United States Patent Application Publication US 2015/0232836 A1 - sequence listing, part 21

SEQ ID NO: 762396 - DNA, 15 bp, Homo sapiens
aaatagacatcaaga

SEQ ID NO: 762397 - DNA, 15 bp, Homo sapiens
aatagacatcaagag

SEQ ID NO: 762398 - DNA, 15 bp, Homo sapiens
atagacatcaagaga

SEQ ID NO: 762399 - DNA, 15 bp, Homo sapiens
tagacatcaagagaa

SEQ ID NO: 762400 - DNA, 15 bp, Homo sapiens
agacatcaagagaat

SEQ ID NO: 762401 - DNA, 15 bp, Homo sapiens
gacatcaagagaatc

SEQ ID NO: 762402 - DNA, 15 bp, Homo sapiens
acatcaagagaatcc

SEQ ID NO: 762403 - DNA, 15 bp, Homo sapiens
catcaagagaatcct

SEQ ID NO: 762404 - DNA, 15 bp, Homo sapiens
atcaagagaatccta

SEQ ID NO: 762405 - DNA, 15 bp, Homo sapiens
tcaagagaatcctaa

SEQ ID NO: 762406 - DNA, 15 bp, Homo sapiens
caagagaatcctaag

SEQ ID NO: 762407 - DNA, 15 bp, Homo sapiens
aagagaatcctaaga

SEQ ID NO: 762408 - DNA, 15 bp, Homo sapiens
agagaatcctaagaa

SEQ ID NO: 762409 - DNA, 15 bp, Homo sapiens
gagaatcctaagaaa

SEQ ID NO: 762410 - DNA, 15 bp, Homo sapiens
agaatcctaagaaac

SEQ ID NO: 762411 - DNA, 15 bp, Homo sapiens
gaatcctaagaaact

SEQ ID NO: 762412 - DNA, 15 bp, Homo sapiens
aatcctaagaaacta

SEQ ID NO: 762413 - DNA, 15 bp, Homo sapiens
atcctaagaaactaa

SEQ ID NO: 762414 - DNA, 15 bp, Homo sapiens
tcctaagaaactaag

SEQ ID NO: 762415 - DNA, 15 bp, Homo sapiens
cctaagaaactaaga

SEQ ID NO: 762416 - DNA, 15 bp, Homo sapiens
ctaagaaactaagaa

SEQ ID NO: 762417 - DNA, 15 bp, Homo sapiens
taagaaactaagaac

SEQ ID NO: 762418 - DNA, 15 bp, Homo sapiens
aagaaactaagaact

SEQ ID NO: 762419 - DNA, 15 bp, Homo sapiens
agaaactaagaactt

SEQ ID NO: 762420 - DNA, 15 bp, Homo sapiens
gaaactaagaacttt

SEQ ID NO: 762421 - DNA, 15 bp, Homo sapiens
aaactaagaacttta

SEQ ID NO: 762422 - DNA, 15 bp, Homo sapiens
aactaagaactttag

SEQ ID NO: 762423 - DNA, 15 bp, Homo sapiens
actaagaactttagt

SEQ ID NO: 762424 - DNA, 15 bp, Homo sapiens
ctaagaactttagtg

SEQ ID NO: 762425 - DNA, 15 bp, Homo sapiens
taagaactttagtgt

SEQ ID NO: 762426 - DNA, 15 bp, Homo sapiens
aagaactttagtgtg

SEQ ID NO: 762427 - DNA, 15 bp, Homo sapiens
agaactttagtgtga

SEQ ID NO: 762428 - DNA, 15 bp, Homo sapiens
gaactttagtgtgaa

SEQ ID NO: 762429 - DNA, 15 bp, Homo sapiens
aactttagtgtgaac

SEQ ID NO: 762430 - DNA, 15 bp, Homo sapiens
actttagtgtgaaca

SEQ ID NO: 762431 - DNA, 15 bp, Homo sapiens
ctttagtgtgaacaa

SEQ ID NO: 762432 - DNA, 15 bp, Homo sapiens
tttagtgtgaacaaa

SEQ ID NO: 762433 - DNA, 15 bp, Homo sapiens
ttagtgtgaacaaag

SEQ ID NO: 762434 - DNA, 15 bp, Homo sapiens
tagtgtgaacaaagg

SEQ ID NO: 762435 - DNA, 15 bp, Homo sapiens
agtgtgaacaaagga

SEQ ID NO: 762436 - DNA, 15 bp, Homo sapiens
gtgtgaacaaaggag

SEQ ID NO: 762437 - DNA, 15 bp, Homo sapiens
tgtgaacaaaggagg

SEQ ID NO: 762438 - DNA, 15 bp, Homo sapiens
gtgaacaaaggaggt

SEQ ID NO: 762439 - DNA, 15 bp, Homo sapiens
tgaacaaaggaggtg

SEQ ID NO: 762440 - DNA, 15 bp, Homo sapiens
gaacaaaggaggtga

SEQ ID NO: 762441 - DNA, 15 bp, Homo sapiens
aacaaaggaggtgac

SEQ ID NO: 762442 - DNA, 15 bp, Homo sapiens
acaaaggaggtgact

SEQ ID NO: 762443 - DNA, 15 bp, Homo sapiens
caaaggaggtgactt

SEQ ID NO: 762444 - DNA, 15 bp, Homo sapiens
aaaggaggtgacttt

SEQ ID NO: 762445 - DNA, 15 bp, Homo sapiens
aaggaggtgacttta

SEQ ID NO: 762446 - DNA, 15 bp, Homo sapiens
aggaggtgactttaa

SEQ ID NO: 762447 - DNA, 15 bp, Homo sapiens
ggaggtgactttaag

SEQ ID NO: 762448 - DNA, 15 bp, Homo sapiens
gaggtgactttaagg

SEQ ID NO: 762449 - DNA, 15 bp, Homo sapiens
aggtgactttaagga

SEQ ID NO: 762450 - DNA, 15 bp, Homo sapiens
ggtgactttaaggaa

SEQ ID NO: 762451 - DNA, 15 bp, Homo sapiens
gtgactttaaggaaa

SEQ ID NO: 762452 - DNA, 15 bp, Homo sapiens
tgactttaaggaaat

SEQ ID NO: 762453 - DNA, 15 bp, Homo sapiens
gactttaaggaaatt

SEQ ID NO: 762454 - DNA, 15 bp, Homo sapiens
actttaaggaaattc

SEQ ID NO: 762455 - DNA, 15 bp, Homo sapiens
ctttaaggaaattca

SEQ ID NO: 762456 - DNA, 15 bp, Homo sapiens
tttaaggaaattcac

SEQ ID NO: 762457 - DNA, 15 bp, Homo sapiens
ttaaggaaattcaca

SEQ ID NO: 762458 - DNA, 15 bp, Homo sapiens
taaggaaattcacat

SEQ ID NO: 762459 - DNA, 15 bp, Homo sapiens
aaggaaattcacatg

SEQ ID NO: 762460 - DNA, 15 bp, Homo sapiens
aggaaattcacatga

SEQ ID NO: 762461 - DNA, 15 bp, Homo sapiens
ggaaattcacatgac

SEQ ID NO: 762462 - DNA, 15 bp, Homo sapiens
gaaattcacatgaca

SEQ ID NO: 762463 - DNA, 15 bp, Homo sapiens
aaattcacatgacac

SEQ ID NO: 762464 - DNA, 15 bp, Homo sapiens
aattcacatgacact

SEQ ID NO: 762465 - DNA, 15 bp, Homo sapiens
attcacatgacactt

SEQ ID NO: 762466 - DNA, 15 bp, Homo sapiens
ttcacatgacacttt

SEQ ID NO: 762467 - DNA, 15 bp, Homo sapiens
tcacatgacactttc

SEQ ID NO: 762468 - DNA, 15 bp, Homo sapiens
cacatgacactttca

SEQ ID NO: 762469 - DNA, 15 bp, Homo sapiens
acatgacactttcaa

SEQ ID NO: 762470 - DNA, 15 bp, Homo sapiens
catgacactttcaaa

SEQ ID NO: 762471 - DNA, 15 bp, Homo sapiens
atgacactttcaaat

SEQ ID NO: 762472 - DNA, 15 bp, Homo sapiens
tgacactttcaaatt

SEQ ID NO: 762473 - DNA, 15 bp, Homo sapiens
gacactttcaaattt

SEQ ID NO: 762474 - DNA, 15 bp, Homo sapiens
acactttcaaattta

SEQ ID NO: 762475 - DNA, 15 bp, Homo sapiens
cactttcaaatttag

SEQ ID NO: 762476 - DNA, 15 bp, Homo sapiens
actttcaaatttagt

SEQ ID NO: 762477 - DNA, 15 bp, Homo sapiens
ctttcaaatttagtt

SEQ ID NO: 762478 - DNA, 15 bp, Homo sapiens
tttcaaatttagttg

SEQ ID NO: 762479 - DNA, 15 bp, Homo sapiens
ttcaaatttagttgt

SEQ ID NO: 762480 - DNA, 15 bp, Homo sapiens
tcaaatttagttgtg

SEQ ID NO: 762481 - DNA, 15 bp, Homo sapiens
caaatttagttgtgt

SEQ ID NO: 762482 - DNA, 15 bp, Homo sapiens
aaatttagttgtgtg

SEQ ID NO: 762483 - DNA, 15 bp, Homo sapiens
aatttagttgtgtgt

SEQ ID NO: 762484 - DNA, 15 bp, Homo sapiens
atttagttgtgtgtg

SEQ ID NO: 762485 - DNA, 15 bp, Homo sapiens
tttagttgtgtgtgc

SEQ ID NO: 762486 - DNA, 15 bp, Homo sapiens
ttagttgtgtgtgct

SEQ ID NO: 762487 - DNA, 15 bp, Homo sapiens
tagttgtgtgtgctg

SEQ ID NO: 762488 - DNA, 15 bp, Homo sapiens
agttgtgtgtgctgt

SEQ ID NO: 762489 - DNA, 15 bp, Homo sapiens
gttgtgtgtgctgta

SEQ ID NO: 762490 - DNA, 15 bp, Homo sapiens
ttgtgtgtgctgtag

SEQ ID NO: 762491 - DNA, 15 bp, Homo sapiens
tgtgtgtgctgtaga

SEQ ID NO: 762492 - DNA, 15 bp, Homo sapiens
gtgtgtgctgtagag

SEQ ID NO: 762493 - DNA, 15 bp, Homo sapiens
tgtgtgctgtagaga

SEQ ID NO: 762494 - DNA, 15 bp, Homo sapiens
gtgtgctgtagagaa

SEQ ID NO: 762495 - DNA, 15 bp, Homo sapiens
tgtgctgtagagaaa

SEQ ID NO: 762496 - DNA, 15 bp, Homo sapiens
gtgctgtagagaaaa

SEQ ID NO: 762497 - DNA, 15 bp, Homo sapiens
tgctgtagagaaaaa

SEQ ID NO: 762498 - DNA, 15 bp, Homo sapiens
gctgtagagaaaaaa

SEQ ID NO: 762499 - DNA, 15 bp, Homo sapiens
ctgtagagaaaaaaa

SEQ ID NO: 762500 - DNA, 15 bp, Homo sapiens
tgtagagaaaaaaat

SEQ ID NO: 762501 - DNA, 15 bp, Homo sapiens
gtagagaaaaaaata

SEQ ID NO: 762502 - DNA, 15 bp, Homo sapiens
tagagaaaaaaatat

SEQ ID NO: 762503 - DNA, 15 bp, Homo sapiens
agagaaaaaaatatg

SEQ ID NO: 762504 - DNA, 15 bp, Homo sapiens
gagaaaaaaatatgg

SEQ ID NO: 762505 - DNA, 15 bp, Homo sapiens
agaaaaaaatatggt

SEQ ID NO: 762506 - DNA, 15 bp, Homo sapiens
gaaaaaaatatggtt

SEQ ID NO: 762507 - DNA, 15 bp, Homo sapiens
aaaaaaatatggttt

SEQ ID NO: 762508 - DNA, 15 bp, Homo sapiens
aaaaaatatggttta

SEQ ID NO: 762509 - DNA, 15 bp, Homo sapiens
aaaaatatggtttaa

SEQ ID NO: 762510 - DNA, 15 bp, Homo sapiens
aaaatatggtttaag

SEQ ID NO: 762511 - DNA, 15 bp, Homo sapiens
aaatatggtttaagt

SEQ ID NO: 762512 - DNA, 15 bp, Homo sapiens
aatatggtttaagtt

SEQ ID NO: 762513 - DNA, 15 bp, Homo sapiens
atatggtttaagttc

SEQ ID NO: 762514 - DNA, 15 bp, Homo sapiens
tatggtttaagttct

SEQ ID NO: 762515 - DNA, 15 bp, Homo sapiens
atggtttaagttctt

SEQ ID NO: 762516 - DNA, 15 bp, Homo sapiens
tggtttaagttctta

SEQ ID NO: 762517 - DNA, 15 bp, Homo sapiens
ggtttaagttcttac

SEQ ID NO: 762518 - DNA, 15 bp, Homo sapiens
gtttaagttcttacc

SEQ ID NO: 762519 - DNA, 15 bp, Homo sapiens
tttaagttcttacca

SEQ ID NO: 762520 - DNA, 15 bp, Homo sapiens
ttaagttcttaccac

SEQ ID NO: 762521 - DNA, 15 bp, Homo sapiens
taagttcttaccaca

SEQ ID NO: 762522 - DNA, 15 bp, Homo sapiens
aagttcttaccacat

SEQ ID NO: 762523 - DNA, 15 bp, Homo sapiens
agttcttaccacatt

SEQ ID NO: 762524 - DNA, 15 bp, Homo sapiens
gttcttaccacatta

SEQ ID NO: 762525 - DNA, 15 bp, Homo sapiens
ttcttaccacattaa

SEQ ID NO: 762526 - DNA, 15 bp, Homo sapiens
tcttaccacattaat

SEQ ID NO: 762527 - DNA, 15 bp, Homo sapiens
cttaccacattaata

SEQ ID NO: 762528 - DNA, 15 bp, Homo sapiens
ttaccacattaataa

SEQ ID NO: 762529 - DNA, 15 bp, Homo sapiens
taccacattaataaa

SEQ ID NO: 762530 - DNA, 15 bp, Homo sapiens
accacattaataaat

SEQ ID NO: 762531 - DNA, 15 bp, Homo sapiens
ccacattaataaata

SEQ ID NO: 762532 - DNA, 15 bp, Homo sapiens
cacattaataaatac

SEQ ID NO: 762533 - DNA, 15 bp, Homo sapiens
acattaataaataca

SEQ ID NO: 762534 - DNA, 15 bp, Homo sapiens
cattaataaatacat

SEQ ID NO: 762535 - DNA, 15 bp, Homo sapiens
attaataaatacatt

SEQ ID NO: 762536 - DNA, 15 bp, Homo sapiens
ttaataaatacatta

SEQ ID NO: 762537 - DNA, 15 bp, Homo sapiens
taataaatacattaa

SEQ ID NO: 762538 - DNA, 15 bp, Homo sapiens
aataaatacattaat

SEQ ID NO: 762539 - DNA, 15 bp, Homo sapiens
ataaatacattaatt

SEQ ID NO: 762540 - DNA, 15 bp, Homo sapiens
taaatacattaatta

SEQ ID NO: 762541 - DNA, 15 bp, Homo sapiens
aaatacattaattaa

SEQ ID NO: 762542 - DNA, 15 bp, Homo sapiens
aatacattaattaaa

SEQ ID NO: 762543 - DNA, 15 bp, Homo sapiens
atacattaattaaat

SEQ ID NO: 762544 - DNA, 15 bp, Homo sapiens
tacattaattaaatt

SEQ ID NO: 762545 - DNA, 15 bp, Homo sapiens
acattaattaaatta

SEQ ID NO: 762546 - DNA, 15 bp, Homo sapiens
cattaattaaattac

SEQ ID NO: 762547 - DNA, 15 bp, Homo sapiens
attaattaaattacc

SEQ ID NO: 762548 - DNA, 15 bp, Homo sapiens
ttaattaaattacct

SEQ ID NO: 762549 - DNA, 15 bp, Homo sapiens
taattaaattacctg

SEQ ID NO: 762550 - DNA, 15 bp, Homo sapiens
aattaaattacctgt

SEQ ID NO: 762551 - DNA, 15 bp, Homo sapiens
attaaattacctgtc

SEQ ID NO: 762552 - DNA, 15 bp, Homo sapiens
ttaaattacctgtct

SEQ ID NO: 762553 - DNA, 15 bp, Homo sapiens
taaattacctgtctg

SEQ ID NO: 762554 - DNA, 15 bp, Homo sapiens
aaattacctgtctga

SEQ ID NO: 762555 - DNA, 15 bp, Homo sapiens
aattacctgtctgat

SEQ ID NO: 762556 - DNA, 15 bp, Homo sapiens
attacctgtctgatg

SEQ ID NO: 762557 - DNA, 15 bp, Homo sapiens
ttacctgtctgatgt

SEQ ID NO: 762558 - DNA, 15 bp, Homo sapiens
tacctgtctgatgtg

SEQ ID NO: 762559 - DNA, 15 bp, Homo sapiens
acctgtctgatgtgg

SEQ ID NO: 762560 - DNA, 15 bp, Homo sapiens
cctgtctgatgtggt

SEQ ID NO: 762561 - DNA, 15 bp, Homo sapiens
ctgtctgatgtggtg

SEQ ID NO: 762562 - DNA, 15 bp, Homo sapiens
tgtctgatgtggtga

SEQ ID NO: 762563 - DNA, 15 bp, Homo sapiens
gtctgatgtggtgag

SEQ ID NO: 762564 - DNA, 15 bp, Homo sapiens
tctgatgtggtgaga

SEQ ID NO: 762565 - DNA, 15 bp, Homo sapiens
ctgatgtggtgagaa

SEQ ID NO: 762566 - DNA, 15 bp, Homo sapiens
tgatgtggtgagaag

SEQ ID NO: 762567 - DNA, 15 bp, Homo sapiens
gatgtggtgagaagc

SEQ ID NO: 762568 - DNA, 15 bp, Homo sapiens
atgtggtgagaagcc

SEQ ID NO: 762569 - DNA, 15 bp, Homo sapiens
tgtggtgagaagccc

SEQ ID NO: 762570 - DNA, 15 bp, Homo sapiens
gtggtgagaagccct

SEQ ID NO: 762571 - DNA, 15 bp, Homo sapiens
tggtgagaagccctt

SEQ ID NO: 762572 - DNA, 15 bp, Homo sapiens
ggtgagaagcccttt

SEQ ID NO: 762573 - DNA, 15 bp, Homo sapiens
gtgagaagccctttt

SEQ ID NO: 762574 - DNA, 15 bp, Homo sapiens
tgagaagcccttttg

SEQ ID NO: 762575 - DNA, 15 bp, Homo sapiens
gagaagcccttttga

SEQ ID NO: 762576 - DNA, 15 bp, Homo sapiens
agaagcccttttgaa

SEQ ID NO: 762577 - DNA, 15 bp, Homo sapiens
gaagcccttttgaat

SEQ ID NO: 762578 - DNA, 15 bp, Homo sapiens
aagcccttttgaatg

SEQ ID NO: 762579 - DNA, 15 bp, Homo sapiens
agcccttttgaatgt

SEQ ID NO: 762580 - DNA, 15 bp, Homo sapiens
gcccttttgaatgtt

SEQ ID NO: 762581 - DNA, 15 bp, Homo sapiens
cccttttgaatgttg

SEQ ID NO: 762582 - DNA, 15 bp, Homo sapiens
ccttttgaatgttgt

SEQ ID NO: 762583 - DNA, 15 bp, Homo sapiens
cttttgaatgttgtc

SEQ ID NO: 762584 - DNA, 15 bp, Homo sapiens
ttttgaatgttgtct

SEQ ID NO: 762585 - DNA, 15 bp, Homo sapiens
tttgaatgttgtctt

SEQ ID NO: 762586 - DNA, 15 bp, Homo sapiens
ttgaatgttgtcttt

SEQ ID NO: 762587 - DNA, 15 bp, Homo sapiens
tgaatgttgtctttc

SEQ ID NO: 762588 - DNA, 15 bp, Homo sapiens
gaatgttgtctttca

SEQ ID NO: 762589 - DNA, 15 bp, Homo sapiens
aatgttgtctttcat

SEQ ID NO: 762590 - DNA, 15 bp, Homo sapiens
atgttgtctttcata

SEQ ID NO: 762591 - DNA, 15 bp, Homo sapiens
tgttgtctttcatag

SEQ ID NO: 762592 - DNA, 15 bp, Homo sapiens
gttgtctttcatagt

SEQ ID NO: 762593 - DNA, 15 bp, Homo sapiens
ttgtctttcatagtg

SEQ ID NO: 762594 - DNA, 15 bp, Homo sapiens
tgtctttcatagtga

SEQ ID NO: 762595 - DNA, 15 bp, Homo sapiens
gtctttcatagtgat

SEQ ID NO: 762596 - DNA, 15 bp, Homo sapiens
tctttcatagtgatt

SEQ ID NO: 762597 - DNA, 15 bp, Homo sapiens
ctttcatagtgattt

SEQ ID NO: 762598 - DNA, 15 bp, Homo sapiens
tttcatagtgatttt

SEQ ID NO: 762599 - DNA, 15 bp, Homo sapiens
ttcatagtgattttt

SEQ ID NO: 762600 - DNA, 15 bp, Homo sapiens
tcatagtgattttta

SEQ ID NO: 762601 - DNA, 15 bp, Homo sapiens
catagtgatttttat

SEQ ID NO: 762602 - DNA, 15 bp, Homo sapiens
atagtgatttttata

SEQ ID NO: 762603 - DNA, 15 bp, Homo sapiens
tagtgatttttataa

SEQ ID NO: 762604 - DNA, 15 bp, Homo sapiens
agtgatttttataaa

SEQ ID NO: 762605 - DNA, 15 bp, Homo sapiens
gtgatttttataaac

SEQ ID NO: 762606 - DNA, 15 bp, Homo sapiens
tgatttttataaaca

SEQ ID NO: 762607 - DNA, 15 bp, Homo sapiens
gatttttataaacat

SEQ ID NO: 762608 - DNA, 15 bp, Homo sapiens
atttttataaacatt

SEQ ID NO: 762609 - DNA, 15 bp, Homo sapiens
tttttataaacattt

SEQ ID NO: 762610 - DNA, 15 bp, Homo sapiens
ttttataaacattta

SEQ ID NO: 762611 - DNA, 15 bp, Homo sapiens
tttataaacatttac

SEQ ID NO: 762612 - DNA, 15 bp, Homo sapiens
ttataaacatttaca

SEQ ID NO: 762613 - DNA, 15 bp, Homo sapiens
tataaacatttacac

SEQ ID NO: 762614 - DNA, 15 bp, Homo sapiens
ataaacatttacaca

SEQ ID NO: 762615 - DNA, 15 bp, Homo sapiens
taaacatttacacat

SEQ ID NO: 762616 - DNA, 15 bp, Homo sapiens
aaacatttacacatt

SEQ ID NO: 762617 - DNA, 15 bp, Homo sapiens
aacatttacacattc

SEQ ID NO: 762618 - DNA, 15 bp, Homo sapiens
acatttacacattca

SEQ ID NO: 762619 - DNA, 15 bp, Homo sapiens
catttacacattcat

SEQ ID NO: 762620 - DNA, 15 bp, Homo sapiens
atttacacattcatt

SEQ ID NO: 762621 - DNA, 15 bp, Homo sapiens
tttacacattcattg

SEQ ID NO: 762622 - DNA, 15 bp, Homo sapiens
ttacacattcattgc

SEQ ID NO: 762623 - DNA, 15 bp, Homo sapiens
tacacattcattgca

SEQ ID NO: 762624 - DNA, 15 bp, Homo sapiens
acacattcattgcaa

SEQ ID NO: 762625 - DNA, 15 bp, Homo sapiens
cacattcattgcaaa

SEQ ID NO: 762626 - DNA, 15 bp, Homo sapiens
acattcattgcaaag

SEQ ID NO: 762627 - DNA, 15 bp, Homo sapiens
cattcattgcaaaga

SEQ ID NO: 762628 - DNA, 15 bp, Homo sapiens
attcattgcaaagat

SEQ ID NO: 762629 - DNA, 15 bp, Homo sapiens
ttcattgcaaagata

SEQ ID NO: 762630 - DNA, 15 bp, Homo sapiens
tcattgcaaagatag

SEQ ID NO: 762631 - DNA, 15 bp, Homo sapiens
cattgcaaagatagc

SEQ ID NO: 762632 - DNA, 15 bp, Homo sapiens
attgcaaagatagct

SEQ ID NO: 762633 - DNA, 15 bp, Homo sapiens
ttgcaaagatagcta

SEQ ID NO: 762634 - DNA, 15 bp, Homo sapiens
tgcaaagatagctat

SEQ ID NO: 762635 - DNA, 15 bp, Homo sapiens
gcaaagatagctata

SEQ ID NO: 762636 - DNA, 15 bp, Homo sapiens
caaagatagctatat

SEQ ID NO: 762637 - DNA, 15 bp, Homo sapiens
aaagatagctatatt

SEQ ID NO: 762638 - DNA, 15 bp, Homo sapiens
aagatagctatattt

SEQ ID NO: 762639 - DNA, 15 bp, Homo sapiens
agatagctatattta

SEQ ID NO: 762640 - DNA, 15 bp, Homo sapiens
gatagctatatttaa

SEQ ID NO: 762641 - DNA, 15 bp, Homo sapiens
atagctatatttaat

SEQ ID NO: 762642 - DNA, 15 bp, Homo sapiens
tagctatatttaatc

SEQ ID NO: 762643 - DNA, 15 bp, Homo sapiens
agctatatttaatct

SEQ ID NO: 762644 - DNA, 15 bp, Homo sapiens
gctatatttaatcta

SEQ ID NO: 762645 - DNA, 15 bp, Homo sapiens
ctatatttaatctat

SEQ ID NO: 762646 - DNA, 15 bp, Homo sapiens
tatatttaatctatt

SEQ ID NO: 762647 - DNA, 15 bp, Homo sapiens
atatttaatctatta

SEQ ID NO: 762648 - DNA, 15 bp, Homo sapiens
tatttaatctattaa

SEQ ID NO: 762649 - DNA, 15 bp, Homo sapiens
atttaatctattaaa

SEQ ID NO: 762650 - DNA, 15 bp, Homo sapiens
tttaatctattaaac

SEQ ID NO: 762651 - DNA, 15 bp, Homo sapiens
ttaatctattaaact

SEQ ID NO: 762652 - DNA, 15 bp, Homo sapiens
taatctattaaactt

SEQ ID NO: 762653 - DNA, 15 bp, Homo sapiens
aatctattaaacttt

SEQ ID NO: 762654 - DNA, 15 bp, Homo sapiens
atctattaaactttg

SEQ ID NO: 762655 - DNA, 15 bp, Homo sapiens
tctattaaactttga

SEQ ID NO: 762656 - DNA, 15 bp, Homo sapiens
ctattaaactttgaa

SEQ ID NO: 762657 - DNA, 15 bp, Homo sapiens
tattaaactttgaag

SEQ ID NO: 762658 - DNA, 15 bp, Homo sapiens
attaaactttgaaga

SEQ ID NO: 762659 - DNA, 15 bp, Homo sapiens
ttaaactttgaagag

SEQ ID NO: 762660 - DNA, 15 bp, Homo sapiens
taaactttgaagaga

SEQ ID NO: 762661 - DNA, 15 bp, Homo sapiens
aaactttgaagagaa

SEQ ID NO: 762662 - DNA, 15 bp, Homo sapiens
aactttgaagagaac

SEQ ID NO: 762663 - DNA, 15 bp, Homo sapiens
actttgaagagaaca

SEQ ID NO: 762664 - DNA, 15 bp, Homo sapiens
ctttgaagagaacaa

SEQ ID NO: 762665 - DNA, 15 bp, Homo sapiens
tttgaagagaacaac

SEQ ID NO: 762666 - DNA, 15 bp, Homo sapiens
ttgaagagaacaact

SEQ ID NO: 762667 - DNA, 15 bp, Homo sapiens
tgaagagaacaactc

SEQ ID NO: 762668 - DNA, 15 bp, Homo sapiens
gaagagaacaactca

SEQ ID NO: 762669 - DNA, 15 bp, Homo sapiens
aagagaacaactcat

SEQ ID NO: 762670 - DNA, 15 bp, Homo sapiens
agagaacaactcatg

SEQ ID NO: 762671 - DNA, 15 bp, Homo sapiens
gagaacaactcatgt

SEQ ID NO: 762672 - DNA, 15 bp, Homo sapiens
agaacaactcatgtt

SEQ ID NO: 762673 - DNA, 15 bp, Homo sapiens
gaacaactcatgttt

SEQ ID NO: 762674 - DNA, 15 bp, Homo sapiens
aacaactcatgtttt

SEQ ID NO: 762675 - DNA, 15 bp, Homo sapiens
acaactcatgttttc

SEQ ID NO: 762676 - DNA, 15 bp, Homo sapiens
caactcatgttttca

SEQ ID NO: 762677 - DNA, 15 bp, Homo sapiens
aactcatgttttcag

SEQ ID NO: 762678 - DNA, 15 bp, Homo sapiens
actcatgttttcagt

SEQ ID NO: 762679 - DNA, 15 bp, Homo sapiens
ctcatgttttcagtt

SEQ ID NO: 762680 - DNA, 15 bp, Homo sapiens
tcatgttttcagttc

SEQ ID NO: 762681 - DNA, 15 bp, Homo sapiens
catgttttcagttca

SEQ ID NO: 762682 - DNA, 15 bp, Homo sapiens
atgttttcagttcat

SEQ ID NO: 762683 - DNA, 15 bp, Homo sapiens
tgttttcagttcatg

SEQ ID NO: 762684 - DNA, 15 bp, Homo sapiens
gttttcagttcatgg

SEQ ID NO: 762685 - DNA, 15 bp, Homo sapiens
ttttcagttcatggc

SEQ ID NO: 762686 - DNA, 15 bp, Homo sapiens
tttcagttcatggca

SEQ ID NO: 762687 - DNA, 15 bp, Homo sapiens
ttcagttcatggcag

SEQ ID NO: 762688 - DNA, 15 bp, Homo sapiens
tcagttcatggcaga

SEQ ID NO: 762689 - DNA, 15 bp, Homo sapiens
cagttcatggcagag

SEQ ID NO: 762690 - DNA, 15 bp, Homo sapiens
agttcatggcagagt

SEQ ID NO: 762691 - DNA, 15 bp, Homo sapiens
gttcatggcagagtg

SEQ ID NO: 762692 - DNA, 15 bp, Homo sapiens
ttcatggcagagtga

SEQ ID NO: 762693 - DNA, 15 bp, Homo sapiens
tcatggcagagtgat

SEQ ID NO: 762694 - DNA, 15 bp, Homo sapiens
catggcagagtgatt

SEQ ID NO: 762695 - DNA, 15 bp, Homo sapiens
atggcagagtgattt

SEQ ID NO: 762696 - DNA, 15 bp, Homo sapiens
tggcagagtgatttt

SEQ ID NO: 762697 - DNA, 15 bp, Homo sapiens
ggcagagtgattttt

SEQ ID NO: 762698 - DNA, 15 bp, Homo sapiens
gcagagtgatttttt

SEQ ID NO: 762699 - DNA, 15 bp, Homo sapiens
cagagtgattttttt

SEQ ID NO: 762700 - DNA, 15 bp, Homo sapiens
agagtgatttttttg

SEQ ID NO: 762701 - DNA, 15 bp, Homo sapiens
gagtgatttttttgt

SEQ ID NO: 762702 - DNA, 15 bp, Homo sapiens
agtgatttttttgta

SEQ ID NO: 762703 - DNA, 15 bp, Homo sapiens
gtgatttttttgtat

SEQ ID NO: 762704 - DNA, 15 bp, Homo sapiens
tgatttttttgtatt

SEQ ID NO: 762705 - DNA, 15 bp, Homo sapiens
gatttttttgtatta

SEQ ID NO: 762706 - DNA, 15 bp, Homo sapiens
atttttttgtattag

SEQ ID NO: 762707 - DNA, 15 bp, Homo sapiens
tttttttgtattaga

SEQ ID NO: 762708 - DNA, 15 bp, Homo sapiens
ttttttgtattagaa

SEQ ID NO: 762709 - DNA, 15 bp, Homo sapiens
tttttgtattagaaa

SEQ ID NO: 762710 - DNA, 15 bp, Homo sapiens
ttttgtattagaaaa

SEQ ID NO: 762711 - DNA, 15 bp, Homo sapiens
tttgtattagaaaag

SEQ ID NO: 762712 - DNA, 15 bp, Homo sapiens
ttgtattagaaaaga

SEQ ID NO: 762713 - DNA, 15 bp, Homo sapiens
tgtattagaaaagag

SEQ ID NO: 762714 - DNA, 15 bp, Homo sapiens
gtattagaaaagagc

SEQ ID NO: 762715 - DNA, 15 bp, Homo sapiens
tattagaaaagagca

SEQ ID NO: 762716 - DNA, 15 bp, Homo sapiens
attagaaaagagcat

SEQ ID NO: 762717 - DNA, 15 bp, Homo sapiens
ttagaaaagagcatt

SEQ ID NO: 762718 - DNA, 15 bp, Homo sapiens
tagaaaagagcattt

SEQ ID NO: 762719 - DNA, 15 bp, Homo sapiens
agaaaagagcattta

SEQ ID NO: 762720 - DNA, 15 bp, Homo sapiens
gaaaagagcatttat

SEQ ID NO: 762721 - DNA, 15 bp, Homo sapiens
aaaagagcatttatt

SEQ ID NO: 762722 - DNA, 15 bp, Homo sapiens
aaagagcatttattt

SEQ ID NO: 762723 - DNA, 15 bp, Homo sapiens
aagagcatttatttt

SEQ ID NO: 762724 - DNA, 15 bp, Homo sapiens
agagcatttattttg

SEQ ID NO: 762725 - DNA, 15 bp, Homo sapiens
gagcatttattttgc

SEQ ID NO: 762726 - DNA, 15 bp, Homo sapiens
agcatttattttgct

SEQ ID NO: 762727 - DNA, 15 bp, Homo sapiens
gcatttattttgctt

SEQ ID NO: 762728 - DNA, 15 bp, Homo sapiens
catttattttgcttt

SEQ ID NO: 762729 - DNA, 15 bp, Homo sapiens
atttattttgctttc

SEQ ID NO: 762730 - DNA, 15 bp, Homo sapiens
tttattttgctttca

SEQ ID NO: 762731 - DNA, 15 bp, Homo sapiens
ttattttgctttcag

SEQ ID NO: 762732 - DNA, 15 bp, Homo sapiens
tattttgctttcagc

SEQ ID NO: 762733 - DNA, 15 bp, Homo sapiens
attttgctttcagca

SEQ ID NO: 762734 - DNA, 15 bp, Homo sapiens
ttttgctttcagcac

SEQ ID NO: 762735 - DNA, 15 bp, Homo sapiens
tttgctttcagcaca

SEQ ID NO: 762736 - DNA, 15 bp, Homo sapiens
ttgctttcagcacaa

SEQ ID NO: 762737 - DNA, 15 bp, Homo sapiens
tgctttcagcacaat

SEQ ID NO: 762738 - DNA, 15 bp, Homo sapiens
gctttcagcacaatc

SEQ ID NO: 762739 - DNA, 15 bp, Homo sapiens
ctttcagcacaatca

SEQ ID NO: 762740 - DNA, 15 bp, Homo sapiens
tttcagcacaatcac

SEQ ID NO: 762741 - DNA, 15 bp, Homo sapiens
ttcagcacaatcact

SEQ ID NO: 762742 - DNA, 15 bp, Homo sapiens
tcagcacaatcactt

SEQ ID NO: 762743 - DNA, 15 bp, Homo sapiens
cagcacaatcacttt

SEQ ID NO: 762744 - DNA, 15 bp, Homo sapiens
agcacaatcactttt

SEQ ID NO: 762745 - DNA, 15 bp, Homo sapiens
gcacaatcacttttg

SEQ ID NO: 762746 - DNA, 15 bp, Homo sapiens
cacaatcacttttgt

SEQ ID NO: 762747 - DNA, 15 bp, Homo sapiens
acaatcacttttgta

SEQ ID NO: 762748 - DNA, 15 bp, Homo sapiens
caatcacttttgtac

SEQ ID NO: 762749 - DNA, 15 bp, Homo sapiens
aatcacttttgtact

SEQ ID NO: 762750 - DNA, 15 bp, Homo sapiens
atcacttttgtacta

SEQ ID NO: 762751 - DNA, 15 bp, Homo sapiens
tcacttttgtactaa

SEQ ID NO: 762752 - DNA, 15 bp, Homo sapiens
cacttttgtactaat

SEQ ID NO: 762753 - DNA, 15 bp, Homo sapiens
acttttgtactaatg

SEQ ID NO: 762754 - DNA, 15 bp, Homo sapiens
cttttgtactaatgg

SEQ ID NO: 762755 - DNA, 15 bp, Homo sapiens
ttttgtactaatggc

SEQ ID NO: 762756 - DNA, 15 bp, Homo sapiens
tttgtactaatggca

SEQ ID NO: 762757 - DNA, 15 bp, Homo sapiens
ttgtactaatggcat

SEQ ID NO: 762758 - DNA, 15 bp, Homo sapiens
tgtactaatggcatc

SEQ ID NO: 762759 - DNA, 15 bp, Homo sapiens
gtactaatggcatca

SEQ ID NO: 762760 - DNA, 15 bp, Homo sapiens
tactaatggcatcat

SEQ ID NO: 762761 - DNA, 15 bp, Homo sapiens
actaatggcatcatt

SEQ ID NO: 762762 - DNA, 15 bp, Homo sapiens
ctaatggcatcatta

SEQ ID NO: 762763 - DNA, 15 bp, Homo sapiens
taatggcatcattat

SEQ ID NO: 762764 - DNA, 15 bp, Homo sapiens
aatggcatcattata

SEQ ID NO: 762765 - DNA, 15 bp, Homo sapiens
atggcatcattatag

SEQ ID NO: 762766 - DNA, 15 bp, Homo sapiens
tggcatcattatagc

SEQ ID NO: 762767 - DNA, 15 bp, Homo sapiens
ggcatcattatagca

SEQ ID NO: 762768 - DNA, 15 bp, Homo sapiens
gcatcattatagcac

SEQ ID NO: 762769 - DNA, 15 bp, Homo sapiens
catcattatagcact

SEQ ID NO: 762770 - DNA, 15 bp, Homo sapiens
atcattatagcactg

SEQ ID NO: 762771 - DNA, 15 bp, Homo sapiens
tcattatagcactga

SEQ ID NO: 762772 - DNA, 15 bp, Homo sapiens
cattatagcactgaa

SEQ ID NO: 762773 - DNA, 15 bp, Homo sapiens
attatagcactgaag

SEQ ID NO: 762774 - DNA, 15 bp, Homo sapiens
ttatagcactgaagg

SEQ ID NO: 762775 - DNA, 15 bp, Homo sapiens
tatagcactgaaggg

SEQ ID NO: 762776 - DNA, 15 bp, Homo sapiens
atagcactgaagggg

SEQ ID NO: 762777 - DNA, 15 bp, Homo sapiens
tagcactgaagggga

SEQ ID NO: 762778 - DNA, 15 bp, Homo sapiens
agcactgaaggggat

SEQ ID NO: 762779 - DNA, 15 bp, Homo sapiens
gcactgaaggggata

SEQ ID NO: 762780 - DNA, 15 bp, Homo sapiens
cactgaaggggatat

SEQ ID NO: 762781 - DNA, 15 bp, Homo sapiens
actgaaggggatatc

SEQ ID NO: 762782 - DNA, 15 bp, Homo sapiens
ctgaaggggatatct

SEQ ID NO: 762783 - DNA, 15 bp, Homo sapiens
tgaaggggatatctt

SEQ ID NO: 762784 - DNA, 15 bp, Homo sapiens
gaaggggatatcttt

SEQ ID NO: 762785 - DNA, 15 bp, Homo sapiens
aaggggatatctttc

SEQ ID NO: 762786 - DNA, 15 bp, Homo sapiens
aggggatatctttca

SEQ ID NO: 762787 - DNA, 15 bp, Homo sapiens
ggggatatctttcaa

SEQ ID NO: 762788 - DNA, 15 bp, Homo sapiens
gggatatctttcaaa

SEQ ID NO: 762789 - DNA, 15 bp, Homo sapiens
ggatatctttcaaaa

SEQ ID NO: 762790 - DNA, 15 bp, Homo sapiens
gatatctttcaaaac

SEQ ID NO: 762791 - DNA, 15 bp, Homo sapiens
atatctttcaaaact

SEQ ID NO: 762792 - DNA, 15 bp, Homo sapiens
tatctttcaaaactg

SEQ ID NO: 762793 - DNA, 15 bp, Homo sapiens
atctttcaaaactga

SEQ ID NO: 762794 - DNA, 15 bp, Homo sapiens
tctttcaaaactgat

SEQ ID NO: 762795 - DNA, 15 bp, Homo sapiens
ctttcaaaactgata

SEQ ID NO: 762796 - DNA, 15 bp, Homo sapiens
tttcaaaactgatat

SEQ ID NO: 762797 - DNA, 15 bp, Homo sapiens
ttcaaaactgatatt

SEQ ID NO: 762798 - DNA, 15 bp, Homo sapiens
tcaaaactgatattt

SEQ ID NO: 762799 - DNA, 15 bp, Homo sapiens
caaaactgatatttg

SEQ ID NO: 762800 - DNA, 15 bp, Homo sapiens
aaaactgatatttga

SEQ ID NO: 762801 - DNA, 15 bp, Homo sapiens
aaactgatatttgat

SEQ ID NO: 762802 - DNA, 15 bp, Homo sapiens
aactgatatttgatg

SEQ ID NO: 762803 - DNA, 15 bp, Homo sapiens
actgatatttgatga

SEQ ID NO: 762804 - DNA, 15 bp, Homo sapiens
ctgatatttgatgat

SEQ ID NO: 762805 - DNA, 15 bp, Homo sapiens
tgatatttgatgatt

SEQ ID NO: 762806 - DNA, 15 bp, Homo sapiens
gatatttgatgattc

SEQ ID NO: 762807 - DNA, 15 bp, Homo sapiens
atatttgatgattca

SEQ ID NO: 762808 - DNA, 15 bp, Homo sapiens
tatttgatgattcaa

SEQ ID NO: 762809 - DNA, 15 bp, Homo sapiens
atttgatgattcaag

SEQ ID NO: 762810 - DNA, 15 bp, Homo sapiens
tttgatgattcaaga

SEQ ID NO: 762811 - DNA, 15 bp, Homo sapiens
ttgatgattcaagaa

SEQ ID NO: 762812 - DNA, 15 bp, Homo sapiens
tgatgattcaagaac

SEQ ID NO: 762813 - DNA, 15 bp, Homo sapiens
gatgattcaagaaca

SEQ ID NO: 762814 - DNA, 15 bp, Homo sapiens
atgattcaagaacag

SEQ ID NO: 762815 - DNA, 15 bp, Homo sapiens
tgattcaagaacaga

SEQ ID NO: 762816 - DNA, 15 bp, Homo sapiens
gattcaagaacagat

SEQ ID NO: 762817 - DNA, 15 bp, Homo sapiens
attcaagaacagatt

SEQ ID NO: 762818 - DNA, 15 bp, Homo sapiens
ttcaagaacagattt

SEQ ID NO: 762819 - DNA, 15 bp, Homo sapiens
tcaagaacagattta

SEQ ID NO: 762820 - DNA, 15 bp, Homo sapiens
caagaacagatttat

SEQ ID NO: 762821 - DNA, 15 bp, Homo sapiens
aagaacagatttatt

SEQ ID NO: 762822 - DNA, 15 bp, Homo sapiens
agaacagatttatta

SEQ ID NO: 762823 - DNA, 15 bp, Homo sapiens
gaacagatttattat

SEQ ID NO: 762824 - DNA, 15 bp, Homo sapiens
aacagatttattatt

SEQ ID NO: 762825 - DNA, 15 bp, Homo sapiens
acagatttattatta

SEQ ID NO: 762826 - DNA, 15 bp, Homo sapiens
cagatttattattaa

SEQ ID NO: 762827 - DNA, 15 bp, Homo sapiens
agatttattattaaa

SEQ ID NO: 762828 - DNA, 15 bp, Homo sapiens
gatttattattaaaa

SEQ ID NO: 762829 - DNA, 15 bp, Homo sapiens
atttattattaaaat

SEQ ID NO: 762830 - DNA, 15 bp, Homo sapiens
tttattattaaaata

SEQ ID NO: 762831 - DNA, 15 bp, Homo sapiens
ttattattaaaataa

SEQ ID NO: 762832 - DNA, 15 bp, Homo sapiens
tattattaaaataat

SEQ ID NO: 762833 - DNA, 15 bp, Homo sapiens
attattaaaataatt

SEQ ID NO: 762834 - DNA, 15 bp, Homo sapiens
ttattaaaataattt

SEQ ID NO: 762835 - DNA, 15 bp, Homo sapiens
tattaaaataattta

SEQ ID NO: 762836 - DNA, 15 bp, Homo sapiens
attaaaataatttaa

SEQ ID NO: 762837 - DNA, 15 bp, Homo sapiens
ttaaaataatttaag

SEQ ID NO: 762838 - DNA, 15 bp, Homo sapiens
taaaataatttaagg

SEQ ID NO: 762839 - DNA, 15 bp, Homo sapiens
aaaataatttaaggg

SEQ ID NO: 762840 - DNA, 15 bp, Homo sapiens
aaataatttaagggg

SEQ ID NO: 762841 - DNA, 15 bp, Homo sapiens
aataatttaaggggc

SEQ ID NO: 762842 - DNA, 15 bp, Homo sapiens
ataatttaaggggcc

SEQ ID NO: 762843 - DNA, 15 bp, Homo sapiens
taatttaaggggccc

SEQ ID NO: 762844 - DNA, 15 bp, Homo sapiens
aatttaaggggccca

SEQ ID NO: 762845 - DNA, 15 bp, Homo sapiens
atttaaggggcccaa

SEQ ID NO: 762846 - DNA, 15 bp, Homo sapiens
tttaaggggcccaaa

SEQ ID NO: 762847 - DNA, 15 bp, Homo sapiens
ttaaggggcccaaaa

SEQ ID NO: 762848 - DNA, 15 bp, Homo sapiens
taaggggcccaaaac

SEQ ID NO: 762849 - DNA, 15 bp, Homo sapiens
aaggggcccaaaaca

SEQ ID NO: 762850 - DNA, 15 bp, Homo sapiens
aggggcccaaaacac

SEQ ID NO: 762851 - DNA, 15 bp, Homo sapiens
ggggcccaaaacact

SEQ ID NO: 762852 - DNA, 15 bp, Homo sapiens
gggcccaaaacactt

SEQ ID NO: 762853 - DNA, 15 bp, Homo sapiens
ggcccaaaacacttc

SEQ ID NO: 762854 - DNA, 15 bp, Homo sapiens
gcccaaaacacttct

SEQ ID NO: 762855 - DNA, 15 bp, Homo sapiens
cccaaaacacttcta

SEQ ID NO: 762856 - DNA, 15 bp, Homo sapiens
ccaaaacacttctat

SEQ ID NO: 762857 - DNA, 15 bp, Homo sapiens
caaaacacttctatt

SEQ ID NO: 762858 - DNA, 15 bp, Homo sapiens
aaaacacttctatta

SEQ ID NO: 762859 - DNA, 15 bp, Homo sapiens
aaacacttctattaa

SEQ ID NO: 762860 - DNA, 15 bp, Homo sapiens
aacacttctattaag

SEQ ID NO: 762861 - DNA, 15 bp, Homo sapiens
acacttctattaagg

SEQ ID NO: 762862 - DNA, 15 bp, Homo sapiens
cacttctattaaggc

SEQ ID NO: 762863 - DNA, 15 bp, Homo sapiens
acttctattaaggcc

SEQ ID NO: 762864 - DNA, 15 bp, Homo sapiens
cttctattaaggcct

SEQ ID NO: 762865 - DNA, 15 bp, Homo sapiens
ttctattaaggcctt

SEQ ID NO: 762866 - DNA, 15 bp, Homo sapiens
tctattaaggccttt

SEQ ID NO: 762867 - DNA, 15 bp, Homo sapiens
ctattaaggcctttg

SEQ ID NO: 762868 - DNA, 15 bp, Homo sapiens
tattaaggcctttgc

SEQ ID NO: 762869 - DNA, 15 bp, Homo sapiens
attaaggcctttgca

SEQ ID NO: 762870 - DNA, 15 bp, Homo sapiens
ttaaggcctttgcat

SEQ ID NO: 762871 - DNA, 15 bp, Homo sapiens
taaggcctttgcatg

SEQ ID NO: 762872 - DNA, 15 bp, Homo sapiens
aaggcctttgcatga

SEQ ID NO: 762873 - DNA, 15 bp, Homo sapiens
aggcctttgcatgaa

SEQ ID NO: 762874 - DNA, 15 bp, Homo sapiens
ggcctttgcatgaaa

SEQ ID NO: 762875 - DNA, 15 bp, Homo sapiens
gcctttgcatgaaac

SEQ ID NO: 762876 - DNA, 15 bp, Homo sapiens
cctttgcatgaaaca

SEQ ID NO: 762877 - DNA, 15 bp, Homo sapiens
ctttgcatgaaacac

SEQ ID NO: 762878 - DNA, 15 bp, Homo sapiens
tttgcatgaaacact

SEQ ID NO: 762879 - DNA, 15 bp, Homo sapiens
ttgcatgaaacactc

SEQ ID NO: 762880 - DNA, 15 bp, Homo sapiens
tgcatgaaacactct

SEQ ID NO: 762881 - DNA, 15 bp, Homo sapiens
gcatgaaacactctt

SEQ ID NO: 762882 - DNA, 15 bp, Homo sapiens
catgaaacactcttc

SEQ ID NO: 762883 - DNA, 15 bp, Homo sapiens
atgaaacactcttcc

SEQ ID NO: 762884 - DNA, 15 bp, Homo sapiens
tgaaacactcttcct

SEQ ID NO: 762885 - DNA, 15 bp, Homo sapiens
gaaacactcttcctt

SEQ ID NO: 762886 - DNA, 15 bp, Homo sapiens
aaacactcttccttc

SEQ ID NO: 762887 - DNA, 15 bp, Homo sapiens
aacactcttccttcc

SEQ ID NO: 762888 - DNA, 15 bp, Homo sapiens
acactcttccttcca

SEQ ID NO: 762889 - DNA, 15 bp, Homo sapiens
cactcttccttccac

SEQ ID NO: 762890 - DNA, 15 bp, Homo sapiens
actcttccttccacg

SEQ ID NO: 762891 - DNA, 15 bp, Homo sapiens
ctcttccttccacgt

SEQ ID NO: 762892 - DNA, 15 bp, Homo sapiens
tcttccttccacgtg

SEQ ID NO: 762893 - DNA, 15 bp, Homo sapiens
cttccttccacgtgg

SEQ ID NO: 762894 - DNA, 15 bp, Homo sapiens
ttccttccacgtggt

SEQ ID NO: 762895 - DNA, 15 bp, Homo sapiens
tccttccacgtggtt

SEQ ID NO: 762896 - DNA, 15 bp, Homo sapiens
ccttccacgtggttt

SEQ ID NO: 762897 - DNA, 15 bp, Homo sapiens
cttccacgtggtttt

SEQ ID NO: 762898 - DNA, 15 bp, Homo sapiens
ttccacgtggttttc

SEQ ID NO: 762899 - DNA, 15 bp, Homo sapiens
tccacgtggttttca

SEQ ID NO: 762900 - DNA, 15 bp, Homo sapiens
ccacgtggttttcag

SEQ ID NO: 762901 - DNA, 15 bp, Homo sapiens
cacgtggttttcagg

SEQ ID NO: 762902 - DNA, 15 bp, Homo sapiens
acgtggttttcaggc

SEQ ID NO: 762903 - DNA, 15 bp, Homo sapiens
cgtggttttcaggct

SEQ ID NO: 762904 - DNA, 15 bp, Homo sapiens
gtggttttcaggcta

SEQ ID NO: 762905 - DNA, 15 bp, Homo sapiens
tggttttcaggctaa

SEQ ID NO: 762906 - DNA, 15 bp, Homo sapiens
ggttttcaggctaac

SEQ ID NO: 762907 - DNA, 15 bp, Homo sapiens
gttttcaggctaacc

SEQ ID NO: 762908 - DNA, 15 bp, Homo sapiens
ttttcaggctaacca

SEQ ID NO: 762909 - DNA, 15 bp, Homo sapiens
tttcaggctaaccat

SEQ ID NO: 762910 - DNA, 15 bp, Homo sapiens
ttcaggctaaccatg

SEQ ID NO: 762911 - DNA, 15 bp, Homo sapiens
tcaggctaaccatgt

SEQ ID NO: 762912 - DNA, 15 bp, Homo sapiens
caggctaaccatgtg

SEQ ID NO: 762913 - DNA, 15 bp, Homo sapiens
aggctaaccatgtgg

SEQ ID NO: 762914 - DNA, 15 bp, Homo sapiens
ggctaaccatgtggt

SEQ ID NO: 762915 - DNA, 15 bp, Homo sapiens
gctaaccatgtggtt

SEQ ID NO: 762916 - DNA, 15 bp, Homo sapiens
ctaaccatgtggttt

SEQ ID NO: 762917 - DNA, 15 bp, Homo sapiens
taaccatgtggtttt

SEQ ID NO: 762918 - DNA, 15 bp, Homo sapiens
aaccatgtggttttt

SEQ ID NO: 762919 - DNA, 15 bp, Homo sapiens
accatgtggtttttt

SEQ ID NO: 762920 - DNA, 15 bp, Homo sapiens
ccatgtggttttttc

SEQ ID NO: 762921 - DNA, 15 bp, Homo sapiens
catgtggttttttca

SEQ ID NO: 762922 - DNA, 15 bp, Homo sapiens
atgtggttttttcag

SEQ ID NO: 762923 - DNA, 15 bp, Homo sapiens
tgtggttttttcagg

SEQ ID NO: 762924 - DNA, 15 bp, Homo sapiens
gtggttttttcaggt

SEQ ID NO: 762925 - DNA, 15 bp, Homo sapiens
tggttttttcaggtc

SEQ ID NO: 762926 - DNA, 15 bp, Homo sapiens
ggttttttcaggtct

SEQ ID NO: 762927 - DNA, 15 bp, Homo sapiens
gttttttcaggtctt

SEQ ID NO: 762928 - DNA, 15 bp, Homo sapiens
ttttttcaggtcttg

SEQ ID NO: 762929 - DNA, 15 bp, Homo sapiens
tttttcaggtcttgt

SEQ ID NO: 762930 - DNA, 15 bp, Homo sapiens
ttttcaggtcttgtt

SEQ ID NO: 762931 - DNA, 15 bp, Homo sapiens
tttcaggtcttgttg

SEQ ID NO: 762932 - DNA, 15 bp, Homo sapiens
ttcaggtcttgttga

SEQ ID NO: 762933 - DNA, 15 bp, Homo sapiens
tcaggtcttgttgaa

SEQ ID NO: 762934 - DNA, 15 bp, Homo sapiens
caggtcttgttgaaa

SEQ ID NO: 762935 - DNA, 15 bp, Homo sapiens
aggtcttgttgaaat

SEQ ID NO: 762936 - DNA, 15 bp, Homo sapiens
ggtcttgttgaaatg

SEQ ID NO: 762937 - DNA, 15 bp, Homo sapiens
gtcttgttgaaatgt

SEQ ID NO: 762938 - DNA, 15 bp, Homo sapiens
tcttgttgaaatgtc

SEQ ID NO: 762939 - DNA, 15 bp, Homo sapiens
cttgttgaaatgtca

SEQ ID NO: 762940 - DNA, 15 bp, Homo sapiens
ttgttgaaatgtcac

SEQ ID NO: 762941 - DNA, 15 bp, Homo sapiens
tgttgaaatgtcacc

SEQ ID NO: 762942 - DNA, 15 bp, Homo sapiens
gttgaaatgtcacct

SEQ ID NO: 762943 - DNA, 15 bp, Homo sapiens
ttgaaatgtcacctt

SEQ ID NO: 762944 - DNA, 15 bp, Homo sapiens
tgaaatgtcaccttt

SEQ ID NO: 762945 - DNA, 15 bp, Homo sapiens
gaaatgtcacctttt

SEQ ID NO: 762946 - DNA, 15 bp, Homo sapiens
aaatgtcaccttttt

SEQ ID NO: 762947 - DNA, 15 bp, Homo sapiens
aatgtcaccttttta

SEQ ID NO: 762948 - DNA, 15 bp, Homo sapiens
atgtcacctttttag

SEQ ID NO: 762949 - DNA, 15 bp, Homo sapiens
tgtcacctttttaga

SEQ ID NO: 762950 - DNA, 15 bp, Homo sapiens
gtcacctttttagag

SEQ ID NO: 762951 - DNA, 15 bp, Homo sapiens
tcacctttttagagt

SEQ ID NO: 762952 - DNA, 15 bp, Homo sapiens
cacctttttagagtg

SEQ ID NO: 762953 - DNA, 15 bp, Homo sapiens
acctttttagagtgg

SEQ ID NO: 762954 - DNA, 15 bp, Homo sapiens
cctttttagagtggc

SEQ ID NO: 762955 - DNA, 15 bp, Homo sapiens
ctttttagagtggcc

SEQ ID NO: 762956 - DNA, 15 bp, Homo sapiens
tttttagagtggcct

SEQ ID NO: 762957 - DNA, 15 bp, Homo sapiens
ttttagagtggcctt

SEQ ID NO: 762958 - DNA, 15 bp, Homo sapiens
tttagagtggccttt

SEQ ID NO: 762959 - DNA, 15 bp, Homo sapiens
ttagagtggcctttc

SEQ ID NO: 762960 - DNA, 15 bp, Homo sapiens
tagagtggcctttcc

SEQ ID NO: 762961 - DNA, 15 bp, Homo sapiens
agagtggcctttcct

SEQ ID NO: 762962 - DNA, 15 bp, Homo sapiens
gagtggcctttcctg

SEQ ID NO: 762963 - DNA, 15 bp, Homo sapiens
agtggcctttcctga

SEQ ID NO: 762964 - DNA, 15 bp, Homo sapiens
gtggcctttcctgat

SEQ ID NO: 762965 - DNA, 15 bp, Homo sapiens
tggcctttcctgata

SEQ ID NO: 762966 - DNA, 15 bp, Homo sapiens
ggcctttcctgataa

SEQ ID NO: 762967 - DNA, 15 bp, Homo sapiens
gcctttcctgataat

SEQ ID NO: 762968 - DNA, 15 bp, Homo sapiens
cctttcctgataatt

SEQ ID NO: 762969 - DNA, 15 bp, Homo sapiens
ctttcctgataattt

SEQ ID NO: 762970 - DNA, 15 bp, Homo sapiens
tttcctgataatttt

SEQ ID NO: 762971 - DNA, 15 bp, Homo sapiens
ttcctgataatttta

SEQ ID NO: 762972 - DNA, 15 bp, Homo sapiens
tcctgataattttac

SEQ ID NO: 762973 - DNA, 15 bp, Homo sapiens
cctgataattttacc

SEQ ID NO: 762974 - DNA, 15 bp, Homo sapiens
ctgataattttacct

SEQ ID NO: 762975 - DNA, 15 bp, Homo sapiens
tgataattttaccta

SEQ ID NO: 762976 - DNA, 15 bp, Homo sapiens
gataattttacctaa

SEQ ID NO: 762977 - DNA, 15 bp, Homo sapiens
ataattttacctaaa

SEQ ID NO: 762978 - DNA, 15 bp, Homo sapiens
taattttacctaaaa

SEQ ID NO: 762979 - DNA, 15 bp, Homo sapiens
aattttacctaaaat

SEQ ID NO: 762980 - DNA, 15 bp, Homo sapiens
attttacctaaaata

SEQ ID NO: 762981 - DNA, 15 bp, Homo sapiens
ttttacctaaaataa

SEQ ID NO: 762982 - DNA, 15 bp, Homo sapiens
tttacctaaaataac

SEQ ID NO: 762983 - DNA, 15 bp, Homo sapiens
ttacctaaaataacc

SEQ ID NO: 762984 - DNA, 15 bp, Homo sapiens
tacctaaaataacct

SEQ ID NO: 762985 - DNA, 15 bp, Homo sapiens
acctaaaataacctt

SEQ ID NO: 762986 - DNA, 15 bp, Homo sapiens
cctaaaataaccttc

SEQ ID NO: 762987 - DNA, 15 bp, Homo sapiens
ctaaaataaccttct

SEQ ID NO: 762988 - DNA, 15 bp, Homo sapiens
taaaataaccttctc

SEQ ID NO: 762989 - DNA, 15 bp, Homo sapiens
aaaataaccttctca

SEQ ID NO: 762990 - DNA, 15 bp, Homo sapiens
aaataaccttctcat

SEQ ID NO: 762991 - DNA, 15 bp, Homo sapiens
aataaccttctcatg

SEQ ID NO: 762992 - DNA, 15 bp, Homo sapiens
ataaccttctcatgc

SEQ ID NO: 762993 - DNA, 15 bp, Homo sapiens
taaccttctcatgca

SEQ ID NO: 762994 - DNA, 15 bp, Homo sapiens
aaccttctcatgcaa

SEQ ID NO: 762995 - DNA, 15 bp, Homo sapiens
accttctcatgcaat

SEQ ID NO: 762996 - DNA, 15 bp, Homo sapiens
ccttctcatgcaatt

SEQ ID NO: 762997 - DNA, 15 bp, Homo sapiens
cttctcatgcaatta

SEQ ID NO: 762998 - DNA, 15 bp, Homo sapiens
ttctcatgcaattac

SEQ ID NO: 762999 - DNA, 15 bp, Homo sapiens
tctcatgcaattact

SEQ ID NO: 763000 - DNA, 15 bp, Homo sapiens
ctcatgcaattactc

SEQ ID NO: 763001 - DNA, 15 bp, Homo sapiens
tcatgcaattactcc

SEQ ID NO: 763002 - DNA, 15 bp, Homo sapiens
catgcaattactcct

SEQ ID NO: 763003 - DNA, 15 bp, Homo sapiens
atgcaattactcctt

SEQ ID NO: 763004 - DNA, 15 bp, Homo sapiens
tgcaattactcctta

SEQ ID NO: 763005 - DNA, 15 bp, Homo sapiens
gcaattactccttat

SEQ ID NO: 763006 - DNA, 15 bp, Homo sapiens
caattactccttatc

SEQ ID NO: 763007 - DNA, 15 bp, Homo sapiens
aattactccttatcc

SEQ ID NO: 763008 - DNA, 15 bp, Homo sapiens
attactccttatcct

SEQ ID NO: 763009 - DNA, 15 bp, Homo sapiens
ttactccttatcctc

SEQ ID NO: 763010 - DNA, 15 bp, Homo sapiens
tactccttatcctct

SEQ ID NO: 763011 - DNA, 15 bp, Homo sapiens
actccttatcctcta

SEQ ID NO: 763012 - DNA, 15 bp, Homo sapiens
ctccttatcctctaa

SEQ ID NO: 763013 - DNA, 15 bp, Homo sapiens
tccttatcctctaat

SEQ ID NO: 763014 - DNA, 15 bp, Homo sapiens
ccttatcctctaatt

SEQ ID NO: 763015 - DNA, 15 bp, Homo sapiens
cttatcctctaattc

SEQ ID NO: 763016 - DNA, 15 bp, Homo sapiens
ttatcctctaattcc

SEQ ID NO: 763017 - DNA, 15 bp, Homo sapiens
tatcctctaattcct

SEQ ID NO: 763018 - DNA, 15 bp, Homo sapiens
atcctctaattcctc

SEQ ID NO: 763019 - DNA, 15 bp, Homo sapiens
tcctctaattcctct

SEQ ID NO: 763020 - DNA, 15 bp, Homo sapiens
cctctaattcctctt

SEQ ID NO: 763021 - DNA, 15 bp, Homo sapiens
ctctaattcctcttt

SEQ ID NO: 763022 - DNA, 15 bp, Homo sapiens
tctaattcctcttta

SEQ ID NO: 763023 - DNA, 15 bp, Homo sapiens
ctaattcctctttat

SEQ ID NO: 763024 - DNA, 15 bp, Homo sapiens
taattcctctttatc

SEQ ID NO: 763025 - DNA, 15 bp, Homo sapiens
aattcctctttatct

SEQ ID NO: 763026 - DNA, 15 bp, Homo sapiens
attcctctttatctt

SEQ ID NO: 763027 - DNA, 15 bp, Homo sapiens
ttcctctttatcttt

SEQ ID NO: 763028 - DNA, 15 bp, Homo sapiens
tcctctttatctttg

SEQ ID NO: 763029 - DNA, 15 bp, Homo sapiens
cctctttatctttgt

SEQ ID NO: 763030 - DNA, 15 bp, Homo sapiens
ctctttatctttgtt

SEQ ID NO: 763031 - DNA, 15 bp, Homo sapiens
tctttatctttgttc

SEQ ID NO: 763032 - DNA, 15 bp, Homo sapiens
ctttatctttgttca

SEQ ID NO: 763033 - DNA, 15 bp, Homo sapiens
tttatctttgttcat

SEQ ID NO: 763034 - DNA, 15 bp, Homo sapiens
ttatctttgttcatc

SEQ ID NO: 763035 - DNA, 15 bp, Homo sapiens
tatctttgttcatca

SEQ ID NO: 763036 - DNA, 15 bp, Homo sapiens
atctttgttcatcac

SEQ ID NO: 763037 - DNA, 15 bp, Homo sapiens
tctttgttcatcaca

SEQ ID NO: 763038 - DNA, 15 bp, Homo sapiens
ctttgttcatcacat

SEQ ID NO: 763039 - DNA, 15 bp, Homo sapiens
tttgttcatcacata

SEQ ID NO: 763040 - DNA, 15 bp, Homo sapiens
ttgttcatcacatat

SEQ ID NO: 763041 - DNA, 15 bp, Homo sapiens
tgttcatcacatata

SEQ ID NO: 763042 - DNA, 15 bp, Homo sapiens
gttcatcacatatac

SEQ ID NO: 763043 - DNA, 15 bp, Homo sapiens
ttcatcacatatacc

SEQ ID NO: 763044 - DNA, 15 bp, Homo sapiens
tcatcacatatacca

SEQ ID NO: 763045 - DNA, 15 bp, Homo sapiens
catcacatataccat

SEQ ID NO: 763046 - DNA, 15 bp, Homo sapiens
atcacatataccatc

SEQ ID NO: 763047 - DNA, 15 bp, Homo sapiens
tcacatataccatca

SEQ ID NO: 763048 - DNA, 15 bp, Homo sapiens
cacatataccatcac

SEQ ID NO: 763049 - DNA, 15 bp, Homo sapiens
acatataccatcact

SEQ ID NO: 763050 - DNA, 15 bp, Homo sapiens
catataccatcactt

SEQ ID NO: 763051 - DNA, 15 bp, Homo sapiens
atataccatcacttg

SEQ ID NO: 763052 - DNA, 15 bp, Homo sapiens
tataccatcacttga

SEQ ID NO: 763053 - DNA, 15 bp, Homo sapiens
ataccatcacttgac

SEQ ID NO: 763054 - DNA, 15 bp, Homo sapiens
taccatcacttgaca

SEQ ID NO: 763055 - DNA, 15 bp, Homo sapiens
accatcacttgacac

SEQ ID NO: 763056 - DNA, 15 bp, Homo sapiens
ccatcacttgacacg

SEQ ID NO: 763057 - DNA, 15 bp, Homo sapiens
catcacttgacacgt

SEQ ID NO: 763058 - DNA, 15 bp, Homo sapiens
atcacttgacacgtc

SEQ ID NO: 763059 - DNA, 15 bp, Homo sapiens
tcacttgacacgtca

SEQ ID NO: 763060 - DNA, 15 bp, Homo sapiens
cacttgacacgtcac

SEQ ID NO: 763061 - DNA, 15 bp, Homo sapiens
acttgacacgtcacg

SEQ ID NO: 763062 - DNA, 15 bp, Homo sapiens
cttgacacgtcacgt

SEQ ID NO: 763063 - DNA, 15 bp, Homo sapiens
ttgacacgtcacgtg

SEQ ID NO: 763064 - DNA, 15 bp, Homo sapiens
tgacacgtcacgtgt

SEQ ID NO: 763065 - DNA, 15 bp, Homo sapiens
gacacgtcacgtgtt

SEQ ID NO: 763066 - DNA, 15 bp, Homo sapiens
acacgtcacgtgttt

SEQ ID NO: 763067 - DNA, 15 bp, Homo sapiens
cacgtcacgtgtttg

SEQ ID NO: 763068 - DNA, 15 bp, Homo sapiens
acgtcacgtgtttgt

SEQ ID NO: 763069 - DNA, 15 bp, Homo sapiens
cgtcacgtgtttgtt

SEQ ID NO: 763070 - DNA, 15 bp, Homo sapiens
gtcacgtgtttgttt

SEQ ID NO: 763071 - DNA, 15 bp, Homo sapiens
tcacgtgtttgtttc

SEQ ID NO: 763072 - DNA, 15 bp, Homo sapiens
cacgtgtttgtttct

SEQ ID NO: 763073 - DNA, 15 bp, Homo sapiens
acgtgtttgtttctc

SEQ ID NO: 763074 - DNA, 15 bp, Homo sapiens
cgtgtttgtttctct

SEQ ID NO: 763075 - DNA, 15 bp, Homo sapiens
gtgtttgtttctctg

SEQ ID NO: 763076 - DNA, 15 bp, Homo sapiens
tgtttgtttctctgt

SEQ ID NO: 763077 - DNA, 15 bp, Homo sapiens
gtttgtttctctgtc

SEQ ID NO: 763078 - DNA, 15 bp, Homo sapiens
tttgtttctctgtct

SEQ ID NO: 763079 - DNA, 15 bp, Homo sapiens
ttgtttctctgtctc

SEQ ID NO: 763080 - DNA, 15 bp, Homo sapiens
tgtttctctgtctca

SEQ ID NO: 763081 - DNA, 15 bp, Homo sapiens
gtttctctgtctcac

SEQ ID NO: 763082 - DNA, 15 bp, Homo sapiens
tttctctgtctcact

SEQ ID NO: 763083 - DNA, 15 bp, Homo sapiens
ttctctgtctcactc

SEQ ID NO: 763084 - DNA, 15 bp, Homo sapiens
tctctgtctcactca

SEQ ID NO: 763085 - DNA, 15 bp, Homo sapiens
ctctgtctcactcac

SEQ ID NO: 763086 - DNA, 15 bp, Homo sapiens
tctgtctcactcact

SEQ ID NO: 763087 - DNA, 15 bp, Homo sapiens
ctgtctcactcacta

SEQ ID NO: 763088 - DNA, 15 bp, Homo sapiens
tgtctcactcactaa

SEQ ID NO: 763089 - DNA, 15 bp, Homo sapiens
gtctcactcactaag

SEQ ID NO: 763090 - DNA, 15 bp, Homo sapiens
tctcactcactaaga

SEQ ID NO: 763091 - DNA, 15 bp, Homo sapiens
ctcactcactaagat

SEQ ID NO: 763092 - DNA, 15 bp, Homo sapiens
tcactcactaagata

SEQ ID NO: 763093 - DNA, 15 bp, Homo sapiens
cactcactaagatac

SEQ ID NO: 763094 - DNA, 15 bp, Homo sapiens
actcactaagataca

SEQ ID NO: 763095 - DNA, 15 bp, Homo sapiens
ctcactaagatacaa

SEQ ID NO: 763096 - DNA, 15 bp, Homo sapiens
tcactaagatacaag

SEQ ID NO: 763097 - DNA, 15 bp, Homo sapiens
cactaagatacaagc

SEQ ID NO: 763098 - DNA, 15 bp, Homo sapiens
actaagatacaagct

SEQ ID NO: 763099 - DNA, 15 bp, Homo sapiens
ctaagatacaagctt

SEQ ID NO: 763100 - DNA, 15 bp, Homo sapiens
taagatacaagcttc

SEQ ID NO: 763101 - DNA, 15 bp, Homo sapiens
aagatacaagcttca

SEQ ID NO: 763102 - DNA, 15 bp, Homo sapiens
agatacaagcttcat

SEQ ID NO: 763103 - DNA, 15 bp, Homo sapiens
gatacaagcttcata

SEQ ID NO: 763104 - DNA, 15 bp, Homo sapiens
atacaagcttcatag

SEQ ID NO: 763105 - DNA, 15 bp, Homo sapiens
tacaagcttcatagg

SEQ ID NO: 763106 - DNA, 15 bp, Homo sapiens
acaagcttcataggg

SEQ ID NO: 763107 - DNA, 15 bp, Homo sapiens
caagcttcatagggg

SEQ ID NO: 763108 - DNA, 15 bp, Homo sapiens
aagcttcatagggga

SEQ ID NO: 763109 - DNA, 15 bp, Homo sapiens
agcttcataggggag

SEQ ID NO: 763110 - DNA, 15 bp, Homo sapiens
gcttcataggggagg

SEQ ID NO: 763111 - DNA, 15 bp, Homo sapiens
cttcataggggaggg

SEQ ID NO: 763112 - DNA, 15 bp, Homo sapiens
ttcataggggaggga

SEQ ID NO: 763113 - DNA, 15 bp, Homo sapiens
tcataggggagggac

SEQ ID NO: 763114 - DNA, 15 bp, Homo sapiens
cataggggagggact

SEQ ID NO: 763115 - DNA, 15 bp, Homo sapiens
ataggggagggactc

SEQ ID NO: 763116 - DNA, 15 bp, Homo sapiens
taggggagggactct

SEQ ID NO: 763117 - DNA, 15 bp, Homo sapiens
aggggagggactctg

SEQ ID NO: 763118 - DNA, 15 bp, Homo sapiens
ggggagggactctgt

SEQ ID NO: 763119 - DNA, 15 bp, Homo sapiens
gggagggactctgtt

SEQ ID NO: 763120 - DNA, 15 bp, Homo sapiens
ggagggactctgttc

SEQ ID NO: 763121 - DNA, 15 bp, Homo sapiens
gagggactctgttca

SEQ ID NO: 763122 - DNA, 15 bp, Homo sapiens
agggactctgttcat

SEQ ID NO: 763123 - DNA, 15 bp, Homo sapiens
gggactctgttcatg

SEQ ID NO: 763124 - DNA, 15 bp, Homo sapiens
ggactctgttcatgg

SEQ ID NO: 763125 - DNA, 15 bp, Homo sapiens
gactctgttcatggc

SEQ ID NO: 763126 - DNA, 15 bp, Homo sapiens
actctgttcatggct

SEQ ID NO: 763127 - DNA, 15 bp, Homo sapiens
ctctgttcatggctg

SEQ ID NO: 763128 - DNA, 15 bp, Homo sapiens
tctgttcatggctga

SEQ ID NO: 763129 - DNA, 15 bp, Homo sapiens
ctgttcatggctgat

SEQ ID NO: 763130 - DNA, 15 bp, Homo sapiens
tgttcatggctgatg

SEQ ID NO: 763131 - DNA, 15 bp, Homo sapiens
gttcatggctgatgc

SEQ ID NO: 763132 - DNA, 15 bp, Homo sapiens
ttcatggctgatgcc

SEQ ID NO: 763133 - DNA, 15 bp, Homo sapiens
tcatggctgatgcct

SEQ ID NO: 763134 - DNA, 15 bp, Homo sapiens
catggctgatgccta

SEQ ID NO: 763135 - DNA, 15 bp, Homo sapiens
atggctgatgcctag

SEQ ID NO: 763136 - DNA, 15 bp, Homo sapiens
tggctgatgcctaga

SEQ ID NO: 763137 - DNA, 15 bp, Homo sapiens
ggctgatgcctagag

SEQ ID NO: 763138 - DNA, 15 bp, Homo sapiens
gctgatgcctagagt

SEQ ID NO: 763139 - DNA, 15 bp, Homo sapiens
ctgatgcctagagtg

SEQ ID NO: 763140 - DNA, 15 bp, Homo sapiens
tgatgcctagagtgt

SEQ ID NO: 763141 - DNA, 15 bp, Homo sapiens
gatgcctagagtgta

SEQ ID NO: 763142 - DNA, 15 bp, Homo sapiens
atgcctagagtgtag

SEQ ID NO: 763143 - DNA, 15 bp, Homo sapiens
tgcctagagtgtaga

SEQ ID NO: 763144 - DNA, 15 bp, Homo sapiens
gcctagagtgtagaa

SEQ ID NO: 763145 - DNA, 15 bp, Homo sapiens
cctagagtgtagaac

SEQ ID NO: 763146 - DNA, 15 bp, Homo sapiens
ctagagtgtagaaca

SEQ ID NO: 763147 - DNA, 15 bp, Homo sapiens
tagagtgtagaacag

SEQ ID NO: 763148 - DNA, 15 bp, Homo sapiens
agagtgtagaacagt

SEQ ID NO: 763149 - DNA, 15 bp, Homo sapiens
gagtgtagaacagta

SEQ ID NO: 763150 - DNA, 15 bp, Homo sapiens
agtgtagaacagtaa

SEQ ID NO: 763151 - DNA, 15 bp, Homo sapiens
gtgtagaacagtaag

SEQ ID NO: 763152 - DNA, 15 bp, Homo sapiens
tgtagaacagtaagc

SEQ ID NO: 763153 - DNA, 15 bp, Homo sapiens
gtagaacagtaagct

SEQ ID NO: 763154 - DNA, 15 bp, Homo sapiens
tagaacagtaagctc

SEQ ID NO: 763155 - DNA, 15 bp, Homo sapiens
agaacagtaagctcc

SEQ ID NO: 763156 - DNA, 15 bp, Homo sapiens
gaacagtaagctccc

SEQ ID NO: 763157 - DNA, 15 bp, Homo sapiens
aacagtaagctccca

SEQ ID NO: 763158 - DNA, 15 bp, Homo sapiens
acagtaagctcccag

SEQ ID NO: 763159 - DNA, 15 bp, Homo sapiens
cagtaagctcccaga

SEQ ID NO: 763160 - DNA, 15 bp, Homo sapiens
agtaagctcccagaa

SEQ ID NO: 763161 - DNA, 15 bp, Homo sapiens
gtaagctcccagaaa

SEQ ID NO: 763162 - DNA, 15 bp, Homo sapiens
taagctcccagaaaa

SEQ ID NO: 763163 - DNA, 15 bp, Homo sapiens
aagctcccagaaaat

SEQ ID NO: 763164 - DNA, 15 bp, Homo sapiens
agctcccagaaaata

SEQ ID NO: 763165 - DNA, 15 bp, Homo sapiens
gctcccagaaaatag

SEQ ID NO: 763166 - DNA, 15 bp, Homo sapiens
ctcccagaaaatagt

SEQ ID NO: 763167 - DNA, 15 bp, Homo sapiens
tcccagaaaatagtt

SEQ ID NO: 763168 - DNA, 15 bp, Homo sapiens
cccagaaaatagttg

SEQ ID NO: 763169 - DNA, 15 bp, Homo sapiens
ccagaaaatagttgt

SEQ ID NO: 763170 - DNA, 15 bp, Homo sapiens
cagaaaatagttgtt

SEQ ID NO: 763171 - DNA, 15 bp, Homo sapiens
agaaaatagttgttg

SEQ ID NO: 763172 - DNA, 15 bp, Homo sapiens
gaaaatagttgttga

SEQ ID NO: 763173 - DNA, 15 bp, Homo sapiens
aaaatagttgttgag

SEQ ID NO: 763174 - DNA, 15 bp, Homo sapiens
aaatagttgttgagt

SEQ ID NO: 763175 - DNA, 15 bp, Homo sapiens
aatagttgttgagtg

SEQ ID NO: 763176 - DNA, 15 bp, Homo sapiens
atagttgttgagtga

SEQ ID NO: 763177 - DNA, 15 bp, Homo sapiens
tagttgttgagtgaa

SEQ ID NO: 763178 - DNA, 15 bp, Homo sapiens
agttgttgagtgaat

SEQ ID NO: 763179 - DNA, 15 bp, Homo sapiens
gttgttgagtgaatg

SEQ ID NO: 763180 - DNA, 15 bp, Homo sapiens
ttgttgagtgaatgc

SEQ ID NO: 763181 - DNA, 15 bp, Homo sapiens
tgttgagtgaatgct

SEQ ID NO: 763182 - DNA, 15 bp, Homo sapiens
gttgagtgaatgctt

SEQ ID NO: 763183 - DNA, 15 bp, Homo sapiens
ttgagtgaatgcttg

SEQ ID NO: 763184 - DNA, 15 bp, Homo sapiens
tgagtgaatgcttga

SEQ ID NO: 763185 - DNA, 15 bp, Homo sapiens
gagtgaatgcttgat

SEQ ID NO: 763186 - DNA, 15 bp, Homo sapiens
agtgaatgcttgata

SEQ ID NO: 763187 - DNA, 15 bp, Homo sapiens
gtgaatgcttgatag

SEQ ID NO: 763188 - DNA, 15 bp, Homo sapiens
tgaatgcttgatagg

SEQ ID NO: 763189 - DNA, 15 bp, Homo sapiens
gaatgcttgataggc

SEQ ID NO: 763190 - DNA, 15 bp, Homo sapiens
aatgcttgataggct

SEQ ID NO: 763191 - DNA, 15 bp, Homo sapiens
atgcttgataggctt

SEQ ID NO: 763192 - DNA, 15 bp, Homo sapiens
tgcttgataggcttt

SEQ ID NO: 763193 - DNA, 15 bp, Homo sapiens
gcttgataggctttc

SEQ ID NO: 763194 - DNA, 15 bp, Homo sapiens
cttgataggctttcc

SEQ ID NO: 763195 - DNA, 15 bp, Homo sapiens
ttgataggctttcct

SEQ ID NO: 763196 - DNA, 15 bp, Homo sapiens
tgataggctttcctt

SEQ ID NO: 763197 - DNA, 15 bp, Homo sapiens
gataggctttccttt

SEQ ID NO: 763198 - DNA, 15 bp, Homo sapiens
ataggctttccttta

SEQ ID NO: 763199 - DNA, 15 bp, Homo sapiens
taggctttcctttaa

SEQ ID NO: 763200 - DNA, 15 bp, Homo sapiens
aggctttcctttaaa

SEQ ID NO: 763201 - DNA, 15 bp, Homo sapiens
ggctttcctttaaaa

SEQ ID NO: 763202 - DNA, 15 bp, Homo sapiens
gctttcctttaaaag

SEQ ID NO: 763203 - DNA, 15 bp, Homo sapiens
ctttcctttaaaagt

SEQ ID NO: 763204 - DNA, 15 bp, Homo sapiens
tttcctttaaaagtg

SEQ ID NO: 763205 - DNA, 15 bp, Homo sapiens
ttcctttaaaagtga

SEQ ID NO: 763206 - DNA, 15 bp, Homo sapiens
tcctttaaaagtgac

SEQ ID NO: 763207 - DNA, 15 bp, Homo sapiens
cctttaaaagtgact

SEQ ID NO: 763208 - DNA, 15 bp, Homo sapiens
ctttaaaagtgactg

SEQ ID NO: 763209 - DNA, 15 bp, Homo sapiens
tttaaaagtgactgt

SEQ ID NO: 763210 - DNA, 15 bp, Homo sapiens
ttaaaagtgactgtt

SEQ ID NO: 763211 - DNA, 15 bp, Homo sapiens
taaaagtgactgttg

SEQ ID NO: 763212 - DNA, 15 bp, Homo sapiens
aaaagtgactgttga

SEQ ID NO: 763213 - DNA, 15 bp, Homo sapiens
aaagtgactgttgac

SEQ ID NO: 763214 - DNA, 15 bp, Homo sapiens
aagtgactgttgact

SEQ ID NO: 763215 - DNA, 15 bp, Homo sapiens
agtgactgttgactg

SEQ ID NO: 763216 - DNA, 15 bp, Homo sapiens
gtgactgttgactga

SEQ ID NO: 763217 - DNA, 15 bp, Homo sapiens
tgactgttgactgac

SEQ ID NO: 763218 - DNA, 15 bp, Homo sapiens
gactgttgactgact

SEQ ID NO: 763219 - DNA, 15 bp, Homo sapiens
actgttgactgactt

SEQ ID NO: 763220 - DNA, 15 bp, Homo sapiens
ctgttgactgacttt

SEQ ID NO: 763221 - DNA, 15 bp, Homo sapiens
tgttgactgacttta

SEQ ID NO: 763222 - DNA, 15 bp, Homo sapiens
gttgactgactttaa

SEQ ID NO: 763223 - DNA, 15 bp, Homo sapiens
ttgactgactttaag

SEQ ID NO: 763224 - DNA, 15 bp, Homo sapiens
tgactgactttaaga

SEQ ID NO: 763225 - DNA, 15 bp, Homo sapiens
gactgactttaagat

SEQ ID NO: 763226 - DNA, 15 bp, Homo sapiens
actgactttaagatt

SEQ ID NO: 763227 - DNA, 15 bp, Homo sapiens
ctgactttaagattt

SEQ ID NO: 763228 - DNA, 15 bp, Homo sapiens
tgactttaagatttt

SEQ ID NO: 763229 - DNA, 15 bp, Homo sapiens
gactttaagattttc

SEQ ID NO: 763230 - DNA, 15 bp, Homo sapiens
actttaagattttcg

SEQ ID NO: 763231 - DNA, 15 bp, Homo sapiens
ctttaagattttcgc

SEQ ID NO: 763232 - DNA, 15 bp, Homo sapiens
tttaagattttcgct

SEQ ID NO: 763233 - DNA, 15 bp, Homo sapiens
ttaagattttcgcta

SEQ ID NO: 763234 - DNA, 15 bp, Homo sapiens
taagattttcgctat

SEQ ID NO: 763235 - DNA, 15 bp, Homo sapiens
aagattttcgctata

SEQ ID NO: 763236 - DNA, 15 bp, Homo sapiens
agattttcgctataa

SEQ ID NO: 763237 - DNA, 15 bp, Homo sapiens
gattttcgctataat

SEQ ID NO: 763238 - DNA, 15 bp, Homo sapiens
attttcgctataatt

SEQ ID NO: 763239 - DNA, 15 bp, Homo sapiens
ttttcgctataattg

SEQ ID NO: 763240 - DNA, 15 bp, Homo sapiens
tttcgctataattgt

SEQ ID NO: 763241 - DNA, 15 bp, Homo sapiens
ttcgctataattgtt

SEQ ID NO: 763242 - DNA, 15 bp, Homo sapiens
tcgctataattgttc

SEQ ID NO: 763243 - DNA, 15 bp, Homo sapiens
cgctataattgttct

SEQ ID NO: 763244 - DNA, 15 bp, Homo sapiens
gctataattgttctt

SEQ ID NO: 763245 - DNA, 15 bp, Homo sapiens
ctataattgttcttt

SEQ ID NO: 763246 - DNA, 15 bp, Homo sapiens
tataattgttctttg

SEQ ID NO: 763247 - DNA, 15 bp, Homo sapiens
ataattgttctttgt

SEQ ID NO: 763248 - DNA, 15 bp, Homo sapiens
taattgttctttgtc

SEQ ID NO: 763249 - DNA, 15 bp, Homo sapiens
aattgttctttgtca

SEQ ID NO: 763250 - DNA, 15 bp, Homo sapiens
attgttctttgtcaa

SEQ ID NO: 763251 - DNA, 15 bp, Homo sapiens
ttgttctttgtcaat

SEQ ID NO: 763252 - DNA, 15 bp, Homo sapiens
tgttctttgtcaata

SEQ ID NO: 763253 - DNA, 15 bp, Homo sapiens
gttctttgtcaatag

SEQ ID NO: 763254 - DNA, 15 bp, Homo sapiens
ttctttgtcaatagc

SEQ ID NO: 763255 - DNA, 15 bp, Homo sapiens
tctttgtcaatagca

SEQ ID NO: 763256 - DNA, 15 bp, Homo sapiens
ctttgtcaatagcat

SEQ ID NO: 763257 - DNA, 15 bp, Homo sapiens
tttgtcaatagcatt

SEQ ID NO: 763258 - DNA, 15 bp, Homo sapiens
ttgtcaatagcattc

SEQ ID NO: 763259 - DNA, 15 bp, Homo sapiens
tgtcaatagcattct

SEQ ID NO: 763260 - DNA, 15 bp, Homo sapiens
gtcaatagcattctc

SEQ ID NO: 763261 - DNA, 15 bp, Homo sapiens
tcaatagcattctca

SEQ ID NO: 763262 - DNA, 15 bp, Homo sapiens
caatagcattctcat

SEQ ID NO: 763263 - DNA, 15 bp, Homo sapiens
aatagcattctcatt

SEQ ID NO: 763264 - DNA, 15 bp, Homo sapiens
atagcattctcattt

SEQ ID NO: 763265 - DNA, 15 bp, Homo sapiens
tagcattctcattta

SEQ ID NO: 763266 - DNA, 15 bp, Homo sapiens
agcattctcatttaa

SEQ ID NO: 763267 - DNA, 15 bp, Homo sapiens
gcattctcatttaat

SEQ ID NO: 763268 - DNA, 15 bp, Homo sapiens
cattctcatttaatg

SEQ ID NO: 763269 - DNA, 15 bp, Homo sapiens
attctcatttaatga

SEQ ID NO: 763270 - DNA, 15 bp, Homo sapiens
ttctcatttaatgat

SEQ ID NO: 763271 - DNA, 15 bp, Homo sapiens
tctcatttaatgatt

SEQ ID NO: 763272 - DNA, 15 bp, Homo sapiens
ctcatttaatgatta

SEQ ID NO: 763273 - DNA, 15 bp, Homo sapiens
tcatttaatgattat

SEQ ID NO: 763274 - DNA, 15 bp, Homo sapiens
catttaatgattatt

SEQ ID NO: 763275 - DNA, 15 bp, Homo sapiens
atttaatgattatta

SEQ ID NO: 763276 - DNA, 15 bp, Homo sapiens
tttaatgattattat

SEQ ID NO: 763277 - DNA, 15 bp, Homo sapiens
ttaatgattattatt

SEQ ID NO: 763278 - DNA, 15 bp, Homo sapiens
taatgattattattt

SEQ ID NO: 763279 - DNA, 15 bp, Homo sapiens
aatgattattatttt

SEQ ID NO: 763280 - DNA, 15 bp, Homo sapiens
atgattattattttg

SEQ ID NO: 763281 - DNA, 15 bp, Homo sapiens
tgattattattttga

SEQ ID NO: 763282 - DNA, 15 bp, Homo sapiens
gattattattttgac

SEQ ID NO: 763283 - DNA, 15 bp, Homo sapiens
attattattttgacc

SEQ ID NO: 763284 - DNA, 15 bp, Homo sapiens
ttattattttgacca

SEQ ID NO: 763285 - DNA, 15 bp, Homo sapiens
tattattttgaccac

SEQ ID NO: 763286 - DNA, 15 bp, Homo sapiens
attattttgaccact

SEQ ID NO: 763287 - DNA, 15 bp, Homo sapiens
ttattttgaccacta

SEQ ID NO: 763288 - DNA, 15 bp, Homo sapiens
tattttgaccactaa

SEQ ID NO: 763289 - DNA, 15 bp, Homo sapiens
attttgaccactaaa

SEQ ID NO: 763290 - DNA, 15 bp, Homo sapiens
ttttgaccactaaac

SEQ ID NO: 763291 - DNA, 15 bp, Homo sapiens
tttgaccactaaact

SEQ ID NO: 763292 - DNA, 15 bp, Homo sapiens
ttgaccactaaacta

SEQ ID NO: 763293 - DNA, 15 bp, Homo sapiens
tgaccactaaactac

SEQ ID NO: 763294 - DNA, 15 bp, Homo sapiens
gaccactaaactact

SEQ ID NO: 763295 - DNA, 15 bp, Homo sapiens
accactaaactactt

SEQ ID NO: 763296 - DNA, 15 bp, Homo sapiens
ccactaaactacttt

SEQ ID NO: 763297 - DNA, 15 bp, Homo sapiens
cactaaactactttg

SEQ ID NO: 763298 - DNA, 15 bp, Homo sapiens
actaaactactttga

SEQ ID NO: 763299 - DNA, 15 bp, Homo sapiens
ctaaactactttgaa

SEQ ID NO: 763300 - DNA, 15 bp, Homo sapiens
taaactactttgaat

SEQ ID NO: 763301 - DNA, 15 bp, Homo sapiens
aaactactttgaatg

SEQ ID NO: 763302 - DNA, 15 bp, Homo sapiens
aactactttgaatgt

SEQ ID NO: 763303 - DNA, 15 bp, Homo sapiens
actactttgaatgtt

SEQ ID NO: 763304 - DNA, 15 bp, Homo sapiens
ctactttgaatgttt

SEQ ID NO: 763305 - DNA, 15 bp, Homo sapiens
tactttgaatgtttt

SEQ ID NO: 763306 - DNA, 15 bp, Homo sapiens
actttgaatgttttc

SEQ ID NO: 763307 - DNA, 15 bp, Homo sapiens
ctttgaatgttttcc

SEQ ID NO: 763308 - DNA, 15 bp, Homo sapiens
tttgaatgttttcct

SEQ ID NO: 763309 - DNA, 15 bp, Homo sapiens
ttgaatgttttcctt

SEQ ID NO: 763310 - DNA, 15 bp, Homo sapiens
tgaatgttttccttc

SEQ ID NO: 763311 - DNA, 15 bp, Homo sapiens
gaatgttttccttcc

SEQ ID NO: 763312 - DNA, 15 bp, Homo sapiens
aatgttttccttcct

SEQ ID NO: 763313 - DNA, 15 bp, Homo sapiens
atgttttccttcctt

SEQ ID NO: 763314 - DNA, 15 bp, Homo sapiens
tgttttccttccttt

SEQ ID NO: 763315 - DNA, 15 bp, Homo sapiens
gttttccttcctttc

SEQ ID NO: 763316 - DNA, 15 bp, Homo sapiens
ttttccttcctttcg

SEQ ID NO: 763317 - DNA, 15 bp, Homo sapiens
tttccttcctttcgt

SEQ ID NO: 763318 - DNA, 15 bp, Homo sapiens
ttccttcctttcgtt

SEQ ID NO: 763319 - DNA, 15 bp, Homo sapiens
tccttcctttcgttg

SEQ ID NO: 763320 - DNA, 15 bp, Homo sapiens
ccttcctttcgttgc

SEQ ID NO: 763321 - DNA, 15 bp, Homo sapiens
cttcctttcgttgct

SEQ ID NO: 763322 - DNA, 15 bp, Homo sapiens
ttcctttcgttgcta

SEQ ID NO: 763323 - DNA, 15 bp, Homo sapiens
tcctttcgttgctaa

SEQ ID NO: 763324 - DNA, 15 bp, Homo sapiens
cctttcgttgctaac

SEQ ID NO: 763325 - DNA, 15 bp, Homo sapiens
ctttcgttgctaact

SEQ ID NO: 763326 - DNA, 15 bp, Homo sapiens
tttcgttgctaactt

SEQ ID NO: 763327 - DNA, 15 bp, Homo sapiens
ttcgttgctaacttt

SEQ ID NO: 763328 - DNA, 15 bp, Homo sapiens
tcgttgctaacttta

SEQ ID NO: 763329 - DNA, 15 bp, Homo sapiens
cgttgctaactttat

SEQ ID NO: 763330 - DNA, 15 bp, Homo sapiens
gttgctaactttatc

SEQ ID NO: 763331 - DNA, 15 bp, Homo sapiens
ttgctaactttatct

SEQ ID NO: 763332 - DNA, 15 bp, Homo sapiens
tgctaactttatcta

SEQ ID NO: 763333 - DNA, 15 bp, Homo sapiens
gctaactttatctag

SEQ ID NO: 763334 - DNA, 15 bp, Homo sapiens
ctaactttatctaga

SEQ ID NO: 763335 - DNA, 15 bp, Homo sapiens
taactttatctagaa

SEQ ID NO: 763336 - DNA, 15 bp, Homo sapiens
aactttatctagaaa

SEQ ID NO: 763337 - DNA, 15 bp, Homo sapiens
actttatctagaaat

SEQ ID NO: 763338 - DNA, 15 bp, Homo sapiens
ctttatctagaaatt

SEQ ID NO: 763339 - DNA, 15 bp, Homo sapiens
tttatctagaaatta

SEQ ID NO: 763340 - DNA, 15 bp, Homo sapiens
ttatctagaaattaa

SEQ ID NO: 763341 - DNA, 15 bp, Homo sapiens
tatctagaaattaac

SEQ ID NO: 763342 - DNA, 15 bp, Homo sapiens
atctagaaattaaca

SEQ ID NO: 763343 - DNA, 15 bp, Homo sapiens
tctagaaattaacag

SEQ ID NO: 763344 - DNA, 15 bp, Homo sapiens
ctagaaattaacagc

SEQ ID NO: 763345 - DNA, 15 bp, Homo sapiens
tagaaattaacagca

SEQ ID NO: 763346 - DNA, 15 bp, Homo sapiens
agaaattaacagcac

SEQ ID NO: 763347 - DNA, 15 bp, Homo sapiens
gaaattaacagcact

SEQ ID NO: 763348 - DNA, 15 bp, Homo sapiens
aaattaacagcactg

SEQ ID NO: 763349 - DNA, 15 bp, Homo sapiens
aattaacagcactgt

SEQ ID NO: 763350 - DNA, 15 bp, Homo sapiens
attaacagcactgtc

SEQ ID NO: 763351 - DNA, 15 bp, Homo sapiens
ttaacagcactgtct

SEQ ID NO: 763352 - DNA, 15 bp, Homo sapiens
taacagcactgtctt

SEQ ID NO: 763353 - DNA, 15 bp, Homo sapiens
aacagcactgtcttt

SEQ ID NO: 763354 - DNA, 15 bp, Homo sapiens
acagcactgtcttta

SEQ ID NO: 763355 - DNA, 15 bp, Homo sapiens
cagcactgtctttac

SEQ ID NO: 763356 - DNA, 15 bp, Homo sapiens
agcactgtctttact

SEQ ID NO: 763357 - DNA, 15 bp, Homo sapiens
gcactgtctttactg

SEQ ID NO: 763358 - DNA, 15 bp, Homo sapiens
cactgtctttactgt

SEQ ID NO: 763359 - DNA, 15 bp, Homo sapiens
actgtctttactgtg

SEQ ID NO: 763360 - DNA, 15 bp, Homo sapiens
ctgtctttactgtga

SEQ ID NO: 763361 - DNA, 15 bp, Homo sapiens
tgtctttactgtgaa

SEQ ID NO: 763362 - DNA, 15 bp, Homo sapiens
gtctttactgtgaag

SEQ ID NO: 763363 - DNA, 15 bp, Homo sapiens
tctttactgtgaagg

SEQ ID NO: 763364 - DNA, 15 bp, Homo sapiens
ctttactgtgaagga

SEQ ID NO: 763365 - DNA, 15 bp, Homo sapiens
tttactgtgaaggaa

SEQ ID NO: 763366 - DNA, 15 bp, Homo sapiens
ttactgtgaaggaag

SEQ ID NO: 763367 - DNA, 15 bp, Homo sapiens
tactgtgaaggaagg

SEQ ID NO: 763368 - DNA, 15 bp, Homo sapiens
actgtgaaggaaggg

SEQ ID NO: 763369 - DNA, 15 bp, Homo sapiens
ctgtgaaggaagggc

SEQ ID NO: 763370 - DNA, 15 bp, Homo sapiens
tgtgaaggaagggca

SEQ ID NO: 763371 - DNA, 15 bp, Homo sapiens
gtgaaggaagggcaa

SEQ ID NO: 763372 - DNA, 15 bp, Homo sapiens
tgaaggaagggcaag

SEQ ID NO: 763373 - DNA, 15 bp, Homo sapiens
gaaggaagggcaagg

SEQ ID NO: 763374 - DNA, 15 bp, Homo sapiens
aaggaagggcaaggt

SEQ ID NO: 763375 - DNA, 15 bp, Homo sapiens
aggaagggcaaggtt

SEQ ID NO: 763376 - DNA, 15 bp, Homo sapiens
ggaagggcaaggttg

SEQ ID NO: 763377 - DNA, 15 bp, Homo sapiens
gaagggcaaggttgc

SEQ ID NO: 763378 - DNA, 15 bp, Homo sapiens
aagggcaaggttgca

SEQ ID NO: 763379 - DNA, 15 bp, Homo sapiens
agggcaaggttgcag

SEQ ID NO: 763380 - DNA, 15 bp, Homo sapiens
gggcaaggttgcagg

SEQ ID NO: 763381 - DNA, 15 bp, Homo sapiens
ggcaaggttgcaggc

SEQ ID NO: 763382 - DNA, 15 bp, Homo sapiens
gcaaggttgcaggca

SEQ ID NO: 763383 - DNA, 15 bp, Homo sapiens
caaggttgcaggcag

SEQ ID NO: 763384 - DNA, 15 bp, Homo sapiens
aaggttgcaggcagg

SEQ ID NO: 763385 - DNA, 15 bp, Homo sapiens
aggttgcaggcaggg

SEQ ID NO: 763386 - DNA, 15 bp, Homo sapiens
ggttgcaggcagggg

SEQ ID NO: 763387 - DNA, 15 bp, Homo sapiens
gttgcaggcaggggt

SEQ ID NO: 763388 - DNA, 15 bp, Homo sapiens
ttgcaggcaggggta

SEQ ID NO: 763389 - DNA, 15 bp, Homo sapiens
tgcaggcaggggtat

SEQ ID NO: 763390 - DNA, 15 bp, Homo sapiens
gcaggcaggggtatt

SEQ ID NO: 763391 - DNA, 15 bp, Homo sapiens
caggcaggggtattc

SEQ ID NO: 763392 - DNA, 15 bp, Homo sapiens
aggcaggggtattca

SEQ ID NO: 763393 - DNA, 15 bp, Homo sapiens
ggcaggggtattcag

SEQ ID NO: 763394 - DNA, 15 bp, Homo sapiens
gcaggggtattcaga

SEQ ID NO: 763395 - DNA, 15 bp, Homo sapiens
caggggtattcagac

SEQ ID NO: 763396 - DNA, 15 bp, Homo sapiens
aggggtattcagaca

SEQ ID NO: 763397 - DNA, 15 bp, Homo sapiens
ggggtattcagacag

SEQ ID NO: 763398 - DNA, 15 bp, Homo sapiens
gggtattcagacaga

SEQ ID NO: 763399 - DNA, 15 bp, Homo sapiens
ggtattcagacagag

SEQ ID NO: 763400 - DNA, 15 bp, Homo sapiens
gtattcagacagagt

SEQ ID NO: 763401 - DNA, 15 bp, Homo sapiens
tattcagacagagtg

SEQ ID NO: 763402 - DNA, 15 bp, Homo sapiens
attcagacagagtgg

SEQ ID NO: 763403 - DNA, 15 bp, Homo sapiens
ttcagacagagtggt

SEQ ID NO: 763404 - DNA, 15 bp, Homo sapiens
tcagacagagtggtt

SEQ ID NO: 763405 - DNA, 15 bp, Homo sapiens
cagacagagtggtta

SEQ ID NO: 763406 - DNA, 15 bp, Homo sapiens
agacagagtggttaa

SEQ ID NO: 763407 - DNA, 15 bp, Homo sapiens
gacagagtggttaag

SEQ ID NO: 763408 - DNA, 15 bp, Homo sapiens
acagagtggttaagc

SEQ ID NO: 763409 - DNA, 15 bp, Homo sapiens
cagagtggttaagcc

SEQ ID NO: 763410 - DNA, 15 bp, Homo sapiens
agagtggttaagcca

SEQ ID NO: 763411 - DNA, 15 bp, Homo sapiens
gagtggttaagccaa

SEQ ID NO: 763412 - DNA, 15 bp, Homo sapiens
agtggttaagccaaa

SEQ ID NO: 763413 - DNA, 15 bp, Homo sapiens
gtggttaagccaaag

SEQ ID NO: 763414 - DNA, 15 bp, Homo sapiens
tggttaagccaaaga

SEQ ID NO: 763415 - DNA, 15 bp, Homo sapiens
ggttaagccaaagat

SEQ ID NO: 763416 - DNA, 15 bp, Homo sapiens
gttaagccaaagatc

SEQ ID NO: 763417 - DNA, 15 bp, Homo sapiens
ttaagccaaagatca

SEQ ID NO: 763418 - DNA, 15 bp, Homo sapiens
taagccaaagatcac

SEQ ID NO: 763419 - DNA, 15 bp, Homo sapiens
aagccaaagatcact

SEQ ID NO: 763420 - DNA, 15 bp, Homo sapiens
agccaaagatcactt

SEQ ID NO: 763421 - DNA, 15 bp, Homo sapiens
gccaaagatcacttt

SEQ ID NO: 763422 - DNA, 15 bp, Homo sapiens
ccaaagatcactttg

SEQ ID NO: 763423 - DNA, 15 bp, Homo sapiens
caaagatcactttgg

SEQ ID NO: 763424 - DNA, 15 bp, Homo sapiens
aaagatcactttggg

SEQ ID NO: 763425 - DNA, 15 bp, Homo sapiens
aagatcactttgggt

SEQ ID NO: 763426 - DNA, 15 bp, Homo sapiens
agatcactttgggtt

SEQ ID NO: 763427 - DNA, 15 bp, Homo sapiens
gatcactttgggttt

SEQ ID NO: 763428 - DNA, 15 bp, Homo sapiens
atcactttgggtttg

SEQ ID NO: 763429 - DNA, 15 bp, Homo sapiens
tcactttgggtttgg

SEQ ID NO: 763430 - DNA, 15 bp, Homo sapiens
cactttgggtttgga

SEQ ID NO: 763431 - DNA, 15 bp, Homo sapiens
actttgggtttggat

SEQ ID NO: 763432 - DNA, 15 bp, Homo sapiens
ctttgggtttggatt

SEQ ID NO: 763433 - DNA, 15 bp, Homo sapiens
tttgggtttggattg

SEQ ID NO: 763434 - DNA, 15 bp, Homo sapiens
ttgggtttggattgt

SEQ ID NO: 763435 - DNA, 15 bp, Homo sapiens
tgggtttggattgta

SEQ ID NO: 763436 - DNA, 15 bp, Homo sapiens
gggtttggattgtat

SEQ ID NO: 763437 - DNA, 15 bp, Homo sapiens
ggtttggattgtatt

SEQ ID NO: 763438 - DNA, 15 bp, Homo sapiens
gtttggattgtatta

SEQ ID NO: 763439 - DNA, 15 bp, Homo sapiens
tttggattgtattat

SEQ ID NO: 763440 - DNA, 15 bp, Homo sapiens
ttggattgtattata

SEQ ID NO: 763441 - DNA, 15 bp, Homo sapiens
tggattgtattatat

SEQ ID NO: 763442 - DNA, 15 bp, Homo sapiens
ggattgtattatatg

SEQ ID NO: 763443 - DNA, 15 bp, Homo sapiens
gattgtattatatga

SEQ ID NO: 763444 - DNA, 15 bp, Homo sapiens
attgtattatatgac

SEQ ID NO: 763445 - DNA, 15 bp, Homo sapiens
ttgtattatatgact

SEQ ID NO: 763446 - DNA, 15 bp, Homo sapiens
tgtattatatgactt

SEQ ID NO: 763447 - DNA, 15 bp, Homo sapiens
gtattatatgacttt

SEQ ID NO: 763448 - DNA, 15 bp, Homo sapiens
tattatatgactttt

SEQ ID NO: 763449 - DNA, 15 bp, Homo sapiens
attatatgacttttt

SEQ ID NO: 763450 - DNA, 15 bp, Homo sapiens
ttatatgactttttt

SEQ ID NO: 763451 - DNA, 15 bp, Homo sapiens
tatatgacttttttt

SEQ ID NO: 763452 - DNA, 15 bp, Homo sapiens
atatgactttttttt

SEQ ID NO: 763453 - DNA, 15 bp, Homo sapiens
tatgacttttttttt

SEQ ID NO: 763454 - DNA, 15 bp, Homo sapiens
atgactttttttttg

SEQ ID NO: 763455 - DNA, 15 bp, Homo sapiens
tgactttttttttgg

SEQ ID NO: 763456 - DNA, 15 bp, Homo sapiens
gactttttttttgga

SEQ ID NO: 763457 - DNA, 15 bp, Homo sapiens
actttttttttggag

SEQ ID NO: 763458 - DNA, 15 bp, Homo sapiens
ctttttttttggagg

SEQ ID NO: 763459 - DNA, 15 bp, Homo sapiens
tttttttttggaggg

SEQ ID NO: 763460 - DNA, 15 bp, Homo sapiens
ttttttttggagggg

SEQ ID NO: 763461 - DNA, 15 bp, Homo sapiens
tttttttggaggggg

SEQ ID NO: 763462 - DNA, 15 bp, Homo sapiens
ttttttggagggggg

SEQ ID NO: 763463 - DNA, 15 bp, Homo sapiens
tttttggaggggggt

SEQ ID NO: 763464 - DNA, 15 bp, Homo sapiens
ttttggaggggggtt

SEQ ID NO: 763465 - DNA, 15 bp, Homo sapiens
tttggaggggggtta

SEQ ID NO: 763466 - DNA, 15 bp, Homo sapiens
ttggaggggggttag

SEQ ID NO: 763467 - DNA, 15 bp, Homo sapiens
tggaggggggttagt

SEQ ID NO: 763468 - DNA, 15 bp, Homo sapiens
ggaggggggttagta

SEQ ID NO: 763469 - DNA, 15 bp, Homo sapiens
gaggggggttagtaa

SEQ ID NO: 763470 - DNA, 15 bp, Homo sapiens
aggggggttagtaag

SEQ ID NO: 763471 - DNA, 15 bp, Homo sapiens
ggggggttagtaagg

SEQ ID NO: 763472 - DNA, 15 bp, Homo sapiens
gggggttagtaaggg

SEQ ID NO: 763473 - DNA, 15 bp, Homo sapiens
ggggttagtaaggga

SEQ ID NO: 763474 - DNA, 15 bp, Homo sapiens
gggttagtaagggat

SEQ ID NO: 763475 - DNA, 15 bp, Homo sapiens
ggttagtaagggata

SEQ ID NO: 763476 - DNA, 15 bp, Homo sapiens
gttagtaagggatat

SEQ ID NO: 763477 - DNA, 15 bp, Homo sapiens
ttagtaagggatatc

SEQ ID NO: 763478 - DNA, 15 bp, Homo sapiens
tagtaagggatatca

SEQ ID NO: 763479 - DNA, 15 bp, Homo sapiens
agtaagggatatcag

SEQ ID NO: 763480 - DNA, 15 bp, Homo sapiens
gtaagggatatcaga

SEQ ID NO: 763481 - DNA, 15 bp, Homo sapiens
taagggatatcagat

SEQ ID NO: 763482 - DNA, 15 bp, Homo sapiens
aagggatatcagatc

SEQ ID NO: 763483 - DNA, 15 bp, Homo sapiens
agggatatcagatca

SEQ ID NO: 763484 - DNA, 15 bp, Homo sapiens
gggatatcagatcag

SEQ ID NO: 763485 - DNA, 15 bp, Homo sapiens
ggatatcagatcagt

SEQ ID NO: 763486 - DNA, 15 bp, Homo sapiens
gatatcagatcagtt

SEQ ID NO: 763487 - DNA, 15 bp, Homo sapiens
atatcagatcagttt

SEQ ID NO: 763488 - DNA, 15 bp, Homo sapiens
tatcagatcagtttt

SEQ ID NO: 763489 - DNA, 15 bp, Homo sapiens
atcagatcagtttta

SEQ ID NO: 763490 - DNA, 15 bp, Homo sapiens
tcagatcagttttat

SEQ ID NO: 763491 - DNA, 15 bp, Homo sapiens
cagatcagttttatt

SEQ ID NO: 763492 - DNA, 15 bp, Homo sapiens
agatcagttttattc

SEQ ID NO: 763493 - DNA, 15 bp, Homo sapiens
gatcagttttattca

SEQ ID NO: 763494 - DNA, 15 bp, Homo sapiens
atcagttttattcat

SEQ ID NO: 763495 - DNA, 15 bp, Homo sapiens
tcagttttattcatc

SEQ ID NO: 763496 - DNA, 15 bp, Homo sapiens
cagttttattcatcc

SEQ ID NO: 763497 - DNA, 15 bp, Homo sapiens
agttttattcatcct

SEQ ID NO: 763498 - DNA, 15 bp, Homo sapiens
gttttattcatcctt

SEQ ID NO: 763499 - DNA, 15 bp, Homo sapiens
ttttattcatccttc

SEQ ID NO: 763500 - DNA, 15 bp, Homo sapiens
tttattcatccttca

SEQ ID NO: 763501 - DNA, 15 bp, Homo sapiens
ttattcatccttcat

SEQ ID NO: 763502 - DNA, 15 bp, Homo sapiens
tattcatccttcatt

SEQ ID NO: 763503 - DNA, 15 bp, Homo sapiens
attcatccttcattt

SEQ ID NO: 763504 - DNA, 15 bp, Homo sapiens
ttcatccttcatttt

SEQ ID NO: 763505 - DNA, 15 bp, Homo sapiens
tcatccttcattttt

SEQ ID NO: 763506 - DNA, 15 bp, Homo sapiens
catccttcatttttc

SEQ ID NO: 763507 - DNA, 15 bp, Homo sapiens
atccttcatttttct

SEQ ID NO: 763508 - DNA, 15 bp, Homo sapiens
tccttcatttttctt

SEQ ID NO: 763509 - DNA, 15 bp, Homo sapiens
ccttcatttttcttc

SEQ ID NO: 763510 - DNA, 15 bp, Homo sapiens
cttcatttttcttca

SEQ ID NO: 763511 - DNA, 15 bp, Homo sapiens
ttcatttttcttcat

SEQ ID NO: 763512 - DNA, 15 bp, Homo sapiens
tcatttttcttcatt

SEQ ID NO: 763513 - DNA, 15 bp, Homo sapiens
catttttcttcatta

SEQ ID NO: 763514 - DNA, 15 bp, Homo sapiens
atttttcttcattac

SEQ ID NO: 763515 - DNA, 15 bp, Homo sapiens
tttttcttcattaca

SEQ ID NO: 763516 - DNA, 15 bp, Homo sapiens
ttttcttcattacat

SEQ ID NO: 763517 - DNA, 15 bp, Homo sapiens
tttcttcattacatt

SEQ ID NO: 763518 - DNA, 15 bp, Homo sapiens
ttcttcattacattt

SEQ ID NO: 763519 - DNA, 15 bp, Homo sapiens
tcttcattacatttt

SEQ ID NO: 763520 - DNA, 15 bp, Homo sapiens
cttcattacattttc

SEQ ID NO: 763521 - DNA, 15 bp, Homo sapiens
ttcattacattttct

SEQ ID NO: 763522 - DNA, 15 bp, Homo sapiens
tcattacattttctt

SEQ ID NO: 763523 - DNA, 15 bp, Homo sapiens
cattacattttcttt

SEQ ID NO: 763524 - DNA, 15 bp, Homo sapiens
attacattttcttta

SEQ ID NO: 763525 - DNA, 15 bp, Homo sapiens
ttacattttctttag

SEQ ID NO: 763526 - DNA, 15 bp, Homo sapiens
tacattttctttaga

SEQ ID NO: 763527 - DNA, 15 bp, Homo sapiens
acattttctttagac

SEQ ID NO: 763528 - DNA, 15 bp, Homo sapiens
cattttctttagaca

SEQ ID NO: 763529 - DNA, 15 bp, Homo sapiens
attttctttagacaa

SEQ ID NO: 763530 - DNA, 15 bp, Homo sapiens
ttttctttagacaac

SEQ ID NO: 763531 - DNA, 15 bp, Homo sapiens
tttctttagacaaca

SEQ ID NO: 763532 - DNA, 15 bp, Homo sapiens
ttctttagacaacat

SEQ ID NO: 763533 - DNA, 15 bp, Homo sapiens
tctttagacaacata

SEQ ID NO: 763534 - DNA, 15 bp, Homo sapiens
ctttagacaacatat

SEQ ID NO: 763535 - DNA, 15 bp, Homo sapiens
tttagacaacatatt

SEQ ID NO: 763536 - DNA, 15 bp, Homo sapiens
ttagacaacatatta

SEQ ID NO: 763537 - DNA, 15 bp, Homo sapiens
tagacaacatattaa

SEQ ID NO: 763538 - DNA, 15 bp, Homo sapiens
agacaacatattaaa

SEQ ID NO: 763539 - DNA, 15 bp, Homo sapiens
gacaacatattaaac

SEQ ID NO: 763540 - DNA, 15 bp, Homo sapiens
acaacatattaaact

SEQ ID NO: 763541 - DNA, 15 bp, Homo sapiens
caacatattaaactt

SEQ ID NO: 763542 - DNA, 15 bp, Homo sapiens
aacatattaaacttt

SEQ ID NO: 763543 - DNA, 15 bp, Homo sapiens
acatattaaactttg

SEQ ID NO: 763544 - DNA, 15 bp, Homo sapiens
catattaaactttgt

SEQ ID NO: 763545 - DNA, 15 bp, Homo sapiens
atattaaactttgtg

SEQ ID NO: 763546 - DNA, 15 bp, Homo sapiens
tattaaactttgtgt

SEQ ID NO: 763547 - DNA, 15 bp, Homo sapiens
attaaactttgtgtt

SEQ ID NO: 763548 - DNA, 15 bp, Homo sapiens
ttaaactttgtgttc

SEQ ID NO: 763549 - DNA, 15 bp, Homo sapiens
taaactttgtgttcc

SEQ ID NO: 763550 - DNA, 15 bp, Homo sapiens
aaactttgtgttcct

SEQ ID NO: 763551 - DNA, 15 bp, Homo sapiens
aactttgtgttcctt

SEQ ID NO: 763552 - DNA, 15 bp, Homo sapiens
actttgtgttccttc

SEQ ID NO: 763553 - DNA, 15 bp, Homo sapiens
ctttgtgttccttct

SEQ ID NO: 763554 - DNA, 15 bp, Homo sapiens
tttgtgttccttctc

SEQ ID NO: 763555 - DNA, 15 bp, Homo sapiens
ttgtgttccttctct

SEQ ID NO: 763556 - DNA, 15 bp, Homo sapiens
tgtgttccttctctg

SEQ ID NO: 763557 - DNA, 15 bp, Homo sapiens
gtgttccttctctga

SEQ ID NO: 763558 - DNA, 15 bp, Homo sapiens
tgttccttctctgag

SEQ ID NO: 763559 - DNA, 15 bp, Homo sapiens
gttccttctctgagc

SEQ ID NO: 763560 - DNA, 15 bp, Homo sapiens
ttccttctctgagct

SEQ ID NO: 763561 - DNA, 15 bp, Homo sapiens
tccttctctgagctg

SEQ ID NO: 763562 - DNA, 15 bp, Homo sapiens
ccttctctgagctga

SEQ ID NO: 763563 - DNA, 15 bp, Homo sapiens
cttctctgagctgac

SEQ ID NO: 763564 - DNA, 15 bp, Homo sapiens
ttctctgagctgact

SEQ ID NO: 763565 - DNA, 15 bp, Homo sapiens
tctctgagctgacta

SEQ ID NO: 763566 - DNA, 15 bp, Homo sapiens
ctctgagctgactag

SEQ ID NO: 763567 - DNA, 15 bp, Homo sapiens
tctgagctgactaga

SEQ ID NO: 763568 - DNA, 15 bp, Homo sapiens
ctgagctgactagag

SEQ ID NO: 763569 - DNA, 15 bp, Homo sapiens
tgagctgactagagg

SEQ ID NO: 763570 - DNA, 15 bp, Homo sapiens
gagctgactagagga

SEQ ID NO: 763571 - DNA, 15 bp, Homo sapiens
agctgactagaggag

SEQ ID NO: 763572 - DNA, 15 bp, Homo sapiens
gctgactagaggaga

SEQ ID NO: 763573 - DNA, 15 bp, Homo sapiens
ctgactagaggagag

SEQ ID NO: 763574 - DNA, 15 bp, Homo sapiens
tgactagaggagaga

SEQ ID NO: 763575 - DNA, 15 bp, Homo sapiens
gactagaggagagaa

SEQ ID NO: 763576 - DNA, 15 bp, Homo sapiens
actagaggagagaac

SEQ ID NO: 763577 - DNA, 15 bp, Homo sapiens
ctagaggagagaact

SEQ ID NO: 763578 - DNA, 15 bp, Homo sapiens
tagaggagagaactg

SEQ ID NO: 763579 - DNA, 15 bp, Homo sapiens
agaggagagaactgg

SEQ ID NO: 763580 - DNA, 15 bp, Homo sapiens
gaggagagaactgga

SEQ ID NO: 763581 - DNA, 15 bp, Homo sapiens
aggagagaactggaa

SEQ ID NO: 763582 - DNA, 15 bp, Homo sapiens
ggagagaactggaat

SEQ ID NO: 763583 - DNA, 15 bp, Homo sapiens
gagagaactggaatg

SEQ ID NO: 763584 - DNA, 15 bp, Homo sapiens
agagaactggaatga

SEQ ID NO: 763585 - DNA, 15 bp, Homo sapiens
gagaactggaatgaa

SEQ ID NO: 763586 - DNA, 15 bp, Homo sapiens
agaactggaatgaac

SEQ ID NO: 763587 - DNA, 15 bp, Homo sapiens
gaactggaatgaact

SEQ ID NO: 763588 - DNA, 15 bp, Homo sapiens
aactggaatgaacta

SEQ ID NO: 763589 - DNA, 15 bp, Homo sapiens
actggaatgaactaa

SEQ ID NO: 763590 - DNA, 15 bp, Homo sapiens
ctggaatgaactaaa

SEQ ID NO: 763591 - DNA, 15 bp, Homo sapiens
tggaatgaactaaac

SEQ ID NO: 763592 - DNA, 15 bp, Homo sapiens
ggaatgaactaaact

SEQ ID NO: 763593 - DNA, 15 bp, Homo sapiens
gaatgaactaaactt

SEQ ID NO: 763594 - DNA, 15 bp, Homo sapiens
aatgaactaaacttt

SEQ ID NO: 763595 - DNA, 15 bp, Homo sapiens
atgaactaaactttt

SEQ ID NO: 763596 - DNA, 15 bp, Homo sapiens
tgaactaaacttttg

SEQ ID NO: 763597 - DNA, 15 bp, Homo sapiens
gaactaaacttttgg

SEQ ID NO: 763598 - DNA, 15 bp, Homo sapiens
aactaaacttttgga

SEQ ID NO: 763599 - DNA, 15 bp, Homo sapiens
actaaacttttggaa

SEQ ID NO: 763600 - DNA, 15 bp, Homo sapiens
ctaaacttttggaat

SEQ ID NO: 763601 - DNA, 15 bp, Homo sapiens
taaacttttggaatc

SEQ ID NO: 763602 - DNA, 15 bp, Homo sapiens
aaacttttggaatca

SEQ ID NO: 763603 - DNA, 15 bp, Homo sapiens
aacttttggaatcat

SEQ ID NO: 763604 - DNA, 15 bp, Homo sapiens
acttttggaatcatt

SEQ ID NO: 763605 - DNA, 15 bp, Homo sapiens
cttttggaatcattt

SEQ ID NO: 763606 - DNA, 15 bp, Homo sapiens
ttttggaatcatttt

SEQ ID NO: 763607 - DNA, 15 bp, Homo sapiens
tttggaatcattttg

SEQ ID NO: 763608 - DNA, 15 bp, Homo sapiens
ttggaatcattttgg

SEQ ID NO: 763609 - DNA, 15 bp, Homo sapiens
tggaatcattttggt

SEQ ID NO: 763610 - DNA, 15 bp, Homo sapiens
ggaatcattttggtc

SEQ ID NO: 763611 - DNA, 15 bp, Homo sapiens
gaatcattttggtca

SEQ ID NO: 763612 - DNA, 15 bp, Homo sapiens
aatcattttggtcaa

SEQ ID NO: 763613 - DNA, 15 bp, Homo sapiens
atcattttggtcaaa

SEQ ID NO: 763614 - DNA, 15 bp, Homo sapiens
tcattttggtcaaag

SEQ ID NO: 763615 - DNA, 15 bp, Homo sapiens
cattttggtcaaaga

SEQ ID NO: 763616 - DNA, 15 bp, Homo sapiens
attttggtcaaagat

SEQ ID NO: 763617 - DNA, 15 bp, Homo sapiens
ttttggtcaaagatg

SEQ ID NO: 763618 - DNA, 15 bp, Homo sapiens
tttggtcaaagatgg

SEQ ID NO: 763619 - DNA, 15 bp, Homo sapiens
ttggtcaaagatggg

SEQ ID NO: 763620 - DNA, 15 bp, Homo sapiens
tggtcaaagatgggt

SEQ ID NO: 763621 - DNA, 15 bp, Homo sapiens
ggtcaaagatgggtc

SEQ ID NO: 763622 - DNA, 15 bp, Homo sapiens
gtcaaagatgggtct

SEQ ID NO: 763623 - DNA, 15 bp, Homo sapiens
tcaaagatgggtctt

SEQ ID NO: 763624 - DNA, 15 bp, Homo sapiens
caaagatgggtcttc

SEQ ID NO: 763625 - DNA, 15 bp, Homo sapiens
aaagatgggtcttca

SEQ ID NO: 763626 - DNA, 15 bp, Homo sapiens
aagatgggtcttcaa

SEQ ID NO: 763627 - DNA, 15 bp, Homo sapiens
agatgggtcttcaac

SEQ ID NO: 763628 - DNA, 15 bp, Homo sapiens
gatgggtcttcaaca

SEQ ID NO: 763629 - DNA, 15 bp, Homo sapiens
atgggtcttcaacaa

SEQ ID NO: 763630 - DNA, 15 bp, Homo sapiens
tgggtcttcaacaat

SEQ ID NO: 763631 - DNA, 15 bp, Homo sapiens
gggtcttcaacaatg

SEQ ID NO: 763632 - DNA, 15 bp, Homo sapiens
ggtcttcaacaatgt

SEQ ID NO: 763633 - DNA, 15 bp, Homo sapiens
gtcttcaacaatgtg

SEQ ID NO: 763634 - DNA, 15 bp, Homo sapiens
tcttcaacaatgtgg

SEQ ID NO: 763635 - DNA, 15 bp, Homo sapiens
cttcaacaatgtgga

SEQ ID NO: 763636 - DNA, 15 bp, Homo sapiens
ttcaacaatgtggat

SEQ ID NO: 763637 - DNA, 15 bp, Homo sapiens
tcaacaatgtggatc

SEQ ID NO: 763638 - DNA, 15 bp, Homo sapiens
caacaatgtggatcc

SEQ ID NO: 763639 - DNA, 15 bp, Homo sapiens
aacaatgtggatcca

SEQ ID NO: 763640 - DNA, 15 bp, Homo sapiens
acaatgtggatccaa

SEQ ID NO: 763641 - DNA, 15 bp, Homo sapiens
caatgtggatccaaa

SEQ ID NO: 763642 - DNA, 15 bp, Homo sapiens
aatgtggatccaaac

SEQ ID NO: 763643 - DNA, 15 bp, Homo sapiens
atgtggatccaaacg

SEQ ID NO: 763644 - DNA, 15 bp, Homo sapiens
tgtggatccaaacgt

SEQ ID NO: 763645 - DNA, 15 bp, Homo sapiens
gtggatccaaacgtt

SEQ ID NO: 763646 - DNA, 15 bp, Homo sapiens
tggatccaaacgttc

SEQ ID NO: 763647 - DNA, 15 bp, Homo sapiens
ggatccaaacgttct

SEQ ID NO: 763648 - DNA, 15 bp, Homo sapiens
gatccaaacgttcta

SEQ ID NO: 763649 - DNA, 15 bp, Homo sapiens
atccaaacgttctaa

SEQ ID NO: 763650 - DNA, 15 bp, Homo sapiens
tccaaacgttctaaa

SEQ ID NO: 763651 - DNA, 15 bp, Homo sapiens
ccaaacgttctaaag

SEQ ID NO: 763652 - DNA, 15 bp, Homo sapiens
caaacgttctaaagt

SEQ ID NO: 763653 - DNA, 15 bp, Homo sapiens
aaacgttctaaagtg

SEQ ID NO: 763654 - DNA, 15 bp, Homo sapiens
aacgttctaaagtgg

SEQ ID NO: 763655 - DNA, 15 bp, Homo sapiens
acgttctaaagtggt

SEQ ID NO: 763656 - DNA, 15 bp, Homo sapiens
cgttctaaagtggtt

SEQ ID NO: 763657 - DNA, 15 bp, Homo sapiens
gttctaaagtggtta

SEQ ID NO: 763658 - DNA, 15 bp, Homo sapiens
ttctaaagtggttag

SEQ ID NO: 763659 - DNA, 15 bp, Homo sapiens
tctaaagtggttaga

SEQ ID NO: 763660 - DNA, 15 bp, Homo sapiens
ctaaagtggttagaa

SEQ ID NO: 763661 - DNA, 15 bp, Homo sapiens
taaagtggttagaaa

SEQ ID NO: 763662 - DNA, 15 bp, Homo sapiens
aaagtggttagaaat

SEQ ID NO: 763663 - DNA, 15 bp, Homo sapiens
aagtggttagaaatg

SEQ ID NO: 763664 - DNA, 15 bp, Homo sapiens
agtggttagaaatgc

SEQ ID NO: 763665 - DNA, 15 bp, Homo sapiens
gtggttagaaatgcc

SEQ ID NO: 763666 - DNA, 15 bp, Homo sapiens
tggttagaaatgcct

SEQ ID NO: 763667 - DNA, 15 bp, Homo sapiens
ggttagaaatgcctc

SEQ ID NO: 763668 - DNA, 15 bp, Homo sapiens
gttagaaatgcctca

SEQ ID NO: 763669 - DNA, 15 bp, Homo sapiens
ttagaaatgcctcag

SEQ ID NO: 763670 - DNA, 15 bp, Homo sapiens
tagaaatgcctcagg

SEQ ID NO: 763671 - DNA, 15 bp, Homo sapiens
agaaatgcctcaggc

SEQ ID NO: 763672 - DNA, 15 bp, Homo sapiens
gaaatgcctcaggcc

SEQ ID NO: 763673 - DNA, 15 bp, Homo sapiens
aaatgcctcaggcct

SEQ ID NO: 763674 - DNA, 15 bp, Homo sapiens
aatgcctcaggcctc

SEQ ID NO: 763675 - DNA, 15 bp, Homo sapiens
atgcctcaggcctcc

SEQ ID NO: 763676 - DNA, 15 bp, Homo sapiens
tgcctcaggcctcca

SEQ ID NO: 763677 - DNA, 15 bp, Homo sapiens
gcctcaggcctccac

SEQ ID NO: 763678 - DNA, 15 bp, Homo sapiens
cctcaggcctccaca

SEQ ID NO: 763679 - DNA, 15 bp, Homo sapiens
ctcaggcctccacat

SEQ ID NO: 763680 - DNA, 15 bp, Homo sapiens
tcaggcctccacata

SEQ ID NO: 763681 - DNA, 15 bp, Homo sapiens
caggcctccacataa

SEQ ID NO: 763682 - DNA, 15 bp, Homo sapiens
aggcctccacataac

SEQ ID NO: 763683 - DNA, 15 bp, Homo sapiens
ggcctccacataaca

SEQ ID NO: 763684 - DNA, 15 bp, Homo sapiens
gcctccacataacag

SEQ ID NO: 763685 - DNA, 15 bp, Homo sapiens
cctccacataacaga

SEQ ID NO: 763686 - DNA, 15 bp, Homo sapiens
ctccacataacagaa

SEQ ID NO: 763687 - DNA, 15 bp, Homo sapiens
tccacataacagaaa

SEQ ID NO: 763688 - DNA, 15 bp, Homo sapiens
ccacataacagaaat

SEQ ID NO: 763689 - DNA, 15 bp, Homo sapiens
cacataacagaaatc

SEQ ID NO: 763690 - DNA, 15 bp, Homo sapiens
acataacagaaatct

SEQ ID NO: 763691 - DNA, 15 bp, Homo sapiens
cataacagaaatctt

SEQ ID NO: 763692 - DNA, 15 bp, Homo sapiens
ataacagaaatcttc

SEQ ID NO: 763693 - DNA, 15 bp, Homo sapiens
taacagaaatcttca

SEQ ID NO: 763694 - DNA, 15 bp, Homo sapiens
aacagaaatcttcat

SEQ ID NO: 763695 - DNA, 15 bp, Homo sapiens
acagaaatcttcata

SEQ ID NO: 763696 - DNA, 15 bp, Homo sapiens
cagaaatcttcatag

SEQ ID NO: 763697 - DNA, 15 bp, Homo sapiens
agaaatcttcatagg

SEQ ID NO: 763698 - DNA, 15 bp, Homo sapiens
gaaatcttcatagga

SEQ ID NO: 763699 - DNA, 15 bp, Homo sapiens
aaatcttcataggag

SEQ ID NO: 763700 - DNA, 15 bp, Homo sapiens
aatcttcataggagt

SEQ ID NO: 763701 - DNA, 15 bp, Homo sapiens
atcttcataggagtc

SEQ ID NO: 763702 - DNA, 15 bp, Homo sapiens
tcttcataggagtca

SEQ ID NO: 763703 - DNA, 15 bp, Homo sapiens
cttcataggagtcag

SEQ ID NO: 763704 - DNA, 15 bp, Homo sapiens
ttcataggagtcaga

SEQ ID NO: 763705 - DNA, 15 bp, Homo sapiens
tcataggagtcagag

SEQ ID NO: 763706 - DNA, 15 bp, Homo sapiens
cataggagtcagagg

SEQ ID NO: 763707 - DNA, 15 bp, Homo sapiens
ataggagtcagaggg

SEQ ID NO: 763708 - DNA, 15 bp, Homo sapiens
taggagtcagagggt

SEQ ID NO: 763709 - DNA, 15 bp, Homo sapiens
aggagtcagagggtg

SEQ ID NO: 763710 - DNA, 15 bp, Homo sapiens
ggagtcagagggtgt

SEQ ID NO: 763711 - DNA, 15 bp, Homo sapiens
gagtcagagggtgtg

SEQ ID NO: 763712 - DNA, 15 bp, Homo sapiens
agtcagagggtgtga

SEQ ID NO: 763713 - DNA, 15 bp, Homo sapiens
gtcagagggtgtgat

SEQ ID NO: 763714 - DNA, 15 bp, Homo sapiens
tcagagggtgtgatt

SEQ ID NO: 763715 - DNA, 15 bp, Homo sapiens
cagagggtgtgattt

SEQ ID NO: 763716 - DNA, 15 bp, Homo sapiens
agagggtgtgatttg

SEQ ID NO: 763717 - DNA, 15 bp, Homo sapiens
gagggtgtgatttgt

SEQ ID NO: 763718 - DNA, 15 bp, Homo sapiens
agggtgtgatttgtg

SEQ ID NO: 763719 - DNA, 15 bp, Homo sapiens
gggtgtgatttgtgt

SEQ ID NO: 763720 - DNA, 15 bp, Homo sapiens
ggtgtgatttgtgtc

SEQ ID NO: 763721 - DNA, 15 bp, Homo sapiens
gtgtgatttgtgtcc

SEQ ID NO: 763722 - DNA, 15 bp, Homo sapiens
tgtgatttgtgtccg

SEQ ID NO: 763723 - DNA, 15 bp, Homo sapiens
gtgatttgtgtccgg

SEQ ID NO: 763724 - DNA, 15 bp, Homo sapiens
tgatttgtgtccggt

SEQ ID NO: 763725 - DNA, 15 bp, Homo sapiens
gatttgtgtccggtt

SEQ ID NO: 763726 - DNA, 15 bp, Homo sapiens
atttgtgtccggttt

SEQ ID NO: 763727 - DNA, 15 bp, Homo sapiens
tttgtgtccggtttt

SEQ ID NO: 763728 - DNA, 15 bp, Homo sapiens
ttgtgtccggttttc

SEQ ID NO: 763729 - DNA, 15 bp, Homo sapiens
tgtgtccggttttcc

SEQ ID NO: 763730 - DNA, 15 bp, Homo sapiens
gtgtccggttttcct

SEQ ID NO: 763731 - DNA, 15 bp, Homo sapiens
tgtccggttttcctg

SEQ ID NO: 763732 - DNA, 15 bp, Homo sapiens
gtccggttttcctgg

SEQ ID NO: 763733 - DNA, 15 bp, Homo sapiens
tccggttttcctggc

SEQ ID NO: 763734 - DNA, 15 bp, Homo sapiens
ccggttttcctggca

SEQ ID NO: 763735 - DNA, 15 bp, Homo sapiens
cggttttcctggcaa

SEQ ID NO: 763736 - DNA, 15 bp, Homo sapiens
ggttttcctggcaag

SEQ ID NO: 763737 - DNA, 15 bp, Homo sapiens
gttttcctggcaagt

SEQ ID NO: 763738 - DNA, 15 bp, Homo sapiens
ttttcctggcaagtg

SEQ ID NO: 763739 - DNA, 15 bp, Homo sapiens
tttcctggcaagtga

SEQ ID NO: 763740 - DNA, 15 bp, Homo sapiens
ttcctggcaagtgag

SEQ ID NO: 763741 - DNA, 15 bp, Homo sapiens
tcctggcaagtgaga

SEQ ID NO: 763742 - DNA, 15 bp, Homo sapiens
cctggcaagtgagat

SEQ ID NO: 763743 - DNA, 15 bp, Homo sapiens
ctggcaagtgagatg

SEQ ID NO: 763744 - DNA, 15 bp, Homo sapiens
tggcaagtgagatgc

SEQ ID NO: 763745 - DNA, 15 bp, Homo sapiens
ggcaagtgagatgcc

SEQ ID NO: 763746 - DNA, 15 bp, Homo sapiens
gcaagtgagatgcct

SEQ ID NO: 763747 - DNA, 15 bp, Homo sapiens
caagtgagatgcctg

SEQ ID NO: 763748 - DNA, 15 bp, Homo sapiens
aagtgagatgcctga

SEQ ID NO: 763749 - DNA, 15 bp, Homo sapiens
agtgagatgcctgat

SEQ ID NO: 763750 - DNA, 15 bp, Homo sapiens
gtgagatgcctgatg

SEQ ID NO: 763751 - DNA, 15 bp, Homo sapiens
tgagatgcctgatgt

SEQ ID NO: 763752 - DNA, 15 bp, Homo sapiens
gagatgcctgatgtt

SEQ ID NO: 763753 - DNA, 15 bp, Homo sapiens
agatgcctgatgttt

SEQ ID NO: 763754 - DNA, 15 bp, Homo sapiens
gatgcctgatgtttt

SEQ ID NO: 763755 - DNA, 15 bp, Homo sapiens
atgcctgatgttttt

SEQ ID NO: 763756 - DNA, 15 bp, Homo sapiens
tgcctgatgttttta

SEQ ID NO: 763757 - DNA, 15 bp, Homo sapiens
gcctgatgtttttag

SEQ ID NO: 763758 - DNA, 15 bp, Homo sapiens
cctgatgtttttagc

SEQ ID NO: 763759 - DNA, 15 bp, Homo sapiens
ctgatgtttttagca

SEQ ID NO: 763760 - DNA, 15 bp, Homo sapiens
tgatgtttttagcat

SEQ ID NO: 763761 - DNA, 15 bp, Homo sapiens
gatgtttttagcata

SEQ ID NO: 763762 - DNA, 15 bp, Homo sapiens
atgtttttagcatac

SEQ ID NO: 763763 - DNA, 15 bp, Homo sapiens
tgtttttagcatact

SEQ ID NO: 763764 - DNA, 15 bp, Homo sapiens
gtttttagcatactg

SEQ ID NO: 763765 - DNA, 15 bp, Homo sapiens
tttttagcatactga

SEQ ID NO: 763766 - DNA, 15 bp, Homo sapiens
ttttagcatactgat

SEQ ID NO: 763767 - DNA, 15 bp, Homo sapiens
tttagcatactgatc

SEQ ID NO: 763768 - DNA, 15 bp, Homo sapiens
ttagcatactgatcc

SEQ ID NO: 763769 - DNA, 15 bp, Homo sapiens
tagcatactgatcct

SEQ ID NO: 763770 - DNA, 15 bp, Homo sapiens
agcatactgatcctg

SEQ ID NO: 763771 - DNA, 15 bp, Homo sapiens
gcatactgatcctgt

SEQ ID NO: 763772 - DNA, 15 bp, Homo sapiens
catactgatcctgtt

SEQ ID NO: 763773 - DNA, 15 bp, Homo sapiens
atactgatcctgtta

SEQ ID NO: 763774 - DNA, 15 bp, Homo sapiens
tactgatcctgttac

SEQ ID NO: 763775 - DNA, 15 bp, Homo sapiens
actgatcctgttaca

SEQ ID NO: 763776 - DNA, 15 bp, Homo sapiens
ctgatcctgttacag

SEQ ID NO: 763777 - DNA, 15 bp, Homo sapiens
tgatcctgttacagt

SEQ ID NO: 763778 - DNA, 15 bp, Homo sapiens
gatcctgttacagtt

SEQ ID NO: 763779 - DNA, 15 bp, Homo sapiens
atcctgttacagttg

SEQ ID NO: 763780 - DNA, 15 bp, Homo sapiens
tcctgttacagttgt

SEQ ID NO: 763781 - DNA, 15 bp, Homo sapiens
cctgttacagttgtc

SEQ ID NO: 763782 - DNA, 15 bp, Homo sapiens
ctgttacagttgtct

SEQ ID NO: 763783 - DNA, 15 bp, Homo sapiens
tgttacagttgtcta

SEQ ID NO: 763784 - DNA, 15 bp, Homo sapiens
gttacagttgtctaa

SEQ ID NO: 763785 - DNA, 15 bp, Homo sapiens
ttacagttgtctaaa

SEQ ID NO: 763786 - DNA, 15 bp, Homo sapiens
tacagttgtctaaaa

SEQ ID NO: 763787 - DNA, 15 bp, Homo sapiens
acagttgtctaaaaa

SEQ ID NO: 763788 - DNA, 15 bp, Homo sapiens
cagttgtctaaaaag

SEQ ID NO: 763789 - DNA, 15 bp, Homo sapiens
agttgtctaaaaagt

SEQ ID NO: 763790 - DNA, 15 bp, Homo sapiens
gttgtctaaaaagta

SEQ ID NO: 763791 - DNA, 15 bp, Homo sapiens
ttgtctaaaaagtag

SEQ ID NO: 763792 - DNA, 15 bp, Homo sapiens
tgtctaaaaagtaga

SEQ ID NO: 763793 - DNA, 15 bp, Homo sapiens
gtctaaaaagtagac

SEQ ID NO: 763794 - DNA, 15 bp, Homo sapiens
tctaaaaagtagact

SEQ ID NO: 763795 - DNA, 15 bp, Homo sapiens
ctaaaaagtagactt

SEQ ID NO: 763796 - DNA, 15 bp, Homo sapiens
taaaaagtagactta

SEQ ID NO: 763797 - DNA, 15 bp, Homo sapiens
aaaaagtagacttaa

SEQ ID NO: 763798 - DNA, 15 bp, Homo sapiens
aaaagtagacttaaa

SEQ ID NO: 763799 - DNA, 15 bp, Homo sapiens
aaagtagacttaaaa

SEQ ID NO: 763800 - DNA, 15 bp, Homo sapiens
aagtagacttaaaaa

SEQ ID NO: 763801 - DNA, 15 bp, Homo sapiens
agtagacttaaaaaa

SEQ ID NO: 763802 - DNA, 15 bp, Homo sapiens
gtagacttaaaaaaa

SEQ ID NO: 763803 - DNA, 15 bp, Homo sapiens
tagacttaaaaaaat

SEQ ID NO: 763804 - DNA, 15 bp, Homo sapiens
agacttaaaaaaatc

SEQ ID NO: 763805 - DNA, 15 bp, Homo sapiens
gacttaaaaaaatca

SEQ ID NO: 763806 - DNA, 15 bp, Homo sapiens
acttaaaaaaatcac

SEQ ID NO: 763807 - DNA, 15 bp, Homo sapiens
cttaaaaaaatcaca

SEQ ID NO: 763808 - DNA, 15 bp, Homo sapiens
ttaaaaaaatcacag

SEQ ID NO: 763809 - DNA, 15 bp, Homo sapiens
taaaaaaatcacagc

SEQ ID NO: 763810 - DNA, 15 bp, Homo sapiens
aaaaaaatcacagcc

SEQ ID NO: 763811 - DNA, 15 bp, Homo sapiens
aaaaaatcacagcct

SEQ ID NO: 763812 - DNA, 15 bp, Homo sapiens
aaaaatcacagcctt

SEQ ID NO: 763813 - DNA, 15 bp, Homo sapiens
aaaatcacagccttt

SEQ ID NO: 763814 - DNA, 15 bp, Homo sapiens
aaatcacagccttta

SEQ ID NO: 763815 - DNA, 15 bp, Homo sapiens
aatcacagcctttaa

SEQ ID NO: 763816 - DNA, 15 bp, Homo sapiens
atcacagcctttaac

SEQ ID NO: 763817 - DNA, 15 bp, Homo sapiens
tcacagcctttaact

SEQ ID NO: 763818 - DNA, 15 bp, Homo sapiens
cacagcctttaactc

SEQ ID NO: 763819 - DNA, 15 bp, Homo sapiens
acagcctttaactct

SEQ ID NO: 763820 - DNA, 15 bp, Homo sapiens
cagcctttaactctt

SEQ ID NO: 763821 - DNA, 15 bp, Homo sapiens
agcctttaactctta

SEQ ID NO: 763822 - DNA, 15 bp, Homo sapiens
gcctttaactcttag

SEQ ID NO: 763823 - DNA, 15 bp, Homo sapiens
cctttaactcttaga

SEQ ID NO: 763824 - DNA, 15 bp, Homo sapiens
ctttaactcttagaa

SEQ ID NO: 763825 - DNA, 15 bp, Homo sapiens
tttaactcttagaag

SEQ ID NO: 763826 - DNA, 15 bp, Homo sapiens
ttaactcttagaagc

SEQ ID NO: 763827 - DNA, 15 bp, Homo sapiens
taactcttagaagcc

SEQ ID NO: 763828 - DNA, 15 bp, Homo sapiens
aactcttagaagcct

SEQ ID NO: 763829 - DNA, 15 bp, Homo sapiens
actcttagaagcctg

SEQ ID NO: 763830 - DNA, 15 bp, Homo sapiens
ctcttagaagcctgt

SEQ ID NO: 763831 - DNA, 15 bp, Homo sapiens
tcttagaagcctgtg

SEQ ID NO: 763832 - DNA, 15 bp, Homo sapiens
cttagaagcctgtgc

SEQ ID NO: 763833 - DNA, 15 bp, Homo sapiens
ttagaagcctgtgcc

SEQ ID NO: 763834 - DNA, 15 bp, Homo sapiens
tagaagcctgtgcca

SEQ ID NO: 763835 - DNA, 15 bp, Homo sapiens
agaagcctgtgccaa

SEQ ID NO: 763836 - DNA, 15 bp, Homo sapiens
gaagcctgtgccaag

SEQ ID NO: 763837 - DNA, 15 bp, Homo sapiens
aagcctgtgccaaga

SEQ ID NO: 763838 - DNA, 15 bp, Homo sapiens
agcctgtgccaagaa

SEQ ID NO: 763839 - DNA, 15 bp, Homo sapiens
gcctgtgccaagaag

SEQ ID NO: 763840 - DNA, 15 bp, Homo sapiens
cctgtgccaagaagt

SEQ ID NO: 763841 - DNA, 15 bp, Homo sapiens
ctgtgccaagaagta

SEQ ID NO: 763842 - DNA, 15 bp, Homo sapiens
tgtgccaagaagtaa

SEQ ID NO: 763843 - DNA, 15 bp, Homo sapiens
gtgccaagaagtaaa

SEQ ID NO: 763844 - DNA, 15 bp, Homo sapiens
tgccaagaagtaaat

SEQ ID NO: 763845 - DNA, 15 bp, Homo sapiens
gccaagaagtaaata

SEQ ID NO: 763846 - DNA, 15 bp, Homo sapiens
ccaagaagtaaatat

SEQ ID NO: 763847 - DNA, 15 bp, Homo sapiens
caagaagtaaatata

SEQ ID NO: 763848 - DNA, 15 bp, Homo sapiens
aagaagtaaatatag

SEQ ID NO: 763849 - DNA, 15 bp, Homo sapiens
agaagtaaatatagg

SEQ ID NO: 763850 - DNA, 15 bp, Homo sapiens
gaagtaaatataggc

SEQ ID NO: 763851 - DNA, 15 bp, Homo sapiens
aagtaaatataggcc

SEQ ID NO: 763852 - DNA, 15 bp, Homo sapiens
agtaaatataggccc

SEQ ID NO: 763853 - DNA, 15 bp, Homo sapiens
gtaaatataggccct

SEQ ID NO: 763854 - DNA, 15 bp, Homo sapiens
taaatataggccctc

SEQ ID NO: 763855 - DNA, 15 bp, Homo sapiens
aaatataggccctca

SEQ ID NO: 763856 - DNA, 15 bp, Homo sapiens
aatataggccctcag

SEQ ID NO: 763857 - DNA, 15 bp, Homo sapiens
atataggccctcaga

SEQ ID NO: 763858 - DNA, 15 bp, Homo sapiens
tataggccctcagaa

SEQ ID NO: 763859 - DNA, 15 bp, Homo sapiens
ataggccctcagaaa

SEQ ID NO: 763860 - DNA, 15 bp, Homo sapiens
taggccctcagaaaa

SEQ ID NO: 763861 - DNA, 15 bp, Homo sapiens
aggccctcagaaaaa

SEQ ID NO: 763862 - DNA, 15 bp, Homo sapiens
ggccctcagaaaaat

SEQ ID NO: 763863 - DNA, 15 bp, Homo sapiens
gccctcagaaaaatg

SEQ ID NO: 763864 - DNA, 15 bp, Homo sapiens
ccctcagaaaaatgc

SEQ ID NO: 763865 - DNA, 15 bp, Homo sapiens
cctcagaaaaatgca

SEQ ID NO: 763866 - DNA, 15 bp, Homo sapiens
ctcagaaaaatgcat

SEQ ID NO: 763867 - DNA, 15 bp, Homo sapiens
tcagaaaaatgcatt

SEQ ID NO: 763868 - DNA, 15 bp, Homo sapiens
cagaaaaatgcattt

SEQ ID NO: 763869 - DNA, 15 bp, Homo sapiens
agaaaaatgcatttt

SEQ ID NO: 763870 - DNA, 15 bp, Homo sapiens
gaaaaatgcattttc

SEQ ID NO: 763871 - DNA, 15 bp, Homo sapiens
aaaaatgcattttca

SEQ ID NO: 763872 - DNA, 15 bp, Homo sapiens
aaaatgcattttcat

SEQ ID NO: 763873 - DNA, 15 bp, Homo sapiens
aaatgcattttcata

SEQ ID NO: 763874 - DNA, 15 bp, Homo sapiens
aatgcattttcatac

SEQ ID NO: 763875 - DNA, 15 bp, Homo sapiens
atgcattttcataca

SEQ ID NO: 763876 - DNA, 15 bp, Homo sapiens
tgcattttcatacac

SEQ ID NO: 763877 - DNA, 15 bp, Homo sapiens
gcattttcatacaca

SEQ ID NO: 763878 - DNA, 15 bp, Homo sapiens
cattttcatacacat

SEQ ID NO: 763879 - DNA, 15 bp, Homo sapiens
attttcatacacata

SEQ ID NO: 763880 - DNA, 15 bp, Homo sapiens
ttttcatacacatat

SEQ ID NO: 763881 - DNA, 15 bp, Homo sapiens
tttcatacacatata

SEQ ID NO: 763882 - DNA, 15 bp, Homo sapiens
ttcatacacatatac

SEQ ID NO: 763883 - DNA, 15 bp, Homo sapiens
tcatacacatataca

SEQ ID NO: 763884 - DNA, 15 bp, Homo sapiens
catacacatatacac

SEQ ID NO: 763885 - DNA, 15 bp, Homo sapiens
atacacatatacaca

SEQ ID NO: 763886 - DNA, 15 bp, Homo sapiens
tacacatatacacac

SEQ ID NO: 763887 - DNA, 15 bp, Homo sapiens
acacatatacacacc

SEQ ID NO: 763888 - DNA, 15 bp, Homo sapiens
cacatatacacaccc

SEQ ID NO: 763889 - DNA, 15 bp, Homo sapiens
acatatacacaccct

SEQ ID NO: 763890 - DNA, 15 bp, Homo sapiens
catatacacaccctc

SEQ ID NO: 763891 - DNA, 15 bp, Homo sapiens
atatacacaccctct

SEQ ID NO: 763892 - DNA, 15 bp, Homo sapiens
tatacacaccctctc

SEQ ID NO: 763893 - DNA, 15 bp, Homo sapiens
atacacaccctctca

SEQ ID NO: 763894 - DNA, 15 bp, Homo sapiens
tacacaccctctcat

SEQ ID NO: 763895 - DNA, 15 bp, Homo sapiens
acacaccctctcatg

SEQ ID NO: 763896 - DNA, 15 bp, Homo sapiens
cacaccctctcatgt

SEQ ID NO: 763897 - DNA, 15 bp, Homo sapiens
acaccctctcatgta

SEQ ID NO: 763898 - DNA, 15 bp, Homo sapiens
caccctctcatgtat

SEQ ID NO: 763899 - DNA, 15 bp, Homo sapiens
accctctcatgtatg

SEQ ID NO: 763900 - DNA, 15 bp, Homo sapiens
ccctctcatgtatga

SEQ ID NO: 763901 - DNA, 15 bp, Homo sapiens
cctctcatgtatgag

SEQ ID NO: 763902 - DNA, 15 bp, Homo sapiens
ctctcatgtatgagc

SEQ ID NO: 763903 - DNA, 15 bp, Homo sapiens
tctcatgtatgagcc

SEQ ID NO: 763904 - DNA, 15 bp, Homo sapiens
ctcatgtatgagcca

SEQ ID NO: 763905 - DNA, 15 bp, Homo sapiens
tcatgtatgagccaa

SEQ ID NO: 763906 - DNA, 15 bp, Homo sapiens
catgtatgagccaac

SEQ ID NO: 763907 - DNA, 15 bp, Homo sapiens
atgtatgagccaaca

SEQ ID NO: 763908 - DNA, 15 bp, Homo sapiens
tgtatgagccaacaa

SEQ ID NO: 763909 - DNA, 15 bp, Homo sapiens
gtatgagccaacaaa

SEQ ID NO: 763910 - DNA, 15 bp, Homo sapiens
tatgagccaacaaaa

SEQ ID NO: 763911 - DNA, 15 bp, Homo sapiens
atgagccaacaaaag

SEQ ID NO: 763912 - DNA, 15 bp, Homo sapiens
tgagccaacaaaagg

SEQ ID NO: 763913 - DNA, 15 bp, Homo sapiens
gagccaacaaaagga

SEQ ID NO: 763914 - DNA, 15 bp, Homo sapiens
agccaacaaaaggag

SEQ ID NO: 763915 - DNA, 15 bp, Homo sapiens
gccaacaaaaggagc

SEQ ID NO: 763916 - DNA, 15 bp, Homo sapiens
ccaacaaaaggagca

SEQ ID NO: 763917 - DNA, 15 bp, Homo sapiens
caacaaaaggagcaa

SEQ ID NO: 763918 - DNA, 15 bp, Homo sapiens
aacaaaaggagcaac

SEQ ID NO: 763919 - DNA, 15 bp, Homo sapiens
acaaaaggagcaaca

SEQ ID NO: 763920 - DNA, 15 bp, Homo sapiens
caaaaggagcaacat

SEQ ID NO: 763921 - DNA, 15 bp, Homo sapiens
aaaaggagcaacata

SEQ ID NO: 763922 - DNA, 15 bp, Homo sapiens
aaaggagcaacataa

SEQ ID NO: 763923 - DNA, 15 bp, Homo sapiens
aaggagcaacataaa

SEQ ID NO: 763924 - DNA, 15 bp, Homo sapiens
aggagcaacataaat

SEQ ID NO: 763925 - DNA, 15 bp, Homo sapiens
ggagcaacataaatg

SEQ ID NO: 763926 - DNA, 15 bp, Homo sapiens
gagcaacataaatga

SEQ ID NO: 763927 - DNA, 15 bp, Homo sapiens
agcaacataaatgag

SEQ ID NO: 763928 - DNA, 15 bp, Homo sapiens
gcaacataaatgagt

SEQ ID NO: 763929 - DNA, 15 bp, Homo sapiens
caacataaatgagtc

SEQ ID NO: 763930 - DNA, 15 bp, Homo sapiens
aacataaatgagtcg

SEQ ID NO: 763931 - DNA, 15 bp, Homo sapiens
acataaatgagtcgg

SEQ ID NO: 763932 - DNA, 15 bp, Homo sapiens
cataaatgagtcggc

SEQ ID NO: 763933 - DNA, 15 bp, Homo sapiens
ataaatgagtcggca

SEQ ID NO: 763934 - DNA, 15 bp, Homo sapiens
taaatgagtcggcaa

SEQ ID NO: 763935 - DNA, 15 bp, Homo sapiens
aaatgagtcggcaaa

SEQ ID NO: 763936 - DNA, 15 bp, Homo sapiens
aatgagtcggcaaag

SEQ ID NO: 763937 - DNA, 15 bp, Homo sapiens
atgagtcggcaaagc

SEQ ID NO: 763938 - DNA, 15 bp, Homo sapiens
tgagtcggcaaagca

SEQ ID NO: 763939 - DNA, 15 bp, Homo sapiens
gagtcggcaaagcag

SEQ ID NO: 763940 - DNA, 15 bp, Homo sapiens
agtcggcaaagcagt

SEQ ID NO: 763941 - DNA, 15 bp, Homo sapiens
gtcggcaaagcagtt

SEQ ID NO: 763942 - DNA, 15 bp, Homo sapiens
tcggcaaagcagtta

SEQ ID NO: 763943 - DNA, 15 bp, Homo sapiens
cggcaaagcagttat

SEQ ID NO: 763944 - DNA, 15 bp, Homo sapiens
ggcaaagcagttatt

SEQ ID NO: 763945 - DNA, 15 bp, Homo sapiens
gcaaagcagttatta

SEQ ID NO: 763946 - DNA, 15 bp, Homo sapiens
caaagcagttattac

SEQ ID NO: 763947 - DNA, 15 bp, Homo sapiens
aaagcagttattaca

SEQ ID NO: 763948 - DNA, 15 bp, Homo sapiens
aagcagttattacat

SEQ ID NO: 763949 - DNA, 15 bp, Homo sapiens
agcagttattacatg

SEQ ID NO: 763950 - DNA, 15 bp, Homo sapiens
gcagttattacatgt

SEQ ID NO: 763951 - DNA, 15 bp, Homo sapiens
cagttattacatgta

SEQ ID NO: 763952 - DNA, 15 bp, Homo sapiens
agttattacatgtag

SEQ ID NO: 763953 - DNA, 15 bp, Homo sapiens
gttattacatgtaga

SEQ ID NO: 763954 - DNA, 15 bp, Homo sapiens
ttattacatgtagac

SEQ ID NO: 763955 - DNA, 15 bp, Homo sapiens
tattacatgtagacc

SEQ ID NO: 763956 - DNA, 15 bp, Homo sapiens
attacatgtagacca

SEQ ID NO: 763957 - DNA, 15 bp, Homo sapiens
ttacatgtagaccat

SEQ ID NO: 763958 - DNA, 15 bp, Homo sapiens
tacatgtagaccatg

SEQ ID NO: 763959 - DNA, 15 bp, Homo sapiens
acatgtagaccatgg

SEQ ID NO: 763960 - DNA, 15 bp, Homo sapiens
catgtagaccatggc

SEQ ID NO: 763961 - DNA, 15 bp, Homo sapiens
atgtagaccatggcc

SEQ ID NO: 763962 - DNA, 15 bp, Homo sapiens
tgtagaccatggcct

SEQ ID NO: 763963 - DNA, 15 bp, Homo sapiens
gtagaccatggcctc

SEQ ID NO: 763964 - DNA, 15 bp, Homo sapiens
tagaccatggcctct

SEQ ID NO: 763965 - DNA, 15 bp, Homo sapiens
agaccatggcctctg

SEQ ID NO: 763966 - DNA, 15 bp, Homo sapiens
gaccatggcctctgt

SEQ ID NO: 763967 - DNA, 15 bp, Homo sapiens
accatggcctctgtt

SEQ ID NO: 763968 - DNA, 15 bp, Homo sapiens
ccatggcctctgttt

SEQ ID NO: 763969 - DNA, 15 bp, Homo sapiens
catggcctctgtttg

SEQ ID NO: 763970 - DNA, 15 bp, Homo sapiens
atggcctctgtttga

SEQ ID NO: 763971 - DNA, 15 bp, Homo sapiens
tggcctctgtttgaa

SEQ ID NO: 763972 - DNA, 15 bp, Homo sapiens
ggcctctgtttgaaa

SEQ ID NO: 763973 - DNA, 15 bp, Homo sapiens
gcctctgtttgaaaa

SEQ ID NO: 763974 - DNA, 15 bp, Homo sapiens
cctctgtttgaaaat

SEQ ID NO: 763975 - DNA, 15 bp, Homo sapiens
ctctgtttgaaaata

SEQ ID NO: 763976 - DNA, 15 bp, Homo sapiens
tctgtttgaaaatat

SEQ ID NO: 763977 - DNA, 15 bp, Homo sapiens
ctgtttgaaaatatc

SEQ ID NO: 763978 - DNA, 15 bp, Homo sapiens
tgtttgaaaatatct

SEQ ID NO: 763979 - DNA, 15 bp, Homo sapiens
gtttgaaaatatctc

SEQ ID NO: 763980 - DNA, 15 bp, Homo sapiens
tttgaaaatatctct

SEQ ID NO: 763981 - DNA, 15 bp, Homo sapiens
ttgaaaatatctcta

SEQ ID NO: 763982 - DNA, 15 bp, Homo sapiens
tgaaaatatctctaa

SEQ ID NO: 763983 - DNA, 15 bp, Homo sapiens
gaaaatatctctaac

SEQ ID NO: 763984 - DNA, 15 bp, Homo sapiens
aaaatatctctaacc

SEQ ID NO: 763985 - DNA, 15 bp, Homo sapiens
aaatatctctaaccc

SEQ ID NO: 763986 - DNA, 15 bp, Homo sapiens
aatatctctaaccca

SEQ ID NO: 763987 - DNA, 15 bp, Homo sapiens
atatctctaacccag

SEQ ID NO: 763988 - DNA, 15 bp, Homo sapiens
tatctctaacccagg

SEQ ID NO: 763989 - DNA, 15 bp, Homo sapiens
atctctaacccaggg

SEQ ID NO: 763990 - DNA, 15 bp, Homo sapiens
tctctaacccagggg

SEQ ID NO: 763991 - DNA, 15 bp, Homo sapiens
ctctaacccaggggc

SEQ ID NO: 763992 - DNA, 15 bp, Homo sapiens
tctaacccaggggcc

SEQ ID NO: 763993 - DNA, 15 bp, Homo sapiens
ctaacccaggggcca

SEQ ID NO: 763994 - DNA, 15 bp, Homo sapiens
taacccaggggccat

SEQ ID NO: 763995 - DNA, 15 bp, Homo sapiens
aacccaggggccatt

SEQ ID NO: 763996 - DNA, 15 bp, Homo sapiens
acccaggggccattt

SEQ ID NO: 763997 - DNA, 15 bp, Homo sapiens
cccaggggccatttt

SEQ ID NO: 763998 - DNA, 15 bp, Homo sapiens
ccaggggccattttc

SEQ ID NO: 763999 - DNA, 15 bp, Homo sapiens
caggggccattttct

SEQ ID NO: 764000 - DNA, 15 bp, Homo sapiens
aggggccattttctc

SEQ ID NO: 764001 - DNA, 15 bp, Homo sapiens
ggggccattttctca

SEQ ID NO: 764002 - DNA, 15 bp, Homo sapiens
gggccattttctcat

SEQ ID NO: 764003 - DNA, 15 bp, Homo sapiens
ggccattttctcatt

SEQ ID NO: 764004 - DNA, 15 bp, Homo sapiens
gccattttctcattc

SEQ ID NO: 764005 - DNA, 15 bp, Homo sapiens
ccattttctcattct

SEQ ID NO: 764006 - DNA, 15 bp, Homo sapiens
cattttctcattctc

SEQ ID NO: 764007 - DNA, 15 bp, Homo sapiens
attttctcattctct

SEQ ID NO: 764008 - DNA, 15 bp, Homo sapiens
ttttctcattctctt

SEQ ID NO: 764009 - DNA, 15 bp, Homo sapiens
tttctcattctcttt

SEQ ID NO: 764010 - DNA, 15 bp, Homo sapiens
ttctcattctctttt

SEQ ID NO: 764011 - DNA, 15 bp, Homo sapiens
tctcattctcttttc

SEQ ID NO: 764012 - DNA, 15 bp, Homo sapiens
ctcattctcttttcc

SEQ ID NO: 764013 - DNA, 15 bp, Homo sapiens
tcattctcttttccc

SEQ ID NO: 764014 - DNA, 15 bp, Homo sapiens
cattctcttttccct

SEQ ID NO: 764015 - DNA, 15 bp, Homo sapiens
attctcttttccctc

SEQ ID NO: 764016 - DNA, 15 bp, Homo sapiens
ttctcttttccctct

SEQ ID NO: 764017 - DNA, 15 bp, Homo sapiens
tctcttttccctctt

SEQ ID NO: 764018 - DNA, 15 bp, Homo sapiens
ctcttttccctcttg

SEQ ID NO: 764019 - DNA, 15 bp, Homo sapiens
tcttttccctcttgc

SEQ ID NO: 764020 - DNA, 15 bp, Homo sapiens
cttttccctcttgcc

SEQ ID NO: 764021 - DNA, 15 bp, Homo sapiens
ttttccctcttgcct

SEQ ID NO: 764022 - DNA, 15 bp, Homo sapiens
tttccctcttgcctt

SEQ ID NO: 764023 - DNA, 15 bp, Homo sapiens
ttccctcttgccttt

SEQ ID NO: 764024 - DNA, 15 bp, Homo sapiens
tccctcttgcctttc

SEQ ID NO: 764025 - DNA, 15 bp, Homo sapiens
ccctcttgcctttct

SEQ ID NO: 764026 - DNA, 15 bp, Homo sapiens
cctcttgcctttctg

SEQ ID NO: 764027 - DNA, 15 bp, Homo sapiens
ctcttgcctttctga

SEQ ID NO: 764028 - DNA, 15 bp, Homo sapiens
tcttgcctttctgac

SEQ ID NO: 764029 - DNA, 15 bp, Homo sapiens
cttgcctttctgacg

SEQ ID NO: 764030 - DNA, 15 bp, Homo sapiens
ttgcctttctgacgg

SEQ ID NO: 764031 - DNA, 15 bp, Homo sapiens
tgcctttctgacggc

SEQ ID NO: 764032 - DNA, 15 bp, Homo sapiens
gcctttctgacggcc

SEQ ID NO: 764033 - DNA, 15 bp, Homo sapiens
cctttctgacggcca

SEQ ID NO: 764034 - DNA, 15 bp, Homo sapiens
ctttctgacggccac

SEQ ID NO: 764035 - DNA, 15 bp, Homo sapiens
tttctgacggccaca

SEQ ID NO: 764036 - DNA, 15 bp, Homo sapiens
ttctgacggccacat

SEQ ID NO: 764037 - DNA, 15 bp, Homo sapiens
tctgacggccacatc

SEQ ID NO: 764038 - DNA, 15 bp, Homo sapiens
ctgacggccacatcc

SEQ ID NO: 764039 - DNA, 15 bp, Homo sapiens
tgacggccacatcca

SEQ ID NO: 764040 - DNA, 15 bp, Homo sapiens
gacggccacatccat

SEQ ID NO: 764041 - DNA, 15 bp, Homo sapiens
acggccacatccatc

SEQ ID NO: 764042 - DNA, 15 bp, Homo sapiens
cggccacatccatcc

SEQ ID NO: 764043 - DNA, 15 bp, Homo sapiens
ggccacatccatcca

SEQ ID NO: 764044 - DNA, 15 bp, Homo sapiens
gccacatccatccac

SEQ ID NO: 764045 - DNA, 15 bp, Homo sapiens
ccacatccatccact

SEQ ID NO: 764046 - DNA, 15 bp, Homo sapiens
cacatccatccacta

SEQ ID NO: 764047 - DNA, 15 bp, Homo sapiens
acatccatccactat

SEQ ID NO: 764048 - DNA, 15 bp, Homo sapiens
catccatccactatt

SEQ ID NO: 764049 - DNA, 15 bp, Homo sapiens
atccatccactattt

SEQ ID NO: 764050 - DNA, 15 bp, Homo sapiens
tccatccactatttg

SEQ ID NO: 764051 - DNA, 15 bp, Homo sapiens
ccatccactatttga

SEQ ID NO: 764052 - DNA, 15 bp, Homo sapiens
catccactatttgag

SEQ ID NO: 764053 - DNA, 15 bp, Homo sapiens
atccactatttgagt

SEQ ID NO: 764054 - DNA, 15 bp, Homo sapiens
tccactatttgagtg

SEQ ID NO: 764055 - DNA, 15 bp, Homo sapiens
ccactatttgagtga

SEQ ID NO: 764056 - DNA, 15 bp, Homo sapiens
cactatttgagtgac

SEQ ID NO: 764057 - DNA, 15 bp, Homo sapiens
actatttgagtgact

SEQ ID NO: 764058 - DNA, 15 bp, Homo sapiens
ctatttgagtgacta

SEQ ID NO: 764059 - DNA, 15 bp, Homo sapiens
tatttgagtgactat

SEQ ID NO: 764060 - DNA, 15 bp, Homo sapiens
atttgagtgactatt

SEQ ID NO: 764061 - DNA, 15 bp, Homo sapiens
tttgagtgactattt

SEQ ID NO: 764062 - DNA, 15 bp, Homo sapiens
ttgagtgactattta

SEQ ID NO: 764063 - DNA, 15 bp, Homo sapiens
tgagtgactatttat

SEQ ID NO: 764064 - DNA, 15 bp, Homo sapiens
gagtgactatttatg

SEQ ID NO: 764065 - DNA, 15 bp, Homo sapiens
agtgactatttatgt

SEQ ID NO: 764066 - DNA, 15 bp, Homo sapiens
gtgactatttatgtg

SEQ ID NO: 764067 - DNA, 15 bp, Homo sapiens
tgactatttatgtga

SEQ ID NO: 764068 - DNA, 15 bp, Homo sapiens
gactatttatgtgac

SEQ ID NO: 764069 - DNA, 15 bp, Homo sapiens
actatttatgtgaca

SEQ ID NO: 764070 - DNA, 15 bp, Homo sapiens
ctatttatgtgacaa

SEQ ID NO: 764071 - DNA, 15 bp, Homo sapiens
tatttatgtgacaac

SEQ ID NO: 764072 - DNA, 15 bp, Homo sapiens
atttatgtgacaaca

SEQ ID NO: 764073 - DNA, 15 bp, Homo sapiens
tttatgtgacaacat

SEQ ID NO: 764074 - DNA, 15 bp, Homo sapiens
ttatgtgacaacatc

SEQ ID NO: 764075 - DNA, 15 bp, Homo sapiens
tatgtgacaacatct

SEQ ID NO: 764076 - DNA, 15 bp, Homo sapiens
atgtgacaacatctc

SEQ ID NO: 764077 - DNA, 15 bp, Homo sapiens
tgtgacaacatctca

SEQ ID NO: 764078 - DNA, 15 bp, Homo sapiens
gtgacaacatctcat

SEQ ID NO: 764079 - DNA, 15 bp, Homo sapiens
tgacaacatctcata

SEQ ID NO: 764080 - DNA, 15 bp, Homo sapiens
gacaacatctcatat

SEQ ID NO: 764081 - DNA, 15 bp, Homo sapiens
acaacatctcatatg

SEQ ID NO: 764082 - DNA, 15 bp, Homo sapiens
caacatctcatatgc

SEQ ID NO: 764083 - DNA, 15 bp, Homo sapiens
aacatctcatatgca

SEQ ID NO: 764084 - DNA, 15 bp, Homo sapiens
acatctcatatgcaa

SEQ ID NO: 764085 - DNA, 15 bp, Homo sapiens
catctcatatgcaat

SEQ ID NO: 764086 - DNA, 15 bp, Homo sapiens
atctcatatgcaatt

SEQ ID NO: 764087 - DNA, 15 bp, Homo sapiens
tctcatatgcaattt

SEQ ID NO: 764088 - DNA, 15 bp, Homo sapiens
ctcatatgcaattta

SEQ ID NO: 764089 - DNA, 15 bp, Homo sapiens
tcatatgcaatttaa

SEQ ID NO: 764090 - DNA, 15 bp, Homo sapiens
catatgcaatttaaa

SEQ ID NO: 764091 - DNA, 15 bp, Homo sapiens
atatgcaatttaaaa

SEQ ID NO: 764092 - DNA, 15 bp, Homo sapiens
tatgcaatttaaaat

SEQ ID NO: 764093 - DNA, 15 bp, Homo sapiens
atgcaatttaaaata

SEQ ID NO: 764094 - DNA, 15 bp, Homo sapiens
tgcaatttaaaatag

SEQ ID NO: 764095 - DNA, 15 bp, Homo sapiens
gcaatttaaaataga

SEQ ID NO: 764096 - DNA, 15 bp, Homo sapiens
caatttaaaatagat

SEQ ID NO: 764097 - DNA, 15 bp, Homo sapiens
aatttaaaatagatc

SEQ ID NO: 764098 - DNA, 15 bp, Homo sapiens
atttaaaatagatct

SEQ ID NO: 764099 - DNA, 15 bp, Homo sapiens
tttaaaatagatctt

SEQ ID NO: 764100 - DNA, 15 bp, Homo sapiens
ttaaaatagatctta

SEQ ID NO: 764101 - DNA, 15 bp, Homo sapiens
taaaatagatcttat

SEQ ID NO: 764102 - DNA, 15 bp, Homo sapiens
aaaatagatcttatg

SEQ ID NO: 764103 - DNA, 15 bp, Homo sapiens
aaatagatcttatgt

SEQ ID NO: 764104 - DNA, 15 bp, Homo sapiens
aatagatcttatgta

SEQ ID NO: 764105 - DNA, 15 bp, Homo sapiens
atagatcttatgtaa

SEQ ID NO: 764106 - DNA, 15 bp, Homo sapiens
tagatcttatgtaag

SEQ ID NO: 764107 - DNA, 15 bp, Homo sapiens
agatcttatgtaaga

SEQ ID NO: 764108 - DNA, 15 bp, Homo sapiens
gatcttatgtaagat

SEQ ID NO: 764109 - DNA, 15 bp, Homo sapiens
atcttatgtaagata

SEQ ID NO: 764110 - DNA, 15 bp, Homo sapiens
tcttatgtaagataa

SEQ ID NO: 764111 - DNA, 15 bp, Homo sapiens
cttatgtaagataat

SEQ ID NO: 764112 - DNA, 15 bp, Homo sapiens
ttatgtaagataata

SEQ ID NO: 764113 - DNA, 15 bp, Homo sapiens
tatgtaagataatat

SEQ ID NO: 764114 - DNA, 15 bp, Homo sapiens
atgtaagataatatt

SEQ ID NO: 764115 - DNA, 15 bp, Homo sapiens
tgtaagataatattc

SEQ ID NO: 764116 - DNA, 15 bp, Homo sapiens
gtaagataatattct

SEQ ID NO: 764117 - DNA, 15 bp, Homo sapiens
taagataatattctg

SEQ ID NO: 764118 - DNA, 15 bp, Homo sapiens
aagataatattctgg

SEQ ID NO: 764119 - DNA, 15 bp, Homo sapiens
agataatattctggc

SEQ ID NO: 764120 - DNA, 15 bp, Homo sapiens
gataatattctggct

SEQ ID NO: 764121 - DNA, 15 bp, Homo sapiens
ataatattctggctt

SEQ ID NO: 764122 - DNA, 15 bp, Homo sapiens
taatattctggcttt

SEQ ID NO: 764123 - DNA, 15 bp, Homo sapiens
aatattctggcttta

SEQ ID NO: 764124 - DNA, 15 bp, Homo sapiens
atattctggctttaa

SEQ ID NO: 764125 - DNA, 15 bp, Homo sapiens
tattctggctttaag

SEQ ID NO: 764126 - DNA, 15 bp, Homo sapiens
attctggctttaagg

SEQ ID NO: 764127 - DNA, 15 bp, Homo sapiens
ttctggctttaaggt

SEQ ID NO: 764128 - DNA, 15 bp, Homo sapiens
tctggctttaaggtt

SEQ ID NO: 764129 - DNA, 15 bp, Homo sapiens
ctggctttaaggttc

SEQ ID NO: 764130 - DNA, 15 bp, Homo sapiens
tggctttaaggttcc

SEQ ID NO: 764131 - DNA, 15 bp, Homo sapiens
ggctttaaggttcca

SEQ ID NO: 764132 - DNA, 15 bp, Homo sapiens
gctttaaggttccac

SEQ ID NO: 764133 - DNA, 15 bp, Homo sapiens
ctttaaggttccacc

SEQ ID NO: 764134 - DNA, 15 bp, Homo sapiens
tttaaggttccaccc

SEQ ID NO: 764135 - DNA, 15 bp, Homo sapiens
ttaaggttccaccct

SEQ ID NO: 764136 - DNA, 15 bp, Homo sapiens
taaggttccaccctt

SEQ ID NO: 764137 - DNA, 15 bp, Homo sapiens
aaggttccacccttt

SEQ ID NO: 764138 - DNA, 15 bp, Homo sapiens
aggttccaccctttt

SEQ ID NO: 764139 - DNA, 15 bp, Homo sapiens
ggttccacccttttg

SEQ ID NO: 764140 - DNA, 15 bp, Homo sapiens
gttccacccttttga

SEQ ID NO: 764141 - DNA, 15 bp, Homo sapiens
ttccacccttttgaa

SEQ ID NO: 764142 - DNA, 15 bp, Homo sapiens
tccacccttttgaac

SEQ ID NO: 764143 - DNA, 15 bp, Homo sapiens
ccacccttttgaact

SEQ ID NO: 764144 - DNA, 15 bp, Homo sapiens
cacccttttgaactg

SEQ ID NO: 764145 - DNA, 15 bp, Homo sapiens
acccttttgaactgt

SEQ ID NO: 764146 - DNA, 15 bp, Homo sapiens
cccttttgaactgta

SEQ ID NO: 764147 - DNA, 15 bp, Homo sapiens
ccttttgaactgtat

SEQ ID NO: 764148 - DNA, 15 bp, Homo sapiens
cttttgaactgtatt

SEQ ID NO: 764149 - DNA, 15 bp, Homo sapiens
ttttgaactgtatta

SEQ ID NO: 764150 - DNA, 15 bp, Homo sapiens
tttgaactgtattat

SEQ ID NO: 764151 - DNA, 15 bp, Homo sapiens
ttgaactgtattatc

SEQ ID NO: 764152 - DNA, 15 bp, Homo sapiens
tgaactgtattatcc

SEQ ID NO: 764153 - DNA, 15 bp, Homo sapiens
gaactgtattatcct

SEQ ID NO: 764154 - DNA, 15 bp, Homo sapiens
aactgtattatcctt

SEQ ID NO: 764155 - DNA, 15 bp, Homo sapiens
actgtattatccttt

SEQ ID NO: 764156 - DNA, 15 bp, Homo sapiens
ctgtattatcctttc

SEQ ID NO: 764157 - DNA, 15 bp, Homo sapiens
tgtattatcctttcc

SEQ ID NO: 764158 - DNA, 15 bp, Homo sapiens
gtattatcctttccc

SEQ ID NO: 764159 - DNA, 15 bp, Homo sapiens
tattatcctttccca

SEQ ID NO: 764160 - DNA, 15 bp, Homo sapiens
attatcctttcccac

SEQ ID NO: 764161 - DNA, 15 bp, Homo sapiens
ttatcctttcccact

SEQ ID NO: 764162 - DNA, 15 bp, Homo sapiens
tatcctttcccactt

SEQ ID NO: 764163 - DNA, 15 bp, Homo sapiens
atcctttcccacttc

SEQ ID NO: 764164 - DNA, 15 bp, Homo sapiens
tcctttcccacttcc

SEQ ID NO: 764165 - DNA, 15 bp, Homo sapiens
cctttcccacttcct

SEQ ID NO: 764166 - DNA, 15 bp, Homo sapiens
ctttcccacttccta

SEQ ID NO: 764167 - DNA, 15 bp, Homo sapiens
tttcccacttcctac

SEQ ID NO: 764168 - DNA, 15 bp, Homo sapiens
ttcccacttcctaca

SEQ ID NO: 764169 - DNA, 15 bp, Homo sapiens
tcccacttcctacag

SEQ ID NO: 764170 - DNA, 15 bp, Homo sapiens
cccacttcctacagt

SEQ ID NO: 764171 - DNA, 15 bp, Homo sapiens
ccacttcctacagtt

SEQ ID NO: 764172 - DNA, 15 bp, Homo sapiens
cacttcctacagtta

SEQ ID NO: 764173 - DNA, 15 bp, Homo sapiens
acttcctacagttac

SEQ ID NO: 764174 - DNA, 15 bp, Homo sapiens
cttcctacagttaca

SEQ ID NO: 764175 - DNA, 15 bp, Homo sapiens
ttcctacagttacat

SEQ ID NO: 764176 - DNA, 15 bp, Homo sapiens
tcctacagttacatt

SEQ ID NO: 764177 - DNA, 15 bp, Homo sapiens
cctacagttacattt

SEQ ID NO: 764178 - DNA, 15 bp, Homo sapiens
ctacagttacatttc

SEQ ID NO: 764179 - DNA, 15 bp, Homo sapiens
tacagttacatttca

SEQ ID NO: 764180 - DNA, 15 bp, Homo sapiens
acagttacatttcaa

SEQ ID NO: 764181 - DNA, 15 bp, Homo sapiens
cagttacatttcaac

SEQ ID NO: 764182 - DNA, 15 bp, Homo sapiens
agttacatttcaaca

SEQ ID NO: 764183 - DNA, 15 bp, Homo sapiens
gttacatttcaacat

SEQ ID NO: 764184 - DNA, 15 bp, Homo sapiens
ttacatttcaacatc

SEQ ID NO: 764185 - DNA, 15 bp, Homo sapiens
tacatttcaacatca

SEQ ID NO: 764186 - DNA, 15 bp, Homo sapiens
acatttcaacatcat

SEQ ID NO: 764187 - DNA, 15 bp, Homo sapiens
catttcaacatcatt

SEQ ID NO: 764188 - DNA, 15 bp, Homo sapiens
atttcaacatcatta

SEQ ID NO: 764189 - DNA, 15 bp, Homo sapiens
tttcaacatcattat

SEQ ID NO: 764190 - DNA, 15 bp, Homo sapiens
ttcaacatcattatt

SEQ ID NO: 764191 - DNA, 15 bp, Homo sapiens
caacatcattattga

SEQ ID NO: 764192 - DNA, 15 bp, Homo sapiens
aacatcattattgat

SEQ ID NO: 764193 - DNA, 15 bp, Homo sapiens
acatcattattgata

SEQ ID NO: 764194 - DNA, 15 bp, Homo sapiens
catcattattgatat

SEQ ID NO: 764195 - DNA, 15 bp, Homo sapiens
atcattattgatatt

SEQ ID NO: 764196 - DNA, 15 bp, Homo sapiens
tcattattgatattc

SEQ ID NO: 764197 - DNA, 15 bp, Homo sapiens
cattattgatattcc

SEQ ID NO: 764198 - DNA, 15 bp, Homo sapiens
attattgatattccc

SEQ ID NO: 764199 - DNA, 15 bp, Homo sapiens
ttattgatattcccc

SEQ ID NO: 764200 - DNA, 15 bp, Homo sapiens
tattgatattccccc

SEQ ID NO: 764201 - DNA, 15 bp, Homo sapiens
attgatattccccct

SEQ ID NO: 764202 - DNA, 15 bp, Homo sapiens
ttgatattccccctt

SEQ ID NO: 764203 - DNA, 15 bp, Homo sapiens
tgatattcccccttg

SEQ ID NO: 764204 - DNA, 15 bp, Homo sapiens
gatattcccccttgg

SEQ ID NO: 764205 - DNA, 15 bp, Homo sapiens
atattcccccttggt

SEQ ID NO: 764206 - DNA, 15 bp, Homo sapiens
tattcccccttggtt

SEQ ID NO: 764207 - DNA, 15 bp, Homo sapiens
attcccccttggttg

SEQ ID NO: 764208 - DNA, 15 bp, Homo sapiens
ttcccccttggttgt

SEQ ID NO: 764209 - DNA, 15 bp, Homo sapiens
tcccccttggttgtc

SEQ ID NO: 764210 - DNA, 15 bp, Homo sapiens
cccccttggttgtcg

SEQ ID NO: 764211 - DNA, 15 bp, Homo sapiens
ccccttggttgtcga

SEQ ID NO: 764212 - DNA, 15 bp, Homo sapiens
cccttggttgtcgat

SEQ ID NO: 764213 - DNA, 15 bp, Homo sapiens
ccttggttgtcgatg

SEQ ID NO: 764214 - DNA, 15 bp, Homo sapiens
cttggttgtcgatgt

SEQ ID NO: 764215 - DNA, 15 bp, Homo sapiens
ttggttgtcgatgtg

SEQ ID NO: 764216 - DNA, 15 bp, Homo sapiens
tggttgtcgatgtga

SEQ ID NO: 764217 - DNA, 15 bp, Homo sapiens
ggttgtcgatgtgac

SEQ ID NO: 764218 - DNA, 15 bp, Homo sapiens
gttgtcgatgtgact

SEQ ID NO: 764219 - DNA, 15 bp, Homo sapiens
ttgtcgatgtgactg

SEQ ID NO: 764220 - DNA, 15 bp, Homo sapiens
tgtcgatgtgactgt

SEQ ID NO: 764221 - DNA, 15 bp, Homo sapiens
gtcgatgtgactgtt

SEQ ID NO: 764222 - DNA, 15 bp, Homo sapiens
tcgatgtgactgttt

SEQ ID NO: 764223 - DNA, 15 bp, Homo sapiens
cgatgtgactgtttt

SEQ ID NO: 764224 - DNA, 15 bp, Homo sapiens
gatgtgactgttttt

SEQ ID NO: 764225 - DNA, 15 bp, Homo sapiens
atgtgactgtttttg

SEQ ID NO: 764226 - DNA, 15 bp, Homo sapiens
tgtgactgtttttga

SEQ ID NO: 764227 - DNA, 15 bp, Homo sapiens
gtgactgtttttgaa

SEQ ID NO: 764228 - DNA, 15 bp, Homo sapiens
tgactgtttttgaag

SEQ ID NO: 764229 - DNA, 15 bp, Homo sapiens
gactgtttttgaagg

SEQ ID NO: 764230 - DNA, 15 bp, Homo sapiens
actgtttttgaaggt

SEQ ID NO: 764231 - DNA, 15 bp, Homo sapiens
ctgtttttgaaggta

SEQ ID NO: 764232 - DNA, 15 bp, Homo sapiens
tgtttttgaaggtat

SEQ ID NO: 764233 - DNA, 15 bp, Homo sapiens
gtttttgaaggtata

SEQ ID NO: 764234 - DNA, 15 bp, Homo sapiens
tttttgaaggtatac

SEQ ID NO: 764235 - DNA, 15 bp, Homo sapiens
ttttgaaggtataca

SEQ ID NO: 764236 - DNA, 15 bp, Homo sapiens
tttgaaggtatacat

SEQ ID NO: 764237 - DNA, 15 bp, Homo sapiens
ttgaaggtatacatt

SEQ ID NO: 764238 - DNA, 15 bp, Homo sapiens
tgaaggtatacattt

SEQ ID NO: 764239 - DNA, 15 bp, Homo sapiens
gaaggtatacatttt

SEQ ID NO: 764240 - DNA, 15 bp, Homo sapiens
aaggtatacattttt

SEQ ID NO: 764241 - DNA, 15 bp, Homo sapiens
aggtatacattttta

SEQ ID NO: 764242 - DNA, 15 bp, Homo sapiens
ggtatacatttttat

SEQ ID NO: 764243 - DNA, 15 bp, Homo sapiens
gtatacatttttatt

SEQ ID NO: 764244 - DNA, 15 bp, Homo sapiens
tatacatttttatta

SEQ ID NO: 764245 - DNA, 15 bp, Homo sapiens
tacatttttattaat

SEQ ID NO: 764246 - DNA, 15 bp, Homo sapiens
acatttttattaatt

SEQ ID NO: 764247 - DNA, 15 bp, Homo sapiens
catttttattaattc

SEQ ID NO: 764248 - DNA, 15 bp, Homo sapiens
atttttattaattcc

SEQ ID NO: 764249 - DNA, 15 bp, Homo sapiens
tttttattaattcct

SEQ ID NO: 764250 - DNA, 15 bp, Homo sapiens
ttttattaattcctg

SEQ ID NO: 764251 - DNA, 15 bp, Homo sapiens
tttattaattcctgc

SEQ ID NO: 764252 - DNA, 15 bp, Homo sapiens
ttattaattcctgca

SEQ ID NO: 764253 - DNA, 15 bp, Homo sapiens
tattaattcctgcaa

SEQ ID NO: 764254 - DNA, 15 bp, Homo sapiens
attaattcctgcaat

SEQ ID NO: 764255 - DNA, 15 bp, Homo sapiens
ttaattcctgcaatt

SEQ ID NO: 764256 - DNA, 15 bp, Homo sapiens
taattcctgcaattt

SEQ ID NO: 764257 - DNA, 15 bp, Homo sapiens
aattcctgcaatttt

SEQ ID NO: 764258 - DNA, 15 bp, Homo sapiens
attcctgcaattttc

SEQ ID NO: 764259 - DNA, 15 bp, Homo sapiens
ttcctgcaattttct

SEQ ID NO: 764260 - DNA, 15 bp, Homo sapiens
tcctgcaattttctg

SEQ ID NO: 764261 - DNA, 15 bp, Homo sapiens
cctgcaattttctgt

SEQ ID NO: 764262 - DNA, 15 bp, Homo sapiens
ctgcaattttctgtg

SEQ ID NO: 764263 - DNA, 15 bp, Homo sapiens
tgcaattttctgtga

SEQ ID NO: 764264 - DNA, 15 bp, Homo sapiens
gcaattttctgtgat

SEQ ID NO: 764265 - DNA, 15 bp, Homo sapiens
caattttctgtgatt

SEQ ID NO: 764266 - DNA, 15 bp, Homo sapiens
aattttctgtgattt

SEQ ID NO: 764267 - DNA, 15 bp, Homo sapiens
attttctgtgatttt

SEQ ID NO: 764268 - DNA, 15 bp, Homo sapiens
ttttctgtgattttt

SEQ ID NO: 764269 - DNA, 15 bp, Homo sapiens
tttctgtgatttttt

SEQ ID NO: 764270 - DNA, 15 bp, Homo sapiens
ttctgtgattttttt

SEQ ID NO: 764271 - DNA, 15 bp, Homo sapiens
tctgtgatttttttt

SEQ ID NO: 764272 - DNA, 15 bp, Homo sapiens
ctgtgattttttttc

SEQ ID NO: 764273 - DNA, 15 bp, Homo sapiens
tgtgattttttttct

SEQ ID NO: 764274 - DNA, 15 bp, Homo sapiens
gtgattttttttctt

SEQ ID NO: 764275 - DNA, 15 bp, Homo sapiens
tgattttttttcttt

SEQ ID NO: 764276 - DNA, 15 bp, Homo sapiens
gattttttttctttc

SEQ ID NO: 764277 - DNA, 15 bp, Homo sapiens
attttttttctttct

SEQ ID NO: 764278 - DNA, 15 bp, Homo sapiens
ttttttttctttctc

SEQ ID NO: 764279 - DNA, 15 bp, Homo sapiens
tttttttctttctct

SEQ ID NO: 764280 - DNA, 15 bp, Homo sapiens
ttttttctttctctg

SEQ ID NO: 764281 - DNA, 15 bp, Homo sapiens
tttttctttctctga

SEQ ID NO: 764282 - DNA, 15 bp, Homo sapiens
ttttctttctctgat

SEQ ID NO: 764283 - DNA, 15 bp, Homo sapiens
tttctttctctgatg

SEQ ID NO: 764284 - DNA, 15 bp, Homo sapiens
ttctttctctgatga

SEQ ID NO: 764285 - DNA, 15 bp, Homo sapiens
tctttctctgatgac

SEQ ID NO: 764286 - DNA, 15 bp, Homo sapiens
ctttctctgatgacc

SEQ ID NO: 764287 - DNA, 15 bp, Homo sapiens
tttctctgatgacct

SEQ ID NO: 764288 - DNA, 15 bp, Homo sapiens
ttctctgatgacctt

SEQ ID NO: 764289 - DNA, 15 bp, Homo sapiens
tctctgatgaccttt

SEQ ID NO: 764290 - DNA, 15 bp, Homo sapiens
ctctgatgacctttc

SEQ ID NO: 764291 - DNA, 15 bp, Homo sapiens
tctgatgacctttct

SEQ ID NO: 764292 - DNA, 15 bp, Homo sapiens
ctgatgacctttctc

SEQ ID NO: 764293 - DNA, 15 bp, Homo sapiens
tgatgacctttctct

SEQ ID NO: 764294 - DNA, 15 bp, Homo sapiens
gatgacctttctctt

SEQ ID NO: 764295 - DNA, 15 bp, Homo sapiens
atgacctttctcttt

SEQ ID NO: 764296 - DNA, 15 bp, Homo sapiens
tgacctttctctttt

SEQ ID NO: 764297 - DNA, 15 bp, Homo sapiens
gacctttctctttta

SEQ ID NO: 764298 - DNA, 15 bp, Homo sapiens
acctttctcttttaa

SEQ ID NO: 764299 - DNA, 15 bp, Homo sapiens
cctttctcttttaac

SEQ ID NO: 764300 - DNA, 15 bp, Homo sapiens
ctttctcttttaacg

SEQ ID NO: 764301 - DNA, 15 bp, Homo sapiens
tttctcttttaacga

SEQ ID NO: 764302 - DNA, 15 bp, Homo sapiens
ttctcttttaacgat

SEQ ID NO: 764303 - DNA, 15 bp, Homo sapiens
tctcttttaacgatt

SEQ ID NO: 764304 - DNA, 15 bp, Homo sapiens
ctcttttaacgattt

SEQ ID NO: 764305 - DNA, 15 bp, Homo sapiens
tcttttaacgatttt

SEQ ID NO: 764306 - DNA, 15 bp, Homo sapiens
cttttaacgattttt

SEQ ID NO: 764307 - DNA, 15 bp, Homo sapiens
ttttaacgatttttt

SEQ ID NO: 764308 - DNA, 15 bp, Homo sapiens
tttaacgattttttt

SEQ ID NO: 764309 - DNA, 15 bp, Homo sapiens
ttaacgatttttttt

SEQ ID NO: 764310 - DNA, 15 bp, Homo sapiens
taacgattttttttc

SEQ ID NO: 764311 - DNA, 15 bp, Homo sapiens
aacgattttttttct

SEQ ID NO: 764312 - DNA, 15 bp, Homo sapiens
acgattttttttctt

SEQ ID NO: 764313 - DNA, 15 bp, Homo sapiens
cgattttttttcttc

SEQ ID NO: 764314 - DNA, 15 bp, Homo sapiens
gattttttttcttca

SEQ ID NO: 764315 - DNA, 15 bp, Homo sapiens
attttttttcttcat

SEQ ID NO: 764316 - DNA, 15 bp, Homo sapiens
gtgcagagaaggccc

SEQ ID NO: 764317 - DNA, 15 bp, Homo sapiens
tgcagagaaggccct

SEQ ID NO: 764318 - DNA, 15 bp, Homo sapiens
gcagagaaggccctg

SEQ ID NO: 764319 - DNA, 15 bp, Homo sapiens
cagagaaggccctgc

SEQ ID NO: 764320 - DNA, 15 bp, Homo sapiens
agagaaggccctgca

SEQ ID NO: 764321 - DNA, 15 bp, Homo sapiens
gagaaggccctgcac

SEQ ID NO: 764322 - DNA, 15 bp, Homo sapiens
agaaggccctgcaca

SEQ ID NO: 764323 - DNA, 15 bp, Homo sapiens
gaaggccctgcacaa

SEQ ID NO: 764324 - DNA, 15 bp, Homo sapiens
aaggccctgcacaat

SEQ ID NO: 764325 - DNA, 15 bp, Homo sapiens
aggccctgcacaatg

SEQ ID NO: 764326 - DNA, 15 bp, Homo sapiens
ggccctgcacaatgg

SEQ ID NO: 764327 - DNA, 15 bp, Homo sapiens
gccctgcacaatggg

SEQ ID NO: 764328 - DNA, 15 bp, Homo sapiens
ccctgcacaatgggc

SEQ ID NO: 764329 - DNA, 15 bp, Homo sapiens
cctgcacaatgggct

SEQ ID NO: 764330 - DNA, 15 bp, Homo sapiens
ctgcacaatgggcta

SEQ ID NO: 764331 - DNA, 15 bp, Homo sapiens
tgcacaatgggctag

SEQ ID NO: 764332 - DNA, 15 bp, Homo sapiens
gcacaatgggctagg

SEQ ID NO: 764333 - DNA, 15 bp, Homo sapiens
cacaatgggctaggc

SEQ ID NO: 764334 - DNA, 15 bp, Homo sapiens
acaatgggctaggca

SEQ ID NO: 764335 - DNA, 15 bp, Homo sapiens
caatgggctaggcag

SEQ ID NO: 764336 - DNA, 15 bp, Homo sapiens
aatgggctaggcagg

SEQ ID NO: 764337 - DNA, 15 bp, Homo sapiens
atgggctaggcagga

SEQ ID NO: 764338 - DNA, 15 bp, Homo sapiens
tgggctaggcaggac

SEQ ID NO: 764339 - DNA, 15 bp, Homo sapiens
gggctaggcaggaca

SEQ ID NO: 764340 - DNA, 15 bp, Homo sapiens
ggctaggcaggacag

SEQ ID NO: 764341 - DNA, 15 bp, Homo sapiens
gctaggcaggacagc

SEQ ID NO: 764342 - DNA, 15 bp, Homo sapiens
ctaggcaggacagca

SEQ ID NO: 764343 - DNA, 15 bp, Homo sapiens
taggcaggacagcag

SEQ ID NO: 764344 - DNA, 15 bp, Homo sapiens
aggcaggacagcagt

SEQ ID NO: 764345 - DNA, 15 bp, Homo sapiens
ggcaggacagcagtt

SEQ ID NO: 764346 - DNA, 15 bp, Homo sapiens
gcaggacagcagttg

SEQ ID NO: 764347 - DNA, 15 bp, Homo sapiens
caggacagcagttgt

SEQ ID NO: 764348 - DNA, 15 bp, Homo sapiens
aggacagcagttgta

SEQ ID NO: 764349 - DNA, 15 bp, Homo sapiens
ggacagcagttgtag

SEQ ID NO: 764350 - DNA, 15 bp, Homo sapiens
gacagcagttgtaga

SEQ ID NO: 764351 - DNA, 15 bp, Homo sapiens
acagcagttgtagac

SEQ ID NO: 764352 - DNA, 15 bp, Homo sapiens
cagcagttgtagaca

SEQ ID NO: 764353 - DNA, 15 bp, Homo sapiens
agcagttgtagacag

SEQ ID NO: 764354 - DNA, 15 bp, Homo sapiens
gcagttgtagacagc

SEQ ID NO: 764355 - DNA, 15 bp, Homo sapiens
cagttgtagacagct

SEQ ID NO: 764356 - DNA, 15 bp, Homo sapiens
agttgtagacagcta

SEQ ID NO: 764357 - DNA, 15 bp, Homo sapiens
gttgtagacagctac

SEQ ID NO: 764358 - DNA, 15 bp, Homo sapiens
ttgtagacagctaca

SEQ ID NO: 764359 - DNA, 15 bp, Homo sapiens
tgtagacagctacaa

SEQ ID NO: 764360 - DNA, 15 bp, Homo sapiens
gtagacagctacaat

SEQ ID NO: 764361 - DNA, 15 bp, Homo sapiens
tagacagctacaatg

SEQ ID NO: 764362 - DNA, 15 bp, Homo sapiens
agacagctacaatgg

SEQ ID NO: 764363 - DNA, 15 bp, Homo sapiens
gacagctacaatgga

SEQ ID NO: 764364 - DNA, 15 bp, Homo sapiens
acagctacaatggat

SEQ ID NO: 764365 - DNA, 15 bp, Homo sapiens
cagctacaatggata

SEQ ID NO: 764366 - DNA, 15 bp, Homo sapiens
agctacaatggatat

SEQ ID NO: 764367 - DNA, 15 bp, Homo sapiens
gctacaatggatatt

SEQ ID NO: 764368 - DNA, 15 bp, Homo sapiens
ctacaatggatattt

SEQ ID NO: 764369 - DNA, 15 bp, Homo sapiens
tacaatggatatttt

SEQ ID NO: 764370 - DNA, 15 bp, Homo sapiens
acaatggatatttta

SEQ ID NO: 764371 - DNA, 15 bp, Homo sapiens
caatggatattttaa

SEQ ID NO: 764372 - DNA, 15 bp, Homo sapiens
aatggatattttaaa

SEQ ID NO: 764373 - DNA, 15 bp, Homo sapiens
atggatattttaaaa

SEQ ID NO: 764374 - DNA, 15 bp, Homo sapiens
tggatattttaaaaa

SEQ ID NO: 764375 - DNA, 15 bp, Homo sapiens
ggatattttaaaaat

SEQ ID NO: 764376 - DNA, 15 bp, Homo sapiens
gatattttaaaaatt

SEQ ID NO: 764377 - DNA, 15 bp, Homo sapiens
atattttaaaaatta

SEQ ID NO: 764378 - DNA, 15 bp, Homo sapiens
tattttaaaaattac

SEQ ID NO: 764379 - DNA, 15 bp, Homo sapiens
attttaaaaattaca

SEQ ID NO: 764380 - DNA, 15 bp, Homo sapiens
ttttaaaaattacaa

SEQ ID NO: 764381 - DNA, 15 bp, Homo sapiens
tttaaaaattacaac

SEQ ID NO: 764382 - DNA, 15 bp, Homo sapiens
ttaaaaattacaacc

SEQ ID NO: 764383 - DNA, 15 bp, Homo sapiens
taaaaattacaacca

SEQ ID NO: 764384 - DNA, 15 bp, Homo sapiens
aaaaattacaaccaa

SEQ ID NO: 764385 - DNA, 15 bp, Homo sapiens
aaaattacaaccaaa

SEQ ID NO: 764386 - DNA, 15 bp, Homo sapiens
aaattacaaccaaac

SEQ ID NO: 764387 - DNA, 15 bp, Homo sapiens
aattacaaccaaact

SEQ ID NO: 764388 - DNA, 15 bp, Homo sapiens
attacaaccaaacta

SEQ ID NO: 764389 - DNA, 15 bp, Homo sapiens
ttacaaccaaactat

SEQ ID NO: 764390 - DNA, 15 bp, Homo sapiens
tacaaccaaactatg

SEQ ID NO: 764391 - DNA, 15 bp, Homo sapiens
acaaccaaactatgt

SEQ ID NO: 764392 - DNA, 15 bp, Homo sapiens
caaccaaactatgtg

SEQ ID NO: 764393 - DNA, 15 bp, Homo sapiens
aaccaaactatgtga

SEQ ID NO: 764394 - DNA, 15 bp, Homo sapiens
accaaactatgtgag

SEQ ID NO: 764395 - DNA, 15 bp, Homo sapiens
ccaaactatgtgagg

SEQ ID NO: 764396 - DNA, 15 bp, Homo sapiens
caaactatgtgagga

SEQ ID NO: 764397 - DNA, 15 bp, Homo sapiens
aaactatgtgaggat

SEQ ID NO: 764398 - DNA, 15 bp, Homo sapiens
aactatgtgaggatt

SEQ ID NO: 764399 - DNA, 15 bp, Homo sapiens
actatgtgaggatta

SEQ ID NO: 764400 - DNA, 15 bp, Homo sapiens
ctatgtgaggattat

SEQ ID NO: 764401 - DNA, 15 bp, Homo sapiens
tatgtgaggattatt

SEQ ID NO: 764402 - DNA, 15 bp, Homo sapiens
atgtgaggattattt

SEQ ID NO: 764403 - DNA, 15 bp, Homo sapiens
tgtgaggattattta

SEQ ID NO: 764404 - DNA, 15 bp, Homo sapiens
gtgaggattatttaa

SEQ ID NO: 764405 - DNA, 15 bp, Homo sapiens
tgaggattatttaat

SEQ ID NO: 764406 - DNA, 15 bp, Homo sapiens
gaggattatttaatg

SEQ ID NO: 764407 - DNA, 15 bp, Homo sapiens
aggattatttaatgt

SEQ ID NO: 764408 - DNA, 15 bp, Homo sapiens
ggattatttaatgtt

SEQ ID NO: 764409 - DNA, 15 bp, Homo sapiens
gattatttaatgttg

SEQ ID NO: 764410 - DNA, 15 bp, Homo sapiens
attatttaatgttga

SEQ ID NO: 764411 - DNA, 15 bp, Homo sapiens
ttatttaatgttgat

SEQ ID NO: 764412 - DNA, 15 bp, Homo sapiens
tatttaatgttgata

SEQ ID NO: 764413 - DNA, 15 bp, Homo sapiens
atttaatgttgatat

SEQ ID NO: 764414 - DNA, 15 bp, Homo sapiens
tttaatgttgatata

SEQ ID NO: 764415 - DNA, 15 bp, Homo sapiens
ttaatgttgatatag

SEQ ID NO: 764416 - DNA, 15 bp, Homo sapiens
taatgttgatataga

SEQ ID NO: 764417 - DNA, 15 bp, Homo sapiens
aatgttgatatagaa

SEQ ID NO: 764418 - DNA, 15 bp, Homo sapiens
atgttgatatagaaa

SEQ ID NO: 764419 - DNA, 15 bp, Homo sapiens
tgttgatatagaaat

SEQ ID NO: 764420 - DNA, 15 bp, Homo sapiens
gttgatatagaaata

SEQ ID NO: 764421 - DNA, 15 bp, Homo sapiens
ttgatatagaaatat

SEQ ID NO: 764422 - DNA, 15 bp, Homo sapiens
tgatatagaaatata

SEQ ID NO: 764423 - DNA, 15 bp, Homo sapiens
gatatagaaatataa

SEQ ID NO: 764424 - DNA, 15 bp, Homo sapiens
atatagaaatataac

SEQ ID NO: 764425 - DNA, 15 bp, Homo sapiens
tatagaaatataacg

SEQ ID NO: 764426 - DNA, 15 bp, Homo sapiens
atagaaatataacgt

SEQ ID NO: 764427 - DNA, 15 bp, Homo sapiens
tagaaatataacgtc

SEQ ID NO: 764428 - DNA, 15 bp, Homo sapiens
agaaatataacgtca

SEQ ID NO: 764429 - DNA, 15 bp, Homo sapiens
gaaatataacgtcaa

SEQ ID NO: 764430 - DNA, 15 bp, Homo sapiens
aaatataacgtcaat

SEQ ID NO: 764431 - DNA, 15 bp, Homo sapiens
aatataacgtcaatg

SEQ ID NO: 764432 - DNA, 15 bp, Homo sapiens
atataacgtcaatgc

SEQ ID NO: 764433 - DNA, 15 bp, Homo sapiens
tataacgtcaatgca

SEQ ID NO: 764434 - DNA, 15 bp, Homo sapiens
ataacgtcaatgcag

SEQ ID NO: 764435 - DNA, 15 bp, Homo sapiens
taacgtcaatgcagt

SEQ ID NO: 764436 - DNA, 15 bp, Homo sapiens
aacgtcaatgcagtt

SEQ ID NO: 764437 - DNA, 15 bp, Homo sapiens
acgtcaatgcagttg

SEQ ID NO: 764438 - DNA, 15 bp, Homo sapiens
cgtcaatgcagttgt

SEQ ID NO: 764439 - DNA, 15 bp, Homo sapiens
gtcaatgcagttgta

SEQ ID NO: 764440 - DNA, 15 bp, Homo sapiens
tcaatgcagttgtac

SEQ ID NO: 764441 - DNA, 15 bp, Homo sapiens
caatgcagttgtaca

SEQ ID NO: 764442 - DNA, 15 bp, Homo sapiens
aatgcagttgtacag

SEQ ID NO: 764443 - DNA, 15 bp, Homo sapiens
atgcagttgtacagg

SEQ ID NO: 764444 - DNA, 15 bp, Homo sapiens
tgcagttgtacaggc

SEQ ID NO: 764445 - DNA, 15 bp, Homo sapiens
gcagttgtacaggct

SEQ ID NO: 764446 - DNA, 15 bp, Homo sapiens
cagttgtacaggctc

SEQ ID NO: 764447 - DNA, 15 bp, Homo sapiens
agttgtacaggctct

SEQ ID NO: 764448 - DNA, 15 bp, Homo sapiens
gttgtacaggctctg

SEQ ID NO: 764449 - DNA, 15 bp, Homo sapiens
ttgtacaggctctgc

SEQ ID NO: 764450 - DNA, 15 bp, Homo sapiens
tgtacaggctctgca

SEQ ID NO: 764451 - DNA, 15 bp, Homo sapiens
gtacaggctctgcag

SEQ ID NO: 764452 - DNA, 15 bp, Homo sapiens
tacaggctctgcaga

SEQ ID NO: 764453 - DNA, 15 bp, Homo sapiens
acaggctctgcagaa

SEQ ID NO: 764454 - DNA, 15 bp, Homo sapiens
caggctctgcagaat

SEQ ID NO: 764455 - DNA, 15 bp, Homo sapiens
aggctctgcagaata

SEQ ID NO: 764456 - DNA, 15 bp, Homo sapiens
ggctctgcagaatat

SEQ ID NO: 764457 - DNA, 15 bp, Homo sapiens
gctctgcagaatatt

SEQ ID NO: 764458 - DNA, 15 bp, Homo sapiens
ctctgcagaatattt

SEQ ID NO: 764459 - DNA, 15 bp, Homo sapiens
tctgcagaatatttt

SEQ ID NO: 764460 - DNA, 15 bp, Homo sapiens
ctgcagaatattttg

SEQ ID NO: 764461 - DNA, 15 bp, Homo sapiens
tgcagaatattttgt

SEQ ID NO: 764462 - DNA, 15 bp, Homo sapiens
gcagaatattttgtc

SEQ ID NO: 764463 - DNA, 15 bp, Homo sapiens
cagaatattttgtca

SEQ ID NO: 764464 - DNA, 15 bp, Homo sapiens
agaatattttgtcat

SEQ ID NO: 764465 - DNA, 15 bp, Homo sapiens
gaatattttgtcatt

SEQ ID NO: 764466 - DNA, 15 bp, Homo sapiens
aatattttgtcattg

SEQ ID NO: 764467 - DNA, 15 bp, Homo sapiens
atattttgtcattgt

SEQ ID NO: 764468 - DNA, 15 bp, Homo sapiens
tattttgtcattgtc

SEQ ID NO: 764469 - DNA, 15 bp, Homo sapiens
attttgtcattgtct

SEQ ID NO: 764470 - DNA, 15 bp, Homo sapiens
ttttgtcattgtcta

SEQ ID NO: 764471 - DNA, 15 bp, Homo sapiens
tttgtcattgtctat

SEQ ID NO: 764472 - DNA, 15 bp, Homo sapiens
ttgtcattgtctatt

SEQ ID NO: 764473 - DNA, 15 bp, Homo sapiens
tgtcattgtctatta

SEQ ID NO: 764474 - DNA, 15 bp, Homo sapiens
gtcattgtctattag

SEQ ID NO: 764475 - DNA, 15 bp, Homo sapiens
tcattgtctattagc

SEQ ID NO: 764476 - DNA, 15 bp, Homo sapiens
cattgtctattagca

SEQ ID NO: 764477 - DNA, 15 bp, Homo sapiens
attgtctattagcaa

SEQ ID NO: 764478 - DNA, 15 bp, Homo sapiens
ttgtctattagcaaa

SEQ ID NO: 764479 - DNA, 15 bp, Homo sapiens
tgtctattagcaaaa

SEQ ID NO: 764480 - DNA, 15 bp, Homo sapiens
gtctattagcaaaaa

SEQ ID NO: 764481 - DNA, 15 bp, Homo sapiens
tctattagcaaaaat

SEQ ID NO: 764482 - DNA, 15 bp, Homo sapiens
ctattagcaaaaatg

SEQ ID NO: 764483 - DNA, 15 bp, Homo sapiens
tattagcaaaaatga

SEQ ID NO: 764484 - DNA, 15 bp, Homo sapiens
attagcaaaaatgac

SEQ ID NO: 764485 - DNA, 15 bp, Homo sapiens
ttagcaaaaatgaca

SEQ ID NO: 764486 - DNA, 15 bp, Homo sapiens
tagcaaaaatgacag

SEQ ID NO: 764487 - DNA, 15 bp, Homo sapiens
agcaaaaatgacagt

SEQ ID NO: 764488 - DNA, 15 bp, Homo sapiens
gcaaaaatgacagtt

SEQ ID NO: 764489 - DNA, 15 bp, Homo sapiens
caaaaatgacagtta

SEQ ID NO: 764490 - DNA, 15 bp, Homo sapiens
aaaaatgacagttaa

SEQ ID NO: 764491 - DNA, 15 bp, Homo sapiens
aaaatgacagttaag

SEQ ID NO: 764492 - DNA, 15 bp, Homo sapiens
aaatgacagttaaga

SEQ ID NO: 764493 - DNA, 15 bp, Homo sapiens
aatgacagttaagaa

SEQ ID NO: 764494 - DNA, 15 bp, Homo sapiens
atgacagttaagaat

SEQ ID NO: 764495 - DNA, 15 bp, Homo sapiens
tgacagttaagaatt

SEQ ID NO: 764496 - DNA, 15 bp, Homo sapiens
gacagttaagaattt

SEQ ID NO: 764497 - DNA, 15 bp, Homo sapiens
acagttaagaatttc

SEQ ID NO: 764498 - DNA, 15 bp, Homo sapiens
cagttaagaatttct

SEQ ID NO: 764499 - DNA, 15 bp, Homo sapiens
agttaagaatttcta

SEQ ID NO: 764500 - DNA, 15 bp, Homo sapiens
gttaagaatttctaa

SEQ ID NO: 764501 - DNA, 15 bp, Homo sapiens
ttaagaatttctaag

SEQ ID NO: 764502 - DNA, 15 bp, Homo sapiens
taagaatttctaaga

SEQ ID NO: 764503 - DNA, 15 bp, Homo sapiens
aagaatttctaagag

SEQ ID NO: 764504 - DNA, 15 bp, Homo sapiens
agaatttctaagaga

SEQ ID NO: 764505 - DNA, 15 bp, Homo sapiens
gaatttctaagagat

SEQ ID NO: 764506 - DNA, 15 bp, Homo sapiens
aatttctaagagata

SEQ ID NO: 764507 - DNA, 15 bp, Homo sapiens
atttctaagagataa

SEQ ID NO: 764508 - DNA, 15 bp, Homo sapiens
tttctaagagataag

SEQ ID NO: 764509 - DNA, 15 bp, Homo sapiens
ttctaagagataaga

SEQ ID NO: 764510 - DNA, 15 bp, Homo sapiens
tctaagagataagaa

SEQ ID NO: 764511 - DNA, 15 bp, Homo sapiens
ctaagagataagaat

SEQ ID NO: 764512 - DNA, 15 bp, Homo sapiens
taagagataagaatt

SEQ ID NO: 764513 - DNA, 15 bp, Homo sapiens
aagagataagaattt

SEQ ID NO: 764514 - DNA, 15 bp, Homo sapiens
agagataagaatttc

SEQ ID NO: 764515 - DNA, 15 bp, Homo sapiens
gagataagaatttct

SEQ ID NO: 764516 - DNA, 15 bp, Homo sapiens
agataagaatttcta

SEQ ID NO: 764517 - DNA, 15 bp, Homo sapiens
gataagaatttctaa

SEQ ID NO: 764518 - DNA, 15 bp, Homo sapiens
ataagaatttctaaa

SEQ ID NO: 764519 - DNA, 15 bp, Homo sapiens
taagaatttctaaag

SEQ ID NO: 764520 - DNA, 15 bp, Homo sapiens
aagaatttctaaaga

SEQ ID NO: 764521 - DNA, 15 bp, Homo sapiens
agaatttctaaagag

SEQ ID NO: 764522 - DNA, 15 bp, Homo sapiens
gaatttctaaagaga

SEQ ID NO: 764523 - DNA, 15 bp, Homo sapiens
aatttctaaagagac

SEQ ID NO: 764524 - DNA, 15 bp, Homo sapiens
atttctaaagagact

SEQ ID NO: 764525 - DNA, 15 bp, Homo sapiens
tttctaaagagactt

SEQ ID NO: 764526 - DNA, 15 bp, Homo sapiens
ttctaaagagacttt

SEQ ID NO: 764527 - DNA, 15 bp, Homo sapiens
tctaaagagactttc

SEQ ID NO: 764528 - DNA, 15 bp, Homo sapiens
ctaaagagactttca

SEQ ID NO: 764529 - DNA, 15 bp, Homo sapiens
taaagagactttcaa

SEQ ID NO: 764530 - DNA, 15 bp, Homo sapiens
aaagagactttcaac

SEQ ID NO: 764531 - DNA, 15 bp, Homo sapiens
aagagactttcaacc

SEQ ID NO: 764532 - DNA, 15 bp, Homo sapiens
agagactttcaacct

SEQ ID NO: 764533 - DNA, 15 bp, Homo sapiens
gagactttcaacctg

SEQ ID NO: 764534 - DNA, 15 bp, Homo sapiens
agactttcaacctgc

SEQ ID NO: 764535 - DNA, 15 bp, Homo sapiens
gactttcaacctgct

SEQ ID NO: 764536 - DNA, 15 bp, Homo sapiens
actttcaacctgctg

SEQ ID NO: 764537 - DNA, 15 bp, Homo sapiens
ctttcaacctgctgg

SEQ ID NO: 764538 - DNA, 15 bp, Homo sapiens
tttcaacctgctggc

SEQ ID NO: 764539 - DNA, 15 bp, Homo sapiens
ttcaacctgctggct

SEQ ID NO: 764540 - DNA, 15 bp, Homo sapiens
tcaacctgctggcta

SEQ ID NO: 764541 - DNA, 15 bp, Homo sapiens
caacctgctggctag

SEQ ID NO: 764542 - DNA, 15 bp, Homo sapiens
aacctgctggctaga

SEQ ID NO: 764543 - DNA, 15 bp, Homo sapiens
acctgctggctagag

SEQ ID NO: 764544 - DNA, 15 bp, Homo sapiens
cctgctggctagagc

SEQ ID NO: 764545 - DNA, 15 bp, Homo sapiens
ctgctggctagagca

SEQ ID NO: 764546 - DNA, 15 bp, Homo sapiens
tgctggctagagcat

SEQ ID NO: 764547 - DNA, 15 bp, Homo sapiens
gctggctagagcatt

SEQ ID NO: 764548 - DNA, 15 bp, Homo sapiens
ctggctagagcatta

SEQ ID NO: 764549 - DNA, 15 bp, Homo sapiens
tggctagagcattaa

SEQ ID NO: 764550 - DNA, 15 bp, Homo sapiens
ggctagagcattaaa

SEQ ID NO: 764551 - DNA, 15 bp, Homo sapiens
gctagagcattaaat

SEQ ID NO: 764552 - DNA, 15 bp, Homo sapiens
ctagagcattaaata

SEQ ID NO: 764553 - DNA, 15 bp, Homo sapiens
tagagcattaaatat

SEQ ID NO: 764554 - DNA, 15 bp, Homo sapiens
agagcattaaatatt

SEQ ID NO: 764555 - DNA, 15 bp, Homo sapiens
gagcattaaatattg

SEQ ID NO: 764556 - DNA, 15 bp, Homo sapiens
agcattaaatattgg

SEQ ID NO: 764557 - DNA, 15 bp, Homo sapiens
gcattaaatattggc

SEQ ID NO: 764558 - DNA, 15 bp, Homo sapiens
cattaaatattggca

SEQ ID NO: 764559 - DNA, 15 bp, Homo sapiens
attaaatattggcaa

SEQ ID NO: 764560 - DNA, 15 bp, Homo sapiens
ttaaatattggcaag

SEQ ID NO: 764561 - DNA, 15 bp, Homo sapiens
taaatattggcaagc

SEQ ID NO: 764562 - DNA, 15 bp, Homo sapiens
aaatattggcaagcc

SEQ ID NO: 764563 - DNA, 15 bp, Homo sapiens
aatattggcaagcca

SEQ ID NO: 764564 - DNA, 15 bp, Homo sapiens
atattggcaagccac

SEQ ID NO: 764565 - DNA, 15 bp, Homo sapiens
tattggcaagccact

SEQ ID NO: 764566 - DNA, 15 bp, Homo sapiens
attggcaagccacta

SEQ ID NO: 764567 - DNA, 15 bp, Homo sapiens
ttggcaagccactat

SEQ ID NO: 764568 - DNA, 15 bp, Homo sapiens
tggcaagccactatc

SEQ ID NO: 764569 - DNA, 15 bp, Homo sapiens
ggcaagccactatct

SEQ ID NO: 764570 - DNA, 15 bp, Homo sapiens
gcaagccactatctt

SEQ ID NO: 764571 - DNA, 15 bp, Homo sapiens
caagccactatcttt

SEQ ID NO: 764572 - DNA, 15 bp, Homo sapiens
aagccactatctttg

SEQ ID NO: 764573 - DNA, 15 bp, Homo sapiens
agccactatctttgc

SEQ ID NO: 764574 - DNA, 15 bp, Homo sapiens
gccactatctttgct

SEQ ID NO: 764575 - DNA, 15 bp, Homo sapiens
ccactatctttgcta

SEQ ID NO: 764576 - DNA, 15 bp, Homo sapiens
cactatctttgctag

SEQ ID NO: 764577 - DNA, 15 bp, Homo sapiens
actatctttgctagg

SEQ ID NO: 764578 - DNA, 15 bp, Homo sapiens
ctatctttgctaggg

SEQ ID NO: 764579 - DNA, 15 bp, Homo sapiens
tatctttgctaggga

SEQ ID NO: 764580 - DNA, 15 bp, Homo sapiens
atctttgctagggag

SEQ ID NO: 764581 - DNA, 15 bp, Homo sapiens
tctttgctagggaga

SEQ ID NO: 764582 - DNA, 15 bp, Homo sapiens
ctttgctagggagaa

SEQ ID NO: 764583 - DNA, 15 bp, Homo sapiens
tttgctagggagaag

SEQ ID NO: 764584 - DNA, 15 bp, Homo sapiens
ttgctagggagaagg

SEQ ID NO: 764585 - DNA, 15 bp, Homo sapiens
tgctagggagaaggg

SEQ ID NO: 764586 - DNA, 15 bp, Homo sapiens
gctagggagaagggg

SEQ ID NO: 764587 - DNA, 15 bp, Homo sapiens
ctagggagaaggggt

SEQ ID NO: 764588 - DNA, 15 bp, Homo sapiens
tagggagaaggggtt

SEQ ID NO: 764589 - DNA, 15 bp, Homo sapiens
agggagaaggggttt

SEQ ID NO: 764590 - DNA, 15 bp, Homo sapiens
gggagaaggggttta

SEQ ID NO: 764591 - DNA, 15 bp, Homo sapiens
ggagaaggggtttag

SEQ ID NO: 764592 - DNA, 15 bp, Homo sapiens
gagaaggggtttagg

SEQ ID NO: 764593 - DNA, 15 bp, Homo sapiens
agaaggggtttaggg

SEQ ID NO: 764594 - DNA, 15 bp, Homo sapiens
gaaggggtttagggg

SEQ ID NO: 764595 - DNA, 15 bp, Homo sapiens
aaggggtttagggga

SEQ ID NO: 764596 - DNA, 15 bp, Homo sapiens
aggggtttaggggag

SEQ ID NO: 764597 - DNA, 15 bp, Homo sapiens
ggggtttaggggagg

SEQ ID NO: 764598 - DNA, 15 bp, Homo sapiens
gggtttaggggagga

SEQ ID NO: 764599 - DNA, 15 bp, Homo sapiens
ggtttaggggaggaa

SEQ ID NO: 764600 - DNA, 15 bp, Homo sapiens
gtttaggggaggaat

SEQ ID NO: 764601 - DNA, 15 bp, Homo sapiens
tttaggggaggaatt

SEQ ID NO: 764602 - DNA, 15 bp, Homo sapiens
ttaggggaggaattt

SEQ ID NO: 764603 - DNA, 15 bp, Homo sapiens
taggggaggaattta

SEQ ID NO: 764604 - DNA, 15 bp, Homo sapiens
aggggaggaatttag

SEQ ID NO: 764605 - DNA, 15 bp, Homo sapiens
ggggaggaatttagg

SEQ ID NO: 764606 - DNA, 15 bp, Homo sapiens
gggaggaatttagga

SEQ ID NO: 764607 - DNA, 15 bp, Homo sapiens
ggaggaatttaggaa

SEQ ID NO: 764608 - DNA, 15 bp, Homo sapiens
gaggaatttaggaaa

SEQ ID NO: 764609 - DNA, 15 bp, Homo sapiens
aggaatttaggaaac

SEQ ID NO: 764610 - DNA, 15 bp, Homo sapiens
ggaatttaggaaact

SEQ ID NO: 764611 - DNA, 15 bp, Homo sapiens
gaatttaggaaactg

SEQ ID NO: 764612 - DNA, 15 bp, Homo sapiens
aatttaggaaactga

SEQ ID NO: 764613 - DNA, 15 bp, Homo sapiens
atttaggaaactgat

SEQ ID NO: 764614 - DNA, 15 bp, Homo sapiens
tttaggaaactgatt

SEQ ID NO: 764615 - DNA, 15 bp, Homo sapiens
ttaggaaactgattt

SEQ ID NO: 764616 - DNA, 15 bp, Homo sapiens
taggaaactgatttc

SEQ ID NO: 764617 - DNA, 15 bp, Homo sapiens
aggaaactgatttct

SEQ ID NO: 764618 - DNA, 15 bp, Homo sapiens
ggaaactgatttctt

SEQ ID NO: 764619 - DNA, 15 bp, Homo sapiens
gaaactgatttctta

SEQ ID NO: 764620 - DNA, 15 bp, Homo sapiens
aaactgatttcttac

SEQ ID NO: 764621 - DNA, 15 bp, Homo sapiens
aactgatttcttacg

SEQ ID NO: 764622 - DNA, 15 bp, Homo sapiens
actgatttcttacga

SEQ ID NO: 764623 - DNA, 15 bp, Homo sapiens
ctgatttcttacgaa

SEQ ID NO: 764624 - DNA, 15 bp, Homo sapiens
tgatttcttacgaac

SEQ ID NO: 764625 - DNA, 15 bp, Homo sapiens
gatttcttacgaact

SEQ ID NO: 764626 - DNA, 15 bp, Homo sapiens
atttcttacgaactt

SEQ ID NO: 764627 - DNA, 15 bp, Homo sapiens
tttcttacgaacttg

SEQ ID NO: 764628 - DNA, 15 bp, Homo sapiens
ttcttacgaacttgt

SEQ ID NO: 764629 - DNA, 15 bp, Homo sapiens
tcttacgaacttgta

SEQ ID NO: 764630 - DNA, 15 bp, Homo sapiens
cttacgaacttgtaa

SEQ ID NO: 764631 - DNA, 15 bp, Homo sapiens
ttacgaacttgtaat

SEQ ID NO: 764632 - DNA, 15 bp, Homo sapiens
tacgaacttgtaatt

SEQ ID NO: 764633 - DNA, 15 bp, Homo sapiens
acgaacttgtaattt

SEQ ID NO: 764634 - DNA, 15 bp, Homo sapiens
cgaacttgtaatttg

SEQ ID NO: 764635 - DNA, 15 bp, Homo sapiens
gaacttgtaatttga

SEQ ID NO: 764636 - DNA, 15 bp, Homo sapiens
aacttgtaatttgac

SEQ ID NO: 764637 - DNA, 15 bp, Homo sapiens
acttgtaatttgacc

SEQ ID NO: 764638 - DNA, 15 bp, Homo sapiens
cttgtaatttgacct

SEQ ID NO: 764639 - DNA, 15 bp, Homo sapiens
ttgtaatttgacctt

SEQ ID NO: 764640 - DNA, 15 bp, Homo sapiens
tgtaatttgaccttt

SEQ ID NO: 764641 - DNA, 15 bp, Homo sapiens
gtaatttgacctttg

SEQ ID NO: 764642 - DNA, 15 bp, Homo sapiens
taatttgacctttgt

SEQ ID NO: 764643 - DNA, 15 bp, Homo sapiens
aatttgacctttgtt

SEQ ID NO: 764644 - DNA, 15 bp, Homo sapiens
atttgacctttgttt

SEQ ID NO: 764645 - DNA, 15 bp, Homo sapiens
tttgacctttgtttt

SEQ ID NO: 764646 - DNA, 15 bp, Homo sapiens
ttgacctttgttttt

SEQ ID NO: 764647 - DNA, 15 bp, Homo sapiens
tgacctttgtttttt

SEQ ID NO: 764648 - DNA, 15 bp, Homo sapiens
gacctttgttttttg

SEQ ID NO: 764649 - DNA, 15 bp, Homo sapiens
acctttgttttttga

SEQ ID NO: 764650 - DNA, 15 bp, Homo sapiens
cctttgttttttgat

SEQ ID NO: 764651 - DNA, 15 bp, Homo sapiens
ctttgttttttgatc

SEQ ID NO: 764652 - DNA, 15 bp, Homo sapiens
tttgttttttgatct

SEQ ID NO: 764653 - DNA, 15 bp, Homo sapiens
ttgttttttgatctc

SEQ ID NO: 764654 - DNA, 15 bp, Homo sapiens
tgttttttgatctca

SEQ ID NO: 764655 - DNA, 15 bp, Homo sapiens
gttttttgatctcag

SEQ ID NO: 764656 - DNA, 15 bp, Homo sapiens
ttttttgatctcagg

SEQ ID NO: 764657 - DNA, 15 bp, Homo sapiens
tttttgatctcaggt

SEQ ID NO: 764658 - DNA, 15 bp, Homo sapiens
ttttgatctcaggtg

SEQ ID NO: 764659 - DNA, 15 bp, Homo sapiens
tttgatctcaggtga

SEQ ID NO: 764660 - DNA, 15 bp, Homo sapiens
ttgatctcaggtgat

SEQ ID NO: 764661 - DNA, 15 bp, Homo sapiens
tgatctcaggtgatc

SEQ ID NO: 764662 - DNA, 15 bp, Homo sapiens
gatctcaggtgatca

SEQ ID NO: 764663 - DNA, 15 bp, Homo sapiens
atctcaggtgatcag

SEQ ID NO: 764664 - DNA, 15 bp, Homo sapiens
tctcaggtgatcagt

SEQ ID NO: 764665 - DNA, 15 bp, Homo sapiens
ctcaggtgatcagtg

SEQ ID NO: 764666 - DNA, 15 bp, Homo sapiens
tcaggtgatcagtgt

SEQ ID NO: 764667 - DNA, 15 bp, Homo sapiens
caggtgatcagtgtg

SEQ ID NO: 764668 - DNA, 15 bp, Homo sapiens
aggtgatcagtgtga

SEQ ID NO: 764669 - DNA, 15 bp, Homo sapiens
ggtgatcagtgtgac

SEQ ID NO: 764670 - DNA, 15 bp, Homo sapiens
gtgatcagtgtgact

SEQ ID NO: 764671 - DNA, 15 bp, Homo sapiens
tgatcagtgtgactg

SEQ ID NO: 764672 - DNA, 15 bp, Homo sapiens
gatcagtgtgactgt

SEQ ID NO: 764673 - DNA, 15 bp, Homo sapiens
atcagtgtgactgtt

SEQ ID NO: 764674 - DNA, 15 bp, Homo sapiens
tcagtgtgactgttt

SEQ ID NO: 764675 - DNA, 15 bp, Homo sapiens
cagtgtgactgtttg

SEQ ID NO: 764676 - DNA, 15 bp, Homo sapiens
agtgtgactgtttgt

SEQ ID NO: 764677 - DNA, 15 bp, Homo sapiens
gtgtgactgtttgtg

SEQ ID NO: 764678 - DNA, 15 bp, Homo sapiens
tgtgactgtttgtgc

SEQ ID NO: 764679 - DNA, 15 bp, Homo sapiens
gtgactgtttgtgca

SEQ ID NO: 764680 - DNA, 15 bp, Homo sapiens
tgactgtttgtgcat

SEQ ID NO: 764681 - DNA, 15 bp, Homo sapiens
gactgtttgtgcata

SEQ ID NO: 764682 - DNA, 15 bp, Homo sapiens
actgtttgtgcatag

SEQ ID NO: 764683 - DNA, 15 bp, Homo sapiens
ctgtttgtgcatagc

SEQ ID NO: 764684 - DNA, 15 bp, Homo sapiens
tgtttgtgcatagct

SEQ ID NO: 764685 - DNA, 15 bp, Homo sapiens
gtttgtgcatagctg

SEQ ID NO: 764686 - DNA, 15 bp, Homo sapiens
tttgtgcatagctga

SEQ ID NO: 764687 - DNA, 15 bp, Homo sapiens
ttgtgcatagctgat

SEQ ID NO: 764688 - DNA, 15 bp, Homo sapiens
tgtgcatagctgatt

SEQ ID NO: 764689 - DNA, 15 bp, Homo sapiens
gtgcatagctgatta

SEQ ID NO: 764690 - DNA, 15 bp, Homo sapiens
tgcatagctgattat

SEQ ID NO: 764691 - DNA, 15 bp, Homo sapiens
gcatagctgattatt

SEQ ID NO: 764692 - DNA, 15 bp, Homo sapiens
catagctgattatta

SEQ ID NO: 764693 - DNA, 15 bp, Homo sapiens
atagctgattattac

SEQ ID NO: 764694 - DNA, 15 bp, Homo sapiens
tagctgattattaca

SEQ ID NO: 764695 - DNA, 15 bp, Homo sapiens
agctgattattacag

SEQ ID NO: 764696 - DNA, 15 bp, Homo sapiens
gctgattattacaga

SEQ ID NO: 764697 - DNA, 15 bp, Homo sapiens
ctgattattacagaa

SEQ ID NO: 764698 - DNA, 15 bp, Homo sapiens
tgattattacagaat

SEQ ID NO: 764699 - DNA, 15 bp, Homo sapiens
gattattacagaata

SEQ ID NO: 764700 - DNA, 15 bp, Homo sapiens
attattacagaatag

SEQ ID NO: 764701 - DNA, 15 bp, Homo sapiens
ttattacagaatagt

SEQ ID NO: 764702 - DNA, 15 bp, Homo sapiens
tattacagaatagta

SEQ ID NO: 764703 - DNA, 15 bp, Homo sapiens
attacagaatagtag

SEQ ID NO: 764704 - DNA, 15 bp, Homo sapiens
ttacagaatagtagc

SEQ ID NO: 764705 - DNA, 15 bp, Homo sapiens
tacagaatagtagca

SEQ ID NO: 764706 - DNA, 15 bp, Homo sapiens
acagaatagtagcat

SEQ ID NO: 764707 - DNA, 15 bp, Homo sapiens
cagaatagtagcatt

SEQ ID NO: 764708 - DNA, 15 bp, Homo sapiens
agaatagtagcattt

SEQ ID NO: 764709 - DNA, 15 bp, Homo sapiens
gaatagtagcatttc

SEQ ID NO: 764710 - DNA, 15 bp, Homo sapiens
aatagtagcatttcg

SEQ ID NO: 764711 - DNA, 15 bp, Homo sapiens
atagtagcatttcga

SEQ ID NO: 764712 - DNA, 15 bp, Homo sapiens
tagtagcatttcgag

SEQ ID NO: 764713 - DNA, 15 bp, Homo sapiens
agtagcatttcgaga

SEQ ID NO: 764714 - DNA, 15 bp, Homo sapiens
gtagcatttcgagag

SEQ ID NO: 764715 - DNA, 15 bp, Homo sapiens
tagcatttcgagaga

SEQ ID NO: 764716 - DNA, 15 bp, Homo sapiens
agcatttcgagagag

SEQ ID NO: 764717 - DNA, 15 bp, Homo sapiens
gcatttcgagagagc

SEQ ID NO: 764718 - DNA, 15 bp, Homo sapiens
catttcgagagagct

SEQ ID NO: 764719 - DNA, 15 bp, Homo sapiens
atttcgagagagcta

SEQ ID NO: 764720 - DNA, 15 bp, Homo sapiens
tttcgagagagctaa

SEQ ID NO: 764721 - DNA, 15 bp, Homo sapiens
ttcgagagagctaat

SEQ ID NO: 764722 - DNA, 15 bp, Homo sapiens
tcgagagagctaata

SEQ ID NO: 764723 - DNA, 15 bp, Homo sapiens
cgagagagctaataa

SEQ ID NO: 764724 - DNA, 15 bp, Homo sapiens
gagagagctaataat

SEQ ID NO: 764725 - DNA, 15 bp, Homo sapiens
agagagctaataatc

SEQ ID NO: 764726 - DNA, 15 bp, Homo sapiens
gagagctaataatcc

SEQ ID NO: 764727 - DNA, 15 bp, Homo sapiens
agagctaataatcct

SEQ ID NO: 764728 - DNA, 15 bp, Homo sapiens
gagctaataatcctc

SEQ ID NO: 764729 - DNA, 15 bp, Homo sapiens
agctaataatcctca

SEQ ID NO: 764730 - DNA, 15 bp, Homo sapiens
gctaataatcctcag

SEQ ID NO: 764731 - DNA, 15 bp, Homo sapiens
ctaataatcctcagt

SEQ ID NO: 764732 - DNA, 15 bp, Homo sapiens
taataatcctcagtt

SEQ ID NO: 764733 - DNA, 15 bp, Homo sapiens
aataatcctcagttc

SEQ ID NO: 764734 - DNA, 15 bp, Homo sapiens
ataatcctcagttct

SEQ ID NO: 764735 - DNA, 15 bp, Homo sapiens
taatcctcagttctt

SEQ ID NO: 764736 - DNA, 15 bp, Homo sapiens
aatcctcagttcttt

SEQ ID NO: 764737 - DNA, 15 bp, Homo sapiens
atcctcagttctttt

SEQ ID NO: 764738 - DNA, 15 bp, Homo sapiens
tcctcagttcttttg

SEQ ID NO: 764739 - DNA, 15 bp, Homo sapiens
cctcagttcttttgt

SEQ ID NO: 764740 - DNA, 15 bp, Homo sapiens
ctcagttcttttgtt

SEQ ID NO: 764741 - DNA, 15 bp, Homo sapiens
tcagttcttttgttt

SEQ ID NO: 764742 - DNA, 15 bp, Homo sapiens
cagttcttttgtttc

SEQ ID NO: 764743 - DNA, 15 bp, Homo sapiens
agttcttttgtttct

SEQ ID NO: 764744 - DNA, 15 bp, Homo sapiens
gttcttttgtttctt

SEQ ID NO: 764745 - DNA, 15 bp, Homo sapiens
ttcttttgtttcttg

SEQ ID NO: 764746 - DNA, 15 bp, Homo sapiens
tcttttgtttcttga

SEQ ID NO: 764747 - DNA, 15 bp, Homo sapiens
cttttgtttcttgat

SEQ ID NO: 764748 - DNA, 15 bp, Homo sapiens
ttttgtttcttgatt

SEQ ID NO: 764749 - DNA, 15 bp, Homo sapiens
tttgtttcttgattg

SEQ ID NO: 764750 - DNA, 15 bp, Homo sapiens
ttgtttcttgattgg

SEQ ID NO: 764751 - DNA, 15 bp, Homo sapiens
tgtttcttgattggc

SEQ ID NO: 764752 - DNA, 15 bp, Homo sapiens
gtttcttgattggct

SEQ ID NO: 764753 - DNA, 15 bp, Homo sapiens
tttcttgattggctt

SEQ ID NO: 764754 - DNA, 15 bp, Homo sapiens
ttcttgattggcttt

SEQ ID NO: 764755 - DNA, 15 bp, Homo sapiens
tcttgattggctttt

SEQ ID NO: 764756 - DNA, 15 bp, Homo sapiens
cttgattggcttttt

SEQ ID NO: 764757 - DNA, 15 bp, Homo sapiens
ttgattggcttttta

SEQ ID NO: 764758 - DNA, 15 bp, Homo sapiens
tgattggctttttaa

SEQ ID NO: 764759 - DNA, 15 bp, Homo sapiens
gattggctttttaaa

SEQ ID NO: 764760 - DNA, 15 bp, Homo sapiens
attggctttttaaaa

SEQ ID NO: 764761 - DNA, 15 bp, Homo sapiens
ttggctttttaaaaa

SEQ ID NO: 764762 - DNA, 15 bp, Homo sapiens
tggctttttaaaaag

SEQ ID NO: 764763 - DNA, 15 bp, Homo sapiens
ggctttttaaaaagg

SEQ ID NO: 764764 - DNA, 15 bp, Homo sapiens
gctttttaaaaaggt

SEQ ID NO: 764765 - DNA, 15 bp, Homo sapiens
ctttttaaaaaggtt

SEQ ID NO: 764766 - DNA, 15 bp, Homo sapiens
tttttaaaaaggtta

SEQ ID NO: 764767 - DNA, 15 bp, Homo sapiens
ttttaaaaaggttaa

SEQ ID NO: 764768 - DNA, 15 bp, Homo sapiens
tttaaaaaggttaat

SEQ ID NO: 764769 - DNA, 15 bp, Homo sapiens
ttaaaaaggttaatt

SEQ ID NO: 764770 - DNA, 15 bp, Homo sapiens
taaaaaggttaatta

SEQ ID NO: 764771 - DNA, 15 bp, Homo sapiens
aaaaaggttaattac

SEQ ID NO: 764772 - DNA, 15 bp, Homo sapiens
aaaaggttaattact

SEQ ID NO: 764773 - DNA, 15 bp, Homo sapiens
aaaggttaattactt

SEQ ID NO: 764774 - DNA, 15 bp, Homo sapiens
aaggttaattacttt

SEQ ID NO: 764775 - DNA, 15 bp, Homo sapiens
aggttaattactttt

SEQ ID NO: 764776 - DNA, 15 bp, Homo sapiens
ggttaattacttttg

SEQ ID NO: 764777 - DNA, 15 bp, Homo sapiens
gttaattacttttgt

SEQ ID NO: 764778 - DNA, 15 bp, Homo sapiens
ttaattacttttgtt

SEQ ID NO: 764779 - DNA, 15 bp, Homo sapiens
taattacttttgttt

SEQ ID NO: 764780 - DNA, 15 bp, Homo sapiens
aattacttttgtttc

SEQ ID NO: 764781 - DNA, 15 bp, Homo sapiens
attacttttgtttca

SEQ ID NO: 764782 - DNA, 15 bp, Homo sapiens
ttacttttgtttcac

SEQ ID NO: 764783 - DNA, 15 bp, Homo sapiens
tacttttgtttcact

SEQ ID NO: 764784 - DNA, 15 bp, Homo sapiens
acttttgtttcactg

SEQ ID NO: 764785 - DNA, 15 bp, Homo sapiens
cttttgtttcactgt

SEQ ID NO: 764786 - DNA, 15 bp, Homo sapiens
ttttgtttcactgta

SEQ ID NO: 764787 - DNA, 15 bp, Homo sapiens
tttgtttcactgtag

SEQ ID NO: 764788 - DNA, 15 bp, Homo sapiens
ttgtttcactgtaga

SEQ ID NO: 764789 - DNA, 15 bp, Homo sapiens
tgtttcactgtagaa

SEQ ID NO: 764790 - DNA, 15 bp, Homo sapiens
gtttcactgtagaag

SEQ ID NO: 764791 - DNA, 15 bp, Homo sapiens
tttcactgtagaagc

SEQ ID NO: 764792 - DNA, 15 bp, Homo sapiens
ttcactgtagaagct

SEQ ID NO: 764793 - DNA, 15 bp, Homo sapiens
tcactgtagaagctt

SEQ ID NO: 764794 - DNA, 15 bp, Homo sapiens
cactgtagaagcttc

SEQ ID NO: 764795 - DNA, 15 bp, Homo sapiens
actgtagaagcttct

SEQ ID NO: 764796 - DNA, 15 bp, Homo sapiens
ctgtagaagcttctc

SEQ ID NO: 764797 - DNA, 15 bp, Homo sapiens
tgtagaagcttctca

SEQ ID NO: 764798 - DNA, 15 bp, Homo sapiens
gtagaagcttctcat

SEQ ID NO: 764799 - DNA, 15 bp, Homo sapiens
tagaagcttctcatc

SEQ ID NO: 764800 - DNA, 15 bp, Homo sapiens
agaagcttctcatct

SEQ ID NO: 764801 - DNA, 15 bp, Homo sapiens
gaagcttctcatctc

SEQ ID NO: 764802 - DNA, 15 bp, Homo sapiens
aagcttctcatctca

SEQ ID NO: 764803 - DNA, 15 bp, Homo sapiens
agcttctcatctcag

SEQ ID NO: 764804 - DNA, 15 bp, Homo sapiens
gcttctcatctcaga

SEQ ID NO: 764805 - DNA, 15 bp, Homo sapiens
cttctcatctcagac

SEQ ID NO: 764806 - DNA, 15 bp, Homo sapiens
ttctcatctcagact

SEQ ID NO: 764807 - DNA, 15 bp, Homo sapiens
tctcatctcagacta

SEQ ID NO: 764808 - DNA, 15 bp, Homo sapiens
ctcatctcagactac

SEQ ID NO: 764809 - DNA, 15 bp, Homo sapiens
tcatctcagactacc

SEQ ID NO: 764810 - DNA, 15 bp, Homo sapiens
catctcagactacca

SEQ ID NO: 764811 - DNA, 15 bp, Homo sapiens
atctcagactaccac

SEQ ID NO: 764812 - DNA, 15 bp, Homo sapiens
tctcagactaccaca

SEQ ID NO: 764813 - DNA, 15 bp, Homo sapiens
ctcagactaccacat

SEQ ID NO: 764814 - DNA, 15 bp, Homo sapiens
tcagactaccacatt

SEQ ID NO: 764815 - DNA, 15 bp, Homo sapiens
cagactaccacattg

SEQ ID NO: 764816 - DNA, 15 bp, Homo sapiens
agactaccacattgc

SEQ ID NO: 764817 - DNA, 15 bp, Homo sapiens
gactaccacattgcc

SEQ ID NO: 764818 - DNA, 15 bp, Homo sapiens
actaccacattgcct

SEQ ID NO: 764819 - DNA, 15 bp, Homo sapiens
ctaccacattgccta

SEQ ID NO: 764820 - DNA, 15 bp, Homo sapiens
taccacattgcctaa

SEQ ID NO: 764821 - DNA, 15 bp, Homo sapiens
accacattgcctaat

SEQ ID NO: 764822 - DNA, 15 bp, Homo sapiens
ccacattgcctaatc

SEQ ID NO: 764823 - DNA, 15 bp, Homo sapiens
cacattgcctaatca

SEQ ID NO: 764824 - DNA, 15 bp, Homo sapiens
acattgcctaatcaa

SEQ ID NO: 764825 - DNA, 15 bp, Homo sapiens
cattgcctaatcaaa

SEQ ID NO: 764826 - DNA, 15 bp, Homo sapiens
attgcctaatcaaag

SEQ ID NO: 764827 - DNA, 15 bp, Homo sapiens
ttgcctaatcaaagt

SEQ ID NO: 764828 - DNA, 15 bp, Homo sapiens
tgcctaatcaaagtt

SEQ ID NO: 764829 - DNA, 15 bp, Homo sapiens
gcctaatcaaagttg

SEQ ID NO: 764830 - DNA, 15 bp, Homo sapiens
cctaatcaaagttgt

SEQ ID NO: 764831 - DNA, 15 bp, Homo sapiens
ctaatcaaagttgtg

SEQ ID NO: 764832 - DNA, 15 bp, Homo sapiens
taatcaaagttgtgt

SEQ ID NO: 764833 - DNA, 15 bp, Homo sapiens
aatcaaagttgtgtt

SEQ ID NO: 764834 - DNA, 15 bp, Homo sapiens
atcaaagttgtgtta

SEQ ID NO: 764835 - DNA, 15 bp, Homo sapiens
tcaaagttgtgttag

SEQ ID NO: 764836 - DNA, 15 bp, Homo sapiens
caaagttgtgttaga

SEQ ID NO: 764837 - DNA, 15 bp, Homo sapiens
aaagttgtgttagaa

SEQ ID NO: 764838 - DNA, 15 bp, Homo sapiens
aagttgtgttagaat

SEQ ID NO: 764839 - DNA, 15 bp, Homo sapiens
agttgtgttagaata

SEQ ID NO: 764840 - DNA, 15 bp, Homo sapiens
gttgtgttagaataa

SEQ ID NO: 764841 - DNA, 15 bp, Homo sapiens
ttgtgttagaataat

SEQ ID NO: 764842 - DNA, 15 bp, Homo sapiens
tgtgttagaataata

SEQ ID NO: 764843 - DNA, 15 bp, Homo sapiens
gtgttagaataatag

SEQ ID NO: 764844 - DNA, 15 bp, Homo sapiens
tgttagaataatagt

SEQ ID NO: 764845 - DNA, 15 bp, Homo sapiens
gttagaataatagtg

SEQ ID NO: 764846 - DNA, 15 bp, Homo sapiens
ttagaataatagtga

SEQ ID NO: 764847 - DNA, 15 bp, Homo sapiens
tagaataatagtgac

SEQ ID NO: 764848 - DNA, 15 bp, Homo sapiens
agaataatagtgaca

SEQ ID NO: 764849 - DNA, 15 bp, Homo sapiens
gaataatagtgacag

SEQ ID NO: 764850 - DNA, 15 bp, Homo sapiens
aataatagtgacagg

SEQ ID NO: 764851 - DNA, 15 bp, Homo sapiens
ataatagtgacaggt

SEQ ID NO: 764852 - DNA, 15 bp, Homo sapiens
taatagtgacaggta

SEQ ID NO: 764853 - DNA, 15 bp, Homo sapiens
aatagtgacaggtaa

SEQ ID NO: 764854 - DNA, 15 bp, Homo sapiens
atagtgacaggtaat

SEQ ID NO: 764855 - DNA, 15 bp, Homo sapiens
tagtgacaggtaatg

SEQ ID NO: 764856 - DNA, 15 bp, Homo sapiens
agtgacaggtaatgt

SEQ ID NO: 764857 - DNA, 15 bp, Homo sapiens
gtgacaggtaatgtc

SEQ ID NO: 764858 - DNA, 15 bp, Homo sapiens
tgacaggtaatgtcc

SEQ ID NO: 764859 - DNA, 15 bp, Homo sapiens
gacaggtaatgtccc

SEQ ID NO: 764860 - DNA, 15 bp, Homo sapiens
acaggtaatgtccca

SEQ ID NO: 764861 - DNA, 15 bp, Homo sapiens
caggtaatgtcccat

SEQ ID NO: 764862 - DNA, 15 bp, Homo sapiens
aggtaatgtcccatt

SEQ ID NO: 764863 - DNA, 15 bp, Homo sapiens
ggtaatgtcccattc

SEQ ID NO: 764864 - DNA, 15 bp, Homo sapiens
gtaatgtcccattca

SEQ ID NO: 764865 - DNA, 15 bp, Homo sapiens
taatgtcccattcag

SEQ ID NO: 764866 - DNA, 15 bp, Homo sapiens
aatgtcccattcagc

SEQ ID NO: 764867 - DNA, 15 bp, Homo sapiens
atgtcccattcagca

SEQ ID NO: 764868 - DNA, 15 bp, Homo sapiens
tgtcccattcagcat

SEQ ID NO: 764869 - DNA, 15 bp, Homo sapiens
gtcccattcagcatg

SEQ ID NO: 764870 - DNA, 15 bp, Homo sapiens
tcccattcagcatgt

SEQ ID NO: 764871 - DNA, 15 bp, Homo sapiens
cccattcagcatgtg

SEQ ID NO: 764872 - DNA, 15 bp, Homo sapiens
ccattcagcatgtga

SEQ ID NO: 764873 - DNA, 15 bp, Homo sapiens
cattcagcatgtgac

SEQ ID NO: 764874 - DNA, 15 bp, Homo sapiens
attcagcatgtgaca

SEQ ID NO: 764875 - DNA, 15 bp, Homo sapiens
ttcagcatgtgacag

SEQ ID NO: 764876 - DNA, 15 bp, Homo sapiens
tcagcatgtgacagt

SEQ ID NO: 764877 - DNA, 15 bp, Homo sapiens
cagcatgtgacagta

SEQ ID NO: 764878 - DNA, 15 bp, Homo sapiens
agcatgtgacagtat

SEQ ID NO: 764879 - DNA, 15 bp, Homo sapiens
gcatgtgacagtatt

SEQ ID NO: 764880 - DNA, 15 bp, Homo sapiens
catgtgacagtatta

SEQ ID NO: 764881 - DNA, 15 bp, Homo sapiens
atgtgacagtattat

SEQ ID NO: 764882 - DNA, 15 bp, Homo sapiens
tgtgacagtattatt

SEQ ID NO: 764883 - DNA, 15 bp, Homo sapiens
gtgacagtattattt

SEQ ID NO: 764884 - DNA, 15 bp, Homo sapiens
tgacagtattatttc

SEQ ID NO: 764885 - DNA, 15 bp, Homo sapiens
gacagtattatttcc

SEQ ID NO: 764886 - DNA, 15 bp, Homo sapiens
acagtattatttcct

SEQ ID NO: 764887 - DNA, 15 bp, Homo sapiens
cagtattatttccta

SEQ ID NO: 764888 - DNA, 15 bp, Homo sapiens
agtattatttcctaa

SEQ ID NO: 764889 - DNA, 15 bp, Homo sapiens
gtattatttcctaat

SEQ ID NO: 764890 - DNA, 15 bp, Homo sapiens
tattatttcctaata

SEQ ID NO: 764891 - DNA, 15 bp, Homo sapiens
attatttcctaataa

SEQ ID NO: 764892 - DNA, 15 bp, Homo sapiens
ttatttcctaataat

SEQ ID NO: 764893 - DNA, 15 bp, Homo sapiens
tatttcctaataatt

SEQ ID NO: 764894 - DNA, 15 bp, Homo sapiens
atttcctaataattt

SEQ ID NO: 764895 - DNA, 15 bp, Homo sapiens
tttcctaataattta

SEQ ID NO: 764896 - DNA, 15 bp, Homo sapiens
ttcctaataatttag

SEQ ID NO: 764897 - DNA, 15 bp, Homo sapiens
tcctaataatttagg

SEQ ID NO: 764898 - DNA, 15 bp, Homo sapiens
cctaataatttaggc

SEQ ID NO: 764899 - DNA, 15 bp, Homo sapiens
ctaataatttaggca

SEQ ID NO: 764900 - DNA, 15 bp, Homo sapiens
taataatttaggcat

SEQ ID NO: 764901 - DNA, 15 bp, Homo sapiens
aataatttaggcata

SEQ ID NO: 764902 - DNA, 15 bp, Homo sapiens
ataatttaggcataa

SEQ ID NO: 764903 - DNA, 15 bp, Homo sapiens
taatttaggcataat

SEQ ID NO: 764904 - DNA, 15 bp, Homo sapiens
aatttaggcataatt

SEQ ID NO: 764905 - DNA, 15 bp, Homo sapiens
atttaggcataattt

SEQ ID NO: 764906 - DNA, 15 bp, Homo sapiens
tttaggcataatttt

SEQ ID NO: 764907 - DNA, 15 bp, Homo sapiens
ttaggcataattttt

SEQ ID NO: 764908 - DNA, 15 bp, Homo sapiens
taggcataatttttt

SEQ ID NO: 764909 - DNA, 15 bp, Homo sapiens
aggcataatttttta

SEQ ID NO: 764910 - DNA, 15 bp, Homo sapiens
ggcataattttttaa

SEQ ID NO: 764911 - DNA, 15 bp, Homo sapiens
gcataattttttaat

SEQ ID NO: 764912 - DNA, 15 bp, Homo sapiens
cataattttttaatt

SEQ ID NO: 764913 - DNA, 15 bp, Homo sapiens
ataattttttaattc

SEQ ID NO: 764914 - DNA, 15 bp, Homo sapiens
taattttttaattca

SEQ ID NO: 764915 - DNA, 15 bp, Homo sapiens
aattttttaattcac

SEQ ID NO: 764916 - DNA, 15 bp, Homo sapiens
attttttaattcact

SEQ ID NO: 764917 - DNA, 15 bp, Homo sapiens
ttttttaattcactt

SEQ ID NO: 764918 - DNA, 15 bp, Homo sapiens
tttttaattcactta

SEQ ID NO: 764919 - DNA, 15 bp, Homo sapiens
ttttaattcacttaa

SEQ ID NO: 764920 - DNA, 15 bp, Homo sapiens
tttaattcacttaat

SEQ ID NO: 764921 - DNA, 15 bp, Homo sapiens
ttaattcacttaatg

SEQ ID NO: 764922 - DNA, 15 bp, Homo sapiens
taattcacttaatgg

SEQ ID NO: 764923 - DNA, 15 bp, Homo sapiens
aattcacttaatggt

SEQ ID NO: 764924 - DNA, 15 bp, Homo sapiens
attcacttaatggta

SEQ ID NO: 764925 - DNA, 15 bp, Homo sapiens
ttcacttaatggtac

SEQ ID NO: 764926 - DNA, 15 bp, Homo sapiens
tcacttaatggtaca

SEQ ID NO: 764927 - DNA, 15 bp, Homo sapiens
cacttaatggtacat

SEQ ID NO: 764928 - DNA, 15 bp, Homo sapiens
acttaatggtacatt

SEQ ID NO: 764929 - DNA, 15 bp, Homo sapiens
cttaatggtacattt

SEQ ID NO: 764930 - DNA, 15 bp, Homo sapiens
ttaatggtacattta

SEQ ID NO: 764931 - DNA, 15 bp, Homo sapiens
taatggtacatttag

SEQ ID NO: 764932 - DNA, 15 bp, Homo sapiens
aatggtacatttaga

SEQ ID NO: 764933 - DNA, 15 bp, Homo sapiens
atggtacatttagaa

SEQ ID NO: 764934 - DNA, 15 bp, Homo sapiens
tggtacatttagaat

SEQ ID NO: 764935 - DNA, 15 bp, Homo sapiens
ggtacatttagaatt

SEQ ID NO: 764936 - DNA, 15 bp, Homo sapiens
gtacatttagaattg

SEQ ID NO: 764937 - DNA, 15 bp, Homo sapiens
tacatttagaattgg

SEQ ID NO: 764938 - DNA, 15 bp, Homo sapiens
acatttagaattggt

SEQ ID NO: 764939 - DNA, 15 bp, Homo sapiens
catttagaattggtt

SEQ ID NO: 764940 - DNA, 15 bp, Homo sapiens
atttagaattggtta

SEQ ID NO: 764941 - DNA, 15 bp, Homo sapiens
tttagaattggttat

SEQ ID NO: 764942 - DNA, 15 bp, Homo sapiens
ttagaattggttatc

SEQ ID NO: 764943 - DNA, 15 bp, Homo sapiens
tagaattggttatct

SEQ ID NO: 764944 - DNA, 15 bp, Homo sapiens
agaattggttatcta

SEQ ID NO: 764945 - DNA, 15 bp, Homo sapiens
gaattggttatctaa

SEQ ID NO: 764946 - DNA, 15 bp, Homo sapiens
aattggttatctaag

SEQ ID NO: 764947 - DNA, 15 bp, Homo sapiens
attggttatctaaga

SEQ ID NO: 764948 - DNA, 15 bp, Homo sapiens
ttggttatctaagaa

SEQ ID NO: 764949 - DNA, 15 bp, Homo sapiens
tggttatctaagaaa

SEQ ID NO: 764950 - DNA, 15 bp, Homo sapiens
ggttatctaagaaat

SEQ ID NO: 764951 - DNA, 15 bp, Homo sapiens
gttatctaagaaata

SEQ ID NO: 764952 - DNA, 15 bp, Homo sapiens
ttatctaagaaatag

SEQ ID NO: 764953 - DNA, 15 bp, Homo sapiens
tatctaagaaataga

SEQ ID NO: 764954 - DNA, 15 bp, Homo sapiens
atctaagaaatagaa

SEQ ID NO: 764955 - DNA, 15 bp, Homo sapiens
tctaagaaatagaaa

SEQ ID NO: 764956 - DNA, 15 bp, Homo sapiens
ctaagaaatagaaat

SEQ ID NO: 764957 - DNA, 15 bp, Homo sapiens
taagaaatagaaata

SEQ ID NO: 764958 - DNA, 15 bp, Homo sapiens
aagaaatagaaataa

SEQ ID NO: 764959 - DNA, 15 bp, Homo sapiens
agaaatagaaataaa

SEQ ID NO: 764960 - DNA, 15 bp, Homo sapiens
gaaatagaaataaat

SEQ ID NO: 764961 - DNA, 15 bp, Homo sapiens
aaatagaaataaatc

SEQ ID NO: 764962 - DNA, 15 bp, Homo sapiens
aatagaaataaatca

SEQ ID NO: 764963 - DNA, 15 bp, Homo sapiens
atagaaataaatcac

SEQ ID NO: 764964 - DNA, 15 bp, Homo sapiens
tagaaataaatcact

SEQ ID NO: 764965 - DNA, 15 bp, Homo sapiens
agaaataaatcacta

SEQ ID NO: 764966 - DNA, 15 bp, Homo sapiens
gaaataaatcactaa

SEQ ID NO: 764967 - DNA, 15 bp, Homo sapiens
aaataaatcactaag

SEQ ID NO: 764968 - DNA, 15 bp, Homo sapiens
aataaatcactaagt

SEQ ID NO: 764969 - DNA, 15 bp, Homo sapiens
ataaatcactaagtg

SEQ ID NO: 764970 - DNA, 15 bp, Homo sapiens
taaatcactaagtgt

SEQ ID NO: 764971 - DNA, 15 bp, Homo sapiens
aaatcactaagtgtc

SEQ ID NO: 764972 - DNA, 15 bp, Homo sapiens
aatcactaagtgtca

SEQ ID NO: 764973 - DNA, 15 bp, Homo sapiens
atcactaagtgtcaa

SEQ ID NO: 764974 - DNA, 15 bp, Homo sapiens
tcactaagtgtcaaa

SEQ ID NO: 764975 - DNA, 15 bp, Homo sapiens
cactaagtgtcaaag

SEQ ID NO: 764976 - DNA, 15 bp, Homo sapiens
actaagtgtcaaaga

SEQ ID NO: 764977 - DNA, 15 bp, Homo sapiens
ctaagtgtcaaagac

SEQ ID NO: 764978 - DNA, 15 bp, Homo sapiens
taagtgtcaaagacc

SEQ ID NO: 764979 - DNA, 15 bp, Homo sapiens
aagtgtcaaagacca

SEQ ID NO: 764980 - DNA, 15 bp, Homo sapiens
agtgtcaaagaccat

SEQ ID NO: 764981 - DNA, 15 bp, Homo sapiens
gtgtcaaagaccatc

SEQ ID NO: 764982 - DNA, 15 bp, Homo sapiens
tgtcaaagaccatcc

SEQ ID NO: 764983 - DNA, 15 bp, Homo sapiens
gtcaaagaccatcca

SEQ ID NO: 764984 - DNA, 15 bp, Homo sapiens
tcaaagaccatccag

SEQ ID NO: 764985 - DNA, 15 bp, Homo sapiens
caaagaccatccagt

SEQ ID NO: 764986 - DNA, 15 bp, Homo sapiens
aaagaccatccagtt

SEQ ID NO: 764987 - DNA, 15 bp, Homo sapiens
aagaccatccagttt

SEQ ID NO: 764988 - DNA, 15 bp, Homo sapiens
agaccatccagtttc

SEQ ID NO: 764989 - DNA, 15 bp, Homo sapiens
gaccatccagtttca

SEQ ID NO: 764990 - DNA, 15 bp, Homo sapiens
accatccagtttcat

SEQ ID NO: 764991 - DNA, 15 bp, Homo sapiens
ccatccagtttcatt

SEQ ID NO: 764992 - DNA, 15 bp, Homo sapiens
catccagtttcattt

SEQ ID NO: 764993 - DNA, 15 bp, Homo sapiens
atccagtttcatttc

SEQ ID NO: 764994 - DNA, 15 bp, Homo sapiens
tccagtttcatttca

SEQ ID NO: 764995 - DNA, 15 bp, Homo sapiens
ccagtttcatttcag

SEQ ID NO: 764996 - DNA, 15 bp, Homo sapiens
cagtttcatttcagt

SEQ ID NO: 764997 - DNA, 15 bp, Homo sapiens
agtttcatttcagtc

SEQ ID NO: 764998 - DNA, 15 bp, Homo sapiens
gtttcatttcagtca

SEQ ID NO: 764999 - DNA, 15 bp, Homo sapiens
tttcatttcagtcat

SEQ ID NO: 765000 - DNA, 15 bp, Homo sapiens
ttcatttcagtcatg

SEQ ID NO: 765001 - DNA, 15 bp, Homo sapiens
tcatttcagtcatgg

SEQ ID NO: 765002 - DNA, 15 bp, Homo sapiens
catttcagtcatgga

SEQ ID NO: 765003 - DNA, 15 bp, Homo sapiens
atttcagtcatggaa

SEQ ID NO: 765004 - DNA, 15 bp, Homo sapiens
tttcagtcatggaat

SEQ ID NO: 765005 - DNA, 15 bp, Homo sapiens
ttcagtcatggaatt

SEQ ID NO: 765006 - DNA, 15 bp, Homo sapiens
tcagtcatggaattt

SEQ ID NO: 765007 - DNA, 15 bp, Homo sapiens
cagtcatggaatttt

SEQ ID NO: 765008 - DNA, 15 bp, Homo sapiens
agtcatggaattttg

SEQ ID NO: 765009 - DNA, 15 bp, Homo sapiens
gtcatggaattttgt

SEQ ID NO: 765010 - DNA, 15 bp, Homo sapiens
tcatggaattttgtt

SEQ ID NO: 765011 - DNA, 15 bp, Homo sapiens
catggaattttgttt

SEQ ID NO: 765012 - DNA, 15 bp, Homo sapiens
atggaattttgttta

SEQ ID NO: 765013 - DNA, 15 bp, Homo sapiens
tggaattttgtttat

SEQ ID NO: 765014 - DNA, 15 bp, Homo sapiens
ggaattttgtttatg

SEQ ID NO: 765015 - DNA, 15 bp, Homo sapiens
gaattttgtttatgc

SEQ ID NO: 765016 - DNA, 15 bp, Homo sapiens
aattttgtttatgca

SEQ ID NO: 765017 - DNA, 15 bp, Homo sapiens
attttgtttatgcag

SEQ ID NO: 765018 - DNA, 15 bp, Homo sapiens
ttttgtttatgcagg

SEQ ID NO: 765019 - DNA, 15 bp, Homo sapiens
tttgtttatgcagga

SEQ ID NO: 765020 - DNA, 15 bp, Homo sapiens
ttgtttatgcaggag

SEQ ID NO: 765021 - DNA, 15 bp, Homo sapiens
tgtttatgcaggagc

SEQ ID NO: 765022 - DNA, 15 bp, Homo sapiens
gtttatgcaggagcc

SEQ ID NO: 765023 - DNA, 15 bp, Homo sapiens
tttatgcaggagcct

SEQ ID NO: 765024 - DNA, 15 bp, Homo sapiens
ttatgcaggagccta

SEQ ID NO: 765025 - DNA, 15 bp, Homo sapiens
tatgcaggagcctag

SEQ ID NO: 765026 - DNA, 15 bp, Homo sapiens
atgcaggagcctagg

SEQ ID NO: 765027 - DNA, 15 bp, Homo sapiens
tgcaggagcctaggt

SEQ ID NO: 765028 - DNA, 15 bp, Homo sapiens
gcaggagcctaggta

SEQ ID NO: 765029 - DNA, 15 bp, Homo sapiens
caggagcctaggtat

SEQ ID NO: 765030 - DNA, 15 bp, Homo sapiens
aggagcctaggtatg

SEQ ID NO: 765031 - DNA, 15 bp, Homo sapiens
ggagcctaggtatgg

SEQ ID NO: 765032 - DNA, 15 bp, Homo sapiens
gagcctaggtatgga

SEQ ID NO: 765033 - DNA, 15 bp, Homo sapiens
agcctaggtatggac

SEQ ID NO: 765034 - DNA, 15 bp, Homo sapiens
gcctaggtatggaca

SEQ ID NO: 765035 - DNA, 15 bp, Homo sapiens
cctaggtatggacag

SEQ ID NO: 765036 - DNA, 15 bp, Homo sapiens
ctaggtatggacaga

SEQ ID NO: 765037 - DNA, 15 bp, Homo sapiens
taggtatggacagaa

SEQ ID NO: 765038 - DNA, 15 bp, Homo sapiens
aggtatggacagaaa

SEQ ID NO: 765039 - DNA, 15 bp, Homo sapiens
ggtatggacagaaat

SEQ ID NO: 765040 - DNA, 15 bp, Homo sapiens
gtatggacagaaata

SEQ ID NO: 765041 - DNA, 15 bp, Homo sapiens
tatggacagaaataa

SEQ ID NO: 765042 - DNA, 15 bp, Homo sapiens
atggacagaaataat

SEQ ID NO: 765043 - DNA, 15 bp, Homo sapiens
tggacagaaataatt

SEQ ID NO: 765044 - DNA, 15 bp, Homo sapiens
ggacagaaataatta

SEQ ID NO: 765045 - DNA, 15 bp, Homo sapiens
gacagaaataattat

SEQ ID NO: 765046 - DNA, 15 bp, Homo sapiens
acagaaataattata

SEQ ID NO: 765047 - DNA, 15 bp, Homo sapiens
cagaaataattatat

SEQ ID NO: 765048 - DNA, 15 bp, Homo sapiens
agaaataattatata

SEQ ID NO: 765049 - DNA, 15 bp, Homo sapiens
gaaataattatatac

SEQ ID NO: 765050 - DNA, 15 bp, Homo sapiens
aaataattatatact

SEQ ID NO: 765051 - DNA, 15 bp, Homo sapiens
aataattatatacta

SEQ ID NO: 765052 - DNA, 15 bp, Homo sapiens
ataattatatactaa

SEQ ID NO: 765053 - DNA, 15 bp, Homo sapiens
taattatatactaaa

SEQ ID NO: 765054 - DNA, 15 bp, Homo sapiens
aattatatactaaag

SEQ ID NO: 765055 - DNA, 15 bp, Homo sapiens
attatatactaaagg

SEQ ID NO: 765056 - DNA, 15 bp, Homo sapiens
ttatatactaaagga

SEQ ID NO: 765057 - DNA, 15 bp, Homo sapiens
tatatactaaaggaa

SEQ ID NO: 765058 - DNA, 15 bp, Homo sapiens
atatactaaaggaaa

SEQ ID NO: 765059 - DNA, 15 bp, Homo sapiens
tatactaaaggaaaa

SEQ ID NO: 765060 - DNA, 15 bp, Homo sapiens
atactaaaggaaaat

SEQ ID NO: 765061 - DNA, 15 bp, Homo sapiens
tactaaaggaaaatt

SEQ ID NO: 765062 - DNA, 15 bp, Homo sapiens
actaaaggaaaatta

SEQ ID NO: 765063 - DNA, 15 bp, Homo sapiens
ctaaaggaaaattag

SEQ ID NO: 765064 - DNA, 15 bp, Homo sapiens
taaaggaaaattaga

SEQ ID NO: 765065 - DNA, 15 bp, Homo sapiens
aaaggaaaattagac

SEQ ID NO: 765066 - DNA, 15 bp, Homo sapiens
aaggaaaattagacc

SEQ ID NO: 765067 - DNA, 15 bp, Homo sapiens
aggaaaattagacct

SEQ ID NO: 765068 - DNA, 15 bp, Homo sapiens
ggaaaattagacctg

SEQ ID NO: 765069 - DNA, 15 bp, Homo sapiens
gaaaattagacctgt

SEQ ID NO: 765070 - DNA, 15 bp, Homo sapiens
aaaattagacctgtt

SEQ ID NO: 765071 - DNA, 15 bp, Homo sapiens
aaattagacctgtta

SEQ ID NO: 765072 - DNA, 15 bp, Homo sapiens
aattagacctgttac

SEQ ID NO: 765073 - DNA, 15 bp, Homo sapiens
attagacctgttact

SEQ ID NO: 765074 - DNA, 15 bp, Homo sapiens
ttagacctgttactt

SEQ ID NO: 765075 - DNA, 15 bp, Homo sapiens
tagacctgttacttg

SEQ ID NO: 765076 - DNA, 15 bp, Homo sapiens
agacctgttacttgg

SEQ ID NO: 765077 - DNA, 15 bp, Homo sapiens
gacctgttacttggt

SEQ ID NO: 765078 - DNA, 15 bp, Homo sapiens
acctgttacttggtt

SEQ ID NO: 765079 - DNA, 15 bp, Homo sapiens
cctgttacttggttt

SEQ ID NO: 765080 - DNA, 15 bp, Homo sapiens
ctgttacttggttta

SEQ ID NO: 765081 - DNA, 15 bp, Homo sapiens
tgttacttggtttag

SEQ ID NO: 765082 - DNA, 15 bp, Homo sapiens
gttacttggtttagc

SEQ ID NO: 765083 - DNA, 15 bp, Homo sapiens
ttacttggtttagcc

SEQ ID NO: 765084 - DNA, 15 bp, Homo sapiens
tacttggtttagcca

SEQ ID NO: 765085 - DNA, 15 bp, Homo sapiens
acttggtttagccaa

SEQ ID NO: 765086 - DNA, 15 bp, Homo sapiens
cttggtttagccaaa

SEQ ID NO: 765087 - DNA, 15 bp, Homo sapiens
ttggtttagccaaaa

SEQ ID NO: 765088 - DNA, 15 bp, Homo sapiens
tggtttagccaaaaa

SEQ ID NO: 765089 - DNA, 15 bp, Homo sapiens
ggtttagccaaaaat

SEQ ID NO: 765090 - DNA, 15 bp, Homo sapiens
gtttagccaaaaatg

SEQ ID NO: 765091 - DNA, 15 bp, Homo sapiens
tttagccaaaaatgg

SEQ ID NO: 765092 - DNA, 15 bp, Homo sapiens
ttagccaaaaatgga

SEQ ID NO: 765093 - DNA, 15 bp, Homo sapiens
tagccaaaaatggaa

SEQ ID NO: 765094 - DNA, 15 bp, Homo sapiens
agccaaaaatggaag

SEQ ID NO: 765095 - DNA, 15 bp, Homo sapiens
gccaaaaatggaagt

SEQ ID NO: 765096 - DNA, 15 bp, Homo sapiens
ccaaaaatggaagtt

SEQ ID NO: 765097 - DNA, 15 bp, Homo sapiens
caaaaatggaagtta

SEQ ID NO: 765098 - DNA, 15 bp, Homo sapiens
aaaaatggaagttaa

SEQ ID NO: 765099 - DNA, 15 bp, Homo sapiens
aaaatggaagttaaa

SEQ ID NO: 765100 - DNA, 15 bp, Homo sapiens
aaatggaagttaaaa

SEQ ID NO: 765101 - DNA, 15 bp, Homo sapiens
aatggaagttaaaac

SEQ ID NO: 765102 - DNA, 15 bp, Homo sapiens
atggaagttaaaact

SEQ ID NO: 765103 - DNA, 15 bp, Homo sapiens
tggaagttaaaactc

SEQ ID NO: 765104 - DNA, 15 bp, Homo sapiens
ggaagttaaaactca

SEQ ID NO: 765105 - DNA, 15 bp, Homo sapiens
gaagttaaaactcag

SEQ ID NO: 765106 - DNA, 15 bp, Homo sapiens
aagttaaaactcagt

SEQ ID NO: 765107 - DNA, 15 bp, Homo sapiens
agttaaaactcagtg

SEQ ID NO: 765108 - DNA, 15 bp, Homo sapiens
gttaaaactcagtgc

SEQ ID NO: 765109 - DNA, 15 bp, Homo sapiens
ttaaaactcagtgca

SEQ ID NO: 765110 - DNA, 15 bp, Homo sapiens
taaaactcagtgcag

SEQ ID NO: 765111 - DNA, 15 bp, Homo sapiens
aaaactcagtgcaga

SEQ ID NO: 765112 - DNA, 15 bp, Homo sapiens
aaactcagtgcagaa

SEQ ID NO: 765113 - DNA, 15 bp, Homo sapiens
aactcagtgcagaag

SEQ ID NO: 765114 - DNA, 15 bp, Homo sapiens
actcagtgcagaagt

SEQ ID NO: 765115 - DNA, 15 bp, Homo sapiens
ctcagtgcagaagtc

SEQ ID NO: 765116 - DNA, 15 bp, Homo sapiens
tcagtgcagaagtct

SEQ ID NO: 765117 - DNA, 15 bp, Homo sapiens
cagtgcagaagtctt

SEQ ID NO: 765118 - DNA, 15 bp, Homo sapiens
agtgcagaagtcttt

SEQ ID NO: 765119 - DNA, 15 bp, Homo sapiens
gtgcagaagtctttg

SEQ ID NO: 765120 - DNA, 15 bp, Homo sapiens
tgcagaagtctttgg

SEQ ID NO: 765121 - DNA, 15 bp, Homo sapiens
gcagaagtctttggt

SEQ ID NO: 765122 - DNA, 15 bp, Homo sapiens
cagaagtctttggtt

SEQ ID NO: 765123 - DNA, 15 bp, Homo sapiens
agaagtctttggttc

SEQ ID NO: 765124 - DNA, 15 bp, Homo sapiens
gaagtctttggttct

SEQ ID NO: 765125 - DNA, 15 bp, Homo sapiens
aagtctttggttctt

SEQ ID NO: 765126 - DNA, 15 bp, Homo sapiens
agtctttggttcttg

SEQ ID NO: 765127 - DNA, 15 bp, Homo sapiens
gtctttggttcttgg

SEQ ID NO: 765128 - DNA, 15 bp, Homo sapiens
tctttggttcttgga

SEQ ID NO: 765129 - DNA, 15 bp, Homo sapiens
ctttggttcttggac

SEQ ID NO: 765130 - DNA, 15 bp, Homo sapiens
tttggttcttggact

SEQ ID NO: 765131 - DNA, 15 bp, Homo sapiens
ttggttcttggacta

SEQ ID NO: 765132 - DNA, 15 bp, Homo sapiens
tggttcttggactag

SEQ ID NO: 765133 - DNA, 15 bp, Homo sapiens
ggttcttggactagg

SEQ ID NO: 765134 - DNA, 15 bp, Homo sapiens
gttcttggactaggg

SEQ ID NO: 765135 - DNA, 15 bp, Homo sapiens
ttcttggactaggga

SEQ ID NO: 765136 - DNA, 15 bp, Homo sapiens
tcttggactagggac

SEQ ID NO: 765137 - DNA, 15 bp, Homo sapiens
cttggactagggact

SEQ ID NO: 765138 - DNA, 15 bp, Homo sapiens
ttggactagggactc

SEQ ID NO: 765139 - DNA, 15 bp, Homo sapiens
tggactagggactct

SEQ ID NO: 765140 - DNA, 15 bp, Homo sapiens
ggactagggactcta

SEQ ID NO: 765141 - DNA, 15 bp, Homo sapiens
gactagggactctaa

SEQ ID NO: 765142 - DNA, 15 bp, Homo sapiens
actagggactctaac

SEQ ID NO: 765143 - DNA, 15 bp, Homo sapiens
ctagggactctaaca

SEQ ID NO: 765144 - DNA, 15 bp, Homo sapiens
tagggactctaacat

SEQ ID NO: 765145 - DNA, 15 bp, Homo sapiens
agggactctaacatt

SEQ ID NO: 765146 - DNA, 15 bp, Homo sapiens
gggactctaacattg

SEQ ID NO: 765147 - DNA, 15 bp, Homo sapiens
ggactctaacattgt

SEQ ID NO: 765148 - DNA, 15 bp, Homo sapiens
gactctaacattgtc

SEQ ID NO: 765149 - DNA, 15 bp, Homo sapiens
actctaacattgtct

SEQ ID NO: 765150 - DNA, 15 bp, Homo sapiens
ctctaacattgtctg

SEQ ID NO: 765151 - DNA, 15 bp, Homo sapiens
tctaacattgtctgc

SEQ ID NO: 765152 - DNA, 15 bp, Homo sapiens
ctaacattgtctgct

SEQ ID NO: 765153 - DNA, 15 bp, Homo sapiens
taacattgtctgctc

SEQ ID NO: 765154 - DNA, 15 bp, Homo sapiens
aacattgtctgctca

SEQ ID NO: 765155 - DNA, 15 bp, Homo sapiens
acattgtctgctcag

SEQ ID NO: 765156 - DNA, 15 bp, Homo sapiens
cattgtctgctcagt

SEQ ID NO: 765157 - DNA, 15 bp, Homo sapiens
attgtctgctcagtg

SEQ ID NO: 765158 - DNA, 15 bp, Homo sapiens
ttgtctgctcagtgt

SEQ ID NO: 765159 - DNA, 15 bp, Homo sapiens
tgtctgctcagtgtt

SEQ ID NO: 765160 - DNA, 15 bp, Homo sapiens
gtctgctcagtgtta

SEQ ID NO: 765161 - DNA, 15 bp, Homo sapiens
tctgctcagtgttac

SEQ ID NO: 765162 - DNA, 15 bp, Homo sapiens
ctgctcagtgttacc

SEQ ID NO: 765163 - DNA, 15 bp, Homo sapiens
tgctcagtgttacca

SEQ ID NO: 765164 - DNA, 15 bp, Homo sapiens
gctcagtgttaccaa

SEQ ID NO: 765165 - DNA, 15 bp, Homo sapiens
ctcagtgttaccaag

SEQ ID NO: 765166 - DNA, 15 bp, Homo sapiens
tcagtgttaccaagc

SEQ ID NO: 765167 - DNA, 15 bp, Homo sapiens
cagtgttaccaagca

SEQ ID NO: 765168 - DNA, 15 bp, Homo sapiens
agtgttaccaagcag

SEQ ID NO: 765169 - DNA, 15 bp, Homo sapiens
gtgttaccaagcaga

SEQ ID NO: 765170 - DNA, 15 bp, Homo sapiens
tgttaccaagcagac

SEQ ID NO: 765171 - DNA, 15 bp, Homo sapiens
gttaccaagcagaca

SEQ ID NO: 765172 - DNA, 15 bp, Homo sapiens
ttaccaagcagacac

SEQ ID NO: 765173 - DNA, 15 bp, Homo sapiens
taccaagcagacaca

SEQ ID NO: 765174 - DNA, 15 bp, Homo sapiens
accaagcagacacat

SEQ ID NO: 765175 - DNA, 15 bp, Homo sapiens
ccaagcagacacata

SEQ ID NO: 765176 - DNA, 15 bp, Homo sapiens
caagcagacacatag

SEQ ID NO: 765177 - DNA, 15 bp, Homo sapiens
aagcagacacatagc

SEQ ID NO: 765178 - DNA, 15 bp, Homo sapiens
agcagacacatagcc

SEQ ID NO: 765179 - DNA, 15 bp, Homo sapiens
gcagacacatagcct

SEQ ID NO: 765180 - DNA, 15 bp, Homo sapiens
cagacacatagcctt

SEQ ID NO: 765181 - DNA, 15 bp, Homo sapiens
agacacatagccttt

SEQ ID NO: 765182 - DNA, 15 bp, Homo sapiens
gacacatagcctttc

SEQ ID NO: 765183 - DNA, 15 bp, Homo sapiens
acacatagcctttcc

SEQ ID NO: 765184 - DNA, 15 bp, Homo sapiens
cacatagcctttcct

SEQ ID NO: 765185 - DNA, 15 bp, Homo sapiens
acatagcctttcctg

SEQ ID NO: 765186 - DNA, 15 bp, Homo sapiens
catagcctttcctga

SEQ ID NO: 765187 - DNA, 15 bp, Homo sapiens
atagcctttcctgat

SEQ ID NO: 765188 - DNA, 15 bp, Homo sapiens
tagcctttcctgatc

SEQ ID NO: 765189 - DNA, 15 bp, Homo sapiens
agcctttcctgatca

SEQ ID NO: 765190 - DNA, 15 bp, Homo sapiens
gcctttcctgatcat

SEQ ID NO: 765191 - DNA, 15 bp, Homo sapiens
cctttcctgatcatc

SEQ ID NO: 765192 - DNA, 15 bp, Homo sapiens
ctttcctgatcatca

SEQ ID NO: 765193 - DNA, 15 bp, Homo sapiens
tttcctgatcatcaa

SEQ ID NO: 765194 - DNA, 15 bp, Homo sapiens
ttcctgatcatcaaa

SEQ ID NO: 765195 - DNA, 15 bp, Homo sapiens
tcctgatcatcaaac

SEQ ID NO: 765196 - DNA, 15 bp, Homo sapiens
cctgatcatcaaacc

SEQ ID NO: 765197 - DNA, 15 bp, Homo sapiens
ctgatcatcaaacct

SEQ ID NO: 765198 - DNA, 15 bp, Homo sapiens
tgatcatcaaacctg

SEQ ID NO: 765199 - DNA, 15 bp, Homo sapiens
gatcatcaaacctga

SEQ ID NO: 765200 - DNA, 15 bp, Homo sapiens
atcatcaaacctgat

SEQ ID NO: 765201 - DNA, 15 bp, Homo sapiens
tcatcaaacctgatc

SEQ ID NO: 765202 - DNA, 15 bp, Homo sapiens
catcaaacctgatct

SEQ ID NO: 765203 - DNA, 15 bp, Homo sapiens
atcaaacctgatctt

SEQ ID NO: 765204 - DNA, 15 bp, Homo sapiens
tcaaacctgatcttt

SEQ ID NO: 765205 - DNA, 15 bp, Homo sapiens
caaacctgatctttt

SEQ ID NO: 765206 - DNA, 15 bp, Homo sapiens
aaacctgatcttttg

SEQ ID NO: 765207 - DNA, 15 bp, Homo sapiens
aacctgatcttttga

SEQ ID NO: 765208 - DNA, 15 bp, Homo sapiens
acctgatcttttgat

SEQ ID NO: 765209 - DNA, 15 bp, Homo sapiens
cctgatcttttgata

SEQ ID NO: 765210 - DNA, 15 bp, Homo sapiens
ctgatcttttgataa

SEQ ID NO: 765211 - DNA, 15 bp, Homo sapiens
tgatcttttgataat

SEQ ID NO: 765212 - DNA, 15 bp, Homo sapiens
gatcttttgataata

SEQ ID NO: 765213 - DNA, 15 bp, Homo sapiens
atcttttgataatat

SEQ ID NO: 765214 - DNA, 15 bp, Homo sapiens
tcttttgataatatc

SEQ ID NO: 765215 - DNA, 15 bp, Homo sapiens
cttttgataatatca

SEQ ID NO: 765216 - DNA, 15 bp, Homo sapiens
ttttgataatatcac

SEQ ID NO: 765217 - DNA, 15 bp, Homo sapiens
tttgataatatcacc

SEQ ID NO: 765218 - DNA, 15 bp, Homo sapiens
ttgataatatcacct

SEQ ID NO: 765219 - DNA, 15 bp, Homo sapiens
tgataatatcaccta

SEQ ID NO: 765220 - DNA, 15 bp, Homo sapiens
gataatatcacctat

SEQ ID NO: 765221 - DNA, 15 bp, Homo sapiens
ataatatcacctatg

SEQ ID NO: 765222 - DNA, 15 bp, Homo sapiens
taatatcacctatgc

SEQ ID NO: 765223 - DNA, 15 bp, Homo sapiens
aatatcacctatgcg

SEQ ID NO: 765224 - DNA, 15 bp, Homo sapiens
atatcacctatgcgc

SEQ ID NO: 765225 - DNA, 15 bp, Homo sapiens
tatcacctatgcgct

SEQ ID NO: 765226 - DNA, 15 bp, Homo sapiens
atcacctatgcgctg

SEQ ID NO: 765227 - DNA, 15 bp, Homo sapiens
tcacctatgcgctgt

SEQ ID NO: 765228 - DNA, 15 bp, Homo sapiens
cacctatgcgctgta

SEQ ID NO: 765229 - DNA, 15 bp, Homo sapiens
acctatgcgctgtat

SEQ ID NO: 765230 - DNA, 15 bp, Homo sapiens
cctatgcgctgtatg

SEQ ID NO: 765231 - DNA, 15 bp, Homo sapiens
ctatgcgctgtatgg

SEQ ID NO: 765232 - DNA, 15 bp, Homo sapiens
tatgcgctgtatggt

SEQ ID NO: 765233 - DNA, 15 bp, Homo sapiens
atgcgctgtatggta

SEQ ID NO: 765234 - DNA, 15 bp, Homo sapiens
tgcgctgtatggtat

SEQ ID NO: 765235 - DNA, 15 bp, Homo sapiens
gcgctgtatggtatg

SEQ ID NO: 765236 - DNA, 15 bp, Homo sapiens
cgctgtatggtatgt

SEQ ID NO: 765237 - DNA, 15 bp, Homo sapiens
gctgtatggtatgtg

SEQ ID NO: 765238 - DNA, 15 bp, Homo sapiens
ctgtatggtatgtgt

SEQ ID NO: 765239 - DNA, 15 bp, Homo sapiens
tgtatggtatgtgtg

SEQ ID NO: 765240 - DNA, 15 bp, Homo sapiens
gtatggtatgtgtga

SEQ ID NO: 765241 - DNA, 15 bp, Homo sapiens
tatggtatgtgtgaa

SEQ ID NO: 765242 - DNA, 15 bp, Homo sapiens
atggtatgtgtgaaa

SEQ ID NO: 765243 - DNA, 15 bp, Homo sapiens
tggtatgtgtgaaaa

SEQ ID NO: 765244 - DNA, 15 bp, Homo sapiens
ggtatgtgtgaaaac

SEQ ID NO: 765245 - DNA, 15 bp, Homo sapiens
gtatgtgtgaaaact

SEQ ID NO: 765246 - DNA, 15 bp, Homo sapiens
tatgtgtgaaaactg

SEQ ID NO: 765247 - DNA, 15 bp, Homo sapiens
atgtgtgaaaactgc

SEQ ID NO: 765248 - DNA, 15 bp, Homo sapiens
tgtgtgaaaactgct

SEQ ID NO: 765249 - DNA, 15 bp, Homo sapiens
gtgtgaaaactgctg

SEQ ID NO: 765250 - DNA, 15 bp, Homo sapiens
tgtgaaaactgctgg

SEQ ID NO: 765251 - DNA, 15 bp, Homo sapiens
gtgaaaactgctggt

SEQ ID NO: 765252 - DNA, 15 bp, Homo sapiens
tgaaaactgctggtt

SEQ ID NO: 765253 - DNA, 15 bp, Homo sapiens
gaaaactgctggttg

SEQ ID NO: 765254 - DNA, 15 bp, Homo sapiens
aaaactgctggttgc

SEQ ID NO: 765255 - DNA, 15 bp, Homo sapiens
aaactgctggttgct

SEQ ID NO: 765256 - DNA, 15 bp, Homo sapiens
aactgctggttgctt

SEQ ID NO: 765257 - DNA, 15 bp, Homo sapiens
actgctggttgcttg

SEQ ID NO: 765258 - DNA, 15 bp, Homo sapiens
ctgctggttgcttgt

SEQ ID NO: 765259 - DNA, 15 bp, Homo sapiens
tgctggttgcttgtg

SEQ ID NO: 765260 - DNA, 15 bp, Homo sapiens
gctggttgcttgtgc

SEQ ID NO: 765261 - DNA, 15 bp, Homo sapiens
ctggttgcttgtgcc

SEQ ID NO: 765262 - DNA, 15 bp, Homo sapiens
tggttgcttgtgccc

SEQ ID NO: 765263 - DNA, 15 bp, Homo sapiens
ggttgcttgtgccct

SEQ ID NO: 765264 - DNA, 15 bp, Homo sapiens
gttgcttgtgccctc

SEQ ID NO: 765265 - DNA, 15 bp, Homo sapiens
ttgcttgtgccctcc

SEQ ID NO: 765266 - DNA, 15 bp, Homo sapiens
tgcttgtgccctcca

SEQ ID NO: 765267 - DNA, 15 bp, Homo sapiens
gcttgtgccctccat

SEQ ID NO: 765268 - DNA, 15 bp, Homo sapiens
cttgtgccctccata

SEQ ID NO: 765269 - DNA, 15 bp, Homo sapiens
ttgtgccctccatag

SEQ ID NO: 765270 - DNA, 15 bp, Homo sapiens
tgtgccctccatagc

SEQ ID NO: 765271 - DNA, 15 bp, Homo sapiens
gtgccctccatagct

SEQ ID NO: 765272 - DNA, 15 bp, Homo sapiens
tgccctccatagctg

SEQ ID NO: 765273 - DNA, 15 bp, Homo sapiens
gccctccatagctgc

SEQ ID NO: 765274 - DNA, 15 bp, Homo sapiens
ccctccatagctgct

SEQ ID NO: 765275 - DNA, 15 bp, Homo sapiens
cctccatagctgcta

SEQ ID NO: 765276 - DNA, 15 bp, Homo sapiens
ctccatagctgctaa

SEQ ID NO: 765277 - DNA, 15 bp, Homo sapiens
tccatagctgctaaa

SEQ ID NO: 765278 - DNA, 15 bp, Homo sapiens
ccatagctgctaaat

SEQ ID NO: 765279 - DNA, 15 bp, Homo sapiens
catagctgctaaatt

SEQ ID NO: 765280 - DNA, 15 bp, Homo sapiens
atagctgctaaatta

SEQ ID NO: 765281 - DNA, 15 bp, Homo sapiens
tagctgctaaattac

SEQ ID NO: 765282 - DNA, 15 bp, Homo sapiens
agctgctaaattact

SEQ ID NO: 765283 - DNA, 15 bp, Homo sapiens
gctgctaaattactg

SEQ ID NO: 765284 - DNA, 15 bp, Homo sapiens
ctgctaaattactga

SEQ ID NO: 765285 - DNA, 15 bp, Homo sapiens
tgctaaattactgaa

SEQ ID NO: 765286 - DNA, 15 bp, Homo sapiens
gctaaattactgaag

SEQ ID NO: 765287 - DNA, 15 bp, Homo sapiens
ctaaattactgaaga

SEQ ID NO: 765288 - DNA, 15 bp, Homo sapiens
taaattactgaagag

SEQ ID NO: 765289 - DNA, 15 bp, Homo sapiens
aaattactgaagaga

SEQ ID NO: 765290 - DNA, 15 bp, Homo sapiens
aattactgaagagaa

SEQ ID NO: 765291 - DNA, 15 bp, Homo sapiens
attactgaagagaat

SEQ ID NO: 765292 - DNA, 15 bp, Homo sapiens
ttactgaagagaata

SEQ ID NO: 765293 - DNA, 15 bp, Homo sapiens
tactgaagagaatag

SEQ ID NO: 765294 - DNA, 15 bp, Homo sapiens
actgaagagaataga

SEQ ID NO: 765295 - DNA, 15 bp, Homo sapiens
ctgaagagaatagaa

SEQ ID NO: 765296 - DNA, 15 bp, Homo sapiens
tgaagagaatagaat

SEQ ID NO: 765297 - DNA, 15 bp, Homo sapiens
gaagagaatagaata

SEQ ID NO: 765298 - DNA, 15 bp, Homo sapiens
aagagaatagaatat

SEQ ID NO: 765299 - DNA, 15 bp, Homo sapiens
agagaatagaatatc

SEQ ID NO: 765300 - DNA, 15 bp, Homo sapiens
gagaatagaatatcc

SEQ ID NO: 765301 - DNA, 15 bp, Homo sapiens
agaatagaatatcct

SEQ ID NO: 765302 - DNA, 15 bp, Homo sapiens
gaatagaatatcctt

SEQ ID NO: 765303 - DNA, 15 bp, Homo sapiens
aatagaatatccttc

SEQ ID NO: 765304 - DNA, 15 bp, Homo sapiens
atagaatatccttca

SEQ ID NO: 765305 - DNA, 15 bp, Homo sapiens
tagaatatccttcag

SEQ ID NO: 765306 - DNA, 15 bp, Homo sapiens
agaatatccttcaga

SEQ ID NO: 765307 - DNA, 15 bp, Homo sapiens
gaatatccttcagaa

SEQ ID NO: 765308 - DNA, 15 bp, Homo sapiens
aatatccttcagaag

SEQ ID NO: 765309 - DNA, 15 bp, Homo sapiens
atatccttcagaaga

SEQ ID NO: 765310 - DNA, 15 bp, Homo sapiens
tatccttcagaagac

SEQ ID NO: 765311 - DNA, 15 bp, Homo sapiens
atccttcagaagaca

SEQ ID NO: 765312 - DNA, 15 bp, Homo sapiens
tccttcagaagacag

SEQ ID NO: 765313 - DNA, 15 bp, Homo sapiens
ccttcagaagacaga

SEQ ID NO: 765314 - DNA, 15 bp, Homo sapiens
cttcagaagacagaa

SEQ ID NO: 765315 - DNA, 15 bp, Homo sapiens
ttcagaagacagaat

SEQ ID NO: 765316 - DNA, 15 bp, Homo sapiens
tcagaagacagaata

SEQ ID NO: 765317 - DNA, 15 bp, Homo sapiens
cagaagacagaatac

SEQ ID NO: 765318 - DNA, 15 bp, Homo sapiens
agaagacagaatact

SEQ ID NO: 765319 - DNA, 15 bp, Homo sapiens
gaagacagaatacta

SEQ ID NO: 765320 - DNA, 15 bp, Homo sapiens
aagacagaatactat

SEQ ID NO: 765321 - DNA, 15 bp, Homo sapiens
agacagaatactatc

SEQ ID NO: 765322 - DNA, 15 bp, Homo sapiens
gacagaatactatca

SEQ ID NO: 765323 - DNA, 15 bp, Homo sapiens
acagaatactatcat

SEQ ID NO: 765324 - DNA, 15 bp, Homo sapiens
cagaatactatcata

SEQ ID NO: 765325 - DNA, 15 bp, Homo sapiens
agaatactatcatac

SEQ ID NO: 765326 - DNA, 15 bp, Homo sapiens
gaatactatcataca

SEQ ID NO: 765327 - DNA, 15 bp, Homo sapiens
aatactatcatacag

SEQ ID NO: 765328 - DNA, 15 bp, Homo sapiens
atactatcatacagg

SEQ ID NO: 765329 - DNA, 15 bp, Homo sapiens
tactatcatacaggt

SEQ ID NO: 765330 - DNA, 15 bp, Homo sapiens
actatcatacaggtt

SEQ ID NO: 765331 - DNA, 15 bp, Homo sapiens
ctatcatacaggttt

SEQ ID NO: 765332 - DNA, 15 bp, Homo sapiens
tatcatacaggtttt

SEQ ID NO: 765333 - DNA, 15 bp, Homo sapiens
atcatacaggttttt

SEQ ID NO: 765334 - DNA, 15 bp, Homo sapiens
tcatacaggttttta

SEQ ID NO: 765335 - DNA, 15 bp, Homo sapiens
catacaggtttttag

SEQ ID NO: 765336 - DNA, 15 bp, Homo sapiens
atacaggtttttagc

SEQ ID NO: 765337 - DNA, 15 bp, Homo sapiens
tacaggtttttagca

SEQ ID NO: 765338 - DNA, 15 bp, Homo sapiens
acaggtttttagcat

SEQ ID NO: 765339 - DNA, 15 bp, Homo sapiens
caggtttttagcatt

SEQ ID NO: 765340 - DNA, 15 bp, Homo sapiens
aggtttttagcattt

SEQ ID NO: 765341 - DNA, 15 bp, Homo sapiens
ggtttttagcatttt

SEQ ID NO: 765342 - DNA, 15 bp, Homo sapiens
gtttttagcattttt

SEQ ID NO: 765343 - DNA, 15 bp, Homo sapiens
tttttagcatttttt

SEQ ID NO: 765344 - DNA, 15 bp, Homo sapiens
ttttagcattttttg

SEQ ID NO: 765345 - DNA, 15 bp, Homo sapiens
tttagcattttttgt

SEQ ID NO: 765346 - DNA, 15 bp, Homo sapiens
ttagcattttttgtc

SEQ ID NO: 765347 - DNA, 15 bp, Homo sapiens
tagcattttttgtct

SEQ ID NO: 765348 - DNA, 15 bp, Homo sapiens
agcattttttgtctt

SEQ ID NO: 765349 - DNA, 15 bp, Homo sapiens
gcattttttgtcttt

SEQ ID NO: 765350 - DNA, 15 bp, Homo sapiens
cattttttgtctttc

SEQ ID NO: 765351 - DNA, 15 bp, Homo sapiens
attttttgtctttcg

SEQ ID NO: 765352 - DNA, 15 bp, Homo sapiens
ttttttgtctttcgt

SEQ ID NO: 765353 - DNA, 15 bp, Homo sapiens
tttttgtctttcgtg

SEQ ID NO: 765354 - DNA, 15 bp, Homo sapiens
ttttgtctttcgtga

SEQ ID NO: 765355 - DNA, 15 bp, Homo sapiens
tttgtctttcgtgag

SEQ ID NO: 765356 - DNA, 15 bp, Homo sapiens
ttgtctttcgtgagt

SEQ ID NO: 765357 - DNA, 15 bp, Homo sapiens
tgtctttcgtgagtg

SEQ ID NO: 765358 - DNA, 15 bp, Homo sapiens
gtctttcgtgagtgt

SEQ ID NO: 765359 - DNA, 15 bp, Homo sapiens
tctttcgtgagtgtt

SEQ ID NO: 765360 - DNA, 15 bp, Homo sapiens
ctttcgtgagtgtta

SEQ ID NO: 765361 - DNA, 15 bp, Homo sapiens
tttcgtgagtgttaa

SEQ ID NO: 765362 - DNA, 15 bp, Homo sapiens
ttcgtgagtgttaag

SEQ ID NO: 765363 - DNA, 15 bp, Homo sapiens
tcgtgagtgttaagc

SEQ ID NO: 765364 - DNA, 15 bp, Homo sapiens
cgtgagtgttaagct

SEQ ID NO: 765365 - DNA, 15 bp, Homo sapiens
gtgagtgttaagctc

SEQ ID NO: 765366 - DNA, 15 bp, Homo sapiens
tgagtgttaagctct

SEQ ID NO: 765367 - DNA, 15 bp, Homo sapiens
gagtgttaagctctg

SEQ ID NO: 765368 - DNA, 15 bp, Homo sapiens
agtgttaagctctgt

SEQ ID NO: 765369 - DNA, 15 bp, Homo sapiens
tcttttctattggtt

SEQ ID NO: 765370 - DNA, 15 bp, Homo sapiens
cttttctattggttg

SEQ ID NO: 765371 - DNA, 15 bp, Homo sapiens
ttttctattggttgt

SEQ ID NO: 765372 - DNA, 15 bp, Homo sapiens
tttctattggttgtt

SEQ ID NO: 765373 - DNA, 15 bp, Homo sapiens
ttctattggttgtta

SEQ ID NO: 765374 - DNA, 15 bp, Homo sapiens
tctattggttgttat

SEQ ID NO: 765375 - DNA, 15 bp, Homo sapiens
ctattggttgttatg

SEQ ID NO: 765376 - DNA, 15 bp, Homo sapiens
tattggttgttatgg

SEQ ID NO: 765377 - DNA, 15 bp, Homo sapiens
attggttgttatgga

SEQ ID NO: 765378 - DNA, 15 bp, Homo sapiens
ttggttgttatggag

SEQ ID NO: 765379 - DNA, 15 bp, Homo sapiens
tggttgttatggaga

SEQ ID NO: 765380 - DNA, 15 bp, Homo sapiens
ggttgttatggagac

SEQ ID NO: 765381 - DNA, 15 bp, Homo sapiens
gttgttatggagact

SEQ ID NO: 765382 - DNA, 15 bp, Homo sapiens
ttgttatggagactt

SEQ ID NO: 765383 - DNA, 15 bp, Homo sapiens
tgttatggagactta

SEQ ID NO: 765384 - DNA, 15 bp, Homo sapiens
gttatggagacttat

SEQ ID NO: 765385 - DNA, 15 bp, Homo sapiens
ttatggagacttatt

SEQ ID NO: 765386 - DNA, 15 bp, Homo sapiens
tatggagacttattt

SEQ ID NO: 765387 - DNA, 15 bp, Homo sapiens
atggagacttatttt

SEQ ID NO: 765388 - DNA, 15 bp, Homo sapiens
tggagacttattttt

SEQ ID NO: 765389 - DNA, 15 bp, Homo sapiens
ggagacttatttttc

SEQ ID NO: 765390 - DNA, 15 bp, Homo sapiens
gagacttatttttca

SEQ ID NO: 765391 - DNA, 15 bp, Homo sapiens
agacttatttttcat

SEQ ID NO: 765392 - DNA, 15 bp, Homo sapiens
gacttatttttcatg

SEQ ID NO: 765393 - DNA, 15 bp, Homo sapiens
acttatttttcatga

SEQ ID NO: 765394 - DNA, 15 bp, Homo sapiens
cttatttttcatgaa

SEQ ID NO: 765395 - DNA, 15 bp, Homo sapiens
ttatttttcatgaag

SEQ ID NO: 765396 - DNA, 15 bp, Homo sapiens
tatttttcatgaagg

SEQ ID NO: 765397 - DNA, 15 bp, Homo sapiens
atttttcatgaaggg

SEQ ID NO: 765398 - DNA, 15 bp, Homo sapiens
tttttcatgaaggga

SEQ ID NO: 765399 - DNA, 15 bp, Homo sapiens
ttttcatgaagggac

SEQ ID NO: 765400 - DNA, 15 bp, Homo sapiens
tttcatgaagggaca

SEQ ID NO: 765401 - DNA, 15 bp, Homo sapiens
ttcatgaagggacat

SEQ ID NO: 765402 - DNA, 15 bp, Homo sapiens
tcatgaagggacatg

SEQ ID NO: 765403 - DNA, 15 bp, Homo sapiens
catgaagggacatgg

SEQ ID NO: 765404 - DNA, 15 bp, Homo sapiens
atgaagggacatggt

SEQ ID NO: 765405 - DNA, 15 bp, Homo sapiens
tgaagggacatggtg

SEQ ID NO: 765406 - DNA, 15 bp, Homo sapiens
gaagggacatggtgc

SEQ ID NO: 765407 - DNA, 15 bp, Homo sapiens
aagggacatggtgct

SEQ ID NO: 765408 - DNA, 15 bp, Homo sapiens
agggacatggtgctg

SEQ ID NO: 765409 - DNA, 15 bp, Homo sapiens
gggacatggtgctgc

SEQ ID NO: 765410 - DNA, 15 bp, Homo sapiens
ggacatggtgctgct

SEQ ID NO: 765411 - DNA, 15 bp, Homo sapiens
gacatggtgctgctt

SEQ ID NO: 765412 - DNA, 15 bp, Homo sapiens
acatggtgctgcttt

SEQ ID NO: 765413 - DNA, 15 bp, Homo sapiens
catggtgctgcttta

SEQ ID NO: 765414 - DNA, 15 bp, Homo sapiens
atggtgctgctttac

SEQ ID NO: 765415 - DNA, 15 bp, Homo sapiens
tggtgctgctttact

SEQ ID NO: 765416 - DNA, 15 bp, Homo sapiens
ggtgctgctttactt

SEQ ID NO: 765417 - DNA, 15 bp, Homo sapiens
gtgctgctttacttg

SEQ ID NO: 765418 - DNA, 15 bp, Homo sapiens
tgctgctttacttga

SEQ ID NO: 765419 - DNA, 15 bp, Homo sapiens
gctgctttacttgaa

SEQ ID NO: 765420 - DNA, 15 bp, Homo sapiens
ctgctttacttgaag

SEQ ID NO: 765421 - DNA, 15 bp, Homo sapiens
tgctttacttgaaga

SEQ ID NO: 765422 - DNA, 15 bp, Homo sapiens
gctttacttgaagat

SEQ ID NO: 765423 - DNA, 15 bp, Homo sapiens
ctttacttgaagatt

SEQ ID NO: 765424 - DNA, 15 bp, Homo sapiens
tttacttgaagattg

SEQ ID NO: 765425 - DNA, 15 bp, Homo sapiens
ttacttgaagattga

SEQ ID NO: 765426 - DNA, 15 bp, Homo sapiens
tacttgaagattgaa

SEQ ID NO: 765427 - DNA, 15 bp, Homo sapiens
acttgaagattgaat

SEQ ID NO: 765428 - DNA, 15 bp, Homo sapiens
cttgaagattgaatt

SEQ ID NO: 765429 - DNA, 15 bp, Homo sapiens
ttgaagattgaattt

SEQ ID NO: 765430 - DNA, 15 bp, Homo sapiens
tgaagattgaatttg

SEQ ID NO: 765431 - DNA, 15 bp, Homo sapiens
gaagattgaatttgc

SEQ ID NO: 765432 - DNA, 15 bp, Homo sapiens
aagattgaatttgct

SEQ ID NO: 765433 - DNA, 15 bp, Homo sapiens
agattgaatttgctt

SEQ ID NO: 765434 - DNA, 15 bp, Homo sapiens
gattgaatttgcttt

SEQ ID NO: 765435 - DNA, 15 bp, Homo sapiens
attgaatttgctttg

SEQ ID NO: 765436 - DNA, 15 bp, Homo sapiens
ttgaatttgctttga

SEQ ID NO: 765437 - DNA, 15 bp, Homo sapiens
tgaatttgctttgat

SEQ ID NO: 765438 - DNA, 15 bp, Homo sapiens
gaatttgctttgatt

SEQ ID NO: 765439 - DNA, 15 bp, Homo sapiens
aatttgctttgattt

SEQ ID NO: 765440 - DNA, 15 bp, Homo sapiens
atttgctttgatttc

SEQ ID NO: 765441 - DNA, 15 bp, Homo sapiens
tttgctttgatttca

SEQ ID NO: 765442 - DNA, 15 bp, Homo sapiens
ttgctttgatttcat

SEQ ID NO: 765443 - DNA, 15 bp, Homo sapiens
tgctttgatttcata

SEQ ID NO: 765444 - DNA, 15 bp, Homo sapiens
gctttgatttcatag

SEQ ID NO: 765445 - DNA, 15 bp, Homo sapiens
ctttgatttcatagt

SEQ ID NO: 765446 - DNA, 15 bp, Homo sapiens
tttgatttcatagtg

SEQ ID NO: 765447 - DNA, 15 bp, Homo sapiens
ttgatttcatagtgc

SEQ ID NO: 765448 - DNA, 15 bp, Homo sapiens
tgatttcatagtgca

SEQ ID NO: 765449 - DNA, 15 bp, Homo sapiens
gatttcatagtgcat

SEQ ID NO: 765450 - DNA, 15 bp, Homo sapiens
atttcatagtgcatt

SEQ ID NO: 765451 - DNA, 15 bp, Homo sapiens
tttcatagtgcatta

SEQ ID NO: 765452 - DNA, 15 bp, Homo sapiens
ttcatagtgcattat

SEQ ID NO: 765453 - DNA, 15 bp, Homo sapiens
tcatagtgcattatg

SEQ ID NO: 765454 - DNA, 15 bp, Homo sapiens
catagtgcattatgg

SEQ ID NO: 765455 - DNA, 15 bp, Homo sapiens
atagtgcattatggt

SEQ ID NO: 765456 - DNA, 15 bp, Homo sapiens
tagtgcattatggta

SEQ ID NO: 765457 - DNA, 15 bp, Homo sapiens
agtgcattatggtaa

SEQ ID NO: 765458 - DNA, 15 bp, Homo sapiens
gtgcattatggtaaa

SEQ ID NO: 765459 - DNA, 15 bp, Homo sapiens
tgcattatggtaaaa

SEQ ID NO: 765460 - DNA, 15 bp, Homo sapiens
gcattatggtaaaat

SEQ ID NO: 765461 - DNA, 15 bp, Homo sapiens
cattatggtaaaatt

SEQ ID NO: 765462 - DNA, 15 bp, Homo sapiens
attatggtaaaattg

SEQ ID NO: 765463 - DNA, 15 bp, Homo sapiens
ttatggtaaaattga

SEQ ID NO: 765464 - DNA, 15 bp, Homo sapiens
tatggtaaaattgag

SEQ ID NO: 765465 - DNA, 15 bp, Homo sapiens
atggtaaaattgagc

SEQ ID NO: 765466 - DNA, 15 bp, Homo sapiens
tggtaaaattgagca

SEQ ID NO: 765467 - DNA, 15 bp, Homo sapiens
ggtaaaattgagcat

SEQ ID NO: 765468 - DNA, 15 bp, Homo sapiens
gtaaaattgagcatc

SEQ ID NO: 765469 - DNA, 15 bp, Homo sapiens
taaaattgagcatca

SEQ ID NO: 765470 - DNA, 15 bp, Homo sapiens
aaaattgagcatcat

SEQ ID NO: 765471 - DNA, 15 bp, Homo sapiens
aaattgagcatcata

SEQ ID NO: 765472 - DNA, 15 bp, Homo sapiens
aattgagcatcataa

SEQ ID NO: 765473 - DNA, 15 bp, Homo sapiens
attgagcatcataat

SEQ ID NO: 765474 - DNA, 15 bp, Homo sapiens
ttgagcatcataatt

SEQ ID NO: 765475 - DNA, 15 bp, Homo sapiens
tgagcatcataattc

SEQ ID NO: 765476 - DNA, 15 bp, Homo sapiens
gagcatcataattct

SEQ ID NO: 765477 - DNA, 15 bp, Homo sapiens
agcatcataattctt

SEQ ID NO: 765478 - DNA, 15 bp, Homo sapiens
gcatcataattctta

SEQ ID NO: 765479 - DNA, 15 bp, Homo sapiens
catcataattcttaa

SEQ ID NO: 765480 - DNA, 15 bp, Homo sapiens
atcataattcttaag

SEQ ID NO: 765481 - DNA, 15 bp, Homo sapiens
tcataattcttaaga

SEQ ID NO: 765482 - DNA, 15 bp, Homo sapiens
cataattcttaagag

SEQ ID NO: 765483 - DNA, 15 bp, Homo sapiens
ataattcttaagagg

SEQ ID NO: 765484 - DNA, 15 bp, Homo sapiens
taattcttaagagga

SEQ ID NO: 765485 - DNA, 15 bp, Homo sapiens
aattcttaagaggaa

SEQ ID NO: 765486 - DNA, 15 bp, Homo sapiens
attcttaagaggaag

SEQ ID NO: 765487 - DNA, 15 bp, Homo sapiens
ttcttaagaggaagc

SEQ ID NO: 765488 - DNA, 15 bp, Homo sapiens
tcttaagaggaagcc

SEQ ID NO: 765489 - DNA, 15 bp, Homo sapiens
cttaagaggaagcca

SEQ ID NO: 765490 - DNA, 15 bp, Homo sapiens
ttaagaggaagccaa

SEQ ID NO: 765491 - DNA, 15 bp, Homo sapiens
taagaggaagccaat

SEQ ID NO: 765492 - DNA, 15 bp, Homo sapiens
aagaggaagccaatt

SEQ ID NO: 765493 - DNA, 15 bp, Homo sapiens
agaggaagccaatta

SEQ ID NO: 765494 - DNA, 15 bp, Homo sapiens
gaggaagccaattat

SEQ ID NO: 765495 - DNA, 15 bp, Homo sapiens
aggaagccaattatc

SEQ ID NO: 765496 - DNA, 15 bp, Homo sapiens
ggaagccaattatca

SEQ ID NO: 765497 - DNA, 15 bp, Homo sapiens
gaagccaattatcaa

SEQ ID NO: 765498 - DNA, 15 bp, Homo sapiens
aagccaattatcaaa

SEQ ID NO: 765499 - DNA, 15 bp, Homo sapiens
agccaattatcaaaa

SEQ ID NO: 765500 - DNA, 15 bp, Homo sapiens
gccaattatcaaaaa

SEQ ID NO: 765501 - DNA, 15 bp, Homo sapiens
ccaattatcaaaaag

SEQ ID NO: 765502 - DNA, 15 bp, Homo sapiens
caattatcaaaaagg

SEQ ID NO: 765503 - DNA, 15 bp, Homo sapiens
aattatcaaaaaggg

SEQ ID NO: 765504 - DNA, 15 bp, Homo sapiens
attatcaaaaaggga

SEQ ID NO: 765505 - DNA, 15 bp, Homo sapiens
ttatcaaaaagggaa

SEQ ID NO: 765506 - DNA, 15 bp, Homo sapiens
tatcaaaaagggaaa

SEQ ID NO: 765507 - DNA, 15 bp, Homo sapiens
atcaaaaagggaaat

SEQ ID NO: 765508 - DNA, 15 bp, Homo sapiens
tcaaaaagggaaata

SEQ ID NO: 765509 - DNA, 15 bp, Homo sapiens
caaaaagggaaatat

SEQ ID NO: 765510 - DNA, 15 bp, Homo sapiens
aaaaagggaaatatt

SEQ ID NO: 765511 - DNA, 15 bp, Homo sapiens
aaaagggaaatattt

SEQ ID NO: 765512 - DNA, 15 bp, Homo sapiens
aaagggaaatattta

SEQ ID NO: 765513 - DNA, 15 bp, Homo sapiens
aagggaaatatttaa

SEQ ID NO: 765514 - DNA, 15 bp, Homo sapiens
agggaaatatttaag

SEQ ID NO: 765515 - DNA, 15 bp, Homo sapiens
gggaaatatttaaga

SEQ ID NO: 765516 - DNA, 15 bp, Homo sapiens
ggaaatatttaagaa

SEQ ID NO: 765517 - DNA, 15 bp, Homo sapiens
gaaatatttaagaat

SEQ ID NO: 765518 - DNA, 15 bp, Homo sapiens
aaatatttaagaatt

SEQ ID NO: 765519 - DNA, 15 bp, Homo sapiens
aatatttaagaatta

SEQ ID NO: 765520 - DNA, 15 bp, Homo sapiens
atatttaagaattat

SEQ ID NO: 765521 - DNA, 15 bp, Homo sapiens
tatttaagaattata

SEQ ID NO: 765522 - DNA, 15 bp, Homo sapiens
atttaagaattataa

SEQ ID NO: 765523 - DNA, 15 bp, Homo sapiens
tttaagaattataaa

SEQ ID NO: 765524 - DNA, 15 bp, Homo sapiens
ttaagaattataaat

SEQ ID NO: 765525 - DNA, 15 bp, Homo sapiens
taagaattataaatc

SEQ ID NO: 765526 - DNA, 15 bp, Homo sapiens
aagaattataaatcc

SEQ ID NO: 765527 - DNA, 15 bp, Homo sapiens
agaattataaatcct

SEQ ID NO: 765528 - DNA, 15 bp, Homo sapiens
gaattataaatccta

SEQ ID NO: 765529 - DNA, 15 bp, Homo sapiens
aattataaatcctat

SEQ ID NO: 765530 - DNA, 15 bp, Homo sapiens
attataaatcctatt

SEQ ID NO: 765531 - DNA, 15 bp, Homo sapiens
ttataaatcctattt

SEQ ID NO: 765532 - DNA, 15 bp, Homo sapiens
tataaatcctatttt

SEQ ID NO: 765533 - DNA, 15 bp, Homo sapiens
ataaatcctattttc

SEQ ID NO: 765534 - DNA, 15 bp, Homo sapiens
taaatcctattttca

SEQ ID NO: 765535 - DNA, 15 bp, Homo sapiens
aaatcctattttcat

SEQ ID NO: 765536 - DNA, 15 bp, Homo sapiens
aatcctattttcata

SEQ ID NO: 765537 - DNA, 15 bp, Homo sapiens
atcctattttcatat

SEQ ID NO: 765538 - DNA, 15 bp, Homo sapiens
tcctattttcatatc

SEQ ID NO: 765539 - DNA, 15 bp, Homo sapiens
cctattttcatatcc

SEQ ID NO: 765540 - DNA, 15 bp, Homo sapiens
ctattttcatatcca

SEQ ID NO: 765541 - DNA, 15 bp, Homo sapiens
tattttcatatccat

SEQ ID NO: 765542 - DNA, 15 bp, Homo sapiens
attttcatatccatc

SEQ ID NO: 765543 - DNA, 15 bp, Homo sapiens
ttttcatatccatcc

SEQ ID NO: 765544 - DNA, 15 bp, Homo sapiens
tttcatatccatcct

SEQ ID NO: 765545 - DNA, 15 bp, Homo sapiens
ttcatatccatcctg

SEQ ID NO: 765546 - DNA, 15 bp, Homo sapiens
tcatatccatcctgt

SEQ ID NO: 765547 - DNA, 15 bp, Homo sapiens
catatccatcctgtg

SEQ ID NO: 765548 - DNA, 15 bp, Homo sapiens
atatccatcctgtgt

SEQ ID NO: 765549 - DNA, 15 bp, Homo sapiens
tatccatcctgtgtt

SEQ ID NO: 765550 - DNA, 15 bp, Homo sapiens
atccatcctgtgttt

SEQ ID NO: 765551 - DNA, 15 bp, Homo sapiens
tccatcctgtgtttt

SEQ ID NO: 765552 - DNA, 15 bp, Homo sapiens
ccatcctgtgtttta

SEQ ID NO: 765553 - DNA, 15 bp, Homo sapiens
catcctgtgttttat

SEQ ID NO: 765554 - DNA, 15 bp, Homo sapiens
atcctgtgttttatg

SEQ ID NO: 765555 - DNA, 15 bp, Homo sapiens
tcctgtgttttatga

SEQ ID NO: 765556 - DNA, 15 bp, Homo sapiens
cctgtgttttatgag

SEQ ID NO: 765557 - DNA, 15 bp, Homo sapiens
ctgtgttttatgaga

SEQ ID NO: 765558 - DNA, 15 bp, Homo sapiens
tgtgttttatgagaa

SEQ ID NO: 765559 - DNA, 15 bp, Homo sapiens
gtgttttatgagaag

SEQ ID NO: 765560 - DNA, 15 bp, Homo sapiens
tgttttatgagaagt

SEQ ID NO: 765561 - DNA, 15 bp, Homo sapiens
gttttatgagaagtc

SEQ ID NO: 765562 - DNA, 15 bp, Homo sapiens
ttttatgagaagtca

SEQ ID NO: 765563 - DNA, 15 bp, Homo sapiens
tttatgagaagtcac

SEQ ID NO: 765564 - DNA, 15 bp, Homo sapiens
ttatgagaagtcaca

SEQ ID NO: 765565 - DNA, 15 bp, Homo sapiens
tatgagaagtcacaa

SEQ ID NO: 765566 - DNA, 15 bp, Homo sapiens
atgagaagtcacaat

SEQ ID NO: 765567 - DNA, 15 bp, Homo sapiens
tgagaagtcacaatg

SEQ ID NO: 765568 - DNA, 15 bp, Homo sapiens
gagaagtcacaatgt

SEQ ID NO: 765569 - DNA, 15 bp, Homo sapiens
agaagtcacaatgta

SEQ ID NO: 765570 - DNA, 15 bp, Homo sapiens
gaagtcacaatgtag

SEQ ID NO: 765571 - DNA, 15 bp, Homo sapiens
aagtcacaatgtaga

SEQ ID NO: 765572 - DNA, 15 bp, Homo sapiens
agtcacaatgtagaa

SEQ ID NO: 765573 - DNA, 15 bp, Homo sapiens
gtcacaatgtagaaa

SEQ ID NO: 765574 - DNA, 15 bp, Homo sapiens
tcacaatgtagaaaa

SEQ ID NO: 765575 - DNA, 15 bp, Homo sapiens
cacaatgtagaaaaa

SEQ ID NO: 765576 - DNA, 15 bp, Homo sapiens
acaatgtagaaaaat

SEQ ID NO: 765577 - DNA, 15 bp, Homo sapiens
caatgtagaaaaatt

SEQ ID NO: 765578 - DNA, 15 bp, Homo sapiens
aatgtagaaaaattt

SEQ ID NO: 765579 - DNA, 15 bp, Homo sapiens
atgtagaaaaatttt

SEQ ID NO: 765580 - DNA, 15 bp, Homo sapiens
tgtagaaaaatttta

SEQ ID NO: 765581 - DNA, 15 bp, Homo sapiens
gtagaaaaattttac

SEQ ID NO: 765582 - DNA, 15 bp, Homo sapiens
tagaaaaattttact

SEQ ID NO: 765583 - DNA, 15 bp, Homo sapiens
agaaaaattttactc

SEQ ID NO: 765584 - DNA, 15 bp, Homo sapiens
gaaaaattttactca

SEQ ID NO: 765585 - DNA, 15 bp, Homo sapiens
aaaaattttactcag

SEQ ID NO: 765586 - DNA, 15 bp, Homo sapiens
aaaattttactcagc

SEQ ID NO: 765587 - DNA, 15 bp, Homo sapiens
aaattttactcagct

SEQ ID NO: 765588 - DNA, 15 bp, Homo sapiens
aattttactcagctt

SEQ ID NO: 765589 - DNA, 15 bp, Homo sapiens
attttactcagcttt

SEQ ID NO: 765590 - DNA, 15 bp, Homo sapiens
ttttactcagctttt

SEQ ID NO: 765591 - DNA, 15 bp, Homo sapiens
tttactcagctttta

SEQ ID NO: 765592 - DNA, 15 bp, Homo sapiens
ttactcagcttttaa

SEQ ID NO: 765593 - DNA, 15 bp, Homo sapiens
tactcagcttttaag

SEQ ID NO: 765594 - DNA, 15 bp, Homo sapiens
actcagcttttaagt

SEQ ID NO: 765595 - DNA, 15 bp, Homo sapiens
ctcagcttttaagtc

SEQ ID NO: 765596 - DNA, 15 bp, Homo sapiens
tcagcttttaagtca

SEQ ID NO: 765597 - DNA, 15 bp, Homo sapiens
cagcttttaagtcaa

SEQ ID NO: 765598 - DNA, 15 bp, Homo sapiens
agcttttaagtcaat

SEQ ID NO: 765599 - DNA, 15 bp, Homo sapiens
gcttttaagtcaata

SEQ ID NO: 765600 - DNA, 15 bp, Homo sapiens
cttttaagtcaatag

SEQ ID NO: 765601 - DNA, 15 bp, Homo sapiens
ttttaagtcaataga

SEQ ID NO: 765602 - DNA, 15 bp, Homo sapiens
tttaagtcaatagat

SEQ ID NO: 765603 - DNA, 15 bp, Homo sapiens
ttaagtcaatagatt

SEQ ID NO: 765604 - DNA, 15 bp, Homo sapiens
taagtcaatagattg

SEQ ID NO: 765605 - DNA, 15 bp, Homo sapiens
aagtcaatagattgg

SEQ ID NO: 765606 - DNA, 15 bp, Homo sapiens
agtcaatagattggc

SEQ ID NO: 765607 - DNA, 15 bp, Homo sapiens
gtcaatagattggcc

SEQ ID NO: 765608 - DNA, 15 bp, Homo sapiens
tcaatagattggcca

SEQ ID NO: 765609 - DNA, 15 bp, Homo sapiens
caatagattggccat

SEQ ID NO: 765610 - DNA, 15 bp, Homo sapiens
aatagattggccata

SEQ ID NO: 765611 - DNA, 15 bp, Homo sapiens
atagattggccatat

SEQ ID NO: 765612 - DNA, 15 bp, Homo sapiens
tagattggccatatt

SEQ ID NO: 765613 - DNA, 15 bp, Homo sapiens
agattggccatattt

SEQ ID NO: 765614 - DNA, 15 bp, Homo sapiens
gattggccatatttc

SEQ ID NO: 765615 - DNA, 15 bp, Homo sapiens
attggccatatttct

SEQ ID NO: 765616 - DNA, 15 bp, Homo sapiens
ttggccatatttctt

SEQ ID NO: 765617 - DNA, 15 bp, Homo sapiens
tggccatatttcttc

SEQ ID NO: 765618 - DNA, 15 bp, Homo sapiens
ggccatatttcttca

SEQ ID NO: 765619 - DNA, 15 bp, Homo sapiens
gccatatttcttcaa

SEQ ID NO: 765620 - DNA, 15 bp, Homo sapiens
ccatatttcttcaac

SEQ ID NO: 765621 - DNA, 15 bp, Homo sapiens
catatttcttcaaca

SEQ ID NO: 765622 - DNA, 15 bp, Homo sapiens
atatttcttcaacaa

SEQ ID NO: 765623 - DNA, 15 bp, Homo sapiens
tatttcttcaacaac

SEQ ID NO: 765624 - DNA, 15 bp, Homo sapiens
atttcttcaacaact

SEQ ID NO: 765625 - DNA, 15 bp, Homo sapiens
tttcttcaacaacta

SEQ ID NO: 765626 - DNA, 15 bp, Homo sapiens
ttcttcaacaactac

SEQ ID NO: 765627 - DNA, 15 bp, Homo sapiens
tcttcaacaactact

SEQ ID NO: 765628 - DNA, 15 bp, Homo sapiens
cttcaacaactactg

SEQ ID NO: 765629 - DNA, 15 bp, Homo sapiens
ttcaacaactactgt

SEQ ID NO: 765630 - DNA, 15 bp, Homo sapiens
tcaacaactactgtg

SEQ ID NO: 765631 - DNA, 15 bp, Homo sapiens
caacaactactgtgt

SEQ ID NO: 765632 - DNA, 15 bp, Homo sapiens
aacaactactgtgtg

SEQ ID NO: 765633 - DNA, 15 bp, Homo sapiens
acaactactgtgtga

SEQ ID NO: 765634 - DNA, 15 bp, Homo sapiens
caactactgtgtgat

SEQ ID NO: 765635 - DNA, 15 bp, Homo sapiens
aactactgtgtgatg

SEQ ID NO: 765636 - DNA, 15 bp, Homo sapiens
actactgtgtgatgg

SEQ ID NO: 765637 - DNA, 15 bp, Homo sapiens
ctactgtgtgatggt

SEQ ID NO: 765638 - DNA, 15 bp, Homo sapiens
tactgtgtgatggta

SEQ ID NO: 765639 - DNA, 15 bp, Homo sapiens
actgtgtgatggtat

SEQ ID NO: 765640 - DNA, 15 bp, Homo sapiens
ctgtgtgatggtatc

SEQ ID NO: 765641 - DNA, 15 bp, Homo sapiens
tgtgtgatggtatca

SEQ ID NO: 765642 - DNA, 15 bp, Homo sapiens
gtgtgatggtatcaa

SEQ ID NO: 765643 - DNA, 15 bp, Homo sapiens
tgtgatggtatcaaa

SEQ ID NO: 765644 - DNA, 15 bp, Homo sapiens
gtgatggtatcaaag

SEQ ID NO: 765645 - DNA, 15 bp, Homo sapiens
tgatggtatcaaaga

SEQ ID NO: 765646 - DNA, 15 bp, Homo sapiens
gatggtatcaaagaa

SEQ ID NO: 765647 - DNA, 15 bp, Homo sapiens
atggtatcaaagaaa

SEQ ID NO: 765648 - DNA, 15 bp, Homo sapiens
tggtatcaaagaaat

SEQ ID NO: 765649 - DNA, 15 bp, Homo sapiens
ggtatcaaagaaata

SEQ ID NO: 765650 - DNA, 15 bp, Homo sapiens
gtatcaaagaaatag

SEQ ID NO: 765651 - DNA, 15 bp, Homo sapiens
tatcaaagaaatagc

SEQ ID NO: 765652 - DNA, 15 bp, Homo sapiens
atcaaagaaatagca

SEQ ID NO: 765653 - DNA, 15 bp, Homo sapiens
tcaaagaaatagcag

SEQ ID NO: 765654 - DNA, 15 bp, Homo sapiens
caaagaaatagcaga

SEQ ID NO: 765655 - DNA, 15 bp, Homo sapiens
aaagaaatagcagat

SEQ ID NO: 765656 - DNA, 15 bp, Homo sapiens
aagaaatagcagata

SEQ ID NO: 765657 - DNA, 15 bp, Homo sapiens
agaaatagcagatat

SEQ ID NO: 765658 - DNA, 15 bp, Homo sapiens
gaaatagcagatata

SEQ ID NO: 765659 - DNA, 15 bp, Homo sapiens
aaatagcagatatac

SEQ ID NO: 765660 - DNA, 15 bp, Homo sapiens
aatagcagatatact

SEQ ID NO: 765661 - DNA, 15 bp, Homo sapiens
atagcagatatactg

SEQ ID NO: 765662 - DNA, 15 bp, Homo sapiens
tagcagatatactgc

SEQ ID NO: 765663 - DNA, 15 bp, Homo sapiens
agcagatatactgca

SEQ ID NO: 765664 - DNA, 15 bp, Homo sapiens
gcagatatactgcac

SEQ ID NO: 765665 - DNA, 15 bp, Homo sapiens
cagatatactgcact

SEQ ID NO: 765666 - DNA, 15 bp, Homo sapiens
agatatactgcactc

SEQ ID NO: 765667 - DNA, 15 bp, Homo sapiens
gatatactgcactcc

SEQ ID NO: 765668 - DNA, 15 bp, Homo sapiens
atatactgcactccc

SEQ ID NO: 765669 - DNA, 15 bp, Homo sapiens
tatactgcactcccc

SEQ ID NO: 765670 - DNA, 15 bp, Homo sapiens
atactgcactcccct

SEQ ID NO: 765671 - DNA, 15 bp, Homo sapiens
tactgcactccccta

SEQ ID NO: 765672 - DNA, 15 bp, Homo sapiens
actgcactcccctat

SEQ ID NO: 765673 - DNA, 15 bp, Homo sapiens
ctgcactcccctatt

SEQ ID NO: 765674 - DNA, 15 bp, Homo sapiens
tgcactcccctattt

SEQ ID NO: 765675 - DNA, 15 bp, Homo sapiens
gcactcccctattta

SEQ ID NO: 765676 - DNA, 15 bp, Homo sapiens
cactcccctatttat

SEQ ID NO: 765677 - DNA, 15 bp, Homo sapiens
actcccctatttatt

SEQ ID NO: 765678 - DNA, 15 bp, Homo sapiens
ctcccctatttattg

SEQ ID NO: 765679 - DNA, 15 bp, Homo sapiens
tcccctatttattgt

SEQ ID NO: 765680 - DNA, 15 bp, Homo sapiens
cccctatttattgta

SEQ ID NO: 765681 - DNA, 15 bp, Homo sapiens
ccctatttattgtag

SEQ ID NO: 765682 - DNA, 15 bp, Homo sapiens
cctatttattgtagc

SEQ ID NO: 765683 - DNA, 15 bp, Homo sapiens
ctatttattgtagca

SEQ ID NO: 765684 - DNA, 15 bp, Homo sapiens
tatttattgtagcac

SEQ ID NO: 765685 - DNA, 15 bp, Homo sapiens
atttattgtagcact

SEQ ID NO: 765686 - DNA, 15 bp, Homo sapiens
tttattgtagcacta

SEQ ID NO: 765687 - DNA, 15 bp, Homo sapiens
ttattgtagcactat

SEQ ID NO: 765688 - DNA, 15 bp, Homo sapiens
tattgtagcactatt

SEQ ID NO: 765689 - DNA, 15 bp, Homo sapiens
attgtagcactattc

SEQ ID NO: 765690 - DNA, 15 bp, Homo sapiens
ttgtagcactattca

SEQ ID NO: 765691 - DNA, 15 bp, Homo sapiens
tgtagcactattcac

SEQ ID NO: 765692 - DNA, 15 bp, Homo sapiens
gtagcactattcaca

SEQ ID NO: 765693 - DNA, 15 bp, Homo sapiens
tagcactattcacaa

SEQ ID NO: 765694 - DNA, 15 bp, Homo sapiens
agcactattcacaat

SEQ ID NO: 765695 - DNA, 15 bp, Homo sapiens
gcactattcacaata

SEQ ID NO: 765696 - DNA, 15 bp, Homo sapiens
cactattcacaatag

SEQ ID NO: 765697 - DNA, 15 bp, Homo sapiens
actattcacaatagc

SEQ ID NO: 765698 - DNA, 15 bp, Homo sapiens
ctattcacaatagcc

SEQ ID NO: 765699 - DNA, 15 bp, Homo sapiens
tattcacaatagcca

SEQ ID NO: 765700 - DNA, 15 bp, Homo sapiens
attcacaatagccaa

SEQ ID NO: 765701 - DNA, 15 bp, Homo sapiens
ttcacaatagccaag

SEQ ID NO: 765702 - DNA, 15 bp, Homo sapiens
tcacaatagccaaga

SEQ ID NO: 765703 - DNA, 15 bp, Homo sapiens
cacaatagccaagat

SEQ ID NO: 765704 - DNA, 15 bp, Homo sapiens
acaatagccaagatt

SEQ ID NO: 765705 - DNA, 15 bp, Homo sapiens
caatagccaagattt

SEQ ID NO: 765706 - DNA, 15 bp, Homo sapiens
aatagccaagatttg

SEQ ID NO: 765707 - DNA, 15 bp, Homo sapiens
atagccaagatttgg

SEQ ID NO: 765708 - DNA, 15 bp, Homo sapiens
tagccaagatttgga

SEQ ID NO: 765709 - DNA, 15 bp, Homo sapiens
agccaagatttggaa

SEQ ID NO: 765710 - DNA, 15 bp, Homo sapiens
gccaagatttggaag

SEQ ID NO: 765711 - DNA, 15 bp, Homo sapiens
ccaagatttggaagc

SEQ ID NO: 765712 - DNA, 15 bp, Homo sapiens
caagatttggaagca

SEQ ID NO: 765713 - DNA, 15 bp, Homo sapiens
aagatttggaagcaa

SEQ ID NO: 765714 - DNA, 15 bp, Homo sapiens
agatttggaagcaac

SEQ ID NO: 765715 - DNA, 15 bp, Homo sapiens
gatttggaagcaacc

SEQ ID NO: 765716 - DNA, 15 bp, Homo sapiens
atttggaagcaacct

SEQ ID NO: 765717 - DNA, 15 bp, Homo sapiens
tttggaagcaaccta

SEQ ID NO: 765718 - DNA, 15 bp, Homo sapiens
ttggaagcaacctaa

SEQ ID NO: 765719 - DNA, 15 bp, Homo sapiens
tggaagcaacctaag

SEQ ID NO: 765720 - DNA, 15 bp, Homo sapiens
ggaagcaacctaagt

SEQ ID NO: 765721 - DNA, 15 bp, Homo sapiens
gaagcaacctaagta

SEQ ID NO: 765722 - DNA, 15 bp, Homo sapiens
aagcaacctaagtat

SEQ ID NO: 765723 - DNA, 15 bp, Homo sapiens
agcaacctaagtatc

SEQ ID NO: 765724 - DNA, 15 bp, Homo sapiens
gcaacctaagtatcc

SEQ ID NO: 765725 - DNA, 15 bp, Homo sapiens
caacctaagtatcca

SEQ ID NO: 765726 - DNA, 15 bp, Homo sapiens
aacctaagtatccat

SEQ ID NO: 765727 - DNA, 15 bp, Homo sapiens
acctaagtatccatt

SEQ ID NO: 765728 - DNA, 15 bp, Homo sapiens
cctaagtatccattg

SEQ ID NO: 765729 - DNA, 15 bp, Homo sapiens
ctaagtatccattga

SEQ ID NO: 765730 - DNA, 15 bp, Homo sapiens
taagtatccattgac

SEQ ID NO: 765731 - DNA, 15 bp, Homo sapiens
aagtatccattgaca

SEQ ID NO: 765732 - DNA, 15 bp, Homo sapiens
agtatccattgacag

SEQ ID NO: 765733 - DNA, 15 bp, Homo sapiens
gtatccattgacaga

SEQ ID NO: 765734 - DNA, 15 bp, Homo sapiens
tatccattgacagat

SEQ ID NO: 765735 - DNA, 15 bp, Homo sapiens
atccattgacagata

SEQ ID NO: 765736 - DNA, 15 bp, Homo sapiens
tccattgacagataa

SEQ ID NO: 765737 - DNA, 15 bp, Homo sapiens
ccattgacagataaa

SEQ ID NO: 765738 - DNA, 15 bp, Homo sapiens
cattgacagataaat

SEQ ID NO: 765739 - DNA, 15 bp, Homo sapiens
attgacagataaatg

SEQ ID NO: 765740 - DNA, 15 bp, Homo sapiens
ttgacagataaatgg

SEQ ID NO: 765741 - DNA, 15 bp, Homo sapiens
tgacagataaatgga

SEQ ID NO: 765742 - DNA, 15 bp, Homo sapiens
gacagataaatggat

SEQ ID NO: 765743 - DNA, 15 bp, Homo sapiens
acagataaatggata

SEQ ID NO: 765744 - DNA, 15 bp, Homo sapiens
cagataaatggataa

SEQ ID NO: 765745 - DNA, 15 bp, Homo sapiens
agataaatggataaa

SEQ ID NO: 765746 - DNA, 15 bp, Homo sapiens
gataaatggataaag

SEQ ID NO: 765747 - DNA, 15 bp, Homo sapiens
ataaatggataaaga

SEQ ID NO: 765748 - DNA, 15 bp, Homo sapiens
taaatggataaagaa

SEQ ID NO: 765749 - DNA, 15 bp, Homo sapiens
aaatggataaagaaa

SEQ ID NO: 765750 - DNA, 15 bp, Homo sapiens
aatggataaagaaaa

SEQ ID NO: 765751 - DNA, 15 bp, Homo sapiens
atggataaagaaaat

SEQ ID NO: 765752 - DNA, 15 bp, Homo sapiens
tggtacatatacaca

SEQ ID NO: 765753 - DNA, 15 bp, Homo sapiens
ggtacatatacacaa

SEQ ID NO: 765754 - DNA, 15 bp, Homo sapiens
gtacatatacacaat

SEQ ID NO: 765755 - DNA, 15 bp, Homo sapiens
tacatatacacaatg

SEQ ID NO: 765756 - DNA, 15 bp, Homo sapiens
acatatacacaatgg

SEQ ID NO: 765757 - DNA, 15 bp, Homo sapiens
catatacacaatgga

SEQ ID NO: 765758 - DNA, 15 bp, Homo sapiens
atatacacaatggag

SEQ ID NO: 765759 - DNA, 15 bp, Homo sapiens
tatacacaatggagt

SEQ ID NO: 765760 - DNA, 15 bp, Homo sapiens
atacacaatggagta

SEQ ID NO: 765761 - DNA, 15 bp, Homo sapiens
tacacaatggagtac

SEQ ID NO: 765762 - DNA, 15 bp, Homo sapiens
acacaatggagtacg

SEQ ID NO: 765763 - DNA, 15 bp, Homo sapiens
cacaatggagtacga

SEQ ID NO: 765764 - DNA, 15 bp, Homo sapiens
acaatggagtacgat

SEQ ID NO: 765765 - DNA, 15 bp, Homo sapiens
caatggagtacgatt

SEQ ID NO: 765766 - DNA, 15 bp, Homo sapiens
aatggagtacgattc

SEQ ID NO: 765767 - DNA, 15 bp, Homo sapiens
atggagtacgattca

SEQ ID NO: 765768 - DNA, 15 bp, Homo sapiens
tggagtacgattcag

SEQ ID NO: 765769 - DNA, 15 bp, Homo sapiens
ggagtacgattcagc

SEQ ID NO: 765770 - DNA, 15 bp, Homo sapiens
gagtacgattcagcc

SEQ ID NO: 765771 - DNA, 15 bp, Homo sapiens
agtacgattcagcca

SEQ ID NO: 765772 - DNA, 15 bp, Homo sapiens
gtacgattcagccat

SEQ ID NO: 765773 - DNA, 15 bp, Homo sapiens
tacgattcagccata

SEQ ID NO: 765774 - DNA, 15 bp, Homo sapiens
acgattcagccataa

SEQ ID NO: 765775 - DNA, 15 bp, Homo sapiens
cgattcagccataaa

SEQ ID NO: 765776 - DNA, 15 bp, Homo sapiens
gattcagccataaaa

SEQ ID NO: 765777 - DNA, 15 bp, Homo sapiens
attcagccataaaaa

SEQ ID NO: 765778 - DNA, 15 bp, Homo sapiens
ttcagccataaaaaa

SEQ ID NO: 765779 - DNA, 15 bp, Homo sapiens
tcagccataaaaaag

SEQ ID NO: 765780 - DNA, 15 bp, Homo sapiens
gccataaaaaagaat

SEQ ID NO: 765781 - DNA, 15 bp, Homo sapiens
ccataaaaaagaatg

SEQ ID NO: 765782 - DNA, 15 bp, Homo sapiens
cataaaaaagaatga

SEQ ID NO: 765783 - DNA, 15 bp, Homo sapiens
ataaaaaagaatgag

SEQ ID NO: 765784 - DNA, 15 bp, Homo sapiens
taaaaaagaatgaga

SEQ ID NO: 765785 - DNA, 15 bp, Homo sapiens
aaaaaagaatgagag

SEQ ID NO: 765786 - DNA, 15 bp, Homo sapiens
aaaaagaatgagagc

SEQ ID NO: 765787 - DNA, 15 bp, Homo sapiens
aaaagaatgagagcc

SEQ ID NO: 765788 - DNA, 15 bp, Homo sapiens
aaagaatgagagcct

SEQ ID NO: 765789 - DNA, 15 bp, Homo sapiens
aagaatgagagcctg

SEQ ID NO: 765790 - DNA, 15 bp, Homo sapiens
agaatgagagcctgt

SEQ ID NO: 765791 - DNA, 15 bp, Homo sapiens
gaatgagagcctgtg

SEQ ID NO: 765792 - DNA, 15 bp, Homo sapiens
aatgagagcctgtga

SEQ ID NO: 765793 - DNA, 15 bp, Homo sapiens
atgagagcctgtgat

SEQ ID NO: 765794 - DNA, 15 bp, Homo sapiens
tgagagcctgtgatt

SEQ ID NO: 765795 - DNA, 15 bp, Homo sapiens
gagagcctgtgattt

SEQ ID NO: 765796 - DNA, 15 bp, Homo sapiens
agagcctgtgatttg

SEQ ID NO: 765797 - DNA, 15 bp, Homo sapiens
gagcctgtgatttgc

SEQ ID NO: 765798 - DNA, 15 bp, Homo sapiens
agcctgtgatttgca

SEQ ID NO: 765799 - DNA, 15 bp, Homo sapiens
gcctgtgatttgcaa

SEQ ID NO: 765800 - DNA, 15 bp, Homo sapiens
cctgtgatttgcaac

SEQ ID NO: 765801 - DNA, 15 bp, Homo sapiens
ctgtgatttgcaaca

SEQ ID NO: 765802 - DNA, 15 bp, Homo sapiens
tgtgatttgcaacaa

SEQ ID NO: 765803 - DNA, 15 bp, Homo sapiens
gtgatttgcaacaac

SEQ ID NO: 765804 - DNA, 15 bp, Homo sapiens
tgatttgcaacaaca

SEQ ID NO: 765805 - DNA, 15 bp, Homo sapiens
gatttgcaacaacat

SEQ ID NO: 765806 - DNA, 15 bp, Homo sapiens
atttgcaacaacatg

SEQ ID NO: 765807 - DNA, 15 bp, Homo sapiens
tttgcaacaacatgg

SEQ ID NO: 765808 - DNA, 15 bp, Homo sapiens
ttgcaacaacatgga

SEQ ID NO: 765809 - DNA, 15 bp, Homo sapiens
tgcaacaacatggat

SEQ ID NO: 765810 - DNA, 15 bp, Homo sapiens
gcaacaacatggatg

SEQ ID NO: 765811 - DNA, 15 bp, Homo sapiens
caacaacatggatgg

SEQ ID NO: 765812 - DNA, 15 bp, Homo sapiens
aacaacatggatgga

SEQ ID NO: 765813 - DNA, 15 bp, Homo sapiens
acaacatggatggaa

SEQ ID NO: 765814 - DNA, 15 bp, Homo sapiens
caacatggatggaac

SEQ ID NO: 765815 - DNA, 15 bp, Homo sapiens
catggatggaactgc

SEQ ID NO: 765816 - DNA, 15 bp, Homo sapiens
atggatggaactgca

SEQ ID NO: 765817 - DNA, 15 bp, Homo sapiens
tggatggaactgcag

SEQ ID NO: 765818 - DNA, 15 bp, Homo sapiens
ggatggaactgcagg

SEQ ID NO: 765819 - DNA, 15 bp, Homo sapiens
gatggaactgcaggt

SEQ ID NO: 765820 - DNA, 15 bp, Homo sapiens
atggaactgcaggtc

SEQ ID NO: 765821 - DNA, 15 bp, Homo sapiens
tggaactgcaggtca

SEQ ID NO: 765822 - DNA, 15 bp, Homo sapiens
ggaactgcaggtcat

SEQ ID NO: 765823 - DNA, 15 bp, Homo sapiens
gaactgcaggtcatt

SEQ ID NO: 765824 - DNA, 15 bp, Homo sapiens
aactgcaggtcatta

SEQ ID NO: 765825 - DNA, 15 bp, Homo sapiens
actgcaggtcattat

SEQ ID NO: 765826 - DNA, 15 bp, Homo sapiens
ctgcaggtcattata

SEQ ID NO: 765827 - DNA, 15 bp, Homo sapiens
tgcaggtcattatat

SEQ ID NO: 765828 - DNA, 15 bp, Homo sapiens
gcaggtcattatatt

SEQ ID NO: 765829 - DNA, 15 bp, Homo sapiens
caggtcattatatta

SEQ ID NO: 765830 - DNA, 15 bp, Homo sapiens
aggtcattatattaa

SEQ ID NO: 765831 - DNA, 15 bp, Homo sapiens
ggtcattatattaag

SEQ ID NO: 765832 - DNA, 15 bp, Homo sapiens
gtcattatattaaga

SEQ ID NO: 765833 - DNA, 15 bp, Homo sapiens
tcattatattaagag

SEQ ID NO: 765834 - DNA, 15 bp, Homo sapiens
cattatattaagaga

SEQ ID NO: 765835 - DNA, 15 bp, Homo sapiens
attatattaagagaa

SEQ ID NO: 765836 - DNA, 15 bp, Homo sapiens
ttatattaagagaaa

SEQ ID NO: 765837 - DNA, 15 bp, Homo sapiens
tatattaagagaaat

SEQ ID NO: 765838 - DNA, 15 bp, Homo sapiens
atattaagagaaata

SEQ ID NO: 765839 - DNA, 15 bp, Homo sapiens
tattaagagaaataa

SEQ ID NO: 765840 - DNA, 15 bp, Homo sapiens
attaagagaaataag

SEQ ID NO: 765841 - DNA, 15 bp, Homo sapiens
ttaagagaaataagc

SEQ ID NO: 765842 - DNA, 15 bp, Homo sapiens
taagagaaataagcc

SEQ ID NO: 765843 - DNA, 15 bp, Homo sapiens
aagagaaataagcca

SEQ ID NO: 765844 - DNA, 15 bp, Homo sapiens
agagaaataagccag

SEQ ID NO: 765845 - DNA, 15 bp, Homo sapiens
gagaaataagccagg

SEQ ID NO: 765846 - DNA, 15 bp, Homo sapiens
agaaataagccaggc

SEQ ID NO: 765847 - DNA, 15 bp, Homo sapiens
gaaataagccaggcg

SEQ ID NO: 765848 - DNA, 15 bp, Homo sapiens
aaataagccaggcgc

SEQ ID NO: 765849 - DNA, 15 bp, Homo sapiens
aataagccaggcgca

SEQ ID NO: 765850 - DNA, 15 bp, Homo sapiens
ataagccaggcgcag

SEQ ID NO: 765851 - DNA, 15 bp, Homo sapiens
taagccaggcgcaga

SEQ ID NO: 765852 - DNA, 15 bp, Homo sapiens
aagccaggcgcagaa

SEQ ID NO: 765853 - DNA, 15 bp, Homo sapiens
agccaggcgcagaaa

SEQ ID NO: 765854 - DNA, 15 bp, Homo sapiens
gccaggcgcagaaag

SEQ ID NO: 765855 - DNA, 15 bp, Homo sapiens
ccaggcgcagaaaga

SEQ ID NO: 765856 - DNA, 15 bp, Homo sapiens
caggcgcagaaagag

SEQ ID NO: 765857 - DNA, 15 bp, Homo sapiens
aggcgcagaaagaga

SEQ ID NO: 765858 - DNA, 15 bp, Homo sapiens
ggcgcagaaagagaa

SEQ ID NO: 765859 - DNA, 15 bp, Homo sapiens
gcgcagaaagagaaa

SEQ ID NO: 765860 - DNA, 15 bp, Homo sapiens
cgcagaaagagaaac

SEQ ID NO: 765861 - DNA, 15 bp, Homo sapiens
gcagaaagagaaact

SEQ ID NO: 765862 - DNA, 15 bp, Homo sapiens
cagaaagagaaactt

SEQ ID NO: 765863 - DNA, 15 bp, Homo sapiens
agaaagagaaacttc

SEQ ID NO: 765864 - DNA, 15 bp, Homo sapiens
gaaagagaaacttcg

SEQ ID NO: 765865 - DNA, 15 bp, Homo sapiens
aaagagaaacttcgc

SEQ ID NO: 765866 - DNA, 15 bp, Homo sapiens
aagagaaacttcgcc

SEQ ID NO: 765867 - DNA, 15 bp, Homo sapiens
agagaaacttcgcct

SEQ ID NO: 765868 - DNA, 15 bp, Homo sapiens
gagaaacttcgcctg

SEQ ID NO: 765869 - DNA, 15 bp, Homo sapiens
agaaacttcgcctgt

SEQ ID NO: 765870 - DNA, 15 bp, Homo sapiens
gaaacttcgcctgtt

SEQ ID NO: 765871 - DNA, 15 bp, Homo sapiens
aaacttcgcctgttc

SEQ ID NO: 765872 - DNA, 15 bp, Homo sapiens
aacttcgcctgttct

SEQ ID NO: 765873 - DNA, 15 bp, Homo sapiens
acttcgcctgttctc

SEQ ID NO: 765874 - DNA, 15 bp, Homo sapiens
cttcgcctgttctca

SEQ ID NO: 765875 - DNA, 15 bp, Homo sapiens
ttcgcctgttctcac

SEQ ID NO: 765876 - DNA, 15 bp, Homo sapiens
tcgcctgttctcact

SEQ ID NO: 765877 - DNA, 15 bp, Homo sapiens
cgcctgttctcactt

SEQ ID NO: 765878 - DNA, 15 bp, Homo sapiens
gcctgttctcactta

SEQ ID NO: 765879 - DNA, 15 bp, Homo sapiens
cctgttctcacttat

SEQ ID NO: 765880 - DNA, 15 bp, Homo sapiens
ctgttctcacttatt

SEQ ID NO: 765881 - DNA, 15 bp, Homo sapiens
tgttctcacttattt

SEQ ID NO: 765882 - DNA, 15 bp, Homo sapiens
gttctcacttatttg

SEQ ID NO: 765883 - DNA, 15 bp, Homo sapiens
ttctcacttatttgt

SEQ ID NO: 765884 - DNA, 15 bp, Homo sapiens
tctcacttatttgta

SEQ ID NO: 765885 - DNA, 15 bp, Homo sapiens
ctcacttatttgtag

SEQ ID NO: 765886 - DNA, 15 bp, Homo sapiens
tcacttatttgtagg

SEQ ID NO: 765887 - DNA, 15 bp, Homo sapiens
cacttatttgtagga

SEQ ID NO: 765888 - DNA, 15 bp, Homo sapiens
acttatttgtaggag

SEQ ID NO: 765889 - DNA, 15 bp, Homo sapiens
cttatttgtaggagc

SEQ ID NO: 765890 - DNA, 15 bp, Homo sapiens
ttatttgtaggagct

SEQ ID NO: 765891 - DNA, 15 bp, Homo sapiens
tatttgtaggagcta

SEQ ID NO: 765892 - DNA, 15 bp, Homo sapiens
atttgtaggagctaa

SEQ ID NO: 765893 - DNA, 15 bp, Homo sapiens
tttgtaggagctaaa

SEQ ID NO: 765894 - DNA, 15 bp, Homo sapiens
ttgtaggagctaaaa

SEQ ID NO: 765895 - DNA, 15 bp, Homo sapiens
tgtaggagctaaaag

SEQ ID NO: 765896 - DNA, 15 bp, Homo sapiens
gtaggagctaaaagt

SEQ ID NO: 765897 - DNA, 15 bp, Homo sapiens
taggagctaaaagtt

SEQ ID NO: 765898 - DNA, 15 bp, Homo sapiens
aggagctaaaagtta

SEQ ID NO: 765899 - DNA, 15 bp, Homo sapiens
ggagctaaaagttaa

SEQ ID NO: 765900 - DNA, 15 bp, Homo sapiens
gagctaaaagttaaa

SEQ ID NO: 765901 - DNA, 15 bp, Homo sapiens
agctaaaagttaaaa

SEQ ID NO: 765902 - DNA, 15 bp, Homo sapiens
gctaaaagttaaaac

SEQ ID NO: 765903 - DNA, 15 bp, Homo sapiens
ctaaaagttaaaaca

SEQ ID NO: 765904 - DNA, 15 bp, Homo sapiens
taaaagttaaaacag

SEQ ID NO: 765905 - DNA, 15 bp, Homo sapiens
aaaagttaaaacagt

SEQ ID NO: 765906 - DNA, 15 bp, Homo sapiens
aaagttaaaacagtt

SEQ ID NO: 765907 - DNA, 15 bp, Homo sapiens
aagttaaaacagttg

SEQ ID NO: 765908 - DNA, 15 bp, Homo sapiens
agttaaaacagttga

SEQ ID NO: 765909 - DNA, 15 bp, Homo sapiens
gttaaaacagttgaa

SEQ ID NO: 765910 - DNA, 15 bp, Homo sapiens
ttaaaacagttgaac

SEQ ID NO: 765911 - DNA, 15 bp, Homo sapiens
taaaacagttgaact

SEQ ID NO: 765912 - DNA, 15 bp, Homo sapiens
aaaacagttgaacta

SEQ ID NO: 765913 - DNA, 15 bp, Homo sapiens
aaacagttgaactaa

SEQ ID NO: 765914 - DNA, 15 bp, Homo sapiens
aacagttgaactaat

SEQ ID NO: 765915 - DNA, 15 bp, Homo sapiens
acagttgaactaatg

SEQ ID NO: 765916 - DNA, 15 bp, Homo sapiens
cagttgaactaatgg

SEQ ID NO: 765917 - DNA, 15 bp, Homo sapiens
agttgaactaatgga

SEQ ID NO: 765918 - DNA, 15 bp, Homo sapiens
gttgaactaatggag

SEQ ID NO: 765919 - DNA, 15 bp, Homo sapiens
ttgaactaatggaga

SEQ ID NO: 765920 - DNA, 15 bp, Homo sapiens
tgaactaatggagat

SEQ ID NO: 765921 - DNA, 15 bp, Homo sapiens
gaactaatggagata

SEQ ID NO: 765922 - DNA, 15 bp, Homo sapiens
aactaatggagatag

SEQ ID NO: 765923 - DNA, 15 bp, Homo sapiens
actaatggagataga

SEQ ID NO: 765924 - DNA, 15 bp, Homo sapiens
ctaatggagatagag

SEQ ID NO: 765925 - DNA, 15 bp, Homo sapiens
taatggagatagaga

SEQ ID NO: 765926 - DNA, 15 bp, Homo sapiens
aatggagatagagaa

SEQ ID NO: 765927 - DNA, 15 bp, Homo sapiens
atggagatagagaat

SEQ ID NO: 765928 - DNA, 15 bp, Homo sapiens
tggagatagagaata

SEQ ID NO: 765929 - DNA, 15 bp, Homo sapiens
ggagatagagaatag

SEQ ID NO: 765930 - DNA, 15 bp, Homo sapiens
gagatagagaataga

SEQ ID NO: 765931 - DNA, 15 bp, Homo sapiens
agatagagaatagaa

SEQ ID NO: 765932 - DNA, 15 bp, Homo sapiens
gatagagaatagaag

SEQ ID NO: 765933 - DNA, 15 bp, Homo sapiens
atagagaatagaagg

SEQ ID NO: 765934 - DNA, 15 bp, Homo sapiens
tagagaatagaagga

SEQ ID NO: 765935 - DNA, 15 bp, Homo sapiens
agagaatagaaggat

SEQ ID NO: 765936 - DNA, 15 bp, Homo sapiens
gagaatagaaggatg

SEQ ID NO: 765937 - DNA, 15 bp, Homo sapiens
agaatagaaggatgg

SEQ ID NO: 765938 - DNA, 15 bp, Homo sapiens
gaatagaaggatggt

SEQ ID NO: 765939 - DNA, 15 bp, Homo sapiens
aatagaaggatggtt

SEQ ID NO: 765940 - DNA, 15 bp, Homo sapiens
atagaaggatggtta

SEQ ID NO: 765941 - DNA, 15 bp, Homo sapiens
tagaaggatggttac

SEQ ID NO: 765942 - DNA, 15 bp, Homo sapiens
agaaggatggttacc

SEQ ID NO: 765943 - DNA, 15 bp, Homo sapiens
gaaggatggttacca

SEQ ID NO: 765944 - DNA, 15 bp, Homo sapiens
aaggatggttaccag

SEQ ID NO: 765945 - DNA, 15 bp, Homo sapiens
aggatggttaccaga

SEQ ID NO: 765946 - DNA, 15 bp, Homo sapiens
ggatggttaccagag

SEQ ID NO: 765947 - DNA, 15 bp, Homo sapiens
gatggttaccagaga

SEQ ID NO: 765948 - DNA, 15 bp, Homo sapiens
atggttaccagagat

SEQ ID NO: 765949 - DNA, 15 bp, Homo sapiens
tggttaccagagatt

SEQ ID NO: 765950 - DNA, 15 bp, Homo sapiens
ggttaccagagattg

SEQ ID NO: 765951 - DNA, 15 bp, Homo sapiens
gttaccagagattgg

SEQ ID NO: 765952 - DNA, 15 bp, Homo sapiens
ttaccagagattggg

SEQ ID NO: 765953 - DNA, 15 bp, Homo sapiens
taccagagattggga

SEQ ID NO: 765954 - DNA, 15 bp, Homo sapiens
accagagattgggaa

SEQ ID NO: 765955 - DNA, 15 bp, Homo sapiens
ccagagattgggaag

SEQ ID NO: 765956 - DNA, 15 bp, Homo sapiens
cagagattgggaagg

SEQ ID NO: 765957 - DNA, 15 bp, Homo sapiens
agagattgggaaggt

SEQ ID NO: 765958 - DNA, 15 bp, Homo sapiens
gagattgggaaggtg

SEQ ID NO: 765959 - DNA, 15 bp, Homo sapiens
agattgggaaggtgg

SEQ ID NO: 765960 - DNA, 15 bp, Homo sapiens
gattgggaaggtggg

SEQ ID NO: 765961 - DNA, 15 bp, Homo sapiens
attgggaaggtgggg

SEQ ID NO: 765962 - DNA, 15 bp, Homo sapiens
ttgggaaggtgggga

SEQ ID NO: 765963 - DNA, 15 bp, Homo sapiens
tgggaaggtggggac

SEQ ID NO: 765964 - DNA, 15 bp, Homo sapiens
gggaaggtggggaca

SEQ ID NO: 765965 - DNA, 15 bp, Homo sapiens
ggaaggtggggacac

SEQ ID NO: 765966 - DNA, 15 bp, Homo sapiens
gaaggtggggacacg

SEQ ID NO: 765967 - DNA, 15 bp, Homo sapiens
aaggtggggacacgg

SEQ ID NO: 765968 - DNA, 15 bp, Homo sapiens
aggtggggacacggg

SEQ ID NO: 765969 - DNA, 15 bp, Homo sapiens
ggtggggacacgggg

SEQ ID NO: 765970 - DNA, 15 bp, Homo sapiens
gtggggacacgggga

SEQ ID NO: 765971 - DNA, 15 bp, Homo sapiens
tggggacacggggat

SEQ ID NO: 765972 - DNA, 15 bp, Homo sapiens
ggggacacggggatg

SEQ ID NO: 765973 - DNA, 15 bp, Homo sapiens
gggacacggggatgt

SEQ ID NO: 765974 - DNA, 15 bp, Homo sapiens
ggacacggggatgtg

SEQ ID NO: 765975 - DNA, 15 bp, Homo sapiens
gacacggggatgtgg

SEQ ID NO: 765976 - DNA, 15 bp, Homo sapiens
acacggggatgtgga

SEQ ID NO: 765977 - DNA, 15 bp, Homo sapiens
cacggggatgtggag

SEQ ID NO: 765978 - DNA, 15 bp, Homo sapiens
acggggatgtggaga

SEQ ID NO: 765979 - DNA, 15 bp, Homo sapiens
cggggatgtggagat

SEQ ID NO: 765980 - DNA, 15 bp, Homo sapiens
ggggatgtggagata

SEQ ID NO: 765981 - DNA, 15 bp, Homo sapiens
gggatgtggagatag

SEQ ID NO: 765982 - DNA, 15 bp, Homo sapiens
ggatgtggagatagt

SEQ ID NO: 765983 - DNA, 15 bp, Homo sapiens
gatgtggagatagtt

SEQ ID NO: 765984 - DNA, 15 bp, Homo sapiens
atgtggagatagtta

SEQ ID NO: 765985 - DNA, 15 bp, Homo sapiens
tgtggagatagttaa

SEQ ID NO: 765986 - DNA, 15 bp, Homo sapiens
gtggagatagttaat

SEQ ID NO: 765987 - DNA, 15 bp, Homo sapiens
tggagatagttaatg

SEQ ID NO: 765988 - DNA, 15 bp, Homo sapiens
ggagatagttaatgg

SEQ ID NO: 765989 - DNA, 15 bp, Homo sapiens
gagatagttaatggg

SEQ ID NO: 765990 - DNA, 15 bp, Homo sapiens
agatagttaatgggt

SEQ ID NO: 765991 - DNA, 15 bp, Homo sapiens
gatagttaatgggta

SEQ ID NO: 765992 - DNA, 15 bp, Homo sapiens
atagttaatgggtac

SEQ ID NO: 765993 - DNA, 15 bp, Homo sapiens
tagttaatgggtaca

SEQ ID NO: 765994 - DNA, 15 bp, Homo sapiens
agttaatgggtacaa

SEQ ID NO: 765995 - DNA, 15 bp, Homo sapiens
gttaatgggtacaaa

SEQ ID NO: 765996 - DNA, 15 bp, Homo sapiens
ttaatgggtacaaaa

SEQ ID NO: 765997 - DNA, 15 bp, Homo sapiens
taatgggtacaaaaa

SEQ ID NO: 765998 - DNA, 15 bp, Homo sapiens
aatgggtacaaaaaa

SEQ ID NO: 765999 - DNA, 15 bp, Homo sapiens
atgggtacaaaaaaa

SEQ ID NO: 766000 - DNA, 15 bp, Homo sapiens
tgggtacaaaaaaag

SEQ ID NO: 766001 - DNA, 15 bp, Homo sapiens
gggtacaaaaaaaga

SEQ ID NO: 766002 - DNA, 15 bp, Homo sapiens
ggtacaaaaaaagaa

SEQ ID NO: 766003 - DNA, 15 bp, Homo sapiens
gtacaaaaaaagaaa

SEQ ID NO: 766004 - DNA, 15 bp, Homo sapiens
tacaaaaaaagaaaa

SEQ ID NO: 766005 - DNA, 15 bp, Homo sapiens
acaaaaaaagaaaat

SEQ ID NO: 766006 - DNA, 15 bp, Homo sapiens
caaaaaaagaaaata

SEQ ID NO: 766007 - DNA, 15 bp, Homo sapiens
aaaaaaagaaaatag

SEQ ID NO: 766008 - DNA, 15 bp, Homo sapiens
aaaaaagaaaataga

SEQ ID NO: 766009 - DNA, 15 bp, Homo sapiens
aaaaagaaaatagag

SEQ ID NO: 766010 - DNA, 15 bp, Homo sapiens
aaaagaaaatagagt

SEQ ID NO: 766011 - DNA, 15 bp, Homo sapiens
aaagaaaatagagtg

SEQ ID NO: 766012 - DNA, 15 bp, Homo sapiens
aagaaaatagagtga

SEQ ID NO: 766013 - DNA, 15 bp, Homo sapiens
agaaaatagagtgaa

SEQ ID NO: 766014 - DNA, 15 bp, Homo sapiens
gaaaatagagtgaat

SEQ ID NO: 766015 - DNA, 15 bp, Homo sapiens
aaaatagagtgaata

SEQ ID NO: 766016 - DNA, 15 bp, Homo sapiens
aaatagagtgaatag

SEQ ID NO: 766017 - DNA, 15 bp, Homo sapiens
aatagagtgaataga

SEQ ID NO: 766018 - DNA, 15 bp, Homo sapiens
atagagtgaatagac

SEQ ID NO: 766019 - DNA, 15 bp, Homo sapiens
tagagtgaatagacc

SEQ ID NO: 766020 - DNA, 15 bp, Homo sapiens
agagtgaatagacct

SEQ ID NO: 766021 - DNA, 15 bp, Homo sapiens
gagtgaatagaccta

SEQ ID NO: 766022 - DNA, 15 bp, Homo sapiens
agtgaatagacctag

SEQ ID NO: 766023 - DNA, 15 bp, Homo sapiens
gtgaatagacctagt

SEQ ID NO: 766024 - DNA, 15 bp, Homo sapiens
tgaatagacctagta

SEQ ID NO: 766025 - DNA, 15 bp, Homo sapiens
gaatagacctagtat

SEQ ID NO: 766026 - DNA, 15 bp, Homo sapiens
aatagacctagtatt

SEQ ID NO: 766027 - DNA, 15 bp, Homo sapiens
atagacctagtattt

SEQ ID NO: 766028 - DNA, 15 bp, Homo sapiens
tagacctagtatttg

SEQ ID NO: 766029 - DNA, 15 bp, Homo sapiens
agacctagtatttgc

SEQ ID NO: 766030 - DNA, 15 bp, Homo sapiens
gacctagtatttgcc

SEQ ID NO: 766031 - DNA, 15 bp, Homo sapiens
acctagtatttgcca

SEQ ID NO: 766032 - DNA, 15 bp, Homo sapiens
cctagtatttgccag

SEQ ID NO: 766033 - DNA, 15 bp, Homo sapiens
ctagtatttgccagc

SEQ ID NO: 766034 - DNA, 15 bp, Homo sapiens
tagtatttgccagca

SEQ ID NO: 766035 - DNA, 15 bp, Homo sapiens
agtatttgccagcac

SEQ ID NO: 766036 - DNA, 15 bp, Homo sapiens
gtatttgccagcaca

SEQ ID NO: 766037 - DNA, 15 bp, Homo sapiens
tatttgccagcacaa

SEQ ID NO: 766038 - DNA, 15 bp, Homo sapiens
atttgccagcacaat

SEQ ID NO: 766039 - DNA, 15 bp, Homo sapiens
tttgccagcacaatg

SEQ ID NO: 766040 - DNA, 15 bp, Homo sapiens
ttgccagcacaatga

SEQ ID NO: 766041 - DNA, 15 bp, Homo sapiens
tgccagcacaatgag

SEQ ID NO: 766042 - DNA, 15 bp, Homo sapiens
gccagcacaatgagg

SEQ ID NO: 766043 - DNA, 15 bp, Homo sapiens
ccagcacaatgaggt

SEQ ID NO: 766044 - DNA, 15 bp, Homo sapiens
cagcacaatgaggtg

SEQ ID NO: 766045 - DNA, 15 bp, Homo sapiens
agcacaatgaggtga

SEQ ID NO: 766046 - DNA, 15 bp, Homo sapiens
gcacaatgaggtgac

SEQ ID NO: 766047 - DNA, 15 bp, Homo sapiens
cacaatgaggtgacc

SEQ ID NO: 766048 - DNA, 15 bp, Homo sapiens
acaatgaggtgacca

SEQ ID NO: 766049 - DNA, 15 bp, Homo sapiens
caatgaggtgaccat

SEQ ID NO: 766050 - DNA, 15 bp, Homo sapiens
aatgaggtgaccata

SEQ ID NO: 766051 - DNA, 15 bp, Homo sapiens
atgaggtgaccatag

SEQ ID NO: 766052 - DNA, 15 bp, Homo sapiens
tgaggtgaccatagt

SEQ ID NO: 766053 - DNA, 15 bp, Homo sapiens
gaggtgaccatagtc

SEQ ID NO: 766054 - DNA, 15 bp, Homo sapiens
aggtgaccatagtca

SEQ ID NO: 766055 - DNA, 15 bp, Homo sapiens
ggtgaccatagtcaa

SEQ ID NO: 766056 - DNA, 15 bp, Homo sapiens
gtgaccatagtcaaa

SEQ ID NO: 766057 - DNA, 15 bp, Homo sapiens
tgaccatagtcaaat

SEQ ID NO: 766058 - DNA, 15 bp, Homo sapiens
gaccatagtcaaata

SEQ ID NO: 766059 - DNA, 15 bp, Homo sapiens
accatagtcaaatat

SEQ ID NO: 766060 - DNA, 15 bp, Homo sapiens
ccatagtcaaatata

SEQ ID NO: 766061 - DNA, 15 bp, Homo sapiens
catagtcaaatataa

SEQ ID NO: 766062 - DNA, 15 bp, Homo sapiens
atagtcaaatataat

SEQ ID NO: 766063 - DNA, 15 bp, Homo sapiens
tagtcaaatataatt

SEQ ID NO: 766064 - DNA, 15 bp, Homo sapiens
agtcaaatataattt

SEQ ID NO: 766065 - DNA, 15 bp, Homo sapiens
gtcaaatataattta

SEQ ID NO: 766066 - DNA, 15 bp, Homo sapiens
tcaaatataatttaa

SEQ ID NO: 766067 - DNA, 15 bp, Homo sapiens
caaatataatttaat

SEQ ID NO: 766068 - DNA, 15 bp, Homo sapiens
aaatataatttaatt

SEQ ID NO: 766069 - DNA, 15 bp, Homo sapiens
aatataatttaattg

SEQ ID NO: 766070 - DNA, 15 bp, Homo sapiens
atataatttaattgt

SEQ ID NO: 766071 - DNA, 15 bp, Homo sapiens
tataatttaattgta

SEQ ID NO: 766072 - DNA, 15 bp, Homo sapiens
ataatttaattgtac

SEQ ID NO: 766073 - DNA, 15 bp, Homo sapiens
taatttaattgtaca

SEQ ID NO: 766074 - DNA, 15 bp, Homo sapiens
aatttaattgtacat

SEQ ID NO: 766075 - DNA, 15 bp, Homo sapiens
atttaattgtacatt

SEQ ID NO: 766076 - DNA, 15 bp, Homo sapiens
tttaattgtacattt

SEQ ID NO: 766077 - DNA, 15 bp, Homo sapiens
ttaattgtacattta

SEQ ID NO: 766078 - DNA, 15 bp, Homo sapiens
taattgtacatttag

SEQ ID NO: 766079 - DNA, 15 bp, Homo sapiens
aattgtacatttaga

SEQ ID NO: 766080 - DNA, 15 bp, Homo sapiens
attgtacatttagaa

SEQ ID NO: 766081 - DNA, 15 bp, Homo sapiens
ttgtacatttagaaa

SEQ ID NO: 766082 - DNA, 15 bp, Homo sapiens
tgtacatttagaaat

SEQ ID NO: 766083 - DNA, 15 bp, Homo sapiens
gtacatttagaaata

SEQ ID NO: 766084 - DNA, 15 bp, Homo sapiens
tacatttagaaataa

SEQ ID NO: 766085 - DNA, 15 bp, Homo sapiens
acatttagaaataac

SEQ ID NO: 766086 - DNA, 15 bp, Homo sapiens
catttagaaataact

SEQ ID NO: 766087 - DNA, 15 bp, Homo sapiens
atttagaaataacta

SEQ ID NO: 766088 - DNA, 15 bp, Homo sapiens
tttagaaataactaa

SEQ ID NO: 766089 - DNA, 15 bp, Homo sapiens
ttagaaataactaaa

SEQ ID NO: 766090 - DNA, 15 bp, Homo sapiens
tagaaataactaaaa

SEQ ID NO: 766091 - DNA, 15 bp, Homo sapiens
agaaataactaaaag

SEQ ID NO: 766092 - DNA, 15 bp, Homo sapiens
gaaataactaaaaga

SEQ ID NO: 766093 - DNA, 15 bp, Homo sapiens
aaataactaaaagag

SEQ ID NO: 766094 - DNA, 15 bp, Homo sapiens
aataactaaaagagt

SEQ ID NO: 766095 - DNA, 15 bp, Homo sapiens
ataactaaaagagtg

SEQ ID NO: 766096 - DNA, 15 bp, Homo sapiens
taactaaaagagtgt

SEQ ID NO: 766097 - DNA, 15 bp, Homo sapiens
aactaaaagagtgta

SEQ ID NO: 766098 - DNA, 15 bp, Homo sapiens
actaaaagagtgtaa

SEQ ID NO: 766099 - DNA, 15 bp, Homo sapiens
ctaaaagagtgtaat

SEQ ID NO: 766100 - DNA, 15 bp, Homo sapiens
taaaagagtgtaatt

SEQ ID NO: 766101 - DNA, 15 bp, Homo sapiens
aaaagagtgtaattg

SEQ ID NO: 766102 - DNA, 15 bp, Homo sapiens
aaagagtgtaattgg

SEQ ID NO: 766103 - DNA, 15 bp, Homo sapiens
aagagtgtaattgga

SEQ ID NO: 766104 - DNA, 15 bp, Homo sapiens
agagtgtaattggat

SEQ ID NO: 766105 - DNA, 15 bp, Homo sapiens
gagtgtaattggatt

SEQ ID NO: 766106 - DNA, 15 bp, Homo sapiens
agtgtaattggattg

SEQ ID NO: 766107 - DNA, 15 bp, Homo sapiens
gtgtaattggattgt

SEQ ID NO: 766108 - DNA, 15 bp, Homo sapiens
tgtaattggattgtt

SEQ ID NO: 766109 - DNA, 15 bp, Homo sapiens
gtaattggattgttt

SEQ ID NO: 766110 - DNA, 15 bp, Homo sapiens
taattggattgtttg

SEQ ID NO: 766111 - DNA, 15 bp, Homo sapiens
aattggattgtttgt

SEQ ID NO: 766112 - DNA, 15 bp, Homo sapiens
attggattgtttgta

SEQ ID NO: 766113 - DNA, 15 bp, Homo sapiens
ttggattgtttgtaa

SEQ ID NO: 766114 - DNA, 15 bp, Homo sapiens
tggattgtttgtaac

SEQ ID NO: 766115 - DNA, 15 bp, Homo sapiens
ggattgtttgtaaca

SEQ ID NO: 766116 - DNA, 15 bp, Homo sapiens
gattgtttgtaacac

SEQ ID NO: 766117 - DNA, 15 bp, Homo sapiens
attgtttgtaacaca

SEQ ID NO: 766118 - DNA, 15 bp, Homo sapiens
ttgtttgtaacacaa

SEQ ID NO: 766119 - DNA, 15 bp, Homo sapiens
tgtttgtaacacaaa

SEQ ID NO: 766120 - DNA, 15 bp, Homo sapiens
gtttgtaacacaaag

SEQ ID NO: 766121 - DNA, 15 bp, Homo sapiens
tttgtaacacaaagg

SEQ ID NO: 766122 - DNA, 15 bp, Homo sapiens
ttgtaacacaaagga

SEQ ID NO: 766123 - DNA, 15 bp, Homo sapiens
tgtaacacaaaggat

SEQ ID NO: 766124 - DNA, 15 bp, Homo sapiens
gtaacacaaaggata

SEQ ID NO: 766125 - DNA, 15 bp, Homo sapiens
taacacaaaggataa

SEQ ID NO: 766126 - DNA, 15 bp, Homo sapiens
aacacaaaggataaa

SEQ ID NO: 766127 - DNA, 15 bp, Homo sapiens
acacaaaggataaat

SEQ ID NO: 766128 - DNA, 15 bp, Homo sapiens
cacaaaggataaatg

SEQ ID NO: 766129 - DNA, 15 bp, Homo sapiens
acaaaggataaatgc

SEQ ID NO: 766130 - DNA, 15 bp, Homo sapiens
caaaggataaatgct

SEQ ID NO: 766131 - DNA, 15 bp, Homo sapiens
aaaggataaatgctg

SEQ ID NO: 766132 - DNA, 15 bp, Homo sapiens
aaggataaatgctgg

SEQ ID NO: 766133 - DNA, 15 bp, Homo sapiens
aggataaatgctgga

SEQ ID NO: 766134 - DNA, 15 bp, Homo sapiens
ggataaatgctggag

SEQ ID NO: 766135 - DNA, 15 bp, Homo sapiens
gataaatgctggagg

SEQ ID NO: 766136 - DNA, 15 bp, Homo sapiens
ataaatgctggaggt

SEQ ID NO: 766137 - DNA, 15 bp, Homo sapiens
taaatgctggaggtg

SEQ ID NO: 766138 - DNA, 15 bp, Homo sapiens
aaatgctggaggtga

SEQ ID NO: 766139 - DNA, 15 bp, Homo sapiens
aatgctggaggtgat

SEQ ID NO: 766140 - DNA, 15 bp, Homo sapiens
atgctggaggtgata

SEQ ID NO: 766141 - DNA, 15 bp, Homo sapiens
tgctggaggtgatag

SEQ ID NO: 766142 - DNA, 15 bp, Homo sapiens
gctggaggtgataga

SEQ ID NO: 766143 - DNA, 15 bp, Homo sapiens
ctggaggtgatagac

SEQ ID NO: 766144 - DNA, 15 bp, Homo sapiens
tggaggtgatagaca

SEQ ID NO: 766145 - DNA, 15 bp, Homo sapiens
ggaggtgatagacac

SEQ ID NO: 766146 - DNA, 15 bp, Homo sapiens
gaggtgatagacacc

SEQ ID NO: 766147 - DNA, 15 bp, Homo sapiens
aggtgatagacacct

SEQ ID NO: 766148 - DNA, 15 bp, Homo sapiens
ggtgatagacacctc

SEQ ID NO: 766149 - DNA, 15 bp, Homo sapiens
gtgatagacacctca

SEQ ID NO: 766150 - DNA, 15 bp, Homo sapiens
tgatagacacctcat

SEQ ID NO: 766151 - DNA, 15 bp, Homo sapiens
gatagacacctcatt

SEQ ID NO: 766152 - DNA, 15 bp, Homo sapiens
atagacacctcattg

SEQ ID NO: 766153 - DNA, 15 bp, Homo sapiens
tagacacctcattga

SEQ ID NO: 766154 - DNA, 15 bp, Homo sapiens
agacacctcattgac

SEQ ID NO: 766155 - DNA, 15 bp, Homo sapiens
gacacctcattgacc

SEQ ID NO: 766156 - DNA, 15 bp, Homo sapiens
acacctcattgaccc

SEQ ID NO: 766157 - DNA, 15 bp, Homo sapiens
cacctcattgaccct

SEQ ID NO: 766158 - DNA, 15 bp, Homo sapiens
acctcattgaccctg

SEQ ID NO: 766159 - DNA, 15 bp, Homo sapiens
cctcattgaccctga

SEQ ID NO: 766160 - DNA, 15 bp, Homo sapiens
ctcattgaccctgat

SEQ ID NO: 766161 - DNA, 15 bp, Homo sapiens
tcattgaccctgatg

SEQ ID NO: 766162 - DNA, 15 bp, Homo sapiens
cattgaccctgatgc

SEQ ID NO: 766163 - DNA, 15 bp, Homo sapiens
attgaccctgatgcc

SEQ ID NO: 766164 - DNA, 15 bp, Homo sapiens
ttgaccctgatgcct

SEQ ID NO: 766165 - DNA, 15 bp, Homo sapiens
tgaccctgatgcctg

SEQ ID NO: 766166 - DNA, 15 bp, Homo sapiens
gaccctgatgcctgg

SEQ ID NO: 766167 - DNA, 15 bp, Homo sapiens
accctgatgcctggt

SEQ ID NO: 766168 - DNA, 15 bp, Homo sapiens
ccctgatgcctggta

SEQ ID NO: 766169 - DNA, 15 bp, Homo sapiens
cctgatgcctggtat

SEQ ID NO: 766170 - DNA, 15 bp, Homo sapiens
ctgatgcctggtatt

SEQ ID NO: 766171 - DNA, 15 bp, Homo sapiens
tgatgcctggtatta

SEQ ID NO: 766172 - DNA, 15 bp, Homo sapiens
gatgcctggtattac

SEQ ID NO: 766173 - DNA, 15 bp, Homo sapiens
atgcctggtattaca

SEQ ID NO: 766174 - DNA, 15 bp, Homo sapiens
tgcctggtattacac

SEQ ID NO: 766175 - DNA, 15 bp, Homo sapiens
gcctggtattacaca

SEQ ID NO: 766176 - DNA, 15 bp, Homo sapiens
cctggtattacacat

SEQ ID NO: 766177 - DNA, 15 bp, Homo sapiens
ctggtattacacatt

SEQ ID NO: 766178 - DNA, 15 bp, Homo sapiens
tggtattacacattg

SEQ ID NO: 766179 - DNA, 15 bp, Homo sapiens
ggtattacacattgc

SEQ ID NO: 766180 - DNA, 15 bp, Homo sapiens
gtattacacattgca

SEQ ID NO: 766181 - DNA, 15 bp, Homo sapiens
tattacacattgcat

SEQ ID NO: 766182 - DNA, 15 bp, Homo sapiens
attacacattgcatg

SEQ ID NO: 766183 - DNA, 15 bp, Homo sapiens
ttacacattgcatgc

SEQ ID NO: 766184 - DNA, 15 bp, Homo sapiens
tacacattgcatgcc

SEQ ID NO: 766185 - DNA, 15 bp, Homo sapiens
acacattgcatgcct

SEQ ID NO: 766186 - DNA, 15 bp, Homo sapiens
cacattgcatgcctg

SEQ ID NO: 766187 - DNA, 15 bp, Homo sapiens
acattgcatgcctgt

SEQ ID NO: 766188 - DNA, 15 bp, Homo sapiens
cattgcatgcctgta

SEQ ID NO: 766189 - DNA, 15 bp, Homo sapiens
attgcatgcctgtac

SEQ ID NO: 766190 - DNA, 15 bp, Homo sapiens
ttgcatgcctgtacc

SEQ ID NO: 766191 - DNA, 15 bp, Homo sapiens
tgcatgcctgtacca

SEQ ID NO: 766192 - DNA, 15 bp, Homo sapiens
gcatgcctgtaccaa

SEQ ID NO: 766193 - DNA, 15 bp, Homo sapiens
catgcctgtaccaaa

SEQ ID NO: 766194 - DNA, 15 bp, Homo sapiens
atgcctgtaccaaaa

SEQ ID NO: 766195 - DNA, 15 bp, Homo sapiens
tgcctgtaccaaaac

SEQ ID NO: 766196 - DNA, 15 bp, Homo sapiens
gcctgtaccaaaaca

SEQ ID NO: 766197 - DNA, 15 bp, Homo sapiens
cctgtaccaaaacat

SEQ ID NO: 766198 - DNA, 15 bp, Homo sapiens
ctgtaccaaaacatc

SEQ ID NO: 766199 - DNA, 15 bp, Homo sapiens
tgtaccaaaacatct

SEQ ID NO: 766200 - DNA, 15 bp, Homo sapiens
gtaccaaaacatcta

SEQ ID NO: 766201 - DNA, 15 bp, Homo sapiens
taccaaaacatctaa

SEQ ID NO: 766202 - DNA, 15 bp, Homo sapiens
accaaaacatctaat

SEQ ID NO: 766203 - DNA, 15 bp, Homo sapiens
ccaaaacatctaatg

SEQ ID NO: 766204 - DNA, 15 bp, Homo sapiens
caaaacatctaatgt

SEQ ID NO: 766205 - DNA, 15 bp, Homo sapiens
aaaacatctaatgta

SEQ ID NO: 766206 - DNA, 15 bp, Homo sapiens
aaacatctaatgtac

SEQ ID NO: 766207 - DNA, 15 bp, Homo sapiens
aacatctaatgtacc

SEQ ID NO: 766208 - DNA, 15 bp, Homo sapiens
acatctaatgtacct

SEQ ID NO: 766209 - DNA, 15 bp, Homo sapiens
catctaatgtacctt

SEQ ID NO: 766210 - DNA, 15 bp, Homo sapiens
atctaatgtacctta

SEQ ID NO: 766211 - DNA, 15 bp, Homo sapiens
tctaatgtaccttat

SEQ ID NO: 766212 - DNA, 15 bp, Homo sapiens
ctaatgtaccttata

SEQ ID NO: 766213 - DNA, 15 bp, Homo sapiens
taatgtaccttataa

SEQ ID NO: 766214 - DNA, 15 bp, Homo sapiens
aatgtaccttataaa

SEQ ID NO: 766215 - DNA, 15 bp, Homo sapiens
atgtaccttataaat

SEQ ID NO: 766216 - DNA, 15 bp, Homo sapiens
tgtaccttataaata

SEQ ID NO: 766217 - DNA, 15 bp, Homo sapiens
gtaccttataaatac

SEQ ID NO: 766218 - DNA, 15 bp, Homo sapiens
taccttataaataca

SEQ ID NO: 766219 - DNA, 15 bp, Homo sapiens
accttataaatacat

SEQ ID NO: 766220 - DNA, 15 bp, Homo sapiens
ccttataaatacata

SEQ ID NO: 766221 - DNA, 15 bp, Homo sapiens
cttataaatacatat

SEQ ID NO: 766222 - DNA, 15 bp, Homo sapiens
ttataaatacatatc

SEQ ID NO: 766223 - DNA, 15 bp, Homo sapiens
tataaatacatatct

SEQ ID NO: 766224 - DNA, 15 bp, Homo sapiens
ataaatacatatcta

SEQ ID NO: 766225 - DNA, 15 bp, Homo sapiens
taaatacatatctac

SEQ ID NO: 766226 - DNA, 15 bp, Homo sapiens
aaatacatatctact

SEQ ID NO: 766227 - DNA, 15 bp, Homo sapiens
aatacatatctacta

SEQ ID NO: 766228 - DNA, 15 bp, Homo sapiens
atacatatctactat

SEQ ID NO: 766229 - DNA, 15 bp, Homo sapiens
tacatatctactatg

SEQ ID NO: 766230 - DNA, 15 bp, Homo sapiens
acatatctactatgt

SEQ ID NO: 766231 - DNA, 15 bp, Homo sapiens
catatctactatgta

SEQ ID NO: 766232 - DNA, 15 bp, Homo sapiens
atatctactatgtac

SEQ ID NO: 766233 - DNA, 15 bp, Homo sapiens
tatctactatgtacc

SEQ ID NO: 766234 - DNA, 15 bp, Homo sapiens
atctactatgtaccc

SEQ ID NO: 766235 - DNA, 15 bp, Homo sapiens
tctactatgtaccca

SEQ ID NO: 766236 - DNA, 15 bp, Homo sapiens
ctactatgtacccac

SEQ ID NO: 766237 - DNA, 15 bp, Homo sapiens
tactatgtacccaca

SEQ ID NO: 766238 - DNA, 15 bp, Homo sapiens
actatgtacccacaa

SEQ ID NO: 766239 - DNA, 15 bp, Homo sapiens
ctatgtacccacaaa

SEQ ID NO: 766240 - DNA, 15 bp, Homo sapiens
tatgtacccacaaaa

SEQ ID NO: 766241 - DNA, 15 bp, Homo sapiens
atgtacccacaaaaa

SEQ ID NO: 766242 - DNA, 15 bp, Homo sapiens
tgtacccacaaaaat

SEQ ID NO: 766243 - DNA, 15 bp, Homo sapiens
gtacccacaaaaatt

SEQ ID NO: 766244 - DNA, 15 bp, Homo sapiens
tacccacaaaaatta

SEQ ID NO: 766245 - DNA, 15 bp, Homo sapiens
acccacaaaaattaa

SEQ ID NO: 766246 - DNA, 15 bp, Homo sapiens
cccacaaaaattaaa

SEQ ID NO: 766247 - DNA, 15 bp, Homo sapiens
ccacaaaaattaaag

SEQ ID NO: 766248 - DNA, 15 bp, Homo sapiens
cacaaaaattaaaga

SEQ ID NO: 766249 - DNA, 15 bp, Homo sapiens
acaaaaattaaagat

SEQ ID NO: 766250 - DNA, 15 bp, Homo sapiens
caaaaattaaagata

SEQ ID NO: 766251 - DNA, 15 bp, Homo sapiens
aaaaattaaagataa

SEQ ID NO: 766252 - DNA, 15 bp, Homo sapiens
aaaattaaagataaa

SEQ ID NO: 766253 - DNA, 15 bp, Homo sapiens
aaattaaagataaaa

SEQ ID NO: 766254 - DNA, 15 bp, Homo sapiens
aattaaagataaaaa

SEQ ID NO: 766255 - DNA, 15 bp, Homo sapiens
attaaagataaaaag

SEQ ID NO: 766256 - DNA, 15 bp, Homo sapiens
ttaaagataaaaaga

SEQ ID NO: 766257 - DNA, 15 bp, Homo sapiens
taaagataaaaagaa

SEQ ID NO: 766258 - DNA, 15 bp, Homo sapiens
aaagataaaaagaaa

SEQ ID NO: 766259 - DNA, 15 bp, Homo sapiens
aagataaaaagaaat

SEQ ID NO: 766260 - DNA, 15 bp, Homo sapiens
agataaaaagaaata

SEQ ID NO: 766261 - DNA, 15 bp, Homo sapiens
gataaaaagaaatag

SEQ ID NO: 766262 - DNA, 15 bp, Homo sapiens
ataaaaagaaatagt

SEQ ID NO: 766263 - DNA, 15 bp, Homo sapiens
taaaaagaaatagta

SEQ ID NO: 766264 - DNA, 15 bp, Homo sapiens
aaaaagaaatagtag

SEQ ID NO: 766265 - DNA, 15 bp, Homo sapiens
aaaagaaatagtaga

SEQ ID NO: 766266 - DNA, 15 bp, Homo sapiens
aaagaaatagtagat

SEQ ID NO: 766267 - DNA, 15 bp, Homo sapiens
aagaaatagtagata

SEQ ID NO: 766268 - DNA, 15 bp, Homo sapiens
agaaatagtagatat

SEQ ID NO: 766269 - DNA, 15 bp, Homo sapiens
gaaatagtagatata

SEQ ID NO: 766270 - DNA, 15 bp, Homo sapiens
aaatagtagatataa

SEQ ID NO: 766271 - DNA, 15 bp, Homo sapiens
aatagtagatataat

SEQ ID NO: 766272 - DNA, 15 bp, Homo sapiens
atagtagatataatt

SEQ ID NO: 766273 - DNA, 15 bp, Homo sapiens
tagtagatataattt

SEQ ID NO: 766274 - DNA, 15 bp, Homo sapiens
agtagatataatttc

SEQ ID NO: 766275 - DNA, 15 bp, Homo sapiens
gtagatataatttct

SEQ ID NO: 766276 - DNA, 15 bp, Homo sapiens
tagatataatttctg

SEQ ID NO: 766277 - DNA, 15 bp, Homo sapiens
agatataatttctgc

SEQ ID NO: 766278 - DNA, 15 bp, Homo sapiens
gatataatttctgct

SEQ ID NO: 766279 - DNA, 15 bp, Homo sapiens
atataatttctgctt

SEQ ID NO: 766280 - DNA, 15 bp, Homo sapiens
tataatttctgcttt

SEQ ID NO: 766281 - DNA, 15 bp, Homo sapiens
ataatttctgctttt

SEQ ID NO: 766282 - DNA, 15 bp, Homo sapiens
taatttctgcttttg

SEQ ID NO: 766283 - DNA, 15 bp, Homo sapiens
aatttctgcttttga

SEQ ID NO: 766284 - DNA, 15 bp, Homo sapiens
atttctgcttttgaa

SEQ ID NO: 766285 - DNA, 15 bp, Homo sapiens
tttctgcttttgaat

SEQ ID NO: 766286 - DNA, 15 bp, Homo sapiens
ttctgcttttgaata

SEQ ID NO: 766287 - DNA, 15 bp, Homo sapiens
tctgcttttgaatag

SEQ ID NO: 766288 - DNA, 15 bp, Homo sapiens
ctgcttttgaatagg

SEQ ID NO: 766289 - DNA, 15 bp, Homo sapiens
tgcttttgaataggt

SEQ ID NO: 766290 - DNA, 15 bp, Homo sapiens
gcttttgaataggtt

SEQ ID NO: 766291 - DNA, 15 bp, Homo sapiens
cttttgaataggtta

SEQ ID NO: 766292 - DNA, 15 bp, Homo sapiens
ttttgaataggttat

SEQ ID NO: 766293 - DNA, 15 bp, Homo sapiens
tttgaataggttatt

SEQ ID NO: 766294 - DNA, 15 bp, Homo sapiens
ttgaataggttatta

SEQ ID NO: 766295 - DNA, 15 bp, Homo sapiens
tgaataggttattat

SEQ ID NO: 766296 - DNA, 15 bp, Homo sapiens
gaataggttattatt

SEQ ID NO: 766297 - DNA, 15 bp, Homo sapiens
aataggttattattt

SEQ ID NO: 766298 - DNA, 15 bp, Homo sapiens
ataggttattattta

SEQ ID NO: 766299 - DNA, 15 bp, Homo sapiens
taggttattatttaa

SEQ ID NO: 766300 - DNA, 15 bp, Homo sapiens
aggttattatttaaa

SEQ ID NO: 766301 - DNA, 15 bp, Homo sapiens
ggttattatttaaaa

SEQ ID NO: 766302 - DNA, 15 bp, Homo sapiens
gttattatttaaaaa

SEQ ID NO: 766303 - DNA, 15 bp, Homo sapiens
ttattatttaaaaag

SEQ ID NO: 766304 - DNA, 15 bp, Homo sapiens
tattatttaaaaaga

SEQ ID NO: 766305 - DNA, 15 bp, Homo sapiens
attatttaaaaagaa

SEQ ID NO: 766306 - DNA, 15 bp, Homo sapiens
ttatttaaaaagaaa

SEQ ID NO: 766307 - DNA, 15 bp, Homo sapiens
tatttaaaaagaaaa

SEQ ID NO: 766308 - DNA, 15 bp, Homo sapiens
atttaaaaagaaaat

SEQ ID NO: 766309 - DNA, 15 bp, Homo sapiens
tttaaaaagaaaata

SEQ ID NO: 766310 - DNA, 15 bp, Homo sapiens
ttaaaaagaaaatag

SEQ ID NO: 766311 - DNA, 15 bp, Homo sapiens
taaaaagaaaatagt

SEQ ID NO: 766312 - DNA, 15 bp, Homo sapiens
aaaaagaaaatagtg

SEQ ID NO: 766313 - DNA, 15 bp, Homo sapiens
aaaagaaaatagtgg

SEQ ID NO: 766314 - DNA, 15 bp, Homo sapiens
aaagaaaatagtggt

SEQ ID NO: 766315 - DNA, 15 bp, Homo sapiens
aagaaaatagtggtc

SEQ ID NO: 766316 - DNA, 15 bp, Homo sapiens
agaaaatagtggtca

SEQ ID NO: 766317 - DNA, 15 bp, Homo sapiens
gaaaatagtggtcaa

SEQ ID NO: 766318 - DNA, 15 bp, Homo sapiens
aaaatagtggtcaag

SEQ ID NO: 766319 - DNA, 15 bp, Homo sapiens
aaatagtggtcaagg

SEQ ID NO: 766320 - DNA, 15 bp, Homo sapiens
aatagtggtcaaggc

SEQ ID NO: 766321 - DNA, 15 bp, Homo sapiens
atagtggtcaaggca

SEQ ID NO: 766322 - DNA, 15 bp, Homo sapiens
tagtggtcaaggcaa

SEQ ID NO: 766323 - DNA, 15 bp, Homo sapiens
agtggtcaaggcaag

SEQ ID NO: 766324 - DNA, 15 bp, Homo sapiens
gtggtcaaggcaaga

SEQ ID NO: 766325 - DNA, 15 bp, Homo sapiens
tggtcaaggcaagaa

SEQ ID NO: 766326 - DNA, 15 bp, Homo sapiens
ggtcaaggcaagaaa

SEQ ID NO: 766327 - DNA, 15 bp, Homo sapiens
gtcaaggcaagaaat

SEQ ID NO: 766328 - DNA, 15 bp, Homo sapiens
tcaaggcaagaaata

SEQ ID NO: 766329 - DNA, 15 bp, Homo sapiens
caaggcaagaaatat

SEQ ID NO: 766330 - DNA, 15 bp, Homo sapiens
aaggcaagaaatatg

SEQ ID NO: 766331 - DNA, 15 bp, Homo sapiens
aggcaagaaatatgt

SEQ ID NO: 766332 - DNA, 15 bp, Homo sapiens
ggcaagaaatatgtc

SEQ ID NO: 766333 - DNA, 15 bp, Homo sapiens
gcaagaaatatgtct

SEQ ID NO: 766334 - DNA, 15 bp, Homo sapiens
caagaaatatgtctt

SEQ ID NO: 766335 - DNA, 15 bp, Homo sapiens
aagaaatatgtcttt

SEQ ID NO: 766336 - DNA, 15 bp, Homo sapiens
agaaatatgtctttg

SEQ ID NO: 766337 - DNA, 15 bp, Homo sapiens
gaaatatgtctttgc

SEQ ID NO: 766338 - DNA, 15 bp, Homo sapiens
aaatatgtctttgcc

SEQ ID NO: 766339 - DNA, 15 bp, Homo sapiens
aatatgtctttgcct

SEQ ID NO: 766340 - DNA, 15 bp, Homo sapiens
atatgtctttgccta

SEQ ID NO: 766341 - DNA, 15 bp, Homo sapiens
tatgtctttgcctat

SEQ ID NO: 766342 - DNA, 15 bp, Homo sapiens
atgtctttgcctatt

SEQ ID NO: 766343 - DNA, 15 bp, Homo sapiens
tgtctttgcctattt

SEQ ID NO: 766344 - DNA, 15 bp, Homo sapiens
gtctttgcctatttg

SEQ ID NO: 766345 - DNA, 15 bp, Homo sapiens
tctttgcctatttga

SEQ ID NO: 766346 - DNA, 15 bp, Homo sapiens
ctttgcctatttgat

SEQ ID NO: 766347 - DNA, 15 bp, Homo sapiens
tttgcctatttgata

SEQ ID NO: 766348 - DNA, 15 bp, Homo sapiens
ttgcctatttgatat

SEQ ID NO: 766349 - DNA, 15 bp, Homo sapiens
tgcctatttgatatg

SEQ ID NO: 766350 - DNA, 15 bp, Homo sapiens
gcctatttgatatgc

SEQ ID NO: 766351 - DNA, 15 bp, Homo sapiens
cctatttgatatgct

SEQ ID NO: 766352 - DNA, 15 bp, Homo sapiens
ctatttgatatgcta

SEQ ID NO: 766353 - DNA, 15 bp, Homo sapiens
tatttgatatgctag

SEQ ID NO: 766354 - DNA, 15 bp, Homo sapiens
atttgatatgctaga

SEQ ID NO: 766355 - DNA, 15 bp, Homo sapiens
tttgatatgctagaa

SEQ ID NO: 766356 - DNA, 15 bp, Homo sapiens
ttgatatgctagaat

SEQ ID NO: 766357 - DNA, 15 bp, Homo sapiens
tgatatgctagaatg

SEQ ID NO: 766358 - DNA, 15 bp, Homo sapiens
gatatgctagaatgg

SEQ ID NO: 766359 - DNA, 15 bp, Homo sapiens
atatgctagaatgga

SEQ ID NO: 766360 - DNA, 15 bp, Homo sapiens
tatgctagaatggac

SEQ ID NO: 766361 - DNA, 15 bp, Homo sapiens
atgctagaatggaca

SEQ ID NO: 766362 - DNA, 15 bp, Homo sapiens
tgctagaatggacag

SEQ ID NO: 766363 - DNA, 15 bp, Homo sapiens
gctagaatggacaga

SEQ ID NO: 766364 - DNA, 15 bp, Homo sapiens
ctagaatggacagaa

SEQ ID NO: 766365 - DNA, 15 bp, Homo sapiens
tagaatggacagaaa

SEQ ID NO: 766366 - DNA, 15 bp, Homo sapiens
agaatggacagaaat

SEQ ID NO: 766367 - DNA, 15 bp, Homo sapiens
gaatggacagaaata

SEQ ID NO: 766368 - DNA, 15 bp, Homo sapiens
aatggacagaaataa

SEQ ID NO: 766369 - DNA, 15 bp, Homo sapiens
tggacagaaataatg

SEQ ID NO: 766370 - DNA, 15 bp, Homo sapiens
ggacagaaataatgg

SEQ ID NO: 766371 - DNA, 15 bp, Homo sapiens
gacagaaataatggc

SEQ ID NO: 766372 - DNA, 15 bp, Homo sapiens
acagaaataatggca

SEQ ID NO: 766373 - DNA, 15 bp, Homo sapiens
cagaaataatggcaa

SEQ ID NO: 766374 - DNA, 15 bp, Homo sapiens
agaaataatggcaaa

SEQ ID NO: 766375 - DNA, 15 bp, Homo sapiens
gaaataatggcaaag

SEQ ID NO: 766376 - DNA, 15 bp, Homo sapiens
aaataatggcaaagt

SEQ ID NO: 766377 - DNA, 15 bp, Homo sapiens
aataatggcaaagtt

SEQ ID NO: 766378 - DNA, 15 bp, Homo sapiens
ataatggcaaagttt

SEQ ID NO: 766379 - DNA, 15 bp, Homo sapiens
taatggcaaagtttc

SEQ ID NO: 766380 - DNA, 15 bp, Homo sapiens
aatggcaaagtttca

SEQ ID NO: 766381 - DNA, 15 bp, Homo sapiens
atggcaaagtttcat

SEQ ID NO: 766382 - DNA, 15 bp, Homo sapiens
tggcaaagtttcatt

SEQ ID NO: 766383 - DNA, 15 bp, Homo sapiens
ggcaaagtttcattc

SEQ ID NO: 766384 - DNA, 15 bp, Homo sapiens
gcaaagtttcattct

SEQ ID NO: 766385 - DNA, 15 bp, Homo sapiens
caaagtttcattctt

SEQ ID NO: 766386 - DNA, 15 bp, Homo sapiens
aaagtttcattcttg

SEQ ID NO: 766387 - DNA, 15 bp, Homo sapiens
aagtttcattcttgt

SEQ ID NO: 766388 - DNA, 15 bp, Homo sapiens
agtttcattcttgtg

SEQ ID NO: 766389 - DNA, 15 bp, Homo sapiens
gtttcattcttgtgt

SEQ ID NO: 766390 - DNA, 15 bp, Homo sapiens
tttcattcttgtgta

SEQ ID NO: 766391 - DNA, 15 bp, Homo sapiens
ttcattcttgtgtat

SEQ ID NO: 766392 - DNA, 15 bp, Homo sapiens
tcattcttgtgtatg

SEQ ID NO: 766393 - DNA, 15 bp, Homo sapiens
cattcttgtgtatgt

SEQ ID NO: 766394 - DNA, 15 bp, Homo sapiens
attcttgtgtatgtg

SEQ ID NO: 766395 - DNA, 15 bp, Homo sapiens
ttcttgtgtatgtgt

SEQ ID NO: 766396 - DNA, 15 bp, Homo sapiens
tcttgtgtatgtgtg

SEQ ID NO: 766397 - DNA, 15 bp, Homo sapiens
cttgtgtatgtgtga

SEQ ID NO: 766398 - DNA, 15 bp, Homo sapiens
ttgtgtatgtgtgag

SEQ ID NO: 766399 - DNA, 15 bp, Homo sapiens
tgtgtatgtgtgaga

SEQ ID NO: 766400 - DNA, 15 bp, Homo sapiens
gtgtatgtgtgagaa

SEQ ID NO: 766401 - DNA, 15 bp, Homo sapiens
tgtatgtgtgagaat

SEQ ID NO: 766402 - DNA, 15 bp, Homo sapiens
gtatgtgtgagaatg

SEQ ID NO: 766403 - DNA, 15 bp, Homo sapiens
tatgtgtgagaatgt

SEQ ID NO: 766404 - DNA, 15 bp, Homo sapiens
atgtgtgagaatgtg

SEQ ID NO: 766405 - DNA, 15 bp, Homo sapiens
tgtgtgagaatgtgt

SEQ ID NO: 766406 - DNA, 15 bp, Homo sapiens
gtgtgagaatgtgtt

SEQ ID NO: 766407 - DNA, 15 bp, Homo sapiens
tgtgagaatgtgttt

SEQ ID NO: 766408 - DNA, 15 bp, Homo sapiens
gtgagaatgtgtttg

SEQ ID NO: 766409 - DNA, 15 bp, Homo sapiens
tgagaatgtgtttgt

SEQ ID NO: 766410 - DNA, 15 bp, Homo sapiens
gagaatgtgtttgtg

SEQ ID NO: 766411 - DNA, 15 bp, Homo sapiens
agaatgtgtttgtgt

SEQ ID NO: 766412 - DNA, 15 bp, Homo sapiens
gaatgtgtttgtgta

SEQ ID NO: 766413 - DNA, 15 bp, Homo sapiens
aatgtgtttgtgtat

SEQ ID NO: 766414 - DNA, 15 bp, Homo sapiens
atgtgtttgtgtatg

SEQ ID NO: 766415 - DNA, 15 bp, Homo sapiens
tgtgtttgtgtatgt

SEQ ID NO: 766416 - DNA, 15 bp, Homo sapiens
gtgtttgtgtatgta

SEQ ID NO: 766417 - DNA, 15 bp, Homo sapiens
tgtttgtgtatgtaa

SEQ ID NO: 766418 - DNA, 15 bp, Homo sapiens
gtttgtgtatgtaac

SEQ ID NO: 766419 - DNA, 15 bp, Homo sapiens
tttgtgtatgtaaca

SEQ ID NO: 766420 - DNA, 15 bp, Homo sapiens
ttgtgtatgtaacat

SEQ ID NO: 766421 - DNA, 15 bp, Homo sapiens
tgtgtatgtaacata

SEQ ID NO: 766422 - DNA, 15 bp, Homo sapiens
gtgtatgtaacatat

SEQ ID NO: 766423 - DNA, 15 bp, Homo sapiens
tgtatgtaacatatg

SEQ ID NO: 766424 - DNA, 15 bp, Homo sapiens
gtatgtaacatatgg

SEQ ID NO: 766425 - DNA, 15 bp, Homo sapiens
tatgtaacatatgga

SEQ ID NO: 766426 - DNA, 15 bp, Homo sapiens
atgtaacatatggaa

SEQ ID NO: 766427 - DNA, 15 bp, Homo sapiens
tgtaacatatggaat

SEQ ID NO: 766428 - DNA, 15 bp, Homo sapiens
gtaacatatggaatt

SEQ ID NO: 766429 - DNA, 15 bp, Homo sapiens
taacatatggaattt

SEQ ID NO: 766430 - DNA, 15 bp, Homo sapiens
aacatatggaatttc

SEQ ID NO: 766431 - DNA, 15 bp, Homo sapiens
acatatggaatttct

SEQ ID NO: 766432 - DNA, 15 bp, Homo sapiens
catatggaatttctg

SEQ ID NO: 766433 - DNA, 15 bp, Homo sapiens
atatggaatttctgg

SEQ ID NO: 766434 - DNA, 15 bp, Homo sapiens
tatggaatttctggc

SEQ ID NO: 766435 - DNA, 15 bp, Homo sapiens
atggaatttctggca

SEQ ID NO: 766436 - DNA, 15 bp, Homo sapiens
tggaatttctggcat

SEQ ID NO: 766437 - DNA, 15 bp, Homo sapiens
ggaatttctggcata

SEQ ID NO: 766438 - DNA, 15 bp, Homo sapiens
gaatttctggcatat

SEQ ID NO: 766439 - DNA, 15 bp, Homo sapiens
aatttctggcatata

SEQ ID NO: 766440 - DNA, 15 bp, Homo sapiens
atttctggcatatat

SEQ ID NO: 766441 - DNA, 15 bp, Homo sapiens
tttctggcatatata

SEQ ID NO: 766442 - DNA, 15 bp, Homo sapiens
ttctggcatatatat

SEQ ID NO: 766443 - DNA, 15 bp, Homo sapiens
tctggcatatatatg

SEQ ID NO: 766444 - DNA, 15 bp, Homo sapiens
ctggcatatatatgg

SEQ ID NO: 766445 - DNA, 15 bp, Homo sapiens
tggcatatatatgga

SEQ ID NO: 766446 - DNA, 15 bp, Homo sapiens
ggcatatatatggat

SEQ ID NO: 766447 - DNA, 15 bp, Homo sapiens
gcatatatatggata

SEQ ID NO: 766448 - DNA, 15 bp, Homo sapiens
catatatatggatat

SEQ ID NO: 766449 - DNA, 15 bp, Homo sapiens
atatatatggatata

SEQ ID NO: 766450 - DNA, 15 bp, Homo sapiens
tatatatggatatat

SEQ ID NO: 766451 - DNA, 15 bp, Homo sapiens
atatatggatatata

SEQ ID NO: 766452 - DNA, 15 bp, Homo sapiens
tatatggatatatat

SEQ ID NO: 766453 - DNA, 15 bp, Homo sapiens
atatggatatatatg

SEQ ID NO: 766454 - DNA, 15 bp, Homo sapiens
tatggatatatatga

SEQ ID NO: 766455 - DNA, 15 bp, Homo sapiens
atggatatatatgaa

SEQ ID NO: 766456 - DNA, 15 bp, Homo sapiens
tggatatatatgaaa

SEQ ID NO: 766457 - DNA, 15 bp, Homo sapiens
ggatatatatgaaat

SEQ ID NO: 766458 - DNA, 15 bp, Homo sapiens
gatatatatgaaatt

SEQ ID NO: 766459 - DNA, 15 bp, Homo sapiens
atatatatgaaattc

SEQ ID NO: 766460 - DNA, 15 bp, Homo sapiens
tatatatgaaattcc

SEQ ID NO: 766461 - DNA, 15 bp, Homo sapiens
atatatgaaattcct

SEQ ID NO: 766462 - DNA, 15 bp, Homo sapiens
tatatgaaattccta

SEQ ID NO: 766463 - DNA, 15 bp, Homo sapiens
atatgaaattcctac

SEQ ID NO: 766464 - DNA, 15 bp, Homo sapiens
tatgaaattcctact

SEQ ID NO: 766465 - DNA, 15 bp, Homo sapiens
atgaaattcctacta

SEQ ID NO: 766466 - DNA, 15 bp, Homo sapiens
tgaaattcctactaa

SEQ ID NO: 766467 - DNA, 15 bp, Homo sapiens
gaaattcctactaat

SEQ ID NO: 766468 - DNA, 15 bp, Homo sapiens
aaattcctactaatt

SEQ ID NO: 766469 - DNA, 15 bp, Homo sapiens
aattcctactaattt

SEQ ID NO: 766470 - DNA, 15 bp, Homo sapiens
attcctactaatttt

SEQ ID NO: 766471 - DNA, 15 bp, Homo sapiens
ttcctactaatttta

SEQ ID NO: 766472 - DNA, 15 bp, Homo sapiens
tcctactaattttag

SEQ ID NO: 766473 - DNA, 15 bp, Homo sapiens
cctactaattttaga

SEQ ID NO: 766474 - DNA, 15 bp, Homo sapiens
ctactaattttagag

SEQ ID NO: 766475 - DNA, 15 bp, Homo sapiens
tactaattttagagg

SEQ ID NO: 766476 - DNA, 15 bp, Homo sapiens
actaattttagaggt

SEQ ID NO: 766477 - DNA, 15 bp, Homo sapiens
ctaattttagaggta

SEQ ID NO: 766478 - DNA, 15 bp, Homo sapiens
taattttagaggtat

SEQ ID NO: 766479 - DNA, 15 bp, Homo sapiens
aattttagaggtata

SEQ ID NO: 766480 - DNA, 15 bp, Homo sapiens
attttagaggtatag

SEQ ID NO: 766481 - DNA, 15 bp, Homo sapiens
ttttagaggtataga

SEQ ID NO: 766482 - DNA, 15 bp, Homo sapiens
tttagaggtatagat

SEQ ID NO: 766483 - DNA, 15 bp, Homo sapiens
ttagaggtatagatc

SEQ ID NO: 766484 - DNA, 15 bp, Homo sapiens
tagaggtatagatct

SEQ ID NO: 766485 - DNA, 15 bp, Homo sapiens
agaggtatagatcta

SEQ ID NO: 766486 - DNA, 15 bp, Homo sapiens
gaggtatagatctaa

SEQ ID NO: 766487 - DNA, 15 bp, Homo sapiens
aggtatagatctaaa

SEQ ID NO: 766488 - DNA, 15 bp, Homo sapiens
ggtatagatctaaac

SEQ ID NO: 766489 - DNA, 15 bp, Homo sapiens
gtatagatctaaact

SEQ ID NO: 766490 - DNA, 15 bp, Homo sapiens
tatagatctaaactt

SEQ ID NO: 766491 - DNA, 15 bp, Homo sapiens
atagatctaaacttg

SEQ ID NO: 766492 - DNA, 15 bp, Homo sapiens
tagatctaaacttgt

SEQ ID NO: 766493 - DNA, 15 bp, Homo sapiens
agatctaaacttgtt

SEQ ID NO: 766494 - DNA, 15 bp, Homo sapiens
gatctaaacttgttc

SEQ ID NO: 766495 - DNA, 15 bp, Homo sapiens
atctaaacttgttct

SEQ ID NO: 766496 - DNA, 15 bp, Homo sapiens
tctaaacttgttctg

SEQ ID NO: 766497 - DNA, 15 bp, Homo sapiens
ctaaacttgttctgg

SEQ ID NO: 766498 - DNA, 15 bp, Homo sapiens
taaacttgttctgga

SEQ ID NO: 766499 - DNA, 15 bp, Homo sapiens
aaacttgttctggag

SEQ ID NO: 766500 - DNA, 15 bp, Homo sapiens
aacttgttctggagt

SEQ ID NO: 766501 - DNA, 15 bp, Homo sapiens
acttgttctggagtt

SEQ ID NO: 766502 - DNA, 15 bp, Homo sapiens
cttgttctggagttg

SEQ ID NO: 766503 - DNA, 15 bp, Homo sapiens
ttgttctggagttga

SEQ ID NO: 766504 - DNA, 15 bp, Homo sapiens
tgttctggagttgag

SEQ ID NO: 766505 - DNA, 15 bp, Homo sapiens
gttctggagttgaga

SEQ ID NO: 766506 - DNA, 15 bp, Homo sapiens
ttctggagttgagaa

SEQ ID NO: 766507 - DNA, 15 bp, Homo sapiens
tctggagttgagaat

SEQ ID NO: 766508 - DNA, 15 bp, Homo sapiens
ctggagttgagaatt

SEQ ID NO: 766509 - DNA, 15 bp, Homo sapiens
tggagttgagaatta

SEQ ID NO: 766510 - DNA, 15 bp, Homo sapiens
ggagttgagaattat

SEQ ID NO: 766511 - DNA, 15 bp, Homo sapiens
gagttgagaattatg

SEQ ID NO: 766512 - DNA, 15 bp, Homo sapiens
agttgagaattatgt

SEQ ID NO: 766513 - DNA, 15 bp, Homo sapiens
gttgagaattatgtc

SEQ ID NO: 766514 - DNA, 15 bp, Homo sapiens
ttgagaattatgtca

SEQ ID NO: 766515 - DNA, 15 bp, Homo sapiens
tgagaattatgtcat

SEQ ID NO: 766516 - DNA, 15 bp, Homo sapiens
gagaattatgtcatc

SEQ ID NO: 766517 - DNA, 15 bp, Homo sapiens
agaattatgtcatcc

SEQ ID NO: 766518 - DNA, 15 bp, Homo sapiens
gaattatgtcatccc

SEQ ID NO: 766519 - DNA, 15 bp, Homo sapiens
aattatgtcatccct

SEQ ID NO: 766520 - DNA, 15 bp, Homo sapiens
attatgtcatccctc

SEQ ID NO: 766521 - DNA, 15 bp, Homo sapiens
ttatgtcatccctca

SEQ ID NO: 766522 - DNA, 15 bp, Homo sapiens
tatgtcatccctcag

SEQ ID NO: 766523 - DNA, 15 bp, Homo sapiens
atgtcatccctcaga

SEQ ID NO: 766524 - DNA, 15 bp, Homo sapiens
tgtcatccctcagag

SEQ ID NO: 766525 - DNA, 15 bp, Homo sapiens
gtcatccctcagaga

SEQ ID NO: 766526 - DNA, 15 bp, Homo sapiens
tcatccctcagagac

SEQ ID NO: 766527 - DNA, 15 bp, Homo sapiens
catccctcagagact

SEQ ID NO: 766528 - DNA, 15 bp, Homo sapiens
atccctcagagacta

SEQ ID NO: 766529 - DNA, 15 bp, Homo sapiens
tccctcagagactat

SEQ ID NO: 766530 - DNA, 15 bp, Homo sapiens
ccctcagagactata

SEQ ID NO: 766531 - DNA, 15 bp, Homo sapiens
cctcagagactatat

SEQ ID NO: 766532 - DNA, 15 bp, Homo sapiens
ctcagagactatatt

SEQ ID NO: 766533 - DNA, 15 bp, Homo sapiens
tcagagactatattt

SEQ ID NO: 766534 - DNA, 15 bp, Homo sapiens
cagagactatatttc

SEQ ID NO: 766535 - DNA, 15 bp, Homo sapiens
agagactatatttca

SEQ ID NO: 766536 - DNA, 15 bp, Homo sapiens
gagactatatttcac

SEQ ID NO: 766537 - DNA, 15 bp, Homo sapiens
agactatatttcaca

SEQ ID NO: 766538 - DNA, 15 bp, Homo sapiens
gactatatttcacag

SEQ ID NO: 766539 - DNA, 15 bp, Homo sapiens
actatatttcacaga

SEQ ID NO: 766540 - DNA, 15 bp, Homo sapiens
ctatatttcacagaa

SEQ ID NO: 766541 - DNA, 15 bp, Homo sapiens
tatatttcacagaaa

SEQ ID NO: 766542 - DNA, 15 bp, Homo sapiens
atatttcacagaaat

SEQ ID NO: 766543 - DNA, 15 bp, Homo sapiens
tatttcacagaaata

SEQ ID NO: 766544 - DNA, 15 bp, Homo sapiens
atttcacagaaatac

SEQ ID NO: 766545 - DNA, 15 bp, Homo sapiens
tttcacagaaatact

SEQ ID NO: 766546 - DNA, 15 bp, Homo sapiens
ttcacagaaatactg

SEQ ID NO: 766547 - DNA, 15 bp, Homo sapiens
tcacagaaatactgc

SEQ ID NO: 766548 - DNA, 15 bp, Homo sapiens
cacagaaatactgct

SEQ ID NO: 766549 - DNA, 15 bp, Homo sapiens
acagaaatactgctt

SEQ ID NO: 766550 - DNA, 15 bp, Homo sapiens
cagaaatactgcttc

SEQ ID NO: 766551 - DNA, 15 bp, Homo sapiens
agaaatactgcttct

SEQ ID NO: 766552 - DNA, 15 bp, Homo sapiens
gaaatactgcttctg

SEQ ID NO: 766553 - DNA, 15 bp, Homo sapiens
aaatactgcttctgg

SEQ ID NO: 766554 - DNA, 15 bp, Homo sapiens
aatactgcttctggt

SEQ ID NO: 766555 - DNA, 15 bp, Homo sapiens
atactgcttctggtc

SEQ ID NO: 766556 - DNA, 15 bp, Homo sapiens
tactgcttctggtca

SEQ ID NO: 766557 - DNA, 15 bp, Homo sapiens
actgcttctggtcag

SEQ ID NO: 766558 - DNA, 15 bp, Homo sapiens
ctgcttctggtcaga

SEQ ID NO: 766559 - DNA, 15 bp, Homo sapiens
tgcttctggtcagaa

SEQ ID NO: 766560 - DNA, 15 bp, Homo sapiens
gcttctggtcagaag

SEQ ID NO: 766561 - DNA, 15 bp, Homo sapiens
cttctggtcagaagt

SEQ ID NO: 766562 - DNA, 15 bp, Homo sapiens
ttctggtcagaagta

SEQ ID NO: 766563 - DNA, 15 bp, Homo sapiens
tctggtcagaagtac

SEQ ID NO: 766564 - DNA, 15 bp, Homo sapiens
ctggtcagaagtact

SEQ ID NO: 766565 - DNA, 15 bp, Homo sapiens
tggtcagaagtactg

SEQ ID NO: 766566 - DNA, 15 bp, Homo sapiens
ggtcagaagtactgt

SEQ ID NO: 766567 - DNA, 15 bp, Homo sapiens
gtcagaagtactgtg

SEQ ID NO: 766568 - DNA, 15 bp, Homo sapiens
tcagaagtactgtgg

SEQ ID NO: 766569 - DNA, 15 bp, Homo sapiens
cagaagtactgtgga

SEQ ID NO: 766570 - DNA, 15 bp, Homo sapiens
agaagtactgtggat

SEQ ID NO: 766571 - DNA, 15 bp, Homo sapiens
gaagtactgtggatc

SEQ ID NO: 766572 - DNA, 15 bp, Homo sapiens
aagtactgtggatct

SEQ ID NO: 766573 - DNA, 15 bp, Homo sapiens
agtactgtggatctt

SEQ ID NO: 766574 - DNA, 15 bp, Homo sapiens
gtactgtggatctta

SEQ ID NO: 766575 - DNA, 15 bp, Homo sapiens
tactgtggatcttaa

SEQ ID NO: 766576 - DNA, 15 bp, Homo sapiens
actgtggatcttaat

SEQ ID NO: 766577 - DNA, 15 bp, Homo sapiens
ctgtggatcttaata

SEQ ID NO: 766578 - DNA, 15 bp, Homo sapiens
tgtggatcttaatat

SEQ ID NO: 766579 - DNA, 15 bp, Homo sapiens
gtggatcttaatatt

SEQ ID NO: 766580 - DNA, 15 bp, Homo sapiens
tggatcttaatatta

SEQ ID NO: 766581 - DNA, 15 bp, Homo sapiens
ggatcttaatattaa

SEQ ID NO: 766582 - DNA, 15 bp, Homo sapiens
gatcttaatattaaa

SEQ ID NO: 766583 - DNA, 15 bp, Homo sapiens
atcttaatattaaat

SEQ ID NO: 766584 - DNA, 15 bp, Homo sapiens
tcttaatattaaatc

SEQ ID NO: 766585 - DNA, 15 bp, Homo sapiens
cttaatattaaatca

SEQ ID NO: 766586 - DNA, 15 bp, Homo sapiens
ttaatattaaatcag

SEQ ID NO: 766587 - DNA, 15 bp, Homo sapiens
taatattaaatcaga

SEQ ID NO: 766588 - DNA, 15 bp, Homo sapiens
aatattaaatcagat

SEQ ID NO: 766589 - DNA, 15 bp, Homo sapiens
atattaaatcagatt

SEQ ID NO: 766590 - DNA, 15 bp, Homo sapiens
tattaaatcagattc

SEQ ID NO: 766591 - DNA, 15 bp, Homo sapiens
attaaatcagattct

SEQ ID NO: 766592 - DNA, 15 bp, Homo sapiens
ttaaatcagattctt

SEQ ID NO: 766593 - DNA, 15 bp, Homo sapiens
taaatcagattcttg

SEQ ID NO: 766594 - DNA, 15 bp, Homo sapiens
aaatcagattcttgg

SEQ ID NO: 766595 - DNA, 15 bp, Homo sapiens
aatcagattcttggc

SEQ ID NO: 766596 - DNA, 15 bp, Homo sapiens
atcagattcttggcc

SEQ ID NO: 766597 - DNA, 15 bp, Homo sapiens
tcagattcttggcca

SEQ ID NO: 766598 - DNA, 15 bp, Homo sapiens
cagattcttggccag

SEQ ID NO: 766599 - DNA, 15 bp, Homo sapiens
agattcttggccagg

SEQ ID NO: 766600 - DNA, 15 bp, Homo sapiens
gattcttggccaggc

SEQ ID NO: 766601 - DNA, 15 bp, Homo sapiens
attcttggccaggca

SEQ ID NO: 766602 - DNA, 15 bp, Homo sapiens
ttcttggccaggcac

SEQ ID NO: 766603 - DNA, 15 bp, Homo sapiens
tcttggccaggcacg

SEQ ID NO: 766604 - DNA, 15 bp, Homo sapiens
cttggccaggcacgg

SEQ ID NO: 766605 - DNA, 15 bp, Homo sapiens
ttggccaggcacggt

SEQ ID NO: 766606 - DNA, 15 bp, Homo sapiens
tggccaggcacggtg

SEQ ID NO: 766607 - DNA, 15 bp, Homo sapiens
ggccaggcacggtgg

SEQ ID NO: 766608 - DNA, 15 bp, Homo sapiens
gccaggcacggtggc

SEQ ID NO: 766609 - DNA, 15 bp, Homo sapiens
ccaggcacggtggct

SEQ ID NO: 766610 - DNA, 15 bp, Homo sapiens
caggcacggtggctt

SEQ ID NO: 766611 - DNA, 15 bp, Homo sapiens
aggcacggtggcttt

SEQ ID NO: 766612 - DNA, 15 bp, Homo sapiens
ggcacggtggctttt

SEQ ID NO: 766613 - DNA, 15 bp, Homo sapiens
gcacggtggcttttg

SEQ ID NO: 766614 - DNA, 15 bp, Homo sapiens
cacggtggcttttgc

SEQ ID NO: 766615 - DNA, 15 bp, Homo sapiens
acggtggcttttgcc

SEQ ID NO: 766616 - DNA, 15 bp, Homo sapiens
cggtggcttttgcct

SEQ ID NO: 766617 - DNA, 15 bp, Homo sapiens
ggtggcttttgcctg

SEQ ID NO: 766618 - DNA, 15 bp, Homo sapiens
gtggcttttgcctgt

SEQ ID NO: 766619 - DNA, 15 bp, Homo sapiens
tggcttttgcctgta

SEQ ID NO: 766620 - DNA, 15 bp, Homo sapiens
ggcttttgcctgtaa

SEQ ID NO: 766621 - DNA, 15 bp, Homo sapiens
gcttttgcctgtaat

SEQ ID NO: 766622 - DNA, 15 bp, Homo sapiens
cttttgcctgtaatc

SEQ ID NO: 766623 - DNA, 15 bp, Homo sapiens
ttttgcctgtaatcc

SEQ ID NO: 766624 - DNA, 15 bp, Homo sapiens
tttgcctgtaatccc

SEQ ID NO: 766625 - DNA, 15 bp, Homo sapiens
ttgcctgtaatccca

SEQ ID NO: 766626 - DNA, 15 bp, Homo sapiens
ctttgggaggccaaa

SEQ ID NO: 766627 - DNA, 15 bp, Homo sapiens
tttgggaggccaaag

SEQ ID NO: 766628 - DNA, 15 bp, Homo sapiens
ttgggaggccaaagt

SEQ ID NO: 766629 - DNA, 15 bp, Homo sapiens
tgggaggccaaagtg

SEQ ID NO: 766630 - DNA, 15 bp, Homo sapiens
gggaggccaaagtgg

SEQ ID NO: 766631 - DNA, 15 bp, Homo sapiens
ggaggccaaagtggg

SEQ ID NO: 766632 - DNA, 15 bp, Homo sapiens
gaggccaaagtggga

SEQ ID NO: 766633 - DNA, 15 bp, Homo sapiens
aggccaaagtgggag

SEQ ID NO: 766634 - DNA, 15 bp, Homo sapiens
ggccaaagtgggaga

SEQ ID NO: 766635 - DNA, 15 bp, Homo sapiens
gccaaagtgggagaa

SEQ ID NO: 766636 - DNA, 15 bp, Homo sapiens
ccaaagtgggagaat

SEQ ID NO: 766637 - DNA, 15 bp, Homo sapiens
caaagtgggagaatc

SEQ ID NO: 766638 - DNA, 15 bp, Homo sapiens
aaagtgggagaatca

SEQ ID NO: 766639 - DNA, 15 bp, Homo sapiens
aagtgggagaatcac

SEQ ID NO: 766640 - DNA, 15 bp, Homo sapiens
agtgggagaatcact

SEQ ID NO: 766641 - DNA, 15 bp, Homo sapiens
gtgggagaatcactt

SEQ ID NO: 766642 - DNA, 15 bp, Homo sapiens
tgggagaatcacttg

SEQ ID NO: 766643 - DNA, 15 bp, Homo sapiens
gggagaatcacttga

SEQ ID NO: 766644 - DNA, 15 bp, Homo sapiens
ggagaatcacttgag

SEQ ID NO: 766645 - DNA, 15 bp, Homo sapiens
gagaatcacttgagc

SEQ ID NO: 766646 - DNA, 15 bp, Homo sapiens
agaatcacttgagcc

SEQ ID NO: 766647 - DNA, 15 bp, Homo sapiens
gaatcacttgagccc

SEQ ID NO: 766648 - DNA, 15 bp, Homo sapiens
aatcacttgagccca

SEQ ID NO: 766649 - DNA, 15 bp, Homo sapiens
atcacttgagcccag

SEQ ID NO: 766650 - DNA, 15 bp, Homo sapiens
tcacttgagcccagg

SEQ ID NO: 766651 - DNA, 15 bp, Homo sapiens
cacttgagcccagga

SEQ ID NO: 766652 - DNA, 15 bp, Homo sapiens
acttgagcccaggaa

SEQ ID NO: 766653 - DNA, 15 bp, Homo sapiens
cttgagcccaggaat

SEQ ID NO: 766654 - DNA, 15 bp, Homo sapiens
ttgagcccaggaatt

SEQ ID NO: 766655 - DNA, 15 bp, Homo sapiens
tgagcccaggaattc

SEQ ID NO: 766656 - DNA, 15 bp, Homo sapiens
gagcccaggaattca

SEQ ID NO: 766657 - DNA, 15 bp, Homo sapiens
agcccaggaattcaa

SEQ ID NO: 766658 - DNA, 15 bp, Homo sapiens
gcccaggaattcaag

SEQ ID NO: 766659 - DNA, 15 bp, Homo sapiens
cccaggaattcaaga

SEQ ID NO: 766660 - DNA, 15 bp, Homo sapiens
ccaggaattcaagac

SEQ ID NO: 766661 - DNA, 15 bp, Homo sapiens
caggaattcaagacc

SEQ ID NO: 766662 - DNA, 15 bp, Homo sapiens
aggaattcaagacca

SEQ ID NO: 766663 - DNA, 15 bp, Homo sapiens
ggaattcaagaccag

SEQ ID NO: 766664 - DNA, 15 bp, Homo sapiens
gaattcaagaccagc

SEQ ID NO: 766665 - DNA, 15 bp, Homo sapiens
aattcaagaccagcc

SEQ ID NO: 766666 - DNA, 15 bp, Homo sapiens
attcaagaccagcct

SEQ ID NO: 766667 - DNA, 15 bp, Homo sapiens
ttcaagaccagcctt

SEQ ID NO: 766668 - DNA, 15 bp, Homo sapiens
tcaagaccagccttt

SEQ ID NO: 766669 - DNA, 15 bp, Homo sapiens
caagaccagcctttg

SEQ ID NO: 766670 - DNA, 15 bp, Homo sapiens
aagaccagcctttgc

SEQ ID NO: 766671 - DNA, 15 bp, Homo sapiens
agaccagcctttgct

SEQ ID NO: 766672 - DNA, 15 bp, Homo sapiens
gaccagcctttgcta

SEQ ID NO: 766673 - DNA, 15 bp, Homo sapiens
accagcctttgctac

SEQ ID NO: 766674 - DNA, 15 bp, Homo sapiens
ccagcctttgctact

SEQ ID NO: 766675 - DNA, 15 bp, Homo sapiens
cagcctttgctactt

SEQ ID NO: 766676 - DNA, 15 bp, Homo sapiens
agcctttgctactta

SEQ ID NO: 766677 - DNA, 15 bp, Homo sapiens
gcctttgctacttag

SEQ ID NO: 766678 - DNA, 15 bp, Homo sapiens
cctttgctacttagt

SEQ ID NO: 766679 - DNA, 15 bp, Homo sapiens
ctttgctacttagta

SEQ ID NO: 766680 - DNA, 15 bp, Homo sapiens
tttgctacttagtaa

SEQ ID NO: 766681 - DNA, 15 bp, Homo sapiens
ttgctacttagtaag

SEQ ID NO: 766682 - DNA, 15 bp, Homo sapiens
tgctacttagtaaga

SEQ ID NO: 766683 - DNA, 15 bp, Homo sapiens
gctacttagtaagac

SEQ ID NO: 766684 - DNA, 15 bp, Homo sapiens
ctacttagtaagact

SEQ ID NO: 766685 - DNA, 15 bp, Homo sapiens
tacttagtaagactt

SEQ ID NO: 766686 - DNA, 15 bp, Homo sapiens
acttagtaagacttc

SEQ ID NO: 766687 - DNA, 15 bp, Homo sapiens
cttagtaagacttca

SEQ ID NO: 766688 - DNA, 15 bp, Homo sapiens
ttagtaagacttcat

SEQ ID NO: 766689 - DNA, 15 bp, Homo sapiens
tagtaagacttcatc

SEQ ID NO: 766690 - DNA, 15 bp, Homo sapiens
agtaagacttcatct

SEQ ID NO: 766691 - DNA, 15 bp, Homo sapiens
gtaagacttcatctc

SEQ ID NO: 766692 - DNA, 15 bp, Homo sapiens
taagacttcatctct

SEQ ID NO: 766693 - DNA, 15 bp, Homo sapiens
aagacttcatctctg

SEQ ID NO: 766694 - DNA, 15 bp, Homo sapiens
agacttcatctctgc

SEQ ID NO: 766695 - DNA, 15 bp, Homo sapiens
gacttcatctctgca

SEQ ID NO: 766696 - DNA, 15 bp, Homo sapiens
acttcatctctgcaa

SEQ ID NO: 766697 - DNA, 15 bp, Homo sapiens
cttcatctctgcaaa

SEQ ID NO: 766698 - DNA, 15 bp, Homo sapiens
ttcatctctgcaaaa

SEQ ID NO: 766699 - DNA, 15 bp, Homo sapiens
tcatctctgcaaaaa

SEQ ID NO: 766700 - DNA, 15 bp, Homo sapiens
catctctgcaaaaaa

SEQ ID NO: 766701 - DNA, 15 bp, Homo sapiens
atctctgcaaaaaaa

SEQ ID NO: 766702 - DNA, 15 bp, Homo sapiens
tctctgcaaaaaaaa

SEQ ID NO: 766703 - DNA, 15 bp, Homo sapiens
ctctgcaaaaaaaaa

SEQ ID NO: 766704 - DNA, 15 bp, Homo sapiens
tctgcaaaaaaaaaa

SEQ ID NO: 766705 - DNA, 15 bp, Homo sapiens
ctgcaaaaaaaaaaa

SEQ ID NO: 766706 - DNA, 15 bp, Homo sapiens
tgcaaaaaaaaaaaa

SEQ ID NO: 766707 - DNA, 15 bp, Homo sapiens
aaaaaaaaaaaatta

SEQ ID NO: 766708 - DNA, 15 bp, Homo sapiens
aaaaaaaaaaattag

SEQ ID NO: 766709 - DNA, 15 bp, Homo sapiens
aaaaaaaaaattagc

SEQ ID NO: 766710 - DNA, 15 bp, Homo sapiens
aaaaaaaaattagct

SEQ ID NO: 766711 - DNA, 15 bp, Homo sapiens
aaaaaaaattagcta

SEQ ID NO: 766712 - DNA, 15 bp, Homo sapiens
aaaaaaattagctac

SEQ ID NO: 766713 - DNA, 15 bp, Homo sapiens
aaaaaattagctacg

SEQ ID NO: 766714 - DNA, 15 bp, Homo sapiens
aaaaattagctacgt

SEQ ID NO: 766715 - DNA, 15 bp, Homo sapiens
aaaattagctacgtg

SEQ ID NO: 766716 - DNA, 15 bp, Homo sapiens
aaattagctacgtgt

SEQ ID NO: 766717 - DNA, 15 bp, Homo sapiens
aattagctacgtgtg

SEQ ID NO: 766718 - DNA, 15 bp, Homo sapiens
attagctacgtgtgg

SEQ ID NO: 766719 - DNA, 15 bp, Homo sapiens
ttagctacgtgtggt

SEQ ID NO: 766720 - DNA, 15 bp, Homo sapiens
tagctacgtgtggta

SEQ ID NO: 766721 - DNA, 15 bp, Homo sapiens
agctacgtgtggtaa

SEQ ID NO: 766722 - DNA, 15 bp, Homo sapiens
gctacgtgtggtaat

SEQ ID NO: 766723 - DNA, 15 bp, Homo sapiens
ctacgtgtggtaatg

SEQ ID NO: 766724 - DNA, 15 bp, Homo sapiens
tacgtgtggtaatgt

SEQ ID NO: 766725 - DNA, 15 bp, Homo sapiens
acgtgtggtaatgtg

SEQ ID NO: 766726 - DNA, 15 bp, Homo sapiens
cgtgtggtaatgtgt

SEQ ID NO: 766727 - DNA, 15 bp, Homo sapiens
gtgtggtaatgtgtg

SEQ ID NO: 766728 - DNA, 15 bp, Homo sapiens
tgtggtaatgtgtgc

SEQ ID NO: 766729 - DNA, 15 bp, Homo sapiens
gtggtaatgtgtgcc

SEQ ID NO: 766730 - DNA, 15 bp, Homo sapiens
tggtaatgtgtgcct

SEQ ID NO: 766731 - DNA, 15 bp, Homo sapiens
ggtaatgtgtgcctg

SEQ ID NO: 766732 - DNA, 15 bp, Homo sapiens
gtaatgtgtgcctgt

SEQ ID NO: 766733 - DNA, 15 bp, Homo sapiens
taatgtgtgcctgta

SEQ ID NO: 766734 - DNA, 15 bp, Homo sapiens
aatgtgtgcctgtag

SEQ ID NO: 766735 - DNA, 15 bp, Homo sapiens
atgtgtgcctgtagt

SEQ ID NO: 766736 - DNA, 15 bp, Homo sapiens
tgtgtgcctgtagtc

SEQ ID NO: 766737 - DNA, 15 bp, Homo sapiens
gtgtgcctgtagtcc

SEQ ID NO: 766738 - DNA, 15 bp, Homo sapiens
tgtgcctgtagtcct

SEQ ID NO: 766739 - DNA, 15 bp, Homo sapiens
gtgcctgtagtccta

SEQ ID NO: 766740 - DNA, 15 bp, Homo sapiens
tgcctgtagtcctag

SEQ ID NO: 766741 - DNA, 15 bp, Homo sapiens
gcctgtagtcctagc

SEQ ID NO: 766742 - DNA, 15 bp, Homo sapiens
ctgtagtcctagcta

SEQ ID NO: 766743 - DNA, 15 bp, Homo sapiens
tgtagtcctagctat

SEQ ID NO: 766744 - DNA, 15 bp, Homo sapiens
gtagtcctagctatt

SEQ ID NO: 766745 - DNA, 15 bp, Homo sapiens
tagtcctagctattt

SEQ ID NO: 766746 - DNA, 15 bp, Homo sapiens
agtcctagctatttg

SEQ ID NO: 766747 - DNA, 15 bp, Homo sapiens
gtcctagctatttgg

SEQ ID NO: 766748 - DNA, 15 bp, Homo sapiens
tcctagctatttggg

SEQ ID NO: 766749 - DNA, 15 bp, Homo sapiens
cctagctatttggga

SEQ ID NO: 766750 - DNA, 15 bp, Homo sapiens
ctagctatttgggag

SEQ ID NO: 766751 - DNA, 15 bp, Homo sapiens
tagctatttgggagg

SEQ ID NO: 766752 - DNA, 15 bp, Homo sapiens
agctatttgggaggc

SEQ ID NO: 766753 - DNA, 15 bp, Homo sapiens
gctatttgggaggct

SEQ ID NO: 766754 - DNA, 15 bp, Homo sapiens
ctatttgggaggctg

SEQ ID NO: 766755 - DNA, 15 bp, Homo sapiens
tatttgggaggctga

SEQ ID NO: 766756 - DNA, 15 bp, Homo sapiens
atttgggaggctgag

SEQ ID NO: 766757 - DNA, 15 bp, Homo sapiens
gaggtgggaggatcg

SEQ ID NO: 766758 - DNA, 15 bp, Homo sapiens
aggtgggaggatcgc

SEQ ID NO: 766759 - DNA, 15 bp, Homo sapiens
ggtgggaggatcgct

SEQ ID NO: 766760 - DNA, 15 bp, Homo sapiens
gtgggaggatcgctt

SEQ ID NO: 766761 - DNA, 15 bp, Homo sapiens
tgggaggatcgcttg

SEQ ID NO: 766762 - DNA, 15 bp, Homo sapiens
gggaggatcgcttga

SEQ ID NO: 766763 - DNA, 15 bp, Homo sapiens
ggaggatcgcttgat

SEQ ID NO: 766764 - DNA, 15 bp, Homo sapiens
gaggatcgcttgatc

SEQ ID NO: 766765 - DNA, 15 bp, Homo sapiens
aggatcgcttgatct

SEQ ID NO: 766766 - DNA, 15 bp, Homo sapiens
ggatcgcttgatctc

SEQ ID NO: 766767 - DNA, 15 bp, Homo sapiens
gatcgcttgatctca

SEQ ID NO: 766768 - DNA, 15 bp, Homo sapiens
atcgcttgatctcag

SEQ ID NO: 766769 - DNA, 15 bp, Homo sapiens
tcgcttgatctcagg

SEQ ID NO: 766770 - DNA, 15 bp, Homo sapiens
cgcttgatctcagga

SEQ ID NO: 766771 - DNA, 15 bp, Homo sapiens
gcttgatctcaggag

SEQ ID NO: 766772 - DNA, 15 bp, Homo sapiens
cttgatctcaggagg

SEQ ID NO: 766773 - DNA, 15 bp, Homo sapiens
ttgatctcaggaggt

SEQ ID NO: 766774 - DNA, 15 bp, Homo sapiens
tgatctcaggaggtt

SEQ ID NO: 766775 - DNA, 15 bp, Homo sapiens
gatctcaggaggttg

SEQ ID NO: 766776 - DNA, 15 bp, Homo sapiens
atctcaggaggttga

SEQ ID NO: 766777 - DNA, 15 bp, Homo sapiens
tctcaggaggttgag

SEQ ID NO: 766778 - DNA, 15 bp, Homo sapiens
ctcaggaggttgagg

SEQ ID NO: 766779 - DNA, 15 bp, Homo sapiens
tcaggaggttgaggc

SEQ ID NO: 766780 - DNA, 15 bp, Homo sapiens
caggaggttgaggct

SEQ ID NO: 766781 - DNA, 15 bp, Homo sapiens
aggaggttgaggctg

SEQ ID NO: 766782 - DNA, 15 bp, Homo sapiens
ggaggttgaggctgc

SEQ ID NO: 766783 - DNA, 15 bp, Homo sapiens
gaggttgaggctgca

SEQ ID NO: 766784 - DNA, 15 bp, Homo sapiens
aggttgaggctgcag

SEQ ID NO: 766785 - DNA, 15 bp, Homo sapiens
ggttgaggctgcagt

SEQ ID NO: 766786 - DNA, 15 bp, Homo sapiens
gttgaggctgcagtg

SEQ ID NO: 766787 - DNA, 15 bp, Homo sapiens
ttgaggctgcagtga

SEQ ID NO: 766788 - DNA, 15 bp, Homo sapiens
tgaggctgcagtgaa

SEQ ID NO: 766789 - DNA, 15 bp, Homo sapiens
gaggctgcagtgaac

SEQ ID NO: 766790 - DNA, 15 bp, Homo sapiens
aggctgcagtgaacc

SEQ ID NO: 766791 - DNA, 15 bp, Homo sapiens
ggctgcagtgaacca

SEQ ID NO: 766792 - DNA, 15 bp, Homo sapiens
gctgcagtgaaccaa

SEQ ID NO: 766793 - DNA, 15 bp, Homo sapiens
ctgcagtgaaccaag

SEQ ID NO: 766794 - DNA, 15 bp, Homo sapiens
tgcagtgaaccaaga

SEQ ID NO: 766795 - DNA, 15 bp, Homo sapiens
gcagtgaaccaagat

SEQ ID NO: 766796 - DNA, 15 bp, Homo sapiens
cagtgaaccaagatc

SEQ ID NO: 766797 - DNA, 15 bp, Homo sapiens
agtgaaccaagatcg

SEQ ID NO: 766798 - DNA, 15 bp, Homo sapiens
gtgaaccaagatcgc

SEQ ID NO: 766799 - DNA, 15 bp, Homo sapiens
tgaaccaagatcgca

SEQ ID NO: 766800 - DNA, 15 bp, Homo sapiens
gaaccaagatcgcac

SEQ ID NO: 766801 - DNA, 15 bp, Homo sapiens
aaccaagatcgcact

SEQ ID NO: 766802 - DNA, 15 bp, Homo sapiens
accaagatcgcacta

SEQ ID NO: 766803 - DNA, 15 bp, Homo sapiens
ccaagatcgcactac

SEQ ID NO: 766804 - DNA, 15 bp, Homo sapiens
caagatcgcactacc

SEQ ID NO: 766805 - DNA, 15 bp, Homo sapiens
aagatcgcactaccc

SEQ ID NO: 766806 - DNA, 15 bp, Homo sapiens
agatcgcactacccc

SEQ ID NO: 766807 - DNA, 15 bp, Homo sapiens
gatcgcactacccca

SEQ ID NO: 766808 - DNA, 15 bp, Homo sapiens
atcgcactaccccac

SEQ ID NO: 766809 - DNA, 15 bp, Homo sapiens
tcgcactaccccact

SEQ ID NO: 766810 - DNA, 15 bp, Homo sapiens
cgcactaccccactt

SEQ ID NO: 766811 - DNA, 15 bp, Homo sapiens
gcactaccccacttc

SEQ ID NO: 766812 - DNA, 15 bp, Homo sapiens
cactaccccacttca

SEQ ID NO: 766813 - DNA, 15 bp, Homo sapiens
actaccccacttcac

SEQ ID NO: 766814 - DNA, 15 bp, Homo sapiens
ctaccccacttcacc

SEQ ID NO: 766815 - DNA, 15 bp, Homo sapiens
taccccacttcaccc

SEQ ID NO: 766816 - DNA, 15 bp, Homo sapiens
accccacttcaccct

SEQ ID NO: 766817 - DNA, 15 bp, Homo sapiens
ccccacttcaccctg

SEQ ID NO: 766818 - DNA, 15 bp, Homo sapiens
cccacttcaccctgg

SEQ ID NO: 766819 - DNA, 15 bp, Homo sapiens
ccacttcaccctggg

SEQ ID NO: 766820 - DNA, 15 bp, Homo sapiens
cacttcaccctgggc

SEQ ID NO: 766821 - DNA, 15 bp, Homo sapiens
acttcaccctgggca

SEQ ID NO: 766822 - DNA, 15 bp, Homo sapiens
cttcaccctgggcaa

SEQ ID NO: 766823 - DNA, 15 bp, Homo sapiens
ttcaccctgggcaac

SEQ ID NO: 766824 - DNA, 15 bp, Homo sapiens
tcaccctgggcaaca

SEQ ID NO: 766825 - DNA, 15 bp, Homo sapiens
caccctgggcaacag

SEQ ID NO: 766826 - DNA, 15 bp, Homo sapiens
accctgggcaacaga

SEQ ID NO: 766827 - DNA, 15 bp, Homo sapiens
ccctgggcaacagag

SEQ ID NO: 766828 - DNA, 15 bp, Homo sapiens
cctgggcaacagagc

SEQ ID NO: 766829 - DNA, 15 bp, Homo sapiens
ctgggcaacagagca

SEQ ID NO: 766830 - DNA, 15 bp, Homo sapiens
tgggcaacagagcaa

SEQ ID NO: 766831 - DNA, 15 bp, Homo sapiens
gggcaacagagcaag

SEQ ID NO: 766832 - DNA, 15 bp, Homo sapiens
ggcaacagagcaaga

SEQ ID NO: 766833 - DNA, 15 bp, Homo sapiens
gcaacagagcaagac

SEQ ID NO: 766834 - DNA, 15 bp, Homo sapiens
caacagagcaagacc

SEQ ID NO: 766835 - DNA, 15 bp, Homo sapiens
aacagagcaagaccc

SEQ ID NO: 766836 - DNA, 15 bp, Homo sapiens
acagagcaagaccct

SEQ ID NO: 766837 - DNA, 15 bp, Homo sapiens
cagagcaagaccctg

SEQ ID NO: 766838 - DNA, 15 bp, Homo sapiens
agagcaagaccctgt

SEQ ID NO: 766839 - DNA, 15 bp, Homo sapiens
gagcaagaccctgtc

SEQ ID NO: 766840 - DNA, 15 bp, Homo sapiens
caagaccctgtctca

SEQ ID NO: 766841 - DNA, 15 bp, Homo sapiens
aagaccctgtctcaa

SEQ ID NO: 766842 - DNA, 15 bp, Homo sapiens
agaccctgtctcaaa

SEQ ID NO: 766843 - DNA, 15 bp, Homo sapiens
gaccctgtctcaaaa

SEQ ID NO: 766844 - DNA, 15 bp, Homo sapiens
accctgtctcaaaaa

SEQ ID NO: 766845 - DNA, 15 bp, Homo sapiens
ccctgtctcaaaaaa

SEQ ID NO: 766846 - DNA, 15 bp, Homo sapiens
cctgtctcaaaaaat

SEQ ID NO: 766847 - DNA, 15 bp, Homo sapiens
ctgtctcaaaaaatc

SEQ ID NO: 766848 - DNA, 15 bp, Homo sapiens
tgtctcaaaaaatca

SEQ ID NO: 766849 - DNA, 15 bp, Homo sapiens
gtctcaaaaaatcaa

SEQ ID NO: 766850 - DNA, 15 bp, Homo sapiens
tctcaaaaaatcaaa

SEQ ID NO: 766851 - DNA, 15 bp, Homo sapiens
ctcaaaaaatcaaat

SEQ ID NO: 766852 - DNA, 15 bp, Homo sapiens
tcaaaaaatcaaatt

SEQ ID NO: 766853 - DNA, 15 bp, Homo sapiens
caaaaaatcaaattc

SEQ ID NO: 766854 - DNA, 15 bp, Homo sapiens
aaaaaatcaaattct

SEQ ID NO: 766855 - DNA, 15 bp, Homo sapiens
aaaaatcaaattctc

SEQ ID NO: 766856 - DNA, 15 bp, Homo sapiens
aaaatcaaattctca

SEQ ID NO: 766857 - DNA, 15 bp, Homo sapiens
aaatcaaattctcat

SEQ ID NO: 766858 - DNA, 15 bp, Homo sapiens
aatcaaattctcata

SEQ ID NO: 766859 - DNA, 15 bp, Homo sapiens
atcaaattctcatat

SEQ ID NO: 766860 - DNA, 15 bp, Homo sapiens
tcaaattctcatata

SEQ ID NO: 766861 - DNA, 15 bp, Homo sapiens
caaattctcatatac

SEQ ID NO: 766862 - DNA, 15 bp, Homo sapiens
aaattctcatatacc

SEQ ID NO: 766863 - DNA, 15 bp, Homo sapiens
aattctcatatacca

SEQ ID NO: 766864 - DNA, 15 bp, Homo sapiens
attctcatataccaa

SEQ ID NO: 766865 - DNA, 15 bp, Homo sapiens
ttctcatataccaag

SEQ ID NO: 766866 - DNA, 15 bp, Homo sapiens
tctcatataccaagt

SEQ ID NO: 766867 - DNA, 15 bp, Homo sapiens
ctcatataccaagta

SEQ ID NO: 766868 - DNA, 15 bp, Homo sapiens
tcatataccaagtaa

SEQ ID NO: 766869 - DNA, 15 bp, Homo sapiens
catataccaagtaat

SEQ ID NO: 766870 - DNA, 15 bp, Homo sapiens
atataccaagtaatt

SEQ ID NO: 766871 - DNA, 15 bp, Homo sapiens
tataccaagtaattg

SEQ ID NO: 766872 - DNA, 15 bp, Homo sapiens
ataccaagtaattgt

SEQ ID NO: 766873 - DNA, 15 bp, Homo sapiens
taccaagtaattgtt

SEQ ID NO: 766874 - DNA, 15 bp, Homo sapiens
accaagtaattgttt

SEQ ID NO: 766875 - DNA, 15 bp, Homo sapiens
ccaagtaattgtttg

SEQ ID NO: 766876 - DNA, 15 bp, Homo sapiens
caagtaattgtttgt

SEQ ID NO: 766877 - DNA, 15 bp, Homo sapiens
aagtaattgtttgtt

SEQ ID NO: 766878 - DNA, 15 bp, Homo sapiens
agtaattgtttgttt

SEQ ID NO: 766879 - DNA, 15 bp, Homo sapiens
gtaattgtttgtttt

SEQ ID NO: 766880 - DNA, 15 bp, Homo sapiens
taattgtttgttttc

SEQ ID NO: 766881 - DNA, 15 bp, Homo sapiens
aattgtttgttttct

SEQ ID NO: 766882 - DNA, 15 bp, Homo sapiens
attgtttgttttctt

SEQ ID NO: 766883 - DNA, 15 bp, Homo sapiens
ttgtttgttttcttt

SEQ ID NO: 766884 - DNA, 15 bp, Homo sapiens
tgtttgttttctttt

SEQ ID NO: 766885 - DNA, 15 bp, Homo sapiens
gtttgttttctttta

SEQ ID NO: 766886 - DNA, 15 bp, Homo sapiens
tttgttttcttttaa

SEQ ID NO: 766887 - DNA, 15 bp, Homo sapiens
ttgttttcttttaat

SEQ ID NO: 766888 - DNA, 15 bp, Homo sapiens
tgttttcttttaata

SEQ ID NO: 766889 - DNA, 15 bp, Homo sapiens
gttttcttttaatat

SEQ ID NO: 766890 - DNA, 15 bp, Homo sapiens
ttttcttttaatata

SEQ ID NO: 766891 - DNA, 15 bp, Homo sapiens
tttcttttaatatat

SEQ ID NO: 766892 - DNA, 15 bp, Homo sapiens
ttcttttaatatatt

SEQ ID NO: 766893 - DNA, 15 bp, Homo sapiens
tcttttaatatattc

SEQ ID NO: 766894 - DNA, 15 bp, Homo sapiens
cttttaatatattcc

SEQ ID NO: 766895 - DNA, 15 bp, Homo sapiens
ttttaatatattcct

SEQ ID NO: 766896 - DNA, 15 bp, Homo sapiens
tttaatatattcctg

SEQ ID NO: 766897 - DNA, 15 bp, Homo sapiens
ttaatatattcctga

SEQ ID NO: 766898 - DNA, 15 bp, Homo sapiens
taatatattcctgac

SEQ ID NO: 766899 - DNA, 15 bp, Homo sapiens
aatatattcctgacc

SEQ ID NO: 766900 - DNA, 15 bp, Homo sapiens
atatattcctgacct

SEQ ID NO: 766901 - DNA, 15 bp, Homo sapiens
tatattcctgacctt

SEQ ID NO: 766902 - DNA, 15 bp, Homo sapiens
atattcctgaccttg

SEQ ID NO: 766903 - DNA, 15 bp, Homo sapiens
tattcctgaccttgg

SEQ ID NO: 766904 - DNA, 15 bp, Homo sapiens
attcctgaccttgga

SEQ ID NO: 766905 - DNA, 15 bp, Homo sapiens
ttcctgaccttggac

SEQ ID NO: 766906 - DNA, 15 bp, Homo sapiens
tcctgaccttggact

SEQ ID NO: 766907 - DNA, 15 bp, Homo sapiens
cctgaccttggactt

SEQ ID NO: 766908 - DNA, 15 bp, Homo sapiens
ctgaccttggacttt

SEQ ID NO: 766909 - DNA, 15 bp, Homo sapiens
tgaccttggacttta

SEQ ID NO: 766910 - DNA, 15 bp, Homo sapiens
gaccttggactttac

SEQ ID NO: 766911 - DNA, 15 bp, Homo sapiens
accttggactttaca

SEQ ID NO: 766912 - DNA, 15 bp, Homo sapiens
ccttggactttacac

SEQ ID NO: 766913 - DNA, 15 bp, Homo sapiens
cttggactttacacc

SEQ ID NO: 766914 - DNA, 15 bp, Homo sapiens
ttggactttacacct

SEQ ID NO: 766915 - DNA, 15 bp, Homo sapiens
tggactttacacctc

SEQ ID NO: 766916 - DNA, 15 bp, Homo sapiens
ggactttacacctcc

SEQ ID NO: 766917 - DNA, 15 bp, Homo sapiens
gactttacacctcca

SEQ ID NO: 766918 - DNA, 15 bp, Homo sapiens
actttacacctccac

SEQ ID NO: 766919 - DNA, 15 bp, Homo sapiens
ctttacacctccacc

SEQ ID NO: 766920 - DNA, 15 bp, Homo sapiens
tttacacctccacca

SEQ ID NO: 766921 - DNA, 15 bp, Homo sapiens
ttacacctccaccat

SEQ ID NO: 766922 - DNA, 15 bp, Homo sapiens
tacacctccaccatt

SEQ ID NO: 766923 - DNA, 15 bp, Homo sapiens
acacctccaccattt

SEQ ID NO: 766924 - DNA, 15 bp, Homo sapiens
cacctccaccatttt

SEQ ID NO: 766925 - DNA, 15 bp, Homo sapiens
acctccaccattttt

SEQ ID NO: 766926 - DNA, 15 bp, Homo sapiens
cctccaccattttta

SEQ ID NO: 766927 - DNA, 15 bp, Homo sapiens
ctccaccatttttag

SEQ ID NO: 766928 - DNA, 15 bp, Homo sapiens
tccaccatttttagg

SEQ ID NO: 766929 - DNA, 15 bp, Homo sapiens
ccaccatttttagga

SEQ ID NO: 766930 - DNA, 15 bp, Homo sapiens
caccatttttaggat

SEQ ID NO: 766931 - DNA, 15 bp, Homo sapiens
accatttttaggatt

SEQ ID NO: 766932 - DNA, 15 bp, Homo sapiens
ccatttttaggattt

SEQ ID NO: 766933 - DNA, 15 bp, Homo sapiens
catttttaggatttg

SEQ ID NO: 766934 - DNA, 15 bp, Homo sapiens
atttttaggatttgt

SEQ ID NO: 766935 - DNA, 15 bp, Homo sapiens
tttttaggatttgtc

SEQ ID NO: 766936 - DNA, 15 bp, Homo sapiens
ttttaggatttgtct

SEQ ID NO: 766937 - DNA, 15 bp, Homo sapiens
tttaggatttgtctg

SEQ ID NO: 766938 - DNA, 15 bp, Homo sapiens
ttaggatttgtctga

SEQ ID NO: 766939 - DNA, 15 bp, Homo sapiens
taggatttgtctgat

SEQ ID NO: 766940 - DNA, 15 bp, Homo sapiens
aggatttgtctgatt

SEQ ID NO: 766941 - DNA, 15 bp, Homo sapiens
ggatttgtctgatta

SEQ ID NO: 766942 - DNA, 15 bp, Homo sapiens
gatttgtctgattag

SEQ ID NO: 766943 - DNA, 15 bp, Homo sapiens
atttgtctgattagc

SEQ ID NO: 766944 - DNA, 15 bp, Homo sapiens
tttgtctgattagct

SEQ ID NO: 766945 - DNA, 15 bp, Homo sapiens
ttgtctgattagctt

SEQ ID NO: 766946 - DNA, 15 bp, Homo sapiens
tgtctgattagcttt

SEQ ID NO: 766947 - DNA, 15 bp, Homo sapiens
gtctgattagctttt

SEQ ID NO: 766948 - DNA, 15 bp, Homo sapiens
tctgattagctttta

SEQ ID NO: 766949 - DNA, 15 bp, Homo sapiens
ctgattagcttttaa

SEQ ID NO: 766950 - DNA, 15 bp, Homo sapiens
tgattagcttttaaa

SEQ ID NO: 766951 - DNA, 15 bp, Homo sapiens
gattagcttttaaaa

SEQ ID NO: 766952 - DNA, 15 bp, Homo sapiens
attagcttttaaaat

SEQ ID NO: 766953 - DNA, 15 bp, Homo sapiens
ttagcttttaaaatt

SEQ ID NO: 766954 - DNA, 15 bp, Homo sapiens
tagcttttaaaattt

SEQ ID NO: 766955 - DNA, 15 bp, Homo sapiens
agcttttaaaatttt

SEQ ID NO: 766956 - DNA, 15 bp, Homo sapiens
gcttttaaaattttg

SEQ ID NO: 766957 - DNA, 15 bp, Homo sapiens
cttttaaaattttgt

SEQ ID NO: 766958 - DNA, 15 bp, Homo sapiens
ttttaaaattttgtt

SEQ ID NO: 766959 - DNA, 15 bp, Homo sapiens
tttaaaattttgttc

SEQ ID NO: 766960 - DNA, 15 bp, Homo sapiens
ttaaaattttgttct

SEQ ID NO: 766961 - DNA, 15 bp, Homo sapiens
taaaattttgttctg

SEQ ID NO: 766962 - DNA, 15 bp, Homo sapiens
aaaattttgttctgg

SEQ ID NO: 766963 - DNA, 15 bp, Homo sapiens
aaattttgttctgga

SEQ ID NO: 766964 - DNA, 15 bp, Homo sapiens
aattttgttctggat

SEQ ID NO: 766965 - DNA, 15 bp, Homo sapiens
attttgttctggatt

SEQ ID NO: 766966 - DNA, 15 bp, Homo sapiens
ttttgttctggattt

SEQ ID NO: 766967 - DNA, 15 bp, Homo sapiens
tttgttctggatttt

SEQ ID NO: 766968 - DNA, 15 bp, Homo sapiens
ttgttctggatttta

SEQ ID NO: 766969 - DNA, 15 bp, Homo sapiens
tgttctggattttac

SEQ ID NO: 766970 - DNA, 15 bp, Homo sapiens
gttctggattttaca

SEQ ID NO: 766971 - DNA, 15 bp, Homo sapiens
ttctggattttacag

SEQ ID NO: 766972 - DNA, 15 bp, Homo sapiens
tctggattttacagg

SEQ ID NO: 766973 - DNA, 15 bp, Homo sapiens
ctggattttacaggg

SEQ ID NO: 766974 - DNA, 15 bp, Homo sapiens
tggattttacagggt

SEQ ID NO: 766975 - DNA, 15 bp, Homo sapiens
ggattttacagggtt

SEQ ID NO: 766976 - DNA, 15 bp, Homo sapiens
gattttacagggttt

SEQ ID NO: 766977 - DNA, 15 bp, Homo sapiens
attttacagggtttg

SEQ ID NO: 766978 - DNA, 15 bp, Homo sapiens
ttttacagggtttga

SEQ ID NO: 766979 - DNA, 15 bp, Homo sapiens
tttacagggtttgat

SEQ ID NO: 766980 - DNA, 15 bp, Homo sapiens
ttacagggtttgatc

SEQ ID NO: 766981 - DNA, 15 bp, Homo sapiens
tacagggtttgatca

SEQ ID NO: 766982 - DNA, 15 bp, Homo sapiens
acagggtttgatcag

SEQ ID NO: 766983 - DNA, 15 bp, Homo sapiens
cagggtttgatcagc

SEQ ID NO: 766984 - DNA, 15 bp, Homo sapiens
agggtttgatcagca

SEQ ID NO: 766985 - DNA, 15 bp, Homo sapiens
gggtttgatcagcat

SEQ ID NO: 766986 - DNA, 15 bp, Homo sapiens
ggtttgatcagcata

SEQ ID NO: 766987 - DNA, 15 bp, Homo sapiens
gtttgatcagcataa

SEQ ID NO: 766988 - DNA, 15 bp, Homo sapiens
tttgatcagcataac

SEQ ID NO: 766989 - DNA, 15 bp, Homo sapiens
ttgatcagcataacc

SEQ ID NO: 766990 - DNA, 15 bp, Homo sapiens
tgatcagcataacca

SEQ ID NO: 766991 - DNA, 15 bp, Homo sapiens
gatcagcataaccag

SEQ ID NO: 766992 - DNA, 15 bp, Homo sapiens
atcagcataaccagt

SEQ ID NO: 766993 - DNA, 15 bp, Homo sapiens
tcagcataaccagtt

SEQ ID NO: 766994 - DNA, 15 bp, Homo sapiens
cagcataaccagttg

SEQ ID NO: 766995 - DNA, 15 bp, Homo sapiens
agcataaccagttga

SEQ ID NO: 766996 - DNA, 15 bp, Homo sapiens
gcataaccagttgac

SEQ ID NO: 766997 - DNA, 15 bp, Homo sapiens
cataaccagttgaca

SEQ ID NO: 766998 - DNA, 15 bp, Homo sapiens
ataaccagttgacac

SEQ ID NO: 766999 - DNA, 15 bp, Homo sapiens
taaccagttgacaca

SEQ ID NO: 767000 - DNA, 15 bp, Homo sapiens
aaccagttgacacaa

SEQ ID NO: 767001 - DNA, 15 bp, Homo sapiens
accagttgacacaag

SEQ ID NO: 767002 - DNA, 15 bp, Homo sapiens
ccagttgacacaagt

SEQ ID NO: 767003 - DNA, 15 bp, Homo sapiens
cagttgacacaagtg

SEQ ID NO: 767004 - DNA, 15 bp, Homo sapiens
agttgacacaagtgc

SEQ ID NO: 767005 - DNA, 15 bp, Homo sapiens
gttgacacaagtgca

SEQ ID NO: 767006 - DNA, 15 bp, Homo sapiens
ttgacacaagtgcag

SEQ ID NO: 767007 - DNA, 15 bp, Homo sapiens
tgacacaagtgcagt

SEQ ID NO: 767008 - DNA, 15 bp, Homo sapiens
gacacaagtgcagtg

SEQ ID NO: 767009 - DNA, 15 bp, Homo sapiens
acacaagtgcagtgg

SEQ ID NO: 767010 - DNA, 15 bp, Homo sapiens
cacaagtgcagtggg

SEQ ID NO: 767011 - DNA, 15 bp, Homo sapiens
acaagtgcagtggga

SEQ ID NO: 767012 - DNA, 15 bp, Homo sapiens
caagtgcagtgggat

SEQ ID NO: 767013 - DNA, 15 bp, Homo sapiens
aagtgcagtgggatc

SEQ ID NO: 767014 - DNA, 15 bp, Homo sapiens
agtgcagtgggatct

SEQ ID NO: 767015 - DNA, 15 bp, Homo sapiens
gtgcagtgggatctt

SEQ ID NO: 767016 - DNA, 15 bp, Homo sapiens
tgcagtgggatcttt

SEQ ID NO: 767017 - DNA, 15 bp, Homo sapiens
gcagtgggatctttt

SEQ ID NO: 767018 - DNA, 15 bp, Homo sapiens
cagtgggatcttttg

SEQ ID NO: 767019 - DNA, 15 bp, Homo sapiens
agtgggatcttttgg

SEQ ID NO: 767020 - DNA, 15 bp, Homo sapiens
gtgggatcttttggt

SEQ ID NO: 767021 - DNA, 15 bp, Homo sapiens
tgggatcttttggtg

SEQ ID NO: 767022 - DNA, 15 bp, Homo sapiens
gggatcttttggtgg

SEQ ID NO: 767023 - DNA, 15 bp, Homo sapiens
ggatcttttggtggg

SEQ ID NO: 767024 - DNA, 15 bp, Homo sapiens
gatcttttggtggga

SEQ ID NO: 767025 - DNA, 15 bp, Homo sapiens
atcttttggtgggaa

SEQ ID NO: 767026 - DNA, 15 bp, Homo sapiens
tcttttggtgggaaa

SEQ ID NO: 767027 - DNA, 15 bp, Homo sapiens
cttttggtgggaaag

SEQ ID NO: 767028 - DNA, 15 bp, Homo sapiens
ttttggtgggaaagt

SEQ ID NO: 767029 - DNA, 15 bp, Homo sapiens
tttggtgggaaagtc

SEQ ID NO: 767030 - DNA, 15 bp, Homo sapiens
ttggtgggaaagtct

SEQ ID NO: 767031 - DNA, 15 bp, Homo sapiens
tggtgggaaagtctg

SEQ ID NO: 767032 - DNA, 15 bp, Homo sapiens
ggtgggaaagtctgg

SEQ ID NO: 767033 - DNA, 15 bp, Homo sapiens
gtgggaaagtctggg

SEQ ID NO: 767034 - DNA, 15 bp, Homo sapiens
tgggaaagtctgggg

SEQ ID NO: 767035 - DNA, 15 bp, Homo sapiens
gggaaagtctggggg

SEQ ID NO: 767036 - DNA, 15 bp, Homo sapiens
ggaaagtctgggggt

SEQ ID NO: 767037 - DNA, 15 bp, Homo sapiens
gaaagtctgggggta

SEQ ID NO: 767038 - DNA, 15 bp, Homo sapiens
aaagtctgggggtac

SEQ ID NO: 767039 - DNA, 15 bp, Homo sapiens
aagtctgggggtacc

SEQ ID NO: 767040 - DNA, 15 bp, Homo sapiens
agtctgggggtacct

SEQ ID NO: 767041 - DNA, 15 bp, Homo sapiens
gtctgggggtacctg

SEQ ID NO: 767042 - DNA, 15 bp, Homo sapiens
tctgggggtacctga

SEQ ID NO: 767043 - DNA, 15 bp, Homo sapiens
ctgggggtacctgag

SEQ ID NO: 767044 - DNA, 15 bp, Homo sapiens
tgggggtacctgagg

SEQ ID NO: 767045 - DNA, 15 bp, Homo sapiens
gggggtacctgaggc

SEQ ID NO: 767046 - DNA, 15 bp, Homo sapiens
ggggtacctgaggca

SEQ ID NO: 767047 - DNA, 15 bp, Homo sapiens
gggtacctgaggcac

SEQ ID NO: 767048 - DNA, 15 bp, Homo sapiens
ggtacctgaggcaca

SEQ ID NO: 767049 - DNA, 15 bp, Homo sapiens
gtacctgaggcacac

SEQ ID NO: 767050 - DNA, 15 bp, Homo sapiens
tacctgaggcacaca

SEQ ID NO: 767051 - DNA, 15 bp, Homo sapiens
acctgaggcacacag

SEQ ID NO: 767052 - DNA, 15 bp, Homo sapiens
cctgaggcacacaga

SEQ ID NO: 767053 - DNA, 15 bp, Homo sapiens
ctgaggcacacagac

SEQ ID NO: 767054 - DNA, 15 bp, Homo sapiens
tgaggcacacagacc

SEQ ID NO: 767055 - DNA, 15 bp, Homo sapiens
gaggcacacagacct

SEQ ID NO: 767056 - DNA, 15 bp, Homo sapiens
aggcacacagacctt

SEQ ID NO: 767057 - DNA, 15 bp, Homo sapiens
ggcacacagaccttg

SEQ ID NO: 767058 - DNA, 15 bp, Homo sapiens
gcacacagaccttgg

SEQ ID NO: 767059 - DNA, 15 bp, Homo sapiens
cacacagaccttggg

SEQ ID NO: 767060 - DNA, 15 bp, Homo sapiens
acacagaccttgggt

SEQ ID NO: 767061 - DNA, 15 bp, Homo sapiens
cacagaccttgggtg

SEQ ID NO: 767062 - DNA, 15 bp, Homo sapiens
acagaccttgggtgg

SEQ ID NO: 767063 - DNA, 15 bp, Homo sapiens
cagaccttgggtggg

SEQ ID NO: 767064 - DNA, 15 bp, Homo sapiens
agaccttgggtgggg

SEQ ID NO: 767065 - DNA, 15 bp, Homo sapiens
gaccttgggtggggc

SEQ ID NO: 767066 - DNA, 15 bp, Homo sapiens
accttgggtggggct

SEQ ID NO: 767067 - DNA, 15 bp, Homo sapiens
ccttgggtggggcta

SEQ ID NO: 767068 - DNA, 15 bp, Homo sapiens
cttgggtggggctag

SEQ ID NO: 767069 - DNA, 15 bp, Homo sapiens
ttgggtggggctaga

SEQ ID NO: 767070 - DNA, 15 bp, Homo sapiens
tgggtggggctagac

SEQ ID NO: 767071 - DNA, 15 bp, Homo sapiens
gggtggggctagaca

SEQ ID NO: 767072 - DNA, 15 bp, Homo sapiens
ggtggggctagacac

SEQ ID NO: 767073 - DNA, 15 bp, Homo sapiens
gtggggctagacact

SEQ ID NO: 767074 - DNA, 15 bp, Homo sapiens
tggggctagacactg

SEQ ID NO: 767075 - DNA, 15 bp, Homo sapiens
ggggctagacactgg

SEQ ID NO: 767076 - DNA, 15 bp, Homo sapiens
gggctagacactggc

SEQ ID NO: 767077 - DNA, 15 bp, Homo sapiens
ggctagacactggct

SEQ ID NO: 767078 - DNA, 15 bp, Homo sapiens
gctagacactggctg

SEQ ID NO: 767079 - DNA, 15 bp, Homo sapiens
ctagacactggctgg

SEQ ID NO: 767080 - DNA, 15 bp, Homo sapiens
tagacactggctggt

SEQ ID NO: 767081 - DNA, 15 bp, Homo sapiens
agacactggctggtt

SEQ ID NO: 767082 - DNA, 15 bp, Homo sapiens
gacactggctggtta

SEQ ID NO: 767083 - DNA, 15 bp, Homo sapiens
acactggctggttaa

SEQ ID NO: 767084 - DNA, 15 bp, Homo sapiens
cactggctggttaaa

SEQ ID NO: 767085 - DNA, 15 bp, Homo sapiens
actggctggttaaag

SEQ ID NO: 767086 - DNA, 15 bp, Homo sapiens
ctggctggttaaaga

SEQ ID NO: 767087 - DNA, 15 bp, Homo sapiens
tggctggttaaagaa

SEQ ID NO: 767088 - DNA, 15 bp, Homo sapiens
ggctggttaaagaat

SEQ ID NO: 767089 - DNA, 15 bp, Homo sapiens
gctggttaaagaata

SEQ ID NO: 767090 - DNA, 15 bp, Homo sapiens
ctggttaaagaataa

SEQ ID NO: 767091 - DNA, 15 bp, Homo sapiens
tggttaaagaataag

SEQ ID NO: 767092 - DNA, 15 bp, Homo sapiens
ggttaaagaataaga

SEQ ID NO: 767093 - DNA, 15 bp, Homo sapiens
gttaaagaataagag

SEQ ID NO: 767094 - DNA, 15 bp, Homo sapiens
ttaaagaataagagt

SEQ ID NO: 767095 - DNA, 15 bp, Homo sapiens
taaagaataagagtc

SEQ ID NO: 767096 - DNA, 15 bp, Homo sapiens
aaagaataagagtct

SEQ ID NO: 767097 - DNA, 15 bp, Homo sapiens
aagaataagagtcta

SEQ ID NO: 767098 - DNA, 15 bp, Homo sapiens
agaataagagtctat

SEQ ID NO: 767099 - DNA, 15 bp, Homo sapiens
gaataagagtctatg

SEQ ID NO: 767100 - DNA, 15 bp, Homo sapiens
aataagagtctatgg

SEQ ID NO: 767101 - DNA, 15 bp, Homo sapiens
ataagagtctatggg

SEQ ID NO: 767102 - DNA, 15 bp, Homo sapiens
taagagtctatgggt

SEQ ID NO: 767103 - DNA, 15 bp, Homo sapiens
aagagtctatgggta

SEQ ID NO: 767104 - DNA, 15 bp, Homo sapiens
agagtctatgggtaa

SEQ ID NO: 767105 - DNA, 15 bp, Homo sapiens
gagtctatgggtaat

SEQ ID NO: 767106 - DNA, 15 bp, Homo sapiens
agtctatgggtaatg

SEQ ID NO: 767107 - DNA, 15 bp, Homo sapiens
gtctatgggtaatgg

SEQ ID NO: 767108 - DNA, 15 bp, Homo sapiens
tctatgggtaatgga

SEQ ID NO: 767109 - DNA, 15 bp, Homo sapiens
ctatgggtaatggag

SEQ ID NO: 767110 - DNA, 15 bp, Homo sapiens
tatgggtaatggaga

SEQ ID NO: 767111 - DNA, 15 bp, Homo sapiens
atgggtaatggagat

SEQ ID NO: 767112 - DNA, 15 bp, Homo sapiens
tgggtaatggagatc

SEQ ID NO: 767113 - DNA, 15 bp, Homo sapiens
gggtaatggagatca

SEQ ID NO: 767114 - DNA, 15 bp, Homo sapiens
ggtaatggagatcaa

SEQ ID NO: 767115 - DNA, 15 bp, Homo sapiens
gtaatggagatcaaa

SEQ ID NO: 767116 - DNA, 15 bp, Homo sapiens
taatggagatcaaaa

SEQ ID NO: 767117 - DNA, 15 bp, Homo sapiens
aatggagatcaaaat

SEQ ID NO: 767118 - DNA, 15 bp, Homo sapiens
atggagatcaaaata

SEQ ID NO: 767119 - DNA, 15 bp, Homo sapiens
tggagatcaaaatag

SEQ ID NO: 767120 - DNA, 15 bp, Homo sapiens
ggagatcaaaatagg

SEQ ID NO: 767121 - DNA, 15 bp, Homo sapiens
gagatcaaaataggc

SEQ ID NO: 767122 - DNA, 15 bp, Homo sapiens
agatcaaaataggcc

SEQ ID NO: 767123 - DNA, 15 bp, Homo sapiens
gatcaaaataggcct

SEQ ID NO: 767124 - DNA, 15 bp, Homo sapiens
atcaaaataggcctg

SEQ ID NO: 767125 - DNA, 15 bp, Homo sapiens
tcaaaataggcctga

SEQ ID NO: 767126 - DNA, 15 bp, Homo sapiens
caaaataggcctgag

SEQ ID NO: 767127 - DNA, 15 bp, Homo sapiens
aaaataggcctgaga

SEQ ID NO: 767128 - DNA, 15 bp, Homo sapiens
aaataggcctgagag

SEQ ID NO: 767129 - DNA, 15 bp, Homo sapiens
aataggcctgagagc

SEQ ID NO: 767130 - DNA, 15 bp, Homo sapiens
ataggcctgagagct

SEQ ID NO: 767131 - DNA, 15 bp, Homo sapiens
taggcctgagagcta

SEQ ID NO: 767132 - DNA, 15 bp, Homo sapiens
aggcctgagagctac

SEQ ID NO: 767133 - DNA, 15 bp, Homo sapiens
ggcctgagagctaca

SEQ ID NO: 767134 - DNA, 15 bp, Homo sapiens
gcctgagagctacag

SEQ ID NO: 767135 - DNA, 15 bp, Homo sapiens
cctgagagctacaga

SEQ ID NO: 767136 - DNA, 15 bp, Homo sapiens
ctgagagctacagaa

SEQ ID NO: 767137 - DNA, 15 bp, Homo sapiens
tgagagctacagaat

SEQ ID NO: 767138 - DNA, 15 bp, Homo sapiens
gagagctacagaatc

SEQ ID NO: 767139 - DNA, 15 bp, Homo sapiens
agagctacagaatca

SEQ ID NO: 767140 - DNA, 15 bp, Homo sapiens
gagctacagaatcag

SEQ ID NO: 767141 - DNA, 15 bp, Homo sapiens
agctacagaatcagt

SEQ ID NO: 767142 - DNA, 15 bp, Homo sapiens
gctacagaatcagtt

SEQ ID NO: 767143 - DNA, 15 bp, Homo sapiens
ctacagaatcagttg

SEQ ID NO: 767144 - DNA, 15 bp, Homo sapiens
tacagaatcagttgc

SEQ ID NO: 767145 - DNA, 15 bp, Homo sapiens
acagaatcagttgca

SEQ ID NO: 767146 - DNA, 15 bp, Homo sapiens
cagaatcagttgcag

SEQ ID NO: 767147 - DNA, 15 bp, Homo sapiens
agaatcagttgcaga

SEQ ID NO: 767148 - DNA, 15 bp, Homo sapiens
gaatcagttgcagaa

SEQ ID NO: 767149 - DNA, 15 bp, Homo sapiens
aatcagttgcagaat

SEQ ID NO: 767150 - DNA, 15 bp, Homo sapiens
atcagttgcagaatc

SEQ ID NO: 767151 - DNA, 15 bp, Homo sapiens
tcagttgcagaatca

SEQ ID NO: 767152 - DNA, 15 bp, Homo sapiens
cagttgcagaatcag

SEQ ID NO: 767153 - DNA, 15 bp, Homo sapiens
agttgcagaatcagt

SEQ ID NO: 767154 - DNA, 15 bp, Homo sapiens
gttgcagaatcagtt

SEQ ID NO: 767155 - DNA, 15 bp, Homo sapiens
ttgcagaatcagttg

SEQ ID NO: 767156 - DNA, 15 bp, Homo sapiens
tgcagaatcagttgt

SEQ ID NO: 767157 - DNA, 15 bp, Homo sapiens
gcagaatcagttgta

SEQ ID NO: 767158 - DNA, 15 bp, Homo sapiens
cagaatcagttgtaa

SEQ ID NO: 767159 - DNA, 15 bp, Homo sapiens
agaatcagttgtaaa

SEQ ID NO: 767160 - DNA, 15 bp, Homo sapiens
gaatcagttgtaaag

SEQ ID NO: 767161 - DNA, 15 bp, Homo sapiens
aatcagttgtaaagg

SEQ ID NO: 767162 - DNA, 15 bp, Homo sapiens
atcagttgtaaagga

SEQ ID NO: 767163 - DNA, 15 bp, Homo sapiens
tcagttgtaaaggaa

SEQ ID NO: 767164 - DNA, 15 bp, Homo sapiens
cagttgtaaaggaaa

SEQ ID NO: 767165 - DNA, 15 bp, Homo sapiens
agttgtaaaggaaat

SEQ ID NO: 767166 - DNA, 15 bp, Homo sapiens
gttgtaaaggaaatg

SEQ ID NO: 767167 - DNA, 15 bp, Homo sapiens
ttgtaaaggaaatgt

SEQ ID NO: 767168 - DNA, 15 bp, Homo sapiens
tgtaaaggaaatgtg

SEQ ID NO: 767169 - DNA, 15 bp, Homo sapiens
gtaaaggaaatgtgg

SEQ ID NO: 767170 - DNA, 15 bp, Homo sapiens
taaaggaaatgtgga

SEQ ID NO: 767171 - DNA, 15 bp, Homo sapiens
aaaggaaatgtggag

SEQ ID NO: 767172 - DNA, 15 bp, Homo sapiens
aaggaaatgtggaga

SEQ ID NO: 767173 - DNA, 15 bp, Homo sapiens
aggaaatgtggagaa

SEQ ID NO: 767174 - DNA, 15 bp, Homo sapiens
ggaaatgtggagaag

SEQ ID NO: 767175 - DNA, 15 bp, Homo sapiens
gaaatgtggagaagg

SEQ ID NO: 767176 - DNA, 15 bp, Homo sapiens
aaatgtggagaaggc

SEQ ID NO: 767177 - DNA, 15 bp, Homo sapiens
aatgtggagaaggca

SEQ ID NO: 767178 - DNA, 15 bp, Homo sapiens
atgtggagaaggcaa

SEQ ID NO: 767179 - DNA, 15 bp, Homo sapiens
tgtggagaaggcaag

SEQ ID NO: 767180 - DNA, 15 bp, Homo sapiens
gtggagaaggcaagc

SEQ ID NO: 767181 - DNA, 15 bp, Homo sapiens
tggagaaggcaagca

SEQ ID NO: 767182 - DNA, 15 bp, Homo sapiens
ggagaaggcaagcag

SEQ ID NO: 767183 - DNA, 15 bp, Homo sapiens
gagaaggcaagcaga

SEQ ID NO: 767184 - DNA, 15 bp, Homo sapiens
agaaggcaagcagaa

SEQ ID NO: 767185 - DNA, 15 bp, Homo sapiens
gaaggcaagcagaat

SEQ ID NO: 767186 - DNA, 15 bp, Homo sapiens
aaggcaagcagaata

SEQ ID NO: 767187 - DNA, 15 bp, Homo sapiens
aggcaagcagaatat

SEQ ID NO: 767188 - DNA, 15 bp, Homo sapiens
ggcaagcagaatatc

SEQ ID NO: 767189 - DNA, 15 bp, Homo sapiens
gcaagcagaatatca

SEQ ID NO: 767190 - DNA, 15 bp, Homo sapiens
caagcagaatatcag

SEQ ID NO: 767191 - DNA, 15 bp, Homo sapiens
aagcagaatatcagg

SEQ ID NO: 767192 - DNA, 15 bp, Homo sapiens
agcagaatatcaggt

SEQ ID NO: 767193 - DNA, 15 bp, Homo sapiens
gcagaatatcaggta

SEQ ID NO: 767194 - DNA, 15 bp, Homo sapiens
cagaatatcaggtaa

SEQ ID NO: 767195 - DNA, 15 bp, Homo sapiens
agaatatcaggtaac

SEQ ID NO: 767196 - DNA, 15 bp, Homo sapiens
gaatatcaggtaact

SEQ ID NO: 767197 - DNA, 15 bp, Homo sapiens
aatatcaggtaactc

SEQ ID NO: 767198 - DNA, 15 bp, Homo sapiens
atatcaggtaactca

SEQ ID NO: 767199 - DNA, 15 bp, Homo sapiens
tatcaggtaactcat

SEQ ID NO: 767200 - DNA, 15 bp, Homo sapiens
atcaggtaactcatg

SEQ ID NO: 767201 - DNA, 15 bp, Homo sapiens
tcaggtaactcatga

SEQ ID NO: 767202 - DNA, 15 bp, Homo sapiens
caggtaactcatgac

SEQ ID NO: 767203 - DNA, 15 bp, Homo sapiens
aggtaactcatgact

SEQ ID NO: 767204 - DNA, 15 bp, Homo sapiens
ggtaactcatgactg

SEQ ID NO: 767205 - DNA, 15 bp, Homo sapiens
gtaactcatgactgc

SEQ ID NO: 767206 - DNA, 15 bp, Homo sapiens
taactcatgactgca

SEQ ID NO: 767207 - DNA, 15 bp, Homo sapiens
aactcatgactgcaa

SEQ ID NO: 767208 - DNA, 15 bp, Homo sapiens
actcatgactgcaaa

SEQ ID NO: 767209 - DNA, 15 bp, Homo sapiens
ctcatgactgcaaag

SEQ ID NO: 767210 - DNA, 15 bp, Homo sapiens
tcatgactgcaaagc

SEQ ID NO: 767211 - DNA, 15 bp, Homo sapiens
catgactgcaaagcc

SEQ ID NO: 767212 - DNA, 15 bp, Homo sapiens
atgactgcaaagccg

SEQ ID NO: 767213 - DNA, 15 bp, Homo sapiens
tgactgcaaagccgt

SEQ ID NO: 767214 - DNA, 15 bp, Homo sapiens
gactgcaaagccgta

SEQ ID NO: 767215 - DNA, 15 bp, Homo sapiens
actgcaaagccgtaa

SEQ ID NO: 767216 - DNA, 15 bp, Homo sapiens
ctgcaaagccgtaat

SEQ ID NO: 767217 - DNA, 15 bp, Homo sapiens
tgcaaagccgtaatt

SEQ ID NO: 767218 - DNA, 15 bp, Homo sapiens
gcaaagccgtaatta

SEQ ID NO: 767219 - DNA, 15 bp, Homo sapiens
caaagccgtaattat

SEQ ID NO: 767220 - DNA, 15 bp, Homo sapiens
aaagccgtaattata

SEQ ID NO: 767221 - DNA, 15 bp, Homo sapiens
aagccgtaattatag

SEQ ID NO: 767222 - DNA, 15 bp, Homo sapiens
agccgtaattataga

SEQ ID NO: 767223 - DNA, 15 bp, Homo sapiens
gccgtaattatagaa

SEQ ID NO: 767224 - DNA, 15 bp, Homo sapiens
ccgtaattatagaaa

SEQ ID NO: 767225 - DNA, 15 bp, Homo sapiens
cgtaattatagaaac

SEQ ID NO: 767226 - DNA, 15 bp, Homo sapiens
gtaattatagaaaca

SEQ ID NO: 767227 - DNA, 15 bp, Homo sapiens
taattatagaaacat

SEQ ID NO: 767228 - DNA, 15 bp, Homo sapiens
aattatagaaacatt

SEQ ID NO: 767229 - DNA, 15 bp, Homo sapiens
attatagaaacattt

SEQ ID NO: 767230 - DNA, 15 bp, Homo sapiens
ttatagaaacatttc

SEQ ID NO: 767231 - DNA, 15 bp, Homo sapiens
tatagaaacatttcg

SEQ ID NO: 767232 - DNA, 15 bp, Homo sapiens
atagaaacatttcgc

SEQ ID NO: 767233 - DNA, 15 bp, Homo sapiens
tagaaacatttcgct

SEQ ID NO: 767234 - DNA, 15 bp, Homo sapiens
agaaacatttcgctt

SEQ ID NO: 767235 - DNA, 15 bp, Homo sapiens
gaaacatttcgctta

SEQ ID NO: 767236 - DNA, 15 bp, Homo sapiens
aaacatttcgcttat

SEQ ID NO: 767237 - DNA, 15 bp, Homo sapiens
aacatttcgcttata

SEQ ID NO: 767238 - DNA, 15 bp, Homo sapiens
acatttcgcttatac

SEQ ID NO: 767239 - DNA, 15 bp, Homo sapiens
catttcgcttataca

SEQ ID NO: 767240 - DNA, 15 bp, Homo sapiens
atttcgcttatacag

SEQ ID NO: 767241 - DNA, 15 bp, Homo sapiens
tttcgcttatacaga

SEQ ID NO: 767242 - DNA, 15 bp, Homo sapiens
ttcgcttatacagac

SEQ ID NO: 767243 - DNA, 15 bp, Homo sapiens
tcgcttatacagacc

SEQ ID NO: 767244 - DNA, 15 bp, Homo sapiens
cgcttatacagaccc

SEQ ID NO: 767245 - DNA, 15 bp, Homo sapiens
gcttatacagaccct

SEQ ID NO: 767246 - DNA, 15 bp, Homo sapiens
cttatacagacccta

SEQ ID NO: 767247 - DNA, 15 bp, Homo sapiens
ttatacagaccctag

SEQ ID NO: 767248 - DNA, 15 bp, Homo sapiens
tatacagaccctagt

SEQ ID NO: 767249 - DNA, 15 bp, Homo sapiens
atacagaccctagtg

SEQ ID NO: 767250 - DNA, 15 bp, Homo sapiens
tacagaccctagtgt

SEQ ID NO: 767251 - DNA, 15 bp, Homo sapiens
acagaccctagtgtt

SEQ ID NO: 767252 - DNA, 15 bp, Homo sapiens
cagaccctagtgttt

SEQ ID NO: 767253 - DNA, 15 bp, Homo sapiens
agaccctagtgttta

SEQ ID NO: 767254 - DNA, 15 bp, Homo sapiens
gaccctagtgtttaa

SEQ ID NO: 767255 - DNA, 15 bp, Homo sapiens
accctagtgtttaac

SEQ ID NO: 767256 - DNA, 15 bp, Homo sapiens
ccctagtgtttaact

SEQ ID NO: 767257 - DNA, 15 bp, Homo sapiens
cctagtgtttaactt

SEQ ID NO: 767258 - DNA, 15 bp, Homo sapiens
ctagtgtttaacttc

SEQ ID NO: 767259 - DNA, 15 bp, Homo sapiens
tagtgtttaacttca

SEQ ID NO: 767260 - DNA, 15 bp, Homo sapiens
agtgtttaacttcag

SEQ ID NO: 767261 - DNA, 15 bp, Homo sapiens
gtgtttaacttcagt

SEQ ID NO: 767262 - DNA, 15 bp, Homo sapiens
tgtttaacttcagtg

SEQ ID NO: 767263 - DNA, 15 bp, Homo sapiens
gtttaacttcagtgt

SEQ ID NO: 767264 - DNA, 15 bp, Homo sapiens
tttaacttcagtgtt

SEQ ID NO: 767265 - DNA, 15 bp, Homo sapiens
ttaacttcagtgttc

SEQ ID NO: 767266 - DNA, 15 bp, Homo sapiens
taacttcagtgttca

SEQ ID NO: 767267 - DNA, 15 bp, Homo sapiens
aacttcagtgttcat

SEQ ID NO: 767268 - DNA, 15 bp, Homo sapiens
acttcagtgttcatt

SEQ ID NO: 767269 - DNA, 15 bp, Homo sapiens
cttcagtgttcattg

SEQ ID NO: 767270 - DNA, 15 bp, Homo sapiens
ttcagtgttcattga

SEQ ID NO: 767271 - DNA, 15 bp, Homo sapiens
tcagtgttcattgaa

SEQ ID NO: 767272 - DNA, 15 bp, Homo sapiens
cagtgttcattgaag

SEQ ID NO: 767273 - DNA, 15 bp, Homo sapiens
agtgttcattgaaga

SEQ ID NO: 767274 - DNA, 15 bp, Homo sapiens
gtgttcattgaagag

SEQ ID NO: 767275 - DNA, 15 bp, Homo sapiens
tgttcattgaagagg

SEQ ID NO: 767276 - DNA, 15 bp, Homo sapiens
gttcattgaagagga

SEQ ID NO: 767277 - DNA, 15 bp, Homo sapiens
ttcattgaagaggaa

SEQ ID NO: 767278 - DNA, 15 bp, Homo sapiens
tcattgaagaggaac

SEQ ID NO: 767279 - DNA, 15 bp, Homo sapiens
cattgaagaggaact

SEQ ID NO: 767280 - DNA, 15 bp, Homo sapiens
attgaagaggaactg

SEQ ID NO: 767281 - DNA, 15 bp, Homo sapiens
ttgaagaggaactgg

SEQ ID NO: 767282 - DNA, 15 bp, Homo sapiens
tgaagaggaactggt

SEQ ID NO: 767283 - DNA, 15 bp, Homo sapiens
gaagaggaactggta

SEQ ID NO: 767284 - DNA, 15 bp, Homo sapiens
aagaggaactggtat

SEQ ID NO: 767285 - DNA, 15 bp, Homo sapiens
agaggaactggtatg

SEQ ID NO: 767286 - DNA, 15 bp, Homo sapiens
gaggaactggtatgt

SEQ ID NO: 767287 - DNA, 15 bp, Homo sapiens
aggaactggtatgta

SEQ ID NO: 767288 - DNA, 15 bp, Homo sapiens
ggaactggtatgtaa

SEQ ID NO: 767289 - DNA, 15 bp, Homo sapiens
gaactggtatgtaag

SEQ ID NO: 767290 - DNA, 15 bp, Homo sapiens
aactggtatgtaagt

SEQ ID NO: 767291 - DNA, 15 bp, Homo sapiens
actggtatgtaagtg

SEQ ID NO: 767292 - DNA, 15 bp, Homo sapiens
ctggtatgtaagtga

SEQ ID NO: 767293 - DNA, 15 bp, Homo sapiens
tggtatgtaagtgat

SEQ ID NO: 767294 - DNA, 15 bp, Homo sapiens
ggtatgtaagtgatg

SEQ ID NO: 767295 - DNA, 15 bp, Homo sapiens
gtatgtaagtgatgc

SEQ ID NO: 767296 - DNA, 15 bp, Homo sapiens
tatgtaagtgatgct

SEQ ID NO: 767297 - DNA, 15 bp, Homo sapiens
atgtaagtgatgcta

SEQ ID NO: 767298 - DNA, 15 bp, Homo sapiens
tgtaagtgatgctac

SEQ ID NO: 767299 - DNA, 15 bp, Homo sapiens
gtaagtgatgctaca

SEQ ID NO: 767300 - DNA, 15 bp, Homo sapiens
taagtgatgctacat

SEQ ID NO: 767301 - DNA, 15 bp, Homo sapiens
aagtgatgctacatc

SEQ ID NO: 767302 - DNA, 15 bp, Homo sapiens
agtgatgctacatca

SEQ ID NO: 767303 - DNA, 15 bp, Homo sapiens
gtgatgctacatcaa

SEQ ID NO: 767304 - DNA, 15 bp, Homo sapiens
tgatgctacatcaac

SEQ ID NO: 767305 - DNA, 15 bp, Homo sapiens
gatgctacatcaaca

SEQ ID NO: 767306 - DNA, 15 bp, Homo sapiens
atgctacatcaacat

SEQ ID NO: 767307 - DNA, 15 bp, Homo sapiens
tgctacatcaacatg

SEQ ID NO: 767308 - DNA, 15 bp, Homo sapiens
gctacatcaacatgg

SEQ ID NO: 767309 - DNA, 15 bp, Homo sapiens
ctacatcaacatggc

SEQ ID NO: 767310 - DNA, 15 bp, Homo sapiens
tacatcaacatggca

SEQ ID NO: 767311 - DNA, 15 bp, Homo sapiens
acatcaacatggcac

SEQ ID NO: 767312 - DNA, 15 bp, Homo sapiens
catcaacatggcaca

SEQ ID NO: 767313 - DNA, 15 bp, Homo sapiens
atcaacatggcacaa

SEQ ID NO: 767314 - DNA, 15 bp, Homo sapiens
tcaacatggcacaat

SEQ ID NO: 767315 - DNA, 15 bp, Homo sapiens
caacatggcacaatc

SEQ ID NO: 767316 - DNA, 15 bp, Homo sapiens
aacatggcacaatct

SEQ ID NO: 767317 - DNA, 15 bp, Homo sapiens
acatggcacaatctt

SEQ ID NO: 767318 - DNA, 15 bp, Homo sapiens
catggcacaatctta

SEQ ID NO: 767319 - DNA, 15 bp, Homo sapiens
atggcacaatcttat

SEQ ID NO: 767320 - DNA, 15 bp, Homo sapiens
tggcacaatcttatc

SEQ ID NO: 767321 - DNA, 15 bp, Homo sapiens
ggcacaatcttatca

SEQ ID NO: 767322 - DNA, 15 bp, Homo sapiens
gcacaatcttatcaa

SEQ ID NO: 767323 - DNA, 15 bp, Homo sapiens
cacaatcttatcaag

SEQ ID NO: 767324 - DNA, 15 bp, Homo sapiens
acaatcttatcaagt

SEQ ID NO: 767325 - DNA, 15 bp, Homo sapiens
caatcttatcaagtc

SEQ ID NO: 767326 - DNA, 15 bp, Homo sapiens
aatcttatcaagtca

SEQ ID NO: 767327 - DNA, 15 bp, Homo sapiens
atcttatcaagtcat

SEQ ID NO: 767328 - DNA, 15 bp, Homo sapiens
tcttatcaagtcatt

SEQ ID NO: 767329 - DNA, 15 bp, Homo sapiens
cttatcaagtcatta

SEQ ID NO: 767330 - DNA, 15 bp, Homo sapiens
ttatcaagtcattac

SEQ ID NO: 767331 - DNA, 15 bp, Homo sapiens
tatcaagtcattaca

SEQ ID NO: 767332 - DNA, 15 bp, Homo sapiens
atcaagtcattacaa

SEQ ID NO: 767333 - DNA, 15 bp, Homo sapiens
tcaagtcattacaat

SEQ ID NO: 767334 - DNA, 15 bp, Homo sapiens
caagtcattacaatg

SEQ ID NO: 767335 - DNA, 15 bp, Homo sapiens
aagtcattacaatga

SEQ ID NO: 767336 - DNA, 15 bp, Homo sapiens
agtcattacaatgaa

SEQ ID NO: 767337 - DNA, 15 bp, Homo sapiens
gtcattacaatgaaa

SEQ ID NO: 767338 - DNA, 15 bp, Homo sapiens
tcattacaatgaaaa

SEQ ID NO: 767339 - DNA, 15 bp, Homo sapiens
cattacaatgaaaaa

SEQ ID NO: 767340 - DNA, 15 bp, Homo sapiens
attacaatgaaaaat

SEQ ID NO: 767341 - DNA, 15 bp, Homo sapiens
ttacaatgaaaaata

SEQ ID NO: 767342 - DNA, 15 bp, Homo sapiens
tacaatgaaaaatat

SEQ ID NO: 767343 - DNA, 15 bp, Homo sapiens
acaatgaaaaatatg

SEQ ID NO: 767344 - DNA, 15 bp, Homo sapiens
caatgaaaaatatga

SEQ ID NO: 767345 - DNA, 15 bp, Homo sapiens
aatgaaaaatatgaa

SEQ ID NO: 767346 - DNA, 15 bp, Homo sapiens
atgaaaaatatgaag

SEQ ID NO: 767347 - DNA, 15 bp, Homo sapiens
tgaaaaatatgaaga

SEQ ID NO: 767348 - DNA, 15 bp, Homo sapiens
gaaaaatatgaagac

SEQ ID NO: 767349 - DNA, 15 bp, Homo sapiens
aaaaatatgaagact

SEQ ID NO: 767350 - DNA, 15 bp, Homo sapiens
aaaatatgaagacta

SEQ ID NO: 767351 - DNA, 15 bp, Homo sapiens
aaatatgaagactaa

SEQ ID NO: 767352 - DNA, 15 bp, Homo sapiens
aatatgaagactaaa

SEQ ID NO: 767353 - DNA, 15 bp, Homo sapiens
atatgaagactaaat

SEQ ID NO: 767354 - DNA, 15 bp, Homo sapiens
tatgaagactaaatg

SEQ ID NO: 767355 - DNA, 15 bp, Homo sapiens
atgaagactaaatgc

SEQ ID NO: 767356 - DNA, 15 bp, Homo sapiens
tgaagactaaatgct

SEQ ID NO: 767357 - DNA, 15 bp, Homo sapiens
gaagactaaatgctt

SEQ ID NO: 767358 - DNA, 15 bp, Homo sapiens
aagactaaatgcttg

SEQ ID NO: 767359 - DNA, 15 bp, Homo sapiens
agactaaatgcttga

SEQ ID NO: 767360 - DNA, 15 bp, Homo sapiens
gactaaatgcttgac

SEQ ID NO: 767361 - DNA, 15 bp, Homo sapiens
actaaatgcttgaca

SEQ ID NO: 767362 - DNA, 15 bp, Homo sapiens
ctaaatgcttgacaa

SEQ ID NO: 767363 - DNA, 15 bp, Homo sapiens
taaatgcttgacaaa

SEQ ID NO: 767364 - DNA, 15 bp, Homo sapiens
aaatgcttgacaaat

SEQ ID NO: 767365 - DNA, 15 bp, Homo sapiens
aatgcttgacaaata

SEQ ID NO: 767366 - DNA, 15 bp, Homo sapiens
atgcttgacaaatac

SEQ ID NO: 767367 - DNA, 15 bp, Homo sapiens
tgcttgacaaataca

SEQ ID NO: 767368 - DNA, 15 bp, Homo sapiens
gcttgacaaatacat

SEQ ID NO: 767369 - DNA, 15 bp, Homo sapiens
cttgacaaatacatt

SEQ ID NO: 767370 - DNA, 15 bp, Homo sapiens
ttgacaaatacattt

SEQ ID NO: 767371 - DNA, 15 bp, Homo sapiens
tgacaaatacattta

SEQ ID NO: 767372 - DNA, 15 bp, Homo sapiens
gacaaatacatttaa

SEQ ID NO: 767373 - DNA, 15 bp, Homo sapiens
acaaatacatttaag

SEQ ID NO: 767374 - DNA, 15 bp, Homo sapiens
caaatacatttaagg

SEQ ID NO: 767375 - DNA, 15 bp, Homo sapiens
aaatacatttaaggt

SEQ ID NO: 767376 - DNA, 15 bp, Homo sapiens
aatacatttaaggtg

SEQ ID NO: 767377 - DNA, 15 bp, Homo sapiens
atacatttaaggtgt

SEQ ID NO: 767378 - DNA, 15 bp, Homo sapiens
tacatttaaggtgta

SEQ ID NO: 767379 - DNA, 15 bp, Homo sapiens
acatttaaggtgtaa

SEQ ID NO: 767380 - DNA, 15 bp, Homo sapiens
catttaaggtgtaat

SEQ ID NO: 767381 - DNA, 15 bp, Homo sapiens
atttaaggtgtaatg

SEQ ID NO: 767382 - DNA, 15 bp, Homo sapiens
tttaaggtgtaatgt

SEQ ID NO: 767383 - DNA, 15 bp, Homo sapiens
ttaaggtgtaatgtt

SEQ ID NO: 767384 - DNA, 15 bp, Homo sapiens
taaggtgtaatgtta

SEQ ID NO: 767385 - DNA, 15 bp, Homo sapiens
aaggtgtaatgttaa

SEQ ID NO: 767386 - DNA, 15 bp, Homo sapiens
aggtgtaatgttaaa

SEQ ID NO: 767387 - DNA, 15 bp, Homo sapiens
ggtgtaatgttaaat

SEQ ID NO: 767388 - DNA, 15 bp, Homo sapiens
gtgtaatgttaaata

SEQ ID NO: 767389 - DNA, 15 bp, Homo sapiens
tgtaatgttaaatag

SEQ ID NO: 767390 - DNA, 15 bp, Homo sapiens
gtaatgttaaataga

SEQ ID NO: 767391 - DNA, 15 bp, Homo sapiens
taatgttaaatagaa

SEQ ID NO: 767392 - DNA, 15 bp, Homo sapiens
aatgttaaatagaat

SEQ ID NO: 767393 - DNA, 15 bp, Homo sapiens
atgttaaatagaata

SEQ ID NO: 767394 - DNA, 15 bp, Homo sapiens
tgttaaatagaatag

SEQ ID NO: 767395 - DNA, 15 bp, Homo sapiens
gttaaatagaataga

SEQ ID NO: 767396 - DNA, 15 bp, Homo sapiens
ttaaatagaatagaa

SEQ ID NO: 767397 - DNA, 15 bp, Homo sapiens
taaatagaatagaac

SEQ ID NO: 767398 - DNA, 15 bp, Homo sapiens
aaatagaatagaacc

SEQ ID NO: 767399 - DNA, 15 bp, Homo sapiens
aatagaatagaaccc

SEQ ID NO: 767400 - DNA, 15 bp, Homo sapiens
atagaatagaaccca

SEQ ID NO: 767401 - DNA, 15 bp, Homo sapiens
tagaatagaacccac

SEQ ID NO: 767402 - DNA, 15 bp, Homo sapiens
agaatagaacccaca

SEQ ID NO: 767403 - DNA, 15 bp, Homo sapiens
gaatagaacccacag

SEQ ID NO: 767404 - DNA, 15 bp, Homo sapiens
aatagaacccacagt

SEQ ID NO: 767405 - DNA, 15 bp, Homo sapiens
atagaacccacagtg

SEQ ID NO: 767406 - DNA, 15 bp, Homo sapiens
tagaacccacagtgt

SEQ ID NO: 767407 - DNA, 15 bp, Homo sapiens
agaacccacagtgtg

SEQ ID NO: 767408 - DNA, 15 bp, Homo sapiens
gaacccacagtgtga

SEQ ID NO: 767409 - DNA, 15 bp, Homo sapiens
aacccacagtgtgat

SEQ ID NO: 767410 - DNA, 15 bp, Homo sapiens
acccacagtgtgatt

SEQ ID NO: 767411 - DNA, 15 bp, Homo sapiens
cccacagtgtgattt

SEQ ID NO: 767412 - DNA, 15 bp, Homo sapiens
ccacagtgtgatttc

SEQ ID NO: 767413 - DNA, 15 bp, Homo sapiens
cacagtgtgatttca

SEQ ID NO: 767414 - DNA, 15 bp, Homo sapiens
acagtgtgatttcaa

SEQ ID NO: 767415 - DNA, 15 bp, Homo sapiens
cagtgtgatttcaag

SEQ ID NO: 767416 - DNA, 15 bp, Homo sapiens
agtgtgatttcaagg

SEQ ID NO: 767417 - DNA, 15 bp, Homo sapiens
gtgtgatttcaagga

SEQ ID NO: 767418 - DNA, 15 bp, Homo sapiens
tgtgatttcaaggat

SEQ ID NO: 767419 - DNA, 15 bp, Homo sapiens
gtgatttcaaggata

SEQ ID NO: 767420 - DNA, 15 bp, Homo sapiens
tgatttcaaggataa

SEQ ID NO: 767421 - DNA, 15 bp, Homo sapiens
gatttcaaggataat

SEQ ID NO: 767422 - DNA, 15 bp, Homo sapiens
atttcaaggataata

SEQ ID NO: 767423 - DNA, 15 bp, Homo sapiens
tttcaaggataataa

SEQ ID NO: 767424 - DNA, 15 bp, Homo sapiens
ttcaaggataataaa

SEQ ID NO: 767425 - DNA, 15 bp, Homo sapiens
tcaaggataataaaa

SEQ ID NO: 767426 - DNA, 15 bp, Homo sapiens
caaggataataaaat

SEQ ID NO: 767427 - DNA, 15 bp, Homo sapiens
aaggataataaaatt

SEQ ID NO: 767428 - DNA, 15 bp, Homo sapiens
aggataataaaattg

SEQ ID NO: 767429 - DNA, 15 bp, Homo sapiens
ggataataaaattgt

SEQ ID NO: 767430 - DNA, 15 bp, Homo sapiens
gataataaaattgtg

SEQ ID NO: 767431 - DNA, 15 bp, Homo sapiens
ataataaaattgtgt

SEQ ID NO: 767432 - DNA, 15 bp, Homo sapiens
taataaaattgtgtg

SEQ ID NO: 767433 - DNA, 15 bp, Homo sapiens
aataaaattgtgtga

SEQ ID NO: 767434 - DNA, 15 bp, Homo sapiens
ataaaattgtgtgaa

SEQ ID NO: 767435 - DNA, 15 bp, Homo sapiens
taaaattgtgtgaaa

SEQ ID NO: 767436 - DNA, 15 bp, Homo sapiens
aaaattgtgtgaaag

SEQ ID NO: 767437 - DNA, 15 bp, Homo sapiens
aaattgtgtgaaagc

SEQ ID NO: 767438 - DNA, 15 bp, Homo sapiens
aattgtgtgaaagct

SEQ ID NO: 767439 - DNA, 15 bp, Homo sapiens
attgtgtgaaagcta

SEQ ID NO: 767440 - DNA, 15 bp, Homo sapiens
ttgtgtgaaagctaa

SEQ ID NO: 767441 - DNA, 15 bp, Homo sapiens
tgtgtgaaagctaat

SEQ ID NO: 767442 - DNA, 15 bp, Homo sapiens
gtgtgaaagctaata

SEQ ID NO: 767443 - DNA, 15 bp, Homo sapiens
tgtgaaagctaatag

SEQ ID NO: 767444 - DNA, 15 bp, Homo sapiens
gtgaaagctaatagt

SEQ ID NO: 767445 - DNA, 15 bp, Homo sapiens
tgaaagctaatagtc

SEQ ID NO: 767446 - DNA, 15 bp, Homo sapiens
gaaagctaatagtca

SEQ ID NO: 767447 - DNA, 15 bp, Homo sapiens
aaagctaatagtcaa

SEQ ID NO: 767448 - DNA, 15 bp, Homo sapiens
aagctaatagtcaat

SEQ ID NO: 767449 - DNA, 15 bp, Homo sapiens
agctaatagtcaata

SEQ ID NO: 767450 - DNA, 15 bp, Homo sapiens
gctaatagtcaataa

SEQ ID NO: 767451 - DNA, 15 bp, Homo sapiens
ctaatagtcaataaa

SEQ ID NO: 767452 - DNA, 15 bp, Homo sapiens
taatagtcaataaag

SEQ ID NO: 767453 - DNA, 15 bp, Homo sapiens
aatagtcaataaagt

SEQ ID NO: 767454 - DNA, 15 bp, Homo sapiens
atagtcaataaagta

SEQ ID NO: 767455 - DNA, 15 bp, Homo sapiens
tagtcaataaagtaa

SEQ ID NO: 767456 - DNA, 15 bp, Homo sapiens
agtcaataaagtaat

SEQ ID NO: 767457 - DNA, 15 bp, Homo sapiens
gtcaataaagtaatt

SEQ ID NO: 767458 - DNA, 15 bp, Homo sapiens
tcaataaagtaattc

SEQ ID NO: 767459 - DNA, 15 bp, Homo sapiens
caataaagtaattct

SEQ ID NO: 767460 - DNA, 15 bp, Homo sapiens
aataaagtaattcta

SEQ ID NO: 767461 - DNA, 15 bp, Homo sapiens
ataaagtaattctat

SEQ ID NO: 767462 - DNA, 15 bp, Homo sapiens
taaagtaattctatt

SEQ ID NO: 767463 - DNA, 15 bp, Homo sapiens
aaagtaattctatta

SEQ ID NO: 767464 - DNA, 15 bp, Homo sapiens
aagtaattctattaa

SEQ ID NO: 767465 - DNA, 15 bp, Homo sapiens
agtaattctattaaa

SEQ ID NO: 767466 - DNA, 15 bp, Homo sapiens
gtaattctattaaaa

SEQ ID NO: 767467 - DNA, 15 bp, Homo sapiens
taattctattaaaat

SEQ ID NO: 767468 - DNA, 15 bp, Homo sapiens
aattctattaaaatg

SEQ ID NO: 767469 - DNA, 15 bp, Homo sapiens
attctattaaaatga

SEQ ID NO: 767470 - DNA, 15 bp, Homo sapiens
ttctattaaaatgat

SEQ ID NO: 767471 - DNA, 15 bp, Homo sapiens
tctattaaaatgata

SEQ ID NO: 767472 - DNA, 15 bp, Homo sapiens
ctattaaaatgatag

SEQ ID NO: 767473 - DNA, 15 bp, Homo sapiens
tattaaaatgatagt

SEQ ID NO: 767474 - DNA, 15 bp, Homo sapiens
attaaaatgatagtt

SEQ ID NO: 767475 - DNA, 15 bp, Homo sapiens
ttaaaatgatagttt

SEQ ID NO: 767476 - DNA, 15 bp, Homo sapiens
taaaatgatagtttg

SEQ ID NO: 767477 - DNA, 15 bp, Homo sapiens
aaaatgatagtttgc

SEQ ID NO: 767478 - DNA, 15 bp, Homo sapiens
aaatgatagtttgca

SEQ ID NO: 767479 - DNA, 15 bp, Homo sapiens
aatgatagtttgcag

SEQ ID NO: 767480 - DNA, 15 bp, Homo sapiens
atgatagtttgcagg

SEQ ID NO: 767481 - DNA, 15 bp, Homo sapiens
tgatagtttgcaggg

SEQ ID NO: 767482 - DNA, 15 bp, Homo sapiens
gatagtttgcagggt

SEQ ID NO: 767483 - DNA, 15 bp, Homo sapiens
atagtttgcagggtt

SEQ ID NO: 767484 - DNA, 15 bp, Homo sapiens
tagtttgcagggttt

SEQ ID NO: 767485 - DNA, 15 bp, Homo sapiens
agtttgcagggtttt

SEQ ID NO: 767486 - DNA, 15 bp, Homo sapiens
gtttgcagggtttta

SEQ ID NO: 767487 - DNA, 15 bp, Homo sapiens
tttgcagggttttaa

SEQ ID NO: 767488 - DNA, 15 bp, Homo sapiens
ttgcagggttttaaa

SEQ ID NO: 767489 - DNA, 15 bp, Homo sapiens
tgcagggttttaaaa

SEQ ID NO: 767490 - DNA, 15 bp, Homo sapiens
gcagggttttaaaaa

SEQ ID NO: 767491 - DNA, 15 bp, Homo sapiens
cagggttttaaaaat

SEQ ID NO: 767492 - DNA, 15 bp, Homo sapiens
agggttttaaaaata

SEQ ID NO: 767493 - DNA, 15 bp, Homo sapiens
gggttttaaaaataa

SEQ ID NO: 767494 - DNA, 15 bp, Homo sapiens
ggttttaaaaataat

SEQ ID NO: 767495 - DNA, 15 bp, Homo sapiens
gttttaaaaataatt

SEQ ID NO: 767496 - DNA, 15 bp, Homo sapiens
ttttaaaaataatta

SEQ ID NO: 767497 - DNA, 15 bp, Homo sapiens
tttaaaaataattaa

SEQ ID NO: 767498 - DNA, 15 bp, Homo sapiens
ttaaaaataattaaa

SEQ ID NO: 767499 - DNA, 15 bp, Homo sapiens
taaaaataattaaaa

SEQ ID NO: 767500 - DNA, 15 bp, Homo sapiens
aaaaataattaaaat

SEQ ID NO: 767501 - DNA, 15 bp, Homo sapiens
aaaataattaaaata

SEQ ID NO: 767502 - DNA, 15 bp, Homo sapiens
aaataattaaaataa

SEQ ID NO: 767503 - DNA, 15 bp, Homo sapiens
aataattaaaataat

SEQ ID NO: 767504 - DNA, 15 bp, Homo sapiens
ataattaaaataatg

SEQ ID NO: 767505 - DNA, 15 bp, Homo sapiens
taattaaaataatgt

SEQ ID NO: 767506 - DNA, 15 bp, Homo sapiens
aattaaaataatgtt

SEQ ID NO: 767507 - DNA, 15 bp, Homo sapiens
attaaaataatgttt

SEQ ID NO: 767508 - DNA, 15 bp, Homo sapiens
ttaaaataatgtttt

SEQ ID NO: 767509 - DNA, 15 bp, Homo sapiens
taaaataatgttttt

SEQ ID NO: 767510 - DNA, 15 bp, Homo sapiens
aaaataatgtttttc

SEQ ID NO: 767511 - DNA, 15 bp, Homo sapiens
aaataatgtttttca

SEQ ID NO: 767512 - DNA, 15 bp, Homo sapiens
aataatgtttttcat

SEQ ID NO: 767513 - DNA, 15 bp, Homo sapiens
ataatgtttttcata

SEQ ID NO: 767514 - DNA, 15 bp, Homo sapiens
taatgtttttcatat

SEQ ID NO: 767515 - DNA, 15 bp, Homo sapiens
aatgtttttcatata

SEQ ID NO: 767516 - DNA, 15 bp, Homo sapiens
atgtttttcatatat

SEQ ID NO: 767517 - DNA, 15 bp, Homo sapiens
tgtttttcatatata

SEQ ID NO: 767518 - DNA, 15 bp, Homo sapiens
gtttttcatatatat

SEQ ID NO: 767519 - DNA, 15 bp, Homo sapiens
tttttcatatatatc

SEQ ID NO: 767520 - DNA, 15 bp, Homo sapiens
ttttcatatatatca

SEQ ID NO: 767521 - DNA, 15 bp, Homo sapiens
tttcatatatatcaa

SEQ ID NO: 767522 - DNA, 15 bp, Homo sapiens
ttcatatatatcaat

SEQ ID NO: 767523 - DNA, 15 bp, Homo sapiens
tcatatatatcaatt

SEQ ID NO: 767524 - DNA, 15 bp, Homo sapiens
catatatatcaattt

SEQ ID NO: 767525 - DNA, 15 bp, Homo sapiens
atatatatcaatttt

SEQ ID NO: 767526 - DNA, 15 bp, Homo sapiens
tatatatcaattttt

SEQ ID NO: 767527 - DNA, 15 bp, Homo sapiens
atatatcaatttttt

SEQ ID NO: 767528 - DNA, 15 bp, Homo sapiens
tatatcaattttttt

SEQ ID NO: 767529 - DNA, 15 bp, Homo sapiens
atatcaatttttttc

SEQ ID NO: 767530 - DNA, 15 bp, Homo sapiens
tatcaatttttttct

SEQ ID NO: 767531 - DNA, 15 bp, Homo sapiens
atcaatttttttctc

SEQ ID NO: 767532 - DNA, 15 bp, Homo sapiens
tcaatttttttctca

SEQ ID NO: 767533 - DNA, 15 bp, Homo sapiens
caatttttttctcaa

SEQ ID NO: 767534 - DNA, 15 bp, Homo sapiens
aatttttttctcaat

SEQ ID NO: 767535 - DNA, 15 bp, Homo sapiens
atttttttctcaatc

SEQ ID NO: 767536 - DNA, 15 bp, Homo sapiens
tttttttctcaatcc

SEQ ID NO: 767537 - DNA, 15 bp, Homo sapiens
ttttttctcaatcct

SEQ ID NO: 767538 - DNA, 15 bp, Homo sapiens
tttttctcaatcctg

SEQ ID NO: 767539 - DNA, 15 bp, Homo sapiens
ttttctcaatcctgt

SEQ ID NO: 767540 - DNA, 15 bp, Homo sapiens
tttctcaatcctgtg

SEQ ID NO: 767541 - DNA, 15 bp, Homo sapiens
ttctcaatcctgtga

SEQ ID NO: 767542 - DNA, 15 bp, Homo sapiens
tctcaatcctgtgat

SEQ ID NO: 767543 - DNA, 15 bp, Homo sapiens
ctcaatcctgtgatt

SEQ ID NO: 767544 - DNA, 15 bp, Homo sapiens
tcaatcctgtgatta

SEQ ID NO: 767545 - DNA, 15 bp, Homo sapiens
caatcctgtgattac

SEQ ID NO: 767546 - DNA, 15 bp, Homo sapiens
aatcctgtgattacc

SEQ ID NO: 767547 - DNA, 15 bp, Homo sapiens
atcctgtgattacca

SEQ ID NO: 767548 - DNA, 15 bp, Homo sapiens
tcctgtgattaccat

SEQ ID NO: 767549 - DNA, 15 bp, Homo sapiens
cctgtgattaccatg

SEQ ID NO: 767550 - DNA, 15 bp, Homo sapiens
ctgtgattaccatga

SEQ ID NO: 767551 - DNA, 15 bp, Homo sapiens
tgtgattaccatgag

SEQ ID NO: 767552 - DNA, 15 bp, Homo sapiens
gtgattaccatgaga

SEQ ID NO: 767553 - DNA, 15 bp, Homo sapiens
tgattaccatgagat

SEQ ID NO: 767554 - DNA, 15 bp, Homo sapiens
gattaccatgagata

SEQ ID NO: 767555 - DNA, 15 bp, Homo sapiens
attaccatgagataa

SEQ ID NO: 767556 - DNA, 15 bp, Homo sapiens
ttaccatgagataaa

SEQ ID NO: 767557 - DNA, 15 bp, Homo sapiens
taccatgagataaaa

SEQ ID NO: 767558 - DNA, 15 bp, Homo sapiens
accatgagataaaat

SEQ ID NO: 767559 - DNA, 15 bp, Homo sapiens
ccatgagataaaata

SEQ ID NO: 767560 - DNA, 15 bp, Homo sapiens
catgagataaaataa

SEQ ID NO: 767561 - DNA, 15 bp, Homo sapiens
atgagataaaataat

SEQ ID NO: 767562 - DNA, 15 bp, Homo sapiens
tgagataaaataatg

SEQ ID NO: 767563 - DNA, 15 bp, Homo sapiens
gagataaaataatgt

SEQ ID NO: 767564 - DNA, 15 bp, Homo sapiens
agataaaataatgtt

SEQ ID NO: 767565 - DNA, 15 bp, Homo sapiens
gataaaataatgttt

SEQ ID NO: 767566 - DNA, 15 bp, Homo sapiens
ataaaataatgttta

SEQ ID NO: 767567 - DNA, 15 bp, Homo sapiens
taaaataatgtttaa

SEQ ID NO: 767568 - DNA, 15 bp, Homo sapiens
aaaataatgtttaat

SEQ ID NO: 767569 - DNA, 15 bp, Homo sapiens
aaataatgtttaata

SEQ ID NO: 767570 - DNA, 15 bp, Homo sapiens
aataatgtttaatat

SEQ ID NO: 767571 - DNA, 15 bp, Homo sapiens
ataatgtttaatata

SEQ ID NO: 767572 - DNA, 15 bp, Homo sapiens
taatgtttaatataa

SEQ ID NO: 767573 - DNA, 15 bp, Homo sapiens
aatgtttaatataat

SEQ ID NO: 767574 - DNA, 15 bp, Homo sapiens
atgtttaatataata

SEQ ID NO: 767575 - DNA, 15 bp, Homo sapiens
tgtttaatataatat

SEQ ID NO: 767576 - DNA, 15 bp, Homo sapiens
gtttaatataatatt

SEQ ID NO: 767577 - DNA, 15 bp, Homo sapiens
tttaatataatattg

SEQ ID NO: 767578 - DNA, 15 bp, Homo sapiens
ttaatataatattgc

SEQ ID NO: 767579 - DNA, 15 bp, Homo sapiens
taatataatattgcc

SEQ ID NO: 767580 - DNA, 15 bp, Homo sapiens
aatataatattgcct

SEQ ID NO: 767581 - DNA, 15 bp, Homo sapiens
atataatattgcctg

SEQ ID NO: 767582 - DNA, 15 bp, Homo sapiens
tataatattgcctgg

SEQ ID NO: 767583 - DNA, 15 bp, Homo sapiens
ataatattgcctggc

SEQ ID NO: 767584 - DNA, 15 bp, Homo sapiens
taatattgcctggcc

SEQ ID NO: 767585 - DNA, 15 bp, Homo sapiens
aatattgcctggcca

SEQ ID NO: 767586 - DNA, 15 bp, Homo sapiens
atattgcctggccag

SEQ ID NO: 767587 - DNA, 15 bp, Homo sapiens
tattgcctggccagg

SEQ ID NO: 767588 - DNA, 15 bp, Homo sapiens
attgcctggccaggc

SEQ ID NO: 767589 - DNA, 15 bp, Homo sapiens
ttgcctggccaggcg

SEQ ID NO: 767590 - DNA, 15 bp, Homo sapiens
tgcctggccaggcgt

SEQ ID NO: 767591 - DNA, 15 bp, Homo sapiens
gcctggccaggcgta

SEQ ID NO: 767592 - DNA, 15 bp, Homo sapiens
cctggccaggcgtag

SEQ ID NO: 767593 - DNA, 15 bp, Homo sapiens
ctggccaggcgtagt

SEQ ID NO: 767594 - DNA, 15 bp, Homo sapiens
tggccaggcgtagtg

SEQ ID NO: 767595 - DNA, 15 bp, Homo sapiens
ggccaggcgtagtgg

SEQ ID NO: 767596 - DNA, 15 bp, Homo sapiens
gccaggcgtagtggc

SEQ ID NO: 767597 - DNA, 15 bp, Homo sapiens
ccaggcgtagtggct

SEQ ID NO: 767598 - DNA, 15 bp, Homo sapiens
caggcgtagtggctt

SEQ ID NO: 767599 - DNA, 15 bp, Homo sapiens
aggcgtagtggctta

SEQ ID NO: 767600 - DNA, 15 bp, Homo sapiens
ggcgtagtggcttac

SEQ ID NO: 767601 - DNA, 15 bp, Homo sapiens
gcgtagtggcttaca

SEQ ID NO: 767602 - DNA, 15 bp, Homo sapiens
cgtagtggcttacac

SEQ ID NO: 767603 - DNA, 15 bp, Homo sapiens
gtagtggcttacacc

SEQ ID NO: 767604 - DNA, 15 bp, Homo sapiens
tagtggcttacacct

SEQ ID NO: 767605 - DNA, 15 bp, Homo sapiens
agtggcttacacctg

SEQ ID NO: 767606 - DNA, 15 bp, Homo sapiens
gtggcttacacctgt

SEQ ID NO: 767607 - DNA, 15 bp, Homo sapiens
tggcttacacctgta

SEQ ID NO: 767608 - DNA, 15 bp, Homo sapiens
ggcttacacctgtaa

SEQ ID NO: 767609 - DNA, 15 bp, Homo sapiens
gcttacacctgtaat

SEQ ID NO: 767610 - DNA, 15 bp, Homo sapiens
cttacacctgtaatc

SEQ ID NO: 767611 - DNA, 15 bp, Homo sapiens
ttacacctgtaatcc

SEQ ID NO: 767612 - DNA, 15 bp, Homo sapiens
tacacctgtaatcct

SEQ ID NO: 767613 - DNA, 15 bp, Homo sapiens
acacctgtaatccta

SEQ ID NO: 767614 - DNA, 15 bp, Homo sapiens
cacctgtaatcctag

SEQ ID NO: 767615 - DNA, 15 bp, Homo sapiens
acctgtaatcctagc

SEQ ID NO: 767616 - DNA, 15 bp, Homo sapiens
cctgtaatcctagca

SEQ ID NO: 767617 - DNA, 15 bp, Homo sapiens
ctgtaatcctagcac

SEQ ID NO: 767618 - DNA, 15 bp, Homo sapiens
tgtaatcctagcact

SEQ ID NO: 767619 - DNA, 15 bp, Homo sapiens
gtaatcctagcactt

SEQ ID NO: 767620 - DNA, 15 bp, Homo sapiens
ggaggctgaggtgga

SEQ ID NO: 767621 - DNA, 15 bp, Homo sapiens
gaggctgaggtggat

SEQ ID NO: 767622 - DNA, 15 bp, Homo sapiens
aggctgaggtggatg

SEQ ID NO: 767623 - DNA, 15 bp, Homo sapiens
ggctgaggtggatgg

SEQ ID NO: 767624 - DNA, 15 bp, Homo sapiens
gctgaggtggatgga

SEQ ID NO: 767625 - DNA, 15 bp, Homo sapiens
ctgaggtggatggat

SEQ ID NO: 767626 - DNA, 15 bp, Homo sapiens
tgaggtggatggatc

SEQ ID NO: 767627 - DNA, 15 bp, Homo sapiens
gaggtggatggatca

SEQ ID NO: 767628 - DNA, 15 bp, Homo sapiens
aggtggatggatcac

SEQ ID NO: 767629 - DNA, 15 bp, Homo sapiens
ggtggatggatcacc

SEQ ID NO: 767630 - DNA, 15 bp, Homo sapiens
gtggatggatcacct

SEQ ID NO: 767631 - DNA, 15 bp, Homo sapiens
tggatggatcacctg

SEQ ID NO: 767632 - DNA, 15 bp, Homo sapiens
ggatggatcacctga

SEQ ID NO: 767633 - DNA, 15 bp, Homo sapiens
gatggatcacctgat

SEQ ID NO: 767634 - DNA, 15 bp, Homo sapiens
atggatcacctgatg

SEQ ID NO: 767635 - DNA, 15 bp, Homo sapiens
tggatcacctgatgt

SEQ ID NO: 767636 - DNA, 15 bp, Homo sapiens
ggatcacctgatgtc

SEQ ID NO: 767637 - DNA, 15 bp, Homo sapiens
gatcacctgatgtca

SEQ ID NO: 767638 - DNA, 15 bp, Homo sapiens
atcacctgatgtcag

SEQ ID NO: 767639 - DNA, 15 bp, Homo sapiens
tcacctgatgtcagg

SEQ ID NO: 767640 - DNA, 15 bp, Homo sapiens
cacctgatgtcagga

SEQ ID NO: 767641 - DNA, 15 bp, Homo sapiens
acctgatgtcaggag

SEQ ID NO: 767642 - DNA, 15 bp, Homo sapiens
cctgatgtcaggagt

SEQ ID NO: 767643 - DNA, 15 bp, Homo sapiens
ctgatgtcaggagtt

SEQ ID NO: 767644 - DNA, 15 bp, Homo sapiens
tgatgtcaggagttt

SEQ ID NO: 767645 - DNA, 15 bp, Homo sapiens
gatgtcaggagtttg

SEQ ID NO: 767646 - DNA, 15 bp, Homo sapiens
atgtcaggagtttga

SEQ ID NO: 767647 - DNA, 15 bp, Homo sapiens
tgtcaggagtttgag

SEQ ID NO: 767648 - DNA, 15 bp, Homo sapiens
gtcaggagtttgaga

SEQ ID NO: 767649 - DNA, 15 bp, Homo sapiens
tcaggagtttgagac

SEQ ID NO: 767650 - DNA, 15 bp, Homo sapiens
caggagtttgagacc

SEQ ID NO: 767651 - DNA, 15 bp, Homo sapiens
aggagtttgagacca

SEQ ID NO: 767652 - DNA, 15 bp, Homo sapiens
caacatggtgaaact

SEQ ID NO: 767653 - DNA, 15 bp, Homo sapiens
aacatggtgaaactt

SEQ ID NO: 767654 - DNA, 15 bp, Homo sapiens
acatggtgaaacttg

SEQ ID NO: 767655 - DNA, 15 bp, Homo sapiens
catggtgaaacttgg

SEQ ID NO: 767656 - DNA, 15 bp, Homo sapiens
atggtgaaacttggt

SEQ ID NO: 767657 - DNA, 15 bp, Homo sapiens
tggtgaaacttggtc

SEQ ID NO: 767658 - DNA, 15 bp, Homo sapiens
ggtgaaacttggtct

SEQ ID NO: 767659 - DNA, 15 bp, Homo sapiens
gtgaaacttggtctc

SEQ ID NO: 767660 - DNA, 15 bp, Homo sapiens
tgaaacttggtctct

SEQ ID NO: 767661 - DNA, 15 bp, Homo sapiens
gaaacttggtctcta

SEQ ID NO: 767662 - DNA, 15 bp, Homo sapiens
aaacttggtctctac

SEQ ID NO: 767663 - DNA, 15 bp, Homo sapiens
aacttggtctctact

SEQ ID NO: 767664 - DNA, 15 bp, Homo sapiens
acttggtctctacta

SEQ ID NO: 767665 - DNA, 15 bp, Homo sapiens
cttggtctctactaa

SEQ ID NO: 767666 - DNA, 15 bp, Homo sapiens
ttggtctctactaaa

SEQ ID NO: 767667 - DNA, 15 bp, Homo sapiens
tggtctctactaaaa

SEQ ID NO: 767668 - DNA, 15 bp, Homo sapiens
ggtctctactaaaaa

SEQ ID NO: 767669 - DNA, 15 bp, Homo sapiens
tgggtgtggtggcgg

SEQ ID NO: 767670 - DNA, 15 bp, Homo sapiens
gggtgtggtggcggg

SEQ ID NO: 767671 - DNA, 15 bp, Homo sapiens
ggtgtggtggcgggc

SEQ ID NO: 767672 - DNA, 15 bp, Homo sapiens
gtgtggtggcgggcg

SEQ ID NO: 767673 - DNA, 15 bp, Homo sapiens
tgtggtggcgggcgc

SEQ ID NO: 767674 - DNA, 15 bp, Homo sapiens
gtggtggcgggcgcc

SEQ ID NO: 767675 - DNA, 15 bp, Homo sapiens
tggtggcgggcgcct

SEQ ID NO: 767676 - DNA, 15 bp, Homo sapiens
ggtggcgggcgcctg

SEQ ID NO: 767677 - DNA, 15 bp, Homo sapiens
ggcgggcgcctgtaa

SEQ ID NO: 767678 - DNA, 15 bp, Homo sapiens
gcgggcgcctgtaat

SEQ ID NO: 767679 - DNA, 15 bp, Homo sapiens
cgggcgcctgtaatc

SEQ ID NO: 767680 - DNA, 15 bp, Homo sapiens
gggcgcctgtaatcc

SEQ ID NO: 767681 - DNA, 15 bp, Homo sapiens
ggcgcctgtaatccc

SEQ ID NO: 767682 - DNA, 15 bp, Homo sapiens
gcgcctgtaatccca

SEQ ID NO: 767683 - DNA, 15 bp, Homo sapiens
tgtaatcccagctat

SEQ ID NO: 767684 - DNA, 15 bp, Homo sapiens
gtaatcccagctatt

SEQ ID NO: 767685 - DNA, 15 bp, Homo sapiens
taatcccagctattc

SEQ ID NO: 767686 - DNA, 15 bp, Homo sapiens
aatcccagctattca

SEQ ID NO: 767687 - DNA, 15 bp, Homo sapiens
atcccagctattcag

SEQ ID NO: 767688 - DNA, 15 bp, Homo sapiens
tcccagctattcagg

SEQ ID NO: 767689 - DNA, 15 bp, Homo sapiens
cccagctattcaggt

SEQ ID NO: 767690 - DNA, 15 bp, Homo sapiens
ccagctattcaggtt

SEQ ID NO: 767691 - DNA, 15 bp, Homo sapiens
cagctattcaggttg

SEQ ID NO: 767692 - DNA, 15 bp, Homo sapiens
agctattcaggttgt

SEQ ID NO: 767693 - DNA, 15 bp, Homo sapiens
gctattcaggttgtt

SEQ ID NO: 767694 - DNA, 15 bp, Homo sapiens
ctattcaggttgttg

SEQ ID NO: 767695 - DNA, 15 bp, Homo sapiens
tattcaggttgttga

SEQ ID NO: 767696 - DNA, 15 bp, Homo sapiens
attcaggttgttgag

SEQ ID NO: 767697 - DNA, 15 bp, Homo sapiens
ttcaggttgttgagg

SEQ ID NO: 767698 - DNA, 15 bp, Homo sapiens
tcaggttgttgaggc

SEQ ID NO: 767699 - DNA, 15 bp, Homo sapiens
caggttgttgaggca

SEQ ID NO: 767700 - DNA, 15 bp, Homo sapiens
aggttgttgaggcag

SEQ ID NO: 767701 - DNA, 15 bp, Homo sapiens
ggttgttgaggcagg

SEQ ID NO: 767702 - DNA, 15 bp, Homo sapiens
gttgttgaggcagga

SEQ ID NO: 767703 - DNA, 15 bp, Homo sapiens
ttgttgaggcaggac

SEQ ID NO: 767704 - DNA, 15 bp, Homo sapiens
tgttgaggcaggaca

SEQ ID NO: 767705 - DNA, 15 bp, Homo sapiens
gttgaggcaggacaa

SEQ ID NO: 767706 - DNA, 15 bp, Homo sapiens
ttgaggcaggacaat

SEQ ID NO: 767707 - DNA, 15 bp, Homo sapiens
tgaggcaggacaatc

SEQ ID NO: 767708 - DNA, 15 bp, Homo sapiens
gaggcaggacaatcg

SEQ ID NO: 767709 - DNA, 15 bp, Homo sapiens
aggcaggacaatcgc

SEQ ID NO: 767710 - DNA, 15 bp, Homo sapiens
ggcaggacaatcgct

SEQ ID NO: 767711 - DNA, 15 bp, Homo sapiens
gcaggacaatcgctt

SEQ ID NO: 767712 - DNA, 15 bp, Homo sapiens
caggacaatcgcttg

SEQ ID NO: 767713 - DNA, 15 bp, Homo sapiens
aggacaatcgcttga

SEQ ID NO: 767714 - DNA, 15 bp, Homo sapiens
ggacaatcgcttgaa

SEQ ID NO: 767715 - DNA, 15 bp, Homo sapiens
gacaatcgcttgaac

SEQ ID NO: 767716 - DNA, 15 bp, Homo sapiens
acaatcgcttgaacc

SEQ ID NO: 767717 - DNA, 15 bp, Homo sapiens
caatcgcttgaacct

SEQ ID NO: 767718 - DNA, 15 bp, Homo sapiens
aatcgcttgaacctg

SEQ ID NO: 767719 - DNA, 15 bp, Homo sapiens
atcgcttgaacctgg

SEQ ID NO: 767720 - DNA, 15 bp, Homo sapiens
tcgcttgaacctggg

SEQ ID NO: 767721 - DNA, 15 bp, Homo sapiens
cgcttgaacctggga

SEQ ID NO: 767722 - DNA, 15 bp, Homo sapiens
gcttgaacctgggag

SEQ ID NO: 767723 - DNA, 15 bp, Homo sapiens
tgaacctgggaggcg

SEQ ID NO: 767724 - DNA, 15 bp, Homo sapiens
gaacctgggaggcgg

SEQ ID NO: 767725 - DNA, 15 bp, Homo sapiens
aacctgggaggcgga

SEQ ID NO: 767726 - DNA, 15 bp, Homo sapiens
acctgggaggcggag

SEQ ID NO: 767727 - DNA, 15 bp, Homo sapiens
cctgggaggcggagg

SEQ ID NO: 767728 - DNA, 15 bp, Homo sapiens
ctccagcctgggcgg

SEQ ID NO: 767729 - DNA, 15 bp, Homo sapiens
tccagcctgggcggc

SEQ ID NO: 767730 - DNA, 15 bp, Homo sapiens
ccagcctgggcggca

SEQ ID NO: 767731 - DNA, 15 bp, Homo sapiens
cagcctgggcggcag

SEQ ID NO: 767732 - DNA, 15 bp, Homo sapiens
agcctgggcggcaga

SEQ ID NO: 767733 - DNA, 15 bp, Homo sapiens
gcctgggcggcagag

SEQ ID NO: 767734 - DNA, 15 bp, Homo sapiens
cctgggcggcagagt

SEQ ID NO: 767735 - DNA, 15 bp, Homo sapiens
ctgggcggcagagtg

SEQ ID NO: 767736 - DNA, 15 bp, Homo sapiens
tgggcggcagagtga

SEQ ID NO: 767737 - DNA, 15 bp, Homo sapiens
gggcggcagagtgag

SEQ ID NO: 767738 - DNA, 15 bp, Homo sapiens
ggcggcagagtgaga

SEQ ID NO: 767739 - DNA, 15 bp, Homo sapiens
gcggcagagtgagac

SEQ ID NO: 767740 - DNA, 15 bp, Homo sapiens
cggcagagtgagact

SEQ ID NO: 767741 - DNA, 15 bp, Homo sapiens
ggcagagtgagactc

SEQ ID NO: 767742 - DNA, 15 bp, Homo sapiens
gcagagtgagactct

SEQ ID NO: 767743 - DNA, 15 bp, Homo sapiens
tgtctcaaaaaaaac

SEQ ID NO: 767744 - DNA, 15 bp, Homo sapiens
gtctcaaaaaaaaca

SEQ ID NO: 767745 - DNA, 15 bp, Homo sapiens
tctcaaaaaaaacaa

SEQ ID NO: 767746 - DNA, 15 bp, Homo sapiens
ctcaaaaaaaacaaa

SEQ ID NO: 767747 - DNA, 15 bp, Homo sapiens
tcaaaaaaaacaaaa

SEQ ID NO: 767748 - DNA, 15 bp, Homo sapiens
caaaaaaaacaaaat

SEQ ID NO: 767749 - DNA, 15 bp, Homo sapiens
aaaaaaaacaaaata

SEQ ID NO: 767750 - DNA, 15 bp, Homo sapiens
aaaaaaacaaaatat

SEQ ID NO: 767751 - DNA, 15 bp, Homo sapiens
aaaaaacaaaatata

SEQ ID NO: 767752 - DNA, 15 bp, Homo sapiens
aaaaacaaaatataa

SEQ ID NO: 767753 - DNA, 15 bp, Homo sapiens
aaaacaaaatataat

SEQ ID NO: 767754 - DNA, 15 bp, Homo sapiens
aaacaaaatataata

SEQ ID NO: 767755 - DNA, 15 bp, Homo sapiens
aacaaaatataatat

SEQ ID NO: 767756 - DNA, 15 bp, Homo sapiens
acaaaatataatatt

SEQ ID NO: 767757 - DNA, 15 bp, Homo sapiens
caaaatataatattg

SEQ ID NO: 767758 - DNA, 15 bp, Homo sapiens
aaaatataatattgc

SEQ ID NO: 767759 - DNA, 15 bp, Homo sapiens
aaatataatattgcc

SEQ ID NO: 767760 - DNA, 15 bp, Homo sapiens
atataatattgcctt

SEQ ID NO: 767761 - DNA, 15 bp, Homo sapiens
tataatattgccttt

SEQ ID NO: 767762 - DNA, 15 bp, Homo sapiens
ataatattgcctttc

SEQ ID NO: 767763 - DNA, 15 bp, Homo sapiens
taatattgcctttcc

SEQ ID NO: 767764 - DNA, 15 bp, Homo sapiens
aatattgcctttccc

SEQ ID NO: 767765 - DNA, 15 bp, Homo sapiens
atattgcctttccca

SEQ ID NO: 767766 - DNA, 15 bp, Homo sapiens
tattgcctttcccat

SEQ ID NO: 767767 - DNA, 15 bp, Homo sapiens
attgcctttcccata

SEQ ID NO: 767768 - DNA, 15 bp, Homo sapiens
ttgcctttcccataa

SEQ ID NO: 767769 - DNA, 15 bp, Homo sapiens
tgcctttcccataaa

SEQ ID NO: 767770 - DNA, 15 bp, Homo sapiens
gcctttcccataaat

SEQ ID NO: 767771 - DNA, 15 bp, Homo sapiens
cctttcccataaata

SEQ ID NO: 767772 - DNA, 15 bp, Homo sapiens
ctttcccataaataa

SEQ ID NO: 767773 - DNA, 15 bp, Homo sapiens
tttcccataaataaa

SEQ ID NO: 767774 - DNA, 15 bp, Homo sapiens
ttcccataaataaat

SEQ ID NO: 767775 - DNA, 15 bp, Homo sapiens
tcccataaataaatg

SEQ ID NO: 767776 - DNA, 15 bp, Homo sapiens
cccataaataaatgg

SEQ ID NO: 767777 - DNA, 15 bp, Homo sapiens
ccataaataaatggg

SEQ ID NO: 767778 - DNA, 15 bp, Homo sapiens
cataaataaatggga

SEQ ID NO: 767779 - DNA, 15 bp, Homo sapiens
ataaataaatgggaa

SEQ ID NO: 767780 - DNA, 15 bp, Homo sapiens
taaataaatgggaaa

SEQ ID NO: 767781 - DNA, 15 bp, Homo sapiens
aaataaatgggaaaa

SEQ ID NO: 767782 - DNA, 15 bp, Homo sapiens
aataaatgggaaaat

SEQ ID NO: 767783 - DNA, 15 bp, Homo sapiens
ataaatgggaaaata

SEQ ID NO: 767784 - DNA, 15 bp, Homo sapiens
taaatgggaaaataa

SEQ ID NO: 767785 - DNA, 15 bp, Homo sapiens
aaatgggaaaataaa

SEQ ID NO: 767786 - DNA, 15 bp, Homo sapiens
aatgggaaaataaat

SEQ ID NO: 767787 - DNA, 15 bp, Homo sapiens
atgggaaaataaatc

SEQ ID NO: 767788 - DNA, 15 bp, Homo sapiens
tgggaaaataaatcc

SEQ ID NO: 767789 - DNA, 15 bp, Homo sapiens
gggaaaataaatcca

SEQ ID NO: 767790 - DNA, 15 bp, Homo sapiens
ggaaaataaatccaa

SEQ ID NO: 767791 - DNA, 15 bp, Homo sapiens
gaaaataaatccaat

SEQ ID NO: 767792 - DNA, 15 bp, Homo sapiens
aaaataaatccaatt

SEQ ID NO: 767793 - DNA, 15 bp, Homo sapiens
aaataaatccaattc

SEQ ID NO: 767794 - DNA, 15 bp, Homo sapiens
aataaatccaattcc

SEQ ID NO: 767795 - DNA, 15 bp, Homo sapiens
ataaatccaattcct

SEQ ID NO: 767796 - DNA, 15 bp, Homo sapiens
taaatccaattcctg

SEQ ID NO: 767797 - DNA, 15 bp, Homo sapiens
aaatccaattcctgc

SEQ ID NO: 767798 - DNA, 15 bp, Homo sapiens
aatccaattcctgcc

SEQ ID NO: 767799 - DNA, 15 bp, Homo sapiens
atccaattcctgccc

SEQ ID NO: 767800 - DNA, 15 bp, Homo sapiens
tccaattcctgccct

SEQ ID NO: 767801 - DNA, 15 bp, Homo sapiens
ccaattcctgccctt

SEQ ID NO: 767802 - DNA, 15 bp, Homo sapiens
caattcctgcccttt

SEQ ID NO: 767803 - DNA, 15 bp, Homo sapiens
aattcctgccctttt

SEQ ID NO: 767804 - DNA, 15 bp, Homo sapiens
attcctgccctttta

SEQ ID NO: 767805 - DNA, 15 bp, Homo sapiens
ttcctgcccttttaa

SEQ ID NO: 767806 - DNA, 15 bp, Homo sapiens
tcctgcccttttaaa

SEQ ID NO: 767807 - DNA, 15 bp, Homo sapiens
cctgcccttttaaag

SEQ ID NO: 767808 - DNA, 15 bp, Homo sapiens
ctgcccttttaaaga

SEQ ID NO: 767809 - DNA, 15 bp, Homo sapiens
tgcccttttaaagac

SEQ ID NO: 767810 - DNA, 15 bp, Homo sapiens
gcccttttaaagaca

SEQ ID NO: 767811 - DNA, 15 bp, Homo sapiens
cccttttaaagacaa

SEQ ID NO: 767812 - DNA, 15 bp, Homo sapiens
ccttttaaagacaat

SEQ ID NO: 767813 - DNA, 15 bp, Homo sapiens
cttttaaagacaatt

SEQ ID NO: 767814 - DNA, 15 bp, Homo sapiens
ttttaaagacaatta

SEQ ID NO: 767815 - DNA, 15 bp, Homo sapiens
tttaaagacaattaa

SEQ ID NO: 767816 - DNA, 15 bp, Homo sapiens
ttaaagacaattaaa

SEQ ID NO: 767817 - DNA, 15 bp, Homo sapiens
taaagacaattaaaa

SEQ ID NO: 767818 - DNA, 15 bp, Homo sapiens
aaagacaattaaaag

SEQ ID NO: 767819 - DNA, 15 bp, Homo sapiens
aagacaattaaaagg

SEQ ID NO: 767820 - DNA, 15 bp, Homo sapiens
agacaattaaaagga

SEQ ID NO: 767821 - DNA, 15 bp, Homo sapiens
gacaattaaaaggag

SEQ ID NO: 767822 - DNA, 15 bp, Homo sapiens
acaattaaaaggagt

SEQ ID NO: 767823 - DNA, 15 bp, Homo sapiens
caattaaaaggagtt

SEQ ID NO: 767824 - DNA, 15 bp, Homo sapiens
aattaaaaggagttt

SEQ ID NO: 767825 - DNA, 15 bp, Homo sapiens
attaaaaggagtttt

SEQ ID NO: 767826 - DNA, 15 bp, Homo sapiens
ttaaaaggagtttta

SEQ ID NO: 767827 - DNA, 15 bp, Homo sapiens
taaaaggagttttag

SEQ ID NO: 767828 - DNA, 15 bp, Homo sapiens
aaaaggagttttagg

SEQ ID NO: 767829 - DNA, 15 bp, Homo sapiens
aaaggagttttaggt

SEQ ID NO: 767830 - DNA, 15 bp, Homo sapiens
aaggagttttaggtc

SEQ ID NO: 767831 - DNA, 15 bp, Homo sapiens
aggagttttaggtcc

SEQ ID NO: 767832 - DNA, 15 bp, Homo sapiens
ggagttttaggtcct

SEQ ID NO: 767833 - DNA, 15 bp, Homo sapiens
gagttttaggtcctg

SEQ ID NO: 767834 - DNA, 15 bp, Homo sapiens
agttttaggtcctgc

SEQ ID NO: 767835 - DNA, 15 bp, Homo sapiens
gttttaggtcctgcc

SEQ ID NO: 767836 - DNA, 15 bp, Homo sapiens
ttttaggtcctgcca

SEQ ID NO: 767837 - DNA, 15 bp, Homo sapiens
tttaggtcctgccat

SEQ ID NO: 767838 - DNA, 15 bp, Homo sapiens
ttaggtcctgccatt

SEQ ID NO: 767839 - DNA, 15 bp, Homo sapiens
taggtcctgccattt

SEQ ID NO: 767840 - DNA, 15 bp, Homo sapiens
aggtcctgccatttt

SEQ ID NO: 767841 - DNA, 15 bp, Homo sapiens
ggtcctgccatttta

SEQ ID NO: 767842 - DNA, 15 bp, Homo sapiens
gtcctgccattttaa

SEQ ID NO: 767843 - DNA, 15 bp, Homo sapiens
tcctgccattttaaa

SEQ ID NO: 767844 - DNA, 15 bp, Homo sapiens
cctgccattttaaag

SEQ ID NO: 767845 - DNA, 15 bp, Homo sapiens
ctgccattttaaaga

SEQ ID NO: 767846 - DNA, 15 bp, Homo sapiens
tgccattttaaagac

SEQ ID NO: 767847 - DNA, 15 bp, Homo sapiens
gccattttaaagaca

SEQ ID NO: 767848 - DNA, 15 bp, Homo sapiens
ccattttaaagacaa

SEQ ID NO: 767849 - DNA, 15 bp, Homo sapiens
cattttaaagacaat

SEQ ID NO: 767850 - DNA, 15 bp, Homo sapiens
attttaaagacaatt

SEQ ID NO: 767851 - DNA, 15 bp, Homo sapiens
cctgccattttaaac

SEQ ID NO: 767852 - DNA, 15 bp, Homo sapiens
ctgccattttaaaca

SEQ ID NO: 767853 - DNA, 15 bp, Homo sapiens
tgccattttaaacac

SEQ ID NO: 767854 - DNA, 15 bp, Homo sapiens
gccattttaaacaca

SEQ ID NO: 767855 - DNA, 15 bp, Homo sapiens
ccattttaaacacaa

SEQ ID NO: 767856 - DNA, 15 bp, Homo sapiens
cattttaaacacaat

SEQ ID NO: 767857 - DNA, 15 bp, Homo sapiens
attttaaacacaatt

SEQ ID NO: 767858 - DNA, 15 bp, Homo sapiens
ttttaaacacaatta

SEQ ID NO: 767859 - DNA, 15 bp, Homo sapiens
tttaaacacaattaa

SEQ ID NO: 767860 - DNA, 15 bp, Homo sapiens
ttaaacacaattaaa

SEQ ID NO: 767861 - DNA, 15 bp, Homo sapiens
taaacacaattaaaa

SEQ ID NO: 767862 - DNA, 15 bp, Homo sapiens
aaacacaattaaaag

SEQ ID NO: 767863 - DNA, 15 bp, Homo sapiens
aacacaattaaaagg

SEQ ID NO: 767864 - DNA, 15 bp, Homo sapiens
acacaattaaaaggg

SEQ ID NO: 767865 - DNA, 15 bp, Homo sapiens
cacaattaaaagggg

SEQ ID NO: 767866 - DNA, 15 bp, Homo sapiens
acaattaaaaggggt

SEQ ID NO: 767867 - DNA, 15 bp, Homo sapiens
caattaaaaggggtt

SEQ ID NO: 767868 - DNA, 15 bp, Homo sapiens
aattaaaaggggttt

SEQ ID NO: 767869 - DNA, 15 bp, Homo sapiens
attaaaaggggtttt

SEQ ID NO: 767870 - DNA, 15 bp, Homo sapiens
ttaaaaggggtttta

SEQ ID NO: 767871 - DNA, 15 bp, Homo sapiens
taaaaggggttttag

SEQ ID NO: 767872 - DNA, 15 bp, Homo sapiens
aaaaggggttttagg

SEQ ID NO: 767873 - DNA, 15 bp, Homo sapiens
aaaggggttttaggt

SEQ ID NO: 767874 - DNA, 15 bp, Homo sapiens
aaggggttttaggtc

SEQ ID NO: 767875 - DNA, 15 bp, Homo sapiens
aggggttttaggtcc

SEQ ID NO: 767876 - DNA, 15 bp, Homo sapiens
ggggttttaggtcct

SEQ ID NO: 767877 - DNA, 15 bp, Homo sapiens
gggttttaggtcctg

SEQ ID NO: 767878 - DNA, 15 bp, Homo sapiens
ggttttaggtcctgc

SEQ ID NO: 767879 - DNA, 15 bp, Homo sapiens
ttaaaaggagttttg

SEQ ID NO: 767880 - DNA, 15 bp, Homo sapiens
taaaaggagttttgg

SEQ ID NO: 767881 - DNA, 15 bp, Homo sapiens
aaaaggagttttggg

SEQ ID NO: 767882 - DNA, 15 bp, Homo sapiens
aaaggagttttgggt

SEQ ID NO: 767883 - DNA, 15 bp, Homo sapiens
aaggagttttgggtc

SEQ ID NO: 767884 - DNA, 15 bp, Homo sapiens
aggagttttgggtct

SEQ ID NO: 767885 - DNA, 15 bp, Homo sapiens
ggagttttgggtctc

SEQ ID NO: 767886 - DNA, 15 bp, Homo sapiens
gagttttgggtctct

SEQ ID NO: 767887 - DNA, 15 bp, Homo sapiens
agttttgggtctctg

SEQ ID NO: 767888 - DNA, 15 bp, Homo sapiens
gttttgggtctctga

SEQ ID NO: 767889 - DNA, 15 bp, Homo sapiens
ttttgggtctctgag

SEQ ID NO: 767890 - DNA, 15 bp, Homo sapiens
tttgggtctctgaga

SEQ ID NO: 767891 - DNA, 15 bp, Homo sapiens
ttgggtctctgagat

SEQ ID NO: 767892 - DNA, 15 bp, Homo sapiens
tgggtctctgagatg

SEQ ID NO: 767893 - DNA, 15 bp, Homo sapiens
gggtctctgagatgt

SEQ ID NO: 767894 - DNA, 15 bp, Homo sapiens
ggtctctgagatgtg

SEQ ID NO: 767895 - DNA, 15 bp, Homo sapiens
gtctctgagatgtgt

SEQ ID NO: 767896 - DNA, 15 bp, Homo sapiens
tctctgagatgtgtg

SEQ ID NO: 767897 - DNA, 15 bp, Homo sapiens
ctctgagatgtgtgg

SEQ ID NO: 767898 - DNA, 15 bp, Homo sapiens
tctgagatgtgtggg

SEQ ID NO: 767899 - DNA, 15 bp, Homo sapiens
ctgagatgtgtgggc

SEQ ID NO: 767900 - DNA, 15 bp, Homo sapiens
tgagatgtgtgggct

SEQ ID NO: 767901 - DNA, 15 bp, Homo sapiens
gagatgtgtgggctg

SEQ ID NO: 767902 - DNA, 15 bp, Homo sapiens
agatgtgtgggctgt

SEQ ID NO: 767903 - DNA, 15 bp, Homo sapiens
gatgtgtgggctgtg

SEQ ID NO: 767904 - DNA, 15 bp, Homo sapiens
atgtgtgggctgtgg

SEQ ID NO: 767905 - DNA, 15 bp, Homo sapiens
tgtgtgggctgtggg

SEQ ID NO: 767906 - DNA, 15 bp, Homo sapiens
gtgtgggctgtgggg

SEQ ID NO: 767907 - DNA, 15 bp, Homo sapiens
tgtgggctgtgggga

SEQ ID NO: 767908 - DNA, 15 bp, Homo sapiens
gtgggctgtggggaa

SEQ ID NO: 767909 - DNA, 15 bp, Homo sapiens
tgggctgtggggaat

SEQ ID NO: 767910 - DNA, 15 bp, Homo sapiens
gggctgtggggaatc

SEQ ID NO: 767911 - DNA, 15 bp, Homo sapiens
ggctgtggggaatca

SEQ ID NO: 767912 - DNA, 15 bp, Homo sapiens
gctgtggggaatcag

SEQ ID NO: 767913 - DNA, 15 bp, Homo sapiens
ctgtggggaatcaga

SEQ ID NO: 767914 - DNA, 15 bp, Homo sapiens
tgtggggaatcagat

SEQ ID NO: 767915 - DNA, 15 bp, Homo sapiens
gtggggaatcagatt

SEQ ID NO: 767916 - DNA, 15 bp, Homo sapiens
tggggaatcagattg

SEQ ID NO: 767917 - DNA, 15 bp, Homo sapiens
ggggaatcagattgg

SEQ ID NO: 767918 - DNA, 15 bp, Homo sapiens
gggaatcagattggc

SEQ ID NO: 767919 - DNA, 15 bp, Homo sapiens
ggaatcagattggcc

SEQ ID NO: 767920 - DNA, 15 bp, Homo sapiens
gaatcagattggcca

SEQ ID NO: 767921 - DNA, 15 bp, Homo sapiens
aatcagattggccat

SEQ ID NO: 767922 - DNA, 15 bp, Homo sapiens
atcagattggccatt

SEQ ID NO: 767923 - DNA, 15 bp, Homo sapiens
tcagattggccattt

SEQ ID NO: 767924 - DNA, 15 bp, Homo sapiens
cagattggccatttg

SEQ ID NO: 767925 - DNA, 15 bp, Homo sapiens
agattggccatttgg

SEQ ID NO: 767926 - DNA, 15 bp, Homo sapiens
gattggccatttggc

SEQ ID NO: 767927 - DNA, 15 bp, Homo sapiens
attggccatttggct

SEQ ID NO: 767928 - DNA, 15 bp, Homo sapiens
ttggccatttggctt

SEQ ID NO: 767929 - DNA, 15 bp, Homo sapiens
tggccatttggcttt

SEQ ID NO: 767930 - DNA, 15 bp, Homo sapiens
ggccatttggctttt

SEQ ID NO: 767931 - DNA, 15 bp, Homo sapiens
gccatttggcttttt

SEQ ID NO: 767932 - DNA, 15 bp, Homo sapiens
ccatttggctttttt

SEQ ID NO: 767933 - DNA, 15 bp, Homo sapiens
catttggcttttttt

SEQ ID NO: 767934 - DNA, 15 bp, Homo sapiens
atttggctttttttc

SEQ ID NO: 767935 - DNA, 15 bp, Homo sapiens
tttggctttttttcc

SEQ ID NO: 767936 - DNA, 15 bp, Homo sapiens
ttggctttttttcct

SEQ ID NO: 767937 - DNA, 15 bp, Homo sapiens
tggctttttttcctg

SEQ ID NO: 767938 - DNA, 15 bp, Homo sapiens
ggctttttttcctgc

SEQ ID NO: 767939 - DNA, 15 bp, Homo sapiens
gctttttttcctgca

SEQ ID NO: 767940 - DNA, 15 bp, Homo sapiens
ctttttttcctgcag

SEQ ID NO: 767941 - DNA, 15 bp, Homo sapiens
tttttttcctgcagt

SEQ ID NO: 767942 - DNA, 15 bp, Homo sapiens
ttttttcctgcagtc

SEQ ID NO: 767943 - DNA, 15 bp, Homo sapiens
tttttcctgcagtct

SEQ ID NO: 767944 - DNA, 15 bp, Homo sapiens
ttttcctgcagtctt

SEQ ID NO: 767945 - DNA, 15 bp, Homo sapiens
tttcctgcagtctta

SEQ ID NO: 767946 - DNA, 15 bp, Homo sapiens
ttcctgcagtcttaa

SEQ ID NO: 767947 - DNA, 15 bp, Homo sapiens
tcctgcagtcttaac

SEQ ID NO: 767948 - DNA, 15 bp, Homo sapiens
cctgcagtcttaacc

SEQ ID NO: 767949 - DNA, 15 bp, Homo sapiens
ctgcagtcttaacca

SEQ ID NO: 767950 - DNA, 15 bp, Homo sapiens
tgcagtcttaaccac

SEQ ID NO: 767951 - DNA, 15 bp, Homo sapiens
gcagtcttaaccaca

SEQ ID NO: 767952 - DNA, 15 bp, Homo sapiens
cagtcttaaccacaa

SEQ ID NO: 767953 - DNA, 15 bp, Homo sapiens
agtcttaaccacaaa

SEQ ID NO: 767954 - DNA, 15 bp, Homo sapiens
gtcttaaccacaaaa

SEQ ID NO: 767955 - DNA, 15 bp, Homo sapiens
tcttaaccacaaaat

SEQ ID NO: 767956 - DNA, 15 bp, Homo sapiens
cttaaccacaaaatt

SEQ ID NO: 767957 - DNA, 15 bp, Homo sapiens
ttaaccacaaaattg

SEQ ID NO: 767958 - DNA, 15 bp, Homo sapiens
taaccacaaaattga

SEQ ID NO: 767959 - DNA, 15 bp, Homo sapiens
aaccacaaaattgag

SEQ ID NO: 767960 - DNA, 15 bp, Homo sapiens
accacaaaattgagc

SEQ ID NO: 767961 - DNA, 15 bp, Homo sapiens
ccacaaaattgagct

SEQ ID NO: 767962 - DNA, 15 bp, Homo sapiens
cacaaaattgagctc

SEQ ID NO: 767963 - DNA, 15 bp, Homo sapiens
acaaaattgagctct

SEQ ID NO: 767964 - DNA, 15 bp, Homo sapiens
caaaattgagctcta

SEQ ID NO: 767965 - DNA, 15 bp, Homo sapiens
aaaattgagctctaa

SEQ ID NO: 767966 - DNA, 15 bp, Homo sapiens
aaattgagctctaag

SEQ ID NO: 767967 - DNA, 15 bp, Homo sapiens
aattgagctctaagg

SEQ ID NO: 767968 - DNA, 15 bp, Homo sapiens
attgagctctaagga

SEQ ID NO: 767969 - DNA, 15 bp, Homo sapiens
ttgagctctaaggat

SEQ ID NO: 767970 - DNA, 15 bp, Homo sapiens
tgagctctaaggatt

SEQ ID NO: 767971 - DNA, 15 bp, Homo sapiens
gagctctaaggattc

SEQ ID NO: 767972 - DNA, 15 bp, Homo sapiens
agctctaaggattcc

SEQ ID NO: 767973 - DNA, 15 bp, Homo sapiens
gctctaaggattcct

SEQ ID NO: 767974 - DNA, 15 bp, Homo sapiens
ctctaaggattccta

SEQ ID NO: 767975 - DNA, 15 bp, Homo sapiens
tctaaggattcctac

SEQ ID NO: 767976 - DNA, 15 bp, Homo sapiens
ctaaggattcctaca

SEQ ID NO: 767977 - DNA, 15 bp, Homo sapiens
taaggattcctacac

SEQ ID NO: 767978 - DNA, 15 bp, Homo sapiens
aaggattcctacact

SEQ ID NO: 767979 - DNA, 15 bp, Homo sapiens
aggattcctacacta

SEQ ID NO: 767980 - DNA, 15 bp, Homo sapiens
ggattcctacactaa

SEQ ID NO: 767981 - DNA, 15 bp, Homo sapiens
gattcctacactaaa

SEQ ID NO: 767982 - DNA, 15 bp, Homo sapiens
attcctacactaaat

SEQ ID NO: 767983 - DNA, 15 bp, Homo sapiens
ttcctacactaaatg

SEQ ID NO: 767984 - DNA, 15 bp, Homo sapiens
tcctacactaaatgg

SEQ ID NO: 767985 - DNA, 15 bp, Homo sapiens
cctacactaaatggg

SEQ ID NO: 767986 - DNA, 15 bp, Homo sapiens
ctacactaaatgggg

SEQ ID NO: 767987 - DNA, 15 bp, Homo sapiens
tacactaaatgggga

SEQ ID NO: 767988 - DNA, 15 bp, Homo sapiens
acactaaatggggaa

SEQ ID NO: 767989 - DNA, 15 bp, Homo sapiens
cactaaatggggaag

SEQ ID NO: 767990 - DNA, 15 bp, Homo sapiens
actaaatggggaagc

SEQ ID NO: 767991 - DNA, 15 bp, Homo sapiens
ctaaatggggaagca

SEQ ID NO: 767992 - DNA, 15 bp, Homo sapiens
taaatggggaagcag

SEQ ID NO: 767993 - DNA, 15 bp, Homo sapiens
aaatggggaagcagg

SEQ ID NO: 767994 - DNA, 15 bp, Homo sapiens
aatggggaagcagga

SEQ ID NO: 767995 - DNA, 15 bp, Homo sapiens
atggggaagcaggaa

SEQ ID NO: 767996 - DNA, 15 bp, Homo sapiens
tggggaagcaggaag

SEQ ID NO: 767997 - DNA, 15 bp, Homo sapiens
ggggaagcaggaaga

SEQ ID NO: 767998 - DNA, 15 bp, Homo sapiens
gggaagcaggaagag

SEQ ID NO: 767999 - DNA, 15 bp, Homo sapiens
ggaagcaggaagagc

SEQ ID NO: 768000 - DNA, 15 bp, Homo sapiens
gaagcaggaagagca

SEQ ID NO: 768001 - DNA, 15 bp, Homo sapiens
aagcaggaagagcaa

SEQ ID NO: 768002 - DNA, 15 bp, Homo sapiens
agcaggaagagcaag

SEQ ID NO: 768003 - DNA, 15 bp, Homo sapiens
gcaggaagagcaagt

SEQ ID NO: 768004 - DNA, 15 bp, Homo sapiens
caggaagagcaagtc

SEQ ID NO: 768005 - DNA, 15 bp, Homo sapiens
aggaagagcaagtct

SEQ ID NO: 768006 - DNA, 15 bp, Homo sapiens
ggaagagcaagtctt

SEQ ID NO: 768007 - DNA, 15 bp, Homo sapiens
gaagagcaagtctta

SEQ ID NO: 768008 - DNA, 15 bp, Homo sapiens
aagagcaagtcttaa

SEQ ID NO: 768009 - DNA, 15 bp, Homo sapiens
agagcaagtcttaaa

SEQ ID NO: 768010 - DNA, 15 bp, Homo sapiens
gagcaagtcttaaaa

SEQ ID NO: 768011 - DNA, 15 bp, Homo sapiens
agcaagtcttaaaag

SEQ ID NO: 768012 - DNA, 15 bp, Homo sapiens
gcaagtcttaaaaga

SEQ ID NO: 768013 - DNA, 15 bp, Homo sapiens
caagtcttaaaagat

SEQ ID NO: 768014 - DNA, 15 bp, Homo sapiens
aagtcttaaaagatt

SEQ ID NO: 768015 - DNA, 15 bp, Homo sapiens
agtcttaaaagattc

SEQ ID NO: 768016 - DNA, 15 bp, Homo sapiens
gtcttaaaagattca

SEQ ID NO: 768017 - DNA, 15 bp, Homo sapiens
tcttaaaagattcaa

SEQ ID NO: 768018 - DNA, 15 bp, Homo sapiens
cttaaaagattcaag

SEQ ID NO: 768019 - DNA, 15 bp, Homo sapiens
ttaaaagattcaagt

SEQ ID NO: 768020 - DNA, 15 bp, Homo sapiens
taaaagattcaagtc

SEQ ID NO: 768021 - DNA, 15 bp, Homo sapiens
aaaagattcaagtcc

SEQ ID NO: 768022 - DNA, 15 bp, Homo sapiens
aaagattcaagtcca

SEQ ID NO: 768023 - DNA, 15 bp, Homo sapiens
aagattcaagtccat

SEQ ID NO: 768024 - DNA, 15 bp, Homo sapiens
agattcaagtccatt

SEQ ID NO: 768025 - DNA, 15 bp, Homo sapiens
gattcaagtccattg

SEQ ID NO: 768026 - DNA, 15 bp, Homo sapiens
attcaagtccattgg

SEQ ID NO: 768027 - DNA, 15 bp, Homo sapiens
ttcaagtccattggc

SEQ ID NO: 768028 - DNA, 15 bp, Homo sapiens
tcaagtccattggct

SEQ ID NO: 768029 - DNA, 15 bp, Homo sapiens
caagtccattggctc

SEQ ID NO: 768030 - DNA, 15 bp, Homo sapiens
aagtccattggctca

SEQ ID NO: 768031 - DNA, 15 bp, Homo sapiens
agtccattggctcac

SEQ ID NO: 768032 - DNA, 15 bp, Homo sapiens
gtccattggctcacc

SEQ ID NO: 768033 - DNA, 15 bp, Homo sapiens
tccattggctcaccc

SEQ ID NO: 768034 - DNA, 15 bp, Homo sapiens
ccattggctcaccct

SEQ ID NO: 768035 - DNA, 15 bp, Homo sapiens
cattggctcaccctt

SEQ ID NO: 768036 - DNA, 15 bp, Homo sapiens
attggctcacccttc

SEQ ID NO: 768037 - DNA, 15 bp, Homo sapiens
ttggctcacccttct

SEQ ID NO: 768038 - DNA, 15 bp, Homo sapiens
tggctcacccttctc

SEQ ID NO: 768039 - DNA, 15 bp, Homo sapiens
ggctcacccttctca

SEQ ID NO: 768040 - DNA, 15 bp, Homo sapiens
gctcacccttctcac

SEQ ID NO: 768041 - DNA, 15 bp, Homo sapiens
ctcacccttctcact

SEQ ID NO: 768042 - DNA, 15 bp, Homo sapiens
tcacccttctcactg

SEQ ID NO: 768043 - DNA, 15 bp, Homo sapiens
cacccttctcactgg

SEQ ID NO: 768044 - DNA, 15 bp, Homo sapiens
acccttctcactggc

SEQ ID NO: 768045 - DNA, 15 bp, Homo sapiens
cccttctcactggcc

SEQ ID NO: 768046 - DNA, 15 bp, Homo sapiens
ccttctcactggcca

SEQ ID NO: 768047 - DNA, 15 bp, Homo sapiens
cttctcactggccag

SEQ ID NO: 768048 - DNA, 15 bp, Homo sapiens
ttctcactggccagc

SEQ ID NO: 768049 - DNA, 15 bp, Homo sapiens
tctcactggccagcc

SEQ ID NO: 768050 - DNA, 15 bp, Homo sapiens
ctcactggccagcct

SEQ ID NO: 768051 - DNA, 15 bp, Homo sapiens
tcactggccagcctg

SEQ ID NO: 768052 - DNA, 15 bp, Homo sapiens
cactggccagcctgc

SEQ ID NO: 768053 - DNA, 15 bp, Homo sapiens
actggccagcctgct

SEQ ID NO: 768054 - DNA, 15 bp, Homo sapiens
ctggccagcctgctt

SEQ ID NO: 768055 - DNA, 15 bp, Homo sapiens
tggccagcctgctta

SEQ ID NO: 768056 - DNA, 15 bp, Homo sapiens
ggccagcctgcttaa

SEQ ID NO: 768057 - DNA, 15 bp, Homo sapiens
gccagcctgcttaaa

SEQ ID NO: 768058 - DNA, 15 bp, Homo sapiens
ccagcctgcttaaat

SEQ ID NO: 768059 - DNA, 15 bp, Homo sapiens
cagcctgcttaaatt

SEQ ID NO: 768060 - DNA, 15 bp, Homo sapiens
agcctgcttaaattt

SEQ ID NO: 768061 - DNA, 15 bp, Homo sapiens
gcctgcttaaattta

SEQ ID NO: 768062 - DNA, 15 bp, Homo sapiens
cctgcttaaatttat

SEQ ID NO: 768063 - DNA, 15 bp, Homo sapiens
ctgcttaaatttatt

SEQ ID NO: 768064 - DNA, 15 bp, Homo sapiens
tgcttaaatttattt

SEQ ID NO: 768065 - DNA, 15 bp, Homo sapiens
gcttaaatttatttg

SEQ ID NO: 768066 - DNA, 15 bp, Homo sapiens
cttaaatttatttga

SEQ ID NO: 768067 - DNA, 15 bp, Homo sapiens
ttaaatttatttgaa

SEQ ID NO: 768068 - DNA, 15 bp, Homo sapiens
taaatttatttgaac

SEQ ID NO: 768069 - DNA, 15 bp, Homo sapiens
aaatttatttgaacc

SEQ ID NO: 768070 - DNA, 15 bp, Homo sapiens
aatttatttgaacct

SEQ ID NO: 768071 - DNA, 15 bp, Homo sapiens
atttatttgaacctc

SEQ ID NO: 768072 - DNA, 15 bp, Homo sapiens
tttatttgaacctca

SEQ ID NO: 768073 - DNA, 15 bp, Homo sapiens
ttatttgaacctcac

SEQ ID NO: 768074 - DNA, 15 bp, Homo sapiens
tatttgaacctcact

SEQ ID NO: 768075 - DNA, 15 bp, Homo sapiens
atttgaacctcactt

SEQ ID NO: 768076 - DNA, 15 bp, Homo sapiens
tttgaacctcacttt

SEQ ID NO: 768077 - DNA, 15 bp, Homo sapiens
ttgaacctcactttc

SEQ ID NO: 768078 - DNA, 15 bp, Homo sapiens
tgaacctcactttct

SEQ ID NO: 768079 - DNA, 15 bp, Homo sapiens
gaacctcactttcta

SEQ ID NO: 768080 - DNA, 15 bp, Homo sapiens
aacctcactttctac

SEQ ID NO: 768081 - DNA, 15 bp, Homo sapiens
acctcactttctaca

SEQ ID NO: 768082 - DNA, 15 bp, Homo sapiens
cctcactttctacac

SEQ ID NO: 768083 - DNA, 15 bp, Homo sapiens
ctcactttctacact

SEQ ID NO: 768084 - DNA, 15 bp, Homo sapiens
tcactttctacactt

SEQ ID NO: 768085 - DNA, 15 bp, Homo sapiens
cactttctacacttt

SEQ ID NO: 768086 - DNA, 15 bp, Homo sapiens
actttctacactttt

SEQ ID NO: 768087 - DNA, 15 bp, Homo sapiens
ctttctacacttttg

SEQ ID NO: 768088 - DNA, 15 bp, Homo sapiens
tttctacacttttga

SEQ ID NO: 768089 - DNA, 15 bp, Homo sapiens
ttctacacttttgat

SEQ ID NO: 768090 - DNA, 15 bp, Homo sapiens
tctacacttttgatt

SEQ ID NO: 768091 - DNA, 15 bp, Homo sapiens
ctacacttttgattg

SEQ ID NO: 768092 - DNA, 15 bp, Homo sapiens
tacacttttgattgg

SEQ ID NO: 768093 - DNA, 15 bp, Homo sapiens
acacttttgattggg

SEQ ID NO: 768094 - DNA, 15 bp, Homo sapiens
cacttttgattgggg

SEQ ID NO: 768095 - DNA, 15 bp, Homo sapiens
acttttgattggggt

SEQ ID NO: 768096 - DNA, 15 bp, Homo sapiens
cttttgattggggta

SEQ ID NO: 768097 - DNA, 15 bp, Homo sapiens
ttttgattggggtag

SEQ ID NO: 768098 - DNA, 15 bp, Homo sapiens
tttgattggggtagg

SEQ ID NO: 768099 - DNA, 15 bp, Homo sapiens
ttgattggggtaggg

SEQ ID NO: 768100 - DNA, 15 bp, Homo sapiens
tgattggggtagggg

SEQ ID NO: 768101 - DNA, 15 bp, Homo sapiens
gattggggtagggga

SEQ ID NO: 768102 - DNA, 15 bp, Homo sapiens
attggggtaggggag

SEQ ID NO: 768103 - DNA, 15 bp, Homo sapiens
ttggggtaggggagg

SEQ ID NO: 768104 - DNA, 15 bp, Homo sapiens
tggggtaggggaggg

SEQ ID NO: 768105 - DNA, 15 bp, Homo sapiens
ggggtaggggagggg

SEQ ID NO: 768106 - DNA, 15 bp, Homo sapiens
gggtaggggaggggt

SEQ ID NO: 768107 - DNA, 15 bp, Homo sapiens
ggtaggggaggggta

SEQ ID NO: 768108 - DNA, 15 bp, Homo sapiens
gtaggggaggggtag

SEQ ID NO: 768109 - DNA, 15 bp, Homo sapiens
taggggaggggtagt

SEQ ID NO: 768110 - DNA, 15 bp, Homo sapiens
aggggaggggtagta

SEQ ID NO: 768111 - DNA, 15 bp, Homo sapiens
ggggaggggtagtag

SEQ ID NO: 768112 - DNA, 15 bp, Homo sapiens
gggaggggtagtagg

SEQ ID NO: 768113 - DNA, 15 bp, Homo sapiens
ggaggggtagtagga

SEQ ID NO: 768114 - DNA, 15 bp, Homo sapiens
gaggggtagtaggaa

SEQ ID NO: 768115 - DNA, 15 bp, Homo sapiens
aggggtagtaggaat

SEQ ID NO: 768116 - DNA, 15 bp, Homo sapiens
ggggtagtaggaata

SEQ ID NO: 768117 - DNA, 15 bp, Homo sapiens
gggtagtaggaataa

SEQ ID NO: 768118 - DNA, 15 bp, Homo sapiens
ggtagtaggaataat

SEQ ID NO: 768119 - DNA, 15 bp, Homo sapiens
gtagtaggaataatt

SEQ ID NO: 768120 - DNA, 15 bp, Homo sapiens
tagtaggaataattt

SEQ ID NO: 768121 - DNA, 15 bp, Homo sapiens
agtaggaataattta

SEQ ID NO: 768122 - DNA, 15 bp, Homo sapiens
gtaggaataatttat

SEQ ID NO: 768123 - DNA, 15 bp, Homo sapiens
taggaataatttatg

SEQ ID NO: 768124 - DNA, 15 bp, Homo sapiens
aggaataatttatga

SEQ ID NO: 768125 - DNA, 15 bp, Homo sapiens
ggaataatttatgat

SEQ ID NO: 768126 - DNA, 15 bp, Homo sapiens
gaataatttatgatg

SEQ ID NO: 768127 - DNA, 15 bp, Homo sapiens
aataatttatgatgc

SEQ ID NO: 768128 - DNA, 15 bp, Homo sapiens
ataatttatgatgct

SEQ ID NO: 768129 - DNA, 15 bp, Homo sapiens
taatttatgatgctt

SEQ ID NO: 768130 - DNA, 15 bp, Homo sapiens
aatttatgatgcttt

SEQ ID NO: 768131 - DNA, 15 bp, Homo sapiens
atttatgatgctttt

SEQ ID NO: 768132 - DNA, 15 bp, Homo sapiens
tttatgatgcttttt

SEQ ID NO: 768133 - DNA, 15 bp, Homo sapiens
ttatgatgcttttta

SEQ ID NO: 768134 - DNA, 15 bp, Homo sapiens
tatgatgctttttac

SEQ ID NO: 768135 - DNA, 15 bp, Homo sapiens
atgatgctttttaca

SEQ ID NO: 768136 - DNA, 15 bp, Homo sapiens
tgatgctttttacaa

SEQ ID NO: 768137 - DNA, 15 bp, Homo sapiens
gatgctttttacaag

SEQ ID NO: 768138 - DNA, 15 bp, Homo sapiens
atgctttttacaagt

SEQ ID NO: 768139 - DNA, 15 bp, Homo sapiens
tgctttttacaagta

SEQ ID NO: 768140 - DNA, 15 bp, Homo sapiens
gctttttacaagtaa

SEQ ID NO: 768141 - DNA, 15 bp, Homo sapiens
ctttttacaagtaat

SEQ ID NO: 768142 - DNA, 15 bp, Homo sapiens
tttttacaagtaatt

SEQ ID NO: 768143 - DNA, 15 bp, Homo sapiens
ttttacaagtaattt

SEQ ID NO: 768144 - DNA, 15 bp, Homo sapiens
tttacaagtaatttg

SEQ ID NO: 768145 - DNA, 15 bp, Homo sapiens
ttacaagtaatttga

SEQ ID NO: 768146 - DNA, 15 bp, Homo sapiens
tacaagtaatttgat

SEQ ID NO: 768147 - DNA, 15 bp, Homo sapiens
acaagtaatttgatg

SEQ ID NO: 768148 - DNA, 15 bp, Homo sapiens
caagtaatttgatgc

SEQ ID NO: 768149 - DNA, 15 bp, Homo sapiens
aagtaatttgatgca

SEQ ID NO: 768150 - DNA, 15 bp, Homo sapiens
agtaatttgatgcaa

SEQ ID NO: 768151 - DNA, 15 bp, Homo sapiens
gtaatttgatgcaaa

SEQ ID NO: 768152 - DNA, 15 bp, Homo sapiens
taatttgatgcaaat

SEQ ID NO: 768153 - DNA, 15 bp, Homo sapiens
aatttgatgcaaatt

SEQ ID NO: 768154 - DNA, 15 bp, Homo sapiens
atttgatgcaaatta

SEQ ID NO: 768155 - DNA, 15 bp, Homo sapiens
tttgatgcaaattat

SEQ ID NO: 768156 - DNA, 15 bp, Homo sapiens
ttgatgcaaattatt

SEQ ID NO: 768157 - DNA, 15 bp, Homo sapiens
tgatgcaaattattt

SEQ ID NO: 768158 - DNA, 15 bp, Homo sapiens
gatgcaaattattta

SEQ ID NO: 768159 - DNA, 15 bp, Homo sapiens
atgcaaattatttat

SEQ ID NO: 768160 - DNA, 15 bp, Homo sapiens
tgcaaattatttatt

SEQ ID NO: 768161 - DNA, 15 bp, Homo sapiens
gcaaattatttatta

SEQ ID NO: 768162 - DNA, 15 bp, Homo sapiens
caaattatttattat

SEQ ID NO: 768163 - DNA, 15 bp, Homo sapiens
aaattatttattatg

SEQ ID NO: 768164 - DNA, 15 bp, Homo sapiens
aattatttattatgt

SEQ ID NO: 768165 - DNA, 15 bp, Homo sapiens
attatttattatgta

SEQ ID NO: 768166 - DNA, 15 bp, Homo sapiens
ttatttattatgtaa

SEQ ID NO: 768167 - DNA, 15 bp, Homo sapiens
tatttattatgtaaa

SEQ ID NO: 768168 - DNA, 15 bp, Homo sapiens
atttattatgtaaaa

SEQ ID NO: 768169 - DNA, 15 bp, Homo sapiens
tttattatgtaaaat

SEQ ID NO: 768170 - DNA, 15 bp, Homo sapiens
ttattatgtaaaata

SEQ ID NO: 768171 - DNA, 15 bp, Homo sapiens
tattatgtaaaataa

SEQ ID NO: 768172 - DNA, 15 bp, Homo sapiens
attatgtaaaataat

SEQ ID NO: 768173 - DNA, 15 bp, Homo sapiens
ttatgtaaaataatt

SEQ ID NO: 768174 - DNA, 15 bp, Homo sapiens
tatgtaaaataatta

SEQ ID NO: 768175 - DNA, 15 bp, Homo sapiens
atgtaaaataattag

SEQ ID NO: 768176 - DNA, 15 bp, Homo sapiens
tgtaaaataattaga

SEQ ID NO: 768177 - DNA, 15 bp, Homo sapiens
gtaaaataattagaa

SEQ ID NO: 768178 - DNA, 15 bp, Homo sapiens
taaaataattagaaa

SEQ ID NO: 768179 - DNA, 15 bp, Homo sapiens
aaaataattagaaac

SEQ ID NO: 768180 - DNA, 15 bp, Homo sapiens
aaataattagaaacc

SEQ ID NO: 768181 - DNA, 15 bp, Homo sapiens
aataattagaaaccc

SEQ ID NO: 768182 - DNA, 15 bp, Homo sapiens
ataattagaaaccca

SEQ ID NO: 768183 - DNA, 15 bp, Homo sapiens
taattagaaacccag

SEQ ID NO: 768184 - DNA, 15 bp, Homo sapiens
aattagaaacccaga

SEQ ID NO: 768185 - DNA, 15 bp, Homo sapiens
attagaaacccagag

SEQ ID NO: 768186 - DNA, 15 bp, Homo sapiens
ttagaaacccagaga

SEQ ID NO: 768187 - DNA, 15 bp, Homo sapiens
tagaaacccagagaa

SEQ ID NO: 768188 - DNA, 15 bp, Homo sapiens
agaaacccagagaac

SEQ ID NO: 768189 - DNA, 15 bp, Homo sapiens
gaaacccagagaaca

SEQ ID NO: 768190 - DNA, 15 bp, Homo sapiens
aaacccagagaacat

SEQ ID NO: 768191 - DNA, 15 bp, Homo sapiens
aacccagagaacatt

SEQ ID NO: 768192 - DNA, 15 bp, Homo sapiens
acccagagaacattt

SEQ ID NO: 768193 - DNA, 15 bp, Homo sapiens
cccagagaacattta

SEQ ID NO: 768194 - DNA, 15 bp, Homo sapiens
ccagagaacatttat

SEQ ID NO: 768195 - DNA, 15 bp, Homo sapiens
cagagaacatttatg

SEQ ID NO: 768196 - DNA, 15 bp, Homo sapiens
agagaacatttatgt

SEQ ID NO: 768197 - DNA, 15 bp, Homo sapiens
gagaacatttatgta

SEQ ID NO: 768198 - DNA, 15 bp, Homo sapiens
agaacatttatgtaa

SEQ ID NO: 768199 - DNA, 15 bp, Homo sapiens
gaacatttatgtaaa

SEQ ID NO: 768200 - DNA, 15 bp, Homo sapiens
aacatttatgtaaat

SEQ ID NO: 768201 - DNA, 15 bp, Homo sapiens
acatttatgtaaatt

SEQ ID NO: 768202 - DNA, 15 bp, Homo sapiens
catttatgtaaatta

SEQ ID NO: 768203 - DNA, 15 bp, Homo sapiens
atttatgtaaattat

SEQ ID NO: 768204 - DNA, 15 bp, Homo sapiens
tttatgtaaattatc

SEQ ID NO: 768205 - DNA, 15 bp, Homo sapiens
ttatgtaaattatct

SEQ ID NO: 768206 - DNA, 15 bp, Homo sapiens
tatgtaaattatctg

SEQ ID NO: 768207 - DNA, 15 bp, Homo sapiens
atgtaaattatctga

SEQ ID NO: 768208 - DNA, 15 bp, Homo sapiens
tgtaaattatctgaa

SEQ ID NO: 768209 - DNA, 15 bp, Homo sapiens
gtaaattatctgaat

SEQ ID NO: 768210 - DNA, 15 bp, Homo sapiens
taaattatctgaatc

SEQ ID NO: 768211 - DNA, 15 bp, Homo sapiens
aaattatctgaatcc

SEQ ID NO: 768212 - DNA, 15 bp, Homo sapiens
aattatctgaatccc

SEQ ID NO: 768213 - DNA, 15 bp, Homo sapiens
attatctgaatccca

SEQ ID NO: 768214 - DNA, 15 bp, Homo sapiens
ttatctgaatcccag

SEQ ID NO: 768215 - DNA, 15 bp, Homo sapiens
tatctgaatcccagt

SEQ ID NO: 768216 - DNA, 15 bp, Homo sapiens
atctgaatcccagtc

SEQ ID NO: 768217 - DNA, 15 bp, Homo sapiens
tctgaatcccagtct

SEQ ID NO: 768218 - DNA, 15 bp, Homo sapiens
ctgaatcccagtctc

SEQ ID NO: 768219 - DNA, 15 bp, Homo sapiens
tgaatcccagtctca

SEQ ID NO: 768220 - DNA, 15 bp, Homo sapiens
gaatcccagtctcag

SEQ ID NO: 768221 - DNA, 15 bp, Homo sapiens
aatcccagtctcagt

SEQ ID NO: 768222 - DNA, 15 bp, Homo sapiens
atcccagtctcagtg

SEQ ID NO: 768223 - DNA, 15 bp, Homo sapiens
tcccagtctcagtga

SEQ ID NO: 768224 - DNA, 15 bp, Homo sapiens
cccagtctcagtgat

SEQ ID NO: 768225 - DNA, 15 bp, Homo sapiens
ccagtctcagtgata

SEQ ID NO: 768226 - DNA, 15 bp, Homo sapiens
cagtctcagtgataa

SEQ ID NO: 768227 - DNA, 15 bp, Homo sapiens
agtctcagtgataag

SEQ ID NO: 768228 - DNA, 15 bp, Homo sapiens
gtctcagtgataaga

SEQ ID NO: 768229 - DNA, 15 bp, Homo sapiens
tctcagtgataagaa

SEQ ID NO: 768230 - DNA, 15 bp, Homo sapiens
ctcagtgataagaaa

SEQ ID NO: 768231 - DNA, 15 bp, Homo sapiens
tcagtgataagaaaa

SEQ ID NO: 768232 - DNA, 15 bp, Homo sapiens
cagtgataagaaaaa

SEQ ID NO: 768233 - DNA, 15 bp, Homo sapiens
agtgataagaaaaac

SEQ ID NO: 768234 - DNA, 15 bp, Homo sapiens
gtgataagaaaaact

SEQ ID NO: 768235 - DNA, 15 bp, Homo sapiens
tgataagaaaaactt

SEQ ID NO: 768236 - DNA, 15 bp, Homo sapiens
gataagaaaaactta

SEQ ID NO: 768237 - DNA, 15 bp, Homo sapiens
ataagaaaaacttag

SEQ ID NO: 768238 - DNA, 15 bp, Homo sapiens
taagaaaaacttaga

SEQ ID NO: 768239 - DNA, 15 bp, Homo sapiens
aagaaaaacttagat

SEQ ID NO: 768240 - DNA, 15 bp, Homo sapiens
agaaaaacttagatg

SEQ ID NO: 768241 - DNA, 15 bp, Homo sapiens
gaaaaacttagatgt

SEQ ID NO: 768242 - DNA, 15 bp, Homo sapiens
aaaaacttagatgta

SEQ ID NO: 768243 - DNA, 15 bp, Homo sapiens
aaaacttagatgtaa

SEQ ID NO: 768244 - DNA, 15 bp, Homo sapiens
aaacttagatgtaaa

SEQ ID NO: 768245 - DNA, 15 bp, Homo sapiens
aacttagatgtaaat

SEQ ID NO: 768246 - DNA, 15 bp, Homo sapiens
acttagatgtaaatg

SEQ ID NO: 768247 - DNA, 15 bp, Homo sapiens
cttagatgtaaatgt

SEQ ID NO: 768248 - DNA, 15 bp, Homo sapiens
ttagatgtaaatgtt

SEQ ID NO: 768249 - DNA, 15 bp, Homo sapiens
tagatgtaaatgttc

SEQ ID NO: 768250 - DNA, 15 bp, Homo sapiens
agatgtaaatgttct

SEQ ID NO: 768251 - DNA, 15 bp, Homo sapiens
gatgtaaatgttcta

SEQ ID NO: 768252 - DNA, 15 bp, Homo sapiens
atgtaaatgttctac

SEQ ID NO: 768253 - DNA, 15 bp, Homo sapiens
tgtaaatgttctact

SEQ ID NO: 768254 - DNA, 15 bp, Homo sapiens
gtaaatgttctactt

SEQ ID NO: 768255 - DNA, 15 bp, Homo sapiens
taaatgttctacttt

SEQ ID NO: 768256 - DNA, 15 bp, Homo sapiens
aaatgttctactttt

SEQ ID NO: 768257 - DNA, 15 bp, Homo sapiens
aatgttctacttttc

SEQ ID NO: 768258 - DNA, 15 bp, Homo sapiens
atgttctacttttca

SEQ ID NO: 768259 - DNA, 15 bp, Homo sapiens
tgttctacttttcag

SEQ ID NO: 768260 - DNA, 15 bp, Homo sapiens
gttctacttttcaga

SEQ ID NO: 768261 - DNA, 15 bp, Homo sapiens
ttctacttttcagaa

SEQ ID NO: 768262 - DNA, 15 bp, Homo sapiens
tctacttttcagaag

SEQ ID NO: 768263 - DNA, 15 bp, Homo sapiens
ctacttttcagaaga

SEQ ID NO: 768264 - DNA, 15 bp, Homo sapiens
tacttttcagaagac

SEQ ID NO: 768265 - DNA, 15 bp, Homo sapiens
acttttcagaagacc

SEQ ID NO: 768266 - DNA, 15 bp, Homo sapiens
cttttcagaagacca

SEQ ID NO: 768267 - DNA, 15 bp, Homo sapiens
ttttcagaagaccaa

SEQ ID NO: 768268 - DNA, 15 bp, Homo sapiens
tttcagaagaccaaa

SEQ ID NO: 768269 - DNA, 15 bp, Homo sapiens
ttcagaagaccaaag

SEQ ID NO: 768270 - DNA, 15 bp, Homo sapiens
tcagaagaccaaagg

SEQ ID NO: 768271 - DNA, 15 bp, Homo sapiens
cagaagaccaaaggg

SEQ ID NO: 768272 - DNA, 15 bp, Homo sapiens
agaagaccaaagggc

SEQ ID NO: 768273 - DNA, 15 bp, Homo sapiens
gaagaccaaagggcc

SEQ ID NO: 768274 - DNA, 15 bp, Homo sapiens
aagaccaaagggcct

SEQ ID NO: 768275 - DNA, 15 bp, Homo sapiens
agaccaaagggcctg

SEQ ID NO: 768276 - DNA, 15 bp, Homo sapiens
gaccaaagggcctga

SEQ ID NO: 768277 - DNA, 15 bp, Homo sapiens
accaaagggcctgaa

SEQ ID NO: 768278 - DNA, 15 bp, Homo sapiens
ccaaagggcctgaat

SEQ ID NO: 768279 - DNA, 15 bp, Homo sapiens
caaagggcctgaatt

SEQ ID NO: 768280 - DNA, 15 bp, Homo sapiens
aaagggcctgaattt

SEQ ID NO: 768281 - DNA, 15 bp, Homo sapiens
aagggcctgaatttt

SEQ ID NO: 768282 - DNA, 15 bp, Homo sapiens
agggcctgaatttta

SEQ ID NO: 768283 - DNA, 15 bp, Homo sapiens
gggcctgaattttat

SEQ ID NO: 768284 - DNA, 15 bp, Homo sapiens
ggcctgaattttata

SEQ ID NO: 768285 - DNA, 15 bp, Homo sapiens
gcctgaattttatat

SEQ ID NO: 768286 - DNA, 15 bp, Homo sapiens
cctgaattttatatc

SEQ ID NO: 768287 - DNA, 15 bp, Homo sapiens
ctgaattttatatct

SEQ ID NO: 768288 - DNA, 15 bp, Homo sapiens
tgaattttatatctg

SEQ ID NO: 768289 - DNA, 15 bp, Homo sapiens
gaattttatatctgt

SEQ ID NO: 768290 - DNA, 15 bp, Homo sapiens
aattttatatctgta

SEQ ID NO: 768291 - DNA, 15 bp, Homo sapiens
attttatatctgtaa

SEQ ID NO: 768292 - DNA, 15 bp, Homo sapiens
ttttatatctgtaaa

SEQ ID NO: 768293 - DNA, 15 bp, Homo sapiens
tttatatctgtaaag

SEQ ID NO: 768294 - DNA, 15 bp, Homo sapiens
ttatatctgtaaagg

SEQ ID NO: 768295 - DNA, 15 bp, Homo sapiens
tatatctgtaaaggc

SEQ ID NO: 768296 - DNA, 15 bp, Homo sapiens
atatctgtaaaggca

SEQ ID NO: 768297 - DNA, 15 bp, Homo sapiens
tatctgtaaaggcac

SEQ ID NO: 768298 - DNA, 15 bp, Homo sapiens
atctgtaaaggcaca

SEQ ID NO: 768299 - DNA, 15 bp, Homo sapiens
tctgtaaaggcacaa

SEQ ID NO: 768300 - DNA, 15 bp, Homo sapiens
ctgtaaaggcacaag

SEQ ID NO: 768301 - DNA, 15 bp, Homo sapiens
tgtaaaggcacaagg

SEQ ID NO: 768302 - DNA, 15 bp, Homo sapiens
gtaaaggcacaaggg

SEQ ID NO: 768303 - DNA, 15 bp, Homo sapiens
taaaggcacaaggga

SEQ ID NO: 768304 - DNA, 15 bp, Homo sapiens
aaaggcacaagggaa

SEQ ID NO: 768305 - DNA, 15 bp, Homo sapiens
aaggcacaagggaag

SEQ ID NO: 768306 - DNA, 15 bp, Homo sapiens
aggcacaagggaaga

SEQ ID NO: 768307 - DNA, 15 bp, Homo sapiens
ggcacaagggaagaa

SEQ ID NO: 768308 - DNA, 15 bp, Homo sapiens
gcacaagggaagaat

SEQ ID NO: 768309 - DNA, 15 bp, Homo sapiens
cacaagggaagaata

SEQ ID NO: 768310 - DNA, 15 bp, Homo sapiens
acaagggaagaatat

SEQ ID NO: 768311 - DNA, 15 bp, Homo sapiens
caagggaagaatata

SEQ ID NO: 768312 - DNA, 15 bp, Homo sapiens
aagggaagaatataa

SEQ ID NO: 768313 - DNA, 15 bp, Homo sapiens
agggaagaatataaa

SEQ ID NO: 768314 - DNA, 15 bp, Homo sapiens
gggaagaatataaat

SEQ ID NO: 768315 - DNA, 15 bp, Homo sapiens
ggaagaatataaatt

SEQ ID NO: 768316 - DNA, 15 bp, Homo sapiens
gaagaatataaattg

SEQ ID NO: 768317 - DNA, 15 bp, Homo sapiens
aagaatataaattga

SEQ ID NO: 768318 - DNA, 15 bp, Homo sapiens
agaatataaattgaa

SEQ ID NO: 768319 - DNA, 15 bp, Homo sapiens
gaatataaattgaat

SEQ ID NO: 768320 - DNA, 15 bp, Homo sapiens
aatataaattgaatt

SEQ ID NO: 768321 - DNA, 15 bp, Homo sapiens
atataaattgaatta

SEQ ID NO: 768322 - DNA, 15 bp, Homo sapiens
tataaattgaattag

SEQ ID NO: 768323 - DNA, 15 bp, Homo sapiens
ataaattgaattagt

SEQ ID NO: 768324 - DNA, 15 bp, Homo sapiens
taaattgaattagta

SEQ ID NO: 768325 - DNA, 15 bp, Homo sapiens
aaattgaattagtaa

SEQ ID NO: 768326 - DNA, 15 bp, Homo sapiens
aattgaattagtaat

SEQ ID NO: 768327 - DNA, 15 bp, Homo sapiens
attgaattagtaatt

SEQ ID NO: 768328 - DNA, 15 bp, Homo sapiens
ttgaattagtaatta

SEQ ID NO: 768329 - DNA, 15 bp, Homo sapiens
tgaattagtaattaa

SEQ ID NO: 768330 - DNA, 15 bp, Homo sapiens
gaattagtaattaaa

SEQ ID NO: 768331 - DNA, 15 bp, Homo sapiens
aattagtaattaaag

SEQ ID NO: 768332 - DNA, 15 bp, Homo sapiens
attagtaattaaagg

SEQ ID NO: 768333 - DNA, 15 bp, Homo sapiens
ttagtaattaaagga

SEQ ID NO: 768334 - DNA, 15 bp, Homo sapiens
tagtaattaaaggaa

SEQ ID NO: 768335 - DNA, 15 bp, Homo sapiens
agtaattaaaggaag

SEQ ID NO: 768336 - DNA, 15 bp, Homo sapiens
gtaattaaaggaagg

SEQ ID NO: 768337 - DNA, 15 bp, Homo sapiens
taattaaaggaaggt

SEQ ID NO: 768338 - DNA, 15 bp, Homo sapiens
aattaaaggaaggtc

SEQ ID NO: 768339 - DNA, 15 bp, Homo sapiens
attaaaggaaggtct

SEQ ID NO: 768340 - DNA, 15 bp, Homo sapiens
ttaaaggaaggtctg

SEQ ID NO: 768341 - DNA, 15 bp, Homo sapiens
taaaggaaggtctga

SEQ ID NO: 768342 - DNA, 15 bp, Homo sapiens
aaaggaaggtctgaa

SEQ ID NO: 768343 - DNA, 15 bp, Homo sapiens
aaggaaggtctgaat

SEQ ID NO: 768344 - DNA, 15 bp, Homo sapiens
aggaaggtctgaatc

SEQ ID NO: 768345 - DNA, 15 bp, Homo sapiens
ggaaggtctgaatcc

SEQ ID NO: 768346 - DNA, 15 bp, Homo sapiens
gaaggtctgaatcca

SEQ ID NO: 768347 - DNA, 15 bp, Homo sapiens
aaggtctgaatccac

SEQ ID NO: 768348 - DNA, 15 bp, Homo sapiens
aggtctgaatccaca

SEQ ID NO: 768349 - DNA, 15 bp, Homo sapiens
ggtctgaatccacag

SEQ ID NO: 768350 - DNA, 15 bp, Homo sapiens
gtctgaatccacaga

SEQ ID NO: 768351 - DNA, 15 bp, Homo sapiens
tctgaatccacagac

SEQ ID NO: 768352 - DNA, 15 bp, Homo sapiens
ctgaatccacagaca

SEQ ID NO: 768353 - DNA, 15 bp, Homo sapiens
tgaatccacagacat

SEQ ID NO: 768354 - DNA, 15 bp, Homo sapiens
gaatccacagacata

SEQ ID NO: 768355 - DNA, 15 bp, Homo sapiens
aatccacagacatag

SEQ ID NO: 768356 - DNA, 15 bp, Homo sapiens
atccacagacatagc

SEQ ID NO: 768357 - DNA, 15 bp, Homo sapiens
tccacagacatagca

SEQ ID NO: 768358 - DNA, 15 bp, Homo sapiens
ccacagacatagcaa

SEQ ID NO: 768359 - DNA, 15 bp, Homo sapiens
cacagacatagcaaa

SEQ ID NO: 768360 - DNA, 15 bp, Homo sapiens
acagacatagcaaag

SEQ ID NO: 768361 - DNA, 15 bp, Homo sapiens
cagacatagcaaaga

SEQ ID NO: 768362 - DNA, 15 bp, Homo sapiens
agacatagcaaagat

SEQ ID NO: 768363 - DNA, 15 bp, Homo sapiens
gacatagcaaagatg

SEQ ID NO: 768364 - DNA, 15 bp, Homo sapiens
acatagcaaagatgg

SEQ ID NO: 768365 - DNA, 15 bp, Homo sapiens
catagcaaagatgga

SEQ ID NO: 768366 - DNA, 15 bp, Homo sapiens
atagcaaagatggag

SEQ ID NO: 768367 - DNA, 15 bp, Homo sapiens
tagcaaagatggagg

SEQ ID NO: 768368 - DNA, 15 bp, Homo sapiens
agcaaagatggagga

SEQ ID NO: 768369 - DNA, 15 bp, Homo sapiens
gcaaagatggaggat

SEQ ID NO: 768370 - DNA, 15 bp, Homo sapiens
caaagatggaggatt

SEQ ID NO: 768371 - DNA, 15 bp, Homo sapiens
aaagatggaggatta

SEQ ID NO: 768372 - DNA, 15 bp, Homo sapiens
aagatggaggattat

SEQ ID NO: 768373 - DNA, 15 bp, Homo sapiens
agatggaggattata

SEQ ID NO: 768374 - DNA, 15 bp, Homo sapiens
gatggaggattatat

SEQ ID NO: 768375 - DNA, 15 bp, Homo sapiens
atggaggattatata

SEQ ID NO: 768376 - DNA, 15 bp, Homo sapiens
tggaggattatatat

SEQ ID NO: 768377 - DNA, 15 bp, Homo sapiens
ggaggattatatata

SEQ ID NO: 768378 - DNA, 15 bp, Homo sapiens
gaggattatatatat

SEQ ID NO: 768379 - DNA, 15 bp, Homo sapiens
aggattatatatata

SEQ ID NO: 768380 - DNA, 15 bp, Homo sapiens
ggattatatatatat

SEQ ID NO: 768381 - DNA, 15 bp, Homo sapiens
attatatatatataa

SEQ ID NO: 768382 - DNA, 15 bp, Homo sapiens
ttatatatatataag

SEQ ID NO: 768383 - DNA, 15 bp, Homo sapiens
tatatatatataagg

SEQ ID NO: 768384 - DNA, 15 bp, Homo sapiens
atatatatataaggg

SEQ ID NO: 768385 - DNA, 15 bp, Homo sapiens
tatatatataagggt

SEQ ID NO: 768386 - DNA, 15 bp, Homo sapiens
atatatataagggta

SEQ ID NO: 768387 - DNA, 15 bp, Homo sapiens
tatatataagggtaa

SEQ ID NO: 768388 - DNA, 15 bp, Homo sapiens
atatataagggtaat

SEQ ID NO: 768389 - DNA, 15 bp, Homo sapiens
tatataagggtaata

SEQ ID NO: 768390 - DNA, 15 bp, Homo sapiens
atataagggtaatag

SEQ ID NO: 768391 - DNA, 15 bp, Homo sapiens
tataagggtaataga

SEQ ID NO: 768392 - DNA, 15 bp, Homo sapiens
ataagggtaatagag

SEQ ID NO: 768393 - DNA, 15 bp, Homo sapiens
taagggtaatagaga

SEQ ID NO: 768394 - DNA, 15 bp, Homo sapiens
aagggtaatagagag

SEQ ID NO: 768395 - DNA, 15 bp, Homo sapiens
agggtaatagagagg

SEQ ID NO: 768396 - DNA, 15 bp, Homo sapiens
gggtaatagagaggg

SEQ ID NO: 768397 - DNA, 15 bp, Homo sapiens
ggtaatagagaggga

SEQ ID NO: 768398 - DNA, 15 bp, Homo sapiens
gtaatagagagggac

SEQ ID NO: 768399 - DNA, 15 bp, Homo sapiens
taatagagagggaca

SEQ ID NO: 768400 - DNA, 15 bp, Homo sapiens
aatagagagggacac

SEQ ID NO: 768401 - DNA, 15 bp, Homo sapiens
atagagagggacact

SEQ ID NO: 768402 - DNA, 15 bp, Homo sapiens
tagagagggacactg

SEQ ID NO: 768403 - DNA, 15 bp, Homo sapiens
agagagggacactga

SEQ ID NO: 768404 - DNA, 15 bp, Homo sapiens
gagagggacactgac

SEQ ID NO: 768405 - DNA, 15 bp, Homo sapiens
agagggacactgaca

SEQ ID NO: 768406 - DNA, 15 bp, Homo sapiens
gagggacactgacat

SEQ ID NO: 768407 - DNA, 15 bp, Homo sapiens
agggacactgacatt

SEQ ID NO: 768408 - DNA, 15 bp, Homo sapiens
gggacactgacatta

SEQ ID NO: 768409 - DNA, 15 bp, Homo sapiens
ggacactgacattaa

SEQ ID NO: 768410 - DNA, 15 bp, Homo sapiens
gacactgacattaaa

SEQ ID NO: 768411 - DNA, 15 bp, Homo sapiens
acactgacattaaaa

SEQ ID NO: 768412 - DNA, 15 bp, Homo sapiens
cactgacattaaaag

SEQ ID NO: 768413 - DNA, 15 bp, Homo sapiens
actgacattaaaagg

SEQ ID NO: 768414 - DNA, 15 bp, Homo sapiens
ctgacattaaaagga

SEQ ID NO: 768415 - DNA, 15 bp, Homo sapiens
tgacattaaaaggaa

SEQ ID NO: 768416 - DNA, 15 bp, Homo sapiens
gacattaaaaggaaa

SEQ ID NO: 768417 - DNA, 15 bp, Homo sapiens
acattaaaaggaaat

SEQ ID NO: 768418 - DNA, 15 bp, Homo sapiens
cattaaaaggaaatg

SEQ ID NO: 768419 - DNA, 15 bp, Homo sapiens
attaaaaggaaatgt

SEQ ID NO: 768420 - DNA, 15 bp, Homo sapiens
ttaaaaggaaatgtg

SEQ ID NO: 768421 - DNA, 15 bp, Homo sapiens
taaaaggaaatgtgt

SEQ ID NO: 768422 - DNA, 15 bp, Homo sapiens
aaaaggaaatgtgta

SEQ ID NO: 768423 - DNA, 15 bp, Homo sapiens
aaaggaaatgtgtag

SEQ ID NO: 768424 - DNA, 15 bp, Homo sapiens
aaggaaatgtgtagc

SEQ ID NO: 768425 - DNA, 15 bp, Homo sapiens
aggaaatgtgtagcc

SEQ ID NO: 768426 - DNA, 15 bp, Homo sapiens
ggaaatgtgtagcca

SEQ ID NO: 768427 - DNA, 15 bp, Homo sapiens
gaaatgtgtagccat

SEQ ID NO: 768428 - DNA, 15 bp, Homo sapiens
aaatgtgtagccatt

SEQ ID NO: 768429 - DNA, 15 bp, Homo sapiens
aatgtgtagccatta

SEQ ID NO: 768430 - DNA, 15 bp, Homo sapiens
atgtgtagccattac

SEQ ID NO: 768431 - DNA, 15 bp, Homo sapiens
tgtgtagccattact

SEQ ID NO: 768432 - DNA, 15 bp, Homo sapiens
gtgtagccattactg

SEQ ID NO: 768433 - DNA, 15 bp, Homo sapiens
tgtagccattactgt

SEQ ID NO: 768434 - DNA, 15 bp, Homo sapiens
gtagccattactgtg

SEQ ID NO: 768435 - DNA, 15 bp, Homo sapiens
tagccattactgtgc

SEQ ID NO: 768436 - DNA, 15 bp, Homo sapiens
agccattactgtgcc

SEQ ID NO: 768437 - DNA, 15 bp, Homo sapiens
gccattactgtgcca

SEQ ID NO: 768438 - DNA, 15 bp, Homo sapiens
ccattactgtgccag

SEQ ID NO: 768439 - DNA, 15 bp, Homo sapiens
cattactgtgccaga

SEQ ID NO: 768440 - DNA, 15 bp, Homo sapiens
attactgtgccagaa

SEQ ID NO: 768441 - DNA, 15 bp, Homo sapiens
ttactgtgccagaaa

SEQ ID NO: 768442 - DNA, 15 bp, Homo sapiens
tactgtgccagaaaa

SEQ ID NO: 768443 - DNA, 15 bp, Homo sapiens
actgtgccagaaaaa

SEQ ID NO: 768444 - DNA, 15 bp, Homo sapiens
ctgtgccagaaaaag

SEQ ID NO: 768445 - DNA, 15 bp, Homo sapiens
tgtgccagaaaaaga

SEQ ID NO: 768446 - DNA, 15 bp, Homo sapiens
gtgccagaaaaagaa

SEQ ID NO: 768447 - DNA, 15 bp, Homo sapiens
tgccagaaaaagaaa

SEQ ID NO: 768448 - DNA, 15 bp, Homo sapiens
gccagaaaaagaaaa

SEQ ID NO: 768449 - DNA, 15 bp, Homo sapiens
ccagaaaaagaaaag

SEQ ID NO: 768450 - DNA, 15 bp, Homo sapiens
cagaaaaagaaaagg

SEQ ID NO: 768451 - DNA, 15 bp, Homo sapiens
agaaaaagaaaagga

SEQ ID NO: 768452 - DNA, 15 bp, Homo sapiens
gaaaaagaaaaggaa

SEQ ID NO: 768453 - DNA, 15 bp, Homo sapiens
aaaaagaaaaggaac

SEQ ID NO: 768454 - DNA, 15 bp, Homo sapiens
aaaagaaaaggaaca

SEQ ID NO: 768455 - DNA, 15 bp, Homo sapiens
aaagaaaaggaacaa

SEQ ID NO: 768456 - DNA, 15 bp, Homo sapiens
aagaaaaggaacaat

SEQ ID NO: 768457 - DNA, 15 bp, Homo sapiens
agaaaaggaacaata

SEQ ID NO: 768458 - DNA, 15 bp, Homo sapiens
gaaaaggaacaatat

SEQ ID NO: 768459 - DNA, 15 bp, Homo sapiens
aaaaggaacaatatt

SEQ ID NO: 768460 - DNA, 15 bp, Homo sapiens
aaaggaacaatattt

SEQ ID NO: 768461 - DNA, 15 bp, Homo sapiens
aaggaacaatattta

SEQ ID NO: 768462 - DNA, 15 bp, Homo sapiens
aggaacaatatttat

SEQ ID NO: 768463 - DNA, 15 bp, Homo sapiens
ggaacaatatttata

SEQ ID NO: 768464 - DNA, 15 bp, Homo sapiens
gaacaatatttatat

SEQ ID NO: 768465 - DNA, 15 bp, Homo sapiens
aacaatatttatatt

SEQ ID NO: 768466 - DNA, 15 bp, Homo sapiens
acaatatttatattg

SEQ ID NO: 768467 - DNA, 15 bp, Homo sapiens
caatatttatattgg

SEQ ID NO: 768468 - DNA, 15 bp, Homo sapiens
aatatttatattggt

SEQ ID NO: 768469 - DNA, 15 bp, Homo sapiens
atatttatattggtt

SEQ ID NO: 768470 - DNA, 15 bp, Homo sapiens
tatttatattggttg

SEQ ID NO: 768471 - DNA, 15 bp, Homo sapiens
atttatattggttgt

SEQ ID NO: 768472 - DNA, 15 bp, Homo sapiens
tttatattggttgtc

SEQ ID NO: 768473 - DNA, 15 bp, Homo sapiens
ttatattggttgtca

SEQ ID NO: 768474 - DNA, 15 bp, Homo sapiens
tatattggttgtcac

SEQ ID NO: 768475 - DNA, 15 bp, Homo sapiens
atattggttgtcact

SEQ ID NO: 768476 - DNA, 15 bp, Homo sapiens
tattggttgtcactt

SEQ ID NO: 768477 - DNA, 15 bp, Homo sapiens
attggttgtcacttg

SEQ ID NO: 768478 - DNA, 15 bp, Homo sapiens
ttggttgtcacttgg

SEQ ID NO: 768479 - DNA, 15 bp, Homo sapiens
tggttgtcacttgga

SEQ ID NO: 768480 - DNA, 15 bp, Homo sapiens
ggttgtcacttggaa

SEQ ID NO: 768481 - DNA, 15 bp, Homo sapiens
gttgtcacttggaaa

SEQ ID NO: 768482 - DNA, 15 bp, Homo sapiens
ttgtcacttggaaaa

SEQ ID NO: 768483 - DNA, 15 bp, Homo sapiens
tgtcacttggaaaat

SEQ ID NO: 768484 - DNA, 15 bp, Homo sapiens
gtcacttggaaaatt

SEQ ID NO: 768485 - DNA, 15 bp, Homo sapiens
tcacttggaaaatta

SEQ ID NO: 768486 - DNA, 15 bp, Homo sapiens
cacttggaaaattaa

SEQ ID NO: 768487 - DNA, 15 bp, Homo sapiens
acttggaaaattaat

SEQ ID NO: 768488 - DNA, 15 bp, Homo sapiens
cttggaaaattaata

SEQ ID NO: 768489 - DNA, 15 bp, Homo sapiens
ttggaaaattaatat

SEQ ID NO: 768490 - DNA, 15 bp, Homo sapiens
tggaaaattaatatg

SEQ ID NO: 768491 - DNA, 15 bp, Homo sapiens
ggaaaattaatatgt

SEQ ID NO: 768492 - DNA, 15 bp, Homo sapiens
gaaaattaatatgta

SEQ ID NO: 768493 - DNA, 15 bp, Homo sapiens
aaaattaatatgtag

SEQ ID NO: 768494 - DNA, 15 bp, Homo sapiens
aaattaatatgtagg

SEQ ID NO: 768495 - DNA, 15 bp, Homo sapiens
aattaatatgtagga

SEQ ID NO: 768496 - DNA, 15 bp, Homo sapiens
attaatatgtaggat

SEQ ID NO: 768497 - DNA, 15 bp, Homo sapiens
ttaatatgtaggatg

SEQ ID NO: 768498 - DNA, 15 bp, Homo sapiens
taatatgtaggatga

SEQ ID NO: 768499 - DNA, 15 bp, Homo sapiens
aatatgtaggatgaa

SEQ ID NO: 768500 - DNA, 15 bp, Homo sapiens
atatgtaggatgaag

SEQ ID NO: 768501 - DNA, 15 bp, Homo sapiens
tatgtaggatgaagc

SEQ ID NO: 768502 - DNA, 15 bp, Homo sapiens
atgtaggatgaagct

SEQ ID NO: 768503 - DNA, 15 bp, Homo sapiens
tgtaggatgaagctt

SEQ ID NO: 768504 - DNA, 15 bp, Homo sapiens
gtaggatgaagctta

SEQ ID NO: 768505 - DNA, 15 bp, Homo sapiens
taggatgaagcttaa

SEQ ID NO: 768506 - DNA, 15 bp, Homo sapiens
aggatgaagcttaag

SEQ ID NO: 768507 - DNA, 15 bp, Homo sapiens
ggatgaagcttaaga

SEQ ID NO: 768508 - DNA, 15 bp, Homo sapiens
gatgaagcttaagaa

SEQ ID NO: 768509 - DNA, 15 bp, Homo sapiens
atgaagcttaagaat

SEQ ID NO: 768510 - DNA, 15 bp, Homo sapiens
tgaagcttaagaatc

SEQ ID NO: 768511 - DNA, 15 bp, Homo sapiens
gaagcttaagaatct

SEQ ID NO: 768512 - DNA, 15 bp, Homo sapiens
aagcttaagaatcta

SEQ ID NO: 768513 - DNA, 15 bp, Homo sapiens
agcttaagaatctaa

SEQ ID NO: 768514 - DNA, 15 bp, Homo sapiens
gcttaagaatctaag

SEQ ID NO: 768515 - DNA, 15 bp, Homo sapiens
cttaagaatctaagc

SEQ ID NO: 768516 - DNA, 15 bp, Homo sapiens
ttaagaatctaagca

SEQ ID NO: 768517 - DNA, 15 bp, Homo sapiens
taagaatctaagcac

SEQ ID NO: 768518 - DNA, 15 bp, Homo sapiens
aagaatctaagcaca

SEQ ID NO: 768519 - DNA, 15 bp, Homo sapiens
agaatctaagcacat

SEQ ID NO: 768520 - DNA, 15 bp, Homo sapiens
gaatctaagcacatt

SEQ ID NO: 768521 - DNA, 15 bp, Homo sapiens
aatctaagcacattt

SEQ ID NO: 768522 - DNA, 15 bp, Homo sapiens
atctaagcacatttt

SEQ ID NO: 768523 - DNA, 15 bp, Homo sapiens
tctaagcacattttc

SEQ ID NO: 768524 - DNA, 15 bp, Homo sapiens
ctaagcacattttca

SEQ ID NO: 768525 - DNA, 15 bp, Homo sapiens
taagcacattttcag

SEQ ID NO: 768526 - DNA, 15 bp, Homo sapiens
aagcacattttcaga

SEQ ID NO: 768527 - DNA, 15 bp, Homo sapiens
agcacattttcagat

SEQ ID NO: 768528 - DNA, 15 bp, Homo sapiens
gcacattttcagatt

SEQ ID NO: 768529 - DNA, 15 bp, Homo sapiens
cacattttcagatta

SEQ ID NO: 768530 - DNA, 15 bp, Homo sapiens
acattttcagattat

SEQ ID NO: 768531 - DNA, 15 bp, Homo sapiens
cattttcagattata

SEQ ID NO: 768532 - DNA, 15 bp, Homo sapiens
attttcagattatat

SEQ ID NO: 768533 - DNA, 15 bp, Homo sapiens
ttttcagattatatt

SEQ ID NO: 768534 - DNA, 15 bp, Homo sapiens
tttcagattatattt

SEQ ID NO: 768535 - DNA, 15 bp, Homo sapiens
ttcagattatatttc

SEQ ID NO: 768536 - DNA, 15 bp, Homo sapiens
tcagattatatttct

SEQ ID NO: 768537 - DNA, 15 bp, Homo sapiens
cagattatatttctg

SEQ ID NO: 768538 - DNA, 15 bp, Homo sapiens
agattatatttctgg

SEQ ID NO: 768539 - DNA, 15 bp, Homo sapiens
gattatatttctgga

SEQ ID NO: 768540 - DNA, 15 bp, Homo sapiens
attatatttctggat

SEQ ID NO: 768541 - DNA, 15 bp, Homo sapiens
ttatatttctggatt

SEQ ID NO: 768542 - DNA, 15 bp, Homo sapiens
tatatttctggattg

SEQ ID NO: 768543 - DNA, 15 bp, Homo sapiens
atatttctggattgt

SEQ ID NO: 768544 - DNA, 15 bp, Homo sapiens
tatttctggattgtc

SEQ ID NO: 768545 - DNA, 15 bp, Homo sapiens
atttctggattgtcc

SEQ ID NO: 768546 - DNA, 15 bp, Homo sapiens
tttctggattgtcct

SEQ ID NO: 768547 - DNA, 15 bp, Homo sapiens
ttctggattgtcctg

SEQ ID NO: 768548 - DNA, 15 bp, Homo sapiens
tctggattgtcctga

SEQ ID NO: 768549 - DNA, 15 bp, Homo sapiens
ctggattgtcctgat

SEQ ID NO: 768550 - DNA, 15 bp, Homo sapiens
tggattgtcctgatt

SEQ ID NO: 768551 - DNA, 15 bp, Homo sapiens
ggattgtcctgattc

SEQ ID NO: 768552 - DNA, 15 bp, Homo sapiens
gattgtcctgattca

SEQ ID NO: 768553 - DNA, 15 bp, Homo sapiens
attgtcctgattcaa

SEQ ID NO: 768554 - DNA, 15 bp, Homo sapiens
ttgtcctgattcaaa

SEQ ID NO: 768555 - DNA, 15 bp, Homo sapiens
tgtcctgattcaaaa

SEQ ID NO: 768556 - DNA, 15 bp, Homo sapiens
gtcctgattcaaaag

SEQ ID NO: 768557 - DNA, 15 bp, Homo sapiens
tcctgattcaaaagg

SEQ ID NO: 768558 - DNA, 15 bp, Homo sapiens
cctgattcaaaagga

SEQ ID NO: 768559 - DNA, 15 bp, Homo sapiens
ctgattcaaaaggat

SEQ ID NO: 768560 - DNA, 15 bp, Homo sapiens
tgattcaaaaggata

SEQ ID NO: 768561 - DNA, 15 bp, Homo sapiens
gattcaaaaggataa

SEQ ID NO: 768562 - DNA, 15 bp, Homo sapiens
attcaaaaggataac

SEQ ID NO: 768563 - DNA, 15 bp, Homo sapiens
ttcaaaaggataact

SEQ ID NO: 768564 - DNA, 15 bp, Homo sapiens
tcaaaaggataactt

SEQ ID NO: 768565 - DNA, 15 bp, Homo sapiens
caaaaggataacttg

SEQ ID NO: 768566 - DNA, 15 bp, Homo sapiens
aaaaggataacttgt

SEQ ID NO: 768567 - DNA, 15 bp, Homo sapiens
aaaggataacttgtg

SEQ ID NO: 768568 - DNA, 15 bp, Homo sapiens
aaggataacttgtgt

SEQ ID NO: 768569 - DNA, 15 bp, Homo sapiens
aggataacttgtgtg

SEQ ID NO: 768570 - DNA, 15 bp, Homo sapiens
ggataacttgtgtgt

SEQ ID NO: 768571 - DNA, 15 bp, Homo sapiens
gataacttgtgtgtg

SEQ ID NO: 768572 - DNA, 15 bp, Homo sapiens
ataacttgtgtgtga

SEQ ID NO: 768573 - DNA, 15 bp, Homo sapiens
taacttgtgtgtgac

SEQ ID NO: 768574 - DNA, 15 bp, Homo sapiens
aacttgtgtgtgact

SEQ ID NO: 768575 - DNA, 15 bp, Homo sapiens
acttgtgtgtgactg

SEQ ID NO: 768576 - DNA, 15 bp, Homo sapiens
cttgtgtgtgactga

SEQ ID NO: 768577 - DNA, 15 bp, Homo sapiens
ttgtgtgtgactgat

SEQ ID NO: 768578 - DNA, 15 bp, Homo sapiens
tgtgtgtgactgatt

SEQ ID NO: 768579 - DNA, 15 bp, Homo sapiens
gtgtgtgactgattt

SEQ ID NO: 768580 - DNA, 15 bp, Homo sapiens
tgtgtgactgatttg

SEQ ID NO: 768581 - DNA, 15 bp, Homo sapiens
gtgtgactgatttga

SEQ ID NO: 768582 - DNA, 15 bp, Homo sapiens
tgtgactgatttgat

SEQ ID NO: 768583 - DNA, 15 bp, Homo sapiens
gtgactgatttgatg

SEQ ID NO: 768584 - DNA, 15 bp, Homo sapiens
tgactgatttgatgg

SEQ ID NO: 768585 - DNA, 15 bp, Homo sapiens
gactgatttgatggt

SEQ ID NO: 768586 - DNA, 15 bp, Homo sapiens
actgatttgatggta

SEQ ID NO: 768587 - DNA, 15 bp, Homo sapiens
ctgatttgatggtat

SEQ ID NO: 768588 - DNA, 15 bp, Homo sapiens
tgatttgatggtata

SEQ ID NO: 768589 - DNA, 15 bp, Homo sapiens
gatttgatggtatat

SEQ ID NO: 768590 - DNA, 15 bp, Homo sapiens
atttgatggtatatg

SEQ ID NO: 768591 - DNA, 15 bp, Homo sapiens
tttgatggtatatga

SEQ ID NO: 768592 - DNA, 15 bp, Homo sapiens
ttgatggtatatgag

SEQ ID NO: 768593 - DNA, 15 bp, Homo sapiens
tgatggtatatgagt

SEQ ID NO: 768594 - DNA, 15 bp, Homo sapiens
gatggtatatgagtc

SEQ ID NO: 768595 - DNA, 15 bp, Homo sapiens
atggtatatgagtca

SEQ ID NO: 768596 - DNA, 15 bp, Homo sapiens
tggtatatgagtcag

SEQ ID NO: 768597 - DNA, 15 bp, Homo sapiens
ggtatatgagtcaga

SEQ ID NO: 768598 - DNA, 15 bp, Homo sapiens
gtatatgagtcagaa

SEQ ID NO: 768599 - DNA, 15 bp, Homo sapiens
tatatgagtcagaag

SEQ ID NO: 768600 - DNA, 15 bp, Homo sapiens
atatgagtcagaagc

SEQ ID NO: 768601 - DNA, 15 bp, Homo sapiens
tatgagtcagaagct

SEQ ID NO: 768602 - DNA, 15 bp, Homo sapiens
atgagtcagaagctc

SEQ ID NO: 768603 - DNA, 15 bp, Homo sapiens
tgagtcagaagctca

SEQ ID NO: 768604 - DNA, 15 bp, Homo sapiens
gagtcagaagctcag

SEQ ID NO: 768605 - DNA, 15 bp, Homo sapiens
agtcagaagctcagg

SEQ ID NO: 768606 - DNA, 15 bp, Homo sapiens
gtcagaagctcaggc

SEQ ID NO: 768607 - DNA, 15 bp, Homo sapiens
tcagaagctcaggct

SEQ ID NO: 768608 - DNA, 15 bp, Homo sapiens
cagaagctcaggctg

SEQ ID NO: 768609 - DNA, 15 bp, Homo sapiens
agaagctcaggctgc

SEQ ID NO: 768610 - DNA, 15 bp, Homo sapiens
gaagctcaggctgcc

SEQ ID NO: 768611 - DNA, 15 bp, Homo sapiens
aagctcaggctgcca

SEQ ID NO: 768612 - DNA, 15 bp, Homo sapiens
agctcaggctgccat

SEQ ID NO: 768613 - DNA, 15 bp, Homo sapiens
gctcaggctgccata

SEQ ID NO: 768614 - DNA, 15 bp, Homo sapiens
ctcaggctgccataa

SEQ ID NO: 768615 - DNA, 15 bp, Homo sapiens
tcaggctgccataac

SEQ ID NO: 768616 - DNA, 15 bp, Homo sapiens
caggctgccataaca

SEQ ID NO: 768617 - DNA, 15 bp, Homo sapiens
aggctgccataacaa

SEQ ID NO: 768618 - DNA, 15 bp, Homo sapiens
ggctgccataacaaa

SEQ ID NO: 768619 - DNA, 15 bp, Homo sapiens
gctgccataacaaaa

SEQ ID NO: 768620 - DNA, 15 bp, Homo sapiens
ctgccataacaaaat

SEQ ID NO: 768621 - DNA, 15 bp, Homo sapiens
tgccataacaaaatt

SEQ ID NO: 768622 - DNA, 15 bp, Homo sapiens
gccataacaaaattt

SEQ ID NO: 768623 - DNA, 15 bp, Homo sapiens
ccataacaaaatttc

SEQ ID NO: 768624 - DNA, 15 bp, Homo sapiens
cataacaaaatttca

SEQ ID NO: 768625 - DNA, 15 bp, Homo sapiens
ataacaaaatttcat

SEQ ID NO: 768626 - DNA, 15 bp, Homo sapiens
taacaaaatttcata

SEQ ID NO: 768627 - DNA, 15 bp, Homo sapiens
aacaaaatttcatag

SEQ ID NO: 768628 - DNA, 15 bp, Homo sapiens
acaaaatttcatagg

SEQ ID NO: 768629 - DNA, 15 bp, Homo sapiens
caaaatttcataggc

SEQ ID NO: 768630 - DNA, 15 bp, Homo sapiens
aaaatttcataggct

SEQ ID NO: 768631 - DNA, 15 bp, Homo sapiens
aaatttcataggctg

SEQ ID NO: 768632 - DNA, 15 bp, Homo sapiens
aatttcataggctgg

SEQ ID NO: 768633 - DNA, 15 bp, Homo sapiens
atttcataggctggg

SEQ ID NO: 768634 - DNA, 15 bp, Homo sapiens
tttcataggctgggt

SEQ ID NO: 768635 - DNA, 15 bp, Homo sapiens
ttcataggctgggtg

SEQ ID NO: 768636 - DNA, 15 bp, Homo sapiens
tcataggctgggtgg

SEQ ID NO: 768637 - DNA, 15 bp, Homo sapiens
cataggctgggtggc

SEQ ID NO: 768638 - DNA, 15 bp, Homo sapiens
ataggctgggtggct

SEQ ID NO: 768639 - DNA, 15 bp, Homo sapiens
taggctgggtggctc

SEQ ID NO: 768640 - DNA, 15 bp, Homo sapiens
aggctgggtggctca

SEQ ID NO: 768641 - DNA, 15 bp, Homo sapiens
ggctgggtggctcaa

SEQ ID NO: 768642 - DNA, 15 bp, Homo sapiens
gctgggtggctcaac

SEQ ID NO: 768643 - DNA, 15 bp, Homo sapiens
ctgggtggctcaaca

SEQ ID NO: 768644 - DNA, 15 bp, Homo sapiens
tgggtggctcaacag

SEQ ID NO: 768645 - DNA, 15 bp, Homo sapiens
gggtggctcaacagg

SEQ ID NO: 768646 - DNA, 15 bp, Homo sapiens
ggtggctcaacagga

SEQ ID NO: 768647 - DNA, 15 bp, Homo sapiens
gtggctcaacaggaa

SEQ ID NO: 768648 - DNA, 15 bp, Homo sapiens
tggctcaacaggaat

SEQ ID NO: 768649 - DNA, 15 bp, Homo sapiens
ggctcaacaggaatt

SEQ ID NO: 768650 - DNA, 15 bp, Homo sapiens
gctcaacaggaattt

SEQ ID NO: 768651 - DNA, 15 bp, Homo sapiens
ctcaacaggaatttc

SEQ ID NO: 768652 - DNA, 15 bp, Homo sapiens
tcaacaggaatttct

SEQ ID NO: 768653 - DNA, 15 bp, Homo sapiens
caacaggaatttctt

SEQ ID NO: 768654 - DNA, 15 bp, Homo sapiens
aacaggaatttcttt

SEQ ID NO: 768655 - DNA, 15 bp, Homo sapiens
acaggaatttctttc

SEQ ID NO: 768656 - DNA, 15 bp, Homo sapiens
caggaatttctttct

SEQ ID NO: 768657 - DNA, 15 bp, Homo sapiens
aggaatttctttctc

SEQ ID NO: 768658 - DNA, 15 bp, Homo sapiens
ggaatttctttctca

SEQ ID NO: 768659 - DNA, 15 bp, Homo sapiens
gaatttctttctcac

SEQ ID NO: 768660 - DNA, 15 bp, Homo sapiens
aatttctttctcaca

SEQ ID NO: 768661 - DNA, 15 bp, Homo sapiens
atttctttctcacag

SEQ ID NO: 768662 - DNA, 15 bp, Homo sapiens
tttctttctcacagt

SEQ ID NO: 768663 - DNA, 15 bp, Homo sapiens
ttctttctcacagtt

SEQ ID NO: 768664 - DNA, 15 bp, Homo sapiens
tctttctcacagtta

SEQ ID NO: 768665 - DNA, 15 bp, Homo sapiens
ctttctcacagttat

SEQ ID NO: 768666 - DNA, 15 bp, Homo sapiens
tttctcacagttatg

SEQ ID NO: 768667 - DNA, 15 bp, Homo sapiens
ttctcacagttatga

SEQ ID NO: 768668 - DNA, 15 bp, Homo sapiens
tctcacagttatgaa

SEQ ID NO: 768669 - DNA, 15 bp, Homo sapiens
ctcacagttatgaag

SEQ ID NO: 768670 - DNA, 15 bp, Homo sapiens
tcacagttatgaagg

SEQ ID NO: 768671 - DNA, 15 bp, Homo sapiens
cacagttatgaaggt

SEQ ID NO: 768672 - DNA, 15 bp, Homo sapiens
acagttatgaaggtt

SEQ ID NO: 768673 - DNA, 15 bp, Homo sapiens
cagttatgaaggttg

SEQ ID NO: 768674 - DNA, 15 bp, Homo sapiens
agttatgaaggttgg

SEQ ID NO: 768675 - DNA, 15 bp, Homo sapiens
gttatgaaggttggg

SEQ ID NO: 768676 - DNA, 15 bp, Homo sapiens
ttatgaaggttggga

SEQ ID NO: 768677 - DNA, 15 bp, Homo sapiens
tatgaaggttgggaa

SEQ ID NO: 768678 - DNA, 15 bp, Homo sapiens
atgaaggttgggaag

SEQ ID NO: 768679 - DNA, 15 bp, Homo sapiens
tgaaggttgggaagt

SEQ ID NO: 768680 - DNA, 15 bp, Homo sapiens
gaaggttgggaagtt

SEQ ID NO: 768681 - DNA, 15 bp, Homo sapiens
aaggttgggaagttc

SEQ ID NO: 768682 - DNA, 15 bp, Homo sapiens
aggttgggaagttca

SEQ ID NO: 768683 - DNA, 15 bp, Homo sapiens
ggttgggaagttcaa

SEQ ID NO: 768684 - DNA, 15 bp, Homo sapiens
gttgggaagttcaag

SEQ ID NO: 768685 - DNA, 15 bp, Homo sapiens
ttgggaagttcaaga

SEQ ID NO: 768686 - DNA, 15 bp, Homo sapiens
tgggaagttcaagat

SEQ ID NO: 768687 - DNA, 15 bp, Homo sapiens
gggaagttcaagatc

SEQ ID NO: 768688 - DNA, 15 bp, Homo sapiens
ggaagttcaagatca

SEQ ID NO: 768689 - DNA, 15 bp, Homo sapiens
gaagttcaagatcaa

SEQ ID NO: 768690 - DNA, 15 bp, Homo sapiens
aagttcaagatcaag

SEQ ID NO: 768691 - DNA, 15 bp, Homo sapiens
agttcaagatcaaga

SEQ ID NO: 768692 - DNA, 15 bp, Homo sapiens
gttcaagatcaagat

SEQ ID NO: 768693 - DNA, 15 bp, Homo sapiens
ttcaagatcaagatg

SEQ ID NO: 768694 - DNA, 15 bp, Homo sapiens
tcaagatcaagatgc

SEQ ID NO: 768695 - DNA, 15 bp, Homo sapiens
caagatcaagatgcc

SEQ ID NO: 768696 - DNA, 15 bp, Homo sapiens
aagatcaagatgcca

SEQ ID NO: 768697 - DNA, 15 bp, Homo sapiens
agatcaagatgccag

SEQ ID NO: 768698 - DNA, 15 bp, Homo sapiens
gatcaagatgccagc

SEQ ID NO: 768699 - DNA, 15 bp, Homo sapiens
atcaagatgccagct

SEQ ID NO: 768700 - DNA, 15 bp, Homo sapiens
tcaagatgccagctg

SEQ ID NO: 768701 - DNA, 15 bp, Homo sapiens
caagatgccagctga

SEQ ID NO: 768702 - DNA, 15 bp, Homo sapiens
aagatgccagctgac

SEQ ID NO: 768703 - DNA, 15 bp, Homo sapiens
agatgccagctgact

SEQ ID NO: 768704 - DNA, 15 bp, Homo sapiens
gatgccagctgactt

SEQ ID NO: 768705 - DNA, 15 bp, Homo sapiens
atgccagctgacttg

SEQ ID NO: 768706 - DNA, 15 bp, Homo sapiens
tgccagctgacttgg

SEQ ID NO: 768707 - DNA, 15 bp, Homo sapiens
gccagctgacttggt

SEQ ID NO: 768708 - DNA, 15 bp, Homo sapiens
ccagctgacttggtt

SEQ ID NO: 768709 - DNA, 15 bp, Homo sapiens
cagctgacttggttc

SEQ ID NO: 768710 - DNA, 15 bp, Homo sapiens
agctgacttggttcc

SEQ ID NO: 768711 - DNA, 15 bp, Homo sapiens
gctgacttggttccc

SEQ ID NO: 768712 - DNA, 15 bp, Homo sapiens
ctgacttggttccct

SEQ ID NO: 768713 - DNA, 15 bp, Homo sapiens
tgacttggttccctg

SEQ ID NO: 768714 - DNA, 15 bp, Homo sapiens
gacttggttccctgg

SEQ ID NO: 768715 - DNA, 15 bp, Homo sapiens
acttggttccctggt

SEQ ID NO: 768716 - DNA, 15 bp, Homo sapiens
cttggttccctggta

SEQ ID NO: 768717 - DNA, 15 bp, Homo sapiens
ttggttccctggtac

SEQ ID NO: 768718 - DNA, 15 bp, Homo sapiens
tggttccctggtaca

SEQ ID NO: 768719 - DNA, 15 bp, Homo sapiens
ggttccctggtacaa

SEQ ID NO: 768720 - DNA, 15 bp, Homo sapiens
gttccctggtacaag

SEQ ID NO: 768721 - DNA, 15 bp, Homo sapiens
ttccctggtacaagg

SEQ ID NO: 768722 - DNA, 15 bp, Homo sapiens
tccctggtacaaggt

SEQ ID NO: 768723 - DNA, 15 bp, Homo sapiens
ccctggtacaaggtc

SEQ ID NO: 768724 - DNA, 15 bp, Homo sapiens
cctggtacaaggtct

SEQ ID NO: 768725 - DNA, 15 bp, Homo sapiens
ctggtacaaggtctt

SEQ ID NO: 768726 - DNA, 15 bp, Homo sapiens
tggtacaaggtcttt

SEQ ID NO: 768727 - DNA, 15 bp, Homo sapiens
ggtacaaggtctttc

SEQ ID NO: 768728 - DNA, 15 bp, Homo sapiens
gtacaaggtctttct

SEQ ID NO: 768729 - DNA, 15 bp, Homo sapiens
tacaaggtctttctt

SEQ ID NO: 768730 - DNA, 15 bp, Homo sapiens
acaaggtctttcttt

SEQ ID NO: 768731 - DNA, 15 bp, Homo sapiens
caaggtctttctttc

SEQ ID NO: 768732 - DNA, 15 bp, Homo sapiens
aaggtctttctttct

SEQ ID NO: 768733 - DNA, 15 bp, Homo sapiens
aggtctttctttctg

SEQ ID NO: 768734 - DNA, 15 bp, Homo sapiens
ggtctttctttctgg

SEQ ID NO: 768735 - DNA, 15 bp, Homo sapiens
gtctttctttctggc

SEQ ID NO: 768736 - DNA, 15 bp, Homo sapiens
tctttctttctggct

SEQ ID NO: 768737 - DNA, 15 bp, Homo sapiens
ctttctttctggctt

SEQ ID NO: 768738 - DNA, 15 bp, Homo sapiens
tttctttctggcttg

SEQ ID NO: 768739 - DNA, 15 bp, Homo sapiens
ttctttctggcttgc

SEQ ID NO: 768740 - DNA, 15 bp, Homo sapiens
tctttctggcttgca

SEQ ID NO: 768741 - DNA, 15 bp, Homo sapiens
ctttctggcttgcag

SEQ ID NO: 768742 - DNA, 15 bp, Homo sapiens
tttctggcttgcaga

SEQ ID NO: 768743 - DNA, 15 bp, Homo sapiens
ttctggcttgcagaa

SEQ ID NO: 768744 - DNA, 15 bp, Homo sapiens
tctggcttgcagaag

SEQ ID NO: 768745 - DNA, 15 bp, Homo sapiens
ctggcttgcagaagg

SEQ ID NO: 768746 - DNA, 15 bp, Homo sapiens
tggcttgcagaaggc

SEQ ID NO: 768747 - DNA, 15 bp, Homo sapiens
ggcttgcagaaggcc

SEQ ID NO: 768748 - DNA, 15 bp, Homo sapiens
gcttgcagaaggcca

SEQ ID NO: 768749 - DNA, 15 bp, Homo sapiens
cttgcagaaggccac

SEQ ID NO: 768750 - DNA, 15 bp, Homo sapiens
ttgcagaaggccact

SEQ ID NO: 768751 - DNA, 15 bp, Homo sapiens
tgcagaaggccactt

SEQ ID NO: 768752 - DNA, 15 bp, Homo sapiens
gcagaaggccacttt

SEQ ID NO: 768753 - DNA, 15 bp, Homo sapiens
cagaaggccactttc

SEQ ID NO: 768754 - DNA, 15 bp, Homo sapiens
agaaggccactttct

SEQ ID NO: 768755 - DNA, 15 bp, Homo sapiens
gaaggccactttctt

SEQ ID NO: 768756 - DNA, 15 bp, Homo sapiens
aaggccactttcttg

SEQ ID NO: 768757 - DNA, 15 bp, Homo sapiens
aggccactttcttgc

SEQ ID NO: 768758 - DNA, 15 bp, Homo sapiens
ggccactttcttgca

SEQ ID NO: 768759 - DNA, 15 bp, Homo sapiens
gccactttcttgcag

SEQ ID NO: 768760 - DNA, 15 bp, Homo sapiens
ccactttcttgcagt

SEQ ID NO: 768761 - DNA, 15 bp, Homo sapiens
cactttcttgcagtg

SEQ ID NO: 768762 - DNA, 15 bp, Homo sapiens
actttcttgcagtgt

SEQ ID NO: 768763 - DNA, 15 bp, Homo sapiens
ctttcttgcagtgtc

SEQ ID NO: 768764 - DNA, 15 bp, Homo sapiens
tttcttgcagtgtct

SEQ ID NO: 768765 - DNA, 15 bp, Homo sapiens
ttcttgcagtgtctt

SEQ ID NO: 768766 - DNA, 15 bp, Homo sapiens
tcttgcagtgtcttc

SEQ ID NO: 768767 - DNA, 15 bp, Homo sapiens
cttgcagtgtcttca

SEQ ID NO: 768768 - DNA, 15 bp, Homo sapiens
ttgcagtgtcttcac

SEQ ID NO: 768769 - DNA, 15 bp, Homo sapiens
tgcagtgtcttcaca

SEQ ID NO: 768770 - DNA, 15 bp, Homo sapiens
gcagtgtcttcacag

SEQ ID NO: 768771 - DNA, 15 bp, Homo sapiens
cagtgtcttcacagg

SEQ ID NO: 768772 - DNA, 15 bp, Homo sapiens
agtgtcttcacaggg

SEQ ID NO: 768773 - DNA, 15 bp, Homo sapiens
gtgtcttcacagggt

SEQ ID NO: 768774 - DNA, 15 bp, Homo sapiens
tgtcttcacagggtg

SEQ ID NO: 768775 - DNA, 15 bp, Homo sapiens
gtcttcacagggtga

SEQ ID NO: 768776 - DNA, 15 bp, Homo sapiens
tcttcacagggtgag

SEQ ID NO: 768777 - DNA, 15 bp, Homo sapiens
cttcacagggtgagg

SEQ ID NO: 768778 - DNA, 15 bp, Homo sapiens
ttcacagggtgaggg

SEQ ID NO: 768779 - DNA, 15 bp, Homo sapiens
tcacagggtgagggg

SEQ ID NO: 768780 - DNA, 15 bp, Homo sapiens
cacagggtgaggggg

SEQ ID NO: 768781 - DNA, 15 bp, Homo sapiens
acagggtgagggggg

SEQ ID NO: 768782 - DNA, 15 bp, Homo sapiens
cagggtgagggggga

SEQ ID NO: 768783 - DNA, 15 bp, Homo sapiens
agggtgaggggggaa

SEQ ID NO: 768784 - DNA, 15 bp, Homo sapiens
gggtgaggggggaaa

SEQ ID NO: 768785 - DNA, 15 bp, Homo sapiens
ggtgaggggggaaag

SEQ ID NO: 768786 - DNA, 15 bp, Homo sapiens
gtgaggggggaaagg

SEQ ID NO: 768787 - DNA, 15 bp, Homo sapiens
tgaggggggaaaggt

SEQ ID NO: 768788 - DNA, 15 bp, Homo sapiens
gaggggggaaaggtg

SEQ ID NO: 768789 - DNA, 15 bp, Homo sapiens
aggggggaaaggtgg

SEQ ID NO: 768790 - DNA, 15 bp, Homo sapiens
ggggggaaaggtggg

SEQ ID NO: 768791 - DNA, 15 bp, Homo sapiens
gggggaaaggtggga

SEQ ID NO: 768792 - DNA, 15 bp, Homo sapiens
ggggaaaggtgggag

SEQ ID NO: 768793 - DNA, 15 bp, Homo sapiens
gggaaaggtgggaga

SEQ ID NO: 768794 - DNA, 15 bp, Homo sapiens
ggaaaggtgggagag

SEQ ID NO: 768795 - DNA, 15 bp, Homo sapiens
gaaaggtgggagaga

SEQ ID NO: 768796 - DNA, 15 bp, Homo sapiens
aaaggtgggagagag

SEQ ID NO: 768797 - DNA, 15 bp, Homo sapiens
aaggtgggagagagg

SEQ ID NO: 768798 - DNA, 15 bp, Homo sapiens
aggtgggagagaggg

SEQ ID NO: 768799 - DNA, 15 bp, Homo sapiens
ggtgggagagaggga

SEQ ID NO: 768800 - DNA, 15 bp, Homo sapiens
gtgggagagagggag

SEQ ID NO: 768801 - DNA, 15 bp, Homo sapiens
tgggagagagggaga

SEQ ID NO: 768802 - DNA, 15 bp, Homo sapiens
gggagagagggagag

SEQ ID NO: 768803 - DNA, 15 bp, Homo sapiens
ggagagagggagaga

SEQ ID NO: 768804 - DNA, 15 bp, Homo sapiens
gagagagggagagag

SEQ ID NO: 768805 - DNA, 15 bp, Homo sapiens
agagagggagagagg

SEQ ID NO: 768806 - DNA, 15 bp, Homo sapiens
gagagggagagagga

SEQ ID NO: 768807 - DNA, 15 bp, Homo sapiens
agagggagagaggaa

SEQ ID NO: 768808 - DNA, 15 bp, Homo sapiens
gagggagagaggaag

SEQ ID NO: 768809 - DNA, 15 bp, Homo sapiens
agggagagaggaaga

SEQ ID NO: 768810 - DNA, 15 bp, Homo sapiens
gggagagaggaagac

SEQ ID NO: 768811 - DNA, 15 bp, Homo sapiens
ggagagaggaagaca

SEQ ID NO: 768812 - DNA, 15 bp, Homo sapiens
gagagaggaagacag

SEQ ID NO: 768813 - DNA, 15 bp, Homo sapiens
agagaggaagacagc

SEQ ID NO: 768814 - DNA, 15 bp, Homo sapiens
gagaggaagacagca

SEQ ID NO: 768815 - DNA, 15 bp, Homo sapiens
agaggaagacagcaa

SEQ ID NO: 768816 - DNA, 15 bp, Homo sapiens
gaggaagacagcaag

SEQ ID NO: 768817 - DNA, 15 bp, Homo sapiens
aggaagacagcaagt

SEQ ID NO: 768818 - DNA, 15 bp, Homo sapiens
ggaagacagcaagtc

SEQ ID NO: 768819 - DNA, 15 bp, Homo sapiens
gaagacagcaagtcc

SEQ ID NO: 768820 - DNA, 15 bp, Homo sapiens
aagacagcaagtcct

SEQ ID NO: 768821 - DNA, 15 bp, Homo sapiens
agacagcaagtcctc

SEQ ID NO: 768822 - DNA, 15 bp, Homo sapiens
gacagcaagtcctct

SEQ ID NO: 768823 - DNA, 15 bp, Homo sapiens
acagcaagtcctctg

SEQ ID NO: 768824 - DNA, 15 bp, Homo sapiens
cagcaagtcctctgg

SEQ ID NO: 768825 - DNA, 15 bp, Homo sapiens
agcaagtcctctgga

SEQ ID NO: 768826 - DNA, 15 bp, Homo sapiens
gcaagtcctctggag

SEQ ID NO: 768827 - DNA, 15 bp, Homo sapiens
caagtcctctggagt

SEQ ID NO: 768828 - DNA, 15 bp, Homo sapiens
aagtcctctggagtc

SEQ ID NO: 768829 - DNA, 15 bp, Homo sapiens
agtcctctggagtct

SEQ ID NO: 768830 - DNA, 15 bp, Homo sapiens
gtcctctggagtctc

SEQ ID NO: 768831 - DNA, 15 bp, Homo sapiens
tcctctggagtctct

SEQ ID NO: 768832 - DNA, 15 bp, Homo sapiens
cctctggagtctctt

SEQ ID NO: 768833 - DNA, 15 bp, Homo sapiens
ctctggagtctcttc

SEQ ID NO: 768834 - DNA, 15 bp, Homo sapiens
tctggagtctcttct

SEQ ID NO: 768835 - DNA, 15 bp, Homo sapiens
ctggagtctcttctt

SEQ ID NO: 768836 - DNA, 15 bp, Homo sapiens
tggagtctcttctta

SEQ ID NO: 768837 - DNA, 15 bp, Homo sapiens
ggagtctcttcttat

SEQ ID NO: 768838 - DNA, 15 bp, Homo sapiens
gagtctcttcttatg

SEQ ID NO: 768839 - DNA, 15 bp, Homo sapiens
agtctcttcttatga

SEQ ID NO: 768840 - DNA, 15 bp, Homo sapiens
gtctcttcttatgag

SEQ ID NO: 768841 - DNA, 15 bp, Homo sapiens
tctcttcttatgagg

SEQ ID NO: 768842 - DNA, 15 bp, Homo sapiens
ctcttcttatgaggg

SEQ ID NO: 768843 - DNA, 15 bp, Homo sapiens
tcttcttatgagggc

SEQ ID NO: 768844 - DNA, 15 bp, Homo sapiens
cttcttatgagggca

SEQ ID NO: 768845 - DNA, 15 bp, Homo sapiens
ttcttatgagggcac

SEQ ID NO: 768846 - DNA, 15 bp, Homo sapiens
tcttatgagggcact

SEQ ID NO: 768847 - DNA, 15 bp, Homo sapiens
cttatgagggcacta

SEQ ID NO: 768848 - DNA, 15 bp, Homo sapiens
ttatgagggcactaa

SEQ ID NO: 768849 - DNA, 15 bp, Homo sapiens
tatgagggcactaat

SEQ ID NO: 768850 - DNA, 15 bp, Homo sapiens
atgagggcactaatc

SEQ ID NO: 768851 - DNA, 15 bp, Homo sapiens
tgagggcactaatcc

SEQ ID NO: 768852 - DNA, 15 bp, Homo sapiens
gagggcactaatccc

SEQ ID NO: 768853 - DNA, 15 bp, Homo sapiens
agggcactaatccca

SEQ ID NO: 768854 - DNA, 15 bp, Homo sapiens
gggcactaatcccat

SEQ ID NO: 768855 - DNA, 15 bp, Homo sapiens
ggcactaatcccatt

SEQ ID NO: 768856 - DNA, 15 bp, Homo sapiens
gcactaatcccatta

SEQ ID NO: 768857 - DNA, 15 bp, Homo sapiens
cactaatcccattat

SEQ ID NO: 768858 - DNA, 15 bp, Homo sapiens
actaatcccattatg

SEQ ID NO: 768859 - DNA, 15 bp, Homo sapiens
ctaatcccattatga

SEQ ID NO: 768860 - DNA, 15 bp, Homo sapiens
taatcccattatgag

SEQ ID NO: 768861 - DNA, 15 bp, Homo sapiens
aatcccattatgagg

SEQ ID NO: 768862 - DNA, 15 bp, Homo sapiens
atcccattatgaggg

SEQ ID NO: 768863 - DNA, 15 bp, Homo sapiens
tcccattatgagggt

SEQ ID NO: 768864 - DNA, 15 bp, Homo sapiens
cccattatgagggtc

SEQ ID NO: 768865 - DNA, 15 bp, Homo sapiens
ccattatgagggtcc

SEQ ID NO: 768866 - DNA, 15 bp, Homo sapiens
cattatgagggtccc

SEQ ID NO: 768867 - DNA, 15 bp, Homo sapiens
attatgagggtccct

SEQ ID NO: 768868 - DNA, 15 bp, Homo sapiens
ttatgagggtccctt

SEQ ID NO: 768869 - DNA, 15 bp, Homo sapiens
tatgagggtcccttg

SEQ ID NO: 768870 - DNA, 15 bp, Homo sapiens
atgagggtcccttgg

SEQ ID NO: 768871 - DNA, 15 bp, Homo sapiens
tgagggtcccttggg

SEQ ID NO: 768872 - DNA, 15 bp, Homo sapiens
gagggtcccttgggc

SEQ ID NO: 768873 - DNA, 15 bp, Homo sapiens
agggtcccttgggcg

SEQ ID NO: 768874 - DNA, 15 bp, Homo sapiens
gggtcccttgggcgc

SEQ ID NO: 768875 - DNA, 15 bp, Homo sapiens
ggtcccttgggcgct

SEQ ID NO: 768876 - DNA, 15 bp, Homo sapiens
gtcccttgggcgctt

SEQ ID NO: 768877 - DNA, 15 bp, Homo sapiens
tcccttgggcgcttc

SEQ ID NO: 768878 - DNA, 15 bp, Homo sapiens
cccttgggcgcttct

SEQ ID NO: 768879 - DNA, 15 bp, Homo sapiens
ccttgggcgcttctc

SEQ ID NO: 768880 - DNA, 15 bp, Homo sapiens
cttgggcgcttctct

SEQ ID NO: 768881 - DNA, 15 bp, Homo sapiens
ttgggcgcttctctc

SEQ ID NO: 768882 - DNA, 15 bp, Homo sapiens
tgggcgcttctctca

SEQ ID NO: 768883 - DNA, 15 bp, Homo sapiens
gggcgcttctctcat

SEQ ID NO: 768884 - DNA, 15 bp, Homo sapiens
ggcgcttctctcatg

SEQ ID NO: 768885 - DNA, 15 bp, Homo sapiens
gcgcttctctcatga

SEQ ID NO: 768886 - DNA, 15 bp, Homo sapiens
cgcttctctcatgac

SEQ ID NO: 768887 - DNA, 15 bp, Homo sapiens
gcttctctcatgacc

SEQ ID NO: 768888 - DNA, 15 bp, Homo sapiens
cttctctcatgacct

SEQ ID NO: 768889 - DNA, 15 bp, Homo sapiens
ttctctcatgacctc

SEQ ID NO: 768890 - DNA, 15 bp, Homo sapiens
tctctcatgacctca

SEQ ID NO: 768891 - DNA, 15 bp, Homo sapiens
ctctcatgacctcat

SEQ ID NO: 768892 - DNA, 15 bp, Homo sapiens
tctcatgacctcatc

SEQ ID NO: 768893 - DNA, 15 bp, Homo sapiens
ctcatgacctcatct

SEQ ID NO: 768894 - DNA, 15 bp, Homo sapiens
tcatgacctcatcta

SEQ ID NO: 768895 - DNA, 15 bp, Homo sapiens
catgacctcatctaa

SEQ ID NO: 768896 - DNA, 15 bp, Homo sapiens
atgacctcatctaat

SEQ ID NO: 768897 - DNA, 15 bp, Homo sapiens
tgacctcatctaatt

SEQ ID NO: 768898 - DNA, 15 bp, Homo sapiens
gacctcatctaattc

SEQ ID NO: 768899 - DNA, 15 bp, Homo sapiens
acctcatctaattct

SEQ ID NO: 768900 - DNA, 15 bp, Homo sapiens
cctcatctaattcta

SEQ ID NO: 768901 - DNA, 15 bp, Homo sapiens
ctcatctaattctaa

SEQ ID NO: 768902 - DNA, 15 bp, Homo sapiens
tcatctaattctaat

SEQ ID NO: 768903 - DNA, 15 bp, Homo sapiens
catctaattctaatt

SEQ ID NO: 768904 - DNA, 15 bp, Homo sapiens
atctaattctaattg

SEQ ID NO: 768905 - DNA, 15 bp, Homo sapiens
tctaattctaattgc

SEQ ID NO: 768906 - DNA, 15 bp, Homo sapiens
ctaattctaattgcc

SEQ ID NO: 768907 - DNA, 15 bp, Homo sapiens
taattctaattgcct

SEQ ID NO: 768908 - DNA, 15 bp, Homo sapiens
aattctaattgcctc

SEQ ID NO: 768909 - DNA, 15 bp, Homo sapiens
attctaattgcctcc

SEQ ID NO: 768910 - DNA, 15 bp, Homo sapiens
ttctaattgcctccc

SEQ ID NO: 768911 - DNA, 15 bp, Homo sapiens
tctaattgcctccca

SEQ ID NO: 768912 - DNA, 15 bp, Homo sapiens
ctaattgcctcccaa

SEQ ID NO: 768913 - DNA, 15 bp, Homo sapiens
taattgcctcccaaa

SEQ ID NO: 768914 - DNA, 15 bp, Homo sapiens
aattgcctcccaaag

SEQ ID NO: 768915 - DNA, 15 bp, Homo sapiens
attgcctcccaaagg

SEQ ID NO: 768916 - DNA, 15 bp, Homo sapiens
ttgcctcccaaaggc

SEQ ID NO: 768917 - DNA, 15 bp, Homo sapiens
tgcctcccaaaggcc

SEQ ID NO: 768918 - DNA, 15 bp, Homo sapiens
gcctcccaaaggccc

SEQ ID NO: 768919 - DNA, 15 bp, Homo sapiens
cctcccaaaggcccc

SEQ ID NO: 768920 - DNA, 15 bp, Homo sapiens
ctcccaaaggcccca

SEQ ID NO: 768921 - DNA, 15 bp, Homo sapiens
tcccaaaggccccat

SEQ ID NO: 768922 - DNA, 15 bp, Homo sapiens
cccaaaggccccatc

SEQ ID NO: 768923 - DNA, 15 bp, Homo sapiens
ccaaaggccccatct

SEQ ID NO: 768924 - DNA, 15 bp, Homo sapiens
caaaggccccatctc

SEQ ID NO: 768925 - DNA, 15 bp, Homo sapiens
aaaggccccatctcc

SEQ ID NO: 768926 - DNA, 15 bp, Homo sapiens
aaggccccatctcca

SEQ ID NO: 768927 - DNA, 15 bp, Homo sapiens
aggccccatctccaa

SEQ ID NO: 768928 - DNA, 15 bp, Homo sapiens
ggccccatctccaaa

SEQ ID NO: 768929 - DNA, 15 bp, Homo sapiens
gccccatctccaaat

SEQ ID NO: 768930 - DNA, 15 bp, Homo sapiens
ccccatctccaaata

SEQ ID NO: 768931 - DNA, 15 bp, Homo sapiens
cccatctccaaatac

SEQ ID NO: 768932 - DNA, 15 bp, Homo sapiens
ccatctccaaatacc

SEQ ID NO: 768933 - DNA, 15 bp, Homo sapiens
catctccaaatacca

SEQ ID NO: 768934 - DNA, 15 bp, Homo sapiens
atctccaaataccat

SEQ ID NO: 768935 - DNA, 15 bp, Homo sapiens
tctccaaataccatc

SEQ ID NO: 768936 - DNA, 15 bp, Homo sapiens
ctccaaataccatca

SEQ ID NO: 768937 - DNA, 15 bp, Homo sapiens
tccaaataccatcac

SEQ ID NO: 768938 - DNA, 15 bp, Homo sapiens
ccaaataccatcaca

SEQ ID NO: 768939 - DNA, 15 bp, Homo sapiens
caaataccatcacat

SEQ ID NO: 768940 - DNA, 15 bp, Homo sapiens
aaataccatcacatt

SEQ ID NO: 768941 - DNA, 15 bp, Homo sapiens
aataccatcacatta

SEQ ID NO: 768942 - DNA, 15 bp, Homo sapiens
ataccatcacattag

SEQ ID NO: 768943 - DNA, 15 bp, Homo sapiens
taccatcacattagg

SEQ ID NO: 768944 - DNA, 15 bp, Homo sapiens
accatcacattaggg

SEQ ID NO: 768945 - DNA, 15 bp, Homo sapiens
ccatcacattagggg

SEQ ID NO: 768946 - DNA, 15 bp, Homo sapiens
catcacattaggggc

SEQ ID NO: 768947 - DNA, 15 bp, Homo sapiens
atcacattaggggct

SEQ ID NO: 768948 - DNA, 15 bp, Homo sapiens
tcacattaggggcta

SEQ ID NO: 768949 - DNA, 15 bp, Homo sapiens
cacattaggggctac

SEQ ID NO: 768950 - DNA, 15 bp, Homo sapiens
acattaggggctaca

SEQ ID NO: 768951 - DNA, 15 bp, Homo sapiens
cattaggggctacag

SEQ ID NO: 768952 - DNA, 15 bp, Homo sapiens
attaggggctacagc

SEQ ID NO: 768953 - DNA, 15 bp, Homo sapiens
ttaggggctacagct

SEQ ID NO: 768954 - DNA, 15 bp, Homo sapiens
taggggctacagctt

SEQ ID NO: 768955 - DNA, 15 bp, Homo sapiens
aggggctacagcttc

SEQ ID NO: 768956 - DNA, 15 bp, Homo sapiens
ggggctacagcttca

SEQ ID NO: 768957 - DNA, 15 bp, Homo sapiens
gggctacagcttcaa

SEQ ID NO: 768958 - DNA, 15 bp, Homo sapiens
ggctacagcttcaac

SEQ ID NO: 768959 - DNA, 15 bp, Homo sapiens
gctacagcttcaacg

SEQ ID NO: 768960 - DNA, 15 bp, Homo sapiens
ctacagcttcaacgt

SEQ ID NO: 768961 - DNA, 15 bp, Homo sapiens
tacagcttcaacgta

SEQ ID NO: 768962 - DNA, 15 bp, Homo sapiens
acagcttcaacgtaa

SEQ ID NO: 768963 - DNA, 15 bp, Homo sapiens
cagcttcaacgtaag

SEQ ID NO: 768964 - DNA, 15 bp, Homo sapiens
agcttcaacgtaaga

SEQ ID NO: 768965 - DNA, 15 bp, Homo sapiens
gcttcaacgtaagaa

SEQ ID NO: 768966 - DNA, 15 bp, Homo sapiens
cttcaacgtaagaat

SEQ ID NO: 768967 - DNA, 15 bp, Homo sapiens
ttcaacgtaagaatt

SEQ ID NO: 768968 - DNA, 15 bp, Homo sapiens
tcaacgtaagaattt

SEQ ID NO: 768969 - DNA, 15 bp, Homo sapiens
caacgtaagaatttt

SEQ ID NO: 768970 - DNA, 15 bp, Homo sapiens
aacgtaagaattttg

SEQ ID NO: 768971 - DNA, 15 bp, Homo sapiens
acgtaagaattttgg

SEQ ID NO: 768972 - DNA, 15 bp, Homo sapiens
cgtaagaattttgga

SEQ ID NO: 768973 - DNA, 15 bp, Homo sapiens
gtaagaattttggag

SEQ ID NO: 768974 - DNA, 15 bp, Homo sapiens
taagaattttggagg

SEQ ID NO: 768975 - DNA, 15 bp, Homo sapiens
aagaattttggagga

SEQ ID NO: 768976 - DNA, 15 bp, Homo sapiens
agaattttggaggaa

SEQ ID NO: 768977 - DNA, 15 bp, Homo sapiens
gaattttggaggaat

SEQ ID NO: 768978 - DNA, 15 bp, Homo sapiens
aattttggaggaatg

SEQ ID NO: 768979 - DNA, 15 bp, Homo sapiens
attttggaggaatgc

SEQ ID NO: 768980 - DNA, 15 bp, Homo sapiens
ttttggaggaatgca

SEQ ID NO: 768981 - DNA, 15 bp, Homo sapiens
tttggaggaatgcaa

SEQ ID NO: 768982 - DNA, 15 bp, Homo sapiens
ttggaggaatgcaat

SEQ ID NO: 768983 - DNA, 15 bp, Homo sapiens
tggaggaatgcaatt

SEQ ID NO: 768984 - DNA, 15 bp, Homo sapiens
ggaggaatgcaattc

SEQ ID NO: 768985 - DNA, 15 bp, Homo sapiens
gaggaatgcaattca

SEQ ID NO: 768986 - DNA, 15 bp, Homo sapiens
aggaatgcaattcag

SEQ ID NO: 768987 - DNA, 15 bp, Homo sapiens
ggaatgcaattcagt

SEQ ID NO: 768988 - DNA, 15 bp, Homo sapiens
gaatgcaattcagtc

SEQ ID NO: 768989 - DNA, 15 bp, Homo sapiens
aatgcaattcagtcc

SEQ ID NO: 768990 - DNA, 15 bp, Homo sapiens
atgcaattcagtcca

SEQ ID NO: 768991 - DNA, 15 bp, Homo sapiens
tgcaattcagtccat

SEQ ID NO: 768992 - DNA, 15 bp, Homo sapiens
gcaattcagtccata

SEQ ID NO: 768993 - DNA, 15 bp, Homo sapiens
caattcagtccataa

SEQ ID NO: 768994 - DNA, 15 bp, Homo sapiens
aattcagtccataat

SEQ ID NO: 768995 - DNA, 15 bp, Homo sapiens
attcagtccataata

SEQ ID NO: 768996 - DNA, 15 bp, Homo sapiens
ttcagtccataatag

SEQ ID NO: 768997 - DNA, 15 bp, Homo sapiens
tcagtccataataga

SEQ ID NO: 768998 - DNA, 15 bp, Homo sapiens
cagtccataatagat

SEQ ID NO: 768999 - DNA, 15 bp, Homo sapiens
agtccataatagatg

SEQ ID NO: 769000 - DNA, 15 bp, Homo sapiens
gtccataatagatgg

SEQ ID NO: 769001 - DNA, 15 bp, Homo sapiens
tccataatagatggt

SEQ ID NO: 769002 - DNA, 15 bp, Homo sapiens
ccataatagatggta

SEQ ID NO: 769003 - DNA, 15 bp, Homo sapiens
cataatagatggtaa

SEQ ID NO: 769004 - DNA, 15 bp, Homo sapiens
ataatagatggtaat

SEQ ID NO: 769005 - DNA, 15 bp, Homo sapiens
taatagatggtaatt

SEQ ID NO: 769006 - DNA, 15 bp, Homo sapiens
aatagatggtaattt

SEQ ID NO: 769007 - DNA, 15 bp, Homo sapiens
atagatggtaatttt

SEQ ID NO: 769008 - DNA, 15 bp, Homo sapiens
tagatggtaattttg

SEQ ID NO: 769009 - DNA, 15 bp, Homo sapiens
agatggtaattttgc

SEQ ID NO: 769010 - DNA, 15 bp, Homo sapiens
gatggtaattttgcc

SEQ ID NO: 769011 - DNA, 15 bp, Homo sapiens
atggtaattttgcca

SEQ ID NO: 769012 - DNA, 15 bp, Homo sapiens
tggtaattttgccag

SEQ ID NO: 769013 - DNA, 15 bp, Homo sapiens
ggtaattttgccagc

SEQ ID NO: 769014 - DNA, 15 bp, Homo sapiens
gtaattttgccagca

SEQ ID NO: 769015 - DNA, 15 bp, Homo sapiens
taattttgccagcag

SEQ ID NO: 769016 - DNA, 15 bp, Homo sapiens
aattttgccagcagg

SEQ ID NO: 769017 - DNA, 15 bp, Homo sapiens
attttgccagcaggt

SEQ ID NO: 769018 - DNA, 15 bp, Homo sapiens
ttttgccagcaggta

SEQ ID NO: 769019 - DNA, 15 bp, Homo sapiens
tttgccagcaggtac

SEQ ID NO: 769020 - DNA, 15 bp, Homo sapiens
ttgccagcaggtacc

SEQ ID NO: 769021 - DNA, 15 bp, Homo sapiens
tgccagcaggtaccc

SEQ ID NO: 769022 - DNA, 15 bp, Homo sapiens
gccagcaggtaccct

SEQ ID NO: 769023 - DNA, 15 bp, Homo sapiens
ccagcaggtacccta

SEQ ID NO: 769024 - DNA, 15 bp, Homo sapiens
cagcaggtaccctat

SEQ ID NO: 769025 - DNA, 15 bp, Homo sapiens
agcaggtaccctatc

SEQ ID NO: 769026 - DNA, 15 bp, Homo sapiens
gcaggtaccctatct

SEQ ID NO: 769027 - DNA, 15 bp, Homo sapiens
caggtaccctatctt

SEQ ID NO: 769028 - DNA, 15 bp, Homo sapiens
aggtaccctatctta

SEQ ID NO: 769029 - DNA, 15 bp, Homo sapiens
ggtaccctatcttat

SEQ ID NO: 769030 - DNA, 15 bp, Homo sapiens
gtaccctatcttata

SEQ ID NO: 769031 - DNA, 15 bp, Homo sapiens
taccctatcttatac

SEQ ID NO: 769032 - DNA, 15 bp, Homo sapiens
accctatcttatact

SEQ ID NO: 769033 - DNA, 15 bp, Homo sapiens
ccctatcttatactt

SEQ ID NO: 769034 - DNA, 15 bp, Homo sapiens
cctatcttatacttt

SEQ ID NO: 769035 - DNA, 15 bp, Homo sapiens
ctatcttatactttt

SEQ ID NO: 769036 - DNA, 15 bp, Homo sapiens
tatcttatacttttt

SEQ ID NO: 769037 - DNA, 15 bp, Homo sapiens
atcttatactttttc

SEQ ID NO: 769038 - DNA, 15 bp, Homo sapiens
tcttatactttttca

SEQ ID NO: 769039 - DNA, 15 bp, Homo sapiens
cttatactttttcag

SEQ ID NO: 769040 - DNA, 15 bp, Homo sapiens
ttatactttttcagc

SEQ ID NO: 769041 - DNA, 15 bp, Homo sapiens
tatactttttcagcc

SEQ ID NO: 769042 - DNA, 15 bp, Homo sapiens
atactttttcagccc

SEQ ID NO: 769043 - DNA, 15 bp, Homo sapiens
tactttttcagcccc

SEQ ID NO: 769044 - DNA, 15 bp, Homo sapiens
actttttcagcccct

SEQ ID NO: 769045 - DNA, 15 bp, Homo sapiens
ctttttcagccccta

SEQ ID NO: 769046 - DNA, 15 bp, Homo sapiens
tttttcagcccctaa

SEQ ID NO: 769047 - DNA, 15 bp, Homo sapiens
ttttcagcccctaag

SEQ ID NO: 769048 - DNA, 15 bp, Homo sapiens
tttcagcccctaagc

SEQ ID NO: 769049 - DNA, 15 bp, Homo sapiens
ttcagcccctaagca

SEQ ID NO: 769050 - DNA, 15 bp, Homo sapiens
tcagcccctaagcag

SEQ ID NO: 769051 - DNA, 15 bp, Homo sapiens
cagcccctaagcagg

SEQ ID NO: 769052 - DNA, 15 bp, Homo sapiens
agcccctaagcaggg

SEQ ID NO: 769053 - DNA, 15 bp, Homo sapiens
gcccctaagcaggga

SEQ ID NO: 769054 - DNA, 15 bp, Homo sapiens
cccctaagcagggag

SEQ ID NO: 769055 - DNA, 15 bp, Homo sapiens
ccctaagcagggagc

SEQ ID NO: 769056 - DNA, 15 bp, Homo sapiens
cctaagcagggagct

SEQ ID NO: 769057 - DNA, 15 bp, Homo sapiens
ctaagcagggagctc

SEQ ID NO: 769058 - DNA, 15 bp, Homo sapiens
taagcagggagctca

SEQ ID NO: 769059 - DNA, 15 bp, Homo sapiens
aagcagggagctcat

SEQ ID NO: 769060 - DNA, 15 bp, Homo sapiens
agcagggagctcatt

SEQ ID NO: 769061 - DNA, 15 bp, Homo sapiens
gcagggagctcattc

SEQ ID NO: 769062 - DNA, 15 bp, Homo sapiens
cagggagctcattct

SEQ ID NO: 769063 - DNA, 15 bp, Homo sapiens
agggagctcattcta

SEQ ID NO: 769064 - DNA, 15 bp, Homo sapiens
gggagctcattctaa

SEQ ID NO: 769065 - DNA, 15 bp, Homo sapiens
ggagctcattctaat

SEQ ID NO: 769066 - DNA, 15 bp, Homo sapiens
gagctcattctaatt

SEQ ID NO: 769067 - DNA, 15 bp, Homo sapiens
agctcattctaattg

SEQ ID NO: 769068 - DNA, 15 bp, Homo sapiens
gctcattctaattgt

SEQ ID NO: 769069 - DNA, 15 bp, Homo sapiens
ctcattctaattgta

SEQ ID NO: 769070 - DNA, 15 bp, Homo sapiens
tcattctaattgtag

SEQ ID NO: 769071 - DNA, 15 bp, Homo sapiens
cattctaattgtagc

SEQ ID NO: 769072 - DNA, 15 bp, Homo sapiens
attctaattgtagca

SEQ ID NO: 769073 - DNA, 15 bp, Homo sapiens
ttctaattgtagcac

SEQ ID NO: 769074 - DNA, 15 bp, Homo sapiens
tctaattgtagcaca

SEQ ID NO: 769075 - DNA, 15 bp, Homo sapiens
ctaattgtagcacat

SEQ ID NO: 769076 - DNA, 15 bp, Homo sapiens
taattgtagcacatg

SEQ ID NO: 769077 - DNA, 15 bp, Homo sapiens
aattgtagcacatgt

SEQ ID NO: 769078 - DNA, 15 bp, Homo sapiens
attgtagcacatgtg

SEQ ID NO: 769079 - DNA, 15 bp, Homo sapiens
ttgtagcacatgtgc

SEQ ID NO: 769080 - DNA, 15 bp, Homo sapiens
tgtagcacatgtgct

SEQ ID NO: 769081 - DNA, 15 bp, Homo sapiens
gtagcacatgtgctc

SEQ ID NO: 769082 - DNA, 15 bp, Homo sapiens
tagcacatgtgctct

SEQ ID NO: 769083 - DNA, 15 bp, Homo sapiens
agcacatgtgctctc

SEQ ID NO: 769084 - DNA, 15 bp, Homo sapiens
gcacatgtgctctca

SEQ ID NO: 769085 - DNA, 15 bp, Homo sapiens
cacatgtgctctcat

SEQ ID NO: 769086 - DNA, 15 bp, Homo sapiens
acatgtgctctcatg

SEQ ID NO: 769087 - DNA, 15 bp, Homo sapiens
catgtgctctcatgg

SEQ ID NO: 769088 - DNA, 15 bp, Homo sapiens
atgtgctctcatgga

SEQ ID NO: 769089 - DNA, 15 bp, Homo sapiens
tgtgctctcatggag

SEQ ID NO: 769090 - DNA, 15 bp, Homo sapiens
gtgctctcatggaga

SEQ ID NO: 769091 - DNA, 15 bp, Homo sapiens
tgctctcatggagat

SEQ ID NO: 769092 - DNA, 15 bp, Homo sapiens
gctctcatggagatc

SEQ ID NO: 769093 - DNA, 15 bp, Homo sapiens
ctctcatggagatca

SEQ ID NO: 769094 - DNA, 15 bp, Homo sapiens
tctcatggagatcag

SEQ ID NO: 769095 - DNA, 15 bp, Homo sapiens
ctcatggagatcaga

SEQ ID NO: 769096 - DNA, 15 bp, Homo sapiens
tcatggagatcagag

SEQ ID NO: 769097 - DNA, 15 bp, Homo sapiens
catggagatcagagt

SEQ ID NO: 769098 - DNA, 15 bp, Homo sapiens
atggagatcagagtc

SEQ ID NO: 769099 - DNA, 15 bp, Homo sapiens
tggagatcagagtca

SEQ ID NO: 769100 - DNA, 15 bp, Homo sapiens
ggagatcagagtcag

SEQ ID NO: 769101 - DNA, 15 bp, Homo sapiens
gagatcagagtcagt

SEQ ID NO: 769102 - DNA, 15 bp, Homo sapiens
agatcagagtcagta

SEQ ID NO: 769103 - DNA, 15 bp, Homo sapiens
gatcagagtcagtat

SEQ ID NO: 769104 - DNA, 15 bp, Homo sapiens
atcagagtcagtatt

SEQ ID NO: 769105 - DNA, 15 bp, Homo sapiens
tcagagtcagtattg

SEQ ID NO: 769106 - DNA, 15 bp, Homo sapiens
cagagtcagtattgt

SEQ ID NO: 769107 - DNA, 15 bp, Homo sapiens
agagtcagtattgtt

SEQ ID NO: 769108 - DNA, 15 bp, Homo sapiens
gagtcagtattgttt

SEQ ID NO: 769109 - DNA, 15 bp, Homo sapiens
agtcagtattgtttg

SEQ ID NO: 769110 - DNA, 15 bp, Homo sapiens
gtcagtattgtttga

SEQ ID NO: 769111 - DNA, 15 bp, Homo sapiens
tcagtattgtttgat

SEQ ID NO: 769112 - DNA, 15 bp, Homo sapiens
cagtattgtttgatt

SEQ ID NO: 769113 - DNA, 15 bp, Homo sapiens
agtattgtttgatta

SEQ ID NO: 769114 - DNA, 15 bp, Homo sapiens
gtattgtttgattaa

SEQ ID NO: 769115 - DNA, 15 bp, Homo sapiens
tattgtttgattaaa

SEQ ID NO: 769116 - DNA, 15 bp, Homo sapiens
attgtttgattaaag

SEQ ID NO: 769117 - DNA, 15 bp, Homo sapiens
ttgtttgattaaagg

SEQ ID NO: 769118 - DNA, 15 bp, Homo sapiens
tgtttgattaaaggt

SEQ ID NO: 769119 - DNA, 15 bp, Homo sapiens
gtttgattaaaggtg

SEQ ID NO: 769120 - DNA, 15 bp, Homo sapiens
tttgattaaaggtgg

SEQ ID NO: 769121 - DNA, 15 bp, Homo sapiens
ttgattaaaggtggt

SEQ ID NO: 769122 - DNA, 15 bp, Homo sapiens
tgattaaaggtggta

SEQ ID NO: 769123 - DNA, 15 bp, Homo sapiens
gattaaaggtggtag

SEQ ID NO: 769124 - DNA, 15 bp, Homo sapiens
attaaaggtggtagc

SEQ ID NO: 769125 - DNA, 15 bp, Homo sapiens
ttaaaggtggtagct

SEQ ID NO: 769126 - DNA, 15 bp, Homo sapiens
taaaggtggtagctt

SEQ ID NO: 769127 - DNA, 15 bp, Homo sapiens
aaaggtggtagctta

SEQ ID NO: 769128 - DNA, 15 bp, Homo sapiens
aaggtggtagcttac

SEQ ID NO: 769129 - DNA, 15 bp, Homo sapiens
aggtggtagcttact

SEQ ID NO: 769130 - DNA, 15 bp, Homo sapiens
ggtggtagcttacta

SEQ ID NO: 769131 - DNA, 15 bp, Homo sapiens
gtggtagcttactaa

SEQ ID NO: 769132 - DNA, 15 bp, Homo sapiens
tggtagcttactaat

SEQ ID NO: 769133 - DNA, 15 bp, Homo sapiens
ggtagcttactaatc

SEQ ID NO: 769134 - DNA, 15 bp, Homo sapiens
gtagcttactaatct

SEQ ID NO: 769135 - DNA, 15 bp, Homo sapiens
tagcttactaatctt

SEQ ID NO: 769136 - DNA, 15 bp, Homo sapiens
agcttactaatcttt

SEQ ID NO: 769137 - DNA, 15 bp, Homo sapiens
gcttactaatctttt

SEQ ID NO: 769138 - DNA, 15 bp, Homo sapiens
cttactaatctttta

SEQ ID NO: 769139 - DNA, 15 bp, Homo sapiens
ttactaatcttttac

SEQ ID NO: 769140 - DNA, 15 bp, Homo sapiens
tactaatcttttact

SEQ ID NO: 769141 - DNA, 15 bp, Homo sapiens
actaatcttttactc

SEQ ID NO: 769142 - DNA, 15 bp, Homo sapiens
ctaatcttttactca

SEQ ID NO: 769143 - DNA, 15 bp, Homo sapiens
taatcttttactcac

SEQ ID NO: 769144 - DNA, 15 bp, Homo sapiens
aatcttttactcact

SEQ ID NO: 769145 - DNA, 15 bp, Homo sapiens
atcttttactcactg

SEQ ID NO: 769146 - DNA, 15 bp, Homo sapiens
tcttttactcactgt

SEQ ID NO: 769147 - DNA, 15 bp, Homo sapiens
cttttactcactgtg

SEQ ID NO: 769148 - DNA, 15 bp, Homo sapiens
ttttactcactgtga

SEQ ID NO: 769149 - DNA, 15 bp, Homo sapiens
tttactcactgtgat

SEQ ID NO: 769150 - DNA, 15 bp, Homo sapiens
ttactcactgtgata

SEQ ID NO: 769151 - DNA, 15 bp, Homo sapiens
tactcactgtgatat

SEQ ID NO: 769152 - DNA, 15 bp, Homo sapiens
actcactgtgatatg

SEQ ID NO: 769153 - DNA, 15 bp, Homo sapiens
ctcactgtgatatga

SEQ ID NO: 769154 - DNA, 15 bp, Homo sapiens
tcactgtgatatgaa

SEQ ID NO: 769155 - DNA, 15 bp, Homo sapiens
cactgtgatatgaaa

SEQ ID NO: 769156 - DNA, 15 bp, Homo sapiens
actgtgatatgaaat

SEQ ID NO: 769157 - DNA, 15 bp, Homo sapiens
ctgtgatatgaaatt

SEQ ID NO: 769158 - DNA, 15 bp, Homo sapiens
tgtgatatgaaattc

SEQ ID NO: 769159 - DNA, 15 bp, Homo sapiens
gtgatatgaaattca

SEQ ID NO: 769160 - DNA, 15 bp, Homo sapiens
tgatatgaaattcaa

SEQ ID NO: 769161 - DNA, 15 bp, Homo sapiens
gatatgaaattcaat

SEQ ID NO: 769162 - DNA, 15 bp, Homo sapiens
atatgaaattcaatc

SEQ ID NO: 769163 - DNA, 15 bp, Homo sapiens
tatgaaattcaatca

SEQ ID NO: 769164 - DNA, 15 bp, Homo sapiens
atgaaattcaatcat

SEQ ID NO: 769165 - DNA, 15 bp, Homo sapiens
tgaaattcaatcata

SEQ ID NO: 769166 - DNA, 15 bp, Homo sapiens
gaaattcaatcatac

SEQ ID NO: 769167 - DNA, 15 bp, Homo sapiens
aaattcaatcatact

SEQ ID NO: 769168 - DNA, 15 bp, Homo sapiens
aattcaatcatactt

SEQ ID NO: 769169 - DNA, 15 bp, Homo sapiens
attcaatcatacttt

SEQ ID NO: 769170 - DNA, 15 bp, Homo sapiens
ttcaatcatactttc

SEQ ID NO: 769171 - DNA, 15 bp, Homo sapiens
tcaatcatactttcg

SEQ ID NO: 769172 - DNA, 15 bp, Homo sapiens
caatcatactttcgt

SEQ ID NO: 769173 - DNA, 15 bp, Homo sapiens
aatcatactttcgta

SEQ ID NO: 769174 - DNA, 15 bp, Homo sapiens
atcatactttcgtag

SEQ ID NO: 769175 - DNA, 15 bp, Homo sapiens
tcatactttcgtagt

SEQ ID NO: 769176 - DNA, 15 bp, Homo sapiens
catactttcgtagta

SEQ ID NO: 769177 - DNA, 15 bp, Homo sapiens
atactttcgtagtag

SEQ ID NO: 769178 - DNA, 15 bp, Homo sapiens
tactttcgtagtagt

SEQ ID NO: 769179 - DNA, 15 bp, Homo sapiens
actttcgtagtagtc

SEQ ID NO: 769180 - DNA, 15 bp, Homo sapiens
ctttcgtagtagtct

SEQ ID NO: 769181 - DNA, 15 bp, Homo sapiens
tttcgtagtagtcta

SEQ ID NO: 769182 - DNA, 15 bp, Homo sapiens
ttcgtagtagtctat

SEQ ID NO: 769183 - DNA, 15 bp, Homo sapiens
tcgtagtagtctatg

SEQ ID NO: 769184 - DNA, 15 bp, Homo sapiens
cgtagtagtctatgg

SEQ ID NO: 769185 - DNA, 15 bp, Homo sapiens
gtagtagtctatgga

SEQ ID NO: 769186 - DNA, 15 bp, Homo sapiens
tagtagtctatggaa

SEQ ID NO: 769187 - DNA, 15 bp, Homo sapiens
agtagtctatggaat

SEQ ID NO: 769188 - DNA, 15 bp, Homo sapiens
gtagtctatggaatt

SEQ ID NO: 769189 - DNA, 15 bp, Homo sapiens
tagtctatggaattt

SEQ ID NO: 769190 - DNA, 15 bp, Homo sapiens
agtctatggaattta

SEQ ID NO: 769191 - DNA, 15 bp, Homo sapiens
gtctatggaatttat

SEQ ID NO: 769192 - DNA, 15 bp, Homo sapiens
tctatggaatttatt

SEQ ID NO: 769193 - DNA, 15 bp, Homo sapiens
ctatggaatttattt

SEQ ID NO: 769194 - DNA, 15 bp, Homo sapiens
tatggaatttatttc

SEQ ID NO: 769195 - DNA, 15 bp, Homo sapiens
atggaatttatttca

SEQ ID NO: 769196 - DNA, 15 bp, Homo sapiens
tggaatttatttcag

SEQ ID NO: 769197 - DNA, 15 bp, Homo sapiens
ggaatttatttcagt

SEQ ID NO: 769198 - DNA, 15 bp, Homo sapiens
gaatttatttcagtg

SEQ ID NO: 769199 - DNA, 15 bp, Homo sapiens
aatttatttcagtga

SEQ ID NO: 769200 - DNA, 15 bp, Homo sapiens
atttatttcagtgag

SEQ ID NO: 769201 - DNA, 15 bp, Homo sapiens
tttatttcagtgagc

SEQ ID NO: 769202 - DNA, 15 bp, Homo sapiens
ttatttcagtgagct

SEQ ID NO: 769203 - DNA, 15 bp, Homo sapiens
tatttcagtgagctg

SEQ ID NO: 769204 - DNA, 15 bp, Homo sapiens
atttcagtgagctgg

SEQ ID NO: 769205 - DNA, 15 bp, Homo sapiens
tttcagtgagctggt

SEQ ID NO: 769206 - DNA, 15 bp, Homo sapiens
ttcagtgagctggtc

SEQ ID NO: 769207 - DNA, 15 bp, Homo sapiens
tcagtgagctggtct

SEQ ID NO: 769208 - DNA, 15 bp, Homo sapiens
cagtgagctggtctg

SEQ ID NO: 769209 - DNA, 15 bp, Homo sapiens
agtgagctggtctgt

SEQ ID NO: 769210 - DNA, 15 bp, Homo sapiens
gtgagctggtctgtt

SEQ ID NO: 769211 - DNA, 15 bp, Homo sapiens
tgagctggtctgtta

SEQ ID NO: 769212 - DNA, 15 bp, Homo sapiens
gagctggtctgttag

SEQ ID NO: 769213 - DNA, 15 bp, Homo sapiens
agctggtctgttaga

SEQ ID NO: 769214 - DNA, 15 bp, Homo sapiens
gctggtctgttagaa

SEQ ID NO: 769215 - DNA, 15 bp, Homo sapiens
ctggtctgttagaat

SEQ ID NO: 769216 - DNA, 15 bp, Homo sapiens
tggtctgttagaatg

SEQ ID NO: 769217 - DNA, 15 bp, Homo sapiens
ggtctgttagaatgc

SEQ ID NO: 769218 - DNA, 15 bp, Homo sapiens
gtctgttagaatgct

SEQ ID NO: 769219 - DNA, 15 bp, Homo sapiens
tctgttagaatgcta

SEQ ID NO: 769220 - DNA, 15 bp, Homo sapiens
ctgttagaatgctaa

SEQ ID NO: 769221 - DNA, 15 bp, Homo sapiens
tgttagaatgctaag

SEQ ID NO: 769222 - DNA, 15 bp, Homo sapiens
gttagaatgctaagc

SEQ ID NO: 769223 - DNA, 15 bp, Homo sapiens
ttagaatgctaagca

SEQ ID NO: 769224 - DNA, 15 bp, Homo sapiens
tagaatgctaagcag

SEQ ID NO: 769225 - DNA, 15 bp, Homo sapiens
agaatgctaagcagc

SEQ ID NO: 769226 - DNA, 15 bp, Homo sapiens
gaatgctaagcagca

SEQ ID NO: 769227 - DNA, 15 bp, Homo sapiens
aatgctaagcagcag

SEQ ID NO: 769228 - DNA, 15 bp, Homo sapiens
atgctaagcagcagt

SEQ ID NO: 769229 - DNA, 15 bp, Homo sapiens
tgctaagcagcagta

SEQ ID NO: 769230 - DNA, 15 bp, Homo sapiens
gctaagcagcagtag

SEQ ID NO: 769231 - DNA, 15 bp, Homo sapiens
ctaagcagcagtagc

SEQ ID NO: 769232 - DNA, 15 bp, Homo sapiens
taagcagcagtagca

SEQ ID NO: 769233 - DNA, 15 bp, Homo sapiens
aagcagcagtagcag

SEQ ID NO: 769234 - DNA, 15 bp, Homo sapiens
agcagcagtagcagt

SEQ ID NO: 769235 - DNA, 15 bp, Homo sapiens
gcagcagtagcagtg

SEQ ID NO: 769236 - DNA, 15 bp, Homo sapiens
cagcagtagcagtgc

SEQ ID NO: 769237 - DNA, 15 bp, Homo sapiens
agcagtagcagtgcc

SEQ ID NO: 769238 - DNA, 15 bp, Homo sapiens
gcagtagcagtgcca

SEQ ID NO: 769239 - DNA, 15 bp, Homo sapiens
cagtagcagtgccat

SEQ ID NO: 769240 - DNA, 15 bp, Homo sapiens
agtagcagtgccatt

SEQ ID NO: 769241 - DNA, 15 bp, Homo sapiens
gtagcagtgccattc

SEQ ID NO: 769242 - DNA, 15 bp, Homo sapiens
tagcagtgccattca

SEQ ID NO: 769243 - DNA, 15 bp, Homo sapiens
agcagtgccattcat

SEQ ID NO: 769244 - DNA, 15 bp, Homo sapiens
gcagtgccattcatg

SEQ ID NO: 769245 - DNA, 15 bp, Homo sapiens
cagtgccattcatgt

SEQ ID NO: 769246 - DNA, 15 bp, Homo sapiens
agtgccattcatgtg

SEQ ID NO: 769247 - DNA, 15 bp, Homo sapiens
gtgccattcatgtgt

SEQ ID NO: 769248 - DNA, 15 bp, Homo sapiens
tgccattcatgtgtt

SEQ ID NO: 769249 - DNA, 15 bp, Homo sapiens
gccattcatgtgttt

SEQ ID NO: 769250 - DNA, 15 bp, Homo sapiens
ccattcatgtgttta

SEQ ID NO: 769251 - DNA, 15 bp, Homo sapiens
cattcatgtgtttat

SEQ ID NO: 769252 - DNA, 15 bp, Homo sapiens
attcatgtgtttatt

SEQ ID NO: 769253 - DNA, 15 bp, Homo sapiens
ttcatgtgtttattt

SEQ ID NO: 769254 - DNA, 15 bp, Homo sapiens
tcatgtgtttatttt

SEQ ID NO: 769255 - DNA, 15 bp, Homo sapiens
catgtgtttattttt

SEQ ID NO: 769256 - DNA, 15 bp, Homo sapiens
atgtgtttatttttt

SEQ ID NO: 769257 - DNA, 15 bp, Homo sapiens
tgtgtttattttttt

SEQ ID NO: 769258 - DNA, 15 bp, Homo sapiens
gtgtttatttttttc

SEQ ID NO: 769259 - DNA, 15 bp, Homo sapiens
tgtttatttttttcc

SEQ ID NO: 769260 - DNA, 15 bp, Homo sapiens
gtttatttttttccc

SEQ ID NO: 769261 - DNA, 15 bp, Homo sapiens
tttatttttttccct

SEQ ID NO: 769262 - DNA, 15 bp, Homo sapiens
ttatttttttccctt

SEQ ID NO: 769263 - DNA, 15 bp, Homo sapiens
tatttttttcccttt

SEQ ID NO: 769264 - DNA, 15 bp, Homo sapiens
atttttttccctttt

SEQ ID NO: 769265 - DNA, 15 bp, Homo sapiens
ttttttcccttttcc

SEQ ID NO: 769266 - DNA, 15 bp, Homo sapiens
tttttcccttttcct

SEQ ID NO: 769267 - DNA, 15 bp, Homo sapiens
ttttcccttttcctt

SEQ ID NO: 769268 - DNA, 15 bp, Homo sapiens
tttcccttttccttt

SEQ ID NO: 769269 - DNA, 15 bp, Homo sapiens
ttcccttttcctttt

SEQ ID NO: 769270 - DNA, 15 bp, Homo sapiens
tcccttttccttttc

SEQ ID NO: 769271 - DNA, 15 bp, Homo sapiens
cccttttccttttct

SEQ ID NO: 769272 - DNA, 15 bp, Homo sapiens
ccttttccttttctg

SEQ ID NO: 769273 - DNA, 15 bp, Homo sapiens
cttttccttttctgg

SEQ ID NO: 769274 - DNA, 15 bp, Homo sapiens
ttttccttttctgga

SEQ ID NO: 769275 - DNA, 15 bp, Homo sapiens
tttccttttctggaa

SEQ ID NO: 769276 - DNA, 15 bp, Homo sapiens
ttccttttctggaac

SEQ ID NO: 769277 - DNA, 15 bp, Homo sapiens
tccttttctggaaca

SEQ ID NO: 769278 - DNA, 15 bp, Homo sapiens
ccttttctggaacat

SEQ ID NO: 769279 - DNA, 15 bp, Homo sapiens
cttttctggaacatt

SEQ ID NO: 769280 - DNA, 15 bp, Homo sapiens
ttttctggaacatta

SEQ ID NO: 769281 - DNA, 15 bp, Homo sapiens
tttctggaacattat

SEQ ID NO: 769282 - DNA, 15 bp, Homo sapiens
ttctggaacattata

SEQ ID NO: 769283 - DNA, 15 bp, Homo sapiens
tctggaacattatat

SEQ ID NO: 769284 - DNA, 15 bp, Homo sapiens
ctggaacattatatt

SEQ ID NO: 769285 - DNA, 15 bp, Homo sapiens
tggaacattatattt

SEQ ID NO: 769286 - DNA, 15 bp, Homo sapiens
ggaacattatattta

SEQ ID NO: 769287 - DNA, 15 bp, Homo sapiens
gaacattatatttaa

SEQ ID NO: 769288 - DNA, 15 bp, Homo sapiens
aacattatatttaat

SEQ ID NO: 769289 - DNA, 15 bp, Homo sapiens
acattatatttaata

SEQ ID NO: 769290 - DNA, 15 bp, Homo sapiens
cattatatttaatac

SEQ ID NO: 769291 - DNA, 15 bp, Homo sapiens
attatatttaataca

SEQ ID NO: 769292 - DNA, 15 bp, Homo sapiens
ttatatttaatacat

SEQ ID NO: 769293 - DNA, 15 bp, Homo sapiens
tatatttaatacatg

SEQ ID NO: 769294 - DNA, 15 bp, Homo sapiens
atatttaatacatgt

SEQ ID NO: 769295 - DNA, 15 bp, Homo sapiens
tatttaatacatgtt

SEQ ID NO: 769296 - DNA, 15 bp, Homo sapiens
atttaatacatgtta

SEQ ID NO: 769297 - DNA, 15 bp, Homo sapiens
tttaatacatgttaa

SEQ ID NO: 769298 - DNA, 15 bp, Homo sapiens
ttaatacatgttaaa

SEQ ID NO: 769299 - DNA, 15 bp, Homo sapiens
taatacatgttaaat

SEQ ID NO: 769300 - DNA, 15 bp, Homo sapiens
aatacatgttaaatt

SEQ ID NO: 769301 - DNA, 15 bp, Homo sapiens
atacatgttaaattt

SEQ ID NO: 769302 - DNA, 15 bp, Homo sapiens
tacatgttaaatttt

SEQ ID NO: 769303 - DNA, 15 bp, Homo sapiens
acatgttaaattttt

SEQ ID NO: 769304 - DNA, 15 bp, Homo sapiens
catgttaaatttttc

SEQ ID NO: 769305 - DNA, 15 bp, Homo sapiens
atgttaaatttttct

SEQ ID NO: 769306 - DNA, 15 bp, Homo sapiens
tgttaaatttttcta

SEQ ID NO: 769307 - DNA, 15 bp, Homo sapiens
gttaaatttttctaa

SEQ ID NO: 769308 - DNA, 15 bp, Homo sapiens
ttaaatttttctaag

SEQ ID NO: 769309 - DNA, 15 bp, Homo sapiens
taaatttttctaaga

SEQ ID NO: 769310 - DNA, 15 bp, Homo sapiens
aaatttttctaagat

SEQ ID NO: 769311 - DNA, 15 bp, Homo sapiens
aatttttctaagata

SEQ ID NO: 769312 - DNA, 15 bp, Homo sapiens
atttttctaagatac

SEQ ID NO: 769313 - DNA, 15 bp, Homo sapiens
tttttctaagataca

SEQ ID NO: 769314 - DNA, 15 bp, Homo sapiens
ttttctaagatacaa

SEQ ID NO: 769315 - DNA, 15 bp, Homo sapiens
tttctaagatacaat

SEQ ID NO: 769316 - DNA, 15 bp, Homo sapiens
ttctaagatacaata

SEQ ID NO: 769317 - DNA, 15 bp, Homo sapiens
tctaagatacaataa

SEQ ID NO: 769318 - DNA, 15 bp, Homo sapiens
ctaagatacaataaa

SEQ ID NO: 769319 - DNA, 15 bp, Homo sapiens
taagatacaataaat

SEQ ID NO: 769320 - DNA, 15 bp, Homo sapiens
aagatacaataaatt

SEQ ID NO: 769321 - DNA, 15 bp, Homo sapiens
agatacaataaattt

SEQ ID NO: 769322 - DNA, 15 bp, Homo sapiens
gatacaataaattta

SEQ ID NO: 769323 - DNA, 15 bp, Homo sapiens
atacaataaatttat

SEQ ID NO: 769324 - DNA, 15 bp, Homo sapiens
tacaataaatttatg

SEQ ID NO: 769325 - DNA, 15 bp, Homo sapiens
acaataaatttatga

SEQ ID NO: 769326 - DNA, 15 bp, Homo sapiens
caataaatttatgag

SEQ ID NO: 769327 - DNA, 15 bp, Homo sapiens
aataaatttatgagg

SEQ ID NO: 769328 - DNA, 15 bp, Homo sapiens
ataaatttatgaggt

SEQ ID NO: 769329 - DNA, 15 bp, Homo sapiens
taaatttatgaggtc

SEQ ID NO: 769330 - DNA, 15 bp, Homo sapiens
aaatttatgaggtct

SEQ ID NO: 769331 - DNA, 15 bp, Homo sapiens
aatttatgaggtctc

SEQ ID NO: 769332 - DNA, 15 bp, Homo sapiens
atttatgaggtctcc

SEQ ID NO: 769333 - DNA, 15 bp, Homo sapiens
tttatgaggtctcct

SEQ ID NO: 769334 - DNA, 15 bp, Homo sapiens
ttatgaggtctcctt

SEQ ID NO: 769335 - DNA, 15 bp, Homo sapiens
tatgaggtctcctta

SEQ ID NO: 769336 - DNA, 15 bp, Homo sapiens
atgaggtctccttaa

SEQ ID NO: 769337 - DNA, 15 bp, Homo sapiens
tgaggtctccttaaa

SEQ ID NO: 769338 - DNA, 15 bp, Homo sapiens
gaggtctccttaaaa

SEQ ID NO: 769339 - DNA, 15 bp, Homo sapiens
aggtctccttaaaag

SEQ ID NO: 769340 - DNA, 15 bp, Homo sapiens
ggtctccttaaaaga

SEQ ID NO: 769341 - DNA, 15 bp, Homo sapiens
gtctccttaaaagat

SEQ ID NO: 769342 - DNA, 15 bp, Homo sapiens
tctccttaaaagata

SEQ ID NO: 769343 - DNA, 15 bp, Homo sapiens
ctccttaaaagatat

SEQ ID NO: 769344 - DNA, 15 bp, Homo sapiens
tccttaaaagatata

SEQ ID NO: 769345 - DNA, 15 bp, Homo sapiens
ccttaaaagatataa

SEQ ID NO: 769346 - DNA, 15 bp, Homo sapiens
cttaaaagatataat

SEQ ID NO: 769347 - DNA, 15 bp, Homo sapiens
ttaaaagatataatc

SEQ ID NO: 769348 - DNA, 15 bp, Homo sapiens
taaaagatataatca

SEQ ID NO: 769349 - DNA, 15 bp, Homo sapiens
aaaagatataatcat

SEQ ID NO: 769350 - DNA, 15 bp, Homo sapiens
aaagatataatcatt

SEQ ID NO: 769351 - DNA, 15 bp, Homo sapiens
aagatataatcatta

SEQ ID NO: 769352 - DNA, 15 bp, Homo sapiens
agatataatcattaa

SEQ ID NO: 769353 - DNA, 15 bp, Homo sapiens
gatataatcattaat

SEQ ID NO: 769354 - DNA, 15 bp, Homo sapiens
atataatcattaata

SEQ ID NO: 769355 - DNA, 15 bp, Homo sapiens
tataatcattaatac

SEQ ID NO: 769356 - DNA, 15 bp, Homo sapiens
ataatcattaataca

SEQ ID NO: 769357 - DNA, 15 bp, Homo sapiens
taatcattaatacaa

SEQ ID NO: 769358 - DNA, 15 bp, Homo sapiens
aatcattaatacaat

SEQ ID NO: 769359 - DNA, 15 bp, Homo sapiens
atcattaatacaata

SEQ ID NO: 769360 - DNA, 15 bp, Homo sapiens
tcattaatacaatag

SEQ ID NO: 769361 - DNA, 15 bp, Homo sapiens
cattaatacaatagt

SEQ ID NO: 769362 - DNA, 15 bp, Homo sapiens
attaatacaatagtt

SEQ ID NO: 769363 - DNA, 15 bp, Homo sapiens
ttaatacaatagttt

SEQ ID NO: 769364 - DNA, 15 bp, Homo sapiens
taatacaatagttta

SEQ ID NO: 769365 - DNA, 15 bp, Homo sapiens
aatacaatagtttat

SEQ ID NO: 769366 - DNA, 15 bp, Homo sapiens
atacaatagtttatc

SEQ ID NO: 769367 - DNA, 15 bp, Homo sapiens
tacaatagtttatca

SEQ ID NO: 769368 - DNA, 15 bp, Homo sapiens
acaatagtttatcat

SEQ ID NO: 769369 - DNA, 15 bp, Homo sapiens
caatagtttatcatg

SEQ ID NO: 769370 - DNA, 15 bp, Homo sapiens
aatagtttatcatgg

SEQ ID NO: 769371 - DNA, 15 bp, Homo sapiens
atagtttatcatggg

SEQ ID NO: 769372 - DNA, 15 bp, Homo sapiens
tagtttatcatgggt

SEQ ID NO: 769373 - DNA, 15 bp, Homo sapiens
agtttatcatgggta

SEQ ID NO: 769374 - DNA, 15 bp, Homo sapiens
gtttatcatgggtaa

SEQ ID NO: 769375 - DNA, 15 bp, Homo sapiens
tttatcatgggtaag

SEQ ID NO: 769376 - DNA, 15 bp, Homo sapiens
ttatcatgggtaagt

SEQ ID NO: 769377 - DNA, 15 bp, Homo sapiens
tatcatgggtaagtt

SEQ ID NO: 769378 - DNA, 15 bp, Homo sapiens
atcatgggtaagtta

SEQ ID NO: 769379 - DNA, 15 bp, Homo sapiens
tcatgggtaagttaa

SEQ ID NO: 769380 - DNA, 15 bp, Homo sapiens
catgggtaagttaaa

SEQ ID NO: 769381 - DNA, 15 bp, Homo sapiens
atgggtaagttaaat

SEQ ID NO: 769382 - DNA, 15 bp, Homo sapiens
tgggtaagttaaatt

SEQ ID NO: 769383 - DNA, 15 bp, Homo sapiens
gggtaagttaaatta

SEQ ID NO: 769384 - DNA, 15 bp, Homo sapiens
ggtaagttaaattaa

SEQ ID NO: 769385 - DNA, 15 bp, Homo sapiens
gtaagttaaattaaa

SEQ ID NO: 769386 - DNA, 15 bp, Homo sapiens
taagttaaattaaat

SEQ ID NO: 769387 - DNA, 15 bp, Homo sapiens
aagttaaattaaatg

SEQ ID NO: 769388 - DNA, 15 bp, Homo sapiens
agttaaattaaatgt

SEQ ID NO: 769389 - DNA, 15 bp, Homo sapiens
gttaaattaaatgta

SEQ ID NO: 769390 - DNA, 15 bp, Homo sapiens
ttaaattaaatgtag

SEQ ID NO: 769391 - DNA, 15 bp, Homo sapiens
taaattaaatgtaga

SEQ ID NO: 769392 - DNA, 15 bp, Homo sapiens
aaattaaatgtagat

SEQ ID NO: 769393 - DNA, 15 bp, Homo sapiens
aattaaatgtagatt

SEQ ID NO: 769394 - DNA, 15 bp, Homo sapiens
attaaatgtagattc

SEQ ID NO: 769395 - DNA, 15 bp, Homo sapiens
ttaaatgtagattct

SEQ ID NO: 769396 - DNA, 15 bp, Homo sapiens
taaatgtagattctt

SEQ ID NO: 769397 - DNA, 15 bp, Homo sapiens
aaatgtagattcttc

SEQ ID NO: 769398 - DNA, 15 bp, Homo sapiens
aatgtagattcttca

SEQ ID NO: 769399 - DNA, 15 bp, Homo sapiens
atgtagattcttcat

SEQ ID NO: 769400 - DNA, 15 bp, Homo sapiens
tgtagattcttcata

SEQ ID NO: 769401 - DNA, 15 bp, Homo sapiens
gtagattcttcatag

SEQ ID NO: 769402 - DNA, 15 bp, Homo sapiens
tagattcttcatagg

SEQ ID NO: 769403 - DNA, 15 bp, Homo sapiens
agattcttcatagga

SEQ ID NO: 769404 - DNA, 15 bp, Homo sapiens
gattcttcataggaa

SEQ ID NO: 769405 - DNA, 15 bp, Homo sapiens
attcttcataggaaa

SEQ ID NO: 769406 - DNA, 15 bp, Homo sapiens
ttcttcataggaaaa

SEQ ID NO: 769407 - DNA, 15 bp, Homo sapiens
tcttcataggaaaaa

SEQ ID NO: 769408 - DNA, 15 bp, Homo sapiens
cttcataggaaaaaa

SEQ ID NO: 769409 - DNA, 15 bp, Homo sapiens
ttcataggaaaaaag

SEQ ID NO: 769410 - DNA, 15 bp, Homo sapiens
tcataggaaaaaagt

SEQ ID NO: 769411 - DNA, 15 bp, Homo sapiens
cataggaaaaaagtg

SEQ ID NO: 769412 - DNA, 15 bp, Homo sapiens
ataggaaaaaagtga

SEQ ID NO: 769413 - DNA, 15 bp, Homo sapiens
taggaaaaaagtgaa

SEQ ID NO: 769414 - DNA, 15 bp, Homo sapiens
aggaaaaaagtgaat

SEQ ID NO: 769415 - DNA, 15 bp, Homo sapiens
ggaaaaaagtgaatg

SEQ ID NO: 769416 - DNA, 15 bp, Homo sapiens
gaaaaaagtgaatgt

SEQ ID NO: 769417 - DNA, 15 bp, Homo sapiens
aaaaaagtgaatgtt

SEQ ID NO: 769418 - DNA, 15 bp, Homo sapiens
aaaaagtgaatgttt

SEQ ID NO: 769419 - DNA, 15 bp, Homo sapiens
aaaagtgaatgttta

SEQ ID NO: 769420 - DNA, 15 bp, Homo sapiens
aaagtgaatgtttat

SEQ ID NO: 769421 - DNA, 15 bp, Homo sapiens
aagtgaatgtttatg

SEQ ID NO: 769422 - DNA, 15 bp, Homo sapiens
agtgaatgtttatgt

SEQ ID NO: 769423 - DNA, 15 bp, Homo sapiens
gtgaatgtttatgtt

SEQ ID NO: 769424 - DNA, 15 bp, Homo sapiens
tgaatgtttatgttc

SEQ ID NO: 769425 - DNA, 15 bp, Homo sapiens
gaatgtttatgttca

SEQ ID NO: 769426 - DNA, 15 bp, Homo sapiens
aatgtttatgttcat

SEQ ID NO: 769427 - DNA, 15 bp, Homo sapiens
atgtttatgttcatc

SEQ ID NO: 769428 - DNA, 15 bp, Homo sapiens
tgtttatgttcatct

SEQ ID NO: 769429 - DNA, 15 bp, Homo sapiens
gtttatgttcatcta

SEQ ID NO: 769430 - DNA, 15 bp, Homo sapiens
tttatgttcatctac

SEQ ID NO: 769431 - DNA, 15 bp, Homo sapiens
ttatgttcatctact

SEQ ID NO: 769432 - DNA, 15 bp, Homo sapiens
tatgttcatctactc

SEQ ID NO: 769433 - DNA, 15 bp, Homo sapiens
atgttcatctactct

SEQ ID NO: 769434 - DNA, 15 bp, Homo sapiens
tgttcatctactctg

SEQ ID NO: 769435 - DNA, 15 bp, Homo sapiens
gttcatctactctgt

SEQ ID NO: 769436 - DNA, 15 bp, Homo sapiens
ttcatctactctgta

SEQ ID NO: 769437 - DNA, 15 bp, Homo sapiens
tcatctactctgtat

SEQ ID NO: 769438 - DNA, 15 bp, Homo sapiens
catctactctgtatg

SEQ ID NO: 769439 - DNA, 15 bp, Homo sapiens
atctactctgtatgt

SEQ ID NO: 769440 - DNA, 15 bp, Homo sapiens
tctactctgtatgtc

SEQ ID NO: 769441 - DNA, 15 bp, Homo sapiens
ctactctgtatgtca

SEQ ID NO: 769442 - DNA, 15 bp, Homo sapiens
tactctgtatgtcaa

SEQ ID NO: 769443 - DNA, 15 bp, Homo sapiens
actctgtatgtcaaa

SEQ ID NO: 769444 - DNA, 15 bp, Homo sapiens
ctctgtatgtcaaac

SEQ ID NO: 769445 - DNA, 15 bp, Homo sapiens
tctgtatgtcaaaca

SEQ ID NO: 769446 - DNA, 15 bp, Homo sapiens
ctgtatgtcaaacat

SEQ ID NO: 769447 - DNA, 15 bp, Homo sapiens
tgtatgtcaaacatt

SEQ ID NO: 769448 - DNA, 15 bp, Homo sapiens
gtatgtcaaacattg

SEQ ID NO: 769449 - DNA, 15 bp, Homo sapiens
tatgtcaaacattgg

SEQ ID NO: 769450 - DNA, 15 bp, Homo sapiens
atgtcaaacattgga

SEQ ID NO: 769451 - DNA, 15 bp, Homo sapiens
tgtcaaacattggat

SEQ ID NO: 769452 - DNA, 15 bp, Homo sapiens
gtcaaacattggata

SEQ ID NO: 769453 - DNA, 15 bp, Homo sapiens
tcaaacattggatag

SEQ ID NO: 769454 - DNA, 15 bp, Homo sapiens
caaacattggataga

SEQ ID NO: 769455 - DNA, 15 bp, Homo sapiens
aaacattggatagaa

SEQ ID NO: 769456 - DNA, 15 bp, Homo sapiens
aacattggatagaaa

SEQ ID NO: 769457 - DNA, 15 bp, Homo sapiens
acattggatagaaaa

SEQ ID NO: 769458 - DNA, 15 bp, Homo sapiens
cattggatagaaaaa

SEQ ID NO: 769459 - DNA, 15 bp, Homo sapiens
attggatagaaaaat

SEQ ID NO: 769460 - DNA, 15 bp, Homo sapiens
ttggatagaaaaatg

SEQ ID NO: 769461 - DNA, 15 bp, Homo sapiens
tggatagaaaaatgg

SEQ ID NO: 769462 - DNA, 15 bp, Homo sapiens
ggatagaaaaatggt

SEQ ID NO: 769463 - DNA, 15 bp, Homo sapiens
gatagaaaaatggta

SEQ ID NO: 769464 - DNA, 15 bp, Homo sapiens
atagaaaaatggtac

SEQ ID NO: 769465 - DNA, 15 bp, Homo sapiens
tagaaaaatggtaca

SEQ ID NO: 769466 - DNA, 15 bp, Homo sapiens
agaaaaatggtacat

SEQ ID NO: 769467 - DNA, 15 bp, Homo sapiens
gaaaaatggtacatc

SEQ ID NO: 769468 - DNA, 15 bp, Homo sapiens
aaaaatggtacatcc

SEQ ID NO: 769469 - DNA, 15 bp, Homo sapiens
aaaatggtacatcct

SEQ ID NO: 769470 - DNA, 15 bp, Homo sapiens
aaatggtacatcctg

SEQ ID NO: 769471 - DNA, 15 bp, Homo sapiens
aatggtacatcctga

SEQ ID NO: 769472 - DNA, 15 bp, Homo sapiens
atggtacatcctgaa

SEQ ID NO: 769473 - DNA, 15 bp, Homo sapiens
tggtacatcctgaac

SEQ ID NO: 769474 - DNA, 15 bp, Homo sapiens
ggtacatcctgaact

SEQ ID NO: 769475 - DNA, 15 bp, Homo sapiens
gtacatcctgaactt

SEQ ID NO: 769476 - DNA, 15 bp, Homo sapiens
tacatcctgaacttg

SEQ ID NO: 769477 - DNA, 15 bp, Homo sapiens
acatcctgaacttgg

SEQ ID NO: 769478 - DNA, 15 bp, Homo sapiens
catcctgaacttggc

SEQ ID NO: 769479 - DNA, 15 bp, Homo sapiens
atcctgaacttggct

SEQ ID NO: 769480 - DNA, 15 bp, Homo sapiens
tcctgaacttggcta

SEQ ID NO: 769481 - DNA, 15 bp, Homo sapiens
cctgaacttggctag

SEQ ID NO: 769482 - DNA, 15 bp, Homo sapiens
ctgaacttggctagc

SEQ ID NO: 769483 - DNA, 15 bp, Homo sapiens
tgaacttggctagca

SEQ ID NO: 769484 - DNA, 15 bp, Homo sapiens
gaacttggctagcac

SEQ ID NO: 769485 - DNA, 15 bp, Homo sapiens
aacttggctagcact

SEQ ID NO: 769486 - DNA, 15 bp, Homo sapiens
acttggctagcactc

SEQ ID NO: 769487 - DNA, 15 bp, Homo sapiens
cttggctagcactcc

SEQ ID NO: 769488 - DNA, 15 bp, Homo sapiens
ttggctagcactcct

SEQ ID NO: 769489 - DNA, 15 bp, Homo sapiens
tggctagcactcctg

SEQ ID NO: 769490 - DNA, 15 bp, Homo sapiens
ggctagcactcctgt

SEQ ID NO: 769491 - DNA, 15 bp, Homo sapiens
gctagcactcctgtg

SEQ ID NO: 769492 - DNA, 15 bp, Homo sapiens
ctagcactcctgtga

SEQ ID NO: 769493 - DNA, 15 bp, Homo sapiens
tagcactcctgtgac

SEQ ID NO: 769494 - DNA, 15 bp, Homo sapiens
agcactcctgtgacc

SEQ ID NO: 769495 - DNA, 15 bp, Homo sapiens
gcactcctgtgacca

SEQ ID NO: 769496 - DNA, 15 bp, Homo sapiens
cactcctgtgaccaa

SEQ ID NO: 769497 - DNA, 15 bp, Homo sapiens
actcctgtgaccaac

SEQ ID NO: 769498 - DNA, 15 bp, Homo sapiens
ctcctgtgaccaact

SEQ ID NO: 769499 - DNA, 15 bp, Homo sapiens
tcctgtgaccaactc

SEQ ID NO: 769500 - DNA, 15 bp, Homo sapiens
cctgtgaccaactca

SEQ ID NO: 769501 - DNA, 15 bp, Homo sapiens
ctgtgaccaactcag

SEQ ID NO: 769502 - DNA, 15 bp, Homo sapiens
tgtgaccaactcagt

SEQ ID NO: 769503 - DNA, 15 bp, Homo sapiens
gtgaccaactcagtt

SEQ ID NO: 769504 - DNA, 15 bp, Homo sapiens
tgaccaactcagttt

SEQ ID NO: 769505 - DNA, 15 bp, Homo sapiens
gaccaactcagtttg

SEQ ID NO: 769506 - DNA, 15 bp, Homo sapiens
accaactcagtttgt

SEQ ID NO: 769507 - DNA, 15 bp, Homo sapiens
ccaactcagtttgtc

SEQ ID NO: 769508 - DNA, 15 bp, Homo sapiens
caactcagtttgtct

SEQ ID NO: 769509 - DNA, 15 bp, Homo sapiens
aactcagtttgtcta

SEQ ID NO: 769510 - DNA, 15 bp, Homo sapiens
actcagtttgtctat

SEQ ID NO: 769511 - DNA, 15 bp, Homo sapiens
ctcagtttgtctatt

SEQ ID NO: 769512 - DNA, 15 bp, Homo sapiens
tcagtttgtctattc

SEQ ID NO: 769513 - DNA, 15 bp, Homo sapiens
cagtttgtctattct

SEQ ID NO: 769514 - DNA, 15 bp, Homo sapiens
agtttgtctattctg

SEQ ID NO: 769515 - DNA, 15 bp, Homo sapiens
gtttgtctattctgt

SEQ ID NO: 769516 - DNA, 15 bp, Homo sapiens
tttgtctattctgtg

SEQ ID NO: 769517 - DNA, 15 bp, Homo sapiens
ttgtctattctgtgc

SEQ ID NO: 769518 - DNA, 15 bp, Homo sapiens
tgtctattctgtgcc

SEQ ID NO: 769519 - DNA, 15 bp, Homo sapiens
gtctattctgtgcca

SEQ ID NO: 769520 - DNA, 15 bp, Homo sapiens
tctattctgtgccaa

SEQ ID NO: 769521 - DNA, 15 bp, Homo sapiens
ctattctgtgccaaa

SEQ ID NO: 769522 - DNA, 15 bp, Homo sapiens
tattctgtgccaaaa

SEQ ID NO: 769523 - DNA, 15 bp, Homo sapiens
attctgtgccaaaat

SEQ ID NO: 769524 - DNA, 15 bp, Homo sapiens
ttctgtgccaaaata

SEQ ID NO: 769525 - DNA, 15 bp, Homo sapiens
tctgtgccaaaataa

SEQ ID NO: 769526 - DNA, 15 bp, Homo sapiens
ctgtgccaaaataat

SEQ ID NO: 769527 - DNA, 15 bp, Homo sapiens
tgtgccaaaataatg

SEQ ID NO: 769528 - DNA, 15 bp, Homo sapiens
gtgccaaaataatgg

SEQ ID NO: 769529 - DNA, 15 bp, Homo sapiens
tgccaaaataatggg

SEQ ID NO: 769530 - DNA, 15 bp, Homo sapiens
gccaaaataatgggt

SEQ ID NO: 769531 - DNA, 15 bp, Homo sapiens
ccaaaataatgggtt

SEQ ID NO: 769532 - DNA, 15 bp, Homo sapiens
caaaataatgggtta

SEQ ID NO: 769533 - DNA, 15 bp, Homo sapiens
aaaataatgggttaa

SEQ ID NO: 769534 - DNA, 15 bp, Homo sapiens
aaataatgggttaat

SEQ ID NO: 769535 - DNA, 15 bp, Homo sapiens
aataatgggttaatt

SEQ ID NO: 769536 - DNA, 15 bp, Homo sapiens
ataatgggttaattc

SEQ ID NO: 769537 - DNA, 15 bp, Homo sapiens
taatgggttaattct

SEQ ID NO: 769538 - DNA, 15 bp, Homo sapiens
aatgggttaattctg

SEQ ID NO: 769539 - DNA, 15 bp, Homo sapiens
atgggttaattctgc

SEQ ID NO: 769540 - DNA, 15 bp, Homo sapiens
tgggttaattctgcc

SEQ ID NO: 769541 - DNA, 15 bp, Homo sapiens
gggttaattctgcca

SEQ ID NO: 769542 - DNA, 15 bp, Homo sapiens
ggttaattctgccat

SEQ ID NO: 769543 - DNA, 15 bp, Homo sapiens
gttaattctgccatt

SEQ ID NO: 769544 - DNA, 15 bp, Homo sapiens
ttaattctgccattt

SEQ ID NO: 769545 - DNA, 15 bp, Homo sapiens
taattctgccatttt

SEQ ID NO: 769546 - DNA, 15 bp, Homo sapiens
aattctgccatttta

SEQ ID NO: 769547 - DNA, 15 bp, Homo sapiens
attctgccattttag

SEQ ID NO: 769548 - DNA, 15 bp, Homo sapiens
ttctgccattttagt

SEQ ID NO: 769549 - DNA, 15 bp, Homo sapiens
tctgccattttagtt

SEQ ID NO: 769550 - DNA, 15 bp, Homo sapiens
ctgccattttagttg

SEQ ID NO: 769551 - DNA, 15 bp, Homo sapiens
tgccattttagttgg

SEQ ID NO: 769552 - DNA, 15 bp, Homo sapiens
gccattttagttgga

SEQ ID NO: 769553 - DNA, 15 bp, Homo sapiens
ccattttagttggaa

SEQ ID NO: 769554 - DNA, 15 bp, Homo sapiens
cattttagttggaat

SEQ ID NO: 769555 - DNA, 15 bp, Homo sapiens
attttagttggaatt

SEQ ID NO: 769556 - DNA, 15 bp, Homo sapiens
ttttagttggaatta

SEQ ID NO: 769557 - DNA, 15 bp, Homo sapiens
tttagttggaattat

SEQ ID NO: 769558 - DNA, 15 bp, Homo sapiens
ttagttggaattatt

SEQ ID NO: 769559 - DNA, 15 bp, Homo sapiens
tagttggaattatta

SEQ ID NO: 769560 - DNA, 15 bp, Homo sapiens
agttggaattattag

SEQ ID NO: 769561 - DNA, 15 bp, Homo sapiens
gttggaattattagt

SEQ ID NO: 769562 - DNA, 15 bp, Homo sapiens
ttggaattattagtg

SEQ ID NO: 769563 - DNA, 15 bp, Homo sapiens
tggaattattagtgc

SEQ ID NO: 769564 - DNA, 15 bp, Homo sapiens
ggaattattagtgcc

SEQ ID NO: 769565 - DNA, 15 bp, Homo sapiens
gaattattagtgcct

SEQ ID NO: 769566 - DNA, 15 bp, Homo sapiens
aattattagtgcctt

SEQ ID NO: 769567 - DNA, 15 bp, Homo sapiens
attattagtgcctta

SEQ ID NO: 769568 - DNA, 15 bp, Homo sapiens
ttattagtgccttaa

SEQ ID NO: 769569 - DNA, 15 bp, Homo sapiens
tattagtgccttaat

SEQ ID NO: 769570 - DNA, 15 bp, Homo sapiens
attagtgccttaatc

SEQ ID NO: 769571 - DNA, 15 bp, Homo sapiens
ttagtgccttaatcc

SEQ ID NO: 769572 - DNA, 15 bp, Homo sapiens
tagtgccttaatccc

SEQ ID NO: 769573 - DNA, 15 bp, Homo sapiens
agtgccttaatcccc

SEQ ID NO: 769574 - DNA, 15 bp, Homo sapiens
gtgccttaatccccc

SEQ ID NO: 769575 - DNA, 15 bp, Homo sapiens
tgccttaatccccct

SEQ ID NO: 769576 - DNA, 15 bp, Homo sapiens
gccttaatcccccta

SEQ ID NO: 769577 - DNA, 15 bp, Homo sapiens
ccttaatccccctac

SEQ ID NO: 769578 - DNA, 15 bp, Homo sapiens
cttaatccccctaca

SEQ ID NO: 769579 - DNA, 15 bp, Homo sapiens
ttaatccccctacat

SEQ ID NO: 769580 - DNA, 15 bp, Homo sapiens
taatccccctacata

SEQ ID NO: 769581 - DNA, 15 bp, Homo sapiens
aatccccctacatag

SEQ ID NO: 769582 - DNA, 15 bp, Homo sapiens
atccccctacatagt

SEQ ID NO: 769583 - DNA, 15 bp, Homo sapiens
tccccctacatagtc

SEQ ID NO: 769584 - DNA, 15 bp, Homo sapiens
ccccctacatagtca

SEQ ID NO: 769585 - DNA, 15 bp, Homo sapiens
cccctacatagtcag

SEQ ID NO: 769586 - DNA, 15 bp, Homo sapiens
ccctacatagtcaga

SEQ ID NO: 769587 - DNA, 15 bp, Homo sapiens
cctacatagtcagat

SEQ ID NO: 769588 - DNA, 15 bp, Homo sapiens
ctacatagtcagata

SEQ ID NO: 769589 - DNA, 15 bp, Homo sapiens
tacatagtcagatac

SEQ ID NO: 769590 - DNA, 15 bp, Homo sapiens
acatagtcagataca

SEQ ID NO: 769591 - DNA, 15 bp, Homo sapiens
catagtcagatacag

SEQ ID NO: 769592 - DNA, 15 bp, Homo sapiens
atagtcagatacagt

SEQ ID NO: 769593 - DNA, 15 bp, Homo sapiens
tagtcagatacagtg

SEQ ID NO: 769594 - DNA, 15 bp, Homo sapiens
agtcagatacagtgg

SEQ ID NO: 769595 - DNA, 15 bp, Homo sapiens
gtcagatacagtgga

SEQ ID NO: 769596 - DNA, 15 bp, Homo sapiens
tcagatacagtggag

SEQ ID NO: 769597 - DNA, 15 bp, Homo sapiens
cagatacagtggagc

SEQ ID NO: 769598 - DNA, 15 bp, Homo sapiens
agatacagtggagca

SEQ ID NO: 769599 - DNA, 15 bp, Homo sapiens
gatacagtggagcat

SEQ ID NO: 769600 - DNA, 15 bp, Homo sapiens
atacagtggagcata

SEQ ID NO: 769601 - DNA, 15 bp, Homo sapiens
tacagtggagcatag

SEQ ID NO: 769602 - DNA, 15 bp, Homo sapiens
acagtggagcatagg

SEQ ID NO: 769603 - DNA, 15 bp, Homo sapiens
cagtggagcatagga

SEQ ID NO: 769604 - DNA, 15 bp, Homo sapiens
agtggagcataggat

SEQ ID NO: 769605 - DNA, 15 bp, Homo sapiens
gtggagcataggatg

SEQ ID NO: 769606 - DNA, 15 bp, Homo sapiens
tggagcataggatgc

SEQ ID NO: 769607 - DNA, 15 bp, Homo sapiens
ggagcataggatgct

SEQ ID NO: 769608 - DNA, 15 bp, Homo sapiens
gagcataggatgctg

SEQ ID NO: 769609 - DNA, 15 bp, Homo sapiens
agcataggatgctgg

SEQ ID NO: 769610 - DNA, 15 bp, Homo sapiens
gcataggatgctgga

SEQ ID NO: 769611 - DNA, 15 bp, Homo sapiens
cataggatgctggaa

SEQ ID NO: 769612 - DNA, 15 bp, Homo sapiens
ataggatgctggaaa

SEQ ID NO: 769613 - DNA, 15 bp, Homo sapiens
taggatgctggaaac

SEQ ID NO: 769614 - DNA, 15 bp, Homo sapiens
aggatgctggaaact

SEQ ID NO: 769615 - DNA, 15 bp, Homo sapiens
ggatgctggaaactt

SEQ ID NO: 769616 - DNA, 15 bp, Homo sapiens
gatgctggaaacttt

SEQ ID NO: 769617 - DNA, 15 bp, Homo sapiens
atgctggaaactttc

SEQ ID NO: 769618 - DNA, 15 bp, Homo sapiens
tgctggaaactttcc

SEQ ID NO: 769619 - DNA, 15 bp, Homo sapiens
gctggaaactttcct

SEQ ID NO: 769620 - DNA, 15 bp, Homo sapiens
ctggaaactttcctt

SEQ ID NO: 769621 - DNA, 15 bp, Homo sapiens
tggaaactttccttt

SEQ ID NO: 769622 - DNA, 15 bp, Homo sapiens
ggaaactttccttta

SEQ ID NO: 769623 - DNA, 15 bp, Homo sapiens
gaaactttcctttag

SEQ ID NO: 769624 - DNA, 15 bp, Homo sapiens
aaactttcctttagt

SEQ ID NO: 769625 - DNA, 15 bp, Homo sapiens
aactttcctttagtt

SEQ ID NO: 769626 - DNA, 15 bp, Homo sapiens
actttcctttagttt

SEQ ID NO: 769627 - DNA, 15 bp, Homo sapiens
ctttcctttagtttt

SEQ ID NO: 769628 - DNA, 15 bp, Homo sapiens
tttcctttagttttt

SEQ ID NO: 769629 - DNA, 15 bp, Homo sapiens
ttcctttagtttttt

SEQ ID NO: 769630 - DNA, 15 bp, Homo sapiens
tcctttagtttttta

SEQ ID NO: 769631 - DNA, 15 bp, Homo sapiens
cctttagttttttac

SEQ ID NO: 769632 - DNA, 15 bp, Homo sapiens
ctttagttttttaca

SEQ ID NO: 769633 - DNA, 15 bp, Homo sapiens
tttagttttttacat

SEQ ID NO: 769634 - DNA, 15 bp, Homo sapiens
ttagttttttacatc

SEQ ID NO: 769635 - DNA, 15 bp, Homo sapiens
tagttttttacatct

SEQ ID NO: 769636 - DNA, 15 bp, Homo sapiens
agttttttacatctt

SEQ ID NO: 769637 - DNA, 15 bp, Homo sapiens
gttttttacatcttt

SEQ ID NO: 769638 - DNA, 15 bp, Homo sapiens
ttttttacatctttc

SEQ ID NO: 769639 - DNA, 15 bp, Homo sapiens
tttttacatctttca

SEQ ID NO: 769640 - DNA, 15 bp, Homo sapiens
ttttacatctttcaa

SEQ ID NO: 769641 - DNA, 15 bp, Homo sapiens
tttacatctttcaag

SEQ ID NO: 769642 - DNA, 15 bp, Homo sapiens
ttacatctttcaagt

SEQ ID NO: 769643 - DNA, 15 bp, Homo sapiens
tacatctttcaagta

SEQ ID NO: 769644 - DNA, 15 bp, Homo sapiens
acatctttcaagtag

SEQ ID NO: 769645 - DNA, 15 bp, Homo sapiens
catctttcaagtaga

SEQ ID NO: 769646 - DNA, 15 bp, Homo sapiens
atctttcaagtagaa

SEQ ID NO: 769647 - DNA, 15 bp, Homo sapiens
tctttcaagtagaag

SEQ ID NO: 769648 - DNA, 15 bp, Homo sapiens
ctttcaagtagaaga

SEQ ID NO: 769649 - DNA, 15 bp, Homo sapiens
tttcaagtagaagaa

SEQ ID NO: 769650 - DNA, 15 bp, Homo sapiens
ttcaagtagaagaaa

SEQ ID NO: 769651 - DNA, 15 bp, Homo sapiens
tcaagtagaagaaaa

SEQ ID NO: 769652 - DNA, 15 bp, Homo sapiens
caagtagaagaaaag

SEQ ID NO: 769653 - DNA, 15 bp, Homo sapiens
aagtagaagaaaaga

SEQ ID NO: 769654 - DNA, 15 bp, Homo sapiens
agtagaagaaaagaa

SEQ ID NO: 769655 - DNA, 15 bp, Homo sapiens
gtagaagaaaagaat

SEQ ID NO: 769656 - DNA, 15 bp, Homo sapiens
tagaagaaaagaatg

SEQ ID NO: 769657 - DNA, 15 bp, Homo sapiens
agaagaaaagaatgt

SEQ ID NO: 769658 - DNA, 15 bp, Homo sapiens
gaagaaaagaatgtt

SEQ ID NO: 769659 - DNA, 15 bp, Homo sapiens
aagaaaagaatgtta

SEQ ID NO: 769660 - DNA, 15 bp, Homo sapiens
agaaaagaatgttaa

SEQ ID NO: 769661 - DNA, 15 bp, Homo sapiens
gaaaagaatgttaag

SEQ ID NO: 769662 - DNA, 15 bp, Homo sapiens
aaaagaatgttaaga

SEQ ID NO: 769663 - DNA, 15 bp, Homo sapiens
aaagaatgttaagaa

SEQ ID NO: 769664 - DNA, 15 bp, Homo sapiens
aagaatgttaagaaa

SEQ ID NO: 769665 - DNA, 15 bp, Homo sapiens
agaatgttaagaaat

SEQ ID NO: 769666 - DNA, 15 bp, Homo sapiens
gaatgttaagaaatc

SEQ ID NO: 769667 - DNA, 15 bp, Homo sapiens
aatgttaagaaatcc

SEQ ID NO: 769668 - DNA, 15 bp, Homo sapiens
atgttaagaaatccc

SEQ ID NO: 769669 - DNA, 15 bp, Homo sapiens
tgttaagaaatccct

SEQ ID NO: 769670 - DNA, 15 bp, Homo sapiens
gttaagaaatccctt

SEQ ID NO: 769671 - DNA, 15 bp, Homo sapiens
ttaagaaatcccttg

SEQ ID NO: 769672 - DNA, 15 bp, Homo sapiens
taagaaatcccttgg

SEQ ID NO: 769673 - DNA, 15 bp, Homo sapiens
aagaaatcccttggt

SEQ ID NO: 769674 - DNA, 15 bp, Homo sapiens
agaaatcccttggtt

SEQ ID NO: 769675 - DNA, 15 bp, Homo sapiens
gaaatcccttggttt

SEQ ID NO: 769676 - DNA, 15 bp, Homo sapiens
aaatcccttggtttt

SEQ ID NO: 769677 - DNA, 15 bp, Homo sapiens
aatcccttggttttg

SEQ ID NO: 769678 - DNA, 15 bp, Homo sapiens
atcccttggttttga

SEQ ID NO: 769679 - DNA, 15 bp, Homo sapiens
tcccttggttttgac

SEQ ID NO: 769680 - DNA, 15 bp, Homo sapiens
cccttggttttgacc

SEQ ID NO: 769681 - DNA, 15 bp, Homo sapiens
ccttggttttgacct

SEQ ID NO: 769682 - DNA, 15 bp, Homo sapiens
cttggttttgacctt

SEQ ID NO: 769683 - DNA, 15 bp, Homo sapiens
ttggttttgaccttt

SEQ ID NO: 769684 - DNA, 15 bp, Homo sapiens
tggttttgacctttg

SEQ ID NO: 769685 - DNA, 15 bp, Homo sapiens
ggttttgacctttgc

SEQ ID NO: 769686 - DNA, 15 bp, Homo sapiens
gttttgacctttgca

SEQ ID NO: 769687 - DNA, 15 bp, Homo sapiens
ttttgacctttgcag

SEQ ID NO: 769688 - DNA, 15 bp, Homo sapiens
tttgacctttgcaga

SEQ ID NO: 769689 - DNA, 15 bp, Homo sapiens
ttgacctttgcagat

SEQ ID NO: 769690 - DNA, 15 bp, Homo sapiens
tgacctttgcagatg

SEQ ID NO: 769691 - DNA, 15 bp, Homo sapiens
gacctttgcagatgc

SEQ ID NO: 769692 - DNA, 15 bp, Homo sapiens
acctttgcagatgct

SEQ ID NO: 769693 - DNA, 15 bp, Homo sapiens
cctttgcagatgctc

SEQ ID NO: 769694 - DNA, 15 bp, Homo sapiens
ctttgcagatgctct

SEQ ID NO: 769695 - DNA, 15 bp, Homo sapiens
tttgcagatgctctc

SEQ ID NO: 769696 - DNA, 15 bp, Homo sapiens
ttgcagatgctctca

SEQ ID NO: 769697 - DNA, 15 bp, Homo sapiens
tgcagatgctctcat

SEQ ID NO: 769698 - DNA, 15 bp, Homo sapiens
gcagatgctctcatt

SEQ ID NO: 769699 - DNA, 15 bp, Homo sapiens
cagatgctctcatta

SEQ ID NO: 769700 - DNA, 15 bp, Homo sapiens
agatgctctcattaa

SEQ ID NO: 769701 - DNA, 15 bp, Homo sapiens
gatgctctcattaat

SEQ ID NO: 769702 - DNA, 15 bp, Homo sapiens
atgctctcattaatc

SEQ ID NO: 769703 - DNA, 15 bp, Homo sapiens
tgctctcattaatca

SEQ ID NO: 769704 - DNA, 15 bp, Homo sapiens
gctctcattaatcaa

SEQ ID NO: 769705 - DNA, 15 bp, Homo sapiens
ctctcattaatcaat

SEQ ID NO: 769706 - DNA, 15 bp, Homo sapiens
tctcattaatcaata

SEQ ID NO: 769707 - DNA, 15 bp, Homo sapiens
ctcattaatcaatag

SEQ ID NO: 769708 - DNA, 15 bp, Homo sapiens
tcattaatcaatagt

SEQ ID NO: 769709 - DNA, 15 bp, Homo sapiens
cattaatcaatagtg

SEQ ID NO: 769710 - DNA, 15 bp, Homo sapiens
attaatcaatagtga

SEQ ID NO: 769711 - DNA, 15 bp, Homo sapiens
ttaatcaatagtgat

SEQ ID NO: 769712 - DNA, 15 bp, Homo sapiens
taatcaatagtgata

SEQ ID NO: 769713 - DNA, 15 bp, Homo sapiens
aatcaatagtgatat

SEQ ID NO: 769714 - DNA, 15 bp, Homo sapiens
atcaatagtgatatt

SEQ ID NO: 769715 - DNA, 15 bp, Homo sapiens
tcaatagtgatattt

SEQ ID NO: 769716 - DNA, 15 bp, Homo sapiens
caatagtgatatttt

SEQ ID NO: 769717 - DNA, 15 bp, Homo sapiens
aatagtgatatttta

SEQ ID NO: 769718 - DNA, 15 bp, Homo sapiens
atagtgatattttaa

SEQ ID NO: 769719 - DNA, 15 bp, Homo sapiens
tagtgatattttaaa

SEQ ID NO: 769720 - DNA, 15 bp, Homo sapiens
agtgatattttaaag

SEQ ID NO: 769721 - DNA, 15 bp, Homo sapiens
gtgatattttaaaga

SEQ ID NO: 769722 - DNA, 15 bp, Homo sapiens
tgatattttaaagaa

SEQ ID NO: 769723 - DNA, 15 bp, Homo sapiens
gatattttaaagaat

SEQ ID NO: 769724 - DNA, 15 bp, Homo sapiens
atattttaaagaatt

SEQ ID NO: 769725 - DNA, 15 bp, Homo sapiens
tattttaaagaattg

SEQ ID NO: 769726 - DNA, 15 bp, Homo sapiens
attttaaagaattga

SEQ ID NO: 769727 - DNA, 15 bp, Homo sapiens
ttttaaagaattgat

SEQ ID NO: 769728 - DNA, 15 bp, Homo sapiens
tttaaagaattgatt

SEQ ID NO: 769729 - DNA, 15 bp, Homo sapiens
ttaaagaattgattt

SEQ ID NO: 769730 - DNA, 15 bp, Homo sapiens
taaagaattgatttt

SEQ ID NO: 769731 - DNA, 15 bp, Homo sapiens
aaagaattgattttt

SEQ ID NO: 769732 - DNA, 15 bp, Homo sapiens
aagaattgatttttt

SEQ ID NO: 769733 - DNA, 15 bp, Homo sapiens
agaattgattttttt

SEQ ID NO: 769734 - DNA, 15 bp, Homo sapiens
gaattgattttttta

SEQ ID NO: 769735 - DNA, 15 bp, Homo sapiens
aattgatttttttaa

SEQ ID NO: 769736 - DNA, 15 bp, Homo sapiens
attgatttttttaag

SEQ ID NO: 769737 - DNA, 15 bp, Homo sapiens
ttgatttttttaagc

SEQ ID NO: 769738 - DNA, 15 bp, Homo sapiens
tgatttttttaagca

SEQ ID NO: 769739 - DNA, 15 bp, Homo sapiens
gatttttttaagcat

SEQ ID NO: 769740 - DNA, 15 bp, Homo sapiens
atttttttaagcata

SEQ ID NO: 769741 - DNA, 15 bp, Homo sapiens
tttttttaagcatac

SEQ ID NO: 769742 - DNA, 15 bp, Homo sapiens
ttttttaagcatacg

SEQ ID NO: 769743 - DNA, 15 bp, Homo sapiens
tttttaagcatacgg

SEQ ID NO: 769744 - DNA, 15 bp, Homo sapiens
ttttaagcatacgga

SEQ ID NO: 769745 - DNA, 15 bp, Homo sapiens
tttaagcatacggat

SEQ ID NO: 769746 - DNA, 15 bp, Homo sapiens
ttaagcatacggata

SEQ ID NO: 769747 - DNA, 15 bp, Homo sapiens
taagcatacggatat

SEQ ID NO: 769748 - DNA, 15 bp, Homo sapiens
aagcatacggatatt

SEQ ID NO: 769749 - DNA, 15 bp, Homo sapiens
agcatacggatattg

SEQ ID NO: 769750 - DNA, 15 bp, Homo sapiens
gcatacggatattgt

SEQ ID NO: 769751 - DNA, 15 bp, Homo sapiens
catacggatattgtc

SEQ ID NO: 769752 - DNA, 15 bp, Homo sapiens
atacggatattgtcc

SEQ ID NO: 769753 - DNA, 15 bp, Homo sapiens
tacggatattgtcct

SEQ ID NO: 769754 - DNA, 15 bp, Homo sapiens
acggatattgtccta

SEQ ID NO: 769755 - DNA, 15 bp, Homo sapiens
cggatattgtcctat

SEQ ID NO: 769756 - DNA, 15 bp, Homo sapiens
ggatattgtcctata

SEQ ID NO: 769757 - DNA, 15 bp, Homo sapiens
gatattgtcctatag

SEQ ID NO: 769758 - DNA, 15 bp, Homo sapiens
atattgtcctataga

SEQ ID NO: 769759 - DNA, 15 bp, Homo sapiens
tattgtcctatagac

SEQ ID NO: 769760 - DNA, 15 bp, Homo sapiens
attgtcctatagaca

SEQ ID NO: 769761 - DNA, 15 bp, Homo sapiens
ttgtcctatagacag

SEQ ID NO: 769762 - DNA, 15 bp, Homo sapiens
tgtcctatagacaga

SEQ ID NO: 769763 - DNA, 15 bp, Homo sapiens
gtcctatagacagaa

SEQ ID NO: 769764 - DNA, 15 bp, Homo sapiens
tcctatagacagaaa

SEQ ID NO: 769765 - DNA, 15 bp, Homo sapiens
cctatagacagaaaa

SEQ ID NO: 769766 - DNA, 15 bp, Homo sapiens
ctatagacagaaaaa

SEQ ID NO: 769767 - DNA, 15 bp, Homo sapiens
tatagacagaaaaat

SEQ ID NO: 769768 - DNA, 15 bp, Homo sapiens
atagacagaaaaata

SEQ ID NO: 769769 - DNA, 15 bp, Homo sapiens
tagacagaaaaataa

SEQ ID NO: 769770 - DNA, 15 bp, Homo sapiens
agacagaaaaataat

SEQ ID NO: 769771 - DNA, 15 bp, Homo sapiens
gacagaaaaataatc

SEQ ID NO: 769772 - DNA, 15 bp, Homo sapiens
acagaaaaataatca

SEQ ID NO: 769773 - DNA, 15 bp, Homo sapiens
cagaaaaataatcaa

SEQ ID NO: 769774 - DNA, 15 bp, Homo sapiens
agaaaaataatcaaa

SEQ ID NO: 769775 - DNA, 15 bp, Homo sapiens
gaaaaataatcaaaa

SEQ ID NO: 769776 - DNA, 15 bp, Homo sapiens
aaaaataatcaaaat

SEQ ID NO: 769777 - DNA, 15 bp, Homo sapiens
aaaataatcaaaatc

SEQ ID NO: 769778 - DNA, 15 bp, Homo sapiens
aaataatcaaaatca

SEQ ID NO: 769779 - DNA, 15 bp, Homo sapiens
aataatcaaaatcaa

SEQ ID NO: 769780 - DNA, 15 bp, Homo sapiens
ataatcaaaatcaaa

SEQ ID NO: 769781 - DNA, 15 bp, Homo sapiens
taatcaaaatcaaag

SEQ ID NO: 769782 - DNA, 15 bp, Homo sapiens
aatcaaaatcaaaga

SEQ ID NO: 769783 - DNA, 15 bp, Homo sapiens
atcaaaatcaaagat

SEQ ID NO: 769784 - DNA, 15 bp, Homo sapiens
tcaaaatcaaagata

SEQ ID NO: 769785 - DNA, 15 bp, Homo sapiens
caaaatcaaagataa

SEQ ID NO: 769786 - DNA, 15 bp, Homo sapiens
aaaatcaaagataaa

SEQ ID NO: 769787 - DNA, 15 bp, Homo sapiens
aaatcaaagataaaa

SEQ ID NO: 769788 - DNA, 15 bp, Homo sapiens
aatcaaagataaaac

SEQ ID NO: 769789 - DNA, 15 bp, Homo sapiens
atcaaagataaaact

SEQ ID NO: 769790 - DNA, 15 bp, Homo sapiens
tcaaagataaaactg

SEQ ID NO: 769791 - DNA, 15 bp, Homo sapiens
caaagataaaactgg

SEQ ID NO: 769792 - DNA, 15 bp, Homo sapiens
aaagataaaactgga

SEQ ID NO: 769793 - DNA, 15 bp, Homo sapiens
aagataaaactggaa

SEQ ID NO: 769794 - DNA, 15 bp, Homo sapiens
agataaaactggaaa

SEQ ID NO: 769795 - DNA, 15 bp, Homo sapiens
gataaaactggaaat

SEQ ID NO: 769796 - DNA, 15 bp, Homo sapiens
ataaaactggaaata

SEQ ID NO: 769797 - DNA, 15 bp, Homo sapiens
taaaactggaaatag

SEQ ID NO: 769798 - DNA, 15 bp, Homo sapiens
aaaactggaaataga

SEQ ID NO: 769799 - DNA, 15 bp, Homo sapiens
aaactggaaatagaa

SEQ ID NO: 769800 - DNA, 15 bp, Homo sapiens
aactggaaatagaat

SEQ ID NO: 769801 - DNA, 15 bp, Homo sapiens
actggaaatagaatc

SEQ ID NO: 769802 - DNA, 15 bp, Homo sapiens
ctggaaatagaatct

SEQ ID NO: 769803 - DNA, 15 bp, Homo sapiens
tggaaatagaatctt

SEQ ID NO: 769804 - DNA, 15 bp, Homo sapiens
ggaaatagaatcttg

SEQ ID NO: 769805 - DNA, 15 bp, Homo sapiens
gaaatagaatcttgt

SEQ ID NO: 769806 - DNA, 15 bp, Homo sapiens
aaatagaatcttgtt

SEQ ID NO: 769807 - DNA, 15 bp, Homo sapiens
aatagaatcttgttt

SEQ ID NO: 769808 - DNA, 15 bp, Homo sapiens
atagaatcttgtttg

SEQ ID NO: 769809 - DNA, 15 bp, Homo sapiens
tagaatcttgtttgc

SEQ ID NO: 769810 - DNA, 15 bp, Homo sapiens
agaatcttgtttgct

SEQ ID NO: 769811 - DNA, 15 bp, Homo sapiens
gaatcttgtttgctt

SEQ ID NO: 769812 - DNA, 15 bp, Homo sapiens
aatcttgtttgcttt

SEQ ID NO: 769813 - DNA, 15 bp, Homo sapiens
atcttgtttgctttt

SEQ ID NO: 769814 - DNA, 15 bp, Homo sapiens
tcttgtttgcttttt

SEQ ID NO: 769815 - DNA, 15 bp, Homo sapiens
cttgtttgctttttt

SEQ ID NO: 769816 - DNA, 15 bp, Homo sapiens
ttgtttgcttttttg

SEQ ID NO: 769817 - DNA, 15 bp, Homo sapiens
tgtttgcttttttgt

SEQ ID NO: 769818 - DNA, 15 bp, Homo sapiens
gtttgcttttttgtt

SEQ ID NO: 769819 - DNA, 15 bp, Homo sapiens
tttgcttttttgttt

SEQ ID NO: 769820 - DNA, 15 bp, Homo sapiens
ttgcttttttgtttc

SEQ ID NO: 769821 - DNA, 15 bp, Homo sapiens
tgcttttttgtttct

SEQ ID NO: 769822 - DNA, 15 bp, Homo sapiens
gcttttttgtttctt

SEQ ID NO: 769823 - DNA, 15 bp, Homo sapiens
cttttttgtttcttt

SEQ ID NO: 769824 - DNA, 15 bp, Homo sapiens
ttttttgtttctttg

SEQ ID NO: 769825 - DNA, 15 bp, Homo sapiens
tttttgtttctttgc

SEQ ID NO: 769826 - DNA, 15 bp, Homo sapiens
ttttgtttctttgct

SEQ ID NO: 769827 - DNA, 15 bp, Homo sapiens
tttgtttctttgctt

SEQ ID NO: 769828 - DNA, 15 bp, Homo sapiens
ttgtttctttgcttt

SEQ ID NO: 769829 - DNA, 15 bp, Homo sapiens
tgtttctttgctttt

SEQ ID NO: 769830 - DNA, 15 bp, Homo sapiens
gtttctttgcttttg

SEQ ID NO: 769831 - DNA, 15 bp, Homo sapiens
tttctttgcttttgt

SEQ ID NO: 769832 - DNA, 15 bp, Homo sapiens
ttctttgcttttgtt

SEQ ID NO: 769833 - DNA, 15 bp, Homo sapiens
tctttgcttttgttt

SEQ ID NO: 769834 - DNA, 15 bp, Homo sapiens
ctttgcttttgtttt

SEQ ID NO: 769835 - DNA, 15 bp, Homo sapiens
tttgcttttgttttt

SEQ ID NO: 769836 - DNA, 15 bp, Homo sapiens
ttgcttttgtttttg

SEQ ID NO: 769837 - DNA, 15 bp, Homo sapiens
tgcttttgtttttgt

SEQ ID NO: 769838 - DNA, 15 bp, Homo sapiens
gcttttgtttttgta

SEQ ID NO: 769839 - DNA, 15 bp, Homo sapiens
cttttgtttttgtat

SEQ ID NO: 769840 - DNA, 15 bp, Homo sapiens
ttttgtttttgtatt

SEQ ID NO: 769841 - DNA, 15 bp, Homo sapiens
tttgtttttgtattt

SEQ ID NO: 769842 - DNA, 15 bp, Homo sapiens
ttgtttttgtatttc

SEQ ID NO: 769843 - DNA, 15 bp, Homo sapiens
tgtttttgtatttca

SEQ ID NO: 769844 - DNA, 15 bp, Homo sapiens
gtttttgtatttcac

SEQ ID NO: 769845 - DNA, 15 bp, Homo sapiens
tttttgtatttcact

SEQ ID NO: 769846 - DNA, 15 bp, Homo sapiens
ttttgtatttcactg

SEQ ID NO: 769847 - DNA, 15 bp, Homo sapiens
tttgtatttcactgt

SEQ ID NO: 769848 - DNA, 15 bp, Homo sapiens
ttgtatttcactgtg

SEQ ID NO: 769849 - DNA, 15 bp, Homo sapiens
tgtatttcactgtgt

SEQ ID NO: 769850 - DNA, 15 bp, Homo sapiens
gtatttcactgtgtt

SEQ ID NO: 769851 - DNA, 15 bp, Homo sapiens
tatttcactgtgttc

SEQ ID NO: 769852 - DNA, 15 bp, Homo sapiens
atttcactgtgttct

SEQ ID NO: 769853 - DNA, 15 bp, Homo sapiens
tttcactgtgttctt

SEQ ID NO: 769854 - DNA, 15 bp, Homo sapiens
ttcactgtgttcttt

SEQ ID NO: 769855 - DNA, 15 bp, Homo sapiens
tcactgtgttctttt

SEQ ID NO: 769856 - DNA, 15 bp, Homo sapiens
cactgtgttcttttt

SEQ ID NO: 769857 - DNA, 15 bp, Homo sapiens
actgtgttctttttt

SEQ ID NO: 769858 - DNA, 15 bp, Homo sapiens
ctgtgttcttttttg

SEQ ID NO: 769859 - DNA, 15 bp, Homo sapiens
tgtgttcttttttga

SEQ ID NO: 769860 - DNA, 15 bp, Homo sapiens
gtgttcttttttgag

SEQ ID NO: 769861 - DNA, 15 bp, Homo sapiens
tgttcttttttgagg

SEQ ID NO: 769862 - DNA, 15 bp, Homo sapiens
gttcttttttgaggt

SEQ ID NO: 769863 - DNA, 15 bp, Homo sapiens
ttcttttttgaggtc

SEQ ID NO: 769864 - DNA, 15 bp, Homo sapiens
tcttttttgaggtcc

SEQ ID NO: 769865 - DNA, 15 bp, Homo sapiens
cttttttgaggtcct

SEQ ID NO: 769866 - DNA, 15 bp, Homo sapiens
ttttttgaggtccta

SEQ ID NO: 769867 - DNA, 15 bp, Homo sapiens
tttttgaggtcctag

SEQ ID NO: 769868 - DNA, 15 bp, Homo sapiens
ttttgaggtcctaga

SEQ ID NO: 769869 - DNA, 15 bp, Homo sapiens
tttgaggtcctagac

SEQ ID NO: 769870 - DNA, 15 bp, Homo sapiens
ttgaggtcctagaca

SEQ ID NO: 769871 - DNA, 15 bp, Homo sapiens
tgaggtcctagacag

SEQ ID NO: 769872 - DNA, 15 bp, Homo sapiens
gaggtcctagacaga

SEQ ID NO: 769873 - DNA, 15 bp, Homo sapiens
aggtcctagacagaa

SEQ ID NO: 769874 - DNA, 15 bp, Homo sapiens
ggtcctagacagaat

SEQ ID NO: 769875 - DNA, 15 bp, Homo sapiens
gtcctagacagaatt

SEQ ID NO: 769876 - DNA, 15 bp, Homo sapiens
tcctagacagaatta

SEQ ID NO: 769877 - DNA, 15 bp, Homo sapiens
cctagacagaattaa

SEQ ID NO: 769878 - DNA, 15 bp, Homo sapiens
ctagacagaattaaa

SEQ ID NO: 769879 - DNA, 15 bp, Homo sapiens
tagacagaattaaat

SEQ ID NO: 769880 - DNA, 15 bp, Homo sapiens
agacagaattaaatt

SEQ ID NO: 769881 - DNA, 15 bp, Homo sapiens
gacagaattaaatta

SEQ ID NO: 769882 - DNA, 15 bp, Homo sapiens
acagaattaaattag

SEQ ID NO: 769883 - DNA, 15 bp, Homo sapiens
cagaattaaattaga

SEQ ID NO: 769884 - DNA, 15 bp, Homo sapiens
agaattaaattagaa

SEQ ID NO: 769885 - DNA, 15 bp, Homo sapiens
gaattaaattagaaa

SEQ ID NO: 769886 - DNA, 15 bp, Homo sapiens
aattaaattagaaat

SEQ ID NO: 769887 - DNA, 15 bp, Homo sapiens
attaaattagaaatc

SEQ ID NO: 769888 - DNA, 15 bp, Homo sapiens
ttaaattagaaatct

SEQ ID NO: 769889 - DNA, 15 bp, Homo sapiens
taaattagaaatctg

SEQ ID NO: 769890 - DNA, 15 bp, Homo sapiens
aaattagaaatctgg

SEQ ID NO: 769891 - DNA, 15 bp, Homo sapiens
aattagaaatctggg

SEQ ID NO: 769892 - DNA, 15 bp, Homo sapiens
attagaaatctgggt

SEQ ID NO: 769893 - DNA, 15 bp, Homo sapiens
ttagaaatctgggtg

SEQ ID NO: 769894 - DNA, 15 bp, Homo sapiens
tagaaatctgggtga

SEQ ID NO: 769895 - DNA, 15 bp, Homo sapiens
agaaatctgggtgat

SEQ ID NO: 769896 - DNA, 15 bp, Homo sapiens
gaaatctgggtgata

SEQ ID NO: 769897 - DNA, 15 bp, Homo sapiens
aaatctgggtgataa

SEQ ID NO: 769898 - DNA, 15 bp, Homo sapiens
aatctgggtgataag

SEQ ID NO: 769899 - DNA, 15 bp, Homo sapiens
atctgggtgataaga

SEQ ID NO: 769900 - DNA, 15 bp, Homo sapiens
tctgggtgataagac

SEQ ID NO: 769901 - DNA, 15 bp, Homo sapiens
ctgggtgataagact

SEQ ID NO: 769902 - DNA, 15 bp, Homo sapiens
tgggtgataagactt

SEQ ID NO: 769903 - DNA, 15 bp, Homo sapiens
gggtgataagacttt

SEQ ID NO: 769904 - DNA, 15 bp, Homo sapiens
ggtgataagactttt

SEQ ID NO: 769905 - DNA, 15 bp, Homo sapiens
gtgataagacttttt

SEQ ID NO: 769906 - DNA, 15 bp, Homo sapiens
tgataagacttttta

SEQ ID NO: 769907 - DNA, 15 bp, Homo sapiens
gataagactttttaa

SEQ ID NO: 769908 - DNA, 15 bp, Homo sapiens
ataagactttttaaa

SEQ ID NO: 769909 - DNA, 15 bp, Homo sapiens
taagactttttaaat

SEQ ID NO: 769910 - DNA, 15 bp, Homo sapiens
aagactttttaaata

SEQ ID NO: 769911 - DNA, 15 bp, Homo sapiens
agactttttaaataa

SEQ ID NO: 769912 - DNA, 15 bp, Homo sapiens
gactttttaaataat

SEQ ID NO: 769913 - DNA, 15 bp, Homo sapiens
actttttaaataata

SEQ ID NO: 769914 - DNA, 15 bp, Homo sapiens
ctttttaaataatat

SEQ ID NO: 769915 - DNA, 15 bp, Homo sapiens
tttttaaataatatg

SEQ ID NO: 769916 - DNA, 15 bp, Homo sapiens
ttttaaataatatga

SEQ ID NO: 769917 - DNA, 15 bp, Homo sapiens
tttaaataatatgac

SEQ ID NO: 769918 - DNA, 15 bp, Homo sapiens
ttaaataatatgact

SEQ ID NO: 769919 - DNA, 15 bp, Homo sapiens
taaataatatgactg

SEQ ID NO: 769920 - DNA, 15 bp, Homo sapiens
aaataatatgactga

SEQ ID NO: 769921 - DNA, 15 bp, Homo sapiens
aataatatgactgat

SEQ ID NO: 769922 - DNA, 15 bp, Homo sapiens
ataatatgactgatg

SEQ ID NO: 769923 - DNA, 15 bp, Homo sapiens
taatatgactgatga

SEQ ID NO: 769924 - DNA, 15 bp, Homo sapiens
aatatgactgatgat

SEQ ID NO: 769925 - DNA, 15 bp, Homo sapiens
atatgactgatgatt

SEQ ID NO: 769926 - DNA, 15 bp, Homo sapiens
tatgactgatgattt

SEQ ID NO: 769927 - DNA, 15 bp, Homo sapiens
atgactgatgatttt

SEQ ID NO: 769928 - DNA, 15 bp, Homo sapiens
tgactgatgatttta

SEQ ID NO: 769929 - DNA, 15 bp, Homo sapiens
gactgatgattttat

SEQ ID NO: 769930 - DNA, 15 bp, Homo sapiens
actgatgattttatg

SEQ ID NO: 769931 - DNA, 15 bp, Homo sapiens
ctgatgattttatgt

SEQ ID NO: 769932 - DNA, 15 bp, Homo sapiens
tgatgattttatgtg

SEQ ID NO: 769933 - DNA, 15 bp, Homo sapiens
gatgattttatgtga

SEQ ID NO: 769934 - DNA, 15 bp, Homo sapiens
atgattttatgtgaa

SEQ ID NO: 769935 - DNA, 15 bp, Homo sapiens
tgattttatgtgaat

SEQ ID NO: 769936 - DNA, 15 bp, Homo sapiens
gattttatgtgaatt

SEQ ID NO: 769937 - DNA, 15 bp, Homo sapiens
attttatgtgaatta

SEQ ID NO: 769938 - DNA, 15 bp, Homo sapiens
ttttatgtgaattat

SEQ ID NO: 769939 - DNA, 15 bp, Homo sapiens
tttatgtgaattata

SEQ ID NO: 769940 - DNA, 15 bp, Homo sapiens
ttatgtgaattataa

SEQ ID NO: 769941 - DNA, 15 bp, Homo sapiens
tatgtgaattataaa

SEQ ID NO: 769942 - DNA, 15 bp, Homo sapiens
atgtgaattataaaa

SEQ ID NO: 769943 - DNA, 15 bp, Homo sapiens
tgtgaattataaaat

SEQ ID NO: 769944 - DNA, 15 bp, Homo sapiens
gtgaattataaaata

SEQ ID NO: 769945 - DNA, 15 bp, Homo sapiens
tgaattataaaatat

SEQ ID NO: 769946 - DNA, 15 bp, Homo sapiens
gaattataaaatata

SEQ ID NO: 769947 - DNA, 15 bp, Homo sapiens
aattataaaatatag

SEQ ID NO: 769948 - DNA, 15 bp, Homo sapiens
attataaaatatagt

SEQ ID NO: 769949 - DNA, 15 bp, Homo sapiens
ttataaaatatagtt

SEQ ID NO: 769950 - DNA, 15 bp, Homo sapiens
tataaaatatagttc

SEQ ID NO: 769951 - DNA, 15 bp, Homo sapiens
ataaaatatagttcc

SEQ ID NO: 769952 - DNA, 15 bp, Homo sapiens
taaaatatagttcca

SEQ ID NO: 769953 - DNA, 15 bp, Homo sapiens
aaaatatagttccaa

SEQ ID NO: 769954 - DNA, 15 bp, Homo sapiens
aaatatagttccaat

SEQ ID NO: 769955 - DNA, 15 bp, Homo sapiens
aatatagttccaatt

SEQ ID NO: 769956 - DNA, 15 bp, Homo sapiens
atatagttccaattc

SEQ ID NO: 769957 - DNA, 15 bp, Homo sapiens
tatagttccaattct

SEQ ID NO: 769958 - DNA, 15 bp, Homo sapiens
atagttccaattctt

SEQ ID NO: 769959 - DNA, 15 bp, Homo sapiens
tagttccaattcttt

SEQ ID NO: 769960 - DNA, 15 bp, Homo sapiens
agttccaattctttt

SEQ ID NO: 769961 - DNA, 15 bp, Homo sapiens
gttccaattcttttt

SEQ ID NO: 769962 - DNA, 15 bp, Homo sapiens
ttccaattctttttt

SEQ ID NO: 769963 - DNA, 15 bp, Homo sapiens
tccaattcttttttt

SEQ ID NO: 769964 - DNA, 15 bp, Homo sapiens
ccaattctttttttg

SEQ ID NO: 769965 - DNA, 15 bp, Homo sapiens
caattctttttttgc

SEQ ID NO: 769966 - DNA, 15 bp, Homo sapiens
aattctttttttgct

SEQ ID NO: 769967 - DNA, 15 bp, Homo sapiens
attctttttttgctt

SEQ ID NO: 769968 - DNA, 15 bp, Homo sapiens
ttctttttttgcttt

SEQ ID NO: 769969 - DNA, 15 bp, Homo sapiens
tctttttttgcttta

SEQ ID NO: 769970 - DNA, 15 bp, Homo sapiens
ctttttttgctttaa

SEQ ID NO: 769971 - DNA, 15 bp, Homo sapiens
tttttttgctttaag

SEQ ID NO: 769972 - DNA, 15 bp, Homo sapiens
ttttttgctttaagc

SEQ ID NO: 769973 - DNA, 15 bp, Homo sapiens
tttttgctttaagcc

SEQ ID NO: 769974 - DNA, 15 bp, Homo sapiens
ttttgctttaagccc

SEQ ID NO: 769975 - DNA, 15 bp, Homo sapiens
tttgctttaagccca

SEQ ID NO: 769976 - DNA, 15 bp, Homo sapiens
ttgctttaagcccag

SEQ ID NO: 769977 - DNA, 15 bp, Homo sapiens
tgctttaagcccagg

SEQ ID NO: 769978 - DNA, 15 bp, Homo sapiens
gctttaagcccagga

SEQ ID NO: 769979 - DNA, 15 bp, Homo sapiens
ctttaagcccaggac

SEQ ID NO: 769980 - DNA, 15 bp, Homo sapiens
tttaagcccaggaca

SEQ ID NO: 769981 - DNA, 15 bp, Homo sapiens
ttaagcccaggacaa

SEQ ID NO: 769982 - DNA, 15 bp, Homo sapiens
taagcccaggacaaa

SEQ ID NO: 769983 - DNA, 15 bp, Homo sapiens
aagcccaggacaaag

SEQ ID NO: 769984 - DNA, 15 bp, Homo sapiens
agcccaggacaaaga

SEQ ID NO: 769985 - DNA, 15 bp, Homo sapiens
gcccaggacaaagat

SEQ ID NO: 769986 - DNA, 15 bp, Homo sapiens
cccaggacaaagatt

SEQ ID NO: 769987 - DNA, 15 bp, Homo sapiens
ccaggacaaagatta

SEQ ID NO: 769988 - DNA, 15 bp, Homo sapiens
caggacaaagattaa

SEQ ID NO: 769989 - DNA, 15 bp, Homo sapiens
aggacaaagattaaa

SEQ ID NO: 769990 - DNA, 15 bp, Homo sapiens
ggacaaagattaaat

SEQ ID NO: 769991 - DNA, 15 bp, Homo sapiens
gacaaagattaaatg

SEQ ID NO: 769992 - DNA, 15 bp, Homo sapiens
acaaagattaaatgt

SEQ ID NO: 769993 - DNA, 15 bp, Homo sapiens
caaagattaaatgtt

SEQ ID NO: 769994 - DNA, 15 bp, Homo sapiens
aaagattaaatgttt

SEQ ID NO: 769995 - DNA, 15 bp, Homo sapiens
aagattaaatgtttt

SEQ ID NO: 769996 - DNA, 15 bp, Homo sapiens
agattaaatgttttc

SEQ ID NO: 769997 - DNA, 15 bp, Homo sapiens
gattaaatgttttca

SEQ ID NO: 769998 - DNA, 15 bp, Homo sapiens
attaaatgttttcac

SEQ ID NO: 769999 - DNA, 15 bp, Homo sapiens
ttaaatgttttcaca

SEQ ID NO: 770000 - DNA, 15 bp, Homo sapiens
taaatgttttcacaa

SEQ ID NO: 770001 - DNA, 15 bp, Homo sapiens
aaatgttttcacaat

SEQ ID NO: 770002 - DNA, 15 bp, Homo sapiens
aatgttttcacaatg

SEQ ID NO: 770003 - DNA, 15 bp, Homo sapiens
atgttttcacaatga

SEQ ID NO: 770004 - DNA, 15 bp, Homo sapiens
tgttttcacaatgat

SEQ ID NO: 770005 - DNA, 15 bp, Homo sapiens
gttttcacaatgata

SEQ ID NO: 770006 - DNA, 15 bp, Homo sapiens
ttttcacaatgataa

SEQ ID NO: 770007 - DNA, 15 bp, Homo sapiens
tttcacaatgataaa

SEQ ID NO: 770008 - DNA, 15 bp, Homo sapiens
ttcacaatgataaag

SEQ ID NO: 770009 - DNA, 15 bp, Homo sapiens
tcacaatgataaagc

SEQ ID NO: 770010 - DNA, 15 bp, Homo sapiens
cacaatgataaagct

SEQ ID NO: 770011 - DNA, 15 bp, Homo sapiens
acaatgataaagctt

SEQ ID NO: 770012 - DNA, 15 bp, Homo sapiens
caatgataaagcttt

SEQ ID NO: 770013 - DNA, 15 bp, Homo sapiens
aatgataaagctttt

SEQ ID NO: 770014 - DNA, 15 bp, Homo sapiens
atgataaagcttttg

SEQ ID NO: 770015 - DNA, 15 bp, Homo sapiens
tgataaagcttttgt

SEQ ID NO: 770016 - DNA, 15 bp, Homo sapiens
gataaagcttttgtt

SEQ ID NO: 770017 - DNA, 15 bp, Homo sapiens
ataaagcttttgttt

SEQ ID NO: 770018 - DNA, 15 bp, Homo sapiens
taaagcttttgtttc

SEQ ID NO: 770019 - DNA, 15 bp, Homo sapiens
aaagcttttgtttct

SEQ ID NO: 770020 - DNA, 15 bp, Homo sapiens
aagcttttgtttctg

SEQ ID NO: 770021 - DNA, 15 bp, Homo sapiens
agcttttgtttctgt

SEQ ID NO: 770022 - DNA, 15 bp, Homo sapiens
gcttttgtttctgtt

SEQ ID NO: 770023 - DNA, 15 bp, Homo sapiens
cttttgtttctgttc

SEQ ID NO: 770024 - DNA, 15 bp, Homo sapiens
ttttgtttctgttca

SEQ ID NO: 770025 - DNA, 15 bp, Homo sapiens
tttgtttctgttcat

SEQ ID NO: 770026 - DNA, 15 bp, Homo sapiens
ttgtttctgttcatt

SEQ ID NO: 770027 - DNA, 15 bp, Homo sapiens
tgtttctgttcattt

SEQ ID NO: 770028 - DNA, 15 bp, Homo sapiens
gtttctgttcatttt

SEQ ID NO: 770029 - DNA, 15 bp, Homo sapiens
tttctgttcattttt

SEQ ID NO: 770030 - DNA, 15 bp, Homo sapiens
ttctgttcatttttg

SEQ ID NO: 770031 - DNA, 15 bp, Homo sapiens
tctgttcatttttgt

SEQ ID NO: 770032 - DNA, 15 bp, Homo sapiens
ctgttcatttttgtt

SEQ ID NO: 770033 - DNA, 15 bp, Homo sapiens
tgttcatttttgttt

SEQ ID NO: 770034 - DNA, 15 bp, Homo sapiens
gttcatttttgtttc

SEQ ID NO: 770035 - DNA, 15 bp, Homo sapiens
ttcatttttgtttct

SEQ ID NO: 770036 - DNA, 15 bp, Homo sapiens
tcatttttgtttctt

SEQ ID NO: 770037 - DNA, 15 bp, Homo sapiens
catttttgtttcttt

SEQ ID NO: 770038 - DNA, 15 bp, Homo sapiens
atttttgtttctttc

SEQ ID NO: 770039 - DNA, 15 bp, Homo sapiens
tttttgtttctttca

SEQ ID NO: 770040 - DNA, 15 bp, Homo sapiens
ttttgtttctttcaa

SEQ ID NO: 770041 - DNA, 15 bp, Homo sapiens
tttgtttctttcaat

SEQ ID NO: 770042 - DNA, 15 bp, Homo sapiens
ttgtttctttcaatt

SEQ ID NO: 770043 - DNA, 15 bp, Homo sapiens
tgtttctttcaattg

SEQ ID NO: 770044 - DNA, 15 bp, Homo sapiens
gtttctttcaattga

SEQ ID NO: 770045 - DNA, 15 bp, Homo sapiens
tttctttcaattgat

SEQ ID NO: 770046 - DNA, 15 bp, Homo sapiens
ttctttcaattgata

SEQ ID NO: 770047 - DNA, 15 bp, Homo sapiens
tctttcaattgatag

SEQ ID NO: 770048 - DNA, 15 bp, Homo sapiens
ctttcaattgatagg

SEQ ID NO: 770049 - DNA, 15 bp, Homo sapiens
tttcaattgatagga

SEQ ID NO: 770050 - DNA, 15 bp, Homo sapiens
ttcaattgataggac

SEQ ID NO: 770051 - DNA, 15 bp, Homo sapiens
tcaattgataggaca

SEQ ID NO: 770052 - DNA, 15 bp, Homo sapiens
caattgataggacat

SEQ ID NO: 770053 - DNA, 15 bp, Homo sapiens
aattgataggacatg

SEQ ID NO: 770054 - DNA, 15 bp, Homo sapiens
attgataggacatgg

SEQ ID NO: 770055 - DNA, 15 bp, Homo sapiens
ttgataggacatgga

SEQ ID NO: 770056 - DNA, 15 bp, Homo sapiens
tgataggacatggag

SEQ ID NO: 770057 - DNA, 15 bp, Homo sapiens
gataggacatggaga

SEQ ID NO: 770058 - DNA, 15 bp, Homo sapiens
ataggacatggagaa

SEQ ID NO: 770059 - DNA, 15 bp, Homo sapiens
taggacatggagaaa

SEQ ID NO: 770060 - DNA, 15 bp, Homo sapiens
aggacatggagaaag

SEQ ID NO: 770061 - DNA, 15 bp, Homo sapiens
ggacatggagaaaga

SEQ ID NO: 770062 - DNA, 15 bp, Homo sapiens
gacatggagaaagat

SEQ ID NO: 770063 - DNA, 15 bp, Homo sapiens
acatggagaaagatt

SEQ ID NO: 770064 - DNA, 15 bp, Homo sapiens
catggagaaagattt

SEQ ID NO: 770065 - DNA, 15 bp, Homo sapiens
atggagaaagatttt

SEQ ID NO: 770066 - DNA, 15 bp, Homo sapiens
tggagaaagattttt

SEQ ID NO: 770067 - DNA, 15 bp, Homo sapiens
ggagaaagatttttg

SEQ ID NO: 770068 - DNA, 15 bp, Homo sapiens
gagaaagatttttgc

SEQ ID NO: 770069 - DNA, 15 bp, Homo sapiens
agaaagatttttgca

SEQ ID NO: 770070 - DNA, 15 bp, Homo sapiens
gaaagatttttgcat

SEQ ID NO: 770071 - DNA, 15 bp, Homo sapiens
aaagatttttgcatt

SEQ ID NO: 770072 - DNA, 15 bp, Homo sapiens
aagatttttgcattt

SEQ ID NO: 770073 - DNA, 15 bp, Homo sapiens
agatttttgcattta

SEQ ID NO: 770074 - DNA, 15 bp, Homo sapiens
gatttttgcatttat

SEQ ID NO: 770075 - DNA, 15 bp, Homo sapiens
atttttgcatttatg

SEQ ID NO: 770076 - DNA, 15 bp, Homo sapiens
tttttgcatttatgt

SEQ ID NO: 770077 - DNA, 15 bp, Homo sapiens
ttttgcatttatgtt

SEQ ID NO: 770078 - DNA, 15 bp, Homo sapiens
tttgcatttatgttt

SEQ ID NO: 770079 - DNA, 15 bp, Homo sapiens
ttgcatttatgtttg

SEQ ID NO: 770080 - DNA, 15 bp, Homo sapiens
tgcatttatgtttgt

SEQ ID NO: 770081 - DNA, 15 bp, Homo sapiens
gcatttatgtttgta

SEQ ID NO: 770082 - DNA, 15 bp, Homo sapiens
catttatgtttgtat

SEQ ID NO: 770083 - DNA, 15 bp, Homo sapiens
atttatgtttgtata

SEQ ID NO: 770084 - DNA, 15 bp, Homo sapiens
tttatgtttgtataa

SEQ ID NO: 770085 - DNA, 15 bp, Homo sapiens
ttatgtttgtataaa

SEQ ID NO: 770086 - DNA, 15 bp, Homo sapiens
tatgtttgtataaag

SEQ ID NO: 770087 - DNA, 15 bp, Homo sapiens
atgtttgtataaagt

SEQ ID NO: 770088 - DNA, 15 bp, Homo sapiens
tgtttgtataaagta

SEQ ID NO: 770089 - DNA, 15 bp, Homo sapiens
gtttgtataaagtat

SEQ ID NO: 770090 - DNA, 15 bp, Homo sapiens
tttgtataaagtatt

SEQ ID NO: 770091 - DNA, 15 bp, Homo sapiens
ttgtataaagtattt

SEQ ID NO: 770092 - DNA, 15 bp, Homo sapiens
tgtataaagtatttc

SEQ ID NO: 770093 - DNA, 15 bp, Homo sapiens
gtataaagtatttca

SEQ ID NO: 770094 - DNA, 15 bp, Homo sapiens
tataaagtatttcag

SEQ ID NO: 770095 - DNA, 15 bp, Homo sapiens
ataaagtatttcagg

SEQ ID NO: 770096 - DNA, 15 bp, Homo sapiens
taaagtatttcaggg

SEQ ID NO: 770097 - DNA, 15 bp, Homo sapiens
aaagtatttcagggc

SEQ ID NO: 770098 - DNA, 15 bp, Homo sapiens
aagtatttcagggcc

SEQ ID NO: 770099 - DNA, 15 bp, Homo sapiens
agtatttcagggcca

SEQ ID NO: 770100 - DNA, 15 bp, Homo sapiens
gtatttcagggccag

SEQ ID NO: 770101 - DNA, 15 bp, Homo sapiens
tatttcagggccagg

SEQ ID NO: 770102 - DNA, 15 bp, Homo sapiens
atttcagggccaggc

SEQ ID NO: 770103 - DNA, 15 bp, Homo sapiens
tttcagggccaggca

SEQ ID NO: 770104 - DNA, 15 bp, Homo sapiens
ttcagggccaggcac

SEQ ID NO: 770105 - DNA, 15 bp, Homo sapiens
tcagggccaggcaca

SEQ ID NO: 770106 - DNA, 15 bp, Homo sapiens
cagggccaggcacag

SEQ ID NO: 770107 - DNA, 15 bp, Homo sapiens
agggccaggcacagt

SEQ ID NO: 770108 - DNA, 15 bp, Homo sapiens
gggccaggcacagtg

SEQ ID NO: 770109 - DNA, 15 bp, Homo sapiens
ggccaggcacagtgg

SEQ ID NO: 770110 - DNA, 15 bp, Homo sapiens
gccaggcacagtggc

SEQ ID NO: 770111 - DNA, 15 bp, Homo sapiens
ccaggcacagtggct

SEQ ID NO: 770112 - DNA, 15 bp, Homo sapiens
caggcacagtggctc

SEQ ID NO: 770113 - DNA, 15 bp, Homo sapiens
aggcacagtggctca

SEQ ID NO: 770114 - DNA, 15 bp, Homo sapiens
ggcacagtggctcat

SEQ ID NO: 770115 - DNA, 15 bp, Homo sapiens
gcacagtggctcatg

SEQ ID NO: 770116 - DNA, 15 bp, Homo sapiens
cacagtggctcatgc

SEQ ID NO: 770117 - DNA, 15 bp, Homo sapiens
acagtggctcatgcc

SEQ ID NO: 770118 - DNA, 15 bp, Homo sapiens
cagtggctcatgcct

SEQ ID NO: 770119 - DNA, 15 bp, Homo sapiens
agtggctcatgccta

SEQ ID NO: 770120 - DNA, 15 bp, Homo sapiens
gtggctcatgcctat

SEQ ID NO: 770121 - DNA, 15 bp, Homo sapiens
tggctcatgcctata

SEQ ID NO: 770122 - DNA, 15 bp, Homo sapiens
ggctcatgcctataa

SEQ ID NO: 770123 - DNA, 15 bp, Homo sapiens
gctcatgcctataat

SEQ ID NO: 770124 - DNA, 15 bp, Homo sapiens
ctcatgcctataatc

SEQ ID NO: 770125 - DNA, 15 bp, Homo sapiens
tttgggaggctgaga

SEQ ID NO: 770126 - DNA, 15 bp, Homo sapiens
ttgggaggctgagat

SEQ ID NO: 770127 - DNA, 15 bp, Homo sapiens
tgggaggctgagatg

SEQ ID NO: 770128 - DNA, 15 bp, Homo sapiens
gggaggctgagatgg

SEQ ID NO: 770129 - DNA, 15 bp, Homo sapiens
ggaggctgagatggg

SEQ ID NO: 770130 - DNA, 15 bp, Homo sapiens
gaggctgagatgggc

SEQ ID NO: 770131 - DNA, 15 bp, Homo sapiens
aggctgagatgggca

SEQ ID NO: 770132 - DNA, 15 bp, Homo sapiens
ggctgagatgggcag

SEQ ID NO: 770133 - DNA, 15 bp, Homo sapiens
gctgagatgggcaga

SEQ ID NO: 770134 - DNA, 15 bp, Homo sapiens
ctgagatgggcagat

SEQ ID NO: 770135 - DNA, 15 bp, Homo sapiens
tgagatgggcagatg

SEQ ID NO: 770136 - DNA, 15 bp, Homo sapiens
gagatgggcagatga

SEQ ID NO: 770137 - DNA, 15 bp, Homo sapiens
agatgggcagatgac

SEQ ID NO: 770138 - DNA, 15 bp, Homo sapiens
gatgggcagatgact

SEQ ID NO: 770139 - DNA, 15 bp, Homo sapiens
atgggcagatgactt

SEQ ID NO: 770140 - DNA, 15 bp, Homo sapiens
tgggcagatgacttg

SEQ ID NO: 770141 - DNA, 15 bp, Homo sapiens
gggcagatgacttga

SEQ ID NO: 770142 - DNA, 15 bp, Homo sapiens
ggcagatgacttgag

SEQ ID NO: 770143 - DNA, 15 bp, Homo sapiens
gcagatgacttgagt

SEQ ID NO: 770144 - DNA, 15 bp, Homo sapiens
cagatgacttgagtc

SEQ ID NO: 770145 - DNA, 15 bp, Homo sapiens
agatgacttgagtcc

SEQ ID NO: 770146 - DNA, 15 bp, Homo sapiens
gatgacttgagtcca

SEQ ID NO: 770147 - DNA, 15 bp, Homo sapiens
atgacttgagtccag

SEQ ID NO: 770148 - DNA, 15 bp, Homo sapiens
tgacttgagtccagg

SEQ ID NO: 770149 - DNA, 15 bp, Homo sapiens
gacttgagtccagga

SEQ ID NO: 770150 - DNA, 15 bp, Homo sapiens
acttgagtccaggag

SEQ ID NO: 770151 - DNA, 15 bp, Homo sapiens
cttgagtccaggagt

SEQ ID NO: 770152 - DNA, 15 bp, Homo sapiens
ttgagtccaggagtt

SEQ ID NO: 770153 - DNA, 15 bp, Homo sapiens
tgagtccaggagttc

SEQ ID NO: 770154 - DNA, 15 bp, Homo sapiens
gagtccaggagttca

SEQ ID NO: 770155 - DNA, 15 bp, Homo sapiens
agtccaggagttcaa

SEQ ID NO: 770156 - DNA, 15 bp, Homo sapiens
gtccaggagttcaag

SEQ ID NO: 770157 - DNA, 15 bp, Homo sapiens
tccaggagttcaaga

SEQ ID NO: 770158 - DNA, 15 bp, Homo sapiens
caggagttcaagacg

SEQ ID NO: 770159 - DNA, 15 bp, Homo sapiens
aggagttcaagacga

SEQ ID NO: 770160 - DNA, 15 bp, Homo sapiens
ggagttcaagacgag

SEQ ID NO: 770161 - DNA, 15 bp, Homo sapiens
gagttcaagacgagc

SEQ ID NO: 770162 - DNA, 15 bp, Homo sapiens
agttcaagacgagcc

SEQ ID NO: 770163 - DNA, 15 bp, Homo sapiens
gttcaagacgagcct

SEQ ID NO: 770164 - DNA, 15 bp, Homo sapiens
ttcaagacgagcctg

SEQ ID NO: 770165 - DNA, 15 bp, Homo sapiens
tcaagacgagcctgg

SEQ ID NO: 770166 - DNA, 15 bp, Homo sapiens
caagacgagcctggg

SEQ ID NO: 770167 - DNA, 15 bp, Homo sapiens
aagacgagcctgggc

SEQ ID NO: 770168 - DNA, 15 bp, Homo sapiens
agacgagcctgggca

SEQ ID NO: 770169 - DNA, 15 bp, Homo sapiens
gacgagcctgggcac

SEQ ID NO: 770170 - DNA, 15 bp, Homo sapiens
acgagcctgggcact

SEQ ID NO: 770171 - DNA, 15 bp, Homo sapiens
cgagcctgggcactg

SEQ ID NO: 770172 - DNA, 15 bp, Homo sapiens
gagcctgggcactgt

SEQ ID NO: 770173 - DNA, 15 bp, Homo sapiens
agcctgggcactgtg

SEQ ID NO: 770174 - DNA, 15 bp, Homo sapiens
gcctgggcactgtgg

SEQ ID NO: 770175 - DNA, 15 bp, Homo sapiens
cctgggcactgtggt

SEQ ID NO: 770176 - DNA, 15 bp, Homo sapiens
ctgggcactgtggtg

SEQ ID NO: 770177 - DNA, 15 bp, Homo sapiens
tgggcactgtggtga

SEQ ID NO: 770178 - DNA, 15 bp, Homo sapiens
gggcactgtggtgaa

SEQ ID NO: 770179 - DNA, 15 bp, Homo sapiens
ggcactgtggtgaaa

SEQ ID NO: 770180 - DNA, 15 bp, Homo sapiens
gcactgtggtgaaag

SEQ ID NO: 770181 - DNA, 15 bp, Homo sapiens
cactgtggtgaaagc

SEQ ID NO: 770182 - DNA, 15 bp, Homo sapiens
actgtggtgaaagcc

SEQ ID NO: 770183 - DNA, 15 bp, Homo sapiens
ctgtggtgaaagcct

SEQ ID NO: 770184 - DNA, 15 bp, Homo sapiens
tgtggtgaaagccta

SEQ ID NO: 770185 - DNA, 15 bp, Homo sapiens
gtggtgaaagcctat

SEQ ID NO: 770186 - DNA, 15 bp, Homo sapiens
tggtgaaagcctatc

SEQ ID NO: 770187 - DNA, 15 bp, Homo sapiens
ggtgaaagcctatct

SEQ ID NO: 770188 - DNA, 15 bp, Homo sapiens
gtgaaagcctatctc

SEQ ID NO: 770189 - DNA, 15 bp, Homo sapiens
tgaaagcctatctct

SEQ ID NO: 770190 - DNA, 15 bp, Homo sapiens
gaaagcctatctcta

SEQ ID NO: 770191 - DNA, 15 bp, Homo sapiens
aaagcctatctctac

SEQ ID NO: 770192 - DNA, 15 bp, Homo sapiens
aagcctatctctaca

SEQ ID NO: 770193 - DNA, 15 bp, Homo sapiens
agcctatctctacaa

SEQ ID NO: 770194 - DNA, 15 bp, Homo sapiens
gcctatctctacaaa

SEQ ID NO: 770195 - DNA, 15 bp, Homo sapiens
cctatctctacaaaa

SEQ ID NO: 770196 - DNA, 15 bp, Homo sapiens
ctatctctacaaaaa

SEQ ID NO: 770197 - DNA, 15 bp, Homo sapiens
tatctctacaaaaaa

SEQ ID NO: 770198 - DNA, 15 bp, Homo sapiens
atctctacaaaaaat

SEQ ID NO: 770199 - DNA, 15 bp, Homo sapiens
tctctacaaaaaatc

SEQ ID NO: 770200 - DNA, 15 bp, Homo sapiens
ctctacaaaaaatcc

SEQ ID NO: 770201 - DNA, 15 bp, Homo sapiens
tctacaaaaaatcca

SEQ ID NO: 770202 - DNA, 15 bp, Homo sapiens
ctacaaaaaatccaa

SEQ ID NO: 770203 - DNA, 15 bp, Homo sapiens
tacaaaaaatccaaa

SEQ ID NO: 770204 - DNA, 15 bp, Homo sapiens
acaaaaaatccaaaa

SEQ ID NO: 770205 - DNA, 15 bp, Homo sapiens
caaaaaatccaaaaa

SEQ ID NO: 770206 - DNA, 15 bp, Homo sapiens
aaaaaatccaaaaat

SEQ ID NO: 770207 - DNA, 15 bp, Homo sapiens
aaaaatccaaaaatt

SEQ ID NO: 770208 - DNA, 15 bp, Homo sapiens
aaaatccaaaaatta

SEQ ID NO: 770209 - DNA, 15 bp, Homo sapiens
aaatccaaaaattag

SEQ ID NO: 770210 - DNA, 15 bp, Homo sapiens
aatccaaaaattagc

SEQ ID NO: 770211 - DNA, 15 bp, Homo sapiens
atccaaaaattagct

SEQ ID NO: 770212 - DNA, 15 bp, Homo sapiens
tccaaaaattagctg

SEQ ID NO: 770213 - DNA, 15 bp, Homo sapiens
ccaaaaattagctgg

SEQ ID NO: 770214 - DNA, 15 bp, Homo sapiens
ctgggtgtggtggca

SEQ ID NO: 770215 - DNA, 15 bp, Homo sapiens
tgggtgtggtggcat

SEQ ID NO: 770216 - DNA, 15 bp, Homo sapiens
gggtgtggtggcatg

SEQ ID NO: 770217 - DNA, 15 bp, Homo sapiens
ggtgtggtggcatgc

SEQ ID NO: 770218 - DNA, 15 bp, Homo sapiens
gtgtggtggcatgca

SEQ ID NO: 770219 - DNA, 15 bp, Homo sapiens
tgtggtggcatgcac

SEQ ID NO: 770220 - DNA, 15 bp, Homo sapiens
gtggtggcatgcacc

SEQ ID NO: 770221 - DNA, 15 bp, Homo sapiens
tggtggcatgcacct

SEQ ID NO: 770222 - DNA, 15 bp, Homo sapiens
ggtggcatgcacctg

SEQ ID NO: 770223 - DNA, 15 bp, Homo sapiens
gtggcatgcacctgt

SEQ ID NO: 770224 - DNA, 15 bp, Homo sapiens
tggcatgcacctgta

SEQ ID NO: 770225 - DNA, 15 bp, Homo sapiens
ggcatgcacctgtag

SEQ ID NO: 770226 - DNA, 15 bp, Homo sapiens
gcatgcacctgtagt

SEQ ID NO: 770227 - DNA, 15 bp, Homo sapiens
catgcacctgtagtc

SEQ ID NO: 770228 - DNA, 15 bp, Homo sapiens
atgcacctgtagtcc

SEQ ID NO: 770229 - DNA, 15 bp, Homo sapiens
tgcacctgtagtccc

SEQ ID NO: 770230 - DNA, 15 bp, Homo sapiens
gtagtcccagctacc

SEQ ID NO: 770231 - DNA, 15 bp, Homo sapiens
tagtcccagctacct

SEQ ID NO: 770232 - DNA, 15 bp, Homo sapiens
agtcccagctacctg

SEQ ID NO: 770233 - DNA, 15 bp, Homo sapiens
gtcccagctacctga

SEQ ID NO: 770234 - DNA, 15 bp, Homo sapiens
tcccagctacctgag

SEQ ID NO: 770235 - DNA, 15 bp, Homo sapiens
cccagctacctgaga

SEQ ID NO: 770236 - DNA, 15 bp, Homo sapiens
ccagctacctgagag

SEQ ID NO: 770237 - DNA, 15 bp, Homo sapiens
cagctacctgagagg

SEQ ID NO: 770238 - DNA, 15 bp, Homo sapiens
agctacctgagaggc

SEQ ID NO: 770239 - DNA, 15 bp, Homo sapiens
gctacctgagaggct

SEQ ID NO: 770240 - DNA, 15 bp, Homo sapiens
ctacctgagaggctg

SEQ ID NO: 770241 - DNA, 15 bp, Homo sapiens
tacctgagaggctga

SEQ ID NO: 770242 - DNA, 15 bp, Homo sapiens
acctgagaggctgaa

SEQ ID NO: 770243 - DNA, 15 bp, Homo sapiens
cctgagaggctgaag

SEQ ID NO: 770244 - DNA, 15 bp, Homo sapiens
ctgagaggctgaagt

SEQ ID NO: 770245 - DNA, 15 bp, Homo sapiens
tgagaggctgaagtg

SEQ ID NO: 770246 - DNA, 15 bp, Homo sapiens
gagaggctgaagtgg

SEQ ID NO: 770247 - DNA, 15 bp, Homo sapiens
agaggctgaagtggg

SEQ ID NO: 770248 - DNA, 15 bp, Homo sapiens
gaggctgaagtggga

SEQ ID NO: 770249 - DNA, 15 bp, Homo sapiens
aggctgaagtgggag

SEQ ID NO: 770250 - DNA, 15 bp, Homo sapiens
ggctgaagtgggagg

SEQ ID NO: 770251 - DNA, 15 bp, Homo sapiens
gctgaagtgggagga

SEQ ID NO: 770252 - DNA, 15 bp, Homo sapiens
ctgaagtgggaggat

SEQ ID NO: 770253 - DNA, 15 bp, Homo sapiens
tgaagtgggaggatc

SEQ ID NO: 770254 - DNA, 15 bp, Homo sapiens
gaagtgggaggatca

SEQ ID NO: 770255 - DNA, 15 bp, Homo sapiens
aagtgggaggatcat

SEQ ID NO: 770256 - DNA, 15 bp, Homo sapiens
agtgggaggatcatc

SEQ ID NO: 770257 - DNA, 15 bp, Homo sapiens
gtgggaggatcatct

SEQ ID NO: 770258 - DNA, 15 bp, Homo sapiens
tgggaggatcatctg

SEQ ID NO: 770259 - DNA, 15 bp, Homo sapiens
gggaggatcatctga

SEQ ID NO: 770260 - DNA, 15 bp, Homo sapiens
ggaggatcatctgag

SEQ ID NO: 770261 - DNA, 15 bp, Homo sapiens
gaggatcatctgagc

SEQ ID NO: 770262 - DNA, 15 bp, Homo sapiens
aggatcatctgagcc

SEQ ID NO: 770263 - DNA, 15 bp, Homo sapiens
ggatcatctgagcct

SEQ ID NO: 770264 - DNA, 15 bp, Homo sapiens
gatcatctgagcctg

SEQ ID NO: 770265 - DNA, 15 bp, Homo sapiens
atcatctgagcctgg

SEQ ID NO: 770266 - DNA, 15 bp, Homo sapiens
tcatctgagcctggg

SEQ ID NO: 770267 - DNA, 15 bp, Homo sapiens
catctgagcctggga

SEQ ID NO: 770268 - DNA, 15 bp, Homo sapiens
atctgagcctgggag

SEQ ID NO: 770269 - DNA, 15 bp, Homo sapiens
tctgagcctgggagg

SEQ ID NO: 770270 - DNA, 15 bp, Homo sapiens
ctgagcctgggaggg

SEQ ID NO: 770271 - DNA, 15 bp, Homo sapiens
tgagcctgggagggt

SEQ ID NO: 770272 - DNA, 15 bp, Homo sapiens
gagcctgggagggtg

SEQ ID NO: 770273 - DNA, 15 bp, Homo sapiens
agcctgggagggtga

SEQ ID NO: 770274 - DNA, 15 bp, Homo sapiens
gcctgggagggtgag

SEQ ID NO: 770275 - DNA, 15 bp, Homo sapiens
cctgggagggtgagg

SEQ ID NO: 770276 - DNA, 15 bp, Homo sapiens
ctgggagggtgaggc

SEQ ID NO: 770277 - DNA, 15 bp, Homo sapiens
tgggagggtgaggct

SEQ ID NO: 770278 - DNA, 15 bp, Homo sapiens
gggagggtgaggctg

SEQ ID NO: 770279 - DNA, 15 bp, Homo sapiens
ggagggtgaggctga

SEQ ID NO: 770280 - DNA, 15 bp, Homo sapiens
gagggtgaggctgaa

SEQ ID NO: 770281 - DNA, 15 bp, Homo sapiens
agggtgaggctgaag

SEQ ID NO: 770282 - DNA, 15 bp, Homo sapiens
gggtgaggctgaagt

SEQ ID NO: 770283 - DNA, 15 bp, Homo sapiens
ggtgaggctgaagtg

SEQ ID NO: 770284 - DNA, 15 bp, Homo sapiens
gtgaggctgaagtga

SEQ ID NO: 770285 - DNA, 15 bp, Homo sapiens
tgaggctgaagtgag

SEQ ID NO: 770286 - DNA, 15 bp, Homo sapiens
gaggctgaagtgagc

SEQ ID NO: 770287 - DNA, 15 bp, Homo sapiens
aggctgaagtgagcc

SEQ ID NO: 770288 - DNA, 15 bp, Homo sapiens
ggctgaagtgagccg

SEQ ID NO: 770289 - DNA, 15 bp, Homo sapiens
gctgaagtgagccga

SEQ ID NO: 770290 - DNA, 15 bp, Homo sapiens
ctgaagtgagccgag

SEQ ID NO: 770291 - DNA, 15 bp, Homo sapiens
tgaagtgagccgaga

SEQ ID NO: 770292 - DNA, 15 bp, Homo sapiens
gaagtgagccgagat

SEQ ID NO: 770293 - DNA, 15 bp, Homo sapiens
aagtgagccgagatt

SEQ ID NO: 770294 - DNA, 15 bp, Homo sapiens
agtgagccgagattg

SEQ ID NO: 770295 - DNA, 15 bp, Homo sapiens
gtgagccgagattgt

SEQ ID NO: 770296 - DNA, 15 bp, Homo sapiens
tgagccgagattgta

SEQ ID NO: 770297 - DNA, 15 bp, Homo sapiens
gagccgagattgtac

SEQ ID NO: 770298 - DNA, 15 bp, Homo sapiens
agccgagattgtacc

SEQ ID NO: 770299 - DNA, 15 bp, Homo sapiens
gccgagattgtacca

SEQ ID NO: 770300 - DNA, 15 bp, Homo sapiens
ccgagattgtaccac

SEQ ID NO: 770301 - DNA, 15 bp, Homo sapiens
cgagattgtaccact

SEQ ID NO: 770302 - DNA, 15 bp, Homo sapiens
gagattgtaccactg

SEQ ID NO: 770303 - DNA, 15 bp, Homo sapiens
agattgtaccactgt

SEQ ID NO: 770304 - DNA, 15 bp, Homo sapiens
gattgtaccactgta

SEQ ID NO: 770305 - DNA, 15 bp, Homo sapiens
attgtaccactgtac

SEQ ID NO: 770306 - DNA, 15 bp, Homo sapiens
ttgtaccactgtact

SEQ ID NO: 770307 - DNA, 15 bp, Homo sapiens
tgtaccactgtactc

SEQ ID NO: 770308 - DNA, 15 bp, Homo sapiens
gtaccactgtactcc

SEQ ID NO: 770309 - DNA, 15 bp, Homo sapiens
taccactgtactcca

SEQ ID NO: 770310 - DNA, 15 bp, Homo sapiens
accactgtactccag

SEQ ID NO: 770311 - DNA, 15 bp, Homo sapiens
ctgggcaacatagca

SEQ ID NO: 770312 - DNA, 15 bp, Homo sapiens
tgggcaacatagcaa

SEQ ID NO: 770313 - DNA, 15 bp, Homo sapiens
gggcaacatagcaag

SEQ ID NO: 770314 - DNA, 15 bp, Homo sapiens
ggcaacatagcaaga

SEQ ID NO: 770315 - DNA, 15 bp, Homo sapiens
gcaacatagcaagac

SEQ ID NO: 770316 - DNA, 15 bp, Homo sapiens
caacatagcaagacc

SEQ ID NO: 770317 - DNA, 15 bp, Homo sapiens
aacatagcaagaccc

SEQ ID NO: 770318 - DNA, 15 bp, Homo sapiens
acatagcaagacccg

SEQ ID NO: 770319 - DNA, 15 bp, Homo sapiens
catagcaagacccgg

SEQ ID NO: 770320 - DNA, 15 bp, Homo sapiens
atagcaagacccggt

SEQ ID NO: 770321 - DNA, 15 bp, Homo sapiens
tagcaagacccggtc

SEQ ID NO: 770322 - DNA, 15 bp, Homo sapiens
agcaagacccggtct

SEQ ID NO: 770323 - DNA, 15 bp, Homo sapiens
gcaagacccggtctc

SEQ ID NO: 770324 - DNA, 15 bp, Homo sapiens
caagacccggtctca

SEQ ID NO: 770325 - DNA, 15 bp, Homo sapiens
aagacccggtctcaa

SEQ ID NO: 770326 - DNA, 15 bp, Homo sapiens
agacccggtctcaaa

SEQ ID NO: 770327 - DNA, 15 bp, Homo sapiens
gacccggtctcaaaa

SEQ ID NO: 770328 - DNA, 15 bp, Homo sapiens
acccggtctcaaaat

SEQ ID NO: 770329 - DNA, 15 bp, Homo sapiens
cccggtctcaaaata

SEQ ID NO: 770330 - DNA, 15 bp, Homo sapiens
ccggtctcaaaataa

SEQ ID NO: 770331 - DNA, 15 bp, Homo sapiens
cggtctcaaaataaa

SEQ ID NO: 770332 - DNA, 15 bp, Homo sapiens
ggtctcaaaataaaa

SEQ ID NO: 770333 - DNA, 15 bp, Homo sapiens
gtctcaaaataaaat

SEQ ID NO: 770334 - DNA, 15 bp, Homo sapiens
tctcaaaataaaata

SEQ ID NO: 770335 - DNA, 15 bp, Homo sapiens
ctcaaaataaaataa

SEQ ID NO: 770336 - DNA, 15 bp, Homo sapiens
tcaaaataaaataaa

SEQ ID NO: 770337 - DNA, 15 bp, Homo sapiens
caaaataaaataaaa

SEQ ID NO: 770338 - DNA, 15 bp, Homo sapiens
aataaaataaaataa

SEQ ID NO: 770339 - DNA, 15 bp, Homo sapiens
ataaaataaaataaa

SEQ ID NO: 770340 - DNA, 15 bp, Homo sapiens
ataaaataaaataat

SEQ ID NO: 770341 - DNA, 15 bp, Homo sapiens
taaaataaaataatt

SEQ ID NO: 770342 - DNA, 15 bp, Homo sapiens
aaaataaaataattc

SEQ ID NO: 770343 - DNA, 15 bp, Homo sapiens
aaataaaataattcc

SEQ ID NO: 770344 - DNA, 15 bp, Homo sapiens
aataaaataattcca

SEQ ID NO: 770345 - DNA, 15 bp, Homo sapiens
ataaaataattccat

SEQ ID NO: 770346 - DNA, 15 bp, Homo sapiens
taaaataattccatc

SEQ ID NO: 770347 - DNA, 15 bp, Homo sapiens
aaaataattccatct

SEQ ID NO: 770348 - DNA, 15 bp, Homo sapiens
aaataattccatctg

SEQ ID NO: 770349 - DNA, 15 bp, Homo sapiens
aataattccatctgc

SEQ ID NO: 770350 - DNA, 15 bp, Homo sapiens
ataattccatctgct

SEQ ID NO: 770351 - DNA, 15 bp, Homo sapiens
taattccatctgctg

SEQ ID NO: 770352 - DNA, 15 bp, Homo sapiens
aattccatctgctgt

SEQ ID NO: 770353 - DNA, 15 bp, Homo sapiens
attccatctgctgtt

SEQ ID NO: 770354 - DNA, 15 bp, Homo sapiens
ttccatctgctgttt

SEQ ID NO: 770355 - DNA, 15 bp, Homo sapiens
tccatctgctgtttt

SEQ ID NO: 770356 - DNA, 15 bp, Homo sapiens
ccatctgctgttttc

SEQ ID NO: 770357 - DNA, 15 bp, Homo sapiens
catctgctgttttct

SEQ ID NO: 770358 - DNA, 15 bp, Homo sapiens
atctgctgttttctt

SEQ ID NO: 770359 - DNA, 15 bp, Homo sapiens
tctgctgttttcttg

SEQ ID NO: 770360 - DNA, 15 bp, Homo sapiens
ctgctgttttcttgg

SEQ ID NO: 770361 - DNA, 15 bp, Homo sapiens
tgctgttttcttggt

SEQ ID NO: 770362 - DNA, 15 bp, Homo sapiens
gctgttttcttggtt

SEQ ID NO: 770363 - DNA, 15 bp, Homo sapiens
ctgttttcttggttt

SEQ ID NO: 770364 - DNA, 15 bp, Homo sapiens
tgttttcttggtttt

SEQ ID NO: 770365 - DNA, 15 bp, Homo sapiens
gttttcttggtttta

SEQ ID NO: 770366 - DNA, 15 bp, Homo sapiens
ttttcttggttttat

SEQ ID NO: 770367 - DNA, 15 bp, Homo sapiens
tttcttggttttata

SEQ ID NO: 770368 - DNA, 15 bp, Homo sapiens
ttcttggttttatat

SEQ ID NO: 770369 - DNA, 15 bp, Homo sapiens
tcttggttttatatc

SEQ ID NO: 770370 - DNA, 15 bp, Homo sapiens
cttggttttatatct

SEQ ID NO: 770371 - DNA, 15 bp, Homo sapiens
ttggttttatatctc

SEQ ID NO: 770372 - DNA, 15 bp, Homo sapiens
tggttttatatctct

SEQ ID NO: 770373 - DNA, 15 bp, Homo sapiens
ggttttatatctctt

SEQ ID NO: 770374 - DNA, 15 bp, Homo sapiens
gttttatatctcttc

SEQ ID NO: 770375 - DNA, 15 bp, Homo sapiens
ttttatatctcttcc

SEQ ID NO: 770376 - DNA, 15 bp, Homo sapiens
tttatatctcttcct

SEQ ID NO: 770377 - DNA, 15 bp, Homo sapiens
ttatatctcttccta

SEQ ID NO: 770378 - DNA, 15 bp, Homo sapiens
tatatctcttcctat

SEQ ID NO: 770379 - DNA, 15 bp, Homo sapiens
atatctcttcctata

SEQ ID NO: 770380 - DNA, 15 bp, Homo sapiens
tatctcttcctatag

SEQ ID NO: 770381 - DNA, 15 bp, Homo sapiens
atctcttcctataga

SEQ ID NO: 770382 - DNA, 15 bp, Homo sapiens
tctcttcctatagaa

SEQ ID NO: 770383 - DNA, 15 bp, Homo sapiens
ctcttcctatagaag

SEQ ID NO: 770384 - DNA, 15 bp, Homo sapiens
tcttcctatagaagc

SEQ ID NO: 770385 - DNA, 15 bp, Homo sapiens
cttcctatagaagca

SEQ ID NO: 770386 - DNA, 15 bp, Homo sapiens
ttcctatagaagcat

SEQ ID NO: 770387 - DNA, 15 bp, Homo sapiens
tcctatagaagcata

SEQ ID NO: 770388 - DNA, 15 bp, Homo sapiens
cctatagaagcatag

SEQ ID NO: 770389 - DNA, 15 bp, Homo sapiens
ctatagaagcatagt

SEQ ID NO: 770390 - DNA, 15 bp, Homo sapiens
tatagaagcatagtt

SEQ ID NO: 770391 - DNA, 15 bp, Homo sapiens
atagaagcatagtta

SEQ ID NO: 770392 - DNA, 15 bp, Homo sapiens
tagaagcatagttaa

SEQ ID NO: 770393 - DNA, 15 bp, Homo sapiens
agaagcatagttaac

SEQ ID NO: 770394 - DNA, 15 bp, Homo sapiens
gaagcatagttaact

SEQ ID NO: 770395 - DNA, 15 bp, Homo sapiens
aagcatagttaactt

SEQ ID NO: 770396 - DNA, 15 bp, Homo sapiens
agcatagttaacttg

SEQ ID NO: 770397 - DNA, 15 bp, Homo sapiens
gcatagttaacttgc

SEQ ID NO: 770398 - DNA, 15 bp, Homo sapiens
catagttaacttgct

SEQ ID NO: 770399 - DNA, 15 bp, Homo sapiens
atagttaacttgctt

SEQ ID NO: 770400 - DNA, 15 bp, Homo sapiens
tagttaacttgcttc

SEQ ID NO: 770401 - DNA, 15 bp, Homo sapiens
agttaacttgcttct

SEQ ID NO: 770402 - DNA, 15 bp, Homo sapiens
gttaacttgcttctt

SEQ ID NO: 770403 - DNA, 15 bp, Homo sapiens
ttaacttgcttcttt

SEQ ID NO: 770404 - DNA, 15 bp, Homo sapiens
taacttgcttctttg

SEQ ID NO: 770405 - DNA, 15 bp, Homo sapiens
aacttgcttctttga

SEQ ID NO: 770406 - DNA, 15 bp, Homo sapiens
acttgcttctttgaa

SEQ ID NO: 770407 - DNA, 15 bp, Homo sapiens
cttgcttctttgaag

SEQ ID NO: 770408 - DNA, 15 bp, Homo sapiens
ttgcttctttgaagg

SEQ ID NO: 770409 - DNA, 15 bp, Homo sapiens
tgcttctttgaaggt

SEQ ID NO: 770410 - DNA, 15 bp, Homo sapiens
gcttctttgaaggta

SEQ ID NO: 770411 - DNA, 15 bp, Homo sapiens
cttctttgaaggtag

SEQ ID NO: 770412 - DNA, 15 bp, Homo sapiens
ttctttgaaggtagc

SEQ ID NO: 770413 - DNA, 15 bp, Homo sapiens
tctttgaaggtagct

SEQ ID NO: 770414 - DNA, 15 bp, Homo sapiens
ctttgaaggtagctg

SEQ ID NO: 770415 - DNA, 15 bp, Homo sapiens
tttgaaggtagctga

SEQ ID NO: 770416 - DNA, 15 bp, Homo sapiens
ttgaaggtagctgaa

SEQ ID NO: 770417 - DNA, 15 bp, Homo sapiens
tgaaggtagctgaat

SEQ ID NO: 770418 - DNA, 15 bp, Homo sapiens
gaaggtagctgaatt

SEQ ID NO: 770419 - DNA, 15 bp, Homo sapiens
aaggtagctgaattt

SEQ ID NO: 770420 - DNA, 15 bp, Homo sapiens
aggtagctgaatttt

SEQ ID NO: 770421 - DNA, 15 bp, Homo sapiens
ggtagctgaattttt

SEQ ID NO: 770422 - DNA, 15 bp, Homo sapiens
gtagctgaattttta

SEQ ID NO: 770423 - DNA, 15 bp, Homo sapiens
tagctgaatttttaa

SEQ ID NO: 770424 - DNA, 15 bp, Homo sapiens
agctgaatttttaaa

SEQ ID NO: 770425 - DNA, 15 bp, Homo sapiens
gctgaatttttaaaa

SEQ ID NO: 770426 - DNA, 15 bp, Homo sapiens
ctgaatttttaaaaa

SEQ ID NO: 770427 - DNA, 15 bp, Homo sapiens
tgaatttttaaaaac

SEQ ID NO: 770428 - DNA, 15 bp, Homo sapiens
gaatttttaaaaaca

SEQ ID NO: 770429 - DNA, 15 bp, Homo sapiens
aatttttaaaaacat

SEQ ID NO: 770430 - DNA, 15 bp, Homo sapiens
atttttaaaaacata

SEQ ID NO: 770431 - DNA, 15 bp, Homo sapiens
tttttaaaaacatac

SEQ ID NO: 770432 - DNA, 15 bp, Homo sapiens
ttttaaaaacataca

SEQ ID NO: 770433 - DNA, 15 bp, Homo sapiens
tttaaaaacatacac

SEQ ID NO: 770434 - DNA, 15 bp, Homo sapiens
ttaaaaacatacact

SEQ ID NO: 770435 - DNA, 15 bp, Homo sapiens
taaaaacatacacta

SEQ ID NO: 770436 - DNA, 15 bp, Homo sapiens
aaaaacatacactaa

SEQ ID NO: 770437 - DNA, 15 bp, Homo sapiens
aaaacatacactaac

SEQ ID NO: 770438 - DNA, 15 bp, Homo sapiens
aaacatacactaaca

SEQ ID NO: 770439 - DNA, 15 bp, Homo sapiens
aacatacactaacat

SEQ ID NO: 770440 - DNA, 15 bp, Homo sapiens
acatacactaacatg

SEQ ID NO: 770441 - DNA, 15 bp, Homo sapiens
catacactaacatgg

SEQ ID NO: 770442 - DNA, 15 bp, Homo sapiens
atacactaacatgga

SEQ ID NO: 770443 - DNA, 15 bp, Homo sapiens
tacactaacatggaa

SEQ ID NO: 770444 - DNA, 15 bp, Homo sapiens
acactaacatggaaa

SEQ ID NO: 770445 - DNA, 15 bp, Homo sapiens
cactaacatggaaaa

SEQ ID NO: 770446 - DNA, 15 bp, Homo sapiens
actaacatggaaaat

SEQ ID NO: 770447 - DNA, 15 bp, Homo sapiens
ctaacatggaaaata

SEQ ID NO: 770448 - DNA, 15 bp, Homo sapiens
taacatggaaaatac

SEQ ID NO: 770449 - DNA, 15 bp, Homo sapiens
aacatggaaaatacc

SEQ ID NO: 770450 - DNA, 15 bp, Homo sapiens
acatggaaaatacct

SEQ ID NO: 770451 - DNA, 15 bp, Homo sapiens
catggaaaatacctt

SEQ ID NO: 770452 - DNA, 15 bp, Homo sapiens
atggaaaataccttt

SEQ ID NO: 770453 - DNA, 15 bp, Homo sapiens
tggaaaatacctttg

SEQ ID NO: 770454 - DNA, 15 bp, Homo sapiens
ggaaaatacctttgg

SEQ ID NO: 770455 - DNA, 15 bp, Homo sapiens
gaaaatacctttggt

SEQ ID NO: 770456 - DNA, 15 bp, Homo sapiens
aaaatacctttggta

SEQ ID NO: 770457 - DNA, 15 bp, Homo sapiens
aaatacctttggtac

SEQ ID NO: 770458 - DNA, 15 bp, Homo sapiens
aatacctttggtact

SEQ ID NO: 770459 - DNA, 15 bp, Homo sapiens
atacctttggtacta

SEQ ID NO: 770460 - DNA, 15 bp, Homo sapiens
tacctttggtactac

SEQ ID NO: 770461 - DNA, 15 bp, Homo sapiens
acctttggtactaca

SEQ ID NO: 770462 - DNA, 15 bp, Homo sapiens
cctttggtactacat

SEQ ID NO: 770463 - DNA, 15 bp, Homo sapiens
ctttggtactacatc

SEQ ID NO: 770464 - DNA, 15 bp, Homo sapiens
tttggtactacatct

SEQ ID NO: 770465 - DNA, 15 bp, Homo sapiens
ttggtactacatctt

SEQ ID NO: 770466 - DNA, 15 bp, Homo sapiens
tggtactacatcttg

SEQ ID NO: 770467 - DNA, 15 bp, Homo sapiens
ggtactacatcttgg

SEQ ID NO: 770468 - DNA, 15 bp, Homo sapiens
gtactacatcttggg

SEQ ID NO: 770469 - DNA, 15 bp, Homo sapiens
tactacatcttgggg

SEQ ID NO: 770470 - DNA, 15 bp, Homo sapiens
actacatcttgggga

SEQ ID NO: 770471 - DNA, 15 bp, Homo sapiens
ctacatcttggggac

SEQ ID NO: 770472 - DNA, 15 bp, Homo sapiens
tacatcttggggacg

SEQ ID NO: 770473 - DNA, 15 bp, Homo sapiens
acatcttggggacga

SEQ ID NO: 770474 - DNA, 15 bp, Homo sapiens
catcttggggacgaa

SEQ ID NO: 770475 - DNA, 15 bp, Homo sapiens
atcttggggacgaaa

SEQ ID NO: 770476 - DNA, 15 bp, Homo sapiens
tcttggggacgaaat

SEQ ID NO: 770477 - DNA, 15 bp, Homo sapiens
cttggggacgaaatt

SEQ ID NO: 770478 - DNA, 15 bp, Homo sapiens
ttggggacgaaattt

SEQ ID NO: 770479 - DNA, 15 bp, Homo sapiens
tggggacgaaattta

SEQ ID NO: 770480 - DNA, 15 bp, Homo sapiens
ggggacgaaatttaa

SEQ ID NO: 770481 - DNA, 15 bp, Homo sapiens
gggacgaaatttaat

SEQ ID NO: 770482 - DNA, 15 bp, Homo sapiens
ggacgaaatttaata

SEQ ID NO: 770483 - DNA, 15 bp, Homo sapiens
gacgaaatttaatac

SEQ ID NO: 770484 - DNA, 15 bp, Homo sapiens
acgaaatttaatacc

SEQ ID NO: 770485 - DNA, 15 bp, Homo sapiens
cgaaatttaatacca

SEQ ID NO: 770486 - DNA, 15 bp, Homo sapiens
gaaatttaataccag

SEQ ID NO: 770487 - DNA, 15 bp, Homo sapiens
aaatttaataccagt

SEQ ID NO: 770488 - DNA, 15 bp, Homo sapiens
aatttaataccagta

SEQ ID NO: 770489 - DNA, 15 bp, Homo sapiens
atttaataccagtat

SEQ ID NO: 770490 - DNA, 15 bp, Homo sapiens
tttaataccagtatg

SEQ ID NO: 770491 - DNA, 15 bp, Homo sapiens
ttaataccagtatgt

SEQ ID NO: 770492 - DNA, 15 bp, Homo sapiens
taataccagtatgtg

SEQ ID NO: 770493 - DNA, 15 bp, Homo sapiens
aataccagtatgtgc

SEQ ID NO: 770494 - DNA, 15 bp, Homo sapiens
ataccagtatgtgcc

SEQ ID NO: 770495 - DNA, 15 bp, Homo sapiens
taccagtatgtgcca

SEQ ID NO: 770496 - DNA, 15 bp, Homo sapiens
accagtatgtgccat

SEQ ID NO: 770497 - DNA, 15 bp, Homo sapiens
ccagtatgtgccatt

SEQ ID NO: 770498 - DNA, 15 bp, Homo sapiens
cagtatgtgccattt

SEQ ID NO: 770499 - DNA, 15 bp, Homo sapiens
agtatgtgccattta

SEQ ID NO: 770500 - DNA, 15 bp, Homo sapiens
gtatgtgccatttat

SEQ ID NO: 770501 - DNA, 15 bp, Homo sapiens
tatgtgccatttata

SEQ ID NO: 770502 - DNA, 15 bp, Homo sapiens
atgtgccatttatag

SEQ ID NO: 770503 - DNA, 15 bp, Homo sapiens
tgtgccatttatagc

SEQ ID NO: 770504 - DNA, 15 bp, Homo sapiens
gtgccatttatagca

SEQ ID NO: 770505 - DNA, 15 bp, Homo sapiens
tgccatttatagcaa

SEQ ID NO: 770506 - DNA, 15 bp, Homo sapiens
gccatttatagcaat

SEQ ID NO: 770507 - DNA, 15 bp, Homo sapiens
ccatttatagcaatt

SEQ ID NO: 770508 - DNA, 15 bp, Homo sapiens
catttatagcaattc

SEQ ID NO: 770509 - DNA, 15 bp, Homo sapiens
atttatagcaattcc

SEQ ID NO: 770510 - DNA, 15 bp, Homo sapiens
tttatagcaattccc

SEQ ID NO: 770511 - DNA, 15 bp, Homo sapiens
ttatagcaattcccg

SEQ ID NO: 770512 - DNA, 15 bp, Homo sapiens
tatagcaattcccga

SEQ ID NO: 770513 - DNA, 15 bp, Homo sapiens
atagcaattcccgac

SEQ ID NO: 770514 - DNA, 15 bp, Homo sapiens
tagcaattcccgaca

SEQ ID NO: 770515 - DNA, 15 bp, Homo sapiens
agcaattcccgacag

SEQ ID NO: 770516 - DNA, 15 bp, Homo sapiens
gcaattcccgacagg

SEQ ID NO: 770517 - DNA, 15 bp, Homo sapiens
caattcccgacaggc

SEQ ID NO: 770518 - DNA, 15 bp, Homo sapiens
aattcccgacaggca

SEQ ID NO: 770519 - DNA, 15 bp, Homo sapiens
attcccgacaggcat

SEQ ID NO: 770520 - DNA, 15 bp, Homo sapiens
ttcccgacaggcatt

SEQ ID NO: 770521 - DNA, 15 bp, Homo sapiens
tcccgacaggcatta

SEQ ID NO: 770522 - DNA, 15 bp, Homo sapiens
cccgacaggcattac

SEQ ID NO: 770523 - DNA, 15 bp, Homo sapiens
ccgacaggcattact

SEQ ID NO: 770524 - DNA, 15 bp, Homo sapiens
cgacaggcattactt

SEQ ID NO: 770525 - DNA, 15 bp, Homo sapiens
gacaggcattactta

SEQ ID NO: 770526 - DNA, 15 bp, Homo sapiens
acaggcattacttat

SEQ ID NO: 770527 - DNA, 15 bp, Homo sapiens
caggcattacttata

SEQ ID NO: 770528 - DNA, 15 bp, Homo sapiens
aggcattacttatac

SEQ ID NO: 770529 - DNA, 15 bp, Homo sapiens
ggcattacttatact

SEQ ID NO: 770530 - DNA, 15 bp, Homo sapiens
gcattacttatacta

SEQ ID NO: 770531 - DNA, 15 bp, Homo sapiens
cattacttatactaa

SEQ ID NO: 770532 - DNA, 15 bp, Homo sapiens
attacttatactaat

SEQ ID NO: 770533 - DNA, 15 bp, Homo sapiens
ttacttatactaatg

SEQ ID NO: 770534 - DNA, 15 bp, Homo sapiens
tacttatactaatgt

SEQ ID NO: 770535 - DNA, 15 bp, Homo sapiens
acttatactaatgtg

SEQ ID NO: 770536 - DNA, 15 bp, Homo sapiens
cttatactaatgtgt

SEQ ID NO: 770537 - DNA, 15 bp, Homo sapiens
ttatactaatgtgta

SEQ ID NO: 770538 - DNA, 15 bp, Homo sapiens
tatactaatgtgtat

SEQ ID NO: 770539 - DNA, 15 bp, Homo sapiens
atactaatgtgtatc

SEQ ID NO: 770540 - DNA, 15 bp, Homo sapiens
tactaatgtgtatca

SEQ ID NO: 770541 - DNA, 15 bp, Homo sapiens
actaatgtgtatcag

SEQ ID NO: 770542 - DNA, 15 bp, Homo sapiens
ctaatgtgtatcagt

SEQ ID NO: 770543 - DNA, 15 bp, Homo sapiens
taatgtgtatcagtg

SEQ ID NO: 770544 - DNA, 15 bp, Homo sapiens
aatgtgtatcagtgt

SEQ ID NO: 770545 - DNA, 15 bp, Homo sapiens
atgtgtatcagtgtt

SEQ ID NO: 770546 - DNA, 15 bp, Homo sapiens
tgtgtatcagtgttc

SEQ ID NO: 770547 - DNA, 15 bp, Homo sapiens
gtgtatcagtgttct

SEQ ID NO: 770548 - DNA, 15 bp, Homo sapiens
tgtatcagtgttctt

SEQ ID NO: 770549 - DNA, 15 bp, Homo sapiens
gtatcagtgttcttg

SEQ ID NO: 770550 - DNA, 15 bp, Homo sapiens
tatcagtgttcttgt

SEQ ID NO: 770551 - DNA, 15 bp, Homo sapiens
atcagtgttcttgta

SEQ ID NO: 770552 - DNA, 15 bp, Homo sapiens
tcagtgttcttgtat

SEQ ID NO: 770553 - DNA, 15 bp, Homo sapiens
cagtgttcttgtatg

SEQ ID NO: 770554 - DNA, 15 bp, Homo sapiens
agtgttcttgtatga

SEQ ID NO: 770555 - DNA, 15 bp, Homo sapiens
gtgttcttgtatgat

SEQ ID NO: 770556 - DNA, 15 bp, Homo sapiens
tgttcttgtatgatt

SEQ ID NO: 770557 - DNA, 15 bp, Homo sapiens
gttcttgtatgattt

SEQ ID NO: 770558 - DNA, 15 bp, Homo sapiens
ttcttgtatgatttg

SEQ ID NO: 770559 - DNA, 15 bp, Homo sapiens
tcttgtatgatttga

SEQ ID NO: 770560 - DNA, 15 bp, Homo sapiens
cttgtatgatttgaa

SEQ ID NO: 770561 - DNA, 15 bp, Homo sapiens
ttgtatgatttgaag

SEQ ID NO: 770562 - DNA, 15 bp, Homo sapiens
tgtatgatttgaagc

SEQ ID NO: 770563 - DNA, 15 bp, Homo sapiens
gtatgatttgaagca

SEQ ID NO: 770564 - DNA, 15 bp, Homo sapiens
tatgatttgaagcac

SEQ ID NO: 770565 - DNA, 15 bp, Homo sapiens
atgatttgaagcaca

SEQ ID NO: 770566 - DNA, 15 bp, Homo sapiens
tgatttgaagcacaa

SEQ ID NO: 770567 - DNA, 15 bp, Homo sapiens
gatttgaagcacaat

SEQ ID NO: 770568 - DNA, 15 bp, Homo sapiens
atttgaagcacaata

SEQ ID NO: 770569 - DNA, 15 bp, Homo sapiens
tttgaagcacaataa

SEQ ID NO: 770570 - DNA, 15 bp, Homo sapiens
ttgaagcacaataat

SEQ ID NO: 770571 - DNA, 15 bp, Homo sapiens
tgaagcacaataatt

SEQ ID NO: 770572 - DNA, 15 bp, Homo sapiens
gaagcacaataattt

SEQ ID NO: 770573 - DNA, 15 bp, Homo sapiens
aagcacaataatttt

SEQ ID NO: 770574 - DNA, 15 bp, Homo sapiens
agcacaataattttc

SEQ ID NO: 770575 - DNA, 15 bp, Homo sapiens
gcacaataattttca

SEQ ID NO: 770576 - DNA, 15 bp, Homo sapiens
cacaataattttcag

SEQ ID NO: 770577 - DNA, 15 bp, Homo sapiens
acaataattttcaga

SEQ ID NO: 770578 - DNA, 15 bp, Homo sapiens
caataattttcagaa

SEQ ID NO: 770579 - DNA, 15 bp, Homo sapiens
aataattttcagaac

SEQ ID NO: 770580 - DNA, 15 bp, Homo sapiens
ataattttcagaaca

SEQ ID NO: 770581 - DNA, 15 bp, Homo sapiens
taattttcagaacat

SEQ ID NO: 770582 - DNA, 15 bp, Homo sapiens
aattttcagaacatt

SEQ ID NO: 770583 - DNA, 15 bp, Homo sapiens
attttcagaacatta

SEQ ID NO: 770584 - DNA, 15 bp, Homo sapiens
ttttcagaacattaa

SEQ ID NO: 770585 - DNA, 15 bp, Homo sapiens
tttcagaacattaaa

SEQ ID NO: 770586 - DNA, 15 bp, Homo sapiens
ttcagaacattaaat

SEQ ID NO: 770587 - DNA, 15 bp, Homo sapiens
tcagaacattaaatt

SEQ ID NO: 770588 - DNA, 15 bp, Homo sapiens
cagaacattaaattt

SEQ ID NO: 770589 - DNA, 15 bp, Homo sapiens
agaacattaaatttc

SEQ ID NO: 770590 - DNA, 15 bp, Homo sapiens
gaacattaaatttct

SEQ ID NO: 770591 - DNA, 15 bp, Homo sapiens
aacattaaatttcta

SEQ ID NO: 770592 - DNA, 15 bp, Homo sapiens
acattaaatttctat

SEQ ID NO: 770593 - DNA, 15 bp, Homo sapiens
cattaaatttctatt

SEQ ID NO: 770594 - DNA, 15 bp, Homo sapiens
attaaatttctattt

SEQ ID NO: 770595 - DNA, 15 bp, Homo sapiens
ttaaatttctattta

SEQ ID NO: 770596 - DNA, 15 bp, Homo sapiens
taaatttctatttag

SEQ ID NO: 770597 - DNA, 15 bp, Homo sapiens
aaatttctatttagg

SEQ ID NO: 770598 - DNA, 15 bp, Homo sapiens
aatttctatttaggg

SEQ ID NO: 770599 - DNA, 15 bp, Homo sapiens
atttctatttaggga

SEQ ID NO: 770600 - DNA, 15 bp, Homo sapiens
tttctatttagggaa

SEQ ID NO: 770601 - DNA, 15 bp, Homo sapiens
ttctatttagggaaa

SEQ ID NO: 770602 - DNA, 15 bp, Homo sapiens
tctatttagggaaat

SEQ ID NO: 770603 - DNA, 15 bp, Homo sapiens
ctatttagggaaata

SEQ ID NO: 770604 - DNA, 15 bp, Homo sapiens
tatttagggaaataa

SEQ ID NO: 770605 - DNA, 15 bp, Homo sapiens
atttagggaaataat

SEQ ID NO: 770606 - DNA, 15 bp, Homo sapiens
tttagggaaataatt

SEQ ID NO: 770607 - DNA, 15 bp, Homo sapiens
ttagggaaataatta

SEQ ID NO: 770608 - DNA, 15 bp, Homo sapiens
tagggaaataattag

SEQ ID NO: 770609 - DNA, 15 bp, Homo sapiens
agggaaataattaga

SEQ ID NO: 770610 - DNA, 15 bp, Homo sapiens
gggaaataattagat

SEQ ID NO: 770611 - DNA, 15 bp, Homo sapiens
ggaaataattagatt

SEQ ID NO: 770612 - DNA, 15 bp, Homo sapiens
gaaataattagattt

SEQ ID NO: 770613 - DNA, 15 bp, Homo sapiens
aaataattagatttc

SEQ ID NO: 770614 - DNA, 15 bp, Homo sapiens
aataattagatttcc

SEQ ID NO: 770615 - DNA, 15 bp, Homo sapiens
ataattagatttcct

SEQ ID NO: 770616 - DNA, 15 bp, Homo sapiens
taattagatttcctc

SEQ ID NO: 770617 - DNA, 15 bp, Homo sapiens
aattagatttcctca

SEQ ID NO: 770618 - DNA, 15 bp, Homo sapiens
attagatttcctcat

SEQ ID NO: 770619 - DNA, 15 bp, Homo sapiens
ttagatttcctcata

SEQ ID NO: 770620 - DNA, 15 bp, Homo sapiens
tagatttcctcatat

SEQ ID NO: 770621 - DNA, 15 bp, Homo sapiens
agatttcctcatatt

SEQ ID NO: 770622 - DNA, 15 bp, Homo sapiens
gatttcctcatattt

SEQ ID NO: 770623 - DNA, 15 bp, Homo sapiens
atttcctcatatttc

SEQ ID NO: 770624 - DNA, 15 bp, Homo sapiens
tttcctcatatttct

SEQ ID NO: 770625 - DNA, 15 bp, Homo sapiens
ttcctcatatttctt

SEQ ID NO: 770626 - DNA, 15 bp, Homo sapiens
tcctcatatttcttc

SEQ ID NO: 770627 - DNA, 15 bp, Homo sapiens
cctcatatttcttca

SEQ ID NO: 770628 - DNA, 15 bp, Homo sapiens
ctcatatttcttcag

SEQ ID NO: 770629 - DNA, 15 bp, Homo sapiens
tcatatttcttcagt

SEQ ID NO: 770630 - DNA, 15 bp, Homo sapiens
catatttcttcagta

SEQ ID NO: 770631 - DNA, 15 bp, Homo sapiens
atatttcttcagtaa

SEQ ID NO: 770632 - DNA, 15 bp, Homo sapiens
tatttcttcagtaat

SEQ ID NO: 770633 - DNA, 15 bp, Homo sapiens
atttcttcagtaatt

SEQ ID NO: 770634 - DNA, 15 bp, Homo sapiens
tttcttcagtaatta

SEQ ID NO: 770635 - DNA, 15 bp, Homo sapiens
ttcttcagtaattaa

SEQ ID NO: 770636 - DNA, 15 bp, Homo sapiens
tcttcagtaattaaa

SEQ ID NO: 770637 - DNA, 15 bp, Homo sapiens
cttcagtaattaaat

SEQ ID NO: 770638 - DNA, 15 bp, Homo sapiens
ttcagtaattaaata

SEQ ID NO: 770639 - DNA, 15 bp, Homo sapiens
tcagtaattaaataa

SEQ ID NO: 770640 - DNA, 15 bp, Homo sapiens
cagtaattaaataat

SEQ ID NO: 770641 - DNA, 15 bp, Homo sapiens
agtaattaaataata

SEQ ID NO: 770642 - DNA, 15 bp, Homo sapiens
gtaattaaataatag

SEQ ID NO: 770643 - DNA, 15 bp, Homo sapiens
taattaaataatagc

SEQ ID NO: 770644 - DNA, 15 bp, Homo sapiens
aattaaataatagct

SEQ ID NO: 770645 - DNA, 15 bp, Homo sapiens
attaaataatagcta

SEQ ID NO: 770646 - DNA, 15 bp, Homo sapiens
ttaaataatagctat

SEQ ID NO: 770647 - DNA, 15 bp, Homo sapiens
taaataatagctatg

SEQ ID NO: 770648 - DNA, 15 bp, Homo sapiens
aaataatagctatga

SEQ ID NO: 770649 - DNA, 15 bp, Homo sapiens
aataatagctatgac

SEQ ID NO: 770650 - DNA, 15 bp, Homo sapiens
ataatagctatgaca

SEQ ID NO: 770651 - DNA, 15 bp, Homo sapiens
taatagctatgacaa

SEQ ID NO: 770652 - DNA, 15 bp, Homo sapiens
aatagctatgacaac

SEQ ID NO: 770653 - DNA, 15 bp, Homo sapiens
atagctatgacaaca

SEQ ID NO: 770654 - DNA, 15 bp, Homo sapiens
tagctatgacaacac

SEQ ID NO: 770655 - DNA, 15 bp, Homo sapiens
agctatgacaacaca

SEQ ID NO: 770656 - DNA, 15 bp, Homo sapiens
gctatgacaacacaa

SEQ ID NO: 770657 - DNA, 15 bp, Homo sapiens
ctatgacaacacaat

SEQ ID NO: 770658 - DNA, 15 bp, Homo sapiens
tatgacaacacaata

SEQ ID NO: 770659 - DNA, 15 bp, Homo sapiens
atgacaacacaatat

SEQ ID NO: 770660 - DNA, 15 bp, Homo sapiens
tgacaacacaatata

SEQ ID NO: 770661 - DNA, 15 bp, Homo sapiens
gacaacacaatatag

SEQ ID NO: 770662 - DNA, 15 bp, Homo sapiens
acaacacaatatagc

SEQ ID NO: 770663 - DNA, 15 bp, Homo sapiens
caacacaatatagca

SEQ ID NO: 770664 - DNA, 15 bp, Homo sapiens
aacacaatatagcat

SEQ ID NO: 770665 - DNA, 15 bp, Homo sapiens
acacaatatagcatt

SEQ ID NO: 770666 - DNA, 15 bp, Homo sapiens
cacaatatagcattt

SEQ ID NO: 770667 - DNA, 15 bp, Homo sapiens
acaatatagcattta

SEQ ID NO: 770668 - DNA, 15 bp, Homo sapiens
caatatagcatttat

SEQ ID NO: 770669 - DNA, 15 bp, Homo sapiens
aatatagcatttatt

SEQ ID NO: 770670 - DNA, 15 bp, Homo sapiens
atatagcatttattt

SEQ ID NO: 770671 - DNA, 15 bp, Homo sapiens
tatagcatttattta

SEQ ID NO: 770672 - DNA, 15 bp, Homo sapiens
atagcatttatttaa

SEQ ID NO: 770673 - DNA, 15 bp, Homo sapiens
tagcatttatttaaa

SEQ ID NO: 770674 - DNA, 15 bp, Homo sapiens
agcatttatttaaag

SEQ ID NO: 770675 - DNA, 15 bp, Homo sapiens
gcatttatttaaagg

SEQ ID NO: 770676 - DNA, 15 bp, Homo sapiens
catttatttaaaggc

SEQ ID NO: 770677 - DNA, 15 bp, Homo sapiens
atttatttaaaggca

SEQ ID NO: 770678 - DNA, 15 bp, Homo sapiens
tttatttaaaggcat

SEQ ID NO: 770679 - DNA, 15 bp, Homo sapiens
ttatttaaaggcatt

SEQ ID NO: 770680 - DNA, 15 bp, Homo sapiens
tatttaaaggcattt

SEQ ID NO: 770681 - DNA, 15 bp, Homo sapiens
atttaaaggcatttt

SEQ ID NO: 770682 - DNA, 15 bp, Homo sapiens
tttaaaggcattttc

SEQ ID NO: 770683 - DNA, 15 bp, Homo sapiens
ttaaaggcattttct

SEQ ID NO: 770684 - DNA, 15 bp, Homo sapiens
taaaggcattttcta

SEQ ID NO: 770685 - DNA, 15 bp, Homo sapiens
aaaggcattttctat

SEQ ID NO: 770686 - DNA, 15 bp, Homo sapiens
aaggcattttctatt

SEQ ID NO: 770687 - DNA, 15 bp, Homo sapiens
aggcattttctattt

SEQ ID NO: 770688 - DNA, 15 bp, Homo sapiens
ggcattttctatttt

SEQ ID NO: 770689 - DNA, 15 bp, Homo sapiens
gcattttctatttta

SEQ ID NO: 770690 - DNA, 15 bp, Homo sapiens
cattttctattttat

SEQ ID NO: 770691 - DNA, 15 bp, Homo sapiens
attttctattttatt

SEQ ID NO: 770692 - DNA, 15 bp, Homo sapiens
ttttctattttatta

SEQ ID NO: 770693 - DNA, 15 bp, Homo sapiens
tttctattttattac

SEQ ID NO: 770694 - DNA, 15 bp, Homo sapiens
ttctattttattacc

SEQ ID NO: 770695 - DNA, 15 bp, Homo sapiens
tctattttattacct

SEQ ID NO: 770696 - DNA, 15 bp, Homo sapiens
ctattttattacctt

SEQ ID NO: 770697 - DNA, 15 bp, Homo sapiens
tattttattaccttt

SEQ ID NO: 770698 - DNA, 15 bp, Homo sapiens
attttattacctttg

SEQ ID NO: 770699 - DNA, 15 bp, Homo sapiens
ttttattacctttgg

SEQ ID NO: 770700 - DNA, 15 bp, Homo sapiens
tttattacctttggt

SEQ ID NO: 770701 - DNA, 15 bp, Homo sapiens
ttattacctttggtt

SEQ ID NO: 770702 - DNA, 15 bp, Homo sapiens
tattacctttggttt

SEQ ID NO: 770703 - DNA, 15 bp, Homo sapiens
attacctttggtttt

SEQ ID NO: 770704 - DNA, 15 bp, Homo sapiens
ttacctttggttttt

SEQ ID NO: 770705 - DNA, 15 bp, Homo sapiens
tacctttggtttttt

SEQ ID NO: 770706 - DNA, 15 bp, Homo sapiens
acctttggttttttt

SEQ ID NO: 770707 - DNA, 15 bp, Homo sapiens
cctttggttttttta

SEQ ID NO: 770708 - DNA, 15 bp, Homo sapiens
ctttggtttttttaa

SEQ ID NO: 770709 - DNA, 15 bp, Homo sapiens
tttggtttttttaat

SEQ ID NO: 770710 - DNA, 15 bp, Homo sapiens
ttggtttttttaata

SEQ ID NO: 770711 - DNA, 15 bp, Homo sapiens
tggtttttttaatac

SEQ ID NO: 770712 - DNA, 15 bp, Homo sapiens
ggtttttttaatacg

SEQ ID NO: 770713 - DNA, 15 bp, Homo sapiens
gtttttttaatacgg

SEQ ID NO: 770714 - DNA, 15 bp, Homo sapiens
tttttttaatacggc

SEQ ID NO: 770715 - DNA, 15 bp, Homo sapiens
ttttttaatacggca

SEQ ID NO: 770716 - DNA, 15 bp, Homo sapiens
tttttaatacggcat

SEQ ID NO: 770717 - DNA, 15 bp, Homo sapiens
ttttaatacggcatt

SEQ ID NO: 770718 - DNA, 15 bp, Homo sapiens
tttaatacggcattt

SEQ ID NO: 770719 - DNA, 15 bp, Homo sapiens
ttaatacggcatttt

SEQ ID NO: 770720 - DNA, 15 bp, Homo sapiens
taatacggcatttta

SEQ ID NO: 770721 - DNA, 15 bp, Homo sapiens
aatacggcattttat

SEQ ID NO: 770722 - DNA, 15 bp, Homo sapiens
atacggcattttatt

SEQ ID NO: 770723 - DNA, 15 bp, Homo sapiens
tacggcattttattc

SEQ ID NO: 770724 - DNA, 15 bp, Homo sapiens
acggcattttattca

SEQ ID NO: 770725 - DNA, 15 bp, Homo sapiens
cggcattttattcaa

SEQ ID NO: 770726 - DNA, 15 bp, Homo sapiens
ggcattttattcaac

SEQ ID NO: 770727 - DNA, 15 bp, Homo sapiens
gcattttattcaaca

SEQ ID NO: 770728 - DNA, 15 bp, Homo sapiens
cattttattcaacaa

SEQ ID NO: 770729 - DNA, 15 bp, Homo sapiens
attttattcaacaag

SEQ ID NO: 770730 - DNA, 15 bp, Homo sapiens
ttttattcaacaaga

SEQ ID NO: 770731 - DNA, 15 bp, Homo sapiens
tttattcaacaagaa

SEQ ID NO: 770732 - DNA, 15 bp, Homo sapiens
ttattcaacaagaaa

SEQ ID NO: 770733 - DNA, 15 bp, Homo sapiens
tattcaacaagaaaa

SEQ ID NO: 770734 - DNA, 15 bp, Homo sapiens
attcaacaagaaaaa

SEQ ID NO: 770735 - DNA, 15 bp, Homo sapiens
ttcaacaagaaaaag

SEQ ID NO: 770736 - DNA, 15 bp, Homo sapiens
tcaacaagaaaaagc

SEQ ID NO: 770737 - DNA, 15 bp, Homo sapiens
caacaagaaaaagct

SEQ ID NO: 770738 - DNA, 15 bp, Homo sapiens
aacaagaaaaagcta

SEQ ID NO: 770739 - DNA, 15 bp, Homo sapiens
acaagaaaaagctac

SEQ ID NO: 770740 - DNA, 15 bp, Homo sapiens
caagaaaaagctact

SEQ ID NO: 770741 - DNA, 15 bp, Homo sapiens
aagaaaaagctacta

SEQ ID NO: 770742 - DNA, 15 bp, Homo sapiens
agaaaaagctactac

SEQ ID NO: 770743 - DNA, 15 bp, Homo sapiens
gaaaaagctactacc

SEQ ID NO: 770744 - DNA, 15 bp, Homo sapiens
aaaaagctactacct

SEQ ID NO: 770745 - DNA, 15 bp, Homo sapiens
aaaagctactacctt

SEQ ID NO: 770746 - DNA, 15 bp, Homo sapiens
aaagctactaccttt

SEQ ID NO: 770747 - DNA, 15 bp, Homo sapiens
aagctactacctttt

SEQ ID NO: 770748 - DNA, 15 bp, Homo sapiens
agctactaccttttt

SEQ ID NO: 770749 - DNA, 15 bp, Homo sapiens
gctactacctttttc

SEQ ID NO: 770750 - DNA, 15 bp, Homo sapiens
ctactacctttttct

SEQ ID NO: 770751 - DNA, 15 bp, Homo sapiens
tactacctttttcta

SEQ ID NO: 770752 - DNA, 15 bp, Homo sapiens
actacctttttctat

SEQ ID NO: 770753 - DNA, 15 bp, Homo sapiens
ctacctttttctatt

SEQ ID NO: 770754 - DNA, 15 bp, Homo sapiens
tacctttttctattg

SEQ ID NO: 770755 - DNA, 15 bp, Homo sapiens
acctttttctattga

SEQ ID NO: 770756 - DNA, 15 bp, Homo sapiens
cctttttctattgaa

SEQ ID NO: 770757 - DNA, 15 bp, Homo sapiens
ctttttctattgaag

SEQ ID NO: 770758 - DNA, 15 bp, Homo sapiens
tttttctattgaaga

SEQ ID NO: 770759 - DNA, 15 bp, Homo sapiens
ttttctattgaagat

SEQ ID NO: 770760 - DNA, 15 bp, Homo sapiens
tttctattgaagata

SEQ ID NO: 770761 - DNA, 15 bp, Homo sapiens
ttctattgaagataa

SEQ ID NO: 770762 - DNA, 15 bp, Homo sapiens
tctattgaagataaa

SEQ ID NO: 770763 - DNA, 15 bp, Homo sapiens
ctattgaagataaac

SEQ ID NO: 770764 - DNA, 15 bp, Homo sapiens
tattgaagataaaca

SEQ ID NO: 770765 - DNA, 15 bp, Homo sapiens
attgaagataaacat

SEQ ID NO: 770766 - DNA, 15 bp, Homo sapiens
ttgaagataaacatt

SEQ ID NO: 770767 - DNA, 15 bp, Homo sapiens
tgaagataaacatta

SEQ ID NO: 770768 - DNA, 15 bp, Homo sapiens
gaagataaacattaa

SEQ ID NO: 770769 - DNA, 15 bp, Homo sapiens
aagataaacattaaa

SEQ ID NO: 770770 - DNA, 15 bp, Homo sapiens
agataaacattaaaa

SEQ ID NO: 770771 - DNA, 15 bp, Homo sapiens
gataaacattaaaat

SEQ ID NO: 770772 - DNA, 15 bp, Homo sapiens
ataaacattaaaatt

SEQ ID NO: 770773 - DNA, 15 bp, Homo sapiens
taaacattaaaattt

SEQ ID NO: 770774 - DNA, 15 bp, Homo sapiens
aaacattaaaattta

SEQ ID NO: 770775 - DNA, 15 bp, Homo sapiens
aacattaaaatttat

SEQ ID NO: 770776 - DNA, 15 bp, Homo sapiens
acattaaaatttatg

SEQ ID NO: 770777 - DNA, 15 bp, Homo sapiens
cattaaaatttatgg

SEQ ID NO: 770778 - DNA, 15 bp, Homo sapiens
attaaaatttatggg

SEQ ID NO: 770779 - DNA, 15 bp, Homo sapiens
ttaaaatttatggga

SEQ ID NO: 770780 - DNA, 15 bp, Homo sapiens
taaaatttatgggac

SEQ ID NO: 770781 - DNA, 15 bp, Homo sapiens
aaaatttatgggaca

SEQ ID NO: 770782 - DNA, 15 bp, Homo sapiens
aaatttatgggacaa

SEQ ID NO: 770783 - DNA, 15 bp, Homo sapiens
aatttatgggacaat

SEQ ID NO: 770784 - DNA, 15 bp, Homo sapiens
atttatgggacaata

SEQ ID NO: 770785 - DNA, 15 bp, Homo sapiens
tttatgggacaatat

SEQ ID NO: 770786 - DNA, 15 bp, Homo sapiens
ttatgggacaatata

SEQ ID NO: 770787 - DNA, 15 bp, Homo sapiens
tatgggacaatatac

SEQ ID NO: 770788 - DNA, 15 bp, Homo sapiens
atgggacaatataca

SEQ ID NO: 770789 - DNA, 15 bp, Homo sapiens
tgggacaatatacat

SEQ ID NO: 770790 - DNA, 15 bp, Homo sapiens
gggacaatatacatg

SEQ ID NO: 770791 - DNA, 15 bp, Homo sapiens
ggacaatatacatgg

SEQ ID NO: 770792 - DNA, 15 bp, Homo sapiens
gacaatatacatggg

SEQ ID NO: 770793 - DNA, 15 bp, Homo sapiens
acaatatacatggga

SEQ ID NO: 770794 - DNA, 15 bp, Homo sapiens
caatatacatgggaa

SEQ ID NO: 770795 - DNA, 15 bp, Homo sapiens
aatatacatgggaaa

SEQ ID NO: 770796 - DNA, 15 bp, Homo sapiens
atatacatgggaaaa

SEQ ID NO: 770797 - DNA, 15 bp, Homo sapiens
tatacatgggaaaag

SEQ ID NO: 770798 - DNA, 15 bp, Homo sapiens
atacatgggaaaagt

SEQ ID NO: 770799 - DNA, 15 bp, Homo sapiens
tacatgggaaaagtt

SEQ ID NO: 770800 - DNA, 15 bp, Homo sapiens
acatgggaaaagttt

SEQ ID NO: 770801 - DNA, 15 bp, Homo sapiens
catgggaaaagtttt

SEQ ID NO: 770802 - DNA, 15 bp, Homo sapiens
atgggaaaagttttt

SEQ ID NO: 770803 - DNA, 15 bp, Homo sapiens
tgggaaaagtttttt

SEQ ID NO: 770804 - DNA, 15 bp, Homo sapiens
gggaaaagttttttt

SEQ ID NO: 770805 - DNA, 15 bp, Homo sapiens
ggaaaagtttttttt

SEQ ID NO: 770806 - DNA, 15 bp, Homo sapiens
gaaaagttttttttc

SEQ ID NO: 770807 - DNA, 15 bp, Homo sapiens
aaaagttttttttct

SEQ ID NO: 770808 - DNA, 15 bp, Homo sapiens
aaagttttttttctt

SEQ ID NO: 770809 - DNA, 15 bp, Homo sapiens
aagttttttttcttt

SEQ ID NO: 770810 - DNA, 15 bp, Homo sapiens
agttttttttctttt

SEQ ID NO: 770811 - DNA, 15 bp, Homo sapiens
gttttttttctttta

SEQ ID NO: 770812 - DNA, 15 bp, Homo sapiens
ttttttttcttttat

SEQ ID NO: 770813 - DNA, 15 bp, Homo sapiens
tttttttcttttata

SEQ ID NO: 770814 - DNA, 15 bp, Homo sapiens
ttttttcttttatat

SEQ ID NO: 770815 - DNA, 15 bp, Homo sapiens
tttttcttttatatt

SEQ ID NO: 770816 - DNA, 15 bp, Homo sapiens
ttttcttttatatta

SEQ ID NO: 770817 - DNA, 15 bp, Homo sapiens
tttcttttatattat

SEQ ID NO: 770818 - DNA, 15 bp, Homo sapiens
ttcttttatattatc

SEQ ID NO: 770819 - DNA, 15 bp, Homo sapiens
tcttttatattatcc

SEQ ID NO: 770820 - DNA, 15 bp, Homo sapiens
cttttatattatcct

SEQ ID NO: 770821 - DNA, 15 bp, Homo sapiens
ttttatattatccta

SEQ ID NO: 770822 - DNA, 15 bp, Homo sapiens
tttatattatcctac

SEQ ID NO: 770823 - DNA, 15 bp, Homo sapiens
ttatattatcctact

SEQ ID NO: 770824 - DNA, 15 bp, Homo sapiens
tatattatcctactt

SEQ ID NO: 770825 - DNA, 15 bp, Homo sapiens
atattatcctactta

SEQ ID NO: 770826 - DNA, 15 bp, Homo sapiens
tattatcctacttaa

SEQ ID NO: 770827 - DNA, 15 bp, Homo sapiens
attatcctacttaac

SEQ ID NO: 770828 - DNA, 15 bp, Homo sapiens
ttatcctacttaaca

SEQ ID NO: 770829 - DNA, 15 bp, Homo sapiens
tatcctacttaacat

SEQ ID NO: 770830 - DNA, 15 bp, Homo sapiens
atcctacttaacata

SEQ ID NO: 770831 - DNA, 15 bp, Homo sapiens
tcctacttaacatat

SEQ ID NO: 770832 - DNA, 15 bp, Homo sapiens
cctacttaacatatt

SEQ ID NO: 770833 - DNA, 15 bp, Homo sapiens
ctacttaacatattg

SEQ ID NO: 770834 - DNA, 15 bp, Homo sapiens
tacttaacatattgt

SEQ ID NO: 770835 - DNA, 15 bp, Homo sapiens
acttaacatattgta

SEQ ID NO: 770836 - DNA, 15 bp, Homo sapiens
cttaacatattgtaa

SEQ ID NO: 770837 - DNA, 15 bp, Homo sapiens
ttaacatattgtaaa

SEQ ID NO: 770838 - DNA, 15 bp, Homo sapiens
taacatattgtaaat

SEQ ID NO: 770839 - DNA, 15 bp, Homo sapiens
aacatattgtaaata

SEQ ID NO: 770840 - DNA, 15 bp, Homo sapiens
acatattgtaaataa

SEQ ID NO: 770841 - DNA, 15 bp, Homo sapiens
catattgtaaataaa

SEQ ID NO: 770842 - DNA, 15 bp, Homo sapiens
atattgtaaataaac

SEQ ID NO: 770843 - DNA, 15 bp, Homo sapiens
tattgtaaataaaca

SEQ ID NO: 770844 - DNA, 15 bp, Homo sapiens
attgtaaataaacat

SEQ ID NO: 770845 - DNA, 15 bp, Homo sapiens
ttgtaaataaacata

SEQ ID NO: 770846 - DNA, 15 bp, Homo sapiens
tgtaaataaacatat

SEQ ID NO: 770847 - DNA, 15 bp, Homo sapiens
gtaaataaacatata

SEQ ID NO: 770848 - DNA, 15 bp, Homo sapiens
taaataaacatatat

SEQ ID NO: 770849 - DNA, 15 bp, Homo sapiens
aaataaacatatatt

SEQ ID NO: 770850 - DNA, 15 bp, Homo sapiens
aataaacatatattc

SEQ ID NO: 770851 - DNA, 15 bp, Homo sapiens
ataaacatatattct

SEQ ID NO: 770852 - DNA, 15 bp, Homo sapiens
taaacatatattctt

SEQ ID NO: 770853 - DNA, 15 bp, Homo sapiens
aaacatatattcttt

SEQ ID NO: 770854 - DNA, 15 bp, Homo sapiens
aacatatattctttt

SEQ ID NO: 770855 - DNA, 15 bp, Homo sapiens
acatatattcttttg

SEQ ID NO: 770856 - DNA, 15 bp, Homo sapiens
catatattcttttgc

SEQ ID NO: 770857 - DNA, 15 bp, Homo sapiens
atatattcttttgct

SEQ ID NO: 770858 - DNA, 15 bp, Homo sapiens
tatattcttttgctt

SEQ ID NO: 770859 - DNA, 15 bp, Homo sapiens
atattcttttgcttt

SEQ ID NO: 770860 - DNA, 15 bp, Homo sapiens
tattcttttgctttt

SEQ ID NO: 770861 - DNA, 15 bp, Homo sapiens
attcttttgcttttc

SEQ ID NO: 770862 - DNA, 15 bp, Homo sapiens
ttcttttgcttttct

SEQ ID NO: 770863 - DNA, 15 bp, Homo sapiens
tcttttgcttttctt

SEQ ID NO: 770864 - DNA, 15 bp, Homo sapiens
cttttgcttttcttt

SEQ ID NO: 770865 - DNA, 15 bp, Homo sapiens
ttttgcttttctttt

SEQ ID NO: 770866 - DNA, 15 bp, Homo sapiens
tttgcttttctttta

SEQ ID NO: 770867 - DNA, 15 bp, Homo sapiens
ttgcttttcttttag

SEQ ID NO: 770868 - DNA, 15 bp, Homo sapiens
tgcttttcttttagt

SEQ ID NO: 770869 - DNA, 15 bp, Homo sapiens
gcttttcttttagtt

SEQ ID NO: 770870 - DNA, 15 bp, Homo sapiens
cttttcttttagtta

SEQ ID NO: 770871 - DNA, 15 bp, Homo sapiens
ttttcttttagttaa

SEQ ID NO: 770872 - DNA, 15 bp, Homo sapiens
tttcttttagttaat

SEQ ID NO: 770873 - DNA, 15 bp, Homo sapiens
ttcttttagttaatg

SEQ ID NO: 770874 - DNA, 15 bp, Homo sapiens
tcttttagttaatgc

SEQ ID NO: 770875 - DNA, 15 bp, Homo sapiens
cttttagttaatgct

SEQ ID NO: 770876 - DNA, 15 bp, Homo sapiens
ttttagttaatgctt

SEQ ID NO: 770877 - DNA, 15 bp, Homo sapiens
tttagttaatgcttt

SEQ ID NO: 770878 - DNA, 15 bp, Homo sapiens
ttagttaatgctttc

SEQ ID NO: 770879 - DNA, 15 bp, Homo sapiens
tagttaatgctttct

SEQ ID NO: 770880 - DNA, 15 bp, Homo sapiens
agttaatgctttctt

SEQ ID NO: 770881 - DNA, 15 bp, Homo sapiens
gttaatgctttctta

SEQ ID NO: 770882 - DNA, 15 bp, Homo sapiens
ttaatgctttcttag

SEQ ID NO: 770883 - DNA, 15 bp, Homo sapiens
taatgctttcttaga

SEQ ID NO: 770884 - DNA, 15 bp, Homo sapiens
aatgctttcttagaa

SEQ ID NO: 770885 - DNA, 15 bp, Homo sapiens
atgctttcttagaaa

SEQ ID NO: 770886 - DNA, 15 bp, Homo sapiens
tgctttcttagaaaa

SEQ ID NO: 770887 - DNA, 15 bp, Homo sapiens
gctttcttagaaaaa

SEQ ID NO: 770888 - DNA, 15 bp, Homo sapiens
ctttcttagaaaaaa

SEQ ID NO: 770889 - DNA, 15 bp, Homo sapiens
tttcttagaaaaaat

SEQ ID NO: 770890 - DNA, 15 bp, Homo sapiens
ttcttagaaaaaatt

SEQ ID NO: 770891 - DNA, 15 bp, Homo sapiens
tcttagaaaaaattt

SEQ ID NO: 770892 - DNA, 15 bp, Homo sapiens
cttagaaaaaattta

SEQ ID NO: 770893 - DNA, 15 bp, Homo sapiens
ttagaaaaaatttaa

SEQ ID NO: 770894 - DNA, 15 bp, Homo sapiens
tagaaaaaatttaat

SEQ ID NO: 770895 - DNA, 15 bp, Homo sapiens
agaaaaaatttaata

SEQ ID NO: 770896 - DNA, 15 bp, Homo sapiens
gaaaaaatttaataa

SEQ ID NO: 770897 - DNA, 15 bp, Homo sapiens
aaaaaatttaataaa

SEQ ID NO: 770898 - DNA, 15 bp, Homo sapiens
aaaaatttaataaat

SEQ ID NO: 770899 - DNA, 15 bp, Homo sapiens
aaaatttaataaatg

SEQ ID NO: 770900 - DNA, 15 bp, Homo sapiens
aaatttaataaatgt

SEQ ID NO: 770901 - DNA, 15 bp, Homo sapiens
aatttaataaatgtg

SEQ ID NO: 770902 - DNA, 15 bp, Homo sapiens
atttaataaatgtga

SEQ ID NO: 770903 - DNA, 15 bp, Homo sapiens
tttaataaatgtgat

SEQ ID NO: 770904 - DNA, 15 bp, Homo sapiens
ttaataaatgtgatg

SEQ ID NO: 770905 - DNA, 15 bp, Homo sapiens
taataaatgtgatgt

SEQ ID NO: 770906 - DNA, 15 bp, Homo sapiens
aataaatgtgatgta

SEQ ID NO: 770907 - DNA, 15 bp, Homo sapiens
ataaatgtgatgtaa

SEQ ID NO: 770908 - DNA, 15 bp, Homo sapiens
taaatgtgatgtaat

SEQ ID NO: 770909 - DNA, 15 bp, Homo sapiens
aaatgtgatgtaatt

SEQ ID NO: 770910 - DNA, 15 bp, Homo sapiens
aatgtgatgtaatta

SEQ ID NO: 770911 - DNA, 15 bp, Homo sapiens
atgtgatgtaattat

SEQ ID NO: 770912 - DNA, 15 bp, Homo sapiens
tgtgatgtaattatt

SEQ ID NO: 770913 - DNA, 15 bp, Homo sapiens
gtgatgtaattatta

SEQ ID NO: 770914 - DNA, 15 bp, Homo sapiens
tgatgtaattattat

SEQ ID NO: 770915 - DNA, 15 bp, Homo sapiens
gatgtaattattatg

SEQ ID NO: 770916 - DNA, 15 bp, Homo sapiens
atgtaattattatga

SEQ ID NO: 770917 - DNA, 15 bp, Homo sapiens
tgtaattattatgaa

SEQ ID NO: 770918 - DNA, 15 bp, Homo sapiens
gtaattattatgaaa

SEQ ID NO: 770919 - DNA, 15 bp, Homo sapiens
taattattatgaaaa

SEQ ID NO: 770920 - DNA, 15 bp, Homo sapiens
aattattatgaaaag

SEQ ID NO: 770921 - DNA, 15 bp, Homo sapiens
attattatgaaaagt

SEQ ID NO: 770922 - DNA, 15 bp, Homo sapiens
ttattatgaaaagtc

SEQ ID NO: 770923 - DNA, 15 bp, Homo sapiens
tattatgaaaagtca

SEQ ID NO: 770924 - DNA, 15 bp, Homo sapiens
attatgaaaagtcag

SEQ ID NO: 770925 - DNA, 15 bp, Homo sapiens
ttatgaaaagtcaga

SEQ ID NO: 770926 - DNA, 15 bp, Homo sapiens
tatgaaaagtcagaa

SEQ ID NO: 770927 - DNA, 15 bp, Homo sapiens
atgaaaagtcagaaa

SEQ ID NO: 770928 - DNA, 15 bp, Homo sapiens
tgaaaagtcagaaaa

SEQ ID NO: 770929 - DNA, 15 bp, Homo sapiens
gaaaagtcagaaaaa

SEQ ID NO: 770930 - DNA, 15 bp, Homo sapiens
aaaagtcagaaaaac

SEQ ID NO: 770931 - DNA, 15 bp, Homo sapiens
aaagtcagaaaaaca

SEQ ID NO: 770932 - DNA, 15 bp, Homo sapiens
aagtcagaaaaacat

SEQ ID NO: 770933 - DNA, 15 bp, Homo sapiens
agtcagaaaaacatt

SEQ ID NO: 770934 - DNA, 15 bp, Homo sapiens
gtcagaaaaacatta

SEQ ID NO: 770935 - DNA, 15 bp, Homo sapiens
tcagaaaaacattaa

SEQ ID NO: 770936 - DNA, 15 bp, Homo sapiens
cagaaaaacattaat

SEQ ID NO: 770937 - DNA, 15 bp, Homo sapiens
agaaaaacattaatg

SEQ ID NO: 770938 - DNA, 15 bp, Homo sapiens
gaaaaacattaatga

SEQ ID NO: 770939 - DNA, 15 bp, Homo sapiens
aaaaacattaatgaa

SEQ ID NO: 770940 - DNA, 15 bp, Homo sapiens
aaaacattaatgaaa

SEQ ID NO: 770941 - DNA, 15 bp, Homo sapiens
aaacattaatgaaat

SEQ ID NO: 770942 - DNA, 15 bp, Homo sapiens
aacattaatgaaata

SEQ ID NO: 770943 - DNA, 15 bp, Homo sapiens
acattaatgaaatat

SEQ ID NO: 770944 - DNA, 15 bp, Homo sapiens
cattaatgaaatatc

SEQ ID NO: 770945 - DNA, 15 bp, Homo sapiens
attaatgaaatatca

SEQ ID NO: 770946 - DNA, 15 bp, Homo sapiens
ttaatgaaatatcaa

SEQ ID NO: 770947 - DNA, 15 bp, Homo sapiens
taatgaaatatcaag

SEQ ID NO: 770948 - DNA, 15 bp, Homo sapiens
aatgaaatatcaagg

SEQ ID NO: 770949 - DNA, 15 bp, Homo sapiens
atgaaatatcaaggt

SEQ ID NO: 770950 - DNA, 15 bp, Homo sapiens
tgaaatatcaaggta

SEQ ID NO: 770951 - DNA, 15 bp, Homo sapiens
gaaatatcaaggtaa

SEQ ID NO: 770952 - DNA, 15 bp, Homo sapiens
aaatatcaaggtaat

SEQ ID NO: 770953 - DNA, 15 bp, Homo sapiens
aatatcaaggtaatt

SEQ ID NO: 770954 - DNA, 15 bp, Homo sapiens
atatcaaggtaatta

SEQ ID NO: 770955 - DNA, 15 bp, Homo sapiens
tatcaaggtaattaa

SEQ ID NO: 770956 - DNA, 15 bp, Homo sapiens
atcaaggtaattaaa

SEQ ID NO: 770957 - DNA, 15 bp, Homo sapiens
tcaaggtaattaaaa

SEQ ID NO: 770958 - DNA, 15 bp, Homo sapiens
caaggtaattaaaaa

SEQ ID NO: 770959 - DNA, 15 bp, Homo sapiens
aaggtaattaaaaaa

SEQ ID NO: 770960 - DNA, 15 bp, Homo sapiens
aggtaattaaaaaac

SEQ ID NO: 770961 - DNA, 15 bp, Homo sapiens
ggtaattaaaaaact

SEQ ID NO: 770962 - DNA, 15 bp, Homo sapiens
gtaattaaaaaacta

SEQ ID NO: 770963 - DNA, 15 bp, Homo sapiens
taattaaaaaactac

SEQ ID NO: 770964 - DNA, 15 bp, Homo sapiens
aattaaaaaactact

SEQ ID NO: 770965 - DNA, 15 bp, Homo sapiens
attaaaaaactactt

SEQ ID NO: 770966 - DNA, 15 bp, Homo sapiens
ttaaaaaactacttc

SEQ ID NO: 770967 - DNA, 15 bp, Homo sapiens
taaaaaactacttcc

SEQ ID NO: 770968 - DNA, 15 bp, Homo sapiens
aaaaaactacttccc

SEQ ID NO: 770969 - DNA, 15 bp, Homo sapiens
aaaaactacttccct

SEQ ID NO: 770970 - DNA, 15 bp, Homo sapiens
aaaactacttcccta

SEQ ID NO: 770971 - DNA, 15 bp, Homo sapiens
aaactacttccctat

SEQ ID NO: 770972 - DNA, 15 bp, Homo sapiens
aactacttccctatg

SEQ ID NO: 770973 - DNA, 15 bp, Homo sapiens
actacttccctatgc

SEQ ID NO: 770974 - DNA, 15 bp, Homo sapiens
ctacttccctatgct

SEQ ID NO: 770975 - DNA, 15 bp, Homo sapiens
tacttccctatgctt

SEQ ID NO: 770976 - DNA, 15 bp, Homo sapiens
acttccctatgcttc

SEQ ID NO: 770977 - DNA, 15 bp, Homo sapiens
cttccctatgcttct

SEQ ID NO: 770978 - DNA, 15 bp, Homo sapiens
ttccctatgcttctg

SEQ ID NO: 770979 - DNA, 15 bp, Homo sapiens
tccctatgcttctgt

SEQ ID NO: 770980 - DNA, 15 bp, Homo sapiens
ccctatgcttctgtc

SEQ ID NO: 770981 - DNA, 15 bp, Homo sapiens
cctatgcttctgtca

SEQ ID NO: 770982 - DNA, 15 bp, Homo sapiens
ctatgcttctgtcag

SEQ ID NO: 770983 - DNA, 15 bp, Homo sapiens
tatgcttctgtcagg

SEQ ID NO: 770984 - DNA, 15 bp, Homo sapiens
atgcttctgtcaggg

SEQ ID NO: 770985 - DNA, 15 bp, Homo sapiens
tgcttctgtcagggg

SEQ ID NO: 770986 - DNA, 15 bp, Homo sapiens
gcttctgtcaggggc

SEQ ID NO: 770987 - DNA, 15 bp, Homo sapiens
cttctgtcaggggct

SEQ ID NO: 770988 - DNA, 15 bp, Homo sapiens
ttctgtcaggggctt

SEQ ID NO: 770989 - DNA, 15 bp, Homo sapiens
tctgtcaggggcttc

SEQ ID NO: 770990 - DNA, 15 bp, Homo sapiens
ctgtcaggggcttcc

SEQ ID NO: 770991 - DNA, 15 bp, Homo sapiens
tgtcaggggcttcca

SEQ ID NO: 770992 - DNA, 15 bp, Homo sapiens
gtcaggggcttccag

SEQ ID NO: 770993 - DNA, 15 bp, Homo sapiens
tcaggggcttccagc

SEQ ID NO: 770994 - DNA, 15 bp, Homo sapiens
caggggcttccagca

SEQ ID NO: 770995 - DNA, 15 bp, Homo sapiens
aggggcttccagcaa

SEQ ID NO: 770996 - DNA, 15 bp, Homo sapiens
ggggcttccagcaaa

SEQ ID NO: 770997 - DNA, 15 bp, Homo sapiens
gggcttccagcaaag

SEQ ID NO: 770998 - DNA, 15 bp, Homo sapiens
ggcttccagcaaagt

SEQ ID NO: 770999 - DNA, 15 bp, Homo sapiens
gcttccagcaaagtc

SEQ ID NO: 771000 - DNA, 15 bp, Homo sapiens
cttccagcaaagtct

SEQ ID NO: 771001 - DNA, 15 bp, Homo sapiens
ttccagcaaagtctc

SEQ ID NO: 771002 - DNA, 15 bp, Homo sapiens
tccagcaaagtctca

SEQ ID NO: 771003 - DNA, 15 bp, Homo sapiens
ccagcaaagtctcaa

SEQ ID NO: 771004 - DNA, 15 bp, Homo sapiens
cagcaaagtctcaaa

SEQ ID NO: 771005 - DNA, 15 bp, Homo sapiens
agcaaagtctcaaaa

SEQ ID NO: 771006 - DNA, 15 bp, Homo sapiens
gcaaagtctcaaaag

SEQ ID NO: 771007 - DNA, 15 bp, Homo sapiens
caaagtctcaaaaga

SEQ ID NO: 771008 - DNA, 15 bp, Homo sapiens
aaagtctcaaaagat

SEQ ID NO: 771009 - DNA, 15 bp, Homo sapiens
aagtctcaaaagatt

SEQ ID NO: 771010 - DNA, 15 bp, Homo sapiens
agtctcaaaagattt

SEQ ID NO: 771011 - DNA, 15 bp, Homo sapiens
gtctcaaaagatttt

SEQ ID NO: 771012 - DNA, 15 bp, Homo sapiens
tctcaaaagattttg

SEQ ID NO: 771013 - DNA, 15 bp, Homo sapiens
ctcaaaagattttgc

SEQ ID NO: 771014 - DNA, 15 bp, Homo sapiens
tcaaaagattttgct

SEQ ID NO: 771015 - DNA, 15 bp, Homo sapiens
caaaagattttgctt

SEQ ID NO: 771016 - DNA, 15 bp, Homo sapiens
aaaagattttgcttt

SEQ ID NO: 771017 - DNA, 15 bp, Homo sapiens
aaagattttgctttt

SEQ ID NO: 771018 - DNA, 15 bp, Homo sapiens
aagattttgcttttt

SEQ ID NO: 771019 - DNA, 15 bp, Homo sapiens
agattttgctttttt

SEQ ID NO: 771020 - DNA, 15 bp, Homo sapiens
gattttgcttttttc

SEQ ID NO: 771021 - DNA, 15 bp, Homo sapiens
attttgcttttttca

SEQ ID NO: 771022 - DNA, 15 bp, Homo sapiens
ttttgcttttttcac

SEQ ID NO: 771023 - DNA, 15 bp, Homo sapiens
tttgcttttttcaca

SEQ ID NO: 771024 - DNA, 15 bp, Homo sapiens
ttgcttttttcacaa

SEQ ID NO: 771025 - DNA, 15 bp, Homo sapiens
tgcttttttcacaac

SEQ ID NO: 771026 - DNA, 15 bp, Homo sapiens
gcttttttcacaact

SEQ ID NO: 771027 - DNA, 15 bp, Homo sapiens
cttttttcacaactg

SEQ ID NO: 771028 - DNA, 15 bp, Homo sapiens
ttttttcacaactgt

SEQ ID NO: 771029 - DNA, 15 bp, Homo sapiens
tttttcacaactgtt

SEQ ID NO: 771030 - DNA, 15 bp, Homo sapiens
ttttcacaactgttt

SEQ ID NO: 771031 - DNA, 15 bp, Homo sapiens
tttcacaactgttta

SEQ ID NO: 771032 - DNA, 15 bp, Homo sapiens
ttcacaactgtttaa

SEQ ID NO: 771033 - DNA, 15 bp, Homo sapiens
tcacaactgtttaat

SEQ ID NO: 771034 - DNA, 15 bp, Homo sapiens
cacaactgtttaatt

SEQ ID NO: 771035 - DNA, 15 bp, Homo sapiens
acaactgtttaatta

SEQ ID NO: 771036 - DNA, 15 bp, Homo sapiens
caactgtttaattaa

SEQ ID NO: 771037 - DNA, 15 bp, Homo sapiens
aactgtttaattaac

SEQ ID NO: 771038 - DNA, 15 bp, Homo sapiens
actgtttaattaact

SEQ ID NO: 771039 - DNA, 15 bp, Homo sapiens
ctgtttaattaactt

SEQ ID NO: 771040 - DNA, 15 bp, Homo sapiens
tgtttaattaacttg

SEQ ID NO: 771041 - DNA, 15 bp, Homo sapiens
gtttaattaacttga

SEQ ID NO: 771042 - DNA, 15 bp, Homo sapiens
tttaattaacttgag

SEQ ID NO: 771043 - DNA, 15 bp, Homo sapiens
ttaattaacttgaga

SEQ ID NO: 771044 - DNA, 15 bp, Homo sapiens
taattaacttgagaa

SEQ ID NO: 771045 - DNA, 15 bp, Homo sapiens
aattaacttgagaaa

SEQ ID NO: 771046 - DNA, 15 bp, Homo sapiens
attaacttgagaaaa

SEQ ID NO: 771047 - DNA, 15 bp, Homo sapiens
ttaacttgagaaaag

SEQ ID NO: 771048 - DNA, 15 bp, Homo sapiens
taacttgagaaaagt

SEQ ID NO: 771049 - DNA, 15 bp, Homo sapiens
aacttgagaaaagtc

SEQ ID NO: 771050 - DNA, 15 bp, Homo sapiens
acttgagaaaagtcc

SEQ ID NO: 771051 - DNA, 15 bp, Homo sapiens
cttgagaaaagtccc

SEQ ID NO: 771052 - DNA, 15 bp, Homo sapiens
ttgagaaaagtccca

SEQ ID NO: 771053 - DNA, 15 bp, Homo sapiens
tgagaaaagtcccaa

SEQ ID NO: 771054 - DNA, 15 bp, Homo sapiens
gagaaaagtcccaag

SEQ ID NO: 771055 - DNA, 15 bp, Homo sapiens
agaaaagtcccaagt

SEQ ID NO: 771056 - DNA, 15 bp, Homo sapiens
gaaaagtcccaagtg

SEQ ID NO: 771057 - DNA, 15 bp, Homo sapiens
aaaagtcccaagtgt

SEQ ID NO: 771058 - DNA, 15 bp, Homo sapiens
aaagtcccaagtgta

SEQ ID NO: 771059 - DNA, 15 bp, Homo sapiens
aagtcccaagtgtac

SEQ ID NO: 771060 - DNA, 15 bp, Homo sapiens
agtcccaagtgtacc

SEQ ID NO: 771061 - DNA, 15 bp, Homo sapiens
gtcccaagtgtaccc

SEQ ID NO: 771062 - DNA, 15 bp, Homo sapiens
tcccaagtgtaccct

SEQ ID NO: 771063 - DNA, 15 bp, Homo sapiens
cccaagtgtaccctt

SEQ ID NO: 771064 - DNA, 15 bp, Homo sapiens
ccaagtgtaccctta

SEQ ID NO: 771065 - DNA, 15 bp, Homo sapiens
caagtgtacccttat

SEQ ID NO: 771066 - DNA, 15 bp, Homo sapiens
aagtgtacccttatt

SEQ ID NO: 771067 - DNA, 15 bp, Homo sapiens
agtgtacccttatta

SEQ ID NO: 771068 - DNA, 15 bp, Homo sapiens
gtgtacccttattac

SEQ ID NO: 771069 - DNA, 15 bp, Homo sapiens
tgtacccttattaca

SEQ ID NO: 771070 - DNA, 15 bp, Homo sapiens
gtacccttattacaa

SEQ ID NO: 771071 - DNA, 15 bp, Homo sapiens
tacccttattacaaa

SEQ ID NO: 771072 - DNA, 15 bp, Homo sapiens
acccttattacaaac

SEQ ID NO: 771073 - DNA, 15 bp, Homo sapiens
cccttattacaaaca

SEQ ID NO: 771074 - DNA, 15 bp, Homo sapiens
ccttattacaaacat

SEQ ID NO: 771075 - DNA, 15 bp, Homo sapiens
cttattacaaacatc

SEQ ID NO: 771076 - DNA, 15 bp, Homo sapiens
ttattacaaacatcc

SEQ ID NO: 771077 - DNA, 15 bp, Homo sapiens
tattacaaacatcct

SEQ ID NO: 771078 - DNA, 15 bp, Homo sapiens
attacaaacatcctt

SEQ ID NO: 771079 - DNA, 15 bp, Homo sapiens
ttacaaacatccttc

SEQ ID NO: 771080 - DNA, 15 bp, Homo sapiens
tacaaacatccttca

SEQ ID NO: 771081 - DNA, 15 bp, Homo sapiens
acaaacatccttcag

SEQ ID NO: 771082 - DNA, 15 bp, Homo sapiens
caaacatccttcaga

SEQ ID NO: 771083 - DNA, 15 bp, Homo sapiens
aaacatccttcagaa

SEQ ID NO: 771084 - DNA, 15 bp, Homo sapiens
aacatccttcagaaa

SEQ ID NO: 771085 - DNA, 15 bp, Homo sapiens
acatccttcagaaaa

SEQ ID NO: 771086 - DNA, 15 bp, Homo sapiens
catccttcagaaaag

SEQ ID NO: 771087 - DNA, 15 bp, Homo sapiens
atccttcagaaaagt

SEQ ID NO: 771088 - DNA, 15 bp, Homo sapiens
tccttcagaaaagtg

SEQ ID NO: 771089 - DNA, 15 bp, Homo sapiens
ccttcagaaaagtgg

SEQ ID NO: 771090 - DNA, 15 bp, Homo sapiens
cttcagaaaagtggt

SEQ ID NO: 771091 - DNA, 15 bp, Homo sapiens
ttcagaaaagtggtg

SEQ ID NO: 771092 - DNA, 15 bp, Homo sapiens
tcagaaaagtggtga

SEQ ID NO: 771093 - DNA, 15 bp, Homo sapiens
cagaaaagtggtgac

SEQ ID NO: 771094 - DNA, 15 bp, Homo sapiens
agaaaagtggtgact

SEQ ID NO: 771095 - DNA, 15 bp, Homo sapiens
gaaaagtggtgacta

SEQ ID NO: 771096 - DNA, 15 bp, Homo sapiens
aaaagtggtgactat

SEQ ID NO: 771097 - DNA, 15 bp, Homo sapiens
aaagtggtgactatg

SEQ ID NO: 771098 - DNA, 15 bp, Homo sapiens
aagtggtgactatga

SEQ ID NO: 771099 - DNA, 15 bp, Homo sapiens
agtggtgactatgat

SEQ ID NO: 771100 - DNA, 15 bp, Homo sapiens
gtggtgactatgatg

SEQ ID NO: 771101 - DNA, 15 bp, Homo sapiens
tggtgactatgatgt

SEQ ID NO: 771102 - DNA, 15 bp, Homo sapiens
ggtgactatgatgtg

SEQ ID NO: 771103 - DNA, 15 bp, Homo sapiens
gtgactatgatgtgt

SEQ ID NO: 771104 - DNA, 15 bp, Homo sapiens
tgactatgatgtgta

SEQ ID NO: 771105 - DNA, 15 bp, Homo sapiens
gactatgatgtgtat

SEQ ID NO: 771106 - DNA, 15 bp, Homo sapiens
actatgatgtgtata

SEQ ID NO: 771107 - DNA, 15 bp, Homo sapiens
ctatgatgtgtatag

SEQ ID NO: 771108 - DNA, 15 bp, Homo sapiens
tatgatgtgtatagt

SEQ ID NO: 771109 - DNA, 15 bp, Homo sapiens
atgatgtgtatagtg

SEQ ID NO: 771110 - DNA, 15 bp, Homo sapiens
tgatgtgtatagtgg

SEQ ID NO: 771111 - DNA, 15 bp, Homo sapiens
gatgtgtatagtggt

SEQ ID NO: 771112 - DNA, 15 bp, Homo sapiens
atgtgtatagtggtg

SEQ ID NO: 771113 - DNA, 15 bp, Homo sapiens
tgtgtatagtggtgt

SEQ ID NO: 771114 - DNA, 15 bp, Homo sapiens
gtgtatagtggtgtc

SEQ ID NO: 771115 - DNA, 15 bp, Homo sapiens
tgtatagtggtgtct

SEQ ID NO: 771116 - DNA, 15 bp, Homo sapiens
gtatagtggtgtctt

SEQ ID NO: 771117 - DNA, 15 bp, Homo sapiens
tatagtggtgtcttc

SEQ ID NO: 771118 - DNA, 15 bp, Homo sapiens
atagtggtgtcttca

SEQ ID NO: 771119 - DNA, 15 bp, Homo sapiens
tagtggtgtcttcac

SEQ ID NO: 771120 - DNA, 15 bp, Homo sapiens
agtggtgtcttcacc

SEQ ID NO: 771121 - DNA, 15 bp, Homo sapiens
gtggtgtcttcacca

SEQ ID NO: 771122 - DNA, 15 bp, Homo sapiens
tggtgtcttcaccag

SEQ ID NO: 771123 - DNA, 15 bp, Homo sapiens
ggtgtcttcaccagc

SEQ ID NO: 771124 - DNA, 15 bp, Homo sapiens
gtgtcttcaccagca

SEQ ID NO: 771125 - DNA, 15 bp, Homo sapiens
tgtcttcaccagcag

SEQ ID NO: 771126 - DNA, 15 bp, Homo sapiens
gtcttcaccagcagc

SEQ ID NO: 771127 - DNA, 15 bp, Homo sapiens
tcttcaccagcagca

SEQ ID NO: 771128 - DNA, 15 bp, Homo sapiens
cttcaccagcagcag

SEQ ID NO: 771129 - DNA, 15 bp, Homo sapiens
ttcaccagcagcagg

SEQ ID NO: 771130 - DNA, 15 bp, Homo sapiens
tcaccagcagcagga

SEQ ID NO: 771131 - DNA, 15 bp, Homo sapiens
caccagcagcaggac

SEQ ID NO: 771132 - DNA, 15 bp, Homo sapiens
accagcagcaggacc

SEQ ID NO: 771133 - DNA, 15 bp, Homo sapiens
ccagcagcaggacca

SEQ ID NO: 771134 - DNA, 15 bp, Homo sapiens
cagcagcaggaccaa

SEQ ID NO: 771135 - DNA, 15 bp, Homo sapiens
agcagcaggaccaac

SEQ ID NO: 771136 - DNA, 15 bp, Homo sapiens
gcagcaggaccaacg

SEQ ID NO: 771137 - DNA, 15 bp, Homo sapiens
cagcaggaccaacgt

SEQ ID NO: 771138 - DNA, 15 bp, Homo sapiens
agcaggaccaacgtg

SEQ ID NO: 771139 - DNA, 15 bp, Homo sapiens
gcaggaccaacgtgt

SEQ ID NO: 771140 - DNA, 15 bp, Homo sapiens
caggaccaacgtgtt

SEQ ID NO: 771141 - DNA, 15 bp, Homo sapiens
aggaccaacgtgttg

SEQ ID NO: 771142 - DNA, 15 bp, Homo sapiens
ggaccaacgtgttgg

SEQ ID NO: 771143 - DNA, 15 bp, Homo sapiens
gaccaacgtgttggg

SEQ ID NO: 771144 - DNA, 15 bp, Homo sapiens
accaacgtgttgggg

SEQ ID NO: 771145 - DNA, 15 bp, Homo sapiens
ccaacgtgttggggt

SEQ ID NO: 771146 - DNA, 15 bp, Homo sapiens
caacgtgttggggtt

SEQ ID NO: 771147 - DNA, 15 bp, Homo sapiens
aacgtgttggggttt

SEQ ID NO: 771148 - DNA, 15 bp, Homo sapiens
acgtgttggggtttg

SEQ ID NO: 771149 - DNA, 15 bp, Homo sapiens
cgtgttggggtttgc

SEQ ID NO: 771150 - DNA, 15 bp, Homo sapiens
gtgttggggtttgca

SEQ ID NO: 771151 - DNA, 15 bp, Homo sapiens
tgttggggtttgcag

SEQ ID NO: 771152 - DNA, 15 bp, Homo sapiens
gttggggtttgcagg

SEQ ID NO: 771153 - DNA, 15 bp, Homo sapiens
ttggggtttgcaggt

SEQ ID NO: 771154 - DNA, 15 bp, Homo sapiens
tggggtttgcaggtg

SEQ ID NO: 771155 - DNA, 15 bp, Homo sapiens
ggggtttgcaggtga

SEQ ID NO: 771156 - DNA, 15 bp, Homo sapiens
gggtttgcaggtgaa

SEQ ID NO: 771157 - DNA, 15 bp, Homo sapiens
ggtttgcaggtgaaa

SEQ ID NO: 771158 - DNA, 15 bp, Homo sapiens
gtttgcaggtgaaat

SEQ ID NO: 771159 - DNA, 15 bp, Homo sapiens
tttgcaggtgaaatt

SEQ ID NO: 771160 - DNA, 15 bp, Homo sapiens
ttgcaggtgaaattt

SEQ ID NO: 771161 - DNA, 15 bp, Homo sapiens
tgcaggtgaaatttg

SEQ ID NO: 771162 - DNA, 15 bp, Homo sapiens
gcaggtgaaatttga

SEQ ID NO: 771163 - DNA, 15 bp, Homo sapiens
caggtgaaatttgac

SEQ ID NO: 771164 - DNA, 15 bp, Homo sapiens
aggtgaaatttgact

SEQ ID NO: 771165 - DNA, 15 bp, Homo sapiens
ggtgaaatttgactg

SEQ ID NO: 771166 - DNA, 15 bp, Homo sapiens
gtgaaatttgactgt

SEQ ID NO: 771167 - DNA, 15 bp, Homo sapiens
tgaaatttgactgta

SEQ ID NO: 771168 - DNA, 15 bp, Homo sapiens
gaaatttgactgtaa

SEQ ID NO: 771169 - DNA, 15 bp, Homo sapiens
aaatttgactgtaat

SEQ ID NO: 771170 - DNA, 15 bp, Homo sapiens
aatttgactgtaatt

SEQ ID NO: 771171 - DNA, 15 bp, Homo sapiens
atttgactgtaattt

SEQ ID NO: 771172 - DNA, 15 bp, Homo sapiens
tttgactgtaattta

SEQ ID NO: 771173 - DNA, 15 bp, Homo sapiens
ttgactgtaatttat

SEQ ID NO: 771174 - DNA, 15 bp, Homo sapiens
tgactgtaatttatt

SEQ ID NO: 771175 - DNA, 15 bp, Homo sapiens
gactgtaatttattt

SEQ ID NO: 771176 - DNA, 15 bp, Homo sapiens
actgtaatttattta

SEQ ID NO: 771177 - DNA, 15 bp, Homo sapiens
ctgtaatttatttac

SEQ ID NO: 771178 - DNA, 15 bp, Homo sapiens
tgtaatttatttact

SEQ ID NO: 771179 - DNA, 15 bp, Homo sapiens
gtaatttatttactt

SEQ ID NO: 771180 - DNA, 15 bp, Homo sapiens
taatttatttacttc

SEQ ID NO: 771181 - DNA, 15 bp, Homo sapiens
aatttatttacttca

SEQ ID NO: 771182 - DNA, 15 bp, Homo sapiens
atttatttacttcag

SEQ ID NO: 771183 - DNA, 15 bp, Homo sapiens
tttatttacttcagt

SEQ ID NO: 771184 - DNA, 15 bp, Homo sapiens
ttatttacttcagtc

SEQ ID NO: 771185 - DNA, 15 bp, Homo sapiens
tatttacttcagtca

SEQ ID NO: 771186 - DNA, 15 bp, Homo sapiens
atttacttcagtcaa

SEQ ID NO: 771187 - DNA, 15 bp, Homo sapiens
tttacttcagtcaaa

SEQ ID NO: 771188 - DNA, 15 bp, Homo sapiens
ttacttcagtcaaat

SEQ ID NO: 771189 - DNA, 15 bp, Homo sapiens
tacttcagtcaaatt

SEQ ID NO: 771190 - DNA, 15 bp, Homo sapiens
acttcagtcaaattt

SEQ ID NO: 771191 - DNA, 15 bp, Homo sapiens
cttcagtcaaatttt

SEQ ID NO: 771192 - DNA, 15 bp, Homo sapiens
ttcagtcaaatttta

SEQ ID NO: 771193 - DNA, 15 bp, Homo sapiens
tcagtcaaattttaa

SEQ ID NO: 771194 - DNA, 15 bp, Homo sapiens
cagtcaaattttaat

SEQ ID NO: 771195 - DNA, 15 bp, Homo sapiens
agtcaaattttaatg

SEQ ID NO: 771196 - DNA, 15 bp, Homo sapiens
gtcaaattttaatgc

SEQ ID NO: 771197 - DNA, 15 bp, Homo sapiens
tcaaattttaatgct

SEQ ID NO: 771198 - DNA, 15 bp, Homo sapiens
caaattttaatgctg

SEQ ID NO: 771199 - DNA, 15 bp, Homo sapiens
aaattttaatgctgt

SEQ ID NO: 771200 - DNA, 15 bp, Homo sapiens
aattttaatgctgta

SEQ ID NO: 771201 - DNA, 15 bp, Homo sapiens
attttaatgctgtaa

SEQ ID NO: 771202 - DNA, 15 bp, Homo sapiens
ttttaatgctgtaat

SEQ ID NO: 771203 - DNA, 15 bp, Homo sapiens
tttaatgctgtaata

SEQ ID NO: 771204 - DNA, 15 bp, Homo sapiens
ttaatgctgtaatac

SEQ ID NO: 771205 - DNA, 15 bp, Homo sapiens
taatgctgtaataca

SEQ ID NO: 771206 - DNA, 15 bp, Homo sapiens
aatgctgtaatacag

SEQ ID NO: 771207 - DNA, 15 bp, Homo sapiens
atgctgtaatacaga

SEQ ID NO: 771208 - DNA, 15 bp, Homo sapiens
tgctgtaatacagat

SEQ ID NO: 771209 - DNA, 15 bp, Homo sapiens
gctgtaatacagata

SEQ ID NO: 771210 - DNA, 15 bp, Homo sapiens
ctgtaatacagataa

SEQ ID NO: 771211 - DNA, 15 bp, Homo sapiens
tgtaatacagataat

SEQ ID NO: 771212 - DNA, 15 bp, Homo sapiens
gtaatacagataatt

SEQ ID NO: 771213 - DNA, 15 bp, Homo sapiens
taatacagataattt

SEQ ID NO: 771214 - DNA, 15 bp, Homo sapiens
aatacagataatttt

SEQ ID NO: 771215 - DNA, 15 bp, Homo sapiens
atacagataattttg

SEQ ID NO: 771216 - DNA, 15 bp, Homo sapiens
tacagataattttgt

SEQ ID NO: 771217 - DNA, 15 bp, Homo sapiens
acagataattttgtc

SEQ ID NO: 771218 - DNA, 15 bp, Homo sapiens
cagataattttgtca

SEQ ID NO: 771219 - DNA, 15 bp, Homo sapiens
agataattttgtcat

SEQ ID NO: 771220 - DNA, 15 bp, Homo sapiens
gataattttgtcatg

SEQ ID NO: 771221 - DNA, 15 bp, Homo sapiens
ataattttgtcatga

SEQ ID NO: 771222 - DNA, 15 bp, Homo sapiens
taattttgtcatgaa

SEQ ID NO: 771223 - DNA, 15 bp, Homo sapiens
aattttgtcatgaac

SEQ ID NO: 771224 - DNA, 15 bp, Homo sapiens
attttgtcatgaact

SEQ ID NO: 771225 - DNA, 15 bp, Homo sapiens
ttttgtcatgaactt

SEQ ID NO: 771226 - DNA, 15 bp, Homo sapiens
tttgtcatgaacttt

SEQ ID NO: 771227 - DNA, 15 bp, Homo sapiens
ttgtcatgaactttg

SEQ ID NO: 771228 - DNA, 15 bp, Homo sapiens
tgtcatgaactttgc

SEQ ID NO: 771229 - DNA, 15 bp, Homo sapiens
gtcatgaactttgcc

SEQ ID NO: 771230 - DNA, 15 bp, Homo sapiens
tcatgaactttgcca

SEQ ID NO: 771231 - DNA, 15 bp, Homo sapiens
catgaactttgccaa

SEQ ID NO: 771232 - DNA, 15 bp, Homo sapiens
atgaactttgccaaa

SEQ ID NO: 771233 - DNA, 15 bp, Homo sapiens
tgaactttgccaaac

SEQ ID NO: 771234 - DNA, 15 bp, Homo sapiens
gaactttgccaaact

SEQ ID NO: 771235 - DNA, 15 bp, Homo sapiens
aactttgccaaacta

SEQ ID NO: 771236 - DNA, 15 bp, Homo sapiens
actttgccaaactat

SEQ ID NO: 771237 - DNA, 15 bp, Homo sapiens
ctttgccaaactatc

SEQ ID NO: 771238 - DNA, 15 bp, Homo sapiens
tttgccaaactatct

SEQ ID NO: 771239 - DNA, 15 bp, Homo sapiens
ttgccaaactatctc

SEQ ID NO: 771240 - DNA, 15 bp, Homo sapiens
tgccaaactatctcc

SEQ ID NO: 771241 - DNA, 15 bp, Homo sapiens
gccaaactatctcct

SEQ ID NO: 771242 - DNA, 15 bp, Homo sapiens
ccaaactatctccta

SEQ ID NO: 771243 - DNA, 15 bp, Homo sapiens
caaactatctcctaa

SEQ ID NO: 771244 - DNA, 15 bp, Homo sapiens
aaactatctcctaaa

SEQ ID NO: 771245 - DNA, 15 bp, Homo sapiens
aactatctcctaaaa

SEQ ID NO: 771246 - DNA, 15 bp, Homo sapiens
actatctcctaaaac

SEQ ID NO: 771247 - DNA, 15 bp, Homo sapiens
ctatctcctaaaacc

SEQ ID NO: 771248 - DNA, 15 bp, Homo sapiens
tatctcctaaaacca

SEQ ID NO: 771249 - DNA, 15 bp, Homo sapiens
atctcctaaaaccaa

SEQ ID NO: 771250 - DNA, 15 bp, Homo sapiens
tctcctaaaaccaat

SEQ ID NO: 771251 - DNA, 15 bp, Homo sapiens
ctcctaaaaccaatt

SEQ ID NO: 771252 - DNA, 15 bp, Homo sapiens
tcctaaaaccaattc

SEQ ID NO: 771253 - DNA, 15 bp, Homo sapiens
cctaaaaccaattct

SEQ ID NO: 771254 - DNA, 15 bp, Homo sapiens
ctaaaaccaattctc

SEQ ID NO: 771255 - DNA, 15 bp, Homo sapiens
taaaaccaattctct

SEQ ID NO: 771256 - DNA, 15 bp, Homo sapiens
aaaaccaattctctt

SEQ ID NO: 771257 - DNA, 15 bp, Homo sapiens
aaaccaattctctta

SEQ ID NO: 771258 - DNA, 15 bp, Homo sapiens
aaccaattctcttat

SEQ ID NO: 771259 - DNA, 15 bp, Homo sapiens
accaattctcttatt

SEQ ID NO: 771260 - DNA, 15 bp, Homo sapiens
ccaattctcttattt

SEQ ID NO: 771261 - DNA, 15 bp, Homo sapiens
caattctcttatttg

SEQ ID NO: 771262 - DNA, 15 bp, Homo sapiens
aattctcttatttgt

SEQ ID NO: 771263 - DNA, 15 bp, Homo sapiens
attctcttatttgtt

SEQ ID NO: 771264 - DNA, 15 bp, Homo sapiens
ttctcttatttgttg

SEQ ID NO: 771265 - DNA, 15 bp, Homo sapiens
tctcttatttgttgc

SEQ ID NO: 771266 - DNA, 15 bp, Homo sapiens
ctcttatttgttgct

SEQ ID NO: 771267 - DNA, 15 bp, Homo sapiens
tcttatttgttgctt

SEQ ID NO: 771268 - DNA, 15 bp, Homo sapiens
cttatttgttgcttc

SEQ ID NO: 771269 - DNA, 15 bp, Homo sapiens
ttatttgttgcttca

SEQ ID NO: 771270 - DNA, 15 bp, Homo sapiens
tatttgttgcttcat

SEQ ID NO: 771271 - DNA, 15 bp, Homo sapiens
atttgttgcttcata

SEQ ID NO: 771272 - DNA, 15 bp, Homo sapiens
tttgttgcttcataa

SEQ ID NO: 771273 - DNA, 15 bp, Homo sapiens
ttgttgcttcataaa

SEQ ID NO: 771274 - DNA, 15 bp, Homo sapiens
tgttgcttcataaag

SEQ ID NO: 771275 - DNA, 15 bp, Homo sapiens
gttgcttcataaagc

SEQ ID NO: 771276 - DNA, 15 bp, Homo sapiens
ttgcttcataaagct

SEQ ID NO: 771277 - DNA, 15 bp, Homo sapiens
tgcttcataaagctg

SEQ ID NO: 771278 - DNA, 15 bp, Homo sapiens
gcttcataaagctgt

SEQ ID NO: 771279 - DNA, 15 bp, Homo sapiens
cttcataaagctgtt

SEQ ID NO: 771280 - DNA, 15 bp, Homo sapiens
ttcataaagctgttt

SEQ ID NO: 771281 - DNA, 15 bp, Homo sapiens
tcataaagctgtttt

SEQ ID NO: 771282 - DNA, 15 bp, Homo sapiens
cataaagctgtttta

SEQ ID NO: 771283 - DNA, 15 bp, Homo sapiens
ataaagctgttttat

SEQ ID NO: 771284 - DNA, 15 bp, Homo sapiens
taaagctgttttata

SEQ ID NO: 771285 - DNA, 15 bp, Homo sapiens
aaagctgttttatag

SEQ ID NO: 771286 - DNA, 15 bp, Homo sapiens
aagctgttttatagc

SEQ ID NO: 771287 - DNA, 15 bp, Homo sapiens
agctgttttatagca

SEQ ID NO: 771288 - DNA, 15 bp, Homo sapiens
gctgttttatagcaa

SEQ ID NO: 771289 - DNA, 15 bp, Homo sapiens
ctgttttatagcaaa

SEQ ID NO: 771290 - DNA, 15 bp, Homo sapiens
tgttttatagcaaat

SEQ ID NO: 771291 - DNA, 15 bp, Homo sapiens
gttttatagcaaatg

SEQ ID NO: 771292 - DNA, 15 bp, Homo sapiens
ttttatagcaaatgt

SEQ ID NO: 771293 - DNA, 15 bp, Homo sapiens
tttatagcaaatgta

SEQ ID NO: 771294 - DNA, 15 bp, Homo sapiens
ttatagcaaatgtat

SEQ ID NO: 771295 - DNA, 15 bp, Homo sapiens
tatagcaaatgtata

SEQ ID NO: 771296 - DNA, 15 bp, Homo sapiens
atagcaaatgtatac

SEQ ID NO: 771297 - DNA, 15 bp, Homo sapiens
tagcaaatgtatact

SEQ ID NO: 771298 - DNA, 15 bp, Homo sapiens
agcaaatgtatactg

SEQ ID NO: 771299 - DNA, 15 bp, Homo sapiens
gcaaatgtatactgt

SEQ ID NO: 771300 - DNA, 15 bp, Homo sapiens
caaatgtatactgtt

SEQ ID NO: 771301 - DNA, 15 bp, Homo sapiens
aaatgtatactgttc

SEQ ID NO: 771302 - DNA, 15 bp, Homo sapiens
aatgtatactgttct

SEQ ID NO: 771303 - DNA, 15 bp, Homo sapiens
atgtatactgttctt

SEQ ID NO: 771304 - DNA, 15 bp, Homo sapiens
tgtatactgttcttc

SEQ ID NO: 771305 - DNA, 15 bp, Homo sapiens
gtatactgttcttct

SEQ ID NO: 771306 - DNA, 15 bp, Homo sapiens
tatactgttcttctt

SEQ ID NO: 771307 - DNA, 15 bp, Homo sapiens
atactgttcttcttc

SEQ ID NO: 771308 - DNA, 15 bp, Homo sapiens
tactgttcttcttca

SEQ ID NO: 771309 - DNA, 15 bp, Homo sapiens
actgttcttcttcag

SEQ ID NO: 771310 - DNA, 15 bp, Homo sapiens
ctgttcttcttcagg

SEQ ID NO: 771311 - DNA, 15 bp, Homo sapiens
tgttcttcttcaggt

SEQ ID NO: 771312 - DNA, 15 bp, Homo sapiens
gttcttcttcaggtc

SEQ ID NO: 771313 - DNA, 15 bp, Homo sapiens
ttcttcttcaggtct

SEQ ID NO: 771314 - DNA, 15 bp, Homo sapiens
tcttcttcaggtctg

SEQ ID NO: 771315 - DNA, 15 bp, Homo sapiens
cttcttcaggtctgt

SEQ ID NO: 771316 - DNA, 15 bp, Homo sapiens
ttcttcaggtctgta

SEQ ID NO: 771317 - DNA, 15 bp, Homo sapiens
tcttcaggtctgtac

SEQ ID NO: 771318 - DNA, 15 bp, Homo sapiens
cttcaggtctgtaca

SEQ ID NO: 771319 - DNA, 15 bp, Homo sapiens
ttcaggtctgtacat

SEQ ID NO: 771320 - DNA, 15 bp, Homo sapiens
tcaggtctgtacatt

SEQ ID NO: 771321 - DNA, 15 bp, Homo sapiens
caggtctgtacattg

SEQ ID NO: 771322 - DNA, 15 bp, Homo sapiens
aggtctgtacattgc

SEQ ID NO: 771323 - DNA, 15 bp, Homo sapiens
ggtctgtacattgcc

SEQ ID NO: 771324 - DNA, 15 bp, Homo sapiens
gtctgtacattgcct

SEQ ID NO: 771325 - DNA, 15 bp, Homo sapiens
tctgtacattgcctg

SEQ ID NO: 771326 - DNA, 15 bp, Homo sapiens
ctgtacattgcctgg

SEQ ID NO: 771327 - DNA, 15 bp, Homo sapiens
tgtacattgcctggt

SEQ ID NO: 771328 - DNA, 15 bp, Homo sapiens
gtacattgcctggtc

SEQ ID NO: 771329 - DNA, 15 bp, Homo sapiens
tacattgcctggtct

SEQ ID NO: 771330 - DNA, 15 bp, Homo sapiens
acattgcctggtctg

SEQ ID NO: 771331 - DNA, 15 bp, Homo sapiens
cattgcctggtctgg

SEQ ID NO: 771332 - DNA, 15 bp, Homo sapiens
attgcctggtctggg

SEQ ID NO: 771333 - DNA, 15 bp, Homo sapiens
ttgcctggtctgggc

SEQ ID NO: 771334 - DNA, 15 bp, Homo sapiens
tgcctggtctgggct

SEQ ID NO: 771335 - DNA, 15 bp, Homo sapiens
gcctggtctgggctt

SEQ ID NO: 771336 - DNA, 15 bp, Homo sapiens
cctggtctgggcttc

SEQ ID NO: 771337 - DNA, 15 bp, Homo sapiens
ctggtctgggcttct

SEQ ID NO: 771338 - DNA, 15 bp, Homo sapiens
tggtctgggcttctt

SEQ ID NO: 771339 - DNA, 15 bp, Homo sapiens
ggtctgggcttcttt

SEQ ID NO: 771340 - DNA, 15 bp, Homo sapiens
gtctgggcttcttta

SEQ ID NO: 771341 - DNA, 15 bp, Homo sapiens
tctgggcttctttaa

SEQ ID NO: 771342 - DNA, 15 bp, Homo sapiens
ctgggcttctttaag

SEQ ID NO: 771343 - DNA, 15 bp, Homo sapiens
tgggcttctttaagg

SEQ ID NO: 771344 - DNA, 15 bp, Homo sapiens
gggcttctttaagga

SEQ ID NO: 771345 - DNA, 15 bp, Homo sapiens
ggcttctttaaggaa

SEQ ID NO: 771346 - DNA, 15 bp, Homo sapiens
gcttctttaaggaaa

SEQ ID NO: 771347 - DNA, 15 bp, Homo sapiens
cttctttaaggaaaa

SEQ ID NO: 771348 - DNA, 15 bp, Homo sapiens
ttctttaaggaaaag

SEQ ID NO: 771349 - DNA, 15 bp, Homo sapiens
tctttaaggaaaagc

SEQ ID NO: 771350 - DNA, 15 bp, Homo sapiens
ctttaaggaaaagct

SEQ ID NO: 771351 - DNA, 15 bp, Homo sapiens
tttaaggaaaagctt

SEQ ID NO: 771352 - DNA, 15 bp, Homo sapiens
ttaaggaaaagcttt

SEQ ID NO: 771353 - DNA, 15 bp, Homo sapiens
taaggaaaagctttc

SEQ ID NO: 771354 - DNA, 15 bp, Homo sapiens
aaggaaaagctttct

SEQ ID NO: 771355 - DNA, 15 bp, Homo sapiens
aggaaaagctttctc

SEQ ID NO: 771356 - DNA, 15 bp, Homo sapiens
ggaaaagctttctct

SEQ ID NO: 771357 - DNA, 15 bp, Homo sapiens
gaaaagctttctctt

SEQ ID NO: 771358 - DNA, 15 bp, Homo sapiens
aaaagctttctctta

SEQ ID NO: 771359 - DNA, 15 bp, Homo sapiens
aaagctttctcttaa

SEQ ID NO: 771360 - DNA, 15 bp, Homo sapiens
aagctttctcttaaa

SEQ ID NO: 771361 - DNA, 15 bp, Homo sapiens
agctttctcttaaaa

SEQ ID NO: 771362 - DNA, 15 bp, Homo sapiens
gctttctcttaaaat

SEQ ID NO: 771363 - DNA, 15 bp, Homo sapiens
ctttctcttaaaata

SEQ ID NO: 771364 - DNA, 15 bp, Homo sapiens
tttctcttaaaatac

SEQ ID NO: 771365 - DNA, 15 bp, Homo sapiens
ttctcttaaaatact

SEQ ID NO: 771366 - DNA, 15 bp, Homo sapiens
tctcttaaaatactg

SEQ ID NO: 771367 - DNA, 15 bp, Homo sapiens
ctcttaaaatactgt

SEQ ID NO: 771368 - DNA, 15 bp, Homo sapiens
tcttaaaatactgtt

SEQ ID NO: 771369 - DNA, 15 bp, Homo sapiens
cttaaaatactgttt

SEQ ID NO: 771370 - DNA, 15 bp, Homo sapiens
ttaaaatactgtttg

SEQ ID NO: 771371 - DNA, 15 bp, Homo sapiens
taaaatactgtttgc

SEQ ID NO: 771372 - DNA, 15 bp, Homo sapiens
aaaatactgtttgct

SEQ ID NO: 771373 - DNA, 15 bp, Homo sapiens
aaatactgtttgctt

SEQ ID NO: 771374 - DNA, 15 bp, Homo sapiens
aatactgtttgcttc

SEQ ID NO: 771375 - DNA, 15 bp, Homo sapiens
atactgtttgcttcc

SEQ ID NO: 771376 - DNA, 15 bp, Homo sapiens
tactgtttgcttccc

SEQ ID NO: 771377 - DNA, 15 bp, Homo sapiens
actgtttgcttccca

SEQ ID NO: 771378 - DNA, 15 bp, Homo sapiens
ctgtttgcttcccag

SEQ ID NO: 771379 - DNA, 15 bp, Homo sapiens
tgtttgcttcccaga

SEQ ID NO: 771380 - DNA, 15 bp, Homo sapiens
gtttgcttcccagag

SEQ ID NO: 771381 - DNA, 15 bp, Homo sapiens
tttgcttcccagaga

SEQ ID NO: 771382 - DNA, 15 bp, Homo sapiens
ttgcttcccagagat

SEQ ID NO: 771383 - DNA, 15 bp, Homo sapiens
tgcttcccagagatg

SEQ ID NO: 771384 - DNA, 15 bp, Homo sapiens
gcttcccagagatgt

SEQ ID NO: 771385 - DNA, 15 bp, Homo sapiens
cttcccagagatgtg

SEQ ID NO: 771386 - DNA, 15 bp, Homo sapiens
ttcccagagatgtgt

SEQ ID NO: 771387 - DNA, 15 bp, Homo sapiens
tcccagagatgtgtc

SEQ ID NO: 771388 - DNA, 15 bp, Homo sapiens
cccagagatgtgtct

SEQ ID NO: 771389 - DNA, 15 bp, Homo sapiens
ccagagatgtgtctg

SEQ ID NO: 771390 - DNA, 15 bp, Homo sapiens
cagagatgtgtctgt

SEQ ID NO: 771391 - DNA, 15 bp, Homo sapiens
agagatgtgtctgta

SEQ ID NO: 771392 - DNA, 15 bp, Homo sapiens
gagatgtgtctgtag

SEQ ID NO: 771393 - DNA, 15 bp, Homo sapiens
agatgtgtctgtagg

SEQ ID NO: 771394 - DNA, 15 bp, Homo sapiens
gatgtgtctgtagga

SEQ ID NO: 771395 - DNA, 15 bp, Homo sapiens
atgtgtctgtaggag

SEQ ID NO: 771396 - DNA, 15 bp, Homo sapiens
tgtgtctgtaggaga

SEQ ID NO: 771397 - DNA, 15 bp, Homo sapiens
gtgtctgtaggagag

SEQ ID NO: 771398 - DNA, 15 bp, Homo sapiens
tgtctgtaggagagg

SEQ ID NO: 771399 - DNA, 15 bp, Homo sapiens
gtctgtaggagagga

SEQ ID NO: 771400 - DNA, 15 bp, Homo sapiens
tctgtaggagaggat

SEQ ID NO: 771401 - DNA, 15 bp, Homo sapiens
ctgtaggagaggatt

SEQ ID NO: 771402 - DNA, 15 bp, Homo sapiens
tgtaggagaggattc

SEQ ID NO: 771403 - DNA, 15 bp, Homo sapiens
gtaggagaggattca

SEQ ID NO: 771404 - DNA, 15 bp, Homo sapiens
taggagaggattcac

SEQ ID NO: 771405 - DNA, 15 bp, Homo sapiens
aggagaggattcacc

SEQ ID NO: 771406 - DNA, 15 bp, Homo sapiens
ggagaggattcacct

SEQ ID NO: 771407 - DNA, 15 bp, Homo sapiens
gagaggattcacctg

SEQ ID NO: 771408 - DNA, 15 bp, Homo sapiens
agaggattcacctgc

SEQ ID NO: 771409 - DNA, 15 bp, Homo sapiens
gaggattcacctgca

SEQ ID NO: 771410 - DNA, 15 bp, Homo sapiens
aggattcacctgcaa

SEQ ID NO: 771411 - DNA, 15 bp, Homo sapiens
ggattcacctgcaaa

SEQ ID NO: 771412 - DNA, 15 bp, Homo sapiens
gattcacctgcaaaa

SEQ ID NO: 771413 - DNA, 15 bp, Homo sapiens
attcacctgcaaaaa

SEQ ID NO: 771414 - DNA, 15 bp, Homo sapiens
ttcacctgcaaaaat

SEQ ID NO: 771415 - DNA, 15 bp, Homo sapiens
tcacctgcaaaaatt

SEQ ID NO: 771416 - DNA, 15 bp, Homo sapiens
cacctgcaaaaattt

SEQ ID NO: 771417 - DNA, 15 bp, Homo sapiens
acctgcaaaaatttt

SEQ ID NO: 771418 - DNA, 15 bp, Homo sapiens
cctgcaaaaatttta

SEQ ID NO: 771419 - DNA, 15 bp, Homo sapiens
ctgcaaaaattttaa

SEQ ID NO: 771420 - DNA, 15 bp, Homo sapiens
tgcaaaaattttaag

SEQ ID NO: 771421 - DNA, 15 bp, Homo sapiens
gcaaaaattttaaga

SEQ ID NO: 771422 - DNA, 15 bp, Homo sapiens
caaaaattttaagag

SEQ ID NO: 771423 - DNA, 15 bp, Homo sapiens
aaaaattttaagagt

SEQ ID NO: 771424 - DNA, 15 bp, Homo sapiens
aaaattttaagagtt

SEQ ID NO: 771425 - DNA, 15 bp, Homo sapiens
aaattttaagagttt

SEQ ID NO: 771426 - DNA, 15 bp, Homo sapiens
aattttaagagtttc

SEQ ID NO: 771427 - DNA, 15 bp, Homo sapiens
attttaagagtttcc

SEQ ID NO: 771428 - DNA, 15 bp, Homo sapiens
ttttaagagtttccc

SEQ ID NO: 771429 - DNA, 15 bp, Homo sapiens
tttaagagtttcccg

SEQ ID NO: 771430 - DNA, 15 bp, Homo sapiens
ttaagagtttcccgg

SEQ ID NO: 771431 - DNA, 15 bp, Homo sapiens
taagagtttcccggg

SEQ ID NO: 771432 - DNA, 15 bp, Homo sapiens
aagagtttcccggga

SEQ ID NO: 771433 - DNA, 15 bp, Homo sapiens
agagtttcccgggaa

SEQ ID NO: 771434 - DNA, 15 bp, Homo sapiens
gagtttcccgggaag

SEQ ID NO: 771435 - DNA, 15 bp, Homo sapiens
agtttcccgggaagt

SEQ ID NO: 771436 - DNA, 15 bp, Homo sapiens
gtttcccgggaagtg

SEQ ID NO: 771437 - DNA, 15 bp, Homo sapiens
tttcccgggaagtgc

SEQ ID NO: 771438 - DNA, 15 bp, Homo sapiens
ttcccgggaagtgcg

SEQ ID NO: 771439 - DNA, 15 bp, Homo sapiens
tcccgggaagtgcgt

SEQ ID NO: 771440 - DNA, 15 bp, Homo sapiens
cccgggaagtgcgtg

SEQ ID NO: 771441 - DNA, 15 bp, Homo sapiens
ccgggaagtgcgtgc

SEQ ID NO: 771442 - DNA, 15 bp, Homo sapiens
cgggaagtgcgtgcc

SEQ ID NO: 771443 - DNA, 15 bp, Homo sapiens
gggaagtgcgtgcca

SEQ ID NO: 771444 - DNA, 15 bp, Homo sapiens
ggaagtgcgtgccat

SEQ ID NO: 771445 - DNA, 15 bp, Homo sapiens
gaagtgcgtgccatg

SEQ ID NO: 771446 - DNA, 15 bp, Homo sapiens
aagtgcgtgccatgg

SEQ ID NO: 771447 - DNA, 15 bp, Homo sapiens
agtgcgtgccatgga

SEQ ID NO: 771448 - DNA, 15 bp, Homo sapiens
gtgcgtgccatggaa

SEQ ID NO: 771449 - DNA, 15 bp, Homo sapiens
tgcgtgccatggaac

SEQ ID NO: 771450 - DNA, 15 bp, Homo sapiens
gcgtgccatggaaca

SEQ ID NO: 771451 - DNA, 15 bp, Homo sapiens
cgtgccatggaacag

SEQ ID NO: 771452 - DNA, 15 bp, Homo sapiens
gtgccatggaacagg

SEQ ID NO: 771453 - DNA, 15 bp, Homo sapiens
tgccatggaacagga

SEQ ID NO: 771454 - DNA, 15 bp, Homo sapiens
gccatggaacaggag

SEQ ID NO: 771455 - DNA, 15 bp, Homo sapiens
ccatggaacaggagt

SEQ ID NO: 771456 - DNA, 15 bp, Homo sapiens
catggaacaggagtt

SEQ ID NO: 771457 - DNA, 15 bp, Homo sapiens
atggaacaggagttg

SEQ ID NO: 771458 - DNA, 15 bp, Homo sapiens
tggaacaggagttga

SEQ ID NO: 771459 - DNA, 15 bp, Homo sapiens
ggaacaggagttgat

SEQ ID NO: 771460 - DNA, 15 bp, Homo sapiens
gaacaggagttgatg

SEQ ID NO: 771461 - DNA, 15 bp, Homo sapiens
aacaggagttgatgg

SEQ ID NO: 771462 - DNA, 15 bp, Homo sapiens
acaggagttgatgga

SEQ ID NO: 771463 - DNA, 15 bp, Homo sapiens
caggagttgatggat

SEQ ID NO: 771464 - DNA, 15 bp, Homo sapiens
aggagttgatggatc

SEQ ID NO: 771465 - DNA, 15 bp, Homo sapiens
ggagttgatggatcc

SEQ ID NO: 771466 - DNA, 15 bp, Homo sapiens
gagttgatggatccc

SEQ ID NO: 771467 - DNA, 15 bp, Homo sapiens
agttgatggatcccc

SEQ ID NO: 771468 - DNA, 15 bp, Homo sapiens
gttgatggatcccca

SEQ ID NO: 771469 - DNA, 15 bp, Homo sapiens
ttgatggatccccac

SEQ ID NO: 771470 - DNA, 15 bp, Homo sapiens
tgatggatccccact

SEQ ID NO: 771471 - DNA, 15 bp, Homo sapiens
gatggatccccactg

SEQ ID NO: 771472 - DNA, 15 bp, Homo sapiens
atggatccccactgt

SEQ ID NO: 771473 - DNA, 15 bp, Homo sapiens
tggatccccactgtg

SEQ ID NO: 771474 - DNA, 15 bp, Homo sapiens
ggatccccactgtgt

SEQ ID NO: 771475 - DNA, 15 bp, Homo sapiens
gatccccactgtgtt

SEQ ID NO: 771476 - DNA, 15 bp, Homo sapiens
atccccactgtgttc

SEQ ID NO: 771477 - DNA, 15 bp, Homo sapiens
tccccactgtgttct

SEQ ID NO: 771478 - DNA, 15 bp, Homo sapiens
ccccactgtgttctc

SEQ ID NO: 771479 - DNA, 15 bp, Homo sapiens
cccactgtgttctct

SEQ ID NO: 771480 - DNA, 15 bp, Homo sapiens
ccactgtgttctcta

SEQ ID NO: 771481 - DNA, 15 bp, Homo sapiens
cactgtgttctctac

SEQ ID NO: 771482 - DNA, 15 bp, Homo sapiens
actgtgttctctaca

SEQ ID NO: 771483 - DNA, 15 bp, Homo sapiens
ctgtgttctctacag

SEQ ID NO: 771484 - DNA, 15 bp, Homo sapiens
tgtgttctctacagg

SEQ ID NO: 771485 - DNA, 15 bp, Homo sapiens
gtgttctctacaggc

SEQ ID NO: 771486 - DNA, 15 bp, Homo sapiens
tgttctctacaggcc

SEQ ID NO: 771487 - DNA, 15 bp, Homo sapiens
gttctctacaggcca

SEQ ID NO: 771488 - DNA, 15 bp, Homo sapiens
ttctctacaggccat

SEQ ID NO: 771489 - DNA, 15 bp, Homo sapiens
tctctacaggccatc

SEQ ID NO: 771490 - DNA, 15 bp, Homo sapiens
ctctacaggccatcg

SEQ ID NO: 771491 - DNA, 15 bp, Homo sapiens
tctacaggccatcgt

SEQ ID NO: 771492 - DNA, 15 bp, Homo sapiens
ctacaggccatcgta

SEQ ID NO: 771493 - DNA, 15 bp, Homo sapiens
tacaggccatcgtat

SEQ ID NO: 771494 - DNA, 15 bp, Homo sapiens
acaggccatcgtata

SEQ ID NO: 771495 - DNA, 15 bp, Homo sapiens
caggccatcgtatat

SEQ ID NO: 771496 - DNA, 15 bp, Homo sapiens
aggccatcgtatatt

SEQ ID NO: 771497 - DNA, 15 bp, Homo sapiens
ggccatcgtatattg

SEQ ID NO: 771498 - DNA, 15 bp, Homo sapiens
gccatcgtatattga

SEQ ID NO: 771499 - DNA, 15 bp, Homo sapiens
ccatcgtatattgaa

SEQ ID NO: 771500 - DNA, 15 bp, Homo sapiens
catcgtatattgaag

SEQ ID NO: 771501 - DNA, 15 bp, Homo sapiens
atcgtatattgaagc

SEQ ID NO: 771502 - DNA, 15 bp, Homo sapiens
tcgtatattgaagca

SEQ ID NO: 771503 - DNA, 15 bp, Homo sapiens
cgtatattgaagcag

SEQ ID NO: 771504 - DNA, 15 bp, Homo sapiens
gtatattgaagcagc

SEQ ID NO: 771505 - DNA, 15 bp, Homo sapiens
tatattgaagcagct

SEQ ID NO: 771506 - DNA, 15 bp, Homo sapiens
atattgaagcagctt

SEQ ID NO: 771507 - DNA, 15 bp, Homo sapiens
tattgaagcagctta

SEQ ID NO: 771508 - DNA, 15 bp, Homo sapiens
attgaagcagcttaa

SEQ ID NO: 771509 - DNA, 15 bp, Homo sapiens
ttgaagcagcttaat

SEQ ID NO: 771510 - DNA, 15 bp, Homo sapiens
tgaagcagcttaatt

SEQ ID NO: 771511 - DNA, 15 bp, Homo sapiens
gaagcagcttaattt

SEQ ID NO: 771512 - DNA, 15 bp, Homo sapiens
aagcagcttaattta

SEQ ID NO: 771513 - DNA, 15 bp, Homo sapiens
agcagcttaatttat

SEQ ID NO: 771514 - DNA, 15 bp, Homo sapiens
gcagcttaatttatc

SEQ ID NO: 771515 - DNA, 15 bp, Homo sapiens
cagcttaatttatcc

SEQ ID NO: 771516 - DNA, 15 bp, Homo sapiens
agcttaatttatcct

SEQ ID NO: 771517 - DNA, 15 bp, Homo sapiens
gcttaatttatcctc

SEQ ID NO: 771518 - DNA, 15 bp, Homo sapiens
cttaatttatcctca

SEQ ID NO: 771519 - DNA, 15 bp, Homo sapiens
ttaatttatcctcat

SEQ ID NO: 771520 - DNA, 15 bp, Homo sapiens
taatttatcctcatt

SEQ ID NO: 771521 - DNA, 15 bp, Homo sapiens
aatttatcctcatta

SEQ ID NO: 771522 - DNA, 15 bp, Homo sapiens
atttatcctcattaa

SEQ ID NO: 771523 - DNA, 15 bp, Homo sapiens
tttatcctcattaaa

SEQ ID NO: 771524 - DNA, 15 bp, Homo sapiens
ttatcctcattaaaa

SEQ ID NO: 771525 - DNA, 15 bp, Homo sapiens
tatcctcattaaaac

SEQ ID NO: 771526 - DNA, 15 bp, Homo sapiens
atcctcattaaaaca

SEQ ID NO: 771527 - DNA, 15 bp, Homo sapiens
tcctcattaaaacaa

SEQ ID NO: 771528 - DNA, 15 bp, Homo sapiens
cctcattaaaacaaa

SEQ ID NO: 771529 - DNA, 15 bp, Homo sapiens
ctcattaaaacaaaa

SEQ ID NO: 771530 - DNA, 15 bp, Homo sapiens
tcattaaaacaaaac

SEQ ID NO: 771531 - DNA, 15 bp, Homo sapiens
cattaaaacaaaaca

SEQ ID NO: 771532 - DNA, 15 bp, Homo sapiens
attaaaacaaaacac

SEQ ID NO: 771533 - DNA, 15 bp, Homo sapiens
ttaaaacaaaacaca

SEQ ID NO: 771534 - DNA, 15 bp, Homo sapiens
taaaacaaaacacac

SEQ ID NO: 771535 - DNA, 15 bp, Homo sapiens
aaaacaaaacacacc

SEQ ID NO: 771536 - DNA, 15 bp, Homo sapiens
aaacaaaacacacct

SEQ ID NO: 771537 - DNA, 15 bp, Homo sapiens
aacaaaacacacctt

SEQ ID NO: 771538 - DNA, 15 bp, Homo sapiens
acaaaacacaccttg

SEQ ID NO: 771539 - DNA, 15 bp, Homo sapiens
caaaacacaccttga

SEQ ID NO: 771540 - DNA, 15 bp, Homo sapiens
aaaacacaccttgac

SEQ ID NO: 771541 - DNA, 15 bp, Homo sapiens
aaacacaccttgacc

SEQ ID NO: 771542 - DNA, 15 bp, Homo sapiens
aacacaccttgacct

SEQ ID NO: 771543 - DNA, 15 bp, Homo sapiens
acacaccttgacctt

SEQ ID NO: 771544 - DNA, 15 bp, Homo sapiens
cacaccttgacctta

SEQ ID NO: 771545 - DNA, 15 bp, Homo sapiens
acaccttgaccttaa

SEQ ID NO: 771546 - DNA, 15 bp, Homo sapiens
caccttgaccttaaa

SEQ ID NO: 771547 - DNA, 15 bp, Homo sapiens
accttgaccttaaag

SEQ ID NO: 771548 - DNA, 15 bp, Homo sapiens
ccttgaccttaaagg

SEQ ID NO: 771549 - DNA, 15 bp, Homo sapiens
cttgaccttaaaggg

SEQ ID NO: 771550 - DNA, 15 bp, Homo sapiens
ttgaccttaaagggg

SEQ ID NO: 771551 - DNA, 15 bp, Homo sapiens
tgaccttaaaggggg

SEQ ID NO: 771552 - DNA, 15 bp, Homo sapiens
gaccttaaaggggga

SEQ ID NO: 771553 - DNA, 15 bp, Homo sapiens
accttaaagggggaa

SEQ ID NO: 771554 - DNA, 15 bp, Homo sapiens
ccttaaagggggaaa

SEQ ID NO: 771555 - DNA, 15 bp, Homo sapiens
cttaaagggggaaaa

SEQ ID NO: 771556 - DNA, 15 bp, Homo sapiens
ttaaagggggaaaaa

SEQ ID NO: 771557 - DNA, 15 bp, Homo sapiens
taaagggggaaaaat

SEQ ID NO: 771558 - DNA, 15 bp, Homo sapiens
aaagggggaaaaatg

SEQ ID NO: 771559 - DNA, 15 bp, Homo sapiens
aagggggaaaaatga

SEQ ID NO: 771560 - DNA, 15 bp, Homo sapiens
agggggaaaaatgac

SEQ ID NO: 771561 - DNA, 15 bp, Homo sapiens
gggggaaaaatgact

SEQ ID NO: 771562 - DNA, 15 bp, Homo sapiens
ggggaaaaatgacta

SEQ ID NO: 771563 - DNA, 15 bp, Homo sapiens
gggaaaaatgactaa

SEQ ID NO: 771564 - DNA, 15 bp, Homo sapiens
ggaaaaatgactaat

SEQ ID NO: 771565 - DNA, 15 bp, Homo sapiens
gaaaaatgactaatc

SEQ ID NO: 771566 - DNA, 15 bp, Homo sapiens
aaaaatgactaatct

SEQ ID NO: 771567 - DNA, 15 bp, Homo sapiens
aaaatgactaatctc

SEQ ID NO: 771568 - DNA, 15 bp, Homo sapiens
aaatgactaatctca

SEQ ID NO: 771569 - DNA, 15 bp, Homo sapiens
aatgactaatctcat

SEQ ID NO: 771570 - DNA, 15 bp, Homo sapiens
atgactaatctcatt

SEQ ID NO: 771571 - DNA, 15 bp, Homo sapiens
tgactaatctcattg

SEQ ID NO: 771572 - DNA, 15 bp, Homo sapiens
gactaatctcattgt

SEQ ID NO: 771573 - DNA, 15 bp, Homo sapiens
actaatctcattgtg

SEQ ID NO: 771574 - DNA, 15 bp, Homo sapiens
ctaatctcattgtgt

SEQ ID NO: 771575 - DNA, 15 bp, Homo sapiens
taatctcattgtgta

SEQ ID NO: 771576 - DNA, 15 bp, Homo sapiens
aatctcattgtgtat

SEQ ID NO: 771577 - DNA, 15 bp, Homo sapiens
atctcattgtgtata

SEQ ID NO: 771578 - DNA, 15 bp, Homo sapiens
tctcattgtgtatat

SEQ ID NO: 771579 - DNA, 15 bp, Homo sapiens
ctcattgtgtatatt

SEQ ID NO: 771580 - DNA, 15 bp, Homo sapiens
tcattgtgtatattg

SEQ ID NO: 771581 - DNA, 15 bp, Homo sapiens
cattgtgtatattgt

SEQ ID NO: 771582 - DNA, 15 bp, Homo sapiens
attgtgtatattgtt

SEQ ID NO: 771583 - DNA, 15 bp, Homo sapiens
ttgtgtatattgttt

SEQ ID NO: 771584 - DNA, 15 bp, Homo sapiens
tgtgtatattgtttt

SEQ ID NO: 771585 - DNA, 15 bp, Homo sapiens
gtgtatattgttttc

SEQ ID NO: 771586 - DNA, 15 bp, Homo sapiens
tgtatattgttttcc

SEQ ID NO: 771587 - DNA, 15 bp, Homo sapiens
gtatattgttttcct

SEQ ID NO: 771588 - DNA, 15 bp, Homo sapiens
tatattgttttcctt

SEQ ID NO: 771589 - DNA, 15 bp, Homo sapiens
atattgttttccttt

SEQ ID NO: 771590 - DNA, 15 bp, Homo sapiens
tattgttttcctttg

SEQ ID NO: 771591 - DNA, 15 bp, Homo sapiens
attgttttcctttgg

SEQ ID NO: 771592 - DNA, 15 bp, Homo sapiens
ttgttttcctttggg

SEQ ID NO: 771593 - DNA, 15 bp, Homo sapiens
tgttttcctttgggt

SEQ ID NO: 771594 - DNA, 15 bp, Homo sapiens
gttttcctttgggtg

SEQ ID NO: 771595 - DNA, 15 bp, Homo sapiens
ttttcctttgggtgt

SEQ ID NO: 771596 - DNA, 15 bp, Homo sapiens
tttcctttgggtgta

SEQ ID NO: 771597 - DNA, 15 bp, Homo sapiens
ttcctttgggtgtat

SEQ ID NO: 771598 - DNA, 15 bp, Homo sapiens
tcctttgggtgtatc

SEQ ID NO: 771599 - DNA, 15 bp, Homo sapiens
cctttgggtgtatct

SEQ ID NO: 771600 - DNA, 15 bp, Homo sapiens
ctttgggtgtatctc

SEQ ID NO: 771601 - DNA, 15 bp, Homo sapiens
tttgggtgtatctct

SEQ ID NO: 771602 - DNA, 15 bp, Homo sapiens
ttgggtgtatctctt

SEQ ID NO: 771603 - DNA, 15 bp, Homo sapiens
tgggtgtatctctta

SEQ ID NO: 771604 - DNA, 15 bp, Homo sapiens
gggtgtatctcttaa

SEQ ID NO: 771605 - DNA, 15 bp, Homo sapiens
ggtgtatctcttaaa

SEQ ID NO: 771606 - DNA, 15 bp, Homo sapiens
gtgtatctcttaaac

SEQ ID NO: 771607 - DNA, 15 bp, Homo sapiens
tgtatctcttaaact

SEQ ID NO: 771608 - DNA, 15 bp, Homo sapiens
gtatctcttaaactg

SEQ ID NO: 771609 - DNA, 15 bp, Homo sapiens
tatctcttaaactgt

SEQ ID NO: 771610 - DNA, 15 bp, Homo sapiens
atctcttaaactgtc

SEQ ID NO: 771611 - DNA, 15 bp, Homo sapiens
tctcttaaactgtct

SEQ ID NO: 771612 - DNA, 15 bp, Homo sapiens
ctcttaaactgtcta

SEQ ID NO: 771613 - DNA, 15 bp, Homo sapiens
tcttaaactgtctaa

SEQ ID NO: 771614 - DNA, 15 bp, Homo sapiens
cttaaactgtctaac

SEQ ID NO: 771615 - DNA, 15 bp, Homo sapiens
ttaaactgtctaaca

SEQ ID NO: 771616 - DNA, 15 bp, Homo sapiens
taaactgtctaacac

SEQ ID NO: 771617 - DNA, 15 bp, Homo sapiens
aaactgtctaacact

SEQ ID NO: 771618 - DNA, 15 bp, Homo sapiens
aactgtctaacactt

SEQ ID NO: 771619 - DNA, 15 bp, Homo sapiens
actgtctaacactta

SEQ ID NO: 771620 - DNA, 15 bp, Homo sapiens
ctgtctaacacttat

SEQ ID NO: 771621 - DNA, 15 bp, Homo sapiens
tgtctaacacttata

SEQ ID NO: 771622 - DNA, 15 bp, Homo sapiens
gtctaacacttataa

SEQ ID NO: 771623 - DNA, 15 bp, Homo sapiens
tctaacacttataag

SEQ ID NO: 771624 - DNA, 15 bp, Homo sapiens
ctaacacttataagc

SEQ ID NO: 771625 - DNA, 15 bp, Homo sapiens
taacacttataagca

SEQ ID NO: 771626 - DNA, 15 bp, Homo sapiens
aacacttataagcac

SEQ ID NO: 771627 - DNA, 15 bp, Homo sapiens
acacttataagcaca

SEQ ID NO: 771628 - DNA, 15 bp, Homo sapiens
cacttataagcacac

SEQ ID NO: 771629 - DNA, 15 bp, Homo sapiens
acttataagcacact

SEQ ID NO: 771630 - DNA, 15 bp, Homo sapiens
cttataagcacactg

SEQ ID NO: 771631 - DNA, 15 bp, Homo sapiens
ttataagcacactgc

SEQ ID NO: 771632 - DNA, 15 bp, Homo sapiens
tataagcacactgcc

SEQ ID NO: 771633 - DNA, 15 bp, Homo sapiens
ataagcacactgcct

SEQ ID NO: 771634 - DNA, 15 bp, Homo sapiens
taagcacactgcctg

SEQ ID NO: 771635 - DNA, 15 bp, Homo sapiens
aagcacactgcctgc

SEQ ID NO: 771636 - DNA, 15 bp, Homo sapiens
agcacactgcctgca

SEQ ID NO: 771637 - DNA, 15 bp, Homo sapiens
gcacactgcctgcaa

SEQ ID NO: 771638 - DNA, 15 bp, Homo sapiens
cacactgcctgcaac

SEQ ID NO: 771639 - DNA, 15 bp, Homo sapiens
acactgcctgcaact

SEQ ID NO: 771640 - DNA, 15 bp, Homo sapiens
cactgcctgcaactc

SEQ ID NO: 771641 - DNA, 15 bp, Homo sapiens
actgcctgcaactct

SEQ ID NO: 771642 - DNA, 15 bp, Homo sapiens
ctgcctgcaactctg

SEQ ID NO: 771643 - DNA, 15 bp, Homo sapiens
tgcctgcaactctgc

SEQ ID NO: 771644 - DNA, 15 bp, Homo sapiens
gcctgcaactctgca

SEQ ID NO: 771645 - DNA, 15 bp, Homo sapiens
cctgcaactctgcag

SEQ ID NO: 771646 - DNA, 15 bp, Homo sapiens
ctgcaactctgcagt

SEQ ID NO: 771647 - DNA, 15 bp, Homo sapiens
tgcaactctgcagtc

SEQ ID NO: 771648 - DNA, 15 bp, Homo sapiens
gcaactctgcagtca

SEQ ID NO: 771649 - DNA, 15 bp, Homo sapiens
caactctgcagtcac

SEQ ID NO: 771650 - DNA, 15 bp, Homo sapiens
aactctgcagtcact

SEQ ID NO: 771651 - DNA, 15 bp, Homo sapiens
actctgcagtcactt

SEQ ID NO: 771652 - DNA, 15 bp, Homo sapiens
ctctgcagtcacttt

SEQ ID NO: 771653 - DNA, 15 bp, Homo sapiens
tctgcagtcactttc

SEQ ID NO: 771654 - DNA, 15 bp, Homo sapiens
ctgcagtcactttca

SEQ ID NO: 771655 - DNA, 15 bp, Homo sapiens
tgcagtcactttcac

SEQ ID NO: 771656 - DNA, 15 bp, Homo sapiens
gcagtcactttcaca

SEQ ID NO: 771657 - DNA, 15 bp, Homo sapiens
cagtcactttcacat

SEQ ID NO: 771658 - DNA, 15 bp, Homo sapiens
agtcactttcacata

SEQ ID NO: 771659 - DNA, 15 bp, Homo sapiens
gtcactttcacatat

SEQ ID NO: 771660 - DNA, 15 bp, Homo sapiens
tcactttcacatata

SEQ ID NO: 771661 - DNA, 15 bp, Homo sapiens
cactttcacatatat

SEQ ID NO: 771662 - DNA, 15 bp, Homo sapiens
actttcacatatatt

SEQ ID NO: 771663 - DNA, 15 bp, Homo sapiens
ctttcacatatatta

SEQ ID NO: 771664 - DNA, 15 bp, Homo sapiens
tttcacatatattaa

SEQ ID NO: 771665 - DNA, 15 bp, Homo sapiens
ttcacatatattaag

SEQ ID NO: 771666 - DNA, 15 bp, Homo sapiens
tcacatatattaaga

SEQ ID NO: 771667 - DNA, 15 bp, Homo sapiens
cacatatattaagac

SEQ ID NO: 771668 - DNA, 15 bp, Homo sapiens
acatatattaagaca

SEQ ID NO: 771669 - DNA, 15 bp, Homo sapiens
catatattaagacag

SEQ ID NO: 771670 - DNA, 15 bp, Homo sapiens
atatattaagacagt

SEQ ID NO: 771671 - DNA, 15 bp, Homo sapiens
tatattaagacagtt

SEQ ID NO: 771672 - DNA, 15 bp, Homo sapiens
atattaagacagtta

SEQ ID NO: 771673 - DNA, 15 bp, Homo sapiens
tattaagacagttaa

SEQ ID NO: 771674 - DNA, 15 bp, Homo sapiens
attaagacagttaag

SEQ ID NO: 771675 - DNA, 15 bp, Homo sapiens
ttaagacagttaagt

SEQ ID NO: 771676 - DNA, 15 bp, Homo sapiens
taagacagttaagtc

SEQ ID NO: 771677 - DNA, 15 bp, Homo sapiens
aagacagttaagtct

SEQ ID NO: 771678 - DNA, 15 bp, Homo sapiens
agacagttaagtctt

SEQ ID NO: 771679 - DNA, 15 bp, Homo sapiens
gacagttaagtctta

SEQ ID NO: 771680 - DNA, 15 bp, Homo sapiens
acagttaagtcttag

SEQ ID NO: 771681 - DNA, 15 bp, Homo sapiens
cagttaagtcttaga

SEQ ID NO: 771682 - DNA, 15 bp, Homo sapiens
agttaagtcttagag

SEQ ID NO: 771683 - DNA, 15 bp, Homo sapiens
gttaagtcttagagt

SEQ ID NO: 771684 - DNA, 15 bp, Homo sapiens
ttaagtcttagagta

SEQ ID NO: 771685 - DNA, 15 bp, Homo sapiens
taagtcttagagtaa

SEQ ID NO: 771686 - DNA, 15 bp, Homo sapiens
aagtcttagagtaac

SEQ ID NO: 771687 - DNA, 15 bp, Homo sapiens
agtcttagagtaacc

SEQ ID NO: 771688 - DNA, 15 bp, Homo sapiens
gtcttagagtaacct

SEQ ID NO: 771689 - DNA, 15 bp, Homo sapiens
tcttagagtaacctt

SEQ ID NO: 771690 - DNA, 15 bp, Homo sapiens
cttagagtaaccttt

SEQ ID NO: 771691 - DNA, 15 bp, Homo sapiens
ttagagtaacctttg

SEQ ID NO: 771692 - DNA, 15 bp, Homo sapiens
tagagtaacctttga

SEQ ID NO: 771693 - DNA, 15 bp, Homo sapiens
agagtaacctttgag

SEQ ID NO: 771694 - DNA, 15 bp, Homo sapiens
gagtaacctttgagg

SEQ ID NO: 771695 - DNA, 15 bp, Homo sapiens
agtaacctttgagga

SEQ ID NO: 771696 - DNA, 15 bp, Homo sapiens
gtaacctttgaggaa

SEQ ID NO: 771697 - DNA, 15 bp, Homo sapiens
taacctttgaggaaa

SEQ ID NO: 771698 - DNA, 15 bp, Homo sapiens
aacctttgaggaaaa

SEQ ID NO: 771699 - DNA, 15 bp, Homo sapiens
acctttgaggaaaag

SEQ ID NO: 771700 - DNA, 15 bp, Homo sapiens
cctttgaggaaaagg

SEQ ID NO: 771701 - DNA, 15 bp, Homo sapiens
ctttgaggaaaaggt

SEQ ID NO: 771702 - DNA, 15 bp, Homo sapiens
tttgaggaaaaggta

SEQ ID NO: 771703 - DNA, 15 bp, Homo sapiens
ttgaggaaaaggtat

SEQ ID NO: 771704 - DNA, 15 bp, Homo sapiens
tgaggaaaaggtatt

SEQ ID NO: 771705 - DNA, 15 bp, Homo sapiens
gaggaaaaggtatta

SEQ ID NO: 771706 - DNA, 15 bp, Homo sapiens
aggaaaaggtattat

SEQ ID NO: 771707 - DNA, 15 bp, Homo sapiens
ggaaaaggtattatt

SEQ ID NO: 771708 - DNA, 15 bp, Homo sapiens
gaaaaggtattattc

SEQ ID NO: 771709 - DNA, 15 bp, Homo sapiens
aaaaggtattattct

SEQ ID NO: 771710 - DNA, 15 bp, Homo sapiens
aaaggtattattcta

SEQ ID NO: 771711 - DNA, 15 bp, Homo sapiens
aaggtattattctaa

SEQ ID NO: 771712 - DNA, 15 bp, Homo sapiens
aggtattattctaac

SEQ ID NO: 771713 - DNA, 15 bp, Homo sapiens
ggtattattctaact

SEQ ID NO: 771714 - DNA, 15 bp, Homo sapiens
gtattattctaacta

SEQ ID NO: 771715 - DNA, 15 bp, Homo sapiens
tattattctaactat

SEQ ID NO: 771716 - DNA, 15 bp, Homo sapiens
attattctaactata

SEQ ID NO: 771717 - DNA, 15 bp, Homo sapiens
ttattctaactatac

SEQ ID NO: 771718 - DNA, 15 bp, Homo sapiens
tattctaactatact

SEQ ID NO: 771719 - DNA, 15 bp, Homo sapiens
attctaactatactg

SEQ ID NO: 771720 - DNA, 15 bp, Homo sapiens
ttctaactatactga

SEQ ID NO: 771721 - DNA, 15 bp, Homo sapiens
tctaactatactgat

SEQ ID NO: 771722 - DNA, 15 bp, Homo sapiens
ctaactatactgata

SEQ ID NO: 771723 - DNA, 15 bp, Homo sapiens
taactatactgataa

SEQ ID NO: 771724 - DNA, 15 bp, Homo sapiens
aactatactgataaa

SEQ ID NO: 771725 - DNA, 15 bp, Homo sapiens
actatactgataaag

SEQ ID NO: 771726 - DNA, 15 bp, Homo sapiens
ctatactgataaaga

SEQ ID NO: 771727 - DNA, 15 bp, Homo sapiens
tatactgataaagaa

SEQ ID NO: 771728 - DNA, 15 bp, Homo sapiens
atactgataaagaac

SEQ ID NO: 771729 - DNA, 15 bp, Homo sapiens
tactgataaagaact

SEQ ID NO: 771730 - DNA, 15 bp, Homo sapiens
actgataaagaactg

SEQ ID NO: 771731 - DNA, 15 bp, Homo sapiens
ctgataaagaactga

SEQ ID NO: 771732 - DNA, 15 bp, Homo sapiens
tgataaagaactgag

SEQ ID NO: 771733 - DNA, 15 bp, Homo sapiens
gataaagaactgaga

SEQ ID NO: 771734 - DNA, 15 bp, Homo sapiens
ataaagaactgagac

SEQ ID NO: 771735 - DNA, 15 bp, Homo sapiens
taaagaactgagact

SEQ ID NO: 771736 - DNA, 15 bp, Homo sapiens
aaagaactgagactc

SEQ ID NO: 771737 - DNA, 15 bp, Homo sapiens
aagaactgagactca

SEQ ID NO: 771738 - DNA, 15 bp, Homo sapiens
agaactgagactcag

SEQ ID NO: 771739 - DNA, 15 bp, Homo sapiens
gaactgagactcagt

SEQ ID NO: 771740 - DNA, 15 bp, Homo sapiens
aactgagactcagtg

SEQ ID NO: 771741 - DNA, 15 bp, Homo sapiens
actgagactcagtga

SEQ ID NO: 771742 - DNA, 15 bp, Homo sapiens
ctgagactcagtgag

SEQ ID NO: 771743 - DNA, 15 bp, Homo sapiens
tgagactcagtgagg

SEQ ID NO: 771744 - DNA, 15 bp, Homo sapiens
gagactcagtgagga

SEQ ID NO: 771745 - DNA, 15 bp, Homo sapiens
agactcagtgaggaa

SEQ ID NO: 771746 - DNA, 15 bp, Homo sapiens
gactcagtgaggaag

SEQ ID NO: 771747 - DNA, 15 bp, Homo sapiens
actcagtgaggaagc

SEQ ID NO: 771748 - DNA, 15 bp, Homo sapiens
ctcagtgaggaagca

SEQ ID NO: 771749 - DNA, 15 bp, Homo sapiens
tcagtgaggaagcat

SEQ ID NO: 771750 - DNA, 15 bp, Homo sapiens
cagtgaggaagcatt

SEQ ID NO: 771751 - DNA, 15 bp, Homo sapiens
agtgaggaagcattt

SEQ ID NO: 771752 - DNA, 15 bp, Homo sapiens
gtgaggaagcatttg

SEQ ID NO: 771753 - DNA, 15 bp, Homo sapiens
tgaggaagcatttgc

SEQ ID NO: 771754 - DNA, 15 bp, Homo sapiens
gaggaagcatttgcc

SEQ ID NO: 771755 - DNA, 15 bp, Homo sapiens
aggaagcatttgcca

SEQ ID NO: 771756 - DNA, 15 bp, Homo sapiens
ggaagcatttgccaa

SEQ ID NO: 771757 - DNA, 15 bp, Homo sapiens
gaagcatttgccaag

SEQ ID NO: 771758 - DNA, 15 bp, Homo sapiens
aagcatttgccaaga

SEQ ID NO: 771759 - DNA, 15 bp, Homo sapiens
agcatttgccaagat

SEQ ID NO: 771760 - DNA, 15 bp, Homo sapiens
gcatttgccaagatt

SEQ ID NO: 771761 - DNA, 15 bp, Homo sapiens
catttgccaagattc

SEQ ID NO: 771762 - DNA, 15 bp, Homo sapiens
atttgccaagattct

SEQ ID NO: 771763 - DNA, 15 bp, Homo sapiens
tttgccaagattcta

SEQ ID NO: 771764 - DNA, 15 bp, Homo sapiens
ttgccaagattctat

SEQ ID NO: 771765 - DNA, 15 bp, Homo sapiens
tgccaagattctata

SEQ ID NO: 771766 - DNA, 15 bp, Homo sapiens
gccaagattctatag

SEQ ID NO: 771767 - DNA, 15 bp, Homo sapiens
ccaagattctatagc

SEQ ID NO: 771768 - DNA, 15 bp, Homo sapiens
caagattctatagca

SEQ ID NO: 771769 - DNA, 15 bp, Homo sapiens
aagattctatagcaa

SEQ ID NO: 771770 - DNA, 15 bp, Homo sapiens
agattctatagcaag

SEQ ID NO: 771771 - DNA, 15 bp, Homo sapiens
gattctatagcaagt

SEQ ID NO: 771772 - DNA, 15 bp, Homo sapiens
attctatagcaagtt

SEQ ID NO: 771773 - DNA, 15 bp, Homo sapiens
ttctatagcaagtta

SEQ ID NO: 771774 - DNA, 15 bp, Homo sapiens
tctatagcaagttat

SEQ ID NO: 771775 - DNA, 15 bp, Homo sapiens
ctatagcaagttatg

SEQ ID NO: 771776 - DNA, 15 bp, Homo sapiens
tatagcaagttatga

SEQ ID NO: 771777 - DNA, 15 bp, Homo sapiens
atagcaagttatgaa

SEQ ID NO: 771778 - DNA, 15 bp, Homo sapiens
tagcaagttatgaat

SEQ ID NO: 771779 - DNA, 15 bp, Homo sapiens
agcaagttatgaata

SEQ ID NO: 771780 - DNA, 15 bp, Homo sapiens
gcaagttatgaataa

SEQ ID NO: 771781 - DNA, 15 bp, Homo sapiens
caagttatgaataaa

SEQ ID NO: 771782 - DNA, 15 bp, Homo sapiens
aagttatgaataaaa

SEQ ID NO: 771783 - DNA, 15 bp, Homo sapiens
agttatgaataaaac

SEQ ID NO: 771784 - DNA, 15 bp, Homo sapiens
gttatgaataaaact

SEQ ID NO: 771785 - DNA, 15 bp, Homo sapiens
ttatgaataaaacta

SEQ ID NO: 771786 - DNA, 15 bp, Homo sapiens
tatgaataaaactag

SEQ ID NO: 771787 - DNA, 15 bp, Homo sapiens
atgaataaaactagg

SEQ ID NO: 771788 - DNA, 15 bp, Homo sapiens
tgaataaaactagga

SEQ ID NO: 771789 - DNA, 15 bp, Homo sapiens
gaataaaactaggaa

SEQ ID NO: 771790 - DNA, 15 bp, Homo sapiens
aataaaactaggaat

SEQ ID NO: 771791 - DNA, 15 bp, Homo sapiens
ataaaactaggaatt

SEQ ID NO: 771792 - DNA, 15 bp, Homo sapiens
taaaactaggaattt

SEQ ID NO: 771793 - DNA, 15 bp, Homo sapiens
aaaactaggaatttg

SEQ ID NO: 771794 - DNA, 15 bp, Homo sapiens
aaactaggaatttga

SEQ ID NO: 771795 - DNA, 15 bp, Homo sapiens
aactaggaatttgag

SEQ ID NO: 771796 - DNA, 15 bp, Homo sapiens
actaggaatttgagg

SEQ ID NO: 771797 - DNA, 15 bp, Homo sapiens
ctaggaatttgaggg

SEQ ID NO: 771798 - DNA, 15 bp, Homo sapiens
taggaatttgagggc

SEQ ID NO: 771799 - DNA, 15 bp, Homo sapiens
aggaatttgagggct

SEQ ID NO: 771800 - DNA, 15 bp, Homo sapiens
ggaatttgagggctt

SEQ ID NO: 771801 - DNA, 15 bp, Homo sapiens
gaatttgagggcttt

SEQ ID NO: 771802 - DNA, 15 bp, Homo sapiens
aatttgagggctttt

SEQ ID NO: 771803 - DNA, 15 bp, Homo sapiens
atttgagggcttttt

SEQ ID NO: 771804 - DNA, 15 bp, Homo sapiens
tttgagggctttttg

SEQ ID NO: 771805 - DNA, 15 bp, Homo sapiens
ttgagggctttttgg

SEQ ID NO: 771806 - DNA, 15 bp, Homo sapiens
tgagggctttttggt

SEQ ID NO: 771807 - DNA, 15 bp, Homo sapiens
gagggctttttggtt

SEQ ID NO: 771808 - DNA, 15 bp, Homo sapiens
agggctttttggttc

SEQ ID NO: 771809 - DNA, 15 bp, Homo sapiens
gggctttttggttca

SEQ ID NO: 771810 - DNA, 15 bp, Homo sapiens
ggctttttggttcaa

SEQ ID NO: 771811 - DNA, 15 bp, Homo sapiens
gctttttggttcaag

SEQ ID NO: 771812 - DNA, 15 bp, Homo sapiens
ctttttggttcaagt

SEQ ID NO: 771813 - DNA, 15 bp, Homo sapiens
tttttggttcaagtc

SEQ ID NO: 771814 - DNA, 15 bp, Homo sapiens
ttttggttcaagtct

SEQ ID NO: 771815 - DNA, 15 bp, Homo sapiens
tttggttcaagtctt

SEQ ID NO: 771816 - DNA, 15 bp, Homo sapiens
ttggttcaagtcttt

SEQ ID NO: 771817 - DNA, 15 bp, Homo sapiens
tggttcaagtctttt

SEQ ID NO: 771818 - DNA, 15 bp, Homo sapiens
ggttcaagtcttttt

SEQ ID NO: 771819 - DNA, 15 bp, Homo sapiens
gttcaagtctttttt

SEQ ID NO: 771820 - DNA, 15 bp, Homo sapiens
ttcaagtcttttttt

SEQ ID NO: 771821 - DNA, 15 bp, Homo sapiens
tcaagtctttttttt

SEQ ID NO: 771822 - DNA, 15 bp, Homo sapiens
caagtcttttttttt

SEQ ID NO: 771823 - DNA, 15 bp, Homo sapiens
aagtctttttttttt

SEQ ID NO: 771824 - DNA, 15 bp, Homo sapiens
gtctttttttttttt

SEQ ID NO: 771825 - DNA, 15 bp, Homo sapiens
tttttttttttttag

SEQ ID NO: 771826 - DNA, 15 bp, Homo sapiens
ttttttttttttaga

SEQ ID NO: 771827 - DNA, 15 bp, Homo sapiens
tttttttttttagac

SEQ ID NO: 771828 - DNA, 15 bp, Homo sapiens
ttttttttttagacg

SEQ ID NO: 771829 - DNA, 15 bp, Homo sapiens
tttttttttagacgg

SEQ ID NO: 771830 - DNA, 15 bp, Homo sapiens
ttttttttagacgga

SEQ ID NO: 771831 - DNA, 15 bp, Homo sapiens
tttttttagacggag

SEQ ID NO: 771832 - DNA, 15 bp, Homo sapiens
ttttttagacggagt

SEQ ID NO: 771833 - DNA, 15 bp, Homo sapiens
tttttagacggagtc

SEQ ID NO: 771834 - DNA, 15 bp, Homo sapiens
ttttagacggagtct

SEQ ID NO: 771835 - DNA, 15 bp, Homo sapiens
tttagacggagtctg

SEQ ID NO: 771836 - DNA, 15 bp, Homo sapiens
ttagacggagtctgg

SEQ ID NO: 771837 - DNA, 15 bp, Homo sapiens
tagacggagtctggc

SEQ ID NO: 771838 - DNA, 15 bp, Homo sapiens
agacggagtctggca

SEQ ID NO: 771839 - DNA, 15 bp, Homo sapiens
gacggagtctggcac

SEQ ID NO: 771840 - DNA, 15 bp, Homo sapiens
acggagtctggcact

SEQ ID NO: 771841 - DNA, 15 bp, Homo sapiens
cggagtctggcacta

SEQ ID NO: 771842 - DNA, 15 bp, Homo sapiens
ggagtctggcactat

SEQ ID NO: 771843 - DNA, 15 bp, Homo sapiens
gagtctggcactatc

SEQ ID NO: 771844 - DNA, 15 bp, Homo sapiens
agtctggcactatcg

SEQ ID NO: 771845 - DNA, 15 bp, Homo sapiens
gtctggcactatcgc

SEQ ID NO: 771846 - DNA, 15 bp, Homo sapiens
tctggcactatcgcc

SEQ ID NO: 771847 - DNA, 15 bp, Homo sapiens
ctggcactatcgcct

SEQ ID NO: 771848 - DNA, 15 bp, Homo sapiens
tggcactatcgccta

SEQ ID NO: 771849 - DNA, 15 bp, Homo sapiens
ggcactatcgcctag

SEQ ID NO: 771850 - DNA, 15 bp, Homo sapiens
gcactatcgcctagg

SEQ ID NO: 771851 - DNA, 15 bp, Homo sapiens
cactatcgcctaggc

SEQ ID NO: 771852 - DNA, 15 bp, Homo sapiens
actatcgcctaggct

SEQ ID NO: 771853 - DNA, 15 bp, Homo sapiens
ctatcgcctaggctg

SEQ ID NO: 771854 - DNA, 15 bp, Homo sapiens
tatcgcctaggctgg

SEQ ID NO: 771855 - DNA, 15 bp, Homo sapiens
atcgcctaggctgga

SEQ ID NO: 771856 - DNA, 15 bp, Homo sapiens
tcgcctaggctggag

SEQ ID NO: 771857 - DNA, 15 bp, Homo sapiens
cgcctaggctggagt

SEQ ID NO: 771858 - DNA, 15 bp, Homo sapiens
gcctaggctggagtg

SEQ ID NO: 771859 - DNA, 15 bp, Homo sapiens
cctaggctggagtgc

SEQ ID NO: 771860 - DNA, 15 bp, Homo sapiens
ctaggctggagtgca

SEQ ID NO: 771861 - DNA, 15 bp, Homo sapiens
taggctggagtgcag

SEQ ID NO: 771862 - DNA, 15 bp, Homo sapiens
agtggcacgatctcc

SEQ ID NO: 771863 - DNA, 15 bp, Homo sapiens
gtggcacgatctccg

SEQ ID NO: 771864 - DNA, 15 bp, Homo sapiens
tggcacgatctccgc

SEQ ID NO: 771865 - DNA, 15 bp, Homo sapiens
ggcacgatctccgct

SEQ ID NO: 771866 - DNA, 15 bp, Homo sapiens
gcacgatctccgctc

SEQ ID NO: 771867 - DNA, 15 bp, Homo sapiens
cacgatctccgctca

SEQ ID NO: 771868 - DNA, 15 bp, Homo sapiens
acgatctccgctcac

SEQ ID NO: 771869 - DNA, 15 bp, Homo sapiens
cgatctccgctcact

SEQ ID NO: 771870 - DNA, 15 bp, Homo sapiens
gatctccgctcactg

SEQ ID NO: 771871 - DNA, 15 bp, Homo sapiens
atctccgctcactgc

SEQ ID NO: 771872 - DNA, 15 bp, Homo sapiens
tctccgctcactgca

SEQ ID NO: 771873 - DNA, 15 bp, Homo sapiens
ctccgctcactgcaa

SEQ ID NO: 771874 - DNA, 15 bp, Homo sapiens
tccgctcactgcaat

SEQ ID NO: 771875 - DNA, 15 bp, Homo sapiens
ccgctcactgcaatc

SEQ ID NO: 771876 - DNA, 15 bp, Homo sapiens
cgctcactgcaatct

SEQ ID NO: 771877 - DNA, 15 bp, Homo sapiens
gctcactgcaatctc

SEQ ID NO: 771878 - DNA, 15 bp, Homo sapiens
ctcactgcaatctcc

SEQ ID NO: 771879 - DNA, 15 bp, Homo sapiens
tcactgcaatctcca

SEQ ID NO: 771880 - DNA, 15 bp, Homo sapiens
cactgcaatctccac

SEQ ID NO: 771881 - DNA, 15 bp, Homo sapiens
actgcaatctccacc

SEQ ID NO: 771882 - DNA, 15 bp, Homo sapiens
ctgcaatctccacct

SEQ ID NO: 771883 - DNA, 15 bp, Homo sapiens
tgcaatctccacctc

SEQ ID NO: 771884 - DNA, 15 bp, Homo sapiens
gcaatctccacctcc

SEQ ID NO: 771885 - DNA, 15 bp, Homo sapiens
caatctccacctcct

SEQ ID NO: 771886 - DNA, 15 bp, Homo sapiens
aatctccacctcctg

SEQ ID NO: 771887 - DNA, 15 bp, Homo sapiens
atctccacctcctgg

SEQ ID NO: 771888 - DNA, 15 bp, Homo sapiens
tctccacctcctggg

SEQ ID NO: 771889 - DNA, 15 bp, Homo sapiens
acctcctgggttcac

SEQ ID NO: 771890 - DNA, 15 bp, Homo sapiens
tcacgccattctccc

SEQ ID NO: 771891 - DNA, 15 bp, Homo sapiens
cacgccattctcccg

SEQ ID NO: 771892 - DNA, 15 bp, Homo sapiens
acgccattctcccgc

SEQ ID NO: 771893 - DNA, 15 bp, Homo sapiens
cgccattctcccgcc

SEQ ID NO: 771894 - DNA, 15 bp, Homo sapiens
gccattctcccgcct

SEQ ID NO: 771895 - DNA, 15 bp, Homo sapiens
ccattctcccgcctc

SEQ ID NO: 771896 - DNA, 15 bp, Homo sapiens
cattctcccgcctca

SEQ ID NO: 771897 - DNA, 15 bp, Homo sapiens
attctcccgcctcag

SEQ ID NO: 771898 - DNA, 15 bp, Homo sapiens
ttctcccgcctcagc

SEQ ID NO: 771899 - DNA, 15 bp, Homo sapiens
tctcccgcctcagcc

SEQ ID NO: 771900 - DNA, 15 bp, Homo sapiens
ctcccgcctcagcct

SEQ ID NO: 771901 - DNA, 15 bp, Homo sapiens
tcccgcctcagcctc

SEQ ID NO: 771902 - DNA, 15 bp, Homo sapiens
cccgcctcagcctcc

SEQ ID NO: 771903 - DNA, 15 bp, Homo sapiens
cgcctcagcctcccg

SEQ ID NO: 771904 - DNA, 15 bp, Homo sapiens
gcctcagcctcccgg

SEQ ID NO: 771905 - DNA, 15 bp, Homo sapiens
cctcagcctcccggg

SEQ ID NO: 771906 - DNA, 15 bp, Homo sapiens
ctcagcctcccgggt

SEQ ID NO: 771907 - DNA, 15 bp, Homo sapiens
tcagcctcccgggta

SEQ ID NO: 771908 - DNA, 15 bp, Homo sapiens
cagcctcccgggtag

SEQ ID NO: 771909 - DNA, 15 bp, Homo sapiens
agcctcccgggtagc

SEQ ID NO: 771910 - DNA, 15 bp, Homo sapiens
gcctcccgggtagct

SEQ ID NO: 771911 - DNA, 15 bp, Homo sapiens
cctcccgggtagctg

SEQ ID NO: 771912 - DNA, 15 bp, Homo sapiens
ctcccgggtagctgg

SEQ ID NO: 771913 - DNA, 15 bp, Homo sapiens
tcccgggtagctggg

SEQ ID NO: 771914 - DNA, 15 bp, Homo sapiens
cccgggtagctggga

SEQ ID NO: 771915 - DNA, 15 bp, Homo sapiens
ccgggtagctgggat

SEQ ID NO: 771916 - DNA, 15 bp, Homo sapiens
cgggtagctgggatt

SEQ ID NO: 771917 - DNA, 15 bp, Homo sapiens
gggtagctgggatta

SEQ ID NO: 771918 - DNA, 15 bp, Homo sapiens
ggtagctgggattac

SEQ ID NO: 771919 - DNA, 15 bp, Homo sapiens
gattacaggcacccg

SEQ ID NO: 771920 - DNA, 15 bp, Homo sapiens
attacaggcacccgc

SEQ ID NO: 771921 - DNA, 15 bp, Homo sapiens
ttacaggcacccgcc

SEQ ID NO: 771922 - DNA, 15 bp, Homo sapiens
tacaggcacccgcca

SEQ ID NO: 771923 - DNA, 15 bp, Homo sapiens
acaggcacccgccac

SEQ ID NO: 771924 - DNA, 15 bp, Homo sapiens
caggcacccgccacc

SEQ ID NO: 771925 - DNA, 15 bp, Homo sapiens
aggcacccgccacca

SEQ ID NO: 771926 - DNA, 15 bp, Homo sapiens
ggcacccgccaccat

SEQ ID NO: 771927 - DNA, 15 bp, Homo sapiens
gcacccgccaccatg

SEQ ID NO: 771928 - DNA, 15 bp, Homo sapiens
cacccgccaccatgc

SEQ ID NO: 771929 - DNA, 15 bp, Homo sapiens
acccgccaccatgcc

SEQ ID NO: 771930 - DNA, 15 bp, Homo sapiens
ccgccaccatgcccg

SEQ ID NO: 771931 - DNA, 15 bp, Homo sapiens
cgccaccatgcccgg

SEQ ID NO: 771932 - DNA, 15 bp, Homo sapiens
caccatgcccggcta

SEQ ID NO: 771933 - DNA, 15 bp, Homo sapiens
accatgcccggctaa

SEQ ID NO: 771934 - DNA, 15 bp, Homo sapiens
ccatgcccggctaat

SEQ ID NO: 771935 - DNA, 15 bp, Homo sapiens
catgcccggctaatt

SEQ ID NO: 771936 - DNA, 15 bp, Homo sapiens
atgcccggctaattt

SEQ ID NO: 771937 - DNA, 15 bp, Homo sapiens
tgcccggctaatttt

SEQ ID NO: 771938 - DNA, 15 bp, Homo sapiens
gcccggctaattttt

SEQ ID NO: 771939 - DNA, 15 bp, Homo sapiens
ccggctaattttttt

SEQ ID NO: 771940 - DNA, 15 bp, Homo sapiens
cggctaatttttttg

SEQ ID NO: 771941 - DNA, 15 bp, Homo sapiens
ggctaatttttttgt

SEQ ID NO: 771942 - DNA, 15 bp, Homo sapiens
taatttttttgtatt

SEQ ID NO: 771943 - DNA, 15 bp, Homo sapiens
aatttttttgtattt

SEQ ID NO: 771944 - DNA, 15 bp, Homo sapiens
atttttttgtatttt

SEQ ID NO: 771945 - DNA, 15 bp, Homo sapiens
tttttttgtattttt

SEQ ID NO: 771946 - DNA, 15 bp, Homo sapiens
ctgacctcgtgatct

SEQ ID NO: 771947 - DNA, 15 bp, Homo sapiens
tgacctcgtgatctg

SEQ ID NO: 771948 - DNA, 15 bp, Homo sapiens
gacctcgtgatctgc

SEQ ID NO: 771949 - DNA, 15 bp, Homo sapiens
acctcgtgatctgcc

SEQ ID NO: 771950 - DNA, 15 bp, Homo sapiens
cctcgtgatctgcct

SEQ ID NO: 771951 - DNA, 15 bp, Homo sapiens
ctcgtgatctgcctg

SEQ ID NO: 771952 - DNA, 15 bp, Homo sapiens
tcgtgatctgcctgc

SEQ ID NO: 771953 - DNA, 15 bp, Homo sapiens
cgtgatctgcctgcc

SEQ ID NO: 771954 - DNA, 15 bp, Homo sapiens
gatctgcctgcctcg

SEQ ID NO: 771955 - DNA, 15 bp, Homo sapiens
atctgcctgcctcgg

SEQ ID NO: 771956 - DNA, 15 bp, Homo sapiens
tctgcctgcctcggc

SEQ ID NO: 771957 - DNA, 15 bp, Homo sapiens
ctgcctgcctcggcc

SEQ ID NO: 771958 - DNA, 15 bp, Homo sapiens
tgcctgcctcggcct

SEQ ID NO: 771959 - DNA, 15 bp, Homo sapiens
ctcggcctcccaaat

SEQ ID NO: 771960 - DNA, 15 bp, Homo sapiens
tcggcctcccaaatt

SEQ ID NO: 771961 - DNA, 15 bp, Homo sapiens
cggcctcccaaattg

SEQ ID NO: 771962 - DNA, 15 bp, Homo sapiens
ggcctcccaaattgc

SEQ ID NO: 771963 - DNA, 15 bp, Homo sapiens
gcctcccaaattgct

SEQ ID NO: 771964 - DNA, 15 bp, Homo sapiens
cctcccaaattgctg

SEQ ID NO: 771965 - DNA, 15 bp, Homo sapiens
ctcccaaattgctgg

SEQ ID NO: 771966 - DNA, 15 bp, Homo sapiens
tcccaaattgctggg

SEQ ID NO: 771967 - DNA, 15 bp, Homo sapiens
cccaaattgctggga

SEQ ID NO: 771968 - DNA, 15 bp, Homo sapiens
ccaaattgctgggat

SEQ ID NO: 771969 - DNA, 15 bp, Homo sapiens
caaattgctgggatt

SEQ ID NO: 771970 - DNA, 15 bp, Homo sapiens
aaattgctgggatta

SEQ ID NO: 771971 - DNA, 15 bp, Homo sapiens
aattgctgggattac

SEQ ID NO: 771972 - DNA, 15 bp, Homo sapiens
attgctgggattaca

SEQ ID NO: 771973 - DNA, 15 bp, Homo sapiens
ttgctgggattacag

SEQ ID NO: 771974 - DNA, 15 bp, Homo sapiens
gagccactgcgcccg

SEQ ID NO: 771975 - DNA, 15 bp, Homo sapiens
agccactgcgcccgg

SEQ ID NO: 771976 - DNA, 15 bp, Homo sapiens
gccactgcgcccggc

SEQ ID NO: 771977 - DNA, 15 bp, Homo sapiens
ccactgcgcccggcc

SEQ ID NO: 771978 - DNA, 15 bp, Homo sapiens
cactgcgcccggcct

SEQ ID NO: 771979 - DNA, 15 bp, Homo sapiens
actgcgcccggcctg

SEQ ID NO: 771980 - DNA, 15 bp, Homo sapiens
ctgcgcccggcctga

SEQ ID NO: 771981 - DNA, 15 bp, Homo sapiens
tgcgcccggcctgaa

SEQ ID NO: 771982 - DNA, 15 bp, Homo sapiens
gcgcccggcctgaag

SEQ ID NO: 771983 - DNA, 15 bp, Homo sapiens
cgcccggcctgaagt

SEQ ID NO: 771984 - DNA, 15 bp, Homo sapiens
gcccggcctgaagtc

SEQ ID NO: 771985 - DNA, 15 bp, Homo sapiens
cccggcctgaagtct

SEQ ID NO: 771986 - DNA, 15 bp, Homo sapiens
ccggcctgaagtctt

SEQ ID NO: 771987 - DNA, 15 bp, Homo sapiens
cggcctgaagtcttt

SEQ ID NO: 771988 - DNA, 15 bp, Homo sapiens
ggcctgaagtctttt

SEQ ID NO: 771989 - DNA, 15 bp, Homo sapiens
gcctgaagtctttta

SEQ ID NO: 771990 - DNA, 15 bp, Homo sapiens
cctgaagtcttttat

SEQ ID NO: 771991 - DNA, 15 bp, Homo sapiens
ctgaagtcttttatg

SEQ ID NO: 771992 - DNA, 15 bp, Homo sapiens
tgaagtcttttatgg

SEQ ID NO: 771993 - DNA, 15 bp, Homo sapiens
gaagtcttttatggt

SEQ ID NO: 771994 - DNA, 15 bp, Homo sapiens
aagtcttttatggta

SEQ ID NO: 771995 - DNA, 15 bp, Homo sapiens
agtcttttatggtac

SEQ ID NO: 771996 - DNA, 15 bp, Homo sapiens
gtcttttatggtaca

SEQ ID NO: 771997 - DNA, 15 bp, Homo sapiens
tcttttatggtacac

SEQ ID NO: 771998 - DNA, 15 bp, Homo sapiens
cttttatggtacact

SEQ ID NO: 771999 - DNA, 15 bp, Homo sapiens
ttttatggtacactt

SEQ ID NO: 772000 - DNA, 15 bp, Homo sapiens
tttatggtacacttt

SEQ ID NO: 772001 - DNA, 15 bp, Homo sapiens
ttatggtacacttta

SEQ ID NO: 772002 - DNA, 15 bp, Homo sapiens
tatggtacactttat

SEQ ID NO: 772003 - DNA, 15 bp, Homo sapiens
atggtacactttata

SEQ ID NO: 772004 - DNA, 15 bp, Homo sapiens
tggtacactttatac

SEQ ID NO: 772005 - DNA, 15 bp, Homo sapiens
ggtacactttatacc

SEQ ID NO: 772006 - DNA, 15 bp, Homo sapiens
gtacactttatacca

SEQ ID NO: 772007 - DNA, 15 bp, Homo sapiens
tacactttataccag

SEQ ID NO: 772008 - DNA, 15 bp, Homo sapiens
acactttataccagt

SEQ ID NO: 772009 - DNA, 15 bp, Homo sapiens
cactttataccagtt

SEQ ID NO: 772010 - DNA, 15 bp, Homo sapiens
actttataccagttc

SEQ ID NO: 772011 - DNA, 15 bp, Homo sapiens
ctttataccagttca

SEQ ID NO: 772012 - DNA, 15 bp, Homo sapiens
tttataccagttcac

SEQ ID NO: 772013 - DNA, 15 bp, Homo sapiens
ttataccagttcact

SEQ ID NO: 772014 - DNA, 15 bp, Homo sapiens
tataccagttcactc

SEQ ID NO: 772015 - DNA, 15 bp, Homo sapiens
ataccagttcactct

SEQ ID NO: 772016 - DNA, 15 bp, Homo sapiens
taccagttcactctt

SEQ ID NO: 772017 - DNA, 15 bp, Homo sapiens
accagttcactcttc

SEQ ID NO: 772018 - DNA, 15 bp, Homo sapiens
ccagttcactcttcc

SEQ ID NO: 772019 - DNA, 15 bp, Homo sapiens
cagttcactcttcct

SEQ ID NO: 772020 - DNA, 15 bp, Homo sapiens
agttcactcttcctt

SEQ ID NO: 772021 - DNA, 15 bp, Homo sapiens
gttcactcttccttt

SEQ ID NO: 772022 - DNA, 15 bp, Homo sapiens
ttcactcttcctttt

SEQ ID NO: 772023 - DNA, 15 bp, Homo sapiens
tcactcttccttttg

SEQ ID NO: 772024 - DNA, 15 bp, Homo sapiens
cactcttccttttgt

SEQ ID NO: 772025 - DNA, 15 bp, Homo sapiens
actcttccttttgta

SEQ ID NO: 772026 - DNA, 15 bp, Homo sapiens
ctcttccttttgtat

SEQ ID NO: 772027 - DNA, 15 bp, Homo sapiens
tcttccttttgtatt

SEQ ID NO: 772028 - DNA, 15 bp, Homo sapiens
cttccttttgtattc

SEQ ID NO: 772029 - DNA, 15 bp, Homo sapiens
ttccttttgtattct

SEQ ID NO: 772030 - DNA, 15 bp, Homo sapiens
tccttttgtattcta

SEQ ID NO: 772031 - DNA, 15 bp, Homo sapiens
ccttttgtattctat

SEQ ID NO: 772032 - DNA, 15 bp, Homo sapiens
cttttgtattctatc

SEQ ID NO: 772033 - DNA, 15 bp, Homo sapiens
ttttgtattctatcc

SEQ ID NO: 772034 - DNA, 15 bp, Homo sapiens
tttgtattctatcca

SEQ ID NO: 772035 - DNA, 15 bp, Homo sapiens
ttgtattctatccag

SEQ ID NO: 772036 - DNA, 15 bp, Homo sapiens
tgtattctatccagt

SEQ ID NO: 772037 - DNA, 15 bp, Homo sapiens
gtattctatccagtg

SEQ ID NO: 772038 - DNA, 15 bp, Homo sapiens
tattctatccagtgc

SEQ ID NO: 772039 - DNA, 15 bp, Homo sapiens
attctatccagtgca

SEQ ID NO: 772040 - DNA, 15 bp, Homo sapiens
ttctatccagtgcag

SEQ ID NO: 772041 - DNA, 15 bp, Homo sapiens
tctatccagtgcagg

SEQ ID NO: 772042 - DNA, 15 bp, Homo sapiens
ctatccagtgcaggc

SEQ ID NO: 772043 - DNA, 15 bp, Homo sapiens
tatccagtgcaggct

SEQ ID NO: 772044 - DNA, 15 bp, Homo sapiens
atccagtgcaggctg

SEQ ID NO: 772045 - DNA, 15 bp, Homo sapiens
tccagtgcaggctgc

SEQ ID NO: 772046 - DNA, 15 bp, Homo sapiens
ccagtgcaggctgca

SEQ ID NO: 772047 - DNA, 15 bp, Homo sapiens
cagtgcaggctgcat

SEQ ID NO: 772048 - DNA, 15 bp, Homo sapiens
agtgcaggctgcata

SEQ ID NO: 772049 - DNA, 15 bp, Homo sapiens
gtgcaggctgcatat

SEQ ID NO: 772050 - DNA, 15 bp, Homo sapiens
tgcaggctgcatata

SEQ ID NO: 772051 - DNA, 15 bp, Homo sapiens
gcaggctgcatatat

SEQ ID NO: 772052 - DNA, 15 bp, Homo sapiens
caggctgcatatata

SEQ ID NO: 772053 - DNA, 15 bp, Homo sapiens
aggctgcatatatag

SEQ ID NO: 772054 - DNA, 15 bp, Homo sapiens
ggctgcatatataga

SEQ ID NO: 772055 - DNA, 15 bp, Homo sapiens
gctgcatatatagag

SEQ ID NO: 772056 - DNA, 15 bp, Homo sapiens
ctgcatatatagagc

SEQ ID NO: 772057 - DNA, 15 bp, Homo sapiens
tgcatatatagagca

SEQ ID NO: 772058 - DNA, 15 bp, Homo sapiens
gcatatatagagcag

SEQ ID NO: 772059 - DNA, 15 bp, Homo sapiens
catatatagagcaga

SEQ ID NO: 772060 - DNA, 15 bp, Homo sapiens
atatatagagcagaa

SEQ ID NO: 772061 - DNA, 15 bp, Homo sapiens
tatatagagcagaat

SEQ ID NO: 772062 - DNA, 15 bp, Homo sapiens
atatagagcagaata

SEQ ID NO: 772063 - DNA, 15 bp, Homo sapiens
tatagagcagaatag

SEQ ID NO: 772064 - DNA, 15 bp, Homo sapiens
atagagcagaatagg

SEQ ID NO: 772065 - DNA, 15 bp, Homo sapiens
tagagcagaatagga

SEQ ID NO: 772066 - DNA, 15 bp, Homo sapiens
agagcagaataggaa

SEQ ID NO: 772067 - DNA, 15 bp, Homo sapiens
gagcagaataggaag

SEQ ID NO: 772068 - DNA, 15 bp, Homo sapiens
agcagaataggaagg

SEQ ID NO: 772069 - DNA, 15 bp, Homo sapiens
gcagaataggaagga

SEQ ID NO: 772070 - DNA, 15 bp, Homo sapiens
cagaataggaaggaa

SEQ ID NO: 772071 - DNA, 15 bp, Homo sapiens
agaataggaaggaat

SEQ ID NO: 772072 - DNA, 15 bp, Homo sapiens
gaataggaaggaatt

SEQ ID NO: 772073 - DNA, 15 bp, Homo sapiens
aataggaaggaattc

SEQ ID NO: 772074 - DNA, 15 bp, Homo sapiens
ataggaaggaattct

SEQ ID NO: 772075 - DNA, 15 bp, Homo sapiens
taggaaggaattctg

SEQ ID NO: 772076 - DNA, 15 bp, Homo sapiens
aggaaggaattctgc

SEQ ID NO: 772077 - DNA, 15 bp, Homo sapiens
ggaaggaattctgcc

SEQ ID NO: 772078 - DNA, 15 bp, Homo sapiens
gaaggaattctgcct

SEQ ID NO: 772079 - DNA, 15 bp, Homo sapiens
aaggaattctgcctc

SEQ ID NO: 772080 - DNA, 15 bp, Homo sapiens
aggaattctgcctca

SEQ ID NO: 772081 - DNA, 15 bp, Homo sapiens
ggaattctgcctcaa

SEQ ID NO: 772082 - DNA, 15 bp, Homo sapiens
gaattctgcctcaag

SEQ ID NO: 772083 - DNA, 15 bp, Homo sapiens
aattctgcctcaagt

SEQ ID NO: 772084 - DNA, 15 bp, Homo sapiens
attctgcctcaagtc

SEQ ID NO: 772085 - DNA, 15 bp, Homo sapiens
ttctgcctcaagtcc

SEQ ID NO: 772086 - DNA, 15 bp, Homo sapiens
tctgcctcaagtcct

SEQ ID NO: 772087 - DNA, 15 bp, Homo sapiens
ctgcctcaagtcctt

SEQ ID NO: 772088 - DNA, 15 bp, Homo sapiens
tgcctcaagtccttt

SEQ ID NO: 772089 - DNA, 15 bp, Homo sapiens
gcctcaagtcctttt

SEQ ID NO: 772090 - DNA, 15 bp, Homo sapiens
cctcaagtccttttt

SEQ ID NO: 772091 - DNA, 15 bp, Homo sapiens
ctcaagtccttttta

SEQ ID NO: 772092 - DNA, 15 bp, Homo sapiens
tcaagtcctttttat

SEQ ID NO: 772093 - DNA, 15 bp, Homo sapiens
caagtcctttttatt

SEQ ID NO: 772094 - DNA, 15 bp, Homo sapiens
aagtcctttttattt

SEQ ID NO: 772095 - DNA, 15 bp, Homo sapiens
agtcctttttatttc

SEQ ID NO: 772096 - DNA, 15 bp, Homo sapiens
gtcctttttatttct

SEQ ID NO: 772097 - DNA, 15 bp, Homo sapiens
tcctttttatttctg

SEQ ID NO: 772098 - DNA, 15 bp, Homo sapiens
cctttttatttctgt

SEQ ID NO: 772099 - DNA, 15 bp, Homo sapiens
ctttttatttctgtg

SEQ ID NO: 772100 - DNA, 15 bp, Homo sapiens
tttttatttctgtgt

SEQ ID NO: 772101 - DNA, 15 bp, Homo sapiens
ttttatttctgtgta

SEQ ID NO: 772102 - DNA, 15 bp, Homo sapiens
tttatttctgtgtat

SEQ ID NO: 772103 - DNA, 15 bp, Homo sapiens
ttatttctgtgtatc

SEQ ID NO: 772104 - DNA, 15 bp, Homo sapiens
tatttctgtgtatct

SEQ ID NO: 772105 - DNA, 15 bp, Homo sapiens
atttctgtgtatctg

SEQ ID NO: 772106 - DNA, 15 bp, Homo sapiens
tttctgtgtatctgt

SEQ ID NO: 772107 - DNA, 15 bp, Homo sapiens
ttctgtgtatctgtc

SEQ ID NO: 772108 - DNA, 15 bp, Homo sapiens
tctgtgtatctgtca

SEQ ID NO: 772109 - DNA, 15 bp, Homo sapiens
ctgtgtatctgtcaa

SEQ ID NO: 772110 - DNA, 15 bp, Homo sapiens
tgtgtatctgtcaag

SEQ ID NO: 772111 - DNA, 15 bp, Homo sapiens
gtgtatctgtcaagg

SEQ ID NO: 772112 - DNA, 15 bp, Homo sapiens
tgtatctgtcaaggt

SEQ ID NO: 772113 - DNA, 15 bp, Homo sapiens
gtatctgtcaaggtt

SEQ ID NO: 772114 - DNA, 15 bp, Homo sapiens
tatctgtcaaggttg

SEQ ID NO: 772115 - DNA, 15 bp, Homo sapiens
atctgtcaaggttgt

SEQ ID NO: 772116 - DNA, 15 bp, Homo sapiens
tctgtcaaggttgtt

SEQ ID NO: 772117 - DNA, 15 bp, Homo sapiens
ctgtcaaggttgtta

SEQ ID NO: 772118 - DNA, 15 bp, Homo sapiens
tgtcaaggttgttag

SEQ ID NO: 772119 - DNA, 15 bp, Homo sapiens
gtcaaggttgttaga

SEQ ID NO: 772120 - DNA, 15 bp, Homo sapiens
tcaaggttgttagaa

SEQ ID NO: 772121 - DNA, 15 bp, Homo sapiens
caaggttgttagaat

SEQ ID NO: 772122 - DNA, 15 bp, Homo sapiens
aaggttgttagaatc

SEQ ID NO: 772123 - DNA, 15 bp, Homo sapiens
aggttgttagaatct

SEQ ID NO: 772124 - DNA, 15 bp, Homo sapiens
ggttgttagaatctc

SEQ ID NO: 772125 - DNA, 15 bp, Homo sapiens
gttgttagaatctct

SEQ ID NO: 772126 - DNA, 15 bp, Homo sapiens
ttgttagaatctctg

SEQ ID NO: 772127 - DNA, 15 bp, Homo sapiens
tgttagaatctctgc

SEQ ID NO: 772128 - DNA, 15 bp, Homo sapiens
gttagaatctctgcg

SEQ ID NO: 772129 - DNA, 15 bp, Homo sapiens
ttagaatctctgcga

SEQ ID NO: 772130 - DNA, 15 bp, Homo sapiens
tagaatctctgcgat

SEQ ID NO: 772131 - DNA, 15 bp, Homo sapiens
agaatctctgcgata

SEQ ID NO: 772132 - DNA, 15 bp, Homo sapiens
gaatctctgcgatag

SEQ ID NO: 772133 - DNA, 15 bp, Homo sapiens
aatctctgcgatagc

SEQ ID NO: 772134 - DNA, 15 bp, Homo sapiens
atctctgcgatagca

SEQ ID NO: 772135 - DNA, 15 bp, Homo sapiens
tctctgcgatagcat

SEQ ID NO: 772136 - DNA, 15 bp, Homo sapiens
ctctgcgatagcata

SEQ ID NO: 772137 - DNA, 15 bp, Homo sapiens
tctgcgatagcataa

SEQ ID NO: 772138 - DNA, 15 bp, Homo sapiens
ctgcgatagcataat

SEQ ID NO: 772139 - DNA, 15 bp, Homo sapiens
tgcgatagcataatc

SEQ ID NO: 772140 - DNA, 15 bp, Homo sapiens
gcgatagcataatcc

SEQ ID NO: 772141 - DNA, 15 bp, Homo sapiens
cgatagcataatcca

SEQ ID NO: 772142 - DNA, 15 bp, Homo sapiens
gatagcataatccaa

SEQ ID NO: 772143 - DNA, 15 bp, Homo sapiens
atagcataatccaag

SEQ ID NO: 772144 - DNA, 15 bp, Homo sapiens
tagcataatccaagt

SEQ ID NO: 772145 - DNA, 15 bp, Homo sapiens
agcataatccaagtc

SEQ ID NO: 772146 - DNA, 15 bp, Homo sapiens
gcataatccaagtca

SEQ ID NO: 772147 - DNA, 15 bp, Homo sapiens
cataatccaagtcat

SEQ ID NO: 772148 - DNA, 15 bp, Homo sapiens
ataatccaagtcatt

SEQ ID NO: 772149 - DNA, 15 bp, Homo sapiens
taatccaagtcatta

SEQ ID NO: 772150 - DNA, 15 bp, Homo sapiens
aatccaagtcattat

SEQ ID NO: 772151 - DNA, 15 bp, Homo sapiens
atccaagtcattatt

SEQ ID NO: 772152 - DNA, 15 bp, Homo sapiens
tccaagtcattatta

SEQ ID NO: 772153 - DNA, 15 bp, Homo sapiens
ccaagtcattattat

SEQ ID NO: 772154 - DNA, 15 bp, Homo sapiens
caagtcattattata

SEQ ID NO: 772155 - DNA, 15 bp, Homo sapiens
aagtcattattatat

SEQ ID NO: 772156 - DNA, 15 bp, Homo sapiens
agtcattattatatt

SEQ ID NO: 772157 - DNA, 15 bp, Homo sapiens
gtcattattatattt

SEQ ID NO: 772158 - DNA, 15 bp, Homo sapiens
tcattattatatttc

SEQ ID NO: 772159 - DNA, 15 bp, Homo sapiens
cattattatatttcc

SEQ ID NO: 772160 - DNA, 15 bp, Homo sapiens
attattatatttcct

SEQ ID NO: 772161 - DNA, 15 bp, Homo sapiens
ttattatatttcctt

SEQ ID NO: 772162 - DNA, 15 bp, Homo sapiens
tattatatttccttc

SEQ ID NO: 772163 - DNA, 15 bp, Homo sapiens
attatatttccttca

SEQ ID NO: 772164 - DNA, 15 bp, Homo sapiens
ttatatttccttcag

SEQ ID NO: 772165 - DNA, 15 bp, Homo sapiens
tatatttccttcaga

SEQ ID NO: 772166 - DNA, 15 bp, Homo sapiens
atatttccttcagag

SEQ ID NO: 772167 - DNA, 15 bp, Homo sapiens
tatttccttcagagc

SEQ ID NO: 772168 - DNA, 15 bp, Homo sapiens
atttccttcagagca

SEQ ID NO: 772169 - DNA, 15 bp, Homo sapiens
tttccttcagagcac

SEQ ID NO: 772170 - DNA, 15 bp, Homo sapiens
ttccttcagagcaca

SEQ ID NO: 772171 - DNA, 15 bp, Homo sapiens
tccttcagagcacag

SEQ ID NO: 772172 - DNA, 15 bp, Homo sapiens
ccttcagagcacagc

SEQ ID NO: 772173 - DNA, 15 bp, Homo sapiens
cttcagagcacagca

SEQ ID NO: 772174 - DNA, 15 bp, Homo sapiens
ttcagagcacagcag

SEQ ID NO: 772175 - DNA, 15 bp, Homo sapiens
tcagagcacagcagt

SEQ ID NO: 772176 - DNA, 15 bp, Homo sapiens
cagagcacagcagtg

SEQ ID NO: 772177 - DNA, 15 bp, Homo sapiens
agagcacagcagtgg

SEQ ID NO: 772178 - DNA, 15 bp, Homo sapiens
gagcacagcagtggc

SEQ ID NO: 772179 - DNA, 15 bp, Homo sapiens
agcacagcagtggcc

SEQ ID NO: 772180 - DNA, 15 bp, Homo sapiens
gcacagcagtggcct

SEQ ID NO: 772181 - DNA, 15 bp, Homo sapiens
cacagcagtggcctt

SEQ ID NO: 772182 - DNA, 15 bp, Homo sapiens
acagcagtggccttc

SEQ ID NO: 772183 - DNA, 15 bp, Homo sapiens
cagcagtggccttct

SEQ ID NO: 772184 - DNA, 15 bp, Homo sapiens
agcagtggccttctg

SEQ ID NO: 772185 - DNA, 15 bp, Homo sapiens
gcagtggccttctga

SEQ ID NO: 772186 - DNA, 15 bp, Homo sapiens
cagtggccttctgac

SEQ ID NO: 772187 - DNA, 15 bp, Homo sapiens
agtggccttctgact

SEQ ID NO: 772188 - DNA, 15 bp, Homo sapiens
gtggccttctgactg

SEQ ID NO: 772189 - DNA, 15 bp, Homo sapiens
tggccttctgactgt

SEQ ID NO: 772190 - DNA, 15 bp, Homo sapiens
ggccttctgactgta

SEQ ID NO: 772191 - DNA, 15 bp, Homo sapiens
gccttctgactgtac

SEQ ID NO: 772192 - DNA, 15 bp, Homo sapiens
ccttctgactgtact

SEQ ID NO: 772193 - DNA, 15 bp, Homo sapiens
cttctgactgtacta

SEQ ID NO: 772194 - DNA, 15 bp, Homo sapiens
ttctgactgtactat

SEQ ID NO: 772195 - DNA, 15 bp, Homo sapiens
tctgactgtactatg

SEQ ID NO: 772196 - DNA, 15 bp, Homo sapiens
ctgactgtactatgc

SEQ ID NO: 772197 - DNA, 15 bp, Homo sapiens
tgactgtactatgct

SEQ ID NO: 772198 - DNA, 15 bp, Homo sapiens
gactgtactatgctc

SEQ ID NO: 772199 - DNA, 15 bp, Homo sapiens
actgtactatgctcc

SEQ ID NO: 772200 - DNA, 15 bp, Homo sapiens
ctgtactatgctcct

SEQ ID NO: 772201 - DNA, 15 bp, Homo sapiens
tgtactatgctcctc

SEQ ID NO: 772202 - DNA, 15 bp, Homo sapiens
gtactatgctcctca

SEQ ID NO: 772203 - DNA, 15 bp, Homo sapiens
tactatgctcctcac

SEQ ID NO: 772204 - DNA, 15 bp, Homo sapiens
actatgctcctcacc

SEQ ID NO: 772205 - DNA, 15 bp, Homo sapiens
ctatgctcctcacct

SEQ ID NO: 772206 - DNA, 15 bp, Homo sapiens
tatgctcctcacctc

SEQ ID NO: 772207 - DNA, 15 bp, Homo sapiens
atgctcctcacctct

SEQ ID NO: 772208 - DNA, 15 bp, Homo sapiens
tgctcctcacctctc

SEQ ID NO: 772209 - DNA, 15 bp, Homo sapiens
gctcctcacctctca

SEQ ID NO: 772210 - DNA, 15 bp, Homo sapiens
ctcctcacctctcag

SEQ ID NO: 772211 - DNA, 15 bp, Homo sapiens
tcctcacctctcagc

SEQ ID NO: 772212 - DNA, 15 bp, Homo sapiens
cctcacctctcagca

SEQ ID NO: 772213 - DNA, 15 bp, Homo sapiens
ctcacctctcagcag

SEQ ID NO: 772214 - DNA, 15 bp, Homo sapiens
tcacctctcagcagc

SEQ ID NO: 772215 - DNA, 15 bp, Homo sapiens
cacctctcagcagcc

SEQ ID NO: 772216 - DNA, 15 bp, Homo sapiens
acctctcagcagcca

SEQ ID NO: 772217 - DNA, 15 bp, Homo sapiens
cctctcagcagccag

SEQ ID NO: 772218 - DNA, 15 bp, Homo sapiens
ctctcagcagccagt

SEQ ID NO: 772219 - DNA, 15 bp, Homo sapiens
tctcagcagccagtc

SEQ ID NO: 772220 - DNA, 15 bp, Homo sapiens
ctcagcagccagtca

SEQ ID NO: 772221 - DNA, 15 bp, Homo sapiens
tcagcagccagtcat

SEQ ID NO: 772222 - DNA, 15 bp, Homo sapiens
cagcagccagtcatc

SEQ ID NO: 772223 - DNA, 15 bp, Homo sapiens
agcagccagtcatct

SEQ ID NO: 772224 - DNA, 15 bp, Homo sapiens
gcagccagtcatctt

SEQ ID NO: 772225 - DNA, 15 bp, Homo sapiens
cagccagtcatcttt

SEQ ID NO: 772226 - DNA, 15 bp, Homo sapiens
agccagtcatctttt

SEQ ID NO: 772227 - DNA, 15 bp, Homo sapiens
gccagtcatcttttt

SEQ ID NO: 772228 - DNA, 15 bp, Homo sapiens
ccagtcatctttttg

SEQ ID NO: 772229 - DNA, 15 bp, Homo sapiens
cagtcatctttttga

SEQ ID NO: 772230 - DNA, 15 bp, Homo sapiens
agtcatctttttgaa

SEQ ID NO: 772231 - DNA, 15 bp, Homo sapiens
gtcatctttttgaaa

SEQ ID NO: 772232 - DNA, 15 bp, Homo sapiens
tcatctttttgaaat

SEQ ID NO: 772233 - DNA, 15 bp, Homo sapiens
catctttttgaaatg

SEQ ID NO: 772234 - DNA, 15 bp, Homo sapiens
atctttttgaaatgt

SEQ ID NO: 772235 - DNA, 15 bp, Homo sapiens
tctttttgaaatgta

SEQ ID NO: 772236 - DNA, 15 bp, Homo sapiens
ctttttgaaatgtaa

SEQ ID NO: 772237 - DNA, 15 bp, Homo sapiens
tttttgaaatgtaat

SEQ ID NO: 772238 - DNA, 15 bp, Homo sapiens
ttttgaaatgtaatt

SEQ ID NO: 772239 - DNA, 15 bp, Homo sapiens
tttgaaatgtaattc

SEQ ID NO: 772240 - DNA, 15 bp, Homo sapiens
ttgaaatgtaattca

SEQ ID NO: 772241 - DNA, 15 bp, Homo sapiens
tgaaatgtaattcag

SEQ ID NO: 772242 - DNA, 15 bp, Homo sapiens
gaaatgtaattcaga

SEQ ID NO: 772243 - DNA, 15 bp, Homo sapiens
aaatgtaattcagat

SEQ ID NO: 772244 - DNA, 15 bp, Homo sapiens
aatgtaattcagatc

SEQ ID NO: 772245 - DNA, 15 bp, Homo sapiens
atgtaattcagatca

SEQ ID NO: 772246 - DNA, 15 bp, Homo sapiens
tgtaattcagatcat

SEQ ID NO: 772247 - DNA, 15 bp, Homo sapiens
gtaattcagatcatg

SEQ ID NO: 772248 - DNA, 15 bp, Homo sapiens
taattcagatcatgc

SEQ ID NO: 772249 - DNA, 15 bp, Homo sapiens
aattcagatcatgcc

SEQ ID NO: 772250 - DNA, 15 bp, Homo sapiens
attcagatcatgcca

SEQ ID NO: 772251 - DNA, 15 bp, Homo sapiens
ttcagatcatgccat

SEQ ID NO: 772252 - DNA, 15 bp, Homo sapiens
tcagatcatgccatc

SEQ ID NO: 772253 - DNA, 15 bp, Homo sapiens
cagatcatgccatcc

SEQ ID NO: 772254 - DNA, 15 bp, Homo sapiens
agatcatgccatcct

SEQ ID NO: 772255 - DNA, 15 bp, Homo sapiens
gatcatgccatcctt

SEQ ID NO: 772256 - DNA, 15 bp, Homo sapiens
atcatgccatccttc

SEQ ID NO: 772257 - DNA, 15 bp, Homo sapiens
tcatgccatccttct

SEQ ID NO: 772258 - DNA, 15 bp, Homo sapiens
catgccatccttctg

SEQ ID NO: 772259 - DNA, 15 bp, Homo sapiens
atgccatccttctgt

SEQ ID NO: 772260 - DNA, 15 bp, Homo sapiens
tgccatccttctgtt

SEQ ID NO: 772261 - DNA, 15 bp, Homo sapiens
gccatccttctgttc

SEQ ID NO: 772262 - DNA, 15 bp, Homo sapiens
ccatccttctgttca

SEQ ID NO: 772263 - DNA, 15 bp, Homo sapiens
catccttctgttcaa

SEQ ID NO: 772264 - DNA, 15 bp, Homo sapiens
atccttctgttcaaa

SEQ ID NO: 772265 - DNA, 15 bp, Homo sapiens
tccttctgttcaaaa

SEQ ID NO: 772266 - DNA, 15 bp, Homo sapiens
ccttctgttcaaaaa

SEQ ID NO: 772267 - DNA, 15 bp, Homo sapiens
cttctgttcaaaaac

SEQ ID NO: 772268 - DNA, 15 bp, Homo sapiens
ttctgttcaaaaacc

SEQ ID NO: 772269 - DNA, 15 bp, Homo sapiens
tctgttcaaaaaccg

SEQ ID NO: 772270 - DNA, 15 bp, Homo sapiens
ctgttcaaaaaccgt

SEQ ID NO: 772271 - DNA, 15 bp, Homo sapiens
tgttcaaaaaccgtc

SEQ ID NO: 772272 - DNA, 15 bp, Homo sapiens
gttcaaaaaccgtca

SEQ ID NO: 772273 - DNA, 15 bp, Homo sapiens
ttcaaaaaccgtcag

SEQ ID NO: 772274 - DNA, 15 bp, Homo sapiens
tcaaaaaccgtcagt

SEQ ID NO: 772275 - DNA, 15 bp, Homo sapiens
caaaaaccgtcagtg

SEQ ID NO: 772276 - DNA, 15 bp, Homo sapiens
aaaaaccgtcagtga

SEQ ID NO: 772277 - DNA, 15 bp, Homo sapiens
aaaaccgtcagtgat

SEQ ID NO: 772278 - DNA, 15 bp, Homo sapiens
aaaccgtcagtgatt

SEQ ID NO: 772279 - DNA, 15 bp, Homo sapiens
aaccgtcagtgattt

SEQ ID NO: 772280 - DNA, 15 bp, Homo sapiens
accgtcagtgatttt

SEQ ID NO: 772281 - DNA, 15 bp, Homo sapiens
ccgtcagtgattttc

SEQ ID NO: 772282 - DNA, 15 bp, Homo sapiens
cgtcagtgattttcc

SEQ ID NO: 772283 - DNA, 15 bp, Homo sapiens
gtcagtgattttcca

SEQ ID NO: 772284 - DNA, 15 bp, Homo sapiens
tcagtgattttccat

SEQ ID NO: 772285 - DNA, 15 bp, Homo sapiens
cagtgattttccatt

SEQ ID NO: 772286 - DNA, 15 bp, Homo sapiens
agtgattttccattg

SEQ ID NO: 772287 - DNA, 15 bp, Homo sapiens
gtgattttccattgt

SEQ ID NO: 772288 - DNA, 15 bp, Homo sapiens
tgattttccattgta

SEQ ID NO: 772289 - DNA, 15 bp, Homo sapiens
gattttccattgtac

SEQ ID NO: 772290 - DNA, 15 bp, Homo sapiens
attttccattgtact

SEQ ID NO: 772291 - DNA, 15 bp, Homo sapiens
ttttccattgtactt

SEQ ID NO: 772292 - DNA, 15 bp, Homo sapiens
tttccattgtactta

SEQ ID NO: 772293 - DNA, 15 bp, Homo sapiens
ttccattgtacttag

SEQ ID NO: 772294 - DNA, 15 bp, Homo sapiens
tccattgtacttaga

SEQ ID NO: 772295 - DNA, 15 bp, Homo sapiens
ccattgtacttagaa

SEQ ID NO: 772296 - DNA, 15 bp, Homo sapiens
cattgtacttagaat

SEQ ID NO: 772297 - DNA, 15 bp, Homo sapiens
attgtacttagaata

SEQ ID NO: 772298 - DNA, 15 bp, Homo sapiens
ttgtacttagaataa

SEQ ID NO: 772299 - DNA, 15 bp, Homo sapiens
tgtacttagaataaa

SEQ ID NO: 772300 - DNA, 15 bp, Homo sapiens
gtacttagaataaaa

SEQ ID NO: 772301 - DNA, 15 bp, Homo sapiens
tacttagaataaaat

SEQ ID NO: 772302 - DNA, 15 bp, Homo sapiens
acttagaataaaatc

SEQ ID NO: 772303 - DNA, 15 bp, Homo sapiens
cttagaataaaatcc

SEQ ID NO: 772304 - DNA, 15 bp, Homo sapiens
ttagaataaaatcca

SEQ ID NO: 772305 - DNA, 15 bp, Homo sapiens
tagaataaaatccaa

SEQ ID NO: 772306 - DNA, 15 bp, Homo sapiens
agaataaaatccaaa

SEQ ID NO: 772307 - DNA, 15 bp, Homo sapiens
gaataaaatccaaag

SEQ ID NO: 772308 - DNA, 15 bp, Homo sapiens
aataaaatccaaagt

SEQ ID NO: 772309 - DNA, 15 bp, Homo sapiens
ataaaatccaaagta

SEQ ID NO: 772310 - DNA, 15 bp, Homo sapiens
taaaatccaaagtac

SEQ ID NO: 772311 - DNA, 15 bp, Homo sapiens
aaaatccaaagtact

SEQ ID NO: 772312 - DNA, 15 bp, Homo sapiens
aaatccaaagtactt

SEQ ID NO: 772313 - DNA, 15 bp, Homo sapiens
aatccaaagtactta

SEQ ID NO: 772314 - DNA, 15 bp, Homo sapiens
atccaaagtacttat

SEQ ID NO: 772315 - DNA, 15 bp, Homo sapiens
tccaaagtacttatt

SEQ ID NO: 772316 - DNA, 15 bp, Homo sapiens
ccaaagtacttattt

SEQ ID NO: 772317 - DNA, 15 bp, Homo sapiens
caaagtacttatttt

SEQ ID NO: 772318 - DNA, 15 bp, Homo sapiens
aaagtacttattttg

SEQ ID NO: 772319 - DNA, 15 bp, Homo sapiens
aagtacttattttgg

SEQ ID NO: 772320 - DNA, 15 bp, Homo sapiens
agtacttattttggt

SEQ ID NO: 772321 - DNA, 15 bp, Homo sapiens
gtacttattttggtc

SEQ ID NO: 772322 - DNA, 15 bp, Homo sapiens
tacttattttggtct

SEQ ID NO: 772323 - DNA, 15 bp, Homo sapiens
acttattttggtctt

SEQ ID NO: 772324 - DNA, 15 bp, Homo sapiens
cttattttggtcttc

SEQ ID NO: 772325 - DNA, 15 bp, Homo sapiens
ttattttggtcttca

SEQ ID NO: 772326 - DNA, 15 bp, Homo sapiens
tattttggtcttcaa

SEQ ID NO: 772327 - DNA, 15 bp, Homo sapiens
attttggtcttcaag

SEQ ID NO: 772328 - DNA, 15 bp, Homo sapiens
ttttggtcttcaaga

SEQ ID NO: 772329 - DNA, 15 bp, Homo sapiens
tttggtcttcaagac

SEQ ID NO: 772330 - DNA, 15 bp, Homo sapiens
ttggtcttcaagacc

SEQ ID NO: 772331 - DNA, 15 bp, Homo sapiens
tggtcttcaagaccc

SEQ ID NO: 772332 - DNA, 15 bp, Homo sapiens
ggtcttcaagaccca

SEQ ID NO: 772333 - DNA, 15 bp, Homo sapiens
gtcttcaagacccag

SEQ ID NO: 772334 - DNA, 15 bp, Homo sapiens
tcttcaagacccagc

SEQ ID NO: 772335 - DNA, 15 bp, Homo sapiens
cttcaagacccagca

SEQ ID NO: 772336 - DNA, 15 bp, Homo sapiens
ttcaagacccagcac

SEQ ID NO: 772337 - DNA, 15 bp, Homo sapiens
tcaagacccagcacg

SEQ ID NO: 772338 - DNA, 15 bp, Homo sapiens
caagacccagcacgt

SEQ ID NO: 772339 - DNA, 15 bp, Homo sapiens
aagacccagcacgtt

SEQ ID NO: 772340 - DNA, 15 bp, Homo sapiens
agacccagcacgttc

SEQ ID NO: 772341 - DNA, 15 bp, Homo sapiens
gacccagcacgttct

SEQ ID NO: 772342 - DNA, 15 bp, Homo sapiens
acccagcacgttctg

SEQ ID NO: 772343 - DNA, 15 bp, Homo sapiens
cccagcacgttctgg

SEQ ID NO: 772344 - DNA, 15 bp, Homo sapiens
ccagcacgttctggc

SEQ ID NO: 772345 - DNA, 15 bp, Homo sapiens
cagcacgttctggct

SEQ ID NO: 772346 - DNA, 15 bp, Homo sapiens
agcacgttctggctc

SEQ ID NO: 772347 - DNA, 15 bp, Homo sapiens
gcacgttctggctcc

SEQ ID NO: 772348 - DNA, 15 bp, Homo sapiens
cacgttctggctcct

SEQ ID NO: 772349 - DNA, 15 bp, Homo sapiens
acgttctggctcctg

SEQ ID NO: 772350 - DNA, 15 bp, Homo sapiens
cgttctggctcctgc

SEQ ID NO: 772351 - DNA, 15 bp, Homo sapiens
gttctggctcctgct

SEQ ID NO: 772352 - DNA, 15 bp, Homo sapiens
ttctggctcctgctt

SEQ ID NO: 772353 - DNA, 15 bp, Homo sapiens
tctggctcctgctta

SEQ ID NO: 772354 - DNA, 15 bp, Homo sapiens
ctggctcctgcttac

SEQ ID NO: 772355 - DNA, 15 bp, Homo sapiens
tggctcctgcttacc

SEQ ID NO: 772356 - DNA, 15 bp, Homo sapiens
ggctcctgcttacct

SEQ ID NO: 772357 - DNA, 15 bp, Homo sapiens
gctcctgcttacctc

SEQ ID NO: 772358 - DNA, 15 bp, Homo sapiens
ctcctgcttacctct

SEQ ID NO: 772359 - DNA, 15 bp, Homo sapiens
tcctgcttacctctc

SEQ ID NO: 772360 - DNA, 15 bp, Homo sapiens
cctgcttacctctcc

SEQ ID NO: 772361 - DNA, 15 bp, Homo sapiens
ctgcttacctctccc

SEQ ID NO: 772362 - DNA, 15 bp, Homo sapiens
tgcttacctctccct

SEQ ID NO: 772363 - DNA, 15 bp, Homo sapiens
gcttacctctccctc

SEQ ID NO: 772364 - DNA, 15 bp, Homo sapiens
cttacctctccctca

SEQ ID NO: 772365 - DNA, 15 bp, Homo sapiens
ttacctctccctcac

SEQ ID NO: 772366 - DNA, 15 bp, Homo sapiens
tacctctccctcact

SEQ ID NO: 772367 - DNA, 15 bp, Homo sapiens
acctctccctcactt

SEQ ID NO: 772368 - DNA, 15 bp, Homo sapiens
cctctccctcacttg

SEQ ID NO: 772369 - DNA, 15 bp, Homo sapiens
ctctccctcacttgc

SEQ ID NO: 772370 - DNA, 15 bp, Homo sapiens
tctccctcacttgct

SEQ ID NO: 772371 - DNA, 15 bp, Homo sapiens
ctccctcacttgctc

SEQ ID NO: 772372 - DNA, 15 bp, Homo sapiens
tccctcacttgctca

SEQ ID NO: 772373 - DNA, 15 bp, Homo sapiens
ccctcacttgctcag

SEQ ID NO: 772374 - DNA, 15 bp, Homo sapiens
cctcacttgctcagt

SEQ ID NO: 772375 - DNA, 15 bp, Homo sapiens
ctcacttgctcagta

SEQ ID NO: 772376 - DNA, 15 bp, Homo sapiens
tcacttgctcagtat

SEQ ID NO: 772377 - DNA, 15 bp, Homo sapiens
cacttgctcagtatc

SEQ ID NO: 772378 - DNA, 15 bp, Homo sapiens
acttgctcagtatca

SEQ ID NO: 772379 - DNA, 15 bp, Homo sapiens
cttgctcagtatcat

SEQ ID NO: 772380 - DNA, 15 bp, Homo sapiens
ttgctcagtatcatc

SEQ ID NO: 772381 - DNA, 15 bp, Homo sapiens
tgctcagtatcatct

SEQ ID NO: 772382 - DNA, 15 bp, Homo sapiens
gctcagtatcatctg

SEQ ID NO: 772383 - DNA, 15 bp, Homo sapiens
ctcagtatcatctga

SEQ ID NO: 772384 - DNA, 15 bp, Homo sapiens
tcagtatcatctgac

SEQ ID NO: 772385 - DNA, 15 bp, Homo sapiens
cagtatcatctgacc

SEQ ID NO: 772386 - DNA, 15 bp, Homo sapiens
agtatcatctgacca

SEQ ID NO: 772387 - DNA, 15 bp, Homo sapiens
gtatcatctgaccat

SEQ ID NO: 772388 - DNA, 15 bp, Homo sapiens
tatcatctgaccatg

SEQ ID NO: 772389 - DNA, 15 bp, Homo sapiens
atcatctgaccatgg

SEQ ID NO: 772390 - DNA, 15 bp, Homo sapiens
tcatctgaccatggt

SEQ ID NO: 772391 - DNA, 15 bp, Homo sapiens
catctgaccatggtt

SEQ ID NO: 772392 - DNA, 15 bp, Homo sapiens
atctgaccatggttc

SEQ ID NO: 772393 - DNA, 15 bp, Homo sapiens
tctgaccatggttcc

SEQ ID NO: 772394 - DNA, 15 bp, Homo sapiens
ctgaccatggttcct

SEQ ID NO: 772395 - DNA, 15 bp, Homo sapiens
tgaccatggttcctg

SEQ ID NO: 772396 - DNA, 15 bp, Homo sapiens
gaccatggttcctga

SEQ ID NO: 772397 - DNA, 15 bp, Homo sapiens
accatggttcctgaa

SEQ ID NO: 772398 - DNA, 15 bp, Homo sapiens
ccatggttcctgaaa

SEQ ID NO: 772399 - DNA, 15 bp, Homo sapiens
catggttcctgaaat

SEQ ID NO: 772400 - DNA, 15 bp, Homo sapiens
atggttcctgaaata

SEQ ID NO: 772401 - DNA, 15 bp, Homo sapiens
tggttcctgaaatac

SEQ ID NO: 772402 - DNA, 15 bp, Homo sapiens
ggttcctgaaatacc

SEQ ID NO: 772403 - DNA, 15 bp, Homo sapiens
gttcctgaaatacct

SEQ ID NO: 772404 - DNA, 15 bp, Homo sapiens
ttcctgaaatacctt

SEQ ID NO: 772405 - DNA, 15 bp, Homo sapiens
tcctgaaatacctta

SEQ ID NO: 772406 - DNA, 15 bp, Homo sapiens
cctgaaataccttaa

SEQ ID NO: 772407 - DNA, 15 bp, Homo sapiens
ctgaaataccttaaa

SEQ ID NO: 772408 - DNA, 15 bp, Homo sapiens
tgaaataccttaaac

SEQ ID NO: 772409 - DNA, 15 bp, Homo sapiens
gaaataccttaaact

SEQ ID NO: 772410 - DNA, 15 bp, Homo sapiens
aaataccttaaactc

SEQ ID NO: 772411 - DNA, 15 bp, Homo sapiens
aataccttaaactct

SEQ ID NO: 772412 - DNA, 15 bp, Homo sapiens
ataccttaaactctt

SEQ ID NO: 772413 - DNA, 15 bp, Homo sapiens
taccttaaactcttc

SEQ ID NO: 772414 - DNA, 15 bp, Homo sapiens
accttaaactcttcc

SEQ ID NO: 772415 - DNA, 15 bp, Homo sapiens
ccttaaactcttcct

SEQ ID NO: 772416 - DNA, 15 bp, Homo sapiens
cttaaactcttcctt

SEQ ID NO: 772417 - DNA, 15 bp, Homo sapiens
ttaaactcttccttg

SEQ ID NO: 772418 - DNA, 15 bp, Homo sapiens
taaactcttccttgc

SEQ ID NO: 772419 - DNA, 15 bp, Homo sapiens
aaactcttccttgcc

SEQ ID NO: 772420 - DNA, 15 bp, Homo sapiens
aactcttccttgcct

SEQ ID NO: 772421 - DNA, 15 bp, Homo sapiens
actcttccttgcctc

SEQ ID NO: 772422 - DNA, 15 bp, Homo sapiens
ctcttccttgcctca

SEQ ID NO: 772423 - DNA, 15 bp, Homo sapiens
tcttccttgcctcag

SEQ ID NO: 772424 - DNA, 15 bp, Homo sapiens
cttccttgcctcagg

SEQ ID NO: 772425 - DNA, 15 bp, Homo sapiens
ggctaggagcatttt

SEQ ID NO: 772426 - DNA, 15 bp, Homo sapiens
gctaggagcattttt

SEQ ID NO: 772427 - DNA, 15 bp, Homo sapiens
ctaggagcattttta

SEQ ID NO: 772428 - DNA, 15 bp, Homo sapiens
taggagcatttttat

SEQ ID NO: 772429 - DNA, 15 bp, Homo sapiens
aggagcatttttatt

SEQ ID NO: 772430 - DNA, 15 bp, Homo sapiens
ggagcatttttatta

SEQ ID NO: 772431 - DNA, 15 bp, Homo sapiens
gagcatttttattag

SEQ ID NO: 772432 - DNA, 15 bp, Homo sapiens
agcatttttattagg

SEQ ID NO: 772433 - DNA, 15 bp, Homo sapiens
gcatttttattaggg

SEQ ID NO: 772434 - DNA, 15 bp, Homo sapiens
catttttattaggga

SEQ ID NO: 772435 - DNA, 15 bp, Homo sapiens
atttttattagggat

SEQ ID NO: 772436 - DNA, 15 bp, Homo sapiens
tttttattagggatg

SEQ ID NO: 772437 - DNA, 15 bp, Homo sapiens
ttttattagggatga

SEQ ID NO: 772438 - DNA, 15 bp, Homo sapiens
tttattagggatgaa

SEQ ID NO: 772439 - DNA, 15 bp, Homo sapiens
ttattagggatgaat

SEQ ID NO: 772440 - DNA, 15 bp, Homo sapiens
tattagggatgaatt

SEQ ID NO: 772441 - DNA, 15 bp, Homo sapiens
attagggatgaattt

SEQ ID NO: 772442 - DNA, 15 bp, Homo sapiens
ttagggatgaattta

SEQ ID NO: 772443 - DNA, 15 bp, Homo sapiens
tagggatgaatttag

SEQ ID NO: 772444 - DNA, 15 bp, Homo sapiens
agggatgaatttagc

SEQ ID NO: 772445 - DNA, 15 bp, Homo sapiens
gggatgaatttagct

SEQ ID NO: 772446 - DNA, 15 bp, Homo sapiens
ggatgaatttagctt

SEQ ID NO: 772447 - DNA, 15 bp, Homo sapiens
gatgaatttagcttg

SEQ ID NO: 772448 - DNA, 15 bp, Homo sapiens
atgaatttagcttga

SEQ ID NO: 772449 - DNA, 15 bp, Homo sapiens
tgaatttagcttgag

SEQ ID NO: 772450 - DNA, 15 bp, Homo sapiens
gaatttagcttgaga

SEQ ID NO: 772451 - DNA, 15 bp, Homo sapiens
aatttagcttgagat

SEQ ID NO: 772452 - DNA, 15 bp, Homo sapiens
atttagcttgagatt

SEQ ID NO: 772453 - DNA, 15 bp, Homo sapiens
tttagcttgagattt

SEQ ID NO: 772454 - DNA, 15 bp, Homo sapiens
ttagcttgagatttg

SEQ ID NO: 772455 - DNA, 15 bp, Homo sapiens
tagcttgagatttgt

SEQ ID NO: 772456 - DNA, 15 bp, Homo sapiens
agcttgagatttgtt

SEQ ID NO: 772457 - DNA, 15 bp, Homo sapiens
gcttgagatttgttt

SEQ ID NO: 772458 - DNA, 15 bp, Homo sapiens
cttgagatttgtttg

SEQ ID NO: 772459 - DNA, 15 bp, Homo sapiens
ttgagatttgtttgg

SEQ ID NO: 772460 - DNA, 15 bp, Homo sapiens
tgagatttgtttggt

SEQ ID NO: 772461 - DNA, 15 bp, Homo sapiens
gagatttgtttggta

SEQ ID NO: 772462 - DNA, 15 bp, Homo sapiens
agatttgtttggtaa

SEQ ID NO: 772463 - DNA, 15 bp, Homo sapiens
gatttgtttggtaac

SEQ ID NO: 772464 - DNA, 15 bp, Homo sapiens
atttgtttggtaaca

SEQ ID NO: 772465 - DNA, 15 bp, Homo sapiens
tttgtttggtaacaa

SEQ ID NO: 772466 - DNA, 15 bp, Homo sapiens
ttgtttggtaacaaa

SEQ ID NO: 772467 - DNA, 15 bp, Homo sapiens
tgtttggtaacaaaa

SEQ ID NO: 772468 - DNA, 15 bp, Homo sapiens
gtttggtaacaaaaa

SEQ ID NO: 772469 - DNA, 15 bp, Homo sapiens
tttggtaacaaaaag

SEQ ID NO: 772470 - DNA, 15 bp, Homo sapiens
ttggtaacaaaaagc

SEQ ID NO: 772471 - DNA, 15 bp, Homo sapiens
tggtaacaaaaagca

SEQ ID NO: 772472 - DNA, 15 bp, Homo sapiens
ggtaacaaaaagcac

SEQ ID NO: 772473 - DNA, 15 bp, Homo sapiens
gtaacaaaaagcacc

SEQ ID NO: 772474 - DNA, 15 bp, Homo sapiens
taacaaaaagcacct

SEQ ID NO: 772475 - DNA, 15 bp, Homo sapiens
aacaaaaagcacctg

SEQ ID NO: 772476 - DNA, 15 bp, Homo sapiens
acaaaaagcacctgg

SEQ ID NO: 772477 - DNA, 15 bp, Homo sapiens
caaaaagcacctgga

SEQ ID NO: 772478 - DNA, 15 bp, Homo sapiens
aaaaagcacctggaa

SEQ ID NO: 772479 - DNA, 15 bp, Homo sapiens
aaaagcacctggaat

SEQ ID NO: 772480 - DNA, 15 bp, Homo sapiens
aaagcacctggaatt

SEQ ID NO: 772481 - DNA, 15 bp, Homo sapiens
aagcacctggaattt

SEQ ID NO: 772482 - DNA, 15 bp, Homo sapiens
agcacctggaattta

SEQ ID NO: 772483 - DNA, 15 bp, Homo sapiens
gcacctggaatttag

SEQ ID NO: 772484 - DNA, 15 bp, Homo sapiens
cacctggaatttaga

SEQ ID NO: 772485 - DNA, 15 bp, Homo sapiens
acctggaatttagat

SEQ ID NO: 772486 - DNA, 15 bp, Homo sapiens
cctggaatttagatg

SEQ ID NO: 772487 - DNA, 15 bp, Homo sapiens
ctggaatttagatgc

SEQ ID NO: 772488 - DNA, 15 bp, Homo sapiens
tggaatttagatgca

SEQ ID NO: 772489 - DNA, 15 bp, Homo sapiens
ggaatttagatgcat

SEQ ID NO: 772490 - DNA, 15 bp, Homo sapiens
gaatttagatgcatc

SEQ ID NO: 772491 - DNA, 15 bp, Homo sapiens
aatttagatgcatct

SEQ ID NO: 772492 - DNA, 15 bp, Homo sapiens
atttagatgcatctt

SEQ ID NO: 772493 - DNA, 15 bp, Homo sapiens
tttagatgcatcttt

SEQ ID NO: 772494 - DNA, 15 bp, Homo sapiens
ttagatgcatctttt

SEQ ID NO: 772495 - DNA, 15 bp, Homo sapiens
tagatgcatctttta

SEQ ID NO: 772496 - DNA, 15 bp, Homo sapiens
agatgcatcttttaa

SEQ ID NO: 772497 - DNA, 15 bp, Homo sapiens
gatgcatcttttaat

SEQ ID NO: 772498 - DNA, 15 bp, Homo sapiens
atgcatcttttaata

SEQ ID NO: 772499 - DNA, 15 bp, Homo sapiens
tgcatcttttaatag

SEQ ID NO: 772500 - DNA, 15 bp, Homo sapiens
gcatcttttaataga

SEQ ID NO: 772501 - DNA, 15 bp, Homo sapiens
catcttttaatagat

SEQ ID NO: 772502 - DNA, 15 bp, Homo sapiens
atcttttaatagatt

SEQ ID NO: 772503 - DNA, 15 bp, Homo sapiens
tcttttaatagattt

SEQ ID NO: 772504 - DNA, 15 bp, Homo sapiens
cttttaatagatttt

SEQ ID NO: 772505 - DNA, 15 bp, Homo sapiens
ttttaatagattttt

SEQ ID NO: 772506 - DNA, 15 bp, Homo sapiens
tttaatagatttttt

SEQ ID NO: 772507 - DNA, 15 bp, Homo sapiens
ttaatagattttttt

SEQ ID NO: 772508 - DNA, 15 bp, Homo sapiens
taatagatttttttt

SEQ ID NO: 772509 - DNA, 15 bp, Homo sapiens
aatagattttttttt

SEQ ID NO: 772510 - DNA, 15 bp, Homo sapiens
atagatttttttttt

SEQ ID NO: 772511 - DNA, 15 bp, Homo sapiens
tagatttttttttta

SEQ ID NO: 772512 - DNA, 15 bp, Homo sapiens
gattttttttttaaa

SEQ ID NO: 772513 - DNA, 15 bp, Homo sapiens
attttttttttaaac

SEQ ID NO: 772514 - DNA, 15 bp, Homo sapiens
ttttttttttaaact

SEQ ID NO: 772515 - DNA, 15 bp, Homo sapiens
tttttttttaaactg

SEQ ID NO: 772516 - DNA, 15 bp, Homo sapiens
ttttttttaaactgg

SEQ ID NO: 772517 - DNA, 15 bp, Homo sapiens
tttttttaaactggc

SEQ ID NO: 772518 - DNA, 15 bp, Homo sapiens
ttttttaaactggct

SEQ ID NO: 772519 - DNA, 15 bp, Homo sapiens
tttttaaactggctt

SEQ ID NO: 772520 - DNA, 15 bp, Homo sapiens
ttttaaactggcttg

SEQ ID NO: 772521 - DNA, 15 bp, Homo sapiens
tttaaactggcttgc

SEQ ID NO: 772522 - DNA, 15 bp, Homo sapiens
ttaaactggcttgcc

SEQ ID NO: 772523 - DNA, 15 bp, Homo sapiens
taaactggcttgcca

SEQ ID NO: 772524 - DNA, 15 bp, Homo sapiens
aaactggcttgccaa

SEQ ID NO: 772525 - DNA, 15 bp, Homo sapiens
aactggcttgccaat

SEQ ID NO: 772526 - DNA, 15 bp, Homo sapiens
actggcttgccaata

SEQ ID NO: 772527 - DNA, 15 bp, Homo sapiens
ctggcttgccaatat

SEQ ID NO: 772528 - DNA, 15 bp, Homo sapiens
tggcttgccaatatt

SEQ ID NO: 772529 - DNA, 15 bp, Homo sapiens
ggcttgccaatattt

SEQ ID NO: 772530 - DNA, 15 bp, Homo sapiens
gcttgccaatatttg

SEQ ID NO: 772531 - DNA, 15 bp, Homo sapiens
cttgccaatatttga

SEQ ID NO: 772532 - DNA, 15 bp, Homo sapiens
ttgccaatatttgaa

SEQ ID NO: 772533 - DNA, 15 bp, Homo sapiens
tgccaatatttgaaa

SEQ ID NO: 772534 - DNA, 15 bp, Homo sapiens
gccaatatttgaaaa

SEQ ID NO: 772535 - DNA, 15 bp, Homo sapiens
ccaatatttgaaaat

SEQ ID NO: 772536 - DNA, 15 bp, Homo sapiens
caatatttgaaaata

SEQ ID NO: 772537 - DNA, 15 bp, Homo sapiens
aatatttgaaaatat

SEQ ID NO: 772538 - DNA, 15 bp, Homo sapiens
atatttgaaaatatc

SEQ ID NO: 772539 - DNA, 15 bp, Homo sapiens
tatttgaaaatatca

SEQ ID NO: 772540 - DNA, 15 bp, Homo sapiens
atttgaaaatatcag

SEQ ID NO: 772541 - DNA, 15 bp, Homo sapiens
tttgaaaatatcagt

SEQ ID NO: 772542 - DNA, 15 bp, Homo sapiens
ttgaaaatatcagtg

SEQ ID NO: 772543 - DNA, 15 bp, Homo sapiens
tgaaaatatcagtgc

SEQ ID NO: 772544 - DNA, 15 bp, Homo sapiens
gaaaatatcagtgct

SEQ ID NO: 772545 - DNA, 15 bp, Homo sapiens
aaaatatcagtgctc

SEQ ID NO: 772546 - DNA, 15 bp, Homo sapiens
aaatatcagtgctcc

SEQ ID NO: 772547 - DNA, 15 bp, Homo sapiens
aatatcagtgctcca

SEQ ID NO: 772548 - DNA, 15 bp, Homo sapiens
atatcagtgctccag

SEQ ID NO: 772549 - DNA, 15 bp, Homo sapiens
tatcagtgctccagt

SEQ ID NO: 772550 - DNA, 15 bp, Homo sapiens
atcagtgctccagtt

SEQ ID NO: 772551 - DNA, 15 bp, Homo sapiens
tcagtgctccagttt

SEQ ID NO: 772552 - DNA, 15 bp, Homo sapiens
cagtgctccagtttc

SEQ ID NO: 772553 - DNA, 15 bp, Homo sapiens
agtgctccagtttcc

SEQ ID NO: 772554 - DNA, 15 bp, Homo sapiens
gtgctccagtttcca

SEQ ID NO: 772555 - DNA, 15 bp, Homo sapiens
tgctccagtttccac

SEQ ID NO: 772556 - DNA, 15 bp, Homo sapiens
ggagacacattcata

SEQ ID NO: 772557 - DNA, 15 bp, Homo sapiens
gagacacattcataa

SEQ ID NO: 772558 - DNA, 15 bp, Homo sapiens
agacacattcataat

SEQ ID NO: 772559 - DNA, 15 bp, Homo sapiens
gacacattcataatg

SEQ ID NO: 772560 - DNA, 15 bp, Homo sapiens
acacattcataatga

SEQ ID NO: 772561 - DNA, 15 bp, Homo sapiens
cacattcataatgat

SEQ ID NO: 772562 - DNA, 15 bp, Homo sapiens
acattcataatgatt

SEQ ID NO: 772563 - DNA, 15 bp, Homo sapiens
cattcataatgatta

SEQ ID NO: 772564 - DNA, 15 bp, Homo sapiens
attcataatgattaa

SEQ ID NO: 772565 - DNA, 15 bp, Homo sapiens
ttcataatgattaac

SEQ ID NO: 772566 - DNA, 15 bp, Homo sapiens
tcataatgattaacc

SEQ ID NO: 772567 - DNA, 15 bp, Homo sapiens
cataatgattaacca

SEQ ID NO: 772568 - DNA, 15 bp, Homo sapiens
ataatgattaaccat

SEQ ID NO: 772569 - DNA, 15 bp, Homo sapiens
taatgattaaccata

SEQ ID NO: 772570 - DNA, 15 bp, Homo sapiens
aatgattaaccatac

SEQ ID NO: 772571 - DNA, 15 bp, Homo sapiens
atgattaaccataca

SEQ ID NO: 772572 - DNA, 15 bp, Homo sapiens
tgattaaccatacat

SEQ ID NO: 772573 - DNA, 15 bp, Homo sapiens
gattaaccatacata

SEQ ID NO: 772574 - DNA, 15 bp, Homo sapiens
attaaccatacatac

SEQ ID NO: 772575 - DNA, 15 bp, Homo sapiens
ttaaccatacataca

SEQ ID NO: 772576 - DNA, 15 bp, Homo sapiens
taaccatacatacat

SEQ ID NO: 772577 - DNA, 15 bp, Homo sapiens
aaccatacatacatc

SEQ ID NO: 772578 - DNA, 15 bp, Homo sapiens
accatacatacatct

SEQ ID NO: 772579 - DNA, 15 bp, Homo sapiens
ccatacatacatctt

SEQ ID NO: 772580 - DNA, 15 bp, Homo sapiens
catacatacatcttt

SEQ ID NO: 772581 - DNA, 15 bp, Homo sapiens
atacatacatcttta

SEQ ID NO: 772582 - DNA, 15 bp, Homo sapiens
tacatacatctttaa

SEQ ID NO: 772583 - DNA, 15 bp, Homo sapiens
acatacatctttaaa

SEQ ID NO: 772584 - DNA, 15 bp, Homo sapiens
catacatctttaaaa

SEQ ID NO: 772585 - DNA, 15 bp, Homo sapiens
atacatctttaaaag

SEQ ID NO: 772586 - DNA, 15 bp, Homo sapiens
tacatctttaaaagt

SEQ ID NO: 772587 - DNA, 15 bp, Homo sapiens
acatctttaaaagtt

SEQ ID NO: 772588 - DNA, 15 bp, Homo sapiens
catctttaaaagttt

SEQ ID NO: 772589 - DNA, 15 bp, Homo sapiens
atctttaaaagtttg

SEQ ID NO: 772590 - DNA, 15 bp, Homo sapiens
tctttaaaagtttgg

SEQ ID NO: 772591 - DNA, 15 bp, Homo sapiens
ctttaaaagtttggt

SEQ ID NO: 772592 - DNA, 15 bp, Homo sapiens
tttaaaagtttggtg

SEQ ID NO: 772593 - DNA, 15 bp, Homo sapiens
ttaaaagtttggtgt

SEQ ID NO: 772594 - DNA, 15 bp, Homo sapiens
taaaagtttggtgta

SEQ ID NO: 772595 - DNA, 15 bp, Homo sapiens
aaaagtttggtgtaa

SEQ ID NO: 772596 - DNA, 15 bp, Homo sapiens
aaagtttggtgtaag

SEQ ID NO: 772597 - DNA, 15 bp, Homo sapiens
aagtttggtgtaaga

SEQ ID NO: 772598 - DNA, 15 bp, Homo sapiens
agtttggtgtaagaa

SEQ ID NO: 772599 - DNA, 15 bp, Homo sapiens
gtttggtgtaagaat

SEQ ID NO: 772600 - DNA, 15 bp, Homo sapiens
tttggtgtaagaatg

SEQ ID NO: 772601 - DNA, 15 bp, Homo sapiens
ttggtgtaagaatga

SEQ ID NO: 772602 - DNA, 15 bp, Homo sapiens
tggtgtaagaatgaa

SEQ ID NO: 772603 - DNA, 15 bp, Homo sapiens
ggtgtaagaatgaac

SEQ ID NO: 772604 - DNA, 15 bp, Homo sapiens
gtgtaagaatgaacc

SEQ ID NO: 772605 - DNA, 15 bp, Homo sapiens
tgtaagaatgaacca

SEQ ID NO: 772606 - DNA, 15 bp, Homo sapiens
gtaagaatgaaccag

SEQ ID NO: 772607 - DNA, 15 bp, Homo sapiens
taagaatgaaccagt

SEQ ID NO: 772608 - DNA, 15 bp, Homo sapiens
aagaatgaaccagta

SEQ ID NO: 772609 - DNA, 15 bp, Homo sapiens
agaatgaaccagtat

SEQ ID NO: 772610 - DNA, 15 bp, Homo sapiens
gaatgaaccagtatt

SEQ ID NO: 772611 - DNA, 15 bp, Homo sapiens
aatgaaccagtatta

SEQ ID NO: 772612 - DNA, 15 bp, Homo sapiens
atgaaccagtattat

SEQ ID NO: 772613 - DNA, 15 bp, Homo sapiens
tgaaccagtattata

SEQ ID NO: 772614 - DNA, 15 bp, Homo sapiens
gaaccagtattatac

SEQ ID NO: 772615 - DNA, 15 bp, Homo sapiens
aaccagtattatact

SEQ ID NO: 772616 - DNA, 15 bp, Homo sapiens
accagtattatactt

SEQ ID NO: 772617 - DNA, 15 bp, Homo sapiens
ccagtattatacttc

SEQ ID NO: 772618 - DNA, 15 bp, Homo sapiens
cagtattatacttca

SEQ ID NO: 772619 - DNA, 15 bp, Homo sapiens
agtattatacttcat

SEQ ID NO: 772620 - DNA, 15 bp, Homo sapiens
gtattatacttcata

SEQ ID NO: 772621 - DNA, 15 bp, Homo sapiens
tattatacttcatag

SEQ ID NO: 772622 - DNA, 15 bp, Homo sapiens
attatacttcataga

SEQ ID NO: 772623 - DNA, 15 bp, Homo sapiens
ttatacttcatagaa

SEQ ID NO: 772624 - DNA, 15 bp, Homo sapiens
tatacttcatagaag

SEQ ID NO: 772625 - DNA, 15 bp, Homo sapiens
atacttcatagaagg

SEQ ID NO: 772626 - DNA, 15 bp, Homo sapiens
tacttcatagaaggg

SEQ ID NO: 772627 - DNA, 15 bp, Homo sapiens
acttcatagaagggc

SEQ ID NO: 772628 - DNA, 15 bp, Homo sapiens
cttcatagaagggct

SEQ ID NO: 772629 - DNA, 15 bp, Homo sapiens
ttcatagaagggctg

SEQ ID NO: 772630 - DNA, 15 bp, Homo sapiens
tcatagaagggctga

SEQ ID NO: 772631 - DNA, 15 bp, Homo sapiens
catagaagggctgat

SEQ ID NO: 772632 - DNA, 15 bp, Homo sapiens
atagaagggctgatt

SEQ ID NO: 772633 - DNA, 15 bp, Homo sapiens
tagaagggctgattg

SEQ ID NO: 772634 - DNA, 15 bp, Homo sapiens
agaagggctgattgt

SEQ ID NO: 772635 - DNA, 15 bp, Homo sapiens
gaagggctgattgtt

SEQ ID NO: 772636 - DNA, 15 bp, Homo sapiens
aagggctgattgttc

SEQ ID NO: 772637 - DNA, 15 bp, Homo sapiens
agggctgattgttct

SEQ ID NO: 772638 - DNA, 15 bp, Homo sapiens
gggctgattgttctt

SEQ ID NO: 772639 - DNA, 15 bp, Homo sapiens
ggctgattgttcttg

SEQ ID NO: 772640 - DNA, 15 bp, Homo sapiens
gctgattgttcttgc

SEQ ID NO: 772641 - DNA, 15 bp, Homo sapiens
ctgattgttcttgca

SEQ ID NO: 772642 - DNA, 15 bp, Homo sapiens
tgattgttcttgcag

SEQ ID NO: 772643 - DNA, 15 bp, Homo sapiens
gattgttcttgcagc

SEQ ID NO: 772644 - DNA, 15 bp, Homo sapiens
attgttcttgcagca

SEQ ID NO: 772645 - DNA, 15 bp, Homo sapiens
ttgttcttgcagcag

SEQ ID NO: 772646 - DNA, 15 bp, Homo sapiens
tgttcttgcagcaga

SEQ ID NO: 772647 - DNA, 15 bp, Homo sapiens
gttcttgcagcagaa

SEQ ID NO: 772648 - DNA, 15 bp, Homo sapiens
ttcttgcagcagaaa

SEQ ID NO: 772649 - DNA, 15 bp, Homo sapiens
tcttgcagcagaaaa

SEQ ID NO: 772650 - DNA, 15 bp, Homo sapiens
cttgcagcagaaaaa

SEQ ID NO: 772651 - DNA, 15 bp, Homo sapiens
ttgcagcagaaaaaa

SEQ ID NO: 772652 - DNA, 15 bp, Homo sapiens
tgcagcagaaaaaag

SEQ ID NO: 772653 - DNA, 15 bp, Homo sapiens
gcagcagaaaaaaga

SEQ ID NO: 772654 - DNA, 15 bp, Homo sapiens
cagcagaaaaaagat

SEQ ID NO: 772655 - DNA, 15 bp, Homo sapiens
agcagaaaaaagata

SEQ ID NO: 772656 - DNA, 15 bp, Homo sapiens
gcagaaaaaagatat

SEQ ID NO: 772657 - DNA, 15 bp, Homo sapiens
cagaaaaaagatatg

SEQ ID NO: 772658 - DNA, 15 bp, Homo sapiens
agaaaaaagatatga

SEQ ID NO: 772659 - DNA, 15 bp, Homo sapiens
gaaaaaagatatgag

SEQ ID NO: 772660 - DNA, 15 bp, Homo sapiens
aaaaaagatatgagt

SEQ ID NO: 772661 - DNA, 15 bp, Homo sapiens
aaaaagatatgagtt

SEQ ID NO: 772662 - DNA, 15 bp, Homo sapiens
aaaagatatgagttt

SEQ ID NO: 772663 - DNA, 15 bp, Homo sapiens
aaagatatgagtttt

SEQ ID NO: 772664 - DNA, 15 bp, Homo sapiens
aagatatgagtttta

SEQ ID NO: 772665 - DNA, 15 bp, Homo sapiens
agatatgagttttat

SEQ ID NO: 772666 - DNA, 15 bp, Homo sapiens
gatatgagttttatt

SEQ ID NO: 772667 - DNA, 15 bp, Homo sapiens
atatgagttttattc

SEQ ID NO: 772668 - DNA, 15 bp, Homo sapiens
tatgagttttattca

SEQ ID NO: 772669 - DNA, 15 bp, Homo sapiens
atgagttttattcat

SEQ ID NO: 772670 - DNA, 15 bp, Homo sapiens
tgagttttattcata

SEQ ID NO: 772671 - DNA, 15 bp, Homo sapiens
gagttttattcataa

SEQ ID NO: 772672 - DNA, 15 bp, Homo sapiens
agttttattcataat

SEQ ID NO: 772673 - DNA, 15 bp, Homo sapiens
gttttattcataatt

SEQ ID NO: 772674 - DNA, 15 bp, Homo sapiens
ttttattcataattt

SEQ ID NO: 772675 - DNA, 15 bp, Homo sapiens
tttattcataattta

SEQ ID NO: 772676 - DNA, 15 bp, Homo sapiens
ttattcataatttac

SEQ ID NO: 772677 - DNA, 15 bp, Homo sapiens
tattcataatttact

SEQ ID NO: 772678 - DNA, 15 bp, Homo sapiens
attcataatttactt

SEQ ID NO: 772679 - DNA, 15 bp, Homo sapiens
ttcataatttactta

SEQ ID NO: 772680 - DNA, 15 bp, Homo sapiens
tcataatttacttac

SEQ ID NO: 772681 - DNA, 15 bp, Homo sapiens
cataatttacttact

SEQ ID NO: 772682 - DNA, 15 bp, Homo sapiens
ataatttacttacta

SEQ ID NO: 772683 - DNA, 15 bp, Homo sapiens
taatttacttactaa

SEQ ID NO: 772684 - DNA, 15 bp, Homo sapiens
aatttacttactaac

SEQ ID NO: 772685 - DNA, 15 bp, Homo sapiens
atttacttactaact

SEQ ID NO: 772686 - DNA, 15 bp, Homo sapiens
tttacttactaactc

SEQ ID NO: 772687 - DNA, 15 bp, Homo sapiens
ttacttactaactca

SEQ ID NO: 772688 - DNA, 15 bp, Homo sapiens
tacttactaactcat

SEQ ID NO: 772689 - DNA, 15 bp, Homo sapiens
acttactaactcatt

SEQ ID NO: 772690 - DNA, 15 bp, Homo sapiens
cttactaactcattc

SEQ ID NO: 772691 - DNA, 15 bp, Homo sapiens
ttactaactcattca

SEQ ID NO: 772692 - DNA, 15 bp, Homo sapiens
tactaactcattcaa

SEQ ID NO: 772693 - DNA, 15 bp, Homo sapiens
actaactcattcaat

SEQ ID NO: 772694 - DNA, 15 bp, Homo sapiens
ctaactcattcaatg

SEQ ID NO: 772695 - DNA, 15 bp, Homo sapiens
taactcattcaatgc

SEQ ID NO: 772696 - DNA, 15 bp, Homo sapiens
aactcattcaatgcc

SEQ ID NO: 772697 - DNA, 15 bp, Homo sapiens
actcattcaatgcca

SEQ ID NO: 772698 - DNA, 15 bp, Homo sapiens
ctcattcaatgccat

SEQ ID NO: 772699 - DNA, 15 bp, Homo sapiens
tcattcaatgccatt

SEQ ID NO: 772700 - DNA, 15 bp, Homo sapiens
cattcaatgccattt

SEQ ID NO: 772701 - DNA, 15 bp, Homo sapiens
attcaatgccattta

SEQ ID NO: 772702 - DNA, 15 bp, Homo sapiens
ttcaatgccatttat

SEQ ID NO: 772703 - DNA, 15 bp, Homo sapiens
tcaatgccatttatc

SEQ ID NO: 772704 - DNA, 15 bp, Homo sapiens
caatgccatttatct

SEQ ID NO: 772705 - DNA, 15 bp, Homo sapiens
aatgccatttatctt

SEQ ID NO: 772706 - DNA, 15 bp, Homo sapiens
atgccatttatcttt

SEQ ID NO: 772707 - DNA, 15 bp, Homo sapiens
tgccatttatcttta

SEQ ID NO: 772708 - DNA, 15 bp, Homo sapiens
gccatttatctttaa

SEQ ID NO: 772709 - DNA, 15 bp, Homo sapiens
ccatttatctttaac

SEQ ID NO: 772710 - DNA, 15 bp, Homo sapiens
catttatctttaact

SEQ ID NO: 772711 - DNA, 15 bp, Homo sapiens
atttatctttaactt

SEQ ID NO: 772712 - DNA, 15 bp, Homo sapiens
tttatctttaactta

SEQ ID NO: 772713 - DNA, 15 bp, Homo sapiens
ttatctttaacttaa

SEQ ID NO: 772714 - DNA, 15 bp, Homo sapiens
tatctttaacttaag

SEQ ID NO: 772715 - DNA, 15 bp, Homo sapiens
atctttaacttaagt

SEQ ID NO: 772716 - DNA, 15 bp, Homo sapiens
tctttaacttaagtc

SEQ ID NO: 772717 - DNA, 15 bp, Homo sapiens
ctttaacttaagtca

SEQ ID NO: 772718 - DNA, 15 bp, Homo sapiens
tttaacttaagtcac

SEQ ID NO: 772719 - DNA, 15 bp, Homo sapiens
ttaacttaagtcaca

SEQ ID NO: 772720 - DNA, 15 bp, Homo sapiens
taacttaagtcacac

SEQ ID NO: 772721 - DNA, 15 bp, Homo sapiens
aacttaagtcacact

SEQ ID NO: 772722 - DNA, 15 bp, Homo sapiens
acttaagtcacactt

SEQ ID NO: 772723 - DNA, 15 bp, Homo sapiens
cttaagtcacactta

SEQ ID NO: 772724 - DNA, 15 bp, Homo sapiens
ttaagtcacacttaa

SEQ ID NO: 772725 - DNA, 15 bp, Homo sapiens
taagtcacacttaat

SEQ ID NO: 772726 - DNA, 15 bp, Homo sapiens
aagtcacacttaatg

SEQ ID NO: 772727 - DNA, 15 bp, Homo sapiens
agtcacacttaatga

SEQ ID NO: 772728 - DNA, 15 bp, Homo sapiens
gtcacacttaatgat

SEQ ID NO: 772729 - DNA, 15 bp, Homo sapiens
tcacacttaatgata

SEQ ID NO: 772730 - DNA, 15 bp, Homo sapiens
cacacttaatgataa

SEQ ID NO: 772731 - DNA, 15 bp, Homo sapiens
acacttaatgataaa

SEQ ID NO: 772732 - DNA, 15 bp, Homo sapiens
cacttaatgataaat

SEQ ID NO: 772733 - DNA, 15 bp, Homo sapiens
acttaatgataaatg

SEQ ID NO: 772734 - DNA, 15 bp, Homo sapiens
cttaatgataaatgc

SEQ ID NO: 772735 - DNA, 15 bp, Homo sapiens
ttaatgataaatgct

SEQ ID NO: 772736 - DNA, 15 bp, Homo sapiens
taatgataaatgctc

SEQ ID NO: 772737 - DNA, 15 bp, Homo sapiens
aatgataaatgctct

SEQ ID NO: 772738 - DNA, 15 bp, Homo sapiens
atgataaatgctctc

SEQ ID NO: 772739 - DNA, 15 bp, Homo sapiens
tgataaatgctctcc

SEQ ID NO: 772740 - DNA, 15 bp, Homo sapiens
gataaatgctctcct

SEQ ID NO: 772741 - DNA, 15 bp, Homo sapiens
ataaatgctctcctc

SEQ ID NO: 772742 - DNA, 15 bp, Homo sapiens
taaatgctctcctct

SEQ ID NO: 772743 - DNA, 15 bp, Homo sapiens
aaatgctctcctctt

SEQ ID NO: 772744 - DNA, 15 bp, Homo sapiens
aatgctctcctcttt

SEQ ID NO: 772745 - DNA, 15 bp, Homo sapiens
atgctctcctcttta

SEQ ID NO: 772746 - DNA, 15 bp, Homo sapiens
tgctctcctctttac

SEQ ID NO: 772747 - DNA, 15 bp, Homo sapiens
gctctcctctttact

SEQ ID NO: 772748 - DNA, 15 bp, Homo sapiens
ctctcctctttactg

SEQ ID NO: 772749 - DNA, 15 bp, Homo sapiens
tctcctctttactgc

SEQ ID NO: 772750 - DNA, 15 bp, Homo sapiens
ctcctctttactgcc

SEQ ID NO: 772751 - DNA, 15 bp, Homo sapiens
tcctctttactgcca

SEQ ID NO: 772752 - DNA, 15 bp, Homo sapiens
cctctttactgccag

SEQ ID NO: 772753 - DNA, 15 bp, Homo sapiens
ctctttactgccaga

SEQ ID NO: 772754 - DNA, 15 bp, Homo sapiens
tctttactgccagac

SEQ ID NO: 772755 - DNA, 15 bp, Homo sapiens
ctttactgccagact

SEQ ID NO: 772756 - DNA, 15 bp, Homo sapiens
tttactgccagactg

SEQ ID NO: 772757 - DNA, 15 bp, Homo sapiens
ttactgccagactgc

SEQ ID NO: 772758 - DNA, 15 bp, Homo sapiens
tactgccagactgcc

SEQ ID NO: 772759 - DNA, 15 bp, Homo sapiens
actgccagactgcct

SEQ ID NO: 772760 - DNA, 15 bp, Homo sapiens
ctgccagactgcctg

SEQ ID NO: 772761 - DNA, 15 bp, Homo sapiens
tgccagactgcctgt

SEQ ID NO: 772762 - DNA, 15 bp, Homo sapiens
gccagactgcctgta

SEQ ID NO: 772763 - DNA, 15 bp, Homo sapiens
ccagactgcctgtag

SEQ ID NO: 772764 - DNA, 15 bp, Homo sapiens
cagactgcctgtaga

SEQ ID NO: 772765 - DNA, 15 bp, Homo sapiens
agactgcctgtagaa

SEQ ID NO: 772766 - DNA, 15 bp, Homo sapiens
gactgcctgtagaag

SEQ ID NO: 772767 - DNA, 15 bp, Homo sapiens
actgcctgtagaagt

SEQ ID NO: 772768 - DNA, 15 bp, Homo sapiens
ctgcctgtagaagta

SEQ ID NO: 772769 - DNA, 15 bp, Homo sapiens
tgcctgtagaagtag

SEQ ID NO: 772770 - DNA, 15 bp, Homo sapiens
gcctgtagaagtagc

SEQ ID NO: 772771 - DNA, 15 bp, Homo sapiens
cctgtagaagtagct

SEQ ID NO: 772772 - DNA, 15 bp, Homo sapiens
ctgtagaagtagctg

SEQ ID NO: 772773 - DNA, 15 bp, Homo sapiens
tgtagaagtagctga

SEQ ID NO: 772774 - DNA, 15 bp, Homo sapiens
gtagaagtagctgag

SEQ ID NO: 772775 - DNA, 15 bp, Homo sapiens
tagaagtagctgagc

SEQ ID NO: 772776 - DNA, 15 bp, Homo sapiens
agaagtagctgagct

SEQ ID NO: 772777 - DNA, 15 bp, Homo sapiens
gaagtagctgagctg

SEQ ID NO: 772778 - DNA, 15 bp, Homo sapiens
aagtagctgagctgg

SEQ ID NO: 772779 - DNA, 15 bp, Homo sapiens
agtagctgagctggc

SEQ ID NO: 772780 - DNA, 15 bp, Homo sapiens
gtagctgagctggct

SEQ ID NO: 772781 - DNA, 15 bp, Homo sapiens
tagctgagctggctg

SEQ ID NO: 772782 - DNA, 15 bp, Homo sapiens
agctgagctggctgc

SEQ ID NO: 772783 - DNA, 15 bp, Homo sapiens
gctgagctggctgcc

SEQ ID NO: 772784 - DNA, 15 bp, Homo sapiens
ctgagctggctgcct

SEQ ID NO: 772785 - DNA, 15 bp, Homo sapiens
tgagctggctgcctt

SEQ ID NO: 772786 - DNA, 15 bp, Homo sapiens
gagctggctgcctta

SEQ ID NO: 772787 - DNA, 15 bp, Homo sapiens
agctggctgccttaa

SEQ ID NO: 772788 - DNA, 15 bp, Homo sapiens
gctggctgccttaat

SEQ ID NO: 772789 - DNA, 15 bp, Homo sapiens
ctggctgccttaatt

SEQ ID NO: 772790 - DNA, 15 bp, Homo sapiens
tggctgccttaattt

SEQ ID NO: 772791 - DNA, 15 bp, Homo sapiens
ggctgccttaatttc

SEQ ID NO: 772792 - DNA, 15 bp, Homo sapiens
gctgccttaatttcc

SEQ ID NO: 772793 - DNA, 15 bp, Homo sapiens
ctgccttaatttcct

SEQ ID NO: 772794 - DNA, 15 bp, Homo sapiens
tgccttaatttcctt

SEQ ID NO: 772795 - DNA, 15 bp, Homo sapiens
gccttaatttcctta

SEQ ID NO: 772796 - DNA, 15 bp, Homo sapiens
ccttaatttccttac

SEQ ID NO: 772797 - DNA, 15 bp, Homo sapiens
cttaatttccttact

SEQ ID NO: 772798 - DNA, 15 bp, Homo sapiens
ttaatttccttacta

SEQ ID NO: 772799 - DNA, 15 bp, Homo sapiens
taatttccttactat

SEQ ID NO: 772800 - DNA, 15 bp, Homo sapiens
aatttccttactatt

SEQ ID NO: 772801 - DNA, 15 bp, Homo sapiens
atttccttactattc

SEQ ID NO: 772802 - DNA, 15 bp, Homo sapiens
tttccttactattca

SEQ ID NO: 772803 - DNA, 15 bp, Homo sapiens
ttccttactattcac

SEQ ID NO: 772804 - DNA, 15 bp, Homo sapiens
tccttactattcact

SEQ ID NO: 772805 - DNA, 15 bp, Homo sapiens
ccttactattcactg

SEQ ID NO: 772806 - DNA, 15 bp, Homo sapiens
cttactattcactgt

SEQ ID NO: 772807 - DNA, 15 bp, Homo sapiens
ttactattcactgtc

SEQ ID NO: 772808 - DNA, 15 bp, Homo sapiens
tactattcactgtct

SEQ ID NO: 772809 - DNA, 15 bp, Homo sapiens
actattcactgtctt

SEQ ID NO: 772810 - DNA, 15 bp, Homo sapiens
ctattcactgtcttt

SEQ ID NO: 772811 - DNA, 15 bp, Homo sapiens
tattcactgtcttta

SEQ ID NO: 772812 - DNA, 15 bp, Homo sapiens
attcactgtctttaa

SEQ ID NO: 772813 - DNA, 15 bp, Homo sapiens
ttcactgtctttaat

SEQ ID NO: 772814 - DNA, 15 bp, Homo sapiens
tcactgtctttaatc

SEQ ID NO: 772815 - DNA, 15 bp, Homo sapiens
cactgtctttaatca

SEQ ID NO: 772816 - DNA, 15 bp, Homo sapiens
actgtctttaatcac

SEQ ID NO: 772817 - DNA, 15 bp, Homo sapiens
ctgtctttaatcact

SEQ ID NO: 772818 - DNA, 15 bp, Homo sapiens
tgtctttaatcactt

SEQ ID NO: 772819 - DNA, 15 bp, Homo sapiens
gtctttaatcacttc

SEQ ID NO: 772820 - DNA, 15 bp, Homo sapiens
tctttaatcacttca

SEQ ID NO: 772821 - DNA, 15 bp, Homo sapiens
ctttaatcacttcaa

SEQ ID NO: 772822 - DNA, 15 bp, Homo sapiens
tttaatcacttcaaa

SEQ ID NO: 772823 - DNA, 15 bp, Homo sapiens
ttaatcacttcaaat

SEQ ID NO: 772824 - DNA, 15 bp, Homo sapiens
taatcacttcaaatt

SEQ ID NO: 772825 - DNA, 15 bp, Homo sapiens
aatcacttcaaattt

SEQ ID NO: 772826 - DNA, 15 bp, Homo sapiens
atcacttcaaatttg

SEQ ID NO: 772827 - DNA, 15 bp, Homo sapiens
tcacttcaaatttga

SEQ ID NO: 772828 - DNA, 15 bp, Homo sapiens
cacttcaaatttgac

SEQ ID NO: 772829 - DNA, 15 bp, Homo sapiens
acttcaaatttgact

SEQ ID NO: 772830 - DNA, 15 bp, Homo sapiens
cttcaaatttgactt

SEQ ID NO: 772831 - DNA, 15 bp, Homo sapiens
ttcaaatttgacttt

SEQ ID NO: 772832 - DNA, 15 bp, Homo sapiens
tcaaatttgactttg

SEQ ID NO: 772833 - DNA, 15 bp, Homo sapiens
caaatttgactttgg

SEQ ID NO: 772834 - DNA, 15 bp, Homo sapiens
aaatttgactttggc

SEQ ID NO: 772835 - DNA, 15 bp, Homo sapiens
aatttgactttggcc

SEQ ID NO: 772836 - DNA, 15 bp, Homo sapiens
atttgactttggccc

SEQ ID NO: 772837 - DNA, 15 bp, Homo sapiens
tttgactttggcccc

SEQ ID NO: 772838 - DNA, 15 bp, Homo sapiens
ttgactttggcccca

SEQ ID NO: 772839 - DNA, 15 bp, Homo sapiens
tgactttggccccac

SEQ ID NO: 772840 - DNA, 15 bp, Homo sapiens
gactttggccccact

SEQ ID NO: 772841 - DNA, 15 bp, Homo sapiens
actttggccccactt

SEQ ID NO: 772842 - DNA, 15 bp, Homo sapiens
ctttggccccacttc

SEQ ID NO: 772843 - DNA, 15 bp, Homo sapiens
tttggccccacttca

SEQ ID NO: 772844 - DNA, 15 bp, Homo sapiens
ttggccccacttcac

SEQ ID NO: 772845 - DNA, 15 bp, Homo sapiens
tggccccacttcacc

SEQ ID NO: 772846 - DNA, 15 bp, Homo sapiens
ggccccacttcacca

SEQ ID NO: 772847 - DNA, 15 bp, Homo sapiens
gccccacttcaccaa

SEQ ID NO: 772848 - DNA, 15 bp, Homo sapiens
ccccacttcaccaac

SEQ ID NO: 772849 - DNA, 15 bp, Homo sapiens
cccacttcaccaaca

SEQ ID NO: 772850 - DNA, 15 bp, Homo sapiens
ccacttcaccaacat

SEQ ID NO: 772851 - DNA, 15 bp, Homo sapiens
cacttcaccaacatg

SEQ ID NO: 772852 - DNA, 15 bp, Homo sapiens
acttcaccaacatgc

SEQ ID NO: 772853 - DNA, 15 bp, Homo sapiens
cttcaccaacatgcc

SEQ ID NO: 772854 - DNA, 15 bp, Homo sapiens
ttcaccaacatgccc

SEQ ID NO: 772855 - DNA, 15 bp, Homo sapiens
tcaccaacatgccca

SEQ ID NO: 772856 - DNA, 15 bp, Homo sapiens
caccaacatgcccag

SEQ ID NO: 772857 - DNA, 15 bp, Homo sapiens
accaacatgcccaga

SEQ ID NO: 772858 - DNA, 15 bp, Homo sapiens
ccaacatgcccagac

SEQ ID NO: 772859 - DNA, 15 bp, Homo sapiens
caacatgcccagact

SEQ ID NO: 772860 - DNA, 15 bp, Homo sapiens
aacatgcccagactc

SEQ ID NO: 772861 - DNA, 15 bp, Homo sapiens
acatgcccagactct

SEQ ID NO: 772862 - DNA, 15 bp, Homo sapiens
catgcccagactctc

SEQ ID NO: 772863 - DNA, 15 bp, Homo sapiens
atgcccagactctcg

SEQ ID NO: 772864 - DNA, 15 bp, Homo sapiens
tgcccagactctcgc

SEQ ID NO: 772865 - DNA, 15 bp, Homo sapiens
gcccagactctcgcc

SEQ ID NO: 772866 - DNA, 15 bp, Homo sapiens
cccagactctcgccc

SEQ ID NO: 772867 - DNA, 15 bp, Homo sapiens
ccagactctcgccct

SEQ ID NO: 772868 - DNA, 15 bp, Homo sapiens
cagactctcgccctt

SEQ ID NO: 772869 - DNA, 15 bp, Homo sapiens
agactctcgcccttt

SEQ ID NO: 772870 - DNA, 15 bp, Homo sapiens
gactctcgcccttta

SEQ ID NO: 772871 - DNA, 15 bp, Homo sapiens
actctcgccctttat

SEQ ID NO: 772872 - DNA, 15 bp, Homo sapiens
ctctcgccctttatg

SEQ ID NO: 772873 - DNA, 15 bp, Homo sapiens
tctcgccctttatgt

SEQ ID NO: 772874 - DNA, 15 bp, Homo sapiens
ctcgccctttatgtc

SEQ ID NO: 772875 - DNA, 15 bp, Homo sapiens
tcgccctttatgtca

SEQ ID NO: 772876 - DNA, 15 bp, Homo sapiens
cgccctttatgtcac

SEQ ID NO: 772877 - DNA, 15 bp, Homo sapiens
gccctttatgtcaca

SEQ ID NO: 772878 - DNA, 15 bp, Homo sapiens
ccctttatgtcacat

SEQ ID NO: 772879 - DNA, 15 bp, Homo sapiens
cctttatgtcacatt

SEQ ID NO: 772880 - DNA, 15 bp, Homo sapiens
ctttatgtcacattg

SEQ ID NO: 772881 - DNA, 15 bp, Homo sapiens
tttatgtcacattgg

SEQ ID NO: 772882 - DNA, 15 bp, Homo sapiens
ttatgtcacattggg

SEQ ID NO: 772883 - DNA, 15 bp, Homo sapiens
tatgtcacattggga

SEQ ID NO: 772884 - DNA, 15 bp, Homo sapiens
atgtcacattgggaa

SEQ ID NO: 772885 - DNA, 15 bp, Homo sapiens
tgtcacattgggaaa

SEQ ID NO: 772886 - DNA, 15 bp, Homo sapiens
gtcacattgggaaag

SEQ ID NO: 772887 - DNA, 15 bp, Homo sapiens
tcacattgggaaagc

SEQ ID NO: 772888 - DNA, 15 bp, Homo sapiens
cacattgggaaagcc

SEQ ID NO: 772889 - DNA, 15 bp, Homo sapiens
acattgggaaagcca

SEQ ID NO: 772890 - DNA, 15 bp, Homo sapiens
cattgggaaagccac

SEQ ID NO: 772891 - DNA, 15 bp, Homo sapiens
attgggaaagccaca

SEQ ID NO: 772892 - DNA, 15 bp, Homo sapiens
ttgggaaagccacat

SEQ ID NO: 772893 - DNA, 15 bp, Homo sapiens
tgggaaagccacatc

SEQ ID NO: 772894 - DNA, 15 bp, Homo sapiens
gggaaagccacatcc

SEQ ID NO: 772895 - DNA, 15 bp, Homo sapiens
ggaaagccacatcct

SEQ ID NO: 772896 - DNA, 15 bp, Homo sapiens
gaaagccacatcctg

SEQ ID NO: 772897 - DNA, 15 bp, Homo sapiens
aaagccacatcctgt

SEQ ID NO: 772898 - DNA, 15 bp, Homo sapiens
aagccacatcctgtt

SEQ ID NO: 772899 - DNA, 15 bp, Homo sapiens
agccacatcctgttg

SEQ ID NO: 772900 - DNA, 15 bp, Homo sapiens
gccacatcctgttga

SEQ ID NO: 772901 - DNA, 15 bp, Homo sapiens
ccacatcctgttgaa

SEQ ID NO: 772902 - DNA, 15 bp, Homo sapiens
cacatcctgttgaat

SEQ ID NO: 772903 - DNA, 15 bp, Homo sapiens
acatcctgttgaatt

SEQ ID NO: 772904 - DNA, 15 bp, Homo sapiens
catcctgttgaattt

SEQ ID NO: 772905 - DNA, 15 bp, Homo sapiens
atcctgttgaattta

SEQ ID NO: 772906 - DNA, 15 bp, Homo sapiens
tcctgttgaatttaa

SEQ ID NO: 772907 - DNA, 15 bp, Homo sapiens
cctgttgaatttaac

SEQ ID NO: 772908 - DNA, 15 bp, Homo sapiens
ctgttgaatttaact

SEQ ID NO: 772909 - DNA, 15 bp, Homo sapiens
tgttgaatttaactc

SEQ ID NO: 772910 - DNA, 15 bp, Homo sapiens
gttgaatttaactct

SEQ ID NO: 772911 - DNA, 15 bp, Homo sapiens
ttgaatttaactctg

SEQ ID NO: 772912 - DNA, 15 bp, Homo sapiens
tgaatttaactctgc

SEQ ID NO: 772913 - DNA, 15 bp, Homo sapiens
gaatttaactctgca

SEQ ID NO: 772914 - DNA, 15 bp, Homo sapiens
aatttaactctgcaa

SEQ ID NO: 772915 - DNA, 15 bp, Homo sapiens
atttaactctgcaac

SEQ ID NO: 772916 - DNA, 15 bp, Homo sapiens
tttaactctgcaaca

SEQ ID NO: 772917 - DNA, 15 bp, Homo sapiens
ttaactctgcaacat

SEQ ID NO: 772918 - DNA, 15 bp, Homo sapiens
taactctgcaacatc

SEQ ID NO: 772919 - DNA, 15 bp, Homo sapiens
aactctgcaacatct

SEQ ID NO: 772920 - DNA, 15 bp, Homo sapiens
actctgcaacatctg

SEQ ID NO: 772921 - DNA, 15 bp, Homo sapiens
ctctgcaacatctga

SEQ ID NO: 772922 - DNA, 15 bp, Homo sapiens
tctgcaacatctgat

SEQ ID NO: 772923 - DNA, 15 bp, Homo sapiens
ctgcaacatctgata

SEQ ID NO: 772924 - DNA, 15 bp, Homo sapiens
tgcaacatctgatat

SEQ ID NO: 772925 - DNA, 15 bp, Homo sapiens
gcaacatctgatatg

SEQ ID NO: 772926 - DNA, 15 bp, Homo sapiens
caacatctgatatgc

SEQ ID NO: 772927 - DNA, 15 bp, Homo sapiens
aacatctgatatgct

SEQ ID NO: 772928 - DNA, 15 bp, Homo sapiens
acatctgatatgctc

SEQ ID NO: 772929 - DNA, 15 bp, Homo sapiens
catctgatatgctca

SEQ ID NO: 772930 - DNA, 15 bp, Homo sapiens
atctgatatgctcaa

SEQ ID NO: 772931 - DNA, 15 bp, Homo sapiens
tctgatatgctcaac

SEQ ID NO: 772932 - DNA, 15 bp, Homo sapiens
ctgatatgctcaact

SEQ ID NO: 772933 - DNA, 15 bp, Homo sapiens
tgatatgctcaactc

SEQ ID NO: 772934 - DNA, 15 bp, Homo sapiens
gatatgctcaactcc

SEQ ID NO: 772935 - DNA, 15 bp, Homo sapiens
atatgctcaactccc

SEQ ID NO: 772936 - DNA, 15 bp, Homo sapiens
tatgctcaactcccc

SEQ ID NO: 772937 - DNA, 15 bp, Homo sapiens
atgctcaactcccct

SEQ ID NO: 772938 - DNA, 15 bp, Homo sapiens
tgctcaactcccctc

SEQ ID NO: 772939 - DNA, 15 bp, Homo sapiens
gctcaactcccctct

SEQ ID NO: 772940 - DNA, 15 bp, Homo sapiens
ctcaactcccctctc

SEQ ID NO: 772941 - DNA, 15 bp, Homo sapiens
tcaactcccctctct

SEQ ID NO: 772942 - DNA, 15 bp, Homo sapiens
caactcccctctctg

SEQ ID NO: 772943 - DNA, 15 bp, Homo sapiens
aactcccctctctgg

SEQ ID NO: 772944 - DNA, 15 bp, Homo sapiens
actcccctctctggt

SEQ ID NO: 772945 - DNA, 15 bp, Homo sapiens
ctcccctctctggtg

SEQ ID NO: 772946 - DNA, 15 bp, Homo sapiens
tcccctctctggtgg

SEQ ID NO: 772947 - DNA, 15 bp, Homo sapiens
cccctctctggtggt

SEQ ID NO: 772948 - DNA, 15 bp, Homo sapiens
ccctctctggtggta

SEQ ID NO: 772949 - DNA, 15 bp, Homo sapiens
cctctctggtggtat

SEQ ID NO: 772950 - DNA, 15 bp, Homo sapiens
ctctctggtggtatt

SEQ ID NO: 772951 - DNA, 15 bp, Homo sapiens
tctctggtggtatta

SEQ ID NO: 772952 - DNA, 15 bp, Homo sapiens
ctctggtggtattat

SEQ ID NO: 772953 - DNA, 15 bp, Homo sapiens
tctggtggtattata

SEQ ID NO: 772954 - DNA, 15 bp, Homo sapiens
ctggtggtattatag

SEQ ID NO: 772955 - DNA, 15 bp, Homo sapiens
tggtggtattatagg

SEQ ID NO: 772956 - DNA, 15 bp, Homo sapiens
ggtggtattataggc

SEQ ID NO: 772957 - DNA, 15 bp, Homo sapiens
gtggtattataggcg

SEQ ID NO: 772958 - DNA, 15 bp, Homo sapiens
tggtattataggcgc

SEQ ID NO: 772959 - DNA, 15 bp, Homo sapiens
ggtattataggcgct

SEQ ID NO: 772960 - DNA, 15 bp, Homo sapiens
gtattataggcgctc

SEQ ID NO: 772961 - DNA, 15 bp, Homo sapiens
tattataggcgctcc

SEQ ID NO: 772962 - DNA, 15 bp, Homo sapiens
attataggcgctccc

SEQ ID NO: 772963 - DNA, 15 bp, Homo sapiens
ttataggcgctcccc

SEQ ID NO: 772964 - DNA, 15 bp, Homo sapiens
tataggcgctcccct

SEQ ID NO: 772965 - DNA, 15 bp, Homo sapiens
ataggcgctcccctc

SEQ ID NO: 772966 - DNA, 15 bp, Homo sapiens
taggcgctcccctct

SEQ ID NO: 772967 - DNA, 15 bp, Homo sapiens
aggcgctcccctctg

SEQ ID NO: 772968 - DNA, 15 bp, Homo sapiens
ggcgctcccctctga

SEQ ID NO: 772969 - DNA, 15 bp, Homo sapiens
gcgctcccctctgaa

SEQ ID NO: 772970 - DNA, 15 bp, Homo sapiens
cgctcccctctgaaa

SEQ ID NO: 772971 - DNA, 15 bp, Homo sapiens
gctcccctctgaaat

SEQ ID NO: 772972 - DNA, 15 bp, Homo sapiens
ctcccctctgaaata

SEQ ID NO: 772973 - DNA, 15 bp, Homo sapiens
tcccctctgaaataa

SEQ ID NO: 772974 - DNA, 15 bp, Homo sapiens
cccctctgaaataat

SEQ ID NO: 772975 - DNA, 15 bp, Homo sapiens
ccctctgaaataatt

SEQ ID NO: 772976 - DNA, 15 bp, Homo sapiens
cctctgaaataattc

SEQ ID NO: 772977 - DNA, 15 bp, Homo sapiens
ctctgaaataattcc

SEQ ID NO: 772978 - DNA, 15 bp, Homo sapiens
tctgaaataattccc

SEQ ID NO: 772979 - DNA, 15 bp, Homo sapiens
ctgaaataattcccg

SEQ ID NO: 772980 - DNA, 15 bp, Homo sapiens
tgaaataattcccgc

SEQ ID NO: 772981 - DNA, 15 bp, Homo sapiens
gaaataattcccgca

SEQ ID NO: 772982 - DNA, 15 bp, Homo sapiens
aaataattcccgcag

SEQ ID NO: 772983 - DNA, 15 bp, Homo sapiens
aataattcccgcagc

SEQ ID NO: 772984 - DNA, 15 bp, Homo sapiens
ataattcccgcagct

SEQ ID NO: 772985 - DNA, 15 bp, Homo sapiens
taattcccgcagctg

SEQ ID NO: 772986 - DNA, 15 bp, Homo sapiens
aattcccgcagctgc

SEQ ID NO: 772987 - DNA, 15 bp, Homo sapiens
attcccgcagctgca

SEQ ID NO: 772988 - DNA, 15 bp, Homo sapiens
ttcccgcagctgcac

SEQ ID NO: 772989 - DNA, 15 bp, Homo sapiens
tcccgcagctgcaca

SEQ ID NO: 772990 - DNA, 15 bp, Homo sapiens
cccgcagctgcacat

SEQ ID NO: 772991 - DNA, 15 bp, Homo sapiens
ccgcagctgcacatt

SEQ ID NO: 772992 - DNA, 15 bp, Homo sapiens
cgcagctgcacattt

SEQ ID NO: 772993 - DNA, 15 bp, Homo sapiens
gcagctgcacatttt

SEQ ID NO: 772994 - DNA, 15 bp, Homo sapiens
cagctgcacatttta

SEQ ID NO: 772995 - DNA, 15 bp, Homo sapiens
agctgcacattttac

SEQ ID NO: 772996 - DNA, 15 bp, Homo sapiens
gctgcacattttaca

SEQ ID NO: 772997 - DNA, 15 bp, Homo sapiens
ctgcacattttacac

SEQ ID NO: 772998 - DNA, 15 bp, Homo sapiens
tgcacattttacaca

SEQ ID NO: 772999 - DNA, 15 bp, Homo sapiens
gcacattttacacac

SEQ ID NO: 773000 - DNA, 15 bp, Homo sapiens
cacattttacacact

SEQ ID NO: 773001 - DNA, 15 bp, Homo sapiens
acattttacacactc

SEQ ID NO: 773002 - DNA, 15 bp, Homo sapiens
cattttacacactct

SEQ ID NO: 773003 - DNA, 15 bp, Homo sapiens
attttacacactcta

SEQ ID NO: 773004 - DNA, 15 bp, Homo sapiens
ttttacacactctac

SEQ ID NO: 773005 - DNA, 15 bp, Homo sapiens
tttacacactctacc

SEQ ID NO: 773006 - DNA, 15 bp, Homo sapiens
ttacacactctaccc

SEQ ID NO: 773007 - DNA, 15 bp, Homo sapiens
tacacactctacccc

SEQ ID NO: 773008 - DNA, 15 bp, Homo sapiens
acacactctacccca

SEQ ID NO: 773009 - DNA, 15 bp, Homo sapiens
cacactctaccccat

SEQ ID NO: 773010 - DNA, 15 bp, Homo sapiens
acactctaccccatt

SEQ ID NO: 773011 - DNA, 15 bp, Homo sapiens
cactctaccccattg

SEQ ID NO: 773012 - DNA, 15 bp, Homo sapiens
actctaccccattgc

SEQ ID NO: 773013 - DNA, 15 bp, Homo sapiens
ctctaccccattgct

SEQ ID NO: 773014 - DNA, 15 bp, Homo sapiens
tctaccccattgcta

SEQ ID NO: 773015 - DNA, 15 bp, Homo sapiens
ctaccccattgctac

SEQ ID NO: 773016 - DNA, 15 bp, Homo sapiens
taccccattgctacc

SEQ ID NO: 773017 - DNA, 15 bp, Homo sapiens
accccattgctacca

SEQ ID NO: 773018 - DNA, 15 bp, Homo sapiens
ccccattgctaccag

SEQ ID NO: 773019 - DNA, 15 bp, Homo sapiens
cccattgctaccaga

SEQ ID NO: 773020 - DNA, 15 bp, Homo sapiens
ccattgctaccagat

SEQ ID NO: 773021 - DNA, 15 bp, Homo sapiens
cattgctaccagatg

SEQ ID NO: 773022 - DNA, 15 bp, Homo sapiens
attgctaccagatgt

SEQ ID NO: 773023 - DNA, 15 bp, Homo sapiens
ttgctaccagatgtg

SEQ ID NO: 773024 - DNA, 15 bp, Homo sapiens
tgctaccagatgtgt

SEQ ID NO: 773025 - DNA, 15 bp, Homo sapiens
gctaccagatgtgtc

SEQ ID NO: 773026 - DNA, 15 bp, Homo sapiens
ctaccagatgtgtct

SEQ ID NO: 773027 - DNA, 15 bp, Homo sapiens
taccagatgtgtctg

SEQ ID NO: 773028 - DNA, 15 bp, Homo sapiens
accagatgtgtctgt

SEQ ID NO: 773029 - DNA, 15 bp, Homo sapiens
ccagatgtgtctgtc

SEQ ID NO: 773030 - DNA, 15 bp, Homo sapiens
cagatgtgtctgtct

SEQ ID NO: 773031 - DNA, 15 bp, Homo sapiens
agatgtgtctgtctt

SEQ ID NO: 773032 - DNA, 15 bp, Homo sapiens
gatgtgtctgtcttt

SEQ ID NO: 773033 - DNA, 15 bp, Homo sapiens
atgtgtctgtctttg

SEQ ID NO: 773034 - DNA, 15 bp, Homo sapiens
tgtgtctgtctttgt

SEQ ID NO: 773035 - DNA, 15 bp, Homo sapiens
gtgtctgtctttgtc

SEQ ID NO: 773036 - DNA, 15 bp, Homo sapiens
tgtctgtctttgtca

SEQ ID NO: 773037 - DNA, 15 bp, Homo sapiens
gtctgtctttgtcac

SEQ ID NO: 773038 - DNA, 15 bp, Homo sapiens
tctgtctttgtcaca

SEQ ID NO: 773039 - DNA, 15 bp, Homo sapiens
ctgtctttgtcacat

SEQ ID NO: 773040 - DNA, 15 bp, Homo sapiens
tgtctttgtcacatc

SEQ ID NO: 773041 - DNA, 15 bp, Homo sapiens
gtctttgtcacatct

SEQ ID NO: 773042 - DNA, 15 bp, Homo sapiens
tctttgtcacatctc

SEQ ID NO: 773043 - DNA, 15 bp, Homo sapiens
ctttgtcacatctct

SEQ ID NO: 773044 - DNA, 15 bp, Homo sapiens
tttgtcacatctctg

SEQ ID NO: 773045 - DNA, 15 bp, Homo sapiens
ttgtcacatctctgg

SEQ ID NO: 773046 - DNA, 15 bp, Homo sapiens
tgtcacatctctggt

SEQ ID NO: 773047 - DNA, 15 bp, Homo sapiens
gtcacatctctggtt

SEQ ID NO: 773048 - DNA, 15 bp, Homo sapiens
tcacatctctggtta

SEQ ID NO: 773049 - DNA, 15 bp, Homo sapiens
cacatctctggttat

SEQ ID NO: 773050 - DNA, 15 bp, Homo sapiens
acatctctggttatg

SEQ ID NO: 773051 - DNA, 15 bp, Homo sapiens
catctctggttatga

SEQ ID NO: 773052 - DNA, 15 bp, Homo sapiens
atctctggttatgaa

SEQ ID NO: 773053 - DNA, 15 bp, Homo sapiens
tctctggttatgaat

SEQ ID NO: 773054 - DNA, 15 bp, Homo sapiens
ctctggttatgaatg

SEQ ID NO: 773055 - DNA, 15 bp, Homo sapiens
tctggttatgaatgg

SEQ ID NO: 773056 - DNA, 15 bp, Homo sapiens
ctggttatgaatggt

SEQ ID NO: 773057 - DNA, 15 bp, Homo sapiens
tggttatgaatggta

SEQ ID NO: 773058 - DNA, 15 bp, Homo sapiens
ggttatgaatggtat

SEQ ID NO: 773059 - DNA, 15 bp, Homo sapiens
gttatgaatggtatc

SEQ ID NO: 773060 - DNA, 15 bp, Homo sapiens
ttatgaatggtatct

SEQ ID NO: 773061 - DNA, 15 bp, Homo sapiens
tatgaatggtatctt

SEQ ID NO: 773062 - DNA, 15 bp, Homo sapiens
atgaatggtatcttc

SEQ ID NO: 773063 - DNA, 15 bp, Homo sapiens
tgaatggtatcttct

SEQ ID NO: 773064 - DNA, 15 bp, Homo sapiens
gaatggtatcttctt

SEQ ID NO: 773065 - DNA, 15 bp, Homo sapiens
aatggtatcttcttt

SEQ ID NO: 773066 - DNA, 15 bp, Homo sapiens
atggtatcttctttc

SEQ ID NO: 773067 - DNA, 15 bp, Homo sapiens
tggtatcttctttct

SEQ ID NO: 773068 - DNA, 15 bp, Homo sapiens
ggtatcttctttctg

SEQ ID NO: 773069 - DNA, 15 bp, Homo sapiens
gtatcttctttctgc

SEQ ID NO: 773070 - DNA, 15 bp, Homo sapiens
tatcttctttctgcc

SEQ ID NO: 773071 - DNA, 15 bp, Homo sapiens
atcttctttctgcct

SEQ ID NO: 773072 - DNA, 15 bp, Homo sapiens
tcttctttctgcctg

SEQ ID NO: 773073 - DNA, 15 bp, Homo sapiens
cttctttctgcctgc

SEQ ID NO: 773074 - DNA, 15 bp, Homo sapiens
ttctttctgcctgct

SEQ ID NO: 773075 - DNA, 15 bp, Homo sapiens
tctttctgcctgcta

SEQ ID NO: 773076 - DNA, 15 bp, Homo sapiens
ctttctgcctgctat

SEQ ID NO: 773077 - DNA, 15 bp, Homo sapiens
tttctgcctgctata

SEQ ID NO: 773078 - DNA, 15 bp, Homo sapiens
ttctgcctgctatat

SEQ ID NO: 773079 - DNA, 15 bp, Homo sapiens
tctgcctgctatatg

SEQ ID NO: 773080 - DNA, 15 bp, Homo sapiens
ctgcctgctatatga

SEQ ID NO: 773081 - DNA, 15 bp, Homo sapiens
tgcctgctatatgaa

SEQ ID NO: 773082 - DNA, 15 bp, Homo sapiens
gcctgctatatgaag

SEQ ID NO: 773083 - DNA, 15 bp, Homo sapiens
cctgctatatgaagt

SEQ ID NO: 773084 - DNA, 15 bp, Homo sapiens
ctgctatatgaagtc

SEQ ID NO: 773085 - DNA, 15 bp, Homo sapiens
tgctatatgaagtcc

SEQ ID NO: 773086 - DNA, 15 bp, Homo sapiens
gctatatgaagtcca

SEQ ID NO: 773087 - DNA, 15 bp, Homo sapiens
ctatatgaagtccac

SEQ ID NO: 773088 - DNA, 15 bp, Homo sapiens
tatatgaagtccact

SEQ ID NO: 773089 - DNA, 15 bp, Homo sapiens
atatgaagtccactt

SEQ ID NO: 773090 - DNA, 15 bp, Homo sapiens
tatgaagtccacttt

SEQ ID NO: 773091 - DNA, 15 bp, Homo sapiens
atgaagtccactttt

SEQ ID NO: 773092 - DNA, 15 bp, Homo sapiens
tgaagtccacttttc

SEQ ID NO: 773093 - DNA, 15 bp, Homo sapiens
gaagtccacttttct

SEQ ID NO: 773094 - DNA, 15 bp, Homo sapiens
aagtccacttttctt

SEQ ID NO: 773095 - DNA, 15 bp, Homo sapiens
agtccacttttcttg

SEQ ID NO: 773096 - DNA, 15 bp, Homo sapiens
gtccacttttcttgg

SEQ ID NO: 773097 - DNA, 15 bp, Homo sapiens
tccacttttcttggc

SEQ ID NO: 773098 - DNA, 15 bp, Homo sapiens
ccacttttcttggct

SEQ ID NO: 773099 - DNA, 15 bp, Homo sapiens
cacttttcttggctt

SEQ ID NO: 773100 - DNA, 15 bp, Homo sapiens
acttttcttggcttg

SEQ ID NO: 773101 - DNA, 15 bp, Homo sapiens
cttttcttggcttgg

SEQ ID NO: 773102 - DNA, 15 bp, Homo sapiens
ttttcttggcttggc

SEQ ID NO: 773103 - DNA, 15 bp, Homo sapiens
tttcttggcttggca

SEQ ID NO: 773104 - DNA, 15 bp, Homo sapiens
ttcttggcttggcat

SEQ ID NO: 773105 - DNA, 15 bp, Homo sapiens
tcttggcttggcatt

SEQ ID NO: 773106 - DNA, 15 bp, Homo sapiens
cttggcttggcattt

SEQ ID NO: 773107 - DNA, 15 bp, Homo sapiens
ttggcttggcatttg

SEQ ID NO: 773108 - DNA, 15 bp, Homo sapiens
tggcttggcatttga

SEQ ID NO: 773109 - DNA, 15 bp, Homo sapiens
ggcttggcatttgag

SEQ ID NO: 773110 - DNA, 15 bp, Homo sapiens
gcttggcatttgagc

SEQ ID NO: 773111 - DNA, 15 bp, Homo sapiens
cttggcatttgagcc

SEQ ID NO: 773112 - DNA, 15 bp, Homo sapiens
ttggcatttgagcca

SEQ ID NO: 773113 - DNA, 15 bp, Homo sapiens
tggcatttgagccag

SEQ ID NO: 773114 - DNA, 15 bp, Homo sapiens
ggcatttgagccagc

SEQ ID NO: 773115 - DNA, 15 bp, Homo sapiens
gcatttgagccagca

SEQ ID NO: 773116 - DNA, 15 bp, Homo sapiens
catttgagccagcat

SEQ ID NO: 773117 - DNA, 15 bp, Homo sapiens
atttgagccagcatt

SEQ ID NO: 773118 - DNA, 15 bp, Homo sapiens
tttgagccagcattc

SEQ ID NO: 773119 - DNA, 15 bp, Homo sapiens
ttgagccagcattct

SEQ ID NO: 773120 - DNA, 15 bp, Homo sapiens
tgagccagcattctc

SEQ ID NO: 773121 - DNA, 15 bp, Homo sapiens
gagccagcattctct

SEQ ID NO: 773122 - DNA, 15 bp, Homo sapiens
agccagcattctctc

SEQ ID NO: 773123 - DNA, 15 bp, Homo sapiens
gccagcattctctcc

SEQ ID NO: 773124 - DNA, 15 bp, Homo sapiens
ccagcattctctccc

SEQ ID NO: 773125 - DNA, 15 bp, Homo sapiens
cagcattctctccca

SEQ ID NO: 773126 - DNA, 15 bp, Homo sapiens
agcattctctcccac

SEQ ID NO: 773127 - DNA, 15 bp, Homo sapiens
gcattctctcccact

SEQ ID NO: 773128 - DNA, 15 bp, Homo sapiens
cattctctcccactg

SEQ ID NO: 773129 - DNA, 15 bp, Homo sapiens
attctctcccactgc

SEQ ID NO: 773130 - DNA, 15 bp, Homo sapiens
ttctctcccactgct

SEQ ID NO: 773131 - DNA, 15 bp, Homo sapiens
ctctcccactgcttc

SEQ ID NO: 773132 - DNA, 15 bp, Homo sapiens
tctcccactgcttct

SEQ ID NO: 773133 - DNA, 15 bp, Homo sapiens
ctcccactgcttctc

SEQ ID NO: 773134 - DNA, 15 bp, Homo sapiens
tcccactgcttctca

SEQ ID NO: 773135 - DNA, 15 bp, Homo sapiens
cccactgcttctcat

SEQ ID NO: 773136 - DNA, 15 bp, Homo sapiens
ccactgcttctcatc

SEQ ID NO: 773137 - DNA, 15 bp, Homo sapiens
cactgcttctcatcc

SEQ ID NO: 773138 - DNA, 15 bp, Homo sapiens
actgcttctcatccg

SEQ ID NO: 773139 - DNA, 15 bp, Homo sapiens
ctgcttctcatccgc

SEQ ID NO: 773140 - DNA, 15 bp, Homo sapiens
tgcttctcatccgcc

SEQ ID NO: 773141 - DNA, 15 bp, Homo sapiens
gcttctcatccgccc

SEQ ID NO: 773142 - DNA, 15 bp, Homo sapiens
cttctcatccgccct

SEQ ID NO: 773143 - DNA, 15 bp, Homo sapiens
ttctcatccgccctg

SEQ ID NO: 773144 - DNA, 15 bp, Homo sapiens
tctcatccgccctgt

SEQ ID NO: 773145 - DNA, 15 bp, Homo sapiens
ctcatccgccctgtt

SEQ ID NO: 773146 - DNA, 15 bp, Homo sapiens
tcatccgccctgttt

SEQ ID NO: 773147 - DNA, 15 bp, Homo sapiens
catccgccctgtttt

SEQ ID NO: 773148 - DNA, 15 bp, Homo sapiens
atccgccctgttttc

SEQ ID NO: 773149 - DNA, 15 bp, Homo sapiens
tccgccctgttttcc

SEQ ID NO: 773150 - DNA, 15 bp, Homo sapiens
ccgccctgttttcca

SEQ ID NO: 773151 - DNA, 15 bp, Homo sapiens
cgccctgttttccaa

SEQ ID NO: 773152 - DNA, 15 bp, Homo sapiens
gccctgttttccaat

SEQ ID NO: 773153 - DNA, 15 bp, Homo sapiens
ccctgttttccaatc

SEQ ID NO: 773154 - DNA, 15 bp, Homo sapiens
cctgttttccaatcc

SEQ ID NO: 773155 - DNA, 15 bp, Homo sapiens
ctgttttccaatcca

SEQ ID NO: 773156 - DNA, 15 bp, Homo sapiens
tgttttccaatccaa

SEQ ID NO: 773157 - DNA, 15 bp, Homo sapiens
gttttccaatccaat

SEQ ID NO: 773158 - DNA, 15 bp, Homo sapiens
ttttccaatccaatt

SEQ ID NO: 773159 - DNA, 15 bp, Homo sapiens
tttccaatccaattc

SEQ ID NO: 773160 - DNA, 15 bp, Homo sapiens
ttccaatccaattcc

SEQ ID NO: 773161 - DNA, 15 bp, Homo sapiens
tccaatccaattcct

SEQ ID NO: 773162 - DNA, 15 bp, Homo sapiens
ccaatccaattcctt

SEQ ID NO: 773163 - DNA, 15 bp, Homo sapiens
caatccaattccttt

SEQ ID NO: 773164 - DNA, 15 bp, Homo sapiens
aatccaattccttta

SEQ ID NO: 773165 - DNA, 15 bp, Homo sapiens
atccaattcctttat

SEQ ID NO: 773166 - DNA, 15 bp, Homo sapiens
tccaattcctttatg

SEQ ID NO: 773167 - DNA, 15 bp, Homo sapiens
ccaattcctttatgt

SEQ ID NO: 773168 - DNA, 15 bp, Homo sapiens
caattcctttatgta

SEQ ID NO: 773169 - DNA, 15 bp, Homo sapiens
aattcctttatgtat

SEQ ID NO: 773170 - DNA, 15 bp, Homo sapiens
attcctttatgtatg

SEQ ID NO: 773171 - DNA, 15 bp, Homo sapiens
ttcctttatgtatgc

SEQ ID NO: 773172 - DNA, 15 bp, Homo sapiens
tcctttatgtatgct

SEQ ID NO: 773173 - DNA, 15 bp, Homo sapiens
cctttatgtatgctg

SEQ ID NO: 773174 - DNA, 15 bp, Homo sapiens
ctttatgtatgctgt

SEQ ID NO: 773175 - DNA, 15 bp, Homo sapiens
tttatgtatgctgtg

SEQ ID NO: 773176 - DNA, 15 bp, Homo sapiens
ttatgtatgctgtga

SEQ ID NO: 773177 - DNA, 15 bp, Homo sapiens
tatgtatgctgtgat

SEQ ID NO: 773178 - DNA, 15 bp, Homo sapiens
atgtatgctgtgata

SEQ ID NO: 773179 - DNA, 15 bp, Homo sapiens
tgtatgctgtgatat

SEQ ID NO: 773180 - DNA, 15 bp, Homo sapiens
gtatgctgtgatatc

SEQ ID NO: 773181 - DNA, 15 bp, Homo sapiens
tatgctgtgatatct

SEQ ID NO: 773182 - DNA, 15 bp, Homo sapiens
atgctgtgatatcta

SEQ ID NO: 773183 - DNA, 15 bp, Homo sapiens
tgctgtgatatctac

SEQ ID NO: 773184 - DNA, 15 bp, Homo sapiens
gctgtgatatctacc

SEQ ID NO: 773185 - DNA, 15 bp, Homo sapiens
ctgtgatatctacct

SEQ ID NO: 773186 - DNA, 15 bp, Homo sapiens
tgtgatatctaccta

SEQ ID NO: 773187 - DNA, 15 bp, Homo sapiens
gtgatatctacctag

SEQ ID NO: 773188 - DNA, 15 bp, Homo sapiens
tgatatctacctaga

SEQ ID NO: 773189 - DNA, 15 bp, Homo sapiens
gatatctacctagag

SEQ ID NO: 773190 - DNA, 15 bp, Homo sapiens
atatctacctagagt

SEQ ID NO: 773191 - DNA, 15 bp, Homo sapiens
tatctacctagagtc

SEQ ID NO: 773192 - DNA, 15 bp, Homo sapiens
atctacctagagtcc

SEQ ID NO: 773193 - DNA, 15 bp, Homo sapiens
tctacctagagtcca

SEQ ID NO: 773194 - DNA, 15 bp, Homo sapiens
ctacctagagtccat

SEQ ID NO: 773195 - DNA, 15 bp, Homo sapiens
tacctagagtccata

SEQ ID NO: 773196 - DNA, 15 bp, Homo sapiens
acctagagtccatac

SEQ ID NO: 773197 - DNA, 15 bp, Homo sapiens
cctagagtccatact

SEQ ID NO: 773198 - DNA, 15 bp, Homo sapiens
ctagagtccatactc

SEQ ID NO: 773199 - DNA, 15 bp, Homo sapiens
tagagtccatactct

SEQ ID NO: 773200 - DNA, 15 bp, Homo sapiens
agagtccatactctc

SEQ ID NO: 773201 - DNA, 15 bp, Homo sapiens
gagtccatactctct

SEQ ID NO: 773202 - DNA, 15 bp, Homo sapiens
agtccatactctctc

SEQ ID NO: 773203 - DNA, 15 bp, Homo sapiens
gtccatactctctct

SEQ ID NO: 773204 - DNA, 15 bp, Homo sapiens
tccatactctctctt

SEQ ID NO: 773205 - DNA, 15 bp, Homo sapiens
ccatactctctcttc

SEQ ID NO: 773206 - DNA, 15 bp, Homo sapiens
catactctctcttct

SEQ ID NO: 773207 - DNA, 15 bp, Homo sapiens
atactctctcttctt

SEQ ID NO: 773208 - DNA, 15 bp, Homo sapiens
tactctctcttcttt

SEQ ID NO: 773209 - DNA, 15 bp, Homo sapiens
actctctcttctttc

SEQ ID NO: 773210 - DNA, 15 bp, Homo sapiens
ctctctcttctttcc

SEQ ID NO: 773211 - DNA, 15 bp, Homo sapiens
tctctcttctttcct

SEQ ID NO: 773212 - DNA, 15 bp, Homo sapiens
ctctcttctttcctc

SEQ ID NO: 773213 - DNA, 15 bp, Homo sapiens
tctcttctttcctct

SEQ ID NO: 773214 - DNA, 15 bp, Homo sapiens
ctcttctttcctctc

SEQ ID NO: 773215 - DNA, 15 bp, Homo sapiens
tcttctttcctctct

SEQ ID NO: 773216 - DNA, 15 bp, Homo sapiens
cttctttcctctcta

SEQ ID NO: 773217 - DNA, 15 bp, Homo sapiens
ttctttcctctctaa

SEQ ID NO: 773218 - DNA, 15 bp, Homo sapiens
tctttcctctctaat

SEQ ID NO: 773219 - DNA, 15 bp, Homo sapiens
ctttcctctctaatc

SEQ ID NO: 773220 - DNA, 15 bp, Homo sapiens
tttcctctctaatct

SEQ ID NO: 773221 - DNA, 15 bp, Homo sapiens
ttcctctctaatctc

SEQ ID NO: 773222 - DNA, 15 bp, Homo sapiens
tcctctctaatctca

SEQ ID NO: 773223 - DNA, 15 bp, Homo sapiens
cctctctaatctcat

SEQ ID NO: 773224 - DNA, 15 bp, Homo sapiens
ctctctaatctcatg

SEQ ID NO: 773225 - DNA, 15 bp, Homo sapiens
tctctaatctcatgt

SEQ ID NO: 773226 - DNA, 15 bp, Homo sapiens
ctctaatctcatgtt

SEQ ID NO: 773227 - DNA, 15 bp, Homo sapiens
tctaatctcatgttc

SEQ ID NO: 773228 - DNA, 15 bp, Homo sapiens
ctaatctcatgttca

SEQ ID NO: 773229 - DNA, 15 bp, Homo sapiens
taatctcatgttcaa

SEQ ID NO: 773230 - DNA, 15 bp, Homo sapiens
aatctcatgttcaaa

SEQ ID NO: 773231 - DNA, 15 bp, Homo sapiens
atctcatgttcaaag

SEQ ID NO: 773232 - DNA, 15 bp, Homo sapiens
tctcatgttcaaagc

SEQ ID NO: 773233 - DNA, 15 bp, Homo sapiens
ctcatgttcaaagct

SEQ ID NO: 773234 - DNA, 15 bp, Homo sapiens
tcatgttcaaagctt

SEQ ID NO: 773235 - DNA, 15 bp, Homo sapiens
catgttcaaagctta

SEQ ID NO: 773236 - DNA, 15 bp, Homo sapiens
atgttcaaagcttat

SEQ ID NO: 773237 - DNA, 15 bp, Homo sapiens
tgttcaaagcttatc

SEQ ID NO: 773238 - DNA, 15 bp, Homo sapiens
gttcaaagcttatcc

SEQ ID NO: 773239 - DNA, 15 bp, Homo sapiens
ttcaaagcttatcct

SEQ ID NO: 773240 - DNA, 15 bp, Homo sapiens
tcaaagcttatcctt

SEQ ID NO: 773241 - DNA, 15 bp, Homo sapiens
caaagcttatccttc

SEQ ID NO: 773242 - DNA, 15 bp, Homo sapiens
aaagcttatccttct

SEQ ID NO: 773243 - DNA, 15 bp, Homo sapiens
aagcttatccttctt

SEQ ID NO: 773244 - DNA, 15 bp, Homo sapiens
agcttatccttcttt

SEQ ID NO: 773245 - DNA, 15 bp, Homo sapiens
gcttatccttctttc

SEQ ID NO: 773246 - DNA, 15 bp, Homo sapiens
cttatccttctttcc

SEQ ID NO: 773247 - DNA, 15 bp, Homo sapiens
ttatccttctttcca

SEQ ID NO: 773248 - DNA, 15 bp, Homo sapiens
tatccttctttccaa

SEQ ID NO: 773249 - DNA, 15 bp, Homo sapiens
atccttctttccaag

SEQ ID NO: 773250 - DNA, 15 bp, Homo sapiens
tccttctttccaagc

SEQ ID NO: 773251 - DNA, 15 bp, Homo sapiens
ccttctttccaagcc

SEQ ID NO: 773252 - DNA, 15 bp, Homo sapiens
cttctttccaagccc

SEQ ID NO: 773253 - DNA, 15 bp, Homo sapiens
ttctttccaagccca

SEQ ID NO: 773254 - DNA, 15 bp, Homo sapiens
tctttccaagcccag

SEQ ID NO: 773255 - DNA, 15 bp, Homo sapiens
ctttccaagcccaga

SEQ ID NO: 773256 - DNA, 15 bp, Homo sapiens
tttccaagcccagaa

SEQ ID NO: 773257 - DNA, 15 bp, Homo sapiens
ttccaagcccagaag

SEQ ID NO: 773258 - DNA, 15 bp, Homo sapiens
tccaagcccagaagg

SEQ ID NO: 773259 - DNA, 15 bp, Homo sapiens
ccaagcccagaagga

SEQ ID NO: 773260 - DNA, 15 bp, Homo sapiens
caagcccagaaggaa

SEQ ID NO: 773261 - DNA, 15 bp, Homo sapiens
aagcccagaaggaag

SEQ ID NO: 773262 - DNA, 15 bp, Homo sapiens
agcccagaaggaagg

SEQ ID NO: 773263 - DNA, 15 bp, Homo sapiens
gcccagaaggaagga

SEQ ID NO: 773264 - DNA, 15 bp, Homo sapiens
cccagaaggaaggac

SEQ ID NO: 773265 - DNA, 15 bp, Homo sapiens
ccagaaggaaggaca

SEQ ID NO: 773266 - DNA, 15 bp, Homo sapiens
cagaaggaaggacat

SEQ ID NO: 773267 - DNA, 15 bp, Homo sapiens
agaaggaaggacatc

SEQ ID NO: 773268 - DNA, 15 bp, Homo sapiens
gaaggaaggacatcc

SEQ ID NO: 773269 - DNA, 15 bp, Homo sapiens
aaggaaggacatccc

SEQ ID NO: 773270 - DNA, 15 bp, Homo sapiens
aggaaggacatccca

SEQ ID NO: 773271 - DNA, 15 bp, Homo sapiens
ggaaggacatcccat

SEQ ID NO: 773272 - DNA, 15 bp, Homo sapiens
gaaggacatcccatt

SEQ ID NO: 773273 - DNA, 15 bp, Homo sapiens
aaggacatcccattc

SEQ ID NO: 773274 - DNA, 15 bp, Homo sapiens
aggacatcccattca

SEQ ID NO: 773275 - DNA, 15 bp, Homo sapiens
ggacatcccattcat

SEQ ID NO: 773276 - DNA, 15 bp, Homo sapiens
gacatcccattcatt

SEQ ID NO: 773277 - DNA, 15 bp, Homo sapiens
acatcccattcatta

SEQ ID NO: 773278 - DNA, 15 bp, Homo sapiens
catcccattcattaa

SEQ ID NO: 773279 - DNA, 15 bp, Homo sapiens
atcccattcattaac

SEQ ID NO: 773280 - DNA, 15 bp, Homo sapiens
tcccattcattaacc

SEQ ID NO: 773281 - DNA, 15 bp, Homo sapiens
cccattcattaacct

SEQ ID NO: 773282 - DNA, 15 bp, Homo sapiens
ccattcattaacctt

SEQ ID NO: 773283 - DNA, 15 bp, Homo sapiens
cattcattaaccttc

SEQ ID NO: 773284 - DNA, 15 bp, Homo sapiens
attcattaaccttct

SEQ ID NO: 773285 - DNA, 15 bp, Homo sapiens
ttcattaaccttctc

SEQ ID NO: 773286 - DNA, 15 bp, Homo sapiens
tcattaaccttctct

SEQ ID NO: 773287 - DNA, 15 bp, Homo sapiens
cattaaccttctcta

SEQ ID NO: 773288 - DNA, 15 bp, Homo sapiens
attaaccttctctaa

SEQ ID NO: 773289 - DNA, 15 bp, Homo sapiens
ttaaccttctctaac

SEQ ID NO: 773290 - DNA, 15 bp, Homo sapiens
taaccttctctaacc

SEQ ID NO: 773291 - DNA, 15 bp, Homo sapiens
aaccttctctaaccc

SEQ ID NO: 773292 - DNA, 15 bp, Homo sapiens
accttctctaaccct

SEQ ID NO: 773293 - DNA, 15 bp, Homo sapiens
ccttctctaaccctc

SEQ ID NO: 773294 - DNA, 15 bp, Homo sapiens
cttctctaaccctcc

SEQ ID NO: 773295 - DNA, 15 bp, Homo sapiens
ttctctaaccctcct

SEQ ID NO: 773296 - DNA, 15 bp, Homo sapiens
tctctaaccctccta

SEQ ID NO: 773297 - DNA, 15 bp, Homo sapiens
ctctaaccctcctag

SEQ ID NO: 773298 - DNA, 15 bp, Homo sapiens
tctaaccctcctagc

SEQ ID NO: 773299 - DNA, 15 bp, Homo sapiens
ctaaccctcctagct

SEQ ID NO: 773300 - DNA, 15 bp, Homo sapiens
taaccctcctagctg

SEQ ID NO: 773301 - DNA, 15 bp, Homo sapiens
aaccctcctagctgg

SEQ ID NO: 773302 - DNA, 15 bp, Homo sapiens
accctcctagctgga

SEQ ID NO: 773303 - DNA, 15 bp, Homo sapiens
ccctcctagctggaa

SEQ ID NO: 773304 - DNA, 15 bp, Homo sapiens
cctcctagctggaag

SEQ ID NO: 773305 - DNA, 15 bp, Homo sapiens
ctcctagctggaagt

SEQ ID NO: 773306 - DNA, 15 bp, Homo sapiens
tcctagctggaagta

SEQ ID NO: 773307 - DNA, 15 bp, Homo sapiens
cctagctggaagtaa

SEQ ID NO: 773308 - DNA, 15 bp, Homo sapiens
ctagctggaagtaat

SEQ ID NO: 773309 - DNA, 15 bp, Homo sapiens
tagctggaagtaatg

SEQ ID NO: 773310 - DNA, 15 bp, Homo sapiens
agctggaagtaatgt

SEQ ID NO: 773311 - DNA, 15 bp, Homo sapiens
gctggaagtaatgtt

SEQ ID NO: 773312 - DNA, 15 bp, Homo sapiens
ctggaagtaatgttt

SEQ ID NO: 773313 - DNA, 15 bp, Homo sapiens
tggaagtaatgttta

SEQ ID NO: 773314 - DNA, 15 bp, Homo sapiens
ggaagtaatgtttac

SEQ ID NO: 773315 - DNA, 15 bp, Homo sapiens
gaagtaatgtttact

SEQ ID NO: 773316 - DNA, 15 bp, Homo sapiens
aagtaatgtttactt

SEQ ID NO: 773317 - DNA, 15 bp, Homo sapiens
agtaatgtttacttc

SEQ ID NO: 773318 - DNA, 15 bp, Homo sapiens
gtaatgtttacttcc

SEQ ID NO: 773319 - DNA, 15 bp, Homo sapiens
taatgtttacttcct

SEQ ID NO: 773320 - DNA, 15 bp, Homo sapiens
aatgtttacttcctc

SEQ ID NO: 773321 - DNA, 15 bp, Homo sapiens
atgtttacttcctct

SEQ ID NO: 773322 - DNA, 15 bp, Homo sapiens
tgtttacttcctcta

SEQ ID NO: 773323 - DNA, 15 bp, Homo sapiens
gtttacttcctctag

SEQ ID NO: 773324 - DNA, 15 bp, Homo sapiens
tttacttcctctaga

SEQ ID NO: 773325 - DNA, 15 bp, Homo sapiens
ttacttcctctagat

SEQ ID NO: 773326 - DNA, 15 bp, Homo sapiens
tacttcctctagatt

SEQ ID NO: 773327 - DNA, 15 bp, Homo sapiens
acttcctctagattt

SEQ ID NO: 773328 - DNA, 15 bp, Homo sapiens
cttcctctagatttt

SEQ ID NO: 773329 - DNA, 15 bp, Homo sapiens
ttcctctagatttta

SEQ ID NO: 773330 - DNA, 15 bp, Homo sapiens
tcctctagattttat

SEQ ID NO: 773331 - DNA, 15 bp, Homo sapiens
cctctagattttatc

SEQ ID NO: 773332 - DNA, 15 bp, Homo sapiens
ctctagattttatct

SEQ ID NO: 773333 - DNA, 15 bp, Homo sapiens
tctagattttatctg

SEQ ID NO: 773334 - DNA, 15 bp, Homo sapiens
ctagattttatctgt

SEQ ID NO: 773335 - DNA, 15 bp, Homo sapiens
tagattttatctgta

SEQ ID NO: 773336 - DNA, 15 bp, Homo sapiens
agattttatctgtac

SEQ ID NO: 773337 - DNA, 15 bp, Homo sapiens
gattttatctgtact

SEQ ID NO: 773338 - DNA, 15 bp, Homo sapiens
attttatctgtactt

SEQ ID NO: 773339 - DNA, 15 bp, Homo sapiens
ttttatctgtacttc

SEQ ID NO: 773340 - DNA, 15 bp, Homo sapiens
tttatctgtacttct

SEQ ID NO: 773341 - DNA, 15 bp, Homo sapiens
ttatctgtacttctc

SEQ ID NO: 773342 - DNA, 15 bp, Homo sapiens
tatctgtacttctct

SEQ ID NO: 773343 - DNA, 15 bp, Homo sapiens
atctgtacttctctt

SEQ ID NO: 773344 - DNA, 15 bp, Homo sapiens
tctgtacttctcttc

SEQ ID NO: 773345 - DNA, 15 bp, Homo sapiens
ctgtacttctcttct

SEQ ID NO: 773346 - DNA, 15 bp, Homo sapiens
tgtacttctcttctg

SEQ ID NO: 773347 - DNA, 15 bp, Homo sapiens
gtacttctcttctga

SEQ ID NO: 773348 - DNA, 15 bp, Homo sapiens
tacttctcttctgag

SEQ ID NO: 773349 - DNA, 15 bp, Homo sapiens
acttctcttctgaga

SEQ ID NO: 773350 - DNA, 15 bp, Homo sapiens
cttctcttctgagat

SEQ ID NO: 773351 - DNA, 15 bp, Homo sapiens
ttctcttctgagatg

SEQ ID NO: 773352 - DNA, 15 bp, Homo sapiens
tctcttctgagatgt

SEQ ID NO: 773353 - DNA, 15 bp, Homo sapiens
ctcttctgagatgtt

SEQ ID NO: 773354 - DNA, 15 bp, Homo sapiens
tcttctgagatgttt

SEQ ID NO: 773355 - DNA, 15 bp, Homo sapiens
cttctgagatgtttc

SEQ ID NO: 773356 - DNA, 15 bp, Homo sapiens
ttctgagatgtttca

SEQ ID NO: 773357 - DNA, 15 bp, Homo sapiens
tctgagatgtttcat

SEQ ID NO: 773358 - DNA, 15 bp, Homo sapiens
ctgagatgtttcata

SEQ ID NO: 773359 - DNA, 15 bp, Homo sapiens
tgagatgtttcatat

SEQ ID NO: 773360 - DNA, 15 bp, Homo sapiens
gagatgtttcatatt

SEQ ID NO: 773361 - DNA, 15 bp, Homo sapiens
agatgtttcatattc

SEQ ID NO: 773362 - DNA, 15 bp, Homo sapiens
gatgtttcatattct

SEQ ID NO: 773363 - DNA, 15 bp, Homo sapiens
atgtttcatattctg

SEQ ID NO: 773364 - DNA, 15 bp, Homo sapiens
tgtttcatattctgt

SEQ ID NO: 773365 - DNA, 15 bp, Homo sapiens
gtttcatattctgtg

SEQ ID NO: 773366 - DNA, 15 bp, Homo sapiens
tttcatattctgtgt

SEQ ID NO: 773367 - DNA, 15 bp, Homo sapiens
ttcatattctgtgtt

SEQ ID NO: 773368 - DNA, 15 bp, Homo sapiens
tcatattctgtgtta

SEQ ID NO: 773369 - DNA, 15 bp, Homo sapiens
catattctgtgttat

SEQ ID NO: 773370 - DNA, 15 bp, Homo sapiens
atattctgtgttatt

SEQ ID NO: 773371 - DNA, 15 bp, Homo sapiens
tattctgtgttattt

SEQ ID NO: 773372 - DNA, 15 bp, Homo sapiens
attctgtgttatttg

SEQ ID NO: 773373 - DNA, 15 bp, Homo sapiens
ttctgtgttatttgt

SEQ ID NO: 773374 - DNA, 15 bp, Homo sapiens
tctgtgttatttgtg

SEQ ID NO: 773375 - DNA, 15 bp, Homo sapiens
ctgtgttatttgtgt

SEQ ID NO: 773376 - DNA, 15 bp, Homo sapiens
tgtgttatttgtgta

SEQ ID NO: 773377 - DNA, 15 bp, Homo sapiens
gtgttatttgtgtag

SEQ ID NO: 773378 - DNA, 15 bp, Homo sapiens
tgttatttgtgtagc

SEQ ID NO: 773379 - DNA, 15 bp, Homo sapiens
gttatttgtgtagcc

SEQ ID NO: 773380 - DNA, 15 bp, Homo sapiens
ttatttgtgtagcca

SEQ ID NO: 773381 - DNA, 15 bp, Homo sapiens
tatttgtgtagccat

SEQ ID NO: 773382 - DNA, 15 bp, Homo sapiens
atttgtgtagccatc

SEQ ID NO: 773383 - DNA, 15 bp, Homo sapiens
tttgtgtagccatct

SEQ ID NO: 773384 - DNA, 15 bp, Homo sapiens
ttgtgtagccatctc

SEQ ID NO: 773385 - DNA, 15 bp, Homo sapiens
tgtgtagccatctca

SEQ ID NO: 773386 - DNA, 15 bp, Homo sapiens
gtgtagccatctcat

SEQ ID NO: 773387 - DNA, 15 bp, Homo sapiens
tgtagccatctcatt

SEQ ID NO: 773388 - DNA, 15 bp, Homo sapiens
gtagccatctcattt

SEQ ID NO: 773389 - DNA, 15 bp, Homo sapiens
tagccatctcatttt

SEQ ID NO: 773390 - DNA, 15 bp, Homo sapiens
agccatctcattttc

SEQ ID NO: 773391 - DNA, 15 bp, Homo sapiens
gccatctcattttcc

SEQ ID NO: 773392 - DNA, 15 bp, Homo sapiens
ccatctcattttcct

SEQ ID NO: 773393 - DNA, 15 bp, Homo sapiens
catctcattttcctg

SEQ ID NO: 773394 - DNA, 15 bp, Homo sapiens
atctcattttcctgt

SEQ ID NO: 773395 - DNA, 15 bp, Homo sapiens
tctcattttcctgtc

SEQ ID NO: 773396 - DNA, 15 bp, Homo sapiens
ctcattttcctgtct

SEQ ID NO: 773397 - DNA, 15 bp, Homo sapiens
tcattttcctgtctc

SEQ ID NO: 773398 - DNA, 15 bp, Homo sapiens
cattttcctgtctca

SEQ ID NO: 773399 - DNA, 15 bp, Homo sapiens
attttcctgtctcaa

SEQ ID NO: 773400 - DNA, 15 bp, Homo sapiens
ttttcctgtctcaag

SEQ ID NO: 773401 - DNA, 15 bp, Homo sapiens
tttcctgtctcaagg

SEQ ID NO: 773402 - DNA, 15 bp, Homo sapiens
ttcctgtctcaaggg

SEQ ID NO: 773403 - DNA, 15 bp, Homo sapiens
tcctgtctcaagggt

SEQ ID NO: 773404 - DNA, 15 bp, Homo sapiens
cctgtctcaagggta

SEQ ID NO: 773405 - DNA, 15 bp, Homo sapiens
ctgtctcaagggtag

SEQ ID NO: 773406 - DNA, 15 bp, Homo sapiens
tgtctcaagggtagg

SEQ ID NO: 773407 - DNA, 15 bp, Homo sapiens
gtctcaagggtagga

SEQ ID NO: 773408 - DNA, 15 bp, Homo sapiens
tctcaagggtaggat

SEQ ID NO: 773409 - DNA, 15 bp, Homo sapiens
ctcaagggtaggatc

SEQ ID NO: 773410 - DNA, 15 bp, Homo sapiens
tcaagggtaggatca

SEQ ID NO: 773411 - DNA, 15 bp, Homo sapiens
caagggtaggatcag

SEQ ID NO: 773412 - DNA, 15 bp, Homo sapiens
aagggtaggatcagt

SEQ ID NO: 773413 - DNA, 15 bp, Homo sapiens
agggtaggatcagtc

SEQ ID NO: 773414 - DNA, 15 bp, Homo sapiens
gggtaggatcagtct

SEQ ID NO: 773415 - DNA, 15 bp, Homo sapiens
ggtaggatcagtctc

SEQ ID NO: 773416 - DNA, 15 bp, Homo sapiens
gtaggatcagtctca

SEQ ID NO: 773417 - DNA, 15 bp, Homo sapiens
taggatcagtctcat

SEQ ID NO: 773418 - DNA, 15 bp, Homo sapiens
aggatcagtctcatt

SEQ ID NO: 773419 - DNA, 15 bp, Homo sapiens
ggatcagtctcatta

SEQ ID NO: 773420 - DNA, 15 bp, Homo sapiens
gatcagtctcattat

SEQ ID NO: 773421 - DNA, 15 bp, Homo sapiens
atcagtctcattatc

SEQ ID NO: 773422 - DNA, 15 bp, Homo sapiens
tcagtctcattatca

SEQ ID NO: 773423 - DNA, 15 bp, Homo sapiens
cagtctcattatcat

SEQ ID NO: 773424 - DNA, 15 bp, Homo sapiens
agtctcattatcatg

SEQ ID NO: 773425 - DNA, 15 bp, Homo sapiens
gtctcattatcatgt

SEQ ID NO: 773426 - DNA, 15 bp, Homo sapiens
tctcattatcatgtt

SEQ ID NO: 773427 - DNA, 15 bp, Homo sapiens
ctcattatcatgtta

SEQ ID NO: 773428 - DNA, 15 bp, Homo sapiens
tcattatcatgttat

SEQ ID NO: 773429 - DNA, 15 bp, Homo sapiens
cattatcatgttatt

SEQ ID NO: 773430 - DNA, 15 bp, Homo sapiens
attatcatgttattt

SEQ ID NO: 773431 - DNA, 15 bp, Homo sapiens
ttatcatgttatttt

SEQ ID NO: 773432 - DNA, 15 bp, Homo sapiens
tatcatgttattttc

SEQ ID NO: 773433 - DNA, 15 bp, Homo sapiens
atcatgttattttct

SEQ ID NO: 773434 - DNA, 15 bp, Homo sapiens
tcatgttattttctg

SEQ ID NO: 773435 - DNA, 15 bp, Homo sapiens
catgttattttctgc

SEQ ID NO: 773436 - DNA, 15 bp, Homo sapiens
atgttattttctgcc

SEQ ID NO: 773437 - DNA, 15 bp, Homo sapiens
tgttattttctgccc

SEQ ID NO: 773438 - DNA, 15 bp, Homo sapiens
gttattttctgcccc

SEQ ID NO: 773439 - DNA, 15 bp, Homo sapiens
ttattttctgccccc

SEQ ID NO: 773440 - DNA, 15 bp, Homo sapiens
tattttctgccccca

SEQ ID NO: 773441 - DNA, 15 bp, Homo sapiens
attttctgcccccag

SEQ ID NO: 773442 - DNA, 15 bp, Homo sapiens
ttttctgcccccagt

SEQ ID NO: 773443 - DNA, 15 bp, Homo sapiens
tttctgcccccagtg

SEQ ID NO: 773444 - DNA, 15 bp, Homo sapiens
ttctgcccccagtgt

SEQ ID NO: 773445 - DNA, 15 bp, Homo sapiens
tctgcccccagtgtc

SEQ ID NO: 773446 - DNA, 15 bp, Homo sapiens
ctgcccccagtgtct

SEQ ID NO: 773447 - DNA, 15 bp, Homo sapiens
tgcccccagtgtcta

SEQ ID NO: 773448 - DNA, 15 bp, Homo sapiens
gcccccagtgtctag

SEQ ID NO: 773449 - DNA, 15 bp, Homo sapiens
cccccagtgtctagt

SEQ ID NO: 773450 - DNA, 15 bp, Homo sapiens
ccccagtgtctagtt

SEQ ID NO: 773451 - DNA, 15 bp, Homo sapiens
cccagtgtctagttc

SEQ ID NO: 773452 - DNA, 15 bp, Homo sapiens
ccagtgtctagttca

SEQ ID NO: 773453 - DNA, 15 bp, Homo sapiens
cagtgtctagttcag

SEQ ID NO: 773454 - DNA, 15 bp, Homo sapiens
agtgtctagttcagt

SEQ ID NO: 773455 - DNA, 15 bp, Homo sapiens
gtgtctagttcagtg

SEQ ID NO: 773456 - DNA, 15 bp, Homo sapiens
tgtctagttcagtgt

SEQ ID NO: 773457 - DNA, 15 bp, Homo sapiens
gtctagttcagtgta

SEQ ID NO: 773458 - DNA, 15 bp, Homo sapiens
tctagttcagtgtat

SEQ ID NO: 773459 - DNA, 15 bp, Homo sapiens
ctagttcagtgtatg

SEQ ID NO: 773460 - DNA, 15 bp, Homo sapiens
tagttcagtgtatga

SEQ ID NO: 773461 - DNA, 15 bp, Homo sapiens
agttcagtgtatgat

SEQ ID NO: 773462 - DNA, 15 bp, Homo sapiens
gttcagtgtatgata

SEQ ID NO: 773463 - DNA, 15 bp, Homo sapiens
ttcagtgtatgatac

SEQ ID NO: 773464 - DNA, 15 bp, Homo sapiens
tcagtgtatgatact

SEQ ID NO: 773465 - DNA, 15 bp, Homo sapiens
cagtgtatgatactt

SEQ ID NO: 773466 - DNA, 15 bp, Homo sapiens
agtgtatgatacttt

SEQ ID NO: 773467 - DNA, 15 bp, Homo sapiens
gtgtatgatactttt

SEQ ID NO: 773468 - DNA, 15 bp, Homo sapiens
tgtatgatacttttt

SEQ ID NO: 773469 - DNA, 15 bp, Homo sapiens
gtatgatacttttta

SEQ ID NO: 773470 - DNA, 15 bp, Homo sapiens
tatgatactttttat

SEQ ID NO: 773471 - DNA, 15 bp, Homo sapiens
atgatactttttata

SEQ ID NO: 773472 - DNA, 15 bp, Homo sapiens
tgatactttttataa

SEQ ID NO: 773473 - DNA, 15 bp, Homo sapiens
gatactttttataag

SEQ ID NO: 773474 - DNA, 15 bp, Homo sapiens
atactttttataagc

SEQ ID NO: 773475 - DNA, 15 bp, Homo sapiens
tactttttataagct

SEQ ID NO: 773476 - DNA, 15 bp, Homo sapiens
actttttataagcta

SEQ ID NO: 773477 - DNA, 15 bp, Homo sapiens
ctttttataagctaa

SEQ ID NO: 773478 - DNA, 15 bp, Homo sapiens
tttttataagctaaa

SEQ ID NO: 773479 - DNA, 15 bp, Homo sapiens
ttttataagctaaat

SEQ ID NO: 773480 - DNA, 15 bp, Homo sapiens
tttataagctaaata

SEQ ID NO: 773481 - DNA, 15 bp, Homo sapiens
ttataagctaaatat

SEQ ID NO: 773482 - DNA, 15 bp, Homo sapiens
tataagctaaatata

SEQ ID NO: 773483 - DNA, 15 bp, Homo sapiens
ataagctaaatatat

SEQ ID NO: 773484 - DNA, 15 bp, Homo sapiens
taagctaaatatatt

SEQ ID NO: 773485 - DNA, 15 bp, Homo sapiens
aagctaaatatattt

SEQ ID NO: 773486 - DNA, 15 bp, Homo sapiens
agctaaatatatttt

SEQ ID NO: 773487 - DNA, 15 bp, Homo sapiens
gctaaatatatttta

SEQ ID NO: 773488 - DNA, 15 bp, Homo sapiens
ctaaatatattttag

SEQ ID NO: 773489 - DNA, 15 bp, Homo sapiens
taaatatattttaga

SEQ ID NO: 773490 - DNA, 15 bp, Homo sapiens
aaatatattttagat

SEQ ID NO: 773491 - DNA, 15 bp, Homo sapiens
aatatattttagata

SEQ ID NO: 773492 - DNA, 15 bp, Homo sapiens
atatattttagatat

SEQ ID NO: 773493 - DNA, 15 bp, Homo sapiens
tatattttagatatt

SEQ ID NO: 773494 - DNA, 15 bp, Homo sapiens
atattttagatatta

SEQ ID NO: 773495 - DNA, 15 bp, Homo sapiens
tattttagatattaa

SEQ ID NO: 773496 - DNA, 15 bp, Homo sapiens
attttagatattaat

SEQ ID NO: 773497 - DNA, 15 bp, Homo sapiens
ttttagatattaata

SEQ ID NO: 773498 - DNA, 15 bp, Homo sapiens
tttagatattaataa

SEQ ID NO: 773499 - DNA, 15 bp, Homo sapiens
ttagatattaataaa

SEQ ID NO: 773500 - DNA, 15 bp, Homo sapiens
tagatattaataaat

SEQ ID NO: 773501 - DNA, 15 bp, Homo sapiens
agatattaataaatg

SEQ ID NO: 773502 - DNA, 15 bp, Homo sapiens
gatattaataaatgt

SEQ ID NO: 773503 - DNA, 15 bp, Homo sapiens
atattaataaatgta

SEQ ID NO: 773504 - DNA, 15 bp, Homo sapiens
tattaataaatgtag

SEQ ID NO: 773505 - DNA, 15 bp, Homo sapiens
attaataaatgtaga

SEQ ID NO: 773506 - DNA, 15 bp, Homo sapiens
ttaataaatgtagag

SEQ ID NO: 773507 - DNA, 15 bp, Homo sapiens
taataaatgtagagc

SEQ ID NO: 773508 - DNA, 15 bp, Homo sapiens
aataaatgtagagca

SEQ ID NO: 773509 - DNA, 15 bp, Homo sapiens
ataaatgtagagcat

SEQ ID NO: 773510 - DNA, 15 bp, Homo sapiens
taaatgtagagcata

SEQ ID NO: 773511 - DNA, 15 bp, Homo sapiens
aaatgtagagcatat

SEQ ID NO: 773512 - DNA, 15 bp, Homo sapiens
aatgtagagcatata

SEQ ID NO: 773513 - DNA, 15 bp, Homo sapiens
atgtagagcatatat

SEQ ID NO: 773514 - DNA, 15 bp, Homo sapiens
tgtagagcatatatg

SEQ ID NO: 773515 - DNA, 15 bp, Homo sapiens
gtagagcatatatga

SEQ ID NO: 773516 - DNA, 15 bp, Homo sapiens
tagagcatatatgaa

SEQ ID NO: 773517 - DNA, 15 bp, Homo sapiens
agagcatatatgaaa

SEQ ID NO: 773518 - DNA, 15 bp, Homo sapiens
gagcatatatgaaag

SEQ ID NO: 773519 - DNA, 15 bp, Homo sapiens
agcatatatgaaaga

SEQ ID NO: 773520 - DNA, 15 bp, Homo sapiens
gcatatatgaaagat

SEQ ID NO: 773521 - DNA, 15 bp, Homo sapiens
catatatgaaagatg

SEQ ID NO: 773522 - DNA, 15 bp, Homo sapiens
atatatgaaagatgt

SEQ ID NO: 773523 - DNA, 15 bp, Homo sapiens
tatatgaaagatgtt

SEQ ID NO: 773524 - DNA, 15 bp, Homo sapiens
atatgaaagatgttt

SEQ ID NO: 773525 - DNA, 15 bp, Homo sapiens
tatgaaagatgtttt

SEQ ID NO: 773526 - DNA, 15 bp, Homo sapiens
atgaaagatgtttta

SEQ ID NO: 773527 - DNA, 15 bp, Homo sapiens
tgaaagatgttttag

SEQ ID NO: 773528 - DNA, 15 bp, Homo sapiens
gaaagatgttttaga

SEQ ID NO: 773529 - DNA, 15 bp, Homo sapiens
aaagatgttttagaa

SEQ ID NO: 773530 - DNA, 15 bp, Homo sapiens
aagatgttttagaat

SEQ ID NO: 773531 - DNA, 15 bp, Homo sapiens
agatgttttagaata

SEQ ID NO: 773532 - DNA, 15 bp, Homo sapiens
gatgttttagaatat

SEQ ID NO: 773533 - DNA, 15 bp, Homo sapiens
atgttttagaatata

SEQ ID NO: 773534 - DNA, 15 bp, Homo sapiens
tgttttagaatatag

SEQ ID NO: 773535 - DNA, 15 bp, Homo sapiens
gttttagaatataga

SEQ ID NO: 773536 - DNA, 15 bp, Homo sapiens
ttttagaatatagat

SEQ ID NO: 773537 - DNA, 15 bp, Homo sapiens
tttagaatatagatg

SEQ ID NO: 773538 - DNA, 15 bp, Homo sapiens
ttagaatatagatgt

SEQ ID NO: 773539 - DNA, 15 bp, Homo sapiens
tagaatatagatgtt

SEQ ID NO: 773540 - DNA, 15 bp, Homo sapiens
agaatatagatgtta

SEQ ID NO: 773541 - DNA, 15 bp, Homo sapiens
gaatatagatgttat

SEQ ID NO: 773542 - DNA, 15 bp, Homo sapiens
aatatagatgttatt

SEQ ID NO: 773543 - DNA, 15 bp, Homo sapiens
atatagatgttattc

SEQ ID NO: 773544 - DNA, 15 bp, Homo sapiens
tatagatgttattcc

SEQ ID NO: 773545 - DNA, 15 bp, Homo sapiens
atagatgttattccg

SEQ ID NO: 773546 - DNA, 15 bp, Homo sapiens
tagatgttattccgt

SEQ ID NO: 773547 - DNA, 15 bp, Homo sapiens
agatgttattccgtt

SEQ ID NO: 773548 - DNA, 15 bp, Homo sapiens
gatgttattccgtta

SEQ ID NO: 773549 - DNA, 15 bp, Homo sapiens
atgttattccgttat

SEQ ID NO: 773550 - DNA, 15 bp, Homo sapiens
tgttattccgttata

SEQ ID NO: 773551 - DNA, 15 bp, Homo sapiens
gttattccgttatac

SEQ ID NO: 773552 - DNA, 15 bp, Homo sapiens
ttattccgttatact

SEQ ID NO: 773553 - DNA, 15 bp, Homo sapiens
tattccgttatactt

SEQ ID NO: 773554 - DNA, 15 bp, Homo sapiens
attccgttatacttg

SEQ ID NO: 773555 - DNA, 15 bp, Homo sapiens
ttccgttatacttgt

SEQ ID NO: 773556 - DNA, 15 bp, Homo sapiens
tccgttatacttgtt

SEQ ID NO: 773557 - DNA, 15 bp, Homo sapiens
ccgttatacttgtta

SEQ ID NO: 773558 - DNA, 15 bp, Homo sapiens
cgttatacttgttaa

SEQ ID NO: 773559 - DNA, 15 bp, Homo sapiens
gttatacttgttaat

SEQ ID NO: 773560 - DNA, 15 bp, Homo sapiens
ttatacttgttaata

SEQ ID NO: 773561 - DNA, 15 bp, Homo sapiens
tatacttgttaatat

SEQ ID NO: 773562 - DNA, 15 bp, Homo sapiens
atacttgttaatatt

SEQ ID NO: 773563 - DNA, 15 bp, Homo sapiens
tacttgttaatattc

SEQ ID NO: 773564 - DNA, 15 bp, Homo sapiens
acttgttaatattct

SEQ ID NO: 773565 - DNA, 15 bp, Homo sapiens
cttgttaatattctt

SEQ ID NO: 773566 - DNA, 15 bp, Homo sapiens
ttgttaatattcttc

SEQ ID NO: 773567 - DNA, 15 bp, Homo sapiens
tgttaatattcttct

SEQ ID NO: 773568 - DNA, 15 bp, Homo sapiens
gttaatattcttctt

SEQ ID NO: 773569 - DNA, 15 bp, Homo sapiens
ttaatattcttctta

SEQ ID NO: 773570 - DNA, 15 bp, Homo sapiens
taatattcttcttac

SEQ ID NO: 773571 - DNA, 15 bp, Homo sapiens
aatattcttcttaca

SEQ ID NO: 773572 - DNA, 15 bp, Homo sapiens
atattcttcttacat

SEQ ID NO: 773573 - DNA, 15 bp, Homo sapiens
tattcttcttacatt

SEQ ID NO: 773574 - DNA, 15 bp, Homo sapiens
attcttcttacattt

SEQ ID NO: 773575 - DNA, 15 bp, Homo sapiens
ttcttcttacatttc

SEQ ID NO: 773576 - DNA, 15 bp, Homo sapiens
tcttcttacatttct

SEQ ID NO: 773577 - DNA, 15 bp, Homo sapiens
cttcttacatttctt

SEQ ID NO: 773578 - DNA, 15 bp, Homo sapiens
ttcttacatttctta

SEQ ID NO: 773579 - DNA, 15 bp, Homo sapiens
tcttacatttcttag

SEQ ID NO: 773580 - DNA, 15 bp, Homo sapiens
cttacatttcttagt

SEQ ID NO: 773581 - DNA, 15 bp, Homo sapiens
ttacatttcttagtt

SEQ ID NO: 773582 - DNA, 15 bp, Homo sapiens
tacatttcttagtta

SEQ ID NO: 773583 - DNA, 15 bp, Homo sapiens
acatttcttagttat

SEQ ID NO: 773584 - DNA, 15 bp, Homo sapiens
catttcttagttatt

SEQ ID NO: 773585 - DNA, 15 bp, Homo sapiens
atttcttagttattt

SEQ ID NO: 773586 - DNA, 15 bp, Homo sapiens
tttcttagttatttc

SEQ ID NO: 773587 - DNA, 15 bp, Homo sapiens
ttcttagttatttcc

SEQ ID NO: 773588 - DNA, 15 bp, Homo sapiens
tcttagttatttcca

SEQ ID NO: 773589 - DNA, 15 bp, Homo sapiens
cttagttatttccat

SEQ ID NO: 773590 - DNA, 15 bp, Homo sapiens
ttagttatttccatg

SEQ ID NO: 773591 - DNA, 15 bp, Homo sapiens
tagttatttccatgc

SEQ ID NO: 773592 - DNA, 15 bp, Homo sapiens
agttatttccatgca

SEQ ID NO: 773593 - DNA, 15 bp, Homo sapiens
gttatttccatgcat

SEQ ID NO: 773594 - DNA, 15 bp, Homo sapiens
ttatttccatgcatt

SEQ ID NO: 773595 - DNA, 15 bp, Homo sapiens
tatttccatgcattt

SEQ ID NO: 773596 - DNA, 15 bp, Homo sapiens
atttccatgcatttt

SEQ ID NO: 773597 - DNA, 15 bp, Homo sapiens
tttccatgcatttta

SEQ ID NO: 773598 - DNA, 15 bp, Homo sapiens
ttccatgcattttag

SEQ ID NO: 773599 - DNA, 15 bp, Homo sapiens
tccatgcattttaga

SEQ ID NO: 773600 - DNA, 15 bp, Homo sapiens
ccatgcattttagat

SEQ ID NO: 773601 - DNA, 15 bp, Homo sapiens
catgcattttagatt

SEQ ID NO: 773602 - DNA, 15 bp, Homo sapiens
atgcattttagattt

SEQ ID NO: 773603 - DNA, 15 bp, Homo sapiens
tgcattttagattta

SEQ ID NO: 773604 - DNA, 15 bp, Homo sapiens
gcattttagatttaa

SEQ ID NO: 773605 - DNA, 15 bp, Homo sapiens
cattttagatttaac

SEQ ID NO: 773606 - DNA, 15 bp, Homo sapiens
attttagatttaaca

SEQ ID NO: 773607 - DNA, 15 bp, Homo sapiens
ttttagatttaacaa

SEQ ID NO: 773608 - DNA, 15 bp, Homo sapiens
tttagatttaacaat

SEQ ID NO: 773609 - DNA, 15 bp, Homo sapiens
ttagatttaacaatt

SEQ ID NO: 773610 - DNA, 15 bp, Homo sapiens
tagatttaacaatta

SEQ ID NO: 773611 - DNA, 15 bp, Homo sapiens
agatttaacaattat

SEQ ID NO: 773612 - DNA, 15 bp, Homo sapiens
gatttaacaattatc

SEQ ID NO: 773613 - DNA, 15 bp, Homo sapiens
atttaacaattatct

SEQ ID NO: 773614 - DNA, 15 bp, Homo sapiens
tttaacaattatctg

SEQ ID NO: 773615 - DNA, 15 bp, Homo sapiens
ttaacaattatctgt

SEQ ID NO: 773616 - DNA, 15 bp, Homo sapiens
taacaattatctgtt

SEQ ID NO: 773617 - DNA, 15 bp, Homo sapiens
aacaattatctgttc

SEQ ID NO: 773618 - DNA, 15 bp, Homo sapiens
acaattatctgttca

SEQ ID NO: 773619 - DNA, 15 bp, Homo sapiens
caattatctgttcaa

SEQ ID NO: 773620 - DNA, 15 bp, Homo sapiens
aattatctgttcaaa

SEQ ID NO: 773621 - DNA, 15 bp, Homo sapiens
attatctgttcaaac

SEQ ID NO: 773622 - DNA, 15 bp, Homo sapiens
ttatctgttcaaaca

SEQ ID NO: 773623 - DNA, 15 bp, Homo sapiens
tatctgttcaaacag

SEQ ID NO: 773624 - DNA, 15 bp, Homo sapiens
atctgttcaaacagt

SEQ ID NO: 773625 - DNA, 15 bp, Homo sapiens
tctgttcaaacagtt

SEQ ID NO: 773626 - DNA, 15 bp, Homo sapiens
ctgttcaaacagttg

SEQ ID NO: 773627 - DNA, 15 bp, Homo sapiens
tgttcaaacagttga

SEQ ID NO: 773628 - DNA, 15 bp, Homo sapiens
gttcaaacagttgat

SEQ ID NO: 773629 - DNA, 15 bp, Homo sapiens
ttcaaacagttgatt

SEQ ID NO: 773630 - DNA, 15 bp, Homo sapiens
tcaaacagttgatta

SEQ ID NO: 773631 - DNA, 15 bp, Homo sapiens
caaacagttgattat

SEQ ID NO: 773632 - DNA, 15 bp, Homo sapiens
aaacagttgattatt

SEQ ID NO: 773633 - DNA, 15 bp, Homo sapiens
aacagttgattattg

SEQ ID NO: 773634 - DNA, 15 bp, Homo sapiens
acagttgattattgt

SEQ ID NO: 773635 - DNA, 15 bp, Homo sapiens
cagttgattattgtg

SEQ ID NO: 773636 - DNA, 15 bp, Homo sapiens
agttgattattgtga

SEQ ID NO: 773637 - DNA, 15 bp, Homo sapiens
gttgattattgtgag

SEQ ID NO: 773638 - DNA, 15 bp, Homo sapiens
ttgattattgtgagt

SEQ ID NO: 773639 - DNA, 15 bp, Homo sapiens
tgattattgtgagta

SEQ ID NO: 773640 - DNA, 15 bp, Homo sapiens
gattattgtgagtat

SEQ ID NO: 773641 - DNA, 15 bp, Homo sapiens
attattgtgagtatt

SEQ ID NO: 773642 - DNA, 15 bp, Homo sapiens
ttattgtgagtattt

SEQ ID NO: 773643 - DNA, 15 bp, Homo sapiens
tattgtgagtatttt

SEQ ID NO: 773644 - DNA, 15 bp, Homo sapiens
attgtgagtattttg

SEQ ID NO: 773645 - DNA, 15 bp, Homo sapiens
ttgtgagtattttga

SEQ ID NO: 773646 - DNA, 15 bp, Homo sapiens
tgtgagtattttgaa

SEQ ID NO: 773647 - DNA, 15 bp, Homo sapiens
gtgagtattttgaac

SEQ ID NO: 773648 - DNA, 15 bp, Homo sapiens
tgagtattttgaacc

SEQ ID NO: 773649 - DNA, 15 bp, Homo sapiens
gagtattttgaaccc

SEQ ID NO: 773650 - DNA, 15 bp, Homo sapiens
agtattttgaaccct

SEQ ID NO: 773651 - DNA, 15 bp, Homo sapiens
gtattttgaaccctt

SEQ ID NO: 773652 - DNA, 15 bp, Homo sapiens
tattttgaacccttt

SEQ ID NO: 773653 - DNA, 15 bp, Homo sapiens
attttgaaccctttt

SEQ ID NO: 773654 - DNA, 15 bp, Homo sapiens
ttttgaaccctttta

SEQ ID NO: 773655 - DNA, 15 bp, Homo sapiens
tttgaacccttttat

SEQ ID NO: 773656 - DNA, 15 bp, Homo sapiens
ttgaacccttttatt

SEQ ID NO: 773657 - DNA, 15 bp, Homo sapiens
tgaacccttttatta

SEQ ID NO: 773658 - DNA, 15 bp, Homo sapiens
gaacccttttattag

SEQ ID NO: 773659 - DNA, 15 bp, Homo sapiens
aacccttttattagg

SEQ ID NO: 773660 - DNA, 15 bp, Homo sapiens
acccttttattaggt

SEQ ID NO: 773661 - DNA, 15 bp, Homo sapiens
cccttttattaggtt

SEQ ID NO: 773662 - DNA, 15 bp, Homo sapiens
ccttttattaggttc

SEQ ID NO: 773663 - DNA, 15 bp, Homo sapiens
cttttattaggttcc

SEQ ID NO: 773664 - DNA, 15 bp, Homo sapiens
ttttattaggttcca

SEQ ID NO: 773665 - DNA, 15 bp, Homo sapiens
tttattaggttccag

SEQ ID NO: 773666 - DNA, 15 bp, Homo sapiens
ttattaggttccagc

SEQ ID NO: 773667 - DNA, 15 bp, Homo sapiens
tattaggttccagca

SEQ ID NO: 773668 - DNA, 15 bp, Homo sapiens
attaggttccagcac

SEQ ID NO: 773669 - DNA, 15 bp, Homo sapiens
ttaggttccagcaca

SEQ ID NO: 773670 - DNA, 15 bp, Homo sapiens
taggttccagcacat

SEQ ID NO: 773671 - DNA, 15 bp, Homo sapiens
aggttccagcacatt

SEQ ID NO: 773672 - DNA, 15 bp, Homo sapiens
ggttccagcacatta

SEQ ID NO: 773673 - DNA, 15 bp, Homo sapiens
gttccagcacattaa

SEQ ID NO: 773674 - DNA, 15 bp, Homo sapiens
ttccagcacattaag

SEQ ID NO: 773675 - DNA, 15 bp, Homo sapiens
tccagcacattaagt

SEQ ID NO: 773676 - DNA, 15 bp, Homo sapiens
ccagcacattaagta

SEQ ID NO: 773677 - DNA, 15 bp, Homo sapiens
cagcacattaagtaa

SEQ ID NO: 773678 - DNA, 15 bp, Homo sapiens
agcacattaagtaac

SEQ ID NO: 773679 - DNA, 15 bp, Homo sapiens
gcacattaagtaacg

SEQ ID NO: 773680 - DNA, 15 bp, Homo sapiens
cacattaagtaacga

SEQ ID NO: 773681 - DNA, 15 bp, Homo sapiens
acattaagtaacgaa

SEQ ID NO: 773682 - DNA, 15 bp, Homo sapiens
cattaagtaacgaat

SEQ ID NO: 773683 - DNA, 15 bp, Homo sapiens
attaagtaacgaatt

SEQ ID NO: 773684 - DNA, 15 bp, Homo sapiens
ttaagtaacgaattg

SEQ ID NO: 773685 - DNA, 15 bp, Homo sapiens
taagtaacgaattgc

SEQ ID NO: 773686 - DNA, 15 bp, Homo sapiens
aagtaacgaattgcc

SEQ ID NO: 773687 - DNA, 15 bp, Homo sapiens
agtaacgaattgccg

SEQ ID NO: 773688 - DNA, 15 bp, Homo sapiens
gtaacgaattgccgt

SEQ ID NO: 773689 - DNA, 15 bp, Homo sapiens
taacgaattgccgta

SEQ ID NO: 773690 - DNA, 15 bp, Homo sapiens
aacgaattgccgtat

SEQ ID NO: 773691 - DNA, 15 bp, Homo sapiens
acgaattgccgtatt

SEQ ID NO: 773692 - DNA, 15 bp, Homo sapiens
cgaattgccgtattc

SEQ ID NO: 773693 - DNA, 15 bp, Homo sapiens
gaattgccgtattca

SEQ ID NO: 773694 - DNA, 15 bp, Homo sapiens
aattgccgtattcag

SEQ ID NO: 773695 - DNA, 15 bp, Homo sapiens
attgccgtattcagc

SEQ ID NO: 773696 - DNA, 15 bp, Homo sapiens
ttgccgtattcagct

SEQ ID NO: 773697 - DNA, 15 bp, Homo sapiens
tgccgtattcagctt

SEQ ID NO: 773698 - DNA, 15 bp, Homo sapiens
gccgtattcagcttt

SEQ ID NO: 773699 - DNA, 15 bp, Homo sapiens
ccgtattcagctttg

SEQ ID NO: 773700 - DNA, 15 bp, Homo sapiens
cgtattcagctttgt

SEQ ID NO: 773701 - DNA, 15 bp, Homo sapiens
gtattcagctttgta

SEQ ID NO: 773702 - DNA, 15 bp, Homo sapiens
tattcagctttgtag

SEQ ID NO: 773703 - DNA, 15 bp, Homo sapiens
attcagctttgtagc

SEQ ID NO: 773704 - DNA, 15 bp, Homo sapiens
ttcagctttgtagca

SEQ ID NO: 773705 - DNA, 15 bp, Homo sapiens
tcagctttgtagcat

SEQ ID NO: 773706 - DNA, 15 bp, Homo sapiens
cagctttgtagcatg

SEQ ID NO: 773707 - DNA, 15 bp, Homo sapiens
agctttgtagcatgt

SEQ ID NO: 773708 - DNA, 15 bp, Homo sapiens
gctttgtagcatgta

SEQ ID NO: 773709 - DNA, 15 bp, Homo sapiens
ctttgtagcatgtaa

SEQ ID NO: 773710 - DNA, 15 bp, Homo sapiens
tttgtagcatgtaat

SEQ ID NO: 773711 - DNA, 15 bp, Homo sapiens
ttgtagcatgtaatc

SEQ ID NO: 773712 - DNA, 15 bp, Homo sapiens
tgtagcatgtaatct

SEQ ID NO: 773713 - DNA, 15 bp, Homo sapiens
gtagcatgtaatctt

SEQ ID NO: 773714 - DNA, 15 bp, Homo sapiens
tagcatgtaatcttc

SEQ ID NO: 773715 - DNA, 15 bp, Homo sapiens
agcatgtaatcttcc

SEQ ID NO: 773716 - DNA, 15 bp, Homo sapiens
gcatgtaatcttcca

SEQ ID NO: 773717 - DNA, 15 bp, Homo sapiens
catgtaatcttccaa

SEQ ID NO: 773718 - DNA, 15 bp, Homo sapiens
atgtaatcttccaaa

SEQ ID NO: 773719 - DNA, 15 bp, Homo sapiens
tgtaatcttccaaat

SEQ ID NO: 773720 - DNA, 15 bp, Homo sapiens
gtaatcttccaaatc

SEQ ID NO: 773721 - DNA, 15 bp, Homo sapiens
taatcttccaaatct

SEQ ID NO: 773722 - DNA, 15 bp, Homo sapiens
aatcttccaaatctt

SEQ ID NO: 773723 - DNA, 15 bp, Homo sapiens
atcttccaaatctta

SEQ ID NO: 773724 - DNA, 15 bp, Homo sapiens
tcttccaaatcttac

SEQ ID NO: 773725 - DNA, 15 bp, Homo sapiens
cttccaaatcttact

SEQ ID NO: 773726 - DNA, 15 bp, Homo sapiens
ttccaaatcttacta

SEQ ID NO: 773727 - DNA, 15 bp, Homo sapiens
tccaaatcttactat

SEQ ID NO: 773728 - DNA, 15 bp, Homo sapiens
ccaaatcttactatt

SEQ ID NO: 773729 - DNA, 15 bp, Homo sapiens
caaatcttactatta

SEQ ID NO: 773730 - DNA, 15 bp, Homo sapiens
aaatcttactattaa

SEQ ID NO: 773731 - DNA, 15 bp, Homo sapiens
aatcttactattaaa

SEQ ID NO: 773732 - DNA, 15 bp, Homo sapiens
atcttactattaaag

SEQ ID NO: 773733 - DNA, 15 bp, Homo sapiens
tcttactattaaagt

SEQ ID NO: 773734 - DNA, 15 bp, Homo sapiens
cttactattaaagtt

SEQ ID NO: 773735 - DNA, 15 bp, Homo sapiens
ttactattaaagttt

SEQ ID NO: 773736 - DNA, 15 bp, Homo sapiens
tactattaaagtttc

SEQ ID NO: 773737 - DNA, 15 bp, Homo sapiens
actattaaagtttct

SEQ ID NO: 773738 - DNA, 15 bp, Homo sapiens
ctattaaagtttctg

SEQ ID NO: 773739 - DNA, 15 bp, Homo sapiens
tattaaagtttctgt

SEQ ID NO: 773740 - DNA, 15 bp, Homo sapiens
attaaagtttctgta

SEQ ID NO: 773741 - DNA, 15 bp, Homo sapiens
ttaaagtttctgtaa

SEQ ID NO: 773742 - DNA, 15 bp, Homo sapiens
taaagtttctgtaat

SEQ ID NO: 773743 - DNA, 15 bp, Homo sapiens
aaagtttctgtaata

SEQ ID NO: 773744 - DNA, 15 bp, Homo sapiens
aagtttctgtaatat

SEQ ID NO: 773745 - DNA, 15 bp, Homo sapiens
agtttctgtaatatt

SEQ ID NO: 773746 - DNA, 15 bp, Homo sapiens
gtttctgtaatattt

SEQ ID NO: 773747 - DNA, 15 bp, Homo sapiens
tttctgtaatatttt

SEQ ID NO: 773748 - DNA, 15 bp, Homo sapiens
ttctgtaatattttt

SEQ ID NO: 773749 - DNA, 15 bp, Homo sapiens
tctgtaatatttttt

SEQ ID NO: 773750 - DNA, 15 bp, Homo sapiens
ctgtaatattttttg

SEQ ID NO: 773751 - DNA, 15 bp, Homo sapiens
tgtaatattttttgg

SEQ ID NO: 773752 - DNA, 15 bp, Homo sapiens
gtaatattttttggt

SEQ ID NO: 773753 - DNA, 15 bp, Homo sapiens
taatattttttggta

SEQ ID NO: 773754 - DNA, 15 bp, Homo sapiens
aatattttttggtat

SEQ ID NO: 773755 - DNA, 15 bp, Homo sapiens
atattttttggtata

SEQ ID NO: 773756 - DNA, 15 bp, Homo sapiens
tattttttggtataa

SEQ ID NO: 773757 - DNA, 15 bp, Homo sapiens
attttttggtataac

SEQ ID NO: 773758 - DNA, 15 bp, Homo sapiens
ttttttggtataact

SEQ ID NO: 773759 - DNA, 15 bp, Homo sapiens
tttttggtataactt

SEQ ID NO: 773760 - DNA, 15 bp, Homo sapiens
ttttggtataacttc

SEQ ID NO: 773761 - DNA, 15 bp, Homo sapiens
tttggtataacttcc

SEQ ID NO: 773762 - DNA, 15 bp, Homo sapiens
ttggtataacttcca

SEQ ID NO: 773763 - DNA, 15 bp, Homo sapiens
tggtataacttccag

SEQ ID NO: 773764 - DNA, 15 bp, Homo sapiens
ggtataacttccagt

SEQ ID NO: 773765 - DNA, 15 bp, Homo sapiens
gtataacttccagta

SEQ ID NO: 773766 - DNA, 15 bp, Homo sapiens
tataacttccagtat

SEQ ID NO: 773767 - DNA, 15 bp, Homo sapiens
ataacttccagtata

SEQ ID NO: 773768 - DNA, 15 bp, Homo sapiens
taacttccagtatag

SEQ ID NO: 773769 - DNA, 15 bp, Homo sapiens
aacttccagtatagg

SEQ ID NO: 773770 - DNA, 15 bp, Homo sapiens
acttccagtatagga

SEQ ID NO: 773771 - DNA, 15 bp, Homo sapiens
cttccagtataggaa

SEQ ID NO: 773772 - DNA, 15 bp, Homo sapiens
ttccagtataggaag

SEQ ID NO: 773773 - DNA, 15 bp, Homo sapiens
tccagtataggaaga

SEQ ID NO: 773774 - DNA, 15 bp, Homo sapiens
ccagtataggaagag

SEQ ID NO: 773775 - DNA, 15 bp, Homo sapiens
cagtataggaagagt

SEQ ID NO: 773776 - DNA, 15 bp, Homo sapiens
agtataggaagagta

SEQ ID NO: 773777 - DNA, 15 bp, Homo sapiens
gtataggaagagtaa

SEQ ID NO: 773778 - DNA, 15 bp, Homo sapiens
tataggaagagtaaa

SEQ ID NO: 773779 - DNA, 15 bp, Homo sapiens
ataggaagagtaaat

SEQ ID NO: 773780 - DNA, 15 bp, Homo sapiens
taggaagagtaaatg

SEQ ID NO: 773781 - DNA, 15 bp, Homo sapiens
aggaagagtaaatga

SEQ ID NO: 773782 - DNA, 15 bp, Homo sapiens
ggaagagtaaatgag

SEQ ID NO: 773783 - DNA, 15 bp, Homo sapiens
gaagagtaaatgaga

SEQ ID NO: 773784 - DNA, 15 bp, Homo sapiens
aagagtaaatgagaa

SEQ ID NO: 773785 - DNA, 15 bp, Homo sapiens
agagtaaatgagaag

SEQ ID NO: 773786 - DNA, 15 bp, Homo sapiens
gagtaaatgagaagc

SEQ ID NO: 773787 - DNA, 15 bp, Homo sapiens
agtaaatgagaagct

SEQ ID NO: 773788 - DNA, 15 bp, Homo sapiens
gtaaatgagaagcta

SEQ ID NO: 773789 - DNA, 15 bp, Homo sapiens
taaatgagaagctag

SEQ ID NO: 773790 - DNA, 15 bp, Homo sapiens
aaatgagaagctagt

SEQ ID NO: 773791 - DNA, 15 bp, Homo sapiens
aatgagaagctagtg

SEQ ID NO: 773792 - DNA, 15 bp, Homo sapiens
atgagaagctagtga

SEQ ID NO: 773793 - DNA, 15 bp, Homo sapiens
tgagaagctagtgaa

SEQ ID NO: 773794 - DNA, 15 bp, Homo sapiens
gagaagctagtgaac

SEQ ID NO: 773795 - DNA, 15 bp, Homo sapiens
agaagctagtgaaca

SEQ ID NO: 773796 - DNA, 15 bp, Homo sapiens
gaagctagtgaacaa

SEQ ID NO: 773797 - DNA, 15 bp, Homo sapiens
aagctagtgaacaaa

SEQ ID NO: 773798 - DNA, 15 bp, Homo sapiens
agctagtgaacaaat

SEQ ID NO: 773799 - DNA, 15 bp, Homo sapiens
gctagtgaacaaatt

SEQ ID NO: 773800 - DNA, 15 bp, Homo sapiens
ctagtgaacaaattc

SEQ ID NO: 773801 - DNA, 15 bp, Homo sapiens
tagtgaacaaattcc

SEQ ID NO: 773802 - DNA, 15 bp, Homo sapiens
agtgaacaaattccc

SEQ ID NO: 773803 - DNA, 15 bp, Homo sapiens
gtgaacaaattcccc

SEQ ID NO: 773804 - DNA, 15 bp, Homo sapiens
tgaacaaattcccct

SEQ ID NO: 773805 - DNA, 15 bp, Homo sapiens
gaacaaattcccctt

SEQ ID NO: 773806 - DNA, 15 bp, Homo sapiens
aacaaattcccctta

SEQ ID NO: 773807 - DNA, 15 bp, Homo sapiens
acaaattccccttaa

SEQ ID NO: 773808 - DNA, 15 bp, Homo sapiens
caaattccccttaag

SEQ ID NO: 773809 - DNA, 15 bp, Homo sapiens
aaattccccttaaga

SEQ ID NO: 773810 - DNA, 15 bp, Homo sapiens
aattccccttaagat

SEQ ID NO: 773811 - DNA, 15 bp, Homo sapiens
attccccttaagata

SEQ ID NO: 773812 - DNA, 15 bp, Homo sapiens
ttccccttaagataa

SEQ ID NO: 773813 - DNA, 15 bp, Homo sapiens
tccccttaagataat

SEQ ID NO: 773814 - DNA, 15 bp, Homo sapiens
ccccttaagataatg

SEQ ID NO: 773815 - DNA, 15 bp, Homo sapiens
cccttaagataatgg

SEQ ID NO: 773816 - DNA, 15 bp, Homo sapiens
ccttaagataatgga

SEQ ID NO: 773817 - DNA, 15 bp, Homo sapiens
cttaagataatggaa

SEQ ID NO: 773818 - DNA, 15 bp, Homo sapiens
ttaagataatggaaa

SEQ ID NO: 773819 - DNA, 15 bp, Homo sapiens
taagataatggaaaa

SEQ ID NO: 773820 - DNA, 15 bp, Homo sapiens
aagataatggaaaag

SEQ ID NO: 773821 - DNA, 15 bp, Homo sapiens
agataatggaaaagt

SEQ ID NO: 773822 - DNA, 15 bp, Homo sapiens
gataatggaaaagtc

SEQ ID NO: 773823 - DNA, 15 bp, Homo sapiens
ataatggaaaagtcc

SEQ ID NO: 773824 - DNA, 15 bp, Homo sapiens
taatggaaaagtcct

SEQ ID NO: 773825 - DNA, 15 bp, Homo sapiens
aatggaaaagtccta

SEQ ID NO: 773826 - DNA, 15 bp, Homo sapiens
atggaaaagtcctag

SEQ ID NO: 773827 - DNA, 15 bp, Homo sapiens
tggaaaagtcctagc

SEQ ID NO: 773828 - DNA, 15 bp, Homo sapiens
ggaaaagtcctagca

SEQ ID NO: 773829 - DNA, 15 bp, Homo sapiens
gaaaagtcctagcac

SEQ ID NO: 773830 - DNA, 15 bp, Homo sapiens
aaaagtcctagcaca

SEQ ID NO: 773831 - DNA, 15 bp, Homo sapiens
aaagtcctagcacat

SEQ ID NO: 773832 - DNA, 15 bp, Homo sapiens
aagtcctagcacatt

SEQ ID NO: 773833 - DNA, 15 bp, Homo sapiens
agtcctagcacattt

SEQ ID NO: 773834 - DNA, 15 bp, Homo sapiens
gtcctagcacatttt

SEQ ID NO: 773835 - DNA, 15 bp, Homo sapiens
tcctagcacattttg

SEQ ID NO: 773836 - DNA, 15 bp, Homo sapiens
cctagcacattttgc

SEQ ID NO: 773837 - DNA, 15 bp, Homo sapiens
ctagcacattttgca

SEQ ID NO: 773838 - DNA, 15 bp, Homo sapiens
tagcacattttgcat

SEQ ID NO: 773839 - DNA, 15 bp, Homo sapiens
agcacattttgcatg

SEQ ID NO: 773840 - DNA, 15 bp, Homo sapiens
gcacattttgcatgg

SEQ ID NO: 773841 - DNA, 15 bp, Homo sapiens
cacattttgcatggc

SEQ ID NO: 773842 - DNA, 15 bp, Homo sapiens
acattttgcatggct

SEQ ID NO: 773843 - DNA, 15 bp, Homo sapiens
cattttgcatggctg

SEQ ID NO: 773844 - DNA, 15 bp, Homo sapiens
attttgcatggctga

SEQ ID NO: 773845 - DNA, 15 bp, Homo sapiens
ttttgcatggctgat

SEQ ID NO: 773846 - DNA, 15 bp, Homo sapiens
tttgcatggctgatg

SEQ ID NO: 773847 - DNA, 15 bp, Homo sapiens
ttgcatggctgatgc

SEQ ID NO: 773848 - DNA, 15 bp, Homo sapiens
tgcatggctgatgct

SEQ ID NO: 773849 - DNA, 15 bp, Homo sapiens
gcatggctgatgctg

SEQ ID NO: 773850 - DNA, 15 bp, Homo sapiens
catggctgatgctgt

SEQ ID NO: 773851 - DNA, 15 bp, Homo sapiens
atggctgatgctgtg

SEQ ID NO: 773852 - DNA, 15 bp, Homo sapiens
tggctgatgctgtga

SEQ ID NO: 773853 - DNA, 15 bp, Homo sapiens
ggctgatgctgtgaa

SEQ ID NO: 773854 - DNA, 15 bp, Homo sapiens
gctgatgctgtgaag

SEQ ID NO: 773855 - DNA, 15 bp, Homo sapiens
ctgatgctgtgaaga

SEQ ID NO: 773856 - DNA, 15 bp, Homo sapiens
tgatgctgtgaagag

SEQ ID NO: 773857 - DNA, 15 bp, Homo sapiens
gatgctgtgaagagc

SEQ ID NO: 773858 - DNA, 15 bp, Homo sapiens
atgctgtgaagagcc

SEQ ID NO: 773859 - DNA, 15 bp, Homo sapiens
tgctgtgaagagccc

SEQ ID NO: 773860 - DNA, 15 bp, Homo sapiens
gctgtgaagagccct

SEQ ID NO: 773861 - DNA, 15 bp, Homo sapiens
ctgtgaagagccctt

SEQ ID NO: 773862 - DNA, 15 bp, Homo sapiens
tgtgaagagcccttt

SEQ ID NO: 773863 - DNA, 15 bp, Homo sapiens
gtgaagagccctttg

SEQ ID NO: 773864 - DNA, 15 bp, Homo sapiens
tgaagagccctttgg

SEQ ID NO: 773865 - DNA, 15 bp, Homo sapiens
gaagagccctttgga

SEQ ID NO: 773866 - DNA, 15 bp, Homo sapiens
aagagccctttggag

SEQ ID NO: 773867 - DNA, 15 bp, Homo sapiens
agagccctttggagt

SEQ ID NO: 773868 - DNA, 15 bp, Homo sapiens
gagccctttggagta

SEQ ID NO: 773869 - DNA, 15 bp, Homo sapiens
agccctttggagtac

SEQ ID NO: 773870 - DNA, 15 bp, Homo sapiens
gccctttggagtact

SEQ ID NO: 773871 - DNA, 15 bp, Homo sapiens
ccctttggagtactc

SEQ ID NO: 773872 - DNA, 15 bp, Homo sapiens
cctttggagtactcc

SEQ ID NO: 773873 - DNA, 15 bp, Homo sapiens
ctttggagtactcca

SEQ ID NO: 773874 - DNA, 15 bp, Homo sapiens
tttggagtactccag

SEQ ID NO: 773875 - DNA, 15 bp, Homo sapiens
ttggagtactccagt

SEQ ID NO: 773876 - DNA, 15 bp, Homo sapiens
tggagtactccagta

SEQ ID NO: 773877 - DNA, 15 bp, Homo sapiens
ggagtactccagtat

SEQ ID NO: 773878 - DNA, 15 bp, Homo sapiens
gagtactccagtatg

SEQ ID NO: 773879 - DNA, 15 bp, Homo sapiens
agtactccagtatga

SEQ ID NO: 773880 - DNA, 15 bp, Homo sapiens
gtactccagtatgaa

SEQ ID NO: 773881 - DNA, 15 bp, Homo sapiens
tactccagtatgaag

SEQ ID NO: 773882 - DNA, 15 bp, Homo sapiens
actccagtatgaaga

SEQ ID NO: 773883 - DNA, 15 bp, Homo sapiens
ctccagtatgaagac

SEQ ID NO: 773884 - DNA, 15 bp, Homo sapiens
tccagtatgaagaca

SEQ ID NO: 773885 - DNA, 15 bp, Homo sapiens
ccagtatgaagacaa

SEQ ID NO: 773886 - DNA, 15 bp, Homo sapiens
cagtatgaagacaag

SEQ ID NO: 773887 - DNA, 15 bp, Homo sapiens
agtatgaagacaaga

SEQ ID NO: 773888 - DNA, 15 bp, Homo sapiens
gtatgaagacaagaa

SEQ ID NO: 773889 - DNA, 15 bp, Homo sapiens
tatgaagacaagaac

SEQ ID NO: 773890 - DNA, 15 bp, Homo sapiens
atgaagacaagaaca

SEQ ID NO: 773891 - DNA, 15 bp, Homo sapiens
tgaagacaagaacaa

SEQ ID NO: 773892 - DNA, 15 bp, Homo sapiens
gaagacaagaacaaa

SEQ ID NO: 773893 - DNA, 15 bp, Homo sapiens
aagacaagaacaaat

SEQ ID NO: 773894 - DNA, 15 bp, Homo sapiens
agacaagaacaaatg

SEQ ID NO: 773895 - DNA, 15 bp, Homo sapiens
gacaagaacaaatgg

SEQ ID NO: 773896 - DNA, 15 bp, Homo sapiens
acaagaacaaatggg

SEQ ID NO: 773897 - DNA, 15 bp, Homo sapiens
caagaacaaatggga

SEQ ID NO: 773898 - DNA, 15 bp, Homo sapiens
aagaacaaatgggag

SEQ ID NO: 773899 - DNA, 15 bp, Homo sapiens
agaacaaatgggagt

SEQ ID NO: 773900 - DNA, 15 bp, Homo sapiens
gaacaaatgggagtg

SEQ ID NO: 773901 - DNA, 15 bp, Homo sapiens
aacaaatgggagtgt

SEQ ID NO: 773902 - DNA, 15 bp, Homo sapiens
acaaatgggagtgtc

SEQ ID NO: 773903 - DNA, 15 bp, Homo sapiens
caaatgggagtgtcc

SEQ ID NO: 773904 - DNA, 15 bp, Homo sapiens
aaatgggagtgtcct

SEQ ID NO: 773905 - DNA, 15 bp, Homo sapiens
aatgggagtgtcctt

SEQ ID NO: 773906 - DNA, 15 bp, Homo sapiens
atgggagtgtccttt

SEQ ID NO: 773907 - DNA, 15 bp, Homo sapiens
tgggagtgtcctttt

SEQ ID NO: 773908 - DNA, 15 bp, Homo sapiens
gggagtgtcctttta

SEQ ID NO: 773909 - DNA, 15 bp, Homo sapiens
ggagtgtccttttat

SEQ ID NO: 773910 - DNA, 15 bp, Homo sapiens
gagtgtccttttata

SEQ ID NO: 773911 - DNA, 15 bp, Homo sapiens
agtgtccttttatac

SEQ ID NO: 773912 - DNA, 15 bp, Homo sapiens
gtgtccttttatacc

SEQ ID NO: 773913 - DNA, 15 bp, Homo sapiens
tgtccttttatacca

SEQ ID NO: 773914 - DNA, 15 bp, Homo sapiens
gtccttttataccac

SEQ ID NO: 773915 - DNA, 15 bp, Homo sapiens
tccttttataccact

SEQ ID NO: 773916 - DNA, 15 bp, Homo sapiens
ccttttataccactc

SEQ ID NO: 773917 - DNA, 15 bp, Homo sapiens
cttttataccactca

SEQ ID NO: 773918 - DNA, 15 bp, Homo sapiens
ttttataccactcac

SEQ ID NO: 773919 - DNA, 15 bp, Homo sapiens
tttataccactcact

SEQ ID NO: 773920 - DNA, 15 bp, Homo sapiens
ttataccactcactc

SEQ ID NO: 773921 - DNA, 15 bp, Homo sapiens
tataccactcactcc

SEQ ID NO: 773922 - DNA, 15 bp, Homo sapiens
ataccactcactcca

SEQ ID NO: 773923 - DNA, 15 bp, Homo sapiens
taccactcactccag

SEQ ID NO: 773924 - DNA, 15 bp, Homo sapiens
accactcactccagc

SEQ ID NO: 773925 - DNA, 15 bp, Homo sapiens
ccactcactccagcc

SEQ ID NO: 773926 - DNA, 15 bp, Homo sapiens
cactcactccagcca

SEQ ID NO: 773927 - DNA, 15 bp, Homo sapiens
actcactccagccac

SEQ ID NO: 773928 - DNA, 15 bp, Homo sapiens
ctcactccagccacc

SEQ ID NO: 773929 - DNA, 15 bp, Homo sapiens
tcactccagccaccc

SEQ ID NO: 773930 - DNA, 15 bp, Homo sapiens
cactccagccacccc

SEQ ID NO: 773931 - DNA, 15 bp, Homo sapiens
actccagccacccca

SEQ ID NO: 773932 - DNA, 15 bp, Homo sapiens
ctccagccaccccat

SEQ ID NO: 773933 - DNA, 15 bp, Homo sapiens
tccagccaccccata

SEQ ID NO: 773934 - DNA, 15 bp, Homo sapiens
ccagccaccccataa

SEQ ID NO: 773935 - DNA, 15 bp, Homo sapiens
cagccaccccataag

SEQ ID NO: 773936 - DNA, 15 bp, Homo sapiens
agccaccccataaga

SEQ ID NO: 773937 - DNA, 15 bp, Homo sapiens
gccaccccataagag

SEQ ID NO: 773938 - DNA, 15 bp, Homo sapiens
ccaccccataagagc

SEQ ID NO: 773939 - DNA, 15 bp, Homo sapiens
caccccataagagca

SEQ ID NO: 773940 - DNA, 15 bp, Homo sapiens
accccataagagcat

SEQ ID NO: 773941 - DNA, 15 bp, Homo sapiens
ccccataagagcatg

SEQ ID NO: 773942 - DNA, 15 bp, Homo sapiens
cccataagagcatgt

SEQ ID NO: 773943 - DNA, 15 bp, Homo sapiens
ccataagagcatgta

SEQ ID NO: 773944 - DNA, 15 bp, Homo sapiens
cataagagcatgtaa

SEQ ID NO: 773945 - DNA, 15 bp, Homo sapiens
ataagagcatgtaat

SEQ ID NO: 773946 - DNA, 15 bp, Homo sapiens
taagagcatgtaata

SEQ ID NO: 773947 - DNA, 15 bp, Homo sapiens
aagagcatgtaatag

SEQ ID NO: 773948 - DNA, 15 bp, Homo sapiens
agagcatgtaatagc

SEQ ID NO: 773949 - DNA, 15 bp, Homo sapiens
gagcatgtaatagct

SEQ ID NO: 773950 - DNA, 15 bp, Homo sapiens
agcatgtaatagctc

SEQ ID NO: 773951 - DNA, 15 bp, Homo sapiens
gcatgtaatagctct

SEQ ID NO: 773952 - DNA, 15 bp, Homo sapiens
catgtaatagctctc

SEQ ID NO: 773953 - DNA, 15 bp, Homo sapiens
atgtaatagctctct

SEQ ID NO: 773954 - DNA, 15 bp, Homo sapiens
tgtaatagctctcta

SEQ ID NO: 773955 - DNA, 15 bp, Homo sapiens
gtaatagctctctac

SEQ ID NO: 773956 - DNA, 15 bp, Homo sapiens
taatagctctctaca

SEQ ID NO: 773957 - DNA, 15 bp, Homo sapiens
aatagctctctacag

SEQ ID NO: 773958 - DNA, 15 bp, Homo sapiens
atagctctctacagt

SEQ ID NO: 773959 - DNA, 15 bp, Homo sapiens
tagctctctacagtg

SEQ ID NO: 773960 - DNA, 15 bp, Homo sapiens
agctctctacagtga

SEQ ID NO: 773961 - DNA, 15 bp, Homo sapiens
gctctctacagtgac

SEQ ID NO: 773962 - DNA, 15 bp, Homo sapiens
ctctctacagtgaca

SEQ ID NO: 773963 - DNA, 15 bp, Homo sapiens
tctctacagtgacac

SEQ ID NO: 773964 - DNA, 15 bp, Homo sapiens
ctctacagtgacact

SEQ ID NO: 773965 - DNA, 15 bp, Homo sapiens
tctacagtgacactg

SEQ ID NO: 773966 - DNA, 15 bp, Homo sapiens
ctacagtgacactgc

SEQ ID NO: 773967 - DNA, 15 bp, Homo sapiens
tacagtgacactgca

SEQ ID NO: 773968 - DNA, 15 bp, Homo sapiens
acagtgacactgcac

SEQ ID NO: 773969 - DNA, 15 bp, Homo sapiens
cagtgacactgcacc

SEQ ID NO: 773970 - DNA, 15 bp, Homo sapiens
agtgacactgcacct

SEQ ID NO: 773971 - DNA, 15 bp, Homo sapiens
gtgacactgcacctt

SEQ ID NO: 773972 - DNA, 15 bp, Homo sapiens
tgacactgcaccttg

SEQ ID NO: 773973 - DNA, 15 bp, Homo sapiens
gacactgcaccttgc

SEQ ID NO: 773974 - DNA, 15 bp, Homo sapiens
acactgcaccttgca

SEQ ID NO: 773975 - DNA, 15 bp, Homo sapiens
cactgcaccttgcaa

SEQ ID NO: 773976 - DNA, 15 bp, Homo sapiens
actgcaccttgcaag

SEQ ID NO: 773977 - DNA, 15 bp, Homo sapiens
ctgcaccttgcaaga

SEQ ID NO: 773978 - DNA, 15 bp, Homo sapiens
tgcaccttgcaagaa

SEQ ID NO: 773979 - DNA, 15 bp, Homo sapiens
gcaccttgcaagaac

SEQ ID NO: 773980 - DNA, 15 bp, Homo sapiens
caccttgcaagaact

SEQ ID NO: 773981 - DNA, 15 bp, Homo sapiens
accttgcaagaactg

SEQ ID NO: 773982 - DNA, 15 bp, Homo sapiens
ccttgcaagaactga

SEQ ID NO: 773983 - DNA, 15 bp, Homo sapiens
cttgcaagaactgag

SEQ ID NO: 773984 - DNA, 15 bp, Homo sapiens
ttgcaagaactgagc

SEQ ID NO: 773985 - DNA, 15 bp, Homo sapiens
tgcaagaactgagca

SEQ ID NO: 773986 - DNA, 15 bp, Homo sapiens
gcaagaactgagcaa

SEQ ID NO: 773987 - DNA, 15 bp, Homo sapiens
caagaactgagcaat

SEQ ID NO: 773988 - DNA, 15 bp, Homo sapiens
aagaactgagcaatc

SEQ ID NO: 773989 - DNA, 15 bp, Homo sapiens
agaactgagcaatcc

SEQ ID NO: 773990 - DNA, 15 bp, Homo sapiens
gaactgagcaatcca

SEQ ID NO: 773991 - DNA, 15 bp, Homo sapiens
aactgagcaatccaa

SEQ ID NO: 773992 - DNA, 15 bp, Homo sapiens
actgagcaatccaaa

SEQ ID NO: 773993 - DNA, 15 bp, Homo sapiens
ctgagcaatccaaac

SEQ ID NO: 773994 - DNA, 15 bp, Homo sapiens
tgagcaatccaaaca

SEQ ID NO: 773995 - DNA, 15 bp, Homo sapiens
gagcaatccaaacat

SEQ ID NO: 773996 - DNA, 15 bp, Homo sapiens
agcaatccaaacatt

SEQ ID NO: 773997 - DNA, 15 bp, Homo sapiens
gcaatccaaacattt

SEQ ID NO: 773998 - DNA, 15 bp, Homo sapiens
caatccaaacatttc

SEQ ID NO: 773999 - DNA, 15 bp, Homo sapiens
aatccaaacatttca

SEQ ID NO: 774000 - DNA, 15 bp, Homo sapiens
atccaaacatttcaa

SEQ ID NO: 774001 - DNA, 15 bp, Homo sapiens
tccaaacatttcaat

SEQ ID NO: 774002 - DNA, 15 bp, Homo sapiens
ccaaacatttcaatt

SEQ ID NO: 774003 - DNA, 15 bp, Homo sapiens
caaacatttcaattc

SEQ ID NO: 774004 - DNA, 15 bp, Homo sapiens
aaacatttcaattcc

SEQ ID NO: 774005 - DNA, 15 bp, Homo sapiens
aacatttcaattccc

SEQ ID NO: 774006 - DNA, 15 bp, Homo sapiens
acatttcaattcccc

SEQ ID NO: 774007 - DNA, 15 bp, Homo sapiens
catttcaattcccca

SEQ ID NO: 774008 - DNA, 15 bp, Homo sapiens
atttcaattccccag

SEQ ID NO: 774009 - DNA, 15 bp, Homo sapiens
tttcaattccccaga

SEQ ID NO: 774010 - DNA, 15 bp, Homo sapiens
ttcaattccccagag

SEQ ID NO: 774011 - DNA, 15 bp, Homo sapiens
tcaattccccagagc

SEQ ID NO: 774012 - DNA, 15 bp, Homo sapiens
caattccccagagca

SEQ ID NO: 774013 - DNA, 15 bp, Homo sapiens
aattccccagagcac

SEQ ID NO: 774014 - DNA, 15 bp, Homo sapiens
attccccagagcacc

SEQ ID NO: 774015 - DNA, 15 bp, Homo sapiens
ttccccagagcacca

SEQ ID NO: 774016 - DNA, 15 bp, Homo sapiens
tccccagagcaccaa

SEQ ID NO: 774017 - DNA, 15 bp, Homo sapiens
ccccagagcaccaag

SEQ ID NO: 774018 - DNA, 15 bp, Homo sapiens
cccagagcaccaagc

SEQ ID NO: 774019 - DNA, 15 bp, Homo sapiens
ccagagcaccaagca

SEQ ID NO: 774020 - DNA, 15 bp, Homo sapiens
cagagcaccaagcac

SEQ ID NO: 774021 - DNA, 15 bp, Homo sapiens
agagcaccaagcact

SEQ ID NO: 774022 - DNA, 15 bp, Homo sapiens
gagcaccaagcacta

SEQ ID NO: 774023 - DNA, 15 bp, Homo sapiens
agcaccaagcactaa

SEQ ID NO: 774024 - DNA, 15 bp, Homo sapiens
gcaccaagcactaag

SEQ ID NO: 774025 - DNA, 15 bp, Homo sapiens
caccaagcactaagt

SEQ ID NO: 774026 - DNA, 15 bp, Homo sapiens
accaagcactaagta

SEQ ID NO: 774027 - DNA, 15 bp, Homo sapiens
ccaagcactaagtaa

SEQ ID NO: 774028 - DNA, 15 bp, Homo sapiens
caagcactaagtaag

SEQ ID NO: 774029 - DNA, 15 bp, Homo sapiens
aagcactaagtaaga

SEQ ID NO: 774030 - DNA, 15 bp, Homo sapiens
agcactaagtaagaa

SEQ ID NO: 774031 - DNA, 15 bp, Homo sapiens
gcactaagtaagaaa

SEQ ID NO: 774032 - DNA, 15 bp, Homo sapiens
cactaagtaagaaaa

SEQ ID NO: 774033 - DNA, 15 bp, Homo sapiens
actaagtaagaaaaa

SEQ ID NO: 774034 - DNA, 15 bp, Homo sapiens
ctaagtaagaaaaaa

SEQ ID NO: 774035 - DNA, 15 bp, Homo sapiens
taagtaagaaaaaaa

SEQ ID NO: 774036 - DNA, 15 bp, Homo sapiens
aagtaagaaaaaaag

SEQ ID NO: 774037 - DNA, 15 bp, Homo sapiens
agtaagaaaaaaagg

SEQ ID NO: 774038 - DNA, 15 bp, Homo sapiens
gtaagaaaaaaaggc

SEQ ID NO: 774039 - DNA, 15 bp, Homo sapiens
taagaaaaaaaggcc

SEQ ID NO: 774040 - DNA, 15 bp, Homo sapiens
aagaaaaaaaggcca

SEQ ID NO: 774041 - DNA, 15 bp, Homo sapiens
agaaaaaaaggccag

SEQ ID NO: 774042 - DNA, 15 bp, Homo sapiens
gaaaaaaaggccagt

SEQ ID NO: 774043 - DNA, 15 bp, Homo sapiens
aaaaaaaggccagtg

SEQ ID NO: 774044 - DNA, 15 bp, Homo sapiens
aaaaaaggccagtgc

SEQ ID NO: 774045 - DNA, 15 bp, Homo sapiens
aaaaaggccagtgcg

SEQ ID NO: 774046 - DNA, 15 bp, Homo sapiens
aaaaggccagtgcgt

SEQ ID NO: 774047 - DNA, 15 bp, Homo sapiens
aaaggccagtgcgta

SEQ ID NO: 774048 - DNA, 15 bp, Homo sapiens
aaggccagtgcgtat

SEQ ID NO: 774049 - DNA, 15 bp, Homo sapiens
aggccagtgcgtata

SEQ ID NO: 774050 - DNA, 15 bp, Homo sapiens
ggccagtgcgtatag

SEQ ID NO: 774051 - DNA, 15 bp, Homo sapiens
gccagtgcgtatagt

SEQ ID NO: 774052 - DNA, 15 bp, Homo sapiens
ccagtgcgtatagta

SEQ ID NO: 774053 - DNA, 15 bp, Homo sapiens
cagtgcgtatagtac

SEQ ID NO: 774054 - DNA, 15 bp, Homo sapiens
agtgcgtatagtaca

SEQ ID NO: 774055 - DNA, 15 bp, Homo sapiens
gtgcgtatagtacat

SEQ ID NO: 774056 - DNA, 15 bp, Homo sapiens
tgcgtatagtacata

SEQ ID NO: 774057 - DNA, 15 bp, Homo sapiens
gcgtatagtacatac

SEQ ID NO: 774058 - DNA, 15 bp, Homo sapiens
cgtatagtacataca

SEQ ID NO: 774059 - DNA, 15 bp, Homo sapiens
gtatagtacatacag

SEQ ID NO: 774060 - DNA, 15 bp, Homo sapiens
tatagtacatacaga

SEQ ID NO: 774061 - DNA, 15 bp, Homo sapiens
atagtacatacagat

SEQ ID NO: 774062 - DNA, 15 bp, Homo sapiens
tagtacatacagata

SEQ ID NO: 774063 - DNA, 15 bp, Homo sapiens
agtacatacagataa

SEQ ID NO: 774064 - DNA, 15 bp, Homo sapiens
gtacatacagataag

SEQ ID NO: 774065 - DNA, 15 bp, Homo sapiens
tacatacagataagc

SEQ ID NO: 774066 - DNA, 15 bp, Homo sapiens
acatacagataagca

SEQ ID NO: 774067 - DNA, 15 bp, Homo sapiens
catacagataagcat

SEQ ID NO: 774068 - DNA, 15 bp, Homo sapiens
atacagataagcata

SEQ ID NO: 774069 - DNA, 15 bp, Homo sapiens
tacagataagcataa

SEQ ID NO: 774070 - DNA, 15 bp, Homo sapiens
acagataagcataaa

SEQ ID NO: 774071 - DNA, 15 bp, Homo sapiens
cagataagcataaaa

SEQ ID NO: 774072 - DNA, 15 bp, Homo sapiens
agataagcataaaat

SEQ ID NO: 774073 - DNA, 15 bp, Homo sapiens
gataagcataaaata

SEQ ID NO: 774074 - DNA, 15 bp, Homo sapiens
ataagcataaaataa

SEQ ID NO: 774075 - DNA, 15 bp, Homo sapiens
taagcataaaataat

SEQ ID NO: 774076 - DNA, 15 bp, Homo sapiens
aagcataaaataatt

SEQ ID NO: 774077 - DNA, 15 bp, Homo sapiens
agcataaaataatta

SEQ ID NO: 774078 - DNA, 15 bp, Homo sapiens
gcataaaataattac

SEQ ID NO: 774079 - DNA, 15 bp, Homo sapiens
cataaaataattacc

SEQ ID NO: 774080 - DNA, 15 bp, Homo sapiens
ataaaataattacca

SEQ ID NO: 774081 - DNA, 15 bp, Homo sapiens
taaaataattaccaa

SEQ ID NO: 774082 - DNA, 15 bp, Homo sapiens
aaaataattaccaag

SEQ ID NO: 774083 - DNA, 15 bp, Homo sapiens
aaataattaccaagg

SEQ ID NO: 774084 - DNA, 15 bp, Homo sapiens
aataattaccaaggg

SEQ ID NO: 774085 - DNA, 15 bp, Homo sapiens
ataattaccaaggga

SEQ ID NO: 774086 - DNA, 15 bp, Homo sapiens
taattaccaagggaa

SEQ ID NO: 774087 - DNA, 15 bp, Homo sapiens
aattaccaagggaag

SEQ ID NO: 774088 - DNA, 15 bp, Homo sapiens
attaccaagggaagg

SEQ ID NO: 774089 - DNA, 15 bp, Homo sapiens
ttaccaagggaaggc

SEQ ID NO: 774090 - DNA, 15 bp, Homo sapiens
taccaagggaaggcc

SEQ ID NO: 774091 - DNA, 15 bp, Homo sapiens
accaagggaaggcct

SEQ ID NO: 774092 - DNA, 15 bp, Homo sapiens
ccaagggaaggcctt

SEQ ID NO: 774093 - DNA, 15 bp, Homo sapiens
caagggaaggcctta

SEQ ID NO: 774094 - DNA, 15 bp, Homo sapiens
aagggaaggccttac

SEQ ID NO: 774095 - DNA, 15 bp, Homo sapiens
agggaaggccttacc

SEQ ID NO: 774096 - DNA, 15 bp, Homo sapiens
gggaaggccttacct

SEQ ID NO: 774097 - DNA, 15 bp, Homo sapiens
ggaaggccttacctt

SEQ ID NO: 774098 - DNA, 15 bp, Homo sapiens
gaaggccttaccttt

SEQ ID NO: 774099 - DNA, 15 bp, Homo sapiens
aaggccttacctttg

SEQ ID NO: 774100 - DNA, 15 bp, Homo sapiens
aggccttacctttgg

SEQ ID NO: 774101 - DNA, 15 bp, Homo sapiens
ggccttacctttggc

SEQ ID NO: 774102 - DNA, 15 bp, Homo sapiens
gccttacctttggcc

SEQ ID NO: 774103 - DNA, 15 bp, Homo sapiens
ccttacctttggccc

SEQ ID NO: 774104 - DNA, 15 bp, Homo sapiens
cttacctttggccct

SEQ ID NO: 774105 - DNA, 15 bp, Homo sapiens
ttacctttggccctc

SEQ ID NO: 774106 - DNA, 15 bp, Homo sapiens
tacctttggccctca

SEQ ID NO: 774107 - DNA, 15 bp, Homo sapiens
acctttggccctcaa

SEQ ID NO: 774108 - DNA, 15 bp, Homo sapiens
cctttggccctcaaa

SEQ ID NO: 774109 - DNA, 15 bp, Homo sapiens
ctttggccctcaaac

SEQ ID NO: 774110 - DNA, 15 bp, Homo sapiens
tttggccctcaaaca

SEQ ID NO: 774111 - DNA, 15 bp, Homo sapiens
ttggccctcaaacac

SEQ ID NO: 774112 - DNA, 15 bp, Homo sapiens
tggccctcaaacaca

SEQ ID NO: 774113 - DNA, 15 bp, Homo sapiens
ggccctcaaacacag

SEQ ID NO: 774114 - DNA, 15 bp, Homo sapiens
gccctcaaacacagc

SEQ ID NO: 774115 - DNA, 15 bp, Homo sapiens
ccctcaaacacagct

SEQ ID NO: 774116 - DNA, 15 bp, Homo sapiens
cctcaaacacagctg

SEQ ID NO: 774117 - DNA, 15 bp, Homo sapiens
ctcaaacacagctgt

SEQ ID NO: 774118 - DNA, 15 bp, Homo sapiens
tcaaacacagctgtt

SEQ ID NO: 774119 - DNA, 15 bp, Homo sapiens
caaacacagctgtta

SEQ ID NO: 774120 - DNA, 15 bp, Homo sapiens
aaacacagctgttat

SEQ ID NO: 774121 - DNA, 15 bp, Homo sapiens
aacacagctgttatt

SEQ ID NO: 774122 - DNA, 15 bp, Homo sapiens
acacagctgttattt

SEQ ID NO: 774123 - DNA, 15 bp, Homo sapiens
cacagctgttatttt

SEQ ID NO: 774124 - DNA, 15 bp, Homo sapiens
acagctgttatttta

SEQ ID NO: 774125 - DNA, 15 bp, Homo sapiens
cagctgttattttac

SEQ ID NO: 774126 - DNA, 15 bp, Homo sapiens
agctgttattttacg

SEQ ID NO: 774127 - DNA, 15 bp, Homo sapiens
gctgttattttacgt

SEQ ID NO: 774128 - DNA, 15 bp, Homo sapiens
ctgttattttacgta

SEQ ID NO: 774129 - DNA, 15 bp, Homo sapiens
tgttattttacgtag

SEQ ID NO: 774130 - DNA, 15 bp, Homo sapiens
gttattttacgtagt

SEQ ID NO: 774131 - DNA, 15 bp, Homo sapiens
ttattttacgtagtt

SEQ ID NO: 774132 - DNA, 15 bp, Homo sapiens
tattttacgtagttc

SEQ ID NO: 774133 - DNA, 15 bp, Homo sapiens
attttacgtagttcc

SEQ ID NO: 774134 - DNA, 15 bp, Homo sapiens
ttttacgtagttcca

SEQ ID NO: 774135 - DNA, 15 bp, Homo sapiens
tttacgtagttccag

SEQ ID NO: 774136 - DNA, 15 bp, Homo sapiens
ttacgtagttccagt

SEQ ID NO: 774137 - DNA, 15 bp, Homo sapiens
tacgtagttccagtg

SEQ ID NO: 774138 - DNA, 15 bp, Homo sapiens
acgtagttccagtgc

SEQ ID NO: 774139 - DNA, 15 bp, Homo sapiens
cgtagttccagtgca

SEQ ID NO: 774140 - DNA, 15 bp, Homo sapiens
gtagttccagtgcac

SEQ ID NO: 774141 - DNA, 15 bp, Homo sapiens
tagttccagtgcaca

SEQ ID NO: 774142 - DNA, 15 bp, Homo sapiens
agttccagtgcacat

SEQ ID NO: 774143 - DNA, 15 bp, Homo sapiens
gttccagtgcacatc

SEQ ID NO: 774144 - DNA, 15 bp, Homo sapiens
ttccagtgcacatct

SEQ ID NO: 774145 - DNA, 15 bp, Homo sapiens
tccagtgcacatctt

SEQ ID NO: 774146 - DNA, 15 bp, Homo sapiens
ccagtgcacatcttt

SEQ ID NO: 774147 - DNA, 15 bp, Homo sapiens
cagtgcacatctttt

SEQ ID NO: 774148 - DNA, 15 bp, Homo sapiens
agtgcacatctttta

SEQ ID NO: 774149 - DNA, 15 bp, Homo sapiens
gtgcacatcttttag

SEQ ID NO: 774150 - DNA, 15 bp, Homo sapiens
tgcacatcttttagg

SEQ ID NO: 774151 - DNA, 15 bp, Homo sapiens
gcacatcttttaggg

SEQ ID NO: 774152 - DNA, 15 bp, Homo sapiens
cacatcttttagggc

SEQ ID NO: 774153 - DNA, 15 bp, Homo sapiens
acatcttttagggct

SEQ ID NO: 774154 - DNA, 15 bp, Homo sapiens
catcttttagggctg

SEQ ID NO: 774155 - DNA, 15 bp, Homo sapiens
atcttttagggctgt

SEQ ID NO: 774156 - DNA, 15 bp, Homo sapiens
tcttttagggctgta

SEQ ID NO: 774157 - DNA, 15 bp, Homo sapiens
cttttagggctgtac

SEQ ID NO: 774158 - DNA, 15 bp, Homo sapiens
ttttagggctgtact

SEQ ID NO: 774159 - DNA, 15 bp, Homo sapiens
tttagggctgtactt

SEQ ID NO: 774160 - DNA, 15 bp, Homo sapiens
ttagggctgtactta

SEQ ID NO: 774161 - DNA, 15 bp, Homo sapiens
tagggctgtacttag

SEQ ID NO: 774162 - DNA, 15 bp, Homo sapiens
agggctgtacttagc

SEQ ID NO: 774163 - DNA, 15 bp, Homo sapiens
gggctgtacttagca

SEQ ID NO: 774164 - DNA, 15 bp, Homo sapiens
ggctgtacttagcac

SEQ ID NO: 774165 - DNA, 15 bp, Homo sapiens
gctgtacttagcacc

SEQ ID NO: 774166 - DNA, 15 bp, Homo sapiens
ctgtacttagcaccc

SEQ ID NO: 774167 - DNA, 15 bp, Homo sapiens
tgtacttagcaccct

SEQ ID NO: 774168 - DNA, 15 bp, Homo sapiens
gtacttagcaccctt

SEQ ID NO: 774169 - DNA, 15 bp, Homo sapiens
tacttagcacccttc

SEQ ID NO: 774170 - DNA, 15 bp, Homo sapiens
acttagcacccttct

SEQ ID NO: 774171 - DNA, 15 bp, Homo sapiens
cttagcacccttctc

SEQ ID NO: 774172 - DNA, 15 bp, Homo sapiens
ttagcacccttctca

SEQ ID NO: 774173 - DNA, 15 bp, Homo sapiens
tagcacccttctcaa

SEQ ID NO: 774174 - DNA, 15 bp, Homo sapiens
agcacccttctcaag

SEQ ID NO: 774175 - DNA, 15 bp, Homo sapiens
gcacccttctcaagg

SEQ ID NO: 774176 - DNA, 15 bp, Homo sapiens
cacccttctcaagga

SEQ ID NO: 774177 - DNA, 15 bp, Homo sapiens
acccttctcaaggaa

SEQ ID NO: 774178 - DNA, 15 bp, Homo sapiens
cccttctcaaggaaa

SEQ ID NO: 774179 - DNA, 15 bp, Homo sapiens
ccttctcaaggaaac

SEQ ID NO: 774180 - DNA, 15 bp, Homo sapiens
cttctcaaggaaaca

SEQ ID NO: 774181 - DNA, 15 bp, Homo sapiens
ttctcaaggaaacat

SEQ ID NO: 774182 - DNA, 15 bp, Homo sapiens
tctcaaggaaacatt

SEQ ID NO: 774183 - DNA, 15 bp, Homo sapiens
ctcaaggaaacattc

SEQ ID NO: 774184 - DNA, 15 bp, Homo sapiens
tcaaggaaacattcc

SEQ ID NO: 774185 - DNA, 15 bp, Homo sapiens
caaggaaacattcct

SEQ ID NO: 774186 - DNA, 15 bp, Homo sapiens
aaggaaacattcctt

SEQ ID NO: 774187 - DNA, 15 bp, Homo sapiens
aggaaacattccttt

SEQ ID NO: 774188 - DNA, 15 bp, Homo sapiens
ggaaacattccttta

SEQ ID NO: 774189 - DNA, 15 bp, Homo sapiens
gaaacattcctttat

SEQ ID NO: 774190 - DNA, 15 bp, Homo sapiens
aaacattcctttatg

SEQ ID NO: 774191 - DNA, 15 bp, Homo sapiens
aacattcctttatgc

SEQ ID NO: 774192 - DNA, 15 bp, Homo sapiens
acattcctttatgca

SEQ ID NO: 774193 - DNA, 15 bp, Homo sapiens
cattcctttatgcac

SEQ ID NO: 774194 - DNA, 15 bp, Homo sapiens
attcctttatgcaca

SEQ ID NO: 774195 - DNA, 15 bp, Homo sapiens
ttcctttatgcacac

SEQ ID NO: 774196 - DNA, 15 bp, Homo sapiens
tcctttatgcacact

SEQ ID NO: 774197 - DNA, 15 bp, Homo sapiens
cctttatgcacactc

SEQ ID NO: 774198 - DNA, 15 bp, Homo sapiens
ctttatgcacactct

SEQ ID NO: 774199 - DNA, 15 bp, Homo sapiens
tttatgcacactctg

SEQ ID NO: 774200 - DNA, 15 bp, Homo sapiens
ttatgcacactctgt

SEQ ID NO: 774201 - DNA, 15 bp, Homo sapiens
tatgcacactctgtc

SEQ ID NO: 774202 - DNA, 15 bp, Homo sapiens
atgcacactctgtca

SEQ ID NO: 774203 - DNA, 15 bp, Homo sapiens
tgcacactctgtcac

SEQ ID NO: 774204 - DNA, 15 bp, Homo sapiens
gcacactctgtcact

SEQ ID NO: 774205 - DNA, 15 bp, Homo sapiens
cacactctgtcactc

SEQ ID NO: 774206 - DNA, 15 bp, Homo sapiens
acactctgtcactca

SEQ ID NO: 774207 - DNA, 15 bp, Homo sapiens
cactctgtcactcac

SEQ ID NO: 774208 - DNA, 15 bp, Homo sapiens
actctgtcactcact

SEQ ID NO: 774209 - DNA, 15 bp, Homo sapiens
ctctgtcactcactc

SEQ ID NO: 774210 - DNA, 15 bp, Homo sapiens
tctgtcactcactcc

SEQ ID NO: 774211 - DNA, 15 bp, Homo sapiens
ctgtcactcactcca

SEQ ID NO: 774212 - DNA, 15 bp, Homo sapiens
tgtcactcactccat

SEQ ID NO: 774213 - DNA, 15 bp, Homo sapiens
gtcactcactccatc

SEQ ID NO: 774214 - DNA, 15 bp, Homo sapiens
tcactcactccatcc

SEQ ID NO: 774215 - DNA, 15 bp, Homo sapiens
cactcactccatcca

SEQ ID NO: 774216 - DNA, 15 bp, Homo sapiens
actcactccatccag

SEQ ID NO: 774217 - DNA, 15 bp, Homo sapiens
ctcactccatccagc

SEQ ID NO: 774218 - DNA, 15 bp, Homo sapiens
tcactccatccagcc

SEQ ID NO: 774219 - DNA, 15 bp, Homo sapiens
cactccatccagccc

SEQ ID NO: 774220 - DNA, 15 bp, Homo sapiens
actccatccagccca

SEQ ID NO: 774221 - DNA, 15 bp, Homo sapiens
ctccatccagcccat

SEQ ID NO: 774222 - DNA, 15 bp, Homo sapiens
tccatccagcccatg

SEQ ID NO: 774223 - DNA, 15 bp, Homo sapiens
ccatccagcccatgg

SEQ ID NO: 774224 - DNA, 15 bp, Homo sapiens
catccagcccatggc

SEQ ID NO: 774225 - DNA, 15 bp, Homo sapiens
atccagcccatggct

SEQ ID NO: 774226 - DNA, 15 bp, Homo sapiens
tccagcccatggctg

SEQ ID NO: 774227 - DNA, 15 bp, Homo sapiens
ccagcccatggctga

SEQ ID NO: 774228 - DNA, 15 bp, Homo sapiens
cagcccatggctgag

SEQ ID NO: 774229 - DNA, 15 bp, Homo sapiens
agcccatggctgagt

SEQ ID NO: 774230 - DNA, 15 bp, Homo sapiens
gcccatggctgagtt

SEQ ID NO: 774231 - DNA, 15 bp, Homo sapiens
cccatggctgagtta

SEQ ID NO: 774232 - DNA, 15 bp, Homo sapiens
ccatggctgagttaa

SEQ ID NO: 774233 - DNA, 15 bp, Homo sapiens
catggctgagttaag

SEQ ID NO: 774234 - DNA, 15 bp, Homo sapiens
atggctgagttaaga

SEQ ID NO: 774235 - DNA, 15 bp, Homo sapiens
tggctgagttaagag

SEQ ID NO: 774236 - DNA, 15 bp, Homo sapiens
ggctgagttaagagt

SEQ ID NO: 774237 - DNA, 15 bp, Homo sapiens
gctgagttaagagta

SEQ ID NO: 774238 - DNA, 15 bp, Homo sapiens
ctgagttaagagtac

SEQ ID NO: 774239 - DNA, 15 bp, Homo sapiens
tgagttaagagtact

SEQ ID NO: 774240 - DNA, 15 bp, Homo sapiens
gagttaagagtacta

SEQ ID NO: 774241 - DNA, 15 bp, Homo sapiens
agttaagagtactag

SEQ ID NO: 774242 - DNA, 15 bp, Homo sapiens
gttaagagtactagc

SEQ ID NO: 774243 - DNA, 15 bp, Homo sapiens
ttaagagtactagct

SEQ ID NO: 774244 - DNA, 15 bp, Homo sapiens
taagagtactagctc

SEQ ID NO: 774245 - DNA, 15 bp, Homo sapiens
aagagtactagctct

SEQ ID NO: 774246 - DNA, 15 bp, Homo sapiens
agagtactagctcta

SEQ ID NO: 774247 - DNA, 15 bp, Homo sapiens
gagtactagctctat

SEQ ID NO: 774248 - DNA, 15 bp, Homo sapiens
agtactagctctata

SEQ ID NO: 774249 - DNA, 15 bp, Homo sapiens
gtactagctctatat

SEQ ID NO: 774250 - DNA, 15 bp, Homo sapiens
tactagctctatatt

SEQ ID NO: 774251 - DNA, 15 bp, Homo sapiens
actagctctatattt

SEQ ID NO: 774252 - DNA, 15 bp, Homo sapiens
ctagctctatatttc

SEQ ID NO: 774253 - DNA, 15 bp, Homo sapiens
tagctctatatttcc

SEQ ID NO: 774254 - DNA, 15 bp, Homo sapiens
agctctatatttcca

SEQ ID NO: 774255 - DNA, 15 bp, Homo sapiens
gctctatatttccag

SEQ ID NO: 774256 - DNA, 15 bp, Homo sapiens
ctctatatttccagc

SEQ ID NO: 774257 - DNA, 15 bp, Homo sapiens
tctatatttccagca

SEQ ID NO: 774258 - DNA, 15 bp, Homo sapiens
ctatatttccagcaa

SEQ ID NO: 774259 - DNA, 15 bp, Homo sapiens
tatatttccagcaac

SEQ ID NO: 774260 - DNA, 15 bp, Homo sapiens
atatttccagcaaca

SEQ ID NO: 774261 - DNA, 15 bp, Homo sapiens
tatttccagcaacac

SEQ ID NO: 774262 - DNA, 15 bp, Homo sapiens
atttccagcaacacc

SEQ ID NO: 774263 - DNA, 15 bp, Homo sapiens
tttccagcaacacca

SEQ ID NO: 774264 - DNA, 15 bp, Homo sapiens
ttccagcaacaccag

SEQ ID NO: 774265 - DNA, 15 bp, Homo sapiens
tccagcaacaccaga

SEQ ID NO: 774266 - DNA, 15 bp, Homo sapiens
ccagcaacaccagaa

SEQ ID NO: 774267 - DNA, 15 bp, Homo sapiens
cagcaacaccagaat

SEQ ID NO: 774268 - DNA, 15 bp, Homo sapiens
agcaacaccagaatt

SEQ ID NO: 774269 - DNA, 15 bp, Homo sapiens
gcaacaccagaatta

SEQ ID NO: 774270 - DNA, 15 bp, Homo sapiens
caacaccagaattat

SEQ ID NO: 774271 - DNA, 15 bp, Homo sapiens
aacaccagaattata

SEQ ID NO: 774272 - DNA, 15 bp, Homo sapiens
acaccagaattataa

SEQ ID NO: 774273 - DNA, 15 bp, Homo sapiens
caccagaattataat

SEQ ID NO: 774274 - DNA, 15 bp, Homo sapiens
accagaattataatt

SEQ ID NO: 774275 - DNA, 15 bp, Homo sapiens
ccagaattataattg

SEQ ID NO: 774276 - DNA, 15 bp, Homo sapiens
cagaattataattgc

SEQ ID NO: 774277 - DNA, 15 bp, Homo sapiens
agaattataattgcc

SEQ ID NO: 774278 - DNA, 15 bp, Homo sapiens
gaattataattgcct

SEQ ID NO: 774279 - DNA, 15 bp, Homo sapiens
aattataattgcctg

SEQ ID NO: 774280 - DNA, 15 bp, Homo sapiens
attataattgcctgc

SEQ ID NO: 774281 - DNA, 15 bp, Homo sapiens
ttataattgcctgcc

SEQ ID NO: 774282 - DNA, 15 bp, Homo sapiens
tataattgcctgcca

SEQ ID NO: 774283 - DNA, 15 bp, Homo sapiens
ataattgcctgccaa

SEQ ID NO: 774284 - DNA, 15 bp, Homo sapiens
taattgcctgccaat

SEQ ID NO: 774285 - DNA, 15 bp, Homo sapiens
aattgcctgccaatt

SEQ ID NO: 774286 - DNA, 15 bp, Homo sapiens
attgcctgccaattt

SEQ ID NO: 774287 - DNA, 15 bp, Homo sapiens
ttgcctgccaatttg

SEQ ID NO: 774288 - DNA, 15 bp, Homo sapiens
tgcctgccaatttgt

SEQ ID NO: 774289 - DNA, 15 bp, Homo sapiens
gcctgccaatttgtc

SEQ ID NO: 774290 - DNA, 15 bp, Homo sapiens
cctgccaatttgtct

SEQ ID NO: 774291 - DNA, 15 bp, Homo sapiens
ctgccaatttgtctc

SEQ ID NO: 774292 - DNA, 15 bp, Homo sapiens
tgccaatttgtctcc

SEQ ID NO: 774293 - DNA, 15 bp, Homo sapiens
gccaatttgtctcca

SEQ ID NO: 774294 - DNA, 15 bp, Homo sapiens
ccaatttgtctccat

SEQ ID NO: 774295 - DNA, 15 bp, Homo sapiens
caatttgtctccatg

SEQ ID NO: 774296 - DNA, 15 bp, Homo sapiens
aatttgtctccatgt

SEQ ID NO: 774297 - DNA, 15 bp, Homo sapiens
atttgtctccatgtc

SEQ ID NO: 774298 - DNA, 15 bp, Homo sapiens
tttgtctccatgtct

SEQ ID NO: 774299 - DNA, 15 bp, Homo sapiens
ttgtctccatgtctg

SEQ ID NO: 774300 - DNA, 15 bp, Homo sapiens
tgtctccatgtctgc

SEQ ID NO: 774301 - DNA, 15 bp, Homo sapiens
gtctccatgtctgct

SEQ ID NO: 774302 - DNA, 15 bp, Homo sapiens
tctccatgtctgctt

SEQ ID NO: 774303 - DNA, 15 bp, Homo sapiens
ctccatgtctgcttc

SEQ ID NO: 774304 - DNA, 15 bp, Homo sapiens
tccatgtctgcttct

SEQ ID NO: 774305 - DNA, 15 bp, Homo sapiens
ccatgtctgcttctc

SEQ ID NO: 774306 - DNA, 15 bp, Homo sapiens
catgtctgcttctcc

SEQ ID NO: 774307 - DNA, 15 bp, Homo sapiens
atgtctgcttctccc

SEQ ID NO: 774308 - DNA, 15 bp, Homo sapiens
tgtctgcttctccca

SEQ ID NO: 774309 - DNA, 15 bp, Homo sapiens
gtctgcttctcccac

SEQ ID NO: 774310 - DNA, 15 bp, Homo sapiens
tctgcttctcccaca

SEQ ID NO: 774311 - DNA, 15 bp, Homo sapiens
ctgcttctcccacaa

SEQ ID NO: 774312 - DNA, 15 bp, Homo sapiens
tgcttctcccacaaa

SEQ ID NO: 774313 - DNA, 15 bp, Homo sapiens
gcttctcccacaaaa

SEQ ID NO: 774314 - DNA, 15 bp, Homo sapiens
cttctcccacaaaac

SEQ ID NO: 774315 - DNA, 15 bp, Homo sapiens
ttctcccacaaaacc

SEQ ID NO: 774316 - DNA, 15 bp, Homo sapiens
tctcccacaaaacct

SEQ ID NO: 774317 - DNA, 15 bp, Homo sapiens
ctcccacaaaaccta

SEQ ID NO: 774318 - DNA, 15 bp, Homo sapiens
tcccacaaaacctag

SEQ ID NO: 774319 - DNA, 15 bp, Homo sapiens
cccacaaaacctaga

SEQ ID NO: 774320 - DNA, 15 bp, Homo sapiens
ccacaaaacctagag

SEQ ID NO: 774321 - DNA, 15 bp, Homo sapiens
cacaaaacctagagc

SEQ ID NO: 774322 - DNA, 15 bp, Homo sapiens
acaaaacctagagct

SEQ ID NO: 774323 - DNA, 15 bp, Homo sapiens
caaaacctagagctc

SEQ ID NO: 774324 - DNA, 15 bp, Homo sapiens
aaaacctagagctcc

SEQ ID NO: 774325 - DNA, 15 bp, Homo sapiens
aaacctagagctcct

SEQ ID NO: 774326 - DNA, 15 bp, Homo sapiens
aacctagagctcctt

SEQ ID NO: 774327 - DNA, 15 bp, Homo sapiens
acctagagctccttg

SEQ ID NO: 774328 - DNA, 15 bp, Homo sapiens
cctagagctccttga

SEQ ID NO: 774329 - DNA, 15 bp, Homo sapiens
ctagagctccttgag

SEQ ID NO: 774330 - DNA, 15 bp, Homo sapiens
tagagctccttgagg

SEQ ID NO: 774331 - DNA, 15 bp, Homo sapiens
agagctccttgagga

SEQ ID NO: 774332 - DNA, 15 bp, Homo sapiens
gagctccttgaggat

SEQ ID NO: 774333 - DNA, 15 bp, Homo sapiens
agctccttgaggata

SEQ ID NO: 774334 - DNA, 15 bp, Homo sapiens
gctccttgaggataa

SEQ ID NO: 774335 - DNA, 15 bp, Homo sapiens
ctccttgaggataag

SEQ ID NO: 774336 - DNA, 15 bp, Homo sapiens
tccttgaggataaga

SEQ ID NO: 774337 - DNA, 15 bp, Homo sapiens
ccttgaggataagaa

SEQ ID NO: 774338 - DNA, 15 bp, Homo sapiens
cttgaggataagaac

SEQ ID NO: 774339 - DNA, 15 bp, Homo sapiens
ttgaggataagaact

SEQ ID NO: 774340 - DNA, 15 bp, Homo sapiens
tgaggataagaacta

SEQ ID NO: 774341 - DNA, 15 bp, Homo sapiens
gaggataagaactat

SEQ ID NO: 774342 - DNA, 15 bp, Homo sapiens
aggataagaactatg

SEQ ID NO: 774343 - DNA, 15 bp, Homo sapiens
ggataagaactatgt

SEQ ID NO: 774344 - DNA, 15 bp, Homo sapiens
gataagaactatgta

SEQ ID NO: 774345 - DNA, 15 bp, Homo sapiens
ataagaactatgtat

SEQ ID NO: 774346 - DNA, 15 bp, Homo sapiens
taagaactatgtata

SEQ ID NO: 774347 - DNA, 15 bp, Homo sapiens
aagaactatgtatat

SEQ ID NO: 774348 - DNA, 15 bp, Homo sapiens
agaactatgtatata

SEQ ID NO: 774349 - DNA, 15 bp, Homo sapiens
gaactatgtatatat

SEQ ID NO: 774350 - DNA, 15 bp, Homo sapiens
aactatgtatatatc

SEQ ID NO: 774351 - DNA, 15 bp, Homo sapiens
actatgtatatatca

SEQ ID NO: 774352 - DNA, 15 bp, Homo sapiens
ctatgtatatatcat

SEQ ID NO: 774353 - DNA, 15 bp, Homo sapiens
tatgtatatatcata

SEQ ID NO: 774354 - DNA, 15 bp, Homo sapiens
atgtatatatcatat

SEQ ID NO: 774355 - DNA, 15 bp, Homo sapiens
tgtatatatcatata

SEQ ID NO: 774356 - DNA, 15 bp, Homo sapiens
gtatatatcatatat

SEQ ID NO: 774357 - DNA, 15 bp, Homo sapiens
tatatatcatatatc

SEQ ID NO: 774358 - DNA, 15 bp, Homo sapiens
atatatcatatatct

SEQ ID NO: 774359 - DNA, 15 bp, Homo sapiens
tatatcatatatctt

SEQ ID NO: 774360 - DNA, 15 bp, Homo sapiens
atatcatatatcttt

SEQ ID NO: 774361 - DNA, 15 bp, Homo sapiens
tatcatatatctttg

SEQ ID NO: 774362 - DNA, 15 bp, Homo sapiens
atcatatatctttgt

SEQ ID NO: 774363 - DNA, 15 bp, Homo sapiens
tcatatatctttgta

SEQ ID NO: 774364 - DNA, 15 bp, Homo sapiens
catatatctttgtat

SEQ ID NO: 774365 - DNA, 15 bp, Homo sapiens
atatatctttgtatc

SEQ ID NO: 774366 - DNA, 15 bp, Homo sapiens
tatatctttgtatca

SEQ ID NO: 774367 - DNA, 15 bp, Homo sapiens
atatctttgtatcac

SEQ ID NO: 774368 - DNA, 15 bp, Homo sapiens
tatctttgtatcacc

SEQ ID NO: 774369 - DNA, 15 bp, Homo sapiens
atctttgtatcacca

SEQ ID NO: 774370 - DNA, 15 bp, Homo sapiens
tctttgtatcaccag

SEQ ID NO: 774371 - DNA, 15 bp, Homo sapiens
ctttgtatcaccagt

SEQ ID NO: 774372 - DNA, 15 bp, Homo sapiens
tttgtatcaccagtg

SEQ ID NO: 774373 - DNA, 15 bp, Homo sapiens
ttgtatcaccagtgt

SEQ ID NO: 774374 - DNA, 15 bp, Homo sapiens
tgtatcaccagtgtt

SEQ ID NO: 774375 - DNA, 15 bp, Homo sapiens
gtatcaccagtgttt

SEQ ID NO: 774376 - DNA, 15 bp, Homo sapiens
tatcaccagtgtttt

SEQ ID NO: 774377 - DNA, 15 bp, Homo sapiens
atcaccagtgtttta

SEQ ID NO: 774378 - DNA, 15 bp, Homo sapiens
tcaccagtgttttac

SEQ ID NO: 774379 - DNA, 15 bp, Homo sapiens
caccagtgttttaca

SEQ ID NO: 774380 - DNA, 15 bp, Homo sapiens
accagtgttttacat

SEQ ID NO: 774381 - DNA, 15 bp, Homo sapiens
ccagtgttttacata

SEQ ID NO: 774382 - DNA, 15 bp, Homo sapiens
cagtgttttacatag

SEQ ID NO: 774383 - DNA, 15 bp, Homo sapiens
agtgttttacatagt

SEQ ID NO: 774384 - DNA, 15 bp, Homo sapiens
gtgttttacatagta

SEQ ID NO: 774385 - DNA, 15 bp, Homo sapiens
tgttttacatagtac

SEQ ID NO: 774386 - DNA, 15 bp, Homo sapiens
gttttacatagtacc

SEQ ID NO: 774387 - DNA, 15 bp, Homo sapiens
ttttacatagtacct

SEQ ID NO: 774388 - DNA, 15 bp, Homo sapiens
tttacatagtacctg

SEQ ID NO: 774389 - DNA, 15 bp, Homo sapiens
ttacatagtacctgg

SEQ ID NO: 774390 - DNA, 15 bp, Homo sapiens
tacatagtacctggc

SEQ ID NO: 774391 - DNA, 15 bp, Homo sapiens
acatagtacctggcc

SEQ ID NO: 774392 - DNA, 15 bp, Homo sapiens
catagtacctggcca

SEQ ID NO: 774393 - DNA, 15 bp, Homo sapiens
atagtacctggccac

SEQ ID NO: 774394 - DNA, 15 bp, Homo sapiens
tagtacctggccaca

SEQ ID NO: 774395 - DNA, 15 bp, Homo sapiens
agtacctggccacac

SEQ ID NO: 774396 - DNA, 15 bp, Homo sapiens
gtacctggccacacg

SEQ ID NO: 774397 - DNA, 15 bp, Homo sapiens
tacctggccacacgt

SEQ ID NO: 774398 - DNA, 15 bp, Homo sapiens
acctggccacacgtt

SEQ ID NO: 774399 - DNA, 15 bp, Homo sapiens
cctggccacacgttg

SEQ ID NO: 774400 - DNA, 15 bp, Homo sapiens
ctggccacacgttga

SEQ ID NO: 774401 - DNA, 15 bp, Homo sapiens
tggccacacgttgaa

SEQ ID NO: 774402 - DNA, 15 bp, Homo sapiens
ggccacacgttgaat

SEQ ID NO: 774403 - DNA, 15 bp, Homo sapiens
gccacacgttgaata

SEQ ID NO: 774404 - DNA, 15 bp, Homo sapiens
ccacacgttgaatat

SEQ ID NO: 774405 - DNA, 15 bp, Homo sapiens
cacacgttgaatatg

SEQ ID NO: 774406 - DNA, 15 bp, Homo sapiens
acacgttgaatatga

SEQ ID NO: 774407 - DNA, 15 bp, Homo sapiens
cacgttgaatatgaa

SEQ ID NO: 774408 - DNA, 15 bp, Homo sapiens
acgttgaatatgaat

SEQ ID NO: 774409 - DNA, 15 bp, Homo sapiens
cgttgaatatgaata

SEQ ID NO: 774410 - DNA, 15 bp, Homo sapiens
gttgaatatgaatat

SEQ ID NO: 774411 - DNA, 15 bp, Homo sapiens
ttgaatatgaatatc

SEQ ID NO: 774412 - DNA, 15 bp, Homo sapiens
tgaatatgaatatct

SEQ ID NO: 774413 - DNA, 15 bp, Homo sapiens
gaatatgaatatcta

SEQ ID NO: 774414 - DNA, 15 bp, Homo sapiens
aatatgaatatctat

SEQ ID NO: 774415 - DNA, 15 bp, Homo sapiens
atatgaatatctatt

SEQ ID NO: 774416 - DNA, 15 bp, Homo sapiens
tatgaatatctattg

SEQ ID NO: 774417 - DNA, 15 bp, Homo sapiens
atgaatatctattga

SEQ ID NO: 774418 - DNA, 15 bp, Homo sapiens
tgaatatctattgaa

SEQ ID NO: 774419 - DNA, 15 bp, Homo sapiens
gaatatctattgaat

SEQ ID NO: 774420 - DNA, 15 bp, Homo sapiens
aatatctattgaatg

SEQ ID NO: 774421 - DNA, 15 bp, Homo sapiens
atatctattgaatgg

SEQ ID NO: 774422 - DNA, 15 bp, Homo sapiens
tatctattgaatggc

SEQ ID NO: 774423 - DNA, 15 bp, Homo sapiens
atctattgaatggcc

SEQ ID NO: 774424 - DNA, 15 bp, Homo sapiens
tctattgaatggcca

SEQ ID NO: 774425 - DNA, 15 bp, Homo sapiens
ctattgaatggccaa

SEQ ID NO: 774426 - DNA, 15 bp, Homo sapiens
tattgaatggccaaa

SEQ ID NO: 774427 - DNA, 15 bp, Homo sapiens
attgaatggccaaag

SEQ ID NO: 774428 - DNA, 15 bp, Homo sapiens
ttgaatggccaaagc

SEQ ID NO: 774429 - DNA, 15 bp, Homo sapiens
tgaatggccaaagct

SEQ ID NO: 774430 - DNA, 15 bp, Homo sapiens
gaatggccaaagctg

SEQ ID NO: 774431 - DNA, 15 bp, Homo sapiens
aatggccaaagctgg

SEQ ID NO: 774432 - DNA, 15 bp, Homo sapiens
atggccaaagctggt

SEQ ID NO: 774433 - DNA, 15 bp, Homo sapiens
tggccaaagctggtc

SEQ ID NO: 774434 - DNA, 15 bp, Homo sapiens
ggccaaagctggtca

SEQ ID NO: 774435 - DNA, 15 bp, Homo sapiens
gccaaagctggtcat

SEQ ID NO: 774436 - DNA, 15 bp, Homo sapiens
ccaaagctggtcatg

SEQ ID NO: 774437 - DNA, 15 bp, Homo sapiens
caaagctggtcatgc

SEQ ID NO: 774438 - DNA, 15 bp, Homo sapiens
aaagctggtcatgcg

SEQ ID NO: 774439 - DNA, 15 bp, Homo sapiens
aagctggtcatgcgc

SEQ ID NO: 774440 - DNA, 15 bp, Homo sapiens
agctggtcatgcgcc

SEQ ID NO: 774441 - DNA, 15 bp, Homo sapiens
gctggtcatgcgcct

SEQ ID NO: 774442 - DNA, 15 bp, Homo sapiens
ctggtcatgcgcctt

SEQ ID NO: 774443 - DNA, 15 bp, Homo sapiens
tggtcatgcgccttt

SEQ ID NO: 774444 - DNA, 15 bp, Homo sapiens
ggtcatgcgcctttg

SEQ ID NO: 774445 - DNA, 15 bp, Homo sapiens
gtcatgcgcctttga

SEQ ID NO: 774446 - DNA, 15 bp, Homo sapiens
tcatgcgcctttgaa

SEQ ID NO: 774447 - DNA, 15 bp, Homo sapiens
catgcgcctttgaaa

SEQ ID NO: 774448 - DNA, 15 bp, Homo sapiens
atgcgcctttgaaat

SEQ ID NO: 774449 - DNA, 15 bp, Homo sapiens
tgcgcctttgaaatc

SEQ ID NO: 774450 - DNA, 15 bp, Homo sapiens
gcgcctttgaaatca

SEQ ID NO: 774451 - DNA, 15 bp, Homo sapiens
cgcctttgaaatcac

SEQ ID NO: 774452 - DNA, 15 bp, Homo sapiens
gcctttgaaatcaca

SEQ ID NO: 774453 - DNA, 15 bp, Homo sapiens
cctttgaaatcacaa

SEQ ID NO: 774454 - DNA, 15 bp, Homo sapiens
ctttgaaatcacaac

SEQ ID NO: 774455 - DNA, 15 bp, Homo sapiens
tttgaaatcacaaca

SEQ ID NO: 774456 - DNA, 15 bp, Homo sapiens
ttgaaatcacaacag

SEQ ID NO: 774457 - DNA, 15 bp, Homo sapiens
tgaaatcacaacaga

SEQ ID NO: 774458 - DNA, 15 bp, Homo sapiens
gaaatcacaacagat

SEQ ID NO: 774459 - DNA, 15 bp, Homo sapiens
aaatcacaacagatt

SEQ ID NO: 774460 - DNA, 15 bp, Homo sapiens
aatcacaacagattt

SEQ ID NO: 774461 - DNA, 15 bp, Homo sapiens
atcacaacagatttt

SEQ ID NO: 774462 - DNA, 15 bp, Homo sapiens
tcacaacagattttt

SEQ ID NO: 774463 - DNA, 15 bp, Homo sapiens
cacaacagattttta

SEQ ID NO: 774464 - DNA, 15 bp, Homo sapiens
acaacagatttttaa

SEQ ID NO: 774465 - DNA, 15 bp, Homo sapiens
caacagatttttaag

SEQ ID NO: 774466 - DNA, 15 bp, Homo sapiens
aacagatttttaagt

SEQ ID NO: 774467 - DNA, 15 bp, Homo sapiens
acagatttttaagta

SEQ ID NO: 774468 - DNA, 15 bp, Homo sapiens
cagatttttaagtag

SEQ ID NO: 774469 - DNA, 15 bp, Homo sapiens
agatttttaagtagc

SEQ ID NO: 774470 - DNA, 15 bp, Homo sapiens
gatttttaagtagca

SEQ ID NO: 774471 - DNA, 15 bp, Homo sapiens
atttttaagtagcac

SEQ ID NO: 774472 - DNA, 15 bp, Homo sapiens
tttttaagtagcaca

SEQ ID NO: 774473 - DNA, 15 bp, Homo sapiens
ttttaagtagcacat

SEQ ID NO: 774474 - DNA, 15 bp, Homo sapiens
tttaagtagcacatt

SEQ ID NO: 774475 - DNA, 15 bp, Homo sapiens
ttaagtagcacattg

SEQ ID NO: 774476 - DNA, 15 bp, Homo sapiens
taagtagcacattga

SEQ ID NO: 774477 - DNA, 15 bp, Homo sapiens
aagtagcacattgag

SEQ ID NO: 774478 - DNA, 15 bp, Homo sapiens
agtagcacattgagg

SEQ ID NO: 774479 - DNA, 15 bp, Homo sapiens
gtagcacattgagga

SEQ ID NO: 774480 - DNA, 15 bp, Homo sapiens
tagcacattgaggag

SEQ ID NO: 774481 - DNA, 15 bp, Homo sapiens
agcacattgaggaga

SEQ ID NO: 774482 - DNA, 15 bp, Homo sapiens
gcacattgaggagaa

SEQ ID NO: 774483 - DNA, 15 bp, Homo sapiens
cacattgaggagaaa

SEQ ID NO: 774484 - DNA, 15 bp, Homo sapiens
acattgaggagaaaa

SEQ ID NO: 774485 - DNA, 15 bp, Homo sapiens
cattgaggagaaaag

SEQ ID NO: 774486 - DNA, 15 bp, Homo sapiens
attgaggagaaaagg

SEQ ID NO: 774487 - DNA, 15 bp, Homo sapiens
ttgaggagaaaaggc

SEQ ID NO: 774488 - DNA, 15 bp, Homo sapiens
tgaggagaaaaggca

SEQ ID NO: 774489 - DNA, 15 bp, Homo sapiens
gaggagaaaaggcag

SEQ ID NO: 774490 - DNA, 15 bp, Homo sapiens
aggagaaaaggcagt

SEQ ID NO: 774491 - DNA, 15 bp, Homo sapiens
ggagaaaaggcagtt

SEQ ID NO: 774492 - DNA, 15 bp, Homo sapiens
gagaaaaggcagttt

SEQ ID NO: 774493 - DNA, 15 bp, Homo sapiens
agaaaaggcagtttg

SEQ ID NO: 774494 - DNA, 15 bp, Homo sapiens
gaaaaggcagtttga

SEQ ID NO: 774495 - DNA, 15 bp, Homo sapiens
aaaaggcagtttgaa

SEQ ID NO: 774496 - DNA, 15 bp, Homo sapiens
aaaggcagtttgaag

SEQ ID NO: 774497 - DNA, 15 bp, Homo sapiens
aaggcagtttgaagc

SEQ ID NO: 774498 - DNA, 15 bp, Homo sapiens
aggcagtttgaagca

SEQ ID NO: 774499 - DNA, 15 bp, Homo sapiens
ggcagtttgaagcag

SEQ ID NO: 774500 - DNA, 15 bp, Homo sapiens
gcagtttgaagcagg

SEQ ID NO: 774501 - DNA, 15 bp, Homo sapiens
cagtttgaagcaggt

SEQ ID NO: 774502 - DNA, 15 bp, Homo sapiens
agtttgaagcaggta

SEQ ID NO: 774503 - DNA, 15 bp, Homo sapiens
gtttgaagcaggtac

SEQ ID NO: 774504 - DNA, 15 bp, Homo sapiens
tttgaagcaggtaca

SEQ ID NO: 774505 - DNA, 15 bp, Homo sapiens
ttgaagcaggtacac

SEQ ID NO: 774506 - DNA, 15 bp, Homo sapiens
tgaagcaggtacaca

SEQ ID NO: 774507 - DNA, 15 bp, Homo sapiens
gaagcaggtacacaa

SEQ ID NO: 774508 - DNA, 15 bp, Homo sapiens
aagcaggtacacaac

SEQ ID NO: 774509 - DNA, 15 bp, Homo sapiens
agcaggtacacaaca

SEQ ID NO: 774510 - DNA, 15 bp, Homo sapiens
gcaggtacacaacaa

SEQ ID NO: 774511 - DNA, 15 bp, Homo sapiens
caggtacacaacaaa

SEQ ID NO: 774512 - DNA, 15 bp, Homo sapiens
aggtacacaacaaat

SEQ ID NO: 774513 - DNA, 15 bp, Homo sapiens
ggtacacaacaaata

SEQ ID NO: 774514 - DNA, 15 bp, Homo sapiens
gtacacaacaaataa

SEQ ID NO: 774515 - DNA, 15 bp, Homo sapiens
tacacaacaaataat

SEQ ID NO: 774516 - DNA, 15 bp, Homo sapiens
acacaacaaataata

SEQ ID NO: 774517 - DNA, 15 bp, Homo sapiens
cacaacaaataataa

SEQ ID NO: 774518 - DNA, 15 bp, Homo sapiens
acaacaaataataat

SEQ ID NO: 774519 - DNA, 15 bp, Homo sapiens
caacaaataataata

SEQ ID NO: 774520 - DNA, 15 bp, Homo sapiens
aacaaataataatag

SEQ ID NO: 774521 - DNA, 15 bp, Homo sapiens
acaaataataatagt

SEQ ID NO: 774522 - DNA, 15 bp, Homo sapiens
caaataataatagtt

SEQ ID NO: 774523 - DNA, 15 bp, Homo sapiens
aaataataatagtta

SEQ ID NO: 774524 - DNA, 15 bp, Homo sapiens
aataataatagttaa

SEQ ID NO: 774525 - DNA, 15 bp, Homo sapiens
ataataatagttaat

SEQ ID NO: 774526 - DNA, 15 bp, Homo sapiens
taataatagttaata

SEQ ID NO: 774527 - DNA, 15 bp, Homo sapiens
aataatagttaatat

SEQ ID NO: 774528 - DNA, 15 bp, Homo sapiens
ataatagttaatatc

SEQ ID NO: 774529 - DNA, 15 bp, Homo sapiens
taatagttaatatct

SEQ ID NO: 774530 - DNA, 15 bp, Homo sapiens
aatagttaatatctg

SEQ ID NO: 774531 - DNA, 15 bp, Homo sapiens
atagttaatatctga

SEQ ID NO: 774532 - DNA, 15 bp, Homo sapiens
tagttaatatctgat

SEQ ID NO: 774533 - DNA, 15 bp, Homo sapiens
agttaatatctgata

SEQ ID NO: 774534 - DNA, 15 bp, Homo sapiens
gttaatatctgatag

SEQ ID NO: 774535 - DNA, 15 bp, Homo sapiens
ttaatatctgatagt

SEQ ID NO: 774536 - DNA, 15 bp, Homo sapiens
taatatctgatagtg

SEQ ID NO: 774537 - DNA, 15 bp, Homo sapiens
aatatctgatagtgt

SEQ ID NO: 774538 - DNA, 15 bp, Homo sapiens
atatctgatagtgtg

SEQ ID NO: 774539 - DNA, 15 bp, Homo sapiens
tatctgatagtgtgt

SEQ ID NO: 774540 - DNA, 15 bp, Homo sapiens
atctgatagtgtgtc

SEQ ID NO: 774541 - DNA, 15 bp, Homo sapiens
tctgatagtgtgtca

SEQ ID NO: 774542 - DNA, 15 bp, Homo sapiens
ctgatagtgtgtcag

SEQ ID NO: 774543 - DNA, 15 bp, Homo sapiens
tgatagtgtgtcagg

SEQ ID NO: 774544 - DNA, 15 bp, Homo sapiens
gatagtgtgtcaggt

SEQ ID NO: 774545 - DNA, 15 bp, Homo sapiens
atagtgtgtcaggtg

SEQ ID NO: 774546 - DNA, 15 bp, Homo sapiens
tagtgtgtcaggtga

SEQ ID NO: 774547 - DNA, 15 bp, Homo sapiens
agtgtgtcaggtgac

SEQ ID NO: 774548 - DNA, 15 bp, Homo sapiens
gtgtgtcaggtgaca

SEQ ID NO: 774549 - DNA, 15 bp, Homo sapiens
tgtgtcaggtgacaa

SEQ ID NO: 774550 - DNA, 15 bp, Homo sapiens
gtgtcaggtgacaaa

SEQ ID NO: 774551 - DNA, 15 bp, Homo sapiens
tgtcaggtgacaaaa

SEQ ID NO: 774552 - DNA, 15 bp, Homo sapiens
gtcaggtgacaaaaa

SEQ ID NO: 774553 - DNA, 15 bp, Homo sapiens
tcaggtgacaaaaat

SEQ ID NO: 774554 - DNA, 15 bp, Homo sapiens
caggtgacaaaaata

SEQ ID NO: 774555 - DNA, 15 bp, Homo sapiens
aggtgacaaaaataa

SEQ ID NO: 774556 - DNA, 15 bp, Homo sapiens
ggtgacaaaaataac

SEQ ID NO: 774557 - DNA, 15 bp, Homo sapiens
gtgacaaaaataaca

SEQ ID NO: 774558 - DNA, 15 bp, Homo sapiens
tgacaaaaataacat

SEQ ID NO: 774559 - DNA, 15 bp, Homo sapiens
gacaaaaataacatg

SEQ ID NO: 774560 - DNA, 15 bp, Homo sapiens
acaaaaataacatga

SEQ ID NO: 774561 - DNA, 15 bp, Homo sapiens
caaaaataacatgaa

SEQ ID NO: 774562 - DNA, 15 bp, Homo sapiens
aaaaataacatgaag

SEQ ID NO: 774563 - DNA, 15 bp, Homo sapiens
aaaataacatgaaga

SEQ ID NO: 774564 - DNA, 15 bp, Homo sapiens
aaataacatgaagaa

SEQ ID NO: 774565 - DNA, 15 bp, Homo sapiens
aataacatgaagaag

SEQ ID NO: 774566 - DNA, 15 bp, Homo sapiens
ataacatgaagaaga

SEQ ID NO: 774567 - DNA, 15 bp, Homo sapiens
taacatgaagaagac

SEQ ID NO: 774568 - DNA, 15 bp, Homo sapiens
aacatgaagaagact

SEQ ID NO: 774569 - DNA, 15 bp, Homo sapiens
acatgaagaagactt

SEQ ID NO: 774570 - DNA, 15 bp, Homo sapiens
catgaagaagactta

SEQ ID NO: 774571 - DNA, 15 bp, Homo sapiens
atgaagaagacttaa

SEQ ID NO: 774572 - DNA, 15 bp, Homo sapiens
tgaagaagacttaaa

SEQ ID NO: 774573 - DNA, 15 bp, Homo sapiens
gaagaagacttaaaa

SEQ ID NO: 774574 - DNA, 15 bp, Homo sapiens
aagaagacttaaaac

SEQ ID NO: 774575 - DNA, 15 bp, Homo sapiens
agaagacttaaaaca

SEQ ID NO: 774576 - DNA, 15 bp, Homo sapiens
gaagacttaaaacaa

SEQ ID NO: 774577 - DNA, 15 bp, Homo sapiens
aagacttaaaacaaa

SEQ ID NO: 774578 - DNA, 15 bp, Homo sapiens
agacttaaaacaaaa

SEQ ID NO: 774579 - DNA, 15 bp, Homo sapiens
gacttaaaacaaaac

SEQ ID NO: 774580 - DNA, 15 bp, Homo sapiens
acttaaaacaaaaca

SEQ ID NO: 774581 - DNA, 15 bp, Homo sapiens
cttaaaacaaaacaa

SEQ ID NO: 774582 - DNA, 15 bp, Homo sapiens
ttaaaacaaaacaaa

SEQ ID NO: 774583 - DNA, 15 bp, Homo sapiens
aaacaaaacaaaaaa

SEQ ID NO: 774584 - DNA, 15 bp, Homo sapiens
aacaaaacaaaaaaa

SEQ ID NO: 774585 - DNA, 15 bp, Homo sapiens
acaaaacaaaaaaaa

SEQ ID NO: 774586 - DNA, 15 bp, Homo sapiens
caaaacaaaaaaaaa

SEQ ID NO: 774587 - DNA, 15 bp, Homo sapiens
aaaacaaaaaaaaac

SEQ ID NO: 774588 - DNA, 15 bp, Homo sapiens
aaacaaaaaaaaacc

SEQ ID NO: 774589 - DNA, 15 bp, Homo sapiens
aacaaaaaaaaacct

SEQ ID NO: 774590 - DNA, 15 bp, Homo sapiens
acaaaaaaaaacctg

SEQ ID NO: 774591 - DNA, 15 bp, Homo sapiens
caaaaaaaaacctgt

SEQ ID NO: 774592 - DNA, 15 bp, Homo sapiens
aaaaaaaaacctgtg

SEQ ID NO: 774593 - DNA, 15 bp, Homo sapiens
aaaaaaaacctgtgc

SEQ ID NO: 774594 - DNA, 15 bp, Homo sapiens
aaaaaaacctgtgcg

SEQ ID NO: 774595 - DNA, 15 bp, Homo sapiens
aaaaaacctgtgcgg

SEQ ID NO: 774596 - DNA, 15 bp, Homo sapiens
aaaaacctgtgcggg

SEQ ID NO: 774597 - DNA, 15 bp, Homo sapiens
aaaacctgtgcggga

SEQ ID NO: 774598 - DNA, 15 bp, Homo sapiens
aaacctgtgcgggat

SEQ ID NO: 774599 - DNA, 15 bp, Homo sapiens
aacctgtgcgggatt

SEQ ID NO: 774600 - DNA, 15 bp, Homo sapiens
acctgtgcgggatta

SEQ ID NO: 774601 - DNA, 15 bp, Homo sapiens
cctgtgcgggattac

SEQ ID NO: 774602 - DNA, 15 bp, Homo sapiens
ctgtgcgggattact

SEQ ID NO: 774603 - DNA, 15 bp, Homo sapiens
tgtgcgggattactt

SEQ ID NO: 774604 - DNA, 15 bp, Homo sapiens
gtgcgggattactta

SEQ ID NO: 774605 - DNA, 15 bp, Homo sapiens
tgcgggattacttac

SEQ ID NO: 774606 - DNA, 15 bp, Homo sapiens
gcgggattacttact

SEQ ID NO: 774607 - DNA, 15 bp, Homo sapiens
cgggattacttactt

SEQ ID NO: 774608 - DNA, 15 bp, Homo sapiens
gggattacttacttt

SEQ ID NO: 774609 - DNA, 15 bp, Homo sapiens
ggattacttactttt

SEQ ID NO: 774610 - DNA, 15 bp, Homo sapiens
gattacttacttttg

SEQ ID NO: 774611 - DNA, 15 bp, Homo sapiens
attacttacttttgg

SEQ ID NO: 774612 - DNA, 15 bp, Homo sapiens
ttacttacttttgga

SEQ ID NO: 774613 - DNA, 15 bp, Homo sapiens
tacttacttttggag

SEQ ID NO: 774614 - DNA, 15 bp, Homo sapiens
acttacttttggagg

SEQ ID NO: 774615 - DNA, 15 bp, Homo sapiens
cttacttttggaggc

SEQ ID NO: 774616 - DNA, 15 bp, Homo sapiens
ttacttttggaggca

SEQ ID NO: 774617 - DNA, 15 bp, Homo sapiens
tacttttggaggcaa

SEQ ID NO: 774618 - DNA, 15 bp, Homo sapiens
acttttggaggcaat

SEQ ID NO: 774619 - DNA, 15 bp, Homo sapiens
cttttggaggcaata

SEQ ID NO: 774620 - DNA, 15 bp, Homo sapiens
ttttggaggcaataa

SEQ ID NO: 774621 - DNA, 15 bp, Homo sapiens
tttggaggcaataac

SEQ ID NO: 774622 - DNA, 15 bp, Homo sapiens
ttggaggcaataacc

SEQ ID NO: 774623 - DNA, 15 bp, Homo sapiens
tggaggcaataacct

SEQ ID NO: 774624 - DNA, 15 bp, Homo sapiens
ggaggcaataaccta

SEQ ID NO: 774625 - DNA, 15 bp, Homo sapiens
gaggcaataacctag

SEQ ID NO: 774626 - DNA, 15 bp, Homo sapiens
aggcaataacctaga

SEQ ID NO: 774627 - DNA, 15 bp, Homo sapiens
ggcaataacctagag

SEQ ID NO: 774628 - DNA, 15 bp, Homo sapiens
gcaataacctagagc

SEQ ID NO: 774629 - DNA, 15 bp, Homo sapiens
caataacctagagca

SEQ ID NO: 774630 - DNA, 15 bp, Homo sapiens
aataacctagagcac

SEQ ID NO: 774631 - DNA, 15 bp, Homo sapiens
ataacctagagcact

SEQ ID NO: 774632 - DNA, 15 bp, Homo sapiens
taacctagagcactt

SEQ ID NO: 774633 - DNA, 15 bp, Homo sapiens
aacctagagcacttc

SEQ ID NO: 774634 - DNA, 15 bp, Homo sapiens
acctagagcacttca

SEQ ID NO: 774635 - DNA, 15 bp, Homo sapiens
cctagagcacttcaa

SEQ ID NO: 774636 - DNA, 15 bp, Homo sapiens
ctagagcacttcaac

SEQ ID NO: 774637 - DNA, 15 bp, Homo sapiens
tagagcacttcaaca

SEQ ID NO: 774638 - DNA, 15 bp, Homo sapiens
agagcacttcaacag

SEQ ID NO: 774639 - DNA, 15 bp, Homo sapiens
gagcacttcaacagt

SEQ ID NO: 774640 - DNA, 15 bp, Homo sapiens
agcacttcaacagtt

SEQ ID NO: 774641 - DNA, 15 bp, Homo sapiens
gcacttcaacagttt

SEQ ID NO: 774642 - DNA, 15 bp, Homo sapiens
cacttcaacagtttg

SEQ ID NO: 774643 - DNA, 15 bp, Homo sapiens
acttcaacagtttgt

SEQ ID NO: 774644 - DNA, 15 bp, Homo sapiens
cttcaacagtttgtt

SEQ ID NO: 774645 - DNA, 15 bp, Homo sapiens
ttcaacagtttgttt

SEQ ID NO: 774646 - DNA, 15 bp, Homo sapiens
tcaacagtttgtttt

SEQ ID NO: 774647 - DNA, 15 bp, Homo sapiens
caacagtttgttttt

SEQ ID NO: 774648 - DNA, 15 bp, Homo sapiens
aacagtttgtttttt

SEQ ID NO: 774649 - DNA, 15 bp, Homo sapiens
acagtttgttttttg

SEQ ID NO: 774650 - DNA, 15 bp, Homo sapiens
cagtttgttttttgt

SEQ ID NO: 774651 - DNA, 15 bp, Homo sapiens
agtttgttttttgtt

SEQ ID NO: 774652 - DNA, 15 bp, Homo sapiens
gtttgttttttgttt

SEQ ID NO: 774653 - DNA, 15 bp, Homo sapiens
tttgttttttgtttt

SEQ ID NO: 774654 - DNA, 15 bp, Homo sapiens
ttgttttttgttttt

SEQ ID NO: 774655 - DNA, 15 bp, Homo sapiens
tgttttttgtttttt

SEQ ID NO: 774656 - DNA, 15 bp, Homo sapiens
gttttttgttttttt

SEQ ID NO: 774657 - DNA, 15 bp, Homo sapiens
ttttttgtttttttg

SEQ ID NO: 774658 - DNA, 15 bp, Homo sapiens
tttttgtttttttgt

SEQ ID NO: 774659 - DNA, 15 bp, Homo sapiens
gtttttttgtttttt

SEQ ID NO: 774660 - DNA, 15 bp, Homo sapiens
gatggaatctcgctc

SEQ ID NO: 774661 - DNA, 15 bp, Homo sapiens
atggaatctcgctct

SEQ ID NO: 774662 - DNA, 15 bp, Homo sapiens
tggaatctcgctctg

SEQ ID NO: 774663 - DNA, 15 bp, Homo sapiens
ggaatctcgctctgt

SEQ ID NO: 774664 - DNA, 15 bp, Homo sapiens
gaatctcgctctgtc

SEQ ID NO: 774665 - DNA, 15 bp, Homo sapiens
aatctcgctctgtcg

SEQ ID NO: 774666 - DNA, 15 bp, Homo sapiens
atctcgctctgtcgc

SEQ ID NO: 774667 - DNA, 15 bp, Homo sapiens
tggagtgcaatggcg

SEQ ID NO: 774668 - DNA, 15 bp, Homo sapiens
ggagtgcaatggcgc

SEQ ID NO: 774669 - DNA, 15 bp, Homo sapiens
gagtgcaatggcgcg

SEQ ID NO: 774670 - DNA, 15 bp, Homo sapiens
agtgcaatggcgcga

SEQ ID NO: 774671 - DNA, 15 bp, Homo sapiens
gtgcaatggcgcgat

SEQ ID NO: 774672 - DNA, 15 bp, Homo sapiens
tgcaatggcgcgatc

SEQ ID NO: 774673 - DNA, 15 bp, Homo sapiens
gcaatggcgcgatct

SEQ ID NO: 774674 - DNA, 15 bp, Homo sapiens
caatggcgcgatctc

SEQ ID NO: 774675 - DNA, 15 bp, Homo sapiens
aatggcgcgatctcg

SEQ ID NO: 774676 - DNA, 15 bp, Homo sapiens
atggcgcgatctcgg

SEQ ID NO: 774677 - DNA, 15 bp, Homo sapiens
tcactgcaacctcta

SEQ ID NO: 774678 - DNA, 15 bp, Homo sapiens
cactgcaacctctac

SEQ ID NO: 774679 - DNA, 15 bp, Homo sapiens
actgcaacctctacc

SEQ ID NO: 774680 - DNA, 15 bp, Homo sapiens
ctgcaacctctacct

SEQ ID NO: 774681 - DNA, 15 bp, Homo sapiens
tgcaacctctacctc

SEQ ID NO: 774682 - DNA, 15 bp, Homo sapiens
gcaacctctacctct

SEQ ID NO: 774683 - DNA, 15 bp, Homo sapiens
caacctctacctctt

SEQ ID NO: 774684 - DNA, 15 bp, Homo sapiens
aacctctacctcttg

SEQ ID NO: 774685 - DNA, 15 bp, Homo sapiens
acctctacctcttgg

SEQ ID NO: 774686 - DNA, 15 bp, Homo sapiens
cctctacctcttggg

SEQ ID NO: 774687 - DNA, 15 bp, Homo sapiens
ctctacctcttgggt

SEQ ID NO: 774688 - DNA, 15 bp, Homo sapiens
tctacctcttgggtt

SEQ ID NO: 774689 - DNA, 15 bp, Homo sapiens
ctacctcttgggttc

SEQ ID NO: 774690 - DNA, 15 bp, Homo sapiens
tacctcttgggttca

SEQ ID NO: 774691 - DNA, 15 bp, Homo sapiens
acctcttgggttcaa

SEQ ID NO: 774692 - DNA, 15 bp, Homo sapiens
cctcttgggttcaag

SEQ ID NO: 774693 - DNA, 15 bp, Homo sapiens
ctcttgggttcaagc

SEQ ID NO: 774694 - DNA, 15 bp, Homo sapiens
tcttgggttcaagcg

SEQ ID NO: 774695 - DNA, 15 bp, Homo sapiens
cttgggttcaagcga

SEQ ID NO: 774696 - DNA, 15 bp, Homo sapiens
ttgggttcaagcgat

SEQ ID NO: 774697 - DNA, 15 bp, Homo sapiens
cgattctcctgcctc

SEQ ID NO: 774698 - DNA, 15 bp, Homo sapiens
tgggactacaggcac

SEQ ID NO: 774699 - DNA, 15 bp, Homo sapiens
gggactacaggcacc

SEQ ID NO: 774700 - DNA, 15 bp, Homo sapiens
ggactacaggcaccc

SEQ ID NO: 774701 - DNA, 15 bp, Homo sapiens
gactacaggcaccca

SEQ ID NO: 774702 - DNA, 15 bp, Homo sapiens
actacaggcacccac

SEQ ID NO: 774703 - DNA, 15 bp, Homo sapiens
ctacaggcacccacc

SEQ ID NO: 774704 - DNA, 15 bp, Homo sapiens
tacaggcacccacca

SEQ ID NO: 774705 - DNA, 15 bp, Homo sapiens
acaggcacccaccac

SEQ ID NO: 774706 - DNA, 15 bp, Homo sapiens
caggcacccaccacc

SEQ ID NO: 774707 - DNA, 15 bp, Homo sapiens
aggcacccaccacca

SEQ ID NO: 774708 - DNA, 15 bp, Homo sapiens
ggcacccaccaccac

SEQ ID NO: 774709 - DNA, 15 bp, Homo sapiens
gcacccaccaccacg

SEQ ID NO: 774710 - DNA, 15 bp, Homo sapiens
cacccaccaccacgc

SEQ ID NO: 774711 - DNA, 15 bp, Homo sapiens
acccaccaccacgcc

SEQ ID NO: 774712 - DNA, 15 bp, Homo sapiens
cccaccaccacgccc

SEQ ID NO: 774713 - DNA, 15 bp, Homo sapiens
ccaccaccacgcccg

SEQ ID NO: 774714 - DNA, 15 bp, Homo sapiens
caccaccacgcccgg

SEQ ID NO: 774715 - DNA, 15 bp, Homo sapiens
accaccacgcccggc

SEQ ID NO: 774716 - DNA, 15 bp, Homo sapiens
ccaccacgcccggct

SEQ ID NO: 774717 - DNA, 15 bp, Homo sapiens
caccacgcccggcta

SEQ ID NO: 774718 - DNA, 15 bp, Homo sapiens
accacgcccggctag

SEQ ID NO: 774719 - DNA, 15 bp, Homo sapiens
ccacgcccggctagt

SEQ ID NO: 774720 - DNA, 15 bp, Homo sapiens
cacgcccggctagtt

SEQ ID NO: 774721 - DNA, 15 bp, Homo sapiens
acgcccggctagttt

SEQ ID NO: 774722 - DNA, 15 bp, Homo sapiens
cgcccggctagtttt

SEQ ID NO: 774723 - DNA, 15 bp, Homo sapiens
gcccggctagttttt

SEQ ID NO: 774724 - DNA, 15 bp, Homo sapiens
cccggctagtttttg

SEQ ID NO: 774725 - DNA, 15 bp, Homo sapiens
ccggctagtttttgt

SEQ ID NO: 774726 - DNA, 15 bp, Homo sapiens
cggctagtttttgta

SEQ ID NO: 774727 - DNA, 15 bp, Homo sapiens
ggctagtttttgtat

SEQ ID NO: 774728 - DNA, 15 bp, Homo sapiens
gctagtttttgtatt

SEQ ID NO: 774729 - DNA, 15 bp, Homo sapiens
ctagtttttgtattt

SEQ ID NO: 774730 - DNA, 15 bp, Homo sapiens
tagtttttgtatttt

SEQ ID NO: 774731 - DNA, 15 bp, Homo sapiens
agtttttgtattttt

SEQ ID NO: 774732 - DNA, 15 bp, Homo sapiens
gtttttgtattttta

SEQ ID NO: 774733 - DNA, 15 bp, Homo sapiens
cggggtttcaccata

SEQ ID NO: 774734 - DNA, 15 bp, Homo sapiens
tgaactcctgacctt

SEQ ID NO: 774735 - DNA, 15 bp, Homo sapiens
gaactcctgaccttg

SEQ ID NO: 774736 - DNA, 15 bp, Homo sapiens
aactcctgaccttgt

SEQ ID NO: 774737 - DNA, 15 bp, Homo sapiens
actcctgaccttgtg

SEQ ID NO: 774738 - DNA, 15 bp, Homo sapiens
ctcctgaccttgtga

SEQ ID NO: 774739 - DNA, 15 bp, Homo sapiens
tcctgaccttgtgat

SEQ ID NO: 774740 - DNA, 15 bp, Homo sapiens
cctgaccttgtgatc

SEQ ID NO: 774741 - DNA, 15 bp, Homo sapiens
ctgaccttgtgatcc

SEQ ID NO: 774742 - DNA, 15 bp, Homo sapiens
tgaccttgtgatcct

SEQ ID NO: 774743 - DNA, 15 bp, Homo sapiens
gaccttgtgatcctc

SEQ ID NO: 774744 - DNA, 15 bp, Homo sapiens
accttgtgatcctcc

SEQ ID NO: 774745 - DNA, 15 bp, Homo sapiens
ccttgtgatcctccc

SEQ ID NO: 774746 - DNA, 15 bp, Homo sapiens
cttgtgatcctcccg

SEQ ID NO: 774747 - DNA, 15 bp, Homo sapiens
ttgtgatcctcccgc

SEQ ID NO: 774748 - DNA, 15 bp, Homo sapiens
tgtgatcctcccgcc

SEQ ID NO: 774749 - DNA, 15 bp, Homo sapiens
gatcctcccgcctcg

SEQ ID NO: 774750 - DNA, 15 bp, Homo sapiens
atcctcccgcctcgg

SEQ ID NO: 774751 - DNA, 15 bp, Homo sapiens
tcctcccgcctcggc

SEQ ID NO: 774752 - DNA, 15 bp, Homo sapiens
cctcccgcctcggcc

SEQ ID NO: 774753 - DNA, 15 bp, Homo sapiens
ctcccgcctcggcct

SEQ ID NO: 774754 - DNA, 15 bp, Homo sapiens
tcccgcctcggcctc

SEQ ID NO: 774755 - DNA, 15 bp, Homo sapiens
ggcatgagccaccgc

SEQ ID NO: 774756 - DNA, 15 bp, Homo sapiens
gcatgagccaccgca

SEQ ID NO: 774757 - DNA, 15 bp, Homo sapiens
catgagccaccgcac

SEQ ID NO: 774758 - DNA, 15 bp, Homo sapiens
atgagccaccgcacc

SEQ ID NO: 774759 - DNA, 15 bp, Homo sapiens
tgagccaccgcaccc

SEQ ID NO: 774760 - DNA, 15 bp, Homo sapiens
gagccaccgcacccg

SEQ ID NO: 774761 - DNA, 15 bp, Homo sapiens
agccaccgcacccgg

SEQ ID NO: 774762 - DNA, 15 bp, Homo sapiens
gccaccgcacccggc

SEQ ID NO: 774763 - DNA, 15 bp, Homo sapiens
ccaccgcacccggcc

SEQ ID NO: 774764 - DNA, 15 bp, Homo sapiens
caccgcacccggcct

SEQ ID NO: 774765 - DNA, 15 bp, Homo sapiens
accgcacccggcctc

SEQ ID NO: 774766 - DNA, 15 bp, Homo sapiens
ccgcacccggcctca

SEQ ID NO: 774767 - DNA, 15 bp, Homo sapiens
cgcacccggcctcaa

SEQ ID NO: 774768 - DNA, 15 bp, Homo sapiens
gcacccggcctcaac

SEQ ID NO: 774769 - DNA, 15 bp, Homo sapiens
cacccggcctcaaca

SEQ ID NO: 774770 - DNA, 15 bp, Homo sapiens
acccggcctcaacag

SEQ ID NO: 774771 - DNA, 15 bp, Homo sapiens
cccggcctcaacagt

SEQ ID NO: 774772 - DNA, 15 bp, Homo sapiens
ccggcctcaacagtt

SEQ ID NO: 774773 - DNA, 15 bp, Homo sapiens
cggcctcaacagttt

SEQ ID NO: 774774 - DNA, 15 bp, Homo sapiens
ggcctcaacagtttt

SEQ ID NO: 774775 - DNA, 15 bp, Homo sapiens
gcctcaacagttttt

SEQ ID NO: 774776 - DNA, 15 bp, Homo sapiens
cctcaacagtttttt

SEQ ID NO: 774777 - DNA, 15 bp, Homo sapiens
ctcaacagtttttta

SEQ ID NO: 774778 - DNA, 15 bp, Homo sapiens
tcaacagttttttaa

SEQ ID NO: 774779 - DNA, 15 bp, Homo sapiens
caacagttttttaaa

SEQ ID NO: 774780 - DNA, 15 bp, Homo sapiens
aacagttttttaaaa

SEQ ID NO: 774781 - DNA, 15 bp, Homo sapiens
acagttttttaaaaa

SEQ ID NO: 774782 - DNA, 15 bp, Homo sapiens
cagttttttaaaaaa

SEQ ID NO: 774783 - DNA, 15 bp, Homo sapiens
agttttttaaaaaac

SEQ ID NO: 774784 - DNA, 15 bp, Homo sapiens
gttttttaaaaaact

SEQ ID NO: 774785 - DNA, 15 bp, Homo sapiens
ttttttaaaaaactt

SEQ ID NO: 774786 - DNA, 15 bp, Homo sapiens
tttttaaaaaacttt

SEQ ID NO: 774787 - DNA, 15 bp, Homo sapiens
ttttaaaaaactttc

SEQ ID NO: 774788 - DNA, 15 bp, Homo sapiens
tttaaaaaactttct

SEQ ID NO: 774789 - DNA, 15 bp, Homo sapiens
ttaaaaaactttctt

SEQ ID NO: 774790 - DNA, 15 bp, Homo sapiens
taaaaaactttcttg

SEQ ID NO: 774791 - DNA, 15 bp, Homo sapiens
aaaaaactttcttgc

SEQ ID NO: 774792 - DNA, 15 bp, Homo sapiens
aaaaactttcttgca

SEQ ID NO: 774793 - DNA, 15 bp, Homo sapiens
aaaactttcttgcat

SEQ ID NO: 774794 - DNA, 15 bp, Homo sapiens
aaactttcttgcatg

SEQ ID NO: 774795 - DNA, 15 bp, Homo sapiens
aactttcttgcatgc

SEQ ID NO: 774796 - DNA, 15 bp, Homo sapiens
actttcttgcatgct

SEQ ID NO: 774797 - DNA, 15 bp, Homo sapiens
ctttcttgcatgcta

SEQ ID NO: 774798 - DNA, 15 bp, Homo sapiens
tttcttgcatgctaa

SEQ ID NO: 774799 - DNA, 15 bp, Homo sapiens
ttcttgcatgctaac

SEQ ID NO: 774800 - DNA, 15 bp, Homo sapiens
tcttgcatgctaaca

SEQ ID NO: 774801 - DNA, 15 bp, Homo sapiens
cttgcatgctaacac

SEQ ID NO: 774802 - DNA, 15 bp, Homo sapiens
ttgcatgctaacaca

SEQ ID NO: 774803 - DNA, 15 bp, Homo sapiens
tgcatgctaacacag

SEQ ID NO: 774804 - DNA, 15 bp, Homo sapiens
gcatgctaacacagt

SEQ ID NO: 774805 - DNA, 15 bp, Homo sapiens
catgctaacacagta

SEQ ID NO: 774806 - DNA, 15 bp, Homo sapiens
atgctaacacagtac

SEQ ID NO: 774807 - DNA, 15 bp, Homo sapiens
tgctaacacagtact

SEQ ID NO: 774808 - DNA, 15 bp, Homo sapiens
gctaacacagtactg

SEQ ID NO: 774809 - DNA, 15 bp, Homo sapiens
ctaacacagtactgt

SEQ ID NO: 774810 - DNA, 15 bp, Homo sapiens
taacacagtactgta

SEQ ID NO: 774811 - DNA, 15 bp, Homo sapiens
aacacagtactgtag

SEQ ID NO: 774812 - DNA, 15 bp, Homo sapiens
acacagtactgtagt

SEQ ID NO: 774813 - DNA, 15 bp, Homo sapiens
cacagtactgtagtt

SEQ ID NO: 774814 - DNA, 15 bp, Homo sapiens
acagtactgtagttt

SEQ ID NO: 774815 - DNA, 15 bp, Homo sapiens
cagtactgtagttta

SEQ ID NO: 774816 - DNA, 15 bp, Homo sapiens
agtactgtagtttac

SEQ ID NO: 774817 - DNA, 15 bp, Homo sapiens
gtactgtagtttaca

SEQ ID NO: 774818 - DNA, 15 bp, Homo sapiens
tactgtagtttacat

SEQ ID NO: 774819 - DNA, 15 bp, Homo sapiens
actgtagtttacatt

SEQ ID NO: 774820 - DNA, 15 bp, Homo sapiens
ctgtagtttacattc

SEQ ID NO: 774821 - DNA, 15 bp, Homo sapiens
tgtagtttacattca

SEQ ID NO: 774822 - DNA, 15 bp, Homo sapiens
gtagtttacattcat

SEQ ID NO: 774823 - DNA, 15 bp, Homo sapiens
tagtttacattcatt

SEQ ID NO: 774824 - DNA, 15 bp, Homo sapiens
agtttacattcattt

SEQ ID NO: 774825 - DNA, 15 bp, Homo sapiens
gtttacattcatttt

SEQ ID NO: 774826 - DNA, 15 bp, Homo sapiens
tttacattcattttg

SEQ ID NO: 774827 - DNA, 15 bp, Homo sapiens
ttacattcattttga

SEQ ID NO: 774828 - DNA, 15 bp, Homo sapiens
tacattcattttgat

SEQ ID NO: 774829 - DNA, 15 bp, Homo sapiens
acattcattttgatg

SEQ ID NO: 774830 - DNA, 15 bp, Homo sapiens
cattcattttgatga

SEQ ID NO: 774831 - DNA, 15 bp, Homo sapiens
attcattttgatgac

SEQ ID NO: 774832 - DNA, 15 bp, Homo sapiens
ttcattttgatgact

SEQ ID NO: 774833 - DNA, 15 bp, Homo sapiens
tcattttgatgactt

SEQ ID NO: 774834 - DNA, 15 bp, Homo sapiens
cattttgatgactta

SEQ ID NO: 774835 - DNA, 15 bp, Homo sapiens
attttgatgacttag

SEQ ID NO: 774836 - DNA, 15 bp, Homo sapiens
ttttgatgacttaga

SEQ ID NO: 774837 - DNA, 15 bp, Homo sapiens
tttgatgacttagag

SEQ ID NO: 774838 - DNA, 15 bp, Homo sapiens
ttgatgacttagagt

SEQ ID NO: 774839 - DNA, 15 bp, Homo sapiens
tgatgacttagagtt

SEQ ID NO: 774840 - DNA, 15 bp, Homo sapiens
gatgacttagagtta

SEQ ID NO: 774841 - DNA, 15 bp, Homo sapiens
atgacttagagttac

SEQ ID NO: 774842 - DNA, 15 bp, Homo sapiens
tgacttagagttacc

SEQ ID NO: 774843 - DNA, 15 bp, Homo sapiens
gacttagagttacca

SEQ ID NO: 774844 - DNA, 15 bp, Homo sapiens
acttagagttaccag

SEQ ID NO: 774845 - DNA, 15 bp, Homo sapiens
cttagagttaccagt

SEQ ID NO: 774846 - DNA, 15 bp, Homo sapiens
ttagagttaccagtc

SEQ ID NO: 774847 - DNA, 15 bp, Homo sapiens
tagagttaccagtca

SEQ ID NO: 774848 - DNA, 15 bp, Homo sapiens
agagttaccagtcaa

SEQ ID NO: 774849 - DNA, 15 bp, Homo sapiens
gagttaccagtcaaa

SEQ ID NO: 774850 - DNA, 15 bp, Homo sapiens
agttaccagtcaaag

SEQ ID NO: 774851 - DNA, 15 bp, Homo sapiens
gttaccagtcaaaga

SEQ ID NO: 774852 - DNA, 15 bp, Homo sapiens
ttaccagtcaaagat

SEQ ID NO: 774853 - DNA, 15 bp, Homo sapiens
taccagtcaaagatt

SEQ ID NO: 774854 - DNA, 15 bp, Homo sapiens
accagtcaaagattg

SEQ ID NO: 774855 - DNA, 15 bp, Homo sapiens
ccagtcaaagattga

SEQ ID NO: 774856 - DNA, 15 bp, Homo sapiens
cagtcaaagattgaa

SEQ ID NO: 774857 - DNA, 15 bp, Homo sapiens
agtcaaagattgaaa

SEQ ID NO: 774858 - DNA, 15 bp, Homo sapiens
gtcaaagattgaaat

SEQ ID NO: 774859 - DNA, 15 bp, Homo sapiens
tcaaagattgaaata

SEQ ID NO: 774860 - DNA, 15 bp, Homo sapiens
caaagattgaaatat

SEQ ID NO: 774861 - DNA, 15 bp, Homo sapiens
aaagattgaaatatg

SEQ ID NO: 774862 - DNA, 15 bp, Homo sapiens
aagattgaaatatgt

SEQ ID NO: 774863 - DNA, 15 bp, Homo sapiens
agattgaaatatgtt

SEQ ID NO: 774864 - DNA, 15 bp, Homo sapiens
gattgaaatatgttc

SEQ ID NO: 774865 - DNA, 15 bp, Homo sapiens
attgaaatatgttct

SEQ ID NO: 774866 - DNA, 15 bp, Homo sapiens
ttgaaatatgttctg

SEQ ID NO: 774867 - DNA, 15 bp, Homo sapiens
tgaaatatgttctgg

SEQ ID NO: 774868 - DNA, 15 bp, Homo sapiens
gaaatatgttctggc

SEQ ID NO: 774869 - DNA, 15 bp, Homo sapiens
aaatatgttctggcc

SEQ ID NO: 774870 - DNA, 15 bp, Homo sapiens
aatatgttctggcca

SEQ ID NO: 774871 - DNA, 15 bp, Homo sapiens
atatgttctggccat

SEQ ID NO: 774872 - DNA, 15 bp, Homo sapiens
tatgttctggccatt

SEQ ID NO: 774873 - DNA, 15 bp, Homo sapiens
atgttctggccattc

SEQ ID NO: 774874 - DNA, 15 bp, Homo sapiens
tgttctggccattct

SEQ ID NO: 774875 - DNA, 15 bp, Homo sapiens
gttctggccattctt

SEQ ID NO: 774876 - DNA, 15 bp, Homo sapiens
ttctggccattcttt

SEQ ID NO: 774877 - DNA, 15 bp, Homo sapiens
tctggccattctttt

SEQ ID NO: 774878 - DNA, 15 bp, Homo sapiens
ctggccattcttttt

SEQ ID NO: 774879 - DNA, 15 bp, Homo sapiens
tggccattcttttta

SEQ ID NO: 774880 - DNA, 15 bp, Homo sapiens
ggccattctttttaa

SEQ ID NO: 774881 - DNA, 15 bp, Homo sapiens
gccattctttttaag

SEQ ID NO: 774882 - DNA, 15 bp, Homo sapiens
ccattctttttaagg

SEQ ID NO: 774883 - DNA, 15 bp, Homo sapiens
cattctttttaaggg

SEQ ID NO: 774884 - DNA, 15 bp, Homo sapiens
attctttttaagggt

SEQ ID NO: 774885 - DNA, 15 bp, Homo sapiens
ttctttttaagggtg

SEQ ID NO: 774886 - DNA, 15 bp, Homo sapiens
tctttttaagggtga

SEQ ID NO: 774887 - DNA, 15 bp, Homo sapiens
ctttttaagggtgaa

SEQ ID NO: 774888 - DNA, 15 bp, Homo sapiens
tttttaagggtgaag

SEQ ID NO: 774889 - DNA, 15 bp, Homo sapiens
ttttaagggtgaagt

SEQ ID NO: 774890 - DNA, 15 bp, Homo sapiens
tttaagggtgaagtc

SEQ ID NO: 774891 - DNA, 15 bp, Homo sapiens
ttaagggtgaagtca

SEQ ID NO: 774892 - DNA, 15 bp, Homo sapiens
taagggtgaagtcaa

SEQ ID NO: 774893 - DNA, 15 bp, Homo sapiens
aagggtgaagtcaag

SEQ ID NO: 774894 - DNA, 15 bp, Homo sapiens
agggtgaagtcaagt

SEQ ID NO: 774895 - DNA, 15 bp, Homo sapiens
gggtgaagtcaagta

SEQ ID NO: 774896 - DNA, 15 bp, Homo sapiens
ggtgaagtcaagtat

SEQ ID NO: 774897 - DNA, 15 bp, Homo sapiens
gtgaagtcaagtatg

SEQ ID NO: 774898 - DNA, 15 bp, Homo sapiens
tgaagtcaagtatgt

SEQ ID NO: 774899 - DNA, 15 bp, Homo sapiens
gaagtcaagtatgta

SEQ ID NO: 774900 - DNA, 15 bp, Homo sapiens
aagtcaagtatgtaa

SEQ ID NO: 774901 - DNA, 15 bp, Homo sapiens
agtcaagtatgtaat

SEQ ID NO: 774902 - DNA, 15 bp, Homo sapiens
gtcaagtatgtaatg

SEQ ID NO: 774903 - DNA, 15 bp, Homo sapiens
tcaagtatgtaatgc

SEQ ID NO: 774904 - DNA, 15 bp, Homo sapiens
caagtatgtaatgca

SEQ ID NO: 774905 - DNA, 15 bp, Homo sapiens
aagtatgtaatgcat

SEQ ID NO: 774906 - DNA, 15 bp, Homo sapiens
agtatgtaatgcatt

SEQ ID NO: 774907 - DNA, 15 bp, Homo sapiens
gtatgtaatgcattt

SEQ ID NO: 774908 - DNA, 15 bp, Homo sapiens
tatgtaatgcatttt

SEQ ID NO: 774909 - DNA, 15 bp, Homo sapiens
atgtaatgcattttg

SEQ ID NO: 774910 - DNA, 15 bp, Homo sapiens
tgtaatgcattttgg

SEQ ID NO: 774911 - DNA, 15 bp, Homo sapiens
gtaatgcattttgga

SEQ ID NO: 774912 - DNA, 15 bp, Homo sapiens
taatgcattttggaa

SEQ ID NO: 774913 - DNA, 15 bp, Homo sapiens
aatgcattttggaaa

SEQ ID NO: 774914 - DNA, 15 bp, Homo sapiens
atgcattttggaaag

SEQ ID NO: 774915 - DNA, 15 bp, Homo sapiens
tgcattttggaaaga

SEQ ID NO: 774916 - DNA, 15 bp, Homo sapiens
gcattttggaaagat

SEQ ID NO: 774917 - DNA, 15 bp, Homo sapiens
cattttggaaagatt

SEQ ID NO: 774918 - DNA, 15 bp, Homo sapiens
attttggaaagattc

SEQ ID NO: 774919 - DNA, 15 bp, Homo sapiens
ttttggaaagattcc

SEQ ID NO: 774920 - DNA, 15 bp, Homo sapiens
tttggaaagattccg

SEQ ID NO: 774921 - DNA, 15 bp, Homo sapiens
ttggaaagattccgt

SEQ ID NO: 774922 - DNA, 15 bp, Homo sapiens
tggaaagattccgtt

SEQ ID NO: 774923 - DNA, 15 bp, Homo sapiens
ggaaagattccgttg

SEQ ID NO: 774924 - DNA, 15 bp, Homo sapiens
gaaagattccgttgt

SEQ ID NO: 774925 - DNA, 15 bp, Homo sapiens
aaagattccgttgtg

SEQ ID NO: 774926 - DNA, 15 bp, Homo sapiens
aagattccgttgtga

SEQ ID NO: 774927 - DNA, 15 bp, Homo sapiens
agattccgttgtgaa

SEQ ID NO: 774928 - DNA, 15 bp, Homo sapiens
gattccgttgtgaaa

SEQ ID NO: 774929 - DNA, 15 bp, Homo sapiens
attccgttgtgaaat

SEQ ID NO: 774930 - DNA, 15 bp, Homo sapiens
ttccgttgtgaaatt

SEQ ID NO: 774931 - DNA, 15 bp, Homo sapiens
tccgttgtgaaattg

SEQ ID NO: 774932 - DNA, 15 bp, Homo sapiens
ccgttgtgaaattgt

SEQ ID NO: 774933 - DNA, 15 bp, Homo sapiens
cgttgtgaaattgtt

SEQ ID NO: 774934 - DNA, 15 bp, Homo sapiens
gttgtgaaattgttt

SEQ ID NO: 774935 - DNA, 15 bp, Homo sapiens
ttgtgaaattgtttt

SEQ ID NO: 774936 - DNA, 15 bp, Homo sapiens
tgtgaaattgttttt

SEQ ID NO: 774937 - DNA, 15 bp, Homo sapiens
gtgaaattgttttta

SEQ ID NO: 774938 - DNA, 15 bp, Homo sapiens
tgaaattgtttttaa

SEQ ID NO: 774939 - DNA, 15 bp, Homo sapiens
gaaattgtttttaaa

SEQ ID NO: 774940 - DNA, 15 bp, Homo sapiens
aaattgtttttaaaa

SEQ ID NO: 774941 - DNA, 15 bp, Homo sapiens
aattgtttttaaaag

SEQ ID NO: 774942 - DNA, 15 bp, Homo sapiens
attgtttttaaaagt

SEQ ID NO: 774943 - DNA, 15 bp, Homo sapiens
ttgtttttaaaagtg

SEQ ID NO: 774944 - DNA, 15 bp, Homo sapiens
tgtttttaaaagtgt

SEQ ID NO: 774945 - DNA, 15 bp, Homo sapiens
gtttttaaaagtgtc

SEQ ID NO: 774946 - DNA, 15 bp, Homo sapiens
tttttaaaagtgtct

SEQ ID NO: 774947 - DNA, 15 bp, Homo sapiens
ttttaaaagtgtctg

SEQ ID NO: 774948 - DNA, 15 bp, Homo sapiens
tttaaaagtgtctgg

SEQ ID NO: 774949 - DNA, 15 bp, Homo sapiens
ttaaaagtgtctggt

SEQ ID NO: 774950 - DNA, 15 bp, Homo sapiens
taaaagtgtctggtt

SEQ ID NO: 774951 - DNA, 15 bp, Homo sapiens
aaaagtgtctggttt

SEQ ID NO: 774952 - DNA, 15 bp, Homo sapiens
aaagtgtctggttta

SEQ ID NO: 774953 - DNA, 15 bp, Homo sapiens
aagtgtctggtttaa

SEQ ID NO: 774954 - DNA, 15 bp, Homo sapiens
agtgtctggtttaat

SEQ ID NO: 774955 - DNA, 15 bp, Homo sapiens
gtgtctggtttaata

SEQ ID NO: 774956 - DNA, 15 bp, Homo sapiens
tgtctggtttaatag

SEQ ID NO: 774957 - DNA, 15 bp, Homo sapiens
gtctggtttaatagg

SEQ ID NO: 774958 - DNA, 15 bp, Homo sapiens
tctggtttaatagga

SEQ ID NO: 774959 - DNA, 15 bp, Homo sapiens
ctggtttaataggat

SEQ ID NO: 774960 - DNA, 15 bp, Homo sapiens
tggtttaataggata

SEQ ID NO: 774961 - DNA, 15 bp, Homo sapiens
ggtttaataggataa

SEQ ID NO: 774962 - DNA, 15 bp, Homo sapiens
gtttaataggataaa

SEQ ID NO: 774963 - DNA, 15 bp, Homo sapiens
tttaataggataaaa

SEQ ID NO: 774964 - DNA, 15 bp, Homo sapiens
ttaataggataaaac

SEQ ID NO: 774965 - DNA, 15 bp, Homo sapiens
taataggataaaacc

SEQ ID NO: 774966 - DNA, 15 bp, Homo sapiens
aataggataaaacct

SEQ ID NO: 774967 - DNA, 15 bp, Homo sapiens
ataggataaaacctt

SEQ ID NO: 774968 - DNA, 15 bp, Homo sapiens
taggataaaacctta

SEQ ID NO: 774969 - DNA, 15 bp, Homo sapiens
aggataaaaccttaa

SEQ ID NO: 774970 - DNA, 15 bp, Homo sapiens
ggataaaaccttaac

SEQ ID NO: 774971 - DNA, 15 bp, Homo sapiens
gataaaaccttaact

SEQ ID NO: 774972 - DNA, 15 bp, Homo sapiens
ataaaaccttaacta

SEQ ID NO: 774973 - DNA, 15 bp, Homo sapiens
taaaaccttaactat

SEQ ID NO: 774974 - DNA, 15 bp, Homo sapiens
aaaaccttaactatc

SEQ ID NO: 774975 - DNA, 15 bp, Homo sapiens
aaaccttaactatcc

SEQ ID NO: 774976 - DNA, 15 bp, Homo sapiens
aaccttaactatccc

SEQ ID NO: 774977 - DNA, 15 bp, Homo sapiens
accttaactatccca

SEQ ID NO: 774978 - DNA, 15 bp, Homo sapiens
ccttaactatcccac

SEQ ID NO: 774979 - DNA, 15 bp, Homo sapiens
cttaactatcccaca

SEQ ID NO: 774980 - DNA, 15 bp, Homo sapiens
ttaactatcccacat

SEQ ID NO: 774981 - DNA, 15 bp, Homo sapiens
taactatcccacatg

SEQ ID NO: 774982 - DNA, 15 bp, Homo sapiens
aactatcccacatga

SEQ ID NO: 774983 - DNA, 15 bp, Homo sapiens
actatcccacatgac

SEQ ID NO: 774984 - DNA, 15 bp, Homo sapiens
ctatcccacatgact

SEQ ID NO: 774985 - DNA, 15 bp, Homo sapiens
tatcccacatgacta

SEQ ID NO: 774986 - DNA, 15 bp, Homo sapiens
atcccacatgactaa

SEQ ID NO: 774987 - DNA, 15 bp, Homo sapiens
tcccacatgactaat

SEQ ID NO: 774988 - DNA, 15 bp, Homo sapiens
cccacatgactaatt

SEQ ID NO: 774989 - DNA, 15 bp, Homo sapiens
ccacatgactaattt

SEQ ID NO: 774990 - DNA, 15 bp, Homo sapiens
cacatgactaatttc

SEQ ID NO: 774991 - DNA, 15 bp, Homo sapiens
acatgactaatttct

SEQ ID NO: 774992 - DNA, 15 bp, Homo sapiens
catgactaatttctg

SEQ ID NO: 774993 - DNA, 15 bp, Homo sapiens
atgactaatttctga

SEQ ID NO: 774994 - DNA, 15 bp, Homo sapiens
tgactaatttctgag

SEQ ID NO: 774995 - DNA, 15 bp, Homo sapiens
gactaatttctgagg

SEQ ID NO: 774996 - DNA, 15 bp, Homo sapiens
actaatttctgaggg

SEQ ID NO: 774997 - DNA, 15 bp, Homo sapiens
ctaatttctgagggt

SEQ ID NO: 774998 - DNA, 15 bp, Homo sapiens
taatttctgagggtt

SEQ ID NO: 774999 - DNA, 15 bp, Homo sapiens
aatttctgagggttc

SEQ ID NO: 775000 - DNA, 15 bp, Homo sapiens
atttctgagggttct

SEQ ID NO: 775001 - DNA, 15 bp, Homo sapiens
tttctgagggttcta

SEQ ID NO: 775002 - DNA, 15 bp, Homo sapiens
ttctgagggttctac

SEQ ID NO: 775003 - DNA, 15 bp, Homo sapiens
tctgagggttctaca

SEQ ID NO: 775004 - DNA, 15 bp, Homo sapiens
ctgagggttctacat

SEQ ID NO: 775005 - DNA, 15 bp, Homo sapiens
tgagggttctacata

SEQ ID NO: 775006 - DNA, 15 bp, Homo sapiens
gagggttctacatag

SEQ ID NO: 775007 - DNA, 15 bp, Homo sapiens
agggttctacatagc

SEQ ID NO: 775008 - DNA, 15 bp, Homo sapiens
gggttctacatagcc

SEQ ID NO: 775009 - DNA, 15 bp, Homo sapiens
ggttctacatagcca

SEQ ID NO: 775010 - DNA, 15 bp, Homo sapiens
gttctacatagccat

SEQ ID NO: 775011 - DNA, 15 bp, Homo sapiens
ttctacatagccata

SEQ ID NO: 775012 - DNA, 15 bp, Homo sapiens
tctacatagccatag

SEQ ID NO: 775013 - DNA, 15 bp, Homo sapiens
ctacatagccatagt

SEQ ID NO: 775014 - DNA, 15 bp, Homo sapiens
tacatagccatagtc

SEQ ID NO: 775015 - DNA, 15 bp, Homo sapiens
acatagccatagtct

SEQ ID NO: 775016 - DNA, 15 bp, Homo sapiens
catagccatagtctt

SEQ ID NO: 775017 - DNA, 15 bp, Homo sapiens
atagccatagtcttg

SEQ ID NO: 775018 - DNA, 15 bp, Homo sapiens
tagccatagtcttgc

SEQ ID NO: 775019 - DNA, 15 bp, Homo sapiens
agccatagtcttgct

SEQ ID NO: 775020 - DNA, 15 bp, Homo sapiens
gccatagtcttgcta

SEQ ID NO: 775021 - DNA, 15 bp, Homo sapiens
ccatagtcttgctat

SEQ ID NO: 775022 - DNA, 15 bp, Homo sapiens
catagtcttgctata

SEQ ID NO: 775023 - DNA, 15 bp, Homo sapiens
atagtcttgctatat

SEQ ID NO: 775024 - DNA, 15 bp, Homo sapiens
tagtcttgctatatg

SEQ ID NO: 775025 - DNA, 15 bp, Homo sapiens
agtcttgctatatga

SEQ ID NO: 775026 - DNA, 15 bp, Homo sapiens
gtcttgctatatgag

SEQ ID NO: 775027 - DNA, 15 bp, Homo sapiens
tcttgctatatgagg

SEQ ID NO: 775028 - DNA, 15 bp, Homo sapiens
cttgctatatgagga

SEQ ID NO: 775029 - DNA, 15 bp, Homo sapiens
ttgctatatgaggat

SEQ ID NO: 775030 - DNA, 15 bp, Homo sapiens
tgctatatgaggata

SEQ ID NO: 775031 - DNA, 15 bp, Homo sapiens
gctatatgaggataa

SEQ ID NO: 775032 - DNA, 15 bp, Homo sapiens
ctatatgaggataat

SEQ ID NO: 775033 - DNA, 15 bp, Homo sapiens
tatatgaggataata

SEQ ID NO: 775034 - DNA, 15 bp, Homo sapiens
atatgaggataatat

SEQ ID NO: 775035 - DNA, 15 bp, Homo sapiens
tatgaggataatata

SEQ ID NO: 775036 - DNA, 15 bp, Homo sapiens
atgaggataatataa

SEQ ID NO: 775037 - DNA, 15 bp, Homo sapiens
tgaggataatataag

SEQ ID NO: 775038 - DNA, 15 bp, Homo sapiens
gaggataatataagt

SEQ ID NO: 775039 - DNA, 15 bp, Homo sapiens
aggataatataagta

SEQ ID NO: 775040 - DNA, 15 bp, Homo sapiens
ggataatataagtat

SEQ ID NO: 775041 - DNA, 15 bp, Homo sapiens
gataatataagtata

SEQ ID NO: 775042 - DNA, 15 bp, Homo sapiens
ataatataagtatat

SEQ ID NO: 775043 - DNA, 15 bp, Homo sapiens
taatataagtatatc

SEQ ID NO: 775044 - DNA, 15 bp, Homo sapiens
aatataagtatatct

SEQ ID NO: 775045 - DNA, 15 bp, Homo sapiens
atataagtatatctg

SEQ ID NO: 775046 - DNA, 15 bp, Homo sapiens
tataagtatatctgg

SEQ ID NO: 775047 - DNA, 15 bp, Homo sapiens
ataagtatatctggg

SEQ ID NO: 775048 - DNA, 15 bp, Homo sapiens
taagtatatctggga

SEQ ID NO: 775049 - DNA, 15 bp, Homo sapiens
aagtatatctgggac

SEQ ID NO: 775050 - DNA, 15 bp, Homo sapiens
agtatatctgggacc

SEQ ID NO: 775051 - DNA, 15 bp, Homo sapiens
gtatatctgggacca

SEQ ID NO: 775052 - DNA, 15 bp, Homo sapiens
tatatctgggaccat

SEQ ID NO: 775053 - DNA, 15 bp, Homo sapiens
atatctgggaccatc

SEQ ID NO: 775054 - DNA, 15 bp, Homo sapiens
tatctgggaccatct

SEQ ID NO: 775055 - DNA, 15 bp, Homo sapiens
atctgggaccatctt

SEQ ID NO: 775056 - DNA, 15 bp, Homo sapiens
tctgggaccatcttg

SEQ ID NO: 775057 - DNA, 15 bp, Homo sapiens
ctgggaccatcttga

SEQ ID NO: 775058 - DNA, 15 bp, Homo sapiens
tgggaccatcttgat

SEQ ID NO: 775059 - DNA, 15 bp, Homo sapiens
gggaccatcttgatt

SEQ ID NO: 775060 - DNA, 15 bp, Homo sapiens
ggaccatcttgattt

SEQ ID NO: 775061 - DNA, 15 bp, Homo sapiens
gaccatcttgattta

SEQ ID NO: 775062 - DNA, 15 bp, Homo sapiens
accatcttgatttat

SEQ ID NO: 775063 - DNA, 15 bp, Homo sapiens
ccatcttgatttatt

SEQ ID NO: 775064 - DNA, 15 bp, Homo sapiens
catcttgatttatta

SEQ ID NO: 775065 - DNA, 15 bp, Homo sapiens
atcttgatttattaa

SEQ ID NO: 775066 - DNA, 15 bp, Homo sapiens
tcttgatttattaat

SEQ ID NO: 775067 - DNA, 15 bp, Homo sapiens
cttgatttattaatg

SEQ ID NO: 775068 - DNA, 15 bp, Homo sapiens
ttgatttattaatgt

SEQ ID NO: 775069 - DNA, 15 bp, Homo sapiens
tgatttattaatgtg

SEQ ID NO: 775070 - DNA, 15 bp, Homo sapiens
gatttattaatgtgt

SEQ ID NO: 775071 - DNA, 15 bp, Homo sapiens
atttattaatgtgta

SEQ ID NO: 775072 - DNA, 15 bp, Homo sapiens
tttattaatgtgtag

SEQ ID NO: 775073 - DNA, 15 bp, Homo sapiens
ttattaatgtgtagt

SEQ ID NO: 775074 - DNA, 15 bp, Homo sapiens
tattaatgtgtagta

SEQ ID NO: 775075 - DNA, 15 bp, Homo sapiens
tacccatccatccag

SEQ ID NO: 775076 - DNA, 15 bp, Homo sapiens
acccatccatccagc

SEQ ID NO: 775077 - DNA, 15 bp, Homo sapiens
cccatccatccagct

SEQ ID NO: 775078 - DNA, 15 bp, Homo sapiens
ccatccatccagctt

SEQ ID NO: 775079 - DNA, 15 bp, Homo sapiens
catccatccagcttt

SEQ ID NO: 775080 - DNA, 15 bp, Homo sapiens
atccatccagctttt

SEQ ID NO: 775081 - DNA, 15 bp, Homo sapiens
tccatccagcttttt

SEQ ID NO: 775082 - DNA, 15 bp, Homo sapiens
ccatccagctttttc

SEQ ID NO: 775083 - DNA, 15 bp, Homo sapiens
catccagctttttcc

SEQ ID NO: 775084 - DNA, 15 bp, Homo sapiens
atccagctttttccc

SEQ ID NO: 775085 - DNA, 15 bp, Homo sapiens
tccagctttttccct

SEQ ID NO: 775086 - DNA, 15 bp, Homo sapiens
ccagctttttccctt

SEQ ID NO: 775087 - DNA, 15 bp, Homo sapiens
cagctttttcccttg

SEQ ID NO: 775088 - DNA, 15 bp, Homo sapiens
agctttttcccttgc

SEQ ID NO: 775089 - DNA, 15 bp, Homo sapiens
gctttttcccttgct

SEQ ID NO: 775090 - DNA, 15 bp, Homo sapiens
ctttttcccttgctt

SEQ ID NO: 775091 - DNA, 15 bp, Homo sapiens
tttttcccttgctta

SEQ ID NO: 775092 - DNA, 15 bp, Homo sapiens
ttttcccttgcttaa

SEQ ID NO: 775093 - DNA, 15 bp, Homo sapiens
tttcccttgcttaat

SEQ ID NO: 775094 - DNA, 15 bp, Homo sapiens
ttcccttgcttaatt

SEQ ID NO: 775095 - DNA, 15 bp, Homo sapiens
tcccttgcttaattt

SEQ ID NO: 775096 - DNA, 15 bp, Homo sapiens
cccttgcttaatttc

SEQ ID NO: 775097 - DNA, 15 bp, Homo sapiens
ccttgcttaatttca

SEQ ID NO: 775098 - DNA, 15 bp, Homo sapiens
cttgcttaatttcaa

SEQ ID NO: 775099 - DNA, 15 bp, Homo sapiens
ttgcttaatttcaag

SEQ ID NO: 775100 - DNA, 15 bp, Homo sapiens
tgcttaatttcaaga

SEQ ID NO: 775101 - DNA, 15 bp, Homo sapiens
gcttaatttcaagat

SEQ ID NO: 775102 - DNA, 15 bp, Homo sapiens
cttaatttcaagata

SEQ ID NO: 775103 - DNA, 15 bp, Homo sapiens
ttaatttcaagatac

SEQ ID NO: 775104 - DNA, 15 bp, Homo sapiens
taatttcaagatacc

SEQ ID NO: 775105 - DNA, 15 bp, Homo sapiens
aatttcaagataccc

SEQ ID NO: 775106 - DNA, 15 bp, Homo sapiens
atttcaagatacccc

SEQ ID NO: 775107 - DNA, 15 bp, Homo sapiens
tttcaagatacccct

SEQ ID NO: 775108 - DNA, 15 bp, Homo sapiens
ttcaagatacccctc

SEQ ID NO: 775109 - DNA, 15 bp, Homo sapiens
tcaagatacccctct

SEQ ID NO: 775110 - DNA, 15 bp, Homo sapiens
caagatacccctctg

SEQ ID NO: 775111 - DNA, 15 bp, Homo sapiens
aagatacccctctgc

SEQ ID NO: 775112 - DNA, 15 bp, Homo sapiens
agatacccctctgcc

SEQ ID NO: 775113 - DNA, 15 bp, Homo sapiens
gatacccctctgcct

SEQ ID NO: 775114 - DNA, 15 bp, Homo sapiens
atacccctctgcctg

SEQ ID NO: 775115 - DNA, 15 bp, Homo sapiens
tacccctctgcctgc

SEQ ID NO: 775116 - DNA, 15 bp, Homo sapiens
acccctctgcctgct

SEQ ID NO: 775117 - DNA, 15 bp, Homo sapiens
cccctctgcctgctt

SEQ ID NO: 775118 - DNA, 15 bp, Homo sapiens
ccctctgcctgcttg

SEQ ID NO: 775119 - DNA, 15 bp, Homo sapiens
cctctgcctgcttgg

SEQ ID NO: 775120 - DNA, 15 bp, Homo sapiens
ctctgcctgcttggc

SEQ ID NO: 775121 - DNA, 15 bp, Homo sapiens
tctgcctgcttggca

SEQ ID NO: 775122 - DNA, 15 bp, Homo sapiens
ctgcctgcttggcac

SEQ ID NO: 775123 - DNA, 15 bp, Homo sapiens
tgcctgcttggcaca

SEQ ID NO: 775124 - DNA, 15 bp, Homo sapiens
gcctgcttggcacaa

SEQ ID NO: 775125 - DNA, 15 bp, Homo sapiens
cctgcttggcacaag

SEQ ID NO: 775126 - DNA, 15 bp, Homo sapiens
ctgcttggcacaagc

SEQ ID NO: 775127 - DNA, 15 bp, Homo sapiens
tgcttggcacaagcc

SEQ ID NO: 775128 - DNA, 15 bp, Homo sapiens
gcttggcacaagcct

SEQ ID NO: 775129 - DNA, 15 bp, Homo sapiens
cttggcacaagcctt

SEQ ID NO: 775130 - DNA, 15 bp, Homo sapiens
ttggcacaagccttc

SEQ ID NO: 775131 - DNA, 15 bp, Homo sapiens
tggcacaagccttcc

SEQ ID NO: 775132 - DNA, 15 bp, Homo sapiens
ggcacaagccttccc

SEQ ID NO: 775133 - DNA, 15 bp, Homo sapiens
gcacaagccttccca

SEQ ID NO: 775134 - DNA, 15 bp, Homo sapiens
cacaagccttcccat

SEQ ID NO: 775135 - DNA, 15 bp, Homo sapiens
acaagccttcccatc

SEQ ID NO: 775136 - DNA, 15 bp, Homo sapiens
caagccttcccatcc

SEQ ID NO: 775137 - DNA, 15 bp, Homo sapiens
aagccttcccatccc

SEQ ID NO: 775138 - DNA, 15 bp, Homo sapiens
agccttcccatccca

SEQ ID NO: 775139 - DNA, 15 bp, Homo sapiens
gccttcccatcccag

SEQ ID NO: 775140 - DNA, 15 bp, Homo sapiens
ccttcccatcccagt

SEQ ID NO: 775141 - DNA, 15 bp, Homo sapiens
cttcccatcccagtc

SEQ ID NO: 775142 - DNA, 15 bp, Homo sapiens
ttcccatcccagtcc

SEQ ID NO: 775143 - DNA, 15 bp, Homo sapiens
tcccatcccagtcca

SEQ ID NO: 775144 - DNA, 15 bp, Homo sapiens
cccatcccagtccag

SEQ ID NO: 775145 - DNA, 15 bp, Homo sapiens
ccatcccagtccagt

SEQ ID NO: 775146 - DNA, 15 bp, Homo sapiens
catcccagtccagtt

SEQ ID NO: 775147 - DNA, 15 bp, Homo sapiens
atcccagtccagttc

SEQ ID NO: 775148 - DNA, 15 bp, Homo sapiens
tcccagtccagttcc

SEQ ID NO: 775149 - DNA, 15 bp, Homo sapiens
cccagtccagttcca

SEQ ID NO: 775150 - DNA, 15 bp, Homo sapiens
ccagtccagttccat

SEQ ID NO: 775151 - DNA, 15 bp, Homo sapiens
cagtccagttccatc

SEQ ID NO: 775152 - DNA, 15 bp, Homo sapiens
agtccagttccatcc

SEQ ID NO: 775153 - DNA, 15 bp, Homo sapiens
gtccagttccatcca

SEQ ID NO: 775154 - DNA, 15 bp, Homo sapiens
tccagttccatccac

SEQ ID NO: 775155 - DNA, 15 bp, Homo sapiens
ccagttccatccaca

SEQ ID NO: 775156 - DNA, 15 bp, Homo sapiens
cagttccatccacaa

SEQ ID NO: 775157 - DNA, 15 bp, Homo sapiens
agttccatccacaag

SEQ ID NO: 775158 - DNA, 15 bp, Homo sapiens
gttccatccacaaga

SEQ ID NO: 775159 - DNA, 15 bp, Homo sapiens
ttccatccacaagaa

SEQ ID NO: 775160 - DNA, 15 bp, Homo sapiens
tccatccacaagaac

SEQ ID NO: 775161 - DNA, 15 bp, Homo sapiens
ccatccacaagaact

SEQ ID NO: 775162 - DNA, 15 bp, Homo sapiens
catccacaagaactg

SEQ ID NO: 775163 - DNA, 15 bp, Homo sapiens
atccacaagaactgc

SEQ ID NO: 775164 - DNA, 15 bp, Homo sapiens
tccacaagaactgca

SEQ ID NO: 775165 - DNA, 15 bp, Homo sapiens
ccacaagaactgcac

SEQ ID NO: 775166 - DNA, 15 bp, Homo sapiens
cacaagaactgcacc

SEQ ID NO: 775167 - DNA, 15 bp, Homo sapiens
acaagaactgcacct

SEQ ID NO: 775168 - DNA, 15 bp, Homo sapiens
caagaactgcacctg

SEQ ID NO: 775169 - DNA, 15 bp, Homo sapiens
aagaactgcacctgt

SEQ ID NO: 775170 - DNA, 15 bp, Homo sapiens
agaactgcacctgtc

SEQ ID NO: 775171 - DNA, 15 bp, Homo sapiens
gaactgcacctgtca

SEQ ID NO: 775172 - DNA, 15 bp, Homo sapiens
aactgcacctgtcat

SEQ ID NO: 775173 - DNA, 15 bp, Homo sapiens
actgcacctgtcatc

SEQ ID NO: 775174 - DNA, 15 bp, Homo sapiens
ctgcacctgtcatca

SEQ ID NO: 775175 - DNA, 15 bp, Homo sapiens
tgcacctgtcatcac

SEQ ID NO: 775176 - DNA, 15 bp, Homo sapiens
gcacctgtcatcaca

SEQ ID NO: 775177 - DNA, 15 bp, Homo sapiens
cacctgtcatcacag

SEQ ID NO: 775178 - DNA, 15 bp, Homo sapiens
acctgtcatcacagt

SEQ ID NO: 775179 - DNA, 15 bp, Homo sapiens
cctgtcatcacagtc

SEQ ID NO: 775180 - DNA, 15 bp, Homo sapiens
ctgtcatcacagtcc

SEQ ID NO: 775181 - DNA, 15 bp, Homo sapiens
tgtcatcacagtcca

SEQ ID NO: 775182 - DNA, 15 bp, Homo sapiens
gtcatcacagtccag

SEQ ID NO: 775183 - DNA, 15 bp, Homo sapiens
tcatcacagtccaga

SEQ ID NO: 775184 - DNA, 15 bp, Homo sapiens
catcacagtccagac

SEQ ID NO: 775185 - DNA, 15 bp, Homo sapiens
atcacagtccagacc

SEQ ID NO: 775186 - DNA, 15 bp, Homo sapiens
tcacagtccagacct

SEQ ID NO: 775187 - DNA, 15 bp, Homo sapiens
cacagtccagacctg

SEQ ID NO: 775188 - DNA, 15 bp, Homo sapiens
acagtccagacctgc

SEQ ID NO: 775189 - DNA, 15 bp, Homo sapiens
cagtccagacctgcc

SEQ ID NO: 775190 - DNA, 15 bp, Homo sapiens
agtccagacctgcca

SEQ ID NO: 775191 - DNA, 15 bp, Homo sapiens
gtccagacctgccaa

SEQ ID NO: 775192 - DNA, 15 bp, Homo sapiens
tccagacctgccaag

SEQ ID NO: 775193 - DNA, 15 bp, Homo sapiens
ccagacctgccaagt

SEQ ID NO: 775194 - DNA, 15 bp, Homo sapiens
cagacctgccaagtt

SEQ ID NO: 775195 - DNA, 15 bp, Homo sapiens
agacctgccaagtta

SEQ ID NO: 775196 - DNA, 15 bp, Homo sapiens
gacctgccaagttag

SEQ ID NO: 775197 - DNA, 15 bp, Homo sapiens
acctgccaagttagt

SEQ ID NO: 775198 - DNA, 15 bp, Homo sapiens
cctgccaagttagtc

SEQ ID NO: 775199 - DNA, 15 bp, Homo sapiens
ctgccaagttagtct

SEQ ID NO: 775200 - DNA, 15 bp, Homo sapiens
tgccaagttagtctt

SEQ ID NO: 775201 - DNA, 15 bp, Homo sapiens
gccaagttagtctta

SEQ ID NO: 775202 - DNA, 15 bp, Homo sapiens
ccaagttagtcttat

SEQ ID NO: 775203 - DNA, 15 bp, Homo sapiens
caagttagtcttatc

SEQ ID NO: 775204 - DNA, 15 bp, Homo sapiens
aagttagtcttatct

SEQ ID NO: 775205 - DNA, 15 bp, Homo sapiens
agttagtcttatctg

SEQ ID NO: 775206 - DNA, 15 bp, Homo sapiens
gttagtcttatctgc

SEQ ID NO: 775207 - DNA, 15 bp, Homo sapiens
ttagtcttatctgct

SEQ ID NO: 775208 - DNA, 15 bp, Homo sapiens
tagtcttatctgcta

SEQ ID NO: 775209 - DNA, 15 bp, Homo sapiens
agtcttatctgctag

SEQ ID NO: 775210 - DNA, 15 bp, Homo sapiens
gtcttatctgctagc

SEQ ID NO: 775211 - DNA, 15 bp, Homo sapiens
tcttatctgctagca

SEQ ID NO: 775212 - DNA, 15 bp, Homo sapiens
cttatctgctagcaa

SEQ ID NO: 775213 - DNA, 15 bp, Homo sapiens
ttatctgctagcaaa

SEQ ID NO: 775214 - DNA, 15 bp, Homo sapiens
tatctgctagcaaag

SEQ ID NO: 775215 - DNA, 15 bp, Homo sapiens
atctgctagcaaaga

SEQ ID NO: 775216 - DNA, 15 bp, Homo sapiens
tctgctagcaaagac

SEQ ID NO: 775217 - DNA, 15 bp, Homo sapiens
ctgctagcaaagaca

SEQ ID NO: 775218 - DNA, 15 bp, Homo sapiens
tgctagcaaagacat

SEQ ID NO: 775219 - DNA, 15 bp, Homo sapiens
gctagcaaagacatg

SEQ ID NO: 775220 - DNA, 15 bp, Homo sapiens
ctagcaaagacatgc

SEQ ID NO: 775221 - DNA, 15 bp, Homo sapiens
tagcaaagacatgcc

SEQ ID NO: 775222 - DNA, 15 bp, Homo sapiens
agcaaagacatgccc

SEQ ID NO: 775223 - DNA, 15 bp, Homo sapiens
gcaaagacatgccca

SEQ ID NO: 775224 - DNA, 15 bp, Homo sapiens
caaagacatgcccag

SEQ ID NO: 775225 - DNA, 15 bp, Homo sapiens
aaagacatgcccagc

SEQ ID NO: 775226 - DNA, 15 bp, Homo sapiens
aagacatgcccagcc

SEQ ID NO: 775227 - DNA, 15 bp, Homo sapiens
agacatgcccagcct

SEQ ID NO: 775228 - DNA, 15 bp, Homo sapiens
gacatgcccagcctc

SEQ ID NO: 775229 - DNA, 15 bp, Homo sapiens
acatgcccagcctct

SEQ ID NO: 775230 - DNA, 15 bp, Homo sapiens
catgcccagcctctg

SEQ ID NO: 775231 - DNA, 15 bp, Homo sapiens
atgcccagcctctgc

SEQ ID NO: 775232 - DNA, 15 bp, Homo sapiens
tgcccagcctctgca

SEQ ID NO: 775233 - DNA, 15 bp, Homo sapiens
gcccagcctctgcag

SEQ ID NO: 775234 - DNA, 15 bp, Homo sapiens
cccagcctctgcagg

SEQ ID NO: 775235 - DNA, 15 bp, Homo sapiens
ccagcctctgcaggg

SEQ ID NO: 775236 - DNA, 15 bp, Homo sapiens
cagcctctgcaggga

SEQ ID NO: 775237 - DNA, 15 bp, Homo sapiens
agcctctgcagggag

SEQ ID NO: 775238 - DNA, 15 bp, Homo sapiens
gcctctgcagggagt

SEQ ID NO: 775239 - DNA, 15 bp, Homo sapiens
cctctgcagggagtg

SEQ ID NO: 775240 - DNA, 15 bp, Homo sapiens
ctctgcagggagtgt

SEQ ID NO: 775241 - DNA, 15 bp, Homo sapiens
tctgcagggagtgtt

SEQ ID NO: 775242 - DNA, 15 bp, Homo sapiens
ctgcagggagtgttt

SEQ ID NO: 775243 - DNA, 15 bp, Homo sapiens
tgcagggagtgttta

SEQ ID NO: 775244 - DNA, 15 bp, Homo sapiens
gcagggagtgtttat

SEQ ID NO: 775245 - DNA, 15 bp, Homo sapiens
cagggagtgtttatt

SEQ ID NO: 775246 - DNA, 15 bp, Homo sapiens
agggagtgtttatta

SEQ ID NO: 775247 - DNA, 15 bp, Homo sapiens
gggagtgtttattat

SEQ ID NO: 775248 - DNA, 15 bp, Homo sapiens
ggagtgtttattata

SEQ ID NO: 775249 - DNA, 15 bp, Homo sapiens
gagtgtttattatag

SEQ ID NO: 775250 - DNA, 15 bp, Homo sapiens
agtgtttattatagt

SEQ ID NO: 775251 - DNA, 15 bp, Homo sapiens
gtgtttattatagtg

SEQ ID NO: 775252 - DNA, 15 bp, Homo sapiens
tgtttattatagtgg

SEQ ID NO: 775253 - DNA, 15 bp, Homo sapiens
gtttattatagtgga

SEQ ID NO: 775254 - DNA, 15 bp, Homo sapiens
tttattatagtggag

SEQ ID NO: 775255 - DNA, 15 bp, Homo sapiens
ttattatagtggaga

SEQ ID NO: 775256 - DNA, 15 bp, Homo sapiens
tattatagtggagaa

SEQ ID NO: 775257 - DNA, 15 bp, Homo sapiens
attatagtggagaaa

SEQ ID NO: 775258 - DNA, 15 bp, Homo sapiens
ttatagtggagaaaa

SEQ ID NO: 775259 - DNA, 15 bp, Homo sapiens
tatagtggagaaaat

SEQ ID NO: 775260 - DNA, 15 bp, Homo sapiens
atagtggagaaaatc

SEQ ID NO: 775261 - DNA, 15 bp, Homo sapiens
tagtggagaaaatct

SEQ ID NO: 775262 - DNA, 15 bp, Homo sapiens
agtggagaaaatctc

SEQ ID NO: 775263 - DNA, 15 bp, Homo sapiens
gtggagaaaatctct

SEQ ID NO: 775264 - DNA, 15 bp, Homo sapiens
tggagaaaatctctg

SEQ ID NO: 775265 - DNA, 15 bp, Homo sapiens
ggagaaaatctctgg

SEQ ID NO: 775266 - DNA, 15 bp, Homo sapiens
gagaaaatctctgga

SEQ ID NO: 775267 - DNA, 15 bp, Homo sapiens
agaaaatctctggat

SEQ ID NO: 775268 - DNA, 15 bp, Homo sapiens
gaaaatctctggatt

SEQ ID NO: 775269 - DNA, 15 bp, Homo sapiens
aaaatctctggattt

SEQ ID NO: 775270 - DNA, 15 bp, Homo sapiens
aaatctctggatttt

SEQ ID NO: 775271 - DNA, 15 bp, Homo sapiens
aatctctggattttg

SEQ ID NO: 775272 - DNA, 15 bp, Homo sapiens
atctctggattttgc

SEQ ID NO: 775273 - DNA, 15 bp, Homo sapiens
tctctggattttgct

SEQ ID NO: 775274 - DNA, 15 bp, Homo sapiens
ctctggattttgctt

SEQ ID NO: 775275 - DNA, 15 bp, Homo sapiens
tctggattttgcttc

SEQ ID NO: 775276 - DNA, 15 bp, Homo sapiens
ctggattttgcttcg

SEQ ID NO: 775277 - DNA, 15 bp, Homo sapiens
tggattttgcttcgc

SEQ ID NO: 775278 - DNA, 15 bp, Homo sapiens
ggattttgcttcgct

SEQ ID NO: 775279 - DNA, 15 bp, Homo sapiens
gattttgcttcgctt

SEQ ID NO: 775280 - DNA, 15 bp, Homo sapiens
attttgcttcgcttt

SEQ ID NO: 775281 - DNA, 15 bp, Homo sapiens
ttttgcttcgctttt

SEQ ID NO: 775282 - DNA, 15 bp, Homo sapiens
tttgcttcgcttttg

SEQ ID NO: 775283 - DNA, 15 bp, Homo sapiens
ttgcttcgcttttga

SEQ ID NO: 775284 - DNA, 15 bp, Homo sapiens
tgcttcgcttttgag

SEQ ID NO: 775285 - DNA, 15 bp, Homo sapiens
gcttcgcttttgaga

SEQ ID NO: 775286 - DNA, 15 bp, Homo sapiens
cttcgcttttgagag

SEQ ID NO: 775287 - DNA, 15 bp, Homo sapiens
ttcgcttttgagagt

SEQ ID NO: 775288 - DNA, 15 bp, Homo sapiens
tcgcttttgagagtg

SEQ ID NO: 775289 - DNA, 15 bp, Homo sapiens
cgcttttgagagtgg

SEQ ID NO: 775290 - DNA, 15 bp, Homo sapiens
gcttttgagagtggt

SEQ ID NO: 775291 - DNA, 15 bp, Homo sapiens
cttttgagagtggta

SEQ ID NO: 775292 - DNA, 15 bp, Homo sapiens
ttttgagagtggtaa

SEQ ID NO: 775293 - DNA, 15 bp, Homo sapiens
tttgagagtggtaag

SEQ ID NO: 775294 - DNA, 15 bp, Homo sapiens
ttgagagtggtaagg

SEQ ID NO: 775295 - DNA, 15 bp, Homo sapiens
tgagagtggtaaggt

SEQ ID NO: 775296 - DNA, 15 bp, Homo sapiens
gagagtggtaaggtg

SEQ ID NO: 775297 - DNA, 15 bp, Homo sapiens
agagtggtaaggtgg

SEQ ID NO: 775298 - DNA, 15 bp, Homo sapiens
gagtggtaaggtgga

SEQ ID NO: 775299 - DNA, 15 bp, Homo sapiens
agtggtaaggtggat

SEQ ID NO: 775300 - DNA, 15 bp, Homo sapiens
gtggtaaggtggata

SEQ ID NO: 775301 - DNA, 15 bp, Homo sapiens
tggtaaggtggatat

SEQ ID NO: 775302 - DNA, 15 bp, Homo sapiens
ggtaaggtggatatg

SEQ ID NO: 775303 - DNA, 15 bp, Homo sapiens
gtaaggtggatatgt

SEQ ID NO: 775304 - DNA, 15 bp, Homo sapiens
taaggtggatatgtg

SEQ ID NO: 775305 - DNA, 15 bp, Homo sapiens
aaggtggatatgtgc

SEQ ID NO: 775306 - DNA, 15 bp, Homo sapiens
aggtggatatgtgca

SEQ ID NO: 775307 - DNA, 15 bp, Homo sapiens
ggtggatatgtgcag

SEQ ID NO: 775308 - DNA, 15 bp, Homo sapiens
gtggatatgtgcaga

SEQ ID NO: 775309 - DNA, 15 bp, Homo sapiens
tggatatgtgcagaa

SEQ ID NO: 775310 - DNA, 15 bp, Homo sapiens
ggatatgtgcagaaa

SEQ ID NO: 775311 - DNA, 15 bp, Homo sapiens
gatatgtgcagaaaa

SEQ ID NO: 775312 - DNA, 15 bp, Homo sapiens
atatgtgcagaaaat

SEQ ID NO: 775313 - DNA, 15 bp, Homo sapiens
tatgtgcagaaaatg

SEQ ID NO: 775314 - DNA, 15 bp, Homo sapiens
atgtgcagaaaatgc

SEQ ID NO: 775315 - DNA, 15 bp, Homo sapiens
tgtgcagaaaatgct

SEQ ID NO: 775316 - DNA, 15 bp, Homo sapiens
gtgcagaaaatgctc

SEQ ID NO: 775317 - DNA, 15 bp, Homo sapiens
tgcagaaaatgctcc

SEQ ID NO: 775318 - DNA, 15 bp, Homo sapiens
gcagaaaatgctccc

SEQ ID NO: 775319 - DNA, 15 bp, Homo sapiens
cagaaaatgctcccc

SEQ ID NO: 775320 - DNA, 15 bp, Homo sapiens
agaaaatgctcccct

SEQ ID NO: 775321 - DNA, 15 bp, Homo sapiens
gaaaatgctcccctt

SEQ ID NO: 775322 - DNA, 15 bp, Homo sapiens
aaaatgctcccctta

SEQ ID NO: 775323 - DNA, 15 bp, Homo sapiens
aaatgctccccttaa

SEQ ID NO: 775324 - DNA, 15 bp, Homo sapiens
aatgctccccttaat

SEQ ID NO: 775325 - DNA, 15 bp, Homo sapiens
atgctccccttaatt

SEQ ID NO: 775326 - DNA, 15 bp, Homo sapiens
tgctccccttaatta

SEQ ID NO: 775327 - DNA, 15 bp, Homo sapiens
gctccccttaattat

SEQ ID NO: 775328 - DNA, 15 bp, Homo sapiens
ctccccttaattatc

SEQ ID NO: 775329 - DNA, 15 bp, Homo sapiens
tccccttaattatct

SEQ ID NO: 775330 - DNA, 15 bp, Homo sapiens
ccccttaattatctc

SEQ ID NO: 775331 - DNA, 15 bp, Homo sapiens
cccttaattatctca

SEQ ID NO: 775332 - DNA, 15 bp, Homo sapiens
ccttaattatctcaa

SEQ ID NO: 775333 - DNA, 15 bp, Homo sapiens
cttaattatctcaaa

SEQ ID NO: 775334 - DNA, 15 bp, Homo sapiens
ttaattatctcaaaa

SEQ ID NO: 775335 - DNA, 15 bp, Homo sapiens
taattatctcaaaat

SEQ ID NO: 775336 - DNA, 15 bp, Homo sapiens
aattatctcaaaatg

SEQ ID NO: 775337 - DNA, 15 bp, Homo sapiens
attatctcaaaatgt

SEQ ID NO: 775338 - DNA, 15 bp, Homo sapiens
ttatctcaaaatgtt

SEQ ID NO: 775339 - DNA, 15 bp, Homo sapiens
tatctcaaaatgttg

SEQ ID NO: 775340 - DNA, 15 bp, Homo sapiens
atctcaaaatgttga

SEQ ID NO: 775341 - DNA, 15 bp, Homo sapiens
tctcaaaatgttgat

SEQ ID NO: 775342 - DNA, 15 bp, Homo sapiens
ctcaaaatgttgata

SEQ ID NO: 775343 - DNA, 15 bp, Homo sapiens
tcaaaatgttgatag

SEQ ID NO: 775344 - DNA, 15 bp, Homo sapiens
caaaatgttgataga

SEQ ID NO: 775345 - DNA, 15 bp, Homo sapiens
aaaatgttgatagaa

SEQ ID NO: 775346 - DNA, 15 bp, Homo sapiens
aaatgttgatagaat

SEQ ID NO: 775347 - DNA, 15 bp, Homo sapiens
aatgttgatagaatg

SEQ ID NO: 775348 - DNA, 15 bp, Homo sapiens
atgttgatagaatgc

SEQ ID NO: 775349 - DNA, 15 bp, Homo sapiens
tgttgatagaatgca

SEQ ID NO: 775350 - DNA, 15 bp, Homo sapiens
gttgatagaatgcat

SEQ ID NO: 775351 - DNA, 15 bp, Homo sapiens
ttgatagaatgcata

SEQ ID NO: 775352 - DNA, 15 bp, Homo sapiens
tgatagaatgcatac

SEQ ID NO: 775353 - DNA, 15 bp, Homo sapiens
gatagaatgcataca

SEQ ID NO: 775354 - DNA, 15 bp, Homo sapiens
atagaatgcatacaa

SEQ ID NO: 775355 - DNA, 15 bp, Homo sapiens
tagaatgcatacaat

SEQ ID NO: 775356 - DNA, 15 bp, Homo sapiens
agaatgcatacaatt

SEQ ID NO: 775357 - DNA, 15 bp, Homo sapiens
gaatgcatacaattc

SEQ ID NO: 775358 - DNA, 15 bp, Homo sapiens
aatgcatacaattct

SEQ ID NO: 775359 - DNA, 15 bp, Homo sapiens
atgcatacaattctg

SEQ ID NO: 775360 - DNA, 15 bp, Homo sapiens
tgcatacaattctgt

SEQ ID NO: 775361 - DNA, 15 bp, Homo sapiens
gcatacaattctgta

SEQ ID NO: 775362 - DNA, 15 bp, Homo sapiens
catacaattctgtat

SEQ ID NO: 775363 - DNA, 15 bp, Homo sapiens
atacaattctgtatg

SEQ ID NO: 775364 - DNA, 15 bp, Homo sapiens
tacaattctgtatgt

SEQ ID NO: 775365 - DNA, 15 bp, Homo sapiens
acaattctgtatgtt

SEQ ID NO: 775366 - DNA, 15 bp, Homo sapiens
caattctgtatgttg

SEQ ID NO: 775367 - DNA, 15 bp, Homo sapiens
aattctgtatgttgc

SEQ ID NO: 775368 - DNA, 15 bp, Homo sapiens
attctgtatgttgca

SEQ ID NO: 775369 - DNA, 15 bp, Homo sapiens
ttctgtatgttgcat

SEQ ID NO: 775370 - DNA, 15 bp, Homo sapiens
tctgtatgttgcatt

SEQ ID NO: 775371 - DNA, 15 bp, Homo sapiens
ctgtatgttgcattg

SEQ ID NO: 775372 - DNA, 15 bp, Homo sapiens
tgtatgttgcattga

SEQ ID NO: 775373 - DNA, 15 bp, Homo sapiens
gtatgttgcattgac

SEQ ID NO: 775374 - DNA, 15 bp, Homo sapiens
tatgttgcattgaca

SEQ ID NO: 775375 - DNA, 15 bp, Homo sapiens
atgttgcattgacat

SEQ ID NO: 775376 - DNA, 15 bp, Homo sapiens
tgttgcattgacatt

SEQ ID NO: 775377 - DNA, 15 bp, Homo sapiens
gttgcattgacattt

SEQ ID NO: 775378 - DNA, 15 bp, Homo sapiens
ttgcattgacattta

SEQ ID NO: 775379 - DNA, 15 bp, Homo sapiens
tgcattgacatttat

SEQ ID NO: 775380 - DNA, 15 bp, Homo sapiens
gcattgacatttata

SEQ ID NO: 775381 - DNA, 15 bp, Homo sapiens
cattgacatttatac

SEQ ID NO: 775382 - DNA, 15 bp, Homo sapiens
attgacatttataca

SEQ ID NO: 775383 - DNA, 15 bp, Homo sapiens
ttgacatttatacat

SEQ ID NO: 775384 - DNA, 15 bp, Homo sapiens
tgacatttatacata

SEQ ID NO: 775385 - DNA, 15 bp, Homo sapiens
gacatttatacatag

SEQ ID NO: 775386 - DNA, 15 bp, Homo sapiens
acatttatacataga

SEQ ID NO: 775387 - DNA, 15 bp, Homo sapiens
catttatacatagat

SEQ ID NO: 775388 - DNA, 15 bp, Homo sapiens
atttatacatagatt

SEQ ID NO: 775389 - DNA, 15 bp, Homo sapiens
tttatacatagattc

SEQ ID NO: 775390 - DNA, 15 bp, Homo sapiens
ttatacatagattcc

SEQ ID NO: 775391 - DNA, 15 bp, Homo sapiens
tatacatagattcct

SEQ ID NO: 775392 - DNA, 15 bp, Homo sapiens
atacatagattccta

SEQ ID NO: 775393 - DNA, 15 bp, Homo sapiens
tacatagattcctat

SEQ ID NO: 775394 - DNA, 15 bp, Homo sapiens
acatagattcctata

SEQ ID NO: 775395 - DNA, 15 bp, Homo sapiens
catagattcctatat

SEQ ID NO: 775396 - DNA, 15 bp, Homo sapiens
atagattcctatatc

SEQ ID NO: 775397 - DNA, 15 bp, Homo sapiens
tagattcctatatcc

SEQ ID NO: 775398 - DNA, 15 bp, Homo sapiens
agattcctatatccc

SEQ ID NO: 775399 - DNA, 15 bp, Homo sapiens
gattcctatatccct

SEQ ID NO: 775400 - DNA, 15 bp, Homo sapiens
attcctatatcccta

SEQ ID NO: 775401 - DNA, 15 bp, Homo sapiens
ttcctatatccctat

SEQ ID NO: 775402 - DNA, 15 bp, Homo sapiens
tcctatatccctatt

SEQ ID NO: 775403 - DNA, 15 bp, Homo sapiens
cctatatccctatta

SEQ ID NO: 775404 - DNA, 15 bp, Homo sapiens
ctatatccctattaa

SEQ ID NO: 775405 - DNA, 15 bp, Homo sapiens
tatatccctattaaa

SEQ ID NO: 775406 - DNA, 15 bp, Homo sapiens
atatccctattaaaa

SEQ ID NO: 775407 - DNA, 15 bp, Homo sapiens
tatccctattaaaat

SEQ ID NO: 775408 - DNA, 15 bp, Homo sapiens
atccctattaaaatg

SEQ ID NO: 775409 - DNA, 15 bp, Homo sapiens
tccctattaaaatgt

SEQ ID NO: 775410 - DNA, 15 bp, Homo sapiens
ccctattaaaatgtg

SEQ ID NO: 775411 - DNA, 15 bp, Homo sapiens
cctattaaaatgtgt

SEQ ID NO: 775412 - DNA, 15 bp, Homo sapiens
ctattaaaatgtgtg

SEQ ID NO: 775413 - DNA, 15 bp, Homo sapiens
tattaaaatgtgtgt

SEQ ID NO: 775414 - DNA, 15 bp, Homo sapiens
attaaaatgtgtgtg

SEQ ID NO: 775415 - DNA, 15 bp, Homo sapiens
ttaaaatgtgtgtgt

SEQ ID NO: 775416 - DNA, 15 bp, Homo sapiens
taaaatgtgtgtgta

SEQ ID NO: 775417 - DNA, 15 bp, Homo sapiens
aaaatgtgtgtgtat

SEQ ID NO: 775418 - DNA, 15 bp, Homo sapiens
aaatgtgtgtgtatg

SEQ ID NO: 775419 - DNA, 15 bp, Homo sapiens
aatgtgtgtgtatgt

SEQ ID NO: 775420 - DNA, 15 bp, Homo sapiens
atgtgtgtgtatgta

SEQ ID NO: 775421 - DNA, 15 bp, Homo sapiens
tgtgtgtgtatgtat

SEQ ID NO: 775422 - DNA, 15 bp, Homo sapiens
gtgtgtgtatgtatt

SEQ ID NO: 775423 - DNA, 15 bp, Homo sapiens
tgtgtgtatgtattt

SEQ ID NO: 775424 - DNA, 15 bp, Homo sapiens
gtgtgtatgtatttc

SEQ ID NO: 775425 - DNA, 15 bp, Homo sapiens
tgtgtatgtatttca

SEQ ID NO: 775426 - DNA, 15 bp, Homo sapiens
gtgtatgtatttcat

SEQ ID NO: 775427 - DNA, 15 bp, Homo sapiens
tgtatgtatttcatt

SEQ ID NO: 775428 - DNA, 15 bp, Homo sapiens
gtatgtatttcattg

SEQ ID NO: 775429 - DNA, 15 bp, Homo sapiens
tatgtatttcattgg

SEQ ID NO: 775430 - DNA, 15 bp, Homo sapiens
atgtatttcattgga

SEQ ID NO: 775431 - DNA, 15 bp, Homo sapiens
tgtatttcattggat

SEQ ID NO: 775432 - DNA, 15 bp, Homo sapiens
gtatttcattggata

SEQ ID NO: 775433 - DNA, 15 bp, Homo sapiens
tatttcattggatat

SEQ ID NO: 775434 - DNA, 15 bp, Homo sapiens
atttcattggatata

SEQ ID NO: 775435 - DNA, 15 bp, Homo sapiens
tttcattggatatag

SEQ ID NO: 775436 - DNA, 15 bp, Homo sapiens
ttcattggatatagg

SEQ ID NO: 775437 - DNA, 15 bp, Homo sapiens
tcattggatataggg

SEQ ID NO: 775438 - DNA, 15 bp, Homo sapiens
cattggatataggga

SEQ ID NO: 775439 - DNA, 15 bp, Homo sapiens
attggatatagggat

SEQ ID NO: 775440 - DNA, 15 bp, Homo sapiens
ttggatatagggatc

SEQ ID NO: 775441 - DNA, 15 bp, Homo sapiens
tggatatagggatca

SEQ ID NO: 775442 - DNA, 15 bp, Homo sapiens
ggatatagggatcaa

SEQ ID NO: 775443 - DNA, 15 bp, Homo sapiens
gatatagggatcaat

SEQ ID NO: 775444 - DNA, 15 bp, Homo sapiens
atatagggatcaata

SEQ ID NO: 775445 - DNA, 15 bp, Homo sapiens
tatagggatcaatac

SEQ ID NO: 775446 - DNA, 15 bp, Homo sapiens
atagggatcaataca

SEQ ID NO: 775447 - DNA, 15 bp, Homo sapiens
tagggatcaatacac

SEQ ID NO: 775448 - DNA, 15 bp, Homo sapiens
agggatcaatacaca

SEQ ID NO: 775449 - DNA, 15 bp, Homo sapiens
gggatcaatacacat

SEQ ID NO: 775450 - DNA, 15 bp, Homo sapiens
ggatcaatacacatt

SEQ ID NO: 775451 - DNA, 15 bp, Homo sapiens
gatcaatacacattt

SEQ ID NO: 775452 - DNA, 15 bp, Homo sapiens
atcaatacacatttt

SEQ ID NO: 775453 - DNA, 15 bp, Homo sapiens
tcaatacacatttta

SEQ ID NO: 775454 - DNA, 15 bp, Homo sapiens
caatacacattttaa

SEQ ID NO: 775455 - DNA, 15 bp, Homo sapiens
aatacacattttaat

SEQ ID NO: 775456 - DNA, 15 bp, Homo sapiens
atacacattttaata

SEQ ID NO: 775457 - DNA, 15 bp, Homo sapiens
tacacattttaatag

SEQ ID NO: 775458 - DNA, 15 bp, Homo sapiens
acacattttaatagg

SEQ ID NO: 775459 - DNA, 15 bp, Homo sapiens
cacattttaatagga

SEQ ID NO: 775460 - DNA, 15 bp, Homo sapiens
acattttaataggat

SEQ ID NO: 775461 - DNA, 15 bp, Homo sapiens
cattttaataggata

SEQ ID NO: 775462 - DNA, 15 bp, Homo sapiens
attttaataggatac

SEQ ID NO: 775463 - DNA, 15 bp, Homo sapiens
ttttaataggataca

SEQ ID NO: 775464 - DNA, 15 bp, Homo sapiens
tttaataggatacag

SEQ ID NO: 775465 - DNA, 15 bp, Homo sapiens
ttaataggatacagg

SEQ ID NO: 775466 - DNA, 15 bp, Homo sapiens
taataggatacagga

SEQ ID NO: 775467 - DNA, 15 bp, Homo sapiens
aataggatacaggat

SEQ ID NO: 775468 - DNA, 15 bp, Homo sapiens
ataggatacaggata

SEQ ID NO: 775469 - DNA, 15 bp, Homo sapiens
taggatacaggatat

SEQ ID NO: 775470 - DNA, 15 bp, Homo sapiens
aggatacaggatatg

SEQ ID NO: 775471 - DNA, 15 bp, Homo sapiens
ggatacaggatatgt

SEQ ID NO: 775472 - DNA, 15 bp, Homo sapiens
gatacaggatatgta

SEQ ID NO: 775473 - DNA, 15 bp, Homo sapiens
atacaggatatgtat

SEQ ID NO: 775474 - DNA, 15 bp, Homo sapiens
tacaggatatgtata

SEQ ID NO: 775475 - DNA, 15 bp, Homo sapiens
acaggatatgtatat

SEQ ID NO: 775476 - DNA, 15 bp, Homo sapiens
caggatatgtatatt

SEQ ID NO: 775477 - DNA, 15 bp, Homo sapiens
aggatatgtatattt

SEQ ID NO: 775478 - DNA, 15 bp, Homo sapiens
ggatatgtatatttg

SEQ ID NO: 775479 - DNA, 15 bp, Homo sapiens
gatatgtatatttgt

SEQ ID NO: 775480 - DNA, 15 bp, Homo sapiens
atatgtatatttgtg

SEQ ID NO: 775481 - DNA, 15 bp, Homo sapiens
tatgtatatttgtgt

SEQ ID NO: 775482 - DNA, 15 bp, Homo sapiens
atgtatatttgtgta

SEQ ID NO: 775483 - DNA, 15 bp, Homo sapiens
tgtatatttgtgtat

SEQ ID NO: 775484 - DNA, 15 bp, Homo sapiens
gtatatttgtgtata

SEQ ID NO: 775485 - DNA, 15 bp, Homo sapiens
tatatttgtgtatat

SEQ ID NO: 775486 - DNA, 15 bp, Homo sapiens
atatttgtgtatatg

SEQ ID NO: 775487 - DNA, 15 bp, Homo sapiens
tatttgtgtatatgt

SEQ ID NO: 775488 - DNA, 15 bp, Homo sapiens
atttgtgtatatgta

SEQ ID NO: 775489 - DNA, 15 bp, Homo sapiens
tttgtgtatatgtat

SEQ ID NO: 775490 - DNA, 15 bp, Homo sapiens
ttgtgtatatgtata

SEQ ID NO: 775491 - DNA, 15 bp, Homo sapiens
tgtgtatatgtatat

SEQ ID NO: 775492 - DNA, 15 bp, Homo sapiens
gtgtatatgtatata

SEQ ID NO: 775493 - DNA, 15 bp, Homo sapiens
tgtatatgtatatag

SEQ ID NO: 775494 - DNA, 15 bp, Homo sapiens
gtatatgtatataga

SEQ ID NO: 775495 - DNA, 15 bp, Homo sapiens
tatatgtatatagat

SEQ ID NO: 775496 - DNA, 15 bp, Homo sapiens
atatgtatatagata

SEQ ID NO: 775497 - DNA, 15 bp, Homo sapiens
tatgtatatagatat

SEQ ID NO: 775498 - DNA, 15 bp, Homo sapiens
atgtatatagatata

SEQ ID NO: 775499 - DNA, 15 bp, Homo sapiens
tgtatatagatatac

SEQ ID NO: 775500 - DNA, 15 bp, Homo sapiens
gtatatagatataca

SEQ ID NO: 775501 - DNA, 15 bp, Homo sapiens
tatatagatatacat

SEQ ID NO: 775502 - DNA, 15 bp, Homo sapiens
atatagatatacata

SEQ ID NO: 775503 - DNA, 15 bp, Homo sapiens
tatagatatacatat

SEQ ID NO: 775504 - DNA, 15 bp, Homo sapiens
agatatacatatatg

SEQ ID NO: 775505 - DNA, 15 bp, Homo sapiens
gatatacatatatgt

SEQ ID NO: 775506 - DNA, 15 bp, Homo sapiens
atatacatatatgta

SEQ ID NO: 775507 - DNA, 15 bp, Homo sapiens
tatacatatatgtac

SEQ ID NO: 775508 - DNA, 15 bp, Homo sapiens
atacatatatgtaca

SEQ ID NO: 775509 - DNA, 15 bp, Homo sapiens
tacatatatgtacat

SEQ ID NO: 775510 - DNA, 15 bp, Homo sapiens
acatatatgtacata

SEQ ID NO: 775511 - DNA, 15 bp, Homo sapiens
catatatgtacatat

SEQ ID NO: 775512 - DNA, 15 bp, Homo sapiens
atatatgtacatata

SEQ ID NO: 775513 - DNA, 15 bp, Homo sapiens
tatatgtacatatat

SEQ ID NO: 775514 - DNA, 15 bp, Homo sapiens
atatgtacatatata

SEQ ID NO: 775515 - DNA, 15 bp, Homo sapiens
tatgtacatatatat

SEQ ID NO: 775516 - DNA, 15 bp, Homo sapiens
atgtacatatatatg

SEQ ID NO: 775517 - DNA, 15 bp, Homo sapiens
tgtacatatatatgc

SEQ ID NO: 775518 - DNA, 15 bp, Homo sapiens
gtacatatatatgca

SEQ ID NO: 775519 - DNA, 15 bp, Homo sapiens
tacatatatatgcat

SEQ ID NO: 775520 - DNA, 15 bp, Homo sapiens
acatatatatgcatg

SEQ ID NO: 775521 - DNA, 15 bp, Homo sapiens
catatatatgcatgt

SEQ ID NO: 775522 - DNA, 15 bp, Homo sapiens
atatatatgcatgtg

SEQ ID NO: 775523 - DNA, 15 bp, Homo sapiens
tatatatgcatgtgt

SEQ ID NO: 775524 - DNA, 15 bp, Homo sapiens
atatatgcatgtgtg

SEQ ID NO: 775525 - DNA, 15 bp, Homo sapiens
tatatgcatgtgtgt

SEQ ID NO: 775526 - DNA, 15 bp, Homo sapiens
atatgcatgtgtgtg

SEQ ID NO: 775527 - DNA, 15 bp, Homo sapiens
tatgcatgtgtgtgt

SEQ ID NO: 775528 - DNA, 15 bp, Homo sapiens
atgcatgtgtgtgtg

SEQ ID NO: 775529 - DNA, 15 bp, Homo sapiens
tgcatgtgtgtgtgt

SEQ ID NO: 775530 - DNA, 15 bp, Homo sapiens
gcatgtgtgtgtgtg

SEQ ID NO: 775531 - DNA, 15 bp, Homo sapiens
catgtgtgtgtgtgt

SEQ ID NO: 775532 - DNA, 15 bp, Homo sapiens
gtgtgtgtgtatata

SEQ ID NO: 775533 - DNA, 15 bp, Homo sapiens
tgtgtgtgtatatat

SEQ ID NO: 775534 - DNA, 15 bp, Homo sapiens
gtgtgtgtatatata

SEQ ID NO: 775535 - DNA, 15 bp, Homo sapiens
gtgtgtatatatata

SEQ ID NO: 775536 - DNA, 15 bp, Homo sapiens
tatatatatatataa

SEQ ID NO: 775537 - DNA, 15 bp, Homo sapiens
atatatatatataac

SEQ ID NO: 775538 - DNA, 15 bp, Homo sapiens
tatatatatataaca

SEQ ID NO: 775539 - DNA, 15 bp, Homo sapiens
atatatatataacag

SEQ ID NO: 775540 - DNA, 15 bp, Homo sapiens
tatatatataacaga

SEQ ID NO: 775541 - DNA, 15 bp, Homo sapiens
atatatataacagag

SEQ ID NO: 775542 - DNA, 15 bp, Homo sapiens
tatatataacagagg

SEQ ID NO: 775543 - DNA, 15 bp, Homo sapiens
atatataacagaggt

SEQ ID NO: 775544 - DNA, 15 bp, Homo sapiens
tatataacagaggta

SEQ ID NO: 775545 - DNA, 15 bp, Homo sapiens
atataacagaggtat

SEQ ID NO: 775546 - DNA, 15 bp, Homo sapiens
tataacagaggtatt

SEQ ID NO: 775547 - DNA, 15 bp, Homo sapiens
ataacagaggtattt

SEQ ID NO: 775548 - DNA, 15 bp, Homo sapiens
taacagaggtatttt

SEQ ID NO: 775549 - DNA, 15 bp, Homo sapiens
aacagaggtattttt

SEQ ID NO: 775550 - DNA, 15 bp, Homo sapiens
acagaggtattttta

SEQ ID NO: 775551 - DNA, 15 bp, Homo sapiens
cagaggtatttttaa

SEQ ID NO: 775552 - DNA, 15 bp, Homo sapiens
agaggtatttttaag

SEQ ID NO: 775553 - DNA, 15 bp, Homo sapiens
gaggtatttttaaga

SEQ ID NO: 775554 - DNA, 15 bp, Homo sapiens
aggtatttttaagag

SEQ ID NO: 775555 - DNA, 15 bp, Homo sapiens
ggtatttttaagagg

SEQ ID NO: 775556 - DNA, 15 bp, Homo sapiens
gtatttttaagaggc

SEQ ID NO: 775557 - DNA, 15 bp, Homo sapiens
tatttttaagaggca

SEQ ID NO: 775558 - DNA, 15 bp, Homo sapiens
atttttaagaggcat

SEQ ID NO: 775559 - DNA, 15 bp, Homo sapiens
tttttaagaggcatc

SEQ ID NO: 775560 - DNA, 15 bp, Homo sapiens
ttttaagaggcatcc

SEQ ID NO: 775561 - DNA, 15 bp, Homo sapiens
tttaagaggcatcca

SEQ ID NO: 775562 - DNA, 15 bp, Homo sapiens
ttaagaggcatccag

SEQ ID NO: 775563 - DNA, 15 bp, Homo sapiens
taagaggcatccaga

SEQ ID NO: 775564 - DNA, 15 bp, Homo sapiens
aagaggcatccagag

SEQ ID NO: 775565 - DNA, 15 bp, Homo sapiens
agaggcatccagagc

SEQ ID NO: 775566 - DNA, 15 bp, Homo sapiens
gaggcatccagagca

SEQ ID NO: 775567 - DNA, 15 bp, Homo sapiens
aggcatccagagcat

SEQ ID NO: 775568 - DNA, 15 bp, Homo sapiens
ggcatccagagcata

SEQ ID NO: 775569 - DNA, 15 bp, Homo sapiens
gcatccagagcataa

SEQ ID NO: 775570 - DNA, 15 bp, Homo sapiens
catccagagcataat

SEQ ID NO: 775571 - DNA, 15 bp, Homo sapiens
atccagagcataatt

SEQ ID NO: 775572 - DNA, 15 bp, Homo sapiens
tccagagcataattt

SEQ ID NO: 775573 - DNA, 15 bp, Homo sapiens
ccagagcataatttt

SEQ ID NO: 775574 - DNA, 15 bp, Homo sapiens
cagagcataattttt

SEQ ID NO: 775575 - DNA, 15 bp, Homo sapiens
agagcataattttta

SEQ ID NO: 775576 - DNA, 15 bp, Homo sapiens
gagcataatttttag

SEQ ID NO: 775577 - DNA, 15 bp, Homo sapiens
agcataatttttaga

SEQ ID NO: 775578 - DNA, 15 bp, Homo sapiens
gcataatttttagaa

SEQ ID NO: 775579 - DNA, 15 bp, Homo sapiens
cataatttttagaag

SEQ ID NO: 775580 - DNA, 15 bp, Homo sapiens
ataatttttagaagt

SEQ ID NO: 775581 - DNA, 15 bp, Homo sapiens
taatttttagaagtc

SEQ ID NO: 775582 - DNA, 15 bp, Homo sapiens
aatttttagaagtca

SEQ ID NO: 775583 - DNA, 15 bp, Homo sapiens
atttttagaagtcag

SEQ ID NO: 775584 - DNA, 15 bp, Homo sapiens
tttttagaagtcaga

SEQ ID NO: 775585 - DNA, 15 bp, Homo sapiens
ttttagaagtcagaa

SEQ ID NO: 775586 - DNA, 15 bp, Homo sapiens
tttagaagtcagaat

SEQ ID NO: 775587 - DNA, 15 bp, Homo sapiens
ttagaagtcagaatc

SEQ ID NO: 775588 - DNA, 15 bp, Homo sapiens
tagaagtcagaatca

SEQ ID NO: 775589 - DNA, 15 bp, Homo sapiens
agaagtcagaatcaa

SEQ ID NO: 775590 - DNA, 15 bp, Homo sapiens
gaagtcagaatcaag

SEQ ID NO: 775591 - DNA, 15 bp, Homo sapiens
aagtcagaatcaaga

SEQ ID NO: 775592 - DNA, 15 bp, Homo sapiens
agtcagaatcaagaa

SEQ ID NO: 775593 - DNA, 15 bp, Homo sapiens
gtcagaatcaagaac

SEQ ID NO: 775594 - DNA, 15 bp, Homo sapiens
tcagaatcaagaaca

SEQ ID NO: 775595 - DNA, 15 bp, Homo sapiens
cagaatcaagaacag

SEQ ID NO: 775596 - DNA, 15 bp, Homo sapiens
agaatcaagaacagg

SEQ ID NO: 775597 - DNA, 15 bp, Homo sapiens
gaatcaagaacagga

SEQ ID NO: 775598 - DNA, 15 bp, Homo sapiens
aatcaagaacaggaa

SEQ ID NO: 775599 - DNA, 15 bp, Homo sapiens
atcaagaacaggaaa

SEQ ID NO: 775600 - DNA, 15 bp, Homo sapiens
tcaagaacaggaaat

SEQ ID NO: 775601 - DNA, 15 bp, Homo sapiens
caagaacaggaaatg

SEQ ID NO: 775602 - DNA, 15 bp, Homo sapiens
aagaacaggaaatgg

SEQ ID NO: 775603 - DNA, 15 bp, Homo sapiens
agaacaggaaatgga

SEQ ID NO: 775604 - DNA, 15 bp, Homo sapiens
gaacaggaaatggag

SEQ ID NO: 775605 - DNA, 15 bp, Homo sapiens
aacaggaaatggaga

SEQ ID NO: 775606 - DNA, 15 bp, Homo sapiens
acaggaaatggagaa

SEQ ID NO: 775607 - DNA, 15 bp, Homo sapiens
caggaaatggagaaa

SEQ ID NO: 775608 - DNA, 15 bp, Homo sapiens
aggaaatggagaaaa

SEQ ID NO: 775609 - DNA, 15 bp, Homo sapiens
ggaaatggagaaaat

SEQ ID NO: 775610 - DNA, 15 bp, Homo sapiens
gaaatggagaaaatc

SEQ ID NO: 775611 - DNA, 15 bp, Homo sapiens
aaatggagaaaatca

SEQ ID NO: 775612 - DNA, 15 bp, Homo sapiens
aatggagaaaatcag

SEQ ID NO: 775613 - DNA, 15 bp, Homo sapiens
atggagaaaatcaga

SEQ ID NO: 775614 - DNA, 15 bp, Homo sapiens
tggagaaaatcagaa

SEQ ID NO: 775615 - DNA, 15 bp, Homo sapiens
ggagaaaatcagaat

SEQ ID NO: 775616 - DNA, 15 bp, Homo sapiens
gagaaaatcagaatg

SEQ ID NO: 775617 - DNA, 15 bp, Homo sapiens
agaaaatcagaatgg

SEQ ID NO: 775618 - DNA, 15 bp, Homo sapiens
gaaaatcagaatggt

SEQ ID NO: 775619 - DNA, 15 bp, Homo sapiens
aaaatcagaatggta

SEQ ID NO: 775620 - DNA, 15 bp, Homo sapiens
aaatcagaatggtaa

SEQ ID NO: 775621 - DNA, 15 bp, Homo sapiens
aatcagaatggtaaa

SEQ ID NO: 775622 - DNA, 15 bp, Homo sapiens
atcagaatggtaaat

SEQ ID NO: 775623 - DNA, 15 bp, Homo sapiens
tcagaatggtaaata

SEQ ID NO: 775624 - DNA, 15 bp, Homo sapiens
cagaatggtaaataa

SEQ ID NO: 775625 - DNA, 15 bp, Homo sapiens
agaatggtaaataaa

SEQ ID NO: 775626 - DNA, 15 bp, Homo sapiens
gaatggtaaataaaa

SEQ ID NO: 775627 - DNA, 15 bp, Homo sapiens
aatggtaaataaaat

SEQ ID NO: 775628 - DNA, 15 bp, Homo sapiens
atggtaaataaaata

SEQ ID NO: 775629 - DNA, 15 bp, Homo sapiens
tggtaaataaaataa

SEQ ID NO: 775630 - DNA, 15 bp, Homo sapiens
ggtaaataaaataat

SEQ ID NO: 775631 - DNA, 15 bp, Homo sapiens
gtaaataaaataatt

SEQ ID NO: 775632 - DNA, 15 bp, Homo sapiens
taaataaaataatta

SEQ ID NO: 775633 - DNA, 15 bp, Homo sapiens
aaataaaataattaa

SEQ ID NO: 775634 - DNA, 15 bp, Homo sapiens
aataaaataattaat

SEQ ID NO: 775635 - DNA, 15 bp, Homo sapiens
ataaaataattaatt

SEQ ID NO: 775636 - DNA, 15 bp, Homo sapiens
taaaataattaattc

SEQ ID NO: 775637 - DNA, 15 bp, Homo sapiens
aaaataattaattca

SEQ ID NO: 775638 - DNA, 15 bp, Homo sapiens
aaataattaattcat

SEQ ID NO: 775639 - DNA, 15 bp, Homo sapiens
aataattaattcatg

SEQ ID NO: 775640 - DNA, 15 bp, Homo sapiens
ataattaattcatgg

SEQ ID NO: 775641 - DNA, 15 bp, Homo sapiens
taattaattcatgga

SEQ ID NO: 775642 - DNA, 15 bp, Homo sapiens
aattaattcatggat

SEQ ID NO: 775643 - DNA, 15 bp, Homo sapiens
attaattcatggatt

SEQ ID NO: 775644 - DNA, 15 bp, Homo sapiens
ttaattcatggatta

SEQ ID NO: 775645 - DNA, 15 bp, Homo sapiens
taattcatggattaa

SEQ ID NO: 775646 - DNA, 15 bp, Homo sapiens
aattcatggattaaa

SEQ ID NO: 775647 - DNA, 15 bp, Homo sapiens
attcatggattaaat

SEQ ID NO: 775648 - DNA, 15 bp, Homo sapiens
ttcatggattaaatg

SEQ ID NO: 775649 - DNA, 15 bp, Homo sapiens
tcatggattaaatgt

SEQ ID NO: 775650 - DNA, 15 bp, Homo sapiens
catggattaaatgta

SEQ ID NO: 775651 - DNA, 15 bp, Homo sapiens
atggattaaatgtaa

SEQ ID NO: 775652 - DNA, 15 bp, Homo sapiens
tggattaaatgtaaa

SEQ ID NO: 775653 - DNA, 15 bp, Homo sapiens
ggattaaatgtaaaa

SEQ ID NO: 775654 - DNA, 15 bp, Homo sapiens
gattaaatgtaaaag

SEQ ID NO: 775655 - DNA, 15 bp, Homo sapiens
attaaatgtaaaaga

SEQ ID NO: 775656 - DNA, 15 bp, Homo sapiens
ttaaatgtaaaagaa

SEQ ID NO: 775657 - DNA, 15 bp, Homo sapiens
taaatgtaaaagaag

SEQ ID NO: 775658 - DNA, 15 bp, Homo sapiens
aaatgtaaaagaagt

SEQ ID NO: 775659 - DNA, 15 bp, Homo sapiens
aatgtaaaagaagtg

SEQ ID NO: 775660 - DNA, 15 bp, Homo sapiens
atgtaaaagaagtgt

SEQ ID NO: 775661 - DNA, 15 bp, Homo sapiens
tgtaaaagaagtgtg

SEQ ID NO: 775662 - DNA, 15 bp, Homo sapiens
gtaaaagaagtgtgt

SEQ ID NO: 775663 - DNA, 15 bp, Homo sapiens
taaaagaagtgtgtt

SEQ ID NO: 775664 - DNA, 15 bp, Homo sapiens
aaaagaagtgtgttt

SEQ ID NO: 775665 - DNA, 15 bp, Homo sapiens
aaagaagtgtgtttt

SEQ ID NO: 775666 - DNA, 15 bp, Homo sapiens
aagaagtgtgttttt

SEQ ID NO: 775667 - DNA, 15 bp, Homo sapiens
agaagtgtgtttttg

SEQ ID NO: 775668 - DNA, 15 bp, Homo sapiens
gaagtgtgtttttgg

SEQ ID NO: 775669 - DNA, 15 bp, Homo sapiens
aagtgtgtttttggg

SEQ ID NO: 775670 - DNA, 15 bp, Homo sapiens
agtgtgtttttggga

SEQ ID NO: 775671 - DNA, 15 bp, Homo sapiens
gtgtgtttttgggaa

SEQ ID NO: 775672 - DNA, 15 bp, Homo sapiens
tgtgtttttgggaaa

SEQ ID NO: 775673 - DNA, 15 bp, Homo sapiens
gtgtttttgggaaag

SEQ ID NO: 775674 - DNA, 15 bp, Homo sapiens
tgtttttgggaaagt

SEQ ID NO: 775675 - DNA, 15 bp, Homo sapiens
gtttttgggaaagtg

SEQ ID NO: 775676 - DNA, 15 bp, Homo sapiens
tttttgggaaagtgg

SEQ ID NO: 775677 - DNA, 15 bp, Homo sapiens
ttttgggaaagtggt

SEQ ID NO: 775678 - DNA, 15 bp, Homo sapiens
tttgggaaagtggta

SEQ ID NO: 775679 - DNA, 15 bp, Homo sapiens
ttgggaaagtggtag

SEQ ID NO: 775680 - DNA, 15 bp, Homo sapiens
tgggaaagtggtagc

SEQ ID NO: 775681 - DNA, 15 bp, Homo sapiens
gggaaagtggtagca

SEQ ID NO: 775682 - DNA, 15 bp, Homo sapiens
ggaaagtggtagcag

SEQ ID NO: 775683 - DNA, 15 bp, Homo sapiens
gaaagtggtagcaga

SEQ ID NO: 775684 - DNA, 15 bp, Homo sapiens
aaagtggtagcagat

SEQ ID NO: 775685 - DNA, 15 bp, Homo sapiens
aagtggtagcagatg

SEQ ID NO: 775686 - DNA, 15 bp, Homo sapiens
agtggtagcagatga

SEQ ID NO: 775687 - DNA, 15 bp, Homo sapiens
gtggtagcagatgac

SEQ ID NO: 775688 - DNA, 15 bp, Homo sapiens
tggtagcagatgacg

SEQ ID NO: 775689 - DNA, 15 bp, Homo sapiens
ggtagcagatgacga

SEQ ID NO: 775690 - DNA, 15 bp, Homo sapiens
gtagcagatgacgat

SEQ ID NO: 775691 - DNA, 15 bp, Homo sapiens
tagcagatgacgatt

SEQ ID NO: 775692 - DNA, 15 bp, Homo sapiens
agcagatgacgattg

SEQ ID NO: 775693 - DNA, 15 bp, Homo sapiens
gcagatgacgattga

SEQ ID NO: 775694 - DNA, 15 bp, Homo sapiens
cagatgacgattgaa

SEQ ID NO: 775695 - DNA, 15 bp, Homo sapiens
agatgacgattgaat

SEQ ID NO: 775696 - DNA, 15 bp, Homo sapiens
gatgacgattgaata

SEQ ID NO: 775697 - DNA, 15 bp, Homo sapiens
atgacgattgaatag

SEQ ID NO: 775698 - DNA, 15 bp, Homo sapiens
tgacgattgaatagg

SEQ ID NO: 775699 - DNA, 15 bp, Homo sapiens
gacgattgaatagga

SEQ ID NO: 775700 - DNA, 15 bp, Homo sapiens
acgattgaataggaa

SEQ ID NO: 775701 - DNA, 15 bp, Homo sapiens
cgattgaataggaat

SEQ ID NO: 775702 - DNA, 15 bp, Homo sapiens
gattgaataggaatg

SEQ ID NO: 775703 - DNA, 15 bp, Homo sapiens
attgaataggaatga

SEQ ID NO: 775704 - DNA, 15 bp, Homo sapiens
ttgaataggaatgag

SEQ ID NO: 775705 - DNA, 15 bp, Homo sapiens
tgaataggaatgagt

SEQ ID NO: 775706 - DNA, 15 bp, Homo sapiens
gaataggaatgagtt

SEQ ID NO: 775707 - DNA, 15 bp, Homo sapiens
aataggaatgagtta

SEQ ID NO: 775708 - DNA, 15 bp, Homo sapiens
ataggaatgagttat

SEQ ID NO: 775709 - DNA, 15 bp, Homo sapiens
taggaatgagttata

SEQ ID NO: 775710 - DNA, 15 bp, Homo sapiens
aggaatgagttataa

SEQ ID NO: 775711 - DNA, 15 bp, Homo sapiens
ggaatgagttataac

SEQ ID NO: 775712 - DNA, 15 bp, Homo sapiens
gaatgagttataaca

SEQ ID NO: 775713 - DNA, 15 bp, Homo sapiens
aatgagttataacaa

SEQ ID NO: 775714 - DNA, 15 bp, Homo sapiens
atgagttataacaaa

SEQ ID NO: 775715 - DNA, 15 bp, Homo sapiens
tgagttataacaaaa

SEQ ID NO: 775716 - DNA, 15 bp, Homo sapiens
gagttataacaaaag

SEQ ID NO: 775717 - DNA, 15 bp, Homo sapiens
agttataacaaaaga

SEQ ID NO: 775718 - DNA, 15 bp, Homo sapiens
gttataacaaaagat

SEQ ID NO: 775719 - DNA, 15 bp, Homo sapiens
ttataacaaaagatc

SEQ ID NO: 775720 - DNA, 15 bp, Homo sapiens
tataacaaaagatct

SEQ ID NO: 775721 - DNA, 15 bp, Homo sapiens
ataacaaaagatcta

SEQ ID NO: 775722 - DNA, 15 bp, Homo sapiens
taacaaaagatctat

SEQ ID NO: 775723 - DNA, 15 bp, Homo sapiens
aacaaaagatctatt

SEQ ID NO: 775724 - DNA, 15 bp, Homo sapiens
acaaaagatctattt

SEQ ID NO: 775725 - DNA, 15 bp, Homo sapiens
caaaagatctattta

SEQ ID NO: 775726 - DNA, 15 bp, Homo sapiens
aaaagatctatttat

SEQ ID NO: 775727 - DNA, 15 bp, Homo sapiens
aaagatctatttatt

SEQ ID NO: 775728 - DNA, 15 bp, Homo sapiens
aagatctatttattg

SEQ ID NO: 775729 - DNA, 15 bp, Homo sapiens
agatctatttattga

SEQ ID NO: 775730 - DNA, 15 bp, Homo sapiens
gatctatttattgag

SEQ ID NO: 775731 - DNA, 15 bp, Homo sapiens
atctatttattgagt

SEQ ID NO: 775732 - DNA, 15 bp, Homo sapiens
tctatttattgagtt

SEQ ID NO: 775733 - DNA, 15 bp, Homo sapiens
ctatttattgagtta

SEQ ID NO: 775734 - DNA, 15 bp, Homo sapiens
tatttattgagttac

SEQ ID NO: 775735 - DNA, 15 bp, Homo sapiens
atttattgagttacc

SEQ ID NO: 775736 - DNA, 15 bp, Homo sapiens
tttattgagttacca

SEQ ID NO: 775737 - DNA, 15 bp, Homo sapiens
ttattgagttaccac

SEQ ID NO: 775738 - DNA, 15 bp, Homo sapiens
tattgagttaccact

SEQ ID NO: 775739 - DNA, 15 bp, Homo sapiens
attgagttaccactc

SEQ ID NO: 775740 - DNA, 15 bp, Homo sapiens
ttgagttaccactcc

SEQ ID NO: 775741 - DNA, 15 bp, Homo sapiens
tgagttaccactcca

SEQ ID NO: 775742 - DNA, 15 bp, Homo sapiens
gagttaccactccat

SEQ ID NO: 775743 - DNA, 15 bp, Homo sapiens
agttaccactccatg

SEQ ID NO: 775744 - DNA, 15 bp, Homo sapiens
gttaccactccatgc

SEQ ID NO: 775745 - DNA, 15 bp, Homo sapiens
ttaccactccatgcc

SEQ ID NO: 775746 - DNA, 15 bp, Homo sapiens
taccactccatgcca

SEQ ID NO: 775747 - DNA, 15 bp, Homo sapiens
accactccatgccag

SEQ ID NO: 775748 - DNA, 15 bp, Homo sapiens
ccactccatgccagg

SEQ ID NO: 775749 - DNA, 15 bp, Homo sapiens
cactccatgccaggt

SEQ ID NO: 775750 - DNA, 15 bp, Homo sapiens
actccatgccaggtg

SEQ ID NO: 775751 - DNA, 15 bp, Homo sapiens
ctccatgccaggtgt

SEQ ID NO: 775752 - DNA, 15 bp, Homo sapiens
tccatgccaggtgta

SEQ ID NO: 775753 - DNA, 15 bp, Homo sapiens
ccatgccaggtgtac

SEQ ID NO: 775754 - DNA, 15 bp, Homo sapiens
catgccaggtgtact

SEQ ID NO: 775755 - DNA, 15 bp, Homo sapiens
atgccaggtgtacta

SEQ ID NO: 775756 - DNA, 15 bp, Homo sapiens
tgccaggtgtactat

SEQ ID NO: 775757 - DNA, 15 bp, Homo sapiens
gccaggtgtactata

SEQ ID NO: 775758 - DNA, 15 bp, Homo sapiens
ccaggtgtactatat

SEQ ID NO: 775759 - DNA, 15 bp, Homo sapiens
caggtgtactatatt

SEQ ID NO: 775760 - DNA, 15 bp, Homo sapiens
aggtgtactatatta

SEQ ID NO: 775761 - DNA, 15 bp, Homo sapiens
ggtgtactatattaa

SEQ ID NO: 775762 - DNA, 15 bp, Homo sapiens
gtgtactatattaag

SEQ ID NO: 775763 - DNA, 15 bp, Homo sapiens
tgtactatattaagc

SEQ ID NO: 775764 - DNA, 15 bp, Homo sapiens
gtactatattaagca

SEQ ID NO: 775765 - DNA, 15 bp, Homo sapiens
tactatattaagcac

SEQ ID NO: 775766 - DNA, 15 bp, Homo sapiens
actatattaagcact

SEQ ID NO: 775767 - DNA, 15 bp, Homo sapiens
ctatattaagcactt

SEQ ID NO: 775768 - DNA, 15 bp, Homo sapiens
tatattaagcacttt

SEQ ID NO: 775769 - DNA, 15 bp, Homo sapiens
atattaagcactttg

SEQ ID NO: 775770 - DNA, 15 bp, Homo sapiens
tattaagcactttgc

SEQ ID NO: 775771 - DNA, 15 bp, Homo sapiens
attaagcactttgca

SEQ ID NO: 775772 - DNA, 15 bp, Homo sapiens
ttaagcactttgcat

SEQ ID NO: 775773 - DNA, 15 bp, Homo sapiens
taagcactttgcata

SEQ ID NO: 775774 - DNA, 15 bp, Homo sapiens
aagcactttgcatat

SEQ ID NO: 775775 - DNA, 15 bp, Homo sapiens
agcactttgcatata

SEQ ID NO: 775776 - DNA, 15 bp, Homo sapiens
gcactttgcatatat

SEQ ID NO: 775777 - DNA, 15 bp, Homo sapiens
cactttgcatatatt

SEQ ID NO: 775778 - DNA, 15 bp, Homo sapiens
actttgcatatatta

SEQ ID NO: 775779 - DNA, 15 bp, Homo sapiens
ctttgcatatattat

SEQ ID NO: 775780 - DNA, 15 bp, Homo sapiens
tttgcatatattatt

SEQ ID NO: 775781 - DNA, 15 bp, Homo sapiens
ttgcatatattattt

SEQ ID NO: 775782 - DNA, 15 bp, Homo sapiens
tgcatatattatttc

SEQ ID NO: 775783 - DNA, 15 bp, Homo sapiens
gcatatattatttca

SEQ ID NO: 775784 - DNA, 15 bp, Homo sapiens
catatattatttcat

SEQ ID NO: 775785 - DNA, 15 bp, Homo sapiens
atatattatttcatt

SEQ ID NO: 775786 - DNA, 15 bp, Homo sapiens
tatattatttcattt

SEQ ID NO: 775787 - DNA, 15 bp, Homo sapiens
atattatttcattta

SEQ ID NO: 775788 - DNA, 15 bp, Homo sapiens
tattatttcatttag

SEQ ID NO: 775789 - DNA, 15 bp, Homo sapiens
attatttcatttagt

SEQ ID NO: 775790 - DNA, 15 bp, Homo sapiens
ttatttcatttagtt

SEQ ID NO: 775791 - DNA, 15 bp, Homo sapiens
tatttcatttagttc

SEQ ID NO: 775792 - DNA, 15 bp, Homo sapiens
atttcatttagttct

SEQ ID NO: 775793 - DNA, 15 bp, Homo sapiens
tttcatttagttctg

SEQ ID NO: 775794 - DNA, 15 bp, Homo sapiens
ttcatttagttctga

SEQ ID NO: 775795 - DNA, 15 bp, Homo sapiens
tcatttagttctgat

SEQ ID NO: 775796 - DNA, 15 bp, Homo sapiens
catttagttctgatt

SEQ ID NO: 775797 - DNA, 15 bp, Homo sapiens
atttagttctgattg

SEQ ID NO: 775798 - DNA, 15 bp, Homo sapiens
tttagttctgattga

SEQ ID NO: 775799 - DNA, 15 bp, Homo sapiens
ttagttctgattgaa

SEQ ID NO: 775800 - DNA, 15 bp, Homo sapiens
tagttctgattgaaa

SEQ ID NO: 775801 - DNA, 15 bp, Homo sapiens
agttctgattgaaat

SEQ ID NO: 775802 - DNA, 15 bp, Homo sapiens
gttctgattgaaatt

SEQ ID NO: 775803 - DNA, 15 bp, Homo sapiens
ttctgattgaaattc

SEQ ID NO: 775804 - DNA, 15 bp, Homo sapiens
tctgattgaaattct

SEQ ID NO: 775805 - DNA, 15 bp, Homo sapiens
ctgattgaaattctg

SEQ ID NO: 775806 - DNA, 15 bp, Homo sapiens
tgattgaaattctga

SEQ ID NO: 775807 - DNA, 15 bp, Homo sapiens
gattgaaattctgag

SEQ ID NO: 775808 - DNA, 15 bp, Homo sapiens
attgaaattctgagt

SEQ ID NO: 775809 - DNA, 15 bp, Homo sapiens
ttgaaattctgagtg

SEQ ID NO: 775810 - DNA, 15 bp, Homo sapiens
tgaaattctgagtgg

SEQ ID NO: 775811 - DNA, 15 bp, Homo sapiens
gaaattctgagtggt

SEQ ID NO: 775812 - DNA, 15 bp, Homo sapiens
aaattctgagtggtg

SEQ ID NO: 775813 - DNA, 15 bp, Homo sapiens
aattctgagtggtgg

SEQ ID NO: 775814 - DNA, 15 bp, Homo sapiens
attctgagtggtggg

SEQ ID NO: 775815 - DNA, 15 bp, Homo sapiens
ttctgagtggtgggt

SEQ ID NO: 775816 - DNA, 15 bp, Homo sapiens
tctgagtggtgggta

SEQ ID NO: 775817 - DNA, 15 bp, Homo sapiens
ctgagtggtgggtat

SEQ ID NO: 775818 - DNA, 15 bp, Homo sapiens
tgagtggtgggtatg

SEQ ID NO: 775819 - DNA, 15 bp, Homo sapiens
gagtggtgggtatga

SEQ ID NO: 775820 - DNA, 15 bp, Homo sapiens
agtggtgggtatgac

SEQ ID NO: 775821 - DNA, 15 bp, Homo sapiens
gtggtgggtatgacc

SEQ ID NO: 775822 - DNA, 15 bp, Homo sapiens
tggtgggtatgacca

SEQ ID NO: 775823 - DNA, 15 bp, Homo sapiens
ggtgggtatgaccag

SEQ ID NO: 775824 - DNA, 15 bp, Homo sapiens
gtgggtatgaccagt

SEQ ID NO: 775825 - DNA, 15 bp, Homo sapiens
tgggtatgaccagtg

SEQ ID NO: 775826 - DNA, 15 bp, Homo sapiens
gggtatgaccagtgt

SEQ ID NO: 775827 - DNA, 15 bp, Homo sapiens
ggtatgaccagtgtc

SEQ ID NO: 775828 - DNA, 15 bp, Homo sapiens
gtatgaccagtgtct

SEQ ID NO: 775829 - DNA, 15 bp, Homo sapiens
tatgaccagtgtctt

SEQ ID NO: 775830 - DNA, 15 bp, Homo sapiens
atgaccagtgtcttt

SEQ ID NO: 775831 - DNA, 15 bp, Homo sapiens
tgaccagtgtcttta

SEQ ID NO: 775832 - DNA, 15 bp, Homo sapiens
gaccagtgtctttat

SEQ ID NO: 775833 - DNA, 15 bp, Homo sapiens
accagtgtctttata

SEQ ID NO: 775834 - DNA, 15 bp, Homo sapiens
ccagtgtctttatat

SEQ ID NO: 775835 - DNA, 15 bp, Homo sapiens
cagtgtctttatatt

SEQ ID NO: 775836 - DNA, 15 bp, Homo sapiens
agtgtctttatattg

SEQ ID NO: 775837 - DNA, 15 bp, Homo sapiens
gtgtctttatattgc

SEQ ID NO: 775838 - DNA, 15 bp, Homo sapiens
tgtctttatattgct

SEQ ID NO: 775839 - DNA, 15 bp, Homo sapiens
gtctttatattgcta

SEQ ID NO: 775840 - DNA, 15 bp, Homo sapiens
tctttatattgctaa

SEQ ID NO: 775841 - DNA, 15 bp, Homo sapiens
ctttatattgctaag

SEQ ID NO: 775842 - DNA, 15 bp, Homo sapiens
tttatattgctaagt

SEQ ID NO: 775843 - DNA, 15 bp, Homo sapiens
ttatattgctaagta

SEQ ID NO: 775844 - DNA, 15 bp, Homo sapiens
tatattgctaagtaa

SEQ ID NO: 775845 - DNA, 15 bp, Homo sapiens
atattgctaagtaaa

SEQ ID NO: 775846 - DNA, 15 bp, Homo sapiens
tattgctaagtaaaa

SEQ ID NO: 775847 - DNA, 15 bp, Homo sapiens
attgctaagtaaaaa

SEQ ID NO: 775848 - DNA, 15 bp, Homo sapiens
ttgctaagtaaaaac

SEQ ID NO: 775849 - DNA, 15 bp, Homo sapiens
tgctaagtaaaaaca

SEQ ID NO: 775850 - DNA, 15 bp, Homo sapiens
gctaagtaaaaacag

SEQ ID NO: 775851 - DNA, 15 bp, Homo sapiens
ctaagtaaaaacaga

SEQ ID NO: 775852 - DNA, 15 bp, Homo sapiens
taagtaaaaacagac

SEQ ID NO: 775853 - DNA, 15 bp, Homo sapiens
aagtaaaaacagaca

SEQ ID NO: 775854 - DNA, 15 bp, Homo sapiens
agtaaaaacagacac

SEQ ID NO: 775855 - DNA, 15 bp, Homo sapiens
gtaaaaacagacaca

SEQ ID NO: 775856 - DNA, 15 bp, Homo sapiens
taaaaacagacacaa

SEQ ID NO: 775857 - DNA, 15 bp, Homo sapiens
aaaaacagacacaaa

SEQ ID NO: 775858 - DNA, 15 bp, Homo sapiens
aaaacagacacaaag

SEQ ID NO: 775859 - DNA, 15 bp, Homo sapiens
aaacagacacaaagt

SEQ ID NO: 775860 - DNA, 15 bp, Homo sapiens
aacagacacaaagtt

SEQ ID NO: 775861 - DNA, 15 bp, Homo sapiens
acagacacaaagttt

SEQ ID NO: 775862 - DNA, 15 bp, Homo sapiens
cagacacaaagttta

SEQ ID NO: 775863 - DNA, 15 bp, Homo sapiens
agacacaaagtttaa

SEQ ID NO: 775864 - DNA, 15 bp, Homo sapiens
acacaaagtttaaat

SEQ ID NO: 775865 - DNA, 15 bp, Homo sapiens
cacaaagtttaaata

SEQ ID NO: 775866 - DNA, 15 bp, Homo sapiens
acaaagtttaaataa

SEQ ID NO: 775867 - DNA, 15 bp, Homo sapiens
caaagtttaaataat

SEQ ID NO: 775868 - DNA, 15 bp, Homo sapiens
aaagtttaaataatt

SEQ ID NO: 775869 - DNA, 15 bp, Homo sapiens
aagtttaaataattt

SEQ ID NO: 775870 - DNA, 15 bp, Homo sapiens
agtttaaataatttg

SEQ ID NO: 775871 - DNA, 15 bp, Homo sapiens
gtttaaataatttgg

SEQ ID NO: 775872 - DNA, 15 bp, Homo sapiens
tttaaataatttggc

SEQ ID NO: 775873 - DNA, 15 bp, Homo sapiens
ttaaataatttggcc

SEQ ID NO: 775874 - DNA, 15 bp, Homo sapiens
taaataatttggcca

SEQ ID NO: 775875 - DNA, 15 bp, Homo sapiens
aaataatttggccaa

SEQ ID NO: 775876 - DNA, 15 bp, Homo sapiens
aataatttggccaag

SEQ ID NO: 775877 - DNA, 15 bp, Homo sapiens
ataatttggccaagg

SEQ ID NO: 775878 - DNA, 15 bp, Homo sapiens
taatttggccaaggt

SEQ ID NO: 775879 - DNA, 15 bp, Homo sapiens
aatttggccaaggtt

SEQ ID NO: 775880 - DNA, 15 bp, Homo sapiens
atttggccaaggtta

SEQ ID NO: 775881 - DNA, 15 bp, Homo sapiens
tttggccaaggttat

SEQ ID NO: 775882 - DNA, 15 bp, Homo sapiens
ttggccaaggttata

SEQ ID NO: 775883 - DNA, 15 bp, Homo sapiens
tggccaaggttatat

SEQ ID NO: 775884 - DNA, 15 bp, Homo sapiens
ggccaaggttatata

SEQ ID NO: 775885 - DNA, 15 bp, Homo sapiens
gccaaggttatatag

SEQ ID NO: 775886 - DNA, 15 bp, Homo sapiens
ccaaggttatatagc

SEQ ID NO: 775887 - DNA, 15 bp, Homo sapiens
caaggttatatagca

SEQ ID NO: 775888 - DNA, 15 bp, Homo sapiens
aaggttatatagcag

SEQ ID NO: 775889 - DNA, 15 bp, Homo sapiens
aggttatatagcagt

SEQ ID NO: 775890 - DNA, 15 bp, Homo sapiens
ggttatatagcagtt

SEQ ID NO: 775891 - DNA, 15 bp, Homo sapiens
gttatatagcagtta

SEQ ID NO: 775892 - DNA, 15 bp, Homo sapiens
ttatatagcagttaa

SEQ ID NO: 775893 - DNA, 15 bp, Homo sapiens
tatatagcagttaaa

SEQ ID NO: 775894 - DNA, 15 bp, Homo sapiens
atatagcagttaaat

SEQ ID NO: 775895 - DNA, 15 bp, Homo sapiens
tatagcagttaaatc

SEQ ID NO: 775896 - DNA, 15 bp, Homo sapiens
atagcagttaaatca

SEQ ID NO: 775897 - DNA, 15 bp, Homo sapiens
tagcagttaaatcat

SEQ ID NO: 775898 - DNA, 15 bp, Homo sapiens
agcagttaaatcatg

SEQ ID NO: 775899 - DNA, 15 bp, Homo sapiens
gcagttaaatcatga

SEQ ID NO: 775900 - DNA, 15 bp, Homo sapiens
cagttaaatcatgag

SEQ ID NO: 775901 - DNA, 15 bp, Homo sapiens
agttaaatcatgaga

SEQ ID NO: 775902 - DNA, 15 bp, Homo sapiens
gttaaatcatgagat

SEQ ID NO: 775903 - DNA, 15 bp, Homo sapiens
ttaaatcatgagatt

SEQ ID NO: 775904 - DNA, 15 bp, Homo sapiens
taaatcatgagattt

SEQ ID NO: 775905 - DNA, 15 bp, Homo sapiens
aaatcatgagatttg

SEQ ID NO: 775906 - DNA, 15 bp, Homo sapiens
aatcatgagatttga

SEQ ID NO: 775907 - DNA, 15 bp, Homo sapiens
atcatgagatttgaa

SEQ ID NO: 775908 - DNA, 15 bp, Homo sapiens
tcatgagatttgaac

SEQ ID NO: 775909 - DNA, 15 bp, Homo sapiens
catgagatttgaacc

SEQ ID NO: 775910 - DNA, 15 bp, Homo sapiens
atgagatttgaaccc

SEQ ID NO: 775911 - DNA, 15 bp, Homo sapiens
tgagatttgaaccca

SEQ ID NO: 775912 - DNA, 15 bp, Homo sapiens
gagatttgaacccag

SEQ ID NO: 775913 - DNA, 15 bp, Homo sapiens
agatttgaacccaga

SEQ ID NO: 775914 - DNA, 15 bp, Homo sapiens
gatttgaacccagat

SEQ ID NO: 775915 - DNA, 15 bp, Homo sapiens
atttgaacccagatc

SEQ ID NO: 775916 - DNA, 15 bp, Homo sapiens
tttgaacccagatct

SEQ ID NO: 775917 - DNA, 15 bp, Homo sapiens
ttgaacccagatctc

SEQ ID NO: 775918 - DNA, 15 bp, Homo sapiens
tgaacccagatctct

SEQ ID NO: 775919 - DNA, 15 bp, Homo sapiens
gaacccagatctctc

SEQ ID NO: 775920 - DNA, 15 bp, Homo sapiens
aacccagatctctct

SEQ ID NO: 775921 - DNA, 15 bp, Homo sapiens
acccagatctctctg

SEQ ID NO: 775922 - DNA, 15 bp, Homo sapiens
cccagatctctctga

SEQ ID NO: 775923 - DNA, 15 bp, Homo sapiens
ccagatctctctgac

SEQ ID NO: 775924 - DNA, 15 bp, Homo sapiens
cagatctctctgacc

SEQ ID NO: 775925 - DNA, 15 bp, Homo sapiens
agatctctctgacct

SEQ ID NO: 775926 - DNA, 15 bp, Homo sapiens
gatctctctgacctt

SEQ ID NO: 775927 - DNA, 15 bp, Homo sapiens
atctctctgaccttg

SEQ ID NO: 775928 - DNA, 15 bp, Homo sapiens
tctctctgaccttgc

SEQ ID NO: 775929 - DNA, 15 bp, Homo sapiens
ctctctgaccttgcc

SEQ ID NO: 775930 - DNA, 15 bp, Homo sapiens
tctctgaccttgcct

SEQ ID NO: 775931 - DNA, 15 bp, Homo sapiens
ctctgaccttgcctt

SEQ ID NO: 775932 - DNA, 15 bp, Homo sapiens
tctgaccttgccttc

SEQ ID NO: 775933 - DNA, 15 bp, Homo sapiens
ctgaccttgccttcc

SEQ ID NO: 775934 - DNA, 15 bp, Homo sapiens
tgaccttgccttcca

SEQ ID NO: 775935 - DNA, 15 bp, Homo sapiens
gaccttgccttccat

SEQ ID NO: 775936 - DNA, 15 bp, Homo sapiens
accttgccttccatc

SEQ ID NO: 775937 - DNA, 15 bp, Homo sapiens
ccttgccttccatca

SEQ ID NO: 775938 - DNA, 15 bp, Homo sapiens
cttgccttccatcac

SEQ ID NO: 775939 - DNA, 15 bp, Homo sapiens
ttgccttccatcacc

SEQ ID NO: 775940 - DNA, 15 bp, Homo sapiens
tgccttccatcacct

SEQ ID NO: 775941 - DNA, 15 bp, Homo sapiens
gccttccatcacctc

SEQ ID NO: 775942 - DNA, 15 bp, Homo sapiens
ccttccatcacctct

SEQ ID NO: 775943 - DNA, 15 bp, Homo sapiens
cttccatcacctctt

SEQ ID NO: 775944 - DNA, 15 bp, Homo sapiens
ttccatcacctctta

SEQ ID NO: 775945 - DNA, 15 bp, Homo sapiens
tccatcacctcttat

SEQ ID NO: 775946 - DNA, 15 bp, Homo sapiens
ccatcacctcttatt

SEQ ID NO: 775947 - DNA, 15 bp, Homo sapiens
catcacctcttattc

SEQ ID NO: 775948 - DNA, 15 bp, Homo sapiens
atcacctcttattca

SEQ ID NO: 775949 - DNA, 15 bp, Homo sapiens
tcacctcttattcaa

SEQ ID NO: 775950 - DNA, 15 bp, Homo sapiens
cacctcttattcaaa

SEQ ID NO: 775951 - DNA, 15 bp, Homo sapiens
acctcttattcaaaa

SEQ ID NO: 775952 - DNA, 15 bp, Homo sapiens
cctcttattcaaaag

SEQ ID NO: 775953 - DNA, 15 bp, Homo sapiens
ctcttattcaaaagt

SEQ ID NO: 775954 - DNA, 15 bp, Homo sapiens
tcttattcaaaagta

SEQ ID NO: 775955 - DNA, 15 bp, Homo sapiens
cttattcaaaagtaa

SEQ ID NO: 775956 - DNA, 15 bp, Homo sapiens
ttattcaaaagtaaa

SEQ ID NO: 775957 - DNA, 15 bp, Homo sapiens
tattcaaaagtaaag

SEQ ID NO: 775958 - DNA, 15 bp, Homo sapiens
attcaaaagtaaagg

SEQ ID NO: 775959 - DNA, 15 bp, Homo sapiens
ttcaaaagtaaagga

SEQ ID NO: 775960 - DNA, 15 bp, Homo sapiens
tcaaaagtaaaggag

SEQ ID NO: 775961 - DNA, 15 bp, Homo sapiens
caaaagtaaaggagc

SEQ ID NO: 775962 - DNA, 15 bp, Homo sapiens
aaaagtaaaggagcg

SEQ ID NO: 775963 - DNA, 15 bp, Homo sapiens
aaagtaaaggagcgg

SEQ ID NO: 775964 - DNA, 15 bp, Homo sapiens
aagtaaaggagcgga

SEQ ID NO: 775965 - DNA, 15 bp, Homo sapiens
agtaaaggagcggag

SEQ ID NO: 775966 - DNA, 15 bp, Homo sapiens
gtaaaggagcggagt

SEQ ID NO: 775967 - DNA, 15 bp, Homo sapiens
taaaggagcggagtt

SEQ ID NO: 775968 - DNA, 15 bp, Homo sapiens
aaaggagcggagttg

SEQ ID NO: 775969 - DNA, 15 bp, Homo sapiens
aaggagcggagttga

SEQ ID NO: 775970 - DNA, 15 bp, Homo sapiens
aggagcggagttgaa

SEQ ID NO: 775971 - DNA, 15 bp, Homo sapiens
ggagcggagttgaag

SEQ ID NO: 775972 - DNA, 15 bp, Homo sapiens
gagcggagttgaaga

SEQ ID NO: 775973 - DNA, 15 bp, Homo sapiens
agcggagttgaagat

SEQ ID NO: 775974 - DNA, 15 bp, Homo sapiens
gcggagttgaagatt

SEQ ID NO: 775975 - DNA, 15 bp, Homo sapiens
cggagttgaagattg

SEQ ID NO: 775976 - DNA, 15 bp, Homo sapiens
ggagttgaagattgc

SEQ ID NO: 775977 - DNA, 15 bp, Homo sapiens
gagttgaagattgct

SEQ ID NO: 775978 - DNA, 15 bp, Homo sapiens
agttgaagattgcta

SEQ ID NO: 775979 - DNA, 15 bp, Homo sapiens
gttgaagattgctat

SEQ ID NO: 775980 - DNA, 15 bp, Homo sapiens
ttgaagattgctatg

SEQ ID NO: 775981 - DNA, 15 bp, Homo sapiens
tgaagattgctatgt

SEQ ID NO: 775982 - DNA, 15 bp, Homo sapiens
gaagattgctatgtc

SEQ ID NO: 775983 - DNA, 15 bp, Homo sapiens
aagattgctatgtct

SEQ ID NO: 775984 - DNA, 15 bp, Homo sapiens
agattgctatgtctc

SEQ ID NO: 775985 - DNA, 15 bp, Homo sapiens
gattgctatgtctcc

SEQ ID NO: 775986 - DNA, 15 bp, Homo sapiens
attgctatgtctcct

SEQ ID NO: 775987 - DNA, 15 bp, Homo sapiens
ttgctatgtctcctt

SEQ ID NO: 775988 - DNA, 15 bp, Homo sapiens
tgctatgtctccttt

SEQ ID NO: 775989 - DNA, 15 bp, Homo sapiens
gctatgtctcctttc

SEQ ID NO: 775990 - DNA, 15 bp, Homo sapiens
ctatgtctcctttca

SEQ ID NO: 775991 - DNA, 15 bp, Homo sapiens
tatgtctcctttcat

SEQ ID NO: 775992 - DNA, 15 bp, Homo sapiens
atgtctcctttcatt

SEQ ID NO: 775993 - DNA, 15 bp, Homo sapiens
tgtctcctttcattc

SEQ ID NO: 775994 - DNA, 15 bp, Homo sapiens
gtctcctttcattcc

SEQ ID NO: 775995 - DNA, 15 bp, Homo sapiens
tctcctttcattcct

SEQ ID NO: 775996 - DNA, 15 bp, Homo sapiens
ctcctttcattcctt

SEQ ID NO: 775997 - DNA, 15 bp, Homo sapiens
tcctttcattccttt

SEQ ID NO: 775998 - DNA, 15 bp, Homo sapiens
cctttcattcctttt

SEQ ID NO: 775999 - DNA, 15 bp, Homo sapiens
ctttcattccttttt

SEQ ID NO: 776000 - DNA, 15 bp, Homo sapiens
tttcattcctttttc

SEQ ID NO: 776001 - DNA, 15 bp, Homo sapiens
ttcattcctttttca

SEQ ID NO: 776002 - DNA, 15 bp, Homo sapiens
tcattcctttttcat

SEQ ID NO: 776003 - DNA, 15 bp, Homo sapiens
cattcctttttcatc

SEQ ID NO: 776004 - DNA, 15 bp, Homo sapiens
attcctttttcatcc

SEQ ID NO: 776005 - DNA, 15 bp, Homo sapiens
ttcctttttcatcca

SEQ ID NO: 776006 - DNA, 15 bp, Homo sapiens
tcctttttcatccat

SEQ ID NO: 776007 - DNA, 15 bp, Homo sapiens
cctttttcatccatc

SEQ ID NO: 776008 - DNA, 15 bp, Homo sapiens
ctttttcatccatct

SEQ ID NO: 776009 - DNA, 15 bp, Homo sapiens
tttttcatccatctc

SEQ ID NO: 776010 - DNA, 15 bp, Homo sapiens
ttttcatccatctca

SEQ ID NO: 776011 - DNA, 15 bp, Homo sapiens
tttcatccatctcaa

SEQ ID NO: 776012 - DNA, 15 bp, Homo sapiens
ttcatccatctcaag

SEQ ID NO: 776013 - DNA, 15 bp, Homo sapiens
tcatccatctcaaga

SEQ ID NO: 776014 - DNA, 15 bp, Homo sapiens
catccatctcaagaa

SEQ ID NO: 776015 - DNA, 15 bp, Homo sapiens
atccatctcaagaag

SEQ ID NO: 776016 - DNA, 15 bp, Homo sapiens
tccatctcaagaagt

SEQ ID NO: 776017 - DNA, 15 bp, Homo sapiens
ccatctcaagaagtt

SEQ ID NO: 776018 - DNA, 15 bp, Homo sapiens
catctcaagaagttg

SEQ ID NO: 776019 - DNA, 15 bp, Homo sapiens
atctcaagaagttga

SEQ ID NO: 776020 - DNA, 15 bp, Homo sapiens
tctcaagaagttgaa

SEQ ID NO: 776021 - DNA, 15 bp, Homo sapiens
ctcaagaagttgaac

SEQ ID NO: 776022 - DNA, 15 bp, Homo sapiens
tcaagaagttgaaca

SEQ ID NO: 776023 - DNA, 15 bp, Homo sapiens
caagaagttgaacag

SEQ ID NO: 776024 - DNA, 15 bp, Homo sapiens
aagaagttgaacagc

SEQ ID NO: 776025 - DNA, 15 bp, Homo sapiens
agaagttgaacagca

SEQ ID NO: 776026 - DNA, 15 bp, Homo sapiens
gaagttgaacagcac

SEQ ID NO: 776027 - DNA, 15 bp, Homo sapiens
aagttgaacagcact

SEQ ID NO: 776028 - DNA, 15 bp, Homo sapiens
agttgaacagcactc

SEQ ID NO: 776029 - DNA, 15 bp, Homo sapiens
gttgaacagcactca

SEQ ID NO: 776030 - DNA, 15 bp, Homo sapiens
ttgaacagcactcag

SEQ ID NO: 776031 - DNA, 15 bp, Homo sapiens
tgaacagcactcagg

SEQ ID NO: 776032 - DNA, 15 bp, Homo sapiens
gaacagcactcaggt

SEQ ID NO: 776033 - DNA, 15 bp, Homo sapiens
aacagcactcaggta

SEQ ID NO: 776034 - DNA, 15 bp, Homo sapiens
acagcactcaggtag

SEQ ID NO: 776035 - DNA, 15 bp, Homo sapiens
cagcactcaggtagc

SEQ ID NO: 776036 - DNA, 15 bp, Homo sapiens
agcactcaggtagca

SEQ ID NO: 776037 - DNA, 15 bp, Homo sapiens
gcactcaggtagcac

SEQ ID NO: 776038 - DNA, 15 bp, Homo sapiens
cactcaggtagcact

SEQ ID NO: 776039 - DNA, 15 bp, Homo sapiens
actcaggtagcactt

SEQ ID NO: 776040 - DNA, 15 bp, Homo sapiens
ctcaggtagcacttt

SEQ ID NO: 776041 - DNA, 15 bp, Homo sapiens
tcaggtagcacttta

SEQ ID NO: 776042 - DNA, 15 bp, Homo sapiens
caggtagcactttaa

SEQ ID NO: 776043 - DNA, 15 bp, Homo sapiens
aggtagcactttaat

SEQ ID NO: 776044 - DNA, 15 bp, Homo sapiens
ggtagcactttaatt

SEQ ID NO: 776045 - DNA, 15 bp, Homo sapiens
gtagcactttaattg

SEQ ID NO: 776046 - DNA, 15 bp, Homo sapiens
tagcactttaattga

SEQ ID NO: 776047 - DNA, 15 bp, Homo sapiens
agcactttaattgat

SEQ ID NO: 776048 - DNA, 15 bp, Homo sapiens
gcactttaattgata

SEQ ID NO: 776049 - DNA, 15 bp, Homo sapiens
cactttaattgatag

SEQ ID NO: 776050 - DNA, 15 bp, Homo sapiens
actttaattgatagc

SEQ ID NO: 776051 - DNA, 15 bp, Homo sapiens
ctttaattgatagcc

SEQ ID NO: 776052 - DNA, 15 bp, Homo sapiens
tttaattgatagcca

SEQ ID NO: 776053 - DNA, 15 bp, Homo sapiens
ttaattgatagccat

SEQ ID NO: 776054 - DNA, 15 bp, Homo sapiens
taattgatagccata

SEQ ID NO: 776055 - DNA, 15 bp, Homo sapiens
aattgatagccatat

SEQ ID NO: 776056 - DNA, 15 bp, Homo sapiens
attgatagccatatg

SEQ ID NO: 776057 - DNA, 15 bp, Homo sapiens
ttgatagccatatgg

SEQ ID NO: 776058 - DNA, 15 bp, Homo sapiens
tgatagccatatgga

SEQ ID NO: 776059 - DNA, 15 bp, Homo sapiens
gatagccatatggat

SEQ ID NO: 776060 - DNA, 15 bp, Homo sapiens
atagccatatggatc

SEQ ID NO: 776061 - DNA, 15 bp, Homo sapiens
tagccatatggatca

SEQ ID NO: 776062 - DNA, 15 bp, Homo sapiens
agccatatggatcac

SEQ ID NO: 776063 - DNA, 15 bp, Homo sapiens
gccatatggatcacc

SEQ ID NO: 776064 - DNA, 15 bp, Homo sapiens
ccatatggatcaccc

SEQ ID NO: 776065 - DNA, 15 bp, Homo sapiens
catatggatcaccca

SEQ ID NO: 776066 - DNA, 15 bp, Homo sapiens
atatggatcacccaa

SEQ ID NO: 776067 - DNA, 15 bp, Homo sapiens
tatggatcacccaaa

SEQ ID NO: 776068 - DNA, 15 bp, Homo sapiens
atggatcacccaaaa

SEQ ID NO: 776069 - DNA, 15 bp, Homo sapiens
tggatcacccaaaat

SEQ ID NO: 776070 - DNA, 15 bp, Homo sapiens
ggatcacccaaaata

SEQ ID NO: 776071 - DNA, 15 bp, Homo sapiens
gatcacccaaaataa

SEQ ID NO: 776072 - DNA, 15 bp, Homo sapiens
atcacccaaaataat

SEQ ID NO: 776073 - DNA, 15 bp, Homo sapiens
tcacccaaaataatg

SEQ ID NO: 776074 - DNA, 15 bp, Homo sapiens
cacccaaaataatgg

SEQ ID NO: 776075 - DNA, 15 bp, Homo sapiens
acccaaaataatggt

SEQ ID NO: 776076 - DNA, 15 bp, Homo sapiens
cccaaaataatggtg

SEQ ID NO: 776077 - DNA, 15 bp, Homo sapiens
ccaaaataatggtga

SEQ ID NO: 776078 - DNA, 15 bp, Homo sapiens
caaaataatggtgat

SEQ ID NO: 776079 - DNA, 15 bp, Homo sapiens
aaaataatggtgatt

SEQ ID NO: 776080 - DNA, 15 bp, Homo sapiens
aaataatggtgattc

SEQ ID NO: 776081 - DNA, 15 bp, Homo sapiens
aataatggtgattct

SEQ ID NO: 776082 - DNA, 15 bp, Homo sapiens
ataatggtgattctg

SEQ ID NO: 776083 - DNA, 15 bp, Homo sapiens
taatggtgattctgg

SEQ ID NO: 776084 - DNA, 15 bp, Homo sapiens
aatggtgattctgga

SEQ ID NO: 776085 - DNA, 15 bp, Homo sapiens
atggtgattctggaa

SEQ ID NO: 776086 - DNA, 15 bp, Homo sapiens
tggtgattctggaac

SEQ ID NO: 776087 - DNA, 15 bp, Homo sapiens
ggtgattctggaacg

SEQ ID NO: 776088 - DNA, 15 bp, Homo sapiens
gtgattctggaacga

SEQ ID NO: 776089 - DNA, 15 bp, Homo sapiens
tgattctggaacgaa

SEQ ID NO: 776090 - DNA, 15 bp, Homo sapiens
gattctggaacgaag

SEQ ID NO: 776091 - DNA, 15 bp, Homo sapiens
attctggaacgaaga

SEQ ID NO: 776092 - DNA, 15 bp, Homo sapiens
ttctggaacgaagag

SEQ ID NO: 776093 - DNA, 15 bp, Homo sapiens
tctggaacgaagagt

SEQ ID NO: 776094 - DNA, 15 bp, Homo sapiens
ctggaacgaagagtg

SEQ ID NO: 776095 - DNA, 15 bp, Homo sapiens
tggaacgaagagtgg

SEQ ID NO: 776096 - DNA, 15 bp, Homo sapiens
ggaacgaagagtgga

SEQ ID NO: 776097 - DNA, 15 bp, Homo sapiens
gaacgaagagtggaa

SEQ ID NO: 776098 - DNA, 15 bp, Homo sapiens
aacgaagagtggaaa

SEQ ID NO: 776099 - DNA, 15 bp, Homo sapiens
acgaagagtggaaaa

SEQ ID NO: 776100 - DNA, 15 bp, Homo sapiens
cgaagagtggaaaaa

SEQ ID NO: 776101 - DNA, 15 bp, Homo sapiens
gaagagtggaaaaag

SEQ ID NO: 776102 - DNA, 15 bp, Homo sapiens
aagagtggaaaaaga

SEQ ID NO: 776103 - DNA, 15 bp, Homo sapiens
agagtggaaaaagac

SEQ ID NO: 776104 - DNA, 15 bp, Homo sapiens
gagtggaaaaagaca

SEQ ID NO: 776105 - DNA, 15 bp, Homo sapiens
agtggaaaaagacac

SEQ ID NO: 776106 - DNA, 15 bp, Homo sapiens
gtggaaaaagacaca

SEQ ID NO: 776107 - DNA, 15 bp, Homo sapiens
tggaaaaagacacag

SEQ ID NO: 776108 - DNA, 15 bp, Homo sapiens
aaaaagacacaggga

SEQ ID NO: 776109 - DNA, 15 bp, Homo sapiens
aaaagacacagggaa

SEQ ID NO: 776110 - DNA, 15 bp, Homo sapiens
aaagacacagggaaa

SEQ ID NO: 776111 - DNA, 15 bp, Homo sapiens
aagacacagggaaac

SEQ ID NO: 776112 - DNA, 15 bp, Homo sapiens
agacacagggaaact

SEQ ID NO: 776113 - DNA, 15 bp, Homo sapiens
gacacagggaaactt

SEQ ID NO: 776114 - DNA, 15 bp, Homo sapiens
acacagggaaacttg

SEQ ID NO: 776115 - DNA, 15 bp, Homo sapiens
cacagggaaacttga

SEQ ID NO: 776116 - DNA, 15 bp, Homo sapiens
acagggaaacttgat

SEQ ID NO: 776117 - DNA, 15 bp, Homo sapiens
cagggaaacttgatt

SEQ ID NO: 776118 - DNA, 15 bp, Homo sapiens
agggaaacttgatta

SEQ ID NO: 776119 - DNA, 15 bp, Homo sapiens
gggaaacttgattag

SEQ ID NO: 776120 - DNA, 15 bp, Homo sapiens
ggaaacttgattaga

SEQ ID NO: 776121 - DNA, 15 bp, Homo sapiens
gaaacttgattagaa

SEQ ID NO: 776122 - DNA, 15 bp, Homo sapiens
aaacttgattagaag

SEQ ID NO: 776123 - DNA, 15 bp, Homo sapiens
aacttgattagaagg

SEQ ID NO: 776124 - DNA, 15 bp, Homo sapiens
acttgattagaaggg

SEQ ID NO: 776125 - DNA, 15 bp, Homo sapiens
cttgattagaagggc

SEQ ID NO: 776126 - DNA, 15 bp, Homo sapiens
ttgattagaagggct

SEQ ID NO: 776127 - DNA, 15 bp, Homo sapiens
tgattagaagggctc

SEQ ID NO: 776128 - DNA, 15 bp, Homo sapiens
gattagaagggctct

SEQ ID NO: 776129 - DNA, 15 bp, Homo sapiens
attagaagggctctt

SEQ ID NO: 776130 - DNA, 15 bp, Homo sapiens
ttagaagggctcttg

SEQ ID NO: 776131 - DNA, 15 bp, Homo sapiens
tagaagggctcttgg

SEQ ID NO: 776132 - DNA, 15 bp, Homo sapiens
agaagggctcttggg

SEQ ID NO: 776133 - DNA, 15 bp, Homo sapiens
gaagggctcttgggg

SEQ ID NO: 776134 - DNA, 15 bp, Homo sapiens
aagggctcttggggg

SEQ ID NO: 776135 - DNA, 15 bp, Homo sapiens
agggctcttggggga

SEQ ID NO: 776136 - DNA, 15 bp, Homo sapiens
gggctcttgggggat

SEQ ID NO: 776137 - DNA, 15 bp, Homo sapiens
ggctcttgggggatt

SEQ ID NO: 776138 - DNA, 15 bp, Homo sapiens
gctcttgggggattg

SEQ ID NO: 776139 - DNA, 15 bp, Homo sapiens
ctcttgggggattgg

SEQ ID NO: 776140 - DNA, 15 bp, Homo sapiens
tcttgggggattggg

SEQ ID NO: 776141 - DNA, 15 bp, Homo sapiens
cttgggggattgggg

SEQ ID NO: 776142 - DNA, 15 bp, Homo sapiens
ttgggggattggggt

SEQ ID NO: 776143 - DNA, 15 bp, Homo sapiens
tgggggattggggtg

SEQ ID NO: 776144 - DNA, 15 bp, Homo sapiens
gggggattggggtgg

SEQ ID NO: 776145 - DNA, 15 bp, Homo sapiens
ggggattggggtggg

SEQ ID NO: 776146 - DNA, 15 bp, Homo sapiens
gggattggggtggga

SEQ ID NO: 776147 - DNA, 15 bp, Homo sapiens
ggattggggtgggaa

SEQ ID NO: 776148 - DNA, 15 bp, Homo sapiens
gattggggtgggaag

SEQ ID NO: 776149 - DNA, 15 bp, Homo sapiens
attggggtgggaagc

SEQ ID NO: 776150 - DNA, 15 bp, Homo sapiens
ttggggtgggaagca

SEQ ID NO: 776151 - DNA, 15 bp, Homo sapiens
tggggtgggaagcag

SEQ ID NO: 776152 - DNA, 15 bp, Homo sapiens
ggggtgggaagcagc

SEQ ID NO: 776153 - DNA, 15 bp, Homo sapiens
gggtgggaagcagcc

SEQ ID NO: 776154 - DNA, 15 bp, Homo sapiens
ggtgggaagcagccc

SEQ ID NO: 776155 - DNA, 15 bp, Homo sapiens
gtgggaagcagccca

SEQ ID NO: 776156 - DNA, 15 bp, Homo sapiens
tgggaagcagcccat

SEQ ID NO: 776157 - DNA, 15 bp, Homo sapiens
gggaagcagcccata

SEQ ID NO: 776158 - DNA, 15 bp, Homo sapiens
ggaagcagcccataa

SEQ ID NO: 776159 - DNA, 15 bp, Homo sapiens
gaagcagcccataaa

SEQ ID NO: 776160 - DNA, 15 bp, Homo sapiens
aagcagcccataaat

SEQ ID NO: 776161 - DNA, 15 bp, Homo sapiens
agcagcccataaatg

SEQ ID NO: 776162 - DNA, 15 bp, Homo sapiens
gcagcccataaatgt

SEQ ID NO: 776163 - DNA, 15 bp, Homo sapiens
cagcccataaatgtc

SEQ ID NO: 776164 - DNA, 15 bp, Homo sapiens
agcccataaatgtca

SEQ ID NO: 776165 - DNA, 15 bp, Homo sapiens
gcccataaatgtcaa

SEQ ID NO: 776166 - DNA, 15 bp, Homo sapiens
cccataaatgtcaag

SEQ ID NO: 776167 - DNA, 15 bp, Homo sapiens
ccataaatgtcaagc

SEQ ID NO: 776168 - DNA, 15 bp, Homo sapiens
cataaatgtcaagct

SEQ ID NO: 776169 - DNA, 15 bp, Homo sapiens
ataaatgtcaagctg

SEQ ID NO: 776170 - DNA, 15 bp, Homo sapiens
taaatgtcaagctgt

SEQ ID NO: 776171 - DNA, 15 bp, Homo sapiens
aaatgtcaagctgtg

SEQ ID NO: 776172 - DNA, 15 bp, Homo sapiens
aatgtcaagctgtgt

SEQ ID NO: 776173 - DNA, 15 bp, Homo sapiens
atgtcaagctgtgtc

SEQ ID NO: 776174 - DNA, 15 bp, Homo sapiens
tgtcaagctgtgtca

SEQ ID NO: 776175 - DNA, 15 bp, Homo sapiens
gtcaagctgtgtcat

SEQ ID NO: 776176 - DNA, 15 bp, Homo sapiens
tcaagctgtgtcatc

SEQ ID NO: 776177 - DNA, 15 bp, Homo sapiens
caagctgtgtcatct

SEQ ID NO: 776178 - DNA, 15 bp, Homo sapiens
aagctgtgtcatctc

SEQ ID NO: 776179 - DNA, 15 bp, Homo sapiens
agctgtgtcatctct

SEQ ID NO: 776180 - DNA, 15 bp, Homo sapiens
gctgtgtcatctctg

SEQ ID NO: 776181 - DNA, 15 bp, Homo sapiens
ctgtgtcatctctga

SEQ ID NO: 776182 - DNA, 15 bp, Homo sapiens
tgtgtcatctctgaa

SEQ ID NO: 776183 - DNA, 15 bp, Homo sapiens
gtgtcatctctgaag

SEQ ID NO: 776184 - DNA, 15 bp, Homo sapiens
tgtcatctctgaagc

SEQ ID NO: 776185 - DNA, 15 bp, Homo sapiens
gtcatctctgaagca

SEQ ID NO: 776186 - DNA, 15 bp, Homo sapiens
tcatctctgaagcac

SEQ ID NO: 776187 - DNA, 15 bp, Homo sapiens
catctctgaagcacc

SEQ ID NO: 776188 - DNA, 15 bp, Homo sapiens
atctctgaagcacct

SEQ ID NO: 776189 - DNA, 15 bp, Homo sapiens
tctctgaagcacctt

SEQ ID NO: 776190 - DNA, 15 bp, Homo sapiens
ctctgaagcaccttg

SEQ ID NO: 776191 - DNA, 15 bp, Homo sapiens
tctgaagcaccttgt

SEQ ID NO: 776192 - DNA, 15 bp, Homo sapiens
ctgaagcaccttgtc

SEQ ID NO: 776193 - DNA, 15 bp, Homo sapiens
tgaagcaccttgtct

SEQ ID NO: 776194 - DNA, 15 bp, Homo sapiens
gaagcaccttgtctc

SEQ ID NO: 776195 - DNA, 15 bp, Homo sapiens
aagcaccttgtctct

SEQ ID NO: 776196 - DNA, 15 bp, Homo sapiens
agcaccttgtctctt

SEQ ID NO: 776197 - DNA, 15 bp, Homo sapiens
gcaccttgtctcttg

SEQ ID NO: 776198 - DNA, 15 bp, Homo sapiens
caccttgtctcttga

SEQ ID NO: 776199 - DNA, 15 bp, Homo sapiens
accttgtctcttgac

SEQ ID NO: 776200 - DNA, 15 bp, Homo sapiens
ccttgtctcttgact

SEQ ID NO: 776201 - DNA, 15 bp, Homo sapiens
cttgtctcttgactc

SEQ ID NO: 776202 - DNA, 15 bp, Homo sapiens
ttgtctcttgactct

SEQ ID NO: 776203 - DNA, 15 bp, Homo sapiens
tgtctcttgactcta

SEQ ID NO: 776204 - DNA, 15 bp, Homo sapiens
gtctcttgactctag

SEQ ID NO: 776205 - DNA, 15 bp, Homo sapiens
tctcttgactctaga

SEQ ID NO: 776206 - DNA, 15 bp, Homo sapiens
ctcttgactctagaa

SEQ ID NO: 776207 - DNA, 15 bp, Homo sapiens
tcttgactctagaat

SEQ ID NO: 776208 - DNA, 15 bp, Homo sapiens
cttgactctagaata

SEQ ID NO: 776209 - DNA, 15 bp, Homo sapiens
ttgactctagaataa

SEQ ID NO: 776210 - DNA, 15 bp, Homo sapiens
tgactctagaataaa

SEQ ID NO: 776211 - DNA, 15 bp, Homo sapiens
gactctagaataaag

SEQ ID NO: 776212 - DNA, 15 bp, Homo sapiens
actctagaataaaga

SEQ ID NO: 776213 - DNA, 15 bp, Homo sapiens
ctctagaataaagaa

SEQ ID NO: 776214 - DNA, 15 bp, Homo sapiens
tctagaataaagaat

SEQ ID NO: 776215 - DNA, 15 bp, Homo sapiens
ctagaataaagaatg

SEQ ID NO: 776216 - DNA, 15 bp, Homo sapiens
tagaataaagaatga

SEQ ID NO: 776217 - DNA, 15 bp, Homo sapiens
agaataaagaatgag

SEQ ID NO: 776218 - DNA, 15 bp, Homo sapiens
gaataaagaatgaga

SEQ ID NO: 776219 - DNA, 15 bp, Homo sapiens
aataaagaatgagag

SEQ ID NO: 776220 - DNA, 15 bp, Homo sapiens
ataaagaatgagaga

SEQ ID NO: 776221 - DNA, 15 bp, Homo sapiens
taaagaatgagagag

SEQ ID NO: 776222 - DNA, 15 bp, Homo sapiens
aaagaatgagagaga

SEQ ID NO: 776223 - DNA, 15 bp, Homo sapiens
aagaatgagagagat

SEQ ID NO: 776224 - DNA, 15 bp, Homo sapiens
agaatgagagagatg

SEQ ID NO: 776225 - DNA, 15 bp, Homo sapiens
gaatgagagagatgc

SEQ ID NO: 776226 - DNA, 15 bp, Homo sapiens
aatgagagagatgct

SEQ ID NO: 776227 - DNA, 15 bp, Homo sapiens
atgagagagatgctg

SEQ ID NO: 776228 - DNA, 15 bp, Homo sapiens
tgagagagatgctgt

SEQ ID NO: 776229 - DNA, 15 bp, Homo sapiens
gagagagatgctgtg

SEQ ID NO: 776230 - DNA, 15 bp, Homo sapiens
agagagatgctgtga

SEQ ID NO: 776231 - DNA, 15 bp, Homo sapiens
gagagatgctgtgag

SEQ ID NO: 776232 - DNA, 15 bp, Homo sapiens
agagatgctgtgagg

SEQ ID NO: 776233 - DNA, 15 bp, Homo sapiens
gagatgctgtgaggg

SEQ ID NO: 776234 - DNA, 15 bp, Homo sapiens
agatgctgtgagggc

SEQ ID NO: 776235 - DNA, 15 bp, Homo sapiens
gatgctgtgagggcc

SEQ ID NO: 776236 - DNA, 15 bp, Homo sapiens
atgctgtgagggcca

SEQ ID NO: 776237 - DNA, 15 bp, Homo sapiens
tgctgtgagggccag

SEQ ID NO: 776238 - DNA, 15 bp, Homo sapiens
gctgtgagggccaga

SEQ ID NO: 776239 - DNA, 15 bp, Homo sapiens
ctgtgagggccagat

SEQ ID NO: 776240 - DNA, 15 bp, Homo sapiens
tgtgagggccagatg

SEQ ID NO: 776241 - DNA, 15 bp, Homo sapiens
gtgagggccagatgg

SEQ ID NO: 776242 - DNA, 15 bp, Homo sapiens
tgagggccagatggc

SEQ ID NO: 776243 - DNA, 15 bp, Homo sapiens
gagggccagatggct

SEQ ID NO: 776244 - DNA, 15 bp, Homo sapiens
agggccagatggctg

SEQ ID NO: 776245 - DNA, 15 bp, Homo sapiens
gggccagatggctgg

SEQ ID NO: 776246 - DNA, 15 bp, Homo sapiens
ggccagatggctggg

SEQ ID NO: 776247 - DNA, 15 bp, Homo sapiens
gccagatggctgggg

SEQ ID NO: 776248 - DNA, 15 bp, Homo sapiens
ccagatggctgggga

SEQ ID NO: 776249 - DNA, 15 bp, Homo sapiens
cagatggctggggag

SEQ ID NO: 776250 - DNA, 15 bp, Homo sapiens
agatggctggggagc

SEQ ID NO: 776251 - DNA, 15 bp, Homo sapiens
gatggctggggagcc

SEQ ID NO: 776252 - DNA, 15 bp, Homo sapiens
atggctggggagcct

SEQ ID NO: 776253 - DNA, 15 bp, Homo sapiens
tggctggggagcctg

SEQ ID NO: 776254 - DNA, 15 bp, Homo sapiens
ggctggggagcctgc

SEQ ID NO: 776255 - DNA, 15 bp, Homo sapiens
gctggggagcctgca

SEQ ID NO: 776256 - DNA, 15 bp, Homo sapiens
ctggggagcctgcag

SEQ ID NO: 776257 - DNA, 15 bp, Homo sapiens
tggggagcctgcaga

SEQ ID NO: 776258 - DNA, 15 bp, Homo sapiens
ggggagcctgcagac

SEQ ID NO: 776259 - DNA, 15 bp, Homo sapiens
gggagcctgcagaca

SEQ ID NO: 776260 - DNA, 15 bp, Homo sapiens
ggagcctgcagacaa

SEQ ID NO: 776261 - DNA, 15 bp, Homo sapiens
gagcctgcagacaat

SEQ ID NO: 776262 - DNA, 15 bp, Homo sapiens
agcctgcagacaatg

SEQ ID NO: 776263 - DNA, 15 bp, Homo sapiens
gcctgcagacaatga

SEQ ID NO: 776264 - DNA, 15 bp, Homo sapiens
cctgcagacaatgag

SEQ ID NO: 776265 - DNA, 15 bp, Homo sapiens
ctgcagacaatgaga

SEQ ID NO: 776266 - DNA, 15 bp, Homo sapiens
tgcagacaatgagag

SEQ ID NO: 776267 - DNA, 15 bp, Homo sapiens
gcagacaatgagagg

SEQ ID NO: 776268 - DNA, 15 bp, Homo sapiens
cagacaatgagagga

SEQ ID NO: 776269 - DNA, 15 bp, Homo sapiens
agacaatgagaggaa

SEQ ID NO: 776270 - DNA, 15 bp, Homo sapiens
gacaatgagaggaaa

SEQ ID NO: 776271 - DNA, 15 bp, Homo sapiens
acaatgagaggaaat

SEQ ID NO: 776272 - DNA, 15 bp, Homo sapiens
caatgagaggaaata

SEQ ID NO: 776273 - DNA, 15 bp, Homo sapiens
aatgagaggaaatag

SEQ ID NO: 776274 - DNA, 15 bp, Homo sapiens
atgagaggaaatagg

SEQ ID NO: 776275 - DNA, 15 bp, Homo sapiens
tgagaggaaataggc

SEQ ID NO: 776276 - DNA, 15 bp, Homo sapiens
gagaggaaataggct

SEQ ID NO: 776277 - DNA, 15 bp, Homo sapiens
agaggaaataggctc

SEQ ID NO: 776278 - DNA, 15 bp, Homo sapiens
gaggaaataggctca

SEQ ID NO: 776279 - DNA, 15 bp, Homo sapiens
aggaaataggctcat

SEQ ID NO: 776280 - DNA, 15 bp, Homo sapiens
ggaaataggctcatt

SEQ ID NO: 776281 - DNA, 15 bp, Homo sapiens
gaaataggctcattt

SEQ ID NO: 776282 - DNA, 15 bp, Homo sapiens
aaataggctcattta

SEQ ID NO: 776283 - DNA, 15 bp, Homo sapiens
aataggctcatttaa

SEQ ID NO: 776284 - DNA, 15 bp, Homo sapiens
ataggctcatttaac

SEQ ID NO: 776285 - DNA, 15 bp, Homo sapiens
taggctcatttaacc

SEQ ID NO: 776286 - DNA, 15 bp, Homo sapiens
aggctcatttaacct

SEQ ID NO: 776287 - DNA, 15 bp, Homo sapiens
ggctcatttaacctt

SEQ ID NO: 776288 - DNA, 15 bp, Homo sapiens
gctcatttaaccttg

SEQ ID NO: 776289 - DNA, 15 bp, Homo sapiens
ctcatttaaccttgt

SEQ ID NO: 776290 - DNA, 15 bp, Homo sapiens
tcatttaaccttgtc

SEQ ID NO: 776291 - DNA, 15 bp, Homo sapiens
catttaaccttgtca

SEQ ID NO: 776292 - DNA, 15 bp, Homo sapiens
atttaaccttgtcaa

SEQ ID NO: 776293 - DNA, 15 bp, Homo sapiens
tttaaccttgtcaaa

SEQ ID NO: 776294 - DNA, 15 bp, Homo sapiens
ttaaccttgtcaaat

SEQ ID NO: 776295 - DNA, 15 bp, Homo sapiens
taaccttgtcaaatt

SEQ ID NO: 776296 - DNA, 15 bp, Homo sapiens
aaccttgtcaaatta

SEQ ID NO: 776297 - DNA, 15 bp, Homo sapiens
accttgtcaaattac

SEQ ID NO: 776298 - DNA, 15 bp, Homo sapiens
ccttgtcaaattaca

SEQ ID NO: 776299 - DNA, 15 bp, Homo sapiens
cttgtcaaattacag

SEQ ID NO: 776300 - DNA, 15 bp, Homo sapiens
ttgtcaaattacagc

SEQ ID NO: 776301 - DNA, 15 bp, Homo sapiens
tgtcaaattacagct

SEQ ID NO: 776302 - DNA, 15 bp, Homo sapiens
gtcaaattacagctt

SEQ ID NO: 776303 - DNA, 15 bp, Homo sapiens
tcaaattacagcttc

SEQ ID NO: 776304 - DNA, 15 bp, Homo sapiens
caaattacagcttct

SEQ ID NO: 776305 - DNA, 15 bp, Homo sapiens
aaattacagcttctt

SEQ ID NO: 776306 - DNA, 15 bp, Homo sapiens
aattacagcttcttg

SEQ ID NO: 776307 - DNA, 15 bp, Homo sapiens
attacagcttcttgt

SEQ ID NO: 776308 - DNA, 15 bp, Homo sapiens
ttacagcttcttgtg

SEQ ID NO: 776309 - DNA, 15 bp, Homo sapiens
tacagcttcttgtgt

SEQ ID NO: 776310 - DNA, 15 bp, Homo sapiens
acagcttcttgtgtt

SEQ ID NO: 776311 - DNA, 15 bp, Homo sapiens
cagcttcttgtgttc

SEQ ID NO: 776312 - DNA, 15 bp, Homo sapiens
agcttcttgtgttca

SEQ ID NO: 776313 - DNA, 15 bp, Homo sapiens
gcttcttgtgttcac

SEQ ID NO: 776314 - DNA, 15 bp, Homo sapiens
cttcttgtgttcacc

SEQ ID NO: 776315 - DNA, 15 bp, Homo sapiens
ttcttgtgttcacca

SEQ ID NO: 776316 - DNA, 15 bp, Homo sapiens
tcttgtgttcaccac

SEQ ID NO: 776317 - DNA, 15 bp, Homo sapiens
cttgtgttcaccacg

SEQ ID NO: 776318 - DNA, 15 bp, Homo sapiens
ttgtgttcaccacgg

SEQ ID NO: 776319 - DNA, 15 bp, Homo sapiens
tgtgttcaccacgga

SEQ ID NO: 776320 - DNA, 15 bp, Homo sapiens
gtgttcaccacggaa

SEQ ID NO: 776321 - DNA, 15 bp, Homo sapiens
tgttcaccacggaag

SEQ ID NO: 776322 - DNA, 15 bp, Homo sapiens
gttcaccacggaagt

SEQ ID NO: 776323 - DNA, 15 bp, Homo sapiens
ttcaccacggaagta

SEQ ID NO: 776324 - DNA, 15 bp, Homo sapiens
tcaccacggaagtaa

SEQ ID NO: 776325 - DNA, 15 bp, Homo sapiens
caccacggaagtaaa

SEQ ID NO: 776326 - DNA, 15 bp, Homo sapiens
accacggaagtaaat

SEQ ID NO: 776327 - DNA, 15 bp, Homo sapiens
ccacggaagtaaatg

SEQ ID NO: 776328 - DNA, 15 bp, Homo sapiens
cacggaagtaaatga

SEQ ID NO: 776329 - DNA, 15 bp, Homo sapiens
acggaagtaaatgat

SEQ ID NO: 776330 - DNA, 15 bp, Homo sapiens
cggaagtaaatgatc

SEQ ID NO: 776331 - DNA, 15 bp, Homo sapiens
ggaagtaaatgatct

SEQ ID NO: 776332 - DNA, 15 bp, Homo sapiens
gaagtaaatgatctt

SEQ ID NO: 776333 - DNA, 15 bp, Homo sapiens
aagtaaatgatcttc

SEQ ID NO: 776334 - DNA, 15 bp, Homo sapiens
agtaaatgatcttct

SEQ ID NO: 776335 - DNA, 15 bp, Homo sapiens
gtaaatgatcttctg

SEQ ID NO: 776336 - DNA, 15 bp, Homo sapiens
taaatgatcttctgc

SEQ ID NO: 776337 - DNA, 15 bp, Homo sapiens
aaatgatcttctgca

SEQ ID NO: 776338 - DNA, 15 bp, Homo sapiens
aatgatcttctgcag

SEQ ID NO: 776339 - DNA, 15 bp, Homo sapiens
atgatcttctgcagg

SEQ ID NO: 776340 - DNA, 15 bp, Homo sapiens
tgatcttctgcaggg

SEQ ID NO: 776341 - DNA, 15 bp, Homo sapiens
gatcttctgcagggg

SEQ ID NO: 776342 - DNA, 15 bp, Homo sapiens
atcttctgcagggga

SEQ ID NO: 776343 - DNA, 15 bp, Homo sapiens
tcttctgcaggggac

SEQ ID NO: 776344 - DNA, 15 bp, Homo sapiens
cttctgcaggggacc

SEQ ID NO: 776345 - DNA, 15 bp, Homo sapiens
ttctgcaggggaccc

SEQ ID NO: 776346 - DNA, 15 bp, Homo sapiens
tctgcaggggacccc

SEQ ID NO: 776347 - DNA, 15 bp, Homo sapiens
ctgcaggggaccccg

SEQ ID NO: 776348 - DNA, 15 bp, Homo sapiens
tgcaggggaccccgt

SEQ ID NO: 776349 - DNA, 15 bp, Homo sapiens
gcaggggaccccgtg

SEQ ID NO: 776350 - DNA, 15 bp, Homo sapiens
caggggaccccgtgt

SEQ ID NO: 776351 - DNA, 15 bp, Homo sapiens
aggggaccccgtgtc

SEQ ID NO: 776352 - DNA, 15 bp, Homo sapiens
ggggaccccgtgtca

SEQ ID NO: 776353 - DNA, 15 bp, Homo sapiens
gggaccccgtgtcag

SEQ ID NO: 776354 - DNA, 15 bp, Homo sapiens
ggaccccgtgtcagg

SEQ ID NO: 776355 - DNA, 15 bp, Homo sapiens
gaccccgtgtcaggc

SEQ ID NO: 776356 - DNA, 15 bp, Homo sapiens
accccgtgtcaggca

SEQ ID NO: 776357 - DNA, 15 bp, Homo sapiens
ccccgtgtcaggcaa

SEQ ID NO: 776358 - DNA, 15 bp, Homo sapiens
cccgtgtcaggcaaa

SEQ ID NO: 776359 - DNA, 15 bp, Homo sapiens
ccgtgtcaggcaaag

SEQ ID NO: 776360 - DNA, 15 bp, Homo sapiens
cgtgtcaggcaaaga

SEQ ID NO: 776361 - DNA, 15 bp, Homo sapiens
gtgtcaggcaaagaa

SEQ ID NO: 776362 - DNA, 15 bp, Homo sapiens
tgtcaggcaaagaaa

SEQ ID NO: 776363 - DNA, 15 bp, Homo sapiens
gtcaggcaaagaaag

SEQ ID NO: 776364 - DNA, 15 bp, Homo sapiens
tcaggcaaagaaagt

SEQ ID NO: 776365 - DNA, 15 bp, Homo sapiens
caggcaaagaaagta

SEQ ID NO: 776366 - DNA, 15 bp, Homo sapiens
aggcaaagaaagtag

SEQ ID NO: 776367 - DNA, 15 bp, Homo sapiens
ggcaaagaaagtaga

SEQ ID NO: 776368 - DNA, 15 bp, Homo sapiens
gcaaagaaagtagat

SEQ ID NO: 776369 - DNA, 15 bp, Homo sapiens
caaagaaagtagatt

SEQ ID NO: 776370 - DNA, 15 bp, Homo sapiens
aaagaaagtagattg

SEQ ID NO: 776371 - DNA, 15 bp, Homo sapiens
aagaaagtagattga

SEQ ID NO: 776372 - DNA, 15 bp, Homo sapiens
agaaagtagattgat

SEQ ID NO: 776373 - DNA, 15 bp, Homo sapiens
gaaagtagattgata

SEQ ID NO: 776374 - DNA, 15 bp, Homo sapiens
aaagtagattgatac

SEQ ID NO: 776375 - DNA, 15 bp, Homo sapiens
aagtagattgatacc

SEQ ID NO: 776376 - DNA, 15 bp, Homo sapiens
agtagattgatacct

SEQ ID NO: 776377 - DNA, 15 bp, Homo sapiens
gtagattgatacctc

SEQ ID NO: 776378 - DNA, 15 bp, Homo sapiens
tagattgatacctct

SEQ ID NO: 776379 - DNA, 15 bp, Homo sapiens
agattgatacctctc

SEQ ID NO: 776380 - DNA, 15 bp, Homo sapiens
gattgatacctctcg

SEQ ID NO: 776381 - DNA, 15 bp, Homo sapiens
attgatacctctcgt

SEQ ID NO: 776382 - DNA, 15 bp, Homo sapiens
ttgatacctctcgtg

SEQ ID NO: 776383 - DNA, 15 bp, Homo sapiens
tgatacctctcgtgg

SEQ ID NO: 776384 - DNA, 15 bp, Homo sapiens
gatacctctcgtgga

SEQ ID NO: 776385 - DNA, 15 bp, Homo sapiens
atacctctcgtggac

SEQ ID NO: 776386 - DNA, 15 bp, Homo sapiens
tacctctcgtggact

SEQ ID NO: 776387 - DNA, 15 bp, Homo sapiens
acctctcgtggactg

SEQ ID NO: 776388 - DNA, 15 bp, Homo sapiens
cctctcgtggactga

SEQ ID NO: 776389 - DNA, 15 bp, Homo sapiens
ctctcgtggactgat

SEQ ID NO: 776390 - DNA, 15 bp, Homo sapiens
tctcgtggactgatt

SEQ ID NO: 776391 - DNA, 15 bp, Homo sapiens
ctcgtggactgattg

SEQ ID NO: 776392 - DNA, 15 bp, Homo sapiens
tcgtggactgattgt

SEQ ID NO: 776393 - DNA, 15 bp, Homo sapiens
cgtggactgattgtg

SEQ ID NO: 776394 - DNA, 15 bp, Homo sapiens
gtggactgattgtgg

SEQ ID NO: 776395 - DNA, 15 bp, Homo sapiens
tggactgattgtgga

SEQ ID NO: 776396 - DNA, 15 bp, Homo sapiens
ggactgattgtggat

SEQ ID NO: 776397 - DNA, 15 bp, Homo sapiens
gactgattgtggatt

SEQ ID NO: 776398 - DNA, 15 bp, Homo sapiens
actgattgtggattt

SEQ ID NO: 776399 - DNA, 15 bp, Homo sapiens
ctgattgtggatttc

SEQ ID NO: 776400 - DNA, 15 bp, Homo sapiens
tgattgtggatttca

SEQ ID NO: 776401 - DNA, 15 bp, Homo sapiens
gattgtggatttcag

SEQ ID NO: 776402 - DNA, 15 bp, Homo sapiens
attgtggatttcagc

SEQ ID NO: 776403 - DNA, 15 bp, Homo sapiens
ttgtggatttcagca

SEQ ID NO: 776404 - DNA, 15 bp, Homo sapiens
tgtggatttcagcat

SEQ ID NO: 776405 - DNA, 15 bp, Homo sapiens
gtggatttcagcatt

SEQ ID NO: 776406 - DNA, 15 bp, Homo sapiens
tggatttcagcattt

SEQ ID NO: 776407 - DNA, 15 bp, Homo sapiens
ggatttcagcatttg

SEQ ID NO: 776408 - DNA, 15 bp, Homo sapiens
gatttcagcatttgg

SEQ ID NO: 776409 - DNA, 15 bp, Homo sapiens
atttcagcatttggg

SEQ ID NO: 776410 - DNA, 15 bp, Homo sapiens
tttcagcatttgggt

SEQ ID NO: 776411 - DNA, 15 bp, Homo sapiens
ttcagcatttgggta

SEQ ID NO: 776412 - DNA, 15 bp, Homo sapiens
tcagcatttgggtag

SEQ ID NO: 776413 - DNA, 15 bp, Homo sapiens
cagcatttgggtaga

SEQ ID NO: 776414 - DNA, 15 bp, Homo sapiens
agcatttgggtagaa

SEQ ID NO: 776415 - DNA, 15 bp, Homo sapiens
gcatttgggtagaac

SEQ ID NO: 776416 - DNA, 15 bp, Homo sapiens
catttgggtagaaca

SEQ ID NO: 776417 - DNA, 15 bp, Homo sapiens
atttgggtagaacag

SEQ ID NO: 776418 - DNA, 15 bp, Homo sapiens
tttgggtagaacaga

SEQ ID NO: 776419 - DNA, 15 bp, Homo sapiens
ttgggtagaacagat

SEQ ID NO: 776420 - DNA, 15 bp, Homo sapiens
tgggtagaacagatt

SEQ ID NO: 776421 - DNA, 15 bp, Homo sapiens
gggtagaacagatta

SEQ ID NO: 776422 - DNA, 15 bp, Homo sapiens
ggtagaacagattaa

SEQ ID NO: 776423 - DNA, 15 bp, Homo sapiens
gtagaacagattaat

SEQ ID NO: 776424 - DNA, 15 bp, Homo sapiens
tagaacagattaatg

SEQ ID NO: 776425 - DNA, 15 bp, Homo sapiens
agaacagattaatga

SEQ ID NO: 776426 - DNA, 15 bp, Homo sapiens
gaacagattaatgat

SEQ ID NO: 776427 - DNA, 15 bp, Homo sapiens
aacagattaatgata

SEQ ID NO: 776428 - DNA, 15 bp, Homo sapiens
acagattaatgataa

SEQ ID NO: 776429 - DNA, 15 bp, Homo sapiens
cagattaatgataag

SEQ ID NO: 776430 - DNA, 15 bp, Homo sapiens
agattaatgataaga

SEQ ID NO: 776431 - DNA, 15 bp, Homo sapiens
gattaatgataagat

SEQ ID NO: 776432 - DNA, 15 bp, Homo sapiens
attaatgataagata

SEQ ID NO: 776433 - DNA, 15 bp, Homo sapiens
ttaatgataagatat

SEQ ID NO: 776434 - DNA, 15 bp, Homo sapiens
taatgataagatatg

SEQ ID NO: 776435 - DNA, 15 bp, Homo sapiens
aatgataagatatgg

SEQ ID NO: 776436 - DNA, 15 bp, Homo sapiens
atgataagatatggc

SEQ ID NO: 776437 - DNA, 15 bp, Homo sapiens
tgataagatatggca

SEQ ID NO: 776438 - DNA, 15 bp, Homo sapiens
gataagatatggcag

SEQ ID NO: 776439 - DNA, 15 bp, Homo sapiens
ataagatatggcaga

SEQ ID NO: 776440 - DNA, 15 bp, Homo sapiens
taagatatggcagaa

SEQ ID NO: 776441 - DNA, 15 bp, Homo sapiens
aagatatggcagaag

SEQ ID NO: 776442 - DNA, 15 bp, Homo sapiens
agatatggcagaagt

SEQ ID NO: 776443 - DNA, 15 bp, Homo sapiens
gatatggcagaagtg

SEQ ID NO: 776444 - DNA, 15 bp, Homo sapiens
atatggcagaagtga

SEQ ID NO: 776445 - DNA, 15 bp, Homo sapiens
tatggcagaagtgaa

SEQ ID NO: 776446 - DNA, 15 bp, Homo sapiens
atggcagaagtgaag

SEQ ID NO: 776447 - DNA, 15 bp, Homo sapiens
tggcagaagtgaaga

SEQ ID NO: 776448 - DNA, 15 bp, Homo sapiens
ggcagaagtgaagaa

SEQ ID NO: 776449 - DNA, 15 bp, Homo sapiens
gcagaagtgaagaag

SEQ ID NO: 776450 - DNA, 15 bp, Homo sapiens
cagaagtgaagaagg

SEQ ID NO: 776451 - DNA, 15 bp, Homo sapiens
agaagtgaagaaggt

SEQ ID NO: 776452 - DNA, 15 bp, Homo sapiens
gaagtgaagaaggtg

SEQ ID NO: 776453 - DNA, 15 bp, Homo sapiens
aagtgaagaaggtga

SEQ ID NO: 776454 - DNA, 15 bp, Homo sapiens
agtgaagaaggtgaa

SEQ ID NO: 776455 - DNA, 15 bp, Homo sapiens
gtgaagaaggtgaat

SEQ ID NO: 776456 - DNA, 15 bp, Homo sapiens
tgaagaaggtgaatg

SEQ ID NO: 776457 - DNA, 15 bp, Homo sapiens
gaagaaggtgaatga

SEQ ID NO: 776458 - DNA, 15 bp, Homo sapiens
aagaaggtgaatgag

SEQ ID NO: 776459 - DNA, 15 bp, Homo sapiens
agaaggtgaatgagc

SEQ ID NO: 776460 - DNA, 15 bp, Homo sapiens
gaaggtgaatgagct

SEQ ID NO: 776461 - DNA, 15 bp, Homo sapiens
aaggtgaatgagcta

SEQ ID NO: 776462 - DNA, 15 bp, Homo sapiens
aggtgaatgagctaa

SEQ ID NO: 776463 - DNA, 15 bp, Homo sapiens
ggtgaatgagctaat

SEQ ID NO: 776464 - DNA, 15 bp, Homo sapiens
gtgaatgagctaatg

SEQ ID NO: 776465 - DNA, 15 bp, Homo sapiens
tgaatgagctaatgg

SEQ ID NO: 776466 - DNA, 15 bp, Homo sapiens
gaatgagctaatggc

SEQ ID NO: 776467 - DNA, 15 bp, Homo sapiens
aatgagctaatggcg

SEQ ID NO: 776468 - DNA, 15 bp, Homo sapiens
atgagctaatggcgg

SEQ ID NO: 776469 - DNA, 15 bp, Homo sapiens
tgagctaatggcgga

SEQ ID NO: 776470 - DNA, 15 bp, Homo sapiens
gagctaatggcggat

SEQ ID NO: 776471 - DNA, 15 bp, Homo sapiens
agctaatggcggata

SEQ ID NO: 776472 - DNA, 15 bp, Homo sapiens
gctaatggcggataa

SEQ ID NO: 776473 - DNA, 15 bp, Homo sapiens
ctaatggcggataaa

SEQ ID NO: 776474 - DNA, 15 bp, Homo sapiens
taatggcggataaag

SEQ ID NO: 776475 - DNA, 15 bp, Homo sapiens
aatggcggataaagg

SEQ ID NO: 776476 - DNA, 15 bp, Homo sapiens
atggcggataaaggg

SEQ ID NO: 776477 - DNA, 15 bp, Homo sapiens
tggcggataaaggga

SEQ ID NO: 776478 - DNA, 15 bp, Homo sapiens
ggcggataaagggac

SEQ ID NO: 776479 - DNA, 15 bp, Homo sapiens
gcggataaagggaca

SEQ ID NO: 776480 - DNA, 15 bp, Homo sapiens
cggataaagggacaa

SEQ ID NO: 776481 - DNA, 15 bp, Homo sapiens
ggataaagggacaaa

SEQ ID NO: 776482 - DNA, 15 bp, Homo sapiens
gataaagggacaaaa

SEQ ID NO: 776483 - DNA, 15 bp, Homo sapiens
ataaagggacaaaac

SEQ ID NO: 776484 - DNA, 15 bp, Homo sapiens
taaagggacaaaact

SEQ ID NO: 776485 - DNA, 15 bp, Homo sapiens
aaagggacaaaactg

SEQ ID NO: 776486 - DNA, 15 bp, Homo sapiens
aagggacaaaactgc

SEQ ID NO: 776487 - DNA, 15 bp, Homo sapiens
agggacaaaactgcc

SEQ ID NO: 776488 - DNA, 15 bp, Homo sapiens
gggacaaaactgcca

SEQ ID NO: 776489 - DNA, 15 bp, Homo sapiens
ggacaaaactgccat

SEQ ID NO: 776490 - DNA, 15 bp, Homo sapiens
gacaaaactgccatt

SEQ ID NO: 776491 - DNA, 15 bp, Homo sapiens
acaaaactgccattt

SEQ ID NO: 776492 - DNA, 15 bp, Homo sapiens
caaaactgccatttt

SEQ ID NO: 776493 - DNA, 15 bp, Homo sapiens
aaaactgccattttg

SEQ ID NO: 776494 - DNA, 15 bp, Homo sapiens
aaactgccattttgg

SEQ ID NO: 776495 - DNA, 15 bp, Homo sapiens
aactgccattttggc

SEQ ID NO: 776496 - DNA, 15 bp, Homo sapiens
actgccattttggct

SEQ ID NO: 776497 - DNA, 15 bp, Homo sapiens
ctgccattttggctt

SEQ ID NO: 776498 - DNA, 15 bp, Homo sapiens
tgccattttggcttt

SEQ ID NO: 776499 - DNA, 15 bp, Homo sapiens
gccattttggctttt

SEQ ID NO: 776500 - DNA, 15 bp, Homo sapiens
ccattttggcttttt

SEQ ID NO: 776501 - DNA, 15 bp, Homo sapiens
cattttggctttttc

SEQ ID NO: 776502 - DNA, 15 bp, Homo sapiens
attttggctttttca

SEQ ID NO: 776503 - DNA, 15 bp, Homo sapiens
ttttggctttttcag

SEQ ID NO: 776504 - DNA, 15 bp, Homo sapiens
tttggctttttcagc

SEQ ID NO: 776505 - DNA, 15 bp, Homo sapiens
ttggctttttcagct

SEQ ID NO: 776506 - DNA, 15 bp, Homo sapiens
tggctttttcagctt

SEQ ID NO: 776507 - DNA, 15 bp, Homo sapiens
ggctttttcagcttg

SEQ ID NO: 776508 - DNA, 15 bp, Homo sapiens
gctttttcagcttgc

SEQ ID NO: 776509 - DNA, 15 bp, Homo sapiens
ctttttcagcttgca

SEQ ID NO: 776510 - DNA, 15 bp, Homo sapiens
tttttcagcttgcat

SEQ ID NO: 776511 - DNA, 15 bp, Homo sapiens
ttttcagcttgcatt

SEQ ID NO: 776512 - DNA, 15 bp, Homo sapiens
tttcagcttgcattt

SEQ ID NO: 776513 - DNA, 15 bp, Homo sapiens
ttcagcttgcatttc

SEQ ID NO: 776514 - DNA, 15 bp, Homo sapiens
tcagcttgcatttca

SEQ ID NO: 776515 - DNA, 15 bp, Homo sapiens
cagcttgcatttcag

SEQ ID NO: 776516 - DNA, 15 bp, Homo sapiens
agcttgcatttcagc

SEQ ID NO: 776517 - DNA, 15 bp, Homo sapiens
gcttgcatttcagca

SEQ ID NO: 776518 - DNA, 15 bp, Homo sapiens
cttgcatttcagcac

SEQ ID NO: 776519 - DNA, 15 bp, Homo sapiens
ttgcatttcagcaca

SEQ ID NO: 776520 - DNA, 15 bp, Homo sapiens
tgcatttcagcacaa

SEQ ID NO: 776521 - DNA, 15 bp, Homo sapiens
gcatttcagcacaaa

SEQ ID NO: 776522 - DNA, 15 bp, Homo sapiens
catttcagcacaaat

SEQ ID NO: 776523 - DNA, 15 bp, Homo sapiens
atttcagcacaaatt

SEQ ID NO: 776524 - DNA, 15 bp, Homo sapiens
tttcagcacaaattg

SEQ ID NO: 776525 - DNA, 15 bp, Homo sapiens
ttcagcacaaattga

SEQ ID NO: 776526 - DNA, 15 bp, Homo sapiens
tcagcacaaattgag

SEQ ID NO: 776527 - DNA, 15 bp, Homo sapiens
cagcacaaattgaga

SEQ ID NO: 776528 - DNA, 15 bp, Homo sapiens
agcacaaattgagag

SEQ ID NO: 776529 - DNA, 15 bp, Homo sapiens
gcacaaattgagaga

SEQ ID NO: 776530 - DNA, 15 bp, Homo sapiens
cacaaattgagagac

SEQ ID NO: 776531 - DNA, 15 bp, Homo sapiens
acaaattgagagact

SEQ ID NO: 776532 - DNA, 15 bp, Homo sapiens
caaattgagagactt

SEQ ID NO: 776533 - DNA, 15 bp, Homo sapiens
aaattgagagacttg

SEQ ID NO: 776534 - DNA, 15 bp, Homo sapiens
aattgagagacttga

SEQ ID NO: 776535 - DNA, 15 bp, Homo sapiens
attgagagacttgaa

SEQ ID NO: 776536 - DNA, 15 bp, Homo sapiens
ttgagagacttgaaa

SEQ ID NO: 776537 - DNA, 15 bp, Homo sapiens
tgagagacttgaaag

SEQ ID NO: 776538 - DNA, 15 bp, Homo sapiens
gagagacttgaaagt

SEQ ID NO: 776539 - DNA, 15 bp, Homo sapiens
agagacttgaaagtc

SEQ ID NO: 776540 - DNA, 15 bp, Homo sapiens
gagacttgaaagtca

SEQ ID NO: 776541 - DNA, 15 bp, Homo sapiens
agacttgaaagtcat

SEQ ID NO: 776542 - DNA, 15 bp, Homo sapiens
gacttgaaagtcata

SEQ ID NO: 776543 - DNA, 15 bp, Homo sapiens
acttgaaagtcatat

SEQ ID NO: 776544 - DNA, 15 bp, Homo sapiens
cttgaaagtcatata

SEQ ID NO: 776545 - DNA, 15 bp, Homo sapiens
ttgaaagtcatatag

SEQ ID NO: 776546 - DNA, 15 bp, Homo sapiens
tgaaagtcatatagt

SEQ ID NO: 776547 - DNA, 15 bp, Homo sapiens
gaaagtcatatagtt

SEQ ID NO: 776548 - DNA, 15 bp, Homo sapiens
aaagtcatatagttg

SEQ ID NO: 776549 - DNA, 15 bp, Homo sapiens
aagtcatatagttgc

SEQ ID NO: 776550 - DNA, 15 bp, Homo sapiens
agtcatatagttgca

SEQ ID NO: 776551 - DNA, 15 bp, Homo sapiens
gtcatatagttgcag

SEQ ID NO: 776552 - DNA, 15 bp, Homo sapiens
tcatatagttgcagt

SEQ ID NO: 776553 - DNA, 15 bp, Homo sapiens
catatagttgcagtg

SEQ ID NO: 776554 - DNA, 15 bp, Homo sapiens
atatagttgcagtgc

SEQ ID NO: 776555 - DNA, 15 bp, Homo sapiens
tatagttgcagtgct

SEQ ID NO: 776556 - DNA, 15 bp, Homo sapiens
atagttgcagtgctg

SEQ ID NO: 776557 - DNA, 15 bp, Homo sapiens
tagttgcagtgctga

SEQ ID NO: 776558 - DNA, 15 bp, Homo sapiens
agttgcagtgctgag

SEQ ID NO: 776559 - DNA, 15 bp, Homo sapiens
gttgcagtgctgagg

SEQ ID NO: 776560 - DNA, 15 bp, Homo sapiens
ttgcagtgctgaggc

SEQ ID NO: 776561 - DNA, 15 bp, Homo sapiens
tgcagtgctgaggca

SEQ ID NO: 776562 - DNA, 15 bp, Homo sapiens
gcagtgctgaggcag

SEQ ID NO: 776563 - DNA, 15 bp, Homo sapiens
cagtgctgaggcagg

SEQ ID NO: 776564 - DNA, 15 bp, Homo sapiens
agtgctgaggcagga

SEQ ID NO: 776565 - DNA, 15 bp, Homo sapiens
gtgctgaggcaggaa

SEQ ID NO: 776566 - DNA, 15 bp, Homo sapiens
tgctgaggcaggaat

SEQ ID NO: 776567 - DNA, 15 bp, Homo sapiens
gctgaggcaggaatg

SEQ ID NO: 776568 - DNA, 15 bp, Homo sapiens
ctgaggcaggaatgc

SEQ ID NO: 776569 - DNA, 15 bp, Homo sapiens
tgaggcaggaatgct

SEQ ID NO: 776570 - DNA, 15 bp, Homo sapiens
gaggcaggaatgctc

SEQ ID NO: 776571 - DNA, 15 bp, Homo sapiens
aggcaggaatgctca

SEQ ID NO: 776572 - DNA, 15 bp, Homo sapiens
ggcaggaatgctcag

SEQ ID NO: 776573 - DNA, 15 bp, Homo sapiens
gcaggaatgctcaga

SEQ ID NO: 776574 - DNA, 15 bp, Homo sapiens
caggaatgctcagaa

SEQ ID NO: 776575 - DNA, 15 bp, Homo sapiens
aggaatgctcagaag

SEQ ID NO: 776576 - DNA, 15 bp, Homo sapiens
ggaatgctcagaagc

SEQ ID NO: 776577 - DNA, 15 bp, Homo sapiens
gaatgctcagaagca

SEQ ID NO: 776578 - DNA, 15 bp, Homo sapiens
aatgctcagaagcaa

SEQ ID NO: 776579 - DNA, 15 bp, Homo sapiens
atgctcagaagcaat

SEQ ID NO: 776580 - DNA, 15 bp, Homo sapiens
tgctcagaagcaatc

SEQ ID NO: 776581 - DNA, 15 bp, Homo sapiens
gctcagaagcaatcc

SEQ ID NO: 776582 - DNA, 15 bp, Homo sapiens
ctcagaagcaatcca

SEQ ID NO: 776583 - DNA, 15 bp, Homo sapiens
tcagaagcaatccac

SEQ ID NO: 776584 - DNA, 15 bp, Homo sapiens
cagaagcaatccact

SEQ ID NO: 776585 - DNA, 15 bp, Homo sapiens
agaagcaatccactt

SEQ ID NO: 776586 - DNA, 15 bp, Homo sapiens
gaagcaatccacttt

SEQ ID NO: 776587 - DNA, 15 bp, Homo sapiens
aagcaatccacttta

SEQ ID NO: 776588 - DNA, 15 bp, Homo sapiens
agcaatccactttaa

SEQ ID NO: 776589 - DNA, 15 bp, Homo sapiens
gcaatccactttaaa

SEQ ID NO: 776590 - DNA, 15 bp, Homo sapiens
caatccactttaaat

SEQ ID NO: 776591 - DNA, 15 bp, Homo sapiens
aatccactttaaatc

SEQ ID NO: 776592 - DNA, 15 bp, Homo sapiens
atccactttaaatca

SEQ ID NO: 776593 - DNA, 15 bp, Homo sapiens
tccactttaaatcag

SEQ ID NO: 776594 - DNA, 15 bp, Homo sapiens
ccactttaaatcagt

SEQ ID NO: 776595 - DNA, 15 bp, Homo sapiens
cactttaaatcagta

SEQ ID NO: 776596 - DNA, 15 bp, Homo sapiens
actttaaatcagtaa

SEQ ID NO: 776597 - DNA, 15 bp, Homo sapiens
ctttaaatcagtaaa

SEQ ID NO: 776598 - DNA, 15 bp, Homo sapiens
tttaaatcagtaaag

SEQ ID NO: 776599 - DNA, 15 bp, Homo sapiens
ttaaatcagtaaaga

SEQ ID NO: 776600 - DNA, 15 bp, Homo sapiens
taaatcagtaaagac

SEQ ID NO: 776601 - DNA, 15 bp, Homo sapiens
aaatcagtaaagacc

SEQ ID NO: 776602 - DNA, 15 bp, Homo sapiens
aatcagtaaagacct

SEQ ID NO: 776603 - DNA, 15 bp, Homo sapiens
atcagtaaagaccta

SEQ ID NO: 776604 - DNA, 15 bp, Homo sapiens
tcagtaaagacctaa

SEQ ID NO: 776605 - DNA, 15 bp, Homo sapiens
cagtaaagacctaag

SEQ ID NO: 776606 - DNA, 15 bp, Homo sapiens
agtaaagacctaagg

SEQ ID NO: 776607 - DNA, 15 bp, Homo sapiens
gtaaagacctaagga

SEQ ID NO: 776608 - DNA, 15 bp, Homo sapiens
taaagacctaaggac

SEQ ID NO: 776609 - DNA, 15 bp, Homo sapiens
aaagacctaaggact

SEQ ID NO: 776610 - DNA, 15 bp, Homo sapiens
aagacctaaggacta

SEQ ID NO: 776611 - DNA, 15 bp, Homo sapiens
agacctaaggactag

SEQ ID NO: 776612 - DNA, 15 bp, Homo sapiens
gacctaaggactagg

SEQ ID NO: 776613 - DNA, 15 bp, Homo sapiens
acctaaggactaggc

SEQ ID NO: 776614 - DNA, 15 bp, Homo sapiens
cctaaggactaggca

SEQ ID NO: 776615 - DNA, 15 bp, Homo sapiens
ctaaggactaggcat

SEQ ID NO: 776616 - DNA, 15 bp, Homo sapiens
taaggactaggcatt

SEQ ID NO: 776617 - DNA, 15 bp, Homo sapiens
aaggactaggcattc

SEQ ID NO: 776618 - DNA, 15 bp, Homo sapiens
aggactaggcattca

SEQ ID NO: 776619 - DNA, 15 bp, Homo sapiens
ggactaggcattcag

SEQ ID NO: 776620 - DNA, 15 bp, Homo sapiens
gactaggcattcaga

SEQ ID NO: 776621 - DNA, 15 bp, Homo sapiens
actaggcattcagaa

SEQ ID NO: 776622 - DNA, 15 bp, Homo sapiens
ctaggcattcagaaa

SEQ ID NO: 776623 - DNA, 15 bp, Homo sapiens
taggcattcagaaaa

SEQ ID NO: 776624 - DNA, 15 bp, Homo sapiens
aggcattcagaaaac

SEQ ID NO: 776625 - DNA, 15 bp, Homo sapiens
ggcattcagaaaact

SEQ ID NO: 776626 - DNA, 15 bp, Homo sapiens
gcattcagaaaactt

SEQ ID NO: 776627 - DNA, 15 bp, Homo sapiens
cattcagaaaacttg

SEQ ID NO: 776628 - DNA, 15 bp, Homo sapiens
attcagaaaacttgt

SEQ ID NO: 776629 - DNA, 15 bp, Homo sapiens
ttcagaaaacttgtg

SEQ ID NO: 776630 - DNA, 15 bp, Homo sapiens
tcagaaaacttgtga

SEQ ID NO: 776631 - DNA, 15 bp, Homo sapiens
cagaaaacttgtgac

SEQ ID NO: 776632 - DNA, 15 bp, Homo sapiens
agaaaacttgtgact

SEQ ID NO: 776633 - DNA, 15 bp, Homo sapiens
gaaaacttgtgactt

SEQ ID NO: 776634 - DNA, 15 bp, Homo sapiens
aaaacttgtgactta

SEQ ID NO: 776635 - DNA, 15 bp, Homo sapiens
aaacttgtgacttac

SEQ ID NO: 776636 - DNA, 15 bp, Homo sapiens
aacttgtgacttacc

SEQ ID NO: 776637 - DNA, 15 bp, Homo sapiens
acttgtgacttacct

SEQ ID NO: 776638 - DNA, 15 bp, Homo sapiens
cttgtgacttaccta

SEQ ID NO: 776639 - DNA, 15 bp, Homo sapiens
ttgtgacttacctac

SEQ ID NO: 776640 - DNA, 15 bp, Homo sapiens
tgtgacttacctacg

SEQ ID NO: 776641 - DNA, 15 bp, Homo sapiens
gtgacttacctacga

SEQ ID NO: 776642 - DNA, 15 bp, Homo sapiens
tgacttacctacgaa

SEQ ID NO: 776643 - DNA, 15 bp, Homo sapiens
gacttacctacgaaa

SEQ ID NO: 776644 - DNA, 15 bp, Homo sapiens
acttacctacgaaac

SEQ ID NO: 776645 - DNA, 15 bp, Homo sapiens
cttacctacgaaact

SEQ ID NO: 776646 - DNA, 15 bp, Homo sapiens
ttacctacgaaactt

SEQ ID NO: 776647 - DNA, 15 bp, Homo sapiens
tacctacgaaacttt

SEQ ID NO: 776648 - DNA, 15 bp, Homo sapiens
acctacgaaactttg

SEQ ID NO: 776649 - DNA, 15 bp, Homo sapiens
cctacgaaactttgc

SEQ ID NO: 776650 - DNA, 15 bp, Homo sapiens
ctacgaaactttgct

SEQ ID NO: 776651 - DNA, 15 bp, Homo sapiens
tacgaaactttgcta

SEQ ID NO: 776652 - DNA, 15 bp, Homo sapiens
acgaaactttgctag

SEQ ID NO: 776653 - DNA, 15 bp, Homo sapiens
cgaaactttgctagg

SEQ ID NO: 776654 - DNA, 15 bp, Homo sapiens
gaaactttgctaggt

SEQ ID NO: 776655 - DNA, 15 bp, Homo sapiens
aaactttgctaggta

SEQ ID NO: 776656 - DNA, 15 bp, Homo sapiens
aactttgctaggtaa

SEQ ID NO: 776657 - DNA, 15 bp, Homo sapiens
actttgctaggtaag

SEQ ID NO: 776658 - DNA, 15 bp, Homo sapiens
ctttgctaggtaagg

SEQ ID NO: 776659 - DNA, 15 bp, Homo sapiens
tttgctaggtaagga

SEQ ID NO: 776660 - DNA, 15 bp, Homo sapiens
ttgctaggtaaggat

SEQ ID NO: 776661 - DNA, 15 bp, Homo sapiens
tgctaggtaaggatg

SEQ ID NO: 776662 - DNA, 15 bp, Homo sapiens
gctaggtaaggatgg

SEQ ID NO: 776663 - DNA, 15 bp, Homo sapiens
ctaggtaaggatgga

SEQ ID NO: 776664 - DNA, 15 bp, Homo sapiens
taggtaaggatggag

SEQ ID NO: 776665 - DNA, 15 bp, Homo sapiens
aggtaaggatggagt

SEQ ID NO: 776666 - DNA, 15 bp, Homo sapiens
ggtaaggatggagtg

SEQ ID NO: 776667 - DNA, 15 bp, Homo sapiens
gtaaggatggagtga

SEQ ID NO: 776668 - DNA, 15 bp, Homo sapiens
taaggatggagtgaa

SEQ ID NO: 776669 - DNA, 15 bp, Homo sapiens
aaggatggagtgaag

SEQ ID NO: 776670 - DNA, 15 bp, Homo sapiens
aggatggagtgaaga

SEQ ID NO: 776671 - DNA, 15 bp, Homo sapiens
ggatggagtgaagac

SEQ ID NO: 776672 - DNA, 15 bp, Homo sapiens
gatggagtgaagact

SEQ ID NO: 776673 - DNA, 15 bp, Homo sapiens
atggagtgaagacta

SEQ ID NO: 776674 - DNA, 15 bp, Homo sapiens
tggagtgaagactag

SEQ ID NO: 776675 - DNA, 15 bp, Homo sapiens
ggagtgaagactaga

SEQ ID NO: 776676 - DNA, 15 bp, Homo sapiens
gagtgaagactagaa

SEQ ID NO: 776677 - DNA, 15 bp, Homo sapiens
agtgaagactagaat

SEQ ID NO: 776678 - DNA, 15 bp, Homo sapiens
gtgaagactagaatt

SEQ ID NO: 776679 - DNA, 15 bp, Homo sapiens
tgaagactagaattt

SEQ ID NO: 776680 - DNA, 15 bp, Homo sapiens
gaagactagaattta

SEQ ID NO: 776681 - DNA, 15 bp, Homo sapiens
aagactagaatttaa

SEQ ID NO: 776682 - DNA, 15 bp, Homo sapiens
agactagaatttaaa

SEQ ID NO: 776683 - DNA, 15 bp, Homo sapiens
gactagaatttaaat

SEQ ID NO: 776684 - DNA, 15 bp, Homo sapiens
actagaatttaaatt

SEQ ID NO: 776685 - DNA, 15 bp, Homo sapiens
ctagaatttaaattt

SEQ ID NO: 776686 - DNA, 15 bp, Homo sapiens
tagaatttaaatttc

SEQ ID NO: 776687 - DNA, 15 bp, Homo sapiens
agaatttaaatttcc

SEQ ID NO: 776688 - DNA, 15 bp, Homo sapiens
gaatttaaatttcca

SEQ ID NO: 776689 - DNA, 15 bp, Homo sapiens
aatttaaatttccac

SEQ ID NO: 776690 - DNA, 15 bp, Homo sapiens
atttaaatttccacc

SEQ ID NO: 776691 - DNA, 15 bp, Homo sapiens
tttaaatttccacca

SEQ ID NO: 776692 - DNA, 15 bp, Homo sapiens
ttaaatttccaccac

SEQ ID NO: 776693 - DNA, 15 bp, Homo sapiens
taaatttccaccact

SEQ ID NO: 776694 - DNA, 15 bp, Homo sapiens
aaatttccaccactc

SEQ ID NO: 776695 - DNA, 15 bp, Homo sapiens
aatttccaccactct

SEQ ID NO: 776696 - DNA, 15 bp, Homo sapiens
atttccaccactctg

SEQ ID NO: 776697 - DNA, 15 bp, Homo sapiens
tttccaccactctgc

SEQ ID NO: 776698 - DNA, 15 bp, Homo sapiens
ttccaccactctgcc

SEQ ID NO: 776699 - DNA, 15 bp, Homo sapiens
tccaccactctgccc

SEQ ID NO: 776700 - DNA, 15 bp, Homo sapiens
ccaccactctgccct

SEQ ID NO: 776701 - DNA, 15 bp, Homo sapiens
caccactctgcccta

SEQ ID NO: 776702 - DNA, 15 bp, Homo sapiens
accactctgccctag

SEQ ID NO: 776703 - DNA, 15 bp, Homo sapiens
ccactctgccctagc

SEQ ID NO: 776704 - DNA, 15 bp, Homo sapiens
cactctgccctagca

SEQ ID NO: 776705 - DNA, 15 bp, Homo sapiens
actctgccctagcat

SEQ ID NO: 776706 - DNA, 15 bp, Homo sapiens
ctctgccctagcatc

SEQ ID NO: 776707 - DNA, 15 bp, Homo sapiens
tctgccctagcatct

SEQ ID NO: 776708 - DNA, 15 bp, Homo sapiens
ctgccctagcatctt

SEQ ID NO: 776709 - DNA, 15 bp, Homo sapiens
tgccctagcatcttt

SEQ ID NO: 776710 - DNA, 15 bp, Homo sapiens
gccctagcatctttc

SEQ ID NO: 776711 - DNA, 15 bp, Homo sapiens
ccctagcatctttct

SEQ ID NO: 776712 - DNA, 15 bp, Homo sapiens
cctagcatctttctg

SEQ ID NO: 776713 - DNA, 15 bp, Homo sapiens
ctagcatctttctgc

SEQ ID NO: 776714 - DNA, 15 bp, Homo sapiens
tagcatctttctgcc

SEQ ID NO: 776715 - DNA, 15 bp, Homo sapiens
agcatctttctgcct

SEQ ID NO: 776716 - DNA, 15 bp, Homo sapiens
gcatctttctgcctc

SEQ ID NO: 776717 - DNA, 15 bp, Homo sapiens
catctttctgcctct

SEQ ID NO: 776718 - DNA, 15 bp, Homo sapiens
atctttctgcctctc

SEQ ID NO: 776719 - DNA, 15 bp, Homo sapiens
tctttctgcctctca

SEQ ID NO: 776720 - DNA, 15 bp, Homo sapiens
ctttctgcctctcat

SEQ ID NO: 776721 - DNA, 15 bp, Homo sapiens
tttctgcctctcata

SEQ ID NO: 776722 - DNA, 15 bp, Homo sapiens
ttctgcctctcataa

SEQ ID NO: 776723 - DNA, 15 bp, Homo sapiens
tctgcctctcataag

SEQ ID NO: 776724 - DNA, 15 bp, Homo sapiens
ctgcctctcataagg

SEQ ID NO: 776725 - DNA, 15 bp, Homo sapiens
tgcctctcataaggt

SEQ ID NO: 776726 - DNA, 15 bp, Homo sapiens
gcctctcataaggtt

SEQ ID NO: 776727 - DNA, 15 bp, Homo sapiens
cctctcataaggttt

SEQ ID NO: 776728 - DNA, 15 bp, Homo sapiens
ctctcataaggtttg

SEQ ID NO: 776729 - DNA, 15 bp, Homo sapiens
tctcataaggtttgc

SEQ ID NO: 776730 - DNA, 15 bp, Homo sapiens
ctcataaggtttgcc

SEQ ID NO: 776731 - DNA, 15 bp, Homo sapiens
tcataaggtttgcct

SEQ ID NO: 776732 - DNA, 15 bp, Homo sapiens
cataaggtttgcctg

SEQ ID NO: 776733 - DNA, 15 bp, Homo sapiens
ataaggtttgcctgg

SEQ ID NO: 776734 - DNA, 15 bp, Homo sapiens
taaggtttgcctggg

SEQ ID NO: 776735 - DNA, 15 bp, Homo sapiens
aaggtttgcctggga

SEQ ID NO: 776736 - DNA, 15 bp, Homo sapiens
aggtttgcctgggaa

SEQ ID NO: 776737 - DNA, 15 bp, Homo sapiens
ggtttgcctgggaag

SEQ ID NO: 776738 - DNA, 15 bp, Homo sapiens
gtttgcctgggaagg

SEQ ID NO: 776739 - DNA, 15 bp, Homo sapiens
tttgcctgggaaggt

SEQ ID NO: 776740 - DNA, 15 bp, Homo sapiens
ttgcctgggaaggtg

SEQ ID NO: 776741 - DNA, 15 bp, Homo sapiens
tgcctgggaaggtgg

SEQ ID NO: 776742 - DNA, 15 bp, Homo sapiens
gcctgggaaggtgga

SEQ ID NO: 776743 - DNA, 15 bp, Homo sapiens
cctgggaaggtggat

SEQ ID NO: 776744 - DNA, 15 bp, Homo sapiens
ctgggaaggtggata

SEQ ID NO: 776745 - DNA, 15 bp, Homo sapiens
tgggaaggtggatag

SEQ ID NO: 776746 - DNA, 15 bp, Homo sapiens
gggaaggtggatagc

SEQ ID NO: 776747 - DNA, 15 bp, Homo sapiens
ggaaggtggatagca

SEQ ID NO: 776748 - DNA, 15 bp, Homo sapiens
gaaggtggatagcag

SEQ ID NO: 776749 - DNA, 15 bp, Homo sapiens
aaggtggatagcagc

SEQ ID NO: 776750 - DNA, 15 bp, Homo sapiens
aggtggatagcagca

SEQ ID NO: 776751 - DNA, 15 bp, Homo sapiens
ggtggatagcagcag

SEQ ID NO: 776752 - DNA, 15 bp, Homo sapiens
gtggatagcagcagg

SEQ ID NO: 776753 - DNA, 15 bp, Homo sapiens
tggatagcagcaggg

SEQ ID NO: 776754 - DNA, 15 bp, Homo sapiens
ggatagcagcagggt

SEQ ID NO: 776755 - DNA, 15 bp, Homo sapiens
gatagcagcagggtg

SEQ ID NO: 776756 - DNA, 15 bp, Homo sapiens
atagcagcagggtgt

SEQ ID NO: 776757 - DNA, 15 bp, Homo sapiens
tagcagcagggtgta

SEQ ID NO: 776758 - DNA, 15 bp, Homo sapiens
agcagcagggtgtag

SEQ ID NO: 776759 - DNA, 15 bp, Homo sapiens
gcagcagggtgtagc

SEQ ID NO: 776760 - DNA, 15 bp, Homo sapiens
cagcagggtgtagcg

SEQ ID NO: 776761 - DNA, 15 bp, Homo sapiens
agcagggtgtagcgg

SEQ ID NO: 776762 - DNA, 15 bp, Homo sapiens
gcagggtgtagcggt

SEQ ID NO: 776763 - DNA, 15 bp, Homo sapiens
cagggtgtagcggtt

SEQ ID NO: 776764 - DNA, 15 bp, Homo sapiens
agggtgtagcggttg

SEQ ID NO: 776765 - DNA, 15 bp, Homo sapiens
gggtgtagcggttga

SEQ ID NO: 776766 - DNA, 15 bp, Homo sapiens
ggtgtagcggttgat

SEQ ID NO: 776767 - DNA, 15 bp, Homo sapiens
gtgtagcggttgata

SEQ ID NO: 776768 - DNA, 15 bp, Homo sapiens
tgtagcggttgatat

SEQ ID NO: 776769 - DNA, 15 bp, Homo sapiens
gtagcggttgatatt

SEQ ID NO: 776770 - DNA, 15 bp, Homo sapiens
tagcggttgatattt

SEQ ID NO: 776771 - DNA, 15 bp, Homo sapiens
agcggttgatatttt

SEQ ID NO: 776772 - DNA, 15 bp, Homo sapiens
gcggttgatattttc

SEQ ID NO: 776773 - DNA, 15 bp, Homo sapiens
cggttgatattttca

SEQ ID NO: 776774 - DNA, 15 bp, Homo sapiens
ggttgatattttcat

SEQ ID NO: 776775 - DNA, 15 bp, Homo sapiens
gttgatattttcatt

SEQ ID NO: 776776 - DNA, 15 bp, Homo sapiens
ttgatattttcattt

SEQ ID NO: 776777 - DNA, 15 bp, Homo sapiens
tgatattttcatttt

SEQ ID NO: 776778 - DNA, 15 bp, Homo sapiens
gatattttcatttta

SEQ ID NO: 776779 - DNA, 15 bp, Homo sapiens
atattttcattttaa

SEQ ID NO: 776780 - DNA, 15 bp, Homo sapiens
tattttcattttaac

SEQ ID NO: 776781 - DNA, 15 bp, Homo sapiens
attttcattttaaca

SEQ ID NO: 776782 - DNA, 15 bp, Homo sapiens
ttttcattttaacag

SEQ ID NO: 776783 - DNA, 15 bp, Homo sapiens
tttcattttaacaga

SEQ ID NO: 776784 - DNA, 15 bp, Homo sapiens
ttcattttaacagac

SEQ ID NO: 776785 - DNA, 15 bp, Homo sapiens
tcattttaacagaca

SEQ ID NO: 776786 - DNA, 15 bp, Homo sapiens
cattttaacagacac

SEQ ID NO: 776787 - DNA, 15 bp, Homo sapiens
attttaacagacaca

SEQ ID NO: 776788 - DNA, 15 bp, Homo sapiens
ttttaacagacacac

SEQ ID NO: 776789 - DNA, 15 bp, Homo sapiens
tttaacagacacaca

SEQ ID NO: 776790 - DNA, 15 bp, Homo sapiens
ttaacagacacacag

SEQ ID NO: 776791 - DNA, 15 bp, Homo sapiens
taacagacacacaga

SEQ ID NO: 776792 - DNA, 15 bp, Homo sapiens
aacagacacacagaa

SEQ ID NO: 776793 - DNA, 15 bp, Homo sapiens
acagacacacagaag

SEQ ID NO: 776794 - DNA, 15 bp, Homo sapiens
cagacacacagaagt

SEQ ID NO: 776795 - DNA, 15 bp, Homo sapiens
agacacacagaagtg

SEQ ID NO: 776796 - DNA, 15 bp, Homo sapiens
gacacacagaagtgg

SEQ ID NO: 776797 - DNA, 15 bp, Homo sapiens
acacacagaagtggg

SEQ ID NO: 776798 - DNA, 15 bp, Homo sapiens
cacacagaagtgggt

SEQ ID NO: 776799 - DNA, 15 bp, Homo sapiens
acacagaagtgggtc

SEQ ID NO: 776800 - DNA, 15 bp, Homo sapiens
cacagaagtgggtca

SEQ ID NO: 776801 - DNA, 15 bp, Homo sapiens
acagaagtgggtcag

SEQ ID NO: 776802 - DNA, 15 bp, Homo sapiens
cagaagtgggtcagg

SEQ ID NO: 776803 - DNA, 15 bp, Homo sapiens
agaagtgggtcaggt

SEQ ID NO: 776804 - DNA, 15 bp, Homo sapiens
gaagtgggtcaggta

SEQ ID NO: 776805 - DNA, 15 bp, Homo sapiens
aagtgggtcaggtag

SEQ ID NO: 776806 - DNA, 15 bp, Homo sapiens
agtgggtcaggtaga

SEQ ID NO: 776807 - DNA, 15 bp, Homo sapiens
gtgggtcaggtagat

SEQ ID NO: 776808 - DNA, 15 bp, Homo sapiens
tgggtcaggtagata

SEQ ID NO: 776809 - DNA, 15 bp, Homo sapiens
gggtcaggtagataa

SEQ ID NO: 776810 - DNA, 15 bp, Homo sapiens
ggtcaggtagataag

SEQ ID NO: 776811 - DNA, 15 bp, Homo sapiens
gtcaggtagataaga

SEQ ID NO: 776812 - DNA, 15 bp, Homo sapiens
tcaggtagataagaa

SEQ ID NO: 776813 - DNA, 15 bp, Homo sapiens
caggtagataagaag

SEQ ID NO: 776814 - DNA, 15 bp, Homo sapiens
aggtagataagaagg

SEQ ID NO: 776815 - DNA, 15 bp, Homo sapiens
ggtagataagaagga

SEQ ID NO: 776816 - DNA, 15 bp, Homo sapiens
gtagataagaaggag

SEQ ID NO: 776817 - DNA, 15 bp, Homo sapiens
tagataagaaggaga

SEQ ID NO: 776818 - DNA, 15 bp, Homo sapiens
agataagaaggagag

SEQ ID NO: 776819 - DNA, 15 bp, Homo sapiens
gataagaaggagaga

SEQ ID NO: 776820 - DNA, 15 bp, Homo sapiens
ataagaaggagagag

SEQ ID NO: 776821 - DNA, 15 bp, Homo sapiens
taagaaggagagagt

SEQ ID NO: 776822 - DNA, 15 bp, Homo sapiens
aagaaggagagagtg

SEQ ID NO: 776823 - DNA, 15 bp, Homo sapiens
agaaggagagagtgg

SEQ ID NO: 776824 - DNA, 15 bp, Homo sapiens
gaaggagagagtggg

SEQ ID NO: 776825 - DNA, 15 bp, Homo sapiens
aaggagagagtgggg

SEQ ID NO: 776826 - DNA, 15 bp, Homo sapiens
aggagagagtgggga

SEQ ID NO: 776827 - DNA, 15 bp, Homo sapiens
ggagagagtggggag

SEQ ID NO: 776828 - DNA, 15 bp, Homo sapiens
gagagagtggggaga

SEQ ID NO: 776829 - DNA, 15 bp, Homo sapiens
agagagtggggagag

SEQ ID NO: 776830 - DNA, 15 bp, Homo sapiens
gagagtggggagagg

SEQ ID NO: 776831 - DNA, 15 bp, Homo sapiens
agagtggggagaggg

SEQ ID NO: 776832 - DNA, 15 bp, Homo sapiens
gagtggggagaggga

SEQ ID NO: 776833 - DNA, 15 bp, Homo sapiens
agtggggagagggaa

SEQ ID NO: 776834 - DNA, 15 bp, Homo sapiens
gtggggagagggaaa

SEQ ID NO: 776835 - DNA, 15 bp, Homo sapiens
tggggagagggaaag

SEQ ID NO: 776836 - DNA, 15 bp, Homo sapiens
ggggagagggaaaga

SEQ ID NO: 776837 - DNA, 15 bp, Homo sapiens
gggagagggaaagag

SEQ ID NO: 776838 - DNA, 15 bp, Homo sapiens
ggagagggaaagaga

SEQ ID NO: 776839 - DNA, 15 bp, Homo sapiens
gagagggaaagagaa

SEQ ID NO: 776840 - DNA, 15 bp, Homo sapiens
agagggaaagagaaa

SEQ ID NO: 776841 - DNA, 15 bp, Homo sapiens
gagggaaagagaaaa

SEQ ID NO: 776842 - DNA, 15 bp, Homo sapiens
agggaaagagaaaag

SEQ ID NO: 776843 - DNA, 15 bp, Homo sapiens
gggaaagagaaaaga

SEQ ID NO: 776844 - DNA, 15 bp, Homo sapiens
ggaaagagaaaagaa

SEQ ID NO: 776845 - DNA, 15 bp, Homo sapiens
gaaagagaaaagaaa

SEQ ID NO: 776846 - DNA, 15 bp, Homo sapiens
aaagagaaaagaaaa

SEQ ID NO: 776847 - DNA, 15 bp, Homo sapiens
aagagaaaagaaaaa

SEQ ID NO: 776848 - DNA, 15 bp, Homo sapiens
agagaaaagaaaaag

SEQ ID NO: 776849 - DNA, 15 bp, Homo sapiens
gagaaaagaaaaagg

SEQ ID NO: 776850 - DNA, 15 bp, Homo sapiens
agaaaagaaaaagga

SEQ ID NO: 776851 - DNA, 15 bp, Homo sapiens
gaaaagaaaaaggaa

SEQ ID NO: 776852 - DNA, 15 bp, Homo sapiens
aaaagaaaaaggaaa

SEQ ID NO: 776853 - DNA, 15 bp, Homo sapiens
aaagaaaaaggaaaa

SEQ ID NO: 776854 - DNA, 15 bp, Homo sapiens
aagaaaaaggaaaag

SEQ ID NO: 776855 - DNA, 15 bp, Homo sapiens
agaaaaaggaaaaga

SEQ ID NO: 776856 - DNA, 15 bp, Homo sapiens
gaaaaaggaaaagaa

SEQ ID NO: 776857 - DNA, 15 bp, Homo sapiens
aaaaaggaaaagaaa

SEQ ID NO: 776858 - DNA, 15 bp, Homo sapiens
aaaaggaaaagaaag

SEQ ID NO: 776859 - DNA, 15 bp, Homo sapiens
aaaggaaaagaaaga

SEQ ID NO: 776860 - DNA, 15 bp, Homo sapiens
aaggaaaagaaagag

SEQ ID NO: 776861 - DNA, 15 bp, Homo sapiens
aggaaaagaaagaga

SEQ ID NO: 776862 - DNA, 15 bp, Homo sapiens
ggaaaagaaagagag

SEQ ID NO: 776863 - DNA, 15 bp, Homo sapiens
gaaaagaaagagaga

SEQ ID NO: 776864 - DNA, 15 bp, Homo sapiens
aaaagaaagagagaa

SEQ ID NO: 776865 - DNA, 15 bp, Homo sapiens
aaagaaagagagaag

SEQ ID NO: 776866 - DNA, 15 bp, Homo sapiens
aagaaagagagaaga

SEQ ID NO: 776867 - DNA, 15 bp, Homo sapiens
agaaagagagaagag

SEQ ID NO: 776868 - DNA, 15 bp, Homo sapiens
gaaagagagaagagg

SEQ ID NO: 776869 - DNA, 15 bp, Homo sapiens
aaagagagaagagga

SEQ ID NO: 776870 - DNA, 15 bp, Homo sapiens
aagagagaagaggaa

SEQ ID NO: 776871 - DNA, 15 bp, Homo sapiens
agagagaagaggaag

SEQ ID NO: 776872 - DNA, 15 bp, Homo sapiens
gagagaagaggaaga

SEQ ID NO: 776873 - DNA, 15 bp, Homo sapiens
agagaagaggaagac

SEQ ID NO: 776874 - DNA, 15 bp, Homo sapiens
gagaagaggaagact

SEQ ID NO: 776875 - DNA, 15 bp, Homo sapiens
agaagaggaagactg

SEQ ID NO: 776876 - DNA, 15 bp, Homo sapiens
gaagaggaagactgc

SEQ ID NO: 776877 - DNA, 15 bp, Homo sapiens
aagaggaagactgca

SEQ ID NO: 776878 - DNA, 15 bp, Homo sapiens
agaggaagactgcaa

SEQ ID NO: 776879 - DNA, 15 bp, Homo sapiens
gaggaagactgcaac

SEQ ID NO: 776880 - DNA, 15 bp, Homo sapiens
aggaagactgcaacc

SEQ ID NO: 776881 - DNA, 15 bp, Homo sapiens
ggaagactgcaacct

SEQ ID NO: 776882 - DNA, 15 bp, Homo sapiens
gaagactgcaacctt

SEQ ID NO: 776883 - DNA, 15 bp, Homo sapiens
aagactgcaaccttc

SEQ ID NO: 776884 - DNA, 15 bp, Homo sapiens
agactgcaaccttct

SEQ ID NO: 776885 - DNA, 15 bp, Homo sapiens
gactgcaaccttctt

SEQ ID NO: 776886 - DNA, 15 bp, Homo sapiens
actgcaaccttcttt

SEQ ID NO: 776887 - DNA, 15 bp, Homo sapiens
ctgcaaccttctttg

SEQ ID NO: 776888 - DNA, 15 bp, Homo sapiens
tgcaaccttctttgg

SEQ ID NO: 776889 - DNA, 15 bp, Homo sapiens
gcaaccttctttgga

SEQ ID NO: 776890 - DNA, 15 bp, Homo sapiens
caaccttctttggag

SEQ ID NO: 776891 - DNA, 15 bp, Homo sapiens
aaccttctttggagg

SEQ ID NO: 776892 - DNA, 15 bp, Homo sapiens
accttctttggagga

SEQ ID NO: 776893 - DNA, 15 bp, Homo sapiens
ccttctttggaggaa

SEQ ID NO: 776894 - DNA, 15 bp, Homo sapiens
cttctttggaggaaa

SEQ ID NO: 776895 - DNA, 15 bp, Homo sapiens
ttctttggaggaaac

SEQ ID NO: 776896 - DNA, 15 bp, Homo sapiens
tctttggaggaaaca

SEQ ID NO: 776897 - DNA, 15 bp, Homo sapiens
ctttggaggaaacat

SEQ ID NO: 776898 - DNA, 15 bp, Homo sapiens
tttggaggaaacatt

SEQ ID NO: 776899 - DNA, 15 bp, Homo sapiens
ttggaggaaacattt

SEQ ID NO: 776900 - DNA, 15 bp, Homo sapiens
tggaggaaacatttt

SEQ ID NO: 776901 - DNA, 15 bp, Homo sapiens
ggaggaaacattttt

SEQ ID NO: 776902 - DNA, 15 bp, Homo sapiens
gaggaaacatttttt

SEQ ID NO: 776903 - DNA, 15 bp, Homo sapiens
aggaaacattttttc

SEQ ID NO: 776904 - DNA, 15 bp, Homo sapiens
ggaaacattttttct

SEQ ID NO: 776905 - DNA, 15 bp, Homo sapiens
gaaacattttttctt

SEQ ID NO: 776906 - DNA, 15 bp, Homo sapiens
aaacattttttcttt

SEQ ID NO: 776907 - DNA, 15 bp, Homo sapiens
aacattttttctttt

SEQ ID NO: 776908 - DNA, 15 bp, Homo sapiens
acattttttcttttt

SEQ ID NO: 776909 - DNA, 15 bp, Homo sapiens
cattttttctttttc

SEQ ID NO: 776910 - DNA, 15 bp, Homo sapiens
attttttctttttct

SEQ ID NO: 776911 - DNA, 15 bp, Homo sapiens
ttttttctttttcta

SEQ ID NO: 776912 - DNA, 15 bp, Homo sapiens
tttttctttttctaa

SEQ ID NO: 776913 - DNA, 15 bp, Homo sapiens
ttttctttttctaat

SEQ ID NO: 776914 - DNA, 15 bp, Homo sapiens
tttctttttctaatt

SEQ ID NO: 776915 - DNA, 15 bp, Homo sapiens
ttctttttctaattg

SEQ ID NO: 776916 - DNA, 15 bp, Homo sapiens
tctttttctaattgg

SEQ ID NO: 776917 - DNA, 15 bp, Homo sapiens
ctttttctaattggc

SEQ ID NO: 776918 - DNA, 15 bp, Homo sapiens
tttttctaattggcc

SEQ ID NO: 776919 - DNA, 15 bp, Homo sapiens
ttttctaattggcca

SEQ ID NO: 776920 - DNA, 15 bp, Homo sapiens
tttctaattggccat

SEQ ID NO: 776921 - DNA, 15 bp, Homo sapiens
ttctaattggccatg

SEQ ID NO: 776922 - DNA, 15 bp, Homo sapiens
tctaattggccatgg

SEQ ID NO: 776923 - DNA, 15 bp, Homo sapiens
ctaattggccatggg

SEQ ID NO: 776924 - DNA, 15 bp, Homo sapiens
taattggccatgggt

SEQ ID NO: 776925 - DNA, 15 bp, Homo sapiens
aattggccatgggtt

SEQ ID NO: 776926 - DNA, 15 bp, Homo sapiens
attggccatgggtta

SEQ ID NO: 776927 - DNA, 15 bp, Homo sapiens
ttggccatgggttag

SEQ ID NO: 776928 - DNA, 15 bp, Homo sapiens
tggccatgggttagg

SEQ ID NO: 776929 - DNA, 15 bp, Homo sapiens
ggccatgggttaggc

SEQ ID NO: 776930 - DNA, 15 bp, Homo sapiens
gccatgggttaggcc

SEQ ID NO: 776931 - DNA, 15 bp, Homo sapiens
ccatgggttaggcca

SEQ ID NO: 776932 - DNA, 15 bp, Homo sapiens
catgggttaggccag

SEQ ID NO: 776933 - DNA, 15 bp, Homo sapiens
atgggttaggccaga

SEQ ID NO: 776934 - DNA, 15 bp, Homo sapiens
tgggttaggccagat

SEQ ID NO: 776935 - DNA, 15 bp, Homo sapiens
gggttaggccagatt

SEQ ID NO: 776936 - DNA, 15 bp, Homo sapiens
ggttaggccagattt

SEQ ID NO: 776937 - DNA, 15 bp, Homo sapiens
gttaggccagatttg

SEQ ID NO: 776938 - DNA, 15 bp, Homo sapiens
ttaggccagatttgt

SEQ ID NO: 776939 - DNA, 15 bp, Homo sapiens
taggccagatttgtc

SEQ ID NO: 776940 - DNA, 15 bp, Homo sapiens
aggccagatttgtcc

SEQ ID NO: 776941 - DNA, 15 bp, Homo sapiens
ggccagatttgtcca

SEQ ID NO: 776942 - DNA, 15 bp, Homo sapiens
gccagatttgtccag

SEQ ID NO: 776943 - DNA, 15 bp, Homo sapiens
ccagatttgtccagc

SEQ ID NO: 776944 - DNA, 15 bp, Homo sapiens
cagatttgtccagcc

SEQ ID NO: 776945 - DNA, 15 bp, Homo sapiens
agatttgtccagcct

SEQ ID NO: 776946 - DNA, 15 bp, Homo sapiens
gatttgtccagccta

SEQ ID NO: 776947 - DNA, 15 bp, Homo sapiens
atttgtccagcctag

SEQ ID NO: 776948 - DNA, 15 bp, Homo sapiens
tttgtccagcctaga

SEQ ID NO: 776949 - DNA, 15 bp, Homo sapiens
ttgtccagcctagaa

SEQ ID NO: 776950 - DNA, 15 bp, Homo sapiens
tgtccagcctagaac

SEQ ID NO: 776951 - DNA, 15 bp, Homo sapiens
gtccagcctagaaca

SEQ ID NO: 776952 - DNA, 15 bp, Homo sapiens
tccagcctagaacat

SEQ ID NO: 776953 - DNA, 15 bp, Homo sapiens
ccagcctagaacata

SEQ ID NO: 776954 - DNA, 15 bp, Homo sapiens
cagcctagaacatag

SEQ ID NO: 776955 - DNA, 15 bp, Homo sapiens
agcctagaacataga

SEQ ID NO: 776956 - DNA, 15 bp, Homo sapiens
gcctagaacatagac

SEQ ID NO: 776957 - DNA, 15 bp, Homo sapiens
cctagaacatagacc

SEQ ID NO: 776958 - DNA, 15 bp, Homo sapiens
ctagaacatagacca

SEQ ID NO: 776959 - DNA, 15 bp, Homo sapiens
tagaacatagaccaa

SEQ ID NO: 776960 - DNA, 15 bp, Homo sapiens
agaacatagaccaat

SEQ ID NO: 776961 - DNA, 15 bp, Homo sapiens
gaacatagaccaatg

SEQ ID NO: 776962 - DNA, 15 bp, Homo sapiens
aacatagaccaatgc

SEQ ID NO: 776963 - DNA, 15 bp, Homo sapiens
acatagaccaatgct

SEQ ID NO: 776964 - DNA, 15 bp, Homo sapiens
catagaccaatgctt

SEQ ID NO: 776965 - DNA, 15 bp, Homo sapiens
atagaccaatgctta

SEQ ID NO: 776966 - DNA, 15 bp, Homo sapiens
tagaccaatgcttag

SEQ ID NO: 776967 - DNA, 15 bp, Homo sapiens
agaccaatgcttagc

SEQ ID NO: 776968 - DNA, 15 bp, Homo sapiens
gaccaatgcttagca

SEQ ID NO: 776969 - DNA, 15 bp, Homo sapiens
accaatgcttagcac

SEQ ID NO: 776970 - DNA, 15 bp, Homo sapiens
ccaatgcttagcaca

SEQ ID NO: 776971 - DNA, 15 bp, Homo sapiens
caatgcttagcacat

SEQ ID NO: 776972 - DNA, 15 bp, Homo sapiens
aatgcttagcacatt

SEQ ID NO: 776973 - DNA, 15 bp, Homo sapiens
atgcttagcacattt

SEQ ID NO: 776974 - DNA, 15 bp, Homo sapiens
tgcttagcacattta

SEQ ID NO: 776975 - DNA, 15 bp, Homo sapiens
gcttagcacatttat

SEQ ID NO: 776976 - DNA, 15 bp, Homo sapiens
cttagcacatttatc

SEQ ID NO: 776977 - DNA, 15 bp, Homo sapiens
ttagcacatttatca

SEQ ID NO: 776978 - DNA, 15 bp, Homo sapiens
tagcacatttatcat

SEQ ID NO: 776979 - DNA, 15 bp, Homo sapiens
agcacatttatcatt

SEQ ID NO: 776980 - DNA, 15 bp, Homo sapiens
gcacatttatcatta

SEQ ID NO: 776981 - DNA, 15 bp, Homo sapiens
cacatttatcattat

SEQ ID NO: 776982 - DNA, 15 bp, Homo sapiens
acatttatcattata

SEQ ID NO: 776983 - DNA, 15 bp, Homo sapiens
catttatcattatat

SEQ ID NO: 776984 - DNA, 15 bp, Homo sapiens
atttatcattatatt

SEQ ID NO: 776985 - DNA, 15 bp, Homo sapiens
tttatcattatattt

SEQ ID NO: 776986 - DNA, 15 bp, Homo sapiens
ttatcattatatttc

SEQ ID NO: 776987 - DNA, 15 bp, Homo sapiens
tatcattatatttca

SEQ ID NO: 776988 - DNA, 15 bp, Homo sapiens
atcattatatttcat

SEQ ID NO: 776989 - DNA, 15 bp, Homo sapiens
tcattatatttcatt

SEQ ID NO: 776990 - DNA, 15 bp, Homo sapiens
cattatatttcattt

SEQ ID NO: 776991 - DNA, 15 bp, Homo sapiens
attatatttcatttg

SEQ ID NO: 776992 - DNA, 15 bp, Homo sapiens
ttatatttcatttgt

SEQ ID NO: 776993 - DNA, 15 bp, Homo sapiens
tatatttcatttgtg

SEQ ID NO: 776994 - DNA, 15 bp, Homo sapiens
atatttcatttgtgt

SEQ ID NO: 776995 - DNA, 15 bp, Homo sapiens
tatttcatttgtgtg

SEQ ID NO: 776996 - DNA, 15 bp, Homo sapiens
atttcatttgtgtga

SEQ ID NO: 776997 - DNA, 15 bp, Homo sapiens
tttcatttgtgtgat

SEQ ID NO: 776998 - DNA, 15 bp, Homo sapiens
ttcatttgtgtgatc

SEQ ID NO: 776999 - DNA, 15 bp, Homo sapiens
tcatttgtgtgatcg

SEQ ID NO: 777000 - DNA, 15 bp, Homo sapiens
catttgtgtgatcgt

SEQ ID NO: 777001 - DNA, 15 bp, Homo sapiens
atttgtgtgatcgtt

SEQ ID NO: 777002 - DNA, 15 bp, Homo sapiens
tttgtgtgatcgttt

SEQ ID NO: 777003 - DNA, 15 bp, Homo sapiens
ttgtgtgatcgttta

SEQ ID NO: 777004 - DNA, 15 bp, Homo sapiens
tgtgtgatcgtttat

SEQ ID NO: 777005 - DNA, 15 bp, Homo sapiens
gtgtgatcgtttatt

SEQ ID NO: 777006 - DNA, 15 bp, Homo sapiens
tgtgatcgtttattg

SEQ ID NO: 777007 - DNA, 15 bp, Homo sapiens
gtgatcgtttattgt

SEQ ID NO: 777008 - DNA, 15 bp, Homo sapiens
tgatcgtttattgtc

SEQ ID NO: 777009 - DNA, 15 bp, Homo sapiens
gatcgtttattgtct

SEQ ID NO: 777010 - DNA, 15 bp, Homo sapiens
atcgtttattgtctt

SEQ ID NO: 777011 - DNA, 15 bp, Homo sapiens
tcgtttattgtcttc

SEQ ID NO: 777012 - DNA, 15 bp, Homo sapiens
cgtttattgtcttct

SEQ ID NO: 777013 - DNA, 15 bp, Homo sapiens
gtttattgtcttctt

SEQ ID NO: 777014 - DNA, 15 bp, Homo sapiens
tttattgtcttcttc

SEQ ID NO: 777015 - DNA, 15 bp, Homo sapiens
ttattgtcttcttcc

SEQ ID NO: 777016 - DNA, 15 bp, Homo sapiens
tattgtcttcttcct

SEQ ID NO: 777017 - DNA, 15 bp, Homo sapiens
attgtcttcttcctc

SEQ ID NO: 777018 - DNA, 15 bp, Homo sapiens
ttgtcttcttcctct

SEQ ID NO: 777019 - DNA, 15 bp, Homo sapiens
tgtcttcttcctctt

SEQ ID NO: 777020 - DNA, 15 bp, Homo sapiens
gtcttcttcctcttt

SEQ ID NO: 777021 - DNA, 15 bp, Homo sapiens
tcttcttcctcttta

SEQ ID NO: 777022 - DNA, 15 bp, Homo sapiens
cttcttcctctttag

SEQ ID NO: 777023 - DNA, 15 bp, Homo sapiens
ttcttcctctttaga

SEQ ID NO: 777024 - DNA, 15 bp, Homo sapiens
tcttcctctttagaa

SEQ ID NO: 777025 - DNA, 15 bp, Homo sapiens
cttcctctttagaat

SEQ ID NO: 777026 - DNA, 15 bp, Homo sapiens
ttcctctttagaata

SEQ ID NO: 777027 - DNA, 15 bp, Homo sapiens
tcctctttagaatag

SEQ ID NO: 777028 - DNA, 15 bp, Homo sapiens
cctctttagaatagg

SEQ ID NO: 777029 - DNA, 15 bp, Homo sapiens
ctctttagaataggc

SEQ ID NO: 777030 - DNA, 15 bp, Homo sapiens
tctttagaataggca

SEQ ID NO: 777031 - DNA, 15 bp, Homo sapiens
ctttagaataggcag

SEQ ID NO: 777032 - DNA, 15 bp, Homo sapiens
tttagaataggcagg

SEQ ID NO: 777033 - DNA, 15 bp, Homo sapiens
ttagaataggcagga

SEQ ID NO: 777034 - DNA, 15 bp, Homo sapiens
tagaataggcaggaa

SEQ ID NO: 777035 - DNA, 15 bp, Homo sapiens
agaataggcaggaac

SEQ ID NO: 777036 - DNA, 15 bp, Homo sapiens
gaataggcaggaacc

SEQ ID NO: 777037 - DNA, 15 bp, Homo sapiens
aataggcaggaacca

SEQ ID NO: 777038 - DNA, 15 bp, Homo sapiens
ataggcaggaaccat

SEQ ID NO: 777039 - DNA, 15 bp, Homo sapiens
taggcaggaaccata

SEQ ID NO: 777040 - DNA, 15 bp, Homo sapiens
aggcaggaaccatat

SEQ ID NO: 777041 - DNA, 15 bp, Homo sapiens
ggcaggaaccatatc

SEQ ID NO: 777042 - DNA, 15 bp, Homo sapiens
gcaggaaccatatct

SEQ ID NO: 777043 - DNA, 15 bp, Homo sapiens
caggaaccatatctg

SEQ ID NO: 777044 - DNA, 15 bp, Homo sapiens
aggaaccatatctgt

SEQ ID NO: 777045 - DNA, 15 bp, Homo sapiens
ggaaccatatctgtg

SEQ ID NO: 777046 - DNA, 15 bp, Homo sapiens
gaaccatatctgtgt

SEQ ID NO: 777047 - DNA, 15 bp, Homo sapiens
aaccatatctgtgtt

SEQ ID NO: 777048 - DNA, 15 bp, Homo sapiens
accatatctgtgttt

SEQ ID NO: 777049 - DNA, 15 bp, Homo sapiens
ccatatctgtgtttc

SEQ ID NO: 777050 - DNA, 15 bp, Homo sapiens
catatctgtgtttct

SEQ ID NO: 777051 - DNA, 15 bp, Homo sapiens
atatctgtgtttctg

SEQ ID NO: 777052 - DNA, 15 bp, Homo sapiens
tatctgtgtttctgt

SEQ ID NO: 777053 - DNA, 15 bp, Homo sapiens
atctgtgtttctgtg

SEQ ID NO: 777054 - DNA, 15 bp, Homo sapiens
tctgtgtttctgtgt

SEQ ID NO: 777055 - DNA, 15 bp, Homo sapiens
ctgtgtttctgtgtg

SEQ ID NO: 777056 - DNA, 15 bp, Homo sapiens
tgtgtttctgtgtgc

SEQ ID NO: 777057 - DNA, 15 bp, Homo sapiens
gtgtttctgtgtgct

SEQ ID NO: 777058 - DNA, 15 bp, Homo sapiens
tgtttctgtgtgcta

SEQ ID NO: 777059 - DNA, 15 bp, Homo sapiens
gtttctgtgtgctac

SEQ ID NO: 777060 - DNA, 15 bp, Homo sapiens
tttctgtgtgctact

SEQ ID NO: 777061 - DNA, 15 bp, Homo sapiens
ttctgtgtgctactg

SEQ ID NO: 777062 - DNA, 15 bp, Homo sapiens
tctgtgtgctactgt

SEQ ID NO: 777063 - DNA, 15 bp, Homo sapiens
ctgtgtgctactgta

SEQ ID NO: 777064 - DNA, 15 bp, Homo sapiens
tgtgtgctactgtat

SEQ ID NO: 777065 - DNA, 15 bp, Homo sapiens
gtgtgctactgtata

SEQ ID NO: 777066 - DNA, 15 bp, Homo sapiens
tgtgctactgtatat

SEQ ID NO: 777067 - DNA, 15 bp, Homo sapiens
gtgctactgtatatg

SEQ ID NO: 777068 - DNA, 15 bp, Homo sapiens
tgctactgtatatga

SEQ ID NO: 777069 - DNA, 15 bp, Homo sapiens
gctactgtatatgaa

SEQ ID NO: 777070 - DNA, 15 bp, Homo sapiens
ctactgtatatgaaa

SEQ ID NO: 777071 - DNA, 15 bp, Homo sapiens
tactgtatatgaaat

SEQ ID NO: 777072 - DNA, 15 bp, Homo sapiens
actgtatatgaaatg

SEQ ID NO: 777073 - DNA, 15 bp, Homo sapiens
ctgtatatgaaatgc

SEQ ID NO: 777074 - DNA, 15 bp, Homo sapiens
tgtatatgaaatgcc

SEQ ID NO: 777075 - DNA, 15 bp, Homo sapiens
gtatatgaaatgcca

SEQ ID NO: 777076 - DNA, 15 bp, Homo sapiens
tatatgaaatgccag

SEQ ID NO: 777077 - DNA, 15 bp, Homo sapiens
atatgaaatgccagg

SEQ ID NO: 777078 - DNA, 15 bp, Homo sapiens
tatgaaatgccaggg

SEQ ID NO: 777079 - DNA, 15 bp, Homo sapiens
atgaaatgccagggt

SEQ ID NO: 777080 - DNA, 15 bp, Homo sapiens
tgaaatgccagggta

SEQ ID NO: 777081 - DNA, 15 bp, Homo sapiens
gaaatgccagggtaa

SEQ ID NO: 777082 - DNA, 15 bp, Homo sapiens
aaatgccagggtaaa

SEQ ID NO: 777083 - DNA, 15 bp, Homo sapiens
aatgccagggtaaat

SEQ ID NO: 777084 - DNA, 15 bp, Homo sapiens
atgccagggtaaata

SEQ ID NO: 777085 - DNA, 15 bp, Homo sapiens
tgccagggtaaatac

SEQ ID NO: 777086 - DNA, 15 bp, Homo sapiens
gccagggtaaatact

SEQ ID NO: 777087 - DNA, 15 bp, Homo sapiens
ccagggtaaatactt

SEQ ID NO: 777088 - DNA, 15 bp, Homo sapiens
cagggtaaatactta

SEQ ID NO: 777089 - DNA, 15 bp, Homo sapiens
agggtaaatacttag

SEQ ID NO: 777090 - DNA, 15 bp, Homo sapiens
gggtaaatacttaga

SEQ ID NO: 777091 - DNA, 15 bp, Homo sapiens
ggtaaatacttagaa

SEQ ID NO: 777092 - DNA, 15 bp, Homo sapiens
gtaaatacttagaaa

SEQ ID NO: 777093 - DNA, 15 bp, Homo sapiens
taaatacttagaaaa

SEQ ID NO: 777094 - DNA, 15 bp, Homo sapiens
aaatacttagaaaat

SEQ ID NO: 777095 - DNA, 15 bp, Homo sapiens
aatacttagaaaata

SEQ ID NO: 777096 - DNA, 15 bp, Homo sapiens
atacttagaaaatat

SEQ ID NO: 777097 - DNA, 15 bp, Homo sapiens
tacttagaaaatatt

SEQ ID NO: 777098 - DNA, 15 bp, Homo sapiens
acttagaaaatattt

SEQ ID NO: 777099 - DNA, 15 bp, Homo sapiens
cttagaaaatatttg

SEQ ID NO: 777100 - DNA, 15 bp, Homo sapiens
ttagaaaatatttgt

SEQ ID NO: 777101 - DNA, 15 bp, Homo sapiens
tagaaaatatttgtc

SEQ ID NO: 777102 - DNA, 15 bp, Homo sapiens
agaaaatatttgtca

SEQ ID NO: 777103 - DNA, 15 bp, Homo sapiens
gaaaatatttgtcaa

SEQ ID NO: 777104 - DNA, 15 bp, Homo sapiens
aaaatatttgtcaaa

SEQ ID NO: 777105 - DNA, 15 bp, Homo sapiens
aaatatttgtcaaat

SEQ ID NO: 777106 - DNA, 15 bp, Homo sapiens
aatatttgtcaaatg

SEQ ID NO: 777107 - DNA, 15 bp, Homo sapiens
atatttgtcaaatgc

SEQ ID NO: 777108 - DNA, 15 bp, Homo sapiens
tatttgtcaaatgca

SEQ ID NO: 777109 - DNA, 15 bp, Homo sapiens
atttgtcaaatgcac

SEQ ID NO: 777110 - DNA, 15 bp, Homo sapiens
tttgtcaaatgcaca

SEQ ID NO: 777111 - DNA, 15 bp, Homo sapiens
ttgtcaaatgcacat

SEQ ID NO: 777112 - DNA, 15 bp, Homo sapiens
tgtcaaatgcacata

SEQ ID NO: 777113 - DNA, 15 bp, Homo sapiens
gtcaaatgcacataa

SEQ ID NO: 777114 - DNA, 15 bp, Homo sapiens
tcaaatgcacataag

SEQ ID NO: 777115 - DNA, 15 bp, Homo sapiens
caaatgcacataaga

SEQ ID NO: 777116 - DNA, 15 bp, Homo sapiens
aaatgcacataagat

SEQ ID NO: 777117 - DNA, 15 bp, Homo sapiens
aatgcacataagatc

SEQ ID NO: 777118 - DNA, 15 bp, Homo sapiens
atgcacataagatcc

SEQ ID NO: 777119 - DNA, 15 bp, Homo sapiens
tgcacataagatcca

SEQ ID NO: 777120 - DNA, 15 bp, Homo sapiens
gcacataagatccaa

SEQ ID NO: 777121 - DNA, 15 bp, Homo sapiens
cacataagatccaag

SEQ ID NO: 777122 - DNA, 15 bp, Homo sapiens
acataagatccaagg

SEQ ID NO: 777123 - DNA, 15 bp, Homo sapiens
cataagatccaagga

SEQ ID NO: 777124 - DNA, 15 bp, Homo sapiens
ataagatccaaggaa

SEQ ID NO: 777125 - DNA, 15 bp, Homo sapiens
taagatccaaggaat

SEQ ID NO: 777126 - DNA, 15 bp, Homo sapiens
aagatccaaggaatg

SEQ ID NO: 777127 - DNA, 15 bp, Homo sapiens
agatccaaggaatga

SEQ ID NO: 777128 - DNA, 15 bp, Homo sapiens
gatccaaggaatgaa

SEQ ID NO: 777129 - DNA, 15 bp, Homo sapiens
atccaaggaatgaat

SEQ ID NO: 777130 - DNA, 15 bp, Homo sapiens
tccaaggaatgaatg

SEQ ID NO: 777131 - DNA, 15 bp, Homo sapiens
ccaaggaatgaatga

SEQ ID NO: 777132 - DNA, 15 bp, Homo sapiens
caaggaatgaatgaa

SEQ ID NO: 777133 - DNA, 15 bp, Homo sapiens
aaggaatgaatgaat

SEQ ID NO: 777134 - DNA, 15 bp, Homo sapiens
aggaatgaatgaatg

SEQ ID NO: 777135 - DNA, 15 bp, Homo sapiens
ggaatgaatgaatga

SEQ ID NO: 777136 - DNA, 15 bp, Homo sapiens
gaatgaatgaatgaa

SEQ ID NO: 777137 - DNA, 15 bp, Homo sapiens
aatgaatgaatgaaa

SEQ ID NO: 777138 - DNA, 15 bp, Homo sapiens
atgaatgaatgaaac

SEQ ID NO: 777139 - DNA, 15 bp, Homo sapiens
tgaatgaatgaaact

SEQ ID NO: 777140 - DNA, 15 bp, Homo sapiens
gaatgaatgaaactg

SEQ ID NO: 777141 - DNA, 15 bp, Homo sapiens
aatgaatgaaactga

SEQ ID NO: 777142 - DNA, 15 bp, Homo sapiens
atgaatgaaactgac

SEQ ID NO: 777143 - DNA, 15 bp, Homo sapiens
tgaatgaaactgact

SEQ ID NO: 777144 - DNA, 15 bp, Homo sapiens
gaatgaaactgactg

SEQ ID NO: 777145 - DNA, 15 bp, Homo sapiens
aatgaaactgactgc

SEQ ID NO: 777146 - DNA, 15 bp, Homo sapiens
atgaaactgactgca

SEQ ID NO: 777147 - DNA, 15 bp, Homo sapiens
tgaaactgactgcat

SEQ ID NO: 777148 - DNA, 15 bp, Homo sapiens
gaaactgactgcatc

SEQ ID NO: 777149 - DNA, 15 bp, Homo sapiens
aaactgactgcatca

SEQ ID NO: 777150 - DNA, 15 bp, Homo sapiens
aactgactgcatcag

SEQ ID NO: 777151 - DNA, 15 bp, Homo sapiens
actgactgcatcaga

SEQ ID NO: 777152 - DNA, 15 bp, Homo sapiens
ctgactgcatcagaa

SEQ ID NO: 777153 - DNA, 15 bp, Homo sapiens
tgactgcatcagaat

SEQ ID NO: 777154 - DNA, 15 bp, Homo sapiens
gactgcatcagaatt

SEQ ID NO: 777155 - DNA, 15 bp, Homo sapiens
actgcatcagaatta

SEQ ID NO: 777156 - DNA, 15 bp, Homo sapiens
ctgcatcagaattat

SEQ ID NO: 777157 - DNA, 15 bp, Homo sapiens
tgcatcagaattatc

SEQ ID NO: 777158 - DNA, 15 bp, Homo sapiens
gcatcagaattatct

SEQ ID NO: 777159 - DNA, 15 bp, Homo sapiens
catcagaattatctg

SEQ ID NO: 777160 - DNA, 15 bp, Homo sapiens
atcagaattatctgg

SEQ ID NO: 777161 - DNA, 15 bp, Homo sapiens
tcagaattatctggg

SEQ ID NO: 777162 - DNA, 15 bp, Homo sapiens
cagaattatctggga

SEQ ID NO: 777163 - DNA, 15 bp, Homo sapiens
agaattatctgggag

SEQ ID NO: 777164 - DNA, 15 bp, Homo sapiens
gaattatctgggagc

SEQ ID NO: 777165 - DNA, 15 bp, Homo sapiens
aattatctgggagct

SEQ ID NO: 777166 - DNA, 15 bp, Homo sapiens
attatctgggagctt

SEQ ID NO: 777167 - DNA, 15 bp, Homo sapiens
ttatctgggagcttg

SEQ ID NO: 777168 - DNA, 15 bp, Homo sapiens
tatctgggagcttgt

SEQ ID NO: 777169 - DNA, 15 bp, Homo sapiens
atctgggagcttgtt

SEQ ID NO: 777170 - DNA, 15 bp, Homo sapiens
tctgggagcttgttt

SEQ ID NO: 777171 - DNA, 15 bp, Homo sapiens
ctgggagcttgttta

SEQ ID NO: 777172 - DNA, 15 bp, Homo sapiens
tgggagcttgtttaa

SEQ ID NO: 777173 - DNA, 15 bp, Homo sapiens
gggagcttgtttaaa

SEQ ID NO: 777174 - DNA, 15 bp, Homo sapiens
ggagcttgtttaaaa

SEQ ID NO: 777175 - DNA, 15 bp, Homo sapiens
gagcttgtttaaaat

SEQ ID NO: 777176 - DNA, 15 bp, Homo sapiens
agcttgtttaaaatg

SEQ ID NO: 777177 - DNA, 15 bp, Homo sapiens
gcttgtttaaaatga

SEQ ID NO: 777178 - DNA, 15 bp, Homo sapiens
cttgtttaaaatgat

SEQ ID NO: 777179 - DNA, 15 bp, Homo sapiens
ttgtttaaaatgata

SEQ ID NO: 777180 - DNA, 15 bp, Homo sapiens
tgtttaaaatgatag

SEQ ID NO: 777181 - DNA, 15 bp, Homo sapiens
gtttaaaatgataga

SEQ ID NO: 777182 - DNA, 15 bp, Homo sapiens
tttaaaatgatagat

SEQ ID NO: 777183 - DNA, 15 bp, Homo sapiens
ttaaaatgatagatt

SEQ ID NO: 777184 - DNA, 15 bp, Homo sapiens
taaaatgatagattc

SEQ ID NO: 777185 - DNA, 15 bp, Homo sapiens
aaaatgatagattct

SEQ ID NO: 777186 - DNA, 15 bp, Homo sapiens
aaatgatagattctg

SEQ ID NO: 777187 - DNA, 15 bp, Homo sapiens
aatgatagattctga

SEQ ID NO: 777188 - DNA, 15 bp, Homo sapiens
atgatagattctgag

SEQ ID NO: 777189 - DNA, 15 bp, Homo sapiens
tgatagattctgagc

SEQ ID NO: 777190 - DNA, 15 bp, Homo sapiens
gatagattctgagca

SEQ ID NO: 777191 - DNA, 15 bp, Homo sapiens
atagattctgagcac

SEQ ID NO: 777192 - DNA, 15 bp, Homo sapiens
tagattctgagcacc

SEQ ID NO: 777193 - DNA, 15 bp, Homo sapiens
agattctgagcacca

SEQ ID NO: 777194 - DNA, 15 bp, Homo sapiens
gattctgagcaccac

SEQ ID NO: 777195 - DNA, 15 bp, Homo sapiens
attctgagcaccacc

SEQ ID NO: 777196 - DNA, 15 bp, Homo sapiens
ttctgagcaccaccc

SEQ ID NO: 777197 - DNA, 15 bp, Homo sapiens
tctgagcaccaccca

SEQ ID NO: 777198 - DNA, 15 bp, Homo sapiens
ctgagcaccacccag

SEQ ID NO: 777199 - DNA, 15 bp, Homo sapiens
tgagcaccacccaga

SEQ ID NO: 777200 - DNA, 15 bp, Homo sapiens
gagcaccacccagac

SEQ ID NO: 777201 - DNA, 15 bp, Homo sapiens
agcaccacccagacc

SEQ ID NO: 777202 - DNA, 15 bp, Homo sapiens
gcaccacccagacca

SEQ ID NO: 777203 - DNA, 15 bp, Homo sapiens
caccacccagaccaa

SEQ ID NO: 777204 - DNA, 15 bp, Homo sapiens
accacccagaccaac

SEQ ID NO: 777205 - DNA, 15 bp, Homo sapiens
ccacccagaccaact

SEQ ID NO: 777206 - DNA, 15 bp, Homo sapiens
cacccagaccaactg

SEQ ID NO: 777207 - DNA, 15 bp, Homo sapiens
acccagaccaactga

SEQ ID NO: 777208 - DNA, 15 bp, Homo sapiens
cccagaccaactgaa

SEQ ID NO: 777209 - DNA, 15 bp, Homo sapiens
ccagaccaactgaat

SEQ ID NO: 777210 - DNA, 15 bp, Homo sapiens
cagaccaactgaatt

SEQ ID NO: 777211 - DNA, 15 bp, Homo sapiens
agaccaactgaatta

SEQ ID NO: 777212 - DNA, 15 bp, Homo sapiens
gaccaactgaattag

SEQ ID NO: 777213 - DNA, 15 bp, Homo sapiens
accaactgaattaga

SEQ ID NO: 777214 - DNA, 15 bp, Homo sapiens
ccaactgaattagaa

SEQ ID NO: 777215 - DNA, 15 bp, Homo sapiens
caactgaattagaat

SEQ ID NO: 777216 - DNA, 15 bp, Homo sapiens
aactgaattagaatc

SEQ ID NO: 777217 - DNA, 15 bp, Homo sapiens
actgaattagaatct

SEQ ID NO: 777218 - DNA, 15 bp, Homo sapiens
ctgaattagaatctc

SEQ ID NO: 777219 - DNA, 15 bp, Homo sapiens
tgaattagaatctct

SEQ ID NO: 777220 - DNA, 15 bp, Homo sapiens
gaattagaatctcta

SEQ ID NO: 777221 - DNA, 15 bp, Homo sapiens
aattagaatctctag

SEQ ID NO: 777222 - DNA, 15 bp, Homo sapiens
attagaatctctaga

SEQ ID NO: 777223 - DNA, 15 bp, Homo sapiens
ttagaatctctagag

SEQ ID NO: 777224 - DNA, 15 bp, Homo sapiens
tagaatctctagagg

SEQ ID NO: 777225 - DNA, 15 bp, Homo sapiens
agaatctctagagga

SEQ ID NO: 777226 - DNA, 15 bp, Homo sapiens
gaatctctagaggag

SEQ ID NO: 777227 - DNA, 15 bp, Homo sapiens
aatctctagaggagg

SEQ ID NO: 777228 - DNA, 15 bp, Homo sapiens
atctctagaggaggg

SEQ ID NO: 777229 - DNA, 15 bp, Homo sapiens
tctctagaggaggga

SEQ ID NO: 777230 - DNA, 15 bp, Homo sapiens
ctctagaggagggac

SEQ ID NO: 777231 - DNA, 15 bp, Homo sapiens
tctagaggagggacc

SEQ ID NO: 777232 - DNA, 15 bp, Homo sapiens
ctagaggagggacct

SEQ ID NO: 777233 - DNA, 15 bp, Homo sapiens
tagaggagggaccta

SEQ ID NO: 777234 - DNA, 15 bp, Homo sapiens
agaggagggacctag

SEQ ID NO: 777235 - DNA, 15 bp, Homo sapiens
gaggagggacctaga

SEQ ID NO: 777236 - DNA, 15 bp, Homo sapiens
aggagggacctagag

SEQ ID NO: 777237 - DNA, 15 bp, Homo sapiens
ggagggacctagagg

SEQ ID NO: 777238 - DNA, 15 bp, Homo sapiens
gagggacctagagga

SEQ ID NO: 777239 - DNA, 15 bp, Homo sapiens
agggacctagaggac

SEQ ID NO: 777240 - DNA, 15 bp, Homo sapiens
gggacctagaggaca

SEQ ID NO: 777241 - DNA, 15 bp, Homo sapiens
ggacctagaggacag

SEQ ID NO: 777242 - DNA, 15 bp, Homo sapiens
gacctagaggacagc

SEQ ID NO: 777243 - DNA, 15 bp, Homo sapiens
acctagaggacagct

SEQ ID NO: 777244 - DNA, 15 bp, Homo sapiens
cctagaggacagctg

SEQ ID NO: 777245 - DNA, 15 bp, Homo sapiens
ctagaggacagctgg

SEQ ID NO: 777246 - DNA, 15 bp, Homo sapiens
tagaggacagctggc

SEQ ID NO: 777247 - DNA, 15 bp, Homo sapiens
agaggacagctggca

SEQ ID NO: 777248 - DNA, 15 bp, Homo sapiens
gaggacagctggcag

SEQ ID NO: 777249 - DNA, 15 bp, Homo sapiens
aggacagctggcagg

SEQ ID NO: 777250 - DNA, 15 bp, Homo sapiens
ggacagctggcaggg

SEQ ID NO: 777251 - DNA, 15 bp, Homo sapiens
gacagctggcagggc

SEQ ID NO: 777252 - DNA, 15 bp, Homo sapiens
acagctggcagggct

SEQ ID NO: 777253 - DNA, 15 bp, Homo sapiens
cagctggcagggctt

SEQ ID NO: 777254 - DNA, 15 bp, Homo sapiens
agctggcagggcttg

SEQ ID NO: 777255 - DNA, 15 bp, Homo sapiens
gctggcagggcttgg

SEQ ID NO: 777256 - DNA, 15 bp, Homo sapiens
ctggcagggcttggg

SEQ ID NO: 777257 - DNA, 15 bp, Homo sapiens
tggcagggcttggga

SEQ ID NO: 777258 - DNA, 15 bp, Homo sapiens
ggcagggcttgggat

SEQ ID NO: 777259 - DNA, 15 bp, Homo sapiens
gcagggcttgggatg

SEQ ID NO: 777260 - DNA, 15 bp, Homo sapiens
cagggcttgggatga

SEQ ID NO: 777261 - DNA, 15 bp, Homo sapiens
agggcttgggatgaa

SEQ ID NO: 777262 - DNA, 15 bp, Homo sapiens
gggcttgggatgaat

SEQ ID NO: 777263 - DNA, 15 bp, Homo sapiens
ggcttgggatgaatg

SEQ ID NO: 777264 - DNA, 15 bp, Homo sapiens
gcttgggatgaatga

SEQ ID NO: 777265 - DNA, 15 bp, Homo sapiens
cttgggatgaatgac

SEQ ID NO: 777266 - DNA, 15 bp, Homo sapiens
ttgggatgaatgaca

SEQ ID NO: 777267 - DNA, 15 bp, Homo sapiens
tgggatgaatgacac

SEQ ID NO: 777268 - DNA, 15 bp, Homo sapiens
gggatgaatgacaca

SEQ ID NO: 777269 - DNA, 15 bp, Homo sapiens
ggatgaatgacacag

SEQ ID NO: 777270 - DNA, 15 bp, Homo sapiens
gatgaatgacacagg

SEQ ID NO: 777271 - DNA, 15 bp, Homo sapiens
atgaatgacacaggc

SEQ ID NO: 777272 - DNA, 15 bp, Homo sapiens
tgaatgacacaggct

SEQ ID NO: 777273 - DNA, 15 bp, Homo sapiens
gaatgacacaggctg

SEQ ID NO: 777274 - DNA, 15 bp, Homo sapiens
aatgacacaggctgg

SEQ ID NO: 777275 - DNA, 15 bp, Homo sapiens
atgacacaggctggc

SEQ ID NO: 777276 - DNA, 15 bp, Homo sapiens
tgacacaggctggct

SEQ ID NO: 777277 - DNA, 15 bp, Homo sapiens
gacacaggctggctt

SEQ ID NO: 777278 - DNA, 15 bp, Homo sapiens
acacaggctggcttt

SEQ ID NO: 777279 - DNA, 15 bp, Homo sapiens
cacaggctggctttt

SEQ ID NO: 777280 - DNA, 15 bp, Homo sapiens
acaggctggcttttc

SEQ ID NO: 777281 - DNA, 15 bp, Homo sapiens
caggctggcttttcc

SEQ ID NO: 777282 - DNA, 15 bp, Homo sapiens
aggctggcttttccc

SEQ ID NO: 777283 - DNA, 15 bp, Homo sapiens
ggctggcttttccca

SEQ ID NO: 777284 - DNA, 15 bp, Homo sapiens
gctggcttttcccaa

SEQ ID NO: 777285 - DNA, 15 bp, Homo sapiens
ctggcttttcccaat

SEQ ID NO: 777286 - DNA, 15 bp, Homo sapiens
tggcttttcccaatt

SEQ ID NO: 777287 - DNA, 15 bp, Homo sapiens
ggcttttcccaattc

SEQ ID NO: 777288 - DNA, 15 bp, Homo sapiens
gcttttcccaattct

SEQ ID NO: 777289 - DNA, 15 bp, Homo sapiens
cttttcccaattctc

SEQ ID NO: 777290 - DNA, 15 bp, Homo sapiens
ttttcccaattctca

SEQ ID NO: 777291 - DNA, 15 bp, Homo sapiens
tttcccaattctcag

SEQ ID NO: 777292 - DNA, 15 bp, Homo sapiens
ttcccaattctcagt

SEQ ID NO: 777293 - DNA, 15 bp, Homo sapiens
tcccaattctcagtg

SEQ ID NO: 777294 - DNA, 15 bp, Homo sapiens
cccaattctcagtgg

SEQ ID NO: 777295 - DNA, 15 bp, Homo sapiens
ccaattctcagtggt

SEQ ID NO: 777296 - DNA, 15 bp, Homo sapiens
caattctcagtggtc

SEQ ID NO: 777297 - DNA, 15 bp, Homo sapiens
aattctcagtggtct

SEQ ID NO: 777298 - DNA, 15 bp, Homo sapiens
attctcagtggtctc

SEQ ID NO: 777299 - DNA, 15 bp, Homo sapiens
ttctcagtggtctcc

SEQ ID NO: 777300 - DNA, 15 bp, Homo sapiens
tctcagtggtctcca

SEQ ID NO: 777301 - DNA, 15 bp, Homo sapiens
ctcagtggtctccag

SEQ ID NO: 777302 - DNA, 15 bp, Homo sapiens
tcagtggtctccagg

SEQ ID NO: 777303 - DNA, 15 bp, Homo sapiens
cagtggtctccaggg

SEQ ID NO: 777304 - DNA, 15 bp, Homo sapiens
agtggtctccagggc

SEQ ID NO: 777305 - DNA, 15 bp, Homo sapiens
gtggtctccagggct

SEQ ID NO: 777306 - DNA, 15 bp, Homo sapiens
tggtctccagggctt

SEQ ID NO: 777307 - DNA, 15 bp, Homo sapiens
ggtctccagggcttt

SEQ ID NO: 777308 - DNA, 15 bp, Homo sapiens
gtctccagggctttg

SEQ ID NO: 777309 - DNA, 15 bp, Homo sapiens
tctccagggctttgt

SEQ ID NO: 777310 - DNA, 15 bp, Homo sapiens
ctccagggctttgtt

SEQ ID NO: 777311 - DNA, 15 bp, Homo sapiens
tccagggctttgttc

SEQ ID NO: 777312 - DNA, 15 bp, Homo sapiens
ccagggctttgttca

SEQ ID NO: 777313 - DNA, 15 bp, Homo sapiens
cagggctttgttcag

SEQ ID NO: 777314 - DNA, 15 bp, Homo sapiens
agggctttgttcagg

SEQ ID NO: 777315 - DNA, 15 bp, Homo sapiens
gggctttgttcagga

SEQ ID NO: 777316 - DNA, 15 bp, Homo sapiens
ggctttgttcaggag

SEQ ID NO: 777317 - DNA, 15 bp, Homo sapiens
gctttgttcaggaga

SEQ ID NO: 777318 - DNA, 15 bp, Homo sapiens
ctttgttcaggagag

SEQ ID NO: 777319 - DNA, 15 bp, Homo sapiens
tttgttcaggagagt

SEQ ID NO: 777320 - DNA, 15 bp, Homo sapiens
ttgttcaggagagtt

SEQ ID NO: 777321 - DNA, 15 bp, Homo sapiens
tgttcaggagagtta

SEQ ID NO: 777322 - DNA, 15 bp, Homo sapiens
gttcaggagagttac

SEQ ID NO: 777323 - DNA, 15 bp, Homo sapiens
ttcaggagagttacc

SEQ ID NO: 777324 - DNA, 15 bp, Homo sapiens
tcaggagagttaccc

SEQ ID NO: 777325 - DNA, 15 bp, Homo sapiens
caggagagttaccct

SEQ ID NO: 777326 - DNA, 15 bp, Homo sapiens
aggagagttaccctc

SEQ ID NO: 777327 - DNA, 15 bp, Homo sapiens
ggagagttaccctcc

SEQ ID NO: 777328 - DNA, 15 bp, Homo sapiens
gagagttaccctccc

SEQ ID NO: 777329 - DNA, 15 bp, Homo sapiens
agagttaccctccct

SEQ ID NO: 777330 - DNA, 15 bp, Homo sapiens
gagttaccctccctt

SEQ ID NO: 777331 - DNA, 15 bp, Homo sapiens
agttaccctcccttt

SEQ ID NO: 777332 - DNA, 15 bp, Homo sapiens
gttaccctccctttt

SEQ ID NO: 777333 - DNA, 15 bp, Homo sapiens
ttaccctccctttta

SEQ ID NO: 777334 - DNA, 15 bp, Homo sapiens
taccctcccttttag

SEQ ID NO: 777335 - DNA, 15 bp, Homo sapiens
accctcccttttagg

SEQ ID NO: 777336 - DNA, 15 bp, Homo sapiens
ccctcccttttaggc

SEQ ID NO: 777337 - DNA, 15 bp, Homo sapiens
cctcccttttaggcc

SEQ ID NO: 777338 - DNA, 15 bp, Homo sapiens
ctcccttttaggcca

SEQ ID NO: 777339 - DNA, 15 bp, Homo sapiens
tcccttttaggccat

SEQ ID NO: 777340 - DNA, 15 bp, Homo sapiens
cccttttaggccata

SEQ ID NO: 777341 - DNA, 15 bp, Homo sapiens
ccttttaggccatag

SEQ ID NO: 777342 - DNA, 15 bp, Homo sapiens
cttttaggccatagt

SEQ ID NO: 777343 - DNA, 15 bp, Homo sapiens
ttttaggccatagta

SEQ ID NO: 777344 - DNA, 15 bp, Homo sapiens
tttaggccatagtag

SEQ ID NO: 777345 - DNA, 15 bp, Homo sapiens
ttaggccatagtagt

SEQ ID NO: 777346 - DNA, 15 bp, Homo sapiens
taggccatagtagtt

SEQ ID NO: 777347 - DNA, 15 bp, Homo sapiens
aggccatagtagtta

SEQ ID NO: 777348 - DNA, 15 bp, Homo sapiens
ggccatagtagttaa

SEQ ID NO: 777349 - DNA, 15 bp, Homo sapiens
gccatagtagttaat

SEQ ID NO: 777350 - DNA, 15 bp, Homo sapiens
ccatagtagttaatg

SEQ ID NO: 777351 - DNA, 15 bp, Homo sapiens
catagtagttaatgc

SEQ ID NO: 777352 - DNA, 15 bp, Homo sapiens
atagtagttaatgct

SEQ ID NO: 777353 - DNA, 15 bp, Homo sapiens
tagtagttaatgctg

SEQ ID NO: 777354 - DNA, 15 bp, Homo sapiens
agtagttaatgctgc

SEQ ID NO: 777355 - DNA, 15 bp, Homo sapiens
gtagttaatgctgcg

SEQ ID NO: 777356 - DNA, 15 bp, Homo sapiens
tagttaatgctgcgg

SEQ ID NO: 777357 - DNA, 15 bp, Homo sapiens
agttaatgctgcggt

SEQ ID NO: 777358 - DNA, 15 bp, Homo sapiens
gttaatgctgcggtg

SEQ ID NO: 777359 - DNA, 15 bp, Homo sapiens
ttaatgctgcggtgg

SEQ ID NO: 777360 - DNA, 15 bp, Homo sapiens
taatgctgcggtgga

SEQ ID NO: 777361 - DNA, 15 bp, Homo sapiens
aatgctgcggtggaa

SEQ ID NO: 777362 - DNA, 15 bp, Homo sapiens
atgctgcggtggaaa

SEQ ID NO: 777363 - DNA, 15 bp, Homo sapiens
tgctgcggtggaaaa

SEQ ID NO: 777364 - DNA, 15 bp, Homo sapiens
gctgcggtggaaaat

SEQ ID NO: 777365 - DNA, 15 bp, Homo sapiens
ctgcggtggaaaatc

SEQ ID NO: 777366 - DNA, 15 bp, Homo sapiens
tgcggtggaaaatct

SEQ ID NO: 777367 - DNA, 15 bp, Homo sapiens
gcggtggaaaatctc

SEQ ID NO: 777368 - DNA, 15 bp, Homo sapiens
cggtggaaaatctca

SEQ ID NO: 777369 - DNA, 15 bp, Homo sapiens
ggtggaaaatctcat

SEQ ID NO: 777370 - DNA, 15 bp, Homo sapiens
gtggaaaatctcatc

SEQ ID NO: 777371 - DNA, 15 bp, Homo sapiens
tggaaaatctcatcc

SEQ ID NO: 777372 - DNA, 15 bp, Homo sapiens
ggaaaatctcatcct

SEQ ID NO: 777373 - DNA, 15 bp, Homo sapiens
gaaaatctcatcctg

SEQ ID NO: 777374 - DNA, 15 bp, Homo sapiens
aaaatctcatcctgt

SEQ ID NO: 777375 - DNA, 15 bp, Homo sapiens
aaatctcatcctgtg

SEQ ID NO: 777376 - DNA, 15 bp, Homo sapiens
aatctcatcctgtga

SEQ ID NO: 777377 - DNA, 15 bp, Homo sapiens
atctcatcctgtgaa

SEQ ID NO: 777378 - DNA, 15 bp, Homo sapiens
tctcatcctgtgaac

SEQ ID NO: 777379 - DNA, 15 bp, Homo sapiens
ctcatcctgtgaact

SEQ ID NO: 777380 - DNA, 15 bp, Homo sapiens
tcatcctgtgaactt

SEQ ID NO: 777381 - DNA, 15 bp, Homo sapiens
catcctgtgaactta

SEQ ID NO: 777382 - DNA, 15 bp, Homo sapiens
atcctgtgaacttag

SEQ ID NO: 777383 - DNA, 15 bp, Homo sapiens
tcctgtgaacttaga

SEQ ID NO: 777384 - DNA, 15 bp, Homo sapiens
cctgtgaacttagag

SEQ ID NO: 777385 - DNA, 15 bp, Homo sapiens
ctgtgaacttagaga

SEQ ID NO: 777386 - DNA, 15 bp, Homo sapiens
tgtgaacttagagac

SEQ ID NO: 777387 - DNA, 15 bp, Homo sapiens
gtgaacttagagaca

SEQ ID NO: 777388 - DNA, 15 bp, Homo sapiens
tgaacttagagacac

SEQ ID NO: 777389 - DNA, 15 bp, Homo sapiens
gaacttagagacact

SEQ ID NO: 777390 - DNA, 15 bp, Homo sapiens
aacttagagacactg

SEQ ID NO: 777391 - DNA, 15 bp, Homo sapiens
acttagagacactga

SEQ ID NO: 777392 - DNA, 15 bp, Homo sapiens
cttagagacactgag

SEQ ID NO: 777393 - DNA, 15 bp, Homo sapiens
ttagagacactgagg

SEQ ID NO: 777394 - DNA, 15 bp, Homo sapiens
tagagacactgaggt

SEQ ID NO: 777395 - DNA, 15 bp, Homo sapiens
agagacactgaggtg

SEQ ID NO: 777396 - DNA, 15 bp, Homo sapiens
gagacactgaggtgg

SEQ ID NO: 777397 - DNA, 15 bp, Homo sapiens
agacactgaggtggg

SEQ ID NO: 777398 - DNA, 15 bp, Homo sapiens
gacactgaggtgggg

SEQ ID NO: 777399 - DNA, 15 bp, Homo sapiens
acactgaggtgggga

SEQ ID NO: 777400 - DNA, 15 bp, Homo sapiens
cactgaggtggggat

SEQ ID NO: 777401 - DNA, 15 bp, Homo sapiens
actgaggtggggatg

SEQ ID NO: 777402 - DNA, 15 bp, Homo sapiens
ctgaggtggggatgg

SEQ ID NO: 777403 - DNA, 15 bp, Homo sapiens
tgaggtggggatgga

SEQ ID NO: 777404 - DNA, 15 bp, Homo sapiens
gaggtggggatggac

SEQ ID NO: 777405 - DNA, 15 bp, Homo sapiens
aggtggggatggacc

SEQ ID NO: 777406 - DNA, 15 bp, Homo sapiens
ggtggggatggacca

SEQ ID NO: 777407 - DNA, 15 bp, Homo sapiens
gtggggatggaccat

SEQ ID NO: 777408 - DNA, 15 bp, Homo sapiens
tggggatggaccatt

SEQ ID NO: 777409 - DNA, 15 bp, Homo sapiens
ggggatggaccattg

SEQ ID NO: 777410 - DNA, 15 bp, Homo sapiens
gggatggaccattgg

SEQ ID NO: 777411 - DNA, 15 bp, Homo sapiens
ggatggaccattggc

SEQ ID NO: 777412 - DNA, 15 bp, Homo sapiens
gatggaccattggct

SEQ ID NO: 777413 - DNA, 15 bp, Homo sapiens
atggaccattggctg

SEQ ID NO: 777414 - DNA, 15 bp, Homo sapiens
tggaccattggctgt

SEQ ID NO: 777415 - DNA, 15 bp, Homo sapiens
ggaccattggctgtt

SEQ ID NO: 777416 - DNA, 15 bp, Homo sapiens
gaccattggctgttg

SEQ ID NO: 777417 - DNA, 15 bp, Homo sapiens
accattggctgttga

SEQ ID NO: 777418 - DNA, 15 bp, Homo sapiens
ccattggctgttgac

SEQ ID NO: 777419 - DNA, 15 bp, Homo sapiens
cattggctgttgacc

SEQ ID NO: 777420 - DNA, 15 bp, Homo sapiens
attggctgttgacct

SEQ ID NO: 777421 - DNA, 15 bp, Homo sapiens
ttggctgttgacctt

SEQ ID NO: 777422 - DNA, 15 bp, Homo sapiens
tggctgttgaccttg

SEQ ID NO: 777423 - DNA, 15 bp, Homo sapiens
ggctgttgaccttga

SEQ ID NO: 777424 - DNA, 15 bp, Homo sapiens
gctgttgaccttgaa

SEQ ID NO: 777425 - DNA, 15 bp, Homo sapiens
ctgttgaccttgaag

SEQ ID NO: 777426 - DNA, 15 bp, Homo sapiens
tgttgaccttgaaga

SEQ ID NO: 777427 - DNA, 15 bp, Homo sapiens
gttgaccttgaagag

SEQ ID NO: 777428 - DNA, 15 bp, Homo sapiens
ttgaccttgaagaga

SEQ ID NO: 777429 - DNA, 15 bp, Homo sapiens
tgaccttgaagagag

SEQ ID NO: 777430 - DNA, 15 bp, Homo sapiens
gaccttgaagagagc

SEQ ID NO: 777431 - DNA, 15 bp, Homo sapiens
accttgaagagagcc

SEQ ID NO: 777432 - DNA, 15 bp, Homo sapiens
ccttgaagagagcct

SEQ ID NO: 777433 - DNA, 15 bp, Homo sapiens
cttgaagagagcctt

SEQ ID NO: 777434 - DNA, 15 bp, Homo sapiens
ttgaagagagcctta

SEQ ID NO: 777435 - DNA, 15 bp, Homo sapiens
tgaagagagccttac

SEQ ID NO: 777436 - DNA, 15 bp, Homo sapiens
gaagagagccttact

SEQ ID NO: 777437 - DNA, 15 bp, Homo sapiens
aagagagccttactt

SEQ ID NO: 777438 - DNA, 15 bp, Homo sapiens
agagagccttacttc

SEQ ID NO: 777439 - DNA, 15 bp, Homo sapiens
gagagccttacttcc

SEQ ID NO: 777440 - DNA, 15 bp, Homo sapiens
agagccttacttccc

SEQ ID NO: 777441 - DNA, 15 bp, Homo sapiens
gagccttacttccct

SEQ ID NO: 777442 - DNA, 15 bp, Homo sapiens
agccttacttccctg

SEQ ID NO: 777443 - DNA, 15 bp, Homo sapiens
gccttacttccctgt

SEQ ID NO: 777444 - DNA, 15 bp, Homo sapiens
ccttacttccctgtg

SEQ ID NO: 777445 - DNA, 15 bp, Homo sapiens
cttacttccctgtgt

SEQ ID NO: 777446 - DNA, 15 bp, Homo sapiens
ttacttccctgtgtt

SEQ ID NO: 777447 - DNA, 15 bp, Homo sapiens
tacttccctgtgttt

SEQ ID NO: 777448 - DNA, 15 bp, Homo sapiens
acttccctgtgtttt

SEQ ID NO: 777449 - DNA, 15 bp, Homo sapiens
cttccctgtgttttc

SEQ ID NO: 777450 - DNA, 15 bp, Homo sapiens
ttccctgtgttttct

SEQ ID NO: 777451 - DNA, 15 bp, Homo sapiens
tccctgtgttttctt

SEQ ID NO: 777452 - DNA, 15 bp, Homo sapiens
ccctgtgttttctta

SEQ ID NO: 777453 - DNA, 15 bp, Homo sapiens
cctgtgttttcttaa

SEQ ID NO: 777454 - DNA, 15 bp, Homo sapiens
ctgtgttttcttaaa

SEQ ID NO: 777455 - DNA, 15 bp, Homo sapiens
tgtgttttcttaaag

SEQ ID NO: 777456 - DNA, 15 bp, Homo sapiens
gtgttttcttaaagt

SEQ ID NO: 777457 - DNA, 15 bp, Homo sapiens
tgttttcttaaagtc

SEQ ID NO: 777458 - DNA, 15 bp, Homo sapiens
gttttcttaaagtct

SEQ ID NO: 777459 - DNA, 15 bp, Homo sapiens
ttttcttaaagtctc

SEQ ID NO: 777460 - DNA, 15 bp, Homo sapiens
tttcttaaagtctcg

SEQ ID NO: 777461 - DNA, 15 bp, Homo sapiens
ttcttaaagtctcgg

SEQ ID NO: 777462 - DNA, 15 bp, Homo sapiens
tcttaaagtctcggc

SEQ ID NO: 777463 - DNA, 15 bp, Homo sapiens
cttaaagtctcggca

SEQ ID NO: 777464 - DNA, 15 bp, Homo sapiens
ttaaagtctcggcaa

SEQ ID NO: 777465 - DNA, 15 bp, Homo sapiens
taaagtctcggcaac

SEQ ID NO: 777466 - DNA, 15 bp, Homo sapiens
aaagtctcggcaaca

SEQ ID NO: 777467 - DNA, 15 bp, Homo sapiens
aagtctcggcaacag

SEQ ID NO: 777468 - DNA, 15 bp, Homo sapiens
agtctcggcaacagg

SEQ ID NO: 777469 - DNA, 15 bp, Homo sapiens
gtctcggcaacaggt

SEQ ID NO: 777470 - DNA, 15 bp, Homo sapiens
tctcggcaacaggtg

SEQ ID NO: 777471 - DNA, 15 bp, Homo sapiens
ctcggcaacaggtgg

SEQ ID NO: 777472 - DNA, 15 bp, Homo sapiens
tcggcaacaggtggc

SEQ ID NO: 777473 - DNA, 15 bp, Homo sapiens
cggcaacaggtggcc

SEQ ID NO: 777474 - DNA, 15 bp, Homo sapiens
ggcaacaggtggcca

SEQ ID NO: 777475 - DNA, 15 bp, Homo sapiens
gcaacaggtggccac

SEQ ID NO: 777476 - DNA, 15 bp, Homo sapiens
caacaggtggccaca

SEQ ID NO: 777477 - DNA, 15 bp, Homo sapiens
aacaggtggccacaa

SEQ ID NO: 777478 - DNA, 15 bp, Homo sapiens
acaggtggccacaaa

SEQ ID NO: 777479 - DNA, 15 bp, Homo sapiens
caggtggccacaaag

SEQ ID NO: 777480 - DNA, 15 bp, Homo sapiens
aggtggccacaaagg

SEQ ID NO: 777481 - DNA, 15 bp, Homo sapiens
ggtggccacaaaggc

SEQ ID NO: 777482 - DNA, 15 bp, Homo sapiens
gtggccacaaaggcg

SEQ ID NO: 777483 - DNA, 15 bp, Homo sapiens
tggccacaaaggcgg

SEQ ID NO: 777484 - DNA, 15 bp, Homo sapiens
ggccacaaaggcggg

SEQ ID NO: 777485 - DNA, 15 bp, Homo sapiens
gccacaaaggcgggt

SEQ ID NO: 777486 - DNA, 15 bp, Homo sapiens
ccacaaaggcgggtg

SEQ ID NO: 777487 - DNA, 15 bp, Homo sapiens
cacaaaggcgggtgg

SEQ ID NO: 777488 - DNA, 15 bp, Homo sapiens
acaaaggcgggtgga

SEQ ID NO: 777489 - DNA, 15 bp, Homo sapiens
caaaggcgggtggaa

SEQ ID NO: 777490 - DNA, 15 bp, Homo sapiens
aaaggcgggtggaag

SEQ ID NO: 777491 - DNA, 15 bp, Homo sapiens
aaggcgggtggaagg

SEQ ID NO: 777492 - DNA, 15 bp, Homo sapiens
aggcgggtggaaggg

SEQ ID NO: 777493 - DNA, 15 bp, Homo sapiens
ggcgggtggaagggc

SEQ ID NO: 777494 - DNA, 15 bp, Homo sapiens
gcgggtggaagggca

SEQ ID NO: 777495 - DNA, 15 bp, Homo sapiens
cgggtggaagggcag

SEQ ID NO: 777496 - DNA, 15 bp, Homo sapiens
gggtggaagggcaga

SEQ ID NO: 777497 - DNA, 15 bp, Homo sapiens
ggtggaagggcagag

SEQ ID NO: 777498 - DNA, 15 bp, Homo sapiens
gtggaagggcagagt

SEQ ID NO: 777499 - DNA, 15 bp, Homo sapiens
tggaagggcagagtg

SEQ ID NO: 777500 - DNA, 15 bp, Homo sapiens
ggaagggcagagtgc

SEQ ID NO: 777501 - DNA, 15 bp, Homo sapiens
gaagggcagagtgcc

SEQ ID NO: 777502 - DNA, 15 bp, Homo sapiens
aagggcagagtgcca

SEQ ID NO: 777503 - DNA, 15 bp, Homo sapiens
agggcagagtgccag

SEQ ID NO: 777504 - DNA, 15 bp, Homo sapiens
gggcagagtgccagt

SEQ ID NO: 777505 - DNA, 15 bp, Homo sapiens
ggcagagtgccagtt

SEQ ID NO: 777506 - DNA, 15 bp, Homo sapiens
gcagagtgccagttt

SEQ ID NO: 777507 - DNA, 15 bp, Homo sapiens
cagagtgccagttta

SEQ ID NO: 777508 - DNA, 15 bp, Homo sapiens
agagtgccagtttac

SEQ ID NO: 777509 - DNA, 15 bp, Homo sapiens
gagtgccagtttaca

SEQ ID NO: 777510 - DNA, 15 bp, Homo sapiens
agtgccagtttacat

SEQ ID NO: 777511 - DNA, 15 bp, Homo sapiens
gtgccagtttacata

SEQ ID NO: 777512 - DNA, 15 bp, Homo sapiens
tgccagtttacatag

SEQ ID NO: 777513 - DNA, 15 bp, Homo sapiens
gccagtttacatagc

SEQ ID NO: 777514 - DNA, 15 bp, Homo sapiens
ccagtttacatagcc

SEQ ID NO: 777515 - DNA, 15 bp, Homo sapiens
cagtttacatagccc

SEQ ID NO: 777516 - DNA, 15 bp, Homo sapiens
agtttacatagcccc

SEQ ID NO: 777517 - DNA, 15 bp, Homo sapiens
gtttacatagccccc

SEQ ID NO: 777518 - DNA, 15 bp, Homo sapiens
tttacatagcccccg

SEQ ID NO: 777519 - DNA, 15 bp, Homo sapiens
ttacatagcccccgc

SEQ ID NO: 777520 - DNA, 15 bp, Homo sapiens
tacatagcccccgca

SEQ ID NO: 777521 - DNA, 15 bp, Homo sapiens
acatagcccccgcaa

SEQ ID NO: 777522 - DNA, 15 bp, Homo sapiens
catagcccccgcaac

SEQ ID NO: 777523 - DNA, 15 bp, Homo sapiens
atagcccccgcaact

SEQ ID NO: 777524 - DNA, 15 bp, Homo sapiens
tagcccccgcaactg

SEQ ID NO: 777525 - DNA, 15 bp, Homo sapiens
agcccccgcaactgt

SEQ ID NO: 777526 - DNA, 15 bp, Homo sapiens
gcccccgcaactgtt

SEQ ID NO: 777527 - DNA, 15 bp, Homo sapiens
cccccgcaactgttg

SEQ ID NO: 777528 - DNA, 15 bp, Homo sapiens
ccccgcaactgttga

SEQ ID NO: 777529 - DNA, 15 bp, Homo sapiens
cccgcaactgttgag

SEQ ID NO: 777530 - DNA, 15 bp, Homo sapiens
ccgcaactgttgagg

SEQ ID NO: 777531 - DNA, 15 bp, Homo sapiens
cgcaactgttgaggg

SEQ ID NO: 777532 - DNA, 15 bp, Homo sapiens
gcaactgttgagggg

SEQ ID NO: 777533 - DNA, 15 bp, Homo sapiens
caactgttgagggga

SEQ ID NO: 777534 - DNA, 15 bp, Homo sapiens
aactgttgaggggaa

SEQ ID NO: 777535 - DNA, 15 bp, Homo sapiens
actgttgaggggaac

SEQ ID NO: 777536 - DNA, 15 bp, Homo sapiens
ctgttgaggggaaca

SEQ ID NO: 777537 - DNA, 15 bp, Homo sapiens
tgttgaggggaacag

SEQ ID NO: 777538 - DNA, 15 bp, Homo sapiens
gttgaggggaacagg

SEQ ID NO: 777539 - DNA, 15 bp, Homo sapiens
ttgaggggaacaggt

SEQ ID NO: 777540 - DNA, 15 bp, Homo sapiens
tgaggggaacaggtg

SEQ ID NO: 777541 - DNA, 15 bp, Homo sapiens
gaggggaacaggtgg

SEQ ID NO: 777542 - DNA, 15 bp, Homo sapiens
aggggaacaggtggc

SEQ ID NO: 777543 - DNA, 15 bp, Homo sapiens
ggggaacaggtggct

SEQ ID NO: 777544 - DNA, 15 bp, Homo sapiens
gggaacaggtggctg

SEQ ID NO: 777545 - DNA, 15 bp, Homo sapiens
ggaacaggtggctgc

SEQ ID NO: 777546 - DNA, 15 bp, Homo sapiens
gaacaggtggctgca

SEQ ID NO: 777547 - DNA, 15 bp, Homo sapiens
aacaggtggctgcag

SEQ ID NO: 777548 - DNA, 15 bp, Homo sapiens
acaggtggctgcaga

SEQ ID NO: 777549 - DNA, 15 bp, Homo sapiens
caggtggctgcagag

SEQ ID NO: 777550 - DNA, 15 bp, Homo sapiens
aggtggctgcagagg

SEQ ID NO: 777551 - DNA, 15 bp, Homo sapiens
ggtggctgcagaggg

SEQ ID NO: 777552 - DNA, 15 bp, Homo sapiens
gtggctgcagaggga

SEQ ID NO: 777553 - DNA, 15 bp, Homo sapiens
tggctgcagagggat

SEQ ID NO: 777554 - DNA, 15 bp, Homo sapiens
ggctgcagagggatt

SEQ ID NO: 777555 - DNA, 15 bp, Homo sapiens
gctgcagagggattg

SEQ ID NO: 777556 - DNA, 15 bp, Homo sapiens
ctgcagagggattgg

SEQ ID NO: 777557 - DNA, 15 bp, Homo sapiens
tgcagagggattggc

SEQ ID NO: 777558 - DNA, 15 bp, Homo sapiens
gcagagggattggct

SEQ ID NO: 777559 - DNA, 15 bp, Homo sapiens
cagagggattggctg

SEQ ID NO: 777560 - DNA, 15 bp, Homo sapiens
agagggattggctga

SEQ ID NO: 777561 - DNA, 15 bp, Homo sapiens
gagggattggctgag

SEQ ID NO: 777562 - DNA, 15 bp, Homo sapiens
agggattggctgaga

SEQ ID NO: 777563 - DNA, 15 bp, Homo sapiens
gggattggctgagat

SEQ ID NO: 777564 - DNA, 15 bp, Homo sapiens
ggattggctgagatc

SEQ ID NO: 777565 - DNA, 15 bp, Homo sapiens
gattggctgagatct

SEQ ID NO: 777566 - DNA, 15 bp, Homo sapiens
attggctgagatcta

SEQ ID NO: 777567 - DNA, 15 bp, Homo sapiens
ttggctgagatctag

SEQ ID NO: 777568 - DNA, 15 bp, Homo sapiens
tggctgagatctagg

SEQ ID NO: 777569 - DNA, 15 bp, Homo sapiens
ggctgagatctagga

SEQ ID NO: 777570 - DNA, 15 bp, Homo sapiens
gctgagatctaggaa

SEQ ID NO: 777571 - DNA, 15 bp, Homo sapiens
ctgagatctaggaag

SEQ ID NO: 777572 - DNA, 15 bp, Homo sapiens
tgagatctaggaagc

SEQ ID NO: 777573 - DNA, 15 bp, Homo sapiens
gagatctaggaagca

SEQ ID NO: 777574 - DNA, 15 bp, Homo sapiens
agatctaggaagcag

SEQ ID NO: 777575 - DNA, 15 bp, Homo sapiens
gatctaggaagcagg

SEQ ID NO: 777576 - DNA, 15 bp, Homo sapiens
atctaggaagcagga

SEQ ID NO: 777577 - DNA, 15 bp, Homo sapiens
tctaggaagcaggag

SEQ ID NO: 777578 - DNA, 15 bp, Homo sapiens
ctaggaagcaggagg

SEQ ID NO: 777579 - DNA, 15 bp, Homo sapiens
taggaagcaggaggc

SEQ ID NO: 777580 - DNA, 15 bp, Homo sapiens
aggaagcaggaggcc

SEQ ID NO: 777581 - DNA, 15 bp, Homo sapiens
ggaagcaggaggcca

SEQ ID NO: 777582 - DNA, 15 bp, Homo sapiens
gaagcaggaggccaa

SEQ ID NO: 777583 - DNA, 15 bp, Homo sapiens
aagcaggaggccaag

SEQ ID NO: 777584 - DNA, 15 bp, Homo sapiens
agcaggaggccaaga

SEQ ID NO: 777585 - DNA, 15 bp, Homo sapiens
gcaggaggccaagac

SEQ ID NO: 777586 - DNA, 15 bp, Homo sapiens
caggaggccaagacc

SEQ ID NO: 777587 - DNA, 15 bp, Homo sapiens
aggaggccaagaccc

SEQ ID NO: 777588 - DNA, 15 bp, Homo sapiens
ggaggccaagaccca

SEQ ID NO: 777589 - DNA, 15 bp, Homo sapiens
gaggccaagacccac

SEQ ID NO: 777590 - DNA, 15 bp, Homo sapiens
aggccaagacccact

SEQ ID NO: 777591 - DNA, 15 bp, Homo sapiens
ggccaagacccactc

SEQ ID NO: 777592 - DNA, 15 bp, Homo sapiens
gccaagacccactca

SEQ ID NO: 777593 - DNA, 15 bp, Homo sapiens
ccaagacccactcag

SEQ ID NO: 777594 - DNA, 15 bp, Homo sapiens
caagacccactcagt

SEQ ID NO: 777595 - DNA, 15 bp, Homo sapiens
aagacccactcagtt

SEQ ID NO: 777596 - DNA, 15 bp, Homo sapiens
agacccactcagttg

SEQ ID NO: 777597 - DNA, 15 bp, Homo sapiens
gacccactcagttgc

SEQ ID NO: 777598 - DNA, 15 bp, Homo sapiens
acccactcagttgct

SEQ ID NO: 777599 - DNA, 15 bp, Homo sapiens
cccactcagttgcta

SEQ ID NO: 777600 - DNA, 15 bp, Homo sapiens
ccactcagttgctat

SEQ ID NO: 777601 - DNA, 15 bp, Homo sapiens
cactcagttgctatt

SEQ ID NO: 777602 - DNA, 15 bp, Homo sapiens
actcagttgctattc

SEQ ID NO: 777603 - DNA, 15 bp, Homo sapiens
ctcagttgctattcc

SEQ ID NO: 777604 - DNA, 15 bp, Homo sapiens
tcagttgctattcca

SEQ ID NO: 777605 - DNA, 15 bp, Homo sapiens
cagttgctattccat

SEQ ID NO: 777606 - DNA, 15 bp, Homo sapiens
agttgctattccata

SEQ ID NO: 777607 - DNA, 15 bp, Homo sapiens
gttgctattccatat

SEQ ID NO: 777608 - DNA, 15 bp, Homo sapiens
ttgctattccatatt

SEQ ID NO: 777609 - DNA, 15 bp, Homo sapiens
tgctattccatattc

SEQ ID NO: 777610 - DNA, 15 bp, Homo sapiens
gctattccatattcc

SEQ ID NO: 777611 - DNA, 15 bp, Homo sapiens
ctattccatattcct

SEQ ID NO: 777612 - DNA, 15 bp, Homo sapiens
tattccatattccta

SEQ ID NO: 777613 - DNA, 15 bp, Homo sapiens
attccatattcctaa

SEQ ID NO: 777614 - DNA, 15 bp, Homo sapiens
ttccatattcctaaa

SEQ ID NO: 777615 - DNA, 15 bp, Homo sapiens
tccatattcctaaac

SEQ ID NO: 777616 - DNA, 15 bp, Homo sapiens
ccatattcctaaaca

SEQ ID NO: 777617 - DNA, 15 bp, Homo sapiens
catattcctaaacaa

SEQ ID NO: 777618 - DNA, 15 bp, Homo sapiens
atattcctaaacaaa

SEQ ID NO: 777619 - DNA, 15 bp, Homo sapiens
tattcctaaacaaaa

SEQ ID NO: 777620 - DNA, 15 bp, Homo sapiens
attcctaaacaaaat

SEQ ID NO: 777621 - DNA, 15 bp, Homo sapiens
ttcctaaacaaaata

SEQ ID NO: 777622 - DNA, 15 bp, Homo sapiens
tcctaaacaaaatat

SEQ ID NO: 777623 - DNA, 15 bp, Homo sapiens
cctaaacaaaatata

SEQ ID NO: 777624 - DNA, 15 bp, Homo sapiens
ctaaacaaaatatac

SEQ ID NO: 777625 - DNA, 15 bp, Homo sapiens
taaacaaaatataca

SEQ ID NO: 777626 - DNA, 15 bp, Homo sapiens
aaacaaaatatacag

SEQ ID NO: 777627 - DNA, 15 bp, Homo sapiens
aacaaaatatacaga

SEQ ID NO: 777628 - DNA, 15 bp, Homo sapiens
acaaaatatacagaa

SEQ ID NO: 777629 - DNA, 15 bp, Homo sapiens
caaaatatacagaaa

SEQ ID NO: 777630 - DNA, 15 bp, Homo sapiens
aaaatatacagaaac

SEQ ID NO: 777631 - DNA, 15 bp, Homo sapiens
aaatatacagaaacc

SEQ ID NO: 777632 - DNA, 15 bp, Homo sapiens
aatatacagaaacca

SEQ ID NO: 777633 - DNA, 15 bp, Homo sapiens
atatacagaaaccaa

SEQ ID NO: 777634 - DNA, 15 bp, Homo sapiens
tatacagaaaccaag

SEQ ID NO: 777635 - DNA, 15 bp, Homo sapiens
atacagaaaccaaga

SEQ ID NO: 777636 - DNA, 15 bp, Homo sapiens
tacagaaaccaagaa

SEQ ID NO: 777637 - DNA, 15 bp, Homo sapiens
acagaaaccaagaat

SEQ ID NO: 777638 - DNA, 15 bp, Homo sapiens
cagaaaccaagaatg

SEQ ID NO: 777639 - DNA, 15 bp, Homo sapiens
agaaaccaagaatgt

SEQ ID NO: 777640 - DNA, 15 bp, Homo sapiens
gaaaccaagaatgta

SEQ ID NO: 777641 - DNA, 15 bp, Homo sapiens
aaaccaagaatgtaa

SEQ ID NO: 777642 - DNA, 15 bp, Homo sapiens
aaccaagaatgtaaa

SEQ ID NO: 777643 - DNA, 15 bp, Homo sapiens
accaagaatgtaaaa

SEQ ID NO: 777644 - DNA, 15 bp, Homo sapiens
ccaagaatgtaaaaa

SEQ ID NO: 777645 - DNA, 15 bp, Homo sapiens
caagaatgtaaaaaa

SEQ ID NO: 777646 - DNA, 15 bp, Homo sapiens
aagaatgtaaaaaaa

SEQ ID NO: 777647 - DNA, 15 bp, Homo sapiens
agaatgtaaaaaaaa

SEQ ID NO: 777648 - DNA, 15 bp, Homo sapiens
gaatgtaaaaaaaaa

SEQ ID NO: 777649 - DNA, 15 bp, Homo sapiens
aatgtaaaaaaaaaa

SEQ ID NO: 777650 - DNA, 15 bp, Homo sapiens
atgtaaaaaaaaaaa

SEQ ID NO: 777651 - DNA, 15 bp, Homo sapiens
tgtaaaaaaaaaaaa

SEQ ID NO: 777652 - DNA, 15 bp, Homo sapiens
gtaaaaaaaaaaaag

SEQ ID NO: 777653 - DNA, 15 bp, Homo sapiens
taaaaaaaaaaaagt

SEQ ID NO: 777654 - DNA, 15 bp, Homo sapiens
aaaaaaaaaaaagtt

SEQ ID NO: 777655 - DNA, 15 bp, Homo sapiens
aaaaaaaaaaagttt

SEQ ID NO: 777656 - DNA, 15 bp, Homo sapiens
aaaaaaaaaagtttg

SEQ ID NO: 777657 - DNA, 15 bp, Homo sapiens
aaaaaaaaagtttga

SEQ ID NO: 777658 - DNA, 15 bp, Homo sapiens
aaaaaaaagtttgat

SEQ ID NO: 777659 - DNA, 15 bp, Homo sapiens
aaaaaaagtttgatc

SEQ ID NO: 777660 - DNA, 15 bp, Homo sapiens
aaaaaagtttgatct

SEQ ID NO: 777661 - DNA, 15 bp, Homo sapiens
aaaaagtttgatctg

SEQ ID NO: 777662 - DNA, 15 bp, Homo sapiens
aaaagtttgatctgt

SEQ ID NO: 777663 - DNA, 15 bp, Homo sapiens
aaagtttgatctgtc

SEQ ID NO: 777664 - DNA, 15 bp, Homo sapiens
aagtttgatctgtca

SEQ ID NO: 777665 - DNA, 15 bp, Homo sapiens
agtttgatctgtcat

SEQ ID NO: 777666 - DNA, 15 bp, Homo sapiens
gtttgatctgtcatg

SEQ ID NO: 777667 - DNA, 15 bp, Homo sapiens
tttgatctgtcatga

SEQ ID NO: 777668 - DNA, 15 bp, Homo sapiens
ttgatctgtcatgag

SEQ ID NO: 777669 - DNA, 15 bp, Homo sapiens
tgatctgtcatgagg

SEQ ID NO: 777670 - DNA, 15 bp, Homo sapiens
gatctgtcatgagga

SEQ ID NO: 777671 - DNA, 15 bp, Homo sapiens
atctgtcatgaggaa

SEQ ID NO: 777672 - DNA, 15 bp, Homo sapiens
tctgtcatgaggaat

SEQ ID NO: 777673 - DNA, 15 bp, Homo sapiens
ctgtcatgaggaatt

SEQ ID NO: 777674 - DNA, 15 bp, Homo sapiens
tgtcatgaggaatta

SEQ ID NO: 777675 - DNA, 15 bp, Homo sapiens
gtcatgaggaattag

SEQ ID NO: 777676 - DNA, 15 bp, Homo sapiens
tcatgaggaattagg

SEQ ID NO: 777677 - DNA, 15 bp, Homo sapiens
catgaggaattagga

SEQ ID NO: 777678 - DNA, 15 bp, Homo sapiens
atgaggaattaggaa

SEQ ID NO: 777679 - DNA, 15 bp, Homo sapiens
tgaggaattaggaag

SEQ ID NO: 777680 - DNA, 15 bp, Homo sapiens
gaggaattaggaagg

SEQ ID NO: 777681 - DNA, 15 bp, Homo sapiens
aggaattaggaagga

SEQ ID NO: 777682 - DNA, 15 bp, Homo sapiens
ggaattaggaaggac

SEQ ID NO: 777683 - DNA, 15 bp, Homo sapiens
gaattaggaaggact

SEQ ID NO: 777684 - DNA, 15 bp, Homo sapiens
aattaggaaggactt

SEQ ID NO: 777685 - DNA, 15 bp, Homo sapiens
attaggaaggacttt

SEQ ID NO: 777686 - DNA, 15 bp, Homo sapiens
ttaggaaggactttg

SEQ ID NO: 777687 - DNA, 15 bp, Homo sapiens
taggaaggactttga

SEQ ID NO: 777688 - DNA, 15 bp, Homo sapiens
aggaaggactttgaa

SEQ ID NO: 777689 - DNA, 15 bp, Homo sapiens
ggaaggactttgaaa

SEQ ID NO: 777690 - DNA, 15 bp, Homo sapiens
gaaggactttgaaag

SEQ ID NO: 777691 - DNA, 15 bp, Homo sapiens
aaggactttgaaaga

SEQ ID NO: 777692 - DNA, 15 bp, Homo sapiens
aggactttgaaagag

SEQ ID NO: 777693 - DNA, 15 bp, Homo sapiens
ggactttgaaagagt

SEQ ID NO: 777694 - DNA, 15 bp, Homo sapiens
gactttgaaagagtc

SEQ ID NO: 777695 - DNA, 15 bp, Homo sapiens
actttgaaagagtca

SEQ ID NO: 777696 - DNA, 15 bp, Homo sapiens
ctttgaaagagtcaa

SEQ ID NO: 777697 - DNA, 15 bp, Homo sapiens
tttgaaagagtcaat

SEQ ID NO: 777698 - DNA, 15 bp, Homo sapiens
ttgaaagagtcaata

SEQ ID NO: 777699 - DNA, 15 bp, Homo sapiens
tgaaagagtcaatat

SEQ ID NO: 777700 - DNA, 15 bp, Homo sapiens
gaaagagtcaatatg

SEQ ID NO: 777701 - DNA, 15 bp, Homo sapiens
aaagagtcaatatgg

SEQ ID NO: 777702 - DNA, 15 bp, Homo sapiens
aagagtcaatatggt

SEQ ID NO: 777703 - DNA, 15 bp, Homo sapiens
agagtcaatatggta

SEQ ID NO: 777704 - DNA, 15 bp, Homo sapiens
gagtcaatatggtaa

SEQ ID NO: 777705 - DNA, 15 bp, Homo sapiens
agtcaatatggtaaa

SEQ ID NO: 777706 - DNA, 15 bp, Homo sapiens
gtcaatatggtaaaa

SEQ ID NO: 777707 - DNA, 15 bp, Homo sapiens
tcaatatggtaaaaa

SEQ ID NO: 777708 - DNA, 15 bp, Homo sapiens
caatatggtaaaaag

SEQ ID NO: 777709 - DNA, 15 bp, Homo sapiens
aatatggtaaaaaga

SEQ ID NO: 777710 - DNA, 15 bp, Homo sapiens
atatggtaaaaagaa

SEQ ID NO: 777711 - DNA, 15 bp, Homo sapiens
tatggtaaaaagaat

SEQ ID NO: 777712 - DNA, 15 bp, Homo sapiens
atggtaaaaagaata

SEQ ID NO: 777713 - DNA, 15 bp, Homo sapiens
tggtaaaaagaatat

SEQ ID NO: 777714 - DNA, 15 bp, Homo sapiens
ggtaaaaagaatata

SEQ ID NO: 777715 - DNA, 15 bp, Homo sapiens
gtaaaaagaatatac

SEQ ID NO: 777716 - DNA, 15 bp, Homo sapiens
taaaaagaatatact

SEQ ID NO: 777717 - DNA, 15 bp, Homo sapiens
aaaaagaatatactt

SEQ ID NO: 777718 - DNA, 15 bp, Homo sapiens
aaaagaatatacttt

SEQ ID NO: 777719 - DNA, 15 bp, Homo sapiens
aaagaatatacttta

SEQ ID NO: 777720 - DNA, 15 bp, Homo sapiens
aagaatatactttag

SEQ ID NO: 777721 - DNA, 15 bp, Homo sapiens
agaatatactttagg

SEQ ID NO: 777722 - DNA, 15 bp, Homo sapiens
gaatatactttagga

SEQ ID NO: 777723 - DNA, 15 bp, Homo sapiens
aatatactttaggat

SEQ ID NO: 777724 - DNA, 15 bp, Homo sapiens
atatactttaggatc

SEQ ID NO: 777725 - DNA, 15 bp, Homo sapiens
tatactttaggatca

SEQ ID NO: 777726 - DNA, 15 bp, Homo sapiens
atactttaggatcaa

SEQ ID NO: 777727 - DNA, 15 bp, Homo sapiens
tactttaggatcaaa

SEQ ID NO: 777728 - DNA, 15 bp, Homo sapiens
actttaggatcaaaa

SEQ ID NO: 777729 - DNA, 15 bp, Homo sapiens
ctttaggatcaaaaa

SEQ ID NO: 777730 - DNA, 15 bp, Homo sapiens
tttaggatcaaaaaa

SEQ ID NO: 777731 - DNA, 15 bp, Homo sapiens
ttaggatcaaaaaag

SEQ ID NO: 777732 - DNA, 15 bp, Homo sapiens
taggatcaaaaaaga

SEQ ID NO: 777733 - DNA, 15 bp, Homo sapiens
aggatcaaaaaagaa

SEQ ID NO: 777734 - DNA, 15 bp, Homo sapiens
ggatcaaaaaagaaa

SEQ ID NO: 777735 - DNA, 15 bp, Homo sapiens
gatcaaaaaagaaac

SEQ ID NO: 777736 - DNA, 15 bp, Homo sapiens
atcaaaaaagaaact

SEQ ID NO: 777737 - DNA, 15 bp, Homo sapiens
tcaaaaaagaaacta

SEQ ID NO: 777738 - DNA, 15 bp, Homo sapiens
caaaaaagaaactaa

SEQ ID NO: 777739 - DNA, 15 bp, Homo sapiens
aaaaaagaaactaaa

SEQ ID NO: 777740 - DNA, 15 bp, Homo sapiens
aaaaagaaactaaaa

SEQ ID NO: 777741 - DNA, 15 bp, Homo sapiens
aaaagaaactaaaaa

SEQ ID NO: 777742 - DNA, 15 bp, Homo sapiens
aaagaaactaaaaat

SEQ ID NO: 777743 - DNA, 15 bp, Homo sapiens
aagaaactaaaaatg

SEQ ID NO: 777744 - DNA, 15 bp, Homo sapiens
agaaactaaaaatgt

SEQ ID NO: 777745 - DNA, 15 bp, Homo sapiens
gaaactaaaaatgtt

SEQ ID NO: 777746 - DNA, 15 bp, Homo sapiens
aaactaaaaatgtta

SEQ ID NO: 777747 - DNA, 15 bp, Homo sapiens
aactaaaaatgttac

SEQ ID NO: 777748 - DNA, 15 bp, Homo sapiens
actaaaaatgttaca

SEQ ID NO: 777749 - DNA, 15 bp, Homo sapiens
ctaaaaatgttacag

SEQ ID NO: 777750 - DNA, 15 bp, Homo sapiens
taaaaatgttacagg

SEQ ID NO: 777751 - DNA, 15 bp, Homo sapiens
aaaaatgttacaggt

SEQ ID NO: 777752 - DNA, 15 bp, Homo sapiens
aaaatgttacaggta

SEQ ID NO: 777753 - DNA, 15 bp, Homo sapiens
aaatgttacaggtat

SEQ ID NO: 777754 - DNA, 15 bp, Homo sapiens
aatgttacaggtatt

SEQ ID NO: 777755 - DNA, 15 bp, Homo sapiens
atgttacaggtatta

SEQ ID NO: 777756 - DNA, 15 bp, Homo sapiens
tgttacaggtattac

SEQ ID NO: 777757 - DNA, 15 bp, Homo sapiens
gttacaggtattact

SEQ ID NO: 777758 - DNA, 15 bp, Homo sapiens
ttacaggtattactg

SEQ ID NO: 777759 - DNA, 15 bp, Homo sapiens
tacaggtattactgt

SEQ ID NO: 777760 - DNA, 15 bp, Homo sapiens
acaggtattactgta

SEQ ID NO: 777761 - DNA, 15 bp, Homo sapiens
caggtattactgtaa

SEQ ID NO: 777762 - DNA, 15 bp, Homo sapiens
aggtattactgtaac

SEQ ID NO: 777763 - DNA, 15 bp, Homo sapiens
ggtattactgtaaca

SEQ ID NO: 777764 - DNA, 15 bp, Homo sapiens
gtattactgtaacac

SEQ ID NO: 777765 - DNA, 15 bp, Homo sapiens
tattactgtaacaca

SEQ ID NO: 777766 - DNA, 15 bp, Homo sapiens
attactgtaacacat

SEQ ID NO: 777767 - DNA, 15 bp, Homo sapiens
ttactgtaacacatg

SEQ ID NO: 777768 - DNA, 15 bp, Homo sapiens
tactgtaacacatgc

SEQ ID NO: 777769 - DNA, 15 bp, Homo sapiens
actgtaacacatgcc

SEQ ID NO: 777770 - DNA, 15 bp, Homo sapiens
ctgtaacacatgcca

SEQ ID NO: 777771 - DNA, 15 bp, Homo sapiens
tgtaacacatgccaa

SEQ ID NO: 777772 - DNA, 15 bp, Homo sapiens
gtaacacatgccaac

SEQ ID NO: 777773 - DNA, 15 bp, Homo sapiens
taacacatgccaact

SEQ ID NO: 777774 - DNA, 15 bp, Homo sapiens
aacacatgccaactg

SEQ ID NO: 777775 - DNA, 15 bp, Homo sapiens
acacatgccaactgc

SEQ ID NO: 777776 - DNA, 15 bp, Homo sapiens
cacatgccaactgcc

SEQ ID NO: 777777 - DNA, 15 bp, Homo sapiens
acatgccaactgcct

SEQ ID NO: 777778 - DNA, 15 bp, Homo sapiens
catgccaactgcctg

SEQ ID NO: 777779 - DNA, 15 bp, Homo sapiens
atgccaactgcctgg

SEQ ID NO: 777780 - DNA, 15 bp, Homo sapiens
tgccaactgcctggg

SEQ ID NO: 777781 - DNA, 15 bp, Homo sapiens
gccaactgcctgggt

SEQ ID NO: 777782 - DNA, 15 bp, Homo sapiens
ccaactgcctgggtt

SEQ ID NO: 777783 - DNA, 15 bp, Homo sapiens
caactgcctgggttt

SEQ ID NO: 777784 - DNA, 15 bp, Homo sapiens
aactgcctgggttta

SEQ ID NO: 777785 - DNA, 15 bp, Homo sapiens
actgcctgggtttat

SEQ ID NO: 777786 - DNA, 15 bp, Homo sapiens
ctgcctgggtttatc

SEQ ID NO: 777787 - DNA, 15 bp, Homo sapiens
tgcctgggtttatct

SEQ ID NO: 777788 - DNA, 15 bp, Homo sapiens
gcctgggtttatctt

SEQ ID NO: 777789 - DNA, 15 bp, Homo sapiens
cctgggtttatcttc

SEQ ID NO: 777790 - DNA, 15 bp, Homo sapiens
ctgggtttatcttct

SEQ ID NO: 777791 - DNA, 15 bp, Homo sapiens
tgggtttatcttctt

SEQ ID NO: 777792 - DNA, 15 bp, Homo sapiens
gggtttatcttctta

SEQ ID NO: 777793 - DNA, 15 bp, Homo sapiens
ggtttatcttcttaa

SEQ ID NO: 777794 - DNA, 15 bp, Homo sapiens
gtttatcttcttaag

SEQ ID NO: 777795 - DNA, 15 bp, Homo sapiens
tttatcttcttaagc

SEQ ID NO: 777796 - DNA, 15 bp, Homo sapiens
ttatcttcttaagcc

SEQ ID NO: 777797 - DNA, 15 bp, Homo sapiens
tatcttcttaagccc

SEQ ID NO: 777798 - DNA, 15 bp, Homo sapiens
atcttcttaagccca

SEQ ID NO: 777799 - DNA, 15 bp, Homo sapiens
tcttcttaagcccag

SEQ ID NO: 777800 - DNA, 15 bp, Homo sapiens
cttcttaagcccaga

SEQ ID NO: 777801 - DNA, 15 bp, Homo sapiens
ttcttaagcccagat

SEQ ID NO: 777802 - DNA, 15 bp, Homo sapiens
tcttaagcccagata

SEQ ID NO: 777803 - DNA, 15 bp, Homo sapiens
cttaagcccagataa

SEQ ID NO: 777804 - DNA, 15 bp, Homo sapiens
ttaagcccagataat

SEQ ID NO: 777805 - DNA, 15 bp, Homo sapiens
taagcccagataatc

SEQ ID NO: 777806 - DNA, 15 bp, Homo sapiens
aagcccagataatcc

SEQ ID NO: 777807 - DNA, 15 bp, Homo sapiens
agcccagataatccc

SEQ ID NO: 777808 - DNA, 15 bp, Homo sapiens
gcccagataatccct

SEQ ID NO: 777809 - DNA, 15 bp, Homo sapiens
cccagataatccctt

SEQ ID NO: 777810 - DNA, 15 bp, Homo sapiens
ccagataatcccttt

SEQ ID NO: 777811 - DNA, 15 bp, Homo sapiens
cagataatccctttt

SEQ ID NO: 777812 - DNA, 15 bp, Homo sapiens
agataatcccttttg

SEQ ID NO: 777813 - DNA, 15 bp, Homo sapiens
gataatcccttttgc

SEQ ID NO: 777814 - DNA, 15 bp, Homo sapiens
ataatcccttttgcc

SEQ ID NO: 777815 - DNA, 15 bp, Homo sapiens
taatcccttttgcca

SEQ ID NO: 777816 - DNA, 15 bp, Homo sapiens
aatcccttttgccaa

SEQ ID NO: 777817 - DNA, 15 bp, Homo sapiens
atcccttttgccaaa

SEQ ID NO: 777818 - DNA, 15 bp, Homo sapiens
tcccttttgccaaaa

SEQ ID NO: 777819 - DNA, 15 bp, Homo sapiens
cccttttgccaaaaa

SEQ ID NO: 777820 - DNA, 15 bp, Homo sapiens
ccttttgccaaaaaa

SEQ ID NO: 777821 - DNA, 15 bp, Homo sapiens
cttttgccaaaaaaa

SEQ ID NO: 777822 - DNA, 15 bp, Homo sapiens
ttttgccaaaaaaaa

SEQ ID NO: 777823 - DNA, 15 bp, Homo sapiens
tttgccaaaaaaaaa

SEQ ID NO: 777824 - DNA, 15 bp, Homo sapiens
ttgccaaaaaaaaaa

SEQ ID NO: 777825 - DNA, 15 bp, Homo sapiens
tgccaaaaaaaaaaa

SEQ ID NO: 777826 - DNA, 15 bp, Homo sapiens
caaaaaaaaaaaaac

SEQ ID NO: 777827 - DNA, 15 bp, Homo sapiens
aaaaaaaaaaaaact

SEQ ID NO: 777828 - DNA, 15 bp, Homo sapiens
aaaaaaaaaaaactg

SEQ ID NO: 777829 - DNA, 15 bp, Homo sapiens
aaaaaaaaaaactgt

SEQ ID NO: 777830 - DNA, 15 bp, Homo sapiens
aaaaaaaaaactgtt

SEQ ID NO: 777831 - DNA, 15 bp, Homo sapiens
aaaaaaaaactgttt

SEQ ID NO: 777832 - DNA, 15 bp, Homo sapiens
aaaaaaaactgttta

SEQ ID NO: 777833 - DNA, 15 bp, Homo sapiens
aaaaaaactgtttac

SEQ ID NO: 777834 - DNA, 15 bp, Homo sapiens
aaaaaactgtttacc

SEQ ID NO: 777835 - DNA, 15 bp, Homo sapiens
aaaaactgtttacca

SEQ ID NO: 777836 - DNA, 15 bp, Homo sapiens
aaaactgtttaccac

SEQ ID NO: 777837 - DNA, 15 bp, Homo sapiens
aaactgtttaccacc

SEQ ID NO: 777838 - DNA, 15 bp, Homo sapiens
aactgtttaccacca

SEQ ID NO: 777839 - DNA, 15 bp, Homo sapiens
actgtttaccaccag

SEQ ID NO: 777840 - DNA, 15 bp, Homo sapiens
ctgtttaccaccaga

SEQ ID NO: 777841 - DNA, 15 bp, Homo sapiens
tgtttaccaccagat

SEQ ID NO: 777842 - DNA, 15 bp, Homo sapiens
gtttaccaccagata

SEQ ID NO: 777843 - DNA, 15 bp, Homo sapiens
tttaccaccagatat

SEQ ID NO: 777844 - DNA, 15 bp, Homo sapiens
ttaccaccagatata

SEQ ID NO: 777845 - DNA, 15 bp, Homo sapiens
taccaccagatatat

SEQ ID NO: 777846 - DNA, 15 bp, Homo sapiens
accaccagatatatt

SEQ ID NO: 777847 - DNA, 15 bp, Homo sapiens
ccaccagatatattt

SEQ ID NO: 777848 - DNA, 15 bp, Homo sapiens
caccagatatatttt

SEQ ID NO: 777849 - DNA, 15 bp, Homo sapiens
accagatatattttt

SEQ ID NO: 777850 - DNA, 15 bp, Homo sapiens
ccagatatatttttg

SEQ ID NO: 777851 - DNA, 15 bp, Homo sapiens
cagatatatttttga

SEQ ID NO: 777852 - DNA, 15 bp, Homo sapiens
agatatatttttgaa

SEQ ID NO: 777853 - DNA, 15 bp, Homo sapiens
gatatatttttgaag

SEQ ID NO: 777854 - DNA, 15 bp, Homo sapiens
atatatttttgaaga

SEQ ID NO: 777855 - DNA, 15 bp, Homo sapiens
tatatttttgaagac

SEQ ID NO: 777856 - DNA, 15 bp, Homo sapiens
atatttttgaagact

SEQ ID NO: 777857 - DNA, 15 bp, Homo sapiens
tatttttgaagactt

SEQ ID NO: 777858 - DNA, 15 bp, Homo sapiens
atttttgaagacttg

SEQ ID NO: 777859 - DNA, 15 bp, Homo sapiens
tttttgaagacttgg

SEQ ID NO: 777860 - DNA, 15 bp, Homo sapiens
ttttgaagacttgga

SEQ ID NO: 777861 - DNA, 15 bp, Homo sapiens
tttgaagacttggag

SEQ ID NO: 777862 - DNA, 15 bp, Homo sapiens
ttgaagacttggagc

SEQ ID NO: 777863 - DNA, 15 bp, Homo sapiens
tgaagacttggagca

SEQ ID NO: 777864 - DNA, 15 bp, Homo sapiens
gaagacttggagcag

SEQ ID NO: 777865 - DNA, 15 bp, Homo sapiens
aagacttggagcagg

SEQ ID NO: 777866 - DNA, 15 bp, Homo sapiens
agacttggagcaggt

SEQ ID NO: 777867 - DNA, 15 bp, Homo sapiens
gacttggagcaggtg

SEQ ID NO: 777868 - DNA, 15 bp, Homo sapiens
acttggagcaggtgt

SEQ ID NO: 777869 - DNA, 15 bp, Homo sapiens
cttggagcaggtgtt

SEQ ID NO: 777870 - DNA, 15 bp, Homo sapiens
ttggagcaggtgttg

SEQ ID NO: 777871 - DNA, 15 bp, Homo sapiens
tggagcaggtgttga

SEQ ID NO: 777872 - DNA, 15 bp, Homo sapiens
ggagcaggtgttgat

SEQ ID NO: 777873 - DNA, 15 bp, Homo sapiens
gagcaggtgttgatt

SEQ ID NO: 777874 - DNA, 15 bp, Homo sapiens
agcaggtgttgattt

SEQ ID NO: 777875 - DNA, 15 bp, Homo sapiens
gcaggtgttgatttg

SEQ ID NO: 777876 - DNA, 15 bp, Homo sapiens
caggtgttgatttgg

SEQ ID NO: 777877 - DNA, 15 bp, Homo sapiens
aggtgttgatttggc

SEQ ID NO: 777878 - DNA, 15 bp, Homo sapiens
ggtgttgatttggca

SEQ ID NO: 777879 - DNA, 15 bp, Homo sapiens
gtgttgatttggcaa

SEQ ID NO: 777880 - DNA, 15 bp, Homo sapiens
tgttgatttggcaat

SEQ ID NO: 777881 - DNA, 15 bp, Homo sapiens
gttgatttggcaatc

SEQ ID NO: 777882 - DNA, 15 bp, Homo sapiens
ttgatttggcaatct

SEQ ID NO: 777883 - DNA, 15 bp, Homo sapiens
tgatttggcaatctt

SEQ ID NO: 777884 - DNA, 15 bp, Homo sapiens
gatttggcaatcttt

SEQ ID NO: 777885 - DNA, 15 bp, Homo sapiens
atttggcaatctttc

SEQ ID NO: 777886 - DNA, 15 bp, Homo sapiens
tttggcaatctttct

SEQ ID NO: 777887 - DNA, 15 bp, Homo sapiens
ttggcaatctttcta

SEQ ID NO: 777888 - DNA, 15 bp, Homo sapiens
tggcaatctttctat

SEQ ID NO: 777889 - DNA, 15 bp, Homo sapiens
ggcaatctttctatc

SEQ ID NO: 777890 - DNA, 15 bp, Homo sapiens
gcaatctttctatct

SEQ ID NO: 777891 - DNA, 15 bp, Homo sapiens
caatctttctatcta

SEQ ID NO: 777892 - DNA, 15 bp, Homo sapiens
aatctttctatctag

SEQ ID NO: 777893 - DNA, 15 bp, Homo sapiens
atctttctatctagg

SEQ ID NO: 777894 - DNA, 15 bp, Homo sapiens
tctttctatctagga

SEQ ID NO: 777895 - DNA, 15 bp, Homo sapiens
ctttctatctaggag

SEQ ID NO: 777896 - DNA, 15 bp, Homo sapiens
tttctatctaggagt

SEQ ID NO: 777897 - DNA, 15 bp, Homo sapiens
ttctatctaggagta

SEQ ID NO: 777898 - DNA, 15 bp, Homo sapiens
tctatctaggagtag

SEQ ID NO: 777899 - DNA, 15 bp, Homo sapiens
ctatctaggagtaga

SEQ ID NO: 777900 - DNA, 15 bp, Homo sapiens
tatctaggagtagac

SEQ ID NO: 777901 - DNA, 15 bp, Homo sapiens
atctaggagtagact

SEQ ID NO: 777902 - DNA, 15 bp, Homo sapiens
tctaggagtagactg

SEQ ID NO: 777903 - DNA, 15 bp, Homo sapiens
ctaggagtagactgc

SEQ ID NO: 777904 - DNA, 15 bp, Homo sapiens
taggagtagactgcc

SEQ ID NO: 777905 - DNA, 15 bp, Homo sapiens
aggagtagactgcca

SEQ ID NO: 777906 - DNA, 15 bp, Homo sapiens
ggagtagactgccat

SEQ ID NO: 777907 - DNA, 15 bp, Homo sapiens
gagtagactgccata

SEQ ID NO: 777908 - DNA, 15 bp, Homo sapiens
agtagactgccataa

SEQ ID NO: 777909 - DNA, 15 bp, Homo sapiens
gtagactgccataaa

SEQ ID NO: 777910 - DNA, 15 bp, Homo sapiens
tagactgccataaag

SEQ ID NO: 777911 - DNA, 15 bp, Homo sapiens
agactgccataaagt

SEQ ID NO: 777912 - DNA, 15 bp, Homo sapiens
gactgccataaagtt

SEQ ID NO: 777913 - DNA, 15 bp, Homo sapiens
actgccataaagttt

SEQ ID NO: 777914 - DNA, 15 bp, Homo sapiens
ctgccataaagtttc

SEQ ID NO: 777915 - DNA, 15 bp, Homo sapiens
tgccataaagtttcg

SEQ ID NO: 777916 - DNA, 15 bp, Homo sapiens
gccataaagtttcgt

SEQ ID NO: 777917 - DNA, 15 bp, Homo sapiens
ccataaagtttcgta

SEQ ID NO: 777918 - DNA, 15 bp, Homo sapiens
cataaagtttcgtat

SEQ ID NO: 777919 - DNA, 15 bp, Homo sapiens
ataaagtttcgtatt

SEQ ID NO: 777920 - DNA, 15 bp, Homo sapiens
taaagtttcgtattc

SEQ ID NO: 777921 - DNA, 15 bp, Homo sapiens
aaagtttcgtattcc

SEQ ID NO: 777922 - DNA, 15 bp, Homo sapiens
aagtttcgtattcct

SEQ ID NO: 777923 - DNA, 15 bp, Homo sapiens
agtttcgtattcctt

SEQ ID NO: 777924 - DNA, 15 bp, Homo sapiens
gtttcgtattccttc

SEQ ID NO: 777925 - DNA, 15 bp, Homo sapiens
tttcgtattccttct

SEQ ID NO: 777926 - DNA, 15 bp, Homo sapiens
ttcgtattccttctt

SEQ ID NO: 777927 - DNA, 15 bp, Homo sapiens
tcgtattccttcttc

SEQ ID NO: 777928 - DNA, 15 bp, Homo sapiens
cgtattccttcttca

SEQ ID NO: 777929 - DNA, 15 bp, Homo sapiens
gtattccttcttcag

SEQ ID NO: 777930 - DNA, 15 bp, Homo sapiens
tattccttcttcagt

SEQ ID NO: 777931 - DNA, 15 bp, Homo sapiens
attccttcttcagtc

SEQ ID NO: 777932 - DNA, 15 bp, Homo sapiens
ttccttcttcagtct

SEQ ID NO: 777933 - DNA, 15 bp, Homo sapiens
tccttcttcagtctc

SEQ ID NO: 777934 - DNA, 15 bp, Homo sapiens
ccttcttcagtctct

SEQ ID NO: 777935 - DNA, 15 bp, Homo sapiens
cttcttcagtctctg

SEQ ID NO: 777936 - DNA, 15 bp, Homo sapiens
ttcttcagtctctgc

SEQ ID NO: 777937 - DNA, 15 bp, Homo sapiens
tcttcagtctctgcc

SEQ ID NO: 777938 - DNA, 15 bp, Homo sapiens
cttcagtctctgcca

SEQ ID NO: 777939 - DNA, 15 bp, Homo sapiens
ttcagtctctgccat

SEQ ID NO: 777940 - DNA, 15 bp, Homo sapiens
tcagtctctgccatc

SEQ ID NO: 777941 - DNA, 15 bp, Homo sapiens
cagtctctgccatca

SEQ ID NO: 777942 - DNA, 15 bp, Homo sapiens
agtctctgccatcac

SEQ ID NO: 777943 - DNA, 15 bp, Homo sapiens
gtctctgccatcact

SEQ ID NO: 777944 - DNA, 15 bp, Homo sapiens
tctctgccatcactg

SEQ ID NO: 777945 - DNA, 15 bp, Homo sapiens
ctctgccatcactgt

SEQ ID NO: 777946 - DNA, 15 bp, Homo sapiens
tctgccatcactgta

SEQ ID NO: 777947 - DNA, 15 bp, Homo sapiens
ctgccatcactgtat

SEQ ID NO: 777948 - DNA, 15 bp, Homo sapiens
tgccatcactgtatc

SEQ ID NO: 777949 - DNA, 15 bp, Homo sapiens
gccatcactgtatct

SEQ ID NO: 777950 - DNA, 15 bp, Homo sapiens
ccatcactgtatcta

SEQ ID NO: 777951 - DNA, 15 bp, Homo sapiens
catcactgtatctat

SEQ ID NO: 777952 - DNA, 15 bp, Homo sapiens
atcactgtatctatc

SEQ ID NO: 777953 - DNA, 15 bp, Homo sapiens
tcactgtatctatcc

SEQ ID NO: 777954 - DNA, 15 bp, Homo sapiens
cactgtatctatcct

SEQ ID NO: 777955 - DNA, 15 bp, Homo sapiens
actgtatctatcctc

SEQ ID NO: 777956 - DNA, 15 bp, Homo sapiens
ctgtatctatcctcc

SEQ ID NO: 777957 - DNA, 15 bp, Homo sapiens
tgtatctatcctcct

SEQ ID NO: 777958 - DNA, 15 bp, Homo sapiens
gtatctatcctcctg

SEQ ID NO: 777959 - DNA, 15 bp, Homo sapiens
tatctatcctcctgt

SEQ ID NO: 777960 - DNA, 15 bp, Homo sapiens
atctatcctcctgtg

SEQ ID NO: 777961 - DNA, 15 bp, Homo sapiens
tctatcctcctgtga

SEQ ID NO: 777962 - DNA, 15 bp, Homo sapiens
ctatcctcctgtgac

SEQ ID NO: 777963 - DNA, 15 bp, Homo sapiens
tatcctcctgtgaca

SEQ ID NO: 777964 - DNA, 15 bp, Homo sapiens
atcctcctgtgacat

SEQ ID NO: 777965 - DNA, 15 bp, Homo sapiens
tcctcctgtgacatc

SEQ ID NO: 777966 - DNA, 15 bp, Homo sapiens
cctcctgtgacatca

SEQ ID NO: 777967 - DNA, 15 bp, Homo sapiens
ctcctgtgacatcat

SEQ ID NO: 777968 - DNA, 15 bp, Homo sapiens
tcctgtgacatcatt

SEQ ID NO: 777969 - DNA, 15 bp, Homo sapiens
cctgtgacatcattg

SEQ ID NO: 777970 - DNA, 15 bp, Homo sapiens
ctgtgacatcattgt

SEQ ID NO: 777971 - DNA, 15 bp, Homo sapiens
tgtgacatcattgtc

SEQ ID NO: 777972 - DNA, 15 bp, Homo sapiens
gtgacatcattgtct

SEQ ID NO: 777973 - DNA, 15 bp, Homo sapiens
tgacatcattgtcta

SEQ ID NO: 777974 - DNA, 15 bp, Homo sapiens
gacatcattgtctac

SEQ ID NO: 777975 - DNA, 15 bp, Homo sapiens
acatcattgtctact

SEQ ID NO: 777976 - DNA, 15 bp, Homo sapiens
catcattgtctactt

SEQ ID NO: 777977 - DNA, 15 bp, Homo sapiens
atcattgtctacttt

SEQ ID NO: 777978 - DNA, 15 bp, Homo sapiens
tcattgtctacttta

SEQ ID NO: 777979 - DNA, 15 bp, Homo sapiens
cattgtctactttaa

SEQ ID NO: 777980 - DNA, 15 bp, Homo sapiens
attgtctactttaat

SEQ ID NO: 777981 - DNA, 15 bp, Homo sapiens
ttgtctactttaatt

SEQ ID NO: 777982 - DNA, 15 bp, Homo sapiens
tgtctactttaattc

SEQ ID NO: 777983 - DNA, 15 bp, Homo sapiens
gtctactttaattct

SEQ ID NO: 777984 - DNA, 15 bp, Homo sapiens
tctactttaattctt

SEQ ID NO: 777985 - DNA, 15 bp, Homo sapiens
ctactttaattctta

SEQ ID NO: 777986 - DNA, 15 bp, Homo sapiens
tactttaattcttaa

SEQ ID NO: 777987 - DNA, 15 bp, Homo sapiens
actttaattcttaag

SEQ ID NO: 777988 - DNA, 15 bp, Homo sapiens
ctttaattcttaaga

SEQ ID NO: 777989 - DNA, 15 bp, Homo sapiens
tttaattcttaagaa

SEQ ID NO: 777990 - DNA, 15 bp, Homo sapiens
ttaattcttaagaag

SEQ ID NO: 777991 - DNA, 15 bp, Homo sapiens
taattcttaagaagc

SEQ ID NO: 777992 - DNA, 15 bp, Homo sapiens
aattcttaagaagca

SEQ ID NO: 777993 - DNA, 15 bp, Homo sapiens
attcttaagaagcac

SEQ ID NO: 777994 - DNA, 15 bp, Homo sapiens
ttcttaagaagcact

SEQ ID NO: 777995 - DNA, 15 bp, Homo sapiens
tcttaagaagcactt

SEQ ID NO: 777996 - DNA, 15 bp, Homo sapiens
cttaagaagcactta

SEQ ID NO: 777997 - DNA, 15 bp, Homo sapiens
ttaagaagcacttag

SEQ ID NO: 777998 - DNA, 15 bp, Homo sapiens
taagaagcacttagc

SEQ ID NO: 777999 - DNA, 15 bp, Homo sapiens
aagaagcacttagcc

SEQ ID NO: 778000 - DNA, 15 bp, Homo sapiens
agaagcacttagcca

SEQ ID NO: 778001 - DNA, 15 bp, Homo sapiens
gaagcacttagccag

SEQ ID NO: 778002 - DNA, 15 bp, Homo sapiens
aagcacttagccagt

SEQ ID NO: 778003 - DNA, 15 bp, Homo sapiens
agcacttagccagtt

SEQ ID NO: 778004 - DNA, 15 bp, Homo sapiens
gcacttagccagttt

SEQ ID NO: 778005 - DNA, 15 bp, Homo sapiens
cacttagccagtttc

SEQ ID NO: 778006 - DNA, 15 bp, Homo sapiens
acttagccagtttca

SEQ ID NO: 778007 - DNA, 15 bp, Homo sapiens
cttagccagtttcaa

SEQ ID NO: 778008 - DNA, 15 bp, Homo sapiens
ttagccagtttcaag

SEQ ID NO: 778009 - DNA, 15 bp, Homo sapiens
tagccagtttcaagc

SEQ ID NO: 778010 - DNA, 15 bp, Homo sapiens
agccagtttcaagct

SEQ ID NO: 778011 - DNA, 15 bp, Homo sapiens
gccagtttcaagctt

SEQ ID NO: 778012 - DNA, 15 bp, Homo sapiens
ccagtttcaagcttt

SEQ ID NO: 778013 - DNA, 15 bp, Homo sapiens
cagtttcaagctttg

SEQ ID NO: 778014 - DNA, 15 bp, Homo sapiens
agtttcaagctttga

SEQ ID NO: 778015 - DNA, 15 bp, Homo sapiens
gtttcaagctttgac

SEQ ID NO: 778016 - DNA, 15 bp, Homo sapiens
tttcaagctttgaca

SEQ ID NO: 778017 - DNA, 15 bp, Homo sapiens
ttcaagctttgacat

SEQ ID NO: 778018 - DNA, 15 bp, Homo sapiens
tcaagctttgacatc

SEQ ID NO: 778019 - DNA, 15 bp, Homo sapiens
caagctttgacatct

SEQ ID NO: 778020 - DNA, 15 bp, Homo sapiens
aagctttgacatctt

SEQ ID NO: 778021 - DNA, 15 bp, Homo sapiens
agctttgacatcttt

SEQ ID NO: 778022 - DNA, 15 bp, Homo sapiens
gctttgacatctttc

SEQ ID NO: 778023 - DNA, 15 bp, Homo sapiens
ctttgacatctttct

SEQ ID NO: 778024 - DNA, 15 bp, Homo sapiens
tttgacatctttcta

SEQ ID NO: 778025 - DNA, 15 bp, Homo sapiens
ttgacatctttctat

SEQ ID NO: 778026 - DNA, 15 bp, Homo sapiens
tgacatctttctatt

SEQ ID NO: 778027 - DNA, 15 bp, Homo sapiens
gacatctttctattt

SEQ ID NO: 778028 - DNA, 15 bp, Homo sapiens
acatctttctatttc

SEQ ID NO: 778029 - DNA, 15 bp, Homo sapiens
catctttctatttcc

SEQ ID NO: 778030 - DNA, 15 bp, Homo sapiens
atctttctatttccc

SEQ ID NO: 778031 - DNA, 15 bp, Homo sapiens
tctttctatttccca

SEQ ID NO: 778032 - DNA, 15 bp, Homo sapiens
ctttctatttcccat

SEQ ID NO: 778033 - DNA, 15 bp, Homo sapiens
tttctatttcccatg

SEQ ID NO: 778034 - DNA, 15 bp, Homo sapiens
ttctatttcccatgg

SEQ ID NO: 778035 - DNA, 15 bp, Homo sapiens
tctatttcccatggg

SEQ ID NO: 778036 - DNA, 15 bp, Homo sapiens
ctatttcccatgggt

SEQ ID NO: 778037 - DNA, 15 bp, Homo sapiens
tatttcccatgggtt

SEQ ID NO: 778038 - DNA, 15 bp, Homo sapiens
atttcccatgggttt

SEQ ID NO: 778039 - DNA, 15 bp, Homo sapiens
tttcccatgggttta

SEQ ID NO: 778040 - DNA, 15 bp, Homo sapiens
ttcccatgggtttaa

SEQ ID NO: 778041 - DNA, 15 bp, Homo sapiens
tcccatgggtttaat

SEQ ID NO: 778042 - DNA, 15 bp, Homo sapiens
cccatgggtttaatg

SEQ ID NO: 778043 - DNA, 15 bp, Homo sapiens
ccatgggtttaatgg

SEQ ID NO: 778044 - DNA, 15 bp, Homo sapiens
catgggtttaatggt

SEQ ID NO: 778045 - DNA, 15 bp, Homo sapiens
atgggtttaatggtg

SEQ ID NO: 778046 - DNA, 15 bp, Homo sapiens
tgggtttaatggtgt

SEQ ID NO: 778047 - DNA, 15 bp, Homo sapiens
gggtttaatggtgtt

SEQ ID NO: 778048 - DNA, 15 bp, Homo sapiens
ggtttaatggtgttg

SEQ ID NO: 778049 - DNA, 15 bp, Homo sapiens
gtttaatggtgttgg

SEQ ID NO: 778050 - DNA, 15 bp, Homo sapiens
tttaatggtgttggt

SEQ ID NO: 778051 - DNA, 15 bp, Homo sapiens
ttaatggtgttggtg

SEQ ID NO: 778052 - DNA, 15 bp, Homo sapiens
taatggtgttggtgt

SEQ ID NO: 778053 - DNA, 15 bp, Homo sapiens
aatggtgttggtgtg

SEQ ID NO: 778054 - DNA, 15 bp, Homo sapiens
atggtgttggtgtgg

SEQ ID NO: 778055 - DNA, 15 bp, Homo sapiens
tggtgttggtgtgga

SEQ ID NO: 778056 - DNA, 15 bp, Homo sapiens
ggtgttggtgtggaa

SEQ ID NO: 778057 - DNA, 15 bp, Homo sapiens
gtgttggtgtggaat

SEQ ID NO: 778058 - DNA, 15 bp, Homo sapiens
tgttggtgtggaatt

SEQ ID NO: 778059 - DNA, 15 bp, Homo sapiens
gttggtgtggaatta

SEQ ID NO: 778060 - DNA, 15 bp, Homo sapiens
ttggtgtggaattac

SEQ ID NO: 778061 - DNA, 15 bp, Homo sapiens
tggtgtggaattact

SEQ ID NO: 778062 - DNA, 15 bp, Homo sapiens
ggtgtggaattacta

SEQ ID NO: 778063 - DNA, 15 bp, Homo sapiens
gtgtggaattactaa

SEQ ID NO: 778064 - DNA, 15 bp, Homo sapiens
tgtggaattactaag

SEQ ID NO: 778065 - DNA, 15 bp, Homo sapiens
gtggaattactaagc

SEQ ID NO: 778066 - DNA, 15 bp, Homo sapiens
tggaattactaagct

SEQ ID NO: 778067 - DNA, 15 bp, Homo sapiens
ggaattactaagctt

SEQ ID NO: 778068 - DNA, 15 bp, Homo sapiens
gaattactaagcttt

SEQ ID NO: 778069 - DNA, 15 bp, Homo sapiens
aattactaagctttt

SEQ ID NO: 778070 - DNA, 15 bp, Homo sapiens
attactaagcttttg

SEQ ID NO: 778071 - DNA, 15 bp, Homo sapiens
ttactaagcttttgc

SEQ ID NO: 778072 - DNA, 15 bp, Homo sapiens
tactaagcttttgct

SEQ ID NO: 778073 - DNA, 15 bp, Homo sapiens
actaagcttttgctg

SEQ ID NO: 778074 - DNA, 15 bp, Homo sapiens
ctaagcttttgctgt

SEQ ID NO: 778075 - DNA, 15 bp, Homo sapiens
taagcttttgctgtg

SEQ ID NO: 778076 - DNA, 15 bp, Homo sapiens
aagcttttgctgtgt

SEQ ID NO: 778077 - DNA, 15 bp, Homo sapiens
agcttttgctgtgtg

SEQ ID NO: 778078 - DNA, 15 bp, Homo sapiens
gcttttgctgtgtgg

SEQ ID NO: 778079 - DNA, 15 bp, Homo sapiens
cttttgctgtgtgga

SEQ ID NO: 778080 - DNA, 15 bp, Homo sapiens
ttttgctgtgtggaa

SEQ ID NO: 778081 - DNA, 15 bp, Homo sapiens
tttgctgtgtggaaa

SEQ ID NO: 778082 - DNA, 15 bp, Homo sapiens
ttgctgtgtggaaat

SEQ ID NO: 778083 - DNA, 15 bp, Homo sapiens
tgctgtgtggaaatc

SEQ ID NO: 778084 - DNA, 15 bp, Homo sapiens
gctgtgtggaaatct

SEQ ID NO: 778085 - DNA, 15 bp, Homo sapiens
ctgtgtggaaatctg

SEQ ID NO: 778086 - DNA, 15 bp, Homo sapiens
tgtgtggaaatctgg

SEQ ID NO: 778087 - DNA, 15 bp, Homo sapiens
gtgtggaaatctgga

SEQ ID NO: 778088 - DNA, 15 bp, Homo sapiens
tgtggaaatctggag

SEQ ID NO: 778089 - DNA, 15 bp, Homo sapiens
gtggaaatctggagg

SEQ ID NO: 778090 - DNA, 15 bp, Homo sapiens
tggaaatctggaggc

SEQ ID NO: 778091 - DNA, 15 bp, Homo sapiens
ggaaatctggaggca

SEQ ID NO: 778092 - DNA, 15 bp, Homo sapiens
gaaatctggaggcat

SEQ ID NO: 778093 - DNA, 15 bp, Homo sapiens
aaatctggaggcatt

SEQ ID NO: 778094 - DNA, 15 bp, Homo sapiens
aatctggaggcattt

SEQ ID NO: 778095 - DNA, 15 bp, Homo sapiens
atctggaggcatttt

SEQ ID NO: 778096 - DNA, 15 bp, Homo sapiens
tctggaggcattttt

SEQ ID NO: 778097 - DNA, 15 bp, Homo sapiens
ctggaggcatttttg

SEQ ID NO: 778098 - DNA, 15 bp, Homo sapiens
tggaggcatttttga

SEQ ID NO: 778099 - DNA, 15 bp, Homo sapiens
ggaggcatttttgag

SEQ ID NO: 778100 - DNA, 15 bp, Homo sapiens
gaggcatttttgagt

SEQ ID NO: 778101 - DNA, 15 bp, Homo sapiens
aggcatttttgagtg

SEQ ID NO: 778102 - DNA, 15 bp, Homo sapiens
ggcatttttgagtgt

SEQ ID NO: 778103 - DNA, 15 bp, Homo sapiens
gcatttttgagtgtg

SEQ ID NO: 778104 - DNA, 15 bp, Homo sapiens
catttttgagtgtga

SEQ ID NO: 778105 - DNA, 15 bp, Homo sapiens
atttttgagtgtgat

SEQ ID NO: 778106 - DNA, 15 bp, Homo sapiens
tttttgagtgtgata

SEQ ID NO: 778107 - DNA, 15 bp, Homo sapiens
ttttgagtgtgataa

SEQ ID NO: 778108 - DNA, 15 bp, Homo sapiens
tttgagtgtgataat

SEQ ID NO: 778109 - DNA, 15 bp, Homo sapiens
ttgagtgtgataata

SEQ ID NO: 778110 - DNA, 15 bp, Homo sapiens
tgagtgtgataatag

SEQ ID NO: 778111 - DNA, 15 bp, Homo sapiens
gagtgtgataatagg

SEQ ID NO: 778112 - DNA, 15 bp, Homo sapiens
agtgtgataataggg

SEQ ID NO: 778113 - DNA, 15 bp, Homo sapiens
gtgtgataatagggc

SEQ ID NO: 778114 - DNA, 15 bp, Homo sapiens
tgtgataatagggca

SEQ ID NO: 778115 - DNA, 15 bp, Homo sapiens
gtgataatagggcat

SEQ ID NO: 778116 - DNA, 15 bp, Homo sapiens
tgataatagggcata

SEQ ID NO: 778117 - DNA, 15 bp, Homo sapiens
gataatagggcatag

SEQ ID NO: 778118 - DNA, 15 bp, Homo sapiens
ataatagggcatagg

SEQ ID NO: 778119 - DNA, 15 bp, Homo sapiens
taatagggcataggg

SEQ ID NO: 778120 - DNA, 15 bp, Homo sapiens
aatagggcataggga

SEQ ID NO: 778121 - DNA, 15 bp, Homo sapiens
atagggcatagggaa

SEQ ID NO: 778122 - DNA, 15 bp, Homo sapiens
tagggcatagggaaa

SEQ ID NO: 778123 - DNA, 15 bp, Homo sapiens
agggcatagggaaat

SEQ ID NO: 778124 - DNA, 15 bp, Homo sapiens
gggcatagggaaatt

SEQ ID NO: 778125 - DNA, 15 bp, Homo sapiens
ggcatagggaaattc

SEQ ID NO: 778126 - DNA, 15 bp, Homo sapiens
gcatagggaaattcc

SEQ ID NO: 778127 - DNA, 15 bp, Homo sapiens
catagggaaattcct

SEQ ID NO: 778128 - DNA, 15 bp, Homo sapiens
atagggaaattcctg

SEQ ID NO: 778129 - DNA, 15 bp, Homo sapiens
tagggaaattcctga

SEQ ID NO: 778130 - DNA, 15 bp, Homo sapiens
agggaaattcctgac

SEQ ID NO: 778131 - DNA, 15 bp, Homo sapiens
gggaaattcctgaca

SEQ ID NO: 778132 - DNA, 15 bp, Homo sapiens
ggaaattcctgacac

SEQ ID NO: 778133 - DNA, 15 bp, Homo sapiens
gaaattcctgacaca

SEQ ID NO: 778134 - DNA, 15 bp, Homo sapiens
aaattcctgacacat

SEQ ID NO: 778135 - DNA, 15 bp, Homo sapiens
aattcctgacacatg

SEQ ID NO: 778136 - DNA, 15 bp, Homo sapiens
attcctgacacatgg

SEQ ID NO: 778137 - DNA, 15 bp, Homo sapiens
ttcctgacacatgga

SEQ ID NO: 778138 - DNA, 15 bp, Homo sapiens
tcctgacacatggag

SEQ ID NO: 778139 - DNA, 15 bp, Homo sapiens
cctgacacatggagt

SEQ ID NO: 778140 - DNA, 15 bp, Homo sapiens
ctgacacatggagtg

SEQ ID NO: 778141 - DNA, 15 bp, Homo sapiens
tgacacatggagtgt

SEQ ID NO: 778142 - DNA, 15 bp, Homo sapiens
gacacatggagtgtt

SEQ ID NO: 778143 - DNA, 15 bp, Homo sapiens
acacatggagtgttt

SEQ ID NO: 778144 - DNA, 15 bp, Homo sapiens
cacatggagtgtttt

SEQ ID NO: 778145 - DNA, 15 bp, Homo sapiens
acatggagtgtttta

SEQ ID NO: 778146 - DNA, 15 bp, Homo sapiens
catggagtgttttat

SEQ ID NO: 778147 - DNA, 15 bp, Homo sapiens
atggagtgttttatg

SEQ ID NO: 778148 - DNA, 15 bp, Homo sapiens
tggagtgttttatgt

SEQ ID NO: 778149 - DNA, 15 bp, Homo sapiens
ggagtgttttatgta

SEQ ID NO: 778150 - DNA, 15 bp, Homo sapiens
gagtgttttatgtat

SEQ ID NO: 778151 - DNA, 15 bp, Homo sapiens
agtgttttatgtata

SEQ ID NO: 778152 - DNA, 15 bp, Homo sapiens
gtgttttatgtatag

SEQ ID NO: 778153 - DNA, 15 bp, Homo sapiens
tgttttatgtataga

SEQ ID NO: 778154 - DNA, 15 bp, Homo sapiens
gttttatgtatagaa

SEQ ID NO: 778155 - DNA, 15 bp, Homo sapiens
ttttatgtatagaat

SEQ ID NO: 778156 - DNA, 15 bp, Homo sapiens
tttatgtatagaata

SEQ ID NO: 778157 - DNA, 15 bp, Homo sapiens
ttatgtatagaatat

SEQ ID NO: 778158 - DNA, 15 bp, Homo sapiens
tatgtatagaatatg

SEQ ID NO: 778159 - DNA, 15 bp, Homo sapiens
atgtatagaatatgc

SEQ ID NO: 778160 - DNA, 15 bp, Homo sapiens
tgtatagaatatgca

SEQ ID NO: 778161 - DNA, 15 bp, Homo sapiens
gtatagaatatgcaa

SEQ ID NO: 778162 - DNA, 15 bp, Homo sapiens
tatagaatatgcaat

SEQ ID NO: 778163 - DNA, 15 bp, Homo sapiens
atagaatatgcaatt

SEQ ID NO: 778164 - DNA, 15 bp, Homo sapiens
tagaatatgcaattc

SEQ ID NO: 778165 - DNA, 15 bp, Homo sapiens
agaatatgcaattca

SEQ ID NO: 778166 - DNA, 15 bp, Homo sapiens
gaatatgcaattcaa

SEQ ID NO: 778167 - DNA, 15 bp, Homo sapiens
aatatgcaattcaaa

SEQ ID NO: 778168 - DNA, 15 bp, Homo sapiens
atatgcaattcaaaa

SEQ ID NO: 778169 - DNA, 15 bp, Homo sapiens
tatgcaattcaaaag

SEQ ID NO: 778170 - DNA, 15 bp, Homo sapiens
atgcaattcaaaaga

SEQ ID NO: 778171 - DNA, 15 bp, Homo sapiens
tgcaattcaaaagaa

SEQ ID NO: 778172 - DNA, 15 bp, Homo sapiens
gcaattcaaaagaag

SEQ ID NO: 778173 - DNA, 15 bp, Homo sapiens
caattcaaaagaaga

SEQ ID NO: 778174 - DNA, 15 bp, Homo sapiens
aattcaaaagaagag

SEQ ID NO: 778175 - DNA, 15 bp, Homo sapiens
attcaaaagaagagg

SEQ ID NO: 778176 - DNA, 15 bp, Homo sapiens
ttcaaaagaagagga

SEQ ID NO: 778177 - DNA, 15 bp, Homo sapiens
tcaaaagaagaggag

SEQ ID NO: 778178 - DNA, 15 bp, Homo sapiens
caaaagaagaggagg

SEQ ID NO: 778179 - DNA, 15 bp, Homo sapiens
aaaagaagaggagga

SEQ ID NO: 778180 - DNA, 15 bp, Homo sapiens
aaagaagaggaggac

SEQ ID NO: 778181 - DNA, 15 bp, Homo sapiens
aagaagaggaggact

SEQ ID NO: 778182 - DNA, 15 bp, Homo sapiens
agaagaggaggactt

SEQ ID NO: 778183 - DNA, 15 bp, Homo sapiens
gaagaggaggactta

SEQ ID NO: 778184 - DNA, 15 bp, Homo sapiens
aagaggaggacttat

SEQ ID NO: 778185 - DNA, 15 bp, Homo sapiens
agaggaggacttatt

SEQ ID NO: 778186 - DNA, 15 bp, Homo sapiens
gaggaggacttattg

SEQ ID NO: 778187 - DNA, 15 bp, Homo sapiens
aggaggacttattgg

SEQ ID NO: 778188 - DNA, 15 bp, Homo sapiens
ggaggacttattgga

SEQ ID NO: 778189 - DNA, 15 bp, Homo sapiens
gaggacttattggat

SEQ ID NO: 778190 - DNA, 15 bp, Homo sapiens
aggacttattggata

SEQ ID NO: 778191 - DNA, 15 bp, Homo sapiens
ggacttattggatag

SEQ ID NO: 778192 - DNA, 15 bp, Homo sapiens
gacttattggatagg

SEQ ID NO: 778193 - DNA, 15 bp, Homo sapiens
acttattggatagga

SEQ ID NO: 778194 - DNA, 15 bp, Homo sapiens
cttattggataggaa

SEQ ID NO: 778195 - DNA, 15 bp, Homo sapiens
ttattggataggaag

SEQ ID NO: 778196 - DNA, 15 bp, Homo sapiens
tattggataggaaga

SEQ ID NO: 778197 - DNA, 15 bp, Homo sapiens
attggataggaagaa

SEQ ID NO: 778198 - DNA, 15 bp, Homo sapiens
ttggataggaagaac

SEQ ID NO: 778199 - DNA, 15 bp, Homo sapiens
tggataggaagaacc

SEQ ID NO: 778200 - DNA, 15 bp, Homo sapiens
ggataggaagaacct

SEQ ID NO: 778201 - DNA, 15 bp, Homo sapiens
gataggaagaaccta

SEQ ID NO: 778202 - DNA, 15 bp, Homo sapiens
ataggaagaacctag

SEQ ID NO: 778203 - DNA, 15 bp, Homo sapiens
taggaagaacctagg

SEQ ID NO: 778204 - DNA, 15 bp, Homo sapiens
aggaagaacctaggc

SEQ ID NO: 778205 - DNA, 15 bp, Homo sapiens
ggaagaacctaggca

SEQ ID NO: 778206 - DNA, 15 bp, Homo sapiens
gaagaacctaggcat

SEQ ID NO: 778207 - DNA, 15 bp, Homo sapiens
aagaacctaggcatc

SEQ ID NO: 778208 - DNA, 15 bp, Homo sapiens
agaacctaggcatct

SEQ ID NO: 778209 - DNA, 15 bp, Homo sapiens
gaacctaggcatctt

SEQ ID NO: 778210 - DNA, 15 bp, Homo sapiens
aacctaggcatcttg

SEQ ID NO: 778211 - DNA, 15 bp, Homo sapiens
acctaggcatcttga

SEQ ID NO: 778212 - DNA, 15 bp, Homo sapiens
cctaggcatcttgaa

SEQ ID NO: 778213 - DNA, 15 bp, Homo sapiens
ctaggcatcttgaac

SEQ ID NO: 778214 - DNA, 15 bp, Homo sapiens
taggcatcttgaaca

SEQ ID NO: 778215 - DNA, 15 bp, Homo sapiens
aggcatcttgaacaa

SEQ ID NO: 778216 - DNA, 15 bp, Homo sapiens
ggcatcttgaacaaa

SEQ ID NO: 778217 - DNA, 15 bp, Homo sapiens
gcatcttgaacaaag

SEQ ID NO: 778218 - DNA, 15 bp, Homo sapiens
catcttgaacaaaga

SEQ ID NO: 778219 - DNA, 15 bp, Homo sapiens
atcttgaacaaagag

SEQ ID NO: 778220 - DNA, 15 bp, Homo sapiens
tcttgaacaaagagt

SEQ ID NO: 778221 - DNA, 15 bp, Homo sapiens
cttgaacaaagagtc

SEQ ID NO: 778222 - DNA, 15 bp, Homo sapiens
ttgaacaaagagtct

SEQ ID NO: 778223 - DNA, 15 bp, Homo sapiens
tgaacaaagagtcta

SEQ ID NO: 778224 - DNA, 15 bp, Homo sapiens
gaacaaagagtctac

SEQ ID NO: 778225 - DNA, 15 bp, Homo sapiens
aacaaagagtctact

SEQ ID NO: 778226 - DNA, 15 bp, Homo sapiens
acaaagagtctactt

SEQ ID NO: 778227 - DNA, 15 bp, Homo sapiens
caaagagtctacttt

SEQ ID NO: 778228 - DNA, 15 bp, Homo sapiens
aaagagtctactttt

SEQ ID NO: 778229 - DNA, 15 bp, Homo sapiens
aagagtctactttta

SEQ ID NO: 778230 - DNA, 15 bp, Homo sapiens
agagtctacttttag

SEQ ID NO: 778231 - DNA, 15 bp, Homo sapiens
gagtctacttttagg

SEQ ID NO: 778232 - DNA, 15 bp, Homo sapiens
agtctacttttaggt

SEQ ID NO: 778233 - DNA, 15 bp, Homo sapiens
gtctacttttaggtc

SEQ ID NO: 778234 - DNA, 15 bp, Homo sapiens
tctacttttaggtct

SEQ ID NO: 778235 - DNA, 15 bp, Homo sapiens
ctacttttaggtctg

SEQ ID NO: 778236 - DNA, 15 bp, Homo sapiens
tacttttaggtctgc

SEQ ID NO: 778237 - DNA, 15 bp, Homo sapiens
acttttaggtctgca

SEQ ID NO: 778238 - DNA, 15 bp, Homo sapiens
cttttaggtctgcaa

SEQ ID NO: 778239 - DNA, 15 bp, Homo sapiens
ttttaggtctgcaag

SEQ ID NO: 778240 - DNA, 15 bp, Homo sapiens
tttaggtctgcaaga

SEQ ID NO: 778241 - DNA, 15 bp, Homo sapiens
ttaggtctgcaagat

SEQ ID NO: 778242 - DNA, 15 bp, Homo sapiens
taggtctgcaagatt

SEQ ID NO: 778243 - DNA, 15 bp, Homo sapiens
aggtctgcaagattg

SEQ ID NO: 778244 - DNA, 15 bp, Homo sapiens
ggtctgcaagattga

SEQ ID NO: 778245 - DNA, 15 bp, Homo sapiens
gtctgcaagattgat

SEQ ID NO: 778246 - DNA, 15 bp, Homo sapiens
tctgcaagattgatg

SEQ ID NO: 778247 - DNA, 15 bp, Homo sapiens
ctgcaagattgatgg

SEQ ID NO: 778248 - DNA, 15 bp, Homo sapiens
tgcaagattgatgga

SEQ ID NO: 778249 - DNA, 15 bp, Homo sapiens
gcaagattgatggaa

SEQ ID NO: 778250 - DNA, 15 bp, Homo sapiens
caagattgatggaaa

SEQ ID NO: 778251 - DNA, 15 bp, Homo sapiens
aagattgatggaaag

SEQ ID NO: 778252 - DNA, 15 bp, Homo sapiens
agattgatggaaagg

SEQ ID NO: 778253 - DNA, 15 bp, Homo sapiens
gattgatggaaaggc

SEQ ID NO: 778254 - DNA, 15 bp, Homo sapiens
attgatggaaaggcc

SEQ ID NO: 778255 - DNA, 15 bp, Homo sapiens
ttgatggaaaggcct

SEQ ID NO: 778256 - DNA, 15 bp, Homo sapiens
tgatggaaaggcctt

SEQ ID NO: 778257 - DNA, 15 bp, Homo sapiens
gatggaaaggccttg

SEQ ID NO: 778258 - DNA, 15 bp, Homo sapiens
atggaaaggccttgt

SEQ ID NO: 778259 - DNA, 15 bp, Homo sapiens
tggaaaggccttgtt

SEQ ID NO: 778260 - DNA, 15 bp, Homo sapiens
ggaaaggccttgttt

SEQ ID NO: 778261 - DNA, 15 bp, Homo sapiens
gaaaggccttgttta

SEQ ID NO: 778262 - DNA, 15 bp, Homo sapiens
aaaggccttgtttat

SEQ ID NO: 778263 - DNA, 15 bp, Homo sapiens
aaggccttgtttatt

SEQ ID NO: 778264 - DNA, 15 bp, Homo sapiens
aggccttgtttattg

SEQ ID NO: 778265 - DNA, 15 bp, Homo sapiens
ggccttgtttattgt

SEQ ID NO: 778266 - DNA, 15 bp, Homo sapiens
gccttgtttattgtt

SEQ ID NO: 778267 - DNA, 15 bp, Homo sapiens
ccttgtttattgttc

SEQ ID NO: 778268 - DNA, 15 bp, Homo sapiens
cttgtttattgttcc

SEQ ID NO: 778269 - DNA, 15 bp, Homo sapiens
ttgtttattgttcct

SEQ ID NO: 778270 - DNA, 15 bp, Homo sapiens
tgtttattgttcctt

SEQ ID NO: 778271 - DNA, 15 bp, Homo sapiens
gtttattgttccttt

SEQ ID NO: 778272 - DNA, 15 bp, Homo sapiens
tttattgttcctttg

SEQ ID NO: 778273 - DNA, 15 bp, Homo sapiens
ttattgttcctttgt

SEQ ID NO: 778274 - DNA, 15 bp, Homo sapiens
tattgttcctttgtc

SEQ ID NO: 778275 - DNA, 15 bp, Homo sapiens
attgttcctttgtct

SEQ ID NO: 778276 - DNA, 15 bp, Homo sapiens
ttgttcctttgtctg

SEQ ID NO: 778277 - DNA, 15 bp, Homo sapiens
tgttcctttgtctga

SEQ ID NO: 778278 - DNA, 15 bp, Homo sapiens
gttcctttgtctgat

SEQ ID NO: 778279 - DNA, 15 bp, Homo sapiens
ttcctttgtctgatt

SEQ ID NO: 778280 - DNA, 15 bp, Homo sapiens
tcctttgtctgattt

SEQ ID NO: 778281 - DNA, 15 bp, Homo sapiens
cctttgtctgatttt

SEQ ID NO: 778282 - DNA, 15 bp, Homo sapiens
ctttgtctgattttt

SEQ ID NO: 778283 - DNA, 15 bp, Homo sapiens
tttgtctgatttttg

SEQ ID NO: 778284 - DNA, 15 bp, Homo sapiens
ttgtctgatttttgt

SEQ ID NO: 778285 - DNA, 15 bp, Homo sapiens
tgtctgatttttgtt

SEQ ID NO: 778286 - DNA, 15 bp, Homo sapiens
gtctgatttttgttc

SEQ ID NO: 778287 - DNA, 15 bp, Homo sapiens
tctgatttttgttcc

SEQ ID NO: 778288 - DNA, 15 bp, Homo sapiens
ctgatttttgttccc

SEQ ID NO: 778289 - DNA, 15 bp, Homo sapiens
tgatttttgttccct

SEQ ID NO: 778290 - DNA, 15 bp, Homo sapiens
gatttttgttccctg

SEQ ID NO: 778291 - DNA, 15 bp, Homo sapiens
atttttgttccctgc

SEQ ID NO: 778292 - DNA, 15 bp, Homo sapiens
tttttgttccctgca

SEQ ID NO: 778293 - DNA, 15 bp, Homo sapiens
ttttgttccctgcag

SEQ ID NO: 778294 - DNA, 15 bp, Homo sapiens
tttgttccctgcagg

SEQ ID NO: 778295 - DNA, 15 bp, Homo sapiens
ttgttccctgcaggt

SEQ ID NO: 778296 - DNA, 15 bp, Homo sapiens
tgttccctgcaggta

SEQ ID NO: 778297 - DNA, 15 bp, Homo sapiens
gttccctgcaggtaa

SEQ ID NO: 778298 - DNA, 15 bp, Homo sapiens
ttccctgcaggtaaa

SEQ ID NO: 778299 - DNA, 15 bp, Homo sapiens
tccctgcaggtaaat

SEQ ID NO: 778300 - DNA, 15 bp, Homo sapiens
ccctgcaggtaaata

SEQ ID NO: 778301 - DNA, 15 bp, Homo sapiens
cctgcaggtaaatat

SEQ ID NO: 778302 - DNA, 15 bp, Homo sapiens
ctgcaggtaaatatg

SEQ ID NO: 778303 - DNA, 15 bp, Homo sapiens
tgcaggtaaatatga

SEQ ID NO: 778304 - DNA, 15 bp, Homo sapiens
gcaggtaaatatgag

SEQ ID NO: 778305 - DNA, 15 bp, Homo sapiens
caggtaaatatgaga

SEQ ID NO: 778306 - DNA, 15 bp, Homo sapiens
aggtaaatatgagac

SEQ ID NO: 778307 - DNA, 15 bp, Homo sapiens
ggtaaatatgagaca

SEQ ID NO: 778308 - DNA, 15 bp, Homo sapiens
gtaaatatgagacaa

SEQ ID NO: 778309 - DNA, 15 bp, Homo sapiens
taaatatgagacaag

SEQ ID NO: 778310 - DNA, 15 bp, Homo sapiens
aaatatgagacaagt

SEQ ID NO: 778311 - DNA, 15 bp, Homo sapiens
aatatgagacaagtt

SEQ ID NO: 778312 - DNA, 15 bp, Homo sapiens
atatgagacaagttt

SEQ ID NO: 778313 - DNA, 15 bp, Homo sapiens
tatgagacaagtttg

SEQ ID NO: 778314 - DNA, 15 bp, Homo sapiens
atgagacaagtttga

SEQ ID NO: 778315 - DNA, 15 bp, Homo sapiens
tgagacaagtttgaa

SEQ ID NO: 778316 - DNA, 15 bp, Homo sapiens
gagacaagtttgaag

SEQ ID NO: 778317 - DNA, 15 bp, Homo sapiens
agacaagtttgaagc

SEQ ID NO: 778318 - DNA, 15 bp, Homo sapiens
gacaagtttgaagct

SEQ ID NO: 778319 - DNA, 15 bp, Homo sapiens
acaagtttgaagctt

SEQ ID NO: 778320 - DNA, 15 bp, Homo sapiens
caagtttgaagctta

SEQ ID NO: 778321 - DNA, 15 bp, Homo sapiens
aagtttgaagcttag

SEQ ID NO: 778322 - DNA, 15 bp, Homo sapiens
agtttgaagcttagg

SEQ ID NO: 778323 - DNA, 15 bp, Homo sapiens
gtttgaagcttaggc

SEQ ID NO: 778324 - DNA, 15 bp, Homo sapiens
tttgaagcttaggcc

SEQ ID NO: 778325 - DNA, 15 bp, Homo sapiens
ttgaagcttaggcca

SEQ ID NO: 778326 - DNA, 15 bp, Homo sapiens
tgaagcttaggccag

SEQ ID NO: 778327 - DNA, 15 bp, Homo sapiens
gaagcttaggccagc

SEQ ID NO: 778328 - DNA, 15 bp, Homo sapiens
aagcttaggccagct

SEQ ID NO: 778329 - DNA, 15 bp, Homo sapiens
agcttaggccagctg

SEQ ID NO: 778330 - DNA, 15 bp, Homo sapiens
gcttaggccagctgg

SEQ ID NO: 778331 - DNA, 15 bp, Homo sapiens
cttaggccagctgga

SEQ ID NO: 778332 - DNA, 15 bp, Homo sapiens
ttaggccagctggaa

SEQ ID NO: 778333 - DNA, 15 bp, Homo sapiens
taggccagctggaaa

SEQ ID NO: 778334 - DNA, 15 bp, Homo sapiens
aggccagctggaaac

SEQ ID NO: 778335 - DNA, 15 bp, Homo sapiens
ggccagctggaaacc

SEQ ID NO: 778336 - DNA, 15 bp, Homo sapiens
gccagctggaaacct

SEQ ID NO: 778337 - DNA, 15 bp, Homo sapiens
ccagctggaaacctg

SEQ ID NO: 778338 - DNA, 15 bp, Homo sapiens
cagctggaaacctgg

SEQ ID NO: 778339 - DNA, 15 bp, Homo sapiens
agctggaaacctggg

SEQ ID NO: 778340 - DNA, 15 bp, Homo sapiens
gctggaaacctgggt

SEQ ID NO: 778341 - DNA, 15 bp, Homo sapiens
ctggaaacctgggtc

SEQ ID NO: 778342 - DNA, 15 bp, Homo sapiens
tggaaacctgggtct

SEQ ID NO: 778343 - DNA, 15 bp, Homo sapiens
ggaaacctgggtctc

SEQ ID NO: 778344 - DNA, 15 bp, Homo sapiens
gaaacctgggtctct

SEQ ID NO: 778345 - DNA, 15 bp, Homo sapiens
aaacctgggtctctg

SEQ ID NO: 778346 - DNA, 15 bp, Homo sapiens
aacctgggtctctgc

SEQ ID NO: 778347 - DNA, 15 bp, Homo sapiens
acctgggtctctgcc

SEQ ID NO: 778348 - DNA, 15 bp, Homo sapiens
cctgggtctctgccc

SEQ ID NO: 778349 - DNA, 15 bp, Homo sapiens
ctgggtctctgcccc

SEQ ID NO: 778350 - DNA, 15 bp, Homo sapiens
tgggtctctgccccc

SEQ ID NO: 778351 - DNA, 15 bp, Homo sapiens
gggtctctgccccca

SEQ ID NO: 778352 - DNA, 15 bp, Homo sapiens
ggtctctgcccccag

SEQ ID NO: 778353 - DNA, 15 bp, Homo sapiens
gtctctgcccccagc

SEQ ID NO: 778354 - DNA, 15 bp, Homo sapiens
tctctgcccccagct

SEQ ID NO: 778355 - DNA, 15 bp, Homo sapiens
ctctgcccccagctc

SEQ ID NO: 778356 - DNA, 15 bp, Homo sapiens
tctgcccccagctcc

SEQ ID NO: 778357 - DNA, 15 bp, Homo sapiens
ctgcccccagctccc

SEQ ID NO: 778358 - DNA, 15 bp, Homo sapiens
tgcccccagctccca

SEQ ID NO: 778359 - DNA, 15 bp, Homo sapiens
gcccccagctcccag

SEQ ID NO: 778360 - DNA, 15 bp, Homo sapiens
cccccagctcccagc

SEQ ID NO: 778361 - DNA, 15 bp, Homo sapiens
ccccagctcccagcc

SEQ ID NO: 778362 - DNA, 15 bp, Homo sapiens
cccagctcccagccc

SEQ ID NO: 778363 - DNA, 15 bp, Homo sapiens
ccagctcccagcccc

SEQ ID NO: 778364 - DNA, 15 bp, Homo sapiens
cagctcccagcccca

SEQ ID NO: 778365 - DNA, 15 bp, Homo sapiens
agctcccagccccag

SEQ ID NO: 778366 - DNA, 15 bp, Homo sapiens
gctcccagccccagt

SEQ ID NO: 778367 - DNA, 15 bp, Homo sapiens
ctcccagccccagtg

SEQ ID NO: 778368 - DNA, 15 bp, Homo sapiens
tcccagccccagtgc

SEQ ID NO: 778369 - DNA, 15 bp, Homo sapiens
cccagccccagtgct

SEQ ID NO: 778370 - DNA, 15 bp, Homo sapiens
ccagccccagtgctc

SEQ ID NO: 778371 - DNA, 15 bp, Homo sapiens
cagccccagtgctcc

SEQ ID NO: 778372 - DNA, 15 bp, Homo sapiens
agccccagtgctcct

SEQ ID NO: 778373 - DNA, 15 bp, Homo sapiens
gccccagtgctcctt

SEQ ID NO: 778374 - DNA, 15 bp, Homo sapiens
ccccagtgctccttg

SEQ ID NO: 778375 - DNA, 15 bp, Homo sapiens
cccagtgctccttgg

SEQ ID NO: 778376 - DNA, 15 bp, Homo sapiens
ccagtgctccttggt

SEQ ID NO: 778377 - DNA, 15 bp, Homo sapiens
cagtgctccttggtt

SEQ ID NO: 778378 - DNA, 15 bp, Homo sapiens
agtgctccttggtta

SEQ ID NO: 778379 - DNA, 15 bp, Homo sapiens
gtgctccttggttat

SEQ ID NO: 778380 - DNA, 15 bp, Homo sapiens
tgctccttggttatc

SEQ ID NO: 778381 - DNA, 15 bp, Homo sapiens
gctccttggttatcc

SEQ ID NO: 778382 - DNA, 15 bp, Homo sapiens
ctccttggttatcct

SEQ ID NO: 778383 - DNA, 15 bp, Homo sapiens
tccttggttatcctt

SEQ ID NO: 778384 - DNA, 15 bp, Homo sapiens
ccttggttatccttt

SEQ ID NO: 778385 - DNA, 15 bp, Homo sapiens
cttggttatcctttc

SEQ ID NO: 778386 - DNA, 15 bp, Homo sapiens
ttggttatcctttct

SEQ ID NO: 778387 - DNA, 15 bp, Homo sapiens
tggttatcctttctg

SEQ ID NO: 778388 - DNA, 15 bp, Homo sapiens
ggttatcctttctgc

SEQ ID NO: 778389 - DNA, 15 bp, Homo sapiens
gttatcctttctgct

SEQ ID NO: 778390 - DNA, 15 bp, Homo sapiens
ttatcctttctgctt

SEQ ID NO: 778391 - DNA, 15 bp, Homo sapiens
tatcctttctgcttc

SEQ ID NO: 778392 - DNA, 15 bp, Homo sapiens
atcctttctgcttct

SEQ ID NO: 778393 - DNA, 15 bp, Homo sapiens
tcctttctgcttctg

SEQ ID NO: 778394 - DNA, 15 bp, Homo sapiens
cctttctgcttctgt

SEQ ID NO: 778395 - DNA, 15 bp, Homo sapiens
ctttctgcttctgtc

SEQ ID NO: 778396 - DNA, 15 bp, Homo sapiens
tttctgcttctgtca

SEQ ID NO: 778397 - DNA, 15 bp, Homo sapiens
ttctgcttctgtcaa

SEQ ID NO: 778398 - DNA, 15 bp, Homo sapiens
tctgcttctgtcaaa

SEQ ID NO: 778399 - DNA, 15 bp, Homo sapiens
ctgcttctgtcaaat

SEQ ID NO: 778400 - DNA, 15 bp, Homo sapiens
tgcttctgtcaaata

SEQ ID NO: 778401 - DNA, 15 bp, Homo sapiens
gcttctgtcaaataa

SEQ ID NO: 778402 - DNA, 15 bp, Homo sapiens
cttctgtcaaataat

SEQ ID NO: 778403 - DNA, 15 bp, Homo sapiens
ttctgtcaaataata

SEQ ID NO: 778404 - DNA, 15 bp, Homo sapiens
tctgtcaaataataa

SEQ ID NO: 778405 - DNA, 15 bp, Homo sapiens
ctgtcaaataataat

SEQ ID NO: 778406 - DNA, 15 bp, Homo sapiens
tgtcaaataataatg

SEQ ID NO: 778407 - DNA, 15 bp, Homo sapiens
gtcaaataataatga

SEQ ID NO: 778408 - DNA, 15 bp, Homo sapiens
tcaaataataatgaa

SEQ ID NO: 778409 - DNA, 15 bp, Homo sapiens
caaataataatgaag

SEQ ID NO: 778410 - DNA, 15 bp, Homo sapiens
aaataataatgaagg

SEQ ID NO: 778411 - DNA, 15 bp, Homo sapiens
aataataatgaagga

SEQ ID NO: 778412 - DNA, 15 bp, Homo sapiens
ataataatgaaggag

SEQ ID NO: 778413 - DNA, 15 bp, Homo sapiens
taataatgaaggagc

SEQ ID NO: 778414 - DNA, 15 bp, Homo sapiens
aataatgaaggagct

SEQ ID NO: 778415 - DNA, 15 bp, Homo sapiens
ataatgaaggagctc

SEQ ID NO: 778416 - DNA, 15 bp, Homo sapiens
taatgaaggagctca

SEQ ID NO: 778417 - DNA, 15 bp, Homo sapiens
aatgaaggagctcac

SEQ ID NO: 778418 - DNA, 15 bp, Homo sapiens
atgaaggagctcact

SEQ ID NO: 778419 - DNA, 15 bp, Homo sapiens
tgaaggagctcactg

SEQ ID NO: 778420 - DNA, 15 bp, Homo sapiens
gaaggagctcactgg

SEQ ID NO: 778421 - DNA, 15 bp, Homo sapiens
aaggagctcactggg

SEQ ID NO: 778422 - DNA, 15 bp, Homo sapiens
aggagctcactgggc

SEQ ID NO: 778423 - DNA, 15 bp, Homo sapiens
ggagctcactgggca

SEQ ID NO: 778424 - DNA, 15 bp, Homo sapiens
gagctcactgggcat

SEQ ID NO: 778425 - DNA, 15 bp, Homo sapiens
agctcactgggcatt

SEQ ID NO: 778426 - DNA, 15 bp, Homo sapiens
gctcactgggcattg

SEQ ID NO: 778427 - DNA, 15 bp, Homo sapiens
ctcactgggcattgg

SEQ ID NO: 778428 - DNA, 15 bp, Homo sapiens
tcactgggcattggt

SEQ ID NO: 778429 - DNA, 15 bp, Homo sapiens
cactgggcattggta

SEQ ID NO: 778430 - DNA, 15 bp, Homo sapiens
actgggcattggtaa

SEQ ID NO: 778431 - DNA, 15 bp, Homo sapiens
ctgggcattggtaac

SEQ ID NO: 778432 - DNA, 15 bp, Homo sapiens
tgggcattggtaact

SEQ ID NO: 778433 - DNA, 15 bp, Homo sapiens
gggcattggtaactg

SEQ ID NO: 778434 - DNA, 15 bp, Homo sapiens
ggcattggtaactgg

SEQ ID NO: 778435 - DNA, 15 bp, Homo sapiens
gcattggtaactggg

SEQ ID NO: 778436 - DNA, 15 bp, Homo sapiens
cattggtaactgggt

SEQ ID NO: 778437 - DNA, 15 bp, Homo sapiens
attggtaactgggtc

SEQ ID NO: 778438 - DNA, 15 bp, Homo sapiens
ttggtaactgggtcc

SEQ ID NO: 778439 - DNA, 15 bp, Homo sapiens
tggtaactgggtcct

SEQ ID NO: 778440 - DNA, 15 bp, Homo sapiens
ggtaactgggtcctt

SEQ ID NO: 778441 - DNA, 15 bp, Homo sapiens
gtaactgggtccttg

SEQ ID NO: 778442 - DNA, 15 bp, Homo sapiens
taactgggtccttgc

SEQ ID NO: 778443 - DNA, 15 bp, Homo sapiens
aactgggtccttgcc

SEQ ID NO: 778444 - DNA, 15 bp, Homo sapiens
actgggtccttgcca

SEQ ID NO: 778445 - DNA, 15 bp, Homo sapiens
ctgggtccttgccaa

SEQ ID NO: 778446 - DNA, 15 bp, Homo sapiens
tgggtccttgccaaa

SEQ ID NO: 778447 - DNA, 15 bp, Homo sapiens
gggtccttgccaaat

SEQ ID NO: 778448 - DNA, 15 bp, Homo sapiens
ggtccttgccaaatg

SEQ ID NO: 778449 - DNA, 15 bp, Homo sapiens
gtccttgccaaatgg

SEQ ID NO: 778450 - DNA, 15 bp, Homo sapiens
tccttgccaaatgga

SEQ ID NO: 778451 - DNA, 15 bp, Homo sapiens
ccttgccaaatggat

SEQ ID NO: 778452 - DNA, 15 bp, Homo sapiens
cttgccaaatggatc

SEQ ID NO: 778453 - DNA, 15 bp, Homo sapiens
ttgccaaatggatct

SEQ ID NO: 778454 - DNA, 15 bp, Homo sapiens
tgccaaatggatctt

SEQ ID NO: 778455 - DNA, 15 bp, Homo sapiens
gccaaatggatcttt

SEQ ID NO: 778456 - DNA, 15 bp, Homo sapiens
ccaaatggatctttg

SEQ ID NO: 778457 - DNA, 15 bp, Homo sapiens
caaatggatctttgt

SEQ ID NO: 778458 - DNA, 15 bp, Homo sapiens
aaatggatctttgtt

SEQ ID NO: 778459 - DNA, 15 bp, Homo sapiens
aatggatctttgttt

SEQ ID NO: 778460 - DNA, 15 bp, Homo sapiens
atggatctttgtttt

SEQ ID NO: 778461 - DNA, 15 bp, Homo sapiens
tggatctttgtttta

SEQ ID NO: 778462 - DNA, 15 bp, Homo sapiens
ggatctttgttttaa

SEQ ID NO: 778463 - DNA, 15 bp, Homo sapiens
gatctttgttttaaa

SEQ ID NO: 778464 - DNA, 15 bp, Homo sapiens
atctttgttttaaat

SEQ ID NO: 778465 - DNA, 15 bp, Homo sapiens
tctttgttttaaata

SEQ ID NO: 778466 - DNA, 15 bp, Homo sapiens
ctttgttttaaatac

SEQ ID NO: 778467 - DNA, 15 bp, Homo sapiens
tttgttttaaatacg

SEQ ID NO: 778468 - DNA, 15 bp, Homo sapiens
ttgttttaaatacga

SEQ ID NO: 778469 - DNA, 15 bp, Homo sapiens
tgttttaaatacgat

SEQ ID NO: 778470 - DNA, 15 bp, Homo sapiens
gttttaaatacgatc

SEQ ID NO: 778471 - DNA, 15 bp, Homo sapiens
ttttaaatacgatct

SEQ ID NO: 778472 - DNA, 15 bp, Homo sapiens
tttaaatacgatctg

SEQ ID NO: 778473 - DNA, 15 bp, Homo sapiens
ttaaatacgatctgg

SEQ ID NO: 778474 - DNA, 15 bp, Homo sapiens
taaatacgatctggg

SEQ ID NO: 778475 - DNA, 15 bp, Homo sapiens
aaatacgatctgggc

SEQ ID NO: 778476 - DNA, 15 bp, Homo sapiens
aatacgatctgggcc

SEQ ID NO: 778477 - DNA, 15 bp, Homo sapiens
atacgatctgggccc

SEQ ID NO: 778478 - DNA, 15 bp, Homo sapiens
tacgatctgggccct

SEQ ID NO: 778479 - DNA, 15 bp, Homo sapiens
acgatctgggccctg

SEQ ID NO: 778480 - DNA, 15 bp, Homo sapiens
cgatctgggccctga

SEQ ID NO: 778481 - DNA, 15 bp, Homo sapiens
gatctgggccctgag

SEQ ID NO: 778482 - DNA, 15 bp, Homo sapiens
atctgggccctgagt

SEQ ID NO: 778483 - DNA, 15 bp, Homo sapiens
tctgggccctgagta

SEQ ID NO: 778484 - DNA, 15 bp, Homo sapiens
ctgggccctgagtat

SEQ ID NO: 778485 - DNA, 15 bp, Homo sapiens
tgggccctgagtata

SEQ ID NO: 778486 - DNA, 15 bp, Homo sapiens
gggccctgagtatag

SEQ ID NO: 778487 - DNA, 15 bp, Homo sapiens
ggccctgagtatagc

SEQ ID NO: 778488 - DNA, 15 bp, Homo sapiens
gccctgagtatagct

SEQ ID NO: 778489 - DNA, 15 bp, Homo sapiens
ccctgagtatagctt

SEQ ID NO: 778490 - DNA, 15 bp, Homo sapiens
cctgagtatagcttc

SEQ ID NO: 778491 - DNA, 15 bp, Homo sapiens
ctgagtatagcttct

SEQ ID NO: 778492 - DNA, 15 bp, Homo sapiens
tgagtatagcttctg

SEQ ID NO: 778493 - DNA, 15 bp, Homo sapiens
gagtatagcttctgg

SEQ ID NO: 778494 - DNA, 15 bp, Homo sapiens
agtatagcttctggc

SEQ ID NO: 778495 - DNA, 15 bp, Homo sapiens
gtatagcttctggcc

SEQ ID NO: 778496 - DNA, 15 bp, Homo sapiens
tatagcttctggccc

SEQ ID NO: 778497 - DNA, 15 bp, Homo sapiens
atagcttctggccct

SEQ ID NO: 778498 - DNA, 15 bp, Homo sapiens
tagcttctggccctt

SEQ ID NO: 778499 - DNA, 15 bp, Homo sapiens
agcttctggcccttc

SEQ ID NO: 778500 - DNA, 15 bp, Homo sapiens
gcttctggcccttct

SEQ ID NO: 778501 - DNA, 15 bp, Homo sapiens
cttctggcccttctg

SEQ ID NO: 778502 - DNA, 15 bp, Homo sapiens
ttctggcccttctgc

SEQ ID NO: 778503 - DNA, 15 bp, Homo sapiens
tctggcccttctgcc

SEQ ID NO: 778504 - DNA, 15 bp, Homo sapiens
ctggcccttctgcct

SEQ ID NO: 778505 - DNA, 15 bp, Homo sapiens
tggcccttctgcctt

SEQ ID NO: 778506 - DNA, 15 bp, Homo sapiens
ggcccttctgccttg

SEQ ID NO: 778507 - DNA, 15 bp, Homo sapiens
gcccttctgccttgt

SEQ ID NO: 778508 - DNA, 15 bp, Homo sapiens
cccttctgccttgta

SEQ ID NO: 778509 - DNA, 15 bp, Homo sapiens
ccttctgccttgtaa

SEQ ID NO: 778510 - DNA, 15 bp, Homo sapiens
cttctgccttgtaag

SEQ ID NO: 778511 - DNA, 15 bp, Homo sapiens
ttctgccttgtaaga

SEQ ID NO: 778512 - DNA, 15 bp, Homo sapiens
tctgccttgtaagat

SEQ ID NO: 778513 - DNA, 15 bp, Homo sapiens
ctgccttgtaagata

SEQ ID NO: 778514 - DNA, 15 bp, Homo sapiens
tgccttgtaagatat

SEQ ID NO: 778515 - DNA, 15 bp, Homo sapiens
gccttgtaagatata

SEQ ID NO: 778516 - DNA, 15 bp, Homo sapiens
ccttgtaagatatag

SEQ ID NO: 778517 - DNA, 15 bp, Homo sapiens
cttgtaagatatagg

SEQ ID NO: 778518 - DNA, 15 bp, Homo sapiens
ttgtaagatataggt

SEQ ID NO: 778519 - DNA, 15 bp, Homo sapiens
tgtaagatataggtc

SEQ ID NO: 778520 - DNA, 15 bp, Homo sapiens
gtaagatataggtcc

SEQ ID NO: 778521 - DNA, 15 bp, Homo sapiens
taagatataggtcca

SEQ ID NO: 778522 - DNA, 15 bp, Homo sapiens
aagatataggtccaa

SEQ ID NO: 778523 - DNA, 15 bp, Homo sapiens
agatataggtccaaa

SEQ ID NO: 778524 - DNA, 15 bp, Homo sapiens
gatataggtccaaac

SEQ ID NO: 778525 - DNA, 15 bp, Homo sapiens
atataggtccaaacc

SEQ ID NO: 778526 - DNA, 15 bp, Homo sapiens
tataggtccaaacca

SEQ ID NO: 778527 - DNA, 15 bp, Homo sapiens
ataggtccaaaccac

SEQ ID NO: 778528 - DNA, 15 bp, Homo sapiens
taggtccaaaccact

SEQ ID NO: 778529 - DNA, 15 bp, Homo sapiens
aggtccaaaccactt

SEQ ID NO: 778530 - DNA, 15 bp, Homo sapiens
ggtccaaaccacttc

SEQ ID NO: 778531 - DNA, 15 bp, Homo sapiens
gtccaaaccacttcc

SEQ ID NO: 778532 - DNA, 15 bp, Homo sapiens
tccaaaccacttcct

SEQ ID NO: 778533 - DNA, 15 bp, Homo sapiens
ccaaaccacttcctc

SEQ ID NO: 778534 - DNA, 15 bp, Homo sapiens
caaaccacttcctca

SEQ ID NO: 778535 - DNA, 15 bp, Homo sapiens
aaaccacttcctcag

SEQ ID NO: 778536 - DNA, 15 bp, Homo sapiens
aaccacttcctcagc

SEQ ID NO: 778537 - DNA, 15 bp, Homo sapiens
accacttcctcagcc

SEQ ID NO: 778538 - DNA, 15 bp, Homo sapiens
ccacttcctcagccc

SEQ ID NO: 778539 - DNA, 15 bp, Homo sapiens
cacttcctcagccct

SEQ ID NO: 778540 - DNA, 15 bp, Homo sapiens
acttcctcagccctc

SEQ ID NO: 778541 - DNA, 15 bp, Homo sapiens
cttcctcagccctct

SEQ ID NO: 778542 - DNA, 15 bp, Homo sapiens
ttcctcagccctctc

SEQ ID NO: 778543 - DNA, 15 bp, Homo sapiens
tcctcagccctctca

SEQ ID NO: 778544 - DNA, 15 bp, Homo sapiens
cctcagccctctcat

SEQ ID NO: 778545 - DNA, 15 bp, Homo sapiens
ctcagccctctcatt

SEQ ID NO: 778546 - DNA, 15 bp, Homo sapiens
tcagccctctcattc

SEQ ID NO: 778547 - DNA, 15 bp, Homo sapiens
cagccctctcattcc

SEQ ID NO: 778548 - DNA, 15 bp, Homo sapiens
agccctctcattccc

SEQ ID NO: 778549 - DNA, 15 bp, Homo sapiens
gccctctcattccca

SEQ ID NO: 778550 - DNA, 15 bp, Homo sapiens
ccctctcattcccaa

SEQ ID NO: 778551 - DNA, 15 bp, Homo sapiens
cctctcattcccaat

SEQ ID NO: 778552 - DNA, 15 bp, Homo sapiens
ctctcattcccaatt

SEQ ID NO: 778553 - DNA, 15 bp, Homo sapiens
tctcattcccaattc

SEQ ID NO: 778554 - DNA, 15 bp, Homo sapiens
ctcattcccaattcc

SEQ ID NO: 778555 - DNA, 15 bp, Homo sapiens
tcattcccaattcca

SEQ ID NO: 778556 - DNA, 15 bp, Homo sapiens
cattcccaattccat

SEQ ID NO: 778557 - DNA, 15 bp, Homo sapiens
attcccaattccatc

SEQ ID NO: 778558 - DNA, 15 bp, Homo sapiens
ttcccaattccatcc

SEQ ID NO: 778559 - DNA, 15 bp, Homo sapiens
tcccaattccatccc

SEQ ID NO: 778560 - DNA, 15 bp, Homo sapiens
cccaattccatcccc

SEQ ID NO: 778561 - DNA, 15 bp, Homo sapiens
ccaattccatcccca

SEQ ID NO: 778562 - DNA, 15 bp, Homo sapiens
caattccatccccac

SEQ ID NO: 778563 - DNA, 15 bp, Homo sapiens
aattccatccccact

SEQ ID NO: 778564 - DNA, 15 bp, Homo sapiens
attccatccccactt

SEQ ID NO: 778565 - DNA, 15 bp, Homo sapiens
ttccatccccacttc

SEQ ID NO: 778566 - DNA, 15 bp, Homo sapiens
tccatccccacttcc

SEQ ID NO: 778567 - DNA, 15 bp, Homo sapiens
ccatccccacttccc

SEQ ID NO: 778568 - DNA, 15 bp, Homo sapiens
catccccacttccct

SEQ ID NO: 778569 - DNA, 15 bp, Homo sapiens
atccccacttccctt

SEQ ID NO: 778570 - DNA, 15 bp, Homo sapiens
tccccacttccctta

SEQ ID NO: 778571 - DNA, 15 bp, Homo sapiens
ccccacttcccttat

SEQ ID NO: 778572 - DNA, 15 bp, Homo sapiens
cccacttcccttatt

SEQ ID NO: 778573 - DNA, 15 bp, Homo sapiens
ccacttcccttattc

SEQ ID NO: 778574 - DNA, 15 bp, Homo sapiens
cacttcccttattcc

SEQ ID NO: 778575 - DNA, 15 bp, Homo sapiens
acttcccttattccc

SEQ ID NO: 778576 - DNA, 15 bp, Homo sapiens
cttcccttattccca

SEQ ID NO: 778577 - DNA, 15 bp, Homo sapiens
ttcccttattcccag

SEQ ID NO: 778578 - DNA, 15 bp, Homo sapiens
tcccttattcccaga

SEQ ID NO: 778579 - DNA, 15 bp, Homo sapiens
cccttattcccagaa

SEQ ID NO: 778580 - DNA, 15 bp, Homo sapiens
ccttattcccagaag

SEQ ID NO: 778581 - DNA, 15 bp, Homo sapiens
cttattcccagaaga

SEQ ID NO: 778582 - DNA, 15 bp, Homo sapiens
ttattcccagaagat

SEQ ID NO: 778583 - DNA, 15 bp, Homo sapiens
tattcccagaagata

SEQ ID NO: 778584 - DNA, 15 bp, Homo sapiens
attcccagaagatat

SEQ ID NO: 778585 - DNA, 15 bp, Homo sapiens
ttcccagaagatata

SEQ ID NO: 778586 - DNA, 15 bp, Homo sapiens
tcccagaagatatac

SEQ ID NO: 778587 - DNA, 15 bp, Homo sapiens
cccagaagatatacc

SEQ ID NO: 778588 - DNA, 15 bp, Homo sapiens
ccagaagatatacct

SEQ ID NO: 778589 - DNA, 15 bp, Homo sapiens
cagaagatataccta

SEQ ID NO: 778590 - DNA, 15 bp, Homo sapiens
agaagatatacctaa

SEQ ID NO: 778591 - DNA, 15 bp, Homo sapiens
gaagatatacctaac

SEQ ID NO: 778592 - DNA, 15 bp, Homo sapiens
aagatatacctaacc

SEQ ID NO: 778593 - DNA, 15 bp, Homo sapiens
agatatacctaacct

SEQ ID NO: 778594 - DNA, 15 bp, Homo sapiens
gatatacctaacctg

SEQ ID NO: 778595 - DNA, 15 bp, Homo sapiens
atatacctaacctgc

SEQ ID NO: 778596 - DNA, 15 bp, Homo sapiens
tatacctaacctgca

SEQ ID NO: 778597 - DNA, 15 bp, Homo sapiens
atacctaacctgcac

SEQ ID NO: 778598 - DNA, 15 bp, Homo sapiens
tacctaacctgcacc

SEQ ID NO: 778599 - DNA, 15 bp, Homo sapiens
acctaacctgcacct

SEQ ID NO: 778600 - DNA, 15 bp, Homo sapiens
cctaacctgcacctc

SEQ ID NO: 778601 - DNA, 15 bp, Homo sapiens
ctaacctgcacctcc

SEQ ID NO: 778602 - DNA, 15 bp, Homo sapiens
taacctgcacctcca

SEQ ID NO: 778603 - DNA, 15 bp, Homo sapiens
aacctgcacctccac

SEQ ID NO: 778604 - DNA, 15 bp, Homo sapiens
acctgcacctccact

SEQ ID NO: 778605 - DNA, 15 bp, Homo sapiens
cctgcacctccactg

SEQ ID NO: 778606 - DNA, 15 bp, Homo sapiens
ctgcacctccactga

SEQ ID NO: 778607 - DNA, 15 bp, Homo sapiens
tgcacctccactgag

SEQ ID NO: 778608 - DNA, 15 bp, Homo sapiens
gcacctccactgaga

SEQ ID NO: 778609 - DNA, 15 bp, Homo sapiens
cacctccactgagat

SEQ ID NO: 778610 - DNA, 15 bp, Homo sapiens
acctccactgagatc

SEQ ID NO: 778611 - DNA, 15 bp, Homo sapiens
cctccactgagatca

SEQ ID NO: 778612 - DNA, 15 bp, Homo sapiens
ctccactgagatcag

SEQ ID NO: 778613 - DNA, 15 bp, Homo sapiens
tccactgagatcagt

SEQ ID NO: 778614 - DNA, 15 bp, Homo sapiens
ccactgagatcagtg

SEQ ID NO: 778615 - DNA, 15 bp, Homo sapiens
cactgagatcagtgt

SEQ ID NO: 778616 - DNA, 15 bp, Homo sapiens
actgagatcagtgtc

SEQ ID NO: 778617 - DNA, 15 bp, Homo sapiens
ctgagatcagtgtca

SEQ ID NO: 778618 - DNA, 15 bp, Homo sapiens
tgagatcagtgtcac

SEQ ID NO: 778619 - DNA, 15 bp, Homo sapiens
gagatcagtgtcacc

SEQ ID NO: 778620 - DNA, 15 bp, Homo sapiens
agatcagtgtcaccc

SEQ ID NO: 778621 - DNA, 15 bp, Homo sapiens
gatcagtgtcaccca

SEQ ID NO: 778622 - DNA, 15 bp, Homo sapiens
atcagtgtcacccag

SEQ ID NO: 778623 - DNA, 15 bp, Homo sapiens
tcagtgtcacccagt

SEQ ID NO: 778624 - DNA, 15 bp, Homo sapiens
cagtgtcacccagtt

SEQ ID NO: 778625 - DNA, 15 bp, Homo sapiens
agtgtcacccagttt

SEQ ID NO: 778626 - DNA, 15 bp, Homo sapiens
gtgtcacccagtttt

SEQ ID NO: 778627 - DNA, 15 bp, Homo sapiens
tgtcacccagttttt

SEQ ID NO: 778628 - DNA, 15 bp, Homo sapiens
gtcacccagttttta

SEQ ID NO: 778629 - DNA, 15 bp, Homo sapiens
tcacccagtttttat

SEQ ID NO: 778630 - DNA, 15 bp, Homo sapiens
cacccagtttttatc

SEQ ID NO: 778631 - DNA, 15 bp, Homo sapiens
acccagtttttatcc

SEQ ID NO: 778632 - DNA, 15 bp, Homo sapiens
cccagtttttatcca

SEQ ID NO: 778633 - DNA, 15 bp, Homo sapiens
ccagtttttatccag

SEQ ID NO: 778634 - DNA, 15 bp, Homo sapiens
cagtttttatccagt

SEQ ID NO: 778635 - DNA, 15 bp, Homo sapiens
agtttttatccagtt

SEQ ID NO: 778636 - DNA, 15 bp, Homo sapiens
gtttttatccagtta

SEQ ID NO: 778637 - DNA, 15 bp, Homo sapiens
tttttatccagttat

SEQ ID NO: 778638 - DNA, 15 bp, Homo sapiens
ttttatccagttatt

SEQ ID NO: 778639 - DNA, 15 bp, Homo sapiens
tttatccagttattg

SEQ ID NO: 778640 - DNA, 15 bp, Homo sapiens
ttatccagttattgc

SEQ ID NO: 778641 - DNA, 15 bp, Homo sapiens
tatccagttattgcc

SEQ ID NO: 778642 - DNA, 15 bp, Homo sapiens
atccagttattgcct

SEQ ID NO: 778643 - DNA, 15 bp, Homo sapiens
tccagttattgcctt

SEQ ID NO: 778644 - DNA, 15 bp, Homo sapiens
ccagttattgccttc

SEQ ID NO: 778645 - DNA, 15 bp, Homo sapiens
cagttattgccttct

SEQ ID NO: 778646 - DNA, 15 bp, Homo sapiens
agttattgccttcta

SEQ ID NO: 778647 - DNA, 15 bp, Homo sapiens
gttattgccttctaa

SEQ ID NO: 778648 - DNA, 15 bp, Homo sapiens
ttattgccttctaac

SEQ ID NO: 778649 - DNA, 15 bp, Homo sapiens
tattgccttctaacc

SEQ ID NO: 778650 - DNA, 15 bp, Homo sapiens
attgccttctaacct

SEQ ID NO: 778651 - DNA, 15 bp, Homo sapiens
ttgccttctaacctg

SEQ ID NO: 778652 - DNA, 15 bp, Homo sapiens
tgccttctaacctgg

SEQ ID NO: 778653 - DNA, 15 bp, Homo sapiens
gccttctaacctggg

SEQ ID NO: 778654 - DNA, 15 bp, Homo sapiens
ccttctaacctggga

SEQ ID NO: 778655 - DNA, 15 bp, Homo sapiens
cttctaacctgggaa

SEQ ID NO: 778656 - DNA, 15 bp, Homo sapiens
ttctaacctgggaaa

SEQ ID NO: 778657 - DNA, 15 bp, Homo sapiens
tctaacctgggaaac

SEQ ID NO: 778658 - DNA, 15 bp, Homo sapiens
ctaacctgggaaaca

SEQ ID NO: 778659 - DNA, 15 bp, Homo sapiens
taacctgggaaacag

SEQ ID NO: 778660 - DNA, 15 bp, Homo sapiens
aacctgggaaacagc

SEQ ID NO: 778661 - DNA, 15 bp, Homo sapiens
acctgggaaacagct

SEQ ID NO: 778662 - DNA, 15 bp, Homo sapiens
cctgggaaacagctc

SEQ ID NO: 778663 - DNA, 15 bp, Homo sapiens
ctgggaaacagctca

SEQ ID NO: 778664 - DNA, 15 bp, Homo sapiens
tgggaaacagctcat

SEQ ID NO: 778665 - DNA, 15 bp, Homo sapiens
gggaaacagctcata

SEQ ID NO: 778666 - DNA, 15 bp, Homo sapiens
ggaaacagctcatat

SEQ ID NO: 778667 - DNA, 15 bp, Homo sapiens
gaaacagctcatatc

SEQ ID NO: 778668 - DNA, 15 bp, Homo sapiens
aaacagctcatatca

SEQ ID NO: 778669 - DNA, 15 bp, Homo sapiens
aacagctcatatcac

SEQ ID NO: 778670 - DNA, 15 bp, Homo sapiens
acagctcatatcaca

SEQ ID NO: 778671 - DNA, 15 bp, Homo sapiens
cagctcatatcacac

SEQ ID NO: 778672 - DNA, 15 bp, Homo sapiens
agctcatatcacact

SEQ ID NO: 778673 - DNA, 15 bp, Homo sapiens
gctcatatcacactc

SEQ ID NO: 778674 - DNA, 15 bp, Homo sapiens
ctcatatcacactct

SEQ ID NO: 778675 - DNA, 15 bp, Homo sapiens
tcatatcacactcta

SEQ ID NO: 778676 - DNA, 15 bp, Homo sapiens
catatcacactctac

SEQ ID NO: 778677 - DNA, 15 bp, Homo sapiens
atatcacactctact

SEQ ID NO: 778678 - DNA, 15 bp, Homo sapiens
tatcacactctactt

SEQ ID NO: 778679 - DNA, 15 bp, Homo sapiens
atcacactctacttt

SEQ ID NO: 778680 - DNA, 15 bp, Homo sapiens
tcacactctactttc

SEQ ID NO: 778681 - DNA, 15 bp, Homo sapiens
cacactctactttcc

SEQ ID NO: 778682 - DNA, 15 bp, Homo sapiens
acactctactttcca

SEQ ID NO: 778683 - DNA, 15 bp, Homo sapiens
cactctactttccaa

SEQ ID NO: 778684 - DNA, 15 bp, Homo sapiens
actctactttccaaa

SEQ ID NO: 778685 - DNA, 15 bp, Homo sapiens
ctctactttccaaaa

SEQ ID NO: 778686 - DNA, 15 bp, Homo sapiens
tctactttccaaaat

SEQ ID NO: 778687 - DNA, 15 bp, Homo sapiens
ctactttccaaaata

SEQ ID NO: 778688 - DNA, 15 bp, Homo sapiens
tactttccaaaatag

SEQ ID NO: 778689 - DNA, 15 bp, Homo sapiens
actttccaaaataga

SEQ ID NO: 778690 - DNA, 15 bp, Homo sapiens
ctttccaaaatagaa

SEQ ID NO: 778691 - DNA, 15 bp, Homo sapiens
tttccaaaatagaat

SEQ ID NO: 778692 - DNA, 15 bp, Homo sapiens
ttccaaaatagaatg

SEQ ID NO: 778693 - DNA, 15 bp, Homo sapiens
tccaaaatagaatgt

SEQ ID NO: 778694 - DNA, 15 bp, Homo sapiens
ccaaaatagaatgtc

SEQ ID NO: 778695 - DNA, 15 bp, Homo sapiens
caaaatagaatgtct

SEQ ID NO: 778696 - DNA, 15 bp, Homo sapiens
aaaatagaatgtctc

SEQ ID NO: 778697 - DNA, 15 bp, Homo sapiens
aaatagaatgtctcc

SEQ ID NO: 778698 - DNA, 15 bp, Homo sapiens
aatagaatgtctccc

SEQ ID NO: 778699 - DNA, 15 bp, Homo sapiens
atagaatgtctcccc

SEQ ID NO: 778700 - DNA, 15 bp, Homo sapiens
tagaatgtctccccc

SEQ ID NO: 778701 - DNA, 15 bp, Homo sapiens
agaatgtctccccct

SEQ ID NO: 778702 - DNA, 15 bp, Homo sapiens
gaatgtctcccccta

SEQ ID NO: 778703 - DNA, 15 bp, Homo sapiens
aatgtctccccctat

SEQ ID NO: 778704 - DNA, 15 bp, Homo sapiens
atgtctccccctatt

SEQ ID NO: 778705 - DNA, 15 bp, Homo sapiens
tgtctccccctattc

SEQ ID NO: 778706 - DNA, 15 bp, Homo sapiens
gtctccccctattca

SEQ ID NO: 778707 - DNA, 15 bp, Homo sapiens
tctccccctattcat

SEQ ID NO: 778708 - DNA, 15 bp, Homo sapiens
ctccccctattcatt

SEQ ID NO: 778709 - DNA, 15 bp, Homo sapiens
tccccctattcattc

SEQ ID NO: 778710 - DNA, 15 bp, Homo sapiens
ccccctattcattct

SEQ ID NO: 778711 - DNA, 15 bp, Homo sapiens
cccctattcattctt

SEQ ID NO: 778712 - DNA, 15 bp, Homo sapiens
ccctattcattcttc

SEQ ID NO: 778713 - DNA, 15 bp, Homo sapiens
cctattcattcttct

SEQ ID NO: 778714 - DNA, 15 bp, Homo sapiens
ctattcattcttctt

SEQ ID NO: 778715 - DNA, 15 bp, Homo sapiens
tattcattcttcttt

SEQ ID NO: 778716 - DNA, 15 bp, Homo sapiens
attcattcttctttc

SEQ ID NO: 778717 - DNA, 15 bp, Homo sapiens
ttcattcttctttct

SEQ ID NO: 778718 - DNA, 15 bp, Homo sapiens
tcattcttctttctc

SEQ ID NO: 778719 - DNA, 15 bp, Homo sapiens
cattcttctttctct

SEQ ID NO: 778720 - DNA, 15 bp, Homo sapiens
attcttctttctctt

SEQ ID NO: 778721 - DNA, 15 bp, Homo sapiens
ttcttctttctcttt

SEQ ID NO: 778722 - DNA, 15 bp, Homo sapiens
tcttctttctctttc

SEQ ID NO: 778723 - DNA, 15 bp, Homo sapiens
cttctttctctttct

SEQ ID NO: 778724 - DNA, 15 bp, Homo sapiens
ttctttctctttctt

SEQ ID NO: 778725 - DNA, 15 bp, Homo sapiens
tctttctctttcttc

SEQ ID NO: 778726 - DNA, 15 bp, Homo sapiens
ctttctctttcttcc

SEQ ID NO: 778727 - DNA, 15 bp, Homo sapiens
tttctctttcttcct

SEQ ID NO: 778728 - DNA, 15 bp, Homo sapiens
ttctctttcttccta

SEQ ID NO: 778729 - DNA, 15 bp, Homo sapiens
tctctttcttcctat

SEQ ID NO: 778730 - DNA, 15 bp, Homo sapiens
ctctttcttcctatc

SEQ ID NO: 778731 - DNA, 15 bp, Homo sapiens
tctttcttcctatct

SEQ ID NO: 778732 - DNA, 15 bp, Homo sapiens
ctttcttcctatctt

SEQ ID NO: 778733 - DNA, 15 bp, Homo sapiens
tttcttcctatctta

SEQ ID NO: 778734 - DNA, 15 bp, Homo sapiens
ttcttcctatcttag

SEQ ID NO: 778735 - DNA, 15 bp, Homo sapiens
tcttcctatcttaga

SEQ ID NO: 778736 - DNA, 15 bp, Homo sapiens
cttcctatcttagag

SEQ ID NO: 778737 - DNA, 15 bp, Homo sapiens
ttcctatcttagagc

SEQ ID NO: 778738 - DNA, 15 bp, Homo sapiens
tcctatcttagagca

SEQ ID NO: 778739 - DNA, 15 bp, Homo sapiens
cctatcttagagcaa

SEQ ID NO: 778740 - DNA, 15 bp, Homo sapiens
ctatcttagagcaag

SEQ ID NO: 778741 - DNA, 15 bp, Homo sapiens
tatcttagagcaaga

SEQ ID NO: 778742 - DNA, 15 bp, Homo sapiens
atcttagagcaagaa

SEQ ID NO: 778743 - DNA, 15 bp, Homo sapiens
tcttagagcaagaag

SEQ ID NO: 778744 - DNA, 15 bp, Homo sapiens
cttagagcaagaagt

SEQ ID NO: 778745 - DNA, 15 bp, Homo sapiens
ttagagcaagaagtg

SEQ ID NO: 778746 - DNA, 15 bp, Homo sapiens
tagagcaagaagtga

SEQ ID NO: 778747 - DNA, 15 bp, Homo sapiens
agagcaagaagtgag

SEQ ID NO: 778748 - DNA, 15 bp, Homo sapiens
gagcaagaagtgaga

SEQ ID NO: 778749 - DNA, 15 bp, Homo sapiens
agcaagaagtgagaa

SEQ ID NO: 778750 - DNA, 15 bp, Homo sapiens
gcaagaagtgagaag

SEQ ID NO: 778751 - DNA, 15 bp, Homo sapiens
caagaagtgagaagt

SEQ ID NO: 778752 - DNA, 15 bp, Homo sapiens
aagaagtgagaagtg

SEQ ID NO: 778753 - DNA, 15 bp, Homo sapiens
agaagtgagaagtgg

SEQ ID NO: 778754 - DNA, 15 bp, Homo sapiens
gaagtgagaagtggt

SEQ ID NO: 778755 - DNA, 15 bp, Homo sapiens
aagtgagaagtggta

SEQ ID NO: 778756 - DNA, 15 bp, Homo sapiens
agtgagaagtggtag

SEQ ID NO: 778757 - DNA, 15 bp, Homo sapiens
gtgagaagtggtagg

SEQ ID NO: 778758 - DNA, 15 bp, Homo sapiens
tgagaagtggtaggt

SEQ ID NO: 778759 - DNA, 15 bp, Homo sapiens
gagaagtggtaggtt

SEQ ID NO: 778760 - DNA, 15 bp, Homo sapiens
agaagtggtaggtta

SEQ ID NO: 778761 - DNA, 15 bp, Homo sapiens
gaagtggtaggttac

SEQ ID NO: 778762 - DNA, 15 bp, Homo sapiens
aagtggtaggttact

SEQ ID NO: 778763 - DNA, 15 bp, Homo sapiens
agtggtaggttactt

SEQ ID NO: 778764 - DNA, 15 bp, Homo sapiens
gtggtaggttacttt

SEQ ID NO: 778765 - DNA, 15 bp, Homo sapiens
tggtaggttactttt

SEQ ID NO: 778766 - DNA, 15 bp, Homo sapiens
ggtaggttacttttt

SEQ ID NO: 778767 - DNA, 15 bp, Homo sapiens
gtaggttactttttt

SEQ ID NO: 778768 - DNA, 15 bp, Homo sapiens
taggttacttttttt

SEQ ID NO: 778769 - DNA, 15 bp, Homo sapiens
aggttactttttttt

SEQ ID NO: 778770 - DNA, 15 bp, Homo sapiens
ggttacttttttttt

SEQ ID NO: 778771 - DNA, 15 bp, Homo sapiens
gttactttttttttt

SEQ ID NO: 778772 - DNA, 15 bp, Homo sapiens
ttacttttttttttt

SEQ ID NO: 778773 - DNA, 15 bp, Homo sapiens
tactttttttttttt

SEQ ID NO: 778774 - DNA, 15 bp, Homo sapiens
ttgagacacagtcta

SEQ ID NO: 778775 - DNA, 15 bp, Homo sapiens
tgagacacagtctaa

SEQ ID NO: 778776 - DNA, 15 bp, Homo sapiens
gagacacagtctaac

SEQ ID NO: 778777 - DNA, 15 bp, Homo sapiens
agacacagtctaact

SEQ ID NO: 778778 - DNA, 15 bp, Homo sapiens
gacacagtctaactc

SEQ ID NO: 778779 - DNA, 15 bp, Homo sapiens
acacagtctaactct

SEQ ID NO: 778780 - DNA, 15 bp, Homo sapiens
cacagtctaactctg

SEQ ID NO: 778781 - DNA, 15 bp, Homo sapiens
acagtctaactctgt

SEQ ID NO: 778782 - DNA, 15 bp, Homo sapiens
cagtctaactctgtc

SEQ ID NO: 778783 - DNA, 15 bp, Homo sapiens
agtctaactctgtca

SEQ ID NO: 778784 - DNA, 15 bp, Homo sapiens
gtctaactctgtcac

SEQ ID NO: 778785 - DNA, 15 bp, Homo sapiens
tctaactctgtcacc

SEQ ID NO: 778786 - DNA, 15 bp, Homo sapiens
ctaactctgtcaccc

SEQ ID NO: 778787 - DNA, 15 bp, Homo sapiens
taactctgtcaccca

SEQ ID NO: 778788 - DNA, 15 bp, Homo sapiens
aactctgtcacccag

SEQ ID NO: 778789 - DNA, 15 bp, Homo sapiens
acccaggctggagta

SEQ ID NO: 778790 - DNA, 15 bp, Homo sapiens
cccaggctggagtac

SEQ ID NO: 778791 - DNA, 15 bp, Homo sapiens
ccaggctggagtaca

SEQ ID NO: 778792 - DNA, 15 bp, Homo sapiens
caggctggagtacag

SEQ ID NO: 778793 - DNA, 15 bp, Homo sapiens
aggctggagtacagt

SEQ ID NO: 778794 - DNA, 15 bp, Homo sapiens
ggctggagtacagtc

SEQ ID NO: 778795 - DNA, 15 bp, Homo sapiens
gctggagtacagtcc

SEQ ID NO: 778796 - DNA, 15 bp, Homo sapiens
ctggagtacagtccc

SEQ ID NO: 778797 - DNA, 15 bp, Homo sapiens
tggagtacagtcccg

SEQ ID NO: 778798 - DNA, 15 bp, Homo sapiens
ggagtacagtcccgc

SEQ ID NO: 778799 - DNA, 15 bp, Homo sapiens
gagtacagtcccgcg

SEQ ID NO: 778800 - DNA, 15 bp, Homo sapiens
agtacagtcccgcga

SEQ ID NO: 778801 - DNA, 15 bp, Homo sapiens
gtacagtcccgcgat

SEQ ID NO: 778802 - DNA, 15 bp, Homo sapiens
tacagtcccgcgatc

SEQ ID NO: 778803 - DNA, 15 bp, Homo sapiens
acagtcccgcgatct

SEQ ID NO: 778804 - DNA, 15 bp, Homo sapiens
cagtcccgcgatctc

SEQ ID NO: 778805 - DNA, 15 bp, Homo sapiens
agtcccgcgatctca

SEQ ID NO: 778806 - DNA, 15 bp, Homo sapiens
gtcccgcgatctcag

SEQ ID NO: 778807 - DNA, 15 bp, Homo sapiens
tcccgcgatctcagc

SEQ ID NO: 778808 - DNA, 15 bp, Homo sapiens
cccgcgatctcagct

SEQ ID NO: 778809 - DNA, 15 bp, Homo sapiens
ccgcgatctcagctc

SEQ ID NO: 778810 - DNA, 15 bp, Homo sapiens
cgcgatctcagctca

SEQ ID NO: 778811 - DNA, 15 bp, Homo sapiens
gcgatctcagctcat

SEQ ID NO: 778812 - DNA, 15 bp, Homo sapiens
cgatctcagctcatt

SEQ ID NO: 778813 - DNA, 15 bp, Homo sapiens
gatctcagctcattg

SEQ ID NO: 778814 - DNA, 15 bp, Homo sapiens
atctcagctcattgc

SEQ ID NO: 778815 - DNA, 15 bp, Homo sapiens
tctcagctcattgca

SEQ ID NO: 778816 - DNA, 15 bp, Homo sapiens
ctcagctcattgcaa

SEQ ID NO: 778817 - DNA, 15 bp, Homo sapiens
tcagctcattgcaac

SEQ ID NO: 778818 - DNA, 15 bp, Homo sapiens
cagctcattgcaact

SEQ ID NO: 778819 - DNA, 15 bp, Homo sapiens
agctcattgcaactt

SEQ ID NO: 778820 - DNA, 15 bp, Homo sapiens
gctcattgcaacttc

SEQ ID NO: 778821 - DNA, 15 bp, Homo sapiens
ctcattgcaacttcc

SEQ ID NO: 778822 - DNA, 15 bp, Homo sapiens
tcattgcaacttccg

SEQ ID NO: 778823 - DNA, 15 bp, Homo sapiens
cattgcaacttccgt

SEQ ID NO: 778824 - DNA, 15 bp, Homo sapiens
attgcaacttccgtc

SEQ ID NO: 778825 - DNA, 15 bp, Homo sapiens
ttgcaacttccgtct

SEQ ID NO: 778826 - DNA, 15 bp, Homo sapiens
tgcaacttccgtctc

SEQ ID NO: 778827 - DNA, 15 bp, Homo sapiens
gcaacttccgtctcc

SEQ ID NO: 778828 - DNA, 15 bp, Homo sapiens
caacttccgtctccc

SEQ ID NO: 778829 - DNA, 15 bp, Homo sapiens
aacttccgtctccca

SEQ ID NO: 778830 - DNA, 15 bp, Homo sapiens
acttccgtctcccag

SEQ ID NO: 778831 - DNA, 15 bp, Homo sapiens
cttccgtctcccagg

SEQ ID NO: 778832 - DNA, 15 bp, Homo sapiens
ttccgtctcccaggt

SEQ ID NO: 778833 - DNA, 15 bp, Homo sapiens
tccgtctcccaggtt

SEQ ID NO: 778834 - DNA, 15 bp, Homo sapiens
ccgtctcccaggttc

SEQ ID NO: 778835 - DNA, 15 bp, Homo sapiens
cgtctcccaggttca

SEQ ID NO: 778836 - DNA, 15 bp, Homo sapiens
gtctcccaggttcaa

SEQ ID NO: 778837 - DNA, 15 bp, Homo sapiens
tctcccaggttcaag

SEQ ID NO: 778838 - DNA, 15 bp, Homo sapiens
gttcaagcaattctg

SEQ ID NO: 778839 - DNA, 15 bp, Homo sapiens
ttcaagcaattctgc

SEQ ID NO: 778840 - DNA, 15 bp, Homo sapiens
tcaagcaattctgct

SEQ ID NO: 778841 - DNA, 15 bp, Homo sapiens
caagcaattctgctg

SEQ ID NO: 778842 - DNA, 15 bp, Homo sapiens
aagcaattctgctgc

SEQ ID NO: 778843 - DNA, 15 bp, Homo sapiens
agcaattctgctgcc

SEQ ID NO: 778844 - DNA, 15 bp, Homo sapiens
gcaattctgctgcct

SEQ ID NO: 778845 - DNA, 15 bp, Homo sapiens
caattctgctgcctc

SEQ ID NO: 778846 - DNA, 15 bp, Homo sapiens
aattctgctgcctca

SEQ ID NO: 778847 - DNA, 15 bp, Homo sapiens
attctgctgcctcag

SEQ ID NO: 778848 - DNA, 15 bp, Homo sapiens
ttctgctgcctcagc

SEQ ID NO: 778849 - DNA, 15 bp, Homo sapiens
tctgctgcctcagcc

SEQ ID NO: 778850 - DNA, 15 bp, Homo sapiens
ctgctgcctcagcca

SEQ ID NO: 778851 - DNA, 15 bp, Homo sapiens
tgctgcctcagccac

SEQ ID NO: 778852 - DNA, 15 bp, Homo sapiens
gctgcctcagccacc

SEQ ID NO: 778853 - DNA, 15 bp, Homo sapiens
ctgcctcagccaccc

SEQ ID NO: 778854 - DNA, 15 bp, Homo sapiens
tgcctcagccacccg

SEQ ID NO: 778855 - DNA, 15 bp, Homo sapiens
gcctcagccacccga

SEQ ID NO: 778856 - DNA, 15 bp, Homo sapiens
cctcagccacccgag

SEQ ID NO: 778857 - DNA, 15 bp, Homo sapiens
ctcagccacccgagt

SEQ ID NO: 778858 - DNA, 15 bp, Homo sapiens
tcagccacccgagta

SEQ ID NO: 778859 - DNA, 15 bp, Homo sapiens
cagccacccgagtag

SEQ ID NO: 778860 - DNA, 15 bp, Homo sapiens
agccacccgagtagc

SEQ ID NO: 778861 - DNA, 15 bp, Homo sapiens
gccacccgagtagct

SEQ ID NO: 778862 - DNA, 15 bp, Homo sapiens
ccacccgagtagctg

SEQ ID NO: 778863 - DNA, 15 bp, Homo sapiens
cacccgagtagctgg

SEQ ID NO: 778864 - DNA, 15 bp, Homo sapiens
acccgagtagctggg

SEQ ID NO: 778865 - DNA, 15 bp, Homo sapiens
cgagtagctgggatg

SEQ ID NO: 778866 - DNA, 15 bp, Homo sapiens
gagtagctgggatga

SEQ ID NO: 778867 - DNA, 15 bp, Homo sapiens
agtagctgggatgac

SEQ ID NO: 778868 - DNA, 15 bp, Homo sapiens
gtagctgggatgaca

SEQ ID NO: 778869 - DNA, 15 bp, Homo sapiens
tagctgggatgacag

SEQ ID NO: 778870 - DNA, 15 bp, Homo sapiens
agctgggatgacagg

SEQ ID NO: 778871 - DNA, 15 bp, Homo sapiens
gctgggatgacaggc

SEQ ID NO: 778872 - DNA, 15 bp, Homo sapiens
ctgggatgacaggca

SEQ ID NO: 778873 - DNA, 15 bp, Homo sapiens
tgggatgacaggcac

SEQ ID NO: 778874 - DNA, 15 bp, Homo sapiens
gggatgacaggcacc

SEQ ID NO: 778875 - DNA, 15 bp, Homo sapiens
ggatgacaggcaccc

SEQ ID NO: 778876 - DNA, 15 bp, Homo sapiens
gatgacaggcaccca

SEQ ID NO: 778877 - DNA, 15 bp, Homo sapiens
atgacaggcacccac

SEQ ID NO: 778878 - DNA, 15 bp, Homo sapiens
tgacaggcacccacc

SEQ ID NO: 778879 - DNA, 15 bp, Homo sapiens
gacaggcacccacca

SEQ ID NO: 778880 - DNA, 15 bp, Homo sapiens
cccaccaccacgcct

SEQ ID NO: 778881 - DNA, 15 bp, Homo sapiens
cctggctaattttta

SEQ ID NO: 778882 - DNA, 15 bp, Homo sapiens
ctggctaatttttat

SEQ ID NO: 778883 - DNA, 15 bp, Homo sapiens
tggctaatttttata

SEQ ID NO: 778884 - DNA, 15 bp, Homo sapiens
ggctaatttttatat

SEQ ID NO: 778885 - DNA, 15 bp, Homo sapiens
gctaatttttatatt

SEQ ID NO: 778886 - DNA, 15 bp, Homo sapiens
ctaatttttatattt

SEQ ID NO: 778887 - DNA, 15 bp, Homo sapiens
taatttttatatttt

SEQ ID NO: 778888 - DNA, 15 bp, Homo sapiens
aatttttatattttt

SEQ ID NO: 778889 - DNA, 15 bp, Homo sapiens
atttttatatttttg

SEQ ID NO: 778890 - DNA, 15 bp, Homo sapiens
tttttatatttttgt

SEQ ID NO: 778891 - DNA, 15 bp, Homo sapiens
ttttatatttttgta

SEQ ID NO: 778892 - DNA, 15 bp, Homo sapiens
tttatatttttgtag

SEQ ID NO: 778893 - DNA, 15 bp, Homo sapiens
ttatatttttgtaga

SEQ ID NO: 778894 - DNA, 15 bp, Homo sapiens
tatatttttgtagag

SEQ ID NO: 778895 - DNA, 15 bp, Homo sapiens
atatttttgtagaga

SEQ ID NO: 778896 - DNA, 15 bp, Homo sapiens
tatttttgtagagat

SEQ ID NO: 778897 - DNA, 15 bp, Homo sapiens
atttttgtagagatg

SEQ ID NO: 778898 - DNA, 15 bp, Homo sapiens
tttttgtagagatgg

SEQ ID NO: 778899 - DNA, 15 bp, Homo sapiens
ttttgtagagatggg

SEQ ID NO: 778900 - DNA, 15 bp, Homo sapiens
tttgtagagatgggg

SEQ ID NO: 778901 - DNA, 15 bp, Homo sapiens
ttgtagagatggggt

SEQ ID NO: 778902 - DNA, 15 bp, Homo sapiens
tgtagagatggggtt

SEQ ID NO: 778903 - DNA, 15 bp, Homo sapiens
gtctcgaactcctga

SEQ ID NO: 778904 - DNA, 15 bp, Homo sapiens
caggtgatctgcccg

SEQ ID NO: 778905 - DNA, 15 bp, Homo sapiens
aggtgatctgcccgc

SEQ ID NO: 778906 - DNA, 15 bp, Homo sapiens
ggtgatctgcccgcc

SEQ ID NO: 778907 - DNA, 15 bp, Homo sapiens
gtgatctgcccgcct

SEQ ID NO: 778908 - DNA, 15 bp, Homo sapiens
tgatctgcccgcctt

SEQ ID NO: 778909 - DNA, 15 bp, Homo sapiens
gatctgcccgccttg

SEQ ID NO: 778910 - DNA, 15 bp, Homo sapiens
atctgcccgccttgg

SEQ ID NO: 778911 - DNA, 15 bp, Homo sapiens
tctgcccgccttggc

SEQ ID NO: 778912 - DNA, 15 bp, Homo sapiens
ctgcccgccttggcc

SEQ ID NO: 778913 - DNA, 15 bp, Homo sapiens
tgcccgccttggcct

SEQ ID NO: 778914 - DNA, 15 bp, Homo sapiens
gcccgccttggcctc

SEQ ID NO: 778915 - DNA, 15 bp, Homo sapiens
cccgccttggcctcc

SEQ ID NO: 778916 - DNA, 15 bp, Homo sapiens
ccgccttggcctccc

SEQ ID NO: 778917 - DNA, 15 bp, Homo sapiens
cgccttggcctccca

SEQ ID NO: 778918 - DNA, 15 bp, Homo sapiens
ctcccaaagtgttgc

SEQ ID NO: 778919 - DNA, 15 bp, Homo sapiens
tcccaaagtgttgcg

SEQ ID NO: 778920 - DNA, 15 bp, Homo sapiens
cccaaagtgttgcga

SEQ ID NO: 778921 - DNA, 15 bp, Homo sapiens
ccaaagtgttgcgat

SEQ ID NO: 778922 - DNA, 15 bp, Homo sapiens
caaagtgttgcgatt

SEQ ID NO: 778923 - DNA, 15 bp, Homo sapiens
aaagtgttgcgatta

SEQ ID NO: 778924 - DNA, 15 bp, Homo sapiens
aagtgttgcgattac

SEQ ID NO: 778925 - DNA, 15 bp, Homo sapiens
agtgttgcgattaca

SEQ ID NO: 778926 - DNA, 15 bp, Homo sapiens
gtgttgcgattacag

SEQ ID NO: 778927 - DNA, 15 bp, Homo sapiens
tgttgcgattacagg

SEQ ID NO: 778928 - DNA, 15 bp, Homo sapiens
gttgcgattacaggc

SEQ ID NO: 778929 - DNA, 15 bp, Homo sapiens
ttgcgattacaggca

SEQ ID NO: 778930 - DNA, 15 bp, Homo sapiens
gcatgagccaccgcg

SEQ ID NO: 778931 - DNA, 15 bp, Homo sapiens
catgagccaccgcgc

SEQ ID NO: 778932 - DNA, 15 bp, Homo sapiens
atgagccaccgcgcc

SEQ ID NO: 778933 - DNA, 15 bp, Homo sapiens
gagccaccgcgccca

SEQ ID NO: 778934 - DNA, 15 bp, Homo sapiens
agccaccgcgcccag

SEQ ID NO: 778935 - DNA, 15 bp, Homo sapiens
gccaccgcgcccagc

SEQ ID NO: 778936 - DNA, 15 bp, Homo sapiens
ccaccgcgcccagcc

SEQ ID NO: 778937 - DNA, 15 bp, Homo sapiens
caccgcgcccagccg

SEQ ID NO: 778938 - DNA, 15 bp, Homo sapiens
accgcgcccagccgg

SEQ ID NO: 778939 - DNA, 15 bp, Homo sapiens
ccgcgcccagccggt

SEQ ID NO: 778940 - DNA, 15 bp, Homo sapiens
cgcgcccagccggta

SEQ ID NO: 778941 - DNA, 15 bp, Homo sapiens
gcgcccagccggtag

SEQ ID NO: 778942 - DNA, 15 bp, Homo sapiens
cgcccagccggtagg

SEQ ID NO: 778943 - DNA, 15 bp, Homo sapiens
gcccagccggtaggt

SEQ ID NO: 778944 - DNA, 15 bp, Homo sapiens
cccagccggtaggtt

SEQ ID NO: 778945 - DNA, 15 bp, Homo sapiens
ccagccggtaggtta

SEQ ID NO: 778946 - DNA, 15 bp, Homo sapiens
cagccggtaggttac

SEQ ID NO: 778947 - DNA, 15 bp, Homo sapiens
agccggtaggttact

SEQ ID NO: 778948 - DNA, 15 bp, Homo sapiens
gccggtaggttactt

SEQ ID NO: 778949 - DNA, 15 bp, Homo sapiens
ccggtaggttacttt

SEQ ID NO: 778950 - DNA, 15 bp, Homo sapiens
cggtaggttactttt

SEQ ID NO: 778951 - DNA, 15 bp, Homo sapiens
gtaggttacttttta

SEQ ID NO: 778952 - DNA, 15 bp, Homo sapiens
taggttactttttaa

SEQ ID NO: 778953 - DNA, 15 bp, Homo sapiens
aggttactttttaaa

SEQ ID NO: 778954 - DNA, 15 bp, Homo sapiens
ggttactttttaaag

SEQ ID NO: 778955 - DNA, 15 bp, Homo sapiens
gttactttttaaagg

SEQ ID NO: 778956 - DNA, 15 bp, Homo sapiens
ttactttttaaaggc

SEQ ID NO: 778957 - DNA, 15 bp, Homo sapiens
tactttttaaaggca

SEQ ID NO: 778958 - DNA, 15 bp, Homo sapiens
actttttaaaggcag

SEQ ID NO: 778959 - DNA, 15 bp, Homo sapiens
ctttttaaaggcaga

SEQ ID NO: 778960 - DNA, 15 bp, Homo sapiens
tttttaaaggcagaa

SEQ ID NO: 778961 - DNA, 15 bp, Homo sapiens
ttttaaaggcagaat

SEQ ID NO: 778962 - DNA, 15 bp, Homo sapiens
tttaaaggcagaatg

SEQ ID NO: 778963 - DNA, 15 bp, Homo sapiens
ttaaaggcagaatgg

SEQ ID NO: 778964 - DNA, 15 bp, Homo sapiens
taaaggcagaatgga

SEQ ID NO: 778965 - DNA, 15 bp, Homo sapiens
aaaggcagaatggac

SEQ ID NO: 778966 - DNA, 15 bp, Homo sapiens
aaggcagaatggact

SEQ ID NO: 778967 - DNA, 15 bp, Homo sapiens
aggcagaatggactt

SEQ ID NO: 778968 - DNA, 15 bp, Homo sapiens
ggcagaatggacttg

SEQ ID NO: 778969 - DNA, 15 bp, Homo sapiens
gcagaatggacttgg

SEQ ID NO: 778970 - DNA, 15 bp, Homo sapiens
cagaatggacttggg

SEQ ID NO: 778971 - DNA, 15 bp, Homo sapiens
agaatggacttggga

SEQ ID NO: 778972 - DNA, 15 bp, Homo sapiens
gaatggacttgggat

SEQ ID NO: 778973 - DNA, 15 bp, Homo sapiens
aatggacttgggatc

SEQ ID NO: 778974 - DNA, 15 bp, Homo sapiens
atggacttgggatca

SEQ ID NO: 778975 - DNA, 15 bp, Homo sapiens
tggacttgggatcat

SEQ ID NO: 778976 - DNA, 15 bp, Homo sapiens
ggacttgggatcatg

SEQ ID NO: 778977 - DNA, 15 bp, Homo sapiens
gacttgggatcatgt

SEQ ID NO: 778978 - DNA, 15 bp, Homo sapiens
acttgggatcatgtc

SEQ ID NO: 778979 - DNA, 15 bp, Homo sapiens
cttgggatcatgtct

SEQ ID NO: 778980 - DNA, 15 bp, Homo sapiens
ttgggatcatgtctc

SEQ ID NO: 778981 - DNA, 15 bp, Homo sapiens
tgggatcatgtctct

SEQ ID NO: 778982 - DNA, 15 bp, Homo sapiens
gggatcatgtctctg

SEQ ID NO: 778983 - DNA, 15 bp, Homo sapiens
ggatcatgtctctgg

SEQ ID NO: 778984 - DNA, 15 bp, Homo sapiens
gatcatgtctctggg

SEQ ID NO: 778985 - DNA, 15 bp, Homo sapiens
atcatgtctctgggt

SEQ ID NO: 778986 - DNA, 15 bp, Homo sapiens
tcatgtctctgggta

SEQ ID NO: 778987 - DNA, 15 bp, Homo sapiens
catgtctctgggtaa

SEQ ID NO: 778988 - DNA, 15 bp, Homo sapiens
atgtctctgggtaat

SEQ ID NO: 778989 - DNA, 15 bp, Homo sapiens
tgtctctgggtaatt

SEQ ID NO: 778990 - DNA, 15 bp, Homo sapiens
gtctctgggtaattt

SEQ ID NO: 778991 - DNA, 15 bp, Homo sapiens
tctctgggtaatttg

SEQ ID NO: 778992 - DNA, 15 bp, Homo sapiens
ctctgggtaatttgt

SEQ ID NO: 778993 - DNA, 15 bp, Homo sapiens
tctgggtaatttgta

SEQ ID NO: 778994 - DNA, 15 bp, Homo sapiens
ctgggtaatttgtac

SEQ ID NO: 778995 - DNA, 15 bp, Homo sapiens
tgggtaatttgtact

SEQ ID NO: 778996 - DNA, 15 bp, Homo sapiens
gggtaatttgtactc

SEQ ID NO: 778997 - DNA, 15 bp, Homo sapiens
ggtaatttgtactct

SEQ ID NO: 778998 - DNA, 15 bp, Homo sapiens
gtaatttgtactctt

SEQ ID NO: 778999 - DNA, 15 bp, Homo sapiens
taatttgtactcttt

SEQ ID NO: 779000 - DNA, 15 bp, Homo sapiens
aatttgtactctttc

SEQ ID NO: 779001 - DNA, 15 bp, Homo sapiens
atttgtactctttcc

SEQ ID NO: 779002 - DNA, 15 bp, Homo sapiens
tttgtactctttccc

SEQ ID NO: 779003 - DNA, 15 bp, Homo sapiens
ttgtactctttccca

SEQ ID NO: 779004 - DNA, 15 bp, Homo sapiens
tgtactctttcccac

SEQ ID NO: 779005 - DNA, 15 bp, Homo sapiens
gtactctttcccacc

SEQ ID NO: 779006 - DNA, 15 bp, Homo sapiens
tactctttcccacca

SEQ ID NO: 779007 - DNA, 15 bp, Homo sapiens
actctttcccaccat

SEQ ID NO: 779008 - DNA, 15 bp, Homo sapiens
ctctttcccaccatc

SEQ ID NO: 779009 - DNA, 15 bp, Homo sapiens
tctttcccaccatca

SEQ ID NO: 779010 - DNA, 15 bp, Homo sapiens
ctttcccaccatcag

SEQ ID NO: 779011 - DNA, 15 bp, Homo sapiens
tttcccaccatcagt

SEQ ID NO: 779012 - DNA, 15 bp, Homo sapiens
ttcccaccatcagtt

SEQ ID NO: 779013 - DNA, 15 bp, Homo sapiens
tcccaccatcagttt

SEQ ID NO: 779014 - DNA, 15 bp, Homo sapiens
cccaccatcagtttc

SEQ ID NO: 779015 - DNA, 15 bp, Homo sapiens
ccaccatcagtttct

SEQ ID NO: 779016 - DNA, 15 bp, Homo sapiens
caccatcagtttctc

SEQ ID NO: 779017 - DNA, 15 bp, Homo sapiens
accatcagtttctct

SEQ ID NO: 779018 - DNA, 15 bp, Homo sapiens
ccatcagtttctctc

SEQ ID NO: 779019 - DNA, 15 bp, Homo sapiens
catcagtttctctct

SEQ ID NO: 779020 - DNA, 15 bp, Homo sapiens
atcagtttctctctt

SEQ ID NO: 779021 - DNA, 15 bp, Homo sapiens
tcagtttctctcttt

SEQ ID NO: 779022 - DNA, 15 bp, Homo sapiens
cagtttctctctttc

SEQ ID NO: 779023 - DNA, 15 bp, Homo sapiens
agtttctctctttcc

SEQ ID NO: 779024 - DNA, 15 bp, Homo sapiens
gtttctctctttcca

SEQ ID NO: 779025 - DNA, 15 bp, Homo sapiens
tttctctctttccac

SEQ ID NO: 779026 - DNA, 15 bp, Homo sapiens
ttctctctttccact

SEQ ID NO: 779027 - DNA, 15 bp, Homo sapiens
tctctctttccactg

SEQ ID NO: 779028 - DNA, 15 bp, Homo sapiens
ctctctttccactgg

SEQ ID NO: 779029 - DNA, 15 bp, Homo sapiens
tctctttccactgga

SEQ ID NO: 779030 - DNA, 15 bp, Homo sapiens
ctctttccactggat

SEQ ID NO: 779031 - DNA, 15 bp, Homo sapiens
tctttccactggatt

SEQ ID NO: 779032 - DNA, 15 bp, Homo sapiens
ctttccactggattt

SEQ ID NO: 779033 - DNA, 15 bp, Homo sapiens
tttccactggatttt

SEQ ID NO: 779034 - DNA, 15 bp, Homo sapiens
ttccactggattttt

SEQ ID NO: 779035 - DNA, 15 bp, Homo sapiens
tccactggatttttt

SEQ ID NO: 779036 - DNA, 15 bp, Homo sapiens
ccactggattttttt

SEQ ID NO: 779037 - DNA, 15 bp, Homo sapiens
cactggatttttttc

SEQ ID NO: 779038 - DNA, 15 bp, Homo sapiens
actggatttttttcc

SEQ ID NO: 779039 - DNA, 15 bp, Homo sapiens
ctggatttttttccc

SEQ ID NO: 779040 - DNA, 15 bp, Homo sapiens
tggatttttttcccc

SEQ ID NO: 779041 - DNA, 15 bp, Homo sapiens
ggatttttttcccct

SEQ ID NO: 779042 - DNA, 15 bp, Homo sapiens
gatttttttccccta

SEQ ID NO: 779043 - DNA, 15 bp, Homo sapiens
atttttttcccctaa

SEQ ID NO: 779044 - DNA, 15 bp, Homo sapiens
tttttttcccctaac

SEQ ID NO: 779045 - DNA, 15 bp, Homo sapiens
ttttttcccctaaca

SEQ ID NO: 779046 - DNA, 15 bp, Homo sapiens
tttttcccctaacac

SEQ ID NO: 779047 - DNA, 15 bp, Homo sapiens
ttttcccctaacaca

SEQ ID NO: 779048 - DNA, 15 bp, Homo sapiens
tttcccctaacacaa

SEQ ID NO: 779049 - DNA, 15 bp, Homo sapiens
ttcccctaacacaaa

SEQ ID NO: 779050 - DNA, 15 bp, Homo sapiens
tcccctaacacaaac

SEQ ID NO: 779051 - DNA, 15 bp, Homo sapiens
cccctaacacaaaca

SEQ ID NO: 779052 - DNA, 15 bp, Homo sapiens
ccctaacacaaacat

SEQ ID NO: 779053 - DNA, 15 bp, Homo sapiens
cctaacacaaacatg

SEQ ID NO: 779054 - DNA, 15 bp, Homo sapiens
ctaacacaaacatgt

SEQ ID NO: 779055 - DNA, 15 bp, Homo sapiens
taacacaaacatgtg

SEQ ID NO: 779056 - DNA, 15 bp, Homo sapiens
aacacaaacatgtgt

SEQ ID NO: 779057 - DNA, 15 bp, Homo sapiens
acacaaacatgtgtg

SEQ ID NO: 779058 - DNA, 15 bp, Homo sapiens
cacaaacatgtgtga

SEQ ID NO: 779059 - DNA, 15 bp, Homo sapiens
acaaacatgtgtgaa

SEQ ID NO: 779060 - DNA, 15 bp, Homo sapiens
caaacatgtgtgaac

SEQ ID NO: 779061 - DNA, 15 bp, Homo sapiens
aaacatgtgtgaacc

SEQ ID NO: 779062 - DNA, 15 bp, Homo sapiens
aacatgtgtgaacct

SEQ ID NO: 779063 - DNA, 15 bp, Homo sapiens
acatgtgtgaacctc

SEQ ID NO: 779064 - DNA, 15 bp, Homo sapiens
catgtgtgaacctct

SEQ ID NO: 779065 - DNA, 15 bp, Homo sapiens
atgtgtgaacctctc

SEQ ID NO: 779066 - DNA, 15 bp, Homo sapiens
tgtgtgaacctctct

SEQ ID NO: 779067 - DNA, 15 bp, Homo sapiens
gtgtgaacctctctt

SEQ ID NO: 779068 - DNA, 15 bp, Homo sapiens
tgtgaacctctcttt

SEQ ID NO: 779069 - DNA, 15 bp, Homo sapiens
gtgaacctctctttt

SEQ ID NO: 779070 - DNA, 15 bp, Homo sapiens
tgaacctctcttttt

SEQ ID NO: 779071 - DNA, 15 bp, Homo sapiens
gaacctctctttttc

SEQ ID NO: 779072 - DNA, 15 bp, Homo sapiens
aacctctctttttca

SEQ ID NO: 779073 - DNA, 15 bp, Homo sapiens
acctctctttttcat

SEQ ID NO: 779074 - DNA, 15 bp, Homo sapiens
cctctctttttcata

SEQ ID NO: 779075 - DNA, 15 bp, Homo sapiens
ctctctttttcataa

SEQ ID NO: 779076 - DNA, 15 bp, Homo sapiens
tctctttttcataaa

SEQ ID NO: 779077 - DNA, 15 bp, Homo sapiens
ctctttttcataaaa

SEQ ID NO: 779078 - DNA, 15 bp, Homo sapiens
tctttttcataaaaa

SEQ ID NO: 779079 - DNA, 15 bp, Homo sapiens
ctttttcataaaaaa

SEQ ID NO: 779080 - DNA, 15 bp, Homo sapiens
tttttcataaaaaac

SEQ ID NO: 779081 - DNA, 15 bp, Homo sapiens
ttttcataaaaaaca

SEQ ID NO: 779082 - DNA, 15 bp, Homo sapiens
tttcataaaaaacaa

SEQ ID NO: 779083 - DNA, 15 bp, Homo sapiens
ttcataaaaaacaaa

SEQ ID NO: 779084 - DNA, 15 bp, Homo sapiens
tcataaaaaacaaaa

SEQ ID NO: 779085 - DNA, 15 bp, Homo sapiens
cataaaaaacaaaat

SEQ ID NO: 779086 - DNA, 15 bp, Homo sapiens
ataaaaaacaaaatg

SEQ ID NO: 779087 - DNA, 15 bp, Homo sapiens
taaaaaacaaaatga

SEQ ID NO: 779088 - DNA, 15 bp, Homo sapiens
aaaaaacaaaatgaa

SEQ ID NO: 779089 - DNA, 15 bp, Homo sapiens
aaaaacaaaatgaac

SEQ ID NO: 779090 - DNA, 15 bp, Homo sapiens
aaaacaaaatgaaca

SEQ ID NO: 779091 - DNA, 15 bp, Homo sapiens
aaacaaaatgaacac

SEQ ID NO: 779092 - DNA, 15 bp, Homo sapiens
aacaaaatgaacaca

SEQ ID NO: 779093 - DNA, 15 bp, Homo sapiens
acaaaatgaacacaa

SEQ ID NO: 779094 - DNA, 15 bp, Homo sapiens
caaaatgaacacaaa

SEQ ID NO: 779095 - DNA, 15 bp, Homo sapiens
aaaatgaacacaaaa

SEQ ID NO: 779096 - DNA, 15 bp, Homo sapiens
aaatgaacacaaaac

SEQ ID NO: 779097 - DNA, 15 bp, Homo sapiens
aatgaacacaaaacc

SEQ ID NO: 779098 - DNA, 15 bp, Homo sapiens
atgaacacaaaacct

SEQ ID NO: 779099 - DNA, 15 bp, Homo sapiens
tgaacacaaaacctt

SEQ ID NO: 779100 - DNA, 15 bp, Homo sapiens
gaacacaaaaccttt

SEQ ID NO: 779101 - DNA, 15 bp, Homo sapiens
aacacaaaacctttt

SEQ ID NO: 779102 - DNA, 15 bp, Homo sapiens
acacaaaacctttta

SEQ ID NO: 779103 - DNA, 15 bp, Homo sapiens
cacaaaaccttttat

SEQ ID NO: 779104 - DNA, 15 bp, Homo sapiens
acaaaaccttttatt

SEQ ID NO: 779105 - DNA, 15 bp, Homo sapiens
caaaaccttttattg

SEQ ID NO: 779106 - DNA, 15 bp, Homo sapiens
aaaaccttttattga

SEQ ID NO: 779107 - DNA, 15 bp, Homo sapiens
aaaccttttattgat

SEQ ID NO: 779108 - DNA, 15 bp, Homo sapiens
aaccttttattgatc

SEQ ID NO: 779109 - DNA, 15 bp, Homo sapiens
accttttattgatcc

SEQ ID NO: 779110 - DNA, 15 bp, Homo sapiens
ccttttattgatccc

SEQ ID NO: 779111 - DNA, 15 bp, Homo sapiens
cttttattgatccca

SEQ ID NO: 779112 - DNA, 15 bp, Homo sapiens
ttttattgatcccac

SEQ ID NO: 779113 - DNA, 15 bp, Homo sapiens
tttattgatcccact

SEQ ID NO: 779114 - DNA, 15 bp, Homo sapiens
ttattgatcccactg

SEQ ID NO: 779115 - DNA, 15 bp, Homo sapiens
tattgatcccactgt

SEQ ID NO: 779116 - DNA, 15 bp, Homo sapiens
attgatcccactgtt

SEQ ID NO: 779117 - DNA, 15 bp, Homo sapiens
ttgatcccactgttg

SEQ ID NO: 779118 - DNA, 15 bp, Homo sapiens
tgatcccactgttga

SEQ ID NO: 779119 - DNA, 15 bp, Homo sapiens
gatcccactgttgat

SEQ ID NO: 779120 - DNA, 15 bp, Homo sapiens
atcccactgttgatt

SEQ ID NO: 779121 - DNA, 15 bp, Homo sapiens
tcccactgttgattt

SEQ ID NO: 779122 - DNA, 15 bp, Homo sapiens
cccactgttgattta

SEQ ID NO: 779123 - DNA, 15 bp, Homo sapiens
ccactgttgatttag

SEQ ID NO: 779124 - DNA, 15 bp, Homo sapiens
cactgttgatttaga

SEQ ID NO: 779125 - DNA, 15 bp, Homo sapiens
actgttgatttagac

SEQ ID NO: 779126 - DNA, 15 bp, Homo sapiens
ctgttgatttagaca

SEQ ID NO: 779127 - DNA, 15 bp, Homo sapiens
tgttgatttagacaa

SEQ ID NO: 779128 - DNA, 15 bp, Homo sapiens
gttgatttagacaat

SEQ ID NO: 779129 - DNA, 15 bp, Homo sapiens
ttgatttagacaatc

SEQ ID NO: 779130 - DNA, 15 bp, Homo sapiens
tgatttagacaatct

SEQ ID NO: 779131 - DNA, 15 bp, Homo sapiens
gatttagacaatctc

SEQ ID NO: 779132 - DNA, 15 bp, Homo sapiens
atttagacaatctcc

SEQ ID NO: 779133 - DNA, 15 bp, Homo sapiens
tttagacaatctcct

SEQ ID NO: 779134 - DNA, 15 bp, Homo sapiens
ttagacaatctcctg

SEQ ID NO: 779135 - DNA, 15 bp, Homo sapiens
tagacaatctcctgt

SEQ ID NO: 779136 - DNA, 15 bp, Homo sapiens
agacaatctcctgtt

SEQ ID NO: 779137 - DNA, 15 bp, Homo sapiens
gacaatctcctgtta

SEQ ID NO: 779138 - DNA, 15 bp, Homo sapiens
acaatctcctgttac

SEQ ID NO: 779139 - DNA, 15 bp, Homo sapiens
caatctcctgttaca

SEQ ID NO: 779140 - DNA, 15 bp, Homo sapiens
aatctcctgttacat

SEQ ID NO: 779141 - DNA, 15 bp, Homo sapiens
atctcctgttacatc

SEQ ID NO: 779142 - DNA, 15 bp, Homo sapiens
tctcctgttacatca

SEQ ID NO: 779143 - DNA, 15 bp, Homo sapiens
ctcctgttacatcaa

SEQ ID NO: 779144 - DNA, 15 bp, Homo sapiens
tcctgttacatcaac

SEQ ID NO: 779145 - DNA, 15 bp, Homo sapiens
cctgttacatcaacc

SEQ ID NO: 779146 - DNA, 15 bp, Homo sapiens
ctgttacatcaacca

SEQ ID NO: 779147 - DNA, 15 bp, Homo sapiens
tgttacatcaaccag

SEQ ID NO: 779148 - DNA, 15 bp, Homo sapiens
gttacatcaaccagg

SEQ ID NO: 779149 - DNA, 15 bp, Homo sapiens
ttacatcaaccaggc

SEQ ID NO: 779150 - DNA, 15 bp, Homo sapiens
tacatcaaccaggcc

SEQ ID NO: 779151 - DNA, 15 bp, Homo sapiens
acatcaaccaggcca

SEQ ID NO: 779152 - DNA, 15 bp, Homo sapiens
catcaaccaggccag

SEQ ID NO: 779153 - DNA, 15 bp, Homo sapiens
atcaaccaggccagc

SEQ ID NO: 779154 - DNA, 15 bp, Homo sapiens
tcaaccaggccagcc

SEQ ID NO: 779155 - DNA, 15 bp, Homo sapiens
caaccaggccagccc

SEQ ID NO: 779156 - DNA, 15 bp, Homo sapiens
aaccaggccagccct

SEQ ID NO: 779157 - DNA, 15 bp, Homo sapiens
accaggccagccctt

SEQ ID NO: 779158 - DNA, 15 bp, Homo sapiens
ccaggccagccctta

SEQ ID NO: 779159 - DNA, 15 bp, Homo sapiens
caggccagcccttat

SEQ ID NO: 779160 - DNA, 15 bp, Homo sapiens
aggccagcccttatc

SEQ ID NO: 779161 - DNA, 15 bp, Homo sapiens
ggccagcccttatca

SEQ ID NO: 779162 - DNA, 15 bp, Homo sapiens
gccagcccttatcat

SEQ ID NO: 779163 - DNA, 15 bp, Homo sapiens
ccagcccttatcatc

SEQ ID NO: 779164 - DNA, 15 bp, Homo sapiens
cagcccttatcatcc

SEQ ID NO: 779165 - DNA, 15 bp, Homo sapiens
agcccttatcatcca

SEQ ID NO: 779166 - DNA, 15 bp, Homo sapiens
gcccttatcatccac

SEQ ID NO: 779167 - DNA, 15 bp, Homo sapiens
cccttatcatccacc

SEQ ID NO: 779168 - DNA, 15 bp, Homo sapiens
ccttatcatccaccc

SEQ ID NO: 779169 - DNA, 15 bp, Homo sapiens
cttatcatccaccca

SEQ ID NO: 779170 - DNA, 15 bp, Homo sapiens
ttatcatccacccag

SEQ ID NO: 779171 - DNA, 15 bp, Homo sapiens
tatcatccacccagt

SEQ ID NO: 779172 - DNA, 15 bp, Homo sapiens
atcatccacccagtc

SEQ ID NO: 779173 - DNA, 15 bp, Homo sapiens
tcatccacccagtca

SEQ ID NO: 779174 - DNA, 15 bp, Homo sapiens
catccacccagtcaa

SEQ ID NO: 779175 - DNA, 15 bp, Homo sapiens
atccacccagtcaac

SEQ ID NO: 779176 - DNA, 15 bp, Homo sapiens
tccacccagtcaacc

SEQ ID NO: 779177 - DNA, 15 bp, Homo sapiens
ccacccagtcaacct

SEQ ID NO: 779178 - DNA, 15 bp, Homo sapiens
cacccagtcaacctt

SEQ ID NO: 779179 - DNA, 15 bp, Homo sapiens
acccagtcaaccttc

SEQ ID NO: 779180 - DNA, 15 bp, Homo sapiens
cccagtcaaccttcc

SEQ ID NO: 779181 - DNA, 15 bp, Homo sapiens
ccagtcaaccttcca

SEQ ID NO: 779182 - DNA, 15 bp, Homo sapiens
cagtcaaccttccaa

SEQ ID NO: 779183 - DNA, 15 bp, Homo sapiens
agtcaaccttccaaa

SEQ ID NO: 779184 - DNA, 15 bp, Homo sapiens
gtcaaccttccaaat

SEQ ID NO: 779185 - DNA, 15 bp, Homo sapiens
tcaaccttccaaata

SEQ ID NO: 779186 - DNA, 15 bp, Homo sapiens
caaccttccaaatat

SEQ ID NO: 779187 - DNA, 15 bp, Homo sapiens
aaccttccaaatatc

SEQ ID NO: 779188 - DNA, 15 bp, Homo sapiens
accttccaaatatcc

SEQ ID NO: 779189 - DNA, 15 bp, Homo sapiens
ccttccaaatatcct

SEQ ID NO: 779190 - DNA, 15 bp, Homo sapiens
cttccaaatatcctt

SEQ ID NO: 779191 - DNA, 15 bp, Homo sapiens
ttccaaatatccttc

SEQ ID NO: 779192 - DNA, 15 bp, Homo sapiens
tccaaatatccttcc

SEQ ID NO: 779193 - DNA, 15 bp, Homo sapiens
ccaaatatccttcca

SEQ ID NO: 779194 - DNA, 15 bp, Homo sapiens
caaatatccttccat

SEQ ID NO: 779195 - DNA, 15 bp, Homo sapiens
aaatatccttccatt

SEQ ID NO: 779196 - DNA, 15 bp, Homo sapiens
aatatccttccattc

SEQ ID NO: 779197 - DNA, 15 bp, Homo sapiens
atatccttccattca

SEQ ID NO: 779198 - DNA, 15 bp, Homo sapiens
tatccttccattcag

SEQ ID NO: 779199 - DNA, 15 bp, Homo sapiens
atccttccattcagt

SEQ ID NO: 779200 - DNA, 15 bp, Homo sapiens
tccttccattcagtc

SEQ ID NO: 779201 - DNA, 15 bp, Homo sapiens
ccttccattcagtct

SEQ ID NO: 779202 - DNA, 15 bp, Homo sapiens
cttccattcagtctt

SEQ ID NO: 779203 - DNA, 15 bp, Homo sapiens
ttccattcagtcttc

SEQ ID NO: 779204 - DNA, 15 bp, Homo sapiens
tccattcagtcttct

SEQ ID NO: 779205 - DNA, 15 bp, Homo sapiens
ccattcagtcttcta

SEQ ID NO: 779206 - DNA, 15 bp, Homo sapiens
cattcagtcttctag

SEQ ID NO: 779207 - DNA, 15 bp, Homo sapiens
attcagtcttctagt

SEQ ID NO: 779208 - DNA, 15 bp, Homo sapiens
ttcagtcttctagtc

SEQ ID NO: 779209 - DNA, 15 bp, Homo sapiens
tcagtcttctagtca

SEQ ID NO: 779210 - DNA, 15 bp, Homo sapiens
cagtcttctagtcat

SEQ ID NO: 779211 - DNA, 15 bp, Homo sapiens
agtcttctagtcatc

SEQ ID NO: 779212 - DNA, 15 bp, Homo sapiens
gtcttctagtcatcc

SEQ ID NO: 779213 - DNA, 15 bp, Homo sapiens
tcttctagtcatccc

SEQ ID NO: 779214 - DNA, 15 bp, Homo sapiens
cttctagtcatccct

SEQ ID NO: 779215 - DNA, 15 bp, Homo sapiens
ttctagtcatccctc

SEQ ID NO: 779216 - DNA, 15 bp, Homo sapiens
tctagtcatccctcc

SEQ ID NO: 779217 - DNA, 15 bp, Homo sapiens
ctagtcatccctccc

SEQ ID NO: 779218 - DNA, 15 bp, Homo sapiens
tagtcatccctccct

SEQ ID NO: 779219 - DNA, 15 bp, Homo sapiens
agtcatccctccctt

SEQ ID NO: 779220 - DNA, 15 bp, Homo sapiens
gtcatccctcccttt

SEQ ID NO: 779221 - DNA, 15 bp, Homo sapiens
tcatccctccctttc

SEQ ID NO: 779222 - DNA, 15 bp, Homo sapiens
catccctccctttct

SEQ ID NO: 779223 - DNA, 15 bp, Homo sapiens
atccctccctttctc

SEQ ID NO: 779224 - DNA, 15 bp, Homo sapiens
tccctccctttctct

SEQ ID NO: 779225 - DNA, 15 bp, Homo sapiens
ccctccctttctctc

SEQ ID NO: 779226 - DNA, 15 bp, Homo sapiens
cctccctttctctct

SEQ ID NO: 779227 - DNA, 15 bp, Homo sapiens
tccctttctctctcc

SEQ ID NO: 779228 - DNA, 15 bp, Homo sapiens
ccctttctctctcca

SEQ ID NO: 779229 - DNA, 15 bp, Homo sapiens
cctttctctctccat

SEQ ID NO: 779230 - DNA, 15 bp, Homo sapiens
ctttctctctccatc

SEQ ID NO: 779231 - DNA, 15 bp, Homo sapiens
tttctctctccatct

SEQ ID NO: 779232 - DNA, 15 bp, Homo sapiens
ttctctctccatctc

SEQ ID NO: 779233 - DNA, 15 bp, Homo sapiens
tctctctccatctct

SEQ ID NO: 779234 - DNA, 15 bp, Homo sapiens
ctctctccatctctt

SEQ ID NO: 779235 - DNA, 15 bp, Homo sapiens
tctctccatctcttc

SEQ ID NO: 779236 - DNA, 15 bp, Homo sapiens
ctctccatctcttca

SEQ ID NO: 779237 - DNA, 15 bp, Homo sapiens
tctccatctcttcat

SEQ ID NO: 779238 - DNA, 15 bp, Homo sapiens
ctccatctcttcatc

SEQ ID NO: 779239 - DNA, 15 bp, Homo sapiens
tccatctcttcatcc

SEQ ID NO: 779240 - DNA, 15 bp, Homo sapiens
ccatctcttcatcca

SEQ ID NO: 779241 - DNA, 15 bp, Homo sapiens
catctcttcatccaa

SEQ ID NO: 779242 - DNA, 15 bp, Homo sapiens
atctcttcatccaac

SEQ ID NO: 779243 - DNA, 15 bp, Homo sapiens
tctcttcatccaaca

SEQ ID NO: 779244 - DNA, 15 bp, Homo sapiens
ctcttcatccaacat

SEQ ID NO: 779245 - DNA, 15 bp, Homo sapiens
tcttcatccaacatc

SEQ ID NO: 779246 - DNA, 15 bp, Homo sapiens
cttcatccaacatca

SEQ ID NO: 779247 - DNA, 15 bp, Homo sapiens
ttcatccaacatcaa

SEQ ID NO: 779248 - DNA, 15 bp, Homo sapiens
tcatccaacatcaac

SEQ ID NO: 779249 - DNA, 15 bp, Homo sapiens
ttgattcattgagtt

SEQ ID NO: 779250 - DNA, 15 bp, Homo sapiens
tgattcattgagttt

SEQ ID NO: 779251 - DNA, 15 bp, Homo sapiens
gattcattgagtttc

SEQ ID NO: 779252 - DNA, 15 bp, Homo sapiens
attcattgagtttca

SEQ ID NO: 779253 - DNA, 15 bp, Homo sapiens
ttcattgagtttcaa

SEQ ID NO: 779254 - DNA, 15 bp, Homo sapiens
tcattgagtttcaaa

SEQ ID NO: 779255 - DNA, 15 bp, Homo sapiens
cattgagtttcaaag

SEQ ID NO: 779256 - DNA, 15 bp, Homo sapiens
attgagtttcaaaga

SEQ ID NO: 779257 - DNA, 15 bp, Homo sapiens
ttgagtttcaaagaa

SEQ ID NO: 779258 - DNA, 15 bp, Homo sapiens
tgagtttcaaagaaa

SEQ ID NO: 779259 - DNA, 15 bp, Homo sapiens
gagtttcaaagaaat

SEQ ID NO: 779260 - DNA, 15 bp, Homo sapiens
agtttcaaagaaata

SEQ ID NO: 779261 - DNA, 15 bp, Homo sapiens
gtttcaaagaaatag

SEQ ID NO: 779262 - DNA, 15 bp, Homo sapiens
tttcaaagaaatagg

SEQ ID NO: 779263 - DNA, 15 bp, Homo sapiens
ttcaaagaaatagga

SEQ ID NO: 779264 - DNA, 15 bp, Homo sapiens
tcaaagaaataggat

SEQ ID NO: 779265 - DNA, 15 bp, Homo sapiens
caaagaaataggatg

SEQ ID NO: 779266 - DNA, 15 bp, Homo sapiens
aaagaaataggatgc

SEQ ID NO: 779267 - DNA, 15 bp, Homo sapiens
aagaaataggatgct

SEQ ID NO: 779268 - DNA, 15 bp, Homo sapiens
agaaataggatgcta

SEQ ID NO: 779269 - DNA, 15 bp, Homo sapiens
gaaataggatgctac

SEQ ID NO: 779270 - DNA, 15 bp, Homo sapiens
aaataggatgctaca

SEQ ID NO: 779271 - DNA, 15 bp, Homo sapiens
aataggatgctacaa

SEQ ID NO: 779272 - DNA, 15 bp, Homo sapiens
ataggatgctacaag

SEQ ID NO: 779273 - DNA, 15 bp, Homo sapiens
taggatgctacaaga

SEQ ID NO: 779274 - DNA, 15 bp, Homo sapiens
aggatgctacaagaa

SEQ ID NO: 779275 - DNA, 15 bp, Homo sapiens
ggatgctacaagaag

SEQ ID NO: 779276 - DNA, 15 bp, Homo sapiens
gatgctacaagaagc

SEQ ID NO: 779277 - DNA, 15 bp, Homo sapiens
atgctacaagaagct

SEQ ID NO: 779278 - DNA, 15 bp, Homo sapiens
tgctacaagaagcta

SEQ ID NO: 779279 - DNA, 15 bp, Homo sapiens
gctacaagaagctag

SEQ ID NO: 779280 - DNA, 15 bp, Homo sapiens
ctacaagaagctaga

SEQ ID NO: 779281 - DNA, 15 bp, Homo sapiens
tacaagaagctagaa

SEQ ID NO: 779282 - DNA, 15 bp, Homo sapiens
acaagaagctagaaa

SEQ ID NO: 779283 - DNA, 15 bp, Homo sapiens
caagaagctagaaat

SEQ ID NO: 779284 - DNA, 15 bp, Homo sapiens
aagaagctagaaata

SEQ ID NO: 779285 - DNA, 15 bp, Homo sapiens
agaagctagaaataa

SEQ ID NO: 779286 - DNA, 15 bp, Homo sapiens
gaagctagaaataaa

SEQ ID NO: 779287 - DNA, 15 bp, Homo sapiens
aagctagaaataaag

SEQ ID NO: 779288 - DNA, 15 bp, Homo sapiens
agctagaaataaagc

SEQ ID NO: 779289 - DNA, 15 bp, Homo sapiens
gctagaaataaagcc

SEQ ID NO: 779290 - DNA, 15 bp, Homo sapiens
ctagaaataaagccg

SEQ ID NO: 779291 - DNA, 15 bp, Homo sapiens
tagaaataaagccgt

SEQ ID NO: 779292 - DNA, 15 bp, Homo sapiens
agaaataaagccgtg

SEQ ID NO: 779293 - DNA, 15 bp, Homo sapiens
gaaataaagccgtgc

SEQ ID NO: 779294 - DNA, 15 bp, Homo sapiens
aaataaagccgtgcc

SEQ ID NO: 779295 - DNA, 15 bp, Homo sapiens
aataaagccgtgcct

SEQ ID NO: 779296 - DNA, 15 bp, Homo sapiens
ataaagccgtgcctt

SEQ ID NO: 779297 - DNA, 15 bp, Homo sapiens
taaagccgtgcctta

SEQ ID NO: 779298 - DNA, 15 bp, Homo sapiens
aaagccgtgccttaa

SEQ ID NO: 779299 - DNA, 15 bp, Homo sapiens
aagccgtgccttaaa

SEQ ID NO: 779300 - DNA, 15 bp, Homo sapiens
agccgtgccttaaaa

SEQ ID NO: 779301 - DNA, 15 bp, Homo sapiens
gccgtgccttaaaaa

SEQ ID NO: 779302 - DNA, 15 bp, Homo sapiens
ccgtgccttaaaaat

SEQ ID NO: 779303 - DNA, 15 bp, Homo sapiens
cgtgccttaaaaatt

SEQ ID NO: 779304 - DNA, 15 bp, Homo sapiens
gtgccttaaaaatta

SEQ ID NO: 779305 - DNA, 15 bp, Homo sapiens
tgccttaaaaattat

SEQ ID NO: 779306 - DNA, 15 bp, Homo sapiens
gccttaaaaattata

SEQ ID NO: 779307 - DNA, 15 bp, Homo sapiens
ccttaaaaattataa

SEQ ID NO: 779308 - DNA, 15 bp, Homo sapiens
cttaaaaattataat

SEQ ID NO: 779309 - DNA, 15 bp, Homo sapiens
ttaaaaattataatg

SEQ ID NO: 779310 - DNA, 15 bp, Homo sapiens
taaaaattataatgc

SEQ ID NO: 779311 - DNA, 15 bp, Homo sapiens
aaaaattataatgca

SEQ ID NO: 779312 - DNA, 15 bp, Homo sapiens
aaaattataatgcaa

SEQ ID NO: 779313 - DNA, 15 bp, Homo sapiens
aaattataatgcaat

SEQ ID NO: 779314 - DNA, 15 bp, Homo sapiens
aattataatgcaatt

SEQ ID NO: 779315 - DNA, 15 bp, Homo sapiens
attataatgcaattt

SEQ ID NO: 779316 - DNA, 15 bp, Homo sapiens
ttataatgcaatttt

SEQ ID NO: 779317 - DNA, 15 bp, Homo sapiens
tataatgcaattttg

SEQ ID NO: 779318 - DNA, 15 bp, Homo sapiens
ataatgcaattttgt

SEQ ID NO: 779319 - DNA, 15 bp, Homo sapiens
taatgcaattttgta

SEQ ID NO: 779320 - DNA, 15 bp, Homo sapiens
aatgcaattttgtaa

SEQ ID NO: 779321 - DNA, 15 bp, Homo sapiens
atgcaattttgtaag

SEQ ID NO: 779322 - DNA, 15 bp, Homo sapiens
tgcaattttgtaagt

SEQ ID NO: 779323 - DNA, 15 bp, Homo sapiens
gcaattttgtaagtg

SEQ ID NO: 779324 - DNA, 15 bp, Homo sapiens
caattttgtaagtgt

SEQ ID NO: 779325 - DNA, 15 bp, Homo sapiens
aattttgtaagtgtt

SEQ ID NO: 779326 - DNA, 15 bp, Homo sapiens
attttgtaagtgttg

SEQ ID NO: 779327 - DNA, 15 bp, Homo sapiens
ttttgtaagtgttgc

SEQ ID NO: 779328 - DNA, 15 bp, Homo sapiens
tttgtaagtgttgct

SEQ ID NO: 779329 - DNA, 15 bp, Homo sapiens
ttgtaagtgttgcta

SEQ ID NO: 779330 - DNA, 15 bp, Homo sapiens
tgtaagtgttgctaa

SEQ ID NO: 779331 - DNA, 15 bp, Homo sapiens
gtaagtgttgctaaa

SEQ ID NO: 779332 - DNA, 15 bp, Homo sapiens
taagtgttgctaaag

SEQ ID NO: 779333 - DNA, 15 bp, Homo sapiens
aagtgttgctaaagg

SEQ ID NO: 779334 - DNA, 15 bp, Homo sapiens
agtgttgctaaaggt

SEQ ID NO: 779335 - DNA, 15 bp, Homo sapiens
gtgttgctaaaggta

SEQ ID NO: 779336 - DNA, 15 bp, Homo sapiens
tgttgctaaaggtaa

SEQ ID NO: 779337 - DNA, 15 bp, Homo sapiens
gttgctaaaggtaaa

SEQ ID NO: 779338 - DNA, 15 bp, Homo sapiens
ttgctaaaggtaaaa

SEQ ID NO: 779339 - DNA, 15 bp, Homo sapiens
tgctaaaggtaaaaa

SEQ ID NO: 779340 - DNA, 15 bp, Homo sapiens
gctaaaggtaaaaat

SEQ ID NO: 779341 - DNA, 15 bp, Homo sapiens
ctaaaggtaaaaata

SEQ ID NO: 779342 - DNA, 15 bp, Homo sapiens
taaaggtaaaaatat

SEQ ID NO: 779343 - DNA, 15 bp, Homo sapiens
aaaggtaaaaatatt

SEQ ID NO: 779344 - DNA, 15 bp, Homo sapiens
aaggtaaaaatatta

SEQ ID NO: 779345 - DNA, 15 bp, Homo sapiens
aggtaaaaatattaa

SEQ ID NO: 779346 - DNA, 15 bp, Homo sapiens
ggtaaaaatattaaa

SEQ ID NO: 779347 - DNA, 15 bp, Homo sapiens
gtaaaaatattaaag

SEQ ID NO: 779348 - DNA, 15 bp, Homo sapiens
taaaaatattaaaga

SEQ ID NO: 779349 - DNA, 15 bp, Homo sapiens
aaaaatattaaagat

SEQ ID NO: 779350 - DNA, 15 bp, Homo sapiens
aaaatattaaagatt

SEQ ID NO: 779351 - DNA, 15 bp, Homo sapiens
aaatattaaagatta

SEQ ID NO: 779352 - DNA, 15 bp, Homo sapiens
aatattaaagattaa

SEQ ID NO: 779353 - DNA, 15 bp, Homo sapiens
atattaaagattaat

SEQ ID NO: 779354 - DNA, 15 bp, Homo sapiens
tattaaagattaatg

SEQ ID NO: 779355 - DNA, 15 bp, Homo sapiens
attaaagattaatgg

SEQ ID NO: 779356 - DNA, 15 bp, Homo sapiens
ttaaagattaatgga

SEQ ID NO: 779357 - DNA, 15 bp, Homo sapiens
taaagattaatggaa

SEQ ID NO: 779358 - DNA, 15 bp, Homo sapiens
aaagattaatggaag

SEQ ID NO: 779359 - DNA, 15 bp, Homo sapiens
aagattaatggaagt

SEQ ID NO: 779360 - DNA, 15 bp, Homo sapiens
agattaatggaagta

SEQ ID NO: 779361 - DNA, 15 bp, Homo sapiens
gattaatggaagtag

SEQ ID NO: 779362 - DNA, 15 bp, Homo sapiens
attaatggaagtaga

SEQ ID NO: 779363 - DNA, 15 bp, Homo sapiens
ttaatggaagtagag

SEQ ID NO: 779364 - DNA, 15 bp, Homo sapiens
taatggaagtagaga

SEQ ID NO: 779365 - DNA, 15 bp, Homo sapiens
aatggaagtagagag

SEQ ID NO: 779366 - DNA, 15 bp, Homo sapiens
atggaagtagagaga

SEQ ID NO: 779367 - DNA, 15 bp, Homo sapiens
tggaagtagagagat

SEQ ID NO: 779368 - DNA, 15 bp, Homo sapiens
ggaagtagagagata

SEQ ID NO: 779369 - DNA, 15 bp, Homo sapiens
gaagtagagagatag

SEQ ID NO: 779370 - DNA, 15 bp, Homo sapiens
aagtagagagatagt

SEQ ID NO: 779371 - DNA, 15 bp, Homo sapiens
agtagagagatagtg

SEQ ID NO: 779372 - DNA, 15 bp, Homo sapiens
gtagagagatagtgt

SEQ ID NO: 779373 - DNA, 15 bp, Homo sapiens
tagagagatagtgta

SEQ ID NO: 779374 - DNA, 15 bp, Homo sapiens
agagagatagtgtac

SEQ ID NO: 779375 - DNA, 15 bp, Homo sapiens
gagagatagtgtaca

SEQ ID NO: 779376 - DNA, 15 bp, Homo sapiens
agagatagtgtacag

SEQ ID NO: 779377 - DNA, 15 bp, Homo sapiens
gagatagtgtacaga

SEQ ID NO: 779378 - DNA, 15 bp, Homo sapiens
agatagtgtacagac

SEQ ID NO: 779379 - DNA, 15 bp, Homo sapiens
gatagtgtacagact

SEQ ID NO: 779380 - DNA, 15 bp, Homo sapiens
atagtgtacagacta

SEQ ID NO: 779381 - DNA, 15 bp, Homo sapiens
tagtgtacagactat

SEQ ID NO: 779382 - DNA, 15 bp, Homo sapiens
agtgtacagactatc

SEQ ID NO: 779383 - DNA, 15 bp, Homo sapiens
gtgtacagactatca

SEQ ID NO: 779384 - DNA, 15 bp, Homo sapiens
tgtacagactatcag

SEQ ID NO: 779385 - DNA, 15 bp, Homo sapiens
gtacagactatcaga

SEQ ID NO: 779386 - DNA, 15 bp, Homo sapiens
tacagactatcagag

SEQ ID NO: 779387 - DNA, 15 bp, Homo sapiens
acagactatcagaga

SEQ ID NO: 779388 - DNA, 15 bp, Homo sapiens
cagactatcagagaa

SEQ ID NO: 779389 - DNA, 15 bp, Homo sapiens
agactatcagagaag

SEQ ID NO: 779390 - DNA, 15 bp, Homo sapiens
gactatcagagaagg

SEQ ID NO: 779391 - DNA, 15 bp, Homo sapiens
actatcagagaaggc

SEQ ID NO: 779392 - DNA, 15 bp, Homo sapiens
ctatcagagaaggct

SEQ ID NO: 779393 - DNA, 15 bp, Homo sapiens
tatcagagaaggctt

SEQ ID NO: 779394 - DNA, 15 bp, Homo sapiens
atcagagaaggcttc

SEQ ID NO: 779395 - DNA, 15 bp, Homo sapiens
tcagagaaggcttcc

SEQ ID NO: 779396 - DNA, 15 bp, Homo sapiens
cagagaaggcttccc

SEQ ID NO: 779397 - DNA, 15 bp, Homo sapiens
agagaaggcttccca

SEQ ID NO: 779398 - DNA, 15 bp, Homo sapiens
gagaaggcttcccag

SEQ ID NO: 779399 - DNA, 15 bp, Homo sapiens
agaaggcttcccagg

SEQ ID NO: 779400 - DNA, 15 bp, Homo sapiens
gaaggcttcccagga

SEQ ID NO: 779401 - DNA, 15 bp, Homo sapiens
aaggcttcccaggag

SEQ ID NO: 779402 - DNA, 15 bp, Homo sapiens
aggcttcccaggagg

SEQ ID NO: 779403 - DNA, 15 bp, Homo sapiens
ggcttcccaggaggt

SEQ ID NO: 779404 - DNA, 15 bp, Homo sapiens
gcttcccaggaggtg

SEQ ID NO: 779405 - DNA, 15 bp, Homo sapiens
cttcccaggaggtga

SEQ ID NO: 779406 - DNA, 15 bp, Homo sapiens
ttcccaggaggtgac

SEQ ID NO: 779407 - DNA, 15 bp, Homo sapiens
tcccaggaggtgaca

SEQ ID NO: 779408 - DNA, 15 bp, Homo sapiens
cccaggaggtgacat

SEQ ID NO: 779409 - DNA, 15 bp, Homo sapiens
ccaggaggtgacatt

SEQ ID NO: 779410 - DNA, 15 bp, Homo sapiens
caggaggtgacattt

SEQ ID NO: 779411 - DNA, 15 bp, Homo sapiens
aggaggtgacatttg

SEQ ID NO: 779412 - DNA, 15 bp, Homo sapiens
ggaggtgacatttga

SEQ ID NO: 779413 - DNA, 15 bp, Homo sapiens
gaggtgacatttgat

SEQ ID NO: 779414 - DNA, 15 bp, Homo sapiens
aggtgacatttgatt

SEQ ID NO: 779415 - DNA, 15 bp, Homo sapiens
ggtgacatttgattt

SEQ ID NO: 779416 - DNA, 15 bp, Homo sapiens
gtgacatttgatttg

SEQ ID NO: 779417 - DNA, 15 bp, Homo sapiens
tgacatttgatttgg

SEQ ID NO: 779418 - DNA, 15 bp, Homo sapiens
gacatttgatttgga

SEQ ID NO: 779419 - DNA, 15 bp, Homo sapiens
acatttgatttggat

SEQ ID NO: 779420 - DNA, 15 bp, Homo sapiens
catttgatttggata

SEQ ID NO: 779421 - DNA, 15 bp, Homo sapiens
atttgatttggatag

SEQ ID NO: 779422 - DNA, 15 bp, Homo sapiens
tttgatttggatagt

SEQ ID NO: 779423 - DNA, 15 bp, Homo sapiens
ttgatttggatagtg

SEQ ID NO: 779424 - DNA, 15 bp, Homo sapiens
tgatttggatagtga

SEQ ID NO: 779425 - DNA, 15 bp, Homo sapiens
gatttggatagtgat

SEQ ID NO: 779426 - DNA, 15 bp, Homo sapiens
atttggatagtgatt

SEQ ID NO: 779427 - DNA, 15 bp, Homo sapiens
tttggatagtgattt

SEQ ID NO: 779428 - DNA, 15 bp, Homo sapiens
ttggatagtgatttg

SEQ ID NO: 779429 - DNA, 15 bp, Homo sapiens
tggatagtgatttgg

SEQ ID NO: 779430 - DNA, 15 bp, Homo sapiens
ggatagtgatttgga

SEQ ID NO: 779431 - DNA, 15 bp, Homo sapiens
gatagtgatttggat

SEQ ID NO: 779432 - DNA, 15 bp, Homo sapiens
atagtgatttggatg

SEQ ID NO: 779433 - DNA, 15 bp, Homo sapiens
tagtgatttggatgg

SEQ ID NO: 779434 - DNA, 15 bp, Homo sapiens
agtgatttggatgga

SEQ ID NO: 779435 - DNA, 15 bp, Homo sapiens
gtgatttggatggat

SEQ ID NO: 779436 - DNA, 15 bp, Homo sapiens
tgatttggatggatg

SEQ ID NO: 779437 - DNA, 15 bp, Homo sapiens
gatttggatggatga

SEQ ID NO: 779438 - DNA, 15 bp, Homo sapiens
atttggatggatgaa

SEQ ID NO: 779439 - DNA, 15 bp, Homo sapiens
tttggatggatgaat

SEQ ID NO: 779440 - DNA, 15 bp, Homo sapiens
ttggatggatgaata

SEQ ID NO: 779441 - DNA, 15 bp, Homo sapiens
tggatggatgaataa

SEQ ID NO: 779442 - DNA, 15 bp, Homo sapiens
ggatggatgaataag

SEQ ID NO: 779443 - DNA, 15 bp, Homo sapiens
gatggatgaataagg

SEQ ID NO: 779444 - DNA, 15 bp, Homo sapiens
atggatgaataaggg

SEQ ID NO: 779445 - DNA, 15 bp, Homo sapiens
tggatgaataaggga

SEQ ID NO: 779446 - DNA, 15 bp, Homo sapiens
ggatgaataagggaa

SEQ ID NO: 779447 - DNA, 15 bp, Homo sapiens
gatgaataagggaaa

SEQ ID NO: 779448 - DNA, 15 bp, Homo sapiens
atgaataagggaaaa

SEQ ID NO: 779449 - DNA, 15 bp, Homo sapiens
tgaataagggaaaag

SEQ ID NO: 779450 - DNA, 15 bp, Homo sapiens
gaataagggaaaagg

SEQ ID NO: 779451 - DNA, 15 bp, Homo sapiens
aataagggaaaaggg

SEQ ID NO: 779452 - DNA, 15 bp, Homo sapiens
ataagggaaaaggga

SEQ ID NO: 779453 - DNA, 15 bp, Homo sapiens
taagggaaaagggag

SEQ ID NO: 779454 - DNA, 15 bp, Homo sapiens
aagggaaaagggaga

SEQ ID NO: 779455 - DNA, 15 bp, Homo sapiens
agggaaaagggagac

SEQ ID NO: 779456 - DNA, 15 bp, Homo sapiens
gggaaaagggagact

SEQ ID NO: 779457 - DNA, 15 bp, Homo sapiens
ggaaaagggagactt

SEQ ID NO: 779458 - DNA, 15 bp, Homo sapiens
gaaaagggagacttg

SEQ ID NO: 779459 - DNA, 15 bp, Homo sapiens
aaaagggagacttgt

SEQ ID NO: 779460 - DNA, 15 bp, Homo sapiens
aaagggagacttgta

SEQ ID NO: 779461 - DNA, 15 bp, Homo sapiens
aagggagacttgtag

SEQ ID NO: 779462 - DNA, 15 bp, Homo sapiens
agggagacttgtagg

SEQ ID NO: 779463 - DNA, 15 bp, Homo sapiens
gggagacttgtaggc

SEQ ID NO: 779464 - DNA, 15 bp, Homo sapiens
ggagacttgtaggca

SEQ ID NO: 779465 - DNA, 15 bp, Homo sapiens
gagacttgtaggcag

SEQ ID NO: 779466 - DNA, 15 bp, Homo sapiens
agacttgtaggcaga

SEQ ID NO: 779467 - DNA, 15 bp, Homo sapiens
gacttgtaggcagag

SEQ ID NO: 779468 - DNA, 15 bp, Homo sapiens
acttgtaggcagagc

SEQ ID NO: 779469 - DNA, 15 bp, Homo sapiens
cttgtaggcagagca

SEQ ID NO: 779470 - DNA, 15 bp, Homo sapiens
ttgtaggcagagcat

SEQ ID NO: 779471 - DNA, 15 bp, Homo sapiens
tgtaggcagagcatc

SEQ ID NO: 779472 - DNA, 15 bp, Homo sapiens
gtaggcagagcatca

SEQ ID NO: 779473 - DNA, 15 bp, Homo sapiens
taggcagagcatcat

SEQ ID NO: 779474 - DNA, 15 bp, Homo sapiens
aggcagagcatcatg

SEQ ID NO: 779475 - DNA, 15 bp, Homo sapiens
ggcagagcatcatga

SEQ ID NO: 779476 - DNA, 15 bp, Homo sapiens
gcagagcatcatgag

SEQ ID NO: 779477 - DNA, 15 bp, Homo sapiens
cagagcatcatgaga

SEQ ID NO: 779478 - DNA, 15 bp, Homo sapiens
agagcatcatgagaa

SEQ ID NO: 779479 - DNA, 15 bp, Homo sapiens
gagcatcatgagaaa

SEQ ID NO: 779480 - DNA, 15 bp, Homo sapiens
agcatcatgagaaac

SEQ ID NO: 779481 - DNA, 15 bp, Homo sapiens
gcatcatgagaaaca

SEQ ID NO: 779482 - DNA, 15 bp, Homo sapiens
catcatgagaaacat

SEQ ID NO: 779483 - DNA, 15 bp, Homo sapiens
atcatgagaaacatg

SEQ ID NO: 779484 - DNA, 15 bp, Homo sapiens
tcatgagaaacatgg

SEQ ID NO: 779485 - DNA, 15 bp, Homo sapiens
catgagaaacatggc

SEQ ID NO: 779486 - DNA, 15 bp, Homo sapiens
atgagaaacatggca

SEQ ID NO: 779487 - DNA, 15 bp, Homo sapiens
tgagaaacatggcat

SEQ ID NO: 779488 - DNA, 15 bp, Homo sapiens
gagaaacatggcatg

SEQ ID NO: 779489 - DNA, 15 bp, Homo sapiens
agaaacatggcatgt

SEQ ID NO: 779490 - DNA, 15 bp, Homo sapiens
gaaacatggcatgtt

SEQ ID NO: 779491 - DNA, 15 bp, Homo sapiens
aaacatggcatgttc

SEQ ID NO: 779492 - DNA, 15 bp, Homo sapiens
aacatggcatgttcg

SEQ ID NO: 779493 - DNA, 15 bp, Homo sapiens
acatggcatgttcga

SEQ ID NO: 779494 - DNA, 15 bp, Homo sapiens
catggcatgttcgag

SEQ ID NO: 779495 - DNA, 15 bp, Homo sapiens
atggcatgttcgaga

SEQ ID NO: 779496 - DNA, 15 bp, Homo sapiens
tggcatgttcgagaa

SEQ ID NO: 779497 - DNA, 15 bp, Homo sapiens
ggcatgttcgagaaa

SEQ ID NO: 779498 - DNA, 15 bp, Homo sapiens
gcatgttcgagaaat

SEQ ID NO: 779499 - DNA, 15 bp, Homo sapiens
catgttcgagaaata

SEQ ID NO: 779500 - DNA, 15 bp, Homo sapiens
atgttcgagaaataa

SEQ ID NO: 779501 - DNA, 15 bp, Homo sapiens
tgttcgagaaataaa

SEQ ID NO: 779502 - DNA, 15 bp, Homo sapiens
gttcgagaaataaaa

SEQ ID NO: 779503 - DNA, 15 bp, Homo sapiens
ttcgagaaataaaaa

SEQ ID NO: 779504 - DNA, 15 bp, Homo sapiens
tcgagaaataaaaat

SEQ ID NO: 779505 - DNA, 15 bp, Homo sapiens
cgagaaataaaaatt

SEQ ID NO: 779506 - DNA, 15 bp, Homo sapiens
gagaaataaaaattg

SEQ ID NO: 779507 - DNA, 15 bp, Homo sapiens
agaaataaaaattgg

SEQ ID NO: 779508 - DNA, 15 bp, Homo sapiens
gaaataaaaattggc

SEQ ID NO: 779509 - DNA, 15 bp, Homo sapiens
aaataaaaattggct

SEQ ID NO: 779510 - DNA, 15 bp, Homo sapiens
aataaaaattggctt

SEQ ID NO: 779511 - DNA, 15 bp, Homo sapiens
ataaaaattggcttc

SEQ ID NO: 779512 - DNA, 15 bp, Homo sapiens
taaaaattggcttca

SEQ ID NO: 779513 - DNA, 15 bp, Homo sapiens
aaaaattggcttcat

SEQ ID NO: 779514 - DNA, 15 bp, Homo sapiens
aaaattggcttcatg

SEQ ID NO: 779515 - DNA, 15 bp, Homo sapiens
aaattggcttcatgt

SEQ ID NO: 779516 - DNA, 15 bp, Homo sapiens
aattggcttcatgtg

SEQ ID NO: 779517 - DNA, 15 bp, Homo sapiens
attggcttcatgtga

SEQ ID NO: 779518 - DNA, 15 bp, Homo sapiens
ttggcttcatgtgac

SEQ ID NO: 779519 - DNA, 15 bp, Homo sapiens
tggcttcatgtgact

SEQ ID NO: 779520 - DNA, 15 bp, Homo sapiens
ggcttcatgtgacta

SEQ ID NO: 779521 - DNA, 15 bp, Homo sapiens
gcttcatgtgactag

SEQ ID NO: 779522 - DNA, 15 bp, Homo sapiens
cttcatgtgactaga

SEQ ID NO: 779523 - DNA, 15 bp, Homo sapiens
ttcatgtgactagaa

SEQ ID NO: 779524 - DNA, 15 bp, Homo sapiens
tcatgtgactagaaa

SEQ ID NO: 779525 - DNA, 15 bp, Homo sapiens
catgtgactagaaaa

SEQ ID NO: 779526 - DNA, 15 bp, Homo sapiens
atgtgactagaaaac

SEQ ID NO: 779527 - DNA, 15 bp, Homo sapiens
tgtgactagaaaaca

SEQ ID NO: 779528 - DNA, 15 bp, Homo sapiens
gtgactagaaaacag

SEQ ID NO: 779529 - DNA, 15 bp, Homo sapiens
tgactagaaaacagg

SEQ ID NO: 779530 - DNA, 15 bp, Homo sapiens
gactagaaaacagga

SEQ ID NO: 779531 - DNA, 15 bp, Homo sapiens
actagaaaacaggac

SEQ ID NO: 779532 - DNA, 15 bp, Homo sapiens
ctagaaaacaggaca

SEQ ID NO: 779533 - DNA, 15 bp, Homo sapiens
tagaaaacaggacat

SEQ ID NO: 779534 - DNA, 15 bp, Homo sapiens
agaaaacaggacata

SEQ ID NO: 779535 - DNA, 15 bp, Homo sapiens
gaaaacaggacatat

SEQ ID NO: 779536 - DNA, 15 bp, Homo sapiens
aaaacaggacatatg

SEQ ID NO: 779537 - DNA, 15 bp, Homo sapiens
aaacaggacatatgg

SEQ ID NO: 779538 - DNA, 15 bp, Homo sapiens
aacaggacatatggg

SEQ ID NO: 779539 - DNA, 15 bp, Homo sapiens
acaggacatatggga

SEQ ID NO: 779540 - DNA, 15 bp, Homo sapiens
caggacatatgggaa

SEQ ID NO: 779541 - DNA, 15 bp, Homo sapiens
aggacatatgggaaa

SEQ ID NO: 779542 - DNA, 15 bp, Homo sapiens
ggacatatgggaaag

SEQ ID NO: 779543 - DNA, 15 bp, Homo sapiens
gacatatgggaaagg

SEQ ID NO: 779544 - DNA, 15 bp, Homo sapiens
acatatgggaaaggg

SEQ ID NO: 779545 - DNA, 15 bp, Homo sapiens
catatgggaaaggga

SEQ ID NO: 779546 - DNA, 15 bp, Homo sapiens
atatgggaaagggac

SEQ ID NO: 779547 - DNA, 15 bp, Homo sapiens
tatgggaaagggact

SEQ ID NO: 779548 - DNA, 15 bp, Homo sapiens
atgggaaagggactg

SEQ ID NO: 779549 - DNA, 15 bp, Homo sapiens
tgggaaagggactgg

SEQ ID NO: 779550 - DNA, 15 bp, Homo sapiens
gggaaagggactgga

SEQ ID NO: 779551 - DNA, 15 bp, Homo sapiens
ggaaagggactggat

SEQ ID NO: 779552 - DNA, 15 bp, Homo sapiens
gaaagggactggatt

SEQ ID NO: 779553 - DNA, 15 bp, Homo sapiens
aaagggactggattg

SEQ ID NO: 779554 - DNA, 15 bp, Homo sapiens
aagggactggattgt

SEQ ID NO: 779555 - DNA, 15 bp, Homo sapiens
agggactggattgtg

SEQ ID NO: 779556 - DNA, 15 bp, Homo sapiens
gggactggattgtga

SEQ ID NO: 779557 - DNA, 15 bp, Homo sapiens
ggactggattgtgac

SEQ ID NO: 779558 - DNA, 15 bp, Homo sapiens
gactggattgtgaca

SEQ ID NO: 779559 - DNA, 15 bp, Homo sapiens
actggattgtgacag

SEQ ID NO: 779560 - DNA, 15 bp, Homo sapiens
ctggattgtgacaga

SEQ ID NO: 779561 - DNA, 15 bp, Homo sapiens
tggattgtgacagaa

SEQ ID NO: 779562 - DNA, 15 bp, Homo sapiens
ggattgtgacagaag

SEQ ID NO: 779563 - DNA, 15 bp, Homo sapiens
gattgtgacagaagc

SEQ ID NO: 779564 - DNA, 15 bp, Homo sapiens
attgtgacagaagcc

SEQ ID NO: 779565 - DNA, 15 bp, Homo sapiens
ttgtgacagaagcca

SEQ ID NO: 779566 - DNA, 15 bp, Homo sapiens
tgtgacagaagccaa

SEQ ID NO: 779567 - DNA, 15 bp, Homo sapiens
gtgacagaagccaaa

SEQ ID NO: 779568 - DNA, 15 bp, Homo sapiens
tgacagaagccaaag

SEQ ID NO: 779569 - DNA, 15 bp, Homo sapiens
gacagaagccaaagt

SEQ ID NO: 779570 - DNA, 15 bp, Homo sapiens
acagaagccaaagtt

SEQ ID NO: 779571 - DNA, 15 bp, Homo sapiens
cagaagccaaagttg

SEQ ID NO: 779572 - DNA, 15 bp, Homo sapiens
agaagccaaagttgc

SEQ ID NO: 779573 - DNA, 15 bp, Homo sapiens
gaagccaaagttgcc

SEQ ID NO: 779574 - DNA, 15 bp, Homo sapiens
aagccaaagttgcca

SEQ ID NO: 779575 - DNA, 15 bp, Homo sapiens
agccaaagttgccaa

SEQ ID NO: 779576 - DNA, 15 bp, Homo sapiens
gccaaagttgccaag

SEQ ID NO: 779577 - DNA, 15 bp, Homo sapiens
ccaaagttgccaagt

SEQ ID NO: 779578 - DNA, 15 bp, Homo sapiens
caaagttgccaagta

SEQ ID NO: 779579 - DNA, 15 bp, Homo sapiens
aaagttgccaagtag

SEQ ID NO: 779580 - DNA, 15 bp, Homo sapiens
aagttgccaagtagc

SEQ ID NO: 779581 - DNA, 15 bp, Homo sapiens
agttgccaagtagct

SEQ ID NO: 779582 - DNA, 15 bp, Homo sapiens
gttgccaagtagctc

SEQ ID NO: 779583 - DNA, 15 bp, Homo sapiens
ttgccaagtagctca

SEQ ID NO: 779584 - DNA, 15 bp, Homo sapiens
tgccaagtagctcat

SEQ ID NO: 779585 - DNA, 15 bp, Homo sapiens
gccaagtagctcatg

SEQ ID NO: 779586 - DNA, 15 bp, Homo sapiens
ccaagtagctcatgc

SEQ ID NO: 779587 - DNA, 15 bp, Homo sapiens
caagtagctcatgct

SEQ ID NO: 779588 - DNA, 15 bp, Homo sapiens
aagtagctcatgctg

SEQ ID NO: 779589 - DNA, 15 bp, Homo sapiens
agtagctcatgctgt

SEQ ID NO: 779590 - DNA, 15 bp, Homo sapiens
gtagctcatgctgtg

SEQ ID NO: 779591 - DNA, 15 bp, Homo sapiens
tagctcatgctgtgc

SEQ ID NO: 779592 - DNA, 15 bp, Homo sapiens
agctcatgctgtgct

SEQ ID NO: 779593 - DNA, 15 bp, Homo sapiens
gctcatgctgtgcta

SEQ ID NO: 779594 - DNA, 15 bp, Homo sapiens
ctcatgctgtgctaa

SEQ ID NO: 779595 - DNA, 15 bp, Homo sapiens
tcatgctgtgctaag

SEQ ID NO: 779596 - DNA, 15 bp, Homo sapiens
catgctgtgctaagg

SEQ ID NO: 779597 - DNA, 15 bp, Homo sapiens
atgctgtgctaagga

SEQ ID NO: 779598 - DNA, 15 bp, Homo sapiens
tgctgtgctaaggaa

SEQ ID NO: 779599 - DNA, 15 bp, Homo sapiens
gctgtgctaaggaat

SEQ ID NO: 779600 - DNA, 15 bp, Homo sapiens
ctgtgctaaggaatc

SEQ ID NO: 779601 - DNA, 15 bp, Homo sapiens
tgtgctaaggaatct

SEQ ID NO: 779602 - DNA, 15 bp, Homo sapiens
gtgctaaggaatctg

SEQ ID NO: 779603 - DNA, 15 bp, Homo sapiens
tgctaaggaatctgg

SEQ ID NO: 779604 - DNA, 15 bp, Homo sapiens
gctaaggaatctgga

SEQ ID NO: 779605 - DNA, 15 bp, Homo sapiens
ctaaggaatctggaa

SEQ ID NO: 779606 - DNA, 15 bp, Homo sapiens
taaggaatctggaac

SEQ ID NO: 779607 - DNA, 15 bp, Homo sapiens
aaggaatctggaacc

SEQ ID NO: 779608 - DNA, 15 bp, Homo sapiens
aggaatctggaacct

SEQ ID NO: 779609 - DNA, 15 bp, Homo sapiens
ggaatctggaacctg

SEQ ID NO: 779610 - DNA, 15 bp, Homo sapiens
gaatctggaacctgg

SEQ ID NO: 779611 - DNA, 15 bp, Homo sapiens
aatctggaacctggg

SEQ ID NO: 779612 - DNA, 15 bp, Homo sapiens
atctggaacctgggc

SEQ ID NO: 779613 - DNA, 15 bp, Homo sapiens
tctggaacctgggcc

SEQ ID NO: 779614 - DNA, 15 bp, Homo sapiens
ctggaacctgggcct

SEQ ID NO: 779615 - DNA, 15 bp, Homo sapiens
tggaacctgggcctt

SEQ ID NO: 779616 - DNA, 15 bp, Homo sapiens
ggaacctgggcctta

SEQ ID NO: 779617 - DNA, 15 bp, Homo sapiens
gaacctgggccttat

SEQ ID NO: 779618 - DNA, 15 bp, Homo sapiens
aacctgggccttatc

SEQ ID NO: 779619 - DNA, 15 bp, Homo sapiens
acctgggccttatct

SEQ ID NO: 779620 - DNA, 15 bp, Homo sapiens
cctgggccttatctt

SEQ ID NO: 779621 - DNA, 15 bp, Homo sapiens
ctgggccttatcttc

SEQ ID NO: 779622 - DNA, 15 bp, Homo sapiens
tgggccttatcttca

SEQ ID NO: 779623 - DNA, 15 bp, Homo sapiens
gggccttatcttcag

SEQ ID NO: 779624 - DNA, 15 bp, Homo sapiens
ggccttatcttcagt

SEQ ID NO: 779625 - DNA, 15 bp, Homo sapiens
gccttatcttcagtg

SEQ ID NO: 779626 - DNA, 15 bp, Homo sapiens
ccttatcttcagtgg

SEQ ID NO: 779627 - DNA, 15 bp, Homo sapiens
cttatcttcagtgga

SEQ ID NO: 779628 - DNA, 15 bp, Homo sapiens
ttatcttcagtggaa

SEQ ID NO: 779629 - DNA, 15 bp, Homo sapiens
tatcttcagtggaat

SEQ ID NO: 779630 - DNA, 15 bp, Homo sapiens
atcttcagtggaatg

SEQ ID NO: 779631 - DNA, 15 bp, Homo sapiens
tcttcagtggaatgg

SEQ ID NO: 779632 - DNA, 15 bp, Homo sapiens
cttcagtggaatggg

SEQ ID NO: 779633 - DNA, 15 bp, Homo sapiens
ttcagtggaatggga

SEQ ID NO: 779634 - DNA, 15 bp, Homo sapiens
tcagtggaatgggaa

SEQ ID NO: 779635 - DNA, 15 bp, Homo sapiens
cagtggaatgggaac

SEQ ID NO: 779636 - DNA, 15 bp, Homo sapiens
agtggaatgggaacc

SEQ ID NO: 779637 - DNA, 15 bp, Homo sapiens
gtggaatgggaacca

SEQ ID NO: 779638 - DNA, 15 bp, Homo sapiens
tggaatgggaaccaa

SEQ ID NO: 779639 - DNA, 15 bp, Homo sapiens
ggaatgggaaccaat

SEQ ID NO: 779640 - DNA, 15 bp, Homo sapiens
gaatgggaaccaatg

SEQ ID NO: 779641 - DNA, 15 bp, Homo sapiens
aatgggaaccaatga

SEQ ID NO: 779642 - DNA, 15 bp, Homo sapiens
atgggaaccaatgat

SEQ ID NO: 779643 - DNA, 15 bp, Homo sapiens
tgggaaccaatgata

SEQ ID NO: 779644 - DNA, 15 bp, Homo sapiens
gggaaccaatgatac

SEQ ID NO: 779645 - DNA, 15 bp, Homo sapiens
ggaaccaatgatact

SEQ ID NO: 779646 - DNA, 15 bp, Homo sapiens
gaaccaatgatactt

SEQ ID NO: 779647 - DNA, 15 bp, Homo sapiens
aaccaatgatacttt

SEQ ID NO: 779648 - DNA, 15 bp, Homo sapiens
accaatgatactttt

SEQ ID NO: 779649 - DNA, 15 bp, Homo sapiens
ccaatgatacttttt

SEQ ID NO: 779650 - DNA, 15 bp, Homo sapiens
caatgatacttttta

SEQ ID NO: 779651 - DNA, 15 bp, Homo sapiens
aatgatactttttaa

SEQ ID NO: 779652 - DNA, 15 bp, Homo sapiens
atgatactttttaaa

SEQ ID NO: 779653 - DNA, 15 bp, Homo sapiens
tgatactttttaaac

SEQ ID NO: 779654 - DNA, 15 bp, Homo sapiens
gatactttttaaaca

SEQ ID NO: 779655 - DNA, 15 bp, Homo sapiens
atactttttaaacag

SEQ ID NO: 779656 - DNA, 15 bp, Homo sapiens
tactttttaaacaga

SEQ ID NO: 779657 - DNA, 15 bp, Homo sapiens
actttttaaacagag

SEQ ID NO: 779658 - DNA, 15 bp, Homo sapiens
ctttttaaacagagg

SEQ ID NO: 779659 - DNA, 15 bp, Homo sapiens
tttttaaacagagga

SEQ ID NO: 779660 - DNA, 15 bp, Homo sapiens
ttttaaacagaggag

SEQ ID NO: 779661 - DNA, 15 bp, Homo sapiens
tttaaacagaggagt

SEQ ID NO: 779662 - DNA, 15 bp, Homo sapiens
ttaaacagaggagtg

SEQ ID NO: 779663 - DNA, 15 bp, Homo sapiens
taaacagaggagtga

SEQ ID NO: 779664 - DNA, 15 bp, Homo sapiens
aaacagaggagtgat

SEQ ID NO: 779665 - DNA, 15 bp, Homo sapiens
aacagaggagtgatg

SEQ ID NO: 779666 - DNA, 15 bp, Homo sapiens
acagaggagtgatgt

SEQ ID NO: 779667 - DNA, 15 bp, Homo sapiens
cagaggagtgatgtg

SEQ ID NO: 779668 - DNA, 15 bp, Homo sapiens
agaggagtgatgtga

SEQ ID NO: 779669 - DNA, 15 bp, Homo sapiens
gaggagtgatgtgat

SEQ ID NO: 779670 - DNA, 15 bp, Homo sapiens
aggagtgatgtgatc

SEQ ID NO: 779671 - DNA, 15 bp, Homo sapiens
ggagtgatgtgatca

SEQ ID NO: 779672 - DNA, 15 bp, Homo sapiens
gagtgatgtgatcag

SEQ ID NO: 779673 - DNA, 15 bp, Homo sapiens
agtgatgtgatcaga

SEQ ID NO: 779674 - DNA, 15 bp, Homo sapiens
gtgatgtgatcagat

SEQ ID NO: 779675 - DNA, 15 bp, Homo sapiens
tgatgtgatcagatc

SEQ ID NO: 779676 - DNA, 15 bp, Homo sapiens
gatgtgatcagatct

SEQ ID NO: 779677 - DNA, 15 bp, Homo sapiens
atgtgatcagatcta

SEQ ID NO: 779678 - DNA, 15 bp, Homo sapiens
tgtgatcagatctag

SEQ ID NO: 779679 - DNA, 15 bp, Homo sapiens
gtgatcagatctagt

SEQ ID NO: 779680 - DNA, 15 bp, Homo sapiens
tgatcagatctagtt

SEQ ID NO: 779681 - DNA, 15 bp, Homo sapiens
gatcagatctagtta

SEQ ID NO: 779682 - DNA, 15 bp, Homo sapiens
atcagatctagttag

SEQ ID NO: 779683 - DNA, 15 bp, Homo sapiens
tcagatctagttaga

SEQ ID NO: 779684 - DNA, 15 bp, Homo sapiens
cagatctagttagac

SEQ ID NO: 779685 - DNA, 15 bp, Homo sapiens
agatctagttagaca

SEQ ID NO: 779686 - DNA, 15 bp, Homo sapiens
gatctagttagacac

SEQ ID NO: 779687 - DNA, 15 bp, Homo sapiens
atctagttagacaca

SEQ ID NO: 779688 - DNA, 15 bp, Homo sapiens
tctagttagacacaa

SEQ ID NO: 779689 - DNA, 15 bp, Homo sapiens
ctagttagacacaag

SEQ ID NO: 779690 - DNA, 15 bp, Homo sapiens
tagttagacacaagg

SEQ ID NO: 779691 - DNA, 15 bp, Homo sapiens
agttagacacaaggt

SEQ ID NO: 779692 - DNA, 15 bp, Homo sapiens
gttagacacaaggtt

SEQ ID NO: 779693 - DNA, 15 bp, Homo sapiens
ttagacacaaggttc

SEQ ID NO: 779694 - DNA, 15 bp, Homo sapiens
tagacacaaggttct

SEQ ID NO: 779695 - DNA, 15 bp, Homo sapiens
agacacaaggttctg

SEQ ID NO: 779696 - DNA, 15 bp, Homo sapiens
gacacaaggttctgc

SEQ ID NO: 779697 - DNA, 15 bp, Homo sapiens
acacaaggttctgca

SEQ ID NO: 779698 - DNA, 15 bp, Homo sapiens
cacaaggttctgcaa

SEQ ID NO: 779699 - DNA, 15 bp, Homo sapiens
acaaggttctgcaat

SEQ ID NO: 779700 - DNA, 15 bp, Homo sapiens
caaggttctgcaatt

SEQ ID NO: 779701 - DNA, 15 bp, Homo sapiens
aaggttctgcaatta

SEQ ID NO: 779702 - DNA, 15 bp, Homo sapiens
aggttctgcaattat

SEQ ID NO: 779703 - DNA, 15 bp, Homo sapiens
ggttctgcaattatc

SEQ ID NO: 779704 - DNA, 15 bp, Homo sapiens
gttctgcaattatca

SEQ ID NO: 779705 - DNA, 15 bp, Homo sapiens
ttctgcaattatcat

SEQ ID NO: 779706 - DNA, 15 bp, Homo sapiens
tctgcaattatcatg

SEQ ID NO: 779707 - DNA, 15 bp, Homo sapiens
ctgcaattatcatgg

SEQ ID NO: 779708 - DNA, 15 bp, Homo sapiens
tgcaattatcatgga

SEQ ID NO: 779709 - DNA, 15 bp, Homo sapiens
gcaattatcatggaa

SEQ ID NO: 779710 - DNA, 15 bp, Homo sapiens
caattatcatggaag

SEQ ID NO: 779711 - DNA, 15 bp, Homo sapiens
aattatcatggaaga

SEQ ID NO: 779712 - DNA, 15 bp, Homo sapiens
attatcatggaagaa

SEQ ID NO: 779713 - DNA, 15 bp, Homo sapiens
ttatcatggaagaaa

SEQ ID NO: 779714 - DNA, 15 bp, Homo sapiens
tatcatggaagaaat

SEQ ID NO: 779715 - DNA, 15 bp, Homo sapiens
atcatggaagaaatg

SEQ ID NO: 779716 - DNA, 15 bp, Homo sapiens
tcatggaagaaatga

SEQ ID NO: 779717 - DNA, 15 bp, Homo sapiens
catggaagaaatgaa

SEQ ID NO: 779718 - DNA, 15 bp, Homo sapiens
atggaagaaatgaat

SEQ ID NO: 779719 - DNA, 15 bp, Homo sapiens
tggaagaaatgaatt

SEQ ID NO: 779720 - DNA, 15 bp, Homo sapiens
ggaagaaatgaattc

SEQ ID NO: 779721 - DNA, 15 bp, Homo sapiens
gaagaaatgaattca

SEQ ID NO: 779722 - DNA, 15 bp, Homo sapiens
aagaaatgaattcat

SEQ ID NO: 779723 - DNA, 15 bp, Homo sapiens
agaaatgaattcatt

SEQ ID NO: 779724 - DNA, 15 bp, Homo sapiens
gaaatgaattcattc

SEQ ID NO: 779725 - DNA, 15 bp, Homo sapiens
aaatgaattcattca

SEQ ID NO: 779726 - DNA, 15 bp, Homo sapiens
aatgaattcattcac

SEQ ID NO: 779727 - DNA, 15 bp, Homo sapiens
atgaattcattcact

SEQ ID NO: 779728 - DNA, 15 bp, Homo sapiens
tgaattcattcactg

SEQ ID NO: 779729 - DNA, 15 bp, Homo sapiens
gaattcattcactga

SEQ ID NO: 779730 - DNA, 15 bp, Homo sapiens
aattcattcactgag

SEQ ID NO: 779731 - DNA, 15 bp, Homo sapiens
attcattcactgagg

SEQ ID NO: 779732 - DNA, 15 bp, Homo sapiens
ttcattcactgagga

SEQ ID NO: 779733 - DNA, 15 bp, Homo sapiens
tcattcactgaggat

SEQ ID NO: 779734 - DNA, 15 bp, Homo sapiens
cattcactgaggata

SEQ ID NO: 779735 - DNA, 15 bp, Homo sapiens
attcactgaggataa

SEQ ID NO: 779736 - DNA, 15 bp, Homo sapiens
ttcactgaggataac

SEQ ID NO: 779737 - DNA, 15 bp, Homo sapiens
tcactgaggataacc

SEQ ID NO: 779738 - DNA, 15 bp, Homo sapiens
cactgaggataacct

SEQ ID NO: 779739 - DNA, 15 bp, Homo sapiens
actgaggataacctg

SEQ ID NO: 779740 - DNA, 15 bp, Homo sapiens
ctgaggataacctgt

SEQ ID NO: 779741 - DNA, 15 bp, Homo sapiens
tgaggataacctgtg

SEQ ID NO: 779742 - DNA, 15 bp, Homo sapiens
gaggataacctgtgg

SEQ ID NO: 779743 - DNA, 15 bp, Homo sapiens
aggataacctgtgga

SEQ ID NO: 779744 - DNA, 15 bp, Homo sapiens
ggataacctgtggaa

SEQ ID NO: 779745 - DNA, 15 bp, Homo sapiens
gataacctgtggaaa

SEQ ID NO: 779746 - DNA, 15 bp, Homo sapiens
ataacctgtggaaat

SEQ ID NO: 779747 - DNA, 15 bp, Homo sapiens
taacctgtggaaatt

SEQ ID NO: 779748 - DNA, 15 bp, Homo sapiens
aacctgtggaaattc

SEQ ID NO: 779749 - DNA, 15 bp, Homo sapiens
acctgtggaaattct

SEQ ID NO: 779750 - DNA, 15 bp, Homo sapiens
cctgtggaaattctc

SEQ ID NO: 779751 - DNA, 15 bp, Homo sapiens
ctgtggaaattctca

SEQ ID NO: 779752 - DNA, 15 bp, Homo sapiens
tgtggaaattctcac

SEQ ID NO: 779753 - DNA, 15 bp, Homo sapiens
gtggaaattctcact

SEQ ID NO: 779754 - DNA, 15 bp, Homo sapiens
tggaaattctcactt

SEQ ID NO: 779755 - DNA, 15 bp, Homo sapiens
ggaaattctcacttt

SEQ ID NO: 779756 - DNA, 15 bp, Homo sapiens
gaaattctcactttt

SEQ ID NO: 779757 - DNA, 15 bp, Homo sapiens
aaattctcacttttg

SEQ ID NO: 779758 - DNA, 15 bp, Homo sapiens
aattctcacttttgt

SEQ ID NO: 779759 - DNA, 15 bp, Homo sapiens
attctcacttttgtt

SEQ ID NO: 779760 - DNA, 15 bp, Homo sapiens
ttctcacttttgttt

SEQ ID NO: 779761 - DNA, 15 bp, Homo sapiens
tctcacttttgtttg

SEQ ID NO: 779762 - DNA, 15 bp, Homo sapiens
ctcacttttgtttgt

SEQ ID NO: 779763 - DNA, 15 bp, Homo sapiens
tcacttttgtttgta

SEQ ID NO: 779764 - DNA, 15 bp, Homo sapiens
cacttttgtttgtat

SEQ ID NO: 779765 - DNA, 15 bp, Homo sapiens
acttttgtttgtatt

SEQ ID NO: 779766 - DNA, 15 bp, Homo sapiens
cttttgtttgtattt

SEQ ID NO: 779767 - DNA, 15 bp, Homo sapiens
ttttgtttgtatttt

SEQ ID NO: 779768 - DNA, 15 bp, Homo sapiens
tttgtttgtattttt

SEQ ID NO: 779769 - DNA, 15 bp, Homo sapiens
ttgtttgtatttttt

SEQ ID NO: 779770 - DNA, 15 bp, Homo sapiens
tgtttgtatttttta

SEQ ID NO: 779771 - DNA, 15 bp, Homo sapiens
gtttgtattttttac

SEQ ID NO: 779772 - DNA, 15 bp, Homo sapiens
tttgtattttttact

SEQ ID NO: 779773 - DNA, 15 bp, Homo sapiens
ttgtattttttactt

SEQ ID NO: 779774 - DNA, 15 bp, Homo sapiens
tgtattttttacttg

SEQ ID NO: 779775 - DNA, 15 bp, Homo sapiens
gtattttttacttgg

SEQ ID NO: 779776 - DNA, 15 bp, Homo sapiens
tattttttacttggc

SEQ ID NO: 779777 - DNA, 15 bp, Homo sapiens
attttttacttggct

SEQ ID NO: 779778 - DNA, 15 bp, Homo sapiens
ttttttacttggcta

SEQ ID NO: 779779 - DNA, 15 bp, Homo sapiens
tttttacttggctaa

SEQ ID NO: 779780 - DNA, 15 bp, Homo sapiens
ttttacttggctaag

SEQ ID NO: 779781 - DNA, 15 bp, Homo sapiens
tttacttggctaaga

SEQ ID NO: 779782 - DNA, 15 bp, Homo sapiens
ttacttggctaagac

SEQ ID NO: 779783 - DNA, 15 bp, Homo sapiens
tacttggctaagact

SEQ ID NO: 779784 - DNA, 15 bp, Homo sapiens
acttggctaagactg

SEQ ID NO: 779785 - DNA, 15 bp, Homo sapiens
cttggctaagactga

SEQ ID NO: 779786 - DNA, 15 bp, Homo sapiens
ttggctaagactgag

SEQ ID NO: 779787 - DNA, 15 bp, Homo sapiens
tggctaagactgagc

SEQ ID NO: 779788 - DNA, 15 bp, Homo sapiens
ggctaagactgagct

SEQ ID NO: 779789 - DNA, 15 bp, Homo sapiens
gctaagactgagctt

SEQ ID NO: 779790 - DNA, 15 bp, Homo sapiens
ctaagactgagcttt

SEQ ID NO: 779791 - DNA, 15 bp, Homo sapiens
taagactgagctttt

SEQ ID NO: 779792 - DNA, 15 bp, Homo sapiens
aagactgagcttttg

SEQ ID NO: 779793 - DNA, 15 bp, Homo sapiens
agactgagcttttgg

SEQ ID NO: 779794 - DNA, 15 bp, Homo sapiens
gactgagcttttgga

SEQ ID NO: 779795 - DNA, 15 bp, Homo sapiens
actgagcttttggat

SEQ ID NO: 779796 - DNA, 15 bp, Homo sapiens
ctgagcttttggata

SEQ ID NO: 779797 - DNA, 15 bp, Homo sapiens
tgagcttttggatat

SEQ ID NO: 779798 - DNA, 15 bp, Homo sapiens
gagcttttggatatt

SEQ ID NO: 779799 - DNA, 15 bp, Homo sapiens
agcttttggatatta

SEQ ID NO: 779800 - DNA, 15 bp, Homo sapiens
gcttttggatattat

SEQ ID NO: 779801 - DNA, 15 bp, Homo sapiens
cttttggatattatt

SEQ ID NO: 779802 - DNA, 15 bp, Homo sapiens
ttttggatattatta

SEQ ID NO: 779803 - DNA, 15 bp, Homo sapiens
tttggatattattac

SEQ ID NO: 779804 - DNA, 15 bp, Homo sapiens
ttggatattattact

SEQ ID NO: 779805 - DNA, 15 bp, Homo sapiens
tggatattattacta

SEQ ID NO: 779806 - DNA, 15 bp, Homo sapiens
ggatattattactag

SEQ ID NO: 779807 - DNA, 15 bp, Homo sapiens
gatattattactagt

SEQ ID NO: 779808 - DNA, 15 bp, Homo sapiens
atattattactagtt

SEQ ID NO: 779809 - DNA, 15 bp, Homo sapiens
tattattactagttc

SEQ ID NO: 779810 - DNA, 15 bp, Homo sapiens
attattactagttca

SEQ ID NO: 779811 - DNA, 15 bp, Homo sapiens
ttattactagttcaa

SEQ ID NO: 779812 - DNA, 15 bp, Homo sapiens
tattactagttcaat

SEQ ID NO: 779813 - DNA, 15 bp, Homo sapiens
attactagttcaatg

SEQ ID NO: 779814 - DNA, 15 bp, Homo sapiens
ttactagttcaatga

SEQ ID NO: 779815 - DNA, 15 bp, Homo sapiens
tactagttcaatgat

SEQ ID NO: 779816 - DNA, 15 bp, Homo sapiens
actagttcaatgata

SEQ ID NO: 779817 - DNA, 15 bp, Homo sapiens
ctagttcaatgataa

SEQ ID NO: 779818 - DNA, 15 bp, Homo sapiens
tagttcaatgataat

SEQ ID NO: 779819 - DNA, 15 bp, Homo sapiens
agttcaatgataata

SEQ ID NO: 779820 - DNA, 15 bp, Homo sapiens
gttcaatgataatat

SEQ ID NO: 779821 - DNA, 15 bp, Homo sapiens
ttcaatgataatatt

SEQ ID NO: 779822 - DNA, 15 bp, Homo sapiens
tcaatgataatatta

SEQ ID NO: 779823 - DNA, 15 bp, Homo sapiens
caatgataatattat

SEQ ID NO: 779824 - DNA, 15 bp, Homo sapiens
aatgataatattatc

SEQ ID NO: 779825 - DNA, 15 bp, Homo sapiens
atgataatattatct

SEQ ID NO: 779826 - DNA, 15 bp, Homo sapiens
tgataatattatcta

SEQ ID NO: 779827 - DNA, 15 bp, Homo sapiens
gataatattatctac

SEQ ID NO: 779828 - DNA, 15 bp, Homo sapiens
ataatattatctacc

SEQ ID NO: 779829 - DNA, 15 bp, Homo sapiens
taatattatctacca

SEQ ID NO: 779830 - DNA, 15 bp, Homo sapiens
aatattatctaccag

SEQ ID NO: 779831 - DNA, 15 bp, Homo sapiens
atattatctaccagt

SEQ ID NO: 779832 - DNA, 15 bp, Homo sapiens
tattatctaccagta

SEQ ID NO: 779833 - DNA, 15 bp, Homo sapiens
attatctaccagtat

SEQ ID NO: 779834 - DNA, 15 bp, Homo sapiens
ttatctaccagtatt

SEQ ID NO: 779835 - DNA, 15 bp, Homo sapiens
tatctaccagtattc

SEQ ID NO: 779836 - DNA, 15 bp, Homo sapiens
atctaccagtattca

SEQ ID NO: 779837 - DNA, 15 bp, Homo sapiens
tctaccagtattcat

SEQ ID NO: 779838 - DNA, 15 bp, Homo sapiens
ctaccagtattcatt

SEQ ID NO: 779839 - DNA, 15 bp, Homo sapiens
taccagtattcattt

SEQ ID NO: 779840 - DNA, 15 bp, Homo sapiens
accagtattcattta

SEQ ID NO: 779841 - DNA, 15 bp, Homo sapiens
ccagtattcatttaa

SEQ ID NO: 779842 - DNA, 15 bp, Homo sapiens
cagtattcatttaat

SEQ ID NO: 779843 - DNA, 15 bp, Homo sapiens
agtattcatttaata

SEQ ID NO: 779844 - DNA, 15 bp, Homo sapiens
gtattcatttaatat

SEQ ID NO: 779845 - DNA, 15 bp, Homo sapiens
tattcatttaatatt

SEQ ID NO: 779846 - DNA, 15 bp, Homo sapiens
attcatttaatatta

SEQ ID NO: 779847 - DNA, 15 bp, Homo sapiens
ttcatttaatattaa

SEQ ID NO: 779848 - DNA, 15 bp, Homo sapiens
tcatttaatattaac

SEQ ID NO: 779849 - DNA, 15 bp, Homo sapiens
catttaatattaaca

SEQ ID NO: 779850 - DNA, 15 bp, Homo sapiens
atttaatattaacat

SEQ ID NO: 779851 - DNA, 15 bp, Homo sapiens
tttaatattaacatc

SEQ ID NO: 779852 - DNA, 15 bp, Homo sapiens
ttaatattaacatct

SEQ ID NO: 779853 - DNA, 15 bp, Homo sapiens
taatattaacatcta

SEQ ID NO: 779854 - DNA, 15 bp, Homo sapiens
aatattaacatctac

SEQ ID NO: 779855 - DNA, 15 bp, Homo sapiens
atattaacatctact

SEQ ID NO: 779856 - DNA, 15 bp, Homo sapiens
tattaacatctacta

SEQ ID NO: 779857 - DNA, 15 bp, Homo sapiens
attaacatctactag

SEQ ID NO: 779858 - DNA, 15 bp, Homo sapiens
ttaacatctactagt

SEQ ID NO: 779859 - DNA, 15 bp, Homo sapiens
taacatctactagta

SEQ ID NO: 779860 - DNA, 15 bp, Homo sapiens
aacatctactagtat

SEQ ID NO: 779861 - DNA, 15 bp, Homo sapiens
acatctactagtatt

SEQ ID NO: 779862 - DNA, 15 bp, Homo sapiens
catctactagtattt

SEQ ID NO: 779863 - DNA, 15 bp, Homo sapiens
atctactagtattta

SEQ ID NO: 779864 - DNA, 15 bp, Homo sapiens
tctactagtatttac

SEQ ID NO: 779865 - DNA, 15 bp, Homo sapiens
ctactagtatttact

SEQ ID NO: 779866 - DNA, 15 bp, Homo sapiens
tactagtatttactg

SEQ ID NO: 779867 - DNA, 15 bp, Homo sapiens
actagtatttactga

SEQ ID NO: 779868 - DNA, 15 bp, Homo sapiens
ctagtatttactgag

SEQ ID NO: 779869 - DNA, 15 bp, Homo sapiens
tagtatttactgagt

SEQ ID NO: 779870 - DNA, 15 bp, Homo sapiens
agtatttactgagtg

SEQ ID NO: 779871 - DNA, 15 bp, Homo sapiens
gtatttactgagtgc

SEQ ID NO: 779872 - DNA, 15 bp, Homo sapiens
tatttactgagtgcc

SEQ ID NO: 779873 - DNA, 15 bp, Homo sapiens
atttactgagtgcct

SEQ ID NO: 779874 - DNA, 15 bp, Homo sapiens
tttactgagtgccta

SEQ ID NO: 779875 - DNA, 15 bp, Homo sapiens
ttactgagtgcctac

SEQ ID NO: 779876 - DNA, 15 bp, Homo sapiens
tactgagtgcctact

SEQ ID NO: 779877 - DNA, 15 bp, Homo sapiens
actgagtgcctacta

SEQ ID NO: 779878 - DNA, 15 bp, Homo sapiens
ctgagtgcctactat

SEQ ID NO: 779879 - DNA, 15 bp, Homo sapiens
tgagtgcctactatg

SEQ ID NO: 779880 - DNA, 15 bp, Homo sapiens
gagtgcctactatgc

SEQ ID NO: 779881 - DNA, 15 bp, Homo sapiens
agtgcctactatgca

SEQ ID NO: 779882 - DNA, 15 bp, Homo sapiens
gtgcctactatgcat

SEQ ID NO: 779883 - DNA, 15 bp, Homo sapiens
tgcctactatgcatt

SEQ ID NO: 779884 - DNA, 15 bp, Homo sapiens
gcctactatgcattc

SEQ ID NO: 779885 - DNA, 15 bp, Homo sapiens
cctactatgcattct

SEQ ID NO: 779886 - DNA, 15 bp, Homo sapiens
ctactatgcattcta

SEQ ID NO: 779887 - DNA, 15 bp, Homo sapiens
tactatgcattctat

SEQ ID NO: 779888 - DNA, 15 bp, Homo sapiens
actatgcattctata

SEQ ID NO: 779889 - DNA, 15 bp, Homo sapiens
ctatgcattctatat

SEQ ID NO: 779890 - DNA, 15 bp, Homo sapiens
tatgcattctatatt

SEQ ID NO: 779891 - DNA, 15 bp, Homo sapiens
atgcattctatattt

SEQ ID NO: 779892 - DNA, 15 bp, Homo sapiens
tgcattctatatttc

SEQ ID NO: 779893 - DNA, 15 bp, Homo sapiens
gcattctatatttcc

SEQ ID NO: 779894 - DNA, 15 bp, Homo sapiens
cattctatatttcca

SEQ ID NO: 779895 - DNA, 15 bp, Homo sapiens
attctatatttccat

SEQ ID NO: 779896 - DNA, 15 bp, Homo sapiens
ttctatatttccatt

SEQ ID NO: 779897 - DNA, 15 bp, Homo sapiens
tctatatttccattc

SEQ ID NO: 779898 - DNA, 15 bp, Homo sapiens
ctatatttccattca

SEQ ID NO: 779899 - DNA, 15 bp, Homo sapiens
tatatttccattcat

SEQ ID NO: 779900 - DNA, 15 bp, Homo sapiens
atatttccattcatt

SEQ ID NO: 779901 - DNA, 15 bp, Homo sapiens
tatttccattcattt

SEQ ID NO: 779902 - DNA, 15 bp, Homo sapiens
atttccattcatttc

SEQ ID NO: 779903 - DNA, 15 bp, Homo sapiens
tttccattcatttct

SEQ ID NO: 779904 - DNA, 15 bp, Homo sapiens
ttccattcatttctt

SEQ ID NO: 779905 - DNA, 15 bp, Homo sapiens
tccattcatttcttg

SEQ ID NO: 779906 - DNA, 15 bp, Homo sapiens
ccattcatttcttgt

SEQ ID NO: 779907 - DNA, 15 bp, Homo sapiens
cattcatttcttgta

SEQ ID NO: 779908 - DNA, 15 bp, Homo sapiens
attcatttcttgtat

SEQ ID NO: 779909 - DNA, 15 bp, Homo sapiens
ttcatttcttgtata

SEQ ID NO: 779910 - DNA, 15 bp, Homo sapiens
tcatttcttgtataa

SEQ ID NO: 779911 - DNA, 15 bp, Homo sapiens
catttcttgtataat

SEQ ID NO: 779912 - DNA, 15 bp, Homo sapiens
atttcttgtataata

SEQ ID NO: 779913 - DNA, 15 bp, Homo sapiens
tttcttgtataatag

SEQ ID NO: 779914 - DNA, 15 bp, Homo sapiens
ttcttgtataataga

SEQ ID NO: 779915 - DNA, 15 bp, Homo sapiens
tcttgtataatagat

SEQ ID NO: 779916 - DNA, 15 bp, Homo sapiens
cttgtataatagata

SEQ ID NO: 779917 - DNA, 15 bp, Homo sapiens
ttgtataatagataa

SEQ ID NO: 779918 - DNA, 15 bp, Homo sapiens
tgtataatagataac

SEQ ID NO: 779919 - DNA, 15 bp, Homo sapiens
gtataatagataaca

SEQ ID NO: 779920 - DNA, 15 bp, Homo sapiens
tataatagataacag

SEQ ID NO: 779921 - DNA, 15 bp, Homo sapiens
ataatagataacagc

SEQ ID NO: 779922 - DNA, 15 bp, Homo sapiens
taatagataacagca

SEQ ID NO: 779923 - DNA, 15 bp, Homo sapiens
aatagataacagcat

SEQ ID NO: 779924 - DNA, 15 bp, Homo sapiens
atagataacagcatt

SEQ ID NO: 779925 - DNA, 15 bp, Homo sapiens
tagataacagcattt

SEQ ID NO: 779926 - DNA, 15 bp, Homo sapiens
agataacagcattta

SEQ ID NO: 779927 - DNA, 15 bp, Homo sapiens
gataacagcatttat

SEQ ID NO: 779928 - DNA, 15 bp, Homo sapiens
ataacagcatttatt

SEQ ID NO: 779929 - DNA, 15 bp, Homo sapiens
taacagcatttattt

SEQ ID NO: 779930 - DNA, 15 bp, Homo sapiens
aacagcatttatttt

SEQ ID NO: 779931 - DNA, 15 bp, Homo sapiens
acagcatttattttc

SEQ ID NO: 779932 - DNA, 15 bp, Homo sapiens
cagcatttattttct

SEQ ID NO: 779933 - DNA, 15 bp, Homo sapiens
agcatttattttctg

SEQ ID NO: 779934 - DNA, 15 bp, Homo sapiens
gcatttattttctgg

SEQ ID NO: 779935 - DNA, 15 bp, Homo sapiens
catttattttctggt

SEQ ID NO: 779936 - DNA, 15 bp, Homo sapiens
atttattttctggta

SEQ ID NO: 779937 - DNA, 15 bp, Homo sapiens
tttattttctggtat

SEQ ID NO: 779938 - DNA, 15 bp, Homo sapiens
ttattttctggtatc

SEQ ID NO: 779939 - DNA, 15 bp, Homo sapiens
tattttctggtatca

SEQ ID NO: 779940 - DNA, 15 bp, Homo sapiens
attttctggtatcat

SEQ ID NO: 779941 - DNA, 15 bp, Homo sapiens
ttttctggtatcata

SEQ ID NO: 779942 - DNA, 15 bp, Homo sapiens
tttctggtatcataa

SEQ ID NO: 779943 - DNA, 15 bp, Homo sapiens
ttctggtatcataac

SEQ ID NO: 779944 - DNA, 15 bp, Homo sapiens
tctggtatcataaca

SEQ ID NO: 779945 - DNA, 15 bp, Homo sapiens
ctggtatcataacag

SEQ ID NO: 779946 - DNA, 15 bp, Homo sapiens
tggtatcataacagt

SEQ ID NO: 779947 - DNA, 15 bp, Homo sapiens
ggtatcataacagtg

SEQ ID NO: 779948 - DNA, 15 bp, Homo sapiens
gtatcataacagtgt

SEQ ID NO: 779949 - DNA, 15 bp, Homo sapiens
tatcataacagtgtt

SEQ ID NO: 779950 - DNA, 15 bp, Homo sapiens
atcataacagtgttc

SEQ ID NO: 779951 - DNA, 15 bp, Homo sapiens
tcataacagtgttca

SEQ ID NO: 779952 - DNA, 15 bp, Homo sapiens
cataacagtgttcaa

SEQ ID NO: 779953 - DNA, 15 bp, Homo sapiens
ataacagtgttcaaa

SEQ ID NO: 779954 - DNA, 15 bp, Homo sapiens
taacagtgttcaaat

SEQ ID NO: 779955 - DNA, 15 bp, Homo sapiens
aacagtgttcaaata

SEQ ID NO: 779956 - DNA, 15 bp, Homo sapiens
acagtgttcaaatag

SEQ ID NO: 779957 - DNA, 15 bp, Homo sapiens
cagtgttcaaatagt

SEQ ID NO: 779958 - DNA, 15 bp, Homo sapiens
agtgttcaaatagtt

SEQ ID NO: 779959 - DNA, 15 bp, Homo sapiens
gtgttcaaatagtta

SEQ ID NO: 779960 - DNA, 15 bp, Homo sapiens
tgttcaaatagttat

SEQ ID NO: 779961 - DNA, 15 bp, Homo sapiens
gttcaaatagttatc

SEQ ID NO: 779962 - DNA, 15 bp, Homo sapiens
ttcaaatagttatcc

SEQ ID NO: 779963 - DNA, 15 bp, Homo sapiens
tcaaatagttatcct

SEQ ID NO: 779964 - DNA, 15 bp, Homo sapiens
caaatagttatcctt

SEQ ID NO: 779965 - DNA, 15 bp, Homo sapiens
aaatagttatcctta

SEQ ID NO: 779966 - DNA, 15 bp, Homo sapiens
aatagttatccttag

SEQ ID NO: 779967 - DNA, 15 bp, Homo sapiens
atagttatccttaga

SEQ ID NO: 779968 - DNA, 15 bp, Homo sapiens
tagttatccttagaa

SEQ ID NO: 779969 - DNA, 15 bp, Homo sapiens
agttatccttagaaa

SEQ ID NO: 779970 - DNA, 15 bp, Homo sapiens
gttatccttagaaaa

SEQ ID NO: 779971 - DNA, 15 bp, Homo sapiens
ttatccttagaaaaa

SEQ ID NO: 779972 - DNA, 15 bp, Homo sapiens
tatccttagaaaaat

SEQ ID NO: 779973 - DNA, 15 bp, Homo sapiens
atccttagaaaaatg

SEQ ID NO: 779974 - DNA, 15 bp, Homo sapiens
tccttagaaaaatgg

SEQ ID NO: 779975 - DNA, 15 bp, Homo sapiens
ccttagaaaaatgga

SEQ ID NO: 779976 - DNA, 15 bp, Homo sapiens
cttagaaaaatggaa

SEQ ID NO: 779977 - DNA, 15 bp, Homo sapiens
ttagaaaaatggaaa

SEQ ID NO: 779978 - DNA, 15 bp, Homo sapiens
tagaaaaatggaaat

SEQ ID NO: 779979 - DNA, 15 bp, Homo sapiens
agaaaaatggaaatt

SEQ ID NO: 779980 - DNA, 15 bp, Homo sapiens
gaaaaatggaaatta

SEQ ID NO: 779981 - DNA, 15 bp, Homo sapiens
aaaaatggaaattaa

SEQ ID NO: 779982 - DNA, 15 bp, Homo sapiens
aaaatggaaattaac

SEQ ID NO: 779983 - DNA, 15 bp, Homo sapiens
aaatggaaattaact

SEQ ID NO: 779984 - DNA, 15 bp, Homo sapiens
aatggaaattaactt

SEQ ID NO: 779985 - DNA, 15 bp, Homo sapiens
atggaaattaacttg

SEQ ID NO: 779986 - DNA, 15 bp, Homo sapiens
tggaaattaacttgt

SEQ ID NO: 779987 - DNA, 15 bp, Homo sapiens
ggaaattaacttgtc

SEQ ID NO: 779988 - DNA, 15 bp, Homo sapiens
gaaattaacttgtct

SEQ ID NO: 779989 - DNA, 15 bp, Homo sapiens
aaattaacttgtctt

SEQ ID NO: 779990 - DNA, 15 bp, Homo sapiens
aattaacttgtctta

SEQ ID NO: 779991 - DNA, 15 bp, Homo sapiens
attaacttgtcttaa

SEQ ID NO: 779992 - DNA, 15 bp, Homo sapiens
ttaacttgtcttaag

SEQ ID NO: 779993 - DNA, 15 bp, Homo sapiens
taacttgtcttaagt

SEQ ID NO: 779994 - DNA, 15 bp, Homo sapiens
aacttgtcttaagta

SEQ ID NO: 779995 - DNA, 15 bp, Homo sapiens
acttgtcttaagtat

SEQ ID NO: 779996 - DNA, 15 bp, Homo sapiens
cttgtcttaagtata

SEQ ID NO: 779997 - DNA, 15 bp, Homo sapiens
ttgtcttaagtatat

SEQ ID NO: 779998 - DNA, 15 bp, Homo sapiens
tgtcttaagtatatt

SEQ ID NO: 779999 - DNA, 15 bp, Homo sapiens
gtcttaagtatattt

SEQ ID NO: 780000 - DNA, 15 bp, Homo sapiens
tcttaagtatattta

SEQ ID NO: 780001 - DNA, 15 bp, Homo sapiens
cttaagtatatttag

SEQ ID NO: 780002 - DNA, 15 bp, Homo sapiens
ttaagtatatttagg

SEQ ID NO: 780003 - DNA, 15 bp, Homo sapiens
taagtatatttaggt

SEQ ID NO: 780004 - DNA, 15 bp, Homo sapiens
aagtatatttaggtc

SEQ ID NO: 780005 - DNA, 15 bp, Homo sapiens
agtatatttaggtct

SEQ ID NO: 780006 - DNA, 15 bp, Homo sapiens
gtatatttaggtctc

SEQ ID NO: 780007 - DNA, 15 bp, Homo sapiens
tatatttaggtctcc

SEQ ID NO: 780008 - DNA, 15 bp, Homo sapiens
atatttaggtctcca

SEQ ID NO: 780009 - DNA, 15 bp, Homo sapiens
tatttaggtctccat

SEQ ID NO: 780010 - DNA, 15 bp, Homo sapiens
atttaggtctccatc

SEQ ID NO: 780011 - DNA, 15 bp, Homo sapiens
tttaggtctccatct

SEQ ID NO: 780012 - DNA, 15 bp, Homo sapiens
ttaggtctccatctg

SEQ ID NO: 780013 - DNA, 15 bp, Homo sapiens
taggtctccatctgc

SEQ ID NO: 780014 - DNA, 15 bp, Homo sapiens
aggtctccatctgcc

SEQ ID NO: 780015 - DNA, 15 bp, Homo sapiens
ggtctccatctgccc

SEQ ID NO: 780016 - DNA, 15 bp, Homo sapiens
gtctccatctgccca

SEQ ID NO: 780017 - DNA, 15 bp, Homo sapiens
tctccatctgcccac

SEQ ID NO: 780018 - DNA, 15 bp, Homo sapiens
ctccatctgcccact

SEQ ID NO: 780019 - DNA, 15 bp, Homo sapiens
tccatctgcccactt

SEQ ID NO: 780020 - DNA, 15 bp, Homo sapiens
ccatctgcccacttc

SEQ ID NO: 780021 - DNA, 15 bp, Homo sapiens
catctgcccacttct

SEQ ID NO: 780022 - DNA, 15 bp, Homo sapiens
atctgcccacttctt

SEQ ID NO: 780023 - DNA, 15 bp, Homo sapiens
tctgcccacttcttg

SEQ ID NO: 780024 - DNA, 15 bp, Homo sapiens
ctgcccacttcttga

SEQ ID NO: 780025 - DNA, 15 bp, Homo sapiens
tgcccacttcttgac

SEQ ID NO: 780026 - DNA, 15 bp, Homo sapiens
gcccacttcttgaca

SEQ ID NO: 780027 - DNA, 15 bp, Homo sapiens
cccacttcttgacat

SEQ ID NO: 780028 - DNA, 15 bp, Homo sapiens
ccacttcttgacatt

SEQ ID NO: 780029 - DNA, 15 bp, Homo sapiens
cacttcttgacattt

SEQ ID NO: 780030 - DNA, 15 bp, Homo sapiens
acttcttgacatttg

SEQ ID NO: 780031 - DNA, 15 bp, Homo sapiens
cttcttgacatttgg

SEQ ID NO: 780032 - DNA, 15 bp, Homo sapiens
ttcttgacatttggg

SEQ ID NO: 780033 - DNA, 15 bp, Homo sapiens
tcttgacatttgggc

SEQ ID NO: 780034 - DNA, 15 bp, Homo sapiens
cttgacatttgggct

SEQ ID NO: 780035 - DNA, 15 bp, Homo sapiens
ttgacatttgggctt

SEQ ID NO: 780036 - DNA, 15 bp, Homo sapiens
tgacatttgggcttc

SEQ ID NO: 780037 - DNA, 15 bp, Homo sapiens
gacatttgggcttct

SEQ ID NO: 780038 - DNA, 15 bp, Homo sapiens
acatttgggcttctg

SEQ ID NO: 780039 - DNA, 15 bp, Homo sapiens
catttgggcttctga

SEQ ID NO: 780040 - DNA, 15 bp, Homo sapiens
atttgggcttctgat

SEQ ID NO: 780041 - DNA, 15 bp, Homo sapiens
tttgggcttctgata

SEQ ID NO: 780042 - DNA, 15 bp, Homo sapiens
ttgggcttctgatat

SEQ ID NO: 780043 - DNA, 15 bp, Homo sapiens
tgggcttctgatatt

SEQ ID NO: 780044 - DNA, 15 bp, Homo sapiens
gggcttctgatattt

SEQ ID NO: 780045 - DNA, 15 bp, Homo sapiens
ggcttctgatatttg

SEQ ID NO: 780046 - DNA, 15 bp, Homo sapiens
gcttctgatatttgg

SEQ ID NO: 780047 - DNA, 15 bp, Homo sapiens
cttctgatatttggc

SEQ ID NO: 780048 - DNA, 15 bp, Homo sapiens
ttctgatatttggct

SEQ ID NO: 780049 - DNA, 15 bp, Homo sapiens
tctgatatttggctg

SEQ ID NO: 780050 - DNA, 15 bp, Homo sapiens
ctgatatttggctga

SEQ ID NO: 780051 - DNA, 15 bp, Homo sapiens
tgatatttggctgac

SEQ ID NO: 780052 - DNA, 15 bp, Homo sapiens
gatatttggctgact

SEQ ID NO: 780053 - DNA, 15 bp, Homo sapiens
atatttggctgactc

SEQ ID NO: 780054 - DNA, 15 bp, Homo sapiens
tatttggctgactca

SEQ ID NO: 780055 - DNA, 15 bp, Homo sapiens
atttggctgactcag

SEQ ID NO: 780056 - DNA, 15 bp, Homo sapiens
tttggctgactcagc

SEQ ID NO: 780057 - DNA, 15 bp, Homo sapiens
ttggctgactcagct

SEQ ID NO: 780058 - DNA, 15 bp, Homo sapiens
tggctgactcagcta

SEQ ID NO: 780059 - DNA, 15 bp, Homo sapiens
ggctgactcagctaa

SEQ ID NO: 780060 - DNA, 15 bp, Homo sapiens
gctgactcagctaaa

SEQ ID NO: 780061 - DNA, 15 bp, Homo sapiens
ctgactcagctaaac

SEQ ID NO: 780062 - DNA, 15 bp, Homo sapiens
tgactcagctaaaca

SEQ ID NO: 780063 - DNA, 15 bp, Homo sapiens
gactcagctaaacaa

SEQ ID NO: 780064 - DNA, 15 bp, Homo sapiens
actcagctaaacaaa

SEQ ID NO: 780065 - DNA, 15 bp, Homo sapiens
ctcagctaaacaaac

SEQ ID NO: 780066 - DNA, 15 bp, Homo sapiens
tcagctaaacaaaca

SEQ ID NO: 780067 - DNA, 15 bp, Homo sapiens
cagctaaacaaacat

SEQ ID NO: 780068 - DNA, 15 bp, Homo sapiens
agctaaacaaacatg

SEQ ID NO: 780069 - DNA, 15 bp, Homo sapiens
gctaaacaaacatgt

SEQ ID NO: 780070 - DNA, 15 bp, Homo sapiens
ctaaacaaacatgta

SEQ ID NO: 780071 - DNA, 15 bp, Homo sapiens
taaacaaacatgtat

SEQ ID NO: 780072 - DNA, 15 bp, Homo sapiens
aaacaaacatgtatg

SEQ ID NO: 780073 - DNA, 15 bp, Homo sapiens
aacaaacatgtatgc

SEQ ID NO: 780074 - DNA, 15 bp, Homo sapiens
acaaacatgtatgct

SEQ ID NO: 780075 - DNA, 15 bp, Homo sapiens
caaacatgtatgcta

SEQ ID NO: 780076 - DNA, 15 bp, Homo sapiens
aaacatgtatgctag

SEQ ID NO: 780077 - DNA, 15 bp, Homo sapiens
aacatgtatgctagt

SEQ ID NO: 780078 - DNA, 15 bp, Homo sapiens
acatgtatgctagtt

SEQ ID NO: 780079 - DNA, 15 bp, Homo sapiens
catgtatgctagttt

SEQ ID NO: 780080 - DNA, 15 bp, Homo sapiens
atgtatgctagtttg

SEQ ID NO: 780081 - DNA, 15 bp, Homo sapiens
tgtatgctagtttgg

SEQ ID NO: 780082 - DNA, 15 bp, Homo sapiens
gtatgctagtttgga

SEQ ID NO: 780083 - DNA, 15 bp, Homo sapiens
tatgctagtttggaa

SEQ ID NO: 780084 - DNA, 15 bp, Homo sapiens
atgctagtttggaag

SEQ ID NO: 780085 - DNA, 15 bp, Homo sapiens
tgctagtttggaagt

SEQ ID NO: 780086 - DNA, 15 bp, Homo sapiens
gctagtttggaagtg

SEQ ID NO: 780087 - DNA, 15 bp, Homo sapiens
ctagtttggaagtgc

SEQ ID NO: 780088 - DNA, 15 bp, Homo sapiens
tagtttggaagtgcc

SEQ ID NO: 780089 - DNA, 15 bp, Homo sapiens
agtttggaagtgcca

SEQ ID NO: 780090 - DNA, 15 bp, Homo sapiens
gtttggaagtgccag

SEQ ID NO: 780091 - DNA, 15 bp, Homo sapiens
tttggaagtgccaga

SEQ ID NO: 780092 - DNA, 15 bp, Homo sapiens
ttggaagtgccagat

SEQ ID NO: 780093 - DNA, 15 bp, Homo sapiens
tggaagtgccagata

SEQ ID NO: 780094 - DNA, 15 bp, Homo sapiens
ggaagtgccagatac

SEQ ID NO: 780095 - DNA, 15 bp, Homo sapiens
gaagtgccagatacc

SEQ ID NO: 780096 - DNA, 15 bp, Homo sapiens
aagtgccagatacca

SEQ ID NO: 780097 - DNA, 15 bp, Homo sapiens
agtgccagataccac

SEQ ID NO: 780098 - DNA, 15 bp, Homo sapiens
gtgccagataccact

SEQ ID NO: 780099 - DNA, 15 bp, Homo sapiens
tgccagataccactg

SEQ ID NO: 780100 - DNA, 15 bp, Homo sapiens
gccagataccactgg

SEQ ID NO: 780101 - DNA, 15 bp, Homo sapiens
ccagataccactgga

SEQ ID NO: 780102 - DNA, 15 bp, Homo sapiens
cagataccactggaa

SEQ ID NO: 780103 - DNA, 15 bp, Homo sapiens
agataccactggaat

SEQ ID NO: 780104 - DNA, 15 bp, Homo sapiens
gataccactggaata

SEQ ID NO: 780105 - DNA, 15 bp, Homo sapiens
ataccactggaataa

SEQ ID NO: 780106 - DNA, 15 bp, Homo sapiens
taccactggaataat

SEQ ID NO: 780107 - DNA, 15 bp, Homo sapiens
accactggaataata

SEQ ID NO: 780108 - DNA, 15 bp, Homo sapiens
ccactggaataatac

SEQ ID NO: 780109 - DNA, 15 bp, Homo sapiens
cactggaataatacc

SEQ ID NO: 780110 - DNA, 15 bp, Homo sapiens
actggaataatacca

SEQ ID NO: 780111 - DNA, 15 bp, Homo sapiens
ctggaataataccat

SEQ ID NO: 780112 - DNA, 15 bp, Homo sapiens
tggaataataccatt

SEQ ID NO: 780113 - DNA, 15 bp, Homo sapiens
ggaataataccattg

SEQ ID NO: 780114 - DNA, 15 bp, Homo sapiens
gaataataccattgc

SEQ ID NO: 780115 - DNA, 15 bp, Homo sapiens
aataataccattgct

SEQ ID NO: 780116 - DNA, 15 bp, Homo sapiens
ataataccattgctg

SEQ ID NO: 780117 - DNA, 15 bp, Homo sapiens
taataccattgctgt

SEQ ID NO: 780118 - DNA, 15 bp, Homo sapiens
aataccattgctgtt

SEQ ID NO: 780119 - DNA, 15 bp, Homo sapiens
ataccattgctgttt

SEQ ID NO: 780120 - DNA, 15 bp, Homo sapiens
taccattgctgtttc

SEQ ID NO: 780121 - DNA, 15 bp, Homo sapiens
accattgctgtttct

SEQ ID NO: 780122 - DNA, 15 bp, Homo sapiens
ccattgctgtttctg

SEQ ID NO: 780123 - DNA, 15 bp, Homo sapiens
cattgctgtttctgt

SEQ ID NO: 780124 - DNA, 15 bp, Homo sapiens
attgctgtttctgtt

SEQ ID NO: 780125 - DNA, 15 bp, Homo sapiens
ttgctgtttctgttt

SEQ ID NO: 780126 - DNA, 15 bp, Homo sapiens
tgctgtttctgtttt

SEQ ID NO: 780127 - DNA, 15 bp, Homo sapiens
gctgtttctgttttt

SEQ ID NO: 780128 - DNA, 15 bp, Homo sapiens
ctgtttctgtttttt

SEQ ID NO: 780129 - DNA, 15 bp, Homo sapiens
tgtttctgttttttt

SEQ ID NO: 780130 - DNA, 15 bp, Homo sapiens
gtttctgtttttttg

SEQ ID NO: 780131 - DNA, 15 bp, Homo sapiens
tttctgtttttttgt

SEQ ID NO: 780132 - DNA, 15 bp, Homo sapiens
ttctgtttttttgtg

SEQ ID NO: 780133 - DNA, 15 bp, Homo sapiens
tctgtttttttgtgg

SEQ ID NO: 780134 - DNA, 15 bp, Homo sapiens
ctgtttttttgtggt

SEQ ID NO: 780135 - DNA, 15 bp, Homo sapiens
tgtttttttgtggtg

SEQ ID NO: 780136 - DNA, 15 bp, Homo sapiens
gtttttttgtggtga

SEQ ID NO: 780137 - DNA, 15 bp, Homo sapiens
tttttttgtggtgat

SEQ ID NO: 780138 - DNA, 15 bp, Homo sapiens
ttttttgtggtgatt

SEQ ID NO: 780139 - DNA, 15 bp, Homo sapiens
tttttgtggtgattt

SEQ ID NO: 780140 - DNA, 15 bp, Homo sapiens
ttttgtggtgatttt

SEQ ID NO: 780141 - DNA, 15 bp, Homo sapiens
tttgtggtgattttg

SEQ ID NO: 780142 - DNA, 15 bp, Homo sapiens
ttgtggtgattttga

SEQ ID NO: 780143 - DNA, 15 bp, Homo sapiens
tgtggtgattttgat

SEQ ID NO: 780144 - DNA, 15 bp, Homo sapiens
gtggtgattttgatt

SEQ ID NO: 780145 - DNA, 15 bp, Homo sapiens
tggtgattttgattt

SEQ ID NO: 780146 - DNA, 15 bp, Homo sapiens
ggtgattttgatttt

SEQ ID NO: 780147 - DNA, 15 bp, Homo sapiens
gtgattttgattttt

SEQ ID NO: 780148 - DNA, 15 bp, Homo sapiens
tgattttgatttttg

SEQ ID NO: 780149 - DNA, 15 bp, Homo sapiens
gattttgatttttga

SEQ ID NO: 780150 - DNA, 15 bp, Homo sapiens
attttgatttttgaa

SEQ ID NO: 780151 - DNA, 15 bp, Homo sapiens
ttttgatttttgaat

SEQ ID NO: 780152 - DNA, 15 bp, Homo sapiens
tttgatttttgaata

SEQ ID NO: 780153 - DNA, 15 bp, Homo sapiens
ttgatttttgaataa

SEQ ID NO: 780154 - DNA, 15 bp, Homo sapiens
tgatttttgaataag

SEQ ID NO: 780155 - DNA, 15 bp, Homo sapiens
gatttttgaataaga

SEQ ID NO: 780156 - DNA, 15 bp, Homo sapiens
atttttgaataagaa

SEQ ID NO: 780157 - DNA, 15 bp, Homo sapiens
tttttgaataagaaa

SEQ ID NO: 780158 - DNA, 15 bp, Homo sapiens
ttttgaataagaaaa

SEQ ID NO: 780159 - DNA, 15 bp, Homo sapiens
tttgaataagaaaaa

SEQ ID NO: 780160 - DNA, 15 bp, Homo sapiens
ttgaataagaaaaat

SEQ ID NO: 780161 - DNA, 15 bp, Homo sapiens
tgaataagaaaaata

SEQ ID NO: 780162 - DNA, 15 bp, Homo sapiens
gaataagaaaaatac

SEQ ID NO: 780163 - DNA, 15 bp, Homo sapiens
aataagaaaaatact

SEQ ID NO: 780164 - DNA, 15 bp, Homo sapiens
ataagaaaaatacta

SEQ ID NO: 780165 - DNA, 15 bp, Homo sapiens
taagaaaaatactaa

SEQ ID NO: 780166 - DNA, 15 bp, Homo sapiens
aagaaaaatactaaa

SEQ ID NO: 780167 - DNA, 15 bp, Homo sapiens
agaaaaatactaaaa

SEQ ID NO: 780168 - DNA, 15 bp, Homo sapiens
gaaaaatactaaaag

SEQ ID NO: 780169 - DNA, 15 bp, Homo sapiens
aaaaatactaaaagg

SEQ ID NO: 780170 - DNA, 15 bp, Homo sapiens
aaaatactaaaaggg

SEQ ID NO: 780171 - DNA, 15 bp, Homo sapiens
aaatactaaaagggt

SEQ ID NO: 780172 - DNA, 15 bp, Homo sapiens
aatactaaaagggta

SEQ ID NO: 780173 - DNA, 15 bp, Homo sapiens
atactaaaagggtac

SEQ ID NO: 780174 - DNA, 15 bp, Homo sapiens
tactaaaagggtaca

SEQ ID NO: 780175 - DNA, 15 bp, Homo sapiens
actaaaagggtacat

SEQ ID NO: 780176 - DNA, 15 bp, Homo sapiens
ctaaaagggtacatt

SEQ ID NO: 780177 - DNA, 15 bp, Homo sapiens
taaaagggtacatta

SEQ ID NO: 780178 - DNA, 15 bp, Homo sapiens
aaaagggtacattag

SEQ ID NO: 780179 - DNA, 15 bp, Homo sapiens
aaagggtacattagg

SEQ ID NO: 780180 - DNA, 15 bp, Homo sapiens
aagggtacattaggt

SEQ ID NO: 780181 - DNA, 15 bp, Homo sapiens
agggtacattaggta

SEQ ID NO: 780182 - DNA, 15 bp, Homo sapiens
gggtacattaggtac

SEQ ID NO: 780183 - DNA, 15 bp, Homo sapiens
ggtacattaggtaca

SEQ ID NO: 780184 - DNA, 15 bp, Homo sapiens
gtacattaggtacat

SEQ ID NO: 780185 - DNA, 15 bp, Homo sapiens
tacattaggtacatt

SEQ ID NO: 780186 - DNA, 15 bp, Homo sapiens
acattaggtacattg

SEQ ID NO: 780187 - DNA, 15 bp, Homo sapiens
cattaggtacattgt

SEQ ID NO: 780188 - DNA, 15 bp, Homo sapiens
attaggtacattgtc

SEQ ID NO: 780189 - DNA, 15 bp, Homo sapiens
ttaggtacattgtct

SEQ ID NO: 780190 - DNA, 15 bp, Homo sapiens
taggtacattgtctg

SEQ ID NO: 780191 - DNA, 15 bp, Homo sapiens
aggtacattgtctga

SEQ ID NO: 780192 - DNA, 15 bp, Homo sapiens
ggtacattgtctgaa

SEQ ID NO: 780193 - DNA, 15 bp, Homo sapiens
gtacattgtctgaat

SEQ ID NO: 780194 - DNA, 15 bp, Homo sapiens
tacattgtctgaatt

SEQ ID NO: 780195 - DNA, 15 bp, Homo sapiens
acattgtctgaattt

SEQ ID NO: 780196 - DNA, 15 bp, Homo sapiens
cattgtctgaattta

SEQ ID NO: 780197 - DNA, 15 bp, Homo sapiens
attgtctgaatttat

SEQ ID NO: 780198 - DNA, 15 bp, Homo sapiens
ttgtctgaatttatc

SEQ ID NO: 780199 - DNA, 15 bp, Homo sapiens
tgtctgaatttatct

SEQ ID NO: 780200 - DNA, 15 bp, Homo sapiens
gtctgaatttatctc

SEQ ID NO: 780201 - DNA, 15 bp, Homo sapiens
tctgaatttatctct

SEQ ID NO: 780202 - DNA, 15 bp, Homo sapiens
ctgaatttatctcta

SEQ ID NO: 780203 - DNA, 15 bp, Homo sapiens
tgaatttatctctac

SEQ ID NO: 780204 - DNA, 15 bp, Homo sapiens
gaatttatctctact

SEQ ID NO: 780205 - DNA, 15 bp, Homo sapiens
aatttatctctactt

SEQ ID NO: 780206 - DNA, 15 bp, Homo sapiens
atttatctctacttt

SEQ ID NO: 780207 - DNA, 15 bp, Homo sapiens
tttatctctactttt

SEQ ID NO: 780208 - DNA, 15 bp, Homo sapiens
ttatctctactttta

SEQ ID NO: 780209 - DNA, 15 bp, Homo sapiens
tatctctacttttaa

SEQ ID NO: 780210 - DNA, 15 bp, Homo sapiens
atctctacttttaat

SEQ ID NO: 780211 - DNA, 15 bp, Homo sapiens
tctctacttttaatc

SEQ ID NO: 780212 - DNA, 15 bp, Homo sapiens
ctctacttttaatca

SEQ ID NO: 780213 - DNA, 15 bp, Homo sapiens
tctacttttaatcac

SEQ ID NO: 780214 - DNA, 15 bp, Homo sapiens
ctacttttaatcact

SEQ ID NO: 780215 - DNA, 15 bp, Homo sapiens
tacttttaatcactt

SEQ ID NO: 780216 - DNA, 15 bp, Homo sapiens
acttttaatcacttt

SEQ ID NO: 780217 - DNA, 15 bp, Homo sapiens
cttttaatcactttc

SEQ ID NO: 780218 - DNA, 15 bp, Homo sapiens
ttttaatcactttct

SEQ ID NO: 780219 - DNA, 15 bp, Homo sapiens
tttaatcactttcta

SEQ ID NO: 780220 - DNA, 15 bp, Homo sapiens
ttaatcactttctat

SEQ ID NO: 780221 - DNA, 15 bp, Homo sapiens
taatcactttctatt

SEQ ID NO: 780222 - DNA, 15 bp, Homo sapiens
aatcactttctattt

SEQ ID NO: 780223 - DNA, 15 bp, Homo sapiens
atcactttctatttc

SEQ ID NO: 780224 - DNA, 15 bp, Homo sapiens
tcactttctatttca

SEQ ID NO: 780225 - DNA, 15 bp, Homo sapiens
cactttctatttcat

SEQ ID NO: 780226 - DNA, 15 bp, Homo sapiens
actttctatttcata

SEQ ID NO: 780227 - DNA, 15 bp, Homo sapiens
ctttctatttcatag

SEQ ID NO: 780228 - DNA, 15 bp, Homo sapiens
tttctatttcatagt

SEQ ID NO: 780229 - DNA, 15 bp, Homo sapiens
ttctatttcatagtc

SEQ ID NO: 780230 - DNA, 15 bp, Homo sapiens
tctatttcatagtct

SEQ ID NO: 780231 - DNA, 15 bp, Homo sapiens
ctatttcatagtctc

SEQ ID NO: 780232 - DNA, 15 bp, Homo sapiens
tatttcatagtctca

SEQ ID NO: 780233 - DNA, 15 bp, Homo sapiens
atttcatagtctcat

SEQ ID NO: 780234 - DNA, 15 bp, Homo sapiens
tttcatagtctcatt

SEQ ID NO: 780235 - DNA, 15 bp, Homo sapiens
ttcatagtctcattt

SEQ ID NO: 780236 - DNA, 15 bp, Homo sapiens
tcatagtctcatttc

SEQ ID NO: 780237 - DNA, 15 bp, Homo sapiens
catagtctcatttca

SEQ ID NO: 780238 - DNA, 15 bp, Homo sapiens
atagtctcatttcaa

SEQ ID NO: 780239 - DNA, 15 bp, Homo sapiens
tagtctcatttcaaa

SEQ ID NO: 780240 - DNA, 15 bp, Homo sapiens
agtctcatttcaaat

SEQ ID NO: 780241 - DNA, 15 bp, Homo sapiens
gtctcatttcaaatg

SEQ ID NO: 780242 - DNA, 15 bp, Homo sapiens
tctcatttcaaatgc

SEQ ID NO: 780243 - DNA, 15 bp, Homo sapiens
ctcatttcaaatgct

SEQ ID NO: 780244 - DNA, 15 bp, Homo sapiens
tcatttcaaatgcta

SEQ ID NO: 780245 - DNA, 15 bp, Homo sapiens
catttcaaatgctaa

SEQ ID NO: 780246 - DNA, 15 bp, Homo sapiens
atttcaaatgctaag

SEQ ID NO: 780247 - DNA, 15 bp, Homo sapiens
tttcaaatgctaagt

SEQ ID NO: 780248 - DNA, 15 bp, Homo sapiens
ttcaaatgctaagta

SEQ ID NO: 780249 - DNA, 15 bp, Homo sapiens
tcaaatgctaagtat

SEQ ID NO: 780250 - DNA, 15 bp, Homo sapiens
caaatgctaagtatc

SEQ ID NO: 780251 - DNA, 15 bp, Homo sapiens
aaatgctaagtatca

SEQ ID NO: 780252 - DNA, 15 bp, Homo sapiens
aatgctaagtatcaa

SEQ ID NO: 780253 - DNA, 15 bp, Homo sapiens
atgctaagtatcaag

SEQ ID NO: 780254 - DNA, 15 bp, Homo sapiens
tgctaagtatcaaga

SEQ ID NO: 780255 - DNA, 15 bp, Homo sapiens
gctaagtatcaagaa

SEQ ID NO: 780256 - DNA, 15 bp, Homo sapiens
ctaagtatcaagaag

SEQ ID NO: 780257 - DNA, 15 bp, Homo sapiens
taagtatcaagaagg

SEQ ID NO: 780258 - DNA, 15 bp, Homo sapiens
aagtatcaagaaggt

SEQ ID NO: 780259 - DNA, 15 bp, Homo sapiens
agtatcaagaaggtc

SEQ ID NO: 780260 - DNA, 15 bp, Homo sapiens
gtatcaagaaggtcc

SEQ ID NO: 780261 - DNA, 15 bp, Homo sapiens
tatcaagaaggtcca

SEQ ID NO: 780262 - DNA, 15 bp, Homo sapiens
atcaagaaggtccaa

SEQ ID NO: 780263 - DNA, 15 bp, Homo sapiens
tcaagaaggtccaaa

SEQ ID NO: 780264 - DNA, 15 bp, Homo sapiens
caagaaggtccaaag

SEQ ID NO: 780265 - DNA, 15 bp, Homo sapiens
aagaaggtccaaagc

SEQ ID NO: 780266 - DNA, 15 bp, Homo sapiens
agaaggtccaaagct

SEQ ID NO: 780267 - DNA, 15 bp, Homo sapiens
gaaggtccaaagctg

SEQ ID NO: 780268 - DNA, 15 bp, Homo sapiens
aaggtccaaagctga

SEQ ID NO: 780269 - DNA, 15 bp, Homo sapiens
aggtccaaagctgag

SEQ ID NO: 780270 - DNA, 15 bp, Homo sapiens
ggtccaaagctgagg

SEQ ID NO: 780271 - DNA, 15 bp, Homo sapiens
gtccaaagctgaggg

SEQ ID NO: 780272 - DNA, 15 bp, Homo sapiens
tccaaagctgagggt

SEQ ID NO: 780273 - DNA, 15 bp, Homo sapiens
ccaaagctgagggtt

SEQ ID NO: 780274 - DNA, 15 bp, Homo sapiens
caaagctgagggtta

SEQ ID NO: 780275 - DNA, 15 bp, Homo sapiens
aaagctgagggttat

SEQ ID NO: 780276 - DNA, 15 bp, Homo sapiens
aagctgagggttatc

SEQ ID NO: 780277 - DNA, 15 bp, Homo sapiens
agctgagggttatca

SEQ ID NO: 780278 - DNA, 15 bp, Homo sapiens
gctgagggttatcag

SEQ ID NO: 780279 - DNA, 15 bp, Homo sapiens
ctgagggttatcagt

SEQ ID NO: 780280 - DNA, 15 bp, Homo sapiens
tgagggttatcagtg

SEQ ID NO: 780281 - DNA, 15 bp, Homo sapiens
gagggttatcagtgt

SEQ ID NO: 780282 - DNA, 15 bp, Homo sapiens
agggttatcagtgta

SEQ ID NO: 780283 - DNA, 15 bp, Homo sapiens
gggttatcagtgtat

SEQ ID NO: 780284 - DNA, 15 bp, Homo sapiens
ggttatcagtgtatt

SEQ ID NO: 780285 - DNA, 15 bp, Homo sapiens
gttatcagtgtattt

SEQ ID NO: 780286 - DNA, 15 bp, Homo sapiens
ttatcagtgtatttt

SEQ ID NO: 780287 - DNA, 15 bp, Homo sapiens
tatcagtgtattttc

SEQ ID NO: 780288 - DNA, 15 bp, Homo sapiens
atcagtgtattttct

SEQ ID NO: 780289 - DNA, 15 bp, Homo sapiens
tcagtgtattttctt

SEQ ID NO: 780290 - DNA, 15 bp, Homo sapiens
cagtgtattttctta

SEQ ID NO: 780291 - DNA, 15 bp, Homo sapiens
agtgtattttcttaa

SEQ ID NO: 780292 - DNA, 15 bp, Homo sapiens
gtgtattttcttaaa

SEQ ID NO: 780293 - DNA, 15 bp, Homo sapiens
tgtattttcttaaac

SEQ ID NO: 780294 - DNA, 15 bp, Homo sapiens
gtattttcttaaact

SEQ ID NO: 780295 - DNA, 15 bp, Homo sapiens
tattttcttaaactt

SEQ ID NO: 780296 - DNA, 15 bp, Homo sapiens
attttcttaaacttg

SEQ ID NO: 780297 - DNA, 15 bp, Homo sapiens
ttttcttaaacttgt

SEQ ID NO: 780298 - DNA, 15 bp, Homo sapiens
tttcttaaacttgtt

SEQ ID NO: 780299 - DNA, 15 bp, Homo sapiens
ttcttaaacttgttt

SEQ ID NO: 780300 - DNA, 15 bp, Homo sapiens
tcttaaacttgttta

SEQ ID NO: 780301 - DNA, 15 bp, Homo sapiens
cttaaacttgtttac

SEQ ID NO: 780302 - DNA, 15 bp, Homo sapiens
ttaaacttgtttaca

SEQ ID NO: 780303 - DNA, 15 bp, Homo sapiens
taaacttgtttacaa

SEQ ID NO: 780304 - DNA, 15 bp, Homo sapiens
aaacttgtttacaaa

SEQ ID NO: 780305 - DNA, 15 bp, Homo sapiens
aacttgtttacaaat

SEQ ID NO: 780306 - DNA, 15 bp, Homo sapiens
acttgtttacaaatt

SEQ ID NO: 780307 - DNA, 15 bp, Homo sapiens
cttgtttacaaattc

SEQ ID NO: 780308 - DNA, 15 bp, Homo sapiens
ttgtttacaaattcc

SEQ ID NO: 780309 - DNA, 15 bp, Homo sapiens
tgtttacaaattccc

SEQ ID NO: 780310 - DNA, 15 bp, Homo sapiens
gtttacaaattccca

SEQ ID NO: 780311 - DNA, 15 bp, Homo sapiens
tttacaaattcccat

SEQ ID NO: 780312 - DNA, 15 bp, Homo sapiens
ttacaaattcccatt

SEQ ID NO: 780313 - DNA, 15 bp, Homo sapiens
tacaaattcccattg

SEQ ID NO: 780314 - DNA, 15 bp, Homo sapiens
acaaattcccattgc

SEQ ID NO: 780315 - DNA, 15 bp, Homo sapiens
caaattcccattgcc

SEQ ID NO: 780316 - DNA, 15 bp, Homo sapiens
aaattcccattgcct

SEQ ID NO: 780317 - DNA, 15 bp, Homo sapiens
aattcccattgcctt

SEQ ID NO: 780318 - DNA, 15 bp, Homo sapiens
attcccattgccttc

SEQ ID NO: 780319 - DNA, 15 bp, Homo sapiens
ttcccattgccttca

SEQ ID NO: 780320 - DNA, 15 bp, Homo sapiens
tcccattgccttcat

SEQ ID NO: 780321 - DNA, 15 bp, Homo sapiens
cccattgccttcata

SEQ ID NO: 780322 - DNA, 15 bp, Homo sapiens
ccattgccttcataa

SEQ ID NO: 780323 - DNA, 15 bp, Homo sapiens
cattgccttcataat

SEQ ID NO: 780324 - DNA, 15 bp, Homo sapiens
attgccttcataata

SEQ ID NO: 780325 - DNA, 15 bp, Homo sapiens
ttgccttcataataa

SEQ ID NO: 780326 - DNA, 15 bp, Homo sapiens
tgccttcataataat

SEQ ID NO: 780327 - DNA, 15 bp, Homo sapiens
gccttcataataata

SEQ ID NO: 780328 - DNA, 15 bp, Homo sapiens
ccttcataataataa

SEQ ID NO: 780329 - DNA, 15 bp, Homo sapiens
cttcataataataaa

SEQ ID NO: 780330 - DNA, 15 bp, Homo sapiens
ttcataataataaaa

SEQ ID NO: 780331 - DNA, 15 bp, Homo sapiens
tcataataataaaat

SEQ ID NO: 780332 - DNA, 15 bp, Homo sapiens
cataataataaaatg

SEQ ID NO: 780333 - DNA, 15 bp, Homo sapiens
ataataataaaatga

SEQ ID NO: 780334 - DNA, 15 bp, Homo sapiens
taataataaaatgac

SEQ ID NO: 780335 - DNA, 15 bp, Homo sapiens
aataataaaatgact

SEQ ID NO: 780336 - DNA, 15 bp, Homo sapiens
ataataaaatgacta

SEQ ID NO: 780337 - DNA, 15 bp, Homo sapiens
taataaaatgactat

SEQ ID NO: 780338 - DNA, 15 bp, Homo sapiens
aataaaatgactatt

SEQ ID NO: 780339 - DNA, 15 bp, Homo sapiens
ataaaatgactattg

SEQ ID NO: 780340 - DNA, 15 bp, Homo sapiens
taaaatgactattgc

SEQ ID NO: 780341 - DNA, 15 bp, Homo sapiens
aaaatgactattgcc

SEQ ID NO: 780342 - DNA, 15 bp, Homo sapiens
aaatgactattgcct

SEQ ID NO: 780343 - DNA, 15 bp, Homo sapiens
aatgactattgcctt

SEQ ID NO: 780344 - DNA, 15 bp, Homo sapiens
atgactattgcctta

SEQ ID NO: 780345 - DNA, 15 bp, Homo sapiens
tgactattgccttaa

SEQ ID NO: 780346 - DNA, 15 bp, Homo sapiens
gactattgccttaat

SEQ ID NO: 780347 - DNA, 15 bp, Homo sapiens
actattgccttaata

SEQ ID NO: 780348 - DNA, 15 bp, Homo sapiens
ctattgccttaataa

SEQ ID NO: 780349 - DNA, 15 bp, Homo sapiens
tattgccttaataac

SEQ ID NO: 780350 - DNA, 15 bp, Homo sapiens
attgccttaataaca

SEQ ID NO: 780351 - DNA, 15 bp, Homo sapiens
ttgccttaataacag

SEQ ID NO: 780352 - DNA, 15 bp, Homo sapiens
tgccttaataacaga

SEQ ID NO: 780353 - DNA, 15 bp, Homo sapiens
gccttaataacagaa

SEQ ID NO: 780354 - DNA, 15 bp, Homo sapiens
ccttaataacagaag

SEQ ID NO: 780355 - DNA, 15 bp, Homo sapiens
cttaataacagaagg

SEQ ID NO: 780356 - DNA, 15 bp, Homo sapiens
ttaataacagaaggg

SEQ ID NO: 780357 - DNA, 15 bp, Homo sapiens
taataacagaagggt

SEQ ID NO: 780358 - DNA, 15 bp, Homo sapiens
aataacagaagggtg

SEQ ID NO: 780359 - DNA, 15 bp, Homo sapiens
ataacagaagggtga

SEQ ID NO: 780360 - DNA, 15 bp, Homo sapiens
taacagaagggtgaa

SEQ ID NO: 780361 - DNA, 15 bp, Homo sapiens
aacagaagggtgaat

SEQ ID NO: 780362 - DNA, 15 bp, Homo sapiens
acagaagggtgaatc

SEQ ID NO: 780363 - DNA, 15 bp, Homo sapiens
cagaagggtgaatct

SEQ ID NO: 780364 - DNA, 15 bp, Homo sapiens
agaagggtgaatcta

SEQ ID NO: 780365 - DNA, 15 bp, Homo sapiens
gaagggtgaatctat

SEQ ID NO: 780366 - DNA, 15 bp, Homo sapiens
aagggtgaatctatt

SEQ ID NO: 780367 - DNA, 15 bp, Homo sapiens
agggtgaatctattg

SEQ ID NO: 780368 - DNA, 15 bp, Homo sapiens
gggtgaatctattga

SEQ ID NO: 780369 - DNA, 15 bp, Homo sapiens
ggtgaatctattgat

SEQ ID NO: 780370 - DNA, 15 bp, Homo sapiens
gtgaatctattgatt

SEQ ID NO: 780371 - DNA, 15 bp, Homo sapiens
tgaatctattgattt

SEQ ID NO: 780372 - DNA, 15 bp, Homo sapiens
gaatctattgatttt

SEQ ID NO: 780373 - DNA, 15 bp, Homo sapiens
aatctattgattttc

SEQ ID NO: 780374 - DNA, 15 bp, Homo sapiens
atctattgattttct

SEQ ID NO: 780375 - DNA, 15 bp, Homo sapiens
tctattgattttctt

SEQ ID NO: 780376 - DNA, 15 bp, Homo sapiens
ctattgattttcttg

SEQ ID NO: 780377 - DNA, 15 bp, Homo sapiens
tattgattttcttgg

SEQ ID NO: 780378 - DNA, 15 bp, Homo sapiens
attgattttcttgga

SEQ ID NO: 780379 - DNA, 15 bp, Homo sapiens
ttgattttcttggag

SEQ ID NO: 780380 - DNA, 15 bp, Homo sapiens
tgattttcttggagc

SEQ ID NO: 780381 - DNA, 15 bp, Homo sapiens
gattttcttggagca

SEQ ID NO: 780382 - DNA, 15 bp, Homo sapiens
attttcttggagcat

SEQ ID NO: 780383 - DNA, 15 bp, Homo sapiens
ttttcttggagcatc

SEQ ID NO: 780384 - DNA, 15 bp, Homo sapiens
tttcttggagcatca

SEQ ID NO: 780385 - DNA, 15 bp, Homo sapiens
ttcttggagcatcat

SEQ ID NO: 780386 - DNA, 15 bp, Homo sapiens
tcttggagcatcata

SEQ ID NO: 780387 - DNA, 15 bp, Homo sapiens
cttggagcatcataa

SEQ ID NO: 780388 - DNA, 15 bp, Homo sapiens
ttggagcatcataag

SEQ ID NO: 780389 - DNA, 15 bp, Homo sapiens
tggagcatcataaga

SEQ ID NO: 780390 - DNA, 15 bp, Homo sapiens
ggagcatcataagat

SEQ ID NO: 780391 - DNA, 15 bp, Homo sapiens
gagcatcataagatg

SEQ ID NO: 780392 - DNA, 15 bp, Homo sapiens
agcatcataagatgg

SEQ ID NO: 780393 - DNA, 15 bp, Homo sapiens
gcatcataagatggc

SEQ ID NO: 780394 - DNA, 15 bp, Homo sapiens
catcataagatggcc

SEQ ID NO: 780395 - DNA, 15 bp, Homo sapiens
atcataagatggccc

SEQ ID NO: 780396 - DNA, 15 bp, Homo sapiens
tcataagatggccct

SEQ ID NO: 780397 - DNA, 15 bp, Homo sapiens
cataagatggccctt

SEQ ID NO: 780398 - DNA, 15 bp, Homo sapiens
ataagatggcccttt

SEQ ID NO: 780399 - DNA, 15 bp, Homo sapiens
taagatggccctttg

SEQ ID NO: 780400 - DNA, 15 bp, Homo sapiens
aagatggccctttgc

SEQ ID NO: 780401 - DNA, 15 bp, Homo sapiens
agatggccctttgct

SEQ ID NO: 780402 - DNA, 15 bp, Homo sapiens
gatggccctttgctg

SEQ ID NO: 780403 - DNA, 15 bp, Homo sapiens
atggccctttgctga

SEQ ID NO: 780404 - DNA, 15 bp, Homo sapiens
tggccctttgctgaa

SEQ ID NO: 780405 - DNA, 15 bp, Homo sapiens
ggccctttgctgaat

SEQ ID NO: 780406 - DNA, 15 bp, Homo sapiens
gccctttgctgaatt

SEQ ID NO: 780407 - DNA, 15 bp, Homo sapiens
ccctttgctgaattg

SEQ ID NO: 780408 - DNA, 15 bp, Homo sapiens
cctttgctgaattgt

SEQ ID NO: 780409 - DNA, 15 bp, Homo sapiens
ctttgctgaattgta

SEQ ID NO: 780410 - DNA, 15 bp, Homo sapiens
tttgctgaattgtac

SEQ ID NO: 780411 - DNA, 15 bp, Homo sapiens
ttgctgaattgtaca

SEQ ID NO: 780412 - DNA, 15 bp, Homo sapiens
tgctgaattgtacat

SEQ ID NO: 780413 - DNA, 15 bp, Homo sapiens
gctgaattgtacatg

SEQ ID NO: 780414 - DNA, 15 bp, Homo sapiens
ctgaattgtacatga

SEQ ID NO: 780415 - DNA, 15 bp, Homo sapiens
tgaattgtacatgaa

SEQ ID NO: 780416 - DNA, 15 bp, Homo sapiens
gaattgtacatgaaa

SEQ ID NO: 780417 - DNA, 15 bp, Homo sapiens
aattgtacatgaaat

SEQ ID NO: 780418 - DNA, 15 bp, Homo sapiens
attgtacatgaaata

SEQ ID NO: 780419 - DNA, 15 bp, Homo sapiens
ttgtacatgaaatat

SEQ ID NO: 780420 - DNA, 15 bp, Homo sapiens
tgtacatgaaatata

SEQ ID NO: 780421 - DNA, 15 bp, Homo sapiens
gtacatgaaatataa

SEQ ID NO: 780422 - DNA, 15 bp, Homo sapiens
tacatgaaatataac

SEQ ID NO: 780423 - DNA, 15 bp, Homo sapiens
acatgaaatataaca

SEQ ID NO: 780424 - DNA, 15 bp, Homo sapiens
catgaaatataacat

SEQ ID NO: 780425 - DNA, 15 bp, Homo sapiens
atgaaatataacatg

SEQ ID NO: 780426 - DNA, 15 bp, Homo sapiens
tgaaatataacatgg

SEQ ID NO: 780427 - DNA, 15 bp, Homo sapiens
gaaatataacatggc

SEQ ID NO: 780428 - DNA, 15 bp, Homo sapiens
aaatataacatggct

SEQ ID NO: 780429 - DNA, 15 bp, Homo sapiens
aatataacatggctc

SEQ ID NO: 780430 - DNA, 15 bp, Homo sapiens
atataacatggctca

SEQ ID NO: 780431 - DNA, 15 bp, Homo sapiens
tataacatggctcac

SEQ ID NO: 780432 - DNA, 15 bp, Homo sapiens
ataacatggctcaca

SEQ ID NO: 780433 - DNA, 15 bp, Homo sapiens
taacatggctcacaa

SEQ ID NO: 780434 - DNA, 15 bp, Homo sapiens
aacatggctcacaaa

SEQ ID NO: 780435 - DNA, 15 bp, Homo sapiens
acatggctcacaaag

SEQ ID NO: 780436 - DNA, 15 bp, Homo sapiens
catggctcacaaagt

SEQ ID NO: 780437 - DNA, 15 bp, Homo sapiens
atggctcacaaagtc

SEQ ID NO: 780438 - DNA, 15 bp, Homo sapiens
tggctcacaaagtct

SEQ ID NO: 780439 - DNA, 15 bp, Homo sapiens
ggctcacaaagtctc

SEQ ID NO: 780440 - DNA, 15 bp, Homo sapiens
gctcacaaagtctca

SEQ ID NO: 780441 - DNA, 15 bp, Homo sapiens
ctcacaaagtctcat

SEQ ID NO: 780442 - DNA, 15 bp, Homo sapiens
tcacaaagtctcatg

SEQ ID NO: 780443 - DNA, 15 bp, Homo sapiens
cacaaagtctcatgg

SEQ ID NO: 780444 - DNA, 15 bp, Homo sapiens
acaaagtctcatgga

SEQ ID NO: 780445 - DNA, 15 bp, Homo sapiens
caaagtctcatggat

SEQ ID NO: 780446 - DNA, 15 bp, Homo sapiens
aaagtctcatggatg

SEQ ID NO: 780447 - DNA, 15 bp, Homo sapiens
aagtctcatggatgt

SEQ ID NO: 780448 - DNA, 15 bp, Homo sapiens
agtctcatggatgtt

SEQ ID NO: 780449 - DNA, 15 bp, Homo sapiens
gtctcatggatgttg

SEQ ID NO: 780450 - DNA, 15 bp, Homo sapiens
tctcatggatgttgg

SEQ ID NO: 780451 - DNA, 15 bp, Homo sapiens
ctcatggatgttggc

SEQ ID NO: 780452 - DNA, 15 bp, Homo sapiens
tcatggatgttggca

SEQ ID NO: 780453 - DNA, 15 bp, Homo sapiens
catggatgttggcaa

SEQ ID NO: 780454 - DNA, 15 bp, Homo sapiens
atggatgttggcaaa

SEQ ID NO: 780455 - DNA, 15 bp, Homo sapiens
tggatgttggcaaag

SEQ ID NO: 780456 - DNA, 15 bp, Homo sapiens
ggatgttggcaaagg

SEQ ID NO: 780457 - DNA, 15 bp, Homo sapiens
gatgttggcaaaggc

SEQ ID NO: 780458 - DNA, 15 bp, Homo sapiens
atgttggcaaaggca

SEQ ID NO: 780459 - DNA, 15 bp, Homo sapiens
tgttggcaaaggcag

SEQ ID NO: 780460 - DNA, 15 bp, Homo sapiens
gttggcaaaggcagt

SEQ ID NO: 780461 - DNA, 15 bp, Homo sapiens
ttggcaaaggcagtg

SEQ ID NO: 780462 - DNA, 15 bp, Homo sapiens
tggcaaaggcagtgt

SEQ ID NO: 780463 - DNA, 15 bp, Homo sapiens
ggcaaaggcagtgta

SEQ ID NO: 780464 - DNA, 15 bp, Homo sapiens
gcaaaggcagtgtaa

SEQ ID NO: 780465 - DNA, 15 bp, Homo sapiens
caaaggcagtgtaat

SEQ ID NO: 780466 - DNA, 15 bp, Homo sapiens
aaaggcagtgtaatg

SEQ ID NO: 780467 - DNA, 15 bp, Homo sapiens
aaggcagtgtaatgg

SEQ ID NO: 780468 - DNA, 15 bp, Homo sapiens
aggcagtgtaatggt

SEQ ID NO: 780469 - DNA, 15 bp, Homo sapiens
ggcagtgtaatggta

SEQ ID NO: 780470 - DNA, 15 bp, Homo sapiens
gcagtgtaatggtat

SEQ ID NO: 780471 - DNA, 15 bp, Homo sapiens
cagtgtaatggtatt

SEQ ID NO: 780472 - DNA, 15 bp, Homo sapiens
agtgtaatggtattt

SEQ ID NO: 780473 - DNA, 15 bp, Homo sapiens
gtgtaatggtatttt

SEQ ID NO: 780474 - DNA, 15 bp, Homo sapiens
tgtaatggtatttta

SEQ ID NO: 780475 - DNA, 15 bp, Homo sapiens
gtaatggtattttat

SEQ ID NO: 780476 - DNA, 15 bp, Homo sapiens
taatggtattttatt

SEQ ID NO: 780477 - DNA, 15 bp, Homo sapiens
aatggtattttattg

SEQ ID NO: 780478 - DNA, 15 bp, Homo sapiens
atggtattttattga

SEQ ID NO: 780479 - DNA, 15 bp, Homo sapiens
tggtattttattgat

SEQ ID NO: 780480 - DNA, 15 bp, Homo sapiens
ggtattttattgatt

SEQ ID NO: 780481 - DNA, 15 bp, Homo sapiens
gtattttattgatta

SEQ ID NO: 780482 - DNA, 15 bp, Homo sapiens
tattttattgattat

SEQ ID NO: 780483 - DNA, 15 bp, Homo sapiens
attttattgattatt

SEQ ID NO: 780484 - DNA, 15 bp, Homo sapiens
ttttattgattattt

SEQ ID NO: 780485 - DNA, 15 bp, Homo sapiens
tttattgattatttg

SEQ ID NO: 780486 - DNA, 15 bp, Homo sapiens
ttattgattatttga

SEQ ID NO: 780487 - DNA, 15 bp, Homo sapiens
tattgattatttgag

SEQ ID NO: 780488 - DNA, 15 bp, Homo sapiens
attgattatttgaga

SEQ ID NO: 780489 - DNA, 15 bp, Homo sapiens
ttgattatttgagaa

SEQ ID NO: 780490 - DNA, 15 bp, Homo sapiens
tgattatttgagaaa

SEQ ID NO: 780491 - DNA, 15 bp, Homo sapiens
gattatttgagaaaa

SEQ ID NO: 780492 - DNA, 15 bp, Homo sapiens
attatttgagaaaat

SEQ ID NO: 780493 - DNA, 15 bp, Homo sapiens
ttatttgagaaaatc

SEQ ID NO: 780494 - DNA, 15 bp, Homo sapiens
tatttgagaaaatca

SEQ ID NO: 780495 - DNA, 15 bp, Homo sapiens
atttgagaaaatcat

SEQ ID NO: 780496 - DNA, 15 bp, Homo sapiens
tttgagaaaatcatt

SEQ ID NO: 780497 - DNA, 15 bp, Homo sapiens
ttgagaaaatcattg

SEQ ID NO: 780498 - DNA, 15 bp, Homo sapiens
tgagaaaatcattga

SEQ ID NO: 780499 - DNA, 15 bp, Homo sapiens
gagaaaatcattgaa

SEQ ID NO: 780500 - DNA, 15 bp, Homo sapiens
agaaaatcattgaaa

SEQ ID NO: 780501 - DNA, 15 bp, Homo sapiens
gaaaatcattgaaaa

SEQ ID NO: 780502 - DNA, 15 bp, Homo sapiens
aaaatcattgaaaaa

SEQ ID NO: 780503 - DNA, 15 bp, Homo sapiens
aaatcattgaaaaaa

SEQ ID NO: 780504 - DNA, 15 bp, Homo sapiens
aatcattgaaaaaag

SEQ ID NO: 780505 - DNA, 15 bp, Homo sapiens
atcattgaaaaaagt

SEQ ID NO: 780506 - DNA, 15 bp, Homo sapiens
tcattgaaaaaagta

SEQ ID NO: 780507 - DNA, 15 bp, Homo sapiens
cattgaaaaaagtaa

SEQ ID NO: 780508 - DNA, 15 bp, Homo sapiens
attgaaaaaagtaag

SEQ ID NO: 780509 - DNA, 15 bp, Homo sapiens
ttgaaaaaagtaaga

SEQ ID NO: 780510 - DNA, 15 bp, Homo sapiens
tgaaaaaagtaagaa

SEQ ID NO: 780511 - DNA, 15 bp, Homo sapiens
gaaaaaagtaagaat

SEQ ID NO: 780512 - DNA, 15 bp, Homo sapiens
aaaaaagtaagaata

SEQ ID NO: 780513 - DNA, 15 bp, Homo sapiens
aaaaagtaagaataa

SEQ ID NO: 780514 - DNA, 15 bp, Homo sapiens
aaaagtaagaataaa

SEQ ID NO: 780515 - DNA, 15 bp, Homo sapiens
aaagtaagaataaag

SEQ ID NO: 780516 - DNA, 15 bp, Homo sapiens
aagtaagaataaagg

SEQ ID NO: 780517 - DNA, 15 bp, Homo sapiens
agtaagaataaaggg

SEQ ID NO: 780518 - DNA, 15 bp, Homo sapiens
gtaagaataaagggg

SEQ ID NO: 780519 - DNA, 15 bp, Homo sapiens
taagaataaagggga

SEQ ID NO: 780520 - DNA, 15 bp, Homo sapiens
aagaataaaggggaa

SEQ ID NO: 780521 - DNA, 15 bp, Homo sapiens
agaataaaggggaaa

SEQ ID NO: 780522 - DNA, 15 bp, Homo sapiens
gaataaaggggaaat

SEQ ID NO: 780523 - DNA, 15 bp, Homo sapiens
aataaaggggaaata

SEQ ID NO: 780524 - DNA, 15 bp, Homo sapiens
ataaaggggaaatat

SEQ ID NO: 780525 - DNA, 15 bp, Homo sapiens
taaaggggaaatatc

SEQ ID NO: 780526 - DNA, 15 bp, Homo sapiens
aaaggggaaatatca

SEQ ID NO: 780527 - DNA, 15 bp, Homo sapiens
aaggggaaatatcag

SEQ ID NO: 780528 - DNA, 15 bp, Homo sapiens
aggggaaatatcagt

SEQ ID NO: 780529 - DNA, 15 bp, Homo sapiens
ggggaaatatcagtt

SEQ ID NO: 780530 - DNA, 15 bp, Homo sapiens
gggaaatatcagtta

SEQ ID NO: 780531 - DNA, 15 bp, Homo sapiens
ggaaatatcagttat

SEQ ID NO: 780532 - DNA, 15 bp, Homo sapiens
gaaatatcagttata

SEQ ID NO: 780533 - DNA, 15 bp, Homo sapiens
aaatatcagttataa

SEQ ID NO: 780534 - DNA, 15 bp, Homo sapiens
aatatcagttataaa

SEQ ID NO: 780535 - DNA, 15 bp, Homo sapiens
atatcagttataaac

SEQ ID NO: 780536 - DNA, 15 bp, Homo sapiens
tatcagttataaaca

SEQ ID NO: 780537 - DNA, 15 bp, Homo sapiens
atcagttataaacat

SEQ ID NO: 780538 - DNA, 15 bp, Homo sapiens
tcagttataaacatt

SEQ ID NO: 780539 - DNA, 15 bp, Homo sapiens
cagttataaacattg

SEQ ID NO: 780540 - DNA, 15 bp, Homo sapiens
agttataaacattgt

SEQ ID NO: 780541 - DNA, 15 bp, Homo sapiens
gttataaacattgtt

SEQ ID NO: 780542 - DNA, 15 bp, Homo sapiens
ttataaacattgttc

SEQ ID NO: 780543 - DNA, 15 bp, Homo sapiens
tataaacattgttct

SEQ ID NO: 780544 - DNA, 15 bp, Homo sapiens
ataaacattgttcta

SEQ ID NO: 780545 - DNA, 15 bp, Homo sapiens
taaacattgttctat

SEQ ID NO: 780546 - DNA, 15 bp, Homo sapiens
aaacattgttctata

SEQ ID NO: 780547 - DNA, 15 bp, Homo sapiens
aacattgttctatat

SEQ ID NO: 780548 - DNA, 15 bp, Homo sapiens
acattgttctatatg

SEQ ID NO: 780549 - DNA, 15 bp, Homo sapiens
cattgttctatatga

SEQ ID NO: 780550 - DNA, 15 bp, Homo sapiens
attgttctatatgaa

SEQ ID NO: 780551 - DNA, 15 bp, Homo sapiens
ttgttctatatgaaa

SEQ ID NO: 780552 - DNA, 15 bp, Homo sapiens
tgttctatatgaaaa

SEQ ID NO: 780553 - DNA, 15 bp, Homo sapiens
gttctatatgaaaat

SEQ ID NO: 780554 - DNA, 15 bp, Homo sapiens
ttctatatgaaaatt

SEQ ID NO: 780555 - DNA, 15 bp, Homo sapiens
tctatatgaaaattc

SEQ ID NO: 780556 - DNA, 15 bp, Homo sapiens
ctatatgaaaattca

SEQ ID NO: 780557 - DNA, 15 bp, Homo sapiens
tatatgaaaattcag

SEQ ID NO: 780558 - DNA, 15 bp, Homo sapiens
atatgaaaattcagt

SEQ ID NO: 780559 - DNA, 15 bp, Homo sapiens
tatgaaaattcagtg

SEQ ID NO: 780560 - DNA, 15 bp, Homo sapiens
atgaaaattcagtgt

SEQ ID NO: 780561 - DNA, 15 bp, Homo sapiens
tgaaaattcagtgta

SEQ ID NO: 780562 - DNA, 15 bp, Homo sapiens
gaaaattcagtgtag

SEQ ID NO: 780563 - DNA, 15 bp, Homo sapiens
aaaattcagtgtagc

SEQ ID NO: 780564 - DNA, 15 bp, Homo sapiens
aaattcagtgtagct

SEQ ID NO: 780565 - DNA, 15 bp, Homo sapiens
aattcagtgtagctc

SEQ ID NO: 780566 - DNA, 15 bp, Homo sapiens
attcagtgtagctct

SEQ ID NO: 780567 - DNA, 15 bp, Homo sapiens
ttcagtgtagctctt

SEQ ID NO: 780568 - DNA, 15 bp, Homo sapiens
tcagtgtagctcttt

SEQ ID NO: 780569 - DNA, 15 bp, Homo sapiens
cagtgtagctctttc

SEQ ID NO: 780570 - DNA, 15 bp, Homo sapiens
agtgtagctctttcc

SEQ ID NO: 780571 - DNA, 15 bp, Homo sapiens
gtgtagctctttcct

SEQ ID NO: 780572 - DNA, 15 bp, Homo sapiens
tgtagctctttcctt

SEQ ID NO: 780573 - DNA, 15 bp, Homo sapiens
gtagctctttcctta

SEQ ID NO: 780574 - DNA, 15 bp, Homo sapiens
tagctctttccttaa

SEQ ID NO: 780575 - DNA, 15 bp, Homo sapiens
agctctttccttaag

SEQ ID NO: 780576 - DNA, 15 bp, Homo sapiens
gctctttccttaagg

SEQ ID NO: 780577 - DNA, 15 bp, Homo sapiens
ctctttccttaagga

SEQ ID NO: 780578 - DNA, 15 bp, Homo sapiens
tctttccttaaggaa

SEQ ID NO: 780579 - DNA, 15 bp, Homo sapiens
ctttccttaaggaat

SEQ ID NO: 780580 - DNA, 15 bp, Homo sapiens
tttccttaaggaata

SEQ ID NO: 780581 - DNA, 15 bp, Homo sapiens
ttccttaaggaataa

SEQ ID NO: 780582 - DNA, 15 bp, Homo sapiens
tccttaaggaataat

SEQ ID NO: 780583 - DNA, 15 bp, Homo sapiens
ccttaaggaataatt

SEQ ID NO: 780584 - DNA, 15 bp, Homo sapiens
cttaaggaataattt

SEQ ID NO: 780585 - DNA, 15 bp, Homo sapiens
ttaaggaataatttg

SEQ ID NO: 780586 - DNA, 15 bp, Homo sapiens
taaggaataatttgt

SEQ ID NO: 780587 - DNA, 15 bp, Homo sapiens
aaggaataatttgtt

SEQ ID NO: 780588 - DNA, 15 bp, Homo sapiens
aggaataatttgttt

SEQ ID NO: 780589 - DNA, 15 bp, Homo sapiens
ggaataatttgtttt

SEQ ID NO: 780590 - DNA, 15 bp, Homo sapiens
gaataatttgttttg

SEQ ID NO: 780591 - DNA, 15 bp, Homo sapiens
aataatttgttttga

SEQ ID NO: 780592 - DNA, 15 bp, Homo sapiens
ataatttgttttgaa

SEQ ID NO: 780593 - DNA, 15 bp, Homo sapiens
taatttgttttgaat

SEQ ID NO: 780594 - DNA, 15 bp, Homo sapiens
aatttgttttgaata

SEQ ID NO: 780595 - DNA, 15 bp, Homo sapiens
atttgttttgaataa

SEQ ID NO: 780596 - DNA, 15 bp, Homo sapiens
tttgttttgaataaa

SEQ ID NO: 780597 - DNA, 15 bp, Homo sapiens
ttgttttgaataaaa

SEQ ID NO: 780598 - DNA, 15 bp, Homo sapiens
tgttttgaataaaag

SEQ ID NO: 780599 - DNA, 15 bp, Homo sapiens
gttttgaataaaagc

SEQ ID NO: 780600 - DNA, 15 bp, Homo sapiens
ttttgaataaaagct

SEQ ID NO: 780601 - DNA, 15 bp, Homo sapiens
tttgaataaaagctg

SEQ ID NO: 780602 - DNA, 15 bp, Homo sapiens
ttgaataaaagctga

SEQ ID NO: 780603 - DNA, 15 bp, Homo sapiens
tgaataaaagctgaa

SEQ ID NO: 780604 - DNA, 15 bp, Homo sapiens
gaataaaagctgaaa

SEQ ID NO: 780605 - DNA, 15 bp, Homo sapiens
aataaaagctgaaaa

SEQ ID NO: 780606 - DNA, 15 bp, Homo sapiens
ataaaagctgaaaaa

SEQ ID NO: 780607 - DNA, 15 bp, Homo sapiens
taaaagctgaaaaac

SEQ ID NO: 780608 - DNA, 15 bp, Homo sapiens
aaaagctgaaaaaca

SEQ ID NO: 780609 - DNA, 15 bp, Homo sapiens
aaagctgaaaaacat

SEQ ID NO: 780610 - DNA, 15 bp, Homo sapiens
aagctgaaaaacatg

SEQ ID NO: 780611 - DNA, 15 bp, Homo sapiens
agctgaaaaacatgg

SEQ ID NO: 780612 - DNA, 15 bp, Homo sapiens
gctgaaaaacatggc

SEQ ID NO: 780613 - DNA, 15 bp, Homo sapiens
ctgaaaaacatggcc

SEQ ID NO: 780614 - DNA, 15 bp, Homo sapiens
tgaaaaacatggcct

SEQ ID NO: 780615 - DNA, 15 bp, Homo sapiens
gaaaaacatggccta

SEQ ID NO: 780616 - DNA, 15 bp, Homo sapiens
aaaaacatggcctac

SEQ ID NO: 780617 - DNA, 15 bp, Homo sapiens
aaaacatggcctacc

SEQ ID NO: 780618 - DNA, 15 bp, Homo sapiens
aaacatggcctacct

SEQ ID NO: 780619 - DNA, 15 bp, Homo sapiens
aacatggcctaccta

SEQ ID NO: 780620 - DNA, 15 bp, Homo sapiens
acatggcctacctaa

SEQ ID NO: 780621 - DNA, 15 bp, Homo sapiens
catggcctacctaag

SEQ ID NO: 780622 - DNA, 15 bp, Homo sapiens
atggcctacctaaga

SEQ ID NO: 780623 - DNA, 15 bp, Homo sapiens
tggcctacctaagaa

SEQ ID NO: 780624 - DNA, 15 bp, Homo sapiens
ggcctacctaagaac

SEQ ID NO: 780625 - DNA, 15 bp, Homo sapiens
gcctacctaagaacg

SEQ ID NO: 780626 - DNA, 15 bp, Homo sapiens
cctacctaagaacga

SEQ ID NO: 780627 - DNA, 15 bp, Homo sapiens
ctacctaagaacgac

SEQ ID NO: 780628 - DNA, 15 bp, Homo sapiens
tacctaagaacgact

SEQ ID NO: 780629 - DNA, 15 bp, Homo sapiens
acctaagaacgactt

SEQ ID NO: 780630 - DNA, 15 bp, Homo sapiens
cctaagaacgacttg

SEQ ID NO: 780631 - DNA, 15 bp, Homo sapiens
ctaagaacgacttgg

SEQ ID NO: 780632 - DNA, 15 bp, Homo sapiens
taagaacgacttggg

SEQ ID NO: 780633 - DNA, 15 bp, Homo sapiens
aagaacgacttggga

SEQ ID NO: 780634 - DNA, 15 bp, Homo sapiens
agaacgacttgggat

SEQ ID NO: 780635 - DNA, 15 bp, Homo sapiens
gaacgacttgggatg

SEQ ID NO: 780636 - DNA, 15 bp, Homo sapiens
aacgacttgggatgg

SEQ ID NO: 780637 - DNA, 15 bp, Homo sapiens
acgacttgggatggg

SEQ ID NO: 780638 - DNA, 15 bp, Homo sapiens
cgacttgggatgggg

SEQ ID NO: 780639 - DNA, 15 bp, Homo sapiens
gacttgggatggggg

SEQ ID NO: 780640 - DNA, 15 bp, Homo sapiens
acttgggatgggggt

SEQ ID NO: 780641 - DNA, 15 bp, Homo sapiens
cttgggatgggggtg

SEQ ID NO: 780642 - DNA, 15 bp, Homo sapiens
ttgggatgggggtgg

SEQ ID NO: 780643 - DNA, 15 bp, Homo sapiens
tgggatgggggtggt

SEQ ID NO: 780644 - DNA, 15 bp, Homo sapiens
gggatgggggtggtg

SEQ ID NO: 780645 - DNA, 15 bp, Homo sapiens
ggatgggggtggtgg

SEQ ID NO: 780646 - DNA, 15 bp, Homo sapiens
gatgggggtggtgga

SEQ ID NO: 780647 - DNA, 15 bp, Homo sapiens
atgggggtggtggag

SEQ ID NO: 780648 - DNA, 15 bp, Homo sapiens
tgggggtggtggagt

SEQ ID NO: 780649 - DNA, 15 bp, Homo sapiens
gggggtggtggagtg

SEQ ID NO: 780650 - DNA, 15 bp, Homo sapiens
ggggtggtggagtga

SEQ ID NO: 780651 - DNA, 15 bp, Homo sapiens
gggtggtggagtgag

SEQ ID NO: 780652 - DNA, 15 bp, Homo sapiens
ggtggtggagtgagg

SEQ ID NO: 780653 - DNA, 15 bp, Homo sapiens
gtggtggagtgagga

SEQ ID NO: 780654 - DNA, 15 bp, Homo sapiens
tggtggagtgaggag

SEQ ID NO: 780655 - DNA, 15 bp, Homo sapiens
ggtggagtgaggagt

SEQ ID NO: 780656 - DNA, 15 bp, Homo sapiens
gtggagtgaggagtg

SEQ ID NO: 780657 - DNA, 15 bp, Homo sapiens
tggagtgaggagtga

SEQ ID NO: 780658 - DNA, 15 bp, Homo sapiens
ggagtgaggagtgag

SEQ ID NO: 780659 - DNA, 15 bp, Homo sapiens
gagtgaggagtgaga

SEQ ID NO: 780660 - DNA, 15 bp, Homo sapiens
agtgaggagtgagaa

SEQ ID NO: 780661 - DNA, 15 bp, Homo sapiens
gtgaggagtgagaaa

SEQ ID NO: 780662 - DNA, 15 bp, Homo sapiens
tgaggagtgagaaag

SEQ ID NO: 780663 - DNA, 15 bp, Homo sapiens
gaggagtgagaaagg

SEQ ID NO: 780664 - DNA, 15 bp, Homo sapiens
aggagtgagaaaggt

SEQ ID NO: 780665 - DNA, 15 bp, Homo sapiens
ggagtgagaaaggtt

SEQ ID NO: 780666 - DNA, 15 bp, Homo sapiens
gagtgagaaaggttg

SEQ ID NO: 780667 - DNA, 15 bp, Homo sapiens
agtgagaaaggttgt

SEQ ID NO: 780668 - DNA, 15 bp, Homo sapiens
gtgagaaaggttgtt

SEQ ID NO: 780669 - DNA, 15 bp, Homo sapiens
tgagaaaggttgtta

SEQ ID NO: 780670 - DNA, 15 bp, Homo sapiens
gagaaaggttgttat

SEQ ID NO: 780671 - DNA, 15 bp, Homo sapiens
agaaaggttgttatg

SEQ ID NO: 780672 - DNA, 15 bp, Homo sapiens
gaaaggttgttatgg

SEQ ID NO: 780673 - DNA, 15 bp, Homo sapiens
aaaggttgttatggt

SEQ ID NO: 780674 - DNA, 15 bp, Homo sapiens
aaggttgttatggtt

SEQ ID NO: 780675 - DNA, 15 bp, Homo sapiens
aggttgttatggtta

SEQ ID NO: 780676 - DNA, 15 bp, Homo sapiens
ggttgttatggttac

SEQ ID NO: 780677 - DNA, 15 bp, Homo sapiens
gttgttatggttaca

SEQ ID NO: 780678 - DNA, 15 bp, Homo sapiens
ttgttatggttacag

SEQ ID NO: 780679 - DNA, 15 bp, Homo sapiens
tgttatggttacagg

SEQ ID NO: 780680 - DNA, 15 bp, Homo sapiens
gttatggttacaggc

SEQ ID NO: 780681 - DNA, 15 bp, Homo sapiens
ttatggttacaggca

SEQ ID NO: 780682 - DNA, 15 bp, Homo sapiens
tatggttacaggcag

SEQ ID NO: 780683 - DNA, 15 bp, Homo sapiens
atggttacaggcaga

SEQ ID NO: 780684 - DNA, 15 bp, Homo sapiens
tggttacaggcagat

SEQ ID NO: 780685 - DNA, 15 bp, Homo sapiens
ggttacaggcagatt

SEQ ID NO: 780686 - DNA, 15 bp, Homo sapiens
gttacaggcagattg

SEQ ID NO: 780687 - DNA, 15 bp, Homo sapiens
ttacaggcagattgt

SEQ ID NO: 780688 - DNA, 15 bp, Homo sapiens
tacaggcagattgtg

SEQ ID NO: 780689 - DNA, 15 bp, Homo sapiens
acaggcagattgtgc

SEQ ID NO: 780690 - DNA, 15 bp, Homo sapiens
caggcagattgtgca

SEQ ID NO: 780691 - DNA, 15 bp, Homo sapiens
aggcagattgtgcat

SEQ ID NO: 780692 - DNA, 15 bp, Homo sapiens
ggcagattgtgcata

SEQ ID NO: 780693 - DNA, 15 bp, Homo sapiens
gcagattgtgcatat

SEQ ID NO: 780694 - DNA, 15 bp, Homo sapiens
cagattgtgcatata

SEQ ID NO: 780695 - DNA, 15 bp, Homo sapiens
agattgtgcatatat

SEQ ID NO: 780696 - DNA, 15 bp, Homo sapiens
gattgtgcatatatt

SEQ ID NO: 780697 - DNA, 15 bp, Homo sapiens
attgtgcatatattt

SEQ ID NO: 780698 - DNA, 15 bp, Homo sapiens
ttgtgcatatatttt

SEQ ID NO: 780699 - DNA, 15 bp, Homo sapiens
tgtgcatatattttt

SEQ ID NO: 780700 - DNA, 15 bp, Homo sapiens
gtgcatatattttta

SEQ ID NO: 780701 - DNA, 15 bp, Homo sapiens
tgcatatatttttaa

SEQ ID NO: 780702 - DNA, 15 bp, Homo sapiens
gcatatatttttaaa

SEQ ID NO: 780703 - DNA, 15 bp, Homo sapiens
catatatttttaaac

SEQ ID NO: 780704 - DNA, 15 bp, Homo sapiens
atatatttttaaact

SEQ ID NO: 780705 - DNA, 15 bp, Homo sapiens
tatatttttaaactt

SEQ ID NO: 780706 - DNA, 15 bp, Homo sapiens
atatttttaaacttc

SEQ ID NO: 780707 - DNA, 15 bp, Homo sapiens
tatttttaaacttct

SEQ ID NO: 780708 - DNA, 15 bp, Homo sapiens
atttttaaacttctg

SEQ ID NO: 780709 - DNA, 15 bp, Homo sapiens
tttttaaacttctgg

SEQ ID NO: 780710 - DNA, 15 bp, Homo sapiens
ttttaaacttctgga

SEQ ID NO: 780711 - DNA, 15 bp, Homo sapiens
tttaaacttctggat

SEQ ID NO: 780712 - DNA, 15 bp, Homo sapiens
ttaaacttctggatt

SEQ ID NO: 780713 - DNA, 15 bp, Homo sapiens
taaacttctggattt

SEQ ID NO: 780714 - DNA, 15 bp, Homo sapiens
aaacttctggatttg

SEQ ID NO: 780715 - DNA, 15 bp, Homo sapiens
aacttctggatttgt

SEQ ID NO: 780716 - DNA, 15 bp, Homo sapiens
acttctggatttgta

SEQ ID NO: 780717 - DNA, 15 bp, Homo sapiens
cttctggatttgtac

SEQ ID NO: 780718 - DNA, 15 bp, Homo sapiens
ttctggatttgtaca

SEQ ID NO: 780719 - DNA, 15 bp, Homo sapiens
tctggatttgtacaa

SEQ ID NO: 780720 - DNA, 15 bp, Homo sapiens
ctggatttgtacaaa

SEQ ID NO: 780721 - DNA, 15 bp, Homo sapiens
tggatttgtacaaag

SEQ ID NO: 780722 - DNA, 15 bp, Homo sapiens
ggatttgtacaaagt

SEQ ID NO: 780723 - DNA, 15 bp, Homo sapiens
gatttgtacaaagtg

SEQ ID NO: 780724 - DNA, 15 bp, Homo sapiens
atttgtacaaagtgg

SEQ ID NO: 780725 - DNA, 15 bp, Homo sapiens
tttgtacaaagtggc

SEQ ID NO: 780726 - DNA, 15 bp, Homo sapiens
ttgtacaaagtggcc

SEQ ID NO: 780727 - DNA, 15 bp, Homo sapiens
tgtacaaagtggcct

SEQ ID NO: 780728 - DNA, 15 bp, Homo sapiens
gtacaaagtggcctg

SEQ ID NO: 780729 - DNA, 15 bp, Homo sapiens
tacaaagtggcctga

SEQ ID NO: 780730 - DNA, 15 bp, Homo sapiens
acaaagtggcctgaa

SEQ ID NO: 780731 - DNA, 15 bp, Homo sapiens
caaagtggcctgaat

SEQ ID NO: 780732 - DNA, 15 bp, Homo sapiens
aaagtggcctgaatg

SEQ ID NO: 780733 - DNA, 15 bp, Homo sapiens
aagtggcctgaatgc

SEQ ID NO: 780734 - DNA, 15 bp, Homo sapiens
agtggcctgaatgca

SEQ ID NO: 780735 - DNA, 15 bp, Homo sapiens
gtggcctgaatgcag

SEQ ID NO: 780736 - DNA, 15 bp, Homo sapiens
tggcctgaatgcaga

SEQ ID NO: 780737 - DNA, 15 bp, Homo sapiens
ggcctgaatgcagac

SEQ ID NO: 780738 - DNA, 15 bp, Homo sapiens
gcctgaatgcagact

SEQ ID NO: 780739 - DNA, 15 bp, Homo sapiens
cctgaatgcagactt

SEQ ID NO: 780740 - DNA, 15 bp, Homo sapiens
ctgaatgcagacttg

SEQ ID NO: 780741 - DNA, 15 bp, Homo sapiens
tgaatgcagacttgc

SEQ ID NO: 780742 - DNA, 15 bp, Homo sapiens
gaatgcagacttgct

SEQ ID NO: 780743 - DNA, 15 bp, Homo sapiens
aatgcagacttgctc

SEQ ID NO: 780744 - DNA, 15 bp, Homo sapiens
atgcagacttgctca

SEQ ID NO: 780745 - DNA, 15 bp, Homo sapiens
tgcagacttgctcac

SEQ ID NO: 780746 - DNA, 15 bp, Homo sapiens
gcagacttgctcaca

SEQ ID NO: 780747 - DNA, 15 bp, Homo sapiens
cagacttgctcacaa

SEQ ID NO: 780748 - DNA, 15 bp, Homo sapiens
agacttgctcacaat

SEQ ID NO: 780749 - DNA, 15 bp, Homo sapiens
gacttgctcacaatt

SEQ ID NO: 780750 - DNA, 15 bp, Homo sapiens
acttgctcacaattt

SEQ ID NO: 780751 - DNA, 15 bp, Homo sapiens
cttgctcacaatttg

SEQ ID NO: 780752 - DNA, 15 bp, Homo sapiens
ttgctcacaatttgc

SEQ ID NO: 780753 - DNA, 15 bp, Homo sapiens
tgctcacaatttgca

SEQ ID NO: 780754 - DNA, 15 bp, Homo sapiens
gctcacaatttgcag

SEQ ID NO: 780755 - DNA, 15 bp, Homo sapiens
ctcacaatttgcagt

SEQ ID NO: 780756 - DNA, 15 bp, Homo sapiens
tcacaatttgcagtg

SEQ ID NO: 780757 - DNA, 15 bp, Homo sapiens
cacaatttgcagtga

SEQ ID NO: 780758 - DNA, 15 bp, Homo sapiens
acaatttgcagtgat

SEQ ID NO: 780759 - DNA, 15 bp, Homo sapiens
caatttgcagtgatc

SEQ ID NO: 780760 - DNA, 15 bp, Homo sapiens
aatttgcagtgatct

SEQ ID NO: 780761 - DNA, 15 bp, Homo sapiens
atttgcagtgatctt

SEQ ID NO: 780762 - DNA, 15 bp, Homo sapiens
tttgcagtgatcttt

SEQ ID NO: 780763 - DNA, 15 bp, Homo sapiens
ttgcagtgatcttta

SEQ ID NO: 780764 - DNA, 15 bp, Homo sapiens
tgcagtgatctttat

SEQ ID NO: 780765 - DNA, 15 bp, Homo sapiens
gcagtgatctttatc

SEQ ID NO: 780766 - DNA, 15 bp, Homo sapiens
cagtgatctttatct

SEQ ID NO: 780767 - DNA, 15 bp, Homo sapiens
agtgatctttatctg

SEQ ID NO: 780768 - DNA, 15 bp, Homo sapiens
gtgatctttatctgc

SEQ ID NO: 780769 - DNA, 15 bp, Homo sapiens
tgatctttatctgcg

SEQ ID NO: 780770 - DNA, 15 bp, Homo sapiens
gatctttatctgcgg

SEQ ID NO: 780771 - DNA, 15 bp, Homo sapiens
atctttatctgcggg

SEQ ID NO: 780772 - DNA, 15 bp, Homo sapiens
tctttatctgcgggc

SEQ ID NO: 780773 - DNA, 15 bp, Homo sapiens
ctttatctgcgggcc

SEQ ID NO: 780774 - DNA, 15 bp, Homo sapiens
tttatctgcgggcca

SEQ ID NO: 780775 - DNA, 15 bp, Homo sapiens
ttatctgcgggccag

SEQ ID NO: 780776 - DNA, 15 bp, Homo sapiens
tatctgcgggccagt

SEQ ID NO: 780777 - DNA, 15 bp, Homo sapiens
atctgcgggccagtg

SEQ ID NO: 780778 - DNA, 15 bp, Homo sapiens
tctgcgggccagtgg

SEQ ID NO: 780779 - DNA, 15 bp, Homo sapiens
ctgcgggccagtgga

SEQ ID NO: 780780 - DNA, 15 bp, Homo sapiens
tgcgggccagtggag

SEQ ID NO: 780781 - DNA, 15 bp, Homo sapiens
gcgggccagtggaga

SEQ ID NO: 780782 - DNA, 15 bp, Homo sapiens
cgggccagtggagaa

SEQ ID NO: 780783 - DNA, 15 bp, Homo sapiens
gggccagtggagaaa

SEQ ID NO: 780784 - DNA, 15 bp, Homo sapiens
ggccagtggagaaat

SEQ ID NO: 780785 - DNA, 15 bp, Homo sapiens
gccagtggagaaatg

SEQ ID NO: 780786 - DNA, 15 bp, Homo sapiens
ccagtggagaaatgt

SEQ ID NO: 780787 - DNA, 15 bp, Homo sapiens
cagtggagaaatgta

SEQ ID NO: 780788 - DNA, 15 bp, Homo sapiens
agtggagaaatgtag

SEQ ID NO: 780789 - DNA, 15 bp, Homo sapiens
gtggagaaatgtagt

SEQ ID NO: 780790 - DNA, 15 bp, Homo sapiens
tggagaaatgtagtt

SEQ ID NO: 780791 - DNA, 15 bp, Homo sapiens
ggagaaatgtagtta

SEQ ID NO: 780792 - DNA, 15 bp, Homo sapiens
gagaaatgtagttaa

SEQ ID NO: 780793 - DNA, 15 bp, Homo sapiens
agaaatgtagttaat

SEQ ID NO: 780794 - DNA, 15 bp, Homo sapiens
gaaatgtagttaatt

SEQ ID NO: 780795 - DNA, 15 bp, Homo sapiens
aaatgtagttaatta

SEQ ID NO: 780796 - DNA, 15 bp, Homo sapiens
aatgtagttaattat

SEQ ID NO: 780797 - DNA, 15 bp, Homo sapiens
atgtagttaattata

SEQ ID NO: 780798 - DNA, 15 bp, Homo sapiens
tgtagttaattatac

SEQ ID NO: 780799 - DNA, 15 bp, Homo sapiens
gtagttaattataca

SEQ ID NO: 780800 - DNA, 15 bp, Homo sapiens
tagttaattatacag

SEQ ID NO: 780801 - DNA, 15 bp, Homo sapiens
agttaattatacagt

SEQ ID NO: 780802 - DNA, 15 bp, Homo sapiens
gttaattatacagtt

SEQ ID NO: 780803 - DNA, 15 bp, Homo sapiens
ttaattatacagttt

SEQ ID NO: 780804 - DNA, 15 bp, Homo sapiens
taattatacagtttc

SEQ ID NO: 780805 - DNA, 15 bp, Homo sapiens
aattatacagtttct

SEQ ID NO: 780806 - DNA, 15 bp, Homo sapiens
attatacagtttctt

SEQ ID NO: 780807 - DNA, 15 bp, Homo sapiens
ttatacagtttctta

SEQ ID NO: 780808 - DNA, 15 bp, Homo sapiens
tatacagtttcttac

SEQ ID NO: 780809 - DNA, 15 bp, Homo sapiens
atacagtttcttact

SEQ ID NO: 780810 - DNA, 15 bp, Homo sapiens
tacagtttcttactt

SEQ ID NO: 780811 - DNA, 15 bp, Homo sapiens
acagtttcttacttc

SEQ ID NO: 780812 - DNA, 15 bp, Homo sapiens
cagtttcttacttca

SEQ ID NO: 780813 - DNA, 15 bp, Homo sapiens
agtttcttacttcaa

SEQ ID NO: 780814 - DNA, 15 bp, Homo sapiens
gtttcttacttcaaa

SEQ ID NO: 780815 - DNA, 15 bp, Homo sapiens
tttcttacttcaaac

SEQ ID NO: 780816 - DNA, 15 bp, Homo sapiens
ttcttacttcaaact

SEQ ID NO: 780817 - DNA, 15 bp, Homo sapiens
tcttacttcaaactt

SEQ ID NO: 780818 - DNA, 15 bp, Homo sapiens
cttacttcaaacttc

SEQ ID NO: 780819 - DNA, 15 bp, Homo sapiens
ttacttcaaacttca

SEQ ID NO: 780820 - DNA, 15 bp, Homo sapiens
tacttcaaacttcag

SEQ ID NO: 780821 - DNA, 15 bp, Homo sapiens
acttcaaacttcaga

SEQ ID NO: 780822 - DNA, 15 bp, Homo sapiens
cttcaaacttcagat

SEQ ID NO: 780823 - DNA, 15 bp, Homo sapiens
ttcaaacttcagatt

SEQ ID NO: 780824 - DNA, 15 bp, Homo sapiens
tcaaacttcagattg

SEQ ID NO: 780825 - DNA, 15 bp, Homo sapiens
caaacttcagattgt

SEQ ID NO: 780826 - DNA, 15 bp, Homo sapiens
aaacttcagattgtt

SEQ ID NO: 780827 - DNA, 15 bp, Homo sapiens
aacttcagattgttt

SEQ ID NO: 780828 - DNA, 15 bp, Homo sapiens
acttcagattgtttg

SEQ ID NO: 780829 - DNA, 15 bp, Homo sapiens
cttcagattgtttgg

SEQ ID NO: 780830 - DNA, 15 bp, Homo sapiens
ttcagattgtttggc

SEQ ID NO: 780831 - DNA, 15 bp, Homo sapiens
tcagattgtttggct

SEQ ID NO: 780832 - DNA, 15 bp, Homo sapiens
cagattgtttggctg

SEQ ID NO: 780833 - DNA, 15 bp, Homo sapiens
agattgtttggctga

SEQ ID NO: 780834 - DNA, 15 bp, Homo sapiens
gattgtttggctgaa

SEQ ID NO: 780835 - DNA, 15 bp, Homo sapiens
attgtttggctgaag

SEQ ID NO: 780836 - DNA, 15 bp, Homo sapiens
ttgtttggctgaagt

SEQ ID NO: 780837 - DNA, 15 bp, Homo sapiens
tgtttggctgaagtt

SEQ ID NO: 780838 - DNA, 15 bp, Homo sapiens
gtttggctgaagtta

SEQ ID NO: 780839 - DNA, 15 bp, Homo sapiens
tttggctgaagttag

SEQ ID NO: 780840 - DNA, 15 bp, Homo sapiens
ttggctgaagttagc

SEQ ID NO: 780841 - DNA, 15 bp, Homo sapiens
tggctgaagttagca

SEQ ID NO: 780842 - DNA, 15 bp, Homo sapiens
ggctgaagttagcat

SEQ ID NO: 780843 - DNA, 15 bp, Homo sapiens
gctgaagttagcatt

SEQ ID NO: 780844 - DNA, 15 bp, Homo sapiens
ctgaagttagcattt

SEQ ID NO: 780845 - DNA, 15 bp, Homo sapiens
tgaagttagcatttg

SEQ ID NO: 780846 - DNA, 15 bp, Homo sapiens
gaagttagcatttgt

SEQ ID NO: 780847 - DNA, 15 bp, Homo sapiens
aagttagcatttgtg

SEQ ID NO: 780848 - DNA, 15 bp, Homo sapiens
agttagcatttgtgt

SEQ ID NO: 780849 - DNA, 15 bp, Homo sapiens
gttagcatttgtgtc

SEQ ID NO: 780850 - DNA, 15 bp, Homo sapiens
ttagcatttgtgtcc

SEQ ID NO: 780851 - DNA, 15 bp, Homo sapiens
tagcatttgtgtcca

SEQ ID NO: 780852 - DNA, 15 bp, Homo sapiens
agcatttgtgtccat

SEQ ID NO: 780853 - DNA, 15 bp, Homo sapiens
gcatttgtgtccatt

SEQ ID NO: 780854 - DNA, 15 bp, Homo sapiens
catttgtgtccattc

SEQ ID NO: 780855 - DNA, 15 bp, Homo sapiens
atttgtgtccattcc

SEQ ID NO: 780856 - DNA, 15 bp, Homo sapiens
tttgtgtccattcca

SEQ ID NO: 780857 - DNA, 15 bp, Homo sapiens
ttgtgtccattccac

SEQ ID NO: 780858 - DNA, 15 bp, Homo sapiens
tgtgtccattccact

SEQ ID NO: 780859 - DNA, 15 bp, Homo sapiens
gtgtccattccactg

SEQ ID NO: 780860 - DNA, 15 bp, Homo sapiens
tgtccattccactgg

SEQ ID NO: 780861 - DNA, 15 bp, Homo sapiens
gtccattccactggt

SEQ ID NO: 780862 - DNA, 15 bp, Homo sapiens
tccattccactggtt

SEQ ID NO: 780863 - DNA, 15 bp, Homo sapiens
ccattccactggttt

SEQ ID NO: 780864 - DNA, 15 bp, Homo sapiens
cattccactggtttt

SEQ ID NO: 780865 - DNA, 15 bp, Homo sapiens
attccactggttttg

SEQ ID NO: 780866 - DNA, 15 bp, Homo sapiens
ttccactggttttgc

SEQ ID NO: 780867 - DNA, 15 bp, Homo sapiens
tccactggttttgct

SEQ ID NO: 780868 - DNA, 15 bp, Homo sapiens
ccactggttttgctt

SEQ ID NO: 780869 - DNA, 15 bp, Homo sapiens
cactggttttgcttt

SEQ ID NO: 780870 - DNA, 15 bp, Homo sapiens
actggttttgcttta

SEQ ID NO: 780871 - DNA, 15 bp, Homo sapiens
ctggttttgctttat

SEQ ID NO: 780872 - DNA, 15 bp, Homo sapiens
tggttttgctttatt

SEQ ID NO: 780873 - DNA, 15 bp, Homo sapiens
ggttttgctttattt

SEQ ID NO: 780874 - DNA, 15 bp, Homo sapiens
gttttgctttatttg

SEQ ID NO: 780875 - DNA, 15 bp, Homo sapiens
ttttgctttatttgg

SEQ ID NO: 780876 - DNA, 15 bp, Homo sapiens
tttgctttatttggg

SEQ ID NO: 780877 - DNA, 15 bp, Homo sapiens
ttgctttatttggga

SEQ ID NO: 780878 - DNA, 15 bp, Homo sapiens
tgctttatttgggag

SEQ ID NO: 780879 - DNA, 15 bp, Homo sapiens
gctttatttgggagc

SEQ ID NO: 780880 - DNA, 15 bp, Homo sapiens
ctttatttgggagct

SEQ ID NO: 780881 - DNA, 15 bp, Homo sapiens
tttatttgggagcta

SEQ ID NO: 780882 - DNA, 15 bp, Homo sapiens
ttatttgggagctaa

SEQ ID NO: 780883 - DNA, 15 bp, Homo sapiens
tatttgggagctaaa

SEQ ID NO: 780884 - DNA, 15 bp, Homo sapiens
atttgggagctaaac

SEQ ID NO: 780885 - DNA, 15 bp, Homo sapiens
tttgggagctaaact

SEQ ID NO: 780886 - DNA, 15 bp, Homo sapiens
ttgggagctaaactg

SEQ ID NO: 780887 - DNA, 15 bp, Homo sapiens
tgggagctaaactgc

SEQ ID NO: 780888 - DNA, 15 bp, Homo sapiens
gggagctaaactgct

SEQ ID NO: 780889 - DNA, 15 bp, Homo sapiens
ggagctaaactgctg

SEQ ID NO: 780890 - DNA, 15 bp, Homo sapiens
gagctaaactgctgt

SEQ ID NO: 780891 - DNA, 15 bp, Homo sapiens
agctaaactgctgtt

SEQ ID NO: 780892 - DNA, 15 bp, Homo sapiens
gctaaactgctgttt

SEQ ID NO: 780893 - DNA, 15 bp, Homo sapiens
ctaaactgctgtttt

SEQ ID NO: 780894 - DNA, 15 bp, Homo sapiens
taaactgctgttttc

SEQ ID NO: 780895 - DNA, 15 bp, Homo sapiens
aaactgctgttttcc

SEQ ID NO: 780896 - DNA, 15 bp, Homo sapiens
aactgctgttttcct

SEQ ID NO: 780897 - DNA, 15 bp, Homo sapiens
actgctgttttcctc

SEQ ID NO: 780898 - DNA, 15 bp, Homo sapiens
ctgctgttttcctct

SEQ ID NO: 780899 - DNA, 15 bp, Homo sapiens
tgctgttttcctctc

SEQ ID NO: 780900 - DNA, 15 bp, Homo sapiens
gctgttttcctctca

SEQ ID NO: 780901 - DNA, 15 bp, Homo sapiens
ctgttttcctctcag

SEQ ID NO: 780902 - DNA, 15 bp, Homo sapiens
tgttttcctctcaga

SEQ ID NO: 780903 - DNA, 15 bp, Homo sapiens
gttttcctctcagat

SEQ ID NO: 780904 - DNA, 15 bp, Homo sapiens
ttttcctctcagata

SEQ ID NO: 780905 - DNA, 15 bp, Homo sapiens
tttcctctcagatat

SEQ ID NO: 780906 - DNA, 15 bp, Homo sapiens
ttcctctcagatatg

SEQ ID NO: 780907 - DNA, 15 bp, Homo sapiens
tcctctcagatatgc

SEQ ID NO: 780908 - DNA, 15 bp, Homo sapiens
cctctcagatatgca

SEQ ID NO: 780909 - DNA, 15 bp, Homo sapiens
ctctcagatatgcag

SEQ ID NO: 780910 - DNA, 15 bp, Homo sapiens
tctcagatatgcagt

SEQ ID NO: 780911 - DNA, 15 bp, Homo sapiens
ctcagatatgcagtt

SEQ ID NO: 780912 - DNA, 15 bp, Homo sapiens
tcagatatgcagttt

SEQ ID NO: 780913 - DNA, 15 bp, Homo sapiens
cagatatgcagtttc

SEQ ID NO: 780914 - DNA, 15 bp, Homo sapiens
agatatgcagtttct

SEQ ID NO: 780915 - DNA, 15 bp, Homo sapiens
gatatgcagtttctg

SEQ ID NO: 780916 - DNA, 15 bp, Homo sapiens
atatgcagtttctga

SEQ ID NO: 780917 - DNA, 15 bp, Homo sapiens
tatgcagtttctgat

SEQ ID NO: 780918 - DNA, 15 bp, Homo sapiens
atgcagtttctgata

SEQ ID NO: 780919 - DNA, 15 bp, Homo sapiens
tgcagtttctgataa

SEQ ID NO: 780920 - DNA, 15 bp, Homo sapiens
gcagtttctgataaa

SEQ ID NO: 780921 - DNA, 15 bp, Homo sapiens
cagtttctgataaac

SEQ ID NO: 780922 - DNA, 15 bp, Homo sapiens
agtttctgataaacc

SEQ ID NO: 780923 - DNA, 15 bp, Homo sapiens
gtttctgataaaccc

SEQ ID NO: 780924 - DNA, 15 bp, Homo sapiens
tttctgataaaccct

SEQ ID NO: 780925 - DNA, 15 bp, Homo sapiens
ttctgataaaccctg

SEQ ID NO: 780926 - DNA, 15 bp, Homo sapiens
tctgataaaccctgc

SEQ ID NO: 780927 - DNA, 15 bp, Homo sapiens
ctgataaaccctgct

SEQ ID NO: 780928 - DNA, 15 bp, Homo sapiens
tgataaaccctgctg

SEQ ID NO: 780929 - DNA, 15 bp, Homo sapiens
gataaaccctgctga

SEQ ID NO: 780930 - DNA, 15 bp, Homo sapiens
ataaaccctgctgat

SEQ ID NO: 780931 - DNA, 15 bp, Homo sapiens
taaaccctgctgata

SEQ ID NO: 780932 - DNA, 15 bp, Homo sapiens
aaaccctgctgatat

SEQ ID NO: 780933 - DNA, 15 bp, Homo sapiens
aaccctgctgatata

SEQ ID NO: 780934 - DNA, 15 bp, Homo sapiens
accctgctgatatat

SEQ ID NO: 780935 - DNA, 15 bp, Homo sapiens
ccctgctgatatatt

SEQ ID NO: 780936 - DNA, 15 bp, Homo sapiens
cctgctgatatattc

SEQ ID NO: 780937 - DNA, 15 bp, Homo sapiens
ctgctgatatattct

SEQ ID NO: 780938 - DNA, 15 bp, Homo sapiens
tgctgatatattctg

SEQ ID NO: 780939 - DNA, 15 bp, Homo sapiens
gctgatatattctgc

SEQ ID NO: 780940 - DNA, 15 bp, Homo sapiens
ctgatatattctgcc

SEQ ID NO: 780941 - DNA, 15 bp, Homo sapiens
tgatatattctgcca

SEQ ID NO: 780942 - DNA, 15 bp, Homo sapiens
gatatattctgccac

SEQ ID NO: 780943 - DNA, 15 bp, Homo sapiens
atatattctgccaca

SEQ ID NO: 780944 - DNA, 15 bp, Homo sapiens
tatattctgccacat

SEQ ID NO: 780945 - DNA, 15 bp, Homo sapiens
atattctgccacatc

SEQ ID NO: 780946 - DNA, 15 bp, Homo sapiens
tattctgccacatca

SEQ ID NO: 780947 - DNA, 15 bp, Homo sapiens
attctgccacatcac

SEQ ID NO: 780948 - DNA, 15 bp, Homo sapiens
ttctgccacatcacc

SEQ ID NO: 780949 - DNA, 15 bp, Homo sapiens
tctgccacatcacca

SEQ ID NO: 780950 - DNA, 15 bp, Homo sapiens
ctgccacatcaccat

SEQ ID NO: 780951 - DNA, 15 bp, Homo sapiens
tgccacatcaccatg

SEQ ID NO: 780952 - DNA, 15 bp, Homo sapiens
gccacatcaccatgt

SEQ ID NO: 780953 - DNA, 15 bp, Homo sapiens
ccacatcaccatgtt

SEQ ID NO: 780954 - DNA, 15 bp, Homo sapiens
cacatcaccatgttt

SEQ ID NO: 780955 - DNA, 15 bp, Homo sapiens
acatcaccatgtttc

SEQ ID NO: 780956 - DNA, 15 bp, Homo sapiens
catcaccatgtttct

SEQ ID NO: 780957 - DNA, 15 bp, Homo sapiens
atcaccatgtttctc

SEQ ID NO: 780958 - DNA, 15 bp, Homo sapiens
tcaccatgtttctca

SEQ ID NO: 780959 - DNA, 15 bp, Homo sapiens
caccatgtttctcac

SEQ ID NO: 780960 - DNA, 15 bp, Homo sapiens
accatgtttctcact

SEQ ID NO: 780961 - DNA, 15 bp, Homo sapiens
ccatgtttctcacta

SEQ ID NO: 780962 - DNA, 15 bp, Homo sapiens
catgtttctcactac

SEQ ID NO: 780963 - DNA, 15 bp, Homo sapiens
atgtttctcactacc

SEQ ID NO: 780964 - DNA, 15 bp, Homo sapiens
tgtttctcactacca

SEQ ID NO: 780965 - DNA, 15 bp, Homo sapiens
gtttctcactaccat

SEQ ID NO: 780966 - DNA, 15 bp, Homo sapiens
tttctcactaccatt

SEQ ID NO: 780967 - DNA, 15 bp, Homo sapiens
ttctcactaccattt

SEQ ID NO: 780968 - DNA, 15 bp, Homo sapiens
tctcactaccatttc

SEQ ID NO: 780969 - DNA, 15 bp, Homo sapiens
ctcactaccatttct

SEQ ID NO: 780970 - DNA, 15 bp, Homo sapiens
tcactaccatttctt

SEQ ID NO: 780971 - DNA, 15 bp, Homo sapiens
cactaccatttctta

SEQ ID NO: 780972 - DNA, 15 bp, Homo sapiens
actaccatttcttaa

SEQ ID NO: 780973 - DNA, 15 bp, Homo sapiens
ctaccatttcttaat

SEQ ID NO: 780974 - DNA, 15 bp, Homo sapiens
taccatttcttaatt

SEQ ID NO: 780975 - DNA, 15 bp, Homo sapiens
accatttcttaattc

SEQ ID NO: 780976 - DNA, 15 bp, Homo sapiens
ccatttcttaattca

SEQ ID NO: 780977 - DNA, 15 bp, Homo sapiens
catttcttaattcag

SEQ ID NO: 780978 - DNA, 15 bp, Homo sapiens
atttcttaattcagc

SEQ ID NO: 780979 - DNA, 15 bp, Homo sapiens
tttcttaattcagct

SEQ ID NO: 780980 - DNA, 15 bp, Homo sapiens
ttcttaattcagctt

SEQ ID NO: 780981 - DNA, 15 bp, Homo sapiens
tcttaattcagctta

SEQ ID NO: 780982 - DNA, 15 bp, Homo sapiens
cttaattcagcttag

SEQ ID NO: 780983 - DNA, 15 bp, Homo sapiens
ttaattcagcttagt

SEQ ID NO: 780984 - DNA, 15 bp, Homo sapiens
taattcagcttagtt

SEQ ID NO: 780985 - DNA, 15 bp, Homo sapiens
aattcagcttagttt

SEQ ID NO: 780986 - DNA, 15 bp, Homo sapiens
attcagcttagttta

SEQ ID NO: 780987 - DNA, 15 bp, Homo sapiens
ttcagcttagtttat

SEQ ID NO: 780988 - DNA, 15 bp, Homo sapiens
tcagcttagtttatg

SEQ ID NO: 780989 - DNA, 15 bp, Homo sapiens
cagcttagtttatga

SEQ ID NO: 780990 - DNA, 15 bp, Homo sapiens
agcttagtttatgag

SEQ ID NO: 780991 - DNA, 15 bp, Homo sapiens
gcttagtttatgagc

SEQ ID NO: 780992 - DNA, 15 bp, Homo sapiens
cttagtttatgagct

SEQ ID NO: 780993 - DNA, 15 bp, Homo sapiens
ttagtttatgagctg

SEQ ID NO: 780994 - DNA, 15 bp, Homo sapiens
tagtttatgagctga

SEQ ID NO: 780995 - DNA, 15 bp, Homo sapiens
agtttatgagctgat

SEQ ID NO: 780996 - DNA, 15 bp, Homo sapiens
gtttatgagctgatg

SEQ ID NO: 780997 - DNA, 15 bp, Homo sapiens
tttatgagctgatga

SEQ ID NO: 780998 - DNA, 15 bp, Homo sapiens
ttatgagctgatgat

SEQ ID NO: 780999 - DNA, 15 bp, Homo sapiens
tatgagctgatgata

SEQ ID NO: 781000 - DNA, 15 bp, Homo sapiens
atgagctgatgataa

SEQ ID NO: 781001 - DNA, 15 bp, Homo sapiens
tgagctgatgataaa

SEQ ID NO: 781002 - DNA, 15 bp, Homo sapiens
gagctgatgataaat

SEQ ID NO: 781003 - DNA, 15 bp, Homo sapiens
agctgatgataaata

SEQ ID NO: 781004 - DNA, 15 bp, Homo sapiens
gctgatgataaatag

SEQ ID NO: 781005 - DNA, 15 bp, Homo sapiens
ctgatgataaatagg

SEQ ID NO: 781006 - DNA, 15 bp, Homo sapiens
tgatgataaataggc

SEQ ID NO: 781007 - DNA, 15 bp, Homo sapiens
gatgataaataggca

SEQ ID NO: 781008 - DNA, 15 bp, Homo sapiens
atgataaataggcat

SEQ ID NO: 781009 - DNA, 15 bp, Homo sapiens
tgataaataggcatt

SEQ ID NO: 781010 - DNA, 15 bp, Homo sapiens
gataaataggcattt

SEQ ID NO: 781011 - DNA, 15 bp, Homo sapiens
ataaataggcattta

SEQ ID NO: 781012 - DNA, 15 bp, Homo sapiens
taaataggcatttaa

SEQ ID NO: 781013 - DNA, 15 bp, Homo sapiens
aaataggcatttaaa

SEQ ID NO: 781014 - DNA, 15 bp, Homo sapiens
aataggcatttaaaa

SEQ ID NO: 781015 - DNA, 15 bp, Homo sapiens
ataggcatttaaaag

SEQ ID NO: 781016 - DNA, 15 bp, Homo sapiens
taggcatttaaaagg

SEQ ID NO: 781017 - DNA, 15 bp, Homo sapiens
aggcatttaaaaggg

SEQ ID NO: 781018 - DNA, 15 bp, Homo sapiens
ggcatttaaaagggc

SEQ ID NO: 781019 - DNA, 15 bp, Homo sapiens
gcatttaaaagggcc

SEQ ID NO: 781020 - DNA, 15 bp, Homo sapiens
catttaaaagggccc

SEQ ID NO: 781021 - DNA, 15 bp, Homo sapiens
atttaaaagggccca

SEQ ID NO: 781022 - DNA, 15 bp, Homo sapiens
tttaaaagggcccag

SEQ ID NO: 781023 - DNA, 15 bp, Homo sapiens
ttaaaagggcccagt

SEQ ID NO: 781024 - DNA, 15 bp, Homo sapiens
taaaagggcccagta

SEQ ID NO: 781025 - DNA, 15 bp, Homo sapiens
aaaagggcccagtaa

SEQ ID NO: 781026 - DNA, 15 bp, Homo sapiens
aaagggcccagtaac

SEQ ID NO: 781027 - DNA, 15 bp, Homo sapiens
aagggcccagtaaca

SEQ ID NO: 781028 - DNA, 15 bp, Homo sapiens
agggcccagtaacat

SEQ ID NO: 781029 - DNA, 15 bp, Homo sapiens
gggcccagtaacatt

SEQ ID NO: 781030 - DNA, 15 bp, Homo sapiens
ggcccagtaacattc

SEQ ID NO: 781031 - DNA, 15 bp, Homo sapiens
gcccagtaacattct

SEQ ID NO: 781032 - DNA, 15 bp, Homo sapiens
cccagtaacattctg

SEQ ID NO: 781033 - DNA, 15 bp, Homo sapiens
ccagtaacattctga

SEQ ID NO: 781034 - DNA, 15 bp, Homo sapiens
cagtaacattctgaa

SEQ ID NO: 781035 - DNA, 15 bp, Homo sapiens
agtaacattctgaat

SEQ ID NO: 781036 - DNA, 15 bp, Homo sapiens
gtaacattctgaatt

SEQ ID NO: 781037 - DNA, 15 bp, Homo sapiens
taacattctgaattt

SEQ ID NO: 781038 - DNA, 15 bp, Homo sapiens
aacattctgaatttg

SEQ ID NO: 781039 - DNA, 15 bp, Homo sapiens
acattctgaatttga

SEQ ID NO: 781040 - DNA, 15 bp, Homo sapiens
cattctgaatttgag

SEQ ID NO: 781041 - DNA, 15 bp, Homo sapiens
attctgaatttgagt

SEQ ID NO: 781042 - DNA, 15 bp, Homo sapiens
ttctgaatttgagtt

SEQ ID NO: 781043 - DNA, 15 bp, Homo sapiens
tctgaatttgagttt

SEQ ID NO: 781044 - DNA, 15 bp, Homo sapiens
ctgaatttgagttta

SEQ ID NO: 781045 - DNA, 15 bp, Homo sapiens
tgaatttgagtttat

SEQ ID NO: 781046 - DNA, 15 bp, Homo sapiens
gaatttgagtttata

SEQ ID NO: 781047 - DNA, 15 bp, Homo sapiens
aatttgagtttatag

SEQ ID NO: 781048 - DNA, 15 bp, Homo sapiens
atttgagtttatagg

SEQ ID NO: 781049 - DNA, 15 bp, Homo sapiens
tttgagtttatagga

SEQ ID NO: 781050 - DNA, 15 bp, Homo sapiens
ttgagtttataggaa

SEQ ID NO: 781051 - DNA, 15 bp, Homo sapiens
tgagtttataggaac

SEQ ID NO: 781052 - DNA, 15 bp, Homo sapiens
gagtttataggaaca

SEQ ID NO: 781053 - DNA, 15 bp, Homo sapiens
agtttataggaacat

SEQ ID NO: 781054 - DNA, 15 bp, Homo sapiens
gtttataggaacatc

SEQ ID NO: 781055 - DNA, 15 bp, Homo sapiens
tttataggaacatct

SEQ ID NO: 781056 - DNA, 15 bp, Homo sapiens
ttataggaacatctg

SEQ ID NO: 781057 - DNA, 15 bp, Homo sapiens
tataggaacatctgt

SEQ ID NO: 781058 - DNA, 15 bp, Homo sapiens
ataggaacatctgtt

SEQ ID NO: 781059 - DNA, 15 bp, Homo sapiens
taggaacatctgttt

SEQ ID NO: 781060 - DNA, 15 bp, Homo sapiens
aggaacatctgtttg

SEQ ID NO: 781061 - DNA, 15 bp, Homo sapiens
ggaacatctgtttga

SEQ ID NO: 781062 - DNA, 15 bp, Homo sapiens
gaacatctgtttgat

SEQ ID NO: 781063 - DNA, 15 bp, Homo sapiens
aacatctgtttgata

SEQ ID NO: 781064 - DNA, 15 bp, Homo sapiens
acatctgtttgataa

SEQ ID NO: 781065 - DNA, 15 bp, Homo sapiens
catctgtttgataat

SEQ ID NO: 781066 - DNA, 15 bp, Homo sapiens
atctgtttgataatt

SEQ ID NO: 781067 - DNA, 15 bp, Homo sapiens
tctgtttgataattt

SEQ ID NO: 781068 - DNA, 15 bp, Homo sapiens
ctgtttgataatttg

SEQ ID NO: 781069 - DNA, 15 bp, Homo sapiens
tgtttgataatttgc

SEQ ID NO: 781070 - DNA, 15 bp, Homo sapiens
gtttgataatttgcc

SEQ ID NO: 781071 - DNA, 15 bp, Homo sapiens
tttgataatttgcct

SEQ ID NO: 781072 - DNA, 15 bp, Homo sapiens
ttgataatttgcctt

SEQ ID NO: 781073 - DNA, 15 bp, Homo sapiens
tgataatttgccttg

SEQ ID NO: 781074 - DNA, 15 bp, Homo sapiens
gataatttgccttgt

SEQ ID NO: 781075 - DNA, 15 bp, Homo sapiens
ataatttgccttgtt

SEQ ID NO: 781076 - DNA, 15 bp, Homo sapiens
taatttgccttgttc

SEQ ID NO: 781077 - DNA, 15 bp, Homo sapiens
aatttgccttgttct

SEQ ID NO: 781078 - DNA, 15 bp, Homo sapiens
atttgccttgttctc

SEQ ID NO: 781079 - DNA, 15 bp, Homo sapiens
tttgccttgttctca

SEQ ID NO: 781080 - DNA, 15 bp, Homo sapiens
ttgccttgttctcaa

SEQ ID NO: 781081 - DNA, 15 bp, Homo sapiens
tgccttgttctcaaa

SEQ ID NO: 781082 - DNA, 15 bp, Homo sapiens
gccttgttctcaaat

SEQ ID NO: 781083 - DNA, 15 bp, Homo sapiens
ccttgttctcaaata

SEQ ID NO: 781084 - DNA, 15 bp, Homo sapiens
cttgttctcaaataa

SEQ ID NO: 781085 - DNA, 15 bp, Homo sapiens
ttgttctcaaataag

SEQ ID NO: 781086 - DNA, 15 bp, Homo sapiens
tgttctcaaataaga

SEQ ID NO: 781087 - DNA, 15 bp, Homo sapiens
gttctcaaataagat

SEQ ID NO: 781088 - DNA, 15 bp, Homo sapiens
ttctcaaataagatg

SEQ ID NO: 781089 - DNA, 15 bp, Homo sapiens
tctcaaataagatgc

SEQ ID NO: 781090 - DNA, 15 bp, Homo sapiens
ctcaaataagatgcc

SEQ ID NO: 781091 - DNA, 15 bp, Homo sapiens
tcaaataagatgcca

SEQ ID NO: 781092 - DNA, 15 bp, Homo sapiens
caaataagatgccat

SEQ ID NO: 781093 - DNA, 15 bp, Homo sapiens
aaataagatgccata

SEQ ID NO: 781094 - DNA, 15 bp, Homo sapiens
aataagatgccataa

SEQ ID NO: 781095 - DNA, 15 bp, Homo sapiens
ataagatgccataaa

SEQ ID NO: 781096 - DNA, 15 bp, Homo sapiens
taagatgccataaag

SEQ ID NO: 781097 - DNA, 15 bp, Homo sapiens
aagatgccataaaga

SEQ ID NO: 781098 - DNA, 15 bp, Homo sapiens
agatgccataaagac

SEQ ID NO: 781099 - DNA, 15 bp, Homo sapiens
gatgccataaagaca

SEQ ID NO: 781100 - DNA, 15 bp, Homo sapiens
atgccataaagacaa

SEQ ID NO: 781101 - DNA, 15 bp, Homo sapiens
tgccataaagacaaa

SEQ ID NO: 781102 - DNA, 15 bp, Homo sapiens
gccataaagacaaag

SEQ ID NO: 781103 - DNA, 15 bp, Homo sapiens
ccataaagacaaagg

SEQ ID NO: 781104 - DNA, 15 bp, Homo sapiens
cataaagacaaaggt

SEQ ID NO: 781105 - DNA, 15 bp, Homo sapiens
ataaagacaaaggtt

SEQ ID NO: 781106 - DNA, 15 bp, Homo sapiens
taaagacaaaggttt

SEQ ID NO: 781107 - DNA, 15 bp, Homo sapiens
aaagacaaaggtttg

SEQ ID NO: 781108 - DNA, 15 bp, Homo sapiens
aagacaaaggtttgc

SEQ ID NO: 781109 - DNA, 15 bp, Homo sapiens
agacaaaggtttgca

SEQ ID NO: 781110 - DNA, 15 bp, Homo sapiens
gacaaaggtttgcag

SEQ ID NO: 781111 - DNA, 15 bp, Homo sapiens
acaaaggtttgcagt

SEQ ID NO: 781112 - DNA, 15 bp, Homo sapiens
caaaggtttgcagtg

SEQ ID NO: 781113 - DNA, 15 bp, Homo sapiens
aaaggtttgcagtgt

SEQ ID NO: 781114 - DNA, 15 bp, Homo sapiens
aaggtttgcagtgtt

SEQ ID NO: 781115 - DNA, 15 bp, Homo sapiens
aggtttgcagtgttt

SEQ ID NO: 781116 - DNA, 15 bp, Homo sapiens
ggtttgcagtgttta

SEQ ID NO: 781117 - DNA, 15 bp, Homo sapiens
gtttgcagtgtttac

SEQ ID NO: 781118 - DNA, 15 bp, Homo sapiens
tttgcagtgtttacc

SEQ ID NO: 781119 - DNA, 15 bp, Homo sapiens
ttgcagtgtttacct

SEQ ID NO: 781120 - DNA, 15 bp, Homo sapiens
tgcagtgtttacctt

SEQ ID NO: 781121 - DNA, 15 bp, Homo sapiens
gcagtgtttaccttc

SEQ ID NO: 781122 - DNA, 15 bp, Homo sapiens
cagtgtttaccttct

SEQ ID NO: 781123 - DNA, 15 bp, Homo sapiens
agtgtttaccttctt

SEQ ID NO: 781124 - DNA, 15 bp, Homo sapiens
gtgtttaccttcttc

SEQ ID NO: 781125 - DNA, 15 bp, Homo sapiens
tgtttaccttcttca

SEQ ID NO: 781126 - DNA, 15 bp, Homo sapiens
gtttaccttcttcag

SEQ ID NO: 781127 - DNA, 15 bp, Homo sapiens
tttaccttcttcagg

SEQ ID NO: 781128 - DNA, 15 bp, Homo sapiens
ttaccttcttcagga

SEQ ID NO: 781129 - DNA, 15 bp, Homo sapiens
taccttcttcaggat

SEQ ID NO: 781130 - DNA, 15 bp, Homo sapiens
accttcttcaggata

SEQ ID NO: 781131 - DNA, 15 bp, Homo sapiens
ccttcttcaggataa

SEQ ID NO: 781132 - DNA, 15 bp, Homo sapiens
cttcttcaggataat

SEQ ID NO: 781133 - DNA, 15 bp, Homo sapiens
ttcttcaggataatg

SEQ ID NO: 781134 - DNA, 15 bp, Homo sapiens
tcttcaggataatgg

SEQ ID NO: 781135 - DNA, 15 bp, Homo sapiens
cttcaggataatggg

SEQ ID NO: 781136 - DNA, 15 bp, Homo sapiens
ttcaggataatggga

SEQ ID NO: 781137 - DNA, 15 bp, Homo sapiens
tcaggataatgggaa

SEQ ID NO: 781138 - DNA, 15 bp, Homo sapiens
caggataatgggaaa

SEQ ID NO: 781139 - DNA, 15 bp, Homo sapiens
aggataatgggaaaa

SEQ ID NO: 781140 - DNA, 15 bp, Homo sapiens
ggataatgggaaaag

SEQ ID NO: 781141 - DNA, 15 bp, Homo sapiens
gataatgggaaaagt

SEQ ID NO: 781142 - DNA, 15 bp, Homo sapiens
ataatgggaaaagtg

SEQ ID NO: 781143 - DNA, 15 bp, Homo sapiens
taatgggaaaagtgg

SEQ ID NO: 781144 - DNA, 15 bp, Homo sapiens
aatgggaaaagtgga

SEQ ID NO: 781145 - DNA, 15 bp, Homo sapiens
atgggaaaagtggag

SEQ ID NO: 781146 - DNA, 15 bp, Homo sapiens
tgggaaaagtggaga

SEQ ID NO: 781147 - DNA, 15 bp, Homo sapiens
gggaaaagtggagag

SEQ ID NO: 781148 - DNA, 15 bp, Homo sapiens
ggaaaagtggagagt

SEQ ID NO: 781149 - DNA, 15 bp, Homo sapiens
gaaaagtggagagtg

SEQ ID NO: 781150 - DNA, 15 bp, Homo sapiens
aaaagtggagagtgc

SEQ ID NO: 781151 - DNA, 15 bp, Homo sapiens
aaagtggagagtgct

SEQ ID NO: 781152 - DNA, 15 bp, Homo sapiens
aagtggagagtgctc

SEQ ID NO: 781153 - DNA, 15 bp, Homo sapiens
agtggagagtgctct

SEQ ID NO: 781154 - DNA, 15 bp, Homo sapiens
gtggagagtgctctg

SEQ ID NO: 781155 - DNA, 15 bp, Homo sapiens
tggagagtgctctgt

SEQ ID NO: 781156 - DNA, 15 bp, Homo sapiens
ggagagtgctctgtc

SEQ ID NO: 781157 - DNA, 15 bp, Homo sapiens
gagagtgctctgtca

SEQ ID NO: 781158 - DNA, 15 bp, Homo sapiens
agagtgctctgtcac

SEQ ID NO: 781159 - DNA, 15 bp, Homo sapiens
gagtgctctgtcaca

SEQ ID NO: 781160 - DNA, 15 bp, Homo sapiens
agtgctctgtcacat

SEQ ID NO: 781161 - DNA, 15 bp, Homo sapiens
gtgctctgtcacatg

SEQ ID NO: 781162 - DNA, 15 bp, Homo sapiens
tgctctgtcacatga

SEQ ID NO: 781163 - DNA, 15 bp, Homo sapiens
gctctgtcacatgaa

SEQ ID NO: 781164 - DNA, 15 bp, Homo sapiens
ctctgtcacatgaaa

SEQ ID NO: 781165 - DNA, 15 bp, Homo sapiens
tctgtcacatgaaaa

SEQ ID NO: 781166 - DNA, 15 bp, Homo sapiens
ctgtcacatgaaaaa

SEQ ID NO: 781167 - DNA, 15 bp, Homo sapiens
tgtcacatgaaaaat

SEQ ID NO: 781168 - DNA, 15 bp, Homo sapiens
gtcacatgaaaaata

SEQ ID NO: 781169 - DNA, 15 bp, Homo sapiens
tcacatgaaaaatat

SEQ ID NO: 781170 - DNA, 15 bp, Homo sapiens
cacatgaaaaatatc

SEQ ID NO: 781171 - DNA, 15 bp, Homo sapiens
acatgaaaaatatcc

SEQ ID NO: 781172 - DNA, 15 bp, Homo sapiens
catgaaaaatatccc

SEQ ID NO: 781173 - DNA, 15 bp, Homo sapiens
atgaaaaatatccct

SEQ ID NO: 781174 - DNA, 15 bp, Homo sapiens
tgaaaaatatccctg

SEQ ID NO: 781175 - DNA, 15 bp, Homo sapiens
gaaaaatatccctgc

SEQ ID NO: 781176 - DNA, 15 bp, Homo sapiens
aaaaatatccctgcc

SEQ ID NO: 781177 - DNA, 15 bp, Homo sapiens
aaaatatccctgcca

SEQ ID NO: 781178 - DNA, 15 bp, Homo sapiens
aaatatccctgccaa

SEQ ID NO: 781179 - DNA, 15 bp, Homo sapiens
aatatccctgccaaa

SEQ ID NO: 781180 - DNA, 15 bp, Homo sapiens
atatccctgccaaag

SEQ ID NO: 781181 - DNA, 15 bp, Homo sapiens
tatccctgccaaagt

SEQ ID NO: 781182 - DNA, 15 bp, Homo sapiens
atccctgccaaagtc

SEQ ID NO: 781183 - DNA, 15 bp, Homo sapiens
tccctgccaaagtca

SEQ ID NO: 781184 - DNA, 15 bp, Homo sapiens
ccctgccaaagtcaa

SEQ ID NO: 781185 - DNA, 15 bp, Homo sapiens
cctgccaaagtcaag

SEQ ID NO: 781186 - DNA, 15 bp, Homo sapiens
ctgccaaagtcaagt

SEQ ID NO: 781187 - DNA, 15 bp, Homo sapiens
tgccaaagtcaagtt

SEQ ID NO: 781188 - DNA, 15 bp, Homo sapiens
gccaaagtcaagttt

SEQ ID NO: 781189 - DNA, 15 bp, Homo sapiens
ccaaagtcaagttta

SEQ ID NO: 781190 - DNA, 15 bp, Homo sapiens
caaagtcaagtttaa

SEQ ID NO: 781191 - DNA, 15 bp, Homo sapiens
aaagtcaagtttaaa

SEQ ID NO: 781192 - DNA, 15 bp, Homo sapiens
aagtcaagtttaaat

SEQ ID NO: 781193 - DNA, 15 bp, Homo sapiens
agtcaagtttaaatt

SEQ ID NO: 781194 - DNA, 15 bp, Homo sapiens
gtcaagtttaaattc

SEQ ID NO: 781195 - DNA, 15 bp, Homo sapiens
tcaagtttaaattct

SEQ ID NO: 781196 - DNA, 15 bp, Homo sapiens
caagtttaaattctc

SEQ ID NO: 781197 - DNA, 15 bp, Homo sapiens
aagtttaaattctct

SEQ ID NO: 781198 - DNA, 15 bp, Homo sapiens
agtttaaattctctg

SEQ ID NO: 781199 - DNA, 15 bp, Homo sapiens
gtttaaattctctga

SEQ ID NO: 781200 - DNA, 15 bp, Homo sapiens
tttaaattctctgag

SEQ ID NO: 781201 - DNA, 15 bp, Homo sapiens
ttaaattctctgaga

SEQ ID NO: 781202 - DNA, 15 bp, Homo sapiens
taaattctctgagat

SEQ ID NO: 781203 - DNA, 15 bp, Homo sapiens
aaattctctgagata

SEQ ID NO: 781204 - DNA, 15 bp, Homo sapiens
aattctctgagatac

SEQ ID NO: 781205 - DNA, 15 bp, Homo sapiens
attctctgagatact

SEQ ID NO: 781206 - DNA, 15 bp, Homo sapiens
ttctctgagatactt

SEQ ID NO: 781207 - DNA, 15 bp, Homo sapiens
tctctgagatacttt

SEQ ID NO: 781208 - DNA, 15 bp, Homo sapiens
ctctgagatacttta

SEQ ID NO: 781209 - DNA, 15 bp, Homo sapiens
tctgagatactttaa

SEQ ID NO: 781210 - DNA, 15 bp, Homo sapiens
ctgagatactttaat

SEQ ID NO: 781211 - DNA, 15 bp, Homo sapiens
tgagatactttaata

SEQ ID NO: 781212 - DNA, 15 bp, Homo sapiens
gagatactttaatag

SEQ ID NO: 781213 - DNA, 15 bp, Homo sapiens
agatactttaatagc

SEQ ID NO: 781214 - DNA, 15 bp, Homo sapiens
gatactttaatagcc

SEQ ID NO: 781215 - DNA, 15 bp, Homo sapiens
atactttaatagcct

SEQ ID NO: 781216 - DNA, 15 bp, Homo sapiens
tactttaatagcctc

SEQ ID NO: 781217 - DNA, 15 bp, Homo sapiens
actttaatagcctct

SEQ ID NO: 781218 - DNA, 15 bp, Homo sapiens
ctttaatagcctctt

SEQ ID NO: 781219 - DNA, 15 bp, Homo sapiens
tttaatagcctcttg

SEQ ID NO: 781220 - DNA, 15 bp, Homo sapiens
ttaatagcctcttgc

SEQ ID NO: 781221 - DNA, 15 bp, Homo sapiens
taatagcctcttgca

SEQ ID NO: 781222 - DNA, 15 bp, Homo sapiens
aatagcctcttgcat

SEQ ID NO: 781223 - DNA, 15 bp, Homo sapiens
atagcctcttgcata

SEQ ID NO: 781224 - DNA, 15 bp, Homo sapiens
tagcctcttgcatag

SEQ ID NO: 781225 - DNA, 15 bp, Homo sapiens
agcctcttgcataga

SEQ ID NO: 781226 - DNA, 15 bp, Homo sapiens
gcctcttgcatagaa

SEQ ID NO: 781227 - DNA, 15 bp, Homo sapiens
cctcttgcatagaat

SEQ ID NO: 781228 - DNA, 15 bp, Homo sapiens
ctcttgcatagaatt

SEQ ID NO: 781229 - DNA, 15 bp, Homo sapiens
tcttgcatagaattg

SEQ ID NO: 781230 - DNA, 15 bp, Homo sapiens
cttgcatagaattgg

SEQ ID NO: 781231 - DNA, 15 bp, Homo sapiens
ttgcatagaattgga

SEQ ID NO: 781232 - DNA, 15 bp, Homo sapiens
tgcatagaattggat

SEQ ID NO: 781233 - DNA, 15 bp, Homo sapiens
gcatagaattggatc

SEQ ID NO: 781234 - DNA, 15 bp, Homo sapiens
catagaattggatct

SEQ ID NO: 781235 - DNA, 15 bp, Homo sapiens
atagaattggatctt

SEQ ID NO: 781236 - DNA, 15 bp, Homo sapiens
tagaattggatcttt

SEQ ID NO: 781237 - DNA, 15 bp, Homo sapiens
agaattggatcttta

SEQ ID NO: 781238 - DNA, 15 bp, Homo sapiens
gaattggatctttaa

SEQ ID NO: 781239 - DNA, 15 bp, Homo sapiens
aattggatctttaaa

SEQ ID NO: 781240 - DNA, 15 bp, Homo sapiens
attggatctttaaac

SEQ ID NO: 781241 - DNA, 15 bp, Homo sapiens
ttggatctttaaaca

SEQ ID NO: 781242 - DNA, 15 bp, Homo sapiens
tggatctttaaacaa

SEQ ID NO: 781243 - DNA, 15 bp, Homo sapiens
ggatctttaaacaaa

SEQ ID NO: 781244 - DNA, 15 bp, Homo sapiens
gatctttaaacaaac

SEQ ID NO: 781245 - DNA, 15 bp, Homo sapiens
atctttaaacaaact

SEQ ID NO: 781246 - DNA, 15 bp, Homo sapiens
tctttaaacaaactg

SEQ ID NO: 781247 - DNA, 15 bp, Homo sapiens
ctttaaacaaactgg

SEQ ID NO: 781248 - DNA, 15 bp, Homo sapiens
tttaaacaaactgga

SEQ ID NO: 781249 - DNA, 15 bp, Homo sapiens
ttaaacaaactggat

SEQ ID NO: 781250 - DNA, 15 bp, Homo sapiens
taaacaaactggata

SEQ ID NO: 781251 - DNA, 15 bp, Homo sapiens
aaacaaactggatag

SEQ ID NO: 781252 - DNA, 15 bp, Homo sapiens
aacaaactggatagt

SEQ ID NO: 781253 - DNA, 15 bp, Homo sapiens
acaaactggatagtc

SEQ ID NO: 781254 - DNA, 15 bp, Homo sapiens
caaactggatagtca

SEQ ID NO: 781255 - DNA, 15 bp, Homo sapiens
aaactggatagtcac

SEQ ID NO: 781256 - DNA, 15 bp, Homo sapiens
aactggatagtcact

SEQ ID NO: 781257 - DNA, 15 bp, Homo sapiens
actggatagtcactt

SEQ ID NO: 781258 - DNA, 15 bp, Homo sapiens
ctggatagtcacttg

SEQ ID NO: 781259 - DNA, 15 bp, Homo sapiens
tggatagtcacttgg

SEQ ID NO: 781260 - DNA, 15 bp, Homo sapiens
ggatagtcacttggc

SEQ ID NO: 781261 - DNA, 15 bp, Homo sapiens
gatagtcacttggct

SEQ ID NO: 781262 - DNA, 15 bp, Homo sapiens
atagtcacttggctt

SEQ ID NO: 781263 - DNA, 15 bp, Homo sapiens
tagtcacttggcttc

SEQ ID NO: 781264 - DNA, 15 bp, Homo sapiens
agtcacttggcttcc

SEQ ID NO: 781265 - DNA, 15 bp, Homo sapiens
gtcacttggcttcct

SEQ ID NO: 781266 - DNA, 15 bp, Homo sapiens
tcacttggcttcctg

SEQ ID NO: 781267 - DNA, 15 bp, Homo sapiens
cacttggcttcctgt

SEQ ID NO: 781268 - DNA, 15 bp, Homo sapiens
acttggcttcctgtc

SEQ ID NO: 781269 - DNA, 15 bp, Homo sapiens
cttggcttcctgtca

SEQ ID NO: 781270 - DNA, 15 bp, Homo sapiens
ttggcttcctgtcac

SEQ ID NO: 781271 - DNA, 15 bp, Homo sapiens
tggcttcctgtcacg

SEQ ID NO: 781272 - DNA, 15 bp, Homo sapiens
ggcttcctgtcacga

SEQ ID NO: 781273 - DNA, 15 bp, Homo sapiens
gcttcctgtcacgaa

SEQ ID NO: 781274 - DNA, 15 bp, Homo sapiens
cttcctgtcacgaat

SEQ ID NO: 781275 - DNA, 15 bp, Homo sapiens
ttcctgtcacgaatc

SEQ ID NO: 781276 - DNA, 15 bp, Homo sapiens
tcctgtcacgaatca

SEQ ID NO: 781277 - DNA, 15 bp, Homo sapiens
cctgtcacgaatcat

SEQ ID NO: 781278 - DNA, 15 bp, Homo sapiens
ctgtcacgaatcatc

SEQ ID NO: 781279 - DNA, 15 bp, Homo sapiens
tgtcacgaatcatct

SEQ ID NO: 781280 - DNA, 15 bp, Homo sapiens
gtcacgaatcatctc

SEQ ID NO: 781281 - DNA, 15 bp, Homo sapiens
tcacgaatcatctcc

SEQ ID NO: 781282 - DNA, 15 bp, Homo sapiens
cacgaatcatctcct

SEQ ID NO: 781283 - DNA, 15 bp, Homo sapiens
acgaatcatctcctt

SEQ ID NO: 781284 - DNA, 15 bp, Homo sapiens
cgaatcatctccttt

SEQ ID NO: 781285 - DNA, 15 bp, Homo sapiens
gaatcatctcctttt

SEQ ID NO: 781286 - DNA, 15 bp, Homo sapiens
aatcatctcctttta

SEQ ID NO: 781287 - DNA, 15 bp, Homo sapiens
atcatctccttttaa

SEQ ID NO: 781288 - DNA, 15 bp, Homo sapiens
tcatctccttttaat

SEQ ID NO: 781289 - DNA, 15 bp, Homo sapiens
catctccttttaatc

SEQ ID NO: 781290 - DNA, 15 bp, Homo sapiens
atctccttttaatct

SEQ ID NO: 781291 - DNA, 15 bp, Homo sapiens
tctccttttaatctt

SEQ ID NO: 781292 - DNA, 15 bp, Homo sapiens
ctccttttaatcttc

SEQ ID NO: 781293 - DNA, 15 bp, Homo sapiens
tccttttaatcttca

SEQ ID NO: 781294 - DNA, 15 bp, Homo sapiens
ccttttaatcttcat

SEQ ID NO: 781295 - DNA, 15 bp, Homo sapiens
cttttaatcttcata

SEQ ID NO: 781296 - DNA, 15 bp, Homo sapiens
ttttaatcttcataa

SEQ ID NO: 781297 - DNA, 15 bp, Homo sapiens
tttaatcttcataag

SEQ ID NO: 781298 - DNA, 15 bp, Homo sapiens
ttaatcttcataagt

SEQ ID NO: 781299 - DNA, 15 bp, Homo sapiens
taatcttcataagta

SEQ ID NO: 781300 - DNA, 15 bp, Homo sapiens
aatcttcataagtat

SEQ ID NO: 781301 - DNA, 15 bp, Homo sapiens
atcttcataagtata

SEQ ID NO: 781302 - DNA, 15 bp, Homo sapiens
tcttcataagtatat

SEQ ID NO: 781303 - DNA, 15 bp, Homo sapiens
cttcataagtatata

SEQ ID NO: 781304 - DNA, 15 bp, Homo sapiens
ttcataagtatatat

SEQ ID NO: 781305 - DNA, 15 bp, Homo sapiens
tcataagtatatatg

SEQ ID NO: 781306 - DNA, 15 bp, Homo sapiens
cataagtatatatgt

SEQ ID NO: 781307 - DNA, 15 bp, Homo sapiens
ataagtatatatgta

SEQ ID NO: 781308 - DNA, 15 bp, Homo sapiens
taagtatatatgtat

SEQ ID NO: 781309 - DNA, 15 bp, Homo sapiens
aagtatatatgtata

SEQ ID NO: 781310 - DNA, 15 bp, Homo sapiens
agtatatatgtatat

SEQ ID NO: 781311 - DNA, 15 bp, Homo sapiens
gtatatatgtatatt

SEQ ID NO: 781312 - DNA, 15 bp, Homo sapiens
tatatatgtatattc

SEQ ID NO: 781313 - DNA, 15 bp, Homo sapiens
atatatgtatattcc

SEQ ID NO: 781314 - DNA, 15 bp, Homo sapiens
tatatgtatattcca

SEQ ID NO: 781315 - DNA, 15 bp, Homo sapiens
atatgtatattccaa

SEQ ID NO: 781316 - DNA, 15 bp, Homo sapiens
tatgtatattccaaa

SEQ ID NO: 781317 - DNA, 15 bp, Homo sapiens
ggtcagacagatgtg

SEQ ID NO: 781318 - DNA, 15 bp, Homo sapiens
gtcagacagatgtgg

SEQ ID NO: 781319 - DNA, 15 bp, Homo sapiens
tcagacagatgtggt

SEQ ID NO: 781320 - DNA, 15 bp, Homo sapiens
cagacagatgtggtc

SEQ ID NO: 781321 - DNA, 15 bp, Homo sapiens
agacagatgtggtcc

SEQ ID NO: 781322 - DNA, 15 bp, Homo sapiens
gacagatgtggtcct

SEQ ID NO: 781323 - DNA, 15 bp, Homo sapiens
acagatgtggtccta

SEQ ID NO: 781324 - DNA, 15 bp, Homo sapiens
cagatgtggtcctaa

SEQ ID NO: 781325 - DNA, 15 bp, Homo sapiens
agatgtggtcctaat

SEQ ID NO: 781326 - DNA, 15 bp, Homo sapiens
gatgtggtcctaatc

SEQ ID NO: 781327 - DNA, 15 bp, Homo sapiens
atgtggtcctaatct

SEQ ID NO: 781328 - DNA, 15 bp, Homo sapiens
tgtggtcctaatctt

SEQ ID NO: 781329 - DNA, 15 bp, Homo sapiens
gtggtcctaatcttc

SEQ ID NO: 781330 - DNA, 15 bp, Homo sapiens
tggtcctaatcttct

SEQ ID NO: 781331 - DNA, 15 bp, Homo sapiens
ggtcctaatcttctg

SEQ ID NO: 781332 - DNA, 15 bp, Homo sapiens
gtcctaatcttctgt

SEQ ID NO: 781333 - DNA, 15 bp, Homo sapiens
tcctaatcttctgtg

SEQ ID NO: 781334 - DNA, 15 bp, Homo sapiens
cctaatcttctgtgt

SEQ ID NO: 781335 - DNA, 15 bp, Homo sapiens
ctaatcttctgtgtg

SEQ ID NO: 781336 - DNA, 15 bp, Homo sapiens
taatcttctgtgtgt

SEQ ID NO: 781337 - DNA, 15 bp, Homo sapiens
aatcttctgtgtgtg

SEQ ID NO: 781338 - DNA, 15 bp, Homo sapiens
atcttctgtgtgtga

SEQ ID NO: 781339 - DNA, 15 bp, Homo sapiens
tcttctgtgtgtgac

SEQ ID NO: 781340 - DNA, 15 bp, Homo sapiens
cttctgtgtgtgacc

SEQ ID NO: 781341 - DNA, 15 bp, Homo sapiens
ttctgtgtgtgacct

SEQ ID NO: 781342 - DNA, 15 bp, Homo sapiens
tctgtgtgtgacctt

SEQ ID NO: 781343 - DNA, 15 bp, Homo sapiens
ctgtgtgtgaccttg

SEQ ID NO: 781344 - DNA, 15 bp, Homo sapiens
tgtgtgtgaccttgg

SEQ ID NO: 781345 - DNA, 15 bp, Homo sapiens
gtgtgtgaccttggg

SEQ ID NO: 781346 - DNA, 15 bp, Homo sapiens
tgtgtgaccttgggc

SEQ ID NO: 781347 - DNA, 15 bp, Homo sapiens
gtgtgaccttgggca

SEQ ID NO: 781348 - DNA, 15 bp, Homo sapiens
tgtgaccttgggcaa

SEQ ID NO: 781349 - DNA, 15 bp, Homo sapiens
gtgaccttgggcaag

SEQ ID NO: 781350 - DNA, 15 bp, Homo sapiens
tgaccttgggcaagt

SEQ ID NO: 781351 - DNA, 15 bp, Homo sapiens
gaccttgggcaagtt

SEQ ID NO: 781352 - DNA, 15 bp, Homo sapiens
accttgggcaagttg

SEQ ID NO: 781353 - DNA, 15 bp, Homo sapiens
ccttgggcaagttgt

SEQ ID NO: 781354 - DNA, 15 bp, Homo sapiens
cttgggcaagttgtt

SEQ ID NO: 781355 - DNA, 15 bp, Homo sapiens
ttgggcaagttgttt

SEQ ID NO: 781356 - DNA, 15 bp, Homo sapiens
tgggcaagttgttta

SEQ ID NO: 781357 - DNA, 15 bp, Homo sapiens
gggcaagttgtttaa

SEQ ID NO: 781358 - DNA, 15 bp, Homo sapiens
ggcaagttgtttaac

SEQ ID NO: 781359 - DNA, 15 bp, Homo sapiens
gcaagttgtttaact

SEQ ID NO: 781360 - DNA, 15 bp, Homo sapiens
caagttgtttaactt

SEQ ID NO: 781361 - DNA, 15 bp, Homo sapiens
aagttgtttaacttt

SEQ ID NO: 781362 - DNA, 15 bp, Homo sapiens
agttgtttaactttg

SEQ ID NO: 781363 - DNA, 15 bp, Homo sapiens
gttgtttaactttgc

SEQ ID NO: 781364 - DNA, 15 bp, Homo sapiens
ttgtttaactttgct

SEQ ID NO: 781365 - DNA, 15 bp, Homo sapiens
tgtttaactttgcta

SEQ ID NO: 781366 - DNA, 15 bp, Homo sapiens
gtttaactttgctat

SEQ ID NO: 781367 - DNA, 15 bp, Homo sapiens
tttaactttgctatg

SEQ ID NO: 781368 - DNA, 15 bp, Homo sapiens
ttaactttgctatgt

SEQ ID NO: 781369 - DNA, 15 bp, Homo sapiens
taactttgctatgtc

SEQ ID NO: 781370 - DNA, 15 bp, Homo sapiens
aactttgctatgtct

SEQ ID NO: 781371 - DNA, 15 bp, Homo sapiens
actttgctatgtctt

SEQ ID NO: 781372 - DNA, 15 bp, Homo sapiens
ctttgctatgtctta

SEQ ID NO: 781373 - DNA, 15 bp, Homo sapiens
tttgctatgtcttag

SEQ ID NO: 781374 - DNA, 15 bp, Homo sapiens
ttgctatgtcttagt

SEQ ID NO: 781375 - DNA, 15 bp, Homo sapiens
tgctatgtcttagta

SEQ ID NO: 781376 - DNA, 15 bp, Homo sapiens
gctatgtcttagtat

SEQ ID NO: 781377 - DNA, 15 bp, Homo sapiens
ctatgtcttagtatc

SEQ ID NO: 781378 - DNA, 15 bp, Homo sapiens
tatgtcttagtatct

SEQ ID NO: 781379 - DNA, 15 bp, Homo sapiens
atgtcttagtatctt

SEQ ID NO: 781380 - DNA, 15 bp, Homo sapiens
tgtcttagtatctta

SEQ ID NO: 781381 - DNA, 15 bp, Homo sapiens
gtcttagtatcttaa

SEQ ID NO: 781382 - DNA, 15 bp, Homo sapiens
tcttagtatcttaat

SEQ ID NO: 781383 - DNA, 15 bp, Homo sapiens
cttagtatcttaatc

SEQ ID NO: 781384 - DNA, 15 bp, Homo sapiens
ttagtatcttaatct

SEQ ID NO: 781385 - DNA, 15 bp, Homo sapiens
tagtatcttaatctg

SEQ ID NO: 781386 - DNA, 15 bp, Homo sapiens
agtatcttaatctgc

SEQ ID NO: 781387 - DNA, 15 bp, Homo sapiens
gtatcttaatctgca

SEQ ID NO: 781388 - DNA, 15 bp, Homo sapiens
tatcttaatctgcaa

SEQ ID NO: 781389 - DNA, 15 bp, Homo sapiens
atcttaatctgcaaa

SEQ ID NO: 781390 - DNA, 15 bp, Homo sapiens
tcttaatctgcaaac

SEQ ID NO: 781391 - DNA, 15 bp, Homo sapiens
cttaatctgcaaaca

SEQ ID NO: 781392 - DNA, 15 bp, Homo sapiens
ttaatctgcaaacat

SEQ ID NO: 781393 - DNA, 15 bp, Homo sapiens
taatctgcaaacatg

SEQ ID NO: 781394 - DNA, 15 bp, Homo sapiens
aatctgcaaacatgg

SEQ ID NO: 781395 - DNA, 15 bp, Homo sapiens
atctgcaaacatggg

SEQ ID NO: 781396 - DNA, 15 bp, Homo sapiens
tctgcaaacatggga

SEQ ID NO: 781397 - DNA, 15 bp, Homo sapiens
ctgcaaacatgggaa

SEQ ID NO: 781398 - DNA, 15 bp, Homo sapiens
tgcaaacatgggaat

SEQ ID NO: 781399 - DNA, 15 bp, Homo sapiens
gcaaacatgggaata

SEQ ID NO: 781400 - DNA, 15 bp, Homo sapiens
caaacatgggaatag

SEQ ID NO: 781401 - DNA, 15 bp, Homo sapiens
aaacatgggaatagc

SEQ ID NO: 781402 - DNA, 15 bp, Homo sapiens
aacatgggaatagca

SEQ ID NO: 781403 - DNA, 15 bp, Homo sapiens
acatgggaatagcag

SEQ ID NO: 781404 - DNA, 15 bp, Homo sapiens
catgggaatagcagt

SEQ ID NO: 781405 - DNA, 15 bp, Homo sapiens
atgggaatagcagta

SEQ ID NO: 781406 - DNA, 15 bp, Homo sapiens
tgggaatagcagtaa

SEQ ID NO: 781407 - DNA, 15 bp, Homo sapiens
gggaatagcagtaat

SEQ ID NO: 781408 - DNA, 15 bp, Homo sapiens
ggaatagcagtaatg

SEQ ID NO: 781409 - DNA, 15 bp, Homo sapiens
gaatagcagtaatgt

SEQ ID NO: 781410 - DNA, 15 bp, Homo sapiens
aatagcagtaatgtc

SEQ ID NO: 781411 - DNA, 15 bp, Homo sapiens
atagcagtaatgtct

SEQ ID NO: 781412 - DNA, 15 bp, Homo sapiens
tagcagtaatgtcta

SEQ ID NO: 781413 - DNA, 15 bp, Homo sapiens
agcagtaatgtctac

SEQ ID NO: 781414 - DNA, 15 bp, Homo sapiens
gcagtaatgtctact

SEQ ID NO: 781415 - DNA, 15 bp, Homo sapiens
cagtaatgtctactg

SEQ ID NO: 781416 - DNA, 15 bp, Homo sapiens
agtaatgtctactgc

SEQ ID NO: 781417 - DNA, 15 bp, Homo sapiens
gtaatgtctactgca

SEQ ID NO: 781418 - DNA, 15 bp, Homo sapiens
taatgtctactgcat

SEQ ID NO: 781419 - DNA, 15 bp, Homo sapiens
aatgtctactgcata

SEQ ID NO: 781420 - DNA, 15 bp, Homo sapiens
atgtctactgcataa

SEQ ID NO: 781421 - DNA, 15 bp, Homo sapiens
tgtctactgcataaa

SEQ ID NO: 781422 - DNA, 15 bp, Homo sapiens
gtctactgcataaag

SEQ ID NO: 781423 - DNA, 15 bp, Homo sapiens
tctactgcataaagt

SEQ ID NO: 781424 - DNA, 15 bp, Homo sapiens
ctactgcataaagtc

SEQ ID NO: 781425 - DNA, 15 bp, Homo sapiens
tactgcataaagtca

SEQ ID NO: 781426 - DNA, 15 bp, Homo sapiens
actgcataaagtcat

SEQ ID NO: 781427 - DNA, 15 bp, Homo sapiens
ctgcataaagtcatt

SEQ ID NO: 781428 - DNA, 15 bp, Homo sapiens
tgcataaagtcattt

SEQ ID NO: 781429 - DNA, 15 bp, Homo sapiens
gcataaagtcatttc

SEQ ID NO: 781430 - DNA, 15 bp, Homo sapiens
cataaagtcatttca

SEQ ID NO: 781431 - DNA, 15 bp, Homo sapiens
ataaagtcatttcag

SEQ ID NO: 781432 - DNA, 15 bp, Homo sapiens
taaagtcatttcagc

SEQ ID NO: 781433 - DNA, 15 bp, Homo sapiens
aaagtcatttcagca

SEQ ID NO: 781434 - DNA, 15 bp, Homo sapiens
aagtcatttcagcat

SEQ ID NO: 781435 - DNA, 15 bp, Homo sapiens
agtcatttcagcatt

SEQ ID NO: 781436 - DNA, 15 bp, Homo sapiens
gtcatttcagcatta

SEQ ID NO: 781437 - DNA, 15 bp, Homo sapiens
catttcagcattaaa

SEQ ID NO: 781438 - DNA, 15 bp, Homo sapiens
atttcagcattaaat

SEQ ID NO: 781439 - DNA, 15 bp, Homo sapiens
tttcagcattaaatg

SEQ ID NO: 781440 - DNA, 15 bp, Homo sapiens
ttcagcattaaatga

SEQ ID NO: 781441 - DNA, 15 bp, Homo sapiens
tcagcattaaatgag

SEQ ID NO: 781442 - DNA, 15 bp, Homo sapiens
cagcattaaatgagg

SEQ ID NO: 781443 - DNA, 15 bp, Homo sapiens
agcattaaatgaggt

SEQ ID NO: 781444 - DNA, 15 bp, Homo sapiens
gcattaaatgaggtc

SEQ ID NO: 781445 - DNA, 15 bp, Homo sapiens
cattaaatgaggtca

SEQ ID NO: 781446 - DNA, 15 bp, Homo sapiens
attaaatgaggtcat

SEQ ID NO: 781447 - DNA, 15 bp, Homo sapiens
ttaaatgaggtcatg

SEQ ID NO: 781448 - DNA, 15 bp, Homo sapiens
taaatgaggtcatgt

SEQ ID NO: 781449 - DNA, 15 bp, Homo sapiens
aaatgaggtcatgtg

SEQ ID NO: 781450 - DNA, 15 bp, Homo sapiens
aatgaggtcatgtgg

SEQ ID NO: 781451 - DNA, 15 bp, Homo sapiens
atgaggtcatgtgga

SEQ ID NO: 781452 - DNA, 15 bp, Homo sapiens
tgaggtcatgtggaa

SEQ ID NO: 781453 - DNA, 15 bp, Homo sapiens
gaggtcatgtggaaa

SEQ ID NO: 781454 - DNA, 15 bp, Homo sapiens
aggtcatgtggaaat

SEQ ID NO: 781455 - DNA, 15 bp, Homo sapiens
ggtcatgtggaaatg

SEQ ID NO: 781456 - DNA, 15 bp, Homo sapiens
gtcatgtggaaatgt

SEQ ID NO: 781457 - DNA, 15 bp, Homo sapiens
tcatgtggaaatgtc

SEQ ID NO: 781458 - DNA, 15 bp, Homo sapiens
catgtggaaatgtca

SEQ ID NO: 781459 - DNA, 15 bp, Homo sapiens
atgtggaaatgtcag

SEQ ID NO: 781460 - DNA, 15 bp, Homo sapiens
tgtggaaatgtcagg

SEQ ID NO: 781461 - DNA, 15 bp, Homo sapiens
gtggaaatgtcaggt

SEQ ID NO: 781462 - DNA, 15 bp, Homo sapiens
tggaaatgtcaggtc

SEQ ID NO: 781463 - DNA, 15 bp, Homo sapiens
ggaaatgtcaggtca

SEQ ID NO: 781464 - DNA, 15 bp, Homo sapiens
gaaatgtcaggtcag

SEQ ID NO: 781465 - DNA, 15 bp, Homo sapiens
aaatgtcaggtcaga

SEQ ID NO: 781466 - DNA, 15 bp, Homo sapiens
aatgtcaggtcagag

SEQ ID NO: 781467 - DNA, 15 bp, Homo sapiens
atgtcaggtcagagg

SEQ ID NO: 781468 - DNA, 15 bp, Homo sapiens
tgtcaggtcagagga

SEQ ID NO: 781469 - DNA, 15 bp, Homo sapiens
gtcaggtcagaggac

SEQ ID NO: 781470 - DNA, 15 bp, Homo sapiens
tcaggtcagaggaca

SEQ ID NO: 781471 - DNA, 15 bp, Homo sapiens
caggtcagaggacag

SEQ ID NO: 781472 - DNA, 15 bp, Homo sapiens
aggtcagaggacagc

SEQ ID NO: 781473 - DNA, 15 bp, Homo sapiens
ggtcagaggacagcc

SEQ ID NO: 781474 - DNA, 15 bp, Homo sapiens
gtcagaggacagcca

SEQ ID NO: 781475 - DNA, 15 bp, Homo sapiens
tcagaggacagccat

SEQ ID NO: 781476 - DNA, 15 bp, Homo sapiens
cagaggacagccatt

SEQ ID NO: 781477 - DNA, 15 bp, Homo sapiens
agaggacagccattt

SEQ ID NO: 781478 - DNA, 15 bp, Homo sapiens
gaggacagccatttg

SEQ ID NO: 781479 - DNA, 15 bp, Homo sapiens
aggacagccatttgg

SEQ ID NO: 781480 - DNA, 15 bp, Homo sapiens
ggacagccatttggc

SEQ ID NO: 781481 - DNA, 15 bp, Homo sapiens
gacagccatttggca

SEQ ID NO: 781482 - DNA, 15 bp, Homo sapiens
acagccatttggcag

SEQ ID NO: 781483 - DNA, 15 bp, Homo sapiens
cagccatttggcagt

SEQ ID NO: 781484 - DNA, 15 bp, Homo sapiens
agccatttggcagtg

SEQ ID NO: 781485 - DNA, 15 bp, Homo sapiens
gccatttggcagtgt

SEQ ID NO: 781486 - DNA, 15 bp, Homo sapiens
ccatttggcagtgtg

SEQ ID NO: 781487 - DNA, 15 bp, Homo sapiens
catttggcagtgtgc

SEQ ID NO: 781488 - DNA, 15 bp, Homo sapiens
atttggcagtgtgcc

SEQ ID NO: 781489 - DNA, 15 bp, Homo sapiens
tttggcagtgtgccc

SEQ ID NO: 781490 - DNA, 15 bp, Homo sapiens
ttggcagtgtgccca

SEQ ID NO: 781491 - DNA, 15 bp, Homo sapiens
tggcagtgtgcccag

SEQ ID NO: 781492 - DNA, 15 bp, Homo sapiens
ggcagtgtgcccaga

SEQ ID NO: 781493 - DNA, 15 bp, Homo sapiens
gcagtgtgcccagat

SEQ ID NO: 781494 - DNA, 15 bp, Homo sapiens
cagtgtgcccagatg

SEQ ID NO: 781495 - DNA, 15 bp, Homo sapiens
agtgtgcccagatga

SEQ ID NO: 781496 - DNA, 15 bp, Homo sapiens
gtgtgcccagatgag

SEQ ID NO: 781497 - DNA, 15 bp, Homo sapiens
tgtgcccagatgagc

SEQ ID NO: 781498 - DNA, 15 bp, Homo sapiens
gtgcccagatgagct

SEQ ID NO: 781499 - DNA, 15 bp, Homo sapiens
tgcccagatgagctg

SEQ ID NO: 781500 - DNA, 15 bp, Homo sapiens
gcccagatgagctga

SEQ ID NO: 781501 - DNA, 15 bp, Homo sapiens
cccagatgagctgat

SEQ ID NO: 781502 - DNA, 15 bp, Homo sapiens
ccagatgagctgatt

SEQ ID NO: 781503 - DNA, 15 bp, Homo sapiens
cagatgagctgattt

SEQ ID NO: 781504 - DNA, 15 bp, Homo sapiens
agatgagctgatttc

SEQ ID NO: 781505 - DNA, 15 bp, Homo sapiens
gatgagctgatttct

SEQ ID NO: 781506 - DNA, 15 bp, Homo sapiens
atgagctgatttctc

SEQ ID NO: 781507 - DNA, 15 bp, Homo sapiens
tgagctgatttctct

SEQ ID NO: 781508 - DNA, 15 bp, Homo sapiens
gagctgatttctcta

SEQ ID NO: 781509 - DNA, 15 bp, Homo sapiens
agctgatttctctac

SEQ ID NO: 781510 - DNA, 15 bp, Homo sapiens
gctgatttctctaca

SEQ ID NO: 781511 - DNA, 15 bp, Homo sapiens
ctgatttctctacaa

SEQ ID NO: 781512 - DNA, 15 bp, Homo sapiens
tgatttctctacaaa

SEQ ID NO: 781513 - DNA, 15 bp, Homo sapiens
gatttctctacaaat

SEQ ID NO: 781514 - DNA, 15 bp, Homo sapiens
atttctctacaaata

SEQ ID NO: 781515 - DNA, 15 bp, Homo sapiens
tttctctacaaatac

SEQ ID NO: 781516 - DNA, 15 bp, Homo sapiens
ttctctacaaatacg

SEQ ID NO: 781517 - DNA, 15 bp, Homo sapiens
tctctacaaatacga

SEQ ID NO: 781518 - DNA, 15 bp, Homo sapiens
ctctacaaatacgac

SEQ ID NO: 781519 - DNA, 15 bp, Homo sapiens
tctacaaatacgact

SEQ ID NO: 781520 - DNA, 15 bp, Homo sapiens
ctacaaatacgactg

SEQ ID NO: 781521 - DNA, 15 bp, Homo sapiens
tacaaatacgactgt

SEQ ID NO: 781522 - DNA, 15 bp, Homo sapiens
acaaatacgactgtg

SEQ ID NO: 781523 - DNA, 15 bp, Homo sapiens
caaatacgactgtgg

SEQ ID NO: 781524 - DNA, 15 bp, Homo sapiens
aaatacgactgtgga

SEQ ID NO: 781525 - DNA, 15 bp, Homo sapiens
aatacgactgtggag

SEQ ID NO: 781526 - DNA, 15 bp, Homo sapiens
atacgactgtggaga

SEQ ID NO: 781527 - DNA, 15 bp, Homo sapiens
tacgactgtggagaa

SEQ ID NO: 781528 - DNA, 15 bp, Homo sapiens
acgactgtggagaat

SEQ ID NO: 781529 - DNA, 15 bp, Homo sapiens
cgactgtggagaatg

SEQ ID NO: 781530 - DNA, 15 bp, Homo sapiens
gactgtggagaatgg

SEQ ID NO: 781531 - DNA, 15 bp, Homo sapiens
actgtggagaatggc

SEQ ID NO: 781532 - DNA, 15 bp, Homo sapiens
ctgtggagaatggca

SEQ ID NO: 781533 - DNA, 15 bp, Homo sapiens
tgtggagaatggcag

SEQ ID NO: 781534 - DNA, 15 bp, Homo sapiens
gtggagaatggcagt

SEQ ID NO: 781535 - DNA, 15 bp, Homo sapiens
tggagaatggcagtc

SEQ ID NO: 781536 - DNA, 15 bp, Homo sapiens
ggagaatggcagtca

SEQ ID NO: 781537 - DNA, 15 bp, Homo sapiens
gagaatggcagtcac

SEQ ID NO: 781538 - DNA, 15 bp, Homo sapiens
agaatggcagtcact

SEQ ID NO: 781539 - DNA, 15 bp, Homo sapiens
gaatggcagtcactt

SEQ ID NO: 781540 - DNA, 15 bp, Homo sapiens
aatggcagtcacttg

SEQ ID NO: 781541 - DNA, 15 bp, Homo sapiens
atggcagtcacttgg

SEQ ID NO: 781542 - DNA, 15 bp, Homo sapiens
tggcagtcacttgga

SEQ ID NO: 781543 - DNA, 15 bp, Homo sapiens
ggcagtcacttggag

SEQ ID NO: 781544 - DNA, 15 bp, Homo sapiens
gcagtcacttggagg

SEQ ID NO: 781545 - DNA, 15 bp, Homo sapiens
cagtcacttggaggt

SEQ ID NO: 781546 - DNA, 15 bp, Homo sapiens
agtcacttggaggta

SEQ ID NO: 781547 - DNA, 15 bp, Homo sapiens
gtcacttggaggtat

SEQ ID NO: 781548 - DNA, 15 bp, Homo sapiens
tcacttggaggtatg

SEQ ID NO: 781549 - DNA, 15 bp, Homo sapiens
cacttggaggtatgg

SEQ ID NO: 781550 - DNA, 15 bp, Homo sapiens
acttggaggtatggc

SEQ ID NO: 781551 - DNA, 15 bp, Homo sapiens
cttggaggtatggct

SEQ ID NO: 781552 - DNA, 15 bp, Homo sapiens
ttggaggtatggctt

SEQ ID NO: 781553 - DNA, 15 bp, Homo sapiens
tggaggtatggcttt

SEQ ID NO: 781554 - DNA, 15 bp, Homo sapiens
ggaggtatggctttg

SEQ ID NO: 781555 - DNA, 15 bp, Homo sapiens
gaggtatggctttgt

SEQ ID NO: 781556 - DNA, 15 bp, Homo sapiens
aggtatggctttgtg

SEQ ID NO: 781557 - DNA, 15 bp, Homo sapiens
ggtatggctttgtgg

SEQ ID NO: 781558 - DNA, 15 bp, Homo sapiens
gtatggctttgtggt

SEQ ID NO: 781559 - DNA, 15 bp, Homo sapiens
tatggctttgtggtc

SEQ ID NO: 781560 - DNA, 15 bp, Homo sapiens
atggctttgtggtca

SEQ ID NO: 781561 - DNA, 15 bp, Homo sapiens
tggctttgtggtcag

SEQ ID NO: 781562 - DNA, 15 bp, Homo sapiens
ggctttgtggtcagc

SEQ ID NO: 781563 - DNA, 15 bp, Homo sapiens
gctttgtggtcagcc

SEQ ID NO: 781564 - DNA, 15 bp, Homo sapiens
ctttgtggtcagccg

SEQ ID NO: 781565 - DNA, 15 bp, Homo sapiens
tttgtggtcagccgg

SEQ ID NO: 781566 - DNA, 15 bp, Homo sapiens
ttgtggtcagccggg

SEQ ID NO: 781567 - DNA, 15 bp, Homo sapiens
tgtggtcagccgggc

SEQ ID NO: 781568 - DNA, 15 bp, Homo sapiens
gtggtcagccgggct

SEQ ID NO: 781569 - DNA, 15 bp, Homo sapiens
tggtcagccgggctt

SEQ ID NO: 781570 - DNA, 15 bp, Homo sapiens
ggtcagccgggctta

SEQ ID NO: 781571 - DNA, 15 bp, Homo sapiens
gtcagccgggcttac

SEQ ID NO: 781572 - DNA, 15 bp, Homo sapiens
tcagccgggcttact

SEQ ID NO: 781573 - DNA, 15 bp, Homo sapiens
cagccgggcttactc

SEQ ID NO: 781574 - DNA, 15 bp, Homo sapiens
agccgggcttactca

SEQ ID NO: 781575 - DNA, 15 bp, Homo sapiens
gccgggcttactcac

SEQ ID NO: 781576 - DNA, 15 bp, Homo sapiens
ccgggcttactcact

SEQ ID NO: 781577 - DNA, 15 bp, Homo sapiens
cgggcttactcacta

SEQ ID NO: 781578 - DNA, 15 bp, Homo sapiens
gggcttactcactag

SEQ ID NO: 781579 - DNA, 15 bp, Homo sapiens
ggcttactcactagc

SEQ ID NO: 781580 - DNA, 15 bp, Homo sapiens
gcttactcactagct

SEQ ID NO: 781581 - DNA, 15 bp, Homo sapiens
cttactcactagctg

SEQ ID NO: 781582 - DNA, 15 bp, Homo sapiens
ttactcactagctga

SEQ ID NO: 781583 - DNA, 15 bp, Homo sapiens
tactcactagctgag

SEQ ID NO: 781584 - DNA, 15 bp, Homo sapiens
actcactagctgagt

SEQ ID NO: 781585 - DNA, 15 bp, Homo sapiens
ctcactagctgagtg

SEQ ID NO: 781586 - DNA, 15 bp, Homo sapiens
tcactagctgagtga

SEQ ID NO: 781587 - DNA, 15 bp, Homo sapiens
cactagctgagtgac

SEQ ID NO: 781588 - DNA, 15 bp, Homo sapiens
actagctgagtgact

SEQ ID NO: 781589 - DNA, 15 bp, Homo sapiens
ctagctgagtgactc

SEQ ID NO: 781590 - DNA, 15 bp, Homo sapiens
tagctgagtgactct

SEQ ID NO: 781591 - DNA, 15 bp, Homo sapiens
agctgagtgactctt

SEQ ID NO: 781592 - DNA, 15 bp, Homo sapiens
gctgagtgactcttt

SEQ ID NO: 781593 - DNA, 15 bp, Homo sapiens
ctgagtgactcttta

SEQ ID NO: 781594 - DNA, 15 bp, Homo sapiens
tgagtgactctttat

SEQ ID NO: 781595 - DNA, 15 bp, Homo sapiens
gagtgactctttata

SEQ ID NO: 781596 - DNA, 15 bp, Homo sapiens
agtgactctttatat

SEQ ID NO: 781597 - DNA, 15 bp, Homo sapiens
gtgactctttatatc

SEQ ID NO: 781598 - DNA, 15 bp, Homo sapiens
tgactctttatatcc

SEQ ID NO: 781599 - DNA, 15 bp, Homo sapiens
gactctttatatcca

SEQ ID NO: 781600 - DNA, 15 bp, Homo sapiens
actctttatatccag

SEQ ID NO: 781601 - DNA, 15 bp, Homo sapiens
ctctttatatccagg

SEQ ID NO: 781602 - DNA, 15 bp, Homo sapiens
tctttatatccaggc

SEQ ID NO: 781603 - DNA, 15 bp, Homo sapiens
ctttatatccaggcc

SEQ ID NO: 781604 - DNA, 15 bp, Homo sapiens
tttatatccaggcca

SEQ ID NO: 781605 - DNA, 15 bp, Homo sapiens
ttatatccaggccat

SEQ ID NO: 781606 - DNA, 15 bp, Homo sapiens
tatatccaggccatt

SEQ ID NO: 781607 - DNA, 15 bp, Homo sapiens
atatccaggccattc

SEQ ID NO: 781608 - DNA, 15 bp, Homo sapiens
tatccaggccattca

SEQ ID NO: 781609 - DNA, 15 bp, Homo sapiens
atccaggccattcag

SEQ ID NO: 781610 - DNA, 15 bp, Homo sapiens
tccaggccattcagt

SEQ ID NO: 781611 - DNA, 15 bp, Homo sapiens
ccaggccattcagtg

SEQ ID NO: 781612 - DNA, 15 bp, Homo sapiens
caggccattcagtgc

SEQ ID NO: 781613 - DNA, 15 bp, Homo sapiens
aggccattcagtgct

SEQ ID NO: 781614 - DNA, 15 bp, Homo sapiens
ggccattcagtgctt

SEQ ID NO: 781615 - DNA, 15 bp, Homo sapiens
gccattcagtgcttt

SEQ ID NO: 781616 - DNA, 15 bp, Homo sapiens
ccattcagtgctttc

SEQ ID NO: 781617 - DNA, 15 bp, Homo sapiens
cattcagtgctttca

SEQ ID NO: 781618 - DNA, 15 bp, Homo sapiens
attcagtgctttcat

SEQ ID NO: 781619 - DNA, 15 bp, Homo sapiens
ttcagtgctttcatt

SEQ ID NO: 781620 - DNA, 15 bp, Homo sapiens
tcagtgctttcattt

SEQ ID NO: 781621 - DNA, 15 bp, Homo sapiens
cagtgctttcatttc

SEQ ID NO: 781622 - DNA, 15 bp, Homo sapiens
agtgctttcatttca

SEQ ID NO: 781623 - DNA, 15 bp, Homo sapiens
gtgctttcatttcaa

SEQ ID NO: 781624 - DNA, 15 bp, Homo sapiens
tgctttcatttcaaa

SEQ ID NO: 781625 - DNA, 15 bp, Homo sapiens
gctttcatttcaaat

SEQ ID NO: 781626 - DNA, 15 bp, Homo sapiens
ctttcatttcaaata

SEQ ID NO: 781627 - DNA, 15 bp, Homo sapiens
tttcatttcaaatat

SEQ ID NO: 781628 - DNA, 15 bp, Homo sapiens
ttcatttcaaatata

SEQ ID NO: 781629 - DNA, 15 bp, Homo sapiens
tcatttcaaatatat

SEQ ID NO: 781630 - DNA, 15 bp, Homo sapiens
catttcaaatatatc

SEQ ID NO: 781631 - DNA, 15 bp, Homo sapiens
atttcaaatatatcc

SEQ ID NO: 781632 - DNA, 15 bp, Homo sapiens
tttcaaatatatccc

SEQ ID NO: 781633 - DNA, 15 bp, Homo sapiens
ttcaaatatatccct

SEQ ID NO: 781634 - DNA, 15 bp, Homo sapiens
tcaaatatatccctc

SEQ ID NO: 781635 - DNA, 15 bp, Homo sapiens
caaatatatccctca

SEQ ID NO: 781636 - DNA, 15 bp, Homo sapiens
aaatatatccctcag

SEQ ID NO: 781637 - DNA, 15 bp, Homo sapiens
aatatatccctcagc

SEQ ID NO: 781638 - DNA, 15 bp, Homo sapiens
atatatccctcagca

SEQ ID NO: 781639 - DNA, 15 bp, Homo sapiens
tatatccctcagcaa

SEQ ID NO: 781640 - DNA, 15 bp, Homo sapiens
atatccctcagcaaa

SEQ ID NO: 781641 - DNA, 15 bp, Homo sapiens
tatccctcagcaaaa

SEQ ID NO: 781642 - DNA, 15 bp, Homo sapiens
atccctcagcaaaac

SEQ ID NO: 781643 - DNA, 15 bp, Homo sapiens
tccctcagcaaaact

SEQ ID NO: 781644 - DNA, 15 bp, Homo sapiens
ccctcagcaaaactg

SEQ ID NO: 781645 - DNA, 15 bp, Homo sapiens
cctcagcaaaactgc

SEQ ID NO: 781646 - DNA, 15 bp, Homo sapiens
ctcagcaaaactgca

SEQ ID NO: 781647 - DNA, 15 bp, Homo sapiens
tcagcaaaactgcaa

SEQ ID NO: 781648 - DNA, 15 bp, Homo sapiens
cagcaaaactgcaaa

SEQ ID NO: 781649 - DNA, 15 bp, Homo sapiens
agcaaaactgcaaaa

SEQ ID NO: 781650 - DNA, 15 bp, Homo sapiens
gcaaaactgcaaaat

SEQ ID NO: 781651 - DNA, 15 bp, Homo sapiens
caaaactgcaaaatg

SEQ ID NO: 781652 - DNA, 15 bp, Homo sapiens
aaaactgcaaaatgc

SEQ ID NO: 781653 - DNA, 15 bp, Homo sapiens
aaactgcaaaatgct

SEQ ID NO: 781654 - DNA, 15 bp, Homo sapiens
aactgcaaaatgcta

SEQ ID NO: 781655 - DNA, 15 bp, Homo sapiens
actgcaaaatgctac

SEQ ID NO: 781656 - DNA, 15 bp, Homo sapiens
ctgcaaaatgctaca

SEQ ID NO: 781657 - DNA, 15 bp, Homo sapiens
tgcaaaatgctacat

SEQ ID NO: 781658 - DNA, 15 bp, Homo sapiens
gcaaaatgctacatg

SEQ ID NO: 781659 - DNA, 15 bp, Homo sapiens
caaaatgctacatgt

SEQ ID NO: 781660 - DNA, 15 bp, Homo sapiens
aaaatgctacatgtc

SEQ ID NO: 781661 - DNA, 15 bp, Homo sapiens
aaatgctacatgtca

SEQ ID NO: 781662 - DNA, 15 bp, Homo sapiens
aatgctacatgtcaa

SEQ ID NO: 781663 - DNA, 15 bp, Homo sapiens
atgctacatgtcaag

SEQ ID NO: 781664 - DNA, 15 bp, Homo sapiens
tgctacatgtcaagg

SEQ ID NO: 781665 - DNA, 15 bp, Homo sapiens
gctacatgtcaagga

SEQ ID NO: 781666 - DNA, 15 bp, Homo sapiens
ctacatgtcaaggac

SEQ ID NO: 781667 - DNA, 15 bp, Homo sapiens
tacatgtcaaggacc

SEQ ID NO: 781668 - DNA, 15 bp, Homo sapiens
acatgtcaaggacct

SEQ ID NO: 781669 - DNA, 15 bp, Homo sapiens
catgtcaaggacctt

SEQ ID NO: 781670 - DNA, 15 bp, Homo sapiens
atgtcaaggaccttt

SEQ ID NO: 781671 - DNA, 15 bp, Homo sapiens
tgtcaaggacctttc

SEQ ID NO: 781672 - DNA, 15 bp, Homo sapiens
gtcaaggacctttcg

SEQ ID NO: 781673 - DNA, 15 bp, Homo sapiens
tcaaggacctttcgg

SEQ ID NO: 781674 - DNA, 15 bp, Homo sapiens
caaggacctttcggg

SEQ ID NO: 781675 - DNA, 15 bp, Homo sapiens
aaggacctttcgggc

SEQ ID NO: 781676 - DNA, 15 bp, Homo sapiens
aggacctttcgggct

SEQ ID NO: 781677 - DNA, 15 bp, Homo sapiens
ggacctttcgggctg

SEQ ID NO: 781678 - DNA, 15 bp, Homo sapiens
gacctttcgggctgc

SEQ ID NO: 781679 - DNA, 15 bp, Homo sapiens
acctttcgggctgct

SEQ ID NO: 781680 - DNA, 15 bp, Homo sapiens
cctttcgggctgctc

SEQ ID NO: 781681 - DNA, 15 bp, Homo sapiens
ctttcgggctgctct

SEQ ID NO: 781682 - DNA, 15 bp, Homo sapiens
tttcgggctgctctc

SEQ ID NO: 781683 - DNA, 15 bp, Homo sapiens
ttcgggctgctctct

SEQ ID NO: 781684 - DNA, 15 bp, Homo sapiens
tcgggctgctctcta

SEQ ID NO: 781685 - DNA, 15 bp, Homo sapiens
cgggctgctctctaa

SEQ ID NO: 781686 - DNA, 15 bp, Homo sapiens
gggctgctctctaat

SEQ ID NO: 781687 - DNA, 15 bp, Homo sapiens
ggctgctctctaata

SEQ ID NO: 781688 - DNA, 15 bp, Homo sapiens
gctgctctctaatag

SEQ ID NO: 781689 - DNA, 15 bp, Homo sapiens
ctgctctctaatagt

SEQ ID NO: 781690 - DNA, 15 bp, Homo sapiens
tgctctctaatagtc

SEQ ID NO: 781691 - DNA, 15 bp, Homo sapiens
gctctctaatagtct

SEQ ID NO: 781692 - DNA, 15 bp, Homo sapiens
ctctctaatagtctt

SEQ ID NO: 781693 - DNA, 15 bp, Homo sapiens
tctctaatagtctta

SEQ ID NO: 781694 - DNA, 15 bp, Homo sapiens
ctctaatagtcttaa

SEQ ID NO: 781695 - DNA, 15 bp, Homo sapiens
tctaatagtcttaat

SEQ ID NO: 781696 - DNA, 15 bp, Homo sapiens
ctaatagtcttaatg

SEQ ID NO: 781697 - DNA, 15 bp, Homo sapiens
taatagtcttaatga

SEQ ID NO: 781698 - DNA, 15 bp, Homo sapiens
aatagtcttaatgag

SEQ ID NO: 781699 - DNA, 15 bp, Homo sapiens
atagtcttaatgagg

SEQ ID NO: 781700 - DNA, 15 bp, Homo sapiens
tagtcttaatgaggg

SEQ ID NO: 781701 - DNA, 15 bp, Homo sapiens
agtcttaatgagggt

SEQ ID NO: 781702 - DNA, 15 bp, Homo sapiens
gtcttaatgagggta

SEQ ID NO: 781703 - DNA, 15 bp, Homo sapiens
tcttaatgagggtaa

SEQ ID NO: 781704 - DNA, 15 bp, Homo sapiens
cttaatgagggtaaa

SEQ ID NO: 781705 - DNA, 15 bp, Homo sapiens
ttaatgagggtaaac

SEQ ID NO: 781706 - DNA, 15 bp, Homo sapiens
taatgagggtaaact

SEQ ID NO: 781707 - DNA, 15 bp, Homo sapiens
aatgagggtaaactc

SEQ ID NO: 781708 - DNA, 15 bp, Homo sapiens
atgagggtaaactca

SEQ ID NO: 781709 - DNA, 15 bp, Homo sapiens
tgagggtaaactcac

SEQ ID NO: 781710 - DNA, 15 bp, Homo sapiens
gagggtaaactcacc

SEQ ID NO: 781711 - DNA, 15 bp, Homo sapiens
agggtaaactcacca

SEQ ID NO: 781712 - DNA, 15 bp, Homo sapiens
gggtaaactcaccaa

SEQ ID NO: 781713 - DNA, 15 bp, Homo sapiens
ggtaaactcaccaaa

SEQ ID NO: 781714 - DNA, 15 bp, Homo sapiens
gtaaactcaccaaaa

SEQ ID NO: 781715 - DNA, 15 bp, Homo sapiens
taaactcaccaaaat

SEQ ID NO: 781716 - DNA, 15 bp, Homo sapiens
aaactcaccaaaatc

SEQ ID NO: 781717 - DNA, 15 bp, Homo sapiens
aactcaccaaaatct

SEQ ID NO: 781718 - DNA, 15 bp, Homo sapiens
actcaccaaaatcta

SEQ ID NO: 781719 - DNA, 15 bp, Homo sapiens
ctcaccaaaatctaa

SEQ ID NO: 781720 - DNA, 15 bp, Homo sapiens
tcaccaaaatctaat

SEQ ID NO: 781721 - DNA, 15 bp, Homo sapiens
caccaaaatctaatg

SEQ ID NO: 781722 - DNA, 15 bp, Homo sapiens
accaaaatctaatgg

SEQ ID NO: 781723 - DNA, 15 bp, Homo sapiens
ccaaaatctaatgga

SEQ ID NO: 781724 - DNA, 15 bp, Homo sapiens
caaaatctaatggat

SEQ ID NO: 781725 - DNA, 15 bp, Homo sapiens
aaaatctaatggatg

SEQ ID NO: 781726 - DNA, 15 bp, Homo sapiens
aaatctaatggatgt

SEQ ID NO: 781727 - DNA, 15 bp, Homo sapiens
aatctaatggatgtg

SEQ ID NO: 781728 - DNA, 15 bp, Homo sapiens
atctaatggatgtgt

SEQ ID NO: 781729 - DNA, 15 bp, Homo sapiens
tctaatggatgtgtt

SEQ ID NO: 781730 - DNA, 15 bp, Homo sapiens
ctaatggatgtgttg

SEQ ID NO: 781731 - DNA, 15 bp, Homo sapiens
taatggatgtgttga

SEQ ID NO: 781732 - DNA, 15 bp, Homo sapiens
aatggatgtgttgaa

SEQ ID NO: 781733 - DNA, 15 bp, Homo sapiens
atggatgtgttgaaa

SEQ ID NO: 781734 - DNA, 15 bp, Homo sapiens
tggatgtgttgaaag

SEQ ID NO: 781735 - DNA, 15 bp, Homo sapiens
ggatgtgttgaaagt

SEQ ID NO: 781736 - DNA, 15 bp, Homo sapiens
gatgtgttgaaagtg

SEQ ID NO: 781737 - DNA, 15 bp, Homo sapiens
atgtgttgaaagtga

SEQ ID NO: 781738 - DNA, 15 bp, Homo sapiens
tgtgttgaaagtgat

SEQ ID NO: 781739 - DNA, 15 bp, Homo sapiens
gtgttgaaagtgatt

SEQ ID NO: 781740 - DNA, 15 bp, Homo sapiens
tgttgaaagtgatta

SEQ ID NO: 781741 - DNA, 15 bp, Homo sapiens
gttgaaagtgattat

SEQ ID NO: 781742 - DNA, 15 bp, Homo sapiens
ttgaaagtgattatc

SEQ ID NO: 781743 - DNA, 15 bp, Homo sapiens
tgaaagtgattatct

SEQ ID NO: 781744 - DNA, 15 bp, Homo sapiens
gaaagtgattatctt

SEQ ID NO: 781745 - DNA, 15 bp, Homo sapiens
aaagtgattatctta

SEQ ID NO: 781746 - DNA, 15 bp, Homo sapiens
aagtgattatcttag

SEQ ID NO: 781747 - DNA, 15 bp, Homo sapiens
agtgattatcttagc

SEQ ID NO: 781748 - DNA, 15 bp, Homo sapiens
gtgattatcttagcc

SEQ ID NO: 781749 - DNA, 15 bp, Homo sapiens
tgattatcttagcca

SEQ ID NO: 781750 - DNA, 15 bp, Homo sapiens
gattatcttagccag

SEQ ID NO: 781751 - DNA, 15 bp, Homo sapiens
attatcttagccagt

SEQ ID NO: 781752 - DNA, 15 bp, Homo sapiens
ttatcttagccagtg

SEQ ID NO: 781753 - DNA, 15 bp, Homo sapiens
tatcttagccagtgt

SEQ ID NO: 781754 - DNA, 15 bp, Homo sapiens
atcttagccagtgtt

SEQ ID NO: 781755 - DNA, 15 bp, Homo sapiens
tcttagccagtgttt

SEQ ID NO: 781756 - DNA, 15 bp, Homo sapiens
cttagccagtgtttt

SEQ ID NO: 781757 - DNA, 15 bp, Homo sapiens
ttagccagtgttttt

SEQ ID NO: 781758 - DNA, 15 bp, Homo sapiens
tagccagtgtttttc

SEQ ID NO: 781759 - DNA, 15 bp, Homo sapiens
agccagtgtttttca

SEQ ID NO: 781760 - DNA, 15 bp, Homo sapiens
gccagtgtttttcac

SEQ ID NO: 781761 - DNA, 15 bp, Homo sapiens
ccagtgtttttcaca

SEQ ID NO: 781762 - DNA, 15 bp, Homo sapiens
cagtgtttttcacat

SEQ ID NO: 781763 - DNA, 15 bp, Homo sapiens
agtgtttttcacatc

SEQ ID NO: 781764 - DNA, 15 bp, Homo sapiens
gtgtttttcacatct

SEQ ID NO: 781765 - DNA, 15 bp, Homo sapiens
tgtttttcacatctt

SEQ ID NO: 781766 - DNA, 15 bp, Homo sapiens
gtttttcacatcttt

SEQ ID NO: 781767 - DNA, 15 bp, Homo sapiens
tttttcacatctttt

SEQ ID NO: 781768 - DNA, 15 bp, Homo sapiens
ttttcacatcttttt

SEQ ID NO: 781769 - DNA, 15 bp, Homo sapiens
tttcacatcttttta

SEQ ID NO: 781770 - DNA, 15 bp, Homo sapiens
ttcacatctttttaa

SEQ ID NO: 781771 - DNA, 15 bp, Homo sapiens
tcacatctttttaaa

SEQ ID NO: 781772 - DNA, 15 bp, Homo sapiens
cacatctttttaaaa

SEQ ID NO: 781773 - DNA, 15 bp, Homo sapiens
acatctttttaaaat

SEQ ID NO: 781774 - DNA, 15 bp, Homo sapiens
catctttttaaaatc

SEQ ID NO: 781775 - DNA, 15 bp, Homo sapiens
atctttttaaaatcc

SEQ ID NO: 781776 - DNA, 15 bp, Homo sapiens
tctttttaaaatcct

SEQ ID NO: 781777 - DNA, 15 bp, Homo sapiens
ctttttaaaatcctt

SEQ ID NO: 781778 - DNA, 15 bp, Homo sapiens
tttttaaaatccttt

SEQ ID NO: 781779 - DNA, 15 bp, Homo sapiens
ttttaaaatcctttg

SEQ ID NO: 781780 - DNA, 15 bp, Homo sapiens
tttaaaatcctttga

SEQ ID NO: 781781 - DNA, 15 bp, Homo sapiens
ttaaaatcctttgac

SEQ ID NO: 781782 - DNA, 15 bp, Homo sapiens
taaaatcctttgaca

SEQ ID NO: 781783 - DNA, 15 bp, Homo sapiens
aaaatcctttgacac

SEQ ID NO: 781784 - DNA, 15 bp, Homo sapiens
aaatcctttgacact

SEQ ID NO: 781785 - DNA, 15 bp, Homo sapiens
aatcctttgacacta

SEQ ID NO: 781786 - DNA, 15 bp, Homo sapiens
atcctttgacactaa

SEQ ID NO: 781787 - DNA, 15 bp, Homo sapiens
tcctttgacactaaa

SEQ ID NO: 781788 - DNA, 15 bp, Homo sapiens
cctttgacactaaaa

SEQ ID NO: 781789 - DNA, 15 bp, Homo sapiens
ctttgacactaaaat

SEQ ID NO: 781790 - DNA, 15 bp, Homo sapiens
tttgacactaaaatt

SEQ ID NO: 781791 - DNA, 15 bp, Homo sapiens
ttgacactaaaattt

SEQ ID NO: 781792 - DNA, 15 bp, Homo sapiens
tgacactaaaatttg

SEQ ID NO: 781793 - DNA, 15 bp, Homo sapiens
gacactaaaatttgt

SEQ ID NO: 781794 - DNA, 15 bp, Homo sapiens
acactaaaatttgtg

SEQ ID NO: 781795 - DNA, 15 bp, Homo sapiens
cactaaaatttgtgc

SEQ ID NO: 781796 - DNA, 15 bp, Homo sapiens
actaaaatttgtgct

SEQ ID NO: 781797 - DNA, 15 bp, Homo sapiens
ctaaaatttgtgctc

SEQ ID NO: 781798 - DNA, 15 bp, Homo sapiens
taaaatttgtgctct

SEQ ID NO: 781799 - DNA, 15 bp, Homo sapiens
aaaatttgtgctcta

SEQ ID NO: 781800 - DNA, 15 bp, Homo sapiens
aaatttgtgctctag

SEQ ID NO: 781801 - DNA, 15 bp, Homo sapiens
aatttgtgctctagt

SEQ ID NO: 781802 - DNA, 15 bp, Homo sapiens
atttgtgctctagta

SEQ ID NO: 781803 - DNA, 15 bp, Homo sapiens
tttgtgctctagtac

SEQ ID NO: 781804 - DNA, 15 bp, Homo sapiens
ttgtgctctagtaca

SEQ ID NO: 781805 - DNA, 15 bp, Homo sapiens
tgtgctctagtacaa

SEQ ID NO: 781806 - DNA, 15 bp, Homo sapiens
gtgctctagtacaaa

SEQ ID NO: 781807 - DNA, 15 bp, Homo sapiens
tgctctagtacaaat

SEQ ID NO: 781808 - DNA, 15 bp, Homo sapiens
gctctagtacaaatt

SEQ ID NO: 781809 - DNA, 15 bp, Homo sapiens
ctctagtacaaatta

SEQ ID NO: 781810 - DNA, 15 bp, Homo sapiens
tctagtacaaattag

SEQ ID NO: 781811 - DNA, 15 bp, Homo sapiens
ctagtacaaattagg

SEQ ID NO: 781812 - DNA, 15 bp, Homo sapiens
tagtacaaattaggt

SEQ ID NO: 781813 - DNA, 15 bp, Homo sapiens
agtacaaattaggtc

SEQ ID NO: 781814 - DNA, 15 bp, Homo sapiens
gtacaaattaggtct

SEQ ID NO: 781815 - DNA, 15 bp, Homo sapiens
tacaaattaggtctc

SEQ ID NO: 781816 - DNA, 15 bp, Homo sapiens
acaaattaggtctcc

SEQ ID NO: 781817 - DNA, 15 bp, Homo sapiens
caaattaggtctcca

SEQ ID NO: 781818 - DNA, 15 bp, Homo sapiens
aaattaggtctccag

SEQ ID NO: 781819 - DNA, 15 bp, Homo sapiens
aattaggtctccagt

SEQ ID NO: 781820 - DNA, 15 bp, Homo sapiens
attaggtctccagtt

SEQ ID NO: 781821 - DNA, 15 bp, Homo sapiens
ttaggtctccagtta

SEQ ID NO: 781822 - DNA, 15 bp, Homo sapiens
taggtctccagttaa

SEQ ID NO: 781823 - DNA, 15 bp, Homo sapiens
aggtctccagttaaa

SEQ ID NO: 781824 - DNA, 15 bp, Homo sapiens
ggtctccagttaaat

SEQ ID NO: 781825 - DNA, 15 bp, Homo sapiens
gtctccagttaaatg

SEQ ID NO: 781826 - DNA, 15 bp, Homo sapiens
tctccagttaaatga

SEQ ID NO: 781827 - DNA, 15 bp, Homo sapiens
ctccagttaaatgat

SEQ ID NO: 781828 - DNA, 15 bp, Homo sapiens
tccagttaaatgatg

SEQ ID NO: 781829 - DNA, 15 bp, Homo sapiens
ccagttaaatgatga

SEQ ID NO: 781830 - DNA, 15 bp, Homo sapiens
cagttaaatgatgat

SEQ ID NO: 781831 - DNA, 15 bp, Homo sapiens
agttaaatgatgata

SEQ ID NO: 781832 - DNA, 15 bp, Homo sapiens
gttaaatgatgataa

SEQ ID NO: 781833 - DNA, 15 bp, Homo sapiens
ttaaatgatgataat

SEQ ID NO: 781834 - DNA, 15 bp, Homo sapiens
taaatgatgataata

SEQ ID NO: 781835 - DNA, 15 bp, Homo sapiens
aaatgatgataatac

SEQ ID NO: 781836 - DNA, 15 bp, Homo sapiens
aatgatgataatacc

SEQ ID NO: 781837 - DNA, 15 bp, Homo sapiens
atgatgataatacct

SEQ ID NO: 781838 - DNA, 15 bp, Homo sapiens
tgatgataataccta

SEQ ID NO: 781839 - DNA, 15 bp, Homo sapiens
gatgataatacctaa

SEQ ID NO: 781840 - DNA, 15 bp, Homo sapiens
atgataatacctaaa

SEQ ID NO: 781841 - DNA, 15 bp, Homo sapiens
tgataatacctaaaa

SEQ ID NO: 781842 - DNA, 15 bp, Homo sapiens
gataatacctaaaat

SEQ ID NO: 781843 - DNA, 15 bp, Homo sapiens
ataatacctaaaata

SEQ ID NO: 781844 - DNA, 15 bp, Homo sapiens
taatacctaaaatag

SEQ ID NO: 781845 - DNA, 15 bp, Homo sapiens
aatacctaaaatagt

SEQ ID NO: 781846 - DNA, 15 bp, Homo sapiens
atacctaaaatagtt

SEQ ID NO: 781847 - DNA, 15 bp, Homo sapiens
tacctaaaatagttt

SEQ ID NO: 781848 - DNA, 15 bp, Homo sapiens
acctaaaatagtttt

SEQ ID NO: 781849 - DNA, 15 bp, Homo sapiens
cctaaaatagtttta

SEQ ID NO: 781850 - DNA, 15 bp, Homo sapiens
ctaaaatagttttag

SEQ ID NO: 781851 - DNA, 15 bp, Homo sapiens
taaaatagttttagt

SEQ ID NO: 781852 - DNA, 15 bp, Homo sapiens
aaaatagttttagta

SEQ ID NO: 781853 - DNA, 15 bp, Homo sapiens
aaatagttttagtag

SEQ ID NO: 781854 - DNA, 15 bp, Homo sapiens
aatagttttagtagc

SEQ ID NO: 781855 - DNA, 15 bp, Homo sapiens
atagttttagtagct

SEQ ID NO: 781856 - DNA, 15 bp, Homo sapiens
tagttttagtagcta

SEQ ID NO: 781857 - DNA, 15 bp, Homo sapiens
agttttagtagctag

SEQ ID NO: 781858 - DNA, 15 bp, Homo sapiens
gttttagtagctagt

SEQ ID NO: 781859 - DNA, 15 bp, Homo sapiens
ttttagtagctagtg

SEQ ID NO: 781860 - DNA, 15 bp, Homo sapiens
tttagtagctagtga

SEQ ID NO: 781861 - DNA, 15 bp, Homo sapiens
ttagtagctagtgaa

SEQ ID NO: 781862 - DNA, 15 bp, Homo sapiens
tagtagctagtgaac

SEQ ID NO: 781863 - DNA, 15 bp, Homo sapiens
agtagctagtgaaca

SEQ ID NO: 781864 - DNA, 15 bp, Homo sapiens
gtagctagtgaacac

SEQ ID NO: 781865 - DNA, 15 bp, Homo sapiens
tagctagtgaacact

SEQ ID NO: 781866 - DNA, 15 bp, Homo sapiens
agctagtgaacactt

SEQ ID NO: 781867 - DNA, 15 bp, Homo sapiens
gctagtgaacactta

SEQ ID NO: 781868 - DNA, 15 bp, Homo sapiens
ctagtgaacacttac

SEQ ID NO: 781869 - DNA, 15 bp, Homo sapiens
tagtgaacacttact

SEQ ID NO: 781870 - DNA, 15 bp, Homo sapiens
agtgaacacttactt

SEQ ID NO: 781871 - DNA, 15 bp, Homo sapiens
gtgaacacttactta

SEQ ID NO: 781872 - DNA, 15 bp, Homo sapiens
tgaacacttacttag

SEQ ID NO: 781873 - DNA, 15 bp, Homo sapiens
gaacacttacttagt

SEQ ID NO: 781874 - DNA, 15 bp, Homo sapiens
aacacttacttagta

SEQ ID NO: 781875 - DNA, 15 bp, Homo sapiens
acacttacttagtaa

SEQ ID NO: 781876 - DNA, 15 bp, Homo sapiens
cacttacttagtaaa

SEQ ID NO: 781877 - DNA, 15 bp, Homo sapiens
acttacttagtaaag

SEQ ID NO: 781878 - DNA, 15 bp, Homo sapiens
cttacttagtaaagt

SEQ ID NO: 781879 - DNA, 15 bp, Homo sapiens
ttacttagtaaagtt

SEQ ID NO: 781880 - DNA, 15 bp, Homo sapiens
tacttagtaaagtta

SEQ ID NO: 781881 - DNA, 15 bp, Homo sapiens
acttagtaaagttat

SEQ ID NO: 781882 - DNA, 15 bp, Homo sapiens
cttagtaaagttatt

SEQ ID NO: 781883 - DNA, 15 bp, Homo sapiens
ttagtaaagttattt

SEQ ID NO: 781884 - DNA, 15 bp, Homo sapiens
tagtaaagttatttc

SEQ ID NO: 781885 - DNA, 15 bp, Homo sapiens
agtaaagttatttca

SEQ ID NO: 781886 - DNA, 15 bp, Homo sapiens
gtaaagttatttcat

SEQ ID NO: 781887 - DNA, 15 bp, Homo sapiens
taaagttatttcata

SEQ ID NO: 781888 - DNA, 15 bp, Homo sapiens
aaagttatttcataa

SEQ ID NO: 781889 - DNA, 15 bp, Homo sapiens
aagttatttcataat

SEQ ID NO: 781890 - DNA, 15 bp, Homo sapiens
agttatttcataatt

SEQ ID NO: 781891 - DNA, 15 bp, Homo sapiens
gttatttcataattt

SEQ ID NO: 781892 - DNA, 15 bp, Homo sapiens
ttatttcataatttc

SEQ ID NO: 781893 - DNA, 15 bp, Homo sapiens
tatttcataatttcc

SEQ ID NO: 781894 - DNA, 15 bp, Homo sapiens
atttcataatttcca

SEQ ID NO: 781895 - DNA, 15 bp, Homo sapiens
tttcataatttccac

SEQ ID NO: 781896 - DNA, 15 bp, Homo sapiens
ttcataatttccaca

SEQ ID NO: 781897 - DNA, 15 bp, Homo sapiens
tcataatttccacat

SEQ ID NO: 781898 - DNA, 15 bp, Homo sapiens
cataatttccacatt

SEQ ID NO: 781899 - DNA, 15 bp, Homo sapiens
ataatttccacatta

SEQ ID NO: 781900 - DNA, 15 bp, Homo sapiens
taatttccacattat

SEQ ID NO: 781901 - DNA, 15 bp, Homo sapiens
aatttccacattatt

SEQ ID NO: 781902 - DNA, 15 bp, Homo sapiens
atttccacattattt

SEQ ID NO: 781903 - DNA, 15 bp, Homo sapiens
tttccacattatttg

SEQ ID NO: 781904 - DNA, 15 bp, Homo sapiens
ttccacattatttgg

SEQ ID NO: 781905 - DNA, 15 bp, Homo sapiens
tccacattatttggt

SEQ ID NO: 781906 - DNA, 15 bp, Homo sapiens
ccacattatttggta

SEQ ID NO: 781907 - DNA, 15 bp, Homo sapiens
cacattatttggtag

SEQ ID NO: 781908 - DNA, 15 bp, Homo sapiens
acattatttggtagg

SEQ ID NO: 781909 - DNA, 15 bp, Homo sapiens
cattatttggtaggg

SEQ ID NO: 781910 - DNA, 15 bp, Homo sapiens
attatttggtagggt

SEQ ID NO: 781911 - DNA, 15 bp, Homo sapiens
ttatttggtagggtt

SEQ ID NO: 781912 - DNA, 15 bp, Homo sapiens
tatttggtagggttg

SEQ ID NO: 781913 - DNA, 15 bp, Homo sapiens
atttggtagggttgg

SEQ ID NO: 781914 - DNA, 15 bp, Homo sapiens
tttggtagggttggt

SEQ ID NO: 781915 - DNA, 15 bp, Homo sapiens
ttggtagggttggtt

SEQ ID NO: 781916 - DNA, 15 bp, Homo sapiens
tggtagggttggttg

SEQ ID NO: 781917 - DNA, 15 bp, Homo sapiens
ggtagggttggttga

SEQ ID NO: 781918 - DNA, 15 bp, Homo sapiens
gtagggttggttgac

SEQ ID NO: 781919 - DNA, 15 bp, Homo sapiens
tagggttggttgact

SEQ ID NO: 781920 - DNA, 15 bp, Homo sapiens
agggttggttgactt

SEQ ID NO: 781921 - DNA, 15 bp, Homo sapiens
gggttggttgactta

SEQ ID NO: 781922 - DNA, 15 bp, Homo sapiens
ggttggttgacttag

SEQ ID NO: 781923 - DNA, 15 bp, Homo sapiens
gttggttgacttagg

SEQ ID NO: 781924 - DNA, 15 bp, Homo sapiens
ttggttgacttaggt

SEQ ID NO: 781925 - DNA, 15 bp, Homo sapiens
tggttgacttaggtg

SEQ ID NO: 781926 - DNA, 15 bp, Homo sapiens
ggttgacttaggtga

SEQ ID NO: 781927 - DNA, 15 bp, Homo sapiens
gttgacttaggtgaa

SEQ ID NO: 781928 - DNA, 15 bp, Homo sapiens
ttgacttaggtgaaa

SEQ ID NO: 781929 - DNA, 15 bp, Homo sapiens
tgacttaggtgaaaa

SEQ ID NO: 781930 - DNA, 15 bp, Homo sapiens
gacttaggtgaaaaa

SEQ ID NO: 781931 - DNA, 15 bp, Homo sapiens
acttaggtgaaaaat

SEQ ID NO: 781932 - DNA, 15 bp, Homo sapiens
cttaggtgaaaaatg

SEQ ID NO: 781933 - DNA, 15 bp, Homo sapiens
ttaggtgaaaaatga

SEQ ID NO: 781934 - DNA, 15 bp, Homo sapiens
taggtgaaaaatgac

SEQ ID NO: 781935 - DNA, 15 bp, Homo sapiens
aggtgaaaaatgacc

SEQ ID NO: 781936 - DNA, 15 bp, Homo sapiens
ggtgaaaaatgacca

SEQ ID NO: 781937 - DNA, 15 bp, Homo sapiens
gtgaaaaatgaccaa

SEQ ID NO: 781938 - DNA, 15 bp, Homo sapiens
tgaaaaatgaccaat

SEQ ID NO: 781939 - DNA, 15 bp, Homo sapiens
gaaaaatgaccaatg

SEQ ID NO: 781940 - DNA, 15 bp, Homo sapiens
aaaaatgaccaatga

SEQ ID NO: 781941 - DNA, 15 bp, Homo sapiens
aaaatgaccaatgag

SEQ ID NO: 781942 - DNA, 15 bp, Homo sapiens
aaatgaccaatgaga

SEQ ID NO: 781943 - DNA, 15 bp, Homo sapiens
aatgaccaatgagaa

SEQ ID NO: 781944 - DNA, 15 bp, Homo sapiens
atgaccaatgagaag

SEQ ID NO: 781945 - DNA, 15 bp, Homo sapiens
tgaccaatgagaagt

SEQ ID NO: 781946 - DNA, 15 bp, Homo sapiens
gaccaatgagaagtg

SEQ ID NO: 781947 - DNA, 15 bp, Homo sapiens
accaatgagaagtgc

SEQ ID NO: 781948 - DNA, 15 bp, Homo sapiens
ccaatgagaagtgca

SEQ ID NO: 781949 - DNA, 15 bp, Homo sapiens
caatgagaagtgcat

SEQ ID NO: 781950 - DNA, 15 bp, Homo sapiens
aatgagaagtgcatg

SEQ ID NO: 781951 - DNA, 15 bp, Homo sapiens
atgagaagtgcatga

SEQ ID NO: 781952 - DNA, 15 bp, Homo sapiens
tgagaagtgcatgac

SEQ ID NO: 781953 - DNA, 15 bp, Homo sapiens
gagaagtgcatgaca

SEQ ID NO: 781954 - DNA, 15 bp, Homo sapiens
agaagtgcatgacag

SEQ ID NO: 781955 - DNA, 15 bp, Homo sapiens
gaagtgcatgacaga

SEQ ID NO: 781956 - DNA, 15 bp, Homo sapiens
aagtgcatgacagat

SEQ ID NO: 781957 - DNA, 15 bp, Homo sapiens
agtgcatgacagatg

SEQ ID NO: 781958 - DNA, 15 bp, Homo sapiens
gtgcatgacagatgc

SEQ ID NO: 781959 - DNA, 15 bp, Homo sapiens
tgcatgacagatgct

SEQ ID NO: 781960 - DNA, 15 bp, Homo sapiens
gcatgacagatgctg

SEQ ID NO: 781961 - DNA, 15 bp, Homo sapiens
catgacagatgctgt

SEQ ID NO: 781962 - DNA, 15 bp, Homo sapiens
atgacagatgctgtt

SEQ ID NO: 781963 - DNA, 15 bp, Homo sapiens
tgacagatgctgtta

SEQ ID NO: 781964 - DNA, 15 bp, Homo sapiens
gacagatgctgttac

SEQ ID NO: 781965 - DNA, 15 bp, Homo sapiens
acagatgctgttaca

SEQ ID NO: 781966 - DNA, 15 bp, Homo sapiens
cagatgctgttacag

SEQ ID NO: 781967 - DNA, 15 bp, Homo sapiens
agatgctgttacaga

SEQ ID NO: 781968 - DNA, 15 bp, Homo sapiens
gatgctgttacagat

SEQ ID NO: 781969 - DNA, 15 bp, Homo sapiens
atgctgttacagatt

SEQ ID NO: 781970 - DNA, 15 bp, Homo sapiens
tgctgttacagattt

SEQ ID NO: 781971 - DNA, 15 bp, Homo sapiens
gctgttacagattta

SEQ ID NO: 781972 - DNA, 15 bp, Homo sapiens
ctgttacagatttaa

SEQ ID NO: 781973 - DNA, 15 bp, Homo sapiens
tgttacagatttaac

SEQ ID NO: 781974 - DNA, 15 bp, Homo sapiens
gttacagatttaacc

SEQ ID NO: 781975 - DNA, 15 bp, Homo sapiens
ttacagatttaacca

SEQ ID NO: 781976 - DNA, 15 bp, Homo sapiens
tacagatttaaccat

SEQ ID NO: 781977 - DNA, 15 bp, Homo sapiens
acagatttaaccatc

SEQ ID NO: 781978 - DNA, 15 bp, Homo sapiens
cagatttaaccatct

SEQ ID NO: 781979 - DNA, 15 bp, Homo sapiens
agatttaaccatctc

SEQ ID NO: 781980 - DNA, 15 bp, Homo sapiens
gatttaaccatctcg

SEQ ID NO: 781981 - DNA, 15 bp, Homo sapiens
atttaaccatctcga

SEQ ID NO: 781982 - DNA, 15 bp, Homo sapiens
tttaaccatctcgac

SEQ ID NO: 781983 - DNA, 15 bp, Homo sapiens
ttaaccatctcgaca

SEQ ID NO: 781984 - DNA, 15 bp, Homo sapiens
taaccatctcgacag

SEQ ID NO: 781985 - DNA, 15 bp, Homo sapiens
aaccatctcgacagt

SEQ ID NO: 781986 - DNA, 15 bp, Homo sapiens
accatctcgacagta

SEQ ID NO: 781987 - DNA, 15 bp, Homo sapiens
ccatctcgacagtat

SEQ ID NO: 781988 - DNA, 15 bp, Homo sapiens
catctcgacagtatt

SEQ ID NO: 781989 - DNA, 15 bp, Homo sapiens
atctcgacagtattc

SEQ ID NO: 781990 - DNA, 15 bp, Homo sapiens
tctcgacagtattct

SEQ ID NO: 781991 - DNA, 15 bp, Homo sapiens
ctcgacagtattctt

SEQ ID NO: 781992 - DNA, 15 bp, Homo sapiens
tcgacagtattcttg

SEQ ID NO: 781993 - DNA, 15 bp, Homo sapiens
cgacagtattcttga

SEQ ID NO: 781994 - DNA, 15 bp, Homo sapiens
gacagtattcttgaa

SEQ ID NO: 781995 - DNA, 15 bp, Homo sapiens
acagtattcttgaag

SEQ ID NO: 781996 - DNA, 15 bp, Homo sapiens
cagtattcttgaaga

SEQ ID NO: 781997 - DNA, 15 bp, Homo sapiens
agtattcttgaagaa

SEQ ID NO: 781998 - DNA, 15 bp, Homo sapiens
gtattcttgaagaaa

SEQ ID NO: 781999 - DNA, 15 bp, Homo sapiens
tattcttgaagaaag

SEQ ID NO: 782000 - DNA, 15 bp, Homo sapiens
attcttgaagaaagt

SEQ ID NO: 782001 - DNA, 15 bp, Homo sapiens
ttcttgaagaaagtg

SEQ ID NO: 782002 - DNA, 15 bp, Homo sapiens
tcttgaagaaagtgg

SEQ ID NO: 782003 - DNA, 15 bp, Homo sapiens
cttgaagaaagtggt

SEQ ID NO: 782004 - DNA, 15 bp, Homo sapiens
ttgaagaaagtggta

SEQ ID NO: 782005 - DNA, 15 bp, Homo sapiens
tgaagaaagtggtac

SEQ ID NO: 782006 - DNA, 15 bp, Homo sapiens
gaagaaagtggtaca

SEQ ID NO: 782007 - DNA, 15 bp, Homo sapiens
aagaaagtggtacat

SEQ ID NO: 782008 - DNA, 15 bp, Homo sapiens
agaaagtggtacatt

SEQ ID NO: 782009 - DNA, 15 bp, Homo sapiens
gaaagtggtacatta

SEQ ID NO: 782010 - DNA, 15 bp, Homo sapiens
aaagtggtacattat

SEQ ID NO: 782011 - DNA, 15 bp, Homo sapiens
aagtggtacattatc

SEQ ID NO: 782012 - DNA, 15 bp, Homo sapiens
agtggtacattatct

SEQ ID NO: 782013 - DNA, 15 bp, Homo sapiens
gtggtacattatctt

SEQ ID NO: 782014 - DNA, 15 bp, Homo sapiens
tggtacattatcttg

SEQ ID NO: 782015 - DNA, 15 bp, Homo sapiens
ggtacattatcttga

SEQ ID NO: 782016 - DNA, 15 bp, Homo sapiens
gtacattatcttgaa

SEQ ID NO: 782017 - DNA, 15 bp, Homo sapiens
tacattatcttgaat

SEQ ID NO: 782018 - DNA, 15 bp, Homo sapiens
acattatcttgaata

SEQ ID NO: 782019 - DNA, 15 bp, Homo sapiens
cattatcttgaatag

SEQ ID NO: 782020 - DNA, 15 bp, Homo sapiens
attatcttgaatagg

SEQ ID NO: 782021 - DNA, 15 bp, Homo sapiens
ttatcttgaatagga

SEQ ID NO: 782022 - DNA, 15 bp, Homo sapiens
tatcttgaataggag

SEQ ID NO: 782023 - DNA, 15 bp, Homo sapiens
atcttgaataggagg

SEQ ID NO: 782024 - DNA, 15 bp, Homo sapiens
tcttgaataggaggc

SEQ ID NO: 782025 - DNA, 15 bp, Homo sapiens
cttgaataggaggcc

SEQ ID NO: 782026 - DNA, 15 bp, Homo sapiens
ttgaataggaggcca

SEQ ID NO: 782027 - DNA, 15 bp, Homo sapiens
tgaataggaggccaa

SEQ ID NO: 782028 - DNA, 15 bp, Homo sapiens
gaataggaggccaaa

SEQ ID NO: 782029 - DNA, 15 bp, Homo sapiens
aataggaggccaaaa

SEQ ID NO: 782030 - DNA, 15 bp, Homo sapiens
ataggaggccaaaat

SEQ ID NO: 782031 - DNA, 15 bp, Homo sapiens
taggaggccaaaata

SEQ ID NO: 782032 - DNA, 15 bp, Homo sapiens
aggaggccaaaataa

SEQ ID NO: 782033 - DNA, 15 bp, Homo sapiens
ggaggccaaaataat

SEQ ID NO: 782034 - DNA, 15 bp, Homo sapiens
gaggccaaaataatg

SEQ ID NO: 782035 - DNA, 15 bp, Homo sapiens
aggccaaaataatgg

SEQ ID NO: 782036 - DNA, 15 bp, Homo sapiens
ggccaaaataatggt

SEQ ID NO: 782037 - DNA, 15 bp, Homo sapiens
gccaaaataatggtc

SEQ ID NO: 782038 - DNA, 15 bp, Homo sapiens
ccaaaataatggtct

SEQ ID NO: 782039 - DNA, 15 bp, Homo sapiens
caaaataatggtctt

SEQ ID NO: 782040 - DNA, 15 bp, Homo sapiens
aaaataatggtctta

SEQ ID NO: 782041 - DNA, 15 bp, Homo sapiens
aaataatggtcttaa

SEQ ID NO: 782042 - DNA, 15 bp, Homo sapiens
aataatggtcttaaa

SEQ ID NO: 782043 - DNA, 15 bp, Homo sapiens
ataatggtcttaaaa

SEQ ID NO: 782044 - DNA, 15 bp, Homo sapiens
taatggtcttaaaat

SEQ ID NO: 782045 - DNA, 15 bp, Homo sapiens
aatggtcttaaaatt

SEQ ID NO: 782046 - DNA, 15 bp, Homo sapiens
atggtcttaaaattc

SEQ ID NO: 782047 - DNA, 15 bp, Homo sapiens
tggtcttaaaattca

SEQ ID NO: 782048 - DNA, 15 bp, Homo sapiens
ggtcttaaaattcac

SEQ ID NO: 782049 - DNA, 15 bp, Homo sapiens
gtcttaaaattcaca

SEQ ID NO: 782050 - DNA, 15 bp, Homo sapiens
tcttaaaattcacat

SEQ ID NO: 782051 - DNA, 15 bp, Homo sapiens
cttaaaattcacatt

SEQ ID NO: 782052 - DNA, 15 bp, Homo sapiens
ttaaaattcacattt

SEQ ID NO: 782053 - DNA, 15 bp, Homo sapiens
taaaattcacattta

SEQ ID NO: 782054 - DNA, 15 bp, Homo sapiens
aaaattcacatttac

SEQ ID NO: 782055 - DNA, 15 bp, Homo sapiens
aaattcacatttact

SEQ ID NO: 782056 - DNA, 15 bp, Homo sapiens
aattcacatttactt

SEQ ID NO: 782057 - DNA, 15 bp, Homo sapiens
attcacatttactta

SEQ ID NO: 782058 - DNA, 15 bp, Homo sapiens
ttcacatttacttat

SEQ ID NO: 782059 - DNA, 15 bp, Homo sapiens
tcacatttacttata

SEQ ID NO: 782060 - DNA, 15 bp, Homo sapiens
cacatttacttatat

SEQ ID NO: 782061 - DNA, 15 bp, Homo sapiens
acatttacttatatc

SEQ ID NO: 782062 - DNA, 15 bp, Homo sapiens
catttacttatatct

SEQ ID NO: 782063 - DNA, 15 bp, Homo sapiens
atttacttatatctt

SEQ ID NO: 782064 - DNA, 15 bp, Homo sapiens
tttacttatatcttt

SEQ ID NO: 782065 - DNA, 15 bp, Homo sapiens
ttacttatatctttt

SEQ ID NO: 782066 - DNA, 15 bp, Homo sapiens
tacttatatcttttg

SEQ ID NO: 782067 - DNA, 15 bp, Homo sapiens
acttatatcttttgt

SEQ ID NO: 782068 - DNA, 15 bp, Homo sapiens
cttatatcttttgtt

SEQ ID NO: 782069 - DNA, 15 bp, Homo sapiens
ttatatcttttgtta

SEQ ID NO: 782070 - DNA, 15 bp, Homo sapiens
tatatcttttgttat

SEQ ID NO: 782071 - DNA, 15 bp, Homo sapiens
atatcttttgttatt

SEQ ID NO: 782072 - DNA, 15 bp, Homo sapiens
tatcttttgttattt

SEQ ID NO: 782073 - DNA, 15 bp, Homo sapiens
atcttttgttatttc

SEQ ID NO: 782074 - DNA, 15 bp, Homo sapiens
tcttttgttatttca

SEQ ID NO: 782075 - DNA, 15 bp, Homo sapiens
cttttgttatttcat

SEQ ID NO: 782076 - DNA, 15 bp, Homo sapiens
ttttgttatttcata

SEQ ID NO: 782077 - DNA, 15 bp, Homo sapiens
tttgttatttcataa

SEQ ID NO: 782078 - DNA, 15 bp, Homo sapiens
ttgttatttcataaa

SEQ ID NO: 782079 - DNA, 15 bp, Homo sapiens
tgttatttcataaag

SEQ ID NO: 782080 - DNA, 15 bp, Homo sapiens
gttatttcataaaga

SEQ ID NO: 782081 - DNA, 15 bp, Homo sapiens
ttatttcataaagaa

SEQ ID NO: 782082 - DNA, 15 bp, Homo sapiens
tatttcataaagaat

SEQ ID NO: 782083 - DNA, 15 bp, Homo sapiens
atttcataaagaatt

SEQ ID NO: 782084 - DNA, 15 bp, Homo sapiens
tttcataaagaattt

SEQ ID NO: 782085 - DNA, 15 bp, Homo sapiens
ttcataaagaatttg

SEQ ID NO: 782086 - DNA, 15 bp, Homo sapiens
tcataaagaatttga

SEQ ID NO: 782087 - DNA, 15 bp, Homo sapiens
cataaagaatttgag

SEQ ID NO: 782088 - DNA, 15 bp, Homo sapiens
ataaagaatttgaga

SEQ ID NO: 782089 - DNA, 15 bp, Homo sapiens
taaagaatttgagat

SEQ ID NO: 782090 - DNA, 15 bp, Homo sapiens
aaagaatttgagata

SEQ ID NO: 782091 - DNA, 15 bp, Homo sapiens
aagaatttgagatag

SEQ ID NO: 782092 - DNA, 15 bp, Homo sapiens
agaatttgagatagt

SEQ ID NO: 782093 - DNA, 15 bp, Homo sapiens
gaatttgagatagta

SEQ ID NO: 782094 - DNA, 15 bp, Homo sapiens
aatttgagatagtaa

SEQ ID NO: 782095 - DNA, 15 bp, Homo sapiens
atttgagatagtaac

SEQ ID NO: 782096 - DNA, 15 bp, Homo sapiens
tttgagatagtaaca

SEQ ID NO: 782097 - DNA, 15 bp, Homo sapiens
ttgagatagtaacat

SEQ ID NO: 782098 - DNA, 15 bp, Homo sapiens
tgagatagtaacata

SEQ ID NO: 782099 - DNA, 15 bp, Homo sapiens
gagatagtaacatat

SEQ ID NO: 782100 - DNA, 15 bp, Homo sapiens
agatagtaacatatt

SEQ ID NO: 782101 - DNA, 15 bp, Homo sapiens
gatagtaacatattt

SEQ ID NO: 782102 - DNA, 15 bp, Homo sapiens
atagtaacatatttg

SEQ ID NO: 782103 - DNA, 15 bp, Homo sapiens
tagtaacatatttgt

SEQ ID NO: 782104 - DNA, 15 bp, Homo sapiens
agtaacatatttgtt

SEQ ID NO: 782105 - DNA, 15 bp, Homo sapiens
gtaacatatttgttg

SEQ ID NO: 782106 - DNA, 15 bp, Homo sapiens
taacatatttgttga

SEQ ID NO: 782107 - DNA, 15 bp, Homo sapiens
aacatatttgttgaa

SEQ ID NO: 782108 - DNA, 15 bp, Homo sapiens
acatatttgttgaat

SEQ ID NO: 782109 - DNA, 15 bp, Homo sapiens
catatttgttgaatt

SEQ ID NO: 782110 - DNA, 15 bp, Homo sapiens
atatttgttgaattg

SEQ ID NO: 782111 - DNA, 15 bp, Homo sapiens
tatttgttgaattga

SEQ ID NO: 782112 - DNA, 15 bp, Homo sapiens
atttgttgaattgaa

SEQ ID NO: 782113 - DNA, 15 bp, Homo sapiens
tttgttgaattgaaa

SEQ ID NO: 782114 - DNA, 15 bp, Homo sapiens
ttgttgaattgaaag

SEQ ID NO: 782115 - DNA, 15 bp, Homo sapiens
tgttgaattgaaagc

SEQ ID NO: 782116 - DNA, 15 bp, Homo sapiens
gttgaattgaaagct

SEQ ID NO: 782117 - DNA, 15 bp, Homo sapiens
ttgaattgaaagcta

SEQ ID NO: 782118 - DNA, 15 bp, Homo sapiens
tgaattgaaagctac

SEQ ID NO: 782119 - DNA, 15 bp, Homo sapiens
gaattgaaagctacc

SEQ ID NO: 782120 - DNA, 15 bp, Homo sapiens
aattgaaagctacct

SEQ ID NO: 782121 - DNA, 15 bp, Homo sapiens
attgaaagctaccta

SEQ ID NO: 782122 - DNA, 15 bp, Homo sapiens
ttgaaagctacctac

SEQ ID NO: 782123 - DNA, 15 bp, Homo sapiens
tgaaagctacctaca

SEQ ID NO: 782124 - DNA, 15 bp, Homo sapiens
gaaagctacctacat

SEQ ID NO: 782125 - DNA, 15 bp, Homo sapiens
aaagctacctacata

SEQ ID NO: 782126 - DNA, 15 bp, Homo sapiens
aagctacctacatat

SEQ ID NO: 782127 - DNA, 15 bp, Homo sapiens
agctacctacatatt

SEQ ID NO: 782128 - DNA, 15 bp, Homo sapiens
gctacctacatattt

SEQ ID NO: 782129 - DNA, 15 bp, Homo sapiens
ctacctacatatttt

SEQ ID NO: 782130 - DNA, 15 bp, Homo sapiens
tacctacatattttt

SEQ ID NO: 782131 - DNA, 15 bp, Homo sapiens
acctacatatttttg

SEQ ID NO: 782132 - DNA, 15 bp, Homo sapiens
cctacatatttttgt

SEQ ID NO: 782133 - DNA, 15 bp, Homo sapiens
ctacatatttttgtg

SEQ ID NO: 782134 - DNA, 15 bp, Homo sapiens
tacatatttttgtgc

SEQ ID NO: 782135 - DNA, 15 bp, Homo sapiens
acatatttttgtgcc

SEQ ID NO: 782136 - DNA, 15 bp, Homo sapiens
catatttttgtgcct

SEQ ID NO: 782137 - DNA, 15 bp, Homo sapiens
atatttttgtgcctt

SEQ ID NO: 782138 - DNA, 15 bp, Homo sapiens
tatttttgtgccttt

SEQ ID NO: 782139 - DNA, 15 bp, Homo sapiens
atttttgtgccttta

SEQ ID NO: 782140 - DNA, 15 bp, Homo sapiens
tttttgtgcctttac

SEQ ID NO: 782141 - DNA, 15 bp, Homo sapiens
ttttgtgcctttact

SEQ ID NO: 782142 - DNA, 15 bp, Homo sapiens
tttgtgcctttactt

SEQ ID NO: 782143 - DNA, 15 bp, Homo sapiens
ttgtgcctttacttc

SEQ ID NO: 782144 - DNA, 15 bp, Homo sapiens
tgtgcctttacttct

SEQ ID NO: 782145 - DNA, 15 bp, Homo sapiens
gtgcctttacttcta

SEQ ID NO: 782146 - DNA, 15 bp, Homo sapiens
tgcctttacttctaa

SEQ ID NO: 782147 - DNA, 15 bp, Homo sapiens
gcctttacttctaat

SEQ ID NO: 782148 - DNA, 15 bp, Homo sapiens
cctttacttctaatc

SEQ ID NO: 782149 - DNA, 15 bp, Homo sapiens
ctttacttctaatca

SEQ ID NO: 782150 - DNA, 15 bp, Homo sapiens
tttacttctaatcat

SEQ ID NO: 782151 - DNA, 15 bp, Homo sapiens
ttacttctaatcatt

SEQ ID NO: 782152 - DNA, 15 bp, Homo sapiens
tacttctaatcattg

SEQ ID NO: 782153 - DNA, 15 bp, Homo sapiens
acttctaatcattgt

SEQ ID NO: 782154 - DNA, 15 bp, Homo sapiens
cttctaatcattgtt

SEQ ID NO: 782155 - DNA, 15 bp, Homo sapiens
ttctaatcattgttt

SEQ ID NO: 782156 - DNA, 15 bp, Homo sapiens
tctaatcattgtttc

SEQ ID NO: 782157 - DNA, 15 bp, Homo sapiens
ctaatcattgtttca

SEQ ID NO: 782158 - DNA, 15 bp, Homo sapiens
taatcattgtttcaa

SEQ ID NO: 782159 - DNA, 15 bp, Homo sapiens
aatcattgtttcaaa

SEQ ID NO: 782160 - DNA, 15 bp, Homo sapiens
atcattgtttcaaaa

SEQ ID NO: 782161 - DNA, 15 bp, Homo sapiens
tcattgtttcaaaat

SEQ ID NO: 782162 - DNA, 15 bp, Homo sapiens
cattgtttcaaaata

SEQ ID NO: 782163 - DNA, 15 bp, Homo sapiens
attgtttcaaaataa

SEQ ID NO: 782164 - DNA, 15 bp, Homo sapiens
ttgtttcaaaataac

SEQ ID NO: 782165 - DNA, 15 bp, Homo sapiens
tgtttcaaaataaca

SEQ ID NO: 782166 - DNA, 15 bp, Homo sapiens
gtttcaaaataacat

SEQ ID NO: 782167 - DNA, 15 bp, Homo sapiens
tttcaaaataacatt

SEQ ID NO: 782168 - DNA, 15 bp, Homo sapiens
ttcaaaataacattt

SEQ ID NO: 782169 - DNA, 15 bp, Homo sapiens
tcaaaataacatttt

SEQ ID NO: 782170 - DNA, 15 bp, Homo sapiens
caaaataacattttg

SEQ ID NO: 782171 - DNA, 15 bp, Homo sapiens
aaaataacattttga

SEQ ID NO: 782172 - DNA, 15 bp, Homo sapiens
aaataacattttgaa

SEQ ID NO: 782173 - DNA, 15 bp, Homo sapiens
aataacattttgaag

SEQ ID NO: 782174 - DNA, 15 bp, Homo sapiens
ataacattttgaagt

SEQ ID NO: 782175 - DNA, 15 bp, Homo sapiens
taacattttgaagtt

SEQ ID NO: 782176 - DNA, 15 bp, Homo sapiens
aacattttgaagtta

SEQ ID NO: 782177 - DNA, 15 bp, Homo sapiens
acattttgaagttat

SEQ ID NO: 782178 - DNA, 15 bp, Homo sapiens
cattttgaagttatg

SEQ ID NO: 782179 - DNA, 15 bp, Homo sapiens
attttgaagttatga

SEQ ID NO: 782180 - DNA, 15 bp, Homo sapiens
ttttgaagttatgaa

SEQ ID NO: 782181 - DNA, 15 bp, Homo sapiens
tttgaagttatgaaa

SEQ ID NO: 782182 - DNA, 15 bp, Homo sapiens
ttgaagttatgaaac

SEQ ID NO: 782183 - DNA, 15 bp, Homo sapiens
tgaagttatgaaaca

SEQ ID NO: 782184 - DNA, 15 bp, Homo sapiens
gaagttatgaaacag

SEQ ID NO: 782185 - DNA, 15 bp, Homo sapiens
aagttatgaaacagt

SEQ ID NO: 782186 - DNA, 15 bp, Homo sapiens
agttatgaaacagtt

SEQ ID NO: 782187 - DNA, 15 bp, Homo sapiens
gttatgaaacagtta

SEQ ID NO: 782188 - DNA, 15 bp, Homo sapiens
ttatgaaacagttaa

SEQ ID NO: 782189 - DNA, 15 bp, Homo sapiens
tatgaaacagttaaa

SEQ ID NO: 782190 - DNA, 15 bp, Homo sapiens
atgaaacagttaaag

SEQ ID NO: 782191 - DNA, 15 bp, Homo sapiens
tgaaacagttaaagc

SEQ ID NO: 782192 - DNA, 15 bp, Homo sapiens
gaaacagttaaagct

SEQ ID NO: 782193 - DNA, 15 bp, Homo sapiens
aaacagttaaagctt

SEQ ID NO: 782194 - DNA, 15 bp, Homo sapiens
aacagttaaagctta

SEQ ID NO: 782195 - DNA, 15 bp, Homo sapiens
acagttaaagcttaa

SEQ ID NO: 782196 - DNA, 15 bp, Homo sapiens
cagttaaagcttaat

SEQ ID NO: 782197 - DNA, 15 bp, Homo sapiens
agttaaagcttaatt

SEQ ID NO: 782198 - DNA, 15 bp, Homo sapiens
gttaaagcttaatta

SEQ ID NO: 782199 - DNA, 15 bp, Homo sapiens
ttaaagcttaattat

SEQ ID NO: 782200 - DNA, 15 bp, Homo sapiens
taaagcttaattatt

SEQ ID NO: 782201 - DNA, 15 bp, Homo sapiens
aaagcttaattattt

SEQ ID NO: 782202 - DNA, 15 bp, Homo sapiens
aagcttaattattta

SEQ ID NO: 782203 - DNA, 15 bp, Homo sapiens
agcttaattatttaa

SEQ ID NO: 782204 - DNA, 15 bp, Homo sapiens
gcttaattatttaag

SEQ ID NO: 782205 - DNA, 15 bp, Homo sapiens
cttaattatttaaga

SEQ ID NO: 782206 - DNA, 15 bp, Homo sapiens
ttaattatttaagaa

SEQ ID NO: 782207 - DNA, 15 bp, Homo sapiens
taattatttaagaat

SEQ ID NO: 782208 - DNA, 15 bp, Homo sapiens
aattatttaagaata

SEQ ID NO: 782209 - DNA, 15 bp, Homo sapiens
attatttaagaatat

SEQ ID NO: 782210 - DNA, 15 bp, Homo sapiens
ttatttaagaatatg

SEQ ID NO: 782211 - DNA, 15 bp, Homo sapiens
tatttaagaatatgg

SEQ ID NO: 782212 - DNA, 15 bp, Homo sapiens
atttaagaatatgga

SEQ ID NO: 782213 - DNA, 15 bp, Homo sapiens
tttaagaatatggat

SEQ ID NO: 782214 - DNA, 15 bp, Homo sapiens
ttaagaatatggata

SEQ ID NO: 782215 - DNA, 15 bp, Homo sapiens
taagaatatggatat

SEQ ID NO: 782216 - DNA, 15 bp, Homo sapiens
aagaatatggatatt

SEQ ID NO: 782217 - DNA, 15 bp, Homo sapiens
agaatatggatattt

SEQ ID NO: 782218 - DNA, 15 bp, Homo sapiens
gaatatggatatttt

SEQ ID NO: 782219 - DNA, 15 bp, Homo sapiens
aatatggatattttt

SEQ ID NO: 782220 - DNA, 15 bp, Homo sapiens
atatggatattttta

SEQ ID NO: 782221 - DNA, 15 bp, Homo sapiens
tatggatatttttac

SEQ ID NO: 782222 - DNA, 15 bp, Homo sapiens
atggatatttttact

SEQ ID NO: 782223 - DNA, 15 bp, Homo sapiens
tggatatttttacta

SEQ ID NO: 782224 - DNA, 15 bp, Homo sapiens
ggatatttttactaa

SEQ ID NO: 782225 - DNA, 15 bp, Homo sapiens
gatatttttactaat

SEQ ID NO: 782226 - DNA, 15 bp, Homo sapiens
atatttttactaata

SEQ ID NO: 782227 - DNA, 15 bp, Homo sapiens
tatttttactaataa

SEQ ID NO: 782228 - DNA, 15 bp, Homo sapiens
atttttactaataat

SEQ ID NO: 782229 - DNA, 15 bp, Homo sapiens
tttttactaataatg

SEQ ID NO: 782230 - DNA, 15 bp, Homo sapiens
ttttactaataatga

SEQ ID NO: 782231 - DNA, 15 bp, Homo sapiens
tttactaataatgat

SEQ ID NO: 782232 - DNA, 15 bp, Homo sapiens
ttactaataatgatt

SEQ ID NO: 782233 - DNA, 15 bp, Homo sapiens
tactaataatgattg

SEQ ID NO: 782234 - DNA, 15 bp, Homo sapiens
actaataatgattgc

SEQ ID NO: 782235 - DNA, 15 bp, Homo sapiens
ctaataatgattgct

SEQ ID NO: 782236 - DNA, 15 bp, Homo sapiens
taataatgattgctt

SEQ ID NO: 782237 - DNA, 15 bp, Homo sapiens
aataatgattgcttt

SEQ ID NO: 782238 - DNA, 15 bp, Homo sapiens
ataatgattgcttta

SEQ ID NO: 782239 - DNA, 15 bp, Homo sapiens
taatgattgctttaa

SEQ ID NO: 782240 - DNA, 15 bp, Homo sapiens
aatgattgctttaaa

SEQ ID NO: 782241 - DNA, 15 bp, Homo sapiens
atgattgctttaaat

SEQ ID NO: 782242 - DNA, 15 bp, Homo sapiens
tgattgctttaaatt

SEQ ID NO: 782243 - DNA, 15 bp, Homo sapiens
gattgctttaaattg

SEQ ID NO: 782244 - DNA, 15 bp, Homo sapiens
attgctttaaattga

SEQ ID NO: 782245 - DNA, 15 bp, Homo sapiens
ttgctttaaattgat

SEQ ID NO: 782246 - DNA, 15 bp, Homo sapiens
tgctttaaattgatc

SEQ ID NO: 782247 - DNA, 15 bp, Homo sapiens
gctttaaattgatct

SEQ ID NO: 782248 - DNA, 15 bp, Homo sapiens
ctttaaattgatctg

SEQ ID NO: 782249 - DNA, 15 bp, Homo sapiens
tttaaattgatctga

SEQ ID NO: 782250 - DNA, 15 bp, Homo sapiens
ttaaattgatctgaa

SEQ ID NO: 782251 - DNA, 15 bp, Homo sapiens
taaattgatctgaat

SEQ ID NO: 782252 - DNA, 15 bp, Homo sapiens
aaattgatctgaata

SEQ ID NO: 782253 - DNA, 15 bp, Homo sapiens
aattgatctgaataa

SEQ ID NO: 782254 - DNA, 15 bp, Homo sapiens
attgatctgaataat

SEQ ID NO: 782255 - DNA, 15 bp, Homo sapiens
ttgatctgaataatg

SEQ ID NO: 782256 - DNA, 15 bp, Homo sapiens
tgatctgaataatgt

SEQ ID NO: 782257 - DNA, 15 bp, Homo sapiens
gatctgaataatgta

SEQ ID NO: 782258 - DNA, 15 bp, Homo sapiens
atctgaataatgtag

SEQ ID NO: 782259 - DNA, 15 bp, Homo sapiens
tctgaataatgtaga

SEQ ID NO: 782260 - DNA, 15 bp, Homo sapiens
ctgaataatgtagag

SEQ ID NO: 782261 - DNA, 15 bp, Homo sapiens
tgaataatgtagaga

SEQ ID NO: 782262 - DNA, 15 bp, Homo sapiens
gaataatgtagagaa

SEQ ID NO: 782263 - DNA, 15 bp, Homo sapiens
aataatgtagagaat

SEQ ID NO: 782264 - DNA, 15 bp, Homo sapiens
ataatgtagagaatt

SEQ ID NO: 782265 - DNA, 15 bp, Homo sapiens
taatgtagagaattg

SEQ ID NO: 782266 - DNA, 15 bp, Homo sapiens
aatgtagagaattgg

SEQ ID NO: 782267 - DNA, 15 bp, Homo sapiens
atgtagagaattggg

SEQ ID NO: 782268 - DNA, 15 bp, Homo sapiens
tgtagagaattgggt

SEQ ID NO: 782269 - DNA, 15 bp, Homo sapiens
gtagagaattgggta

SEQ ID NO: 782270 - DNA, 15 bp, Homo sapiens
tagagaattgggtat

SEQ ID NO: 782271 - DNA, 15 bp, Homo sapiens
agagaattgggtatt

SEQ ID NO: 782272 - DNA, 15 bp, Homo sapiens
gagaattgggtattc

SEQ ID NO: 782273 - DNA, 15 bp, Homo sapiens
agaattgggtattca

SEQ ID NO: 782274 - DNA, 15 bp, Homo sapiens
gaattgggtattcat

SEQ ID NO: 782275 - DNA, 15 bp, Homo sapiens
aattgggtattcatt

SEQ ID NO: 782276 - DNA, 15 bp, Homo sapiens
attgggtattcattt

SEQ ID NO: 782277 - DNA, 15 bp, Homo sapiens
ttgggtattcatttc

SEQ ID NO: 782278 - DNA, 15 bp, Homo sapiens
tgggtattcatttct

SEQ ID NO: 782279 - DNA, 15 bp, Homo sapiens
gggtattcatttctg

SEQ ID NO: 782280 - DNA, 15 bp, Homo sapiens
ggtattcatttctga

SEQ ID NO: 782281 - DNA, 15 bp, Homo sapiens
gtattcatttctgag

SEQ ID NO: 782282 - DNA, 15 bp, Homo sapiens
tattcatttctgaga

SEQ ID NO: 782283 - DNA, 15 bp, Homo sapiens
attcatttctgagat

SEQ ID NO: 782284 - DNA, 15 bp, Homo sapiens
ttcatttctgagata

SEQ ID NO: 782285 - DNA, 15 bp, Homo sapiens
tcatttctgagatat

SEQ ID NO: 782286 - DNA, 15 bp, Homo sapiens
catttctgagatatc

SEQ ID NO: 782287 - DNA, 15 bp, Homo sapiens
atttctgagatatca

SEQ ID NO: 782288 - DNA, 15 bp, Homo sapiens
tttctgagatatcaa

SEQ ID NO: 782289 - DNA, 15 bp, Homo sapiens
ttctgagatatcaaa

SEQ ID NO: 782290 - DNA, 15 bp, Homo sapiens
tctgagatatcaaag

SEQ ID NO: 782291 - DNA, 15 bp, Homo sapiens
ctgagatatcaaagc

SEQ ID NO: 782292 - DNA, 15 bp, Homo sapiens
tgagatatcaaagct

SEQ ID NO: 782293 - DNA, 15 bp, Homo sapiens
gagatatcaaagcta

SEQ ID NO: 782294 - DNA, 15 bp, Homo sapiens
agatatcaaagctaa

SEQ ID NO: 782295 - DNA, 15 bp, Homo sapiens
gatatcaaagctaat

SEQ ID NO: 782296 - DNA, 15 bp, Homo sapiens
atatcaaagctaata

SEQ ID NO: 782297 - DNA, 15 bp, Homo sapiens
tatcaaagctaataa

SEQ ID NO: 782298 - DNA, 15 bp, Homo sapiens
atcaaagctaataaa

SEQ ID NO: 782299 - DNA, 15 bp, Homo sapiens
tcaaagctaataaac

SEQ ID NO: 782300 - DNA, 15 bp, Homo sapiens
caaagctaataaaca

SEQ ID NO: 782301 - DNA, 15 bp, Homo sapiens
aaagctaataaacat

SEQ ID NO: 782302 - DNA, 15 bp, Homo sapiens
aagctaataaacata

SEQ ID NO: 782303 - DNA, 15 bp, Homo sapiens
agctaataaacatat

SEQ ID NO: 782304 - DNA, 15 bp, Homo sapiens
gctaataaacatatg

SEQ ID NO: 782305 - DNA, 15 bp, Homo sapiens
ctaataaacatatgc

SEQ ID NO: 782306 - DNA, 15 bp, Homo sapiens
taataaacatatgca

SEQ ID NO: 782307 - DNA, 15 bp, Homo sapiens
aataaacatatgcac

SEQ ID NO: 782308 - DNA, 15 bp, Homo sapiens
ataaacatatgcaca

SEQ ID NO: 782309 - DNA, 15 bp, Homo sapiens
taaacatatgcacaa

SEQ ID NO: 782310 - DNA, 15 bp, Homo sapiens
aaacatatgcacaat

SEQ ID NO: 782311 - DNA, 15 bp, Homo sapiens
aacatatgcacaatc

SEQ ID NO: 782312 - DNA, 15 bp, Homo sapiens
acatatgcacaatca

SEQ ID NO: 782313 - DNA, 15 bp, Homo sapiens
catatgcacaatcac

SEQ ID NO: 782314 - DNA, 15 bp, Homo sapiens
atatgcacaatcact

SEQ ID NO: 782315 - DNA, 15 bp, Homo sapiens
tatgcacaatcactt

SEQ ID NO: 782316 - DNA, 15 bp, Homo sapiens
atgcacaatcacttg

SEQ ID NO: 782317 - DNA, 15 bp, Homo sapiens
tgcacaatcacttgt

SEQ ID NO: 782318 - DNA, 15 bp, Homo sapiens
gcacaatcacttgtc

SEQ ID NO: 782319 - DNA, 15 bp, Homo sapiens
cacaatcacttgtca

SEQ ID NO: 782320 - DNA, 15 bp, Homo sapiens
acaatcacttgtcag

SEQ ID NO: 782321 - DNA, 15 bp, Homo sapiens
caatcacttgtcaga

SEQ ID NO: 782322 - DNA, 15 bp, Homo sapiens
aatcacttgtcagaa

SEQ ID NO: 782323 - DNA, 15 bp, Homo sapiens
atcacttgtcagaaa

SEQ ID NO: 782324 - DNA, 15 bp, Homo sapiens
tcacttgtcagaaat

SEQ ID NO: 782325 - DNA, 15 bp, Homo sapiens
cacttgtcagaaatt

SEQ ID NO: 782326 - DNA, 15 bp, Homo sapiens
acttgtcagaaattg

SEQ ID NO: 782327 - DNA, 15 bp, Homo sapiens
cttgtcagaaattga

SEQ ID NO: 782328 - DNA, 15 bp, Homo sapiens
ttgtcagaaattgac

SEQ ID NO: 782329 - DNA, 15 bp, Homo sapiens
tgtcagaaattgact

SEQ ID NO: 782330 - DNA, 15 bp, Homo sapiens
gtcagaaattgactg

SEQ ID NO: 782331 - DNA, 15 bp, Homo sapiens
tcagaaattgactgg

SEQ ID NO: 782332 - DNA, 15 bp, Homo sapiens
cagaaattgactggc

SEQ ID NO: 782333 - DNA, 15 bp, Homo sapiens
agaaattgactggct

SEQ ID NO: 782334 - DNA, 15 bp, Homo sapiens
gaaattgactggctt

SEQ ID NO: 782335 - DNA, 15 bp, Homo sapiens
aaattgactggcttg

SEQ ID NO: 782336 - DNA, 15 bp, Homo sapiens
aattgactggcttgg

SEQ ID NO: 782337 - DNA, 15 bp, Homo sapiens
attgactggcttggg

SEQ ID NO: 782338 - DNA, 15 bp, Homo sapiens
ttgactggcttgggg

SEQ ID NO: 782339 - DNA, 15 bp, Homo sapiens
tgactggcttggggt

SEQ ID NO: 782340 - DNA, 15 bp, Homo sapiens
gactggcttggggtt

SEQ ID NO: 782341 - DNA, 15 bp, Homo sapiens
actggcttggggtta

SEQ ID NO: 782342 - DNA, 15 bp, Homo sapiens
ctggcttggggttaa

SEQ ID NO: 782343 - DNA, 15 bp, Homo sapiens
tggcttggggttaat

SEQ ID NO: 782344 - DNA, 15 bp, Homo sapiens
ggcttggggttaatt

SEQ ID NO: 782345 - DNA, 15 bp, Homo sapiens
gcttggggttaattt

SEQ ID NO: 782346 - DNA, 15 bp, Homo sapiens
cttggggttaatttt

SEQ ID NO: 782347 - DNA, 15 bp, Homo sapiens
ttggggttaatttta

SEQ ID NO: 782348 - DNA, 15 bp, Homo sapiens
tggggttaattttat

SEQ ID NO: 782349 - DNA, 15 bp, Homo sapiens
ggggttaattttata

SEQ ID NO: 782350 - DNA, 15 bp, Homo sapiens
gggttaattttataa

SEQ ID NO: 782351 - DNA, 15 bp, Homo sapiens
ggttaattttataat

SEQ ID NO: 782352 - DNA, 15 bp, Homo sapiens
gttaattttataata

SEQ ID NO: 782353 - DNA, 15 bp, Homo sapiens
ttaattttataatac

SEQ ID NO: 782354 - DNA, 15 bp, Homo sapiens
taattttataataca

SEQ ID NO: 782355 - DNA, 15 bp, Homo sapiens
aattttataatacaa

SEQ ID NO: 782356 - DNA, 15 bp, Homo sapiens
attttataatacaag

SEQ ID NO: 782357 - DNA, 15 bp, Homo sapiens
ttttataatacaagc

SEQ ID NO: 782358 - DNA, 15 bp, Homo sapiens
tttataatacaagcc

SEQ ID NO: 782359 - DNA, 15 bp, Homo sapiens
ttataatacaagcca

SEQ ID NO: 782360 - DNA, 15 bp, Homo sapiens
tataatacaagccaa

SEQ ID NO: 782361 - DNA, 15 bp, Homo sapiens
ataatacaagccaat

SEQ ID NO: 782362 - DNA, 15 bp, Homo sapiens
taatacaagccaatg

SEQ ID NO: 782363 - DNA, 15 bp, Homo sapiens
aatacaagccaatga

SEQ ID NO: 782364 - DNA, 15 bp, Homo sapiens
atacaagccaatgaa

SEQ ID NO: 782365 - DNA, 15 bp, Homo sapiens
tacaagccaatgaaa

SEQ ID NO: 782366 - DNA, 15 bp, Homo sapiens
acaagccaatgaaac

SEQ ID NO: 782367 - DNA, 15 bp, Homo sapiens
caagccaatgaaact

SEQ ID NO: 782368 - DNA, 15 bp, Homo sapiens
aagccaatgaaactt

SEQ ID NO: 782369 - DNA, 15 bp, Homo sapiens
agccaatgaaacttt

SEQ ID NO: 782370 - DNA, 15 bp, Homo sapiens
gccaatgaaacttta

SEQ ID NO: 782371 - DNA, 15 bp, Homo sapiens
ccaatgaaactttag

SEQ ID NO: 782372 - DNA, 15 bp, Homo sapiens
caatgaaactttagc

SEQ ID NO: 782373 - DNA, 15 bp, Homo sapiens
aatgaaactttagct

SEQ ID NO: 782374 - DNA, 15 bp, Homo sapiens
atgaaactttagcta

SEQ ID NO: 782375 - DNA, 15 bp, Homo sapiens
tgaaactttagctag

SEQ ID NO: 782376 - DNA, 15 bp, Homo sapiens
gaaactttagctagc

SEQ ID NO: 782377 - DNA, 15 bp, Homo sapiens
aaactttagctagca

SEQ ID NO: 782378 - DNA, 15 bp, Homo sapiens
aactttagctagcac

SEQ ID NO: 782379 - DNA, 15 bp, Homo sapiens
actttagctagcacc

SEQ ID NO: 782380 - DNA, 15 bp, Homo sapiens
ctttagctagcaccc

SEQ ID NO: 782381 - DNA, 15 bp, Homo sapiens
tttagctagcaccct

SEQ ID NO: 782382 - DNA, 15 bp, Homo sapiens
ttagctagcaccctt

SEQ ID NO: 782383 - DNA, 15 bp, Homo sapiens
tagctagcacccttt

SEQ ID NO: 782384 - DNA, 15 bp, Homo sapiens
agctagcaccctttt

SEQ ID NO: 782385 - DNA, 15 bp, Homo sapiens
gctagcacccttttc

SEQ ID NO: 782386 - DNA, 15 bp, Homo sapiens
ctagcacccttttct

SEQ ID NO: 782387 - DNA, 15 bp, Homo sapiens
tagcacccttttctg

SEQ ID NO: 782388 - DNA, 15 bp, Homo sapiens
agcacccttttctgt

SEQ ID NO: 782389 - DNA, 15 bp, Homo sapiens
gcacccttttctgtt

SEQ ID NO: 782390 - DNA, 15 bp, Homo sapiens
cacccttttctgttg

SEQ ID NO: 782391 - DNA, 15 bp, Homo sapiens
acccttttctgttgt

SEQ ID NO: 782392 - DNA, 15 bp, Homo sapiens
cccttttctgttgta

SEQ ID NO: 782393 - DNA, 15 bp, Homo sapiens
ccttttctgttgtac

SEQ ID NO: 782394 - DNA, 15 bp, Homo sapiens
cttttctgttgtact

SEQ ID NO: 782395 - DNA, 15 bp, Homo sapiens
ttttctgttgtactt

SEQ ID NO: 782396 - DNA, 15 bp, Homo sapiens
tttctgttgtacttt

SEQ ID NO: 782397 - DNA, 15 bp, Homo sapiens
ttctgttgtactttg

SEQ ID NO: 782398 - DNA, 15 bp, Homo sapiens
tctgttgtactttga

SEQ ID NO: 782399 - DNA, 15 bp, Homo sapiens
ctgttgtactttgaa

SEQ ID NO: 782400 - DNA, 15 bp, Homo sapiens
tgttgtactttgaaa

SEQ ID NO: 782401 - DNA, 15 bp, Homo sapiens
gttgtactttgaaac

SEQ ID NO: 782402 - DNA, 15 bp, Homo sapiens
ttgtactttgaaact

SEQ ID NO: 782403 - DNA, 15 bp, Homo sapiens
tgtactttgaaacta

SEQ ID NO: 782404 - DNA, 15 bp, Homo sapiens
gtactttgaaactaa

SEQ ID NO: 782405 - DNA, 15 bp, Homo sapiens
tactttgaaactaaa

SEQ ID NO: 782406 - DNA, 15 bp, Homo sapiens
actttgaaactaaag

SEQ ID NO: 782407 - DNA, 15 bp, Homo sapiens
ctttgaaactaaagt

SEQ ID NO: 782408 - DNA, 15 bp, Homo sapiens
tttgaaactaaagtg

SEQ ID NO: 782409 - DNA, 15 bp, Homo sapiens
ttgaaactaaagtgt

SEQ ID NO: 782410 - DNA, 15 bp, Homo sapiens
tgaaactaaagtgtt

SEQ ID NO: 782411 - DNA, 15 bp, Homo sapiens
gaaactaaagtgttt

SEQ ID NO: 782412 - DNA, 15 bp, Homo sapiens
aaactaaagtgttta

SEQ ID NO: 782413 - DNA, 15 bp, Homo sapiens
aactaaagtgtttaa

SEQ ID NO: 782414 - DNA, 15 bp, Homo sapiens
actaaagtgtttaaa

SEQ ID NO: 782415 - DNA, 15 bp, Homo sapiens
ctaaagtgtttaaaa

SEQ ID NO: 782416 - DNA, 15 bp, Homo sapiens
taaagtgtttaaaag

SEQ ID NO: 782417 - DNA, 15 bp, Homo sapiens
aaagtgtttaaaagt

SEQ ID NO: 782418 - DNA, 15 bp, Homo sapiens
aagtgtttaaaagtg

SEQ ID NO: 782419 - DNA, 15 bp, Homo sapiens
agtgtttaaaagtgt

SEQ ID NO: 782420 - DNA, 15 bp, Homo sapiens
gtgtttaaaagtgtt

SEQ ID NO: 782421 - DNA, 15 bp, Homo sapiens
tgtttaaaagtgtta

SEQ ID NO: 782422 - DNA, 15 bp, Homo sapiens
gtttaaaagtgttaa

SEQ ID NO: 782423 - DNA, 15 bp, Homo sapiens
tttaaaagtgttaaa

SEQ ID NO: 782424 - DNA, 15 bp, Homo sapiens
ttaaaagtgttaaaa

SEQ ID NO: 782425 - DNA, 15 bp, Homo sapiens
taaaagtgttaaaaa

SEQ ID NO: 782426 - DNA, 15 bp, Homo sapiens
aaaagtgttaaaaag

SEQ ID NO: 782427 - DNA, 15 bp, Homo sapiens
aaagtgttaaaaagt

SEQ ID NO: 782428 - DNA, 15 bp, Homo sapiens
aagtgttaaaaagtt

SEQ ID NO: 782429 - DNA, 15 bp, Homo sapiens
agtgttaaaaagttc

SEQ ID NO: 782430 - DNA, 15 bp, Homo sapiens
gtgttaaaaagttcc

SEQ ID NO: 782431 - DNA, 15 bp, Homo sapiens
tgttaaaaagttcct

SEQ ID NO: 782432 - DNA, 15 bp, Homo sapiens
gttaaaaagttccta

SEQ ID NO: 782433 - DNA, 15 bp, Homo sapiens
ttaaaaagttcctaa

SEQ ID NO: 782434 - DNA, 15 bp, Homo sapiens
taaaaagttcctaat

SEQ ID NO: 782435 - DNA, 15 bp, Homo sapiens
aaaaagttcctaatg

SEQ ID NO: 782436 - DNA, 15 bp, Homo sapiens
aaaagttcctaatgt

SEQ ID NO: 782437 - DNA, 15 bp, Homo sapiens
aaagttcctaatgtt

SEQ ID NO: 782438 - DNA, 15 bp, Homo sapiens
aagttcctaatgttt

SEQ ID NO: 782439 - DNA, 15 bp, Homo sapiens
agttcctaatgtttt

SEQ ID NO: 782440 - DNA, 15 bp, Homo sapiens
gttcctaatgttttt

SEQ ID NO: 782441 - DNA, 15 bp, Homo sapiens
ttcctaatgtttttc

SEQ ID NO: 782442 - DNA, 15 bp, Homo sapiens
tcctaatgtttttcc

SEQ ID NO: 782443 - DNA, 15 bp, Homo sapiens
cctaatgtttttcca

SEQ ID NO: 782444 - DNA, 15 bp, Homo sapiens
ctaatgtttttccag

SEQ ID NO: 782445 - DNA, 15 bp, Homo sapiens
taatgtttttccagg

SEQ ID NO: 782446 - DNA, 15 bp, Homo sapiens
aatgtttttccaggg

SEQ ID NO: 782447 - DNA, 15 bp, Homo sapiens
atgtttttccagggg

SEQ ID NO: 782448 - DNA, 15 bp, Homo sapiens
tgtttttccagggga

SEQ ID NO: 782449 - DNA, 15 bp, Homo sapiens
gtttttccaggggag

SEQ ID NO: 782450 - DNA, 15 bp, Homo sapiens
tttttccaggggagt

SEQ ID NO: 782451 - DNA, 15 bp, Homo sapiens
ttttccaggggagtt

SEQ ID NO: 782452 - DNA, 15 bp, Homo sapiens
tttccaggggagttt

SEQ ID NO: 782453 - DNA, 15 bp, Homo sapiens
ttccaggggagtttt

SEQ ID NO: 782454 - DNA, 15 bp, Homo sapiens
tccaggggagttttt

SEQ ID NO: 782455 - DNA, 15 bp, Homo sapiens
ccaggggagttttta

SEQ ID NO: 782456 - DNA, 15 bp, Homo sapiens
caggggagtttttaa

SEQ ID NO: 782457 - DNA, 15 bp, Homo sapiens
aggggagtttttaaa

SEQ ID NO: 782458 - DNA, 15 bp, Homo sapiens
ggggagtttttaaaa

SEQ ID NO: 782459 - DNA, 15 bp, Homo sapiens
gggagtttttaaaaa

SEQ ID NO: 782460 - DNA, 15 bp, Homo sapiens
ggagtttttaaaaat

SEQ ID NO: 782461 - DNA, 15 bp, Homo sapiens
gagtttttaaaaatt

SEQ ID NO: 782462 - DNA, 15 bp, Homo sapiens
agtttttaaaaattg

SEQ ID NO: 782463 - DNA, 15 bp, Homo sapiens
gtttttaaaaattgt

SEQ ID NO: 782464 - DNA, 15 bp, Homo sapiens
tttttaaaaattgtt

SEQ ID NO: 782465 - DNA, 15 bp, Homo sapiens
ttttaaaaattgttt

SEQ ID NO: 782466 - DNA, 15 bp, Homo sapiens
tttaaaaattgtttc

SEQ ID NO: 782467 - DNA, 15 bp, Homo sapiens
ttaaaaattgtttct

SEQ ID NO: 782468 - DNA, 15 bp, Homo sapiens
taaaaattgtttctt

SEQ ID NO: 782469 - DNA, 15 bp, Homo sapiens
aaaaattgtttcttt

SEQ ID NO: 782470 - DNA, 15 bp, Homo sapiens
aaaattgtttcttta

SEQ ID NO: 782471 - DNA, 15 bp, Homo sapiens
aaattgtttctttag

SEQ ID NO: 782472 - DNA, 15 bp, Homo sapiens
aattgtttctttagt

SEQ ID NO: 782473 - DNA, 15 bp, Homo sapiens
attgtttctttagtg

SEQ ID NO: 782474 - DNA, 15 bp, Homo sapiens
ttgtttctttagtga

SEQ ID NO: 782475 - DNA, 15 bp, Homo sapiens
tgtttctttagtgaa

SEQ ID NO: 782476 - DNA, 15 bp, Homo sapiens
gtttctttagtgaaa

SEQ ID NO: 782477 - DNA, 15 bp, Homo sapiens
tttctttagtgaaaa

SEQ ID NO: 782478 - DNA, 15 bp, Homo sapiens
ttctttagtgaaaaa

SEQ ID NO: 782479 - DNA, 15 bp, Homo sapiens
tctttagtgaaaaat

SEQ ID NO: 782480 - DNA, 15 bp, Homo sapiens
ctttagtgaaaaatc

SEQ ID NO: 782481 - DNA, 15 bp, Homo sapiens
tttagtgaaaaatct

SEQ ID NO: 782482 - DNA, 15 bp, Homo sapiens
ttagtgaaaaatcta

SEQ ID NO: 782483 - DNA, 15 bp, Homo sapiens
tagtgaaaaatctaa

SEQ ID NO: 782484 - DNA, 15 bp, Homo sapiens
agtgaaaaatctaac

SEQ ID NO: 782485 - DNA, 15 bp, Homo sapiens
gtgaaaaatctaact

SEQ ID NO: 782486 - DNA, 15 bp, Homo sapiens
tgaaaaatctaactg

SEQ ID NO: 782487 - DNA, 15 bp, Homo sapiens
gaaaaatctaactga

SEQ ID NO: 782488 - DNA, 15 bp, Homo sapiens
aaaaatctaactgat

SEQ ID NO: 782489 - DNA, 15 bp, Homo sapiens
aaaatctaactgatg

SEQ ID NO: 782490 - DNA, 15 bp, Homo sapiens
aaatctaactgatgg

SEQ ID NO: 782491 - DNA, 15 bp, Homo sapiens
aatctaactgatgga

SEQ ID NO: 782492 - DNA, 15 bp, Homo sapiens
atctaactgatggat

SEQ ID NO: 782493 - DNA, 15 bp, Homo sapiens
tctaactgatggatt

SEQ ID NO: 782494 - DNA, 15 bp, Homo sapiens
ctaactgatggattc

SEQ ID NO: 782495 - DNA, 15 bp, Homo sapiens
taactgatggattca

SEQ ID NO: 782496 - DNA, 15 bp, Homo sapiens
aactgatggattcac

SEQ ID NO: 782497 - DNA, 15 bp, Homo sapiens
actgatggattcaca

SEQ ID NO: 782498 - DNA, 15 bp, Homo sapiens
ctgatggattcacaa

SEQ ID NO: 782499 - DNA, 15 bp, Homo sapiens
tgatggattcacaat

SEQ ID NO: 782500 - DNA, 15 bp, Homo sapiens
gatggattcacaata

SEQ ID NO: 782501 - DNA, 15 bp, Homo sapiens
atggattcacaatat

SEQ ID NO: 782502 - DNA, 15 bp, Homo sapiens
tggattcacaatatt

SEQ ID NO: 782503 - DNA, 15 bp, Homo sapiens
ggattcacaatattt

SEQ ID NO: 782504 - DNA, 15 bp, Homo sapiens
gattcacaatatttc

SEQ ID NO: 782505 - DNA, 15 bp, Homo sapiens
attcacaatatttcc

SEQ ID NO: 782506 - DNA, 15 bp, Homo sapiens
ttcacaatatttcca

SEQ ID NO: 782507 - DNA, 15 bp, Homo sapiens
tcacaatatttccaa

SEQ ID NO: 782508 - DNA, 15 bp, Homo sapiens
cacaatatttccaaa

SEQ ID NO: 782509 - DNA, 15 bp, Homo sapiens
acaatatttccaaaa

SEQ ID NO: 782510 - DNA, 15 bp, Homo sapiens
caatatttccaaaat

SEQ ID NO: 782511 - DNA, 15 bp, Homo sapiens
aatatttccaaaata

SEQ ID NO: 782512 - DNA, 15 bp, Homo sapiens
atatttccaaaatat

SEQ ID NO: 782513 - DNA, 15 bp, Homo sapiens
tatttccaaaatatg

SEQ ID NO: 782514 - DNA, 15 bp, Homo sapiens
atttccaaaatatga

SEQ ID NO: 782515 - DNA, 15 bp, Homo sapiens
tttccaaaatatgat

SEQ ID NO: 782516 - DNA, 15 bp, Homo sapiens
ttccaaaatatgatg

SEQ ID NO: 782517 - DNA, 15 bp, Homo sapiens
tccaaaatatgatgt

SEQ ID NO: 782518 - DNA, 15 bp, Homo sapiens
ccaaaatatgatgtt

SEQ ID NO: 782519 - DNA, 15 bp, Homo sapiens
caaaatatgatgttg

SEQ ID NO: 782520 - DNA, 15 bp, Homo sapiens
aaaatatgatgttgc

SEQ ID NO: 782521 - DNA, 15 bp, Homo sapiens
aaatatgatgttgca

SEQ ID NO: 782522 - DNA, 15 bp, Homo sapiens
aatatgatgttgcag

SEQ ID NO: 782523 - DNA, 15 bp, Homo sapiens
atatgatgttgcagg

SEQ ID NO: 782524 - DNA, 15 bp, Homo sapiens
tatgatgttgcaggg

SEQ ID NO: 782525 - DNA, 15 bp, Homo sapiens
atgatgttgcagggt

SEQ ID NO: 782526 - DNA, 15 bp, Homo sapiens
tgatgttgcagggtt

SEQ ID NO: 782527 - DNA, 15 bp, Homo sapiens
gatgttgcagggttt

SEQ ID NO: 782528 - DNA, 15 bp, Homo sapiens
atgttgcagggttta

SEQ ID NO: 782529 - DNA, 15 bp, Homo sapiens
tgttgcagggtttaa

SEQ ID NO: 782530 - DNA, 15 bp, Homo sapiens
gttgcagggtttaac

SEQ ID NO: 782531 - DNA, 15 bp, Homo sapiens
ttgcagggtttaaca

SEQ ID NO: 782532 - DNA, 15 bp, Homo sapiens
tgcagggtttaacag

SEQ ID NO: 782533 - DNA, 15 bp, Homo sapiens
gcagggtttaacagg

SEQ ID NO: 782534 - DNA, 15 bp, Homo sapiens
cagggtttaacaggt

SEQ ID NO: 782535 - DNA, 15 bp, Homo sapiens
agggtttaacaggtt

SEQ ID NO: 782536 - DNA, 15 bp, Homo sapiens
gggtttaacaggttt

SEQ ID NO: 782537 - DNA, 15 bp, Homo sapiens
ggtttaacaggtttg

SEQ ID NO: 782538 - DNA, 15 bp, Homo sapiens
gtttaacaggtttgt

SEQ ID NO: 782539 - DNA, 15 bp, Homo sapiens
tttaacaggtttgtt

SEQ ID NO: 782540 - DNA, 15 bp, Homo sapiens
ttaacaggtttgttg

SEQ ID NO: 782541 - DNA, 15 bp, Homo sapiens
taacaggtttgttgc

SEQ ID NO: 782542 - DNA, 15 bp, Homo sapiens
aacaggtttgttgca

SEQ ID NO: 782543 - DNA, 15 bp, Homo sapiens
acaggtttgttgcat

SEQ ID NO: 782544 - DNA, 15 bp, Homo sapiens
caggtttgttgcatg

SEQ ID NO: 782545 - DNA, 15 bp, Homo sapiens
aggtttgttgcatgt

SEQ ID NO: 782546 - DNA, 15 bp, Homo sapiens
ggtttgttgcatgta

SEQ ID NO: 782547 - DNA, 15 bp, Homo sapiens
gtttgttgcatgtaa

SEQ ID NO: 782548 - DNA, 15 bp, Homo sapiens
tttgttgcatgtaat

SEQ ID NO: 782549 - DNA, 15 bp, Homo sapiens
ttgttgcatgtaatg

SEQ ID NO: 782550 - DNA, 15 bp, Homo sapiens
tgttgcatgtaatgg

SEQ ID NO: 782551 - DNA, 15 bp, Homo sapiens
gttgcatgtaatgga

SEQ ID NO: 782552 - DNA, 15 bp, Homo sapiens
ttgcatgtaatggat

SEQ ID NO: 782553 - DNA, 15 bp, Homo sapiens
tgcatgtaatggata

SEQ ID NO: 782554 - DNA, 15 bp, Homo sapiens
gcatgtaatggataa

SEQ ID NO: 782555 - DNA, 15 bp, Homo sapiens
catgtaatggataag

SEQ ID NO: 782556 - DNA, 15 bp, Homo sapiens
atgtaatggataaga

SEQ ID NO: 782557 - DNA, 15 bp, Homo sapiens
tgtaatggataagag

SEQ ID NO: 782558 - DNA, 15 bp, Homo sapiens
gtaatggataagagt

SEQ ID NO: 782559 - DNA, 15 bp, Homo sapiens
taatggataagagtc

SEQ ID NO: 782560 - DNA, 15 bp, Homo sapiens
aatggataagagtcg

SEQ ID NO: 782561 - DNA, 15 bp, Homo sapiens
atggataagagtcgg

SEQ ID NO: 782562 - DNA, 15 bp, Homo sapiens
tggataagagtcggg

SEQ ID NO: 782563 - DNA, 15 bp, Homo sapiens
ggataagagtcgggc

SEQ ID NO: 782564 - DNA, 15 bp, Homo sapiens
gataagagtcgggca

SEQ ID NO: 782565 - DNA, 15 bp, Homo sapiens
ataagagtcgggcag

SEQ ID NO: 782566 - DNA, 15 bp, Homo sapiens
taagagtcgggcagt

SEQ ID NO: 782567 - DNA, 15 bp, Homo sapiens
aagagtcgggcagtc

SEQ ID NO: 782568 - DNA, 15 bp, Homo sapiens
agagtcgggcagtct

SEQ ID NO: 782569 - DNA, 15 bp, Homo sapiens
gagtcgggcagtctg

SEQ ID NO: 782570 - DNA, 15 bp, Homo sapiens
agtcgggcagtctgg

SEQ ID NO: 782571 - DNA, 15 bp, Homo sapiens
gtcgggcagtctgga

SEQ ID NO: 782572 - DNA, 15 bp, Homo sapiens
tcgggcagtctggac

SEQ ID NO: 782573 - DNA, 15 bp, Homo sapiens
cgggcagtctggaca

SEQ ID NO: 782574 - DNA, 15 bp, Homo sapiens
gggcagtctggacac

SEQ ID NO: 782575 - DNA, 15 bp, Homo sapiens
ggcagtctggacacc

SEQ ID NO: 782576 - DNA, 15 bp, Homo sapiens
gcagtctggacacca

SEQ ID NO: 782577 - DNA, 15 bp, Homo sapiens
cagtctggacaccag

SEQ ID NO: 782578 - DNA, 15 bp, Homo sapiens
agtctggacaccagg

SEQ ID NO: 782579 - DNA, 15 bp, Homo sapiens
gtctggacaccaggc

SEQ ID NO: 782580 - DNA, 15 bp, Homo sapiens
tctggacaccaggcc

SEQ ID NO: 782581 - DNA, 15 bp, Homo sapiens
ctggacaccaggcct

SEQ ID NO: 782582 - DNA, 15 bp, Homo sapiens
tggacaccaggcctt

SEQ ID NO: 782583 - DNA, 15 bp, Homo sapiens
ggacaccaggcctta

SEQ ID NO: 782584 - DNA, 15 bp, Homo sapiens
gacaccaggccttaa

SEQ ID NO: 782585 - DNA, 15 bp, Homo sapiens
acaccaggccttaat

SEQ ID NO: 782586 - DNA, 15 bp, Homo sapiens
caccaggccttaatc

SEQ ID NO: 782587 - DNA, 15 bp, Homo sapiens
accaggccttaatct

SEQ ID NO: 782588 - DNA, 15 bp, Homo sapiens
ccaggccttaatctc

SEQ ID NO: 782589 - DNA, 15 bp, Homo sapiens
caggccttaatctca

SEQ ID NO: 782590 - DNA, 15 bp, Homo sapiens
aggccttaatctcat

SEQ ID NO: 782591 - DNA, 15 bp, Homo sapiens
ggccttaatctcatt

SEQ ID NO: 782592 - DNA, 15 bp, Homo sapiens
gccttaatctcattt

SEQ ID NO: 782593 - DNA, 15 bp, Homo sapiens
ccttaatctcattta

SEQ ID NO: 782594 - DNA, 15 bp, Homo sapiens
cttaatctcatttac

SEQ ID NO: 782595 - DNA, 15 bp, Homo sapiens
ttaatctcatttacc

SEQ ID NO: 782596 - DNA, 15 bp, Homo sapiens
taatctcatttacca

SEQ ID NO: 782597 - DNA, 15 bp, Homo sapiens
aatctcatttaccat

SEQ ID NO: 782598 - DNA, 15 bp, Homo sapiens
atctcatttaccata

SEQ ID NO: 782599 - DNA, 15 bp, Homo sapiens
tctcatttaccatag

SEQ ID NO: 782600 - DNA, 15 bp, Homo sapiens
ctcatttaccataga

SEQ ID NO: 782601 - DNA, 15 bp, Homo sapiens
tcatttaccatagac

SEQ ID NO: 782602 - DNA, 15 bp, Homo sapiens
catttaccatagacc

SEQ ID NO: 782603 - DNA, 15 bp, Homo sapiens
atttaccatagacct

SEQ ID NO: 782604 - DNA, 15 bp, Homo sapiens
tttaccatagacctt

SEQ ID NO: 782605 - DNA, 15 bp, Homo sapiens
ttaccatagacctta

SEQ ID NO: 782606 - DNA, 15 bp, Homo sapiens
taccatagaccttag

SEQ ID NO: 782607 - DNA, 15 bp, Homo sapiens
accatagaccttagg

SEQ ID NO: 782608 - DNA, 15 bp, Homo sapiens
ccatagaccttaggg

SEQ ID NO: 782609 - DNA, 15 bp, Homo sapiens
catagaccttaggga

SEQ ID NO: 782610 - DNA, 15 bp, Homo sapiens
atagaccttagggaa

SEQ ID NO: 782611 - DNA, 15 bp, Homo sapiens
tagaccttagggaaa

SEQ ID NO: 782612 - DNA, 15 bp, Homo sapiens
agaccttagggaaat

SEQ ID NO: 782613 - DNA, 15 bp, Homo sapiens
gaccttagggaaatt

SEQ ID NO: 782614 - DNA, 15 bp, Homo sapiens
accttagggaaatta

SEQ ID NO: 782615 - DNA, 15 bp, Homo sapiens
ccttagggaaattag

SEQ ID NO: 782616 - DNA, 15 bp, Homo sapiens
cttagggaaattagc

SEQ ID NO: 782617 - DNA, 15 bp, Homo sapiens
ttagggaaattagct

SEQ ID NO: 782618 - DNA, 15 bp, Homo sapiens
tagggaaattagctt

SEQ ID NO: 782619 - DNA, 15 bp, Homo sapiens
agggaaattagcttt

SEQ ID NO: 782620 - DNA, 15 bp, Homo sapiens
gggaaattagctttt

SEQ ID NO: 782621 - DNA, 15 bp, Homo sapiens
ggaaattagcttttc

SEQ ID NO: 782622 - DNA, 15 bp, Homo sapiens
gaaattagcttttct

SEQ ID NO: 782623 - DNA, 15 bp, Homo sapiens
aaattagcttttctg

SEQ ID NO: 782624 - DNA, 15 bp, Homo sapiens
aattagcttttctgt

SEQ ID NO: 782625 - DNA, 15 bp, Homo sapiens
attagcttttctgta

SEQ ID NO: 782626 - DNA, 15 bp, Homo sapiens
ttagcttttctgtac

SEQ ID NO: 782627 - DNA, 15 bp, Homo sapiens
tagcttttctgtact

SEQ ID NO: 782628 - DNA, 15 bp, Homo sapiens
agcttttctgtactt

SEQ ID NO: 782629 - DNA, 15 bp, Homo sapiens
gcttttctgtacttt

SEQ ID NO: 782630 - DNA, 15 bp, Homo sapiens
cttttctgtactttt

SEQ ID NO: 782631 - DNA, 15 bp, Homo sapiens
ttttctgtacttttt

SEQ ID NO: 782632 - DNA, 15 bp, Homo sapiens
tttctgtacttttta

SEQ ID NO: 782633 - DNA, 15 bp, Homo sapiens
ttctgtactttttac

SEQ ID NO: 782634 - DNA, 15 bp, Homo sapiens
tctgtactttttact

SEQ ID NO: 782635 - DNA, 15 bp, Homo sapiens
ctgtactttttactt

SEQ ID NO: 782636 - DNA, 15 bp, Homo sapiens
tgtactttttactta

SEQ ID NO: 782637 - DNA, 15 bp, Homo sapiens
gtactttttacttat

SEQ ID NO: 782638 - DNA, 15 bp, Homo sapiens
tactttttacttatg

SEQ ID NO: 782639 - DNA, 15 bp, Homo sapiens
actttttacttatgt

SEQ ID NO: 782640 - DNA, 15 bp, Homo sapiens
ctttttacttatgta

SEQ ID NO: 782641 - DNA, 15 bp, Homo sapiens
tttttacttatgtaa

SEQ ID NO: 782642 - DNA, 15 bp, Homo sapiens
ttttacttatgtaaa

SEQ ID NO: 782643 - DNA, 15 bp, Homo sapiens
tttacttatgtaaaa

SEQ ID NO: 782644 - DNA, 15 bp, Homo sapiens
ttacttatgtaaaaa

SEQ ID NO: 782645 - DNA, 15 bp, Homo sapiens
tacttatgtaaaaag

SEQ ID NO: 782646 - DNA, 15 bp, Homo sapiens
acttatgtaaaaagg

SEQ ID NO: 782647 - DNA, 15 bp, Homo sapiens
cttatgtaaaaaggg

SEQ ID NO: 782648 - DNA, 15 bp, Homo sapiens
ttatgtaaaaagggt

SEQ ID NO: 782649 - DNA, 15 bp, Homo sapiens
tatgtaaaaagggtg

SEQ ID NO: 782650 - DNA, 15 bp, Homo sapiens
atgtaaaaagggtgt

SEQ ID NO: 782651 - DNA, 15 bp, Homo sapiens
tgtaaaaagggtgta

SEQ ID NO: 782652 - DNA, 15 bp, Homo sapiens
gtaaaaagggtgtaa

SEQ ID NO: 782653 - DNA, 15 bp, Homo sapiens
taaaaagggtgtaat

SEQ ID NO: 782654 - DNA, 15 bp, Homo sapiens
aaaaagggtgtaata

SEQ ID NO: 782655 - DNA, 15 bp, Homo sapiens
aaaagggtgtaatat

SEQ ID NO: 782656 - DNA, 15 bp, Homo sapiens
aaagggtgtaatata

SEQ ID NO: 782657 - DNA, 15 bp, Homo sapiens
aagggtgtaatatat

SEQ ID NO: 782658 - DNA, 15 bp, Homo sapiens
agggtgtaatatata

SEQ ID NO: 782659 - DNA, 15 bp, Homo sapiens
gggtgtaatatatac

SEQ ID NO: 782660 - DNA, 15 bp, Homo sapiens
ggtgtaatatatacc

SEQ ID NO: 782661 - DNA, 15 bp, Homo sapiens
gtgtaatatataccc

SEQ ID NO: 782662 - DNA, 15 bp, Homo sapiens
tgtaatatatacccc

SEQ ID NO: 782663 - DNA, 15 bp, Homo sapiens
gtaatatatacccct

SEQ ID NO: 782664 - DNA, 15 bp, Homo sapiens
taatatataccccta

SEQ ID NO: 782665 - DNA, 15 bp, Homo sapiens
aatatatacccctaa

SEQ ID NO: 782666 - DNA, 15 bp, Homo sapiens
atatatacccctaac

SEQ ID NO: 782667 - DNA, 15 bp, Homo sapiens
tatatacccctaact

SEQ ID NO: 782668 - DNA, 15 bp, Homo sapiens
atatacccctaacta

SEQ ID NO: 782669 - DNA, 15 bp, Homo sapiens
tatacccctaactaa

SEQ ID NO: 782670 - DNA, 15 bp, Homo sapiens
atacccctaactaat

SEQ ID NO: 782671 - DNA, 15 bp, Homo sapiens
tacccctaactaatg

SEQ ID NO: 782672 - DNA, 15 bp, Homo sapiens
acccctaactaatgt

SEQ ID NO: 782673 - DNA, 15 bp, Homo sapiens
cccctaactaatgta

SEQ ID NO: 782674 - DNA, 15 bp, Homo sapiens
ccctaactaatgtat

SEQ ID NO: 782675 - DNA, 15 bp, Homo sapiens
cctaactaatgtatg

SEQ ID NO: 782676 - DNA, 15 bp, Homo sapiens
ctaactaatgtatgt

SEQ ID NO: 782677 - DNA, 15 bp, Homo sapiens
taactaatgtatgta

SEQ ID NO: 782678 - DNA, 15 bp, Homo sapiens
aactaatgtatgtaa

SEQ ID NO: 782679 - DNA, 15 bp, Homo sapiens
actaatgtatgtaag

SEQ ID NO: 782680 - DNA, 15 bp, Homo sapiens
ctaatgtatgtaagg

SEQ ID NO: 782681 - DNA, 15 bp, Homo sapiens
taatgtatgtaagga

SEQ ID NO: 782682 - DNA, 15 bp, Homo sapiens
aatgtatgtaaggaa

SEQ ID NO: 782683 - DNA, 15 bp, Homo sapiens
atgtatgtaaggaat

SEQ ID NO: 782684 - DNA, 15 bp, Homo sapiens
tgtatgtaaggaatg

SEQ ID NO: 782685 - DNA, 15 bp, Homo sapiens
gtatgtaaggaatgt

SEQ ID NO: 782686 - DNA, 15 bp, Homo sapiens
tatgtaaggaatgta

SEQ ID NO: 782687 - DNA, 15 bp, Homo sapiens
atgtaaggaatgtag

SEQ ID NO: 782688 - DNA, 15 bp, Homo sapiens
tgtaaggaatgtaga

SEQ ID NO: 782689 - DNA, 15 bp, Homo sapiens
gtaaggaatgtagat

SEQ ID NO: 782690 - DNA, 15 bp, Homo sapiens
taaggaatgtagata

SEQ ID NO: 782691 - DNA, 15 bp, Homo sapiens
aaggaatgtagataa

SEQ ID NO: 782692 - DNA, 15 bp, Homo sapiens
aggaatgtagataaa

SEQ ID NO: 782693 - DNA, 15 bp, Homo sapiens
ggaatgtagataaat

SEQ ID NO: 782694 - DNA, 15 bp, Homo sapiens
gaatgtagataaatc

SEQ ID NO: 782695 - DNA, 15 bp, Homo sapiens
aatgtagataaatcg

SEQ ID NO: 782696 - DNA, 15 bp, Homo sapiens
atgtagataaatcga

SEQ ID NO: 782697 - DNA, 15 bp, Homo sapiens
tgtagataaatcgag

SEQ ID NO: 782698 - DNA, 15 bp, Homo sapiens
gtagataaatcgagc

SEQ ID NO: 782699 - DNA, 15 bp, Homo sapiens
tagataaatcgagct

SEQ ID NO: 782700 - DNA, 15 bp, Homo sapiens
agataaatcgagctt

SEQ ID NO: 782701 - DNA, 15 bp, Homo sapiens
gataaatcgagcttt

SEQ ID NO: 782702 - DNA, 15 bp, Homo sapiens
ataaatcgagcttta

SEQ ID NO: 782703 - DNA, 15 bp, Homo sapiens
taaatcgagctttaa

SEQ ID NO: 782704 - DNA, 15 bp, Homo sapiens
aaatcgagctttaag

SEQ ID NO: 782705 - DNA, 15 bp, Homo sapiens
aatcgagctttaagc

SEQ ID NO: 782706 - DNA, 15 bp, Homo sapiens
atcgagctttaagcc

SEQ ID NO: 782707 - DNA, 15 bp, Homo sapiens
tcgagctttaagccc

SEQ ID NO: 782708 - DNA, 15 bp, Homo sapiens
cgagctttaagcccc

SEQ ID NO: 782709 - DNA, 15 bp, Homo sapiens
gagctttaagcccct

SEQ ID NO: 782710 - DNA, 15 bp, Homo sapiens
agctttaagcccctt

SEQ ID NO: 782711 - DNA, 15 bp, Homo sapiens
gctttaagccccttt

SEQ ID NO: 782712 - DNA, 15 bp, Homo sapiens
ctttaagccccttta

SEQ ID NO: 782713 - DNA, 15 bp, Homo sapiens
tttaagcccctttac

SEQ ID NO: 782714 - DNA, 15 bp, Homo sapiens
ttaagcccctttaca

SEQ ID NO: 782715 - DNA, 15 bp, Homo sapiens
taagcccctttacag

SEQ ID NO: 782716 - DNA, 15 bp, Homo sapiens
aagcccctttacaga

SEQ ID NO: 782717 - DNA, 15 bp, Homo sapiens
agcccctttacagaa

SEQ ID NO: 782718 - DNA, 15 bp, Homo sapiens
gcccctttacagaaa

SEQ ID NO: 782719 - DNA, 15 bp, Homo sapiens
cccctttacagaaag

SEQ ID NO: 782720 - DNA, 15 bp, Homo sapiens
ccctttacagaaagg

SEQ ID NO: 782721 - DNA, 15 bp, Homo sapiens
cctttacagaaagga

SEQ ID NO: 782722 - DNA, 15 bp, Homo sapiens
ctttacagaaaggat

SEQ ID NO: 782723 - DNA, 15 bp, Homo sapiens
tttacagaaaggatc

SEQ ID NO: 782724 - DNA, 15 bp, Homo sapiens
ttacagaaaggatcc

SEQ ID NO: 782725 - DNA, 15 bp, Homo sapiens
tacagaaaggatcca

SEQ ID NO: 782726 - DNA, 15 bp, Homo sapiens
acagaaaggatccat

SEQ ID NO: 782727 - DNA, 15 bp, Homo sapiens
cagaaaggatccatg

SEQ ID NO: 782728 - DNA, 15 bp, Homo sapiens
agaaaggatccatga

SEQ ID NO: 782729 - DNA, 15 bp, Homo sapiens
gaaaggatccatgaa

SEQ ID NO: 782730 - DNA, 15 bp, Homo sapiens
aaaggatccatgaaa

SEQ ID NO: 782731 - DNA, 15 bp, Homo sapiens
aaggatccatgaaaa

SEQ ID NO: 782732 - DNA, 15 bp, Homo sapiens
aggatccatgaaaat

SEQ ID NO: 782733 - DNA, 15 bp, Homo sapiens
ggatccatgaaaatc

SEQ ID NO: 782734 - DNA, 15 bp, Homo sapiens
gatccatgaaaatca

SEQ ID NO: 782735 - DNA, 15 bp, Homo sapiens
atccatgaaaatcaa

SEQ ID NO: 782736 - DNA, 15 bp, Homo sapiens
tccatgaaaatcaag

SEQ ID NO: 782737 - DNA, 15 bp, Homo sapiens
ccatgaaaatcaagc

SEQ ID NO: 782738 - DNA, 15 bp, Homo sapiens
catgaaaatcaagct

SEQ ID NO: 782739 - DNA, 15 bp, Homo sapiens
atgaaaatcaagctc

SEQ ID NO: 782740 - DNA, 15 bp, Homo sapiens
tgaaaatcaagctca

SEQ ID NO: 782741 - DNA, 15 bp, Homo sapiens
gaaaatcaagctcat

SEQ ID NO: 782742 - DNA, 15 bp, Homo sapiens
aaaatcaagctcata

SEQ ID NO: 782743 - DNA, 15 bp, Homo sapiens
aaatcaagctcatag

SEQ ID NO: 782744 - DNA, 15 bp, Homo sapiens
aatcaagctcatagc

SEQ ID NO: 782745 - DNA, 15 bp, Homo sapiens
atcaagctcatagca

SEQ ID NO: 782746 - DNA, 15 bp, Homo sapiens
tcaagctcatagcaa

SEQ ID NO: 782747 - DNA, 15 bp, Homo sapiens
caagctcatagcaac

SEQ ID NO: 782748 - DNA, 15 bp, Homo sapiens
aagctcatagcaaca

SEQ ID NO: 782749 - DNA, 15 bp, Homo sapiens
agctcatagcaacaa

SEQ ID NO: 782750 - DNA, 15 bp, Homo sapiens
gctcatagcaacaac

SEQ ID NO: 782751 - DNA, 15 bp, Homo sapiens
ctcatagcaacaaca

SEQ ID NO: 782752 - DNA, 15 bp, Homo sapiens
tcatagcaacaacaa

SEQ ID NO: 782753 - DNA, 15 bp, Homo sapiens
catagcaacaacaaa

SEQ ID NO: 782754 - DNA, 15 bp, Homo sapiens
atagcaacaacaaaa

SEQ ID NO: 782755 - DNA, 15 bp, Homo sapiens
tagcaacaacaaaag

SEQ ID NO: 782756 - DNA, 15 bp, Homo sapiens
agcaacaacaaaagt

SEQ ID NO: 782757 - DNA, 15 bp, Homo sapiens
gcaacaacaaaagtt

SEQ ID NO: 782758 - DNA, 15 bp, Homo sapiens
caacaacaaaagttg

SEQ ID NO: 782759 - DNA, 15 bp, Homo sapiens
aacaacaaaagttgc

SEQ ID NO: 782760 - DNA, 15 bp, Homo sapiens
acaacaaaagttgct

SEQ ID NO: 782761 - DNA, 15 bp, Homo sapiens
caacaaaagttgctg

SEQ ID NO: 782762 - DNA, 15 bp, Homo sapiens
aacaaaagttgctgc

SEQ ID NO: 782763 - DNA, 15 bp, Homo sapiens
acaaaagttgctgct

SEQ ID NO: 782764 - DNA, 15 bp, Homo sapiens
caaaagttgctgcta

SEQ ID NO: 782765 - DNA, 15 bp, Homo sapiens
aaaagttgctgctac

SEQ ID NO: 782766 - DNA, 15 bp, Homo sapiens
aaagttgctgctact

SEQ ID NO: 782767 - DNA, 15 bp, Homo sapiens
aagttgctgctacta

SEQ ID NO: 782768 - DNA, 15 bp, Homo sapiens
agttgctgctactac

SEQ ID NO: 782769 - DNA, 15 bp, Homo sapiens
gttgctgctactact

SEQ ID NO: 782770 - DNA, 15 bp, Homo sapiens
ttgctgctactactg

SEQ ID NO: 782771 - DNA, 15 bp, Homo sapiens
tgctgctactactgt

SEQ ID NO: 782772 - DNA, 15 bp, Homo sapiens
gctgctactactgtt

SEQ ID NO: 782773 - DNA, 15 bp, Homo sapiens
ctgctactactgttt

SEQ ID NO: 782774 - DNA, 15 bp, Homo sapiens
tgctactactgtttg

SEQ ID NO: 782775 - DNA, 15 bp, Homo sapiens
gctactactgtttgt

SEQ ID NO: 782776 - DNA, 15 bp, Homo sapiens
ctactactgtttgta

SEQ ID NO: 782777 - DNA, 15 bp, Homo sapiens
tactactgtttgtaa

SEQ ID NO: 782778 - DNA, 15 bp, Homo sapiens
actactgtttgtaat

SEQ ID NO: 782779 - DNA, 15 bp, Homo sapiens
ctactgtttgtaata

SEQ ID NO: 782780 - DNA, 15 bp, Homo sapiens
tactgtttgtaataa

SEQ ID NO: 782781 - DNA, 15 bp, Homo sapiens
actgtttgtaataac

SEQ ID NO: 782782 - DNA, 15 bp, Homo sapiens
ctgtttgtaataaca

SEQ ID NO: 782783 - DNA, 15 bp, Homo sapiens
tgtttgtaataacat

SEQ ID NO: 782784 - DNA, 15 bp, Homo sapiens
gtttgtaataacatt

SEQ ID NO: 782785 - DNA, 15 bp, Homo sapiens
tttgtaataacattg

SEQ ID NO: 782786 - DNA, 15 bp, Homo sapiens
ttgtaataacattgt

SEQ ID NO: 782787 - DNA, 15 bp, Homo sapiens
tgtaataacattgtc

SEQ ID NO: 782788 - DNA, 15 bp, Homo sapiens
gtaataacattgtca

SEQ ID NO: 782789 - DNA, 15 bp, Homo sapiens
taataacattgtcat

SEQ ID NO: 782790 - DNA, 15 bp, Homo sapiens
aataacattgtcatg

SEQ ID NO: 782791 - DNA, 15 bp, Homo sapiens
ataacattgtcatgc

SEQ ID NO: 782792 - DNA, 15 bp, Homo sapiens
taacattgtcatgct

SEQ ID NO: 782793 - DNA, 15 bp, Homo sapiens
aacattgtcatgctt

SEQ ID NO: 782794 - DNA, 15 bp, Homo sapiens
acattgtcatgctta

SEQ ID NO: 782795 - DNA, 15 bp, Homo sapiens
cattgtcatgcttat

SEQ ID NO: 782796 - DNA, 15 bp, Homo sapiens
attgtcatgcttatc

SEQ ID NO: 782797 - DNA, 15 bp, Homo sapiens
ttgtcatgcttatcc

SEQ ID NO: 782798 - DNA, 15 bp, Homo sapiens
tgtcatgcttatcca

SEQ ID NO: 782799 - DNA, 15 bp, Homo sapiens
gtcatgcttatccat

SEQ ID NO: 782800 - DNA, 15 bp, Homo sapiens
tcatgcttatccata

SEQ ID NO: 782801 - DNA, 15 bp, Homo sapiens
catgcttatccatac

SEQ ID NO: 782802 - DNA, 15 bp, Homo sapiens
atgcttatccatact

SEQ ID NO: 782803 - DNA, 15 bp, Homo sapiens
tgcttatccatactt

SEQ ID NO: 782804 - DNA, 15 bp, Homo sapiens
gcttatccatacttt

SEQ ID NO: 782805 - DNA, 15 bp, Homo sapiens
cttatccatacttta

SEQ ID NO: 782806 - DNA, 15 bp, Homo sapiens
ttatccatactttag

SEQ ID NO: 782807 - DNA, 15 bp, Homo sapiens
tatccatactttaga

SEQ ID NO: 782808 - DNA, 15 bp, Homo sapiens
atccatactttagat

SEQ ID NO: 782809 - DNA, 15 bp, Homo sapiens
tccatactttagatt

SEQ ID NO: 782810 - DNA, 15 bp, Homo sapiens
ccatactttagattc

SEQ ID NO: 782811 - DNA, 15 bp, Homo sapiens
catactttagattct

SEQ ID NO: 782812 - DNA, 15 bp, Homo sapiens
atactttagattctg

SEQ ID NO: 782813 - DNA, 15 bp, Homo sapiens
tactttagattctgg

SEQ ID NO: 782814 - DNA, 15 bp, Homo sapiens
actttagattctggg

SEQ ID NO: 782815 - DNA, 15 bp, Homo sapiens
ctttagattctggga

SEQ ID NO: 782816 - DNA, 15 bp, Homo sapiens
tttagattctgggaa

SEQ ID NO: 782817 - DNA, 15 bp, Homo sapiens
ttagattctgggaag

SEQ ID NO: 782818 - DNA, 15 bp, Homo sapiens
tagattctgggaaga

SEQ ID NO: 782819 - DNA, 15 bp, Homo sapiens
agattctgggaagat

SEQ ID NO: 782820 - DNA, 15 bp, Homo sapiens
gattctgggaagatg

SEQ ID NO: 782821 - DNA, 15 bp, Homo sapiens
attctgggaagatgt

SEQ ID NO: 782822 - DNA, 15 bp, Homo sapiens
ttctgggaagatgtg

SEQ ID NO: 782823 - DNA, 15 bp, Homo sapiens
tctgggaagatgtgg

SEQ ID NO: 782824 - DNA, 15 bp, Homo sapiens
ctgggaagatgtggt

SEQ ID NO: 782825 - DNA, 15 bp, Homo sapiens
tgggaagatgtggta

SEQ ID NO: 782826 - DNA, 15 bp, Homo sapiens
gggaagatgtggtaa

SEQ ID NO: 782827 - DNA, 15 bp, Homo sapiens
ggaagatgtggtaac

SEQ ID NO: 782828 - DNA, 15 bp, Homo sapiens
gaagatgtggtaact

SEQ ID NO: 782829 - DNA, 15 bp, Homo sapiens
aagatgtggtaactt

SEQ ID NO: 782830 - DNA, 15 bp, Homo sapiens
agatgtggtaacttt

SEQ ID NO: 782831 - DNA, 15 bp, Homo sapiens
gatgtggtaactttt

SEQ ID NO: 782832 - DNA, 15 bp, Homo sapiens
atgtggtaacttttt

SEQ ID NO: 782833 - DNA, 15 bp, Homo sapiens
tgtggtaacttttta

SEQ ID NO: 782834 - DNA, 15 bp, Homo sapiens
gtggtaactttttag

SEQ ID NO: 782835 - DNA, 15 bp, Homo sapiens
tggtaactttttagt

SEQ ID NO: 782836 - DNA, 15 bp, Homo sapiens
ggtaactttttagta

SEQ ID NO: 782837 - DNA, 15 bp, Homo sapiens
gtaactttttagtat

SEQ ID NO: 782838 - DNA, 15 bp, Homo sapiens
taactttttagtata

SEQ ID NO: 782839 - DNA, 15 bp, Homo sapiens
aactttttagtataa

SEQ ID NO: 782840 - DNA, 15 bp, Homo sapiens
actttttagtataag

SEQ ID NO: 782841 - DNA, 15 bp, Homo sapiens
ctttttagtataaga

SEQ ID NO: 782842 - DNA, 15 bp, Homo sapiens
tttttagtataagaa

SEQ ID NO: 782843 - DNA, 15 bp, Homo sapiens
ttttagtataagaaa

SEQ ID NO: 782844 - DNA, 15 bp, Homo sapiens
tttagtataagaaac

SEQ ID NO: 782845 - DNA, 15 bp, Homo sapiens
ttagtataagaaacc

SEQ ID NO: 782846 - DNA, 15 bp, Homo sapiens
tagtataagaaaccc

SEQ ID NO: 782847 - DNA, 15 bp, Homo sapiens
agtataagaaaccct

SEQ ID NO: 782848 - DNA, 15 bp, Homo sapiens
gtataagaaaccctt

SEQ ID NO: 782849 - DNA, 15 bp, Homo sapiens
tataagaaacccttc

SEQ ID NO: 782850 - DNA, 15 bp, Homo sapiens
ataagaaacccttct

SEQ ID NO: 782851 - DNA, 15 bp, Homo sapiens
taagaaacccttctg

SEQ ID NO: 782852 - DNA, 15 bp, Homo sapiens
aagaaacccttctgg

SEQ ID NO: 782853 - DNA, 15 bp, Homo sapiens
agaaacccttctggg

SEQ ID NO: 782854 - DNA, 15 bp, Homo sapiens
gaaacccttctgggc

SEQ ID NO: 782855 - DNA, 15 bp, Homo sapiens
aaacccttctgggcc

SEQ ID NO: 782856 - DNA, 15 bp, Homo sapiens
aacccttctgggcct

SEQ ID NO: 782857 - DNA, 15 bp, Homo sapiens
acccttctgggcctt

SEQ ID NO: 782858 - DNA, 15 bp, Homo sapiens
cccttctgggccttg

SEQ ID NO: 782859 - DNA, 15 bp, Homo sapiens
ccttctgggccttga

SEQ ID NO: 782860 - DNA, 15 bp, Homo sapiens
cttctgggccttgaa

SEQ ID NO: 782861 - DNA, 15 bp, Homo sapiens
ttctgggccttgaat

SEQ ID NO: 782862 - DNA, 15 bp, Homo sapiens
tctgggccttgaatt

SEQ ID NO: 782863 - DNA, 15 bp, Homo sapiens
ctgggccttgaatta

SEQ ID NO: 782864 - DNA, 15 bp, Homo sapiens
tgggccttgaattag

SEQ ID NO: 782865 - DNA, 15 bp, Homo sapiens
gggccttgaattagc

SEQ ID NO: 782866 - DNA, 15 bp, Homo sapiens
ggccttgaattagca

SEQ ID NO: 782867 - DNA, 15 bp, Homo sapiens
gccttgaattagcaa

SEQ ID NO: 782868 - DNA, 15 bp, Homo sapiens
ccttgaattagcaat

SEQ ID NO: 782869 - DNA, 15 bp, Homo sapiens
cttgaattagcaatt

SEQ ID NO: 782870 - DNA, 15 bp, Homo sapiens
ttgaattagcaattt

SEQ ID NO: 782871 - DNA, 15 bp, Homo sapiens
tgaattagcaattta

SEQ ID NO: 782872 - DNA, 15 bp, Homo sapiens
gaattagcaatttat

SEQ ID NO: 782873 - DNA, 15 bp, Homo sapiens
aattagcaatttata

SEQ ID NO: 782874 - DNA, 15 bp, Homo sapiens
attagcaatttataa

SEQ ID NO: 782875 - DNA, 15 bp, Homo sapiens
ttagcaatttataat

SEQ ID NO: 782876 - DNA, 15 bp, Homo sapiens
tagcaatttataatt

SEQ ID NO: 782877 - DNA, 15 bp, Homo sapiens
agcaatttataattt

SEQ ID NO: 782878 - DNA, 15 bp, Homo sapiens
gcaatttataatttt

SEQ ID NO: 782879 - DNA, 15 bp, Homo sapiens
caatttataattttt

SEQ ID NO: 782880 - DNA, 15 bp, Homo sapiens
aatttataatttttg

SEQ ID NO: 782881 - DNA, 15 bp, Homo sapiens
atttataatttttga

SEQ ID NO: 782882 - DNA, 15 bp, Homo sapiens
tttataatttttgaa

SEQ ID NO: 782883 - DNA, 15 bp, Homo sapiens
ttataatttttgaag

SEQ ID NO: 782884 - DNA, 15 bp, Homo sapiens
tataatttttgaagt

SEQ ID NO: 782885 - DNA, 15 bp, Homo sapiens
ataatttttgaagtc

SEQ ID NO: 782886 - DNA, 15 bp, Homo sapiens
taatttttgaagtcc

SEQ ID NO: 782887 - DNA, 15 bp, Homo sapiens
aatttttgaagtccc

SEQ ID NO: 782888 - DNA, 15 bp, Homo sapiens
atttttgaagtcccc

SEQ ID NO: 782889 - DNA, 15 bp, Homo sapiens
tttttgaagtcccca

SEQ ID NO: 782890 - DNA, 15 bp, Homo sapiens
ttttgaagtccccat

SEQ ID NO: 782891 - DNA, 15 bp, Homo sapiens
tttgaagtccccatg

SEQ ID NO: 782892 - DNA, 15 bp, Homo sapiens
ttgaagtccccatga

SEQ ID NO: 782893 - DNA, 15 bp, Homo sapiens
tgaagtccccatgac

SEQ ID NO: 782894 - DNA, 15 bp, Homo sapiens
gaagtccccatgact

SEQ ID NO: 782895 - DNA, 15 bp, Homo sapiens
aagtccccatgacta

SEQ ID NO: 782896 - DNA, 15 bp, Homo sapiens
agtccccatgactag

SEQ ID NO: 782897 - DNA, 15 bp, Homo sapiens
gtccccatgactagg

SEQ ID NO: 782898 - DNA, 15 bp, Homo sapiens
tccccatgactaggg

SEQ ID NO: 782899 - DNA, 15 bp, Homo sapiens
ccccatgactaggga

SEQ ID NO: 782900 - DNA, 15 bp, Homo sapiens
cccatgactagggat

SEQ ID NO: 782901 - DNA, 15 bp, Homo sapiens
ccatgactagggatt

SEQ ID NO: 782902 - DNA, 15 bp, Homo sapiens
catgactagggattt

SEQ ID NO: 782903 - DNA, 15 bp, Homo sapiens
atgactagggatttt

SEQ ID NO: 782904 - DNA, 15 bp, Homo sapiens
tgactagggattttc

SEQ ID NO: 782905 - DNA, 15 bp, Homo sapiens
gactagggattttct

SEQ ID NO: 782906 - DNA, 15 bp, Homo sapiens
actagggattttcta

SEQ ID NO: 782907 - DNA, 15 bp, Homo sapiens
ctagggattttctat

SEQ ID NO: 782908 - DNA, 15 bp, Homo sapiens
tagggattttctatc

SEQ ID NO: 782909 - DNA, 15 bp, Homo sapiens
agggattttctatct

SEQ ID NO: 782910 - DNA, 15 bp, Homo sapiens
gggattttctatctt

SEQ ID NO: 782911 - DNA, 15 bp, Homo sapiens
ggattttctatcttt

SEQ ID NO: 782912 - DNA, 15 bp, Homo sapiens
gattttctatctttt

SEQ ID NO: 782913 - DNA, 15 bp, Homo sapiens
attttctatcttttt

SEQ ID NO: 782914 - DNA, 15 bp, Homo sapiens
ttttctatctttttt

SEQ ID NO: 782915 - DNA, 15 bp, Homo sapiens
tttctatcttttttt

SEQ ID NO: 782916 - DNA, 15 bp, Homo sapiens
ttctatctttttttt

SEQ ID NO: 782917 - DNA, 15 bp, Homo sapiens
tctatctttttttta

SEQ ID NO: 782918 - DNA, 15 bp, Homo sapiens
ctatcttttttttaa

SEQ ID NO: 782919 - DNA, 15 bp, Homo sapiens
tatcttttttttaat

SEQ ID NO: 782920 - DNA, 15 bp, Homo sapiens
atcttttttttaatt

SEQ ID NO: 782921 - DNA, 15 bp, Homo sapiens
tcttttttttaattt

SEQ ID NO: 782922 - DNA, 15 bp, Homo sapiens
cttttttttaatttt

SEQ ID NO: 782923 - DNA, 15 bp, Homo sapiens
tttttttaattttag

SEQ ID NO: 782924 - DNA, 15 bp, Homo sapiens
ttttttaattttaga

SEQ ID NO: 782925 - DNA, 15 bp, Homo sapiens
tttttaattttagaa

SEQ ID NO: 782926 - DNA, 15 bp, Homo sapiens
ttttaattttagaaa

SEQ ID NO: 782927 - DNA, 15 bp, Homo sapiens
tttaattttagaaaa

SEQ ID NO: 782928 - DNA, 15 bp, Homo sapiens
ttaattttagaaaaa

SEQ ID NO: 782929 - DNA, 15 bp, Homo sapiens
taattttagaaaaaa

SEQ ID NO: 782930 - DNA, 15 bp, Homo sapiens
aattttagaaaaaag

SEQ ID NO: 782931 - DNA, 15 bp, Homo sapiens
attttagaaaaaagt

SEQ ID NO: 782932 - DNA, 15 bp, Homo sapiens
ttttagaaaaaagtt

SEQ ID NO: 782933 - DNA, 15 bp, Homo sapiens
tttagaaaaaagttt

SEQ ID NO: 782934 - DNA, 15 bp, Homo sapiens
ttagaaaaaagtttt

SEQ ID NO: 782935 - DNA, 15 bp, Homo sapiens
tagaaaaaagttttc

SEQ ID NO: 782936 - DNA, 15 bp, Homo sapiens
agaaaaaagttttca

SEQ ID NO: 782937 - DNA, 15 bp, Homo sapiens
gaaaaaagttttcag

SEQ ID NO: 782938 - DNA, 15 bp, Homo sapiens
aaaaaagttttcaga

SEQ ID NO: 782939 - DNA, 15 bp, Homo sapiens
aaaaagttttcagag

SEQ ID NO: 782940 - DNA, 15 bp, Homo sapiens
aaaagttttcagagt

SEQ ID NO: 782941 - DNA, 15 bp, Homo sapiens
aaagttttcagagtt

SEQ ID NO: 782942 - DNA, 15 bp, Homo sapiens
aagttttcagagtta

SEQ ID NO: 782943 - DNA, 15 bp, Homo sapiens
agttttcagagttaa

SEQ ID NO: 782944 - DNA, 15 bp, Homo sapiens
gttttcagagttaaa

SEQ ID NO: 782945 - DNA, 15 bp, Homo sapiens
ttttcagagttaaat

SEQ ID NO: 782946 - DNA, 15 bp, Homo sapiens
tttcagagttaaatt

SEQ ID NO: 782947 - DNA, 15 bp, Homo sapiens
ttcagagttaaattg

SEQ ID NO: 782948 - DNA, 15 bp, Homo sapiens
tcagagttaaattgg

SEQ ID NO: 782949 - DNA, 15 bp, Homo sapiens
cagagttaaattggg

SEQ ID NO: 782950 - DNA, 15 bp, Homo sapiens
agagttaaattgggt

SEQ ID NO: 782951 - DNA, 15 bp, Homo sapiens
gagttaaattgggtg

SEQ ID NO: 782952 - DNA, 15 bp, Homo sapiens
agttaaattgggtgt

SEQ ID NO: 782953 - DNA, 15 bp, Homo sapiens
gttaaattgggtgta

SEQ ID NO: 782954 - DNA, 15 bp, Homo sapiens
ttaaattgggtgtag

SEQ ID NO: 782955 - DNA, 15 bp, Homo sapiens
taaattgggtgtaga

SEQ ID NO: 782956 - DNA, 15 bp, Homo sapiens
aaattgggtgtagaa

SEQ ID NO: 782957 - DNA, 15 bp, Homo sapiens
aattgggtgtagaat

SEQ ID NO: 782958 - DNA, 15 bp, Homo sapiens
attgggtgtagaata

SEQ ID NO: 782959 - DNA, 15 bp, Homo sapiens
ttgggtgtagaataa

SEQ ID NO: 782960 - DNA, 15 bp, Homo sapiens
tgggtgtagaataat

SEQ ID NO: 782961 - DNA, 15 bp, Homo sapiens
gggtgtagaataata

SEQ ID NO: 782962 - DNA, 15 bp, Homo sapiens
ggtgtagaataatat

SEQ ID NO: 782963 - DNA, 15 bp, Homo sapiens
gtgtagaataatatt

SEQ ID NO: 782964 - DNA, 15 bp, Homo sapiens
tgtagaataatattt

SEQ ID NO: 782965 - DNA, 15 bp, Homo sapiens
gtagaataatatttt

SEQ ID NO: 782966 - DNA, 15 bp, Homo sapiens
tagaataatattttc

SEQ ID NO: 782967 - DNA, 15 bp, Homo sapiens
agaataatattttct

SEQ ID NO: 782968 - DNA, 15 bp, Homo sapiens
gaataatattttctt

SEQ ID NO: 782969 - DNA, 15 bp, Homo sapiens
aataatattttcttt

SEQ ID NO: 782970 - DNA, 15 bp, Homo sapiens
ataatattttctttc

SEQ ID NO: 782971 - DNA, 15 bp, Homo sapiens
taatattttctttct

SEQ ID NO: 782972 - DNA, 15 bp, Homo sapiens
aatattttctttctg

SEQ ID NO: 782973 - DNA, 15 bp, Homo sapiens
atattttctttctgt

SEQ ID NO: 782974 - DNA, 15 bp, Homo sapiens
tattttctttctgtg

SEQ ID NO: 782975 - DNA, 15 bp, Homo sapiens
attttctttctgtgt

SEQ ID NO: 782976 - DNA, 15 bp, Homo sapiens
ttttctttctgtgtg

SEQ ID NO: 782977 - DNA, 15 bp, Homo sapiens
tttctttctgtgtga

SEQ ID NO: 782978 - DNA, 15 bp, Homo sapiens
ttctttctgtgtgat

SEQ ID NO: 782979 - DNA, 15 bp, Homo sapiens
tctttctgtgtgatt

SEQ ID NO: 782980 - DNA, 15 bp, Homo sapiens
ctttctgtgtgatta

SEQ ID NO: 782981 - DNA, 15 bp, Homo sapiens
tttctgtgtgattaa

SEQ ID NO: 782982 - DNA, 15 bp, Homo sapiens
ttctgtgtgattaaa

SEQ ID NO: 782983 - DNA, 15 bp, Homo sapiens
tctgtgtgattaaaa

SEQ ID NO: 782984 - DNA, 15 bp, Homo sapiens
ctgtgtgattaaaag

SEQ ID NO: 782985 - DNA, 15 bp, Homo sapiens
tgtgtgattaaaagc

SEQ ID NO: 782986 - DNA, 15 bp, Homo sapiens
gtgtgattaaaagct

SEQ ID NO: 782987 - DNA, 15 bp, Homo sapiens
tgtgattaaaagctc

SEQ ID NO: 782988 - DNA, 15 bp, Homo sapiens
gtgattaaaagctct

SEQ ID NO: 782989 - DNA, 15 bp, Homo sapiens
tgattaaaagctctg

SEQ ID NO: 782990 - DNA, 15 bp, Homo sapiens
gattaaaagctctgt

SEQ ID NO: 782991 - DNA, 15 bp, Homo sapiens
attaaaagctctgtg

SEQ ID NO: 782992 - DNA, 15 bp, Homo sapiens
ttaaaagctctgtga

SEQ ID NO: 782993 - DNA, 15 bp, Homo sapiens
taaaagctctgtgac

SEQ ID NO: 782994 - DNA, 15 bp, Homo sapiens
aaaagctctgtgact

SEQ ID NO: 782995 - DNA, 15 bp, Homo sapiens
aaagctctgtgacta

SEQ ID NO: 782996 - DNA, 15 bp, Homo sapiens
aagctctgtgactat

SEQ ID NO: 782997 - DNA, 15 bp, Homo sapiens
agctctgtgactata

SEQ ID NO: 782998 - DNA, 15 bp, Homo sapiens
gctctgtgactatag

SEQ ID NO: 782999 - DNA, 15 bp, Homo sapiens
ctctgtgactataga

SEQ ID NO: 783000 - DNA, 15 bp, Homo sapiens
tctgtgactatagag

SEQ ID NO: 783001 - DNA, 15 bp, Homo sapiens
ctgtgactatagagc

SEQ ID NO: 783002 - DNA, 15 bp, Homo sapiens
tgtgactatagagcc

SEQ ID NO: 783003 - DNA, 15 bp, Homo sapiens
gtgactatagagcct

SEQ ID NO: 783004 - DNA, 15 bp, Homo sapiens
tgactatagagcctt

SEQ ID NO: 783005 - DNA, 15 bp, Homo sapiens
gactatagagccttt

SEQ ID NO: 783006 - DNA, 15 bp, Homo sapiens
actatagagcctttt

SEQ ID NO: 783007 - DNA, 15 bp, Homo sapiens
ctatagagccttttt

SEQ ID NO: 783008 - DNA, 15 bp, Homo sapiens
tatagagcctttttt

SEQ ID NO: 783009 - DNA, 15 bp, Homo sapiens
atagagccttttttt

SEQ ID NO: 783010 - DNA, 15 bp, Homo sapiens
tagagcctttttttt

SEQ ID NO: 783011 - DNA, 15 bp, Homo sapiens
agagccttttttttg

SEQ ID NO: 783012 - DNA, 15 bp, Homo sapiens
gagccttttttttgt

SEQ ID NO: 783013 - DNA, 15 bp, Homo sapiens
agccttttttttgtt

SEQ ID NO: 783014 - DNA, 15 bp, Homo sapiens
gccttttttttgttt

SEQ ID NO: 783015 - DNA, 15 bp, Homo sapiens
ccttttttttgtttg

SEQ ID NO: 783016 - DNA, 15 bp, Homo sapiens
cttttttttgtttgt

SEQ ID NO: 783017 - DNA, 15 bp, Homo sapiens
tttttgtttgtttta

SEQ ID NO: 783018 - DNA, 15 bp, Homo sapiens
ttttgtttgttttat

SEQ ID NO: 783019 - DNA, 15 bp, Homo sapiens
tttgtttgttttatg

SEQ ID NO: 783020 - DNA, 15 bp, Homo sapiens
ttgtttgttttatga

SEQ ID NO: 783021 - DNA, 15 bp, Homo sapiens
tgtttgttttatgag

SEQ ID NO: 783022 - DNA, 15 bp, Homo sapiens
gtttgttttatgaga

SEQ ID NO: 783023 - DNA, 15 bp, Homo sapiens
tttgttttatgagaa

SEQ ID NO: 783024 - DNA, 15 bp, Homo sapiens
ttgttttatgagaat

SEQ ID NO: 783025 - DNA, 15 bp, Homo sapiens
tgttttatgagaatt

SEQ ID NO: 783026 - DNA, 15 bp, Homo sapiens
gttttatgagaattg

SEQ ID NO: 783027 - DNA, 15 bp, Homo sapiens
ttttatgagaattga

SEQ ID NO: 783028 - DNA, 15 bp, Homo sapiens
tttatgagaattgag

SEQ ID NO: 783029 - DNA, 15 bp, Homo sapiens
ttatgagaattgagt

SEQ ID NO: 783030 - DNA, 15 bp, Homo sapiens
tatgagaattgagtt

SEQ ID NO: 783031 - DNA, 15 bp, Homo sapiens
atgagaattgagttc

SEQ ID NO: 783032 - DNA, 15 bp, Homo sapiens
tgagaattgagttct

SEQ ID NO: 783033 - DNA, 15 bp, Homo sapiens
gagaattgagttctc

SEQ ID NO: 783034 - DNA, 15 bp, Homo sapiens
agaattgagttctct

SEQ ID NO: 783035 - DNA, 15 bp, Homo sapiens
gaattgagttctctt

SEQ ID NO: 783036 - DNA, 15 bp, Homo sapiens
aattgagttctcttc

SEQ ID NO: 783037 - DNA, 15 bp, Homo sapiens
attgagttctcttct

SEQ ID NO: 783038 - DNA, 15 bp, Homo sapiens
ttgagttctcttctc

SEQ ID NO: 783039 - DNA, 15 bp, Homo sapiens
tgagttctcttctct

SEQ ID NO: 783040 - DNA, 15 bp, Homo sapiens
gagttctcttctctt

SEQ ID NO: 783041 - DNA, 15 bp, Homo sapiens
agttctcttctcttg

SEQ ID NO: 783042 - DNA, 15 bp, Homo sapiens
gttctcttctcttga

SEQ ID NO: 783043 - DNA, 15 bp, Homo sapiens
ttctcttctcttgag

SEQ ID NO: 783044 - DNA, 15 bp, Homo sapiens
tctcttctcttgagt

SEQ ID NO: 783045 - DNA, 15 bp, Homo sapiens
ctcttctcttgagta

SEQ ID NO: 783046 - DNA, 15 bp, Homo sapiens
tcttctcttgagtat

SEQ ID NO: 783047 - DNA, 15 bp, Homo sapiens
cttctcttgagtatt

SEQ ID NO: 783048 - DNA, 15 bp, Homo sapiens
ttctcttgagtattg

SEQ ID NO: 783049 - DNA, 15 bp, Homo sapiens
tctcttgagtattgt

SEQ ID NO: 783050 - DNA, 15 bp, Homo sapiens
ctcttgagtattgtg

SEQ ID NO: 783051 - DNA, 15 bp, Homo sapiens
tcttgagtattgtga

SEQ ID NO: 783052 - DNA, 15 bp, Homo sapiens
cttgagtattgtgac

SEQ ID NO: 783053 - DNA, 15 bp, Homo sapiens
ttgagtattgtgaca

SEQ ID NO: 783054 - DNA, 15 bp, Homo sapiens
tgagtattgtgacaa

SEQ ID NO: 783055 - DNA, 15 bp, Homo sapiens
gagtattgtgacaaa

SEQ ID NO: 783056 - DNA, 15 bp, Homo sapiens
agtattgtgacaaag

SEQ ID NO: 783057 - DNA, 15 bp, Homo sapiens
gtattgtgacaaagg

SEQ ID NO: 783058 - DNA, 15 bp, Homo sapiens
tattgtgacaaaggg

SEQ ID NO: 783059 - DNA, 15 bp, Homo sapiens
attgtgacaaaggga

SEQ ID NO: 783060 - DNA, 15 bp, Homo sapiens
ttgtgacaaagggaa

SEQ ID NO: 783061 - DNA, 15 bp, Homo sapiens
tgtgacaaagggaaa

SEQ ID NO: 783062 - DNA, 15 bp, Homo sapiens
gtgacaaagggaaaa

SEQ ID NO: 783063 - DNA, 15 bp, Homo sapiens
tgacaaagggaaaag

SEQ ID NO: 783064 - DNA, 15 bp, Homo sapiens
gacaaagggaaaagt

SEQ ID NO: 783065 - DNA, 15 bp, Homo sapiens
acaaagggaaaagtc

SEQ ID NO: 783066 - DNA, 15 bp, Homo sapiens
caaagggaaaagtct

SEQ ID NO: 783067 - DNA, 15 bp, Homo sapiens
aaagggaaaagtctg

SEQ ID NO: 783068 - DNA, 15 bp, Homo sapiens
aagggaaaagtctgt

SEQ ID NO: 783069 - DNA, 15 bp, Homo sapiens
agggaaaagtctgtg

SEQ ID NO: 783070 - DNA, 15 bp, Homo sapiens
gggaaaagtctgtgg

SEQ ID NO: 783071 - DNA, 15 bp, Homo sapiens
ggaaaagtctgtggt

SEQ ID NO: 783072 - DNA, 15 bp, Homo sapiens
gaaaagtctgtggtt

SEQ ID NO: 783073 - DNA, 15 bp, Homo sapiens
aaaagtctgtggttc

SEQ ID NO: 783074 - DNA, 15 bp, Homo sapiens
aaagtctgtggttct

SEQ ID NO: 783075 - DNA, 15 bp, Homo sapiens
aagtctgtggttctc

SEQ ID NO: 783076 - DNA, 15 bp, Homo sapiens
agtctgtggttctct

SEQ ID NO: 783077 - DNA, 15 bp, Homo sapiens
gtctgtggttctctc

SEQ ID NO: 783078 - DNA, 15 bp, Homo sapiens
tctgtggttctctca

SEQ ID NO: 783079 - DNA, 15 bp, Homo sapiens
ctgtggttctctcag

SEQ ID NO: 783080 - DNA, 15 bp, Homo sapiens
tgtggttctctcaga

SEQ ID NO: 783081 - DNA, 15 bp, Homo sapiens
gtggttctctcagaa

SEQ ID NO: 783082 - DNA, 15 bp, Homo sapiens
tggttctctcagaat

SEQ ID NO: 783083 - DNA, 15 bp, Homo sapiens
ggttctctcagaata

SEQ ID NO: 783084 - DNA, 15 bp, Homo sapiens
gttctctcagaatat

SEQ ID NO: 783085 - DNA, 15 bp, Homo sapiens
ttctctcagaatatt

SEQ ID NO: 783086 - DNA, 15 bp, Homo sapiens
tctctcagaatattt

SEQ ID NO: 783087 - DNA, 15 bp, Homo sapiens
ctctcagaatattta

SEQ ID NO: 783088 - DNA, 15 bp, Homo sapiens
tctcagaatatttat

SEQ ID NO: 783089 - DNA, 15 bp, Homo sapiens
ctcagaatatttatt

SEQ ID NO: 783090 - DNA, 15 bp, Homo sapiens
tcagaatatttattc

SEQ ID NO: 783091 - DNA, 15 bp, Homo sapiens
cagaatatttattcc

SEQ ID NO: 783092 - DNA, 15 bp, Homo sapiens
agaatatttattccc

SEQ ID NO: 783093 - DNA, 15 bp, Homo sapiens
gaatatttattccct

SEQ ID NO: 783094 - DNA, 15 bp, Homo sapiens
aatatttattccctc

SEQ ID NO: 783095 - DNA, 15 bp, Homo sapiens
atatttattccctct

SEQ ID NO: 783096 - DNA, 15 bp, Homo sapiens
tatttattccctctg

SEQ ID NO: 783097 - DNA, 15 bp, Homo sapiens
atttattccctctgt

SEQ ID NO: 783098 - DNA, 15 bp, Homo sapiens
tttattccctctgta

SEQ ID NO: 783099 - DNA, 15 bp, Homo sapiens
ttattccctctgtag

SEQ ID NO: 783100 - DNA, 15 bp, Homo sapiens
tattccctctgtaga

SEQ ID NO: 783101 - DNA, 15 bp, Homo sapiens
attccctctgtagag

SEQ ID NO: 783102 - DNA, 15 bp, Homo sapiens
ttccctctgtagagc

SEQ ID NO: 783103 - DNA, 15 bp, Homo sapiens
tccctctgtagagct

SEQ ID NO: 783104 - DNA, 15 bp, Homo sapiens
ccctctgtagagctt

SEQ ID NO: 783105 - DNA, 15 bp, Homo sapiens
cctctgtagagcttc

SEQ ID NO: 783106 - DNA, 15 bp, Homo sapiens
ctctgtagagcttct

SEQ ID NO: 783107 - DNA, 15 bp, Homo sapiens
tctgtagagcttctt

SEQ ID NO: 783108 - DNA, 15 bp, Homo sapiens
ctgtagagcttcttc

SEQ ID NO: 783109 - DNA, 15 bp, Homo sapiens
tgtagagcttcttca

SEQ ID NO: 783110 - DNA, 15 bp, Homo sapiens
gtagagcttcttcag

SEQ ID NO: 783111 - DNA, 15 bp, Homo sapiens
tagagcttcttcagg

SEQ ID NO: 783112 - DNA, 15 bp, Homo sapiens
agagcttcttcaggt

SEQ ID NO: 783113 - DNA, 15 bp, Homo sapiens
gagcttcttcaggtg

SEQ ID NO: 783114 - DNA, 15 bp, Homo sapiens
agcttcttcaggtgg

SEQ ID NO: 783115 - DNA, 15 bp, Homo sapiens
gcttcttcaggtggg

SEQ ID NO: 783116 - DNA, 15 bp, Homo sapiens
cttcttcaggtgggt

SEQ ID NO: 783117 - DNA, 15 bp, Homo sapiens
ttcttcaggtgggtg

SEQ ID NO: 783118 - DNA, 15 bp, Homo sapiens
tcttcaggtgggtgc

SEQ ID NO: 783119 - DNA, 15 bp, Homo sapiens
cttcaggtgggtgcc

SEQ ID NO: 783120 - DNA, 15 bp, Homo sapiens
ttcaggtgggtgcca

SEQ ID NO: 783121 - DNA, 15 bp, Homo sapiens
tcaggtgggtgccag

SEQ ID NO: 783122 - DNA, 15 bp, Homo sapiens
caggtgggtgccagt

SEQ ID NO: 783123 - DNA, 15 bp, Homo sapiens
aggtgggtgccagtt

SEQ ID NO: 783124 - DNA, 15 bp, Homo sapiens
ggtgggtgccagtta

SEQ ID NO: 783125 - DNA, 15 bp, Homo sapiens
gtgggtgccagttag

SEQ ID NO: 783126 - DNA, 15 bp, Homo sapiens
tgggtgccagttagt

SEQ ID NO: 783127 - DNA, 15 bp, Homo sapiens
gggtgccagttagtt

SEQ ID NO: 783128 - DNA, 15 bp, Homo sapiens
ggtgccagttagttc

SEQ ID NO: 783129 - DNA, 15 bp, Homo sapiens
gtgccagttagttca

SEQ ID NO: 783130 - DNA, 15 bp, Homo sapiens
tgccagttagttcaa

SEQ ID NO: 783131 - DNA, 15 bp, Homo sapiens
gccagttagttcaat

SEQ ID NO: 783132 - DNA, 15 bp, Homo sapiens
ccagttagttcaata

SEQ ID NO: 783133 - DNA, 15 bp, Homo sapiens
cagttagttcaatac

SEQ ID NO: 783134 - DNA, 15 bp, Homo sapiens
agttagttcaatacc

SEQ ID NO: 783135 - DNA, 15 bp, Homo sapiens
gttagttcaataccc

SEQ ID NO: 783136 - DNA, 15 bp, Homo sapiens
ttagttcaataccct

SEQ ID NO: 783137 - DNA, 15 bp, Homo sapiens
tagttcaataccctt

SEQ ID NO: 783138 - DNA, 15 bp, Homo sapiens
agttcaatacccttt

SEQ ID NO: 783139 - DNA, 15 bp, Homo sapiens
gttcaataccctttt

SEQ ID NO: 783140 - DNA, 15 bp, Homo sapiens
ttcaatacccttttc

SEQ ID NO: 783141 - DNA, 15 bp, Homo sapiens
tcaatacccttttca

SEQ ID NO: 783142 - DNA, 15 bp, Homo sapiens
caatacccttttcac

SEQ ID NO: 783143 - DNA, 15 bp, Homo sapiens
aatacccttttcact

SEQ ID NO: 783144 - DNA, 15 bp, Homo sapiens
atacccttttcactt

SEQ ID NO: 783145 - DNA, 15 bp, Homo sapiens
tacccttttcacttt

SEQ ID NO: 783146 - DNA, 15 bp, Homo sapiens
acccttttcactttt

SEQ ID NO: 783147 - DNA, 15 bp, Homo sapiens
cccttttcacttttc

SEQ ID NO: 783148 - DNA, 15 bp, Homo sapiens
ccttttcacttttct

SEQ ID NO: 783149 - DNA, 15 bp, Homo sapiens
cttttcacttttctg

SEQ ID NO: 783150 - DNA, 15 bp, Homo sapiens
ttttcacttttctgc

SEQ ID NO: 783151 - DNA, 15 bp, Homo sapiens
tttcacttttctgcc

SEQ ID NO: 783152 - DNA, 15 bp, Homo sapiens
ttcacttttctgcca

SEQ ID NO: 783153 - DNA, 15 bp, Homo sapiens
tcacttttctgccaa

SEQ ID NO: 783154 - DNA, 15 bp, Homo sapiens
cacttttctgccaag

SEQ ID NO: 783155 - DNA, 15 bp, Homo sapiens
acttttctgccaagg

SEQ ID NO: 783156 - DNA, 15 bp, Homo sapiens
cttttctgccaaggc

SEQ ID NO: 783157 - DNA, 15 bp, Homo sapiens
ttttctgccaaggct

SEQ ID NO: 783158 - DNA, 15 bp, Homo sapiens
tttctgccaaggcta

SEQ ID NO: 783159 - DNA, 15 bp, Homo sapiens
ttctgccaaggctaa

SEQ ID NO: 783160 - DNA, 15 bp, Homo sapiens
tctgccaaggctaaa

SEQ ID NO: 783161 - DNA, 15 bp, Homo sapiens
ctgccaaggctaaat

SEQ ID NO: 783162 - DNA, 15 bp, Homo sapiens
tgccaaggctaaatg

SEQ ID NO: 783163 - DNA, 15 bp, Homo sapiens
gccaaggctaaatgt

SEQ ID NO: 783164 - DNA, 15 bp, Homo sapiens
ccaaggctaaatgtt

SEQ ID NO: 783165 - DNA, 15 bp, Homo sapiens
caaggctaaatgttc

SEQ ID NO: 783166 - DNA, 15 bp, Homo sapiens
aaggctaaatgttcc

SEQ ID NO: 783167 - DNA, 15 bp, Homo sapiens
aggctaaatgttcct

SEQ ID NO: 783168 - DNA, 15 bp, Homo sapiens
ggctaaatgttcctc

SEQ ID NO: 783169 - DNA, 15 bp, Homo sapiens
gctaaatgttcctct

SEQ ID NO: 783170 - DNA, 15 bp, Homo sapiens
ctaaatgttcctcta

SEQ ID NO: 783171 - DNA, 15 bp, Homo sapiens
taaatgttcctctaa

SEQ ID NO: 783172 - DNA, 15 bp, Homo sapiens
aaatgttcctctaag

SEQ ID NO: 783173 - DNA, 15 bp, Homo sapiens
aatgttcctctaaga

SEQ ID NO: 783174 - DNA, 15 bp, Homo sapiens
atgttcctctaagac

SEQ ID NO: 783175 - DNA, 15 bp, Homo sapiens
tgttcctctaagaca

SEQ ID NO: 783176 - DNA, 15 bp, Homo sapiens
gttcctctaagacat

SEQ ID NO: 783177 - DNA, 15 bp, Homo sapiens
ttcctctaagacata

SEQ ID NO: 783178 - DNA, 15 bp, Homo sapiens
tcctctaagacataa

SEQ ID NO: 783179 - DNA, 15 bp, Homo sapiens
cctctaagacataag

SEQ ID NO: 783180 - DNA, 15 bp, Homo sapiens
ctctaagacataagc

SEQ ID NO: 783181 - DNA, 15 bp, Homo sapiens
tctaagacataagct

SEQ ID NO: 783182 - DNA, 15 bp, Homo sapiens
ctaagacataagcta

SEQ ID NO: 783183 - DNA, 15 bp, Homo sapiens
taagacataagctat

SEQ ID NO: 783184 - DNA, 15 bp, Homo sapiens
aagacataagctatt

SEQ ID NO: 783185 - DNA, 15 bp, Homo sapiens
agacataagctatta

SEQ ID NO: 783186 - DNA, 15 bp, Homo sapiens
gacataagctattat

SEQ ID NO: 783187 - DNA, 15 bp, Homo sapiens
acataagctattatc

SEQ ID NO: 783188 - DNA, 15 bp, Homo sapiens
cataagctattatct

SEQ ID NO: 783189 - DNA, 15 bp, Homo sapiens
ataagctattatctt

SEQ ID NO: 783190 - DNA, 15 bp, Homo sapiens
taagctattatcttt

SEQ ID NO: 783191 - DNA, 15 bp, Homo sapiens
aagctattatctttt

SEQ ID NO: 783192 - DNA, 15 bp, Homo sapiens
agctattatcttttt

SEQ ID NO: 783193 - DNA, 15 bp, Homo sapiens
gctattatctttttt

SEQ ID NO: 783194 - DNA, 15 bp, Homo sapiens
ctattatcttttttt

SEQ ID NO: 783195 - DNA, 15 bp, Homo sapiens
atctttttttgtaac

SEQ ID NO: 783196 - DNA, 15 bp, Homo sapiens
tctttttttgtaacc

SEQ ID NO: 783197 - DNA, 15 bp, Homo sapiens
ctttttttgtaaccc

SEQ ID NO: 783198 - DNA, 15 bp, Homo sapiens
tttttttgtaaccca

SEQ ID NO: 783199 - DNA, 15 bp, Homo sapiens
ttttttgtaacccat

SEQ ID NO: 783200 - DNA, 15 bp, Homo sapiens
tttttgtaacccatg

SEQ ID NO: 783201 - DNA, 15 bp, Homo sapiens
ttttgtaacccatgg

SEQ ID NO: 783202 - DNA, 15 bp, Homo sapiens
tttgtaacccatggc

SEQ ID NO: 783203 - DNA, 15 bp, Homo sapiens
ttgtaacccatggcc

SEQ ID NO: 783204 - DNA, 15 bp, Homo sapiens
tgtaacccatggcct

SEQ ID NO: 783205 - DNA, 15 bp, Homo sapiens
gtaacccatggccta

SEQ ID NO: 783206 - DNA, 15 bp, Homo sapiens
taacccatggcctaa

SEQ ID NO: 783207 - DNA, 15 bp, Homo sapiens
aacccatggcctaat

SEQ ID NO: 783208 - DNA, 15 bp, Homo sapiens
acccatggcctaatt

SEQ ID NO: 783209 - DNA, 15 bp, Homo sapiens
cccatggcctaattg

SEQ ID NO: 783210 - DNA, 15 bp, Homo sapiens
ccatggcctaattga

SEQ ID NO: 783211 - DNA, 15 bp, Homo sapiens
catggcctaattgag

SEQ ID NO: 783212 - DNA, 15 bp, Homo sapiens
atggcctaattgaga

SEQ ID NO: 783213 - DNA, 15 bp, Homo sapiens
tggcctaattgagag

SEQ ID NO: 783214 - DNA, 15 bp, Homo sapiens
ggcctaattgagaga

SEQ ID NO: 783215 - DNA, 15 bp, Homo sapiens
gcctaattgagagat

SEQ ID NO: 783216 - DNA, 15 bp, Homo sapiens
cctaattgagagatt

SEQ ID NO: 783217 - DNA, 15 bp, Homo sapiens
ctaattgagagatta

SEQ ID NO: 783218 - DNA, 15 bp, Homo sapiens
taattgagagattaa

SEQ ID NO: 783219 - DNA, 15 bp, Homo sapiens
aattgagagattaat

SEQ ID NO: 783220 - DNA, 15 bp, Homo sapiens
attgagagattaatg

SEQ ID NO: 783221 - DNA, 15 bp, Homo sapiens
ttgagagattaatgc

SEQ ID NO: 783222 - DNA, 15 bp, Homo sapiens
tgagagattaatgca

SEQ ID NO: 783223 - DNA, 15 bp, Homo sapiens
gagagattaatgcat

SEQ ID NO: 783224 - DNA, 15 bp, Homo sapiens
agagattaatgcata

SEQ ID NO: 783225 - DNA, 15 bp, Homo sapiens
gagattaatgcataa

SEQ ID NO: 783226 - DNA, 15 bp, Homo sapiens
agattaatgcataat

SEQ ID NO: 783227 - DNA, 15 bp, Homo sapiens
gattaatgcataatt

SEQ ID NO: 783228 - DNA, 15 bp, Homo sapiens
attaatgcataatta

SEQ ID NO: 783229 - DNA, 15 bp, Homo sapiens
ttaatgcataattac

SEQ ID NO: 783230 - DNA, 15 bp, Homo sapiens
taatgcataattacc

SEQ ID NO: 783231 - DNA, 15 bp, Homo sapiens
aatgcataattaccc

SEQ ID NO: 783232 - DNA, 15 bp, Homo sapiens
atgcataattaccca

SEQ ID NO: 783233 - DNA, 15 bp, Homo sapiens
tgcataattacccac

SEQ ID NO: 783234 - DNA, 15 bp, Homo sapiens
gcataattacccact

SEQ ID NO: 783235 - DNA, 15 bp, Homo sapiens
cataattacccactc

SEQ ID NO: 783236 - DNA, 15 bp, Homo sapiens
ataattacccactca

SEQ ID NO: 783237 - DNA, 15 bp, Homo sapiens
taattacccactcaa

SEQ ID NO: 783238 - DNA, 15 bp, Homo sapiens
aattacccactcaat

SEQ ID NO: 783239 - DNA, 15 bp, Homo sapiens
attacccactcaata

SEQ ID NO: 783240 - DNA, 15 bp, Homo sapiens
ttacccactcaatac

SEQ ID NO: 783241 - DNA, 15 bp, Homo sapiens
tacccactcaataca

SEQ ID NO: 783242 - DNA, 15 bp, Homo sapiens
acccactcaatacat

SEQ ID NO: 783243 - DNA, 15 bp, Homo sapiens
cccactcaatacatg

SEQ ID NO: 783244 - DNA, 15 bp, Homo sapiens
ccactcaatacatgt

SEQ ID NO: 783245 - DNA, 15 bp, Homo sapiens
cactcaatacatgtt

SEQ ID NO: 783246 - DNA, 15 bp, Homo sapiens
actcaatacatgttt

SEQ ID NO: 783247 - DNA, 15 bp, Homo sapiens
ctcaatacatgttta

SEQ ID NO: 783248 - DNA, 15 bp, Homo sapiens
tcaatacatgtttaa

SEQ ID NO: 783249 - DNA, 15 bp, Homo sapiens
caatacatgtttaaa

SEQ ID NO: 783250 - DNA, 15 bp, Homo sapiens
aatacatgtttaaac

SEQ ID NO: 783251 - DNA, 15 bp, Homo sapiens
atacatgtttaaacc

SEQ ID NO: 783252 - DNA, 15 bp, Homo sapiens
tacatgtttaaacca

SEQ ID NO: 783253 - DNA, 15 bp, Homo sapiens
acatgtttaaaccac

SEQ ID NO: 783254 - DNA, 15 bp, Homo sapiens
catgtttaaaccaca

SEQ ID NO: 783255 - DNA, 15 bp, Homo sapiens
atgtttaaaccacac

SEQ ID NO: 783256 - DNA, 15 bp, Homo sapiens
tgtttaaaccacaca

SEQ ID NO: 783257 - DNA, 15 bp, Homo sapiens
gtttaaaccacacag

SEQ ID NO: 783258 - DNA, 15 bp, Homo sapiens
tttaaaccacacagt

SEQ ID NO: 783259 - DNA, 15 bp, Homo sapiens
ttaaaccacacagtc

SEQ ID NO: 783260 - DNA, 15 bp, Homo sapiens
taaaccacacagtct

SEQ ID NO: 783261 - DNA, 15 bp, Homo sapiens
aaaccacacagtctt

SEQ ID NO: 783262 - DNA, 15 bp, Homo sapiens
aaccacacagtctta

SEQ ID NO: 783263 - DNA, 15 bp, Homo sapiens
accacacagtcttat

SEQ ID NO: 783264 - DNA, 15 bp, Homo sapiens
ccacacagtcttatg

SEQ ID NO: 783265 - DNA, 15 bp, Homo sapiens
cacacagtcttatga

SEQ ID NO: 783266 - DNA, 15 bp, Homo sapiens
acacagtcttatgag

SEQ ID NO: 783267 - DNA, 15 bp, Homo sapiens
cacagtcttatgagt

SEQ ID NO: 783268 - DNA, 15 bp, Homo sapiens
acagtcttatgagtg

SEQ ID NO: 783269 - DNA, 15 bp, Homo sapiens
cagtcttatgagtga

SEQ ID NO: 783270 - DNA, 15 bp, Homo sapiens
agtcttatgagtgat

SEQ ID NO: 783271 - DNA, 15 bp, Homo sapiens
gtcttatgagtgatg

SEQ ID NO: 783272 - DNA, 15 bp, Homo sapiens
tcttatgagtgatgg

SEQ ID NO: 783273 - DNA, 15 bp, Homo sapiens
cttatgagtgatggg

SEQ ID NO: 783274 - DNA, 15 bp, Homo sapiens
ttatgagtgatgggg

SEQ ID NO: 783275 - DNA, 15 bp, Homo sapiens
tatgagtgatggggt

SEQ ID NO: 783276 - DNA, 15 bp, Homo sapiens
atgagtgatggggtg

SEQ ID NO: 783277 - DNA, 15 bp, Homo sapiens
tgagtgatggggtgg

SEQ ID NO: 783278 - DNA, 15 bp, Homo sapiens
gagtgatggggtggg

SEQ ID NO: 783279 - DNA, 15 bp, Homo sapiens
agtgatggggtgggc

SEQ ID NO: 783280 - DNA, 15 bp, Homo sapiens
gtgatggggtgggca

SEQ ID NO: 783281 - DNA, 15 bp, Homo sapiens
tgatggggtgggcat

SEQ ID NO: 783282 - DNA, 15 bp, Homo sapiens
gatggggtgggcatt

SEQ ID NO: 783283 - DNA, 15 bp, Homo sapiens
atggggtgggcattg

SEQ ID NO: 783284 - DNA, 15 bp, Homo sapiens
tggggtgggcattgc

SEQ ID NO: 783285 - DNA, 15 bp, Homo sapiens
ggggtgggcattgca

SEQ ID NO: 783286 - DNA, 15 bp, Homo sapiens
gggtgggcattgcag

SEQ ID NO: 783287 - DNA, 15 bp, Homo sapiens
ggtgggcattgcaga

SEQ ID NO: 783288 - DNA, 15 bp, Homo sapiens
gtgggcattgcagaa

SEQ ID NO: 783289 - DNA, 15 bp, Homo sapiens
tgggcattgcagaag

SEQ ID NO: 783290 - DNA, 15 bp, Homo sapiens
gggcattgcagaaga

SEQ ID NO: 783291 - DNA, 15 bp, Homo sapiens
ggcattgcagaagag

SEQ ID NO: 783292 - DNA, 15 bp, Homo sapiens
gcattgcagaagagt

SEQ ID NO: 783293 - DNA, 15 bp, Homo sapiens
cattgcagaagagta

SEQ ID NO: 783294 - DNA, 15 bp, Homo sapiens
attgcagaagagtag

SEQ ID NO: 783295 - DNA, 15 bp, Homo sapiens
ttgcagaagagtaga

SEQ ID NO: 783296 - DNA, 15 bp, Homo sapiens
tgcagaagagtagaa

SEQ ID NO: 783297 - DNA, 15 bp, Homo sapiens
gcagaagagtagaag

SEQ ID NO: 783298 - DNA, 15 bp, Homo sapiens
cagaagagtagaaga

SEQ ID NO: 783299 - DNA, 15 bp, Homo sapiens
agaagagtagaagag

SEQ ID NO: 783300 - DNA, 15 bp, Homo sapiens
gaagagtagaagagt

SEQ ID NO: 783301 - DNA, 15 bp, Homo sapiens
aagagtagaagagta

SEQ ID NO: 783302 - DNA, 15 bp, Homo sapiens
agagtagaagagtat

SEQ ID NO: 783303 - DNA, 15 bp, Homo sapiens
gagtagaagagtatg

SEQ ID NO: 783304 - DNA, 15 bp, Homo sapiens
agtagaagagtatga

SEQ ID NO: 783305 - DNA, 15 bp, Homo sapiens
gtagaagagtatgaa

SEQ ID NO: 783306 - DNA, 15 bp, Homo sapiens
tagaagagtatgaaa

SEQ ID NO: 783307 - DNA, 15 bp, Homo sapiens
agaagagtatgaaaa

SEQ ID NO: 783308 - DNA, 15 bp, Homo sapiens
gaagagtatgaaaag

SEQ ID NO: 783309 - DNA, 15 bp, Homo sapiens
aagagtatgaaaaga

SEQ ID NO: 783310 - DNA, 15 bp, Homo sapiens
agagtatgaaaagac

SEQ ID NO: 783311 - DNA, 15 bp, Homo sapiens
gagtatgaaaagaca

SEQ ID NO: 783312 - DNA, 15 bp, Homo sapiens
agtatgaaaagacat

SEQ ID NO: 783313 - DNA, 15 bp, Homo sapiens
gtatgaaaagacatg

SEQ ID NO: 783314 - DNA, 15 bp, Homo sapiens
tatgaaaagacatga

SEQ ID NO: 783315 - DNA, 15 bp, Homo sapiens
atgaaaagacatgaa

SEQ ID NO: 783316 - DNA, 15 bp, Homo sapiens
tgaaaagacatgaaa

SEQ ID NO: 783317 - DNA, 15 bp, Homo sapiens
gaaaagacatgaaat

SEQ ID NO: 783318 - DNA, 15 bp, Homo sapiens
aaaagacatgaaata

SEQ ID NO: 783319 - DNA, 15 bp, Homo sapiens
aaagacatgaaataa

SEQ ID NO: 783320 - DNA, 15 bp, Homo sapiens
aagacatgaaataaa

SEQ ID NO: 783321 - DNA, 15 bp, Homo sapiens
agacatgaaataaat

SEQ ID NO: 783322 - DNA, 15 bp, Homo sapiens
gacatgaaataaata

SEQ ID NO: 783323 - DNA, 15 bp, Homo sapiens
acatgaaataaataa

SEQ ID NO: 783324 - DNA, 15 bp, Homo sapiens
catgaaataaataag

SEQ ID NO: 783325 - DNA, 15 bp, Homo sapiens
atgaaataaataagt

SEQ ID NO: 783326 - DNA, 15 bp, Homo sapiens
tgaaataaataagta

SEQ ID NO: 783327 - DNA, 15 bp, Homo sapiens
gaaataaataagtat

SEQ ID NO: 783328 - DNA, 15 bp, Homo sapiens
aaataaataagtatg

SEQ ID NO: 783329 - DNA, 15 bp, Homo sapiens
aataaataagtatga

SEQ ID NO: 783330 - DNA, 15 bp, Homo sapiens
ataaataagtatgat

SEQ ID NO: 783331 - DNA, 15 bp, Homo sapiens
taaataagtatgatt

SEQ ID NO: 783332 - DNA, 15 bp, Homo sapiens
aaataagtatgattg

SEQ ID NO: 783333 - DNA, 15 bp, Homo sapiens
aataagtatgattgt

SEQ ID NO: 783334 - DNA, 15 bp, Homo sapiens
ataagtatgattgtg

SEQ ID NO: 783335 - DNA, 15 bp, Homo sapiens
taagtatgattgtga

SEQ ID NO: 783336 - DNA, 15 bp, Homo sapiens
aagtatgattgtgat

SEQ ID NO: 783337 - DNA, 15 bp, Homo sapiens
agtatgattgtgatg

SEQ ID NO: 783338 - DNA, 15 bp, Homo sapiens
gtatgattgtgatgg

SEQ ID NO: 783339 - DNA, 15 bp, Homo sapiens
tatgattgtgatgga

SEQ ID NO: 783340 - DNA, 15 bp, Homo sapiens
atgattgtgatggaa

SEQ ID NO: 783341 - DNA, 15 bp, Homo sapiens
tgattgtgatggaag

SEQ ID NO: 783342 - DNA, 15 bp, Homo sapiens
gattgtgatggaagg

SEQ ID NO: 783343 - DNA, 15 bp, Homo sapiens
attgtgatggaaggt

SEQ ID NO: 783344 - DNA, 15 bp, Homo sapiens
ttgtgatggaaggtt

SEQ ID NO: 783345 - DNA, 15 bp, Homo sapiens
tgtgatggaaggttt

SEQ ID NO: 783346 - DNA, 15 bp, Homo sapiens
gtgatggaaggtttt

SEQ ID NO: 783347 - DNA, 15 bp, Homo sapiens
tgatggaaggtttta

SEQ ID NO: 783348 - DNA, 15 bp, Homo sapiens
gatggaaggttttag

SEQ ID NO: 783349 - DNA, 15 bp, Homo sapiens
atggaaggttttagt

SEQ ID NO: 783350 - DNA, 15 bp, Homo sapiens
tggaaggttttagta

SEQ ID NO: 783351 - DNA, 15 bp, Homo sapiens
ggaaggttttagtag

SEQ ID NO: 783352 - DNA, 15 bp, Homo sapiens
gaaggttttagtagg

SEQ ID NO: 783353 - DNA, 15 bp, Homo sapiens
aaggttttagtaggg

SEQ ID NO: 783354 - DNA, 15 bp, Homo sapiens
aggttttagtaggga

SEQ ID NO: 783355 - DNA, 15 bp, Homo sapiens
ggttttagtagggaa

SEQ ID NO: 783356 - DNA, 15 bp, Homo sapiens
gttttagtagggaat

SEQ ID NO: 783357 - DNA, 15 bp, Homo sapiens
ttttagtagggaata

SEQ ID NO: 783358 - DNA, 15 bp, Homo sapiens
tttagtagggaatag

SEQ ID NO: 783359 - DNA, 15 bp, Homo sapiens
ttagtagggaatagt

SEQ ID NO: 783360 - DNA, 15 bp, Homo sapiens
tagtagggaatagtg

SEQ ID NO: 783361 - DNA, 15 bp, Homo sapiens
agtagggaatagtga

SEQ ID NO: 783362 - DNA, 15 bp, Homo sapiens
gtagggaatagtgag

SEQ ID NO: 783363 - DNA, 15 bp, Homo sapiens
tagggaatagtgaga

SEQ ID NO: 783364 - DNA, 15 bp, Homo sapiens
agggaatagtgagag

SEQ ID NO: 783365 - DNA, 15 bp, Homo sapiens
gggaatagtgagagg

SEQ ID NO: 783366 - DNA, 15 bp, Homo sapiens
ggaatagtgagaggg

SEQ ID NO: 783367 - DNA, 15 bp, Homo sapiens
gaatagtgagaggga

SEQ ID NO: 783368 - DNA, 15 bp, Homo sapiens
aatagtgagagggag

SEQ ID NO: 783369 - DNA, 15 bp, Homo sapiens
atagtgagagggagg

SEQ ID NO: 783370 - DNA, 15 bp, Homo sapiens
tagtgagagggaggg

SEQ ID NO: 783371 - DNA, 15 bp, Homo sapiens
agtgagagggagggc

SEQ ID NO: 783372 - DNA, 15 bp, Homo sapiens
gtgagagggagggct

SEQ ID NO: 783373 - DNA, 15 bp, Homo sapiens
tgagagggagggctg

SEQ ID NO: 783374 - DNA, 15 bp, Homo sapiens
gagagggagggctga

SEQ ID NO: 783375 - DNA, 15 bp, Homo sapiens
agagggagggctgaa

SEQ ID NO: 783376 - DNA, 15 bp, Homo sapiens
gagggagggctgaaa

SEQ ID NO: 783377 - DNA, 15 bp, Homo sapiens
agggagggctgaaaa

SEQ ID NO: 783378 - DNA, 15 bp, Homo sapiens
gggagggctgaaaaa

SEQ ID NO: 783379 - DNA, 15 bp, Homo sapiens
ggagggctgaaaaaa

SEQ ID NO: 783380 - DNA, 15 bp, Homo sapiens
gagggctgaaaaaaa

SEQ ID NO: 783381 - DNA, 15 bp, Homo sapiens
agggctgaaaaaaaa

SEQ ID NO: 783382 - DNA, 15 bp, Homo sapiens
gggctgaaaaaaaag

SEQ ID NO: 783383 - DNA, 15 bp, Homo sapiens
ggctgaaaaaaaagg

SEQ ID NO: 783384 - DNA, 15 bp, Homo sapiens
gctgaaaaaaaagga

SEQ ID NO: 783385 - DNA, 15 bp, Homo sapiens
ctgaaaaaaaaggat

SEQ ID NO: 783386 - DNA, 15 bp, Homo sapiens
tgaaaaaaaaggatt

SEQ ID NO: 783387 - DNA, 15 bp, Homo sapiens
gaaaaaaaaggatta

SEQ ID NO: 783388 - DNA, 15 bp, Homo sapiens
aaaaaaaaggattag

SEQ ID NO: 783389 - DNA, 15 bp, Homo sapiens
aaaaaaaggattaga

SEQ ID NO: 783390 - DNA, 15 bp, Homo sapiens
aaaaaaggattagag

SEQ ID NO: 783391 - DNA, 15 bp, Homo sapiens
aaaaaggattagagc

SEQ ID NO: 783392 - DNA, 15 bp, Homo sapiens
aaaaggattagagct

SEQ ID NO: 783393 - DNA, 15 bp, Homo sapiens
aaaggattagagctt

SEQ ID NO: 783394 - DNA, 15 bp, Homo sapiens
aaggattagagcttg

SEQ ID NO: 783395 - DNA, 15 bp, Homo sapiens
aggattagagcttgc

SEQ ID NO: 783396 - DNA, 15 bp, Homo sapiens
ggattagagcttgct

SEQ ID NO: 783397 - DNA, 15 bp, Homo sapiens
gattagagcttgctt

SEQ ID NO: 783398 - DNA, 15 bp, Homo sapiens
attagagcttgcttt

SEQ ID NO: 783399 - DNA, 15 bp, Homo sapiens
ttagagcttgctttt

SEQ ID NO: 783400 - DNA, 15 bp, Homo sapiens
tagagcttgctttta

SEQ ID NO: 783401 - DNA, 15 bp, Homo sapiens
agagcttgcttttag

SEQ ID NO: 783402 - DNA, 15 bp, Homo sapiens
gagcttgcttttaga

SEQ ID NO: 783403 - DNA, 15 bp, Homo sapiens
agcttgcttttagaa

SEQ ID NO: 783404 - DNA, 15 bp, Homo sapiens
gcttgcttttagaag

SEQ ID NO: 783405 - DNA, 15 bp, Homo sapiens
cttgcttttagaagt

SEQ ID NO: 783406 - DNA, 15 bp, Homo sapiens
ttgcttttagaagta

SEQ ID NO: 783407 - DNA, 15 bp, Homo sapiens
tgcttttagaagtac

SEQ ID NO: 783408 - DNA, 15 bp, Homo sapiens
gcttttagaagtact

SEQ ID NO: 783409 - DNA, 15 bp, Homo sapiens
cttttagaagtactt

SEQ ID NO: 783410 - DNA, 15 bp, Homo sapiens
ttttagaagtactta

SEQ ID NO: 783411 - DNA, 15 bp, Homo sapiens
tttagaagtacttag

SEQ ID NO: 783412 - DNA, 15 bp, Homo sapiens
ttagaagtacttagc

SEQ ID NO: 783413 - DNA, 15 bp, Homo sapiens
tagaagtacttagct

SEQ ID NO: 783414 - DNA, 15 bp, Homo sapiens
agaagtacttagctg

SEQ ID NO: 783415 - DNA, 15 bp, Homo sapiens
gaagtacttagctgt

SEQ ID NO: 783416 - DNA, 15 bp, Homo sapiens
aagtacttagctgta

SEQ ID NO: 783417 - DNA, 15 bp, Homo sapiens
agtacttagctgtag

SEQ ID NO: 783418 - DNA, 15 bp, Homo sapiens
gtacttagctgtaga

SEQ ID NO: 783419 - DNA, 15 bp, Homo sapiens
tacttagctgtagat

SEQ ID NO: 783420 - DNA, 15 bp, Homo sapiens
acttagctgtagata

SEQ ID NO: 783421 - DNA, 15 bp, Homo sapiens
cttagctgtagatag

SEQ ID NO: 783422 - DNA, 15 bp, Homo sapiens
ttagctgtagatagt

SEQ ID NO: 783423 - DNA, 15 bp, Homo sapiens
tagctgtagatagta

SEQ ID NO: 783424 - DNA, 15 bp, Homo sapiens
agctgtagatagtaa

SEQ ID NO: 783425 - DNA, 15 bp, Homo sapiens
gctgtagatagtaaa

SEQ ID NO: 783426 - DNA, 15 bp, Homo sapiens
ctgtagatagtaaac

SEQ ID NO: 783427 - DNA, 15 bp, Homo sapiens
tgtagatagtaaaca

SEQ ID NO: 783428 - DNA, 15 bp, Homo sapiens
gtagatagtaaacat

SEQ ID NO: 783429 - DNA, 15 bp, Homo sapiens
tagatagtaaacatt

SEQ ID NO: 783430 - DNA, 15 bp, Homo sapiens
agatagtaaacatta

SEQ ID NO: 783431 - DNA, 15 bp, Homo sapiens
gatagtaaacattat

SEQ ID NO: 783432 - DNA, 15 bp, Homo sapiens
atagtaaacattatt

SEQ ID NO: 783433 - DNA, 15 bp, Homo sapiens
tagtaaacattattc

SEQ ID NO: 783434 - DNA, 15 bp, Homo sapiens
agtaaacattattct

SEQ ID NO: 783435 - DNA, 15 bp, Homo sapiens
gtaaacattattctt

SEQ ID NO: 783436 - DNA, 15 bp, Homo sapiens
taaacattattcttt

SEQ ID NO: 783437 - DNA, 15 bp, Homo sapiens
aaacattattcttta

SEQ ID NO: 783438 - DNA, 15 bp, Homo sapiens
aacattattctttag

SEQ ID NO: 783439 - DNA, 15 bp, Homo sapiens
acattattctttagg

SEQ ID NO: 783440 - DNA, 15 bp, Homo sapiens
cattattctttaggt

SEQ ID NO: 783441 - DNA, 15 bp, Homo sapiens
attattctttaggtt

SEQ ID NO: 783442 - DNA, 15 bp, Homo sapiens
ttattctttaggttc

SEQ ID NO: 783443 - DNA, 15 bp, Homo sapiens
tattctttaggttct

SEQ ID NO: 783444 - DNA, 15 bp, Homo sapiens
attctttaggttctt

SEQ ID NO: 783445 - DNA, 15 bp, Homo sapiens
ttctttaggttcttt

SEQ ID NO: 783446 - DNA, 15 bp, Homo sapiens
tctttaggttctttg

SEQ ID NO: 783447 - DNA, 15 bp, Homo sapiens
ctttaggttctttgt

SEQ ID NO: 783448 - DNA, 15 bp, Homo sapiens
tttaggttctttgtc

SEQ ID NO: 783449 - DNA, 15 bp, Homo sapiens
ttaggttctttgtct

SEQ ID NO: 783450 - DNA, 15 bp, Homo sapiens
taggttctttgtctc

SEQ ID NO: 783451 - DNA, 15 bp, Homo sapiens
aggttctttgtctct

SEQ ID NO: 783452 - DNA, 15 bp, Homo sapiens
ggttctttgtctctc

SEQ ID NO: 783453 - DNA, 15 bp, Homo sapiens
gttctttgtctctca

SEQ ID NO: 783454 - DNA, 15 bp, Homo sapiens
ttctttgtctctcac

SEQ ID NO: 783455 - DNA, 15 bp, Homo sapiens
tctttgtctctcaca

SEQ ID NO: 783456 - DNA, 15 bp, Homo sapiens
ctttgtctctcacaa

SEQ ID NO: 783457 - DNA, 15 bp, Homo sapiens
tttgtctctcacaaa

SEQ ID NO: 783458 - DNA, 15 bp, Homo sapiens
ttgtctctcacaaag

SEQ ID NO: 783459 - DNA, 15 bp, Homo sapiens
tgtctctcacaaaga

SEQ ID NO: 783460 - DNA, 15 bp, Homo sapiens
gtctctcacaaagaa

SEQ ID NO: 783461 - DNA, 15 bp, Homo sapiens
tctctcacaaagaag

SEQ ID NO: 783462 - DNA, 15 bp, Homo sapiens
ctctcacaaagaagc

SEQ ID NO: 783463 - DNA, 15 bp, Homo sapiens
tctcacaaagaagct

SEQ ID NO: 783464 - DNA, 15 bp, Homo sapiens
ctcacaaagaagctt

SEQ ID NO: 783465 - DNA, 15 bp, Homo sapiens
tcacaaagaagcttg

SEQ ID NO: 783466 - DNA, 15 bp, Homo sapiens
cacaaagaagcttgt

SEQ ID NO: 783467 - DNA, 15 bp, Homo sapiens
acaaagaagcttgta

SEQ ID NO: 783468 - DNA, 15 bp, Homo sapiens
caaagaagcttgtaa

SEQ ID NO: 783469 - DNA, 15 bp, Homo sapiens
aaagaagcttgtaat

SEQ ID NO: 783470 - DNA, 15 bp, Homo sapiens
aagaagcttgtaatg

SEQ ID NO: 783471 - DNA, 15 bp, Homo sapiens
agaagcttgtaatga

SEQ ID NO: 783472 - DNA, 15 bp, Homo sapiens
gaagcttgtaatgat

SEQ ID NO: 783473 - DNA, 15 bp, Homo sapiens
aagcttgtaatgatc

SEQ ID NO: 783474 - DNA, 15 bp, Homo sapiens
agcttgtaatgatct

SEQ ID NO: 783475 - DNA, 15 bp, Homo sapiens
gcttgtaatgatctc

SEQ ID NO: 783476 - DNA, 15 bp, Homo sapiens
cttgtaatgatctca

SEQ ID NO: 783477 - DNA, 15 bp, Homo sapiens
ttgtaatgatctcat

SEQ ID NO: 783478 - DNA, 15 bp, Homo sapiens
tgtaatgatctcatt

SEQ ID NO: 783479 - DNA, 15 bp, Homo sapiens
gtaatgatctcatta

SEQ ID NO: 783480 - DNA, 15 bp, Homo sapiens
taatgatctcattat

SEQ ID NO: 783481 - DNA, 15 bp, Homo sapiens
aatgatctcattatg

SEQ ID NO: 783482 - DNA, 15 bp, Homo sapiens
atgatctcattatga

SEQ ID NO: 783483 - DNA, 15 bp, Homo sapiens
tgatctcattatgac

SEQ ID NO: 783484 - DNA, 15 bp, Homo sapiens
gatctcattatgaca

SEQ ID NO: 783485 - DNA, 15 bp, Homo sapiens
atctcattatgacaa

SEQ ID NO: 783486 - DNA, 15 bp, Homo sapiens
tctcattatgacaaa

SEQ ID NO: 783487 - DNA, 15 bp, Homo sapiens
ctcattatgacaaag

SEQ ID NO: 783488 - DNA, 15 bp, Homo sapiens
tcattatgacaaagt

SEQ ID NO: 783489 - DNA, 15 bp, Homo sapiens
cattatgacaaagta

SEQ ID NO: 783490 - DNA, 15 bp, Homo sapiens
attatgacaaagtag

SEQ ID NO: 783491 - DNA, 15 bp, Homo sapiens
ttatgacaaagtagg

SEQ ID NO: 783492 - DNA, 15 bp, Homo sapiens
tatgacaaagtaggg

SEQ ID NO: 783493 - DNA, 15 bp, Homo sapiens
atgacaaagtaggga

SEQ ID NO: 783494 - DNA, 15 bp, Homo sapiens
tgacaaagtagggaa

SEQ ID NO: 783495 - DNA, 15 bp, Homo sapiens
gacaaagtagggaat

SEQ ID NO: 783496 - DNA, 15 bp, Homo sapiens
acaaagtagggaatc

SEQ ID NO: 783497 - DNA, 15 bp, Homo sapiens
caaagtagggaatct

SEQ ID NO: 783498 - DNA, 15 bp, Homo sapiens
aaagtagggaatctc

SEQ ID NO: 783499 - DNA, 15 bp, Homo sapiens
aagtagggaatctct

SEQ ID NO: 783500 - DNA, 15 bp, Homo sapiens
agtagggaatctctt

SEQ ID NO: 783501 - DNA, 15 bp, Homo sapiens
gtagggaatctcttc

SEQ ID NO: 783502 - DNA, 15 bp, Homo sapiens
tagggaatctcttcc

SEQ ID NO: 783503 - DNA, 15 bp, Homo sapiens
agggaatctcttccg

SEQ ID NO: 783504 - DNA, 15 bp, Homo sapiens
gggaatctcttccgc

SEQ ID NO: 783505 - DNA, 15 bp, Homo sapiens
ggaatctcttccgca

SEQ ID NO: 783506 - DNA, 15 bp, Homo sapiens
gaatctcttccgcag

SEQ ID NO: 783507 - DNA, 15 bp, Homo sapiens
aatctcttccgcaga

SEQ ID NO: 783508 - DNA, 15 bp, Homo sapiens
atctcttccgcagac

SEQ ID NO: 783509 - DNA, 15 bp, Homo sapiens
tctcttccgcagact

SEQ ID NO: 783510 - DNA, 15 bp, Homo sapiens
ctcttccgcagactt

SEQ ID NO: 783511 - DNA, 15 bp, Homo sapiens
tcttccgcagacttt

SEQ ID NO: 783512 - DNA, 15 bp, Homo sapiens
cttccgcagactttg

SEQ ID NO: 783513 - DNA, 15 bp, Homo sapiens
ttccgcagactttgg

SEQ ID NO: 783514 - DNA, 15 bp, Homo sapiens
tccgcagactttggg

SEQ ID NO: 783515 - DNA, 15 bp, Homo sapiens
ccgcagactttggga

SEQ ID NO: 783516 - DNA, 15 bp, Homo sapiens
cgcagactttgggaa

SEQ ID NO: 783517 - DNA, 15 bp, Homo sapiens
gcagactttgggaac

SEQ ID NO: 783518 - DNA, 15 bp, Homo sapiens
cagactttgggaact

SEQ ID NO: 783519 - DNA, 15 bp, Homo sapiens
agactttgggaacta

SEQ ID NO: 783520 - DNA, 15 bp, Homo sapiens
gactttgggaactaa

SEQ ID NO: 783521 - DNA, 15 bp, Homo sapiens
actttgggaactaag

SEQ ID NO: 783522 - DNA, 15 bp, Homo sapiens
ctttgggaactaagc

SEQ ID NO: 783523 - DNA, 15 bp, Homo sapiens
tttgggaactaagca

SEQ ID NO: 783524 - DNA, 15 bp, Homo sapiens
ttgggaactaagcaa

SEQ ID NO: 783525 - DNA, 15 bp, Homo sapiens
tgggaactaagcaag

SEQ ID NO: 783526 - DNA, 15 bp, Homo sapiens
gggaactaagcaagt

SEQ ID NO: 783527 - DNA, 15 bp, Homo sapiens
ggaactaagcaagtg

SEQ ID NO: 783528 - DNA, 15 bp, Homo sapiens
gaactaagcaagtgc

SEQ ID NO: 783529 - DNA, 15 bp, Homo sapiens
aactaagcaagtgct

SEQ ID NO: 783530 - DNA, 15 bp, Homo sapiens
actaagcaagtgcta

SEQ ID NO: 783531 - DNA, 15 bp, Homo sapiens
ctaagcaagtgctat

SEQ ID NO: 783532 - DNA, 15 bp, Homo sapiens
taagcaagtgctatt

SEQ ID NO: 783533 - DNA, 15 bp, Homo sapiens
aagcaagtgctattc

SEQ ID NO: 783534 - DNA, 15 bp, Homo sapiens
agcaagtgctattca

SEQ ID NO: 783535 - DNA, 15 bp, Homo sapiens
gcaagtgctattcaa

SEQ ID NO: 783536 - DNA, 15 bp, Homo sapiens
caagtgctattcaat

SEQ ID NO: 783537 - DNA, 15 bp, Homo sapiens
aagtgctattcaata

SEQ ID NO: 783538 - DNA, 15 bp, Homo sapiens
agtgctattcaatat

SEQ ID NO: 783539 - DNA, 15 bp, Homo sapiens
gtgctattcaatatt

SEQ ID NO: 783540 - DNA, 15 bp, Homo sapiens
tgctattcaatattt

SEQ ID NO: 783541 - DNA, 15 bp, Homo sapiens
gctattcaatatttg

SEQ ID NO: 783542 - DNA, 15 bp, Homo sapiens
ctattcaatatttgc

SEQ ID NO: 783543 - DNA, 15 bp, Homo sapiens
tattcaatatttgct

SEQ ID NO: 783544 - DNA, 15 bp, Homo sapiens
attcaatatttgctg

SEQ ID NO: 783545 - DNA, 15 bp, Homo sapiens
ttcaatatttgctgc

SEQ ID NO: 783546 - DNA, 15 bp, Homo sapiens
tcaatatttgctgct

SEQ ID NO: 783547 - DNA, 15 bp, Homo sapiens
caatatttgctgctg

SEQ ID NO: 783548 - DNA, 15 bp, Homo sapiens
aatatttgctgctgc

SEQ ID NO: 783549 - DNA, 15 bp, Homo sapiens
atatttgctgctgcc

SEQ ID NO: 783550 - DNA, 15 bp, Homo sapiens
tatttgctgctgccc

SEQ ID NO: 783551 - DNA, 15 bp, Homo sapiens
atttgctgctgccct

SEQ ID NO: 783552 - DNA, 15 bp, Homo sapiens
tttgctgctgccctt

SEQ ID NO: 783553 - DNA, 15 bp, Homo sapiens
ttgctgctgcccttt

SEQ ID NO: 783554 - DNA, 15 bp, Homo sapiens
tgctgctgccctttt

SEQ ID NO: 783555 - DNA, 15 bp, Homo sapiens
gctgctgcccttttt

SEQ ID NO: 783556 - DNA, 15 bp, Homo sapiens
ctgctgccctttttc

SEQ ID NO: 783557 - DNA, 15 bp, Homo sapiens
tgctgccctttttct

SEQ ID NO: 783558 - DNA, 15 bp, Homo sapiens
gctgccctttttctt

SEQ ID NO: 783559 - DNA, 15 bp, Homo sapiens
ctgccctttttcttg

SEQ ID NO: 783560 - DNA, 15 bp, Homo sapiens
tgccctttttcttga

SEQ ID NO: 783561 - DNA, 15 bp, Homo sapiens
gccctttttcttgaa

SEQ ID NO: 783562 - DNA, 15 bp, Homo sapiens
ccctttttcttgaat

SEQ ID NO: 783563 - DNA, 15 bp, Homo sapiens
cctttttcttgaatt

SEQ ID NO: 783564 - DNA, 15 bp, Homo sapiens
ctttttcttgaattt

SEQ ID NO: 783565 - DNA, 15 bp, Homo sapiens
tttttcttgaatttc

SEQ ID NO: 783566 - DNA, 15 bp, Homo sapiens
ttttcttgaatttca

SEQ ID NO: 783567 - DNA, 15 bp, Homo sapiens
tttcttgaatttcat

SEQ ID NO: 783568 - DNA, 15 bp, Homo sapiens
ttcttgaatttcatt

SEQ ID NO: 783569 - DNA, 15 bp, Homo sapiens
tcttgaatttcattc

SEQ ID NO: 783570 - DNA, 15 bp, Homo sapiens
cttgaatttcattct

SEQ ID NO: 783571 - DNA, 15 bp, Homo sapiens
ttgaatttcattctt

SEQ ID NO: 783572 - DNA, 15 bp, Homo sapiens
tgaatttcattcttg

SEQ ID NO: 783573 - DNA, 15 bp, Homo sapiens
gaatttcattcttgc

SEQ ID NO: 783574 - DNA, 15 bp, Homo sapiens
aatttcattcttgca

SEQ ID NO: 783575 - DNA, 15 bp, Homo sapiens
atttcattcttgcat

SEQ ID NO: 783576 - DNA, 15 bp, Homo sapiens
tttcattcttgcatg

SEQ ID NO: 783577 - DNA, 15 bp, Homo sapiens
ttcattcttgcatgt

SEQ ID NO: 783578 - DNA, 15 bp, Homo sapiens
tcattcttgcatgtg

SEQ ID NO: 783579 - DNA, 15 bp, Homo sapiens
cattcttgcatgtgt

SEQ ID NO: 783580 - DNA, 15 bp, Homo sapiens
attcttgcatgtgtg

SEQ ID NO: 783581 - DNA, 15 bp, Homo sapiens
ttcttgcatgtgtgc

SEQ ID NO: 783582 - DNA, 15 bp, Homo sapiens
tcttgcatgtgtgct

SEQ ID NO: 783583 - DNA, 15 bp, Homo sapiens
cttgcatgtgtgcta

SEQ ID NO: 783584 - DNA, 15 bp, Homo sapiens
ttgcatgtgtgctaa

SEQ ID NO: 783585 - DNA, 15 bp, Homo sapiens
tgcatgtgtgctaag

SEQ ID NO: 783586 - DNA, 15 bp, Homo sapiens
gcatgtgtgctaagg

SEQ ID NO: 783587 - DNA, 15 bp, Homo sapiens
catgtgtgctaagga

SEQ ID NO: 783588 - DNA, 15 bp, Homo sapiens
atgtgtgctaaggat

SEQ ID NO: 783589 - DNA, 15 bp, Homo sapiens
tgtgtgctaaggatg

SEQ ID NO: 783590 - DNA, 15 bp, Homo sapiens
gtgtgctaaggatgg

SEQ ID NO: 783591 - DNA, 15 bp, Homo sapiens
tgtgctaaggatgga

SEQ ID NO: 783592 - DNA, 15 bp, Homo sapiens
gtgctaaggatggaa

SEQ ID NO: 783593 - DNA, 15 bp, Homo sapiens
tgctaaggatggaac

SEQ ID NO: 783594 - DNA, 15 bp, Homo sapiens
gctaaggatggaaca

SEQ ID NO: 783595 - DNA, 15 bp, Homo sapiens
ctaaggatggaacat

SEQ ID NO: 783596 - DNA, 15 bp, Homo sapiens
taaggatggaacatt

SEQ ID NO: 783597 - DNA, 15 bp, Homo sapiens
aaggatggaacattt

SEQ ID NO: 783598 - DNA, 15 bp, Homo sapiens
aggatggaacatttc

SEQ ID NO: 783599 - DNA, 15 bp, Homo sapiens
ggatggaacatttct

SEQ ID NO: 783600 - DNA, 15 bp, Homo sapiens
gatggaacatttctg

SEQ ID NO: 783601 - DNA, 15 bp, Homo sapiens
atggaacatttctgt

SEQ ID NO: 783602 - DNA, 15 bp, Homo sapiens
tggaacatttctgtc

SEQ ID NO: 783603 - DNA, 15 bp, Homo sapiens
ggaacatttctgtca

SEQ ID NO: 783604 - DNA, 15 bp, Homo sapiens
gaacatttctgtcag

SEQ ID NO: 783605 - DNA, 15 bp, Homo sapiens
aacatttctgtcagc

SEQ ID NO: 783606 - DNA, 15 bp, Homo sapiens
acatttctgtcagca

SEQ ID NO: 783607 - DNA, 15 bp, Homo sapiens
catttctgtcagcac

SEQ ID NO: 783608 - DNA, 15 bp, Homo sapiens
atttctgtcagcact

SEQ ID NO: 783609 - DNA, 15 bp, Homo sapiens
tttctgtcagcactt

SEQ ID NO: 783610 - DNA, 15 bp, Homo sapiens
ttctgtcagcacttg

SEQ ID NO: 783611 - DNA, 15 bp, Homo sapiens
tctgtcagcacttgt

SEQ ID NO: 783612 - DNA, 15 bp, Homo sapiens
ctgtcagcacttgtg

SEQ ID NO: 783613 - DNA, 15 bp, Homo sapiens
tgtcagcacttgtga

SEQ ID NO: 783614 - DNA, 15 bp, Homo sapiens
gtcagcacttgtgag

SEQ ID NO: 783615 - DNA, 15 bp, Homo sapiens
tcagcacttgtgagt

SEQ ID NO: 783616 - DNA, 15 bp, Homo sapiens
cagcacttgtgagta

SEQ ID NO: 783617 - DNA, 15 bp, Homo sapiens
agcacttgtgagtag

SEQ ID NO: 783618 - DNA, 15 bp, Homo sapiens
gcacttgtgagtaga

SEQ ID NO: 783619 - DNA, 15 bp, Homo sapiens
cacttgtgagtagag

SEQ ID NO: 783620 - DNA, 15 bp, Homo sapiens
acttgtgagtagaga

SEQ ID NO: 783621 - DNA, 15 bp, Homo sapiens
cttgtgagtagagac

SEQ ID NO: 783622 - DNA, 15 bp, Homo sapiens
ttgtgagtagagact

SEQ ID NO: 783623 - DNA, 15 bp, Homo sapiens
tgtgagtagagactg

SEQ ID NO: 783624 - DNA, 15 bp, Homo sapiens
gtgagtagagactgc

SEQ ID NO: 783625 - DNA, 15 bp, Homo sapiens
tgagtagagactgca

SEQ ID NO: 783626 - DNA, 15 bp, Homo sapiens
gagtagagactgcac

SEQ ID NO: 783627 - DNA, 15 bp, Homo sapiens
agtagagactgcact

SEQ ID NO: 783628 - DNA, 15 bp, Homo sapiens
gtagagactgcactg

SEQ ID NO: 783629 - DNA, 15 bp, Homo sapiens
tagagactgcactgt

SEQ ID NO: 783630 - DNA, 15 bp, Homo sapiens
agagactgcactgtg

SEQ ID NO: 783631 - DNA, 15 bp, Homo sapiens
gagactgcactgtga

SEQ ID NO: 783632 - DNA, 15 bp, Homo sapiens
agactgcactgtgaa

SEQ ID NO: 783633 - DNA, 15 bp, Homo sapiens
gactgcactgtgaat

SEQ ID NO: 783634 - DNA, 15 bp, Homo sapiens
actgcactgtgaatt

SEQ ID NO: 783635 - DNA, 15 bp, Homo sapiens
ctgcactgtgaattg

SEQ ID NO: 783636 - DNA, 15 bp, Homo sapiens
tgcactgtgaattgc

SEQ ID NO: 783637 - DNA, 15 bp, Homo sapiens
gcactgtgaattgct

SEQ ID NO: 783638 - DNA, 15 bp, Homo sapiens
cactgtgaattgctg

SEQ ID NO: 783639 - DNA, 15 bp, Homo sapiens
actgtgaattgctgc

SEQ ID NO: 783640 - DNA, 15 bp, Homo sapiens
ctgtgaattgctgca

SEQ ID NO: 783641 - DNA, 15 bp, Homo sapiens
tgtgaattgctgcat

SEQ ID NO: 783642 - DNA, 15 bp, Homo sapiens
gtgaattgctgcata

SEQ ID NO: 783643 - DNA, 15 bp, Homo sapiens
tgaattgctgcatat

SEQ ID NO: 783644 - DNA, 15 bp, Homo sapiens
gaattgctgcatatg

SEQ ID NO: 783645 - DNA, 15 bp, Homo sapiens
aattgctgcatatgg

SEQ ID NO: 783646 - DNA, 15 bp, Homo sapiens
attgctgcatatgga

SEQ ID NO: 783647 - DNA, 15 bp, Homo sapiens
ttgctgcatatggaa

SEQ ID NO: 783648 - DNA, 15 bp, Homo sapiens
tgctgcatatggaac

SEQ ID NO: 783649 - DNA, 15 bp, Homo sapiens
gctgcatatggaact

SEQ ID NO: 783650 - DNA, 15 bp, Homo sapiens
ctgcatatggaacta

SEQ ID NO: 783651 - DNA, 15 bp, Homo sapiens
tgcatatggaactat

SEQ ID NO: 783652 - DNA, 15 bp, Homo sapiens
gcatatggaactata

SEQ ID NO: 783653 - DNA, 15 bp, Homo sapiens
catatggaactatag

SEQ ID NO: 783654 - DNA, 15 bp, Homo sapiens
atatggaactataga

SEQ ID NO: 783655 - DNA, 15 bp, Homo sapiens
tatggaactatagag

SEQ ID NO: 783656 - DNA, 15 bp, Homo sapiens
atggaactatagaga

SEQ ID NO: 783657 - DNA, 15 bp, Homo sapiens
tggaactatagagag

SEQ ID NO: 783658 - DNA, 15 bp, Homo sapiens
ggaactatagagagc

SEQ ID NO: 783659 - DNA, 15 bp, Homo sapiens
gaactatagagagca

SEQ ID NO: 783660 - DNA, 15 bp, Homo sapiens
aactatagagagcat

SEQ ID NO: 783661 - DNA, 15 bp, Homo sapiens
actatagagagcatg

SEQ ID NO: 783662 - DNA, 15 bp, Homo sapiens
ctatagagagcatgt

SEQ ID NO: 783663 - DNA, 15 bp, Homo sapiens
tatagagagcatgtt

SEQ ID NO: 783664 - DNA, 15 bp, Homo sapiens
atagagagcatgttt

SEQ ID NO: 783665 - DNA, 15 bp, Homo sapiens
tagagagcatgtttg

SEQ ID NO: 783666 - DNA, 15 bp, Homo sapiens
agagagcatgtttgt

SEQ ID NO: 783667 - DNA, 15 bp, Homo sapiens
gagagcatgtttgtt

SEQ ID NO: 783668 - DNA, 15 bp, Homo sapiens
agagcatgtttgttg

SEQ ID NO: 783669 - DNA, 15 bp, Homo sapiens
gagcatgtttgttgt

SEQ ID NO: 783670 - DNA, 15 bp, Homo sapiens
agcatgtttgttgta

SEQ ID NO: 783671 - DNA, 15 bp, Homo sapiens
gcatgtttgttgtat

SEQ ID NO: 783672 - DNA, 15 bp, Homo sapiens
catgtttgttgtatc

SEQ ID NO: 783673 - DNA, 15 bp, Homo sapiens
atgtttgttgtatca

SEQ ID NO: 783674 - DNA, 15 bp, Homo sapiens
tgtttgttgtatcaa

SEQ ID NO: 783675 - DNA, 15 bp, Homo sapiens
gtttgttgtatcaag

SEQ ID NO: 783676 - DNA, 15 bp, Homo sapiens
tttgttgtatcaagg

SEQ ID NO: 783677 - DNA, 15 bp, Homo sapiens
ttgttgtatcaaggg

SEQ ID NO: 783678 - DNA, 15 bp, Homo sapiens
tgttgtatcaagggt

SEQ ID NO: 783679 - DNA, 15 bp, Homo sapiens
gttgtatcaagggta

SEQ ID NO: 783680 - DNA, 15 bp, Homo sapiens
ttgtatcaagggtat

SEQ ID NO: 783681 - DNA, 15 bp, Homo sapiens
tgtatcaagggtata

SEQ ID NO: 783682 - DNA, 15 bp, Homo sapiens
gtatcaagggtatat

SEQ ID NO: 783683 - DNA, 15 bp, Homo sapiens
tatcaagggtatatt

SEQ ID NO: 783684 - DNA, 15 bp, Homo sapiens
atcaagggtatattt

SEQ ID NO: 783685 - DNA, 15 bp, Homo sapiens
tcaagggtatatttt

SEQ ID NO: 783686 - DNA, 15 bp, Homo sapiens
caagggtatattttt

SEQ ID NO: 783687 - DNA, 15 bp, Homo sapiens
aagggtatattttta

SEQ ID NO: 783688 - DNA, 15 bp, Homo sapiens
agggtatatttttaa

SEQ ID NO: 783689 - DNA, 15 bp, Homo sapiens
gggtatatttttaac

SEQ ID NO: 783690 - DNA, 15 bp, Homo sapiens
ggtatatttttaact

SEQ ID NO: 783691 - DNA, 15 bp, Homo sapiens
gtatatttttaacta

SEQ ID NO: 783692 - DNA, 15 bp, Homo sapiens
tatatttttaactat

SEQ ID NO: 783693 - DNA, 15 bp, Homo sapiens
atatttttaactata

SEQ ID NO: 783694 - DNA, 15 bp, Homo sapiens
tatttttaactatat

SEQ ID NO: 783695 - DNA, 15 bp, Homo sapiens
atttttaactatatt

SEQ ID NO: 783696 - DNA, 15 bp, Homo sapiens
tttttaactatatta

SEQ ID NO: 783697 - DNA, 15 bp, Homo sapiens
ttttaactatattat

SEQ ID NO: 783698 - DNA, 15 bp, Homo sapiens
tttaactatattatt

SEQ ID NO: 783699 - DNA, 15 bp, Homo sapiens
ttaactatattatta

SEQ ID NO: 783700 - DNA, 15 bp, Homo sapiens
taactatattattat

SEQ ID NO: 783701 - DNA, 15 bp, Homo sapiens
aactatattattatt

SEQ ID NO: 783702 - DNA, 15 bp, Homo sapiens
actatattattattg

SEQ ID NO: 783703 - DNA, 15 bp, Homo sapiens
ctatattattattga

SEQ ID NO: 783704 - DNA, 15 bp, Homo sapiens
tatattattattgat

SEQ ID NO: 783705 - DNA, 15 bp, Homo sapiens
atattattattgata

SEQ ID NO: 783706 - DNA, 15 bp, Homo sapiens
tattattattgatat

SEQ ID NO: 783707 - DNA, 15 bp, Homo sapiens
attattattgatatt

SEQ ID NO: 783708 - DNA, 15 bp, Homo sapiens
ttattattgatatta

SEQ ID NO: 783709 - DNA, 15 bp, Homo sapiens
tattattgatattag

SEQ ID NO: 783710 - DNA, 15 bp, Homo sapiens
attattgatattagc

SEQ ID NO: 783711 - DNA, 15 bp, Homo sapiens
ttattgatattagca

SEQ ID NO: 783712 - DNA, 15 bp, Homo sapiens
tattgatattagcaa

SEQ ID NO: 783713 - DNA, 15 bp, Homo sapiens
attgatattagcaag

SEQ ID NO: 783714 - DNA, 15 bp, Homo sapiens
ttgatattagcaagt

SEQ ID NO: 783715 - DNA, 15 bp, Homo sapiens
tgatattagcaagtt

SEQ ID NO: 783716 - DNA, 15 bp, Homo sapiens
gatattagcaagttc

SEQ ID NO: 783717 - DNA, 15 bp, Homo sapiens
atattagcaagttca

SEQ ID NO: 783718 - DNA, 15 bp, Homo sapiens
tattagcaagttcat

SEQ ID NO: 783719 - DNA, 15 bp, Homo sapiens
attagcaagttcatg

SEQ ID NO: 783720 - DNA, 15 bp, Homo sapiens
ttagcaagttcatga

SEQ ID NO: 783721 - DNA, 15 bp, Homo sapiens
tagcaagttcatgat

SEQ ID NO: 783722 - DNA, 15 bp, Homo sapiens
agcaagttcatgatg

SEQ ID NO: 783723 - DNA, 15 bp, Homo sapiens
gcaagttcatgatga

SEQ ID NO: 783724 - DNA, 15 bp, Homo sapiens
caagttcatgatgaa

SEQ ID NO: 783725 - DNA, 15 bp, Homo sapiens
aagttcatgatgaag

SEQ ID NO: 783726 - DNA, 15 bp, Homo sapiens
agttcatgatgaagt

SEQ ID NO: 783727 - DNA, 15 bp, Homo sapiens
gttcatgatgaagtc

SEQ ID NO: 783728 - DNA, 15 bp, Homo sapiens
ttcatgatgaagtcc

SEQ ID NO: 783729 - DNA, 15 bp, Homo sapiens
tcatgatgaagtccc

SEQ ID NO: 783730 - DNA, 15 bp, Homo sapiens
catgatgaagtccca

SEQ ID NO: 783731 - DNA, 15 bp, Homo sapiens
atgatgaagtcccaa

SEQ ID NO: 783732 - DNA, 15 bp, Homo sapiens
tgatgaagtcccaat

SEQ ID NO: 783733 - DNA, 15 bp, Homo sapiens
gatgaagtcccaatc

SEQ ID NO: 783734 - DNA, 15 bp, Homo sapiens
atgaagtcccaatca

SEQ ID NO: 783735 - DNA, 15 bp, Homo sapiens
tgaagtcccaatcaa

SEQ ID NO: 783736 - DNA, 15 bp, Homo sapiens
gaagtcccaatcaac

SEQ ID NO: 783737 - DNA, 15 bp, Homo sapiens
aagtcccaatcaact

SEQ ID NO: 783738 - DNA, 15 bp, Homo sapiens
agtcccaatcaactt

SEQ ID NO: 783739 - DNA, 15 bp, Homo sapiens
gtcccaatcaacttc

SEQ ID NO: 783740 - DNA, 15 bp, Homo sapiens
tcccaatcaacttct

SEQ ID NO: 783741 - DNA, 15 bp, Homo sapiens
cccaatcaacttcta

SEQ ID NO: 783742 - DNA, 15 bp, Homo sapiens
ccaatcaacttctag

SEQ ID NO: 783743 - DNA, 15 bp, Homo sapiens
caatcaacttctagt

SEQ ID NO: 783744 - DNA, 15 bp, Homo sapiens
aatcaacttctagtg

SEQ ID NO: 783745 - DNA, 15 bp, Homo sapiens
atcaacttctagtgc

SEQ ID NO: 783746 - DNA, 15 bp, Homo sapiens
tcaacttctagtgca

SEQ ID NO: 783747 - DNA, 15 bp, Homo sapiens
caacttctagtgcat

SEQ ID NO: 783748 - DNA, 15 bp, Homo sapiens
aacttctagtgcatc

SEQ ID NO: 783749 - DNA, 15 bp, Homo sapiens
acttctagtgcatct

SEQ ID NO: 783750 - DNA, 15 bp, Homo sapiens
cttctagtgcatctt

SEQ ID NO: 783751 - DNA, 15 bp, Homo sapiens
ttctagtgcatcttg

SEQ ID NO: 783752 - DNA, 15 bp, Homo sapiens
tctagtgcatcttga

SEQ ID NO: 783753 - DNA, 15 bp, Homo sapiens
ctagtgcatcttgag

SEQ ID NO: 783754 - DNA, 15 bp, Homo sapiens
tagtgcatcttgagg

SEQ ID NO: 783755 - DNA, 15 bp, Homo sapiens
agtgcatcttgaggg

SEQ ID NO: 783756 - DNA, 15 bp, Homo sapiens
gtgcatcttgagggc

SEQ ID NO: 783757 - DNA, 15 bp, Homo sapiens
tgcatcttgagggca

SEQ ID NO: 783758 - DNA, 15 bp, Homo sapiens
gcatcttgagggcat

SEQ ID NO: 783759 - DNA, 15 bp, Homo sapiens
catcttgagggcatt

SEQ ID NO: 783760 - DNA, 15 bp, Homo sapiens
atcttgagggcatta

SEQ ID NO: 783761 - DNA, 15 bp, Homo sapiens
tcttgagggcattaa

SEQ ID NO: 783762 - DNA, 15 bp, Homo sapiens
cttgagggcattaaa

SEQ ID NO: 783763 - DNA, 15 bp, Homo sapiens
ttgagggcattaaaa

SEQ ID NO: 783764 - DNA, 15 bp, Homo sapiens
tgagggcattaaaat

SEQ ID NO: 783765 - DNA, 15 bp, Homo sapiens
gagggcattaaaatt

SEQ ID NO: 783766 - DNA, 15 bp, Homo sapiens
agggcattaaaattg

SEQ ID NO: 783767 - DNA, 15 bp, Homo sapiens
gggcattaaaattgt

SEQ ID NO: 783768 - DNA, 15 bp, Homo sapiens
ggcattaaaattgtt

SEQ ID NO: 783769 - DNA, 15 bp, Homo sapiens
gcattaaaattgttg

SEQ ID NO: 783770 - DNA, 15 bp, Homo sapiens
cattaaaattgttga

SEQ ID NO: 783771 - DNA, 15 bp, Homo sapiens
attaaaattgttgat

SEQ ID NO: 783772 - DNA, 15 bp, Homo sapiens
ttaaaattgttgatg

SEQ ID NO: 783773 - DNA, 15 bp, Homo sapiens
taaaattgttgatgt

SEQ ID NO: 783774 - DNA, 15 bp, Homo sapiens
aaaattgttgatgtt

SEQ ID NO: 783775 - DNA, 15 bp, Homo sapiens
aaattgttgatgtta

SEQ ID NO: 783776 - DNA, 15 bp, Homo sapiens
aattgttgatgttaa

SEQ ID NO: 783777 - DNA, 15 bp, Homo sapiens
attgttgatgttaat

SEQ ID NO: 783778 - DNA, 15 bp, Homo sapiens
ttgttgatgttaatg

SEQ ID NO: 783779 - DNA, 15 bp, Homo sapiens
tgttgatgttaatgg

SEQ ID NO: 783780 - DNA, 15 bp, Homo sapiens
gttgatgttaatgga

SEQ ID NO: 783781 - DNA, 15 bp, Homo sapiens
ttgatgttaatggag

SEQ ID NO: 783782 - DNA, 15 bp, Homo sapiens
tgatgttaatggaga

SEQ ID NO: 783783 - DNA, 15 bp, Homo sapiens
gatgttaatggagaa

SEQ ID NO: 783784 - DNA, 15 bp, Homo sapiens
atgttaatggagaat

SEQ ID NO: 783785 - DNA, 15 bp, Homo sapiens
tgttaatggagaatg

SEQ ID NO: 783786 - DNA, 15 bp, Homo sapiens
gttaatggagaatgg

SEQ ID NO: 783787 - DNA, 15 bp, Homo sapiens
ttaatggagaatgga

SEQ ID NO: 783788 - DNA, 15 bp, Homo sapiens
taatggagaatggaa

SEQ ID NO: 783789 - DNA, 15 bp, Homo sapiens
aatggagaatggaaa

SEQ ID NO: 783790 - DNA, 15 bp, Homo sapiens
atggagaatggaaaa

SEQ ID NO: 783791 - DNA, 15 bp, Homo sapiens
tggagaatggaaaat

SEQ ID NO: 783792 - DNA, 15 bp, Homo sapiens
ggagaatggaaaatt

SEQ ID NO: 783793 - DNA, 15 bp, Homo sapiens
gagaatggaaaattc

SEQ ID NO: 783794 - DNA, 15 bp, Homo sapiens
agaatggaaaattcc

SEQ ID NO: 783795 - DNA, 15 bp, Homo sapiens
gaatggaaaattcct

SEQ ID NO: 783796 - DNA, 15 bp, Homo sapiens
aatggaaaattcctt

SEQ ID NO: 783797 - DNA, 15 bp, Homo sapiens
atggaaaattccttt

SEQ ID NO: 783798 - DNA, 15 bp, Homo sapiens
tggaaaattcctttt

SEQ ID NO: 783799 - DNA, 15 bp, Homo sapiens
ggaaaattccttttt

SEQ ID NO: 783800 - DNA, 15 bp, Homo sapiens
gaaaattcctttttg

SEQ ID NO: 783801 - DNA, 15 bp, Homo sapiens
aaaattcctttttgg

SEQ ID NO: 783802 - DNA, 15 bp, Homo sapiens
aaattcctttttgga

SEQ ID NO: 783803 - DNA, 15 bp, Homo sapiens
aattcctttttggag

SEQ ID NO: 783804 - DNA, 15 bp, Homo sapiens
attcctttttggagg

SEQ ID NO: 783805 - DNA, 15 bp, Homo sapiens
ttcctttttggaggt

SEQ ID NO: 783806 - DNA, 15 bp, Homo sapiens
tcctttttggaggta

SEQ ID NO: 783807 - DNA, 15 bp, Homo sapiens
cctttttggaggtaa

SEQ ID NO: 783808 - DNA, 15 bp, Homo sapiens
ctttttggaggtaaa

SEQ ID NO: 783809 - DNA, 15 bp, Homo sapiens
tttttggaggtaaaa

SEQ ID NO: 783810 - DNA, 15 bp, Homo sapiens
ttttggaggtaaaat

SEQ ID NO: 783811 - DNA, 15 bp, Homo sapiens
tttggaggtaaaatt

SEQ ID NO: 783812 - DNA, 15 bp, Homo sapiens
ttggaggtaaaattt

SEQ ID NO: 783813 - DNA, 15 bp, Homo sapiens
tggaggtaaaatttt

SEQ ID NO: 783814 - DNA, 15 bp, Homo sapiens
ggaggtaaaatttta

SEQ ID NO: 783815 - DNA, 15 bp, Homo sapiens
gaggtaaaattttaa

SEQ ID NO: 783816 - DNA, 15 bp, Homo sapiens
aggtaaaattttaaa

SEQ ID NO: 783817 - DNA, 15 bp, Homo sapiens
ggtaaaattttaaat

SEQ ID NO: 783818 - DNA, 15 bp, Homo sapiens
gtaaaattttaaatc

SEQ ID NO: 783819 - DNA, 15 bp, Homo sapiens
taaaattttaaatct

SEQ ID NO: 783820 - DNA, 15 bp, Homo sapiens
aaaattttaaatctg

SEQ ID NO: 783821 - DNA, 15 bp, Homo sapiens
aaattttaaatctga

SEQ ID NO: 783822 - DNA, 15 bp, Homo sapiens
aattttaaatctgat

SEQ ID NO: 783823 - DNA, 15 bp, Homo sapiens
attttaaatctgatt

SEQ ID NO: 783824 - DNA, 15 bp, Homo sapiens
ttttaaatctgattt

SEQ ID NO: 783825 - DNA, 15 bp, Homo sapiens
tttaaatctgatttg

SEQ ID NO: 783826 - DNA, 15 bp, Homo sapiens
ttaaatctgatttga

SEQ ID NO: 783827 - DNA, 15 bp, Homo sapiens
taaatctgatttgaa

SEQ ID NO: 783828 - DNA, 15 bp, Homo sapiens
aaatctgatttgaaa

SEQ ID NO: 783829 - DNA, 15 bp, Homo sapiens
aatctgatttgaaat

SEQ ID NO: 783830 - DNA, 15 bp, Homo sapiens
atctgatttgaaata

SEQ ID NO: 783831 - DNA, 15 bp, Homo sapiens
tctgatttgaaataa

SEQ ID NO: 783832 - DNA, 15 bp, Homo sapiens
ctgatttgaaataag

SEQ ID NO: 783833 - DNA, 15 bp, Homo sapiens
tgatttgaaataagg

SEQ ID NO: 783834 - DNA, 15 bp, Homo sapiens
gatttgaaataagga

SEQ ID NO: 783835 - DNA, 15 bp, Homo sapiens
atttgaaataaggaa

SEQ ID NO: 783836 - DNA, 15 bp, Homo sapiens
tttgaaataaggaat

SEQ ID NO: 783837 - DNA, 15 bp, Homo sapiens
ttgaaataaggaatt

SEQ ID NO: 783838 - DNA, 15 bp, Homo sapiens
tgaaataaggaattt

SEQ ID NO: 783839 - DNA, 15 bp, Homo sapiens
gaaataaggaattta

SEQ ID NO: 783840 - DNA, 15 bp, Homo sapiens
aaataaggaatttat

SEQ ID NO: 783841 - DNA, 15 bp, Homo sapiens
aataaggaatttatt

SEQ ID NO: 783842 - DNA, 15 bp, Homo sapiens
ataaggaatttattc

SEQ ID NO: 783843 - DNA, 15 bp, Homo sapiens
taaggaatttattcc

SEQ ID NO: 783844 - DNA, 15 bp, Homo sapiens
aaggaatttattcct

SEQ ID NO: 783845 - DNA, 15 bp, Homo sapiens
aggaatttattcctt

SEQ ID NO: 783846 - DNA, 15 bp, Homo sapiens
ggaatttattcctta

SEQ ID NO: 783847 - DNA, 15 bp, Homo sapiens
gaatttattccttaa

SEQ ID NO: 783848 - DNA, 15 bp, Homo sapiens
aatttattccttaaa

SEQ ID NO: 783849 - DNA, 15 bp, Homo sapiens
atttattccttaaag

SEQ ID NO: 783850 - DNA, 15 bp, Homo sapiens
tttattccttaaagg

SEQ ID NO: 783851 - DNA, 15 bp, Homo sapiens
ttattccttaaagga

SEQ ID NO: 783852 - DNA, 15 bp, Homo sapiens
tattccttaaaggaa

SEQ ID NO: 783853 - DNA, 15 bp, Homo sapiens
attccttaaaggaac

SEQ ID NO: 783854 - DNA, 15 bp, Homo sapiens
ttccttaaaggaaca

SEQ ID NO: 783855 - DNA, 15 bp, Homo sapiens
tccttaaaggaacac

SEQ ID NO: 783856 - DNA, 15 bp, Homo sapiens
ccttaaaggaacaca

SEQ ID NO: 783857 - DNA, 15 bp, Homo sapiens
cttaaaggaacacat

SEQ ID NO: 783858 - DNA, 15 bp, Homo sapiens
ttaaaggaacacata

SEQ ID NO: 783859 - DNA, 15 bp, Homo sapiens
taaaggaacacataa

SEQ ID NO: 783860 - DNA, 15 bp, Homo sapiens
aaaggaacacataag

SEQ ID NO: 783861 - DNA, 15 bp, Homo sapiens
aaggaacacataaga

SEQ ID NO: 783862 - DNA, 15 bp, Homo sapiens
aggaacacataagaa

SEQ ID NO: 783863 - DNA, 15 bp, Homo sapiens
ggaacacataagaaa

SEQ ID NO: 783864 - DNA, 15 bp, Homo sapiens
gaacacataagaaac

SEQ ID NO: 783865 - DNA, 15 bp, Homo sapiens
aacacataagaaact

SEQ ID NO: 783866 - DNA, 15 bp, Homo sapiens
acacataagaaactc

SEQ ID NO: 783867 - DNA, 15 bp, Homo sapiens
cacataagaaactct

SEQ ID NO: 783868 - DNA, 15 bp, Homo sapiens
acataagaaactctt

SEQ ID NO: 783869 - DNA, 15 bp, Homo sapiens
cataagaaactctta

SEQ ID NO: 783870 - DNA, 15 bp, Homo sapiens
ataagaaactcttac

SEQ ID NO: 783871 - DNA, 15 bp, Homo sapiens
taagaaactcttacc

SEQ ID NO: 783872 - DNA, 15 bp, Homo sapiens
aagaaactcttaccc

SEQ ID NO: 783873 - DNA, 15 bp, Homo sapiens
agaaactcttaccct

SEQ ID NO: 783874 - DNA, 15 bp, Homo sapiens
gaaactcttaccctc

SEQ ID NO: 783875 - DNA, 15 bp, Homo sapiens
aaactcttaccctct

SEQ ID NO: 783876 - DNA, 15 bp, Homo sapiens
aactcttaccctcta

SEQ ID NO: 783877 - DNA, 15 bp, Homo sapiens
actcttaccctctag

SEQ ID NO: 783878 - DNA, 15 bp, Homo sapiens
ctcttaccctctaga

SEQ ID NO: 783879 - DNA, 15 bp, Homo sapiens
tcttaccctctagag

SEQ ID NO: 783880 - DNA, 15 bp, Homo sapiens
cttaccctctagaga

SEQ ID NO: 783881 - DNA, 15 bp, Homo sapiens
ttaccctctagagat

SEQ ID NO: 783882 - DNA, 15 bp, Homo sapiens
taccctctagagatc

SEQ ID NO: 783883 - DNA, 15 bp, Homo sapiens
accctctagagatct

SEQ ID NO: 783884 - DNA, 15 bp, Homo sapiens
ccctctagagatcta

SEQ ID NO: 783885 - DNA, 15 bp, Homo sapiens
cctctagagatctaa

SEQ ID NO: 783886 - DNA, 15 bp, Homo sapiens
ctctagagatctaag

SEQ ID NO: 783887 - DNA, 15 bp, Homo sapiens
tctagagatctaagt

SEQ ID NO: 783888 - DNA, 15 bp, Homo sapiens
ctagagatctaagta

SEQ ID NO: 783889 - DNA, 15 bp, Homo sapiens
tagagatctaagtac

SEQ ID NO: 783890 - DNA, 15 bp, Homo sapiens
agagatctaagtact

SEQ ID NO: 783891 - DNA, 15 bp, Homo sapiens
gagatctaagtactt

SEQ ID NO: 783892 - DNA, 15 bp, Homo sapiens
agatctaagtacttc

SEQ ID NO: 783893 - DNA, 15 bp, Homo sapiens
gatctaagtacttcc

SEQ ID NO: 783894 - DNA, 15 bp, Homo sapiens
atctaagtacttcct

SEQ ID NO: 783895 - DNA, 15 bp, Homo sapiens
tctaagtacttcctg

SEQ ID NO: 783896 - DNA, 15 bp, Homo sapiens
ctaagtacttcctga

SEQ ID NO: 783897 - DNA, 15 bp, Homo sapiens
taagtacttcctgac

SEQ ID NO: 783898 - DNA, 15 bp, Homo sapiens
aagtacttcctgact

SEQ ID NO: 783899 - DNA, 15 bp, Homo sapiens
agtacttcctgactt

SEQ ID NO: 783900 - DNA, 15 bp, Homo sapiens
gtacttcctgactta

SEQ ID NO: 783901 - DNA, 15 bp, Homo sapiens
tacttcctgacttaa

SEQ ID NO: 783902 - DNA, 15 bp, Homo sapiens
acttcctgacttaaa

SEQ ID NO: 783903 - DNA, 15 bp, Homo sapiens
cttcctgacttaaat

SEQ ID NO: 783904 - DNA, 15 bp, Homo sapiens
ttcctgacttaaatc

SEQ ID NO: 783905 - DNA, 15 bp, Homo sapiens
tcctgacttaaatct

SEQ ID NO: 783906 - DNA, 15 bp, Homo sapiens
cctgacttaaatctt

SEQ ID NO: 783907 - DNA, 15 bp, Homo sapiens
ctgacttaaatcttc

SEQ ID NO: 783908 - DNA, 15 bp, Homo sapiens
tgacttaaatcttca

SEQ ID NO: 783909 - DNA, 15 bp, Homo sapiens
gacttaaatcttcat

SEQ ID NO: 783910 - DNA, 15 bp, Homo sapiens
acttaaatcttcata

SEQ ID NO: 783911 - DNA, 15 bp, Homo sapiens
cttaaatcttcatat

SEQ ID NO: 783912 - DNA, 15 bp, Homo sapiens
ttaaatcttcatatt

SEQ ID NO: 783913 - DNA, 15 bp, Homo sapiens
taaatcttcatattc

SEQ ID NO: 783914 - DNA, 15 bp, Homo sapiens
aaatcttcatattct

SEQ ID NO: 783915 - DNA, 15 bp, Homo sapiens
aatcttcatattcta

SEQ ID NO: 783916 - DNA, 15 bp, Homo sapiens
atcttcatattctaa

SEQ ID NO: 783917 - DNA, 15 bp, Homo sapiens
tcttcatattctaat

SEQ ID NO: 783918 - DNA, 15 bp, Homo sapiens
cttcatattctaata

SEQ ID NO: 783919 - DNA, 15 bp, Homo sapiens
ttcatattctaatat

SEQ ID NO: 783920 - DNA, 15 bp, Homo sapiens
tcatattctaatatg

SEQ ID NO: 783921 - DNA, 15 bp, Homo sapiens
catattctaatatgc

SEQ ID NO: 783922 - DNA, 15 bp, Homo sapiens
atattctaatatgct

SEQ ID NO: 783923 - DNA, 15 bp, Homo sapiens
tattctaatatgctt

SEQ ID NO: 783924 - DNA, 15 bp, Homo sapiens
attctaatatgcttg

SEQ ID NO: 783925 - DNA, 15 bp, Homo sapiens
ttctaatatgcttgg

SEQ ID NO: 783926 - DNA, 15 bp, Homo sapiens
tctaatatgcttggc

SEQ ID NO: 783927 - DNA, 15 bp, Homo sapiens
ctaatatgcttggca

SEQ ID NO: 783928 - DNA, 15 bp, Homo sapiens
taatatgcttggcat

SEQ ID NO: 783929 - DNA, 15 bp, Homo sapiens
aatatgcttggcatt

SEQ ID NO: 783930 - DNA, 15 bp, Homo sapiens
atatgcttggcattt

SEQ ID NO: 783931 - DNA, 15 bp, Homo sapiens
tatgcttggcattta

SEQ ID NO: 783932 - DNA, 15 bp, Homo sapiens
atgcttggcatttac

SEQ ID NO: 783933 - DNA, 15 bp, Homo sapiens
tgcttggcatttaca

SEQ ID NO: 783934 - DNA, 15 bp, Homo sapiens
gcttggcatttacat

SEQ ID NO: 783935 - DNA, 15 bp, Homo sapiens
cttggcatttacatc

SEQ ID NO: 783936 - DNA, 15 bp, Homo sapiens
ttggcatttacatcc

SEQ ID NO: 783937 - DNA, 15 bp, Homo sapiens
tggcatttacatcct

SEQ ID NO: 783938 - DNA, 15 bp, Homo sapiens
ggcatttacatcctt

SEQ ID NO: 783939 - DNA, 15 bp, Homo sapiens
gcatttacatccttt

SEQ ID NO: 783940 - DNA, 15 bp, Homo sapiens
catttacatcctttg

SEQ ID NO: 783941 - DNA, 15 bp, Homo sapiens
atttacatcctttgt

SEQ ID NO: 783942 - DNA, 15 bp, Homo sapiens
tttacatcctttgtc

SEQ ID NO: 783943 - DNA, 15 bp, Homo sapiens
ttacatcctttgtct

SEQ ID NO: 783944 - DNA, 15 bp, Homo sapiens
tacatcctttgtctc

SEQ ID NO: 783945 - DNA, 15 bp, Homo sapiens
acatcctttgtctct

SEQ ID NO: 783946 - DNA, 15 bp, Homo sapiens
catcctttgtctcta

SEQ ID NO: 783947 - DNA, 15 bp, Homo sapiens
atcctttgtctctat

SEQ ID NO: 783948 - DNA, 15 bp, Homo sapiens
tcctttgtctctatc

SEQ ID NO: 783949 - DNA, 15 bp, Homo sapiens
cctttgtctctatca

SEQ ID NO: 783950 - DNA, 15 bp, Homo sapiens
ctttgtctctatcac

SEQ ID NO: 783951 - DNA, 15 bp, Homo sapiens
tttgtctctatcact

SEQ ID NO: 783952 - DNA, 15 bp, Homo sapiens
ttgtctctatcacta

SEQ ID NO: 783953 - DNA, 15 bp, Homo sapiens
tgtctctatcactaa

SEQ ID NO: 783954 - DNA, 15 bp, Homo sapiens
gtctctatcactaaa

SEQ ID NO: 783955 - DNA, 15 bp, Homo sapiens
tctctatcactaaac

SEQ ID NO: 783956 - DNA, 15 bp, Homo sapiens
ctctatcactaaacc

SEQ ID NO: 783957 - DNA, 15 bp, Homo sapiens
tctatcactaaacca

SEQ ID NO: 783958 - DNA, 15 bp, Homo sapiens
ctatcactaaaccat

SEQ ID NO: 783959 - DNA, 15 bp, Homo sapiens
tatcactaaaccatc

SEQ ID NO: 783960 - DNA, 15 bp, Homo sapiens
atcactaaaccatca

SEQ ID NO: 783961 - DNA, 15 bp, Homo sapiens
tcactaaaccatcac

SEQ ID NO: 783962 - DNA, 15 bp, Homo sapiens
cactaaaccatcaca

SEQ ID NO: 783963 - DNA, 15 bp, Homo sapiens
actaaaccatcacat

SEQ ID NO: 783964 - DNA, 15 bp, Homo sapiens
ctaaaccatcacata

SEQ ID NO: 783965 - DNA, 15 bp, Homo sapiens
taaaccatcacatag

SEQ ID NO: 783966 - DNA, 15 bp, Homo sapiens
aaaccatcacatagc

SEQ ID NO: 783967 - DNA, 15 bp, Homo sapiens
aaccatcacatagcc

SEQ ID NO: 783968 - DNA, 15 bp, Homo sapiens
accatcacatagcct

SEQ ID NO: 783969 - DNA, 15 bp, Homo sapiens
ccatcacatagcctg

SEQ ID NO: 783970 - DNA, 15 bp, Homo sapiens
catcacatagcctga

SEQ ID NO: 783971 - DNA, 15 bp, Homo sapiens
atcacatagcctgat

SEQ ID NO: 783972 - DNA, 15 bp, Homo sapiens
tcacatagcctgata

SEQ ID NO: 783973 - DNA, 15 bp, Homo sapiens
cacatagcctgatat

SEQ ID NO: 783974 - DNA, 15 bp, Homo sapiens
acatagcctgatatt

SEQ ID NO: 783975 - DNA, 15 bp, Homo sapiens
catagcctgatattt

SEQ ID NO: 783976 - DNA, 15 bp, Homo sapiens
atagcctgatattta

SEQ ID NO: 783977 - DNA, 15 bp, Homo sapiens
tagcctgatatttat

SEQ ID NO: 783978 - DNA, 15 bp, Homo sapiens
agcctgatatttatg

SEQ ID NO: 783979 - DNA, 15 bp, Homo sapiens
gcctgatatttatga

SEQ ID NO: 783980 - DNA, 15 bp, Homo sapiens
cctgatatttatgag

SEQ ID NO: 783981 - DNA, 15 bp, Homo sapiens
ctgatatttatgagg

SEQ ID NO: 783982 - DNA, 15 bp, Homo sapiens
tgatatttatgaggt

SEQ ID NO: 783983 - DNA, 15 bp, Homo sapiens
gatatttatgaggta

SEQ ID NO: 783984 - DNA, 15 bp, Homo sapiens
atatttatgaggtat

SEQ ID NO: 783985 - DNA, 15 bp, Homo sapiens
tatttatgaggtatg

SEQ ID NO: 783986 - DNA, 15 bp, Homo sapiens
atttatgaggtatgt

SEQ ID NO: 783987 - DNA, 15 bp, Homo sapiens
tttatgaggtatgtt

SEQ ID NO: 783988 - DNA, 15 bp, Homo sapiens
ttatgaggtatgtta

SEQ ID NO: 783989 - DNA, 15 bp, Homo sapiens
tatgaggtatgttac

SEQ ID NO: 783990 - DNA, 15 bp, Homo sapiens
atgaggtatgttacc

SEQ ID NO: 783991 - DNA, 15 bp, Homo sapiens
tgaggtatgttacct

SEQ ID NO: 783992 - DNA, 15 bp, Homo sapiens
gaggtatgttaccta

SEQ ID NO: 783993 - DNA, 15 bp, Homo sapiens
aggtatgttacctag

SEQ ID NO: 783994 - DNA, 15 bp, Homo sapiens
ggtatgttacctaga

SEQ ID NO: 783995 - DNA, 15 bp, Homo sapiens
gtatgttacctagag

SEQ ID NO: 783996 - DNA, 15 bp, Homo sapiens
tatgttacctagagt

SEQ ID NO: 783997 - DNA, 15 bp, Homo sapiens
atgttacctagagtg

SEQ ID NO: 783998 - DNA, 15 bp, Homo sapiens
tgttacctagagtga

SEQ ID NO: 783999 - DNA, 15 bp, Homo sapiens
gttacctagagtgat

SEQ ID NO: 784000 - DNA, 15 bp, Homo sapiens
ttacctagagtgatt

SEQ ID NO: 784001 - DNA, 15 bp, Homo sapiens
tacctagagtgattc

SEQ ID NO: 784002 - DNA, 15 bp, Homo sapiens
acctagagtgattct

SEQ ID NO: 784003 - DNA, 15 bp, Homo sapiens
cctagagtgattcta

SEQ ID NO: 784004 - DNA, 15 bp, Homo sapiens
ctagagtgattctag

SEQ ID NO: 784005 - DNA, 15 bp, Homo sapiens
tagagtgattctaga

SEQ ID NO: 784006 - DNA, 15 bp, Homo sapiens
agagtgattctagat

SEQ ID NO: 784007 - DNA, 15 bp, Homo sapiens
gagtgattctagatt

SEQ ID NO: 784008 - DNA, 15 bp, Homo sapiens
agtgattctagattg

SEQ ID NO: 784009 - DNA, 15 bp, Homo sapiens
gtgattctagattga

SEQ ID NO: 784010 - DNA, 15 bp, Homo sapiens
tgattctagattgag

SEQ ID NO: 784011 - DNA, 15 bp, Homo sapiens
gattctagattgagt

SEQ ID NO: 784012 - DNA, 15 bp, Homo sapiens
attctagattgagtt

SEQ ID NO: 784013 - DNA, 15 bp, Homo sapiens
ttctagattgagttt

SEQ ID NO: 784014 - DNA, 15 bp, Homo sapiens
tctagattgagtttt

SEQ ID NO: 784015 - DNA, 15 bp, Homo sapiens
ctagattgagttttt

SEQ ID NO: 784016 - DNA, 15 bp, Homo sapiens
tagattgagtttttg

SEQ ID NO: 784017 - DNA, 15 bp, Homo sapiens
agattgagtttttgc

SEQ ID NO: 784018 - DNA, 15 bp, Homo sapiens
gattgagtttttgca

SEQ ID NO: 784019 - DNA, 15 bp, Homo sapiens
attgagtttttgcag

SEQ ID NO: 784020 - DNA, 15 bp, Homo sapiens
ttgagtttttgcaga

SEQ ID NO: 784021 - DNA, 15 bp, Homo sapiens
tgagtttttgcagac

SEQ ID NO: 784022 - DNA, 15 bp, Homo sapiens
gagtttttgcagaca

SEQ ID NO: 784023 - DNA, 15 bp, Homo sapiens
agtttttgcagacaa

SEQ ID NO: 784024 - DNA, 15 bp, Homo sapiens
gtttttgcagacaag

SEQ ID NO: 784025 - DNA, 15 bp, Homo sapiens
tttttgcagacaaga

SEQ ID NO: 784026 - DNA, 15 bp, Homo sapiens
ttttgcagacaagat

SEQ ID NO: 784027 - DNA, 15 bp, Homo sapiens
tttgcagacaagata

SEQ ID NO: 784028 - DNA, 15 bp, Homo sapiens
ttgcagacaagataa

SEQ ID NO: 784029 - DNA, 15 bp, Homo sapiens
tgcagacaagataag

SEQ ID NO: 784030 - DNA, 15 bp, Homo sapiens
gcagacaagataaga

SEQ ID NO: 784031 - DNA, 15 bp, Homo sapiens
cagacaagataagat

SEQ ID NO: 784032 - DNA, 15 bp, Homo sapiens
agacaagataagatt

SEQ ID NO: 784033 - DNA, 15 bp, Homo sapiens
gacaagataagatta

SEQ ID NO: 784034 - DNA, 15 bp, Homo sapiens
acaagataagattat

SEQ ID NO: 784035 - DNA, 15 bp, Homo sapiens
caagataagattatg

SEQ ID NO: 784036 - DNA, 15 bp, Homo sapiens
aagataagattatgg

SEQ ID NO: 784037 - DNA, 15 bp, Homo sapiens
agataagattatgga

SEQ ID NO: 784038 - DNA, 15 bp, Homo sapiens
gataagattatggaa

SEQ ID NO: 784039 - DNA, 15 bp, Homo sapiens
ataagattatggaac

SEQ ID NO: 784040 - DNA, 15 bp, Homo sapiens
taagattatggaaca

SEQ ID NO: 784041 - DNA, 15 bp, Homo sapiens
aagattatggaacag

SEQ ID NO: 784042 - DNA, 15 bp, Homo sapiens
agattatggaacaga

SEQ ID NO: 784043 - DNA, 15 bp, Homo sapiens
gattatggaacagag

SEQ ID NO: 784044 - DNA, 15 bp, Homo sapiens
attatggaacagagg

SEQ ID NO: 784045 - DNA, 15 bp, Homo sapiens
ttatggaacagaggg

SEQ ID NO: 784046 - DNA, 15 bp, Homo sapiens
tatggaacagaggga

SEQ ID NO: 784047 - DNA, 15 bp, Homo sapiens
atggaacagagggac

SEQ ID NO: 784048 - DNA, 15 bp, Homo sapiens
tggaacagagggaca

SEQ ID NO: 784049 - DNA, 15 bp, Homo sapiens
ggaacagagggacaa

SEQ ID NO: 784050 - DNA, 15 bp, Homo sapiens
gaacagagggacaaa

SEQ ID NO: 784051 - DNA, 15 bp, Homo sapiens
aacagagggacaaag

SEQ ID NO: 784052 - DNA, 15 bp, Homo sapiens
acagagggacaaaga

SEQ ID NO: 784053 - DNA, 15 bp, Homo sapiens
cagagggacaaagaa

SEQ ID NO: 784054 - DNA, 15 bp, Homo sapiens
agagggacaaagaag

SEQ ID NO: 784055 - DNA, 15 bp, Homo sapiens
gagggacaaagaaga

SEQ ID NO: 784056 - DNA, 15 bp, Homo sapiens
agggacaaagaagaa

SEQ ID NO: 784057 - DNA, 15 bp, Homo sapiens
gggacaaagaagaaa

SEQ ID NO: 784058 - DNA, 15 bp, Homo sapiens
ggacaaagaagaaat

SEQ ID NO: 784059 - DNA, 15 bp, Homo sapiens
gacaaagaagaaatt

SEQ ID NO: 784060 - DNA, 15 bp, Homo sapiens
acaaagaagaaatta

SEQ ID NO: 784061 - DNA, 15 bp, Homo sapiens
caaagaagaaattaa

SEQ ID NO: 784062 - DNA, 15 bp, Homo sapiens
aaagaagaaattaac

SEQ ID NO: 784063 - DNA, 15 bp, Homo sapiens
aagaagaaattaaca

SEQ ID NO: 784064 - DNA, 15 bp, Homo sapiens
agaagaaattaacat

SEQ ID NO: 784065 - DNA, 15 bp, Homo sapiens
gaagaaattaacata

SEQ ID NO: 784066 - DNA, 15 bp, Homo sapiens
aagaaattaacatag

SEQ ID NO: 784067 - DNA, 15 bp, Homo sapiens
agaaattaacatagc

SEQ ID NO: 784068 - DNA, 15 bp, Homo sapiens
gaaattaacatagct

SEQ ID NO: 784069 - DNA, 15 bp, Homo sapiens
aaattaacatagctg

SEQ ID NO: 784070 - DNA, 15 bp, Homo sapiens
aattaacatagctgt

SEQ ID NO: 784071 - DNA, 15 bp, Homo sapiens
attaacatagctgtg

SEQ ID NO: 784072 - DNA, 15 bp, Homo sapiens
ttaacatagctgtgg

SEQ ID NO: 784073 - DNA, 15 bp, Homo sapiens
taacatagctgtggc

SEQ ID NO: 784074 - DNA, 15 bp, Homo sapiens
aacatagctgtggcc

SEQ ID NO: 784075 - DNA, 15 bp, Homo sapiens
acatagctgtggcct

SEQ ID NO: 784076 - DNA, 15 bp, Homo sapiens
catagctgtggccta

SEQ ID NO: 784077 - DNA, 15 bp, Homo sapiens
atagctgtggcctaa

SEQ ID NO: 784078 - DNA, 15 bp, Homo sapiens
tagctgtggcctaat

SEQ ID NO: 784079 - DNA, 15 bp, Homo sapiens
agctgtggcctaatt

SEQ ID NO: 784080 - DNA, 15 bp, Homo sapiens
gctgtggcctaattt

SEQ ID NO: 784081 - DNA, 15 bp, Homo sapiens
ctgtggcctaatttt

SEQ ID NO: 784082 - DNA, 15 bp, Homo sapiens
tgtggcctaatttta

SEQ ID NO: 784083 - DNA, 15 bp, Homo sapiens
ttacttgtgactcgg

SEQ ID NO: 784084 - DNA, 15 bp, Homo sapiens
tacttgtgactcgga

SEQ ID NO: 784085 - DNA, 15 bp, Homo sapiens
acttgtgactcggac

SEQ ID NO: 784086 - DNA, 15 bp, Homo sapiens
cttgtgactcggacc

SEQ ID NO: 784087 - DNA, 15 bp, Homo sapiens
ttgtgactcggacca

SEQ ID NO: 784088 - DNA, 15 bp, Homo sapiens
tgtgactcggaccat

SEQ ID NO: 784089 - DNA, 15 bp, Homo sapiens
gtgactcggaccatc

SEQ ID NO: 784090 - DNA, 15 bp, Homo sapiens
tgactcggaccatct

SEQ ID NO: 784091 - DNA, 15 bp, Homo sapiens
gactcggaccatctg

SEQ ID NO: 784092 - DNA, 15 bp, Homo sapiens
actcggaccatctgc

SEQ ID NO: 784093 - DNA, 15 bp, Homo sapiens
ctcggaccatctgcg

SEQ ID NO: 784094 - DNA, 15 bp, Homo sapiens
tcggaccatctgcgt

SEQ ID NO: 784095 - DNA, 15 bp, Homo sapiens
cggaccatctgcgtc

SEQ ID NO: 784096 - DNA, 15 bp, Homo sapiens
ggaccatctgcgtcc

SEQ ID NO: 784097 - DNA, 15 bp, Homo sapiens
gaccatctgcgtccc

SEQ ID NO: 784098 - DNA, 15 bp, Homo sapiens
accatctgcgtcccg

SEQ ID NO: 784099 - DNA, 15 bp, Homo sapiens
ccatctgcgtcccgc

SEQ ID NO: 784100 - DNA, 15 bp, Homo sapiens
catctgcgtcccgca

SEQ ID NO: 784101 - DNA, 15 bp, Homo sapiens
atctgcgtcccgcag

SEQ ID NO: 784102 - DNA, 15 bp, Homo sapiens
tctgcgtcccgcaga

SEQ ID NO: 784103 - DNA, 15 bp, Homo sapiens
ctgcgtcccgcagat

SEQ ID NO: 784104 - DNA, 15 bp, Homo sapiens
tgcgtcccgcagatg

SEQ ID NO: 784105 - DNA, 15 bp, Homo sapiens
gcgtcccgcagatgc

SEQ ID NO: 784106 - DNA, 15 bp, Homo sapiens
cgtcccgcagatgca

SEQ ID NO: 784107 - DNA, 15 bp, Homo sapiens
gtcccgcagatgcaa

SEQ ID NO: 784108 - DNA, 15 bp, Homo sapiens
tcccgcagatgcaag

SEQ ID NO: 784109 - DNA, 15 bp, Homo sapiens
cccgcagatgcaagt

SEQ ID NO: 784110 - DNA, 15 bp, Homo sapiens
ccgcagatgcaagta

SEQ ID NO: 784111 - DNA, 15 bp, Homo sapiens
cgcagatgcaagtat

SEQ ID NO: 784112 - DNA, 15 bp, Homo sapiens
gcagatgcaagtatg

SEQ ID NO: 784113 - DNA, 15 bp, Homo sapiens
cagatgcaagtatga

SEQ ID NO: 784114 - DNA, 15 bp, Homo sapiens
agatgcaagtatgaa

SEQ ID NO: 784115 - DNA, 15 bp, Homo sapiens
gatgcaagtatgaaa

SEQ ID NO: 784116 - DNA, 15 bp, Homo sapiens
atgcaagtatgaaaa

SEQ ID NO: 784117 - DNA, 15 bp, Homo sapiens
tgcaagtatgaaaaa

SEQ ID NO: 784118 - DNA, 15 bp, Homo sapiens
gcaagtatgaaaaat

SEQ ID NO: 784119 - DNA, 15 bp, Homo sapiens
caagtatgaaaaatc

SEQ ID NO: 784120 - DNA, 15 bp, Homo sapiens
aagtatgaaaaatcc

SEQ ID NO: 784121 - DNA, 15 bp, Homo sapiens
agtatgaaaaatcca

SEQ ID NO: 784122 - DNA, 15 bp, Homo sapiens
gtatgaaaaatccat

SEQ ID NO: 784123 - DNA, 15 bp, Homo sapiens
tatgaaaaatccata

SEQ ID NO: 784124 - DNA, 15 bp, Homo sapiens
atgaaaaatccatac

SEQ ID NO: 784125 - DNA, 15 bp, Homo sapiens
tgaaaaatccataca

SEQ ID NO: 784126 - DNA, 15 bp, Homo sapiens
gaaaaatccatacat

SEQ ID NO: 784127 - DNA, 15 bp, Homo sapiens
aaaaatccatacatc

SEQ ID NO: 784128 - DNA, 15 bp, Homo sapiens
aaaatccatacatcc

SEQ ID NO: 784129 - DNA, 15 bp, Homo sapiens
aaatccatacatcct

SEQ ID NO: 784130 - DNA, 15 bp, Homo sapiens
aatccatacatcctt

SEQ ID NO: 784131 - DNA, 15 bp, Homo sapiens
atccatacatccttc

SEQ ID NO: 784132 - DNA, 15 bp, Homo sapiens
tccatacatccttct

SEQ ID NO: 784133 - DNA, 15 bp, Homo sapiens
ccatacatccttctg

SEQ ID NO: 784134 - DNA, 15 bp, Homo sapiens
catacatccttctga

SEQ ID NO: 784135 - DNA, 15 bp, Homo sapiens
atacatccttctgaa

SEQ ID NO: 784136 - DNA, 15 bp, Homo sapiens
tacatccttctgaat

SEQ ID NO: 784137 - DNA, 15 bp, Homo sapiens
acatccttctgaatg

SEQ ID NO: 784138 - DNA, 15 bp, Homo sapiens
catccttctgaatgg

SEQ ID NO: 784139 - DNA, 15 bp, Homo sapiens
atccttctgaatggg

SEQ ID NO: 784140 - DNA, 15 bp, Homo sapiens
tccttctgaatggga

SEQ ID NO: 784141 - DNA, 15 bp, Homo sapiens
ccttctgaatgggag

SEQ ID NO: 784142 - DNA, 15 bp, Homo sapiens
cttctgaatgggagg

SEQ ID NO: 784143 - DNA, 15 bp, Homo sapiens
ttctgaatgggaggg

SEQ ID NO: 784144 - DNA, 15 bp, Homo sapiens
tctgaatgggagggc

SEQ ID NO: 784145 - DNA, 15 bp, Homo sapiens
ctgaatgggagggct

SEQ ID NO: 784146 - DNA, 15 bp, Homo sapiens
tgaatgggagggctt

SEQ ID NO: 784147 - DNA, 15 bp, Homo sapiens
gaatgggagggcttt

SEQ ID NO: 784148 - DNA, 15 bp, Homo sapiens
aatgggagggctttt

SEQ ID NO: 784149 - DNA, 15 bp, Homo sapiens
atgggagggcttttt

SEQ ID NO: 784150 - DNA, 15 bp, Homo sapiens
tgggagggctttttg

SEQ ID NO: 784151 - DNA, 15 bp, Homo sapiens
gggagggctttttgg

SEQ ID NO: 784152 - DNA, 15 bp, Homo sapiens
ggagggctttttggc

SEQ ID NO: 784153 - DNA, 15 bp, Homo sapiens
gagggctttttggct

SEQ ID NO: 784154 - DNA, 15 bp, Homo sapiens
agggctttttggctt

SEQ ID NO: 784155 - DNA, 15 bp, Homo sapiens
gggctttttggctta

SEQ ID NO: 784156 - DNA, 15 bp, Homo sapiens
ggctttttggcttaa

SEQ ID NO: 784157 - DNA, 15 bp, Homo sapiens
gctttttggcttaag

SEQ ID NO: 784158 - DNA, 15 bp, Homo sapiens
ctttttggcttaagt

SEQ ID NO: 784159 - DNA, 15 bp, Homo sapiens
tttttggcttaagtg

SEQ ID NO: 784160 - DNA, 15 bp, Homo sapiens
ttttggcttaagtgt

SEQ ID NO: 784161 - DNA, 15 bp, Homo sapiens
tttggcttaagtgtc

SEQ ID NO: 784162 - DNA, 15 bp, Homo sapiens
ttggcttaagtgtca

SEQ ID NO: 784163 - DNA, 15 bp, Homo sapiens
tggcttaagtgtcaa

SEQ ID NO: 784164 - DNA, 15 bp, Homo sapiens
ggcttaagtgtcaag

SEQ ID NO: 784165 - DNA, 15 bp, Homo sapiens
gcttaagtgtcaaga

SEQ ID NO: 784166 - DNA, 15 bp, Homo sapiens
cttaagtgtcaagat

SEQ ID NO: 784167 - DNA, 15 bp, Homo sapiens
ttaagtgtcaagatt

SEQ ID NO: 784168 - DNA, 15 bp, Homo sapiens
taagtgtcaagattt

SEQ ID NO: 784169 - DNA, 15 bp, Homo sapiens
aagtgtcaagatttc

SEQ ID NO: 784170 - DNA, 15 bp, Homo sapiens
agtgtcaagatttct

SEQ ID NO: 784171 - DNA, 15 bp, Homo sapiens
gtgtcaagatttctg

SEQ ID NO: 784172 - DNA, 15 bp, Homo sapiens
tgtcaagatttctgc

SEQ ID NO: 784173 - DNA, 15 bp, Homo sapiens
gtcaagatttctgct

SEQ ID NO: 784174 - DNA, 15 bp, Homo sapiens
tcaagatttctgctt

SEQ ID NO: 784175 - DNA, 15 bp, Homo sapiens
caagatttctgcttt

SEQ ID NO: 784176 - DNA, 15 bp, Homo sapiens
aagatttctgctttt

SEQ ID NO: 784177 - DNA, 15 bp, Homo sapiens
agatttctgctttta

SEQ ID NO: 784178 - DNA, 15 bp, Homo sapiens
gatttctgcttttag

SEQ ID NO: 784179 - DNA, 15 bp, Homo sapiens
atttctgcttttaga

SEQ ID NO: 784180 - DNA, 15 bp, Homo sapiens
tttctgcttttagaa

SEQ ID NO: 784181 - DNA, 15 bp, Homo sapiens
ttctgcttttagaat

SEQ ID NO: 784182 - DNA, 15 bp, Homo sapiens
tctgcttttagaata

SEQ ID NO: 784183 - DNA, 15 bp, Homo sapiens
ctgcttttagaatat

SEQ ID NO: 784184 - DNA, 15 bp, Homo sapiens
tgcttttagaatatc

SEQ ID NO: 784185 - DNA, 15 bp, Homo sapiens
gcttttagaatatcc

SEQ ID NO: 784186 - DNA, 15 bp, Homo sapiens
cttttagaatatcca

SEQ ID NO: 784187 - DNA, 15 bp, Homo sapiens
ttttagaatatccac

SEQ ID NO: 784188 - DNA, 15 bp, Homo sapiens
tttagaatatccact

SEQ ID NO: 784189 - DNA, 15 bp, Homo sapiens
ttagaatatccactc

SEQ ID NO: 784190 - DNA, 15 bp, Homo sapiens
tagaatatccactct

SEQ ID NO: 784191 - DNA, 15 bp, Homo sapiens
agaatatccactctg

SEQ ID NO: 784192 - DNA, 15 bp, Homo sapiens
gaatatccactctgt

SEQ ID NO: 784193 - DNA, 15 bp, Homo sapiens
aatatccactctgta

SEQ ID NO: 784194 - DNA, 15 bp, Homo sapiens
atatccactctgtaa

SEQ ID NO: 784195 - DNA, 15 bp, Homo sapiens
tatccactctgtaaa

SEQ ID NO: 784196 - DNA, 15 bp, Homo sapiens
atccactctgtaaaa

SEQ ID NO: 784197 - DNA, 15 bp, Homo sapiens
tccactctgtaaaac

SEQ ID NO: 784198 - DNA, 15 bp, Homo sapiens
ccactctgtaaaact

SEQ ID NO: 784199 - DNA, 15 bp, Homo sapiens
cactctgtaaaactc

SEQ ID NO: 784200 - DNA, 15 bp, Homo sapiens
actctgtaaaactcc

SEQ ID NO: 784201 - DNA, 15 bp, Homo sapiens
ctctgtaaaactcca

SEQ ID NO: 784202 - DNA, 15 bp, Homo sapiens
tctgtaaaactccaa

SEQ ID NO: 784203 - DNA, 15 bp, Homo sapiens
ctgtaaaactccaat

SEQ ID NO: 784204 - DNA, 15 bp, Homo sapiens
tgtaaaactccaatg

SEQ ID NO: 784205 - DNA, 15 bp, Homo sapiens
gtaaaactccaatga

SEQ ID NO: 784206 - DNA, 15 bp, Homo sapiens
taaaactccaatgaa

SEQ ID NO: 784207 - DNA, 15 bp, Homo sapiens
aaaactccaatgaat

SEQ ID NO: 784208 - DNA, 15 bp, Homo sapiens
aaactccaatgaata

SEQ ID NO: 784209 - DNA, 15 bp, Homo sapiens
aactccaatgaataa

SEQ ID NO: 784210 - DNA, 15 bp, Homo sapiens
actccaatgaataaa

SEQ ID NO: 784211 - DNA, 15 bp, Homo sapiens
ctccaatgaataaaa

SEQ ID NO: 784212 - DNA, 15 bp, Homo sapiens
tccaatgaataaaat

SEQ ID NO: 784213 - DNA, 15 bp, Homo sapiens
ccaatgaataaaata

SEQ ID NO: 784214 - DNA, 15 bp, Homo sapiens
caatgaataaaatat

SEQ ID NO: 784215 - DNA, 15 bp, Homo sapiens
aatgaataaaatatt

SEQ ID NO: 784216 - DNA, 15 bp, Homo sapiens
atgaataaaatatta

SEQ ID NO: 784217 - DNA, 15 bp, Homo sapiens
tgaataaaatattaa

SEQ ID NO: 784218 - DNA, 15 bp, Homo sapiens
gaataaaatattaaa

SEQ ID NO: 784219 - DNA, 15 bp, Homo sapiens
aataaaatattaaat

SEQ ID NO: 784220 - DNA, 15 bp, Homo sapiens
ataaaatattaaatt

SEQ ID NO: 784221 - DNA, 15 bp, Homo sapiens
taaaatattaaattg

SEQ ID NO: 784222 - DNA, 15 bp, Homo sapiens
aaaatattaaattgt

SEQ ID NO: 784223 - DNA, 15 bp, Homo sapiens
aaatattaaattgtt

SEQ ID NO: 784224 - DNA, 15 bp, Homo sapiens
aatattaaattgttg

SEQ ID NO: 784225 - DNA, 15 bp, Homo sapiens
atattaaattgttga

SEQ ID NO: 784226 - DNA, 15 bp, Homo sapiens
tattaaattgttgat

SEQ ID NO: 784227 - DNA, 15 bp, Homo sapiens
attaaattgttgatt

SEQ ID NO: 784228 - DNA, 15 bp, Homo sapiens
ttaaattgttgattg

SEQ ID NO: 784229 - DNA, 15 bp, Homo sapiens
taaattgttgattga

SEQ ID NO: 784230 - DNA, 15 bp, Homo sapiens
aaattgttgattgac

SEQ ID NO: 784231 - DNA, 15 bp, Homo sapiens
aattgttgattgact

SEQ ID NO: 784232 - DNA, 15 bp, Homo sapiens
attgttgattgacta

SEQ ID NO: 784233 - DNA, 15 bp, Homo sapiens
ttgttgattgactaa

SEQ ID NO: 784234 - DNA, 15 bp, Homo sapiens
tgttgattgactaat

SEQ ID NO: 784235 - DNA, 15 bp, Homo sapiens
gttgattgactaata

SEQ ID NO: 784236 - DNA, 15 bp, Homo sapiens
ttgattgactaataa

SEQ ID NO: 784237 - DNA, 15 bp, Homo sapiens
tgattgactaataag

SEQ ID NO: 784238 - DNA, 15 bp, Homo sapiens
gattgactaataaga

SEQ ID NO: 784239 - DNA, 15 bp, Homo sapiens
attgactaataagaa

SEQ ID NO: 784240 - DNA, 15 bp, Homo sapiens
ttgactaataagaac

SEQ ID NO: 784241 - DNA, 15 bp, Homo sapiens
tgactaataagaacc

SEQ ID NO: 784242 - DNA, 15 bp, Homo sapiens
gactaataagaaccc

SEQ ID NO: 784243 - DNA, 15 bp, Homo sapiens
actaataagaaccca

SEQ ID NO: 784244 - DNA, 15 bp, Homo sapiens
ctaataagaacccag

SEQ ID NO: 784245 - DNA, 15 bp, Homo sapiens
taataagaacccaga

SEQ ID NO: 784246 - DNA, 15 bp, Homo sapiens
aataagaacccagaa

SEQ ID NO: 784247 - DNA, 15 bp, Homo sapiens
ataagaacccagaac

SEQ ID NO: 784248 - DNA, 15 bp, Homo sapiens
taagaacccagaact

SEQ ID NO: 784249 - DNA, 15 bp, Homo sapiens
aagaacccagaactc

SEQ ID NO: 784250 - DNA, 15 bp, Homo sapiens
agaacccagaactct

SEQ ID NO: 784251 - DNA, 15 bp, Homo sapiens
gaacccagaactctg

SEQ ID NO: 784252 - DNA, 15 bp, Homo sapiens
aacccagaactctga

SEQ ID NO: 784253 - DNA, 15 bp, Homo sapiens
acccagaactctgat

SEQ ID NO: 784254 - DNA, 15 bp, Homo sapiens
cccagaactctgata

SEQ ID NO: 784255 - DNA, 15 bp, Homo sapiens
ccagaactctgataa

SEQ ID NO: 784256 - DNA, 15 bp, Homo sapiens
cagaactctgataat

SEQ ID NO: 784257 - DNA, 15 bp, Homo sapiens
agaactctgataatt

SEQ ID NO: 784258 - DNA, 15 bp, Homo sapiens
gaactctgataatta

SEQ ID NO: 784259 - DNA, 15 bp, Homo sapiens
aactctgataattaa

SEQ ID NO: 784260 - DNA, 15 bp, Homo sapiens
actctgataattaag

SEQ ID NO: 784261 - DNA, 15 bp, Homo sapiens
ctctgataattaagt

SEQ ID NO: 784262 - DNA, 15 bp, Homo sapiens
tctgataattaagta

SEQ ID NO: 784263 - DNA, 15 bp, Homo sapiens
ctgataattaagtaa

SEQ ID NO: 784264 - DNA, 15 bp, Homo sapiens
tgataattaagtaaa

SEQ ID NO: 784265 - DNA, 15 bp, Homo sapiens
gataattaagtaaac

SEQ ID NO: 784266 - DNA, 15 bp, Homo sapiens
ataattaagtaaacc

SEQ ID NO: 784267 - DNA, 15 bp, Homo sapiens
taattaagtaaacct

SEQ ID NO: 784268 - DNA, 15 bp, Homo sapiens
aattaagtaaacctt

SEQ ID NO: 784269 - DNA, 15 bp, Homo sapiens
attaagtaaaccttt

SEQ ID NO: 784270 - DNA, 15 bp, Homo sapiens
ttaagtaaaccttta

SEQ ID NO: 784271 - DNA, 15 bp, Homo sapiens
taagtaaacctttat

SEQ ID NO: 784272 - DNA, 15 bp, Homo sapiens
aagtaaacctttatc

SEQ ID NO: 784273 - DNA, 15 bp, Homo sapiens
agtaaacctttatca

SEQ ID NO: 784274 - DNA, 15 bp, Homo sapiens
gtaaacctttatcac

SEQ ID NO: 784275 - DNA, 15 bp, Homo sapiens
taaacctttatcaca

SEQ ID NO: 784276 - DNA, 15 bp, Homo sapiens
aaacctttatcacaa

SEQ ID NO: 784277 - DNA, 15 bp, Homo sapiens
aacctttatcacaat

SEQ ID NO: 784278 - DNA, 15 bp, Homo sapiens
acctttatcacaatg

SEQ ID NO: 784279 - DNA, 15 bp, Homo sapiens
cctttatcacaatga

SEQ ID NO: 784280 - DNA, 15 bp, Homo sapiens
ctttatcacaatgaa

SEQ ID NO: 784281 - DNA, 15 bp, Homo sapiens
tttatcacaatgaag

SEQ ID NO: 784282 - DNA, 15 bp, Homo sapiens
ttatcacaatgaagt

SEQ ID NO: 784283 - DNA, 15 bp, Homo sapiens
tatcacaatgaagta

SEQ ID NO: 784284 - DNA, 15 bp, Homo sapiens
atcacaatgaagtat

SEQ ID NO: 784285 - DNA, 15 bp, Homo sapiens
tcacaatgaagtatt

SEQ ID NO: 784286 - DNA, 15 bp, Homo sapiens
cacaatgaagtattt

SEQ ID NO: 784287 - DNA, 15 bp, Homo sapiens
acaatgaagtattta

SEQ ID NO: 784288 - DNA, 15 bp, Homo sapiens
caatgaagtatttat

SEQ ID NO: 784289 - DNA, 15 bp, Homo sapiens
aatgaagtatttatg

SEQ ID NO: 784290 - DNA, 15 bp, Homo sapiens
atgaagtatttatgt

SEQ ID NO: 784291 - DNA, 15 bp, Homo sapiens
tgaagtatttatgtt

SEQ ID NO: 784292 - DNA, 15 bp, Homo sapiens
gaagtatttatgttg

SEQ ID NO: 784293 - DNA, 15 bp, Homo sapiens
aagtatttatgttga

SEQ ID NO: 784294 - DNA, 15 bp, Homo sapiens
agtatttatgttgaa

SEQ ID NO: 784295 - DNA, 15 bp, Homo sapiens
gtatttatgttgaaa

SEQ ID NO: 784296 - DNA, 15 bp, Homo sapiens
tatttatgttgaaat

SEQ ID NO: 784297 - DNA, 15 bp, Homo sapiens
atttatgttgaaatg

SEQ ID NO: 784298 - DNA, 15 bp, Homo sapiens
tttatgttgaaatga

SEQ ID NO: 784299 - DNA, 15 bp, Homo sapiens
ttatgttgaaatgag

SEQ ID NO: 784300 - DNA, 15 bp, Homo sapiens
tatgttgaaatgagt

SEQ ID NO: 784301 - DNA, 15 bp, Homo sapiens
atgttgaaatgagtc

SEQ ID NO: 784302 - DNA, 15 bp, Homo sapiens
tgttgaaatgagtcc

SEQ ID NO: 784303 - DNA, 15 bp, Homo sapiens
gttgaaatgagtccc

SEQ ID NO: 784304 - DNA, 15 bp, Homo sapiens
ttgaaatgagtcccc

SEQ ID NO: 784305 - DNA, 15 bp, Homo sapiens
tgaaatgagtcccct

SEQ ID NO: 784306 - DNA, 15 bp, Homo sapiens
gaaatgagtcccctc

SEQ ID NO: 784307 - DNA, 15 bp, Homo sapiens
aaatgagtcccctca

SEQ ID NO: 784308 - DNA, 15 bp, Homo sapiens
aatgagtcccctcat

SEQ ID NO: 784309 - DNA, 15 bp, Homo sapiens
atgagtcccctcata

SEQ ID NO: 784310 - DNA, 15 bp, Homo sapiens
tgagtcccctcataa

SEQ ID NO: 784311 - DNA, 15 bp, Homo sapiens
gagtcccctcataat

SEQ ID NO: 784312 - DNA, 15 bp, Homo sapiens
agtcccctcataata

SEQ ID NO: 784313 - DNA, 15 bp, Homo sapiens
gtcccctcataataa

SEQ ID NO: 784314 - DNA, 15 bp, Homo sapiens
tcccctcataataat

SEQ ID NO: 784315 - DNA, 15 bp, Homo sapiens
cccctcataataatt

SEQ ID NO: 784316 - DNA, 15 bp, Homo sapiens
ccctcataataattt

SEQ ID NO: 784317 - DNA, 15 bp, Homo sapiens
cctcataataatttg

SEQ ID NO: 784318 - DNA, 15 bp, Homo sapiens
ctcataataatttga

SEQ ID NO: 784319 - DNA, 15 bp, Homo sapiens
tcataataatttgaa

SEQ ID NO: 784320 - DNA, 15 bp, Homo sapiens
cataataatttgaat

SEQ ID NO: 784321 - DNA, 15 bp, Homo sapiens
ataataatttgaatc

SEQ ID NO: 784322 - DNA, 15 bp, Homo sapiens
taataatttgaatca

SEQ ID NO: 784323 - DNA, 15 bp, Homo sapiens
aataatttgaatcat

SEQ ID NO: 784324 - DNA, 15 bp, Homo sapiens
ataatttgaatcatg

SEQ ID NO: 784325 - DNA, 15 bp, Homo sapiens
taatttgaatcatga

SEQ ID NO: 784326 - DNA, 15 bp, Homo sapiens
aatttgaatcatgat

SEQ ID NO: 784327 - DNA, 15 bp, Homo sapiens
atttgaatcatgatt

SEQ ID NO: 784328 - DNA, 15 bp, Homo sapiens
tttgaatcatgattt

SEQ ID NO: 784329 - DNA, 15 bp, Homo sapiens
ttgaatcatgatttt

SEQ ID NO: 784330 - DNA, 15 bp, Homo sapiens
tgaatcatgattttt

SEQ ID NO: 784331 - DNA, 15 bp, Homo sapiens
gaatcatgattttta

SEQ ID NO: 784332 - DNA, 15 bp, Homo sapiens
aatcatgatttttaa

SEQ ID NO: 784333 - DNA, 15 bp, Homo sapiens
atcatgatttttaaa

SEQ ID NO: 784334 - DNA, 15 bp, Homo sapiens
tcatgatttttaaaa

SEQ ID NO: 784335 - DNA, 15 bp, Homo sapiens
catgatttttaaaaa

SEQ ID NO: 784336 - DNA, 15 bp, Homo sapiens
tgatttttaaaaata

SEQ ID NO: 784337 - DNA, 15 bp, Homo sapiens
gatttttaaaaatat

SEQ ID NO: 784338 - DNA, 15 bp, Homo sapiens
atttttaaaaatata

SEQ ID NO: 784339 - DNA, 15 bp, Homo sapiens
tttttaaaaatatat

SEQ ID NO: 784340 - DNA, 15 bp, Homo sapiens
ttttaaaaatatatc

SEQ ID NO: 784341 - DNA, 15 bp, Homo sapiens
tttaaaaatatatcg

SEQ ID NO: 784342 - DNA, 15 bp, Homo sapiens
ttaaaaatatatcga

SEQ ID NO: 784343 - DNA, 15 bp, Homo sapiens
taaaaatatatcgaa

SEQ ID NO: 784344 - DNA, 15 bp, Homo sapiens
aaaaatatatcgaag

SEQ ID NO: 784345 - DNA, 15 bp, Homo sapiens
aaaatatatcgaagt

SEQ ID NO: 784346 - DNA, 15 bp, Homo sapiens
aaatatatcgaagtt

SEQ ID NO: 784347 - DNA, 15 bp, Homo sapiens
aatatatcgaagttg

SEQ ID NO: 784348 - DNA, 15 bp, Homo sapiens
atatatcgaagttgg

SEQ ID NO: 784349 - DNA, 15 bp, Homo sapiens
tatatcgaagttggt

SEQ ID NO: 784350 - DNA, 15 bp, Homo sapiens
atatcgaagttggtt

SEQ ID NO: 784351 - DNA, 15 bp, Homo sapiens
tatcgaagttggttt

SEQ ID NO: 784352 - DNA, 15 bp, Homo sapiens
atcgaagttggtttt

SEQ ID NO: 784353 - DNA, 15 bp, Homo sapiens
tcgaagttggtttta

SEQ ID NO: 784354 - DNA, 15 bp, Homo sapiens
cgaagttggttttat

SEQ ID NO: 784355 - DNA, 15 bp, Homo sapiens
gaagttggttttata

SEQ ID NO: 784356 - DNA, 15 bp, Homo sapiens
aagttggttttatat

SEQ ID NO: 784357 - DNA, 15 bp, Homo sapiens
agttggttttatata

SEQ ID NO: 784358 - DNA, 15 bp, Homo sapiens
gttggttttatatat

SEQ ID NO: 784359 - DNA, 15 bp, Homo sapiens
ttggttttatatatt

SEQ ID NO: 784360 - DNA, 15 bp, Homo sapiens
tggttttatatattt

SEQ ID NO: 784361 - DNA, 15 bp, Homo sapiens
ggttttatatatttt

SEQ ID NO: 784362 - DNA, 15 bp, Homo sapiens
gttttatatatttta

SEQ ID NO: 784363 - DNA, 15 bp, Homo sapiens
ttttatatattttaa

SEQ ID NO: 784364 - DNA, 15 bp, Homo sapiens
tttatatattttaaa

SEQ ID NO: 784365 - DNA, 15 bp, Homo sapiens
ttatatattttaaag

SEQ ID NO: 784366 - DNA, 15 bp, Homo sapiens
tatatattttaaaga

SEQ ID NO: 784367 - DNA, 15 bp, Homo sapiens
atatattttaaagaa

SEQ ID NO: 784368 - DNA, 15 bp, Homo sapiens
tatattttaaagaaa

SEQ ID NO: 784369 - DNA, 15 bp, Homo sapiens
atattttaaagaaat

SEQ ID NO: 784370 - DNA, 15 bp, Homo sapiens
tattttaaagaaata

SEQ ID NO: 784371 - DNA, 15 bp, Homo sapiens
attttaaagaaatat

SEQ ID NO: 784372 - DNA, 15 bp, Homo sapiens
ttttaaagaaatatg

SEQ ID NO: 784373 - DNA, 15 bp, Homo sapiens
tttaaagaaatatga

SEQ ID NO: 784374 - DNA, 15 bp, Homo sapiens
ttaaagaaatatgaa

SEQ ID NO: 784375 - DNA, 15 bp, Homo sapiens
taaagaaatatgaat

SEQ ID NO: 784376 - DNA, 15 bp, Homo sapiens
aaagaaatatgaatc

SEQ ID NO: 784377 - DNA, 15 bp, Homo sapiens
aagaaatatgaatct

SEQ ID NO: 784378 - DNA, 15 bp, Homo sapiens
agaaatatgaatctt

SEQ ID NO: 784379 - DNA, 15 bp, Homo sapiens
gaaatatgaatctta

SEQ ID NO: 784380 - DNA, 15 bp, Homo sapiens
aaatatgaatcttat

SEQ ID NO: 784381 - DNA, 15 bp, Homo sapiens
aatatgaatcttata

SEQ ID NO: 784382 - DNA, 15 bp, Homo sapiens
atatgaatcttatat

SEQ ID NO: 784383 - DNA, 15 bp, Homo sapiens
tatgaatcttatatg

SEQ ID NO: 784384 - DNA, 15 bp, Homo sapiens
atgaatcttatatga

SEQ ID NO: 784385 - DNA, 15 bp, Homo sapiens
tgaatcttatatgaa

SEQ ID NO: 784386 - DNA, 15 bp, Homo sapiens
gaatcttatatgaag

SEQ ID NO: 784387 - DNA, 15 bp, Homo sapiens
aatcttatatgaagc

SEQ ID NO: 784388 - DNA, 15 bp, Homo sapiens
atcttatatgaagct

SEQ ID NO: 784389 - DNA, 15 bp, Homo sapiens
tcttatatgaagcta

SEQ ID NO: 784390 - DNA, 15 bp, Homo sapiens
cttatatgaagctaa

SEQ ID NO: 784391 - DNA, 15 bp, Homo sapiens
ttatatgaagctaat

SEQ ID NO: 784392 - DNA, 15 bp, Homo sapiens
tatatgaagctaatg

SEQ ID NO: 784393 - DNA, 15 bp, Homo sapiens
atatgaagctaatga

SEQ ID NO: 784394 - DNA, 15 bp, Homo sapiens
tatgaagctaatgaa

SEQ ID NO: 784395 - DNA, 15 bp, Homo sapiens
atgaagctaatgaag

SEQ ID NO: 784396 - DNA, 15 bp, Homo sapiens
tgaagctaatgaagt

SEQ ID NO: 784397 - DNA, 15 bp, Homo sapiens
gaagctaatgaagtt

SEQ ID NO: 784398 - DNA, 15 bp, Homo sapiens
aagctaatgaagttc

SEQ ID NO: 784399 - DNA, 15 bp, Homo sapiens
agctaatgaagttct

SEQ ID NO: 784400 - DNA, 15 bp, Homo sapiens
gctaatgaagttctt

SEQ ID NO: 784401 - DNA, 15 bp, Homo sapiens
ctaatgaagttcttg

SEQ ID NO: 784402 - DNA, 15 bp, Homo sapiens
taatgaagttcttgg

SEQ ID NO: 784403 - DNA, 15 bp, Homo sapiens
aatgaagttcttggt

SEQ ID NO: 784404 - DNA, 15 bp, Homo sapiens
atgaagttcttggtt

SEQ ID NO: 784405 - DNA, 15 bp, Homo sapiens
tgaagttcttggttg

SEQ ID NO: 784406 - DNA, 15 bp, Homo sapiens
gaagttcttggttga

SEQ ID NO: 784407 - DNA, 15 bp, Homo sapiens
aagttcttggttgag

SEQ ID NO: 784408 - DNA, 15 bp, Homo sapiens
agttcttggttgagt

SEQ ID NO: 784409 - DNA, 15 bp, Homo sapiens
gttcttggttgagtt

SEQ ID NO: 784410 - DNA, 15 bp, Homo sapiens
ttcttggttgagtta

SEQ ID NO: 784411 - DNA, 15 bp, Homo sapiens
tcttggttgagttag

SEQ ID NO: 784412 - DNA, 15 bp, Homo sapiens
cttggttgagttagc

SEQ ID NO: 784413 - DNA, 15 bp, Homo sapiens
ttggttgagttagca

SEQ ID NO: 784414 - DNA, 15 bp, Homo sapiens
tggttgagttagcat

SEQ ID NO: 784415 - DNA, 15 bp, Homo sapiens
ggttgagttagcatg

SEQ ID NO: 784416 - DNA, 15 bp, Homo sapiens
gttgagttagcatga

SEQ ID NO: 784417 - DNA, 15 bp, Homo sapiens
ttgagttagcatgaa

SEQ ID NO: 784418 - DNA, 15 bp, Homo sapiens
tgagttagcatgaag

SEQ ID NO: 784419 - DNA, 15 bp, Homo sapiens
gagttagcatgaagg

SEQ ID NO: 784420 - DNA, 15 bp, Homo sapiens
agttagcatgaaggc

SEQ ID NO: 784421 - DNA, 15 bp, Homo sapiens
gttagcatgaaggcc

SEQ ID NO: 784422 - DNA, 15 bp, Homo sapiens
ttagcatgaaggcct

SEQ ID NO: 784423 - DNA, 15 bp, Homo sapiens
tagcatgaaggcctt

SEQ ID NO: 784424 - DNA, 15 bp, Homo sapiens
agcatgaaggcctta

SEQ ID NO: 784425 - DNA, 15 bp, Homo sapiens
gcatgaaggccttat

SEQ ID NO: 784426 - DNA, 15 bp, Homo sapiens
catgaaggccttatc

SEQ ID NO: 784427 - DNA, 15 bp, Homo sapiens
atgaaggccttatct

SEQ ID NO: 784428 - DNA, 15 bp, Homo sapiens
tgaaggccttatctc

SEQ ID NO: 784429 - DNA, 15 bp, Homo sapiens
gaaggccttatctcc

SEQ ID NO: 784430 - DNA, 15 bp, Homo sapiens
aaggccttatctcct

SEQ ID NO: 784431 - DNA, 15 bp, Homo sapiens
aggccttatctcctt

SEQ ID NO: 784432 - DNA, 15 bp, Homo sapiens
ggccttatctccttt

SEQ ID NO: 784433 - DNA, 15 bp, Homo sapiens
gccttatctccttta

SEQ ID NO: 784434 - DNA, 15 bp, Homo sapiens
ccttatctcctttat

SEQ ID NO: 784435 - DNA, 15 bp, Homo sapiens
cttatctcctttatg

SEQ ID NO: 784436 - DNA, 15 bp, Homo sapiens
ttatctcctttatga

SEQ ID NO: 784437 - DNA, 15 bp, Homo sapiens
tatctcctttatgat

SEQ ID NO: 784438 - DNA, 15 bp, Homo sapiens
atctcctttatgata

SEQ ID NO: 784439 - DNA, 15 bp, Homo sapiens
tctcctttatgatat

SEQ ID NO: 784440 - DNA, 15 bp, Homo sapiens
ctcctttatgatatt

SEQ ID NO: 784441 - DNA, 15 bp, Homo sapiens
tcctttatgatattc

SEQ ID NO: 784442 - DNA, 15 bp, Homo sapiens
cctttatgatattca

SEQ ID NO: 784443 - DNA, 15 bp, Homo sapiens
ctttatgatattcaa

SEQ ID NO: 784444 - DNA, 15 bp, Homo sapiens
tttatgatattcaaa

SEQ ID NO: 784445 - DNA, 15 bp, Homo sapiens
ttatgatattcaaag

SEQ ID NO: 784446 - DNA, 15 bp, Homo sapiens
tatgatattcaaagt

SEQ ID NO: 784447 - DNA, 15 bp, Homo sapiens
atgatattcaaagta

SEQ ID NO: 784448 - DNA, 15 bp, Homo sapiens
tgatattcaaagtag

SEQ ID NO: 784449 - DNA, 15 bp, Homo sapiens
gatattcaaagtaga

SEQ ID NO: 784450 - DNA, 15 bp, Homo sapiens
atattcaaagtagaa

SEQ ID NO: 784451 - DNA, 15 bp, Homo sapiens
tattcaaagtagaaa

SEQ ID NO: 784452 - DNA, 15 bp, Homo sapiens
attcaaagtagaaat

SEQ ID NO: 784453 - DNA, 15 bp, Homo sapiens
ttcaaagtagaaatt

SEQ ID NO: 784454 - DNA, 15 bp, Homo sapiens
tcaaagtagaaattg

SEQ ID NO: 784455 - DNA, 15 bp, Homo sapiens
caaagtagaaattgg

SEQ ID NO: 784456 - DNA, 15 bp, Homo sapiens
aaagtagaaattgga

SEQ ID NO: 784457 - DNA, 15 bp, Homo sapiens
aagtagaaattggaa

SEQ ID NO: 784458 - DNA, 15 bp, Homo sapiens
agtagaaattggaat

SEQ ID NO: 784459 - DNA, 15 bp, Homo sapiens
gtagaaattggaatt

SEQ ID NO: 784460 - DNA, 15 bp, Homo sapiens
tagaaattggaattt

SEQ ID NO: 784461 - DNA, 15 bp, Homo sapiens
agaaattggaattta

SEQ ID NO: 784462 - DNA, 15 bp, Homo sapiens
gaaattggaatttac

SEQ ID NO: 784463 - DNA, 15 bp, Homo sapiens
aaattggaatttact

SEQ ID NO: 784464 - DNA, 15 bp, Homo sapiens
aattggaatttactg

SEQ ID NO: 784465 - DNA, 15 bp, Homo sapiens
attggaatttactgg

SEQ ID NO: 784466 - DNA, 15 bp, Homo sapiens
ttggaatttactgga

SEQ ID NO: 784467 - DNA, 15 bp, Homo sapiens
tggaatttactggat

SEQ ID NO: 784468 - DNA, 15 bp, Homo sapiens
ggaatttactggatt

SEQ ID NO: 784469 - DNA, 15 bp, Homo sapiens
gaatttactggattc

SEQ ID NO: 784470 - DNA, 15 bp, Homo sapiens
aatttactggattca

SEQ ID NO: 784471 - DNA, 15 bp, Homo sapiens
atttactggattcag

SEQ ID NO: 784472 - DNA, 15 bp, Homo sapiens
tttactggattcaga

SEQ ID NO: 784473 - DNA, 15 bp, Homo sapiens
ttactggattcagat

SEQ ID NO: 784474 - DNA, 15 bp, Homo sapiens
tactggattcagatg

SEQ ID NO: 784475 - DNA, 15 bp, Homo sapiens
actggattcagatga

SEQ ID NO: 784476 - DNA, 15 bp, Homo sapiens
ctggattcagatgat

SEQ ID NO: 784477 - DNA, 15 bp, Homo sapiens
tggattcagatgatt

SEQ ID NO: 784478 - DNA, 15 bp, Homo sapiens
ggattcagatgatta

SEQ ID NO: 784479 - DNA, 15 bp, Homo sapiens
gattcagatgattaa

SEQ ID NO: 784480 - DNA, 15 bp, Homo sapiens
attcagatgattaat

SEQ ID NO: 784481 - DNA, 15 bp, Homo sapiens
ttcagatgattaatg

SEQ ID NO: 784482 - DNA, 15 bp, Homo sapiens
tcagatgattaatga

SEQ ID NO: 784483 - DNA, 15 bp, Homo sapiens
cagatgattaatgaa

SEQ ID NO: 784484 - DNA, 15 bp, Homo sapiens
agatgattaatgaat

SEQ ID NO: 784485 - DNA, 15 bp, Homo sapiens
gatgattaatgaata

SEQ ID NO: 784486 - DNA, 15 bp, Homo sapiens
atgattaatgaatat

SEQ ID NO: 784487 - DNA, 15 bp, Homo sapiens
tgattaatgaatata

SEQ ID NO: 784488 - DNA, 15 bp, Homo sapiens
gattaatgaatatat

SEQ ID NO: 784489 - DNA, 15 bp, Homo sapiens
attaatgaatatatt

SEQ ID NO: 784490 - DNA, 15 bp, Homo sapiens
ttaatgaatatattt

SEQ ID NO: 784491 - DNA, 15 bp, Homo sapiens
taatgaatatatttt

SEQ ID NO: 784492 - DNA, 15 bp, Homo sapiens
aatgaatatatttta

SEQ ID NO: 784493 - DNA, 15 bp, Homo sapiens
atgaatatattttag

SEQ ID NO: 784494 - DNA, 15 bp, Homo sapiens
tgaatatattttagt

SEQ ID NO: 784495 - DNA, 15 bp, Homo sapiens
gaatatattttagtg

SEQ ID NO: 784496 - DNA, 15 bp, Homo sapiens
aatatattttagtga

SEQ ID NO: 784497 - DNA, 15 bp, Homo sapiens
atatattttagtgac

SEQ ID NO: 784498 - DNA, 15 bp, Homo sapiens
tatattttagtgact

SEQ ID NO: 784499 - DNA, 15 bp, Homo sapiens
atattttagtgactt

SEQ ID NO: 784500 - DNA, 15 bp, Homo sapiens
tattttagtgacttt

SEQ ID NO: 784501 - DNA, 15 bp, Homo sapiens
attttagtgactttt

SEQ ID NO: 784502 - DNA, 15 bp, Homo sapiens
ttttagtgactttta

SEQ ID NO: 784503 - DNA, 15 bp, Homo sapiens
tttagtgacttttat

SEQ ID NO: 784504 - DNA, 15 bp, Homo sapiens
ttagtgacttttatt

SEQ ID NO: 784505 - DNA, 15 bp, Homo sapiens
tagtgacttttattt

SEQ ID NO: 784506 - DNA, 15 bp, Homo sapiens
agtgacttttatttg

SEQ ID NO: 784507 - DNA, 15 bp, Homo sapiens
gtgacttttatttgc

SEQ ID NO: 784508 - DNA, 15 bp, Homo sapiens
tgacttttatttgcc

SEQ ID NO: 784509 - DNA, 15 bp, Homo sapiens
gacttttatttgcct

SEQ ID NO: 784510 - DNA, 15 bp, Homo sapiens
acttttatttgccta

SEQ ID NO: 784511 - DNA, 15 bp, Homo sapiens
cttttatttgcctat

SEQ ID NO: 784512 - DNA, 15 bp, Homo sapiens
ttttatttgcctatt

SEQ ID NO: 784513 - DNA, 15 bp, Homo sapiens
tttatttgcctattt

SEQ ID NO: 784514 - DNA, 15 bp, Homo sapiens
ttatttgcctattta

SEQ ID NO: 784515 - DNA, 15 bp, Homo sapiens
tatttgcctatttat

SEQ ID NO: 784516 - DNA, 15 bp, Homo sapiens
atttgcctatttata

SEQ ID NO: 784517 - DNA, 15 bp, Homo sapiens
tttgcctatttatag

SEQ ID NO: 784518 - DNA, 15 bp, Homo sapiens
ttgcctatttatagg

SEQ ID NO: 784519 - DNA, 15 bp, Homo sapiens
tgcctatttataggt

SEQ ID NO: 784520 - DNA, 15 bp, Homo sapiens
gcctatttataggtt

SEQ ID NO: 784521 - DNA, 15 bp, Homo sapiens
cctatttataggtta

SEQ ID NO: 784522 - DNA, 15 bp, Homo sapiens
ctatttataggttaa

SEQ ID NO: 784523 - DNA, 15 bp, Homo sapiens
tatttataggttaac

SEQ ID NO: 784524 - DNA, 15 bp, Homo sapiens
atttataggttaact

SEQ ID NO: 784525 - DNA, 15 bp, Homo sapiens
tttataggttaacta

SEQ ID NO: 784526 - DNA, 15 bp, Homo sapiens
ttataggttaactag

SEQ ID NO: 784527 - DNA, 15 bp, Homo sapiens
tataggttaactagc

SEQ ID NO: 784528 - DNA, 15 bp, Homo sapiens
ataggttaactagca

SEQ ID NO: 784529 - DNA, 15 bp, Homo sapiens
taggttaactagcat

SEQ ID NO: 784530 - DNA, 15 bp, Homo sapiens
aggttaactagcatc

SEQ ID NO: 784531 - DNA, 15 bp, Homo sapiens
ggttaactagcatcg

SEQ ID NO: 784532 - DNA, 15 bp, Homo sapiens
gttaactagcatcga

SEQ ID NO: 784533 - DNA, 15 bp, Homo sapiens
ttaactagcatcgaa

SEQ ID NO: 784534 - DNA, 15 bp, Homo sapiens
taactagcatcgaat

SEQ ID NO: 784535 - DNA, 15 bp, Homo sapiens
aactagcatcgaatg

SEQ ID NO: 784536 - DNA, 15 bp, Homo sapiens
actagcatcgaatgg

SEQ ID NO: 784537 - DNA, 15 bp, Homo sapiens
ctagcatcgaatggg

SEQ ID NO: 784538 - DNA, 15 bp, Homo sapiens
tagcatcgaatgggg

SEQ ID NO: 784539 - DNA, 15 bp, Homo sapiens
agcatcgaatggggt

SEQ ID NO: 784540 - DNA, 15 bp, Homo sapiens
gcatcgaatggggtc

SEQ ID NO: 784541 - DNA, 15 bp, Homo sapiens
catcgaatggggtca

SEQ ID NO: 784542 - DNA, 15 bp, Homo sapiens
atcgaatggggtcat

SEQ ID NO: 784543 - DNA, 15 bp, Homo sapiens
tcgaatggggtcatg

SEQ ID NO: 784544 - DNA, 15 bp, Homo sapiens
cgaatggggtcatgg

SEQ ID NO: 784545 - DNA, 15 bp, Homo sapiens
gaatggggtcatggc

SEQ ID NO: 784546 - DNA, 15 bp, Homo sapiens
aatggggtcatggcc

SEQ ID NO: 784547 - DNA, 15 bp, Homo sapiens
atggggtcatggcct

SEQ ID NO: 784548 - DNA, 15 bp, Homo sapiens
tggggtcatggcctt

SEQ ID NO: 784549 - DNA, 15 bp, Homo sapiens
ggggtcatggccttg

SEQ ID NO: 784550 - DNA, 15 bp, Homo sapiens
gggtcatggccttgg

SEQ ID NO: 784551 - DNA, 15 bp, Homo sapiens
ggtcatggccttggc

SEQ ID NO: 784552 - DNA, 15 bp, Homo sapiens
gtcatggccttggct

SEQ ID NO: 784553 - DNA, 15 bp, Homo sapiens
tcatggccttggcta

SEQ ID NO: 784554 - DNA, 15 bp, Homo sapiens
catggccttggctat

SEQ ID NO: 784555 - DNA, 15 bp, Homo sapiens
atggccttggctatt

SEQ ID NO: 784556 - DNA, 15 bp, Homo sapiens
tggccttggctattg

SEQ ID NO: 784557 - DNA, 15 bp, Homo sapiens
ggccttggctattgg

SEQ ID NO: 784558 - DNA, 15 bp, Homo sapiens
gccttggctattgga

SEQ ID NO: 784559 - DNA, 15 bp, Homo sapiens
ccttggctattggag

SEQ ID NO: 784560 - DNA, 15 bp, Homo sapiens
cttggctattggagt

SEQ ID NO: 784561 - DNA, 15 bp, Homo sapiens
ttggctattggagtc

SEQ ID NO: 784562 - DNA, 15 bp, Homo sapiens
tggctattggagtct

SEQ ID NO: 784563 - DNA, 15 bp, Homo sapiens
ggctattggagtcta

SEQ ID NO: 784564 - DNA, 15 bp, Homo sapiens
gctattggagtctag

SEQ ID NO: 784565 - DNA, 15 bp, Homo sapiens
ctattggagtctaga

SEQ ID NO: 784566 - DNA, 15 bp, Homo sapiens
tattggagtctagat

SEQ ID NO: 784567 - DNA, 15 bp, Homo sapiens
attggagtctagatg

SEQ ID NO: 784568 - DNA, 15 bp, Homo sapiens
ttggagtctagatgt

SEQ ID NO: 784569 - DNA, 15 bp, Homo sapiens
tggagtctagatgtg

SEQ ID NO: 784570 - DNA, 15 bp, Homo sapiens
ggagtctagatgtgt

SEQ ID NO: 784571 - DNA, 15 bp, Homo sapiens
gagtctagatgtgtg

SEQ ID NO: 784572 - DNA, 15 bp, Homo sapiens
agtctagatgtgtgt

SEQ ID NO: 784573 - DNA, 15 bp, Homo sapiens
gtctagatgtgtgtt

SEQ ID NO: 784574 - DNA, 15 bp, Homo sapiens
tctagatgtgtgttc

SEQ ID NO: 784575 - DNA, 15 bp, Homo sapiens
ctagatgtgtgttcc

SEQ ID NO: 784576 - DNA, 15 bp, Homo sapiens
tagatgtgtgttcca

SEQ ID NO: 784577 - DNA, 15 bp, Homo sapiens
agatgtgtgttccat

SEQ ID NO: 784578 - DNA, 15 bp, Homo sapiens
gatgtgtgttccatc

SEQ ID NO: 784579 - DNA, 15 bp, Homo sapiens
atgtgtgttccatct

SEQ ID NO: 784580 - DNA, 15 bp, Homo sapiens
tgtgtgttccatctg

SEQ ID NO: 784581 - DNA, 15 bp, Homo sapiens
gtgtgttccatctga

SEQ ID NO: 784582 - DNA, 15 bp, Homo sapiens
tgtgttccatctgag

SEQ ID NO: 784583 - DNA, 15 bp, Homo sapiens
gtgttccatctgaga

SEQ ID NO: 784584 - DNA, 15 bp, Homo sapiens
tgttccatctgagaa

SEQ ID NO: 784585 - DNA, 15 bp, Homo sapiens
gttccatctgagaaa

SEQ ID NO: 784586 - DNA, 15 bp, Homo sapiens
ttccatctgagaaaa

SEQ ID NO: 784587 - DNA, 15 bp, Homo sapiens
tccatctgagaaaat

SEQ ID NO: 784588 - DNA, 15 bp, Homo sapiens
ccatctgagaaaata

SEQ ID NO: 784589 - DNA, 15 bp, Homo sapiens
catctgagaaaatac

SEQ ID NO: 784590 - DNA, 15 bp, Homo sapiens
atctgagaaaatact

SEQ ID NO: 784591 - DNA, 15 bp, Homo sapiens
tctgagaaaatactt

SEQ ID NO: 784592 - DNA, 15 bp, Homo sapiens
ctgagaaaatacttt

SEQ ID NO: 784593 - DNA, 15 bp, Homo sapiens
tgagaaaatactttg

SEQ ID NO: 784594 - DNA, 15 bp, Homo sapiens
gagaaaatactttgt

SEQ ID NO: 784595 - DNA, 15 bp, Homo sapiens
agaaaatactttgtt

SEQ ID NO: 784596 - DNA, 15 bp, Homo sapiens
gaaaatactttgttt

SEQ ID NO: 784597 - DNA, 15 bp, Homo sapiens
aaaatactttgttta

SEQ ID NO: 784598 - DNA, 15 bp, Homo sapiens
aaatactttgtttag

SEQ ID NO: 784599 - DNA, 15 bp, Homo sapiens
aatactttgtttagt

SEQ ID NO: 784600 - DNA, 15 bp, Homo sapiens
atactttgtttagtg

SEQ ID NO: 784601 - DNA, 15 bp, Homo sapiens
tactttgtttagtgt

SEQ ID NO: 784602 - DNA, 15 bp, Homo sapiens
actttgtttagtgtg

SEQ ID NO: 784603 - DNA, 15 bp, Homo sapiens
ctttgtttagtgtgt

SEQ ID NO: 784604 - DNA, 15 bp, Homo sapiens
tttgtttagtgtgta

SEQ ID NO: 784605 - DNA, 15 bp, Homo sapiens
ttgtttagtgtgtat

SEQ ID NO: 784606 - DNA, 15 bp, Homo sapiens
tgtttagtgtgtatt

SEQ ID NO: 784607 - DNA, 15 bp, Homo sapiens
gtttagtgtgtattt

SEQ ID NO: 784608 - DNA, 15 bp, Homo sapiens
tttagtgtgtatttt

SEQ ID NO: 784609 - DNA, 15 bp, Homo sapiens
ttagtgtgtatttta

SEQ ID NO: 784610 - DNA, 15 bp, Homo sapiens
tagtgtgtattttac

SEQ ID NO: 784611 - DNA, 15 bp, Homo sapiens
agtgtgtattttaca

SEQ ID NO: 784612 - DNA, 15 bp, Homo sapiens
gtgtgtattttacat

SEQ ID NO: 784613 - DNA, 15 bp, Homo sapiens
tgtgtattttacatt

SEQ ID NO: 784614 - DNA, 15 bp, Homo sapiens
gtgtattttacatta

SEQ ID NO: 784615 - DNA, 15 bp, Homo sapiens
tgtattttacattac

SEQ ID NO: 784616 - DNA, 15 bp, Homo sapiens
gtattttacattact

SEQ ID NO: 784617 - DNA, 15 bp, Homo sapiens
tattttacattactt

SEQ ID NO: 784618 - DNA, 15 bp, Homo sapiens
attttacattacttg

SEQ ID NO: 784619 - DNA, 15 bp, Homo sapiens
ttttacattacttga

SEQ ID NO: 784620 - DNA, 15 bp, Homo sapiens
tttacattacttgag

SEQ ID NO: 784621 - DNA, 15 bp, Homo sapiens
ttacattacttgagt

SEQ ID NO: 784622 - DNA, 15 bp, Homo sapiens
tacattacttgagtt

SEQ ID NO: 784623 - DNA, 15 bp, Homo sapiens
acattacttgagttt

SEQ ID NO: 784624 - DNA, 15 bp, Homo sapiens
cattacttgagtttc

SEQ ID NO: 784625 - DNA, 15 bp, Homo sapiens
attacttgagtttca

SEQ ID NO: 784626 - DNA, 15 bp, Homo sapiens
ttacttgagtttcag

SEQ ID NO: 784627 - DNA, 15 bp, Homo sapiens
tacttgagtttcaga

SEQ ID NO: 784628 - DNA, 15 bp, Homo sapiens
acttgagtttcagat

SEQ ID NO: 784629 - DNA, 15 bp, Homo sapiens
cttgagtttcagata

SEQ ID NO: 784630 - DNA, 15 bp, Homo sapiens
ttgagtttcagataa

SEQ ID NO: 784631 - DNA, 15 bp, Homo sapiens
tgagtttcagataat

SEQ ID NO: 784632 - DNA, 15 bp, Homo sapiens
gagtttcagataatt

SEQ ID NO: 784633 - DNA, 15 bp, Homo sapiens
agtttcagataattc

SEQ ID NO: 784634 - DNA, 15 bp, Homo sapiens
gtttcagataattca

SEQ ID NO: 784635 - DNA, 15 bp, Homo sapiens
tttcagataattcaa

SEQ ID NO: 784636 - DNA, 15 bp, Homo sapiens
ttcagataattcaac

SEQ ID NO: 784637 - DNA, 15 bp, Homo sapiens
tcagataattcaact

SEQ ID NO: 784638 - DNA, 15 bp, Homo sapiens
cagataattcaactg

SEQ ID NO: 784639 - DNA, 15 bp, Homo sapiens
agataattcaactga

SEQ ID NO: 784640 - DNA, 15 bp, Homo sapiens
gataattcaactgaa

SEQ ID NO: 784641 - DNA, 15 bp, Homo sapiens
ataattcaactgaaa

SEQ ID NO: 784642 - DNA, 15 bp, Homo sapiens
taattcaactgaaat

SEQ ID NO: 784643 - DNA, 15 bp, Homo sapiens
aattcaactgaaatt

SEQ ID NO: 784644 - DNA, 15 bp, Homo sapiens
attcaactgaaattt

SEQ ID NO: 784645 - DNA, 15 bp, Homo sapiens
ttcaactgaaatttt

SEQ ID NO: 784646 - DNA, 15 bp, Homo sapiens
tcaactgaaattttt

SEQ ID NO: 784647 - DNA, 15 bp, Homo sapiens
caactgaaatttttt

SEQ ID NO: 784648 - DNA, 15 bp, Homo sapiens
aactgaaattttttg

SEQ ID NO: 784649 - DNA, 15 bp, Homo sapiens
actgaaattttttgt

SEQ ID NO: 784650 - DNA, 15 bp, Homo sapiens
ctgaaattttttgtt

SEQ ID NO: 784651 - DNA, 15 bp, Homo sapiens
tgaaattttttgtta

SEQ ID NO: 784652 - DNA, 15 bp, Homo sapiens
gaaattttttgttat

SEQ ID NO: 784653 - DNA, 15 bp, Homo sapiens
aaattttttgttata

SEQ ID NO: 784654 - DNA, 15 bp, Homo sapiens
aattttttgttataa

SEQ ID NO: 784655 - DNA, 15 bp, Homo sapiens
attttttgttataaa

SEQ ID NO: 784656 - DNA, 15 bp, Homo sapiens
ttttttgttataaaa

SEQ ID NO: 784657 - DNA, 15 bp, Homo sapiens
tttttgttataaaat

SEQ ID NO: 784658 - DNA, 15 bp, Homo sapiens
ttttgttataaaatt

SEQ ID NO: 784659 - DNA, 15 bp, Homo sapiens
tttgttataaaattt

SEQ ID NO: 784660 - DNA, 15 bp, Homo sapiens
ttgttataaaattta

SEQ ID NO: 784661 - DNA, 15 bp, Homo sapiens
tgttataaaatttat

SEQ ID NO: 784662 - DNA, 15 bp, Homo sapiens
gttataaaatttatt

SEQ ID NO: 784663 - DNA, 15 bp, Homo sapiens
ttataaaatttattc

SEQ ID NO: 784664 - DNA, 15 bp, Homo sapiens
tataaaatttattca

SEQ ID NO: 784665 - DNA, 15 bp, Homo sapiens
ataaaatttattcaa

SEQ ID NO: 784666 - DNA, 15 bp, Homo sapiens
taaaatttattcaaa

SEQ ID NO: 784667 - DNA, 15 bp, Homo sapiens
aaaatttattcaaag

SEQ ID NO: 784668 - DNA, 15 bp, Homo sapiens
aaatttattcaaagt

SEQ ID NO: 784669 - DNA, 15 bp, Homo sapiens
aatttattcaaagta

SEQ ID NO: 784670 - DNA, 15 bp, Homo sapiens
atttattcaaagtaa

SEQ ID NO: 784671 - DNA, 15 bp, Homo sapiens
tttattcaaagtaaa

SEQ ID NO: 784672 - DNA, 15 bp, Homo sapiens
ttattcaaagtaaat

SEQ ID NO: 784673 - DNA, 15 bp, Homo sapiens
tattcaaagtaaata

SEQ ID NO: 784674 - DNA, 15 bp, Homo sapiens
attcaaagtaaatag

SEQ ID NO: 784675 - DNA, 15 bp, Homo sapiens
ttcaaagtaaatagg

SEQ ID NO: 784676 - DNA, 15 bp, Homo sapiens
tcaaagtaaataggt

SEQ ID NO: 784677 - DNA, 15 bp, Homo sapiens
caaagtaaataggtg

SEQ ID NO: 784678 - DNA, 15 bp, Homo sapiens
aaagtaaataggtga

SEQ ID NO: 784679 - DNA, 15 bp, Homo sapiens
aagtaaataggtgaa

SEQ ID NO: 784680 - DNA, 15 bp, Homo sapiens
agtaaataggtgaaa

SEQ ID NO: 784681 - DNA, 15 bp, Homo sapiens
gtaaataggtgaaaa

SEQ ID NO: 784682 - DNA, 15 bp, Homo sapiens
taaataggtgaaaaa

SEQ ID NO: 784683 - DNA, 15 bp, Homo sapiens
aaataggtgaaaaaa

SEQ ID NO: 784684 - DNA, 15 bp, Homo sapiens
aataggtgaaaaaat

SEQ ID NO: 784685 - DNA, 15 bp, Homo sapiens
ataggtgaaaaaatg

SEQ ID NO: 784686 - DNA, 15 bp, Homo sapiens
taggtgaaaaaatgt

SEQ ID NO: 784687 - DNA, 15 bp, Homo sapiens
aggtgaaaaaatgtt

SEQ ID NO: 784688 - DNA, 15 bp, Homo sapiens
ggtgaaaaaatgttt

SEQ ID NO: 784689 - DNA, 15 bp, Homo sapiens
gtgaaaaaatgtttt

SEQ ID NO: 784690 - DNA, 15 bp, Homo sapiens
tgaaaaaatgttttt

SEQ ID NO: 784691 - DNA, 15 bp, Homo sapiens
gaaaaaatgtttttg

SEQ ID NO: 784692 - DNA, 15 bp, Homo sapiens
aaaaaatgtttttga

SEQ ID NO: 784693 - DNA, 15 bp, Homo sapiens
aaaaatgtttttgaa

SEQ ID NO: 784694 - DNA, 15 bp, Homo sapiens
aaaatgtttttgaaa

SEQ ID NO: 784695 - DNA, 15 bp, Homo sapiens
aaatgtttttgaaag

SEQ ID NO: 784696 - DNA, 15 bp, Homo sapiens
aatgtttttgaaagg

SEQ ID NO: 784697 - DNA, 15 bp, Homo sapiens
atgtttttgaaaggg

SEQ ID NO: 784698 - DNA, 15 bp, Homo sapiens
tgtttttgaaaggga

SEQ ID NO: 784699 - DNA, 15 bp, Homo sapiens
gtttttgaaagggaa

SEQ ID NO: 784700 - DNA, 15 bp, Homo sapiens
tttttgaaagggaac

SEQ ID NO: 784701 - DNA, 15 bp, Homo sapiens
ttttgaaagggaacc

SEQ ID NO: 784702 - DNA, 15 bp, Homo sapiens
tttgaaagggaacct

SEQ ID NO: 784703 - DNA, 15 bp, Homo sapiens
ttgaaagggaacctc

SEQ ID NO: 784704 - DNA, 15 bp, Homo sapiens
tgaaagggaacctct

SEQ ID NO: 784705 - DNA, 15 bp, Homo sapiens
gaaagggaacctcta

SEQ ID NO: 784706 - DNA, 15 bp, Homo sapiens
aaagggaacctctac

SEQ ID NO: 784707 - DNA, 15 bp, Homo sapiens
aagggaacctctaca

SEQ ID NO: 784708 - DNA, 15 bp, Homo sapiens
agggaacctctacac

SEQ ID NO: 784709 - DNA, 15 bp, Homo sapiens
gggaacctctacaca

SEQ ID NO: 784710 - DNA, 15 bp, Homo sapiens
ggaacctctacacac

SEQ ID NO: 784711 - DNA, 15 bp, Homo sapiens
gaacctctacacact

SEQ ID NO: 784712 - DNA, 15 bp, Homo sapiens
aacctctacacactc

SEQ ID NO: 784713 - DNA, 15 bp, Homo sapiens
acctctacacactct

SEQ ID NO: 784714 - DNA, 15 bp, Homo sapiens
cctctacacactcta

SEQ ID NO: 784715 - DNA, 15 bp, Homo sapiens
ctctacacactctaa

SEQ ID NO: 784716 - DNA, 15 bp, Homo sapiens
tctacacactctaaa

SEQ ID NO: 784717 - DNA, 15 bp, Homo sapiens
ctacacactctaaaa

SEQ ID NO: 784718 - DNA, 15 bp, Homo sapiens
tacacactctaaaat

SEQ ID NO: 784719 - DNA, 15 bp, Homo sapiens
acacactctaaaata

SEQ ID NO: 784720 - DNA, 15 bp, Homo sapiens
cacactctaaaataa

SEQ ID NO: 784721 - DNA, 15 bp, Homo sapiens
cactctaaaataatt

SEQ ID NO: 784722 - DNA, 15 bp, Homo sapiens
actctaaaataattt

SEQ ID NO: 784723 - DNA, 15 bp, Homo sapiens
ctctaaaataattta

SEQ ID NO: 784724 - DNA, 15 bp, Homo sapiens
tctaaaataatttat

SEQ ID NO: 784725 - DNA, 15 bp, Homo sapiens
ctaaaataatttata

SEQ ID NO: 784726 - DNA, 15 bp, Homo sapiens
taaaataatttataa

SEQ ID NO: 784727 - DNA, 15 bp, Homo sapiens
aaaataatttataaa

SEQ ID NO: 784728 - DNA, 15 bp, Homo sapiens
aaataatttataaaa

SEQ ID NO: 784729 - DNA, 15 bp, Homo sapiens
aataatttataaaat

SEQ ID NO: 784730 - DNA, 15 bp, Homo sapiens
ataatttataaaata

SEQ ID NO: 784731 - DNA, 15 bp, Homo sapiens
taatttataaaatac

SEQ ID NO: 784732 - DNA, 15 bp, Homo sapiens
aatttataaaataca

SEQ ID NO: 784733 - DNA, 15 bp, Homo sapiens
atttataaaatacaa

SEQ ID NO: 784734 - DNA, 15 bp, Homo sapiens
tttataaaatacaaa

SEQ ID NO: 784735 - DNA, 15 bp, Homo sapiens
ttataaaatacaaat

SEQ ID NO: 784736 - DNA, 15 bp, Homo sapiens
tataaaatacaaatt

SEQ ID NO: 784737 - DNA, 15 bp, Homo sapiens
ataaaatacaaattt

SEQ ID NO: 784738 - DNA, 15 bp, Homo sapiens
taaaatacaaattta

SEQ ID NO: 784739 - DNA, 15 bp, Homo sapiens
aaaatacaaatttat

SEQ ID NO: 784740 - DNA, 15 bp, Homo sapiens
aaatacaaatttata

SEQ ID NO: 784741 - DNA, 15 bp, Homo sapiens
aatacaaatttataa

SEQ ID NO: 784742 - DNA, 15 bp, Homo sapiens
atacaaatttataaa

SEQ ID NO: 784743 - DNA, 15 bp, Homo sapiens
tacaaatttataaaa

SEQ ID NO: 784744 - DNA, 15 bp, Homo sapiens
acaaatttataaaat

SEQ ID NO: 784745 - DNA, 15 bp, Homo sapiens
caaatttataaaata

SEQ ID NO: 784746 - DNA, 15 bp, Homo sapiens
aaatttataaaataa

SEQ ID NO: 784747 - DNA, 15 bp, Homo sapiens
aatttataaaataaa

SEQ ID NO: 784748 - DNA, 15 bp, Homo sapiens
atttataaaataaat

SEQ ID NO: 784749 - DNA, 15 bp, Homo sapiens
tttataaaataaata

SEQ ID NO: 784750 - DNA, 15 bp, Homo sapiens
ttataaaataaataa

SEQ ID NO: 784751 - DNA, 15 bp, Homo sapiens
tataaaataaataag

SEQ ID NO: 784752 - DNA, 15 bp, Homo sapiens
ataaaataaataagg

SEQ ID NO: 784753 - DNA, 15 bp, Homo sapiens
taaaataaataagga

SEQ ID NO: 784754 - DNA, 15 bp, Homo sapiens
aaaataaataaggag

SEQ ID NO: 784755 - DNA, 15 bp, Homo sapiens
aaataaataaggaga

SEQ ID NO: 784756 - DNA, 15 bp, Homo sapiens
aataaataaggagat

SEQ ID NO: 784757 - DNA, 15 bp, Homo sapiens
ataaataaggagatt

SEQ ID NO: 784758 - DNA, 15 bp, Homo sapiens
taaataaggagattg

SEQ ID NO: 784759 - DNA, 15 bp, Homo sapiens
aaataaggagattgt

SEQ ID NO: 784760 - DNA, 15 bp, Homo sapiens
aataaggagattgtt

SEQ ID NO: 784761 - DNA, 15 bp, Homo sapiens
ataaggagattgtta

SEQ ID NO: 784762 - DNA, 15 bp, Homo sapiens
taaggagattgttac

SEQ ID NO: 784763 - DNA, 15 bp, Homo sapiens
aaggagattgttact

SEQ ID NO: 784764 - DNA, 15 bp, Homo sapiens
aggagattgttactc

SEQ ID NO: 784765 - DNA, 15 bp, Homo sapiens
ggagattgttactcc

SEQ ID NO: 784766 - DNA, 15 bp, Homo sapiens
gagattgttactcct

SEQ ID NO: 784767 - DNA, 15 bp, Homo sapiens
agattgttactcctt

SEQ ID NO: 784768 - DNA, 15 bp, Homo sapiens
gattgttactccttt

SEQ ID NO: 784769 - DNA, 15 bp, Homo sapiens
attgttactcctttg

SEQ ID NO: 784770 - DNA, 15 bp, Homo sapiens
ttgttactcctttgt

SEQ ID NO: 784771 - DNA, 15 bp, Homo sapiens
tgttactcctttgta

SEQ ID NO: 784772 - DNA, 15 bp, Homo sapiens
gttactcctttgtaa

SEQ ID NO: 784773 - DNA, 15 bp, Homo sapiens
ttactcctttgtaaa

SEQ ID NO: 784774 - DNA, 15 bp, Homo sapiens
tactcctttgtaaaa

SEQ ID NO: 784775 - DNA, 15 bp, Homo sapiens
actcctttgtaaaat

SEQ ID NO: 784776 - DNA, 15 bp, Homo sapiens
ctcctttgtaaaatg

SEQ ID NO: 784777 - DNA, 15 bp, Homo sapiens
tcctttgtaaaatgg

SEQ ID NO: 784778 - DNA, 15 bp, Homo sapiens
cctttgtaaaatggt

SEQ ID NO: 784779 - DNA, 15 bp, Homo sapiens
ctttgtaaaatggta

SEQ ID NO: 784780 - DNA, 15 bp, Homo sapiens
tttgtaaaatggtac

SEQ ID NO: 784781 - DNA, 15 bp, Homo sapiens
ttgtaaaatggtact

SEQ ID NO: 784782 - DNA, 15 bp, Homo sapiens
tgtaaaatggtactc

SEQ ID NO: 784783 - DNA, 15 bp, Homo sapiens
gtaaaatggtactct

SEQ ID NO: 784784 - DNA, 15 bp, Homo sapiens
taaaatggtactctt

SEQ ID NO: 784785 - DNA, 15 bp, Homo sapiens
aaaatggtactcttt

SEQ ID NO: 784786 - DNA, 15 bp, Homo sapiens
aaatggtactctttg

SEQ ID NO: 784787 - DNA, 15 bp, Homo sapiens
aatggtactctttgc

SEQ ID NO: 784788 - DNA, 15 bp, Homo sapiens
atggtactctttgct

SEQ ID NO: 784789 - DNA, 15 bp, Homo sapiens
tggtactctttgcta

SEQ ID NO: 784790 - DNA, 15 bp, Homo sapiens
ggtactctttgctat

SEQ ID NO: 784791 - DNA, 15 bp, Homo sapiens
gtactctttgctatg

SEQ ID NO: 784792 - DNA, 15 bp, Homo sapiens
tactctttgctatgg

SEQ ID NO: 784793 - DNA, 15 bp, Homo sapiens
actctttgctatggt

SEQ ID NO: 784794 - DNA, 15 bp, Homo sapiens
ctctttgctatggta

SEQ ID NO: 784795 - DNA, 15 bp, Homo sapiens
tctttgctatggtag

SEQ ID NO: 784796 - DNA, 15 bp, Homo sapiens
ctttgctatggtaga

SEQ ID NO: 784797 - DNA, 15 bp, Homo sapiens
tttgctatggtagaa

SEQ ID NO: 784798 - DNA, 15 bp, Homo sapiens
ttgctatggtagaaa

SEQ ID NO: 784799 - DNA, 15 bp, Homo sapiens
tgctatggtagaaac

SEQ ID NO: 784800 - DNA, 15 bp, Homo sapiens
gctatggtagaaaca

SEQ ID NO: 784801 - DNA, 15 bp, Homo sapiens
ctatggtagaaacat

SEQ ID NO: 784802 - DNA, 15 bp, Homo sapiens
tatggtagaaacatc

SEQ ID NO: 784803 - DNA, 15 bp, Homo sapiens
atggtagaaacatca

SEQ ID NO: 784804 - DNA, 15 bp, Homo sapiens
tggtagaaacatcat

SEQ ID NO: 784805 - DNA, 15 bp, Homo sapiens
ggtagaaacatcatg

SEQ ID NO: 784806 - DNA, 15 bp, Homo sapiens
gtagaaacatcatgg

SEQ ID NO: 784807 - DNA, 15 bp, Homo sapiens
tagaaacatcatggt

SEQ ID NO: 784808 - DNA, 15 bp, Homo sapiens
agaaacatcatggta

SEQ ID NO: 784809 - DNA, 15 bp, Homo sapiens
gaaacatcatggtac

SEQ ID NO: 784810 - DNA, 15 bp, Homo sapiens
aaacatcatggtaca

SEQ ID NO: 784811 - DNA, 15 bp, Homo sapiens
aacatcatggtacag

SEQ ID NO: 784812 - DNA, 15 bp, Homo sapiens
acatcatggtacagt

SEQ ID NO: 784813 - DNA, 15 bp, Homo sapiens
catcatggtacagta

SEQ ID NO: 784814 - DNA, 15 bp, Homo sapiens
atcatggtacagtaa

SEQ ID NO: 784815 - DNA, 15 bp, Homo sapiens
tcatggtacagtaaa

SEQ ID NO: 784816 - DNA, 15 bp, Homo sapiens
catggtacagtaaat

SEQ ID NO: 784817 - DNA, 15 bp, Homo sapiens
atggtacagtaaata

SEQ ID NO: 784818 - DNA, 15 bp, Homo sapiens
tggtacagtaaatat

SEQ ID NO: 784819 - DNA, 15 bp, Homo sapiens
ggtacagtaaatatt

SEQ ID NO: 784820 - DNA, 15 bp, Homo sapiens
gtacagtaaatattc

SEQ ID NO: 784821 - DNA, 15 bp, Homo sapiens
tacagtaaatattcc

SEQ ID NO: 784822 - DNA, 15 bp, Homo sapiens
acagtaaatattccc

SEQ ID NO: 784823 - DNA, 15 bp, Homo sapiens
cagtaaatattccca

SEQ ID NO: 784824 - DNA, 15 bp, Homo sapiens
agtaaatattcccat

SEQ ID NO: 784825 - DNA, 15 bp, Homo sapiens
gtaaatattcccatt

SEQ ID NO: 784826 - DNA, 15 bp, Homo sapiens
taaatattcccattg

SEQ ID NO: 784827 - DNA, 15 bp, Homo sapiens
aaatattcccattga

SEQ ID NO: 784828 - DNA, 15 bp, Homo sapiens
aatattcccattgag

SEQ ID NO: 784829 - DNA, 15 bp, Homo sapiens
atattcccattgagc

SEQ ID NO: 784830 - DNA, 15 bp, Homo sapiens
tattcccattgagct

SEQ ID NO: 784831 - DNA, 15 bp, Homo sapiens
attcccattgagctt

SEQ ID NO: 784832 - DNA, 15 bp, Homo sapiens
ttcccattgagcttc

SEQ ID NO: 784833 - DNA, 15 bp, Homo sapiens
tcccattgagcttcc

SEQ ID NO: 784834 - DNA, 15 bp, Homo sapiens
cccattgagcttccc

SEQ ID NO: 784835 - DNA, 15 bp, Homo sapiens
ccattgagcttccca

SEQ ID NO: 784836 - DNA, 15 bp, Homo sapiens
cattgagcttcccac

SEQ ID NO: 784837 - DNA, 15 bp, Homo sapiens
attgagcttcccacc

SEQ ID NO: 784838 - DNA, 15 bp, Homo sapiens
ttgagcttcccacca

SEQ ID NO: 784839 - DNA, 15 bp, Homo sapiens
tgagcttcccaccat

SEQ ID NO: 784840 - DNA, 15 bp, Homo sapiens
gagcttcccaccata

SEQ ID NO: 784841 - DNA, 15 bp, Homo sapiens
agcttcccaccatat

SEQ ID NO: 784842 - DNA, 15 bp, Homo sapiens
gcttcccaccatatg

SEQ ID NO: 784843 - DNA, 15 bp, Homo sapiens
cttcccaccatatgt

SEQ ID NO: 784844 - DNA, 15 bp, Homo sapiens
ttcccaccatatgtt

SEQ ID NO: 784845 - DNA, 15 bp, Homo sapiens
tcccaccatatgttc

SEQ ID NO: 784846 - DNA, 15 bp, Homo sapiens
cccaccatatgttca

SEQ ID NO: 784847 - DNA, 15 bp, Homo sapiens
ccaccatatgttcag

SEQ ID NO: 784848 - DNA, 15 bp, Homo sapiens
caccatatgttcaga

SEQ ID NO: 784849 - DNA, 15 bp, Homo sapiens
accatatgttcagaa

SEQ ID NO: 784850 - DNA, 15 bp, Homo sapiens
ccatatgttcagaaa

SEQ ID NO: 784851 - DNA, 15 bp, Homo sapiens
catatgttcagaaac

SEQ ID NO: 784852 - DNA, 15 bp, Homo sapiens
atatgttcagaaact

SEQ ID NO: 784853 - DNA, 15 bp, Homo sapiens
tatgttcagaaactg

SEQ ID NO: 784854 - DNA, 15 bp, Homo sapiens
atgttcagaaactgc

SEQ ID NO: 784855 - DNA, 15 bp, Homo sapiens
tgttcagaaactgct

SEQ ID NO: 784856 - DNA, 15 bp, Homo sapiens
gttcagaaactgctc

SEQ ID NO: 784857 - DNA, 15 bp, Homo sapiens
ttcagaaactgctct

SEQ ID NO: 784858 - DNA, 15 bp, Homo sapiens
tcagaaactgctctg

SEQ ID NO: 784859 - DNA, 15 bp, Homo sapiens
cagaaactgctctga

SEQ ID NO: 784860 - DNA, 15 bp, Homo sapiens
agaaactgctctgat

SEQ ID NO: 784861 - DNA, 15 bp, Homo sapiens
gaaactgctctgatg

SEQ ID NO: 784862 - DNA, 15 bp, Homo sapiens
aaactgctctgatgt

SEQ ID NO: 784863 - DNA, 15 bp, Homo sapiens
aactgctctgatgta

SEQ ID NO: 784864 - DNA, 15 bp, Homo sapiens
actgctctgatgtat

SEQ ID NO: 784865 - DNA, 15 bp, Homo sapiens
ctgctctgatgtata

SEQ ID NO: 784866 - DNA, 15 bp, Homo sapiens
tgctctgatgtataa

SEQ ID NO: 784867 - DNA, 15 bp, Homo sapiens
gctctgatgtataaa

SEQ ID NO: 784868 - DNA, 15 bp, Homo sapiens
ctctgatgtataaaa

SEQ ID NO: 784869 - DNA, 15 bp, Homo sapiens
tctgatgtataaaag

SEQ ID NO: 784870 - DNA, 15 bp, Homo sapiens
ctgatgtataaaagc

SEQ ID NO: 784871 - DNA, 15 bp, Homo sapiens
tgatgtataaaagct

SEQ ID NO: 784872 - DNA, 15 bp, Homo sapiens
gatgtataaaagcta

SEQ ID NO: 784873 - DNA, 15 bp, Homo sapiens
atgtataaaagctag

SEQ ID NO: 784874 - DNA, 15 bp, Homo sapiens
tgtataaaagctagg

SEQ ID NO: 784875 - DNA, 15 bp, Homo sapiens
gtataaaagctaggt

SEQ ID NO: 784876 - DNA, 15 bp, Homo sapiens
tataaaagctaggtt

SEQ ID NO: 784877 - DNA, 15 bp, Homo sapiens
ataaaagctaggttt

SEQ ID NO: 784878 - DNA, 15 bp, Homo sapiens
taaaagctaggtttg

SEQ ID NO: 784879 - DNA, 15 bp, Homo sapiens
aaaagctaggtttgc

SEQ ID NO: 784880 - DNA, 15 bp, Homo sapiens
aaagctaggtttgca

SEQ ID NO: 784881 - DNA, 15 bp, Homo sapiens
aagctaggtttgcag

SEQ ID NO: 784882 - DNA, 15 bp, Homo sapiens
agctaggtttgcagg

SEQ ID NO: 784883 - DNA, 15 bp, Homo sapiens
gctaggtttgcaggt

SEQ ID NO: 784884 - DNA, 15 bp, Homo sapiens
ctaggtttgcaggta

SEQ ID NO: 784885 - DNA, 15 bp, Homo sapiens
taggtttgcaggtaa

SEQ ID NO: 784886 - DNA, 15 bp, Homo sapiens
aggtttgcaggtaaa

SEQ ID NO: 784887 - DNA, 15 bp, Homo sapiens
ggtttgcaggtaaat

SEQ ID NO: 784888 - DNA, 15 bp, Homo sapiens
gtttgcaggtaaatt

SEQ ID NO: 784889 - DNA, 15 bp, Homo sapiens
tttgcaggtaaattt

SEQ ID NO: 784890 - DNA, 15 bp, Homo sapiens
ttgcaggtaaatttg

SEQ ID NO: 784891 - DNA, 15 bp, Homo sapiens
tgcaggtaaatttgg

SEQ ID NO: 784892 - DNA, 15 bp, Homo sapiens
gcaggtaaatttggg

SEQ ID NO: 784893 - DNA, 15 bp, Homo sapiens
caggtaaatttggga

SEQ ID NO: 784894 - DNA, 15 bp, Homo sapiens
aggtaaatttgggat

SEQ ID NO: 784895 - DNA, 15 bp, Homo sapiens
ggtaaatttgggata

SEQ ID NO: 784896 - DNA, 15 bp, Homo sapiens
gtaaatttgggatat

SEQ ID NO: 784897 - DNA, 15 bp, Homo sapiens
taaatttgggatata

SEQ ID NO: 784898 - DNA, 15 bp, Homo sapiens
aaatttgggatataa

SEQ ID NO: 784899 - DNA, 15 bp, Homo sapiens
aatttgggatataag

SEQ ID NO: 784900 - DNA, 15 bp, Homo sapiens
atttgggatataagt

SEQ ID NO: 784901 - DNA, 15 bp, Homo sapiens
tttgggatataagta

SEQ ID NO: 784902 - DNA, 15 bp, Homo sapiens
ttgggatataagtac

SEQ ID NO: 784903 - DNA, 15 bp, Homo sapiens
tgggatataagtaca

SEQ ID NO: 784904 - DNA, 15 bp, Homo sapiens
gggatataagtacac

SEQ ID NO: 784905 - DNA, 15 bp, Homo sapiens
ggatataagtacaca

SEQ ID NO: 784906 - DNA, 15 bp, Homo sapiens
gatataagtacacat

SEQ ID NO: 784907 - DNA, 15 bp, Homo sapiens
atataagtacacatg

SEQ ID NO: 784908 - DNA, 15 bp, Homo sapiens
tataagtacacatgt

SEQ ID NO: 784909 - DNA, 15 bp, Homo sapiens
ataagtacacatgtt

SEQ ID NO: 784910 - DNA, 15 bp, Homo sapiens
taagtacacatgtta

SEQ ID NO: 784911 - DNA, 15 bp, Homo sapiens
aagtacacatgttaa

SEQ ID NO: 784912 - DNA, 15 bp, Homo sapiens
agtacacatgttaag

SEQ ID NO: 784913 - DNA, 15 bp, Homo sapiens
gtacacatgttaagc

SEQ ID NO: 784914 - DNA, 15 bp, Homo sapiens
tacacatgttaagca

SEQ ID NO: 784915 - DNA, 15 bp, Homo sapiens
acacatgttaagcaa

SEQ ID NO: 784916 - DNA, 15 bp, Homo sapiens
cacatgttaagcaaa

SEQ ID NO: 784917 - DNA, 15 bp, Homo sapiens
acatgttaagcaaaa

SEQ ID NO: 784918 - DNA, 15 bp, Homo sapiens
catgttaagcaaaag

SEQ ID NO: 784919 - DNA, 15 bp, Homo sapiens
atgttaagcaaaagc

SEQ ID NO: 784920 - DNA, 15 bp, Homo sapiens
tgttaagcaaaagct

SEQ ID NO: 784921 - DNA, 15 bp, Homo sapiens
gttaagcaaaagctt

SEQ ID NO: 784922 - DNA, 15 bp, Homo sapiens
ttaagcaaaagctta

SEQ ID NO: 784923 - DNA, 15 bp, Homo sapiens
taagcaaaagcttaa

SEQ ID NO: 784924 - DNA, 15 bp, Homo sapiens
aagcaaaagcttaag

SEQ ID NO: 784925 - DNA, 15 bp, Homo sapiens
agcaaaagcttaagc

SEQ ID NO: 784926 - DNA, 15 bp, Homo sapiens
gcaaaagcttaagca

SEQ ID NO: 784927 - DNA, 15 bp, Homo sapiens
caaaagcttaagcat

SEQ ID NO: 784928 - DNA, 15 bp, Homo sapiens
aaaagcttaagcatt

SEQ ID NO: 784929 - DNA, 15 bp, Homo sapiens
aaagcttaagcattt

SEQ ID NO: 784930 - DNA, 15 bp, Homo sapiens
aagcttaagcatttt

SEQ ID NO: 784931 - DNA, 15 bp, Homo sapiens
agcttaagcattttt

SEQ ID NO: 784932 - DNA, 15 bp, Homo sapiens
gcttaagcatttttt

SEQ ID NO: 784933 - DNA, 15 bp, Homo sapiens
cttaagcatttttta

SEQ ID NO: 784934 - DNA, 15 bp, Homo sapiens
ttaagcattttttac

SEQ ID NO: 784935 - DNA, 15 bp, Homo sapiens
taagcattttttact

SEQ ID NO: 784936 - DNA, 15 bp, Homo sapiens
aagcattttttactg

SEQ ID NO: 784937 - DNA, 15 bp, Homo sapiens
agcattttttactga

SEQ ID NO: 784938 - DNA, 15 bp, Homo sapiens
gcattttttactgac

SEQ ID NO: 784939 - DNA, 15 bp, Homo sapiens
cattttttactgacc

SEQ ID NO: 784940 - DNA, 15 bp, Homo sapiens
attttttactgaccc

SEQ ID NO: 784941 - DNA, 15 bp, Homo sapiens
ttttttactgaccca

SEQ ID NO: 784942 - DNA, 15 bp, Homo sapiens
tttttactgacccac

SEQ ID NO: 784943 - DNA, 15 bp, Homo sapiens
ttttactgacccacg

SEQ ID NO: 784944 - DNA, 15 bp, Homo sapiens
tttactgacccacgc

SEQ ID NO: 784945 - DNA, 15 bp, Homo sapiens
ttactgacccacgca

SEQ ID NO: 784946 - DNA, 15 bp, Homo sapiens
tactgacccacgcat

SEQ ID NO: 784947 - DNA, 15 bp, Homo sapiens
actgacccacgcata

SEQ ID NO: 784948 - DNA, 15 bp, Homo sapiens
ctgacccacgcataa

SEQ ID NO: 784949 - DNA, 15 bp, Homo sapiens
tgacccacgcataat

SEQ ID NO: 784950 - DNA, 15 bp, Homo sapiens
gacccacgcataatt

SEQ ID NO: 784951 - DNA, 15 bp, Homo sapiens
acccacgcataattc

SEQ ID NO: 784952 - DNA, 15 bp, Homo sapiens
cccacgcataattct

SEQ ID NO: 784953 - DNA, 15 bp, Homo sapiens
ccacgcataattctt

SEQ ID NO: 784954 - DNA, 15 bp, Homo sapiens
cacgcataattcttg

SEQ ID NO: 784955 - DNA, 15 bp, Homo sapiens
acgcataattcttga

SEQ ID NO: 784956 - DNA, 15 bp, Homo sapiens
cgcataattcttgaa

SEQ ID NO: 784957 - DNA, 15 bp, Homo sapiens
gcataattcttgaaa

SEQ ID NO: 784958 - DNA, 15 bp, Homo sapiens
cataattcttgaaat

SEQ ID NO: 784959 - DNA, 15 bp, Homo sapiens
ataattcttgaaatg

SEQ ID NO: 784960 - DNA, 15 bp, Homo sapiens
taattcttgaaatgg

SEQ ID NO: 784961 - DNA, 15 bp, Homo sapiens
aattcttgaaatggt

SEQ ID NO: 784962 - DNA, 15 bp, Homo sapiens
attcttgaaatggtt

SEQ ID NO: 784963 - DNA, 15 bp, Homo sapiens
ttcttgaaatggttt

SEQ ID NO: 784964 - DNA, 15 bp, Homo sapiens
tcttgaaatggtttc

SEQ ID NO: 784965 - DNA, 15 bp, Homo sapiens
cttgaaatggtttca

SEQ ID NO: 784966 - DNA, 15 bp, Homo sapiens
ttgaaatggtttcag

SEQ ID NO: 784967 - DNA, 15 bp, Homo sapiens
tgaaatggtttcaga

SEQ ID NO: 784968 - DNA, 15 bp, Homo sapiens
gaaatggtttcagaa

SEQ ID NO: 784969 - DNA, 15 bp, Homo sapiens
aaatggtttcagaat

SEQ ID NO: 784970 - DNA, 15 bp, Homo sapiens
aatggtttcagaatg

SEQ ID NO: 784971 - DNA, 15 bp, Homo sapiens
atggtttcagaatgt

SEQ ID NO: 784972 - DNA, 15 bp, Homo sapiens
tggtttcagaatgtt

SEQ ID NO: 784973 - DNA, 15 bp, Homo sapiens
ggtttcagaatgttc

SEQ ID NO: 784974 - DNA, 15 bp, Homo sapiens
gtttcagaatgttct

SEQ ID NO: 784975 - DNA, 15 bp, Homo sapiens
tttcagaatgttcta

SEQ ID NO: 784976 - DNA, 15 bp, Homo sapiens
ttcagaatgttctaa

SEQ ID NO: 784977 - DNA, 15 bp, Homo sapiens
tcagaatgttctaac

SEQ ID NO: 784978 - DNA, 15 bp, Homo sapiens
cagaatgttctaaca

SEQ ID NO: 784979 - DNA, 15 bp, Homo sapiens
agaatgttctaacac

SEQ ID NO: 784980 - DNA, 15 bp, Homo sapiens
gaatgttctaacacc

SEQ ID NO: 784981 - DNA, 15 bp, Homo sapiens
aatgttctaacacca

SEQ ID NO: 784982 - DNA, 15 bp, Homo sapiens
atgttctaacaccaa

SEQ ID NO: 784983 - DNA, 15 bp, Homo sapiens
tgttctaacaccaag

SEQ ID NO: 784984 - DNA, 15 bp, Homo sapiens
gttctaacaccaaga

SEQ ID NO: 784985 - DNA, 15 bp, Homo sapiens
ttctaacaccaagag

SEQ ID NO: 784986 - DNA, 15 bp, Homo sapiens
tctaacaccaagagt

SEQ ID NO: 784987 - DNA, 15 bp, Homo sapiens
ctaacaccaagagtc

SEQ ID NO: 784988 - DNA, 15 bp, Homo sapiens
taacaccaagagtct

SEQ ID NO: 784989 - DNA, 15 bp, Homo sapiens
aacaccaagagtctg

SEQ ID NO: 784990 - DNA, 15 bp, Homo sapiens
acaccaagagtctgt

SEQ ID NO: 784991 - DNA, 15 bp, Homo sapiens
caccaagagtctgtg

SEQ ID NO: 784992 - DNA, 15 bp, Homo sapiens
accaagagtctgtgt

SEQ ID NO: 784993 - DNA, 15 bp, Homo sapiens
ccaagagtctgtgtt

SEQ ID NO: 784994 - DNA, 15 bp, Homo sapiens
caagagtctgtgtta

SEQ ID NO: 784995 - DNA, 15 bp, Homo sapiens
aagagtctgtgttaa

SEQ ID NO: 784996 - DNA, 15 bp, Homo sapiens
agagtctgtgttaag

SEQ ID NO: 784997 - DNA, 15 bp, Homo sapiens
gagtctgtgttaagt

SEQ ID NO: 784998 - DNA, 15 bp, Homo sapiens
agtctgtgttaagtg

SEQ ID NO: 784999 - DNA, 15 bp, Homo sapiens
gtctgtgttaagtgc

SEQ ID NO: 785000 - DNA, 15 bp, Homo sapiens
tctgtgttaagtgct

SEQ ID NO: 785001 - DNA, 15 bp, Homo sapiens
ctgtgttaagtgctt

SEQ ID NO: 785002 - DNA, 15 bp, Homo sapiens
tgtgttaagtgcttc

SEQ ID NO: 785003 - DNA, 15 bp, Homo sapiens
gtgttaagtgcttcg

SEQ ID NO: 785004 - DNA, 15 bp, Homo sapiens
tgttaagtgcttcgg

SEQ ID NO: 785005 - DNA, 15 bp, Homo sapiens
gttaagtgcttcgga

SEQ ID NO: 785006 - DNA, 15 bp, Homo sapiens
ttaagtgcttcggaa

SEQ ID NO: 785007 - DNA, 15 bp, Homo sapiens
taagtgcttcggaaa

SEQ ID NO: 785008 - DNA, 15 bp, Homo sapiens
aagtgcttcggaaaa

SEQ ID NO: 785009 - DNA, 15 bp, Homo sapiens
agtgcttcggaaaat

SEQ ID NO: 785010 - DNA, 15 bp, Homo sapiens
gtgcttcggaaaatg

SEQ ID NO: 785011 - DNA, 15 bp, Homo sapiens
tgcttcggaaaatga

SEQ ID NO: 785012 - DNA, 15 bp, Homo sapiens
gcttcggaaaatgac

SEQ ID NO: 785013 - DNA, 15 bp, Homo sapiens
cttcggaaaatgacc

SEQ ID NO: 785014 - DNA, 15 bp, Homo sapiens
ttcggaaaatgacca

SEQ ID NO: 785015 - DNA, 15 bp, Homo sapiens
tcggaaaatgaccaa

SEQ ID NO: 785016 - DNA, 15 bp, Homo sapiens
cggaaaatgaccaat

SEQ ID NO: 785017 - DNA, 15 bp, Homo sapiens
ggaaaatgaccaatt

SEQ ID NO: 785018 - DNA, 15 bp, Homo sapiens
gaaaatgaccaatta

SEQ ID NO: 785019 - DNA, 15 bp, Homo sapiens
aaaatgaccaattat

SEQ ID NO: 785020 - DNA, 15 bp, Homo sapiens
aaatgaccaattatg

SEQ ID NO: 785021 - DNA, 15 bp, Homo sapiens
aatgaccaattatgt

SEQ ID NO: 785022 - DNA, 15 bp, Homo sapiens
atgaccaattatgtt

SEQ ID NO: 785023 - DNA, 15 bp, Homo sapiens
tgaccaattatgttg

SEQ ID NO: 785024 - DNA, 15 bp, Homo sapiens
gaccaattatgttgt

SEQ ID NO: 785025 - DNA, 15 bp, Homo sapiens
accaattatgttgta

SEQ ID NO: 785026 - DNA, 15 bp, Homo sapiens
ccaattatgttgtat

SEQ ID NO: 785027 - DNA, 15 bp, Homo sapiens
caattatgttgtatc

SEQ ID NO: 785028 - DNA, 15 bp, Homo sapiens
aattatgttgtatct

SEQ ID NO: 785029 - DNA, 15 bp, Homo sapiens
attatgttgtatcta

SEQ ID NO: 785030 - DNA, 15 bp, Homo sapiens
ttatgttgtatctaa

SEQ ID NO: 785031 - DNA, 15 bp, Homo sapiens
tatgttgtatctaag

SEQ ID NO: 785032 - DNA, 15 bp, Homo sapiens
atgttgtatctaagt

SEQ ID NO: 785033 - DNA, 15 bp, Homo sapiens
tgttgtatctaagtg

SEQ ID NO: 785034 - DNA, 15 bp, Homo sapiens
gttgtatctaagtga

SEQ ID NO: 785035 - DNA, 15 bp, Homo sapiens
ttgtatctaagtgaa

SEQ ID NO: 785036 - DNA, 15 bp, Homo sapiens
tgtatctaagtgaat

SEQ ID NO: 785037 - DNA, 15 bp, Homo sapiens
gtatctaagtgaatg

SEQ ID NO: 785038 - DNA, 15 bp, Homo sapiens
tatctaagtgaatga

SEQ ID NO: 785039 - DNA, 15 bp, Homo sapiens
atctaagtgaatgaa

SEQ ID NO: 785040 - DNA, 15 bp, Homo sapiens
tctaagtgaatgaaa

SEQ ID NO: 785041 - DNA, 15 bp, Homo sapiens
ctaagtgaatgaaaa

SEQ ID NO: 785042 - DNA, 15 bp, Homo sapiens
taagtgaatgaaaag

SEQ ID NO: 785043 - DNA, 15 bp, Homo sapiens
aagtgaatgaaaagg

SEQ ID NO: 785044 - DNA, 15 bp, Homo sapiens
agtgaatgaaaaggt

SEQ ID NO: 785045 - DNA, 15 bp, Homo sapiens
gtgaatgaaaaggtt

SEQ ID NO: 785046 - DNA, 15 bp, Homo sapiens
tgaatgaaaaggttg

SEQ ID NO: 785047 - DNA, 15 bp, Homo sapiens
gaatgaaaaggttgg

SEQ ID NO: 785048 - DNA, 15 bp, Homo sapiens
aatgaaaaggttggt

SEQ ID NO: 785049 - DNA, 15 bp, Homo sapiens
atgaaaaggttggta

SEQ ID NO: 785050 - DNA, 15 bp, Homo sapiens
tgaaaaggttggtag

SEQ ID NO: 785051 - DNA, 15 bp, Homo sapiens
gaaaaggttggtagc

SEQ ID NO: 785052 - DNA, 15 bp, Homo sapiens
aaaaggttggtagca

SEQ ID NO: 785053 - DNA, 15 bp, Homo sapiens
aaaggttggtagcaa

SEQ ID NO: 785054 - DNA, 15 bp, Homo sapiens
aaggttggtagcaat

SEQ ID NO: 785055 - DNA, 15 bp, Homo sapiens
aggttggtagcaatg

SEQ ID NO: 785056 - DNA, 15 bp, Homo sapiens
ggttggtagcaatgt

SEQ ID NO: 785057 - DNA, 15 bp, Homo sapiens
gttggtagcaatgtc

SEQ ID NO: 785058 - DNA, 15 bp, Homo sapiens
ttggtagcaatgtca

SEQ ID NO: 785059 - DNA, 15 bp, Homo sapiens
tggtagcaatgtcat

SEQ ID NO: 785060 - DNA, 15 bp, Homo sapiens
ggtagcaatgtcatc

SEQ ID NO: 785061 - DNA, 15 bp, Homo sapiens
gtagcaatgtcatct

SEQ ID NO: 785062 - DNA, 15 bp, Homo sapiens
tagcaatgtcatctc

SEQ ID NO: 785063 - DNA, 15 bp, Homo sapiens
agcaatgtcatctca

SEQ ID NO: 785064 - DNA, 15 bp, Homo sapiens
gcaatgtcatctcaa

SEQ ID NO: 785065 - DNA, 15 bp, Homo sapiens
caatgtcatctcaaa

SEQ ID NO: 785066 - DNA, 15 bp, Homo sapiens
aatgtcatctcaaaa

SEQ ID NO: 785067 - DNA, 15 bp, Homo sapiens
atgtcatctcaaaat

SEQ ID NO: 785068 - DNA, 15 bp, Homo sapiens
tgtcatctcaaaatg

SEQ ID NO: 785069 - DNA, 15 bp, Homo sapiens
gtcatctcaaaatgc

SEQ ID NO: 785070 - DNA, 15 bp, Homo sapiens
tcatctcaaaatgca

SEQ ID NO: 785071 - DNA, 15 bp, Homo sapiens
catctcaaaatgcat

SEQ ID NO: 785072 - DNA, 15 bp, Homo sapiens
atctcaaaatgcata

SEQ ID NO: 785073 - DNA, 15 bp, Homo sapiens
tctcaaaatgcataa

SEQ ID NO: 785074 - DNA, 15 bp, Homo sapiens
ctcaaaatgcataaa

SEQ ID NO: 785075 - DNA, 15 bp, Homo sapiens
tcaaaatgcataaaa

SEQ ID NO: 785076 - DNA, 15 bp, Homo sapiens
caaaatgcataaaat

SEQ ID NO: 785077 - DNA, 15 bp, Homo sapiens
aaaatgcataaaata

SEQ ID NO: 785078 - DNA, 15 bp, Homo sapiens
aaatgcataaaatat

SEQ ID NO: 785079 - DNA, 15 bp, Homo sapiens
aatgcataaaatata

SEQ ID NO: 785080 - DNA, 15 bp, Homo sapiens
atgcataaaatatat

SEQ ID NO: 785081 - DNA, 15 bp, Homo sapiens
tgcataaaatatatt

SEQ ID NO: 785082 - DNA, 15 bp, Homo sapiens
gcataaaatatattc

SEQ ID NO: 785083 - DNA, 15 bp, Homo sapiens
cataaaatatattct

SEQ ID NO: 785084 - DNA, 15 bp, Homo sapiens
ataaaatatattctc

SEQ ID NO: 785085 - DNA, 15 bp, Homo sapiens
taaaatatattctcc

SEQ ID NO: 785086 - DNA, 15 bp, Homo sapiens
aaaatatattctcca

SEQ ID NO: 785087 - DNA, 15 bp, Homo sapiens
aaatatattctccaa

SEQ ID NO: 785088 - DNA, 15 bp, Homo sapiens
aatatattctccaag

SEQ ID NO: 785089 - DNA, 15 bp, Homo sapiens
atatattctccaaga

SEQ ID NO: 785090 - DNA, 15 bp, Homo sapiens
tatattctccaagaa

SEQ ID NO: 785091 - DNA, 15 bp, Homo sapiens
atattctccaagaac

SEQ ID NO: 785092 - DNA, 15 bp, Homo sapiens
tattctccaagaaca

SEQ ID NO: 785093 - DNA, 15 bp, Homo sapiens
attctccaagaacaa

SEQ ID NO: 785094 - DNA, 15 bp, Homo sapiens
ttctccaagaacaaa

SEQ ID NO: 785095 - DNA, 15 bp, Homo sapiens
tctccaagaacaaat

SEQ ID NO: 785096 - DNA, 15 bp, Homo sapiens
ctccaagaacaaatg

SEQ ID NO: 785097 - DNA, 15 bp, Homo sapiens
tccaagaacaaatga

SEQ ID NO: 785098 - DNA, 15 bp, Homo sapiens
ccaagaacaaatgac

SEQ ID NO: 785099 - DNA, 15 bp, Homo sapiens
caagaacaaatgaca

SEQ ID NO: 785100 - DNA, 15 bp, Homo sapiens
aagaacaaatgacat

SEQ ID NO: 785101 - DNA, 15 bp, Homo sapiens
agaacaaatgacatt

SEQ ID NO: 785102 - DNA, 15 bp, Homo sapiens
gaacaaatgacatta

SEQ ID NO: 785103 - DNA, 15 bp, Homo sapiens
aacaaatgacattaa

SEQ ID NO: 785104 - DNA, 15 bp, Homo sapiens
acaaatgacattaat

SEQ ID NO: 785105 - DNA, 15 bp, Homo sapiens
caaatgacattaatg

SEQ ID NO: 785106 - DNA, 15 bp, Homo sapiens
aaatgacattaatgt

SEQ ID NO: 785107 - DNA, 15 bp, Homo sapiens
aatgacattaatgtg

SEQ ID NO: 785108 - DNA, 15 bp, Homo sapiens
atgacattaatgtgc

SEQ ID NO: 785109 - DNA, 15 bp, Homo sapiens
tgacattaatgtgca

SEQ ID NO: 785110 - DNA, 15 bp, Homo sapiens
gacattaatgtgcaa

SEQ ID NO: 785111 - DNA, 15 bp, Homo sapiens
acattaatgtgcaaa

SEQ ID NO: 785112 - DNA, 15 bp, Homo sapiens
cattaatgtgcaaaa

SEQ ID NO: 785113 - DNA, 15 bp, Homo sapiens
attaatgtgcaaaag

SEQ ID NO: 785114 - DNA, 15 bp, Homo sapiens
ttaatgtgcaaaaga

SEQ ID NO: 785115 - DNA, 15 bp, Homo sapiens
taatgtgcaaaagac

SEQ ID NO: 785116 - DNA, 15 bp, Homo sapiens
aatgtgcaaaagaca

SEQ ID NO: 785117 - DNA, 15 bp, Homo sapiens
atgtgcaaaagacac

SEQ ID NO: 785118 - DNA, 15 bp, Homo sapiens
tgtgcaaaagacacg

SEQ ID NO: 785119 - DNA, 15 bp, Homo sapiens
gtgcaaaagacacgc

SEQ ID NO: 785120 - DNA, 15 bp, Homo sapiens
tgcaaaagacacgca

SEQ ID NO: 785121 - DNA, 15 bp, Homo sapiens
gcaaaagacacgcaa

SEQ ID NO: 785122 - DNA, 15 bp, Homo sapiens
caaaagacacgcaaa

SEQ ID NO: 785123 - DNA, 15 bp, Homo sapiens
aaaagacacgcaaaa

SEQ ID NO: 785124 - DNA, 15 bp, Homo sapiens
aaagacacgcaaaat

SEQ ID NO: 785125 - DNA, 15 bp, Homo sapiens
aagacacgcaaaatc

SEQ ID NO: 785126 - DNA, 15 bp, Homo sapiens
agacacgcaaaatct

SEQ ID NO: 785127 - DNA, 15 bp, Homo sapiens
gacacgcaaaatctc

SEQ ID NO: 785128 - DNA, 15 bp, Homo sapiens
acacgcaaaatctct

SEQ ID NO: 785129 - DNA, 15 bp, Homo sapiens
cacgcaaaatctctg

SEQ ID NO: 785130 - DNA, 15 bp, Homo sapiens
acgcaaaatctctgt

SEQ ID NO: 785131 - DNA, 15 bp, Homo sapiens
cgcaaaatctctgtt

SEQ ID NO: 785132 - DNA, 15 bp, Homo sapiens
gcaaaatctctgtta

SEQ ID NO: 785133 - DNA, 15 bp, Homo sapiens
caaaatctctgttag

SEQ ID NO: 785134 - DNA, 15 bp, Homo sapiens
aaaatctctgttaga

SEQ ID NO: 785135 - DNA, 15 bp, Homo sapiens
aaatctctgttagag

SEQ ID NO: 785136 - DNA, 15 bp, Homo sapiens
aatctctgttagagt

SEQ ID NO: 785137 - DNA, 15 bp, Homo sapiens
atctctgttagagtg

SEQ ID NO: 785138 - DNA, 15 bp, Homo sapiens
tctctgttagagtgc

SEQ ID NO: 785139 - DNA, 15 bp, Homo sapiens
ctctgttagagtgcc

SEQ ID NO: 785140 - DNA, 15 bp, Homo sapiens
tctgttagagtgcct

SEQ ID NO: 785141 - DNA, 15 bp, Homo sapiens
ctgttagagtgcctt

SEQ ID NO: 785142 - DNA, 15 bp, Homo sapiens
tgttagagtgccttt

SEQ ID NO: 785143 - DNA, 15 bp, Homo sapiens
gttagagtgcctttt

SEQ ID NO: 785144 - DNA, 15 bp, Homo sapiens
ttagagtgccttttc

SEQ ID NO: 785145 - DNA, 15 bp, Homo sapiens
tagagtgccttttct

SEQ ID NO: 785146 - DNA, 15 bp, Homo sapiens
agagtgccttttctt

SEQ ID NO: 785147 - DNA, 15 bp, Homo sapiens
gagtgccttttcttg

SEQ ID NO: 785148 - DNA, 15 bp, Homo sapiens
agtgccttttcttga

SEQ ID NO: 785149 - DNA, 15 bp, Homo sapiens
gtgccttttcttgat

SEQ ID NO: 785150 - DNA, 15 bp, Homo sapiens
tgccttttcttgatt

SEQ ID NO: 785151 - DNA, 15 bp, Homo sapiens
gccttttcttgattt

SEQ ID NO: 785152 - DNA, 15 bp, Homo sapiens
ccttttcttgatttc

SEQ ID NO: 785153 - DNA, 15 bp, Homo sapiens
cttttcttgatttcc

SEQ ID NO: 785154 - DNA, 15 bp, Homo sapiens
ttttcttgatttcct

SEQ ID NO: 785155 - DNA, 15 bp, Homo sapiens
tttcttgatttcctt

SEQ ID NO: 785156 - DNA, 15 bp, Homo sapiens
ttcttgatttcctta

SEQ ID NO: 785157 - DNA, 15 bp, Homo sapiens
tcttgatttccttag

SEQ ID NO: 785158 - DNA, 15 bp, Homo sapiens
cttgatttccttagc

SEQ ID NO: 785159 - DNA, 15 bp, Homo sapiens
ttgatttccttagcc

SEQ ID NO: 785160 - DNA, 15 bp, Homo sapiens
tgatttccttagcct

SEQ ID NO: 785161 - DNA, 15 bp, Homo sapiens
gatttccttagcctg

SEQ ID NO: 785162 - DNA, 15 bp, Homo sapiens
atttccttagcctgt

SEQ ID NO: 785163 - DNA, 15 bp, Homo sapiens
tttccttagcctgta

SEQ ID NO: 785164 - DNA, 15 bp, Homo sapiens
ttccttagcctgtag

SEQ ID NO: 785165 - DNA, 15 bp, Homo sapiens
tccttagcctgtagt

SEQ ID NO: 785166 - DNA, 15 bp, Homo sapiens
ccttagcctgtagtt

SEQ ID NO: 785167 - DNA, 15 bp, Homo sapiens
cttagcctgtagttt

SEQ ID NO: 785168 - DNA, 15 bp, Homo sapiens
ttagcctgtagtttt

SEQ ID NO: 785169 - DNA, 15 bp, Homo sapiens
tagcctgtagttttg

SEQ ID NO: 785170 - DNA, 15 bp, Homo sapiens
agcctgtagttttgt

SEQ ID NO: 785171 - DNA, 15 bp, Homo sapiens
gcctgtagttttgtg

SEQ ID NO: 785172 - DNA, 15 bp, Homo sapiens
cctgtagttttgtga

SEQ ID NO: 785173 - DNA, 15 bp, Homo sapiens
ctgtagttttgtgag

SEQ ID NO: 785174 - DNA, 15 bp, Homo sapiens
tgtagttttgtgagc

SEQ ID NO: 785175 - DNA, 15 bp, Homo sapiens
gtagttttgtgagca

SEQ ID NO: 785176 - DNA, 15 bp, Homo sapiens
tagttttgtgagcac

SEQ ID NO: 785177 - DNA, 15 bp, Homo sapiens
agttttgtgagcaca

SEQ ID NO: 785178 - DNA, 15 bp, Homo sapiens
gttttgtgagcacaa

SEQ ID NO: 785179 - DNA, 15 bp, Homo sapiens
ttttgtgagcacaaa

SEQ ID NO: 785180 - DNA, 15 bp, Homo sapiens
tttgtgagcacaaaa

SEQ ID NO: 785181 - DNA, 15 bp, Homo sapiens
ttgtgagcacaaaaa

SEQ ID NO: 785182 - DNA, 15 bp, Homo sapiens
tgtgagcacaaaaaa

SEQ ID NO: 785183 - DNA, 15 bp, Homo sapiens
gtgagcacaaaaaag

SEQ ID NO: 785184 - DNA, 15 bp, Homo sapiens
tgagcacaaaaaagg

SEQ ID NO: 785185 - DNA, 15 bp, Homo sapiens
gagcacaaaaaaggt

SEQ ID NO: 785186 - DNA, 15 bp, Homo sapiens
agcacaaaaaaggtt

SEQ ID NO: 785187 - DNA, 15 bp, Homo sapiens
gcacaaaaaaggttt

SEQ ID NO: 785188 - DNA, 15 bp, Homo sapiens
cacaaaaaaggtttg

SEQ ID NO: 785189 - DNA, 15 bp, Homo sapiens
acaaaaaaggtttgc

SEQ ID NO: 785190 - DNA, 15 bp, Homo sapiens
caaaaaaggtttgct

SEQ ID NO: 785191 - DNA, 15 bp, Homo sapiens
aaaaaaggtttgcta

SEQ ID NO: 785192 - DNA, 15 bp, Homo sapiens
aaaaaggtttgctat

SEQ ID NO: 785193 - DNA, 15 bp, Homo sapiens
aaaaggtttgctatc

SEQ ID NO: 785194 - DNA, 15 bp, Homo sapiens
aaaggtttgctatca

SEQ ID NO: 785195 - DNA, 15 bp, Homo sapiens
aaggtttgctatcag

SEQ ID NO: 785196 - DNA, 15 bp, Homo sapiens
aggtttgctatcagc

SEQ ID NO: 785197 - DNA, 15 bp, Homo sapiens
ggtttgctatcagca

SEQ ID NO: 785198 - DNA, 15 bp, Homo sapiens
gtttgctatcagcag

SEQ ID NO: 785199 - DNA, 15 bp, Homo sapiens
tttgctatcagcagt

SEQ ID NO: 785200 - DNA, 15 bp, Homo sapiens
ttgctatcagcagtt

SEQ ID NO: 785201 - DNA, 15 bp, Homo sapiens
tgctatcagcagttg

SEQ ID NO: 785202 - DNA, 15 bp, Homo sapiens
gctatcagcagttga

SEQ ID NO: 785203 - DNA, 15 bp, Homo sapiens
ctatcagcagttgaa

SEQ ID NO: 785204 - DNA, 15 bp, Homo sapiens
tatcagcagttgaaa

SEQ ID NO: 785205 - DNA, 15 bp, Homo sapiens
atcagcagttgaaat

SEQ ID NO: 785206 - DNA, 15 bp, Homo sapiens
tcagcagttgaaata

SEQ ID NO: 785207 - DNA, 15 bp, Homo sapiens
cagcagttgaaatac

SEQ ID NO: 785208 - DNA, 15 bp, Homo sapiens
agcagttgaaatact

SEQ ID NO: 785209 - DNA, 15 bp, Homo sapiens
gcagttgaaatactg

SEQ ID NO: 785210 - DNA, 15 bp, Homo sapiens
cagttgaaatactgt

SEQ ID NO: 785211 - DNA, 15 bp, Homo sapiens
agttgaaatactgtg

SEQ ID NO: 785212 - DNA, 15 bp, Homo sapiens
gttgaaatactgtgg

SEQ ID NO: 785213 - DNA, 15 bp, Homo sapiens
ttgaaatactgtgga

SEQ ID NO: 785214 - DNA, 15 bp, Homo sapiens
tgaaatactgtggaa

SEQ ID NO: 785215 - DNA, 15 bp, Homo sapiens
gaaatactgtggaat

SEQ ID NO: 785216 - DNA, 15 bp, Homo sapiens
aaatactgtggaata

SEQ ID NO: 785217 - DNA, 15 bp, Homo sapiens
aatactgtggaatag

SEQ ID NO: 785218 - DNA, 15 bp, Homo sapiens
atactgtggaatagc

SEQ ID NO: 785219 - DNA, 15 bp, Homo sapiens
tactgtggaatagca

SEQ ID NO: 785220 - DNA, 15 bp, Homo sapiens
actgtggaatagcac

SEQ ID NO: 785221 - DNA, 15 bp, Homo sapiens
ctgtggaatagcaca

SEQ ID NO: 785222 - DNA, 15 bp, Homo sapiens
tgtggaatagcacat

SEQ ID NO: 785223 - DNA, 15 bp, Homo sapiens
gtggaatagcacatt

SEQ ID NO: 785224 - DNA, 15 bp, Homo sapiens
tggaatagcacatta

SEQ ID NO: 785225 - DNA, 15 bp, Homo sapiens
ggaatagcacattaa

SEQ ID NO: 785226 - DNA, 15 bp, Homo sapiens
gaatagcacattaat

SEQ ID NO: 785227 - DNA, 15 bp, Homo sapiens
aatagcacattaata

SEQ ID NO: 785228 - DNA, 15 bp, Homo sapiens
atagcacattaatac

SEQ ID NO: 785229 - DNA, 15 bp, Homo sapiens
tagcacattaataca

SEQ ID NO: 785230 - DNA, 15 bp, Homo sapiens
agcacattaatacac

SEQ ID NO: 785231 - DNA, 15 bp, Homo sapiens
gcacattaatacact

SEQ ID NO: 785232 - DNA, 15 bp, Homo sapiens
cacattaatacacta

SEQ ID NO: 785233 - DNA, 15 bp, Homo sapiens
acattaatacactaa

SEQ ID NO: 785234 - DNA, 15 bp, Homo sapiens
cattaatacactaat

SEQ ID NO: 785235 - DNA, 15 bp, Homo sapiens
attaatacactaata

SEQ ID NO: 785236 - DNA, 15 bp, Homo sapiens
ttaatacactaatat

SEQ ID NO: 785237 - DNA, 15 bp, Homo sapiens
taatacactaatatg

SEQ ID NO: 785238 - DNA, 15 bp, Homo sapiens
aatacactaatatga

SEQ ID NO: 785239 - DNA, 15 bp, Homo sapiens
atacactaatatgac

SEQ ID NO: 785240 - DNA, 15 bp, Homo sapiens
tacactaatatgact

SEQ ID NO: 785241 - DNA, 15 bp, Homo sapiens
acactaatatgactt

SEQ ID NO: 785242 - DNA, 15 bp, Homo sapiens
cactaatatgacttt

SEQ ID NO: 785243 - DNA, 15 bp, Homo sapiens
actaatatgactttg

SEQ ID NO: 785244 - DNA, 15 bp, Homo sapiens
ctaatatgactttgg

SEQ ID NO: 785245 - DNA, 15 bp, Homo sapiens
taatatgactttgga

SEQ ID NO: 785246 - DNA, 15 bp, Homo sapiens
aatatgactttggag

SEQ ID NO: 785247 - DNA, 15 bp, Homo sapiens
atatgactttggaga

SEQ ID NO: 785248 - DNA, 15 bp, Homo sapiens
tatgactttggagat

SEQ ID NO: 785249 - DNA, 15 bp, Homo sapiens
atgactttggagatt

SEQ ID NO: 785250 - DNA, 15 bp, Homo sapiens
tgactttggagattt

SEQ ID NO: 785251 - DNA, 15 bp, Homo sapiens
gactttggagatttt

SEQ ID NO: 785252 - DNA, 15 bp, Homo sapiens
actttggagattttg

SEQ ID NO: 785253 - DNA, 15 bp, Homo sapiens
ctttggagattttgg

SEQ ID NO: 785254 - DNA, 15 bp, Homo sapiens
tttggagattttggc

SEQ ID NO: 785255 - DNA, 15 bp, Homo sapiens
ttggagattttggcc

SEQ ID NO: 785256 - DNA, 15 bp, Homo sapiens
tggagattttggcca

SEQ ID NO: 785257 - DNA, 15 bp, Homo sapiens
ggagattttggccaa

SEQ ID NO: 785258 - DNA, 15 bp, Homo sapiens
gagattttggccaac

SEQ ID NO: 785259 - DNA, 15 bp, Homo sapiens
agattttggccaacc

SEQ ID NO: 785260 - DNA, 15 bp, Homo sapiens
gattttggccaaccc

SEQ ID NO: 785261 - DNA, 15 bp, Homo sapiens
attttggccaaccct

SEQ ID NO: 785262 - DNA, 15 bp, Homo sapiens
ttttggccaaccctc

SEQ ID NO: 785263 - DNA, 15 bp, Homo sapiens
tttggccaaccctct

SEQ ID NO: 785264 - DNA, 15 bp, Homo sapiens
ttggccaaccctctt

SEQ ID NO: 785265 - DNA, 15 bp, Homo sapiens
tggccaaccctctta

SEQ ID NO: 785266 - DNA, 15 bp, Homo sapiens
ggccaaccctcttag

SEQ ID NO: 785267 - DNA, 15 bp, Homo sapiens
gccaaccctcttagc

SEQ ID NO: 785268 - DNA, 15 bp, Homo sapiens
ccaaccctcttagca

SEQ ID NO: 785269 - DNA, 15 bp, Homo sapiens
caaccctcttagcaa

SEQ ID NO: 785270 - DNA, 15 bp, Homo sapiens
aaccctcttagcaat

SEQ ID NO: 785271 - DNA, 15 bp, Homo sapiens
accctcttagcaatg

SEQ ID NO: 785272 - DNA, 15 bp, Homo sapiens
ccctcttagcaatga

SEQ ID NO: 785273 - DNA, 15 bp, Homo sapiens
cctcttagcaatgaa

SEQ ID NO: 785274 - DNA, 15 bp, Homo sapiens
ctcttagcaatgaaa

SEQ ID NO: 785275 - DNA, 15 bp, Homo sapiens
tcttagcaatgaaat

SEQ ID NO: 785276 - DNA, 15 bp, Homo sapiens
cttagcaatgaaata

SEQ ID NO: 785277 - DNA, 15 bp, Homo sapiens
ttagcaatgaaatat

SEQ ID NO: 785278 - DNA, 15 bp, Homo sapiens
tagcaatgaaatatg

SEQ ID NO: 785279 - DNA, 15 bp, Homo sapiens
agcaatgaaatatgt

SEQ ID NO: 785280 - DNA, 15 bp, Homo sapiens
gcaatgaaatatgtt

SEQ ID NO: 785281 - DNA, 15 bp, Homo sapiens
caatgaaatatgttc

SEQ ID NO: 785282 - DNA, 15 bp, Homo sapiens
aatgaaatatgttct

SEQ ID NO: 785283 - DNA, 15 bp, Homo sapiens
atgaaatatgttctt

SEQ ID NO: 785284 - DNA, 15 bp, Homo sapiens
tgaaatatgttcttg

SEQ ID NO: 785285 - DNA, 15 bp, Homo sapiens
gaaatatgttcttgt

SEQ ID NO: 785286 - DNA, 15 bp, Homo sapiens
aaatatgttcttgta

SEQ ID NO: 785287 - DNA, 15 bp, Homo sapiens
aatatgttcttgtaa

SEQ ID NO: 785288 - DNA, 15 bp, Homo sapiens
atatgttcttgtaat

SEQ ID NO: 785289 - DNA, 15 bp, Homo sapiens
tatgttcttgtaatt

SEQ ID NO: 785290 - DNA, 15 bp, Homo sapiens
atgttcttgtaattt

SEQ ID NO: 785291 - DNA, 15 bp, Homo sapiens
tgttcttgtaattta

SEQ ID NO: 785292 - DNA, 15 bp, Homo sapiens
gttcttgtaatttaa

SEQ ID NO: 785293 - DNA, 15 bp, Homo sapiens
ttcttgtaatttaag

SEQ ID NO: 785294 - DNA, 15 bp, Homo sapiens
tcttgtaatttaagc

SEQ ID NO: 785295 - DNA, 15 bp, Homo sapiens
cttgtaatttaagct

SEQ ID NO: 785296 - DNA, 15 bp, Homo sapiens
ttgtaatttaagctg

SEQ ID NO: 785297 - DNA, 15 bp, Homo sapiens
tgtaatttaagctga

SEQ ID NO: 785298 - DNA, 15 bp, Homo sapiens
gtaatttaagctgac

SEQ ID NO: 785299 - DNA, 15 bp, Homo sapiens
taatttaagctgaca

SEQ ID NO: 785300 - DNA, 15 bp, Homo sapiens
aatttaagctgacac

SEQ ID NO: 785301 - DNA, 15 bp, Homo sapiens
atttaagctgacact

SEQ ID NO: 785302 - DNA, 15 bp, Homo sapiens
tttaagctgacactc

SEQ ID NO: 785303 - DNA, 15 bp, Homo sapiens
ttaagctgacactcc

SEQ ID NO: 785304 - DNA, 15 bp, Homo sapiens
taagctgacactcct

SEQ ID NO: 785305 - DNA, 15 bp, Homo sapiens
aagctgacactccta

SEQ ID NO: 785306 - DNA, 15 bp, Homo sapiens
agctgacactcctaa

SEQ ID NO: 785307 - DNA, 15 bp, Homo sapiens
gctgacactcctaat

SEQ ID NO: 785308 - DNA, 15 bp, Homo sapiens
ctgacactcctaatt

SEQ ID NO: 785309 - DNA, 15 bp, Homo sapiens
tgacactcctaattt

SEQ ID NO: 785310 - DNA, 15 bp, Homo sapiens
gacactcctaattta

SEQ ID NO: 785311 - DNA, 15 bp, Homo sapiens
acactcctaatttag

SEQ ID NO: 785312 - DNA, 15 bp, Homo sapiens
cactcctaatttagc

SEQ ID NO: 785313 - DNA, 15 bp, Homo sapiens
actcctaatttagct

SEQ ID NO: 785314 - DNA, 15 bp, Homo sapiens
ctcctaatttagctc

SEQ ID NO: 785315 - DNA, 15 bp, Homo sapiens
tcctaatttagctct

SEQ ID NO: 785316 - DNA, 15 bp, Homo sapiens
cctaatttagctctt

SEQ ID NO: 785317 - DNA, 15 bp, Homo sapiens
ctaatttagctcttg

SEQ ID NO: 785318 - DNA, 15 bp, Homo sapiens
taatttagctcttgt

SEQ ID NO: 785319 - DNA, 15 bp, Homo sapiens
aatttagctcttgtc

SEQ ID NO: 785320 - DNA, 15 bp, Homo sapiens
atttagctcttgtcc

SEQ ID NO: 785321 - DNA, 15 bp, Homo sapiens
tttagctcttgtcct

SEQ ID NO: 785322 - DNA, 15 bp, Homo sapiens
ttagctcttgtcctc

SEQ ID NO: 785323 - DNA, 15 bp, Homo sapiens
tagctcttgtcctct

SEQ ID NO: 785324 - DNA, 15 bp, Homo sapiens
agctcttgtcctcta

SEQ ID NO: 785325 - DNA, 15 bp, Homo sapiens
gctcttgtcctctac

SEQ ID NO: 785326 - DNA, 15 bp, Homo sapiens
ctcttgtcctctact

SEQ ID NO: 785327 - DNA, 15 bp, Homo sapiens
tcttgtcctctactg

SEQ ID NO: 785328 - DNA, 15 bp, Homo sapiens
cttgtcctctactga

SEQ ID NO: 785329 - DNA, 15 bp, Homo sapiens
ttgtcctctactgag

SEQ ID NO: 785330 - DNA, 15 bp, Homo sapiens
tgtcctctactgagt

SEQ ID NO: 785331 - DNA, 15 bp, Homo sapiens
gtcctctactgagtc

SEQ ID NO: 785332 - DNA, 15 bp, Homo sapiens
tcctctactgagtct

SEQ ID NO: 785333 - DNA, 15 bp, Homo sapiens
cctctactgagtcta

SEQ ID NO: 785334 - DNA, 15 bp, Homo sapiens
ctctactgagtctac

SEQ ID NO: 785335 - DNA, 15 bp, Homo sapiens
tctactgagtctacc

SEQ ID NO: 785336 - DNA, 15 bp, Homo sapiens
ctactgagtctacct

SEQ ID NO: 785337 - DNA, 15 bp, Homo sapiens
tactgagtctaccta

SEQ ID NO: 785338 - DNA, 15 bp, Homo sapiens
actgagtctacctaa

SEQ ID NO: 785339 - DNA, 15 bp, Homo sapiens
ctgagtctacctaat

SEQ ID NO: 785340 - DNA, 15 bp, Homo sapiens
tgagtctacctaatt

SEQ ID NO: 785341 - DNA, 15 bp, Homo sapiens
gagtctacctaatta

SEQ ID NO: 785342 - DNA, 15 bp, Homo sapiens
agtctacctaattat

SEQ ID NO: 785343 - DNA, 15 bp, Homo sapiens
gtctacctaattata

SEQ ID NO: 785344 - DNA, 15 bp, Homo sapiens
tctacctaattatat

SEQ ID NO: 785345 - DNA, 15 bp, Homo sapiens
ctacctaattatatg

SEQ ID NO: 785346 - DNA, 15 bp, Homo sapiens
tacctaattatatgt

SEQ ID NO: 785347 - DNA, 15 bp, Homo sapiens
acctaattatatgta

SEQ ID NO: 785348 - DNA, 15 bp, Homo sapiens
cctaattatatgtat

SEQ ID NO: 785349 - DNA, 15 bp, Homo sapiens
ctaattatatgtatg

SEQ ID NO: 785350 - DNA, 15 bp, Homo sapiens
taattatatgtatgg

SEQ ID NO: 785351 - DNA, 15 bp, Homo sapiens
aattatatgtatgga

SEQ ID NO: 785352 - DNA, 15 bp, Homo sapiens
attatatgtatggat

SEQ ID NO: 785353 - DNA, 15 bp, Homo sapiens
ttatatgtatggatt

SEQ ID NO: 785354 - DNA, 15 bp, Homo sapiens
tatatgtatggattg

SEQ ID NO: 785355 - DNA, 15 bp, Homo sapiens
atatgtatggattga

SEQ ID NO: 785356 - DNA, 15 bp, Homo sapiens
tatgtatggattgac

SEQ ID NO: 785357 - DNA, 15 bp, Homo sapiens
atgtatggattgact

SEQ ID NO: 785358 - DNA, 15 bp, Homo sapiens
tgtatggattgactt

SEQ ID NO: 785359 - DNA, 15 bp, Homo sapiens
gtatggattgacttg

SEQ ID NO: 785360 - DNA, 15 bp, Homo sapiens
tatggattgacttgg

SEQ ID NO: 785361 - DNA, 15 bp, Homo sapiens
atggattgacttggt

SEQ ID NO: 785362 - DNA, 15 bp, Homo sapiens
tggattgacttggtg

SEQ ID NO: 785363 - DNA, 15 bp, Homo sapiens
ggattgacttggtgt

SEQ ID NO: 785364 - DNA, 15 bp, Homo sapiens
gattgacttggtgtt

SEQ ID NO: 785365 - DNA, 15 bp, Homo sapiens
attgacttggtgttt

SEQ ID NO: 785366 - DNA, 15 bp, Homo sapiens
ttgacttggtgtttt

SEQ ID NO: 785367 - DNA, 15 bp, Homo sapiens
tgacttggtgttttc

SEQ ID NO: 785368 - DNA, 15 bp, Homo sapiens
gacttggtgttttct

SEQ ID NO: 785369 - DNA, 15 bp, Homo sapiens
acttggtgttttctc

SEQ ID NO: 785370 - DNA, 15 bp, Homo sapiens
cttggtgttttctct

SEQ ID NO: 785371 - DNA, 15 bp, Homo sapiens
ttggtgttttctctt

SEQ ID NO: 785372 - DNA, 15 bp, Homo sapiens
tggtgttttctcttt

SEQ ID NO: 785373 - DNA, 15 bp, Homo sapiens
ggtgttttctctttt

SEQ ID NO: 785374 - DNA, 15 bp, Homo sapiens
gtgttttctcttttt

SEQ ID NO: 785375 - DNA, 15 bp, Homo sapiens
tgttttctctttttc

SEQ ID NO: 785376 - DNA, 15 bp, Homo sapiens
gttttctctttttct

SEQ ID NO: 785377 - DNA, 15 bp, Homo sapiens
ttttctctttttctt

SEQ ID NO: 785378 - DNA, 15 bp, Homo sapiens
tttctctttttctta

SEQ ID NO: 785379 - DNA, 15 bp, Homo sapiens
ttctctttttcttaa

SEQ ID NO: 785380 - DNA, 15 bp, Homo sapiens
tctctttttcttaaa

SEQ ID NO: 785381 - DNA, 15 bp, Homo sapiens
ctctttttcttaaat

SEQ ID NO: 785382 - DNA, 15 bp, Homo sapiens
tctttttcttaaata

SEQ ID NO: 785383 - DNA, 15 bp, Homo sapiens
ctttttcttaaatag

SEQ ID NO: 785384 - DNA, 15 bp, Homo sapiens
tttttcttaaatagt

SEQ ID NO: 785385 - DNA, 15 bp, Homo sapiens
ttttcttaaatagta

SEQ ID NO: 785386 - DNA, 15 bp, Homo sapiens
tttcttaaatagtaa

SEQ ID NO: 785387 - DNA, 15 bp, Homo sapiens
ttcttaaatagtaat

SEQ ID NO: 785388 - DNA, 15 bp, Homo sapiens
tcttaaatagtaatg

SEQ ID NO: 785389 - DNA, 15 bp, Homo sapiens
cttaaatagtaatgc

SEQ ID NO: 785390 - DNA, 15 bp, Homo sapiens
ttaaatagtaatgca

SEQ ID NO: 785391 - DNA, 15 bp, Homo sapiens
taaatagtaatgcag

SEQ ID NO: 785392 - DNA, 15 bp, Homo sapiens
aaatagtaatgcaga

SEQ ID NO: 785393 - DNA, 15 bp, Homo sapiens
aatagtaatgcagaa

SEQ ID NO: 785394 - DNA, 15 bp, Homo sapiens
atagtaatgcagaaa

SEQ ID NO: 785395 - DNA, 15 bp, Homo sapiens
tagtaatgcagaaag

SEQ ID NO: 785396 - DNA, 15 bp, Homo sapiens
agtaatgcagaaagc

SEQ ID NO: 785397 - DNA, 15 bp, Homo sapiens
gtaatgcagaaagcc

SEQ ID NO: 785398 - DNA, 15 bp, Homo sapiens
taatgcagaaagcct

SEQ ID NO: 785399 - DNA, 15 bp, Homo sapiens
aatgcagaaagcctg

SEQ ID NO: 785400 - DNA, 15 bp, Homo sapiens
atgcagaaagcctgg

SEQ ID NO: 785401 - DNA, 15 bp, Homo sapiens
tgcagaaagcctgga

SEQ ID NO: 785402 - DNA, 15 bp, Homo sapiens
gcagaaagcctggag

SEQ ID NO: 785403 - DNA, 15 bp, Homo sapiens
cagaaagcctggaga

SEQ ID NO: 785404 - DNA, 15 bp, Homo sapiens
agaaagcctggagag

SEQ ID NO: 785405 - DNA, 15 bp, Homo sapiens
gaaagcctggagaga

SEQ ID NO: 785406 - DNA, 15 bp, Homo sapiens
aaagcctggagagag

SEQ ID NO: 785407 - DNA, 15 bp, Homo sapiens
aagcctggagagaga

SEQ ID NO: 785408 - DNA, 15 bp, Homo sapiens
agcctggagagagag

SEQ ID NO: 785409 - DNA, 15 bp, Homo sapiens
gcctggagagagaga

SEQ ID NO: 785410 - DNA, 15 bp, Homo sapiens
cctggagagagagaa

SEQ ID NO: 785411 - DNA, 15 bp, Homo sapiens
ctggagagagagaaa

SEQ ID NO: 785412 - DNA, 15 bp, Homo sapiens
tggagagagagaaac

SEQ ID NO: 785413 - DNA, 15 bp, Homo sapiens
ggagagagagaaacc

SEQ ID NO: 785414 - DNA, 15 bp, Homo sapiens
gagagagagaaaccc

SEQ ID NO: 785415 - DNA, 15 bp, Homo sapiens
agagagagaaacccc

SEQ ID NO: 785416 - DNA, 15 bp, Homo sapiens
gagagagaaaccccc

SEQ ID NO: 785417 - DNA, 15 bp, Homo sapiens
agagagaaaccccca

SEQ ID NO: 785418 - DNA, 15 bp, Homo sapiens
gagagaaacccccaa

SEQ ID NO: 785419 - DNA, 15 bp, Homo sapiens
agagaaacccccaag

SEQ ID NO: 785420 - DNA, 15 bp, Homo sapiens
gagaaacccccaagc

SEQ ID NO: 785421 - DNA, 15 bp, Homo sapiens
agaaacccccaagct

SEQ ID NO: 785422 - DNA, 15 bp, Homo sapiens
gaaacccccaagcta

SEQ ID NO: 785423 - DNA, 15 bp, Homo sapiens
aaacccccaagctag

SEQ ID NO: 785424 - DNA, 15 bp, Homo sapiens
aacccccaagctagg

SEQ ID NO: 785425 - DNA, 15 bp, Homo sapiens
acccccaagctagga

SEQ ID NO: 785426 - DNA, 15 bp, Homo sapiens
cccccaagctaggat

SEQ ID NO: 785427 - DNA, 15 bp, Homo sapiens
ccccaagctaggatt

SEQ ID NO: 785428 - DNA, 15 bp, Homo sapiens
cccaagctaggattt

SEQ ID NO: 785429 - DNA, 15 bp, Homo sapiens
ccaagctaggatttc

SEQ ID NO: 785430 - DNA, 15 bp, Homo sapiens
caagctaggatttct

SEQ ID NO: 785431 - DNA, 15 bp, Homo sapiens
aagctaggatttctg

SEQ ID NO: 785432 - DNA, 15 bp, Homo sapiens
agctaggatttctgc

SEQ ID NO: 785433 - DNA, 15 bp, Homo sapiens
gctaggatttctgca

SEQ ID NO: 785434 - DNA, 15 bp, Homo sapiens
ctaggatttctgcag

SEQ ID NO: 785435 - DNA, 15 bp, Homo sapiens
taggatttctgcagc

SEQ ID NO: 785436 - DNA, 15 bp, Homo sapiens
aggatttctgcagct

SEQ ID NO: 785437 - DNA, 15 bp, Homo sapiens
ggatttctgcagctc

SEQ ID NO: 785438 - DNA, 15 bp, Homo sapiens
gatttctgcagctca

SEQ ID NO: 785439 - DNA, 15 bp, Homo sapiens
atttctgcagctcat

SEQ ID NO: 785440 - DNA, 15 bp, Homo sapiens
tttctgcagctcatg

SEQ ID NO: 785441 - DNA, 15 bp, Homo sapiens
ttctgcagctcatga

SEQ ID NO: 785442 - DNA, 15 bp, Homo sapiens
tctgcagctcatgaa

SEQ ID NO: 785443 - DNA, 15 bp, Homo sapiens
ctgcagctcatgaag

SEQ ID NO: 785444 - DNA, 15 bp, Homo sapiens
tgcagctcatgaagc

SEQ ID NO: 785445 - DNA, 15 bp, Homo sapiens
gcagctcatgaagcc

SEQ ID NO: 785446 - DNA, 15 bp, Homo sapiens
cagctcatgaagcct

SEQ ID NO: 785447 - DNA, 15 bp, Homo sapiens
agctcatgaagcctt

SEQ ID NO: 785448 - DNA, 15 bp, Homo sapiens
gctcatgaagccttg

SEQ ID NO: 785449 - DNA, 15 bp, Homo sapiens
ctcatgaagccttgg

SEQ ID NO: 785450 - DNA, 15 bp, Homo sapiens
tcatgaagccttgga

SEQ ID NO: 785451 - DNA, 15 bp, Homo sapiens
catgaagccttggag

SEQ ID NO: 785452 - DNA, 15 bp, Homo sapiens
atgaagccttggaga

SEQ ID NO: 785453 - DNA, 15 bp, Homo sapiens
tgaagccttggagat

SEQ ID NO: 785454 - DNA, 15 bp, Homo sapiens
gaagccttggagata

SEQ ID NO: 785455 - DNA, 15 bp, Homo sapiens
aagccttggagataa

SEQ ID NO: 785456 - DNA, 15 bp, Homo sapiens
agccttggagataaa

SEQ ID NO: 785457 - DNA, 15 bp, Homo sapiens
gccttggagataaat

SEQ ID NO: 785458 - DNA, 15 bp, Homo sapiens
ccttggagataaatg

SEQ ID NO: 785459 - DNA, 15 bp, Homo sapiens
cttggagataaatga

SEQ ID NO: 785460 - DNA, 15 bp, Homo sapiens
ttggagataaatgag

SEQ ID NO: 785461 - DNA, 15 bp, Homo sapiens
tggagataaatgagt

SEQ ID NO: 785462 - DNA, 15 bp, Homo sapiens
ggagataaatgagta

SEQ ID NO: 785463 - DNA, 15 bp, Homo sapiens
gagataaatgagtaa

SEQ ID NO: 785464 - DNA, 15 bp, Homo sapiens
agataaatgagtaag

SEQ ID NO: 785465 - DNA, 15 bp, Homo sapiens
gataaatgagtaagt

SEQ ID NO: 785466 - DNA, 15 bp, Homo sapiens
ataaatgagtaagtg

SEQ ID NO: 785467 - DNA, 15 bp, Homo sapiens
taaatgagtaagtgg

SEQ ID NO: 785468 - DNA, 15 bp, Homo sapiens
aaatgagtaagtggg

SEQ ID NO: 785469 - DNA, 15 bp, Homo sapiens
aatgagtaagtgggg

SEQ ID NO: 785470 - DNA, 15 bp, Homo sapiens
atgagtaagtggggg

SEQ ID NO: 785471 - DNA, 15 bp, Homo sapiens
tgagtaagtggggga

SEQ ID NO: 785472 - DNA, 15 bp, Homo sapiens
gagtaagtgggggaa

SEQ ID NO: 785473 - DNA, 15 bp, Homo sapiens
agtaagtgggggaaa

SEQ ID NO: 785474 - DNA, 15 bp, Homo sapiens
gtaagtgggggaaaa

SEQ ID NO: 785475 - DNA, 15 bp, Homo sapiens
taagtgggggaaaat

SEQ ID NO: 785476 - DNA, 15 bp, Homo sapiens
aagtgggggaaaatc

SEQ ID NO: 785477 - DNA, 15 bp, Homo sapiens
agtgggggaaaatct

SEQ ID NO: 785478 - DNA, 15 bp, Homo sapiens
gtgggggaaaatctt

SEQ ID NO: 785479 - DNA, 15 bp, Homo sapiens
tgggggaaaatcttg

SEQ ID NO: 785480 - DNA, 15 bp, Homo sapiens
gggggaaaatcttgc

SEQ ID NO: 785481 - DNA, 15 bp, Homo sapiens
ggggaaaatcttgct

SEQ ID NO: 785482 - DNA, 15 bp, Homo sapiens
gggaaaatcttgctg

SEQ ID NO: 785483 - DNA, 15 bp, Homo sapiens
ggaaaatcttgctgt

SEQ ID NO: 785484 - DNA, 15 bp, Homo sapiens
gaaaatcttgctgtt

SEQ ID NO: 785485 - DNA, 15 bp, Homo sapiens
aaaatcttgctgtta

SEQ ID NO: 785486 - DNA, 15 bp, Homo sapiens
aaatcttgctgttaa

SEQ ID NO: 785487 - DNA, 15 bp, Homo sapiens
aatcttgctgttaaa

SEQ ID NO: 785488 - DNA, 15 bp, Homo sapiens
atcttgctgttaaaa

SEQ ID NO: 785489 - DNA, 15 bp, Homo sapiens
tcttgctgttaaaaa

SEQ ID NO: 785490 - DNA, 15 bp, Homo sapiens
cttgctgttaaaaag

SEQ ID NO: 785491 - DNA, 15 bp, Homo sapiens
ttgctgttaaaaagg

SEQ ID NO: 785492 - DNA, 15 bp, Homo sapiens
tgctgttaaaaagga

SEQ ID NO: 785493 - DNA, 15 bp, Homo sapiens
gctgttaaaaaggaa

SEQ ID NO: 785494 - DNA, 15 bp, Homo sapiens
ctgttaaaaaggaaa

SEQ ID NO: 785495 - DNA, 15 bp, Homo sapiens
tgttaaaaaggaaat

SEQ ID NO: 785496 - DNA, 15 bp, Homo sapiens
gttaaaaaggaaatc

SEQ ID NO: 785497 - DNA, 15 bp, Homo sapiens
ttaaaaaggaaatct

SEQ ID NO: 785498 - DNA, 15 bp, Homo sapiens
taaaaaggaaatctc

SEQ ID NO: 785499 - DNA, 15 bp, Homo sapiens
aaaaaggaaatctca

SEQ ID NO: 785500 - DNA, 15 bp, Homo sapiens
aaaaggaaatctcat

SEQ ID NO: 785501 - DNA, 15 bp, Homo sapiens
aaaggaaatctcatc

SEQ ID NO: 785502 - DNA, 15 bp, Homo sapiens
aaggaaatctcatcc

SEQ ID NO: 785503 - DNA, 15 bp, Homo sapiens
aggaaatctcatcct

SEQ ID NO: 785504 - DNA, 15 bp, Homo sapiens
ggaaatctcatcctt

SEQ ID NO: 785505 - DNA, 15 bp, Homo sapiens
gaaatctcatccttt

SEQ ID NO: 785506 - DNA, 15 bp, Homo sapiens
aaatctcatcctttg

SEQ ID NO: 785507 - DNA, 15 bp, Homo sapiens
aatctcatcctttgc

SEQ ID NO: 785508 - DNA, 15 bp, Homo sapiens
atctcatcctttgct

SEQ ID NO: 785509 - DNA, 15 bp, Homo sapiens
tctcatcctttgctg

SEQ ID NO: 785510 - DNA, 15 bp, Homo sapiens
ctcatcctttgctga

SEQ ID NO: 785511 - DNA, 15 bp, Homo sapiens
tcatcctttgctgaa

SEQ ID NO: 785512 - DNA, 15 bp, Homo sapiens
catcctttgctgaat

SEQ ID NO: 785513 - DNA, 15 bp, Homo sapiens
atcctttgctgaata

SEQ ID NO: 785514 - DNA, 15 bp, Homo sapiens
tcctttgctgaatat

SEQ ID NO: 785515 - DNA, 15 bp, Homo sapiens
cctttgctgaatata

SEQ ID NO: 785516 - DNA, 15 bp, Homo sapiens
ctttgctgaatatat

SEQ ID NO: 785517 - DNA, 15 bp, Homo sapiens
tttgctgaatatatt

SEQ ID NO: 785518 - DNA, 15 bp, Homo sapiens
ttgctgaatatattc

SEQ ID NO: 785519 - DNA, 15 bp, Homo sapiens
tgctgaatatattca

SEQ ID NO: 785520 - DNA, 15 bp, Homo sapiens
gctgaatatattcag

SEQ ID NO: 785521 - DNA, 15 bp, Homo sapiens
ctgaatatattcagt

SEQ ID NO: 785522 - DNA, 15 bp, Homo sapiens
tgaatatattcagtt

SEQ ID NO: 785523 - DNA, 15 bp, Homo sapiens
gaatatattcagttg

SEQ ID NO: 785524 - DNA, 15 bp, Homo sapiens
aatatattcagttgc

SEQ ID NO: 785525 - DNA, 15 bp, Homo sapiens
atatattcagttgcc

SEQ ID NO: 785526 - DNA, 15 bp, Homo sapiens
tatattcagttgcca

SEQ ID NO: 785527 - DNA, 15 bp, Homo sapiens
atattcagttgccat

SEQ ID NO: 785528 - DNA, 15 bp, Homo sapiens
tattcagttgccatt

SEQ ID NO: 785529 - DNA, 15 bp, Homo sapiens
attcagttgccattg

SEQ ID NO: 785530 - DNA, 15 bp, Homo sapiens
ttcagttgccattga

SEQ ID NO: 785531 - DNA, 15 bp, Homo sapiens
tcagttgccattgat

SEQ ID NO: 785532 - DNA, 15 bp, Homo sapiens
cagttgccattgata

SEQ ID NO: 785533 - DNA, 15 bp, Homo sapiens
agttgccattgatag

SEQ ID NO: 785534 - DNA, 15 bp, Homo sapiens
gttgccattgatagg

SEQ ID NO: 785535 - DNA, 15 bp, Homo sapiens
ttgccattgatagga

SEQ ID NO: 785536 - DNA, 15 bp, Homo sapiens
tgccattgataggat

SEQ ID NO: 785537 - DNA, 15 bp, Homo sapiens
gccattgataggata

SEQ ID NO: 785538 - DNA, 15 bp, Homo sapiens
ccattgataggatac

SEQ ID NO: 785539 - DNA, 15 bp, Homo sapiens
cattgataggatact

SEQ ID NO: 785540 - DNA, 15 bp, Homo sapiens
attgataggatactt

SEQ ID NO: 785541 - DNA, 15 bp, Homo sapiens
ttgataggatactta

SEQ ID NO: 785542 - DNA, 15 bp, Homo sapiens
tgataggatacttaa

SEQ ID NO: 785543 - DNA, 15 bp, Homo sapiens
gataggatacttaaa

SEQ ID NO: 785544 - DNA, 15 bp, Homo sapiens
ataggatacttaaat

SEQ ID NO: 785545 - DNA, 15 bp, Homo sapiens
taggatacttaaatt

SEQ ID NO: 785546 - DNA, 15 bp, Homo sapiens
aggatacttaaatta

SEQ ID NO: 785547 - DNA, 15 bp, Homo sapiens
ggatacttaaattaa

SEQ ID NO: 785548 - DNA, 15 bp, Homo sapiens
gatacttaaattaaa

SEQ ID NO: 785549 - DNA, 15 bp, Homo sapiens
atacttaaattaaac

SEQ ID NO: 785550 - DNA, 15 bp, Homo sapiens
tacttaaattaaact

SEQ ID NO: 785551 - DNA, 15 bp, Homo sapiens
acttaaattaaactg

SEQ ID NO: 785552 - DNA, 15 bp, Homo sapiens
cttaaattaaactgc

SEQ ID NO: 785553 - DNA, 15 bp, Homo sapiens
ttaaattaaactgca

SEQ ID NO: 785554 - DNA, 15 bp, Homo sapiens
taaattaaactgcat

SEQ ID NO: 785555 - DNA, 15 bp, Homo sapiens
aaattaaactgcatt

SEQ ID NO: 785556 - DNA, 15 bp, Homo sapiens
aattaaactgcattt

SEQ ID NO: 785557 - DNA, 15 bp, Homo sapiens
attaaactgcatttg

SEQ ID NO: 785558 - DNA, 15 bp, Homo sapiens
ttaaactgcatttga

SEQ ID NO: 785559 - DNA, 15 bp, Homo sapiens
taaactgcatttgaa

SEQ ID NO: 785560 - DNA, 15 bp, Homo sapiens
aaactgcatttgaac

SEQ ID NO: 785561 - DNA, 15 bp, Homo sapiens
aactgcatttgaact

SEQ ID NO: 785562 - DNA, 15 bp, Homo sapiens
actgcatttgaactg

SEQ ID NO: 785563 - DNA, 15 bp, Homo sapiens
ctgcatttgaactgg

SEQ ID NO: 785564 - DNA, 15 bp, Homo sapiens
tgcatttgaactgga

SEQ ID NO: 785565 - DNA, 15 bp, Homo sapiens
gcatttgaactggag

SEQ ID NO: 785566 - DNA, 15 bp, Homo sapiens
catttgaactggagg

SEQ ID NO: 785567 - DNA, 15 bp, Homo sapiens
atttgaactggagga

SEQ ID NO: 785568 - DNA, 15 bp, Homo sapiens
tttgaactggaggat

SEQ ID NO: 785569 - DNA, 15 bp, Homo sapiens
ttgaactggaggatt

SEQ ID NO: 785570 - DNA, 15 bp, Homo sapiens
tgaactggaggatta

SEQ ID NO: 785571 - DNA, 15 bp, Homo sapiens
gaactggaggattat

SEQ ID NO: 785572 - DNA, 15 bp, Homo sapiens
aactggaggattatt

SEQ ID NO: 785573 - DNA, 15 bp, Homo sapiens
actggaggattattt

SEQ ID NO: 785574 - DNA, 15 bp, Homo sapiens
ctggaggattatttg

SEQ ID NO: 785575 - DNA, 15 bp, Homo sapiens
tggaggattatttgg

SEQ ID NO: 785576 - DNA, 15 bp, Homo sapiens
ggaggattatttggg

SEQ ID NO: 785577 - DNA, 15 bp, Homo sapiens
gaggattatttgggg

SEQ ID NO: 785578 - DNA, 15 bp, Homo sapiens
aggattatttgggga

SEQ ID NO: 785579 - DNA, 15 bp, Homo sapiens
ggattatttggggag

SEQ ID NO: 785580 - DNA, 15 bp, Homo sapiens
gattatttggggagt

SEQ ID NO: 785581 - DNA, 15 bp, Homo sapiens
attatttggggagtt

SEQ ID NO: 785582 - DNA, 15 bp, Homo sapiens
ttatttggggagtta

SEQ ID NO: 785583 - DNA, 15 bp, Homo sapiens
tatttggggagttat

SEQ ID NO: 785584 - DNA, 15 bp, Homo sapiens
atttggggagttatt

SEQ ID NO: 785585 - DNA, 15 bp, Homo sapiens
tttggggagttatta

SEQ ID NO: 785586 - DNA, 15 bp, Homo sapiens
ttggggagttattac

SEQ ID NO: 785587 - DNA, 15 bp, Homo sapiens
tggggagttattact

SEQ ID NO: 785588 - DNA, 15 bp, Homo sapiens
ggggagttattactc

SEQ ID NO: 785589 - DNA, 15 bp, Homo sapiens
gggagttattactct

SEQ ID NO: 785590 - DNA, 15 bp, Homo sapiens
ggagttattactcta

SEQ ID NO: 785591 - DNA, 15 bp, Homo sapiens
gagttattactctat

SEQ ID NO: 785592 - DNA, 15 bp, Homo sapiens
agttattactctatt

SEQ ID NO: 785593 - DNA, 15 bp, Homo sapiens
gttattactctattt

SEQ ID NO: 785594 - DNA, 15 bp, Homo sapiens
ttattactctattta

SEQ ID NO: 785595 - DNA, 15 bp, Homo sapiens
tattactctatttaa

SEQ ID NO: 785596 - DNA, 15 bp, Homo sapiens
attactctatttaaa

SEQ ID NO: 785597 - DNA, 15 bp, Homo sapiens
ttactctatttaaaa

SEQ ID NO: 785598 - DNA, 15 bp, Homo sapiens
tactctatttaaaaa

SEQ ID NO: 785599 - DNA, 15 bp, Homo sapiens
actctatttaaaaaa

SEQ ID NO: 785600 - DNA, 15 bp, Homo sapiens
ctctatttaaaaaag

SEQ ID NO: 785601 - DNA, 15 bp, Homo sapiens
tctatttaaaaaagt

SEQ ID NO: 785602 - DNA, 15 bp, Homo sapiens
ctatttaaaaaagtt

SEQ ID NO: 785603 - DNA, 15 bp, Homo sapiens
tatttaaaaaagttt

SEQ ID NO: 785604 - DNA, 15 bp, Homo sapiens
atttaaaaaagtttt

SEQ ID NO: 785605 - DNA, 15 bp, Homo sapiens
tttaaaaaagttttt

SEQ ID NO: 785606 - DNA, 15 bp, Homo sapiens
ttaaaaaagtttttt

SEQ ID NO: 785607 - DNA, 15 bp, Homo sapiens
taaaaaagttttttt

SEQ ID NO: 785608 - DNA, 15 bp, Homo sapiens
aaaaaagtttttttt

SEQ ID NO: 785609 - DNA, 15 bp, Homo sapiens
aaaaagttttttttt

SEQ ID NO: 785610 - DNA, 15 bp, Homo sapiens
aaaagtttttttttt

SEQ ID NO: 785611 - DNA, 15 bp, Homo sapiens
aaagtttttttttta

SEQ ID NO: 785612 - DNA, 15 bp, Homo sapiens
aagttttttttttaa

SEQ ID NO: 785613 - DNA, 15 bp, Homo sapiens
agttttttttttaaa

SEQ ID NO: 785614 - DNA, 15 bp, Homo sapiens
gttttttttttaaat

SEQ ID NO: 785615 - DNA, 15 bp, Homo sapiens
ttttttttttaaatg

SEQ ID NO: 785616 - DNA, 15 bp, Homo sapiens
tttttttttaaatga

SEQ ID NO: 785617 - DNA, 15 bp, Homo sapiens
ttttttttaaatgaa

SEQ ID NO: 785618 - DNA, 15 bp, Homo sapiens
tttttttaaatgaag

SEQ ID NO: 785619 - DNA, 15 bp, Homo sapiens
ttttttaaatgaagg

SEQ ID NO: 785620 - DNA, 15 bp, Homo sapiens
tttttaaatgaagga

SEQ ID NO: 785621 - DNA, 15 bp, Homo sapiens
ttttaaatgaaggac

SEQ ID NO: 785622 - DNA, 15 bp, Homo sapiens
tttaaatgaaggaca

SEQ ID NO: 785623 - DNA, 15 bp, Homo sapiens
ttaaatgaaggacag

SEQ ID NO: 785624 - DNA, 15 bp, Homo sapiens
taaatgaaggacagc

SEQ ID NO: 785625 - DNA, 15 bp, Homo sapiens
aaatgaaggacagcc

SEQ ID NO: 785626 - DNA, 15 bp, Homo sapiens
aatgaaggacagcca

SEQ ID NO: 785627 - DNA, 15 bp, Homo sapiens
atgaaggacagccac

SEQ ID NO: 785628 - DNA, 15 bp, Homo sapiens
tgaaggacagccacc

SEQ ID NO: 785629 - DNA, 15 bp, Homo sapiens
gaaggacagccacca

SEQ ID NO: 785630 - DNA, 15 bp, Homo sapiens
aaggacagccaccat

SEQ ID NO: 785631 - DNA, 15 bp, Homo sapiens
aggacagccaccatg

SEQ ID NO: 785632 - DNA, 15 bp, Homo sapiens
ggacagccaccatgt

SEQ ID NO: 785633 - DNA, 15 bp, Homo sapiens
gacagccaccatgtg

SEQ ID NO: 785634 - DNA, 15 bp, Homo sapiens
acagccaccatgtgg

SEQ ID NO: 785635 - DNA, 15 bp, Homo sapiens
cagccaccatgtgga

SEQ ID NO: 785636 - DNA, 15 bp, Homo sapiens
agccaccatgtggag

SEQ ID NO: 785637 - DNA, 15 bp, Homo sapiens
gccaccatgtggagg

SEQ ID NO: 785638 - DNA, 15 bp, Homo sapiens
ccaccatgtggaggt

SEQ ID NO: 785639 - DNA, 15 bp, Homo sapiens
caccatgtggaggtg

SEQ ID NO: 785640 - DNA, 15 bp, Homo sapiens
accatgtggaggtgg

SEQ ID NO: 785641 - DNA, 15 bp, Homo sapiens
ccatgtggaggtggt

SEQ ID NO: 785642 - DNA, 15 bp, Homo sapiens
catgtggaggtggtt

SEQ ID NO: 785643 - DNA, 15 bp, Homo sapiens
atgtggaggtggttt

SEQ ID NO: 785644 - DNA, 15 bp, Homo sapiens
tgtggaggtggtttt

SEQ ID NO: 785645 - DNA, 15 bp, Homo sapiens
gtggaggtggtttta

SEQ ID NO: 785646 - DNA, 15 bp, Homo sapiens
tggaggtggttttag

SEQ ID NO: 785647 - DNA, 15 bp, Homo sapiens
ggaggtggttttagt

SEQ ID NO: 785648 - DNA, 15 bp, Homo sapiens
gaggtggttttagtc

SEQ ID NO: 785649 - DNA, 15 bp, Homo sapiens
aggtggttttagtca

SEQ ID NO: 785650 - DNA, 15 bp, Homo sapiens
ggtggttttagtcat

SEQ ID NO: 785651 - DNA, 15 bp, Homo sapiens
gtggttttagtcatt

SEQ ID NO: 785652 - DNA, 15 bp, Homo sapiens
tggttttagtcattt

SEQ ID NO: 785653 - DNA, 15 bp, Homo sapiens
ggttttagtcatttt

SEQ ID NO: 785654 - DNA, 15 bp, Homo sapiens
gttttagtcatttta

SEQ ID NO: 785655 - DNA, 15 bp, Homo sapiens
ttttagtcattttat

SEQ ID NO: 785656 - DNA, 15 bp, Homo sapiens
tttagtcattttatg

SEQ ID NO: 785657 - DNA, 15 bp, Homo sapiens
ttagtcattttatga

SEQ ID NO: 785658 - DNA, 15 bp, Homo sapiens
tagtcattttatgaa

SEQ ID NO: 785659 - DNA, 15 bp, Homo sapiens
agtcattttatgaat

SEQ ID NO: 785660 - DNA, 15 bp, Homo sapiens
gtcattttatgaatt

SEQ ID NO: 785661 - DNA, 15 bp, Homo sapiens
tcattttatgaattc

SEQ ID NO: 785662 - DNA, 15 bp, Homo sapiens
cattttatgaattca

SEQ ID NO: 785663 - DNA, 15 bp, Homo sapiens
attttatgaattcaa

SEQ ID NO: 785664 - DNA, 15 bp, Homo sapiens
ttttatgaattcaat

SEQ ID NO: 785665 - DNA, 15 bp, Homo sapiens
tttatgaattcaatg

SEQ ID NO: 785666 - DNA, 15 bp, Homo sapiens
ttatgaattcaatgg

SEQ ID NO: 785667 - DNA, 15 bp, Homo sapiens
tatgaattcaatggc

SEQ ID NO: 785668 - DNA, 15 bp, Homo sapiens
atgaattcaatggct

SEQ ID NO: 785669 - DNA, 15 bp, Homo sapiens
tgaattcaatggctt

SEQ ID NO: 785670 - DNA, 15 bp, Homo sapiens
gaattcaatggcttt

SEQ ID NO: 785671 - DNA, 15 bp, Homo sapiens
aattcaatggctttg

SEQ ID NO: 785672 - DNA, 15 bp, Homo sapiens
attcaatggctttgc

SEQ ID NO: 785673 - DNA, 15 bp, Homo sapiens
ttcaatggctttgct

SEQ ID NO: 785674 - DNA, 15 bp, Homo sapiens
tcaatggctttgctg

SEQ ID NO: 785675 - DNA, 15 bp, Homo sapiens
caatggctttgctgt

SEQ ID NO: 785676 - DNA, 15 bp, Homo sapiens
aatggctttgctgtg

SEQ ID NO: 785677 - DNA, 15 bp, Homo sapiens
atggctttgctgtga

SEQ ID NO: 785678 - DNA, 15 bp, Homo sapiens
tggctttgctgtgat

SEQ ID NO: 785679 - DNA, 15 bp, Homo sapiens
ggctttgctgtgatc

SEQ ID NO: 785680 - DNA, 15 bp, Homo sapiens
gctttgctgtgatcc

SEQ ID NO: 785681 - DNA, 15 bp, Homo sapiens
ctttgctgtgatcct

SEQ ID NO: 785682 - DNA, 15 bp, Homo sapiens
tttgctgtgatccta

SEQ ID NO: 785683 - DNA, 15 bp, Homo sapiens
ttgctgtgatcctaa

SEQ ID NO: 785684 - DNA, 15 bp, Homo sapiens
tgctgtgatcctaaa

SEQ ID NO: 785685 - DNA, 15 bp, Homo sapiens
gctgtgatcctaaat

SEQ ID NO: 785686 - DNA, 15 bp, Homo sapiens
ctgtgatcctaaatt

SEQ ID NO: 785687 - DNA, 15 bp, Homo sapiens
tgtgatcctaaatta

SEQ ID NO: 785688 - DNA, 15 bp, Homo sapiens
gtgatcctaaattaa

SEQ ID NO: 785689 - DNA, 15 bp, Homo sapiens
tgatcctaaattaat

SEQ ID NO: 785690 - DNA, 15 bp, Homo sapiens
gatcctaaattaatt

SEQ ID NO: 785691 - DNA, 15 bp, Homo sapiens
atcctaaattaattt

SEQ ID NO: 785692 - DNA, 15 bp, Homo sapiens
tcctaaattaatttc

SEQ ID NO: 785693 - DNA, 15 bp, Homo sapiens
cctaaattaatttct

SEQ ID NO: 785694 - DNA, 15 bp, Homo sapiens
ctaaattaatttctt

SEQ ID NO: 785695 - DNA, 15 bp, Homo sapiens
taaattaatttcttg

SEQ ID NO: 785696 - DNA, 15 bp, Homo sapiens
aaattaatttcttga

SEQ ID NO: 785697 - DNA, 15 bp, Homo sapiens
aattaatttcttgaa

SEQ ID NO: 785698 - DNA, 15 bp, Homo sapiens
attaatttcttgaag

SEQ ID NO: 785699 - DNA, 15 bp, Homo sapiens
ttaatttcttgaagg

SEQ ID NO: 785700 - DNA, 15 bp, Homo sapiens
taatttcttgaaggg

SEQ ID NO: 785701 - DNA, 15 bp, Homo sapiens
aatttcttgaagggc

SEQ ID NO: 785702 - DNA, 15 bp, Homo sapiens
atttcttgaagggct

SEQ ID NO: 785703 - DNA, 15 bp, Homo sapiens
tttcttgaagggcta

SEQ ID NO: 785704 - DNA, 15 bp, Homo sapiens
ttcttgaagggctat

SEQ ID NO: 785705 - DNA, 15 bp, Homo sapiens
tcttgaagggctatc

SEQ ID NO: 785706 - DNA, 15 bp, Homo sapiens
cttgaagggctatcc

SEQ ID NO: 785707 - DNA, 15 bp, Homo sapiens
ttgaagggctatccc

SEQ ID NO: 785708 - DNA, 15 bp, Homo sapiens
tgaagggctatccct

SEQ ID NO: 785709 - DNA, 15 bp, Homo sapiens
gaagggctatcccta

SEQ ID NO: 785710 - DNA, 15 bp, Homo sapiens
aagggctatccctag

SEQ ID NO: 785711 - DNA, 15 bp, Homo sapiens
agggctatccctagg

SEQ ID NO: 785712 - DNA, 15 bp, Homo sapiens
gggctatccctagga

SEQ ID NO: 785713 - DNA, 15 bp, Homo sapiens
ggctatccctaggat

SEQ ID NO: 785714 - DNA, 15 bp, Homo sapiens
gctatccctaggata

SEQ ID NO: 785715 - DNA, 15 bp, Homo sapiens
ctatccctaggatat

SEQ ID NO: 785716 - DNA, 15 bp, Homo sapiens
tatccctaggatatt

SEQ ID NO: 785717 - DNA, 15 bp, Homo sapiens
atccctaggatattg

SEQ ID NO: 785718 - DNA, 15 bp, Homo sapiens
tccctaggatattgt

SEQ ID NO: 785719 - DNA, 15 bp, Homo sapiens
ccctaggatattgtg

SEQ ID NO: 785720 - DNA, 15 bp, Homo sapiens
cctaggatattgtga

SEQ ID NO: 785721 - DNA, 15 bp, Homo sapiens
ctaggatattgtgag

SEQ ID NO: 785722 - DNA, 15 bp, Homo sapiens
taggatattgtgagg

SEQ ID NO: 785723 - DNA, 15 bp, Homo sapiens
aggatattgtgagga

SEQ ID NO: 785724 - DNA, 15 bp, Homo sapiens
ggatattgtgaggat

SEQ ID NO: 785725 - DNA, 15 bp, Homo sapiens
gatattgtgaggata

SEQ ID NO: 785726 - DNA, 15 bp, Homo sapiens
atattgtgaggatat

SEQ ID NO: 785727 - DNA, 15 bp, Homo sapiens
tattgtgaggatata

SEQ ID NO: 785728 - DNA, 15 bp, Homo sapiens
attgtgaggatataa

SEQ ID NO: 785729 - DNA, 15 bp, Homo sapiens
ttgtgaggatataaa

SEQ ID NO: 785730 - DNA, 15 bp, Homo sapiens
tgtgaggatataaaa

SEQ ID NO: 785731 - DNA, 15 bp, Homo sapiens
gtgaggatataaaat

SEQ ID NO: 785732 - DNA, 15 bp, Homo sapiens
tgaggatataaaata

SEQ ID NO: 785733 - DNA, 15 bp, Homo sapiens
gaggatataaaataa

SEQ ID NO: 785734 - DNA, 15 bp, Homo sapiens
aggatataaaataaa

SEQ ID NO: 785735 - DNA, 15 bp, Homo sapiens
ggatataaaataaat

SEQ ID NO: 785736 - DNA, 15 bp, Homo sapiens
gatataaaataaata

SEQ ID NO: 785737 - DNA, 15 bp, Homo sapiens
atataaaataaatac

SEQ ID NO: 785738 - DNA, 15 bp, Homo sapiens
tataaaataaataca

SEQ ID NO: 785739 - DNA, 15 bp, Homo sapiens
ataaaataaatacaa

SEQ ID NO: 785740 - DNA, 15 bp, Homo sapiens
taaaataaatacaat

SEQ ID NO: 785741 - DNA, 15 bp, Homo sapiens
aaaataaatacaatt

SEQ ID NO: 785742 - DNA, 15 bp, Homo sapiens
aaataaatacaattc

SEQ ID NO: 785743 - DNA, 15 bp, Homo sapiens
aataaatacaattct

SEQ ID NO: 785744 - DNA, 15 bp, Homo sapiens
ataaatacaattctt

SEQ ID NO: 785745 - DNA, 15 bp, Homo sapiens
taaatacaattcttt

SEQ ID NO: 785746 - DNA, 15 bp, Homo sapiens
aaatacaattcttta

SEQ ID NO: 785747 - DNA, 15 bp, Homo sapiens
aatacaattctttac

SEQ ID NO: 785748 - DNA, 15 bp, Homo sapiens
atacaattctttaca

SEQ ID NO: 785749 - DNA, 15 bp, Homo sapiens
tacaattctttacat

SEQ ID NO: 785750 - DNA, 15 bp, Homo sapiens
acaattctttacata

SEQ ID NO: 785751 - DNA, 15 bp, Homo sapiens
caattctttacatat

SEQ ID NO: 785752 - DNA, 15 bp, Homo sapiens
aattctttacatatc

SEQ ID NO: 785753 - DNA, 15 bp, Homo sapiens
attctttacatatct

SEQ ID NO: 785754 - DNA, 15 bp, Homo sapiens
ttctttacatatcta

SEQ ID NO: 785755 - DNA, 15 bp, Homo sapiens
tctttacatatctaa

SEQ ID NO: 785756 - DNA, 15 bp, Homo sapiens
ctttacatatctaaa

SEQ ID NO: 785757 - DNA, 15 bp, Homo sapiens
tttacatatctaaaa

SEQ ID NO: 785758 - DNA, 15 bp, Homo sapiens
ttacatatctaaaac

SEQ ID NO: 785759 - DNA, 15 bp, Homo sapiens
tacatatctaaaaca

SEQ ID NO: 785760 - DNA, 15 bp, Homo sapiens
acatatctaaaacat

SEQ ID NO: 785761 - DNA, 15 bp, Homo sapiens
catatctaaaacatt

SEQ ID NO: 785762 - DNA, 15 bp, Homo sapiens
atatctaaaacattc

SEQ ID NO: 785763 - DNA, 15 bp, Homo sapiens
tatctaaaacattct

SEQ ID NO: 785764 - DNA, 15 bp, Homo sapiens
atctaaaacattctg

SEQ ID NO: 785765 - DNA, 15 bp, Homo sapiens
tctaaaacattctga

SEQ ID NO: 785766 - DNA, 15 bp, Homo sapiens
ctaaaacattctgac

SEQ ID NO: 785767 - DNA, 15 bp, Homo sapiens
taaaacattctgaca

SEQ ID NO: 785768 - DNA, 15 bp, Homo sapiens
aaaacattctgacag

SEQ ID NO: 785769 - DNA, 15 bp, Homo sapiens
aaacattctgacagg

SEQ ID NO: 785770 - DNA, 15 bp, Homo sapiens
aacattctgacaggg

SEQ ID NO: 785771 - DNA, 15 bp, Homo sapiens
acattctgacaggga

SEQ ID NO: 785772 - DNA, 15 bp, Homo sapiens
cattctgacagggaa

SEQ ID NO: 785773 - DNA, 15 bp, Homo sapiens
attctgacagggaaa

SEQ ID NO: 785774 - DNA, 15 bp, Homo sapiens
ttctgacagggaaaa

SEQ ID NO: 785775 - DNA, 15 bp, Homo sapiens
tctgacagggaaaat

SEQ ID NO: 785776 - DNA, 15 bp, Homo sapiens
ctgacagggaaaatt

SEQ ID NO: 785777 - DNA, 15 bp, Homo sapiens
tgacagggaaaattt

SEQ ID NO: 785778 - DNA, 15 bp, Homo sapiens
gacagggaaaatttt

SEQ ID NO: 785779 - DNA, 15 bp, Homo sapiens
acagggaaaattttc

SEQ ID NO: 785780 - DNA, 15 bp, Homo sapiens
cagggaaaattttcc

SEQ ID NO: 785781 - DNA, 15 bp, Homo sapiens
agggaaaattttcca

SEQ ID NO: 785782 - DNA, 15 bp, Homo sapiens
gggaaaattttccag

SEQ ID NO: 785783 - DNA, 15 bp, Homo sapiens
ggaaaattttccaga

SEQ ID NO: 785784 - DNA, 15 bp, Homo sapiens
gaaaattttccagat

SEQ ID NO: 785785 - DNA, 15 bp, Homo sapiens
aaaattttccagatg

SEQ ID NO: 785786 - DNA, 15 bp, Homo sapiens
aaattttccagatgt

SEQ ID NO: 785787 - DNA, 15 bp, Homo sapiens
aattttccagatgta

SEQ ID NO: 785788 - DNA, 15 bp, Homo sapiens
attttccagatgtag

SEQ ID NO: 785789 - DNA, 15 bp, Homo sapiens
ttttccagatgtaga

SEQ ID NO: 785790 - DNA, 15 bp, Homo sapiens
tttccagatgtagaa

SEQ ID NO: 785791 - DNA, 15 bp, Homo sapiens
ttccagatgtagaat

SEQ ID NO: 785792 - DNA, 15 bp, Homo sapiens
tccagatgtagaatg

SEQ ID NO: 785793 - DNA, 15 bp, Homo sapiens
ccagatgtagaatgc

SEQ ID NO: 785794 - DNA, 15 bp, Homo sapiens
cagatgtagaatgct

SEQ ID NO: 785795 - DNA, 15 bp, Homo sapiens
agatgtagaatgctc

SEQ ID NO: 785796 - DNA, 15 bp, Homo sapiens
gatgtagaatgctca

SEQ ID NO: 785797 - DNA, 15 bp, Homo sapiens
atgtagaatgctcat

SEQ ID NO: 785798 - DNA, 15 bp, Homo sapiens
tgtagaatgctcatc

SEQ ID NO: 785799 - DNA, 15 bp, Homo sapiens
gtagaatgctcatct

SEQ ID NO: 785800 - DNA, 15 bp, Homo sapiens
tagaatgctcatctg

SEQ ID NO: 785801 - DNA, 15 bp, Homo sapiens
agaatgctcatctgc

SEQ ID NO: 785802 - DNA, 15 bp, Homo sapiens
gaatgctcatctgca

SEQ ID NO: 785803 - DNA, 15 bp, Homo sapiens
aatgctcatctgcac

SEQ ID NO: 785804 - DNA, 15 bp, Homo sapiens
atgctcatctgcact

SEQ ID NO: 785805 - DNA, 15 bp, Homo sapiens
tgctcatctgcacta

SEQ ID NO: 785806 - DNA, 15 bp, Homo sapiens
gctcatctgcactag

SEQ ID NO: 785807 - DNA, 15 bp, Homo sapiens
ctcatctgcactaga

SEQ ID NO: 785808 - DNA, 15 bp, Homo sapiens
tcatctgcactagaa

SEQ ID NO: 785809 - DNA, 15 bp, Homo sapiens
catctgcactagaac

SEQ ID NO: 785810 - DNA, 15 bp, Homo sapiens
atctgcactagaaca

SEQ ID NO: 785811 - DNA, 15 bp, Homo sapiens
tctgcactagaacat

SEQ ID NO: 785812 - DNA, 15 bp, Homo sapiens
ctgcactagaacatt

SEQ ID NO: 785813 - DNA, 15 bp, Homo sapiens
tgcactagaacattt

SEQ ID NO: 785814 - DNA, 15 bp, Homo sapiens
gcactagaacatttt

SEQ ID NO: 785815 - DNA, 15 bp, Homo sapiens
cactagaacattttc

SEQ ID NO: 785816 - DNA, 15 bp, Homo sapiens
actagaacattttct

SEQ ID NO: 785817 - DNA, 15 bp, Homo sapiens
ctagaacattttcta

SEQ ID NO: 785818 - DNA, 15 bp, Homo sapiens
tagaacattttctag

SEQ ID NO: 785819 - DNA, 15 bp, Homo sapiens
agaacattttctagt

SEQ ID NO: 785820 - DNA, 15 bp, Homo sapiens
gaacattttctagta

SEQ ID NO: 785821 - DNA, 15 bp, Homo sapiens
aacattttctagtag

SEQ ID NO: 785822 - DNA, 15 bp, Homo sapiens
acattttctagtaga

SEQ ID NO: 785823 - DNA, 15 bp, Homo sapiens
cattttctagtagaa

SEQ ID NO: 785824 - DNA, 15 bp, Homo sapiens
attttctagtagaac

SEQ ID NO: 785825 - DNA, 15 bp, Homo sapiens
ttttctagtagaact

SEQ ID NO: 785826 - DNA, 15 bp, Homo sapiens
tttctagtagaactt

SEQ ID NO: 785827 - DNA, 15 bp, Homo sapiens
ttctagtagaacttc

SEQ ID NO: 785828 - DNA, 15 bp, Homo sapiens
tctagtagaacttct

SEQ ID NO: 785829 - DNA, 15 bp, Homo sapiens
ctagtagaacttctg

SEQ ID NO: 785830 - DNA, 15 bp, Homo sapiens
tagtagaacttctgc

SEQ ID NO: 785831 - DNA, 15 bp, Homo sapiens
agtagaacttctgct

SEQ ID NO: 785832 - DNA, 15 bp, Homo sapiens
gtagaacttctgcta

SEQ ID NO: 785833 - DNA, 15 bp, Homo sapiens
tagaacttctgctag

SEQ ID NO: 785834 - DNA, 15 bp, Homo sapiens
agaacttctgctagt

SEQ ID NO: 785835 - DNA, 15 bp, Homo sapiens
gaacttctgctagtg

SEQ ID NO: 785836 - DNA, 15 bp, Homo sapiens
aacttctgctagtgg

SEQ ID NO: 785837 - DNA, 15 bp, Homo sapiens
acttctgctagtggg

SEQ ID NO: 785838 - DNA, 15 bp, Homo sapiens
cttctgctagtgggg

SEQ ID NO: 785839 - DNA, 15 bp, Homo sapiens
ttctgctagtgggga

SEQ ID NO: 785840 - DNA, 15 bp, Homo sapiens
tctgctagtggggaa

SEQ ID NO: 785841 - DNA, 15 bp, Homo sapiens
ctgctagtggggaaa

SEQ ID NO: 785842 - DNA, 15 bp, Homo sapiens
tgctagtggggaaaa

SEQ ID NO: 785843 - DNA, 15 bp, Homo sapiens
gctagtggggaaaac

SEQ ID NO: 785844 - DNA, 15 bp, Homo sapiens
ctagtggggaaaaca

SEQ ID NO: 785845 - DNA, 15 bp, Homo sapiens
tagtggggaaaacat

SEQ ID NO: 785846 - DNA, 15 bp, Homo sapiens
agtggggaaaacatg

SEQ ID NO: 785847 - DNA, 15 bp, Homo sapiens
gtggggaaaacatga

SEQ ID NO: 785848 - DNA, 15 bp, Homo sapiens
tggggaaaacatgat

SEQ ID NO: 785849 - DNA, 15 bp, Homo sapiens
ggggaaaacatgata

SEQ ID NO: 785850 - DNA, 15 bp, Homo sapiens
gggaaaacatgataa

SEQ ID NO: 785851 - DNA, 15 bp, Homo sapiens
ggaaaacatgataac

SEQ ID NO: 785852 - DNA, 15 bp, Homo sapiens
gaaaacatgataaca

SEQ ID NO: 785853 - DNA, 15 bp, Homo sapiens
aaaacatgataacaa

SEQ ID NO: 785854 - DNA, 15 bp, Homo sapiens
aaacatgataacaac

SEQ ID NO: 785855 - DNA, 15 bp, Homo sapiens
aacatgataacaaca

SEQ ID NO: 785856 - DNA, 15 bp, Homo sapiens
acatgataacaacat

SEQ ID NO: 785857 - DNA, 15 bp, Homo sapiens
catgataacaacata

SEQ ID NO: 785858 - DNA, 15 bp, Homo sapiens
atgataacaacataa

SEQ ID NO: 785859 - DNA, 15 bp, Homo sapiens
tgataacaacataag

SEQ ID NO: 785860 - DNA, 15 bp, Homo sapiens
gataacaacataagg

SEQ ID NO: 785861 - DNA, 15 bp, Homo sapiens
ataacaacataaggt

SEQ ID NO: 785862 - DNA, 15 bp, Homo sapiens
taacaacataaggtt

SEQ ID NO: 785863 - DNA, 15 bp, Homo sapiens
aacaacataaggttt

SEQ ID NO: 785864 - DNA, 15 bp, Homo sapiens
acaacataaggttta

SEQ ID NO: 785865 - DNA, 15 bp, Homo sapiens
caacataaggtttaa

SEQ ID NO: 785866 - DNA, 15 bp, Homo sapiens
aacataaggtttaaa

SEQ ID NO: 785867 - DNA, 15 bp, Homo sapiens
acataaggtttaaaa

SEQ ID NO: 785868 - DNA, 15 bp, Homo sapiens
cataaggtttaaaaa

SEQ ID NO: 785869 - DNA, 15 bp, Homo sapiens
ataaggtttaaaaaa

SEQ ID NO: 785870 - DNA, 15 bp, Homo sapiens
taaggtttaaaaaaa

SEQ ID NO: 785871 - DNA, 15 bp, Homo sapiens
aaggtttaaaaaaaa

SEQ ID NO: 785872 - DNA, 15 bp, Homo sapiens
aggtttaaaaaaaaa

SEQ ID NO: 785873 - DNA, 15 bp, Homo sapiens
ggtttaaaaaaaaaa

SEQ ID NO: 785874 - DNA, 15 bp, Homo sapiens
gtttaaaaaaaaaat

SEQ ID NO: 785875 - DNA, 15 bp, Homo sapiens
tttaaaaaaaaaatt

SEQ ID NO: 785876 - DNA, 15 bp, Homo sapiens
ttaaaaaaaaaattt

SEQ ID NO: 785877 - DNA, 15 bp, Homo sapiens
taaaaaaaaaatttt

SEQ ID NO: 785878 - DNA, 15 bp, Homo sapiens
aaaaaaaaattttag

SEQ ID NO: 785879 - DNA, 15 bp, Homo sapiens
aaaaaaaattttaga

SEQ ID NO: 785880 - DNA, 15 bp, Homo sapiens
aaaaaaattttagaa

SEQ ID NO: 785881 - DNA, 15 bp, Homo sapiens
aaaaaattttagaaa

SEQ ID NO: 785882 - DNA, 15 bp, Homo sapiens
aaaaattttagaaaa

SEQ ID NO: 785883 - DNA, 15 bp, Homo sapiens
aaaattttagaaaat

SEQ ID NO: 785884 - DNA, 15 bp, Homo sapiens
aaattttagaaaata

SEQ ID NO: 785885 - DNA, 15 bp, Homo sapiens
aattttagaaaatac

SEQ ID NO: 785886 - DNA, 15 bp, Homo sapiens
attttagaaaatact

SEQ ID NO: 785887 - DNA, 15 bp, Homo sapiens
ttttagaaaatactt

SEQ ID NO: 785888 - DNA, 15 bp, Homo sapiens
tttagaaaatacttc

SEQ ID NO: 785889 - DNA, 15 bp, Homo sapiens
ttagaaaatacttca

SEQ ID NO: 785890 - DNA, 15 bp, Homo sapiens
tagaaaatacttcaa

SEQ ID NO: 785891 - DNA, 15 bp, Homo sapiens
agaaaatacttcaag

SEQ ID NO: 785892 - DNA, 15 bp, Homo sapiens
gaaaatacttcaaga

SEQ ID NO: 785893 - DNA, 15 bp, Homo sapiens
aaaatacttcaagat

SEQ ID NO: 785894 - DNA, 15 bp, Homo sapiens
aaatacttcaagatt

SEQ ID NO: 785895 - DNA, 15 bp, Homo sapiens
aatacttcaagatta

SEQ ID NO: 785896 - DNA, 15 bp, Homo sapiens
atacttcaagattaa

SEQ ID NO: 785897 - DNA, 15 bp, Homo sapiens
tacttcaagattaag

SEQ ID NO: 785898 - DNA, 15 bp, Homo sapiens
acttcaagattaaga

SEQ ID NO: 785899 - DNA, 15 bp, Homo sapiens
cttcaagattaagac

SEQ ID NO: 785900 - DNA, 15 bp, Homo sapiens
ttcaagattaagaca

SEQ ID NO: 785901 - DNA, 15 bp, Homo sapiens
tcaagattaagacaa

SEQ ID NO: 785902 - DNA, 15 bp, Homo sapiens
caagattaagacaaa

SEQ ID NO: 785903 - DNA, 15 bp, Homo sapiens
aagattaagacaaag

SEQ ID NO: 785904 - DNA, 15 bp, Homo sapiens
agattaagacaaaga

SEQ ID NO: 785905 - DNA, 15 bp, Homo sapiens
gattaagacaaagat

SEQ ID NO: 785906 - DNA, 15 bp, Homo sapiens
attaagacaaagata

SEQ ID NO: 785907 - DNA, 15 bp, Homo sapiens
ttaagacaaagataa

SEQ ID NO: 785908 - DNA, 15 bp, Homo sapiens
taagacaaagataag

SEQ ID NO: 785909 - DNA, 15 bp, Homo sapiens
aagacaaagataaga

SEQ ID NO: 785910 - DNA, 15 bp, Homo sapiens
agacaaagataagag

SEQ ID NO: 785911 - DNA, 15 bp, Homo sapiens
gacaaagataagagg

SEQ ID NO: 785912 - DNA, 15 bp, Homo sapiens
acaaagataagagga

SEQ ID NO: 785913 - DNA, 15 bp, Homo sapiens
caaagataagaggaa

SEQ ID NO: 785914 - DNA, 15 bp, Homo sapiens
aaagataagaggaaa

SEQ ID NO: 785915 - DNA, 15 bp, Homo sapiens
aagataagaggaaat

SEQ ID NO: 785916 - DNA, 15 bp, Homo sapiens
agataagaggaaatg

SEQ ID NO: 785917 - DNA, 15 bp, Homo sapiens
gataagaggaaatgc

SEQ ID NO: 785918 - DNA, 15 bp, Homo sapiens
ataagaggaaatgct

SEQ ID NO: 785919 - DNA, 15 bp, Homo sapiens
taagaggaaatgctg

SEQ ID NO: 785920 - DNA, 15 bp, Homo sapiens
aagaggaaatgctgt

SEQ ID NO: 785921 - DNA, 15 bp, Homo sapiens
agaggaaatgctgtc

SEQ ID NO: 785922 - DNA, 15 bp, Homo sapiens
gaggaaatgctgtct

SEQ ID NO: 785923 - DNA, 15 bp, Homo sapiens
aggaaatgctgtctt

SEQ ID NO: 785924 - DNA, 15 bp, Homo sapiens
ggaaatgctgtcttg

SEQ ID NO: 785925 - DNA, 15 bp, Homo sapiens
gaaatgctgtcttga

SEQ ID NO: 785926 - DNA, 15 bp, Homo sapiens
aaatgctgtcttgag

SEQ ID NO: 785927 - DNA, 15 bp, Homo sapiens
aatgctgtcttgagt

SEQ ID NO: 785928 - DNA, 15 bp, Homo sapiens
atgctgtcttgagtg

SEQ ID NO: 785929 - DNA, 15 bp, Homo sapiens
tgctgtcttgagtgt

SEQ ID NO: 785930 - DNA, 15 bp, Homo sapiens
gctgtcttgagtgtt

SEQ ID NO: 785931 - DNA, 15 bp, Homo sapiens
ctgtcttgagtgttg

SEQ ID NO: 785932 - DNA, 15 bp, Homo sapiens
tgtcttgagtgttgt

SEQ ID NO: 785933 - DNA, 15 bp, Homo sapiens
gtcttgagtgttgtt

SEQ ID NO: 785934 - DNA, 15 bp, Homo sapiens
tcttgagtgttgtta

SEQ ID NO: 785935 - DNA, 15 bp, Homo sapiens
cttgagtgttgttaa

SEQ ID NO: 785936 - DNA, 15 bp, Homo sapiens
ttgagtgttgttaaa

SEQ ID NO: 785937 - DNA, 15 bp, Homo sapiens
tgagtgttgttaaac

SEQ ID NO: 785938 - DNA, 15 bp, Homo sapiens
gagtgttgttaaaca

SEQ ID NO: 785939 - DNA, 15 bp, Homo sapiens
agtgttgttaaacat

SEQ ID NO: 785940 - DNA, 15 bp, Homo sapiens
gtgttgttaaacatt

SEQ ID NO: 785941 - DNA, 15 bp, Homo sapiens
tgttgttaaacattc

SEQ ID NO: 785942 - DNA, 15 bp, Homo sapiens
gttgttaaacattct

SEQ ID NO: 785943 - DNA, 15 bp, Homo sapiens
ttgttaaacattctg

SEQ ID NO: 785944 - DNA, 15 bp, Homo sapiens
tgttaaacattctgt

SEQ ID NO: 785945 - DNA, 15 bp, Homo sapiens
gttaaacattctgtg

SEQ ID NO: 785946 - DNA, 15 bp, Homo sapiens
ttaaacattctgtgg

SEQ ID NO: 785947 - DNA, 15 bp, Homo sapiens
taaacattctgtggg

SEQ ID NO: 785948 - DNA, 15 bp, Homo sapiens
aaacattctgtgggt

SEQ ID NO: 785949 - DNA, 15 bp, Homo sapiens
aacattctgtgggtt

SEQ ID NO: 785950 - DNA, 15 bp, Homo sapiens
acattctgtgggtta

SEQ ID NO: 785951 - DNA, 15 bp, Homo sapiens
cattctgtgggttac

SEQ ID NO: 785952 - DNA, 15 bp, Homo sapiens
attctgtgggttacc

SEQ ID NO: 785953 - DNA, 15 bp, Homo sapiens
ttctgtgggttacca

SEQ ID NO: 785954 - DNA, 15 bp, Homo sapiens
tctgtgggttaccaa

SEQ ID NO: 785955 - DNA, 15 bp, Homo sapiens
ctgtgggttaccaag

SEQ ID NO: 785956 - DNA, 15 bp, Homo sapiens
tgtgggttaccaagg

SEQ ID NO: 785957 - DNA, 15 bp, Homo sapiens
gtgggttaccaagga

SEQ ID NO: 785958 - DNA, 15 bp, Homo sapiens
tgggttaccaaggaa

SEQ ID NO: 785959 - DNA, 15 bp, Homo sapiens
gggttaccaaggaag

SEQ ID NO: 785960 - DNA, 15 bp, Homo sapiens
ggttaccaaggaagg

SEQ ID NO: 785961 - DNA, 15 bp, Homo sapiens
gttaccaaggaaggc

SEQ ID NO: 785962 - DNA, 15 bp, Homo sapiens
ttaccaaggaaggct

SEQ ID NO: 785963 - DNA, 15 bp, Homo sapiens
taccaaggaaggctg

SEQ ID NO: 785964 - DNA, 15 bp, Homo sapiens
accaaggaaggctgg

SEQ ID NO: 785965 - DNA, 15 bp, Homo sapiens
ccaaggaaggctggg

SEQ ID NO: 785966 - DNA, 15 bp, Homo sapiens
caaggaaggctggga

SEQ ID NO: 785967 - DNA, 15 bp, Homo sapiens
aaggaaggctgggaa

SEQ ID NO: 785968 - DNA, 15 bp, Homo sapiens
aggaaggctgggaaa

SEQ ID NO: 785969 - DNA, 15 bp, Homo sapiens
ggaaggctgggaaat

SEQ ID NO: 785970 - DNA, 15 bp, Homo sapiens
gaaggctgggaaatc

SEQ ID NO: 785971 - DNA, 15 bp, Homo sapiens
aaggctgggaaatct

SEQ ID NO: 785972 - DNA, 15 bp, Homo sapiens
aggctgggaaatctc

SEQ ID NO: 785973 - DNA, 15 bp, Homo sapiens
ggctgggaaatctct

SEQ ID NO: 785974 - DNA, 15 bp, Homo sapiens
gctgggaaatctctt

SEQ ID NO: 785975 - DNA, 15 bp, Homo sapiens
ctgggaaatctcttc

SEQ ID NO: 785976 - DNA, 15 bp, Homo sapiens
tgggaaatctcttct

SEQ ID NO: 785977 - DNA, 15 bp, Homo sapiens
gggaaatctcttctg

SEQ ID NO: 785978 - DNA, 15 bp, Homo sapiens
ggaaatctcttctgg

SEQ ID NO: 785979 - DNA, 15 bp, Homo sapiens
gaaatctcttctgga

SEQ ID NO: 785980 - DNA, 15 bp, Homo sapiens
aaatctcttctggag

SEQ ID NO: 785981 - DNA, 15 bp, Homo sapiens
aatctcttctggaga

SEQ ID NO: 785982 - DNA, 15 bp, Homo sapiens
atctcttctggagat

SEQ ID NO: 785983 - DNA, 15 bp, Homo sapiens
tctcttctggagatc

SEQ ID NO: 785984 - DNA, 15 bp, Homo sapiens
ctcttctggagatct

SEQ ID NO: 785985 - DNA, 15 bp, Homo sapiens
tcttctggagatctc

SEQ ID NO: 785986 - DNA, 15 bp, Homo sapiens
cttctggagatctca

SEQ ID NO: 785987 - DNA, 15 bp, Homo sapiens
ttctggagatctcag

SEQ ID NO: 785988 - DNA, 15 bp, Homo sapiens
tctggagatctcaga

SEQ ID NO: 785989 - DNA, 15 bp, Homo sapiens
ctggagatctcagaa

SEQ ID NO: 785990 - DNA, 15 bp, Homo sapiens
tggagatctcagaaa

SEQ ID NO: 785991 - DNA, 15 bp, Homo sapiens
ggagatctcagaaaa

SEQ ID NO: 785992 - DNA, 15 bp, Homo sapiens
gagatctcagaaaat

SEQ ID NO: 785993 - DNA, 15 bp, Homo sapiens
agatctcagaaaatg

SEQ ID NO: 785994 - DNA, 15 bp, Homo sapiens
gatctcagaaaatga

SEQ ID NO: 785995 - DNA, 15 bp, Homo sapiens
atctcagaaaatgag

SEQ ID NO: 785996 - DNA, 15 bp, Homo sapiens
tctcagaaaatgaga

SEQ ID NO: 785997 - DNA, 15 bp, Homo sapiens
ctcagaaaatgagaa

SEQ ID NO: 785998 - DNA, 15 bp, Homo sapiens
tcagaaaatgagaaa

SEQ ID NO: 785999 - DNA, 15 bp, Homo sapiens
cagaaaatgagaaag

SEQ ID NO: 786000 - DNA, 15 bp, Homo sapiens
agaaaatgagaaaga

SEQ ID NO: 786001 - DNA, 15 bp, Homo sapiens
gaaaatgagaaagat

SEQ ID NO: 786002 - DNA, 15 bp, Homo sapiens
aaaatgagaaagatt

SEQ ID NO: 786003 - DNA, 15 bp, Homo sapiens
aaatgagaaagattc

SEQ ID NO: 786004 - DNA, 15 bp, Homo sapiens
aatgagaaagattct

SEQ ID NO: 786005 - DNA, 15 bp, Homo sapiens
atgagaaagattctt

SEQ ID NO: 786006 - DNA, 15 bp, Homo sapiens
tgagaaagattctta

SEQ ID NO: 786007 - DNA, 15 bp, Homo sapiens
gagaaagattcttaa

SEQ ID NO: 786008 - DNA, 15 bp, Homo sapiens
agaaagattcttaaa

SEQ ID NO: 786009 - DNA, 15 bp, Homo sapiens
gaaagattcttaaag

SEQ ID NO: 786010 - DNA, 15 bp, Homo sapiens
aaagattcttaaagt

SEQ ID NO: 786011 - DNA, 15 bp, Homo sapiens
aagattcttaaagtt

SEQ ID NO: 786012 - DNA, 15 bp, Homo sapiens
agattcttaaagttg

SEQ ID NO: 786013 - DNA, 15 bp, Homo sapiens
gattcttaaagttgg

SEQ ID NO: 786014 - DNA, 15 bp, Homo sapiens
attcttaaagttgga

SEQ ID NO: 786015 - DNA, 15 bp, Homo sapiens
ttcttaaagttggag

SEQ ID NO: 786016 - DNA, 15 bp, Homo sapiens
tcttaaagttggagt

SEQ ID NO: 786017 - DNA, 15 bp, Homo sapiens
cttaaagttggagtc

SEQ ID NO: 786018 - DNA, 15 bp, Homo sapiens
ttaaagttggagtca

SEQ ID NO: 786019 - DNA, 15 bp, Homo sapiens
taaagttggagtcat

SEQ ID NO: 786020 - DNA, 15 bp, Homo sapiens
aaagttggagtcata

SEQ ID NO: 786021 - DNA, 15 bp, Homo sapiens
aagttggagtcataa

SEQ ID NO: 786022 - DNA, 15 bp, Homo sapiens
agttggagtcataaa

SEQ ID NO: 786023 - DNA, 15 bp, Homo sapiens
gttggagtcataaaa

SEQ ID NO: 786024 - DNA, 15 bp, Homo sapiens
ttggagtcataaaaa

SEQ ID NO: 786025 - DNA, 15 bp, Homo sapiens
tggagtcataaaaac

SEQ ID NO: 786026 - DNA, 15 bp, Homo sapiens
ggagtcataaaaact

SEQ ID NO: 786027 - DNA, 15 bp, Homo sapiens
gagtcataaaaactc

SEQ ID NO: 786028 - DNA, 15 bp, Homo sapiens
agtcataaaaactca

SEQ ID NO: 786029 - DNA, 15 bp, Homo sapiens
gtcataaaaactcag

SEQ ID NO: 786030 - DNA, 15 bp, Homo sapiens
tcataaaaactcagg

SEQ ID NO: 786031 - DNA, 15 bp, Homo sapiens
cataaaaactcaggg

SEQ ID NO: 786032 - DNA, 15 bp, Homo sapiens
ataaaaactcagggt

SEQ ID NO: 786033 - DNA, 15 bp, Homo sapiens
taaaaactcagggtt

SEQ ID NO: 786034 - DNA, 15 bp, Homo sapiens
aaaaactcagggttg

SEQ ID NO: 786035 - DNA, 15 bp, Homo sapiens
aaaactcagggttgg

SEQ ID NO: 786036 - DNA, 15 bp, Homo sapiens
aaactcagggttggc

SEQ ID NO: 786037 - DNA, 15 bp, Homo sapiens
aactcagggttggca

SEQ ID NO: 786038 - DNA, 15 bp, Homo sapiens
actcagggttggcag

SEQ ID NO: 786039 - DNA, 15 bp, Homo sapiens
ctcagggttggcaga

SEQ ID NO: 786040 - DNA, 15 bp, Homo sapiens
tcagggttggcagag

SEQ ID NO: 786041 - DNA, 15 bp, Homo sapiens
cagggttggcagaga

SEQ ID NO: 786042 - DNA, 15 bp, Homo sapiens
agggttggcagagac

SEQ ID NO: 786043 - DNA, 15 bp, Homo sapiens
gggttggcagagacc

SEQ ID NO: 786044 - DNA, 15 bp, Homo sapiens
ggttggcagagacct

SEQ ID NO: 786045 - DNA, 15 bp, Homo sapiens
gttggcagagacctt

SEQ ID NO: 786046 - DNA, 15 bp, Homo sapiens
ttggcagagacctta

SEQ ID NO: 786047 - DNA, 15 bp, Homo sapiens
tggcagagaccttaa

SEQ ID NO: 786048 - DNA, 15 bp, Homo sapiens
ggcagagaccttaaa

SEQ ID NO: 786049 - DNA, 15 bp, Homo sapiens
gcagagaccttaaag

SEQ ID NO: 786050 - DNA, 15 bp, Homo sapiens
cagagaccttaaagg

SEQ ID NO: 786051 - DNA, 15 bp, Homo sapiens
agagaccttaaaggt

SEQ ID NO: 786052 - DNA, 15 bp, Homo sapiens
gagaccttaaaggtc

SEQ ID NO: 786053 - DNA, 15 bp, Homo sapiens
agaccttaaaggtca

SEQ ID NO: 786054 - DNA, 15 bp, Homo sapiens
gaccttaaaggtcac

SEQ ID NO: 786055 - DNA, 15 bp, Homo sapiens
accttaaaggtcact

SEQ ID NO: 786056 - DNA, 15 bp, Homo sapiens
ccttaaaggtcactt

SEQ ID NO: 786057 - DNA, 15 bp, Homo sapiens
cttaaaggtcactta

SEQ ID NO: 786058 - DNA, 15 bp, Homo sapiens
ttaaaggtcacttag

SEQ ID NO: 786059 - DNA, 15 bp, Homo sapiens
taaaggtcacttagc

SEQ ID NO: 786060 - DNA, 15 bp, Homo sapiens
aaaggtcacttagct

SEQ ID NO: 786061 - DNA, 15 bp, Homo sapiens
aaggtcacttagctg

SEQ ID NO: 786062 - DNA, 15 bp, Homo sapiens
aggtcacttagctga

SEQ ID NO: 786063 - DNA, 15 bp, Homo sapiens
ggtcacttagctgaa

SEQ ID NO: 786064 - DNA, 15 bp, Homo sapiens
gtcacttagctgaac

SEQ ID NO: 786065 - DNA, 15 bp, Homo sapiens
tcacttagctgaacc

SEQ ID NO: 786066 - DNA, 15 bp, Homo sapiens
cacttagctgaacca

SEQ ID NO: 786067 - DNA, 15 bp, Homo sapiens
acttagctgaaccac

SEQ ID NO: 786068 - DNA, 15 bp, Homo sapiens
cttagctgaaccacc

SEQ ID NO: 786069 - DNA, 15 bp, Homo sapiens
ttagctgaaccaccc

SEQ ID NO: 786070 - DNA, 15 bp, Homo sapiens
tagctgaaccaccca

SEQ ID NO: 786071 - DNA, 15 bp, Homo sapiens
agctgaaccacccat

SEQ ID NO: 786072 - DNA, 15 bp, Homo sapiens
gctgaaccacccatc

SEQ ID NO: 786073 - DNA, 15 bp, Homo sapiens
ctgaaccacccatct

SEQ ID NO: 786074 - DNA, 15 bp, Homo sapiens
tgaaccacccatctg

SEQ ID NO: 786075 - DNA, 15 bp, Homo sapiens
gaaccacccatctgg

SEQ ID NO: 786076 - DNA, 15 bp, Homo sapiens
aaccacccatctggt

SEQ ID NO: 786077 - DNA, 15 bp, Homo sapiens
accacccatctggtg

SEQ ID NO: 786078 - DNA, 15 bp, Homo sapiens
ccacccatctggtgc

SEQ ID NO: 786079 - DNA, 15 bp, Homo sapiens
cacccatctggtgct

SEQ ID NO: 786080 - DNA, 15 bp, Homo sapiens
acccatctggtgctt

SEQ ID NO: 786081 - DNA, 15 bp, Homo sapiens
cccatctggtgcttg

SEQ ID NO: 786082 - DNA, 15 bp, Homo sapiens
ccatctggtgcttga

SEQ ID NO: 786083 - DNA, 15 bp, Homo sapiens
catctggtgcttgaa

SEQ ID NO: 786084 - DNA, 15 bp, Homo sapiens
atctggtgcttgaat

SEQ ID NO: 786085 - DNA, 15 bp, Homo sapiens
tctggtgcttgaatc

SEQ ID NO: 786086 - DNA, 15 bp, Homo sapiens
ctggtgcttgaatca

SEQ ID NO: 786087 - DNA, 15 bp, Homo sapiens
tggtgcttgaatcac

SEQ ID NO: 786088 - DNA, 15 bp, Homo sapiens
ggtgcttgaatcacc

SEQ ID NO: 786089 - DNA, 15 bp, Homo sapiens
gtgcttgaatcacct

SEQ ID NO: 786090 - DNA, 15 bp, Homo sapiens
tgcttgaatcacctc

SEQ ID NO: 786091 - DNA, 15 bp, Homo sapiens
gcttgaatcacctca

SEQ ID NO: 786092 - DNA, 15 bp, Homo sapiens
cttgaatcacctcaa

SEQ ID NO: 786093 - DNA, 15 bp, Homo sapiens
ttgaatcacctcaac

SEQ ID NO: 786094 - DNA, 15 bp, Homo sapiens
tgaatcacctcaaca

SEQ ID NO: 786095 - DNA, 15 bp, Homo sapiens
gaatcacctcaacac

SEQ ID NO: 786096 - DNA, 15 bp, Homo sapiens
aatcacctcaacact

SEQ ID NO: 786097 - DNA, 15 bp, Homo sapiens
atcacctcaacacta

SEQ ID NO: 786098 - DNA, 15 bp, Homo sapiens
tcacctcaacactat

SEQ ID NO: 786099 - DNA, 15 bp, Homo sapiens
cacctcaacactatc

SEQ ID NO: 786100 - DNA, 15 bp, Homo sapiens
acctcaacactatcc

SEQ ID NO: 786101 - DNA, 15 bp, Homo sapiens
cctcaacactatcct

SEQ ID NO: 786102 - DNA, 15 bp, Homo sapiens
ctcaacactatcctt

SEQ ID NO: 786103 - DNA, 15 bp, Homo sapiens
tcaacactatccttg

SEQ ID NO: 786104 - DNA, 15 bp, Homo sapiens
caacactatccttgc

SEQ ID NO: 786105 - DNA, 15 bp, Homo sapiens
aacactatccttgcc

SEQ ID NO: 786106 - DNA, 15 bp, Homo sapiens
acactatccttgcca

SEQ ID NO: 786107 - DNA, 15 bp, Homo sapiens
cactatccttgccaa

SEQ ID NO: 786108 - DNA, 15 bp, Homo sapiens
actatccttgccaag

SEQ ID NO: 786109 - DNA, 15 bp, Homo sapiens
ctatccttgccaagt

SEQ ID NO: 786110 - DNA, 15 bp, Homo sapiens
tatccttgccaagtg

SEQ ID NO: 786111 - DNA, 15 bp, Homo sapiens
atccttgccaagtgg

SEQ ID NO: 786112 - DNA, 15 bp, Homo sapiens
tccttgccaagtggt

SEQ ID NO: 786113 - DNA, 15 bp, Homo sapiens
ccttgccaagtggtc

SEQ ID NO: 786114 - DNA, 15 bp, Homo sapiens
cttgccaagtggtca

SEQ ID NO: 786115 - DNA, 15 bp, Homo sapiens
ttgccaagtggtcat

SEQ ID NO: 786116 - DNA, 15 bp, Homo sapiens
tgccaagtggtcatt

SEQ ID NO: 786117 - DNA, 15 bp, Homo sapiens
gccaagtggtcattg

SEQ ID NO: 786118 - DNA, 15 bp, Homo sapiens
ccaagtggtcattgt

SEQ ID NO: 786119 - DNA, 15 bp, Homo sapiens
caagtggtcattgtt

SEQ ID NO: 786120 - DNA, 15 bp, Homo sapiens
aagtggtcattgtta

SEQ ID NO: 786121 - DNA, 15 bp, Homo sapiens
agtggtcattgttaa

SEQ ID NO: 786122 - DNA, 15 bp, Homo sapiens
gtggtcattgttaaa

SEQ ID NO: 786123 - DNA, 15 bp, Homo sapiens
tggtcattgttaaac

SEQ ID NO: 786124 - DNA, 15 bp, Homo sapiens
ggtcattgttaaact

SEQ ID NO: 786125 - DNA, 15 bp, Homo sapiens
gtcattgttaaacta

SEQ ID NO: 786126 - DNA, 15 bp, Homo sapiens
tcattgttaaactat

SEQ ID NO: 786127 - DNA, 15 bp, Homo sapiens
cattgttaaactatt

SEQ ID NO: 786128 - DNA, 15 bp, Homo sapiens
attgttaaactattt

SEQ ID NO: 786129 - DNA, 15 bp, Homo sapiens
ttgttaaactatttt

SEQ ID NO: 786130 - DNA, 15 bp, Homo sapiens
tgttaaactatttta

SEQ ID NO: 786131 - DNA, 15 bp, Homo sapiens
gttaaactattttat

SEQ ID NO: 786132 - DNA, 15 bp, Homo sapiens
ttaaactattttatg

SEQ ID NO: 786133 - DNA, 15 bp, Homo sapiens
taaactattttatga

SEQ ID NO: 786134 - DNA, 15 bp, Homo sapiens
aaactattttatgat

SEQ ID NO: 786135 - DNA, 15 bp, Homo sapiens
aactattttatgatt

SEQ ID NO: 786136 - DNA, 15 bp, Homo sapiens
actattttatgattt

SEQ ID NO: 786137 - DNA, 15 bp, Homo sapiens
ctattttatgatttt

SEQ ID NO: 786138 - DNA, 15 bp, Homo sapiens
tattttatgattttt

SEQ ID NO: 786139 - DNA, 15 bp, Homo sapiens
attttatgatttttc

SEQ ID NO: 786140 - DNA, 15 bp, Homo sapiens
ttttatgatttttct

SEQ ID NO: 786141 - DNA, 15 bp, Homo sapiens
tttatgatttttctg

SEQ ID NO: 786142 - DNA, 15 bp, Homo sapiens
ttatgatttttctga

SEQ ID NO: 786143 - DNA, 15 bp, Homo sapiens
tatgatttttctgaa

SEQ ID NO: 786144 - DNA, 15 bp, Homo sapiens
atgatttttctgaag

SEQ ID NO: 786145 - DNA, 15 bp, Homo sapiens
tgatttttctgaaga

SEQ ID NO: 786146 - DNA, 15 bp, Homo sapiens
gatttttctgaagaa

SEQ ID NO: 786147 - DNA, 15 bp, Homo sapiens
atttttctgaagaag

SEQ ID NO: 786148 - DNA, 15 bp, Homo sapiens
tttttctgaagaagg

SEQ ID NO: 786149 - DNA, 15 bp, Homo sapiens
ttttctgaagaaggt

SEQ ID NO: 786150 - DNA, 15 bp, Homo sapiens
tttctgaagaaggtt

SEQ ID NO: 786151 - DNA, 15 bp, Homo sapiens
ttctgaagaaggtta

SEQ ID NO: 786152 - DNA, 15 bp, Homo sapiens
tctgaagaaggttac

SEQ ID NO: 786153 - DNA, 15 bp, Homo sapiens
ctgaagaaggttaca

SEQ ID NO: 786154 - DNA, 15 bp, Homo sapiens
tgaagaaggttacag

SEQ ID NO: 786155 - DNA, 15 bp, Homo sapiens
gaagaaggttacaga

SEQ ID NO: 786156 - DNA, 15 bp, Homo sapiens
aagaaggttacagaa

SEQ ID NO: 786157 - DNA, 15 bp, Homo sapiens
agaaggttacagaat

SEQ ID NO: 786158 - DNA, 15 bp, Homo sapiens
gaaggttacagaatc

SEQ ID NO: 786159 - DNA, 15 bp, Homo sapiens
aaggttacagaatct

SEQ ID NO: 786160 - DNA, 15 bp, Homo sapiens
aggttacagaatctt

SEQ ID NO: 786161 - DNA, 15 bp, Homo sapiens
ggttacagaatcttc

SEQ ID NO: 786162 - DNA, 15 bp, Homo sapiens
gttacagaatcttct

SEQ ID NO: 786163 - DNA, 15 bp, Homo sapiens
ttacagaatcttctt

SEQ ID NO: 786164 - DNA, 15 bp, Homo sapiens
tacagaatcttcttc

SEQ ID NO: 786165 - DNA, 15 bp, Homo sapiens
acagaatcttcttca

SEQ ID NO: 786166 - DNA, 15 bp, Homo sapiens
cagaatcttcttcag

SEQ ID NO: 786167 - DNA, 15 bp, Homo sapiens
agaatcttcttcaga

SEQ ID NO: 786168 - DNA, 15 bp, Homo sapiens
gaatcttcttcagag

SEQ ID NO: 786169 - DNA, 15 bp, Homo sapiens
aatcttcttcagaga

SEQ ID NO: 786170 - DNA, 15 bp, Homo sapiens
atcttcttcagagat

SEQ ID NO: 786171 - DNA, 15 bp, Homo sapiens
tcttcttcagagatc

SEQ ID NO: 786172 - DNA, 15 bp, Homo sapiens
cttcttcagagatct

SEQ ID NO: 786173 - DNA, 15 bp, Homo sapiens
ttcttcagagatctt

SEQ ID NO: 786174 - DNA, 15 bp, Homo sapiens
tcttcagagatctta

SEQ ID NO: 786175 - DNA, 15 bp, Homo sapiens
cttcagagatcttag

SEQ ID NO: 786176 - DNA, 15 bp, Homo sapiens
ttcagagatcttagg

SEQ ID NO: 786177 - DNA, 15 bp, Homo sapiens
tcagagatcttaggg

SEQ ID NO: 786178 - DNA, 15 bp, Homo sapiens
cagagatcttaggga

SEQ ID NO: 786179 - DNA, 15 bp, Homo sapiens
agagatcttagggaa

SEQ ID NO: 786180 - DNA, 15 bp, Homo sapiens
gagatcttagggaaa

SEQ ID NO: 786181 - DNA, 15 bp, Homo sapiens
agatcttagggaaaa

SEQ ID NO: 786182 - DNA, 15 bp, Homo sapiens
gatcttagggaaaaa

SEQ ID NO: 786183 - DNA, 15 bp, Homo sapiens
atcttagggaaaaaa

SEQ ID NO: 786184 - DNA, 15 bp, Homo sapiens
tcttagggaaaaaaa

SEQ ID NO: 786185 - DNA, 15 bp, Homo sapiens
cttagggaaaaaaaa

SEQ ID NO: 786186 - DNA, 15 bp, Homo sapiens
ttagggaaaaaaaaa

SEQ ID NO: 786187 - DNA, 15 bp, Homo sapiens
tagggaaaaaaaaaa

SEQ ID NO: 786188 - DNA, 15 bp, Homo sapiens
agggaaaaaaaaaaa

SEQ ID NO: 786189 - DNA, 15 bp, Homo sapiens
gggaaaaaaaaaaaa

SEQ ID NO: 786190 - DNA, 15 bp, Homo sapiens
ggaaaaaaaaaaaag

SEQ ID NO: 786191 - DNA, 15 bp, Homo sapiens
gaaaaaaaaaaaaga

SEQ ID NO: 786192 - DNA, 15 bp, Homo sapiens
aaaaaaaaaaaagat

SEQ ID NO: 786193 - DNA, 15 bp, Homo sapiens
aaaaaaaaaaagatt

SEQ ID NO: 786194 - DNA, 15 bp, Homo sapiens
aaaaaaaaaagattg

SEQ ID NO: 786195 - DNA, 15 bp, Homo sapiens
aaaaaaaaagattgt

SEQ ID NO: 786196 - DNA, 15 bp, Homo sapiens
aaaaaaaagattgtc

SEQ ID NO: 786197 - DNA, 15 bp, Homo sapiens
aaaaaaagattgtcg

SEQ ID NO: 786198 - DNA, 15 bp, Homo sapiens
aaaaaagattgtcgt

SEQ ID NO: 786199 - DNA, 15 bp, Homo sapiens
aaaaagattgtcgtg

SEQ ID NO: 786200 - DNA, 15 bp, Homo sapiens
aaaagattgtcgtga

SEQ ID NO: 786201 - DNA, 15 bp, Homo sapiens
aaagattgtcgtgag

SEQ ID NO: 786202 - DNA, 15 bp, Homo sapiens
aagattgtcgtgaga

SEQ ID NO: 786203 - DNA, 15 bp, Homo sapiens
agattgtcgtgagag

SEQ ID NO: 786204 - DNA, 15 bp, Homo sapiens
gattgtcgtgagagt

SEQ ID NO: 786205 - DNA, 15 bp, Homo sapiens
attgtcgtgagagtt

SEQ ID NO: 786206 - DNA, 15 bp, Homo sapiens
ttgtcgtgagagttg

SEQ ID NO: 786207 - DNA, 15 bp, Homo sapiens
tgtcgtgagagttga

SEQ ID NO: 786208 - DNA, 15 bp, Homo sapiens
gtcgtgagagttgaa

SEQ ID NO: 786209 - DNA, 15 bp, Homo sapiens
tcgtgagagttgaaa

SEQ ID NO: 786210 - DNA, 15 bp, Homo sapiens
cgtgagagttgaaaa

SEQ ID NO: 786211 - DNA, 15 bp, Homo sapiens
gtgagagttgaaaat

SEQ ID NO: 786212 - DNA, 15 bp, Homo sapiens
tgagagttgaaaatc

SEQ ID NO: 786213 - DNA, 15 bp, Homo sapiens
gagagttgaaaatcc

SEQ ID NO: 786214 - DNA, 15 bp, Homo sapiens
agagttgaaaatcct

SEQ ID NO: 786215 - DNA, 15 bp, Homo sapiens
gagttgaaaatcctg

SEQ ID NO: 786216 - DNA, 15 bp, Homo sapiens
agttgaaaatcctgc

SEQ ID NO: 786217 - DNA, 15 bp, Homo sapiens
gttgaaaatcctgcc

SEQ ID NO: 786218 - DNA, 15 bp, Homo sapiens
ttgaaaatcctgcca

SEQ ID NO: 786219 - DNA, 15 bp, Homo sapiens
tgaaaatcctgccat

SEQ ID NO: 786220 - DNA, 15 bp, Homo sapiens
gaaaatcctgccatt

SEQ ID NO: 786221 - DNA, 15 bp, Homo sapiens
aaaatcctgccattg

SEQ ID NO: 786222 - DNA, 15 bp, Homo sapiens
aaatcctgccattgt

SEQ ID NO: 786223 - DNA, 15 bp, Homo sapiens
aatcctgccattgta

SEQ ID NO: 786224 - DNA, 15 bp, Homo sapiens
atcctgccattgtaa

SEQ ID NO: 786225 - DNA, 15 bp, Homo sapiens
tcctgccattgtaac

SEQ ID NO: 786226 - DNA, 15 bp, Homo sapiens
cctgccattgtaacc

SEQ ID NO: 786227 - DNA, 15 bp, Homo sapiens
ctgccattgtaacca

SEQ ID NO: 786228 - DNA, 15 bp, Homo sapiens
tgccattgtaaccag

SEQ ID NO: 786229 - DNA, 15 bp, Homo sapiens
gccattgtaaccagt

SEQ ID NO: 786230 - DNA, 15 bp, Homo sapiens
ccattgtaaccagtt

SEQ ID NO: 786231 - DNA, 15 bp, Homo sapiens
cattgtaaccagttg

SEQ ID NO: 786232 - DNA, 15 bp, Homo sapiens
attgtaaccagttga

SEQ ID NO: 786233 - DNA, 15 bp, Homo sapiens
ttgtaaccagttgat

SEQ ID NO: 786234 - DNA, 15 bp, Homo sapiens
tgtaaccagttgatc

SEQ ID NO: 786235 - DNA, 15 bp, Homo sapiens
gtaaccagttgatct

SEQ ID NO: 786236 - DNA, 15 bp, Homo sapiens
taaccagttgatcta

SEQ ID NO: 786237 - DNA, 15 bp, Homo sapiens
aaccagttgatctac

SEQ ID NO: 786238 - DNA, 15 bp, Homo sapiens
accagttgatctacg

SEQ ID NO: 786239 - DNA, 15 bp, Homo sapiens
ccagttgatctacgg

SEQ ID NO: 786240 - DNA, 15 bp, Homo sapiens
cagttgatctacggt

SEQ ID NO: 786241 - DNA, 15 bp, Homo sapiens
agttgatctacggtt

SEQ ID NO: 786242 - DNA, 15 bp, Homo sapiens
gttgatctacggttt

SEQ ID NO: 786243 - DNA, 15 bp, Homo sapiens
ttgatctacggtttc

SEQ ID NO: 786244 - DNA, 15 bp, Homo sapiens
tgatctacggtttct

SEQ ID NO: 786245 - DNA, 15 bp, Homo sapiens
gatctacggtttctg

SEQ ID NO: 786246 - DNA, 15 bp, Homo sapiens
atctacggtttctga

SEQ ID NO: 786247 - DNA, 15 bp, Homo sapiens
tctacggtttctgat

SEQ ID NO: 786248 - DNA, 15 bp, Homo sapiens
ctacggtttctgatt

SEQ ID NO: 786249 - DNA, 15 bp, Homo sapiens
tacggtttctgattc

SEQ ID NO: 786250 - DNA, 15 bp, Homo sapiens
acggtttctgattct

SEQ ID NO: 786251 - DNA, 15 bp, Homo sapiens
cggtttctgattctg

SEQ ID NO: 786252 - DNA, 15 bp, Homo sapiens
ggtttctgattctgt

SEQ ID NO: 786253 - DNA, 15 bp, Homo sapiens
gtttctgattctgtc

SEQ ID NO: 786254 - DNA, 15 bp, Homo sapiens
tttctgattctgtca

SEQ ID NO: 786255 - DNA, 15 bp, Homo sapiens
ttctgattctgtcat

SEQ ID NO: 786256 - DNA, 15 bp, Homo sapiens
tctgattctgtcatg

SEQ ID NO: 786257 - DNA, 15 bp, Homo sapiens
ctgattctgtcatgc

SEQ ID NO: 786258 - DNA, 15 bp, Homo sapiens
tgattctgtcatgca

SEQ ID NO: 786259 - DNA, 15 bp, Homo sapiens
gattctgtcatgcaa

SEQ ID NO: 786260 - DNA, 15 bp, Homo sapiens
attctgtcatgcaac

SEQ ID NO: 786261 - DNA, 15 bp, Homo sapiens
ttctgtcatgcaaca

SEQ ID NO: 786262 - DNA, 15 bp, Homo sapiens
tctgtcatgcaacat

SEQ ID NO: 786263 - DNA, 15 bp, Homo sapiens
ctgtcatgcaacata

SEQ ID NO: 786264 - DNA, 15 bp, Homo sapiens
tgtcatgcaacatat

SEQ ID NO: 786265 - DNA, 15 bp, Homo sapiens
gtcatgcaacatatt

SEQ ID NO: 786266 - DNA, 15 bp, Homo sapiens
tcatgcaacatattt

SEQ ID NO: 786267 - DNA, 15 bp, Homo sapiens
catgcaacatattta

SEQ ID NO: 786268 - DNA, 15 bp, Homo sapiens
atgcaacatatttat

SEQ ID NO: 786269 - DNA, 15 bp, Homo sapiens
tgcaacatatttatt

SEQ ID NO: 786270 - DNA, 15 bp, Homo sapiens
gcaacatatttattt

SEQ ID NO: 786271 - DNA, 15 bp, Homo sapiens
caacatatttatttt

SEQ ID NO: 786272 - DNA, 15 bp, Homo sapiens
aacatatttattttc

SEQ ID NO: 786273 - DNA, 15 bp, Homo sapiens
acatatttattttcc

SEQ ID NO: 786274 - DNA, 15 bp, Homo sapiens
catatttattttcca

SEQ ID NO: 786275 - DNA, 15 bp, Homo sapiens
atatttattttccag

SEQ ID NO: 786276 - DNA, 15 bp, Homo sapiens
tatttattttccagt

SEQ ID NO: 786277 - DNA, 15 bp, Homo sapiens
atttattttccagtt

SEQ ID NO: 786278 - DNA, 15 bp, Homo sapiens
tttattttccagttt

SEQ ID NO: 786279 - DNA, 15 bp, Homo sapiens
ttattttccagtttc

SEQ ID NO: 786280 - DNA, 15 bp, Homo sapiens
tattttccagtttct

SEQ ID NO: 786281 - DNA, 15 bp, Homo sapiens
attttccagtttctt

SEQ ID NO: 786282 - DNA, 15 bp, Homo sapiens
ttttccagtttcttg

SEQ ID NO: 786283 - DNA, 15 bp, Homo sapiens
tttccagtttcttgt

SEQ ID NO: 786284 - DNA, 15 bp, Homo sapiens
ttccagtttcttgtc

SEQ ID NO: 786285 - DNA, 15 bp, Homo sapiens
tccagtttcttgtca

SEQ ID NO: 786286 - DNA, 15 bp, Homo sapiens
ccagtttcttgtcat

SEQ ID NO: 786287 - DNA, 15 bp, Homo sapiens
cagtttcttgtcatc

SEQ ID NO: 786288 - DNA, 15 bp, Homo sapiens
agtttcttgtcatct

SEQ ID NO: 786289 - DNA, 15 bp, Homo sapiens
gtttcttgtcatcta

SEQ ID NO: 786290 - DNA, 15 bp, Homo sapiens
tttcttgtcatctac

SEQ ID NO: 786291 - DNA, 15 bp, Homo sapiens
ttcttgtcatctaca

SEQ ID NO: 786292 - DNA, 15 bp, Homo sapiens
tcttgtcatctacaa

SEQ ID NO: 786293 - DNA, 15 bp, Homo sapiens
cttgtcatctacaaa

SEQ ID NO: 786294 - DNA, 15 bp, Homo sapiens
ttgtcatctacaaat

SEQ ID NO: 786295 - DNA, 15 bp, Homo sapiens
tgtcatctacaaatt

SEQ ID NO: 786296 - DNA, 15 bp, Homo sapiens
gtcatctacaaattc

SEQ ID NO: 786297 - DNA, 15 bp, Homo sapiens
tcatctacaaattcg

SEQ ID NO: 786298 - DNA, 15 bp, Homo sapiens
catctacaaattcga

SEQ ID NO: 786299 - DNA, 15 bp, Homo sapiens
atctacaaattcgat

SEQ ID NO: 786300 - DNA, 15 bp, Homo sapiens
tctacaaattcgata

SEQ ID NO: 786301 - DNA, 15 bp, Homo sapiens
ctacaaattcgatat

SEQ ID NO: 786302 - DNA, 15 bp, Homo sapiens
tacaaattcgatatg

SEQ ID NO: 786303 - DNA, 15 bp, Homo sapiens
acaaattcgatatgc

SEQ ID NO: 786304 - DNA, 15 bp, Homo sapiens
caaattcgatatgcc

SEQ ID NO: 786305 - DNA, 15 bp, Homo sapiens
aaattcgatatgcct

SEQ ID NO: 786306 - DNA, 15 bp, Homo sapiens
aattcgatatgcctg

SEQ ID NO: 786307 - DNA, 15 bp, Homo sapiens
attcgatatgcctgc

SEQ ID NO: 786308 - DNA, 15 bp, Homo sapiens
ttcgatatgcctgcc

SEQ ID NO: 786309 - DNA, 15 bp, Homo sapiens
tcgatatgcctgcct

SEQ ID NO: 786310 - DNA, 15 bp, Homo sapiens
cgatatgcctgcctt

SEQ ID NO: 786311 - DNA, 15 bp, Homo sapiens
gatatgcctgccttc

SEQ ID NO: 786312 - DNA, 15 bp, Homo sapiens
atatgcctgccttct

SEQ ID NO: 786313 - DNA, 15 bp, Homo sapiens
tatgcctgccttctg

SEQ ID NO: 786314 - DNA, 15 bp, Homo sapiens
atgcctgccttctgt

SEQ ID NO: 786315 - DNA, 15 bp, Homo sapiens
tgcctgccttctgtg

SEQ ID NO: 786316 - DNA, 15 bp, Homo sapiens
gcctgccttctgtgt

SEQ ID NO: 786317 - DNA, 15 bp, Homo sapiens
cctgccttctgtgtg

SEQ ID NO: 786318 - DNA, 15 bp, Homo sapiens
ctgccttctgtgtgt

SEQ ID NO: 786319 - DNA, 15 bp, Homo sapiens
tgccttctgtgtgtc

SEQ ID NO: 786320 - DNA, 15 bp, Homo sapiens
gccttctgtgtgtca

SEQ ID NO: 786321 - DNA, 15 bp, Homo sapiens
ccttctgtgtgtcat

SEQ ID NO: 786322 - DNA, 15 bp, Homo sapiens
cttctgtgtgtcatc

SEQ ID NO: 786323 - DNA, 15 bp, Homo sapiens
ttctgtgtgtcatcc

SEQ ID NO: 786324 - DNA, 15 bp, Homo sapiens
tctgtgtgtcatcca

SEQ ID NO: 786325 - DNA, 15 bp, Homo sapiens
ctgtgtgtcatccat

SEQ ID NO: 786326 - DNA, 15 bp, Homo sapiens
tgtgtgtcatccata

SEQ ID NO: 786327 - DNA, 15 bp, Homo sapiens
gtgtgtcatccatat

SEQ ID NO: 786328 - DNA, 15 bp, Homo sapiens
tgtgtcatccatatt

SEQ ID NO: 786329 - DNA, 15 bp, Homo sapiens
gtgtcatccatattt

SEQ ID NO: 786330 - DNA, 15 bp, Homo sapiens
tgtcatccatatttc

SEQ ID NO: 786331 - DNA, 15 bp, Homo sapiens
gtcatccatatttct

SEQ ID NO: 786332 - DNA, 15 bp, Homo sapiens
tcatccatatttctg

SEQ ID NO: 786333 - DNA, 15 bp, Homo sapiens
catccatatttctga

SEQ ID NO: 786334 - DNA, 15 bp, Homo sapiens
atccatatttctgag

SEQ ID NO: 786335 - DNA, 15 bp, Homo sapiens
tccatatttctgaga

SEQ ID NO: 786336 - DNA, 15 bp, Homo sapiens
ccatatttctgagaa

SEQ ID NO: 786337 - DNA, 15 bp, Homo sapiens
catatttctgagaaa

SEQ ID NO: 786338 - DNA, 15 bp, Homo sapiens
atatttctgagaaaa

SEQ ID NO: 786339 - DNA, 15 bp, Homo sapiens
tatttctgagaaaaa

SEQ ID NO: 786340 - DNA, 15 bp, Homo sapiens
atttctgagaaaaat

SEQ ID NO: 786341 - DNA, 15 bp, Homo sapiens
tttctgagaaaaata

SEQ ID NO: 786342 - DNA, 15 bp, Homo sapiens
ttctgagaaaaatat

SEQ ID NO: 786343 - DNA, 15 bp, Homo sapiens
tctgagaaaaatatg

SEQ ID NO: 786344 - DNA, 15 bp, Homo sapiens
ctgagaaaaatatga

SEQ ID NO: 786345 - DNA, 15 bp, Homo sapiens
tgagaaaaatatgaa

SEQ ID NO: 786346 - DNA, 15 bp, Homo sapiens
gagaaaaatatgaag

SEQ ID NO: 786347 - DNA, 15 bp, Homo sapiens
agaaaaatatgaagg

SEQ ID NO: 786348 - DNA, 15 bp, Homo sapiens
gaaaaatatgaaggc

SEQ ID NO: 786349 - DNA, 15 bp, Homo sapiens
aaaaatatgaaggcc

SEQ ID NO: 786350 - DNA, 15 bp, Homo sapiens
aaaatatgaaggcca

SEQ ID NO: 786351 - DNA, 15 bp, Homo sapiens
aaatatgaaggccag

SEQ ID NO: 786352 - DNA, 15 bp, Homo sapiens
aatatgaaggccagg

SEQ ID NO: 786353 - DNA, 15 bp, Homo sapiens
atatgaaggccagga

SEQ ID NO: 786354 - DNA, 15 bp, Homo sapiens
tatgaaggccaggaa

SEQ ID NO: 786355 - DNA, 15 bp, Homo sapiens
atgaaggccaggaat

SEQ ID NO: 786356 - DNA, 15 bp, Homo sapiens
tgaaggccaggaata

SEQ ID NO: 786357 - DNA, 15 bp, Homo sapiens
gaaggccaggaatag

SEQ ID NO: 786358 - DNA, 15 bp, Homo sapiens
aaggccaggaataga

SEQ ID NO: 786359 - DNA, 15 bp, Homo sapiens
aggccaggaatagag

SEQ ID NO: 786360 - DNA, 15 bp, Homo sapiens
ggccaggaatagagc

SEQ ID NO: 786361 - DNA, 15 bp, Homo sapiens
gccaggaatagagcc

SEQ ID NO: 786362 - DNA, 15 bp, Homo sapiens
ccaggaatagagccc

SEQ ID NO: 786363 - DNA, 15 bp, Homo sapiens
caggaatagagccct

SEQ ID NO: 786364 - DNA, 15 bp, Homo sapiens
aggaatagagccctg

SEQ ID NO: 786365 - DNA, 15 bp, Homo sapiens
ggaatagagccctgt

SEQ ID NO: 786366 - DNA, 15 bp, Homo sapiens
gaatagagccctgtg

SEQ ID NO: 786367 - DNA, 15 bp, Homo sapiens
aatagagccctgtga

SEQ ID NO: 786368 - DNA, 15 bp, Homo sapiens
atagagccctgtgac

SEQ ID NO: 786369 - DNA, 15 bp, Homo sapiens
tagagccctgtgaca

SEQ ID NO: 786370 - DNA, 15 bp, Homo sapiens
agagccctgtgacat

SEQ ID NO: 786371 - DNA, 15 bp, Homo sapiens
gagccctgtgacatg

SEQ ID NO: 786372 - DNA, 15 bp, Homo sapiens
agccctgtgacatga

SEQ ID NO: 786373 - DNA, 15 bp, Homo sapiens
gccctgtgacatgac

SEQ ID NO: 786374 - DNA, 15 bp, Homo sapiens
ccctgtgacatgaca

SEQ ID NO: 786375 - DNA, 15 bp, Homo sapiens
cctgtgacatgacat

SEQ ID NO: 786376 - DNA, 15 bp, Homo sapiens
ctgtgacatgacata

SEQ ID NO: 786377 - DNA, 15 bp, Homo sapiens
tgtgacatgacatag

SEQ ID NO: 786378 - DNA, 15 bp, Homo sapiens
gtgacatgacataga

SEQ ID NO: 786379 - DNA, 15 bp, Homo sapiens
tgacatgacatagaa

SEQ ID NO: 786380 - DNA, 15 bp, Homo sapiens
gacatgacatagaaa

SEQ ID NO: 786381 - DNA, 15 bp, Homo sapiens
acatgacatagaaac

SEQ ID NO: 786382 - DNA, 15 bp, Homo sapiens
catgacatagaaact

SEQ ID NO: 786383 - DNA, 15 bp, Homo sapiens
atgacatagaaacta

SEQ ID NO: 786384 - DNA, 15 bp, Homo sapiens
tgacatagaaactac

SEQ ID NO: 786385 - DNA, 15 bp, Homo sapiens
gacatagaaactacc

SEQ ID NO: 786386 - DNA, 15 bp, Homo sapiens
acatagaaactaccc

SEQ ID NO: 786387 - DNA, 15 bp, Homo sapiens
catagaaactaccct

SEQ ID NO: 786388 - DNA, 15 bp, Homo sapiens
atagaaactaccctc

SEQ ID NO: 786389 - DNA, 15 bp, Homo sapiens
tagaaactaccctcc

SEQ ID NO: 786390 - DNA, 15 bp, Homo sapiens
agaaactaccctcca

SEQ ID NO: 786391 - DNA, 15 bp, Homo sapiens
gaaactaccctccag

SEQ ID NO: 786392 - DNA, 15 bp, Homo sapiens
aaactaccctccagg

SEQ ID NO: 786393 - DNA, 15 bp, Homo sapiens
aactaccctccaggt

SEQ ID NO: 786394 - DNA, 15 bp, Homo sapiens
actaccctccaggtt

SEQ ID NO: 786395 - DNA, 15 bp, Homo sapiens
ctaccctccaggttc

SEQ ID NO: 786396 - DNA, 15 bp, Homo sapiens
taccctccaggttca

SEQ ID NO: 786397 - DNA, 15 bp, Homo sapiens
accctccaggttcat

SEQ ID NO: 786398 - DNA, 15 bp, Homo sapiens
ccctccaggttcatg

SEQ ID NO: 786399 - DNA, 15 bp, Homo sapiens
cctccaggttcatgt

SEQ ID NO: 786400 - DNA, 15 bp, Homo sapiens
ctccaggttcatgtc

SEQ ID NO: 786401 - DNA, 15 bp, Homo sapiens
tccaggttcatgtct

SEQ ID NO: 786402 - DNA, 15 bp, Homo sapiens
ccaggttcatgtctt

SEQ ID NO: 786403 - DNA, 15 bp, Homo sapiens
caggttcatgtcttc

SEQ ID NO: 786404 - DNA, 15 bp, Homo sapiens
aggttcatgtcttca

SEQ ID NO: 786405 - DNA, 15 bp, Homo sapiens
ggttcatgtcttcat

SEQ ID NO: 786406 - DNA, 15 bp, Homo sapiens
gttcatgtcttcatg

SEQ ID NO: 786407 - DNA, 15 bp, Homo sapiens
ttcatgtcttcatga

SEQ ID NO: 786408 - DNA, 15 bp, Homo sapiens
tcatgtcttcatgaa

SEQ ID NO: 786409 - DNA, 15 bp, Homo sapiens
catgtcttcatgaat

SEQ ID NO: 786410 - DNA, 15 bp, Homo sapiens
atgtcttcatgaatc

SEQ ID NO: 786411 - DNA, 15 bp, Homo sapiens
tgtcttcatgaatca

SEQ ID NO: 786412 - DNA, 15 bp, Homo sapiens
gtcttcatgaatcac

SEQ ID NO: 786413 - DNA, 15 bp, Homo sapiens
tcttcatgaatcacc

SEQ ID NO: 786414 - DNA, 15 bp, Homo sapiens
cttcatgaatcacca

SEQ ID NO: 786415 - DNA, 15 bp, Homo sapiens
ttcatgaatcaccat

SEQ ID NO: 786416 - DNA, 15 bp, Homo sapiens
tcatgaatcaccatc

SEQ ID NO: 786417 - DNA, 15 bp, Homo sapiens
catgaatcaccatct

SEQ ID NO: 786418 - DNA, 15 bp, Homo sapiens
atgaatcaccatctt

SEQ ID NO: 786419 - DNA, 15 bp, Homo sapiens
tgaatcaccatcttt

SEQ ID NO: 786420 - DNA, 15 bp, Homo sapiens
gaatcaccatctttt

SEQ ID NO: 786421 - DNA, 15 bp, Homo sapiens
aatcaccatcttttg

SEQ ID NO: 786422 - DNA, 15 bp, Homo sapiens
atcaccatcttttgt

SEQ ID NO: 786423 - DNA, 15 bp, Homo sapiens
tcaccatcttttgta

SEQ ID NO: 786424 - DNA, 15 bp, Homo sapiens
caccatcttttgtat

SEQ ID NO: 786425 - DNA, 15 bp, Homo sapiens
accatcttttgtatt

SEQ ID NO: 786426 - DNA, 15 bp, Homo sapiens
ccatcttttgtattg

SEQ ID NO: 786427 - DNA, 15 bp, Homo sapiens
catcttttgtattgt

SEQ ID NO: 786428 - DNA, 15 bp, Homo sapiens
atcttttgtattgtt

SEQ ID NO: 786429 - DNA, 15 bp, Homo sapiens
tcttttgtattgttc

SEQ ID NO: 786430 - DNA, 15 bp, Homo sapiens
cttttgtattgttca

SEQ ID NO: 786431 - DNA, 15 bp, Homo sapiens
ttttgtattgttcac

SEQ ID NO: 786432 - DNA, 15 bp, Homo sapiens
tttgtattgttcact

SEQ ID NO: 786433 - DNA, 15 bp, Homo sapiens
ttgtattgttcactc

SEQ ID NO: 786434 - DNA, 15 bp, Homo sapiens
tgtattgttcactca

SEQ ID NO: 786435 - DNA, 15 bp, Homo sapiens
gtattgttcactcaa

SEQ ID NO: 786436 - DNA, 15 bp, Homo sapiens
tattgttcactcaat

SEQ ID NO: 786437 - DNA, 15 bp, Homo sapiens
attgttcactcaatt

SEQ ID NO: 786438 - DNA, 15 bp, Homo sapiens
ttgttcactcaatta

SEQ ID NO: 786439 - DNA, 15 bp, Homo sapiens
tgttcactcaattac

SEQ ID NO: 786440 - DNA, 15 bp, Homo sapiens
gttcactcaattact

SEQ ID NO: 786441 - DNA, 15 bp, Homo sapiens
ttcactcaattacta

SEQ ID NO: 786442 - DNA, 15 bp, Homo sapiens
tcactcaattactaa

SEQ ID NO: 786443 - DNA, 15 bp, Homo sapiens
cactcaattactaag

SEQ ID NO: 786444 - DNA, 15 bp, Homo sapiens
actcaattactaagc

SEQ ID NO: 786445 - DNA, 15 bp, Homo sapiens
ctcaattactaagcc

SEQ ID NO: 786446 - DNA, 15 bp, Homo sapiens
tcaattactaagcca

SEQ ID NO: 786447 - DNA, 15 bp, Homo sapiens
caattactaagccac

SEQ ID NO: 786448 - DNA, 15 bp, Homo sapiens
aattactaagccacc

SEQ ID NO: 786449 - DNA, 15 bp, Homo sapiens
attactaagccaccc

SEQ ID NO: 786450 - DNA, 15 bp, Homo sapiens
ttactaagccaccca

SEQ ID NO: 786451 - DNA, 15 bp, Homo sapiens
tactaagccacccag

SEQ ID NO: 786452 - DNA, 15 bp, Homo sapiens
actaagccacccagt

SEQ ID NO: 786453 - DNA, 15 bp, Homo sapiens
ctaagccacccagtt

SEQ ID NO: 786454 - DNA, 15 bp, Homo sapiens
taagccacccagtta

SEQ ID NO: 786455 - DNA, 15 bp, Homo sapiens
aagccacccagttac

SEQ ID NO: 786456 - DNA, 15 bp, Homo sapiens
agccacccagttaca

SEQ ID NO: 786457 - DNA, 15 bp, Homo sapiens
gccacccagttacac

SEQ ID NO: 786458 - DNA, 15 bp, Homo sapiens
ccacccagttacact

SEQ ID NO: 786459 - DNA, 15 bp, Homo sapiens
cacccagttacactg

SEQ ID NO: 786460 - DNA, 15 bp, Homo sapiens
acccagttacactgt

SEQ ID NO: 786461 - DNA, 15 bp, Homo sapiens
cccagttacactgtg

SEQ ID NO: 786462 - DNA, 15 bp, Homo sapiens
ccagttacactgtga

SEQ ID NO: 786463 - DNA, 15 bp, Homo sapiens
cagttacactgtgac

SEQ ID NO: 786464 - DNA, 15 bp, Homo sapiens
agttacactgtgact

SEQ ID NO: 786465 - DNA, 15 bp, Homo sapiens
gttacactgtgactc

SEQ ID NO: 786466 - DNA, 15 bp, Homo sapiens
ttacactgtgactca

SEQ ID NO: 786467 - DNA, 15 bp, Homo sapiens
tacactgtgactcag

SEQ ID NO: 786468 - DNA, 15 bp, Homo sapiens
acactgtgactcagc

SEQ ID NO: 786469 - DNA, 15 bp, Homo sapiens
cactgtgactcagct

SEQ ID NO: 786470 - DNA, 15 bp, Homo sapiens
actgtgactcagctc

SEQ ID NO: 786471 - DNA, 15 bp, Homo sapiens
ctgtgactcagctca

SEQ ID NO: 786472 - DNA, 15 bp, Homo sapiens
tgtgactcagctcat

SEQ ID NO: 786473 - DNA, 15 bp, Homo sapiens
gtgactcagctcata

SEQ ID NO: 786474 - DNA, 15 bp, Homo sapiens
tgactcagctcatat

SEQ ID NO: 786475 - DNA, 15 bp, Homo sapiens
gactcagctcatatt

SEQ ID NO: 786476 - DNA, 15 bp, Homo sapiens
actcagctcatattt

SEQ ID NO: 786477 - DNA, 15 bp, Homo sapiens
ctcagctcatatttc

SEQ ID NO: 786478 - DNA, 15 bp, Homo sapiens
tcagctcatatttct

SEQ ID NO: 786479 - DNA, 15 bp, Homo sapiens
cagctcatatttctc

SEQ ID NO: 786480 - DNA, 15 bp, Homo sapiens
agctcatatttctcc

SEQ ID NO: 786481 - DNA, 15 bp, Homo sapiens
gctcatatttctcca

SEQ ID NO: 786482 - DNA, 15 bp, Homo sapiens
ctcatatttctccat

SEQ ID NO: 786483 - DNA, 15 bp, Homo sapiens
tcatatttctccatt

SEQ ID NO: 786484 - DNA, 15 bp, Homo sapiens
catatttctccattt

SEQ ID NO: 786485 - DNA, 15 bp, Homo sapiens
atatttctccatttg

SEQ ID NO: 786486 - DNA, 15 bp, Homo sapiens
tatttctccatttgg

SEQ ID NO: 786487 - DNA, 15 bp, Homo sapiens
atttctccatttgga

SEQ ID NO: 786488 - DNA, 15 bp, Homo sapiens
tttctccatttggat

SEQ ID NO: 786489 - DNA, 15 bp, Homo sapiens
ttctccatttggatc

SEQ ID NO: 786490 - DNA, 15 bp, Homo sapiens
tctccatttggatct

SEQ ID NO: 786491 - DNA, 15 bp, Homo sapiens
ctccatttggatctt

SEQ ID NO: 786492 - DNA, 15 bp, Homo sapiens
tccatttggatctta

SEQ ID NO: 786493 - DNA, 15 bp, Homo sapiens
ccatttggatcttaa

SEQ ID NO: 786494 - DNA, 15 bp, Homo sapiens
catttggatcttaag

SEQ ID NO: 786495 - DNA, 15 bp, Homo sapiens
atttggatcttaaga

SEQ ID NO: 786496 - DNA, 15 bp, Homo sapiens
tttggatcttaagaa

SEQ ID NO: 786497 - DNA, 15 bp, Homo sapiens
ttggatcttaagaat

SEQ ID NO: 786498 - DNA, 15 bp, Homo sapiens
tggatcttaagaatg

SEQ ID NO: 786499 - DNA, 15 bp, Homo sapiens
ggatcttaagaatgc

SEQ ID NO: 786500 - DNA, 15 bp, Homo sapiens
gatcttaagaatgcc

SEQ ID NO: 786501 - DNA, 15 bp, Homo sapiens
atcttaagaatgcca

SEQ ID NO: 786502 - DNA, 15 bp, Homo sapiens
tcttaagaatgccaa

SEQ ID NO: 786503 - DNA, 15 bp, Homo sapiens
cttaagaatgccaat

SEQ ID NO: 786504 - DNA, 15 bp, Homo sapiens
ttaagaatgccaatc

SEQ ID NO: 786505 - DNA, 15 bp, Homo sapiens
taagaatgccaatcg

SEQ ID NO: 786506 - DNA, 15 bp, Homo sapiens
aagaatgccaatcgt

SEQ ID NO: 786507 - DNA, 15 bp, Homo sapiens
agaatgccaatcgta

SEQ ID NO: 786508 - DNA, 15 bp, Homo sapiens
gaatgccaatcgtag

SEQ ID NO: 786509 - DNA, 15 bp, Homo sapiens
aatgccaatcgtagc

SEQ ID NO: 786510 - DNA, 15 bp, Homo sapiens
atgccaatcgtagct

SEQ ID NO: 786511 - DNA, 15 bp, Homo sapiens
tgccaatcgtagctg

SEQ ID NO: 786512 - DNA, 15 bp, Homo sapiens
gccaatcgtagctgc

SEQ ID NO: 786513 - DNA, 15 bp, Homo sapiens
ccaatcgtagctgcg

SEQ ID NO: 786514 - DNA, 15 bp, Homo sapiens
caatcgtagctgcgg

SEQ ID NO: 786515 - DNA, 15 bp, Homo sapiens
aatcgtagctgcgga

SEQ ID NO: 786516 - DNA, 15 bp, Homo sapiens
atcgtagctgcggat

SEQ ID NO: 786517 - DNA, 15 bp, Homo sapiens
tcgtagctgcggatc

SEQ ID NO: 786518 - DNA, 15 bp, Homo sapiens
cgtagctgcggatct

SEQ ID NO: 786519 - DNA, 15 bp, Homo sapiens
gtagctgcggatctt

SEQ ID NO: 786520 - DNA, 15 bp, Homo sapiens
tagctgcggatctta

SEQ ID NO: 786521 - DNA, 15 bp, Homo sapiens
agctgcggatcttaa

SEQ ID NO: 786522 - DNA, 15 bp, Homo sapiens
gctgcggatcttaaa

SEQ ID NO: 786523 - DNA, 15 bp, Homo sapiens
ctgcggatcttaaat

SEQ ID NO: 786524 - DNA, 15 bp, Homo sapiens
tgcggatcttaaatt

SEQ ID NO: 786525 - DNA, 15 bp, Homo sapiens
gcggatcttaaattt

SEQ ID NO: 786526 - DNA, 15 bp, Homo sapiens
cggatcttaaattta

SEQ ID NO: 786527 - DNA, 15 bp, Homo sapiens
ggatcttaaatttat

SEQ ID NO: 786528 - DNA, 15 bp, Homo sapiens
gatcttaaatttata

SEQ ID NO: 786529 - DNA, 15 bp, Homo sapiens
atcttaaatttatag

SEQ ID NO: 786530 - DNA, 15 bp, Homo sapiens
tcttaaatttatagt

SEQ ID NO: 786531 - DNA, 15 bp, Homo sapiens
cttaaatttatagta

SEQ ID NO: 786532 - DNA, 15 bp, Homo sapiens
ttaaatttatagtaa

SEQ ID NO: 786533 - DNA, 15 bp, Homo sapiens
taaatttatagtaaa

SEQ ID NO: 786534 - DNA, 15 bp, Homo sapiens
aaatttatagtaaat

SEQ ID NO: 786535 - DNA, 15 bp, Homo sapiens
aatttatagtaaatc

SEQ ID NO: 786536 - DNA, 15 bp, Homo sapiens
atttatagtaaatct

SEQ ID NO: 786537 - DNA, 15 bp, Homo sapiens
tttatagtaaatcta

SEQ ID NO: 786538 - DNA, 15 bp, Homo sapiens
ttatagtaaatctat

SEQ ID NO: 786539 - DNA, 15 bp, Homo sapiens
tatagtaaatctatt

SEQ ID NO: 786540 - DNA, 15 bp, Homo sapiens
atagtaaatctatta

SEQ ID NO: 786541 - DNA, 15 bp, Homo sapiens
tagtaaatctattac

SEQ ID NO: 786542 - DNA, 15 bp, Homo sapiens
agtaaatctattaca

SEQ ID NO: 786543 - DNA, 15 bp, Homo sapiens
gtaaatctattacag

SEQ ID NO: 786544 - DNA, 15 bp, Homo sapiens
taaatctattacagt

SEQ ID NO: 786545 - DNA, 15 bp, Homo sapiens
aaatctattacagta

SEQ ID NO: 786546 - DNA, 15 bp, Homo sapiens
aatctattacagtaa

SEQ ID NO: 786547 - DNA, 15 bp, Homo sapiens
atctattacagtaaa

SEQ ID NO: 786548 - DNA, 15 bp, Homo sapiens
tctattacagtaaat

SEQ ID NO: 786549 - DNA, 15 bp, Homo sapiens
ctattacagtaaatt

SEQ ID NO: 786550 - DNA, 15 bp, Homo sapiens
tattacagtaaatta

SEQ ID NO: 786551 - DNA, 15 bp, Homo sapiens
attacagtaaattaa

SEQ ID NO: 786552 - DNA, 15 bp, Homo sapiens
ttacagtaaattaag

SEQ ID NO: 786553 - DNA, 15 bp, Homo sapiens
tacagtaaattaagc

SEQ ID NO: 786554 - DNA, 15 bp, Homo sapiens
acagtaaattaagct

SEQ ID NO: 786555 - DNA, 15 bp, Homo sapiens
cagtaaattaagcta

SEQ ID NO: 786556 - DNA, 15 bp, Homo sapiens
agtaaattaagctag

SEQ ID NO: 786557 - DNA, 15 bp, Homo sapiens
gtaaattaagctagc

SEQ ID NO: 786558 - DNA, 15 bp, Homo sapiens
taaattaagctagca

SEQ ID NO: 786559 - DNA, 15 bp, Homo sapiens
aaattaagctagcac

SEQ ID NO: 786560 - DNA, 15 bp, Homo sapiens
aattaagctagcaca

SEQ ID NO: 786561 - DNA, 15 bp, Homo sapiens
attaagctagcacaa

SEQ ID NO: 786562 - DNA, 15 bp, Homo sapiens
ttaagctagcacaat

SEQ ID NO: 786563 - DNA, 15 bp, Homo sapiens
taagctagcacaatc

SEQ ID NO: 786564 - DNA, 15 bp, Homo sapiens
aagctagcacaatct

SEQ ID NO: 786565 - DNA, 15 bp, Homo sapiens
agctagcacaatctg

SEQ ID NO: 786566 - DNA, 15 bp, Homo sapiens
gctagcacaatctga

SEQ ID NO: 786567 - DNA, 15 bp, Homo sapiens
ctagcacaatctgat

SEQ ID NO: 786568 - DNA, 15 bp, Homo sapiens
tagcacaatctgatt

SEQ ID NO: 786569 - DNA, 15 bp, Homo sapiens
agcacaatctgattt

SEQ ID NO: 786570 - DNA, 15 bp, Homo sapiens
gcacaatctgattta

SEQ ID NO: 786571 - DNA, 15 bp, Homo sapiens
cacaatctgatttat

SEQ ID NO: 786572 - DNA, 15 bp, Homo sapiens
acaatctgatttatt

SEQ ID NO: 786573 - DNA, 15 bp, Homo sapiens
caatctgatttattt

SEQ ID NO: 786574 - DNA, 15 bp, Homo sapiens
aatctgatttattta

SEQ ID NO: 786575 - DNA, 15 bp, Homo sapiens
atctgatttatttat

SEQ ID NO: 786576 - DNA, 15 bp, Homo sapiens
tctgatttatttatt

SEQ ID NO: 786577 - DNA, 15 bp, Homo sapiens
ctgatttatttattc

SEQ ID NO: 786578 - DNA, 15 bp, Homo sapiens
tgatttatttattct

SEQ ID NO: 786579 - DNA, 15 bp, Homo sapiens
gatttatttattctt

SEQ ID NO: 786580 - DNA, 15 bp, Homo sapiens
atttatttattctta

SEQ ID NO: 786581 - DNA, 15 bp, Homo sapiens
tttatttattcttag

SEQ ID NO: 786582 - DNA, 15 bp, Homo sapiens
ttatttattcttagt

SEQ ID NO: 786583 - DNA, 15 bp, Homo sapiens
tatttattcttagtg

SEQ ID NO: 786584 - DNA, 15 bp, Homo sapiens
atttattcttagtga

SEQ ID NO: 786585 - DNA, 15 bp, Homo sapiens
tttattcttagtgaa

SEQ ID NO: 786586 - DNA, 15 bp, Homo sapiens
ttattcttagtgaat

SEQ ID NO: 786587 - DNA, 15 bp, Homo sapiens
tattcttagtgaata

SEQ ID NO: 786588 - DNA, 15 bp, Homo sapiens
attcttagtgaatat

SEQ ID NO: 786589 - DNA, 15 bp, Homo sapiens
ttcttagtgaatata

SEQ ID NO: 786590 - DNA, 15 bp, Homo sapiens
tcttagtgaatataa

SEQ ID NO: 786591 - DNA, 15 bp, Homo sapiens
cttagtgaatataag

SEQ ID NO: 786592 - DNA, 15 bp, Homo sapiens
ttagtgaatataagc

SEQ ID NO: 786593 - DNA, 15 bp, Homo sapiens
tagtgaatataagct

SEQ ID NO: 786594 - DNA, 15 bp, Homo sapiens
agtgaatataagctg

SEQ ID NO: 786595 - DNA, 15 bp, Homo sapiens
gtgaatataagctgg

SEQ ID NO: 786596 - DNA, 15 bp, Homo sapiens
tgaatataagctggc

SEQ ID NO: 786597 - DNA, 15 bp, Homo sapiens
gaatataagctggct

SEQ ID NO: 786598 - DNA, 15 bp, Homo sapiens
aatataagctggctt

SEQ ID NO: 786599 - DNA, 15 bp, Homo sapiens
atataagctggcttc

SEQ ID NO: 786600 - DNA, 15 bp, Homo sapiens
tataagctggcttct

SEQ ID NO: 786601 - DNA, 15 bp, Homo sapiens
ataagctggcttcta

SEQ ID NO: 786602 - DNA, 15 bp, Homo sapiens
taagctggcttctag

SEQ ID NO: 786603 - DNA, 15 bp, Homo sapiens
aagctggcttctagt

SEQ ID NO: 786604 - DNA, 15 bp, Homo sapiens
agctggcttctagtc

SEQ ID NO: 786605 - DNA, 15 bp, Homo sapiens
gctggcttctagtcg

SEQ ID NO: 786606 - DNA, 15 bp, Homo sapiens
ctggcttctagtcgt

SEQ ID NO: 786607 - DNA, 15 bp, Homo sapiens
tggcttctagtcgtc

SEQ ID NO: 786608 - DNA, 15 bp, Homo sapiens
ggcttctagtcgtca

SEQ ID NO: 786609 - DNA, 15 bp, Homo sapiens
gcttctagtcgtcac

SEQ ID NO: 786610 - DNA, 15 bp, Homo sapiens
cttctagtcgtcact

SEQ ID NO: 786611 - DNA, 15 bp, Homo sapiens
ttctagtcgtcacta

SEQ ID NO: 786612 - DNA, 15 bp, Homo sapiens
tctagtcgtcactac

SEQ ID NO: 786613 - DNA, 15 bp, Homo sapiens
ctagtcgtcactact

SEQ ID NO: 786614 - DNA, 15 bp, Homo sapiens
tagtcgtcactactt

SEQ ID NO: 786615 - DNA, 15 bp, Homo sapiens
agtcgtcactacttt

SEQ ID NO: 786616 - DNA, 15 bp, Homo sapiens
gtcgtcactactttc

SEQ ID NO: 786617 - DNA, 15 bp, Homo sapiens
tcgtcactactttct

SEQ ID NO: 786618 - DNA, 15 bp, Homo sapiens
cgtcactactttctt

SEQ ID NO: 786619 - DNA, 15 bp, Homo sapiens
gtcactactttcttt

SEQ ID NO: 786620 - DNA, 15 bp, Homo sapiens
tcactactttctttt

SEQ ID NO: 786621 - DNA, 15 bp, Homo sapiens
cactactttcttttt

SEQ ID NO: 786622 - DNA, 15 bp, Homo sapiens
actactttcttttta

SEQ ID NO: 786623 - DNA, 15 bp, Homo sapiens
ctactttctttttaa

SEQ ID NO: 786624 - DNA, 15 bp, Homo sapiens
actttctttttaaag

SEQ ID NO: 786625 - DNA, 15 bp, Homo sapiens
ctttctttttaaagt

SEQ ID NO: 786626 - DNA, 15 bp, Homo sapiens
tttctttttaaagtg

SEQ ID NO: 786627 - DNA, 15 bp, Homo sapiens
ttctttttaaagtgc

SEQ ID NO: 786628 - DNA, 15 bp, Homo sapiens
tctttttaaagtgct

SEQ ID NO: 786629 - DNA, 15 bp, Homo sapiens
ctttttaaagtgctt

SEQ ID NO: 786630 - DNA, 15 bp, Homo sapiens
tttttaaagtgcttg

SEQ ID NO: 786631 - DNA, 15 bp, Homo sapiens
ttttaaagtgcttgg

SEQ ID NO: 786632 - DNA, 15 bp, Homo sapiens
tttaaagtgcttgga

SEQ ID NO: 786633 - DNA, 15 bp, Homo sapiens
ttaaagtgcttggag

SEQ ID NO: 786634 - DNA, 15 bp, Homo sapiens
taaagtgcttggaga

SEQ ID NO: 786635 - DNA, 15 bp, Homo sapiens
aaagtgcttggagac

SEQ ID NO: 786636 - DNA, 15 bp, Homo sapiens
aagtgcttggagacc

SEQ ID NO: 786637 - DNA, 15 bp, Homo sapiens
agtgcttggagacca

SEQ ID NO: 786638 - DNA, 15 bp, Homo sapiens
gtgcttggagaccat

SEQ ID NO: 786639 - DNA, 15 bp, Homo sapiens
tgcttggagaccatt

SEQ ID NO: 786640 - DNA, 15 bp, Homo sapiens
gcttggagaccattc

SEQ ID NO: 786641 - DNA, 15 bp, Homo sapiens
cttggagaccattcc

SEQ ID NO: 786642 - DNA, 15 bp, Homo sapiens
ttggagaccattcct

SEQ ID NO: 786643 - DNA, 15 bp, Homo sapiens
tggagaccattcctt

SEQ ID NO: 786644 - DNA, 15 bp, Homo sapiens
ggagaccattccttt

SEQ ID NO: 786645 - DNA, 15 bp, Homo sapiens
gagaccattccttta

SEQ ID NO: 786646 - DNA, 15 bp, Homo sapiens
agaccattcctttaa

SEQ ID NO: 786647 - DNA, 15 bp, Homo sapiens
gaccattcctttaat

SEQ ID NO: 786648 - DNA, 15 bp, Homo sapiens
accattcctttaata

SEQ ID NO: 786649 - DNA, 15 bp, Homo sapiens
ccattcctttaataa

SEQ ID NO: 786650 - DNA, 15 bp, Homo sapiens
cattcctttaataat

SEQ ID NO: 786651 - DNA, 15 bp, Homo sapiens
attcctttaataatc

SEQ ID NO: 786652 - DNA, 15 bp, Homo sapiens
ttcctttaataatcc

SEQ ID NO: 786653 - DNA, 15 bp, Homo sapiens
tcctttaataatcca

SEQ ID NO: 786654 - DNA, 15 bp, Homo sapiens
cctttaataatccat

SEQ ID NO: 786655 - DNA, 15 bp, Homo sapiens
ctttaataatccatt

SEQ ID NO: 786656 - DNA, 15 bp, Homo sapiens
tttaataatccatta

SEQ ID NO: 786657 - DNA, 15 bp, Homo sapiens
ttaataatccattag

SEQ ID NO: 786658 - DNA, 15 bp, Homo sapiens
taataatccattaga

SEQ ID NO: 786659 - DNA, 15 bp, Homo sapiens
aataatccattagaa

SEQ ID NO: 786660 - DNA, 15 bp, Homo sapiens
ataatccattagaat

SEQ ID NO: 786661 - DNA, 15 bp, Homo sapiens
taatccattagaata

SEQ ID NO: 786662 - DNA, 15 bp, Homo sapiens
aatccattagaatat

SEQ ID NO: 786663 - DNA, 15 bp, Homo sapiens
atccattagaatatc

SEQ ID NO: 786664 - DNA, 15 bp, Homo sapiens
tccattagaatatct

SEQ ID NO: 786665 - DNA, 15 bp, Homo sapiens
ccattagaatatctt

SEQ ID NO: 786666 - DNA, 15 bp, Homo sapiens
cattagaatatcttt

SEQ ID NO: 786667 - DNA, 15 bp, Homo sapiens
attagaatatctttc

SEQ ID NO: 786668 - DNA, 15 bp, Homo sapiens
ttagaatatctttcc

SEQ ID NO: 786669 - DNA, 15 bp, Homo sapiens
tagaatatctttcca

SEQ ID NO: 786670 - DNA, 15 bp, Homo sapiens
agaatatctttccaa

SEQ ID NO: 786671 - DNA, 15 bp, Homo sapiens
gaatatctttccaaa

SEQ ID NO: 786672 - DNA, 15 bp, Homo sapiens
aatatctttccaaat

SEQ ID NO: 786673 - DNA, 15 bp, Homo sapiens
atatctttccaaatc

SEQ ID NO: 786674 - DNA, 15 bp, Homo sapiens
tatctttccaaatca

SEQ ID NO: 786675 - DNA, 15 bp, Homo sapiens
atctttccaaatcac

SEQ ID NO: 786676 - DNA, 15 bp, Homo sapiens
tctttccaaatcact

SEQ ID NO: 786677 - DNA, 15 bp, Homo sapiens
ctttccaaatcactg

SEQ ID NO: 786678 - DNA, 15 bp, Homo sapiens
tttccaaatcactgt

SEQ ID NO: 786679 - DNA, 15 bp, Homo sapiens
ttccaaatcactgtg

SEQ ID NO: 786680 - DNA, 15 bp, Homo sapiens
tccaaatcactgtgt

SEQ ID NO: 786681 - DNA, 15 bp, Homo sapiens
ccaaatcactgtgtt

SEQ ID NO: 786682 - DNA, 15 bp, Homo sapiens
caaatcactgtgttc

SEQ ID NO: 786683 - DNA, 15 bp, Homo sapiens
aaatcactgtgttct

SEQ ID NO: 786684 - DNA, 15 bp, Homo sapiens
aatcactgtgttctg

SEQ ID NO: 786685 - DNA, 15 bp, Homo sapiens
atcactgtgttctgt

SEQ ID NO: 786686 - DNA, 15 bp, Homo sapiens
tcactgtgttctgta

SEQ ID NO: 786687 - DNA, 15 bp, Homo sapiens
cactgtgttctgtag

SEQ ID NO: 786688 - DNA, 15 bp, Homo sapiens
actgtgttctgtagt

SEQ ID NO: 786689 - DNA, 15 bp, Homo sapiens
ctgtgttctgtagtt

SEQ ID NO: 786690 - DNA, 15 bp, Homo sapiens
tgtgttctgtagttt

SEQ ID NO: 786691 - DNA, 15 bp, Homo sapiens
gtgttctgtagtttg

SEQ ID NO: 786692 - DNA, 15 bp, Homo sapiens
tgttctgtagtttgg

SEQ ID NO: 786693 - DNA, 15 bp, Homo sapiens
gttctgtagtttggg

SEQ ID NO: 786694 - DNA, 15 bp, Homo sapiens
ttctgtagtttggga

SEQ ID NO: 786695 - DNA, 15 bp, Homo sapiens
tctgtagtttgggaa

SEQ ID NO: 786696 - DNA, 15 bp, Homo sapiens
ctgtagtttgggaag

SEQ ID NO: 786697 - DNA, 15 bp, Homo sapiens
tgtagtttgggaagt

SEQ ID NO: 786698 - DNA, 15 bp, Homo sapiens
gtagtttgggaagtc

SEQ ID NO: 786699 - DNA, 15 bp, Homo sapiens
tagtttgggaagtct

SEQ ID NO: 786700 - DNA, 15 bp, Homo sapiens
agtttgggaagtctg

SEQ ID NO: 786701 - DNA, 15 bp, Homo sapiens
gtttgggaagtctgc

SEQ ID NO: 786702 - DNA, 15 bp, Homo sapiens
tttgggaagtctgcc

SEQ ID NO: 786703 - DNA, 15 bp, Homo sapiens
ttgggaagtctgcct

SEQ ID NO: 786704 - DNA, 15 bp, Homo sapiens
tgggaagtctgcctt

SEQ ID NO: 786705 - DNA, 15 bp, Homo sapiens
gggaagtctgccttc

SEQ ID NO: 786706 - DNA, 15 bp, Homo sapiens
ggaagtctgccttct

SEQ ID NO: 786707 - DNA, 15 bp, Homo sapiens
gaagtctgccttctt

SEQ ID NO: 786708 - DNA, 15 bp, Homo sapiens
aagtctgccttcttc

SEQ ID NO: 786709 - DNA, 15 bp, Homo sapiens
agtctgccttcttcc

SEQ ID NO: 786710 - DNA, 15 bp, Homo sapiens
gtctgccttcttccc

SEQ ID NO: 786711 - DNA, 15 bp, Homo sapiens
tctgccttcttcccc

SEQ ID NO: 786712 - DNA, 15 bp, Homo sapiens
ctgccttcttcccct

SEQ ID NO: 786713 - DNA, 15 bp, Homo sapiens
tgccttcttcccctt

SEQ ID NO: 786714 - DNA, 15 bp, Homo sapiens
gccttcttccccttt

SEQ ID NO: 786715 - DNA, 15 bp, Homo sapiens
ccttcttcccctttt

SEQ ID NO: 786716 - DNA, 15 bp, Homo sapiens
cttcttccccttttt

SEQ ID NO: 786717 - DNA, 15 bp, Homo sapiens
ttcttcccctttttg

SEQ ID NO: 786718 - DNA, 15 bp, Homo sapiens
tcttcccctttttga

SEQ ID NO: 786719 - DNA, 15 bp, Homo sapiens
cttcccctttttgaa

SEQ ID NO: 786720 - DNA, 15 bp, Homo sapiens
ttcccctttttgaaa

SEQ ID NO: 786721 - DNA, 15 bp, Homo sapiens
tcccctttttgaaaa

SEQ ID NO: 786722 - DNA, 15 bp, Homo sapiens
cccctttttgaaaat

SEQ ID NO: 786723 - DNA, 15 bp, Homo sapiens
ccctttttgaaaatt

SEQ ID NO: 786724 - DNA, 15 bp, Homo sapiens
cctttttgaaaattt

SEQ ID NO: 786725 - DNA, 15 bp, Homo sapiens
ctttttgaaaattta

SEQ ID NO: 786726 - DNA, 15 bp, Homo sapiens
tttttgaaaatttat

SEQ ID NO: 786727 - DNA, 15 bp, Homo sapiens
ttttgaaaatttatg

SEQ ID NO: 786728 - DNA, 15 bp, Homo sapiens
tttgaaaatttatgc

SEQ ID NO: 786729 - DNA, 15 bp, Homo sapiens
ttgaaaatttatgct

SEQ ID NO: 786730 - DNA, 15 bp, Homo sapiens
tgaaaatttatgcta

SEQ ID NO: 786731 - DNA, 15 bp, Homo sapiens
gaaaatttatgctac

SEQ ID NO: 786732 - DNA, 15 bp, Homo sapiens
aaaatttatgctaca

SEQ ID NO: 786733 - DNA, 15 bp, Homo sapiens
aaatttatgctacat

SEQ ID NO: 786734 - DNA, 15 bp, Homo sapiens
aatttatgctacatt

SEQ ID NO: 786735 - DNA, 15 bp, Homo sapiens
atttatgctacattt

SEQ ID NO: 786736 - DNA, 15 bp, Homo sapiens
tttatgctacattta

SEQ ID NO: 786737 - DNA, 15 bp, Homo sapiens
ttatgctacatttat

SEQ ID NO: 786738 - DNA, 15 bp, Homo sapiens
tatgctacatttatc

SEQ ID NO: 786739 - DNA, 15 bp, Homo sapiens
atgctacatttatca

SEQ ID NO: 786740 - DNA, 15 bp, Homo sapiens
tgctacatttatcat

SEQ ID NO: 786741 - DNA, 15 bp, Homo sapiens
gctacatttatcatc

SEQ ID NO: 786742 - DNA, 15 bp, Homo sapiens
ctacatttatcatct

SEQ ID NO: 786743 - DNA, 15 bp, Homo sapiens
tacatttatcatctc

SEQ ID NO: 786744 - DNA, 15 bp, Homo sapiens
acatttatcatctca

SEQ ID NO: 786745 - DNA, 15 bp, Homo sapiens
catttatcatctcat

SEQ ID NO: 786746 - DNA, 15 bp, Homo sapiens
atttatcatctcatc

SEQ ID NO: 786747 - DNA, 15 bp, Homo sapiens
tttatcatctcatct

SEQ ID NO: 786748 - DNA, 15 bp, Homo sapiens
ttatcatctcatctt

SEQ ID NO: 786749 - DNA, 15 bp, Homo sapiens
tatcatctcatcttc

SEQ ID NO: 786750 - DNA, 15 bp, Homo sapiens
atcatctcatcttct

SEQ ID NO: 786751 - DNA, 15 bp, Homo sapiens
tcatctcatcttcta

SEQ ID NO: 786752 - DNA, 15 bp, Homo sapiens
catctcatcttctag

SEQ ID NO: 786753 - DNA, 15 bp, Homo sapiens
atctcatcttctagc

SEQ ID NO: 786754 - DNA, 15 bp, Homo sapiens
tctcatcttctagca

SEQ ID NO: 786755 - DNA, 15 bp, Homo sapiens
ctcatcttctagcac

SEQ ID NO: 786756 - DNA, 15 bp, Homo sapiens
tcatcttctagcacc

SEQ ID NO: 786757 - DNA, 15 bp, Homo sapiens
catcttctagcacct

SEQ ID NO: 786758 - DNA, 15 bp, Homo sapiens
atcttctagcacctc

SEQ ID NO: 786759 - DNA, 15 bp, Homo sapiens
tcttctagcacctct

SEQ ID NO: 786760 - DNA, 15 bp, Homo sapiens
cttctagcacctctc

SEQ ID NO: 786761 - DNA, 15 bp, Homo sapiens
ttctagcacctctcc

SEQ ID NO: 786762 - DNA, 15 bp, Homo sapiens
tctagcacctctcca

SEQ ID NO: 786763 - DNA, 15 bp, Homo sapiens
ctagcacctctccat

SEQ ID NO: 786764 - DNA, 15 bp, Homo sapiens
tagcacctctccatt

SEQ ID NO: 786765 - DNA, 15 bp, Homo sapiens
agcacctctccattc

SEQ ID NO: 786766 - DNA, 15 bp, Homo sapiens
gcacctctccattct

SEQ ID NO: 786767 - DNA, 15 bp, Homo sapiens
cacctctccattctt

SEQ ID NO: 786768 - DNA, 15 bp, Homo sapiens
acctctccattcttt

SEQ ID NO: 786769 - DNA, 15 bp, Homo sapiens
cctctccattctttg

SEQ ID NO: 786770 - DNA, 15 bp, Homo sapiens
ctctccattctttgt

SEQ ID NO: 786771 - DNA, 15 bp, Homo sapiens
tctccattctttgtg

SEQ ID NO: 786772 - DNA, 15 bp, Homo sapiens
ctccattctttgtga

SEQ ID NO: 786773 - DNA, 15 bp, Homo sapiens
tccattctttgtgat

SEQ ID NO: 786774 - DNA, 15 bp, Homo sapiens
ccattctttgtgatt

SEQ ID NO: 786775 - DNA, 15 bp, Homo sapiens
cattctttgtgattc

SEQ ID NO: 786776 - DNA, 15 bp, Homo sapiens
attctttgtgattcc

SEQ ID NO: 786777 - DNA, 15 bp, Homo sapiens
ttctttgtgattcct

SEQ ID NO: 786778 - DNA, 15 bp, Homo sapiens
tctttgtgattcctc

SEQ ID NO: 786779 - DNA, 15 bp, Homo sapiens
ctttgtgattcctca

SEQ ID NO: 786780 - DNA, 15 bp, Homo sapiens
tttgtgattcctcaa

SEQ ID NO: 786781 - DNA, 15 bp, Homo sapiens
ttgtgattcctcaac

SEQ ID NO: 786782 - DNA, 15 bp, Homo sapiens
tgtgattcctcaact

SEQ ID NO: 786783 - DNA, 15 bp, Homo sapiens
gtgattcctcaacta

SEQ ID NO: 786784 - DNA, 15 bp, Homo sapiens
tgattcctcaactat

SEQ ID NO: 786785 - DNA, 15 bp, Homo sapiens
gattcctcaactatc

SEQ ID NO: 786786 - DNA, 15 bp, Homo sapiens
attcctcaactatcc

SEQ ID NO: 786787 - DNA, 15 bp, Homo sapiens
ttcctcaactatcca

SEQ ID NO: 786788 - DNA, 15 bp, Homo sapiens
tcctcaactatccac

SEQ ID NO: 786789 - DNA, 15 bp, Homo sapiens
cctcaactatccaca

SEQ ID NO: 786790 - DNA, 15 bp, Homo sapiens
ctcaactatccacag

SEQ ID NO: 786791 - DNA, 15 bp, Homo sapiens
tcaactatccacaga

SEQ ID NO: 786792 - DNA, 15 bp, Homo sapiens
caactatccacagag

SEQ ID NO: 786793 - DNA, 15 bp, Homo sapiens
aactatccacagaga

SEQ ID NO: 786794 - DNA, 15 bp, Homo sapiens
actatccacagagag

SEQ ID NO: 786795 - DNA, 15 bp, Homo sapiens
ctatccacagagagc

SEQ ID NO: 786796 - DNA, 15 bp, Homo sapiens
tatccacagagagca

SEQ ID NO: 786797 - DNA, 15 bp, Homo sapiens
atccacagagagcaa

SEQ ID NO: 786798 - DNA, 15 bp, Homo sapiens
tccacagagagcaat

SEQ ID NO: 786799 - DNA, 15 bp, Homo sapiens
ccacagagagcaatt

SEQ ID NO: 786800 - DNA, 15 bp, Homo sapiens
cacagagagcaattc

SEQ ID NO: 786801 - DNA, 15 bp, Homo sapiens
acagagagcaattcc

SEQ ID NO: 786802 - DNA, 15 bp, Homo sapiens
cagagagcaattcca

SEQ ID NO: 786803 - DNA, 15 bp, Homo sapiens
agagagcaattccat

SEQ ID NO: 786804 - DNA, 15 bp, Homo sapiens
gagagcaattccatg

SEQ ID NO: 786805 - DNA, 15 bp, Homo sapiens
agagcaattccatgg

SEQ ID NO: 786806 - DNA, 15 bp, Homo sapiens
gagcaattccatggc

SEQ ID NO: 786807 - DNA, 15 bp, Homo sapiens
agcaattccatggcc

SEQ ID NO: 786808 - DNA, 15 bp, Homo sapiens
gcaattccatggcct

SEQ ID NO: 786809 - DNA, 15 bp, Homo sapiens
caattccatggcctg

SEQ ID NO: 786810 - DNA, 15 bp, Homo sapiens
aattccatggcctgc

SEQ ID NO: 786811 - DNA, 15 bp, Homo sapiens
attccatggcctgcc

SEQ ID NO: 786812 - DNA, 15 bp, Homo sapiens
ttccatggcctgcct

SEQ ID NO: 786813 - DNA, 15 bp, Homo sapiens
tccatggcctgccta

SEQ ID NO: 786814 - DNA, 15 bp, Homo sapiens
ccatggcctgcctac

SEQ ID NO: 786815 - DNA, 15 bp, Homo sapiens
catggcctgcctaca

SEQ ID NO: 786816 - DNA, 15 bp, Homo sapiens
atggcctgcctacaa

SEQ ID NO: 786817 - DNA, 15 bp, Homo sapiens
tggcctgcctacaag

SEQ ID NO: 786818 - DNA, 15 bp, Homo sapiens
ggcctgcctacaagg

SEQ ID NO: 786819 - DNA, 15 bp, Homo sapiens
gcctgcctacaaggt

SEQ ID NO: 786820 - DNA, 15 bp, Homo sapiens
cctgcctacaaggtc

SEQ ID NO: 786821 - DNA, 15 bp, Homo sapiens
ctgcctacaaggtct

SEQ ID NO: 786822 - DNA, 15 bp, Homo sapiens
tgcctacaaggtctt

SEQ ID NO: 786823 - DNA, 15 bp, Homo sapiens
gcctacaaggtcttt

SEQ ID NO: 786824 - DNA, 15 bp, Homo sapiens
cctacaaggtctttc

SEQ ID NO: 786825 - DNA, 15 bp, Homo sapiens
ctacaaggtctttcg

SEQ ID NO: 786826 - DNA, 15 bp, Homo sapiens
tacaaggtctttcgg

SEQ ID NO: 786827 - DNA, 15 bp, Homo sapiens
acaaggtctttcggt

SEQ ID NO: 786828 - DNA, 15 bp, Homo sapiens
caaggtctttcggtt

SEQ ID NO: 786829 - DNA, 15 bp, Homo sapiens
aaggtctttcggttt

SEQ ID NO: 786830 - DNA, 15 bp, Homo sapiens
aggtctttcggtttc

SEQ ID NO: 786831 - DNA, 15 bp, Homo sapiens
ggtctttcggtttcc

SEQ ID NO: 786832 - DNA, 15 bp, Homo sapiens
gtctttcggtttcct

SEQ ID NO: 786833 - DNA, 15 bp, Homo sapiens
tctttcggtttcctg

SEQ ID NO: 786834 - DNA, 15 bp, Homo sapiens
ctttcggtttcctgg

SEQ ID NO: 786835 - DNA, 15 bp, Homo sapiens
tttcggtttcctggg

SEQ ID NO: 786836 - DNA, 15 bp, Homo sapiens
ttcggtttcctggga

SEQ ID NO: 786837 - DNA, 15 bp, Homo sapiens
tcggtttcctgggat

SEQ ID NO: 786838 - DNA, 15 bp, Homo sapiens
cggtttcctgggatt

SEQ ID NO: 786839 - DNA, 15 bp, Homo sapiens
ggtttcctgggattt

SEQ ID NO: 786840 - DNA, 15 bp, Homo sapiens
gtttcctgggatttg

SEQ ID NO: 786841 - DNA, 15 bp, Homo sapiens
tttcctgggatttgc

SEQ ID NO: 786842 - DNA, 15 bp, Homo sapiens
ttcctgggatttgcc

SEQ ID NO: 786843 - DNA, 15 bp, Homo sapiens
tcctgggatttgccc

SEQ ID NO: 786844 - DNA, 15 bp, Homo sapiens
cctgggatttgccca

SEQ ID NO: 786845 - DNA, 15 bp, Homo sapiens
ctgggatttgcccat

SEQ ID NO: 786846 - DNA, 15 bp, Homo sapiens
tgggatttgcccatc

SEQ ID NO: 786847 - DNA, 15 bp, Homo sapiens
gggatttgcccatcc

SEQ ID NO: 786848 - DNA, 15 bp, Homo sapiens
ggatttgcccatcca

SEQ ID NO: 786849 - DNA, 15 bp, Homo sapiens
gatttgcccatccag

SEQ ID NO: 786850 - DNA, 15 bp, Homo sapiens
atttgcccatccagt

SEQ ID NO: 786851 - DNA, 15 bp, Homo sapiens
tttgcccatccagtc

SEQ ID NO: 786852 - DNA, 15 bp, Homo sapiens
ttgcccatccagtcc

SEQ ID NO: 786853 - DNA, 15 bp, Homo sapiens
tgcccatccagtcca

SEQ ID NO: 786854 - DNA, 15 bp, Homo sapiens
gcccatccagtccag

SEQ ID NO: 786855 - DNA, 15 bp, Homo sapiens
cccatccagtccagt

SEQ ID NO: 786856 - DNA, 15 bp, Homo sapiens
ccatccagtccagta

SEQ ID NO: 786857 - DNA, 15 bp, Homo sapiens
catccagtccagtaa

SEQ ID NO: 786858 - DNA, 15 bp, Homo sapiens
atccagtccagtaat

SEQ ID NO: 786859 - DNA, 15 bp, Homo sapiens
tccagtccagtaatt

SEQ ID NO: 786860 - DNA, 15 bp, Homo sapiens
ccagtccagtaattc

SEQ ID NO: 786861 - DNA, 15 bp, Homo sapiens
cagtccagtaattca

SEQ ID NO: 786862 - DNA, 15 bp, Homo sapiens
agtccagtaattcat

SEQ ID NO: 786863 - DNA, 15 bp, Homo sapiens
gtccagtaattcatt

SEQ ID NO: 786864 - DNA, 15 bp, Homo sapiens
tccagtaattcattt

SEQ ID NO: 786865 - DNA, 15 bp, Homo sapiens
ccagtaattcattta

SEQ ID NO: 786866 - DNA, 15 bp, Homo sapiens
cagtaattcatttag

SEQ ID NO: 786867 - DNA, 15 bp, Homo sapiens
agtaattcatttaga

SEQ ID NO: 786868 - DNA, 15 bp, Homo sapiens
gtaattcatttagaa

SEQ ID NO: 786869 - DNA, 15 bp, Homo sapiens
taattcatttagaat

SEQ ID NO: 786870 - DNA, 15 bp, Homo sapiens
aattcatttagaatg

SEQ ID NO: 786871 - DNA, 15 bp, Homo sapiens
attcatttagaatgg

SEQ ID NO: 786872 - DNA, 15 bp, Homo sapiens
ttcatttagaatgga

SEQ ID NO: 786873 - DNA, 15 bp, Homo sapiens
tcatttagaatggat

SEQ ID NO: 786874 - DNA, 15 bp, Homo sapiens
catttagaatggatc

SEQ ID NO: 786875 - DNA, 15 bp, Homo sapiens
atttagaatggatca

SEQ ID NO: 786876 - DNA, 15 bp, Homo sapiens
tttagaatggatcaa

SEQ ID NO: 786877 - DNA, 15 bp, Homo sapiens
ttagaatggatcaat

SEQ ID NO: 786878 - DNA, 15 bp, Homo sapiens
tagaatggatcaatt

SEQ ID NO: 786879 - DNA, 15 bp, Homo sapiens
agaatggatcaatta

SEQ ID NO: 786880 - DNA, 15 bp, Homo sapiens
gaatggatcaattat

SEQ ID NO: 786881 - DNA, 15 bp, Homo sapiens
aatggatcaattatt

SEQ ID NO: 786882 - DNA, 15 bp, Homo sapiens
atggatcaattattt

SEQ ID NO: 786883 - DNA, 15 bp, Homo sapiens
tggatcaattatttg

SEQ ID NO: 786884 - DNA, 15 bp, Homo sapiens
ggatcaattatttgc

SEQ ID NO: 786885 - DNA, 15 bp, Homo sapiens
gatcaattatttgct

SEQ ID NO: 786886 - DNA, 15 bp, Homo sapiens
atcaattatttgcta

SEQ ID NO: 786887 - DNA, 15 bp, Homo sapiens
tcaattatttgctat

SEQ ID NO: 786888 - DNA, 15 bp, Homo sapiens
caattatttgctatc

SEQ ID NO: 786889 - DNA, 15 bp, Homo sapiens
aattatttgctatct

SEQ ID NO: 786890 - DNA, 15 bp, Homo sapiens
attatttgctatctt

SEQ ID NO: 786891 - DNA, 15 bp, Homo sapiens
ttatttgctatctta

SEQ ID NO: 786892 - DNA, 15 bp, Homo sapiens
tatttgctatcttac

SEQ ID NO: 786893 - DNA, 15 bp, Homo sapiens
atttgctatcttaca

SEQ ID NO: 786894 - DNA, 15 bp, Homo sapiens
tttgctatcttacat

SEQ ID NO: 786895 - DNA, 15 bp, Homo sapiens
ttgctatcttacatc

SEQ ID NO: 786896 - DNA, 15 bp, Homo sapiens
tgctatcttacatct

SEQ ID NO: 786897 - DNA, 15 bp, Homo sapiens
gctatcttacatctt

SEQ ID NO: 786898 - DNA, 15 bp, Homo sapiens
ctatcttacatcttt

SEQ ID NO: 786899 - DNA, 15 bp, Homo sapiens
tatcttacatctttt

SEQ ID NO: 786900 - DNA, 15 bp, Homo sapiens
atcttacatcttttt

SEQ ID NO: 786901 - DNA, 15 bp, Homo sapiens
tcttacatcttttta

SEQ ID NO: 786902 - DNA, 15 bp, Homo sapiens
cttacatctttttac

SEQ ID NO: 786903 - DNA, 15 bp, Homo sapiens
ttacatctttttacc

SEQ ID NO: 786904 - DNA, 15 bp, Homo sapiens
tacatctttttaccc

SEQ ID NO: 786905 - DNA, 15 bp, Homo sapiens
acatctttttaccca

SEQ ID NO: 786906 - DNA, 15 bp, Homo sapiens
catctttttacccat

SEQ ID NO: 786907 - DNA, 15 bp, Homo sapiens
atctttttacccatt

SEQ ID NO: 786908 - DNA, 15 bp, Homo sapiens
tctttttacccattt

SEQ ID NO: 786909 - DNA, 15 bp, Homo sapiens
ctttttacccatttt

SEQ ID NO: 786910 - DNA, 15 bp, Homo sapiens
tttttacccatttta

SEQ ID NO: 786911 - DNA, 15 bp, Homo sapiens
ttttacccattttag

SEQ ID NO: 786912 - DNA, 15 bp, Homo sapiens
tttacccattttaga

SEQ ID NO: 786913 - DNA, 15 bp, Homo sapiens
ttacccattttagag

SEQ ID NO: 786914 - DNA, 15 bp, Homo sapiens
tacccattttagagt

SEQ ID NO: 786915 - DNA, 15 bp, Homo sapiens
acccattttagagtt

SEQ ID NO: 786916 - DNA, 15 bp, Homo sapiens
cccattttagagttt

SEQ ID NO: 786917 - DNA, 15 bp, Homo sapiens
ccattttagagttta

SEQ ID NO: 786918 - DNA, 15 bp, Homo sapiens
cattttagagtttaa

SEQ ID NO: 786919 - DNA, 15 bp, Homo sapiens
attttagagtttaat

SEQ ID NO: 786920 - DNA, 15 bp, Homo sapiens
ttttagagtttaatt

SEQ ID NO: 786921 - DNA, 15 bp, Homo sapiens
tttagagtttaattt

SEQ ID NO: 786922 - DNA, 15 bp, Homo sapiens
ttagagtttaatttc

SEQ ID NO: 786923 - DNA, 15 bp, Homo sapiens
tagagtttaatttct

SEQ ID NO: 786924 - DNA, 15 bp, Homo sapiens
agagtttaatttctt

SEQ ID NO: 786925 - DNA, 15 bp, Homo sapiens
gagtttaatttcttc

SEQ ID NO: 786926 - DNA, 15 bp, Homo sapiens
agtttaatttcttct

SEQ ID NO: 786927 - DNA, 15 bp, Homo sapiens
gtttaatttcttctc

SEQ ID NO: 786928 - DNA, 15 bp, Homo sapiens
tttaatttcttctcc

SEQ ID NO: 786929 - DNA, 15 bp, Homo sapiens
ttaatttcttctccc

SEQ ID NO: 786930 - DNA, 15 bp, Homo sapiens
taatttcttctccct

SEQ ID NO: 786931 - DNA, 15 bp, Homo sapiens
aatttcttctccctt

SEQ ID NO: 786932 - DNA, 15 bp, Homo sapiens
atttcttctcccttt

SEQ ID NO: 786933 - DNA, 15 bp, Homo sapiens
tttcttctccctttt

SEQ ID NO: 786934 - DNA, 15 bp, Homo sapiens
ttcttctcccttttt

SEQ ID NO: 786935 - DNA, 15 bp, Homo sapiens
tcttctccctttttc

SEQ ID NO: 786936 - DNA, 15 bp, Homo sapiens
cttctccctttttca

SEQ ID NO: 786937 - DNA, 15 bp, Homo sapiens
ttctccctttttcag

SEQ ID NO: 786938 - DNA, 15 bp, Homo sapiens
tctccctttttcagt

SEQ ID NO: 786939 - DNA, 15 bp, Homo sapiens
ctccctttttcagtc

SEQ ID NO: 786940 - DNA, 15 bp, Homo sapiens
tccctttttcagtct

SEQ ID NO: 786941 - DNA, 15 bp, Homo sapiens
ccctttttcagtctg

SEQ ID NO: 786942 - DNA, 15 bp, Homo sapiens
cctttttcagtctga

SEQ ID NO: 786943 - DNA, 15 bp, Homo sapiens
ctttttcagtctgac

SEQ ID NO: 786944 - DNA, 15 bp, Homo sapiens
tttttcagtctgaca

SEQ ID NO: 786945 - DNA, 15 bp, Homo sapiens
ttttcagtctgacag

SEQ ID NO: 786946 - DNA, 15 bp, Homo sapiens
tttcagtctgacagt

SEQ ID NO: 786947 - DNA, 15 bp, Homo sapiens
ttcagtctgacagtc

SEQ ID NO: 786948 - DNA, 15 bp, Homo sapiens
tcagtctgacagtca

SEQ ID NO: 786949 - DNA, 15 bp, Homo sapiens
cagtctgacagtcat

SEQ ID NO: 786950 - DNA, 15 bp, Homo sapiens
agtctgacagtcatt

SEQ ID NO: 786951 - DNA, 15 bp, Homo sapiens
gtctgacagtcattc

SEQ ID NO: 786952 - DNA, 15 bp, Homo sapiens
tctgacagtcattct

SEQ ID NO: 786953 - DNA, 15 bp, Homo sapiens
ctgacagtcattctc

SEQ ID NO: 786954 - DNA, 15 bp, Homo sapiens
tgacagtcattctcc

SEQ ID NO: 786955 - DNA, 15 bp, Homo sapiens
gacagtcattctcct

SEQ ID NO: 786956 - DNA, 15 bp, Homo sapiens
acagtcattctcctt

SEQ ID NO: 786957 - DNA, 15 bp, Homo sapiens
cagtcattctccttg

SEQ ID NO: 786958 - DNA, 15 bp, Homo sapiens
agtcattctccttga

SEQ ID NO: 786959 - DNA, 15 bp, Homo sapiens
gtcattctccttgat

SEQ ID NO: 786960 - DNA, 15 bp, Homo sapiens
tcattctccttgata

SEQ ID NO: 786961 - DNA, 15 bp, Homo sapiens
cattctccttgatag

SEQ ID NO: 786962 - DNA, 15 bp, Homo sapiens
attctccttgataga

SEQ ID NO: 786963 - DNA, 15 bp, Homo sapiens
ttctccttgatagag

SEQ ID NO: 786964 - DNA, 15 bp, Homo sapiens
tctccttgatagaga

SEQ ID NO: 786965 - DNA, 15 bp, Homo sapiens
ctccttgatagagaa

SEQ ID NO: 786966 - DNA, 15 bp, Homo sapiens
tccttgatagagaag

SEQ ID NO: 786967 - DNA, 15 bp, Homo sapiens
ccttgatagagaagc

SEQ ID NO: 786968 - DNA, 15 bp, Homo sapiens
cttgatagagaagcc

SEQ ID NO: 786969 - DNA, 15 bp, Homo sapiens
ttgatagagaagcca

SEQ ID NO: 786970 - DNA, 15 bp, Homo sapiens
tgatagagaagccag

SEQ ID NO: 786971 - DNA, 15 bp, Homo sapiens
gatagagaagccagg

SEQ ID NO: 786972 - DNA, 15 bp, Homo sapiens
atagagaagccagga

SEQ ID NO: 786973 - DNA, 15 bp, Homo sapiens
tagagaagccaggaa

SEQ ID NO: 786974 - DNA, 15 bp, Homo sapiens
agagaagccaggaac

SEQ ID NO: 786975 - DNA, 15 bp, Homo sapiens
gagaagccaggaaca

SEQ ID NO: 786976 - DNA, 15 bp, Homo sapiens
agaagccaggaacaa

SEQ ID NO: 786977 - DNA, 15 bp, Homo sapiens
gaagccaggaacaaa

SEQ ID NO: 786978 - DNA, 15 bp, Homo sapiens
aagccaggaacaaaa

SEQ ID NO: 786979 - DNA, 15 bp, Homo sapiens
agccaggaacaaaat

SEQ ID NO: 786980 - DNA, 15 bp, Homo sapiens
gccaggaacaaaata

SEQ ID NO: 786981 - DNA, 15 bp, Homo sapiens
ccaggaacaaaatag

SEQ ID NO: 786982 - DNA, 15 bp, Homo sapiens
caggaacaaaatagg

SEQ ID NO: 786983 - DNA, 15 bp, Homo sapiens
aggaacaaaatagga

SEQ ID NO: 786984 - DNA, 15 bp, Homo sapiens
ggaacaaaataggag

SEQ ID NO: 786985 - DNA, 15 bp, Homo sapiens
gaacaaaataggagg

SEQ ID NO: 786986 - DNA, 15 bp, Homo sapiens
aacaaaataggaggg

SEQ ID NO: 786987 - DNA, 15 bp, Homo sapiens
acaaaataggaggga

SEQ ID NO: 786988 - DNA, 15 bp, Homo sapiens
caaaataggagggag

SEQ ID NO: 786989 - DNA, 15 bp, Homo sapiens
aaaataggagggaga

SEQ ID NO: 786990 - DNA, 15 bp, Homo sapiens
aaataggagggagag

SEQ ID NO: 786991 - DNA, 15 bp, Homo sapiens
aataggagggagaga

SEQ ID NO: 786992 - DNA, 15 bp, Homo sapiens
ataggagggagagag

SEQ ID NO: 786993 - DNA, 15 bp, Homo sapiens
taggagggagagagt

SEQ ID NO: 786994 - DNA, 15 bp, Homo sapiens
aggagggagagagtt

SEQ ID NO: 786995 - DNA, 15 bp, Homo sapiens
ggagggagagagttt

SEQ ID NO: 786996 - DNA, 15 bp, Homo sapiens
gagggagagagtttt

SEQ ID NO: 786997 - DNA, 15 bp, Homo sapiens
agggagagagttttg

SEQ ID NO: 786998 - DNA, 15 bp, Homo sapiens
gggagagagttttgc

SEQ ID NO: 786999 - DNA, 15 bp, Homo sapiens
ggagagagttttgct

SEQ ID NO: 787000 - DNA, 15 bp, Homo sapiens
gagagagttttgctt

SEQ ID NO: 787001 - DNA, 15 bp, Homo sapiens
agagagttttgcttt

SEQ ID NO: 787002 - DNA, 15 bp, Homo sapiens
gagagttttgctttt

SEQ ID NO: 787003 - DNA, 15 bp, Homo sapiens
agagttttgcttttt

SEQ ID NO: 787004 - DNA, 15 bp, Homo sapiens
gagttttgctttttc

SEQ ID NO: 787005 - DNA, 15 bp, Homo sapiens
agttttgctttttct

SEQ ID NO: 787006 - DNA, 15 bp, Homo sapiens
gttttgctttttctt

SEQ ID NO: 787007 - DNA, 15 bp, Homo sapiens
ttttgctttttcttt

SEQ ID NO: 787008 - DNA, 15 bp, Homo sapiens
tttgctttttcttta

SEQ ID NO: 787009 - DNA, 15 bp, Homo sapiens
ttgctttttctttat

SEQ ID NO: 787010 - DNA, 15 bp, Homo sapiens
tgctttttctttatt

SEQ ID NO: 787011 - DNA, 15 bp, Homo sapiens
gctttttctttatta

SEQ ID NO: 787012 - DNA, 15 bp, Homo sapiens
ctttttctttattat

SEQ ID NO: 787013 - DNA, 15 bp, Homo sapiens
tttttctttattatc

SEQ ID NO: 787014 - DNA, 15 bp, Homo sapiens
ttttctttattatct

SEQ ID NO: 787015 - DNA, 15 bp, Homo sapiens
tttctttattatcta

SEQ ID NO: 787016 - DNA, 15 bp, Homo sapiens
ttctttattatctac

SEQ ID NO: 787017 - DNA, 15 bp, Homo sapiens
tctttattatctact

SEQ ID NO: 787018 - DNA, 15 bp, Homo sapiens
ctttattatctactg

SEQ ID NO: 787019 - DNA, 15 bp, Homo sapiens
tttattatctactgc

SEQ ID NO: 787020 - DNA, 15 bp, Homo sapiens
ttattatctactgct

SEQ ID NO: 787021 - DNA, 15 bp, Homo sapiens
tattatctactgctt

SEQ ID NO: 787022 - DNA, 15 bp, Homo sapiens
attatctactgcttt

SEQ ID NO: 787023 - DNA, 15 bp, Homo sapiens
ttatctactgctttt

SEQ ID NO: 787024 - DNA, 15 bp, Homo sapiens
tatctactgctttta

SEQ ID NO: 787025 - DNA, 15 bp, Homo sapiens
atctactgcttttaa

SEQ ID NO: 787026 - DNA, 15 bp, Homo sapiens
tctactgcttttaac

SEQ ID NO: 787027 - DNA, 15 bp, Homo sapiens
ctactgcttttaaca

SEQ ID NO: 787028 - DNA, 15 bp, Homo sapiens
tactgcttttaacaa

SEQ ID NO: 787029 - DNA, 15 bp, Homo sapiens
actgcttttaacaat

SEQ ID NO: 787030 - DNA, 15 bp, Homo sapiens
ctgcttttaacaata

SEQ ID NO: 787031 - DNA, 15 bp, Homo sapiens
tgcttttaacaataa

SEQ ID NO: 787032 - DNA, 15 bp, Homo sapiens
gcttttaacaataaa

SEQ ID NO: 787033 - DNA, 15 bp, Homo sapiens
cttttaacaataaac

SEQ ID NO: 787034 - DNA, 15 bp, Homo sapiens
ttttaacaataaacc

SEQ ID NO: 787035 - DNA, 15 bp, Homo sapiens
tttaacaataaacct

SEQ ID NO: 787036 - DNA, 15 bp, Homo sapiens
ttaacaataaacctt

SEQ ID NO: 787037 - DNA, 15 bp, Homo sapiens
taacaataaaccttc

SEQ ID NO: 787038 - DNA, 15 bp, Homo sapiens
aacaataaaccttcc

SEQ ID NO: 787039 - DNA, 15 bp, Homo sapiens
acaataaaccttcct

SEQ ID NO: 787040 - DNA, 15 bp, Homo sapiens
caataaaccttcctt

SEQ ID NO: 787041 - DNA, 15 bp, Homo sapiens
aataaaccttccttg

SEQ ID NO: 787042 - DNA, 15 bp, Homo sapiens
ataaaccttccttgt

SEQ ID NO: 787043 - DNA, 15 bp, Homo sapiens
taaaccttccttgtt

SEQ ID NO: 787044 - DNA, 15 bp, Homo sapiens
aaaccttccttgttt

SEQ ID NO: 787045 - DNA, 15 bp, Homo sapiens
aaccttccttgtttt

SEQ ID NO: 787046 - DNA, 15 bp, Homo sapiens
accttccttgttttg

SEQ ID NO: 787047 - DNA, 15 bp, Homo sapiens
ccttccttgttttga

SEQ ID NO: 787048 - DNA, 15 bp, Homo sapiens
cttccttgttttgat

SEQ ID NO: 787049 - DNA, 15 bp, Homo sapiens
ttccttgttttgatg

SEQ ID NO: 787050 - DNA, 15 bp, Homo sapiens
tccttgttttgatgt

SEQ ID NO: 787051 - DNA, 15 bp, Homo sapiens
ccttgttttgatgtt

SEQ ID NO: 787052 - DNA, 15 bp, Homo sapiens
cttgttttgatgtta

SEQ ID NO: 787053 - DNA, 15 bp, Homo sapiens
ttgttttgatgttat

SEQ ID NO: 787054 - DNA, 15 bp, Homo sapiens
tgttttgatgttatt

SEQ ID NO: 787055 - DNA, 15 bp, Homo sapiens
gttttgatgttatta

SEQ ID NO: 787056 - DNA, 15 bp, Homo sapiens
ttttgatgttattat

SEQ ID NO: 787057 - DNA, 15 bp, Homo sapiens
tttgatgttattatg

SEQ ID NO: 787058 - DNA, 15 bp, Homo sapiens
ttgatgttattatgt

SEQ ID NO: 787059 - DNA, 15 bp, Homo sapiens
tgatgttattatgtt

SEQ ID NO: 787060 - DNA, 15 bp, Homo sapiens
gatgttattatgttg

SEQ ID NO: 787061 - DNA, 15 bp, Homo sapiens
atgttattatgttgt

SEQ ID NO: 787062 - DNA, 15 bp, Homo sapiens
tgttattatgttgtt

SEQ ID NO: 787063 - DNA, 15 bp, Homo sapiens
gttattatgttgttt

SEQ ID NO: 787064 - DNA, 15 bp, Homo sapiens
ttattatgttgtttg

SEQ ID NO: 787065 - DNA, 15 bp, Homo sapiens
tattatgttgtttgt

SEQ ID NO: 787066 - DNA, 15 bp, Homo sapiens
attatgttgtttgtc

SEQ ID NO: 787067 - DNA, 15 bp, Homo sapiens
ttatgttgtttgtct

SEQ ID NO: 787068 - DNA, 15 bp, Homo sapiens
tatgttgtttgtctt

SEQ ID NO: 787069 - DNA, 15 bp, Homo sapiens
atgttgtttgtcttt

SEQ ID NO: 787070 - DNA, 15 bp, Homo sapiens
tgttgtttgtctttt

SEQ ID NO: 787071 - DNA, 15 bp, Homo sapiens
gttgtttgtcttttt

SEQ ID NO: 787072 - DNA, 15 bp, Homo sapiens
ttgtttgtctttttt

SEQ ID NO: 787073 - DNA, 15 bp, Homo sapiens
tgtttgtcttttttt

SEQ ID NO: 787074 - DNA, 15 bp, Homo sapiens
gtttgtctttttttt

SEQ ID NO: 787075 - DNA, 15 bp, Homo sapiens
tttgtcttttttttt

SEQ ID NO: 787076 - DNA, 15 bp, Homo sapiens
ttgtctttttttttt

SEQ ID NO: 787077 - DNA, 15 bp, Homo sapiens
tgtctttttttttta

SEQ ID NO: 787078 - DNA, 15 bp, Homo sapiens
gtcttttttttttac

SEQ ID NO: 787079 - DNA, 15 bp, Homo sapiens
tcttttttttttact

SEQ ID NO: 787080 - DNA, 15 bp, Homo sapiens
cttttttttttactt

SEQ ID NO: 787081 - DNA, 15 bp, Homo sapiens
ttttttttttactta

SEQ ID NO: 787082 - DNA, 15 bp, Homo sapiens
tttttttttacttat

SEQ ID NO: 787083 - DNA, 15 bp, Homo sapiens
ttttttttacttatt

SEQ ID NO: 787084 - DNA, 15 bp, Homo sapiens
tttttttacttattt

SEQ ID NO: 787085 - DNA, 15 bp, Homo sapiens
ttttttacttatttg

SEQ ID NO: 787086 - DNA, 15 bp, Homo sapiens
tttttacttatttgc

SEQ ID NO: 787087 - DNA, 15 bp, Homo sapiens
ttttacttatttgcc

SEQ ID NO: 787088 - DNA, 15 bp, Homo sapiens
tttacttatttgcct

SEQ ID NO: 787089 - DNA, 15 bp, Homo sapiens
ttacttatttgcctt

SEQ ID NO: 787090 - DNA, 15 bp, Homo sapiens
tacttatttgccttt

SEQ ID NO: 787091 - DNA, 15 bp, Homo sapiens
acttatttgcctttg

SEQ ID NO: 787092 - DNA, 15 bp, Homo sapiens
cttatttgcctttgt

SEQ ID NO: 787093 - DNA, 15 bp, Homo sapiens
ttatttgcctttgtg

SEQ ID NO: 787094 - DNA, 15 bp, Homo sapiens
tatttgcctttgtga

SEQ ID NO: 787095 - DNA, 15 bp, Homo sapiens
atttgcctttgtgac

SEQ ID NO: 787096 - DNA, 15 bp, Homo sapiens
tttgcctttgtgaca

SEQ ID NO: 787097 - DNA, 15 bp, Homo sapiens
ttgcctttgtgacat

SEQ ID NO: 787098 - DNA, 15 bp, Homo sapiens
tgcctttgtgacatg

SEQ ID NO: 787099 - DNA, 15 bp, Homo sapiens
gcctttgtgacatgg

SEQ ID NO: 787100 - DNA, 15 bp, Homo sapiens
cctttgtgacatggg

SEQ ID NO: 787101 - DNA, 15 bp, Homo sapiens
ctttgtgacatgggg

SEQ ID NO: 787102 - DNA, 15 bp, Homo sapiens
tttgtgacatgggga

SEQ ID NO: 787103 - DNA, 15 bp, Homo sapiens
ttgtgacatggggac

SEQ ID NO: 787104 - DNA, 15 bp, Homo sapiens
tgtgacatggggacg

SEQ ID NO: 787105 - DNA, 15 bp, Homo sapiens
gtgacatggggacgg

SEQ ID NO: 787106 - DNA, 15 bp, Homo sapiens
tgacatggggacggt

SEQ ID NO: 787107 - DNA, 15 bp, Homo sapiens
gacatggggacggtg

SEQ ID NO: 787108 - DNA, 15 bp, Homo sapiens
acatggggacggtga

SEQ ID NO: 787109 - DNA, 15 bp, Homo sapiens
catggggacggtgat

SEQ ID NO: 787110 - DNA, 15 bp, Homo sapiens
atggggacggtgata

SEQ ID NO: 787111 - DNA, 15 bp, Homo sapiens
tggggacggtgatag

SEQ ID NO: 787112 - DNA, 15 bp, Homo sapiens
ggggacggtgatagg

SEQ ID NO: 787113 - DNA, 15 bp, Homo sapiens
gggacggtgataggg

SEQ ID NO: 787114 - DNA, 15 bp, Homo sapiens
ggacggtgatagggc

SEQ ID NO: 787115 - DNA, 15 bp, Homo sapiens
gacggtgatagggcc

SEQ ID NO: 787116 - DNA, 15 bp, Homo sapiens
acggtgatagggcct

SEQ ID NO: 787117 - DNA, 15 bp, Homo sapiens
cggtgatagggcctt

SEQ ID NO: 787118 - DNA, 15 bp, Homo sapiens
ggtgatagggcctta

SEQ ID NO: 787119 - DNA, 15 bp, Homo sapiens
gtgatagggccttaa

SEQ ID NO: 787120 - DNA, 15 bp, Homo sapiens
tgatagggccttaaa

SEQ ID NO: 787121 - DNA, 15 bp, Homo sapiens
gatagggccttaaat

SEQ ID NO: 787122 - DNA, 15 bp, Homo sapiens
atagggccttaaata

SEQ ID NO: 787123 - DNA, 15 bp, Homo sapiens
tagggccttaaatat

SEQ ID NO: 787124 - DNA, 15 bp, Homo sapiens
agggccttaaatata

SEQ ID NO: 787125 - DNA, 15 bp, Homo sapiens
gggccttaaatataa

SEQ ID NO: 787126 - DNA, 15 bp, Homo sapiens
ggccttaaatataat

SEQ ID NO: 787127 - DNA, 15 bp, Homo sapiens
gccttaaatataatt

SEQ ID NO: 787128 - DNA, 15 bp, Homo sapiens
ttaaatataatttta

SEQ ID NO: 787129 - DNA, 15 bp, Homo sapiens
taaatataattttaa

SEQ ID NO: 787130 - DNA, 15 bp, Homo sapiens
aaatataattttaaa

SEQ ID NO: 787131 - DNA, 15 bp, Homo sapiens
aatataattttaaaa

SEQ ID NO: 787132 - DNA, 15 bp, Homo sapiens
atataattttaaaat

SEQ ID NO: 787133 - DNA, 15 bp, Homo sapiens
tataattttaaaata

SEQ ID NO: 787134 - DNA, 15 bp, Homo sapiens
ataattttaaaatag

SEQ ID NO: 787135 - DNA, 15 bp, Homo sapiens
taattttaaaatagg

SEQ ID NO: 787136 - DNA, 15 bp, Homo sapiens
aattttaaaataggg

SEQ ID NO: 787137 - DNA, 15 bp, Homo sapiens
attttaaaataggga

SEQ ID NO: 787138 - DNA, 15 bp, Homo sapiens
ttttaaaatagggaa

SEQ ID NO: 787139 - DNA, 15 bp, Homo sapiens
tttaaaatagggaat

SEQ ID NO: 787140 - DNA, 15 bp, Homo sapiens
ttaaaatagggaata

SEQ ID NO: 787141 - DNA, 15 bp, Homo sapiens
taaaatagggaataa

SEQ ID NO: 787142 - DNA, 15 bp, Homo sapiens
aaaatagggaataaa

SEQ ID NO: 787143 - DNA, 15 bp, Homo sapiens
aaatagggaataaat

SEQ ID NO: 787144 - DNA, 15 bp, Homo sapiens
aatagggaataaatg

SEQ ID NO: 787145 - DNA, 15 bp, Homo sapiens
atagggaataaatgg

SEQ ID NO: 787146 - DNA, 15 bp, Homo sapiens
tagggaataaatggt

SEQ ID NO: 787147 - DNA, 15 bp, Homo sapiens
agggaataaatggtt

SEQ ID NO: 787148 - DNA, 15 bp, Homo sapiens
gggaataaatggttg

SEQ ID NO: 787149 - DNA, 15 bp, Homo sapiens
ggaataaatggttgt

SEQ ID NO: 787150 - DNA, 15 bp, Homo sapiens
gaataaatggttgtc

SEQ ID NO: 787151 - DNA, 15 bp, Homo sapiens
aataaatggttgtct

SEQ ID NO: 787152 - DNA, 15 bp, Homo sapiens
ataaatggttgtctt

SEQ ID NO: 787153 - DNA, 15 bp, Homo sapiens
taaatggttgtcttt

SEQ ID NO: 787154 - DNA, 15 bp, Homo sapiens
aaatggttgtcttta

SEQ ID NO: 787155 - DNA, 15 bp, Homo sapiens
aatggttgtctttag

SEQ ID NO: 787156 - DNA, 15 bp, Homo sapiens
atggttgtctttagt

SEQ ID NO: 787157 - DNA, 15 bp, Homo sapiens
tggttgtctttagta

SEQ ID NO: 787158 - DNA, 15 bp, Homo sapiens
ggttgtctttagtat

SEQ ID NO: 787159 - DNA, 15 bp, Homo sapiens
gttgtctttagtatt

SEQ ID NO: 787160 - DNA, 15 bp, Homo sapiens
ttgtctttagtattt

SEQ ID NO: 787161 - DNA, 15 bp, Homo sapiens
tgtctttagtatttt

SEQ ID NO: 787162 - DNA, 15 bp, Homo sapiens
gtctttagtatttta

SEQ ID NO: 787163 - DNA, 15 bp, Homo sapiens
tctttagtattttat

SEQ ID NO: 787164 - DNA, 15 bp, Homo sapiens
ctttagtattttatt

SEQ ID NO: 787165 - DNA, 15 bp, Homo sapiens
tttagtattttattt

SEQ ID NO: 787166 - DNA, 15 bp, Homo sapiens
ttagtattttatttt

SEQ ID NO: 787167 - DNA, 15 bp, Homo sapiens
tagtattttattttg

SEQ ID NO: 787168 - DNA, 15 bp, Homo sapiens
agtattttattttgt

SEQ ID NO: 787169 - DNA, 15 bp, Homo sapiens
gtattttattttgtt

SEQ ID NO: 787170 - DNA, 15 bp, Homo sapiens
tattttattttgttt

SEQ ID NO: 787171 - DNA, 15 bp, Homo sapiens
attttattttgtttt

SEQ ID NO: 787172 - DNA, 15 bp, Homo sapiens
ttttattttgtttta

SEQ ID NO: 787173 - DNA, 15 bp, Homo sapiens
tttattttgttttat

SEQ ID NO: 787174 - DNA, 15 bp, Homo sapiens
ttattttgttttatt

SEQ ID NO: 787175 - DNA, 15 bp, Homo sapiens
tattttgttttatta

SEQ ID NO: 787176 - DNA, 15 bp, Homo sapiens
attttgttttattat

SEQ ID NO: 787177 - DNA, 15 bp, Homo sapiens
ttttgttttattatt

SEQ ID NO: 787178 - DNA, 15 bp, Homo sapiens
tttgttttattatta

SEQ ID NO: 787179 - DNA, 15 bp, Homo sapiens
ttgttttattattat

SEQ ID NO: 787180 - DNA, 15 bp, Homo sapiens
tgttttattattatt

SEQ ID NO: 787181 - DNA, 15 bp, Homo sapiens
gttttattattatta

SEQ ID NO: 787182 - DNA, 15 bp, Homo sapiens
ttttattattattat

SEQ ID NO: 787183 - DNA, 15 bp, Homo sapiens
tttattattattatt

SEQ ID NO: 787184 - DNA, 15 bp, Homo sapiens
ttattattattattg

SEQ ID NO: 787185 - DNA, 15 bp, Homo sapiens
tattattattattgt

SEQ ID NO: 787186 - DNA, 15 bp, Homo sapiens
attattattattgtt

SEQ ID NO: 787187 - DNA, 15 bp, Homo sapiens
ttattattattgtta

SEQ ID NO: 787188 - DNA, 15 bp, Homo sapiens
tattattattgttat

SEQ ID NO: 787189 - DNA, 15 bp, Homo sapiens
attattattgttatt

SEQ ID NO: 787190 - DNA, 15 bp, Homo sapiens
ttattattgttattt

SEQ ID NO: 787191 - DNA, 15 bp, Homo sapiens
tattattgttatttt

SEQ ID NO: 787192 - DNA, 15 bp, Homo sapiens
attattgttattttt

SEQ ID NO: 787193 - DNA, 15 bp, Homo sapiens
ttattgttatttttg

SEQ ID NO: 787194 - DNA, 15 bp, Homo sapiens
tattgttatttttgc

SEQ ID NO: 787195 - DNA, 15 bp, Homo sapiens
attgttatttttgca

SEQ ID NO: 787196 - DNA, 15 bp, Homo sapiens
ttgttatttttgcaa

SEQ ID NO: 787197 - DNA, 15 bp, Homo sapiens
tgttatttttgcaag

SEQ ID NO: 787198 - DNA, 15 bp, Homo sapiens
gttatttttgcaagc

SEQ ID NO: 787199 - DNA, 15 bp, Homo sapiens
ttatttttgcaagct

SEQ ID NO: 787200 - DNA, 15 bp, Homo sapiens
tatttttgcaagctt

SEQ ID NO: 787201 - DNA, 15 bp, Homo sapiens
atttttgcaagcttc

SEQ ID NO: 787202 - DNA, 15 bp, Homo sapiens
tttttgcaagcttca

SEQ ID NO: 787203 - DNA, 15 bp, Homo sapiens
ttttgcaagcttcag

SEQ ID NO: 787204 - DNA, 15 bp, Homo sapiens
tttgcaagcttcagc

SEQ ID NO: 787205 - DNA, 15 bp, Homo sapiens
ttgcaagcttcagct

SEQ ID NO: 787206 - DNA, 15 bp, Homo sapiens
tgcaagcttcagcta

SEQ ID NO: 787207 - DNA, 15 bp, Homo sapiens
gcaagcttcagctaa

SEQ ID NO: 787208 - DNA, 15 bp, Homo sapiens
caagcttcagctaat

SEQ ID NO: 787209 - DNA, 15 bp, Homo sapiens
aagcttcagctaatt

SEQ ID NO: 787210 - DNA, 15 bp, Homo sapiens
agcttcagctaattt

SEQ ID NO: 787211 - DNA, 15 bp, Homo sapiens
gcttcagctaatttg

SEQ ID NO: 787212 - DNA, 15 bp, Homo sapiens
cttcagctaatttgg

SEQ ID NO: 787213 - DNA, 15 bp, Homo sapiens
ttcagctaatttgga

SEQ ID NO: 787214 - DNA, 15 bp, Homo sapiens
tcagctaatttggaa

SEQ ID NO: 787215 - DNA, 15 bp, Homo sapiens
cagctaatttggaat

SEQ ID NO: 787216 - DNA, 15 bp, Homo sapiens
agctaatttggaatt

SEQ ID NO: 787217 - DNA, 15 bp, Homo sapiens
gctaatttggaattg

SEQ ID NO: 787218 - DNA, 15 bp, Homo sapiens
ctaatttggaattgt

SEQ ID NO: 787219 - DNA, 15 bp, Homo sapiens
taatttggaattgta

SEQ ID NO: 787220 - DNA, 15 bp, Homo sapiens
aatttggaattgtag

SEQ ID NO: 787221 - DNA, 15 bp, Homo sapiens
atttggaattgtagc

SEQ ID NO: 787222 - DNA, 15 bp, Homo sapiens
tttggaattgtagct

SEQ ID NO: 787223 - DNA, 15 bp, Homo sapiens
ttggaattgtagctc

SEQ ID NO: 787224 - DNA, 15 bp, Homo sapiens
tggaattgtagctct

SEQ ID NO: 787225 - DNA, 15 bp, Homo sapiens
ggaattgtagctctc

SEQ ID NO: 787226 - DNA, 15 bp, Homo sapiens
gaattgtagctctcc

SEQ ID NO: 787227 - DNA, 15 bp, Homo sapiens
aattgtagctctcct

SEQ ID NO: 787228 - DNA, 15 bp, Homo sapiens
attgtagctctcctg

SEQ ID NO: 787229 - DNA, 15 bp, Homo sapiens
ttgtagctctcctga

SEQ ID NO: 787230 - DNA, 15 bp, Homo sapiens
tgtagctctcctgac

SEQ ID NO: 787231 - DNA, 15 bp, Homo sapiens
gtagctctcctgaca

SEQ ID NO: 787232 - DNA, 15 bp, Homo sapiens
tagctctcctgacat

SEQ ID NO: 787233 - DNA, 15 bp, Homo sapiens
agctctcctgacatt

SEQ ID NO: 787234 - DNA, 15 bp, Homo sapiens
gctctcctgacatta

SEQ ID NO: 787235 - DNA, 15 bp, Homo sapiens
ctctcctgacattat

SEQ ID NO: 787236 - DNA, 15 bp, Homo sapiens
tctcctgacattatt

SEQ ID NO: 787237 - DNA, 15 bp, Homo sapiens
ctcctgacattattc

SEQ ID NO: 787238 - DNA, 15 bp, Homo sapiens
tcctgacattattct

SEQ ID NO: 787239 - DNA, 15 bp, Homo sapiens
cctgacattattctt

SEQ ID NO: 787240 - DNA, 15 bp, Homo sapiens
ctgacattattctta

SEQ ID NO: 787241 - DNA, 15 bp, Homo sapiens
tgacattattcttat

SEQ ID NO: 787242 - DNA, 15 bp, Homo sapiens
gacattattcttata

SEQ ID NO: 787243 - DNA, 15 bp, Homo sapiens
acattattcttataa

SEQ ID NO: 787244 - DNA, 15 bp, Homo sapiens
cattattcttataag

SEQ ID NO: 787245 - DNA, 15 bp, Homo sapiens
attattcttataagc

SEQ ID NO: 787246 - DNA, 15 bp, Homo sapiens
ttattcttataagct

SEQ ID NO: 787247 - DNA, 15 bp, Homo sapiens
tattcttataagctc

SEQ ID NO: 787248 - DNA, 15 bp, Homo sapiens
attcttataagctca

SEQ ID NO: 787249 - DNA, 15 bp, Homo sapiens
ttcttataagctcat

SEQ ID NO: 787250 - DNA, 15 bp, Homo sapiens
tcttataagctcatt

SEQ ID NO: 787251 - DNA, 15 bp, Homo sapiens
cttataagctcattc

SEQ ID NO: 787252 - DNA, 15 bp, Homo sapiens
ttataagctcattcc

SEQ ID NO: 787253 - DNA, 15 bp, Homo sapiens
tataagctcattcca

SEQ ID NO: 787254 - DNA, 15 bp, Homo sapiens
ataagctcattccac

SEQ ID NO: 787255 - DNA, 15 bp, Homo sapiens
taagctcattccact

SEQ ID NO: 787256 - DNA, 15 bp, Homo sapiens
aagctcattccactc

SEQ ID NO: 787257 - DNA, 15 bp, Homo sapiens
agctcattccactct

SEQ ID NO: 787258 - DNA, 15 bp, Homo sapiens
gctcattccactctc

SEQ ID NO: 787259 - DNA, 15 bp, Homo sapiens
ctcattccactctct

SEQ ID NO: 787260 - DNA, 15 bp, Homo sapiens
tcattccactctctt

SEQ ID NO: 787261 - DNA, 15 bp, Homo sapiens
cattccactctctta

SEQ ID NO: 787262 - DNA, 15 bp, Homo sapiens
attccactctcttat

SEQ ID NO: 787263 - DNA, 15 bp, Homo sapiens
ttccactctcttata

SEQ ID NO: 787264 - DNA, 15 bp, Homo sapiens
tccactctcttatag

SEQ ID NO: 787265 - DNA, 15 bp, Homo sapiens
ccactctcttataga

SEQ ID NO: 787266 - DNA, 15 bp, Homo sapiens
cactctcttatagac

SEQ ID NO: 787267 - DNA, 15 bp, Homo sapiens
actctcttatagacc

SEQ ID NO: 787268 - DNA, 15 bp, Homo sapiens
ctctcttatagacca

SEQ ID NO: 787269 - DNA, 15 bp, Homo sapiens
tctcttatagaccat

SEQ ID NO: 787270 - DNA, 15 bp, Homo sapiens
ctcttatagaccatc

SEQ ID NO: 787271 - DNA, 15 bp, Homo sapiens
tcttatagaccatca

SEQ ID NO: 787272 - DNA, 15 bp, Homo sapiens
cttatagaccatcat

SEQ ID NO: 787273 - DNA, 15 bp, Homo sapiens
ttatagaccatcatt

SEQ ID NO: 787274 - DNA, 15 bp, Homo sapiens
tatagaccatcatta

SEQ ID NO: 787275 - DNA, 15 bp, Homo sapiens
atagaccatcattac

SEQ ID NO: 787276 - DNA, 15 bp, Homo sapiens
tagaccatcattaca

SEQ ID NO: 787277 - DNA, 15 bp, Homo sapiens
agaccatcattacat

SEQ ID NO: 787278 - DNA, 15 bp, Homo sapiens
gaccatcattacatg

SEQ ID NO: 787279 - DNA, 15 bp, Homo sapiens
accatcattacatgc

SEQ ID NO: 787280 - DNA, 15 bp, Homo sapiens
ccatcattacatgcc

SEQ ID NO: 787281 - DNA, 15 bp, Homo sapiens
catcattacatgccc

SEQ ID NO: 787282 - DNA, 15 bp, Homo sapiens
atcattacatgccct

SEQ ID NO: 787283 - DNA, 15 bp, Homo sapiens
tcattacatgccctc

SEQ ID NO: 787284 - DNA, 15 bp, Homo sapiens
cattacatgccctct

SEQ ID NO: 787285 - DNA, 15 bp, Homo sapiens
attacatgccctctt

SEQ ID NO: 787286 - DNA, 15 bp, Homo sapiens
ttacatgccctcttt

SEQ ID NO: 787287 - DNA, 15 bp, Homo sapiens
tacatgccctctttc

SEQ ID NO: 787288 - DNA, 15 bp, Homo sapiens
acatgccctctttcc

SEQ ID NO: 787289 - DNA, 15 bp, Homo sapiens
catgccctctttcca

SEQ ID NO: 787290 - DNA, 15 bp, Homo sapiens
atgccctctttccat

SEQ ID NO: 787291 - DNA, 15 bp, Homo sapiens
tgccctctttccatc

SEQ ID NO: 787292 - DNA, 15 bp, Homo sapiens
gccctctttccatct

SEQ ID NO: 787293 - DNA, 15 bp, Homo sapiens
ccctctttccatctt

SEQ ID NO: 787294 - DNA, 15 bp, Homo sapiens
cctctttccatcttt

SEQ ID NO: 787295 - DNA, 15 bp, Homo sapiens
ctctttccatctttt

SEQ ID NO: 787296 - DNA, 15 bp, Homo sapiens
tctttccatctttta

SEQ ID NO: 787297 - DNA, 15 bp, Homo sapiens
ctttccatcttttaa

SEQ ID NO: 787298 - DNA, 15 bp, Homo sapiens
tttccatcttttaaa

SEQ ID NO: 787299 - DNA, 15 bp, Homo sapiens
ttccatcttttaaaa

SEQ ID NO: 787300 - DNA, 15 bp, Homo sapiens
tccatcttttaaaat

SEQ ID NO: 787301 - DNA, 15 bp, Homo sapiens
ccatcttttaaaata

SEQ ID NO: 787302 - DNA, 15 bp, Homo sapiens
catcttttaaaatat

SEQ ID NO: 787303 - DNA, 15 bp, Homo sapiens
atcttttaaaatatg

SEQ ID NO: 787304 - DNA, 15 bp, Homo sapiens
tcttttaaaatatgt

SEQ ID NO: 787305 - DNA, 15 bp, Homo sapiens
cttttaaaatatgtc

SEQ ID NO: 787306 - DNA, 15 bp, Homo sapiens
ttttaaaatatgtcc

SEQ ID NO: 787307 - DNA, 15 bp, Homo sapiens
tttaaaatatgtcct

SEQ ID NO: 787308 - DNA, 15 bp, Homo sapiens
ttaaaatatgtcctt

SEQ ID NO: 787309 - DNA, 15 bp, Homo sapiens
taaaatatgtccttt

SEQ ID NO: 787310 - DNA, 15 bp, Homo sapiens
aaaatatgtccttta

SEQ ID NO: 787311 - DNA, 15 bp, Homo sapiens
aaatatgtcctttaa

SEQ ID NO: 787312 - DNA, 15 bp, Homo sapiens
aatatgtcctttaaa

SEQ ID NO: 787313 - DNA, 15 bp, Homo sapiens
atatgtcctttaaaa

SEQ ID NO: 787314 - DNA, 15 bp, Homo sapiens
tatgtcctttaaaaa

SEQ ID NO: 787315 - DNA, 15 bp, Homo sapiens
atgtcctttaaaaat

SEQ ID NO: 787316 - DNA, 15 bp, Homo sapiens
tgtcctttaaaaatc

SEQ ID NO: 787317 - DNA, 15 bp, Homo sapiens
gtcctttaaaaatct

SEQ ID NO: 787318 - DNA, 15 bp, Homo sapiens
tcctttaaaaatctg

SEQ ID NO: 787319 - DNA, 15 bp, Homo sapiens
cctttaaaaatctga

SEQ ID NO: 787320 - DNA, 15 bp, Homo sapiens
ctttaaaaatctgac

SEQ ID NO: 787321 - DNA, 15 bp, Homo sapiens
tttaaaaatctgacc

SEQ ID NO: 787322 - DNA, 15 bp, Homo sapiens
ttaaaaatctgacct

SEQ ID NO: 787323 - DNA, 15 bp, Homo sapiens
taaaaatctgacctg

SEQ ID NO: 787324 - DNA, 15 bp, Homo sapiens
aaaaatctgacctgg

SEQ ID NO: 787325 - DNA, 15 bp, Homo sapiens
aaaatctgacctggg

SEQ ID NO: 787326 - DNA, 15 bp, Homo sapiens
aaatctgacctggga

SEQ ID NO: 787327 - DNA, 15 bp, Homo sapiens
aatctgacctgggag

SEQ ID NO: 787328 - DNA, 15 bp, Homo sapiens
atctgacctgggaga

SEQ ID NO: 787329 - DNA, 15 bp, Homo sapiens
tctgacctgggagaa

SEQ ID NO: 787330 - DNA, 15 bp, Homo sapiens
ctgacctgggagaaa

SEQ ID NO: 787331 - DNA, 15 bp, Homo sapiens
tgacctgggagaaat

SEQ ID NO: 787332 - DNA, 15 bp, Homo sapiens
gacctgggagaaatc

SEQ ID NO: 787333 - DNA, 15 bp, Homo sapiens
acctgggagaaatct

SEQ ID NO: 787334 - DNA, 15 bp, Homo sapiens
cctgggagaaatctc

SEQ ID NO: 787335 - DNA, 15 bp, Homo sapiens
ctgggagaaatctct

SEQ ID NO: 787336 - DNA, 15 bp, Homo sapiens
tgggagaaatctctg

SEQ ID NO: 787337 - DNA, 15 bp, Homo sapiens
gggagaaatctctgt

SEQ ID NO: 787338 - DNA, 15 bp, Homo sapiens
ggagaaatctctgtg

SEQ ID NO: 787339 - DNA, 15 bp, Homo sapiens
gagaaatctctgtga

SEQ ID NO: 787340 - DNA, 15 bp, Homo sapiens
agaaatctctgtgaa

SEQ ID NO: 787341 - DNA, 15 bp, Homo sapiens
gaaatctctgtgaag

SEQ ID NO: 787342 - DNA, 15 bp, Homo sapiens
aaatctctgtgaagc

SEQ ID NO: 787343 - DNA, 15 bp, Homo sapiens
aatctctgtgaagcc

SEQ ID NO: 787344 - DNA, 15 bp, Homo sapiens
atctctgtgaagccg

SEQ ID NO: 787345 - DNA, 15 bp, Homo sapiens
tctctgtgaagccgt

SEQ ID NO: 787346 - DNA, 15 bp, Homo sapiens
ctctgtgaagccgtg

SEQ ID NO: 787347 - DNA, 15 bp, Homo sapiens
tctgtgaagccgtgt

SEQ ID NO: 787348 - DNA, 15 bp, Homo sapiens
ctgtgaagccgtgtt

SEQ ID NO: 787349 - DNA, 15 bp, Homo sapiens
tgtgaagccgtgttg

SEQ ID NO: 787350 - DNA, 15 bp, Homo sapiens
gtgaagccgtgttgg

SEQ ID NO: 787351 - DNA, 15 bp, Homo sapiens
tgaagccgtgttggt

SEQ ID NO: 787352 - DNA, 15 bp, Homo sapiens
gaagccgtgttggtt

SEQ ID NO: 787353 - DNA, 15 bp, Homo sapiens
aagccgtgttggtta

SEQ ID NO: 787354 - DNA, 15 bp, Homo sapiens
agccgtgttggttac

SEQ ID NO: 787355 - DNA, 15 bp, Homo sapiens
gccgtgttggttact

SEQ ID NO: 787356 - DNA, 15 bp, Homo sapiens
ccgtgttggttactt

SEQ ID NO: 787357 - DNA, 15 bp, Homo sapiens
cgtgttggttactta

SEQ ID NO: 787358 - DNA, 15 bp, Homo sapiens
gtgttggttacttaa

SEQ ID NO: 787359 - DNA, 15 bp, Homo sapiens
tgttggttacttaag

SEQ ID NO: 787360 - DNA, 15 bp, Homo sapiens
gttggttacttaagt

SEQ ID NO: 787361 - DNA, 15 bp, Homo sapiens
ttggttacttaagtg

SEQ ID NO: 787362 - DNA, 15 bp, Homo sapiens
tggttacttaagtgc

SEQ ID NO: 787363 - DNA, 15 bp, Homo sapiens
ggttacttaagtgcc

SEQ ID NO: 787364 - DNA, 15 bp, Homo sapiens
gttacttaagtgcca

SEQ ID NO: 787365 - DNA, 15 bp, Homo sapiens
ttacttaagtgccac

SEQ ID NO: 787366 - DNA, 15 bp, Homo sapiens
tacttaagtgccacc

SEQ ID NO: 787367 - DNA, 15 bp, Homo sapiens
acttaagtgccaccc

SEQ ID NO: 787368 - DNA, 15 bp, Homo sapiens
cttaagtgccacccc

SEQ ID NO: 787369 - DNA, 15 bp, Homo sapiens
ttaagtgccacccct

SEQ ID NO: 787370 - DNA, 15 bp, Homo sapiens
taagtgccacccctc

SEQ ID NO: 787371 - DNA, 15 bp, Homo sapiens
aagtgccacccctct

SEQ ID NO: 787372 - DNA, 15 bp, Homo sapiens
agtgccacccctctt

SEQ ID NO: 787373 - DNA, 15 bp, Homo sapiens
gtgccacccctcttt

SEQ ID NO: 787374 - DNA, 15 bp, Homo sapiens
tgccacccctctttt

SEQ ID NO: 787375 - DNA, 15 bp, Homo sapiens
gccacccctcttttc

SEQ ID NO: 787376 - DNA, 15 bp, Homo sapiens
ccacccctcttttct

SEQ ID NO: 787377 - DNA, 15 bp, Homo sapiens
cacccctcttttctt

SEQ ID NO: 787378 - DNA, 15 bp, Homo sapiens
acccctcttttcttc

SEQ ID NO: 787379 - DNA, 15 bp, Homo sapiens
cccctcttttcttcc

SEQ ID NO: 787380 - DNA, 15 bp, Homo sapiens
ccctcttttcttcct

SEQ ID NO: 787381 - DNA, 15 bp, Homo sapiens
cctcttttcttcctg

SEQ ID NO: 787382 - DNA, 15 bp, Homo sapiens
ctcttttcttcctga

SEQ ID NO: 787383 - DNA, 15 bp, Homo sapiens
tcttttcttcctgag

SEQ ID NO: 787384 - DNA, 15 bp, Homo sapiens
cttttcttcctgaga

SEQ ID NO: 787385 - DNA, 15 bp, Homo sapiens
ttttcttcctgagag

SEQ ID NO: 787386 - DNA, 15 bp, Homo sapiens
tttcttcctgagagg

SEQ ID NO: 787387 - DNA, 15 bp, Homo sapiens
ttcttcctgagagga

SEQ ID NO: 787388 - DNA, 15 bp, Homo sapiens
tcttcctgagaggat

SEQ ID NO: 787389 - DNA, 15 bp, Homo sapiens
cttcctgagaggatc

SEQ ID NO: 787390 - DNA, 15 bp, Homo sapiens
ttcctgagaggatca

SEQ ID NO: 787391 - DNA, 15 bp, Homo sapiens
tcctgagaggatcat

SEQ ID NO: 787392 - DNA, 15 bp, Homo sapiens
cctgagaggatcatt

SEQ ID NO: 787393 - DNA, 15 bp, Homo sapiens
ctgagaggatcattt

SEQ ID NO: 787394 - DNA, 15 bp, Homo sapiens
tgagaggatcatttg

SEQ ID NO: 787395 - DNA, 15 bp, Homo sapiens
gagaggatcatttgt

SEQ ID NO: 787396 - DNA, 15 bp, Homo sapiens
agaggatcatttgtg

SEQ ID NO: 787397 - DNA, 15 bp, Homo sapiens
gaggatcatttgtga

SEQ ID NO: 787398 - DNA, 15 bp, Homo sapiens
aggatcatttgtgat

SEQ ID NO: 787399 - DNA, 15 bp, Homo sapiens
ggatcatttgtgatt

SEQ ID NO: 787400 - DNA, 15 bp, Homo sapiens
gatcatttgtgattg

SEQ ID NO: 787401 - DNA, 15 bp, Homo sapiens
atcatttgtgattgc

SEQ ID NO: 787402 - DNA, 15 bp, Homo sapiens
tcatttgtgattgca

SEQ ID NO: 787403 - DNA, 15 bp, Homo sapiens
catttgtgattgcag

SEQ ID NO: 787404 - DNA, 15 bp, Homo sapiens
atttgtgattgcagt

SEQ ID NO: 787405 - DNA, 15 bp, Homo sapiens
tttgtgattgcagtt

SEQ ID NO: 787406 - DNA, 15 bp, Homo sapiens
ttgtgattgcagtta

SEQ ID NO: 787407 - DNA, 15 bp, Homo sapiens
tgtgattgcagttac

SEQ ID NO: 787408 - DNA, 15 bp, Homo sapiens
gtgattgcagttaca

SEQ ID NO: 787409 - DNA, 15 bp, Homo sapiens
tgattgcagttacag

SEQ ID NO: 787410 - DNA, 15 bp, Homo sapiens
gattgcagttacagt

SEQ ID NO: 787411 - DNA, 15 bp, Homo sapiens
attgcagttacagtt

SEQ ID NO: 787412 - DNA, 15 bp, Homo sapiens
ttgcagttacagttg

SEQ ID NO: 787413 - DNA, 15 bp, Homo sapiens
tgcagttacagttga

SEQ ID NO: 787414 - DNA, 15 bp, Homo sapiens
gcagttacagttgaa

SEQ ID NO: 787415 - DNA, 15 bp, Homo sapiens
cagttacagttgaac

SEQ ID NO: 787416 - DNA, 15 bp, Homo sapiens
agttacagttgaaca

SEQ ID NO: 787417 - DNA, 15 bp, Homo sapiens
gttacagttgaacat

SEQ ID NO: 787418 - DNA, 15 bp, Homo sapiens
ttacagttgaacatt

SEQ ID NO: 787419 - DNA, 15 bp, Homo sapiens
tacagttgaacattt

SEQ ID NO: 787420 - DNA, 15 bp, Homo sapiens
acagttgaacatttg

SEQ ID NO: 787421 - DNA, 15 bp, Homo sapiens
cagttgaacatttgg

SEQ ID NO: 787422 - DNA, 15 bp, Homo sapiens
agttgaacatttgga

SEQ ID NO: 787423 - DNA, 15 bp, Homo sapiens
gttgaacatttggaa

SEQ ID NO: 787424 - DNA, 15 bp, Homo sapiens
ttgaacatttggaag

SEQ ID NO: 787425 - DNA, 15 bp, Homo sapiens
tgaacatttggaagc

SEQ ID NO: 787426 - DNA, 15 bp, Homo sapiens
gaacatttggaagct

SEQ ID NO: 787427 - DNA, 15 bp, Homo sapiens
aacatttggaagctg

SEQ ID NO: 787428 - DNA, 15 bp, Homo sapiens
acatttggaagctgc

SEQ ID NO: 787429 - DNA, 15 bp, Homo sapiens
catttggaagctgct

SEQ ID NO: 787430 - DNA, 15 bp, Homo sapiens
atttggaagctgctc

SEQ ID NO: 787431 - DNA, 15 bp, Homo sapiens
tttggaagctgctca

SEQ ID NO: 787432 - DNA, 15 bp, Homo sapiens
ttggaagctgctcaa

SEQ ID NO: 787433 - DNA, 15 bp, Homo sapiens
tggaagctgctcaac

SEQ ID NO: 787434 - DNA, 15 bp, Homo sapiens
ggaagctgctcaacc

SEQ ID NO: 787435 - DNA, 15 bp, Homo sapiens
gaagctgctcaaccc

SEQ ID NO: 787436 - DNA, 15 bp, Homo sapiens
aagctgctcaaccct

SEQ ID NO: 787437 - DNA, 15 bp, Homo sapiens
agctgctcaaccctc

SEQ ID NO: 787438 - DNA, 15 bp, Homo sapiens
gctgctcaaccctct

SEQ ID NO: 787439 - DNA, 15 bp, Homo sapiens
ctgctcaaccctctt

SEQ ID NO: 787440 - DNA, 15 bp, Homo sapiens
tgctcaaccctctta

SEQ ID NO: 787441 - DNA, 15 bp, Homo sapiens
gctcaaccctcttaa

SEQ ID NO: 787442 - DNA, 15 bp, Homo sapiens
ctcaaccctcttaaa

SEQ ID NO: 787443 - DNA, 15 bp, Homo sapiens
tcaaccctcttaaac

SEQ ID NO: 787444 - DNA, 15 bp, Homo sapiens
caaccctcttaaacc

SEQ ID NO: 787445 - DNA, 15 bp, Homo sapiens
aaccctcttaaacca

SEQ ID NO: 787446 - DNA, 15 bp, Homo sapiens
accctcttaaaccat

SEQ ID NO: 787447 - DNA, 15 bp, Homo sapiens
ccctcttaaaccatt

SEQ ID NO: 787448 - DNA, 15 bp, Homo sapiens
cctcttaaaccattt

SEQ ID NO: 787449 - DNA, 15 bp, Homo sapiens
ctcttaaaccatttt

SEQ ID NO: 787450 - DNA, 15 bp, Homo sapiens
tcttaaaccattttt

SEQ ID NO: 787451 - DNA, 15 bp, Homo sapiens
cttaaaccatttttc

SEQ ID NO: 787452 - DNA, 15 bp, Homo sapiens
ttaaaccatttttcc

SEQ ID NO: 787453 - DNA, 15 bp, Homo sapiens
taaaccatttttcct

SEQ ID NO: 787454 - DNA, 15 bp, Homo sapiens
aaaccatttttcctt

SEQ ID NO: 787455 - DNA, 15 bp, Homo sapiens
aaccatttttccttc

SEQ ID NO: 787456 - DNA, 15 bp, Homo sapiens
accatttttccttct

SEQ ID NO: 787457 - DNA, 15 bp, Homo sapiens
ccatttttccttctg

SEQ ID NO: 787458 - DNA, 15 bp, Homo sapiens
catttttccttctga

SEQ ID NO: 787459 - DNA, 15 bp, Homo sapiens
atttttccttctgaa

SEQ ID NO: 787460 - DNA, 15 bp, Homo sapiens
tttttccttctgaat

SEQ ID NO: 787461 - DNA, 15 bp, Homo sapiens
ttttccttctgaatc

SEQ ID NO: 787462 - DNA, 15 bp, Homo sapiens
tttccttctgaatct

SEQ ID NO: 787463 - DNA, 15 bp, Homo sapiens
ttccttctgaatctc

SEQ ID NO: 787464 - DNA, 15 bp, Homo sapiens
tccttctgaatctca

SEQ ID NO: 787465 - DNA, 15 bp, Homo sapiens
ccttctgaatctcat

SEQ ID NO: 787466 - DNA, 15 bp, Homo sapiens
cttctgaatctcatg

SEQ ID NO: 787467 - DNA, 15 bp, Homo sapiens
ttctgaatctcatgc

SEQ ID NO: 787468 - DNA, 15 bp, Homo sapiens
tctgaatctcatgcc

SEQ ID NO: 787469 - DNA, 15 bp, Homo sapiens
ctgaatctcatgcca

SEQ ID NO: 787470 - DNA, 15 bp, Homo sapiens
tgaatctcatgccat

SEQ ID NO: 787471 - DNA, 15 bp, Homo sapiens
gaatctcatgccatt

SEQ ID NO: 787472 - DNA, 15 bp, Homo sapiens
aatctcatgccattg

SEQ ID NO: 787473 - DNA, 15 bp, Homo sapiens
atctcatgccattga

SEQ ID NO: 787474 - DNA, 15 bp, Homo sapiens
tctcatgccattgaa

SEQ ID NO: 787475 - DNA, 15 bp, Homo sapiens
ctcatgccattgaat

SEQ ID NO: 787476 - DNA, 15 bp, Homo sapiens
tcatgccattgaatc

SEQ ID NO: 787477 - DNA, 15 bp, Homo sapiens
catgccattgaatca

SEQ ID NO: 787478 - DNA, 15 bp, Homo sapiens
atgccattgaatcat

SEQ ID NO: 787479 - DNA, 15 bp, Homo sapiens
tgccattgaatcatg

SEQ ID NO: 787480 - DNA, 15 bp, Homo sapiens
gccattgaatcatgc

SEQ ID NO: 787481 - DNA, 15 bp, Homo sapiens
ccattgaatcatgcc

SEQ ID NO: 787482 - DNA, 15 bp, Homo sapiens
cattgaatcatgcct

SEQ ID NO: 787483 - DNA, 15 bp, Homo sapiens
attgaatcatgcctc

SEQ ID NO: 787484 - DNA, 15 bp, Homo sapiens
ttgaatcatgcctct

SEQ ID NO: 787485 - DNA, 15 bp, Homo sapiens
tgaatcatgcctctt

SEQ ID NO: 787486 - DNA, 15 bp, Homo sapiens
gaatcatgcctcttt

SEQ ID NO: 787487 - DNA, 15 bp, Homo sapiens
aatcatgcctctttt

SEQ ID NO: 787488 - DNA, 15 bp, Homo sapiens
atcatgcctcttttc

SEQ ID NO: 787489 - DNA, 15 bp, Homo sapiens
tcatgcctcttttct

SEQ ID NO: 787490 - DNA, 15 bp, Homo sapiens
catgcctcttttctt

SEQ ID NO: 787491 - DNA, 15 bp, Homo sapiens
atgcctcttttcttt

SEQ ID NO: 787492 - DNA, 15 bp, Homo sapiens
tgcctcttttctttg

SEQ ID NO: 787493 - DNA, 15 bp, Homo sapiens
gcctcttttctttga

SEQ ID NO: 787494 - DNA, 15 bp, Homo sapiens
cctcttttctttgaa

SEQ ID NO: 787495 - DNA, 15 bp, Homo sapiens
ctcttttctttgaat

SEQ ID NO: 787496 - DNA, 15 bp, Homo sapiens
tcttttctttgaatt

SEQ ID NO: 787497 - DNA, 15 bp, Homo sapiens
cttttctttgaattt

SEQ ID NO: 787498 - DNA, 15 bp, Homo sapiens
ttttctttgaatttt

SEQ ID NO: 787499 - DNA, 15 bp, Homo sapiens
tttctttgaattttt

SEQ ID NO: 787500 - DNA, 15 bp, Homo sapiens
ttctttgaatttttt

SEQ ID NO: 787501 - DNA, 15 bp, Homo sapiens
tctttgaattttttg

SEQ ID NO: 787502 - DNA, 15 bp, Homo sapiens
ctttgaattttttga

SEQ ID NO: 787503 - DNA, 15 bp, Homo sapiens
tttgaattttttgaa

SEQ ID NO: 787504 - DNA, 15 bp, Homo sapiens
ttgaattttttgaag

SEQ ID NO: 787505 - DNA, 15 bp, Homo sapiens
tgaattttttgaagt

SEQ ID NO: 787506 - DNA, 15 bp, Homo sapiens
gaattttttgaagtc

SEQ ID NO: 787507 - DNA, 15 bp, Homo sapiens
aattttttgaagtcc

SEQ ID NO: 787508 - DNA, 15 bp, Homo sapiens
attttttgaagtcca

SEQ ID NO: 787509 - DNA, 15 bp, Homo sapiens
ttttttgaagtccac

SEQ ID NO: 787510 - DNA, 15 bp, Homo sapiens
tttttgaagtccacc

SEQ ID NO: 787511 - DNA, 15 bp, Homo sapiens
ttttgaagtccacct

SEQ ID NO: 787512 - DNA, 15 bp, Homo sapiens
tttgaagtccacctt

SEQ ID NO: 787513 - DNA, 15 bp, Homo sapiens
ttgaagtccaccttc

SEQ ID NO: 787514 - DNA, 15 bp, Homo sapiens
tgaagtccaccttcc

SEQ ID NO: 787515 - DNA, 15 bp, Homo sapiens
gaagtccaccttccc

SEQ ID NO: 787516 - DNA, 15 bp, Homo sapiens
aagtccaccttcccc

SEQ ID NO: 787517 - DNA, 15 bp, Homo sapiens
agtccaccttcccct

SEQ ID NO: 787518 - DNA, 15 bp, Homo sapiens
gtccaccttcccctc

SEQ ID NO: 787519 - DNA, 15 bp, Homo sapiens
tccaccttcccctct

SEQ ID NO: 787520 - DNA, 15 bp, Homo sapiens
ccaccttcccctctt

SEQ ID NO: 787521 - DNA, 15 bp, Homo sapiens
caccttcccctcttt

SEQ ID NO: 787522 - DNA, 15 bp, Homo sapiens
accttcccctctttg

SEQ ID NO: 787523 - DNA, 15 bp, Homo sapiens
ccttcccctctttga

SEQ ID NO: 787524 - DNA, 15 bp, Homo sapiens
cttcccctctttgat

SEQ ID NO: 787525 - DNA, 15 bp, Homo sapiens
ttcccctctttgatt

SEQ ID NO: 787526 - DNA, 15 bp, Homo sapiens
tcccctctttgatta

SEQ ID NO: 787527 - DNA, 15 bp, Homo sapiens
cccctctttgattac

SEQ ID NO: 787528 - DNA, 15 bp, Homo sapiens
ccctctttgattacc

SEQ ID NO: 787529 - DNA, 15 bp, Homo sapiens
cctctttgattaccc

SEQ ID NO: 787530 - DNA, 15 bp, Homo sapiens
ctctttgattaccct

SEQ ID NO: 787531 - DNA, 15 bp, Homo sapiens
tctttgattaccctg

SEQ ID NO: 787532 - DNA, 15 bp, Homo sapiens
ctttgattaccctga

SEQ ID NO: 787533 - DNA, 15 bp, Homo sapiens
tttgattaccctgaa

SEQ ID NO: 787534 - DNA, 15 bp, Homo sapiens
ttgattaccctgaac

SEQ ID NO: 787535 - DNA, 15 bp, Homo sapiens
tgattaccctgaact

SEQ ID NO: 787536 - DNA, 15 bp, Homo sapiens
gattaccctgaactc

SEQ ID NO: 787537 - DNA, 15 bp, Homo sapiens
attaccctgaactcc

SEQ ID NO: 787538 - DNA, 15 bp, Homo sapiens
ttaccctgaactccg

SEQ ID NO: 787539 - DNA, 15 bp, Homo sapiens
taccctgaactccga

SEQ ID NO: 787540 - DNA, 15 bp, Homo sapiens
accctgaactccgaa

SEQ ID NO: 787541 - DNA, 15 bp, Homo sapiens
ccctgaactccgaaa

SEQ ID NO: 787542 - DNA, 15 bp, Homo sapiens
cctgaactccgaaat

SEQ ID NO: 787543 - DNA, 15 bp, Homo sapiens
ctgaactccgaaatg

SEQ ID NO: 787544 - DNA, 15 bp, Homo sapiens
tgaactccgaaatga

SEQ ID NO: 787545 - DNA, 15 bp, Homo sapiens
gaactccgaaatgac

SEQ ID NO: 787546 - DNA, 15 bp, Homo sapiens
aactccgaaatgaca

SEQ ID NO: 787547 - DNA, 15 bp, Homo sapiens
actccgaaatgacat

SEQ ID NO: 787548 - DNA, 15 bp, Homo sapiens
ctccgaaatgacata

SEQ ID NO: 787549 - DNA, 15 bp, Homo sapiens
tccgaaatgacatag

SEQ ID NO: 787550 - DNA, 15 bp, Homo sapiens
ccgaaatgacatagt

SEQ ID NO: 787551 - DNA, 15 bp, Homo sapiens
cgaaatgacatagtg

SEQ ID NO: 787552 - DNA, 15 bp, Homo sapiens
gaaatgacatagtga

SEQ ID NO: 787553 - DNA, 15 bp, Homo sapiens
aaatgacatagtgac

SEQ ID NO: 787554 - DNA, 15 bp, Homo sapiens
aatgacatagtgact

SEQ ID NO: 787555 - DNA, 15 bp, Homo sapiens
atgacatagtgactc

SEQ ID NO: 787556 - DNA, 15 bp, Homo sapiens
tgacatagtgactct

SEQ ID NO: 787557 - DNA, 15 bp, Homo sapiens
gacatagtgactctc

SEQ ID NO: 787558 - DNA, 15 bp, Homo sapiens
acatagtgactctct

SEQ ID NO: 787559 - DNA, 15 bp, Homo sapiens
catagtgactctctc

SEQ ID NO: 787560 - DNA, 15 bp, Homo sapiens
atagtgactctctct

SEQ ID NO: 787561 - DNA, 15 bp, Homo sapiens
tagtgactctctctg

SEQ ID NO: 787562 - DNA, 15 bp, Homo sapiens
agtgactctctctga

SEQ ID NO: 787563 - DNA, 15 bp, Homo sapiens
gtgactctctctgaa

SEQ ID NO: 787564 - DNA, 15 bp, Homo sapiens
tgactctctctgaat

SEQ ID NO: 787565 - DNA, 15 bp, Homo sapiens
gactctctctgaatg

SEQ ID NO: 787566 - DNA, 15 bp, Homo sapiens
actctctctgaatgt

SEQ ID NO: 787567 - DNA, 15 bp, Homo sapiens
ctctctctgaatgtt

SEQ ID NO: 787568 - DNA, 15 bp, Homo sapiens
tctctctgaatgttc

SEQ ID NO: 787569 - DNA, 15 bp, Homo sapiens
ctctctgaatgttcc

SEQ ID NO: 787570 - DNA, 15 bp, Homo sapiens
tctctgaatgttcct

SEQ ID NO: 787571 - DNA, 15 bp, Homo sapiens
ctctgaatgttccta

SEQ ID NO: 787572 - DNA, 15 bp, Homo sapiens
tctgaatgttcctat

SEQ ID NO: 787573 - DNA, 15 bp, Homo sapiens
ctgaatgttcctatc

SEQ ID NO: 787574 - DNA, 15 bp, Homo sapiens
tgaatgttcctatca

SEQ ID NO: 787575 - DNA, 15 bp, Homo sapiens
gaatgttcctatcaa

SEQ ID NO: 787576 - DNA, 15 bp, Homo sapiens
aatgttcctatcaat

SEQ ID NO: 787577 - DNA, 15 bp, Homo sapiens
atgttcctatcaatt

SEQ ID NO: 787578 - DNA, 15 bp, Homo sapiens
tgttcctatcaattt

SEQ ID NO: 787579 - DNA, 15 bp, Homo sapiens
gttcctatcaatttt

SEQ ID NO: 787580 - DNA, 15 bp, Homo sapiens
ttcctatcaattttc

SEQ ID NO: 787581 - DNA, 15 bp, Homo sapiens
tcctatcaattttca

SEQ ID NO: 787582 - DNA, 15 bp, Homo sapiens
cctatcaattttcat

SEQ ID NO: 787583 - DNA, 15 bp, Homo sapiens
ctatcaattttcatt

SEQ ID NO: 787584 - DNA, 15 bp, Homo sapiens
tatcaattttcattt

SEQ ID NO: 787585 - DNA, 15 bp, Homo sapiens
atcaattttcatttt

SEQ ID NO: 787586 - DNA, 15 bp, Homo sapiens
tcaattttcatttta

SEQ ID NO: 787587 - DNA, 15 bp, Homo sapiens
caattttcattttac

SEQ ID NO: 787588 - DNA, 15 bp, Homo sapiens
aattttcattttacc

SEQ ID NO: 787589 - DNA, 15 bp, Homo sapiens
attttcattttacca

SEQ ID NO: 787590 - DNA, 15 bp, Homo sapiens
ttttcattttaccaa

SEQ ID NO: 787591 - DNA, 15 bp, Homo sapiens
tttcattttaccaac

SEQ ID NO: 787592 - DNA, 15 bp, Homo sapiens
ttcattttaccaact

SEQ ID NO: 787593 - DNA, 15 bp, Homo sapiens
tcattttaccaacta

SEQ ID NO: 787594 - DNA, 15 bp, Homo sapiens
cattttaccaactat

SEQ ID NO: 787595 - DNA, 15 bp, Homo sapiens
attttaccaactatt

SEQ ID NO: 787596 - DNA, 15 bp, Homo sapiens
ttttaccaactattt

SEQ ID NO: 787597 - DNA, 15 bp, Homo sapiens
tttaccaactatttt

SEQ ID NO: 787598 - DNA, 15 bp, Homo sapiens
ttaccaactattttt

SEQ ID NO: 787599 - DNA, 15 bp, Homo sapiens
taccaactatttttt

SEQ ID NO: 787600 - DNA, 15 bp, Homo sapiens
accaactattttttt

SEQ ID NO: 787601 - DNA, 15 bp, Homo sapiens
ccaactatttttttc

SEQ ID NO: 787602 - DNA, 15 bp, Homo sapiens
caactatttttttct

SEQ ID NO: 787603 - DNA, 15 bp, Homo sapiens
aactatttttttctt

SEQ ID NO: 787604 - DNA, 15 bp, Homo sapiens
actatttttttcttc

SEQ ID NO: 787605 - DNA, 15 bp, Homo sapiens
ctatttttttcttct

SEQ ID NO: 787606 - DNA, 15 bp, Homo sapiens
tatttttttcttctt

SEQ ID NO: 787607 - DNA, 15 bp, Homo sapiens
atttttttcttcttg

SEQ ID NO: 787608 - DNA, 15 bp, Homo sapiens
tttttttcttcttgg

SEQ ID NO: 787609 - DNA, 15 bp, Homo sapiens
ttttttcttcttggt

SEQ ID NO: 787610 - DNA, 15 bp, Homo sapiens
tttttcttcttggtc

SEQ ID NO: 787611 - DNA, 15 bp, Homo sapiens
ttttcttcttggtca

SEQ ID NO: 787612 - DNA, 15 bp, Homo sapiens
tttcttcttggtcag

SEQ ID NO: 787613 - DNA, 15 bp, Homo sapiens
ttcttcttggtcaga

SEQ ID NO: 787614 - DNA, 15 bp, Homo sapiens
tcttcttggtcagaa

SEQ ID NO: 787615 - DNA, 15 bp, Homo sapiens
cttcttggtcagaat

SEQ ID NO: 787616 - DNA, 15 bp, Homo sapiens
ttcttggtcagaatt

SEQ ID NO: 787617 - DNA, 15 bp, Homo sapiens
tcttggtcagaatta

SEQ ID NO: 787618 - DNA, 15 bp, Homo sapiens
cttggtcagaattag

SEQ ID NO: 787619 - DNA, 15 bp, Homo sapiens
ttggtcagaattagg

SEQ ID NO: 787620 - DNA, 15 bp, Homo sapiens
tggtcagaattaggt

SEQ ID NO: 787621 - DNA, 15 bp, Homo sapiens
ggtcagaattaggtc

SEQ ID NO: 787622 - DNA, 15 bp, Homo sapiens
gtcagaattaggtcc

SEQ ID NO: 787623 - DNA, 15 bp, Homo sapiens
tcagaattaggtcca

SEQ ID NO: 787624 - DNA, 15 bp, Homo sapiens
cagaattaggtccag

SEQ ID NO: 787625 - DNA, 15 bp, Homo sapiens
agaattaggtccaga

SEQ ID NO: 787626 - DNA, 15 bp, Homo sapiens
gaattaggtccagag

SEQ ID NO: 787627 - DNA, 15 bp, Homo sapiens
aattaggtccagagt

SEQ ID NO: 787628 - DNA, 15 bp, Homo sapiens
attaggtccagagtt

SEQ ID NO: 787629 - DNA, 15 bp, Homo sapiens
ttaggtccagagttg

SEQ ID NO: 787630 - DNA, 15 bp, Homo sapiens
taggtccagagttga

SEQ ID NO: 787631 - DNA, 15 bp, Homo sapiens
aggtccagagttgaa

SEQ ID NO: 787632 - DNA, 15 bp, Homo sapiens
ggtccagagttgaag

SEQ ID NO: 787633 - DNA, 15 bp, Homo sapiens
gtccagagttgaagt

SEQ ID NO: 787634 - DNA, 15 bp, Homo sapiens
tccagagttgaagtt

SEQ ID NO: 787635 - DNA, 15 bp, Homo sapiens
ccagagttgaagttc

SEQ ID NO: 787636 - DNA, 15 bp, Homo sapiens
cagagttgaagttcc

SEQ ID NO: 787637 - DNA, 15 bp, Homo sapiens
agagttgaagttccc

SEQ ID NO: 787638 - DNA, 15 bp, Homo sapiens
gagttgaagttcccc

SEQ ID NO: 787639 - DNA, 15 bp, Homo sapiens
agttgaagttcccct

SEQ ID NO: 787640 - DNA, 15 bp, Homo sapiens
gttgaagttccccta

SEQ ID NO: 787641 - DNA, 15 bp, Homo sapiens
ttgaagttcccctaa

SEQ ID NO: 787642 - DNA, 15 bp, Homo sapiens
tgaagttcccctaat

SEQ ID NO: 787643 - DNA, 15 bp, Homo sapiens
gaagttcccctaatt

SEQ ID NO: 787644 - DNA, 15 bp, Homo sapiens
aagttcccctaattg

SEQ ID NO: 787645 - DNA, 15 bp, Homo sapiens
agttcccctaattgc

SEQ ID NO: 787646 - DNA, 15 bp, Homo sapiens
gttcccctaattgct

SEQ ID NO: 787647 - DNA, 15 bp, Homo sapiens
ttcccctaattgctt

SEQ ID NO: 787648 - DNA, 15 bp, Homo sapiens
tcccctaattgcttc

SEQ ID NO: 787649 - DNA, 15 bp, Homo sapiens
cccctaattgcttcc

SEQ ID NO: 787650 - DNA, 15 bp, Homo sapiens
ccctaattgcttcct

SEQ ID NO: 787651 - DNA, 15 bp, Homo sapiens
cctaattgcttcctc

SEQ ID NO: 787652 - DNA, 15 bp, Homo sapiens
ctaattgcttcctct

SEQ ID NO: 787653 - DNA, 15 bp, Homo sapiens
taattgcttcctcta

SEQ ID NO: 787654 - DNA, 15 bp, Homo sapiens
aattgcttcctctac

SEQ ID NO: 787655 - DNA, 15 bp, Homo sapiens
attgcttcctctacc

SEQ ID NO: 787656 - DNA, 15 bp, Homo sapiens
ttgcttcctctacca

SEQ ID NO: 787657 - DNA, 15 bp, Homo sapiens
tgcttcctctaccat

SEQ ID NO: 787658 - DNA, 15 bp, Homo sapiens
gcttcctctaccatc

SEQ ID NO: 787659 - DNA, 15 bp, Homo sapiens
cttcctctaccatct

SEQ ID NO: 787660 - DNA, 15 bp, Homo sapiens
ttcctctaccatctg

SEQ ID NO: 787661 - DNA, 15 bp, Homo sapiens
tcctctaccatctgg

SEQ ID NO: 787662 - DNA, 15 bp, Homo sapiens
cctctaccatctggg

SEQ ID NO: 787663 - DNA, 15 bp, Homo sapiens
ctctaccatctggga

SEQ ID NO: 787664 - DNA, 15 bp, Homo sapiens
tctaccatctgggag

SEQ ID NO: 787665 - DNA, 15 bp, Homo sapiens
ctaccatctgggaga

SEQ ID NO: 787666 - DNA, 15 bp, Homo sapiens
taccatctgggagat

SEQ ID NO: 787667 - DNA, 15 bp, Homo sapiens
accatctgggagata

SEQ ID NO: 787668 - DNA, 15 bp, Homo sapiens
ccatctgggagataa

SEQ ID NO: 787669 - DNA, 15 bp, Homo sapiens
catctgggagataaa

SEQ ID NO: 787670 - DNA, 15 bp, Homo sapiens
atctgggagataaaa

SEQ ID NO: 787671 - DNA, 15 bp, Homo sapiens
tctgggagataaaat

SEQ ID NO: 787672 - DNA, 15 bp, Homo sapiens
ctgggagataaaatt

SEQ ID NO: 787673 - DNA, 15 bp, Homo sapiens
tgggagataaaattg

SEQ ID NO: 787674 - DNA, 15 bp, Homo sapiens
gggagataaaattgt

SEQ ID NO: 787675 - DNA, 15 bp, Homo sapiens
ggagataaaattgtt

SEQ ID NO: 787676 - DNA, 15 bp, Homo sapiens
gagataaaattgtta

SEQ ID NO: 787677 - DNA, 15 bp, Homo sapiens
agataaaattgttac

SEQ ID NO: 787678 - DNA, 15 bp, Homo sapiens
gataaaattgttacc

SEQ ID NO: 787679 - DNA, 15 bp, Homo sapiens
ataaaattgttacca

SEQ ID NO: 787680 - DNA, 15 bp, Homo sapiens
taaaattgttaccaa

SEQ ID NO: 787681 - DNA, 15 bp, Homo sapiens
aaaattgttaccaaa

SEQ ID NO: 787682 - DNA, 15 bp, Homo sapiens
aaattgttaccaaag

SEQ ID NO: 787683 - DNA, 15 bp, Homo sapiens
aattgttaccaaagt

SEQ ID NO: 787684 - DNA, 15 bp, Homo sapiens
attgttaccaaagta

SEQ ID NO: 787685 - DNA, 15 bp, Homo sapiens
ttgttaccaaagtaa

SEQ ID NO: 787686 - DNA, 15 bp, Homo sapiens
tgttaccaaagtaag

SEQ ID NO: 787687 - DNA, 15 bp, Homo sapiens
gttaccaaagtaagt

SEQ ID NO: 787688 - DNA, 15 bp, Homo sapiens
ttaccaaagtaagtc

SEQ ID NO: 787689 - DNA, 15 bp, Homo sapiens
taccaaagtaagtca

SEQ ID NO: 787690 - DNA, 15 bp, Homo sapiens
accaaagtaagtcaa

SEQ ID NO: 787691 - DNA, 15 bp, Homo sapiens
ccaaagtaagtcaag

SEQ ID NO: 787692 - DNA, 15 bp, Homo sapiens
caaagtaagtcaaga

SEQ ID NO: 787693 - DNA, 15 bp, Homo sapiens
aaagtaagtcaagaa

SEQ ID NO: 787694 - DNA, 15 bp, Homo sapiens
aagtaagtcaagaac

SEQ ID NO: 787695 - DNA, 15 bp, Homo sapiens
agtaagtcaagaacc

SEQ ID NO: 787696 - DNA, 15 bp, Homo sapiens
gtaagtcaagaacct

SEQ ID NO: 787697 - DNA, 15 bp, Homo sapiens
taagtcaagaacctg

SEQ ID NO: 787698 - DNA, 15 bp, Homo sapiens
aagtcaagaacctgt

SEQ ID NO: 787699 - DNA, 15 bp, Homo sapiens
agtcaagaacctgtt

SEQ ID NO: 787700 - DNA, 15 bp, Homo sapiens
gtcaagaacctgttg

SEQ ID NO: 787701 - DNA, 15 bp, Homo sapiens
tcaagaacctgttgg

SEQ ID NO: 787702 - DNA, 15 bp, Homo sapiens
caagaacctgttggg

SEQ ID NO: 787703 - DNA, 15 bp, Homo sapiens
aagaacctgttgggt

SEQ ID NO: 787704 - DNA, 15 bp, Homo sapiens
agaacctgttgggtg

SEQ ID NO: 787705 - DNA, 15 bp, Homo sapiens
gaacctgttgggtgc

SEQ ID NO: 787706 - DNA, 15 bp, Homo sapiens
aacctgttgggtgcc

SEQ ID NO: 787707 - DNA, 15 bp, Homo sapiens
acctgttgggtgccc

SEQ ID NO: 787708 - DNA, 15 bp, Homo sapiens
cctgttgggtgccct

SEQ ID NO: 787709 - DNA, 15 bp, Homo sapiens
ctgttgggtgcccta

SEQ ID NO: 787710 - DNA, 15 bp, Homo sapiens
tgttgggtgccctac

SEQ ID NO: 787711 - DNA, 15 bp, Homo sapiens
gttgggtgccctact

SEQ ID NO: 787712 - DNA, 15 bp, Homo sapiens
ttgggtgccctactt

SEQ ID NO: 787713 - DNA, 15 bp, Homo sapiens
tgggtgccctacttc

SEQ ID NO: 787714 - DNA, 15 bp, Homo sapiens
gggtgccctacttct

SEQ ID NO: 787715 - DNA, 15 bp, Homo sapiens
ggtgccctacttcta

SEQ ID NO: 787716 - DNA, 15 bp, Homo sapiens
gtgccctacttctaa

SEQ ID NO: 787717 - DNA, 15 bp, Homo sapiens
tgccctacttctaac

SEQ ID NO: 787718 - DNA, 15 bp, Homo sapiens
gccctacttctaacc

SEQ ID NO: 787719 - DNA, 15 bp, Homo sapiens
ccctacttctaacca

SEQ ID NO: 787720 - DNA, 15 bp, Homo sapiens
cctacttctaaccaa

SEQ ID NO: 787721 - DNA, 15 bp, Homo sapiens
ctacttctaaccaaa

SEQ ID NO: 787722 - DNA, 15 bp, Homo sapiens
tacttctaaccaaat

SEQ ID NO: 787723 - DNA, 15 bp, Homo sapiens
acttctaaccaaatg

SEQ ID NO: 787724 - DNA, 15 bp, Homo sapiens
cttctaaccaaatga

SEQ ID NO: 787725 - DNA, 15 bp, Homo sapiens
ttctaaccaaatgag

SEQ ID NO: 787726 - DNA, 15 bp, Homo sapiens
tctaaccaaatgaga

SEQ ID NO: 787727 - DNA, 15 bp, Homo sapiens
ctaaccaaatgagac

SEQ ID NO: 787728 - DNA, 15 bp, Homo sapiens
taaccaaatgagact

SEQ ID NO: 787729 - DNA, 15 bp, Homo sapiens
aaccaaatgagactt

SEQ ID NO: 787730 - DNA, 15 bp, Homo sapiens
accaaatgagacttc

SEQ ID NO: 787731 - DNA, 15 bp, Homo sapiens
ccaaatgagacttct

SEQ ID NO: 787732 - DNA, 15 bp, Homo sapiens
caaatgagacttcta

SEQ ID NO: 787733 - DNA, 15 bp, Homo sapiens
aaatgagacttctag

SEQ ID NO: 787734 - DNA, 15 bp, Homo sapiens
aatgagacttctagt

SEQ ID NO: 787735 - DNA, 15 bp, Homo sapiens
atgagacttctagtg

SEQ ID NO: 787736 - DNA, 15 bp, Homo sapiens
tgagacttctagtgg

SEQ ID NO: 787737 - DNA, 15 bp, Homo sapiens
gagacttctagtgga

SEQ ID NO: 787738 - DNA, 15 bp, Homo sapiens
agacttctagtggat

SEQ ID NO: 787739 - DNA, 15 bp, Homo sapiens
gacttctagtggata

SEQ ID NO: 787740 - DNA, 15 bp, Homo sapiens
acttctagtggatat

SEQ ID NO: 787741 - DNA, 15 bp, Homo sapiens
cttctagtggatatc

SEQ ID NO: 787742 - DNA, 15 bp, Homo sapiens
ttctagtggatatct

SEQ ID NO: 787743 - DNA, 15 bp, Homo sapiens
tctagtggatatctg

SEQ ID NO: 787744 - DNA, 15 bp, Homo sapiens
ctagtggatatctgg

SEQ ID NO: 787745 - DNA, 15 bp, Homo sapiens
tagtggatatctgga

SEQ ID NO: 787746 - DNA, 15 bp, Homo sapiens
agtggatatctggat

SEQ ID NO: 787747 - DNA, 15 bp, Homo sapiens
gtggatatctggatg

SEQ ID NO: 787748 - DNA, 15 bp, Homo sapiens
tggatatctggatgg

SEQ ID NO: 787749 - DNA, 15 bp, Homo sapiens
ggatatctggatggt

SEQ ID NO: 787750 - DNA, 15 bp, Homo sapiens
gatatctggatggtt

SEQ ID NO: 787751 - DNA, 15 bp, Homo sapiens
atatctggatggttg

SEQ ID NO: 787752 - DNA, 15 bp, Homo sapiens
tatctggatggttga

SEQ ID NO: 787753 - DNA, 15 bp, Homo sapiens
atctggatggttgac

SEQ ID NO: 787754 - DNA, 15 bp, Homo sapiens
ttatgttacctgtgc

SEQ ID NO: 787755 - DNA, 15 bp, Homo sapiens
tatgttacctgtgct

SEQ ID NO: 787756 - DNA, 15 bp, Homo sapiens
atgttacctgtgctt

SEQ ID NO: 787757 - DNA, 15 bp, Homo sapiens
tgttacctgtgcttt

SEQ ID NO: 787758 - DNA, 15 bp, Homo sapiens
gttacctgtgctttt

SEQ ID NO: 787759 - DNA, 15 bp, Homo sapiens
ttacctgtgcttttg

SEQ ID NO: 787760 - DNA, 15 bp, Homo sapiens
tacctgtgcttttga

SEQ ID NO: 787761 - DNA, 15 bp, Homo sapiens
acctgtgcttttgag

SEQ ID NO: 787762 - DNA, 15 bp, Homo sapiens
cctgtgcttttgagg

SEQ ID NO: 787763 - DNA, 15 bp, Homo sapiens
ctgtgcttttgaggt

SEQ ID NO: 787764 - DNA, 15 bp, Homo sapiens
tgtgcttttgaggtc

SEQ ID NO: 787765 - DNA, 15 bp, Homo sapiens
gtgcttttgaggtct

SEQ ID NO: 787766 - DNA, 15 bp, Homo sapiens
tgcttttgaggtctt

SEQ ID NO: 787767 - DNA, 15 bp, Homo sapiens
gcttttgaggtctta

SEQ ID NO: 787768 - DNA, 15 bp, Homo sapiens
cttttgaggtcttat

SEQ ID NO: 787769 - DNA, 15 bp, Homo sapiens
ttttgaggtcttatt

SEQ ID NO: 787770 - DNA, 15 bp, Homo sapiens
tttgaggtcttattc

SEQ ID NO: 787771 - DNA, 15 bp, Homo sapiens
ttgaggtcttattca

SEQ ID NO: 787772 - DNA, 15 bp, Homo sapiens
tgaggtcttattcat

SEQ ID NO: 787773 - DNA, 15 bp, Homo sapiens
gaggtcttattcata

SEQ ID NO: 787774 - DNA, 15 bp, Homo sapiens
aggtcttattcataa

SEQ ID NO: 787775 - DNA, 15 bp, Homo sapiens
ggtcttattcataaa

SEQ ID NO: 787776 - DNA, 15 bp, Homo sapiens
gtcttattcataaaa

SEQ ID NO: 787777 - DNA, 15 bp, Homo sapiens
tcttattcataaaat

SEQ ID NO: 787778 - DNA, 15 bp, Homo sapiens
cttattcataaaata

SEQ ID NO: 787779 - DNA, 15 bp, Homo sapiens
ttattcataaaatat

SEQ ID NO: 787780 - DNA, 15 bp, Homo sapiens
tattcataaaatatt

SEQ ID NO: 787781 - DNA, 15 bp, Homo sapiens
attcataaaatattt

SEQ ID NO: 787782 - DNA, 15 bp, Homo sapiens
ttcataaaatatttt

SEQ ID NO: 787783 - DNA, 15 bp, Homo sapiens
tcataaaatattttc

SEQ ID NO: 787784 - DNA, 15 bp, Homo sapiens
cataaaatattttcc

SEQ ID NO: 787785 - DNA, 15 bp, Homo sapiens
ataaaatattttccc

SEQ ID NO: 787786 - DNA, 15 bp, Homo sapiens
taaaatattttccca

SEQ ID NO: 787787 - DNA, 15 bp, Homo sapiens
aaaatattttcccag

SEQ ID NO: 787788 - DNA, 15 bp, Homo sapiens
aaatattttcccaga

SEQ ID NO: 787789 - DNA, 15 bp, Homo sapiens
aatattttcccagac

SEQ ID NO: 787790 - DNA, 15 bp, Homo sapiens
atattttcccagacc

SEQ ID NO: 787791 - DNA, 15 bp, Homo sapiens
tattttcccagacca

SEQ ID NO: 787792 - DNA, 15 bp, Homo sapiens
attttcccagaccaa

SEQ ID NO: 787793 - DNA, 15 bp, Homo sapiens
ttttcccagaccaat

SEQ ID NO: 787794 - DNA, 15 bp, Homo sapiens
tttcccagaccaatg

SEQ ID NO: 787795 - DNA, 15 bp, Homo sapiens
ttcccagaccaatgt

SEQ ID NO: 787796 - DNA, 15 bp, Homo sapiens
tcccagaccaatgtc

SEQ ID NO: 787797 - DNA, 15 bp, Homo sapiens
cccagaccaatgtcc

SEQ ID NO: 787798 - DNA, 15 bp, Homo sapiens
ccagaccaatgtcct

SEQ ID NO: 787799 - DNA, 15 bp, Homo sapiens
cagaccaatgtcctg

SEQ ID NO: 787800 - DNA, 15 bp, Homo sapiens
agaccaatgtcctga

SEQ ID NO: 787801 - DNA, 15 bp, Homo sapiens
gaccaatgtcctgaa

SEQ ID NO: 787802 - DNA, 15 bp, Homo sapiens
accaatgtcctgaag

SEQ ID NO: 787803 - DNA, 15 bp, Homo sapiens
ccaatgtcctgaagc

SEQ ID NO: 787804 - DNA, 15 bp, Homo sapiens
caatgtcctgaagca

SEQ ID NO: 787805 - DNA, 15 bp, Homo sapiens
aatgtcctgaagcat

SEQ ID NO: 787806 - DNA, 15 bp, Homo sapiens
atgtcctgaagcatt

SEQ ID NO: 787807 - DNA, 15 bp, Homo sapiens
tgtcctgaagcattt

SEQ ID NO: 787808 - DNA, 15 bp, Homo sapiens
gtcctgaagcatttc

SEQ ID NO: 787809 - DNA, 15 bp, Homo sapiens
tcctgaagcatttcc

SEQ ID NO: 787810 - DNA, 15 bp, Homo sapiens
cctgaagcatttccc

SEQ ID NO: 787811 - DNA, 15 bp, Homo sapiens
ctgaagcatttcccc

SEQ ID NO: 787812 - DNA, 15 bp, Homo sapiens
tgaagcatttcccct

SEQ ID NO: 787813 - DNA, 15 bp, Homo sapiens
gaagcatttccccta

SEQ ID NO: 787814 - DNA, 15 bp, Homo sapiens
aagcatttcccctat

SEQ ID NO: 787815 - DNA, 15 bp, Homo sapiens
agcatttcccctatg

SEQ ID NO: 787816 - DNA, 15 bp, Homo sapiens
gcatttcccctatgt

SEQ ID NO: 787817 - DNA, 15 bp, Homo sapiens
catttcccctatgtt

SEQ ID NO: 787818 - DNA, 15 bp, Homo sapiens
atttcccctatgttt

SEQ ID NO: 787819 - DNA, 15 bp, Homo sapiens
tttcccctatgtttt

SEQ ID NO: 787820 - DNA, 15 bp, Homo sapiens
ttcccctatgttttc

SEQ ID NO: 787821 - DNA, 15 bp, Homo sapiens
tcccctatgttttct

SEQ ID NO: 787822 - DNA, 15 bp, Homo sapiens
cccctatgttttctt

SEQ ID NO: 787823 - DNA, 15 bp, Homo sapiens
ccctatgttttcttc

SEQ ID NO: 787824 - DNA, 15 bp, Homo sapiens
cctatgttttcttct

SEQ ID NO: 787825 - DNA, 15 bp, Homo sapiens
ctatgttttcttcta

SEQ ID NO: 787826 - DNA, 15 bp, Homo sapiens
tatgttttcttctag

SEQ ID NO: 787827 - DNA, 15 bp, Homo sapiens
atgttttcttctagt

SEQ ID NO: 787828 - DNA, 15 bp, Homo sapiens
tgttttcttctagta

SEQ ID NO: 787829 - DNA, 15 bp, Homo sapiens
gttttcttctagtag

SEQ ID NO: 787830 - DNA, 15 bp, Homo sapiens
ttttcttctagtagt

SEQ ID NO: 787831 - DNA, 15 bp, Homo sapiens
tttcttctagtagtt

SEQ ID NO: 787832 - DNA, 15 bp, Homo sapiens
ttcttctagtagttt

SEQ ID NO: 787833 - DNA, 15 bp, Homo sapiens
tcttctagtagtttt

SEQ ID NO: 787834 - DNA, 15 bp, Homo sapiens
cttctagtagtttta

SEQ ID NO: 787835 - DNA, 15 bp, Homo sapiens
ttctagtagttttat

SEQ ID NO: 787836 - DNA, 15 bp, Homo sapiens
tctagtagttttata

SEQ ID NO: 787837 - DNA, 15 bp, Homo sapiens
ctagtagttttatag

SEQ ID NO: 787838 - DNA, 15 bp, Homo sapiens
tagtagttttatagt

SEQ ID NO: 787839 - DNA, 15 bp, Homo sapiens
agtagttttatagtc

SEQ ID NO: 787840 - DNA, 15 bp, Homo sapiens
gtagttttatagtct

SEQ ID NO: 787841 - DNA, 15 bp, Homo sapiens
tagttttatagtctt

SEQ ID NO: 787842 - DNA, 15 bp, Homo sapiens
agttttatagtcttg

SEQ ID NO: 787843 - DNA, 15 bp, Homo sapiens
gttttatagtcttgg

SEQ ID NO: 787844 - DNA, 15 bp, Homo sapiens
ttttatagtcttgga

SEQ ID NO: 787845 - DNA, 15 bp, Homo sapiens
tttatagtcttggac

SEQ ID NO: 787846 - DNA, 15 bp, Homo sapiens
ttatagtcttggacc

SEQ ID NO: 787847 - DNA, 15 bp, Homo sapiens
tatagtcttggacct

SEQ ID NO: 787848 - DNA, 15 bp, Homo sapiens
atagtcttggacctt

SEQ ID NO: 787849 - DNA, 15 bp, Homo sapiens
tagtcttggacctta

SEQ ID NO: 787850 - DNA, 15 bp, Homo sapiens
agtcttggaccttac

SEQ ID NO: 787851 - DNA, 15 bp, Homo sapiens
gtcttggaccttaca

SEQ ID NO: 787852 - DNA, 15 bp, Homo sapiens
tcttggaccttacat

SEQ ID NO: 787853 - DNA, 15 bp, Homo sapiens
cttggaccttacatt

SEQ ID NO: 787854 - DNA, 15 bp, Homo sapiens
ttggaccttacattg

SEQ ID NO: 787855 - DNA, 15 bp, Homo sapiens
tggaccttacattga

SEQ ID NO: 787856 - DNA, 15 bp, Homo sapiens
ggaccttacattgag

SEQ ID NO: 787857 - DNA, 15 bp, Homo sapiens
gaccttacattgagg

SEQ ID NO: 787858 - DNA, 15 bp, Homo sapiens
accttacattgaggt

SEQ ID NO: 787859 - DNA, 15 bp, Homo sapiens
ccttacattgaggtt

SEQ ID NO: 787860 - DNA, 15 bp, Homo sapiens
cttacattgaggttt

SEQ ID NO: 787861 - DNA, 15 bp, Homo sapiens
ttacattgaggtttt

SEQ ID NO: 787862 - DNA, 15 bp, Homo sapiens
tacattgaggttttt

SEQ ID NO: 787863 - DNA, 15 bp, Homo sapiens
acattgaggtttttg

SEQ ID NO: 787864 - DNA, 15 bp, Homo sapiens
cattgaggtttttgg

SEQ ID NO: 787865 - DNA, 15 bp, Homo sapiens
attgaggtttttgga

SEQ ID NO: 787866 - DNA, 15 bp, Homo sapiens
ttgaggtttttggaa

SEQ ID NO: 787867 - DNA, 15 bp, Homo sapiens
tgaggtttttggaag

SEQ ID NO: 787868 - DNA, 15 bp, Homo sapiens
gaggtttttggaagc

SEQ ID NO: 787869 - DNA, 15 bp, Homo sapiens
aggtttttggaagca

SEQ ID NO: 787870 - DNA, 15 bp, Homo sapiens
ggtttttggaagcaa

SEQ ID NO: 787871 - DNA, 15 bp, Homo sapiens
gtttttggaagcaat

SEQ ID NO: 787872 - DNA, 15 bp, Homo sapiens
tttttggaagcaatc

SEQ ID NO: 787873 - DNA, 15 bp, Homo sapiens
ttttggaagcaatct

SEQ ID NO: 787874 - DNA, 15 bp, Homo sapiens
tttggaagcaatcta

SEQ ID NO: 787875 - DNA, 15 bp, Homo sapiens
ttggaagcaatctac

SEQ ID NO: 787876 - DNA, 15 bp, Homo sapiens
tggaagcaatctaca

SEQ ID NO: 787877 - DNA, 15 bp, Homo sapiens
ggaagcaatctacag

SEQ ID NO: 787878 - DNA, 15 bp, Homo sapiens
gaagcaatctacagt

SEQ ID NO: 787879 - DNA, 15 bp, Homo sapiens
aagcaatctacagtt

SEQ ID NO: 787880 - DNA, 15 bp, Homo sapiens
agcaatctacagttt

SEQ ID NO: 787881 - DNA, 15 bp, Homo sapiens
gcaatctacagtttt

SEQ ID NO: 787882 - DNA, 15 bp, Homo sapiens
caatctacagttttg

SEQ ID NO: 787883 - DNA, 15 bp, Homo sapiens
aatctacagttttgc

SEQ ID NO: 787884 - DNA, 15 bp, Homo sapiens
atctacagttttgct

SEQ ID NO: 787885 - DNA, 15 bp, Homo sapiens
tctacagttttgctg

SEQ ID NO: 787886 - DNA, 15 bp, Homo sapiens
ctacagttttgctgc

SEQ ID NO: 787887 - DNA, 15 bp, Homo sapiens
tacagttttgctgca

SEQ ID NO: 787888 - DNA, 15 bp, Homo sapiens
acagttttgctgcaa

SEQ ID NO: 787889 - DNA, 15 bp, Homo sapiens
cagttttgctgcaat

SEQ ID NO: 787890 - DNA, 15 bp, Homo sapiens
agttttgctgcaatc

SEQ ID NO: 787891 - DNA, 15 bp, Homo sapiens
gttttgctgcaatct

SEQ ID NO: 787892 - DNA, 15 bp, Homo sapiens
ttttgctgcaatctg

SEQ ID NO: 787893 - DNA, 15 bp, Homo sapiens
tttgctgcaatctgt

SEQ ID NO: 787894 - DNA, 15 bp, Homo sapiens
ttgctgcaatctgta

SEQ ID NO: 787895 - DNA, 15 bp, Homo sapiens
tgctgcaatctgtat

SEQ ID NO: 787896 - DNA, 15 bp, Homo sapiens
gctgcaatctgtatc

SEQ ID NO: 787897 - DNA, 15 bp, Homo sapiens
ctgcaatctgtatca

SEQ ID NO: 787898 - DNA, 15 bp, Homo sapiens
tgcaatctgtatcaa

SEQ ID NO: 787899 - DNA, 15 bp, Homo sapiens
gcaatctgtatcaaa

SEQ ID NO: 787900 - DNA, 15 bp, Homo sapiens
caatctgtatcaaaa

SEQ ID NO: 787901 - DNA, 15 bp, Homo sapiens
aatctgtatcaaaat

SEQ ID NO: 787902 - DNA, 15 bp, Homo sapiens
atctgtatcaaaata

SEQ ID NO: 787903 - DNA, 15 bp, Homo sapiens
tctgtatcaaaatac

SEQ ID NO: 787904 - DNA, 15 bp, Homo sapiens
ctgtatcaaaatacc

SEQ ID NO: 787905 - DNA, 15 bp, Homo sapiens
tgtatcaaaatacca

SEQ ID NO: 787906 - DNA, 15 bp, Homo sapiens
gtatcaaaataccaa

SEQ ID NO: 787907 - DNA, 15 bp, Homo sapiens
atcaaaataccaatg

SEQ ID NO: 787908 - DNA, 15 bp, Homo sapiens
tcaaaataccaatga

SEQ ID NO: 787909 - DNA, 15 bp, Homo sapiens
caaaataccaatgac

SEQ ID NO: 787910 - DNA, 15 bp, Homo sapiens
aaaataccaatgaca

SEQ ID NO: 787911 - DNA, 15 bp, Homo sapiens
aaataccaatgacat

SEQ ID NO: 787912 - DNA, 15 bp, Homo sapiens
aataccaatgacatt

SEQ ID NO: 787913 - DNA, 15 bp, Homo sapiens
ataccaatgacattc

SEQ ID NO: 787914 - DNA, 15 bp, Homo sapiens
taccaatgacattct

SEQ ID NO: 787915 - DNA, 15 bp, Homo sapiens
accaatgacattctt

SEQ ID NO: 787916 - DNA, 15 bp, Homo sapiens
ccaatgacattcttc

SEQ ID NO: 787917 - DNA, 15 bp, Homo sapiens
caatgacattcttca

SEQ ID NO: 787918 - DNA, 15 bp, Homo sapiens
aatgacattcttcat

SEQ ID NO: 787919 - DNA, 15 bp, Homo sapiens
atgacattcttcata

SEQ ID NO: 787920 - DNA, 15 bp, Homo sapiens
tgacattcttcatag

SEQ ID NO: 787921 - DNA, 15 bp, Homo sapiens
gacattcttcataga

SEQ ID NO: 787922 - DNA, 15 bp, Homo sapiens
acattcttcatagaa

SEQ ID NO: 787923 - DNA, 15 bp, Homo sapiens
cattcttcatagaaa

SEQ ID NO: 787924 - DNA, 15 bp, Homo sapiens
attcttcatagaaat

SEQ ID NO: 787925 - DNA, 15 bp, Homo sapiens
ttcttcatagaaata

SEQ ID NO: 787926 - DNA, 15 bp, Homo sapiens
tcttcatagaaatag

SEQ ID NO: 787927 - DNA, 15 bp, Homo sapiens
cttcatagaaataga

SEQ ID NO: 787928 - DNA, 15 bp, Homo sapiens
ttcatagaaatagaa

SEQ ID NO: 787929 - DNA, 15 bp, Homo sapiens
tcatagaaatagaaa

SEQ ID NO: 787930 - DNA, 15 bp, Homo sapiens
catagaaatagaaaa

SEQ ID NO: 787931 - DNA, 15 bp, Homo sapiens
atagaaatagaaaaa

SEQ ID NO: 787932 - DNA, 15 bp, Homo sapiens
tagaaatagaaaaac

SEQ ID NO: 787933 - DNA, 15 bp, Homo sapiens
agaaatagaaaaaca

SEQ ID NO: 787934 - DNA, 15 bp, Homo sapiens
gaaatagaaaaacaa

SEQ ID NO: 787935 - DNA, 15 bp, Homo sapiens
aaatagaaaaacaat

SEQ ID NO: 787936 - DNA, 15 bp, Homo sapiens
aatagaaaaacaatc

SEQ ID NO: 787937 - DNA, 15 bp, Homo sapiens
atagaaaaacaatcc

SEQ ID NO: 787938 - DNA, 15 bp, Homo sapiens
tagaaaaacaatcct

SEQ ID NO: 787939 - DNA, 15 bp, Homo sapiens
agaaaaacaatccta

SEQ ID NO: 787940 - DNA, 15 bp, Homo sapiens
gaaaaacaatcctaa

SEQ ID NO: 787941 - DNA, 15 bp, Homo sapiens
aaaaacaatcctaaa

SEQ ID NO: 787942 - DNA, 15 bp, Homo sapiens
aaaacaatcctaaaa

SEQ ID NO: 787943 - DNA, 15 bp, Homo sapiens
aaacaatcctaaaat

SEQ ID NO: 787944 - DNA, 15 bp, Homo sapiens
aacaatcctaaaatc

SEQ ID NO: 787945 - DNA, 15 bp, Homo sapiens
acaatcctaaaatct

SEQ ID NO: 787946 - DNA, 15 bp, Homo sapiens
caatcctaaaatctg

SEQ ID NO: 787947 - DNA, 15 bp, Homo sapiens
aatcctaaaatctgt

SEQ ID NO: 787948 - DNA, 15 bp, Homo sapiens
atcctaaaatctgtg

SEQ ID NO: 787949 - DNA, 15 bp, Homo sapiens
tcctaaaatctgtgt

SEQ ID NO: 787950 - DNA, 15 bp, Homo sapiens
cctaaaatctgtgtg

SEQ ID NO: 787951 - DNA, 15 bp, Homo sapiens
ctaaaatctgtgtgg

SEQ ID NO: 787952 - DNA, 15 bp, Homo sapiens
taaaatctgtgtgga

SEQ ID NO: 787953 - DNA, 15 bp, Homo sapiens
aaaatctgtgtggaa

SEQ ID NO: 787954 - DNA, 15 bp, Homo sapiens
aaatctgtgtggaac

SEQ ID NO: 787955 - DNA, 15 bp, Homo sapiens
aatctgtgtggaacc

SEQ ID NO: 787956 - DNA, 15 bp, Homo sapiens
atctgtgtggaacca

SEQ ID NO: 787957 - DNA, 15 bp, Homo sapiens
tctgtgtggaaccac

SEQ ID NO: 787958 - DNA, 15 bp, Homo sapiens
ctgtgtggaaccaca

SEQ ID NO: 787959 - DNA, 15 bp, Homo sapiens
tgtgtggaaccacaa

SEQ ID NO: 787960 - DNA, 15 bp, Homo sapiens
gtgtggaaccacaaa

SEQ ID NO: 787961 - DNA, 15 bp, Homo sapiens
tgtggaaccacaaaa

SEQ ID NO: 787962 - DNA, 15 bp, Homo sapiens
gtggaaccacaaaag

SEQ ID NO: 787963 - DNA, 15 bp, Homo sapiens
tggaaccacaaaaga

SEQ ID NO: 787964 - DNA, 15 bp, Homo sapiens
ggaaccacaaaagac

SEQ ID NO: 787965 - DNA, 15 bp, Homo sapiens
gaaccacaaaagacc

SEQ ID NO: 787966 - DNA, 15 bp, Homo sapiens
aaccacaaaagaccc

SEQ ID NO: 787967 - DNA, 15 bp, Homo sapiens
accacaaaagacccc

SEQ ID NO: 787968 - DNA, 15 bp, Homo sapiens
ccacaaaagacccca

SEQ ID NO: 787969 - DNA, 15 bp, Homo sapiens
cacaaaagaccccaa

SEQ ID NO: 787970 - DNA, 15 bp, Homo sapiens
acaaaagaccccaaa

SEQ ID NO: 787971 - DNA, 15 bp, Homo sapiens
caaaagaccccaaat

SEQ ID NO: 787972 - DNA, 15 bp, Homo sapiens
aaagaccccaaatag

SEQ ID NO: 787973 - DNA, 15 bp, Homo sapiens
aagaccccaaatagc

SEQ ID NO: 787974 - DNA, 15 bp, Homo sapiens
agaccccaaatagcc

SEQ ID NO: 787975 - DNA, 15 bp, Homo sapiens
gaccccaaatagcca

SEQ ID NO: 787976 - DNA, 15 bp, Homo sapiens
accccaaatagccaa

SEQ ID NO: 787977 - DNA, 15 bp, Homo sapiens
ccccaaatagccaaa

SEQ ID NO: 787978 - DNA, 15 bp, Homo sapiens
cccaaatagccaaag

SEQ ID NO: 787979 - DNA, 15 bp, Homo sapiens
ccaaatagccaaagc

SEQ ID NO: 787980 - DNA, 15 bp, Homo sapiens
caaatagccaaagca

SEQ ID NO: 787981 - DNA, 15 bp, Homo sapiens
aaatagccaaagcaa

SEQ ID NO: 787982 - DNA, 15 bp, Homo sapiens
aatagccaaagcaat

SEQ ID NO: 787983 - DNA, 15 bp, Homo sapiens
atagccaaagcaatt

SEQ ID NO: 787984 - DNA, 15 bp, Homo sapiens
tagccaaagcaattc

SEQ ID NO: 787985 - DNA, 15 bp, Homo sapiens
agccaaagcaattct

SEQ ID NO: 787986 - DNA, 15 bp, Homo sapiens
gccaaagcaattcta

SEQ ID NO: 787987 - DNA, 15 bp, Homo sapiens
ccaaagcaattctaa

SEQ ID NO: 787988 - DNA, 15 bp, Homo sapiens
caaagcaattctaag

SEQ ID NO: 787989 - DNA, 15 bp, Homo sapiens
aaagcaattctaagc

SEQ ID NO: 787990 - DNA, 15 bp, Homo sapiens
aagcaattctaagca

SEQ ID NO: 787991 - DNA, 15 bp, Homo sapiens
agcaattctaagcaa

SEQ ID NO: 787992 - DNA, 15 bp, Homo sapiens
gcaattctaagcaaa

SEQ ID NO: 787993 - DNA, 15 bp, Homo sapiens
caattctaagcaaaa

SEQ ID NO: 787994 - DNA, 15 bp, Homo sapiens
aattctaagcaaaaa

SEQ ID NO: 787995 - DNA, 15 bp, Homo sapiens
attctaagcaaaaag

SEQ ID NO: 787996 - DNA, 15 bp, Homo sapiens
ttctaagcaaaaagt

SEQ ID NO: 787997 - DNA, 15 bp, Homo sapiens
tctaagcaaaaagta

SEQ ID NO: 787998 - DNA, 15 bp, Homo sapiens
ctaagcaaaaagtac

SEQ ID NO: 787999 - DNA, 15 bp, Homo sapiens
taagcaaaaagtaca

SEQ ID NO: 788000 - DNA, 15 bp, Homo sapiens
aagcaaaaagtacaa

SEQ ID NO: 788001 - DNA, 15 bp, Homo sapiens
agcaaaaagtacaaa

SEQ ID NO: 788002 - DNA, 15 bp, Homo sapiens
gcaaaaagtacaaag

SEQ ID NO: 788003 - DNA, 15 bp, Homo sapiens
caaaaagtacaaagc

SEQ ID NO: 788004 - DNA, 15 bp, Homo sapiens
aaaaagtacaaagct

SEQ ID NO: 788005 - DNA, 15 bp, Homo sapiens
aaaagtacaaagctg

SEQ ID NO: 788006 - DNA, 15 bp, Homo sapiens
aaagtacaaagctgg

SEQ ID NO: 788007 - DNA, 15 bp, Homo sapiens
aagtacaaagctgga

SEQ ID NO: 788008 - DNA, 15 bp, Homo sapiens
agtacaaagctggag

SEQ ID NO: 788009 - DNA, 15 bp, Homo sapiens
gtacaaagctggagg

SEQ ID NO: 788010 - DNA, 15 bp, Homo sapiens
tacaaagctggaggc

SEQ ID NO: 788011 - DNA, 15 bp, Homo sapiens
acaaagctggaggca

SEQ ID NO: 788012 - DNA, 15 bp, Homo sapiens
caaagctggaggcat

SEQ ID NO: 788013 - DNA, 15 bp, Homo sapiens
aaagctggaggcatc

SEQ ID NO: 788014 - DNA, 15 bp, Homo sapiens
aagctggaggcatca

SEQ ID NO: 788015 - DNA, 15 bp, Homo sapiens
agctggaggcatcat

SEQ ID NO: 788016 - DNA, 15 bp, Homo sapiens
gctggaggcatcata

SEQ ID NO: 788017 - DNA, 15 bp, Homo sapiens
ctggaggcatcatac

SEQ ID NO: 788018 - DNA, 15 bp, Homo sapiens
tggaggcatcatact

SEQ ID NO: 788019 - DNA, 15 bp, Homo sapiens
ggaggcatcatacta

SEQ ID NO: 788020 - DNA, 15 bp, Homo sapiens
gaggcatcatactat

SEQ ID NO: 788021 - DNA, 15 bp, Homo sapiens
aggcatcatactata

SEQ ID NO: 788022 - DNA, 15 bp, Homo sapiens
ggcatcatactataa

SEQ ID NO: 788023 - DNA, 15 bp, Homo sapiens
gcatcatactataag

SEQ ID NO: 788024 - DNA, 15 bp, Homo sapiens
catcatactataagc

SEQ ID NO: 788025 - DNA, 15 bp, Homo sapiens
atcatactataagct

SEQ ID NO: 788026 - DNA, 15 bp, Homo sapiens
tcatactataagcta

SEQ ID NO: 788027 - DNA, 15 bp, Homo sapiens
catactataagctat

SEQ ID NO: 788028 - DNA, 15 bp, Homo sapiens
atactataagctatt

SEQ ID NO: 788029 - DNA, 15 bp, Homo sapiens
tactataagctattg

SEQ ID NO: 788030 - DNA, 15 bp, Homo sapiens
actataagctattgt

SEQ ID NO: 788031 - DNA, 15 bp, Homo sapiens
ctataagctattgta

SEQ ID NO: 788032 - DNA, 15 bp, Homo sapiens
tataagctattgtaa

SEQ ID NO: 788033 - DNA, 15 bp, Homo sapiens
ataagctattgtaac

SEQ ID NO: 788034 - DNA, 15 bp, Homo sapiens
taagctattgtaacc

SEQ ID NO: 788035 - DNA, 15 bp, Homo sapiens
aagctattgtaaccc

SEQ ID NO: 788036 - DNA, 15 bp, Homo sapiens
agctattgtaaccca

SEQ ID NO: 788037 - DNA, 15 bp, Homo sapiens
gctattgtaacccaa

SEQ ID NO: 788038 - DNA, 15 bp, Homo sapiens
ctattgtaacccaaa

SEQ ID NO: 788039 - DNA, 15 bp, Homo sapiens
tattgtaacccaaac

SEQ ID NO: 788040 - DNA, 15 bp, Homo sapiens
attgtaacccaaact

SEQ ID NO: 788041 - DNA, 15 bp, Homo sapiens
ttgtaacccaaactg

SEQ ID NO: 788042 - DNA, 15 bp, Homo sapiens
tgtaacccaaactgc

SEQ ID NO: 788043 - DNA, 15 bp, Homo sapiens
gtaacccaaactgca

SEQ ID NO: 788044 - DNA, 15 bp, Homo sapiens
taacccaaactgcat

SEQ ID NO: 788045 - DNA, 15 bp, Homo sapiens
aacccaaactgcatg

SEQ ID NO: 788046 - DNA, 15 bp, Homo sapiens
acccaaactgcatgg

SEQ ID NO: 788047 - DNA, 15 bp, Homo sapiens
cccaaactgcatggt

SEQ ID NO: 788048 - DNA, 15 bp, Homo sapiens
ccaaactgcatggta

SEQ ID NO: 788049 - DNA, 15 bp, Homo sapiens
caaactgcatggtac

SEQ ID NO: 788050 - DNA, 15 bp, Homo sapiens
aaactgcatggtact

SEQ ID NO: 788051 - DNA, 15 bp, Homo sapiens
aactgcatggtactg

SEQ ID NO: 788052 - DNA, 15 bp, Homo sapiens
actgcatggtactgg

SEQ ID NO: 788053 - DNA, 15 bp, Homo sapiens
ctgcatggtactggc

SEQ ID NO: 788054 - DNA, 15 bp, Homo sapiens
tgcatggtactggca

SEQ ID NO: 788055 - DNA, 15 bp, Homo sapiens
catggtactggcatc

SEQ ID NO: 788056 - DNA, 15 bp, Homo sapiens
atggtactggcatca

SEQ ID NO: 788057 - DNA, 15 bp, Homo sapiens
tggtactggcatcaa

SEQ ID NO: 788058 - DNA, 15 bp, Homo sapiens
ggtactggcatcaaa

SEQ ID NO: 788059 - DNA, 15 bp, Homo sapiens
gtactggcatcaaaa

SEQ ID NO: 788060 - DNA, 15 bp, Homo sapiens
tactggcatcaaaac

SEQ ID NO: 788061 - DNA, 15 bp, Homo sapiens
actggcatcaaaaca

SEQ ID NO: 788062 - DNA, 15 bp, Homo sapiens
ctggcatcaaaacag

SEQ ID NO: 788063 - DNA, 15 bp, Homo sapiens
tggcatcaaaacaga

SEQ ID NO: 788064 - DNA, 15 bp, Homo sapiens
ggcatcaaaacagac

SEQ ID NO: 788065 - DNA, 15 bp, Homo sapiens
gcatcaaaacagaca

SEQ ID NO: 788066 - DNA, 15 bp, Homo sapiens
catcaaaacagacac

SEQ ID NO: 788067 - DNA, 15 bp, Homo sapiens
atcaaaacagacaca

SEQ ID NO: 788068 - DNA, 15 bp, Homo sapiens
tcaaaacagacacac

SEQ ID NO: 788069 - DNA, 15 bp, Homo sapiens
caaaacagacacaca

SEQ ID NO: 788070 - DNA, 15 bp, Homo sapiens
aaaacagacacacaa

SEQ ID NO: 788071 - DNA, 15 bp, Homo sapiens
aaacagacacacaaa

SEQ ID NO: 788072 - DNA, 15 bp, Homo sapiens
aacagacacacaaac

SEQ ID NO: 788073 - DNA, 15 bp, Homo sapiens
acagacacacaaacc

SEQ ID NO: 788074 - DNA, 15 bp, Homo sapiens
cagacacacaaaccg

SEQ ID NO: 788075 - DNA, 15 bp, Homo sapiens
agacacacaaaccga

SEQ ID NO: 788076 - DNA, 15 bp, Homo sapiens
gacacacaaaccgat

SEQ ID NO: 788077 - DNA, 15 bp, Homo sapiens
acacacaaaccgatg

SEQ ID NO: 788078 - DNA, 15 bp, Homo sapiens
cacacaaaccgatgg

SEQ ID NO: 788079 - DNA, 15 bp, Homo sapiens
acacaaaccgatgga

SEQ ID NO: 788080 - DNA, 15 bp, Homo sapiens
cacaaaccgatggaa

SEQ ID NO: 788081 - DNA, 15 bp, Homo sapiens
acaaaccgatggaac

SEQ ID NO: 788082 - DNA, 15 bp, Homo sapiens
caaaccgatggaaca

SEQ ID NO: 788083 - DNA, 15 bp, Homo sapiens
aaaccgatggaacag

SEQ ID NO: 788084 - DNA, 15 bp, Homo sapiens
aaccgatggaacaga

SEQ ID NO: 788085 - DNA, 15 bp, Homo sapiens
accgatggaacagaa

SEQ ID NO: 788086 - DNA, 15 bp, Homo sapiens
ccgatggaacagaat

SEQ ID NO: 788087 - DNA, 15 bp, Homo sapiens
cgatggaacagaata

SEQ ID NO: 788088 - DNA, 15 bp, Homo sapiens
gatggaacagaataa

SEQ ID NO: 788089 - DNA, 15 bp, Homo sapiens
atggaacagaataaa

SEQ ID NO: 788090 - DNA, 15 bp, Homo sapiens
tggaacagaataaag

SEQ ID NO: 788091 - DNA, 15 bp, Homo sapiens
ggaacagaataaaga

SEQ ID NO: 788092 - DNA, 15 bp, Homo sapiens
gaacagaataaagaa

SEQ ID NO: 788093 - DNA, 15 bp, Homo sapiens
aacagaataaagaag

SEQ ID NO: 788094 - DNA, 15 bp, Homo sapiens
acagaataaagaagc

SEQ ID NO: 788095 - DNA, 15 bp, Homo sapiens
cagaataaagaagcc

SEQ ID NO: 788096 - DNA, 15 bp, Homo sapiens
agaataaagaagcca

SEQ ID NO: 788097 - DNA, 15 bp, Homo sapiens
gaataaagaagccag

SEQ ID NO: 788098 - DNA, 15 bp, Homo sapiens
aataaagaagccaga

SEQ ID NO: 788099 - DNA, 15 bp, Homo sapiens
ataaagaagccagaa

SEQ ID NO: 788100 - DNA, 15 bp, Homo sapiens
taaagaagccagaaa

SEQ ID NO: 788101 - DNA, 15 bp, Homo sapiens
aaagaagccagaaat

SEQ ID NO: 788102 - DNA, 15 bp, Homo sapiens
aagaagccagaaatt

SEQ ID NO: 788103 - DNA, 15 bp, Homo sapiens
agaagccagaaattc

SEQ ID NO: 788104 - DNA, 15 bp, Homo sapiens
gaagccagaaattca

SEQ ID NO: 788105 - DNA, 15 bp, Homo sapiens
aagccagaaattcat

SEQ ID NO: 788106 - DNA, 15 bp, Homo sapiens
agccagaaattcatc

SEQ ID NO: 788107 - DNA, 15 bp, Homo sapiens
gccagaaattcatcc

SEQ ID NO: 788108 - DNA, 15 bp, Homo sapiens
ccagaaattcatcca

SEQ ID NO: 788109 - DNA, 15 bp, Homo sapiens
cagaaattcatccac

SEQ ID NO: 788110 - DNA, 15 bp, Homo sapiens
agaaattcatccaca

SEQ ID NO: 788111 - DNA, 15 bp, Homo sapiens
gaaattcatccacat

SEQ ID NO: 788112 - DNA, 15 bp, Homo sapiens
aaattcatccacata

SEQ ID NO: 788113 - DNA, 15 bp, Homo sapiens
aattcatccacatat

SEQ ID NO: 788114 - DNA, 15 bp, Homo sapiens
attcatccacatatc

SEQ ID NO: 788115 - DNA, 15 bp, Homo sapiens
ttcatccacatatct

SEQ ID NO: 788116 - DNA, 15 bp, Homo sapiens
tcatccacatatcta

SEQ ID NO: 788117 - DNA, 15 bp, Homo sapiens
catccacatatctac

SEQ ID NO: 788118 - DNA, 15 bp, Homo sapiens
atccacatatctaca

SEQ ID NO: 788119 - DNA, 15 bp, Homo sapiens
tccacatatctacag

SEQ ID NO: 788120 - DNA, 15 bp, Homo sapiens
ccacatatctacagc

SEQ ID NO: 788121 - DNA, 15 bp, Homo sapiens
cacatatctacagcc

SEQ ID NO: 788122 - DNA, 15 bp, Homo sapiens
acatatctacagcca

SEQ ID NO: 788123 - DNA, 15 bp, Homo sapiens
catatctacagccaa

SEQ ID NO: 788124 - DNA, 15 bp, Homo sapiens
atatctacagccaac

SEQ ID NO: 788125 - DNA, 15 bp, Homo sapiens
tatctacagccaact

SEQ ID NO: 788126 - DNA, 15 bp, Homo sapiens
atctacagccaactg

SEQ ID NO: 788127 - DNA, 15 bp, Homo sapiens
tctacagccaactga

SEQ ID NO: 788128 - DNA, 15 bp, Homo sapiens
ctacagccaactgat

SEQ ID NO: 788129 - DNA, 15 bp, Homo sapiens
tacagccaactgatt

SEQ ID NO: 788130 - DNA, 15 bp, Homo sapiens
acagccaactgattt

SEQ ID NO: 788131 - DNA, 15 bp, Homo sapiens
cagccaactgatttt

SEQ ID NO: 788132 - DNA, 15 bp, Homo sapiens
agccaactgattttg

SEQ ID NO: 788133 - DNA, 15 bp, Homo sapiens
gccaactgattttga

SEQ ID NO: 788134 - DNA, 15 bp, Homo sapiens
ccaactgattttgac

SEQ ID NO: 788135 - DNA, 15 bp, Homo sapiens
caactgattttgaca

SEQ ID NO: 788136 - DNA, 15 bp, Homo sapiens
aactgattttgacaa

SEQ ID NO: 788137 - DNA, 15 bp, Homo sapiens
actgattttgacaaa

SEQ ID NO: 788138 - DNA, 15 bp, Homo sapiens
ctgattttgacaaag

SEQ ID NO: 788139 - DNA, 15 bp, Homo sapiens
tgattttgacaaagg

SEQ ID NO: 788140 - DNA, 15 bp, Homo sapiens
gattttgacaaaggt

SEQ ID NO: 788141 - DNA, 15 bp, Homo sapiens
attttgacaaaggtg

SEQ ID NO: 788142 - DNA, 15 bp, Homo sapiens
ttttgacaaaggtgc

SEQ ID NO: 788143 - DNA, 15 bp, Homo sapiens
tttgacaaaggtgcc

SEQ ID NO: 788144 - DNA, 15 bp, Homo sapiens
ttgacaaaggtgcca

SEQ ID NO: 788145 - DNA, 15 bp, Homo sapiens
tgacaaaggtgccaa

SEQ ID NO: 788146 - DNA, 15 bp, Homo sapiens
gacaaaggtgccaag

SEQ ID NO: 788147 - DNA, 15 bp, Homo sapiens
acaaaggtgccaaga

SEQ ID NO: 788148 - DNA, 15 bp, Homo sapiens
caaaggtgccaagaa

SEQ ID NO: 788149 - DNA, 15 bp, Homo sapiens
aaaggtgccaagaac

SEQ ID NO: 788150 - DNA, 15 bp, Homo sapiens
aaggtgccaagaacc

SEQ ID NO: 788151 - DNA, 15 bp, Homo sapiens
aggtgccaagaaccg

SEQ ID NO: 788152 - DNA, 15 bp, Homo sapiens
ggtgccaagaaccgt

SEQ ID NO: 788153 - DNA, 15 bp, Homo sapiens
gtgccaagaaccgtt

SEQ ID NO: 788154 - DNA, 15 bp, Homo sapiens
tgccaagaaccgttg

SEQ ID NO: 788155 - DNA, 15 bp, Homo sapiens
gccaagaaccgttgt

SEQ ID NO: 788156 - DNA, 15 bp, Homo sapiens
ccaagaaccgttgtc

SEQ ID NO: 788157 - DNA, 15 bp, Homo sapiens
caagaaccgttgtca

SEQ ID NO: 788158 - DNA, 15 bp, Homo sapiens
aagaaccgttgtcac

SEQ ID NO: 788159 - DNA, 15 bp, Homo sapiens
agaaccgttgtcact

SEQ ID NO: 788160 - DNA, 15 bp, Homo sapiens
gaaccgttgtcactg

SEQ ID NO: 788161 - DNA, 15 bp, Homo sapiens
aaccgttgtcactgg

SEQ ID NO: 788162 - DNA, 15 bp, Homo sapiens
accgttgtcactgga

SEQ ID NO: 788163 - DNA, 15 bp, Homo sapiens
ccgttgtcactggag

SEQ ID NO: 788164 - DNA, 15 bp, Homo sapiens
cgttgtcactggaga

SEQ ID NO: 788165 - DNA, 15 bp, Homo sapiens
gttgtcactggagaa

SEQ ID NO: 788166 - DNA, 15 bp, Homo sapiens
ttgtcactggagaaa

SEQ ID NO: 788167 - DNA, 15 bp, Homo sapiens
tgtcactggagaaag

SEQ ID NO: 788168 - DNA, 15 bp, Homo sapiens
gtcactggagaaagg

SEQ ID NO: 788169 - DNA, 15 bp, Homo sapiens
tcactggagaaagga

SEQ ID NO: 788170 - DNA, 15 bp, Homo sapiens
cactggagaaaggac

SEQ ID NO: 788171 - DNA, 15 bp, Homo sapiens
actggagaaaggaca

SEQ ID NO: 788172 - DNA, 15 bp, Homo sapiens
ctggagaaaggacag

SEQ ID NO: 788173 - DNA, 15 bp, Homo sapiens
tggagaaaggacagt

SEQ ID NO: 788174 - DNA, 15 bp, Homo sapiens
ggagaaaggacagtc

SEQ ID NO: 788175 - DNA, 15 bp, Homo sapiens
gagaaaggacagtct

SEQ ID NO: 788176 - DNA, 15 bp, Homo sapiens
agaaaggacagtctc

SEQ ID NO: 788177 - DNA, 15 bp, Homo sapiens
gaaaggacagtctct

SEQ ID NO: 788178 - DNA, 15 bp, Homo sapiens
aaaggacagtctctt

SEQ ID NO: 788179 - DNA, 15 bp, Homo sapiens
aaggacagtctcttc

SEQ ID NO: 788180 - DNA, 15 bp, Homo sapiens
aggacagtctcttca

SEQ ID NO: 788181 - DNA, 15 bp, Homo sapiens
gacagtctcttcaaa

SEQ ID NO: 788182 - DNA, 15 bp, Homo sapiens
acagtctcttcaaaa

SEQ ID NO: 788183 - DNA, 15 bp, Homo sapiens
cagtctcttcaaaaa

SEQ ID NO: 788184 - DNA, 15 bp, Homo sapiens
agtctcttcaaaaag

SEQ ID NO: 788185 - DNA, 15 bp, Homo sapiens
gtctcttcaaaaagt

SEQ ID NO: 788186 - DNA, 15 bp, Homo sapiens
tctcttcaaaaagtg

SEQ ID NO: 788187 - DNA, 15 bp, Homo sapiens
ctcttcaaaaagtgg

SEQ ID NO: 788188 - DNA, 15 bp, Homo sapiens
tcttcaaaaagtggt

SEQ ID NO: 788189 - DNA, 15 bp, Homo sapiens
cttcaaaaagtggtg

SEQ ID NO: 788190 - DNA, 15 bp, Homo sapiens
ttcaaaaagtggtgt

SEQ ID NO: 788191 - DNA, 15 bp, Homo sapiens
tcaaaaagtggtgtt

SEQ ID NO: 788192 - DNA, 15 bp, Homo sapiens
caaaaagtggtgttg

SEQ ID NO: 788193 - DNA, 15 bp, Homo sapiens
aaaaagtggtgttgg

SEQ ID NO: 788194 - DNA, 15 bp, Homo sapiens
aaaagtggtgttggg

SEQ ID NO: 788195 - DNA, 15 bp, Homo sapiens
aaagtggtgttgggg

SEQ ID NO: 788196 - DNA, 15 bp, Homo sapiens
aagtggtgttgggga

SEQ ID NO: 788197 - DNA, 15 bp, Homo sapiens
agtggtgttggggaa

SEQ ID NO: 788198 - DNA, 15 bp, Homo sapiens
gtggtgttggggaaa

SEQ ID NO: 788199 - DNA, 15 bp, Homo sapiens
tggtgttggggaaac

SEQ ID NO: 788200 - DNA, 15 bp, Homo sapiens
ggtgttggggaaact

SEQ ID NO: 788201 - DNA, 15 bp, Homo sapiens
gtgttggggaaactg

SEQ ID NO: 788202 - DNA, 15 bp, Homo sapiens
tgttggggaaactgg

SEQ ID NO: 788203 - DNA, 15 bp, Homo sapiens
gttggggaaactgga

SEQ ID NO: 788204 - DNA, 15 bp, Homo sapiens
ttggggaaactggat

SEQ ID NO: 788205 - DNA, 15 bp, Homo sapiens
tggggaaactggata

SEQ ID NO: 788206 - DNA, 15 bp, Homo sapiens
ggggaaactggatat

SEQ ID NO: 788207 - DNA, 15 bp, Homo sapiens
gggaaactggatatt

SEQ ID NO: 788208 - DNA, 15 bp, Homo sapiens
ggaaactggatattc

SEQ ID NO: 788209 - DNA, 15 bp, Homo sapiens
gaaactggatattca

SEQ ID NO: 788210 - DNA, 15 bp, Homo sapiens
aaactggatattcat

SEQ ID NO: 788211 - DNA, 15 bp, Homo sapiens
aactggatattcata

SEQ ID NO: 788212 - DNA, 15 bp, Homo sapiens
actggatattcatac

SEQ ID NO: 788213 - DNA, 15 bp, Homo sapiens
ctggatattcataca

SEQ ID NO: 788214 - DNA, 15 bp, Homo sapiens
tggatattcatacac

SEQ ID NO: 788215 - DNA, 15 bp, Homo sapiens
ggatattcatacaca

SEQ ID NO: 788216 - DNA, 15 bp, Homo sapiens
gatattcatacacaa

SEQ ID NO: 788217 - DNA, 15 bp, Homo sapiens
atattcatacacaaa

SEQ ID NO: 788218 - DNA, 15 bp, Homo sapiens
tattcatacacaaaa

SEQ ID NO: 788219 - DNA, 15 bp, Homo sapiens
attcatacacaaaag

SEQ ID NO: 788220 - DNA, 15 bp, Homo sapiens
ttcatacacaaaaga

SEQ ID NO: 788221 - DNA, 15 bp, Homo sapiens
tcatacacaaaagaa

SEQ ID NO: 788222 - DNA, 15 bp, Homo sapiens
catacacaaaagaat

SEQ ID NO: 788223 - DNA, 15 bp, Homo sapiens
atacacaaaagaata

SEQ ID NO: 788224 - DNA, 15 bp, Homo sapiens
tacacaaaagaataa

SEQ ID NO: 788225 - DNA, 15 bp, Homo sapiens
acacaaaagaataaa

SEQ ID NO: 788226 - DNA, 15 bp, Homo sapiens
cacaaaagaataaaa

SEQ ID NO: 788227 - DNA, 15 bp, Homo sapiens
acaaaagaataaaac

SEQ ID NO: 788228 - DNA, 15 bp, Homo sapiens
caaaagaataaaact

SEQ ID NO: 788229 - DNA, 15 bp, Homo sapiens
aaaagaataaaacta

SEQ ID NO: 788230 - DNA, 15 bp, Homo sapiens
aaagaataaaactag

SEQ ID NO: 788231 - DNA, 15 bp, Homo sapiens
aagaataaaactaga

SEQ ID NO: 788232 - DNA, 15 bp, Homo sapiens
agaataaaactagac

SEQ ID NO: 788233 - DNA, 15 bp, Homo sapiens
gaataaaactagacc

SEQ ID NO: 788234 - DNA, 15 bp, Homo sapiens
aataaaactagaccc

SEQ ID NO: 788235 - DNA, 15 bp, Homo sapiens
ataaaactagacccc

SEQ ID NO: 788236 - DNA, 15 bp, Homo sapiens
taaaactagaccccc

SEQ ID NO: 788237 - DNA, 15 bp, Homo sapiens
aaaactagacccccc

SEQ ID NO: 788238 - DNA, 15 bp, Homo sapiens
aaactagaccccccc

SEQ ID NO: 788239 - DNA, 15 bp, Homo sapiens
aactagaccccccca

SEQ ID NO: 788240 - DNA, 15 bp, Homo sapiens
actagacccccccac

SEQ ID NO: 788241 - DNA, 15 bp, Homo sapiens
ctagacccccccacc

SEQ ID NO: 788242 - DNA, 15 bp, Homo sapiens
tagacccccccacct

SEQ ID NO: 788243 - DNA, 15 bp, Homo sapiens
agacccccccacctc

SEQ ID NO: 788244 - DNA, 15 bp, Homo sapiens
gacccccccacctct

SEQ ID NO: 788245 - DNA, 15 bp, Homo sapiens
acccccccacctctc

SEQ ID NO: 788246 - DNA, 15 bp, Homo sapiens
cccccccacctctca

SEQ ID NO: 788247 - DNA, 15 bp, Homo sapiens
ccccccacctctcac

SEQ ID NO: 788248 - DNA, 15 bp, Homo sapiens
cccccacctctcacc

SEQ ID NO: 788249 - DNA, 15 bp, Homo sapiens
ccccacctctcaccc

SEQ ID NO: 788250 - DNA, 15 bp, Homo sapiens
cccacctctcaccct

SEQ ID NO: 788251 - DNA, 15 bp, Homo sapiens
ccacctctcaccctc

SEQ ID NO: 788252 - DNA, 15 bp, Homo sapiens
cacctctcaccctct

SEQ ID NO: 788253 - DNA, 15 bp, Homo sapiens
acctctcaccctcta

SEQ ID NO: 788254 - DNA, 15 bp, Homo sapiens
cctctcaccctctat

SEQ ID NO: 788255 - DNA, 15 bp, Homo sapiens
ctctcaccctctatt

SEQ ID NO: 788256 - DNA, 15 bp, Homo sapiens
tctcaccctctattt

SEQ ID NO: 788257 - DNA, 15 bp, Homo sapiens
ctcaccctctatttt

SEQ ID NO: 788258 - DNA, 15 bp, Homo sapiens
tcaccctctatttta

SEQ ID NO: 788259 - DNA, 15 bp, Homo sapiens
caccctctattttat

SEQ ID NO: 788260 - DNA, 15 bp, Homo sapiens
accctctattttatt

SEQ ID NO: 788261 - DNA, 15 bp, Homo sapiens
ccctctattttattg

SEQ ID NO: 788262 - DNA, 15 bp, Homo sapiens
cctctattttattgt

SEQ ID NO: 788263 - DNA, 15 bp, Homo sapiens
ctctattttattgtt

SEQ ID NO: 788264 - DNA, 15 bp, Homo sapiens
tctattttattgttt

SEQ ID NO: 788265 - DNA, 15 bp, Homo sapiens
ctattttattgtttt

SEQ ID NO: 788266 - DNA, 15 bp, Homo sapiens
tattttattgttttt

SEQ ID NO: 788267 - DNA, 15 bp, Homo sapiens
attttattgttttta

SEQ ID NO: 788268 - DNA, 15 bp, Homo sapiens
ttttattgtttttag

SEQ ID NO: 788269 - DNA, 15 bp, Homo sapiens
tttattgtttttagt

SEQ ID NO: 788270 - DNA, 15 bp, Homo sapiens
ttattgtttttagtt

SEQ ID NO: 788271 - DNA, 15 bp, Homo sapiens
tattgtttttagttt

SEQ ID NO: 788272 - DNA, 15 bp, Homo sapiens
attgtttttagtttt

SEQ ID NO: 788273 - DNA, 15 bp, Homo sapiens
ttgtttttagttttg

SEQ ID NO: 788274 - DNA, 15 bp, Homo sapiens
tgtttttagttttgt

SEQ ID NO: 788275 - DNA, 15 bp, Homo sapiens
gtttttagttttgtt

SEQ ID NO: 788276 - DNA, 15 bp, Homo sapiens
tttttagttttgttt

SEQ ID NO: 788277 - DNA, 15 bp, Homo sapiens
ttttagttttgtttt

SEQ ID NO: 788278 - DNA, 15 bp, Homo sapiens
tttagttttgttttt

SEQ ID NO: 788279 - DNA, 15 bp, Homo sapiens
ttagttttgtttttt

SEQ ID NO: 788280 - DNA, 15 bp, Homo sapiens
tagttttgttttttg

SEQ ID NO: 788281 - DNA, 15 bp, Homo sapiens
agttttgttttttga

SEQ ID NO: 788282 - DNA, 15 bp, Homo sapiens
gttttgttttttgaa

SEQ ID NO: 788283 - DNA, 15 bp, Homo sapiens
ttttgttttttgaat

SEQ ID NO: 788284 - DNA, 15 bp, Homo sapiens
tttgttttttgaatt

SEQ ID NO: 788285 - DNA, 15 bp, Homo sapiens
ttgttttttgaatta

SEQ ID NO: 788286 - DNA, 15 bp, Homo sapiens
tgttttttgaattat

SEQ ID NO: 788287 - DNA, 15 bp, Homo sapiens
gttttttgaattatc

SEQ ID NO: 788288 - DNA, 15 bp, Homo sapiens
ttttttgaattatct

SEQ ID NO: 788289 - DNA, 15 bp, Homo sapiens
tttttgaattatcta

SEQ ID NO: 788290 - DNA, 15 bp, Homo sapiens
ttttgaattatctaa

SEQ ID NO: 788291 - DNA, 15 bp, Homo sapiens
tttgaattatctaat

SEQ ID NO: 788292 - DNA, 15 bp, Homo sapiens
ttgaattatctaata

SEQ ID NO: 788293 - DNA, 15 bp, Homo sapiens
tgaattatctaatat

SEQ ID NO: 788294 - DNA, 15 bp, Homo sapiens
gaattatctaatatt

SEQ ID NO: 788295 - DNA, 15 bp, Homo sapiens
aattatctaatattc

SEQ ID NO: 788296 - DNA, 15 bp, Homo sapiens
attatctaatattca

SEQ ID NO: 788297 - DNA, 15 bp, Homo sapiens
ttatctaatattcag

SEQ ID NO: 788298 - DNA, 15 bp, Homo sapiens
tatctaatattcagc

SEQ ID NO: 788299 - DNA, 15 bp, Homo sapiens
atctaatattcagct

SEQ ID NO: 788300 - DNA, 15 bp, Homo sapiens
tctaatattcagctg

SEQ ID NO: 788301 - DNA, 15 bp, Homo sapiens
ctaatattcagctgc

SEQ ID NO: 788302 - DNA, 15 bp, Homo sapiens
taatattcagctgca

SEQ ID NO: 788303 - DNA, 15 bp, Homo sapiens
aatattcagctgcat

SEQ ID NO: 788304 - DNA, 15 bp, Homo sapiens
atattcagctgcata

SEQ ID NO: 788305 - DNA, 15 bp, Homo sapiens
tattcagctgcataa

SEQ ID NO: 788306 - DNA, 15 bp, Homo sapiens
attcagctgcataaa

SEQ ID NO: 788307 - DNA, 15 bp, Homo sapiens
ttcagctgcataaat

SEQ ID NO: 788308 - DNA, 15 bp, Homo sapiens
tcagctgcataaata

SEQ ID NO: 788309 - DNA, 15 bp, Homo sapiens
cagctgcataaataa

SEQ ID NO: 788310 - DNA, 15 bp, Homo sapiens
agctgcataaataag

SEQ ID NO: 788311 - DNA, 15 bp, Homo sapiens
gctgcataaataaga

SEQ ID NO: 788312 - DNA, 15 bp, Homo sapiens
ctgcataaataagat

SEQ ID NO: 788313 - DNA, 15 bp, Homo sapiens
tgcataaataagatg

SEQ ID NO: 788314 - DNA, 15 bp, Homo sapiens
gcataaataagatga

SEQ ID NO: 788315 - DNA, 15 bp, Homo sapiens
cataaataagatgat

SEQ ID NO: 788316 - DNA, 15 bp, Homo sapiens
ataaataagatgatt

SEQ ID NO: 788317 - DNA, 15 bp, Homo sapiens
taaataagatgattt

SEQ ID NO: 788318 - DNA, 15 bp, Homo sapiens
aaataagatgatttc

SEQ ID NO: 788319 - DNA, 15 bp, Homo sapiens
aataagatgatttca

SEQ ID NO: 788320 - DNA, 15 bp, Homo sapiens
ataagatgatttcag

SEQ ID NO: 788321 - DNA, 15 bp, Homo sapiens
taagatgatttcaga

SEQ ID NO: 788322 - DNA, 15 bp, Homo sapiens
aagatgatttcagaa

SEQ ID NO: 788323 - DNA, 15 bp, Homo sapiens
agatgatttcagaat

SEQ ID NO: 788324 - DNA, 15 bp, Homo sapiens
gatgatttcagaatg

SEQ ID NO: 788325 - DNA, 15 bp, Homo sapiens
atgatttcagaatgt

SEQ ID NO: 788326 - DNA, 15 bp, Homo sapiens
tgatttcagaatgtg

SEQ ID NO: 788327 - DNA, 15 bp, Homo sapiens
gatttcagaatgtga

SEQ ID NO: 788328 - DNA, 15 bp, Homo sapiens
atttcagaatgtgat

SEQ ID NO: 788329 - DNA, 15 bp, Homo sapiens
tttcagaatgtgata

SEQ ID NO: 788330 - DNA, 15 bp, Homo sapiens
ttcagaatgtgatag

SEQ ID NO: 788331 - DNA, 15 bp, Homo sapiens
tcagaatgtgataga

SEQ ID NO: 788332 - DNA, 15 bp, Homo sapiens
cagaatgtgatagaa

SEQ ID NO: 788333 - DNA, 15 bp, Homo sapiens
agaatgtgatagaaa

SEQ ID NO: 788334 - DNA, 15 bp, Homo sapiens
gaatgtgatagaaac

SEQ ID NO: 788335 - DNA, 15 bp, Homo sapiens
aatgtgatagaaaca

SEQ ID NO: 788336 - DNA, 15 bp, Homo sapiens
atgtgatagaaacaa

SEQ ID NO: 788337 - DNA, 15 bp, Homo sapiens
tgtgatagaaacaat

SEQ ID NO: 788338 - DNA, 15 bp, Homo sapiens
gtgatagaaacaatg

SEQ ID NO: 788339 - DNA, 15 bp, Homo sapiens
tgatagaaacaatgg

SEQ ID NO: 788340 - DNA, 15 bp, Homo sapiens
gatagaaacaatgga

SEQ ID NO: 788341 - DNA, 15 bp, Homo sapiens
atagaaacaatggaa

SEQ ID NO: 788342 - DNA, 15 bp, Homo sapiens
tagaaacaatggaaa

SEQ ID NO: 788343 - DNA, 15 bp, Homo sapiens
agaaacaatggaaaa

SEQ ID NO: 788344 - DNA, 15 bp, Homo sapiens
gaaacaatggaaaat

SEQ ID NO: 788345 - DNA, 15 bp, Homo sapiens
aaacaatggaaaatg

SEQ ID NO: 788346 - DNA, 15 bp, Homo sapiens
aacaatggaaaatgg

SEQ ID NO: 788347 - DNA, 15 bp, Homo sapiens
acaatggaaaatggt

SEQ ID NO: 788348 - DNA, 15 bp, Homo sapiens
caatggaaaatggtg

SEQ ID NO: 788349 - DNA, 15 bp, Homo sapiens
aatggaaaatggtga

SEQ ID NO: 788350 - DNA, 15 bp, Homo sapiens
atggaaaatggtgat

SEQ ID NO: 788351 - DNA, 15 bp, Homo sapiens
tggaaaatggtgata

SEQ ID NO: 788352 - DNA, 15 bp, Homo sapiens
ggaaaatggtgatat

SEQ ID NO: 788353 - DNA, 15 bp, Homo sapiens
gaaaatggtgatatg

SEQ ID NO: 788354 - DNA, 15 bp, Homo sapiens
aaaatggtgatatga

SEQ ID NO: 788355 - DNA, 15 bp, Homo sapiens
aaatggtgatatgag

SEQ ID NO: 788356 - DNA, 15 bp, Homo sapiens
aatggtgatatgagg

SEQ ID NO: 788357 - DNA, 15 bp, Homo sapiens
atggtgatatgaggg

SEQ ID NO: 788358 - DNA, 15 bp, Homo sapiens
tggtgatatgagggg

SEQ ID NO: 788359 - DNA, 15 bp, Homo sapiens
ggtgatatgaggggg

SEQ ID NO: 788360 - DNA, 15 bp, Homo sapiens
gtgatatgagggggt

SEQ ID NO: 788361 - DNA, 15 bp, Homo sapiens
tgatatgagggggtg

SEQ ID NO: 788362 - DNA, 15 bp, Homo sapiens
gatatgagggggtgg

SEQ ID NO: 788363 - DNA, 15 bp, Homo sapiens
atatgagggggtggg

SEQ ID NO: 788364 - DNA, 15 bp, Homo sapiens
tatgagggggtgggt

SEQ ID NO: 788365 - DNA, 15 bp, Homo sapiens
atgagggggtgggtg

SEQ ID NO: 788366 - DNA, 15 bp, Homo sapiens
tgagggggtgggtgg

SEQ ID NO: 788367 - DNA, 15 bp, Homo sapiens
gagggggtgggtggt

SEQ ID NO: 788368 - DNA, 15 bp, Homo sapiens
agggggtgggtggtg

SEQ ID NO: 788369 - DNA, 15 bp, Homo sapiens
gggggtgggtggtga

SEQ ID NO: 788370 - DNA, 15 bp, Homo sapiens
ggggtgggtggtgac

SEQ ID NO: 788371 - DNA, 15 bp, Homo sapiens
gggtgggtggtgaca

SEQ ID NO: 788372 - DNA, 15 bp, Homo sapiens
ggtgggtggtgacat

SEQ ID NO: 788373 - DNA, 15 bp, Homo sapiens
gtgggtggtgacatt

SEQ ID NO: 788374 - DNA, 15 bp, Homo sapiens
tgggtggtgacatta

SEQ ID NO: 788375 - DNA, 15 bp, Homo sapiens
gggtggtgacattag

SEQ ID NO: 788376 - DNA, 15 bp, Homo sapiens
ggtggtgacattagg

SEQ ID NO: 788377 - DNA, 15 bp, Homo sapiens
gtggtgacattaggt

SEQ ID NO: 788378 - DNA, 15 bp, Homo sapiens
tggtgacattaggta

SEQ ID NO: 788379 - DNA, 15 bp, Homo sapiens
ggtgacattaggtag

SEQ ID NO: 788380 - DNA, 15 bp, Homo sapiens
gtgacattaggtagg

SEQ ID NO: 788381 - DNA, 15 bp, Homo sapiens
tgacattaggtaggg

SEQ ID NO: 788382 - DNA, 15 bp, Homo sapiens
gacattaggtagggt

SEQ ID NO: 788383 - DNA, 15 bp, Homo sapiens
acattaggtagggtg

SEQ ID NO: 788384 - DNA, 15 bp, Homo sapiens
cattaggtagggtgg

SEQ ID NO: 788385 - DNA, 15 bp, Homo sapiens
attaggtagggtggt

SEQ ID NO: 788386 - DNA, 15 bp, Homo sapiens
ttaggtagggtggta

SEQ ID NO: 788387 - DNA, 15 bp, Homo sapiens
taggtagggtggtag

SEQ ID NO: 788388 - DNA, 15 bp, Homo sapiens
aggtagggtggtaga

SEQ ID NO: 788389 - DNA, 15 bp, Homo sapiens
ggtagggtggtagag

SEQ ID NO: 788390 - DNA, 15 bp, Homo sapiens
gtagggtggtagaga

SEQ ID NO: 788391 - DNA, 15 bp, Homo sapiens
tagggtggtagagag

SEQ ID NO: 788392 - DNA, 15 bp, Homo sapiens
agggtggtagagaga

SEQ ID NO: 788393 - DNA, 15 bp, Homo sapiens
gggtggtagagagag

SEQ ID NO: 788394 - DNA, 15 bp, Homo sapiens
ggtggtagagagagt

SEQ ID NO: 788395 - DNA, 15 bp, Homo sapiens
gtggtagagagagtt

SEQ ID NO: 788396 - DNA, 15 bp, Homo sapiens
tggtagagagagttt

SEQ ID NO: 788397 - DNA, 15 bp, Homo sapiens
ggtagagagagtttg

SEQ ID NO: 788398 - DNA, 15 bp, Homo sapiens
gtagagagagtttga

SEQ ID NO: 788399 - DNA, 15 bp, Homo sapiens
tagagagagtttgag

SEQ ID NO: 788400 - DNA, 15 bp, Homo sapiens
agagagagtttgaga

SEQ ID NO: 788401 - DNA, 15 bp, Homo sapiens
gagagagtttgagaa

SEQ ID NO: 788402 - DNA, 15 bp, Homo sapiens
agagagtttgagaag

SEQ ID NO: 788403 - DNA, 15 bp, Homo sapiens
gagagtttgagaaga

SEQ ID NO: 788404 - DNA, 15 bp, Homo sapiens
agagtttgagaagat

SEQ ID NO: 788405 - DNA, 15 bp, Homo sapiens
gagtttgagaagatg

SEQ ID NO: 788406 - DNA, 15 bp, Homo sapiens
agtttgagaagatgc

SEQ ID NO: 788407 - DNA, 15 bp, Homo sapiens
gtttgagaagatgcc

SEQ ID NO: 788408 - DNA, 15 bp, Homo sapiens
tttgagaagatgcca

SEQ ID NO: 788409 - DNA, 15 bp, Homo sapiens
ttgagaagatgccat

SEQ ID NO: 788410 - DNA, 15 bp, Homo sapiens
tgagaagatgccata

SEQ ID NO: 788411 - DNA, 15 bp, Homo sapiens
gagaagatgccatat

SEQ ID NO: 788412 - DNA, 15 bp, Homo sapiens
agaagatgccatatg

SEQ ID NO: 788413 - DNA, 15 bp, Homo sapiens
gaagatgccatatga

SEQ ID NO: 788414 - DNA, 15 bp, Homo sapiens
aagatgccatatgag

SEQ ID NO: 788415 - DNA, 15 bp, Homo sapiens
agatgccatatgagc

SEQ ID NO: 788416 - DNA, 15 bp, Homo sapiens
gatgccatatgagct

SEQ ID NO: 788417 - DNA, 15 bp, Homo sapiens
atgccatatgagcta

SEQ ID NO: 788418 - DNA, 15 bp, Homo sapiens
tgccatatgagctaa

SEQ ID NO: 788419 - DNA, 15 bp, Homo sapiens
gccatatgagctaag

SEQ ID NO: 788420 - DNA, 15 bp, Homo sapiens
ccatatgagctaaga

SEQ ID NO: 788421 - DNA, 15 bp, Homo sapiens
catatgagctaagac

SEQ ID NO: 788422 - DNA, 15 bp, Homo sapiens
atatgagctaagacc

SEQ ID NO: 788423 - DNA, 15 bp, Homo sapiens
tatgagctaagaccc

SEQ ID NO: 788424 - DNA, 15 bp, Homo sapiens
atgagctaagaccca

SEQ ID NO: 788425 - DNA, 15 bp, Homo sapiens
tgagctaagacccag

SEQ ID NO: 788426 - DNA, 15 bp, Homo sapiens
gagctaagacccagg

SEQ ID NO: 788427 - DNA, 15 bp, Homo sapiens
agctaagacccagga

SEQ ID NO: 788428 - DNA, 15 bp, Homo sapiens
gctaagacccaggag

SEQ ID NO: 788429 - DNA, 15 bp, Homo sapiens
ctaagacccaggaga

SEQ ID NO: 788430 - DNA, 15 bp, Homo sapiens
taagacccaggagat

SEQ ID NO: 788431 - DNA, 15 bp, Homo sapiens
aagacccaggagatg

SEQ ID NO: 788432 - DNA, 15 bp, Homo sapiens
agacccaggagatga

SEQ ID NO: 788433 - DNA, 15 bp, Homo sapiens
gacccaggagatgaa

SEQ ID NO: 788434 - DNA, 15 bp, Homo sapiens
acccaggagatgaag

SEQ ID NO: 788435 - DNA, 15 bp, Homo sapiens
cccaggagatgaaga

SEQ ID NO: 788436 - DNA, 15 bp, Homo sapiens
ccaggagatgaagaa

SEQ ID NO: 788437 - DNA, 15 bp, Homo sapiens
caggagatgaagaaa

SEQ ID NO: 788438 - DNA, 15 bp, Homo sapiens
aggagatgaagaaac

SEQ ID NO: 788439 - DNA, 15 bp, Homo sapiens
ggagatgaagaaacc

SEQ ID NO: 788440 - DNA, 15 bp, Homo sapiens
gagatgaagaaacca

SEQ ID NO: 788441 - DNA, 15 bp, Homo sapiens
agatgaagaaaccaa

SEQ ID NO: 788442 - DNA, 15 bp, Homo sapiens
gatgaagaaaccaaa

SEQ ID NO: 788443 - DNA, 15 bp, Homo sapiens
atgaagaaaccaaag

SEQ ID NO: 788444 - DNA, 15 bp, Homo sapiens
tgaagaaaccaaagc

SEQ ID NO: 788445 - DNA, 15 bp, Homo sapiens
gaagaaaccaaagct

SEQ ID NO: 788446 - DNA, 15 bp, Homo sapiens
aagaaaccaaagctc

SEQ ID NO: 788447 - DNA, 15 bp, Homo sapiens
agaaaccaaagctca

SEQ ID NO: 788448 - DNA, 15 bp, Homo sapiens
gaaaccaaagctcag

SEQ ID NO: 788449 - DNA, 15 bp, Homo sapiens
aaaccaaagctcaga

SEQ ID NO: 788450 - DNA, 15 bp, Homo sapiens
aaccaaagctcagag

SEQ ID NO: 788451 - DNA, 15 bp, Homo sapiens
accaaagctcagaga

SEQ ID NO: 788452 - DNA, 15 bp, Homo sapiens
ccaaagctcagagag

SEQ ID NO: 788453 - DNA, 15 bp, Homo sapiens
caaagctcagagagg

SEQ ID NO: 788454 - DNA, 15 bp, Homo sapiens
aaagctcagagaggt

SEQ ID NO: 788455 - DNA, 15 bp, Homo sapiens
aagctcagagaggta

SEQ ID NO: 788456 - DNA, 15 bp, Homo sapiens
agctcagagaggtaa

SEQ ID NO: 788457 - DNA, 15 bp, Homo sapiens
gctcagagaggtaaa

SEQ ID NO: 788458 - DNA, 15 bp, Homo sapiens
ctcagagaggtaaat

SEQ ID NO: 788459 - DNA, 15 bp, Homo sapiens
tcagagaggtaaata

SEQ ID NO: 788460 - DNA, 15 bp, Homo sapiens
cagagaggtaaataa

SEQ ID NO: 788461 - DNA, 15 bp, Homo sapiens
agagaggtaaataat

SEQ ID NO: 788462 - DNA, 15 bp, Homo sapiens
gagaggtaaataatt

SEQ ID NO: 788463 - DNA, 15 bp, Homo sapiens
agaggtaaataattt

SEQ ID NO: 788464 - DNA, 15 bp, Homo sapiens
gaggtaaataatttg

SEQ ID NO: 788465 - DNA, 15 bp, Homo sapiens
aggtaaataatttgt

SEQ ID NO: 788466 - DNA, 15 bp, Homo sapiens
ggtaaataatttgtg

SEQ ID NO: 788467 - DNA, 15 bp, Homo sapiens
gtaaataatttgtgc

SEQ ID NO: 788468 - DNA, 15 bp, Homo sapiens
taaataatttgtgca

SEQ ID NO: 788469 - DNA, 15 bp, Homo sapiens
aaataatttgtgcaa

SEQ ID NO: 788470 - DNA, 15 bp, Homo sapiens
aataatttgtgcaaa

SEQ ID NO: 788471 - DNA, 15 bp, Homo sapiens
ataatttgtgcaaat

SEQ ID NO: 788472 - DNA, 15 bp, Homo sapiens
taatttgtgcaaatt

SEQ ID NO: 788473 - DNA, 15 bp, Homo sapiens
aatttgtgcaaattc

SEQ ID NO: 788474 - DNA, 15 bp, Homo sapiens
atttgtgcaaattca

SEQ ID NO: 788475 - DNA, 15 bp, Homo sapiens
tttgtgcaaattcac

SEQ ID NO: 788476 - DNA, 15 bp, Homo sapiens
ttgtgcaaattcaca

SEQ ID NO: 788477 - DNA, 15 bp, Homo sapiens
tgtgcaaattcacac

SEQ ID NO: 788478 - DNA, 15 bp, Homo sapiens
gtgcaaattcacaca

SEQ ID NO: 788479 - DNA, 15 bp, Homo sapiens
tgcaaattcacacag

SEQ ID NO: 788480 - DNA, 15 bp, Homo sapiens
gcaaattcacacagg

SEQ ID NO: 788481 - DNA, 15 bp, Homo sapiens
caaattcacacaggt

SEQ ID NO: 788482 - DNA, 15 bp, Homo sapiens
aaattcacacaggta

SEQ ID NO: 788483 - DNA, 15 bp, Homo sapiens
aattcacacaggtag

SEQ ID NO: 788484 - DNA, 15 bp, Homo sapiens
attcacacaggtagt

SEQ ID NO: 788485 - DNA, 15 bp, Homo sapiens
ttcacacaggtagtt

SEQ ID NO: 788486 - DNA, 15 bp, Homo sapiens
tcacacaggtagtta

SEQ ID NO: 788487 - DNA, 15 bp, Homo sapiens
cacacaggtagttaa

SEQ ID NO: 788488 - DNA, 15 bp, Homo sapiens
acacaggtagttaat

SEQ ID NO: 788489 - DNA, 15 bp, Homo sapiens
cacaggtagttaatg

SEQ ID NO: 788490 - DNA, 15 bp, Homo sapiens
acaggtagttaatgg

SEQ ID NO: 788491 - DNA, 15 bp, Homo sapiens
caggtagttaatggc

SEQ ID NO: 788492 - DNA, 15 bp, Homo sapiens
aggtagttaatggca

SEQ ID NO: 788493 - DNA, 15 bp, Homo sapiens
ggtagttaatggcag

SEQ ID NO: 788494 - DNA, 15 bp, Homo sapiens
gtagttaatggcaga

SEQ ID NO: 788495 - DNA, 15 bp, Homo sapiens
tagttaatggcagag

SEQ ID NO: 788496 - DNA, 15 bp, Homo sapiens
agttaatggcagagg

SEQ ID NO: 788497 - DNA, 15 bp, Homo sapiens
gttaatggcagaggt

SEQ ID NO: 788498 - DNA, 15 bp, Homo sapiens
ttaatggcagaggtt

SEQ ID NO: 788499 - DNA, 15 bp, Homo sapiens
taatggcagaggttg

SEQ ID NO: 788500 - DNA, 15 bp, Homo sapiens
aatggcagaggttgg

SEQ ID NO: 788501 - DNA, 15 bp, Homo sapiens
atggcagaggttgga

SEQ ID NO: 788502 - DNA, 15 bp, Homo sapiens
tggcagaggttggat

SEQ ID NO: 788503 - DNA, 15 bp, Homo sapiens
ggcagaggttggatt

SEQ ID NO: 788504 - DNA, 15 bp, Homo sapiens
gcagaggttggattt

SEQ ID NO: 788505 - DNA, 15 bp, Homo sapiens
cagaggttggatttt

SEQ ID NO: 788506 - DNA, 15 bp, Homo sapiens
agaggttggatttta

SEQ ID NO: 788507 - DNA, 15 bp, Homo sapiens
gaggttggattttaa

SEQ ID NO: 788508 - DNA, 15 bp, Homo sapiens
aggttggattttaat

SEQ ID NO: 788509 - DNA, 15 bp, Homo sapiens
ggttggattttaatt

SEQ ID NO: 788510 - DNA, 15 bp, Homo sapiens
gttggattttaattc

SEQ ID NO: 788511 - DNA, 15 bp, Homo sapiens
ttggattttaattca

SEQ ID NO: 788512 - DNA, 15 bp, Homo sapiens
tggattttaattcaa

SEQ ID NO: 788513 - DNA, 15 bp, Homo sapiens
ggattttaattcaag

SEQ ID NO: 788514 - DNA, 15 bp, Homo sapiens
gattttaattcaaga

SEQ ID NO: 788515 - DNA, 15 bp, Homo sapiens
attttaattcaagaa

SEQ ID NO: 788516 - DNA, 15 bp, Homo sapiens
ttttaattcaagaat

SEQ ID NO: 788517 - DNA, 15 bp, Homo sapiens
tttaattcaagaata

SEQ ID NO: 788518 - DNA, 15 bp, Homo sapiens
ttaattcaagaataa

SEQ ID NO: 788519 - DNA, 15 bp, Homo sapiens
taattcaagaataac

SEQ ID NO: 788520 - DNA, 15 bp, Homo sapiens
aattcaagaataact

SEQ ID NO: 788521 - DNA, 15 bp, Homo sapiens
attcaagaataactt

SEQ ID NO: 788522 - DNA, 15 bp, Homo sapiens
ttcaagaataacttt

SEQ ID NO: 788523 - DNA, 15 bp, Homo sapiens
tcaagaataacttta

SEQ ID NO: 788524 - DNA, 15 bp, Homo sapiens
caagaataactttaa

SEQ ID NO: 788525 - DNA, 15 bp, Homo sapiens
aagaataactttaaa

SEQ ID NO: 788526 - DNA, 15 bp, Homo sapiens
agaataactttaaat

SEQ ID NO: 788527 - DNA, 15 bp, Homo sapiens
gaataactttaaata

SEQ ID NO: 788528 - DNA, 15 bp, Homo sapiens
aataactttaaatat

SEQ ID NO: 788529 - DNA, 15 bp, Homo sapiens
ataactttaaatata

SEQ ID NO: 788530 - DNA, 15 bp, Homo sapiens
taactttaaatatag

SEQ ID NO: 788531 - DNA, 15 bp, Homo sapiens
aactttaaatatagg

SEQ ID NO: 788532 - DNA, 15 bp, Homo sapiens
actttaaatatagga

SEQ ID NO: 788533 - DNA, 15 bp, Homo sapiens
ctttaaatataggac

SEQ ID NO: 788534 - DNA, 15 bp, Homo sapiens
tttaaatataggact

SEQ ID NO: 788535 - DNA, 15 bp, Homo sapiens
ttaaatataggactc

SEQ ID NO: 788536 - DNA, 15 bp, Homo sapiens
taaatataggactct

SEQ ID NO: 788537 - DNA, 15 bp, Homo sapiens
aaatataggactctt

SEQ ID NO: 788538 - DNA, 15 bp, Homo sapiens
aatataggactcttt

SEQ ID NO: 788539 - DNA, 15 bp, Homo sapiens
atataggactctttc

SEQ ID NO: 788540 - DNA, 15 bp, Homo sapiens
tataggactctttcc

SEQ ID NO: 788541 - DNA, 15 bp, Homo sapiens
ataggactctttcct

SEQ ID NO: 788542 - DNA, 15 bp, Homo sapiens
taggactctttcctc

SEQ ID NO: 788543 - DNA, 15 bp, Homo sapiens
aggactctttcctct

SEQ ID NO: 788544 - DNA, 15 bp, Homo sapiens
ggactctttcctctg

SEQ ID NO: 788545 - DNA, 15 bp, Homo sapiens
gactctttcctctgc

SEQ ID NO: 788546 - DNA, 15 bp, Homo sapiens
actctttcctctgca

SEQ ID NO: 788547 - DNA, 15 bp, Homo sapiens
ctctttcctctgcaa

SEQ ID NO: 788548 - DNA, 15 bp, Homo sapiens
tctttcctctgcaat

SEQ ID NO: 788549 - DNA, 15 bp, Homo sapiens
ctttcctctgcaata

SEQ ID NO: 788550 - DNA, 15 bp, Homo sapiens
tttcctctgcaatac

SEQ ID NO: 788551 - DNA, 15 bp, Homo sapiens
ttcctctgcaataca

SEQ ID NO: 788552 - DNA, 15 bp, Homo sapiens
tcctctgcaatacag

SEQ ID NO: 788553 - DNA, 15 bp, Homo sapiens
cctctgcaatacagc

SEQ ID NO: 788554 - DNA, 15 bp, Homo sapiens
ctctgcaatacagct

SEQ ID NO: 788555 - DNA, 15 bp, Homo sapiens
tctgcaatacagcta

SEQ ID NO: 788556 - DNA, 15 bp, Homo sapiens
ctgcaatacagctat

SEQ ID NO: 788557 - DNA, 15 bp, Homo sapiens
tgcaatacagctatc

SEQ ID NO: 788558 - DNA, 15 bp, Homo sapiens
gcaatacagctatct

SEQ ID NO: 788559 - DNA, 15 bp, Homo sapiens
caatacagctatctt

SEQ ID NO: 788560 - DNA, 15 bp, Homo sapiens
aatacagctatcttc

SEQ ID NO: 788561 - DNA, 15 bp, Homo sapiens
atacagctatcttct

SEQ ID NO: 788562 - DNA, 15 bp, Homo sapiens
tacagctatcttctt

SEQ ID NO: 788563 - DNA, 15 bp, Homo sapiens
acagctatcttctta

SEQ ID NO: 788564 - DNA, 15 bp, Homo sapiens
cagctatcttcttaa

SEQ ID NO: 788565 - DNA, 15 bp, Homo sapiens
agctatcttcttaaa

SEQ ID NO: 788566 - DNA, 15 bp, Homo sapiens
gctatcttcttaaat

SEQ ID NO: 788567 - DNA, 15 bp, Homo sapiens
ctatcttcttaaatt

SEQ ID NO: 788568 - DNA, 15 bp, Homo sapiens
tatcttcttaaattc

SEQ ID NO: 788569 - DNA, 15 bp, Homo sapiens
atcttcttaaattca

SEQ ID NO: 788570 - DNA, 15 bp, Homo sapiens
tcttcttaaattcat

SEQ ID NO: 788571 - DNA, 15 bp, Homo sapiens
cttcttaaattcatg

SEQ ID NO: 788572 - DNA, 15 bp, Homo sapiens
ttcttaaattcatgt

SEQ ID NO: 788573 - DNA, 15 bp, Homo sapiens
tcttaaattcatgta

SEQ ID NO: 788574 - DNA, 15 bp, Homo sapiens
cttaaattcatgtaa

SEQ ID NO: 788575 - DNA, 15 bp, Homo sapiens
ttaaattcatgtaaa

SEQ ID NO: 788576 - DNA, 15 bp, Homo sapiens
taaattcatgtaaac

SEQ ID NO: 788577 - DNA, 15 bp, Homo sapiens
aaattcatgtaaaca

SEQ ID NO: 788578 - DNA, 15 bp, Homo sapiens
aattcatgtaaacac

SEQ ID NO: 788579 - DNA, 15 bp, Homo sapiens
attcatgtaaacaca

SEQ ID NO: 788580 - DNA, 15 bp, Homo sapiens
ttcatgtaaacacaa

SEQ ID NO: 788581 - DNA, 15 bp, Homo sapiens
tcatgtaaacacaat

SEQ ID NO: 788582 - DNA, 15 bp, Homo sapiens
catgtaaacacaata

SEQ ID NO: 788583 - DNA, 15 bp, Homo sapiens
atgtaaacacaatac

SEQ ID NO: 788584 - DNA, 15 bp, Homo sapiens
tgtaaacacaataca

SEQ ID NO: 788585 - DNA, 15 bp, Homo sapiens
gtaaacacaatacaa

SEQ ID NO: 788586 - DNA, 15 bp, Homo sapiens
taaacacaatacaaa

SEQ ID NO: 788587 - DNA, 15 bp, Homo sapiens
aaacacaatacaaag

SEQ ID NO: 788588 - DNA, 15 bp, Homo sapiens
aacacaatacaaaga

SEQ ID NO: 788589 - DNA, 15 bp, Homo sapiens
acacaatacaaagat

SEQ ID NO: 788590 - DNA, 15 bp, Homo sapiens
cacaatacaaagatg

SEQ ID NO: 788591 - DNA, 15 bp, Homo sapiens
acaatacaaagatga

SEQ ID NO: 788592 - DNA, 15 bp, Homo sapiens
caatacaaagatgat

SEQ ID NO: 788593 - DNA, 15 bp, Homo sapiens
aatacaaagatgata

SEQ ID NO: 788594 - DNA, 15 bp, Homo sapiens
atacaaagatgatac

SEQ ID NO: 788595 - DNA, 15 bp, Homo sapiens
tacaaagatgataca

SEQ ID NO: 788596 - DNA, 15 bp, Homo sapiens
acaaagatgatacaa

SEQ ID NO: 788597 - DNA, 15 bp, Homo sapiens
caaagatgatacaat

SEQ ID NO: 788598 - DNA, 15 bp, Homo sapiens
aaagatgatacaata

SEQ ID NO: 788599 - DNA, 15 bp, Homo sapiens
aagatgatacaatag

SEQ ID NO: 788600 - DNA, 15 bp, Homo sapiens
agatgatacaatagc

SEQ ID NO: 788601 - DNA, 15 bp, Homo sapiens
gatgatacaatagca

SEQ ID NO: 788602 - DNA, 15 bp, Homo sapiens
atgatacaatagcat

SEQ ID NO: 788603 - DNA, 15 bp, Homo sapiens
tgatacaatagcatt

SEQ ID NO: 788604 - DNA, 15 bp, Homo sapiens
gatacaatagcattg

SEQ ID NO: 788605 - DNA, 15 bp, Homo sapiens
atacaatagcattgt

SEQ ID NO: 788606 - DNA, 15 bp, Homo sapiens
tacaatagcattgtg

SEQ ID NO: 788607 - DNA, 15 bp, Homo sapiens
acaatagcattgtgt

SEQ ID NO: 788608 - DNA, 15 bp, Homo sapiens
caatagcattgtgtg

SEQ ID NO: 788609 - DNA, 15 bp, Homo sapiens
aatagcattgtgtga

SEQ ID NO: 788610 - DNA, 15 bp, Homo sapiens
atagcattgtgtgag

SEQ ID NO: 788611 - DNA, 15 bp, Homo sapiens
tagcattgtgtgaga

SEQ ID NO: 788612 - DNA, 15 bp, Homo sapiens
agcattgtgtgagaa

SEQ ID NO: 788613 - DNA, 15 bp, Homo sapiens
gcattgtgtgagaag

SEQ ID NO: 788614 - DNA, 15 bp, Homo sapiens
cattgtgtgagaagc

SEQ ID NO: 788615 - DNA, 15 bp, Homo sapiens
attgtgtgagaagca

SEQ ID NO: 788616 - DNA, 15 bp, Homo sapiens
ttgtgtgagaagcat

SEQ ID NO: 788617 - DNA, 15 bp, Homo sapiens
tgtgtgagaagcata

SEQ ID NO: 788618 - DNA, 15 bp, Homo sapiens
gtgtgagaagcataa

SEQ ID NO: 788619 - DNA, 15 bp, Homo sapiens
tgtgagaagcataag

SEQ ID NO: 788620 - DNA, 15 bp, Homo sapiens
gtgagaagcataagc

SEQ ID NO: 788621 - DNA, 15 bp, Homo sapiens
tgagaagcataagca

SEQ ID NO: 788622 - DNA, 15 bp, Homo sapiens
gagaagcataagcaa

SEQ ID NO: 788623 - DNA, 15 bp, Homo sapiens
agaagcataagcaaa

SEQ ID NO: 788624 - DNA, 15 bp, Homo sapiens
gaagcataagcaaaa

SEQ ID NO: 788625 - DNA, 15 bp, Homo sapiens
aagcataagcaaaat

SEQ ID NO: 788626 - DNA, 15 bp, Homo sapiens
agcataagcaaaatg

SEQ ID NO: 788627 - DNA, 15 bp, Homo sapiens
gcataagcaaaatgg

SEQ ID NO: 788628 - DNA, 15 bp, Homo sapiens
cataagcaaaatggt

SEQ ID NO: 788629 - DNA, 15 bp, Homo sapiens
ataagcaaaatggtt

SEQ ID NO: 788630 - DNA, 15 bp, Homo sapiens
taagcaaaatggttt

SEQ ID NO: 788631 - DNA, 15 bp, Homo sapiens
aagcaaaatggttta

SEQ ID NO: 788632 - DNA, 15 bp, Homo sapiens
agcaaaatggtttag

SEQ ID NO: 788633 - DNA, 15 bp, Homo sapiens
gcaaaatggtttagt

SEQ ID NO: 788634 - DNA, 15 bp, Homo sapiens
caaaatggtttagtt

SEQ ID NO: 788635 - DNA, 15 bp, Homo sapiens
aaaatggtttagttc

SEQ ID NO: 788636 - DNA, 15 bp, Homo sapiens
aaatggtttagttct

SEQ ID NO: 788637 - DNA, 15 bp, Homo sapiens
aatggtttagttctg

SEQ ID NO: 788638 - DNA, 15 bp, Homo sapiens
atggtttagttctgg

SEQ ID NO: 788639 - DNA, 15 bp, Homo sapiens
tggtttagttctgga

SEQ ID NO: 788640 - DNA, 15 bp, Homo sapiens
ggtttagttctggac

SEQ ID NO: 788641 - DNA, 15 bp, Homo sapiens
gtttagttctggact

SEQ ID NO: 788642 - DNA, 15 bp, Homo sapiens
tttagttctggactt

SEQ ID NO: 788643 - DNA, 15 bp, Homo sapiens
ttagttctggacttg

SEQ ID NO: 788644 - DNA, 15 bp, Homo sapiens
tagttctggacttgg

SEQ ID NO: 788645 - DNA, 15 bp, Homo sapiens
agttctggacttggc

SEQ ID NO: 788646 - DNA, 15 bp, Homo sapiens
gttctggacttggca

SEQ ID NO: 788647 - DNA, 15 bp, Homo sapiens
ttctggacttggcaa

SEQ ID NO: 788648 - DNA, 15 bp, Homo sapiens
tctggacttggcaac

SEQ ID NO: 788649 - DNA, 15 bp, Homo sapiens
ctggacttggcaaca

SEQ ID NO: 788650 - DNA, 15 bp, Homo sapiens
tggacttggcaacat

SEQ ID NO: 788651 - DNA, 15 bp, Homo sapiens
ggacttggcaacata

SEQ ID NO: 788652 - DNA, 15 bp, Homo sapiens
gacttggcaacatag

SEQ ID NO: 788653 - DNA, 15 bp, Homo sapiens
acttggcaacataga

SEQ ID NO: 788654 - DNA, 15 bp, Homo sapiens
cttggcaacatagaa

SEQ ID NO: 788655 - DNA, 15 bp, Homo sapiens
ttggcaacatagaaa

SEQ ID NO: 788656 - DNA, 15 bp, Homo sapiens
tggcaacatagaaac

SEQ ID NO: 788657 - DNA, 15 bp, Homo sapiens
ggcaacatagaaact

SEQ ID NO: 788658 - DNA, 15 bp, Homo sapiens
gcaacatagaaacta

SEQ ID NO: 788659 - DNA, 15 bp, Homo sapiens
caacatagaaactag

SEQ ID NO: 788660 - DNA, 15 bp, Homo sapiens
aacatagaaactagg

SEQ ID NO: 788661 - DNA, 15 bp, Homo sapiens
acatagaaactaggg

SEQ ID NO: 788662 - DNA, 15 bp, Homo sapiens
catagaaactagggt

SEQ ID NO: 788663 - DNA, 15 bp, Homo sapiens
atagaaactagggtt

SEQ ID NO: 788664 - DNA, 15 bp, Homo sapiens
tagaaactagggttc

SEQ ID NO: 788665 - DNA, 15 bp, Homo sapiens
agaaactagggttct

SEQ ID NO: 788666 - DNA, 15 bp, Homo sapiens
gaaactagggttctg

SEQ ID NO: 788667 - DNA, 15 bp, Homo sapiens
aaactagggttctga

SEQ ID NO: 788668 - DNA, 15 bp, Homo sapiens
aactagggttctgat

SEQ ID NO: 788669 - DNA, 15 bp, Homo sapiens
actagggttctgatg

SEQ ID NO: 788670 - DNA, 15 bp, Homo sapiens
ctagggttctgatgt

SEQ ID NO: 788671 - DNA, 15 bp, Homo sapiens
tagggttctgatgtg

SEQ ID NO: 788672 - DNA, 15 bp, Homo sapiens
agggttctgatgtgt

SEQ ID NO: 788673 - DNA, 15 bp, Homo sapiens
gggttctgatgtgtt

SEQ ID NO: 788674 - DNA, 15 bp, Homo sapiens
ggttctgatgtgttg

SEQ ID NO: 788675 - DNA, 15 bp, Homo sapiens
gttctgatgtgttga

SEQ ID NO: 788676 - DNA, 15 bp, Homo sapiens
ttctgatgtgttgaa

SEQ ID NO: 788677 - DNA, 15 bp, Homo sapiens
tctgatgtgttgaaa

SEQ ID NO: 788678 - DNA, 15 bp, Homo sapiens
ctgatgtgttgaaat

SEQ ID NO: 788679 - DNA, 15 bp, Homo sapiens
tgatgtgttgaaatt

SEQ ID NO: 788680 - DNA, 15 bp, Homo sapiens
gatgtgttgaaattt

SEQ ID NO: 788681 - DNA, 15 bp, Homo sapiens
atgtgttgaaatttg

SEQ ID NO: 788682 - DNA, 15 bp, Homo sapiens
tgtgttgaaatttgg

SEQ ID NO: 788683 - DNA, 15 bp, Homo sapiens
gtgttgaaatttgga

SEQ ID NO: 788684 - DNA, 15 bp, Homo sapiens
tgttgaaatttggac

SEQ ID NO: 788685 - DNA, 15 bp, Homo sapiens
gttgaaatttggact

SEQ ID NO: 788686 - DNA, 15 bp, Homo sapiens
ttgaaatttggactc

SEQ ID NO: 788687 - DNA, 15 bp, Homo sapiens
tgaaatttggactca

SEQ ID NO: 788688 - DNA, 15 bp, Homo sapiens
gaaatttggactcag

SEQ ID NO: 788689 - DNA, 15 bp, Homo sapiens
aaatttggactcagt

SEQ ID NO: 788690 - DNA, 15 bp, Homo sapiens
aatttggactcagtg

SEQ ID NO: 788691 - DNA, 15 bp, Homo sapiens
atttggactcagtgc

SEQ ID NO: 788692 - DNA, 15 bp, Homo sapiens
tttggactcagtgct

SEQ ID NO: 788693 - DNA, 15 bp, Homo sapiens
ttggactcagtgctg

SEQ ID NO: 788694 - DNA, 15 bp, Homo sapiens
tggactcagtgctga

SEQ ID NO: 788695 - DNA, 15 bp, Homo sapiens
ggactcagtgctgat

SEQ ID NO: 788696 - DNA, 15 bp, Homo sapiens
gactcagtgctgatg

SEQ ID NO: 788697 - DNA, 15 bp, Homo sapiens
actcagtgctgatga

SEQ ID NO: 788698 - DNA, 15 bp, Homo sapiens
ctcagtgctgatgac

SEQ ID NO: 788699 - DNA, 15 bp, Homo sapiens
tcagtgctgatgact

SEQ ID NO: 788700 - DNA, 15 bp, Homo sapiens
cagtgctgatgactg

SEQ ID NO: 788701 - DNA, 15 bp, Homo sapiens
agtgctgatgactgg

SEQ ID NO: 788702 - DNA, 15 bp, Homo sapiens
gtgctgatgactggg

SEQ ID NO: 788703 - DNA, 15 bp, Homo sapiens
tgctgatgactgggt

SEQ ID NO: 788704 - DNA, 15 bp, Homo sapiens
gctgatgactgggtt

SEQ ID NO: 788705 - DNA, 15 bp, Homo sapiens
ctgatgactgggttt

SEQ ID NO: 788706 - DNA, 15 bp, Homo sapiens
tgatgactgggtttg

SEQ ID NO: 788707 - DNA, 15 bp, Homo sapiens
gatgactgggtttga

SEQ ID NO: 788708 - DNA, 15 bp, Homo sapiens
atgactgggtttgaa

SEQ ID NO: 788709 - DNA, 15 bp, Homo sapiens
tgactgggtttgaat

SEQ ID NO: 788710 - DNA, 15 bp, Homo sapiens
gactgggtttgaatc

SEQ ID NO: 788711 - DNA, 15 bp, Homo sapiens
actgggtttgaatca

SEQ ID NO: 788712 - DNA, 15 bp, Homo sapiens
ctgggtttgaatcat

SEQ ID NO: 788713 - DNA, 15 bp, Homo sapiens
tgggtttgaatcata

SEQ ID NO: 788714 - DNA, 15 bp, Homo sapiens
gggtttgaatcataa

SEQ ID NO: 788715 - DNA, 15 bp, Homo sapiens
ggtttgaatcataat

SEQ ID NO: 788716 - DNA, 15 bp, Homo sapiens
gtttgaatcataatc

SEQ ID NO: 788717 - DNA, 15 bp, Homo sapiens
tttgaatcataatcc

SEQ ID NO: 788718 - DNA, 15 bp, Homo sapiens
ttgaatcataatccc

SEQ ID NO: 788719 - DNA, 15 bp, Homo sapiens
tgaatcataatccca

SEQ ID NO: 788720 - DNA, 15 bp, Homo sapiens
gaatcataatcccag

SEQ ID NO: 788721 - DNA, 15 bp, Homo sapiens
aatcataatcccagc

SEQ ID NO: 788722 - DNA, 15 bp, Homo sapiens
atcataatcccagca

SEQ ID NO: 788723 - DNA, 15 bp, Homo sapiens
tcataatcccagcac

SEQ ID NO: 788724 - DNA, 15 bp, Homo sapiens
cataatcccagcact

SEQ ID NO: 788725 - DNA, 15 bp, Homo sapiens
ataatcccagcacta

SEQ ID NO: 788726 - DNA, 15 bp, Homo sapiens
taatcccagcactaa

SEQ ID NO: 788727 - DNA, 15 bp, Homo sapiens
aatcccagcactaac

SEQ ID NO: 788728 - DNA, 15 bp, Homo sapiens
atcccagcactaact

SEQ ID NO: 788729 - DNA, 15 bp, Homo sapiens
tcccagcactaactt

SEQ ID NO: 788730 - DNA, 15 bp, Homo sapiens
cccagcactaacttg

SEQ ID NO: 788731 - DNA, 15 bp, Homo sapiens
ccagcactaacttgg

SEQ ID NO: 788732 - DNA, 15 bp, Homo sapiens
cagcactaacttggc

SEQ ID NO: 788733 - DNA, 15 bp, Homo sapiens
agcactaacttggct

SEQ ID NO: 788734 - DNA, 15 bp, Homo sapiens
gcactaacttggctg

SEQ ID NO: 788735 - DNA, 15 bp, Homo sapiens
cactaacttggctga

SEQ ID NO: 788736 - DNA, 15 bp, Homo sapiens
actaacttggctgaa

SEQ ID NO: 788737 - DNA, 15 bp, Homo sapiens
ctaacttggctgaat

SEQ ID NO: 788738 - DNA, 15 bp, Homo sapiens
taacttggctgaatc

SEQ ID NO: 788739 - DNA, 15 bp, Homo sapiens
aacttggctgaatca

SEQ ID NO: 788740 - DNA, 15 bp, Homo sapiens
acttggctgaatcac

SEQ ID NO: 788741 - DNA, 15 bp, Homo sapiens
cttggctgaatcact

SEQ ID NO: 788742 - DNA, 15 bp, Homo sapiens
ttggctgaatcactt

SEQ ID NO: 788743 - DNA, 15 bp, Homo sapiens
tggctgaatcactta

SEQ ID NO: 788744 - DNA, 15 bp, Homo sapiens
ggctgaatcacttaa

SEQ ID NO: 788745 - DNA, 15 bp, Homo sapiens
gctgaatcacttaaa

SEQ ID NO: 788746 - DNA, 15 bp, Homo sapiens
ctgaatcacttaaac

SEQ ID NO: 788747 - DNA, 15 bp, Homo sapiens
tgaatcacttaaact

SEQ ID NO: 788748 - DNA, 15 bp, Homo sapiens
gaatcacttaaactt

SEQ ID NO: 788749 - DNA, 15 bp, Homo sapiens
aatcacttaaacttg

SEQ ID NO: 788750 - DNA, 15 bp, Homo sapiens
atcacttaaacttgc

SEQ ID NO: 788751 - DNA, 15 bp, Homo sapiens
tcacttaaacttgca

SEQ ID NO: 788752 - DNA, 15 bp, Homo sapiens
cacttaaacttgcag

SEQ ID NO: 788753 - DNA, 15 bp, Homo sapiens
acttaaacttgcagc

SEQ ID NO: 788754 - DNA, 15 bp, Homo sapiens
cttaaacttgcagcc

SEQ ID NO: 788755 - DNA, 15 bp, Homo sapiens
ttaaacttgcagcct

SEQ ID NO: 788756 - DNA, 15 bp, Homo sapiens
taaacttgcagcctt

SEQ ID NO: 788757 - DNA, 15 bp, Homo sapiens
aaacttgcagccttt

SEQ ID NO: 788758 - DNA, 15 bp, Homo sapiens
aacttgcagccttta

SEQ ID NO: 788759 - DNA, 15 bp, Homo sapiens
acttgcagcctttat

SEQ ID NO: 788760 - DNA, 15 bp, Homo sapiens
cttgcagcctttatt

SEQ ID NO: 788761 - DNA, 15 bp, Homo sapiens
ttgcagcctttattg

SEQ ID NO: 788762 - DNA, 15 bp, Homo sapiens
tgcagcctttattgt

SEQ ID NO: 788763 - DNA, 15 bp, Homo sapiens
gcagcctttattgtt

SEQ ID NO: 788764 - DNA, 15 bp, Homo sapiens
cagcctttattgttt

SEQ ID NO: 788765 - DNA, 15 bp, Homo sapiens
agcctttattgtttt

SEQ ID NO: 788766 - DNA, 15 bp, Homo sapiens
gcctttattgttttt

SEQ ID NO: 788767 - DNA, 15 bp, Homo sapiens
cctttattgtttttt

SEQ ID NO: 788768 - DNA, 15 bp, Homo sapiens
ctttattgttttttg

SEQ ID NO: 788769 - DNA, 15 bp, Homo sapiens
tttattgttttttgg

SEQ ID NO: 788770 - DNA, 15 bp, Homo sapiens
ttattgttttttggt

SEQ ID NO: 788771 - DNA, 15 bp, Homo sapiens
tattgttttttggtg

SEQ ID NO: 788772 - DNA, 15 bp, Homo sapiens
attgttttttggtgg

SEQ ID NO: 788773 - DNA, 15 bp, Homo sapiens
ttgttttttggtggg

SEQ ID NO: 788774 - DNA, 15 bp, Homo sapiens
tgttttttggtgggg

SEQ ID NO: 788775 - DNA, 15 bp, Homo sapiens
gttttttggtggggc

SEQ ID NO: 788776 - DNA, 15 bp, Homo sapiens
ttttttggtggggcg

SEQ ID NO: 788777 - DNA, 15 bp, Homo sapiens
tttttggtggggcgg

SEQ ID NO: 788778 - DNA, 15 bp, Homo sapiens
ttttggtggggcggg

SEQ ID NO: 788779 - DNA, 15 bp, Homo sapiens
tttggtggggcgggg

SEQ ID NO: 788780 - DNA, 15 bp, Homo sapiens
ttggtggggcggggg

SEQ ID NO: 788781 - DNA, 15 bp, Homo sapiens
tggtggggcgggggt

SEQ ID NO: 788782 - DNA, 15 bp, Homo sapiens
ggtggggcgggggtg

SEQ ID NO: 788783 - DNA, 15 bp, Homo sapiens
gtggggcgggggtgg

SEQ ID NO: 788784 - DNA, 15 bp, Homo sapiens
tggggcgggggtggg

SEQ ID NO: 788785 - DNA, 15 bp, Homo sapiens
ggggcgggggtggga

SEQ ID NO: 788786 - DNA, 15 bp, Homo sapiens
gggcgggggtgggag

SEQ ID NO: 788787 - DNA, 15 bp, Homo sapiens
ggcgggggtgggagg

SEQ ID NO: 788788 - DNA, 15 bp, Homo sapiens
gcgggggtgggaggg

SEQ ID NO: 788789 - DNA, 15 bp, Homo sapiens
cgggggtgggaggga

SEQ ID NO: 788790 - DNA, 15 bp, Homo sapiens
gggggtgggagggag

SEQ ID NO: 788791 - DNA, 15 bp, Homo sapiens
ggggtgggagggagc

SEQ ID NO: 788792 - DNA, 15 bp, Homo sapiens
gggtgggagggagct

SEQ ID NO: 788793 - DNA, 15 bp, Homo sapiens
ggtgggagggagctc

SEQ ID NO: 788794 - DNA, 15 bp, Homo sapiens
gtgggagggagctca

SEQ ID NO: 788795 - DNA, 15 bp, Homo sapiens
tgggagggagctcat

SEQ ID NO: 788796 - DNA, 15 bp, Homo sapiens
gggagggagctcatc

SEQ ID NO: 788797 - DNA, 15 bp, Homo sapiens
ggagggagctcatct

SEQ ID NO: 788798 - DNA, 15 bp, Homo sapiens
gagggagctcatctg

SEQ ID NO: 788799 - DNA, 15 bp, Homo sapiens
agggagctcatctgt

SEQ ID NO: 788800 - DNA, 15 bp, Homo sapiens
gggagctcatctgta

SEQ ID NO: 788801 - DNA, 15 bp, Homo sapiens
ggagctcatctgtaa

SEQ ID NO: 788802 - DNA, 15 bp, Homo sapiens
gagctcatctgtaaa

SEQ ID NO: 788803 - DNA, 15 bp, Homo sapiens
agctcatctgtaaag

SEQ ID NO: 788804 - DNA, 15 bp, Homo sapiens
gctcatctgtaaagt

SEQ ID NO: 788805 - DNA, 15 bp, Homo sapiens
ctcatctgtaaagtg

SEQ ID NO: 788806 - DNA, 15 bp, Homo sapiens
tcatctgtaaagtga

SEQ ID NO: 788807 - DNA, 15 bp, Homo sapiens
catctgtaaagtgag

SEQ ID NO: 788808 - DNA, 15 bp, Homo sapiens
atctgtaaagtgagg

SEQ ID NO: 788809 - DNA, 15 bp, Homo sapiens
tctgtaaagtgagga

SEQ ID NO: 788810 - DNA, 15 bp, Homo sapiens
ctgtaaagtgaggag

SEQ ID NO: 788811 - DNA, 15 bp, Homo sapiens
tgtaaagtgaggagg

SEQ ID NO: 788812 - DNA, 15 bp, Homo sapiens
gtaaagtgaggaggg

SEQ ID NO: 788813 - DNA, 15 bp, Homo sapiens
taaagtgaggagggt

SEQ ID NO: 788814 - DNA, 15 bp, Homo sapiens
aaagtgaggagggtg

SEQ ID NO: 788815 - DNA, 15 bp, Homo sapiens
aagtgaggagggtgt

SEQ ID NO: 788816 - DNA, 15 bp, Homo sapiens
agtgaggagggtgtt

SEQ ID NO: 788817 - DNA, 15 bp, Homo sapiens
gtgaggagggtgttt

SEQ ID NO: 788818 - DNA, 15 bp, Homo sapiens
tgaggagggtgtttg

SEQ ID NO: 788819 - DNA, 15 bp, Homo sapiens
gaggagggtgtttgg

SEQ ID NO: 788820 - DNA, 15 bp, Homo sapiens
aggagggtgtttgga

SEQ ID NO: 788821 - DNA, 15 bp, Homo sapiens
ggagggtgtttggat

SEQ ID NO: 788822 - DNA, 15 bp, Homo sapiens
gagggtgtttggatg

SEQ ID NO: 788823 - DNA, 15 bp, Homo sapiens
agggtgtttggatga

SEQ ID NO: 788824 - DNA, 15 bp, Homo sapiens
gggtgtttggatgat

SEQ ID NO: 788825 - DNA, 15 bp, Homo sapiens
ggtgtttggatgatc

SEQ ID NO: 788826 - DNA, 15 bp, Homo sapiens
gtgtttggatgatct

SEQ ID NO: 788827 - DNA, 15 bp, Homo sapiens
tgtttggatgatctc

SEQ ID NO: 788828 - DNA, 15 bp, Homo sapiens
gtttggatgatctcc

SEQ ID NO: 788829 - DNA, 15 bp, Homo sapiens
tttggatgatctcca

SEQ ID NO: 788830 - DNA, 15 bp, Homo sapiens
ttggatgatctccac

SEQ ID NO: 788831 - DNA, 15 bp, Homo sapiens
tggatgatctccacg

SEQ ID NO: 788832 - DNA, 15 bp, Homo sapiens
ggatgatctccacgg

SEQ ID NO: 788833 - DNA, 15 bp, Homo sapiens
gatgatctccacgga

SEQ ID NO: 788834 - DNA, 15 bp, Homo sapiens
atgatctccacggac

SEQ ID NO: 788835 - DNA, 15 bp, Homo sapiens
tgatctccacggact

SEQ ID NO: 788836 - DNA, 15 bp, Homo sapiens
gatctccacggactc

SEQ ID NO: 788837 - DNA, 15 bp, Homo sapiens
atctccacggactct

SEQ ID NO: 788838 - DNA, 15 bp, Homo sapiens
tctccacggactctt

SEQ ID NO: 788839 - DNA, 15 bp, Homo sapiens
ctccacggactcttc

SEQ ID NO: 788840 - DNA, 15 bp, Homo sapiens
tccacggactcttct

SEQ ID NO: 788841 - DNA, 15 bp, Homo sapiens
ccacggactcttctg

SEQ ID NO: 788842 - DNA, 15 bp, Homo sapiens
cacggactcttctgg

SEQ ID NO: 788843 - DNA, 15 bp, Homo sapiens
acggactcttctggc

SEQ ID NO: 788844 - DNA, 15 bp, Homo sapiens
cggactcttctggct

SEQ ID NO: 788845 - DNA, 15 bp, Homo sapiens
ggactcttctggctc

SEQ ID NO: 788846 - DNA, 15 bp, Homo sapiens
gactcttctggctct

SEQ ID NO: 788847 - DNA, 15 bp, Homo sapiens
actcttctggctctc

SEQ ID NO: 788848 - DNA, 15 bp, Homo sapiens
ctcttctggctctca

SEQ ID NO: 788849 - DNA, 15 bp, Homo sapiens
tcttctggctctcac

SEQ ID NO: 788850 - DNA, 15 bp, Homo sapiens
cttctggctctcact

SEQ ID NO: 788851 - DNA, 15 bp, Homo sapiens
ttctggctctcactt

SEQ ID NO: 788852 - DNA, 15 bp, Homo sapiens
tctggctctcacttt

SEQ ID NO: 788853 - DNA, 15 bp, Homo sapiens
ctggctctcactttc

SEQ ID NO: 788854 - DNA, 15 bp, Homo sapiens
tggctctcactttct

SEQ ID NO: 788855 - DNA, 15 bp, Homo sapiens
ggctctcactttcta

SEQ ID NO: 788856 - DNA, 15 bp, Homo sapiens
gctctcactttctat

SEQ ID NO: 788857 - DNA, 15 bp, Homo sapiens
ctctcactttctatg

SEQ ID NO: 788858 - DNA, 15 bp, Homo sapiens
tctcactttctatga

SEQ ID NO: 788859 - DNA, 15 bp, Homo sapiens
ctcactttctatgat

SEQ ID NO: 788860 - DNA, 15 bp, Homo sapiens
tcactttctatgatg

SEQ ID NO: 788861 - DNA, 15 bp, Homo sapiens
cactttctatgatgc

SEQ ID NO: 788862 - DNA, 15 bp, Homo sapiens
actttctatgatgct

SEQ ID NO: 788863 - DNA, 15 bp, Homo sapiens
ctttctatgatgctg

SEQ ID NO: 788864 - DNA, 15 bp, Homo sapiens
tttctatgatgctgt

SEQ ID NO: 788865 - DNA, 15 bp, Homo sapiens
ttctatgatgctgtg

SEQ ID NO: 788866 - DNA, 15 bp, Homo sapiens
tctatgatgctgtga

SEQ ID NO: 788867 - DNA, 15 bp, Homo sapiens
ctatgatgctgtgac

SEQ ID NO: 788868 - DNA, 15 bp, Homo sapiens
tatgatgctgtgact

SEQ ID NO: 788869 - DNA, 15 bp, Homo sapiens
atgatgctgtgactt

SEQ ID NO: 788870 - DNA, 15 bp, Homo sapiens
tgatgctgtgacttt

SEQ ID NO: 788871 - DNA, 15 bp, Homo sapiens
gatgctgtgacttta

SEQ ID NO: 788872 - DNA, 15 bp, Homo sapiens
atgctgtgactttag

SEQ ID NO: 788873 - DNA, 15 bp, Homo sapiens
tgctgtgactttagg

SEQ ID NO: 788874 - DNA, 15 bp, Homo sapiens
gctgtgactttagga

SEQ ID NO: 788875 - DNA, 15 bp, Homo sapiens
ctgtgactttaggag

SEQ ID NO: 788876 - DNA, 15 bp, Homo sapiens
tgtgactttaggagg

SEQ ID NO: 788877 - DNA, 15 bp, Homo sapiens
gtgactttaggaggt

SEQ ID NO: 788878 - DNA, 15 bp, Homo sapiens
tgactttaggaggtg

SEQ ID NO: 788879 - DNA, 15 bp, Homo sapiens
gactttaggaggtgg

SEQ ID NO: 788880 - DNA, 15 bp, Homo sapiens
actttaggaggtggc

SEQ ID NO: 788881 - DNA, 15 bp, Homo sapiens
ctttaggaggtggca

SEQ ID NO: 788882 - DNA, 15 bp, Homo sapiens
tttaggaggtggcat

SEQ ID NO: 788883 - DNA, 15 bp, Homo sapiens
ttaggaggtggcatt

SEQ ID NO: 788884 - DNA, 15 bp, Homo sapiens
taggaggtggcattt

SEQ ID NO: 788885 - DNA, 15 bp, Homo sapiens
aggaggtggcatttg

SEQ ID NO: 788886 - DNA, 15 bp, Homo sapiens
ggaggtggcatttga

SEQ ID NO: 788887 - DNA, 15 bp, Homo sapiens
gaggtggcatttgat

SEQ ID NO: 788888 - DNA, 15 bp, Homo sapiens
aggtggcatttgatc

SEQ ID NO: 788889 - DNA, 15 bp, Homo sapiens
ggtggcatttgatct

SEQ ID NO: 788890 - DNA, 15 bp, Homo sapiens
gtggcatttgatctg

SEQ ID NO: 788891 - DNA, 15 bp, Homo sapiens
tggcatttgatctgg

SEQ ID NO: 788892 - DNA, 15 bp, Homo sapiens
ggcatttgatctggg

SEQ ID NO: 788893 - DNA, 15 bp, Homo sapiens
gcatttgatctgggc

SEQ ID NO: 788894 - DNA, 15 bp, Homo sapiens
catttgatctgggct

SEQ ID NO: 788895 - DNA, 15 bp, Homo sapiens
atttgatctgggctt

SEQ ID NO: 788896 - DNA, 15 bp, Homo sapiens
tttgatctgggcttt

SEQ ID NO: 788897 - DNA, 15 bp, Homo sapiens
ttgatctgggctttg

SEQ ID NO: 788898 - DNA, 15 bp, Homo sapiens
tgatctgggctttgg

SEQ ID NO: 788899 - DNA, 15 bp, Homo sapiens
gatctgggctttgga

SEQ ID NO: 788900 - DNA, 15 bp, Homo sapiens
atctgggctttggag

SEQ ID NO: 788901 - DNA, 15 bp, Homo sapiens
tctgggctttggagg

SEQ ID NO: 788902 - DNA, 15 bp, Homo sapiens
ctgggctttggaggg

SEQ ID NO: 788903 - DNA, 15 bp, Homo sapiens
tgggctttggagggt

SEQ ID NO: 788904 - DNA, 15 bp, Homo sapiens
gggctttggagggtg

SEQ ID NO: 788905 - DNA, 15 bp, Homo sapiens
ggctttggagggtgg

SEQ ID NO: 788906 - DNA, 15 bp, Homo sapiens
gctttggagggtggg

SEQ ID NO: 788907 - DNA, 15 bp, Homo sapiens
ctttggagggtgggg

SEQ ID NO: 788908 - DNA, 15 bp, Homo sapiens
tttggagggtggggt

SEQ ID NO: 788909 - DNA, 15 bp, Homo sapiens
ttggagggtggggtg

SEQ ID NO: 788910 - DNA, 15 bp, Homo sapiens
tggagggtggggtga

SEQ ID NO: 788911 - DNA, 15 bp, Homo sapiens
ggagggtggggtgat

SEQ ID NO: 788912 - DNA, 15 bp, Homo sapiens
gagggtggggtgatt

SEQ ID NO: 788913 - DNA, 15 bp, Homo sapiens
agggtggggtgattt

SEQ ID NO: 788914 - DNA, 15 bp, Homo sapiens
gggtggggtgatttt

SEQ ID NO: 788915 - DNA, 15 bp, Homo sapiens
ggtggggtgattttg

SEQ ID NO: 788916 - DNA, 15 bp, Homo sapiens
gtggggtgattttga

SEQ ID NO: 788917 - DNA, 15 bp, Homo sapiens
tggggtgattttgac

SEQ ID NO: 788918 - DNA, 15 bp, Homo sapiens
ggggtgattttgaca

SEQ ID NO: 788919 - DNA, 15 bp, Homo sapiens
gggtgattttgacag

SEQ ID NO: 788920 - DNA, 15 bp, Homo sapiens
ggtgattttgacagg

SEQ ID NO: 788921 - DNA, 15 bp, Homo sapiens
gtgattttgacaggc

SEQ ID NO: 788922 - DNA, 15 bp, Homo sapiens
tgattttgacaggct

SEQ ID NO: 788923 - DNA, 15 bp, Homo sapiens
gattttgacaggctg

SEQ ID NO: 788924 - DNA, 15 bp, Homo sapiens
attttgacaggctgc

SEQ ID NO: 788925 - DNA, 15 bp, Homo sapiens
ttttgacaggctgcc

SEQ ID NO: 788926 - DNA, 15 bp, Homo sapiens
tttgacaggctgcct

SEQ ID NO: 788927 - DNA, 15 bp, Homo sapiens
ttgacaggctgcctt

SEQ ID NO: 788928 - DNA, 15 bp, Homo sapiens
tgacaggctgccttg

SEQ ID NO: 788929 - DNA, 15 bp, Homo sapiens
gacaggctgccttgt

SEQ ID NO: 788930 - DNA, 15 bp, Homo sapiens
acaggctgccttgta

SEQ ID NO: 788931 - DNA, 15 bp, Homo sapiens
caggctgccttgtaa

SEQ ID NO: 788932 - DNA, 15 bp, Homo sapiens
aggctgccttgtaaa

SEQ ID NO: 788933 - DNA, 15 bp, Homo sapiens
ggctgccttgtaaat

SEQ ID NO: 788934 - DNA, 15 bp, Homo sapiens
gctgccttgtaaatg

SEQ ID NO: 788935 - DNA, 15 bp, Homo sapiens
ctgccttgtaaatga

SEQ ID NO: 788936 - DNA, 15 bp, Homo sapiens
tgccttgtaaatgag

SEQ ID NO: 788937 - DNA, 15 bp, Homo sapiens
gccttgtaaatgaga

SEQ ID NO: 788938 - DNA, 15 bp, Homo sapiens
ccttgtaaatgagag

SEQ ID NO: 788939 - DNA, 15 bp, Homo sapiens
cttgtaaatgagagg

SEQ ID NO: 788940 - DNA, 15 bp, Homo sapiens
ttgtaaatgagagga

SEQ ID NO: 788941 - DNA, 15 bp, Homo sapiens
tgtaaatgagaggaa

SEQ ID NO: 788942 - DNA, 15 bp, Homo sapiens
gtaaatgagaggaaa

SEQ ID NO: 788943 - DNA, 15 bp, Homo sapiens
taaatgagaggaaaa

SEQ ID NO: 788944 - DNA, 15 bp, Homo sapiens
aaatgagaggaaaag

SEQ ID NO: 788945 - DNA, 15 bp, Homo sapiens
aatgagaggaaaagg

SEQ ID NO: 788946 - DNA, 15 bp, Homo sapiens
atgagaggaaaaggt

SEQ ID NO: 788947 - DNA, 15 bp, Homo sapiens
tgagaggaaaaggta

SEQ ID NO: 788948 - DNA, 15 bp, Homo sapiens
gagaggaaaaggtat

SEQ ID NO: 788949 - DNA, 15 bp, Homo sapiens
agaggaaaaggtatt

SEQ ID NO: 788950 - DNA, 15 bp, Homo sapiens
gaggaaaaggtattc

SEQ ID NO: 788951 - DNA, 15 bp, Homo sapiens
aggaaaaggtattcc

SEQ ID NO: 788952 - DNA, 15 bp, Homo sapiens
ggaaaaggtattcca

SEQ ID NO: 788953 - DNA, 15 bp, Homo sapiens
gaaaaggtattccag

SEQ ID NO: 788954 - DNA, 15 bp, Homo sapiens
aaaaggtattccagg

SEQ ID NO: 788955 - DNA, 15 bp, Homo sapiens
aaaggtattccaggt

SEQ ID NO: 788956 - DNA, 15 bp, Homo sapiens
aaggtattccaggtg

SEQ ID NO: 788957 - DNA, 15 bp, Homo sapiens
aggtattccaggtgg

SEQ ID NO: 788958 - DNA, 15 bp, Homo sapiens
ggtattccaggtggt

SEQ ID NO: 788959 - DNA, 15 bp, Homo sapiens
gtattccaggtggtg

SEQ ID NO: 788960 - DNA, 15 bp, Homo sapiens
tattccaggtggtga

SEQ ID NO: 788961 - DNA, 15 bp, Homo sapiens
attccaggtggtgaa

SEQ ID NO: 788962 - DNA, 15 bp, Homo sapiens
ttccaggtggtgaaa

SEQ ID NO: 788963 - DNA, 15 bp, Homo sapiens
tccaggtggtgaaaa

SEQ ID NO: 788964 - DNA, 15 bp, Homo sapiens
ccaggtggtgaaaac

SEQ ID NO: 788965 - DNA, 15 bp, Homo sapiens
caggtggtgaaaaca

SEQ ID NO: 788966 - DNA, 15 bp, Homo sapiens
aggtggtgaaaacag

SEQ ID NO: 788967 - DNA, 15 bp, Homo sapiens
ggtggtgaaaacagt

SEQ ID NO: 788968 - DNA, 15 bp, Homo sapiens
gtggtgaaaacagtt

SEQ ID NO: 788969 - DNA, 15 bp, Homo sapiens
tggtgaaaacagttt

SEQ ID NO: 788970 - DNA, 15 bp, Homo sapiens
ggtgaaaacagtttg

SEQ ID NO: 788971 - DNA, 15 bp, Homo sapiens
gtgaaaacagtttga

SEQ ID NO: 788972 - DNA, 15 bp, Homo sapiens
tgaaaacagtttgag

SEQ ID NO: 788973 - DNA, 15 bp, Homo sapiens
gaaaacagtttgagc

SEQ ID NO: 788974 - DNA, 15 bp, Homo sapiens
aaaacagtttgagca

SEQ ID NO: 788975 - DNA, 15 bp, Homo sapiens
aaacagtttgagcag

SEQ ID NO: 788976 - DNA, 15 bp, Homo sapiens
aacagtttgagcaga

SEQ ID NO: 788977 - DNA, 15 bp, Homo sapiens
acagtttgagcagaa

SEQ ID NO: 788978 - DNA, 15 bp, Homo sapiens
cagtttgagcagaaa

SEQ ID NO: 788979 - DNA, 15 bp, Homo sapiens
agtttgagcagaaac

SEQ ID NO: 788980 - DNA, 15 bp, Homo sapiens
gtttgagcagaaaca

SEQ ID NO: 788981 - DNA, 15 bp, Homo sapiens
tttgagcagaaacac

SEQ ID NO: 788982 - DNA, 15 bp, Homo sapiens
ttgagcagaaacacg

SEQ ID NO: 788983 - DNA, 15 bp, Homo sapiens
tgagcagaaacacgg

SEQ ID NO: 788984 - DNA, 15 bp, Homo sapiens
gagcagaaacacggt

SEQ ID NO: 788985 - DNA, 15 bp, Homo sapiens
agcagaaacacggtg

SEQ ID NO: 788986 - DNA, 15 bp, Homo sapiens
gcagaaacacggtgg

SEQ ID NO: 788987 - DNA, 15 bp, Homo sapiens
cagaaacacggtggc

SEQ ID NO: 788988 - DNA, 15 bp, Homo sapiens
agaaacacggtggct

SEQ ID NO: 788989 - DNA, 15 bp, Homo sapiens
gaaacacggtggcta

SEQ ID NO: 788990 - DNA, 15 bp, Homo sapiens
aaacacggtggctag

SEQ ID NO: 788991 - DNA, 15 bp, Homo sapiens
aacacggtggctagt

SEQ ID NO: 788992 - DNA, 15 bp, Homo sapiens
acacggtggctagta

SEQ ID NO: 788993 - DNA, 15 bp, Homo sapiens
cacggtggctagtaa

SEQ ID NO: 788994 - DNA, 15 bp, Homo sapiens
acggtggctagtaac

SEQ ID NO: 788995 - DNA, 15 bp, Homo sapiens
cggtggctagtaact

SEQ ID NO: 788996 - DNA, 15 bp, Homo sapiens
ggtggctagtaacta

SEQ ID NO: 788997 - DNA, 15 bp, Homo sapiens
gtggctagtaactat

SEQ ID NO: 788998 - DNA, 15 bp, Homo sapiens
tggctagtaactata

SEQ ID NO: 788999 - DNA, 15 bp, Homo sapiens
ggctagtaactatag

SEQ ID NO: 789000 - DNA, 15 bp, Homo sapiens
gctagtaactataga

SEQ ID NO: 789001 - DNA, 15 bp, Homo sapiens
ctagtaactatagaa

SEQ ID NO: 789002 - DNA, 15 bp, Homo sapiens
tagtaactatagaaa

SEQ ID NO: 789003 - DNA, 15 bp, Homo sapiens
agtaactatagaaag

SEQ ID NO: 789004 - DNA, 15 bp, Homo sapiens
gtaactatagaaagg

SEQ ID NO: 789005 - DNA, 15 bp, Homo sapiens
taactatagaaagga

SEQ ID NO: 789006 - DNA, 15 bp, Homo sapiens
aactatagaaaggat

SEQ ID NO: 789007 - DNA, 15 bp, Homo sapiens
actatagaaaggatt

SEQ ID NO: 789008 - DNA, 15 bp, Homo sapiens
ctatagaaaggattc

SEQ ID NO: 789009 - DNA, 15 bp, Homo sapiens
tatagaaaggattct

SEQ ID NO: 789010 - DNA, 15 bp, Homo sapiens
atagaaaggattctg

SEQ ID NO: 789011 - DNA, 15 bp, Homo sapiens
tagaaaggattctgg

SEQ ID NO: 789012 - DNA, 15 bp, Homo sapiens
agaaaggattctggg

SEQ ID NO: 789013 - DNA, 15 bp, Homo sapiens
gaaaggattctggga

SEQ ID NO: 789014 - DNA, 15 bp, Homo sapiens
aaaggattctgggaa

SEQ ID NO: 789015 - DNA, 15 bp, Homo sapiens
aaggattctgggaat

SEQ ID NO: 789016 - DNA, 15 bp, Homo sapiens
aggattctgggaatg

SEQ ID NO: 789017 - DNA, 15 bp, Homo sapiens
ggattctgggaatgg

SEQ ID NO: 789018 - DNA, 15 bp, Homo sapiens
gattctgggaatggc

SEQ ID NO: 789019 - DNA, 15 bp, Homo sapiens
attctgggaatggcg

SEQ ID NO: 789020 - DNA, 15 bp, Homo sapiens
ttctgggaatggcgt

SEQ ID NO: 789021 - DNA, 15 bp, Homo sapiens
tctgggaatggcgtg

SEQ ID NO: 789022 - DNA, 15 bp, Homo sapiens
ctgggaatggcgtgt

SEQ ID NO: 789023 - DNA, 15 bp, Homo sapiens
tgggaatggcgtgta

SEQ ID NO: 789024 - DNA, 15 bp, Homo sapiens
gggaatggcgtgtaa

SEQ ID NO: 789025 - DNA, 15 bp, Homo sapiens
ggaatggcgtgtaat

SEQ ID NO: 789026 - DNA, 15 bp, Homo sapiens
gaatggcgtgtaata

SEQ ID NO: 789027 - DNA, 15 bp, Homo sapiens
aatggcgtgtaatag

SEQ ID NO: 789028 - DNA, 15 bp, Homo sapiens
atggcgtgtaatagt

SEQ ID NO: 789029 - DNA, 15 bp, Homo sapiens
tggcgtgtaatagtc

SEQ ID NO: 789030 - DNA, 15 bp, Homo sapiens
ggcgtgtaatagtct

SEQ ID NO: 789031 - DNA, 15 bp, Homo sapiens
gcgtgtaatagtctg

SEQ ID NO: 789032 - DNA, 15 bp, Homo sapiens
cgtgtaatagtctgg

SEQ ID NO: 789033 - DNA, 15 bp, Homo sapiens
gtgtaatagtctggt

SEQ ID NO: 789034 - DNA, 15 bp, Homo sapiens
tgtaatagtctggtt

SEQ ID NO: 789035 - DNA, 15 bp, Homo sapiens
gtaatagtctggttt

SEQ ID NO: 789036 - DNA, 15 bp, Homo sapiens
taatagtctggtttg

SEQ ID NO: 789037 - DNA, 15 bp, Homo sapiens
aatagtctggtttga

SEQ ID NO: 789038 - DNA, 15 bp, Homo sapiens
atagtctggtttgac

SEQ ID NO: 789039 - DNA, 15 bp, Homo sapiens
tagtctggtttgaca

SEQ ID NO: 789040 - DNA, 15 bp, Homo sapiens
agtctggtttgacaa

SEQ ID NO: 789041 - DNA, 15 bp, Homo sapiens
gtctggtttgacaag

SEQ ID NO: 789042 - DNA, 15 bp, Homo sapiens
tctggtttgacaagg

SEQ ID NO: 789043 - DNA, 15 bp, Homo sapiens
ctggtttgacaaggc

SEQ ID NO: 789044 - DNA, 15 bp, Homo sapiens
tggtttgacaaggct

SEQ ID NO: 789045 - DNA, 15 bp, Homo sapiens
ggtttgacaaggcta

SEQ ID NO: 789046 - DNA, 15 bp, Homo sapiens
gtttgacaaggctag

SEQ ID NO: 789047 - DNA, 15 bp, Homo sapiens
tttgacaaggctaga

SEQ ID NO: 789048 - DNA, 15 bp, Homo sapiens
ttgacaaggctagaa

SEQ ID NO: 789049 - DNA, 15 bp, Homo sapiens
tgacaaggctagaat

SEQ ID NO: 789050 - DNA, 15 bp, Homo sapiens
gacaaggctagaatt

SEQ ID NO: 789051 - DNA, 15 bp, Homo sapiens
acaaggctagaattt

SEQ ID NO: 789052 - DNA, 15 bp, Homo sapiens
caaggctagaattta

SEQ ID NO: 789053 - DNA, 15 bp, Homo sapiens
aaggctagaatttaa

SEQ ID NO: 789054 - DNA, 15 bp, Homo sapiens
aggctagaatttaat

SEQ ID NO: 789055 - DNA, 15 bp, Homo sapiens
ggctagaatttaatc

SEQ ID NO: 789056 - DNA, 15 bp, Homo sapiens
gctagaatttaatcc

SEQ ID NO: 789057 - DNA, 15 bp, Homo sapiens
ctagaatttaatcct

SEQ ID NO: 789058 - DNA, 15 bp, Homo sapiens
tagaatttaatcctg

SEQ ID NO: 789059 - DNA, 15 bp, Homo sapiens
agaatttaatcctgc

SEQ ID NO: 789060 - DNA, 15 bp, Homo sapiens
gaatttaatcctgca

SEQ ID NO: 789061 - DNA, 15 bp, Homo sapiens
aatttaatcctgcag

SEQ ID NO: 789062 - DNA, 15 bp, Homo sapiens
atttaatcctgcaga

SEQ ID NO: 789063 - DNA, 15 bp, Homo sapiens
tttaatcctgcagaa

SEQ ID NO: 789064 - DNA, 15 bp, Homo sapiens
ttaatcctgcagaag

SEQ ID NO: 789065 - DNA, 15 bp, Homo sapiens
taatcctgcagaaga

SEQ ID NO: 789066 - DNA, 15 bp, Homo sapiens
aatcctgcagaagac

SEQ ID NO: 789067 - DNA, 15 bp, Homo sapiens
atcctgcagaagaca

SEQ ID NO: 789068 - DNA, 15 bp, Homo sapiens
tcctgcagaagacag

SEQ ID NO: 789069 - DNA, 15 bp, Homo sapiens
cctgcagaagacagg

SEQ ID NO: 789070 - DNA, 15 bp, Homo sapiens
ctgcagaagacagga

SEQ ID NO: 789071 - DNA, 15 bp, Homo sapiens
tgcagaagacaggag

SEQ ID NO: 789072 - DNA, 15 bp, Homo sapiens
gcagaagacaggaga

SEQ ID NO: 789073 - DNA, 15 bp, Homo sapiens
cagaagacaggagag

SEQ ID NO: 789074 - DNA, 15 bp, Homo sapiens
agaagacaggagagg

SEQ ID NO: 789075 - DNA, 15 bp, Homo sapiens
gaagacaggagaggc

SEQ ID NO: 789076 - DNA, 15 bp, Homo sapiens
aagacaggagaggcc

SEQ ID NO: 789077 - DNA, 15 bp, Homo sapiens
agacaggagaggccg

SEQ ID NO: 789078 - DNA, 15 bp, Homo sapiens
gacaggagaggccgg

SEQ ID NO: 789079 - DNA, 15 bp, Homo sapiens
acaggagaggccgga

SEQ ID NO: 789080 - DNA, 15 bp, Homo sapiens
caggagaggccggag

SEQ ID NO: 789081 - DNA, 15 bp, Homo sapiens
aggagaggccggagg

SEQ ID NO: 789082 - DNA, 15 bp, Homo sapiens
ggagaggccggagga

SEQ ID NO: 789083 - DNA, 15 bp, Homo sapiens
gagaggccggaggaa

SEQ ID NO: 789084 - DNA, 15 bp, Homo sapiens
agaggccggaggaat

SEQ ID NO: 789085 - DNA, 15 bp, Homo sapiens
gaggccggaggaatc

SEQ ID NO: 789086 - DNA, 15 bp, Homo sapiens
aggccggaggaatct

SEQ ID NO: 789087 - DNA, 15 bp, Homo sapiens
ggccggaggaatctg

SEQ ID NO: 789088 - DNA, 15 bp, Homo sapiens
gccggaggaatctgg

SEQ ID NO: 789089 - DNA, 15 bp, Homo sapiens
ccggaggaatctggc

SEQ ID NO: 789090 - DNA, 15 bp, Homo sapiens
cggaggaatctggcc

SEQ ID NO: 789091 - DNA, 15 bp, Homo sapiens
ggaggaatctggcct

SEQ ID NO: 789092 - DNA, 15 bp, Homo sapiens
gaggaatctggcctt

SEQ ID NO: 789093 - DNA, 15 bp, Homo sapiens
aggaatctggccttg

SEQ ID NO: 789094 - DNA, 15 bp, Homo sapiens
ggaatctggccttga

SEQ ID NO: 789095 - DNA, 15 bp, Homo sapiens
gaatctggccttgag

SEQ ID NO: 789096 - DNA, 15 bp, Homo sapiens
aatctggccttgagc

SEQ ID NO: 789097 - DNA, 15 bp, Homo sapiens
atctggccttgagct

SEQ ID NO: 789098 - DNA, 15 bp, Homo sapiens
tctggccttgagctg

SEQ ID NO: 789099 - DNA, 15 bp, Homo sapiens
ctggccttgagctga

SEQ ID NO: 789100 - DNA, 15 bp, Homo sapiens
tggccttgagctgag

SEQ ID NO: 789101 - DNA, 15 bp, Homo sapiens
ggccttgagctgaga

SEQ ID NO: 789102 - DNA, 15 bp, Homo sapiens
gccttgagctgagag

SEQ ID NO: 789103 - DNA, 15 bp, Homo sapiens
ccttgagctgagaga

SEQ ID NO: 789104 - DNA, 15 bp, Homo sapiens
cttgagctgagagag

SEQ ID NO: 789105 - DNA, 15 bp, Homo sapiens
ttgagctgagagagg

SEQ ID NO: 789106 - DNA, 15 bp, Homo sapiens
tgagctgagagaggg

SEQ ID NO: 789107 - DNA, 15 bp, Homo sapiens
gagctgagagagggc

SEQ ID NO: 789108 - DNA, 15 bp, Homo sapiens
agctgagagagggcc

SEQ ID NO: 789109 - DNA, 15 bp, Homo sapiens
gctgagagagggcct

SEQ ID NO: 789110 - DNA, 15 bp, Homo sapiens
ctgagagagggcctt

SEQ ID NO: 789111 - DNA, 15 bp, Homo sapiens
tgagagagggcctta

SEQ ID NO: 789112 - DNA, 15 bp, Homo sapiens
gagagagggccttaa

SEQ ID NO: 789113 - DNA, 15 bp, Homo sapiens
agagagggccttaaa

SEQ ID NO: 789114 - DNA, 15 bp, Homo sapiens
gagagggccttaaaa

SEQ ID NO: 789115 - DNA, 15 bp, Homo sapiens
agagggccttaaaag

SEQ ID NO: 789116 - DNA, 15 bp, Homo sapiens
gagggccttaaaagt

SEQ ID NO: 789117 - DNA, 15 bp, Homo sapiens
agggccttaaaagtt

SEQ ID NO: 789118 - DNA, 15 bp, Homo sapiens
gggccttaaaagtta

SEQ ID NO: 789119 - DNA, 15 bp, Homo sapiens
ggccttaaaagttac

SEQ ID NO: 789120 - DNA, 15 bp, Homo sapiens
gccttaaaagttacg

SEQ ID NO: 789121 - DNA, 15 bp, Homo sapiens
ccttaaaagttacgc

SEQ ID NO: 789122 - DNA, 15 bp, Homo sapiens
cttaaaagttacgct

SEQ ID NO: 789123 - DNA, 15 bp, Homo sapiens
ttaaaagttacgctt

SEQ ID NO: 789124 - DNA, 15 bp, Homo sapiens
taaaagttacgctta

SEQ ID NO: 789125 - DNA, 15 bp, Homo sapiens
aaaagttacgcttag

SEQ ID NO: 789126 - DNA, 15 bp, Homo sapiens
aaagttacgcttagg

SEQ ID NO: 789127 - DNA, 15 bp, Homo sapiens
aagttacgcttagga

SEQ ID NO: 789128 - DNA, 15 bp, Homo sapiens
agttacgcttaggag

SEQ ID NO: 789129 - DNA, 15 bp, Homo sapiens
gttacgcttaggagc

SEQ ID NO: 789130 - DNA, 15 bp, Homo sapiens
ttacgcttaggagct

SEQ ID NO: 789131 - DNA, 15 bp, Homo sapiens
tacgcttaggagctg

SEQ ID NO: 789132 - DNA, 15 bp, Homo sapiens
acgcttaggagctgg

SEQ ID NO: 789133 - DNA, 15 bp, Homo sapiens
cgcttaggagctggg

SEQ ID NO: 789134 - DNA, 15 bp, Homo sapiens
gcttaggagctggga

SEQ ID NO: 789135 - DNA, 15 bp, Homo sapiens
cttaggagctgggaa

SEQ ID NO: 789136 - DNA, 15 bp, Homo sapiens
ttaggagctgggaat

SEQ ID NO: 789137 - DNA, 15 bp, Homo sapiens
taggagctgggaatt

SEQ ID NO: 789138 - DNA, 15 bp, Homo sapiens
aggagctgggaattg

SEQ ID NO: 789139 - DNA, 15 bp, Homo sapiens
ggagctgggaattgt

SEQ ID NO: 789140 - DNA, 15 bp, Homo sapiens
gagctgggaattgtt

SEQ ID NO: 789141 - DNA, 15 bp, Homo sapiens
agctgggaattgttt

SEQ ID NO: 789142 - DNA, 15 bp, Homo sapiens
gctgggaattgttta

SEQ ID NO: 789143 - DNA, 15 bp, Homo sapiens
ctgggaattgtttac

SEQ ID NO: 789144 - DNA, 15 bp, Homo sapiens
tgggaattgtttacc

SEQ ID NO: 789145 - DNA, 15 bp, Homo sapiens
gggaattgtttacct

SEQ ID NO: 789146 - DNA, 15 bp, Homo sapiens
ggaattgtttacctg

SEQ ID NO: 789147 - DNA, 15 bp, Homo sapiens
gaattgtttacctgg

SEQ ID NO: 789148 - DNA, 15 bp, Homo sapiens
aattgtttacctgga

SEQ ID NO: 789149 - DNA, 15 bp, Homo sapiens
attgtttacctggaa

SEQ ID NO: 789150 - DNA, 15 bp, Homo sapiens
ttgtttacctggaat

SEQ ID NO: 789151 - DNA, 15 bp, Homo sapiens
tgtttacctggaatt

SEQ ID NO: 789152 - DNA, 15 bp, Homo sapiens
gtttacctggaattg

SEQ ID NO: 789153 - DNA, 15 bp, Homo sapiens
tttacctggaattgc

SEQ ID NO: 789154 - DNA, 15 bp, Homo sapiens
ttacctggaattgca

SEQ ID NO: 789155 - DNA, 15 bp, Homo sapiens
tacctggaattgcag

SEQ ID NO: 789156 - DNA, 15 bp, Homo sapiens
acctggaattgcaga

SEQ ID NO: 789157 - DNA, 15 bp, Homo sapiens
cctggaattgcagaa

SEQ ID NO: 789158 - DNA, 15 bp, Homo sapiens
ctggaattgcagaat

SEQ ID NO: 789159 - DNA, 15 bp, Homo sapiens
tggaattgcagaatt

SEQ ID NO: 789160 - DNA, 15 bp, Homo sapiens
ggaattgcagaattt

SEQ ID NO: 789161 - DNA, 15 bp, Homo sapiens
gaattgcagaatttg

SEQ ID NO: 789162 - DNA, 15 bp, Homo sapiens
aattgcagaatttga

SEQ ID NO: 789163 - DNA, 15 bp, Homo sapiens
attgcagaatttgaa

SEQ ID NO: 789164 - DNA, 15 bp, Homo sapiens
ttgcagaatttgaaa

SEQ ID NO: 789165 - DNA, 15 bp, Homo sapiens
tgcagaatttgaaag

SEQ ID NO: 789166 - DNA, 15 bp, Homo sapiens
gcagaatttgaaagg

SEQ ID NO: 789167 - DNA, 15 bp, Homo sapiens
cagaatttgaaaggt

SEQ ID NO: 789168 - DNA, 15 bp, Homo sapiens
agaatttgaaaggtt

SEQ ID NO: 789169 - DNA, 15 bp, Homo sapiens
gaatttgaaaggttc

SEQ ID NO: 789170 - DNA, 15 bp, Homo sapiens
aatttgaaaggttct

SEQ ID NO: 789171 - DNA, 15 bp, Homo sapiens
atttgaaaggttctt

SEQ ID NO: 789172 - DNA, 15 bp, Homo sapiens
tttgaaaggttcttg

SEQ ID NO: 789173 - DNA, 15 bp, Homo sapiens
ttgaaaggttcttgg

SEQ ID NO: 789174 - DNA, 15 bp, Homo sapiens
tgaaaggttcttggt

SEQ ID NO: 789175 - DNA, 15 bp, Homo sapiens
gaaaggttcttggtc

SEQ ID NO: 789176 - DNA, 15 bp, Homo sapiens
aaaggttcttggtcc

SEQ ID NO: 789177 - DNA, 15 bp, Homo sapiens
aaggttcttggtcct

SEQ ID NO: 789178 - DNA, 15 bp, Homo sapiens
aggttcttggtcctt

SEQ ID NO: 789179 - DNA, 15 bp, Homo sapiens
ggttcttggtccttt

SEQ ID NO: 789180 - DNA, 15 bp, Homo sapiens
gttcttggtcctttc

SEQ ID NO: 789181 - DNA, 15 bp, Homo sapiens
ttcttggtcctttct

SEQ ID NO: 789182 - DNA, 15 bp, Homo sapiens
tcttggtcctttctt

SEQ ID NO: 789183 - DNA, 15 bp, Homo sapiens
cttggtcctttcttt

SEQ ID NO: 789184 - DNA, 15 bp, Homo sapiens
ttggtcctttcttta

SEQ ID NO: 789185 - DNA, 15 bp, Homo sapiens
tggtcctttctttag

SEQ ID NO: 789186 - DNA, 15 bp, Homo sapiens
ggtcctttctttagt

SEQ ID NO: 789187 - DNA, 15 bp, Homo sapiens
gtcctttctttagta

SEQ ID NO: 789188 - DNA, 15 bp, Homo sapiens
tcctttctttagtat

SEQ ID NO: 789189 - DNA, 15 bp, Homo sapiens
cctttctttagtatc

SEQ ID NO: 789190 - DNA, 15 bp, Homo sapiens
ctttctttagtatcc

SEQ ID NO: 789191 - DNA, 15 bp, Homo sapiens
tttctttagtatccc

SEQ ID NO: 789192 - DNA, 15 bp, Homo sapiens
ttctttagtatccct

SEQ ID NO: 789193 - DNA, 15 bp, Homo sapiens
tctttagtatcccta

SEQ ID NO: 789194 - DNA, 15 bp, Homo sapiens
ctttagtatccctat

SEQ ID NO: 789195 - DNA, 15 bp, Homo sapiens
tttagtatccctatc

SEQ ID NO: 789196 - DNA, 15 bp, Homo sapiens
ttagtatccctatcc

SEQ ID NO: 789197 - DNA, 15 bp, Homo sapiens
tagtatccctatccc

SEQ ID NO: 789198 - DNA, 15 bp, Homo sapiens
agtatccctatccca

SEQ ID NO: 789199 - DNA, 15 bp, Homo sapiens
gtatccctatcccat

SEQ ID NO: 789200 - DNA, 15 bp, Homo sapiens
tatccctatcccatg

SEQ ID NO: 789201 - DNA, 15 bp, Homo sapiens
atccctatcccatga

SEQ ID NO: 789202 - DNA, 15 bp, Homo sapiens
tccctatcccatgac

SEQ ID NO: 789203 - DNA, 15 bp, Homo sapiens
ccctatcccatgact

SEQ ID NO: 789204 - DNA, 15 bp, Homo sapiens
cctatcccatgactg

SEQ ID NO: 789205 - DNA, 15 bp, Homo sapiens
ctatcccatgactgg

SEQ ID NO: 789206 - DNA, 15 bp, Homo sapiens
tatcccatgactggc

SEQ ID NO: 789207 - DNA, 15 bp, Homo sapiens
atcccatgactggct

SEQ ID NO: 789208 - DNA, 15 bp, Homo sapiens
tcccatgactggctt

SEQ ID NO: 789209 - DNA, 15 bp, Homo sapiens
cccatgactggcttc

SEQ ID NO: 789210 - DNA, 15 bp, Homo sapiens
ccatgactggcttct

SEQ ID NO: 789211 - DNA, 15 bp, Homo sapiens
catgactggcttctc

SEQ ID NO: 789212 - DNA, 15 bp, Homo sapiens
atgactggcttctct

SEQ ID NO: 789213 - DNA, 15 bp, Homo sapiens
tgactggcttctctg

SEQ ID NO: 789214 - DNA, 15 bp, Homo sapiens
gactggcttctctgt

SEQ ID NO: 789215 - DNA, 15 bp, Homo sapiens
actggcttctctgta

SEQ ID NO: 789216 - DNA, 15 bp, Homo sapiens
ctggcttctctgtat

SEQ ID NO: 789217 - DNA, 15 bp, Homo sapiens
tggcttctctgtata

SEQ ID NO: 789218 - DNA, 15 bp, Homo sapiens
ggcttctctgtatat

SEQ ID NO: 789219 - DNA, 15 bp, Homo sapiens
gcttctctgtatata

SEQ ID NO: 789220 - DNA, 15 bp, Homo sapiens
cttctctgtatataa

SEQ ID NO: 789221 - DNA, 15 bp, Homo sapiens
ttctctgtatataaa

SEQ ID NO: 789222 - DNA, 15 bp, Homo sapiens
tctctgtatataaat

SEQ ID NO: 789223 - DNA, 15 bp, Homo sapiens
ctctgtatataaata

SEQ ID NO: 789224 - DNA, 15 bp, Homo sapiens
tctgtatataaatag

SEQ ID NO: 789225 - DNA, 15 bp, Homo sapiens
ctgtatataaatagt

SEQ ID NO: 789226 - DNA, 15 bp, Homo sapiens
tgtatataaatagtt

SEQ ID NO: 789227 - DNA, 15 bp, Homo sapiens
gtatataaatagttc

SEQ ID NO: 789228 - DNA, 15 bp, Homo sapiens
tatataaatagttct

SEQ ID NO: 789229 - DNA, 15 bp, Homo sapiens
atataaatagttctg

SEQ ID NO: 789230 - DNA, 15 bp, Homo sapiens
tataaatagttctgg

SEQ ID NO: 789231 - DNA, 15 bp, Homo sapiens
ataaatagttctggt

SEQ ID NO: 789232 - DNA, 15 bp, Homo sapiens
taaatagttctggtg

SEQ ID NO: 789233 - DNA, 15 bp, Homo sapiens
aaatagttctggtga

SEQ ID NO: 789234 - DNA, 15 bp, Homo sapiens
aatagttctggtgac

SEQ ID NO: 789235 - DNA, 15 bp, Homo sapiens
atagttctggtgaca

SEQ ID NO: 789236 - DNA, 15 bp, Homo sapiens
tagttctggtgacag

SEQ ID NO: 789237 - DNA, 15 bp, Homo sapiens
agttctggtgacaga

SEQ ID NO: 789238 - DNA, 15 bp, Homo sapiens
gttctggtgacagag

SEQ ID NO: 789239 - DNA, 15 bp, Homo sapiens
ttctggtgacagaga

SEQ ID NO: 789240 - DNA, 15 bp, Homo sapiens
tctggtgacagagac

SEQ ID NO: 789241 - DNA, 15 bp, Homo sapiens
ctggtgacagagact

SEQ ID NO: 789242 - DNA, 15 bp, Homo sapiens
tggtgacagagactt

SEQ ID NO: 789243 - DNA, 15 bp, Homo sapiens
ggtgacagagacttc

SEQ ID NO: 789244 - DNA, 15 bp, Homo sapiens
gtgacagagacttct

SEQ ID NO: 789245 - DNA, 15 bp, Homo sapiens
tgacagagacttctc

SEQ ID NO: 789246 - DNA, 15 bp, Homo sapiens
gacagagacttctct

SEQ ID NO: 789247 - DNA, 15 bp, Homo sapiens
acagagacttctcta

SEQ ID NO: 789248 - DNA, 15 bp, Homo sapiens
cagagacttctctag

SEQ ID NO: 789249 - DNA, 15 bp, Homo sapiens
agagacttctctaga

SEQ ID NO: 789250 - DNA, 15 bp, Homo sapiens
gagacttctctagac

SEQ ID NO: 789251 - DNA, 15 bp, Homo sapiens
agacttctctagacc

SEQ ID NO: 789252 - DNA, 15 bp, Homo sapiens
gacttctctagacca

SEQ ID NO: 789253 - DNA, 15 bp, Homo sapiens
acttctctagaccat

SEQ ID NO: 789254 - DNA, 15 bp, Homo sapiens
cttctctagaccatc

SEQ ID NO: 789255 - DNA, 15 bp, Homo sapiens
ttctctagaccatct

SEQ ID NO: 789256 - DNA, 15 bp, Homo sapiens
tctctagaccatcta

SEQ ID NO: 789257 - DNA, 15 bp, Homo sapiens
ctctagaccatctat

SEQ ID NO: 789258 - DNA, 15 bp, Homo sapiens
tctagaccatctatt

SEQ ID NO: 789259 - DNA, 15 bp, Homo sapiens
ctagaccatctattc

SEQ ID NO: 789260 - DNA, 15 bp, Homo sapiens
tagaccatctattcc

SEQ ID NO: 789261 - DNA, 15 bp, Homo sapiens
agaccatctattcca

SEQ ID NO: 789262 - DNA, 15 bp, Homo sapiens
gaccatctattccat

SEQ ID NO: 789263 - DNA, 15 bp, Homo sapiens
accatctattccatt

SEQ ID NO: 789264 - DNA, 15 bp, Homo sapiens
ccatctattccattt

SEQ ID NO: 789265 - DNA, 15 bp, Homo sapiens
catctattccatttt

SEQ ID NO: 789266 - DNA, 15 bp, Homo sapiens
atctattccattttc

SEQ ID NO: 789267 - DNA, 15 bp, Homo sapiens
tctattccattttca

SEQ ID NO: 789268 - DNA, 15 bp, Homo sapiens
ctattccattttcag

SEQ ID NO: 789269 - DNA, 15 bp, Homo sapiens
tattccattttcaga

SEQ ID NO: 789270 - DNA, 15 bp, Homo sapiens
attccattttcagac

SEQ ID NO: 789271 - DNA, 15 bp, Homo sapiens
ttccattttcagaca

SEQ ID NO: 789272 - DNA, 15 bp, Homo sapiens
tccattttcagacag

SEQ ID NO: 789273 - DNA, 15 bp, Homo sapiens
ccattttcagacagc

SEQ ID NO: 789274 - DNA, 15 bp, Homo sapiens
cattttcagacagct

SEQ ID NO: 789275 - DNA, 15 bp, Homo sapiens
attttcagacagctc

SEQ ID NO: 789276 - DNA, 15 bp, Homo sapiens
ttttcagacagctct

SEQ ID NO: 789277 - DNA, 15 bp, Homo sapiens
tttcagacagctcta

SEQ ID NO: 789278 - DNA, 15 bp, Homo sapiens
ttcagacagctctaa

SEQ ID NO: 789279 - DNA, 15 bp, Homo sapiens
tcagacagctctaag

SEQ ID NO: 789280 - DNA, 15 bp, Homo sapiens
cagacagctctaagt

SEQ ID NO: 789281 - DNA, 15 bp, Homo sapiens
agacagctctaagta

SEQ ID NO: 789282 - DNA, 15 bp, Homo sapiens
gacagctctaagtat

SEQ ID NO: 789283 - DNA, 15 bp, Homo sapiens
acagctctaagtata

SEQ ID NO: 789284 - DNA, 15 bp, Homo sapiens
cagctctaagtataa

SEQ ID NO: 789285 - DNA, 15 bp, Homo sapiens
agctctaagtataag

SEQ ID NO: 789286 - DNA, 15 bp, Homo sapiens
gctctaagtataaga

SEQ ID NO: 789287 - DNA, 15 bp, Homo sapiens
ctctaagtataagaa

SEQ ID NO: 789288 - DNA, 15 bp, Homo sapiens
tctaagtataagaaa

SEQ ID NO: 789289 - DNA, 15 bp, Homo sapiens
ctaagtataagaaaa

SEQ ID NO: 789290 - DNA, 15 bp, Homo sapiens
taagtataagaaaat

SEQ ID NO: 789291 - DNA, 15 bp, Homo sapiens
aagtataagaaaatt

SEQ ID NO: 789292 - DNA, 15 bp, Homo sapiens
agtataagaaaattc

SEQ ID NO: 789293 - DNA, 15 bp, Homo sapiens
gtataagaaaattct

SEQ ID NO: 789294 - DNA, 15 bp, Homo sapiens
tataagaaaattctg

SEQ ID NO: 789295 - DNA, 15 bp, Homo sapiens
ataagaaaattctga

SEQ ID NO: 789296 - DNA, 15 bp, Homo sapiens
taagaaaattctgag

SEQ ID NO: 789297 - DNA, 15 bp, Homo sapiens
aagaaaattctgagc

SEQ ID NO: 789298 - DNA, 15 bp, Homo sapiens
agaaaattctgagca

SEQ ID NO: 789299 - DNA, 15 bp, Homo sapiens
gaaaattctgagcat

SEQ ID NO: 789300 - DNA, 15 bp, Homo sapiens
aaaattctgagcatt

SEQ ID NO: 789301 - DNA, 15 bp, Homo sapiens
aaattctgagcattg

SEQ ID NO: 789302 - DNA, 15 bp, Homo sapiens
aattctgagcattga

SEQ ID NO: 789303 - DNA, 15 bp, Homo sapiens
attctgagcattgag

SEQ ID NO: 789304 - DNA, 15 bp, Homo sapiens
ttctgagcattgagt

SEQ ID NO: 789305 - DNA, 15 bp, Homo sapiens
tctgagcattgagtc

SEQ ID NO: 789306 - DNA, 15 bp, Homo sapiens
ctgagcattgagtca

SEQ ID NO: 789307 - DNA, 15 bp, Homo sapiens
tgagcattgagtcaa

SEQ ID NO: 789308 - DNA, 15 bp, Homo sapiens
gagcattgagtcaaa

SEQ ID NO: 789309 - DNA, 15 bp, Homo sapiens
agcattgagtcaaaa

SEQ ID NO: 789310 - DNA, 15 bp, Homo sapiens
gcattgagtcaaaac

SEQ ID NO: 789311 - DNA, 15 bp, Homo sapiens
cattgagtcaaaacg

SEQ ID NO: 789312 - DNA, 15 bp, Homo sapiens
attgagtcaaaacgt

SEQ ID NO: 789313 - DNA, 15 bp, Homo sapiens
ttgagtcaaaacgta

SEQ ID NO: 789314 - DNA, 15 bp, Homo sapiens
tgagtcaaaacgtac

SEQ ID NO: 789315 - DNA, 15 bp, Homo sapiens
gagtcaaaacgtaca

SEQ ID NO: 789316 - DNA, 15 bp, Homo sapiens
agtcaaaacgtacag

SEQ ID NO: 789317 - DNA, 15 bp, Homo sapiens
gtcaaaacgtacagg

SEQ ID NO: 789318 - DNA, 15 bp, Homo sapiens
tcaaaacgtacaggt

SEQ ID NO: 789319 - DNA, 15 bp, Homo sapiens
caaaacgtacaggtt

SEQ ID NO: 789320 - DNA, 15 bp, Homo sapiens
aaaacgtacaggttc

SEQ ID NO: 789321 - DNA, 15 bp, Homo sapiens
aaacgtacaggttct

SEQ ID NO: 789322 - DNA, 15 bp, Homo sapiens
aacgtacaggttcta

SEQ ID NO: 789323 - DNA, 15 bp, Homo sapiens
acgtacaggttctac

SEQ ID NO: 789324 - DNA, 15 bp, Homo sapiens
cgtacaggttctacc

SEQ ID NO: 789325 - DNA, 15 bp, Homo sapiens
gtacaggttctacct

SEQ ID NO: 789326 - DNA, 15 bp, Homo sapiens
tacaggttctaccta

SEQ ID NO: 789327 - DNA, 15 bp, Homo sapiens
acaggttctacctat

SEQ ID NO: 789328 - DNA, 15 bp, Homo sapiens
caggttctacctata

SEQ ID NO: 789329 - DNA, 15 bp, Homo sapiens
aggttctacctatac

SEQ ID NO: 789330 - DNA, 15 bp, Homo sapiens
ggttctacctatacc

SEQ ID NO: 789331 - DNA, 15 bp, Homo sapiens
gttctacctatacct

SEQ ID NO: 789332 - DNA, 15 bp, Homo sapiens
ttctacctatacctt

SEQ ID NO: 789333 - DNA, 15 bp, Homo sapiens
tctacctataccttg

SEQ ID NO: 789334 - DNA, 15 bp, Homo sapiens
ctacctataccttgt

SEQ ID NO: 789335 - DNA, 15 bp, Homo sapiens
tacctataccttgtc

SEQ ID NO: 789336 - DNA, 15 bp, Homo sapiens
acctataccttgtcc

SEQ ID NO: 789337 - DNA, 15 bp, Homo sapiens
cctataccttgtcca

SEQ ID NO: 789338 - DNA, 15 bp, Homo sapiens
ctataccttgtccaa

SEQ ID NO: 789339 - DNA, 15 bp, Homo sapiens
tataccttgtccaag

SEQ ID NO: 789340 - DNA, 15 bp, Homo sapiens
ataccttgtccaagg

SEQ ID NO: 789341 - DNA, 15 bp, Homo sapiens
taccttgtccaaggt

SEQ ID NO: 789342 - DNA, 15 bp, Homo sapiens
accttgtccaaggtg

SEQ ID NO: 789343 - DNA, 15 bp, Homo sapiens
ccttgtccaaggtgt

SEQ ID NO: 789344 - DNA, 15 bp, Homo sapiens
cttgtccaaggtgta

SEQ ID NO: 789345 - DNA, 15 bp, Homo sapiens
ttgtccaaggtgtag

SEQ ID NO: 789346 - DNA, 15 bp, Homo sapiens
tgtccaaggtgtaga

SEQ ID NO: 789347 - DNA, 15 bp, Homo sapiens
gtccaaggtgtagat

SEQ ID NO: 789348 - DNA, 15 bp, Homo sapiens
tccaaggtgtagata

SEQ ID NO: 789349 - DNA, 15 bp, Homo sapiens
ccaaggtgtagataa

SEQ ID NO: 789350 - DNA, 15 bp, Homo sapiens
caaggtgtagataat

SEQ ID NO: 789351 - DNA, 15 bp, Homo sapiens
aaggtgtagataatg

SEQ ID NO: 789352 - DNA, 15 bp, Homo sapiens
aggtgtagataatgg

SEQ ID NO: 789353 - DNA, 15 bp, Homo sapiens
ggtgtagataatgga

SEQ ID NO: 789354 - DNA, 15 bp, Homo sapiens
gtgtagataatggaa

SEQ ID NO: 789355 - DNA, 15 bp, Homo sapiens
tgtagataatggaag

SEQ ID NO: 789356 - DNA, 15 bp, Homo sapiens
gtagataatggaaga

SEQ ID NO: 789357 - DNA, 15 bp, Homo sapiens
tagataatggaagat

SEQ ID NO: 789358 - DNA, 15 bp, Homo sapiens
agataatggaagatt

SEQ ID NO: 789359 - DNA, 15 bp, Homo sapiens
gataatggaagatta

SEQ ID NO: 789360 - DNA, 15 bp, Homo sapiens
ataatggaagattat

SEQ ID NO: 789361 - DNA, 15 bp, Homo sapiens
taatggaagattata

SEQ ID NO: 789362 - DNA, 15 bp, Homo sapiens
aatggaagattataa

SEQ ID NO: 789363 - DNA, 15 bp, Homo sapiens
atggaagattataaa

SEQ ID NO: 789364 - DNA, 15 bp, Homo sapiens
tggaagattataaat

SEQ ID NO: 789365 - DNA, 15 bp, Homo sapiens
ggaagattataaatg

SEQ ID NO: 789366 - DNA, 15 bp, Homo sapiens
gaagattataaatga

SEQ ID NO: 789367 - DNA, 15 bp, Homo sapiens
aagattataaatgat

SEQ ID NO: 789368 - DNA, 15 bp, Homo sapiens
agattataaatgata

SEQ ID NO: 789369 - DNA, 15 bp, Homo sapiens
gattataaatgataa

SEQ ID NO: 789370 - DNA, 15 bp, Homo sapiens
attataaatgataaa

SEQ ID NO: 789371 - DNA, 15 bp, Homo sapiens
ttataaatgataaag

SEQ ID NO: 789372 - DNA, 15 bp, Homo sapiens
tataaatgataaagg

SEQ ID NO: 789373 - DNA, 15 bp, Homo sapiens
ataaatgataaagga

SEQ ID NO: 789374 - DNA, 15 bp, Homo sapiens
taaatgataaaggac

SEQ ID NO: 789375 - DNA, 15 bp, Homo sapiens
aaatgataaaggaca

SEQ ID NO: 789376 - DNA, 15 bp, Homo sapiens
aatgataaaggacac

SEQ ID NO: 789377 - DNA, 15 bp, Homo sapiens
atgataaaggacacg

SEQ ID NO: 789378 - DNA, 15 bp, Homo sapiens
tgataaaggacacgt

SEQ ID NO: 789379 - DNA, 15 bp, Homo sapiens
gataaaggacacgtt

SEQ ID NO: 789380 - DNA, 15 bp, Homo sapiens
ataaaggacacgttt

SEQ ID NO: 789381 - DNA, 15 bp, Homo sapiens
taaaggacacgttta

SEQ ID NO: 789382 - DNA, 15 bp, Homo sapiens
aaaggacacgtttag

SEQ ID NO: 789383 - DNA, 15 bp, Homo sapiens
aaggacacgtttagg

SEQ ID NO: 789384 - DNA, 15 bp, Homo sapiens
aggacacgtttaggg

SEQ ID NO: 789385 - DNA, 15 bp, Homo sapiens
ggacacgtttaggga

SEQ ID NO: 789386 - DNA, 15 bp, Homo sapiens
gacacgtttagggat

SEQ ID NO: 789387 - DNA, 15 bp, Homo sapiens
acacgtttagggata

SEQ ID NO: 789388 - DNA, 15 bp, Homo sapiens
cacgtttagggatat

SEQ ID NO: 789389 - DNA, 15 bp, Homo sapiens
acgtttagggatatg

SEQ ID NO: 789390 - DNA, 15 bp, Homo sapiens
cgtttagggatatgt

SEQ ID NO: 789391 - DNA, 15 bp, Homo sapiens
gtttagggatatgta

SEQ ID NO: 789392 - DNA, 15 bp, Homo sapiens
tttagggatatgtaa

SEQ ID NO: 789393 - DNA, 15 bp, Homo sapiens
ttagggatatgtaac

SEQ ID NO: 789394 - DNA, 15 bp, Homo sapiens
tagggatatgtaact

SEQ ID NO: 789395 - DNA, 15 bp, Homo sapiens
agggatatgtaactc

SEQ ID NO: 789396 - DNA, 15 bp, Homo sapiens
gggatatgtaactca

SEQ ID NO: 789397 - DNA, 15 bp, Homo sapiens
ggatatgtaactcaa

SEQ ID NO: 789398 - DNA, 15 bp, Homo sapiens
gatatgtaactcaat

SEQ ID NO: 789399 - DNA, 15 bp, Homo sapiens
atatgtaactcaatg

SEQ ID NO: 789400 - DNA, 15 bp, Homo sapiens
tatgtaactcaatgg

SEQ ID NO: 789401 - DNA, 15 bp, Homo sapiens
atgtaactcaatggc

SEQ ID NO: 789402 - DNA, 15 bp, Homo sapiens
tgtaactcaatggcc

SEQ ID NO: 789403 - DNA, 15 bp, Homo sapiens
gtaactcaatggcct

SEQ ID NO: 789404 - DNA, 15 bp, Homo sapiens
taactcaatggcctg

SEQ ID NO: 789405 - DNA, 15 bp, Homo sapiens
aactcaatggcctga

SEQ ID NO: 789406 - DNA, 15 bp, Homo sapiens
actcaatggcctgaa

SEQ ID NO: 789407 - DNA, 15 bp, Homo sapiens
ctcaatggcctgaag

SEQ ID NO: 789408 - DNA, 15 bp, Homo sapiens
tcaatggcctgaagt

SEQ ID NO: 789409 - DNA, 15 bp, Homo sapiens
caatggcctgaagta

SEQ ID NO: 789410 - DNA, 15 bp, Homo sapiens
aatggcctgaagtag

SEQ ID NO: 789411 - DNA, 15 bp, Homo sapiens
atggcctgaagtaga

SEQ ID NO: 789412 - DNA, 15 bp, Homo sapiens
tggcctgaagtagag

SEQ ID NO: 789413 - DNA, 15 bp, Homo sapiens
ggcctgaagtagagc

SEQ ID NO: 789414 - DNA, 15 bp, Homo sapiens
gcctgaagtagagct

SEQ ID NO: 789415 - DNA, 15 bp, Homo sapiens
cctgaagtagagctg

SEQ ID NO: 789416 - DNA, 15 bp, Homo sapiens
ctgaagtagagctgt

SEQ ID NO: 789417 - DNA, 15 bp, Homo sapiens
tgaagtagagctgtg

SEQ ID NO: 789418 - DNA, 15 bp, Homo sapiens
gaagtagagctgtgg

SEQ ID NO: 789419 - DNA, 15 bp, Homo sapiens
aagtagagctgtggc

SEQ ID NO: 789420 - DNA, 15 bp, Homo sapiens
agtagagctgtggca

SEQ ID NO: 789421 - DNA, 15 bp, Homo sapiens
gtagagctgtggcag

SEQ ID NO: 789422 - DNA, 15 bp, Homo sapiens
tagagctgtggcagt

SEQ ID NO: 789423 - DNA, 15 bp, Homo sapiens
agagctgtggcagta

SEQ ID NO: 789424 - DNA, 15 bp, Homo sapiens
gagctgtggcagtag

SEQ ID NO: 789425 - DNA, 15 bp, Homo sapiens
agctgtggcagtaga

SEQ ID NO: 789426 - DNA, 15 bp, Homo sapiens
gctgtggcagtagac

SEQ ID NO: 789427 - DNA, 15 bp, Homo sapiens
ctgtggcagtagaca

SEQ ID NO: 789428 - DNA, 15 bp, Homo sapiens
tgtggcagtagacat

SEQ ID NO: 789429 - DNA, 15 bp, Homo sapiens
gtggcagtagacata

SEQ ID NO: 789430 - DNA, 15 bp, Homo sapiens
tggcagtagacatat

SEQ ID NO: 789431 - DNA, 15 bp, Homo sapiens
ggcagtagacatata

SEQ ID NO: 789432 - DNA, 15 bp, Homo sapiens
gcagtagacatataa

SEQ ID NO: 789433 - DNA, 15 bp, Homo sapiens
cagtagacatataat

SEQ ID NO: 789434 - DNA, 15 bp, Homo sapiens
agtagacatataata

SEQ ID NO: 789435 - DNA, 15 bp, Homo sapiens
gtagacatataatat

SEQ ID NO: 789436 - DNA, 15 bp, Homo sapiens
tagacatataatatt

SEQ ID NO: 789437 - DNA, 15 bp, Homo sapiens
agacatataatatta

SEQ ID NO: 789438 - DNA, 15 bp, Homo sapiens
gacatataatattat

SEQ ID NO: 789439 - DNA, 15 bp, Homo sapiens
acatataatattata

SEQ ID NO: 789440 - DNA, 15 bp, Homo sapiens
catataatattataa

SEQ ID NO: 789441 - DNA, 15 bp, Homo sapiens
atataatattataat

SEQ ID NO: 789442 - DNA, 15 bp, Homo sapiens
tataatattataata

SEQ ID NO: 789443 - DNA, 15 bp, Homo sapiens
ataatattataatac

SEQ ID NO: 789444 - DNA, 15 bp, Homo sapiens
taatattataatacg

SEQ ID NO: 789445 - DNA, 15 bp, Homo sapiens
aatattataatacgt

SEQ ID NO: 789446 - DNA, 15 bp, Homo sapiens
atattataatacgta

SEQ ID NO: 789447 - DNA, 15 bp, Homo sapiens
tattataatacgtac

SEQ ID NO: 789448 - DNA, 15 bp, Homo sapiens
attataatacgtact

SEQ ID NO: 789449 - DNA, 15 bp, Homo sapiens
ttataatacgtactc

SEQ ID NO: 789450 - DNA, 15 bp, Homo sapiens
tataatacgtactcc

SEQ ID NO: 789451 - DNA, 15 bp, Homo sapiens
ataatacgtactcca

SEQ ID NO: 789452 - DNA, 15 bp, Homo sapiens
taatacgtactccaa

SEQ ID NO: 789453 - DNA, 15 bp, Homo sapiens
aatacgtactccaaa

SEQ ID NO: 789454 - DNA, 15 bp, Homo sapiens
atacgtactccaaag

SEQ ID NO: 789455 - DNA, 15 bp, Homo sapiens
tacgtactccaaagc

SEQ ID NO: 789456 - DNA, 15 bp, Homo sapiens
acgtactccaaagca

SEQ ID NO: 789457 - DNA, 15 bp, Homo sapiens
cgtactccaaagcaa

SEQ ID NO: 789458 - DNA, 15 bp, Homo sapiens
gtactccaaagcaat

SEQ ID NO: 789459 - DNA, 15 bp, Homo sapiens
tactccaaagcaata

SEQ ID NO: 789460 - DNA, 15 bp, Homo sapiens
actccaaagcaatag

SEQ ID NO: 789461 - DNA, 15 bp, Homo sapiens
ctccaaagcaataga

SEQ ID NO: 789462 - DNA, 15 bp, Homo sapiens
tccaaagcaatagaa

SEQ ID NO: 789463 - DNA, 15 bp, Homo sapiens
ccaaagcaatagaaa

SEQ ID NO: 789464 - DNA, 15 bp, Homo sapiens
caaagcaatagaaat

SEQ ID NO: 789465 - DNA, 15 bp, Homo sapiens
aaagcaatagaaatt

SEQ ID NO: 789466 - DNA, 15 bp, Homo sapiens
aagcaatagaaattt

SEQ ID NO: 789467 - DNA, 15 bp, Homo sapiens
agcaatagaaattta

SEQ ID NO: 789468 - DNA, 15 bp, Homo sapiens
gcaatagaaatttaa

SEQ ID NO: 789469 - DNA, 15 bp, Homo sapiens
caatagaaatttaaa

SEQ ID NO: 789470 - DNA, 15 bp, Homo sapiens
aatagaaatttaaag

SEQ ID NO: 789471 - DNA, 15 bp, Homo sapiens
atagaaatttaaagc

SEQ ID NO: 789472 - DNA, 15 bp, Homo sapiens
tagaaatttaaagcc

SEQ ID NO: 789473 - DNA, 15 bp, Homo sapiens
agaaatttaaagcct

SEQ ID NO: 789474 - DNA, 15 bp, Homo sapiens
gaaatttaaagcctt

SEQ ID NO: 789475 - DNA, 15 bp, Homo sapiens
aaatttaaagccttt

SEQ ID NO: 789476 - DNA, 15 bp, Homo sapiens
aatttaaagccttta

SEQ ID NO: 789477 - DNA, 15 bp, Homo sapiens
atttaaagcctttaa

SEQ ID NO: 789478 - DNA, 15 bp, Homo sapiens
tttaaagcctttaaa

SEQ ID NO: 789479 - DNA, 15 bp, Homo sapiens
ttaaagcctttaaaa

SEQ ID NO: 789480 - DNA, 15 bp, Homo sapiens
taaagcctttaaaaa

SEQ ID NO: 789481 - DNA, 15 bp, Homo sapiens
aaagcctttaaaaag

SEQ ID NO: 789482 - DNA, 15 bp, Homo sapiens
aagcctttaaaaagt

SEQ ID NO: 789483 - DNA, 15 bp, Homo sapiens
agcctttaaaaagta

SEQ ID NO: 789484 - DNA, 15 bp, Homo sapiens
gcctttaaaaagtat

SEQ ID NO: 789485 - DNA, 15 bp, Homo sapiens
cctttaaaaagtatt

SEQ ID NO: 789486 - DNA, 15 bp, Homo sapiens
ctttaaaaagtattc

SEQ ID NO: 789487 - DNA, 15 bp, Homo sapiens
ttaaaaagtattcca

SEQ ID NO: 789488 - DNA, 15 bp, Homo sapiens
taaaaagtattccag

SEQ ID NO: 789489 - DNA, 15 bp, Homo sapiens
aaaaagtattccagt

SEQ ID NO: 789490 - DNA, 15 bp, Homo sapiens
aaaagtattccagtc

SEQ ID NO: 789491 - DNA, 15 bp, Homo sapiens
aaagtattccagtca

SEQ ID NO: 789492 - DNA, 15 bp, Homo sapiens
aagtattccagtcat

SEQ ID NO: 789493 - DNA, 15 bp, Homo sapiens
agtattccagtcatg

SEQ ID NO: 789494 - DNA, 15 bp, Homo sapiens
gtattccagtcatga

SEQ ID NO: 789495 - DNA, 15 bp, Homo sapiens
tattccagtcatgaa

SEQ ID NO: 789496 - DNA, 15 bp, Homo sapiens
attccagtcatgaag

SEQ ID NO: 789497 - DNA, 15 bp, Homo sapiens
ttccagtcatgaagt

SEQ ID NO: 789498 - DNA, 15 bp, Homo sapiens
tccagtcatgaagtg

SEQ ID NO: 789499 - DNA, 15 bp, Homo sapiens
ccagtcatgaagtgt

SEQ ID NO: 789500 - DNA, 15 bp, Homo sapiens
cagtcatgaagtgtg

SEQ ID NO: 789501 - DNA, 15 bp, Homo sapiens
agtcatgaagtgtgt

SEQ ID NO: 789502 - DNA, 15 bp, Homo sapiens
gtcatgaagtgtgtg

SEQ ID NO: 789503 - DNA, 15 bp, Homo sapiens
tcatgaagtgtgtgt

SEQ ID NO: 789504 - DNA, 15 bp, Homo sapiens
catgaagtgtgtgtt

SEQ ID NO: 789505 - DNA, 15 bp, Homo sapiens
atgaagtgtgtgttg

SEQ ID NO: 789506 - DNA, 15 bp, Homo sapiens
tgaagtgtgtgttga

SEQ ID NO: 789507 - DNA, 15 bp, Homo sapiens
gaagtgtgtgttgag

SEQ ID NO: 789508 - DNA, 15 bp, Homo sapiens
aagtgtgtgttgagc

SEQ ID NO: 789509 - DNA, 15 bp, Homo sapiens
agtgtgtgttgagca

SEQ ID NO: 789510 - DNA, 15 bp, Homo sapiens
gtgtgtgttgagcac

SEQ ID NO: 789511 - DNA, 15 bp, Homo sapiens
tgtgtgttgagcacc

SEQ ID NO: 789512 - DNA, 15 bp, Homo sapiens
gtgtgttgagcacct

SEQ ID NO: 789513 - DNA, 15 bp, Homo sapiens
tgtgttgagcaccta

SEQ ID NO: 789514 - DNA, 15 bp, Homo sapiens
gtgttgagcacctat

SEQ ID NO: 789515 - DNA, 15 bp, Homo sapiens
tgttgagcacctatg

SEQ ID NO: 789516 - DNA, 15 bp, Homo sapiens
gttgagcacctatga

SEQ ID NO: 789517 - DNA, 15 bp, Homo sapiens
ttgagcacctatgat

SEQ ID NO: 789518 - DNA, 15 bp, Homo sapiens
tgagcacctatgata

SEQ ID NO: 789519 - DNA, 15 bp, Homo sapiens
gagcacctatgatag

SEQ ID NO: 789520 - DNA, 15 bp, Homo sapiens
agcacctatgatagg

SEQ ID NO: 789521 - DNA, 15 bp, Homo sapiens
gcacctatgataggt

SEQ ID NO: 789522 - DNA, 15 bp, Homo sapiens
cacctatgataggtc

SEQ ID NO: 789523 - DNA, 15 bp, Homo sapiens
acctatgataggtcg

SEQ ID NO: 789524 - DNA, 15 bp, Homo sapiens
cctatgataggtcgg

SEQ ID NO: 789525 - DNA, 15 bp, Homo sapiens
ctatgataggtcggt

SEQ ID NO: 789526 - DNA, 15 bp, Homo sapiens
tatgataggtcggtc

SEQ ID NO: 789527 - DNA, 15 bp, Homo sapiens
atgataggtcggtca

SEQ ID NO: 789528 - DNA, 15 bp, Homo sapiens
tgataggtcggtcac

SEQ ID NO: 789529 - DNA, 15 bp, Homo sapiens
gataggtcggtcact

SEQ ID NO: 789530 - DNA, 15 bp, Homo sapiens
ataggtcggtcactg

SEQ ID NO: 789531 - DNA, 15 bp, Homo sapiens
taggtcggtcactga

SEQ ID NO: 789532 - DNA, 15 bp, Homo sapiens
aggtcggtcactgac

SEQ ID NO: 789533 - DNA, 15 bp, Homo sapiens
ggtcggtcactgacc

SEQ ID NO: 789534 - DNA, 15 bp, Homo sapiens
gtcggtcactgacca

SEQ ID NO: 789535 - DNA, 15 bp, Homo sapiens
tcggtcactgaccaa

SEQ ID NO: 789536 - DNA, 15 bp, Homo sapiens
cggtcactgaccaag

SEQ ID NO: 789537 - DNA, 15 bp, Homo sapiens
ggtcactgaccaaga

SEQ ID NO: 789538 - DNA, 15 bp, Homo sapiens
gtcactgaccaagaa

SEQ ID NO: 789539 - DNA, 15 bp, Homo sapiens
tcactgaccaagaat

SEQ ID NO: 789540 - DNA, 15 bp, Homo sapiens
cactgaccaagaata

SEQ ID NO: 789541 - DNA, 15 bp, Homo sapiens
actgaccaagaatac

SEQ ID NO: 789542 - DNA, 15 bp, Homo sapiens
ctgaccaagaataca

SEQ ID NO: 789543 - DNA, 15 bp, Homo sapiens
tgaccaagaatacag

SEQ ID NO: 789544 - DNA, 15 bp, Homo sapiens
gaccaagaatacagc

SEQ ID NO: 789545 - DNA, 15 bp, Homo sapiens
accaagaatacagca

SEQ ID NO: 789546 - DNA, 15 bp, Homo sapiens
ccaagaatacagcaa

SEQ ID NO: 789547 - DNA, 15 bp, Homo sapiens
caagaatacagcaat

SEQ ID NO: 789548 - DNA, 15 bp, Homo sapiens
aagaatacagcaata

SEQ ID NO: 789549 - DNA, 15 bp, Homo sapiens
agaatacagcaataa

SEQ ID NO: 789550 - DNA, 15 bp, Homo sapiens
gaatacagcaataag

SEQ ID NO: 789551 - DNA, 15 bp, Homo sapiens
aatacagcaataagg

SEQ ID NO: 789552 - DNA, 15 bp, Homo sapiens
atacagcaataaggc

SEQ ID NO: 789553 - DNA, 15 bp, Homo sapiens
tacagcaataaggca

SEQ ID NO: 789554 - DNA, 15 bp, Homo sapiens
acagcaataaggcaa

SEQ ID NO: 789555 - DNA, 15 bp, Homo sapiens
cagcaataaggcaaa

SEQ ID NO: 789556 - DNA, 15 bp, Homo sapiens
agcaataaggcaaag

SEQ ID NO: 789557 - DNA, 15 bp, Homo sapiens
gcaataaggcaaagt

SEQ ID NO: 789558 - DNA, 15 bp, Homo sapiens
caataaggcaaagtt

SEQ ID NO: 789559 - DNA, 15 bp, Homo sapiens
aataaggcaaagttc

SEQ ID NO: 789560 - DNA, 15 bp, Homo sapiens
ataaggcaaagttcc

SEQ ID NO: 789561 - DNA, 15 bp, Homo sapiens
taaggcaaagttcct

SEQ ID NO: 789562 - DNA, 15 bp, Homo sapiens
aaggcaaagttcctg

SEQ ID NO: 789563 - DNA, 15 bp, Homo sapiens
aggcaaagttcctgc

SEQ ID NO: 789564 - DNA, 15 bp, Homo sapiens
ggcaaagttcctgct

SEQ ID NO: 789565 - DNA, 15 bp, Homo sapiens
gcaaagttcctgctc

SEQ ID NO: 789566 - DNA, 15 bp, Homo sapiens
caaagttcctgctct

SEQ ID NO: 789567 - DNA, 15 bp, Homo sapiens
aaagttcctgctctc

SEQ ID NO: 789568 - DNA, 15 bp, Homo sapiens
aagttcctgctctca

SEQ ID NO: 789569 - DNA, 15 bp, Homo sapiens
agttcctgctctcac

SEQ ID NO: 789570 - DNA, 15 bp, Homo sapiens
gttcctgctctcacg

SEQ ID NO: 789571 - DNA, 15 bp, Homo sapiens
ttcctgctctcacgt

SEQ ID NO: 789572 - DNA, 15 bp, Homo sapiens
tcctgctctcacgtt

SEQ ID NO: 789573 - DNA, 15 bp, Homo sapiens
cctgctctcacgttc

SEQ ID NO: 789574 - DNA, 15 bp, Homo sapiens
ctgctctcacgttct

SEQ ID NO: 789575 - DNA, 15 bp, Homo sapiens
tgctctcacgttctt

SEQ ID NO: 789576 - DNA, 15 bp, Homo sapiens
gctctcacgttcttc

SEQ ID NO: 789577 - DNA, 15 bp, Homo sapiens
ctctcacgttcttct

SEQ ID NO: 789578 - DNA, 15 bp, Homo sapiens
tctcacgttcttctc

SEQ ID NO: 789579 - DNA, 15 bp, Homo sapiens
ctcacgttcttctca

SEQ ID NO: 789580 - DNA, 15 bp, Homo sapiens
tcacgttcttctcag

SEQ ID NO: 789581 - DNA, 15 bp, Homo sapiens
cacgttcttctcaga

SEQ ID NO: 789582 - DNA, 15 bp, Homo sapiens
acgttcttctcagac

SEQ ID NO: 789583 - DNA, 15 bp, Homo sapiens
cgttcttctcagact

SEQ ID NO: 789584 - DNA, 15 bp, Homo sapiens
gttcttctcagactc

SEQ ID NO: 789585 - DNA, 15 bp, Homo sapiens
ttcttctcagactca

SEQ ID NO: 789586 - DNA, 15 bp, Homo sapiens
tcttctcagactcat

SEQ ID NO: 789587 - DNA, 15 bp, Homo sapiens
cttctcagactcatg

SEQ ID NO: 789588 - DNA, 15 bp, Homo sapiens
ttctcagactcatgg

SEQ ID NO: 789589 - DNA, 15 bp, Homo sapiens
tctcagactcatgga

SEQ ID NO: 789590 - DNA, 15 bp, Homo sapiens
ctcagactcatggag

SEQ ID NO: 789591 - DNA, 15 bp, Homo sapiens
tcagactcatggaga

SEQ ID NO: 789592 - DNA, 15 bp, Homo sapiens
cagactcatggagaa

SEQ ID NO: 789593 - DNA, 15 bp, Homo sapiens
agactcatggagaag

SEQ ID NO: 789594 - DNA, 15 bp, Homo sapiens
gactcatggagaaga

SEQ ID NO: 789595 - DNA, 15 bp, Homo sapiens
actcatggagaagat

SEQ ID NO: 789596 - DNA, 15 bp, Homo sapiens
ctcatggagaagatg

SEQ ID NO: 789597 - DNA, 15 bp, Homo sapiens
tcatggagaagatgg

SEQ ID NO: 789598 - DNA, 15 bp, Homo sapiens
catggagaagatgga

SEQ ID NO: 789599 - DNA, 15 bp, Homo sapiens
atggagaagatggac

SEQ ID NO: 789600 - DNA, 15 bp, Homo sapiens
tggagaagatggaca

SEQ ID NO: 789601 - DNA, 15 bp, Homo sapiens
ggagaagatggacaa

SEQ ID NO: 789602 - DNA, 15 bp, Homo sapiens
gagaagatggacaag

SEQ ID NO: 789603 - DNA, 15 bp, Homo sapiens
agaagatggacaagt

SEQ ID NO: 789604 - DNA, 15 bp, Homo sapiens
gaagatggacaagta

SEQ ID NO: 789605 - DNA, 15 bp, Homo sapiens
aagatggacaagtag

SEQ ID NO: 789606 - DNA, 15 bp, Homo sapiens
agatggacaagtaga

SEQ ID NO: 789607 - DNA, 15 bp, Homo sapiens
gatggacaagtagat

SEQ ID NO: 789608 - DNA, 15 bp, Homo sapiens
atggacaagtagatg

SEQ ID NO: 789609 - DNA, 15 bp, Homo sapiens
tggacaagtagatga

SEQ ID NO: 789610 - DNA, 15 bp, Homo sapiens
ggacaagtagatgat

SEQ ID NO: 789611 - DNA, 15 bp, Homo sapiens
gacaagtagatgatt

SEQ ID NO: 789612 - DNA, 15 bp, Homo sapiens
acaagtagatgattg

SEQ ID NO: 789613 - DNA, 15 bp, Homo sapiens
caagtagatgattgt

SEQ ID NO: 789614 - DNA, 15 bp, Homo sapiens
aagtagatgattgtg

SEQ ID NO: 789615 - DNA, 15 bp, Homo sapiens
agtagatgattgtga

SEQ ID NO: 789616 - DNA, 15 bp, Homo sapiens
gtagatgattgtgac

SEQ ID NO: 789617 - DNA, 15 bp, Homo sapiens
tagatgattgtgaca

SEQ ID NO: 789618 - DNA, 15 bp, Homo sapiens
agatgattgtgacaa

SEQ ID NO: 789619 - DNA, 15 bp, Homo sapiens
gatgattgtgacaag

SEQ ID NO: 789620 - DNA, 15 bp, Homo sapiens
atgattgtgacaagg

SEQ ID NO: 789621 - DNA, 15 bp, Homo sapiens
tgattgtgacaagga

SEQ ID NO: 789622 - DNA, 15 bp, Homo sapiens
gattgtgacaaggac

SEQ ID NO: 789623 - DNA, 15 bp, Homo sapiens
attgtgacaaggact

SEQ ID NO: 789624 - DNA, 15 bp, Homo sapiens
ttgtgacaaggactc

SEQ ID NO: 789625 - DNA, 15 bp, Homo sapiens
tgtgacaaggactct

SEQ ID NO: 789626 - DNA, 15 bp, Homo sapiens
gtgacaaggactctg

SEQ ID NO: 789627 - DNA, 15 bp, Homo sapiens
tgacaaggactctgg

SEQ ID NO: 789628 - DNA, 15 bp, Homo sapiens
gacaaggactctggt

SEQ ID NO: 789629 - DNA, 15 bp, Homo sapiens
acaaggactctggta

SEQ ID NO: 789630 - DNA, 15 bp, Homo sapiens
caaggactctggtag

SEQ ID NO: 789631 - DNA, 15 bp, Homo sapiens
aaggactctggtagt

SEQ ID NO: 789632 - DNA, 15 bp, Homo sapiens
aggactctggtagtt

SEQ ID NO: 789633 - DNA, 15 bp, Homo sapiens
ggactctggtagttc

SEQ ID NO: 789634 - DNA, 15 bp, Homo sapiens
gactctggtagttca

SEQ ID NO: 789635 - DNA, 15 bp, Homo sapiens
actctggtagttcag

SEQ ID NO: 789636 - DNA, 15 bp, Homo sapiens
ctctggtagttcagg

SEQ ID NO: 789637 - DNA, 15 bp, Homo sapiens
tctggtagttcaggc

SEQ ID NO: 789638 - DNA, 15 bp, Homo sapiens
ctggtagttcaggcc

SEQ ID NO: 789639 - DNA, 15 bp, Homo sapiens
tggtagttcaggcca

SEQ ID NO: 789640 - DNA, 15 bp, Homo sapiens
ggtagttcaggccag

SEQ ID NO: 789641 - DNA, 15 bp, Homo sapiens
gtagttcaggccagg

SEQ ID NO: 789642 - DNA, 15 bp, Homo sapiens
tagttcaggccagga

SEQ ID NO: 789643 - DNA, 15 bp, Homo sapiens
agttcaggccaggag

SEQ ID NO: 789644 - DNA, 15 bp, Homo sapiens
gttcaggccaggagt

SEQ ID NO: 789645 - DNA, 15 bp, Homo sapiens
ttcaggccaggagta

SEQ ID NO: 789646 - DNA, 15 bp, Homo sapiens
tcaggccaggagtac

SEQ ID NO: 789647 - DNA, 15 bp, Homo sapiens
caggccaggagtact

SEQ ID NO: 789648 - DNA, 15 bp, Homo sapiens
aggccaggagtactt

SEQ ID NO: 789649 - DNA, 15 bp, Homo sapiens
ggccaggagtactta

SEQ ID NO: 789650 - DNA, 15 bp, Homo sapiens
gccaggagtacttaa

SEQ ID NO: 789651 - DNA, 15 bp, Homo sapiens
ccaggagtacttaac

SEQ ID NO: 789652 - DNA, 15 bp, Homo sapiens
caggagtacttaacc

SEQ ID NO: 789653 - DNA, 15 bp, Homo sapiens
aggagtacttaacca

SEQ ID NO: 789654 - DNA, 15 bp, Homo sapiens
ggagtacttaaccag

SEQ ID NO: 789655 - DNA, 15 bp, Homo sapiens
gagtacttaaccagc

SEQ ID NO: 789656 - DNA, 15 bp, Homo sapiens
agtacttaaccagca

SEQ ID NO: 789657 - DNA, 15 bp, Homo sapiens
gtacttaaccagcag

SEQ ID NO: 789658 - DNA, 15 bp, Homo sapiens
tacttaaccagcaga

SEQ ID NO: 789659 - DNA, 15 bp, Homo sapiens
acttaaccagcagat

SEQ ID NO: 789660 - DNA, 15 bp, Homo sapiens
cttaaccagcagatg

SEQ ID NO: 789661 - DNA, 15 bp, Homo sapiens
ttaaccagcagatga

SEQ ID NO: 789662 - DNA, 15 bp, Homo sapiens
taaccagcagatgaa

SEQ ID NO: 789663 - DNA, 15 bp, Homo sapiens
aaccagcagatgaag

SEQ ID NO: 789664 - DNA, 15 bp, Homo sapiens
accagcagatgaagg

SEQ ID NO: 789665 - DNA, 15 bp, Homo sapiens
ccagcagatgaaggt

SEQ ID NO: 789666 - DNA, 15 bp, Homo sapiens
cagcagatgaaggta

SEQ ID NO: 789667 - DNA, 15 bp, Homo sapiens
agcagatgaaggtaa

SEQ ID NO: 789668 - DNA, 15 bp, Homo sapiens
gcagatgaaggtaag

SEQ ID NO: 789669 - DNA, 15 bp, Homo sapiens
cagatgaaggtaaga

SEQ ID NO: 789670 - DNA, 15 bp, Homo sapiens
agatgaaggtaagag

SEQ ID NO: 789671 - DNA, 15 bp, Homo sapiens
gatgaaggtaagagg

SEQ ID NO: 789672 - DNA, 15 bp, Homo sapiens
atgaaggtaagaggt

SEQ ID NO: 789673 - DNA, 15 bp, Homo sapiens
tgaaggtaagaggtc

SEQ ID NO: 789674 - DNA, 15 bp, Homo sapiens
gaaggtaagaggtca

SEQ ID NO: 789675 - DNA, 15 bp, Homo sapiens
aaggtaagaggtcag

SEQ ID NO: 789676 - DNA, 15 bp, Homo sapiens
aggtaagaggtcagg

SEQ ID NO: 789677 - DNA, 15 bp, Homo sapiens
ggtaagaggtcagga

SEQ ID NO: 789678 - DNA, 15 bp, Homo sapiens
gtaagaggtcaggag

SEQ ID NO: 789679 - DNA, 15 bp, Homo sapiens
taagaggtcaggagt

SEQ ID NO: 789680 - DNA, 15 bp, Homo sapiens
aagaggtcaggagtc

SEQ ID NO: 789681 - DNA, 15 bp, Homo sapiens
agaggtcaggagtca

SEQ ID NO: 789682 - DNA, 15 bp, Homo sapiens
gaggtcaggagtcag

SEQ ID NO: 789683 - DNA, 15 bp, Homo sapiens
aggtcaggagtcagg

SEQ ID NO: 789684 - DNA, 15 bp, Homo sapiens
ggtcaggagtcaggg

SEQ ID NO: 789685 - DNA, 15 bp, Homo sapiens
gtcaggagtcagggg

SEQ ID NO: 789686 - DNA, 15 bp, Homo sapiens
tcaggagtcaggggc

SEQ ID NO: 789687 - DNA, 15 bp, Homo sapiens
caggagtcaggggcc

SEQ ID NO: 789688 - DNA, 15 bp, Homo sapiens
aggagtcaggggcca

SEQ ID NO: 789689 - DNA, 15 bp, Homo sapiens
ggagtcaggggccag

SEQ ID NO: 789690 - DNA, 15 bp, Homo sapiens
gagtcaggggccagg

SEQ ID NO: 789691 - DNA, 15 bp, Homo sapiens
agtcaggggccaggt

SEQ ID NO: 789692 - DNA, 15 bp, Homo sapiens
gtcaggggccaggta

SEQ ID NO: 789693 - DNA, 15 bp, Homo sapiens
tcaggggccaggtaa

SEQ ID NO: 789694 - DNA, 15 bp, Homo sapiens
caggggccaggtaaa

SEQ ID NO: 789695 - DNA, 15 bp, Homo sapiens
aggggccaggtaaag

SEQ ID NO: 789696 - DNA, 15 bp, Homo sapiens
ggggccaggtaaaga

SEQ ID NO: 789697 - DNA, 15 bp, Homo sapiens
gggccaggtaaagat

SEQ ID NO: 789698 - DNA, 15 bp, Homo sapiens
ggccaggtaaagatt

SEQ ID NO: 789699 - DNA, 15 bp, Homo sapiens
gccaggtaaagattt

SEQ ID NO: 789700 - DNA, 15 bp, Homo sapiens
ccaggtaaagatttc

SEQ ID NO: 789701 - DNA, 15 bp, Homo sapiens
caggtaaagatttcc

SEQ ID NO: 789702 - DNA, 15 bp, Homo sapiens
aggtaaagatttcct

SEQ ID NO: 789703 - DNA, 15 bp, Homo sapiens
ggtaaagatttcctg

SEQ ID NO: 789704 - DNA, 15 bp, Homo sapiens
gtaaagatttcctga

SEQ ID NO: 789705 - DNA, 15 bp, Homo sapiens
taaagatttcctgaa

SEQ ID NO: 789706 - DNA, 15 bp, Homo sapiens
aaagatttcctgaaa

SEQ ID NO: 789707 - DNA, 15 bp, Homo sapiens
aagatttcctgaaag

SEQ ID NO: 789708 - DNA, 15 bp, Homo sapiens
agatttcctgaaagt

SEQ ID NO: 789709 - DNA, 15 bp, Homo sapiens
gatttcctgaaagtt

SEQ ID NO: 789710 - DNA, 15 bp, Homo sapiens
atttcctgaaagttg

SEQ ID NO: 789711 - DNA, 15 bp, Homo sapiens
tttcctgaaagttga

SEQ ID NO: 789712 - DNA, 15 bp, Homo sapiens
ttcctgaaagttgag

SEQ ID NO: 789713 - DNA, 15 bp, Homo sapiens
tcctgaaagttgagg

SEQ ID NO: 789714 - DNA, 15 bp, Homo sapiens
cctgaaagttgagga

SEQ ID NO: 789715 - DNA, 15 bp, Homo sapiens
ctgaaagttgaggag

SEQ ID NO: 789716 - DNA, 15 bp, Homo sapiens
tgaaagttgaggagc

SEQ ID NO: 789717 - DNA, 15 bp, Homo sapiens
gaaagttgaggagcg

SEQ ID NO: 789718 - DNA, 15 bp, Homo sapiens
aaagttgaggagcgg

SEQ ID NO: 789719 - DNA, 15 bp, Homo sapiens
aagttgaggagcggc

SEQ ID NO: 789720 - DNA, 15 bp, Homo sapiens
agttgaggagcggcc

SEQ ID NO: 789721 - DNA, 15 bp, Homo sapiens
gttgaggagcggcca

SEQ ID NO: 789722 - DNA, 15 bp, Homo sapiens
ttgaggagcggccag

SEQ ID NO: 789723 - DNA, 15 bp, Homo sapiens
tgaggagcggccaga

SEQ ID NO: 789724 - DNA, 15 bp, Homo sapiens
gaggagcggccagat

SEQ ID NO: 789725 - DNA, 15 bp, Homo sapiens
aggagcggccagatt

SEQ ID NO: 789726 - DNA, 15 bp, Homo sapiens
ggagcggccagattg

SEQ ID NO: 789727 - DNA, 15 bp, Homo sapiens
gagcggccagattga

SEQ ID NO: 789728 - DNA, 15 bp, Homo sapiens
agcggccagattgac

SEQ ID NO: 789729 - DNA, 15 bp, Homo sapiens
gcggccagattgacc

SEQ ID NO: 789730 - DNA, 15 bp, Homo sapiens
cggccagattgacca

SEQ ID NO: 789731 - DNA, 15 bp, Homo sapiens
ggccagattgaccag

SEQ ID NO: 789732 - DNA, 15 bp, Homo sapiens
gccagattgaccagg

SEQ ID NO: 789733 - DNA, 15 bp, Homo sapiens
ccagattgaccagga

SEQ ID NO: 789734 - DNA, 15 bp, Homo sapiens
cagattgaccaggac

SEQ ID NO: 789735 - DNA, 15 bp, Homo sapiens
agattgaccaggaca

SEQ ID NO: 789736 - DNA, 15 bp, Homo sapiens
gattgaccaggacag

SEQ ID NO: 789737 - DNA, 15 bp, Homo sapiens
attgaccaggacagg

SEQ ID NO: 789738 - DNA, 15 bp, Homo sapiens
ttgaccaggacagga

SEQ ID NO: 789739 - DNA, 15 bp, Homo sapiens
tgaccaggacaggag

SEQ ID NO: 789740 - DNA, 15 bp, Homo sapiens
gaccaggacaggaga

SEQ ID NO: 789741 - DNA, 15 bp, Homo sapiens
accaggacaggagag

SEQ ID NO: 789742 - DNA, 15 bp, Homo sapiens
ccaggacaggagagc

SEQ ID NO: 789743 - DNA, 15 bp, Homo sapiens
caggacaggagagca

SEQ ID NO: 789744 - DNA, 15 bp, Homo sapiens
aggacaggagagcac

SEQ ID NO: 789745 - DNA, 15 bp, Homo sapiens
ggacaggagagcact

SEQ ID NO: 789746 - DNA, 15 bp, Homo sapiens
gacaggagagcactc

SEQ ID NO: 789747 - DNA, 15 bp, Homo sapiens
acaggagagcactcc

SEQ ID NO: 789748 - DNA, 15 bp, Homo sapiens
caggagagcactcca

SEQ ID NO: 789749 - DNA, 15 bp, Homo sapiens
aggagagcactccag

SEQ ID NO: 789750 - DNA, 15 bp, Homo sapiens
ggagagcactccagg

SEQ ID NO: 789751 - DNA, 15 bp, Homo sapiens
gagagcactccaggg

SEQ ID NO: 789752 - DNA, 15 bp, Homo sapiens
agagcactccaggga

SEQ ID NO: 789753 - DNA, 15 bp, Homo sapiens
gagcactccagggag

SEQ ID NO: 789754 - DNA, 15 bp, Homo sapiens
agcactccagggagg

SEQ ID NO: 789755 - DNA, 15 bp, Homo sapiens
gcactccagggagga

SEQ ID NO: 789756 - DNA, 15 bp, Homo sapiens
cactccagggaggag

SEQ ID NO: 789757 - DNA, 15 bp, Homo sapiens
actccagggaggagg

SEQ ID NO: 789758 - DNA, 15 bp, Homo sapiens
ctccagggaggagga

SEQ ID NO: 789759 - DNA, 15 bp, Homo sapiens
tccagggaggaggag

SEQ ID NO: 789760 - DNA, 15 bp, Homo sapiens
ccagggaggaggagc

SEQ ID NO: 789761 - DNA, 15 bp, Homo sapiens
cagggaggaggagct

SEQ ID NO: 789762 - DNA, 15 bp, Homo sapiens
agggaggaggagctt

SEQ ID NO: 789763 - DNA, 15 bp, Homo sapiens
gggaggaggagcttg

SEQ ID NO: 789764 - DNA, 15 bp, Homo sapiens
ggaggaggagcttgg

SEQ ID NO: 789765 - DNA, 15 bp, Homo sapiens
gaggaggagcttgga

SEQ ID NO: 789766 - DNA, 15 bp, Homo sapiens
aggaggagcttggaa

SEQ ID NO: 789767 - DNA, 15 bp, Homo sapiens
ggaggagcttggaac

SEQ ID NO: 789768 - DNA, 15 bp, Homo sapiens
gaggagcttggaaca

SEQ ID NO: 789769 - DNA, 15 bp, Homo sapiens
aggagcttggaacat

SEQ ID NO: 789770 - DNA, 15 bp, Homo sapiens
ggagcttggaacatg

SEQ ID NO: 789771 - DNA, 15 bp, Homo sapiens
gagcttggaacatga

SEQ ID NO: 789772 - DNA, 15 bp, Homo sapiens
agcttggaacatgag

SEQ ID NO: 789773 - DNA, 15 bp, Homo sapiens
gcttggaacatgagt

SEQ ID NO: 789774 - DNA, 15 bp, Homo sapiens
cttggaacatgagtg

SEQ ID NO: 789775 - DNA, 15 bp, Homo sapiens
ttggaacatgagtga

SEQ ID NO: 789776 - DNA, 15 bp, Homo sapiens
tggaacatgagtgaa

SEQ ID NO: 789777 - DNA, 15 bp, Homo sapiens
ggaacatgagtgaac

SEQ ID NO: 789778 - DNA, 15 bp, Homo sapiens
gaacatgagtgaaca

SEQ ID NO: 789779 - DNA, 15 bp, Homo sapiens
aacatgagtgaacat

SEQ ID NO: 789780 - DNA, 15 bp, Homo sapiens
acatgagtgaacatg

SEQ ID NO: 789781 - DNA, 15 bp, Homo sapiens
catgagtgaacatgg

SEQ ID NO: 789782 - DNA, 15 bp, Homo sapiens
atgagtgaacatggc

SEQ ID NO: 789783 - DNA, 15 bp, Homo sapiens
tgagtgaacatggcc

SEQ ID NO: 789784 - DNA, 15 bp, Homo sapiens
gagtgaacatggcct

SEQ ID NO: 789785 - DNA, 15 bp, Homo sapiens
agtgaacatggcctg

SEQ ID NO: 789786 - DNA, 15 bp, Homo sapiens
gtgaacatggcctgt

SEQ ID NO: 789787 - DNA, 15 bp, Homo sapiens
tgaacatggcctgtt

SEQ ID NO: 789788 - DNA, 15 bp, Homo sapiens
gaacatggcctgttt

SEQ ID NO: 789789 - DNA, 15 bp, Homo sapiens
aacatggcctgttta

SEQ ID NO: 789790 - DNA, 15 bp, Homo sapiens
acatggcctgtttaa

SEQ ID NO: 789791 - DNA, 15 bp, Homo sapiens
catggcctgtttaag

SEQ ID NO: 789792 - DNA, 15 bp, Homo sapiens
atggcctgtttaagg

SEQ ID NO: 789793 - DNA, 15 bp, Homo sapiens
tggcctgtttaagga

SEQ ID NO: 789794 - DNA, 15 bp, Homo sapiens
ggcctgtttaaggaa

SEQ ID NO: 789795 - DNA, 15 bp, Homo sapiens
gcctgtttaaggaac

SEQ ID NO: 789796 - DNA, 15 bp, Homo sapiens
cctgtttaaggaact

SEQ ID NO: 789797 - DNA, 15 bp, Homo sapiens
ctgtttaaggaactg

SEQ ID NO: 789798 - DNA, 15 bp, Homo sapiens
tgtttaaggaactga

SEQ ID NO: 789799 - DNA, 15 bp, Homo sapiens
gtttaaggaactgaa

SEQ ID NO: 789800 - DNA, 15 bp, Homo sapiens
tttaaggaactgaaa

SEQ ID NO: 789801 - DNA, 15 bp, Homo sapiens
ttaaggaactgaaag

SEQ ID NO: 789802 - DNA, 15 bp, Homo sapiens
taaggaactgaaagc

SEQ ID NO: 789803 - DNA, 15 bp, Homo sapiens
aaggaactgaaagct

SEQ ID NO: 789804 - DNA, 15 bp, Homo sapiens
aggaactgaaagctg

SEQ ID NO: 789805 - DNA, 15 bp, Homo sapiens
ggaactgaaagctgt

SEQ ID NO: 789806 - DNA, 15 bp, Homo sapiens
gaactgaaagctgtt

SEQ ID NO: 789807 - DNA, 15 bp, Homo sapiens
aactgaaagctgttc

SEQ ID NO: 789808 - DNA, 15 bp, Homo sapiens
actgaaagctgttct

SEQ ID NO: 789809 - DNA, 15 bp, Homo sapiens
ctgaaagctgttcta

SEQ ID NO: 789810 - DNA, 15 bp, Homo sapiens
tgaaagctgttctat

SEQ ID NO: 789811 - DNA, 15 bp, Homo sapiens
gaaagctgttctatg

SEQ ID NO: 789812 - DNA, 15 bp, Homo sapiens
aaagctgttctatgc

SEQ ID NO: 789813 - DNA, 15 bp, Homo sapiens
aagctgttctatgcc

SEQ ID NO: 789814 - DNA, 15 bp, Homo sapiens
agctgttctatgcca

SEQ ID NO: 789815 - DNA, 15 bp, Homo sapiens
gctgttctatgccag

SEQ ID NO: 789816 - DNA, 15 bp, Homo sapiens
ctgttctatgccaga

SEQ ID NO: 789817 - DNA, 15 bp, Homo sapiens
tgttctatgccagat

SEQ ID NO: 789818 - DNA, 15 bp, Homo sapiens
gttctatgccagatg

SEQ ID NO: 789819 - DNA, 15 bp, Homo sapiens
ttctatgccagatgc

SEQ ID NO: 789820 - DNA, 15 bp, Homo sapiens
tctatgccagatgcg

SEQ ID NO: 789821 - DNA, 15 bp, Homo sapiens
ctatgccagatgcgt

SEQ ID NO: 789822 - DNA, 15 bp, Homo sapiens
tatgccagatgcgtg

SEQ ID NO: 789823 - DNA, 15 bp, Homo sapiens
atgccagatgcgtgg

SEQ ID NO: 789824 - DNA, 15 bp, Homo sapiens
tgccagatgcgtggt

SEQ ID NO: 789825 - DNA, 15 bp, Homo sapiens
gccagatgcgtggtg

SEQ ID NO: 789826 - DNA, 15 bp, Homo sapiens
ccagatgcgtggtgc

SEQ ID NO: 789827 - DNA, 15 bp, Homo sapiens
cagatgcgtggtgcg

SEQ ID NO: 789828 - DNA, 15 bp, Homo sapiens
agatgcgtggtgcgt

SEQ ID NO: 789829 - DNA, 15 bp, Homo sapiens
gatgcgtggtgcgtg

SEQ ID NO: 789830 - DNA, 15 bp, Homo sapiens
atgcgtggtgcgtgt

SEQ ID NO: 789831 - DNA, 15 bp, Homo sapiens
tgcgtggtgcgtgtg

SEQ ID NO: 789832 - DNA, 15 bp, Homo sapiens
gcgtggtgcgtgtga

SEQ ID NO: 789833 - DNA, 15 bp, Homo sapiens
cgtggtgcgtgtgaa

SEQ ID NO: 789834 - DNA, 15 bp, Homo sapiens
gtggtgcgtgtgaag

SEQ ID NO: 789835 - DNA, 15 bp, Homo sapiens
tggtgcgtgtgaagt

SEQ ID NO: 789836 - DNA, 15 bp, Homo sapiens
ggtgcgtgtgaagtg

SEQ ID NO: 789837 - DNA, 15 bp, Homo sapiens
gtgcgtgtgaagtgg

SEQ ID NO: 789838 - DNA, 15 bp, Homo sapiens
tgcgtgtgaagtggc

SEQ ID NO: 789839 - DNA, 15 bp, Homo sapiens
gcgtgtgaagtggct

SEQ ID NO: 789840 - DNA, 15 bp, Homo sapiens
cgtgtgaagtggcta

SEQ ID NO: 789841 - DNA, 15 bp, Homo sapiens
gtgtgaagtggctag

SEQ ID NO: 789842 - DNA, 15 bp, Homo sapiens
tgtgaagtggctaga

SEQ ID NO: 789843 - DNA, 15 bp, Homo sapiens
gtgaagtggctagaa

SEQ ID NO: 789844 - DNA, 15 bp, Homo sapiens
tgaagtggctagaag

SEQ ID NO: 789845 - DNA, 15 bp, Homo sapiens
gaagtggctagaagt

SEQ ID NO: 789846 - DNA, 15 bp, Homo sapiens
aagtggctagaagtg

SEQ ID NO: 789847 - DNA, 15 bp, Homo sapiens
agtggctagaagtga

SEQ ID NO: 789848 - DNA, 15 bp, Homo sapiens
gtggctagaagtgag

SEQ ID NO: 789849 - DNA, 15 bp, Homo sapiens
tggctagaagtgagg

SEQ ID NO: 789850 - DNA, 15 bp, Homo sapiens
ggctagaagtgaggt

SEQ ID NO: 789851 - DNA, 15 bp, Homo sapiens
gctagaagtgaggtt

SEQ ID NO: 789852 - DNA, 15 bp, Homo sapiens
ctagaagtgaggttg

SEQ ID NO: 789853 - DNA, 15 bp, Homo sapiens
tagaagtgaggttgg

SEQ ID NO: 789854 - DNA, 15 bp, Homo sapiens
agaagtgaggttggc

SEQ ID NO: 789855 - DNA, 15 bp, Homo sapiens
gaagtgaggttggca

SEQ ID NO: 789856 - DNA, 15 bp, Homo sapiens
aagtgaggttggcat

SEQ ID NO: 789857 - DNA, 15 bp, Homo sapiens
agtgaggttggcata

SEQ ID NO: 789858 - DNA, 15 bp, Homo sapiens
gtgaggttggcatat

SEQ ID NO: 789859 - DNA, 15 bp, Homo sapiens
tgaggttggcatatt

SEQ ID NO: 789860 - DNA, 15 bp, Homo sapiens
gaggttggcatatta

SEQ ID NO: 789861 - DNA, 15 bp, Homo sapiens
aggttggcatattag

SEQ ID NO: 789862 - DNA, 15 bp, Homo sapiens
ggttggcatattaga

SEQ ID NO: 789863 - DNA, 15 bp, Homo sapiens
gttggcatattagac

SEQ ID NO: 789864 - DNA, 15 bp, Homo sapiens
ttggcatattagaca

SEQ ID NO: 789865 - DNA, 15 bp, Homo sapiens
tggcatattagacag

SEQ ID NO: 789866 - DNA, 15 bp, Homo sapiens
ggcatattagacagg

SEQ ID NO: 789867 - DNA, 15 bp, Homo sapiens
gcatattagacaggg

SEQ ID NO: 789868 - DNA, 15 bp, Homo sapiens
catattagacaggga

SEQ ID NO: 789869 - DNA, 15 bp, Homo sapiens
atattagacagggac

SEQ ID NO: 789870 - DNA, 15 bp, Homo sapiens
tattagacagggact

SEQ ID NO: 789871 - DNA, 15 bp, Homo sapiens
attagacagggactt

SEQ ID NO: 789872 - DNA, 15 bp, Homo sapiens
ttagacagggacttg

SEQ ID NO: 789873 - DNA, 15 bp, Homo sapiens
tagacagggacttgt

SEQ ID NO: 789874 - DNA, 15 bp, Homo sapiens
agacagggacttgtc

SEQ ID NO: 789875 - DNA, 15 bp, Homo sapiens
gacagggacttgtca

SEQ ID NO: 789876 - DNA, 15 bp, Homo sapiens
acagggacttgtcac

SEQ ID NO: 789877 - DNA, 15 bp, Homo sapiens
cagggacttgtcaca

SEQ ID NO: 789878 - DNA, 15 bp, Homo sapiens
agggacttgtcacaa

SEQ ID NO: 789879 - DNA, 15 bp, Homo sapiens
gggacttgtcacaag

SEQ ID NO: 789880 - DNA, 15 bp, Homo sapiens
ggacttgtcacaagg

SEQ ID NO: 789881 - DNA, 15 bp, Homo sapiens
gacttgtcacaaggg

SEQ ID NO: 789882 - DNA, 15 bp, Homo sapiens
acttgtcacaagggg

SEQ ID NO: 789883 - DNA, 15 bp, Homo sapiens
cttgtcacaaggggc

SEQ ID NO: 789884 - DNA, 15 bp, Homo sapiens
ttgtcacaaggggct

SEQ ID NO: 789885 - DNA, 15 bp, Homo sapiens
tgtcacaaggggcta

SEQ ID NO: 789886 - DNA, 15 bp, Homo sapiens
gtcacaaggggctac

SEQ ID NO: 789887 - DNA, 15 bp, Homo sapiens
tcacaaggggctacg

SEQ ID NO: 789888 - DNA, 15 bp, Homo sapiens
cacaaggggctacgt

SEQ ID NO: 789889 - DNA, 15 bp, Homo sapiens
acaaggggctacgtt

SEQ ID NO: 789890 - DNA, 15 bp, Homo sapiens
caaggggctacgttt

SEQ ID NO: 789891 - DNA, 15 bp, Homo sapiens
aaggggctacgtttg

SEQ ID NO: 789892 - DNA, 15 bp, Homo sapiens
aggggctacgtttgc

SEQ ID NO: 789893 - DNA, 15 bp, Homo sapiens
ggggctacgtttgcc

SEQ ID NO: 789894 - DNA, 15 bp, Homo sapiens
gggctacgtttgcca

SEQ ID NO: 789895 - DNA, 15 bp, Homo sapiens
ggctacgtttgccat

SEQ ID NO: 789896 - DNA, 15 bp, Homo sapiens
gctacgtttgccatg

SEQ ID NO: 789897 - DNA, 15 bp, Homo sapiens
ctacgtttgccatgc

SEQ ID NO: 789898 - DNA, 15 bp, Homo sapiens
tacgtttgccatgct

SEQ ID NO: 789899 - DNA, 15 bp, Homo sapiens
acgtttgccatgcta

SEQ ID NO: 789900 - DNA, 15 bp, Homo sapiens
cgtttgccatgctaa

SEQ ID NO: 789901 - DNA, 15 bp, Homo sapiens
gtttgccatgctaag

SEQ ID NO: 789902 - DNA, 15 bp, Homo sapiens
tttgccatgctaagc

SEQ ID NO: 789903 - DNA, 15 bp, Homo sapiens
ttgccatgctaagca

SEQ ID NO: 789904 - DNA, 15 bp, Homo sapiens
tgccatgctaagcat

SEQ ID NO: 789905 - DNA, 15 bp, Homo sapiens
gccatgctaagcatt

SEQ ID NO: 789906 - DNA, 15 bp, Homo sapiens
ccatgctaagcattt

SEQ ID NO: 789907 - DNA, 15 bp, Homo sapiens
catgctaagcatttt

SEQ ID NO: 789908 - DNA, 15 bp, Homo sapiens
atgctaagcatttta

SEQ ID NO: 789909 - DNA, 15 bp, Homo sapiens
tgctaagcattttag

SEQ ID NO: 789910 - DNA, 15 bp, Homo sapiens
gctaagcattttaga

SEQ ID NO: 789911 - DNA, 15 bp, Homo sapiens
ctaagcattttagat

SEQ ID NO: 789912 - DNA, 15 bp, Homo sapiens
taagcattttagatt

SEQ ID NO: 789913 - DNA, 15 bp, Homo sapiens
aagcattttagatta

SEQ ID NO: 789914 - DNA, 15 bp, Homo sapiens
agcattttagattat

SEQ ID NO: 789915 - DNA, 15 bp, Homo sapiens
gcattttagattata

SEQ ID NO: 789916 - DNA, 15 bp, Homo sapiens
cattttagattatat

SEQ ID NO: 789917 - DNA, 15 bp, Homo sapiens
attttagattatatc

SEQ ID NO: 789918 - DNA, 15 bp, Homo sapiens
ttttagattatatcc

SEQ ID NO: 789919 - DNA, 15 bp, Homo sapiens
tttagattatatcct

SEQ ID NO: 789920 - DNA, 15 bp, Homo sapiens
ttagattatatcctg

SEQ ID NO: 789921 - DNA, 15 bp, Homo sapiens
tagattatatcctga

SEQ ID NO: 789922 - DNA, 15 bp, Homo sapiens
agattatatcctgaa

SEQ ID NO: 789923 - DNA, 15 bp, Homo sapiens
gattatatcctgaat

SEQ ID NO: 789924 - DNA, 15 bp, Homo sapiens
attatatcctgaatt

SEQ ID NO: 789925 - DNA, 15 bp, Homo sapiens
ttatatcctgaattc

SEQ ID NO: 789926 - DNA, 15 bp, Homo sapiens
tatatcctgaattca

SEQ ID NO: 789927 - DNA, 15 bp, Homo sapiens
atatcctgaattcag

SEQ ID NO: 789928 - DNA, 15 bp, Homo sapiens
tatcctgaattcagt

SEQ ID NO: 789929 - DNA, 15 bp, Homo sapiens
atcctgaattcagtg

SEQ ID NO: 789930 - DNA, 15 bp, Homo sapiens
tcctgaattcagtga

SEQ ID NO: 789931 - DNA, 15 bp, Homo sapiens
cctgaattcagtgag

SEQ ID NO: 789932 - DNA, 15 bp, Homo sapiens
ctgaattcagtgaga

SEQ ID NO: 789933 - DNA, 15 bp, Homo sapiens
tgaattcagtgagaa

SEQ ID NO: 789934 - DNA, 15 bp, Homo sapiens
gaattcagtgagaag

SEQ ID NO: 789935 - DNA, 15 bp, Homo sapiens
aattcagtgagaagc

SEQ ID NO: 789936 - DNA, 15 bp, Homo sapiens
attcagtgagaagcc

SEQ ID NO: 789937 - DNA, 15 bp, Homo sapiens
ttcagtgagaagcca

SEQ ID NO: 789938 - DNA, 15 bp, Homo sapiens
tcagtgagaagccag

SEQ ID NO: 789939 - DNA, 15 bp, Homo sapiens
cagtgagaagccagt

SEQ ID NO: 789940 - DNA, 15 bp, Homo sapiens
agtgagaagccagta

SEQ ID NO: 789941 - DNA, 15 bp, Homo sapiens
gtgagaagccagtat

SEQ ID NO: 789942 - DNA, 15 bp, Homo sapiens
tgagaagccagtatt

SEQ ID NO: 789943 - DNA, 15 bp, Homo sapiens
gagaagccagtattc

SEQ ID NO: 789944 - DNA, 15 bp, Homo sapiens
agaagccagtattcc

SEQ ID NO: 789945 - DNA, 15 bp, Homo sapiens
gaagccagtattcct

SEQ ID NO: 789946 - DNA, 15 bp, Homo sapiens
aagccagtattccta

SEQ ID NO: 789947 - DNA, 15 bp, Homo sapiens
agccagtattcctaa

SEQ ID NO: 789948 - DNA, 15 bp, Homo sapiens
gccagtattcctaaa

SEQ ID NO: 789949 - DNA, 15 bp, Homo sapiens
ccagtattcctaaaa

SEQ ID NO: 789950 - DNA, 15 bp, Homo sapiens
cagtattcctaaaaa

SEQ ID NO: 789951 - DNA, 15 bp, Homo sapiens
agtattcctaaaaat

SEQ ID NO: 789952 - DNA, 15 bp, Homo sapiens
gtattcctaaaaatg

SEQ ID NO: 789953 - DNA, 15 bp, Homo sapiens
tattcctaaaaatgg

SEQ ID NO: 789954 - DNA, 15 bp, Homo sapiens
attcctaaaaatggc

SEQ ID NO: 789955 - DNA, 15 bp, Homo sapiens
ttcctaaaaatggct

SEQ ID NO: 789956 - DNA, 15 bp, Homo sapiens
tcctaaaaatggctg

SEQ ID NO: 789957 - DNA, 15 bp, Homo sapiens
cctaaaaatggctgt

SEQ ID NO: 789958 - DNA, 15 bp, Homo sapiens
ctaaaaatggctgtc

SEQ ID NO: 789959 - DNA, 15 bp, Homo sapiens
taaaaatggctgtcc

SEQ ID NO: 789960 - DNA, 15 bp, Homo sapiens
aaaaatggctgtccc

SEQ ID NO: 789961 - DNA, 15 bp, Homo sapiens
aaaatggctgtcccc

SEQ ID NO: 789962 - DNA, 15 bp, Homo sapiens
aaatggctgtccccc

SEQ ID NO: 789963 - DNA, 15 bp, Homo sapiens
aatggctgtccccct

SEQ ID NO: 789964 - DNA, 15 bp, Homo sapiens
atggctgtccccctc

SEQ ID NO: 789965 - DNA, 15 bp, Homo sapiens
tggctgtccccctcc

SEQ ID NO: 789966 - DNA, 15 bp, Homo sapiens
ggctgtccccctccc

SEQ ID NO: 789967 - DNA, 15 bp, Homo sapiens
gctgtccccctcccc

SEQ ID NO: 789968 - DNA, 15 bp, Homo sapiens
ctgtccccctcccca

SEQ ID NO: 789969 - DNA, 15 bp, Homo sapiens
tgtccccctccccag

SEQ ID NO: 789970 - DNA, 15 bp, Homo sapiens
gtccccctccccagt

SEQ ID NO: 789971 - DNA, 15 bp, Homo sapiens
tccccctccccagtt

SEQ ID NO: 789972 - DNA, 15 bp, Homo sapiens
ccccctccccagttt

SEQ ID NO: 789973 - DNA, 15 bp, Homo sapiens
cccctccccagttta

SEQ ID NO: 789974 - DNA, 15 bp, Homo sapiens
ccctccccagtttat

SEQ ID NO: 789975 - DNA, 15 bp, Homo sapiens
cctccccagtttata

SEQ ID NO: 789976 - DNA, 15 bp, Homo sapiens
ctccccagtttatag

SEQ ID NO: 789977 - DNA, 15 bp, Homo sapiens
tccccagtttataga

SEQ ID NO: 789978 - DNA, 15 bp, Homo sapiens
ccccagtttatagaa

SEQ ID NO: 789979 - DNA, 15 bp, Homo sapiens
cccagtttatagaat

SEQ ID NO: 789980 - DNA, 15 bp, Homo sapiens
ccagtttatagaatg

SEQ ID NO: 789981 - DNA, 15 bp, Homo sapiens
cagtttatagaatga

SEQ ID NO: 789982 - DNA, 15 bp, Homo sapiens
agtttatagaatgaa

SEQ ID NO: 789983 - DNA, 15 bp, Homo sapiens
gtttatagaatgaat

SEQ ID NO: 789984 - DNA, 15 bp, Homo sapiens
tttatagaatgaata

SEQ ID NO: 789985 - DNA, 15 bp, Homo sapiens
ttatagaatgaatat

SEQ ID NO: 789986 - DNA, 15 bp, Homo sapiens
tatagaatgaatatt

SEQ ID NO: 789987 - DNA, 15 bp, Homo sapiens
atagaatgaatatta

SEQ ID NO: 789988 - DNA, 15 bp, Homo sapiens
tagaatgaatattag

SEQ ID NO: 789989 - DNA, 15 bp, Homo sapiens
agaatgaatattaga

SEQ ID NO: 789990 - DNA, 15 bp, Homo sapiens
gaatgaatattagaa

SEQ ID NO: 789991 - DNA, 15 bp, Homo sapiens
aatgaatattagaac

SEQ ID NO: 789992 - DNA, 15 bp, Homo sapiens
atgaatattagaaca

SEQ ID NO: 789993 - DNA, 15 bp, Homo sapiens
tgaatattagaacaa

SEQ ID NO: 789994 - DNA, 15 bp, Homo sapiens
gaatattagaacaaa

SEQ ID NO: 789995 - DNA, 15 bp, Homo sapiens
aatattagaacaaaa

SEQ ID NO: 789996 - DNA, 15 bp, Homo sapiens
atattagaacaaaat

SEQ ID NO: 789997 - DNA, 15 bp, Homo sapiens
tattagaacaaaatt

SEQ ID NO: 789998 - DNA, 15 bp, Homo sapiens
attagaacaaaattt

SEQ ID NO: 789999 - DNA, 15 bp, Homo sapiens
ttagaacaaaatttt

SEQ ID NO: 790000 - DNA, 15 bp, Homo sapiens
tagaacaaaatttta

SEQ ID NO: 790001 - DNA, 15 bp, Homo sapiens
agaacaaaattttaa

SEQ ID NO: 790002 - DNA, 15 bp, Homo sapiens
gaacaaaattttaaa

SEQ ID NO: 790003 - DNA, 15 bp, Homo sapiens
aacaaaattttaaaa

SEQ ID NO: 790004 - DNA, 15 bp, Homo sapiens
acaaaattttaaaaa

SEQ ID NO: 790005 - DNA, 15 bp, Homo sapiens
caaaattttaaaaat

SEQ ID NO: 790006 - DNA, 15 bp, Homo sapiens
aaattttaaaaatta

SEQ ID NO: 790007 - DNA, 15 bp, Homo sapiens
aattttaaaaattag

SEQ ID NO: 790008 - DNA, 15 bp, Homo sapiens
attttaaaaattaga

SEQ ID NO: 790009 - DNA, 15 bp, Homo sapiens
ttttaaaaattagaa

SEQ ID NO: 790010 - DNA, 15 bp, Homo sapiens
tttaaaaattagaac

SEQ ID NO: 790011 - DNA, 15 bp, Homo sapiens
ttaaaaattagaaca

SEQ ID NO: 790012 - DNA, 15 bp, Homo sapiens
taaaaattagaacat

SEQ ID NO: 790013 - DNA, 15 bp, Homo sapiens
aaaaattagaacata

SEQ ID NO: 790014 - DNA, 15 bp, Homo sapiens
aaaattagaacatat

SEQ ID NO: 790015 - DNA, 15 bp, Homo sapiens
aaattagaacatata

SEQ ID NO: 790016 - DNA, 15 bp, Homo sapiens
aattagaacatatag

SEQ ID NO: 790017 - DNA, 15 bp, Homo sapiens
attagaacatataga

SEQ ID NO: 790018 - DNA, 15 bp, Homo sapiens
ttagaacatatagaa

SEQ ID NO: 790019 - DNA, 15 bp, Homo sapiens
tagaacatatagaaa

SEQ ID NO: 790020 - DNA, 15 bp, Homo sapiens
agaacatatagaaaa

SEQ ID NO: 790021 - DNA, 15 bp, Homo sapiens
gaacatatagaaaat

SEQ ID NO: 790022 - DNA, 15 bp, Homo sapiens
aacatatagaaaata

SEQ ID NO: 790023 - DNA, 15 bp, Homo sapiens
acatatagaaaatat

SEQ ID NO: 790024 - DNA, 15 bp, Homo sapiens
catatagaaaatatg

SEQ ID NO: 790025 - DNA, 15 bp, Homo sapiens
atatagaaaatatga

SEQ ID NO: 790026 - DNA, 15 bp, Homo sapiens
tatagaaaatatgaa

SEQ ID NO: 790027 - DNA, 15 bp, Homo sapiens
atagaaaatatgaag

SEQ ID NO: 790028 - DNA, 15 bp, Homo sapiens
tagaaaatatgaagg

SEQ ID NO: 790029 - DNA, 15 bp, Homo sapiens
agaaaatatgaagga

SEQ ID NO: 790030 - DNA, 15 bp, Homo sapiens
gaaaatatgaaggaa

SEQ ID NO: 790031 - DNA, 15 bp, Homo sapiens
aaaatatgaaggaag

SEQ ID NO: 790032 - DNA, 15 bp, Homo sapiens
aaatatgaaggaaga

SEQ ID NO: 790033 - DNA, 15 bp, Homo sapiens
aatatgaaggaagaa

SEQ ID NO: 790034 - DNA, 15 bp, Homo sapiens
atatgaaggaagaaa

SEQ ID NO: 790035 - DNA, 15 bp, Homo sapiens
tatgaaggaagaaat

SEQ ID NO: 790036 - DNA, 15 bp, Homo sapiens
atgaaggaagaaata

SEQ ID NO: 790037 - DNA, 15 bp, Homo sapiens
tgaaggaagaaataa

SEQ ID NO: 790038 - DNA, 15 bp, Homo sapiens
gaaggaagaaataaa

SEQ ID NO: 790039 - DNA, 15 bp, Homo sapiens
aaggaagaaataaaa

SEQ ID NO: 790040 - DNA, 15 bp, Homo sapiens
aggaagaaataaaaa

SEQ ID NO: 790041 - DNA, 15 bp, Homo sapiens
ggaagaaataaaaat

SEQ ID NO: 790042 - DNA, 15 bp, Homo sapiens
gaagaaataaaaatc

SEQ ID NO: 790043 - DNA, 15 bp, Homo sapiens
aagaaataaaaatca

SEQ ID NO: 790044 - DNA, 15 bp, Homo sapiens
agaaataaaaatcac

SEQ ID NO: 790045 - DNA, 15 bp, Homo sapiens
gaaataaaaatcacc

SEQ ID NO: 790046 - DNA, 15 bp, Homo sapiens
aaataaaaatcacct

SEQ ID NO: 790047 - DNA, 15 bp, Homo sapiens
aataaaaatcacctt

SEQ ID NO: 790048 - DNA, 15 bp, Homo sapiens
ataaaaatcaccttt

SEQ ID NO: 790049 - DNA, 15 bp, Homo sapiens
taaaaatcaccttta

SEQ ID NO: 790050 - DNA, 15 bp, Homo sapiens
aaaaatcacctttaa

SEQ ID NO: 790051 - DNA, 15 bp, Homo sapiens
aaaatcacctttaat

SEQ ID NO: 790052 - DNA, 15 bp, Homo sapiens
aaatcacctttaata

SEQ ID NO: 790053 - DNA, 15 bp, Homo sapiens
aatcacctttaatat

SEQ ID NO: 790054 - DNA, 15 bp, Homo sapiens
atcacctttaatatc

SEQ ID NO: 790055 - DNA, 15 bp, Homo sapiens
tcacctttaatatca

SEQ ID NO: 790056 - DNA, 15 bp, Homo sapiens
cacctttaatatcat

SEQ ID NO: 790057 - DNA, 15 bp, Homo sapiens
acctttaatatcatc

SEQ ID NO: 790058 - DNA, 15 bp, Homo sapiens
cctttaatatcatca

SEQ ID NO: 790059 - DNA, 15 bp, Homo sapiens
ctttaatatcatcaa

SEQ ID NO: 790060 - DNA, 15 bp, Homo sapiens
tttaatatcatcaac

SEQ ID NO: 790061 - DNA, 15 bp, Homo sapiens
ttaatatcatcaact

SEQ ID NO: 790062 - DNA, 15 bp, Homo sapiens
taatatcatcaacta

SEQ ID NO: 790063 - DNA, 15 bp, Homo sapiens
aatatcatcaactag

SEQ ID NO: 790064 - DNA, 15 bp, Homo sapiens
atatcatcaactaga

SEQ ID NO: 790065 - DNA, 15 bp, Homo sapiens
tatcatcaactagaa

SEQ ID NO: 790066 - DNA, 15 bp, Homo sapiens
atcatcaactagaaa

SEQ ID NO: 790067 - DNA, 15 bp, Homo sapiens
tcatcaactagaaat

SEQ ID NO: 790068 - DNA, 15 bp, Homo sapiens
catcaactagaaata

SEQ ID NO: 790069 - DNA, 15 bp, Homo sapiens
atcaactagaaataa

SEQ ID NO: 790070 - DNA, 15 bp, Homo sapiens
tcaactagaaataac

SEQ ID NO: 790071 - DNA, 15 bp, Homo sapiens
caactagaaataact

SEQ ID NO: 790072 - DNA, 15 bp, Homo sapiens
aactagaaataactg

SEQ ID NO: 790073 - DNA, 15 bp, Homo sapiens
actagaaataactgc

SEQ ID NO: 790074 - DNA, 15 bp, Homo sapiens
ctagaaataactgct

SEQ ID NO: 790075 - DNA, 15 bp, Homo sapiens
tagaaataactgctg

SEQ ID NO: 790076 - DNA, 15 bp, Homo sapiens
agaaataactgctgt

SEQ ID NO: 790077 - DNA, 15 bp, Homo sapiens
gaaataactgctgtt

SEQ ID NO: 790078 - DNA, 15 bp, Homo sapiens
aaataactgctgtta

SEQ ID NO: 790079 - DNA, 15 bp, Homo sapiens
aataactgctgttaa

SEQ ID NO: 790080 - DNA, 15 bp, Homo sapiens
ataactgctgttaaa

SEQ ID NO: 790081 - DNA, 15 bp, Homo sapiens
taactgctgttaaaa

SEQ ID NO: 790082 - DNA, 15 bp, Homo sapiens
aactgctgttaaaat

SEQ ID NO: 790083 - DNA, 15 bp, Homo sapiens
actgctgttaaaatt

SEQ ID NO: 790084 - DNA, 15 bp, Homo sapiens
ctgctgttaaaattt

SEQ ID NO: 790085 - DNA, 15 bp, Homo sapiens
tgctgttaaaatttt

SEQ ID NO: 790086 - DNA, 15 bp, Homo sapiens
gctgttaaaatttta

SEQ ID NO: 790087 - DNA, 15 bp, Homo sapiens
ctgttaaaattttag

SEQ ID NO: 790088 - DNA, 15 bp, Homo sapiens
tgttaaaattttagt

SEQ ID NO: 790089 - DNA, 15 bp, Homo sapiens
gttaaaattttagta

SEQ ID NO: 790090 - DNA, 15 bp, Homo sapiens
ttaaaattttagtat

SEQ ID NO: 790091 - DNA, 15 bp, Homo sapiens
taaaattttagtata

SEQ ID NO: 790092 - DNA, 15 bp, Homo sapiens
aaaattttagtatat

SEQ ID NO: 790093 - DNA, 15 bp, Homo sapiens
aaattttagtatatt

SEQ ID NO: 790094 - DNA, 15 bp, Homo sapiens
aattttagtatatta

SEQ ID NO: 790095 - DNA, 15 bp, Homo sapiens
attttagtatattag

SEQ ID NO: 790096 - DNA, 15 bp, Homo sapiens
ttttagtatattagt

SEQ ID NO: 790097 - DNA, 15 bp, Homo sapiens
tttagtatattagta

SEQ ID NO: 790098 - DNA, 15 bp, Homo sapiens
ttagtatattagtat

SEQ ID NO: 790099 - DNA, 15 bp, Homo sapiens
tagtatattagtata

SEQ ID NO: 790100 - DNA, 15 bp, Homo sapiens
agtatattagtataa

SEQ ID NO: 790101 - DNA, 15 bp, Homo sapiens
gtatattagtataat

SEQ ID NO: 790102 - DNA, 15 bp, Homo sapiens
tatattagtataatt

SEQ ID NO: 790103 - DNA, 15 bp, Homo sapiens
atattagtataattt

SEQ ID NO: 790104 - DNA, 15 bp, Homo sapiens
tattagtataattta

SEQ ID NO: 790105 - DNA, 15 bp, Homo sapiens
attagtataatttag

SEQ ID NO: 790106 - DNA, 15 bp, Homo sapiens
ttagtataatttagc

SEQ ID NO: 790107 - DNA, 15 bp, Homo sapiens
tagtataatttagca

SEQ ID NO: 790108 - DNA, 15 bp, Homo sapiens
agtataatttagcat

SEQ ID NO: 790109 - DNA, 15 bp, Homo sapiens
gtataatttagcata

SEQ ID NO: 790110 - DNA, 15 bp, Homo sapiens
tataatttagcatat

SEQ ID NO: 790111 - DNA, 15 bp, Homo sapiens
ataatttagcatatt

SEQ ID NO: 790112 - DNA, 15 bp, Homo sapiens
taatttagcatattg

SEQ ID NO: 790113 - DNA, 15 bp, Homo sapiens
aatttagcatattgg

SEQ ID NO: 790114 - DNA, 15 bp, Homo sapiens
atttagcatattggt

SEQ ID NO: 790115 - DNA, 15 bp, Homo sapiens
tttagcatattggta

SEQ ID NO: 790116 - DNA, 15 bp, Homo sapiens
ttagcatattggtat

SEQ ID NO: 790117 - DNA, 15 bp, Homo sapiens
tagcatattggtata

SEQ ID NO: 790118 - DNA, 15 bp, Homo sapiens
agcatattggtataa

SEQ ID NO: 790119 - DNA, 15 bp, Homo sapiens
gcatattggtataat

SEQ ID NO: 790120 - DNA, 15 bp, Homo sapiens
catattggtataatt

SEQ ID NO: 790121 - DNA, 15 bp, Homo sapiens
atattggtataattt

SEQ ID NO: 790122 - DNA, 15 bp, Homo sapiens
tattggtataatttt

SEQ ID NO: 790123 - DNA, 15 bp, Homo sapiens
attggtataatttta

SEQ ID NO: 790124 - DNA, 15 bp, Homo sapiens
ttggtataattttag

SEQ ID NO: 790125 - DNA, 15 bp, Homo sapiens
tggtataattttagt

SEQ ID NO: 790126 - DNA, 15 bp, Homo sapiens
ggtataattttagtg

SEQ ID NO: 790127 - DNA, 15 bp, Homo sapiens
gtataattttagtgt

SEQ ID NO: 790128 - DNA, 15 bp, Homo sapiens
tataattttagtgta

SEQ ID NO: 790129 - DNA, 15 bp, Homo sapiens
ataattttagtgtat

SEQ ID NO: 790130 - DNA, 15 bp, Homo sapiens
taattttagtgtatt

SEQ ID NO: 790131 - DNA, 15 bp, Homo sapiens
aattttagtgtattt

SEQ ID NO: 790132 - DNA, 15 bp, Homo sapiens
attttagtgtatttc

SEQ ID NO: 790133 - DNA, 15 bp, Homo sapiens
ttttagtgtatttct

SEQ ID NO: 790134 - DNA, 15 bp, Homo sapiens
tttagtgtatttcta

SEQ ID NO: 790135 - DNA, 15 bp, Homo sapiens
ttagtgtatttctaa

SEQ ID NO: 790136 - DNA, 15 bp, Homo sapiens
tagtgtatttctaac

SEQ ID NO: 790137 - DNA, 15 bp, Homo sapiens
agtgtatttctaacc

SEQ ID NO: 790138 - DNA, 15 bp, Homo sapiens
gtgtatttctaacca

SEQ ID NO: 790139 - DNA, 15 bp, Homo sapiens
tgtatttctaaccaa

SEQ ID NO: 790140 - DNA, 15 bp, Homo sapiens
gtatttctaaccaag

SEQ ID NO: 790141 - DNA, 15 bp, Homo sapiens
tatttctaaccaagt

SEQ ID NO: 790142 - DNA, 15 bp, Homo sapiens
atttctaaccaagta

SEQ ID NO: 790143 - DNA, 15 bp, Homo sapiens
tttctaaccaagtat

SEQ ID NO: 790144 - DNA, 15 bp, Homo sapiens
ttctaaccaagtatg

SEQ ID NO: 790145 - DNA, 15 bp, Homo sapiens
tctaaccaagtatgt

SEQ ID NO: 790146 - DNA, 15 bp, Homo sapiens
ctaaccaagtatgtt

SEQ ID NO: 790147 - DNA, 15 bp, Homo sapiens
taaccaagtatgttt

SEQ ID NO: 790148 - DNA, 15 bp, Homo sapiens
aaccaagtatgtttc

SEQ ID NO: 790149 - DNA, 15 bp, Homo sapiens
accaagtatgtttct

SEQ ID NO: 790150 - DNA, 15 bp, Homo sapiens
ccaagtatgtttcta

SEQ ID NO: 790151 - DNA, 15 bp, Homo sapiens
caagtatgtttctat

SEQ ID NO: 790152 - DNA, 15 bp, Homo sapiens
aagtatgtttctatg

SEQ ID NO: 790153 - DNA, 15 bp, Homo sapiens
agtatgtttctatgc

SEQ ID NO: 790154 - DNA, 15 bp, Homo sapiens
gtatgtttctatgca

SEQ ID NO: 790155 - DNA, 15 bp, Homo sapiens
tatgtttctatgcat

SEQ ID NO: 790156 - DNA, 15 bp, Homo sapiens
atgtttctatgcata

SEQ ID NO: 790157 - DNA, 15 bp, Homo sapiens
tgtttctatgcatag

SEQ ID NO: 790158 - DNA, 15 bp, Homo sapiens
gtttctatgcatagg

SEQ ID NO: 790159 - DNA, 15 bp, Homo sapiens
tttctatgcataggc

SEQ ID NO: 790160 - DNA, 15 bp, Homo sapiens
ttctatgcataggct

SEQ ID NO: 790161 - DNA, 15 bp, Homo sapiens
tctatgcataggctc

SEQ ID NO: 790162 - DNA, 15 bp, Homo sapiens
ctatgcataggctca

SEQ ID NO: 790163 - DNA, 15 bp, Homo sapiens
tatgcataggctcat

SEQ ID NO: 790164 - DNA, 15 bp, Homo sapiens
atgcataggctcata

SEQ ID NO: 790165 - DNA, 15 bp, Homo sapiens
tgcataggctcataa

SEQ ID NO: 790166 - DNA, 15 bp, Homo sapiens
gcataggctcataag

SEQ ID NO: 790167 - DNA, 15 bp, Homo sapiens
cataggctcataaga

SEQ ID NO: 790168 - DNA, 15 bp, Homo sapiens
ataggctcataagaa

SEQ ID NO: 790169 - DNA, 15 bp, Homo sapiens
taggctcataagaaa

SEQ ID NO: 790170 - DNA, 15 bp, Homo sapiens
aggctcataagaaaa

SEQ ID NO: 790171 - DNA, 15 bp, Homo sapiens
ggctcataagaaaag

SEQ ID NO: 790172 - DNA, 15 bp, Homo sapiens
gctcataagaaaagc

SEQ ID NO: 790173 - DNA, 15 bp, Homo sapiens
ctcataagaaaagca

SEQ ID NO: 790174 - DNA, 15 bp, Homo sapiens
tcataagaaaagcat

SEQ ID NO: 790175 - DNA, 15 bp, Homo sapiens
cataagaaaagcatg

SEQ ID NO: 790176 - DNA, 15 bp, Homo sapiens
ataagaaaagcatga

SEQ ID NO: 790177 - DNA, 15 bp, Homo sapiens
taagaaaagcatgat

SEQ ID NO: 790178 - DNA, 15 bp, Homo sapiens
aagaaaagcatgatt

SEQ ID NO: 790179 - DNA, 15 bp, Homo sapiens
agaaaagcatgattt

SEQ ID NO: 790180 - DNA, 15 bp, Homo sapiens
gaaaagcatgatttt

SEQ ID NO: 790181 - DNA, 15 bp, Homo sapiens
aaaagcatgatttta

SEQ ID NO: 790182 - DNA, 15 bp, Homo sapiens
aaagcatgattttat

SEQ ID NO: 790183 - DNA, 15 bp, Homo sapiens
aagcatgattttatt

SEQ ID NO: 790184 - DNA, 15 bp, Homo sapiens
agcatgattttatta

SEQ ID NO: 790185 - DNA, 15 bp, Homo sapiens
gcatgattttattac

SEQ ID NO: 790186 - DNA, 15 bp, Homo sapiens
catgattttattaca

SEQ ID NO: 790187 - DNA, 15 bp, Homo sapiens
atgattttattacaa

SEQ ID NO: 790188 - DNA, 15 bp, Homo sapiens
tgattttattacaaa

SEQ ID NO: 790189 - DNA, 15 bp, Homo sapiens
gattttattacaaaa

SEQ ID NO: 790190 - DNA, 15 bp, Homo sapiens
attttattacaaaat

SEQ ID NO: 790191 - DNA, 15 bp, Homo sapiens
ttttattacaaaata

SEQ ID NO: 790192 - DNA, 15 bp, Homo sapiens
tttattacaaaatat

SEQ ID NO: 790193 - DNA, 15 bp, Homo sapiens
ttattacaaaatata

SEQ ID NO: 790194 - DNA, 15 bp, Homo sapiens
tattacaaaatatag

SEQ ID NO: 790195 - DNA, 15 bp, Homo sapiens
attacaaaatatagt

SEQ ID NO: 790196 - DNA, 15 bp, Homo sapiens
ttacaaaatatagtt

SEQ ID NO: 790197 - DNA, 15 bp, Homo sapiens
tacaaaatatagttt

SEQ ID NO: 790198 - DNA, 15 bp, Homo sapiens
acaaaatatagtttg

SEQ ID NO: 790199 - DNA, 15 bp, Homo sapiens
caaaatatagtttgt

SEQ ID NO: 790200 - DNA, 15 bp, Homo sapiens
aaaatatagtttgta

SEQ ID NO: 790201 - DNA, 15 bp, Homo sapiens
aaatatagtttgtat

SEQ ID NO: 790202 - DNA, 15 bp, Homo sapiens
aatatagtttgtatc

SEQ ID NO: 790203 - DNA, 15 bp, Homo sapiens
atatagtttgtatcc

SEQ ID NO: 790204 - DNA, 15 bp, Homo sapiens
tatagtttgtatcct

SEQ ID NO: 790205 - DNA, 15 bp, Homo sapiens
atagtttgtatcctg

SEQ ID NO: 790206 - DNA, 15 bp, Homo sapiens
tagtttgtatcctgc

SEQ ID NO: 790207 - DNA, 15 bp, Homo sapiens
agtttgtatcctgct

SEQ ID NO: 790208 - DNA, 15 bp, Homo sapiens
gtttgtatcctgctt

SEQ ID NO: 790209 - DNA, 15 bp, Homo sapiens
tttgtatcctgcttt

SEQ ID NO: 790210 - DNA, 15 bp, Homo sapiens
ttgtatcctgctttc

SEQ ID NO: 790211 - DNA, 15 bp, Homo sapiens
tgtatcctgctttct

SEQ ID NO: 790212 - DNA, 15 bp, Homo sapiens
gtatcctgctttctc

SEQ ID NO: 790213 - DNA, 15 bp, Homo sapiens
tatcctgctttctct

SEQ ID NO: 790214 - DNA, 15 bp, Homo sapiens
atcctgctttctcta

SEQ ID NO: 790215 - DNA, 15 bp, Homo sapiens
tcctgctttctctag

SEQ ID NO: 790216 - DNA, 15 bp, Homo sapiens
cctgctttctctagt

SEQ ID NO: 790217 - DNA, 15 bp, Homo sapiens
ctgctttctctagtg

SEQ ID NO: 790218 - DNA, 15 bp, Homo sapiens
tgctttctctagtgt

SEQ ID NO: 790219 - DNA, 15 bp, Homo sapiens
gctttctctagtgta

SEQ ID NO: 790220 - DNA, 15 bp, Homo sapiens
ctttctctagtgtaa

SEQ ID NO: 790221 - DNA, 15 bp, Homo sapiens
tttctctagtgtaat

SEQ ID NO: 790222 - DNA, 15 bp, Homo sapiens
ttctctagtgtaata

SEQ ID NO: 790223 - DNA, 15 bp, Homo sapiens
tctctagtgtaatat

SEQ ID NO: 790224 - DNA, 15 bp, Homo sapiens
ctctagtgtaatatt

SEQ ID NO: 790225 - DNA, 15 bp, Homo sapiens
tctagtgtaatattg

SEQ ID NO: 790226 - DNA, 15 bp, Homo sapiens
ctagtgtaatattgt

SEQ ID NO: 790227 - DNA, 15 bp, Homo sapiens
tagtgtaatattgta

SEQ ID NO: 790228 - DNA, 15 bp, Homo sapiens
agtgtaatattgtat

SEQ ID NO: 790229 - DNA, 15 bp, Homo sapiens
gtgtaatattgtatg

SEQ ID NO: 790230 - DNA, 15 bp, Homo sapiens
tgtaatattgtatgc

SEQ ID NO: 790231 - DNA, 15 bp, Homo sapiens
gtaatattgtatgcc

SEQ ID NO: 790232 - DNA, 15 bp, Homo sapiens
taatattgtatgcca

SEQ ID NO: 790233 - DNA, 15 bp, Homo sapiens
aatattgtatgccag

SEQ ID NO: 790234 - DNA, 15 bp, Homo sapiens
atattgtatgccagc

SEQ ID NO: 790235 - DNA, 15 bp, Homo sapiens
tattgtatgccagca

SEQ ID NO: 790236 - DNA, 15 bp, Homo sapiens
attgtatgccagcat

SEQ ID NO: 790237 - DNA, 15 bp, Homo sapiens
ttgtatgccagcatt

SEQ ID NO: 790238 - DNA, 15 bp, Homo sapiens
tgtatgccagcattt

SEQ ID NO: 790239 - DNA, 15 bp, Homo sapiens
gtatgccagcatttc

SEQ ID NO: 790240 - DNA, 15 bp, Homo sapiens
tatgccagcatttcc

SEQ ID NO: 790241 - DNA, 15 bp, Homo sapiens
atgccagcatttccc

SEQ ID NO: 790242 - DNA, 15 bp, Homo sapiens
tgccagcatttccca

SEQ ID NO: 790243 - DNA, 15 bp, Homo sapiens
gccagcatttcccag

SEQ ID NO: 790244 - DNA, 15 bp, Homo sapiens
ccagcatttcccagg

SEQ ID NO: 790245 - DNA, 15 bp, Homo sapiens
cagcatttcccaggc

SEQ ID NO: 790246 - DNA, 15 bp, Homo sapiens
agcatttcccaggct

SEQ ID NO: 790247 - DNA, 15 bp, Homo sapiens
gcatttcccaggcta

SEQ ID NO: 790248 - DNA, 15 bp, Homo sapiens
catttcccaggctat

SEQ ID NO: 790249 - DNA, 15 bp, Homo sapiens
atttcccaggctatg

SEQ ID NO: 790250 - DNA, 15 bp, Homo sapiens
tttcccaggctatgc

SEQ ID NO: 790251 - DNA, 15 bp, Homo sapiens
ttcccaggctatgct

SEQ ID NO: 790252 - DNA, 15 bp, Homo sapiens
tcccaggctatgctg

SEQ ID NO: 790253 - DNA, 15 bp, Homo sapiens
cccaggctatgctgt

SEQ ID NO: 790254 - DNA, 15 bp, Homo sapiens
ccaggctatgctgtt

SEQ ID NO: 790255 - DNA, 15 bp, Homo sapiens
caggctatgctgttg

SEQ ID NO: 790256 - DNA, 15 bp, Homo sapiens
aggctatgctgttga

SEQ ID NO: 790257 - DNA, 15 bp, Homo sapiens
ggctatgctgttgaa

SEQ ID NO: 790258 - DNA, 15 bp, Homo sapiens
gctatgctgttgaaa

SEQ ID NO: 790259 - DNA, 15 bp, Homo sapiens
ctatgctgttgaaag

SEQ ID NO: 790260 - DNA, 15 bp, Homo sapiens
tatgctgttgaaagt

SEQ ID NO: 790261 - DNA, 15 bp, Homo sapiens
atgctgttgaaagtt

SEQ ID NO: 790262 - DNA, 15 bp, Homo sapiens
tgctgttgaaagttt

SEQ ID NO: 790263 - DNA, 15 bp, Homo sapiens
gctgttgaaagtttt

SEQ ID NO: 790264 - DNA, 15 bp, Homo sapiens
ctgttgaaagttttt

SEQ ID NO: 790265 - DNA, 15 bp, Homo sapiens
tgttgaaagtttttt

SEQ ID NO: 790266 - DNA, 15 bp, Homo sapiens
gttgaaagttttttg

SEQ ID NO: 790267 - DNA, 15 bp, Homo sapiens
ttgaaagttttttga

SEQ ID NO: 790268 - DNA, 15 bp, Homo sapiens
tgaaagttttttgag

SEQ ID NO: 790269 - DNA, 15 bp, Homo sapiens
gaaagttttttgaga

SEQ ID NO: 790270 - DNA, 15 bp, Homo sapiens
aaagttttttgagaa

SEQ ID NO: 790271 - DNA, 15 bp, Homo sapiens
aagttttttgagaac

SEQ ID NO: 790272 - DNA, 15 bp, Homo sapiens
agttttttgagaact

SEQ ID NO: 790273 - DNA, 15 bp, Homo sapiens
gttttttgagaactt

SEQ ID NO: 790274 - DNA, 15 bp, Homo sapiens
ttttttgagaactta

SEQ ID NO: 790275 - DNA, 15 bp, Homo sapiens
tttttgagaacttaa

SEQ ID NO: 790276 - DNA, 15 bp, Homo sapiens
ttttgagaacttaac

SEQ ID NO: 790277 - DNA, 15 bp, Homo sapiens
tttgagaacttaact

SEQ ID NO: 790278 - DNA, 15 bp, Homo sapiens
ttgagaacttaactt

SEQ ID NO: 790279 - DNA, 15 bp, Homo sapiens
tgagaacttaacttc

SEQ ID NO: 790280 - DNA, 15 bp, Homo sapiens
gagaacttaacttct

SEQ ID NO: 790281 - DNA, 15 bp, Homo sapiens
agaacttaacttcta

SEQ ID NO: 790282 - DNA, 15 bp, Homo sapiens
gaacttaacttctaa

SEQ ID NO: 790283 - DNA, 15 bp, Homo sapiens
aacttaacttctaat

SEQ ID NO: 790284 - DNA, 15 bp, Homo sapiens
acttaacttctaatg

SEQ ID NO: 790285 - DNA, 15 bp, Homo sapiens
cttaacttctaatga

SEQ ID NO: 790286 - DNA, 15 bp, Homo sapiens
ttaacttctaatgac

SEQ ID NO: 790287 - DNA, 15 bp, Homo sapiens
taacttctaatgaca

SEQ ID NO: 790288 - DNA, 15 bp, Homo sapiens
aacttctaatgacaa

SEQ ID NO: 790289 - DNA, 15 bp, Homo sapiens
acttctaatgacaac

SEQ ID NO: 790290 - DNA, 15 bp, Homo sapiens
cttctaatgacaaca

SEQ ID NO: 790291 - DNA, 15 bp, Homo sapiens
ttctaatgacaacat

SEQ ID NO: 790292 - DNA, 15 bp, Homo sapiens
tctaatgacaacata

SEQ ID NO: 790293 - DNA, 15 bp, Homo sapiens
ctaatgacaacatat

SEQ ID NO: 790294 - DNA, 15 bp, Homo sapiens
taatgacaacatata

SEQ ID NO: 790295 - DNA, 15 bp, Homo sapiens
aatgacaacatataa

SEQ ID NO: 790296 - DNA, 15 bp, Homo sapiens
atgacaacatataat

SEQ ID NO: 790297 - DNA, 15 bp, Homo sapiens
tgacaacatataata

SEQ ID NO: 790298 - DNA, 15 bp, Homo sapiens
gacaacatataatag

SEQ ID NO: 790299 - DNA, 15 bp, Homo sapiens
acaacatataatagc

SEQ ID NO: 790300 - DNA, 15 bp, Homo sapiens
caacatataatagcc

SEQ ID NO: 790301 - DNA, 15 bp, Homo sapiens
aacatataatagccc

SEQ ID NO: 790302 - DNA, 15 bp, Homo sapiens
acatataatagccca

SEQ ID NO: 790303 - DNA, 15 bp, Homo sapiens
catataatagcccaa

SEQ ID NO: 790304 - DNA, 15 bp, Homo sapiens
atataatagcccaaa

SEQ ID NO: 790305 - DNA, 15 bp, Homo sapiens
tataatagcccaaaa

SEQ ID NO: 790306 - DNA, 15 bp, Homo sapiens
ataatagcccaaaag

SEQ ID NO: 790307 - DNA, 15 bp, Homo sapiens
taatagcccaaaagg

SEQ ID NO: 790308 - DNA, 15 bp, Homo sapiens
aatagcccaaaaggt

SEQ ID NO: 790309 - DNA, 15 bp, Homo sapiens
atagcccaaaaggtg

SEQ ID NO: 790310 - DNA, 15 bp, Homo sapiens
tagcccaaaaggtga

SEQ ID NO: 790311 - DNA, 15 bp, Homo sapiens
agcccaaaaggtgac

SEQ ID NO: 790312 - DNA, 15 bp, Homo sapiens
gcccaaaaggtgact

SEQ ID NO: 790313 - DNA, 15 bp, Homo sapiens
cccaaaaggtgacta

SEQ ID NO: 790314 - DNA, 15 bp, Homo sapiens
ccaaaaggtgactat

SEQ ID NO: 790315 - DNA, 15 bp, Homo sapiens
caaaaggtgactata

SEQ ID NO: 790316 - DNA, 15 bp, Homo sapiens
aaaaggtgactatag

SEQ ID NO: 790317 - DNA, 15 bp, Homo sapiens
aaaggtgactatagt

SEQ ID NO: 790318 - DNA, 15 bp, Homo sapiens
aaggtgactatagtt

SEQ ID NO: 790319 - DNA, 15 bp, Homo sapiens
aggtgactatagttt

SEQ ID NO: 790320 - DNA, 15 bp, Homo sapiens
ggtgactatagttta

SEQ ID NO: 790321 - DNA, 15 bp, Homo sapiens
gtgactatagtttat

SEQ ID NO: 790322 - DNA, 15 bp, Homo sapiens
tgactatagtttatt

SEQ ID NO: 790323 - DNA, 15 bp, Homo sapiens
gactatagtttatta

SEQ ID NO: 790324 - DNA, 15 bp, Homo sapiens
actatagtttattat

SEQ ID NO: 790325 - DNA, 15 bp, Homo sapiens
ctatagtttattata

SEQ ID NO: 790326 - DNA, 15 bp, Homo sapiens
tatagtttattatac

SEQ ID NO: 790327 - DNA, 15 bp, Homo sapiens
atagtttattatact

SEQ ID NO: 790328 - DNA, 15 bp, Homo sapiens
tagtttattatactt

SEQ ID NO: 790329 - DNA, 15 bp, Homo sapiens
agtttattatactta

SEQ ID NO: 790330 - DNA, 15 bp, Homo sapiens
gtttattatacttaa

SEQ ID NO: 790331 - DNA, 15 bp, Homo sapiens
tttattatacttaaa

SEQ ID NO: 790332 - DNA, 15 bp, Homo sapiens
ttattatacttaaat

SEQ ID NO: 790333 - DNA, 15 bp, Homo sapiens
tattatacttaaata

SEQ ID NO: 790334 - DNA, 15 bp, Homo sapiens
attatacttaaatat

SEQ ID NO: 790335 - DNA, 15 bp, Homo sapiens
ttatacttaaatatc

SEQ ID NO: 790336 - DNA, 15 bp, Homo sapiens
tatacttaaatatct

SEQ ID NO: 790337 - DNA, 15 bp, Homo sapiens
atacttaaatatctc

SEQ ID NO: 790338 - DNA, 15 bp, Homo sapiens
tacttaaatatctca

SEQ ID NO: 790339 - DNA, 15 bp, Homo sapiens
acttaaatatctcat

SEQ ID NO: 790340 - DNA, 15 bp, Homo sapiens
cttaaatatctcata

SEQ ID NO: 790341 - DNA, 15 bp, Homo sapiens
ttaaatatctcataa

SEQ ID NO: 790342 - DNA, 15 bp, Homo sapiens
taaatatctcataat

SEQ ID NO: 790343 - DNA, 15 bp, Homo sapiens
aaatatctcataatg

SEQ ID NO: 790344 - DNA, 15 bp, Homo sapiens
aatatctcataatgg

SEQ ID NO: 790345 - DNA, 15 bp, Homo sapiens
atatctcataatggg

SEQ ID NO: 790346 - DNA, 15 bp, Homo sapiens
tatctcataatgggt

SEQ ID NO: 790347 - DNA, 15 bp, Homo sapiens
atctcataatgggtt

SEQ ID NO: 790348 - DNA, 15 bp, Homo sapiens
tctcataatgggtta

SEQ ID NO: 790349 - DNA, 15 bp, Homo sapiens
ctcataatgggttaa

SEQ ID NO: 790350 - DNA, 15 bp, Homo sapiens
tcataatgggttaaa

SEQ ID NO: 790351 - DNA, 15 bp, Homo sapiens
cataatgggttaaat

SEQ ID NO: 790352 - DNA, 15 bp, Homo sapiens
ataatgggttaaatt

SEQ ID NO: 790353 - DNA, 15 bp, Homo sapiens
taatgggttaaattt

SEQ ID NO: 790354 - DNA, 15 bp, Homo sapiens
aatgggttaaatttt

SEQ ID NO: 790355 - DNA, 15 bp, Homo sapiens
atgggttaaatttta

SEQ ID NO: 790356 - DNA, 15 bp, Homo sapiens
tgggttaaattttaa

SEQ ID NO: 790357 - DNA, 15 bp, Homo sapiens
gggttaaattttaag

SEQ ID NO: 790358 - DNA, 15 bp, Homo sapiens
ggttaaattttaagt

SEQ ID NO: 790359 - DNA, 15 bp, Homo sapiens
gttaaattttaagtt

SEQ ID NO: 790360 - DNA, 15 bp, Homo sapiens
ttaaattttaagttg

SEQ ID NO: 790361 - DNA, 15 bp, Homo sapiens
taaattttaagttgc

SEQ ID NO: 790362 - DNA, 15 bp, Homo sapiens
aaattttaagttgct

SEQ ID NO: 790363 - DNA, 15 bp, Homo sapiens
aattttaagttgctt

SEQ ID NO: 790364 - DNA, 15 bp, Homo sapiens
attttaagttgcttg

SEQ ID NO: 790365 - DNA, 15 bp, Homo sapiens
ttttaagttgcttgc

SEQ ID NO: 790366 - DNA, 15 bp, Homo sapiens
tttaagttgcttgca

SEQ ID NO: 790367 - DNA, 15 bp, Homo sapiens
ttaagttgcttgcat

SEQ ID NO: 790368 - DNA, 15 bp, Homo sapiens
taagttgcttgcatt

SEQ ID NO: 790369 - DNA, 15 bp, Homo sapiens
aagttgcttgcattt

SEQ ID NO: 790370 - DNA, 15 bp, Homo sapiens
agttgcttgcatttt

SEQ ID NO: 790371 - DNA, 15 bp, Homo sapiens
gttgcttgcattttt

SEQ ID NO: 790372 - DNA, 15 bp, Homo sapiens
ttgcttgcatttttt

SEQ ID NO: 790373 - DNA, 15 bp, Homo sapiens
tgcttgcattttttt

SEQ ID NO: 790374 - DNA, 15 bp, Homo sapiens
gcttgcatttttttt

SEQ ID NO: 790375 - DNA, 15 bp, Homo sapiens
cttgcattttttttt

SEQ ID NO: 790376 - DNA, 15 bp, Homo sapiens
ttgcatttttttttt

SEQ ID NO: 790377 - DNA, 15 bp, Homo sapiens
tgcattttttttttt

SEQ ID NO: 790378 - DNA, 15 bp, Homo sapiens
gcatttttttttttt

SEQ ID NO: 790379 - DNA, 15 bp, Homo sapiens
cattttttttttttt

SEQ ID NO: 790380 - DNA, 15 bp, Homo sapiens
tttttttttttttac

SEQ ID NO: 790381 - DNA, 15 bp, Homo sapiens
ttttttttttttact

SEQ ID NO: 790382 - DNA, 15 bp, Homo sapiens
tttttttttttacta

SEQ ID NO: 790383 - DNA, 15 bp, Homo sapiens
ttttttttttactat

SEQ ID NO: 790384 - DNA, 15 bp, Homo sapiens
tttttttttactatt

SEQ ID NO: 790385 - DNA, 15 bp, Homo sapiens
ttttttttactatta

SEQ ID NO: 790386 - DNA, 15 bp, Homo sapiens
tttttttactattac

SEQ ID NO: 790387 - DNA, 15 bp, Homo sapiens
ttttttactattaca

SEQ ID NO: 790388 - DNA, 15 bp, Homo sapiens
tttttactattacaa

SEQ ID NO: 790389 - DNA, 15 bp, Homo sapiens
ttttactattacaaa

SEQ ID NO: 790390 - DNA, 15 bp, Homo sapiens
tttactattacaaat

SEQ ID NO: 790391 - DNA, 15 bp, Homo sapiens
ttactattacaaata

SEQ ID NO: 790392 - DNA, 15 bp, Homo sapiens
tactattacaaataa

SEQ ID NO: 790393 - DNA, 15 bp, Homo sapiens
actattacaaataat

SEQ ID NO: 790394 - DNA, 15 bp, Homo sapiens
ctattacaaataatg

SEQ ID NO: 790395 - DNA, 15 bp, Homo sapiens
tattacaaataatgt

SEQ ID NO: 790396 - DNA, 15 bp, Homo sapiens
attacaaataatgtt

SEQ ID NO: 790397 - DNA, 15 bp, Homo sapiens
ttacaaataatgttg

SEQ ID NO: 790398 - DNA, 15 bp, Homo sapiens
tacaaataatgttgt

SEQ ID NO: 790399 - DNA, 15 bp, Homo sapiens
acaaataatgttgtg

SEQ ID NO: 790400 - DNA, 15 bp, Homo sapiens
caaataatgttgtga

SEQ ID NO: 790401 - DNA, 15 bp, Homo sapiens
aaataatgttgtgat

SEQ ID NO: 790402 - DNA, 15 bp, Homo sapiens
aataatgttgtgata

SEQ ID NO: 790403 - DNA, 15 bp, Homo sapiens
ataatgttgtgataa

SEQ ID NO: 790404 - DNA, 15 bp, Homo sapiens
taatgttgtgataaa

SEQ ID NO: 790405 - DNA, 15 bp, Homo sapiens
aatgttgtgataaac

SEQ ID NO: 790406 - DNA, 15 bp, Homo sapiens
atgttgtgataaaca

SEQ ID NO: 790407 - DNA, 15 bp, Homo sapiens
tgttgtgataaacag

SEQ ID NO: 790408 - DNA, 15 bp, Homo sapiens
gttgtgataaacagc

SEQ ID NO: 790409 - DNA, 15 bp, Homo sapiens
ttgtgataaacagct

SEQ ID NO: 790410 - DNA, 15 bp, Homo sapiens
tgtgataaacagctt

SEQ ID NO: 790411 - DNA, 15 bp, Homo sapiens
gtgataaacagcttt

SEQ ID NO: 790412 - DNA, 15 bp, Homo sapiens
tgataaacagctttg

SEQ ID NO: 790413 - DNA, 15 bp, Homo sapiens
gataaacagctttgt

SEQ ID NO: 790414 - DNA, 15 bp, Homo sapiens
ataaacagctttgta

SEQ ID NO: 790415 - DNA, 15 bp, Homo sapiens
taaacagctttgtaa

SEQ ID NO: 790416 - DNA, 15 bp, Homo sapiens
aaacagctttgtaaa

SEQ ID NO: 790417 - DNA, 15 bp, Homo sapiens
aacagctttgtaaat

SEQ ID NO: 790418 - DNA, 15 bp, Homo sapiens
acagctttgtaaatt

SEQ ID NO: 790419 - DNA, 15 bp, Homo sapiens
cagctttgtaaattt

SEQ ID NO: 790420 - DNA, 15 bp, Homo sapiens
agctttgtaaatttg

SEQ ID NO: 790421 - DNA, 15 bp, Homo sapiens
gctttgtaaatttgt

SEQ ID NO: 790422 - DNA, 15 bp, Homo sapiens
ctttgtaaatttgta

SEQ ID NO: 790423 - DNA, 15 bp, Homo sapiens
tttgtaaatttgtat

SEQ ID NO: 790424 - DNA, 15 bp, Homo sapiens
ttgtaaatttgtatt

SEQ ID NO: 790425 - DNA, 15 bp, Homo sapiens
tgtaaatttgtatta

SEQ ID NO: 790426 - DNA, 15 bp, Homo sapiens
gtaaatttgtattaa

SEQ ID NO: 790427 - DNA, 15 bp, Homo sapiens
taaatttgtattaac

SEQ ID NO: 790428 - DNA, 15 bp, Homo sapiens
aaatttgtattaaca

SEQ ID NO: 790429 - DNA, 15 bp, Homo sapiens
aatttgtattaacat

SEQ ID NO: 790430 - DNA, 15 bp, Homo sapiens
atttgtattaacatc

SEQ ID NO: 790431 - DNA, 15 bp, Homo sapiens
tttgtattaacatct

SEQ ID NO: 790432 - DNA, 15 bp, Homo sapiens
ttgtattaacatctg

SEQ ID NO: 790433 - DNA, 15 bp, Homo sapiens
tgtattaacatctgc

SEQ ID NO: 790434 - DNA, 15 bp, Homo sapiens
gtattaacatctgct

SEQ ID NO: 790435 - DNA, 15 bp, Homo sapiens
tattaacatctgctt

SEQ ID NO: 790436 - DNA, 15 bp, Homo sapiens
attaacatctgctta

SEQ ID NO: 790437 - DNA, 15 bp, Homo sapiens
ttaacatctgcttat

SEQ ID NO: 790438 - DNA, 15 bp, Homo sapiens
taacatctgcttatt

SEQ ID NO: 790439 - DNA, 15 bp, Homo sapiens
aacatctgcttattt

SEQ ID NO: 790440 - DNA, 15 bp, Homo sapiens
acatctgcttatttc

SEQ ID NO: 790441 - DNA, 15 bp, Homo sapiens
catctgcttatttcc

SEQ ID NO: 790442 - DNA, 15 bp, Homo sapiens
atctgcttatttcct

SEQ ID NO: 790443 - DNA, 15 bp, Homo sapiens
tctgcttatttcctt

SEQ ID NO: 790444 - DNA, 15 bp, Homo sapiens
ctgcttatttccttg

SEQ ID NO: 790445 - DNA, 15 bp, Homo sapiens
tgcttatttccttgg

SEQ ID NO: 790446 - DNA, 15 bp, Homo sapiens
gcttatttccttggg

SEQ ID NO: 790447 - DNA, 15 bp, Homo sapiens
cttatttccttggga

SEQ ID NO: 790448 - DNA, 15 bp, Homo sapiens
ttatttccttgggat

SEQ ID NO: 790449 - DNA, 15 bp, Homo sapiens
tatttccttgggata

SEQ ID NO: 790450 - DNA, 15 bp, Homo sapiens
atttccttgggataa

SEQ ID NO: 790451 - DNA, 15 bp, Homo sapiens
tttccttgggataaa

SEQ ID NO: 790452 - DNA, 15 bp, Homo sapiens
ttccttgggataaat

SEQ ID NO: 790453 - DNA, 15 bp, Homo sapiens
tccttgggataaatc

SEQ ID NO: 790454 - DNA, 15 bp, Homo sapiens
ccttgggataaatct

SEQ ID NO: 790455 - DNA, 15 bp, Homo sapiens
cttgggataaatctc

SEQ ID NO: 790456 - DNA, 15 bp, Homo sapiens
ttgggataaatctcg

SEQ ID NO: 790457 - DNA, 15 bp, Homo sapiens
tgggataaatctcgt

SEQ ID NO: 790458 - DNA, 15 bp, Homo sapiens
gggataaatctcgtc

SEQ ID NO: 790459 - DNA, 15 bp, Homo sapiens
ggataaatctcgtca

SEQ ID NO: 790460 - DNA, 15 bp, Homo sapiens
gataaatctcgtcat

SEQ ID NO: 790461 - DNA, 15 bp, Homo sapiens
ataaatctcgtcatg

SEQ ID NO: 790462 - DNA, 15 bp, Homo sapiens
taaatctcgtcatgt

SEQ ID NO: 790463 - DNA, 15 bp, Homo sapiens
aaatctcgtcatgtc

SEQ ID NO: 790464 - DNA, 15 bp, Homo sapiens
aatctcgtcatgtcc

SEQ ID NO: 790465 - DNA, 15 bp, Homo sapiens
atctcgtcatgtccg

SEQ ID NO: 790466 - DNA, 15 bp, Homo sapiens
tctcgtcatgtccgt

SEQ ID NO: 790467 - DNA, 15 bp, Homo sapiens
ctcgtcatgtccgtg

SEQ ID NO: 790468 - DNA, 15 bp, Homo sapiens
tcgtcatgtccgtga

SEQ ID NO: 790469 - DNA, 15 bp, Homo sapiens
cgtcatgtccgtgat

SEQ ID NO: 790470 - DNA, 15 bp, Homo sapiens
gtcatgtccgtgatt

SEQ ID NO: 790471 - DNA, 15 bp, Homo sapiens
tcatgtccgtgattg

SEQ ID NO: 790472 - DNA, 15 bp, Homo sapiens
catgtccgtgattgc

SEQ ID NO: 790473 - DNA, 15 bp, Homo sapiens
atgtccgtgattgcc

SEQ ID NO: 790474 - DNA, 15 bp, Homo sapiens
tgtccgtgattgcct

SEQ ID NO: 790475 - DNA, 15 bp, Homo sapiens
gtccgtgattgcctt

SEQ ID NO: 790476 - DNA, 15 bp, Homo sapiens
tccgtgattgccttt

SEQ ID NO: 790477 - DNA, 15 bp, Homo sapiens
ccgtgattgcctttt

SEQ ID NO: 790478 - DNA, 15 bp, Homo sapiens
cgtgattgcctttta

SEQ ID NO: 790479 - DNA, 15 bp, Homo sapiens
gtgattgccttttaa

SEQ ID NO: 790480 - DNA, 15 bp, Homo sapiens
tgattgccttttaag

SEQ ID NO: 790481 - DNA, 15 bp, Homo sapiens
gattgccttttaagc

SEQ ID NO: 790482 - DNA, 15 bp, Homo sapiens
attgccttttaagca

SEQ ID NO: 790483 - DNA, 15 bp, Homo sapiens
ttgccttttaagcag

SEQ ID NO: 790484 - DNA, 15 bp, Homo sapiens
tgccttttaagcagg

SEQ ID NO: 790485 - DNA, 15 bp, Homo sapiens
gccttttaagcagga

SEQ ID NO: 790486 - DNA, 15 bp, Homo sapiens
ccttttaagcaggag

SEQ ID NO: 790487 - DNA, 15 bp, Homo sapiens
cttttaagcaggagt

SEQ ID NO: 790488 - DNA, 15 bp, Homo sapiens
ttttaagcaggagtg

SEQ ID NO: 790489 - DNA, 15 bp, Homo sapiens
tttaagcaggagtgt

SEQ ID NO: 790490 - DNA, 15 bp, Homo sapiens
ttaagcaggagtgtg

SEQ ID NO: 790491 - DNA, 15 bp, Homo sapiens
taagcaggagtgtga

SEQ ID NO: 790492 - DNA, 15 bp, Homo sapiens
aagcaggagtgtgat

SEQ ID NO: 790493 - DNA, 15 bp, Homo sapiens
agcaggagtgtgatg

SEQ ID NO: 790494 - DNA, 15 bp, Homo sapiens
gcaggagtgtgatgg

SEQ ID NO: 790495 - DNA, 15 bp, Homo sapiens
caggagtgtgatgga

SEQ ID NO: 790496 - DNA, 15 bp, Homo sapiens
aggagtgtgatggac

SEQ ID NO: 790497 - DNA, 15 bp, Homo sapiens
ggagtgtgatggact

SEQ ID NO: 790498 - DNA, 15 bp, Homo sapiens
gagtgtgatggactc

SEQ ID NO: 790499 - DNA, 15 bp, Homo sapiens
agtgtgatggactca

SEQ ID NO: 790500 - DNA, 15 bp, Homo sapiens
gtgtgatggactcac

SEQ ID NO: 790501 - DNA, 15 bp, Homo sapiens
tgtgatggactcact

SEQ ID NO: 790502 - DNA, 15 bp, Homo sapiens
gtgatggactcactt

SEQ ID NO: 790503 - DNA, 15 bp, Homo sapiens
tgatggactcacttg

SEQ ID NO: 790504 - DNA, 15 bp, Homo sapiens
gatggactcacttgt

SEQ ID NO: 790505 - DNA, 15 bp, Homo sapiens
atggactcacttgtg

SEQ ID NO: 790506 - DNA, 15 bp, Homo sapiens
tggactcacttgtgt

SEQ ID NO: 790507 - DNA, 15 bp, Homo sapiens
ggactcacttgtgta

SEQ ID NO: 790508 - DNA, 15 bp, Homo sapiens
gactcacttgtgtat

SEQ ID NO: 790509 - DNA, 15 bp, Homo sapiens
actcacttgtgtata

SEQ ID NO: 790510 - DNA, 15 bp, Homo sapiens
ctcacttgtgtataa

SEQ ID NO: 790511 - DNA, 15 bp, Homo sapiens
tcacttgtgtataag

SEQ ID NO: 790512 - DNA, 15 bp, Homo sapiens
cacttgtgtataaga

SEQ ID NO: 790513 - DNA, 15 bp, Homo sapiens
acttgtgtataagag

SEQ ID NO: 790514 - DNA, 15 bp, Homo sapiens
cttgtgtataagagc

SEQ ID NO: 790515 - DNA, 15 bp, Homo sapiens
ttgtgtataagagcc

SEQ ID NO: 790516 - DNA, 15 bp, Homo sapiens
tgtgtataagagcct

SEQ ID NO: 790517 - DNA, 15 bp, Homo sapiens
gtgtataagagcctt

SEQ ID NO: 790518 - DNA, 15 bp, Homo sapiens
tgtataagagccttt

SEQ ID NO: 790519 - DNA, 15 bp, Homo sapiens
gtataagagccttta

SEQ ID NO: 790520 - DNA, 15 bp, Homo sapiens
tataagagcctttat

SEQ ID NO: 790521 - DNA, 15 bp, Homo sapiens
ataagagcctttatg

SEQ ID NO: 790522 - DNA, 15 bp, Homo sapiens
taagagcctttatgg

SEQ ID NO: 790523 - DNA, 15 bp, Homo sapiens
aagagcctttatggg

SEQ ID NO: 790524 - DNA, 15 bp, Homo sapiens
agagcctttatgggc

SEQ ID NO: 790525 - DNA, 15 bp, Homo sapiens
gagcctttatgggcc

SEQ ID NO: 790526 - DNA, 15 bp, Homo sapiens
agcctttatgggcca

SEQ ID NO: 790527 - DNA, 15 bp, Homo sapiens
gcctttatgggccag

SEQ ID NO: 790528 - DNA, 15 bp, Homo sapiens
cctttatgggccagg

SEQ ID NO: 790529 - DNA, 15 bp, Homo sapiens
ctttatgggccaggc

SEQ ID NO: 790530 - DNA, 15 bp, Homo sapiens
tttatgggccaggcg

SEQ ID NO: 790531 - DNA, 15 bp, Homo sapiens
ttatgggccaggcgc

SEQ ID NO: 790532 - DNA, 15 bp, Homo sapiens
tatgggccaggcgca

SEQ ID NO: 790533 - DNA, 15 bp, Homo sapiens
atgggccaggcgcag

SEQ ID NO: 790534 - DNA, 15 bp, Homo sapiens
tgggccaggcgcagt

SEQ ID NO: 790535 - DNA, 15 bp, Homo sapiens
gggccaggcgcagtg

SEQ ID NO: 790536 - DNA, 15 bp, Homo sapiens
ggccaggcgcagtgg

SEQ ID NO: 790537 - DNA, 15 bp, Homo sapiens
gccaggcgcagtggc

SEQ ID NO: 790538 - DNA, 15 bp, Homo sapiens
ccaggcgcagtggct

SEQ ID NO: 790539 - DNA, 15 bp, Homo sapiens
caggcgcagtggctc

SEQ ID NO: 790540 - DNA, 15 bp, Homo sapiens
aggcgcagtggctca

SEQ ID NO: 790541 - DNA, 15 bp, Homo sapiens
cgcagtggctcacac

SEQ ID NO: 790542 - DNA, 15 bp, Homo sapiens
ggatcacaaggtcag

SEQ ID NO: 790543 - DNA, 15 bp, Homo sapiens
gatcacaaggtcagg

SEQ ID NO: 790544 - DNA, 15 bp, Homo sapiens
atcacaaggtcagga

SEQ ID NO: 790545 - DNA, 15 bp, Homo sapiens
tcacaaggtcaggag

SEQ ID NO: 790546 - DNA, 15 bp, Homo sapiens
cacaaggtcaggaga

SEQ ID NO: 790547 - DNA, 15 bp, Homo sapiens
acaaggtcaggagat

SEQ ID NO: 790548 - DNA, 15 bp, Homo sapiens
caaggtcaggagatc

SEQ ID NO: 790549 - DNA, 15 bp, Homo sapiens
aaggtcaggagatcg

SEQ ID NO: 790550 - DNA, 15 bp, Homo sapiens
agatcgagaccatcc

SEQ ID NO: 790551 - DNA, 15 bp, Homo sapiens
gatcgagaccatcct

SEQ ID NO: 790552 - DNA, 15 bp, Homo sapiens
atcgagaccatcctg

SEQ ID NO: 790553 - DNA, 15 bp, Homo sapiens
catcctggctaacat

SEQ ID NO: 790554 - DNA, 15 bp, Homo sapiens
atcctggctaacatg

SEQ ID NO: 790555 - DNA, 15 bp, Homo sapiens
tcctggctaacatgg

SEQ ID NO: 790556 - DNA, 15 bp, Homo sapiens
cctggctaacatggt

SEQ ID NO: 790557 - DNA, 15 bp, Homo sapiens
ctggctaacatggtg

SEQ ID NO: 790558 - DNA, 15 bp, Homo sapiens
tggctaacatggtga

SEQ ID NO: 790559 - DNA, 15 bp, Homo sapiens
ggctaacatggtgaa

SEQ ID NO: 790560 - DNA, 15 bp, Homo sapiens
gctaacatggtgaaa

SEQ ID NO: 790561 - DNA, 15 bp, Homo sapiens
ctaacatggtgaaac

SEQ ID NO: 790562 - DNA, 15 bp, Homo sapiens
taacatggtgaaacc

SEQ ID NO: 790563 - DNA, 15 bp, Homo sapiens
ccatctctactaaag

SEQ ID NO: 790564 - DNA, 15 bp, Homo sapiens
catctctactaaaga

SEQ ID NO: 790565 - DNA, 15 bp, Homo sapiens
atctctactaaagat

SEQ ID NO: 790566 - DNA, 15 bp, Homo sapiens
tctctactaaagata

SEQ ID NO: 790567 - DNA, 15 bp, Homo sapiens
ctctactaaagatac

SEQ ID NO: 790568 - DNA, 15 bp, Homo sapiens
tctactaaagataca

SEQ ID NO: 790569 - DNA, 15 bp, Homo sapiens
ctactaaagatacaa

SEQ ID NO: 790570 - DNA, 15 bp, Homo sapiens
tactaaagatacaaa

SEQ ID NO: 790571 - DNA, 15 bp, Homo sapiens
actaaagatacaaaa

SEQ ID NO: 790572 - DNA, 15 bp, Homo sapiens
ctaaagatacaaaaa

SEQ ID NO: 790573 - DNA, 15 bp, Homo sapiens
taaagatacaaaaaa

SEQ ID NO: 790574 - DNA, 15 bp, Homo sapiens
aaagatacaaaaaat

SEQ ID NO: 790575 - DNA, 15 bp, Homo sapiens
aagatacaaaaaatt

SEQ ID NO: 790576 - DNA, 15 bp, Homo sapiens
agatacaaaaaatta

SEQ ID NO: 790577 - DNA, 15 bp, Homo sapiens
gatacaaaaaattag

SEQ ID NO: 790578 - DNA, 15 bp, Homo sapiens
gccgggcatggtggt

SEQ ID NO: 790579 - DNA, 15 bp, Homo sapiens
ccgggcatggtggtg

SEQ ID NO: 790580 - DNA, 15 bp, Homo sapiens
cgggcatggtggtgg

SEQ ID NO: 790581 - DNA, 15 bp, Homo sapiens
ggcatggtggtgggc

SEQ ID NO: 790582 - DNA, 15 bp, Homo sapiens
gcatggtggtgggcg

SEQ ID NO: 790583 - DNA, 15 bp, Homo sapiens
catggtggtgggcgc

SEQ ID NO: 790584 - DNA, 15 bp, Homo sapiens
atggtggtgggcgcc

SEQ ID NO: 790585 - DNA, 15 bp, Homo sapiens
tggtggtgggcgcct

SEQ ID NO: 790586 - DNA, 15 bp, Homo sapiens
ggtggtgggcgcctg

SEQ ID NO: 790587 - DNA, 15 bp, Homo sapiens
gtggtgggcgcctgt

SEQ ID NO: 790588 - DNA, 15 bp, Homo sapiens
tggtgggcgcctgta

SEQ ID NO: 790589 - DNA, 15 bp, Homo sapiens
ggtgggcgcctgtag

SEQ ID NO: 790590 - DNA, 15 bp, Homo sapiens
gtgggcgcctgtagt

SEQ ID NO: 790591 - DNA, 15 bp, Homo sapiens
tgggcgcctgtagtt

SEQ ID NO: 790592 - DNA, 15 bp, Homo sapiens
gggcgcctgtagttc

SEQ ID NO: 790593 - DNA, 15 bp, Homo sapiens
ggcgcctgtagttcc

SEQ ID NO: 790594 - DNA, 15 bp, Homo sapiens
gcgcctgtagttcca

SEQ ID NO: 790595 - DNA, 15 bp, Homo sapiens
cgcctgtagttccag

SEQ ID NO: 790596 - DNA, 15 bp, Homo sapiens
ggcaggagaatggca

SEQ ID NO: 790597 - DNA, 15 bp, Homo sapiens
gcaggagaatggcat

SEQ ID NO: 790598 - DNA, 15 bp, Homo sapiens
caggagaatggcatg

SEQ ID NO: 790599 - DNA, 15 bp, Homo sapiens
aggagaatggcatga

SEQ ID NO: 790600 - DNA, 15 bp, Homo sapiens
ggagaatggcatgaa

SEQ ID NO: 790601 - DNA, 15 bp, Homo sapiens
gagaatggcatgaac

SEQ ID NO: 790602 - DNA, 15 bp, Homo sapiens
agaatggcatgaacc

SEQ ID NO: 790603 - DNA, 15 bp, Homo sapiens
gaatggcatgaacct

SEQ ID NO: 790604 - DNA, 15 bp, Homo sapiens
aatggcatgaacctg

SEQ ID NO: 790605 - DNA, 15 bp, Homo sapiens
atggcatgaacctgg

SEQ ID NO: 790606 - DNA, 15 bp, Homo sapiens
tggcatgaacctggg

SEQ ID NO: 790607 - DNA, 15 bp, Homo sapiens
ggcatgaacctggga

SEQ ID NO: 790608 - DNA, 15 bp, Homo sapiens
gcatgaacctgggag

SEQ ID NO: 790609 - DNA, 15 bp, Homo sapiens
catgaacctgggagg

SEQ ID NO: 790610 - DNA, 15 bp, Homo sapiens
atgaacctgggaggc

SEQ ID NO: 790611 - DNA, 15 bp, Homo sapiens
cctgggaggcagagc

SEQ ID NO: 790612 - DNA, 15 bp, Homo sapiens
ctgggaggcagagct

SEQ ID NO: 790613 - DNA, 15 bp, Homo sapiens
tgggaggcagagctt

SEQ ID NO: 790614 - DNA, 15 bp, Homo sapiens
gggaggcagagcttg

SEQ ID NO: 790615 - DNA, 15 bp, Homo sapiens
ggaggcagagcttgc

SEQ ID NO: 790616 - DNA, 15 bp, Homo sapiens
gaggcagagcttgca

SEQ ID NO: 790617 - DNA, 15 bp, Homo sapiens
aggcagagcttgcag

SEQ ID NO: 790618 - DNA, 15 bp, Homo sapiens
ggcagagcttgcagt

SEQ ID NO: 790619 - DNA, 15 bp, Homo sapiens
gcagagcttgcagtg

SEQ ID NO: 790620 - DNA, 15 bp, Homo sapiens
cagagcttgcagtga

SEQ ID NO: 790621 - DNA, 15 bp, Homo sapiens
agagcttgcagtgag

SEQ ID NO: 790622 - DNA, 15 bp, Homo sapiens
gattgcaccactgcg

SEQ ID NO: 790623 - DNA, 15 bp, Homo sapiens
attgcaccactgcgc

SEQ ID NO: 790624 - DNA, 15 bp, Homo sapiens
ttgcaccactgcgct

SEQ ID NO: 790625 - DNA, 15 bp, Homo sapiens
tgcaccactgcgctc

SEQ ID NO: 790626 - DNA, 15 bp, Homo sapiens
gcaccactgcgctcc

SEQ ID NO: 790627 - DNA, 15 bp, Homo sapiens
caccactgcgctcca

SEQ ID NO: 790628 - DNA, 15 bp, Homo sapiens
accactgcgctccag

SEQ ID NO: 790629 - DNA, 15 bp, Homo sapiens
ccactgcgctccaga

SEQ ID NO: 790630 - DNA, 15 bp, Homo sapiens
cactgcgctccagac

SEQ ID NO: 790631 - DNA, 15 bp, Homo sapiens
actgcgctccagact

SEQ ID NO: 790632 - DNA, 15 bp, Homo sapiens
ctgcgctccagactg

SEQ ID NO: 790633 - DNA, 15 bp, Homo sapiens
tgcgctccagactgg

SEQ ID NO: 790634 - DNA, 15 bp, Homo sapiens
gcgctccagactggg

SEQ ID NO: 790635 - DNA, 15 bp, Homo sapiens
cgctccagactgggt

SEQ ID NO: 790636 - DNA, 15 bp, Homo sapiens
gctccagactgggtg

SEQ ID NO: 790637 - DNA, 15 bp, Homo sapiens
ctccagactgggtga

SEQ ID NO: 790638 - DNA, 15 bp, Homo sapiens
tccagactgggtgac

SEQ ID NO: 790639 - DNA, 15 bp, Homo sapiens
ccagactgggtgaca

SEQ ID NO: 790640 - DNA, 15 bp, Homo sapiens
cagactgggtgacag

SEQ ID NO: 790641 - DNA, 15 bp, Homo sapiens
agactgggtgacaga

SEQ ID NO: 790642 - DNA, 15 bp, Homo sapiens
gactgggtgacagag

SEQ ID NO: 790643 - DNA, 15 bp, Homo sapiens
actgggtgacagagc

SEQ ID NO: 790644 - DNA, 15 bp, Homo sapiens
ctgggtgacagagcc

SEQ ID NO: 790645 - DNA, 15 bp, Homo sapiens
tgggtgacagagcca

SEQ ID NO: 790646 - DNA, 15 bp, Homo sapiens
gggtgacagagccag

SEQ ID NO: 790647 - DNA, 15 bp, Homo sapiens
ggtgacagagccaga

SEQ ID NO: 790648 - DNA, 15 bp, Homo sapiens
gtgacagagccagac

SEQ ID NO: 790649 - DNA, 15 bp, Homo sapiens
tgacagagccagact

SEQ ID NO: 790650 - DNA, 15 bp, Homo sapiens
gacagagccagactc

SEQ ID NO: 790651 - DNA, 15 bp, Homo sapiens
acagagccagactct

SEQ ID NO: 790652 - DNA, 15 bp, Homo sapiens
cagagccagactctg

SEQ ID NO: 790653 - DNA, 15 bp, Homo sapiens
agagccagactctgt

SEQ ID NO: 790654 - DNA, 15 bp, Homo sapiens
gagccagactctgtc

SEQ ID NO: 790655 - DNA, 15 bp, Homo sapiens
agccagactctgtct

SEQ ID NO: 790656 - DNA, 15 bp, Homo sapiens
gccagactctgtctc

SEQ ID NO: 790657 - DNA, 15 bp, Homo sapiens
ccagactctgtctct

SEQ ID NO: 790658 - DNA, 15 bp, Homo sapiens
cagactctgtctctc

SEQ ID NO: 790659 - DNA, 15 bp, Homo sapiens
agactctgtctctca

SEQ ID NO: 790660 - DNA, 15 bp, Homo sapiens
gactctgtctctcaa

SEQ ID NO: 790661 - DNA, 15 bp, Homo sapiens
actctgtctctcaaa

SEQ ID NO: 790662 - DNA, 15 bp, Homo sapiens
ctctgtctctcaaaa

SEQ ID NO: 790663 - DNA, 15 bp, Homo sapiens
tctgtctctcaaaaa

SEQ ID NO: 790664 - DNA, 15 bp, Homo sapiens
ctgtctctcaaaaaa

SEQ ID NO: 790665 - DNA, 15 bp, Homo sapiens
tgtctctcaaaaaaa

SEQ ID NO: 790666 - DNA, 15 bp, Homo sapiens
gtctctcaaaaaaaa

SEQ ID NO: 790667 - DNA, 15 bp, Homo sapiens
tctctcaaaaaaaaa

SEQ ID NO: 790668 - DNA, 15 bp, Homo sapiens
ctctcaaaaaaaaaa

SEQ ID NO: 790669 - DNA, 15 bp, Homo sapiens
tcaaaaaaaaaaaag

SEQ ID NO: 790670 - DNA, 15 bp, Homo sapiens
caaaaaaaaaaaagc

SEQ ID NO: 790671 - DNA, 15 bp, Homo sapiens
aaaaaaaaaaaagcc

SEQ ID NO: 790672 - DNA, 15 bp, Homo sapiens
aaaaaaaaaaagcct

SEQ ID NO: 790673 - DNA, 15 bp, Homo sapiens
aaaaaaaaaagcctt

SEQ ID NO: 790674 - DNA, 15 bp, Homo sapiens
aaaaaaaaagccttt

SEQ ID NO: 790675 - DNA, 15 bp, Homo sapiens
aaaaaaaagccttta

SEQ ID NO: 790676 - DNA, 15 bp, Homo sapiens
aaaaaaagcctttat

SEQ ID NO: 790677 - DNA, 15 bp, Homo sapiens
aaaaaagcctttatg

SEQ ID NO: 790678 - DNA, 15 bp, Homo sapiens
aaaaagcctttatga

SEQ ID NO: 790679 - DNA, 15 bp, Homo sapiens
aaaagcctttatgac

SEQ ID NO: 790680 - DNA, 15 bp, Homo sapiens
aaagcctttatgaca

SEQ ID NO: 790681 - DNA, 15 bp, Homo sapiens
aagcctttatgacaa

SEQ ID NO: 790682 - DNA, 15 bp, Homo sapiens
agcctttatgacaat

SEQ ID NO: 790683 - DNA, 15 bp, Homo sapiens
gcctttatgacaata

SEQ ID NO: 790684 - DNA, 15 bp, Homo sapiens
cctttatgacaatat

SEQ ID NO: 790685 - DNA, 15 bp, Homo sapiens
ctttatgacaatatt

SEQ ID NO: 790686 - DNA, 15 bp, Homo sapiens
tttatgacaatattg

SEQ ID NO: 790687 - DNA, 15 bp, Homo sapiens
ttatgacaatattgg

SEQ ID NO: 790688 - DNA, 15 bp, Homo sapiens
tatgacaatattgga

SEQ ID NO: 790689 - DNA, 15 bp, Homo sapiens
atgacaatattggaa

SEQ ID NO: 790690 - DNA, 15 bp, Homo sapiens
tgacaatattggaag

SEQ ID NO: 790691 - DNA, 15 bp, Homo sapiens
gacaatattggaagg

SEQ ID NO: 790692 - DNA, 15 bp, Homo sapiens
acaatattggaaggg

SEQ ID NO: 790693 - DNA, 15 bp, Homo sapiens
caatattggaagggt

SEQ ID NO: 790694 - DNA, 15 bp, Homo sapiens
aatattggaagggtg

SEQ ID NO: 790695 - DNA, 15 bp, Homo sapiens
atattggaagggtgg

SEQ ID NO: 790696 - DNA, 15 bp, Homo sapiens
tattggaagggtgga

SEQ ID NO: 790697 - DNA, 15 bp, Homo sapiens
attggaagggtggat

SEQ ID NO: 790698 - DNA, 15 bp, Homo sapiens
ttggaagggtggatt

SEQ ID NO: 790699 - DNA, 15 bp, Homo sapiens
tggaagggtggattg

SEQ ID NO: 790700 - DNA, 15 bp, Homo sapiens
ggaagggtggattgg

SEQ ID NO: 790701 - DNA, 15 bp, Homo sapiens
gaagggtggattgga

SEQ ID NO: 790702 - DNA, 15 bp, Homo sapiens
aagggtggattggaa

SEQ ID NO: 790703 - DNA, 15 bp, Homo sapiens
agggtggattggaaa

SEQ ID NO: 790704 - DNA, 15 bp, Homo sapiens
gggtggattggaaag

SEQ ID NO: 790705 - DNA, 15 bp, Homo sapiens
ggtggattggaaaga

SEQ ID NO: 790706 - DNA, 15 bp, Homo sapiens
gtggattggaaagag

SEQ ID NO: 790707 - DNA, 15 bp, Homo sapiens
tggattggaaagagg

SEQ ID NO: 790708 - DNA, 15 bp, Homo sapiens
ggattggaaagaggt

SEQ ID NO: 790709 - DNA, 15 bp, Homo sapiens
gattggaaagaggtg

SEQ ID NO: 790710 - DNA, 15 bp, Homo sapiens
attggaaagaggtga

SEQ ID NO: 790711 - DNA, 15 bp, Homo sapiens
ttggaaagaggtgat

SEQ ID NO: 790712 - DNA, 15 bp, Homo sapiens
tggaaagaggtgatt

SEQ ID NO: 790713 - DNA, 15 bp, Homo sapiens
ggaaagaggtgattg

SEQ ID NO: 790714 - DNA, 15 bp, Homo sapiens
gaaagaggtgattgg

SEQ ID NO: 790715 - DNA, 15 bp, Homo sapiens
aaagaggtgattgga

SEQ ID NO: 790716 - DNA, 15 bp, Homo sapiens
aagaggtgattggag

SEQ ID NO: 790717 - DNA, 15 bp, Homo sapiens
agaggtgattggagg

SEQ ID NO: 790718 - DNA, 15 bp, Homo sapiens
gaggtgattggaggc

SEQ ID NO: 790719 - DNA, 15 bp, Homo sapiens
aggtgattggaggca

SEQ ID NO: 790720 - DNA, 15 bp, Homo sapiens
ggtgattggaggcaa

SEQ ID NO: 790721 - DNA, 15 bp, Homo sapiens
gtgattggaggcaaa

SEQ ID NO: 790722 - DNA, 15 bp, Homo sapiens
tgattggaggcaaat

SEQ ID NO: 790723 - DNA, 15 bp, Homo sapiens
gattggaggcaaatg

SEQ ID NO: 790724 - DNA, 15 bp, Homo sapiens
attggaggcaaatgg

SEQ ID NO: 790725 - DNA, 15 bp, Homo sapiens
ttggaggcaaatgga

SEQ ID NO: 790726 - DNA, 15 bp, Homo sapiens
tggaggcaaatggac

SEQ ID NO: 790727 - DNA, 15 bp, Homo sapiens
ggaggcaaatggaca

SEQ ID NO: 790728 - DNA, 15 bp, Homo sapiens
gaggcaaatggacaa

SEQ ID NO: 790729 - DNA, 15 bp, Homo sapiens
aggcaaatggacaaa

SEQ ID NO: 790730 - DNA, 15 bp, Homo sapiens
ggcaaatggacaaat

SEQ ID NO: 790731 - DNA, 15 bp, Homo sapiens
gcaaatggacaaatg

SEQ ID NO: 790732 - DNA, 15 bp, Homo sapiens
caaatggacaaatgc

SEQ ID NO: 790733 - DNA, 15 bp, Homo sapiens
aaatggacaaatgca

SEQ ID NO: 790734 - DNA, 15 bp, Homo sapiens
aatggacaaatgcag

SEQ ID NO: 790735 - DNA, 15 bp, Homo sapiens
atggacaaatgcaga

SEQ ID NO: 790736 - DNA, 15 bp, Homo sapiens
tggacaaatgcagat

SEQ ID NO: 790737 - DNA, 15 bp, Homo sapiens
ggacaaatgcagatg

SEQ ID NO: 790738 - DNA, 15 bp, Homo sapiens
gacaaatgcagatgc

SEQ ID NO: 790739 - DNA, 15 bp, Homo sapiens
acaaatgcagatgct

SEQ ID NO: 790740 - DNA, 15 bp, Homo sapiens
caaatgcagatgctg

SEQ ID NO: 790741 - DNA, 15 bp, Homo sapiens
aaatgcagatgctgt

SEQ ID NO: 790742 - DNA, 15 bp, Homo sapiens
aatgcagatgctgtg

SEQ ID NO: 790743 - DNA, 15 bp, Homo sapiens
atgcagatgctgtgt

SEQ ID NO: 790744 - DNA, 15 bp, Homo sapiens
tgcagatgctgtgtg

SEQ ID NO: 790745 - DNA, 15 bp, Homo sapiens
gcagatgctgtgtga

SEQ ID NO: 790746 - DNA, 15 bp, Homo sapiens
cagatgctgtgtgag

SEQ ID NO: 790747 - DNA, 15 bp, Homo sapiens
agatgctgtgtgagc

SEQ ID NO: 790748 - DNA, 15 bp, Homo sapiens
gatgctgtgtgagca

SEQ ID NO: 790749 - DNA, 15 bp, Homo sapiens
atgctgtgtgagcaa

SEQ ID NO: 790750 - DNA, 15 bp, Homo sapiens
tgctgtgtgagcaat

SEQ ID NO: 790751 - DNA, 15 bp, Homo sapiens
gctgtgtgagcaatt

SEQ ID NO: 790752 - DNA, 15 bp, Homo sapiens
ctgtgtgagcaattt

SEQ ID NO: 790753 - DNA, 15 bp, Homo sapiens
tgtgtgagcaattta

SEQ ID NO: 790754 - DNA, 15 bp, Homo sapiens
gtgtgagcaatttag

SEQ ID NO: 790755 - DNA, 15 bp, Homo sapiens
tgtgagcaatttagg

SEQ ID NO: 790756 - DNA, 15 bp, Homo sapiens
gtgagcaatttaggc

SEQ ID NO: 790757 - DNA, 15 bp, Homo sapiens
tgagcaatttaggca

SEQ ID NO: 790758 - DNA, 15 bp, Homo sapiens
gagcaatttaggcaa

SEQ ID NO: 790759 - DNA, 15 bp, Homo sapiens
agcaatttaggcaac

SEQ ID NO: 790760 - DNA, 15 bp, Homo sapiens
gcaatttaggcaacg

SEQ ID NO: 790761 - DNA, 15 bp, Homo sapiens
caatttaggcaacgt

SEQ ID NO: 790762 - DNA, 15 bp, Homo sapiens
aatttaggcaacgta

SEQ ID NO: 790763 - DNA, 15 bp, Homo sapiens
atttaggcaacgtat

SEQ ID NO: 790764 - DNA, 15 bp, Homo sapiens
tttaggcaacgtatg

SEQ ID NO: 790765 - DNA, 15 bp, Homo sapiens
ttaggcaacgtatga

SEQ ID NO: 790766 - DNA, 15 bp, Homo sapiens
taggcaacgtatgag

SEQ ID NO: 790767 - DNA, 15 bp, Homo sapiens
aggcaacgtatgagg

SEQ ID NO: 790768 - DNA, 15 bp, Homo sapiens
ggcaacgtatgaggg

SEQ ID NO: 790769 - DNA, 15 bp, Homo sapiens
gcaacgtatgagggg

SEQ ID NO: 790770 - DNA, 15 bp, Homo sapiens
caacgtatgaggggc

SEQ ID NO: 790771 - DNA, 15 bp, Homo sapiens
aacgtatgaggggca

SEQ ID NO: 790772 - DNA, 15 bp, Homo sapiens
acgtatgaggggcat

SEQ ID NO: 790773 - DNA, 15 bp, Homo sapiens
cgtatgaggggcata

SEQ ID NO: 790774 - DNA, 15 bp, Homo sapiens
gtatgaggggcataa

SEQ ID NO: 790775 - DNA, 15 bp, Homo sapiens
tatgaggggcataag

SEQ ID NO: 790776 - DNA, 15 bp, Homo sapiens
atgaggggcataagt

SEQ ID NO: 790777 - DNA, 15 bp, Homo sapiens
tgaggggcataagtt

SEQ ID NO: 790778 - DNA, 15 bp, Homo sapiens
gaggggcataagtta

SEQ ID NO: 790779 - DNA, 15 bp, Homo sapiens
aggggcataagttac

SEQ ID NO: 790780 - DNA, 15 bp, Homo sapiens
ggggcataagttact

SEQ ID NO: 790781 - DNA, 15 bp, Homo sapiens
gggcataagttactg

SEQ ID NO: 790782 - DNA, 15 bp, Homo sapiens
ggcataagttactgg

SEQ ID NO: 790783 - DNA, 15 bp, Homo sapiens
gcataagttactggc

SEQ ID NO: 790784 - DNA, 15 bp, Homo sapiens
cataagttactggca

SEQ ID NO: 790785 - DNA, 15 bp, Homo sapiens
ataagttactggcag

SEQ ID NO: 790786 - DNA, 15 bp, Homo sapiens
taagttactggcagc

SEQ ID NO: 790787 - DNA, 15 bp, Homo sapiens
aagttactggcagca

SEQ ID NO: 790788 - DNA, 15 bp, Homo sapiens
agttactggcagcat

SEQ ID NO: 790789 - DNA, 15 bp, Homo sapiens
gttactggcagcatg

SEQ ID NO: 790790 - DNA, 15 bp, Homo sapiens
ttactggcagcatgg

SEQ ID NO: 790791 - DNA, 15 bp, Homo sapiens
tactggcagcatggt

SEQ ID NO: 790792 - DNA, 15 bp, Homo sapiens
actggcagcatggtt

SEQ ID NO: 790793 - DNA, 15 bp, Homo sapiens
ctggcagcatggtta

SEQ ID NO: 790794 - DNA, 15 bp, Homo sapiens
tggcagcatggttag

SEQ ID NO: 790795 - DNA, 15 bp, Homo sapiens
ggcagcatggttaga

SEQ ID NO: 790796 - DNA, 15 bp, Homo sapiens
gcagcatggttagag

SEQ ID NO: 790797 - DNA, 15 bp, Homo sapiens
cagcatggttagaga

SEQ ID NO: 790798 - DNA, 15 bp, Homo sapiens
agcatggttagagaa

SEQ ID NO: 790799 - DNA, 15 bp, Homo sapiens
gcatggttagagaaa

SEQ ID NO: 790800 - DNA, 15 bp, Homo sapiens
catggttagagaaaa

SEQ ID NO: 790801 - DNA, 15 bp, Homo sapiens
atggttagagaaaag

SEQ ID NO: 790802 - DNA, 15 bp, Homo sapiens
tggttagagaaaaga

SEQ ID NO: 790803 - DNA, 15 bp, Homo sapiens
ggttagagaaaagag

SEQ ID NO: 790804 - DNA, 15 bp, Homo sapiens
gttagagaaaagagg

SEQ ID NO: 790805 - DNA, 15 bp, Homo sapiens
ttagagaaaagagga

SEQ ID NO: 790806 - DNA, 15 bp, Homo sapiens
tagagaaaagaggag

SEQ ID NO: 790807 - DNA, 15 bp, Homo sapiens
agagaaaagaggaga

SEQ ID NO: 790808 - DNA, 15 bp, Homo sapiens
gagaaaagaggagat

SEQ ID NO: 790809 - DNA, 15 bp, Homo sapiens
agaaaagaggagatg

SEQ ID NO: 790810 - DNA, 15 bp, Homo sapiens
gaaaagaggagatgg

SEQ ID NO: 790811 - DNA, 15 bp, Homo sapiens
aaaagaggagatggt

SEQ ID NO: 790812 - DNA, 15 bp, Homo sapiens
aaagaggagatggta

SEQ ID NO: 790813 - DNA, 15 bp, Homo sapiens
aagaggagatggtaa

SEQ ID NO: 790814 - DNA, 15 bp, Homo sapiens
agaggagatggtaat

SEQ ID NO: 790815 - DNA, 15 bp, Homo sapiens
gaggagatggtaatg

SEQ ID NO: 790816 - DNA, 15 bp, Homo sapiens
aggagatggtaatga

SEQ ID NO: 790817 - DNA, 15 bp, Homo sapiens
ggagatggtaatgat

SEQ ID NO: 790818 - DNA, 15 bp, Homo sapiens
gagatggtaatgatt

SEQ ID NO: 790819 - DNA, 15 bp, Homo sapiens
agatggtaatgattc

SEQ ID NO: 790820 - DNA, 15 bp, Homo sapiens
gatggtaatgattct

SEQ ID NO: 790821 - DNA, 15 bp, Homo sapiens
atggtaatgattctt

SEQ ID NO: 790822 - DNA, 15 bp, Homo sapiens
tggtaatgattcttt

SEQ ID NO: 790823 - DNA, 15 bp, Homo sapiens
ggtaatgattctttt

SEQ ID NO: 790824 - DNA, 15 bp, Homo sapiens
gtaatgattcttttt

SEQ ID NO: 790825 - DNA, 15 bp, Homo sapiens
taatgattctttttt

SEQ ID NO: 790826 - DNA, 15 bp, Homo sapiens
aatgattcttttttt

SEQ ID NO: 790827 - DNA, 15 bp, Homo sapiens
atgattctttttttt

SEQ ID NO: 790828 - DNA, 15 bp, Homo sapiens
tgattcttttttttt

SEQ ID NO: 790829 - DNA, 15 bp, Homo sapiens
cttttttttttttac

SEQ ID NO: 790830 - DNA, 15 bp, Homo sapiens
tttttttttttactt

SEQ ID NO: 790831 - DNA, 15 bp, Homo sapiens
ttttttttttacttt

SEQ ID NO: 790832 - DNA, 15 bp, Homo sapiens
tttttttttactttg

SEQ ID NO: 790833 - DNA, 15 bp, Homo sapiens
ttttttttactttgt

SEQ ID NO: 790834 - DNA, 15 bp, Homo sapiens
tttttttactttgtt

SEQ ID NO: 790835 - DNA, 15 bp, Homo sapiens
ttttttactttgttt

SEQ ID NO: 790836 - DNA, 15 bp, Homo sapiens
tttttactttgtttt

SEQ ID NO: 790837 - DNA, 15 bp, Homo sapiens
ttttactttgttttt

SEQ ID NO: 790838 - DNA, 15 bp, Homo sapiens
tttactttgtttttt

SEQ ID NO: 790839 - DNA, 15 bp, Homo sapiens
ttactttgttttttt

SEQ ID NO: 790840 - DNA, 15 bp, Homo sapiens
tactttgtttttttt

SEQ ID NO: 790841 - DNA, 15 bp, Homo sapiens
actttgtttttttta

SEQ ID NO: 790842 - DNA, 15 bp, Homo sapiens
ctttgttttttttaa

SEQ ID NO: 790843 - DNA, 15 bp, Homo sapiens
tttgttttttttaat

SEQ ID NO: 790844 - DNA, 15 bp, Homo sapiens
ttgttttttttaatt

SEQ ID NO: 790845 - DNA, 15 bp, Homo sapiens
tgttttttttaatta

SEQ ID NO: 790846 - DNA, 15 bp, Homo sapiens
gttttttttaattat

SEQ ID NO: 790847 - DNA, 15 bp, Homo sapiens
ttttttttaattatt

SEQ ID NO: 790848 - DNA, 15 bp, Homo sapiens
tttttttaattatta

SEQ ID NO: 790849 - DNA, 15 bp, Homo sapiens
ttttttaattattat

SEQ ID NO: 790850 - DNA, 15 bp, Homo sapiens
tttttaattattata

SEQ ID NO: 790851 - DNA, 15 bp, Homo sapiens
ttttaattattatac

SEQ ID NO: 790852 - DNA, 15 bp, Homo sapiens
tttaattattatact

SEQ ID NO: 790853 - DNA, 15 bp, Homo sapiens
ttaattattatactt

SEQ ID NO: 790854 - DNA, 15 bp, Homo sapiens
taattattatacttt

SEQ ID NO: 790855 - DNA, 15 bp, Homo sapiens
aattattatacttta

SEQ ID NO: 790856 - DNA, 15 bp, Homo sapiens
attattatactttaa

SEQ ID NO: 790857 - DNA, 15 bp, Homo sapiens
ttattatactttaag

SEQ ID NO: 790858 - DNA, 15 bp, Homo sapiens
tattatactttaagt

SEQ ID NO: 790859 - DNA, 15 bp, Homo sapiens
attatactttaagtt

SEQ ID NO: 790860 - DNA, 15 bp, Homo sapiens
ttatactttaagttt

SEQ ID NO: 790861 - DNA, 15 bp, Homo sapiens
tatactttaagtttt

SEQ ID NO: 790862 - DNA, 15 bp, Homo sapiens
atactttaagtttta

SEQ ID NO: 790863 - DNA, 15 bp, Homo sapiens
tactttaagttttag

SEQ ID NO: 790864 - DNA, 15 bp, Homo sapiens
actttaagttttagg

SEQ ID NO: 790865 - DNA, 15 bp, Homo sapiens
ctttaagttttaggg

SEQ ID NO: 790866 - DNA, 15 bp, Homo sapiens
tttaagttttagggt

SEQ ID NO: 790867 - DNA, 15 bp, Homo sapiens
ttaagttttagggta

SEQ ID NO: 790868 - DNA, 15 bp, Homo sapiens
taagttttagggtac

SEQ ID NO: 790869 - DNA, 15 bp, Homo sapiens
aagttttagggtaca

SEQ ID NO: 790870 - DNA, 15 bp, Homo sapiens
agttttagggtacat

SEQ ID NO: 790871 - DNA, 15 bp, Homo sapiens
gttttagggtacatg

SEQ ID NO: 790872 - DNA, 15 bp, Homo sapiens
ttttagggtacatgt

SEQ ID NO: 790873 - DNA, 15 bp, Homo sapiens
tttagggtacatgtg

SEQ ID NO: 790874 - DNA, 15 bp, Homo sapiens
ttagggtacatgtgc

SEQ ID NO: 790875 - DNA, 15 bp, Homo sapiens
tagggtacatgtgca

SEQ ID NO: 790876 - DNA, 15 bp, Homo sapiens
agggtacatgtgcac

SEQ ID NO: 790877 - DNA, 15 bp, Homo sapiens
gggtacatgtgcaca

SEQ ID NO: 790878 - DNA, 15 bp, Homo sapiens
ggtacatgtgcacat

SEQ ID NO: 790879 - DNA, 15 bp, Homo sapiens
gtacatgtgcacatt

SEQ ID NO: 790880 - DNA, 15 bp, Homo sapiens
tacatgtgcacattg

SEQ ID NO: 790881 - DNA, 15 bp, Homo sapiens
acatgtgcacattgt

SEQ ID NO: 790882 - DNA, 15 bp, Homo sapiens
catgtgcacattgtg

SEQ ID NO: 790883 - DNA, 15 bp, Homo sapiens
atgtgcacattgtgc

SEQ ID NO: 790884 - DNA, 15 bp, Homo sapiens
tgtgcacattgtgca

SEQ ID NO: 790885 - DNA, 15 bp, Homo sapiens
gtgcacattgtgcag

SEQ ID NO: 790886 - DNA, 15 bp, Homo sapiens
tgcacattgtgcagg

SEQ ID NO: 790887 - DNA, 15 bp, Homo sapiens
gcacattgtgcaggt

SEQ ID NO: 790888 - DNA, 15 bp, Homo sapiens
cacattgtgcaggtt

SEQ ID NO: 790889 - DNA, 15 bp, Homo sapiens
acattgtgcaggtta

SEQ ID NO: 790890 - DNA, 15 bp, Homo sapiens
cattgtgcaggttag

SEQ ID NO: 790891 - DNA, 15 bp, Homo sapiens
attgtgcaggttagt

SEQ ID NO: 790892 - DNA, 15 bp, Homo sapiens
ttgtgcaggttagtt

SEQ ID NO: 790893 - DNA, 15 bp, Homo sapiens
tgtgcaggttagtta

SEQ ID NO: 790894 - DNA, 15 bp, Homo sapiens
gtgcaggttagttac

SEQ ID NO: 790895 - DNA, 15 bp, Homo sapiens
tgcaggttagttaca

SEQ ID NO: 790896 - DNA, 15 bp, Homo sapiens
gcaggttagttacat

SEQ ID NO: 790897 - DNA, 15 bp, Homo sapiens
caggttagttacata

SEQ ID NO: 790898 - DNA, 15 bp, Homo sapiens
aggttagttacatac

SEQ ID NO: 790899 - DNA, 15 bp, Homo sapiens
ggttagttacatacg

SEQ ID NO: 790900 - DNA, 15 bp, Homo sapiens
gttagttacatacgt

SEQ ID NO: 790901 - DNA, 15 bp, Homo sapiens
ttagttacatacgta

SEQ ID NO: 790902 - DNA, 15 bp, Homo sapiens
tagttacatacgtat

SEQ ID NO: 790903 - DNA, 15 bp, Homo sapiens
agttacatacgtata

SEQ ID NO: 790904 - DNA, 15 bp, Homo sapiens
gttacatacgtatac

SEQ ID NO: 790905 - DNA, 15 bp, Homo sapiens
ttacatacgtataca

SEQ ID NO: 790906 - DNA, 15 bp, Homo sapiens
tacatacgtatacat

SEQ ID NO: 790907 - DNA, 15 bp, Homo sapiens
acatacgtatacatg

SEQ ID NO: 790908 - DNA, 15 bp, Homo sapiens
catacgtatacatgt

SEQ ID NO: 790909 - DNA, 15 bp, Homo sapiens
atacgtatacatgtg

SEQ ID NO: 790910 - DNA, 15 bp, Homo sapiens
tacgtatacatgtgc

SEQ ID NO: 790911 - DNA, 15 bp, Homo sapiens
acgtatacatgtgcc

SEQ ID NO: 790912 - DNA, 15 bp, Homo sapiens
cgtatacatgtgcca

SEQ ID NO: 790913 - DNA, 15 bp, Homo sapiens
gtatacatgtgccat

SEQ ID NO: 790914 - DNA, 15 bp, Homo sapiens
tatacatgtgccatg

SEQ ID NO: 790915 - DNA, 15 bp, Homo sapiens
atacatgtgccatgc

SEQ ID NO: 790916 - DNA, 15 bp, Homo sapiens
tacatgtgccatgct

SEQ ID NO: 790917 - DNA, 15 bp, Homo sapiens
acatgtgccatgctg

SEQ ID NO: 790918 - DNA, 15 bp, Homo sapiens
catgtgccatgctgg

SEQ ID NO: 790919 - DNA, 15 bp, Homo sapiens
atgtgccatgctggt

SEQ ID NO: 790920 - DNA, 15 bp, Homo sapiens
tgtgccatgctggtg

SEQ ID NO: 790921 - DNA, 15 bp, Homo sapiens
gtgccatgctggtgt

SEQ ID NO: 790922 - DNA, 15 bp, Homo sapiens
tgccatgctggtgtg

SEQ ID NO: 790923 - DNA, 15 bp, Homo sapiens
gccatgctggtgtgc

SEQ ID NO: 790924 - DNA, 15 bp, Homo sapiens
ccatgctggtgtgct

SEQ ID NO: 790925 - DNA, 15 bp, Homo sapiens
catgctggtgtgctg

SEQ ID NO: 790926 - DNA, 15 bp, Homo sapiens
atgctggtgtgctgc

SEQ ID NO: 790927 - DNA, 15 bp, Homo sapiens
tgctggtgtgctgca

SEQ ID NO: 790928 - DNA, 15 bp, Homo sapiens
gctggtgtgctgcac

SEQ ID NO: 790929 - DNA, 15 bp, Homo sapiens
ctggtgtgctgcacc

SEQ ID NO: 790930 - DNA, 15 bp, Homo sapiens
tggtgtgctgcaccc

SEQ ID NO: 790931 - DNA, 15 bp, Homo sapiens
ggtgtgctgcaccca

SEQ ID NO: 790932 - DNA, 15 bp, Homo sapiens
gtgtgctgcacccac

SEQ ID NO: 790933 - DNA, 15 bp, Homo sapiens
tgtgctgcacccact

SEQ ID NO: 790934 - DNA, 15 bp, Homo sapiens
gtgctgcacccacta

SEQ ID NO: 790935 - DNA, 15 bp, Homo sapiens
tgctgcacccactaa

SEQ ID NO: 790936 - DNA, 15 bp, Homo sapiens
gctgcacccactaac

SEQ ID NO: 790937 - DNA, 15 bp, Homo sapiens
ctgcacccactaact

SEQ ID NO: 790938 - DNA, 15 bp, Homo sapiens
tgcacccactaactc

SEQ ID NO: 790939 - DNA, 15 bp, Homo sapiens
gcacccactaactcg

SEQ ID NO: 790940 - DNA, 15 bp, Homo sapiens
cacccactaactcgt

SEQ ID NO: 790941 - DNA, 15 bp, Homo sapiens
acccactaactcgtc

SEQ ID NO: 790942 - DNA, 15 bp, Homo sapiens
cccactaactcgtca

SEQ ID NO: 790943 - DNA, 15 bp, Homo sapiens
ccactaactcgtcat

SEQ ID NO: 790944 - DNA, 15 bp, Homo sapiens
cactaactcgtcatc

SEQ ID NO: 790945 - DNA, 15 bp, Homo sapiens
actaactcgtcatct

SEQ ID NO: 790946 - DNA, 15 bp, Homo sapiens
ctaactcgtcatcta

SEQ ID NO: 790947 - DNA, 15 bp, Homo sapiens
taactcgtcatctag

SEQ ID NO: 790948 - DNA, 15 bp, Homo sapiens
aactcgtcatctagc

SEQ ID NO: 790949 - DNA, 15 bp, Homo sapiens
actcgtcatctagca

SEQ ID NO: 790950 - DNA, 15 bp, Homo sapiens
ctcgtcatctagcat

SEQ ID NO: 790951 - DNA, 15 bp, Homo sapiens
tcgtcatctagcatt

SEQ ID NO: 790952 - DNA, 15 bp, Homo sapiens
cgtcatctagcatta

SEQ ID NO: 790953 - DNA, 15 bp, Homo sapiens
gtcatctagcattag

SEQ ID NO: 790954 - DNA, 15 bp, Homo sapiens
tcatctagcattagg

SEQ ID NO: 790955 - DNA, 15 bp, Homo sapiens
catctagcattaggt

SEQ ID NO: 790956 - DNA, 15 bp, Homo sapiens
atctagcattaggta

SEQ ID NO: 790957 - DNA, 15 bp, Homo sapiens
tctagcattaggtat

SEQ ID NO: 790958 - DNA, 15 bp, Homo sapiens
ctagcattaggtata

SEQ ID NO: 790959 - DNA, 15 bp, Homo sapiens
tagcattaggtatat

SEQ ID NO: 790960 - DNA, 15 bp, Homo sapiens
agcattaggtatatc

SEQ ID NO: 790961 - DNA, 15 bp, Homo sapiens
gcattaggtatatca

SEQ ID NO: 790962 - DNA, 15 bp, Homo sapiens
cattaggtatatcac

SEQ ID NO: 790963 - DNA, 15 bp, Homo sapiens
attaggtatatcacc

SEQ ID NO: 790964 - DNA, 15 bp, Homo sapiens
ttaggtatatcaccc

SEQ ID NO: 790965 - DNA, 15 bp, Homo sapiens
taggtatatcaccct

SEQ ID NO: 790966 - DNA, 15 bp, Homo sapiens
aggtatatcaccctc

SEQ ID NO: 790967 - DNA, 15 bp, Homo sapiens
ggtatatcaccctct

SEQ ID NO: 790968 - DNA, 15 bp, Homo sapiens
gtatatcaccctctg

SEQ ID NO: 790969 - DNA, 15 bp, Homo sapiens
tatatcaccctctgc

SEQ ID NO: 790970 - DNA, 15 bp, Homo sapiens
atatcaccctctgct

SEQ ID NO: 790971 - DNA, 15 bp, Homo sapiens
tatcaccctctgcta

SEQ ID NO: 790972 - DNA, 15 bp, Homo sapiens
atcaccctctgctat

SEQ ID NO: 790973 - DNA, 15 bp, Homo sapiens
tcaccctctgctatc

SEQ ID NO: 790974 - DNA, 15 bp, Homo sapiens
caccctctgctatcc

SEQ ID NO: 790975 - DNA, 15 bp, Homo sapiens
accctctgctatccc

SEQ ID NO: 790976 - DNA, 15 bp, Homo sapiens
ccctctgctatccct

SEQ ID NO: 790977 - DNA, 15 bp, Homo sapiens
cctctgctatccctc

SEQ ID NO: 790978 - DNA, 15 bp, Homo sapiens
ctctgctatccctcc

SEQ ID NO: 790979 - DNA, 15 bp, Homo sapiens
tctgctatccctccc

SEQ ID NO: 790980 - DNA, 15 bp, Homo sapiens
ctgctatccctcccc

SEQ ID NO: 790981 - DNA, 15 bp, Homo sapiens
tgctatccctccccc

SEQ ID NO: 790982 - DNA, 15 bp, Homo sapiens
gctatccctcccccc

SEQ ID NO: 790983 - DNA, 15 bp, Homo sapiens
ctatccctcccccct

SEQ ID NO: 790984 - DNA, 15 bp, Homo sapiens
tatccctcccccctc

SEQ ID NO: 790985 - DNA, 15 bp, Homo sapiens
atccctcccccctcc

SEQ ID NO: 790986 - DNA, 15 bp, Homo sapiens
tccctcccccctccc

SEQ ID NO: 790987 - DNA, 15 bp, Homo sapiens
ccctcccccctcccc

SEQ ID NO: 790988 - DNA, 15 bp, Homo sapiens
cctcccccctccccc

SEQ ID NO: 790989 - DNA, 15 bp, Homo sapiens
ctcccccctcccccc

SEQ ID NO: 790990 - DNA, 15 bp, Homo sapiens
tcccccctcccccca

SEQ ID NO: 790991 - DNA, 15 bp, Homo sapiens
cccccctccccccac

SEQ ID NO: 790992 - DNA, 15 bp, Homo sapiens
ccccctccccccacc

SEQ ID NO: 790993 - DNA, 15 bp, Homo sapiens
cccctccccccaccc

SEQ ID NO: 790994 - DNA, 15 bp, Homo sapiens
ccctccccccacccc

SEQ ID NO: 790995 - DNA, 15 bp, Homo sapiens
cctccccccacccca

SEQ ID NO: 790996 - DNA, 15 bp, Homo sapiens
ctccccccaccccac

SEQ ID NO: 790997 - DNA, 15 bp, Homo sapiens
tccccccaccccaca

SEQ ID NO: 790998 - DNA, 15 bp, Homo sapiens
ccccccaccccacaa

SEQ ID NO: 790999 - DNA, 15 bp, Homo sapiens
cccccaccccacaac

SEQ ID NO: 791000 - DNA, 15 bp, Homo sapiens
ccccaccccacaaca

SEQ ID NO: 791001 - DNA, 15 bp, Homo sapiens
cccaccccacaacag

SEQ ID NO: 791002 - DNA, 15 bp, Homo sapiens
ccaccccacaacagt

SEQ ID NO: 791003 - DNA, 15 bp, Homo sapiens
caccccacaacagtc

SEQ ID NO: 791004 - DNA, 15 bp, Homo sapiens
accccacaacagtcc

SEQ ID NO: 791005 - DNA, 15 bp, Homo sapiens
ccccacaacagtccc

SEQ ID NO: 791006 - DNA, 15 bp, Homo sapiens
cccacaacagtcccc

SEQ ID NO: 791007 - DNA, 15 bp, Homo sapiens
ccacaacagtcccca

SEQ ID NO: 791008 - DNA, 15 bp, Homo sapiens
cacaacagtccccag

SEQ ID NO: 791009 - DNA, 15 bp, Homo sapiens
acaacagtccccaga

SEQ ID NO: 791010 - DNA, 15 bp, Homo sapiens
caacagtccccagag

SEQ ID NO: 791011 - DNA, 15 bp, Homo sapiens
aacagtccccagagt

SEQ ID NO: 791012 - DNA, 15 bp, Homo sapiens
acagtccccagagtg

SEQ ID NO: 791013 - DNA, 15 bp, Homo sapiens
cagtccccagagtgt

SEQ ID NO: 791014 - DNA, 15 bp, Homo sapiens
agtccccagagtgtg

SEQ ID NO: 791015 - DNA, 15 bp, Homo sapiens
gtccccagagtgtga

SEQ ID NO: 791016 - DNA, 15 bp, Homo sapiens
tccccagagtgtgat

SEQ ID NO: 791017 - DNA, 15 bp, Homo sapiens
ccccagagtgtgatg

SEQ ID NO: 791018 - DNA, 15 bp, Homo sapiens
cccagagtgtgatgt

SEQ ID NO: 791019 - DNA, 15 bp, Homo sapiens
ccagagtgtgatgtt

SEQ ID NO: 791020 - DNA, 15 bp, Homo sapiens
cagagtgtgatgttc

SEQ ID NO: 791021 - DNA, 15 bp, Homo sapiens
agagtgtgatgttcc

SEQ ID NO: 791022 - DNA, 15 bp, Homo sapiens
gagtgtgatgttccc

SEQ ID NO: 791023 - DNA, 15 bp, Homo sapiens
agtgtgatgttcccc

SEQ ID NO: 791024 - DNA, 15 bp, Homo sapiens
gtgtgatgttcccct

SEQ ID NO: 791025 - DNA, 15 bp, Homo sapiens
tgtgatgttcccctt

SEQ ID NO: 791026 - DNA, 15 bp, Homo sapiens
gtgatgttccccttc

SEQ ID NO: 791027 - DNA, 15 bp, Homo sapiens
tgatgttccccttcc

SEQ ID NO: 791028 - DNA, 15 bp, Homo sapiens
gatgttccccttcct

SEQ ID NO: 791029 - DNA, 15 bp, Homo sapiens
atgttccccttcctg

SEQ ID NO: 791030 - DNA, 15 bp, Homo sapiens
tgttccccttcctgt

SEQ ID NO: 791031 - DNA, 15 bp, Homo sapiens
gttccccttcctgtg

SEQ ID NO: 791032 - DNA, 15 bp, Homo sapiens
ttccccttcctgtgt

SEQ ID NO: 791033 - DNA, 15 bp, Homo sapiens
tccccttcctgtgtc

SEQ ID NO: 791034 - DNA, 15 bp, Homo sapiens
ccccttcctgtgtcc

SEQ ID NO: 791035 - DNA, 15 bp, Homo sapiens
cccttcctgtgtcca

SEQ ID NO: 791036 - DNA, 15 bp, Homo sapiens
ccttcctgtgtccaa

SEQ ID NO: 791037 - DNA, 15 bp, Homo sapiens
cttcctgtgtccaag

SEQ ID NO: 791038 - DNA, 15 bp, Homo sapiens
ttcctgtgtccaagt

SEQ ID NO: 791039 - DNA, 15 bp, Homo sapiens
tcctgtgtccaagtg

SEQ ID NO: 791040 - DNA, 15 bp, Homo sapiens
cctgtgtccaagtgt

SEQ ID NO: 791041 - DNA, 15 bp, Homo sapiens
ctgtgtccaagtgtt

SEQ ID NO: 791042 - DNA, 15 bp, Homo sapiens
tgtgtccaagtgttc

SEQ ID NO: 791043 - DNA, 15 bp, Homo sapiens
gtgtccaagtgttca

SEQ ID NO: 791044 - DNA, 15 bp, Homo sapiens
tgtccaagtgttcat

SEQ ID NO: 791045 - DNA, 15 bp, Homo sapiens
gtccaagtgttcatg

SEQ ID NO: 791046 - DNA, 15 bp, Homo sapiens
tccaagtgttcatga

SEQ ID NO: 791047 - DNA, 15 bp, Homo sapiens
ccaagtgttcatgat

SEQ ID NO: 791048 - DNA, 15 bp, Homo sapiens
caagtgttcatgatt

SEQ ID NO: 791049 - DNA, 15 bp, Homo sapiens
aagtgttcatgattc

SEQ ID NO: 791050 - DNA, 15 bp, Homo sapiens
agtgttcatgattct

SEQ ID NO: 791051 - DNA, 15 bp, Homo sapiens
gtgttcatgattctt

SEQ ID NO: 791052 - DNA, 15 bp, Homo sapiens
tgttcatgattctta

SEQ ID NO: 791053 - DNA, 15 bp, Homo sapiens
gttcatgattcttaa

SEQ ID NO: 791054 - DNA, 15 bp, Homo sapiens
ttcatgattcttaag

SEQ ID NO: 791055 - DNA, 15 bp, Homo sapiens
tcatgattcttaagg

SEQ ID NO: 791056 - DNA, 15 bp, Homo sapiens
catgattcttaaggt

SEQ ID NO: 791057 - DNA, 15 bp, Homo sapiens
atgattcttaaggtg

SEQ ID NO: 791058 - DNA, 15 bp, Homo sapiens
tgattcttaaggtgt

SEQ ID NO: 791059 - DNA, 15 bp, Homo sapiens
gattcttaaggtgta

SEQ ID NO: 791060 - DNA, 15 bp, Homo sapiens
attcttaaggtgtat

SEQ ID NO: 791061 - DNA, 15 bp, Homo sapiens
ttcttaaggtgtatg

SEQ ID NO: 791062 - DNA, 15 bp, Homo sapiens
tcttaaggtgtatgt

SEQ ID NO: 791063 - DNA, 15 bp, Homo sapiens
cttaaggtgtatgtt

SEQ ID NO: 791064 - DNA, 15 bp, Homo sapiens
ttaaggtgtatgttt

SEQ ID NO: 791065 - DNA, 15 bp, Homo sapiens
taaggtgtatgtttg

SEQ ID NO: 791066 - DNA, 15 bp, Homo sapiens
aaggtgtatgtttgc

SEQ ID NO: 791067 - DNA, 15 bp, Homo sapiens
aggtgtatgtttgca

SEQ ID NO: 791068 - DNA, 15 bp, Homo sapiens
ggtgtatgtttgcat

SEQ ID NO: 791069 - DNA, 15 bp, Homo sapiens
gtgtatgtttgcata

SEQ ID NO: 791070 - DNA, 15 bp, Homo sapiens
tgtatgtttgcataa

SEQ ID NO: 791071 - DNA, 15 bp, Homo sapiens
gtatgtttgcataac

SEQ ID NO: 791072 - DNA, 15 bp, Homo sapiens
tatgtttgcataaca

SEQ ID NO: 791073 - DNA, 15 bp, Homo sapiens
atgtttgcataacac

SEQ ID NO: 791074 - DNA, 15 bp, Homo sapiens
tgtttgcataacaca

SEQ ID NO: 791075 - DNA, 15 bp, Homo sapiens
gtttgcataacacag

SEQ ID NO: 791076 - DNA, 15 bp, Homo sapiens
tttgcataacacagc

SEQ ID NO: 791077 - DNA, 15 bp, Homo sapiens
ttgcataacacagct

SEQ ID NO: 791078 - DNA, 15 bp, Homo sapiens
tgcataacacagctt

SEQ ID NO: 791079 - DNA, 15 bp, Homo sapiens
gcataacacagcttt

SEQ ID NO: 791080 - DNA, 15 bp, Homo sapiens
cataacacagctttc

SEQ ID NO: 791081 - DNA, 15 bp, Homo sapiens
ataacacagctttca

SEQ ID NO: 791082 - DNA, 15 bp, Homo sapiens
taacacagctttcat

SEQ ID NO: 791083 - DNA, 15 bp, Homo sapiens
aacacagctttcatt

SEQ ID NO: 791084 - DNA, 15 bp, Homo sapiens
acacagctttcattg

SEQ ID NO: 791085 - DNA, 15 bp, Homo sapiens
cacagctttcattga

SEQ ID NO: 791086 - DNA, 15 bp, Homo sapiens
acagctttcattgaa

SEQ ID NO: 791087 - DNA, 15 bp, Homo sapiens
cagctttcattgaat

SEQ ID NO: 791088 - DNA, 15 bp, Homo sapiens
agctttcattgaatg

SEQ ID NO: 791089 - DNA, 15 bp, Homo sapiens
gctttcattgaatgt

SEQ ID NO: 791090 - DNA, 15 bp, Homo sapiens
ctttcattgaatgta

SEQ ID NO: 791091 - DNA, 15 bp, Homo sapiens
tttcattgaatgtaa

SEQ ID NO: 791092 - DNA, 15 bp, Homo sapiens
ttcattgaatgtaat

SEQ ID NO: 791093 - DNA, 15 bp, Homo sapiens
tcattgaatgtaatg

SEQ ID NO: 791094 - DNA, 15 bp, Homo sapiens
cattgaatgtaatga

SEQ ID NO: 791095 - DNA, 15 bp, Homo sapiens
attgaatgtaatgaa

SEQ ID NO: 791096 - DNA, 15 bp, Homo sapiens
ttgaatgtaatgaaa

SEQ ID NO: 791097 - DNA, 15 bp, Homo sapiens
tgaatgtaatgaaag

SEQ ID NO: 791098 - DNA, 15 bp, Homo sapiens
gaatgtaatgaaagc

SEQ ID NO: 791099 - DNA, 15 bp, Homo sapiens
aatgtaatgaaagct

SEQ ID NO: 791100 - DNA, 15 bp, Homo sapiens
atgtaatgaaagctg

SEQ ID NO: 791101 - DNA, 15 bp, Homo sapiens
tgtaatgaaagctgt

SEQ ID NO: 791102 - DNA, 15 bp, Homo sapiens
gtaatgaaagctgtc

SEQ ID NO: 791103 - DNA, 15 bp, Homo sapiens
taatgaaagctgtca

SEQ ID NO: 791104 - DNA, 15 bp, Homo sapiens
aatgaaagctgtcag

SEQ ID NO: 791105 - DNA, 15 bp, Homo sapiens
atgaaagctgtcagc

SEQ ID NO: 791106 - DNA, 15 bp, Homo sapiens
tgaaagctgtcagca

SEQ ID NO: 791107 - DNA, 15 bp, Homo sapiens
gaaagctgtcagcat

SEQ ID NO: 791108 - DNA, 15 bp, Homo sapiens
aaagctgtcagcatg

SEQ ID NO: 791109 - DNA, 15 bp, Homo sapiens
aagctgtcagcatgt

SEQ ID NO: 791110 - DNA, 15 bp, Homo sapiens
agctgtcagcatgtt

SEQ ID NO: 791111 - DNA, 15 bp, Homo sapiens
gctgtcagcatgttt

SEQ ID NO: 791112 - DNA, 15 bp, Homo sapiens
ctgtcagcatgtttt

SEQ ID NO: 791113 - DNA, 15 bp, Homo sapiens
tgtcagcatgtttta

SEQ ID NO: 791114 - DNA, 15 bp, Homo sapiens
gtcagcatgttttaa

SEQ ID NO: 791115 - DNA, 15 bp, Homo sapiens
tcagcatgttttaaa

SEQ ID NO: 791116 - DNA, 15 bp, Homo sapiens
cagcatgttttaaat

SEQ ID NO: 791117 - DNA, 15 bp, Homo sapiens
agcatgttttaaata

SEQ ID NO: 791118 - DNA, 15 bp, Homo sapiens
gcatgttttaaatat

SEQ ID NO: 791119 - DNA, 15 bp, Homo sapiens
catgttttaaatatc

SEQ ID NO: 791120 - DNA, 15 bp, Homo sapiens
atgttttaaatatca

SEQ ID NO: 791121 - DNA, 15 bp, Homo sapiens
tgttttaaatatcaa

SEQ ID NO: 791122 - DNA, 15 bp, Homo sapiens
gttttaaatatcaac

SEQ ID NO: 791123 - DNA, 15 bp, Homo sapiens
ttttaaatatcaact

SEQ ID NO: 791124 - DNA, 15 bp, Homo sapiens
tttaaatatcaactc

SEQ ID NO: 791125 - DNA, 15 bp, Homo sapiens
ttaaatatcaactct

SEQ ID NO: 791126 - DNA, 15 bp, Homo sapiens
taaatatcaactctc

SEQ ID NO: 791127 - DNA, 15 bp, Homo sapiens
aaatatcaactctcg

SEQ ID NO: 791128 - DNA, 15 bp, Homo sapiens
aatatcaactctcgg

SEQ ID NO: 791129 - DNA, 15 bp, Homo sapiens
atatcaactctcggg

SEQ ID NO: 791130 - DNA, 15 bp, Homo sapiens
tatcaactctcgggg

SEQ ID NO: 791131 - DNA, 15 bp, Homo sapiens
atcaactctcggggg

SEQ ID NO: 791132 - DNA, 15 bp, Homo sapiens
tcaactctcgggggt

SEQ ID NO: 791133 - DNA, 15 bp, Homo sapiens
caactctcgggggtt

SEQ ID NO: 791134 - DNA, 15 bp, Homo sapiens
aactctcgggggttg

SEQ ID NO: 791135 - DNA, 15 bp, Homo sapiens
actctcgggggttgc

SEQ ID NO: 791136 - DNA, 15 bp, Homo sapiens
ctctcgggggttgca

SEQ ID NO: 791137 - DNA, 15 bp, Homo sapiens
tctcgggggttgcag

SEQ ID NO: 791138 - DNA, 15 bp, Homo sapiens
ctcgggggttgcagg

SEQ ID NO: 791139 - DNA, 15 bp, Homo sapiens
tcgggggttgcaggg

SEQ ID NO: 791140 - DNA, 15 bp, Homo sapiens
cgggggttgcagggc

SEQ ID NO: 791141 - DNA, 15 bp, Homo sapiens
gggggttgcagggcc

SEQ ID NO: 791142 - DNA, 15 bp, Homo sapiens
ggggttgcagggcct

SEQ ID NO: 791143 - DNA, 15 bp, Homo sapiens
gggttgcagggcctc

SEQ ID NO: 791144 - DNA, 15 bp, Homo sapiens
ggttgcagggcctct

SEQ ID NO: 791145 - DNA, 15 bp, Homo sapiens
gttgcagggcctcta

SEQ ID NO: 791146 - DNA, 15 bp, Homo sapiens
ttgcagggcctctaa

SEQ ID NO: 791147 - DNA, 15 bp, Homo sapiens
tgcagggcctctaaa

SEQ ID NO: 791148 - DNA, 15 bp, Homo sapiens
gcagggcctctaaag

SEQ ID NO: 791149 - DNA, 15 bp, Homo sapiens
cagggcctctaaagt

SEQ ID NO: 791150 - DNA, 15 bp, Homo sapiens
agggcctctaaagtg

SEQ ID NO: 791151 - DNA, 15 bp, Homo sapiens
gggcctctaaagtgg

SEQ ID NO: 791152 - DNA, 15 bp, Homo sapiens
ggcctctaaagtggc

SEQ ID NO: 791153 - DNA, 15 bp, Homo sapiens
gcctctaaagtggct

SEQ ID NO: 791154 - DNA, 15 bp, Homo sapiens
cctctaaagtggctg

SEQ ID NO: 791155 - DNA, 15 bp, Homo sapiens
ctctaaagtggctgt

SEQ ID NO: 791156 - DNA, 15 bp, Homo sapiens
tctaaagtggctgta

SEQ ID NO: 791157 - DNA, 15 bp, Homo sapiens
ctaaagtggctgtag

SEQ ID NO: 791158 - DNA, 15 bp, Homo sapiens
taaagtggctgtagg

SEQ ID NO: 791159 - DNA, 15 bp, Homo sapiens
aaagtggctgtaggg

SEQ ID NO: 791160 - DNA, 15 bp, Homo sapiens
aagtggctgtaggga

SEQ ID NO: 791161 - DNA, 15 bp, Homo sapiens
agtggctgtagggag

SEQ ID NO: 791162 - DNA, 15 bp, Homo sapiens
gtggctgtagggaga

SEQ ID NO: 791163 - DNA, 15 bp, Homo sapiens
tggctgtagggagaa

SEQ ID NO: 791164 - DNA, 15 bp, Homo sapiens
ggctgtagggagaag

SEQ ID NO: 791165 - DNA, 15 bp, Homo sapiens
gctgtagggagaaga

SEQ ID NO: 791166 - DNA, 15 bp, Homo sapiens
ctgtagggagaagag

SEQ ID NO: 791167 - DNA, 15 bp, Homo sapiens
tgtagggagaagagg

SEQ ID NO: 791168 - DNA, 15 bp, Homo sapiens
gtagggagaagaggg

SEQ ID NO: 791169 - DNA, 15 bp, Homo sapiens
tagggagaagagggt

SEQ ID NO: 791170 - DNA, 15 bp, Homo sapiens
agggagaagagggtg

SEQ ID NO: 791171 - DNA, 15 bp, Homo sapiens
gggagaagagggtga

SEQ ID NO: 791172 - DNA, 15 bp, Homo sapiens
ggagaagagggtgac

SEQ ID NO: 791173 - DNA, 15 bp, Homo sapiens
gagaagagggtgaca

SEQ ID NO: 791174 - DNA, 15 bp, Homo sapiens
agaagagggtgacaa

SEQ ID NO: 791175 - DNA, 15 bp, Homo sapiens
gaagagggtgacaag

SEQ ID NO: 791176 - DNA, 15 bp, Homo sapiens
aagagggtgacaaga

SEQ ID NO: 791177 - DNA, 15 bp, Homo sapiens
agagggtgacaagag

SEQ ID NO: 791178 - DNA, 15 bp, Homo sapiens
gagggtgacaagagg

SEQ ID NO: 791179 - DNA, 15 bp, Homo sapiens
agggtgacaagaggt

SEQ ID NO: 791180 - DNA, 15 bp, Homo sapiens
gggtgacaagaggtt

SEQ ID NO: 791181 - DNA, 15 bp, Homo sapiens
ggtgacaagaggtta

SEQ ID NO: 791182 - DNA, 15 bp, Homo sapiens
gtgacaagaggttaa

SEQ ID NO: 791183 - DNA, 15 bp, Homo sapiens
tgacaagaggttaat

SEQ ID NO: 791184 - DNA, 15 bp, Homo sapiens
gacaagaggttaatg

SEQ ID NO: 791185 - DNA, 15 bp, Homo sapiens
acaagaggttaatgg

SEQ ID NO: 791186 - DNA, 15 bp, Homo sapiens
caagaggttaatggt

SEQ ID NO: 791187 - DNA, 15 bp, Homo sapiens
aagaggttaatggtt

SEQ ID NO: 791188 - DNA, 15 bp, Homo sapiens
agaggttaatggttc

SEQ ID NO: 791189 - DNA, 15 bp, Homo sapiens
gaggttaatggttct

SEQ ID NO: 791190 - DNA, 15 bp, Homo sapiens
aggttaatggttctt

SEQ ID NO: 791191 - DNA, 15 bp, Homo sapiens
ggttaatggttcttt

SEQ ID NO: 791192 - DNA, 15 bp, Homo sapiens
gttaatggttctttt

SEQ ID NO: 791193 - DNA, 15 bp, Homo sapiens
ttaatggttcttttc

SEQ ID NO: 791194 - DNA, 15 bp, Homo sapiens
taatggttcttttct

SEQ ID NO: 791195 - DNA, 15 bp, Homo sapiens
aatggttcttttctc

SEQ ID NO: 791196 - DNA, 15 bp, Homo sapiens
atggttcttttctct

SEQ ID NO: 791197 - DNA, 15 bp, Homo sapiens
tggttcttttctctg

SEQ ID NO: 791198 - DNA, 15 bp, Homo sapiens
ggttcttttctctga

SEQ ID NO: 791199 - DNA, 15 bp, Homo sapiens
gttcttttctctgaa

SEQ ID NO: 791200 - DNA, 15 bp, Homo sapiens
ttcttttctctgaaa

SEQ ID NO: 791201 - DNA, 15 bp, Homo sapiens
tcttttctctgaaat

SEQ ID NO: 791202 - DNA, 15 bp, Homo sapiens
cttttctctgaaata

SEQ ID NO: 791203 - DNA, 15 bp, Homo sapiens
ttttctctgaaatag

SEQ ID NO: 791204 - DNA, 15 bp, Homo sapiens
tttctctgaaatagg

SEQ ID NO: 791205 - DNA, 15 bp, Homo sapiens
ttctctgaaatagga

SEQ ID NO: 791206 - DNA, 15 bp, Homo sapiens
tctctgaaataggaa

SEQ ID NO: 791207 - DNA, 15 bp, Homo sapiens
ctctgaaataggaaa

SEQ ID NO: 791208 - DNA, 15 bp, Homo sapiens
tctgaaataggaaat

SEQ ID NO: 791209 - DNA, 15 bp, Homo sapiens
ctgaaataggaaata

SEQ ID NO: 791210 - DNA, 15 bp, Homo sapiens
tgaaataggaaatac

SEQ ID NO: 791211 - DNA, 15 bp, Homo sapiens
gaaataggaaatacc

SEQ ID NO: 791212 - DNA, 15 bp, Homo sapiens
aaataggaaatacca

SEQ ID NO: 791213 - DNA, 15 bp, Homo sapiens
aataggaaataccaa

SEQ ID NO: 791214 - DNA, 15 bp, Homo sapiens
ataggaaataccaag

SEQ ID NO: 791215 - DNA, 15 bp, Homo sapiens
taggaaataccaagg

SEQ ID NO: 791216 - DNA, 15 bp, Homo sapiens
aggaaataccaagga

SEQ ID NO: 791217 - DNA, 15 bp, Homo sapiens
ggaaataccaaggag

SEQ ID NO: 791218 - DNA, 15 bp, Homo sapiens
gaaataccaaggagg

SEQ ID NO: 791219 - DNA, 15 bp, Homo sapiens
aaataccaaggaggg

SEQ ID NO: 791220 - DNA, 15 bp, Homo sapiens
aataccaaggaggga

SEQ ID NO: 791221 - DNA, 15 bp, Homo sapiens
ataccaaggagggaa

SEQ ID NO: 791222 - DNA, 15 bp, Homo sapiens
taccaaggagggaag

SEQ ID NO: 791223 - DNA, 15 bp, Homo sapiens
accaaggagggaaga

SEQ ID NO: 791224 - DNA, 15 bp, Homo sapiens
ccaaggagggaagaa

SEQ ID NO: 791225 - DNA, 15 bp, Homo sapiens
caaggagggaagaac

SEQ ID NO: 791226 - DNA, 15 bp, Homo sapiens
aaggagggaagaaca

SEQ ID NO: 791227 - DNA, 15 bp, Homo sapiens
aggagggaagaacag

SEQ ID NO: 791228 - DNA, 15 bp, Homo sapiens
ggagggaagaacagg

SEQ ID NO: 791229 - DNA, 15 bp, Homo sapiens
gagggaagaacaggt

SEQ ID NO: 791230 - DNA, 15 bp, Homo sapiens
agggaagaacaggtt

SEQ ID NO: 791231 - DNA, 15 bp, Homo sapiens
gggaagaacaggttt

SEQ ID NO: 791232 - DNA, 15 bp, Homo sapiens
ggaagaacaggtttg

SEQ ID NO: 791233 - DNA, 15 bp, Homo sapiens
gaagaacaggtttga

SEQ ID NO: 791234 - DNA, 15 bp, Homo sapiens
aagaacaggtttgaa

SEQ ID NO: 791235 - DNA, 15 bp, Homo sapiens
agaacaggtttgaag

SEQ ID NO: 791236 - DNA, 15 bp, Homo sapiens
gaacaggtttgaagg

SEQ ID NO: 791237 - DNA, 15 bp, Homo sapiens
aacaggtttgaaggg

SEQ ID NO: 791238 - DNA, 15 bp, Homo sapiens
acaggtttgaagggt

SEQ ID NO: 791239 - DNA, 15 bp, Homo sapiens
caggtttgaagggtt

SEQ ID NO: 791240 - DNA, 15 bp, Homo sapiens
aggtttgaagggttg

SEQ ID NO: 791241 - DNA, 15 bp, Homo sapiens
ggtttgaagggttgg

SEQ ID NO: 791242 - DNA, 15 bp, Homo sapiens
gtttgaagggttggc

SEQ ID NO: 791243 - DNA, 15 bp, Homo sapiens
tttgaagggttggcc

SEQ ID NO: 791244 - DNA, 15 bp, Homo sapiens
ttgaagggttggcct

SEQ ID NO: 791245 - DNA, 15 bp, Homo sapiens
tgaagggttggcctg

SEQ ID NO: 791246 - DNA, 15 bp, Homo sapiens
gaagggttggcctgg

SEQ ID NO: 791247 - DNA, 15 bp, Homo sapiens
aagggttggcctggg

SEQ ID NO: 791248 - DNA, 15 bp, Homo sapiens
agggttggcctggga

SEQ ID NO: 791249 - DNA, 15 bp, Homo sapiens
gggttggcctgggaa

SEQ ID NO: 791250 - DNA, 15 bp, Homo sapiens
ggttggcctgggaag

SEQ ID NO: 791251 - DNA, 15 bp, Homo sapiens
gttggcctgggaagg

SEQ ID NO: 791252 - DNA, 15 bp, Homo sapiens
ttggcctgggaaggg

SEQ ID NO: 791253 - DNA, 15 bp, Homo sapiens
tggcctgggaagggg

SEQ ID NO: 791254 - DNA, 15 bp, Homo sapiens
ggcctgggaaggggg

SEQ ID NO: 791255 - DNA, 15 bp, Homo sapiens
gcctgggaaggggga

SEQ ID NO: 791256 - DNA, 15 bp, Homo sapiens
cctgggaagggggaa

SEQ ID NO: 791257 - DNA, 15 bp, Homo sapiens
ctgggaagggggaaa

SEQ ID NO: 791258 - DNA, 15 bp, Homo sapiens
tgggaagggggaaat

SEQ ID NO: 791259 - DNA, 15 bp, Homo sapiens
gggaagggggaaatt

SEQ ID NO: 791260 - DNA, 15 bp, Homo sapiens
ggaagggggaaatta

SEQ ID NO: 791261 - DNA, 15 bp, Homo sapiens
gaagggggaaattat

SEQ ID NO: 791262 - DNA, 15 bp, Homo sapiens
aagggggaaattatc

SEQ ID NO: 791263 - DNA, 15 bp, Homo sapiens
agggggaaattatca

SEQ ID NO: 791264 - DNA, 15 bp, Homo sapiens
gggggaaattatcat

SEQ ID NO: 791265 - DNA, 15 bp, Homo sapiens
ggggaaattatcatc

SEQ ID NO: 791266 - DNA, 15 bp, Homo sapiens
gggaaattatcatct

SEQ ID NO: 791267 - DNA, 15 bp, Homo sapiens
ggaaattatcatctc

SEQ ID NO: 791268 - DNA, 15 bp, Homo sapiens
gaaattatcatctca

SEQ ID NO: 791269 - DNA, 15 bp, Homo sapiens
aaattatcatctcag

SEQ ID NO: 791270 - DNA, 15 bp, Homo sapiens
aattatcatctcagt

SEQ ID NO: 791271 - DNA, 15 bp, Homo sapiens
attatcatctcagta

SEQ ID NO: 791272 - DNA, 15 bp, Homo sapiens
ttatcatctcagtat

SEQ ID NO: 791273 - DNA, 15 bp, Homo sapiens
tatcatctcagtatt

SEQ ID NO: 791274 - DNA, 15 bp, Homo sapiens
atcatctcagtatta

SEQ ID NO: 791275 - DNA, 15 bp, Homo sapiens
tcatctcagtattag

SEQ ID NO: 791276 - DNA, 15 bp, Homo sapiens
catctcagtattagg

SEQ ID NO: 791277 - DNA, 15 bp, Homo sapiens
atctcagtattaggt

SEQ ID NO: 791278 - DNA, 15 bp, Homo sapiens
tctcagtattaggtg

SEQ ID NO: 791279 - DNA, 15 bp, Homo sapiens
ctcagtattaggtgt

SEQ ID NO: 791280 - DNA, 15 bp, Homo sapiens
tcagtattaggtgtg

SEQ ID NO: 791281 - DNA, 15 bp, Homo sapiens
cagtattaggtgtgt

SEQ ID NO: 791282 - DNA, 15 bp, Homo sapiens
agtattaggtgtgtt

SEQ ID NO: 791283 - DNA, 15 bp, Homo sapiens
gtattaggtgtgttg

SEQ ID NO: 791284 - DNA, 15 bp, Homo sapiens
tattaggtgtgttgc

SEQ ID NO: 791285 - DNA, 15 bp, Homo sapiens
attaggtgtgttgcc

SEQ ID NO: 791286 - DNA, 15 bp, Homo sapiens
ttaggtgtgttgcct

SEQ ID NO: 791287 - DNA, 15 bp, Homo sapiens
taggtgtgttgcctt

SEQ ID NO: 791288 - DNA, 15 bp, Homo sapiens
aggtgtgttgccttt

SEQ ID NO: 791289 - DNA, 15 bp, Homo sapiens
ggtgtgttgccttta

SEQ ID NO: 791290 - DNA, 15 bp, Homo sapiens
gtgtgttgcctttaa

SEQ ID NO: 791291 - DNA, 15 bp, Homo sapiens
tgtgttgcctttaag

SEQ ID NO: 791292 - DNA, 15 bp, Homo sapiens
gtgttgcctttaagg

SEQ ID NO: 791293 - DNA, 15 bp, Homo sapiens
tgttgcctttaagga

SEQ ID NO: 791294 - DNA, 15 bp, Homo sapiens
gttgcctttaaggac

SEQ ID NO: 791295 - DNA, 15 bp, Homo sapiens
ttgcctttaaggaca

SEQ ID NO: 791296 - DNA, 15 bp, Homo sapiens
tgcctttaaggacac

SEQ ID NO: 791297 - DNA, 15 bp, Homo sapiens
gcctttaaggacact

SEQ ID NO: 791298 - DNA, 15 bp, Homo sapiens
cctttaaggacactc

SEQ ID NO: 791299 - DNA, 15 bp, Homo sapiens
ctttaaggacactca

SEQ ID NO: 791300 - DNA, 15 bp, Homo sapiens
tttaaggacactcag

SEQ ID NO: 791301 - DNA, 15 bp, Homo sapiens
ttaaggacactcagg

SEQ ID NO: 791302 - DNA, 15 bp, Homo sapiens
taaggacactcaggt

SEQ ID NO: 791303 - DNA, 15 bp, Homo sapiens
aaggacactcaggta

SEQ ID NO: 791304 - DNA, 15 bp, Homo sapiens
aggacactcaggtaa

SEQ ID NO: 791305 - DNA, 15 bp, Homo sapiens
ggacactcaggtaaa

SEQ ID NO: 791306 - DNA, 15 bp, Homo sapiens
gacactcaggtaaaa

SEQ ID NO: 791307 - DNA, 15 bp, Homo sapiens
acactcaggtaaaac

SEQ ID NO: 791308 - DNA, 15 bp, Homo sapiens
cactcaggtaaaact

SEQ ID NO: 791309 - DNA, 15 bp, Homo sapiens
actcaggtaaaactg

SEQ ID NO: 791310 - DNA, 15 bp, Homo sapiens
ctcaggtaaaactgt

SEQ ID NO: 791311 - DNA, 15 bp, Homo sapiens
tcaggtaaaactgtc

SEQ ID NO: 791312 - DNA, 15 bp, Homo sapiens
caggtaaaactgtca

SEQ ID NO: 791313 - DNA, 15 bp, Homo sapiens
aggtaaaactgtcag

SEQ ID NO: 791314 - DNA, 15 bp, Homo sapiens
ggtaaaactgtcagg

SEQ ID NO: 791315 - DNA, 15 bp, Homo sapiens
gtaaaactgtcagga

SEQ ID NO: 791316 - DNA, 15 bp, Homo sapiens
taaaactgtcaggaa

SEQ ID NO: 791317 - DNA, 15 bp, Homo sapiens
aaaactgtcaggaag

SEQ ID NO: 791318 - DNA, 15 bp, Homo sapiens
aaactgtcaggaaga

SEQ ID NO: 791319 - DNA, 15 bp, Homo sapiens
aactgtcaggaagac

SEQ ID NO: 791320 - DNA, 15 bp, Homo sapiens
actgtcaggaagaca

SEQ ID NO: 791321 - DNA, 15 bp, Homo sapiens
ctgtcaggaagacag

SEQ ID NO: 791322 - DNA, 15 bp, Homo sapiens
tgtcaggaagacagt

SEQ ID NO: 791323 - DNA, 15 bp, Homo sapiens
gtcaggaagacagtt

SEQ ID NO: 791324 - DNA, 15 bp, Homo sapiens
tcaggaagacagttg

SEQ ID NO: 791325 - DNA, 15 bp, Homo sapiens
caggaagacagttgg

SEQ ID NO: 791326 - DNA, 15 bp, Homo sapiens
aggaagacagttggc

SEQ ID NO: 791327 - DNA, 15 bp, Homo sapiens
ggaagacagttggca

SEQ ID NO: 791328 - DNA, 15 bp, Homo sapiens
gaagacagttggcaa

SEQ ID NO: 791329 - DNA, 15 bp, Homo sapiens
aagacagttggcaag

SEQ ID NO: 791330 - DNA, 15 bp, Homo sapiens
agacagttggcaaga

SEQ ID NO: 791331 - DNA, 15 bp, Homo sapiens
gacagttggcaagag

SEQ ID NO: 791332 - DNA, 15 bp, Homo sapiens
acagttggcaagagc

SEQ ID NO: 791333 - DNA, 15 bp, Homo sapiens
cagttggcaagagca

SEQ ID NO: 791334 - DNA, 15 bp, Homo sapiens
agttggcaagagcag

SEQ ID NO: 791335 - DNA, 15 bp, Homo sapiens
gttggcaagagcagg

SEQ ID NO: 791336 - DNA, 15 bp, Homo sapiens
ttggcaagagcagga

SEQ ID NO: 791337 - DNA, 15 bp, Homo sapiens
tggcaagagcaggat

SEQ ID NO: 791338 - DNA, 15 bp, Homo sapiens
ggcaagagcaggatg

SEQ ID NO: 791339 - DNA, 15 bp, Homo sapiens
gcaagagcaggatgt

SEQ ID NO: 791340 - DNA, 15 bp, Homo sapiens
caagagcaggatgtt

SEQ ID NO: 791341 - DNA, 15 bp, Homo sapiens
aagagcaggatgtta

SEQ ID NO: 791342 - DNA, 15 bp, Homo sapiens
agagcaggatgttag

SEQ ID NO: 791343 - DNA, 15 bp, Homo sapiens
gagcaggatgttagg

SEQ ID NO: 791344 - DNA, 15 bp, Homo sapiens
agcaggatgttaggt

SEQ ID NO: 791345 - DNA, 15 bp, Homo sapiens
gcaggatgttaggtt

SEQ ID NO: 791346 - DNA, 15 bp, Homo sapiens
caggatgttaggttg

SEQ ID NO: 791347 - DNA, 15 bp, Homo sapiens
aggatgttaggttgt

SEQ ID NO: 791348 - DNA, 15 bp, Homo sapiens
ggatgttaggttgtg

SEQ ID NO: 791349 - DNA, 15 bp, Homo sapiens
gatgttaggttgtgg

SEQ ID NO: 791350 - DNA, 15 bp, Homo sapiens
atgttaggttgtgga

SEQ ID NO: 791351 - DNA, 15 bp, Homo sapiens
tgttaggttgtggaa

SEQ ID NO: 791352 - DNA, 15 bp, Homo sapiens
gttaggttgtggaag

SEQ ID NO: 791353 - DNA, 15 bp, Homo sapiens
ttaggttgtggaagt

SEQ ID NO: 791354 - DNA, 15 bp, Homo sapiens
taggttgtggaagtc

SEQ ID NO: 791355 - DNA, 15 bp, Homo sapiens
aggttgtggaagtca

SEQ ID NO: 791356 - DNA, 15 bp, Homo sapiens
ggttgtggaagtcat

SEQ ID NO: 791357 - DNA, 15 bp, Homo sapiens
gttgtggaagtcatc

SEQ ID NO: 791358 - DNA, 15 bp, Homo sapiens
ttgtggaagtcatcc

SEQ ID NO: 791359 - DNA, 15 bp, Homo sapiens
tgtggaagtcatccc

SEQ ID NO: 791360 - DNA, 15 bp, Homo sapiens
gtggaagtcatcccc

SEQ ID NO: 791361 - DNA, 15 bp, Homo sapiens
tggaagtcatcccca

SEQ ID NO: 791362 - DNA, 15 bp, Homo sapiens
ggaagtcatccccat

SEQ ID NO: 791363 - DNA, 15 bp, Homo sapiens
gaagtcatccccatg

SEQ ID NO: 791364 - DNA, 15 bp, Homo sapiens
aagtcatccccatgg

SEQ ID NO: 791365 - DNA, 15 bp, Homo sapiens
agtcatccccatgga

SEQ ID NO: 791366 - DNA, 15 bp, Homo sapiens
gtcatccccatggag

SEQ ID NO: 791367 - DNA, 15 bp, Homo sapiens
tcatccccatggaga

SEQ ID NO: 791368 - DNA, 15 bp, Homo sapiens
catccccatggagat

SEQ ID NO: 791369 - DNA, 15 bp, Homo sapiens
atccccatggagatg

SEQ ID NO: 791370 - DNA, 15 bp, Homo sapiens
tccccatggagatgc

SEQ ID NO: 791371 - DNA, 15 bp, Homo sapiens
ccccatggagatgct

SEQ ID NO: 791372 - DNA, 15 bp, Homo sapiens
cccatggagatgctg

SEQ ID NO: 791373 - DNA, 15 bp, Homo sapiens
ccatggagatgctga

SEQ ID NO: 791374 - DNA, 15 bp, Homo sapiens
catggagatgctgat

SEQ ID NO: 791375 - DNA, 15 bp, Homo sapiens
atggagatgctgatg

SEQ ID NO: 791376 - DNA, 15 bp, Homo sapiens
tggagatgctgatgc

SEQ ID NO: 791377 - DNA, 15 bp, Homo sapiens
ggagatgctgatgct

SEQ ID NO: 791378 - DNA, 15 bp, Homo sapiens
gagatgctgatgctg

SEQ ID NO: 791379 - DNA, 15 bp, Homo sapiens
agatgctgatgctga

SEQ ID NO: 791380 - DNA, 15 bp, Homo sapiens
gatgctgatgctgag

SEQ ID NO: 791381 - DNA, 15 bp, Homo sapiens
atgctgatgctgaga

SEQ ID NO: 791382 - DNA, 15 bp, Homo sapiens
tgctgatgctgagac

SEQ ID NO: 791383 - DNA, 15 bp, Homo sapiens
gctgatgctgagacc

SEQ ID NO: 791384 - DNA, 15 bp, Homo sapiens
ctgatgctgagaccc

SEQ ID NO: 791385 - DNA, 15 bp, Homo sapiens
tgatgctgagaccct

SEQ ID NO: 791386 - DNA, 15 bp, Homo sapiens
gatgctgagaccctg

SEQ ID NO: 791387 - DNA, 15 bp, Homo sapiens
atgctgagaccctgg

SEQ ID NO: 791388 - DNA, 15 bp, Homo sapiens
tgctgagaccctgga

SEQ ID NO: 791389 - DNA, 15 bp, Homo sapiens
gctgagaccctggaa

SEQ ID NO: 791390 - DNA, 15 bp, Homo sapiens
ctgagaccctggaaa

SEQ ID NO: 791391 - DNA, 15 bp, Homo sapiens
tgagaccctggaaat

SEQ ID NO: 791392 - DNA, 15 bp, Homo sapiens
gagaccctggaaatg

SEQ ID NO: 791393 - DNA, 15 bp, Homo sapiens
agaccctggaaatga

SEQ ID NO: 791394 - DNA, 15 bp, Homo sapiens
gaccctggaaatgac

SEQ ID NO: 791395 - DNA, 15 bp, Homo sapiens
accctggaaatgaca

SEQ ID NO: 791396 - DNA, 15 bp, Homo sapiens
ccctggaaatgacaa

SEQ ID NO: 791397 - DNA, 15 bp, Homo sapiens
cctggaaatgacaac

SEQ ID NO: 791398 - DNA, 15 bp, Homo sapiens
ctggaaatgacaaca

SEQ ID NO: 791399 - DNA, 15 bp, Homo sapiens
tggaaatgacaacag

SEQ ID NO: 791400 - DNA, 15 bp, Homo sapiens
ggaaatgacaacagt

SEQ ID NO: 791401 - DNA, 15 bp, Homo sapiens
gaaatgacaacagtt

SEQ ID NO: 791402 - DNA, 15 bp, Homo sapiens
aaatgacaacagttc

SEQ ID NO: 791403 - DNA, 15 bp, Homo sapiens
aatgacaacagttct

SEQ ID NO: 791404 - DNA, 15 bp, Homo sapiens
atgacaacagttcta

SEQ ID NO: 791405 - DNA, 15 bp, Homo sapiens
tgacaacagttctag

SEQ ID NO: 791406 - DNA, 15 bp, Homo sapiens
gacaacagttctaga

SEQ ID NO: 791407 - DNA, 15 bp, Homo sapiens
acaacagttctagag

SEQ ID NO: 791408 - DNA, 15 bp, Homo sapiens
caacagttctagaga

SEQ ID NO: 791409 - DNA, 15 bp, Homo sapiens
aacagttctagagat

SEQ ID NO: 791410 - DNA, 15 bp, Homo sapiens
acagttctagagatc

SEQ ID NO: 791411 - DNA, 15 bp, Homo sapiens
cagttctagagatca

SEQ ID NO: 791412 - DNA, 15 bp, Homo sapiens
agttctagagatcag

SEQ ID NO: 791413 - DNA, 15 bp, Homo sapiens
gttctagagatcagg

SEQ ID NO: 791414 - DNA, 15 bp, Homo sapiens
ttctagagatcaggg

SEQ ID NO: 791415 - DNA, 15 bp, Homo sapiens
tctagagatcagggt

SEQ ID NO: 791416 - DNA, 15 bp, Homo sapiens
ctagagatcagggtg

SEQ ID NO: 791417 - DNA, 15 bp, Homo sapiens
tagagatcagggtgt

SEQ ID NO: 791418 - DNA, 15 bp, Homo sapiens
agagatcagggtgtt

SEQ ID NO: 791419 - DNA, 15 bp, Homo sapiens
gagatcagggtgttt

SEQ ID NO: 791420 - DNA, 15 bp, Homo sapiens
agatcagggtgttta

SEQ ID NO: 791421 - DNA, 15 bp, Homo sapiens
gatcagggtgtttaa

SEQ ID NO: 791422 - DNA, 15 bp, Homo sapiens
atcagggtgtttaag

SEQ ID NO: 791423 - DNA, 15 bp, Homo sapiens
tcagggtgtttaaga

SEQ ID NO: 791424 - DNA, 15 bp, Homo sapiens
cagggtgtttaagat

SEQ ID NO: 791425 - DNA, 15 bp, Homo sapiens
agggtgtttaagata

SEQ ID NO: 791426 - DNA, 15 bp, Homo sapiens
gggtgtttaagataa

SEQ ID NO: 791427 - DNA, 15 bp, Homo sapiens
ggtgtttaagataag

SEQ ID NO: 791428 - DNA, 15 bp, Homo sapiens
gtgtttaagataaga

SEQ ID NO: 791429 - DNA, 15 bp, Homo sapiens
tgtttaagataagag

SEQ ID NO: 791430 - DNA, 15 bp, Homo sapiens
gtttaagataagagg

SEQ ID NO: 791431 - DNA, 15 bp, Homo sapiens
tttaagataagagga

SEQ ID NO: 791432 - DNA, 15 bp, Homo sapiens
ttaagataagaggat

SEQ ID NO: 791433 - DNA, 15 bp, Homo sapiens
taagataagaggatg

SEQ ID NO: 791434 - DNA, 15 bp, Homo sapiens
aagataagaggatgt

SEQ ID NO: 791435 - DNA, 15 bp, Homo sapiens
agataagaggatgtg

SEQ ID NO: 791436 - DNA, 15 bp, Homo sapiens
gataagaggatgtgg

SEQ ID NO: 791437 - DNA, 15 bp, Homo sapiens
ataagaggatgtggg

SEQ ID NO: 791438 - DNA, 15 bp, Homo sapiens
taagaggatgtggga

SEQ ID NO: 791439 - DNA, 15 bp, Homo sapiens
aagaggatgtgggac

SEQ ID NO: 791440 - DNA, 15 bp, Homo sapiens
agaggatgtgggaca

SEQ ID NO: 791441 - DNA, 15 bp, Homo sapiens
gaggatgtgggacat

SEQ ID NO: 791442 - DNA, 15 bp, Homo sapiens
aggatgtgggacata

SEQ ID NO: 791443 - DNA, 15 bp, Homo sapiens
ggatgtgggacataa

SEQ ID NO: 791444 - DNA, 15 bp, Homo sapiens
gatgtgggacataac

SEQ ID NO: 791445 - DNA, 15 bp, Homo sapiens
atgtgggacataacc

SEQ ID NO: 791446 - DNA, 15 bp, Homo sapiens
tgtgggacataacct

SEQ ID NO: 791447 - DNA, 15 bp, Homo sapiens
gtgggacataacctg

SEQ ID NO: 791448 - DNA, 15 bp, Homo sapiens
tgggacataacctgc

SEQ ID NO: 791449 - DNA, 15 bp, Homo sapiens
gggacataacctgca

SEQ ID NO: 791450 - DNA, 15 bp, Homo sapiens
ggacataacctgcaa

SEQ ID NO: 791451 - DNA, 15 bp, Homo sapiens
gacataacctgcaag

SEQ ID NO: 791452 - DNA, 15 bp, Homo sapiens
acataacctgcaaga

SEQ ID NO: 791453 - DNA, 15 bp, Homo sapiens
cataacctgcaagaa

SEQ ID NO: 791454 - DNA, 15 bp, Homo sapiens
ataacctgcaagaag

SEQ ID NO: 791455 - DNA, 15 bp, Homo sapiens
taacctgcaagaaga

SEQ ID NO: 791456 - DNA, 15 bp, Homo sapiens
aacctgcaagaagac

SEQ ID NO: 791457 - DNA, 15 bp, Homo sapiens
acctgcaagaagact

SEQ ID NO: 791458 - DNA, 15 bp, Homo sapiens
cctgcaagaagactt

SEQ ID NO: 791459 - DNA, 15 bp, Homo sapiens
ctgcaagaagactta

SEQ ID NO: 791460 - DNA, 15 bp, Homo sapiens
tgcaagaagacttac

SEQ ID NO: 791461 - DNA, 15 bp, Homo sapiens
gcaagaagacttact

SEQ ID NO: 791462 - DNA, 15 bp, Homo sapiens
caagaagacttactc

SEQ ID NO: 791463 - DNA, 15 bp, Homo sapiens
aagaagacttactcc

SEQ ID NO: 791464 - DNA, 15 bp, Homo sapiens
agaagacttactcct

SEQ ID NO: 791465 - DNA, 15 bp, Homo sapiens
gaagacttactccta

SEQ ID NO: 791466 - DNA, 15 bp, Homo sapiens
aagacttactcctaa

SEQ ID NO: 791467 - DNA, 15 bp, Homo sapiens
agacttactcctaaa

SEQ ID NO: 791468 - DNA, 15 bp, Homo sapiens
gacttactcctaaat

SEQ ID NO: 791469 - DNA, 15 bp, Homo sapiens
acttactcctaaatc

SEQ ID NO: 791470 - DNA, 15 bp, Homo sapiens
cttactcctaaatca

SEQ ID NO: 791471 - DNA, 15 bp, Homo sapiens
ttactcctaaatcag

SEQ ID NO: 791472 - DNA, 15 bp, Homo sapiens
tactcctaaatcaga

SEQ ID NO: 791473 - DNA, 15 bp, Homo sapiens
actcctaaatcagag

SEQ ID NO: 791474 - DNA, 15 bp, Homo sapiens
ctcctaaatcagaga

SEQ ID NO: 791475 - DNA, 15 bp, Homo sapiens
tcctaaatcagagac

SEQ ID NO: 791476 - DNA, 15 bp, Homo sapiens
cctaaatcagagaca

SEQ ID NO: 791477 - DNA, 15 bp, Homo sapiens
ctaaatcagagacaa

SEQ ID NO: 791478 - DNA, 15 bp, Homo sapiens
taaatcagagacaag

SEQ ID NO: 791479 - DNA, 15 bp, Homo sapiens
aaatcagagacaagg

SEQ ID NO: 791480 - DNA, 15 bp, Homo sapiens
aatcagagacaaggg

SEQ ID NO: 791481 - DNA, 15 bp, Homo sapiens
atcagagacaagggg

SEQ ID NO: 791482 - DNA, 15 bp, Homo sapiens
tcagagacaagggga

SEQ ID NO: 791483 - DNA, 15 bp, Homo sapiens
cagagacaaggggaa

SEQ ID NO: 791484 - DNA, 15 bp, Homo sapiens
agagacaaggggaaa

SEQ ID NO: 791485 - DNA, 15 bp, Homo sapiens
gagacaaggggaaac

SEQ ID NO: 791486 - DNA, 15 bp, Homo sapiens
agacaaggggaaact

SEQ ID NO: 791487 - DNA, 15 bp, Homo sapiens
gacaaggggaaacta

SEQ ID NO: 791488 - DNA, 15 bp, Homo sapiens
acaaggggaaactag

SEQ ID NO: 791489 - DNA, 15 bp, Homo sapiens
caaggggaaactaga

SEQ ID NO: 791490 - DNA, 15 bp, Homo sapiens
aaggggaaactagaa

SEQ ID NO: 791491 - DNA, 15 bp, Homo sapiens
aggggaaactagaaa

SEQ ID NO: 791492 - DNA, 15 bp, Homo sapiens
ggggaaactagaaaa

SEQ ID NO: 791493 - DNA, 15 bp, Homo sapiens
gggaaactagaaaag

SEQ ID NO: 791494 - DNA, 15 bp, Homo sapiens
ggaaactagaaaagg

SEQ ID NO: 791495 - DNA, 15 bp, Homo sapiens
gaaactagaaaagga

SEQ ID NO: 791496 - DNA, 15 bp, Homo sapiens
aaactagaaaaggag

SEQ ID NO: 791497 - DNA, 15 bp, Homo sapiens
aactagaaaaggagc

SEQ ID NO: 791498 - DNA, 15 bp, Homo sapiens
actagaaaaggagct

SEQ ID NO: 791499 - DNA, 15 bp, Homo sapiens
ctagaaaaggagctg

SEQ ID NO: 791500 - DNA, 15 bp, Homo sapiens
tagaaaaggagctgt

SEQ ID NO: 791501 - DNA, 15 bp, Homo sapiens
agaaaaggagctgtg

SEQ ID NO: 791502 - DNA, 15 bp, Homo sapiens
gaaaaggagctgtga

SEQ ID NO: 791503 - DNA, 15 bp, Homo sapiens
aaaaggagctgtgag

SEQ ID NO: 791504 - DNA, 15 bp, Homo sapiens
aaaggagctgtgaga

SEQ ID NO: 791505 - DNA, 15 bp, Homo sapiens
aaggagctgtgagat

SEQ ID NO: 791506 - DNA, 15 bp, Homo sapiens
aggagctgtgagata

SEQ ID NO: 791507 - DNA, 15 bp, Homo sapiens
ggagctgtgagataa

SEQ ID NO: 791508 - DNA, 15 bp, Homo sapiens
gagctgtgagataag

SEQ ID NO: 791509 - DNA, 15 bp, Homo sapiens
agctgtgagataagt

SEQ ID NO: 791510 - DNA, 15 bp, Homo sapiens
gctgtgagataagta

SEQ ID NO: 791511 - DNA, 15 bp, Homo sapiens
ctgtgagataagtat

SEQ ID NO: 791512 - DNA, 15 bp, Homo sapiens
tgtgagataagtata

SEQ ID NO: 791513 - DNA, 15 bp, Homo sapiens
gtgagataagtataa

SEQ ID NO: 791514 - DNA, 15 bp, Homo sapiens
tgagataagtataaa

SEQ ID NO: 791515 - DNA, 15 bp, Homo sapiens
gagataagtataaag

SEQ ID NO: 791516 - DNA, 15 bp, Homo sapiens
agataagtataaaga

SEQ ID NO: 791517 - DNA, 15 bp, Homo sapiens
gataagtataaagaa

SEQ ID NO: 791518 - DNA, 15 bp, Homo sapiens
ataagtataaagaaa

SEQ ID NO: 791519 - DNA, 15 bp, Homo sapiens
taagtataaagaaaa

SEQ ID NO: 791520 - DNA, 15 bp, Homo sapiens
aagtataaagaaaac

SEQ ID NO: 791521 - DNA, 15 bp, Homo sapiens
agtataaagaaaacc

SEQ ID NO: 791522 - DNA, 15 bp, Homo sapiens
gtataaagaaaacca

SEQ ID NO: 791523 - DNA, 15 bp, Homo sapiens
tataaagaaaaccag

SEQ ID NO: 791524 - DNA, 15 bp, Homo sapiens
ataaagaaaaccaga

SEQ ID NO: 791525 - DNA, 15 bp, Homo sapiens
taaagaaaaccagaa

SEQ ID NO: 791526 - DNA, 15 bp, Homo sapiens
aaagaaaaccagaag

SEQ ID NO: 791527 - DNA, 15 bp, Homo sapiens
aagaaaaccagaaga

SEQ ID NO: 791528 - DNA, 15 bp, Homo sapiens
agaaaaccagaagag

SEQ ID NO: 791529 - DNA, 15 bp, Homo sapiens
gaaaaccagaagaga

SEQ ID NO: 791530 - DNA, 15 bp, Homo sapiens
aaaaccagaagagaa

SEQ ID NO: 791531 - DNA, 15 bp, Homo sapiens
aaaccagaagagaat

SEQ ID NO: 791532 - DNA, 15 bp, Homo sapiens
aaccagaagagaatg

SEQ ID NO: 791533 - DNA, 15 bp, Homo sapiens
accagaagagaatgc

SEQ ID NO: 791534 - DNA, 15 bp, Homo sapiens
ccagaagagaatgct

SEQ ID NO: 791535 - DNA, 15 bp, Homo sapiens
cagaagagaatgctg

SEQ ID NO: 791536 - DNA, 15 bp, Homo sapiens
agaagagaatgctgt

SEQ ID NO: 791537 - DNA, 15 bp, Homo sapiens
gaagagaatgctgtt

SEQ ID NO: 791538 - DNA, 15 bp, Homo sapiens
aagagaatgctgttg

SEQ ID NO: 791539 - DNA, 15 bp, Homo sapiens
agagaatgctgttga

SEQ ID NO: 791540 - DNA, 15 bp, Homo sapiens
gagaatgctgttgaa

SEQ ID NO: 791541 - DNA, 15 bp, Homo sapiens
agaatgctgttgaag

SEQ ID NO: 791542 - DNA, 15 bp, Homo sapiens
gaatgctgttgaaga

SEQ ID NO: 791543 - DNA, 15 bp, Homo sapiens
aatgctgttgaagaa

SEQ ID NO: 791544 - DNA, 15 bp, Homo sapiens
atgctgttgaagaag

SEQ ID NO: 791545 - DNA, 15 bp, Homo sapiens
tgctgttgaagaagc

SEQ ID NO: 791546 - DNA, 15 bp, Homo sapiens
gctgttgaagaagcc

SEQ ID NO: 791547 - DNA, 15 bp, Homo sapiens
ctgttgaagaagcca

SEQ ID NO: 791548 - DNA, 15 bp, Homo sapiens
tgttgaagaagccaa

SEQ ID NO: 791549 - DNA, 15 bp, Homo sapiens
gttgaagaagccaag

SEQ ID NO: 791550 - DNA, 15 bp, Homo sapiens
ttgaagaagccaaga

SEQ ID NO: 791551 - DNA, 15 bp, Homo sapiens
tgaagaagccaagag

SEQ ID NO: 791552 - DNA, 15 bp, Homo sapiens
gaagaagccaagaga

SEQ ID NO: 791553 - DNA, 15 bp, Homo sapiens
aagaagccaagagag

SEQ ID NO: 791554 - DNA, 15 bp, Homo sapiens
agaagccaagagagg

SEQ ID NO: 791555 - DNA, 15 bp, Homo sapiens
gaagccaagagaggc

SEQ ID NO: 791556 - DNA, 15 bp, Homo sapiens
aagccaagagaggca

SEQ ID NO: 791557 - DNA, 15 bp, Homo sapiens
agccaagagaggcaa

SEQ ID NO: 791558 - DNA, 15 bp, Homo sapiens
gccaagagaggcaag

SEQ ID NO: 791559 - DNA, 15 bp, Homo sapiens
ccaagagaggcaagt

SEQ ID NO: 791560 - DNA, 15 bp, Homo sapiens
caagagaggcaagtg

SEQ ID NO: 791561 - DNA, 15 bp, Homo sapiens
aagagaggcaagtgt

SEQ ID NO: 791562 - DNA, 15 bp, Homo sapiens
agagaggcaagtgtt

SEQ ID NO: 791563 - DNA, 15 bp, Homo sapiens
gagaggcaagtgttt

SEQ ID NO: 791564 - DNA, 15 bp, Homo sapiens
agaggcaagtgtttc

SEQ ID NO: 791565 - DNA, 15 bp, Homo sapiens
gaggcaagtgtttca

SEQ ID NO: 791566 - DNA, 15 bp, Homo sapiens
aggcaagtgtttcaa

SEQ ID NO: 791567 - DNA, 15 bp, Homo sapiens
ggcaagtgtttcaaa

SEQ ID NO: 791568 - DNA, 15 bp, Homo sapiens
gcaagtgtttcaaag

SEQ ID NO: 791569 - DNA, 15 bp, Homo sapiens
caagtgtttcaaaga

SEQ ID NO: 791570 - DNA, 15 bp, Homo sapiens
aagtgtttcaaagaa

SEQ ID NO: 791571 - DNA, 15 bp, Homo sapiens
agtgtttcaaagaaa

SEQ ID NO: 791572 - DNA, 15 bp, Homo sapiens
gtgtttcaaagaaaa

SEQ ID NO: 791573 - DNA, 15 bp, Homo sapiens
tgtttcaaagaaaaa

SEQ ID NO: 791574 - DNA, 15 bp, Homo sapiens
gtttcaaagaaaaag

SEQ ID NO: 791575 - DNA, 15 bp, Homo sapiens
tttcaaagaaaaagc

SEQ ID NO: 791576 - DNA, 15 bp, Homo sapiens
ttcaaagaaaaagcc

SEQ ID NO: 791577 - DNA, 15 bp, Homo sapiens
tcaaagaaaaagcca

SEQ ID NO: 791578 - DNA, 15 bp, Homo sapiens
caaagaaaaagccat

SEQ ID NO: 791579 - DNA, 15 bp, Homo sapiens
aaagaaaaagccatc

SEQ ID NO: 791580 - DNA, 15 bp, Homo sapiens
aagaaaaagccatca

SEQ ID NO: 791581 - DNA, 15 bp, Homo sapiens
agaaaaagccatcag

SEQ ID NO: 791582 - DNA, 15 bp, Homo sapiens
gaaaaagccatcaga

SEQ ID NO: 791583 - DNA, 15 bp, Homo sapiens
aaaaagccatcagac

SEQ ID NO: 791584 - DNA, 15 bp, Homo sapiens
aaaagccatcagact

SEQ ID NO: 791585 - DNA, 15 bp, Homo sapiens
aaagccatcagactt

SEQ ID NO: 791586 - DNA, 15 bp, Homo sapiens
aagccatcagacttt

SEQ ID NO: 791587 - DNA, 15 bp, Homo sapiens
agccatcagactttc

SEQ ID NO: 791588 - DNA, 15 bp, Homo sapiens
gccatcagactttca

SEQ ID NO: 791589 - DNA, 15 bp, Homo sapiens
ccatcagactttcaa

SEQ ID NO: 791590 - DNA, 15 bp, Homo sapiens
catcagactttcaaa

SEQ ID NO: 791591 - DNA, 15 bp, Homo sapiens
atcagactttcaaat

SEQ ID NO: 791592 - DNA, 15 bp, Homo sapiens
tcagactttcaaatg

SEQ ID NO: 791593 - DNA, 15 bp, Homo sapiens
cagactttcaaatga

SEQ ID NO: 791594 - DNA, 15 bp, Homo sapiens
agactttcaaatgat

SEQ ID NO: 791595 - DNA, 15 bp, Homo sapiens
gactttcaaatgatg

SEQ ID NO: 791596 - DNA, 15 bp, Homo sapiens
actttcaaatgatgc

SEQ ID NO: 791597 - DNA, 15 bp, Homo sapiens
ctttcaaatgatgca

SEQ ID NO: 791598 - DNA, 15 bp, Homo sapiens
tttcaaatgatgcag

SEQ ID NO: 791599 - DNA, 15 bp, Homo sapiens
ttcaaatgatgcaga

SEQ ID NO: 791600 - DNA, 15 bp, Homo sapiens
tcaaatgatgcagag

SEQ ID NO: 791601 - DNA, 15 bp, Homo sapiens
caaatgatgcagagg

SEQ ID NO: 791602 - DNA, 15 bp, Homo sapiens
aaatgatgcagaggt

SEQ ID NO: 791603 - DNA, 15 bp, Homo sapiens
aatgatgcagaggtc

SEQ ID NO: 791604 - DNA, 15 bp, Homo sapiens
atgatgcagaggtca

SEQ ID NO: 791605 - DNA, 15 bp, Homo sapiens
tgatgcagaggtcaa

SEQ ID NO: 791606 - DNA, 15 bp, Homo sapiens
gatgcagaggtcaaa

SEQ ID NO: 791607 - DNA, 15 bp, Homo sapiens
atgcagaggtcaaac

SEQ ID NO: 791608 - DNA, 15 bp, Homo sapiens
tgcagaggtcaaaca

SEQ ID NO: 791609 - DNA, 15 bp, Homo sapiens
gcagaggtcaaacaa

SEQ ID NO: 791610 - DNA, 15 bp, Homo sapiens
cagaggtcaaacaag

SEQ ID NO: 791611 - DNA, 15 bp, Homo sapiens
agaggtcaaacaaga

SEQ ID NO: 791612 - DNA, 15 bp, Homo sapiens
gaggtcaaacaagaa

SEQ ID NO: 791613 - DNA, 15 bp, Homo sapiens
aggtcaaacaagaaa

SEQ ID NO: 791614 - DNA, 15 bp, Homo sapiens
ggtcaaacaagaaaa

SEQ ID NO: 791615 - DNA, 15 bp, Homo sapiens
gtcaaacaagaaaag

SEQ ID NO: 791616 - DNA, 15 bp, Homo sapiens
tcaaacaagaaaagg

SEQ ID NO: 791617 - DNA, 15 bp, Homo sapiens
caaacaagaaaaggg

SEQ ID NO: 791618 - DNA, 15 bp, Homo sapiens
aaacaagaaaagggc

SEQ ID NO: 791619 - DNA, 15 bp, Homo sapiens
aacaagaaaagggcg

SEQ ID NO: 791620 - DNA, 15 bp, Homo sapiens
acaagaaaagggcgg

SEQ ID NO: 791621 - DNA, 15 bp, Homo sapiens
caagaaaagggcgga

SEQ ID NO: 791622 - DNA, 15 bp, Homo sapiens
aagaaaagggcggag

SEQ ID NO: 791623 - DNA, 15 bp, Homo sapiens
agaaaagggcggagg

SEQ ID NO: 791624 - DNA, 15 bp, Homo sapiens
gaaaagggcggaggg

SEQ ID NO: 791625 - DNA, 15 bp, Homo sapiens
aaaagggcggagggt

SEQ ID NO: 791626 - DNA, 15 bp, Homo sapiens
aaagggcggagggtg

SEQ ID NO: 791627 - DNA, 15 bp, Homo sapiens
aagggcggagggtgt

SEQ ID NO: 791628 - DNA, 15 bp, Homo sapiens
agggcggagggtgtc

SEQ ID NO: 791629 - DNA, 15 bp, Homo sapiens
gggcggagggtgtcc

SEQ ID NO: 791630 - DNA, 15 bp, Homo sapiens
ggcggagggtgtcca

SEQ ID NO: 791631 - DNA, 15 bp, Homo sapiens
gcggagggtgtccac

SEQ ID NO: 791632 - DNA, 15 bp, Homo sapiens
cggagggtgtccacg

SEQ ID NO: 791633 - DNA, 15 bp, Homo sapiens
ggagggtgtccacgg

SEQ ID NO: 791634 - DNA, 15 bp, Homo sapiens
gagggtgtccacggg

SEQ ID NO: 791635 - DNA, 15 bp, Homo sapiens
agggtgtccacggga

SEQ ID NO: 791636 - DNA, 15 bp, Homo sapiens
gggtgtccacgggag

SEQ ID NO: 791637 - DNA, 15 bp, Homo sapiens
ggtgtccacgggagc

SEQ ID NO: 791638 - DNA, 15 bp, Homo sapiens
gtgtccacgggagca

SEQ ID NO: 791639 - DNA, 15 bp, Homo sapiens
tgtccacgggagcaa

SEQ ID NO: 791640 - DNA, 15 bp, Homo sapiens
gtccacgggagcaat

SEQ ID NO: 791641 - DNA, 15 bp, Homo sapiens
tccacgggagcaatt

SEQ ID NO: 791642 - DNA, 15 bp, Homo sapiens
ccacgggagcaattt

SEQ ID NO: 791643 - DNA, 15 bp, Homo sapiens
cacgggagcaatttc

SEQ ID NO: 791644 - DNA, 15 bp, Homo sapiens
acgggagcaatttca

SEQ ID NO: 791645 - DNA, 15 bp, Homo sapiens
cgggagcaatttcag

SEQ ID NO: 791646 - DNA, 15 bp, Homo sapiens
gggagcaatttcagt

SEQ ID NO: 791647 - DNA, 15 bp, Homo sapiens
ggagcaatttcagtc

SEQ ID NO: 791648 - DNA, 15 bp, Homo sapiens
gagcaatttcagtca

SEQ ID NO: 791649 - DNA, 15 bp, Homo sapiens
agcaatttcagtcac

SEQ ID NO: 791650 - DNA, 15 bp, Homo sapiens
gcaatttcagtcacc

SEQ ID NO: 791651 - DNA, 15 bp, Homo sapiens
caatttcagtcacct

SEQ ID NO: 791652 - DNA, 15 bp, Homo sapiens
aatttcagtcacctg

SEQ ID NO: 791653 - DNA, 15 bp, Homo sapiens
atttcagtcacctgt

SEQ ID NO: 791654 - DNA, 15 bp, Homo sapiens
agacccatgctttta

SEQ ID NO: 791655 - DNA, 15 bp, Homo sapiens
gacccatgcttttaa

SEQ ID NO: 791656 - DNA, 15 bp, Homo sapiens
acccatgcttttaac

SEQ ID NO: 791657 - DNA, 15 bp, Homo sapiens
cccatgcttttaacc

SEQ ID NO: 791658 - DNA, 15 bp, Homo sapiens
ccatgcttttaacca

SEQ ID NO: 791659 - DNA, 15 bp, Homo sapiens
catgcttttaaccac

SEQ ID NO: 791660 - DNA, 15 bp, Homo sapiens
atgcttttaaccacc

SEQ ID NO: 791661 - DNA, 15 bp, Homo sapiens
tgcttttaaccacca

SEQ ID NO: 791662 - DNA, 15 bp, Homo sapiens
gcttttaaccaccac

SEQ ID NO: 791663 - DNA, 15 bp, Homo sapiens
cttttaaccaccaca

SEQ ID NO: 791664 - DNA, 15 bp, Homo sapiens
ttttaaccaccacac

SEQ ID NO: 791665 - DNA, 15 bp, Homo sapiens
tttaaccaccacact

SEQ ID NO: 791666 - DNA, 15 bp, Homo sapiens
ttaaccaccacactt

SEQ ID NO: 791667 - DNA, 15 bp, Homo sapiens
taaccaccacactta

SEQ ID NO: 791668 - DNA, 15 bp, Homo sapiens
aaccaccacacttac

SEQ ID NO: 791669 - DNA, 15 bp, Homo sapiens
accaccacacttaca

SEQ ID NO: 791670 - DNA, 15 bp, Homo sapiens
ccaccacacttacac

SEQ ID NO: 791671 - DNA, 15 bp, Homo sapiens
caccacacttacact

SEQ ID NO: 791672 - DNA, 15 bp, Homo sapiens
accacacttacactc

SEQ ID NO: 791673 - DNA, 15 bp, Homo sapiens
ccacacttacactct

SEQ ID NO: 791674 - DNA, 15 bp, Homo sapiens
cacacttacactctt

SEQ ID NO: 791675 - DNA, 15 bp, Homo sapiens
acacttacactcttt

SEQ ID NO: 791676 - DNA, 15 bp, Homo sapiens
cacttacactctttc

SEQ ID NO: 791677 - DNA, 15 bp, Homo sapiens
acttacactctttct

SEQ ID NO: 791678 - DNA, 15 bp, Homo sapiens
cttacactctttctg

SEQ ID NO: 791679 - DNA, 15 bp, Homo sapiens
ttacactctttctgc

SEQ ID NO: 791680 - DNA, 15 bp, Homo sapiens
tacactctttctgct

SEQ ID NO: 791681 - DNA, 15 bp, Homo sapiens
acactctttctgctg

SEQ ID NO: 791682 - DNA, 15 bp, Homo sapiens
cactctttctgctgt

SEQ ID NO: 791683 - DNA, 15 bp, Homo sapiens
actctttctgctgtt

SEQ ID NO: 791684 - DNA, 15 bp, Homo sapiens
ctctttctgctgttg

SEQ ID NO: 791685 - DNA, 15 bp, Homo sapiens
tctttctgctgttgg

SEQ ID NO: 791686 - DNA, 15 bp, Homo sapiens
ctttctgctgttggt

SEQ ID NO: 791687 - DNA, 15 bp, Homo sapiens
tttctgctgttggta

SEQ ID NO: 791688 - DNA, 15 bp, Homo sapiens
ttctgctgttggtag

SEQ ID NO: 791689 - DNA, 15 bp, Homo sapiens
tctgctgttggtagt

SEQ ID NO: 791690 - DNA, 15 bp, Homo sapiens
ctgctgttggtagta

SEQ ID NO: 791691 - DNA, 15 bp, Homo sapiens
tgctgttggtagtat

SEQ ID NO: 791692 - DNA, 15 bp, Homo sapiens
gctgttggtagtatt

SEQ ID NO: 791693 - DNA, 15 bp, Homo sapiens
ctgttggtagtattt

SEQ ID NO: 791694 - DNA, 15 bp, Homo sapiens
tgttggtagtattta

SEQ ID NO: 791695 - DNA, 15 bp, Homo sapiens
gttggtagtatttat

SEQ ID NO: 791696 - DNA, 15 bp, Homo sapiens
ttggtagtatttatt

SEQ ID NO: 791697 - DNA, 15 bp, Homo sapiens
tggtagtatttattt

SEQ ID NO: 791698 - DNA, 15 bp, Homo sapiens
ggtagtatttattta

SEQ ID NO: 791699 - DNA, 15 bp, Homo sapiens
gtagtatttatttaa

SEQ ID NO: 791700 - DNA, 15 bp, Homo sapiens
tagtatttatttaaa

SEQ ID NO: 791701 - DNA, 15 bp, Homo sapiens
agtatttatttaaat

SEQ ID NO: 791702 - DNA, 15 bp, Homo sapiens
gtatttatttaaatt

SEQ ID NO: 791703 - DNA, 15 bp, Homo sapiens
tatttatttaaattg

SEQ ID NO: 791704 - DNA, 15 bp, Homo sapiens
atttatttaaattgt

SEQ ID NO: 791705 - DNA, 15 bp, Homo sapiens
tttatttaaattgtt

SEQ ID NO: 791706 - DNA, 15 bp, Homo sapiens
ttatttaaattgttt

SEQ ID NO: 791707 - DNA, 15 bp, Homo sapiens
tatttaaattgtttt

SEQ ID NO: 791708 - DNA, 15 bp, Homo sapiens
atttaaattgttttt

SEQ ID NO: 791709 - DNA, 15 bp, Homo sapiens
tttaaattgttttta

SEQ ID NO: 791710 - DNA, 15 bp, Homo sapiens
ttaaattgtttttat

SEQ ID NO: 791711 - DNA, 15 bp, Homo sapiens
taaattgtttttatt

SEQ ID NO: 791712 - DNA, 15 bp, Homo sapiens
aaattgtttttatta

SEQ ID NO: 791713 - DNA, 15 bp, Homo sapiens
aattgtttttattaa

SEQ ID NO: 791714 - DNA, 15 bp, Homo sapiens
attgtttttattaat

SEQ ID NO: 791715 - DNA, 15 bp, Homo sapiens
ttgtttttattaata

SEQ ID NO: 791716 - DNA, 15 bp, Homo sapiens
tgtttttattaatac

SEQ ID NO: 791717 - DNA, 15 bp, Homo sapiens
gtttttattaatacc

SEQ ID NO: 791718 - DNA, 15 bp, Homo sapiens
tttttattaatacca

SEQ ID NO: 791719 - DNA, 15 bp, Homo sapiens
ttttattaataccat

SEQ ID NO: 791720 - DNA, 15 bp, Homo sapiens
tttattaataccatt

SEQ ID NO: 791721 - DNA, 15 bp, Homo sapiens
ttattaataccattg

SEQ ID NO: 791722 - DNA, 15 bp, Homo sapiens
tattaataccattgt

SEQ ID NO: 791723 - DNA, 15 bp, Homo sapiens
attaataccattgtt

SEQ ID NO: 791724 - DNA, 15 bp, Homo sapiens
ttaataccattgttc

SEQ ID NO: 791725 - DNA, 15 bp, Homo sapiens
taataccattgttct

SEQ ID NO: 791726 - DNA, 15 bp, Homo sapiens
aataccattgttctt

SEQ ID NO: 791727 - DNA, 15 bp, Homo sapiens
ataccattgttcttg

SEQ ID NO: 791728 - DNA, 15 bp, Homo sapiens
taccattgttcttgt

SEQ ID NO: 791729 - DNA, 15 bp, Homo sapiens
accattgttcttgtt

SEQ ID NO: 791730 - DNA, 15 bp, Homo sapiens
ccattgttcttgttg

SEQ ID NO: 791731 - DNA, 15 bp, Homo sapiens
cattgttcttgttgt

SEQ ID NO: 791732 - DNA, 15 bp, Homo sapiens
attgttcttgttgtt

SEQ ID NO: 791733 - DNA, 15 bp, Homo sapiens
ttgttcttgttgttg

SEQ ID NO: 791734 - DNA, 15 bp, Homo sapiens
tgttcttgttgttgt

SEQ ID NO: 791735 - DNA, 15 bp, Homo sapiens
gttcttgttgttgtt

SEQ ID NO: 791736 - DNA, 15 bp, Homo sapiens
ttcttgttgttgtta

SEQ ID NO: 791737 - DNA, 15 bp, Homo sapiens
tcttgttgttgttat

SEQ ID NO: 791738 - DNA, 15 bp, Homo sapiens
cttgttgttgttatt

SEQ ID NO: 791739 - DNA, 15 bp, Homo sapiens
ttgttgttgttatta

SEQ ID NO: 791740 - DNA, 15 bp, Homo sapiens
tgttgttgttattag

SEQ ID NO: 791741 - DNA, 15 bp, Homo sapiens
gttgttgttattagc

SEQ ID NO: 791742 - DNA, 15 bp, Homo sapiens
ttgttgttattagcc

SEQ ID NO: 791743 - DNA, 15 bp, Homo sapiens
tgttgttattagcca

SEQ ID NO: 791744 - DNA, 15 bp, Homo sapiens
gttgttattagccac

SEQ ID NO: 791745 - DNA, 15 bp, Homo sapiens
ttgttattagccaca

SEQ ID NO: 791746 - DNA, 15 bp, Homo sapiens
tgttattagccacaa

SEQ ID NO: 791747 - DNA, 15 bp, Homo sapiens
gttattagccacaat

SEQ ID NO: 791748 - DNA, 15 bp, Homo sapiens
ttattagccacaatc

SEQ ID NO: 791749 - DNA, 15 bp, Homo sapiens
tattagccacaatct

SEQ ID NO: 791750 - DNA, 15 bp, Homo sapiens
attagccacaatcta

SEQ ID NO: 791751 - DNA, 15 bp, Homo sapiens
ttagccacaatctat

SEQ ID NO: 791752 - DNA, 15 bp, Homo sapiens
tagccacaatctatt

SEQ ID NO: 791753 - DNA, 15 bp, Homo sapiens
agccacaatctattg

SEQ ID NO: 791754 - DNA, 15 bp, Homo sapiens
gccacaatctattga

SEQ ID NO: 791755 - DNA, 15 bp, Homo sapiens
ccacaatctattgag

SEQ ID NO: 791756 - DNA, 15 bp, Homo sapiens
cacaatctattgaga

SEQ ID NO: 791757 - DNA, 15 bp, Homo sapiens
acaatctattgagaa

SEQ ID NO: 791758 - DNA, 15 bp, Homo sapiens
caatctattgagaac

SEQ ID NO: 791759 - DNA, 15 bp, Homo sapiens
aatctattgagaacc

SEQ ID NO: 791760 - DNA, 15 bp, Homo sapiens
atctattgagaacct

SEQ ID NO: 791761 - DNA, 15 bp, Homo sapiens
tctattgagaaccta

SEQ ID NO: 791762 - DNA, 15 bp, Homo sapiens
ctattgagaacctac

SEQ ID NO: 791763 - DNA, 15 bp, Homo sapiens
tattgagaacctacc

SEQ ID NO: 791764 - DNA, 15 bp, Homo sapiens
attgagaacctacca

SEQ ID NO: 791765 - DNA, 15 bp, Homo sapiens
ttgagaacctaccat

SEQ ID NO: 791766 - DNA, 15 bp, Homo sapiens
tgagaacctaccatg

SEQ ID NO: 791767 - DNA, 15 bp, Homo sapiens
gagaacctaccatgt

SEQ ID NO: 791768 - DNA, 15 bp, Homo sapiens
agaacctaccatgtg

SEQ ID NO: 791769 - DNA, 15 bp, Homo sapiens
gaacctaccatgtgc

SEQ ID NO: 791770 - DNA, 15 bp, Homo sapiens
aacctaccatgtgcc

SEQ ID NO: 791771 - DNA, 15 bp, Homo sapiens
acctaccatgtgcca

SEQ ID NO: 791772 - DNA, 15 bp, Homo sapiens
cctaccatgtgccaa

SEQ ID NO: 791773 - DNA, 15 bp, Homo sapiens
ctaccatgtgccaag

SEQ ID NO: 791774 - DNA, 15 bp, Homo sapiens
taccatgtgccaagc

SEQ ID NO: 791775 - DNA, 15 bp, Homo sapiens
accatgtgccaagca

SEQ ID NO: 791776 - DNA, 15 bp, Homo sapiens
ccatgtgccaagcat

SEQ ID NO: 791777 - DNA, 15 bp, Homo sapiens
catgtgccaagcatg

SEQ ID NO: 791778 - DNA, 15 bp, Homo sapiens
atgtgccaagcatgt

SEQ ID NO: 791779 - DNA, 15 bp, Homo sapiens
tgtgccaagcatgtt

SEQ ID NO: 791780 - DNA, 15 bp, Homo sapiens
gtgccaagcatgtta

SEQ ID NO: 791781 - DNA, 15 bp, Homo sapiens
tgccaagcatgttat

SEQ ID NO: 791782 - DNA, 15 bp, Homo sapiens
gccaagcatgttatt

SEQ ID NO: 791783 - DNA, 15 bp, Homo sapiens
ccaagcatgttatta

SEQ ID NO: 791784 - DNA, 15 bp, Homo sapiens
caagcatgttattag

SEQ ID NO: 791785 - DNA, 15 bp, Homo sapiens
aagcatgttattagc

SEQ ID NO: 791786 - DNA, 15 bp, Homo sapiens
agcatgttattagct

SEQ ID NO: 791787 - DNA, 15 bp, Homo sapiens
gcatgttattagctt

SEQ ID NO: 791788 - DNA, 15 bp, Homo sapiens
catgttattagcttg

SEQ ID NO: 791789 - DNA, 15 bp, Homo sapiens
atgttattagcttgg

SEQ ID NO: 791790 - DNA, 15 bp, Homo sapiens
tgttattagcttggc

SEQ ID NO: 791791 - DNA, 15 bp, Homo sapiens
gttattagcttggca

SEQ ID NO: 791792 - DNA, 15 bp, Homo sapiens
ttattagcttggcat

SEQ ID NO: 791793 - DNA, 15 bp, Homo sapiens
tattagcttggcatt

SEQ ID NO: 791794 - DNA, 15 bp, Homo sapiens
attagcttggcatta

SEQ ID NO: 791795 - DNA, 15 bp, Homo sapiens
ttagcttggcattag

SEQ ID NO: 791796 - DNA, 15 bp, Homo sapiens
tagcttggcattagc

SEQ ID NO: 791797 - DNA, 15 bp, Homo sapiens
agcttggcattagct

SEQ ID NO: 791798 - DNA, 15 bp, Homo sapiens
gcttggcattagctt

SEQ ID NO: 791799 - DNA, 15 bp, Homo sapiens
cttggcattagcttt

SEQ ID NO: 791800 - DNA, 15 bp, Homo sapiens
ttggcattagcttta

SEQ ID NO: 791801 - DNA, 15 bp, Homo sapiens
tggcattagctttac

SEQ ID NO: 791802 - DNA, 15 bp, Homo sapiens
ggcattagctttacc

SEQ ID NO: 791803 - DNA, 15 bp, Homo sapiens
gcattagctttaccc

SEQ ID NO: 791804 - DNA, 15 bp, Homo sapiens
cattagctttaccct

SEQ ID NO: 791805 - DNA, 15 bp, Homo sapiens
attagctttaccctc

SEQ ID NO: 791806 - DNA, 15 bp, Homo sapiens
ttagctttaccctca

SEQ ID NO: 791807 - DNA, 15 bp, Homo sapiens
tagctttaccctcac

SEQ ID NO: 791808 - DNA, 15 bp, Homo sapiens
agctttaccctcaca

SEQ ID NO: 791809 - DNA, 15 bp, Homo sapiens
gctttaccctcacaa

SEQ ID NO: 791810 - DNA, 15 bp, Homo sapiens
ctttaccctcacaat

SEQ ID NO: 791811 - DNA, 15 bp, Homo sapiens
tttaccctcacaata

SEQ ID NO: 791812 - DNA, 15 bp, Homo sapiens
ttaccctcacaataa

SEQ ID NO: 791813 - DNA, 15 bp, Homo sapiens
taccctcacaataac

SEQ ID NO: 791814 - DNA, 15 bp, Homo sapiens
accctcacaataacc

SEQ ID NO: 791815 - DNA, 15 bp, Homo sapiens
ccctcacaataaccc

SEQ ID NO: 791816 - DNA, 15 bp, Homo sapiens
cctcacaataaccct

SEQ ID NO: 791817 - DNA, 15 bp, Homo sapiens
ctcacaataaccctg

SEQ ID NO: 791818 - DNA, 15 bp, Homo sapiens
tcacaataaccctgc

SEQ ID NO: 791819 - DNA, 15 bp, Homo sapiens
cacaataaccctgca

SEQ ID NO: 791820 - DNA, 15 bp, Homo sapiens
acaataaccctgcaa

SEQ ID NO: 791821 - DNA, 15 bp, Homo sapiens
caataaccctgcaag

SEQ ID NO: 791822 - DNA, 15 bp, Homo sapiens
aataaccctgcaagg

SEQ ID NO: 791823 - DNA, 15 bp, Homo sapiens
ataaccctgcaagga

SEQ ID NO: 791824 - DNA, 15 bp, Homo sapiens
taaccctgcaaggag

SEQ ID NO: 791825 - DNA, 15 bp, Homo sapiens
aaccctgcaaggagg

SEQ ID NO: 791826 - DNA, 15 bp, Homo sapiens
accctgcaaggaggc

SEQ ID NO: 791827 - DNA, 15 bp, Homo sapiens
ccctgcaaggaggca

SEQ ID NO: 791828 - DNA, 15 bp, Homo sapiens
cctgcaaggaggcag

SEQ ID NO: 791829 - DNA, 15 bp, Homo sapiens
ctgcaaggaggcagt

SEQ ID NO: 791830 - DNA, 15 bp, Homo sapiens
tgcaaggaggcagtt

SEQ ID NO: 791831 - DNA, 15 bp, Homo sapiens
gcaaggaggcagtta

SEQ ID NO: 791832 - DNA, 15 bp, Homo sapiens
caaggaggcagttat

SEQ ID NO: 791833 - DNA, 15 bp, Homo sapiens
aaggaggcagttatt

SEQ ID NO: 791834 - DNA, 15 bp, Homo sapiens
aggaggcagttattc

SEQ ID NO: 791835 - DNA, 15 bp, Homo sapiens
ggaggcagttattcc

SEQ ID NO: 791836 - DNA, 15 bp, Homo sapiens
gaggcagttattcca

SEQ ID NO: 791837 - DNA, 15 bp, Homo sapiens
aggcagttattccat

SEQ ID NO: 791838 - DNA, 15 bp, Homo sapiens
ggcagttattccatt

SEQ ID NO: 791839 - DNA, 15 bp, Homo sapiens
gcagttattccattt

SEQ ID NO: 791840 - DNA, 15 bp, Homo sapiens
cagttattccatttt

SEQ ID NO: 791841 - DNA, 15 bp, Homo sapiens
agttattccatttta

SEQ ID NO: 791842 - DNA, 15 bp, Homo sapiens
gttattccattttag

SEQ ID NO: 791843 - DNA, 15 bp, Homo sapiens
ttattccattttagc

SEQ ID NO: 791844 - DNA, 15 bp, Homo sapiens
tattccattttagca

SEQ ID NO: 791845 - DNA, 15 bp, Homo sapiens
attccattttagcag

SEQ ID NO: 791846 - DNA, 15 bp, Homo sapiens
ttccattttagcaga

SEQ ID NO: 791847 - DNA, 15 bp, Homo sapiens
tccattttagcagat

SEQ ID NO: 791848 - DNA, 15 bp, Homo sapiens
ccattttagcagatg

SEQ ID NO: 791849 - DNA, 15 bp, Homo sapiens
cattttagcagatgc

SEQ ID NO: 791850 - DNA, 15 bp, Homo sapiens
attttagcagatgca

SEQ ID NO: 791851 - DNA, 15 bp, Homo sapiens
ttttagcagatgcag

SEQ ID NO: 791852 - DNA, 15 bp, Homo sapiens
tttagcagatgcaga

SEQ ID NO: 791853 - DNA, 15 bp, Homo sapiens
ttagcagatgcagaa

SEQ ID NO: 791854 - DNA, 15 bp, Homo sapiens
tagcagatgcagaaa

SEQ ID NO: 791855 - DNA, 15 bp, Homo sapiens
agcagatgcagaaac

SEQ ID NO: 791856 - DNA, 15 bp, Homo sapiens
gcagatgcagaaact

SEQ ID NO: 791857 - DNA, 15 bp, Homo sapiens
cagatgcagaaactg

SEQ ID NO: 791858 - DNA, 15 bp, Homo sapiens
agatgcagaaactga

SEQ ID NO: 791859 - DNA, 15 bp, Homo sapiens
gatgcagaaactgag

SEQ ID NO: 791860 - DNA, 15 bp, Homo sapiens
atgcagaaactgagg

SEQ ID NO: 791861 - DNA, 15 bp, Homo sapiens
tgcagaaactgaggc

SEQ ID NO: 791862 - DNA, 15 bp, Homo sapiens
gcagaaactgaggct

SEQ ID NO: 791863 - DNA, 15 bp, Homo sapiens
cagaaactgaggctt

SEQ ID NO: 791864 - DNA, 15 bp, Homo sapiens
agaaactgaggcttt

SEQ ID NO: 791865 - DNA, 15 bp, Homo sapiens
gaaactgaggctttg

SEQ ID NO: 791866 - DNA, 15 bp, Homo sapiens
aaactgaggctttgt

SEQ ID NO: 791867 - DNA, 15 bp, Homo sapiens
aactgaggctttgtg

SEQ ID NO: 791868 - DNA, 15 bp, Homo sapiens
actgaggctttgtga

SEQ ID NO: 791869 - DNA, 15 bp, Homo sapiens
ctgaggctttgtgag

SEQ ID NO: 791870 - DNA, 15 bp, Homo sapiens
tgaggctttgtgaga

SEQ ID NO: 791871 - DNA, 15 bp, Homo sapiens
gaggctttgtgagat

SEQ ID NO: 791872 - DNA, 15 bp, Homo sapiens
aggctttgtgagatt

SEQ ID NO: 791873 - DNA, 15 bp, Homo sapiens
ggctttgtgagatta

SEQ ID NO: 791874 - DNA, 15 bp, Homo sapiens
gctttgtgagattaa

SEQ ID NO: 791875 - DNA, 15 bp, Homo sapiens
ctttgtgagattaaa

SEQ ID NO: 791876 - DNA, 15 bp, Homo sapiens
tttgtgagattaaat

SEQ ID NO: 791877 - DNA, 15 bp, Homo sapiens
ttgtgagattaaata

SEQ ID NO: 791878 - DNA, 15 bp, Homo sapiens
tgtgagattaaataa

SEQ ID NO: 791879 - DNA, 15 bp, Homo sapiens
gtgagattaaataac

SEQ ID NO: 791880 - DNA, 15 bp, Homo sapiens
tgagattaaataact

SEQ ID NO: 791881 - DNA, 15 bp, Homo sapiens
gagattaaataactt

SEQ ID NO: 791882 - DNA, 15 bp, Homo sapiens
agattaaataactta

SEQ ID NO: 791883 - DNA, 15 bp, Homo sapiens
gattaaataacttac

SEQ ID NO: 791884 - DNA, 15 bp, Homo sapiens
attaaataacttaca

SEQ ID NO: 791885 - DNA, 15 bp, Homo sapiens
ttaaataacttacaa

SEQ ID NO: 791886 - DNA, 15 bp, Homo sapiens
taaataacttacaag

SEQ ID NO: 791887 - DNA, 15 bp, Homo sapiens
aaataacttacaaga

SEQ ID NO: 791888 - DNA, 15 bp, Homo sapiens
aataacttacaagac

SEQ ID NO: 791889 - DNA, 15 bp, Homo sapiens
ataacttacaagacc

SEQ ID NO: 791890 - DNA, 15 bp, Homo sapiens
taacttacaagacca

SEQ ID NO: 791891 - DNA, 15 bp, Homo sapiens
aacttacaagaccac

SEQ ID NO: 791892 - DNA, 15 bp, Homo sapiens
acttacaagaccaca

SEQ ID NO: 791893 - DNA, 15 bp, Homo sapiens
cttacaagaccacat

SEQ ID NO: 791894 - DNA, 15 bp, Homo sapiens
ttacaagaccacatt

SEQ ID NO: 791895 - DNA, 15 bp, Homo sapiens
tacaagaccacattc

SEQ ID NO: 791896 - DNA, 15 bp, Homo sapiens
acaagaccacattct

SEQ ID NO: 791897 - DNA, 15 bp, Homo sapiens
caagaccacattctt

SEQ ID NO: 791898 - DNA, 15 bp, Homo sapiens
aagaccacattctta

SEQ ID NO: 791899 - DNA, 15 bp, Homo sapiens
agaccacattcttag

SEQ ID NO: 791900 - DNA, 15 bp, Homo sapiens
gaccacattcttaga

SEQ ID NO: 791901 - DNA, 15 bp, Homo sapiens
accacattcttagaa

SEQ ID NO: 791902 - DNA, 15 bp, Homo sapiens
ccacattcttagaaa

SEQ ID NO: 791903 - DNA, 15 bp, Homo sapiens
cacattcttagaaaa

SEQ ID NO: 791904 - DNA, 15 bp, Homo sapiens
acattcttagaaaac

SEQ ID NO: 791905 - DNA, 15 bp, Homo sapiens
cattcttagaaaact

SEQ ID NO: 791906 - DNA, 15 bp, Homo sapiens
attcttagaaaactg

SEQ ID NO: 791907 - DNA, 15 bp, Homo sapiens
ttcttagaaaactgc

SEQ ID NO: 791908 - DNA, 15 bp, Homo sapiens
tcttagaaaactgca

SEQ ID NO: 791909 - DNA, 15 bp, Homo sapiens
cttagaaaactgcag

SEQ ID NO: 791910 - DNA, 15 bp, Homo sapiens
ttagaaaactgcaga

SEQ ID NO: 791911 - DNA, 15 bp, Homo sapiens
tagaaaactgcagag

SEQ ID NO: 791912 - DNA, 15 bp, Homo sapiens
agaaaactgcagagc

SEQ ID NO: 791913 - DNA, 15 bp, Homo sapiens
gaaaactgcagagct

SEQ ID NO: 791914 - DNA, 15 bp, Homo sapiens
aaaactgcagagctg

SEQ ID NO: 791915 - DNA, 15 bp, Homo sapiens
aaactgcagagctgg

SEQ ID NO: 791916 - DNA, 15 bp, Homo sapiens
aactgcagagctggg

SEQ ID NO: 791917 - DNA, 15 bp, Homo sapiens
actgcagagctggga

SEQ ID NO: 791918 - DNA, 15 bp, Homo sapiens
ctgcagagctgggat

SEQ ID NO: 791919 - DNA, 15 bp, Homo sapiens
tgcagagctgggatt

SEQ ID NO: 791920 - DNA, 15 bp, Homo sapiens
gcagagctgggattc

SEQ ID NO: 791921 - DNA, 15 bp, Homo sapiens
cagagctgggattca

SEQ ID NO: 791922 - DNA, 15 bp, Homo sapiens
agagctgggattcaa

SEQ ID NO: 791923 - DNA, 15 bp, Homo sapiens
gagctgggattcaaa

SEQ ID NO: 791924 - DNA, 15 bp, Homo sapiens
agctgggattcaaat

SEQ ID NO: 791925 - DNA, 15 bp, Homo sapiens
gctgggattcaaatc

SEQ ID NO: 791926 - DNA, 15 bp, Homo sapiens
ctgggattcaaatcc

SEQ ID NO: 791927 - DNA, 15 bp, Homo sapiens
tgggattcaaatcca

SEQ ID NO: 791928 - DNA, 15 bp, Homo sapiens
gggattcaaatccag

SEQ ID NO: 791929 - DNA, 15 bp, Homo sapiens
ggattcaaatccaga

SEQ ID NO: 791930 - DNA, 15 bp, Homo sapiens
gattcaaatccagat

SEQ ID NO: 791931 - DNA, 15 bp, Homo sapiens
attcaaatccagatc

SEQ ID NO: 791932 - DNA, 15 bp, Homo sapiens
ttcaaatccagatcc

SEQ ID NO: 791933 - DNA, 15 bp, Homo sapiens
tcaaatccagatcca

SEQ ID NO: 791934 - DNA, 15 bp, Homo sapiens
caaatccagatccag

SEQ ID NO: 791935 - DNA, 15 bp, Homo sapiens
aaatccagatccagc

SEQ ID NO: 791936 - DNA, 15 bp, Homo sapiens
aatccagatccagct

SEQ ID NO: 791937 - DNA, 15 bp, Homo sapiens
atccagatccagctg

SEQ ID NO: 791938 - DNA, 15 bp, Homo sapiens
tccagatccagctgg

SEQ ID NO: 791939 - DNA, 15 bp, Homo sapiens
ccagatccagctggc

SEQ ID NO: 791940 - DNA, 15 bp, Homo sapiens
cagatccagctggct

SEQ ID NO: 791941 - DNA, 15 bp, Homo sapiens
agatccagctggctc

SEQ ID NO: 791942 - DNA, 15 bp, Homo sapiens
gatccagctggctct

SEQ ID NO: 791943 - DNA, 15 bp, Homo sapiens
atccagctggctcta

SEQ ID NO: 791944 - DNA, 15 bp, Homo sapiens
tccagctggctctaa

SEQ ID NO: 791945 - DNA, 15 bp, Homo sapiens
ccagctggctctaaa

SEQ ID NO: 791946 - DNA, 15 bp, Homo sapiens
cagctggctctaaat

SEQ ID NO: 791947 - DNA, 15 bp, Homo sapiens
agctggctctaaatc

SEQ ID NO: 791948 - DNA, 15 bp, Homo sapiens
gctggctctaaatcc

SEQ ID NO: 791949 - DNA, 15 bp, Homo sapiens
ctggctctaaatccc

SEQ ID NO: 791950 - DNA, 15 bp, Homo sapiens
tggctctaaatccca

SEQ ID NO: 791951 - DNA, 15 bp, Homo sapiens
ggctctaaatcccat

SEQ ID NO: 791952 - DNA, 15 bp, Homo sapiens
gctctaaatcccatg

SEQ ID NO: 791953 - DNA, 15 bp, Homo sapiens
ctctaaatcccatgt

SEQ ID NO: 791954 - DNA, 15 bp, Homo sapiens
tctaaatcccatgtg

SEQ ID NO: 791955 - DNA, 15 bp, Homo sapiens
ctaaatcccatgtgt

SEQ ID NO: 791956 - DNA, 15 bp, Homo sapiens
taaatcccatgtgtt

SEQ ID NO: 791957 - DNA, 15 bp, Homo sapiens
aaatcccatgtgttt

SEQ ID NO: 791958 - DNA, 15 bp, Homo sapiens
aatcccatgtgtttt

SEQ ID NO: 791959 - DNA, 15 bp, Homo sapiens
atcccatgtgttttg

SEQ ID NO: 791960 - DNA, 15 bp, Homo sapiens
tcccatgtgttttgc

SEQ ID NO: 791961 - DNA, 15 bp, Homo sapiens
cccatgtgttttgca

SEQ ID NO: 791962 - DNA, 15 bp, Homo sapiens
ccatgtgttttgcat

SEQ ID NO: 791963 - DNA, 15 bp, Homo sapiens
catgtgttttgcata

SEQ ID NO: 791964 - DNA, 15 bp, Homo sapiens
atgtgttttgcataa

SEQ ID NO: 791965 - DNA, 15 bp, Homo sapiens
tgtgttttgcataaa

SEQ ID NO: 791966 - DNA, 15 bp, Homo sapiens
gtgttttgcataaat

SEQ ID NO: 791967 - DNA, 15 bp, Homo sapiens
tgttttgcataaatg

SEQ ID NO: 791968 - DNA, 15 bp, Homo sapiens
gttttgcataaatgt

SEQ ID NO: 791969 - DNA, 15 bp, Homo sapiens
ttttgcataaatgta

SEQ ID NO: 791970 - DNA, 15 bp, Homo sapiens
tttgcataaatgtaa

SEQ ID NO: 791971 - DNA, 15 bp, Homo sapiens
ttgcataaatgtaag

SEQ ID NO: 791972 - DNA, 15 bp, Homo sapiens
tgcataaatgtaagc

SEQ ID NO: 791973 - DNA, 15 bp, Homo sapiens
gcataaatgtaagcc

SEQ ID NO: 791974 - DNA, 15 bp, Homo sapiens
cataaatgtaagcct

SEQ ID NO: 791975 - DNA, 15 bp, Homo sapiens
ataaatgtaagcctc

SEQ ID NO: 791976 - DNA, 15 bp, Homo sapiens
taaatgtaagcctcc

SEQ ID NO: 791977 - DNA, 15 bp, Homo sapiens
aaatgtaagcctccc

SEQ ID NO: 791978 - DNA, 15 bp, Homo sapiens
aatgtaagcctccca

SEQ ID NO: 791979 - DNA, 15 bp, Homo sapiens
atgtaagcctcccaa

SEQ ID NO: 791980 - DNA, 15 bp, Homo sapiens
tgtaagcctcccaaa

SEQ ID NO: 791981 - DNA, 15 bp, Homo sapiens
gtaagcctcccaaaa

SEQ ID NO: 791982 - DNA, 15 bp, Homo sapiens
taagcctcccaaaag

SEQ ID NO: 791983 - DNA, 15 bp, Homo sapiens
aagcctcccaaaagt

SEQ ID NO: 791984 - DNA, 15 bp, Homo sapiens
agcctcccaaaagtg

SEQ ID NO: 791985 - DNA, 15 bp, Homo sapiens
gcctcccaaaagtga

SEQ ID NO: 791986 - DNA, 15 bp, Homo sapiens
cctcccaaaagtgat

SEQ ID NO: 791987 - DNA, 15 bp, Homo sapiens
ctcccaaaagtgatg

SEQ ID NO: 791988 - DNA, 15 bp, Homo sapiens
tcccaaaagtgatgt

SEQ ID NO: 791989 - DNA, 15 bp, Homo sapiens
cccaaaagtgatgtg

SEQ ID NO: 791990 - DNA, 15 bp, Homo sapiens
ccaaaagtgatgtgc

SEQ ID NO: 791991 - DNA, 15 bp, Homo sapiens
caaaagtgatgtgct

SEQ ID NO: 791992 - DNA, 15 bp, Homo sapiens
aaaagtgatgtgctg

SEQ ID NO: 791993 - DNA, 15 bp, Homo sapiens
aaagtgatgtgctgg

SEQ ID NO: 791994 - DNA, 15 bp, Homo sapiens
aagtgatgtgctggg

SEQ ID NO: 791995 - DNA, 15 bp, Homo sapiens
agtgatgtgctgggc

SEQ ID NO: 791996 - DNA, 15 bp, Homo sapiens
gtgatgtgctgggcc

SEQ ID NO: 791997 - DNA, 15 bp, Homo sapiens
tgatgtgctgggcct

SEQ ID NO: 791998 - DNA, 15 bp, Homo sapiens
gatgtgctgggcctc

SEQ ID NO: 791999 - DNA, 15 bp, Homo sapiens
atgtgctgggcctct

SEQ ID NO: 792000 - DNA, 15 bp, Homo sapiens
tgtgctgggcctctc

SEQ ID NO: 792001 - DNA, 15 bp, Homo sapiens
gtgctgggcctctct

SEQ ID NO: 792002 - DNA, 15 bp, Homo sapiens
tgctgggcctctctc

SEQ ID NO: 792003 - DNA, 15 bp, Homo sapiens
gctgggcctctctca

SEQ ID NO: 792004 - DNA, 15 bp, Homo sapiens
ctgggcctctctcac

SEQ ID NO: 792005 - DNA, 15 bp, Homo sapiens
tgggcctctctcact

SEQ ID NO: 792006 - DNA, 15 bp, Homo sapiens
gggcctctctcactc

SEQ ID NO: 792007 - DNA, 15 bp, Homo sapiens
ggcctctctcactcc

SEQ ID NO: 792008 - DNA, 15 bp, Homo sapiens
gcctctctcactcct

SEQ ID NO: 792009 - DNA, 15 bp, Homo sapiens
cctctctcactcctc

SEQ ID NO: 792010 - DNA, 15 bp, Homo sapiens
ctctctcactcctct

SEQ ID NO: 792011 - DNA, 15 bp, Homo sapiens
tctctcactcctctt

SEQ ID NO: 792012 - DNA, 15 bp, Homo sapiens
ctctcactcctctta

SEQ ID NO: 792013 - DNA, 15 bp, Homo sapiens
tctcactcctcttac

SEQ ID NO: 792014 - DNA, 15 bp, Homo sapiens
ctcactcctcttaca

SEQ ID NO: 792015 - DNA, 15 bp, Homo sapiens
tcactcctcttacaa

SEQ ID NO: 792016 - DNA, 15 bp, Homo sapiens
cactcctcttacaaa

SEQ ID NO: 792017 - DNA, 15 bp, Homo sapiens
actcctcttacaaag

SEQ ID NO: 792018 - DNA, 15 bp, Homo sapiens
ctcctcttacaaagg

SEQ ID NO: 792019 - DNA, 15 bp, Homo sapiens
tcctcttacaaaggc

SEQ ID NO: 792020 - DNA, 15 bp, Homo sapiens
cctcttacaaaggca

SEQ ID NO: 792021 - DNA, 15 bp, Homo sapiens
ctcttacaaaggcat

SEQ ID NO: 792022 - DNA, 15 bp, Homo sapiens
tcttacaaaggcatg

SEQ ID NO: 792023 - DNA, 15 bp, Homo sapiens
cttacaaaggcatga

SEQ ID NO: 792024 - DNA, 15 bp, Homo sapiens
ttacaaaggcatgac

SEQ ID NO: 792025 - DNA, 15 bp, Homo sapiens
tacaaaggcatgact

SEQ ID NO: 792026 - DNA, 15 bp, Homo sapiens
acaaaggcatgactt

SEQ ID NO: 792027 - DNA, 15 bp, Homo sapiens
caaaggcatgactta

SEQ ID NO: 792028 - DNA, 15 bp, Homo sapiens
aaaggcatgacttag

SEQ ID NO: 792029 - DNA, 15 bp, Homo sapiens
aaggcatgacttagg

SEQ ID NO: 792030 - DNA, 15 bp, Homo sapiens
aggcatgacttaggt

SEQ ID NO: 792031 - DNA, 15 bp, Homo sapiens
ggcatgacttaggtg

SEQ ID NO: 792032 - DNA, 15 bp, Homo sapiens
gcatgacttaggtgg

SEQ ID NO: 792033 - DNA, 15 bp, Homo sapiens
catgacttaggtggg

SEQ ID NO: 792034 - DNA, 15 bp, Homo sapiens
atgacttaggtgggc

SEQ ID NO: 792035 - DNA, 15 bp, Homo sapiens
tgacttaggtgggct

SEQ ID NO: 792036 - DNA, 15 bp, Homo sapiens
gacttaggtgggctg

SEQ ID NO: 792037 - DNA, 15 bp, Homo sapiens
acttaggtgggctga

SEQ ID NO: 792038 - DNA, 15 bp, Homo sapiens
cttaggtgggctgaa

SEQ ID NO: 792039 - DNA, 15 bp, Homo sapiens
ttaggtgggctgaag

SEQ ID NO: 792040 - DNA, 15 bp, Homo sapiens
taggtgggctgaagc

SEQ ID NO: 792041 - DNA, 15 bp, Homo sapiens
aggtgggctgaagcc

SEQ ID NO: 792042 - DNA, 15 bp, Homo sapiens
ggtgggctgaagcca

SEQ ID NO: 792043 - DNA, 15 bp, Homo sapiens
gtgggctgaagccat

SEQ ID NO: 792044 - DNA, 15 bp, Homo sapiens
tgggctgaagccatg

SEQ ID NO: 792045 - DNA, 15 bp, Homo sapiens
gggctgaagccatgg

SEQ ID NO: 792046 - DNA, 15 bp, Homo sapiens
ggctgaagccatggt

SEQ ID NO: 792047 - DNA, 15 bp, Homo sapiens
gctgaagccatggtg

SEQ ID NO: 792048 - DNA, 15 bp, Homo sapiens
ctgaagccatggtgc

SEQ ID NO: 792049 - DNA, 15 bp, Homo sapiens
tgaagccatggtgca

SEQ ID NO: 792050 - DNA, 15 bp, Homo sapiens
gaagccatggtgcag

SEQ ID NO: 792051 - DNA, 15 bp, Homo sapiens
aagccatggtgcaga

SEQ ID NO: 792052 - DNA, 15 bp, Homo sapiens
agccatggtgcagaa

SEQ ID NO: 792053 - DNA, 15 bp, Homo sapiens
gccatggtgcagaat

SEQ ID NO: 792054 - DNA, 15 bp, Homo sapiens
ccatggtgcagaatt

SEQ ID NO: 792055 - DNA, 15 bp, Homo sapiens
catggtgcagaattt

SEQ ID NO: 792056 - DNA, 15 bp, Homo sapiens
atggtgcagaatttc

SEQ ID NO: 792057 - DNA, 15 bp, Homo sapiens
tggtgcagaatttca

SEQ ID NO: 792058 - DNA, 15 bp, Homo sapiens
ggtgcagaatttcag

SEQ ID NO: 792059 - DNA, 15 bp, Homo sapiens
gtgcagaatttcagt

SEQ ID NO: 792060 - DNA, 15 bp, Homo sapiens
tgcagaatttcagtg

SEQ ID NO: 792061 - DNA, 15 bp, Homo sapiens
gcagaatttcagtga

SEQ ID NO: 792062 - DNA, 15 bp, Homo sapiens
cagaatttcagtgac

SEQ ID NO: 792063 - DNA, 15 bp, Homo sapiens
agaatttcagtgacg

SEQ ID NO: 792064 - DNA, 15 bp, Homo sapiens
gaatttcagtgacgc

SEQ ID NO: 792065 - DNA, 15 bp, Homo sapiens
aatttcagtgacgcc

SEQ ID NO: 792066 - DNA, 15 bp, Homo sapiens
atttcagtgacgcct

SEQ ID NO: 792067 - DNA, 15 bp, Homo sapiens
tttcagtgacgcctc

SEQ ID NO: 792068 - DNA, 15 bp, Homo sapiens
ttcagtgacgcctca

SEQ ID NO: 792069 - DNA, 15 bp, Homo sapiens
tcagtgacgcctcat

SEQ ID NO: 792070 - DNA, 15 bp, Homo sapiens
cagtgacgcctcatt

SEQ ID NO: 792071 - DNA, 15 bp, Homo sapiens
agtgacgcctcattg

SEQ ID NO: 792072 - DNA, 15 bp, Homo sapiens
gtgacgcctcattgt

SEQ ID NO: 792073 - DNA, 15 bp, Homo sapiens
tgacgcctcattgtc

SEQ ID NO: 792074 - DNA, 15 bp, Homo sapiens
gacgcctcattgtct

SEQ ID NO: 792075 - DNA, 15 bp, Homo sapiens
acgcctcattgtctt

SEQ ID NO: 792076 - DNA, 15 bp, Homo sapiens
cgcctcattgtcttg

SEQ ID NO: 792077 - DNA, 15 bp, Homo sapiens
gcctcattgtcttgc

SEQ ID NO: 792078 - DNA, 15 bp, Homo sapiens
cctcattgtcttgca

SEQ ID NO: 792079 - DNA, 15 bp, Homo sapiens
ctcattgtcttgcaa

SEQ ID NO: 792080 - DNA, 15 bp, Homo sapiens
tcattgtcttgcaag

SEQ ID NO: 792081 - DNA, 15 bp, Homo sapiens
cattgtcttgcaaga

SEQ ID NO: 792082 - DNA, 15 bp, Homo sapiens
attgtcttgcaagat

SEQ ID NO: 792083 - DNA, 15 bp, Homo sapiens
ttgtcttgcaagatt

SEQ ID NO: 792084 - DNA, 15 bp, Homo sapiens
tgtcttgcaagattc

SEQ ID NO: 792085 - DNA, 15 bp, Homo sapiens
gtcttgcaagattcc

SEQ ID NO: 792086 - DNA, 15 bp, Homo sapiens
tcttgcaagattcct

SEQ ID NO: 792087 - DNA, 15 bp, Homo sapiens
cttgcaagattcctt

SEQ ID NO: 792088 - DNA, 15 bp, Homo sapiens
ttgcaagattccttt

SEQ ID NO: 792089 - DNA, 15 bp, Homo sapiens
tgcaagattcctttc

SEQ ID NO: 792090 - DNA, 15 bp, Homo sapiens
gcaagattcctttct

SEQ ID NO: 792091 - DNA, 15 bp, Homo sapiens
caagattcctttcta

SEQ ID NO: 792092 - DNA, 15 bp, Homo sapiens
aagattcctttctaa

SEQ ID NO: 792093 - DNA, 15 bp, Homo sapiens
agattcctttctaat

SEQ ID NO: 792094 - DNA, 15 bp, Homo sapiens
gattcctttctaatc

SEQ ID NO: 792095 - DNA, 15 bp, Homo sapiens
attcctttctaatca

SEQ ID NO: 792096 - DNA, 15 bp, Homo sapiens
ttcctttctaatcat

SEQ ID NO: 792097 - DNA, 15 bp, Homo sapiens
tcctttctaatcatt

SEQ ID NO: 792098 - DNA, 15 bp, Homo sapiens
cctttctaatcattc

SEQ ID NO: 792099 - DNA, 15 bp, Homo sapiens
ctttctaatcattct

SEQ ID NO: 792100 - DNA, 15 bp, Homo sapiens
tttctaatcattctt

SEQ ID NO: 792101 - DNA, 15 bp, Homo sapiens
ttctaatcattcttt

SEQ ID NO: 792102 - DNA, 15 bp, Homo sapiens
tctaatcattcttta

SEQ ID NO: 792103 - DNA, 15 bp, Homo sapiens
ctaatcattctttaa

SEQ ID NO: 792104 - DNA, 15 bp, Homo sapiens
taatcattctttaag

SEQ ID NO: 792105 - DNA, 15 bp, Homo sapiens
aatcattctttaaga

SEQ ID NO: 792106 - DNA, 15 bp, Homo sapiens
atcattctttaagaa

SEQ ID NO: 792107 - DNA, 15 bp, Homo sapiens
tcattctttaagaac

SEQ ID NO: 792108 - DNA, 15 bp, Homo sapiens
cattctttaagaact

SEQ ID NO: 792109 - DNA, 15 bp, Homo sapiens
attctttaagaactg

SEQ ID NO: 792110 - DNA, 15 bp, Homo sapiens
ttctttaagaactga

SEQ ID NO: 792111 - DNA, 15 bp, Homo sapiens
tctttaagaactgag

SEQ ID NO: 792112 - DNA, 15 bp, Homo sapiens
ctttaagaactgagt

SEQ ID NO: 792113 - DNA, 15 bp, Homo sapiens
tttaagaactgagtg

SEQ ID NO: 792114 - DNA, 15 bp, Homo sapiens
ttaagaactgagtgt

SEQ ID NO: 792115 - DNA, 15 bp, Homo sapiens
taagaactgagtgta

SEQ ID NO: 792116 - DNA, 15 bp, Homo sapiens
aagaactgagtgtat

SEQ ID NO: 792117 - DNA, 15 bp, Homo sapiens
agaactgagtgtatc

SEQ ID NO: 792118 - DNA, 15 bp, Homo sapiens
gaactgagtgtatct

SEQ ID NO: 792119 - DNA, 15 bp, Homo sapiens
aactgagtgtatcta

SEQ ID NO: 792120 - DNA, 15 bp, Homo sapiens
actgagtgtatctat

SEQ ID NO: 792121 - DNA, 15 bp, Homo sapiens
ctgagtgtatctata

SEQ ID NO: 792122 - DNA, 15 bp, Homo sapiens
tgagtgtatctatat

SEQ ID NO: 792123 - DNA, 15 bp, Homo sapiens
gagtgtatctatatt

SEQ ID NO: 792124 - DNA, 15 bp, Homo sapiens
agtgtatctatattt

SEQ ID NO: 792125 - DNA, 15 bp, Homo sapiens
gtgtatctatatttg

SEQ ID NO: 792126 - DNA, 15 bp, Homo sapiens
tgtatctatatttgc

SEQ ID NO: 792127 - DNA, 15 bp, Homo sapiens
gtatctatatttgct

SEQ ID NO: 792128 - DNA, 15 bp, Homo sapiens
tatctatatttgctt

SEQ ID NO: 792129 - DNA, 15 bp, Homo sapiens
atctatatttgcttg

SEQ ID NO: 792130 - DNA, 15 bp, Homo sapiens
tctatatttgcttgt

SEQ ID NO: 792131 - DNA, 15 bp, Homo sapiens
ctatatttgcttgtc

SEQ ID NO: 792132 - DNA, 15 bp, Homo sapiens
tatatttgcttgtct

SEQ ID NO: 792133 - DNA, 15 bp, Homo sapiens
atatttgcttgtctt

SEQ ID NO: 792134 - DNA, 15 bp, Homo sapiens
tatttgcttgtcttt

SEQ ID NO: 792135 - DNA, 15 bp, Homo sapiens
atttgcttgtctttc

SEQ ID NO: 792136 - DNA, 15 bp, Homo sapiens
tttgcttgtctttct

SEQ ID NO: 792137 - DNA, 15 bp, Homo sapiens
ttgcttgtctttctg

SEQ ID NO: 792138 - DNA, 15 bp, Homo sapiens
tgcttgtctttctga

SEQ ID NO: 792139 - DNA, 15 bp, Homo sapiens
gcttgtctttctgaa

SEQ ID NO: 792140 - DNA, 15 bp, Homo sapiens
cttgtctttctgaaa

SEQ ID NO: 792141 - DNA, 15 bp, Homo sapiens
ttgtctttctgaaac

SEQ ID NO: 792142 - DNA, 15 bp, Homo sapiens
tgtctttctgaaact

SEQ ID NO: 792143 - DNA, 15 bp, Homo sapiens
gtctttctgaaactg

SEQ ID NO: 792144 - DNA, 15 bp, Homo sapiens
tctttctgaaactgt

SEQ ID NO: 792145 - DNA, 15 bp, Homo sapiens
ctttctgaaactgtc

SEQ ID NO: 792146 - DNA, 15 bp, Homo sapiens
tttctgaaactgtct

SEQ ID NO: 792147 - DNA, 15 bp, Homo sapiens
ttctgaaactgtctt

SEQ ID NO: 792148 - DNA, 15 bp, Homo sapiens
tctgaaactgtcttc

SEQ ID NO: 792149 - DNA, 15 bp, Homo sapiens
ctgaaactgtcttcc

SEQ ID NO: 792150 - DNA, 15 bp, Homo sapiens
tgaaactgtcttcca

SEQ ID NO: 792151 - DNA, 15 bp, Homo sapiens
gaaactgtcttccaa

SEQ ID NO: 792152 - DNA, 15 bp, Homo sapiens
aaactgtcttccaaa

SEQ ID NO: 792153 - DNA, 15 bp, Homo sapiens
aactgtcttccaaac

SEQ ID NO: 792154 - DNA, 15 bp, Homo sapiens
actgtcttccaaaca

SEQ ID NO: 792155 - DNA, 15 bp, Homo sapiens
ctgtcttccaaacat

SEQ ID NO: 792156 - DNA, 15 bp, Homo sapiens
tgtcttccaaacatg

SEQ ID NO: 792157 - DNA, 15 bp, Homo sapiens
gtcttccaaacatgg

SEQ ID NO: 792158 - DNA, 15 bp, Homo sapiens
tcttccaaacatggc

SEQ ID NO: 792159 - DNA, 15 bp, Homo sapiens
cttccaaacatggct

SEQ ID NO: 792160 - DNA, 15 bp, Homo sapiens
ttccaaacatggctt

SEQ ID NO: 792161 - DNA, 15 bp, Homo sapiens
tccaaacatggcttt

SEQ ID NO: 792162 - DNA, 15 bp, Homo sapiens
ccaaacatggctttc

SEQ ID NO: 792163 - DNA, 15 bp, Homo sapiens
caaacatggctttcc

SEQ ID NO: 792164 - DNA, 15 bp, Homo sapiens
aaacatggctttcca

SEQ ID NO: 792165 - DNA, 15 bp, Homo sapiens
aacatggctttccat

SEQ ID NO: 792166 - DNA, 15 bp, Homo sapiens
acatggctttccatc

SEQ ID NO: 792167 - DNA, 15 bp, Homo sapiens
catggctttccatct

SEQ ID NO: 792168 - DNA, 15 bp, Homo sapiens
atggctttccatctt

SEQ ID NO: 792169 - DNA, 15 bp, Homo sapiens
tggctttccatcttc

SEQ ID NO: 792170 - DNA, 15 bp, Homo sapiens
ggctttccatcttca

SEQ ID NO: 792171 - DNA, 15 bp, Homo sapiens
gctttccatcttcaa

SEQ ID NO: 792172 - DNA, 15 bp, Homo sapiens
ctttccatcttcaat

SEQ ID NO: 792173 - DNA, 15 bp, Homo sapiens
tttccatcttcaatc

SEQ ID NO: 792174 - DNA, 15 bp, Homo sapiens
ttccatcttcaatca

SEQ ID NO: 792175 - DNA, 15 bp, Homo sapiens
tccatcttcaatcaa

SEQ ID NO: 792176 - DNA, 15 bp, Homo sapiens
ccatcttcaatcaac

SEQ ID NO: 792177 - DNA, 15 bp, Homo sapiens
catcttcaatcaact

SEQ ID NO: 792178 - DNA, 15 bp, Homo sapiens
atcttcaatcaactt

SEQ ID NO: 792179 - DNA, 15 bp, Homo sapiens
tcttcaatcaacttg

SEQ ID NO: 792180 - DNA, 15 bp, Homo sapiens
cttcaatcaacttgt

SEQ ID NO: 792181 - DNA, 15 bp, Homo sapiens
ttcaatcaacttgta

SEQ ID NO: 792182 - DNA, 15 bp, Homo sapiens
tcaatcaacttgtat

SEQ ID NO: 792183 - DNA, 15 bp, Homo sapiens
caatcaacttgtatc

SEQ ID NO: 792184 - DNA, 15 bp, Homo sapiens
aatcaacttgtatct

SEQ ID NO: 792185 - DNA, 15 bp, Homo sapiens
atcaacttgtatctg

SEQ ID NO: 792186 - DNA, 15 bp, Homo sapiens
tcaacttgtatctga

SEQ ID NO: 792187 - DNA, 15 bp, Homo sapiens
caacttgtatctgat

SEQ ID NO: 792188 - DNA, 15 bp, Homo sapiens
aacttgtatctgatt

SEQ ID NO: 792189 - DNA, 15 bp, Homo sapiens
acttgtatctgattt

SEQ ID NO: 792190 - DNA, 15 bp, Homo sapiens
cttgtatctgatttt

SEQ ID NO: 792191 - DNA, 15 bp, Homo sapiens
ttgtatctgattttt

SEQ ID NO: 792192 - DNA, 15 bp, Homo sapiens
tgtatctgatttttt

SEQ ID NO: 792193 - DNA, 15 bp, Homo sapiens
gtatctgattttttt

SEQ ID NO: 792194 - DNA, 15 bp, Homo sapiens
tatctgattttttta

SEQ ID NO: 792195 - DNA, 15 bp, Homo sapiens
atctgatttttttaa

SEQ ID NO: 792196 - DNA, 15 bp, Homo sapiens
tctgatttttttaat

SEQ ID NO: 792197 - DNA, 15 bp, Homo sapiens
ctgatttttttaatc

SEQ ID NO: 792198 - DNA, 15 bp, Homo sapiens
tgatttttttaatca

SEQ ID NO: 792199 - DNA, 15 bp, Homo sapiens
gatttttttaatcac

SEQ ID NO: 792200 - DNA, 15 bp, Homo sapiens
atttttttaatcaca

SEQ ID NO: 792201 - DNA, 15 bp, Homo sapiens
tttttttaatcacaa

SEQ ID NO: 792202 - DNA, 15 bp, Homo sapiens
ttttttaatcacaaa

SEQ ID NO: 792203 - DNA, 15 bp, Homo sapiens
tttttaatcacaaag

SEQ ID NO: 792204 - DNA, 15 bp, Homo sapiens
ttttaatcacaaagg

SEQ ID NO: 792205 - DNA, 15 bp, Homo sapiens
tttaatcacaaaggg

SEQ ID NO: 792206 - DNA, 15 bp, Homo sapiens
ttaatcacaaagggg

SEQ ID NO: 792207 - DNA, 15 bp, Homo sapiens
taatcacaaagggga

SEQ ID NO: 792208 - DNA, 15 bp, Homo sapiens
aatcacaaaggggat

SEQ ID NO: 792209 - DNA, 15 bp, Homo sapiens
atcacaaaggggatt

SEQ ID NO: 792210 - DNA, 15 bp, Homo sapiens
tcacaaaggggattt

SEQ ID NO: 792211 - DNA, 15 bp, Homo sapiens
cacaaaggggatttg

SEQ ID NO: 792212 - DNA, 15 bp, Homo sapiens
acaaaggggatttga

SEQ ID NO: 792213 - DNA, 15 bp, Homo sapiens
caaaggggatttgat

SEQ ID NO: 792214 - DNA, 15 bp, Homo sapiens
aaaggggatttgatg

SEQ ID NO: 792215 - DNA, 15 bp, Homo sapiens
aaggggatttgatgt

SEQ ID NO: 792216 - DNA, 15 bp, Homo sapiens
aggggatttgatgta

SEQ ID NO: 792217 - DNA, 15 bp, Homo sapiens
ggggatttgatgtaa

SEQ ID NO: 792218 - DNA, 15 bp, Homo sapiens
gggatttgatgtaag

SEQ ID NO: 792219 - DNA, 15 bp, Homo sapiens
ggatttgatgtaaga

SEQ ID NO: 792220 - DNA, 15 bp, Homo sapiens
gatttgatgtaagat

SEQ ID NO: 792221 - DNA, 15 bp, Homo sapiens
atttgatgtaagatg

SEQ ID NO: 792222 - DNA, 15 bp, Homo sapiens
tttgatgtaagatgt

SEQ ID NO: 792223 - DNA, 15 bp, Homo sapiens
ttgatgtaagatgtt

SEQ ID NO: 792224 - DNA, 15 bp, Homo sapiens
tgatgtaagatgttc

SEQ ID NO: 792225 - DNA, 15 bp, Homo sapiens
gatgtaagatgttca

SEQ ID NO: 792226 - DNA, 15 bp, Homo sapiens
atgtaagatgttcat

SEQ ID NO: 792227 - DNA, 15 bp, Homo sapiens
tgtaagatgttcatt

SEQ ID NO: 792228 - DNA, 15 bp, Homo sapiens
gtaagatgttcattt

SEQ ID NO: 792229 - DNA, 15 bp, Homo sapiens
taagatgttcattta

SEQ ID NO: 792230 - DNA, 15 bp, Homo sapiens
aagatgttcatttaa

SEQ ID NO: 792231 - DNA, 15 bp, Homo sapiens
agatgttcatttaat

SEQ ID NO: 792232 - DNA, 15 bp, Homo sapiens
gatgttcatttaatt

SEQ ID NO: 792233 - DNA, 15 bp, Homo sapiens
atgttcatttaattt

SEQ ID NO: 792234 - DNA, 15 bp, Homo sapiens
tgttcatttaatttg

SEQ ID NO: 792235 - DNA, 15 bp, Homo sapiens
gttcatttaatttga

SEQ ID NO: 792236 - DNA, 15 bp, Homo sapiens
ttcatttaatttgag

SEQ ID NO: 792237 - DNA, 15 bp, Homo sapiens
tcatttaatttgaga

SEQ ID NO: 792238 - DNA, 15 bp, Homo sapiens
catttaatttgagat

SEQ ID NO: 792239 - DNA, 15 bp, Homo sapiens
atttaatttgagatt

SEQ ID NO: 792240 - DNA, 15 bp, Homo sapiens
tttaatttgagattt

SEQ ID NO: 792241 - DNA, 15 bp, Homo sapiens
ttaatttgagattta

SEQ ID NO: 792242 - DNA, 15 bp, Homo sapiens
taatttgagatttat

SEQ ID NO: 792243 - DNA, 15 bp, Homo sapiens
aatttgagatttatt

SEQ ID NO: 792244 - DNA, 15 bp, Homo sapiens
atttgagatttattt

SEQ ID NO: 792245 - DNA, 15 bp, Homo sapiens
tttgagatttattta

SEQ ID NO: 792246 - DNA, 15 bp, Homo sapiens
ttgagatttatttat

SEQ ID NO: 792247 - DNA, 15 bp, Homo sapiens
tgagatttatttatc

SEQ ID NO: 792248 - DNA, 15 bp, Homo sapiens
gagatttatttatct

SEQ ID NO: 792249 - DNA, 15 bp, Homo sapiens
agatttatttatctt

SEQ ID NO: 792250 - DNA, 15 bp, Homo sapiens
gatttatttatcttt

SEQ ID NO: 792251 - DNA, 15 bp, Homo sapiens
atttatttatctttc

SEQ ID NO: 792252 - DNA, 15 bp, Homo sapiens
tttatttatctttct

SEQ ID NO: 792253 - DNA, 15 bp, Homo sapiens
ttatttatctttctc

SEQ ID NO: 792254 - DNA, 15 bp, Homo sapiens
tatttatctttctct

SEQ ID NO: 792255 - DNA, 15 bp, Homo sapiens
atttatctttctctt

SEQ ID NO: 792256 - DNA, 15 bp, Homo sapiens
tttatctttctcttc

SEQ ID NO: 792257 - DNA, 15 bp, Homo sapiens
ttatctttctcttca

SEQ ID NO: 792258 - DNA, 15 bp, Homo sapiens
tatctttctcttcag

SEQ ID NO: 792259 - DNA, 15 bp, Homo sapiens
atctttctcttcagt

SEQ ID NO: 792260 - DNA, 15 bp, Homo sapiens
tctttctcttcagtc

SEQ ID NO: 792261 - DNA, 15 bp, Homo sapiens
ctttctcttcagtca

SEQ ID NO: 792262 - DNA, 15 bp, Homo sapiens
tttctcttcagtcat

SEQ ID NO: 792263 - DNA, 15 bp, Homo sapiens
ttctcttcagtcata

SEQ ID NO: 792264 - DNA, 15 bp, Homo sapiens
tctcttcagtcatac

SEQ ID NO: 792265 - DNA, 15 bp, Homo sapiens
ctcttcagtcataca

SEQ ID NO: 792266 - DNA, 15 bp, Homo sapiens
tcttcagtcatacat

SEQ ID NO: 792267 - DNA, 15 bp, Homo sapiens
cttcagtcatacatt

SEQ ID NO: 792268 - DNA, 15 bp, Homo sapiens
ttcagtcatacattt

SEQ ID NO: 792269 - DNA, 15 bp, Homo sapiens
tcagtcatacatttg

SEQ ID NO: 792270 - DNA, 15 bp, Homo sapiens
cagtcatacatttgc

SEQ ID NO: 792271 - DNA, 15 bp, Homo sapiens
agtcatacatttgct

SEQ ID NO: 792272 - DNA, 15 bp, Homo sapiens
gtcatacatttgcta

SEQ ID NO: 792273 - DNA, 15 bp, Homo sapiens
tcatacatttgctat

SEQ ID NO: 792274 - DNA, 15 bp, Homo sapiens
catacatttgctata

SEQ ID NO: 792275 - DNA, 15 bp, Homo sapiens
atacatttgctataa

SEQ ID NO: 792276 - DNA, 15 bp, Homo sapiens
tacatttgctataaa

SEQ ID NO: 792277 - DNA, 15 bp, Homo sapiens
acatttgctataaag

SEQ ID NO: 792278 - DNA, 15 bp, Homo sapiens
catttgctataaaga

SEQ ID NO: 792279 - DNA, 15 bp, Homo sapiens
atttgctataaagac

SEQ ID NO: 792280 - DNA, 15 bp, Homo sapiens
tttgctataaagaca

SEQ ID NO: 792281 - DNA, 15 bp, Homo sapiens
ttgctataaagacag

SEQ ID NO: 792282 - DNA, 15 bp, Homo sapiens
tgctataaagacagc

SEQ ID NO: 792283 - DNA, 15 bp, Homo sapiens
gctataaagacagcc

SEQ ID NO: 792284 - DNA, 15 bp, Homo sapiens
ctataaagacagcca

SEQ ID NO: 792285 - DNA, 15 bp, Homo sapiens
tataaagacagccat

SEQ ID NO: 792286 - DNA, 15 bp, Homo sapiens
ataaagacagccatg

SEQ ID NO: 792287 - DNA, 15 bp, Homo sapiens
taaagacagccatgt

SEQ ID NO: 792288 - DNA, 15 bp, Homo sapiens
aaagacagccatgtt

SEQ ID NO: 792289 - DNA, 15 bp, Homo sapiens
aagacagccatgttt

SEQ ID NO: 792290 - DNA, 15 bp, Homo sapiens
agacagccatgtttt

SEQ ID NO: 792291 - DNA, 15 bp, Homo sapiens
gacagccatgttttc

SEQ ID NO: 792292 - DNA, 15 bp, Homo sapiens
acagccatgttttca

SEQ ID NO: 792293 - DNA, 15 bp, Homo sapiens
cagccatgttttcaa

SEQ ID NO: 792294 - DNA, 15 bp, Homo sapiens
agccatgttttcaag

SEQ ID NO: 792295 - DNA, 15 bp, Homo sapiens
gccatgttttcaaga

SEQ ID NO: 792296 - DNA, 15 bp, Homo sapiens
ccatgttttcaagat

SEQ ID NO: 792297 - DNA, 15 bp, Homo sapiens
catgttttcaagatc

SEQ ID NO: 792298 - DNA, 15 bp, Homo sapiens
atgttttcaagatca

SEQ ID NO: 792299 - DNA, 15 bp, Homo sapiens
tgttttcaagatcat

SEQ ID NO: 792300 - DNA, 15 bp, Homo sapiens
gttttcaagatcatt

SEQ ID NO: 792301 - DNA, 15 bp, Homo sapiens
ttttcaagatcatta

SEQ ID NO: 792302 - DNA, 15 bp, Homo sapiens
tttcaagatcattaa

SEQ ID NO: 792303 - DNA, 15 bp, Homo sapiens
ttcaagatcattaag

SEQ ID NO: 792304 - DNA, 15 bp, Homo sapiens
tcaagatcattaagt

SEQ ID NO: 792305 - DNA, 15 bp, Homo sapiens
caagatcattaagtc

SEQ ID NO: 792306 - DNA, 15 bp, Homo sapiens
aagatcattaagtca

SEQ ID NO: 792307 - DNA, 15 bp, Homo sapiens
agatcattaagtcat

SEQ ID NO: 792308 - DNA, 15 bp, Homo sapiens
gatcattaagtcatg

SEQ ID NO: 792309 - DNA, 15 bp, Homo sapiens
atcattaagtcatga

SEQ ID NO: 792310 - DNA, 15 bp, Homo sapiens
tcattaagtcatgag

SEQ ID NO: 792311 - DNA, 15 bp, Homo sapiens
cattaagtcatgaga

SEQ ID NO: 792312 - DNA, 15 bp, Homo sapiens
attaagtcatgagaa

SEQ ID NO: 792313 - DNA, 15 bp, Homo sapiens
ttaagtcatgagaac

SEQ ID NO: 792314 - DNA, 15 bp, Homo sapiens
taagtcatgagaacc

SEQ ID NO: 792315 - DNA, 15 bp, Homo sapiens
aagtcatgagaacct

SEQ ID NO: 792316 - DNA, 15 bp, Homo sapiens
agtcatgagaacctt

SEQ ID NO: 792317 - DNA, 15 bp, Homo sapiens
gtcatgagaaccttc

SEQ ID NO: 792318 - DNA, 15 bp, Homo sapiens
tcatgagaaccttct

SEQ ID NO: 792319 - DNA, 15 bp, Homo sapiens
catgagaaccttctt

SEQ ID NO: 792320 - DNA, 15 bp, Homo sapiens
atgagaaccttcttt

SEQ ID NO: 792321 - DNA, 15 bp, Homo sapiens
tgagaaccttctttt

SEQ ID NO: 792322 - DNA, 15 bp, Homo sapiens
gagaaccttctttta

SEQ ID NO: 792323 - DNA, 15 bp, Homo sapiens
agaaccttcttttag

SEQ ID NO: 792324 - DNA, 15 bp, Homo sapiens
gaaccttcttttaga

SEQ ID NO: 792325 - DNA, 15 bp, Homo sapiens
aaccttcttttagaa

SEQ ID NO: 792326 - DNA, 15 bp, Homo sapiens
accttcttttagaag

SEQ ID NO: 792327 - DNA, 15 bp, Homo sapiens
ccttcttttagaagc

SEQ ID NO: 792328 - DNA, 15 bp, Homo sapiens
cttcttttagaagcc

SEQ ID NO: 792329 - DNA, 15 bp, Homo sapiens
ttcttttagaagccg

SEQ ID NO: 792330 - DNA, 15 bp, Homo sapiens
tcttttagaagccgt

SEQ ID NO: 792331 - DNA, 15 bp, Homo sapiens
cttttagaagccgtt

SEQ ID NO: 792332 - DNA, 15 bp, Homo sapiens
ttttagaagccgttg

SEQ ID NO: 792333 - DNA, 15 bp, Homo sapiens
tttagaagccgttgc

SEQ ID NO: 792334 - DNA, 15 bp, Homo sapiens
ttagaagccgttgca

SEQ ID NO: 792335 - DNA, 15 bp, Homo sapiens
tagaagccgttgcaa

SEQ ID NO: 792336 - DNA, 15 bp, Homo sapiens
agaagccgttgcaaa

SEQ ID NO: 792337 - DNA, 15 bp, Homo sapiens
gaagccgttgcaaaa

SEQ ID NO: 792338 - DNA, 15 bp, Homo sapiens
aagccgttgcaaaag

SEQ ID NO: 792339 - DNA, 15 bp, Homo sapiens
agccgttgcaaaagt

SEQ ID NO: 792340 - DNA, 15 bp, Homo sapiens
gccgttgcaaaagtt

SEQ ID NO: 792341 - DNA, 15 bp, Homo sapiens
ccgttgcaaaagttc

SEQ ID NO: 792342 - DNA, 15 bp, Homo sapiens
cgttgcaaaagttct

SEQ ID NO: 792343 - DNA, 15 bp, Homo sapiens
gttgcaaaagttctt

SEQ ID NO: 792344 - DNA, 15 bp, Homo sapiens
ttgcaaaagttctta

SEQ ID NO: 792345 - DNA, 15 bp, Homo sapiens
tgcaaaagttcttac

SEQ ID NO: 792346 - DNA, 15 bp, Homo sapiens
gcaaaagttcttaca

SEQ ID NO: 792347 - DNA, 15 bp, Homo sapiens
caaaagttcttacaa

SEQ ID NO: 792348 - DNA, 15 bp, Homo sapiens
aaaagttcttacaag

SEQ ID NO: 792349 - DNA, 15 bp, Homo sapiens
aaagttcttacaagc

SEQ ID NO: 792350 - DNA, 15 bp, Homo sapiens
aagttcttacaagct

SEQ ID NO: 792351 - DNA, 15 bp, Homo sapiens
agttcttacaagctt

SEQ ID NO: 792352 - DNA, 15 bp, Homo sapiens
gttcttacaagcttt

SEQ ID NO: 792353 - DNA, 15 bp, Homo sapiens
ttcttacaagctttg

SEQ ID NO: 792354 - DNA, 15 bp, Homo sapiens
tcttacaagctttgg

SEQ ID NO: 792355 - DNA, 15 bp, Homo sapiens
cttacaagctttgga

SEQ ID NO: 792356 - DNA, 15 bp, Homo sapiens
ttacaagctttggat

SEQ ID NO: 792357 - DNA, 15 bp, Homo sapiens
tacaagctttggatt

SEQ ID NO: 792358 - DNA, 15 bp, Homo sapiens
acaagctttggattg

SEQ ID NO: 792359 - DNA, 15 bp, Homo sapiens
caagctttggattgc

SEQ ID NO: 792360 - DNA, 15 bp, Homo sapiens
aagctttggattgcc

SEQ ID NO: 792361 - DNA, 15 bp, Homo sapiens
agctttggattgcct

SEQ ID NO: 792362 - DNA, 15 bp, Homo sapiens
gctttggattgcctt

SEQ ID NO: 792363 - DNA, 15 bp, Homo sapiens
ctttggattgccttt

SEQ ID NO: 792364 - DNA, 15 bp, Homo sapiens
tttggattgcctttc

SEQ ID NO: 792365 - DNA, 15 bp, Homo sapiens
ttggattgcctttca

SEQ ID NO: 792366 - DNA, 15 bp, Homo sapiens
tggattgcctttcaa

SEQ ID NO: 792367 - DNA, 15 bp, Homo sapiens
ggattgcctttcaaa

SEQ ID NO: 792368 - DNA, 15 bp, Homo sapiens
gattgcctttcaaag

SEQ ID NO: 792369 - DNA, 15 bp, Homo sapiens
attgcctttcaaaga

SEQ ID NO: 792370 - DNA, 15 bp, Homo sapiens
ttgcctttcaaagaa

SEQ ID NO: 792371 - DNA, 15 bp, Homo sapiens
tgcctttcaaagaag

SEQ ID NO: 792372 - DNA, 15 bp, Homo sapiens
gcctttcaaagaagt

SEQ ID NO: 792373 - DNA, 15 bp, Homo sapiens
cctttcaaagaagtt

SEQ ID NO: 792374 - DNA, 15 bp, Homo sapiens
ctttcaaagaagttt

SEQ ID NO: 792375 - DNA, 15 bp, Homo sapiens
tttcaaagaagttta

SEQ ID NO: 792376 - DNA, 15 bp, Homo sapiens
ttcaaagaagtttat

SEQ ID NO: 792377 - DNA, 15 bp, Homo sapiens
tcaaagaagtttata

SEQ ID NO: 792378 - DNA, 15 bp, Homo sapiens
caaagaagtttatag

SEQ ID NO: 792379 - DNA, 15 bp, Homo sapiens
aaagaagtttatagg

SEQ ID NO: 792380 - DNA, 15 bp, Homo sapiens
aagaagtttataggc

SEQ ID NO: 792381 - DNA, 15 bp, Homo sapiens
agaagtttataggcc

SEQ ID NO: 792382 - DNA, 15 bp, Homo sapiens
gaagtttataggcca

SEQ ID NO: 792383 - DNA, 15 bp, Homo sapiens
aagtttataggccac

SEQ ID NO: 792384 - DNA, 15 bp, Homo sapiens
agtttataggccacc

SEQ ID NO: 792385 - DNA, 15 bp, Homo sapiens
gtttataggccacct

SEQ ID NO: 792386 - DNA, 15 bp, Homo sapiens
tttataggccaccta

SEQ ID NO: 792387 - DNA, 15 bp, Homo sapiens
ttataggccacctac

SEQ ID NO: 792388 - DNA, 15 bp, Homo sapiens
tataggccacctacg

SEQ ID NO: 792389 - DNA, 15 bp, Homo sapiens
ataggccacctacgt

SEQ ID NO: 792390 - DNA, 15 bp, Homo sapiens
taggccacctacgtg

SEQ ID NO: 792391 - DNA, 15 bp, Homo sapiens
aggccacctacgtga

SEQ ID NO: 792392 - DNA, 15 bp, Homo sapiens
ggccacctacgtgaa

SEQ ID NO: 792393 - DNA, 15 bp, Homo sapiens
gccacctacgtgaaa

SEQ ID NO: 792394 - DNA, 15 bp, Homo sapiens
ccacctacgtgaaaa

SEQ ID NO: 792395 - DNA, 15 bp, Homo sapiens
cacctacgtgaaaac

SEQ ID NO: 792396 - DNA, 15 bp, Homo sapiens
acctacgtgaaaact

SEQ ID NO: 792397 - DNA, 15 bp, Homo sapiens
cctacgtgaaaactt

SEQ ID NO: 792398 - DNA, 15 bp, Homo sapiens
ctacgtgaaaactta

SEQ ID NO: 792399 - DNA, 15 bp, Homo sapiens
tacgtgaaaacttaa

SEQ ID NO: 792400 - DNA, 15 bp, Homo sapiens
acgtgaaaacttaag

SEQ ID NO: 792401 - DNA, 15 bp, Homo sapiens
cgtgaaaacttaagt

SEQ ID NO: 792402 - DNA, 15 bp, Homo sapiens
gtgaaaacttaagtc

SEQ ID NO: 792403 - DNA, 15 bp, Homo sapiens
tgaaaacttaagtcc

SEQ ID NO: 792404 - DNA, 15 bp, Homo sapiens
gaaaacttaagtccc

SEQ ID NO: 792405 - DNA, 15 bp, Homo sapiens
aaaacttaagtccca

SEQ ID NO: 792406 - DNA, 15 bp, Homo sapiens
aaacttaagtcccaa

SEQ ID NO: 792407 - DNA, 15 bp, Homo sapiens
aacttaagtcccaaa

SEQ ID NO: 792408 - DNA, 15 bp, Homo sapiens
acttaagtcccaaag

SEQ ID NO: 792409 - DNA, 15 bp, Homo sapiens
cttaagtcccaaaga

SEQ ID NO: 792410 - DNA, 15 bp, Homo sapiens
ttaagtcccaaagat

SEQ ID NO: 792411 - DNA, 15 bp, Homo sapiens
taagtcccaaagatt

SEQ ID NO: 792412 - DNA, 15 bp, Homo sapiens
aagtcccaaagatta

SEQ ID NO: 792413 - DNA, 15 bp, Homo sapiens
agtcccaaagattag

SEQ ID NO: 792414 - DNA, 15 bp, Homo sapiens
gtcccaaagattagg

SEQ ID NO: 792415 - DNA, 15 bp, Homo sapiens
tcccaaagattaggg

SEQ ID NO: 792416 - DNA, 15 bp, Homo sapiens
cccaaagattagggt

SEQ ID NO: 792417 - DNA, 15 bp, Homo sapiens
ccaaagattagggtg

SEQ ID NO: 792418 - DNA, 15 bp, Homo sapiens
caaagattagggtgg

SEQ ID NO: 792419 - DNA, 15 bp, Homo sapiens
aaagattagggtggg

SEQ ID NO: 792420 - DNA, 15 bp, Homo sapiens
aagattagggtggga

SEQ ID NO: 792421 - DNA, 15 bp, Homo sapiens
agattagggtgggag

SEQ ID NO: 792422 - DNA, 15 bp, Homo sapiens
gattagggtgggagt

SEQ ID NO: 792423 - DNA, 15 bp, Homo sapiens
attagggtgggagtg

SEQ ID NO: 792424 - DNA, 15 bp, Homo sapiens
ttagggtgggagtgt

SEQ ID NO: 792425 - DNA, 15 bp, Homo sapiens
tagggtgggagtgtg

SEQ ID NO: 792426 - DNA, 15 bp, Homo sapiens
agggtgggagtgtgg

SEQ ID NO: 792427 - DNA, 15 bp, Homo sapiens
gggtgggagtgtgga

SEQ ID NO: 792428 - DNA, 15 bp, Homo sapiens
ggtgggagtgtggaa

SEQ ID NO: 792429 - DNA, 15 bp, Homo sapiens
gtgggagtgtggaaa

SEQ ID NO: 792430 - DNA, 15 bp, Homo sapiens
tgggagtgtggaaaa

SEQ ID NO: 792431 - DNA, 15 bp, Homo sapiens
gggagtgtggaaaag

SEQ ID NO: 792432 - DNA, 15 bp, Homo sapiens
ggagtgtggaaaaga

SEQ ID NO: 792433 - DNA, 15 bp, Homo sapiens
gagtgtggaaaagaa

SEQ ID NO: 792434 - DNA, 15 bp, Homo sapiens
agtgtggaaaagaat

SEQ ID NO: 792435 - DNA, 15 bp, Homo sapiens
gtgtggaaaagaatt

SEQ ID NO: 792436 - DNA, 15 bp, Homo sapiens
tgtggaaaagaattc

SEQ ID NO: 792437 - DNA, 15 bp, Homo sapiens
gtggaaaagaattca

SEQ ID NO: 792438 - DNA, 15 bp, Homo sapiens
tggaaaagaattcat

SEQ ID NO: 792439 - DNA, 15 bp, Homo sapiens
ggaaaagaattcata

SEQ ID NO: 792440 - DNA, 15 bp, Homo sapiens
gaaaagaattcatat

SEQ ID NO: 792441 - DNA, 15 bp, Homo sapiens
aaaagaattcatatg

SEQ ID NO: 792442 - DNA, 15 bp, Homo sapiens
aaagaattcatatgt

SEQ ID NO: 792443 - DNA, 15 bp, Homo sapiens
aagaattcatatgtt

SEQ ID NO: 792444 - DNA, 15 bp, Homo sapiens
agaattcatatgttt

SEQ ID NO: 792445 - DNA, 15 bp, Homo sapiens
gaattcatatgtttc

SEQ ID NO: 792446 - DNA, 15 bp, Homo sapiens
aattcatatgtttct

SEQ ID NO: 792447 - DNA, 15 bp, Homo sapiens
attcatatgtttctt

SEQ ID NO: 792448 - DNA, 15 bp, Homo sapiens
ttcatatgtttctta

SEQ ID NO: 792449 - DNA, 15 bp, Homo sapiens
tcatatgtttcttat

SEQ ID NO: 792450 - DNA, 15 bp, Homo sapiens
catatgtttcttatt

SEQ ID NO: 792451 - DNA, 15 bp, Homo sapiens
atatgtttcttattc

SEQ ID NO: 792452 - DNA, 15 bp, Homo sapiens
tatgtttcttattca

SEQ ID NO: 792453 - DNA, 15 bp, Homo sapiens
atgtttcttattcat

SEQ ID NO: 792454 - DNA, 15 bp, Homo sapiens
tgtttcttattcatt

SEQ ID NO: 792455 - DNA, 15 bp, Homo sapiens
gtttcttattcattg

SEQ ID NO: 792456 - DNA, 15 bp, Homo sapiens
tttcttattcattgt

SEQ ID NO: 792457 - DNA, 15 bp, Homo sapiens
ttcttattcattgtc

SEQ ID NO: 792458 - DNA, 15 bp, Homo sapiens
tcttattcattgtca

SEQ ID NO: 792459 - DNA, 15 bp, Homo sapiens
cttattcattgtcat

SEQ ID NO: 792460 - DNA, 15 bp, Homo sapiens
ttattcattgtcatt

SEQ ID NO: 792461 - DNA, 15 bp, Homo sapiens
tattcattgtcattt

SEQ ID NO: 792462 - DNA, 15 bp, Homo sapiens
attcattgtcatttg

SEQ ID NO: 792463 - DNA, 15 bp, Homo sapiens
ttcattgtcatttgt

SEQ ID NO: 792464 - DNA, 15 bp, Homo sapiens
tcattgtcatttgtg

SEQ ID NO: 792465 - DNA, 15 bp, Homo sapiens
cattgtcatttgtgc

SEQ ID NO: 792466 - DNA, 15 bp, Homo sapiens
attgtcatttgtgca

SEQ ID NO: 792467 - DNA, 15 bp, Homo sapiens
ttgtcatttgtgcat

SEQ ID NO: 792468 - DNA, 15 bp, Homo sapiens
tgtcatttgtgcatt

SEQ ID NO: 792469 - DNA, 15 bp, Homo sapiens
gtcatttgtgcattt

SEQ ID NO: 792470 - DNA, 15 bp, Homo sapiens
tcatttgtgcatttc

SEQ ID NO: 792471 - DNA, 15 bp, Homo sapiens
catttgtgcatttca

SEQ ID NO: 792472 - DNA, 15 bp, Homo sapiens
atttgtgcatttcaa

SEQ ID NO: 792473 - DNA, 15 bp, Homo sapiens
tttgtgcatttcaat

SEQ ID NO: 792474 - DNA, 15 bp, Homo sapiens
ttgtgcatttcaatt

SEQ ID NO: 792475 - DNA, 15 bp, Homo sapiens
tgtgcatttcaattt

SEQ ID NO: 792476 - DNA, 15 bp, Homo sapiens
gtgcatttcaatttt

SEQ ID NO: 792477 - DNA, 15 bp, Homo sapiens
tgcatttcaatttta

SEQ ID NO: 792478 - DNA, 15 bp, Homo sapiens
gcatttcaattttag

SEQ ID NO: 792479 - DNA, 15 bp, Homo sapiens
catttcaattttagg

SEQ ID NO: 792480 - DNA, 15 bp, Homo sapiens
atttcaattttagga

SEQ ID NO: 792481 - DNA, 15 bp, Homo sapiens
tttcaattttaggag

SEQ ID NO: 792482 - DNA, 15 bp, Homo sapiens
ttcaattttaggaga

SEQ ID NO: 792483 - DNA, 15 bp, Homo sapiens
tcaattttaggagaa

SEQ ID NO: 792484 - DNA, 15 bp, Homo sapiens
caattttaggagaat

SEQ ID NO: 792485 - DNA, 15 bp, Homo sapiens
aattttaggagaatc

SEQ ID NO: 792486 - DNA, 15 bp, Homo sapiens
attttaggagaatct

SEQ ID NO: 792487 - DNA, 15 bp, Homo sapiens
ttttaggagaatctc

SEQ ID NO: 792488 - DNA, 15 bp, Homo sapiens
tttaggagaatctcg

SEQ ID NO: 792489 - DNA, 15 bp, Homo sapiens
ttaggagaatctcgt

SEQ ID NO: 792490 - DNA, 15 bp, Homo sapiens
taggagaatctcgta

SEQ ID NO: 792491 - DNA, 15 bp, Homo sapiens
aggagaatctcgtac

SEQ ID NO: 792492 - DNA, 15 bp, Homo sapiens
ggagaatctcgtaca

SEQ ID NO: 792493 - DNA, 15 bp, Homo sapiens
gagaatctcgtacag

SEQ ID NO: 792494 - DNA, 15 bp, Homo sapiens
agaatctcgtacagc

SEQ ID NO: 792495 - DNA, 15 bp, Homo sapiens
gaatctcgtacagca

SEQ ID NO: 792496 - DNA, 15 bp, Homo sapiens
aatctcgtacagcaa

SEQ ID NO: 792497 - DNA, 15 bp, Homo sapiens
atctcgtacagcaag

SEQ ID NO: 792498 - DNA, 15 bp, Homo sapiens
tctcgtacagcaagc

SEQ ID NO: 792499 - DNA, 15 bp, Homo sapiens
ctcgtacagcaagcg

SEQ ID NO: 792500 - DNA, 15 bp, Homo sapiens
tcgtacagcaagcga

SEQ ID NO: 792501 - DNA, 15 bp, Homo sapiens
cgtacagcaagcgaa

SEQ ID NO: 792502 - DNA, 15 bp, Homo sapiens
gtacagcaagcgaac

SEQ ID NO: 792503 - DNA, 15 bp, Homo sapiens
tacagcaagcgaaca

SEQ ID NO: 792504 - DNA, 15 bp, Homo sapiens
acagcaagcgaacac

SEQ ID NO: 792505 - DNA, 15 bp, Homo sapiens
cagcaagcgaacaca

SEQ ID NO: 792506 - DNA, 15 bp, Homo sapiens
agcaagcgaacacag

SEQ ID NO: 792507 - DNA, 15 bp, Homo sapiens
gcaagcgaacacagg

SEQ ID NO: 792508 - DNA, 15 bp, Homo sapiens
caagcgaacacaggt

SEQ ID NO: 792509 - DNA, 15 bp, Homo sapiens
aagcgaacacaggtc

SEQ ID NO: 792510 - DNA, 15 bp, Homo sapiens
agcgaacacaggtct

SEQ ID NO: 792511 - DNA, 15 bp, Homo sapiens
gcgaacacaggtctg

SEQ ID NO: 792512 - DNA, 15 bp, Homo sapiens
cgaacacaggtctga

SEQ ID NO: 792513 - DNA, 15 bp, Homo sapiens
gaacacaggtctgag

SEQ ID NO: 792514 - DNA, 15 bp, Homo sapiens
aacacaggtctgagc

SEQ ID NO: 792515 - DNA, 15 bp, Homo sapiens
acacaggtctgagca

SEQ ID NO: 792516 - DNA, 15 bp, Homo sapiens
cacaggtctgagcac

SEQ ID NO: 792517 - DNA, 15 bp, Homo sapiens
acaggtctgagcact

SEQ ID NO: 792518 - DNA, 15 bp, Homo sapiens
caggtctgagcacta

SEQ ID NO: 792519 - DNA, 15 bp, Homo sapiens
aggtctgagcactat

SEQ ID NO: 792520 - DNA, 15 bp, Homo sapiens
ggtctgagcactata

SEQ ID NO: 792521 - DNA, 15 bp, Homo sapiens
gtctgagcactataa

SEQ ID NO: 792522 - DNA, 15 bp, Homo sapiens
tctgagcactataag

SEQ ID NO: 792523 - DNA, 15 bp, Homo sapiens
ctgagcactataagg

SEQ ID NO: 792524 - DNA, 15 bp, Homo sapiens
tgagcactataaggt

SEQ ID NO: 792525 - DNA, 15 bp, Homo sapiens
gagcactataaggta

SEQ ID NO: 792526 - DNA, 15 bp, Homo sapiens
agcactataaggtac

SEQ ID NO: 792527 - DNA, 15 bp, Homo sapiens
gcactataaggtacc

SEQ ID NO: 792528 - DNA, 15 bp, Homo sapiens
cactataaggtacct

SEQ ID NO: 792529 - DNA, 15 bp, Homo sapiens
actataaggtacctt

SEQ ID NO: 792530 - DNA, 15 bp, Homo sapiens
ctataaggtaccttt

SEQ ID NO: 792531 - DNA, 15 bp, Homo sapiens
tataaggtacctttg

SEQ ID NO: 792532 - DNA, 15 bp, Homo sapiens
ataaggtacctttgg

SEQ ID NO: 792533 - DNA, 15 bp, Homo sapiens
taaggtacctttggg

SEQ ID NO: 792534 - DNA, 15 bp, Homo sapiens
aaggtacctttggga

SEQ ID NO: 792535 - DNA, 15 bp, Homo sapiens
aggtacctttgggag

SEQ ID NO: 792536 - DNA, 15 bp, Homo sapiens
ggtacctttgggagc

SEQ ID NO: 792537 - DNA, 15 bp, Homo sapiens
gtacctttgggagca

SEQ ID NO: 792538 - DNA, 15 bp, Homo sapiens
tacctttgggagcat

SEQ ID NO: 792539 - DNA, 15 bp, Homo sapiens
acctttgggagcatc

SEQ ID NO: 792540 - DNA, 15 bp, Homo sapiens
cctttgggagcatct

SEQ ID NO: 792541 - DNA, 15 bp, Homo sapiens
ctttgggagcatcta

SEQ ID NO: 792542 - DNA, 15 bp, Homo sapiens
tttgggagcatctag

SEQ ID NO: 792543 - DNA, 15 bp, Homo sapiens
ttgggagcatctagt

SEQ ID NO: 792544 - DNA, 15 bp, Homo sapiens
tgggagcatctagtt

SEQ ID NO: 792545 - DNA, 15 bp, Homo sapiens
gggagcatctagttc

SEQ ID NO: 792546 - DNA, 15 bp, Homo sapiens
ggagcatctagttct

SEQ ID NO: 792547 - DNA, 15 bp, Homo sapiens
gagcatctagttctg

SEQ ID NO: 792548 - DNA, 15 bp, Homo sapiens
agcatctagttctgc

SEQ ID NO: 792549 - DNA, 15 bp, Homo sapiens
gcatctagttctgcc

SEQ ID NO: 792550 - DNA, 15 bp, Homo sapiens
catctagttctgcct

SEQ ID NO: 792551 - DNA, 15 bp, Homo sapiens
atctagttctgcctg

SEQ ID NO: 792552 - DNA, 15 bp, Homo sapiens
tctagttctgcctgt

SEQ ID NO: 792553 - DNA, 15 bp, Homo sapiens
ctagttctgcctgtc

SEQ ID NO: 792554 - DNA, 15 bp, Homo sapiens
tagttctgcctgtct

SEQ ID NO: 792555 - DNA, 15 bp, Homo sapiens
agttctgcctgtctc

SEQ ID NO: 792556 - DNA, 15 bp, Homo sapiens
gttctgcctgtctct

SEQ ID NO: 792557 - DNA, 15 bp, Homo sapiens
ttctgcctgtctcta

SEQ ID NO: 792558 - DNA, 15 bp, Homo sapiens
tctgcctgtctctag

SEQ ID NO: 792559 - DNA, 15 bp, Homo sapiens
ctgcctgtctctagt

SEQ ID NO: 792560 - DNA, 15 bp, Homo sapiens
tgcctgtctctagtt

SEQ ID NO: 792561 - DNA, 15 bp, Homo sapiens
gcctgtctctagtta

SEQ ID NO: 792562 - DNA, 15 bp, Homo sapiens
cctgtctctagttag

SEQ ID NO: 792563 - DNA, 15 bp, Homo sapiens
ctgtctctagttagt

SEQ ID NO: 792564 - DNA, 15 bp, Homo sapiens
tgtctctagttagtg

SEQ ID NO: 792565 - DNA, 15 bp, Homo sapiens
gtctctagttagtga

SEQ ID NO: 792566 - DNA, 15 bp, Homo sapiens
tctctagttagtgat

SEQ ID NO: 792567 - DNA, 15 bp, Homo sapiens
ctctagttagtgatc

SEQ ID NO: 792568 - DNA, 15 bp, Homo sapiens
tctagttagtgatcc

SEQ ID NO: 792569 - DNA, 15 bp, Homo sapiens
ctagttagtgatcct

SEQ ID NO: 792570 - DNA, 15 bp, Homo sapiens
tagttagtgatcctt

SEQ ID NO: 792571 - DNA, 15 bp, Homo sapiens
agttagtgatccttg

SEQ ID NO: 792572 - DNA, 15 bp, Homo sapiens
gttagtgatccttgg

SEQ ID NO: 792573 - DNA, 15 bp, Homo sapiens
ttagtgatccttggg

SEQ ID NO: 792574 - DNA, 15 bp, Homo sapiens
tagtgatccttgggg

SEQ ID NO: 792575 - DNA, 15 bp, Homo sapiens
agtgatccttgggga

SEQ ID NO: 792576 - DNA, 15 bp, Homo sapiens
gtgatccttggggat

SEQ ID NO: 792577 - DNA, 15 bp, Homo sapiens
tgatccttggggata

SEQ ID NO: 792578 - DNA, 15 bp, Homo sapiens
gatccttggggatac

SEQ ID NO: 792579 - DNA, 15 bp, Homo sapiens
atccttggggatacc

SEQ ID NO: 792580 - DNA, 15 bp, Homo sapiens
tccttggggatacca

SEQ ID NO: 792581 - DNA, 15 bp, Homo sapiens
ccttggggataccag

SEQ ID NO: 792582 - DNA, 15 bp, Homo sapiens
cttggggataccaga

SEQ ID NO: 792583 - DNA, 15 bp, Homo sapiens
ttggggataccagaa

SEQ ID NO: 792584 - DNA, 15 bp, Homo sapiens
tggggataccagaag

SEQ ID NO: 792585 - DNA, 15 bp, Homo sapiens
ggggataccagaagg

SEQ ID NO: 792586 - DNA, 15 bp, Homo sapiens
gggataccagaaggc

SEQ ID NO: 792587 - DNA, 15 bp, Homo sapiens
ggataccagaaggca

SEQ ID NO: 792588 - DNA, 15 bp, Homo sapiens
gataccagaaggcag

SEQ ID NO: 792589 - DNA, 15 bp, Homo sapiens
ataccagaaggcagt

SEQ ID NO: 792590 - DNA, 15 bp, Homo sapiens
taccagaaggcagtc

SEQ ID NO: 792591 - DNA, 15 bp, Homo sapiens
accagaaggcagtca

SEQ ID NO: 792592 - DNA, 15 bp, Homo sapiens
ccagaaggcagtcat

SEQ ID NO: 792593 - DNA, 15 bp, Homo sapiens
cagaaggcagtcatg

SEQ ID NO: 792594 - DNA, 15 bp, Homo sapiens
agaaggcagtcatgg

SEQ ID NO: 792595 - DNA, 15 bp, Homo sapiens
gaaggcagtcatggg

SEQ ID NO: 792596 - DNA, 15 bp, Homo sapiens
aaggcagtcatgggt

SEQ ID NO: 792597 - DNA, 15 bp, Homo sapiens
aggcagtcatgggtg

SEQ ID NO: 792598 - DNA, 15 bp, Homo sapiens
ggcagtcatgggtgg

SEQ ID NO: 792599 - DNA, 15 bp, Homo sapiens
gcagtcatgggtggt

SEQ ID NO: 792600 - DNA, 15 bp, Homo sapiens
cagtcatgggtggtg

SEQ ID NO: 792601 - DNA, 15 bp, Homo sapiens
agtcatgggtggtgg

SEQ ID NO: 792602 - DNA, 15 bp, Homo sapiens
gtcatgggtggtggg

SEQ ID NO: 792603 - DNA, 15 bp, Homo sapiens
tcatgggtggtgggg

SEQ ID NO: 792604 - DNA, 15 bp, Homo sapiens
catgggtggtgggga

SEQ ID NO: 792605 - DNA, 15 bp, Homo sapiens
atgggtggtggggaa

SEQ ID NO: 792606 - DNA, 15 bp, Homo sapiens
tgggtggtggggaag

SEQ ID NO: 792607 - DNA, 15 bp, Homo sapiens
gggtggtggggaaga

SEQ ID NO: 792608 - DNA, 15 bp, Homo sapiens
ggtggtggggaagag

SEQ ID NO: 792609 - DNA, 15 bp, Homo sapiens
gtggtggggaagagg

SEQ ID NO: 792610 - DNA, 15 bp, Homo sapiens
tggtggggaagaggt

SEQ ID NO: 792611 - DNA, 15 bp, Homo sapiens
ggtggggaagaggtg

SEQ ID NO: 792612 - DNA, 15 bp, Homo sapiens
gtggggaagaggtgg

SEQ ID NO: 792613 - DNA, 15 bp, Homo sapiens
tggggaagaggtgga

SEQ ID NO: 792614 - DNA, 15 bp, Homo sapiens
ggggaagaggtggat

SEQ ID NO: 792615 - DNA, 15 bp, Homo sapiens
gggaagaggtggatc

SEQ ID NO: 792616 - DNA, 15 bp, Homo sapiens
ggaagaggtggatca

SEQ ID NO: 792617 - DNA, 15 bp, Homo sapiens
gaagaggtggatcag

SEQ ID NO: 792618 - DNA, 15 bp, Homo sapiens
aagaggtggatcagg

SEQ ID NO: 792619 - DNA, 15 bp, Homo sapiens
agaggtggatcaggt

SEQ ID NO: 792620 - DNA, 15 bp, Homo sapiens
gaggtggatcaggtc

SEQ ID NO: 792621 - DNA, 15 bp, Homo sapiens
aggtggatcaggtcc

SEQ ID NO: 792622 - DNA, 15 bp, Homo sapiens
ggtggatcaggtccc

SEQ ID NO: 792623 - DNA, 15 bp, Homo sapiens
gtggatcaggtccca

SEQ ID NO: 792624 - DNA, 15 bp, Homo sapiens
tggatcaggtcccag

SEQ ID NO: 792625 - DNA, 15 bp, Homo sapiens
ggatcaggtcccagc

SEQ ID NO: 792626 - DNA, 15 bp, Homo sapiens
gatcaggtcccagct

SEQ ID NO: 792627 - DNA, 15 bp, Homo sapiens
atcaggtcccagctc

SEQ ID NO: 792628 - DNA, 15 bp, Homo sapiens
tcaggtcccagctct

SEQ ID NO: 792629 - DNA, 15 bp, Homo sapiens
caggtcccagctctg

SEQ ID NO: 792630 - DNA, 15 bp, Homo sapiens
aggtcccagctctgc

SEQ ID NO: 792631 - DNA, 15 bp, Homo sapiens
ggtcccagctctgcc

SEQ ID NO: 792632 - DNA, 15 bp, Homo sapiens
gtcccagctctgcct

SEQ ID NO: 792633 - DNA, 15 bp, Homo sapiens
tcccagctctgcctt

SEQ ID NO: 792634 - DNA, 15 bp, Homo sapiens
cccagctctgccttt

SEQ ID NO: 792635 - DNA, 15 bp, Homo sapiens
ccagctctgcctttc

SEQ ID NO: 792636 - DNA, 15 bp, Homo sapiens
cagctctgcctttca

SEQ ID NO: 792637 - DNA, 15 bp, Homo sapiens
agctctgcctttcac

SEQ ID NO: 792638 - DNA, 15 bp, Homo sapiens
gctctgcctttcacc

SEQ ID NO: 792639 - DNA, 15 bp, Homo sapiens
ctctgcctttcacca

SEQ ID NO: 792640 - DNA, 15 bp, Homo sapiens
tctgcctttcaccaa

SEQ ID NO: 792641 - DNA, 15 bp, Homo sapiens
ctgcctttcaccaac

SEQ ID NO: 792642 - DNA, 15 bp, Homo sapiens
tgcctttcaccaact

SEQ ID NO: 792643 - DNA, 15 bp, Homo sapiens
gcctttcaccaactg

SEQ ID NO: 792644 - DNA, 15 bp, Homo sapiens
cctttcaccaactga

SEQ ID NO: 792645 - DNA, 15 bp, Homo sapiens
ctttcaccaactgag

SEQ ID NO: 792646 - DNA, 15 bp, Homo sapiens
tttcaccaactgagg

SEQ ID NO: 792647 - DNA, 15 bp, Homo sapiens
ttcaccaactgaggg

SEQ ID NO: 792648 - DNA, 15 bp, Homo sapiens
tcaccaactgaggga

SEQ ID NO: 792649 - DNA, 15 bp, Homo sapiens
caccaactgagggag

SEQ ID NO: 792650 - DNA, 15 bp, Homo sapiens
accaactgagggagc

SEQ ID NO: 792651 - DNA, 15 bp, Homo sapiens
ccaactgagggagct

SEQ ID NO: 792652 - DNA, 15 bp, Homo sapiens
caactgagggagctt

SEQ ID NO: 792653 - DNA, 15 bp, Homo sapiens
aactgagggagcttg

SEQ ID NO: 792654 - DNA, 15 bp, Homo sapiens
actgagggagcttga

SEQ ID NO: 792655 - DNA, 15 bp, Homo sapiens
ctgagggagcttgag

SEQ ID NO: 792656 - DNA, 15 bp, Homo sapiens
tgagggagcttgagc

SEQ ID NO: 792657 - DNA, 15 bp, Homo sapiens
gagggagcttgagca

SEQ ID NO: 792658 - DNA, 15 bp, Homo sapiens
agggagcttgagcaa

SEQ ID NO: 792659 - DNA, 15 bp, Homo sapiens
gggagcttgagcaaa

SEQ ID NO: 792660 - DNA, 15 bp, Homo sapiens
ggagcttgagcaaat

SEQ ID NO: 792661 - DNA, 15 bp, Homo sapiens
gagcttgagcaaatt

SEQ ID NO: 792662 - DNA, 15 bp, Homo sapiens
agcttgagcaaatta

SEQ ID NO: 792663 - DNA, 15 bp, Homo sapiens
gcttgagcaaattac

SEQ ID NO: 792664 - DNA, 15 bp, Homo sapiens
cttgagcaaattact

SEQ ID NO: 792665 - DNA, 15 bp, Homo sapiens
ttgagcaaattactt

SEQ ID NO: 792666 - DNA, 15 bp, Homo sapiens
tgagcaaattactta

SEQ ID NO: 792667 - DNA, 15 bp, Homo sapiens
gagcaaattacttaa

SEQ ID NO: 792668 - DNA, 15 bp, Homo sapiens
agcaaattacttaac

SEQ ID NO: 792669 - DNA, 15 bp, Homo sapiens
gcaaattacttaaca

SEQ ID NO: 792670 - DNA, 15 bp, Homo sapiens
caaattacttaacat

SEQ ID NO: 792671 - DNA, 15 bp, Homo sapiens
aaattacttaacatt

SEQ ID NO: 792672 - DNA, 15 bp, Homo sapiens
aattacttaacattc

SEQ ID NO: 792673 - DNA, 15 bp, Homo sapiens
attacttaacattcc

SEQ ID NO: 792674 - DNA, 15 bp, Homo sapiens
ttacttaacattcca

SEQ ID NO: 792675 - DNA, 15 bp, Homo sapiens
tacttaacattccaa

SEQ ID NO: 792676 - DNA, 15 bp, Homo sapiens
acttaacattccaag

SEQ ID NO: 792677 - DNA, 15 bp, Homo sapiens
cttaacattccaagc

SEQ ID NO: 792678 - DNA, 15 bp, Homo sapiens
ttaacattccaagcc

SEQ ID NO: 792679 - DNA, 15 bp, Homo sapiens
taacattccaagcct

SEQ ID NO: 792680 - DNA, 15 bp, Homo sapiens
aacattccaagcctt

SEQ ID NO: 792681 - DNA, 15 bp, Homo sapiens
acattccaagccttg

SEQ ID NO: 792682 - DNA, 15 bp, Homo sapiens
cattccaagccttgg

SEQ ID NO: 792683 - DNA, 15 bp, Homo sapiens
attccaagccttggt

SEQ ID NO: 792684 - DNA, 15 bp, Homo sapiens
ttccaagccttggtt

SEQ ID NO: 792685 - DNA, 15 bp, Homo sapiens
tccaagccttggttt

SEQ ID NO: 792686 - DNA, 15 bp, Homo sapiens
ccaagccttggtttc

SEQ ID NO: 792687 - DNA, 15 bp, Homo sapiens
caagccttggtttct

SEQ ID NO: 792688 - DNA, 15 bp, Homo sapiens
aagccttggtttctt

SEQ ID NO: 792689 - DNA, 15 bp, Homo sapiens
agccttggtttcttt

SEQ ID NO: 792690 - DNA, 15 bp, Homo sapiens
gccttggtttctttc

SEQ ID NO: 792691 - DNA, 15 bp, Homo sapiens
ccttggtttctttct

SEQ ID NO: 792692 - DNA, 15 bp, Homo sapiens
cttggtttctttctc

SEQ ID NO: 792693 - DNA, 15 bp, Homo sapiens
ttggtttctttctct

SEQ ID NO: 792694 - DNA, 15 bp, Homo sapiens
tggtttctttctctg

SEQ ID NO: 792695 - DNA, 15 bp, Homo sapiens
ggtttctttctctgg

SEQ ID NO: 792696 - DNA, 15 bp, Homo sapiens
gtttctttctctgga

SEQ ID NO: 792697 - DNA, 15 bp, Homo sapiens
tttctttctctggaa

SEQ ID NO: 792698 - DNA, 15 bp, Homo sapiens
ttctttctctggaaa

SEQ ID NO: 792699 - DNA, 15 bp, Homo sapiens
tctttctctggaaat

SEQ ID NO: 792700 - DNA, 15 bp, Homo sapiens
ctttctctggaaatg

SEQ ID NO: 792701 - DNA, 15 bp, Homo sapiens
tttctctggaaatga

SEQ ID NO: 792702 - DNA, 15 bp, Homo sapiens
ttctctggaaatgag

SEQ ID NO: 792703 - DNA, 15 bp, Homo sapiens
tctctggaaatgaga

SEQ ID NO: 792704 - DNA, 15 bp, Homo sapiens
ctctggaaatgagat

SEQ ID NO: 792705 - DNA, 15 bp, Homo sapiens
tctggaaatgagatc

SEQ ID NO: 792706 - DNA, 15 bp, Homo sapiens
ctggaaatgagatcg

SEQ ID NO: 792707 - DNA, 15 bp, Homo sapiens
tggaaatgagatcga

SEQ ID NO: 792708 - DNA, 15 bp, Homo sapiens
ggaaatgagatcgag

SEQ ID NO: 792709 - DNA, 15 bp, Homo sapiens
gaaatgagatcgaga

SEQ ID NO: 792710 - DNA, 15 bp, Homo sapiens
aaatgagatcgagac

SEQ ID NO: 792711 - DNA, 15 bp, Homo sapiens
aatgagatcgagact

SEQ ID NO: 792712 - DNA, 15 bp, Homo sapiens
atgagatcgagactt

SEQ ID NO: 792713 - DNA, 15 bp, Homo sapiens
tgagatcgagactta

SEQ ID NO: 792714 - DNA, 15 bp, Homo sapiens
gagatcgagacttag

SEQ ID NO: 792715 - DNA, 15 bp, Homo sapiens
agatcgagacttaga

SEQ ID NO: 792716 - DNA, 15 bp, Homo sapiens
gatcgagacttagaa

SEQ ID NO: 792717 - DNA, 15 bp, Homo sapiens
atcgagacttagaaa

SEQ ID NO: 792718 - DNA, 15 bp, Homo sapiens
tcgagacttagaaag

SEQ ID NO: 792719 - DNA, 15 bp, Homo sapiens
cgagacttagaaagg

SEQ ID NO: 792720 - DNA, 15 bp, Homo sapiens
gagacttagaaaggc

SEQ ID NO: 792721 - DNA, 15 bp, Homo sapiens
agacttagaaaggct

SEQ ID NO: 792722 - DNA, 15 bp, Homo sapiens
gacttagaaaggcta

SEQ ID NO: 792723 - DNA, 15 bp, Homo sapiens
acttagaaaggctaa

SEQ ID NO: 792724 - DNA, 15 bp, Homo sapiens
cttagaaaggctaag

SEQ ID NO: 792725 - DNA, 15 bp, Homo sapiens
ttagaaaggctaagt

SEQ ID NO: 792726 - DNA, 15 bp, Homo sapiens
tagaaaggctaagta

SEQ ID NO: 792727 - DNA, 15 bp, Homo sapiens
agaaaggctaagtaa

SEQ ID NO: 792728 - DNA, 15 bp, Homo sapiens
gaaaggctaagtaac

SEQ ID NO: 792729 - DNA, 15 bp, Homo sapiens
aaaggctaagtaact

SEQ ID NO: 792730 - DNA, 15 bp, Homo sapiens
aaggctaagtaactt

SEQ ID NO: 792731 - DNA, 15 bp, Homo sapiens
aggctaagtaacttg

SEQ ID NO: 792732 - DNA, 15 bp, Homo sapiens
ggctaagtaacttgc

SEQ ID NO: 792733 - DNA, 15 bp, Homo sapiens
gctaagtaacttgcc

SEQ ID NO: 792734 - DNA, 15 bp, Homo sapiens
ctaagtaacttgccc

SEQ ID NO: 792735 - DNA, 15 bp, Homo sapiens
taagtaacttgccca

SEQ ID NO: 792736 - DNA, 15 bp, Homo sapiens
aagtaacttgcccaa

SEQ ID NO: 792737 - DNA, 15 bp, Homo sapiens
agtaacttgcccaag

SEQ ID NO: 792738 - DNA, 15 bp, Homo sapiens
gtaacttgcccaaga

SEQ ID NO: 792739 - DNA, 15 bp, Homo sapiens
taacttgcccaagat

SEQ ID NO: 792740 - DNA, 15 bp, Homo sapiens
aacttgcccaagatc

SEQ ID NO: 792741 - DNA, 15 bp, Homo sapiens
acttgcccaagatca

SEQ ID NO: 792742 - DNA, 15 bp, Homo sapiens
cttgcccaagatcac

SEQ ID NO: 792743 - DNA, 15 bp, Homo sapiens
ttgcccaagatcaca

SEQ ID NO: 792744 - DNA, 15 bp, Homo sapiens
tgcccaagatcacac

SEQ ID NO: 792745 - DNA, 15 bp, Homo sapiens
gcccaagatcacaca

SEQ ID NO: 792746 - DNA, 15 bp, Homo sapiens
cccaagatcacacag

SEQ ID NO: 792747 - DNA, 15 bp, Homo sapiens
ccaagatcacacagc

SEQ ID NO: 792748 - DNA, 15 bp, Homo sapiens
caagatcacacagcg

SEQ ID NO: 792749 - DNA, 15 bp, Homo sapiens
aagatcacacagcgg

SEQ ID NO: 792750 - DNA, 15 bp, Homo sapiens
agatcacacagcggg

SEQ ID NO: 792751 - DNA, 15 bp, Homo sapiens
gatcacacagcgggt

SEQ ID NO: 792752 - DNA, 15 bp, Homo sapiens
atcacacagcgggta

SEQ ID NO: 792753 - DNA, 15 bp, Homo sapiens
tcacacagcgggtaa

SEQ ID NO: 792754 - DNA, 15 bp, Homo sapiens
cacacagcgggtaat

SEQ ID NO: 792755 - DNA, 15 bp, Homo sapiens
acacagcgggtaatt

SEQ ID NO: 792756 - DNA, 15 bp, Homo sapiens
cacagcgggtaattt

SEQ ID NO: 792757 - DNA, 15 bp, Homo sapiens
acagcgggtaatttg

SEQ ID NO: 792758 - DNA, 15 bp, Homo sapiens
cagcgggtaatttgt

SEQ ID NO: 792759 - DNA, 15 bp, Homo sapiens
agcgggtaatttgtt

SEQ ID NO: 792760 - DNA, 15 bp, Homo sapiens
gcgggtaatttgttg

SEQ ID NO: 792761 - DNA, 15 bp, Homo sapiens
cgggtaatttgttgt

SEQ ID NO: 792762 - DNA, 15 bp, Homo sapiens
gggtaatttgttgtg

SEQ ID NO: 792763 - DNA, 15 bp, Homo sapiens
ggtaatttgttgtga

SEQ ID NO: 792764 - DNA, 15 bp, Homo sapiens
gtaatttgttgtgag

SEQ ID NO: 792765 - DNA, 15 bp, Homo sapiens
taatttgttgtgagg

SEQ ID NO: 792766 - DNA, 15 bp, Homo sapiens
aatttgttgtgagga

SEQ ID NO: 792767 - DNA, 15 bp, Homo sapiens
atttgttgtgaggat

SEQ ID NO: 792768 - DNA, 15 bp, Homo sapiens
tttgttgtgaggatt

SEQ ID NO: 792769 - DNA, 15 bp, Homo sapiens
ttgttgtgaggatta

SEQ ID NO: 792770 - DNA, 15 bp, Homo sapiens
tgttgtgaggattaa

SEQ ID NO: 792771 - DNA, 15 bp, Homo sapiens
gttgtgaggattaaa

SEQ ID NO: 792772 - DNA, 15 bp, Homo sapiens
ttgtgaggattaaag

SEQ ID NO: 792773 - DNA, 15 bp, Homo sapiens
tgtgaggattaaagt

SEQ ID NO: 792774 - DNA, 15 bp, Homo sapiens
gtgaggattaaagta

SEQ ID NO: 792775 - DNA, 15 bp, Homo sapiens
tgaggattaaagtag

SEQ ID NO: 792776 - DNA, 15 bp, Homo sapiens
gaggattaaagtagt

SEQ ID NO: 792777 - DNA, 15 bp, Homo sapiens
aggattaaagtagtt

SEQ ID NO: 792778 - DNA, 15 bp, Homo sapiens
ggattaaagtagttt

SEQ ID NO: 792779 - DNA, 15 bp, Homo sapiens
gattaaagtagttta

SEQ ID NO: 792780 - DNA, 15 bp, Homo sapiens
attaaagtagtttaa

SEQ ID NO: 792781 - DNA, 15 bp, Homo sapiens
ttaaagtagtttaat

SEQ ID NO: 792782 - DNA, 15 bp, Homo sapiens
taaagtagtttaatc

SEQ ID NO: 792783 - DNA, 15 bp, Homo sapiens
aaagtagtttaatct

SEQ ID NO: 792784 - DNA, 15 bp, Homo sapiens
aagtagtttaatcta

SEQ ID NO: 792785 - DNA, 15 bp, Homo sapiens
agtagtttaatctat

SEQ ID NO: 792786 - DNA, 15 bp, Homo sapiens
gtagtttaatctatg

SEQ ID NO: 792787 - DNA, 15 bp, Homo sapiens
tagtttaatctatgt

SEQ ID NO: 792788 - DNA, 15 bp, Homo sapiens
agtttaatctatgtt

SEQ ID NO: 792789 - DNA, 15 bp, Homo sapiens
gtttaatctatgtta

SEQ ID NO: 792790 - DNA, 15 bp, Homo sapiens
tttaatctatgttaa

SEQ ID NO: 792791 - DNA, 15 bp, Homo sapiens
ttaatctatgttaag

SEQ ID NO: 792792 - DNA, 15 bp, Homo sapiens
taatctatgttaagt

SEQ ID NO: 792793 - DNA, 15 bp, Homo sapiens
aatctatgttaagtg

SEQ ID NO: 792794 - DNA, 15 bp, Homo sapiens
atctatgttaagtgt

SEQ ID NO: 792795 - DNA, 15 bp, Homo sapiens
tctatgttaagtgtc

SEQ ID NO: 792796 - DNA, 15 bp, Homo sapiens
ctatgttaagtgtca

SEQ ID NO: 792797 - DNA, 15 bp, Homo sapiens
tatgttaagtgtcaa

SEQ ID NO: 792798 - DNA, 15 bp, Homo sapiens
atgttaagtgtcaag

SEQ ID NO: 792799 - DNA, 15 bp, Homo sapiens
tgttaagtgtcaaga

SEQ ID NO: 792800 - DNA, 15 bp, Homo sapiens
gttaagtgtcaagaa

SEQ ID NO: 792801 - DNA, 15 bp, Homo sapiens
ttaagtgtcaagaac

SEQ ID NO: 792802 - DNA, 15 bp, Homo sapiens
taagtgtcaagaaca

SEQ ID NO: 792803 - DNA, 15 bp, Homo sapiens
aagtgtcaagaacag

SEQ ID NO: 792804 - DNA, 15 bp, Homo sapiens
agtgtcaagaacagt

SEQ ID NO: 792805 - DNA, 15 bp, Homo sapiens
gtgtcaagaacagtg

SEQ ID NO: 792806 - DNA, 15 bp, Homo sapiens
tgtcaagaacagtgt

SEQ ID NO: 792807 - DNA, 15 bp, Homo sapiens
gtcaagaacagtgtg

SEQ ID NO: 792808 - DNA, 15 bp, Homo sapiens
tcaagaacagtgtgg

SEQ ID NO: 792809 - DNA, 15 bp, Homo sapiens
caagaacagtgtggg

SEQ ID NO: 792810 - DNA, 15 bp, Homo sapiens
aagaacagtgtggga

SEQ ID NO: 792811 - DNA, 15 bp, Homo sapiens
agaacagtgtgggac

SEQ ID NO: 792812 - DNA, 15 bp, Homo sapiens
gaacagtgtgggaca

SEQ ID NO: 792813 - DNA, 15 bp, Homo sapiens
aacagtgtgggacac

SEQ ID NO: 792814 - DNA, 15 bp, Homo sapiens
acagtgtgggacaca

SEQ ID NO: 792815 - DNA, 15 bp, Homo sapiens
cagtgtgggacacac

SEQ ID NO: 792816 - DNA, 15 bp, Homo sapiens
agtgtgggacacaca

SEQ ID NO: 792817 - DNA, 15 bp, Homo sapiens
gtgtgggacacacag

SEQ ID NO: 792818 - DNA, 15 bp, Homo sapiens
tgtgggacacacagt

SEQ ID NO: 792819 - DNA, 15 bp, Homo sapiens
gtgggacacacagta

SEQ ID NO: 792820 - DNA, 15 bp, Homo sapiens
tgggacacacagtaa

SEQ ID NO: 792821 - DNA, 15 bp, Homo sapiens
gggacacacagtaag

SEQ ID NO: 792822 - DNA, 15 bp, Homo sapiens
ggacacacagtaaga

SEQ ID NO: 792823 - DNA, 15 bp, Homo sapiens
gacacacagtaagag

SEQ ID NO: 792824 - DNA, 15 bp, Homo sapiens
acacacagtaagagt

SEQ ID NO: 792825 - DNA, 15 bp, Homo sapiens
cacacagtaagagtt

SEQ ID NO: 792826 - DNA, 15 bp, Homo sapiens
acacagtaagagttc

SEQ ID NO: 792827 - DNA, 15 bp, Homo sapiens
cacagtaagagttca

SEQ ID NO: 792828 - DNA, 15 bp, Homo sapiens
acagtaagagttcag

SEQ ID NO: 792829 - DNA, 15 bp, Homo sapiens
cagtaagagttcaga

SEQ ID NO: 792830 - DNA, 15 bp, Homo sapiens
agtaagagttcagat

SEQ ID NO: 792831 - DNA, 15 bp, Homo sapiens
gtaagagttcagata

SEQ ID NO: 792832 - DNA, 15 bp, Homo sapiens
taagagttcagatat

SEQ ID NO: 792833 - DNA, 15 bp, Homo sapiens
aagagttcagatatt

SEQ ID NO: 792834 - DNA, 15 bp, Homo sapiens
agagttcagatatta

SEQ ID NO: 792835 - DNA, 15 bp, Homo sapiens
gagttcagatattat

SEQ ID NO: 792836 - DNA, 15 bp, Homo sapiens
agttcagatattatt

SEQ ID NO: 792837 - DNA, 15 bp, Homo sapiens
gttcagatattattc

SEQ ID NO: 792838 - DNA, 15 bp, Homo sapiens
ttcagatattattcg

SEQ ID NO: 792839 - DNA, 15 bp, Homo sapiens
tcagatattattcgc

SEQ ID NO: 792840 - DNA, 15 bp, Homo sapiens
cagatattattcgct

SEQ ID NO: 792841 - DNA, 15 bp, Homo sapiens
agatattattcgcta

SEQ ID NO: 792842 - DNA, 15 bp, Homo sapiens
gatattattcgctat

SEQ ID NO: 792843 - DNA, 15 bp, Homo sapiens
atattattcgctatt

SEQ ID NO: 792844 - DNA, 15 bp, Homo sapiens
tattattcgctatta

SEQ ID NO: 792845 - DNA, 15 bp, Homo sapiens
attattcgctattat

SEQ ID NO: 792846 - DNA, 15 bp, Homo sapiens
ttattcgctattata

SEQ ID NO: 792847 - DNA, 15 bp, Homo sapiens
tattcgctattataa

SEQ ID NO: 792848 - DNA, 15 bp, Homo sapiens
attcgctattataaa

SEQ ID NO: 792849 - DNA, 15 bp, Homo sapiens
ttcgctattataaag

SEQ ID NO: 792850 - DNA, 15 bp, Homo sapiens
tcgctattataaaga

SEQ ID NO: 792851 - DNA, 15 bp, Homo sapiens
cgctattataaagag

SEQ ID NO: 792852 - DNA, 15 bp, Homo sapiens
gctattataaagagc

SEQ ID NO: 792853 - DNA, 15 bp, Homo sapiens
ctattataaagagcc

SEQ ID NO: 792854 - DNA, 15 bp, Homo sapiens
tattataaagagcca

SEQ ID NO: 792855 - DNA, 15 bp, Homo sapiens
attataaagagccaa

SEQ ID NO: 792856 - DNA, 15 bp, Homo sapiens
ttataaagagccaaa

SEQ ID NO: 792857 - DNA, 15 bp, Homo sapiens
tataaagagccaaaa

SEQ ID NO: 792858 - DNA, 15 bp, Homo sapiens
ataaagagccaaaag

SEQ ID NO: 792859 - DNA, 15 bp, Homo sapiens
taaagagccaaaagt

SEQ ID NO: 792860 - DNA, 15 bp, Homo sapiens
aaagagccaaaagtg

SEQ ID NO: 792861 - DNA, 15 bp, Homo sapiens
aagagccaaaagtgt

SEQ ID NO: 792862 - DNA, 15 bp, Homo sapiens
agagccaaaagtgtc

SEQ ID NO: 792863 - DNA, 15 bp, Homo sapiens
gagccaaaagtgtca

SEQ ID NO: 792864 - DNA, 15 bp, Homo sapiens
agccaaaagtgtcac

SEQ ID NO: 792865 - DNA, 15 bp, Homo sapiens
gccaaaagtgtcact

SEQ ID NO: 792866 - DNA, 15 bp, Homo sapiens
ccaaaagtgtcactc

SEQ ID NO: 792867 - DNA, 15 bp, Homo sapiens
caaaagtgtcactcc

SEQ ID NO: 792868 - DNA, 15 bp, Homo sapiens
aaaagtgtcactcct

SEQ ID NO: 792869 - DNA, 15 bp, Homo sapiens
aaagtgtcactccta

SEQ ID NO: 792870 - DNA, 15 bp, Homo sapiens
aagtgtcactcctaa

SEQ ID NO: 792871 - DNA, 15 bp, Homo sapiens
agtgtcactcctaaa

SEQ ID NO: 792872 - DNA, 15 bp, Homo sapiens
gtgtcactcctaaac

SEQ ID NO: 792873 - DNA, 15 bp, Homo sapiens
tgtcactcctaaact

SEQ ID NO: 792874 - DNA, 15 bp, Homo sapiens
gtcactcctaaactt

SEQ ID NO: 792875 - DNA, 15 bp, Homo sapiens
tcactcctaaacttc

SEQ ID NO: 792876 - DNA, 15 bp, Homo sapiens
cactcctaaacttca

SEQ ID NO: 792877 - DNA, 15 bp, Homo sapiens
actcctaaacttcac

SEQ ID NO: 792878 - DNA, 15 bp, Homo sapiens
ctcctaaacttcacc

SEQ ID NO: 792879 - DNA, 15 bp, Homo sapiens
tcctaaacttcacca

SEQ ID NO: 792880 - DNA, 15 bp, Homo sapiens
cctaaacttcaccac

SEQ ID NO: 792881 - DNA, 15 bp, Homo sapiens
ctaaacttcaccact

SEQ ID NO: 792882 - DNA, 15 bp, Homo sapiens
taaacttcaccacta

SEQ ID NO: 792883 - DNA, 15 bp, Homo sapiens
aaacttcaccactat

SEQ ID NO: 792884 - DNA, 15 bp, Homo sapiens
aacttcaccactatt

SEQ ID NO: 792885 - DNA, 15 bp, Homo sapiens
acttcaccactattc

SEQ ID NO: 792886 - DNA, 15 bp, Homo sapiens
cttcaccactattct

SEQ ID NO: 792887 - DNA, 15 bp, Homo sapiens
ttcaccactattctt

SEQ ID NO: 792888 - DNA, 15 bp, Homo sapiens
tcaccactattcttc

SEQ ID NO: 792889 - DNA, 15 bp, Homo sapiens
caccactattcttca

SEQ ID NO: 792890 - DNA, 15 bp, Homo sapiens
accactattcttcat

SEQ ID NO: 792891 - DNA, 15 bp, Homo sapiens
ccactattcttcatt

SEQ ID NO: 792892 - DNA, 15 bp, Homo sapiens
cactattcttcatta

SEQ ID NO: 792893 - DNA, 15 bp, Homo sapiens
actattcttcattag

SEQ ID NO: 792894 - DNA, 15 bp, Homo sapiens
ctattcttcattagt

SEQ ID NO: 792895 - DNA, 15 bp, Homo sapiens
tattcttcattagtc

SEQ ID NO: 792896 - DNA, 15 bp, Homo sapiens
attcttcattagtct

SEQ ID NO: 792897 - DNA, 15 bp, Homo sapiens
ttcttcattagtctt

SEQ ID NO: 792898 - DNA, 15 bp, Homo sapiens
tcttcattagtcttg

SEQ ID NO: 792899 - DNA, 15 bp, Homo sapiens
cttcattagtcttgt

SEQ ID NO: 792900 - DNA, 15 bp, Homo sapiens
ttcattagtcttgtt

SEQ ID NO: 792901 - DNA, 15 bp, Homo sapiens
tcattagtcttgttc

SEQ ID NO: 792902 - DNA, 15 bp, Homo sapiens
cattagtcttgttca

SEQ ID NO: 792903 - DNA, 15 bp, Homo sapiens
attagtcttgttcaa

SEQ ID NO: 792904 - DNA, 15 bp, Homo sapiens
ttagtcttgttcaaa

SEQ ID NO: 792905 - DNA, 15 bp, Homo sapiens
tagtcttgttcaaat

SEQ ID NO: 792906 - DNA, 15 bp, Homo sapiens
agtcttgttcaaatg

SEQ ID NO: 792907 - DNA, 15 bp, Homo sapiens
gtcttgttcaaatgg

SEQ ID NO: 792908 - DNA, 15 bp, Homo sapiens
tcttgttcaaatgga

SEQ ID NO: 792909 - DNA, 15 bp, Homo sapiens
cttgttcaaatggaa

SEQ ID NO: 792910 - DNA, 15 bp, Homo sapiens
ttgttcaaatggaaa

SEQ ID NO: 792911 - DNA, 15 bp, Homo sapiens
tgttcaaatggaaaa

SEQ ID NO: 792912 - DNA, 15 bp, Homo sapiens
gttcaaatggaaaac

SEQ ID NO: 792913 - DNA, 15 bp, Homo sapiens
ttcaaatggaaaact

SEQ ID NO: 792914 - DNA, 15 bp, Homo sapiens
tcaaatggaaaacta

SEQ ID NO: 792915 - DNA, 15 bp, Homo sapiens
caaatggaaaactat

SEQ ID NO: 792916 - DNA, 15 bp, Homo sapiens
aaatggaaaactata

SEQ ID NO: 792917 - DNA, 15 bp, Homo sapiens
aatggaaaactatat

SEQ ID NO: 792918 - DNA, 15 bp, Homo sapiens
atggaaaactatata

SEQ ID NO: 792919 - DNA, 15 bp, Homo sapiens
tggaaaactatatat

SEQ ID NO: 792920 - DNA, 15 bp, Homo sapiens
ggaaaactatatata

SEQ ID NO: 792921 - DNA, 15 bp, Homo sapiens
gaaaactatatataa

SEQ ID NO: 792922 - DNA, 15 bp, Homo sapiens
aaaactatatataaa

SEQ ID NO: 792923 - DNA, 15 bp, Homo sapiens
aaactatatataaaa

SEQ ID NO: 792924 - DNA, 15 bp, Homo sapiens
aactatatataaaat

SEQ ID NO: 792925 - DNA, 15 bp, Homo sapiens
actatatataaaatg

SEQ ID NO: 792926 - DNA, 15 bp, Homo sapiens
ctatatataaaatgt

SEQ ID NO: 792927 - DNA, 15 bp, Homo sapiens
tatatataaaatgtc

SEQ ID NO: 792928 - DNA, 15 bp, Homo sapiens
atatataaaatgtcg

SEQ ID NO: 792929 - DNA, 15 bp, Homo sapiens
tatataaaatgtcgc

SEQ ID NO: 792930 - DNA, 15 bp, Homo sapiens
atataaaatgtcgca

SEQ ID NO: 792931 - DNA, 15 bp, Homo sapiens
tataaaatgtcgcaa

SEQ ID NO: 792932 - DNA, 15 bp, Homo sapiens
ataaaatgtcgcaat

SEQ ID NO: 792933 - DNA, 15 bp, Homo sapiens
taaaatgtcgcaatg

SEQ ID NO: 792934 - DNA, 15 bp, Homo sapiens
aaaatgtcgcaatga

SEQ ID NO: 792935 - DNA, 15 bp, Homo sapiens
aaatgtcgcaatgag

SEQ ID NO: 792936 - DNA, 15 bp, Homo sapiens
aatgtcgcaatgaga

SEQ ID NO: 792937 - DNA, 15 bp, Homo sapiens
atgtcgcaatgagag

SEQ ID NO: 792938 - DNA, 15 bp, Homo sapiens
tgtcgcaatgagaga

SEQ ID NO: 792939 - DNA, 15 bp, Homo sapiens
gtcgcaatgagagaa

SEQ ID NO: 792940 - DNA, 15 bp, Homo sapiens
tcgcaatgagagaat

SEQ ID NO: 792941 - DNA, 15 bp, Homo sapiens
cgcaatgagagaata

SEQ ID NO: 792942 - DNA, 15 bp, Homo sapiens
gcaatgagagaataa

SEQ ID NO: 792943 - DNA, 15 bp, Homo sapiens
caatgagagaataag

SEQ ID NO: 792944 - DNA, 15 bp, Homo sapiens
aatgagagaataaga

SEQ ID NO: 792945 - DNA, 15 bp, Homo sapiens
atgagagaataagag

SEQ ID NO: 792946 - DNA, 15 bp, Homo sapiens
tgagagaataagagc

SEQ ID NO: 792947 - DNA, 15 bp, Homo sapiens
gagagaataagagcc

SEQ ID NO: 792948 - DNA, 15 bp, Homo sapiens
agagaataagagccc

SEQ ID NO: 792949 - DNA, 15 bp, Homo sapiens
gagaataagagccca

SEQ ID NO: 792950 - DNA, 15 bp, Homo sapiens
agaataagagcccag

SEQ ID NO: 792951 - DNA, 15 bp, Homo sapiens
gaataagagcccagt

SEQ ID NO: 792952 - DNA, 15 bp, Homo sapiens
aataagagcccagtc

SEQ ID NO: 792953 - DNA, 15 bp, Homo sapiens
ataagagcccagtct

SEQ ID NO: 792954 - DNA, 15 bp, Homo sapiens
taagagcccagtctt

SEQ ID NO: 792955 - DNA, 15 bp, Homo sapiens
aagagcccagtctta

SEQ ID NO: 792956 - DNA, 15 bp, Homo sapiens
agagcccagtcttat

SEQ ID NO: 792957 - DNA, 15 bp, Homo sapiens
gagcccagtcttatg

SEQ ID NO: 792958 - DNA, 15 bp, Homo sapiens
agcccagtcttatgc

SEQ ID NO: 792959 - DNA, 15 bp, Homo sapiens
gcccagtcttatgct

SEQ ID NO: 792960 - DNA, 15 bp, Homo sapiens
cccagtcttatgctc

SEQ ID NO: 792961 - DNA, 15 bp, Homo sapiens
ccagtcttatgctct

SEQ ID NO: 792962 - DNA, 15 bp, Homo sapiens
cagtcttatgctctg

SEQ ID NO: 792963 - DNA, 15 bp, Homo sapiens
agtcttatgctctgc

SEQ ID NO: 792964 - DNA, 15 bp, Homo sapiens
gtcttatgctctgca

SEQ ID NO: 792965 - DNA, 15 bp, Homo sapiens
tcttatgctctgcaa

SEQ ID NO: 792966 - DNA, 15 bp, Homo sapiens
cttatgctctgcaaa

SEQ ID NO: 792967 - DNA, 15 bp, Homo sapiens
ttatgctctgcaaaa

SEQ ID NO: 792968 - DNA, 15 bp, Homo sapiens
tatgctctgcaaaaa

SEQ ID NO: 792969 - DNA, 15 bp, Homo sapiens
atgctctgcaaaaag

SEQ ID NO: 792970 - DNA, 15 bp, Homo sapiens
tgctctgcaaaaaga

SEQ ID NO: 792971 - DNA, 15 bp, Homo sapiens
gctctgcaaaaagac

SEQ ID NO: 792972 - DNA, 15 bp, Homo sapiens
ctctgcaaaaagaca

SEQ ID NO: 792973 - DNA, 15 bp, Homo sapiens
tctgcaaaaagacaa

SEQ ID NO: 792974 - DNA, 15 bp, Homo sapiens
ctgcaaaaagacaat

SEQ ID NO: 792975 - DNA, 15 bp, Homo sapiens
tgcaaaaagacaatg

SEQ ID NO: 792976 - DNA, 15 bp, Homo sapiens
gcaaaaagacaatgt

SEQ ID NO: 792977 - DNA, 15 bp, Homo sapiens
caaaaagacaatgtt

SEQ ID NO: 792978 - DNA, 15 bp, Homo sapiens
aaaaagacaatgtta

SEQ ID NO: 792979 - DNA, 15 bp, Homo sapiens
aaaagacaatgttac

SEQ ID NO: 792980 - DNA, 15 bp, Homo sapiens
aaagacaatgttacg

SEQ ID NO: 792981 - DNA, 15 bp, Homo sapiens
aagacaatgttacga

SEQ ID NO: 792982 - DNA, 15 bp, Homo sapiens
agacaatgttacgac

SEQ ID NO: 792983 - DNA, 15 bp, Homo sapiens
gacaatgttacgact

SEQ ID NO: 792984 - DNA, 15 bp, Homo sapiens
acaatgttacgactt

SEQ ID NO: 792985 - DNA, 15 bp, Homo sapiens
caatgttacgacttg

SEQ ID NO: 792986 - DNA, 15 bp, Homo sapiens
aatgttacgacttgt

SEQ ID NO: 792987 - DNA, 15 bp, Homo sapiens
atgttacgacttgtt

SEQ ID NO: 792988 - DNA, 15 bp, Homo sapiens
tgttacgacttgtta

SEQ ID NO: 792989 - DNA, 15 bp, Homo sapiens
gttacgacttgttat

SEQ ID NO: 792990 - DNA, 15 bp, Homo sapiens
ttacgacttgttatt

SEQ ID NO: 792991 - DNA, 15 bp, Homo sapiens
tacgacttgttatta

SEQ ID NO: 792992 - DNA, 15 bp, Homo sapiens
acgacttgttattaa

SEQ ID NO: 792993 - DNA, 15 bp, Homo sapiens
cgacttgttattaaa

SEQ ID NO: 792994 - DNA, 15 bp, Homo sapiens
gacttgttattaaaa

SEQ ID NO: 792995 - DNA, 15 bp, Homo sapiens
acttgttattaaaat

SEQ ID NO: 792996 - DNA, 15 bp, Homo sapiens
cttgttattaaaatt

SEQ ID NO: 792997 - DNA, 15 bp, Homo sapiens
ttgttattaaaatta

SEQ ID NO: 792998 - DNA, 15 bp, Homo sapiens
tgttattaaaattaa

SEQ ID NO: 792999 - DNA, 15 bp, Homo sapiens
gttattaaaattaat

SEQ ID NO: 793000 - DNA, 15 bp, Homo sapiens
ttattaaaattaatt

SEQ ID NO: 793001 - DNA, 15 bp, Homo sapiens
tattaaaattaatta

SEQ ID NO: 793002 - DNA, 15 bp, Homo sapiens
attaaaattaattat

SEQ ID NO: 793003 - DNA, 15 bp, Homo sapiens
ttaaaattaattatg

SEQ ID NO: 793004 - DNA, 15 bp, Homo sapiens
taaaattaattatgg

SEQ ID NO: 793005 - DNA, 15 bp, Homo sapiens
aaaattaattatgga

SEQ ID NO: 793006 - DNA, 15 bp, Homo sapiens
aaattaattatggat

SEQ ID NO: 793007 - DNA, 15 bp, Homo sapiens
aattaattatggatc

SEQ ID NO: 793008 - DNA, 15 bp, Homo sapiens
attaattatggatct

SEQ ID NO: 793009 - DNA, 15 bp, Homo sapiens
ttaattatggatcta

SEQ ID NO: 793010 - DNA, 15 bp, Homo sapiens
taattatggatctaa

SEQ ID NO: 793011 - DNA, 15 bp, Homo sapiens
aattatggatctaat

SEQ ID NO: 793012 - DNA, 15 bp, Homo sapiens
attatggatctaata

SEQ ID NO: 793013 - DNA, 15 bp, Homo sapiens
ttatggatctaatag

SEQ ID NO: 793014 - DNA, 15 bp, Homo sapiens
tatggatctaatagg

SEQ ID NO: 793015 - DNA, 15 bp, Homo sapiens
atggatctaatagga

SEQ ID NO: 793016 - DNA, 15 bp, Homo sapiens
tggatctaataggac

SEQ ID NO: 793017 - DNA, 15 bp, Homo sapiens
ggatctaataggaca

SEQ ID NO: 793018 - DNA, 15 bp, Homo sapiens
gatctaataggacat

SEQ ID NO: 793019 - DNA, 15 bp, Homo sapiens
atctaataggacata

SEQ ID NO: 793020 - DNA, 15 bp, Homo sapiens
tctaataggacatat

SEQ ID NO: 793021 - DNA, 15 bp, Homo sapiens
ctaataggacatata

SEQ ID NO: 793022 - DNA, 15 bp, Homo sapiens
taataggacatatag

SEQ ID NO: 793023 - DNA, 15 bp, Homo sapiens
aataggacatataga

SEQ ID NO: 793024 - DNA, 15 bp, Homo sapiens
ataggacatatagat

SEQ ID NO: 793025 - DNA, 15 bp, Homo sapiens
taggacatatagata

SEQ ID NO: 793026 - DNA, 15 bp, Homo sapiens
aggacatatagatat

SEQ ID NO: 793027 - DNA, 15 bp, Homo sapiens
ggacatatagatatt

SEQ ID NO: 793028 - DNA, 15 bp, Homo sapiens
gacatatagatattt

SEQ ID NO: 793029 - DNA, 15 bp, Homo sapiens
acatatagatatttg

SEQ ID NO: 793030 - DNA, 15 bp, Homo sapiens
catatagatatttga

SEQ ID NO: 793031 - DNA, 15 bp, Homo sapiens
atatagatatttgat

SEQ ID NO: 793032 - DNA, 15 bp, Homo sapiens
tatagatatttgata

SEQ ID NO: 793033 - DNA, 15 bp, Homo sapiens
atagatatttgataa

SEQ ID NO: 793034 - DNA, 15 bp, Homo sapiens
tagatatttgataag

SEQ ID NO: 793035 - DNA, 15 bp, Homo sapiens
agatatttgataaga

SEQ ID NO: 793036 - DNA, 15 bp, Homo sapiens
gatatttgataagaa

SEQ ID NO: 793037 - DNA, 15 bp, Homo sapiens
atatttgataagaac

SEQ ID NO: 793038 - DNA, 15 bp, Homo sapiens
tatttgataagaact

SEQ ID NO: 793039 - DNA, 15 bp, Homo sapiens
atttgataagaacta

SEQ ID NO: 793040 - DNA, 15 bp, Homo sapiens
tttgataagaactaa

SEQ ID NO: 793041 - DNA, 15 bp, Homo sapiens
ttgataagaactaaa

SEQ ID NO: 793042 - DNA, 15 bp, Homo sapiens
tgataagaactaaaa

SEQ ID NO: 793043 - DNA, 15 bp, Homo sapiens
gataagaactaaaat

SEQ ID NO: 793044 - DNA, 15 bp, Homo sapiens
ataagaactaaaatt

SEQ ID NO: 793045 - DNA, 15 bp, Homo sapiens
taagaactaaaattc

SEQ ID NO: 793046 - DNA, 15 bp, Homo sapiens
aagaactaaaattct

SEQ ID NO: 793047 - DNA, 15 bp, Homo sapiens
agaactaaaattctt

SEQ ID NO: 793048 - DNA, 15 bp, Homo sapiens
gaactaaaattctta

SEQ ID NO: 793049 - DNA, 15 bp, Homo sapiens
aactaaaattcttag

SEQ ID NO: 793050 - DNA, 15 bp, Homo sapiens
actaaaattcttagt

SEQ ID NO: 793051 - DNA, 15 bp, Homo sapiens
ctaaaattcttagtt

SEQ ID NO: 793052 - DNA, 15 bp, Homo sapiens
taaaattcttagttt

SEQ ID NO: 793053 - DNA, 15 bp, Homo sapiens
aaaattcttagtttt

SEQ ID NO: 793054 - DNA, 15 bp, Homo sapiens
aaattcttagtttta

SEQ ID NO: 793055 - DNA, 15 bp, Homo sapiens
aattcttagttttat

SEQ ID NO: 793056 - DNA, 15 bp, Homo sapiens
attcttagttttatc

SEQ ID NO: 793057 - DNA, 15 bp, Homo sapiens
ttcttagttttatct

SEQ ID NO: 793058 - DNA, 15 bp, Homo sapiens
tcttagttttatcta

SEQ ID NO: 793059 - DNA, 15 bp, Homo sapiens
cttagttttatctaa

SEQ ID NO: 793060 - DNA, 15 bp, Homo sapiens
ttagttttatctaaa

SEQ ID NO: 793061 - DNA, 15 bp, Homo sapiens
tagttttatctaaac

SEQ ID NO: 793062 - DNA, 15 bp, Homo sapiens
agttttatctaaact

SEQ ID NO: 793063 - DNA, 15 bp, Homo sapiens
gttttatctaaactt

SEQ ID NO: 793064 - DNA, 15 bp, Homo sapiens
ttttatctaaacttt

SEQ ID NO: 793065 - DNA, 15 bp, Homo sapiens
tttatctaaactttt

SEQ ID NO: 793066 - DNA, 15 bp, Homo sapiens
ttatctaaacttttg

SEQ ID NO: 793067 - DNA, 15 bp, Homo sapiens
tatctaaacttttgg

SEQ ID NO: 793068 - DNA, 15 bp, Homo sapiens
atctaaacttttgga

SEQ ID NO: 793069 - DNA, 15 bp, Homo sapiens
tctaaacttttggaa

SEQ ID NO: 793070 - DNA, 15 bp, Homo sapiens
ctaaacttttggaaa

SEQ ID NO: 793071 - DNA, 15 bp, Homo sapiens
taaacttttggaaag

SEQ ID NO: 793072 - DNA, 15 bp, Homo sapiens
aaacttttggaaagc

SEQ ID NO: 793073 - DNA, 15 bp, Homo sapiens
aacttttggaaagct

SEQ ID NO: 793074 - DNA, 15 bp, Homo sapiens
acttttggaaagctg

SEQ ID NO: 793075 - DNA, 15 bp, Homo sapiens
cttttggaaagctga

SEQ ID NO: 793076 - DNA, 15 bp, Homo sapiens
ttttggaaagctgaa

SEQ ID NO: 793077 - DNA, 15 bp, Homo sapiens
tttggaaagctgaaa

SEQ ID NO: 793078 - DNA, 15 bp, Homo sapiens
ttggaaagctgaaaa

SEQ ID NO: 793079 - DNA, 15 bp, Homo sapiens
tggaaagctgaaaaa

SEQ ID NO: 793080 - DNA, 15 bp, Homo sapiens
ggaaagctgaaaaaa

SEQ ID NO: 793081 - DNA, 15 bp, Homo sapiens
gaaagctgaaaaaag

SEQ ID NO: 793082 - DNA, 15 bp, Homo sapiens
aaagctgaaaaaaga

SEQ ID NO: 793083 - DNA, 15 bp, Homo sapiens
aagctgaaaaaagac

SEQ ID NO: 793084 - DNA, 15 bp, Homo sapiens
agctgaaaaaagaca

SEQ ID NO: 793085 - DNA, 15 bp, Homo sapiens
gctgaaaaaagacat

SEQ ID NO: 793086 - DNA, 15 bp, Homo sapiens
ctgaaaaaagacatg

SEQ ID NO: 793087 - DNA, 15 bp, Homo sapiens
tgaaaaaagacatgc

SEQ ID NO: 793088 - DNA, 15 bp, Homo sapiens
gaaaaaagacatgcc

SEQ ID NO: 793089 - DNA, 15 bp, Homo sapiens
aaaaaagacatgcca

SEQ ID NO: 793090 - DNA, 15 bp, Homo sapiens
aaaaagacatgccag

SEQ ID NO: 793091 - DNA, 15 bp, Homo sapiens
aaaagacatgccagg

SEQ ID NO: 793092 - DNA, 15 bp, Homo sapiens
aaagacatgccaggg

SEQ ID NO: 793093 - DNA, 15 bp, Homo sapiens
aagacatgccaggga

SEQ ID NO: 793094 - DNA, 15 bp, Homo sapiens
agacatgccagggat

SEQ ID NO: 793095 - DNA, 15 bp, Homo sapiens
gacatgccagggatt

SEQ ID NO: 793096 - DNA, 15 bp, Homo sapiens
acatgccagggattt

SEQ ID NO: 793097 - DNA, 15 bp, Homo sapiens
catgccagggatttt

SEQ ID NO: 793098 - DNA, 15 bp, Homo sapiens
atgccagggattttt

SEQ ID NO: 793099 - DNA, 15 bp, Homo sapiens
tgccagggattttta

SEQ ID NO: 793100 - DNA, 15 bp, Homo sapiens
gccagggatttttac

SEQ ID NO: 793101 - DNA, 15 bp, Homo sapiens
ccagggatttttact

SEQ ID NO: 793102 - DNA, 15 bp, Homo sapiens
cagggatttttactc

SEQ ID NO: 793103 - DNA, 15 bp, Homo sapiens
agggatttttactcc

SEQ ID NO: 793104 - DNA, 15 bp, Homo sapiens
gggatttttactcct

SEQ ID NO: 793105 - DNA, 15 bp, Homo sapiens
ggatttttactcctg

SEQ ID NO: 793106 - DNA, 15 bp, Homo sapiens
gatttttactcctga

SEQ ID NO: 793107 - DNA, 15 bp, Homo sapiens
atttttactcctgat

SEQ ID NO: 793108 - DNA, 15 bp, Homo sapiens
tttttactcctgatc

SEQ ID NO: 793109 - DNA, 15 bp, Homo sapiens
ttttactcctgatca

SEQ ID NO: 793110 - DNA, 15 bp, Homo sapiens
tttactcctgatcaa

SEQ ID NO: 793111 - DNA, 15 bp, Homo sapiens
ttactcctgatcaaa

SEQ ID NO: 793112 - DNA, 15 bp, Homo sapiens
tactcctgatcaaag

SEQ ID NO: 793113 - DNA, 15 bp, Homo sapiens
actcctgatcaaagg

SEQ ID NO: 793114 - DNA, 15 bp, Homo sapiens
ctcctgatcaaagga

SEQ ID NO: 793115 - DNA, 15 bp, Homo sapiens
tcctgatcaaaggaa

SEQ ID NO: 793116 - DNA, 15 bp, Homo sapiens
cctgatcaaaggaaa

SEQ ID NO: 793117 - DNA, 15 bp, Homo sapiens
ctgatcaaaggaaaa

SEQ ID NO: 793118 - DNA, 15 bp, Homo sapiens
tgatcaaaggaaaaa

SEQ ID NO: 793119 - DNA, 15 bp, Homo sapiens
gatcaaaggaaaaat

SEQ ID NO: 793120 - DNA, 15 bp, Homo sapiens
atcaaaggaaaaatt

SEQ ID NO: 793121 - DNA, 15 bp, Homo sapiens
tcaaaggaaaaatta

SEQ ID NO: 793122 - DNA, 15 bp, Homo sapiens
caaaggaaaaattac

SEQ ID NO: 793123 - DNA, 15 bp, Homo sapiens
aaaggaaaaattact

SEQ ID NO: 793124 - DNA, 15 bp, Homo sapiens
aaggaaaaattactt

SEQ ID NO: 793125 - DNA, 15 bp, Homo sapiens
aggaaaaattacttc

SEQ ID NO: 793126 - DNA, 15 bp, Homo sapiens
ggaaaaattacttct

SEQ ID NO: 793127 - DNA, 15 bp, Homo sapiens
gaaaaattacttctt

SEQ ID NO: 793128 - DNA, 15 bp, Homo sapiens
aaaaattacttcttt

SEQ ID NO: 793129 - DNA, 15 bp, Homo sapiens
aaaattacttctttg

SEQ ID NO: 793130 - DNA, 15 bp, Homo sapiens
aaattacttctttgg

SEQ ID NO: 793131 - DNA, 15 bp, Homo sapiens
aattacttctttggg

SEQ ID NO: 793132 - DNA, 15 bp, Homo sapiens
attacttctttgggt

SEQ ID NO: 793133 - DNA, 15 bp, Homo sapiens
ttacttctttgggtt

SEQ ID NO: 793134 - DNA, 15 bp, Homo sapiens
tacttctttgggttc

SEQ ID NO: 793135 - DNA, 15 bp, Homo sapiens
acttctttgggttca

SEQ ID NO: 793136 - DNA, 15 bp, Homo sapiens
cttctttgggttcat

SEQ ID NO: 793137 - DNA, 15 bp, Homo sapiens
ttctttgggttcata

SEQ ID NO: 793138 - DNA, 15 bp, Homo sapiens
tctttgggttcatag

SEQ ID NO: 793139 - DNA, 15 bp, Homo sapiens
ctttgggttcatagc

SEQ ID NO: 793140 - DNA, 15 bp, Homo sapiens
tttgggttcatagca

SEQ ID NO: 793141 - DNA, 15 bp, Homo sapiens
ttgggttcatagcaa

SEQ ID NO: 793142 - DNA, 15 bp, Homo sapiens
tgggttcatagcaac

SEQ ID NO: 793143 - DNA, 15 bp, Homo sapiens
gggttcatagcaact

SEQ ID NO: 793144 - DNA, 15 bp, Homo sapiens
ggttcatagcaactt

SEQ ID NO: 793145 - DNA, 15 bp, Homo sapiens
gttcatagcaacttc

SEQ ID NO: 793146 - DNA, 15 bp, Homo sapiens
ttcatagcaacttca

SEQ ID NO: 793147 - DNA, 15 bp, Homo sapiens
tcatagcaacttcag

SEQ ID NO: 793148 - DNA, 15 bp, Homo sapiens
catagcaacttcagc

SEQ ID NO: 793149 - DNA, 15 bp, Homo sapiens
atagcaacttcagcc

SEQ ID NO: 793150 - DNA, 15 bp, Homo sapiens
tagcaacttcagcct

SEQ ID NO: 793151 - DNA, 15 bp, Homo sapiens
agcaacttcagcctc

SEQ ID NO: 793152 - DNA, 15 bp, Homo sapiens
gcaacttcagcctct

SEQ ID NO: 793153 - DNA, 15 bp, Homo sapiens
caacttcagcctctg

SEQ ID NO: 793154 - DNA, 15 bp, Homo sapiens
aacttcagcctctga

SEQ ID NO: 793155 - DNA, 15 bp, Homo sapiens
acttcagcctctgaa

SEQ ID NO: 793156 - DNA, 15 bp, Homo sapiens
cttcagcctctgaac

SEQ ID NO: 793157 - DNA, 15 bp, Homo sapiens
ttcagcctctgaaca

SEQ ID NO: 793158 - DNA, 15 bp, Homo sapiens
tcagcctctgaacaa

SEQ ID NO: 793159 - DNA, 15 bp, Homo sapiens
cagcctctgaacaat

SEQ ID NO: 793160 - DNA, 15 bp, Homo sapiens
agcctctgaacaatt

SEQ ID NO: 793161 - DNA, 15 bp, Homo sapiens
gcctctgaacaattt

SEQ ID NO: 793162 - DNA, 15 bp, Homo sapiens
cctctgaacaatttg

SEQ ID NO: 793163 - DNA, 15 bp, Homo sapiens
ctctgaacaatttgt

SEQ ID NO: 793164 - DNA, 15 bp, Homo sapiens
tctgaacaatttgtc

SEQ ID NO: 793165 - DNA, 15 bp, Homo sapiens
ctgaacaatttgtcc

SEQ ID NO: 793166 - DNA, 15 bp, Homo sapiens
tgaacaatttgtcct

SEQ ID NO: 793167 - DNA, 15 bp, Homo sapiens
gaacaatttgtccta

SEQ ID NO: 793168 - DNA, 15 bp, Homo sapiens
aacaatttgtcctaa

SEQ ID NO: 793169 - DNA, 15 bp, Homo sapiens
acaatttgtcctaat

SEQ ID NO: 793170 - DNA, 15 bp, Homo sapiens
caatttgtcctaatg

SEQ ID NO: 793171 - DNA, 15 bp, Homo sapiens
aatttgtcctaatgg

SEQ ID NO: 793172 - DNA, 15 bp, Homo sapiens
atttgtcctaatgga

SEQ ID NO: 793173 - DNA, 15 bp, Homo sapiens
tttgtcctaatggaa

SEQ ID NO: 793174 - DNA, 15 bp, Homo sapiens
ttgtcctaatggaaa

SEQ ID NO: 793175 - DNA, 15 bp, Homo sapiens
tgtcctaatggaaat

SEQ ID NO: 793176 - DNA, 15 bp, Homo sapiens
gtcctaatggaaata

SEQ ID NO: 793177 - DNA, 15 bp, Homo sapiens
tcctaatggaaatac

SEQ ID NO: 793178 - DNA, 15 bp, Homo sapiens
cctaatggaaataca

SEQ ID NO: 793179 - DNA, 15 bp, Homo sapiens
ctaatggaaatacag

SEQ ID NO: 793180 - DNA, 15 bp, Homo sapiens
taatggaaatacaga

SEQ ID NO: 793181 - DNA, 15 bp, Homo sapiens
aatggaaatacagat

SEQ ID NO: 793182 - DNA, 15 bp, Homo sapiens
atggaaatacagatc

SEQ ID NO: 793183 - DNA, 15 bp, Homo sapiens
tggaaatacagatct

SEQ ID NO: 793184 - DNA, 15 bp, Homo sapiens
ggaaatacagatcta

SEQ ID NO: 793185 - DNA, 15 bp, Homo sapiens
gaaatacagatctaa

SEQ ID NO: 793186 - DNA, 15 bp, Homo sapiens
aaatacagatctaag

SEQ ID NO: 793187 - DNA, 15 bp, Homo sapiens
aatacagatctaagc

SEQ ID NO: 793188 - DNA, 15 bp, Homo sapiens
atacagatctaagca

SEQ ID NO: 793189 - DNA, 15 bp, Homo sapiens
tacagatctaagcac

SEQ ID NO: 793190 - DNA, 15 bp, Homo sapiens
acagatctaagcact

SEQ ID NO: 793191 - DNA, 15 bp, Homo sapiens
cagatctaagcactt

SEQ ID NO: 793192 - DNA, 15 bp, Homo sapiens
agatctaagcacttt

SEQ ID NO: 793193 - DNA, 15 bp, Homo sapiens
gatctaagcactttt

SEQ ID NO: 793194 - DNA, 15 bp, Homo sapiens
atctaagcacttttg

SEQ ID NO: 793195 - DNA, 15 bp, Homo sapiens
tctaagcacttttgg

SEQ ID NO: 793196 - DNA, 15 bp, Homo sapiens
ctaagcacttttgga

SEQ ID NO: 793197 - DNA, 15 bp, Homo sapiens
taagcacttttggat

SEQ ID NO: 793198 - DNA, 15 bp, Homo sapiens
aagcacttttggata

SEQ ID NO: 793199 - DNA, 15 bp, Homo sapiens
agcacttttggatat

SEQ ID NO: 793200 - DNA, 15 bp, Homo sapiens
gcacttttggatatt

SEQ ID NO: 793201 - DNA, 15 bp, Homo sapiens
cacttttggatattt

SEQ ID NO: 793202 - DNA, 15 bp, Homo sapiens
acttttggatattta

SEQ ID NO: 793203 - DNA, 15 bp, Homo sapiens
cttttggatatttac

SEQ ID NO: 793204 - DNA, 15 bp, Homo sapiens
ttttggatatttact

SEQ ID NO: 793205 - DNA, 15 bp, Homo sapiens
tttggatatttactc

SEQ ID NO: 793206 - DNA, 15 bp, Homo sapiens
ttggatatttactcc

SEQ ID NO: 793207 - DNA, 15 bp, Homo sapiens
tggatatttactccg

SEQ ID NO: 793208 - DNA, 15 bp, Homo sapiens
ggatatttactccgt

SEQ ID NO: 793209 - DNA, 15 bp, Homo sapiens
gatatttactccgtt

SEQ ID NO: 793210 - DNA, 15 bp, Homo sapiens
atatttactccgtta

SEQ ID NO: 793211 - DNA, 15 bp, Homo sapiens
tatttactccgttaa

SEQ ID NO: 793212 - DNA, 15 bp, Homo sapiens
atttactccgttaag

SEQ ID NO: 793213 - DNA, 15 bp, Homo sapiens
tttactccgttaagt

SEQ ID NO: 793214 - DNA, 15 bp, Homo sapiens
ttactccgttaagtc

SEQ ID NO: 793215 - DNA, 15 bp, Homo sapiens
tactccgttaagtca

SEQ ID NO: 793216 - DNA, 15 bp, Homo sapiens
actccgttaagtcat

SEQ ID NO: 793217 - DNA, 15 bp, Homo sapiens
ctccgttaagtcatt

SEQ ID NO: 793218 - DNA, 15 bp, Homo sapiens
tccgttaagtcattt

SEQ ID NO: 793219 - DNA, 15 bp, Homo sapiens
ccgttaagtcattta

SEQ ID NO: 793220 - DNA, 15 bp, Homo sapiens
cgttaagtcatttag

SEQ ID NO: 793221 - DNA, 15 bp, Homo sapiens
gttaagtcatttagt

SEQ ID NO: 793222 - DNA, 15 bp, Homo sapiens
ttaagtcatttagtg

SEQ ID NO: 793223 - DNA, 15 bp, Homo sapiens
taagtcatttagtga

SEQ ID NO: 793224 - DNA, 15 bp, Homo sapiens
aagtcatttagtgat

SEQ ID NO: 793225 - DNA, 15 bp, Homo sapiens
agtcatttagtgatt

SEQ ID NO: 793226 - DNA, 15 bp, Homo sapiens
gtcatttagtgattg

SEQ ID NO: 793227 - DNA, 15 bp, Homo sapiens
tcatttagtgattgc

SEQ ID NO: 793228 - DNA, 15 bp, Homo sapiens
catttagtgattgcc

SEQ ID NO: 793229 - DNA, 15 bp, Homo sapiens
atttagtgattgccc

SEQ ID NO: 793230 - DNA, 15 bp, Homo sapiens
tttagtgattgccct

SEQ ID NO: 793231 - DNA, 15 bp, Homo sapiens
ttagtgattgcccta

SEQ ID NO: 793232 - DNA, 15 bp, Homo sapiens
tagtgattgccctaa

SEQ ID NO: 793233 - DNA, 15 bp, Homo sapiens
agtgattgccctaaa

SEQ ID NO: 793234 - DNA, 15 bp, Homo sapiens
gtgattgccctaaat

SEQ ID NO: 793235 - DNA, 15 bp, Homo sapiens
tgattgccctaaatt

SEQ ID NO: 793236 - DNA, 15 bp, Homo sapiens
gattgccctaaattt

SEQ ID NO: 793237 - DNA, 15 bp, Homo sapiens
ttgccctaaatttgg

SEQ ID NO: 793238 - DNA, 15 bp, Homo sapiens
tgccctaaatttggg

SEQ ID NO: 793239 - DNA, 15 bp, Homo sapiens
gccctaaatttgggg

SEQ ID NO: 793240 - DNA, 15 bp, Homo sapiens
ccctaaatttggggc

SEQ ID NO: 793241 - DNA, 15 bp, Homo sapiens
cctaaatttggggca

SEQ ID NO: 793242 - DNA, 15 bp, Homo sapiens
ctaaatttggggcag

SEQ ID NO: 793243 - DNA, 15 bp, Homo sapiens
taaatttggggcaga

SEQ ID NO: 793244 - DNA, 15 bp, Homo sapiens
aaatttggggcagaa

SEQ ID NO: 793245 - DNA, 15 bp, Homo sapiens
aatttggggcagaat

SEQ ID NO: 793246 - DNA, 15 bp, Homo sapiens
atttggggcagaatc

SEQ ID NO: 793247 - DNA, 15 bp, Homo sapiens
tttggggcagaatct

SEQ ID NO: 793248 - DNA, 15 bp, Homo sapiens
ttggggcagaatctt

SEQ ID NO: 793249 - DNA, 15 bp, Homo sapiens
tggggcagaatcttc

SEQ ID NO: 793250 - DNA, 15 bp, Homo sapiens
ggggcagaatcttct

SEQ ID NO: 793251 - DNA, 15 bp, Homo sapiens
gggcagaatcttctc

SEQ ID NO: 793252 - DNA, 15 bp, Homo sapiens
ggcagaatcttctct

SEQ ID NO: 793253 - DNA, 15 bp, Homo sapiens
gcagaatcttctctt

SEQ ID NO: 793254 - DNA, 15 bp, Homo sapiens
cagaatcttctcttg

SEQ ID NO: 793255 - DNA, 15 bp, Homo sapiens
agaatcttctcttgt

SEQ ID NO: 793256 - DNA, 15 bp, Homo sapiens
gaatcttctcttgtt

SEQ ID NO: 793257 - DNA, 15 bp, Homo sapiens
aatcttctcttgttc

SEQ ID NO: 793258 - DNA, 15 bp, Homo sapiens
atcttctcttgttct

SEQ ID NO: 793259 - DNA, 15 bp, Homo sapiens
tcttctcttgttctt

SEQ ID NO: 793260 - DNA, 15 bp, Homo sapiens
cttctcttgttcttc

SEQ ID NO: 793261 - DNA, 15 bp, Homo sapiens
ttctcttgttcttcc

SEQ ID NO: 793262 - DNA, 15 bp, Homo sapiens
tctcttgttcttccc

SEQ ID NO: 793263 - DNA, 15 bp, Homo sapiens
ctcttgttcttccct

SEQ ID NO: 793264 - DNA, 15 bp, Homo sapiens
tcttgttcttccctt

SEQ ID NO: 793265 - DNA, 15 bp, Homo sapiens
cttgttcttcccttc

SEQ ID NO: 793266 - DNA, 15 bp, Homo sapiens
ttgttcttcccttcc

SEQ ID NO: 793267 - DNA, 15 bp, Homo sapiens
tgttcttcccttcct

SEQ ID NO: 793268 - DNA, 15 bp, Homo sapiens
gttcttcccttcctt

SEQ ID NO: 793269 - DNA, 15 bp, Homo sapiens
ttcttcccttccttc

SEQ ID NO: 793270 - DNA, 15 bp, Homo sapiens
tcttcccttccttct

SEQ ID NO: 793271 - DNA, 15 bp, Homo sapiens
cttcccttccttctc

SEQ ID NO: 793272 - DNA, 15 bp, Homo sapiens
ttcccttccttctca

SEQ ID NO: 793273 - DNA, 15 bp, Homo sapiens
tcccttccttctcaa

SEQ ID NO: 793274 - DNA, 15 bp, Homo sapiens
cccttccttctcaaa

SEQ ID NO: 793275 - DNA, 15 bp, Homo sapiens
ccttccttctcaaac

SEQ ID NO: 793276 - DNA, 15 bp, Homo sapiens
cttccttctcaaacg

SEQ ID NO: 793277 - DNA, 15 bp, Homo sapiens
ttccttctcaaacga

SEQ ID NO: 793278 - DNA, 15 bp, Homo sapiens
tccttctcaaacgaa

SEQ ID NO: 793279 - DNA, 15 bp, Homo sapiens
ccttctcaaacgaac

SEQ ID NO: 793280 - DNA, 15 bp, Homo sapiens
cttctcaaacgaact

SEQ ID NO: 793281 - DNA, 15 bp, Homo sapiens
ttctcaaacgaacta

SEQ ID NO: 793282 - DNA, 15 bp, Homo sapiens
tctcaaacgaactag

SEQ ID NO: 793283 - DNA, 15 bp, Homo sapiens
ctcaaacgaactagg

SEQ ID NO: 793284 - DNA, 15 bp, Homo sapiens
tcaaacgaactaggg

SEQ ID NO: 793285 - DNA, 15 bp, Homo sapiens
caaacgaactaggga

SEQ ID NO: 793286 - DNA, 15 bp, Homo sapiens
aaacgaactagggac

SEQ ID NO: 793287 - DNA, 15 bp, Homo sapiens
aacgaactagggaca

SEQ ID NO: 793288 - DNA, 15 bp, Homo sapiens
acgaactagggacag

SEQ ID NO: 793289 - DNA, 15 bp, Homo sapiens
cgaactagggacagc

SEQ ID NO: 793290 - DNA, 15 bp, Homo sapiens
gaactagggacagct

SEQ ID NO: 793291 - DNA, 15 bp, Homo sapiens
aactagggacagctg

SEQ ID NO: 793292 - DNA, 15 bp, Homo sapiens
actagggacagctgg

SEQ ID NO: 793293 - DNA, 15 bp, Homo sapiens
ctagggacagctggt

SEQ ID NO: 793294 - DNA, 15 bp, Homo sapiens
tagggacagctggtc

SEQ ID NO: 793295 - DNA, 15 bp, Homo sapiens
agggacagctggtct

SEQ ID NO: 793296 - DNA, 15 bp, Homo sapiens
gggacagctggtctt

SEQ ID NO: 793297 - DNA, 15 bp, Homo sapiens
ggacagctggtcttt

SEQ ID NO: 793298 - DNA, 15 bp, Homo sapiens
gacagctggtctttc

SEQ ID NO: 793299 - DNA, 15 bp, Homo sapiens
acagctggtctttct

SEQ ID NO: 793300 - DNA, 15 bp, Homo sapiens
cagctggtctttctt

SEQ ID NO: 793301 - DNA, 15 bp, Homo sapiens
agctggtctttctta

SEQ ID NO: 793302 - DNA, 15 bp, Homo sapiens
gctggtctttcttac

SEQ ID NO: 793303 - DNA, 15 bp, Homo sapiens
ctggtctttcttaca

SEQ ID NO: 793304 - DNA, 15 bp, Homo sapiens
tggtctttcttacag

SEQ ID NO: 793305 - DNA, 15 bp, Homo sapiens
ggtctttcttacagt

SEQ ID NO: 793306 - DNA, 15 bp, Homo sapiens
gtctttcttacagtc

SEQ ID NO: 793307 - DNA, 15 bp, Homo sapiens
tctttcttacagtca

SEQ ID NO: 793308 - DNA, 15 bp, Homo sapiens
ctttcttacagtcac

SEQ ID NO: 793309 - DNA, 15 bp, Homo sapiens
tttcttacagtcaca

SEQ ID NO: 793310 - DNA, 15 bp, Homo sapiens
ttcttacagtcacaa

SEQ ID NO: 793311 - DNA, 15 bp, Homo sapiens
tcttacagtcacaaa

SEQ ID NO: 793312 - DNA, 15 bp, Homo sapiens
cttacagtcacaaaa

SEQ ID NO: 793313 - DNA, 15 bp, Homo sapiens
ttacagtcacaaaag

SEQ ID NO: 793314 - DNA, 15 bp, Homo sapiens
tacagtcacaaaagt

SEQ ID NO: 793315 - DNA, 15 bp, Homo sapiens
acagtcacaaaagtt

SEQ ID NO: 793316 - DNA, 15 bp, Homo sapiens
cagtcacaaaagtta

SEQ ID NO: 793317 - DNA, 15 bp, Homo sapiens
agtcacaaaagttat

SEQ ID NO: 793318 - DNA, 15 bp, Homo sapiens
gtcacaaaagttata

SEQ ID NO: 793319 - DNA, 15 bp, Homo sapiens
tcacaaaagttatat

SEQ ID NO: 793320 - DNA, 15 bp, Homo sapiens
cacaaaagttatata

SEQ ID NO: 793321 - DNA, 15 bp, Homo sapiens
acaaaagttatataa

SEQ ID NO: 793322 - DNA, 15 bp, Homo sapiens
caaaagttatataaa

SEQ ID NO: 793323 - DNA, 15 bp, Homo sapiens
aaaagttatataaat

SEQ ID NO: 793324 - DNA, 15 bp, Homo sapiens
aaagttatataaatg

SEQ ID NO: 793325 - DNA, 15 bp, Homo sapiens
aagttatataaatgc

SEQ ID NO: 793326 - DNA, 15 bp, Homo sapiens
agttatataaatgca

SEQ ID NO: 793327 - DNA, 15 bp, Homo sapiens
gttatataaatgcaa

SEQ ID NO: 793328 - DNA, 15 bp, Homo sapiens
ttatataaatgcaac

SEQ ID NO: 793329 - DNA, 15 bp, Homo sapiens
tatataaatgcaacc

SEQ ID NO: 793330 - DNA, 15 bp, Homo sapiens
atataaatgcaacca

SEQ ID NO: 793331 - DNA, 15 bp, Homo sapiens
tataaatgcaaccac

SEQ ID NO: 793332 - DNA, 15 bp, Homo sapiens
ataaatgcaaccact

SEQ ID NO: 793333 - DNA, 15 bp, Homo sapiens
taaatgcaaccacta

SEQ ID NO: 793334 - DNA, 15 bp, Homo sapiens
aaatgcaaccactat

SEQ ID NO: 793335 - DNA, 15 bp, Homo sapiens
aatgcaaccactata

SEQ ID NO: 793336 - DNA, 15 bp, Homo sapiens
atgcaaccactatat

SEQ ID NO: 793337 - DNA, 15 bp, Homo sapiens
tgcaaccactatatc

SEQ ID NO: 793338 - DNA, 15 bp, Homo sapiens
gcaaccactatatca

SEQ ID NO: 793339 - DNA, 15 bp, Homo sapiens
caaccactatatcaa

SEQ ID NO: 793340 - DNA, 15 bp, Homo sapiens
aaccactatatcaag

SEQ ID NO: 793341 - DNA, 15 bp, Homo sapiens
accactatatcaaga

SEQ ID NO: 793342 - DNA, 15 bp, Homo sapiens
ccactatatcaagat

SEQ ID NO: 793343 - DNA, 15 bp, Homo sapiens
cactatatcaagatc

SEQ ID NO: 793344 - DNA, 15 bp, Homo sapiens
actatatcaagatca

SEQ ID NO: 793345 - DNA, 15 bp, Homo sapiens
ctatatcaagatcat

SEQ ID NO: 793346 - DNA, 15 bp, Homo sapiens
tatatcaagatcatt

SEQ ID NO: 793347 - DNA, 15 bp, Homo sapiens
atatcaagatcattt

SEQ ID NO: 793348 - DNA, 15 bp, Homo sapiens
tatcaagatcatttt

SEQ ID NO: 793349 - DNA, 15 bp, Homo sapiens
atcaagatcattttt

SEQ ID NO: 793350 - DNA, 15 bp, Homo sapiens
tcaagatcattttta

SEQ ID NO: 793351 - DNA, 15 bp, Homo sapiens
caagatcatttttac

SEQ ID NO: 793352 - DNA, 15 bp, Homo sapiens
aagatcatttttact

SEQ ID NO: 793353 - DNA, 15 bp, Homo sapiens
agatcatttttactg

SEQ ID NO: 793354 - DNA, 15 bp, Homo sapiens
gatcatttttactga

SEQ ID NO: 793355 - DNA, 15 bp, Homo sapiens
atcatttttactgat

SEQ ID NO: 793356 - DNA, 15 bp, Homo sapiens
tcatttttactgatg

SEQ ID NO: 793357 - DNA, 15 bp, Homo sapiens
catttttactgatgc

SEQ ID NO: 793358 - DNA, 15 bp, Homo sapiens
atttttactgatgcc

SEQ ID NO: 793359 - DNA, 15 bp, Homo sapiens
tttttactgatgcca

SEQ ID NO: 793360 - DNA, 15 bp, Homo sapiens
ttttactgatgccat

SEQ ID NO: 793361 - DNA, 15 bp, Homo sapiens
tttactgatgccatc

SEQ ID NO: 793362 - DNA, 15 bp, Homo sapiens
ttactgatgccatca

SEQ ID NO: 793363 - DNA, 15 bp, Homo sapiens
tactgatgccatcaa

SEQ ID NO: 793364 - DNA, 15 bp, Homo sapiens
actgatgccatcaag

SEQ ID NO: 793365 - DNA, 15 bp, Homo sapiens
ctgatgccatcaagc

SEQ ID NO: 793366 - DNA, 15 bp, Homo sapiens
tgatgccatcaagcc

SEQ ID NO: 793367 - DNA, 15 bp, Homo sapiens
gatgccatcaagccc

SEQ ID NO: 793368 - DNA, 15 bp, Homo sapiens
atgccatcaagccca

SEQ ID NO: 793369 - DNA, 15 bp, Homo sapiens
tgccatcaagcccat

SEQ ID NO: 793370 - DNA, 15 bp, Homo sapiens
gccatcaagcccatc

SEQ ID NO: 793371 - DNA, 15 bp, Homo sapiens
ccatcaagcccatcc

SEQ ID NO: 793372 - DNA, 15 bp, Homo sapiens
catcaagcccatcct

SEQ ID NO: 793373 - DNA, 15 bp, Homo sapiens
atcaagcccatccta

SEQ ID NO: 793374 - DNA, 15 bp, Homo sapiens
tcaagcccatcctaa

SEQ ID NO: 793375 - DNA, 15 bp, Homo sapiens
caagcccatcctaaa

SEQ ID NO: 793376 - DNA, 15 bp, Homo sapiens
aagcccatcctaaat

SEQ ID NO: 793377 - DNA, 15 bp, Homo sapiens
agcccatcctaaatt

SEQ ID NO: 793378 - DNA, 15 bp, Homo sapiens
gcccatcctaaatta

SEQ ID NO: 793379 - DNA, 15 bp, Homo sapiens
cccatcctaaattag

SEQ ID NO: 793380 - DNA, 15 bp, Homo sapiens
ccatcctaaattagc

SEQ ID NO: 793381 - DNA, 15 bp, Homo sapiens
catcctaaattagca

SEQ ID NO: 793382 - DNA, 15 bp, Homo sapiens
atcctaaattagcat

SEQ ID NO: 793383 - DNA, 15 bp, Homo sapiens
tcctaaattagcatt

SEQ ID NO: 793384 - DNA, 15 bp, Homo sapiens
cctaaattagcatta

SEQ ID NO: 793385 - DNA, 15 bp, Homo sapiens
ctaaattagcattat

SEQ ID NO: 793386 - DNA, 15 bp, Homo sapiens
taaattagcattatt

SEQ ID NO: 793387 - DNA, 15 bp, Homo sapiens
aaattagcattatta

SEQ ID NO: 793388 - DNA, 15 bp, Homo sapiens
aattagcattattat

SEQ ID NO: 793389 - DNA, 15 bp, Homo sapiens
attagcattattatc

SEQ ID NO: 793390 - DNA, 15 bp, Homo sapiens
ttagcattattatct

SEQ ID NO: 793391 - DNA, 15 bp, Homo sapiens
tagcattattatctg

SEQ ID NO: 793392 - DNA, 15 bp, Homo sapiens
agcattattatctgc

SEQ ID NO: 793393 - DNA, 15 bp, Homo sapiens
gcattattatctgcc

SEQ ID NO: 793394 - DNA, 15 bp, Homo sapiens
cattattatctgcca

SEQ ID NO: 793395 - DNA, 15 bp, Homo sapiens
attattatctgccat

SEQ ID NO: 793396 - DNA, 15 bp, Homo sapiens
ttattatctgccatc

SEQ ID NO: 793397 - DNA, 15 bp, Homo sapiens
tattatctgccatct

SEQ ID NO: 793398 - DNA, 15 bp, Homo sapiens
attatctgccatctg

SEQ ID NO: 793399 - DNA, 15 bp, Homo sapiens
ttatctgccatctgg

SEQ ID NO: 793400 - DNA, 15 bp, Homo sapiens
tatctgccatctggt

SEQ ID NO: 793401 - DNA, 15 bp, Homo sapiens
atctgccatctggta

SEQ ID NO: 793402 - DNA, 15 bp, Homo sapiens
tctgccatctggtaa

SEQ ID NO: 793403 - DNA, 15 bp, Homo sapiens
ctgccatctggtaat

SEQ ID NO: 793404 - DNA, 15 bp, Homo sapiens
tgccatctggtaatt

SEQ ID NO: 793405 - DNA, 15 bp, Homo sapiens
gccatctggtaattt

SEQ ID NO: 793406 - DNA, 15 bp, Homo sapiens
ccatctggtaatttg

SEQ ID NO: 793407 - DNA, 15 bp, Homo sapiens
catctggtaatttgc

SEQ ID NO: 793408 - DNA, 15 bp, Homo sapiens
atctggtaatttgca

SEQ ID NO: 793409 - DNA, 15 bp, Homo sapiens
tctggtaatttgcag

SEQ ID NO: 793410 - DNA, 15 bp, Homo sapiens
ctggtaatttgcaga

SEQ ID NO: 793411 - DNA, 15 bp, Homo sapiens
tggtaatttgcagag

SEQ ID NO: 793412 - DNA, 15 bp, Homo sapiens
ggtaatttgcagagg

SEQ ID NO: 793413 - DNA, 15 bp, Homo sapiens
gtaatttgcagaggg

SEQ ID NO: 793414 - DNA, 15 bp, Homo sapiens
taatttgcagagggt

SEQ ID NO: 793415 - DNA, 15 bp, Homo sapiens
aatttgcagagggta

SEQ ID NO: 793416 - DNA, 15 bp, Homo sapiens
atttgcagagggtat

SEQ ID NO: 793417 - DNA, 15 bp, Homo sapiens
tttgcagagggtata

SEQ ID NO: 793418 - DNA, 15 bp, Homo sapiens
ttgcagagggtatac

SEQ ID NO: 793419 - DNA, 15 bp, Homo sapiens
tgcagagggtatact

SEQ ID NO: 793420 - DNA, 15 bp, Homo sapiens
gcagagggtatactt

SEQ ID NO: 793421 - DNA, 15 bp, Homo sapiens
cagagggtatacttt

SEQ ID NO: 793422 - DNA, 15 bp, Homo sapiens
agagggtatactttt

SEQ ID NO: 793423 - DNA, 15 bp, Homo sapiens
gagggtatacttttt

SEQ ID NO: 793424 - DNA, 15 bp, Homo sapiens
agggtatacttttta

SEQ ID NO: 793425 - DNA, 15 bp, Homo sapiens
gggtatactttttag

SEQ ID NO: 793426 - DNA, 15 bp, Homo sapiens
ggtatactttttaga

SEQ ID NO: 793427 - DNA, 15 bp, Homo sapiens
gtatactttttagaa

SEQ ID NO: 793428 - DNA, 15 bp, Homo sapiens
tatactttttagaaa

SEQ ID NO: 793429 - DNA, 15 bp, Homo sapiens
atactttttagaaaa

SEQ ID NO: 793430 - DNA, 15 bp, Homo sapiens
tactttttagaaaag

SEQ ID NO: 793431 - DNA, 15 bp, Homo sapiens
actttttagaaaagg

SEQ ID NO: 793432 - DNA, 15 bp, Homo sapiens
ctttttagaaaagga

SEQ ID NO: 793433 - DNA, 15 bp, Homo sapiens
tttttagaaaaggac

SEQ ID NO: 793434 - DNA, 15 bp, Homo sapiens
ttttagaaaaggaca

SEQ ID NO: 793435 - DNA, 15 bp, Homo sapiens
tttagaaaaggacat

SEQ ID NO: 793436 - DNA, 15 bp, Homo sapiens
ttagaaaaggacatg

SEQ ID NO: 793437 - DNA, 15 bp, Homo sapiens
tagaaaaggacatgt

SEQ ID NO: 793438 - DNA, 15 bp, Homo sapiens
agaaaaggacatgtt

SEQ ID NO: 793439 - DNA, 15 bp, Homo sapiens
gaaaaggacatgttt

SEQ ID NO: 793440 - DNA, 15 bp, Homo sapiens
aaaaggacatgtttc

SEQ ID NO: 793441 - DNA, 15 bp, Homo sapiens
aaaggacatgtttct

SEQ ID NO: 793442 - DNA, 15 bp, Homo sapiens
aaggacatgtttcta

SEQ ID NO: 793443 - DNA, 15 bp, Homo sapiens
aggacatgtttctaa

SEQ ID NO: 793444 - DNA, 15 bp, Homo sapiens
ggacatgtttctaac

SEQ ID NO: 793445 - DNA, 15 bp, Homo sapiens
gacatgtttctaaca

SEQ ID NO: 793446 - DNA, 15 bp, Homo sapiens
acatgtttctaacat

SEQ ID NO: 793447 - DNA, 15 bp, Homo sapiens
catgtttctaacatt

SEQ ID NO: 793448 - DNA, 15 bp, Homo sapiens
atgtttctaacattg

SEQ ID NO: 793449 - DNA, 15 bp, Homo sapiens
tgtttctaacattgg

SEQ ID NO: 793450 - DNA, 15 bp, Homo sapiens
gtttctaacattgga

SEQ ID NO: 793451 - DNA, 15 bp, Homo sapiens
tttctaacattggag

SEQ ID NO: 793452 - DNA, 15 bp, Homo sapiens
ttctaacattggagg

SEQ ID NO: 793453 - DNA, 15 bp, Homo sapiens
tctaacattggagga

SEQ ID NO: 793454 - DNA, 15 bp, Homo sapiens
ctaacattggaggaa

SEQ ID NO: 793455 - DNA, 15 bp, Homo sapiens
taacattggaggaaa

SEQ ID NO: 793456 - DNA, 15 bp, Homo sapiens
aacattggaggaaat

SEQ ID NO: 793457 - DNA, 15 bp, Homo sapiens
acattggaggaaatg

SEQ ID NO: 793458 - DNA, 15 bp, Homo sapiens
cattggaggaaatgc

SEQ ID NO: 793459 - DNA, 15 bp, Homo sapiens
attggaggaaatgct

SEQ ID NO: 793460 - DNA, 15 bp, Homo sapiens
ttggaggaaatgctt

SEQ ID NO: 793461 - DNA, 15 bp, Homo sapiens
tggaggaaatgcttt

SEQ ID NO: 793462 - DNA, 15 bp, Homo sapiens
ggaggaaatgctttc

SEQ ID NO: 793463 - DNA, 15 bp, Homo sapiens
gaggaaatgctttca

SEQ ID NO: 793464 - DNA, 15 bp, Homo sapiens
aggaaatgctttcat

SEQ ID NO: 793465 - DNA, 15 bp, Homo sapiens
ggaaatgctttcatc

SEQ ID NO: 793466 - DNA, 15 bp, Homo sapiens
gaaatgctttcatct

SEQ ID NO: 793467 - DNA, 15 bp, Homo sapiens
aaatgctttcatctc

SEQ ID NO: 793468 - DNA, 15 bp, Homo sapiens
aatgctttcatctca

SEQ ID NO: 793469 - DNA, 15 bp, Homo sapiens
atgctttcatctcag

SEQ ID NO: 793470 - DNA, 15 bp, Homo sapiens
tgctttcatctcagt

SEQ ID NO: 793471 - DNA, 15 bp, Homo sapiens
gctttcatctcagta

SEQ ID NO: 793472 - DNA, 15 bp, Homo sapiens
ctttcatctcagtag

SEQ ID NO: 793473 - DNA, 15 bp, Homo sapiens
tttcatctcagtaga

SEQ ID NO: 793474 - DNA, 15 bp, Homo sapiens
ttcatctcagtagat

SEQ ID NO: 793475 - DNA, 15 bp, Homo sapiens
tcatctcagtagatt

SEQ ID NO: 793476 - DNA, 15 bp, Homo sapiens
catctcagtagattg

SEQ ID NO: 793477 - DNA, 15 bp, Homo sapiens
atctcagtagattga

SEQ ID NO: 793478 - DNA, 15 bp, Homo sapiens
tctcagtagattgaa

SEQ ID NO: 793479 - DNA, 15 bp, Homo sapiens
ctcagtagattgaaa

SEQ ID NO: 793480 - DNA, 15 bp, Homo sapiens
tcagtagattgaaaa

SEQ ID NO: 793481 - DNA, 15 bp, Homo sapiens
cagtagattgaaaac

SEQ ID NO: 793482 - DNA, 15 bp, Homo sapiens
agtagattgaaaaca

SEQ ID NO: 793483 - DNA, 15 bp, Homo sapiens
gtagattgaaaacag

SEQ ID NO: 793484 - DNA, 15 bp, Homo sapiens
tagattgaaaacaga

SEQ ID NO: 793485 - DNA, 15 bp, Homo sapiens
agattgaaaacagaa

SEQ ID NO: 793486 - DNA, 15 bp, Homo sapiens
gattgaaaacagaag

SEQ ID NO: 793487 - DNA, 15 bp, Homo sapiens
attgaaaacagaagt

SEQ ID NO: 793488 - DNA, 15 bp, Homo sapiens
ttgaaaacagaagtt

SEQ ID NO: 793489 - DNA, 15 bp, Homo sapiens
tgaaaacagaagttc

SEQ ID NO: 793490 - DNA, 15 bp, Homo sapiens
gaaaacagaagttct

SEQ ID NO: 793491 - DNA, 15 bp, Homo sapiens
aaaacagaagttcta

SEQ ID NO: 793492 - DNA, 15 bp, Homo sapiens
aaacagaagttctaa

SEQ ID NO: 793493 - DNA, 15 bp, Homo sapiens
aacagaagttctaag

SEQ ID NO: 793494 - DNA, 15 bp, Homo sapiens
acagaagttctaagg

SEQ ID NO: 793495 - DNA, 15 bp, Homo sapiens
cagaagttctaagga

SEQ ID NO: 793496 - DNA, 15 bp, Homo sapiens
agaagttctaaggaa

SEQ ID NO: 793497 - DNA, 15 bp, Homo sapiens
gaagttctaaggaaa

SEQ ID NO: 793498 - DNA, 15 bp, Homo sapiens
aagttctaaggaaag

SEQ ID NO: 793499 - DNA, 15 bp, Homo sapiens
agttctaaggaaagt

SEQ ID NO: 793500 - DNA, 15 bp, Homo sapiens
gttctaaggaaagtc

SEQ ID NO: 793501 - DNA, 15 bp, Homo sapiens
ttctaaggaaagtca

SEQ ID NO: 793502 - DNA, 15 bp, Homo sapiens
tctaaggaaagtcat

SEQ ID NO: 793503 - DNA, 15 bp, Homo sapiens
ctaaggaaagtcatt

SEQ ID NO: 793504 - DNA, 15 bp, Homo sapiens
taaggaaagtcatta

SEQ ID NO: 793505 - DNA, 15 bp, Homo sapiens
aaggaaagtcattag

SEQ ID NO: 793506 - DNA, 15 bp, Homo sapiens
aggaaagtcattagg

SEQ ID NO: 793507 - DNA, 15 bp, Homo sapiens
ggaaagtcattaggg

SEQ ID NO: 793508 - DNA, 15 bp, Homo sapiens
gaaagtcattaggga

SEQ ID NO: 793509 - DNA, 15 bp, Homo sapiens
aaagtcattagggaa

SEQ ID NO: 793510 - DNA, 15 bp, Homo sapiens
aagtcattagggaat

SEQ ID NO: 793511 - DNA, 15 bp, Homo sapiens
agtcattagggaatc

SEQ ID NO: 793512 - DNA, 15 bp, Homo sapiens
gtcattagggaatca

SEQ ID NO: 793513 - DNA, 15 bp, Homo sapiens
tcattagggaatcat

SEQ ID NO: 793514 - DNA, 15 bp, Homo sapiens
cattagggaatcatg

SEQ ID NO: 793515 - DNA, 15 bp, Homo sapiens
attagggaatcatgc

SEQ ID NO: 793516 - DNA, 15 bp, Homo sapiens
ttagggaatcatgct

SEQ ID NO: 793517 - DNA, 15 bp, Homo sapiens
tagggaatcatgcta

SEQ ID NO: 793518 - DNA, 15 bp, Homo sapiens
agggaatcatgctat

SEQ ID NO: 793519 - DNA, 15 bp, Homo sapiens
gggaatcatgctatg

SEQ ID NO: 793520 - DNA, 15 bp, Homo sapiens
ggaatcatgctatgt

SEQ ID NO: 793521 - DNA, 15 bp, Homo sapiens
gaatcatgctatgtt

SEQ ID NO: 793522 - DNA, 15 bp, Homo sapiens
aatcatgctatgttg

SEQ ID NO: 793523 - DNA, 15 bp, Homo sapiens
atcatgctatgttga

SEQ ID NO: 793524 - DNA, 15 bp, Homo sapiens
tcatgctatgttgag

SEQ ID NO: 793525 - DNA, 15 bp, Homo sapiens
catgctatgttgaga

SEQ ID NO: 793526 - DNA, 15 bp, Homo sapiens
atgctatgttgagac

SEQ ID NO: 793527 - DNA, 15 bp, Homo sapiens
tgctatgttgagact

SEQ ID NO: 793528 - DNA, 15 bp, Homo sapiens
gctatgttgagacta

SEQ ID NO: 793529 - DNA, 15 bp, Homo sapiens
ctatgttgagactat

SEQ ID NO: 793530 - DNA, 15 bp, Homo sapiens
tatgttgagactatt

SEQ ID NO: 793531 - DNA, 15 bp, Homo sapiens
atgttgagactattc

SEQ ID NO: 793532 - DNA, 15 bp, Homo sapiens
tgttgagactattca

SEQ ID NO: 793533 - DNA, 15 bp, Homo sapiens
gttgagactattcag

SEQ ID NO: 793534 - DNA, 15 bp, Homo sapiens
ttgagactattcaga

SEQ ID NO: 793535 - DNA, 15 bp, Homo sapiens
tgagactattcagag

SEQ ID NO: 793536 - DNA, 15 bp, Homo sapiens
gagactattcagaga

SEQ ID NO: 793537 - DNA, 15 bp, Homo sapiens
agactattcagagaa

SEQ ID NO: 793538 - DNA, 15 bp, Homo sapiens
gactattcagagaaa

SEQ ID NO: 793539 - DNA, 15 bp, Homo sapiens
actattcagagaaaa

SEQ ID NO: 793540 - DNA, 15 bp, Homo sapiens
ctattcagagaaaaa

SEQ ID NO: 793541 - DNA, 15 bp, Homo sapiens
tattcagagaaaaag

SEQ ID NO: 793542 - DNA, 15 bp, Homo sapiens
attcagagaaaaagc

SEQ ID NO: 793543 - DNA, 15 bp, Homo sapiens
ttcagagaaaaagcc

SEQ ID NO: 793544 - DNA, 15 bp, Homo sapiens
tcagagaaaaagcct

SEQ ID NO: 793545 - DNA, 15 bp, Homo sapiens
cagagaaaaagcctt

SEQ ID NO: 793546 - DNA, 15 bp, Homo sapiens
agagaaaaagccttt

SEQ ID NO: 793547 - DNA, 15 bp, Homo sapiens
gagaaaaagcctttt

SEQ ID NO: 793548 - DNA, 15 bp, Homo sapiens
agaaaaagccttttg

SEQ ID NO: 793549 - DNA, 15 bp, Homo sapiens
gaaaaagccttttgc

SEQ ID NO: 793550 - DNA, 15 bp, Homo sapiens
aaaaagccttttgct

SEQ ID NO: 793551 - DNA, 15 bp, Homo sapiens
aaaagccttttgctg

SEQ ID NO: 793552 - DNA, 15 bp, Homo sapiens
aaagccttttgctga

SEQ ID NO: 793553 - DNA, 15 bp, Homo sapiens
aagccttttgctgat

SEQ ID NO: 793554 - DNA, 15 bp, Homo sapiens
agccttttgctgata

SEQ ID NO: 793555 - DNA, 15 bp, Homo sapiens
gccttttgctgatac

SEQ ID NO: 793556 - DNA, 15 bp, Homo sapiens
ccttttgctgatact

SEQ ID NO: 793557 - DNA, 15 bp, Homo sapiens
cttttgctgatactg

SEQ ID NO: 793558 - DNA, 15 bp, Homo sapiens
ttttgctgatactgt

SEQ ID NO: 793559 - DNA, 15 bp, Homo sapiens
tttgctgatactgtt

SEQ ID NO: 793560 - DNA, 15 bp, Homo sapiens
ttgctgatactgttt

SEQ ID NO: 793561 - DNA, 15 bp, Homo sapiens
tgctgatactgtttt

SEQ ID NO: 793562 - DNA, 15 bp, Homo sapiens
gctgatactgttttg

SEQ ID NO: 793563 - DNA, 15 bp, Homo sapiens
ctgatactgttttgc

SEQ ID NO: 793564 - DNA, 15 bp, Homo sapiens
tgatactgttttgca

SEQ ID NO: 793565 - DNA, 15 bp, Homo sapiens
gatactgttttgcag

SEQ ID NO: 793566 - DNA, 15 bp, Homo sapiens
atactgttttgcaga

SEQ ID NO: 793567 - DNA, 15 bp, Homo sapiens
tactgttttgcagag

SEQ ID NO: 793568 - DNA, 15 bp, Homo sapiens
actgttttgcagagt

SEQ ID NO: 793569 - DNA, 15 bp, Homo sapiens
ctgttttgcagagtc

SEQ ID NO: 793570 - DNA, 15 bp, Homo sapiens
tgttttgcagagtca

SEQ ID NO: 793571 - DNA, 15 bp, Homo sapiens
gttttgcagagtcag

SEQ ID NO: 793572 - DNA, 15 bp, Homo sapiens
ttttgcagagtcagc

SEQ ID NO: 793573 - DNA, 15 bp, Homo sapiens
tttgcagagtcagca

SEQ ID NO: 793574 - DNA, 15 bp, Homo sapiens
ttgcagagtcagcat

SEQ ID NO: 793575 - DNA, 15 bp, Homo sapiens
tgcagagtcagcatg

SEQ ID NO: 793576 - DNA, 15 bp, Homo sapiens
gcagagtcagcatgt

SEQ ID NO: 793577 - DNA, 15 bp, Homo sapiens
cagagtcagcatgta

SEQ ID NO: 793578 - DNA, 15 bp, Homo sapiens
agagtcagcatgtag

SEQ ID NO: 793579 - DNA, 15 bp, Homo sapiens
gagtcagcatgtagt

SEQ ID NO: 793580 - DNA, 15 bp, Homo sapiens
agtcagcatgtagtt

SEQ ID NO: 793581 - DNA, 15 bp, Homo sapiens
gtcagcatgtagtta

SEQ ID NO: 793582 - DNA, 15 bp, Homo sapiens
tcagcatgtagttat

SEQ ID NO: 793583 - DNA, 15 bp, Homo sapiens
cagcatgtagttata

SEQ ID NO: 793584 - DNA, 15 bp, Homo sapiens
agcatgtagttataa

SEQ ID NO: 793585 - DNA, 15 bp, Homo sapiens
gcatgtagttataac

SEQ ID NO: 793586 - DNA, 15 bp, Homo sapiens
catgtagttataact

SEQ ID NO: 793587 - DNA, 15 bp, Homo sapiens
atgtagttataacta

SEQ ID NO: 793588 - DNA, 15 bp, Homo sapiens
tgtagttataactaa

SEQ ID NO: 793589 - DNA, 15 bp, Homo sapiens
gtagttataactaaa

SEQ ID NO: 793590 - DNA, 15 bp, Homo sapiens
tagttataactaaaa

SEQ ID NO: 793591 - DNA, 15 bp, Homo sapiens
agttataactaaaaa

SEQ ID NO: 793592 - DNA, 15 bp, Homo sapiens
gttataactaaaaat

SEQ ID NO: 793593 - DNA, 15 bp, Homo sapiens
ttataactaaaaatt

SEQ ID NO: 793594 - DNA, 15 bp, Homo sapiens
tataactaaaaattt

SEQ ID NO: 793595 - DNA, 15 bp, Homo sapiens
ataactaaaaatttc

SEQ ID NO: 793596 - DNA, 15 bp, Homo sapiens
taactaaaaatttcg

SEQ ID NO: 793597 - DNA, 15 bp, Homo sapiens
aactaaaaatttcgt

SEQ ID NO: 793598 - DNA, 15 bp, Homo sapiens
actaaaaatttcgta

SEQ ID NO: 793599 - DNA, 15 bp, Homo sapiens
ctaaaaatttcgtaa

SEQ ID NO: 793600 - DNA, 15 bp, Homo sapiens
taaaaatttcgtaaa

SEQ ID NO: 793601 - DNA, 15 bp, Homo sapiens
aaaaatttcgtaaac

SEQ ID NO: 793602 - DNA, 15 bp, Homo sapiens
aaaatttcgtaaacc

SEQ ID NO: 793603 - DNA, 15 bp, Homo sapiens
aaatttcgtaaacct

SEQ ID NO: 793604 - DNA, 15 bp, Homo sapiens
aatttcgtaaacctt

SEQ ID NO: 793605 - DNA, 15 bp, Homo sapiens
atttcgtaaaccttg

SEQ ID NO: 793606 - DNA, 15 bp, Homo sapiens
tttcgtaaaccttgc

SEQ ID NO: 793607 - DNA, 15 bp, Homo sapiens
ttcgtaaaccttgct

SEQ ID NO: 793608 - DNA, 15 bp, Homo sapiens
tcgtaaaccttgctt

SEQ ID NO: 793609 - DNA, 15 bp, Homo sapiens
cgtaaaccttgctta

SEQ ID NO: 793610 - DNA, 15 bp, Homo sapiens
gtaaaccttgcttat

SEQ ID NO: 793611 - DNA, 15 bp, Homo sapiens
taaaccttgcttatt

SEQ ID NO: 793612 - DNA, 15 bp, Homo sapiens
aaaccttgcttattt

SEQ ID NO: 793613 - DNA, 15 bp, Homo sapiens
aaccttgcttatttc

SEQ ID NO: 793614 - DNA, 15 bp, Homo sapiens
accttgcttatttcc

SEQ ID NO: 793615 - DNA, 15 bp, Homo sapiens
ccttgcttatttccc

SEQ ID NO: 793616 - DNA, 15 bp, Homo sapiens
cttgcttatttccca

SEQ ID NO: 793617 - DNA, 15 bp, Homo sapiens
ttgcttatttcccaa

SEQ ID NO: 793618 - DNA, 15 bp, Homo sapiens
tgcttatttcccaag

SEQ ID NO: 793619 - DNA, 15 bp, Homo sapiens
gcttatttcccaagg

SEQ ID NO: 793620 - DNA, 15 bp, Homo sapiens
cttatttcccaaggc

SEQ ID NO: 793621 - DNA, 15 bp, Homo sapiens
ttatttcccaaggcc

SEQ ID NO: 793622 - DNA, 15 bp, Homo sapiens
tatttcccaaggcct

SEQ ID NO: 793623 - DNA, 15 bp, Homo sapiens
atttcccaaggcctt

SEQ ID NO: 793624 - DNA, 15 bp, Homo sapiens
tttcccaaggcctta

SEQ ID NO: 793625 - DNA, 15 bp, Homo sapiens
ttcccaaggccttat

SEQ ID NO: 793626 - DNA, 15 bp, Homo sapiens
tcccaaggccttata

SEQ ID NO: 793627 - DNA, 15 bp, Homo sapiens
cccaaggccttataa

SEQ ID NO: 793628 - DNA, 15 bp, Homo sapiens
ccaaggccttataac

SEQ ID NO: 793629 - DNA, 15 bp, Homo sapiens
caaggccttataact

SEQ ID NO: 793630 - DNA, 15 bp, Homo sapiens
aaggccttataacta

SEQ ID NO: 793631 - DNA, 15 bp, Homo sapiens
aggccttataactag

SEQ ID NO: 793632 - DNA, 15 bp, Homo sapiens
ggccttataactagc

SEQ ID NO: 793633 - DNA, 15 bp, Homo sapiens
gccttataactagca

SEQ ID NO: 793634 - DNA, 15 bp, Homo sapiens
ccttataactagcac

SEQ ID NO: 793635 - DNA, 15 bp, Homo sapiens
cttataactagcaca

SEQ ID NO: 793636 - DNA, 15 bp, Homo sapiens
ttataactagcacaa

SEQ ID NO: 793637 - DNA, 15 bp, Homo sapiens
tataactagcacaag

SEQ ID NO: 793638 - DNA, 15 bp, Homo sapiens
ataactagcacaagt

SEQ ID NO: 793639 - DNA, 15 bp, Homo sapiens
taactagcacaagtt

SEQ ID NO: 793640 - DNA, 15 bp, Homo sapiens
aactagcacaagtta

SEQ ID NO: 793641 - DNA, 15 bp, Homo sapiens
actagcacaagttat

SEQ ID NO: 793642 - DNA, 15 bp, Homo sapiens
ctagcacaagttatt

SEQ ID NO: 793643 - DNA, 15 bp, Homo sapiens
tagcacaagttattc

SEQ ID NO: 793644 - DNA, 15 bp, Homo sapiens
agcacaagttattca

SEQ ID NO: 793645 - DNA, 15 bp, Homo sapiens
gcacaagttattcag

SEQ ID NO: 793646 - DNA, 15 bp, Homo sapiens
cacaagttattcagc

SEQ ID NO: 793647 - DNA, 15 bp, Homo sapiens
acaagttattcagct

SEQ ID NO: 793648 - DNA, 15 bp, Homo sapiens
caagttattcagcta

SEQ ID NO: 793649 - DNA, 15 bp, Homo sapiens
aagttattcagctat

SEQ ID NO: 793650 - DNA, 15 bp, Homo sapiens
agttattcagctatc

SEQ ID NO: 793651 - DNA, 15 bp, Homo sapiens
gttattcagctatca

SEQ ID NO: 793652 - DNA, 15 bp, Homo sapiens
ttattcagctatcat

SEQ ID NO: 793653 - DNA, 15 bp, Homo sapiens
tattcagctatcatc

SEQ ID NO: 793654 - DNA, 15 bp, Homo sapiens
attcagctatcatca

SEQ ID NO: 793655 - DNA, 15 bp, Homo sapiens
ttcagctatcatcat

SEQ ID NO: 793656 - DNA, 15 bp, Homo sapiens
tcagctatcatcata

SEQ ID NO: 793657 - DNA, 15 bp, Homo sapiens
cagctatcatcatag

SEQ ID NO: 793658 - DNA, 15 bp, Homo sapiens
agctatcatcatagt

SEQ ID NO: 793659 - DNA, 15 bp, Homo sapiens
gctatcatcatagtt

SEQ ID NO: 793660 - DNA, 15 bp, Homo sapiens
ctatcatcatagttc

SEQ ID NO: 793661 - DNA, 15 bp, Homo sapiens
tatcatcatagttcc

SEQ ID NO: 793662 - DNA, 15 bp, Homo sapiens
atcatcatagttcct

SEQ ID NO: 793663 - DNA, 15 bp, Homo sapiens
tcatcatagttcctt

SEQ ID NO: 793664 - DNA, 15 bp, Homo sapiens
catcatagttccttt

SEQ ID NO: 793665 - DNA, 15 bp, Homo sapiens
atcatagttcctttg

SEQ ID NO: 793666 - DNA, 15 bp, Homo sapiens
tcatagttcctttga

SEQ ID NO: 793667 - DNA, 15 bp, Homo sapiens
catagttcctttgaa

SEQ ID NO: 793668 - DNA, 15 bp, Homo sapiens
atagttcctttgaaa

SEQ ID NO: 793669 - DNA, 15 bp, Homo sapiens
tagttcctttgaaat

SEQ ID NO: 793670 - DNA, 15 bp, Homo sapiens
agttcctttgaaatg

SEQ ID NO: 793671 - DNA, 15 bp, Homo sapiens
gttcctttgaaatgg

SEQ ID NO: 793672 - DNA, 15 bp, Homo sapiens
ttcctttgaaatggt

SEQ ID NO: 793673 - DNA, 15 bp, Homo sapiens
tcctttgaaatggtt

SEQ ID NO: 793674 - DNA, 15 bp, Homo sapiens
cctttgaaatggtta

SEQ ID NO: 793675 - DNA, 15 bp, Homo sapiens
ctttgaaatggttac

SEQ ID NO: 793676 - DNA, 15 bp, Homo sapiens
tttgaaatggttact

SEQ ID NO: 793677 - DNA, 15 bp, Homo sapiens
ttgaaatggttactg

SEQ ID NO: 793678 - DNA, 15 bp, Homo sapiens
tgaaatggttactgg

SEQ ID NO: 793679 - DNA, 15 bp, Homo sapiens
gaaatggttactgga

SEQ ID NO: 793680 - DNA, 15 bp, Homo sapiens
aaatggttactggat

SEQ ID NO: 793681 - DNA, 15 bp, Homo sapiens
aatggttactggata

SEQ ID NO: 793682 - DNA, 15 bp, Homo sapiens
atggttactggatac

SEQ ID NO: 793683 - DNA, 15 bp, Homo sapiens
tggttactggatacc

SEQ ID NO: 793684 - DNA, 15 bp, Homo sapiens
ggttactggataccc

SEQ ID NO: 793685 - DNA, 15 bp, Homo sapiens
gttactggataccct

SEQ ID NO: 793686 - DNA, 15 bp, Homo sapiens
ttactggataccctg

SEQ ID NO: 793687 - DNA, 15 bp, Homo sapiens
tactggataccctgt

SEQ ID NO: 793688 - DNA, 15 bp, Homo sapiens
actggataccctgtc

SEQ ID NO: 793689 - DNA, 15 bp, Homo sapiens
ctggataccctgtct

SEQ ID NO: 793690 - DNA, 15 bp, Homo sapiens
tggataccctgtctt

SEQ ID NO: 793691 - DNA, 15 bp, Homo sapiens
ggataccctgtcttt

SEQ ID NO: 793692 - DNA, 15 bp, Homo sapiens
gataccctgtctttt

SEQ ID NO: 793693 - DNA, 15 bp, Homo sapiens
ataccctgtcttttg

SEQ ID NO: 793694 - DNA, 15 bp, Homo sapiens
taccctgtcttttgg

SEQ ID NO: 793695 - DNA, 15 bp, Homo sapiens
accctgtcttttggt

SEQ ID NO: 793696 - DNA, 15 bp, Homo sapiens
ccctgtcttttggtt

SEQ ID NO: 793697 - DNA, 15 bp, Homo sapiens
cctgtcttttggtta

SEQ ID NO: 793698 - DNA, 15 bp, Homo sapiens
ctgtcttttggttag

SEQ ID NO: 793699 - DNA, 15 bp, Homo sapiens
tgtcttttggttagg

SEQ ID NO: 793700 - DNA, 15 bp, Homo sapiens
gtcttttggttaggc

SEQ ID NO: 793701 - DNA, 15 bp, Homo sapiens
tcttttggttaggct

SEQ ID NO: 793702 - DNA, 15 bp, Homo sapiens
cttttggttaggctg

SEQ ID NO: 793703 - DNA, 15 bp, Homo sapiens
ttttggttaggctgt

SEQ ID NO: 793704 - DNA, 15 bp, Homo sapiens
tttggttaggctgtt

SEQ ID NO: 793705 - DNA, 15 bp, Homo sapiens
ttggttaggctgttt

SEQ ID NO: 793706 - DNA, 15 bp, Homo sapiens
tggttaggctgtttt

SEQ ID NO: 793707 - DNA, 15 bp, Homo sapiens
ggttaggctgttttc

SEQ ID NO: 793708 - DNA, 15 bp, Homo sapiens
gttaggctgttttcc

SEQ ID NO: 793709 - DNA, 15 bp, Homo sapiens
ttaggctgttttcca

SEQ ID NO: 793710 - DNA, 15 bp, Homo sapiens
taggctgttttccat

SEQ ID NO: 793711 - DNA, 15 bp, Homo sapiens
aggctgttttccatt

SEQ ID NO: 793712 - DNA, 15 bp, Homo sapiens
ggctgttttccattt

SEQ ID NO: 793713 - DNA, 15 bp, Homo sapiens
gctgttttccattta

SEQ ID NO: 793714 - DNA, 15 bp, Homo sapiens
ctgttttccatttat

SEQ ID NO: 793715 - DNA, 15 bp, Homo sapiens
tgttttccatttatg

SEQ ID NO: 793716 - DNA, 15 bp, Homo sapiens
gttttccatttatgt

SEQ ID NO: 793717 - DNA, 15 bp, Homo sapiens
ttttccatttatgtt

SEQ ID NO: 793718 - DNA, 15 bp, Homo sapiens
tttccatttatgttt

SEQ ID NO: 793719 - DNA, 15 bp, Homo sapiens
ttccatttatgtttg

SEQ ID NO: 793720 - DNA, 15 bp, Homo sapiens
tccatttatgtttga

SEQ ID NO: 793721 - DNA, 15 bp, Homo sapiens
ccatttatgtttgag

SEQ ID NO: 793722 - DNA, 15 bp, Homo sapiens
catttatgtttgagg

SEQ ID NO: 793723 - DNA, 15 bp, Homo sapiens
atttatgtttgagga

SEQ ID NO: 793724 - DNA, 15 bp, Homo sapiens
tttatgtttgaggaa

SEQ ID NO: 793725 - DNA, 15 bp, Homo sapiens
ttatgtttgaggaat

SEQ ID NO: 793726 - DNA, 15 bp, Homo sapiens
tatgtttgaggaata

SEQ ID NO: 793727 - DNA, 15 bp, Homo sapiens
atgtttgaggaataa

SEQ ID NO: 793728 - DNA, 15 bp, Homo sapiens
tgtttgaggaataag

SEQ ID NO: 793729 - DNA, 15 bp, Homo sapiens
gtttgaggaataagt

SEQ ID NO: 793730 - DNA, 15 bp, Homo sapiens
tttgaggaataagta

SEQ ID NO: 793731 - DNA, 15 bp, Homo sapiens
ttgaggaataagtaa

SEQ ID NO: 793732 - DNA, 15 bp, Homo sapiens
tgaggaataagtaaa

SEQ ID NO: 793733 - DNA, 15 bp, Homo sapiens
gaggaataagtaaaa

SEQ ID NO: 793734 - DNA, 15 bp, Homo sapiens
aggaataagtaaaaa

SEQ ID NO: 793735 - DNA, 15 bp, Homo sapiens
ggaataagtaaaaat

SEQ ID NO: 793736 - DNA, 15 bp, Homo sapiens
gaataagtaaaaata

SEQ ID NO: 793737 - DNA, 15 bp, Homo sapiens
aataagtaaaaatag

SEQ ID NO: 793738 - DNA, 15 bp, Homo sapiens
ataagtaaaaatagg

SEQ ID NO: 793739 - DNA, 15 bp, Homo sapiens
taagtaaaaatagga

SEQ ID NO: 793740 - DNA, 15 bp, Homo sapiens
aagtaaaaataggaa

SEQ ID NO: 793741 - DNA, 15 bp, Homo sapiens
agtaaaaataggaag

SEQ ID NO: 793742 - DNA, 15 bp, Homo sapiens
gtaaaaataggaagg

SEQ ID NO: 793743 - DNA, 15 bp, Homo sapiens
taaaaataggaagga

SEQ ID NO: 793744 - DNA, 15 bp, Homo sapiens
aaaaataggaaggat

SEQ ID NO: 793745 - DNA, 15 bp, Homo sapiens
aaaataggaaggatg

SEQ ID NO: 793746 - DNA, 15 bp, Homo sapiens
aaataggaaggatgt

SEQ ID NO: 793747 - DNA, 15 bp, Homo sapiens
aataggaaggatgtg

SEQ ID NO: 793748 - DNA, 15 bp, Homo sapiens
ataggaaggatgtga

SEQ ID NO: 793749 - DNA, 15 bp, Homo sapiens
taggaaggatgtgag

SEQ ID NO: 793750 - DNA, 15 bp, Homo sapiens
aggaaggatgtgaga

SEQ ID NO: 793751 - DNA, 15 bp, Homo sapiens
ggaaggatgtgagat

SEQ ID NO: 793752 - DNA, 15 bp, Homo sapiens
gaaggatgtgagatg

SEQ ID NO: 793753 - DNA, 15 bp, Homo sapiens
aaggatgtgagatgt

SEQ ID NO: 793754 - DNA, 15 bp, Homo sapiens
aggatgtgagatgtc

SEQ ID NO: 793755 - DNA, 15 bp, Homo sapiens
ggatgtgagatgtct

SEQ ID NO: 793756 - DNA, 15 bp, Homo sapiens
gatgtgagatgtctg

SEQ ID NO: 793757 - DNA, 15 bp, Homo sapiens
atgtgagatgtctgg

SEQ ID NO: 793758 - DNA, 15 bp, Homo sapiens
tgtgagatgtctgga

SEQ ID NO: 793759 - DNA, 15 bp, Homo sapiens
gtgagatgtctggag

SEQ ID NO: 793760 - DNA, 15 bp, Homo sapiens
tgagatgtctggagg

SEQ ID NO: 793761 - DNA, 15 bp, Homo sapiens
gagatgtctggaggt

SEQ ID NO: 793762 - DNA, 15 bp, Homo sapiens
agatgtctggaggtc

SEQ ID NO: 793763 - DNA, 15 bp, Homo sapiens
gatgtctggaggtcc

SEQ ID NO: 793764 - DNA, 15 bp, Homo sapiens
atgtctggaggtcca

SEQ ID NO: 793765 - DNA, 15 bp, Homo sapiens
tgtctggaggtccaa

SEQ ID NO: 793766 - DNA, 15 bp, Homo sapiens
gtctggaggtccaat

SEQ ID NO: 793767 - DNA, 15 bp, Homo sapiens
tctggaggtccaatg

SEQ ID NO: 793768 - DNA, 15 bp, Homo sapiens
ctggaggtccaatga

SEQ ID NO: 793769 - DNA, 15 bp, Homo sapiens
tggaggtccaatgag

SEQ ID NO: 793770 - DNA, 15 bp, Homo sapiens
ggaggtccaatgagt

SEQ ID NO: 793771 - DNA, 15 bp, Homo sapiens
gaggtccaatgagta

SEQ ID NO: 793772 - DNA, 15 bp, Homo sapiens
aggtccaatgagtaa

SEQ ID NO: 793773 - DNA, 15 bp, Homo sapiens
ggtccaatgagtaaa

SEQ ID NO: 793774 - DNA, 15 bp, Homo sapiens
gtccaatgagtaaaa

SEQ ID NO: 793775 - DNA, 15 bp, Homo sapiens
tccaatgagtaaaat

SEQ ID NO: 793776 - DNA, 15 bp, Homo sapiens
ccaatgagtaaaatc

SEQ ID NO: 793777 - DNA, 15 bp, Homo sapiens
caatgagtaaaatct

SEQ ID NO: 793778 - DNA, 15 bp, Homo sapiens
aatgagtaaaatctg

SEQ ID NO: 793779 - DNA, 15 bp, Homo sapiens
atgagtaaaatctgt

SEQ ID NO: 793780 - DNA, 15 bp, Homo sapiens
tgagtaaaatctgta

SEQ ID NO: 793781 - DNA, 15 bp, Homo sapiens
gagtaaaatctgtat

SEQ ID NO: 793782 - DNA, 15 bp, Homo sapiens
agtaaaatctgtatt

SEQ ID NO: 793783 - DNA, 15 bp, Homo sapiens
gtaaaatctgtattt

SEQ ID NO: 793784 - DNA, 15 bp, Homo sapiens
taaaatctgtatttg

SEQ ID NO: 793785 - DNA, 15 bp, Homo sapiens
aaaatctgtatttgt

SEQ ID NO: 793786 - DNA, 15 bp, Homo sapiens
aaatctgtatttgtc

SEQ ID NO: 793787 - DNA, 15 bp, Homo sapiens
aatctgtatttgtca

SEQ ID NO: 793788 - DNA, 15 bp, Homo sapiens
atctgtatttgtcaa

SEQ ID NO: 793789 - DNA, 15 bp, Homo sapiens
tctgtatttgtcaaa

SEQ ID NO: 793790 - DNA, 15 bp, Homo sapiens
ctgtatttgtcaaac

SEQ ID NO: 793791 - DNA, 15 bp, Homo sapiens
tgtatttgtcaaaca

SEQ ID NO: 793792 - DNA, 15 bp, Homo sapiens
gtatttgtcaaacac

SEQ ID NO: 793793 - DNA, 15 bp, Homo sapiens
tatttgtcaaacact

SEQ ID NO: 793794 - DNA, 15 bp, Homo sapiens
atttgtcaaacactt

SEQ ID NO: 793795 - DNA, 15 bp, Homo sapiens
tttgtcaaacacttc

SEQ ID NO: 793796 - DNA, 15 bp, Homo sapiens
ttgtcaaacacttca

SEQ ID NO: 793797 - DNA, 15 bp, Homo sapiens
tgtcaaacacttcaa

SEQ ID NO: 793798 - DNA, 15 bp, Homo sapiens
gtcaaacacttcaag

SEQ ID NO: 793799 - DNA, 15 bp, Homo sapiens
tcaaacacttcaagt

SEQ ID NO: 793800 - DNA, 15 bp, Homo sapiens
caaacacttcaagtg

SEQ ID NO: 793801 - DNA, 15 bp, Homo sapiens
aaacacttcaagtgt

SEQ ID NO: 793802 - DNA, 15 bp, Homo sapiens
aacacttcaagtgtc

SEQ ID NO: 793803 - DNA, 15 bp, Homo sapiens
acacttcaagtgtca

SEQ ID NO: 793804 - DNA, 15 bp, Homo sapiens
cacttcaagtgtcag

SEQ ID NO: 793805 - DNA, 15 bp, Homo sapiens
acttcaagtgtcagt

SEQ ID NO: 793806 - DNA, 15 bp, Homo sapiens
cttcaagtgtcagta

SEQ ID NO: 793807 - DNA, 15 bp, Homo sapiens
ttcaagtgtcagtat

SEQ ID NO: 793808 - DNA, 15 bp, Homo sapiens
tcaagtgtcagtatg

SEQ ID NO: 793809 - DNA, 15 bp, Homo sapiens
caagtgtcagtatgt

SEQ ID NO: 793810 - DNA, 15 bp, Homo sapiens
aagtgtcagtatgtc

SEQ ID NO: 793811 - DNA, 15 bp, Homo sapiens
agtgtcagtatgtcc

SEQ ID NO: 793812 - DNA, 15 bp, Homo sapiens
gtgtcagtatgtcca

SEQ ID NO: 793813 - DNA, 15 bp, Homo sapiens
tgtcagtatgtccat

SEQ ID NO: 793814 - DNA, 15 bp, Homo sapiens
gtcagtatgtccata

SEQ ID NO: 793815 - DNA, 15 bp, Homo sapiens
tcagtatgtccatac

SEQ ID NO: 793816 - DNA, 15 bp, Homo sapiens
cagtatgtccatact

SEQ ID NO: 793817 - DNA, 15 bp, Homo sapiens
agtatgtccatactt

SEQ ID NO: 793818 - DNA, 15 bp, Homo sapiens
gtatgtccatacttc

SEQ ID NO: 793819 - DNA, 15 bp, Homo sapiens
tatgtccatacttcc

SEQ ID NO: 793820 - DNA, 15 bp, Homo sapiens
atgtccatacttcca

SEQ ID NO: 793821 - DNA, 15 bp, Homo sapiens
tgtccatacttccaa

SEQ ID NO: 793822 - DNA, 15 bp, Homo sapiens
gtccatacttccaaa

SEQ ID NO: 793823 - DNA, 15 bp, Homo sapiens
tccatacttccaaaa

SEQ ID NO: 793824 - DNA, 15 bp, Homo sapiens
ccatacttccaaaac

SEQ ID NO: 793825 - DNA, 15 bp, Homo sapiens
catacttccaaaaca

SEQ ID NO: 793826 - DNA, 15 bp, Homo sapiens
atacttccaaaacag

SEQ ID NO: 793827 - DNA, 15 bp, Homo sapiens
tacttccaaaacagt

SEQ ID NO: 793828 - DNA, 15 bp, Homo sapiens
acttccaaaacagta

SEQ ID NO: 793829 - DNA, 15 bp, Homo sapiens
cttccaaaacagtac

SEQ ID NO: 793830 - DNA, 15 bp, Homo sapiens
ttccaaaacagtact

SEQ ID NO: 793831 - DNA, 15 bp, Homo sapiens
tccaaaacagtactt

SEQ ID NO: 793832 - DNA, 15 bp, Homo sapiens
ccaaaacagtacttt

SEQ ID NO: 793833 - DNA, 15 bp, Homo sapiens
caaaacagtactttt

SEQ ID NO: 793834 - DNA, 15 bp, Homo sapiens
aaaacagtacttttc

SEQ ID NO: 793835 - DNA, 15 bp, Homo sapiens
aaacagtacttttca

SEQ ID NO: 793836 - DNA, 15 bp, Homo sapiens
aacagtacttttcag

SEQ ID NO: 793837 - DNA, 15 bp, Homo sapiens
acagtacttttcagt

SEQ ID NO: 793838 - DNA, 15 bp, Homo sapiens
cagtacttttcagtt

SEQ ID NO: 793839 - DNA, 15 bp, Homo sapiens
agtacttttcagtta

SEQ ID NO: 793840 - DNA, 15 bp, Homo sapiens
gtacttttcagttaa

SEQ ID NO: 793841 - DNA, 15 bp, Homo sapiens
tacttttcagttaag

SEQ ID NO: 793842 - DNA, 15 bp, Homo sapiens
acttttcagttaagt

SEQ ID NO: 793843 - DNA, 15 bp, Homo sapiens
cttttcagttaagta

SEQ ID NO: 793844 - DNA, 15 bp, Homo sapiens
ttttcagttaagtat

SEQ ID NO: 793845 - DNA, 15 bp, Homo sapiens
tttcagttaagtata

SEQ ID NO: 793846 - DNA, 15 bp, Homo sapiens
ttcagttaagtatat

SEQ ID NO: 793847 - DNA, 15 bp, Homo sapiens
tcagttaagtatata

SEQ ID NO: 793848 - DNA, 15 bp, Homo sapiens
cagttaagtatataa

SEQ ID NO: 793849 - DNA, 15 bp, Homo sapiens
agttaagtatataaa

SEQ ID NO: 793850 - DNA, 15 bp, Homo sapiens
gttaagtatataaat

SEQ ID NO: 793851 - DNA, 15 bp, Homo sapiens
ttaagtatataaatg

SEQ ID NO: 793852 - DNA, 15 bp, Homo sapiens
taagtatataaatgt

SEQ ID NO: 793853 - DNA, 15 bp, Homo sapiens
aagtatataaatgtg

SEQ ID NO: 793854 - DNA, 15 bp, Homo sapiens
agtatataaatgtga

SEQ ID NO: 793855 - DNA, 15 bp, Homo sapiens
gtatataaatgtgaa

SEQ ID NO: 793856 - DNA, 15 bp, Homo sapiens
tatataaatgtgaat

SEQ ID NO: 793857 - DNA, 15 bp, Homo sapiens
atataaatgtgaatt

SEQ ID NO: 793858 - DNA, 15 bp, Homo sapiens
tataaatgtgaattt

SEQ ID NO: 793859 - DNA, 15 bp, Homo sapiens
ataaatgtgaatttt

SEQ ID NO: 793860 - DNA, 15 bp, Homo sapiens
taaatgtgaattttg

SEQ ID NO: 793861 - DNA, 15 bp, Homo sapiens
aaatgtgaattttga

SEQ ID NO: 793862 - DNA, 15 bp, Homo sapiens
aatgtgaattttgat

SEQ ID NO: 793863 - DNA, 15 bp, Homo sapiens
atgtgaattttgatg

SEQ ID NO: 793864 - DNA, 15 bp, Homo sapiens
tgtgaattttgatgc

SEQ ID NO: 793865 - DNA, 15 bp, Homo sapiens
gtgaattttgatgcc

SEQ ID NO: 793866 - DNA, 15 bp, Homo sapiens
tgaattttgatgcca

SEQ ID NO: 793867 - DNA, 15 bp, Homo sapiens
gaattttgatgccac

SEQ ID NO: 793868 - DNA, 15 bp, Homo sapiens
aattttgatgccaca

SEQ ID NO: 793869 - DNA, 15 bp, Homo sapiens
attttgatgccacag

SEQ ID NO: 793870 - DNA, 15 bp, Homo sapiens
ttttgatgccacagg

SEQ ID NO: 793871 - DNA, 15 bp, Homo sapiens
tttgatgccacaggc

SEQ ID NO: 793872 - DNA, 15 bp, Homo sapiens
ttgatgccacaggca

SEQ ID NO: 793873 - DNA, 15 bp, Homo sapiens
tgatgccacaggcac

SEQ ID NO: 793874 - DNA, 15 bp, Homo sapiens
gatgccacaggcaca

SEQ ID NO: 793875 - DNA, 15 bp, Homo sapiens
atgccacaggcacaa

SEQ ID NO: 793876 - DNA, 15 bp, Homo sapiens
tgccacaggcacaag

SEQ ID NO: 793877 - DNA, 15 bp, Homo sapiens
gccacaggcacaagc

SEQ ID NO: 793878 - DNA, 15 bp, Homo sapiens
ccacaggcacaagca

SEQ ID NO: 793879 - DNA, 15 bp, Homo sapiens
cacaggcacaagcag

SEQ ID NO: 793880 - DNA, 15 bp, Homo sapiens
acaggcacaagcagc

SEQ ID NO: 793881 - DNA, 15 bp, Homo sapiens
caggcacaagcagcc

SEQ ID NO: 793882 - DNA, 15 bp, Homo sapiens
aggcacaagcagcct

SEQ ID NO: 793883 - DNA, 15 bp, Homo sapiens
ggcacaagcagcctc

SEQ ID NO: 793884 - DNA, 15 bp, Homo sapiens
gcacaagcagcctct

SEQ ID NO: 793885 - DNA, 15 bp, Homo sapiens
cacaagcagcctctg

SEQ ID NO: 793886 - DNA, 15 bp, Homo sapiens
acaagcagcctctga

SEQ ID NO: 793887 - DNA, 15 bp, Homo sapiens
caagcagcctctgaa

SEQ ID NO: 793888 - DNA, 15 bp, Homo sapiens
aagcagcctctgaaa

SEQ ID NO: 793889 - DNA, 15 bp, Homo sapiens
agcagcctctgaaaa

SEQ ID NO: 793890 - DNA, 15 bp, Homo sapiens
gcagcctctgaaaat

SEQ ID NO: 793891 - DNA, 15 bp, Homo sapiens
cagcctctgaaaata

SEQ ID NO: 793892 - DNA, 15 bp, Homo sapiens
agcctctgaaaatac

SEQ ID NO: 793893 - DNA, 15 bp, Homo sapiens
gcctctgaaaatact

SEQ ID NO: 793894 - DNA, 15 bp, Homo sapiens
cctctgaaaatactc

SEQ ID NO: 793895 - DNA, 15 bp, Homo sapiens
ctctgaaaatactca

SEQ ID NO: 793896 - DNA, 15 bp, Homo sapiens
tctgaaaatactcac

SEQ ID NO: 793897 - DNA, 15 bp, Homo sapiens
ctgaaaatactcacc

SEQ ID NO: 793898 - DNA, 15 bp, Homo sapiens
tgaaaatactcacca

SEQ ID NO: 793899 - DNA, 15 bp, Homo sapiens
gaaaatactcaccac

SEQ ID NO: 793900 - DNA, 15 bp, Homo sapiens
aaaatactcaccaca

SEQ ID NO: 793901 - DNA, 15 bp, Homo sapiens
aaatactcaccacaa

SEQ ID NO: 793902 - DNA, 15 bp, Homo sapiens
aatactcaccacaaa

SEQ ID NO: 793903 - DNA, 15 bp, Homo sapiens
atactcaccacaaaa

SEQ ID NO: 793904 - DNA, 15 bp, Homo sapiens
tactcaccacaaaat

SEQ ID NO: 793905 - DNA, 15 bp, Homo sapiens
actcaccacaaaatt

SEQ ID NO: 793906 - DNA, 15 bp, Homo sapiens
ctcaccacaaaattt

SEQ ID NO: 793907 - DNA, 15 bp, Homo sapiens
tcaccacaaaatttg

SEQ ID NO: 793908 - DNA, 15 bp, Homo sapiens
caccacaaaatttgg

SEQ ID NO: 793909 - DNA, 15 bp, Homo sapiens
accacaaaatttggc

SEQ ID NO: 793910 - DNA, 15 bp, Homo sapiens
ccacaaaatttggct

SEQ ID NO: 793911 - DNA, 15 bp, Homo sapiens
cacaaaatttggctg

SEQ ID NO: 793912 - DNA, 15 bp, Homo sapiens
acaaaatttggctgc

SEQ ID NO: 793913 - DNA, 15 bp, Homo sapiens
caaaatttggctgca

SEQ ID NO: 793914 - DNA, 15 bp, Homo sapiens
aaaatttggctgcat

SEQ ID NO: 793915 - DNA, 15 bp, Homo sapiens
aaatttggctgcata

SEQ ID NO: 793916 - DNA, 15 bp, Homo sapiens
aatttggctgcatat

SEQ ID NO: 793917 - DNA, 15 bp, Homo sapiens
atttggctgcatatt

SEQ ID NO: 793918 - DNA, 15 bp, Homo sapiens
tttggctgcatatta

SEQ ID NO: 793919 - DNA, 15 bp, Homo sapiens
ttggctgcatattag

SEQ ID NO: 793920 - DNA, 15 bp, Homo sapiens
tggctgcatattaga

SEQ ID NO: 793921 - DNA, 15 bp, Homo sapiens
ggctgcatattagaa

SEQ ID NO: 793922 - DNA, 15 bp, Homo sapiens
gctgcatattagaaa

SEQ ID NO: 793923 - DNA, 15 bp, Homo sapiens
ctgcatattagaaag

SEQ ID NO: 793924 - DNA, 15 bp, Homo sapiens
tgcatattagaaaga

SEQ ID NO: 793925 - DNA, 15 bp, Homo sapiens
gcatattagaaagaa

SEQ ID NO: 793926 - DNA, 15 bp, Homo sapiens
catattagaaagaag

SEQ ID NO: 793927 - DNA, 15 bp, Homo sapiens
atattagaaagaaga

SEQ ID NO: 793928 - DNA, 15 bp, Homo sapiens
tattagaaagaagat

SEQ ID NO: 793929 - DNA, 15 bp, Homo sapiens
attagaaagaagatt

SEQ ID NO: 793930 - DNA, 15 bp, Homo sapiens
ttagaaagaagattt

SEQ ID NO: 793931 - DNA, 15 bp, Homo sapiens
tagaaagaagatttg

SEQ ID NO: 793932 - DNA, 15 bp, Homo sapiens
agaaagaagatttgg

SEQ ID NO: 793933 - DNA, 15 bp, Homo sapiens
gaaagaagatttggt

SEQ ID NO: 793934 - DNA, 15 bp, Homo sapiens
aaagaagatttggta

SEQ ID NO: 793935 - DNA, 15 bp, Homo sapiens
aagaagatttggtat

SEQ ID NO: 793936 - DNA, 15 bp, Homo sapiens
agaagatttggtatg

SEQ ID NO: 793937 - DNA, 15 bp, Homo sapiens
gaagatttggtatgc

SEQ ID NO: 793938 - DNA, 15 bp, Homo sapiens
aagatttggtatgct

SEQ ID NO: 793939 - DNA, 15 bp, Homo sapiens
agatttggtatgctg

SEQ ID NO: 793940 - DNA, 15 bp, Homo sapiens
gatttggtatgctgt

SEQ ID NO: 793941 - DNA, 15 bp, Homo sapiens
atttggtatgctgtc

SEQ ID NO: 793942 - DNA, 15 bp, Homo sapiens
tttggtatgctgtca

SEQ ID NO: 793943 - DNA, 15 bp, Homo sapiens
ttggtatgctgtcag

SEQ ID NO: 793944 - DNA, 15 bp, Homo sapiens
tggtatgctgtcagt

SEQ ID NO: 793945 - DNA, 15 bp, Homo sapiens
ggtatgctgtcagtt

SEQ ID NO: 793946 - DNA, 15 bp, Homo sapiens
gtatgctgtcagttt

SEQ ID NO: 793947 - DNA, 15 bp, Homo sapiens
tatgctgtcagtttc

SEQ ID NO: 793948 - DNA, 15 bp, Homo sapiens
atgctgtcagtttct

SEQ ID NO: 793949 - DNA, 15 bp, Homo sapiens
tgctgtcagtttcta

SEQ ID NO: 793950 - DNA, 15 bp, Homo sapiens
gctgtcagtttctag

SEQ ID NO: 793951 - DNA, 15 bp, Homo sapiens
ctgtcagtttctagt

SEQ ID NO: 793952 - DNA, 15 bp, Homo sapiens
tgtcagtttctagtg

SEQ ID NO: 793953 - DNA, 15 bp, Homo sapiens
gtcagtttctagtga

SEQ ID NO: 793954 - DNA, 15 bp, Homo sapiens
tcagtttctagtgac

SEQ ID NO: 793955 - DNA, 15 bp, Homo sapiens
cagtttctagtgaca

SEQ ID NO: 793956 - DNA, 15 bp, Homo sapiens
agtttctagtgacag

SEQ ID NO: 793957 - DNA, 15 bp, Homo sapiens
gtttctagtgacaga

SEQ ID NO: 793958 - DNA, 15 bp, Homo sapiens
tttctagtgacagac

SEQ ID NO: 793959 - DNA, 15 bp, Homo sapiens
ttctagtgacagact

SEQ ID NO: 793960 - DNA, 15 bp, Homo sapiens
tctagtgacagacta

SEQ ID NO: 793961 - DNA, 15 bp, Homo sapiens
ctagtgacagactat

SEQ ID NO: 793962 - DNA, 15 bp, Homo sapiens
tagtgacagactata

SEQ ID NO: 793963 - DNA, 15 bp, Homo sapiens
agtgacagactataa

SEQ ID NO: 793964 - DNA, 15 bp, Homo sapiens
gtgacagactataaa

SEQ ID NO: 793965 - DNA, 15 bp, Homo sapiens
tgacagactataaac

SEQ ID NO: 793966 - DNA, 15 bp, Homo sapiens
gacagactataaacc

SEQ ID NO: 793967 - DNA, 15 bp, Homo sapiens
acagactataaacct

SEQ ID NO: 793968 - DNA, 15 bp, Homo sapiens
cagactataaaccta

SEQ ID NO: 793969 - DNA, 15 bp, Homo sapiens
agactataaacctag

SEQ ID NO: 793970 - DNA, 15 bp, Homo sapiens
gactataaacctagt

SEQ ID NO: 793971 - DNA, 15 bp, Homo sapiens
actataaacctagtc

SEQ ID NO: 793972 - DNA, 15 bp, Homo sapiens
ctataaacctagtcc

SEQ ID NO: 793973 - DNA, 15 bp, Homo sapiens
tataaacctagtccg

SEQ ID NO: 793974 - DNA, 15 bp, Homo sapiens
ataaacctagtccgg

SEQ ID NO: 793975 - DNA, 15 bp, Homo sapiens
taaacctagtccggc

SEQ ID NO: 793976 - DNA, 15 bp, Homo sapiens
aaacctagtccggct

SEQ ID NO: 793977 - DNA, 15 bp, Homo sapiens
aacctagtccggctc

SEQ ID NO: 793978 - DNA, 15 bp, Homo sapiens
acctagtccggctca

SEQ ID NO: 793979 - DNA, 15 bp, Homo sapiens
cctagtccggctcat

SEQ ID NO: 793980 - DNA, 15 bp, Homo sapiens
ctagtccggctcatt

SEQ ID NO: 793981 - DNA, 15 bp, Homo sapiens
tagtccggctcattt

SEQ ID NO: 793982 - DNA, 15 bp, Homo sapiens
agtccggctcatttc

SEQ ID NO: 793983 - DNA, 15 bp, Homo sapiens
gtccggctcatttcc

SEQ ID NO: 793984 - DNA, 15 bp, Homo sapiens
tccggctcatttccc

SEQ ID NO: 793985 - DNA, 15 bp, Homo sapiens
ccggctcatttccct

SEQ ID NO: 793986 - DNA, 15 bp, Homo sapiens
cggctcatttccctg

SEQ ID NO: 793987 - DNA, 15 bp, Homo sapiens
ggctcatttccctgg

SEQ ID NO: 793988 - DNA, 15 bp, Homo sapiens
gctcatttccctggg

SEQ ID NO: 793989 - DNA, 15 bp, Homo sapiens
ctcatttccctgggc

SEQ ID NO: 793990 - DNA, 15 bp, Homo sapiens
tcatttccctgggct

SEQ ID NO: 793991 - DNA, 15 bp, Homo sapiens
catttccctgggctc

SEQ ID NO: 793992 - DNA, 15 bp, Homo sapiens
atttccctgggctcg

SEQ ID NO: 793993 - DNA, 15 bp, Homo sapiens
tttccctgggctcgc

SEQ ID NO: 793994 - DNA, 15 bp, Homo sapiens
ttccctgggctcgct

SEQ ID NO: 793995 - DNA, 15 bp, Homo sapiens
tccctgggctcgctg

SEQ ID NO: 793996 - DNA, 15 bp, Homo sapiens
ccctgggctcgctgt

SEQ ID NO: 793997 - DNA, 15 bp, Homo sapiens
cctgggctcgctgtt

SEQ ID NO: 793998 - DNA, 15 bp, Homo sapiens
ctgggctcgctgtta

SEQ ID NO: 793999 - DNA, 15 bp, Homo sapiens
tgggctcgctgttac

SEQ ID NO: 794000 - DNA, 15 bp, Homo sapiens
gggctcgctgttacg

SEQ ID NO: 794001 - DNA, 15 bp, Homo sapiens
ggctcgctgttacgg

SEQ ID NO: 794002 - DNA, 15 bp, Homo sapiens
gctcgctgttacgga

SEQ ID NO: 794003 - DNA, 15 bp, Homo sapiens
ctcgctgttacggaa

SEQ ID NO: 794004 - DNA, 15 bp, Homo sapiens
tcgctgttacggaaa

SEQ ID NO: 794005 - DNA, 15 bp, Homo sapiens
cgctgttacggaaaa

SEQ ID NO: 794006 - DNA, 15 bp, Homo sapiens
gctgttacggaaaag

SEQ ID NO: 794007 - DNA, 15 bp, Homo sapiens
ctgttacggaaaaga

SEQ ID NO: 794008 - DNA, 15 bp, Homo sapiens
tgttacggaaaagat

SEQ ID NO: 794009 - DNA, 15 bp, Homo sapiens
gttacggaaaagatc

SEQ ID NO: 794010 - DNA, 15 bp, Homo sapiens
ttacggaaaagatca

SEQ ID NO: 794011 - DNA, 15 bp, Homo sapiens
tacggaaaagatcat

SEQ ID NO: 794012 - DNA, 15 bp, Homo sapiens
acggaaaagatcatg

SEQ ID NO: 794013 - DNA, 15 bp, Homo sapiens
cggaaaagatcatgg

SEQ ID NO: 794014 - DNA, 15 bp, Homo sapiens
ggaaaagatcatggt

SEQ ID NO: 794015 - DNA, 15 bp, Homo sapiens
gaaaagatcatggtt

SEQ ID NO: 794016 - DNA, 15 bp, Homo sapiens
aaaagatcatggtta

SEQ ID NO: 794017 - DNA, 15 bp, Homo sapiens
aaagatcatggttac

SEQ ID NO: 794018 - DNA, 15 bp, Homo sapiens
aagatcatggttacc

SEQ ID NO: 794019 - DNA, 15 bp, Homo sapiens
agatcatggttacca

SEQ ID NO: 794020 - DNA, 15 bp, Homo sapiens
gatcatggttaccag

SEQ ID NO: 794021 - DNA, 15 bp, Homo sapiens
atcatggttaccagg

SEQ ID NO: 794022 - DNA, 15 bp, Homo sapiens
tcatggttaccaggc

SEQ ID NO: 794023 - DNA, 15 bp, Homo sapiens
catggttaccaggca

SEQ ID NO: 794024 - DNA, 15 bp, Homo sapiens
atggttaccaggcaa

SEQ ID NO: 794025 - DNA, 15 bp, Homo sapiens
tggttaccaggcaag

SEQ ID NO: 794026 - DNA, 15 bp, Homo sapiens
ggttaccaggcaagt

SEQ ID NO: 794027 - DNA, 15 bp, Homo sapiens
gttaccaggcaagtg

SEQ ID NO: 794028 - DNA, 15 bp, Homo sapiens
ttaccaggcaagtgc

SEQ ID NO: 794029 - DNA, 15 bp, Homo sapiens
taccaggcaagtgct

SEQ ID NO: 794030 - DNA, 15 bp, Homo sapiens
accaggcaagtgctc

SEQ ID NO: 794031 - DNA, 15 bp, Homo sapiens
ccaggcaagtgctca

SEQ ID NO: 794032 - DNA, 15 bp, Homo sapiens
caggcaagtgctcaa

SEQ ID NO: 794033 - DNA, 15 bp, Homo sapiens
aggcaagtgctcaaa

SEQ ID NO: 794034 - DNA, 15 bp, Homo sapiens
ggcaagtgctcaaag

SEQ ID NO: 794035 - DNA, 15 bp, Homo sapiens
gcaagtgctcaaaga

SEQ ID NO: 794036 - DNA, 15 bp, Homo sapiens
caagtgctcaaagag

SEQ ID NO: 794037 - DNA, 15 bp, Homo sapiens
aagtgctcaaagaga

SEQ ID NO: 794038 - DNA, 15 bp, Homo sapiens
agtgctcaaagagag

SEQ ID NO: 794039 - DNA, 15 bp, Homo sapiens
gtgctcaaagagagt

SEQ ID NO: 794040 - DNA, 15 bp, Homo sapiens
tgctcaaagagagtc

SEQ ID NO: 794041 - DNA, 15 bp, Homo sapiens
gctcaaagagagtcc

SEQ ID NO: 794042 - DNA, 15 bp, Homo sapiens
ctcaaagagagtcct

SEQ ID NO: 794043 - DNA, 15 bp, Homo sapiens
tcaaagagagtcctt

SEQ ID NO: 794044 - DNA, 15 bp, Homo sapiens
caaagagagtccttg

SEQ ID NO: 794045 - DNA, 15 bp, Homo sapiens
aaagagagtccttgt

SEQ ID NO: 794046 - DNA, 15 bp, Homo sapiens
aagagagtccttgtg

SEQ ID NO: 794047 - DNA, 15 bp, Homo sapiens
agagagtccttgtgt

SEQ ID NO: 794048 - DNA, 15 bp, Homo sapiens
gagagtccttgtgta

SEQ ID NO: 794049 - DNA, 15 bp, Homo sapiens
agagtccttgtgtaa

SEQ ID NO: 794050 - DNA, 15 bp, Homo sapiens
gagtccttgtgtaaa

SEQ ID NO: 794051 - DNA, 15 bp, Homo sapiens
agtccttgtgtaaaa

SEQ ID NO: 794052 - DNA, 15 bp, Homo sapiens
gtccttgtgtaaaag

SEQ ID NO: 794053 - DNA, 15 bp, Homo sapiens
tccttgtgtaaaaga

SEQ ID NO: 794054 - DNA, 15 bp, Homo sapiens
ccttgtgtaaaagat

SEQ ID NO: 794055 - DNA, 15 bp, Homo sapiens
cttgtgtaaaagatg

SEQ ID NO: 794056 - DNA, 15 bp, Homo sapiens
ttgtgtaaaagatgg

SEQ ID NO: 794057 - DNA, 15 bp, Homo sapiens
tgtgtaaaagatggg

SEQ ID NO: 794058 - DNA, 15 bp, Homo sapiens
gtgtaaaagatgggc

SEQ ID NO: 794059 - DNA, 15 bp, Homo sapiens
tgtaaaagatgggcg

SEQ ID NO: 794060 - DNA, 15 bp, Homo sapiens
gtaaaagatgggcga

SEQ ID NO: 794061 - DNA, 15 bp, Homo sapiens
taaaagatgggcgaa

SEQ ID NO: 794062 - DNA, 15 bp, Homo sapiens
aaaagatgggcgaat

SEQ ID NO: 794063 - DNA, 15 bp, Homo sapiens
aaagatgggcgaatg

SEQ ID NO: 794064 - DNA, 15 bp, Homo sapiens
aagatgggcgaatga

SEQ ID NO: 794065 - DNA, 15 bp, Homo sapiens
agatgggcgaatgaa

SEQ ID NO: 794066 - DNA, 15 bp, Homo sapiens
gatgggcgaatgaac

SEQ ID NO: 794067 - DNA, 15 bp, Homo sapiens
atgggcgaatgaacc

SEQ ID NO: 794068 - DNA, 15 bp, Homo sapiens
tgggcgaatgaacca

SEQ ID NO: 794069 - DNA, 15 bp, Homo sapiens
gggcgaatgaaccac

SEQ ID NO: 794070 - DNA, 15 bp, Homo sapiens
ggcgaatgaaccaca

SEQ ID NO: 794071 - DNA, 15 bp, Homo sapiens
gcgaatgaaccacat

SEQ ID NO: 794072 - DNA, 15 bp, Homo sapiens
cgaatgaaccacatc

SEQ ID NO: 794073 - DNA, 15 bp, Homo sapiens
gaatgaaccacatca

SEQ ID NO: 794074 - DNA, 15 bp, Homo sapiens
aatgaaccacatcag

SEQ ID NO: 794075 - DNA, 15 bp, Homo sapiens
atgaaccacatcagt

SEQ ID NO: 794076 - DNA, 15 bp, Homo sapiens
tgaaccacatcagtg

SEQ ID NO: 794077 - DNA, 15 bp, Homo sapiens
gaaccacatcagtgc

SEQ ID NO: 794078 - DNA, 15 bp, Homo sapiens
aaccacatcagtgct

SEQ ID NO: 794079 - DNA, 15 bp, Homo sapiens
accacatcagtgctt

SEQ ID NO: 794080 - DNA, 15 bp, Homo sapiens
ccacatcagtgcttc

SEQ ID NO: 794081 - DNA, 15 bp, Homo sapiens
cacatcagtgcttca

SEQ ID NO: 794082 - DNA, 15 bp, Homo sapiens
acatcagtgcttcaa

SEQ ID NO: 794083 - DNA, 15 bp, Homo sapiens
catcagtgcttcaaa

SEQ ID NO: 794084 - DNA, 15 bp, Homo sapiens
atcagtgcttcaaag

SEQ ID NO: 794085 - DNA, 15 bp, Homo sapiens
tcagtgcttcaaaga

SEQ ID NO: 794086 - DNA, 15 bp, Homo sapiens
cagtgcttcaaagaa

SEQ ID NO: 794087 - DNA, 15 bp, Homo sapiens
agtgcttcaaagaag

SEQ ID NO: 794088 - DNA, 15 bp, Homo sapiens
gtgcttcaaagaaga

SEQ ID NO: 794089 - DNA, 15 bp, Homo sapiens
tgcttcaaagaagaa

SEQ ID NO: 794090 - DNA, 15 bp, Homo sapiens
gcttcaaagaagaaa

SEQ ID NO: 794091 - DNA, 15 bp, Homo sapiens
cttcaaagaagaaaa

SEQ ID NO: 794092 - DNA, 15 bp, Homo sapiens
ttcaaagaagaaaat

SEQ ID NO: 794093 - DNA, 15 bp, Homo sapiens
tcaaagaagaaaata

SEQ ID NO: 794094 - DNA, 15 bp, Homo sapiens
caaagaagaaaataa

SEQ ID NO: 794095 - DNA, 15 bp, Homo sapiens
aaagaagaaaataat

SEQ ID NO: 794096 - DNA, 15 bp, Homo sapiens
aagaagaaaataatt

SEQ ID NO: 794097 - DNA, 15 bp, Homo sapiens
agaagaaaataatta

SEQ ID NO: 794098 - DNA, 15 bp, Homo sapiens
gaagaaaataattat

SEQ ID NO: 794099 - DNA, 15 bp, Homo sapiens
aagaaaataattatc

SEQ ID NO: 794100 - DNA, 15 bp, Homo sapiens
agaaaataattatca

SEQ ID NO: 794101 - DNA, 15 bp, Homo sapiens
gaaaataattatcag

SEQ ID NO: 794102 - DNA, 15 bp, Homo sapiens
aaaataattatcagc

SEQ ID NO: 794103 - DNA, 15 bp, Homo sapiens
aaataattatcagca

SEQ ID NO: 794104 - DNA, 15 bp, Homo sapiens
aataattatcagcac

SEQ ID NO: 794105 - DNA, 15 bp, Homo sapiens
ataattatcagcact

SEQ ID NO: 794106 - DNA, 15 bp, Homo sapiens
taattatcagcactg

SEQ ID NO: 794107 - DNA, 15 bp, Homo sapiens
aattatcagcactga

SEQ ID NO: 794108 - DNA, 15 bp, Homo sapiens
attatcagcactgat

SEQ ID NO: 794109 - DNA, 15 bp, Homo sapiens
ttatcagcactgata

SEQ ID NO: 794110 - DNA, 15 bp, Homo sapiens
tatcagcactgatac

SEQ ID NO: 794111 - DNA, 15 bp, Homo sapiens
atcagcactgatact

SEQ ID NO: 794112 - DNA, 15 bp, Homo sapiens
tcagcactgatacta

SEQ ID NO: 794113 - DNA, 15 bp, Homo sapiens
cagcactgatactat

SEQ ID NO: 794114 - DNA, 15 bp, Homo sapiens
agcactgatactatg

SEQ ID NO: 794115 - DNA, 15 bp, Homo sapiens
gcactgatactatgg

SEQ ID NO: 794116 - DNA, 15 bp, Homo sapiens
cactgatactatggc

SEQ ID NO: 794117 - DNA, 15 bp, Homo sapiens
actgatactatggct

SEQ ID NO: 794118 - DNA, 15 bp, Homo sapiens
ctgatactatggctg

SEQ ID NO: 794119 - DNA, 15 bp, Homo sapiens
tgatactatggctgt

SEQ ID NO: 794120 - DNA, 15 bp, Homo sapiens
gatactatggctgtg

SEQ ID NO: 794121 - DNA, 15 bp, Homo sapiens
atactatggctgtgg

SEQ ID NO: 794122 - DNA, 15 bp, Homo sapiens
tactatggctgtggc

SEQ ID NO: 794123 - DNA, 15 bp, Homo sapiens
actatggctgtggct

SEQ ID NO: 794124 - DNA, 15 bp, Homo sapiens
ctatggctgtggctt

SEQ ID NO: 794125 - DNA, 15 bp, Homo sapiens
tatggctgtggcttc

SEQ ID NO: 794126 - DNA, 15 bp, Homo sapiens
atggctgtggcttca

SEQ ID NO: 794127 - DNA, 15 bp, Homo sapiens
tggctgtggcttcat

SEQ ID NO: 794128 - DNA, 15 bp, Homo sapiens
ggctgtggcttcatg

SEQ ID NO: 794129 - DNA, 15 bp, Homo sapiens
gctgtggcttcatgc

SEQ ID NO: 794130 - DNA, 15 bp, Homo sapiens
ctgtggcttcatgcc

SEQ ID NO: 794131 - DNA, 15 bp, Homo sapiens
tgtggcttcatgcct

SEQ ID NO: 794132 - DNA, 15 bp, Homo sapiens
gtggcttcatgcctg

SEQ ID NO: 794133 - DNA, 15 bp, Homo sapiens
tggcttcatgcctgt

SEQ ID NO: 794134 - DNA, 15 bp, Homo sapiens
ggcttcatgcctgta

SEQ ID NO: 794135 - DNA, 15 bp, Homo sapiens
gcttcatgcctgtaa

SEQ ID NO: 794136 - DNA, 15 bp, Homo sapiens
cttcatgcctgtaag

SEQ ID NO: 794137 - DNA, 15 bp, Homo sapiens
ttcatgcctgtaagc

SEQ ID NO: 794138 - DNA, 15 bp, Homo sapiens
tcatgcctgtaagca

SEQ ID NO: 794139 - DNA, 15 bp, Homo sapiens
catgcctgtaagcac

SEQ ID NO: 794140 - DNA, 15 bp, Homo sapiens
atgcctgtaagcaca

SEQ ID NO: 794141 - DNA, 15 bp, Homo sapiens
tgcctgtaagcacaa

SEQ ID NO: 794142 - DNA, 15 bp, Homo sapiens
gcctgtaagcacaag

SEQ ID NO: 794143 - DNA, 15 bp, Homo sapiens
cctgtaagcacaagt

SEQ ID NO: 794144 - DNA, 15 bp, Homo sapiens
ctgtaagcacaagtc

SEQ ID NO: 794145 - DNA, 15 bp, Homo sapiens
tgtaagcacaagtca

SEQ ID NO: 794146 - DNA, 15 bp, Homo sapiens
gtaagcacaagtcac

SEQ ID NO: 794147 - DNA, 15 bp, Homo sapiens
taagcacaagtcact

SEQ ID NO: 794148 - DNA, 15 bp, Homo sapiens
aagcacaagtcactg

SEQ ID NO: 794149 - DNA, 15 bp, Homo sapiens
agcacaagtcactga

SEQ ID NO: 794150 - DNA, 15 bp, Homo sapiens
gcacaagtcactgag

SEQ ID NO: 794151 - DNA, 15 bp, Homo sapiens
cacaagtcactgaga

SEQ ID NO: 794152 - DNA, 15 bp, Homo sapiens
acaagtcactgagaa

SEQ ID NO: 794153 - DNA, 15 bp, Homo sapiens
caagtcactgagaaa

SEQ ID NO: 794154 - DNA, 15 bp, Homo sapiens
aagtcactgagaaat

SEQ ID NO: 794155 - DNA, 15 bp, Homo sapiens
agtcactgagaaatg

SEQ ID NO: 794156 - DNA, 15 bp, Homo sapiens
gtcactgagaaatgg

SEQ ID NO: 794157 - DNA, 15 bp, Homo sapiens
tcactgagaaatggt

SEQ ID NO: 794158 - DNA, 15 bp, Homo sapiens
cactgagaaatggtg

SEQ ID NO: 794159 - DNA, 15 bp, Homo sapiens
actgagaaatggtgg

SEQ ID NO: 794160 - DNA, 15 bp, Homo sapiens
ctgagaaatggtggt

SEQ ID NO: 794161 - DNA, 15 bp, Homo sapiens
tgagaaatggtggtc

SEQ ID NO: 794162 - DNA, 15 bp, Homo sapiens
gagaaatggtggtcc

SEQ ID NO: 794163 - DNA, 15 bp, Homo sapiens
agaaatggtggtcct

SEQ ID NO: 794164 - DNA, 15 bp, Homo sapiens
gaaatggtggtcctg

SEQ ID NO: 794165 - DNA, 15 bp, Homo sapiens
aaatggtggtcctgc

SEQ ID NO: 794166 - DNA, 15 bp, Homo sapiens
aatggtggtcctgca

SEQ ID NO: 794167 - DNA, 15 bp, Homo sapiens
atggtggtcctgcat

SEQ ID NO: 794168 - DNA, 15 bp, Homo sapiens
tggtggtcctgcata

SEQ ID NO: 794169 - DNA, 15 bp, Homo sapiens
ggtggtcctgcatag

SEQ ID NO: 794170 - DNA, 15 bp, Homo sapiens
gtggtcctgcatagc

SEQ ID NO: 794171 - DNA, 15 bp, Homo sapiens
tggtcctgcatagct

SEQ ID NO: 794172 - DNA, 15 bp, Homo sapiens
ggtcctgcatagctt

SEQ ID NO: 794173 - DNA, 15 bp, Homo sapiens
gtcctgcatagcttt

SEQ ID NO: 794174 - DNA, 15 bp, Homo sapiens
tcctgcatagctttg

SEQ ID NO: 794175 - DNA, 15 bp, Homo sapiens
cctgcatagctttgc

SEQ ID NO: 794176 - DNA, 15 bp, Homo sapiens
ctgcatagctttgca

SEQ ID NO: 794177 - DNA, 15 bp, Homo sapiens
tgcatagctttgcac

SEQ ID NO: 794178 - DNA, 15 bp, Homo sapiens
gcatagctttgcact

SEQ ID NO: 794179 - DNA, 15 bp, Homo sapiens
catagctttgcactg

SEQ ID NO: 794180 - DNA, 15 bp, Homo sapiens
atagctttgcactgg

SEQ ID NO: 794181 - DNA, 15 bp, Homo sapiens
tagctttgcactgga

SEQ ID NO: 794182 - DNA, 15 bp, Homo sapiens
agctttgcactggat

SEQ ID NO: 794183 - DNA, 15 bp, Homo sapiens
gctttgcactggatg

SEQ ID NO: 794184 - DNA, 15 bp, Homo sapiens
ctttgcactggatgc

SEQ ID NO: 794185 - DNA, 15 bp, Homo sapiens
tttgcactggatgct

SEQ ID NO: 794186 - DNA, 15 bp, Homo sapiens
ttgcactggatgctc

SEQ ID NO: 794187 - DNA, 15 bp, Homo sapiens
tgcactggatgctct

SEQ ID NO: 794188 - DNA, 15 bp, Homo sapiens
gcactggatgctcta

SEQ ID NO: 794189 - DNA, 15 bp, Homo sapiens
cactggatgctctac

SEQ ID NO: 794190 - DNA, 15 bp, Homo sapiens
actggatgctctaca

SEQ ID NO: 794191 - DNA, 15 bp, Homo sapiens
ctggatgctctacag

SEQ ID NO: 794192 - DNA, 15 bp, Homo sapiens
tggatgctctacaga

SEQ ID NO: 794193 - DNA, 15 bp, Homo sapiens
ggatgctctacagat

SEQ ID NO: 794194 - DNA, 15 bp, Homo sapiens
gatgctctacagatt

SEQ ID NO: 794195 - DNA, 15 bp, Homo sapiens
atgctctacagattt

SEQ ID NO: 794196 - DNA, 15 bp, Homo sapiens
tgctctacagatttg

SEQ ID NO: 794197 - DNA, 15 bp, Homo sapiens
gctctacagatttgg

SEQ ID NO: 794198 - DNA, 15 bp, Homo sapiens
ctctacagatttgga

SEQ ID NO: 794199 - DNA, 15 bp, Homo sapiens
tctacagatttggac

SEQ ID NO: 794200 - DNA, 15 bp, Homo sapiens
ctacagatttggaca

SEQ ID NO: 794201 - DNA, 15 bp, Homo sapiens
tacagatttggacac

SEQ ID NO: 794202 - DNA, 15 bp, Homo sapiens
acagatttggacacc

SEQ ID NO: 794203 - DNA, 15 bp, Homo sapiens
cagatttggacacca

SEQ ID NO: 794204 - DNA, 15 bp, Homo sapiens
agatttggacaccaa

SEQ ID NO: 794205 - DNA, 15 bp, Homo sapiens
gatttggacaccaag

SEQ ID NO: 794206 - DNA, 15 bp, Homo sapiens
atttggacaccaaga

SEQ ID NO: 794207 - DNA, 15 bp, Homo sapiens
tttggacaccaagag

SEQ ID NO: 794208 - DNA, 15 bp, Homo sapiens
ttggacaccaagagg

SEQ ID NO: 794209 - DNA, 15 bp, Homo sapiens
tggacaccaagaggt

SEQ ID NO: 794210 - DNA, 15 bp, Homo sapiens
ggacaccaagaggta

SEQ ID NO: 794211 - DNA, 15 bp, Homo sapiens
gacaccaagaggtag

SEQ ID NO: 794212 - DNA, 15 bp, Homo sapiens
acaccaagaggtaga

SEQ ID NO: 794213 - DNA, 15 bp, Homo sapiens
caccaagaggtagat

SEQ ID NO: 794214 - DNA, 15 bp, Homo sapiens
accaagaggtagatc

SEQ ID NO: 794215 - DNA, 15 bp, Homo sapiens
ccaagaggtagatct

SEQ ID NO: 794216 - DNA, 15 bp, Homo sapiens
caagaggtagatctg

SEQ ID NO: 794217 - DNA, 15 bp, Homo sapiens
aagaggtagatctgc

SEQ ID NO: 794218 - DNA, 15 bp, Homo sapiens
agaggtagatctgcc

SEQ ID NO: 794219 - DNA, 15 bp, Homo sapiens
gaggtagatctgcca

SEQ ID NO: 794220 - DNA, 15 bp, Homo sapiens
aggtagatctgccaa

SEQ ID NO: 794221 - DNA, 15 bp, Homo sapiens
ggtagatctgccaag

SEQ ID NO: 794222 - DNA, 15 bp, Homo sapiens
gtagatctgccaaga

SEQ ID NO: 794223 - DNA, 15 bp, Homo sapiens
tagatctgccaagag

SEQ ID NO: 794224 - DNA, 15 bp, Homo sapiens
agatctgccaagagg

SEQ ID NO: 794225 - DNA, 15 bp, Homo sapiens
gatctgccaagagga

SEQ ID NO: 794226 - DNA, 15 bp, Homo sapiens
atctgccaagaggac

SEQ ID NO: 794227 - DNA, 15 bp, Homo sapiens
tctgccaagaggact

SEQ ID NO: 794228 - DNA, 15 bp, Homo sapiens
ctgccaagaggacta

SEQ ID NO: 794229 - DNA, 15 bp, Homo sapiens
tgccaagaggactag

SEQ ID NO: 794230 - DNA, 15 bp, Homo sapiens
gccaagaggactagt

SEQ ID NO: 794231 - DNA, 15 bp, Homo sapiens
ccaagaggactagtc

SEQ ID NO: 794232 - DNA, 15 bp, Homo sapiens
caagaggactagtcc

SEQ ID NO: 794233 - DNA, 15 bp, Homo sapiens
aagaggactagtcct

SEQ ID NO: 794234 - DNA, 15 bp, Homo sapiens
agaggactagtcctt

SEQ ID NO: 794235 - DNA, 15 bp, Homo sapiens
gaggactagtccttt

SEQ ID NO: 794236 - DNA, 15 bp, Homo sapiens
aggactagtcctttg

SEQ ID NO: 794237 - DNA, 15 bp, Homo sapiens
ggactagtcctttga

SEQ ID NO: 794238 - DNA, 15 bp, Homo sapiens
gactagtcctttgag

SEQ ID NO: 794239 - DNA, 15 bp, Homo sapiens
actagtcctttgagg

SEQ ID NO: 794240 - DNA, 15 bp, Homo sapiens
ctagtcctttgaggt

SEQ ID NO: 794241 - DNA, 15 bp, Homo sapiens
tagtcctttgaggtt

SEQ ID NO: 794242 - DNA, 15 bp, Homo sapiens
agtcctttgaggtta

SEQ ID NO: 794243 - DNA, 15 bp, Homo sapiens
gtcctttgaggttac

SEQ ID NO: 794244 - DNA, 15 bp, Homo sapiens
tcctttgaggttact

SEQ ID NO: 794245 - DNA, 15 bp, Homo sapiens
cctttgaggttactt

SEQ ID NO: 794246 - DNA, 15 bp, Homo sapiens
ctttgaggttacttt

SEQ ID NO: 794247 - DNA, 15 bp, Homo sapiens
tttgaggttacttta

SEQ ID NO: 794248 - DNA, 15 bp, Homo sapiens
ttgaggttactttag

SEQ ID NO: 794249 - DNA, 15 bp, Homo sapiens
tgaggttactttaga

SEQ ID NO: 794250 - DNA, 15 bp, Homo sapiens
gaggttactttagaa

SEQ ID NO: 794251 - DNA, 15 bp, Homo sapiens
aggttactttagaac

SEQ ID NO: 794252 - DNA, 15 bp, Homo sapiens
ggttactttagaaca

SEQ ID NO: 794253 - DNA, 15 bp, Homo sapiens
gttactttagaacaa

SEQ ID NO: 794254 - DNA, 15 bp, Homo sapiens
ttactttagaacaaa

SEQ ID NO: 794255 - DNA, 15 bp, Homo sapiens
tactttagaacaaat

SEQ ID NO: 794256 - DNA, 15 bp, Homo sapiens
actttagaacaaatg

SEQ ID NO: 794257 - DNA, 15 bp, Homo sapiens
ctttagaacaaatga

SEQ ID NO: 794258 - DNA, 15 bp, Homo sapiens
tttagaacaaatgat

SEQ ID NO: 794259 - DNA, 15 bp, Homo sapiens
ttagaacaaatgata

SEQ ID NO: 794260 - DNA, 15 bp, Homo sapiens
tagaacaaatgatag

SEQ ID NO: 794261 - DNA, 15 bp, Homo sapiens
agaacaaatgataga

SEQ ID NO: 794262 - DNA, 15 bp, Homo sapiens
gaacaaatgatagac

SEQ ID NO: 794263 - DNA, 15 bp, Homo sapiens
aacaaatgatagact

SEQ ID NO: 794264 - DNA, 15 bp, Homo sapiens
acaaatgatagactg

SEQ ID NO: 794265 - DNA, 15 bp, Homo sapiens
caaatgatagactgt

SEQ ID NO: 794266 - DNA, 15 bp, Homo sapiens
aaatgatagactgtc

SEQ ID NO: 794267 - DNA, 15 bp, Homo sapiens
aatgatagactgtca

SEQ ID NO: 794268 - DNA, 15 bp, Homo sapiens
atgatagactgtcag

SEQ ID NO: 794269 - DNA, 15 bp, Homo sapiens
tgatagactgtcagg

SEQ ID NO: 794270 - DNA, 15 bp, Homo sapiens
gatagactgtcaggg

SEQ ID NO: 794271 - DNA, 15 bp, Homo sapiens
atagactgtcaggga

SEQ ID NO: 794272 - DNA, 15 bp, Homo sapiens
tagactgtcagggat

SEQ ID NO: 794273 - DNA, 15 bp, Homo sapiens
agactgtcagggatg

SEQ ID NO: 794274 - DNA, 15 bp, Homo sapiens
gactgtcagggatga

SEQ ID NO: 794275 - DNA, 15 bp, Homo sapiens
actgtcagggatgaa

SEQ ID NO: 794276 - DNA, 15 bp, Homo sapiens
ctgtcagggatgaac

SEQ ID NO: 794277 - DNA, 15 bp, Homo sapiens
tgtcagggatgaact

SEQ ID NO: 794278 - DNA, 15 bp, Homo sapiens
gtcagggatgaacta

SEQ ID NO: 794279 - DNA, 15 bp, Homo sapiens
tcagggatgaactat

SEQ ID NO: 794280 - DNA, 15 bp, Homo sapiens
cagggatgaactata

SEQ ID NO: 794281 - DNA, 15 bp, Homo sapiens
agggatgaactatat

SEQ ID NO: 794282 - DNA, 15 bp, Homo sapiens
gggatgaactatata

SEQ ID NO: 794283 - DNA, 15 bp, Homo sapiens
ggatgaactatatat

SEQ ID NO: 794284 - DNA, 15 bp, Homo sapiens
gatgaactatatatt

SEQ ID NO: 794285 - DNA, 15 bp, Homo sapiens
atgaactatatattg

SEQ ID NO: 794286 - DNA, 15 bp, Homo sapiens
tgaactatatattgc

SEQ ID NO: 794287 - DNA, 15 bp, Homo sapiens
gaactatatattgca

SEQ ID NO: 794288 - DNA, 15 bp, Homo sapiens
aactatatattgcat

SEQ ID NO: 794289 - DNA, 15 bp, Homo sapiens
actatatattgcatt

SEQ ID NO: 794290 - DNA, 15 bp, Homo sapiens
ctatatattgcattg

SEQ ID NO: 794291 - DNA, 15 bp, Homo sapiens
tatatattgcattga

SEQ ID NO: 794292 - DNA, 15 bp, Homo sapiens
atatattgcattgag

SEQ ID NO: 794293 - DNA, 15 bp, Homo sapiens
tatattgcattgagc

SEQ ID NO: 794294 - DNA, 15 bp, Homo sapiens
atattgcattgagca

SEQ ID NO: 794295 - DNA, 15 bp, Homo sapiens
tattgcattgagcaa

SEQ ID NO: 794296 - DNA, 15 bp, Homo sapiens
attgcattgagcaaa

SEQ ID NO: 794297 - DNA, 15 bp, Homo sapiens
ttgcattgagcaaaa

SEQ ID NO: 794298 - DNA, 15 bp, Homo sapiens
tgcattgagcaaaag

SEQ ID NO: 794299 - DNA, 15 bp, Homo sapiens
gcattgagcaaaagt

SEQ ID NO: 794300 - DNA, 15 bp, Homo sapiens
cattgagcaaaagtt

SEQ ID NO: 794301 - DNA, 15 bp, Homo sapiens
attgagcaaaagttc

SEQ ID NO: 794302 - DNA, 15 bp, Homo sapiens
ttgagcaaaagttct

SEQ ID NO: 794303 - DNA, 15 bp, Homo sapiens
tgagcaaaagttctg

SEQ ID NO: 794304 - DNA, 15 bp, Homo sapiens
gagcaaaagttctga

SEQ ID NO: 794305 - DNA, 15 bp, Homo sapiens
agcaaaagttctgat

SEQ ID NO: 794306 - DNA, 15 bp, Homo sapiens
gcaaaagttctgata

SEQ ID NO: 794307 - DNA, 15 bp, Homo sapiens
caaaagttctgataa

SEQ ID NO: 794308 - DNA, 15 bp, Homo sapiens
aaaagttctgataat

SEQ ID NO: 794309 - DNA, 15 bp, Homo sapiens
aaagttctgataata

SEQ ID NO: 794310 - DNA, 15 bp, Homo sapiens
aagttctgataatag

SEQ ID NO: 794311 - DNA, 15 bp, Homo sapiens
agttctgataataga

SEQ ID NO: 794312 - DNA, 15 bp, Homo sapiens
gttctgataatagat

SEQ ID NO: 794313 - DNA, 15 bp, Homo sapiens
ttctgataatagatg

SEQ ID NO: 794314 - DNA, 15 bp, Homo sapiens
tctgataatagatgt

SEQ ID NO: 794315 - DNA, 15 bp, Homo sapiens
ctgataatagatgtc

SEQ ID NO: 794316 - DNA, 15 bp, Homo sapiens
tgataatagatgtca

SEQ ID NO: 794317 - DNA, 15 bp, Homo sapiens
gataatagatgtcat

SEQ ID NO: 794318 - DNA, 15 bp, Homo sapiens
ataatagatgtcatt

SEQ ID NO: 794319 - DNA, 15 bp, Homo sapiens
taatagatgtcattt

SEQ ID NO: 794320 - DNA, 15 bp, Homo sapiens
aatagatgtcatttc

SEQ ID NO: 794321 - DNA, 15 bp, Homo sapiens
atagatgtcatttca

SEQ ID NO: 794322 - DNA, 15 bp, Homo sapiens
tagatgtcatttcag

SEQ ID NO: 794323 - DNA, 15 bp, Homo sapiens
agatgtcatttcagt

SEQ ID NO: 794324 - DNA, 15 bp, Homo sapiens
gatgtcatttcagtg

SEQ ID NO: 794325 - DNA, 15 bp, Homo sapiens
atgtcatttcagtga

SEQ ID NO: 794326 - DNA, 15 bp, Homo sapiens
tgtcatttcagtgag

SEQ ID NO: 794327 - DNA, 15 bp, Homo sapiens
gtcatttcagtgagg

SEQ ID NO: 794328 - DNA, 15 bp, Homo sapiens
tcatttcagtgagga

SEQ ID NO: 794329 - DNA, 15 bp, Homo sapiens
catttcagtgaggac

SEQ ID NO: 794330 - DNA, 15 bp, Homo sapiens
atttcagtgaggact

SEQ ID NO: 794331 - DNA, 15 bp, Homo sapiens
tttcagtgaggacta

SEQ ID NO: 794332 - DNA, 15 bp, Homo sapiens
ttcagtgaggactat

SEQ ID NO: 794333 - DNA, 15 bp, Homo sapiens
tcagtgaggactata

SEQ ID NO: 794334 - DNA, 15 bp, Homo sapiens
cagtgaggactatat

SEQ ID NO: 794335 - DNA, 15 bp, Homo sapiens
agtgaggactatatg

SEQ ID NO: 794336 - DNA, 15 bp, Homo sapiens
gtgaggactatatgc

SEQ ID NO: 794337 - DNA, 15 bp, Homo sapiens
tgaggactatatgca

SEQ ID NO: 794338 - DNA, 15 bp, Homo sapiens
gaggactatatgcat

SEQ ID NO: 794339 - DNA, 15 bp, Homo sapiens
aggactatatgcatg

SEQ ID NO: 794340 - DNA, 15 bp, Homo sapiens
ggactatatgcatga

SEQ ID NO: 794341 - DNA, 15 bp, Homo sapiens
gactatatgcatgac

SEQ ID NO: 794342 - DNA, 15 bp, Homo sapiens
actatatgcatgaca

SEQ ID NO: 794343 - DNA, 15 bp, Homo sapiens
ctatatgcatgacaa

SEQ ID NO: 794344 - DNA, 15 bp, Homo sapiens
tatatgcatgacaaa

SEQ ID NO: 794345 - DNA, 15 bp, Homo sapiens
atatgcatgacaaac

SEQ ID NO: 794346 - DNA, 15 bp, Homo sapiens
tatgcatgacaaact

SEQ ID NO: 794347 - DNA, 15 bp, Homo sapiens
atgcatgacaaactt

SEQ ID NO: 794348 - DNA, 15 bp, Homo sapiens
tgcatgacaaacttc

SEQ ID NO: 794349 - DNA, 15 bp, Homo sapiens
gcatgacaaacttct

SEQ ID NO: 794350 - DNA, 15 bp, Homo sapiens
catgacaaacttctg

SEQ ID NO: 794351 - DNA, 15 bp, Homo sapiens
atgacaaacttctgt

SEQ ID NO: 794352 - DNA, 15 bp, Homo sapiens
tgacaaacttctgtc

SEQ ID NO: 794353 - DNA, 15 bp, Homo sapiens
gacaaacttctgtct

SEQ ID NO: 794354 - DNA, 15 bp, Homo sapiens
acaaacttctgtctc

SEQ ID NO: 794355 - DNA, 15 bp, Homo sapiens
caaacttctgtctct

SEQ ID NO: 794356 - DNA, 15 bp, Homo sapiens
aaacttctgtctctg

SEQ ID NO: 794357 - DNA, 15 bp, Homo sapiens
aacttctgtctctga

SEQ ID NO: 794358 - DNA, 15 bp, Homo sapiens
acttctgtctctgat

SEQ ID NO: 794359 - DNA, 15 bp, Homo sapiens
cttctgtctctgatg

SEQ ID NO: 794360 - DNA, 15 bp, Homo sapiens
ttctgtctctgatga

SEQ ID NO: 794361 - DNA, 15 bp, Homo sapiens
tctgtctctgatgat

SEQ ID NO: 794362 - DNA, 15 bp, Homo sapiens
ctgtctctgatgata

SEQ ID NO: 794363 - DNA, 15 bp, Homo sapiens
tgtctctgatgatag

SEQ ID NO: 794364 - DNA, 15 bp, Homo sapiens
gtctctgatgataga

SEQ ID NO: 794365 - DNA, 15 bp, Homo sapiens
tctctgatgatagaa

SEQ ID NO: 794366 - DNA, 15 bp, Homo sapiens
ctctgatgatagaag

SEQ ID NO: 794367 - DNA, 15 bp, Homo sapiens
tctgatgatagaaga

SEQ ID NO: 794368 - DNA, 15 bp, Homo sapiens
ctgatgatagaagac

SEQ ID NO: 794369 - DNA, 15 bp, Homo sapiens
tgatgatagaagacc

SEQ ID NO: 794370 - DNA, 15 bp, Homo sapiens
gatgatagaagacct

SEQ ID NO: 794371 - DNA, 15 bp, Homo sapiens
atgatagaagacctt

SEQ ID NO: 794372 - DNA, 15 bp, Homo sapiens
tgatagaagaccttt

SEQ ID NO: 794373 - DNA, 15 bp, Homo sapiens
gatagaagacctttg

SEQ ID NO: 794374 - DNA, 15 bp, Homo sapiens
atagaagacctttgg

SEQ ID NO: 794375 - DNA, 15 bp, Homo sapiens
tagaagacctttggt

SEQ ID NO: 794376 - DNA, 15 bp, Homo sapiens
agaagacctttggtg

SEQ ID NO: 794377 - DNA, 15 bp, Homo sapiens
gaagacctttggtga

SEQ ID NO: 794378 - DNA, 15 bp, Homo sapiens
aagacctttggtgaa

SEQ ID NO: 794379 - DNA, 15 bp, Homo sapiens
agacctttggtgaat

SEQ ID NO: 794380 - DNA, 15 bp, Homo sapiens
gacctttggtgaatg

SEQ ID NO: 794381 - DNA, 15 bp, Homo sapiens
acctttggtgaatgc

SEQ ID NO: 794382 - DNA, 15 bp, Homo sapiens
cctttggtgaatgca

SEQ ID NO: 794383 - DNA, 15 bp, Homo sapiens
ctttggtgaatgcat

SEQ ID NO: 794384 - DNA, 15 bp, Homo sapiens
tttggtgaatgcata

SEQ ID NO: 794385 - DNA, 15 bp, Homo sapiens
ttggtgaatgcatac

SEQ ID NO: 794386 - DNA, 15 bp, Homo sapiens
tggtgaatgcataca

SEQ ID NO: 794387 - DNA, 15 bp, Homo sapiens
ggtgaatgcatacat

SEQ ID NO: 794388 - DNA, 15 bp, Homo sapiens
gtgaatgcatacatc

SEQ ID NO: 794389 - DNA, 15 bp, Homo sapiens
tgaatgcatacatct

SEQ ID NO: 794390 - DNA, 15 bp, Homo sapiens
gaatgcatacatctg

SEQ ID NO: 794391 - DNA, 15 bp, Homo sapiens
aatgcatacatctgt

SEQ ID NO: 794392 - DNA, 15 bp, Homo sapiens
atgcatacatctgta

SEQ ID NO: 794393 - DNA, 15 bp, Homo sapiens
tgcatacatctgtaa

SEQ ID NO: 794394 - DNA, 15 bp, Homo sapiens
gcatacatctgtaat

SEQ ID NO: 794395 - DNA, 15 bp, Homo sapiens
catacatctgtaatt

SEQ ID NO: 794396 - DNA, 15 bp, Homo sapiens
atacatctgtaattc

SEQ ID NO: 794397 - DNA, 15 bp, Homo sapiens
tacatctgtaattca

SEQ ID NO: 794398 - DNA, 15 bp, Homo sapiens
acatctgtaattcac

SEQ ID NO: 794399 - DNA, 15 bp, Homo sapiens
catctgtaattcaca

SEQ ID NO: 794400 - DNA, 15 bp, Homo sapiens
atctgtaattcacat

SEQ ID NO: 794401 - DNA, 15 bp, Homo sapiens
tctgtaattcacata

SEQ ID NO: 794402 - DNA, 15 bp, Homo sapiens
ctgtaattcacatag

SEQ ID NO: 794403 - DNA, 15 bp, Homo sapiens
tgtaattcacatagc

SEQ ID NO: 794404 - DNA, 15 bp, Homo sapiens
gtaattcacatagct

SEQ ID NO: 794405 - DNA, 15 bp, Homo sapiens
taattcacatagctg

SEQ ID NO: 794406 - DNA, 15 bp, Homo sapiens
aattcacatagctgg

SEQ ID NO: 794407 - DNA, 15 bp, Homo sapiens
attcacatagctggc

SEQ ID NO: 794408 - DNA, 15 bp, Homo sapiens
ttcacatagctggca

SEQ ID NO: 794409 - DNA, 15 bp, Homo sapiens
tcacatagctggcac

SEQ ID NO: 794410 - DNA, 15 bp, Homo sapiens
cacatagctggcaca

SEQ ID NO: 794411 - DNA, 15 bp, Homo sapiens
acatagctggcacat

SEQ ID NO: 794412 - DNA, 15 bp, Homo sapiens
catagctggcacatg

SEQ ID NO: 794413 - DNA, 15 bp, Homo sapiens
atagctggcacatgt

SEQ ID NO: 794414 - DNA, 15 bp, Homo sapiens
tagctggcacatgta

SEQ ID NO: 794415 - DNA, 15 bp, Homo sapiens
agctggcacatgtac

SEQ ID NO: 794416 - DNA, 15 bp, Homo sapiens
gctggcacatgtaca

SEQ ID NO: 794417 - DNA, 15 bp, Homo sapiens
ctggcacatgtacaa

SEQ ID NO: 794418 - DNA, 15 bp, Homo sapiens
tggcacatgtacaaa

SEQ ID NO: 794419 - DNA, 15 bp, Homo sapiens
ggcacatgtacaaac

SEQ ID NO: 794420 - DNA, 15 bp, Homo sapiens
gcacatgtacaaacc

SEQ ID NO: 794421 - DNA, 15 bp, Homo sapiens
cacatgtacaaaccc

SEQ ID NO: 794422 - DNA, 15 bp, Homo sapiens
acatgtacaaaccct

SEQ ID NO: 794423 - DNA, 15 bp, Homo sapiens
catgtacaaaccctc

SEQ ID NO: 794424 - DNA, 15 bp, Homo sapiens
atgtacaaaccctcc

SEQ ID NO: 794425 - DNA, 15 bp, Homo sapiens
tgtacaaaccctcca

SEQ ID NO: 794426 - DNA, 15 bp, Homo sapiens
gtacaaaccctccaa

SEQ ID NO: 794427 - DNA, 15 bp, Homo sapiens
tacaaaccctccaaa

SEQ ID NO: 794428 - DNA, 15 bp, Homo sapiens
acaaaccctccaaat

SEQ ID NO: 794429 - DNA, 15 bp, Homo sapiens
caaaccctccaaatt

SEQ ID NO: 794430 - DNA, 15 bp, Homo sapiens
aaaccctccaaattt

SEQ ID NO: 794431 - DNA, 15 bp, Homo sapiens
aaccctccaaattta

SEQ ID NO: 794432 - DNA, 15 bp, Homo sapiens
accctccaaatttat

SEQ ID NO: 794433 - DNA, 15 bp, Homo sapiens
ccctccaaatttatg

SEQ ID NO: 794434 - DNA, 15 bp, Homo sapiens
cctccaaatttatgt

SEQ ID NO: 794435 - DNA, 15 bp, Homo sapiens
ctccaaatttatgtt

SEQ ID NO: 794436 - DNA, 15 bp, Homo sapiens
tccaaatttatgttg

SEQ ID NO: 794437 - DNA, 15 bp, Homo sapiens
ccaaatttatgttgg

SEQ ID NO: 794438 - DNA, 15 bp, Homo sapiens
caaatttatgttggg

SEQ ID NO: 794439 - DNA, 15 bp, Homo sapiens
aaatttatgttgggt

SEQ ID NO: 794440 - DNA, 15 bp, Homo sapiens
aatttatgttgggtt

SEQ ID NO: 794441 - DNA, 15 bp, Homo sapiens
atttatgttgggttt

SEQ ID NO: 794442 - DNA, 15 bp, Homo sapiens
tttatgttgggtttg

SEQ ID NO: 794443 - DNA, 15 bp, Homo sapiens
ttatgttgggtttgg

SEQ ID NO: 794444 - DNA, 15 bp, Homo sapiens
tatgttgggtttggt

SEQ ID NO: 794445 - DNA, 15 bp, Homo sapiens
atgttgggtttggta

SEQ ID NO: 794446 - DNA, 15 bp, Homo sapiens
tgttgggtttggtaa

SEQ ID NO: 794447 - DNA, 15 bp, Homo sapiens
gttgggtttggtaat

SEQ ID NO: 794448 - DNA, 15 bp, Homo sapiens
ttgggtttggtaatc

SEQ ID NO: 794449 - DNA, 15 bp, Homo sapiens
tgggtttggtaatcc

SEQ ID NO: 794450 - DNA, 15 bp, Homo sapiens
gggtttggtaatcct

SEQ ID NO: 794451 - DNA, 15 bp, Homo sapiens
ggtttggtaatcctt

SEQ ID NO: 794452 - DNA, 15 bp, Homo sapiens
gtttggtaatcctta

SEQ ID NO: 794453 - DNA, 15 bp, Homo sapiens
tttggtaatccttat

SEQ ID NO: 794454 - DNA, 15 bp, Homo sapiens
ttggtaatccttatt

SEQ ID NO: 794455 - DNA, 15 bp, Homo sapiens
tggtaatccttattg

SEQ ID NO: 794456 - DNA, 15 bp, Homo sapiens
ggtaatccttattgc

SEQ ID NO: 794457 - DNA, 15 bp, Homo sapiens
gtaatccttattgcc

SEQ ID NO: 794458 - DNA, 15 bp, Homo sapiens
taatccttattgccc

SEQ ID NO: 794459 - DNA, 15 bp, Homo sapiens
aatccttattgccca

SEQ ID NO: 794460 - DNA, 15 bp, Homo sapiens
atccttattgcccag

SEQ ID NO: 794461 - DNA, 15 bp, Homo sapiens
tccttattgcccagt

SEQ ID NO: 794462 - DNA, 15 bp, Homo sapiens
ccttattgcccagtt

SEQ ID NO: 794463 - DNA, 15 bp, Homo sapiens
cttattgcccagtta

SEQ ID NO: 794464 - DNA, 15 bp, Homo sapiens
ttattgcccagttat

SEQ ID NO: 794465 - DNA, 15 bp, Homo sapiens
tattgcccagttatc

SEQ ID NO: 794466 - DNA, 15 bp, Homo sapiens
attgcccagttatca

SEQ ID NO: 794467 - DNA, 15 bp, Homo sapiens
ttgcccagttatcat

SEQ ID NO: 794468 - DNA, 15 bp, Homo sapiens
tgcccagttatcata

SEQ ID NO: 794469 - DNA, 15 bp, Homo sapiens
gcccagttatcataa

SEQ ID NO: 794470 - DNA, 15 bp, Homo sapiens
cccagttatcataat

SEQ ID NO: 794471 - DNA, 15 bp, Homo sapiens
ccagttatcataatt

SEQ ID NO: 794472 - DNA, 15 bp, Homo sapiens
cagttatcataattt

SEQ ID NO: 794473 - DNA, 15 bp, Homo sapiens
agttatcataattta

SEQ ID NO: 794474 - DNA, 15 bp, Homo sapiens
gttatcataatttac

SEQ ID NO: 794475 - DNA, 15 bp, Homo sapiens
ttatcataatttacc

SEQ ID NO: 794476 - DNA, 15 bp, Homo sapiens
tatcataatttacca

SEQ ID NO: 794477 - DNA, 15 bp, Homo sapiens
atcataatttaccaa

SEQ ID NO: 794478 - DNA, 15 bp, Homo sapiens
tcataatttaccaag

SEQ ID NO: 794479 - DNA, 15 bp, Homo sapiens
cataatttaccaagg

SEQ ID NO: 794480 - DNA, 15 bp, Homo sapiens
ataatttaccaaggt

SEQ ID NO: 794481 - DNA, 15 bp, Homo sapiens
taatttaccaaggta

SEQ ID NO: 794482 - DNA, 15 bp, Homo sapiens
aatttaccaaggtaa

SEQ ID NO: 794483 - DNA, 15 bp, Homo sapiens
atttaccaaggtaac

SEQ ID NO: 794484 - DNA, 15 bp, Homo sapiens
tttaccaaggtaaca

SEQ ID NO: 794485 - DNA, 15 bp, Homo sapiens
ttaccaaggtaacat

SEQ ID NO: 794486 - DNA, 15 bp, Homo sapiens
taccaaggtaacatc

SEQ ID NO: 794487 - DNA, 15 bp, Homo sapiens
accaaggtaacatcc

SEQ ID NO: 794488 - DNA, 15 bp, Homo sapiens
ccaaggtaacatccc

SEQ ID NO: 794489 - DNA, 15 bp, Homo sapiens
caaggtaacatccct

SEQ ID NO: 794490 - DNA, 15 bp, Homo sapiens
aaggtaacatccctc

SEQ ID NO: 794491 - DNA, 15 bp, Homo sapiens
aggtaacatccctcc

SEQ ID NO: 794492 - DNA, 15 bp, Homo sapiens
ggtaacatccctccc

SEQ ID NO: 794493 - DNA, 15 bp, Homo sapiens
gtaacatccctcccc

SEQ ID NO: 794494 - DNA, 15 bp, Homo sapiens
taacatccctcccca

SEQ ID NO: 794495 - DNA, 15 bp, Homo sapiens
aacatccctccccag

SEQ ID NO: 794496 - DNA, 15 bp, Homo sapiens
acatccctccccagc

SEQ ID NO: 794497 - DNA, 15 bp, Homo sapiens
catccctccccagcc

SEQ ID NO: 794498 - DNA, 15 bp, Homo sapiens
atccctccccagcca

SEQ ID NO: 794499 - DNA, 15 bp, Homo sapiens
tccctccccagccag

SEQ ID NO: 794500 - DNA, 15 bp, Homo sapiens
ccctccccagccagc

SEQ ID NO: 794501 - DNA, 15 bp, Homo sapiens
cctccccagccagcc

SEQ ID NO: 794502 - DNA, 15 bp, Homo sapiens
ctccccagccagcca

SEQ ID NO: 794503 - DNA, 15 bp, Homo sapiens
tccccagccagccat

SEQ ID NO: 794504 - DNA, 15 bp, Homo sapiens
ccccagccagccatt

SEQ ID NO: 794505 - DNA, 15 bp, Homo sapiens
cccagccagccatta

SEQ ID NO: 794506 - DNA, 15 bp, Homo sapiens
ccagccagccattac

SEQ ID NO: 794507 - DNA, 15 bp, Homo sapiens
cagccagccattacc

SEQ ID NO: 794508 - DNA, 15 bp, Homo sapiens
agccagccattacca

SEQ ID NO: 794509 - DNA, 15 bp, Homo sapiens
gccagccattaccat

SEQ ID NO: 794510 - DNA, 15 bp, Homo sapiens
ccagccattaccatc

SEQ ID NO: 794511 - DNA, 15 bp, Homo sapiens
cagccattaccatca

SEQ ID NO: 794512 - DNA, 15 bp, Homo sapiens
agccattaccatcag

SEQ ID NO: 794513 - DNA, 15 bp, Homo sapiens
gccattaccatcagg

SEQ ID NO: 794514 - DNA, 15 bp, Homo sapiens
ccattaccatcaggg

SEQ ID NO: 794515 - DNA, 15 bp, Homo sapiens
cattaccatcaggga

SEQ ID NO: 794516 - DNA, 15 bp, Homo sapiens
attaccatcagggaa

SEQ ID NO: 794517 - DNA, 15 bp, Homo sapiens
ttaccatcagggaaa

SEQ ID NO: 794518 - DNA, 15 bp, Homo sapiens
taccatcagggaaac

SEQ ID NO: 794519 - DNA, 15 bp, Homo sapiens
accatcagggaaact

SEQ ID NO: 794520 - DNA, 15 bp, Homo sapiens
ccatcagggaaactg

SEQ ID NO: 794521 - DNA, 15 bp, Homo sapiens
catcagggaaactgc

SEQ ID NO: 794522 - DNA, 15 bp, Homo sapiens
atcagggaaactgct

SEQ ID NO: 794523 - DNA, 15 bp, Homo sapiens
tcagggaaactgctt

SEQ ID NO: 794524 - DNA, 15 bp, Homo sapiens
cagggaaactgcttt

SEQ ID NO: 794525 - DNA, 15 bp, Homo sapiens
agggaaactgctttg

SEQ ID NO: 794526 - DNA, 15 bp, Homo sapiens
gggaaactgctttgt

SEQ ID NO: 794527 - DNA, 15 bp, Homo sapiens
ggaaactgctttgtt

SEQ ID NO: 794528 - DNA, 15 bp, Homo sapiens
gaaactgctttgttt

SEQ ID NO: 794529 - DNA, 15 bp, Homo sapiens
aaactgctttgtttg

SEQ ID NO: 794530 - DNA, 15 bp, Homo sapiens
aactgctttgtttgg

SEQ ID NO: 794531 - DNA, 15 bp, Homo sapiens
actgctttgtttggc

SEQ ID NO: 794532 - DNA, 15 bp, Homo sapiens
ctgctttgtttggct

SEQ ID NO: 794533 - DNA, 15 bp, Homo sapiens
tgctttgtttggctt

SEQ ID NO: 794534 - DNA, 15 bp, Homo sapiens
gctttgtttggcttc

SEQ ID NO: 794535 - DNA, 15 bp, Homo sapiens
ctttgtttggcttca

SEQ ID NO: 794536 - DNA, 15 bp, Homo sapiens
tttgtttggcttcag

SEQ ID NO: 794537 - DNA, 15 bp, Homo sapiens
ttgtttggcttcagg

SEQ ID NO: 794538 - DNA, 15 bp, Homo sapiens
tgtttggcttcaggg

SEQ ID NO: 794539 - DNA, 15 bp, Homo sapiens
gtttggcttcagggc

SEQ ID NO: 794540 - DNA, 15 bp, Homo sapiens
tttggcttcagggca

SEQ ID NO: 794541 - DNA, 15 bp, Homo sapiens
ttggcttcagggcac

SEQ ID NO: 794542 - DNA, 15 bp, Homo sapiens
tggcttcagggcacc

SEQ ID NO: 794543 - DNA, 15 bp, Homo sapiens
ggcttcagggcacca

SEQ ID NO: 794544 - DNA, 15 bp, Homo sapiens
gcttcagggcaccag

SEQ ID NO: 794545 - DNA, 15 bp, Homo sapiens
cttcagggcaccagc

SEQ ID NO: 794546 - DNA, 15 bp, Homo sapiens
ttcagggcaccagcc

SEQ ID NO: 794547 - DNA, 15 bp, Homo sapiens
tcagggcaccagcca

SEQ ID NO: 794548 - DNA, 15 bp, Homo sapiens
cagggcaccagccac

SEQ ID NO: 794549 - DNA, 15 bp, Homo sapiens
agggcaccagccacg

SEQ ID NO: 794550 - DNA, 15 bp, Homo sapiens
gggcaccagccacgg

SEQ ID NO: 794551 - DNA, 15 bp, Homo sapiens
ggcaccagccacgga

SEQ ID NO: 794552 - DNA, 15 bp, Homo sapiens
gcaccagccacggaa

SEQ ID NO: 794553 - DNA, 15 bp, Homo sapiens
caccagccacggaag

SEQ ID NO: 794554 - DNA, 15 bp, Homo sapiens
accagccacggaagg

SEQ ID NO: 794555 - DNA, 15 bp, Homo sapiens
ccagccacggaaggg

SEQ ID NO: 794556 - DNA, 15 bp, Homo sapiens
cagccacggaagggc

SEQ ID NO: 794557 - DNA, 15 bp, Homo sapiens
agccacggaagggcc

SEQ ID NO: 794558 - DNA, 15 bp, Homo sapiens
gccacggaagggccc

SEQ ID NO: 794559 - DNA, 15 bp, Homo sapiens
ccacggaagggccct

SEQ ID NO: 794560 - DNA, 15 bp, Homo sapiens
cacggaagggccctc

SEQ ID NO: 794561 - DNA, 15 bp, Homo sapiens
acggaagggccctct

SEQ ID NO: 794562 - DNA, 15 bp, Homo sapiens
cggaagggccctctg

SEQ ID NO: 794563 - DNA, 15 bp, Homo sapiens
ggaagggccctctga

SEQ ID NO: 794564 - DNA, 15 bp, Homo sapiens
gaagggccctctgac

SEQ ID NO: 794565 - DNA, 15 bp, Homo sapiens
aagggccctctgaca

SEQ ID NO: 794566 - DNA, 15 bp, Homo sapiens
agggccctctgacac

SEQ ID NO: 794567 - DNA, 15 bp, Homo sapiens
gggccctctgacaca

SEQ ID NO: 794568 - DNA, 15 bp, Homo sapiens
ggccctctgacacag

SEQ ID NO: 794569 - DNA, 15 bp, Homo sapiens
gccctctgacacaga

SEQ ID NO: 794570 - DNA, 15 bp, Homo sapiens
ccctctgacacagac

SEQ ID NO: 794571 - DNA, 15 bp, Homo sapiens
cctctgacacagacc

SEQ ID NO: 794572 - DNA, 15 bp, Homo sapiens
ctctgacacagacct

SEQ ID NO: 794573 - DNA, 15 bp, Homo sapiens
tctgacacagacctt

SEQ ID NO: 794574 - DNA, 15 bp, Homo sapiens
ctgacacagaccttc

SEQ ID NO: 794575 - DNA, 15 bp, Homo sapiens
tgacacagaccttct

SEQ ID NO: 794576 - DNA, 15 bp, Homo sapiens
gacacagaccttctg

SEQ ID NO: 794577 - DNA, 15 bp, Homo sapiens
acacagaccttctgg

SEQ ID NO: 794578 - DNA, 15 bp, Homo sapiens
cacagaccttctggg

SEQ ID NO: 794579 - DNA, 15 bp, Homo sapiens
acagaccttctgggg

SEQ ID NO: 794580 - DNA, 15 bp, Homo sapiens
cagaccttctggggt

SEQ ID NO: 794581 - DNA, 15 bp, Homo sapiens
agaccttctggggta

SEQ ID NO: 794582 - DNA, 15 bp, Homo sapiens
gaccttctggggtaa

SEQ ID NO: 794583 - DNA, 15 bp, Homo sapiens
accttctggggtaat

SEQ ID NO: 794584 - DNA, 15 bp, Homo sapiens
ccttctggggtaatc

SEQ ID NO: 794585 - DNA, 15 bp, Homo sapiens
cttctggggtaatcc

SEQ ID NO: 794586 - DNA, 15 bp, Homo sapiens
ttctggggtaatcca

SEQ ID NO: 794587 - DNA, 15 bp, Homo sapiens
tctggggtaatccag

SEQ ID NO: 794588 - DNA, 15 bp, Homo sapiens
ctggggtaatccagt

SEQ ID NO: 794589 - DNA, 15 bp, Homo sapiens
tggggtaatccagtc

SEQ ID NO: 794590 - DNA, 15 bp, Homo sapiens
ggggtaatccagtcc

SEQ ID NO: 794591 - DNA, 15 bp, Homo sapiens
gggtaatccagtcca

SEQ ID NO: 794592 - DNA, 15 bp, Homo sapiens
ggtaatccagtccaa

SEQ ID NO: 794593 - DNA, 15 bp, Homo sapiens
gtaatccagtccaaa

SEQ ID NO: 794594 - DNA, 15 bp, Homo sapiens
taatccagtccaaaa

SEQ ID NO: 794595 - DNA, 15 bp, Homo sapiens
aatccagtccaaaag

SEQ ID NO: 794596 - DNA, 15 bp, Homo sapiens
atccagtccaaaagt

SEQ ID NO: 794597 - DNA, 15 bp, Homo sapiens
tccagtccaaaagtt

SEQ ID NO: 794598 - DNA, 15 bp, Homo sapiens
ccagtccaaaagttg

SEQ ID NO: 794599 - DNA, 15 bp, Homo sapiens
cagtccaaaagttga

SEQ ID NO: 794600 - DNA, 15 bp, Homo sapiens
agtccaaaagttgaa

SEQ ID NO: 794601 - DNA, 15 bp, Homo sapiens
gtccaaaagttgaaa

SEQ ID NO: 794602 - DNA, 15 bp, Homo sapiens
tccaaaagttgaaaa

SEQ ID NO: 794603 - DNA, 15 bp, Homo sapiens
ccaaaagttgaaaat

SEQ ID NO: 794604 - DNA, 15 bp, Homo sapiens
caaaagttgaaaata

SEQ ID NO: 794605 - DNA, 15 bp, Homo sapiens
aaaagttgaaaataa

SEQ ID NO: 794606 - DNA, 15 bp, Homo sapiens
aaagttgaaaataac

SEQ ID NO: 794607 - DNA, 15 bp, Homo sapiens
aagttgaaaataaca

SEQ ID NO: 794608 - DNA, 15 bp, Homo sapiens
agttgaaaataacaa

SEQ ID NO: 794609 - DNA, 15 bp, Homo sapiens
gttgaaaataacaac

SEQ ID NO: 794610 - DNA, 15 bp, Homo sapiens
ttgaaaataacaact

SEQ ID NO: 794611 - DNA, 15 bp, Homo sapiens
tgaaaataacaactg

SEQ ID NO: 794612 - DNA, 15 bp, Homo sapiens
gaaaataacaactgg

SEQ ID NO: 794613 - DNA, 15 bp, Homo sapiens
aaaataacaactggt

SEQ ID NO: 794614 - DNA, 15 bp, Homo sapiens
aaataacaactggtg

SEQ ID NO: 794615 - DNA, 15 bp, Homo sapiens
aataacaactggtgt

SEQ ID NO: 794616 - DNA, 15 bp, Homo sapiens
ataacaactggtgtt

SEQ ID NO: 794617 - DNA, 15 bp, Homo sapiens
taacaactggtgttt

SEQ ID NO: 794618 - DNA, 15 bp, Homo sapiens
aacaactggtgtttg

SEQ ID NO: 794619 - DNA, 15 bp, Homo sapiens
acaactggtgtttgg

SEQ ID NO: 794620 - DNA, 15 bp, Homo sapiens
caactggtgtttggc

SEQ ID NO: 794621 - DNA, 15 bp, Homo sapiens
aactggtgtttggct

SEQ ID NO: 794622 - DNA, 15 bp, Homo sapiens
actggtgtttggctt

SEQ ID NO: 794623 - DNA, 15 bp, Homo sapiens
ctggtgtttggcttt

SEQ ID NO: 794624 - DNA, 15 bp, Homo sapiens
tggtgtttggctttg

SEQ ID NO: 794625 - DNA, 15 bp, Homo sapiens
ggtgtttggctttgt

SEQ ID NO: 794626 - DNA, 15 bp, Homo sapiens
gtgtttggctttgta

SEQ ID NO: 794627 - DNA, 15 bp, Homo sapiens
tgtttggctttgtag

SEQ ID NO: 794628 - DNA, 15 bp, Homo sapiens
gtttggctttgtagc

SEQ ID NO: 794629 - DNA, 15 bp, Homo sapiens
tttggctttgtagcg

SEQ ID NO: 794630 - DNA, 15 bp, Homo sapiens
ttggctttgtagcgt

SEQ ID NO: 794631 - DNA, 15 bp, Homo sapiens
tggctttgtagcgta

SEQ ID NO: 794632 - DNA, 15 bp, Homo sapiens
ggctttgtagcgtaa

SEQ ID NO: 794633 - DNA, 15 bp, Homo sapiens
gctttgtagcgtaag

SEQ ID NO: 794634 - DNA, 15 bp, Homo sapiens
ctttgtagcgtaaga

SEQ ID NO: 794635 - DNA, 15 bp, Homo sapiens
tttgtagcgtaagac

SEQ ID NO: 794636 - DNA, 15 bp, Homo sapiens
ttgtagcgtaagacg

SEQ ID NO: 794637 - DNA, 15 bp, Homo sapiens
tgtagcgtaagacga

SEQ ID NO: 794638 - DNA, 15 bp, Homo sapiens
gtagcgtaagacgaa

SEQ ID NO: 794639 - DNA, 15 bp, Homo sapiens
tagcgtaagacgaat

SEQ ID NO: 794640 - DNA, 15 bp, Homo sapiens
agcgtaagacgaatt

SEQ ID NO: 794641 - DNA, 15 bp, Homo sapiens
gcgtaagacgaattt

SEQ ID NO: 794642 - DNA, 15 bp, Homo sapiens
cgtaagacgaatttt

SEQ ID NO: 794643 - DNA, 15 bp, Homo sapiens
gtaagacgaattttt

SEQ ID NO: 794644 - DNA, 15 bp, Homo sapiens
taagacgaatttttc

SEQ ID NO: 794645 - DNA, 15 bp, Homo sapiens
aagacgaatttttct

SEQ ID NO: 794646 - DNA, 15 bp, Homo sapiens
agacgaatttttctg

SEQ ID NO: 794647 - DNA, 15 bp, Homo sapiens
gacgaatttttctgg

SEQ ID NO: 794648 - DNA, 15 bp, Homo sapiens
acgaatttttctggg

SEQ ID NO: 794649 - DNA, 15 bp, Homo sapiens
cgaatttttctgggt

SEQ ID NO: 794650 - DNA, 15 bp, Homo sapiens
gaatttttctgggtg

SEQ ID NO: 794651 - DNA, 15 bp, Homo sapiens
aatttttctgggtgt

SEQ ID NO: 794652 - DNA, 15 bp, Homo sapiens
atttttctgggtgta

SEQ ID NO: 794653 - DNA, 15 bp, Homo sapiens
tttttctgggtgtag

SEQ ID NO: 794654 - DNA, 15 bp, Homo sapiens
ttttctgggtgtagt

SEQ ID NO: 794655 - DNA, 15 bp, Homo sapiens
tttctgggtgtagtt

SEQ ID NO: 794656 - DNA, 15 bp, Homo sapiens
ttctgggtgtagttg

SEQ ID NO: 794657 - DNA, 15 bp, Homo sapiens
tctgggtgtagttga

SEQ ID NO: 794658 - DNA, 15 bp, Homo sapiens
ctgggtgtagttgaa

SEQ ID NO: 794659 - DNA, 15 bp, Homo sapiens
tgggtgtagttgaat

SEQ ID NO: 794660 - DNA, 15 bp, Homo sapiens
gggtgtagttgaatg

SEQ ID NO: 794661 - DNA, 15 bp, Homo sapiens
ggtgtagttgaatgc

SEQ ID NO: 794662 - DNA, 15 bp, Homo sapiens
gtgtagttgaatgct

SEQ ID NO: 794663 - DNA, 15 bp, Homo sapiens
tgtagttgaatgctt

SEQ ID NO: 794664 - DNA, 15 bp, Homo sapiens
gtagttgaatgctta

SEQ ID NO: 794665 - DNA, 15 bp, Homo sapiens
tagttgaatgcttag

SEQ ID NO: 794666 - DNA, 15 bp, Homo sapiens
agttgaatgcttagt

SEQ ID NO: 794667 - DNA, 15 bp, Homo sapiens
gttgaatgcttagtg

SEQ ID NO: 794668 - DNA, 15 bp, Homo sapiens
ttgaatgcttagtgc

SEQ ID NO: 794669 - DNA, 15 bp, Homo sapiens
tgaatgcttagtgct

SEQ ID NO: 794670 - DNA, 15 bp, Homo sapiens
gaatgcttagtgctt

SEQ ID NO: 794671 - DNA, 15 bp, Homo sapiens
aatgcttagtgcttg

SEQ ID NO: 794672 - DNA, 15 bp, Homo sapiens
atgcttagtgcttgt

SEQ ID NO: 794673 - DNA, 15 bp, Homo sapiens
tgcttagtgcttgtc

SEQ ID NO: 794674 - DNA, 15 bp, Homo sapiens
gcttagtgcttgtct

SEQ ID NO: 794675 - DNA, 15 bp, Homo sapiens
cttagtgcttgtctt

SEQ ID NO: 794676 - DNA, 15 bp, Homo sapiens
ttagtgcttgtcttt

SEQ ID NO: 794677 - DNA, 15 bp, Homo sapiens
tagtgcttgtctttc

SEQ ID NO: 794678 - DNA, 15 bp, Homo sapiens
agtgcttgtctttcc

SEQ ID NO: 794679 - DNA, 15 bp, Homo sapiens
gtgcttgtctttccc

SEQ ID NO: 794680 - DNA, 15 bp, Homo sapiens
tgcttgtctttcccc

SEQ ID NO: 794681 - DNA, 15 bp, Homo sapiens
gcttgtctttccccc

SEQ ID NO: 794682 - DNA, 15 bp, Homo sapiens
cttgtctttccccct

SEQ ID NO: 794683 - DNA, 15 bp, Homo sapiens
ttgtctttccccctg

SEQ ID NO: 794684 - DNA, 15 bp, Homo sapiens
tgtctttccccctgc

SEQ ID NO: 794685 - DNA, 15 bp, Homo sapiens
gtctttccccctgcc

SEQ ID NO: 794686 - DNA, 15 bp, Homo sapiens
tctttccccctgccc

SEQ ID NO: 794687 - DNA, 15 bp, Homo sapiens
ctttccccctgcccc

SEQ ID NO: 794688 - DNA, 15 bp, Homo sapiens
tttccccctgcccca

SEQ ID NO: 794689 - DNA, 15 bp, Homo sapiens
ttccccctgccccaa

SEQ ID NO: 794690 - DNA, 15 bp, Homo sapiens
tccccctgccccaaa

SEQ ID NO: 794691 - DNA, 15 bp, Homo sapiens
ccccctgccccaaat

SEQ ID NO: 794692 - DNA, 15 bp, Homo sapiens
cccctgccccaaatt

SEQ ID NO: 794693 - DNA, 15 bp, Homo sapiens
ccctgccccaaatta

SEQ ID NO: 794694 - DNA, 15 bp, Homo sapiens
cctgccccaaattac

SEQ ID NO: 794695 - DNA, 15 bp, Homo sapiens
ctgccccaaattact

SEQ ID NO: 794696 - DNA, 15 bp, Homo sapiens
tgccccaaattacta

SEQ ID NO: 794697 - DNA, 15 bp, Homo sapiens
gccccaaattactaa

SEQ ID NO: 794698 - DNA, 15 bp, Homo sapiens
ccccaaattactaag

SEQ ID NO: 794699 - DNA, 15 bp, Homo sapiens
cccaaattactaagg

SEQ ID NO: 794700 - DNA, 15 bp, Homo sapiens
ccaaattactaaggt

SEQ ID NO: 794701 - DNA, 15 bp, Homo sapiens
caaattactaaggtc

SEQ ID NO: 794702 - DNA, 15 bp, Homo sapiens
aaattactaaggtca

SEQ ID NO: 794703 - DNA, 15 bp, Homo sapiens
aattactaaggtcat

SEQ ID NO: 794704 - DNA, 15 bp, Homo sapiens
attactaaggtcatg

SEQ ID NO: 794705 - DNA, 15 bp, Homo sapiens
ttactaaggtcatgt

SEQ ID NO: 794706 - DNA, 15 bp, Homo sapiens
tactaaggtcatgta

SEQ ID NO: 794707 - DNA, 15 bp, Homo sapiens
actaaggtcatgtag

SEQ ID NO: 794708 - DNA, 15 bp, Homo sapiens
ctaaggtcatgtaga

SEQ ID NO: 794709 - DNA, 15 bp, Homo sapiens
taaggtcatgtagaa

SEQ ID NO: 794710 - DNA, 15 bp, Homo sapiens
aaggtcatgtagaac

SEQ ID NO: 794711 - DNA, 15 bp, Homo sapiens
aggtcatgtagaact

SEQ ID NO: 794712 - DNA, 15 bp, Homo sapiens
ggtcatgtagaactt

SEQ ID NO: 794713 - DNA, 15 bp, Homo sapiens
gtcatgtagaacttc

SEQ ID NO: 794714 - DNA, 15 bp, Homo sapiens
tcatgtagaacttcc

SEQ ID NO: 794715 - DNA, 15 bp, Homo sapiens
catgtagaacttccc

SEQ ID NO: 794716 - DNA, 15 bp, Homo sapiens
atgtagaacttccca

SEQ ID NO: 794717 - DNA, 15 bp, Homo sapiens
tgtagaacttcccag

SEQ ID NO: 794718 - DNA, 15 bp, Homo sapiens
gtagaacttcccagt

SEQ ID NO: 794719 - DNA, 15 bp, Homo sapiens
tagaacttcccagtt

SEQ ID NO: 794720 - DNA, 15 bp, Homo sapiens
agaacttcccagttg

SEQ ID NO: 794721 - DNA, 15 bp, Homo sapiens
gaacttcccagttga

SEQ ID NO: 794722 - DNA, 15 bp, Homo sapiens
aacttcccagttgaa

SEQ ID NO: 794723 - DNA, 15 bp, Homo sapiens
acttcccagttgaat

SEQ ID NO: 794724 - DNA, 15 bp, Homo sapiens
cttcccagttgaatc

SEQ ID NO: 794725 - DNA, 15 bp, Homo sapiens
ttcccagttgaatca

SEQ ID NO: 794726 - DNA, 15 bp, Homo sapiens
tcccagttgaatcat

SEQ ID NO: 794727 - DNA, 15 bp, Homo sapiens
cccagttgaatcatt

SEQ ID NO: 794728 - DNA, 15 bp, Homo sapiens
ccagttgaatcattg

SEQ ID NO: 794729 - DNA, 15 bp, Homo sapiens
cagttgaatcattga

SEQ ID NO: 794730 - DNA, 15 bp, Homo sapiens
agttgaatcattgaa

SEQ ID NO: 794731 - DNA, 15 bp, Homo sapiens
gttgaatcattgaac

SEQ ID NO: 794732 - DNA, 15 bp, Homo sapiens
ttgaatcattgaact

SEQ ID NO: 794733 - DNA, 15 bp, Homo sapiens
tgaatcattgaactc

SEQ ID NO: 794734 - DNA, 15 bp, Homo sapiens
gaatcattgaactcc

SEQ ID NO: 794735 - DNA, 15 bp, Homo sapiens
aatcattgaactccc

SEQ ID NO: 794736 - DNA, 15 bp, Homo sapiens
atcattgaactccca

SEQ ID NO: 794737 - DNA, 15 bp, Homo sapiens
tcattgaactcccaa

SEQ ID NO: 794738 - DNA, 15 bp, Homo sapiens
cattgaactcccaag

SEQ ID NO: 794739 - DNA, 15 bp, Homo sapiens
attgaactcccaagt

SEQ ID NO: 794740 - DNA, 15 bp, Homo sapiens
ttgaactcccaagtg

SEQ ID NO: 794741 - DNA, 15 bp, Homo sapiens
tgaactcccaagtgg

SEQ ID NO: 794742 - DNA, 15 bp, Homo sapiens
gaactcccaagtggc

SEQ ID NO: 794743 - DNA, 15 bp, Homo sapiens
aactcccaagtggca

SEQ ID NO: 794744 - DNA, 15 bp, Homo sapiens
actcccaagtggcac

SEQ ID NO: 794745 - DNA, 15 bp, Homo sapiens
ctcccaagtggcaca

SEQ ID NO: 794746 - DNA, 15 bp, Homo sapiens
tcccaagtggcacat

SEQ ID NO: 794747 - DNA, 15 bp, Homo sapiens
cccaagtggcacatc

SEQ ID NO: 794748 - DNA, 15 bp, Homo sapiens
ccaagtggcacatct

SEQ ID NO: 794749 - DNA, 15 bp, Homo sapiens
caagtggcacatctt

SEQ ID NO: 794750 - DNA, 15 bp, Homo sapiens
aagtggcacatcttt

SEQ ID NO: 794751 - DNA, 15 bp, Homo sapiens
agtggcacatctttt

SEQ ID NO: 794752 - DNA, 15 bp, Homo sapiens
gtggcacatcttttt

SEQ ID NO: 794753 - DNA, 15 bp, Homo sapiens
tggcacatctttttg

SEQ ID NO: 794754 - DNA, 15 bp, Homo sapiens
ggcacatctttttga

SEQ ID NO: 794755 - DNA, 15 bp, Homo sapiens
gcacatctttttgag

SEQ ID NO: 794756 - DNA, 15 bp, Homo sapiens
cacatctttttgaga

SEQ ID NO: 794757 - DNA, 15 bp, Homo sapiens
acatctttttgagat

SEQ ID NO: 794758 - DNA, 15 bp, Homo sapiens
catctttttgagatt

SEQ ID NO: 794759 - DNA, 15 bp, Homo sapiens
atctttttgagattc

SEQ ID NO: 794760 - DNA, 15 bp, Homo sapiens
tctttttgagattct

SEQ ID NO: 794761 - DNA, 15 bp, Homo sapiens
ctttttgagattctt

SEQ ID NO: 794762 - DNA, 15 bp, Homo sapiens
tttttgagattcttg

SEQ ID NO: 794763 - DNA, 15 bp, Homo sapiens
ttttgagattcttgt

SEQ ID NO: 794764 - DNA, 15 bp, Homo sapiens
tttgagattcttgta

SEQ ID NO: 794765 - DNA, 15 bp, Homo sapiens
ttgagattcttgtat

SEQ ID NO: 794766 - DNA, 15 bp, Homo sapiens
tgagattcttgtata

SEQ ID NO: 794767 - DNA, 15 bp, Homo sapiens
gagattcttgtatat

SEQ ID NO: 794768 - DNA, 15 bp, Homo sapiens
agattcttgtatatc

SEQ ID NO: 794769 - DNA, 15 bp, Homo sapiens
gattcttgtatatca

SEQ ID NO: 794770 - DNA, 15 bp, Homo sapiens
attcttgtatatcaa

SEQ ID NO: 794771 - DNA, 15 bp, Homo sapiens
ttcttgtatatcaat

SEQ ID NO: 794772 - DNA, 15 bp, Homo sapiens
tcttgtatatcaatc

SEQ ID NO: 794773 - DNA, 15 bp, Homo sapiens
cttgtatatcaatcc

SEQ ID NO: 794774 - DNA, 15 bp, Homo sapiens
ttgtatatcaatccc

SEQ ID NO: 794775 - DNA, 15 bp, Homo sapiens
tgtatatcaatccct

SEQ ID NO: 794776 - DNA, 15 bp, Homo sapiens
gtatatcaatccctt

SEQ ID NO: 794777 - DNA, 15 bp, Homo sapiens
tatatcaatcccttt

SEQ ID NO: 794778 - DNA, 15 bp, Homo sapiens
atatcaatccctttt

SEQ ID NO: 794779 - DNA, 15 bp, Homo sapiens
tatcaatccctttta

SEQ ID NO: 794780 - DNA, 15 bp, Homo sapiens
atcaatcccttttat

SEQ ID NO: 794781 - DNA, 15 bp, Homo sapiens
tcaatcccttttatt

SEQ ID NO: 794782 - DNA, 15 bp, Homo sapiens
caatcccttttattt

SEQ ID NO: 794783 - DNA, 15 bp, Homo sapiens
aatcccttttatttc

SEQ ID NO: 794784 - DNA, 15 bp, Homo sapiens
atcccttttatttct

SEQ ID NO: 794785 - DNA, 15 bp, Homo sapiens
tcccttttatttctt

SEQ ID NO: 794786 - DNA, 15 bp, Homo sapiens
cccttttatttcttc

SEQ ID NO: 794787 - DNA, 15 bp, Homo sapiens
ccttttatttcttca

SEQ ID NO: 794788 - DNA, 15 bp, Homo sapiens
cttttatttcttcag

SEQ ID NO: 794789 - DNA, 15 bp, Homo sapiens
ttttatttcttcagt

SEQ ID NO: 794790 - DNA, 15 bp, Homo sapiens
tttatttcttcagtg

SEQ ID NO: 794791 - DNA, 15 bp, Homo sapiens
ttatttcttcagtga

SEQ ID NO: 794792 - DNA, 15 bp, Homo sapiens
tatttcttcagtgaa

SEQ ID NO: 794793 - DNA, 15 bp, Homo sapiens
atttcttcagtgaaa

SEQ ID NO: 794794 - DNA, 15 bp, Homo sapiens
tttcttcagtgaaat

SEQ ID NO: 794795 - DNA, 15 bp, Homo sapiens
ttcttcagtgaaatt

SEQ ID NO: 794796 - DNA, 15 bp, Homo sapiens
tcttcagtgaaattt

SEQ ID NO: 794797 - DNA, 15 bp, Homo sapiens
cttcagtgaaatttt

SEQ ID NO: 794798 - DNA, 15 bp, Homo sapiens
ttcagtgaaattttt

SEQ ID NO: 794799 - DNA, 15 bp, Homo sapiens
tcagtgaaatttttc

SEQ ID NO: 794800 - DNA, 15 bp, Homo sapiens
cagtgaaatttttcc

SEQ ID NO: 794801 - DNA, 15 bp, Homo sapiens
agtgaaatttttccc

SEQ ID NO: 794802 - DNA, 15 bp, Homo sapiens
gtgaaatttttccct

SEQ ID NO: 794803 - DNA, 15 bp, Homo sapiens
tgaaatttttccctt

SEQ ID NO: 794804 - DNA, 15 bp, Homo sapiens
gaaatttttcccttt

SEQ ID NO: 794805 - DNA, 15 bp, Homo sapiens
aaatttttccctttg

SEQ ID NO: 794806 - DNA, 15 bp, Homo sapiens
aatttttccctttgg

SEQ ID NO: 794807 - DNA, 15 bp, Homo sapiens
atttttccctttggt

SEQ ID NO: 794808 - DNA, 15 bp, Homo sapiens
tttttccctttggtt

SEQ ID NO: 794809 - DNA, 15 bp, Homo sapiens
ttttccctttggttg

SEQ ID NO: 794810 - DNA, 15 bp, Homo sapiens
tttccctttggttgg

SEQ ID NO: 794811 - DNA, 15 bp, Homo sapiens
ttccctttggttgga

SEQ ID NO: 794812 - DNA, 15 bp, Homo sapiens
tccctttggttggaa

SEQ ID NO: 794813 - DNA, 15 bp, Homo sapiens
ccctttggttggaag

SEQ ID NO: 794814 - DNA, 15 bp, Homo sapiens
cctttggttggaagg

SEQ ID NO: 794815 - DNA, 15 bp, Homo sapiens
ctttggttggaaggg

SEQ ID NO: 794816 - DNA, 15 bp, Homo sapiens
tttggttggaagggg

SEQ ID NO: 794817 - DNA, 15 bp, Homo sapiens
ttggttggaagggga

SEQ ID NO: 794818 - DNA, 15 bp, Homo sapiens
tggttggaaggggac

SEQ ID NO: 794819 - DNA, 15 bp, Homo sapiens
ggttggaaggggacc

SEQ ID NO: 794820 - DNA, 15 bp, Homo sapiens
gttggaaggggacct

SEQ ID NO: 794821 - DNA, 15 bp, Homo sapiens
ttggaaggggacctc

SEQ ID NO: 794822 - DNA, 15 bp, Homo sapiens
tggaaggggacctcg

SEQ ID NO: 794823 - DNA, 15 bp, Homo sapiens
ggaaggggacctcgg

SEQ ID NO: 794824 - DNA, 15 bp, Homo sapiens
gaaggggacctcgga

SEQ ID NO: 794825 - DNA, 15 bp, Homo sapiens
aaggggacctcggat

SEQ ID NO: 794826 - DNA, 15 bp, Homo sapiens
aggggacctcggatt

SEQ ID NO: 794827 - DNA, 15 bp, Homo sapiens
ggggacctcggattg

SEQ ID NO: 794828 - DNA, 15 bp, Homo sapiens
gggacctcggattgg

SEQ ID NO: 794829 - DNA, 15 bp, Homo sapiens
ggacctcggattggc

SEQ ID NO: 794830 - DNA, 15 bp, Homo sapiens
gacctcggattggct

SEQ ID NO: 794831 - DNA, 15 bp, Homo sapiens
acctcggattggctt

SEQ ID NO: 794832 - DNA, 15 bp, Homo sapiens
cctcggattggcttt

SEQ ID NO: 794833 - DNA, 15 bp, Homo sapiens
ctcggattggctttt

SEQ ID NO: 794834 - DNA, 15 bp, Homo sapiens
tcggattggcttttt

SEQ ID NO: 794835 - DNA, 15 bp, Homo sapiens
cggattggctttttg

SEQ ID NO: 794836 - DNA, 15 bp, Homo sapiens
ggattggctttttga

SEQ ID NO: 794837 - DNA, 15 bp, Homo sapiens
gattggctttttgaa

SEQ ID NO: 794838 - DNA, 15 bp, Homo sapiens
attggctttttgaag

SEQ ID NO: 794839 - DNA, 15 bp, Homo sapiens
ttggctttttgaagg

SEQ ID NO: 794840 - DNA, 15 bp, Homo sapiens
tggctttttgaaggt

SEQ ID NO: 794841 - DNA, 15 bp, Homo sapiens
ggctttttgaaggtg

SEQ ID NO: 794842 - DNA, 15 bp, Homo sapiens
gctttttgaaggtgg

SEQ ID NO: 794843 - DNA, 15 bp, Homo sapiens
ctttttgaaggtggg

SEQ ID NO: 794844 - DNA, 15 bp, Homo sapiens
tttttgaaggtgggg

SEQ ID NO: 794845 - DNA, 15 bp, Homo sapiens
ttttgaaggtggggc

SEQ ID NO: 794846 - DNA, 15 bp, Homo sapiens
tttgaaggtggggca

SEQ ID NO: 794847 - DNA, 15 bp, Homo sapiens
ttgaaggtggggcaa

SEQ ID NO: 794848 - DNA, 15 bp, Homo sapiens
tgaaggtggggcaaa

SEQ ID NO: 794849 - DNA, 15 bp, Homo sapiens
gaaggtggggcaaaa

SEQ ID NO: 794850 - DNA, 15 bp, Homo sapiens
aaggtggggcaaaaa

SEQ ID NO: 794851 - DNA, 15 bp, Homo sapiens
aggtggggcaaaaag

SEQ ID NO: 794852 - DNA, 15 bp, Homo sapiens
ggtggggcaaaaaga

SEQ ID NO: 794853 - DNA, 15 bp, Homo sapiens
gtggggcaaaaagac

SEQ ID NO: 794854 - DNA, 15 bp, Homo sapiens
tggggcaaaaagacc

SEQ ID NO: 794855 - DNA, 15 bp, Homo sapiens
ggggcaaaaagacct

SEQ ID NO: 794856 - DNA, 15 bp, Homo sapiens
gggcaaaaagacctc

SEQ ID NO: 794857 - DNA, 15 bp, Homo sapiens
ggcaaaaagacctca

SEQ ID NO: 794858 - DNA, 15 bp, Homo sapiens
gcaaaaagacctcat

SEQ ID NO: 794859 - DNA, 15 bp, Homo sapiens
caaaaagacctcata

SEQ ID NO: 794860 - DNA, 15 bp, Homo sapiens
aaaaagacctcatac

SEQ ID NO: 794861 - DNA, 15 bp, Homo sapiens
aaaagacctcatact

SEQ ID NO: 794862 - DNA, 15 bp, Homo sapiens
aaagacctcatactg

SEQ ID NO: 794863 - DNA, 15 bp, Homo sapiens
aagacctcatactgc

SEQ ID NO: 794864 - DNA, 15 bp, Homo sapiens
agacctcatactgcc

SEQ ID NO: 794865 - DNA, 15 bp, Homo sapiens
gacctcatactgcct

SEQ ID NO: 794866 - DNA, 15 bp, Homo sapiens
acctcatactgcctg

SEQ ID NO: 794867 - DNA, 15 bp, Homo sapiens
cctcatactgcctgg

SEQ ID NO: 794868 - DNA, 15 bp, Homo sapiens
ctcatactgcctggg

SEQ ID NO: 794869 - DNA, 15 bp, Homo sapiens
tcatactgcctggga

SEQ ID NO: 794870 - DNA, 15 bp, Homo sapiens
catactgcctgggat

SEQ ID NO: 794871 - DNA, 15 bp, Homo sapiens
atactgcctgggatc

SEQ ID NO: 794872 - DNA, 15 bp, Homo sapiens
tactgcctgggatca

SEQ ID NO: 794873 - DNA, 15 bp, Homo sapiens
actgcctgggatcaa

SEQ ID NO: 794874 - DNA, 15 bp, Homo sapiens
ctgcctgggatcaac

SEQ ID NO: 794875 - DNA, 15 bp, Homo sapiens
tgcctgggatcaaca

SEQ ID NO: 794876 - DNA, 15 bp, Homo sapiens
gcctgggatcaacag

SEQ ID NO: 794877 - DNA, 15 bp, Homo sapiens
cctgggatcaacagt

SEQ ID NO: 794878 - DNA, 15 bp, Homo sapiens
ctgggatcaacagta

SEQ ID NO: 794879 - DNA, 15 bp, Homo sapiens
tgggatcaacagtaa

SEQ ID NO: 794880 - DNA, 15 bp, Homo sapiens
gggatcaacagtaac

SEQ ID NO: 794881 - DNA, 15 bp, Homo sapiens
ggatcaacagtaaca

SEQ ID NO: 794882 - DNA, 15 bp, Homo sapiens
gatcaacagtaacaa

SEQ ID NO: 794883 - DNA, 15 bp, Homo sapiens
atcaacagtaacaaa

SEQ ID NO: 794884 - DNA, 15 bp, Homo sapiens
tcaacagtaacaaaa

SEQ ID NO: 794885 - DNA, 15 bp, Homo sapiens
caacagtaacaaaaa

SEQ ID NO: 794886 - DNA, 15 bp, Homo sapiens
aacagtaacaaaaat

SEQ ID NO: 794887 - DNA, 15 bp, Homo sapiens
acagtaacaaaaatt

SEQ ID NO: 794888 - DNA, 15 bp, Homo sapiens
cagtaacaaaaattt

SEQ ID NO: 794889 - DNA, 15 bp, Homo sapiens
agtaacaaaaattta

SEQ ID NO: 794890 - DNA, 15 bp, Homo sapiens
gtaacaaaaatttaa

SEQ ID NO: 794891 - DNA, 15 bp, Homo sapiens
taacaaaaatttaag

SEQ ID NO: 794892 - DNA, 15 bp, Homo sapiens
aacaaaaatttaagg

SEQ ID NO: 794893 - DNA, 15 bp, Homo sapiens
acaaaaatttaagga

SEQ ID NO: 794894 - DNA, 15 bp, Homo sapiens
caaaaatttaaggag

SEQ ID NO: 794895 - DNA, 15 bp, Homo sapiens
aaaaatttaaggaga

SEQ ID NO: 794896 - DNA, 15 bp, Homo sapiens
aaaatttaaggagaa

SEQ ID NO: 794897 - DNA, 15 bp, Homo sapiens
aaatttaaggagaat

SEQ ID NO: 794898 - DNA, 15 bp, Homo sapiens
aatttaaggagaatc

SEQ ID NO: 794899 - DNA, 15 bp, Homo sapiens
atttaaggagaatcc

SEQ ID NO: 794900 - DNA, 15 bp, Homo sapiens
tttaaggagaatcct

SEQ ID NO: 794901 - DNA, 15 bp, Homo sapiens
ttaaggagaatcctg

SEQ ID NO: 794902 - DNA, 15 bp, Homo sapiens
taaggagaatcctgt

SEQ ID NO: 794903 - DNA, 15 bp, Homo sapiens
aaggagaatcctgta

SEQ ID NO: 794904 - DNA, 15 bp, Homo sapiens
aggagaatcctgtat

SEQ ID NO: 794905 - DNA, 15 bp, Homo sapiens
ggagaatcctgtatg

SEQ ID NO: 794906 - DNA, 15 bp, Homo sapiens
gagaatcctgtatgt

SEQ ID NO: 794907 - DNA, 15 bp, Homo sapiens
agaatcctgtatgtc

SEQ ID NO: 794908 - DNA, 15 bp, Homo sapiens
gaatcctgtatgtct

SEQ ID NO: 794909 - DNA, 15 bp, Homo sapiens
aatcctgtatgtcta

SEQ ID NO: 794910 - DNA, 15 bp, Homo sapiens
atcctgtatgtctat

SEQ ID NO: 794911 - DNA, 15 bp, Homo sapiens
tcctgtatgtctatt

SEQ ID NO: 794912 - DNA, 15 bp, Homo sapiens
cctgtatgtctattg

SEQ ID NO: 794913 - DNA, 15 bp, Homo sapiens
ctgtatgtctattgt

SEQ ID NO: 794914 - DNA, 15 bp, Homo sapiens
tgtatgtctattgtt

SEQ ID NO: 794915 - DNA, 15 bp, Homo sapiens
gtatgtctattgttt

SEQ ID NO: 794916 - DNA, 15 bp, Homo sapiens
tatgtctattgtttt

SEQ ID NO: 794917 - DNA, 15 bp, Homo sapiens
atgtctattgttttc

SEQ ID NO: 794918 - DNA, 15 bp, Homo sapiens
tgtctattgttttct

SEQ ID NO: 794919 - DNA, 15 bp, Homo sapiens
gtctattgttttctt

SEQ ID NO: 794920 - DNA, 15 bp, Homo sapiens
tctattgttttcttt

SEQ ID NO: 794921 - DNA, 15 bp, Homo sapiens
ctattgttttcttta

SEQ ID NO: 794922 - DNA, 15 bp, Homo sapiens
tattgttttctttac

SEQ ID NO: 794923 - DNA, 15 bp, Homo sapiens
attgttttctttaca

SEQ ID NO: 794924 - DNA, 15 bp, Homo sapiens
ttgttttctttacat

SEQ ID NO: 794925 - DNA, 15 bp, Homo sapiens
tgttttctttacatc

SEQ ID NO: 794926 - DNA, 15 bp, Homo sapiens
gttttctttacatca

SEQ ID NO: 794927 - DNA, 15 bp, Homo sapiens
ttttctttacatcat

SEQ ID NO: 794928 - DNA, 15 bp, Homo sapiens
tttctttacatcata

SEQ ID NO: 794929 - DNA, 15 bp, Homo sapiens
ttctttacatcatat

SEQ ID NO: 794930 - DNA, 15 bp, Homo sapiens
tctttacatcatatc

SEQ ID NO: 794931 - DNA, 15 bp, Homo sapiens
ctttacatcatatca

SEQ ID NO: 794932 - DNA, 15 bp, Homo sapiens
tttacatcatatcat

SEQ ID NO: 794933 - DNA, 15 bp, Homo sapiens
ttacatcatatcata

SEQ ID NO: 794934 - DNA, 15 bp, Homo sapiens
tacatcatatcataa

SEQ ID NO: 794935 - DNA, 15 bp, Homo sapiens
acatcatatcataaa

SEQ ID NO: 794936 - DNA, 15 bp, Homo sapiens
catcatatcataaac

SEQ ID NO: 794937 - DNA, 15 bp, Homo sapiens
atcatatcataaaca

SEQ ID NO: 794938 - DNA, 15 bp, Homo sapiens
tcatatcataaacaa

SEQ ID NO: 794939 - DNA, 15 bp, Homo sapiens
catatcataaacaag

SEQ ID NO: 794940 - DNA, 15 bp, Homo sapiens
atatcataaacaagt

SEQ ID NO: 794941 - DNA, 15 bp, Homo sapiens
tatcataaacaagta

SEQ ID NO: 794942 - DNA, 15 bp, Homo sapiens
atcataaacaagtaa

SEQ ID NO: 794943 - DNA, 15 bp, Homo sapiens
tcataaacaagtaaa

SEQ ID NO: 794944 - DNA, 15 bp, Homo sapiens
cataaacaagtaaat

SEQ ID NO: 794945 - DNA, 15 bp, Homo sapiens
ataaacaagtaaatt

SEQ ID NO: 794946 - DNA, 15 bp, Homo sapiens
taaacaagtaaattg

SEQ ID NO: 794947 - DNA, 15 bp, Homo sapiens
aaacaagtaaattga

SEQ ID NO: 794948 - DNA, 15 bp, Homo sapiens
aacaagtaaattgag

SEQ ID NO: 794949 - DNA, 15 bp, Homo sapiens
acaagtaaattgaga

SEQ ID NO: 794950 - DNA, 15 bp, Homo sapiens
caagtaaattgagaa

SEQ ID NO: 794951 - DNA, 15 bp, Homo sapiens
aagtaaattgagaaa

SEQ ID NO: 794952 - DNA, 15 bp, Homo sapiens
agtaaattgagaaat

SEQ ID NO: 794953 - DNA, 15 bp, Homo sapiens
gtaaattgagaaatt

SEQ ID NO: 794954 - DNA, 15 bp, Homo sapiens
taaattgagaaatta

SEQ ID NO: 794955 - DNA, 15 bp, Homo sapiens
aaattgagaaattaa

SEQ ID NO: 794956 - DNA, 15 bp, Homo sapiens
aattgagaaattaat

SEQ ID NO: 794957 - DNA, 15 bp, Homo sapiens
attgagaaattaatc

SEQ ID NO: 794958 - DNA, 15 bp, Homo sapiens
ttgagaaattaatca

SEQ ID NO: 794959 - DNA, 15 bp, Homo sapiens
tgagaaattaatcac

SEQ ID NO: 794960 - DNA, 15 bp, Homo sapiens
gagaaattaatcaca

SEQ ID NO: 794961 - DNA, 15 bp, Homo sapiens
agaaattaatcacat

SEQ ID NO: 794962 - DNA, 15 bp, Homo sapiens
gaaattaatcacata

SEQ ID NO: 794963 - DNA, 15 bp, Homo sapiens
aaattaatcacataa

SEQ ID NO: 794964 - DNA, 15 bp, Homo sapiens
aattaatcacataat

SEQ ID NO: 794965 - DNA, 15 bp, Homo sapiens
attaatcacataatg

SEQ ID NO: 794966 - DNA, 15 bp, Homo sapiens
ttaatcacataatgg

SEQ ID NO: 794967 - DNA, 15 bp, Homo sapiens
taatcacataatggg

SEQ ID NO: 794968 - DNA, 15 bp, Homo sapiens
aatcacataatggga

SEQ ID NO: 794969 - DNA, 15 bp, Homo sapiens
atcacataatgggac

SEQ ID NO: 794970 - DNA, 15 bp, Homo sapiens
tcacataatgggaca

SEQ ID NO: 794971 - DNA, 15 bp, Homo sapiens
cacataatgggacag

SEQ ID NO: 794972 - DNA, 15 bp, Homo sapiens
acataatgggacagt

SEQ ID NO: 794973 - DNA, 15 bp, Homo sapiens
cataatgggacagta

SEQ ID NO: 794974 - DNA, 15 bp, Homo sapiens
ataatgggacagtaa

SEQ ID NO: 794975 - DNA, 15 bp, Homo sapiens
taatgggacagtaag

SEQ ID NO: 794976 - DNA, 15 bp, Homo sapiens
aatgggacagtaaga

SEQ ID NO: 794977 - DNA, 15 bp, Homo sapiens
atgggacagtaagaa

SEQ ID NO: 794978 - DNA, 15 bp, Homo sapiens
tgggacagtaagaac

SEQ ID NO: 794979 - DNA, 15 bp, Homo sapiens
gggacagtaagaaca

SEQ ID NO: 794980 - DNA, 15 bp, Homo sapiens
ggacagtaagaacac

SEQ ID NO: 794981 - DNA, 15 bp, Homo sapiens
gacagtaagaacaca

SEQ ID NO: 794982 - DNA, 15 bp, Homo sapiens
acagtaagaacacat

SEQ ID NO: 794983 - DNA, 15 bp, Homo sapiens
cagtaagaacacatc

SEQ ID NO: 794984 - DNA, 15 bp, Homo sapiens
agtaagaacacatca

SEQ ID NO: 794985 - DNA, 15 bp, Homo sapiens
gtaagaacacatcac

SEQ ID NO: 794986 - DNA, 15 bp, Homo sapiens
taagaacacatcaca

SEQ ID NO: 794987 - DNA, 15 bp, Homo sapiens
aagaacacatcacaa

SEQ ID NO: 794988 - DNA, 15 bp, Homo sapiens
agaacacatcacaat

SEQ ID NO: 794989 - DNA, 15 bp, Homo sapiens
gaacacatcacaatc

SEQ ID NO: 794990 - DNA, 15 bp, Homo sapiens
aacacatcacaatcc

SEQ ID NO: 794991 - DNA, 15 bp, Homo sapiens
acacatcacaatcca

SEQ ID NO: 794992 - DNA, 15 bp, Homo sapiens
cacatcacaatccac

SEQ ID NO: 794993 - DNA, 15 bp, Homo sapiens
acatcacaatccaca

SEQ ID NO: 794994 - DNA, 15 bp, Homo sapiens
catcacaatccacaa

SEQ ID NO: 794995 - DNA, 15 bp, Homo sapiens
atcacaatccacaaa

SEQ ID NO: 794996 - DNA, 15 bp, Homo sapiens
tcacaatccacaaac

SEQ ID NO: 794997 - DNA, 15 bp, Homo sapiens
cacaatccacaaaca

SEQ ID NO: 794998 - DNA, 15 bp, Homo sapiens
acaatccacaaacag

SEQ ID NO: 794999 - DNA, 15 bp, Homo sapiens
caatccacaaacagg

SEQ ID NO: 795000 - DNA, 15 bp, Homo sapiens
aatccacaaacaggt

SEQ ID NO: 795001 - DNA, 15 bp, Homo sapiens
atccacaaacaggtt

SEQ ID NO: 795002 - DNA, 15 bp, Homo sapiens
tccacaaacaggtta

SEQ ID NO: 795003 - DNA, 15 bp, Homo sapiens
ccacaaacaggttac

SEQ ID NO: 795004 - DNA, 15 bp, Homo sapiens
cacaaacaggttacg

SEQ ID NO: 795005 - DNA, 15 bp, Homo sapiens
acaaacaggttacga

SEQ ID NO: 795006 - DNA, 15 bp, Homo sapiens
caaacaggttacgaa

SEQ ID NO: 795007 - DNA, 15 bp, Homo sapiens
aaacaggttacgaag

SEQ ID NO: 795008 - DNA, 15 bp, Homo sapiens
aacaggttacgaagg

SEQ ID NO: 795009 - DNA, 15 bp, Homo sapiens
acaggttacgaagga

SEQ ID NO: 795010 - DNA, 15 bp, Homo sapiens
caggttacgaaggag

SEQ ID NO: 795011 - DNA, 15 bp, Homo sapiens
aggttacgaaggaga

SEQ ID NO: 795012 - DNA, 15 bp, Homo sapiens
ggttacgaaggagaa

SEQ ID NO: 795013 - DNA, 15 bp, Homo sapiens
gttacgaaggagaaa

SEQ ID NO: 795014 - DNA, 15 bp, Homo sapiens
ttacgaaggagaaat

SEQ ID NO: 795015 - DNA, 15 bp, Homo sapiens
tacgaaggagaaatg

SEQ ID NO: 795016 - DNA, 15 bp, Homo sapiens
acgaaggagaaatgg

SEQ ID NO: 795017 - DNA, 15 bp, Homo sapiens
cgaaggagaaatgga

SEQ ID NO: 795018 - DNA, 15 bp, Homo sapiens
gaaggagaaatggac

SEQ ID NO: 795019 - DNA, 15 bp, Homo sapiens
aaggagaaatggact

SEQ ID NO: 795020 - DNA, 15 bp, Homo sapiens
aggagaaatggactg

SEQ ID NO: 795021 - DNA, 15 bp, Homo sapiens
ggagaaatggactgc

SEQ ID NO: 795022 - DNA, 15 bp, Homo sapiens
gagaaatggactgct

SEQ ID NO: 795023 - DNA, 15 bp, Homo sapiens
agaaatggactgctt

SEQ ID NO: 795024 - DNA, 15 bp, Homo sapiens
gaaatggactgcttt

SEQ ID NO: 795025 - DNA, 15 bp, Homo sapiens
aaatggactgctttt

SEQ ID NO: 795026 - DNA, 15 bp, Homo sapiens
aatggactgcttttt

SEQ ID NO: 795027 - DNA, 15 bp, Homo sapiens
atggactgcttttta

SEQ ID NO: 795028 - DNA, 15 bp, Homo sapiens
tggactgctttttaa

SEQ ID NO: 795029 - DNA, 15 bp, Homo sapiens
ggactgctttttaaa

SEQ ID NO: 795030 - DNA, 15 bp, Homo sapiens
gactgctttttaaat

SEQ ID NO: 795031 - DNA, 15 bp, Homo sapiens
actgctttttaaatt

SEQ ID NO: 795032 - DNA, 15 bp, Homo sapiens
ctgctttttaaattt

SEQ ID NO: 795033 - DNA, 15 bp, Homo sapiens
tgctttttaaatttc

SEQ ID NO: 795034 - DNA, 15 bp, Homo sapiens
tttaaatttcttttc

SEQ ID NO: 795035 - DNA, 15 bp, Homo sapiens
ttaaatttcttttcc

SEQ ID NO: 795036 - DNA, 15 bp, Homo sapiens
taaatttcttttcca

SEQ ID NO: 795037 - DNA, 15 bp, Homo sapiens
aaatttcttttccat

SEQ ID NO: 795038 - DNA, 15 bp, Homo sapiens
aatttcttttccatt

SEQ ID NO: 795039 - DNA, 15 bp, Homo sapiens
atttcttttccattt

SEQ ID NO: 795040 - DNA, 15 bp, Homo sapiens
tttcttttccatttt

SEQ ID NO: 795041 - DNA, 15 bp, Homo sapiens
ttcttttccattttt

SEQ ID NO: 795042 - DNA, 15 bp, Homo sapiens
tcttttccatttttg

SEQ ID NO: 795043 - DNA, 15 bp, Homo sapiens
cttttccatttttgt

SEQ ID NO: 795044 - DNA, 15 bp, Homo sapiens
ttttccatttttgtt

SEQ ID NO: 795045 - DNA, 15 bp, Homo sapiens
tttccatttttgttt

SEQ ID NO: 795046 - DNA, 15 bp, Homo sapiens
ttccatttttgtttg

SEQ ID NO: 795047 - DNA, 15 bp, Homo sapiens
tccatttttgtttgt

SEQ ID NO: 795048 - DNA, 15 bp, Homo sapiens
ccatttttgtttgtt

SEQ ID NO: 795049 - DNA, 15 bp, Homo sapiens
tgtttgtttgtttgg

SEQ ID NO: 795050 - DNA, 15 bp, Homo sapiens
gtttgtttgtttggg

SEQ ID NO: 795051 - DNA, 15 bp, Homo sapiens
tttgtttgtttgggt

SEQ ID NO: 795052 - DNA, 15 bp, Homo sapiens
ttgtttgtttgggtc

SEQ ID NO: 795053 - DNA, 15 bp, Homo sapiens
tgtttgtttgggtca

SEQ ID NO: 795054 - DNA, 15 bp, Homo sapiens
gtttgtttgggtcat

SEQ ID NO: 795055 - DNA, 15 bp, Homo sapiens
tttgtttgggtcatg

SEQ ID NO: 795056 - DNA, 15 bp, Homo sapiens
ttgtttgggtcatgc

SEQ ID NO: 795057 - DNA, 15 bp, Homo sapiens
tgtttgggtcatgct

SEQ ID NO: 795058 - DNA, 15 bp, Homo sapiens
gtttgggtcatgctt

SEQ ID NO: 795059 - DNA, 15 bp, Homo sapiens
tttgggtcatgcttc

SEQ ID NO: 795060 - DNA, 15 bp, Homo sapiens
ttgggtcatgcttcc

SEQ ID NO: 795061 - DNA, 15 bp, Homo sapiens
tgggtcatgcttcca

SEQ ID NO: 795062 - DNA, 15 bp, Homo sapiens
gggtcatgcttccaa

SEQ ID NO: 795063 - DNA, 15 bp, Homo sapiens
ggtcatgcttccaag

SEQ ID NO: 795064 - DNA, 15 bp, Homo sapiens
gtcatgcttccaaga

SEQ ID NO: 795065 - DNA, 15 bp, Homo sapiens
tcatgcttccaagag

SEQ ID NO: 795066 - DNA, 15 bp, Homo sapiens
catgcttccaagagc

SEQ ID NO: 795067 - DNA, 15 bp, Homo sapiens
atgcttccaagagca

SEQ ID NO: 795068 - DNA, 15 bp, Homo sapiens
tgcttccaagagcat

SEQ ID NO: 795069 - DNA, 15 bp, Homo sapiens
gcttccaagagcatc

SEQ ID NO: 795070 - DNA, 15 bp, Homo sapiens
cttccaagagcatct

SEQ ID NO: 795071 - DNA, 15 bp, Homo sapiens
ttccaagagcatctg

SEQ ID NO: 795072 - DNA, 15 bp, Homo sapiens
tccaagagcatctgt

SEQ ID NO: 795073 - DNA, 15 bp, Homo sapiens
ccaagagcatctgtg

SEQ ID NO: 795074 - DNA, 15 bp, Homo sapiens
caagagcatctgtga

SEQ ID NO: 795075 - DNA, 15 bp, Homo sapiens
aagagcatctgtgaa

SEQ ID NO: 795076 - DNA, 15 bp, Homo sapiens
agagcatctgtgaag

SEQ ID NO: 795077 - DNA, 15 bp, Homo sapiens
gagcatctgtgaagg

SEQ ID NO: 795078 - DNA, 15 bp, Homo sapiens
agcatctgtgaaggc

SEQ ID NO: 795079 - DNA, 15 bp, Homo sapiens
gcatctgtgaaggcc

SEQ ID NO: 795080 - DNA, 15 bp, Homo sapiens
catctgtgaaggcca

SEQ ID NO: 795081 - DNA, 15 bp, Homo sapiens
atctgtgaaggccaa

SEQ ID NO: 795082 - DNA, 15 bp, Homo sapiens
tctgtgaaggccaaa

SEQ ID NO: 795083 - DNA, 15 bp, Homo sapiens
ctgtgaaggccaaat

SEQ ID NO: 795084 - DNA, 15 bp, Homo sapiens
tgtgaaggccaaata

SEQ ID NO: 795085 - DNA, 15 bp, Homo sapiens
gtgaaggccaaatat

SEQ ID NO: 795086 - DNA, 15 bp, Homo sapiens
tgaaggccaaatatg

SEQ ID NO: 795087 - DNA, 15 bp, Homo sapiens
gaaggccaaatatgc

SEQ ID NO: 795088 - DNA, 15 bp, Homo sapiens
aaggccaaatatgct

SEQ ID NO: 795089 - DNA, 15 bp, Homo sapiens
aggccaaatatgctg

SEQ ID NO: 795090 - DNA, 15 bp, Homo sapiens
ggccaaatatgctgg

SEQ ID NO: 795091 - DNA, 15 bp, Homo sapiens
gccaaatatgctgga

SEQ ID NO: 795092 - DNA, 15 bp, Homo sapiens
ccaaatatgctggat

SEQ ID NO: 795093 - DNA, 15 bp, Homo sapiens
caaatatgctggatt

SEQ ID NO: 795094 - DNA, 15 bp, Homo sapiens
aaatatgctggatta

SEQ ID NO: 795095 - DNA, 15 bp, Homo sapiens
aatatgctggattat

SEQ ID NO: 795096 - DNA, 15 bp, Homo sapiens
atatgctggattata

SEQ ID NO: 795097 - DNA, 15 bp, Homo sapiens
tatgctggattatag

SEQ ID NO: 795098 - DNA, 15 bp, Homo sapiens
atgctggattatagg

SEQ ID NO: 795099 - DNA, 15 bp, Homo sapiens
tgctggattatagga

SEQ ID NO: 795100 - DNA, 15 bp, Homo sapiens
gctggattataggag

SEQ ID NO: 795101 - DNA, 15 bp, Homo sapiens
ctggattataggagc

SEQ ID NO: 795102 - DNA, 15 bp, Homo sapiens
tggattataggagct

SEQ ID NO: 795103 - DNA, 15 bp, Homo sapiens
ggattataggagctt

SEQ ID NO: 795104 - DNA, 15 bp, Homo sapiens
gattataggagcttc

SEQ ID NO: 795105 - DNA, 15 bp, Homo sapiens
attataggagcttca

SEQ ID NO: 795106 - DNA, 15 bp, Homo sapiens
ttataggagcttcaa

SEQ ID NO: 795107 - DNA, 15 bp, Homo sapiens
tataggagcttcaag

SEQ ID NO: 795108 - DNA, 15 bp, Homo sapiens
ataggagcttcaagt

SEQ ID NO: 795109 - DNA, 15 bp, Homo sapiens
taggagcttcaagtg

SEQ ID NO: 795110 - DNA, 15 bp, Homo sapiens
aggagcttcaagtgt

SEQ ID NO: 795111 - DNA, 15 bp, Homo sapiens
ggagcttcaagtgta

SEQ ID NO: 795112 - DNA, 15 bp, Homo sapiens
gagcttcaagtgtat

SEQ ID NO: 795113 - DNA, 15 bp, Homo sapiens
agcttcaagtgtatc

SEQ ID NO: 795114 - DNA, 15 bp, Homo sapiens
gcttcaagtgtatct

SEQ ID NO: 795115 - DNA, 15 bp, Homo sapiens
cttcaagtgtatctg

SEQ ID NO: 795116 - DNA, 15 bp, Homo sapiens
ttcaagtgtatctgg

SEQ ID NO: 795117 - DNA, 15 bp, Homo sapiens
tcaagtgtatctggt

SEQ ID NO: 795118 - DNA, 15 bp, Homo sapiens
caagtgtatctggta

SEQ ID NO: 795119 - DNA, 15 bp, Homo sapiens
aagtgtatctggtag

SEQ ID NO: 795120 - DNA, 15 bp, Homo sapiens
agtgtatctggtaga

SEQ ID NO: 795121 - DNA, 15 bp, Homo sapiens
gtgtatctggtagaa

SEQ ID NO: 795122 - DNA, 15 bp, Homo sapiens
tgtatctggtagaaa

SEQ ID NO: 795123 - DNA, 15 bp, Homo sapiens
gtatctggtagaaat

SEQ ID NO: 795124 - DNA, 15 bp, Homo sapiens
tatctggtagaaatg

SEQ ID NO: 795125 - DNA, 15 bp, Homo sapiens
atctggtagaaatga

SEQ ID NO: 795126 - DNA, 15 bp, Homo sapiens
tctggtagaaatgat

SEQ ID NO: 795127 - DNA, 15 bp, Homo sapiens
ctggtagaaatgata

SEQ ID NO: 795128 - DNA, 15 bp, Homo sapiens
tggtagaaatgatat

SEQ ID NO: 795129 - DNA, 15 bp, Homo sapiens
ggtagaaatgatatc

SEQ ID NO: 795130 - DNA, 15 bp, Homo sapiens
gtagaaatgatatca

SEQ ID NO: 795131 - DNA, 15 bp, Homo sapiens
tagaaatgatatcat

SEQ ID NO: 795132 - DNA, 15 bp, Homo sapiens
agaaatgatatcatt

SEQ ID NO: 795133 - DNA, 15 bp, Homo sapiens
gaaatgatatcattt

SEQ ID NO: 795134 - DNA, 15 bp, Homo sapiens
aaatgatatcatttg

SEQ ID NO: 795135 - DNA, 15 bp, Homo sapiens
aatgatatcatttgt

SEQ ID NO: 795136 - DNA, 15 bp, Homo sapiens
atgatatcatttgtt

SEQ ID NO: 795137 - DNA, 15 bp, Homo sapiens
tgatatcatttgttg

SEQ ID NO: 795138 - DNA, 15 bp, Homo sapiens
gatatcatttgttgc

SEQ ID NO: 795139 - DNA, 15 bp, Homo sapiens
atatcatttgttgcc

SEQ ID NO: 795140 - DNA, 15 bp, Homo sapiens
tatcatttgttgcct

SEQ ID NO: 795141 - DNA, 15 bp, Homo sapiens
atcatttgttgcctg

SEQ ID NO: 795142 - DNA, 15 bp, Homo sapiens
tcatttgttgcctga

SEQ ID NO: 795143 - DNA, 15 bp, Homo sapiens
catttgttgcctgat

SEQ ID NO: 795144 - DNA, 15 bp, Homo sapiens
atttgttgcctgata

SEQ ID NO: 795145 - DNA, 15 bp, Homo sapiens
tttgttgcctgatat

SEQ ID NO: 795146 - DNA, 15 bp, Homo sapiens
ttgttgcctgatata

SEQ ID NO: 795147 - DNA, 15 bp, Homo sapiens
tgttgcctgatataa

SEQ ID NO: 795148 - DNA, 15 bp, Homo sapiens
gttgcctgatataat

SEQ ID NO: 795149 - DNA, 15 bp, Homo sapiens
ttgcctgatataatt

SEQ ID NO: 795150 - DNA, 15 bp, Homo sapiens
tgcctgatataattt

SEQ ID NO: 795151 - DNA, 15 bp, Homo sapiens
gcctgatataatttg

SEQ ID NO: 795152 - DNA, 15 bp, Homo sapiens
cctgatataatttgt

SEQ ID NO: 795153 - DNA, 15 bp, Homo sapiens
ctgatataatttgtt

SEQ ID NO: 795154 - DNA, 15 bp, Homo sapiens
tgatataatttgttg

SEQ ID NO: 795155 - DNA, 15 bp, Homo sapiens
gatataatttgttgc

SEQ ID NO: 795156 - DNA, 15 bp, Homo sapiens
atataatttgttgcc

SEQ ID NO: 795157 - DNA, 15 bp, Homo sapiens
tataatttgttgcct

SEQ ID NO: 795158 - DNA, 15 bp, Homo sapiens
ataatttgttgcctg

SEQ ID NO: 795159 - DNA, 15 bp, Homo sapiens
taatttgttgcctga

SEQ ID NO: 795160 - DNA, 15 bp, Homo sapiens
aatttgttgcctgac

SEQ ID NO: 795161 - DNA, 15 bp, Homo sapiens
atttgttgcctgacc

SEQ ID NO: 795162 - DNA, 15 bp, Homo sapiens
tttgttgcctgacca

SEQ ID NO: 795163 - DNA, 15 bp, Homo sapiens
ttgttgcctgaccaa

SEQ ID NO: 795164 - DNA, 15 bp, Homo sapiens
tgttgcctgaccaag

SEQ ID NO: 795165 - DNA, 15 bp, Homo sapiens
gttgcctgaccaaga

SEQ ID NO: 795166 - DNA, 15 bp, Homo sapiens
ttgcctgaccaagaa

SEQ ID NO: 795167 - DNA, 15 bp, Homo sapiens
tgcctgaccaagaaa

SEQ ID NO: 795168 - DNA, 15 bp, Homo sapiens
gcctgaccaagaaaa

SEQ ID NO: 795169 - DNA, 15 bp, Homo sapiens
cctgaccaagaaaag

SEQ ID NO: 795170 - DNA, 15 bp, Homo sapiens
ctgaccaagaaaagg

SEQ ID NO: 795171 - DNA, 15 bp, Homo sapiens
tgaccaagaaaaggg

SEQ ID NO: 795172 - DNA, 15 bp, Homo sapiens
gaccaagaaaaggga

SEQ ID NO: 795173 - DNA, 15 bp, Homo sapiens
accaagaaaagggat

SEQ ID NO: 795174 - DNA, 15 bp, Homo sapiens
ccaagaaaagggatt

SEQ ID NO: 795175 - DNA, 15 bp, Homo sapiens
caagaaaagggattc

SEQ ID NO: 795176 - DNA, 15 bp, Homo sapiens
aagaaaagggattct

SEQ ID NO: 795177 - DNA, 15 bp, Homo sapiens
agaaaagggattctt

SEQ ID NO: 795178 - DNA, 15 bp, Homo sapiens
gaaaagggattcttg

SEQ ID NO: 795179 - DNA, 15 bp, Homo sapiens
aaaagggattcttgg

SEQ ID NO: 795180 - DNA, 15 bp, Homo sapiens
aaagggattcttggt

SEQ ID NO: 795181 - DNA, 15 bp, Homo sapiens
aagggattcttggta

SEQ ID NO: 795182 - DNA, 15 bp, Homo sapiens
agggattcttggtac

SEQ ID NO: 795183 - DNA, 15 bp, Homo sapiens
gggattcttggtact

SEQ ID NO: 795184 - DNA, 15 bp, Homo sapiens
ggattcttggtactt

SEQ ID NO: 795185 - DNA, 15 bp, Homo sapiens
gattcttggtacttc

SEQ ID NO: 795186 - DNA, 15 bp, Homo sapiens
attcttggtacttca

SEQ ID NO: 795187 - DNA, 15 bp, Homo sapiens
ttcttggtacttcat

SEQ ID NO: 795188 - DNA, 15 bp, Homo sapiens
tcttggtacttcata

SEQ ID NO: 795189 - DNA, 15 bp, Homo sapiens
cttggtacttcataa

SEQ ID NO: 795190 - DNA, 15 bp, Homo sapiens
ttggtacttcataat

SEQ ID NO: 795191 - DNA, 15 bp, Homo sapiens
tggtacttcataatt

SEQ ID NO: 795192 - DNA, 15 bp, Homo sapiens
ggtacttcataattt

SEQ ID NO: 795193 - DNA, 15 bp, Homo sapiens
gtacttcataatttt

SEQ ID NO: 795194 - DNA, 15 bp, Homo sapiens
tacttcataatttta

SEQ ID NO: 795195 - DNA, 15 bp, Homo sapiens
acttcataattttaa

SEQ ID NO: 795196 - DNA, 15 bp, Homo sapiens
cttcataattttaaa

SEQ ID NO: 795197 - DNA, 15 bp, Homo sapiens
ttcataattttaaag

SEQ ID NO: 795198 - DNA, 15 bp, Homo sapiens
tcataattttaaagg

SEQ ID NO: 795199 - DNA, 15 bp, Homo sapiens
cataattttaaagga

SEQ ID NO: 795200 - DNA, 15 bp, Homo sapiens
ataattttaaaggat

SEQ ID NO: 795201 - DNA, 15 bp, Homo sapiens
taattttaaaggata

SEQ ID NO: 795202 - DNA, 15 bp, Homo sapiens
aattttaaaggataa

SEQ ID NO: 795203 - DNA, 15 bp, Homo sapiens
attttaaaggataac

SEQ ID NO: 795204 - DNA, 15 bp, Homo sapiens
ttttaaaggataaca

SEQ ID NO: 795205 - DNA, 15 bp, Homo sapiens
tttaaaggataacag

SEQ ID NO: 795206 - DNA, 15 bp, Homo sapiens
ttaaaggataacaga

SEQ ID NO: 795207 - DNA, 15 bp, Homo sapiens
taaaggataacagag

SEQ ID NO: 795208 - DNA, 15 bp, Homo sapiens
aaaggataacagaga

SEQ ID NO: 795209 - DNA, 15 bp, Homo sapiens
aaggataacagagag

SEQ ID NO: 795210 - DNA, 15 bp, Homo sapiens
aggataacagagagt

SEQ ID NO: 795211 - DNA, 15 bp, Homo sapiens
ggataacagagagta

SEQ ID NO: 795212 - DNA, 15 bp, Homo sapiens
gataacagagagtaa

SEQ ID NO: 795213 - DNA, 15 bp, Homo sapiens
ataacagagagtaaa

SEQ ID NO: 795214 - DNA, 15 bp, Homo sapiens
taacagagagtaaat

SEQ ID NO: 795215 - DNA, 15 bp, Homo sapiens
aacagagagtaaata

SEQ ID NO: 795216 - DNA, 15 bp, Homo sapiens
acagagagtaaatag

SEQ ID NO: 795217 - DNA, 15 bp, Homo sapiens
cagagagtaaatagg

SEQ ID NO: 795218 - DNA, 15 bp, Homo sapiens
agagagtaaataggt

SEQ ID NO: 795219 - DNA, 15 bp, Homo sapiens
gagagtaaataggtt

SEQ ID NO: 795220 - DNA, 15 bp, Homo sapiens
agagtaaataggtta

SEQ ID NO: 795221 - DNA, 15 bp, Homo sapiens
gagtaaataggttaa

SEQ ID NO: 795222 - DNA, 15 bp, Homo sapiens
agtaaataggttaat

SEQ ID NO: 795223 - DNA, 15 bp, Homo sapiens
gtaaataggttaatt

SEQ ID NO: 795224 - DNA, 15 bp, Homo sapiens
taaataggttaattt

SEQ ID NO: 795225 - DNA, 15 bp, Homo sapiens
aaataggttaatttt

SEQ ID NO: 795226 - DNA, 15 bp, Homo sapiens
aataggttaattttt

SEQ ID NO: 795227 - DNA, 15 bp, Homo sapiens
ataggttaatttttt

SEQ ID NO: 795228 - DNA, 15 bp, Homo sapiens
taggttaattttttt

SEQ ID NO: 795229 - DNA, 15 bp, Homo sapiens
aggttaatttttttc

SEQ ID NO: 795230 - DNA, 15 bp, Homo sapiens
ggttaatttttttca

SEQ ID NO: 795231 - DNA, 15 bp, Homo sapiens
gttaatttttttcaa

SEQ ID NO: 795232 - DNA, 15 bp, Homo sapiens
ttaatttttttcaaa

SEQ ID NO: 795233 - DNA, 15 bp, Homo sapiens
taatttttttcaaat

SEQ ID NO: 795234 - DNA, 15 bp, Homo sapiens
aatttttttcaaatt

SEQ ID NO: 795235 - DNA, 15 bp, Homo sapiens
atttttttcaaatta

SEQ ID NO: 795236 - DNA, 15 bp, Homo sapiens
tttttttcaaattat

SEQ ID NO: 795237 - DNA, 15 bp, Homo sapiens
ttttttcaaattatt

SEQ ID NO: 795238 - DNA, 15 bp, Homo sapiens
tttttcaaattattt

SEQ ID NO: 795239 - DNA, 15 bp, Homo sapiens
ttttcaaattatttc

SEQ ID NO: 795240 - DNA, 15 bp, Homo sapiens
tttcaaattatttca

SEQ ID NO: 795241 - DNA, 15 bp, Homo sapiens
ttcaaattatttcag

SEQ ID NO: 795242 - DNA, 15 bp, Homo sapiens
tcaaattatttcagc

SEQ ID NO: 795243 - DNA, 15 bp, Homo sapiens
caaattatttcagca

SEQ ID NO: 795244 - DNA, 15 bp, Homo sapiens
aaattatttcagcaa

SEQ ID NO: 795245 - DNA, 15 bp, Homo sapiens
aattatttcagcaag

SEQ ID NO: 795246 - DNA, 15 bp, Homo sapiens
attatttcagcaagg

SEQ ID NO: 795247 - DNA, 15 bp, Homo sapiens
ttatttcagcaagga

SEQ ID NO: 795248 - DNA, 15 bp, Homo sapiens
tatttcagcaaggat

SEQ ID NO: 795249 - DNA, 15 bp, Homo sapiens
atttcagcaaggatc

SEQ ID NO: 795250 - DNA, 15 bp, Homo sapiens
tttcagcaaggatct

SEQ ID NO: 795251 - DNA, 15 bp, Homo sapiens
ttcagcaaggatctg

SEQ ID NO: 795252 - DNA, 15 bp, Homo sapiens
tcagcaaggatctgt

SEQ ID NO: 795253 - DNA, 15 bp, Homo sapiens
cagcaaggatctgtt

SEQ ID NO: 795254 - DNA, 15 bp, Homo sapiens
agcaaggatctgttg

SEQ ID NO: 795255 - DNA, 15 bp, Homo sapiens
gcaaggatctgttga

SEQ ID NO: 795256 - DNA, 15 bp, Homo sapiens
caaggatctgttgag

SEQ ID NO: 795257 - DNA, 15 bp, Homo sapiens
aaggatctgttgagt

SEQ ID NO: 795258 - DNA, 15 bp, Homo sapiens
aggatctgttgagtc

SEQ ID NO: 795259 - DNA, 15 bp, Homo sapiens
ggatctgttgagtcc

SEQ ID NO: 795260 - DNA, 15 bp, Homo sapiens
gatctgttgagtcct

SEQ ID NO: 795261 - DNA, 15 bp, Homo sapiens
atctgttgagtcctt

SEQ ID NO: 795262 - DNA, 15 bp, Homo sapiens
tctgttgagtcctta

SEQ ID NO: 795263 - DNA, 15 bp, Homo sapiens
ctgttgagtccttat

SEQ ID NO: 795264 - DNA, 15 bp, Homo sapiens
tgttgagtccttatt

SEQ ID NO: 795265 - DNA, 15 bp, Homo sapiens
gttgagtccttatta

SEQ ID NO: 795266 - DNA, 15 bp, Homo sapiens
ttgagtccttattat

SEQ ID NO: 795267 - DNA, 15 bp, Homo sapiens
tgagtccttattatg

SEQ ID NO: 795268 - DNA, 15 bp, Homo sapiens
gagtccttattatgt

SEQ ID NO: 795269 - DNA, 15 bp, Homo sapiens
agtccttattatgtt

SEQ ID NO: 795270 - DNA, 15 bp, Homo sapiens
gtccttattatgttg

SEQ ID NO: 795271 - DNA, 15 bp, Homo sapiens
tccttattatgttga

SEQ ID NO: 795272 - DNA, 15 bp, Homo sapiens
ccttattatgttgaa

SEQ ID NO: 795273 - DNA, 15 bp, Homo sapiens
cttattatgttgaag

SEQ ID NO: 795274 - DNA, 15 bp, Homo sapiens
ttattatgttgaagt

SEQ ID NO: 795275 - DNA, 15 bp, Homo sapiens
tattatgttgaagta

SEQ ID NO: 795276 - DNA, 15 bp, Homo sapiens
attatgttgaagtac

SEQ ID NO: 795277 - DNA, 15 bp, Homo sapiens
ttatgttgaagtacg

SEQ ID NO: 795278 - DNA, 15 bp, Homo sapiens
tatgttgaagtacga

SEQ ID NO: 795279 - DNA, 15 bp, Homo sapiens
atgttgaagtacgaa

SEQ ID NO: 795280 - DNA, 15 bp, Homo sapiens
tgttgaagtacgaac

SEQ ID NO: 795281 - DNA, 15 bp, Homo sapiens
gttgaagtacgaact

SEQ ID NO: 795282 - DNA, 15 bp, Homo sapiens
ttgaagtacgaactt

SEQ ID NO: 795283 - DNA, 15 bp, Homo sapiens
tgaagtacgaacttt

SEQ ID NO: 795284 - DNA, 15 bp, Homo sapiens
gaagtacgaactttt

SEQ ID NO: 795285 - DNA, 15 bp, Homo sapiens
aagtacgaactttta

SEQ ID NO: 795286 - DNA, 15 bp, Homo sapiens
agtacgaacttttag

SEQ ID NO: 795287 - DNA, 15 bp, Homo sapiens
gtacgaacttttagg

SEQ ID NO: 795288 - DNA, 15 bp, Homo sapiens
tacgaacttttaggt

SEQ ID NO: 795289 - DNA, 15 bp, Homo sapiens
acgaacttttaggtg

SEQ ID NO: 795290 - DNA, 15 bp, Homo sapiens
cgaacttttaggtgc

SEQ ID NO: 795291 - DNA, 15 bp, Homo sapiens
gaacttttaggtgct

SEQ ID NO: 795292 - DNA, 15 bp, Homo sapiens
aacttttaggtgctt

SEQ ID NO: 795293 - DNA, 15 bp, Homo sapiens
acttttaggtgcttt

SEQ ID NO: 795294 - DNA, 15 bp, Homo sapiens
cttttaggtgcttta

SEQ ID NO: 795295 - DNA, 15 bp, Homo sapiens
ttttaggtgctttag

SEQ ID NO: 795296 - DNA, 15 bp, Homo sapiens
tttaggtgctttaga

SEQ ID NO: 795297 - DNA, 15 bp, Homo sapiens
ttaggtgctttagat

SEQ ID NO: 795298 - DNA, 15 bp, Homo sapiens
taggtgctttagatt

SEQ ID NO: 795299 - DNA, 15 bp, Homo sapiens
aggtgctttagattc

SEQ ID NO: 795300 - DNA, 15 bp, Homo sapiens
ggtgctttagattca

SEQ ID NO: 795301 - DNA, 15 bp, Homo sapiens
gtgctttagattcag

SEQ ID NO: 795302 - DNA, 15 bp, Homo sapiens
tgctttagattcaga

SEQ ID NO: 795303 - DNA, 15 bp, Homo sapiens
gctttagattcagag

SEQ ID NO: 795304 - DNA, 15 bp, Homo sapiens
ctttagattcagaga

SEQ ID NO: 795305 - DNA, 15 bp, Homo sapiens
tttagattcagagat

SEQ ID NO: 795306 - DNA, 15 bp, Homo sapiens
ttagattcagagata

SEQ ID NO: 795307 - DNA, 15 bp, Homo sapiens
tagattcagagataa

SEQ ID NO: 795308 - DNA, 15 bp, Homo sapiens
agattcagagataaa

SEQ ID NO: 795309 - DNA, 15 bp, Homo sapiens
gattcagagataaat

SEQ ID NO: 795310 - DNA, 15 bp, Homo sapiens
attcagagataaata

SEQ ID NO: 795311 - DNA, 15 bp, Homo sapiens
ttcagagataaatat

SEQ ID NO: 795312 - DNA, 15 bp, Homo sapiens
tcagagataaatata

SEQ ID NO: 795313 - DNA, 15 bp, Homo sapiens
cagagataaatataa

SEQ ID NO: 795314 - DNA, 15 bp, Homo sapiens
agagataaatataac

SEQ ID NO: 795315 - DNA, 15 bp, Homo sapiens
gagataaatataacc

SEQ ID NO: 795316 - DNA, 15 bp, Homo sapiens
agataaatataacct

SEQ ID NO: 795317 - DNA, 15 bp, Homo sapiens
gataaatataaccta

SEQ ID NO: 795318 - DNA, 15 bp, Homo sapiens
ataaatataacctat

SEQ ID NO: 795319 - DNA, 15 bp, Homo sapiens
taaatataacctatt

SEQ ID NO: 795320 - DNA, 15 bp, Homo sapiens
aaatataacctattc

SEQ ID NO: 795321 - DNA, 15 bp, Homo sapiens
aatataacctattct

SEQ ID NO: 795322 - DNA, 15 bp, Homo sapiens
atataacctattctc

SEQ ID NO: 795323 - DNA, 15 bp, Homo sapiens
tataacctattctct

SEQ ID NO: 795324 - DNA, 15 bp, Homo sapiens
ataacctattctctg

SEQ ID NO: 795325 - DNA, 15 bp, Homo sapiens
taacctattctctgt

SEQ ID NO: 795326 - DNA, 15 bp, Homo sapiens
aacctattctctgtc

SEQ ID NO: 795327 - DNA, 15 bp, Homo sapiens
acctattctctgtca

SEQ ID NO: 795328 - DNA, 15 bp, Homo sapiens
cctattctctgtcac

SEQ ID NO: 795329 - DNA, 15 bp, Homo sapiens
ctattctctgtcacc

SEQ ID NO: 795330 - DNA, 15 bp, Homo sapiens
tattctctgtcacca

SEQ ID NO: 795331 - DNA, 15 bp, Homo sapiens
attctctgtcaccaa

SEQ ID NO: 795332 - DNA, 15 bp, Homo sapiens
ttctctgtcaccaag

SEQ ID NO: 795333 - DNA, 15 bp, Homo sapiens
tctctgtcaccaaga

SEQ ID NO: 795334 - DNA, 15 bp, Homo sapiens
ctctgtcaccaagat

SEQ ID NO: 795335 - DNA, 15 bp, Homo sapiens
ttgactgtggacaac

SEQ ID NO: 795336 - DNA, 15 bp, Homo sapiens
tgactgtggacaact

SEQ ID NO: 795337 - DNA, 15 bp, Homo sapiens
gactgtggacaactg

SEQ ID NO: 795338 - DNA, 15 bp, Homo sapiens
actgtggacaactga

SEQ ID NO: 795339 - DNA, 15 bp, Homo sapiens
ctgtggacaactgaa

SEQ ID NO: 795340 - DNA, 15 bp, Homo sapiens
tgtggacaactgaaa

SEQ ID NO: 795341 - DNA, 15 bp, Homo sapiens
gtggacaactgaaac

SEQ ID NO: 795342 - DNA, 15 bp, Homo sapiens
tggacaactgaaacc

SEQ ID NO: 795343 - DNA, 15 bp, Homo sapiens
ggacaactgaaacca

SEQ ID NO: 795344 - DNA, 15 bp, Homo sapiens
gacaactgaaaccac

SEQ ID NO: 795345 - DNA, 15 bp, Homo sapiens
acaactgaaaccaca

SEQ ID NO: 795346 - DNA, 15 bp, Homo sapiens
caactgaaaccacag

SEQ ID NO: 795347 - DNA, 15 bp, Homo sapiens
aactgaaaccacaga

SEQ ID NO: 795348 - DNA, 15 bp, Homo sapiens
actgaaaccacagaa

SEQ ID NO: 795349 - DNA, 15 bp, Homo sapiens
ctgaaaccacagaaa

SEQ ID NO: 795350 - DNA, 15 bp, Homo sapiens
tgaaaccacagaaag

SEQ ID NO: 795351 - DNA, 15 bp, Homo sapiens
gaaaccacagaaagt

SEQ ID NO: 795352 - DNA, 15 bp, Homo sapiens
aaaccacagaaagtg

SEQ ID NO: 795353 - DNA, 15 bp, Homo sapiens
aaccacagaaagtga

SEQ ID NO: 795354 - DNA, 15 bp, Homo sapiens
accacagaaagtgaa

SEQ ID NO: 795355 - DNA, 15 bp, Homo sapiens
ccacagaaagtgaaa

SEQ ID NO: 795356 - DNA, 15 bp, Homo sapiens
cacagaaagtgaaac

SEQ ID NO: 795357 - DNA, 15 bp, Homo sapiens
acagaaagtgaaact

SEQ ID NO: 795358 - DNA, 15 bp, Homo sapiens
cagaaagtgaaacta

SEQ ID NO: 795359 - DNA, 15 bp, Homo sapiens
agaaagtgaaactac

SEQ ID NO: 795360 - DNA, 15 bp, Homo sapiens
gaaagtgaaactact

SEQ ID NO: 795361 - DNA, 15 bp, Homo sapiens
aaagtgaaactactg

SEQ ID NO: 795362 - DNA, 15 bp, Homo sapiens
aagtgaaactactga

SEQ ID NO: 795363 - DNA, 15 bp, Homo sapiens
agtgaaactactgat

SEQ ID NO: 795364 - DNA, 15 bp, Homo sapiens
gtgaaactactgata

SEQ ID NO: 795365 - DNA, 15 bp, Homo sapiens
tgaaactactgataa

SEQ ID NO: 795366 - DNA, 15 bp, Homo sapiens
gaaactactgataag

SEQ ID NO: 795367 - DNA, 15 bp, Homo sapiens
aaactactgataagg

SEQ ID NO: 795368 - DNA, 15 bp, Homo sapiens
aactactgataaggg

SEQ ID NO: 795369 - DNA, 15 bp, Homo sapiens
actactgataagggg

SEQ ID NO: 795370 - DNA, 15 bp, Homo sapiens
ctactgataagggga

SEQ ID NO: 795371 - DNA, 15 bp, Homo sapiens
tactgataaggggag

SEQ ID NO: 795372 - DNA, 15 bp, Homo sapiens
actgataaggggagt

SEQ ID NO: 795373 - DNA, 15 bp, Homo sapiens
ctgataaggggagtc

SEQ ID NO: 795374 - DNA, 15 bp, Homo sapiens
tgataaggggagtct

SEQ ID NO: 795375 - DNA, 15 bp, Homo sapiens
gataaggggagtcta

SEQ ID NO: 795376 - DNA, 15 bp, Homo sapiens
ataaggggagtctac

SEQ ID NO: 795377 - DNA, 15 bp, Homo sapiens
taaggggagtctaca

SEQ ID NO: 795378 - DNA, 15 bp, Homo sapiens
aaggggagtctacaa

SEQ ID NO: 795379 - DNA, 15 bp, Homo sapiens
aggggagtctacaat

SEQ ID NO: 795380 - DNA, 15 bp, Homo sapiens
ggggagtctacaata

SEQ ID NO: 795381 - DNA, 15 bp, Homo sapiens
gggagtctacaatat

SEQ ID NO: 795382 - DNA, 15 bp, Homo sapiens
ggagtctacaatatt

SEQ ID NO: 795383 - DNA, 15 bp, Homo sapiens
gagtctacaatattt

SEQ ID NO: 795384 - DNA, 15 bp, Homo sapiens
agtctacaatatttg

SEQ ID NO: 795385 - DNA, 15 bp, Homo sapiens
gtctacaatatttgg

SEQ ID NO: 795386 - DNA, 15 bp, Homo sapiens
tctacaatatttggt

SEQ ID NO: 795387 - DNA, 15 bp, Homo sapiens
ctacaatatttggtg

SEQ ID NO: 795388 - DNA, 15 bp, Homo sapiens
tacaatatttggtgc

SEQ ID NO: 795389 - DNA, 15 bp, Homo sapiens
acaatatttggtgca

SEQ ID NO: 795390 - DNA, 15 bp, Homo sapiens
caatatttggtgcat

SEQ ID NO: 795391 - DNA, 15 bp, Homo sapiens
aatatttggtgcata

SEQ ID NO: 795392 - DNA, 15 bp, Homo sapiens
atatttggtgcatat

SEQ ID NO: 795393 - DNA, 15 bp, Homo sapiens
tatttggtgcatatt

SEQ ID NO: 795394 - DNA, 15 bp, Homo sapiens
atttggtgcatatta

SEQ ID NO: 795395 - DNA, 15 bp, Homo sapiens
tttggtgcatattat

SEQ ID NO: 795396 - DNA, 15 bp, Homo sapiens
ttggtgcatattatt

SEQ ID NO: 795397 - DNA, 15 bp, Homo sapiens
tggtgcatattattc

SEQ ID NO: 795398 - DNA, 15 bp, Homo sapiens
ggtgcatattattcc

SEQ ID NO: 795399 - DNA, 15 bp, Homo sapiens
gtgcatattattcca

SEQ ID NO: 795400 - DNA, 15 bp, Homo sapiens
tgcatattattccaa

SEQ ID NO: 795401 - DNA, 15 bp, Homo sapiens
gcatattattccaat

SEQ ID NO: 795402 - DNA, 15 bp, Homo sapiens
catattattccaatc

SEQ ID NO: 795403 - DNA, 15 bp, Homo sapiens
atattattccaatct

SEQ ID NO: 795404 - DNA, 15 bp, Homo sapiens
tattattccaatctt

SEQ ID NO: 795405 - DNA, 15 bp, Homo sapiens
attattccaatcttt

SEQ ID NO: 795406 - DNA, 15 bp, Homo sapiens
ttattccaatctttg

SEQ ID NO: 795407 - DNA, 15 bp, Homo sapiens
tattccaatctttgt

SEQ ID NO: 795408 - DNA, 15 bp, Homo sapiens
attccaatctttgtg

SEQ ID NO: 795409 - DNA, 15 bp, Homo sapiens
ttccaatctttgtgc

SEQ ID NO: 795410 - DNA, 15 bp, Homo sapiens
tccaatctttgtgca

SEQ ID NO: 795411 - DNA, 15 bp, Homo sapiens
ccaatctttgtgcat

SEQ ID NO: 795412 - DNA, 15 bp, Homo sapiens
caatctttgtgcata

SEQ ID NO: 795413 - DNA, 15 bp, Homo sapiens
aatctttgtgcatag

SEQ ID NO: 795414 - DNA, 15 bp, Homo sapiens
atctttgtgcataga

SEQ ID NO: 795415 - DNA, 15 bp, Homo sapiens
tctttgtgcatagaa

SEQ ID NO: 795416 - DNA, 15 bp, Homo sapiens
ctttgtgcatagaaa

SEQ ID NO: 795417 - DNA, 15 bp, Homo sapiens
tttgtgcatagaaat

SEQ ID NO: 795418 - DNA, 15 bp, Homo sapiens
ttgtgcatagaaatg

SEQ ID NO: 795419 - DNA, 15 bp, Homo sapiens
tgtgcatagaaatgc

SEQ ID NO: 795420 - DNA, 15 bp, Homo sapiens
gtgcatagaaatgct

SEQ ID NO: 795421 - DNA, 15 bp, Homo sapiens
tgcatagaaatgctt

SEQ ID NO: 795422 - DNA, 15 bp, Homo sapiens
gcatagaaatgcttt

SEQ ID NO: 795423 - DNA, 15 bp, Homo sapiens
catagaaatgctttt

SEQ ID NO: 795424 - DNA, 15 bp, Homo sapiens
atagaaatgctttta

SEQ ID NO: 795425 - DNA, 15 bp, Homo sapiens
tagaaatgcttttaa

SEQ ID NO: 795426 - DNA, 15 bp, Homo sapiens
agaaatgcttttaaa

SEQ ID NO: 795427 - DNA, 15 bp, Homo sapiens
gaaatgcttttaaaa

SEQ ID NO: 795428 - DNA, 15 bp, Homo sapiens
aaatgcttttaaaaa

SEQ ID NO: 795429 - DNA, 15 bp, Homo sapiens
aatgcttttaaaaat

SEQ ID NO: 795430 - DNA, 15 bp, Homo sapiens
atgcttttaaaaatg

SEQ ID NO: 795431 - DNA, 15 bp, Homo sapiens
tgcttttaaaaatga

SEQ ID NO: 795432 - DNA, 15 bp, Homo sapiens
gcttttaaaaatgaa

SEQ ID NO: 795433 - DNA, 15 bp, Homo sapiens
cttttaaaaatgaat

SEQ ID NO: 795434 - DNA, 15 bp, Homo sapiens
ttttaaaaatgaata

SEQ ID NO: 795435 - DNA, 15 bp, Homo sapiens
tttaaaaatgaatat

SEQ ID NO: 795436 - DNA, 15 bp, Homo sapiens
ttaaaaatgaatatt

SEQ ID NO: 795437 - DNA, 15 bp, Homo sapiens
taaaaatgaatatta

SEQ ID NO: 795438 - DNA, 15 bp, Homo sapiens
aaaaatgaatattaa

SEQ ID NO: 795439 - DNA, 15 bp, Homo sapiens
aaaatgaatattaaa

SEQ ID NO: 795440 - DNA, 15 bp, Homo sapiens
aaatgaatattaaag

SEQ ID NO: 795441 - DNA, 15 bp, Homo sapiens
aatgaatattaaagc

SEQ ID NO: 795442 - DNA, 15 bp, Homo sapiens
atgaatattaaagca

SEQ ID NO: 795443 - DNA, 15 bp, Homo sapiens
tgaatattaaagcat

SEQ ID NO: 795444 - DNA, 15 bp, Homo sapiens
gaatattaaagcata

SEQ ID NO: 795445 - DNA, 15 bp, Homo sapiens
aatattaaagcatac

SEQ ID NO: 795446 - DNA, 15 bp, Homo sapiens
atattaaagcatact

SEQ ID NO: 795447 - DNA, 15 bp, Homo sapiens
tattaaagcatactt

SEQ ID NO: 795448 - DNA, 15 bp, Homo sapiens
attaaagcatacttt

SEQ ID NO: 795449 - DNA, 15 bp, Homo sapiens
ttaaagcatactttt

SEQ ID NO: 795450 - DNA, 15 bp, Homo sapiens
taaagcatacttttt

SEQ ID NO: 795451 - DNA, 15 bp, Homo sapiens
aaagcatacttttta

SEQ ID NO: 795452 - DNA, 15 bp, Homo sapiens
aagcatactttttat

SEQ ID NO: 795453 - DNA, 15 bp, Homo sapiens
agcatactttttata

SEQ ID NO: 795454 - DNA, 15 bp, Homo sapiens
gcatactttttataa

SEQ ID NO: 795455 - DNA, 15 bp, Homo sapiens
catactttttataaa

SEQ ID NO: 795456 - DNA, 15 bp, Homo sapiens
atactttttataaac

SEQ ID NO: 795457 - DNA, 15 bp, Homo sapiens
tactttttataaact

SEQ ID NO: 795458 - DNA, 15 bp, Homo sapiens
actttttataaactt

SEQ ID NO: 795459 - DNA, 15 bp, Homo sapiens
ctttttataaactta

SEQ ID NO: 795460 - DNA, 15 bp, Homo sapiens
tttttataaacttat

SEQ ID NO: 795461 - DNA, 15 bp, Homo sapiens
ttttataaacttatt

SEQ ID NO: 795462 - DNA, 15 bp, Homo sapiens
tttataaacttattg

SEQ ID NO: 795463 - DNA, 15 bp, Homo sapiens
ttataaacttattga

SEQ ID NO: 795464 - DNA, 15 bp, Homo sapiens
tataaacttattgat

SEQ ID NO: 795465 - DNA, 15 bp, Homo sapiens
ataaacttattgata

SEQ ID NO: 795466 - DNA, 15 bp, Homo sapiens
taaacttattgatat

SEQ ID NO: 795467 - DNA, 15 bp, Homo sapiens
aaacttattgatatg

SEQ ID NO: 795468 - DNA, 15 bp, Homo sapiens
aacttattgatatgt

SEQ ID NO: 795469 - DNA, 15 bp, Homo sapiens
acttattgatatgtg

SEQ ID NO: 795470 - DNA, 15 bp, Homo sapiens
cttattgatatgtgc

SEQ ID NO: 795471 - DNA, 15 bp, Homo sapiens
ttattgatatgtgca

SEQ ID NO: 795472 - DNA, 15 bp, Homo sapiens
tattgatatgtgcac

SEQ ID NO: 795473 - DNA, 15 bp, Homo sapiens
attgatatgtgcaca

SEQ ID NO: 795474 - DNA, 15 bp, Homo sapiens
ttgatatgtgcacaa

SEQ ID NO: 795475 - DNA, 15 bp, Homo sapiens
tgatatgtgcacaat

SEQ ID NO: 795476 - DNA, 15 bp, Homo sapiens
gatatgtgcacaata

SEQ ID NO: 795477 - DNA, 15 bp, Homo sapiens
atatgtgcacaatac

SEQ ID NO: 795478 - DNA, 15 bp, Homo sapiens
tatgtgcacaataca

SEQ ID NO: 795479 - DNA, 15 bp, Homo sapiens
atgtgcacaatacat

SEQ ID NO: 795480 - DNA, 15 bp, Homo sapiens
tgtgcacaatacatt

SEQ ID NO: 795481 - DNA, 15 bp, Homo sapiens
gtgcacaatacattt

SEQ ID NO: 795482 - DNA, 15 bp, Homo sapiens
tgcacaatacatttc

SEQ ID NO: 795483 - DNA, 15 bp, Homo sapiens
gcacaatacatttcc

SEQ ID NO: 795484 - DNA, 15 bp, Homo sapiens
cacaatacatttccc

SEQ ID NO: 795485 - DNA, 15 bp, Homo sapiens
acaatacatttcccc

SEQ ID NO: 795486 - DNA, 15 bp, Homo sapiens
caatacatttccccc

SEQ ID NO: 795487 - DNA, 15 bp, Homo sapiens
aatacatttccccca

SEQ ID NO: 795488 - DNA, 15 bp, Homo sapiens
atacatttcccccag

SEQ ID NO: 795489 - DNA, 15 bp, Homo sapiens
tacatttcccccaga

SEQ ID NO: 795490 - DNA, 15 bp, Homo sapiens
acatttcccccagat

SEQ ID NO: 795491 - DNA, 15 bp, Homo sapiens
catttcccccagatc

SEQ ID NO: 795492 - DNA, 15 bp, Homo sapiens
atttcccccagatca

SEQ ID NO: 795493 - DNA, 15 bp, Homo sapiens
tttcccccagatcat

SEQ ID NO: 795494 - DNA, 15 bp, Homo sapiens
ttcccccagatcatt

SEQ ID NO: 795495 - DNA, 15 bp, Homo sapiens
tcccccagatcattc

SEQ ID NO: 795496 - DNA, 15 bp, Homo sapiens
cccccagatcattca

SEQ ID NO: 795497 - DNA, 15 bp, Homo sapiens
ccccagatcattcag

SEQ ID NO: 795498 - DNA, 15 bp, Homo sapiens
cccagatcattcagt

SEQ ID NO: 795499 - DNA, 15 bp, Homo sapiens
ccagatcattcagta

SEQ ID NO: 795500 - DNA, 15 bp, Homo sapiens
cagatcattcagtac

SEQ ID NO: 795501 - DNA, 15 bp, Homo sapiens
agatcattcagtacc

SEQ ID NO: 795502 - DNA, 15 bp, Homo sapiens
gatcattcagtacct

SEQ ID NO: 795503 - DNA, 15 bp, Homo sapiens
atcattcagtacctt

SEQ ID NO: 795504 - DNA, 15 bp, Homo sapiens
tcattcagtaccttt

SEQ ID NO: 795505 - DNA, 15 bp, Homo sapiens
cattcagtacctttc

SEQ ID NO: 795506 - DNA, 15 bp, Homo sapiens
attcagtacctttcc

SEQ ID NO: 795507 - DNA, 15 bp, Homo sapiens
ttcagtacctttcca

SEQ ID NO: 795508 - DNA, 15 bp, Homo sapiens
tcagtacctttccac

SEQ ID NO: 795509 - DNA, 15 bp, Homo sapiens
cagtacctttccacc

SEQ ID NO: 795510 - DNA, 15 bp, Homo sapiens
agtacctttccaccg

SEQ ID NO: 795511 - DNA, 15 bp, Homo sapiens
gtacctttccaccgc

SEQ ID NO: 795512 - DNA, 15 bp, Homo sapiens
tacctttccaccgca

SEQ ID NO: 795513 - DNA, 15 bp, Homo sapiens
acctttccaccgcat

SEQ ID NO: 795514 - DNA, 15 bp, Homo sapiens
cctttccaccgcata

SEQ ID NO: 795515 - DNA, 15 bp, Homo sapiens
ctttccaccgcataa

SEQ ID NO: 795516 - DNA, 15 bp, Homo sapiens
tttccaccgcataat

SEQ ID NO: 795517 - DNA, 15 bp, Homo sapiens
ttccaccgcataatt

SEQ ID NO: 795518 - DNA, 15 bp, Homo sapiens
tccaccgcataattt

SEQ ID NO: 795519 - DNA, 15 bp, Homo sapiens
ccaccgcataattta

SEQ ID NO: 795520 - DNA, 15 bp, Homo sapiens
caccgcataatttaa

SEQ ID NO: 795521 - DNA, 15 bp, Homo sapiens
accgcataatttaat

SEQ ID NO: 795522 - DNA, 15 bp, Homo sapiens
ccgcataatttaatg

SEQ ID NO: 795523 - DNA, 15 bp, Homo sapiens
cgcataatttaatga

SEQ ID NO: 795524 - DNA, 15 bp, Homo sapiens
gcataatttaatgac

SEQ ID NO: 795525 - DNA, 15 bp, Homo sapiens
cataatttaatgact

SEQ ID NO: 795526 - DNA, 15 bp, Homo sapiens
ataatttaatgactg

SEQ ID NO: 795527 - DNA, 15 bp, Homo sapiens
taatttaatgactgc

SEQ ID NO: 795528 - DNA, 15 bp, Homo sapiens
aatttaatgactgca

SEQ ID NO: 795529 - DNA, 15 bp, Homo sapiens
atttaatgactgcat

SEQ ID NO: 795530 - DNA, 15 bp, Homo sapiens
tttaatgactgcatg

SEQ ID NO: 795531 - DNA, 15 bp, Homo sapiens
ttaatgactgcatgg

SEQ ID NO: 795532 - DNA, 15 bp, Homo sapiens
taatgactgcatgga

SEQ ID NO: 795533 - DNA, 15 bp, Homo sapiens
aatgactgcatggaa

SEQ ID NO: 795534 - DNA, 15 bp, Homo sapiens
atgactgcatggaat

SEQ ID NO: 795535 - DNA, 15 bp, Homo sapiens
tgactgcatggaatt

SEQ ID NO: 795536 - DNA, 15 bp, Homo sapiens
gactgcatggaattg

SEQ ID NO: 795537 - DNA, 15 bp, Homo sapiens
actgcatggaattgt

SEQ ID NO: 795538 - DNA, 15 bp, Homo sapiens
ctgcatggaattgta

SEQ ID NO: 795539 - DNA, 15 bp, Homo sapiens
tgcatggaattgtac

SEQ ID NO: 795540 - DNA, 15 bp, Homo sapiens
gcatggaattgtacc

SEQ ID NO: 795541 - DNA, 15 bp, Homo sapiens
catggaattgtaccc

SEQ ID NO: 795542 - DNA, 15 bp, Homo sapiens
atggaattgtaccct

SEQ ID NO: 795543 - DNA, 15 bp, Homo sapiens
tggaattgtaccctg

SEQ ID NO: 795544 - DNA, 15 bp, Homo sapiens
ggaattgtaccctgt

SEQ ID NO: 795545 - DNA, 15 bp, Homo sapiens
gaattgtaccctgtg

SEQ ID NO: 795546 - DNA, 15 bp, Homo sapiens
aattgtaccctgtga

SEQ ID NO: 795547 - DNA, 15 bp, Homo sapiens
attgtaccctgtgaa

SEQ ID NO: 795548 - DNA, 15 bp, Homo sapiens
ttgtaccctgtgaat

SEQ ID NO: 795549 - DNA, 15 bp, Homo sapiens
tgtaccctgtgaatg

SEQ ID NO: 795550 - DNA, 15 bp, Homo sapiens
gtaccctgtgaatga

SEQ ID NO: 795551 - DNA, 15 bp, Homo sapiens
taccctgtgaatgaa

SEQ ID NO: 795552 - DNA, 15 bp, Homo sapiens
accctgtgaatgaac

SEQ ID NO: 795553 - DNA, 15 bp, Homo sapiens
ccctgtgaatgaact

SEQ ID NO: 795554 - DNA, 15 bp, Homo sapiens
cctgtgaatgaactt

SEQ ID NO: 795555 - DNA, 15 bp, Homo sapiens
ctgtgaatgaactta

SEQ ID NO: 795556 - DNA, 15 bp, Homo sapiens
tgtgaatgaacttac

SEQ ID NO: 795557 - DNA, 15 bp, Homo sapiens
gtgaatgaacttaca

SEQ ID NO: 795558 - DNA, 15 bp, Homo sapiens
tgaatgaacttacag

SEQ ID NO: 795559 - DNA, 15 bp, Homo sapiens
gaatgaacttacagc

SEQ ID NO: 795560 - DNA, 15 bp, Homo sapiens
aatgaacttacagca

SEQ ID NO: 795561 - DNA, 15 bp, Homo sapiens
atgaacttacagcat

SEQ ID NO: 795562 - DNA, 15 bp, Homo sapiens
tgaacttacagcatg

SEQ ID NO: 795563 - DNA, 15 bp, Homo sapiens
gaacttacagcatgt

SEQ ID NO: 795564 - DNA, 15 bp, Homo sapiens
aacttacagcatgtt

SEQ ID NO: 795565 - DNA, 15 bp, Homo sapiens
acttacagcatgtta

SEQ ID NO: 795566 - DNA, 15 bp, Homo sapiens
cttacagcatgttag

SEQ ID NO: 795567 - DNA, 15 bp, Homo sapiens
ttacagcatgttagc

SEQ ID NO: 795568 - DNA, 15 bp, Homo sapiens
tacagcatgttagcc

SEQ ID NO: 795569 - DNA, 15 bp, Homo sapiens
acagcatgttagcca

SEQ ID NO: 795570 - DNA, 15 bp, Homo sapiens
cagcatgttagccag

SEQ ID NO: 795571 - DNA, 15 bp, Homo sapiens
agcatgttagccagt

SEQ ID NO: 795572 - DNA, 15 bp, Homo sapiens
gcatgttagccagtc

SEQ ID NO: 795573 - DNA, 15 bp, Homo sapiens
catgttagccagtct

SEQ ID NO: 795574 - DNA, 15 bp, Homo sapiens
atgttagccagtcta

SEQ ID NO: 795575 - DNA, 15 bp, Homo sapiens
tgttagccagtctat

SEQ ID NO: 795576 - DNA, 15 bp, Homo sapiens
gttagccagtctatg

SEQ ID NO: 795577 - DNA, 15 bp, Homo sapiens
ttagccagtctatga

SEQ ID NO: 795578 - DNA, 15 bp, Homo sapiens
tagccagtctatgat

SEQ ID NO: 795579 - DNA, 15 bp, Homo sapiens
agccagtctatgatt

SEQ ID NO: 795580 - DNA, 15 bp, Homo sapiens
gccagtctatgattg

SEQ ID NO: 795581 - DNA, 15 bp, Homo sapiens
ccagtctatgattgg

SEQ ID NO: 795582 - DNA, 15 bp, Homo sapiens
cagtctatgattgga

SEQ ID NO: 795583 - DNA, 15 bp, Homo sapiens
agtctatgattggac

SEQ ID NO: 795584 - DNA, 15 bp, Homo sapiens
gtctatgattggaca

SEQ ID NO: 795585 - DNA, 15 bp, Homo sapiens
tctatgattggacat

SEQ ID NO: 795586 - DNA, 15 bp, Homo sapiens
ctatgattggacatt

SEQ ID NO: 795587 - DNA, 15 bp, Homo sapiens
tatgattggacattg

SEQ ID NO: 795588 - DNA, 15 bp, Homo sapiens
atgattggacattgg

SEQ ID NO: 795589 - DNA, 15 bp, Homo sapiens
tgattggacattggg

SEQ ID NO: 795590 - DNA, 15 bp, Homo sapiens
gattggacattgggc

SEQ ID NO: 795591 - DNA, 15 bp, Homo sapiens
attggacattgggcc

SEQ ID NO: 795592 - DNA, 15 bp, Homo sapiens
ttggacattgggcca

SEQ ID NO: 795593 - DNA, 15 bp, Homo sapiens
tggacattgggccat

SEQ ID NO: 795594 - DNA, 15 bp, Homo sapiens
ggacattgggccatt

SEQ ID NO: 795595 - DNA, 15 bp, Homo sapiens
gacattgggccattt

SEQ ID NO: 795596 - DNA, 15 bp, Homo sapiens
acattgggccatttc

SEQ ID NO: 795597 - DNA, 15 bp, Homo sapiens
cattgggccatttcc

SEQ ID NO: 795598 - DNA, 15 bp, Homo sapiens
attgggccatttcca

SEQ ID NO: 795599 - DNA, 15 bp, Homo sapiens
ttgggccatttccaa

SEQ ID NO: 795600 - DNA, 15 bp, Homo sapiens
tgggccatttccaat

SEQ ID NO: 795601 - DNA, 15 bp, Homo sapiens
gggccatttccaatt

SEQ ID NO: 795602 - DNA, 15 bp, Homo sapiens
ggccatttccaattt

SEQ ID NO: 795603 - DNA, 15 bp, Homo sapiens
gccatttccaatttt

SEQ ID NO: 795604 - DNA, 15 bp, Homo sapiens
ccatttccaattttc

SEQ ID NO: 795605 - DNA, 15 bp, Homo sapiens
catttccaattttcc

SEQ ID NO: 795606 - DNA, 15 bp, Homo sapiens
atttccaattttcca

SEQ ID NO: 795607 - DNA, 15 bp, Homo sapiens
tttccaattttccat

SEQ ID NO: 795608 - DNA, 15 bp, Homo sapiens
ttccaattttccatt

SEQ ID NO: 795609 - DNA, 15 bp, Homo sapiens
tccaattttccatta

SEQ ID NO: 795610 - DNA, 15 bp, Homo sapiens
ccaattttccattag

SEQ ID NO: 795611 - DNA, 15 bp, Homo sapiens
caattttccattaga

SEQ ID NO: 795612 - DNA, 15 bp, Homo sapiens
aattttccattagaa

SEQ ID NO: 795613 - DNA, 15 bp, Homo sapiens
attttccattagaaa

SEQ ID NO: 795614 - DNA, 15 bp, Homo sapiens
ttttccattagaaac

SEQ ID NO: 795615 - DNA, 15 bp, Homo sapiens
tttccattagaaaca

SEQ ID NO: 795616 - DNA, 15 bp, Homo sapiens
ttccattagaaacaa

SEQ ID NO: 795617 - DNA, 15 bp, Homo sapiens
tccattagaaacaat

SEQ ID NO: 795618 - DNA, 15 bp, Homo sapiens
ccattagaaacaatg

SEQ ID NO: 795619 - DNA, 15 bp, Homo sapiens
cattagaaacaatgt

SEQ ID NO: 795620 - DNA, 15 bp, Homo sapiens
attagaaacaatgtt

SEQ ID NO: 795621 - DNA, 15 bp, Homo sapiens
ttagaaacaatgttg

SEQ ID NO: 795622 - DNA, 15 bp, Homo sapiens
tagaaacaatgttgt

SEQ ID NO: 795623 - DNA, 15 bp, Homo sapiens
agaaacaatgttgtg

SEQ ID NO: 795624 - DNA, 15 bp, Homo sapiens
gaaacaatgttgtga

SEQ ID NO: 795625 - DNA, 15 bp, Homo sapiens
aaacaatgttgtgat

SEQ ID NO: 795626 - DNA, 15 bp, Homo sapiens
aacaatgttgtgatg

SEQ ID NO: 795627 - DNA, 15 bp, Homo sapiens
acaatgttgtgatga

SEQ ID NO: 795628 - DNA, 15 bp, Homo sapiens
caatgttgtgatgaa

SEQ ID NO: 795629 - DNA, 15 bp, Homo sapiens
aatgttgtgatgaac

SEQ ID NO: 795630 - DNA, 15 bp, Homo sapiens
atgttgtgatgaaca

SEQ ID NO: 795631 - DNA, 15 bp, Homo sapiens
tgttgtgatgaacaa

SEQ ID NO: 795632 - DNA, 15 bp, Homo sapiens
gttgtgatgaacaat

SEQ ID NO: 795633 - DNA, 15 bp, Homo sapiens
ttgtgatgaacaatc

SEQ ID NO: 795634 - DNA, 15 bp, Homo sapiens
tgtgatgaacaatct

SEQ ID NO: 795635 - DNA, 15 bp, Homo sapiens
gtgatgaacaatctt

SEQ ID NO: 795636 - DNA, 15 bp, Homo sapiens
tgatgaacaatcttt

SEQ ID NO: 795637 - DNA, 15 bp, Homo sapiens
gatgaacaatctttg

SEQ ID NO: 795638 - DNA, 15 bp, Homo sapiens
atgaacaatctttgt

SEQ ID NO: 795639 - DNA, 15 bp, Homo sapiens
tgaacaatctttgtg

SEQ ID NO: 795640 - DNA, 15 bp, Homo sapiens
gaacaatctttgtgc

SEQ ID NO: 795641 - DNA, 15 bp, Homo sapiens
aacaatctttgtgca

SEQ ID NO: 795642 - DNA, 15 bp, Homo sapiens
acaatctttgtgcac

SEQ ID NO: 795643 - DNA, 15 bp, Homo sapiens
caatctttgtgcaca

SEQ ID NO: 795644 - DNA, 15 bp, Homo sapiens
aatctttgtgcacat

SEQ ID NO: 795645 - DNA, 15 bp, Homo sapiens
atctttgtgcacatt

SEQ ID NO: 795646 - DNA, 15 bp, Homo sapiens
tctttgtgcacattg

SEQ ID NO: 795647 - DNA, 15 bp, Homo sapiens
ctttgtgcacattga

SEQ ID NO: 795648 - DNA, 15 bp, Homo sapiens
tttgtgcacattgat

SEQ ID NO: 795649 - DNA, 15 bp, Homo sapiens
ttgtgcacattgatg

SEQ ID NO: 795650 - DNA, 15 bp, Homo sapiens
tgtgcacattgatga

SEQ ID NO: 795651 - DNA, 15 bp, Homo sapiens
gtgcacattgatgat

SEQ ID NO: 795652 - DNA, 15 bp, Homo sapiens
tgcacattgatgatt

SEQ ID NO: 795653 - DNA, 15 bp, Homo sapiens
gcacattgatgatta

SEQ ID NO: 795654 - DNA, 15 bp, Homo sapiens
cacattgatgattat

SEQ ID NO: 795655 - DNA, 15 bp, Homo sapiens
acattgatgattatt

SEQ ID NO: 795656 - DNA, 15 bp, Homo sapiens
cattgatgattattt

SEQ ID NO: 795657 - DNA, 15 bp, Homo sapiens
attgatgattatttc

SEQ ID NO: 795658 - DNA, 15 bp, Homo sapiens
ttgatgattatttcc

SEQ ID NO: 795659 - DNA, 15 bp, Homo sapiens
tgatgattatttcct

SEQ ID NO: 795660 - DNA, 15 bp, Homo sapiens
gatgattatttccta

SEQ ID NO: 795661 - DNA, 15 bp, Homo sapiens
atgattatttcctag

SEQ ID NO: 795662 - DNA, 15 bp, Homo sapiens
tgattatttcctagg

SEQ ID NO: 795663 - DNA, 15 bp, Homo sapiens
gattatttcctagga

SEQ ID NO: 795664 - DNA, 15 bp, Homo sapiens
attatttcctaggat

SEQ ID NO: 795665 - DNA, 15 bp, Homo sapiens
ttatttcctaggata

SEQ ID NO: 795666 - DNA, 15 bp, Homo sapiens
tatttcctaggataa

SEQ ID NO: 795667 - DNA, 15 bp, Homo sapiens
atttcctaggataaa

SEQ ID NO: 795668 - DNA, 15 bp, Homo sapiens
tttcctaggataaag

SEQ ID NO: 795669 - DNA, 15 bp, Homo sapiens
ttcctaggataaagt

SEQ ID NO: 795670 - DNA, 15 bp, Homo sapiens
tcctaggataaagtc

SEQ ID NO: 795671 - DNA, 15 bp, Homo sapiens
cctaggataaagtct

SEQ ID NO: 795672 - DNA, 15 bp, Homo sapiens
ctaggataaagtctt

SEQ ID NO: 795673 - DNA, 15 bp, Homo sapiens
taggataaagtctta

SEQ ID NO: 795674 - DNA, 15 bp, Homo sapiens
aggataaagtcttag

SEQ ID NO: 795675 - DNA, 15 bp, Homo sapiens
ggataaagtcttaga

SEQ ID NO: 795676 - DNA, 15 bp, Homo sapiens
gataaagtcttagaa

SEQ ID NO: 795677 - DNA, 15 bp, Homo sapiens
ataaagtcttagaag

SEQ ID NO: 795678 - DNA, 15 bp, Homo sapiens
taaagtcttagaagt

SEQ ID NO: 795679 - DNA, 15 bp, Homo sapiens
aaagtcttagaagtg

SEQ ID NO: 795680 - DNA, 15 bp, Homo sapiens
aagtcttagaagtgg

SEQ ID NO: 795681 - DNA, 15 bp, Homo sapiens
agtcttagaagtgga

SEQ ID NO: 795682 - DNA, 15 bp, Homo sapiens
gtcttagaagtggaa

SEQ ID NO: 795683 - DNA, 15 bp, Homo sapiens
tcttagaagtggaat

SEQ ID NO: 795684 - DNA, 15 bp, Homo sapiens
cttagaagtggaatt

SEQ ID NO: 795685 - DNA, 15 bp, Homo sapiens
ttagaagtggaattg

SEQ ID NO: 795686 - DNA, 15 bp, Homo sapiens
tagaagtggaattgc

SEQ ID NO: 795687 - DNA, 15 bp, Homo sapiens
agaagtggaattgct

SEQ ID NO: 795688 - DNA, 15 bp, Homo sapiens
gaagtggaattgctg

SEQ ID NO: 795689 - DNA, 15 bp, Homo sapiens
aagtggaattgctgg

SEQ ID NO: 795690 - DNA, 15 bp, Homo sapiens
agtggaattgctggg

SEQ ID NO: 795691 - DNA, 15 bp, Homo sapiens
gtggaattgctgggt

SEQ ID NO: 795692 - DNA, 15 bp, Homo sapiens
tggaattgctgggta

SEQ ID NO: 795693 - DNA, 15 bp, Homo sapiens
ggaattgctgggtag

SEQ ID NO: 795694 - DNA, 15 bp, Homo sapiens
gaattgctgggtagt

SEQ ID NO: 795695 - DNA, 15 bp, Homo sapiens
aattgctgggtagtc

SEQ ID NO: 795696 - DNA, 15 bp, Homo sapiens
attgctgggtagtca

SEQ ID NO: 795697 - DNA, 15 bp, Homo sapiens
ttgctgggtagtcaa

SEQ ID NO: 795698 - DNA, 15 bp, Homo sapiens
tgctgggtagtcaaa

SEQ ID NO: 795699 - DNA, 15 bp, Homo sapiens
gctgggtagtcaaaa

SEQ ID NO: 795700 - DNA, 15 bp, Homo sapiens
ctgggtagtcaaaat

SEQ ID NO: 795701 - DNA, 15 bp, Homo sapiens
tgggtagtcaaaatg

SEQ ID NO: 795702 - DNA, 15 bp, Homo sapiens
gggtagtcaaaatgt

SEQ ID NO: 795703 - DNA, 15 bp, Homo sapiens
ggtagtcaaaatgta

SEQ ID NO: 795704 - DNA, 15 bp, Homo sapiens
gtagtcaaaatgtaa

SEQ ID NO: 795705 - DNA, 15 bp, Homo sapiens
tagtcaaaatgtaaa

SEQ ID NO: 795706 - DNA, 15 bp, Homo sapiens
agtcaaaatgtaaaa

SEQ ID NO: 795707 - DNA, 15 bp, Homo sapiens
gtcaaaatgtaaaag

SEQ ID NO: 795708 - DNA, 15 bp, Homo sapiens
tcaaaatgtaaaagc

SEQ ID NO: 795709 - DNA, 15 bp, Homo sapiens
caaaatgtaaaagct

SEQ ID NO: 795710 - DNA, 15 bp, Homo sapiens
aaaatgtaaaagctt

SEQ ID NO: 795711 - DNA, 15 bp, Homo sapiens
aaatgtaaaagcttt

SEQ ID NO: 795712 - DNA, 15 bp, Homo sapiens
aatgtaaaagctttc

SEQ ID NO: 795713 - DNA, 15 bp, Homo sapiens
atgtaaaagctttcc

SEQ ID NO: 795714 - DNA, 15 bp, Homo sapiens
tgtaaaagctttcca

SEQ ID NO: 795715 - DNA, 15 bp, Homo sapiens
gtaaaagctttccat

SEQ ID NO: 795716 - DNA, 15 bp, Homo sapiens
taaaagctttccatt

SEQ ID NO: 795717 - DNA, 15 bp, Homo sapiens
aaaagctttccattt

SEQ ID NO: 795718 - DNA, 15 bp, Homo sapiens
aaagctttccattta

SEQ ID NO: 795719 - DNA, 15 bp, Homo sapiens
aagctttccatttat

SEQ ID NO: 795720 - DNA, 15 bp, Homo sapiens
agctttccatttata

SEQ ID NO: 795721 - DNA, 15 bp, Homo sapiens
gctttccatttatat

SEQ ID NO: 795722 - DNA, 15 bp, Homo sapiens
ctttccatttatatt

SEQ ID NO: 795723 - DNA, 15 bp, Homo sapiens
tttccatttatattg

SEQ ID NO: 795724 - DNA, 15 bp, Homo sapiens
ttccatttatattgc

SEQ ID NO: 795725 - DNA, 15 bp, Homo sapiens
tccatttatattgcc

SEQ ID NO: 795726 - DNA, 15 bp, Homo sapiens
ccatttatattgcct

SEQ ID NO: 795727 - DNA, 15 bp, Homo sapiens
catttatattgccta

SEQ ID NO: 795728 - DNA, 15 bp, Homo sapiens
atttatattgcctaa

SEQ ID NO: 795729 - DNA, 15 bp, Homo sapiens
tttatattgcctaag

SEQ ID NO: 795730 - DNA, 15 bp, Homo sapiens
ttatattgcctaagt

SEQ ID NO: 795731 - DNA, 15 bp, Homo sapiens
tatattgcctaagtg

SEQ ID NO: 795732 - DNA, 15 bp, Homo sapiens
atattgcctaagtgc

SEQ ID NO: 795733 - DNA, 15 bp, Homo sapiens
tattgcctaagtgct

SEQ ID NO: 795734 - DNA, 15 bp, Homo sapiens
attgcctaagtgctc

SEQ ID NO: 795735 - DNA, 15 bp, Homo sapiens
ttgcctaagtgctct

SEQ ID NO: 795736 - DNA, 15 bp, Homo sapiens
tgcctaagtgctctg

SEQ ID NO: 795737 - DNA, 15 bp, Homo sapiens
gcctaagtgctctgc

SEQ ID NO: 795738 - DNA, 15 bp, Homo sapiens
cctaagtgctctgca

SEQ ID NO: 795739 - DNA, 15 bp, Homo sapiens
ctaagtgctctgcag

SEQ ID NO: 795740 - DNA, 15 bp, Homo sapiens
taagtgctctgcaga

SEQ ID NO: 795741 - DNA, 15 bp, Homo sapiens
aagtgctctgcagaa

SEQ ID NO: 795742 - DNA, 15 bp, Homo sapiens
agtgctctgcagaaa

SEQ ID NO: 795743 - DNA, 15 bp, Homo sapiens
gtgctctgcagaaaa

SEQ ID NO: 795744 - DNA, 15 bp, Homo sapiens
tgctctgcagaaaaa

SEQ ID NO: 795745 - DNA, 15 bp, Homo sapiens
gctctgcagaaaaat

SEQ ID NO: 795746 - DNA, 15 bp, Homo sapiens
ctctgcagaaaaata

SEQ ID NO: 795747 - DNA, 15 bp, Homo sapiens
tctgcagaaaaatat

SEQ ID NO: 795748 - DNA, 15 bp, Homo sapiens
ctgcagaaaaatatg

SEQ ID NO: 795749 - DNA, 15 bp, Homo sapiens
tgcagaaaaatatgc

SEQ ID NO: 795750 - DNA, 15 bp, Homo sapiens
gcagaaaaatatgca

SEQ ID NO: 795751 - DNA, 15 bp, Homo sapiens
cagaaaaatatgcat

SEQ ID NO: 795752 - DNA, 15 bp, Homo sapiens
agaaaaatatgcatc

SEQ ID NO: 795753 - DNA, 15 bp, Homo sapiens
gaaaaatatgcatca

SEQ ID NO: 795754 - DNA, 15 bp, Homo sapiens
aaaaatatgcatcat

SEQ ID NO: 795755 - DNA, 15 bp, Homo sapiens
aaaatatgcatcatt

SEQ ID NO: 795756 - DNA, 15 bp, Homo sapiens
aaatatgcatcattt

SEQ ID NO: 795757 - DNA, 15 bp, Homo sapiens
aatatgcatcatttt

SEQ ID NO: 795758 - DNA, 15 bp, Homo sapiens
atatgcatcattttc

SEQ ID NO: 795759 - DNA, 15 bp, Homo sapiens
tatgcatcattttca

SEQ ID NO: 795760 - DNA, 15 bp, Homo sapiens
atgcatcattttcaa

SEQ ID NO: 795761 - DNA, 15 bp, Homo sapiens
tgcatcattttcaaa

SEQ ID NO: 795762 - DNA, 15 bp, Homo sapiens
gcatcattttcaaaa

SEQ ID NO: 795763 - DNA, 15 bp, Homo sapiens
catcattttcaaaaa

SEQ ID NO: 795764 - DNA, 15 bp, Homo sapiens
atcattttcaaaaat

SEQ ID NO: 795765 - DNA, 15 bp, Homo sapiens
tcattttcaaaaatg

SEQ ID NO: 795766 - DNA, 15 bp, Homo sapiens
cattttcaaaaatga

SEQ ID NO: 795767 - DNA, 15 bp, Homo sapiens
attttcaaaaatgaa

SEQ ID NO: 795768 - DNA, 15 bp, Homo sapiens
ttttcaaaaatgaaa

SEQ ID NO: 795769 - DNA, 15 bp, Homo sapiens
tttcaaaaatgaaaa

SEQ ID NO: 795770 - DNA, 15 bp, Homo sapiens
ttcaaaaatgaaaat

SEQ ID NO: 795771 - DNA, 15 bp, Homo sapiens
tcaaaaatgaaaatt

SEQ ID NO: 795772 - DNA, 15 bp, Homo sapiens
caaaaatgaaaattg

SEQ ID NO: 795773 - DNA, 15 bp, Homo sapiens
aaaaatgaaaattgt

SEQ ID NO: 795774 - DNA, 15 bp, Homo sapiens
aaaatgaaaattgta

SEQ ID NO: 795775 - DNA, 15 bp, Homo sapiens
aaatgaaaattgtaa

SEQ ID NO: 795776 - DNA, 15 bp, Homo sapiens
aatgaaaattgtaaa

SEQ ID NO: 795777 - DNA, 15 bp, Homo sapiens
atgaaaattgtaaac

SEQ ID NO: 795778 - DNA, 15 bp, Homo sapiens
tgaaaattgtaaacc

SEQ ID NO: 795779 - DNA, 15 bp, Homo sapiens
gaaaattgtaaacca

SEQ ID NO: 795780 - DNA, 15 bp, Homo sapiens
aaaattgtaaaccaa

SEQ ID NO: 795781 - DNA, 15 bp, Homo sapiens
aaattgtaaaccaaa

SEQ ID NO: 795782 - DNA, 15 bp, Homo sapiens
aattgtaaaccaaaa

SEQ ID NO: 795783 - DNA, 15 bp, Homo sapiens
attgtaaaccaaaac

SEQ ID NO: 795784 - DNA, 15 bp, Homo sapiens
ttgtaaaccaaaacc

SEQ ID NO: 795785 - DNA, 15 bp, Homo sapiens
tgtaaaccaaaacct

SEQ ID NO: 795786 - DNA, 15 bp, Homo sapiens
gtaaaccaaaaccta

SEQ ID NO: 795787 - DNA, 15 bp, Homo sapiens
taaaccaaaacctat

SEQ ID NO: 795788 - DNA, 15 bp, Homo sapiens
aaaccaaaacctatt

SEQ ID NO: 795789 - DNA, 15 bp, Homo sapiens
aaccaaaacctattt

SEQ ID NO: 795790 - DNA, 15 bp, Homo sapiens
accaaaacctatttg

SEQ ID NO: 795791 - DNA, 15 bp, Homo sapiens
ccaaaacctatttga

SEQ ID NO: 795792 - DNA, 15 bp, Homo sapiens
caaaacctatttgaa

SEQ ID NO: 795793 - DNA, 15 bp, Homo sapiens
aaaacctatttgaac

SEQ ID NO: 795794 - DNA, 15 bp, Homo sapiens
aaacctatttgaaca

SEQ ID NO: 795795 - DNA, 15 bp, Homo sapiens
aacctatttgaacaa

SEQ ID NO: 795796 - DNA, 15 bp, Homo sapiens
acctatttgaacaac

SEQ ID NO: 795797 - DNA, 15 bp, Homo sapiens
cctatttgaacaaca

SEQ ID NO: 795798 - DNA, 15 bp, Homo sapiens
ctatttgaacaacaa

SEQ ID NO: 795799 - DNA, 15 bp, Homo sapiens
tatttgaacaacaag

SEQ ID NO: 795800 - DNA, 15 bp, Homo sapiens
atttgaacaacaaga

SEQ ID NO: 795801 - DNA, 15 bp, Homo sapiens
tttgaacaacaagat

SEQ ID NO: 795802 - DNA, 15 bp, Homo sapiens
ttgaacaacaagatg

SEQ ID NO: 795803 - DNA, 15 bp, Homo sapiens
tgaacaacaagatgc

SEQ ID NO: 795804 - DNA, 15 bp, Homo sapiens
gaacaacaagatgct

SEQ ID NO: 795805 - DNA, 15 bp, Homo sapiens
aacaacaagatgctc

SEQ ID NO: 795806 - DNA, 15 bp, Homo sapiens
acaacaagatgctct

SEQ ID NO: 795807 - DNA, 15 bp, Homo sapiens
caacaagatgctcta

SEQ ID NO: 795808 - DNA, 15 bp, Homo sapiens
aacaagatgctctat

SEQ ID NO: 795809 - DNA, 15 bp, Homo sapiens
acaagatgctctatg

SEQ ID NO: 795810 - DNA, 15 bp, Homo sapiens
caagatgctctatgt

SEQ ID NO: 795811 - DNA, 15 bp, Homo sapiens
aagatgctctatgtg

SEQ ID NO: 795812 - DNA, 15 bp, Homo sapiens
agatgctctatgtga

SEQ ID NO: 795813 - DNA, 15 bp, Homo sapiens
gatgctctatgtgaa

SEQ ID NO: 795814 - DNA, 15 bp, Homo sapiens
atgctctatgtgaag

SEQ ID NO: 795815 - DNA, 15 bp, Homo sapiens
tgctctatgtgaagg

SEQ ID NO: 795816 - DNA, 15 bp, Homo sapiens
gctctatgtgaaggg

SEQ ID NO: 795817 - DNA, 15 bp, Homo sapiens
ctctatgtgaaggga

SEQ ID NO: 795818 - DNA, 15 bp, Homo sapiens
tctatgtgaagggaa

SEQ ID NO: 795819 - DNA, 15 bp, Homo sapiens
ctatgtgaagggaaa

SEQ ID NO: 795820 - DNA, 15 bp, Homo sapiens
tatgtgaagggaaat

SEQ ID NO: 795821 - DNA, 15 bp, Homo sapiens
atgtgaagggaaatt

SEQ ID NO: 795822 - DNA, 15 bp, Homo sapiens
tgtgaagggaaattt

SEQ ID NO: 795823 - DNA, 15 bp, Homo sapiens
gtgaagggaaattta

SEQ ID NO: 795824 - DNA, 15 bp, Homo sapiens
tgaagggaaatttag

SEQ ID NO: 795825 - DNA, 15 bp, Homo sapiens
gaagggaaatttagg

SEQ ID NO: 795826 - DNA, 15 bp, Homo sapiens
aagggaaatttagga

SEQ ID NO: 795827 - DNA, 15 bp, Homo sapiens
agggaaatttaggat

SEQ ID NO: 795828 - DNA, 15 bp, Homo sapiens
gggaaatttaggatc

SEQ ID NO: 795829 - DNA, 15 bp, Homo sapiens
ggaaatttaggatcc

SEQ ID NO: 795830 - DNA, 15 bp, Homo sapiens
gaaatttaggatccg

SEQ ID NO: 795831 - DNA, 15 bp, Homo sapiens
aaatttaggatccgt

SEQ ID NO: 795832 - DNA, 15 bp, Homo sapiens
aatttaggatccgtt

SEQ ID NO: 795833 - DNA, 15 bp, Homo sapiens
atttaggatccgttt

SEQ ID NO: 795834 - DNA, 15 bp, Homo sapiens
tttaggatccgtttc

SEQ ID NO: 795835 - DNA, 15 bp, Homo sapiens
ttaggatccgtttct

SEQ ID NO: 795836 - DNA, 15 bp, Homo sapiens
taggatccgtttctt

SEQ ID NO: 795837 - DNA, 15 bp, Homo sapiens
aggatccgtttcttt

SEQ ID NO: 795838 - DNA, 15 bp, Homo sapiens
ggatccgtttcttta

SEQ ID NO: 795839 - DNA, 15 bp, Homo sapiens
gatccgtttctttag

SEQ ID NO: 795840 - DNA, 15 bp, Homo sapiens
atccgtttctttaga

SEQ ID NO: 795841 - DNA, 15 bp, Homo sapiens
tccgtttctttagag

SEQ ID NO: 795842 - DNA, 15 bp, Homo sapiens
ccgtttctttagagt

SEQ ID NO: 795843 - DNA, 15 bp, Homo sapiens
cgtttctttagagtg

SEQ ID NO: 795844 - DNA, 15 bp, Homo sapiens
gtttctttagagtga

SEQ ID NO: 795845 - DNA, 15 bp, Homo sapiens
tttctttagagtgat

SEQ ID NO: 795846 - DNA, 15 bp, Homo sapiens
ttctttagagtgatt

SEQ ID NO: 795847 - DNA, 15 bp, Homo sapiens
tctttagagtgattc

SEQ ID NO: 795848 - DNA, 15 bp, Homo sapiens
ctttagagtgattca

SEQ ID NO: 795849 - DNA, 15 bp, Homo sapiens
tttagagtgattcat

SEQ ID NO: 795850 - DNA, 15 bp, Homo sapiens
ttagagtgattcatc

SEQ ID NO: 795851 - DNA, 15 bp, Homo sapiens
tagagtgattcatcc

SEQ ID NO: 795852 - DNA, 15 bp, Homo sapiens
agagtgattcatccc

SEQ ID NO: 795853 - DNA, 15 bp, Homo sapiens
gagtgattcatccct

SEQ ID NO: 795854 - DNA, 15 bp, Homo sapiens
agtgattcatccctc

SEQ ID NO: 795855 - DNA, 15 bp, Homo sapiens
gtgattcatccctcc

SEQ ID NO: 795856 - DNA, 15 bp, Homo sapiens
tgattcatccctcct

SEQ ID NO: 795857 - DNA, 15 bp, Homo sapiens
gattcatccctcctt

SEQ ID NO: 795858 - DNA, 15 bp, Homo sapiens
attcatccctcctta

SEQ ID NO: 795859 - DNA, 15 bp, Homo sapiens
ttcatccctccttag

SEQ ID NO: 795860 - DNA, 15 bp, Homo sapiens
tcatccctccttaga

SEQ ID NO: 795861 - DNA, 15 bp, Homo sapiens
catccctccttagag

SEQ ID NO: 795862 - DNA, 15 bp, Homo sapiens
atccctccttagagg

SEQ ID NO: 795863 - DNA, 15 bp, Homo sapiens
tccctccttagaggc

SEQ ID NO: 795864 - DNA, 15 bp, Homo sapiens
ccctccttagaggca

SEQ ID NO: 795865 - DNA, 15 bp, Homo sapiens
cctccttagaggcaa

SEQ ID NO: 795866 - DNA, 15 bp, Homo sapiens
ctccttagaggcaaa

SEQ ID NO: 795867 - DNA, 15 bp, Homo sapiens
tccttagaggcaaat

SEQ ID NO: 795868 - DNA, 15 bp, Homo sapiens
ccttagaggcaaatt

SEQ ID NO: 795869 - DNA, 15 bp, Homo sapiens
cttagaggcaaattg

SEQ ID NO: 795870 - DNA, 15 bp, Homo sapiens
ttagaggcaaattgc

SEQ ID NO: 795871 - DNA, 15 bp, Homo sapiens
tagaggcaaattgct

SEQ ID NO: 795872 - DNA, 15 bp, Homo sapiens
agaggcaaattgcta

SEQ ID NO: 795873 - DNA, 15 bp, Homo sapiens
gaggcaaattgctat

SEQ ID NO: 795874 - DNA, 15 bp, Homo sapiens
aggcaaattgctatt

SEQ ID NO: 795875 - DNA, 15 bp, Homo sapiens
ggcaaattgctatta

SEQ ID NO: 795876 - DNA, 15 bp, Homo sapiens
gcaaattgctattac

SEQ ID NO: 795877 - DNA, 15 bp, Homo sapiens
caaattgctattacc

SEQ ID NO: 795878 - DNA, 15 bp, Homo sapiens
aaattgctattacca

SEQ ID NO: 795879 - DNA, 15 bp, Homo sapiens
aattgctattaccaa

SEQ ID NO: 795880 - DNA, 15 bp, Homo sapiens
attgctattaccaag

SEQ ID NO: 795881 - DNA, 15 bp, Homo sapiens
ttgctattaccaagt

SEQ ID NO: 795882 - DNA, 15 bp, Homo sapiens
tgctattaccaagta

SEQ ID NO: 795883 - DNA, 15 bp, Homo sapiens
gctattaccaagtag

SEQ ID NO: 795884 - DNA, 15 bp, Homo sapiens
ctattaccaagtaga

SEQ ID NO: 795885 - DNA, 15 bp, Homo sapiens
tattaccaagtagat

SEQ ID NO: 795886 - DNA, 15 bp, Homo sapiens
attaccaagtagatg

SEQ ID NO: 795887 - DNA, 15 bp, Homo sapiens
ttaccaagtagatgt

SEQ ID NO: 795888 - DNA, 15 bp, Homo sapiens
taccaagtagatgta

SEQ ID NO: 795889 - DNA, 15 bp, Homo sapiens
accaagtagatgtaa

SEQ ID NO: 795890 - DNA, 15 bp, Homo sapiens
ccaagtagatgtaat

SEQ ID NO: 795891 - DNA, 15 bp, Homo sapiens
caagtagatgtaatg

SEQ ID NO: 795892 - DNA, 15 bp, Homo sapiens
aagtagatgtaatgt

SEQ ID NO: 795893 - DNA, 15 bp, Homo sapiens
agtagatgtaatgtt

SEQ ID NO: 795894 - DNA, 15 bp, Homo sapiens
gtagatgtaatgttt

SEQ ID NO: 795895 - DNA, 15 bp, Homo sapiens
tagatgtaatgtttt

SEQ ID NO: 795896 - DNA, 15 bp, Homo sapiens
agatgtaatgttttt

SEQ ID NO: 795897 - DNA, 15 bp, Homo sapiens
gatgtaatgttttta

SEQ ID NO: 795898 - DNA, 15 bp, Homo sapiens
atgtaatgtttttac

SEQ ID NO: 795899 - DNA, 15 bp, Homo sapiens
tgtaatgtttttaca

SEQ ID NO: 795900 - DNA, 15 bp, Homo sapiens
gtaatgtttttacag

SEQ ID NO: 795901 - DNA, 15 bp, Homo sapiens
taatgtttttacaga

SEQ ID NO: 795902 - DNA, 15 bp, Homo sapiens
aatgtttttacagat

SEQ ID NO: 795903 - DNA, 15 bp, Homo sapiens
atgtttttacagata

SEQ ID NO: 795904 - DNA, 15 bp, Homo sapiens
tgtttttacagataa

SEQ ID NO: 795905 - DNA, 15 bp, Homo sapiens
gtttttacagataaa

SEQ ID NO: 795906 - DNA, 15 bp, Homo sapiens
tttttacagataaaa

SEQ ID NO: 795907 - DNA, 15 bp, Homo sapiens
ttttacagataaaag

SEQ ID NO: 795908 - DNA, 15 bp, Homo sapiens
tttacagataaaaga

SEQ ID NO: 795909 - DNA, 15 bp, Homo sapiens
ttacagataaaagaa

SEQ ID NO: 795910 - DNA, 15 bp, Homo sapiens
tacagataaaagaat

SEQ ID NO: 795911 - DNA, 15 bp, Homo sapiens
acagataaaagaata

SEQ ID NO: 795912 - DNA, 15 bp, Homo sapiens
cagataaaagaataa

SEQ ID NO: 795913 - DNA, 15 bp, Homo sapiens
agataaaagaataac

SEQ ID NO: 795914 - DNA, 15 bp, Homo sapiens
gataaaagaataaca

SEQ ID NO: 795915 - DNA, 15 bp, Homo sapiens
ataaaagaataacat

SEQ ID NO: 795916 - DNA, 15 bp, Homo sapiens
taaaagaataacatt

SEQ ID NO: 795917 - DNA, 15 bp, Homo sapiens
aaaagaataacattg

SEQ ID NO: 795918 - DNA, 15 bp, Homo sapiens
aaagaataacattga

SEQ ID NO: 795919 - DNA, 15 bp, Homo sapiens
aagaataacattgaa

SEQ ID NO: 795920 - DNA, 15 bp, Homo sapiens
agaataacattgaaa

SEQ ID NO: 795921 - DNA, 15 bp, Homo sapiens
gaataacattgaaaa

SEQ ID NO: 795922 - DNA, 15 bp, Homo sapiens
aataacattgaaaat

SEQ ID NO: 795923 - DNA, 15 bp, Homo sapiens
ataacattgaaaata

SEQ ID NO: 795924 - DNA, 15 bp, Homo sapiens
taacattgaaaatat

SEQ ID NO: 795925 - DNA, 15 bp, Homo sapiens
aacattgaaaatatc

SEQ ID NO: 795926 - DNA, 15 bp, Homo sapiens
acattgaaaatatct

SEQ ID NO: 795927 - DNA, 15 bp, Homo sapiens
cattgaaaatatcta

SEQ ID NO: 795928 - DNA, 15 bp, Homo sapiens
attgaaaatatctaa

SEQ ID NO: 795929 - DNA, 15 bp, Homo sapiens
ttgaaaatatctaaa

SEQ ID NO: 795930 - DNA, 15 bp, Homo sapiens
tgaaaatatctaaat

SEQ ID NO: 795931 - DNA, 15 bp, Homo sapiens
gaaaatatctaaata

SEQ ID NO: 795932 - DNA, 15 bp, Homo sapiens
aaaatatctaaataa

SEQ ID NO: 795933 - DNA, 15 bp, Homo sapiens
aaatatctaaataaa

SEQ ID NO: 795934 - DNA, 15 bp, Homo sapiens
aatatctaaataaac

SEQ ID NO: 795935 - DNA, 15 bp, Homo sapiens
atatctaaataaacc

SEQ ID NO: 795936 - DNA, 15 bp, Homo sapiens
tatctaaataaacca

SEQ ID NO: 795937 - DNA, 15 bp, Homo sapiens
atctaaataaaccag

SEQ ID NO: 795938 - DNA, 15 bp, Homo sapiens
tctaaataaaccagc

SEQ ID NO: 795939 - DNA, 15 bp, Homo sapiens
ctaaataaaccagcc

SEQ ID NO: 795940 - DNA, 15 bp, Homo sapiens
taaataaaccagcca

SEQ ID NO: 795941 - DNA, 15 bp, Homo sapiens
aaataaaccagccat

SEQ ID NO: 795942 - DNA, 15 bp, Homo sapiens
aataaaccagccatg

SEQ ID NO: 795943 - DNA, 15 bp, Homo sapiens
ataaaccagccatgc

SEQ ID NO: 795944 - DNA, 15 bp, Homo sapiens
taaaccagccatgca

SEQ ID NO: 795945 - DNA, 15 bp, Homo sapiens
aaaccagccatgcaa

SEQ ID NO: 795946 - DNA, 15 bp, Homo sapiens
aaccagccatgcaag

SEQ ID NO: 795947 - DNA, 15 bp, Homo sapiens
accagccatgcaaga

SEQ ID NO: 795948 - DNA, 15 bp, Homo sapiens
ccagccatgcaagaa

SEQ ID NO: 795949 - DNA, 15 bp, Homo sapiens
cagccatgcaagaat

SEQ ID NO: 795950 - DNA, 15 bp, Homo sapiens
agccatgcaagaata

SEQ ID NO: 795951 - DNA, 15 bp, Homo sapiens
gccatgcaagaatat

SEQ ID NO: 795952 - DNA, 15 bp, Homo sapiens
ccatgcaagaatatt

SEQ ID NO: 795953 - DNA, 15 bp, Homo sapiens
catgcaagaatattt

SEQ ID NO: 795954 - DNA, 15 bp, Homo sapiens
atgcaagaatatttt

SEQ ID NO: 795955 - DNA, 15 bp, Homo sapiens
tgcaagaatattttg

SEQ ID NO: 795956 - DNA, 15 bp, Homo sapiens
gcaagaatattttgc

SEQ ID NO: 795957 - DNA, 15 bp, Homo sapiens
caagaatattttgct

SEQ ID NO: 795958 - DNA, 15 bp, Homo sapiens
aagaatattttgcta

SEQ ID NO: 795959 - DNA, 15 bp, Homo sapiens
agaatattttgctat

SEQ ID NO: 795960 - DNA, 15 bp, Homo sapiens
gaatattttgctatt

SEQ ID NO: 795961 - DNA, 15 bp, Homo sapiens
aatattttgctattt

SEQ ID NO: 795962 - DNA, 15 bp, Homo sapiens
atattttgctatttt

SEQ ID NO: 795963 - DNA, 15 bp, Homo sapiens
tattttgctattttc

SEQ ID NO: 795964 - DNA, 15 bp, Homo sapiens
attttgctattttct

SEQ ID NO: 795965 - DNA, 15 bp, Homo sapiens
ttttgctattttcta

SEQ ID NO: 795966 - DNA, 15 bp, Homo sapiens
tttgctattttctat

SEQ ID NO: 795967 - DNA, 15 bp, Homo sapiens
ttgctattttctatt

SEQ ID NO: 795968 - DNA, 15 bp, Homo sapiens
tgctattttctattt

SEQ ID NO: 795969 - DNA, 15 bp, Homo sapiens
gctattttctatttc

SEQ ID NO: 795970 - DNA, 15 bp, Homo sapiens
ctattttctatttct

SEQ ID NO: 795971 - DNA, 15 bp, Homo sapiens
tattttctatttctg

SEQ ID NO: 795972 - DNA, 15 bp, Homo sapiens
attttctatttctgt

SEQ ID NO: 795973 - DNA, 15 bp, Homo sapiens
ttttctatttctgtt

SEQ ID NO: 795974 - DNA, 15 bp, Homo sapiens
tttctatttctgtta

SEQ ID NO: 795975 - DNA, 15 bp, Homo sapiens
ttctatttctgttaa

SEQ ID NO: 795976 - DNA, 15 bp, Homo sapiens
tctatttctgttaat

SEQ ID NO: 795977 - DNA, 15 bp, Homo sapiens
ctatttctgttaatc

SEQ ID NO: 795978 - DNA, 15 bp, Homo sapiens
tatttctgttaatca

SEQ ID NO: 795979 - DNA, 15 bp, Homo sapiens
atttctgttaatcag

SEQ ID NO: 795980 - DNA, 15 bp, Homo sapiens
tttctgttaatcagt

SEQ ID NO: 795981 - DNA, 15 bp, Homo sapiens
ttctgttaatcagtg

SEQ ID NO: 795982 - DNA, 15 bp, Homo sapiens
tctgttaatcagtga

SEQ ID NO: 795983 - DNA, 15 bp, Homo sapiens
ctgttaatcagtgag

SEQ ID NO: 795984 - DNA, 15 bp, Homo sapiens
tgttaatcagtgaga

SEQ ID NO: 795985 - DNA, 15 bp, Homo sapiens
gttaatcagtgagaa

SEQ ID NO: 795986 - DNA, 15 bp, Homo sapiens
ttaatcagtgagaac

SEQ ID NO: 795987 - DNA, 15 bp, Homo sapiens
taatcagtgagaaca

SEQ ID NO: 795988 - DNA, 15 bp, Homo sapiens
aatcagtgagaacaa

SEQ ID NO: 795989 - DNA, 15 bp, Homo sapiens
atcagtgagaacaaa

SEQ ID NO: 795990 - DNA, 15 bp, Homo sapiens
tcagtgagaacaaaa

SEQ ID NO: 795991 - DNA, 15 bp, Homo sapiens
cagtgagaacaaaat

SEQ ID NO: 795992 - DNA, 15 bp, Homo sapiens
agtgagaacaaaata

SEQ ID NO: 795993 - DNA, 15 bp, Homo sapiens
gtgagaacaaaataa

SEQ ID NO: 795994 - DNA, 15 bp, Homo sapiens
tgagaacaaaataac

SEQ ID NO: 795995 - DNA, 15 bp, Homo sapiens
gagaacaaaataact

SEQ ID NO: 795996 - DNA, 15 bp, Homo sapiens
agaacaaaataactt

SEQ ID NO: 795997 - DNA, 15 bp, Homo sapiens
gaacaaaataactta

SEQ ID NO: 795998 - DNA, 15 bp, Homo sapiens
aacaaaataacttac

SEQ ID NO: 795999 - DNA, 15 bp, Homo sapiens
acaaaataacttact

SEQ ID NO: 796000 - DNA, 15 bp, Homo sapiens
caaaataacttacta

SEQ ID NO: 796001 - DNA, 15 bp, Homo sapiens
aaaataacttactag

SEQ ID NO: 796002 - DNA, 15 bp, Homo sapiens
aaataacttactagc

SEQ ID NO: 796003 - DNA, 15 bp, Homo sapiens
aataacttactagca

SEQ ID NO: 796004 - DNA, 15 bp, Homo sapiens
ataacttactagcat

SEQ ID NO: 796005 - DNA, 15 bp, Homo sapiens
taacttactagcata

SEQ ID NO: 796006 - DNA, 15 bp, Homo sapiens
aacttactagcataa

SEQ ID NO: 796007 - DNA, 15 bp, Homo sapiens
acttactagcataaa

SEQ ID NO: 796008 - DNA, 15 bp, Homo sapiens
cttactagcataaaa

SEQ ID NO: 796009 - DNA, 15 bp, Homo sapiens
ttactagcataaaaa

SEQ ID NO: 796010 - DNA, 15 bp, Homo sapiens
tactagcataaaaag

SEQ ID NO: 796011 - DNA, 15 bp, Homo sapiens
actagcataaaaaga

SEQ ID NO: 796012 - DNA, 15 bp, Homo sapiens
ctagcataaaaagat

SEQ ID NO: 796013 - DNA, 15 bp, Homo sapiens
tagcataaaaagata

SEQ ID NO: 796014 - DNA, 15 bp, Homo sapiens
agcataaaaagataa

SEQ ID NO: 796015 - DNA, 15 bp, Homo sapiens
gcataaaaagataag

SEQ ID NO: 796016 - DNA, 15 bp, Homo sapiens
cataaaaagataagt

SEQ ID NO: 796017 - DNA, 15 bp, Homo sapiens
ataaaaagataagta

SEQ ID NO: 796018 - DNA, 15 bp, Homo sapiens
taaaaagataagtag

SEQ ID NO: 796019 - DNA, 15 bp, Homo sapiens
aaaaagataagtaga

SEQ ID NO: 796020 - DNA, 15 bp, Homo sapiens
aaaagataagtagaa

SEQ ID NO: 796021 - DNA, 15 bp, Homo sapiens
aaagataagtagaat

SEQ ID NO: 796022 - DNA, 15 bp, Homo sapiens
aagataagtagaatg

SEQ ID NO: 796023 - DNA, 15 bp, Homo sapiens
agataagtagaatga

SEQ ID NO: 796024 - DNA, 15 bp, Homo sapiens
gataagtagaatgac

SEQ ID NO: 796025 - DNA, 15 bp, Homo sapiens
ataagtagaatgaca

SEQ ID NO: 796026 - DNA, 15 bp, Homo sapiens
taagtagaatgacat

SEQ ID NO: 796027 - DNA, 15 bp, Homo sapiens
aagtagaatgacatg

SEQ ID NO: 796028 - DNA, 15 bp, Homo sapiens
agtagaatgacatgc

SEQ ID NO: 796029 - DNA, 15 bp, Homo sapiens
gtagaatgacatgcc

SEQ ID NO: 796030 - DNA, 15 bp, Homo sapiens
tagaatgacatgcca

SEQ ID NO: 796031 - DNA, 15 bp, Homo sapiens
agaatgacatgccac

SEQ ID NO: 796032 - DNA, 15 bp, Homo sapiens
gaatgacatgccact

SEQ ID NO: 796033 - DNA, 15 bp, Homo sapiens
aatgacatgccacta

SEQ ID NO: 796034 - DNA, 15 bp, Homo sapiens
atgacatgccactaa

SEQ ID NO: 796035 - DNA, 15 bp, Homo sapiens
tgacatgccactaat

SEQ ID NO: 796036 - DNA, 15 bp, Homo sapiens
gacatgccactaatg

SEQ ID NO: 796037 - DNA, 15 bp, Homo sapiens
acatgccactaatgg

SEQ ID NO: 796038 - DNA, 15 bp, Homo sapiens
catgccactaatggg

SEQ ID NO: 796039 - DNA, 15 bp, Homo sapiens
atgccactaatgggg

SEQ ID NO: 796040 - DNA, 15 bp, Homo sapiens
tgccactaatgggga

SEQ ID NO: 796041 - DNA, 15 bp, Homo sapiens
gccactaatggggaa

SEQ ID NO: 796042 - DNA, 15 bp, Homo sapiens
ccactaatggggaat

SEQ ID NO: 796043 - DNA, 15 bp, Homo sapiens
cactaatggggaatg

SEQ ID NO: 796044 - DNA, 15 bp, Homo sapiens
actaatggggaatgg

SEQ ID NO: 796045 - DNA, 15 bp, Homo sapiens
ctaatggggaatggg

SEQ ID NO: 796046 - DNA, 15 bp, Homo sapiens
taatggggaatgggg

SEQ ID NO: 796047 - DNA, 15 bp, Homo sapiens
aatggggaatggggt

SEQ ID NO: 796048 - DNA, 15 bp, Homo sapiens
atggggaatggggta

SEQ ID NO: 796049 - DNA, 15 bp, Homo sapiens
tggggaatggggtat

SEQ ID NO: 796050 - DNA, 15 bp, Homo sapiens
ggggaatggggtatt

SEQ ID NO: 796051 - DNA, 15 bp, Homo sapiens
gggaatggggtattt

SEQ ID NO: 796052 - DNA, 15 bp, Homo sapiens
ggaatggggtatttt

SEQ ID NO: 796053 - DNA, 15 bp, Homo sapiens
gaatggggtattttc

SEQ ID NO: 796054 - DNA, 15 bp, Homo sapiens
aatggggtattttca

SEQ ID NO: 796055 - DNA, 15 bp, Homo sapiens
atggggtattttcat

SEQ ID NO: 796056 - DNA, 15 bp, Homo sapiens
tggggtattttcata

SEQ ID NO: 796057 - DNA, 15 bp, Homo sapiens
ggggtattttcatag

SEQ ID NO: 796058 - DNA, 15 bp, Homo sapiens
gggtattttcataga

SEQ ID NO: 796059 - DNA, 15 bp, Homo sapiens
ggtattttcatagag

SEQ ID NO: 796060 - DNA, 15 bp, Homo sapiens
gtattttcatagagc

SEQ ID NO: 796061 - DNA, 15 bp, Homo sapiens
tattttcatagagct

SEQ ID NO: 796062 - DNA, 15 bp, Homo sapiens
attttcatagagcta

SEQ ID NO: 796063 - DNA, 15 bp, Homo sapiens
ttttcatagagctac

SEQ ID NO: 796064 - DNA, 15 bp, Homo sapiens
tttcatagagctaca

SEQ ID NO: 796065 - DNA, 15 bp, Homo sapiens
ttcatagagctacat

SEQ ID NO: 796066 - DNA, 15 bp, Homo sapiens
tcatagagctacatt

SEQ ID NO: 796067 - DNA, 15 bp, Homo sapiens
catagagctacattt

SEQ ID NO: 796068 - DNA, 15 bp, Homo sapiens
atagagctacatttc

SEQ ID NO: 796069 - DNA, 15 bp, Homo sapiens
tagagctacatttcc

SEQ ID NO: 796070 - DNA, 15 bp, Homo sapiens
agagctacatttccc

SEQ ID NO: 796071 - DNA, 15 bp, Homo sapiens
gagctacatttccct

SEQ ID NO: 796072 - DNA, 15 bp, Homo sapiens
agctacatttccctc

SEQ ID NO: 796073 - DNA, 15 bp, Homo sapiens
gctacatttccctct

SEQ ID NO: 796074 - DNA, 15 bp, Homo sapiens
ctacatttccctctt

SEQ ID NO: 796075 - DNA, 15 bp, Homo sapiens
tacatttccctcttt

SEQ ID NO: 796076 - DNA, 15 bp, Homo sapiens
acatttccctctttg

SEQ ID NO: 796077 - DNA, 15 bp, Homo sapiens
catttccctctttga

SEQ ID NO: 796078 - DNA, 15 bp, Homo sapiens
atttccctctttgat

SEQ ID NO: 796079 - DNA, 15 bp, Homo sapiens
tttccctctttgata

SEQ ID NO: 796080 - DNA, 15 bp, Homo sapiens
ttccctctttgatat

SEQ ID NO: 796081 - DNA, 15 bp, Homo sapiens
tccctctttgatatt

SEQ ID NO: 796082 - DNA, 15 bp, Homo sapiens
ccctctttgatattg

SEQ ID NO: 796083 - DNA, 15 bp, Homo sapiens
cctctttgatattga

SEQ ID NO: 796084 - DNA, 15 bp, Homo sapiens
ctctttgatattgat

SEQ ID NO: 796085 - DNA, 15 bp, Homo sapiens
tctttgatattgatt

SEQ ID NO: 796086 - DNA, 15 bp, Homo sapiens
ctttgatattgatta

SEQ ID NO: 796087 - DNA, 15 bp, Homo sapiens
tttgatattgattaa

SEQ ID NO: 796088 - DNA, 15 bp, Homo sapiens
ttgatattgattaaa

SEQ ID NO: 796089 - DNA, 15 bp, Homo sapiens
tgatattgattaaaa

SEQ ID NO: 796090 - DNA, 15 bp, Homo sapiens
gatattgattaaaat

SEQ ID NO: 796091 - DNA, 15 bp, Homo sapiens
atattgattaaaata

SEQ ID NO: 796092 - DNA, 15 bp, Homo sapiens
tattgattaaaatat

SEQ ID NO: 796093 - DNA, 15 bp, Homo sapiens
attgattaaaatata

SEQ ID NO: 796094 - DNA, 15 bp, Homo sapiens
ttgattaaaatatat

SEQ ID NO: 796095 - DNA, 15 bp, Homo sapiens
tgattaaaatatatt

SEQ ID NO: 796096 - DNA, 15 bp, Homo sapiens
gattaaaatatattt

SEQ ID NO: 796097 - DNA, 15 bp, Homo sapiens
attaaaatatatttt

SEQ ID NO: 796098 - DNA, 15 bp, Homo sapiens
ttaaaatatattttg

SEQ ID NO: 796099 - DNA, 15 bp, Homo sapiens
taaaatatattttgg

SEQ ID NO: 796100 - DNA, 15 bp, Homo sapiens
aaaatatattttggt

SEQ ID NO: 796101 - DNA, 15 bp, Homo sapiens
aaatatattttggtt

SEQ ID NO: 796102 - DNA, 15 bp, Homo sapiens
aatatattttggtta

SEQ ID NO: 796103 - DNA, 15 bp, Homo sapiens
atatattttggttat

SEQ ID NO: 796104 - DNA, 15 bp, Homo sapiens
tatattttggttatt

SEQ ID NO: 796105 - DNA, 15 bp, Homo sapiens
atattttggttattt

SEQ ID NO: 796106 - DNA, 15 bp, Homo sapiens
tattttggttatttt

SEQ ID NO: 796107 - DNA, 15 bp, Homo sapiens
attttggttattttt

SEQ ID NO: 796108 - DNA, 15 bp, Homo sapiens
ttttggttatttttt

SEQ ID NO: 796109 - DNA, 15 bp, Homo sapiens
tttggttattttttt

SEQ ID NO: 796110 - DNA, 15 bp, Homo sapiens
ttggttatttttttt

SEQ ID NO: 796111 - DNA, 15 bp, Homo sapiens
tggttatttttttta

SEQ ID NO: 796112 - DNA, 15 bp, Homo sapiens
ggttattttttttaa

SEQ ID NO: 796113 - DNA, 15 bp, Homo sapiens
gttattttttttaag

SEQ ID NO: 796114 - DNA, 15 bp, Homo sapiens
ttattttttttaagc

SEQ ID NO: 796115 - DNA, 15 bp, Homo sapiens
tattttttttaagca

SEQ ID NO: 796116 - DNA, 15 bp, Homo sapiens
attttttttaagcat

SEQ ID NO: 796117 - DNA, 15 bp, Homo sapiens
ttttttttaagcatt

SEQ ID NO: 796118 - DNA, 15 bp, Homo sapiens
tttttttaagcattt

SEQ ID NO: 796119 - DNA, 15 bp, Homo sapiens
ttttttaagcatttt

SEQ ID NO: 796120 - DNA, 15 bp, Homo sapiens
tttttaagcattttt

SEQ ID NO: 796121 - DNA, 15 bp, Homo sapiens
ttttaagcatttttc

SEQ ID NO: 796122 - DNA, 15 bp, Homo sapiens
tttaagcatttttct

SEQ ID NO: 796123 - DNA, 15 bp, Homo sapiens
ttaagcatttttctt

SEQ ID NO: 796124 - DNA, 15 bp, Homo sapiens
taagcatttttcttg

SEQ ID NO: 796125 - DNA, 15 bp, Homo sapiens
aagcatttttcttgt

SEQ ID NO: 796126 - DNA, 15 bp, Homo sapiens
agcatttttcttgtg

SEQ ID NO: 796127 - DNA, 15 bp, Homo sapiens
gcatttttcttgtgc

SEQ ID NO: 796128 - DNA, 15 bp, Homo sapiens
catttttcttgtgca

SEQ ID NO: 796129 - DNA, 15 bp, Homo sapiens
atttttcttgtgcac

SEQ ID NO: 796130 - DNA, 15 bp, Homo sapiens
tttttcttgtgcaca

SEQ ID NO: 796131 - DNA, 15 bp, Homo sapiens
ttttcttgtgcacat

SEQ ID NO: 796132 - DNA, 15 bp, Homo sapiens
tttcttgtgcacata

SEQ ID NO: 796133 - DNA, 15 bp, Homo sapiens
ttcttgtgcacatat

SEQ ID NO: 796134 - DNA, 15 bp, Homo sapiens
tcttgtgcacatata

SEQ ID NO: 796135 - DNA, 15 bp, Homo sapiens
cttgtgcacatatac

SEQ ID NO: 796136 - DNA, 15 bp, Homo sapiens
ttgtgcacatatact

SEQ ID NO: 796137 - DNA, 15 bp, Homo sapiens
tgtgcacatatacta

SEQ ID NO: 796138 - DNA, 15 bp, Homo sapiens
gtgcacatatactac

SEQ ID NO: 796139 - DNA, 15 bp, Homo sapiens
tgcacatatactact

SEQ ID NO: 796140 - DNA, 15 bp, Homo sapiens
gcacatatactactt

SEQ ID NO: 796141 - DNA, 15 bp, Homo sapiens
cacatatactactta

SEQ ID NO: 796142 - DNA, 15 bp, Homo sapiens
acatatactacttaa

SEQ ID NO: 796143 - DNA, 15 bp, Homo sapiens
catatactacttaat

SEQ ID NO: 796144 - DNA, 15 bp, Homo sapiens
atatactacttaata

SEQ ID NO: 796145 - DNA, 15 bp, Homo sapiens
tatactacttaataa

SEQ ID NO: 796146 - DNA, 15 bp, Homo sapiens
atactacttaataaa

SEQ ID NO: 796147 - DNA, 15 bp, Homo sapiens
tactacttaataaag

SEQ ID NO: 796148 - DNA, 15 bp, Homo sapiens
actacttaataaagg

SEQ ID NO: 796149 - DNA, 15 bp, Homo sapiens
ctacttaataaagga

SEQ ID NO: 796150 - DNA, 15 bp, Homo sapiens
tacttaataaaggag

SEQ ID NO: 796151 - DNA, 15 bp, Homo sapiens
acttaataaaggaga

SEQ ID NO: 796152 - DNA, 15 bp, Homo sapiens
cttaataaaggagaa

SEQ ID NO: 796153 - DNA, 15 bp, Homo sapiens
ttaataaaggagaag

SEQ ID NO: 796154 - DNA, 15 bp, Homo sapiens
taataaaggagaagg

SEQ ID NO: 796155 - DNA, 15 bp, Homo sapiens
aataaaggagaagga

SEQ ID NO: 796156 - DNA, 15 bp, Homo sapiens
ataaaggagaaggag

SEQ ID NO: 796157 - DNA, 15 bp, Homo sapiens
taaaggagaaggagc

SEQ ID NO: 796158 - DNA, 15 bp, Homo sapiens
aaaggagaaggagca

SEQ ID NO: 796159 - DNA, 15 bp, Homo sapiens
aaggagaaggagcaa

SEQ ID NO: 796160 - DNA, 15 bp, Homo sapiens
aggagaaggagcaaa

SEQ ID NO: 796161 - DNA, 15 bp, Homo sapiens
ggagaaggagcaaac

SEQ ID NO: 796162 - DNA, 15 bp, Homo sapiens
gagaaggagcaaaca

SEQ ID NO: 796163 - DNA, 15 bp, Homo sapiens
agaaggagcaaacat

SEQ ID NO: 796164 - DNA, 15 bp, Homo sapiens
gaaggagcaaacatt

SEQ ID NO: 796165 - DNA, 15 bp, Homo sapiens
aaggagcaaacattt

SEQ ID NO: 796166 - DNA, 15 bp, Homo sapiens
aggagcaaacatttt

SEQ ID NO: 796167 - DNA, 15 bp, Homo sapiens
ggagcaaacatttta

SEQ ID NO: 796168 - DNA, 15 bp, Homo sapiens
gagcaaacattttaa

SEQ ID NO: 796169 - DNA, 15 bp, Homo sapiens
agcaaacattttaaa

SEQ ID NO: 796170 - DNA, 15 bp, Homo sapiens
gcaaacattttaaaa

SEQ ID NO: 796171 - DNA, 15 bp, Homo sapiens
caaacattttaaaaa

SEQ ID NO: 796172 - DNA, 15 bp, Homo sapiens
aaacattttaaaaat

SEQ ID NO: 796173 - DNA, 15 bp, Homo sapiens
aacattttaaaaatg

SEQ ID NO: 796174 - DNA, 15 bp, Homo sapiens
acattttaaaaatgg

SEQ ID NO: 796175 - DNA, 15 bp, Homo sapiens
cattttaaaaatgga

SEQ ID NO: 796176 - DNA, 15 bp, Homo sapiens
attttaaaaatggag

SEQ ID NO: 796177 - DNA, 15 bp, Homo sapiens
ttttaaaaatggaga

SEQ ID NO: 796178 - DNA, 15 bp, Homo sapiens
tttaaaaatggagaa

SEQ ID NO: 796179 - DNA, 15 bp, Homo sapiens
ttaaaaatggagaaa

SEQ ID NO: 796180 - DNA, 15 bp, Homo sapiens
taaaaatggagaaaa

SEQ ID NO: 796181 - DNA, 15 bp, Homo sapiens
aaaaatggagaaaag

SEQ ID NO: 796182 - DNA, 15 bp, Homo sapiens
aaaatggagaaaagg

SEQ ID NO: 796183 - DNA, 15 bp, Homo sapiens
aaatggagaaaaggt

SEQ ID NO: 796184 - DNA, 15 bp, Homo sapiens
aatggagaaaaggta

SEQ ID NO: 796185 - DNA, 15 bp, Homo sapiens
atggagaaaaggtac

SEQ ID NO: 796186 - DNA, 15 bp, Homo sapiens
tggagaaaaggtact

SEQ ID NO: 796187 - DNA, 15 bp, Homo sapiens
ggagaaaaggtactg

SEQ ID NO: 796188 - DNA, 15 bp, Homo sapiens
gagaaaaggtactgt

SEQ ID NO: 796189 - DNA, 15 bp, Homo sapiens
agaaaaggtactgta

SEQ ID NO: 796190 - DNA, 15 bp, Homo sapiens
gaaaaggtactgtag

SEQ ID NO: 796191 - DNA, 15 bp, Homo sapiens
aaaaggtactgtagt

SEQ ID NO: 796192 - DNA, 15 bp, Homo sapiens
aaaggtactgtagtc

SEQ ID NO: 796193 - DNA, 15 bp, Homo sapiens
aaggtactgtagtcg

SEQ ID NO: 796194 - DNA, 15 bp, Homo sapiens
aggtactgtagtcgt

SEQ ID NO: 796195 - DNA, 15 bp, Homo sapiens
ggtactgtagtcgtc

SEQ ID NO: 796196 - DNA, 15 bp, Homo sapiens
gtactgtagtcgtca

SEQ ID NO: 796197 - DNA, 15 bp, Homo sapiens
tactgtagtcgtcat

SEQ ID NO: 796198 - DNA, 15 bp, Homo sapiens
actgtagtcgtcata

SEQ ID NO: 796199 - DNA, 15 bp, Homo sapiens
ctgtagtcgtcataa

SEQ ID NO: 796200 - DNA, 15 bp, Homo sapiens
tgtagtcgtcataat

SEQ ID NO: 796201 - DNA, 15 bp, Homo sapiens
gtagtcgtcataatg

SEQ ID NO: 796202 - DNA, 15 bp, Homo sapiens
tagtcgtcataatgt

SEQ ID NO: 796203 - DNA, 15 bp, Homo sapiens
agtcgtcataatgtt

SEQ ID NO: 796204 - DNA, 15 bp, Homo sapiens
gtcgtcataatgttg

SEQ ID NO: 796205 - DNA, 15 bp, Homo sapiens
tcgtcataatgttgc

SEQ ID NO: 796206 - DNA, 15 bp, Homo sapiens
cgtcataatgttgct

SEQ ID NO: 796207 - DNA, 15 bp, Homo sapiens
gtcataatgttgctg

SEQ ID NO: 796208 - DNA, 15 bp, Homo sapiens
tcataatgttgctga

SEQ ID NO: 796209 - DNA, 15 bp, Homo sapiens
cataatgttgctgaa

SEQ ID NO: 796210 - DNA, 15 bp, Homo sapiens
ataatgttgctgaat

SEQ ID NO: 796211 - DNA, 15 bp, Homo sapiens
taatgttgctgaatg

SEQ ID NO: 796212 - DNA, 15 bp, Homo sapiens
aatgttgctgaatgc

SEQ ID NO: 796213 - DNA, 15 bp, Homo sapiens
atgttgctgaatgct

SEQ ID NO: 796214 - DNA, 15 bp, Homo sapiens
tgttgctgaatgctg

SEQ ID NO: 796215 - DNA, 15 bp, Homo sapiens
gttgctgaatgctgt

SEQ ID NO: 796216 - DNA, 15 bp, Homo sapiens
ttgctgaatgctgtt

SEQ ID NO: 796217 - DNA, 15 bp, Homo sapiens
tgctgaatgctgttg

SEQ ID NO: 796218 - DNA, 15 bp, Homo sapiens
gctgaatgctgttgc

SEQ ID NO: 796219 - DNA, 15 bp, Homo sapiens
ctgaatgctgttgca

SEQ ID NO: 796220 - DNA, 15 bp, Homo sapiens
tgaatgctgttgcat

SEQ ID NO: 796221 - DNA, 15 bp, Homo sapiens
gaatgctgttgcatt

SEQ ID NO: 796222 - DNA, 15 bp, Homo sapiens
aatgctgttgcattt

SEQ ID NO: 796223 - DNA, 15 bp, Homo sapiens
atgctgttgcatttt

SEQ ID NO: 796224 - DNA, 15 bp, Homo sapiens
tgctgttgcattttt

SEQ ID NO: 796225 - DNA, 15 bp, Homo sapiens
gctgttgcatttttc

SEQ ID NO: 796226 - DNA, 15 bp, Homo sapiens
ctgttgcatttttct

SEQ ID NO: 796227 - DNA, 15 bp, Homo sapiens
tgttgcatttttcta

SEQ ID NO: 796228 - DNA, 15 bp, Homo sapiens
gttgcatttttctag

SEQ ID NO: 796229 - DNA, 15 bp, Homo sapiens
ttgcatttttctagc

SEQ ID NO: 796230 - DNA, 15 bp, Homo sapiens
tgcatttttctagct

SEQ ID NO: 796231 - DNA, 15 bp, Homo sapiens
gcatttttctagctg

SEQ ID NO: 796232 - DNA, 15 bp, Homo sapiens
catttttctagctgt

SEQ ID NO: 796233 - DNA, 15 bp, Homo sapiens
atttttctagctgtg

SEQ ID NO: 796234 - DNA, 15 bp, Homo sapiens
tttttctagctgtga

SEQ ID NO: 796235 - DNA, 15 bp, Homo sapiens
ttttctagctgtgaa

SEQ ID NO: 796236 - DNA, 15 bp, Homo sapiens
tttctagctgtgaat

SEQ ID NO: 796237 - DNA, 15 bp, Homo sapiens
ttctagctgtgaatg

SEQ ID NO: 796238 - DNA, 15 bp, Homo sapiens
tctagctgtgaatgt

SEQ ID NO: 796239 - DNA, 15 bp, Homo sapiens
ctagctgtgaatgtc

SEQ ID NO: 796240 - DNA, 15 bp, Homo sapiens
tagctgtgaatgtcc

SEQ ID NO: 796241 - DNA, 15 bp, Homo sapiens
agctgtgaatgtcct

SEQ ID NO: 796242 - DNA, 15 bp, Homo sapiens
gctgtgaatgtcctg

SEQ ID NO: 796243 - DNA, 15 bp, Homo sapiens
ctgtgaatgtcctgt

SEQ ID NO: 796244 - DNA, 15 bp, Homo sapiens
tgtgaatgtcctgtc

SEQ ID NO: 796245 - DNA, 15 bp, Homo sapiens
gtgaatgtcctgtct

SEQ ID NO: 796246 - DNA, 15 bp, Homo sapiens
tgaatgtcctgtcta

SEQ ID NO: 796247 - DNA, 15 bp, Homo sapiens
gaatgtcctgtctat

SEQ ID NO: 796248 - DNA, 15 bp, Homo sapiens
aatgtcctgtctatg

SEQ ID NO: 796249 - DNA, 15 bp, Homo sapiens
atgtcctgtctatgc

SEQ ID NO: 796250 - DNA, 15 bp, Homo sapiens
tgtcctgtctatgct

SEQ ID NO: 796251 - DNA, 15 bp, Homo sapiens
gtcctgtctatgcta

SEQ ID NO: 796252 - DNA, 15 bp, Homo sapiens
tcctgtctatgctag

SEQ ID NO: 796253 - DNA, 15 bp, Homo sapiens
cctgtctatgctagt

SEQ ID NO: 796254 - DNA, 15 bp, Homo sapiens
ctgtctatgctagtg

SEQ ID NO: 796255 - DNA, 15 bp, Homo sapiens
tgtctatgctagtgg

SEQ ID NO: 796256 - DNA, 15 bp, Homo sapiens
gtctatgctagtggg

SEQ ID NO: 796257 - DNA, 15 bp, Homo sapiens
tctatgctagtggga

SEQ ID NO: 796258 - DNA, 15 bp, Homo sapiens
ctatgctagtgggaa

SEQ ID NO: 796259 - DNA, 15 bp, Homo sapiens
tatgctagtgggaac

SEQ ID NO: 796260 - DNA, 15 bp, Homo sapiens
atgctagtgggaacg

SEQ ID NO: 796261 - DNA, 15 bp, Homo sapiens
tgctagtgggaacgg

SEQ ID NO: 796262 - DNA, 15 bp, Homo sapiens
gctagtgggaacgga

SEQ ID NO: 796263 - DNA, 15 bp, Homo sapiens
ctagtgggaacggag

SEQ ID NO: 796264 - DNA, 15 bp, Homo sapiens
tagtgggaacggagg

SEQ ID NO: 796265 - DNA, 15 bp, Homo sapiens
agtgggaacggaggt

SEQ ID NO: 796266 - DNA, 15 bp, Homo sapiens
gtgggaacggaggtc

SEQ ID NO: 796267 - DNA, 15 bp, Homo sapiens
tgggaacggaggtca

SEQ ID NO: 796268 - DNA, 15 bp, Homo sapiens
gggaacggaggtcag

SEQ ID NO: 796269 - DNA, 15 bp, Homo sapiens
ggaacggaggtcagg

SEQ ID NO: 796270 - DNA, 15 bp, Homo sapiens
gaacggaggtcagga

SEQ ID NO: 796271 - DNA, 15 bp, Homo sapiens
aacggaggtcaggat

SEQ ID NO: 796272 - DNA, 15 bp, Homo sapiens
acggaggtcaggatt

SEQ ID NO: 796273 - DNA, 15 bp, Homo sapiens
cggaggtcaggattc

SEQ ID NO: 796274 - DNA, 15 bp, Homo sapiens
ggaggtcaggattct

SEQ ID NO: 796275 - DNA, 15 bp, Homo sapiens
gaggtcaggattcta

SEQ ID NO: 796276 - DNA, 15 bp, Homo sapiens
aggtcaggattctag

SEQ ID NO: 796277 - DNA, 15 bp, Homo sapiens
ggtcaggattctaga

SEQ ID NO: 796278 - DNA, 15 bp, Homo sapiens
gtcaggattctagat

SEQ ID NO: 796279 - DNA, 15 bp, Homo sapiens
tcaggattctagatt

SEQ ID NO: 796280 - DNA, 15 bp, Homo sapiens
caggattctagatta

SEQ ID NO: 796281 - DNA, 15 bp, Homo sapiens
aggattctagattaa

SEQ ID NO: 796282 - DNA, 15 bp, Homo sapiens
ggattctagattaaa

SEQ ID NO: 796283 - DNA, 15 bp, Homo sapiens
gattctagattaaag

SEQ ID NO: 796284 - DNA, 15 bp, Homo sapiens
attctagattaaaga

SEQ ID NO: 796285 - DNA, 15 bp, Homo sapiens
ttctagattaaagat

SEQ ID NO: 796286 - DNA, 15 bp, Homo sapiens
tctagattaaagatt

SEQ ID NO: 796287 - DNA, 15 bp, Homo sapiens
ctagattaaagatta

SEQ ID NO: 796288 - DNA, 15 bp, Homo sapiens
tagattaaagattac

SEQ ID NO: 796289 - DNA, 15 bp, Homo sapiens
agattaaagattacc

SEQ ID NO: 796290 - DNA, 15 bp, Homo sapiens
gattaaagattacct

SEQ ID NO: 796291 - DNA, 15 bp, Homo sapiens
attaaagattacctt

SEQ ID NO: 796292 - DNA, 15 bp, Homo sapiens
ttaaagattaccttt

SEQ ID NO: 796293 - DNA, 15 bp, Homo sapiens
taaagattacctttg

SEQ ID NO: 796294 - DNA, 15 bp, Homo sapiens
aaagattacctttga

SEQ ID NO: 796295 - DNA, 15 bp, Homo sapiens
aagattacctttgat

SEQ ID NO: 796296 - DNA, 15 bp, Homo sapiens
agattacctttgatt

SEQ ID NO: 796297 - DNA, 15 bp, Homo sapiens
gattacctttgatta

SEQ ID NO: 796298 - DNA, 15 bp, Homo sapiens
attacctttgattag

SEQ ID NO: 796299 - DNA, 15 bp, Homo sapiens
ttacctttgattagg

SEQ ID NO: 796300 - DNA, 15 bp, Homo sapiens
tacctttgattaggc

SEQ ID NO: 796301 - DNA, 15 bp, Homo sapiens
acctttgattaggca

SEQ ID NO: 796302 - DNA, 15 bp, Homo sapiens
cctttgattaggcat

SEQ ID NO: 796303 - DNA, 15 bp, Homo sapiens
ctttgattaggcatc

SEQ ID NO: 796304 - DNA, 15 bp, Homo sapiens
tttgattaggcatct

SEQ ID NO: 796305 - DNA, 15 bp, Homo sapiens
ttgattaggcatctc

SEQ ID NO: 796306 - DNA, 15 bp, Homo sapiens
tgattaggcatctct

SEQ ID NO: 796307 - DNA, 15 bp, Homo sapiens
gattaggcatctcta

SEQ ID NO: 796308 - DNA, 15 bp, Homo sapiens
attaggcatctctag

SEQ ID NO: 796309 - DNA, 15 bp, Homo sapiens
ttaggcatctctagt

SEQ ID NO: 796310 - DNA, 15 bp, Homo sapiens
taggcatctctagtc

SEQ ID NO: 796311 - DNA, 15 bp, Homo sapiens
aggcatctctagtca

SEQ ID NO: 796312 - DNA, 15 bp, Homo sapiens
ggcatctctagtcat

SEQ ID NO: 796313 - DNA, 15 bp, Homo sapiens
gcatctctagtcatt

SEQ ID NO: 796314 - DNA, 15 bp, Homo sapiens
catctctagtcattt

SEQ ID NO: 796315 - DNA, 15 bp, Homo sapiens
atctctagtcatttg

SEQ ID NO: 796316 - DNA, 15 bp, Homo sapiens
tctctagtcatttgc

SEQ ID NO: 796317 - DNA, 15 bp, Homo sapiens
ctctagtcatttgct

SEQ ID NO: 796318 - DNA, 15 bp, Homo sapiens
tctagtcatttgctg

SEQ ID NO: 796319 - DNA, 15 bp, Homo sapiens
ctagtcatttgctgg

SEQ ID NO: 796320 - DNA, 15 bp, Homo sapiens
tagtcatttgctgga

SEQ ID NO: 796321 - DNA, 15 bp, Homo sapiens
agtcatttgctggaa

SEQ ID NO: 796322 - DNA, 15 bp, Homo sapiens
gtcatttgctggaac

SEQ ID NO: 796323 - DNA, 15 bp, Homo sapiens
tcatttgctggaaca

SEQ ID NO: 796324 - DNA, 15 bp, Homo sapiens
catttgctggaacac

SEQ ID NO: 796325 - DNA, 15 bp, Homo sapiens
atttgctggaacacc

SEQ ID NO: 796326 - DNA, 15 bp, Homo sapiens
tttgctggaacacct

SEQ ID NO: 796327 - DNA, 15 bp, Homo sapiens
ttgctggaacacctc

SEQ ID NO: 796328 - DNA, 15 bp, Homo sapiens
tgctggaacacctcg

SEQ ID NO: 796329 - DNA, 15 bp, Homo sapiens
gctggaacacctcga

SEQ ID NO: 796330 - DNA, 15 bp, Homo sapiens
ctggaacacctcgaa

SEQ ID NO: 796331 - DNA, 15 bp, Homo sapiens
tggaacacctcgaat

SEQ ID NO: 796332 - DNA, 15 bp, Homo sapiens
ggaacacctcgaatg

SEQ ID NO: 796333 - DNA, 15 bp, Homo sapiens
gaacacctcgaatgt

SEQ ID NO: 796334 - DNA, 15 bp, Homo sapiens
aacacctcgaatgta

SEQ ID NO: 796335 - DNA, 15 bp, Homo sapiens
acacctcgaatgtat

SEQ ID NO: 796336 - DNA, 15 bp, Homo sapiens
cacctcgaatgtatc

SEQ ID NO: 796337 - DNA, 15 bp, Homo sapiens
acctcgaatgtatct

SEQ ID NO: 796338 - DNA, 15 bp, Homo sapiens
cctcgaatgtatctt

SEQ ID NO: 796339 - DNA, 15 bp, Homo sapiens
ctcgaatgtatcttt

SEQ ID NO: 796340 - DNA, 15 bp, Homo sapiens
tcgaatgtatctttt

SEQ ID NO: 796341 - DNA, 15 bp, Homo sapiens
cgaatgtatcttttt

SEQ ID NO: 796342 - DNA, 15 bp, Homo sapiens
gaatgtatctttttc

SEQ ID NO: 796343 - DNA, 15 bp, Homo sapiens
aatgtatctttttct

SEQ ID NO: 796344 - DNA, 15 bp, Homo sapiens
atgtatctttttctg

SEQ ID NO: 796345 - DNA, 15 bp, Homo sapiens
tgtatctttttctgt

SEQ ID NO: 796346 - DNA, 15 bp, Homo sapiens
gtatctttttctgta

SEQ ID NO: 796347 - DNA, 15 bp, Homo sapiens
tatctttttctgtat

SEQ ID NO: 796348 - DNA, 15 bp, Homo sapiens
atctttttctgtatt

SEQ ID NO: 796349 - DNA, 15 bp, Homo sapiens
tctttttctgtattt

SEQ ID NO: 796350 - DNA, 15 bp, Homo sapiens
ctttttctgtatttc

SEQ ID NO: 796351 - DNA, 15 bp, Homo sapiens
tttttctgtatttct

SEQ ID NO: 796352 - DNA, 15 bp, Homo sapiens
ttttctgtatttcta

SEQ ID NO: 796353 - DNA, 15 bp, Homo sapiens
tttctgtatttctat

SEQ ID NO: 796354 - DNA, 15 bp, Homo sapiens
ttctgtatttctatc

SEQ ID NO: 796355 - DNA, 15 bp, Homo sapiens
tctgtatttctatct

SEQ ID NO: 796356 - DNA, 15 bp, Homo sapiens
ctgtatttctatctg

SEQ ID NO: 796357 - DNA, 15 bp, Homo sapiens
tgtatttctatctgg

SEQ ID NO: 796358 - DNA, 15 bp, Homo sapiens
gtatttctatctggg

SEQ ID NO: 796359 - DNA, 15 bp, Homo sapiens
tatttctatctgggt

SEQ ID NO: 796360 - DNA, 15 bp, Homo sapiens
atttctatctgggtg

SEQ ID NO: 796361 - DNA, 15 bp, Homo sapiens
tttctatctgggtga

SEQ ID NO: 796362 - DNA, 15 bp, Homo sapiens
ttctatctgggtgaa

SEQ ID NO: 796363 - DNA, 15 bp, Homo sapiens
tctatctgggtgaaa

SEQ ID NO: 796364 - DNA, 15 bp, Homo sapiens
ctatctgggtgaaag

SEQ ID NO: 796365 - DNA, 15 bp, Homo sapiens
tatctgggtgaaagt

SEQ ID NO: 796366 - DNA, 15 bp, Homo sapiens
atctgggtgaaagtg

SEQ ID NO: 796367 - DNA, 15 bp, Homo sapiens
tctgggtgaaagtgt

SEQ ID NO: 796368 - DNA, 15 bp, Homo sapiens
ctgggtgaaagtgtc

SEQ ID NO: 796369 - DNA, 15 bp, Homo sapiens
tgggtgaaagtgtcc

SEQ ID NO: 796370 - DNA, 15 bp, Homo sapiens
gggtgaaagtgtcca

SEQ ID NO: 796371 - DNA, 15 bp, Homo sapiens
ggtgaaagtgtccat

SEQ ID NO: 796372 - DNA, 15 bp, Homo sapiens
gtgaaagtgtccatt

SEQ ID NO: 796373 - DNA, 15 bp, Homo sapiens
tgaaagtgtccattt

SEQ ID NO: 796374 - DNA, 15 bp, Homo sapiens
gaaagtgtccatttg

SEQ ID NO: 796375 - DNA, 15 bp, Homo sapiens
aaagtgtccatttga

SEQ ID NO: 796376 - DNA, 15 bp, Homo sapiens
aagtgtccatttgat

SEQ ID NO: 796377 - DNA, 15 bp, Homo sapiens
agtgtccatttgatt

SEQ ID NO: 796378 - DNA, 15 bp, Homo sapiens
gtgtccatttgattg

SEQ ID NO: 796379 - DNA, 15 bp, Homo sapiens
tgtccatttgattga

SEQ ID NO: 796380 - DNA, 15 bp, Homo sapiens
gtccatttgattgat

SEQ ID NO: 796381 - DNA, 15 bp, Homo sapiens
tccatttgattgatt

SEQ ID NO: 796382 - DNA, 15 bp, Homo sapiens
ccatttgattgatta

SEQ ID NO: 796383 - DNA, 15 bp, Homo sapiens
catttgattgattag

SEQ ID NO: 796384 - DNA, 15 bp, Homo sapiens
atttgattgattaga

SEQ ID NO: 796385 - DNA, 15 bp, Homo sapiens
tttgattgattagat

SEQ ID NO: 796386 - DNA, 15 bp, Homo sapiens
ttgattgattagata

SEQ ID NO: 796387 - DNA, 15 bp, Homo sapiens
tgattgattagataa

SEQ ID NO: 796388 - DNA, 15 bp, Homo sapiens
gattgattagataac

SEQ ID NO: 796389 - DNA, 15 bp, Homo sapiens
attgattagataacc

SEQ ID NO: 796390 - DNA, 15 bp, Homo sapiens
ttgattagataacca

SEQ ID NO: 796391 - DNA, 15 bp, Homo sapiens
tgattagataaccat

SEQ ID NO: 796392 - DNA, 15 bp, Homo sapiens
gattagataaccatc

SEQ ID NO: 796393 - DNA, 15 bp, Homo sapiens
attagataaccatca

SEQ ID NO: 796394 - DNA, 15 bp, Homo sapiens
ttagataaccatcaa

SEQ ID NO: 796395 - DNA, 15 bp, Homo sapiens
tagataaccatcaaa

SEQ ID NO: 796396 - DNA, 15 bp, Homo sapiens
agataaccatcaaac

SEQ ID NO: 796397 - DNA, 15 bp, Homo sapiens
gataaccatcaaaca

SEQ ID NO: 796398 - DNA, 15 bp, Homo sapiens
ataaccatcaaacac

SEQ ID NO: 796399 - DNA, 15 bp, Homo sapiens
taaccatcaaacaca

SEQ ID NO: 796400 - DNA, 15 bp, Homo sapiens
aaccatcaaacacaa

SEQ ID NO: 796401 - DNA, 15 bp, Homo sapiens
accatcaaacacaac

SEQ ID NO: 796402 - DNA, 15 bp, Homo sapiens
ccatcaaacacaact

SEQ ID NO: 796403 - DNA, 15 bp, Homo sapiens
catcaaacacaactt

SEQ ID NO: 796404 - DNA, 15 bp, Homo sapiens
atcaaacacaacttg

SEQ ID NO: 796405 - DNA, 15 bp, Homo sapiens
tcaaacacaacttga

SEQ ID NO: 796406 - DNA, 15 bp, Homo sapiens
caaacacaacttgat

SEQ ID NO: 796407 - DNA, 15 bp, Homo sapiens
aaacacaacttgatc

SEQ ID NO: 796408 - DNA, 15 bp, Homo sapiens
aacacaacttgatct

SEQ ID NO: 796409 - DNA, 15 bp, Homo sapiens
acacaacttgatctt

SEQ ID NO: 796410 - DNA, 15 bp, Homo sapiens
cacaacttgatcttt

SEQ ID NO: 796411 - DNA, 15 bp, Homo sapiens
acaacttgatctttc

SEQ ID NO: 796412 - DNA, 15 bp, Homo sapiens
caacttgatctttct

SEQ ID NO: 796413 - DNA, 15 bp, Homo sapiens
aacttgatctttctt

SEQ ID NO: 796414 - DNA, 15 bp, Homo sapiens
acttgatctttcttg

SEQ ID NO: 796415 - DNA, 15 bp, Homo sapiens
cttgatctttcttgt

SEQ ID NO: 796416 - DNA, 15 bp, Homo sapiens
ttgatctttcttgtt

SEQ ID NO: 796417 - DNA, 15 bp, Homo sapiens
tgatctttcttgttg

SEQ ID NO: 796418 - DNA, 15 bp, Homo sapiens
gatctttcttgttgg

SEQ ID NO: 796419 - DNA, 15 bp, Homo sapiens
atctttcttgttggg

SEQ ID NO: 796420 - DNA, 15 bp, Homo sapiens
tctttcttgttgggc

SEQ ID NO: 796421 - DNA, 15 bp, Homo sapiens
ctttcttgttgggca

SEQ ID NO: 796422 - DNA, 15 bp, Homo sapiens
tttcttgttgggcag

SEQ ID NO: 796423 - DNA, 15 bp, Homo sapiens
ttcttgttgggcagc

SEQ ID NO: 796424 - DNA, 15 bp, Homo sapiens
tcttgttgggcagct

SEQ ID NO: 796425 - DNA, 15 bp, Homo sapiens
cttgttgggcagcta

SEQ ID NO: 796426 - DNA, 15 bp, Homo sapiens
ttgttgggcagctaa

SEQ ID NO: 796427 - DNA, 15 bp, Homo sapiens
tgttgggcagctaag

SEQ ID NO: 796428 - DNA, 15 bp, Homo sapiens
gttgggcagctaagt

SEQ ID NO: 796429 - DNA, 15 bp, Homo sapiens
ttgggcagctaagtc

SEQ ID NO: 796430 - DNA, 15 bp, Homo sapiens
tgggcagctaagtca

SEQ ID NO: 796431 - DNA, 15 bp, Homo sapiens
gggcagctaagtcat

SEQ ID NO: 796432 - DNA, 15 bp, Homo sapiens
ggcagctaagtcatt

SEQ ID NO: 796433 - DNA, 15 bp, Homo sapiens
gcagctaagtcatta

SEQ ID NO: 796434 - DNA, 15 bp, Homo sapiens
cagctaagtcattaa

SEQ ID NO: 796435 - DNA, 15 bp, Homo sapiens
agctaagtcattaaa

SEQ ID NO: 796436 - DNA, 15 bp, Homo sapiens
gctaagtcattaaaa

SEQ ID NO: 796437 - DNA, 15 bp, Homo sapiens
ctaagtcattaaaaa

SEQ ID NO: 796438 - DNA, 15 bp, Homo sapiens
taagtcattaaaaag

SEQ ID NO: 796439 - DNA, 15 bp, Homo sapiens
aagtcattaaaaaga

SEQ ID NO: 796440 - DNA, 15 bp, Homo sapiens
agtcattaaaaagag

SEQ ID NO: 796441 - DNA, 15 bp, Homo sapiens
gtcattaaaaagagg

SEQ ID NO: 796442 - DNA, 15 bp, Homo sapiens
tcattaaaaagaggc

SEQ ID NO: 796443 - DNA, 15 bp, Homo sapiens
cattaaaaagaggct

SEQ ID NO: 796444 - DNA, 15 bp, Homo sapiens
attaaaaagaggctc

SEQ ID NO: 796445 - DNA, 15 bp, Homo sapiens
ttaaaaagaggctcc

SEQ ID NO: 796446 - DNA, 15 bp, Homo sapiens
taaaaagaggctcct

SEQ ID NO: 796447 - DNA, 15 bp, Homo sapiens
aaaaagaggctcctt

SEQ ID NO: 796448 - DNA, 15 bp, Homo sapiens
aaaagaggctccttc

SEQ ID NO: 796449 - DNA, 15 bp, Homo sapiens
aaagaggctccttct

SEQ ID NO: 796450 - DNA, 15 bp, Homo sapiens
aagaggctccttctt

SEQ ID NO: 796451 - DNA, 15 bp, Homo sapiens
agaggctccttcttg

SEQ ID NO: 796452 - DNA, 15 bp, Homo sapiens
gaggctccttcttgt

SEQ ID NO: 796453 - DNA, 15 bp, Homo sapiens
aggctccttcttgtg

SEQ ID NO: 796454 - DNA, 15 bp, Homo sapiens
ggctccttcttgtgc

SEQ ID NO: 796455 - DNA, 15 bp, Homo sapiens
gctccttcttgtgct

SEQ ID NO: 796456 - DNA, 15 bp, Homo sapiens
ctccttcttgtgctg

SEQ ID NO: 796457 - DNA, 15 bp, Homo sapiens
tccttcttgtgctgc

SEQ ID NO: 796458 - DNA, 15 bp, Homo sapiens
ccttcttgtgctgcc

SEQ ID NO: 796459 - DNA, 15 bp, Homo sapiens
cttcttgtgctgcca

SEQ ID NO: 796460 - DNA, 15 bp, Homo sapiens
ttcttgtgctgccac

SEQ ID NO: 796461 - DNA, 15 bp, Homo sapiens
tcttgtgctgccacc

SEQ ID NO: 796462 - DNA, 15 bp, Homo sapiens
cttgtgctgccacct

SEQ ID NO: 796463 - DNA, 15 bp, Homo sapiens
ttgtgctgccacctt

SEQ ID NO: 796464 - DNA, 15 bp, Homo sapiens
tgtgctgccaccttc

SEQ ID NO: 796465 - DNA, 15 bp, Homo sapiens
gtgctgccaccttca

SEQ ID NO: 796466 - DNA, 15 bp, Homo sapiens
tgctgccaccttcaa

SEQ ID NO: 796467 - DNA, 15 bp, Homo sapiens
gctgccaccttcaaa

SEQ ID NO: 796468 - DNA, 15 bp, Homo sapiens
ctgccaccttcaaat

SEQ ID NO: 796469 - DNA, 15 bp, Homo sapiens
tgccaccttcaaata

SEQ ID NO: 796470 - DNA, 15 bp, Homo sapiens
gccaccttcaaatag

SEQ ID NO: 796471 - DNA, 15 bp, Homo sapiens
ccaccttcaaatagt

SEQ ID NO: 796472 - DNA, 15 bp, Homo sapiens
caccttcaaatagtt

SEQ ID NO: 796473 - DNA, 15 bp, Homo sapiens
accttcaaatagtta

SEQ ID NO: 796474 - DNA, 15 bp, Homo sapiens
ccttcaaatagttat

SEQ ID NO: 796475 - DNA, 15 bp, Homo sapiens
cttcaaatagttatg

SEQ ID NO: 796476 - DNA, 15 bp, Homo sapiens
ttcaaatagttatga

SEQ ID NO: 796477 - DNA, 15 bp, Homo sapiens
tcaaatagttatgat

SEQ ID NO: 796478 - DNA, 15 bp, Homo sapiens
caaatagttatgatc

SEQ ID NO: 796479 - DNA, 15 bp, Homo sapiens
aaatagttatgatca

SEQ ID NO: 796480 - DNA, 15 bp, Homo sapiens
aatagttatgatcat

SEQ ID NO: 796481 - DNA, 15 bp, Homo sapiens
atagttatgatcatt

SEQ ID NO: 796482 - DNA, 15 bp, Homo sapiens
tagttatgatcattg

SEQ ID NO: 796483 - DNA, 15 bp, Homo sapiens
agttatgatcattgt

SEQ ID NO: 796484 - DNA, 15 bp, Homo sapiens
gttatgatcattgtt

SEQ ID NO: 796485 - DNA, 15 bp, Homo sapiens
ttatgatcattgttt

SEQ ID NO: 796486 - DNA, 15 bp, Homo sapiens
tatgatcattgtttt

SEQ ID NO: 796487 - DNA, 15 bp, Homo sapiens
atgatcattgttttc

SEQ ID NO: 796488 - DNA, 15 bp, Homo sapiens
tgatcattgttttcg

SEQ ID NO: 796489 - DNA, 15 bp, Homo sapiens
gatcattgttttcgg

SEQ ID NO: 796490 - DNA, 15 bp, Homo sapiens
atcattgttttcgga

SEQ ID NO: 796491 - DNA, 15 bp, Homo sapiens
tcattgttttcggaa

SEQ ID NO: 796492 - DNA, 15 bp, Homo sapiens
cattgttttcggaaa

SEQ ID NO: 796493 - DNA, 15 bp, Homo sapiens
attgttttcggaaac

SEQ ID NO: 796494 - DNA, 15 bp, Homo sapiens
ttgttttcggaaaca

SEQ ID NO: 796495 - DNA, 15 bp, Homo sapiens
tgttttcggaaacaa

SEQ ID NO: 796496 - DNA, 15 bp, Homo sapiens
gttttcggaaacaag

SEQ ID NO: 796497 - DNA, 15 bp, Homo sapiens
ttttcggaaacaagg

SEQ ID NO: 796498 - DNA, 15 bp, Homo sapiens
tttcggaaacaaggc

SEQ ID NO: 796499 - DNA, 15 bp, Homo sapiens
ttcggaaacaaggct

SEQ ID NO: 796500 - DNA, 15 bp, Homo sapiens
tcggaaacaaggctt

SEQ ID NO: 796501 - DNA, 15 bp, Homo sapiens
cggaaacaaggcttg

SEQ ID NO: 796502 - DNA, 15 bp, Homo sapiens
ggaaacaaggcttgg

SEQ ID NO: 796503 - DNA, 15 bp, Homo sapiens
gaaacaaggcttggg

SEQ ID NO: 796504 - DNA, 15 bp, Homo sapiens
aaacaaggcttgggt

SEQ ID NO: 796505 - DNA, 15 bp, Homo sapiens
aacaaggcttgggta

SEQ ID NO: 796506 - DNA, 15 bp, Homo sapiens
acaaggcttgggtaa

SEQ ID NO: 796507 - DNA, 15 bp, Homo sapiens
caaggcttgggtaat

SEQ ID NO: 796508 - DNA, 15 bp, Homo sapiens
aaggcttgggtaatt

SEQ ID NO: 796509 - DNA, 15 bp, Homo sapiens
aggcttgggtaattt

SEQ ID NO: 796510 - DNA, 15 bp, Homo sapiens
ggcttgggtaatttt

SEQ ID NO: 796511 - DNA, 15 bp, Homo sapiens
gcttgggtaatttta

SEQ ID NO: 796512 - DNA, 15 bp, Homo sapiens
cttgggtaattttaa

SEQ ID NO: 796513 - DNA, 15 bp, Homo sapiens
ttgggtaattttaaa

SEQ ID NO: 796514 - DNA, 15 bp, Homo sapiens
tgggtaattttaaaa

SEQ ID NO: 796515 - DNA, 15 bp, Homo sapiens
gggtaattttaaaat

SEQ ID NO: 796516 - DNA, 15 bp, Homo sapiens
ggtaattttaaaata

SEQ ID NO: 796517 - DNA, 15 bp, Homo sapiens
gtaattttaaaataa

SEQ ID NO: 796518 - DNA, 15 bp, Homo sapiens
taattttaaaataaa

SEQ ID NO: 796519 - DNA, 15 bp, Homo sapiens
aattttaaaataaaa

SEQ ID NO: 796520 - DNA, 15 bp, Homo sapiens
attttaaaataaaaa

SEQ ID NO: 796521 - DNA, 15 bp, Homo sapiens
ttttaaaataaaaag

SEQ ID NO: 796522 - DNA, 15 bp, Homo sapiens
tttaaaataaaaagt

SEQ ID NO: 796523 - DNA, 15 bp, Homo sapiens
ttaaaataaaaagtc

SEQ ID NO: 796524 - DNA, 15 bp, Homo sapiens
taaaataaaaagtct

SEQ ID NO: 796525 - DNA, 15 bp, Homo sapiens
aaaataaaaagtctg

SEQ ID NO: 796526 - DNA, 15 bp, Homo sapiens
aaataaaaagtctga

SEQ ID NO: 796527 - DNA, 15 bp, Homo sapiens
aataaaaagtctgaa

SEQ ID NO: 796528 - DNA, 15 bp, Homo sapiens
ataaaaagtctgaac

SEQ ID NO: 796529 - DNA, 15 bp, Homo sapiens
taaaaagtctgaact

SEQ ID NO: 796530 - DNA, 15 bp, Homo sapiens
aaaaagtctgaactt

SEQ ID NO: 796531 - DNA, 15 bp, Homo sapiens
aaaagtctgaacttt

SEQ ID NO: 796532 - DNA, 15 bp, Homo sapiens
aaagtctgaactttt

SEQ ID NO: 796533 - DNA, 15 bp, Homo sapiens
aagtctgaactttta

SEQ ID NO: 796534 - DNA, 15 bp, Homo sapiens
agtctgaacttttaa

SEQ ID NO: 796535 - DNA, 15 bp, Homo sapiens
gtctgaacttttaag

SEQ ID NO: 796536 - DNA, 15 bp, Homo sapiens
tctgaacttttaagt

SEQ ID NO: 796537 - DNA, 15 bp, Homo sapiens
ctgaacttttaagta

SEQ ID NO: 796538 - DNA, 15 bp, Homo sapiens
tgaacttttaagtag

SEQ ID NO: 796539 - DNA, 15 bp, Homo sapiens
gaacttttaagtagg

SEQ ID NO: 796540 - DNA, 15 bp, Homo sapiens
aacttttaagtaggc

SEQ ID NO: 796541 - DNA, 15 bp, Homo sapiens
acttttaagtaggcc

SEQ ID NO: 796542 - DNA, 15 bp, Homo sapiens
cttttaagtaggcca

SEQ ID NO: 796543 - DNA, 15 bp, Homo sapiens
ttttaagtaggccat

SEQ ID NO: 796544 - DNA, 15 bp, Homo sapiens
tttaagtaggccatg

SEQ ID NO: 796545 - DNA, 15 bp, Homo sapiens
ttaagtaggccatgt

SEQ ID NO: 796546 - DNA, 15 bp, Homo sapiens
taagtaggccatgtg

SEQ ID NO: 796547 - DNA, 15 bp, Homo sapiens
aagtaggccatgtgt

SEQ ID NO: 796548 - DNA, 15 bp, Homo sapiens
agtaggccatgtgtc

SEQ ID NO: 796549 - DNA, 15 bp, Homo sapiens
gtaggccatgtgtca

SEQ ID NO: 796550 - DNA, 15 bp, Homo sapiens
taggccatgtgtcat

SEQ ID NO: 796551 - DNA, 15 bp, Homo sapiens
aggccatgtgtcatc

SEQ ID NO: 796552 - DNA, 15 bp, Homo sapiens
ggccatgtgtcatct

SEQ ID NO: 796553 - DNA, 15 bp, Homo sapiens
gccatgtgtcatcta

SEQ ID NO: 796554 - DNA, 15 bp, Homo sapiens
ccatgtgtcatctag

SEQ ID NO: 796555 - DNA, 15 bp, Homo sapiens
catgtgtcatctagt

SEQ ID NO: 796556 - DNA, 15 bp, Homo sapiens
atgtgtcatctagtt

SEQ ID NO: 796557 - DNA, 15 bp, Homo sapiens
tgtgtcatctagttt

SEQ ID NO: 796558 - DNA, 15 bp, Homo sapiens
gtgtcatctagtttt

SEQ ID NO: 796559 - DNA, 15 bp, Homo sapiens
tgtcatctagttttt

SEQ ID NO: 796560 - DNA, 15 bp, Homo sapiens
gtcatctagtttttt

SEQ ID NO: 796561 - DNA, 15 bp, Homo sapiens
tcatctagttttttt

SEQ ID NO: 796562 - DNA, 15 bp, Homo sapiens
catctagtttttttt

SEQ ID NO: 796563 - DNA, 15 bp, Homo sapiens
atctagtttttttta

SEQ ID NO: 796564 - DNA, 15 bp, Homo sapiens
tctagttttttttat

SEQ ID NO: 796565 - DNA, 15 bp, Homo sapiens
ctagttttttttatt

SEQ ID NO: 796566 - DNA, 15 bp, Homo sapiens
tagttttttttatta

SEQ ID NO: 796567 - DNA, 15 bp, Homo sapiens
agttttttttattag

SEQ ID NO: 796568 - DNA, 15 bp, Homo sapiens
gttttttttattagc

SEQ ID NO: 796569 - DNA, 15 bp, Homo sapiens
ttttttttattagct

SEQ ID NO: 796570 - DNA, 15 bp, Homo sapiens
tttttttattagctt

SEQ ID NO: 796571 - DNA, 15 bp, Homo sapiens
ttttttattagcttc

SEQ ID NO: 796572 - DNA, 15 bp, Homo sapiens
tttttattagcttca

SEQ ID NO: 796573 - DNA, 15 bp, Homo sapiens
ttttattagcttcaa

SEQ ID NO: 796574 - DNA, 15 bp, Homo sapiens
tttattagcttcaaa

SEQ ID NO: 796575 - DNA, 15 bp, Homo sapiens
ttattagcttcaaat

SEQ ID NO: 796576 - DNA, 15 bp, Homo sapiens
tattagcttcaaata

SEQ ID NO: 796577 - DNA, 15 bp, Homo sapiens
attagcttcaaataa

SEQ ID NO: 796578 - DNA, 15 bp, Homo sapiens
ttagcttcaaataac

SEQ ID NO: 796579 - DNA, 15 bp, Homo sapiens
tagcttcaaataaca

SEQ ID NO: 796580 - DNA, 15 bp, Homo sapiens
agcttcaaataacaa

SEQ ID NO: 796581 - DNA, 15 bp, Homo sapiens
gcttcaaataacaat

SEQ ID NO: 796582 - DNA, 15 bp, Homo sapiens
cttcaaataacaatc

SEQ ID NO: 796583 - DNA, 15 bp, Homo sapiens
ttcaaataacaatca

SEQ ID NO: 796584 - DNA, 15 bp, Homo sapiens
tcaaataacaatcaa

SEQ ID NO: 796585 - DNA, 15 bp, Homo sapiens
caaataacaatcaat

SEQ ID NO: 796586 - DNA, 15 bp, Homo sapiens
aaataacaatcaatg

SEQ ID NO: 796587 - DNA, 15 bp, Homo sapiens
aataacaatcaatga

SEQ ID NO: 796588 - DNA, 15 bp, Homo sapiens
ataacaatcaatgag

SEQ ID NO: 796589 - DNA, 15 bp, Homo sapiens
taacaatcaatgagt

SEQ ID NO: 796590 - DNA, 15 bp, Homo sapiens
aacaatcaatgagta

SEQ ID NO: 796591 - DNA, 15 bp, Homo sapiens
acaatcaatgagtat

SEQ ID NO: 796592 - DNA, 15 bp, Homo sapiens
caatcaatgagtata

SEQ ID NO: 796593 - DNA, 15 bp, Homo sapiens
aatcaatgagtatac

SEQ ID NO: 796594 - DNA, 15 bp, Homo sapiens
atcaatgagtatacc

SEQ ID NO: 796595 - DNA, 15 bp, Homo sapiens
tcaatgagtataccc

SEQ ID NO: 796596 - DNA, 15 bp, Homo sapiens
caatgagtataccct

SEQ ID NO: 796597 - DNA, 15 bp, Homo sapiens
aatgagtatacccta

SEQ ID NO: 796598 - DNA, 15 bp, Homo sapiens
atgagtataccctag

SEQ ID NO: 796599 - DNA, 15 bp, Homo sapiens
tgagtataccctaga

SEQ ID NO: 796600 - DNA, 15 bp, Homo sapiens
gagtataccctagaa

SEQ ID NO: 796601 - DNA, 15 bp, Homo sapiens
agtataccctagaaa

SEQ ID NO: 796602 - DNA, 15 bp, Homo sapiens
gtataccctagaaaa

SEQ ID NO: 796603 - DNA, 15 bp, Homo sapiens
tataccctagaaaac

SEQ ID NO: 796604 - DNA, 15 bp, Homo sapiens
ataccctagaaaaca

SEQ ID NO: 796605 - DNA, 15 bp, Homo sapiens
taccctagaaaacaa

SEQ ID NO: 796606 - DNA, 15 bp, Homo sapiens
accctagaaaacaac

SEQ ID NO: 796607 - DNA, 15 bp, Homo sapiens
ccctagaaaacaaca

SEQ ID NO: 796608 - DNA, 15 bp, Homo sapiens
cctagaaaacaacat

SEQ ID NO: 796609 - DNA, 15 bp, Homo sapiens
ctagaaaacaacata

SEQ ID NO: 796610 - DNA, 15 bp, Homo sapiens
tagaaaacaacatat

SEQ ID NO: 796611 - DNA, 15 bp, Homo sapiens
agaaaacaacatatt

SEQ ID NO: 796612 - DNA, 15 bp, Homo sapiens
gaaaacaacatattt

SEQ ID NO: 796613 - DNA, 15 bp, Homo sapiens
aaaacaacatatttc

SEQ ID NO: 796614 - DNA, 15 bp, Homo sapiens
aaacaacatatttcg

SEQ ID NO: 796615 - DNA, 15 bp, Homo sapiens
aacaacatatttcgt

SEQ ID NO: 796616 - DNA, 15 bp, Homo sapiens
acaacatatttcgtt

SEQ ID NO: 796617 - DNA, 15 bp, Homo sapiens
caacatatttcgttc

SEQ ID NO: 796618 - DNA, 15 bp, Homo sapiens
aacatatttcgttcc

SEQ ID NO: 796619 - DNA, 15 bp, Homo sapiens
acatatttcgttcct

SEQ ID NO: 796620 - DNA, 15 bp, Homo sapiens
catatttcgttcctg

SEQ ID NO: 796621 - DNA, 15 bp, Homo sapiens
atatttcgttcctgt

SEQ ID NO: 796622 - DNA, 15 bp, Homo sapiens
tatttcgttcctgta

SEQ ID NO: 796623 - DNA, 15 bp, Homo sapiens
atttcgttcctgtat

SEQ ID NO: 796624 - DNA, 15 bp, Homo sapiens
tttcgttcctgtatt

SEQ ID NO: 796625 - DNA, 15 bp, Homo sapiens
ttcgttcctgtattg

SEQ ID NO: 796626 - DNA, 15 bp, Homo sapiens
tcgttcctgtattga

SEQ ID NO: 796627 - DNA, 15 bp, Homo sapiens
cgttcctgtattgat

SEQ ID NO: 796628 - DNA, 15 bp, Homo sapiens
gttcctgtattgatt

SEQ ID NO: 796629 - DNA, 15 bp, Homo sapiens
ttcctgtattgattc

SEQ ID NO: 796630 - DNA, 15 bp, Homo sapiens
tcctgtattgattcc

SEQ ID NO: 796631 - DNA, 15 bp, Homo sapiens
cctgtattgattccc

SEQ ID NO: 796632 - DNA, 15 bp, Homo sapiens
ctgtattgattcccc

SEQ ID NO: 796633 - DNA, 15 bp, Homo sapiens
tgtattgattcccca

SEQ ID NO: 796634 - DNA, 15 bp, Homo sapiens
gtattgattccccac

SEQ ID NO: 796635 - DNA, 15 bp, Homo sapiens
tattgattccccaca

SEQ ID NO: 796636 - DNA, 15 bp, Homo sapiens
attgattccccacac

SEQ ID NO: 796637 - DNA, 15 bp, Homo sapiens
ttgattccccacact

SEQ ID NO: 796638 - DNA, 15 bp, Homo sapiens
tgattccccacactg

SEQ ID NO: 796639 - DNA, 15 bp, Homo sapiens
gattccccacactgg

SEQ ID NO: 796640 - DNA, 15 bp, Homo sapiens
attccccacactgga

SEQ ID NO: 796641 - DNA, 15 bp, Homo sapiens
ttccccacactggaa

SEQ ID NO: 796642 - DNA, 15 bp, Homo sapiens
tccccacactggaaa

SEQ ID NO: 796643 - DNA, 15 bp, Homo sapiens
ccccacactggaaag

SEQ ID NO: 796644 - DNA, 15 bp, Homo sapiens
cccacactggaaagc

SEQ ID NO: 796645 - DNA, 15 bp, Homo sapiens
ccacactggaaagct

SEQ ID NO: 796646 - DNA, 15 bp, Homo sapiens
cacactggaaagctg

SEQ ID NO: 796647 - DNA, 15 bp, Homo sapiens
acactggaaagctgt

SEQ ID NO: 796648 - DNA, 15 bp, Homo sapiens
cactggaaagctgtt

SEQ ID NO: 796649 - DNA, 15 bp, Homo sapiens
actggaaagctgtta

SEQ ID NO: 796650 - DNA, 15 bp, Homo sapiens
ctggaaagctgttaa

SEQ ID NO: 796651 - DNA, 15 bp, Homo sapiens
tggaaagctgttaaa

SEQ ID NO: 796652 - DNA, 15 bp, Homo sapiens
ggaaagctgttaaat

SEQ ID NO: 796653 - DNA, 15 bp, Homo sapiens
gaaagctgttaaatg

SEQ ID NO: 796654 - DNA, 15 bp, Homo sapiens
aaagctgttaaatgt

SEQ ID NO: 796655 - DNA, 15 bp, Homo sapiens
aagctgttaaatgtt

SEQ ID NO: 796656 - DNA, 15 bp, Homo sapiens
agctgttaaatgttt

SEQ ID NO: 796657 - DNA, 15 bp, Homo sapiens
gctgttaaatgttta

SEQ ID NO: 796658 - DNA, 15 bp, Homo sapiens
ctgttaaatgtttag

SEQ ID NO: 796659 - DNA, 15 bp, Homo sapiens
tgttaaatgtttaga

SEQ ID NO: 796660 - DNA, 15 bp, Homo sapiens
gttaaatgtttagat

SEQ ID NO: 796661 - DNA, 15 bp, Homo sapiens
ttaaatgtttagatg

SEQ ID NO: 796662 - DNA, 15 bp, Homo sapiens
taaatgtttagatgc

SEQ ID NO: 796663 - DNA, 15 bp, Homo sapiens
aaatgtttagatgct

SEQ ID NO: 796664 - DNA, 15 bp, Homo sapiens
aatgtttagatgctg

SEQ ID NO: 796665 - DNA, 15 bp, Homo sapiens
atgtttagatgctgg

SEQ ID NO: 796666 - DNA, 15 bp, Homo sapiens
tgtttagatgctgga

SEQ ID NO: 796667 - DNA, 15 bp, Homo sapiens
gtttagatgctggaa

SEQ ID NO: 796668 - DNA, 15 bp, Homo sapiens
tttagatgctggaaa

SEQ ID NO: 796669 - DNA, 15 bp, Homo sapiens
ttagatgctggaaaa

SEQ ID NO: 796670 - DNA, 15 bp, Homo sapiens
tagatgctggaaaag

SEQ ID NO: 796671 - DNA, 15 bp, Homo sapiens
agatgctggaaaagc

SEQ ID NO: 796672 - DNA, 15 bp, Homo sapiens
gatgctggaaaagca

SEQ ID NO: 796673 - DNA, 15 bp, Homo sapiens
atgctggaaaagcaa

SEQ ID NO: 796674 - DNA, 15 bp, Homo sapiens
tgctggaaaagcaac

SEQ ID NO: 796675 - DNA, 15 bp, Homo sapiens
gctggaaaagcaaca

SEQ ID NO: 796676 - DNA, 15 bp, Homo sapiens
ctggaaaagcaacaa

SEQ ID NO: 796677 - DNA, 15 bp, Homo sapiens
tggaaaagcaacaag

SEQ ID NO: 796678 - DNA, 15 bp, Homo sapiens
ggaaaagcaacaaga

SEQ ID NO: 796679 - DNA, 15 bp, Homo sapiens
gaaaagcaacaagac

SEQ ID NO: 796680 - DNA, 15 bp, Homo sapiens
aaaagcaacaagact

SEQ ID NO: 796681 - DNA, 15 bp, Homo sapiens
aaagcaacaagacta

SEQ ID NO: 796682 - DNA, 15 bp, Homo sapiens
aagcaacaagactaa

SEQ ID NO: 796683 - DNA, 15 bp, Homo sapiens
agcaacaagactaat

SEQ ID NO: 796684 - DNA, 15 bp, Homo sapiens
gcaacaagactaatc

SEQ ID NO: 796685 - DNA, 15 bp, Homo sapiens
caacaagactaatcc

SEQ ID NO: 796686 - DNA, 15 bp, Homo sapiens
aacaagactaatcca

SEQ ID NO: 796687 - DNA, 15 bp, Homo sapiens
acaagactaatccat

SEQ ID NO: 796688 - DNA, 15 bp, Homo sapiens
caagactaatccatg

SEQ ID NO: 796689 - DNA, 15 bp, Homo sapiens
aagactaatccatga

SEQ ID NO: 796690 - DNA, 15 bp, Homo sapiens
agactaatccatgag

SEQ ID NO: 796691 - DNA, 15 bp, Homo sapiens
gactaatccatgagt

SEQ ID NO: 796692 - DNA, 15 bp, Homo sapiens
actaatccatgagtg

SEQ ID NO: 796693 - DNA, 15 bp, Homo sapiens
ctaatccatgagtgt

SEQ ID NO: 796694 - DNA, 15 bp, Homo sapiens
taatccatgagtgtc

SEQ ID NO: 796695 - DNA, 15 bp, Homo sapiens
aatccatgagtgtct

SEQ ID NO: 796696 - DNA, 15 bp, Homo sapiens
atccatgagtgtctg

SEQ ID NO: 796697 - DNA, 15 bp, Homo sapiens
tccatgagtgtctgg

SEQ ID NO: 796698 - DNA, 15 bp, Homo sapiens
ccatgagtgtctggc

SEQ ID NO: 796699 - DNA, 15 bp, Homo sapiens
catgagtgtctggca

SEQ ID NO: 796700 - DNA, 15 bp, Homo sapiens
atgagtgtctggcat

SEQ ID NO: 796701 - DNA, 15 bp, Homo sapiens
tgagtgtctggcatt

SEQ ID NO: 796702 - DNA, 15 bp, Homo sapiens
gagtgtctggcattt

SEQ ID NO: 796703 - DNA, 15 bp, Homo sapiens
agtgtctggcatttt

SEQ ID NO: 796704 - DNA, 15 bp, Homo sapiens
gtgtctggcattttt

SEQ ID NO: 796705 - DNA, 15 bp, Homo sapiens
tgtctggcatttttt

SEQ ID NO: 796706 - DNA, 15 bp, Homo sapiens
gtctggcattttttt

SEQ ID NO: 796707 - DNA, 15 bp, Homo sapiens
tctggcatttttttc

SEQ ID NO: 796708 - DNA, 15 bp, Homo sapiens
ctggcatttttttct

SEQ ID NO: 796709 - DNA, 15 bp, Homo sapiens
tggcatttttttctt

SEQ ID NO: 796710 - DNA, 15 bp, Homo sapiens
ggcatttttttcttc

SEQ ID NO: 796711 - DNA, 15 bp, Homo sapiens
gcatttttttcttct

SEQ ID NO: 796712 - DNA, 15 bp, Homo sapiens
catttttttcttctt

SEQ ID NO: 796713 - DNA, 15 bp, Homo sapiens
atttttttcttctta

SEQ ID NO: 796714 - DNA, 15 bp, Homo sapiens
tttttttcttcttaa

SEQ ID NO: 796715 - DNA, 15 bp, Homo sapiens
ttttttcttcttaat

SEQ ID NO: 796716 - DNA, 15 bp, Homo sapiens
tttttcttcttaatt

SEQ ID NO: 796717 - DNA, 15 bp, Homo sapiens
ttttcttcttaattg

SEQ ID NO: 796718 - DNA, 15 bp, Homo sapiens
tttcttcttaattgt

SEQ ID NO: 796719 - DNA, 15 bp, Homo sapiens
ttcttcttaattgta

SEQ ID NO: 796720 - DNA, 15 bp, Homo sapiens
tcttcttaattgtaa

SEQ ID NO: 796721 - DNA, 15 bp, Homo sapiens
cttcttaattgtaag

SEQ ID NO: 796722 - DNA, 15 bp, Homo sapiens
ttcttaattgtaagt

SEQ ID NO: 796723 - DNA, 15 bp, Homo sapiens
tcttaattgtaagtg

SEQ ID NO: 796724 - DNA, 15 bp, Homo sapiens
cttaattgtaagtgc

SEQ ID NO: 796725 - DNA, 15 bp, Homo sapiens
ttaattgtaagtgca

SEQ ID NO: 796726 - DNA, 15 bp, Homo sapiens
taattgtaagtgcac

SEQ ID NO: 796727 - DNA, 15 bp, Homo sapiens
aattgtaagtgcacc

SEQ ID NO: 796728 - DNA, 15 bp, Homo sapiens
attgtaagtgcacca

SEQ ID NO: 796729 - DNA, 15 bp, Homo sapiens
ttgtaagtgcaccat

SEQ ID NO: 796730 - DNA, 15 bp, Homo sapiens
tgtaagtgcaccatt

SEQ ID NO: 796731 - DNA, 15 bp, Homo sapiens
gtaagtgcaccattt

SEQ ID NO: 796732 - DNA, 15 bp, Homo sapiens
taagtgcaccatttt

SEQ ID NO: 796733 - DNA, 15 bp, Homo sapiens
aagtgcaccatttta

SEQ ID NO: 796734 - DNA, 15 bp, Homo sapiens
agtgcaccattttat

SEQ ID NO: 796735 - DNA, 15 bp, Homo sapiens
gtgcaccattttata

SEQ ID NO: 796736 - DNA, 15 bp, Homo sapiens
tgcaccattttatat

SEQ ID NO: 796737 - DNA, 15 bp, Homo sapiens
gcaccattttatata

SEQ ID NO: 796738 - DNA, 15 bp, Homo sapiens
caccattttatatag

SEQ ID NO: 796739 - DNA, 15 bp, Homo sapiens
accattttatatagt

SEQ ID NO: 796740 - DNA, 15 bp, Homo sapiens
ccattttatatagta

SEQ ID NO: 796741 - DNA, 15 bp, Homo sapiens
cattttatatagtat

SEQ ID NO: 796742 - DNA, 15 bp, Homo sapiens
attttatatagtatg

SEQ ID NO: 796743 - DNA, 15 bp, Homo sapiens
ttttatatagtatgt

SEQ ID NO: 796744 - DNA, 15 bp, Homo sapiens
tttatatagtatgta

SEQ ID NO: 796745 - DNA, 15 bp, Homo sapiens
ttatatagtatgtat

SEQ ID NO: 796746 - DNA, 15 bp, Homo sapiens
tatatagtatgtatg

SEQ ID NO: 796747 - DNA, 15 bp, Homo sapiens
atatagtatgtatgt

SEQ ID NO: 796748 - DNA, 15 bp, Homo sapiens
tatagtatgtatgtg

SEQ ID NO: 796749 - DNA, 15 bp, Homo sapiens
atagtatgtatgtgg

SEQ ID NO: 796750 - DNA, 15 bp, Homo sapiens
tagtatgtatgtggt

SEQ ID NO: 796751 - DNA, 15 bp, Homo sapiens
agtatgtatgtggtg

SEQ ID NO: 796752 - DNA, 15 bp, Homo sapiens
gtatgtatgtggtgg

SEQ ID NO: 796753 - DNA, 15 bp, Homo sapiens
tatgtatgtggtggt

SEQ ID NO: 796754 - DNA, 15 bp, Homo sapiens
atgtatgtggtggtg

SEQ ID NO: 796755 - DNA, 15 bp, Homo sapiens
tgtatgtggtggtga

SEQ ID NO: 796756 - DNA, 15 bp, Homo sapiens
gtatgtggtggtgac

SEQ ID NO: 796757 - DNA, 15 bp, Homo sapiens
tatgtggtggtgaca

SEQ ID NO: 796758 - DNA, 15 bp, Homo sapiens
atgtggtggtgacat

SEQ ID NO: 796759 - DNA, 15 bp, Homo sapiens
tgtggtggtgacatt

SEQ ID NO: 796760 - DNA, 15 bp, Homo sapiens
gtggtggtgacattt

SEQ ID NO: 796761 - DNA, 15 bp, Homo sapiens
tggtggtgacatttt

SEQ ID NO: 796762 - DNA, 15 bp, Homo sapiens
ggtggtgacattttg

SEQ ID NO: 796763 - DNA, 15 bp, Homo sapiens
gtggtgacattttgc

SEQ ID NO: 796764 - DNA, 15 bp, Homo sapiens
tggtgacattttgct

SEQ ID NO: 796765 - DNA, 15 bp, Homo sapiens
ggtgacattttgctt

SEQ ID NO: 796766 - DNA, 15 bp, Homo sapiens
gtgacattttgcttg

SEQ ID NO: 796767 - DNA, 15 bp, Homo sapiens
tgacattttgcttga

SEQ ID NO: 796768 - DNA, 15 bp, Homo sapiens
gacattttgcttgaa

SEQ ID NO: 796769 - DNA, 15 bp, Homo sapiens
acattttgcttgaat

SEQ ID NO: 796770 - DNA, 15 bp, Homo sapiens
cattttgcttgaata

SEQ ID NO: 796771 - DNA, 15 bp, Homo sapiens
attttgcttgaatat

SEQ ID NO: 796772 - DNA, 15 bp, Homo sapiens
ttttgcttgaatata

SEQ ID NO: 796773 - DNA, 15 bp, Homo sapiens
tttgcttgaatatag

SEQ ID NO: 796774 - DNA, 15 bp, Homo sapiens
ttgcttgaatatagt

SEQ ID NO: 796775 - DNA, 15 bp, Homo sapiens
tgcttgaatatagtt

SEQ ID NO: 796776 - DNA, 15 bp, Homo sapiens
gcttgaatatagttt

SEQ ID NO: 796777 - DNA, 15 bp, Homo sapiens
cttgaatatagttta

SEQ ID NO: 796778 - DNA, 15 bp, Homo sapiens
ttgaatatagtttaa

SEQ ID NO: 796779 - DNA, 15 bp, Homo sapiens
tgaatatagtttaag

SEQ ID NO: 796780 - DNA, 15 bp, Homo sapiens
gaatatagtttaaga

SEQ ID NO: 796781 - DNA, 15 bp, Homo sapiens
aatatagtttaagag

SEQ ID NO: 796782 - DNA, 15 bp, Homo sapiens
atatagtttaagaga

SEQ ID NO: 796783 - DNA, 15 bp, Homo sapiens
tatagtttaagagat

SEQ ID NO: 796784 - DNA, 15 bp, Homo sapiens
atagtttaagagatt

SEQ ID NO: 796785 - DNA, 15 bp, Homo sapiens
tagtttaagagatta

SEQ ID NO: 796786 - DNA, 15 bp, Homo sapiens
agtttaagagattac

SEQ ID NO: 796787 - DNA, 15 bp, Homo sapiens
gtttaagagattacg

SEQ ID NO: 796788 - DNA, 15 bp, Homo sapiens
tttaagagattacgg

SEQ ID NO: 796789 - DNA, 15 bp, Homo sapiens
ttaagagattacggg

SEQ ID NO: 796790 - DNA, 15 bp, Homo sapiens
taagagattacgggt

SEQ ID NO: 796791 - DNA, 15 bp, Homo sapiens
aagagattacgggta

SEQ ID NO: 796792 - DNA, 15 bp, Homo sapiens
agagattacgggtac

SEQ ID NO: 796793 - DNA, 15 bp, Homo sapiens
gagattacgggtaca

SEQ ID NO: 796794 - DNA, 15 bp, Homo sapiens
agattacgggtacaa

SEQ ID NO: 796795 - DNA, 15 bp, Homo sapiens
gattacgggtacaaa

SEQ ID NO: 796796 - DNA, 15 bp, Homo sapiens
attacgggtacaaag

SEQ ID NO: 796797 - DNA, 15 bp, Homo sapiens
ttacgggtacaaaga

SEQ ID NO: 796798 - DNA, 15 bp, Homo sapiens
tacgggtacaaagac

SEQ ID NO: 796799 - DNA, 15 bp, Homo sapiens
acgggtacaaagacc

SEQ ID NO: 796800 - DNA, 15 bp, Homo sapiens
cgggtacaaagacct

SEQ ID NO: 796801 - DNA, 15 bp, Homo sapiens
gggtacaaagacctg

SEQ ID NO: 796802 - DNA, 15 bp, Homo sapiens
ggtacaaagacctgt

SEQ ID NO: 796803 - DNA, 15 bp, Homo sapiens
gtacaaagacctgtt

SEQ ID NO: 796804 - DNA, 15 bp, Homo sapiens
tacaaagacctgttt

SEQ ID NO: 796805 - DNA, 15 bp, Homo sapiens
acaaagacctgtttt

SEQ ID NO: 796806 - DNA, 15 bp, Homo sapiens
caaagacctgttttc

SEQ ID NO: 796807 - DNA, 15 bp, Homo sapiens
aaagacctgttttcc

SEQ ID NO: 796808 - DNA, 15 bp, Homo sapiens
aagacctgttttcct

SEQ ID NO: 796809 - DNA, 15 bp, Homo sapiens
agacctgttttcctt

SEQ ID NO: 796810 - DNA, 15 bp, Homo sapiens
gacctgttttccttt

SEQ ID NO: 796811 - DNA, 15 bp, Homo sapiens
acctgttttcctttc

SEQ ID NO: 796812 - DNA, 15 bp, Homo sapiens
cctgttttcctttca

SEQ ID NO: 796813 - DNA, 15 bp, Homo sapiens
ctgttttcctttcaa

SEQ ID NO: 796814 - DNA, 15 bp, Homo sapiens
tgttttcctttcaat

SEQ ID NO: 796815 - DNA, 15 bp, Homo sapiens
gttttcctttcaatt

SEQ ID NO: 796816 - DNA, 15 bp, Homo sapiens
ttttcctttcaattc

SEQ ID NO: 796817 - DNA, 15 bp, Homo sapiens
tttcctttcaattct

SEQ ID NO: 796818 - DNA, 15 bp, Homo sapiens
ttcctttcaattctg

SEQ ID NO: 796819 - DNA, 15 bp, Homo sapiens
tcctttcaattctgt

SEQ ID NO: 796820 - DNA, 15 bp, Homo sapiens
cctttcaattctgtg

SEQ ID NO: 796821 - DNA, 15 bp, Homo sapiens
ctttcaattctgtgc

SEQ ID NO: 796822 - DNA, 15 bp, Homo sapiens
tttcaattctgtgct

SEQ ID NO: 796823 - DNA, 15 bp, Homo sapiens
ttcaattctgtgctg

SEQ ID NO: 796824 - DNA, 15 bp, Homo sapiens
tcaattctgtgctga

SEQ ID NO: 796825 - DNA, 15 bp, Homo sapiens
caattctgtgctgat

SEQ ID NO: 796826 - DNA, 15 bp, Homo sapiens
aattctgtgctgata

SEQ ID NO: 796827 - DNA, 15 bp, Homo sapiens
attctgtgctgatat

SEQ ID NO: 796828 - DNA, 15 bp, Homo sapiens
ttctgtgctgatatt

SEQ ID NO: 796829 - DNA, 15 bp, Homo sapiens
tctgtgctgatattt

SEQ ID NO: 796830 - DNA, 15 bp, Homo sapiens
ctgtgctgatatttt

SEQ ID NO: 796831 - DNA, 15 bp, Homo sapiens
tgtgctgatattttc

SEQ ID NO: 796832 - DNA, 15 bp, Homo sapiens
gtgctgatattttct

SEQ ID NO: 796833 - DNA, 15 bp, Homo sapiens
tgctgatattttcta

SEQ ID NO: 796834 - DNA, 15 bp, Homo sapiens
gctgatattttctat

SEQ ID NO: 796835 - DNA, 15 bp, Homo sapiens
ctgatattttctatg

SEQ ID NO: 796836 - DNA, 15 bp, Homo sapiens
tgatattttctatga

SEQ ID NO: 796837 - DNA, 15 bp, Homo sapiens
gatattttctatgat

SEQ ID NO: 796838 - DNA, 15 bp, Homo sapiens
atattttctatgatt

SEQ ID NO: 796839 - DNA, 15 bp, Homo sapiens
tattttctatgattg

SEQ ID NO: 796840 - DNA, 15 bp, Homo sapiens
attttctatgattgt

SEQ ID NO: 796841 - DNA, 15 bp, Homo sapiens
ttttctatgattgtg

SEQ ID NO: 796842 - DNA, 15 bp, Homo sapiens
tttctatgattgtgt

SEQ ID NO: 796843 - DNA, 15 bp, Homo sapiens
ttctatgattgtgtt

SEQ ID NO: 796844 - DNA, 15 bp, Homo sapiens
tctatgattgtgttt

SEQ ID NO: 796845 - DNA, 15 bp, Homo sapiens
ctatgattgtgtttt

SEQ ID NO: 796846 - DNA, 15 bp, Homo sapiens
tatgattgtgtttta

SEQ ID NO: 796847 - DNA, 15 bp, Homo sapiens
atgattgtgttttat

SEQ ID NO: 796848 - DNA, 15 bp, Homo sapiens
tgattgtgttttatc

SEQ ID NO: 796849 - DNA, 15 bp, Homo sapiens
gattgtgttttatca

SEQ ID NO: 796850 - DNA, 15 bp, Homo sapiens
attgtgttttatcaa

SEQ ID NO: 796851 - DNA, 15 bp, Homo sapiens
ttgtgttttatcaat

SEQ ID NO: 796852 - DNA, 15 bp, Homo sapiens
tgtgttttatcaatg

SEQ ID NO: 796853 - DNA, 15 bp, Homo sapiens
gtgttttatcaatgt

SEQ ID NO: 796854 - DNA, 15 bp, Homo sapiens
tgttttatcaatgtc

SEQ ID NO: 796855 - DNA, 15 bp, Homo sapiens
gttttatcaatgtca

SEQ ID NO: 796856 - DNA, 15 bp, Homo sapiens
ttttatcaatgtcat

SEQ ID NO: 796857 - DNA, 15 bp, Homo sapiens
tttatcaatgtcatt

SEQ ID NO: 796858 - DNA, 15 bp, Homo sapiens
ttatcaatgtcattg

SEQ ID NO: 796859 - DNA, 15 bp, Homo sapiens
tatcaatgtcattga

SEQ ID NO: 796860 - DNA, 15 bp, Homo sapiens
atcaatgtcattgaa

SEQ ID NO: 796861 - DNA, 15 bp, Homo sapiens
tcaatgtcattgaaa

SEQ ID NO: 796862 - DNA, 15 bp, Homo sapiens
caatgtcattgaaat

SEQ ID NO: 796863 - DNA, 15 bp, Homo sapiens
aatgtcattgaaatt

SEQ ID NO: 796864 - DNA, 15 bp, Homo sapiens
atgtcattgaaattt

SEQ ID NO: 796865 - DNA, 15 bp, Homo sapiens
tgtcattgaaatttc

SEQ ID NO: 796866 - DNA, 15 bp, Homo sapiens
gtcattgaaatttcc

SEQ ID NO: 796867 - DNA, 15 bp, Homo sapiens
tcattgaaatttccc

SEQ ID NO: 796868 - DNA, 15 bp, Homo sapiens
cattgaaatttccct

SEQ ID NO: 796869 - DNA, 15 bp, Homo sapiens
attgaaatttccctc

SEQ ID NO: 796870 - DNA, 15 bp, Homo sapiens
ttgaaatttccctca

SEQ ID NO: 796871 - DNA, 15 bp, Homo sapiens
tgaaatttccctcaa

SEQ ID NO: 796872 - DNA, 15 bp, Homo sapiens
gaaatttccctcaaa

SEQ ID NO: 796873 - DNA, 15 bp, Homo sapiens
aaatttccctcaaag

SEQ ID NO: 796874 - DNA, 15 bp, Homo sapiens
aatttccctcaaaga

SEQ ID NO: 796875 - DNA, 15 bp, Homo sapiens
atttccctcaaagag

SEQ ID NO: 796876 - DNA, 15 bp, Homo sapiens
tttccctcaaagaga

SEQ ID NO: 796877 - DNA, 15 bp, Homo sapiens
ttccctcaaagagaa

SEQ ID NO: 796878 - DNA, 15 bp, Homo sapiens
tccctcaaagagaaa

SEQ ID NO: 796879 - DNA, 15 bp, Homo sapiens
ccctcaaagagaaat

SEQ ID NO: 796880 - DNA, 15 bp, Homo sapiens
cctcaaagagaaatt

SEQ ID NO: 796881 - DNA, 15 bp, Homo sapiens
ctcaaagagaaattc

SEQ ID NO: 796882 - DNA, 15 bp, Homo sapiens
tcaaagagaaattcc

SEQ ID NO: 796883 - DNA, 15 bp, Homo sapiens
caaagagaaattcct

SEQ ID NO: 796884 - DNA, 15 bp, Homo sapiens
aaagagaaattcctt

SEQ ID NO: 796885 - DNA, 15 bp, Homo sapiens
aagagaaattcctta

SEQ ID NO: 796886 - DNA, 15 bp, Homo sapiens
agagaaattccttag

SEQ ID NO: 796887 - DNA, 15 bp, Homo sapiens
gagaaattccttagg

SEQ ID NO: 796888 - DNA, 15 bp, Homo sapiens
agaaattccttagga

SEQ ID NO: 796889 - DNA, 15 bp, Homo sapiens
gaaattccttaggaa

SEQ ID NO: 796890 - DNA, 15 bp, Homo sapiens
aaattccttaggaat

SEQ ID NO: 796891 - DNA, 15 bp, Homo sapiens
aattccttaggaatc

SEQ ID NO: 796892 - DNA, 15 bp, Homo sapiens
attccttaggaatct

SEQ ID NO: 796893 - DNA, 15 bp, Homo sapiens
ttccttaggaatctc

SEQ ID NO: 796894 - DNA, 15 bp, Homo sapiens
tccttaggaatctcc

SEQ ID NO: 796895 - DNA, 15 bp, Homo sapiens
ccttaggaatctcct

SEQ ID NO: 796896 - DNA, 15 bp, Homo sapiens
cttaggaatctcctt

SEQ ID NO: 796897 - DNA, 15 bp, Homo sapiens
ttaggaatctccttg

SEQ ID NO: 796898 - DNA, 15 bp, Homo sapiens
taggaatctccttgg

SEQ ID NO: 796899 - DNA, 15 bp, Homo sapiens
aggaatctccttgga

SEQ ID NO: 796900 - DNA, 15 bp, Homo sapiens
ggaatctccttggaa

SEQ ID NO: 796901 - DNA, 15 bp, Homo sapiens
gaatctccttggaat

SEQ ID NO: 796902 - DNA, 15 bp, Homo sapiens
aatctccttggaatt

SEQ ID NO: 796903 - DNA, 15 bp, Homo sapiens
atctccttggaattg

SEQ ID NO: 796904 - DNA, 15 bp, Homo sapiens
tctccttggaattgg

SEQ ID NO: 796905 - DNA, 15 bp, Homo sapiens
ctccttggaattggc

SEQ ID NO: 796906 - DNA, 15 bp, Homo sapiens
tccttggaattggca

SEQ ID NO: 796907 - DNA, 15 bp, Homo sapiens
ccttggaattggcat

SEQ ID NO: 796908 - DNA, 15 bp, Homo sapiens
cttggaattggcatt

SEQ ID NO: 796909 - DNA, 15 bp, Homo sapiens
ttggaattggcatta

SEQ ID NO: 796910 - DNA, 15 bp, Homo sapiens
tggaattggcattaa

SEQ ID NO: 796911 - DNA, 15 bp, Homo sapiens
ggaattggcattaaa

SEQ ID NO: 796912 - DNA, 15 bp, Homo sapiens
gaattggcattaaat

SEQ ID NO: 796913 - DNA, 15 bp, Homo sapiens
aattggcattaaata

SEQ ID NO: 796914 - DNA, 15 bp, Homo sapiens
attggcattaaatac

SEQ ID NO: 796915 - DNA, 15 bp, Homo sapiens
ttggcattaaatact

SEQ ID NO: 796916 - DNA, 15 bp, Homo sapiens
tggcattaaatactc

SEQ ID NO: 796917 - DNA, 15 bp, Homo sapiens
ggcattaaatactct

SEQ ID NO: 796918 - DNA, 15 bp, Homo sapiens
gcattaaatactctt

SEQ ID NO: 796919 - DNA, 15 bp, Homo sapiens
cattaaatactcttt

SEQ ID NO: 796920 - DNA, 15 bp, Homo sapiens
attaaatactcttta

SEQ ID NO: 796921 - DNA, 15 bp, Homo sapiens
ttaaatactctttat

SEQ ID NO: 796922 - DNA, 15 bp, Homo sapiens
taaatactctttatt

SEQ ID NO: 796923 - DNA, 15 bp, Homo sapiens
aaatactctttattg

SEQ ID NO: 796924 - DNA, 15 bp, Homo sapiens
aatactctttattga

SEQ ID NO: 796925 - DNA, 15 bp, Homo sapiens
atactctttattgaa

SEQ ID NO: 796926 - DNA, 15 bp, Homo sapiens
tactctttattgaaa

SEQ ID NO: 796927 - DNA, 15 bp, Homo sapiens
actctttattgaaag

SEQ ID NO: 796928 - DNA, 15 bp, Homo sapiens
ctctttattgaaaga

SEQ ID NO: 796929 - DNA, 15 bp, Homo sapiens
tctttattgaaagag

SEQ ID NO: 796930 - DNA, 15 bp, Homo sapiens
ctttattgaaagaga

SEQ ID NO: 796931 - DNA, 15 bp, Homo sapiens
tttattgaaagagag

SEQ ID NO: 796932 - DNA, 15 bp, Homo sapiens
ttattgaaagagaga

SEQ ID NO: 796933 - DNA, 15 bp, Homo sapiens
tattgaaagagagat

SEQ ID NO: 796934 - DNA, 15 bp, Homo sapiens
attgaaagagagatt

SEQ ID NO: 796935 - DNA, 15 bp, Homo sapiens
ttgaaagagagattg

SEQ ID NO: 796936 - DNA, 15 bp, Homo sapiens
tgaaagagagattgg

SEQ ID NO: 796937 - DNA, 15 bp, Homo sapiens
gaaagagagattggt

SEQ ID NO: 796938 - DNA, 15 bp, Homo sapiens
aaagagagattggtt

SEQ ID NO: 796939 - DNA, 15 bp, Homo sapiens
aagagagattggttt

SEQ ID NO: 796940 - DNA, 15 bp, Homo sapiens
agagagattggtttt

SEQ ID NO: 796941 - DNA, 15 bp, Homo sapiens
gagagattggttttc

SEQ ID NO: 796942 - DNA, 15 bp, Homo sapiens
agagattggttttct

SEQ ID NO: 796943 - DNA, 15 bp, Homo sapiens
gagattggttttctt

SEQ ID NO: 796944 - DNA, 15 bp, Homo sapiens
agattggttttcttt

SEQ ID NO: 796945 - DNA, 15 bp, Homo sapiens
gattggttttcttta

SEQ ID NO: 796946 - DNA, 15 bp, Homo sapiens
attggttttctttat

SEQ ID NO: 796947 - DNA, 15 bp, Homo sapiens
ttggttttctttatg

SEQ ID NO: 796948 - DNA, 15 bp, Homo sapiens
tggttttctttatga

SEQ ID NO: 796949 - DNA, 15 bp, Homo sapiens
ggttttctttatgaa

SEQ ID NO: 796950 - DNA, 15 bp, Homo sapiens
gttttctttatgaaa

SEQ ID NO: 796951 - DNA, 15 bp, Homo sapiens
ttttctttatgaaat

SEQ ID NO: 796952 - DNA, 15 bp, Homo sapiens
tttctttatgaaatt

SEQ ID NO: 796953 - DNA, 15 bp, Homo sapiens
ttctttatgaaattg

SEQ ID NO: 796954 - DNA, 15 bp, Homo sapiens
tctttatgaaattgt

SEQ ID NO: 796955 - DNA, 15 bp, Homo sapiens
ctttatgaaattgtt

SEQ ID NO: 796956 - DNA, 15 bp, Homo sapiens
tttatgaaattgttt

SEQ ID NO: 796957 - DNA, 15 bp, Homo sapiens
ttatgaaattgtttt

SEQ ID NO: 796958 - DNA, 15 bp, Homo sapiens
tatgaaattgttttc

SEQ ID NO: 796959 - DNA, 15 bp, Homo sapiens
atgaaattgttttct

SEQ ID NO: 796960 - DNA, 15 bp, Homo sapiens
tgaaattgttttctt

SEQ ID NO: 796961 - DNA, 15 bp, Homo sapiens
gaaattgttttcttc

SEQ ID NO: 796962 - DNA, 15 bp, Homo sapiens
aaattgttttcttct

SEQ ID NO: 796963 - DNA, 15 bp, Homo sapiens
aattgttttcttctg

SEQ ID NO: 796964 - DNA, 15 bp, Homo sapiens
attgttttcttctgc

SEQ ID NO: 796965 - DNA, 15 bp, Homo sapiens
ttgttttcttctgcc

SEQ ID NO: 796966 - DNA, 15 bp, Homo sapiens
tgttttcttctgcct

SEQ ID NO: 796967 - DNA, 15 bp, Homo sapiens
gttttcttctgcctc

SEQ ID NO: 796968 - DNA, 15 bp, Homo sapiens
ttttcttctgcctct

SEQ ID NO: 796969 - DNA, 15 bp, Homo sapiens
tttcttctgcctctg

SEQ ID NO: 796970 - DNA, 15 bp, Homo sapiens
ttcttctgcctctgt

SEQ ID NO: 796971 - DNA, 15 bp, Homo sapiens
tcttctgcctctgtc

SEQ ID NO: 796972 - DNA, 15 bp, Homo sapiens
cttctgcctctgtct

SEQ ID NO: 796973 - DNA, 15 bp, Homo sapiens
ttctgcctctgtcta

SEQ ID NO: 796974 - DNA, 15 bp, Homo sapiens
tctgcctctgtctat

SEQ ID NO: 796975 - DNA, 15 bp, Homo sapiens
ctgcctctgtctatt

SEQ ID NO: 796976 - DNA, 15 bp, Homo sapiens
tgcctctgtctattg

SEQ ID NO: 796977 - DNA, 15 bp, Homo sapiens
gcctctgtctattgg

SEQ ID NO: 796978 - DNA, 15 bp, Homo sapiens
cctctgtctattggc

SEQ ID NO: 796979 - DNA, 15 bp, Homo sapiens
ctctgtctattggct

SEQ ID NO: 796980 - DNA, 15 bp, Homo sapiens
tctgtctattggcta

SEQ ID NO: 796981 - DNA, 15 bp, Homo sapiens
ctgtctattggctaa

SEQ ID NO: 796982 - DNA, 15 bp, Homo sapiens
tgtctattggctaat

SEQ ID NO: 796983 - DNA, 15 bp, Homo sapiens
gtctattggctaatt

SEQ ID NO: 796984 - DNA, 15 bp, Homo sapiens
tctattggctaatta

SEQ ID NO: 796985 - DNA, 15 bp, Homo sapiens
ctattggctaattat

SEQ ID NO: 796986 - DNA, 15 bp, Homo sapiens
tattggctaattatg

SEQ ID NO: 796987 - DNA, 15 bp, Homo sapiens
attggctaattatgg

SEQ ID NO: 796988 - DNA, 15 bp, Homo sapiens
ttggctaattatggg

SEQ ID NO: 796989 - DNA, 15 bp, Homo sapiens
tggctaattatggga

SEQ ID NO: 796990 - DNA, 15 bp, Homo sapiens
ggctaattatgggac

SEQ ID NO: 796991 - DNA, 15 bp, Homo sapiens
gctaattatgggact

SEQ ID NO: 796992 - DNA, 15 bp, Homo sapiens
ctaattatgggactt

SEQ ID NO: 796993 - DNA, 15 bp, Homo sapiens
taattatgggacttc

SEQ ID NO: 796994 - DNA, 15 bp, Homo sapiens
aattatgggacttct

SEQ ID NO: 796995 - DNA, 15 bp, Homo sapiens
attatgggacttcta

SEQ ID NO: 796996 - DNA, 15 bp, Homo sapiens
ttatgggacttctat

SEQ ID NO: 796997 - DNA, 15 bp, Homo sapiens
tatgggacttctatt

SEQ ID NO: 796998 - DNA, 15 bp, Homo sapiens
atgggacttctattt

SEQ ID NO: 796999 - DNA, 15 bp, Homo sapiens
tgggacttctatttt

SEQ ID NO: 797000 - DNA, 15 bp, Homo sapiens
gggacttctattttt

SEQ ID NO: 797001 - DNA, 15 bp, Homo sapiens
ggacttctatttttc

SEQ ID NO: 797002 - DNA, 15 bp, Homo sapiens
gacttctatttttca

SEQ ID NO: 797003 - DNA, 15 bp, Homo sapiens
acttctatttttcat

SEQ ID NO: 797004 - DNA, 15 bp, Homo sapiens
cttctatttttcatt

SEQ ID NO: 797005 - DNA, 15 bp, Homo sapiens
ttctatttttcattt

SEQ ID NO: 797006 - DNA, 15 bp, Homo sapiens
tctatttttcatttc

SEQ ID NO: 797007 - DNA, 15 bp, Homo sapiens
ctatttttcatttct

SEQ ID NO: 797008 - DNA, 15 bp, Homo sapiens
tatttttcatttcta

SEQ ID NO: 797009 - DNA, 15 bp, Homo sapiens
atttttcatttctac

SEQ ID NO: 797010 - DNA, 15 bp, Homo sapiens
tttttcatttctact

SEQ ID NO: 797011 - DNA, 15 bp, Homo sapiens
ttttcatttctactt

SEQ ID NO: 797012 - DNA, 15 bp, Homo sapiens
tttcatttctacttt

SEQ ID NO: 797013 - DNA, 15 bp, Homo sapiens
ttcatttctacttta

SEQ ID NO: 797014 - DNA, 15 bp, Homo sapiens
tcatttctactttac

SEQ ID NO: 797015 - DNA, 15 bp, Homo sapiens
catttctactttact

SEQ ID NO: 797016 - DNA, 15 bp, Homo sapiens
atttctactttactg

SEQ ID NO: 797017 - DNA, 15 bp, Homo sapiens
tttctactttactgt

SEQ ID NO: 797018 - DNA, 15 bp, Homo sapiens
ttctactttactgta

SEQ ID NO: 797019 - DNA, 15 bp, Homo sapiens
tctactttactgtaa

SEQ ID NO: 797020 - DNA, 15 bp, Homo sapiens
ctactttactgtaat

SEQ ID NO: 797021 - DNA, 15 bp, Homo sapiens
tactttactgtaatc

SEQ ID NO: 797022 - DNA, 15 bp, Homo sapiens
actttactgtaatcc

SEQ ID NO: 797023 - DNA, 15 bp, Homo sapiens
ctttactgtaatcct

SEQ ID NO: 797024 - DNA, 15 bp, Homo sapiens
tttactgtaatcctt

SEQ ID NO: 797025 - DNA, 15 bp, Homo sapiens
ttactgtaatccttt

SEQ ID NO: 797026 - DNA, 15 bp, Homo sapiens
tactgtaatcctttc

SEQ ID NO: 797027 - DNA, 15 bp, Homo sapiens
actgtaatcctttct

SEQ ID NO: 797028 - DNA, 15 bp, Homo sapiens
ctgtaatcctttcta

SEQ ID NO: 797029 - DNA, 15 bp, Homo sapiens
tgtaatcctttctaa

SEQ ID NO: 797030 - DNA, 15 bp, Homo sapiens
gtaatcctttctaag

SEQ ID NO: 797031 - DNA, 15 bp, Homo sapiens
taatcctttctaagt

SEQ ID NO: 797032 - DNA, 15 bp, Homo sapiens
aatcctttctaagtt

SEQ ID NO: 797033 - DNA, 15 bp, Homo sapiens
atcctttctaagttg

SEQ ID NO: 797034 - DNA, 15 bp, Homo sapiens
tcctttctaagttga

SEQ ID NO: 797035 - DNA, 15 bp, Homo sapiens
cctttctaagttgaa

SEQ ID NO: 797036 - DNA, 15 bp, Homo sapiens
ctttctaagttgaaa

SEQ ID NO: 797037 - DNA, 15 bp, Homo sapiens
tttctaagttgaaaa

SEQ ID NO: 797038 - DNA, 15 bp, Homo sapiens
ttctaagttgaaaac

SEQ ID NO: 797039 - DNA, 15 bp, Homo sapiens
tctaagttgaaaaca

SEQ ID NO: 797040 - DNA, 15 bp, Homo sapiens
ctaagttgaaaacag

SEQ ID NO: 797041 - DNA, 15 bp, Homo sapiens
taagttgaaaacagc

SEQ ID NO: 797042 - DNA, 15 bp, Homo sapiens
aagttgaaaacagcc

SEQ ID NO: 797043 - DNA, 15 bp, Homo sapiens
agttgaaaacagcct

SEQ ID NO: 797044 - DNA, 15 bp, Homo sapiens
gttgaaaacagcctt

SEQ ID NO: 797045 - DNA, 15 bp, Homo sapiens
ttgaaaacagccttg

SEQ ID NO: 797046 - DNA, 15 bp, Homo sapiens
tgaaaacagccttgc

SEQ ID NO: 797047 - DNA, 15 bp, Homo sapiens
gaaaacagccttgca

SEQ ID NO: 797048 - DNA, 15 bp, Homo sapiens
aaaacagccttgcaa

SEQ ID NO: 797049 - DNA, 15 bp, Homo sapiens
aaacagccttgcaaa

SEQ ID NO: 797050 - DNA, 15 bp, Homo sapiens
aacagccttgcaaag

SEQ ID NO: 797051 - DNA, 15 bp, Homo sapiens
acagccttgcaaaga

SEQ ID NO: 797052 - DNA, 15 bp, Homo sapiens
cagccttgcaaagaa

SEQ ID NO: 797053 - DNA, 15 bp, Homo sapiens
agccttgcaaagaaa

SEQ ID NO: 797054 - DNA, 15 bp, Homo sapiens
gccttgcaaagaaac

SEQ ID NO: 797055 - DNA, 15 bp, Homo sapiens
ccttgcaaagaaact

SEQ ID NO: 797056 - DNA, 15 bp, Homo sapiens
cttgcaaagaaactc

SEQ ID NO: 797057 - DNA, 15 bp, Homo sapiens
ttgcaaagaaactcg

SEQ ID NO: 797058 - DNA, 15 bp, Homo sapiens
tgcaaagaaactcgc

SEQ ID NO: 797059 - DNA, 15 bp, Homo sapiens
gcaaagaaactcgca

SEQ ID NO: 797060 - DNA, 15 bp, Homo sapiens
caaagaaactcgcag

SEQ ID NO: 797061 - DNA, 15 bp, Homo sapiens
aaagaaactcgcagg

SEQ ID NO: 797062 - DNA, 15 bp, Homo sapiens
aagaaactcgcaggg

SEQ ID NO: 797063 - DNA, 15 bp, Homo sapiens
agaaactcgcagggc

SEQ ID NO: 797064 - DNA, 15 bp, Homo sapiens
gaaactcgcagggca

SEQ ID NO: 797065 - DNA, 15 bp, Homo sapiens
aaactcgcagggcat

SEQ ID NO: 797066 - DNA, 15 bp, Homo sapiens
aactcgcagggcatt

SEQ ID NO: 797067 - DNA, 15 bp, Homo sapiens
actcgcagggcattc

SEQ ID NO: 797068 - DNA, 15 bp, Homo sapiens
ctcgcagggcattcc

SEQ ID NO: 797069 - DNA, 15 bp, Homo sapiens
tcgcagggcattcca

SEQ ID NO: 797070 - DNA, 15 bp, Homo sapiens
cgcagggcattccag

SEQ ID NO: 797071 - DNA, 15 bp, Homo sapiens
gcagggcattccagg

SEQ ID NO: 797072 - DNA, 15 bp, Homo sapiens
cagggcattccaggg

SEQ ID NO: 797073 - DNA, 15 bp, Homo sapiens
agggcattccagggg

SEQ ID NO: 797074 - DNA, 15 bp, Homo sapiens
gggcattccaggggc

SEQ ID NO: 797075 - DNA, 15 bp, Homo sapiens
ggcattccaggggca

SEQ ID NO: 797076 - DNA, 15 bp, Homo sapiens
gcattccaggggcaa

SEQ ID NO: 797077 - DNA, 15 bp, Homo sapiens
cattccaggggcaaa

SEQ ID NO: 797078 - DNA, 15 bp, Homo sapiens
attccaggggcaaag

SEQ ID NO: 797079 - DNA, 15 bp, Homo sapiens
ttccaggggcaaaga

SEQ ID NO: 797080 - DNA, 15 bp, Homo sapiens
tccaggggcaaagag

SEQ ID NO: 797081 - DNA, 15 bp, Homo sapiens
ccaggggcaaagagt

SEQ ID NO: 797082 - DNA, 15 bp, Homo sapiens
caggggcaaagagtt

SEQ ID NO: 797083 - DNA, 15 bp, Homo sapiens
aggggcaaagagttc

SEQ ID NO: 797084 - DNA, 15 bp, Homo sapiens
ggggcaaagagttcc

SEQ ID NO: 797085 - DNA, 15 bp, Homo sapiens
gggcaaagagttcct

SEQ ID NO: 797086 - DNA, 15 bp, Homo sapiens
ggcaaagagttcctc

SEQ ID NO: 797087 - DNA, 15 bp, Homo sapiens
gcaaagagttcctct

SEQ ID NO: 797088 - DNA, 15 bp, Homo sapiens
caaagagttcctcta

SEQ ID NO: 797089 - DNA, 15 bp, Homo sapiens
aaagagttcctctaa

SEQ ID NO: 797090 - DNA, 15 bp, Homo sapiens
aagagttcctctaac

SEQ ID NO: 797091 - DNA, 15 bp, Homo sapiens
agagttcctctaacc

SEQ ID NO: 797092 - DNA, 15 bp, Homo sapiens
gagttcctctaacct

SEQ ID NO: 797093 - DNA, 15 bp, Homo sapiens
agttcctctaaccta

SEQ ID NO: 797094 - DNA, 15 bp, Homo sapiens
gttcctctaacctag

SEQ ID NO: 797095 - DNA, 15 bp, Homo sapiens
ttcctctaacctaga

SEQ ID NO: 797096 - DNA, 15 bp, Homo sapiens
tcctctaacctagaa

SEQ ID NO: 797097 - DNA, 15 bp, Homo sapiens
cctctaacctagaat

SEQ ID NO: 797098 - DNA, 15 bp, Homo sapiens
ctctaacctagaatg

SEQ ID NO: 797099 - DNA, 15 bp, Homo sapiens
tctaacctagaatga

SEQ ID NO: 797100 - DNA, 15 bp, Homo sapiens
ctaacctagaatgaa

SEQ ID NO: 797101 - DNA, 15 bp, Homo sapiens
taacctagaatgaat

SEQ ID NO: 797102 - DNA, 15 bp, Homo sapiens
aacctagaatgaatt

SEQ ID NO: 797103 - DNA, 15 bp, Homo sapiens
acctagaatgaattt

SEQ ID NO: 797104 - DNA, 15 bp, Homo sapiens
cctagaatgaatttt

SEQ ID NO: 797105 - DNA, 15 bp, Homo sapiens
ctagaatgaattttg

SEQ ID NO: 797106 - DNA, 15 bp, Homo sapiens
tagaatgaattttgc

SEQ ID NO: 797107 - DNA, 15 bp, Homo sapiens
agaatgaattttgca

SEQ ID NO: 797108 - DNA, 15 bp, Homo sapiens
gaatgaattttgcag

SEQ ID NO: 797109 - DNA, 15 bp, Homo sapiens
aatgaattttgcagc

SEQ ID NO: 797110 - DNA, 15 bp, Homo sapiens
atgaattttgcagca

SEQ ID NO: 797111 - DNA, 15 bp, Homo sapiens
tgaattttgcagcat

SEQ ID NO: 797112 - DNA, 15 bp, Homo sapiens
gaattttgcagcatc

SEQ ID NO: 797113 - DNA, 15 bp, Homo sapiens
aattttgcagcatct

SEQ ID NO: 797114 - DNA, 15 bp, Homo sapiens
attttgcagcatctg

SEQ ID NO: 797115 - DNA, 15 bp, Homo sapiens
ttttgcagcatctgg

SEQ ID NO: 797116 - DNA, 15 bp, Homo sapiens
tttgcagcatctggg

SEQ ID NO: 797117 - DNA, 15 bp, Homo sapiens
ttgcagcatctggga

SEQ ID NO: 797118 - DNA, 15 bp, Homo sapiens
tgcagcatctgggaa

SEQ ID NO: 797119 - DNA, 15 bp, Homo sapiens
gcagcatctgggaat

SEQ ID NO: 797120 - DNA, 15 bp, Homo sapiens
cagcatctgggaatg

SEQ ID NO: 797121 - DNA, 15 bp, Homo sapiens
agcatctgggaatgg

SEQ ID NO: 797122 - DNA, 15 bp, Homo sapiens
gcatctgggaatggc

SEQ ID NO: 797123 - DNA, 15 bp, Homo sapiens
catctgggaatggca

SEQ ID NO: 797124 - DNA, 15 bp, Homo sapiens
atctgggaatggcat

SEQ ID NO: 797125 - DNA, 15 bp, Homo sapiens
tctgggaatggcata

SEQ ID NO: 797126 - DNA, 15 bp, Homo sapiens
ctgggaatggcatat

SEQ ID NO: 797127 - DNA, 15 bp, Homo sapiens
tgggaatggcatatt

SEQ ID NO: 797128 - DNA, 15 bp, Homo sapiens
gggaatggcatattt

SEQ ID NO: 797129 - DNA, 15 bp, Homo sapiens
ggaatggcatatttt

SEQ ID NO: 797130 - DNA, 15 bp, Homo sapiens
gaatggcatattttt

SEQ ID NO: 797131 - DNA, 15 bp, Homo sapiens
aatggcatattttta

SEQ ID NO: 797132 - DNA, 15 bp, Homo sapiens
atggcatatttttac

SEQ ID NO: 797133 - DNA, 15 bp, Homo sapiens
tggcatatttttacc

SEQ ID NO: 797134 - DNA, 15 bp, Homo sapiens
ggcatatttttacct

SEQ ID NO: 797135 - DNA, 15 bp, Homo sapiens
gcatatttttacctg

SEQ ID NO: 797136 - DNA, 15 bp, Homo sapiens
catatttttacctgt

SEQ ID NO: 797137 - DNA, 15 bp, Homo sapiens
atatttttacctgtt

SEQ ID NO: 797138 - DNA, 15 bp, Homo sapiens
tatttttacctgttc

SEQ ID NO: 797139 - DNA, 15 bp, Homo sapiens
atttttacctgttct

SEQ ID NO: 797140 - DNA, 15 bp, Homo sapiens
tttttacctgttctg

SEQ ID NO: 797141 - DNA, 15 bp, Homo sapiens
ttttacctgttctga

SEQ ID NO: 797142 - DNA, 15 bp, Homo sapiens
tttacctgttctgaa

SEQ ID NO: 797143 - DNA, 15 bp, Homo sapiens
ttacctgttctgaat

SEQ ID NO: 797144 - DNA, 15 bp, Homo sapiens
tacctgttctgaatt

SEQ ID NO: 797145 - DNA, 15 bp, Homo sapiens
acctgttctgaatta

SEQ ID NO: 797146 - DNA, 15 bp, Homo sapiens
cctgttctgaattaa

SEQ ID NO: 797147 - DNA, 15 bp, Homo sapiens
ctgttctgaattaag

SEQ ID NO: 797148 - DNA, 15 bp, Homo sapiens
tgttctgaattaagg

SEQ ID NO: 797149 - DNA, 15 bp, Homo sapiens
gttctgaattaaggt

SEQ ID NO: 797150 - DNA, 15 bp, Homo sapiens
ttctgaattaaggta

SEQ ID NO: 797151 - DNA, 15 bp, Homo sapiens
tctgaattaaggtat

SEQ ID NO: 797152 - DNA, 15 bp, Homo sapiens
ctgaattaaggtatt

SEQ ID NO: 797153 - DNA, 15 bp, Homo sapiens
tgaattaaggtattt

SEQ ID NO: 797154 - DNA, 15 bp, Homo sapiens
gaattaaggtatttc

SEQ ID NO: 797155 - DNA, 15 bp, Homo sapiens
aattaaggtatttct

SEQ ID NO: 797156 - DNA, 15 bp, Homo sapiens
attaaggtatttctg

SEQ ID NO: 797157 - DNA, 15 bp, Homo sapiens
ttaaggtatttctgt

SEQ ID NO: 797158 - DNA, 15 bp, Homo sapiens
taaggtatttctgtg

SEQ ID NO: 797159 - DNA, 15 bp, Homo sapiens
aaggtatttctgtgt

SEQ ID NO: 797160 - DNA, 15 bp, Homo sapiens
aggtatttctgtgtc

SEQ ID NO: 797161 - DNA, 15 bp, Homo sapiens
ggtatttctgtgtca

SEQ ID NO: 797162 - DNA, 15 bp, Homo sapiens
gtatttctgtgtcat

SEQ ID NO: 797163 - DNA, 15 bp, Homo sapiens
tatttctgtgtcata

SEQ ID NO: 797164 - DNA, 15 bp, Homo sapiens
atttctgtgtcatag

SEQ ID NO: 797165 - DNA, 15 bp, Homo sapiens
tttctgtgtcatagt

SEQ ID NO: 797166 - DNA, 15 bp, Homo sapiens
ttctgtgtcatagtg

SEQ ID NO: 797167 - DNA, 15 bp, Homo sapiens
tctgtgtcatagtgt

SEQ ID NO: 797168 - DNA, 15 bp, Homo sapiens
ctgtgtcatagtgta

SEQ ID NO: 797169 - DNA, 15 bp, Homo sapiens
tgtgtcatagtgtaa

SEQ ID NO: 797170 - DNA, 15 bp, Homo sapiens
gtgtcatagtgtaaa

SEQ ID NO: 797171 - DNA, 15 bp, Homo sapiens
tgtcatagtgtaaat

SEQ ID NO: 797172 - DNA, 15 bp, Homo sapiens
gtcatagtgtaaatt

SEQ ID NO: 797173 - DNA, 15 bp, Homo sapiens
tcatagtgtaaattt

SEQ ID NO: 797174 - DNA, 15 bp, Homo sapiens
catagtgtaaatttg

SEQ ID NO: 797175 - DNA, 15 bp, Homo sapiens
atagtgtaaatttgg

SEQ ID NO: 797176 - DNA, 15 bp, Homo sapiens
tagtgtaaatttggt

SEQ ID NO: 797177 - DNA, 15 bp, Homo sapiens
agtgtaaatttggtt

SEQ ID NO: 797178 - DNA, 15 bp, Homo sapiens
gtgtaaatttggttg

SEQ ID NO: 797179 - DNA, 15 bp, Homo sapiens
tgtaaatttggttgc

SEQ ID NO: 797180 - DNA, 15 bp, Homo sapiens
gtaaatttggttgca

SEQ ID NO: 797181 - DNA, 15 bp, Homo sapiens
taaatttggttgcaa

SEQ ID NO: 797182 - DNA, 15 bp, Homo sapiens
aaatttggttgcaag

SEQ ID NO: 797183 - DNA, 15 bp, Homo sapiens
aatttggttgcaagt

SEQ ID NO: 797184 - DNA, 15 bp, Homo sapiens
atttggttgcaagta

SEQ ID NO: 797185 - DNA, 15 bp, Homo sapiens
tttggttgcaagtat

SEQ ID NO: 797186 - DNA, 15 bp, Homo sapiens
ttggttgcaagtatt

SEQ ID NO: 797187 - DNA, 15 bp, Homo sapiens
tggttgcaagtatta

SEQ ID NO: 797188 - DNA, 15 bp, Homo sapiens
ggttgcaagtattaa

SEQ ID NO: 797189 - DNA, 15 bp, Homo sapiens
gttgcaagtattaaa

SEQ ID NO: 797190 - DNA, 15 bp, Homo sapiens
ttgcaagtattaaat

SEQ ID NO: 797191 - DNA, 15 bp, Homo sapiens
tgcaagtattaaata

SEQ ID NO: 797192 - DNA, 15 bp, Homo sapiens
gcaagtattaaatac

SEQ ID NO: 797193 - DNA, 15 bp, Homo sapiens
caagtattaaatact

SEQ ID NO: 797194 - DNA, 15 bp, Homo sapiens
aagtattaaatacta

SEQ ID NO: 797195 - DNA, 15 bp, Homo sapiens
agtattaaatactaa

SEQ ID NO: 797196 - DNA, 15 bp, Homo sapiens
gtattaaatactaac

SEQ ID NO: 797197 - DNA, 15 bp, Homo sapiens
tattaaatactaact

SEQ ID NO: 797198 - DNA, 15 bp, Homo sapiens
attaaatactaactc

SEQ ID NO: 797199 - DNA, 15 bp, Homo sapiens
ttaaatactaactcc

SEQ ID NO: 797200 - DNA, 15 bp, Homo sapiens
taaatactaactcct

SEQ ID NO: 797201 - DNA, 15 bp, Homo sapiens
aaatactaactccta

SEQ ID NO: 797202 - DNA, 15 bp, Homo sapiens
aatactaactcctat

SEQ ID NO: 797203 - DNA, 15 bp, Homo sapiens
atactaactcctatt

SEQ ID NO: 797204 - DNA, 15 bp, Homo sapiens
tactaactcctattc

SEQ ID NO: 797205 - DNA, 15 bp, Homo sapiens
actaactcctattct

SEQ ID NO: 797206 - DNA, 15 bp, Homo sapiens
ctaactcctattctg

SEQ ID NO: 797207 - DNA, 15 bp, Homo sapiens
taactcctattctgg

SEQ ID NO: 797208 - DNA, 15 bp, Homo sapiens
aactcctattctgga

SEQ ID NO: 797209 - DNA, 15 bp, Homo sapiens
actcctattctggaa

SEQ ID NO: 797210 - DNA, 15 bp, Homo sapiens
ctcctattctggaaa

SEQ ID NO: 797211 - DNA, 15 bp, Homo sapiens
tcctattctggaaag

SEQ ID NO: 797212 - DNA, 15 bp, Homo sapiens
cctattctggaaaga

SEQ ID NO: 797213 - DNA, 15 bp, Homo sapiens
ctattctggaaagaa

SEQ ID NO: 797214 - DNA, 15 bp, Homo sapiens
tattctggaaagaat

SEQ ID NO: 797215 - DNA, 15 bp, Homo sapiens
attctggaaagaatg

SEQ ID NO: 797216 - DNA, 15 bp, Homo sapiens
ttctggaaagaatgc

SEQ ID NO: 797217 - DNA, 15 bp, Homo sapiens
tctggaaagaatgca

SEQ ID NO: 797218 - DNA, 15 bp, Homo sapiens
ctggaaagaatgcaa

SEQ ID NO: 797219 - DNA, 15 bp, Homo sapiens
tggaaagaatgcaat

SEQ ID NO: 797220 - DNA, 15 bp, Homo sapiens
ggaaagaatgcaatc

SEQ ID NO: 797221 - DNA, 15 bp, Homo sapiens
gaaagaatgcaatca

SEQ ID NO: 797222 - DNA, 15 bp, Homo sapiens
aaagaatgcaatcat

SEQ ID NO: 797223 - DNA, 15 bp, Homo sapiens
aagaatgcaatcata

SEQ ID NO: 797224 - DNA, 15 bp, Homo sapiens
agaatgcaatcataa

SEQ ID NO: 797225 - DNA, 15 bp, Homo sapiens
gaatgcaatcataat

SEQ ID NO: 797226 - DNA, 15 bp, Homo sapiens
aatgcaatcataatt

SEQ ID NO: 797227 - DNA, 15 bp, Homo sapiens
atgcaatcataattt

SEQ ID NO: 797228 - DNA, 15 bp, Homo sapiens
tgcaatcataattta

SEQ ID NO: 797229 - DNA, 15 bp, Homo sapiens
gcaatcataatttaa

SEQ ID NO: 797230 - DNA, 15 bp, Homo sapiens
caatcataatttaag

SEQ ID NO: 797231 - DNA, 15 bp, Homo sapiens
aatcataatttaaga

SEQ ID NO: 797232 - DNA, 15 bp, Homo sapiens
atcataatttaagaa

SEQ ID NO: 797233 - DNA, 15 bp, Homo sapiens
tcataatttaagaac

SEQ ID NO: 797234 - DNA, 15 bp, Homo sapiens
cataatttaagaaca

SEQ ID NO: 797235 - DNA, 15 bp, Homo sapiens
ataatttaagaacac

SEQ ID NO: 797236 - DNA, 15 bp, Homo sapiens
taatttaagaacaca

SEQ ID NO: 797237 - DNA, 15 bp, Homo sapiens
aatttaagaacacat

SEQ ID NO: 797238 - DNA, 15 bp, Homo sapiens
atttaagaacacatt

SEQ ID NO: 797239 - DNA, 15 bp, Homo sapiens
tttaagaacacattt

SEQ ID NO: 797240 - DNA, 15 bp, Homo sapiens
ttaagaacacatttt

SEQ ID NO: 797241 - DNA, 15 bp, Homo sapiens
taagaacacattttt

SEQ ID NO: 797242 - DNA, 15 bp, Homo sapiens
aagaacacatttttc

SEQ ID NO: 797243 - DNA, 15 bp, Homo sapiens
agaacacatttttca

SEQ ID NO: 797244 - DNA, 15 bp, Homo sapiens
gaacacatttttcac

SEQ ID NO: 797245 - DNA, 15 bp, Homo sapiens
aacacatttttcacc

SEQ ID NO: 797246 - DNA, 15 bp, Homo sapiens
acacatttttcaccc

SEQ ID NO: 797247 - DNA, 15 bp, Homo sapiens
cacatttttcaccca

SEQ ID NO: 797248 - DNA, 15 bp, Homo sapiens
acatttttcacccaa

SEQ ID NO: 797249 - DNA, 15 bp, Homo sapiens
catttttcacccaaa

SEQ ID NO: 797250 - DNA, 15 bp, Homo sapiens
atttttcacccaaag

SEQ ID NO: 797251 - DNA, 15 bp, Homo sapiens
tttttcacccaaagg

SEQ ID NO: 797252 - DNA, 15 bp, Homo sapiens
ttttcacccaaaggg

SEQ ID NO: 797253 - DNA, 15 bp, Homo sapiens
tttcacccaaagggg

SEQ ID NO: 797254 - DNA, 15 bp, Homo sapiens
ttcacccaaaggggt

SEQ ID NO: 797255 - DNA, 15 bp, Homo sapiens
tcacccaaaggggtg

SEQ ID NO: 797256 - DNA, 15 bp, Homo sapiens
cacccaaaggggtgc

SEQ ID NO: 797257 - DNA, 15 bp, Homo sapiens
acccaaaggggtgcc

SEQ ID NO: 797258 - DNA, 15 bp, Homo sapiens
cccaaaggggtgccc

SEQ ID NO: 797259 - DNA, 15 bp, Homo sapiens
ccaaaggggtgccct

SEQ ID NO: 797260 - DNA, 15 bp, Homo sapiens
caaaggggtgccctc

SEQ ID NO: 797261 - DNA, 15 bp, Homo sapiens
aaaggggtgccctct

SEQ ID NO: 797262 - DNA, 15 bp, Homo sapiens
aaggggtgccctctt

SEQ ID NO: 797263 - DNA, 15 bp, Homo sapiens
aggggtgccctcttt

SEQ ID NO: 797264 - DNA, 15 bp, Homo sapiens
ggggtgccctctttg

SEQ ID NO: 797265 - DNA, 15 bp, Homo sapiens
gggtgccctctttga

SEQ ID NO: 797266 - DNA, 15 bp, Homo sapiens
ggtgccctctttgag

SEQ ID NO: 797267 - DNA, 15 bp, Homo sapiens
gtgccctctttgagt

SEQ ID NO: 797268 - DNA, 15 bp, Homo sapiens
tgccctctttgagtt

SEQ ID NO: 797269 - DNA, 15 bp, Homo sapiens
gccctctttgagttt

SEQ ID NO: 797270 - DNA, 15 bp, Homo sapiens
ccctctttgagttta

SEQ ID NO: 797271 - DNA, 15 bp, Homo sapiens
cctctttgagtttat

SEQ ID NO: 797272 - DNA, 15 bp, Homo sapiens
ctctttgagtttatc

SEQ ID NO: 797273 - DNA, 15 bp, Homo sapiens
tctttgagtttatct

SEQ ID NO: 797274 - DNA, 15 bp, Homo sapiens
ctttgagtttatcta

SEQ ID NO: 797275 - DNA, 15 bp, Homo sapiens
tttgagtttatctac

SEQ ID NO: 797276 - DNA, 15 bp, Homo sapiens
ttgagtttatctact

SEQ ID NO: 797277 - DNA, 15 bp, Homo sapiens
tgagtttatctactc

SEQ ID NO: 797278 - DNA, 15 bp, Homo sapiens
gagtttatctactct

SEQ ID NO: 797279 - DNA, 15 bp, Homo sapiens
agtttatctactctc

SEQ ID NO: 797280 - DNA, 15 bp, Homo sapiens
gtttatctactctca

SEQ ID NO: 797281 - DNA, 15 bp, Homo sapiens
tttatctactctcac

SEQ ID NO: 797282 - DNA, 15 bp, Homo sapiens
ttatctactctcact

SEQ ID NO: 797283 - DNA, 15 bp, Homo sapiens
tatctactctcactt

SEQ ID NO: 797284 - DNA, 15 bp, Homo sapiens
atctactctcacttg

SEQ ID NO: 797285 - DNA, 15 bp, Homo sapiens
tctactctcacttgt

SEQ ID NO: 797286 - DNA, 15 bp, Homo sapiens
ctactctcacttgta

SEQ ID NO: 797287 - DNA, 15 bp, Homo sapiens
tactctcacttgtac

SEQ ID NO: 797288 - DNA, 15 bp, Homo sapiens
actctcacttgtacc

SEQ ID NO: 797289 - DNA, 15 bp, Homo sapiens
ctctcacttgtaccc

SEQ ID NO: 797290 - DNA, 15 bp, Homo sapiens
tctcacttgtaccct

SEQ ID NO: 797291 - DNA, 15 bp, Homo sapiens
ctcacttgtaccctg

SEQ ID NO: 797292 - DNA, 15 bp, Homo sapiens
tcacttgtaccctgt

SEQ ID NO: 797293 - DNA, 15 bp, Homo sapiens
cacttgtaccctgtg

SEQ ID NO: 797294 - DNA, 15 bp, Homo sapiens
acttgtaccctgtgc

SEQ ID NO: 797295 - DNA, 15 bp, Homo sapiens
cttgtaccctgtgct

SEQ ID NO: 797296 - DNA, 15 bp, Homo sapiens
ttgtaccctgtgctt

SEQ ID NO: 797297 - DNA, 15 bp, Homo sapiens
tgtaccctgtgcttt

SEQ ID NO: 797298 - DNA, 15 bp, Homo sapiens
gtaccctgtgctttc

SEQ ID NO: 797299 - DNA, 15 bp, Homo sapiens
taccctgtgctttca

SEQ ID NO: 797300 - DNA, 15 bp, Homo sapiens
accctgtgctttcac

SEQ ID NO: 797301 - DNA, 15 bp, Homo sapiens
ccctgtgctttcact

SEQ ID NO: 797302 - DNA, 15 bp, Homo sapiens
cctgtgctttcactt

SEQ ID NO: 797303 - DNA, 15 bp, Homo sapiens
ctgtgctttcacttt

SEQ ID NO: 797304 - DNA, 15 bp, Homo sapiens
tgtgctttcactttc

SEQ ID NO: 797305 - DNA, 15 bp, Homo sapiens
gtgctttcactttcc

SEQ ID NO: 797306 - DNA, 15 bp, Homo sapiens
tgctttcactttcct

SEQ ID NO: 797307 - DNA, 15 bp, Homo sapiens
gctttcactttcctg

SEQ ID NO: 797308 - DNA, 15 bp, Homo sapiens
ctttcactttcctgt

SEQ ID NO: 797309 - DNA, 15 bp, Homo sapiens
tttcactttcctgta

SEQ ID NO: 797310 - DNA, 15 bp, Homo sapiens
ttcactttcctgtaa

SEQ ID NO: 797311 - DNA, 15 bp, Homo sapiens
tcactttcctgtaaa

SEQ ID NO: 797312 - DNA, 15 bp, Homo sapiens
cactttcctgtaaac

SEQ ID NO: 797313 - DNA, 15 bp, Homo sapiens
actttcctgtaaact

SEQ ID NO: 797314 - DNA, 15 bp, Homo sapiens
ctttcctgtaaactc

SEQ ID NO: 797315 - DNA, 15 bp, Homo sapiens
tttcctgtaaactca

SEQ ID NO: 797316 - DNA, 15 bp, Homo sapiens
ttcctgtaaactcat

SEQ ID NO: 797317 - DNA, 15 bp, Homo sapiens
tcctgtaaactcatt

SEQ ID NO: 797318 - DNA, 15 bp, Homo sapiens
cctgtaaactcatta

SEQ ID NO: 797319 - DNA, 15 bp, Homo sapiens
ctgtaaactcattat

SEQ ID NO: 797320 - DNA, 15 bp, Homo sapiens
tgtaaactcattatc

SEQ ID NO: 797321 - DNA, 15 bp, Homo sapiens
gtaaactcattatct

SEQ ID NO: 797322 - DNA, 15 bp, Homo sapiens
taaactcattatctg

SEQ ID NO: 797323 - DNA, 15 bp, Homo sapiens
aaactcattatctga

SEQ ID NO: 797324 - DNA, 15 bp, Homo sapiens
aactcattatctgaa

SEQ ID NO: 797325 - DNA, 15 bp, Homo sapiens
actcattatctgaac

SEQ ID NO: 797326 - DNA, 15 bp, Homo sapiens
ctcattatctgaacc

SEQ ID NO: 797327 - DNA, 15 bp, Homo sapiens
tcattatctgaaccc

SEQ ID NO: 797328 - DNA, 15 bp, Homo sapiens
cattatctgaacccc

SEQ ID NO: 797329 - DNA, 15 bp, Homo sapiens
attatctgaacccca

SEQ ID NO: 797330 - DNA, 15 bp, Homo sapiens
ttatctgaaccccac

SEQ ID NO: 797331 - DNA, 15 bp, Homo sapiens
tatctgaaccccaca

SEQ ID NO: 797332 - DNA, 15 bp, Homo sapiens
atctgaaccccacac

SEQ ID NO: 797333 - DNA, 15 bp, Homo sapiens
tctgaaccccacacc

SEQ ID NO: 797334 - DNA, 15 bp, Homo sapiens
ctgaaccccacaccc

SEQ ID NO: 797335 - DNA, 15 bp, Homo sapiens
tgaaccccacaccca

SEQ ID NO: 797336 - DNA, 15 bp, Homo sapiens
gaaccccacacccac

SEQ ID NO: 797337 - DNA, 15 bp, Homo sapiens
aaccccacacccacc

SEQ ID NO: 797338 - DNA, 15 bp, Homo sapiens
accccacacccaccc

SEQ ID NO: 797339 - DNA, 15 bp, Homo sapiens
ccccacacccaccct

SEQ ID NO: 797340 - DNA, 15 bp, Homo sapiens
cccacacccaccctg

SEQ ID NO: 797341 - DNA, 15 bp, Homo sapiens
ccacacccaccctgg

SEQ ID NO: 797342 - DNA, 15 bp, Homo sapiens
cacacccaccctggc

SEQ ID NO: 797343 - DNA, 15 bp, Homo sapiens
acacccaccctggcc

SEQ ID NO: 797344 - DNA, 15 bp, Homo sapiens
cacccaccctggccc

SEQ ID NO: 797345 - DNA, 15 bp, Homo sapiens
acccaccctggccct

SEQ ID NO: 797346 - DNA, 15 bp, Homo sapiens
cccaccctggccctt

SEQ ID NO: 797347 - DNA, 15 bp, Homo sapiens
ccaccctggcccttc

SEQ ID NO: 797348 - DNA, 15 bp, Homo sapiens
caccctggcccttct

SEQ ID NO: 797349 - DNA, 15 bp, Homo sapiens
accctggcccttctg

SEQ ID NO: 797350 - DNA, 15 bp, Homo sapiens
ccctggcccttctga

SEQ ID NO: 797351 - DNA, 15 bp, Homo sapiens
cctggcccttctgaa

SEQ ID NO: 797352 - DNA, 15 bp, Homo sapiens
ctggcccttctgaaa

SEQ ID NO: 797353 - DNA, 15 bp, Homo sapiens
tggcccttctgaaat

SEQ ID NO: 797354 - DNA, 15 bp, Homo sapiens
ggcccttctgaaatt

SEQ ID NO: 797355 - DNA, 15 bp, Homo sapiens
gcccttctgaaattt

SEQ ID NO: 797356 - DNA, 15 bp, Homo sapiens
cccttctgaaatttt

SEQ ID NO: 797357 - DNA, 15 bp, Homo sapiens
ccttctgaaattttt

SEQ ID NO: 797358 - DNA, 15 bp, Homo sapiens
cttctgaaatttttg

SEQ ID NO: 797359 - DNA, 15 bp, Homo sapiens
ttctgaaatttttgt

SEQ ID NO: 797360 - DNA, 15 bp, Homo sapiens
tctgaaatttttgta

SEQ ID NO: 797361 - DNA, 15 bp, Homo sapiens
ctgaaatttttgtaa

SEQ ID NO: 797362 - DNA, 15 bp, Homo sapiens
tgaaatttttgtaaa

SEQ ID NO: 797363 - DNA, 15 bp, Homo sapiens
gaaatttttgtaaaa

SEQ ID NO: 797364 - DNA, 15 bp, Homo sapiens
aaatttttgtaaaat

SEQ ID NO: 797365 - DNA, 15 bp, Homo sapiens
aatttttgtaaaatt

SEQ ID NO: 797366 - DNA, 15 bp, Homo sapiens
atttttgtaaaattg

SEQ ID NO: 797367 - DNA, 15 bp, Homo sapiens
tttttgtaaaattga

SEQ ID NO: 797368 - DNA, 15 bp, Homo sapiens
ttttgtaaaattgaa

SEQ ID NO: 797369 - DNA, 15 bp, Homo sapiens
tttgtaaaattgaaa

SEQ ID NO: 797370 - DNA, 15 bp, Homo sapiens
ttgtaaaattgaaag

SEQ ID NO: 797371 - DNA, 15 bp, Homo sapiens
tgtaaaattgaaagg

SEQ ID NO: 797372 - DNA, 15 bp, Homo sapiens
gtaaaattgaaagga

SEQ ID NO: 797373 - DNA, 15 bp, Homo sapiens
taaaattgaaaggaa

SEQ ID NO: 797374 - DNA, 15 bp, Homo sapiens
aaaattgaaaggaac

SEQ ID NO: 797375 - DNA, 15 bp, Homo sapiens
aaattgaaaggaact

SEQ ID NO: 797376 - DNA, 15 bp, Homo sapiens
aattgaaaggaactg

SEQ ID NO: 797377 - DNA, 15 bp, Homo sapiens
attgaaaggaactgt

SEQ ID NO: 797378 - DNA, 15 bp, Homo sapiens
ttgaaaggaactgtt

SEQ ID NO: 797379 - DNA, 15 bp, Homo sapiens
tgaaaggaactgttt

SEQ ID NO: 797380 - DNA, 15 bp, Homo sapiens
gaaaggaactgtttt

SEQ ID NO: 797381 - DNA, 15 bp, Homo sapiens
aaaggaactgttttt

SEQ ID NO: 797382 - DNA, 15 bp, Homo sapiens
aaggaactgtttttc

SEQ ID NO: 797383 - DNA, 15 bp, Homo sapiens
aggaactgtttttcc

SEQ ID NO: 797384 - DNA, 15 bp, Homo sapiens
ggaactgtttttcct

SEQ ID NO: 797385 - DNA, 15 bp, Homo sapiens
gaactgtttttcctg

SEQ ID NO: 797386 - DNA, 15 bp, Homo sapiens
aactgtttttcctga

SEQ ID NO: 797387 - DNA, 15 bp, Homo sapiens
actgtttttcctgat

SEQ ID NO: 797388 - DNA, 15 bp, Homo sapiens
ctgtttttcctgatg

SEQ ID NO: 797389 - DNA, 15 bp, Homo sapiens
tgtttttcctgatga

SEQ ID NO: 797390 - DNA, 15 bp, Homo sapiens
gtttttcctgatgac

SEQ ID NO: 797391 - DNA, 15 bp, Homo sapiens
tttttcctgatgaca

SEQ ID NO: 797392 - DNA, 15 bp, Homo sapiens
ttttcctgatgacaa

SEQ ID NO: 797393 - DNA, 15 bp, Homo sapiens
tttcctgatgacaag

SEQ ID NO: 797394 - DNA, 15 bp, Homo sapiens
ttcctgatgacaagt

SEQ ID NO: 797395 - DNA, 15 bp, Homo sapiens
tcctgatgacaagtg

SEQ ID NO: 797396 - DNA, 15 bp, Homo sapiens
cctgatgacaagtga

SEQ ID NO: 797397 - DNA, 15 bp, Homo sapiens
ctgatgacaagtgag

SEQ ID NO: 797398 - DNA, 15 bp, Homo sapiens
tgatgacaagtgagg

SEQ ID NO: 797399 - DNA, 15 bp, Homo sapiens
gatgacaagtgaggc

SEQ ID NO: 797400 - DNA, 15 bp, Homo sapiens
atgacaagtgaggct

SEQ ID NO: 797401 - DNA, 15 bp, Homo sapiens
tgacaagtgaggctt

SEQ ID NO: 797402 - DNA, 15 bp, Homo sapiens
gacaagtgaggcttc

SEQ ID NO: 797403 - DNA, 15 bp, Homo sapiens
acaagtgaggcttca

SEQ ID NO: 797404 - DNA, 15 bp, Homo sapiens
caagtgaggcttcat

SEQ ID NO: 797405 - DNA, 15 bp, Homo sapiens
aagtgaggcttcata

SEQ ID NO: 797406 - DNA, 15 bp, Homo sapiens
agtgaggcttcatat

SEQ ID NO: 797407 - DNA, 15 bp, Homo sapiens
gtgaggcttcatatg

SEQ ID NO: 797408 - DNA, 15 bp, Homo sapiens
tgaggcttcatatga

SEQ ID NO: 797409 - DNA, 15 bp, Homo sapiens
gaggcttcatatgaa

SEQ ID NO: 797410 - DNA, 15 bp, Homo sapiens
aggcttcatatgaaa

SEQ ID NO: 797411 - DNA, 15 bp, Homo sapiens
ggcttcatatgaaag

SEQ ID NO: 797412 - DNA, 15 bp, Homo sapiens
gcttcatatgaaagg

SEQ ID NO: 797413 - DNA, 15 bp, Homo sapiens
cttcatatgaaagga

SEQ ID NO: 797414 - DNA, 15 bp, Homo sapiens
ttcatatgaaaggag

SEQ ID NO: 797415 - DNA, 15 bp, Homo sapiens
tcatatgaaaggaga

SEQ ID NO: 797416 - DNA, 15 bp, Homo sapiens
catatgaaaggagat

SEQ ID NO: 797417 - DNA, 15 bp, Homo sapiens
atatgaaaggagatt

SEQ ID NO: 797418 - DNA, 15 bp, Homo sapiens
tatgaaaggagattt

SEQ ID NO: 797419 - DNA, 15 bp, Homo sapiens
atgaaaggagattta

SEQ ID NO: 797420 - DNA, 15 bp, Homo sapiens
tgaaaggagatttat

SEQ ID NO: 797421 - DNA, 15 bp, Homo sapiens
gaaaggagatttatg

SEQ ID NO: 797422 - DNA, 15 bp, Homo sapiens
aaaggagatttatga

SEQ ID NO: 797423 - DNA, 15 bp, Homo sapiens
aaggagatttatgat

SEQ ID NO: 797424 - DNA, 15 bp, Homo sapiens
aggagatttatgata

SEQ ID NO: 797425 - DNA, 15 bp, Homo sapiens
ggagatttatgatag

SEQ ID NO: 797426 - DNA, 15 bp, Homo sapiens
gagatttatgatagg

SEQ ID NO: 797427 - DNA, 15 bp, Homo sapiens
agatttatgataggt

SEQ ID NO: 797428 - DNA, 15 bp, Homo sapiens
gatttatgataggtt

SEQ ID NO: 797429 - DNA, 15 bp, Homo sapiens
atttatgataggttt

SEQ ID NO: 797430 - DNA, 15 bp, Homo sapiens
tttatgataggtttt

SEQ ID NO: 797431 - DNA, 15 bp, Homo sapiens
ttatgataggttttc

SEQ ID NO: 797432 - DNA, 15 bp, Homo sapiens
tatgataggttttca

SEQ ID NO: 797433 - DNA, 15 bp, Homo sapiens
atgataggttttcat

SEQ ID NO: 797434 - DNA, 15 bp, Homo sapiens
tgataggttttcatg

SEQ ID NO: 797435 - DNA, 15 bp, Homo sapiens
gataggttttcatga

SEQ ID NO: 797436 - DNA, 15 bp, Homo sapiens
ataggttttcatgag

SEQ ID NO: 797437 - DNA, 15 bp, Homo sapiens
taggttttcatgagc

SEQ ID NO: 797438 - DNA, 15 bp, Homo sapiens
aggttttcatgagca

SEQ ID NO: 797439 - DNA, 15 bp, Homo sapiens
ggttttcatgagcaa

SEQ ID NO: 797440 - DNA, 15 bp, Homo sapiens
gttttcatgagcaaa

SEQ ID NO: 797441 - DNA, 15 bp, Homo sapiens
ttttcatgagcaaaa

SEQ ID NO: 797442 - DNA, 15 bp, Homo sapiens
tttcatgagcaaaaa

SEQ ID NO: 797443 - DNA, 15 bp, Homo sapiens
ttcatgagcaaaaat

SEQ ID NO: 797444 - DNA, 15 bp, Homo sapiens
tcatgagcaaaaatt

SEQ ID NO: 797445 - DNA, 15 bp, Homo sapiens
catgagcaaaaattg

SEQ ID NO: 797446 - DNA, 15 bp, Homo sapiens
atgagcaaaaattgt

SEQ ID NO: 797447 - DNA, 15 bp, Homo sapiens
tgagcaaaaattgtg

SEQ ID NO: 797448 - DNA, 15 bp, Homo sapiens
gagcaaaaattgtgt

SEQ ID NO: 797449 - DNA, 15 bp, Homo sapiens
agcaaaaattgtgta

SEQ ID NO: 797450 - DNA, 15 bp, Homo sapiens
gcaaaaattgtgtag

SEQ ID NO: 797451 - DNA, 15 bp, Homo sapiens
caaaaattgtgtagt

SEQ ID NO: 797452 - DNA, 15 bp, Homo sapiens
aaaaattgtgtagtt

SEQ ID NO: 797453 - DNA, 15 bp, Homo sapiens
aaaattgtgtagttt

SEQ ID NO: 797454 - DNA, 15 bp, Homo sapiens
aaattgtgtagtttt

SEQ ID NO: 797455 - DNA, 15 bp, Homo sapiens
aattgtgtagttttc

SEQ ID NO: 797456 - DNA, 15 bp, Homo sapiens
attgtgtagttttct

SEQ ID NO: 797457 - DNA, 15 bp, Homo sapiens
ttgtgtagttttcta

SEQ ID NO: 797458 - DNA, 15 bp, Homo sapiens
tgtgtagttttctaa

SEQ ID NO: 797459 - DNA, 15 bp, Homo sapiens
gtgtagttttctaaa

SEQ ID NO: 797460 - DNA, 15 bp, Homo sapiens
tgtagttttctaaag

SEQ ID NO: 797461 - DNA, 15 bp, Homo sapiens
gtagttttctaaaga

SEQ ID NO: 797462 - DNA, 15 bp, Homo sapiens
tagttttctaaagat

SEQ ID NO: 797463 - DNA, 15 bp, Homo sapiens
agttttctaaagatt

SEQ ID NO: 797464 - DNA, 15 bp, Homo sapiens
gttttctaaagattt

SEQ ID NO: 797465 - DNA, 15 bp, Homo sapiens
ttttctaaagatttc

SEQ ID NO: 797466 - DNA, 15 bp, Homo sapiens
tttctaaagatttca

SEQ ID NO: 797467 - DNA, 15 bp, Homo sapiens
ttctaaagatttcat

SEQ ID NO: 797468 - DNA, 15 bp, Homo sapiens
tctaaagatttcata

SEQ ID NO: 797469 - DNA, 15 bp, Homo sapiens
ctaaagatttcatac

SEQ ID NO: 797470 - DNA, 15 bp, Homo sapiens
taaagatttcataca

SEQ ID NO: 797471 - DNA, 15 bp, Homo sapiens
aaagatttcatacat

SEQ ID NO: 797472 - DNA, 15 bp, Homo sapiens
aagatttcatacata

SEQ ID NO: 797473 - DNA, 15 bp, Homo sapiens
agatttcatacatat

SEQ ID NO: 797474 - DNA, 15 bp, Homo sapiens
gatttcatacatata

SEQ ID NO: 797475 - DNA, 15 bp, Homo sapiens
atttcatacatatac

SEQ ID NO: 797476 - DNA, 15 bp, Homo sapiens
tttcatacatatacc

SEQ ID NO: 797477 - DNA, 15 bp, Homo sapiens
ttcatacatataccc

SEQ ID NO: 797478 - DNA, 15 bp, Homo sapiens
tcatacatataccct

SEQ ID NO: 797479 - DNA, 15 bp, Homo sapiens
catacatataccctt

SEQ ID NO: 797480 - DNA, 15 bp, Homo sapiens
atacatatacccttt

SEQ ID NO: 797481 - DNA, 15 bp, Homo sapiens
tacatatacccttta

SEQ ID NO: 797482 - DNA, 15 bp, Homo sapiens
acatataccctttaa

SEQ ID NO: 797483 - DNA, 15 bp, Homo sapiens
catataccctttaaa

SEQ ID NO: 797484 - DNA, 15 bp, Homo sapiens
atataccctttaaaa

SEQ ID NO: 797485 - DNA, 15 bp, Homo sapiens
tataccctttaaaag

SEQ ID NO: 797486 - DNA, 15 bp, Homo sapiens
ataccctttaaaagt

SEQ ID NO: 797487 - DNA, 15 bp, Homo sapiens
taccctttaaaagtt

SEQ ID NO: 797488 - DNA, 15 bp, Homo sapiens
accctttaaaagtta

SEQ ID NO: 797489 - DNA, 15 bp, Homo sapiens
ccctttaaaagttat

SEQ ID NO: 797490 - DNA, 15 bp, Homo sapiens
cctttaaaagttata

SEQ ID NO: 797491 - DNA, 15 bp, Homo sapiens
ctttaaaagttatat

SEQ ID NO: 797492 - DNA, 15 bp, Homo sapiens
tttaaaagttatata

SEQ ID NO: 797493 - DNA, 15 bp, Homo sapiens
ttaaaagttatatat

SEQ ID NO: 797494 - DNA, 15 bp, Homo sapiens
taaaagttatatatg

SEQ ID NO: 797495 - DNA, 15 bp, Homo sapiens
aaaagttatatatgt

SEQ ID NO: 797496 - DNA, 15 bp, Homo sapiens
aaagttatatatgtt

SEQ ID NO: 797497 - DNA, 15 bp, Homo sapiens
aagttatatatgttt

SEQ ID NO: 797498 - DNA, 15 bp, Homo sapiens
agttatatatgttta

SEQ ID NO: 797499 - DNA, 15 bp, Homo sapiens
gttatatatgtttat

SEQ ID NO: 797500 - DNA, 15 bp, Homo sapiens
ttatatatgtttatt

SEQ ID NO: 797501 - DNA, 15 bp, Homo sapiens
tatatatgtttattt

SEQ ID NO: 797502 - DNA, 15 bp, Homo sapiens
atatatgtttattta

SEQ ID NO: 797503 - DNA, 15 bp, Homo sapiens
tatatgtttatttat

SEQ ID NO: 797504 - DNA, 15 bp, Homo sapiens
atatgtttatttata

SEQ ID NO: 797505 - DNA, 15 bp, Homo sapiens
tatgtttatttatat

SEQ ID NO: 797506 - DNA, 15 bp, Homo sapiens
atgtttatttatata

SEQ ID NO: 797507 - DNA, 15 bp, Homo sapiens
tgtttatttatatat

SEQ ID NO: 797508 - DNA, 15 bp, Homo sapiens
gtttatttatatatt

SEQ ID NO: 797509 - DNA, 15 bp, Homo sapiens
tttatttatatatta

SEQ ID NO: 797510 - DNA, 15 bp, Homo sapiens
ttatttatatattag

SEQ ID NO: 797511 - DNA, 15 bp, Homo sapiens
tatttatatattaga

SEQ ID NO: 797512 - DNA, 15 bp, Homo sapiens
atttatatattagac

SEQ ID NO: 797513 - DNA, 15 bp, Homo sapiens
tttatatattagaca

SEQ ID NO: 797514 - DNA, 15 bp, Homo sapiens
ttatatattagacat

SEQ ID NO: 797515 - DNA, 15 bp, Homo sapiens
tatatattagacata

SEQ ID NO: 797516 - DNA, 15 bp, Homo sapiens
atatattagacatat

SEQ ID NO: 797517 - DNA, 15 bp, Homo sapiens
tatattagacatata

SEQ ID NO: 797518 - DNA, 15 bp, Homo sapiens
atattagacatatat

SEQ ID NO: 797519 - DNA, 15 bp, Homo sapiens
tattagacatatata

SEQ ID NO: 797520 - DNA, 15 bp, Homo sapiens
attagacatatatat

SEQ ID NO: 797521 - DNA, 15 bp, Homo sapiens
ttagacatatatata

SEQ ID NO: 797522 - DNA, 15 bp, Homo sapiens
tagacatatatataa

SEQ ID NO: 797523 - DNA, 15 bp, Homo sapiens
agacatatatataac

SEQ ID NO: 797524 - DNA, 15 bp, Homo sapiens
gacatatatataact

SEQ ID NO: 797525 - DNA, 15 bp, Homo sapiens
acatatatataactt

SEQ ID NO: 797526 - DNA, 15 bp, Homo sapiens
catatatataacttg

SEQ ID NO: 797527 - DNA, 15 bp, Homo sapiens
atatatataacttgg

SEQ ID NO: 797528 - DNA, 15 bp, Homo sapiens
tatatataacttgga

SEQ ID NO: 797529 - DNA, 15 bp, Homo sapiens
atatataacttggac

SEQ ID NO: 797530 - DNA, 15 bp, Homo sapiens
tatataacttggact

SEQ ID NO: 797531 - DNA, 15 bp, Homo sapiens
atataacttggactt

SEQ ID NO: 797532 - DNA, 15 bp, Homo sapiens
tataacttggacttt

SEQ ID NO: 797533 - DNA, 15 bp, Homo sapiens
ataacttggactttt

SEQ ID NO: 797534 - DNA, 15 bp, Homo sapiens
taacttggactttta

SEQ ID NO: 797535 - DNA, 15 bp, Homo sapiens
aacttggacttttac

SEQ ID NO: 797536 - DNA, 15 bp, Homo sapiens
acttggacttttaca

SEQ ID NO: 797537 - DNA, 15 bp, Homo sapiens
cttggacttttacat

SEQ ID NO: 797538 - DNA, 15 bp, Homo sapiens
ttggacttttacatt

SEQ ID NO: 797539 - DNA, 15 bp, Homo sapiens
tggacttttacattt

SEQ ID NO: 797540 - DNA, 15 bp, Homo sapiens
ggacttttacatttt

SEQ ID NO: 797541 - DNA, 15 bp, Homo sapiens
gacttttacattttt

SEQ ID NO: 797542 - DNA, 15 bp, Homo sapiens
acttttacattttta

SEQ ID NO: 797543 - DNA, 15 bp, Homo sapiens
cttttacatttttaa

SEQ ID NO: 797544 - DNA, 15 bp, Homo sapiens
ttttacatttttaac

SEQ ID NO: 797545 - DNA, 15 bp, Homo sapiens
tttacatttttaaca

SEQ ID NO: 797546 - DNA, 15 bp, Homo sapiens
ttacatttttaacaa

SEQ ID NO: 797547 - DNA, 15 bp, Homo sapiens
tacatttttaacaag

SEQ ID NO: 797548 - DNA, 15 bp, Homo sapiens
acatttttaacaagc

SEQ ID NO: 797549 - DNA, 15 bp, Homo sapiens
catttttaacaagca

SEQ ID NO: 797550 - DNA, 15 bp, Homo sapiens
atttttaacaagcac

SEQ ID NO: 797551 - DNA, 15 bp, Homo sapiens
tttttaacaagcact

SEQ ID NO: 797552 - DNA, 15 bp, Homo sapiens
ttttaacaagcacta

SEQ ID NO: 797553 - DNA, 15 bp, Homo sapiens
tttaacaagcactat

SEQ ID NO: 797554 - DNA, 15 bp, Homo sapiens
ttaacaagcactatt

SEQ ID NO: 797555 - DNA, 15 bp, Homo sapiens
taacaagcactatta

SEQ ID NO: 797556 - DNA, 15 bp, Homo sapiens
aacaagcactattaa

SEQ ID NO: 797557 - DNA, 15 bp, Homo sapiens
acaagcactattaaa

SEQ ID NO: 797558 - DNA, 15 bp, Homo sapiens
caagcactattaaaa

SEQ ID NO: 797559 - DNA, 15 bp, Homo sapiens
aagcactattaaaaa

SEQ ID NO: 797560 - DNA, 15 bp, Homo sapiens
agcactattaaaaat

SEQ ID NO: 797561 - DNA, 15 bp, Homo sapiens
gcactattaaaaatt

SEQ ID NO: 797562 - DNA, 15 bp, Homo sapiens
cactattaaaaattg

SEQ ID NO: 797563 - DNA, 15 bp, Homo sapiens
actattaaaaattga

SEQ ID NO: 797564 - DNA, 15 bp, Homo sapiens
ctattaaaaattgaa

SEQ ID NO: 797565 - DNA, 15 bp, Homo sapiens
tattaaaaattgaat

SEQ ID NO: 797566 - DNA, 15 bp, Homo sapiens
attaaaaattgaatg

SEQ ID NO: 797567 - DNA, 15 bp, Homo sapiens
ttaaaaattgaatgt

SEQ ID NO: 797568 - DNA, 15 bp, Homo sapiens
taaaaattgaatgta

SEQ ID NO: 797569 - DNA, 15 bp, Homo sapiens
aaaaattgaatgtaa

SEQ ID NO: 797570 - DNA, 15 bp, Homo sapiens
aaaattgaatgtaaa

SEQ ID NO: 797571 - DNA, 15 bp, Homo sapiens
aaattgaatgtaaac

SEQ ID NO: 797572 - DNA, 15 bp, Homo sapiens
aattgaatgtaaact

SEQ ID NO: 797573 - DNA, 15 bp, Homo sapiens
attgaatgtaaactt

SEQ ID NO: 797574 - DNA, 15 bp, Homo sapiens
ttgaatgtaaacttg

SEQ ID NO: 797575 - DNA, 15 bp, Homo sapiens
tgaatgtaaacttga

SEQ ID NO: 797576 - DNA, 15 bp, Homo sapiens
gaatgtaaacttgaa

SEQ ID NO: 797577 - DNA, 15 bp, Homo sapiens
aatgtaaacttgaaa

SEQ ID NO: 797578 - DNA, 15 bp, Homo sapiens
atgtaaacttgaaat

SEQ ID NO: 797579 - DNA, 15 bp, Homo sapiens
tgtaaacttgaaatt

SEQ ID NO: 797580 - DNA, 15 bp, Homo sapiens
gtaaacttgaaattt

SEQ ID NO: 797581 - DNA, 15 bp, Homo sapiens
taaacttgaaattta

SEQ ID NO: 797582 - DNA, 15 bp, Homo sapiens
aaacttgaaatttaa

SEQ ID NO: 797583 - DNA, 15 bp, Homo sapiens
aacttgaaatttaat

SEQ ID NO: 797584 - DNA, 15 bp, Homo sapiens
acttgaaatttaatg

SEQ ID NO: 797585 - DNA, 15 bp, Homo sapiens
cttgaaatttaatgc

SEQ ID NO: 797586 - DNA, 15 bp, Homo sapiens
ttgaaatttaatgca

SEQ ID NO: 797587 - DNA, 15 bp, Homo sapiens
tgaaatttaatgcaa

SEQ ID NO: 797588 - DNA, 15 bp, Homo sapiens
gaaatttaatgcaaa

SEQ ID NO: 797589 - DNA, 15 bp, Homo sapiens
aaatttaatgcaaag

SEQ ID NO: 797590 - DNA, 15 bp, Homo sapiens
aatttaatgcaaagg

SEQ ID NO: 797591 - DNA, 15 bp, Homo sapiens
atttaatgcaaagga

SEQ ID NO: 797592 - DNA, 15 bp, Homo sapiens
tttaatgcaaaggaa

SEQ ID NO: 797593 - DNA, 15 bp, Homo sapiens
ttaatgcaaaggaaa

SEQ ID NO: 797594 - DNA, 15 bp, Homo sapiens
taatgcaaaggaaat

SEQ ID NO: 797595 - DNA, 15 bp, Homo sapiens
aatgcaaaggaaatt

SEQ ID NO: 797596 - DNA, 15 bp, Homo sapiens
atgcaaaggaaattt

SEQ ID NO: 797597 - DNA, 15 bp, Homo sapiens
tgcaaaggaaattta

SEQ ID NO: 797598 - DNA, 15 bp, Homo sapiens
gcaaaggaaatttag

SEQ ID NO: 797599 - DNA, 15 bp, Homo sapiens
caaaggaaatttagt

SEQ ID NO: 797600 - DNA, 15 bp, Homo sapiens
aaaggaaatttagtt

SEQ ID NO: 797601 - DNA, 15 bp, Homo sapiens
aaggaaatttagttt

SEQ ID NO: 797602 - DNA, 15 bp, Homo sapiens
aggaaatttagttta

SEQ ID NO: 797603 - DNA, 15 bp, Homo sapiens
ggaaatttagtttaa

SEQ ID NO: 797604 - DNA, 15 bp, Homo sapiens
gaaatttagtttaaa

SEQ ID NO: 797605 - DNA, 15 bp, Homo sapiens
aaatttagtttaaat

SEQ ID NO: 797606 - DNA, 15 bp, Homo sapiens
aatttagtttaaatc

SEQ ID NO: 797607 - DNA, 15 bp, Homo sapiens
atttagtttaaatct

SEQ ID NO: 797608 - DNA, 15 bp, Homo sapiens
tttagtttaaatctg

SEQ ID NO: 797609 - DNA, 15 bp, Homo sapiens
ttagtttaaatctgt

SEQ ID NO: 797610 - DNA, 15 bp, Homo sapiens
tagtttaaatctgtc

SEQ ID NO: 797611 - DNA, 15 bp, Homo sapiens
agtttaaatctgtcc

SEQ ID NO: 797612 - DNA, 15 bp, Homo sapiens
gtttaaatctgtcca

SEQ ID NO: 797613 - DNA, 15 bp, Homo sapiens
tttaaatctgtccac

SEQ ID NO: 797614 - DNA, 15 bp, Homo sapiens
ttaaatctgtccact

SEQ ID NO: 797615 - DNA, 15 bp, Homo sapiens
taaatctgtccacta

SEQ ID NO: 797616 - DNA, 15 bp, Homo sapiens
aaatctgtccactaa

SEQ ID NO: 797617 - DNA, 15 bp, Homo sapiens
aatctgtccactaaa

SEQ ID NO: 797618 - DNA, 15 bp, Homo sapiens
atctgtccactaaag

SEQ ID NO: 797619 - DNA, 15 bp, Homo sapiens
tctgtccactaaaga

SEQ ID NO: 797620 - DNA, 15 bp, Homo sapiens
ctgtccactaaagaa

SEQ ID NO: 797621 - DNA, 15 bp, Homo sapiens
tgtccactaaagaat

SEQ ID NO: 797622 - DNA, 15 bp, Homo sapiens
gtccactaaagaatc

SEQ ID NO: 797623 - DNA, 15 bp, Homo sapiens
tccactaaagaatca

SEQ ID NO: 797624 - DNA, 15 bp, Homo sapiens
ccactaaagaatcat

SEQ ID NO: 797625 - DNA, 15 bp, Homo sapiens
cactaaagaatcatt

SEQ ID NO: 797626 - DNA, 15 bp, Homo sapiens
actaaagaatcattc

SEQ ID NO: 797627 - DNA, 15 bp, Homo sapiens
ctaaagaatcattca

SEQ ID NO: 797628 - DNA, 15 bp, Homo sapiens
taaagaatcattcat

SEQ ID NO: 797629 - DNA, 15 bp, Homo sapiens
aaagaatcattcatt

SEQ ID NO: 797630 - DNA, 15 bp, Homo sapiens
aagaatcattcattt

SEQ ID NO: 797631 - DNA, 15 bp, Homo sapiens
agaatcattcatttg

SEQ ID NO: 797632 - DNA, 15 bp, Homo sapiens
gaatcattcatttgg

SEQ ID NO: 797633 - DNA, 15 bp, Homo sapiens
aatcattcatttggc

SEQ ID NO: 797634 - DNA, 15 bp, Homo sapiens
atcattcatttggct

SEQ ID NO: 797635 - DNA, 15 bp, Homo sapiens
tcattcatttggcta

SEQ ID NO: 797636 - DNA, 15 bp, Homo sapiens
cattcatttggctaa

SEQ ID NO: 797637 - DNA, 15 bp, Homo sapiens
attcatttggctaag

SEQ ID NO: 797638 - DNA, 15 bp, Homo sapiens
ttcatttggctaagt

SEQ ID NO: 797639 - DNA, 15 bp, Homo sapiens
tcatttggctaagtc

SEQ ID NO: 797640 - DNA, 15 bp, Homo sapiens
catttggctaagtct

SEQ ID NO: 797641 - DNA, 15 bp, Homo sapiens
atttggctaagtctt

SEQ ID NO: 797642 - DNA, 15 bp, Homo sapiens
tttggctaagtcttc

SEQ ID NO: 797643 - DNA, 15 bp, Homo sapiens
ttggctaagtcttct

SEQ ID NO: 797644 - DNA, 15 bp, Homo sapiens
tggctaagtcttctt

SEQ ID NO: 797645 - DNA, 15 bp, Homo sapiens
ggctaagtcttcttt

SEQ ID NO: 797646 - DNA, 15 bp, Homo sapiens
gctaagtcttctttt

SEQ ID NO: 797647 - DNA, 15 bp, Homo sapiens
ctaagtcttctttta

SEQ ID NO: 797648 - DNA, 15 bp, Homo sapiens
taagtcttcttttaa

SEQ ID NO: 797649 - DNA, 15 bp, Homo sapiens
aagtcttcttttaat

SEQ ID NO: 797650 - DNA, 15 bp, Homo sapiens
agtcttcttttaatc

SEQ ID NO: 797651 - DNA, 15 bp, Homo sapiens
gtcttcttttaatct

SEQ ID NO: 797652 - DNA, 15 bp, Homo sapiens
tcttcttttaatcta

SEQ ID NO: 797653 - DNA, 15 bp, Homo sapiens
cttcttttaatctag

SEQ ID NO: 797654 - DNA, 15 bp, Homo sapiens
ttcttttaatctaga

SEQ ID NO: 797655 - DNA, 15 bp, Homo sapiens
tcttttaatctagat

SEQ ID NO: 797656 - DNA, 15 bp, Homo sapiens
cttttaatctagatt

SEQ ID NO: 797657 - DNA, 15 bp, Homo sapiens
ttttaatctagattt

SEQ ID NO: 797658 - DNA, 15 bp, Homo sapiens
tttaatctagatttt

SEQ ID NO: 797659 - DNA, 15 bp, Homo sapiens
ttaatctagattttt

SEQ ID NO: 797660 - DNA, 15 bp, Homo sapiens
taatctagatttttt

SEQ ID NO: 797661 - DNA, 15 bp, Homo sapiens
aatctagattttttt

SEQ ID NO: 797662 - DNA, 15 bp, Homo sapiens
atctagatttttttc

SEQ ID NO: 797663 - DNA, 15 bp, Homo sapiens
tctagatttttttct

SEQ ID NO: 797664 - DNA, 15 bp, Homo sapiens
ctagatttttttctt

SEQ ID NO: 797665 - DNA, 15 bp, Homo sapiens
tagatttttttcttc

SEQ ID NO: 797666 - DNA, 15 bp, Homo sapiens
agatttttttcttca

SEQ ID NO: 797667 - DNA, 15 bp, Homo sapiens
gatttttttcttcaa

SEQ ID NO: 797668 - DNA, 15 bp, Homo sapiens
atttttttcttcaat

SEQ ID NO: 797669 - DNA, 15 bp, Homo sapiens
tttttttcttcaatt

SEQ ID NO: 797670 - DNA, 15 bp, Homo sapiens
ttttttcttcaatta

SEQ ID NO: 797671 - DNA, 15 bp, Homo sapiens
tttttcttcaattag

SEQ ID NO: 797672 - DNA, 15 bp, Homo sapiens
ttttcttcaattagc

SEQ ID NO: 797673 - DNA, 15 bp, Homo sapiens
tttcttcaattagca

SEQ ID NO: 797674 - DNA, 15 bp, Homo sapiens
ttcttcaattagcat

SEQ ID NO: 797675 - DNA, 15 bp, Homo sapiens
tcttcaattagcatt

SEQ ID NO: 797676 - DNA, 15 bp, Homo sapiens
cttcaattagcattt

SEQ ID NO: 797677 - DNA, 15 bp, Homo sapiens
ttcaattagcatttc

SEQ ID NO: 797678 - DNA, 15 bp, Homo sapiens
tcaattagcatttca

SEQ ID NO: 797679 - DNA, 15 bp, Homo sapiens
caattagcatttcat

SEQ ID NO: 797680 - DNA, 15 bp, Homo sapiens
aattagcatttcata

SEQ ID NO: 797681 - DNA, 15 bp, Homo sapiens
attagcatttcatat

SEQ ID NO: 797682 - DNA, 15 bp, Homo sapiens
ttagcatttcatata

SEQ ID NO: 797683 - DNA, 15 bp, Homo sapiens
tagcatttcatatac

SEQ ID NO: 797684 - DNA, 15 bp, Homo sapiens
agcatttcatatacc

SEQ ID NO: 797685 - DNA, 15 bp, Homo sapiens
gcatttcatatacct

SEQ ID NO: 797686 - DNA, 15 bp, Homo sapiens
catttcatatacctg

SEQ ID NO: 797687 - DNA, 15 bp, Homo sapiens
atttcatatacctgt

SEQ ID NO: 797688 - DNA, 15 bp, Homo sapiens
tttcatatacctgtt

SEQ ID NO: 797689 - DNA, 15 bp, Homo sapiens
ttcatatacctgttg

SEQ ID NO: 797690 - DNA, 15 bp, Homo sapiens
tcatatacctgttga

SEQ ID NO: 797691 - DNA, 15 bp, Homo sapiens
catatacctgttgag

SEQ ID NO: 797692 - DNA, 15 bp, Homo sapiens
atatacctgttgaga

SEQ ID NO: 797693 - DNA, 15 bp, Homo sapiens
tatacctgttgagaa

SEQ ID NO: 797694 - DNA, 15 bp, Homo sapiens
atacctgttgagaaa

SEQ ID NO: 797695 - DNA, 15 bp, Homo sapiens
tacctgttgagaaat

SEQ ID NO: 797696 - DNA, 15 bp, Homo sapiens
acctgttgagaaatt

SEQ ID NO: 797697 - DNA, 15 bp, Homo sapiens
cctgttgagaaattt

SEQ ID NO: 797698 - DNA, 15 bp, Homo sapiens
ctgttgagaaatttt

SEQ ID NO: 797699 - DNA, 15 bp, Homo sapiens
tgttgagaaattttt

SEQ ID NO: 797700 - DNA, 15 bp, Homo sapiens
gttgagaaatttttg

SEQ ID NO: 797701 - DNA, 15 bp, Homo sapiens
ttgagaaatttttgt

SEQ ID NO: 797702 - DNA, 15 bp, Homo sapiens
tgagaaatttttgta

SEQ ID NO: 797703 - DNA, 15 bp, Homo sapiens
gagaaatttttgtaa

SEQ ID NO: 797704 - DNA, 15 bp, Homo sapiens
agaaatttttgtaag

SEQ ID NO: 797705 - DNA, 15 bp, Homo sapiens
gaaatttttgtaagt

SEQ ID NO: 797706 - DNA, 15 bp, Homo sapiens
aaatttttgtaagtg

SEQ ID NO: 797707 - DNA, 15 bp, Homo sapiens
aatttttgtaagtga

SEQ ID NO: 797708 - DNA, 15 bp, Homo sapiens
atttttgtaagtgac

SEQ ID NO: 797709 - DNA, 15 bp, Homo sapiens
tttttgtaagtgaca

SEQ ID NO: 797710 - DNA, 15 bp, Homo sapiens
ttttgtaagtgacaa

SEQ ID NO: 797711 - DNA, 15 bp, Homo sapiens
tttgtaagtgacaaa

SEQ ID NO: 797712 - DNA, 15 bp, Homo sapiens
ttgtaagtgacaaag

SEQ ID NO: 797713 - DNA, 15 bp, Homo sapiens
tgtaagtgacaaaga

SEQ ID NO: 797714 - DNA, 15 bp, Homo sapiens
gtaagtgacaaagac

SEQ ID NO: 797715 - DNA, 15 bp, Homo sapiens
taagtgacaaagaca

SEQ ID NO: 797716 - DNA, 15 bp, Homo sapiens
aagtgacaaagacac

SEQ ID NO: 797717 - DNA, 15 bp, Homo sapiens
agtgacaaagacact

SEQ ID NO: 797718 - DNA, 15 bp, Homo sapiens
gtgacaaagacactt

SEQ ID NO: 797719 - DNA, 15 bp, Homo sapiens
tgacaaagacacttt

SEQ ID NO: 797720 - DNA, 15 bp, Homo sapiens
gacaaagacactttc

SEQ ID NO: 797721 - DNA, 15 bp, Homo sapiens
acaaagacactttca

SEQ ID NO: 797722 - DNA, 15 bp, Homo sapiens
caaagacactttcat

SEQ ID NO: 797723 - DNA, 15 bp, Homo sapiens
aaagacactttcatg

SEQ ID NO: 797724 - DNA, 15 bp, Homo sapiens
aagacactttcatgt

SEQ ID NO: 797725 - DNA, 15 bp, Homo sapiens
agacactttcatgtc

SEQ ID NO: 797726 - DNA, 15 bp, Homo sapiens
gacactttcatgtct

SEQ ID NO: 797727 - DNA, 15 bp, Homo sapiens
acactttcatgtctt

SEQ ID NO: 797728 - DNA, 15 bp, Homo sapiens
cactttcatgtcttt

SEQ ID NO: 797729 - DNA, 15 bp, Homo sapiens
actttcatgtctttc

SEQ ID NO: 797730 - DNA, 15 bp, Homo sapiens
ctttcatgtctttca

SEQ ID NO: 797731 - DNA, 15 bp, Homo sapiens
tttcatgtctttcac

SEQ ID NO: 797732 - DNA, 15 bp, Homo sapiens
ttcatgtctttcaca

SEQ ID NO: 797733 - DNA, 15 bp, Homo sapiens
tcatgtctttcacat

SEQ ID NO: 797734 - DNA, 15 bp, Homo sapiens
catgtctttcacatc

SEQ ID NO: 797735 - DNA, 15 bp, Homo sapiens
atgtctttcacatca

SEQ ID NO: 797736 - DNA, 15 bp, Homo sapiens
tgtctttcacatcaa

SEQ ID NO: 797737 - DNA, 15 bp, Homo sapiens
gtctttcacatcaag

SEQ ID NO: 797738 - DNA, 15 bp, Homo sapiens
tctttcacatcaagg

SEQ ID NO: 797739 - DNA, 15 bp, Homo sapiens
ctttcacatcaagga

SEQ ID NO: 797740 - DNA, 15 bp, Homo sapiens
tttcacatcaaggat

SEQ ID NO: 797741 - DNA, 15 bp, Homo sapiens
ttcacatcaaggata

SEQ ID NO: 797742 - DNA, 15 bp, Homo sapiens
tcacatcaaggatat

SEQ ID NO: 797743 - DNA, 15 bp, Homo sapiens
cacatcaaggatatt

SEQ ID NO: 797744 - DNA, 15 bp, Homo sapiens
acatcaaggatattc

SEQ ID NO: 797745 - DNA, 15 bp, Homo sapiens
catcaaggatattca

SEQ ID NO: 797746 - DNA, 15 bp, Homo sapiens
atcaaggatattcat

SEQ ID NO: 797747 - DNA, 15 bp, Homo sapiens
tcaaggatattcatg

SEQ ID NO: 797748 - DNA, 15 bp, Homo sapiens
caaggatattcatgt

SEQ ID NO: 797749 - DNA, 15 bp, Homo sapiens
aaggatattcatgtg

SEQ ID NO: 797750 - DNA, 15 bp, Homo sapiens
aggatattcatgtga

SEQ ID NO: 797751 - DNA, 15 bp, Homo sapiens
ggatattcatgtgat

SEQ ID NO: 797752 - DNA, 15 bp, Homo sapiens
gatattcatgtgata

SEQ ID NO: 797753 - DNA, 15 bp, Homo sapiens
atattcatgtgatat

SEQ ID NO: 797754 - DNA, 15 bp, Homo sapiens
tattcatgtgatatc

SEQ ID NO: 797755 - DNA, 15 bp, Homo sapiens
attcatgtgatatct

SEQ ID NO: 797756 - DNA, 15 bp, Homo sapiens
ttcatgtgatatcta

SEQ ID NO: 797757 - DNA, 15 bp, Homo sapiens
tcatgtgatatctaa

SEQ ID NO: 797758 - DNA, 15 bp, Homo sapiens
catgtgatatctaaa

SEQ ID NO: 797759 - DNA, 15 bp, Homo sapiens
atgtgatatctaaat

SEQ ID NO: 797760 - DNA, 15 bp, Homo sapiens
tgtgatatctaaatg

SEQ ID NO: 797761 - DNA, 15 bp, Homo sapiens
gtgatatctaaatgt

SEQ ID NO: 797762 - DNA, 15 bp, Homo sapiens
tgatatctaaatgta

SEQ ID NO: 797763 - DNA, 15 bp, Homo sapiens
gatatctaaatgtat

SEQ ID NO: 797764 - DNA, 15 bp, Homo sapiens
atatctaaatgtata

SEQ ID NO: 797765 - DNA, 15 bp, Homo sapiens
tatctaaatgtatat

SEQ ID NO: 797766 - DNA, 15 bp, Homo sapiens
atctaaatgtatata

SEQ ID NO: 797767 - DNA, 15 bp, Homo sapiens
tctaaatgtatatat

SEQ ID NO: 797768 - DNA, 15 bp, Homo sapiens
ctaaatgtatatatt

SEQ ID NO: 797769 - DNA, 15 bp, Homo sapiens
taaatgtatatattt

SEQ ID NO: 797770 - DNA, 15 bp, Homo sapiens
aaatgtatatattta

SEQ ID NO: 797771 - DNA, 15 bp, Homo sapiens
aatgtatatatttat

SEQ ID NO: 797772 - DNA, 15 bp, Homo sapiens
atgtatatatttata

SEQ ID NO: 797773 - DNA, 15 bp, Homo sapiens
tgtatatatttatag

SEQ ID NO: 797774 - DNA, 15 bp, Homo sapiens
gtatatatttatagc

SEQ ID NO: 797775 - DNA, 15 bp, Homo sapiens
tatatatttatagct

SEQ ID NO: 797776 - DNA, 15 bp, Homo sapiens
atatatttatagcta

SEQ ID NO: 797777 - DNA, 15 bp, Homo sapiens
tatatttatagctat

SEQ ID NO: 797778 - DNA, 15 bp, Homo sapiens
atatttatagctata

SEQ ID NO: 797779 - DNA, 15 bp, Homo sapiens
tatttatagctatac

SEQ ID NO: 797780 - DNA, 15 bp, Homo sapiens
atttatagctatact

SEQ ID NO: 797781 - DNA, 15 bp, Homo sapiens
tttatagctatactc

SEQ ID NO: 797782 - DNA, 15 bp, Homo sapiens
ttatagctatactct

SEQ ID NO: 797783 - DNA, 15 bp, Homo sapiens
tatagctatactctg

SEQ ID NO: 797784 - DNA, 15 bp, Homo sapiens
atagctatactctgc

SEQ ID NO: 797785 - DNA, 15 bp, Homo sapiens
tagctatactctgct

SEQ ID NO: 797786 - DNA, 15 bp, Homo sapiens
agctatactctgctt

SEQ ID NO: 797787 - DNA, 15 bp, Homo sapiens
gctatactctgctta

SEQ ID NO: 797788 - DNA, 15 bp, Homo sapiens
ctatactctgcttaa

SEQ ID NO: 797789 - DNA, 15 bp, Homo sapiens
tatactctgcttaaa

SEQ ID NO: 797790 - DNA, 15 bp, Homo sapiens
atactctgcttaaac

SEQ ID NO: 797791 - DNA, 15 bp, Homo sapiens
tactctgcttaaact

SEQ ID NO: 797792 - DNA, 15 bp, Homo sapiens
actctgcttaaactc

SEQ ID NO: 797793 - DNA, 15 bp, Homo sapiens
ctctgcttaaactca

SEQ ID NO: 797794 - DNA, 15 bp, Homo sapiens
tctgcttaaactcaa

SEQ ID NO: 797795 - DNA, 15 bp, Homo sapiens
ctgcttaaactcaac

SEQ ID NO: 797796 - DNA, 15 bp, Homo sapiens
tgcttaaactcaaca

SEQ ID NO: 797797 - DNA, 15 bp, Homo sapiens
gcttaaactcaacat

SEQ ID NO: 797798 - DNA, 15 bp, Homo sapiens
cttaaactcaacata

SEQ ID NO: 797799 - DNA, 15 bp, Homo sapiens
ttaaactcaacatat

SEQ ID NO: 797800 - DNA, 15 bp, Homo sapiens
taaactcaacatatg

SEQ ID NO: 797801 - DNA, 15 bp, Homo sapiens
aaactcaacatatga

SEQ ID NO: 797802 - DNA, 15 bp, Homo sapiens
aactcaacatatgaa

SEQ ID NO: 797803 - DNA, 15 bp, Homo sapiens
actcaacatatgaaa

SEQ ID NO: 797804 - DNA, 15 bp, Homo sapiens
ctcaacatatgaaaa

SEQ ID NO: 797805 - DNA, 15 bp, Homo sapiens
tcaacatatgaaaat

SEQ ID NO: 797806 - DNA, 15 bp, Homo sapiens
caacatatgaaaatt

SEQ ID NO: 797807 - DNA, 15 bp, Homo sapiens
aacatatgaaaattc

SEQ ID NO: 797808 - DNA, 15 bp, Homo sapiens
acatatgaaaattca

SEQ ID NO: 797809 - DNA, 15 bp, Homo sapiens
catatgaaaattcat

SEQ ID NO: 797810 - DNA, 15 bp, Homo sapiens
atatgaaaattcata

SEQ ID NO: 797811 - DNA, 15 bp, Homo sapiens
tatgaaaattcatat

SEQ ID NO: 797812 - DNA, 15 bp, Homo sapiens
atgaaaattcatatt

SEQ ID NO: 797813 - DNA, 15 bp, Homo sapiens
tgaaaattcatattt

SEQ ID NO: 797814 - DNA, 15 bp, Homo sapiens
gaaaattcatatttt

SEQ ID NO: 797815 - DNA, 15 bp, Homo sapiens
aaaattcatatttta

SEQ ID NO: 797816 - DNA, 15 bp, Homo sapiens
aaattcatattttaa

SEQ ID NO: 797817 - DNA, 15 bp, Homo sapiens
aattcatattttaaa

SEQ ID NO: 797818 - DNA, 15 bp, Homo sapiens
attcatattttaaaa

SEQ ID NO: 797819 - DNA, 15 bp, Homo sapiens
ttcatattttaaaat

SEQ ID NO: 797820 - DNA, 15 bp, Homo sapiens
tcatattttaaaata

SEQ ID NO: 797821 - DNA, 15 bp, Homo sapiens
catattttaaaatag

SEQ ID NO: 797822 - DNA, 15 bp, Homo sapiens
atattttaaaataga

SEQ ID NO: 797823 - DNA, 15 bp, Homo sapiens
tattttaaaatagaa

SEQ ID NO: 797824 - DNA, 15 bp, Homo sapiens
attttaaaatagaag

SEQ ID NO: 797825 - DNA, 15 bp, Homo sapiens
ttttaaaatagaagg

SEQ ID NO: 797826 - DNA, 15 bp, Homo sapiens
tttaaaatagaaggt

SEQ ID NO: 797827 - DNA, 15 bp, Homo sapiens
ttaaaatagaaggtg

SEQ ID NO: 797828 - DNA, 15 bp, Homo sapiens
taaaatagaaggtga

SEQ ID NO: 797829 - DNA, 15 bp, Homo sapiens
aaaatagaaggtgat

SEQ ID NO: 797830 - DNA, 15 bp, Homo sapiens
aaatagaaggtgatt

SEQ ID NO: 797831 - DNA, 15 bp, Homo sapiens
aatagaaggtgattg

SEQ ID NO: 797832 - DNA, 15 bp, Homo sapiens
atagaaggtgattgc

SEQ ID NO: 797833 - DNA, 15 bp, Homo sapiens
tagaaggtgattgct

SEQ ID NO: 797834 - DNA, 15 bp, Homo sapiens
agaaggtgattgctt

SEQ ID NO: 797835 - DNA, 15 bp, Homo sapiens
gaaggtgattgctta

SEQ ID NO: 797836 - DNA, 15 bp, Homo sapiens
aaggtgattgcttaa

SEQ ID NO: 797837 - DNA, 15 bp, Homo sapiens
aggtgattgcttaag

SEQ ID NO: 797838 - DNA, 15 bp, Homo sapiens
ggtgattgcttaaga

SEQ ID NO: 797839 - DNA, 15 bp, Homo sapiens
gtgattgcttaagag

SEQ ID NO: 797840 - DNA, 15 bp, Homo sapiens
tgattgcttaagagt

SEQ ID NO: 797841 - DNA, 15 bp, Homo sapiens
gattgcttaagagtc

SEQ ID NO: 797842 - DNA, 15 bp, Homo sapiens
attgcttaagagtca

SEQ ID NO: 797843 - DNA, 15 bp, Homo sapiens
ttgcttaagagtcag

SEQ ID NO: 797844 - DNA, 15 bp, Homo sapiens
tgcttaagagtcagc

SEQ ID NO: 797845 - DNA, 15 bp, Homo sapiens
gcttaagagtcagcc

SEQ ID NO: 797846 - DNA, 15 bp, Homo sapiens
cttaagagtcagcct

SEQ ID NO: 797847 - DNA, 15 bp, Homo sapiens
ttaagagtcagcctg

SEQ ID NO: 797848 - DNA, 15 bp, Homo sapiens
taagagtcagcctgt

SEQ ID NO: 797849 - DNA, 15 bp, Homo sapiens
aagagtcagcctgtt

SEQ ID NO: 797850 - DNA, 15 bp, Homo sapiens
agagtcagcctgttg

SEQ ID NO: 797851 - DNA, 15 bp, Homo sapiens
gagtcagcctgttgg

SEQ ID NO: 797852 - DNA, 15 bp, Homo sapiens
agtcagcctgttgga

SEQ ID NO: 797853 - DNA, 15 bp, Homo sapiens
gtcagcctgttggac

SEQ ID NO: 797854 - DNA, 15 bp, Homo sapiens
tcagcctgttggaca

SEQ ID NO: 797855 - DNA, 15 bp, Homo sapiens
cagcctgttggacat

SEQ ID NO: 797856 - DNA, 15 bp, Homo sapiens
agcctgttggacatg

SEQ ID NO: 797857 - DNA, 15 bp, Homo sapiens
gcctgttggacatga

SEQ ID NO: 797858 - DNA, 15 bp, Homo sapiens
cctgttggacatgaa

SEQ ID NO: 797859 - DNA, 15 bp, Homo sapiens
ctgttggacatgaat

SEQ ID NO: 797860 - DNA, 15 bp, Homo sapiens
tgttggacatgaatt

SEQ ID NO: 797861 - DNA, 15 bp, Homo sapiens
gttggacatgaatta

SEQ ID NO: 797862 - DNA, 15 bp, Homo sapiens
ttggacatgaattat

SEQ ID NO: 797863 - DNA, 15 bp, Homo sapiens
tggacatgaattatt

SEQ ID NO: 797864 - DNA, 15 bp, Homo sapiens
ggacatgaattattc

SEQ ID NO: 797865 - DNA, 15 bp, Homo sapiens
gacatgaattattca

SEQ ID NO: 797866 - DNA, 15 bp, Homo sapiens
acatgaattattcac

SEQ ID NO: 797867 - DNA, 15 bp, Homo sapiens
catgaattattcaca

SEQ ID NO: 797868 - DNA, 15 bp, Homo sapiens
atgaattattcacaa

SEQ ID NO: 797869 - DNA, 15 bp, Homo sapiens
tgaattattcacaaa

SEQ ID NO: 797870 - DNA, 15 bp, Homo sapiens
gaattattcacaaaa

SEQ ID NO: 797871 - DNA, 15 bp, Homo sapiens
aattattcacaaaaa

SEQ ID NO: 797872 - DNA, 15 bp, Homo sapiens
attattcacaaaaat

SEQ ID NO: 797873 - DNA, 15 bp, Homo sapiens
ttattcacaaaaata

SEQ ID NO: 797874 - DNA, 15 bp, Homo sapiens
tattcacaaaaatac

SEQ ID NO: 797875 - DNA, 15 bp, Homo sapiens
attcacaaaaataca

SEQ ID NO: 797876 - DNA, 15 bp, Homo sapiens
ttcacaaaaatacaa

SEQ ID NO: 797877 - DNA, 15 bp, Homo sapiens
tcacaaaaatacaaa

SEQ ID NO: 797878 - DNA, 15 bp, Homo sapiens
cacaaaaatacaaac

SEQ ID NO: 797879 - DNA, 15 bp, Homo sapiens
acaaaaatacaaact

SEQ ID NO: 797880 - DNA, 15 bp, Homo sapiens
caaaaatacaaacta

SEQ ID NO: 797881 - DNA, 15 bp, Homo sapiens
aaaaatacaaactac

SEQ ID NO: 797882 - DNA, 15 bp, Homo sapiens
aaaatacaaactacc

SEQ ID NO: 797883 - DNA, 15 bp, Homo sapiens
aaatacaaactaccc

SEQ ID NO: 797884 - DNA, 15 bp, Homo sapiens
aatacaaactaccct

SEQ ID NO: 797885 - DNA, 15 bp, Homo sapiens
atacaaactaccctt

SEQ ID NO: 797886 - DNA, 15 bp, Homo sapiens
tacaaactaccctta

SEQ ID NO: 797887 - DNA, 15 bp, Homo sapiens
acaaactacccttag

SEQ ID NO: 797888 - DNA, 15 bp, Homo sapiens
caaactacccttagt

SEQ ID NO: 797889 - DNA, 15 bp, Homo sapiens
aaactacccttagtt

SEQ ID NO: 797890 - DNA, 15 bp, Homo sapiens
aactacccttagttt

SEQ ID NO: 797891 - DNA, 15 bp, Homo sapiens
actacccttagtttc

SEQ ID NO: 797892 - DNA, 15 bp, Homo sapiens
ctacccttagtttca

SEQ ID NO: 797893 - DNA, 15 bp, Homo sapiens
tacccttagtttcac

SEQ ID NO: 797894 - DNA, 15 bp, Homo sapiens
acccttagtttcaca

SEQ ID NO: 797895 - DNA, 15 bp, Homo sapiens
cccttagtttcacat

SEQ ID NO: 797896 - DNA, 15 bp, Homo sapiens
ccttagtttcacata

SEQ ID NO: 797897 - DNA, 15 bp, Homo sapiens
cttagtttcacatac

SEQ ID NO: 797898 - DNA, 15 bp, Homo sapiens
ttagtttcacatacc

SEQ ID NO: 797899 - DNA, 15 bp, Homo sapiens
tagtttcacatacca

SEQ ID NO: 797900 - DNA, 15 bp, Homo sapiens
agtttcacataccac

SEQ ID NO: 797901 - DNA, 15 bp, Homo sapiens
gtttcacataccacg

SEQ ID NO: 797902 - DNA, 15 bp, Homo sapiens
tttcacataccacgt

SEQ ID NO: 797903 - DNA, 15 bp, Homo sapiens
ttcacataccacgtt

SEQ ID NO: 797904 - DNA, 15 bp, Homo sapiens
tcacataccacgttg

SEQ ID NO: 797905 - DNA, 15 bp, Homo sapiens
cacataccacgttga

SEQ ID NO: 797906 - DNA, 15 bp, Homo sapiens
acataccacgttgat

SEQ ID NO: 797907 - DNA, 15 bp, Homo sapiens
cataccacgttgata

SEQ ID NO: 797908 - DNA, 15 bp, Homo sapiens
ataccacgttgatac

SEQ ID NO: 797909 - DNA, 15 bp, Homo sapiens
taccacgttgataca

SEQ ID NO: 797910 - DNA, 15 bp, Homo sapiens
accacgttgatacag

SEQ ID NO: 797911 - DNA, 15 bp, Homo sapiens
ccacgttgatacagt

SEQ ID NO: 797912 - DNA, 15 bp, Homo sapiens
cacgttgatacagta

SEQ ID NO: 797913 - DNA, 15 bp, Homo sapiens
acgttgatacagtaa

SEQ ID NO: 797914 - DNA, 15 bp, Homo sapiens
cgttgatacagtaag

SEQ ID NO: 797915 - DNA, 15 bp, Homo sapiens
gttgatacagtaagg

SEQ ID NO: 797916 - DNA, 15 bp, Homo sapiens
ttgatacagtaagga

SEQ ID NO: 797917 - DNA, 15 bp, Homo sapiens
tgatacagtaaggaa

SEQ ID NO: 797918 - DNA, 15 bp, Homo sapiens
gatacagtaaggaat

SEQ ID NO: 797919 - DNA, 15 bp, Homo sapiens
atacagtaaggaata

SEQ ID NO: 797920 - DNA, 15 bp, Homo sapiens
tacagtaaggaatag

SEQ ID NO: 797921 - DNA, 15 bp, Homo sapiens
acagtaaggaatagc

SEQ ID NO: 797922 - DNA, 15 bp, Homo sapiens
cagtaaggaatagct

SEQ ID NO: 797923 - DNA, 15 bp, Homo sapiens
agtaaggaatagctg

SEQ ID NO: 797924 - DNA, 15 bp, Homo sapiens
gtaaggaatagctga

SEQ ID NO: 797925 - DNA, 15 bp, Homo sapiens
taaggaatagctgaa

SEQ ID NO: 797926 - DNA, 15 bp, Homo sapiens
aaggaatagctgaaa

SEQ ID NO: 797927 - DNA, 15 bp, Homo sapiens
aggaatagctgaaat

SEQ ID NO: 797928 - DNA, 15 bp, Homo sapiens
ggaatagctgaaatt

SEQ ID NO: 797929 - DNA, 15 bp, Homo sapiens
gaatagctgaaattc

SEQ ID NO: 797930 - DNA, 15 bp, Homo sapiens
aatagctgaaattct

SEQ ID NO: 797931 - DNA, 15 bp, Homo sapiens
atagctgaaattctt

SEQ ID NO: 797932 - DNA, 15 bp, Homo sapiens
tagctgaaattcttg

SEQ ID NO: 797933 - DNA, 15 bp, Homo sapiens
agctgaaattcttgt

SEQ ID NO: 797934 - DNA, 15 bp, Homo sapiens
gctgaaattcttgtg

SEQ ID NO: 797935 - DNA, 15 bp, Homo sapiens
ctgaaattcttgtgt

SEQ ID NO: 797936 - DNA, 15 bp, Homo sapiens
tgaaattcttgtgta

SEQ ID NO: 797937 - DNA, 15 bp, Homo sapiens
gaaattcttgtgtaa

SEQ ID NO: 797938 - DNA, 15 bp, Homo sapiens
aaattcttgtgtaat

SEQ ID NO: 797939 - DNA, 15 bp, Homo sapiens
aattcttgtgtaatg

SEQ ID NO: 797940 - DNA, 15 bp, Homo sapiens
attcttgtgtaatgt

SEQ ID NO: 797941 - DNA, 15 bp, Homo sapiens
ttcttgtgtaatgtc

SEQ ID NO: 797942 - DNA, 15 bp, Homo sapiens
tcttgtgtaatgtct

SEQ ID NO: 797943 - DNA, 15 bp, Homo sapiens
cttgtgtaatgtctg

SEQ ID NO: 797944 - DNA, 15 bp, Homo sapiens
ttgtgtaatgtctgt

SEQ ID NO: 797945 - DNA, 15 bp, Homo sapiens
tgtgtaatgtctgta

SEQ ID NO: 797946 - DNA, 15 bp, Homo sapiens
gtgtaatgtctgtat

SEQ ID NO: 797947 - DNA, 15 bp, Homo sapiens
tgtaatgtctgtatt

SEQ ID NO: 797948 - DNA, 15 bp, Homo sapiens
gtaatgtctgtatta

SEQ ID NO: 797949 - DNA, 15 bp, Homo sapiens
taatgtctgtattaa

SEQ ID NO: 797950 - DNA, 15 bp, Homo sapiens
aatgtctgtattaaa

SEQ ID NO: 797951 - DNA, 15 bp, Homo sapiens
atgtctgtattaaaa

SEQ ID NO: 797952 - DNA, 15 bp, Homo sapiens
tgtctgtattaaaat

SEQ ID NO: 797953 - DNA, 15 bp, Homo sapiens
gtctgtattaaaata

SEQ ID NO: 797954 - DNA, 15 bp, Homo sapiens
tctgtattaaaatat

SEQ ID NO: 797955 - DNA, 15 bp, Homo sapiens
ctgtattaaaatatt

SEQ ID NO: 797956 - DNA, 15 bp, Homo sapiens
tgtattaaaatattc

SEQ ID NO: 797957 - DNA, 15 bp, Homo sapiens
gtattaaaatattct

SEQ ID NO: 797958 - DNA, 15 bp, Homo sapiens
tattaaaatattctt

SEQ ID NO: 797959 - DNA, 15 bp, Homo sapiens
attaaaatattcttc

SEQ ID NO: 797960 - DNA, 15 bp, Homo sapiens
ttaaaatattcttca

SEQ ID NO: 797961 - DNA, 15 bp, Homo sapiens
taaaatattcttcat

SEQ ID NO: 797962 - DNA, 15 bp, Homo sapiens
aaaatattcttcatt

SEQ ID NO: 797963 - DNA, 15 bp, Homo sapiens
aaatattcttcattt

SEQ ID NO: 797964 - DNA, 15 bp, Homo sapiens
aatattcttcattta

SEQ ID NO: 797965 - DNA, 15 bp, Homo sapiens
atattcttcatttat

SEQ ID NO: 797966 - DNA, 15 bp, Homo sapiens
tattcttcatttatg

SEQ ID NO: 797967 - DNA, 15 bp, Homo sapiens
attcttcatttatgc

SEQ ID NO: 797968 - DNA, 15 bp, Homo sapiens
ttcttcatttatgct

SEQ ID NO: 797969 - DNA, 15 bp, Homo sapiens
tcttcatttatgctt

SEQ ID NO: 797970 - DNA, 15 bp, Homo sapiens
cttcatttatgcttt

SEQ ID NO: 797971 - DNA, 15 bp, Homo sapiens
ttcatttatgcttta

SEQ ID NO: 797972 - DNA, 15 bp, Homo sapiens
tcatttatgctttat

SEQ ID NO: 797973 - DNA, 15 bp, Homo sapiens
catttatgctttatt

SEQ ID NO: 797974 - DNA, 15 bp, Homo sapiens
atttatgctttattg

SEQ ID NO: 797975 - DNA, 15 bp, Homo sapiens
tttatgctttattgc

SEQ ID NO: 797976 - DNA, 15 bp, Homo sapiens
ttatgctttattgca

SEQ ID NO: 797977 - DNA, 15 bp, Homo sapiens
tatgctttattgcac

SEQ ID NO: 797978 - DNA, 15 bp, Homo sapiens
atgctttattgcact

SEQ ID NO: 797979 - DNA, 15 bp, Homo sapiens
tgctttattgcactt

SEQ ID NO: 797980 - DNA, 15 bp, Homo sapiens
gctttattgcactta

SEQ ID NO: 797981 - DNA, 15 bp, Homo sapiens
ctttattgcacttaa

SEQ ID NO: 797982 - DNA, 15 bp, Homo sapiens
tttattgcacttaaa

SEQ ID NO: 797983 - DNA, 15 bp, Homo sapiens
ttattgcacttaaac

SEQ ID NO: 797984 - DNA, 15 bp, Homo sapiens
tattgcacttaaacg

SEQ ID NO: 797985 - DNA, 15 bp, Homo sapiens
attgcacttaaacgt

SEQ ID NO: 797986 - DNA, 15 bp, Homo sapiens
ttgcacttaaacgtg

SEQ ID NO: 797987 - DNA, 15 bp, Homo sapiens
tgcacttaaacgtga

SEQ ID NO: 797988 - DNA, 15 bp, Homo sapiens
gcacttaaacgtgat

SEQ ID NO: 797989 - DNA, 15 bp, Homo sapiens
cacttaaacgtgatt

SEQ ID NO: 797990 - DNA, 15 bp, Homo sapiens
acttaaacgtgatta

SEQ ID NO: 797991 - DNA, 15 bp, Homo sapiens
cttaaacgtgattaa

SEQ ID NO: 797992 - DNA, 15 bp, Homo sapiens
ttaaacgtgattaaa

SEQ ID NO: 797993 - DNA, 15 bp, Homo sapiens
taaacgtgattaaaa

SEQ ID NO: 797994 - DNA, 15 bp, Homo sapiens
aaacgtgattaaaat

SEQ ID NO: 797995 - DNA, 15 bp, Homo sapiens
aacgtgattaaaatg

SEQ ID NO: 797996 - DNA, 15 bp, Homo sapiens
acgtgattaaaatgc

SEQ ID NO: 797997 - DNA, 15 bp, Homo sapiens
cgtgattaaaatgct

SEQ ID NO: 797998 - DNA, 15 bp, Homo sapiens
gtgattaaaatgcta

SEQ ID NO: 797999 - DNA, 15 bp, Homo sapiens
tgattaaaatgctag

SEQ ID NO: 798000 - DNA, 15 bp, Homo sapiens
gattaaaatgctagt

SEQ ID NO: 798001 - DNA, 15 bp, Homo sapiens
attaaaatgctagtg

SEQ ID NO: 798002 - DNA, 15 bp, Homo sapiens
ttaaaatgctagtgt

SEQ ID NO: 798003 - DNA, 15 bp, Homo sapiens
taaaatgctagtgta

SEQ ID NO: 798004 - DNA, 15 bp, Homo sapiens
aaaatgctagtgtat

SEQ ID NO: 798005 - DNA, 15 bp, Homo sapiens
aaatgctagtgtatt

SEQ ID NO: 798006 - DNA, 15 bp, Homo sapiens
aatgctagtgtattg

SEQ ID NO: 798007 - DNA, 15 bp, Homo sapiens
atgctagtgtattga

SEQ ID NO: 798008 - DNA, 15 bp, Homo sapiens
tgctagtgtattgaa

SEQ ID NO: 798009 - DNA, 15 bp, Homo sapiens
gctagtgtattgaaa

SEQ ID NO: 798010 - DNA, 15 bp, Homo sapiens
ctagtgtattgaaaa

SEQ ID NO: 798011 - DNA, 15 bp, Homo sapiens
tagtgtattgaaaat

SEQ ID NO: 798012 - DNA, 15 bp, Homo sapiens
agtgtattgaaaatg

SEQ ID NO: 798013 - DNA, 15 bp, Homo sapiens
gtgtattgaaaatga

SEQ ID NO: 798014 - DNA, 15 bp, Homo sapiens
tgtattgaaaatgat

SEQ ID NO: 798015 - DNA, 15 bp, Homo sapiens
gtattgaaaatgatt

SEQ ID NO: 798016 - DNA, 15 bp, Homo sapiens
tattgaaaatgattg

SEQ ID NO: 798017 - DNA, 15 bp, Homo sapiens
attgaaaatgattgc

SEQ ID NO: 798018 - DNA, 15 bp, Homo sapiens
ttgaaaatgattgct

SEQ ID NO: 798019 - DNA, 15 bp, Homo sapiens
tgaaaatgattgctc

SEQ ID NO: 798020 - DNA, 15 bp, Homo sapiens
gaaaatgattgctct

SEQ ID NO: 798021 - DNA, 15 bp, Homo sapiens
aaaatgattgctctt

SEQ ID NO: 798022 - DNA, 15 bp, Homo sapiens
aaatgattgctcttt

SEQ ID NO: 798023 - DNA, 15 bp, Homo sapiens
aatgattgctctttg

SEQ ID NO: 798024 - DNA, 15 bp, Homo sapiens
atgattgctctttgt

SEQ ID NO: 798025 - DNA, 15 bp, Homo sapiens
tgattgctctttgtt

SEQ ID NO: 798026 - DNA, 15 bp, Homo sapiens
gattgctctttgtta

SEQ ID NO: 798027 - DNA, 15 bp, Homo sapiens
attgctctttgttac

SEQ ID NO: 798028 - DNA, 15 bp, Homo sapiens
ttgctctttgttacc

SEQ ID NO: 798029 - DNA, 15 bp, Homo sapiens
tgctctttgttacct

SEQ ID NO: 798030 - DNA, 15 bp, Homo sapiens
gctctttgttacctg

SEQ ID NO: 798031 - DNA, 15 bp, Homo sapiens
ctctttgttacctgc

SEQ ID NO: 798032 - DNA, 15 bp, Homo sapiens
tctttgttacctgca

SEQ ID NO: 798033 - DNA, 15 bp, Homo sapiens
ctttgttacctgcaa

SEQ ID NO: 798034 - DNA, 15 bp, Homo sapiens
tttgttacctgcaaa

SEQ ID NO: 798035 - DNA, 15 bp, Homo sapiens
ttgttacctgcaaac

SEQ ID NO: 798036 - DNA, 15 bp, Homo sapiens
tgttacctgcaaact

SEQ ID NO: 798037 - DNA, 15 bp, Homo sapiens
gttacctgcaaactt

SEQ ID NO: 798038 - DNA, 15 bp, Homo sapiens
ttacctgcaaactta

SEQ ID NO: 798039 - DNA, 15 bp, Homo sapiens
tacctgcaaacttat

SEQ ID NO: 798040 - DNA, 15 bp, Homo sapiens
acctgcaaacttatg

SEQ ID NO: 798041 - DNA, 15 bp, Homo sapiens
cctgcaaacttatgt

SEQ ID NO: 798042 - DNA, 15 bp, Homo sapiens
ctgcaaacttatgtg

SEQ ID NO: 798043 - DNA, 15 bp, Homo sapiens
tgcaaacttatgtgt

SEQ ID NO: 798044 - DNA, 15 bp, Homo sapiens
gcaaacttatgtgtt

SEQ ID NO: 798045 - DNA, 15 bp, Homo sapiens
caaacttatgtgttc

SEQ ID NO: 798046 - DNA, 15 bp, Homo sapiens
aaacttatgtgttcc

SEQ ID NO: 798047 - DNA, 15 bp, Homo sapiens
aacttatgtgttcct

SEQ ID NO: 798048 - DNA, 15 bp, Homo sapiens
acttatgtgttccta

SEQ ID NO: 798049 - DNA, 15 bp, Homo sapiens
cttatgtgttcctac

SEQ ID NO: 798050 - DNA, 15 bp, Homo sapiens
ttatgtgttcctact

SEQ ID NO: 798051 - DNA, 15 bp, Homo sapiens
tatgtgttcctactt

SEQ ID NO: 798052 - DNA, 15 bp, Homo sapiens
atgtgttcctacttt

SEQ ID NO: 798053 - DNA, 15 bp, Homo sapiens
tgtgttcctactttc

SEQ ID NO: 798054 - DNA, 15 bp, Homo sapiens
gtgttcctactttct

SEQ ID NO: 798055 - DNA, 15 bp, Homo sapiens
tgttcctactttctt

SEQ ID NO: 798056 - DNA, 15 bp, Homo sapiens
gttcctactttcttt

SEQ ID NO: 798057 - DNA, 15 bp, Homo sapiens
ttcctactttctttt

SEQ ID NO: 798058 - DNA, 15 bp, Homo sapiens
tcctactttcttttt

SEQ ID NO: 798059 - DNA, 15 bp, Homo sapiens
cctactttctttttc

SEQ ID NO: 798060 - DNA, 15 bp, Homo sapiens
ctactttctttttct

SEQ ID NO: 798061 - DNA, 15 bp, Homo sapiens
tactttctttttctc

SEQ ID NO: 798062 - DNA, 15 bp, Homo sapiens
actttctttttctcc

SEQ ID NO: 798063 - DNA, 15 bp, Homo sapiens
ctttctttttctcca

SEQ ID NO: 798064 - DNA, 15 bp, Homo sapiens
tttctttttctccaa

SEQ ID NO: 798065 - DNA, 15 bp, Homo sapiens
ttctttttctccaac

SEQ ID NO: 798066 - DNA, 15 bp, Homo sapiens
tctttttctccaaca

SEQ ID NO: 798067 - DNA, 15 bp, Homo sapiens
ctttttctccaacag

SEQ ID NO: 798068 - DNA, 15 bp, Homo sapiens
tttttctccaacaga

SEQ ID NO: 798069 - DNA, 15 bp, Homo sapiens
ttttctccaacagat

SEQ ID NO: 798070 - DNA, 15 bp, Homo sapiens
tttctccaacagata

SEQ ID NO: 798071 - DNA, 15 bp, Homo sapiens
ttctccaacagatat

SEQ ID NO: 798072 - DNA, 15 bp, Homo sapiens
tctccaacagatata

SEQ ID NO: 798073 - DNA, 15 bp, Homo sapiens
ctccaacagatataa

SEQ ID NO: 798074 - DNA, 15 bp, Homo sapiens
tccaacagatataag

SEQ ID NO: 798075 - DNA, 15 bp, Homo sapiens
ccaacagatataagc

SEQ ID NO: 798076 - DNA, 15 bp, Homo sapiens
caacagatataagct

SEQ ID NO: 798077 - DNA, 15 bp, Homo sapiens
aacagatataagctt

SEQ ID NO: 798078 - DNA, 15 bp, Homo sapiens
acagatataagctta

SEQ ID NO: 798079 - DNA, 15 bp, Homo sapiens
cagatataagcttac

SEQ ID NO: 798080 - DNA, 15 bp, Homo sapiens
agatataagcttacc

SEQ ID NO: 798081 - DNA, 15 bp, Homo sapiens
gatataagcttacca

SEQ ID NO: 798082 - DNA, 15 bp, Homo sapiens
atataagcttaccaa

SEQ ID NO: 798083 - DNA, 15 bp, Homo sapiens
tataagcttaccaaa

SEQ ID NO: 798084 - DNA, 15 bp, Homo sapiens
ataagcttaccaaag

SEQ ID NO: 798085 - DNA, 15 bp, Homo sapiens
taagcttaccaaagt

SEQ ID NO: 798086 - DNA, 15 bp, Homo sapiens
aagcttaccaaagtc

SEQ ID NO: 798087 - DNA, 15 bp, Homo sapiens
agcttaccaaagtca

SEQ ID NO: 798088 - DNA, 15 bp, Homo sapiens
gcttaccaaagtcag

SEQ ID NO: 798089 - DNA, 15 bp, Homo sapiens
cttaccaaagtcagc

SEQ ID NO: 798090 - DNA, 15 bp, Homo sapiens
ttaccaaagtcagca

SEQ ID NO: 798091 - DNA, 15 bp, Homo sapiens
taccaaagtcagcaa

SEQ ID NO: 798092 - DNA, 15 bp, Homo sapiens
accaaagtcagcaac

SEQ ID NO: 798093 - DNA, 15 bp, Homo sapiens
ccaaagtcagcaaca

SEQ ID NO: 798094 - DNA, 15 bp, Homo sapiens
caaagtcagcaacaa

SEQ ID NO: 798095 - DNA, 15 bp, Homo sapiens
aaagtcagcaacaat

SEQ ID NO: 798096 - DNA, 15 bp, Homo sapiens
aagtcagcaacaata

SEQ ID NO: 798097 - DNA, 15 bp, Homo sapiens
agtcagcaacaatat

SEQ ID NO: 798098 - DNA, 15 bp, Homo sapiens
gtcagcaacaatatg

SEQ ID NO: 798099 - DNA, 15 bp, Homo sapiens
tcagcaacaatatgc

SEQ ID NO: 798100 - DNA, 15 bp, Homo sapiens
cagcaacaatatgct

SEQ ID NO: 798101 - DNA, 15 bp, Homo sapiens
agcaacaatatgcta

SEQ ID NO: 798102 - DNA, 15 bp, Homo sapiens
gcaacaatatgctac

SEQ ID NO: 798103 - DNA, 15 bp, Homo sapiens
caacaatatgctaca

SEQ ID NO: 798104 - DNA, 15 bp, Homo sapiens
aacaatatgctacac

SEQ ID NO: 798105 - DNA, 15 bp, Homo sapiens
acaatatgctacaca

SEQ ID NO: 798106 - DNA, 15 bp, Homo sapiens
caatatgctacacag

SEQ ID NO: 798107 - DNA, 15 bp, Homo sapiens
aatatgctacacagc

SEQ ID NO: 798108 - DNA, 15 bp, Homo sapiens
atatgctacacagct

SEQ ID NO: 798109 - DNA, 15 bp, Homo sapiens
tatgctacacagctg

SEQ ID NO: 798110 - DNA, 15 bp, Homo sapiens
atgctacacagctgc

SEQ ID NO: 798111 - DNA, 15 bp, Homo sapiens
tgctacacagctgct

SEQ ID NO: 798112 - DNA, 15 bp, Homo sapiens
gctacacagctgctt

SEQ ID NO: 798113 - DNA, 15 bp, Homo sapiens
ctacacagctgcttt

SEQ ID NO: 798114 - DNA, 15 bp, Homo sapiens
tacacagctgctttg

SEQ ID NO: 798115 - DNA, 15 bp, Homo sapiens
acacagctgctttgc

SEQ ID NO: 798116 - DNA, 15 bp, Homo sapiens
cacagctgctttgct

SEQ ID NO: 798117 - DNA, 15 bp, Homo sapiens
acagctgctttgctc

SEQ ID NO: 798118 - DNA, 15 bp, Homo sapiens
cagctgctttgctca

SEQ ID NO: 798119 - DNA, 15 bp, Homo sapiens
agctgctttgctcaa

SEQ ID NO: 798120 - DNA, 15 bp, Homo sapiens
gctgctttgctcaaa

SEQ ID NO: 798121 - DNA, 15 bp, Homo sapiens
ctgctttgctcaaag

SEQ ID NO: 798122 - DNA, 15 bp, Homo sapiens
tgctttgctcaaagc

SEQ ID NO: 798123 - DNA, 15 bp, Homo sapiens
gctttgctcaaagca

SEQ ID NO: 798124 - DNA, 15 bp, Homo sapiens
ctttgctcaaagcaa

SEQ ID NO: 798125 - DNA, 15 bp, Homo sapiens
tttgctcaaagcaag

SEQ ID NO: 798126 - DNA, 15 bp, Homo sapiens
ttgctcaaagcaaga

SEQ ID NO: 798127 - DNA, 15 bp, Homo sapiens
tgctcaaagcaagag

SEQ ID NO: 798128 - DNA, 15 bp, Homo sapiens
gctcaaagcaagagc

SEQ ID NO: 798129 - DNA, 15 bp, Homo sapiens
ctcaaagcaagagct

SEQ ID NO: 798130 - DNA, 15 bp, Homo sapiens
tcaaagcaagagctg

SEQ ID NO: 798131 - DNA, 15 bp, Homo sapiens
caaagcaagagctgt

SEQ ID NO: 798132 - DNA, 15 bp, Homo sapiens
aaagcaagagctgtc

SEQ ID NO: 798133 - DNA, 15 bp, Homo sapiens
aagcaagagctgtct

SEQ ID NO: 798134 - DNA, 15 bp, Homo sapiens
agcaagagctgtctc

SEQ ID NO: 798135 - DNA, 15 bp, Homo sapiens
gcaagagctgtctct

SEQ ID NO: 798136 - DNA, 15 bp, Homo sapiens
caagagctgtctctg

SEQ ID NO: 798137 - DNA, 15 bp, Homo sapiens
aagagctgtctctga

SEQ ID NO: 798138 - DNA, 15 bp, Homo sapiens
agagctgtctctgac

SEQ ID NO: 798139 - DNA, 15 bp, Homo sapiens
gagctgtctctgaca

SEQ ID NO: 798140 - DNA, 15 bp, Homo sapiens
agctgtctctgacaa

SEQ ID NO: 798141 - DNA, 15 bp, Homo sapiens
gctgtctctgacaag

SEQ ID NO: 798142 - DNA, 15 bp, Homo sapiens
ctgtctctgacaagt

SEQ ID NO: 798143 - DNA, 15 bp, Homo sapiens
tgtctctgacaagta

SEQ ID NO: 798144 - DNA, 15 bp, Homo sapiens
gtctctgacaagtaa

SEQ ID NO: 798145 - DNA, 15 bp, Homo sapiens
tctctgacaagtaag

SEQ ID NO: 798146 - DNA, 15 bp, Homo sapiens
ctctgacaagtaagt

SEQ ID NO: 798147 - DNA, 15 bp, Homo sapiens
tctgacaagtaagtg

SEQ ID NO: 798148 - DNA, 15 bp, Homo sapiens
ctgacaagtaagtga

SEQ ID NO: 798149 - DNA, 15 bp, Homo sapiens
tgacaagtaagtgaa

SEQ ID NO: 798150 - DNA, 15 bp, Homo sapiens
gacaagtaagtgaat

SEQ ID NO: 798151 - DNA, 15 bp, Homo sapiens
acaagtaagtgaata

SEQ ID NO: 798152 - DNA, 15 bp, Homo sapiens
caagtaagtgaataa

SEQ ID NO: 798153 - DNA, 15 bp, Homo sapiens
aagtaagtgaataat

SEQ ID NO: 798154 - DNA, 15 bp, Homo sapiens
agtaagtgaataata

SEQ ID NO: 798155 - DNA, 15 bp, Homo sapiens
gtaagtgaataatag

SEQ ID NO: 798156 - DNA, 15 bp, Homo sapiens
taagtgaataatagt

SEQ ID NO: 798157 - DNA, 15 bp, Homo sapiens
aagtgaataatagtt

SEQ ID NO: 798158 - DNA, 15 bp, Homo sapiens
agtgaataatagttt

SEQ ID NO: 798159 - DNA, 15 bp, Homo sapiens
gtgaataatagtttg

SEQ ID NO: 798160 - DNA, 15 bp, Homo sapiens
tgaataatagtttgc

SEQ ID NO: 798161 - DNA, 15 bp, Homo sapiens
gaataatagtttgcg

SEQ ID NO: 798162 - DNA, 15 bp, Homo sapiens
aataatagtttgcgc

SEQ ID NO: 798163 - DNA, 15 bp, Homo sapiens
ataatagtttgcgcg

SEQ ID NO: 798164 - DNA, 15 bp, Homo sapiens
taatagtttgcgcgg

SEQ ID NO: 798165 - DNA, 15 bp, Homo sapiens
aatagtttgcgcggt

SEQ ID NO: 798166 - DNA, 15 bp, Homo sapiens
atagtttgcgcggta

SEQ ID NO: 798167 - DNA, 15 bp, Homo sapiens
tagtttgcgcggtac

SEQ ID NO: 798168 - DNA, 15 bp, Homo sapiens
agtttgcgcggtact

SEQ ID NO: 798169 - DNA, 15 bp, Homo sapiens
gtttgcgcggtacta

SEQ ID NO: 798170 - DNA, 15 bp, Homo sapiens
tttgcgcggtactaa

SEQ ID NO: 798171 - DNA, 15 bp, Homo sapiens
ttgcgcggtactaat

SEQ ID NO: 798172 - DNA, 15 bp, Homo sapiens
tgcgcggtactaatg

SEQ ID NO: 798173 - DNA, 15 bp, Homo sapiens
gcgcggtactaatgc

SEQ ID NO: 798174 - DNA, 15 bp, Homo sapiens
cgcggtactaatgcc

SEQ ID NO: 798175 - DNA, 15 bp, Homo sapiens
gcggtactaatgcct

SEQ ID NO: 798176 - DNA, 15 bp, Homo sapiens
cggtactaatgcctg

SEQ ID NO: 798177 - DNA, 15 bp, Homo sapiens
ggtactaatgcctga

SEQ ID NO: 798178 - DNA, 15 bp, Homo sapiens
gtactaatgcctgac

SEQ ID NO: 798179 - DNA, 15 bp, Homo sapiens
tactaatgcctgacc

SEQ ID NO: 798180 - DNA, 15 bp, Homo sapiens
actaatgcctgaccg

SEQ ID NO: 798181 - DNA, 15 bp, Homo sapiens
ctaatgcctgaccgg

SEQ ID NO: 798182 - DNA, 15 bp, Homo sapiens
taatgcctgaccgga

SEQ ID NO: 798183 - DNA, 15 bp, Homo sapiens
aatgcctgaccggaa

SEQ ID NO: 798184 - DNA, 15 bp, Homo sapiens
atgcctgaccggaat

SEQ ID NO: 798185 - DNA, 15 bp, Homo sapiens
tgcctgaccggaatt

SEQ ID NO: 798186 - DNA, 15 bp, Homo sapiens
gcctgaccggaattg

SEQ ID NO: 798187 - DNA, 15 bp, Homo sapiens
cctgaccggaattga

SEQ ID NO: 798188 - DNA, 15 bp, Homo sapiens
ctgaccggaattgag

SEQ ID NO: 798189 - DNA, 15 bp, Homo sapiens
tgaccggaattgaga

SEQ ID NO: 798190 - DNA, 15 bp, Homo sapiens
gaccggaattgagat

SEQ ID NO: 798191 - DNA, 15 bp, Homo sapiens
accggaattgagatg

SEQ ID NO: 798192 - DNA, 15 bp, Homo sapiens
ccggaattgagatgt

SEQ ID NO: 798193 - DNA, 15 bp, Homo sapiens
cggaattgagatgtg

SEQ ID NO: 798194 - DNA, 15 bp, Homo sapiens
ggaattgagatgtgt

SEQ ID NO: 798195 - DNA, 15 bp, Homo sapiens
gaattgagatgtgtt

SEQ ID NO: 798196 - DNA, 15 bp, Homo sapiens
aattgagatgtgttg

SEQ ID NO: 798197 - DNA, 15 bp, Homo sapiens
attgagatgtgttgc

SEQ ID NO: 798198 - DNA, 15 bp, Homo sapiens
ttgagatgtgttgcc

SEQ ID NO: 798199 - DNA, 15 bp, Homo sapiens
tgagatgtgttgcct

SEQ ID NO: 798200 - DNA, 15 bp, Homo sapiens
gagatgtgttgcctc

SEQ ID NO: 798201 - DNA, 15 bp, Homo sapiens
agatgtgttgcctct

SEQ ID NO: 798202 - DNA, 15 bp, Homo sapiens
gatgtgttgcctctg

SEQ ID NO: 798203 - DNA, 15 bp, Homo sapiens
atgtgttgcctctga

SEQ ID NO: 798204 - DNA, 15 bp, Homo sapiens
tgtgttgcctctgag

SEQ ID NO: 798205 - DNA, 15 bp, Homo sapiens
gtgttgcctctgagg

SEQ ID NO: 798206 - DNA, 15 bp, Homo sapiens
tgttgcctctgaggg

SEQ ID NO: 798207 - DNA, 15 bp, Homo sapiens
gttgcctctgagggc

SEQ ID NO: 798208 - DNA, 15 bp, Homo sapiens
ttgcctctgagggct

SEQ ID NO: 798209 - DNA, 15 bp, Homo sapiens
tgcctctgagggctt

SEQ ID NO: 798210 - DNA, 15 bp, Homo sapiens
gcctctgagggcttt

SEQ ID NO: 798211 - DNA, 15 bp, Homo sapiens
cctctgagggctttc

SEQ ID NO: 798212 - DNA, 15 bp, Homo sapiens
ctctgagggctttct

SEQ ID NO: 798213 - DNA, 15 bp, Homo sapiens
tctgagggctttctc

SEQ ID NO: 798214 - DNA, 15 bp, Homo sapiens
ctgagggctttctct

SEQ ID NO: 798215 - DNA, 15 bp, Homo sapiens
tgagggctttctctg

SEQ ID NO: 798216 - DNA, 15 bp, Homo sapiens
gagggctttctctgg

SEQ ID NO: 798217 - DNA, 15 bp, Homo sapiens
agggctttctctgga

SEQ ID NO: 798218 - DNA, 15 bp, Homo sapiens
gggctttctctggaa

SEQ ID NO: 798219 - DNA, 15 bp, Homo sapiens
ggctttctctggaag

SEQ ID NO: 798220 - DNA, 15 bp, Homo sapiens
gctttctctggaagt

SEQ ID NO: 798221 - DNA, 15 bp, Homo sapiens
ctttctctggaagtt

SEQ ID NO: 798222 - DNA, 15 bp, Homo sapiens
tttctctggaagttt

SEQ ID NO: 798223 - DNA, 15 bp, Homo sapiens
ttctctggaagtttc

SEQ ID NO: 798224 - DNA, 15 bp, Homo sapiens
tctctggaagtttct

SEQ ID NO: 798225 - DNA, 15 bp, Homo sapiens
ctctggaagtttctc

SEQ ID NO: 798226 - DNA, 15 bp, Homo sapiens
tctggaagtttctct

SEQ ID NO: 798227 - DNA, 15 bp, Homo sapiens
ctggaagtttctctt

SEQ ID NO: 798228 - DNA, 15 bp, Homo sapiens
tggaagtttctctta

SEQ ID NO: 798229 - DNA, 15 bp, Homo sapiens
ggaagtttctcttag

SEQ ID NO: 798230 - DNA, 15 bp, Homo sapiens
gaagtttctcttagg

SEQ ID NO: 798231 - DNA, 15 bp, Homo sapiens
aagtttctcttaggc

SEQ ID NO: 798232 - DNA, 15 bp, Homo sapiens
agtttctcttaggct

SEQ ID NO: 798233 - DNA, 15 bp, Homo sapiens
gtttctcttaggcta

SEQ ID NO: 798234 - DNA, 15 bp, Homo sapiens
tttctcttaggctat

SEQ ID NO: 798235 - DNA, 15 bp, Homo sapiens
ttctcttaggctatg

SEQ ID NO: 798236 - DNA, 15 bp, Homo sapiens
tctcttaggctatga

SEQ ID NO: 798237 - DNA, 15 bp, Homo sapiens
ctcttaggctatgag

SEQ ID NO: 798238 - DNA, 15 bp, Homo sapiens
tcttaggctatgaga

SEQ ID NO: 798239 - DNA, 15 bp, Homo sapiens
cttaggctatgagac

SEQ ID NO: 798240 - DNA, 15 bp, Homo sapiens
ttaggctatgagacc

SEQ ID NO: 798241 - DNA, 15 bp, Homo sapiens
taggctatgagaccc

SEQ ID NO: 798242 - DNA, 15 bp, Homo sapiens
aggctatgagacccc

SEQ ID NO: 798243 - DNA, 15 bp, Homo sapiens
ggctatgagacccct

SEQ ID NO: 798244 - DNA, 15 bp, Homo sapiens
gctatgagacccctg

SEQ ID NO: 798245 - DNA, 15 bp, Homo sapiens
ctatgagacccctgc

SEQ ID NO: 798246 - DNA, 15 bp, Homo sapiens
tatgagacccctgct

SEQ ID NO: 798247 - DNA, 15 bp, Homo sapiens
atgagacccctgctt

SEQ ID NO: 798248 - DNA, 15 bp, Homo sapiens
tgagacccctgctta

SEQ ID NO: 798249 - DNA, 15 bp, Homo sapiens
gagacccctgcttat

SEQ ID NO: 798250 - DNA, 15 bp, Homo sapiens
agacccctgcttata

SEQ ID NO: 798251 - DNA, 15 bp, Homo sapiens
gacccctgcttataa

SEQ ID NO: 798252 - DNA, 15 bp, Homo sapiens
acccctgcttataag

SEQ ID NO: 798253 - DNA, 15 bp, Homo sapiens
cccctgcttataagc

SEQ ID NO: 798254 - DNA, 15 bp, Homo sapiens
ccctgcttataagca

SEQ ID NO: 798255 - DNA, 15 bp, Homo sapiens
cctgcttataagcat

SEQ ID NO: 798256 - DNA, 15 bp, Homo sapiens
ctgcttataagcatg

SEQ ID NO: 798257 - DNA, 15 bp, Homo sapiens
tgcttataagcatgc

SEQ ID NO: 798258 - DNA, 15 bp, Homo sapiens
gcttataagcatgca

SEQ ID NO: 798259 - DNA, 15 bp, Homo sapiens
cttataagcatgcat

SEQ ID NO: 798260 - DNA, 15 bp, Homo sapiens
ttataagcatgcatt

SEQ ID NO: 798261 - DNA, 15 bp, Homo sapiens
tataagcatgcattt

SEQ ID NO: 798262 - DNA, 15 bp, Homo sapiens
ataagcatgcatttt

SEQ ID NO: 798263 - DNA, 15 bp, Homo sapiens
taagcatgcattttc

SEQ ID NO: 798264 - DNA, 15 bp, Homo sapiens
aagcatgcattttcc

SEQ ID NO: 798265 - DNA, 15 bp, Homo sapiens
agcatgcattttcca

SEQ ID NO: 798266 - DNA, 15 bp, Homo sapiens
gcatgcattttccaa

SEQ ID NO: 798267 - DNA, 15 bp, Homo sapiens
catgcattttccaaa

SEQ ID NO: 798268 - DNA, 15 bp, Homo sapiens
atgcattttccaaaa

SEQ ID NO: 798269 - DNA, 15 bp, Homo sapiens
tgcattttccaaaac

SEQ ID NO: 798270 - DNA, 15 bp, Homo sapiens
gcattttccaaaacc

SEQ ID NO: 798271 - DNA, 15 bp, Homo sapiens
cattttccaaaacct

SEQ ID NO: 798272 - DNA, 15 bp, Homo sapiens
attttccaaaacctg

SEQ ID NO: 798273 - DNA, 15 bp, Homo sapiens
ttttccaaaacctgc

SEQ ID NO: 798274 - DNA, 15 bp, Homo sapiens
tttccaaaacctgct

SEQ ID NO: 798275 - DNA, 15 bp, Homo sapiens
ttccaaaacctgctg

SEQ ID NO: 798276 - DNA, 15 bp, Homo sapiens
tccaaaacctgctgt

SEQ ID NO: 798277 - DNA, 15 bp, Homo sapiens
ccaaaacctgctgtt

SEQ ID NO: 798278 - DNA, 15 bp, Homo sapiens
caaaacctgctgttc

SEQ ID NO: 798279 - DNA, 15 bp, Homo sapiens
aaaacctgctgttct

SEQ ID NO: 798280 - DNA, 15 bp, Homo sapiens
aaacctgctgttctt

SEQ ID NO: 798281 - DNA, 15 bp, Homo sapiens
aacctgctgttcttt

SEQ ID NO: 798282 - DNA, 15 bp, Homo sapiens
acctgctgttctttt

SEQ ID NO: 798283 - DNA, 15 bp, Homo sapiens
cctgctgttcttttc

SEQ ID NO: 798284 - DNA, 15 bp, Homo sapiens
ctgctgttcttttct

SEQ ID NO: 798285 - DNA, 15 bp, Homo sapiens
tgctgttcttttctt

SEQ ID NO: 798286 - DNA, 15 bp, Homo sapiens
gctgttcttttcttt

SEQ ID NO: 798287 - DNA, 15 bp, Homo sapiens
ctgttcttttctttc

SEQ ID NO: 798288 - DNA, 15 bp, Homo sapiens
tgttcttttctttca

SEQ ID NO: 798289 - DNA, 15 bp, Homo sapiens
gttcttttctttcac

SEQ ID NO: 798290 - DNA, 15 bp, Homo sapiens
ttcttttctttcact

SEQ ID NO: 798291 - DNA, 15 bp, Homo sapiens
tcttttctttcacta

SEQ ID NO: 798292 - DNA, 15 bp, Homo sapiens
cttttctttcactat

SEQ ID NO: 798293 - DNA, 15 bp, Homo sapiens
ttttctttcactatt

SEQ ID NO: 798294 - DNA, 15 bp, Homo sapiens
tttctttcactattg

SEQ ID NO: 798295 - DNA, 15 bp, Homo sapiens
ttctttcactattgg

SEQ ID NO: 798296 - DNA, 15 bp, Homo sapiens
tctttcactattgga

SEQ ID NO: 798297 - DNA, 15 bp, Homo sapiens
ctttcactattggaa

SEQ ID NO: 798298 - DNA, 15 bp, Homo sapiens
tttcactattggaag

SEQ ID NO: 798299 - DNA, 15 bp, Homo sapiens
ttcactattggaagg

SEQ ID NO: 798300 - DNA, 15 bp, Homo sapiens
tcactattggaagga

SEQ ID NO: 798301 - DNA, 15 bp, Homo sapiens
cactattggaaggag

SEQ ID NO: 798302 - DNA, 15 bp, Homo sapiens
actattggaaggagg

SEQ ID NO: 798303 - DNA, 15 bp, Homo sapiens
ctattggaaggaggg

SEQ ID NO: 798304 - DNA, 15 bp, Homo sapiens
tattggaaggaggga

SEQ ID NO: 798305 - DNA, 15 bp, Homo sapiens
attggaaggagggaa

SEQ ID NO: 798306 - DNA, 15 bp, Homo sapiens
ttggaaggagggaat

SEQ ID NO: 798307 - DNA, 15 bp, Homo sapiens
tggaaggagggaatg

SEQ ID NO: 798308 - DNA, 15 bp, Homo sapiens
ggaaggagggaatgt

SEQ ID NO: 798309 - DNA, 15 bp, Homo sapiens
gaaggagggaatgta

SEQ ID NO: 798310 - DNA, 15 bp, Homo sapiens
aaggagggaatgtat

SEQ ID NO: 798311 - DNA, 15 bp, Homo sapiens
aggagggaatgtata

SEQ ID NO: 798312 - DNA, 15 bp, Homo sapiens
ggagggaatgtatat

SEQ ID NO: 798313 - DNA, 15 bp, Homo sapiens
gagggaatgtatatc

SEQ ID NO: 798314 - DNA, 15 bp, Homo sapiens
agggaatgtatatcc

SEQ ID NO: 798315 - DNA, 15 bp, Homo sapiens
gggaatgtatatcct

SEQ ID NO: 798316 - DNA, 15 bp, Homo sapiens
ggaatgtatatcctc

SEQ ID NO: 798317 - DNA, 15 bp, Homo sapiens
gaatgtatatcctca

SEQ ID NO: 798318 - DNA, 15 bp, Homo sapiens
aatgtatatcctcag

SEQ ID NO: 798319 - DNA, 15 bp, Homo sapiens
atgtatatcctcagg

SEQ ID NO: 798320 - DNA, 15 bp, Homo sapiens
tgtatatcctcaggt

SEQ ID NO: 798321 - DNA, 15 bp, Homo sapiens
gtatatcctcaggta

SEQ ID NO: 798322 - DNA, 15 bp, Homo sapiens
tatatcctcaggtaa

SEQ ID NO: 798323 - DNA, 15 bp, Homo sapiens
atatcctcaggtaat

SEQ ID NO: 798324 - DNA, 15 bp, Homo sapiens
tatcctcaggtaatg

SEQ ID NO: 798325 - DNA, 15 bp, Homo sapiens
atcctcaggtaatgt

SEQ ID NO: 798326 - DNA, 15 bp, Homo sapiens
tcctcaggtaatgta

SEQ ID NO: 798327 - DNA, 15 bp, Homo sapiens
cctcaggtaatgtaa

SEQ ID NO: 798328 - DNA, 15 bp, Homo sapiens
ctcaggtaatgtaag

SEQ ID NO: 798329 - DNA, 15 bp, Homo sapiens
tcaggtaatgtaagg

SEQ ID NO: 798330 - DNA, 15 bp, Homo sapiens
caggtaatgtaaggg

SEQ ID NO: 798331 - DNA, 15 bp, Homo sapiens
aggtaatgtaagggt

SEQ ID NO: 798332 - DNA, 15 bp, Homo sapiens
ggtaatgtaagggtg

SEQ ID NO: 798333 - DNA, 15 bp, Homo sapiens
gtaatgtaagggtgt

SEQ ID NO: 798334 - DNA, 15 bp, Homo sapiens
taatgtaagggtgtg

SEQ ID NO: 798335 - DNA, 15 bp, Homo sapiens
aatgtaagggtgtgt

SEQ ID NO: 798336 - DNA, 15 bp, Homo sapiens
atgtaagggtgtgta

SEQ ID NO: 798337 - DNA, 15 bp, Homo sapiens
tgtaagggtgtgtaa

SEQ ID NO: 798338 - DNA, 15 bp, Homo sapiens
gtaagggtgtgtaaa

SEQ ID NO: 798339 - DNA, 15 bp, Homo sapiens
taagggtgtgtaaag

SEQ ID NO: 798340 - DNA, 15 bp, Homo sapiens
aagggtgtgtaaagg

SEQ ID NO: 798341 - DNA, 15 bp, Homo sapiens
agggtgtgtaaaggt

SEQ ID NO: 798342 - DNA, 15 bp, Homo sapiens
gggtgtgtaaaggta

SEQ ID NO: 798343 - DNA, 15 bp, Homo sapiens
ggtgtgtaaaggtat

SEQ ID NO: 798344 - DNA, 15 bp, Homo sapiens
gtgtgtaaaggtatc

SEQ ID NO: 798345 - DNA, 15 bp, Homo sapiens
tgtgtaaaggtatcc

SEQ ID NO: 798346 - DNA, 15 bp, Homo sapiens
gtgtaaaggtatcct

SEQ ID NO: 798347 - DNA, 15 bp, Homo sapiens
tgtaaaggtatccta

SEQ ID NO: 798348 - DNA, 15 bp, Homo sapiens
gtaaaggtatcctaa

SEQ ID NO: 798349 - DNA, 15 bp, Homo sapiens
taaaggtatcctaaa

SEQ ID NO: 798350 - DNA, 15 bp, Homo sapiens
aaaggtatcctaaag

SEQ ID NO: 798351 - DNA, 15 bp, Homo sapiens
aaggtatcctaaagc

SEQ ID NO: 798352 - DNA, 15 bp, Homo sapiens
aggtatcctaaagca

SEQ ID NO: 798353 - DNA, 15 bp, Homo sapiens
ggtatcctaaagcag

SEQ ID NO: 798354 - DNA, 15 bp, Homo sapiens
gtatcctaaagcagg

SEQ ID NO: 798355 - DNA, 15 bp, Homo sapiens
tatcctaaagcagga

SEQ ID NO: 798356 - DNA, 15 bp, Homo sapiens
atcctaaagcaggat

SEQ ID NO: 798357 - DNA, 15 bp, Homo sapiens
tcctaaagcaggatt

SEQ ID NO: 798358 - DNA, 15 bp, Homo sapiens
cctaaagcaggattt

SEQ ID NO: 798359 - DNA, 15 bp, Homo sapiens
ctaaagcaggattta

SEQ ID NO: 798360 - DNA, 15 bp, Homo sapiens
taaagcaggatttat

SEQ ID NO: 798361 - DNA, 15 bp, Homo sapiens
aaagcaggatttatt

SEQ ID NO: 798362 - DNA, 15 bp, Homo sapiens
aagcaggatttattt

SEQ ID NO: 798363 - DNA, 15 bp, Homo sapiens
agcaggatttatttg

SEQ ID NO: 798364 - DNA, 15 bp, Homo sapiens
gcaggatttatttga

SEQ ID NO: 798365 - DNA, 15 bp, Homo sapiens
caggatttatttgaa

SEQ ID NO: 798366 - DNA, 15 bp, Homo sapiens
aggatttatttgaaa

SEQ ID NO: 798367 - DNA, 15 bp, Homo sapiens
ggatttatttgaaat

SEQ ID NO: 798368 - DNA, 15 bp, Homo sapiens
gatttatttgaaatt

SEQ ID NO: 798369 - DNA, 15 bp, Homo sapiens
atttatttgaaattc

SEQ ID NO: 798370 - DNA, 15 bp, Homo sapiens
tttatttgaaattcc

SEQ ID NO: 798371 - DNA, 15 bp, Homo sapiens
ttatttgaaattcca

SEQ ID NO: 798372 - DNA, 15 bp, Homo sapiens
tatttgaaattccat

SEQ ID NO: 798373 - DNA, 15 bp, Homo sapiens
atttgaaattccatg

SEQ ID NO: 798374 - DNA, 15 bp, Homo sapiens
tttgaaattccatgc

SEQ ID NO: 798375 - DNA, 15 bp, Homo sapiens
ttgaaattccatgct

SEQ ID NO: 798376 - DNA, 15 bp, Homo sapiens
tgaaattccatgctt

SEQ ID NO: 798377 - DNA, 15 bp, Homo sapiens
gaaattccatgcttc

SEQ ID NO: 798378 - DNA, 15 bp, Homo sapiens
aaattccatgcttct

SEQ ID NO: 798379 - DNA, 15 bp, Homo sapiens
aattccatgcttctg

SEQ ID NO: 798380 - DNA, 15 bp, Homo sapiens
attccatgcttctga

SEQ ID NO: 798381 - DNA, 15 bp, Homo sapiens
ttccatgcttctgag

SEQ ID NO: 798382 - DNA, 15 bp, Homo sapiens
tccatgcttctgaga

SEQ ID NO: 798383 - DNA, 15 bp, Homo sapiens
ccatgcttctgagat

SEQ ID NO: 798384 - DNA, 15 bp, Homo sapiens
catgcttctgagatg

SEQ ID NO: 798385 - DNA, 15 bp, Homo sapiens
atgcttctgagatga

SEQ ID NO: 798386 - DNA, 15 bp, Homo sapiens
tgcttctgagatgag

SEQ ID NO: 798387 - DNA, 15 bp, Homo sapiens
gcttctgagatgagt

SEQ ID NO: 798388 - DNA, 15 bp, Homo sapiens
cttctgagatgagtt

SEQ ID NO: 798389 - DNA, 15 bp, Homo sapiens
ttctgagatgagttt

SEQ ID NO: 798390 - DNA, 15 bp, Homo sapiens
tctgagatgagtttt

SEQ ID NO: 798391 - DNA, 15 bp, Homo sapiens
ctgagatgagttttt

SEQ ID NO: 798392 - DNA, 15 bp, Homo sapiens
tgagatgagtttttt

SEQ ID NO: 798393 - DNA, 15 bp, Homo sapiens
gagatgagttttttg

SEQ ID NO: 798394 - DNA, 15 bp, Homo sapiens
agatgagttttttgg

SEQ ID NO: 798395 - DNA, 15 bp, Homo sapiens
gatgagttttttggt

SEQ ID NO: 798396 - DNA, 15 bp, Homo sapiens
atgagttttttggtg

SEQ ID NO: 798397 - DNA, 15 bp, Homo sapiens
tgagttttttggtgt

SEQ ID NO: 798398 - DNA, 15 bp, Homo sapiens
gagttttttggtgtg

SEQ ID NO: 798399 - DNA, 15 bp, Homo sapiens
agttttttggtgtga

SEQ ID NO: 798400 - DNA, 15 bp, Homo sapiens
gttttttggtgtgag

SEQ ID NO: 798401 - DNA, 15 bp, Homo sapiens
ttttttggtgtgaga

SEQ ID NO: 798402 - DNA, 15 bp, Homo sapiens
tttttggtgtgagac

SEQ ID NO: 798403 - DNA, 15 bp, Homo sapiens
ttttggtgtgagaca

SEQ ID NO: 798404 - DNA, 15 bp, Homo sapiens
tttggtgtgagacag

SEQ ID NO: 798405 - DNA, 15 bp, Homo sapiens
ttggtgtgagacagt

SEQ ID NO: 798406 - DNA, 15 bp, Homo sapiens
tggtgtgagacagta

SEQ ID NO: 798407 - DNA, 15 bp, Homo sapiens
ggtgtgagacagtag

SEQ ID NO: 798408 - DNA, 15 bp, Homo sapiens
gtgtgagacagtaga

SEQ ID NO: 798409 - DNA, 15 bp, Homo sapiens
tgtgagacagtagat

SEQ ID NO: 798410 - DNA, 15 bp, Homo sapiens
gtgagacagtagata

SEQ ID NO: 798411 - DNA, 15 bp, Homo sapiens
tgagacagtagatac

SEQ ID NO: 798412 - DNA, 15 bp, Homo sapiens
gagacagtagatacc

SEQ ID NO: 798413 - DNA, 15 bp, Homo sapiens
agacagtagatacca

SEQ ID NO: 798414 - DNA, 15 bp, Homo sapiens
gacagtagataccaa

SEQ ID NO: 798415 - DNA, 15 bp, Homo sapiens
acagtagataccaaa

SEQ ID NO: 798416 - DNA, 15 bp, Homo sapiens
cagtagataccaaaa

SEQ ID NO: 798417 - DNA, 15 bp, Homo sapiens
agtagataccaaaac

SEQ ID NO: 798418 - DNA, 15 bp, Homo sapiens
gtagataccaaaaca

SEQ ID NO: 798419 - DNA, 15 bp, Homo sapiens
tagataccaaaacac

SEQ ID NO: 798420 - DNA, 15 bp, Homo sapiens
agataccaaaacacc

SEQ ID NO: 798421 - DNA, 15 bp, Homo sapiens
gataccaaaacacct

SEQ ID NO: 798422 - DNA, 15 bp, Homo sapiens
ataccaaaacacctg

SEQ ID NO: 798423 - DNA, 15 bp, Homo sapiens
taccaaaacacctgc

SEQ ID NO: 798424 - DNA, 15 bp, Homo sapiens
accaaaacacctgct

SEQ ID NO: 798425 - DNA, 15 bp, Homo sapiens
ccaaaacacctgctt

SEQ ID NO: 798426 - DNA, 15 bp, Homo sapiens
caaaacacctgcttg

SEQ ID NO: 798427 - DNA, 15 bp, Homo sapiens
aaaacacctgcttgg

SEQ ID NO: 798428 - DNA, 15 bp, Homo sapiens
aaacacctgcttggg

SEQ ID NO: 798429 - DNA, 15 bp, Homo sapiens
aacacctgcttggga

SEQ ID NO: 798430 - DNA, 15 bp, Homo sapiens
acacctgcttgggac

SEQ ID NO: 798431 - DNA, 15 bp, Homo sapiens
cacctgcttgggact

SEQ ID NO: 798432 - DNA, 15 bp, Homo sapiens
acctgcttgggactt

SEQ ID NO: 798433 - DNA, 15 bp, Homo sapiens
cctgcttgggactta

SEQ ID NO: 798434 - DNA, 15 bp, Homo sapiens
ctgcttgggacttaa

SEQ ID NO: 798435 - DNA, 15 bp, Homo sapiens
tgcttgggacttaac

SEQ ID NO: 798436 - DNA, 15 bp, Homo sapiens
gcttgggacttaaca

SEQ ID NO: 798437 - DNA, 15 bp, Homo sapiens
cttgggacttaacac

SEQ ID NO: 798438 - DNA, 15 bp, Homo sapiens
ttgggacttaacaca

SEQ ID NO: 798439 - DNA, 15 bp, Homo sapiens
tgggacttaacacag

SEQ ID NO: 798440 - DNA, 15 bp, Homo sapiens
gggacttaacacaga

SEQ ID NO: 798441 - DNA, 15 bp, Homo sapiens
ggacttaacacagaa

SEQ ID NO: 798442 - DNA, 15 bp, Homo sapiens
gacttaacacagaat

SEQ ID NO: 798443 - DNA, 15 bp, Homo sapiens
acttaacacagaata

SEQ ID NO: 798444 - DNA, 15 bp, Homo sapiens
cttaacacagaatac

SEQ ID NO: 798445 - DNA, 15 bp, Homo sapiens
ttaacacagaatacc

SEQ ID NO: 798446 - DNA, 15 bp, Homo sapiens
taacacagaatacca

SEQ ID NO: 798447 - DNA, 15 bp, Homo sapiens
aacacagaataccat

SEQ ID NO: 798448 - DNA, 15 bp, Homo sapiens
acacagaataccatc

SEQ ID NO: 798449 - DNA, 15 bp, Homo sapiens
cacagaataccatcc

SEQ ID NO: 798450 - DNA, 15 bp, Homo sapiens
acagaataccatcct

SEQ ID NO: 798451 - DNA, 15 bp, Homo sapiens
cagaataccatcctt

SEQ ID NO: 798452 - DNA, 15 bp, Homo sapiens
agaataccatccttc

SEQ ID NO: 798453 - DNA, 15 bp, Homo sapiens
gaataccatccttct

SEQ ID NO: 798454 - DNA, 15 bp, Homo sapiens
aataccatccttcta

SEQ ID NO: 798455 - DNA, 15 bp, Homo sapiens
ataccatccttctat

SEQ ID NO: 798456 - DNA, 15 bp, Homo sapiens
taccatccttctatt

SEQ ID NO: 798457 - DNA, 15 bp, Homo sapiens
accatccttctattt

SEQ ID NO: 798458 - DNA, 15 bp, Homo sapiens
ccatccttctatttg

SEQ ID NO: 798459 - DNA, 15 bp, Homo sapiens
catccttctatttgt

SEQ ID NO: 798460 - DNA, 15 bp, Homo sapiens
atccttctatttgtt

SEQ ID NO: 798461 - DNA, 15 bp, Homo sapiens
tccttctatttgttt

SEQ ID NO: 798462 - DNA, 15 bp, Homo sapiens
ccttctatttgtttt

SEQ ID NO: 798463 - DNA, 15 bp, Homo sapiens
cttctatttgttttt

SEQ ID NO: 798464 - DNA, 15 bp, Homo sapiens
ttctatttgtttttt

SEQ ID NO: 798465 - DNA, 15 bp, Homo sapiens
tctatttgttttttg

SEQ ID NO: 798466 - DNA, 15 bp, Homo sapiens
ctatttgttttttgc

SEQ ID NO: 798467 - DNA, 15 bp, Homo sapiens
tatttgttttttgca

SEQ ID NO: 798468 - DNA, 15 bp, Homo sapiens
atttgttttttgcac

SEQ ID NO: 798469 - DNA, 15 bp, Homo sapiens
tttgttttttgcaca

SEQ ID NO: 798470 - DNA, 15 bp, Homo sapiens
ttgttttttgcacat

SEQ ID NO: 798471 - DNA, 15 bp, Homo sapiens
tgttttttgcacatt

SEQ ID NO: 798472 - DNA, 15 bp, Homo sapiens
gttttttgcacattc

SEQ ID NO: 798473 - DNA, 15 bp, Homo sapiens
ttttttgcacattcc

SEQ ID NO: 798474 - DNA, 15 bp, Homo sapiens
tttttgcacattcct

SEQ ID NO: 798475 - DNA, 15 bp, Homo sapiens
ttttgcacattcctc

SEQ ID NO: 798476 - DNA, 15 bp, Homo sapiens
tttgcacattcctct

SEQ ID NO: 798477 - DNA, 15 bp, Homo sapiens
ttgcacattcctctc

SEQ ID NO: 798478 - DNA, 15 bp, Homo sapiens
tgcacattcctctcc

SEQ ID NO: 798479 - DNA, 15 bp, Homo sapiens
gcacattcctctccc

SEQ ID NO: 798480 - DNA, 15 bp, Homo sapiens
cacattcctctccct

SEQ ID NO: 798481 - DNA, 15 bp, Homo sapiens
acattcctctccctt

SEQ ID NO: 798482 - DNA, 15 bp, Homo sapiens
cattcctctcccttc

SEQ ID NO: 798483 - DNA, 15 bp, Homo sapiens
attcctctcccttca

SEQ ID NO: 798484 - DNA, 15 bp, Homo sapiens
ttcctctcccttcag

SEQ ID NO: 798485 - DNA, 15 bp, Homo sapiens
tcctctcccttcagc

SEQ ID NO: 798486 - DNA, 15 bp, Homo sapiens
cctctcccttcagcg

SEQ ID NO: 798487 - DNA, 15 bp, Homo sapiens
ctctcccttcagcgg

SEQ ID NO: 798488 - DNA, 15 bp, Homo sapiens
tctcccttcagcggt

SEQ ID NO: 798489 - DNA, 15 bp, Homo sapiens
ctcccttcagcggtc

SEQ ID NO: 798490 - DNA, 15 bp, Homo sapiens
tcccttcagcggtcc

SEQ ID NO: 798491 - DNA, 15 bp, Homo sapiens
cccttcagcggtcca

SEQ ID NO: 798492 - DNA, 15 bp, Homo sapiens
ccttcagcggtccat

SEQ ID NO: 798493 - DNA, 15 bp, Homo sapiens
cttcagcggtccata

SEQ ID NO: 798494 - DNA, 15 bp, Homo sapiens
ttcagcggtccataa

SEQ ID NO: 798495 - DNA, 15 bp, Homo sapiens
tcagcggtccataac

SEQ ID NO: 798496 - DNA, 15 bp, Homo sapiens
cagcggtccataact

SEQ ID NO: 798497 - DNA, 15 bp, Homo sapiens
agcggtccataactg

SEQ ID NO: 798498 - DNA, 15 bp, Homo sapiens
gcggtccataactgg

SEQ ID NO: 798499 - DNA, 15 bp, Homo sapiens
cggtccataactggg

SEQ ID NO: 798500 - DNA, 15 bp, Homo sapiens
ggtccataactgggt

SEQ ID NO: 798501 - DNA, 15 bp, Homo sapiens
gtccataactgggta

SEQ ID NO: 798502 - DNA, 15 bp, Homo sapiens
tccataactgggtag

SEQ ID NO: 798503 - DNA, 15 bp, Homo sapiens
ccataactgggtagt

SEQ ID NO: 798504 - DNA, 15 bp, Homo sapiens
cataactgggtagtg

SEQ ID NO: 798505 - DNA, 15 bp, Homo sapiens
ataactgggtagtgt

SEQ ID NO: 798506 - DNA, 15 bp, Homo sapiens
taactgggtagtgtc

SEQ ID NO: 798507 - DNA, 15 bp, Homo sapiens
aactgggtagtgtca

SEQ ID NO: 798508 - DNA, 15 bp, Homo sapiens
actgggtagtgtcat

SEQ ID NO: 798509 - DNA, 15 bp, Homo sapiens
ctgggtagtgtcata

SEQ ID NO: 798510 - DNA, 15 bp, Homo sapiens
tgggtagtgtcatac

SEQ ID NO: 798511 - DNA, 15 bp, Homo sapiens
gggtagtgtcataca

SEQ ID NO: 798512 - DNA, 15 bp, Homo sapiens
ggtagtgtcatacac

SEQ ID NO: 798513 - DNA, 15 bp, Homo sapiens
gtagtgtcatacaca

SEQ ID NO: 798514 - DNA, 15 bp, Homo sapiens
tagtgtcatacacac

SEQ ID NO: 798515 - DNA, 15 bp, Homo sapiens
agtgtcatacacacg

SEQ ID NO: 798516 - DNA, 15 bp, Homo sapiens
gtgtcatacacacgt

SEQ ID NO: 798517 - DNA, 15 bp, Homo sapiens
tgtcatacacacgtg

SEQ ID NO: 798518 - DNA, 15 bp, Homo sapiens
gtcatacacacgtgg

SEQ ID NO: 798519 - DNA, 15 bp, Homo sapiens
tcatacacacgtgga

SEQ ID NO: 798520 - DNA, 15 bp, Homo sapiens
catacacacgtggaa

SEQ ID NO: 798521 - DNA, 15 bp, Homo sapiens
atacacacgtggaat

SEQ ID NO: 798522 - DNA, 15 bp, Homo sapiens
tacacacgtggaatg

SEQ ID NO: 798523 - DNA, 15 bp, Homo sapiens
acacacgtggaatgt

SEQ ID NO: 798524 - DNA, 15 bp, Homo sapiens
cacacgtggaatgtg

SEQ ID NO: 798525 - DNA, 15 bp, Homo sapiens
acacgtggaatgtgg

SEQ ID NO: 798526 - DNA, 15 bp, Homo sapiens
cacgtggaatgtggc

SEQ ID NO: 798527 - DNA, 15 bp, Homo sapiens
acgtggaatgtggca

SEQ ID NO: 798528 - DNA, 15 bp, Homo sapiens
cgtggaatgtggcag

SEQ ID NO: 798529 - DNA, 15 bp, Homo sapiens
gtggaatgtggcaga

SEQ ID NO: 798530 - DNA, 15 bp, Homo sapiens
tggaatgtggcagac

SEQ ID NO: 798531 - DNA, 15 bp, Homo sapiens
ggaatgtggcagaca

SEQ ID NO: 798532 - DNA, 15 bp, Homo sapiens
gaatgtggcagacag

SEQ ID NO: 798533 - DNA, 15 bp, Homo sapiens
aatgtggcagacagg

SEQ ID NO: 798534 - DNA, 15 bp, Homo sapiens
atgtggcagacagga

SEQ ID NO: 798535 - DNA, 15 bp, Homo sapiens
tgtggcagacaggat

SEQ ID NO: 798536 - DNA, 15 bp, Homo sapiens
gtggcagacaggatg

SEQ ID NO: 798537 - DNA, 15 bp, Homo sapiens
tggcagacaggatgg

SEQ ID NO: 798538 - DNA, 15 bp, Homo sapiens
ggcagacaggatggt

SEQ ID NO: 798539 - DNA, 15 bp, Homo sapiens
gcagacaggatggtc

SEQ ID NO: 798540 - DNA, 15 bp, Homo sapiens
cagacaggatggtca

SEQ ID NO: 798541 - DNA, 15 bp, Homo sapiens
agacaggatggtcat

SEQ ID NO: 798542 - DNA, 15 bp, Homo sapiens
gacaggatggtcatc

SEQ ID NO: 798543 - DNA, 15 bp, Homo sapiens
acaggatggtcatct

SEQ ID NO: 798544 - DNA, 15 bp, Homo sapiens
caggatggtcatctc

SEQ ID NO: 798545 - DNA, 15 bp, Homo sapiens
aggatggtcatctct

SEQ ID NO: 798546 - DNA, 15 bp, Homo sapiens
ggatggtcatctctc

SEQ ID NO: 798547 - DNA, 15 bp, Homo sapiens
gatggtcatctctca

SEQ ID NO: 798548 - DNA, 15 bp, Homo sapiens
atggtcatctctcat

SEQ ID NO: 798549 - DNA, 15 bp, Homo sapiens
tggtcatctctcatt

SEQ ID NO: 798550 - DNA, 15 bp, Homo sapiens
ggtcatctctcattc

SEQ ID NO: 798551 - DNA, 15 bp, Homo sapiens
gtcatctctcattct

SEQ ID NO: 798552 - DNA, 15 bp, Homo sapiens
tcatctctcattctt

SEQ ID NO: 798553 - DNA, 15 bp, Homo sapiens
catctctcattcttt

SEQ ID NO: 798554 - DNA, 15 bp, Homo sapiens
atctctcattctttg

SEQ ID NO: 798555 - DNA, 15 bp, Homo sapiens
tctctcattctttgc

SEQ ID NO: 798556 - DNA, 15 bp, Homo sapiens
ctctcattctttgcc

SEQ ID NO: 798557 - DNA, 15 bp, Homo sapiens
tctcattctttgcct

SEQ ID NO: 798558 - DNA, 15 bp, Homo sapiens
ctcattctttgcctc

SEQ ID NO: 798559 - DNA, 15 bp, Homo sapiens
tcattctttgcctca

SEQ ID NO: 798560 - DNA, 15 bp, Homo sapiens
cattctttgcctcat

SEQ ID NO: 798561 - DNA, 15 bp, Homo sapiens
attctttgcctcatc

SEQ ID NO: 798562 - DNA, 15 bp, Homo sapiens
ttctttgcctcatca

SEQ ID NO: 798563 - DNA, 15 bp, Homo sapiens
tctttgcctcatcaa

SEQ ID NO: 798564 - DNA, 15 bp, Homo sapiens
ctttgcctcatcaac

SEQ ID NO: 798565 - DNA, 15 bp, Homo sapiens
tttgcctcatcaact

SEQ ID NO: 798566 - DNA, 15 bp, Homo sapiens
ttgcctcatcaactt

SEQ ID NO: 798567 - DNA, 15 bp, Homo sapiens
tgcctcatcaacttc

SEQ ID NO: 798568 - DNA, 15 bp, Homo sapiens
gcctcatcaacttca

SEQ ID NO: 798569 - DNA, 15 bp, Homo sapiens
cctcatcaacttcaa

SEQ ID NO: 798570 - DNA, 15 bp, Homo sapiens
ctcatcaacttcaaa

SEQ ID NO: 798571 - DNA, 15 bp, Homo sapiens
tcatcaacttcaaat

SEQ ID NO: 798572 - DNA, 15 bp, Homo sapiens
catcaacttcaaatt

SEQ ID NO: 798573 - DNA, 15 bp, Homo sapiens
atcaacttcaaatta

SEQ ID NO: 798574 - DNA, 15 bp, Homo sapiens
tcaacttcaaattag

SEQ ID NO: 798575 - DNA, 15 bp, Homo sapiens
caacttcaaattagc

SEQ ID NO: 798576 - DNA, 15 bp, Homo sapiens
aacttcaaattagcc

SEQ ID NO: 798577 - DNA, 15 bp, Homo sapiens
acttcaaattagccc

SEQ ID NO: 798578 - DNA, 15 bp, Homo sapiens
cttcaaattagcccc

SEQ ID NO: 798579 - DNA, 15 bp, Homo sapiens
ttcaaattagccccc

SEQ ID NO: 798580 - DNA, 15 bp, Homo sapiens
tcaaattagcccccc

SEQ ID NO: 798581 - DNA, 15 bp, Homo sapiens
caaattagcccccca

SEQ ID NO: 798582 - DNA, 15 bp, Homo sapiens
aaattagccccccac

SEQ ID NO: 798583 - DNA, 15 bp, Homo sapiens
aattagccccccact

SEQ ID NO: 798584 - DNA, 15 bp, Homo sapiens
attagccccccactg

SEQ ID NO: 798585 - DNA, 15 bp, Homo sapiens
ttagccccccactgg

SEQ ID NO: 798586 - DNA, 15 bp, Homo sapiens
tagccccccactggt

SEQ ID NO: 798587 - DNA, 15 bp, Homo sapiens
agccccccactggtc

SEQ ID NO: 798588 - DNA, 15 bp, Homo sapiens
gccccccactggtct

SEQ ID NO: 798589 - DNA, 15 bp, Homo sapiens
ccccccactggtcta

SEQ ID NO: 798590 - DNA, 15 bp, Homo sapiens
cccccactggtctat

SEQ ID NO: 798591 - DNA, 15 bp, Homo sapiens
ccccactggtctatt

SEQ ID NO: 798592 - DNA, 15 bp, Homo sapiens
cccactggtctatta

SEQ ID NO: 798593 - DNA, 15 bp, Homo sapiens
ccactggtctattaa

SEQ ID NO: 798594 - DNA, 15 bp, Homo sapiens
cactggtctattaac

SEQ ID NO: 798595 - DNA, 15 bp, Homo sapiens
actggtctattaact

SEQ ID NO: 798596 - DNA, 15 bp, Homo sapiens
ctggtctattaactt

SEQ ID NO: 798597 - DNA, 15 bp, Homo sapiens
tggtctattaacttt

SEQ ID NO: 798598 - DNA, 15 bp, Homo sapiens
ggtctattaactttg

SEQ ID NO: 798599 - DNA, 15 bp, Homo sapiens
gtctattaactttga

SEQ ID NO: 798600 - DNA, 15 bp, Homo sapiens
tctattaactttgag

SEQ ID NO: 798601 - DNA, 15 bp, Homo sapiens
ctattaactttgagt

SEQ ID NO: 798602 - DNA, 15 bp, Homo sapiens
tattaactttgagtt

SEQ ID NO: 798603 - DNA, 15 bp, Homo sapiens
attaactttgagttg

SEQ ID NO: 798604 - DNA, 15 bp, Homo sapiens
ttaactttgagttgc

SEQ ID NO: 798605 - DNA, 15 bp, Homo sapiens
taactttgagttgcc

SEQ ID NO: 798606 - DNA, 15 bp, Homo sapiens
aactttgagttgcca

SEQ ID NO: 798607 - DNA, 15 bp, Homo sapiens
actttgagttgccat

SEQ ID NO: 798608 - DNA, 15 bp, Homo sapiens
ctttgagttgccatc

SEQ ID NO: 798609 - DNA, 15 bp, Homo sapiens
tttgagttgccatct

SEQ ID NO: 798610 - DNA, 15 bp, Homo sapiens
ttgagttgccatctc

SEQ ID NO: 798611 - DNA, 15 bp, Homo sapiens
tgagttgccatctca

SEQ ID NO: 798612 - DNA, 15 bp, Homo sapiens
gagttgccatctcaa

SEQ ID NO: 798613 - DNA, 15 bp, Homo sapiens
agttgccatctcaat

SEQ ID NO: 798614 - DNA, 15 bp, Homo sapiens
gttgccatctcaatg

SEQ ID NO: 798615 - DNA, 15 bp, Homo sapiens
ttgccatctcaatgg

SEQ ID NO: 798616 - DNA, 15 bp, Homo sapiens
tgccatctcaatggt

SEQ ID NO: 798617 - DNA, 15 bp, Homo sapiens
gccatctcaatggta

SEQ ID NO: 798618 - DNA, 15 bp, Homo sapiens
ccatctcaatggtac

SEQ ID NO: 798619 - DNA, 15 bp, Homo sapiens
catctcaatggtacg

SEQ ID NO: 798620 - DNA, 15 bp, Homo sapiens
atctcaatggtacgt

SEQ ID NO: 798621 - DNA, 15 bp, Homo sapiens
tctcaatggtacgtt

SEQ ID NO: 798622 - DNA, 15 bp, Homo sapiens
ctcaatggtacgttt

SEQ ID NO: 798623 - DNA, 15 bp, Homo sapiens
tcaatggtacgtttg

SEQ ID NO: 798624 - DNA, 15 bp, Homo sapiens
caatggtacgtttgc

SEQ ID NO: 798625 - DNA, 15 bp, Homo sapiens
aatggtacgtttgcc

SEQ ID NO: 798626 - DNA, 15 bp, Homo sapiens
atggtacgtttgcct

SEQ ID NO: 798627 - DNA, 15 bp, Homo sapiens
tggtacgtttgccta

SEQ ID NO: 798628 - DNA, 15 bp, Homo sapiens
ggtacgtttgcctat

SEQ ID NO: 798629 - DNA, 15 bp, Homo sapiens
gtacgtttgcctatt

SEQ ID NO: 798630 - DNA, 15 bp, Homo sapiens
tacgtttgcctattt

SEQ ID NO: 798631 - DNA, 15 bp, Homo sapiens
acgtttgcctatttt

SEQ ID NO: 798632 - DNA, 15 bp, Homo sapiens
cgtttgcctattttg

SEQ ID NO: 798633 - DNA, 15 bp, Homo sapiens
gtttgcctattttgt

SEQ ID NO: 798634 - DNA, 15 bp, Homo sapiens
tttgcctattttgtt

SEQ ID NO: 798635 - DNA, 15 bp, Homo sapiens
ttgcctattttgttc

SEQ ID NO: 798636 - DNA, 15 bp, Homo sapiens
tgcctattttgttca

SEQ ID NO: 798637 - DNA, 15 bp, Homo sapiens
gcctattttgttcag

SEQ ID NO: 798638 - DNA, 15 bp, Homo sapiens
cctattttgttcagg

SEQ ID NO: 798639 - DNA, 15 bp, Homo sapiens
ctattttgttcaggc

SEQ ID NO: 798640 - DNA, 15 bp, Homo sapiens
tattttgttcaggca

SEQ ID NO: 798641 - DNA, 15 bp, Homo sapiens
attttgttcaggcag

SEQ ID NO: 798642 - DNA, 15 bp, Homo sapiens
ttttgttcaggcagg

SEQ ID NO: 798643 - DNA, 15 bp, Homo sapiens
tttgttcaggcaggt

SEQ ID NO: 798644 - DNA, 15 bp, Homo sapiens
ttgttcaggcaggtg

SEQ ID NO: 798645 - DNA, 15 bp, Homo sapiens
tgttcaggcaggtga

SEQ ID NO: 798646 - DNA, 15 bp, Homo sapiens
gttcaggcaggtgac

SEQ ID NO: 798647 - DNA, 15 bp, Homo sapiens
ttcaggcaggtgact

SEQ ID NO: 798648 - DNA, 15 bp, Homo sapiens
tcaggcaggtgacta

SEQ ID NO: 798649 - DNA, 15 bp, Homo sapiens
caggcaggtgactat

SEQ ID NO: 798650 - DNA, 15 bp, Homo sapiens
aggcaggtgactatg

SEQ ID NO: 798651 - DNA, 15 bp, Homo sapiens
ggcaggtgactatga

SEQ ID NO: 798652 - DNA, 15 bp, Homo sapiens
gcaggtgactatgac

SEQ ID NO: 798653 - DNA, 15 bp, Homo sapiens
caggtgactatgaca

SEQ ID NO: 798654 - DNA, 15 bp, Homo sapiens
aggtgactatgacat

SEQ ID NO: 798655 - DNA, 15 bp, Homo sapiens
ggtgactatgacata

SEQ ID NO: 798656 - DNA, 15 bp, Homo sapiens
gtgactatgacatat

SEQ ID NO: 798657 - DNA, 15 bp, Homo sapiens
tgactatgacatata

SEQ ID NO: 798658 - DNA, 15 bp, Homo sapiens
gactatgacatatag

SEQ ID NO: 798659 - DNA, 15 bp, Homo sapiens
actatgacatataga

SEQ ID NO: 798660 - DNA, 15 bp, Homo sapiens
ctatgacatatagac

SEQ ID NO: 798661 - DNA, 15 bp, Homo sapiens
tatgacatatagact

SEQ ID NO: 798662 - DNA, 15 bp, Homo sapiens
atgacatatagactt

SEQ ID NO: 798663 - DNA, 15 bp, Homo sapiens
tgacatatagacttt

SEQ ID NO: 798664 - DNA, 15 bp, Homo sapiens
gacatatagactttt

SEQ ID NO: 798665 - DNA, 15 bp, Homo sapiens
acatatagacttttc

SEQ ID NO: 798666 - DNA, 15 bp, Homo sapiens
catatagacttttca

SEQ ID NO: 798667 - DNA, 15 bp, Homo sapiens
atatagacttttcat

SEQ ID NO: 798668 - DNA, 15 bp, Homo sapiens
tatagacttttcata

SEQ ID NO: 798669 - DNA, 15 bp, Homo sapiens
atagacttttcataa

SEQ ID NO: 798670 - DNA, 15 bp, Homo sapiens
tagacttttcataag

SEQ ID NO: 798671 - DNA, 15 bp, Homo sapiens
agacttttcataagc

SEQ ID NO: 798672 - DNA, 15 bp, Homo sapiens
gacttttcataagca

SEQ ID NO: 798673 - DNA, 15 bp, Homo sapiens
acttttcataagcat

SEQ ID NO: 798674 - DNA, 15 bp, Homo sapiens
cttttcataagcatc

SEQ ID NO: 798675 - DNA, 15 bp, Homo sapiens
ttttcataagcatcc

SEQ ID NO: 798676 - DNA, 15 bp, Homo sapiens
tttcataagcatcca

SEQ ID NO: 798677 - DNA, 15 bp, Homo sapiens
ttcataagcatccaa

SEQ ID NO: 798678 - DNA, 15 bp, Homo sapiens
tcataagcatccaag

SEQ ID NO: 798679 - DNA, 15 bp, Homo sapiens
cataagcatccaagg

SEQ ID NO: 798680 - DNA, 15 bp, Homo sapiens
ataagcatccaagga

SEQ ID NO: 798681 - DNA, 15 bp, Homo sapiens
taagcatccaaggat

SEQ ID NO: 798682 - DNA, 15 bp, Homo sapiens
aagcatccaaggatg

SEQ ID NO: 798683 - DNA, 15 bp, Homo sapiens
agcatccaaggatgc

SEQ ID NO: 798684 - DNA, 15 bp, Homo sapiens
gcatccaaggatgcc

SEQ ID NO: 798685 - DNA, 15 bp, Homo sapiens
catccaaggatgcct

SEQ ID NO: 798686 - DNA, 15 bp, Homo sapiens
atccaaggatgcctg

SEQ ID NO: 798687 - DNA, 15 bp, Homo sapiens
tccaaggatgcctgt

SEQ ID NO: 798688 - DNA, 15 bp, Homo sapiens
ccaaggatgcctgtc

SEQ ID NO: 798689 - DNA, 15 bp, Homo sapiens
caaggatgcctgtca

SEQ ID NO: 798690 - DNA, 15 bp, Homo sapiens
aaggatgcctgtcag

SEQ ID NO: 798691 - DNA, 15 bp, Homo sapiens
aggatgcctgtcaga

SEQ ID NO: 798692 - DNA, 15 bp, Homo sapiens
ggatgcctgtcagat

SEQ ID NO: 798693 - DNA, 15 bp, Homo sapiens
gatgcctgtcagatg

SEQ ID NO: 798694 - DNA, 15 bp, Homo sapiens
atgcctgtcagatga

SEQ ID NO: 798695 - DNA, 15 bp, Homo sapiens
tgcctgtcagatgaa

SEQ ID NO: 798696 - DNA, 15 bp, Homo sapiens
gcctgtcagatgaaa

SEQ ID NO: 798697 - DNA, 15 bp, Homo sapiens
cctgtcagatgaaag

SEQ ID NO: 798698 - DNA, 15 bp, Homo sapiens
ctgtcagatgaaaga

SEQ ID NO: 798699 - DNA, 15 bp, Homo sapiens
tgtcagatgaaagag

SEQ ID NO: 798700 - DNA, 15 bp, Homo sapiens
gtcagatgaaagagc

SEQ ID NO: 798701 - DNA, 15 bp, Homo sapiens
tcagatgaaagagca

SEQ ID NO: 798702 - DNA, 15 bp, Homo sapiens
cagatgaaagagcat

SEQ ID NO: 798703 - DNA, 15 bp, Homo sapiens
agatgaaagagcata

SEQ ID NO: 798704 - DNA, 15 bp, Homo sapiens
gatgaaagagcatag

SEQ ID NO: 798705 - DNA, 15 bp, Homo sapiens
atgaaagagcataga

SEQ ID NO: 798706 - DNA, 15 bp, Homo sapiens
tgaaagagcatagat

SEQ ID NO: 798707 - DNA, 15 bp, Homo sapiens
gaaagagcatagatg

SEQ ID NO: 798708 - DNA, 15 bp, Homo sapiens
aaagagcatagatgg

SEQ ID NO: 798709 - DNA, 15 bp, Homo sapiens
aagagcatagatggc

SEQ ID NO: 798710 - DNA, 15 bp, Homo sapiens
agagcatagatggct

SEQ ID NO: 798711 - DNA, 15 bp, Homo sapiens
gagcatagatggctt

SEQ ID NO: 798712 - DNA, 15 bp, Homo sapiens
agcatagatggctta

SEQ ID NO: 798713 - DNA, 15 bp, Homo sapiens
gcatagatggcttaa

SEQ ID NO: 798714 - DNA, 15 bp, Homo sapiens
catagatggcttaac

SEQ ID NO: 798715 - DNA, 15 bp, Homo sapiens
atagatggcttaact

SEQ ID NO: 798716 - DNA, 15 bp, Homo sapiens
tagatggcttaactg

SEQ ID NO: 798717 - DNA, 15 bp, Homo sapiens
agatggcttaactgc

SEQ ID NO: 798718 - DNA, 15 bp, Homo sapiens
gatggcttaactgct

SEQ ID NO: 798719 - DNA, 15 bp, Homo sapiens
atggcttaactgctt

SEQ ID NO: 798720 - DNA, 15 bp, Homo sapiens
tggcttaactgcttt

SEQ ID NO: 798721 - DNA, 15 bp, Homo sapiens
ggcttaactgctttt

SEQ ID NO: 798722 - DNA, 15 bp, Homo sapiens
gcttaactgcttttg

SEQ ID NO: 798723 - DNA, 15 bp, Homo sapiens
cttaactgcttttga

SEQ ID NO: 798724 - DNA, 15 bp, Homo sapiens
ttaactgcttttgag

SEQ ID NO: 798725 - DNA, 15 bp, Homo sapiens
taactgcttttgagt

SEQ ID NO: 798726 - DNA, 15 bp, Homo sapiens
aactgcttttgagtt

SEQ ID NO: 798727 - DNA, 15 bp, Homo sapiens
actgcttttgagttc

SEQ ID NO: 798728 - DNA, 15 bp, Homo sapiens
ctgcttttgagttca

SEQ ID NO: 798729 - DNA, 15 bp, Homo sapiens
tgcttttgagttcat

SEQ ID NO: 798730 - DNA, 15 bp, Homo sapiens
gcttttgagttcata

SEQ ID NO: 798731 - DNA, 15 bp, Homo sapiens
cttttgagttcataa

SEQ ID NO: 798732 - DNA, 15 bp, Homo sapiens
ttttgagttcataaa

SEQ ID NO: 798733 - DNA, 15 bp, Homo sapiens
tttgagttcataaac

SEQ ID NO: 798734 - DNA, 15 bp, Homo sapiens
ttgagttcataaact

SEQ ID NO: 798735 - DNA, 15 bp, Homo sapiens
tgagttcataaactc

SEQ ID NO: 798736 - DNA, 15 bp, Homo sapiens
gagttcataaactct

SEQ ID NO: 798737 - DNA, 15 bp, Homo sapiens
agttcataaactctt

SEQ ID NO: 798738 - DNA, 15 bp, Homo sapiens
gttcataaactctta

SEQ ID NO: 798739 - DNA, 15 bp, Homo sapiens
ttcataaactcttac

SEQ ID NO: 798740 - DNA, 15 bp, Homo sapiens
tcataaactcttacg

SEQ ID NO: 798741 - DNA, 15 bp, Homo sapiens
cataaactcttacgc

SEQ ID NO: 798742 - DNA, 15 bp, Homo sapiens
ataaactcttacgct

SEQ ID NO: 798743 - DNA, 15 bp, Homo sapiens
taaactcttacgctt

SEQ ID NO: 798744 - DNA, 15 bp, Homo sapiens
aaactcttacgcttc

SEQ ID NO: 798745 - DNA, 15 bp, Homo sapiens
aactcttacgcttcc

SEQ ID NO: 798746 - DNA, 15 bp, Homo sapiens
actcttacgcttccc

SEQ ID NO: 798747 - DNA, 15 bp, Homo sapiens
ctcttacgcttcccc

SEQ ID NO: 798748 - DNA, 15 bp, Homo sapiens
tcttacgcttcccca

SEQ ID NO: 798749 - DNA, 15 bp, Homo sapiens
cttacgcttccccaa

SEQ ID NO: 798750 - DNA, 15 bp, Homo sapiens
ttacgcttccccaat

SEQ ID NO: 798751 - DNA, 15 bp, Homo sapiens
tacgcttccccaata

SEQ ID NO: 798752 - DNA, 15 bp, Homo sapiens
acgcttccccaatat

SEQ ID NO: 798753 - DNA, 15 bp, Homo sapiens
cgcttccccaatata

SEQ ID NO: 798754 - DNA, 15 bp, Homo sapiens
gcttccccaatataa

SEQ ID NO: 798755 - DNA, 15 bp, Homo sapiens
cttccccaatataat

SEQ ID NO: 798756 - DNA, 15 bp, Homo sapiens
ttccccaatataatc

SEQ ID NO: 798757 - DNA, 15 bp, Homo sapiens
tccccaatataatcc

SEQ ID NO: 798758 - DNA, 15 bp, Homo sapiens
ccccaatataatccc

SEQ ID NO: 798759 - DNA, 15 bp, Homo sapiens
cccaatataatccct

SEQ ID NO: 798760 - DNA, 15 bp, Homo sapiens
ccaatataatccctc

SEQ ID NO: 798761 - DNA, 15 bp, Homo sapiens
caatataatccctct

SEQ ID NO: 798762 - DNA, 15 bp, Homo sapiens
aatataatccctctg

SEQ ID NO: 798763 - DNA, 15 bp, Homo sapiens
atataatccctctgt

SEQ ID NO: 798764 - DNA, 15 bp, Homo sapiens
tataatccctctgta

SEQ ID NO: 798765 - DNA, 15 bp, Homo sapiens
ataatccctctgtag

SEQ ID NO: 798766 - DNA, 15 bp, Homo sapiens
taatccctctgtagc

SEQ ID NO: 798767 - DNA, 15 bp, Homo sapiens
aatccctctgtagca

SEQ ID NO: 798768 - DNA, 15 bp, Homo sapiens
atccctctgtagcat

SEQ ID NO: 798769 - DNA, 15 bp, Homo sapiens
tccctctgtagcatc

SEQ ID NO: 798770 - DNA, 15 bp, Homo sapiens
ccctctgtagcatcg

SEQ ID NO: 798771 - DNA, 15 bp, Homo sapiens
cctctgtagcatcga

SEQ ID NO: 798772 - DNA, 15 bp, Homo sapiens
ctctgtagcatcgaa

SEQ ID NO: 798773 - DNA, 15 bp, Homo sapiens
tctgtagcatcgaaa

SEQ ID NO: 798774 - DNA, 15 bp, Homo sapiens
ctgtagcatcgaaag

SEQ ID NO: 798775 - DNA, 15 bp, Homo sapiens
tgtagcatcgaaagc

SEQ ID NO: 798776 - DNA, 15 bp, Homo sapiens
gtagcatcgaaagca

SEQ ID NO: 798777 - DNA, 15 bp, Homo sapiens
tagcatcgaaagcag

SEQ ID NO: 798778 - DNA, 15 bp, Homo sapiens
agcatcgaaagcaga

SEQ ID NO: 798779 - DNA, 15 bp, Homo sapiens
gcatcgaaagcagag

SEQ ID NO: 798780 - DNA, 15 bp, Homo sapiens
catcgaaagcagaga

SEQ ID NO: 798781 - DNA, 15 bp, Homo sapiens
atcgaaagcagagaa

SEQ ID NO: 798782 - DNA, 15 bp, Homo sapiens
tcgaaagcagagaac

SEQ ID NO: 798783 - DNA, 15 bp, Homo sapiens
cgaaagcagagaaca

SEQ ID NO: 798784 - DNA, 15 bp, Homo sapiens
gaaagcagagaacag

SEQ ID NO: 798785 - DNA, 15 bp, Homo sapiens
aaagcagagaacagg

SEQ ID NO: 798786 - DNA, 15 bp, Homo sapiens
agctcacattattct

SEQ ID NO: 798787 - DNA, 15 bp, Homo sapiens
gctcacattattcta

SEQ ID NO: 798788 - DNA, 15 bp, Homo sapiens
ctcacattattctag

SEQ ID NO: 798789 - DNA, 15 bp, Homo sapiens
tcacattattctagt

SEQ ID NO: 798790 - DNA, 15 bp, Homo sapiens
cacattattctagtt

SEQ ID NO: 798791 - DNA, 15 bp, Homo sapiens
acattattctagttt

SEQ ID NO: 798792 - DNA, 15 bp, Homo sapiens
cattattctagtttc

SEQ ID NO: 798793 - DNA, 15 bp, Homo sapiens
attattctagtttct

SEQ ID NO: 798794 - DNA, 15 bp, Homo sapiens
ttattctagtttctt

SEQ ID NO: 798795 - DNA, 15 bp, Homo sapiens
tattctagtttctta

SEQ ID NO: 798796 - DNA, 15 bp, Homo sapiens
attctagtttcttat

SEQ ID NO: 798797 - DNA, 15 bp, Homo sapiens
ttctagtttcttatg

SEQ ID NO: 798798 - DNA, 15 bp, Homo sapiens
tctagtttcttatgc

SEQ ID NO: 798799 - DNA, 15 bp, Homo sapiens
ctagtttcttatgcc

SEQ ID NO: 798800 - DNA, 15 bp, Homo sapiens
tagtttcttatgcca

SEQ ID NO: 798801 - DNA, 15 bp, Homo sapiens
agtttcttatgccaa

SEQ ID NO: 798802 - DNA, 15 bp, Homo sapiens
gtttcttatgccaaa

SEQ ID NO: 798803 - DNA, 15 bp, Homo sapiens
tttcttatgccaaaa

SEQ ID NO: 798804 - DNA, 15 bp, Homo sapiens
ttcttatgccaaaaa

SEQ ID NO: 798805 - DNA, 15 bp, Homo sapiens
tcttatgccaaaaat

SEQ ID NO: 798806 - DNA, 15 bp, Homo sapiens
cttatgccaaaaatt

SEQ ID NO: 798807 - DNA, 15 bp, Homo sapiens
ttatgccaaaaattt

SEQ ID NO: 798808 - DNA, 15 bp, Homo sapiens
tatgccaaaaatttg

SEQ ID NO: 798809 - DNA, 15 bp, Homo sapiens
atgccaaaaatttgt

SEQ ID NO: 798810 - DNA, 15 bp, Homo sapiens
tgccaaaaatttgtc

SEQ ID NO: 798811 - DNA, 15 bp, Homo sapiens
gccaaaaatttgtca

SEQ ID NO: 798812 - DNA, 15 bp, Homo sapiens
ccaaaaatttgtcac

SEQ ID NO: 798813 - DNA, 15 bp, Homo sapiens
caaaaatttgtcacc

SEQ ID NO: 798814 - DNA, 15 bp, Homo sapiens
aaaaatttgtcacct

SEQ ID NO: 798815 - DNA, 15 bp, Homo sapiens
aaaatttgtcacctt

SEQ ID NO: 798816 - DNA, 15 bp, Homo sapiens
aaatttgtcaccttc

SEQ ID NO: 798817 - DNA, 15 bp, Homo sapiens
aatttgtcaccttcg

SEQ ID NO: 798818 - DNA, 15 bp, Homo sapiens
atttgtcaccttcgg

SEQ ID NO: 798819 - DNA, 15 bp, Homo sapiens
tttgtcaccttcggt

SEQ ID NO: 798820 - DNA, 15 bp, Homo sapiens
ttgtcaccttcggtt

SEQ ID NO: 798821 - DNA, 15 bp, Homo sapiens
tgtcaccttcggttc

SEQ ID NO: 798822 - DNA, 15 bp, Homo sapiens
gtcaccttcggttct

SEQ ID NO: 798823 - DNA, 15 bp, Homo sapiens
tcaccttcggttctt

SEQ ID NO: 798824 - DNA, 15 bp, Homo sapiens
caccttcggttcttt

SEQ ID NO: 798825 - DNA, 15 bp, Homo sapiens
accttcggttctttc

SEQ ID NO: 798826 - DNA, 15 bp, Homo sapiens
ccttcggttctttcc

SEQ ID NO: 798827 - DNA, 15 bp, Homo sapiens
cttcggttctttccc

SEQ ID NO: 798828 - DNA, 15 bp, Homo sapiens
ttcggttctttccct

SEQ ID NO: 798829 - DNA, 15 bp, Homo sapiens
tcggttctttccctc

SEQ ID NO: 798830 - DNA, 15 bp, Homo sapiens
cggttctttccctca

SEQ ID NO: 798831 - DNA, 15 bp, Homo sapiens
ggttctttccctcac

SEQ ID NO: 798832 - DNA, 15 bp, Homo sapiens
gttctttccctcact

SEQ ID NO: 798833 - DNA, 15 bp, Homo sapiens
ttctttccctcactc

SEQ ID NO: 798834 - DNA, 15 bp, Homo sapiens
tctttccctcactct

SEQ ID NO: 798835 - DNA, 15 bp, Homo sapiens
ctttccctcactctc

SEQ ID NO: 798836 - DNA, 15 bp, Homo sapiens
tttccctcactctca

SEQ ID NO: 798837 - DNA, 15 bp, Homo sapiens
ttccctcactctcac

SEQ ID NO: 798838 - DNA, 15 bp, Homo sapiens
tccctcactctcaca

SEQ ID NO: 798839 - DNA, 15 bp, Homo sapiens
ccctcactctcacat

SEQ ID NO: 798840 - DNA, 15 bp, Homo sapiens
cctcactctcacatt

SEQ ID NO: 798841 - DNA, 15 bp, Homo sapiens
ctcactctcacattt

SEQ ID NO: 798842 - DNA, 15 bp, Homo sapiens
tcactctcacattta

SEQ ID NO: 798843 - DNA, 15 bp, Homo sapiens
cactctcacatttag

SEQ ID NO: 798844 - DNA, 15 bp, Homo sapiens
actctcacatttagt

SEQ ID NO: 798845 - DNA, 15 bp, Homo sapiens
ctctcacatttagtc

SEQ ID NO: 798846 - DNA, 15 bp, Homo sapiens
tctcacatttagtca

SEQ ID NO: 798847 - DNA, 15 bp, Homo sapiens
ctcacatttagtcag

SEQ ID NO: 798848 - DNA, 15 bp, Homo sapiens
tcacatttagtcagg

SEQ ID NO: 798849 - DNA, 15 bp, Homo sapiens
cacatttagtcaggt

SEQ ID NO: 798850 - DNA, 15 bp, Homo sapiens
acatttagtcaggtg

SEQ ID NO: 798851 - DNA, 15 bp, Homo sapiens
catttagtcaggtgc

SEQ ID NO: 798852 - DNA, 15 bp, Homo sapiens
atttagtcaggtgcc

SEQ ID NO: 798853 - DNA, 15 bp, Homo sapiens
tttagtcaggtgcca

SEQ ID NO: 798854 - DNA, 15 bp, Homo sapiens
ttagtcaggtgccaa

SEQ ID NO: 798855 - DNA, 15 bp, Homo sapiens
tagtcaggtgccaag

SEQ ID NO: 798856 - DNA, 15 bp, Homo sapiens
agtcaggtgccaagt

SEQ ID NO: 798857 - DNA, 15 bp, Homo sapiens
gtcaggtgccaagtc

SEQ ID NO: 798858 - DNA, 15 bp, Homo sapiens
tcaggtgccaagtcc

SEQ ID NO: 798859 - DNA, 15 bp, Homo sapiens
caggtgccaagtcct

SEQ ID NO: 798860 - DNA, 15 bp, Homo sapiens
aggtgccaagtcctg

SEQ ID NO: 798861 - DNA, 15 bp, Homo sapiens
ggtgccaagtcctgg

SEQ ID NO: 798862 - DNA, 15 bp, Homo sapiens
gtgccaagtcctgga

SEQ ID NO: 798863 - DNA, 15 bp, Homo sapiens
tgccaagtcctggag

SEQ ID NO: 798864 - DNA, 15 bp, Homo sapiens
gccaagtcctggaga

SEQ ID NO: 798865 - DNA, 15 bp, Homo sapiens
ccaagtcctggagaa

SEQ ID NO: 798866 - DNA, 15 bp, Homo sapiens
caagtcctggagaag

SEQ ID NO: 798867 - DNA, 15 bp, Homo sapiens
aagtcctggagaagc

SEQ ID NO: 798868 - DNA, 15 bp, Homo sapiens
agtcctggagaagct

SEQ ID NO: 798869 - DNA, 15 bp, Homo sapiens
gtcctggagaagctc

SEQ ID NO: 798870 - DNA, 15 bp, Homo sapiens
tcctggagaagctcc

SEQ ID NO: 798871 - DNA, 15 bp, Homo sapiens
cctggagaagctcct

SEQ ID NO: 798872 - DNA, 15 bp, Homo sapiens
ctggagaagctcctc

SEQ ID NO: 798873 - DNA, 15 bp, Homo sapiens
tggagaagctcctcc

SEQ ID NO: 798874 - DNA, 15 bp, Homo sapiens
ggagaagctcctcct

SEQ ID NO: 798875 - DNA, 15 bp, Homo sapiens
gagaagctcctcctc

SEQ ID NO: 798876 - DNA, 15 bp, Homo sapiens
agaagctcctcctcc

SEQ ID NO: 798877 - DNA, 15 bp, Homo sapiens
gaagctcctcctcca

SEQ ID NO: 798878 - DNA, 15 bp, Homo sapiens
aagctcctcctccac

SEQ ID NO: 798879 - DNA, 15 bp, Homo sapiens
agctcctcctccacc

SEQ ID NO: 798880 - DNA, 15 bp, Homo sapiens
gctcctcctccaccc

SEQ ID NO: 798881 - DNA, 15 bp, Homo sapiens
ctcctcctccacccc

SEQ ID NO: 798882 - DNA, 15 bp, Homo sapiens
tcctcctccaccccg

SEQ ID NO: 798883 - DNA, 15 bp, Homo sapiens
cctcctccaccccgc

SEQ ID NO: 798884 - DNA, 15 bp, Homo sapiens
ctcctccaccccgca

SEQ ID NO: 798885 - DNA, 15 bp, Homo sapiens
tcctccaccccgcaa

SEQ ID NO: 798886 - DNA, 15 bp, Homo sapiens
cctccaccccgcaat

SEQ ID NO: 798887 - DNA, 15 bp, Homo sapiens
ctccaccccgcaatt

SEQ ID NO: 798888 - DNA, 15 bp, Homo sapiens
tccaccccgcaattt

SEQ ID NO: 798889 - DNA, 15 bp, Homo sapiens
ccaccccgcaatttt

SEQ ID NO: 798890 - DNA, 15 bp, Homo sapiens
caccccgcaattttg

SEQ ID NO: 798891 - DNA, 15 bp, Homo sapiens
accccgcaattttgt

SEQ ID NO: 798892 - DNA, 15 bp, Homo sapiens
ccccgcaattttgtc

SEQ ID NO: 798893 - DNA, 15 bp, Homo sapiens
cccgcaattttgtcc

SEQ ID NO: 798894 - DNA, 15 bp, Homo sapiens
ccgcaattttgtccc

SEQ ID NO: 798895 - DNA, 15 bp, Homo sapiens
cgcaattttgtcccc

SEQ ID NO: 798896 - DNA, 15 bp, Homo sapiens
gcaattttgtcccca

SEQ ID NO: 798897 - DNA, 15 bp, Homo sapiens
caattttgtccccat

SEQ ID NO: 798898 - DNA, 15 bp, Homo sapiens
aattttgtccccatc

SEQ ID NO: 798899 - DNA, 15 bp, Homo sapiens
attttgtccccatca

SEQ ID NO: 798900 - DNA, 15 bp, Homo sapiens
ttttgtccccatcac

SEQ ID NO: 798901 - DNA, 15 bp, Homo sapiens
tttgtccccatcacc

SEQ ID NO: 798902 - DNA, 15 bp, Homo sapiens
ttgtccccatcacct

SEQ ID NO: 798903 - DNA, 15 bp, Homo sapiens
tgtccccatcacctg

SEQ ID NO: 798904 - DNA, 15 bp, Homo sapiens
gtccccatcacctgg

SEQ ID NO: 798905 - DNA, 15 bp, Homo sapiens
tccccatcacctgga

SEQ ID NO: 798906 - DNA, 15 bp, Homo sapiens
ccccatcacctggac

SEQ ID NO: 798907 - DNA, 15 bp, Homo sapiens
cccatcacctggact

SEQ ID NO: 798908 - DNA, 15 bp, Homo sapiens
ccatcacctggactc

SEQ ID NO: 798909 - DNA, 15 bp, Homo sapiens
catcacctggactct

SEQ ID NO: 798910 - DNA, 15 bp, Homo sapiens
atcacctggactcta

SEQ ID NO: 798911 - DNA, 15 bp, Homo sapiens
tcacctggactctaa

SEQ ID NO: 798912 - DNA, 15 bp, Homo sapiens
cacctggactctaac

SEQ ID NO: 798913 - DNA, 15 bp, Homo sapiens
acctggactctaaca

SEQ ID NO: 798914 - DNA, 15 bp, Homo sapiens
cctggactctaacag

SEQ ID NO: 798915 - DNA, 15 bp, Homo sapiens
ctggactctaacagg

SEQ ID NO: 798916 - DNA, 15 bp, Homo sapiens
tggactctaacagga

SEQ ID NO: 798917 - DNA, 15 bp, Homo sapiens
ggactctaacaggag

SEQ ID NO: 798918 - DNA, 15 bp, Homo sapiens
gactctaacaggagc

SEQ ID NO: 798919 - DNA, 15 bp, Homo sapiens
actctaacaggagct

SEQ ID NO: 798920 - DNA, 15 bp, Homo sapiens
ctctaacaggagctt

SEQ ID NO: 798921 - DNA, 15 bp, Homo sapiens
tctaacaggagcttt

SEQ ID NO: 798922 - DNA, 15 bp, Homo sapiens
ctaacaggagctttt

SEQ ID NO: 798923 - DNA, 15 bp, Homo sapiens
taacaggagcttttt

SEQ ID NO: 798924 - DNA, 15 bp, Homo sapiens
aacaggagcttttta

SEQ ID NO: 798925 - DNA, 15 bp, Homo sapiens
acaggagctttttaa

SEQ ID NO: 798926 - DNA, 15 bp, Homo sapiens
caggagctttttaag

SEQ ID NO: 798927 - DNA, 15 bp, Homo sapiens
aggagctttttaaga

SEQ ID NO: 798928 - DNA, 15 bp, Homo sapiens
ggagctttttaagac

SEQ ID NO: 798929 - DNA, 15 bp, Homo sapiens
gagctttttaagact

SEQ ID NO: 798930 - DNA, 15 bp, Homo sapiens
agctttttaagactt

SEQ ID NO: 798931 - DNA, 15 bp, Homo sapiens
gctttttaagacttt

SEQ ID NO: 798932 - DNA, 15 bp, Homo sapiens
ctttttaagactttg

SEQ ID NO: 798933 - DNA, 15 bp, Homo sapiens
tttttaagactttgc

SEQ ID NO: 798934 - DNA, 15 bp, Homo sapiens
ttttaagactttgct

SEQ ID NO: 798935 - DNA, 15 bp, Homo sapiens
tttaagactttgcta

SEQ ID NO: 798936 - DNA, 15 bp, Homo sapiens
ttaagactttgctaa

SEQ ID NO: 798937 - DNA, 15 bp, Homo sapiens
taagactttgctaat

SEQ ID NO: 798938 - DNA, 15 bp, Homo sapiens
aagactttgctaatt

SEQ ID NO: 798939 - DNA, 15 bp, Homo sapiens
agactttgctaattt

SEQ ID NO: 798940 - DNA, 15 bp, Homo sapiens
gactttgctaatttc

SEQ ID NO: 798941 - DNA, 15 bp, Homo sapiens
actttgctaatttcc

SEQ ID NO: 798942 - DNA, 15 bp, Homo sapiens
ctttgctaatttcca

SEQ ID NO: 798943 - DNA, 15 bp, Homo sapiens
tttgctaatttccat

SEQ ID NO: 798944 - DNA, 15 bp, Homo sapiens
ttgctaatttccatc

SEQ ID NO: 798945 - DNA, 15 bp, Homo sapiens
tgctaatttccatct

SEQ ID NO: 798946 - DNA, 15 bp, Homo sapiens
gctaatttccatctg

SEQ ID NO: 798947 - DNA, 15 bp, Homo sapiens
ctaatttccatctgt

SEQ ID NO: 798948 - DNA, 15 bp, Homo sapiens
taatttccatctgtt

SEQ ID NO: 798949 - DNA, 15 bp, Homo sapiens
aatttccatctgttc

SEQ ID NO: 798950 - DNA, 15 bp, Homo sapiens
atttccatctgttcc

SEQ ID NO: 798951 - DNA, 15 bp, Homo sapiens
tttccatctgttccc

SEQ ID NO: 798952 - DNA, 15 bp, Homo sapiens
ttccatctgttccct

SEQ ID NO: 798953 - DNA, 15 bp, Homo sapiens
tccatctgttccctg

SEQ ID NO: 798954 - DNA, 15 bp, Homo sapiens
ccatctgttccctgt

SEQ ID NO: 798955 - DNA, 15 bp, Homo sapiens
catctgttccctgtc

SEQ ID NO: 798956 - DNA, 15 bp, Homo sapiens
atctgttccctgtct

SEQ ID NO: 798957 - DNA, 15 bp, Homo sapiens
tctgttccctgtctg

SEQ ID NO: 798958 - DNA, 15 bp, Homo sapiens
ctgttccctgtctgt

SEQ ID NO: 798959 - DNA, 15 bp, Homo sapiens
tgttccctgtctgtt

SEQ ID NO: 798960 - DNA, 15 bp, Homo sapiens
gttccctgtctgttg

SEQ ID NO: 798961 - DNA, 15 bp, Homo sapiens
ttccctgtctgttga

SEQ ID NO: 798962 - DNA, 15 bp, Homo sapiens
tccctgtctgttgat

SEQ ID NO: 798963 - DNA, 15 bp, Homo sapiens
ccctgtctgttgatc

SEQ ID NO: 798964 - DNA, 15 bp, Homo sapiens
cctgtctgttgatcc

SEQ ID NO: 798965 - DNA, 15 bp, Homo sapiens
ctgtctgttgatcct

SEQ ID NO: 798966 - DNA, 15 bp, Homo sapiens
tgtctgttgatccta

SEQ ID NO: 798967 - DNA, 15 bp, Homo sapiens
gtctgttgatcctac

SEQ ID NO: 798968 - DNA, 15 bp, Homo sapiens
tctgttgatcctaca

SEQ ID NO: 798969 - DNA, 15 bp, Homo sapiens
ctgttgatcctacac

SEQ ID NO: 798970 - DNA, 15 bp, Homo sapiens
tgttgatcctacaca

SEQ ID NO: 798971 - DNA, 15 bp, Homo sapiens
gttgatcctacacat

SEQ ID NO: 798972 - DNA, 15 bp, Homo sapiens
ttgatcctacacatg

SEQ ID NO: 798973 - DNA, 15 bp, Homo sapiens
tgatcctacacatga

SEQ ID NO: 798974 - DNA, 15 bp, Homo sapiens
gatcctacacatgac

SEQ ID NO: 798975 - DNA, 15 bp, Homo sapiens
atcctacacatgact

SEQ ID NO: 798976 - DNA, 15 bp, Homo sapiens
tcctacacatgactc

SEQ ID NO: 798977 - DNA, 15 bp, Homo sapiens
cctacacatgactca

SEQ ID NO: 798978 - DNA, 15 bp, Homo sapiens
ctacacatgactcac

SEQ ID NO: 798979 - DNA, 15 bp, Homo sapiens
tacacatgactcacc

SEQ ID NO: 798980 - DNA, 15 bp, Homo sapiens
acacatgactcaccc

SEQ ID NO: 798981 - DNA, 15 bp, Homo sapiens
cacatgactcaccca

SEQ ID NO: 798982 - DNA, 15 bp, Homo sapiens
acatgactcacccat

SEQ ID NO: 798983 - DNA, 15 bp, Homo sapiens
catgactcacccatt

SEQ ID NO: 798984 - DNA, 15 bp, Homo sapiens
atgactcacccattt

SEQ ID NO: 798985 - DNA, 15 bp, Homo sapiens
tgactcacccatttc

SEQ ID NO: 798986 - DNA, 15 bp, Homo sapiens
gactcacccatttct

SEQ ID NO: 798987 - DNA, 15 bp, Homo sapiens
actcacccatttctc

SEQ ID NO: 798988 - DNA, 15 bp, Homo sapiens
ctcacccatttctct

SEQ ID NO: 798989 - DNA, 15 bp, Homo sapiens
tcacccatttctctc

SEQ ID NO: 798990 - DNA, 15 bp, Homo sapiens
cacccatttctctca

SEQ ID NO: 798991 - DNA, 15 bp, Homo sapiens
acccatttctctcaa

SEQ ID NO: 798992 - DNA, 15 bp, Homo sapiens
cccatttctctcaaa

SEQ ID NO: 798993 - DNA, 15 bp, Homo sapiens
ccatttctctcaaaa

SEQ ID NO: 798994 - DNA, 15 bp, Homo sapiens
catttctctcaaaat

SEQ ID NO: 798995 - DNA, 15 bp, Homo sapiens
atttctctcaaaatt

SEQ ID NO: 798996 - DNA, 15 bp, Homo sapiens
tttctctcaaaattg

SEQ ID NO: 798997 - DNA, 15 bp, Homo sapiens
ttctctcaaaattgc

SEQ ID NO: 798998 - DNA, 15 bp, Homo sapiens
tctctcaaaattgca

SEQ ID NO: 798999 - DNA, 15 bp, Homo sapiens
ctctcaaaattgcaa

SEQ ID NO: 799000 - DNA, 15 bp, Homo sapiens
tctcaaaattgcaaa

SEQ ID NO: 799001 - DNA, 15 bp, Homo sapiens
ctcaaaattgcaaac

SEQ ID NO: 799002 - DNA, 15 bp, Homo sapiens
tcaaaattgcaaact

SEQ ID NO: 799003 - DNA, 15 bp, Homo sapiens
caaaattgcaaactg

SEQ ID NO: 799004 - DNA, 15 bp, Homo sapiens
aaaattgcaaactgc

SEQ ID NO: 799005 - DNA, 15 bp, Homo sapiens
aaattgcaaactgca

SEQ ID NO: 799006 - DNA, 15 bp, Homo sapiens
aattgcaaactgcac

SEQ ID NO: 799007 - DNA, 15 bp, Homo sapiens
attgcaaactgcaca

SEQ ID NO: 799008 - DNA, 15 bp, Homo sapiens
ttgcaaactgcacaa

SEQ ID NO: 799009 - DNA, 15 bp, Homo sapiens
tgcaaactgcacaac

SEQ ID NO: 799010 - DNA, 15 bp, Homo sapiens
gcaaactgcacaact

SEQ ID NO: 799011 - DNA, 15 bp, Homo sapiens
caaactgcacaactc

SEQ ID NO: 799012 - DNA, 15 bp, Homo sapiens
aaactgcacaactca

SEQ ID NO: 799013 - DNA, 15 bp, Homo sapiens
aactgcacaactcac

SEQ ID NO: 799014 - DNA, 15 bp, Homo sapiens
actgcacaactcact

SEQ ID NO: 799015 - DNA, 15 bp, Homo sapiens
ctgcacaactcactt

SEQ ID NO: 799016 - DNA, 15 bp, Homo sapiens
tgcacaactcacttc

SEQ ID NO: 799017 - DNA, 15 bp, Homo sapiens
gcacaactcacttcc

SEQ ID NO: 799018 - DNA, 15 bp, Homo sapiens
cacaactcacttccc

SEQ ID NO: 799019 - DNA, 15 bp, Homo sapiens
acaactcacttccca

SEQ ID NO: 799020 - DNA, 15 bp, Homo sapiens
caactcacttcccaa

SEQ ID NO: 799021 - DNA, 15 bp, Homo sapiens
aactcacttcccaat

SEQ ID NO: 799022 - DNA, 15 bp, Homo sapiens
actcacttcccaatt

SEQ ID NO: 799023 - DNA, 15 bp, Homo sapiens
ctcacttcccaattg

SEQ ID NO: 799024 - DNA, 15 bp, Homo sapiens
tcacttcccaattgc

SEQ ID NO: 799025 - DNA, 15 bp, Homo sapiens
cacttcccaattgcc

SEQ ID NO: 799026 - DNA, 15 bp, Homo sapiens
acttcccaattgcct

SEQ ID NO: 799027 - DNA, 15 bp, Homo sapiens
cttcccaattgccta

SEQ ID NO: 799028 - DNA, 15 bp, Homo sapiens
ttcccaattgcctat

SEQ ID NO: 799029 - DNA, 15 bp, Homo sapiens
tcccaattgcctatg

SEQ ID NO: 799030 - DNA, 15 bp, Homo sapiens
cccaattgcctatgg

SEQ ID NO: 799031 - DNA, 15 bp, Homo sapiens
ccaattgcctatggc

SEQ ID NO: 799032 - DNA, 15 bp, Homo sapiens
caattgcctatggca

SEQ ID NO: 799033 - DNA, 15 bp, Homo sapiens
aattgcctatggcag

SEQ ID NO: 799034 - DNA, 15 bp, Homo sapiens
attgcctatggcagt

SEQ ID NO: 799035 - DNA, 15 bp, Homo sapiens
ttgcctatggcagtg

SEQ ID NO: 799036 - DNA, 15 bp, Homo sapiens
tgcctatggcagtga

SEQ ID NO: 799037 - DNA, 15 bp, Homo sapiens
gcctatggcagtgat

SEQ ID NO: 799038 - DNA, 15 bp, Homo sapiens
cctatggcagtgatt

SEQ ID NO: 799039 - DNA, 15 bp, Homo sapiens
ctatggcagtgattt

SEQ ID NO: 799040 - DNA, 15 bp, Homo sapiens
tatggcagtgatttc

SEQ ID NO: 799041 - DNA, 15 bp, Homo sapiens
atggcagtgatttcc

SEQ ID NO: 799042 - DNA, 15 bp, Homo sapiens
tggcagtgatttcca

SEQ ID NO: 799043 - DNA, 15 bp, Homo sapiens
ggcagtgatttccaa

SEQ ID NO: 799044 - DNA, 15 bp, Homo sapiens
gcagtgatttccaaa

SEQ ID NO: 799045 - DNA, 15 bp, Homo sapiens
cagtgatttccaaac

SEQ ID NO: 799046 - DNA, 15 bp, Homo sapiens
agtgatttccaaact

SEQ ID NO: 799047 - DNA, 15 bp, Homo sapiens
gtgatttccaaactg

SEQ ID NO: 799048 - DNA, 15 bp, Homo sapiens
tgatttccaaactgt

SEQ ID NO: 799049 - DNA, 15 bp, Homo sapiens
gatttccaaactgtc

SEQ ID NO: 799050 - DNA, 15 bp, Homo sapiens
atttccaaactgtcc

SEQ ID NO: 799051 - DNA, 15 bp, Homo sapiens
tttccaaactgtcct

SEQ ID NO: 799052 - DNA, 15 bp, Homo sapiens
ttccaaactgtcctc

SEQ ID NO: 799053 - DNA, 15 bp, Homo sapiens
tccaaactgtcctcc

SEQ ID NO: 799054 - DNA, 15 bp, Homo sapiens
ccaaactgtcctcct

SEQ ID NO: 799055 - DNA, 15 bp, Homo sapiens
caaactgtcctccta

SEQ ID NO: 799056 - DNA, 15 bp, Homo sapiens
aaactgtcctcctag

SEQ ID NO: 799057 - DNA, 15 bp, Homo sapiens
aactgtcctcctagg

SEQ ID NO: 799058 - DNA, 15 bp, Homo sapiens
actgtcctcctagga

SEQ ID NO: 799059 - DNA, 15 bp, Homo sapiens
ctgtcctcctaggag

SEQ ID NO: 799060 - DNA, 15 bp, Homo sapiens
tgtcctcctaggaga

SEQ ID NO: 799061 - DNA, 15 bp, Homo sapiens
gtcctcctaggagag

SEQ ID NO: 799062 - DNA, 15 bp, Homo sapiens
tcctcctaggagagc

SEQ ID NO: 799063 - DNA, 15 bp, Homo sapiens
cctcctaggagagcc

SEQ ID NO: 799064 - DNA, 15 bp, Homo sapiens
ctcctaggagagcca

SEQ ID NO: 799065 - DNA, 15 bp, Homo sapiens
tcctaggagagccag

SEQ ID NO: 799066 - DNA, 15 bp, Homo sapiens
cctaggagagccagg

SEQ ID NO: 799067 - DNA, 15 bp, Homo sapiens
ctaggagagccagga

SEQ ID NO: 799068 - DNA, 15 bp, Homo sapiens
taggagagccaggag

SEQ ID NO: 799069 - DNA, 15 bp, Homo sapiens
aggagagccaggagg

SEQ ID NO: 799070 - DNA, 15 bp, Homo sapiens
ggagagccaggaggg

SEQ ID NO: 799071 - DNA, 15 bp, Homo sapiens
gagagccaggagggt

SEQ ID NO: 799072 - DNA, 15 bp, Homo sapiens
agagccaggagggtt

SEQ ID NO: 799073 - DNA, 15 bp, Homo sapiens
gagccaggagggttc

SEQ ID NO: 799074 - DNA, 15 bp, Homo sapiens
agccaggagggttcc

SEQ ID NO: 799075 - DNA, 15 bp, Homo sapiens
gccaggagggttccc

SEQ ID NO: 799076 - DNA, 15 bp, Homo sapiens
ccaggagggttcccc

SEQ ID NO: 799077 - DNA, 15 bp, Homo sapiens
caggagggttccccg

SEQ ID NO: 799078 - DNA, 15 bp, Homo sapiens
aggagggttccccgg

SEQ ID NO: 799079 - DNA, 15 bp, Homo sapiens
ggagggttccccgga

SEQ ID NO: 799080 - DNA, 15 bp, Homo sapiens
gagggttccccggac

SEQ ID NO: 799081 - DNA, 15 bp, Homo sapiens
agggttccccggacc

SEQ ID NO: 799082 - DNA, 15 bp, Homo sapiens
gggttccccggacct

SEQ ID NO: 799083 - DNA, 15 bp, Homo sapiens
ggttccccggacctc

SEQ ID NO: 799084 - DNA, 15 bp, Homo sapiens
gttccccggacctct

SEQ ID NO: 799085 - DNA, 15 bp, Homo sapiens
ttccccggacctctc

SEQ ID NO: 799086 - DNA, 15 bp, Homo sapiens
tccccggacctctct

SEQ ID NO: 799087 - DNA, 15 bp, Homo sapiens
ccccggacctctctt

SEQ ID NO: 799088 - DNA, 15 bp, Homo sapiens
cccggacctctcttg

SEQ ID NO: 799089 - DNA, 15 bp, Homo sapiens
ccggacctctcttgg

SEQ ID NO: 799090 - DNA, 15 bp, Homo sapiens
cggacctctcttggg

SEQ ID NO: 799091 - DNA, 15 bp, Homo sapiens
ggacctctcttgggt

SEQ ID NO: 799092 - DNA, 15 bp, Homo sapiens
gacctctcttgggtc

SEQ ID NO: 799093 - DNA, 15 bp, Homo sapiens
acctctcttgggtcc

SEQ ID NO: 799094 - DNA, 15 bp, Homo sapiens
cctctcttgggtccc

SEQ ID NO: 799095 - DNA, 15 bp, Homo sapiens
ctctcttgggtccct

SEQ ID NO: 799096 - DNA, 15 bp, Homo sapiens
tctcttgggtccctc

SEQ ID NO: 799097 - DNA, 15 bp, Homo sapiens
ctcttgggtccctcc

SEQ ID NO: 799098 - DNA, 15 bp, Homo sapiens
tcttgggtccctccc

SEQ ID NO: 799099 - DNA, 15 bp, Homo sapiens
cttgggtccctccct

SEQ ID NO: 799100 - DNA, 15 bp, Homo sapiens
ttgggtccctccctc

SEQ ID NO: 799101 - DNA, 15 bp, Homo sapiens
tgggtccctccctca

SEQ ID NO: 799102 - DNA, 15 bp, Homo sapiens
gggtccctccctcag

SEQ ID NO: 799103 - DNA, 15 bp, Homo sapiens
ggtccctccctcaga

SEQ ID NO: 799104 - DNA, 15 bp, Homo sapiens
gtccctccctcagat

SEQ ID NO: 799105 - DNA, 15 bp, Homo sapiens
tccctccctcagatt

SEQ ID NO: 799106 - DNA, 15 bp, Homo sapiens
ccctccctcagattt

SEQ ID NO: 799107 - DNA, 15 bp, Homo sapiens
cctccctcagatttc

SEQ ID NO: 799108 - DNA, 15 bp, Homo sapiens
ctccctcagatttcc

SEQ ID NO: 799109 - DNA, 15 bp, Homo sapiens
tccctcagatttccc

SEQ ID NO: 799110 - DNA, 15 bp, Homo sapiens
ccctcagatttcccc

SEQ ID NO: 799111 - DNA, 15 bp, Homo sapiens
cctcagatttcccca

SEQ ID NO: 799112 - DNA, 15 bp, Homo sapiens
ctcagatttccccac

SEQ ID NO: 799113 - DNA, 15 bp, Homo sapiens
tcagatttccccaca

SEQ ID NO: 799114 - DNA, 15 bp, Homo sapiens
cagatttccccacag

SEQ ID NO: 799115 - DNA, 15 bp, Homo sapiens
agatttccccacagc

SEQ ID NO: 799116 - DNA, 15 bp, Homo sapiens
gatttccccacagct

SEQ ID NO: 799117 - DNA, 15 bp, Homo sapiens
atttccccacagctt

SEQ ID NO: 799118 - DNA, 15 bp, Homo sapiens
tttccccacagcttt

SEQ ID NO: 799119 - DNA, 15 bp, Homo sapiens
ttccccacagctttg

SEQ ID NO: 799120 - DNA, 15 bp, Homo sapiens
tccccacagctttgt

SEQ ID NO: 799121 - DNA, 15 bp, Homo sapiens
ccccacagctttgtt

SEQ ID NO: 799122 - DNA, 15 bp, Homo sapiens
cccacagctttgttt

SEQ ID NO: 799123 - DNA, 15 bp, Homo sapiens
ccacagctttgtttt

SEQ ID NO: 799124 - DNA, 15 bp, Homo sapiens
cacagctttgttttt

SEQ ID NO: 799125 - DNA, 15 bp, Homo sapiens
acagctttgtttttc

SEQ ID NO: 799126 - DNA, 15 bp, Homo sapiens
cagctttgtttttca

SEQ ID NO: 799127 - DNA, 15 bp, Homo sapiens
agctttgtttttcat

SEQ ID NO: 799128 - DNA, 15 bp, Homo sapiens
gctttgtttttcatc

SEQ ID NO: 799129 - DNA, 15 bp, Homo sapiens
ctttgtttttcatca

SEQ ID NO: 799130 - DNA, 15 bp, Homo sapiens
tttgtttttcatcag

SEQ ID NO: 799131 - DNA, 15 bp, Homo sapiens
ttgtttttcatcagc

SEQ ID NO: 799132 - DNA, 15 bp, Homo sapiens
tgtttttcatcagct

SEQ ID NO: 799133 - DNA, 15 bp, Homo sapiens
gtttttcatcagctt

SEQ ID NO: 799134 - DNA, 15 bp, Homo sapiens
tttttcatcagcttc

SEQ ID NO: 799135 - DNA, 15 bp, Homo sapiens
ttttcatcagcttca

SEQ ID NO: 799136 - DNA, 15 bp, Homo sapiens
tttcatcagcttcac

SEQ ID NO: 799137 - DNA, 15 bp, Homo sapiens
ttcatcagcttcaca

SEQ ID NO: 799138 - DNA, 15 bp, Homo sapiens
tcatcagcttcacag

SEQ ID NO: 799139 - DNA, 15 bp, Homo sapiens
catcagcttcacaga

SEQ ID NO: 799140 - DNA, 15 bp, Homo sapiens
atcagcttcacagat

SEQ ID NO: 799141 - DNA, 15 bp, Homo sapiens
tcagcttcacagatt

SEQ ID NO: 799142 - DNA, 15 bp, Homo sapiens
cagcttcacagattc

SEQ ID NO: 799143 - DNA, 15 bp, Homo sapiens
agcttcacagattct

SEQ ID NO: 799144 - DNA, 15 bp, Homo sapiens
gcttcacagattcta

SEQ ID NO: 799145 - DNA, 15 bp, Homo sapiens
cttcacagattctaa

SEQ ID NO: 799146 - DNA, 15 bp, Homo sapiens
ttcacagattctaag

SEQ ID NO: 799147 - DNA, 15 bp, Homo sapiens
tcacagattctaagt

SEQ ID NO: 799148 - DNA, 15 bp, Homo sapiens
cacagattctaagtg

SEQ ID NO: 799149 - DNA, 15 bp, Homo sapiens
acagattctaagtgt

SEQ ID NO: 799150 - DNA, 15 bp, Homo sapiens
cagattctaagtgtt

SEQ ID NO: 799151 - DNA, 15 bp, Homo sapiens
agattctaagtgttt

SEQ ID NO: 799152 - DNA, 15 bp, Homo sapiens
gattctaagtgtttt

SEQ ID NO: 799153 - DNA, 15 bp, Homo sapiens
attctaagtgttttt

SEQ ID NO: 799154 - DNA, 15 bp, Homo sapiens
ttctaagtgtttttt

SEQ ID NO: 799155 - DNA, 15 bp, Homo sapiens
tctaagtgttttttt

SEQ ID NO: 799156 - DNA, 15 bp, Homo sapiens
ctaagtgtttttttc

SEQ ID NO: 799157 - DNA, 15 bp, Homo sapiens
taagtgtttttttcc

SEQ ID NO: 799158 - DNA, 15 bp, Homo sapiens
aagtgtttttttccc

SEQ ID NO: 799159 - DNA, 15 bp, Homo sapiens
agtgtttttttcccc

SEQ ID NO: 799160 - DNA, 15 bp, Homo sapiens
gtgtttttttccccc

SEQ ID NO: 799161 - DNA, 15 bp, Homo sapiens
tgtttttttcccccc

SEQ ID NO: 799162 - DNA, 15 bp, Homo sapiens
gtttttttccccccc

SEQ ID NO: 799163 - DNA, 15 bp, Homo sapiens
tttttttccccccct

SEQ ID NO: 799164 - DNA, 15 bp, Homo sapiens
ttttttccccccctc

SEQ ID NO: 799165 - DNA, 15 bp, Homo sapiens
tttttccccccctca

SEQ ID NO: 799166 - DNA, 15 bp, Homo sapiens
ttttccccccctcag

SEQ ID NO: 799167 - DNA, 15 bp, Homo sapiens
tttccccccctcagt

SEQ ID NO: 799168 - DNA, 15 bp, Homo sapiens
ttccccccctcagta

SEQ ID NO: 799169 - DNA, 15 bp, Homo sapiens
tccccccctcagtat

SEQ ID NO: 799170 - DNA, 15 bp, Homo sapiens
ccccccctcagtatc

SEQ ID NO: 799171 - DNA, 15 bp, Homo sapiens
cccccctcagtatct

SEQ ID NO: 799172 - DNA, 15 bp, Homo sapiens
ccccctcagtatctg

SEQ ID NO: 799173 - DNA, 15 bp, Homo sapiens
cccctcagtatctgc

SEQ ID NO: 799174 - DNA, 15 bp, Homo sapiens
ccctcagtatctgca

SEQ ID NO: 799175 - DNA, 15 bp, Homo sapiens
cctcagtatctgcag

SEQ ID NO: 799176 - DNA, 15 bp, Homo sapiens
ctcagtatctgcagg

SEQ ID NO: 799177 - DNA, 15 bp, Homo sapiens
tcagtatctgcaggg

SEQ ID NO: 799178 - DNA, 15 bp, Homo sapiens
cagtatctgcagggg

SEQ ID NO: 799179 - DNA, 15 bp, Homo sapiens
agtatctgcagggga

SEQ ID NO: 799180 - DNA, 15 bp, Homo sapiens
gtatctgcaggggat

SEQ ID NO: 799181 - DNA, 15 bp, Homo sapiens
tatctgcaggggatt

SEQ ID NO: 799182 - DNA, 15 bp, Homo sapiens
atctgcaggggattg

SEQ ID NO: 799183 - DNA, 15 bp, Homo sapiens
tctgcaggggattgg

SEQ ID NO: 799184 - DNA, 15 bp, Homo sapiens
ctgcaggggattggt

SEQ ID NO: 799185 - DNA, 15 bp, Homo sapiens
tgcaggggattggtt

SEQ ID NO: 799186 - DNA, 15 bp, Homo sapiens
gcaggggattggttc

SEQ ID NO: 799187 - DNA, 15 bp, Homo sapiens
caggggattggttcc

SEQ ID NO: 799188 - DNA, 15 bp, Homo sapiens
aggggattggttcca

SEQ ID NO: 799189 - DNA, 15 bp, Homo sapiens
ggggattggttccag

SEQ ID NO: 799190 - DNA, 15 bp, Homo sapiens
gggattggttccagg

SEQ ID NO: 799191 - DNA, 15 bp, Homo sapiens
ggattggttccagga

SEQ ID NO: 799192 - DNA, 15 bp, Homo sapiens
gattggttccaggac

SEQ ID NO: 799193 - DNA, 15 bp, Homo sapiens
attggttccaggacc

SEQ ID NO: 799194 - DNA, 15 bp, Homo sapiens
ttggttccaggaccc

SEQ ID NO: 799195 - DNA, 15 bp, Homo sapiens
tggttccaggacccc

SEQ ID NO: 799196 - DNA, 15 bp, Homo sapiens
ggttccaggacccct

SEQ ID NO: 799197 - DNA, 15 bp, Homo sapiens
gttccaggacccctc

SEQ ID NO: 799198 - DNA, 15 bp, Homo sapiens
ttccaggacccctca

SEQ ID NO: 799199 - DNA, 15 bp, Homo sapiens
tccaggacccctcac

SEQ ID NO: 799200 - DNA, 15 bp, Homo sapiens
ccaggacccctcaca

SEQ ID NO: 799201 - DNA, 15 bp, Homo sapiens
caggacccctcacat

SEQ ID NO: 799202 - DNA, 15 bp, Homo sapiens
aggacccctcacata

SEQ ID NO: 799203 - DNA, 15 bp, Homo sapiens
ggacccctcacatat

SEQ ID NO: 799204 - DNA, 15 bp, Homo sapiens
gacccctcacatata

SEQ ID NO: 799205 - DNA, 15 bp, Homo sapiens
acccctcacatatac

SEQ ID NO: 799206 - DNA, 15 bp, Homo sapiens
cccctcacatatacc

SEQ ID NO: 799207 - DNA, 15 bp, Homo sapiens
ccctcacatatacca

SEQ ID NO: 799208 - DNA, 15 bp, Homo sapiens
cctcacatataccaa

SEQ ID NO: 799209 - DNA, 15 bp, Homo sapiens
ctcacatataccaaa

SEQ ID NO: 799210 - DNA, 15 bp, Homo sapiens
tcacatataccaaaa

SEQ ID NO: 799211 - DNA, 15 bp, Homo sapiens
cacatataccaaaat

SEQ ID NO: 799212 - DNA, 15 bp, Homo sapiens
acatataccaaaatc

SEQ ID NO: 799213 - DNA, 15 bp, Homo sapiens
catataccaaaatct

SEQ ID NO: 799214 - DNA, 15 bp, Homo sapiens
atataccaaaatctg

SEQ ID NO: 799215 - DNA, 15 bp, Homo sapiens
tataccaaaatctgc

SEQ ID NO: 799216 - DNA, 15 bp, Homo sapiens
ataccaaaatctgca

SEQ ID NO: 799217 - DNA, 15 bp, Homo sapiens
taccaaaatctgcac

SEQ ID NO: 799218 - DNA, 15 bp, Homo sapiens
accaaaatctgcaca

SEQ ID NO: 799219 - DNA, 15 bp, Homo sapiens
ccaaaatctgcacat

SEQ ID NO: 799220 - DNA, 15 bp, Homo sapiens
caaaatctgcacata

SEQ ID NO: 799221 - DNA, 15 bp, Homo sapiens
aaaatctgcacatac

SEQ ID NO: 799222 - DNA, 15 bp, Homo sapiens
aaatctgcacatact

SEQ ID NO: 799223 - DNA, 15 bp, Homo sapiens
aatctgcacatactc

SEQ ID NO: 799224 - DNA, 15 bp, Homo sapiens
atctgcacatactca

SEQ ID NO: 799225 - DNA, 15 bp, Homo sapiens
tctgcacatactcaa

SEQ ID NO: 799226 - DNA, 15 bp, Homo sapiens
ctgcacatactcaag

SEQ ID NO: 799227 - DNA, 15 bp, Homo sapiens
tgcacatactcaagt

SEQ ID NO: 799228 - DNA, 15 bp, Homo sapiens
gcacatactcaagtc

SEQ ID NO: 799229 - DNA, 15 bp, Homo sapiens
cacatactcaagtcc

SEQ ID NO: 799230 - DNA, 15 bp, Homo sapiens
acatactcaagtccc

SEQ ID NO: 799231 - DNA, 15 bp, Homo sapiens
catactcaagtcccc

SEQ ID NO: 799232 - DNA, 15 bp, Homo sapiens
atactcaagtccccc

SEQ ID NO: 799233 - DNA, 15 bp, Homo sapiens
tactcaagtccccca

SEQ ID NO: 799234 - DNA, 15 bp, Homo sapiens
actcaagtcccccag

SEQ ID NO: 799235 - DNA, 15 bp, Homo sapiens
ctcaagtcccccagt

SEQ ID NO: 799236 - DNA, 15 bp, Homo sapiens
tcaagtcccccagtg

SEQ ID NO: 799237 - DNA, 15 bp, Homo sapiens
caagtcccccagtgg

SEQ ID NO: 799238 - DNA, 15 bp, Homo sapiens
aagtcccccagtggg

SEQ ID NO: 799239 - DNA, 15 bp, Homo sapiens
agtcccccagtgggc

SEQ ID NO: 799240 - DNA, 15 bp, Homo sapiens
gtcccccagtgggcc

SEQ ID NO: 799241 - DNA, 15 bp, Homo sapiens
tcccccagtgggccc

SEQ ID NO: 799242 - DNA, 15 bp, Homo sapiens
cccccagtgggccct

SEQ ID NO: 799243 - DNA, 15 bp, Homo sapiens
ccccagtgggccctg

SEQ ID NO: 799244 - DNA, 15 bp, Homo sapiens
cccagtgggccctgc

SEQ ID NO: 799245 - DNA, 15 bp, Homo sapiens
ccagtgggccctgca

SEQ ID NO: 799246 - DNA, 15 bp, Homo sapiens
cagtgggccctgcag

SEQ ID NO: 799247 - DNA, 15 bp, Homo sapiens
agtgggccctgcaga

SEQ ID NO: 799248 - DNA, 15 bp, Homo sapiens
gtgggccctgcagaa

SEQ ID NO: 799249 - DNA, 15 bp, Homo sapiens
tgggccctgcagaac

SEQ ID NO: 799250 - DNA, 15 bp, Homo sapiens
gggccctgcagaacc

SEQ ID NO: 799251 - DNA, 15 bp, Homo sapiens
ggccctgcagaaccg

SEQ ID NO: 799252 - DNA, 15 bp, Homo sapiens
gccctgcagaaccga

SEQ ID NO: 799253 - DNA, 15 bp, Homo sapiens
ccctgcagaaccgaa

SEQ ID NO: 799254 - DNA, 15 bp, Homo sapiens
cctgcagaaccgaac

SEQ ID NO: 799255 - DNA, 15 bp, Homo sapiens
ctgcagaaccgaaca

SEQ ID NO: 799256 - DNA, 15 bp, Homo sapiens
tgcagaaccgaacag

SEQ ID NO: 799257 - DNA, 15 bp, Homo sapiens
gcagaaccgaacaga

SEQ ID NO: 799258 - DNA, 15 bp, Homo sapiens
cagaaccgaacagaa

SEQ ID NO: 799259 - DNA, 15 bp, Homo sapiens
agaaccgaacagaac

SEQ ID NO: 799260 - DNA, 15 bp, Homo sapiens
gaaccgaacagaacc

SEQ ID NO: 799261 - DNA, 15 bp, Homo sapiens
aaccgaacagaacct

SEQ ID NO: 799262 - DNA, 15 bp, Homo sapiens
accgaacagaacctg

SEQ ID NO: 799263 - DNA, 15 bp, Homo sapiens
ccgaacagaacctgt

SEQ ID NO: 799264 - DNA, 15 bp, Homo sapiens
cgaacagaacctgtg

SEQ ID NO: 799265 - DNA, 15 bp, Homo sapiens
gaacagaacctgtgt

SEQ ID NO: 799266 - DNA, 15 bp, Homo sapiens
aacagaacctgtgtt

SEQ ID NO: 799267 - DNA, 15 bp, Homo sapiens
acagaacctgtgtta

SEQ ID NO: 799268 - DNA, 15 bp, Homo sapiens
cagaacctgtgttat

SEQ ID NO: 799269 - DNA, 15 bp, Homo sapiens
agaacctgtgttatg

SEQ ID NO: 799270 - DNA, 15 bp, Homo sapiens
gaacctgtgttatgc

SEQ ID NO: 799271 - DNA, 15 bp, Homo sapiens
aacctgtgttatgca

SEQ ID NO: 799272 - DNA, 15 bp, Homo sapiens
acctgtgttatgcaa

SEQ ID NO: 799273 - DNA, 15 bp, Homo sapiens
cctgtgttatgcaaa

SEQ ID NO: 799274 - DNA, 15 bp, Homo sapiens
ctgtgttatgcaaaa

SEQ ID NO: 799275 - DNA, 15 bp, Homo sapiens
tgtgttatgcaaaaa

SEQ ID NO: 799276 - DNA, 15 bp, Homo sapiens
gtgttatgcaaaaaa

SEQ ID NO: 799277 - DNA, 15 bp, Homo sapiens
tgttatgcaaaaaat

SEQ ID NO: 799278 - DNA, 15 bp, Homo sapiens
gttatgcaaaaaatc

SEQ ID NO: 799279 - DNA, 15 bp, Homo sapiens
ttatgcaaaaaatca

SEQ ID NO: 799280 - DNA, 15 bp, Homo sapiens
tatgcaaaaaatcag

SEQ ID NO: 799281 - DNA, 15 bp, Homo sapiens
atgcaaaaaatcagc

SEQ ID NO: 799282 - DNA, 15 bp, Homo sapiens
tgcaaaaaatcagct

SEQ ID NO: 799283 - DNA, 15 bp, Homo sapiens
gcaaaaaatcagctc

SEQ ID NO: 799284 - DNA, 15 bp, Homo sapiens
caaaaaatcagctct

SEQ ID NO: 799285 - DNA, 15 bp, Homo sapiens
aaaaaatcagctctc

SEQ ID NO: 799286 - DNA, 15 bp, Homo sapiens
aaaaatcagctctct

SEQ ID NO: 799287 - DNA, 15 bp, Homo sapiens
aaaatcagctctctg

SEQ ID NO: 799288 - DNA, 15 bp, Homo sapiens
aaatcagctctctgt

SEQ ID NO: 799289 - DNA, 15 bp, Homo sapiens
aatcagctctctgta

SEQ ID NO: 799290 - DNA, 15 bp, Homo sapiens
atcagctctctgtat

SEQ ID NO: 799291 - DNA, 15 bp, Homo sapiens
tcagctctctgtata

SEQ ID NO: 799292 - DNA, 15 bp, Homo sapiens
cagctctctgtatat

SEQ ID NO: 799293 - DNA, 15 bp, Homo sapiens
agctctctgtatatg

SEQ ID NO: 799294 - DNA, 15 bp, Homo sapiens
gctctctgtatatgc

SEQ ID NO: 799295 - DNA, 15 bp, Homo sapiens
ctctctgtatatgca

SEQ ID NO: 799296 - DNA, 15 bp, Homo sapiens
tctctgtatatgcag

SEQ ID NO: 799297 - DNA, 15 bp, Homo sapiens
ctctgtatatgcagg

SEQ ID NO: 799298 - DNA, 15 bp, Homo sapiens
tctgtatatgcaggt

SEQ ID NO: 799299 - DNA, 15 bp, Homo sapiens
ctgtatatgcaggtt

SEQ ID NO: 799300 - DNA, 15 bp, Homo sapiens
tgtatatgcaggttt

SEQ ID NO: 799301 - DNA, 15 bp, Homo sapiens
gtatatgcaggtttc

SEQ ID NO: 799302 - DNA, 15 bp, Homo sapiens
tatatgcaggtttcc

SEQ ID NO: 799303 - DNA, 15 bp, Homo sapiens
atatgcaggtttccc

SEQ ID NO: 799304 - DNA, 15 bp, Homo sapiens
tatgcaggtttccca

SEQ ID NO: 799305 - DNA, 15 bp, Homo sapiens
atgcaggtttcccat

SEQ ID NO: 799306 - DNA, 15 bp, Homo sapiens
tgcaggtttcccatc

SEQ ID NO: 799307 - DNA, 15 bp, Homo sapiens
gcaggtttcccatcc

SEQ ID NO: 799308 - DNA, 15 bp, Homo sapiens
caggtttcccatccc

SEQ ID NO: 799309 - DNA, 15 bp, Homo sapiens
aggtttcccatccca

SEQ ID NO: 799310 - DNA, 15 bp, Homo sapiens
ggtttcccatcccat

SEQ ID NO: 799311 - DNA, 15 bp, Homo sapiens
gtttcccatcccatg

SEQ ID NO: 799312 - DNA, 15 bp, Homo sapiens
tttcccatcccatga

SEQ ID NO: 799313 - DNA, 15 bp, Homo sapiens
ttcccatcccatgaa

SEQ ID NO: 799314 - DNA, 15 bp, Homo sapiens
tcccatcccatgaat

SEQ ID NO: 799315 - DNA, 15 bp, Homo sapiens
cccatcccatgaata

SEQ ID NO: 799316 - DNA, 15 bp, Homo sapiens
ccatcccatgaatat

SEQ ID NO: 799317 - DNA, 15 bp, Homo sapiens
catcccatgaatatt

SEQ ID NO: 799318 - DNA, 15 bp, Homo sapiens
atcccatgaatatta

SEQ ID NO: 799319 - DNA, 15 bp, Homo sapiens
tcccatgaatattat

SEQ ID NO: 799320 - DNA, 15 bp, Homo sapiens
cccatgaatattata

SEQ ID NO: 799321 - DNA, 15 bp, Homo sapiens
ccatgaatattatat

SEQ ID NO: 799322 - DNA, 15 bp, Homo sapiens
catgaatattatatt

SEQ ID NO: 799323 - DNA, 15 bp, Homo sapiens
atgaatattatattt

SEQ ID NO: 799324 - DNA, 15 bp, Homo sapiens
tgaatattatatttt

SEQ ID NO: 799325 - DNA, 15 bp, Homo sapiens
gaatattatattttc

SEQ ID NO: 799326 - DNA, 15 bp, Homo sapiens
aatattatattttca

SEQ ID NO: 799327 - DNA, 15 bp, Homo sapiens
atattatattttcaa

SEQ ID NO: 799328 - DNA, 15 bp, Homo sapiens
tattatattttcaat

SEQ ID NO: 799329 - DNA, 15 bp, Homo sapiens
attatattttcaatc

SEQ ID NO: 799330 - DNA, 15 bp, Homo sapiens
ttatattttcaatcc

SEQ ID NO: 799331 - DNA, 15 bp, Homo sapiens
tatattttcaatccg

SEQ ID NO: 799332 - DNA, 15 bp, Homo sapiens
atattttcaatccgt

SEQ ID NO: 799333 - DNA, 15 bp, Homo sapiens
tattttcaatccgtg

SEQ ID NO: 799334 - DNA, 15 bp, Homo sapiens
attttcaatccgtgt

SEQ ID NO: 799335 - DNA, 15 bp, Homo sapiens
ttttcaatccgtgtt

SEQ ID NO: 799336 - DNA, 15 bp, Homo sapiens
tttcaatccgtgttt

SEQ ID NO: 799337 - DNA, 15 bp, Homo sapiens
ttcaatccgtgttta

SEQ ID NO: 799338 - DNA, 15 bp, Homo sapiens
tcaatccgtgtttag

SEQ ID NO: 799339 - DNA, 15 bp, Homo sapiens
caatccgtgtttagt

SEQ ID NO: 799340 - DNA, 15 bp, Homo sapiens
aatccgtgtttagtt

SEQ ID NO: 799341 - DNA, 15 bp, Homo sapiens
atccgtgtttagttg

SEQ ID NO: 799342 - DNA, 15 bp, Homo sapiens
tccgtgtttagttga

SEQ ID NO: 799343 - DNA, 15 bp, Homo sapiens
ccgtgtttagttgaa

SEQ ID NO: 799344 - DNA, 15 bp, Homo sapiens
cgtgtttagttgaaa

SEQ ID NO: 799345 - DNA, 15 bp, Homo sapiens
gtgtttagttgaaaa

SEQ ID NO: 799346 - DNA, 15 bp, Homo sapiens
tgtttagttgaaaaa

SEQ ID NO: 799347 - DNA, 15 bp, Homo sapiens
gtttagttgaaaaaa

SEQ ID NO: 799348 - DNA, 15 bp, Homo sapiens
tttagttgaaaaaaa

SEQ ID NO: 799349 - DNA, 15 bp, Homo sapiens
ttagttgaaaaaaat

SEQ ID NO: 799350 - DNA, 15 bp, Homo sapiens
tagttgaaaaaaatt

SEQ ID NO: 799351 - DNA, 15 bp, Homo sapiens
agttgaaaaaaattt

SEQ ID NO: 799352 - DNA, 15 bp, Homo sapiens
gttgaaaaaaatttt

SEQ ID NO: 799353 - DNA, 15 bp, Homo sapiens
ttgaaaaaaattttg

SEQ ID NO: 799354 - DNA, 15 bp, Homo sapiens
tgaaaaaaattttgt

SEQ ID NO: 799355 - DNA, 15 bp, Homo sapiens
gaaaaaaattttgta

SEQ ID NO: 799356 - DNA, 15 bp, Homo sapiens
aaaaaaattttgtat

SEQ ID NO: 799357 - DNA, 15 bp, Homo sapiens
aaaaaattttgtata

SEQ ID NO: 799358 - DNA, 15 bp, Homo sapiens
aaaaattttgtataa

SEQ ID NO: 799359 - DNA, 15 bp, Homo sapiens
aaaattttgtataaa

SEQ ID NO: 799360 - DNA, 15 bp, Homo sapiens
aaattttgtataaaa

SEQ ID NO: 799361 - DNA, 15 bp, Homo sapiens
aattttgtataaaag

SEQ ID NO: 799362 - DNA, 15 bp, Homo sapiens
attttgtataaaagt

SEQ ID NO: 799363 - DNA, 15 bp, Homo sapiens
ttttgtataaaagta

SEQ ID NO: 799364 - DNA, 15 bp, Homo sapiens
tttgtataaaagtaa

SEQ ID NO: 799365 - DNA, 15 bp, Homo sapiens
ttgtataaaagtaag

SEQ ID NO: 799366 - DNA, 15 bp, Homo sapiens
tgtataaaagtaagc

SEQ ID NO: 799367 - DNA, 15 bp, Homo sapiens
gtataaaagtaagcc

SEQ ID NO: 799368 - DNA, 15 bp, Homo sapiens
tataaaagtaagcct

SEQ ID NO: 799369 - DNA, 15 bp, Homo sapiens
ataaaagtaagcctg

SEQ ID NO: 799370 - DNA, 15 bp, Homo sapiens
taaaagtaagcctgt

SEQ ID NO: 799371 - DNA, 15 bp, Homo sapiens
aaaagtaagcctgtg

SEQ ID NO: 799372 - DNA, 15 bp, Homo sapiens
aaagtaagcctgtgc

SEQ ID NO: 799373 - DNA, 15 bp, Homo sapiens
aagtaagcctgtgca

SEQ ID NO: 799374 - DNA, 15 bp, Homo sapiens
agtaagcctgtgcag

SEQ ID NO: 799375 - DNA, 15 bp, Homo sapiens
gtaagcctgtgcagt

SEQ ID NO: 799376 - DNA, 15 bp, Homo sapiens
taagcctgtgcagtt

SEQ ID NO: 799377 - DNA, 15 bp, Homo sapiens
aagcctgtgcagttc

SEQ ID NO: 799378 - DNA, 15 bp, Homo sapiens
agcctgtgcagttca

SEQ ID NO: 799379 - DNA, 15 bp, Homo sapiens
gcctgtgcagttcaa

SEQ ID NO: 799380 - DNA, 15 bp, Homo sapiens
cctgtgcagttcaaa

SEQ ID NO: 799381 - DNA, 15 bp, Homo sapiens
ctgtgcagttcaaac

SEQ ID NO: 799382 - DNA, 15 bp, Homo sapiens
tgtgcagttcaaacc

SEQ ID NO: 799383 - DNA, 15 bp, Homo sapiens
gtgcagttcaaaccc

SEQ ID NO: 799384 - DNA, 15 bp, Homo sapiens
tgcagttcaaaccca

SEQ ID NO: 799385 - DNA, 15 bp, Homo sapiens
gcagttcaaacccag

SEQ ID NO: 799386 - DNA, 15 bp, Homo sapiens
cagttcaaacccagg

SEQ ID NO: 799387 - DNA, 15 bp, Homo sapiens
agttcaaacccaggt

SEQ ID NO: 799388 - DNA, 15 bp, Homo sapiens
gttcaaacccaggtt

SEQ ID NO: 799389 - DNA, 15 bp, Homo sapiens
ttcaaacccaggttg

SEQ ID NO: 799390 - DNA, 15 bp, Homo sapiens
tcaaacccaggttgc

SEQ ID NO: 799391 - DNA, 15 bp, Homo sapiens
caaacccaggttgct

SEQ ID NO: 799392 - DNA, 15 bp, Homo sapiens
aaacccaggttgctc

SEQ ID NO: 799393 - DNA, 15 bp, Homo sapiens
aacccaggttgctca

SEQ ID NO: 799394 - DNA, 15 bp, Homo sapiens
acccaggttgctcaa

SEQ ID NO: 799395 - DNA, 15 bp, Homo sapiens
cccaggttgctcaag

SEQ ID NO: 799396 - DNA, 15 bp, Homo sapiens
ccaggttgctcaaga

SEQ ID NO: 799397 - DNA, 15 bp, Homo sapiens
caggttgctcaagag

SEQ ID NO: 799398 - DNA, 15 bp, Homo sapiens
aggttgctcaagagc

SEQ ID NO: 799399 - DNA, 15 bp, Homo sapiens
ggttgctcaagagcc

SEQ ID NO: 799400 - DNA, 15 bp, Homo sapiens
gttgctcaagagcca

SEQ ID NO: 799401 - DNA, 15 bp, Homo sapiens
ttgctcaagagccaa

SEQ ID NO: 799402 - DNA, 15 bp, Homo sapiens
tgctcaagagccaac

SEQ ID NO: 799403 - DNA, 15 bp, Homo sapiens
gctcaagagccaact

SEQ ID NO: 799404 - DNA, 15 bp, Homo sapiens
ctcaagagccaactg

SEQ ID NO: 799405 - DNA, 15 bp, Homo sapiens
tcaagagccaactgt

SEQ ID NO: 799406 - DNA, 15 bp, Homo sapiens
caagagccaactgta

SEQ ID NO: 799407 - DNA, 15 bp, Homo sapiens
aagagccaactgtag

SEQ ID NO: 799408 - DNA, 15 bp, Homo sapiens
agagccaactgtagt

SEQ ID NO: 799409 - DNA, 15 bp, Homo sapiens
gagccaactgtagtc

SEQ ID NO: 799410 - DNA, 15 bp, Homo sapiens
agccaactgtagtct

SEQ ID NO: 799411 - DNA, 15 bp, Homo sapiens
gccaactgtagtctg

SEQ ID NO: 799412 - DNA, 15 bp, Homo sapiens
ccaactgtagtctgt

SEQ ID NO: 799413 - DNA, 15 bp, Homo sapiens
caactgtagtctgtg

SEQ ID NO: 799414 - DNA, 15 bp, Homo sapiens
aactgtagtctgtgt

SEQ ID NO: 799415 - DNA, 15 bp, Homo sapiens
actgtagtctgtgtc

SEQ ID NO: 799416 - DNA, 15 bp, Homo sapiens
ctgtagtctgtgtct

SEQ ID NO: 799417 - DNA, 15 bp, Homo sapiens
tgtagtctgtgtcta

SEQ ID NO: 799418 - DNA, 15 bp, Homo sapiens
gtagtctgtgtctaa

SEQ ID NO: 799419 - DNA, 15 bp, Homo sapiens
tagtctgtgtctaaa

SEQ ID NO: 799420 - DNA, 15 bp, Homo sapiens
agtctgtgtctaaaa

SEQ ID NO: 799421 - DNA, 15 bp, Homo sapiens
gtctgtgtctaaaag

SEQ ID NO: 799422 - DNA, 15 bp, Homo sapiens
tctgtgtctaaaagt

SEQ ID NO: 799423 - DNA, 15 bp, Homo sapiens
ctgtgtctaaaagtc

SEQ ID NO: 799424 - DNA, 15 bp, Homo sapiens
tgtgtctaaaagtct

SEQ ID NO: 799425 - DNA, 15 bp, Homo sapiens
gtgtctaaaagtctg

SEQ ID NO: 799426 - DNA, 15 bp, Homo sapiens
tgtctaaaagtctga

SEQ ID NO: 799427 - DNA, 15 bp, Homo sapiens
gtctaaaagtctgaa

SEQ ID NO: 799428 - DNA, 15 bp, Homo sapiens
tctaaaagtctgaaa

SEQ ID NO: 799429 - DNA, 15 bp, Homo sapiens
ctaaaagtctgaaaa

SEQ ID NO: 799430 - DNA, 15 bp, Homo sapiens
taaaagtctgaaaac

SEQ ID NO: 799431 - DNA, 15 bp, Homo sapiens
aaaagtctgaaaacc

SEQ ID NO: 799432 - DNA, 15 bp, Homo sapiens
aaagtctgaaaacca

SEQ ID NO: 799433 - DNA, 15 bp, Homo sapiens
aagtctgaaaaccag

SEQ ID NO: 799434 - DNA, 15 bp, Homo sapiens
agtctgaaaaccagt

SEQ ID NO: 799435 - DNA, 15 bp, Homo sapiens
gtctgaaaaccagtt

SEQ ID NO: 799436 - DNA, 15 bp, Homo sapiens
tctgaaaaccagtta

SEQ ID NO: 799437 - DNA, 15 bp, Homo sapiens
ctgaaaaccagttac

SEQ ID NO: 799438 - DNA, 15 bp, Homo sapiens
tgaaaaccagttact

SEQ ID NO: 799439 - DNA, 15 bp, Homo sapiens
gaaaaccagttactg

SEQ ID NO: 799440 - DNA, 15 bp, Homo sapiens
aaaaccagttactga

SEQ ID NO: 799441 - DNA, 15 bp, Homo sapiens
aaaccagttactgaa

SEQ ID NO: 799442 - DNA, 15 bp, Homo sapiens
aaccagttactgaag

SEQ ID NO: 799443 - DNA, 15 bp, Homo sapiens
accagttactgaagg

SEQ ID NO: 799444 - DNA, 15 bp, Homo sapiens
ccagttactgaaggt

SEQ ID NO: 799445 - DNA, 15 bp, Homo sapiens
cagttactgaaggtc

SEQ ID NO: 799446 - DNA, 15 bp, Homo sapiens
agttactgaaggtca

SEQ ID NO: 799447 - DNA, 15 bp, Homo sapiens
gttactgaaggtcag

SEQ ID NO: 799448 - DNA, 15 bp, Homo sapiens
ttactgaaggtcagg

SEQ ID NO: 799449 - DNA, 15 bp, Homo sapiens
tactgaaggtcaggg

SEQ ID NO: 799450 - DNA, 15 bp, Homo sapiens
actgaaggtcagggc

SEQ ID NO: 799451 - DNA, 15 bp, Homo sapiens
ctgaaggtcagggca

SEQ ID NO: 799452 - DNA, 15 bp, Homo sapiens
tgaaggtcagggcac

SEQ ID NO: 799453 - DNA, 15 bp, Homo sapiens
gaaggtcagggcacc

SEQ ID NO: 799454 - DNA, 15 bp, Homo sapiens
aaggtcagggcaccc

SEQ ID NO: 799455 - DNA, 15 bp, Homo sapiens
aggtcagggcaccct

SEQ ID NO: 799456 - DNA, 15 bp, Homo sapiens
ggtcagggcaccctc

SEQ ID NO: 799457 - DNA, 15 bp, Homo sapiens
gtcagggcaccctct

SEQ ID NO: 799458 - DNA, 15 bp, Homo sapiens
tcagggcaccctctg

SEQ ID NO: 799459 - DNA, 15 bp, Homo sapiens
cagggcaccctctgg

SEQ ID NO: 799460 - DNA, 15 bp, Homo sapiens
agggcaccctctgga

SEQ ID NO: 799461 - DNA, 15 bp, Homo sapiens
gggcaccctctggag

SEQ ID NO: 799462 - DNA, 15 bp, Homo sapiens
ggcaccctctggagc

SEQ ID NO: 799463 - DNA, 15 bp, Homo sapiens
gcaccctctggagca

SEQ ID NO: 799464 - DNA, 15 bp, Homo sapiens
caccctctggagcag

SEQ ID NO: 799465 - DNA, 15 bp, Homo sapiens
accctctggagcagg

SEQ ID NO: 799466 - DNA, 15 bp, Homo sapiens
ccctctggagcaggt

SEQ ID NO: 799467 - DNA, 15 bp, Homo sapiens
cctctggagcaggtc

SEQ ID NO: 799468 - DNA, 15 bp, Homo sapiens
ctctggagcaggtca

SEQ ID NO: 799469 - DNA, 15 bp, Homo sapiens
tctggagcaggtcat

SEQ ID NO: 799470 - DNA, 15 bp, Homo sapiens
ctggagcaggtcatg

SEQ ID NO: 799471 - DNA, 15 bp, Homo sapiens
tggagcaggtcatga

SEQ ID NO: 799472 - DNA, 15 bp, Homo sapiens
ggagcaggtcatgaa

SEQ ID NO: 799473 - DNA, 15 bp, Homo sapiens
gagcaggtcatgaag

SEQ ID NO: 799474 - DNA, 15 bp, Homo sapiens
agcaggtcatgaagg

SEQ ID NO: 799475 - DNA, 15 bp, Homo sapiens
gcaggtcatgaaggc

SEQ ID NO: 799476 - DNA, 15 bp, Homo sapiens
caggtcatgaaggcc

SEQ ID NO: 799477 - DNA, 15 bp, Homo sapiens
aggtcatgaaggcct

SEQ ID NO: 799478 - DNA, 15 bp, Homo sapiens
ggtcatgaaggcctt

SEQ ID NO: 799479 - DNA, 15 bp, Homo sapiens
gtcatgaaggccttt

SEQ ID NO: 799480 - DNA, 15 bp, Homo sapiens
tcatgaaggcctttt

SEQ ID NO: 799481 - DNA, 15 bp, Homo sapiens
catgaaggcctttta

SEQ ID NO: 799482 - DNA, 15 bp, Homo sapiens
atgaaggccttttac

SEQ ID NO: 799483 - DNA, 15 bp, Homo sapiens
tgaaggccttttaca

SEQ ID NO: 799484 - DNA, 15 bp, Homo sapiens
gaaggccttttacag

SEQ ID NO: 799485 - DNA, 15 bp, Homo sapiens
aaggccttttacagc

SEQ ID NO: 799486 - DNA, 15 bp, Homo sapiens
aggccttttacagcc

SEQ ID NO: 799487 - DNA, 15 bp, Homo sapiens
ggccttttacagcct

SEQ ID NO: 799488 - DNA, 15 bp, Homo sapiens
gccttttacagccta

SEQ ID NO: 799489 - DNA, 15 bp, Homo sapiens
ccttttacagcctac

SEQ ID NO: 799490 - DNA, 15 bp, Homo sapiens
cttttacagcctact

SEQ ID NO: 799491 - DNA, 15 bp, Homo sapiens
ttttacagcctactt

SEQ ID NO: 799492 - DNA, 15 bp, Homo sapiens
tttacagcctacttt

SEQ ID NO: 799493 - DNA, 15 bp, Homo sapiens
ttacagcctactttt

SEQ ID NO: 799494 - DNA, 15 bp, Homo sapiens
tacagcctacttttt

SEQ ID NO: 799495 - DNA, 15 bp, Homo sapiens
acagcctactttttc

SEQ ID NO: 799496 - DNA, 15 bp, Homo sapiens
cagcctactttttct

SEQ ID NO: 799497 - DNA, 15 bp, Homo sapiens
agcctactttttcta

SEQ ID NO: 799498 - DNA, 15 bp, Homo sapiens
gcctactttttctac

SEQ ID NO: 799499 - DNA, 15 bp, Homo sapiens
cctactttttctact

SEQ ID NO: 799500 - DNA, 15 bp, Homo sapiens
ctactttttctactt

SEQ ID NO: 799501 - DNA, 15 bp, Homo sapiens
tactttttctacttc

SEQ ID NO: 799502 - DNA, 15 bp, Homo sapiens
actttttctacttca

SEQ ID NO: 799503 - DNA, 15 bp, Homo sapiens
ctttttctacttcac

SEQ ID NO: 799504 - DNA, 15 bp, Homo sapiens
tttttctacttcact

SEQ ID NO: 799505 - DNA, 15 bp, Homo sapiens
ttttctacttcactc

SEQ ID NO: 799506 - DNA, 15 bp, Homo sapiens
tttctacttcactcc

SEQ ID NO: 799507 - DNA, 15 bp, Homo sapiens
ttctacttcactcct

SEQ ID NO: 799508 - DNA, 15 bp, Homo sapiens
tctacttcactcctt

SEQ ID NO: 799509 - DNA, 15 bp, Homo sapiens
ctacttcactccttt

SEQ ID NO: 799510 - DNA, 15 bp, Homo sapiens
tacttcactcctttg

SEQ ID NO: 799511 - DNA, 15 bp, Homo sapiens
acttcactcctttgg

SEQ ID NO: 799512 - DNA, 15 bp, Homo sapiens
cttcactcctttgga

SEQ ID NO: 799513 - DNA, 15 bp, Homo sapiens
ttcactcctttggag

SEQ ID NO: 799514 - DNA, 15 bp, Homo sapiens
tcactcctttggaga

SEQ ID NO: 799515 - DNA, 15 bp, Homo sapiens
cactcctttggagag

SEQ ID NO: 799516 - DNA, 15 bp, Homo sapiens
actcctttggagagt

SEQ ID NO: 799517 - DNA, 15 bp, Homo sapiens
ctcctttggagagta

SEQ ID NO: 799518 - DNA, 15 bp, Homo sapiens
tcctttggagagtag

SEQ ID NO: 799519 - DNA, 15 bp, Homo sapiens
cctttggagagtagc

SEQ ID NO: 799520 - DNA, 15 bp, Homo sapiens
ctttggagagtagcc

SEQ ID NO: 799521 - DNA, 15 bp, Homo sapiens
tttggagagtagcct

SEQ ID NO: 799522 - DNA, 15 bp, Homo sapiens
ttggagagtagcctg

SEQ ID NO: 799523 - DNA, 15 bp, Homo sapiens
tggagagtagcctga

SEQ ID NO: 799524 - DNA, 15 bp, Homo sapiens
ggagagtagcctgag

SEQ ID NO: 799525 - DNA, 15 bp, Homo sapiens
gagagtagcctgagt

SEQ ID NO: 799526 - DNA, 15 bp, Homo sapiens
agagtagcctgagtt

SEQ ID NO: 799527 - DNA, 15 bp, Homo sapiens
gagtagcctgagttc

SEQ ID NO: 799528 - DNA, 15 bp, Homo sapiens
agtagcctgagttca

SEQ ID NO: 799529 - DNA, 15 bp, Homo sapiens
gtagcctgagttcaa

SEQ ID NO: 799530 - DNA, 15 bp, Homo sapiens
tagcctgagttcaaa

SEQ ID NO: 799531 - DNA, 15 bp, Homo sapiens
agcctgagttcaaat

SEQ ID NO: 799532 - DNA, 15 bp, Homo sapiens
gcctgagttcaaatg

SEQ ID NO: 799533 - DNA, 15 bp, Homo sapiens
cctgagttcaaatgc

SEQ ID NO: 799534 - DNA, 15 bp, Homo sapiens
ctgagttcaaatgca

SEQ ID NO: 799535 - DNA, 15 bp, Homo sapiens
tgagttcaaatgcag

SEQ ID NO: 799536 - DNA, 15 bp, Homo sapiens
gagttcaaatgcagg

SEQ ID NO: 799537 - DNA, 15 bp, Homo sapiens
agttcaaatgcaggt

SEQ ID NO: 799538 - DNA, 15 bp, Homo sapiens
gttcaaatgcaggtt

SEQ ID NO: 799539 - DNA, 15 bp, Homo sapiens
ttcaaatgcaggttt

SEQ ID NO: 799540 - DNA, 15 bp, Homo sapiens
tcaaatgcaggtttt

SEQ ID NO: 799541 - DNA, 15 bp, Homo sapiens
caaatgcaggttttg

SEQ ID NO: 799542 - DNA, 15 bp, Homo sapiens
aaatgcaggttttgc

SEQ ID NO: 799543 - DNA, 15 bp, Homo sapiens
aatgcaggttttgcc

SEQ ID NO: 799544 - DNA, 15 bp, Homo sapiens
atgcaggttttgcca

SEQ ID NO: 799545 - DNA, 15 bp, Homo sapiens
tgcaggttttgccac

SEQ ID NO: 799546 - DNA, 15 bp, Homo sapiens
gcaggttttgccact

SEQ ID NO: 799547 - DNA, 15 bp, Homo sapiens
caggttttgccactt

SEQ ID NO: 799548 - DNA, 15 bp, Homo sapiens
aggttttgccacttc

SEQ ID NO: 799549 - DNA, 15 bp, Homo sapiens
ggttttgccacttcc

SEQ ID NO: 799550 - DNA, 15 bp, Homo sapiens
gttttgccacttcca

SEQ ID NO: 799551 - DNA, 15 bp, Homo sapiens
ttttgccacttccaa

SEQ ID NO: 799552 - DNA, 15 bp, Homo sapiens
tttgccacttccaac

SEQ ID NO: 799553 - DNA, 15 bp, Homo sapiens
ttgccacttccaact

SEQ ID NO: 799554 - DNA, 15 bp, Homo sapiens
tgccacttccaactg

SEQ ID NO: 799555 - DNA, 15 bp, Homo sapiens
gccacttccaactgt

SEQ ID NO: 799556 - DNA, 15 bp, Homo sapiens
ccacttccaactgtg

SEQ ID NO: 799557 - DNA, 15 bp, Homo sapiens
cacttccaactgtgt

SEQ ID NO: 799558 - DNA, 15 bp, Homo sapiens
acttccaactgtgta

SEQ ID NO: 799559 - DNA, 15 bp, Homo sapiens
cttccaactgtgtaa

SEQ ID NO: 799560 - DNA, 15 bp, Homo sapiens
ttccaactgtgtaac

SEQ ID NO: 799561 - DNA, 15 bp, Homo sapiens
tccaactgtgtaacc

SEQ ID NO: 799562 - DNA, 15 bp, Homo sapiens
ccaactgtgtaaccc

SEQ ID NO: 799563 - DNA, 15 bp, Homo sapiens
caactgtgtaaccct

SEQ ID NO: 799564 - DNA, 15 bp, Homo sapiens
aactgtgtaaccctg

SEQ ID NO: 799565 - DNA, 15 bp, Homo sapiens
actgtgtaaccctga

SEQ ID NO: 799566 - DNA, 15 bp, Homo sapiens
ctgtgtaaccctgaa

SEQ ID NO: 799567 - DNA, 15 bp, Homo sapiens
tgtgtaaccctgaac

SEQ ID NO: 799568 - DNA, 15 bp, Homo sapiens
gtgtaaccctgaaca

SEQ ID NO: 799569 - DNA, 15 bp, Homo sapiens
tgtaaccctgaacaa

SEQ ID NO: 799570 - DNA, 15 bp, Homo sapiens
gtaaccctgaacaag

SEQ ID NO: 799571 - DNA, 15 bp, Homo sapiens
taaccctgaacaagt

SEQ ID NO: 799572 - DNA, 15 bp, Homo sapiens
aaccctgaacaagtt

SEQ ID NO: 799573 - DNA, 15 bp, Homo sapiens
accctgaacaagtta

SEQ ID NO: 799574 - DNA, 15 bp, Homo sapiens
ccctgaacaagttag

SEQ ID NO: 799575 - DNA, 15 bp, Homo sapiens
cctgaacaagttagt

SEQ ID NO: 799576 - DNA, 15 bp, Homo sapiens
ctgaacaagttagtt

SEQ ID NO: 799577 - DNA, 15 bp, Homo sapiens
tgaacaagttagttc

SEQ ID NO: 799578 - DNA, 15 bp, Homo sapiens
gaacaagttagttcc

SEQ ID NO: 799579 - DNA, 15 bp, Homo sapiens
aacaagttagttcct

SEQ ID NO: 799580 - DNA, 15 bp, Homo sapiens
acaagttagttccta

SEQ ID NO: 799581 - DNA, 15 bp, Homo sapiens
caagttagttcctaa

SEQ ID NO: 799582 - DNA, 15 bp, Homo sapiens
aagttagttcctaaa

SEQ ID NO: 799583 - DNA, 15 bp, Homo sapiens
agttagttcctaaag

SEQ ID NO: 799584 - DNA, 15 bp, Homo sapiens
gttagttcctaaagc

SEQ ID NO: 799585 - DNA, 15 bp, Homo sapiens
ttagttcctaaagcc

SEQ ID NO: 799586 - DNA, 15 bp, Homo sapiens
tagttcctaaagcct

SEQ ID NO: 799587 - DNA, 15 bp, Homo sapiens
agttcctaaagcctt

SEQ ID NO: 799588 - DNA, 15 bp, Homo sapiens
gttcctaaagccttc

SEQ ID NO: 799589 - DNA, 15 bp, Homo sapiens
ttcctaaagccttca

SEQ ID NO: 799590 - DNA, 15 bp, Homo sapiens
tcctaaagccttcat

SEQ ID NO: 799591 - DNA, 15 bp, Homo sapiens
cctaaagccttcatt

SEQ ID NO: 799592 - DNA, 15 bp, Homo sapiens
ctaaagccttcattt

SEQ ID NO: 799593 - DNA, 15 bp, Homo sapiens
taaagccttcatttt

SEQ ID NO: 799594 - DNA, 15 bp, Homo sapiens
aaagccttcattttc

SEQ ID NO: 799595 - DNA, 15 bp, Homo sapiens
aagccttcattttcc

SEQ ID NO: 799596 - DNA, 15 bp, Homo sapiens
agccttcattttccc

SEQ ID NO: 799597 - DNA, 15 bp, Homo sapiens
gccttcattttccca

SEQ ID NO: 799598 - DNA, 15 bp, Homo sapiens
ccttcattttcccat

SEQ ID NO: 799599 - DNA, 15 bp, Homo sapiens
cttcattttcccatc

SEQ ID NO: 799600 - DNA, 15 bp, Homo sapiens
ttcattttcccatct

SEQ ID NO: 799601 - DNA, 15 bp, Homo sapiens
tcattttcccatctg

SEQ ID NO: 799602 - DNA, 15 bp, Homo sapiens
cattttcccatctgt

SEQ ID NO: 799603 - DNA, 15 bp, Homo sapiens
attttcccatctgtg

SEQ ID NO: 799604 - DNA, 15 bp, Homo sapiens
ttttcccatctgtga

SEQ ID NO: 799605 - DNA, 15 bp, Homo sapiens
tttcccatctgtgaa

SEQ ID NO: 799606 - DNA, 15 bp, Homo sapiens
ttcccatctgtgaaa

SEQ ID NO: 799607 - DNA, 15 bp, Homo sapiens
tcccatctgtgaaac

SEQ ID NO: 799608 - DNA, 15 bp, Homo sapiens
cccatctgtgaaaca

SEQ ID NO: 799609 - DNA, 15 bp, Homo sapiens
ccatctgtgaaacag

SEQ ID NO: 799610 - DNA, 15 bp, Homo sapiens
catctgtgaaacagg

SEQ ID NO: 799611 - DNA, 15 bp, Homo sapiens
atctgtgaaacagga

SEQ ID NO: 799612 - DNA, 15 bp, Homo sapiens
tctgtgaaacaggaa

SEQ ID NO: 799613 - DNA, 15 bp, Homo sapiens
ctgtgaaacaggaat

SEQ ID NO: 799614 - DNA, 15 bp, Homo sapiens
tgtgaaacaggaata

SEQ ID NO: 799615 - DNA, 15 bp, Homo sapiens
gtgaaacaggaatag

SEQ ID NO: 799616 - DNA, 15 bp, Homo sapiens
tgaaacaggaataga

SEQ ID NO: 799617 - DNA, 15 bp, Homo sapiens
gaaacaggaatagaa

SEQ ID NO: 799618 - DNA, 15 bp, Homo sapiens
aaacaggaatagaaa

SEQ ID NO: 799619 - DNA, 15 bp, Homo sapiens
aacaggaatagaaat

SEQ ID NO: 799620 - DNA, 15 bp, Homo sapiens
acaggaatagaaata

SEQ ID NO: 799621 - DNA, 15 bp, Homo sapiens
caggaatagaaatat

SEQ ID NO: 799622 - DNA, 15 bp, Homo sapiens
aggaatagaaatatt

SEQ ID NO: 799623 - DNA, 15 bp, Homo sapiens
ggaatagaaatatta

SEQ ID NO: 799624 - DNA, 15 bp, Homo sapiens
gaatagaaatattag

SEQ ID NO: 799625 - DNA, 15 bp, Homo sapiens
aatagaaatattagc

SEQ ID NO: 799626 - DNA, 15 bp, Homo sapiens
atagaaatattagct

SEQ ID NO: 799627 - DNA, 15 bp, Homo sapiens
tagaaatattagctc

SEQ ID NO: 799628 - DNA, 15 bp, Homo sapiens
agaaatattagctct

SEQ ID NO: 799629 - DNA, 15 bp, Homo sapiens
gaaatattagctcta

SEQ ID NO: 799630 - DNA, 15 bp, Homo sapiens
aaatattagctctat

SEQ ID NO: 799631 - DNA, 15 bp, Homo sapiens
aatattagctctatc

SEQ ID NO: 799632 - DNA, 15 bp, Homo sapiens
atattagctctatca

SEQ ID NO: 799633 - DNA, 15 bp, Homo sapiens
tattagctctatcac

SEQ ID NO: 799634 - DNA, 15 bp, Homo sapiens
attagctctatcaca

SEQ ID NO: 799635 - DNA, 15 bp, Homo sapiens
ttagctctatcacag

SEQ ID NO: 799636 - DNA, 15 bp, Homo sapiens
tagctctatcacaga

SEQ ID NO: 799637 - DNA, 15 bp, Homo sapiens
agctctatcacagag

SEQ ID NO: 799638 - DNA, 15 bp, Homo sapiens
gctctatcacagagt

SEQ ID NO: 799639 - DNA, 15 bp, Homo sapiens
ctctatcacagagtt

SEQ ID NO: 799640 - DNA, 15 bp, Homo sapiens
tctatcacagagtta

SEQ ID NO: 799641 - DNA, 15 bp, Homo sapiens
ctatcacagagttag

SEQ ID NO: 799642 - DNA, 15 bp, Homo sapiens
tatcacagagttagt

SEQ ID NO: 799643 - DNA, 15 bp, Homo sapiens
atcacagagttagtg

SEQ ID NO: 799644 - DNA, 15 bp, Homo sapiens
tcacagagttagtgt

SEQ ID NO: 799645 - DNA, 15 bp, Homo sapiens
cacagagttagtgtt

SEQ ID NO: 799646 - DNA, 15 bp, Homo sapiens
acagagttagtgtta

SEQ ID NO: 799647 - DNA, 15 bp, Homo sapiens
cagagttagtgttaa

SEQ ID NO: 799648 - DNA, 15 bp, Homo sapiens
agagttagtgttaag

SEQ ID NO: 799649 - DNA, 15 bp, Homo sapiens
gagttagtgttaagg

SEQ ID NO: 799650 - DNA, 15 bp, Homo sapiens
agttagtgttaagga

SEQ ID NO: 799651 - DNA, 15 bp, Homo sapiens
gttagtgttaaggag

SEQ ID NO: 799652 - DNA, 15 bp, Homo sapiens
ttagtgttaaggagt

SEQ ID NO: 799653 - DNA, 15 bp, Homo sapiens
tagtgttaaggagtt

SEQ ID NO: 799654 - DNA, 15 bp, Homo sapiens
agtgttaaggagtta

SEQ ID NO: 799655 - DNA, 15 bp, Homo sapiens
gtgttaaggagttac

SEQ ID NO: 799656 - DNA, 15 bp, Homo sapiens
tgttaaggagttact

SEQ ID NO: 799657 - DNA, 15 bp, Homo sapiens
gttaaggagttactg

SEQ ID NO: 799658 - DNA, 15 bp, Homo sapiens
ttaaggagttactga

SEQ ID NO: 799659 - DNA, 15 bp, Homo sapiens
taaggagttactgag

SEQ ID NO: 799660 - DNA, 15 bp, Homo sapiens
aaggagttactgaga

SEQ ID NO: 799661 - DNA, 15 bp, Homo sapiens
aggagttactgagat

SEQ ID NO: 799662 - DNA, 15 bp, Homo sapiens
ggagttactgagata

SEQ ID NO: 799663 - DNA, 15 bp, Homo sapiens
gagttactgagataa

SEQ ID NO: 799664 - DNA, 15 bp, Homo sapiens
agttactgagataat

SEQ ID NO: 799665 - DNA, 15 bp, Homo sapiens
gttactgagataatg

SEQ ID NO: 799666 - DNA, 15 bp, Homo sapiens
ttactgagataatgc

SEQ ID NO: 799667 - DNA, 15 bp, Homo sapiens
tactgagataatgct

SEQ ID NO: 799668 - DNA, 15 bp, Homo sapiens
actgagataatgctt

SEQ ID NO: 799669 - DNA, 15 bp, Homo sapiens
ctgagataatgcttg

SEQ ID NO: 799670 - DNA, 15 bp, Homo sapiens
tgagataatgcttgg

SEQ ID NO: 799671 - DNA, 15 bp, Homo sapiens
gagataatgcttggc

SEQ ID NO: 799672 - DNA, 15 bp, Homo sapiens
agataatgcttggca

SEQ ID NO: 799673 - DNA, 15 bp, Homo sapiens
gataatgcttggcat

SEQ ID NO: 799674 - DNA, 15 bp, Homo sapiens
ataatgcttggcatg

SEQ ID NO: 799675 - DNA, 15 bp, Homo sapiens
taatgcttggcatgt

SEQ ID NO: 799676 - DNA, 15 bp, Homo sapiens
aatgcttggcatgtg

SEQ ID NO: 799677 - DNA, 15 bp, Homo sapiens
atgcttggcatgtgt

SEQ ID NO: 799678 - DNA, 15 bp, Homo sapiens
tgcttggcatgtgtg

SEQ ID NO: 799679 - DNA, 15 bp, Homo sapiens
gcttggcatgtgtgt

SEQ ID NO: 799680 - DNA, 15 bp, Homo sapiens
cttggcatgtgtgtt

SEQ ID NO: 799681 - DNA, 15 bp, Homo sapiens
ttggcatgtgtgtta

SEQ ID NO: 799682 - DNA, 15 bp, Homo sapiens
tggcatgtgtgttag

SEQ ID NO: 799683 - DNA, 15 bp, Homo sapiens
ggcatgtgtgttagt

SEQ ID NO: 799684 - DNA, 15 bp, Homo sapiens
gcatgtgtgttagtg

SEQ ID NO: 799685 - DNA, 15 bp, Homo sapiens
catgtgtgttagtgt

SEQ ID NO: 799686 - DNA, 15 bp, Homo sapiens
atgtgtgttagtgtg

SEQ ID NO: 799687 - DNA, 15 bp, Homo sapiens
tgtgtgttagtgtgt

SEQ ID NO: 799688 - DNA, 15 bp, Homo sapiens
gtgtgttagtgtgta

SEQ ID NO: 799689 - DNA, 15 bp, Homo sapiens
tgtgttagtgtgtaa

SEQ ID NO: 799690 - DNA, 15 bp, Homo sapiens
gtgttagtgtgtaat

SEQ ID NO: 799691 - DNA, 15 bp, Homo sapiens
tgttagtgtgtaatc

SEQ ID NO: 799692 - DNA, 15 bp, Homo sapiens
gttagtgtgtaatca

SEQ ID NO: 799693 - DNA, 15 bp, Homo sapiens
ttagtgtgtaatcag

SEQ ID NO: 799694 - DNA, 15 bp, Homo sapiens
tagtgtgtaatcagt

SEQ ID NO: 799695 - DNA, 15 bp, Homo sapiens
agtgtgtaatcagtg

SEQ ID NO: 799696 - DNA, 15 bp, Homo sapiens
gtgtgtaatcagtgt

SEQ ID NO: 799697 - DNA, 15 bp, Homo sapiens
tgtgtaatcagtgtt

SEQ ID NO: 799698 - DNA, 15 bp, Homo sapiens
gtgtaatcagtgttg

SEQ ID NO: 799699 - DNA, 15 bp, Homo sapiens
tgtaatcagtgttgg

SEQ ID NO: 799700 - DNA, 15 bp, Homo sapiens
gtaatcagtgttggc

SEQ ID NO: 799701 - DNA, 15 bp, Homo sapiens
taatcagtgttggca

SEQ ID NO: 799702 - DNA, 15 bp, Homo sapiens
aatcagtgttggcag

SEQ ID NO: 799703 - DNA, 15 bp, Homo sapiens
atcagtgttggcagt

SEQ ID NO: 799704 - DNA, 15 bp, Homo sapiens
tcagtgttggcagtt

SEQ ID NO: 799705 - DNA, 15 bp, Homo sapiens
cagtgttggcagtta

SEQ ID NO: 799706 - DNA, 15 bp, Homo sapiens
agtgttggcagttac

SEQ ID NO: 799707 - DNA, 15 bp, Homo sapiens
gtgttggcagttacc

SEQ ID NO: 799708 - DNA, 15 bp, Homo sapiens
tgttggcagttacca

SEQ ID NO: 799709 - DNA, 15 bp, Homo sapiens
gttggcagttaccat

SEQ ID NO: 799710 - DNA, 15 bp, Homo sapiens
ttggcagttaccatc

SEQ ID NO: 799711 - DNA, 15 bp, Homo sapiens
tggcagttaccatca

SEQ ID NO: 799712 - DNA, 15 bp, Homo sapiens
ggcagttaccatcat

SEQ ID NO: 799713 - DNA, 15 bp, Homo sapiens
gcagttaccatcatg

SEQ ID NO: 799714 - DNA, 15 bp, Homo sapiens
cagttaccatcatgt

SEQ ID NO: 799715 - DNA, 15 bp, Homo sapiens
agttaccatcatgtt

SEQ ID NO: 799716 - DNA, 15 bp, Homo sapiens
gttaccatcatgtta

SEQ ID NO: 799717 - DNA, 15 bp, Homo sapiens
ttaccatcatgttag

SEQ ID NO: 799718 - DNA, 15 bp, Homo sapiens
taccatcatgttagt

SEQ ID NO: 799719 - DNA, 15 bp, Homo sapiens
accatcatgttagta

SEQ ID NO: 799720 - DNA, 15 bp, Homo sapiens
ccatcatgttagtac

SEQ ID NO: 799721 - DNA, 15 bp, Homo sapiens
catcatgttagtact

SEQ ID NO: 799722 - DNA, 15 bp, Homo sapiens
atcatgttagtactc

SEQ ID NO: 799723 - DNA, 15 bp, Homo sapiens
tcatgttagtactca

SEQ ID NO: 799724 - DNA, 15 bp, Homo sapiens
catgttagtactcag

SEQ ID NO: 799725 - DNA, 15 bp, Homo sapiens
atgttagtactcagg

SEQ ID NO: 799726 - DNA, 15 bp, Homo sapiens
tgttagtactcaggc

SEQ ID NO: 799727 - DNA, 15 bp, Homo sapiens
gttagtactcaggcc

SEQ ID NO: 799728 - DNA, 15 bp, Homo sapiens
ttagtactcaggccc

SEQ ID NO: 799729 - DNA, 15 bp, Homo sapiens
tagtactcaggcccc

SEQ ID NO: 799730 - DNA, 15 bp, Homo sapiens
agtactcaggcccca

SEQ ID NO: 799731 - DNA, 15 bp, Homo sapiens
gtactcaggccccac

SEQ ID NO: 799732 - DNA, 15 bp, Homo sapiens
tactcaggccccacc

SEQ ID NO: 799733 - DNA, 15 bp, Homo sapiens
actcaggccccacca

SEQ ID NO: 799734 - DNA, 15 bp, Homo sapiens
ctcaggccccaccag

SEQ ID NO: 799735 - DNA, 15 bp, Homo sapiens
tcaggccccaccagt

SEQ ID NO: 799736 - DNA, 15 bp, Homo sapiens
caggccccaccagtt

SEQ ID NO: 799737 - DNA, 15 bp, Homo sapiens
aggccccaccagttt

SEQ ID NO: 799738 - DNA, 15 bp, Homo sapiens
ggccccaccagttta

SEQ ID NO: 799739 - DNA, 15 bp, Homo sapiens
gccccaccagtttag

SEQ ID NO: 799740 - DNA, 15 bp, Homo sapiens
ccccaccagtttaga

SEQ ID NO: 799741 - DNA, 15 bp, Homo sapiens
cccaccagtttagaa

SEQ ID NO: 799742 - DNA, 15 bp, Homo sapiens
ccaccagtttagaaa

SEQ ID NO: 799743 - DNA, 15 bp, Homo sapiens
caccagtttagaaac

SEQ ID NO: 799744 - DNA, 15 bp, Homo sapiens
accagtttagaaaca

SEQ ID NO: 799745 - DNA, 15 bp, Homo sapiens
ccagtttagaaacac

SEQ ID NO: 799746 - DNA, 15 bp, Homo sapiens
cagtttagaaacaca

SEQ ID NO: 799747 - DNA, 15 bp, Homo sapiens
agtttagaaacacat

SEQ ID NO: 799748 - DNA, 15 bp, Homo sapiens
gtttagaaacacatc

SEQ ID NO: 799749 - DNA, 15 bp, Homo sapiens
tttagaaacacatca

SEQ ID NO: 799750 - DNA, 15 bp, Homo sapiens
ttagaaacacatcat

SEQ ID NO: 799751 - DNA, 15 bp, Homo sapiens
tagaaacacatcatg

SEQ ID NO: 799752 - DNA, 15 bp, Homo sapiens
agaaacacatcatgc

SEQ ID NO: 799753 - DNA, 15 bp, Homo sapiens
gaaacacatcatgcc

SEQ ID NO: 799754 - DNA, 15 bp, Homo sapiens
aaacacatcatgccc

SEQ ID NO: 799755 - DNA, 15 bp, Homo sapiens
aacacatcatgccct

SEQ ID NO: 799756 - DNA, 15 bp, Homo sapiens
acacatcatgccctt

SEQ ID NO: 799757 - DNA, 15 bp, Homo sapiens
cacatcatgcccttg

SEQ ID NO: 799758 - DNA, 15 bp, Homo sapiens
acatcatgcccttga

SEQ ID NO: 799759 - DNA, 15 bp, Homo sapiens
catcatgcccttgaa

SEQ ID NO: 799760 - DNA, 15 bp, Homo sapiens
atcatgcccttgaat

SEQ ID NO: 799761 - DNA, 15 bp, Homo sapiens
tcatgcccttgaatg

SEQ ID NO: 799762 - DNA, 15 bp, Homo sapiens
catgcccttgaatgc

SEQ ID NO: 799763 - DNA, 15 bp, Homo sapiens
atgcccttgaatgcc

SEQ ID NO: 799764 - DNA, 15 bp, Homo sapiens
tgcccttgaatgcct

SEQ ID NO: 799765 - DNA, 15 bp, Homo sapiens
gcccttgaatgcctt

SEQ ID NO: 799766 - DNA, 15 bp, Homo sapiens
cccttgaatgccttg

SEQ ID NO: 799767 - DNA, 15 bp, Homo sapiens
ccttgaatgccttgg

SEQ ID NO: 799768 - DNA, 15 bp, Homo sapiens
cttgaatgccttggt

SEQ ID NO: 799769 - DNA, 15 bp, Homo sapiens
ttgaatgccttggtt

SEQ ID NO: 799770 - DNA, 15 bp, Homo sapiens
tgaatgccttggttt

SEQ ID NO: 799771 - DNA, 15 bp, Homo sapiens
gaatgccttggtttg

SEQ ID NO: 799772 - DNA, 15 bp, Homo sapiens
aatgccttggtttgc

SEQ ID NO: 799773 - DNA, 15 bp, Homo sapiens
atgccttggtttgct

SEQ ID NO: 799774 - DNA, 15 bp, Homo sapiens
tgccttggtttgctt

SEQ ID NO: 799775 - DNA, 15 bp, Homo sapiens
gccttggtttgcttt

SEQ ID NO: 799776 - DNA, 15 bp, Homo sapiens
ccttggtttgctttt

SEQ ID NO: 799777 - DNA, 15 bp, Homo sapiens
cttggtttgcttttg

SEQ ID NO: 799778 - DNA, 15 bp, Homo sapiens
ttggtttgcttttgg

SEQ ID NO: 799779 - DNA, 15 bp, Homo sapiens
tggtttgcttttggt

SEQ ID NO: 799780 - DNA, 15 bp, Homo sapiens
ggtttgcttttggta

SEQ ID NO: 799781 - DNA, 15 bp, Homo sapiens
gtttgcttttggtag

SEQ ID NO: 799782 - DNA, 15 bp, Homo sapiens
tttgcttttggtagg

SEQ ID NO: 799783 - DNA, 15 bp, Homo sapiens
ttgcttttggtaggc

SEQ ID NO: 799784 - DNA, 15 bp, Homo sapiens
tgcttttggtaggct

SEQ ID NO: 799785 - DNA, 15 bp, Homo sapiens
gcttttggtaggctt

SEQ ID NO: 799786 - DNA, 15 bp, Homo sapiens
cttttggtaggcttt

SEQ ID NO: 799787 - DNA, 15 bp, Homo sapiens
ttttggtaggctttg

SEQ ID NO: 799788 - DNA, 15 bp, Homo sapiens
tttggtaggctttga

SEQ ID NO: 799789 - DNA, 15 bp, Homo sapiens
ttggtaggctttgat

SEQ ID NO: 799790 - DNA, 15 bp, Homo sapiens
tggtaggctttgatg

SEQ ID NO: 799791 - DNA, 15 bp, Homo sapiens
ggtaggctttgatgc

SEQ ID NO: 799792 - DNA, 15 bp, Homo sapiens
gtaggctttgatgct

SEQ ID NO: 799793 - DNA, 15 bp, Homo sapiens
taggctttgatgctt

SEQ ID NO: 799794 - DNA, 15 bp, Homo sapiens
aggctttgatgcttt

SEQ ID NO: 799795 - DNA, 15 bp, Homo sapiens
ggctttgatgctttt

SEQ ID NO: 799796 - DNA, 15 bp, Homo sapiens
gctttgatgcttttg

SEQ ID NO: 799797 - DNA, 15 bp, Homo sapiens
ctttgatgcttttgg

SEQ ID NO: 799798 - DNA, 15 bp, Homo sapiens
tttgatgcttttggt

SEQ ID NO: 799799 - DNA, 15 bp, Homo sapiens
ttgatgcttttggta

SEQ ID NO: 799800 - DNA, 15 bp, Homo sapiens
tgatgcttttggtat

SEQ ID NO: 799801 - DNA, 15 bp, Homo sapiens
gatgcttttggtata

SEQ ID NO: 799802 - DNA, 15 bp, Homo sapiens
atgcttttggtatac

SEQ ID NO: 799803 - DNA, 15 bp, Homo sapiens
tgcttttggtatact

SEQ ID NO: 799804 - DNA, 15 bp, Homo sapiens
gcttttggtatactt

SEQ ID NO: 799805 - DNA, 15 bp, Homo sapiens
cttttggtatacttt

SEQ ID NO: 799806 - DNA, 15 bp, Homo sapiens
ttttggtatactttg

SEQ ID NO: 799807 - DNA, 15 bp, Homo sapiens
tttggtatactttgc

SEQ ID NO: 799808 - DNA, 15 bp, Homo sapiens
ttggtatactttgcc

SEQ ID NO: 799809 - DNA, 15 bp, Homo sapiens
tggtatactttgccc

SEQ ID NO: 799810 - DNA, 15 bp, Homo sapiens
ggtatactttgcccg

SEQ ID NO: 799811 - DNA, 15 bp, Homo sapiens
gtatactttgcccgt

SEQ ID NO: 799812 - DNA, 15 bp, Homo sapiens
tatactttgcccgtt

SEQ ID NO: 799813 - DNA, 15 bp, Homo sapiens
atactttgcccgtta

SEQ ID NO: 799814 - DNA, 15 bp, Homo sapiens
tactttgcccgttaa

SEQ ID NO: 799815 - DNA, 15 bp, Homo sapiens
actttgcccgttaat

SEQ ID NO: 799816 - DNA, 15 bp, Homo sapiens
ctttgcccgttaatg

SEQ ID NO: 799817 - DNA, 15 bp, Homo sapiens
tttgcccgttaatgc

SEQ ID NO: 799818 - DNA, 15 bp, Homo sapiens
ttgcccgttaatgct

SEQ ID NO: 799819 - DNA, 15 bp, Homo sapiens
tgcccgttaatgctg

SEQ ID NO: 799820 - DNA, 15 bp, Homo sapiens
gcccgttaatgctgg

SEQ ID NO: 799821 - DNA, 15 bp, Homo sapiens
cccgttaatgctggt

SEQ ID NO: 799822 - DNA, 15 bp, Homo sapiens
ccgttaatgctggtt

SEQ ID NO: 799823 - DNA, 15 bp, Homo sapiens
cgttaatgctggttt

SEQ ID NO: 799824 - DNA, 15 bp, Homo sapiens
gttaatgctggtttg

SEQ ID NO: 799825 - DNA, 15 bp, Homo sapiens
ttaatgctggtttgg

SEQ ID NO: 799826 - DNA, 15 bp, Homo sapiens
taatgctggtttgga

SEQ ID NO: 799827 - DNA, 15 bp, Homo sapiens
aatgctggtttggaa

SEQ ID NO: 799828 - DNA, 15 bp, Homo sapiens
atgctggtttggaat

SEQ ID NO: 799829 - DNA, 15 bp, Homo sapiens
tgctggtttggaatc

SEQ ID NO: 799830 - DNA, 15 bp, Homo sapiens
gctggtttggaatcc

SEQ ID NO: 799831 - DNA, 15 bp, Homo sapiens
ctggtttggaatccc

SEQ ID NO: 799832 - DNA, 15 bp, Homo sapiens
tggtttggaatcccc

SEQ ID NO: 799833 - DNA, 15 bp, Homo sapiens
ggtttggaatccccc

SEQ ID NO: 799834 - DNA, 15 bp, Homo sapiens
gtttggaatcccccc

SEQ ID NO: 799835 - DNA, 15 bp, Homo sapiens
tttggaatcccccct

SEQ ID NO: 799836 - DNA, 15 bp, Homo sapiens
ttggaatcccccctc

SEQ ID NO: 799837 - DNA, 15 bp, Homo sapiens
tggaatcccccctcc

SEQ ID NO: 799838 - DNA, 15 bp, Homo sapiens
ggaatcccccctcct

SEQ ID NO: 799839 - DNA, 15 bp, Homo sapiens
gaatcccccctcctc

SEQ ID NO: 799840 - DNA, 15 bp, Homo sapiens
aatcccccctcctca

SEQ ID NO: 799841 - DNA, 15 bp, Homo sapiens
atcccccctcctcat

SEQ ID NO: 799842 - DNA, 15 bp, Homo sapiens
tcccccctcctcatt

SEQ ID NO: 799843 - DNA, 15 bp, Homo sapiens
cccccctcctcattt

SEQ ID NO: 799844 - DNA, 15 bp, Homo sapiens
ccccctcctcatttt

SEQ ID NO: 799845 - DNA, 15 bp, Homo sapiens
cccctcctcattttt

SEQ ID NO: 799846 - DNA, 15 bp, Homo sapiens
ccctcctcatttttt

SEQ ID NO: 799847 - DNA, 15 bp, Homo sapiens
cctcctcattttttc

SEQ ID NO: 799848 - DNA, 15 bp, Homo sapiens
ctcctcattttttca

SEQ ID NO: 799849 - DNA, 15 bp, Homo sapiens
tcctcattttttcag

SEQ ID NO: 799850 - DNA, 15 bp, Homo sapiens
cctcattttttcagt

SEQ ID NO: 799851 - DNA, 15 bp, Homo sapiens
ctcattttttcagta

SEQ ID NO: 799852 - DNA, 15 bp, Homo sapiens
tcattttttcagtat

SEQ ID NO: 799853 - DNA, 15 bp, Homo sapiens
cattttttcagtata

SEQ ID NO: 799854 - DNA, 15 bp, Homo sapiens
attttttcagtataa

SEQ ID NO: 799855 - DNA, 15 bp, Homo sapiens
ttttttcagtataaa

SEQ ID NO: 799856 - DNA, 15 bp, Homo sapiens
tttttcagtataaac

SEQ ID NO: 799857 - DNA, 15 bp, Homo sapiens
ttttcagtataaact

SEQ ID NO: 799858 - DNA, 15 bp, Homo sapiens
tttcagtataaactc

SEQ ID NO: 799859 - DNA, 15 bp, Homo sapiens
ttcagtataaactct

SEQ ID NO: 799860 - DNA, 15 bp, Homo sapiens
tcagtataaactctt

SEQ ID NO: 799861 - DNA, 15 bp, Homo sapiens
cagtataaactctta

SEQ ID NO: 799862 - DNA, 15 bp, Homo sapiens
agtataaactcttat

SEQ ID NO: 799863 - DNA, 15 bp, Homo sapiens
gtataaactcttatt

SEQ ID NO: 799864 - DNA, 15 bp, Homo sapiens
tataaactcttattt

SEQ ID NO: 799865 - DNA, 15 bp, Homo sapiens
ataaactcttattta

SEQ ID NO: 799866 - DNA, 15 bp, Homo sapiens
taaactcttatttaa

SEQ ID NO: 799867 - DNA, 15 bp, Homo sapiens
aaactcttatttaat

SEQ ID NO: 799868 - DNA, 15 bp, Homo sapiens
aactcttatttaatt

SEQ ID NO: 799869 - DNA, 15 bp, Homo sapiens
actcttatttaatta

SEQ ID NO: 799870 - DNA, 15 bp, Homo sapiens
ctcttatttaattag

SEQ ID NO: 799871 - DNA, 15 bp, Homo sapiens
tcttatttaattagt

SEQ ID NO: 799872 - DNA, 15 bp, Homo sapiens
cttatttaattagta

SEQ ID NO: 799873 - DNA, 15 bp, Homo sapiens
ttatttaattagtaa

SEQ ID NO: 799874 - DNA, 15 bp, Homo sapiens
tatttaattagtaaa

SEQ ID NO: 799875 - DNA, 15 bp, Homo sapiens
atttaattagtaaaa

SEQ ID NO: 799876 - DNA, 15 bp, Homo sapiens
tttaattagtaaaat

SEQ ID NO: 799877 - DNA, 15 bp, Homo sapiens
ttaattagtaaaatt

SEQ ID NO: 799878 - DNA, 15 bp, Homo sapiens
taattagtaaaattg

SEQ ID NO: 799879 - DNA, 15 bp, Homo sapiens
aattagtaaaattga

SEQ ID NO: 799880 - DNA, 15 bp, Homo sapiens
attagtaaaattgat

SEQ ID NO: 799881 - DNA, 15 bp, Homo sapiens
ttagtaaaattgatg

SEQ ID NO: 799882 - DNA, 15 bp, Homo sapiens
tagtaaaattgatgt

SEQ ID NO: 799883 - DNA, 15 bp, Homo sapiens
agtaaaattgatgtt

SEQ ID NO: 799884 - DNA, 15 bp, Homo sapiens
gtaaaattgatgttt

SEQ ID NO: 799885 - DNA, 15 bp, Homo sapiens
taaaattgatgtttt

SEQ ID NO: 799886 - DNA, 15 bp, Homo sapiens
aaaattgatgttttc

SEQ ID NO: 799887 - DNA, 15 bp, Homo sapiens
aaattgatgttttca

SEQ ID NO: 799888 - DNA, 15 bp, Homo sapiens
aattgatgttttcat

SEQ ID NO: 799889 - DNA, 15 bp, Homo sapiens
attgatgttttcatt

SEQ ID NO: 799890 - DNA, 15 bp, Homo sapiens
ttgatgttttcattt

SEQ ID NO: 799891 - DNA, 15 bp, Homo sapiens
tgatgttttcatttt

SEQ ID NO: 799892 - DNA, 15 bp, Homo sapiens
gatgttttcattttt

SEQ ID NO: 799893 - DNA, 15 bp, Homo sapiens
atgttttcatttttc

SEQ ID NO: 799894 - DNA, 15 bp, Homo sapiens
tgttttcatttttct

SEQ ID NO: 799895 - DNA, 15 bp, Homo sapiens
gttttcatttttctg

SEQ ID NO: 799896 - DNA, 15 bp, Homo sapiens
ttttcatttttctgt

SEQ ID NO: 799897 - DNA, 15 bp, Homo sapiens
tttcatttttctgtg

SEQ ID NO: 799898 - DNA, 15 bp, Homo sapiens
ttcatttttctgtga

SEQ ID NO: 799899 - DNA, 15 bp, Homo sapiens
tcatttttctgtgaa

SEQ ID NO: 799900 - DNA, 15 bp, Homo sapiens
catttttctgtgaag

SEQ ID NO: 799901 - DNA, 15 bp, Homo sapiens
atttttctgtgaagc

SEQ ID NO: 799902 - DNA, 15 bp, Homo sapiens
tttttctgtgaagct

SEQ ID NO: 799903 - DNA, 15 bp, Homo sapiens
ttttctgtgaagctt

SEQ ID NO: 799904 - DNA, 15 bp, Homo sapiens
tttctgtgaagcttc

SEQ ID NO: 799905 - DNA, 15 bp, Homo sapiens
ttctgtgaagcttct

SEQ ID NO: 799906 - DNA, 15 bp, Homo sapiens
tctgtgaagcttctc

SEQ ID NO: 799907 - DNA, 15 bp, Homo sapiens
ctgtgaagcttctca

SEQ ID NO: 799908 - DNA, 15 bp, Homo sapiens
tgtgaagcttctcag

SEQ ID NO: 799909 - DNA, 15 bp, Homo sapiens
gtgaagcttctcaga

SEQ ID NO: 799910 - DNA, 15 bp, Homo sapiens
tgaagcttctcagac

SEQ ID NO: 799911 - DNA, 15 bp, Homo sapiens
gaagcttctcagaca

SEQ ID NO: 799912 - DNA, 15 bp, Homo sapiens
aagcttctcagacac

SEQ ID NO: 799913 - DNA, 15 bp, Homo sapiens
agcttctcagacaca

SEQ ID NO: 799914 - DNA, 15 bp, Homo sapiens
gcttctcagacacaa

SEQ ID NO: 799915 - DNA, 15 bp, Homo sapiens
cttctcagacacaat

SEQ ID NO: 799916 - DNA, 15 bp, Homo sapiens
ttctcagacacaatg

SEQ ID NO: 799917 - DNA, 15 bp, Homo sapiens
tctcagacacaatgc

SEQ ID NO: 799918 - DNA, 15 bp, Homo sapiens
ctcagacacaatgct

SEQ ID NO: 799919 - DNA, 15 bp, Homo sapiens
tcagacacaatgctc

SEQ ID NO: 799920 - DNA, 15 bp, Homo sapiens
cagacacaatgctct

SEQ ID NO: 799921 - DNA, 15 bp, Homo sapiens
agacacaatgctctc

SEQ ID NO: 799922 - DNA, 15 bp, Homo sapiens
gacacaatgctctcc

SEQ ID NO: 799923 - DNA, 15 bp, Homo sapiens
acacaatgctctcca

SEQ ID NO: 799924 - DNA, 15 bp, Homo sapiens
cacaatgctctccat

SEQ ID NO: 799925 - DNA, 15 bp, Homo sapiens
acaatgctctccatt

SEQ ID NO: 799926 - DNA, 15 bp, Homo sapiens
caatgctctccattt

SEQ ID NO: 799927 - DNA, 15 bp, Homo sapiens
aatgctctccatttg

SEQ ID NO: 799928 - DNA, 15 bp, Homo sapiens
atgctctccatttgc

SEQ ID NO: 799929 - DNA, 15 bp, Homo sapiens
tgctctccatttgct

SEQ ID NO: 799930 - DNA, 15 bp, Homo sapiens
gctctccatttgctt

SEQ ID NO: 799931 - DNA, 15 bp, Homo sapiens
ctctccatttgcttc

SEQ ID NO: 799932 - DNA, 15 bp, Homo sapiens
tctccatttgcttcc

SEQ ID NO: 799933 - DNA, 15 bp, Homo sapiens
ctccatttgcttcct

SEQ ID NO: 799934 - DNA, 15 bp, Homo sapiens
tccatttgcttcctt

SEQ ID NO: 799935 - DNA, 15 bp, Homo sapiens
ccatttgcttcctta

SEQ ID NO: 799936 - DNA, 15 bp, Homo sapiens
catttgcttccttag

SEQ ID NO: 799937 - DNA, 15 bp, Homo sapiens
atttgcttccttagt

SEQ ID NO: 799938 - DNA, 15 bp, Homo sapiens
tttgcttccttagtg

SEQ ID NO: 799939 - DNA, 15 bp, Homo sapiens
ttgcttccttagtgc

SEQ ID NO: 799940 - DNA, 15 bp, Homo sapiens
tgcttccttagtgct

SEQ ID NO: 799941 - DNA, 15 bp, Homo sapiens
gcttccttagtgcta

SEQ ID NO: 799942 - DNA, 15 bp, Homo sapiens
cttccttagtgctaa

SEQ ID NO: 799943 - DNA, 15 bp, Homo sapiens
ttccttagtgctaag

SEQ ID NO: 799944 - DNA, 15 bp, Homo sapiens
tccttagtgctaagt

SEQ ID NO: 799945 - DNA, 15 bp, Homo sapiens
ccttagtgctaagtt

SEQ ID NO: 799946 - DNA, 15 bp, Homo sapiens
cttagtgctaagttt

SEQ ID NO: 799947 - DNA, 15 bp, Homo sapiens
ttagtgctaagttta

SEQ ID NO: 799948 - DNA, 15 bp, Homo sapiens
tagtgctaagtttat

SEQ ID NO: 799949 - DNA, 15 bp, Homo sapiens
agtgctaagtttata

SEQ ID NO: 799950 - DNA, 15 bp, Homo sapiens
gtgctaagtttatac

SEQ ID NO: 799951 - DNA, 15 bp, Homo sapiens
tgctaagtttataca

SEQ ID NO: 799952 - DNA, 15 bp, Homo sapiens
gctaagtttatacat

SEQ ID NO: 799953 - DNA, 15 bp, Homo sapiens
ctaagtttatacatc

SEQ ID NO: 799954 - DNA, 15 bp, Homo sapiens
taagtttatacatct

SEQ ID NO: 799955 - DNA, 15 bp, Homo sapiens
aagtttatacatctt

SEQ ID NO: 799956 - DNA, 15 bp, Homo sapiens
agtttatacatctta

SEQ ID NO: 799957 - DNA, 15 bp, Homo sapiens
gtttatacatcttac

SEQ ID NO: 799958 - DNA, 15 bp, Homo sapiens
tttatacatcttact

SEQ ID NO: 799959 - DNA, 15 bp, Homo sapiens
ttatacatcttacta

SEQ ID NO: 799960 - DNA, 15 bp, Homo sapiens
tatacatcttactaa

SEQ ID NO: 799961 - DNA, 15 bp, Homo sapiens
atacatcttactaag

SEQ ID NO: 799962 - DNA, 15 bp, Homo sapiens
tacatcttactaagg

SEQ ID NO: 799963 - DNA, 15 bp, Homo sapiens
acatcttactaaggt

SEQ ID NO: 799964 - DNA, 15 bp, Homo sapiens
catcttactaaggta

SEQ ID NO: 799965 - DNA, 15 bp, Homo sapiens
atcttactaaggtac

SEQ ID NO: 799966 - DNA, 15 bp, Homo sapiens
tcttactaaggtact

SEQ ID NO: 799967 - DNA, 15 bp, Homo sapiens
cttactaaggtactt

SEQ ID NO: 799968 - DNA, 15 bp, Homo sapiens
ttactaaggtactta

SEQ ID NO: 799969 - DNA, 15 bp, Homo sapiens
tactaaggtacttac

SEQ ID NO: 799970 - DNA, 15 bp, Homo sapiens
actaaggtacttacc

SEQ ID NO: 799971 - DNA, 15 bp, Homo sapiens
ctaaggtacttacca

SEQ ID NO: 799972 - DNA, 15 bp, Homo sapiens
taaggtacttaccat

SEQ ID NO: 799973 - DNA, 15 bp, Homo sapiens
aaggtacttaccatg

SEQ ID NO: 799974 - DNA, 15 bp, Homo sapiens
aggtacttaccatgt

SEQ ID NO: 799975 - DNA, 15 bp, Homo sapiens
ggtacttaccatgtt

SEQ ID NO: 799976 - DNA, 15 bp, Homo sapiens
gtacttaccatgttg

SEQ ID NO: 799977 - DNA, 15 bp, Homo sapiens
tacttaccatgttga

SEQ ID NO: 799978 - DNA, 15 bp, Homo sapiens
acttaccatgttgaa

SEQ ID NO: 799979 - DNA, 15 bp, Homo sapiens
cttaccatgttgaat

SEQ ID NO: 799980 - DNA, 15 bp, Homo sapiens
ttaccatgttgaatt

SEQ ID NO: 799981 - DNA, 15 bp, Homo sapiens
taccatgttgaattt

SEQ ID NO: 799982 - DNA, 15 bp, Homo sapiens
accatgttgaatttt

SEQ ID NO: 799983 - DNA, 15 bp, Homo sapiens
ccatgttgaatttta

SEQ ID NO: 799984 - DNA, 15 bp, Homo sapiens
catgttgaattttat

SEQ ID NO: 799985 - DNA, 15 bp, Homo sapiens
atgttgaattttatt

SEQ ID NO: 799986 - DNA, 15 bp, Homo sapiens
tgttgaattttattc

SEQ ID NO: 799987 - DNA, 15 bp, Homo sapiens
gttgaattttattct

SEQ ID NO: 799988 - DNA, 15 bp, Homo sapiens
ttgaattttattctt

SEQ ID NO: 799989 - DNA, 15 bp, Homo sapiens
tgaattttattcttt

SEQ ID NO: 799990 - DNA, 15 bp, Homo sapiens
gaattttattctttc

SEQ ID NO: 799991 - DNA, 15 bp, Homo sapiens
aattttattctttct

SEQ ID NO: 799992 - DNA, 15 bp, Homo sapiens
attttattctttctc

SEQ ID NO: 799993 - DNA, 15 bp, Homo sapiens
ttttattctttctcc

SEQ ID NO: 799994 - DNA, 15 bp, Homo sapiens
tttattctttctcca

SEQ ID NO: 799995 - DNA, 15 bp, Homo sapiens
ttattctttctccat

SEQ ID NO: 799996 - DNA, 15 bp, Homo sapiens
tattctttctccata

SEQ ID NO: 799997 - DNA, 15 bp, Homo sapiens
attctttctccatac

SEQ ID NO: 799998 - DNA, 15 bp, Homo sapiens
ttctttctccataca

SEQ ID NO: 799999 - DNA, 15 bp, Homo sapiens
tctttctccatacat

SEQ ID NO: 800000 - DNA, 15 bp, Homo sapiens
ctttctccatacatt

SEQ ID NO: 800001 - DNA, 15 bp, Homo sapiens
tttctccatacattc

SEQ ID NO: 800002 - DNA, 15 bp, Homo sapiens
ttctccatacattct

SEQ ID NO: 800003 - DNA, 15 bp, Homo sapiens
tctccatacattctc

SEQ ID NO: 800004 - DNA, 15 bp, Homo sapiens
ctccatacattctct

SEQ ID NO: 800005 - DNA, 15 bp, Homo sapiens
tccatacattctctt

SEQ ID NO: 800006 - DNA, 15 bp, Homo sapiens
ccatacattctcttt

SEQ ID NO: 800007 - DNA, 15 bp, Homo sapiens
catacattctctttt

SEQ ID NO: 800008 - DNA, 15 bp, Homo sapiens
atacattctcttttt

SEQ ID NO: 800009 - DNA, 15 bp, Homo sapiens
tacattctctttttc

SEQ ID NO: 800010 - DNA, 15 bp, Homo sapiens
acattctctttttct

SEQ ID NO: 800011 - DNA, 15 bp, Homo sapiens
cattctctttttctc

SEQ ID NO: 800012 - DNA, 15 bp, Homo sapiens
attctctttttctct

SEQ ID NO: 800013 - DNA, 15 bp, Homo sapiens
ttctctttttctctc

SEQ ID NO: 800014 - DNA, 15 bp, Homo sapiens
tctctttttctctcc

SEQ ID NO: 800015 - DNA, 15 bp, Homo sapiens
ctctttttctctcct

SEQ ID NO: 800016 - DNA, 15 bp, Homo sapiens
tctttttctctcctc

SEQ ID NO: 800017 - DNA, 15 bp, Homo sapiens
ctttttctctcctct

SEQ ID NO: 800018 - DNA, 15 bp, Homo sapiens
tttttctctcctctc

SEQ ID NO: 800019 - DNA, 15 bp, Homo sapiens
ttttctctcctctct

SEQ ID NO: 800020 - DNA, 15 bp, Homo sapiens
tttctctcctctctc

SEQ ID NO: 800021 - DNA, 15 bp, Homo sapiens
ttctctcctctctct

SEQ ID NO: 800022 - DNA, 15 bp, Homo sapiens
tctctcctctctctc

SEQ ID NO: 800023 - DNA, 15 bp, Homo sapiens
ctctcctctctctct

SEQ ID NO: 800024 - DNA, 15 bp, Homo sapiens
tctcctctctctctc

SEQ ID NO: 800025 - DNA, 15 bp, Homo sapiens
ctcctctctctctcc

SEQ ID NO: 800026 - DNA, 15 bp, Homo sapiens
tcctctctctctccc

SEQ ID NO: 800027 - DNA, 15 bp, Homo sapiens
cctctctctctccct

SEQ ID NO: 800028 - DNA, 15 bp, Homo sapiens
ctctctctctccctc

SEQ ID NO: 800029 - DNA, 15 bp, Homo sapiens
tctctctctccctcc

SEQ ID NO: 800030 - DNA, 15 bp, Homo sapiens
ctctctctccctcct

SEQ ID NO: 800031 - DNA, 15 bp, Homo sapiens
tctctctccctcctc

SEQ ID NO: 800032 - DNA, 15 bp, Homo sapiens
ctctctccctcctct

SEQ ID NO: 800033 - DNA, 15 bp, Homo sapiens
tctctccctcctcta

SEQ ID NO: 800034 - DNA, 15 bp, Homo sapiens
ctctccctcctctac

SEQ ID NO: 800035 - DNA, 15 bp, Homo sapiens
tctccctcctctact

SEQ ID NO: 800036 - DNA, 15 bp, Homo sapiens
ctccctcctctactc

SEQ ID NO: 800037 - DNA, 15 bp, Homo sapiens
tccctcctctactcc

SEQ ID NO: 800038 - DNA, 15 bp, Homo sapiens
ccctcctctactcct

SEQ ID NO: 800039 - DNA, 15 bp, Homo sapiens
cctcctctactccta

SEQ ID NO: 800040 - DNA, 15 bp, Homo sapiens
ctcctctactcctac

SEQ ID NO: 800041 - DNA, 15 bp, Homo sapiens
tcctctactcctaca

SEQ ID NO: 800042 - DNA, 15 bp, Homo sapiens
cctctactcctacaa

SEQ ID NO: 800043 - DNA, 15 bp, Homo sapiens
ctctactcctacaaa

SEQ ID NO: 800044 - DNA, 15 bp, Homo sapiens
tctactcctacaaag

SEQ ID NO: 800045 - DNA, 15 bp, Homo sapiens
ctactcctacaaaga

SEQ ID NO: 800046 - DNA, 15 bp, Homo sapiens
tactcctacaaagac

SEQ ID NO: 800047 - DNA, 15 bp, Homo sapiens
actcctacaaagact

SEQ ID NO: 800048 - DNA, 15 bp, Homo sapiens
ctcctacaaagacta

SEQ ID NO: 800049 - DNA, 15 bp, Homo sapiens
tcctacaaagactat

SEQ ID NO: 800050 - DNA, 15 bp, Homo sapiens
cctacaaagactatg

SEQ ID NO: 800051 - DNA, 15 bp, Homo sapiens
ctacaaagactatgg

SEQ ID NO: 800052 - DNA, 15 bp, Homo sapiens
tacaaagactatgga

SEQ ID NO: 800053 - DNA, 15 bp, Homo sapiens
acaaagactatggat

SEQ ID NO: 800054 - DNA, 15 bp, Homo sapiens
caaagactatggatc

SEQ ID NO: 800055 - DNA, 15 bp, Homo sapiens
aaagactatggatca

SEQ ID NO: 800056 - DNA, 15 bp, Homo sapiens
aagactatggatcat

SEQ ID NO: 800057 - DNA, 15 bp, Homo sapiens
agactatggatcatc

SEQ ID NO: 800058 - DNA, 15 bp, Homo sapiens
gactatggatcatca

SEQ ID NO: 800059 - DNA, 15 bp, Homo sapiens
actatggatcatcaa

SEQ ID NO: 800060 - DNA, 15 bp, Homo sapiens
ctatggatcatcaag

SEQ ID NO: 800061 - DNA, 15 bp, Homo sapiens
tatggatcatcaagg

SEQ ID NO: 800062 - DNA, 15 bp, Homo sapiens
atggatcatcaaggt

SEQ ID NO: 800063 - DNA, 15 bp, Homo sapiens
tggatcatcaaggtg

SEQ ID NO: 800064 - DNA, 15 bp, Homo sapiens
ggatcatcaaggtgg

SEQ ID NO: 800065 - DNA, 15 bp, Homo sapiens
gatcatcaaggtggg

SEQ ID NO: 800066 - DNA, 15 bp, Homo sapiens
atcatcaaggtgggg

SEQ ID NO: 800067 - DNA, 15 bp, Homo sapiens
tcatcaaggtgggga

SEQ ID NO: 800068 - DNA, 15 bp, Homo sapiens
catcaaggtggggac

SEQ ID NO: 800069 - DNA, 15 bp, Homo sapiens
atcaaggtggggacc

SEQ ID NO: 800070 - DNA, 15 bp, Homo sapiens
tcaaggtggggacct

SEQ ID NO: 800071 - DNA, 15 bp, Homo sapiens
caaggtggggacctg

SEQ ID NO: 800072 - DNA, 15 bp, Homo sapiens
aaggtggggacctgg

SEQ ID NO: 800073 - DNA, 15 bp, Homo sapiens
aggtggggacctggc

SEQ ID NO: 800074 - DNA, 15 bp, Homo sapiens
ggtggggacctggcc

SEQ ID NO: 800075 - DNA, 15 bp, Homo sapiens
gtggggacctggcct

SEQ ID NO: 800076 - DNA, 15 bp, Homo sapiens
tggggacctggcctg

SEQ ID NO: 800077 - DNA, 15 bp, Homo sapiens
ggggacctggcctga

SEQ ID NO: 800078 - DNA, 15 bp, Homo sapiens
gggacctggcctgat

SEQ ID NO: 800079 - DNA, 15 bp, Homo sapiens
ggacctggcctgatt

SEQ ID NO: 800080 - DNA, 15 bp, Homo sapiens
gacctggcctgattc

SEQ ID NO: 800081 - DNA, 15 bp, Homo sapiens
acctggcctgattca

SEQ ID NO: 800082 - DNA, 15 bp, Homo sapiens
cctggcctgattcat

SEQ ID NO: 800083 - DNA, 15 bp, Homo sapiens
ctggcctgattcata

SEQ ID NO: 800084 - DNA, 15 bp, Homo sapiens
tggcctgattcatat

SEQ ID NO: 800085 - DNA, 15 bp, Homo sapiens
ggcctgattcatatc

SEQ ID NO: 800086 - DNA, 15 bp, Homo sapiens
gcctgattcatatcc

SEQ ID NO: 800087 - DNA, 15 bp, Homo sapiens
cctgattcatatcca

SEQ ID NO: 800088 - DNA, 15 bp, Homo sapiens
ctgattcatatccat

SEQ ID NO: 800089 - DNA, 15 bp, Homo sapiens
tgattcatatccatg

SEQ ID NO: 800090 - DNA, 15 bp, Homo sapiens
gattcatatccatgc

SEQ ID NO: 800091 - DNA, 15 bp, Homo sapiens
attcatatccatgcc

SEQ ID NO: 800092 - DNA, 15 bp, Homo sapiens
ttcatatccatgccc

SEQ ID NO: 800093 - DNA, 15 bp, Homo sapiens
tcatatccatgcccc

SEQ ID NO: 800094 - DNA, 15 bp, Homo sapiens
catatccatgcccct

SEQ ID NO: 800095 - DNA, 15 bp, Homo sapiens
atatccatgcccctg

SEQ ID NO: 800096 - DNA, 15 bp, Homo sapiens
tatccatgcccctga

SEQ ID NO: 800097 - DNA, 15 bp, Homo sapiens
atccatgcccctgag

SEQ ID NO: 800098 - DNA, 15 bp, Homo sapiens
tccatgcccctgagg

SEQ ID NO: 800099 - DNA, 15 bp, Homo sapiens
ccatgcccctgaggt

SEQ ID NO: 800100 - DNA, 15 bp, Homo sapiens
catgcccctgaggta

SEQ ID NO: 800101 - DNA, 15 bp, Homo sapiens
atgcccctgaggtaa

SEQ ID NO: 800102 - DNA, 15 bp, Homo sapiens
tgcccctgaggtaaa

SEQ ID NO: 800103 - DNA, 15 bp, Homo sapiens
gcccctgaggtaaat

SEQ ID NO: 800104 - DNA, 15 bp, Homo sapiens
cccctgaggtaaatt

SEQ ID NO: 800105 - DNA, 15 bp, Homo sapiens
ccctgaggtaaatta

SEQ ID NO: 800106 - DNA, 15 bp, Homo sapiens
cctgaggtaaattat

SEQ ID NO: 800107 - DNA, 15 bp, Homo sapiens
ctgaggtaaattatg

SEQ ID NO: 800108 - DNA, 15 bp, Homo sapiens
tgaggtaaattatgg

SEQ ID NO: 800109 - DNA, 15 bp, Homo sapiens
gaggtaaattatggt

SEQ ID NO: 800110 - DNA, 15 bp, Homo sapiens
aggtaaattatggtg

SEQ ID NO: 800111 - DNA, 15 bp, Homo sapiens
ggtaaattatggtgc

SEQ ID NO: 800112 - DNA, 15 bp, Homo sapiens
gtaaattatggtgct

SEQ ID NO: 800113 - DNA, 15 bp, Homo sapiens
taaattatggtgctt

SEQ ID NO: 800114 - DNA, 15 bp, Homo sapiens
aaattatggtgcttc

SEQ ID NO: 800115 - DNA, 15 bp, Homo sapiens
aattatggtgcttcc

SEQ ID NO: 800116 - DNA, 15 bp, Homo sapiens
attatggtgcttcca

SEQ ID NO: 800117 - DNA, 15 bp, Homo sapiens
ttatggtgcttccat

SEQ ID NO: 800118 - DNA, 15 bp, Homo sapiens
tatggtgcttccata

SEQ ID NO: 800119 - DNA, 15 bp, Homo sapiens
atggtgcttccatat

SEQ ID NO: 800120 - DNA, 15 bp, Homo sapiens
tggtgcttccatatc

SEQ ID NO: 800121 - DNA, 15 bp, Homo sapiens
ggtgcttccatatct

SEQ ID NO: 800122 - DNA, 15 bp, Homo sapiens
gtgcttccatatctg

SEQ ID NO: 800123 - DNA, 15 bp, Homo sapiens
tgcttccatatctgt

SEQ ID NO: 800124 - DNA, 15 bp, Homo sapiens
gcttccatatctgtg

SEQ ID NO: 800125 - DNA, 15 bp, Homo sapiens
cttccatatctgtgt

SEQ ID NO: 800126 - DNA, 15 bp, Homo sapiens
ttccatatctgtgtc

SEQ ID NO: 800127 - DNA, 15 bp, Homo sapiens
tccatatctgtgtcc

SEQ ID NO: 800128 - DNA, 15 bp, Homo sapiens
ccatatctgtgtcct

SEQ ID NO: 800129 - DNA, 15 bp, Homo sapiens
catatctgtgtcctt

SEQ ID NO: 800130 - DNA, 15 bp, Homo sapiens
atatctgtgtccttg

SEQ ID NO: 800131 - DNA, 15 bp, Homo sapiens
tatctgtgtccttgg

SEQ ID NO: 800132 - DNA, 15 bp, Homo sapiens
atctgtgtccttgga

SEQ ID NO: 800133 - DNA, 15 bp, Homo sapiens
tctgtgtccttggaa

SEQ ID NO: 800134 - DNA, 15 bp, Homo sapiens
ctgtgtccttggaat

SEQ ID NO: 800135 - DNA, 15 bp, Homo sapiens
tgtgtccttggaata

SEQ ID NO: 800136 - DNA, 15 bp, Homo sapiens
gtgtccttggaatac

SEQ ID NO: 800137 - DNA, 15 bp, Homo sapiens
tgtccttggaataca

SEQ ID NO: 800138 - DNA, 15 bp, Homo sapiens
gtccttggaatacac

SEQ ID NO: 800139 - DNA, 15 bp, Homo sapiens
tccttggaatacaca

SEQ ID NO: 800140 - DNA, 15 bp, Homo sapiens
ccttggaatacacaa

SEQ ID NO: 800141 - DNA, 15 bp, Homo sapiens
cttggaatacacaaa

SEQ ID NO: 800142 - DNA, 15 bp, Homo sapiens
ttggaatacacaaag

SEQ ID NO: 800143 - DNA, 15 bp, Homo sapiens
tggaatacacaaagg

SEQ ID NO: 800144 - DNA, 15 bp, Homo sapiens
ggaatacacaaagga

SEQ ID NO: 800145 - DNA, 15 bp, Homo sapiens
gaatacacaaaggat

SEQ ID NO: 800146 - DNA, 15 bp, Homo sapiens
aatacacaaaggatc

SEQ ID NO: 800147 - DNA, 15 bp, Homo sapiens
atacacaaaggatcc

SEQ ID NO: 800148 - DNA, 15 bp, Homo sapiens
tacacaaaggatcct

SEQ ID NO: 800149 - DNA, 15 bp, Homo sapiens
acacaaaggatcctt

SEQ ID NO: 800150 - DNA, 15 bp, Homo sapiens
cacaaaggatccttc

SEQ ID NO: 800151 - DNA, 15 bp, Homo sapiens
acaaaggatccttcc

SEQ ID NO: 800152 - DNA, 15 bp, Homo sapiens
caaaggatccttcca

SEQ ID NO: 800153 - DNA, 15 bp, Homo sapiens
aaaggatccttccat

SEQ ID NO: 800154 - DNA, 15 bp, Homo sapiens
aaggatccttccata

SEQ ID NO: 800155 - DNA, 15 bp, Homo sapiens
aggatccttccatat

SEQ ID NO: 800156 - DNA, 15 bp, Homo sapiens
ggatccttccatatc

SEQ ID NO: 800157 - DNA, 15 bp, Homo sapiens
gatccttccatatcc

SEQ ID NO: 800158 - DNA, 15 bp, Homo sapiens
atccttccatatcca

SEQ ID NO: 800159 - DNA, 15 bp, Homo sapiens
tccttccatatccat

SEQ ID NO: 800160 - DNA, 15 bp, Homo sapiens
ccttccatatccatg

SEQ ID NO: 800161 - DNA, 15 bp, Homo sapiens
cttccatatccatgt

SEQ ID NO: 800162 - DNA, 15 bp, Homo sapiens
ttccatatccatgtc

SEQ ID NO: 800163 - DNA, 15 bp, Homo sapiens
tccatatccatgtcc

SEQ ID NO: 800164 - DNA, 15 bp, Homo sapiens
ccatatccatgtcct

SEQ ID NO: 800165 - DNA, 15 bp, Homo sapiens
catatccatgtcctt

SEQ ID NO: 800166 - DNA, 15 bp, Homo sapiens
atatccatgtccttg

SEQ ID NO: 800167 - DNA, 15 bp, Homo sapiens
tatccatgtccttgg

SEQ ID NO: 800168 - DNA, 15 bp, Homo sapiens
atccatgtccttgga

SEQ ID NO: 800169 - DNA, 15 bp, Homo sapiens
tccatgtccttggat

SEQ ID NO: 800170 - DNA, 15 bp, Homo sapiens
ccatgtccttggata

SEQ ID NO: 800171 - DNA, 15 bp, Homo sapiens
catgtccttggatag

SEQ ID NO: 800172 - DNA, 15 bp, Homo sapiens
atgtccttggatagg

SEQ ID NO: 800173 - DNA, 15 bp, Homo sapiens
tgtccttggataggc

SEQ ID NO: 800174 - DNA, 15 bp, Homo sapiens
gtccttggataggct

SEQ ID NO: 800175 - DNA, 15 bp, Homo sapiens
tccttggataggctg

SEQ ID NO: 800176 - DNA, 15 bp, Homo sapiens
ccttggataggctgt

SEQ ID NO: 800177 - DNA, 15 bp, Homo sapiens
cttggataggctgtg

SEQ ID NO: 800178 - DNA, 15 bp, Homo sapiens
ttggataggctgtgg

SEQ ID NO: 800179 - DNA, 15 bp, Homo sapiens
tggataggctgtggg

SEQ ID NO: 800180 - DNA, 15 bp, Homo sapiens
ggataggctgtgggt

SEQ ID NO: 800181 - DNA, 15 bp, Homo sapiens
gataggctgtgggtg

SEQ ID NO: 800182 - DNA, 15 bp, Homo sapiens
ataggctgtgggtgc

SEQ ID NO: 800183 - DNA, 15 bp, Homo sapiens
taggctgtgggtgct

SEQ ID NO: 800184 - DNA, 15 bp, Homo sapiens
aggctgtgggtgctc

SEQ ID NO: 800185 - DNA, 15 bp, Homo sapiens
ggctgtgggtgctcc

SEQ ID NO: 800186 - DNA, 15 bp, Homo sapiens
gctgtgggtgctccc

SEQ ID NO: 800187 - DNA, 15 bp, Homo sapiens
ctgtgggtgctccca

SEQ ID NO: 800188 - DNA, 15 bp, Homo sapiens
tgtgggtgctcccat

SEQ ID NO: 800189 - DNA, 15 bp, Homo sapiens
gtgggtgctcccata

SEQ ID NO: 800190 - DNA, 15 bp, Homo sapiens
tgggtgctcccatat

SEQ ID NO: 800191 - DNA, 15 bp, Homo sapiens
gggtgctcccatatc

SEQ ID NO: 800192 - DNA, 15 bp, Homo sapiens
ggtgctcccatatct

SEQ ID NO: 800193 - DNA, 15 bp, Homo sapiens
gtgctcccatatctg

SEQ ID NO: 800194 - DNA, 15 bp, Homo sapiens
tgctcccatatctgt

SEQ ID NO: 800195 - DNA, 15 bp, Homo sapiens
gctcccatatctgta

SEQ ID NO: 800196 - DNA, 15 bp, Homo sapiens
ctcccatatctgtac

SEQ ID NO: 800197 - DNA, 15 bp, Homo sapiens
tcccatatctgtaca

SEQ ID NO: 800198 - DNA, 15 bp, Homo sapiens
cccatatctgtacac

SEQ ID NO: 800199 - DNA, 15 bp, Homo sapiens
ccatatctgtacact

SEQ ID NO: 800200 - DNA, 15 bp, Homo sapiens
catatctgtacactt

SEQ ID NO: 800201 - DNA, 15 bp, Homo sapiens
atatctgtacacttg

SEQ ID NO: 800202 - DNA, 15 bp, Homo sapiens
tatctgtacacttga

SEQ ID NO: 800203 - DNA, 15 bp, Homo sapiens
atctgtacacttgag

SEQ ID NO: 800204 - DNA, 15 bp, Homo sapiens
tctgtacacttgaga

SEQ ID NO: 800205 - DNA, 15 bp, Homo sapiens
ctgtacacttgagat

SEQ ID NO: 800206 - DNA, 15 bp, Homo sapiens
tgtacacttgagata

SEQ ID NO: 800207 - DNA, 15 bp, Homo sapiens
gtacacttgagatac

SEQ ID NO: 800208 - DNA, 15 bp, Homo sapiens
tacacttgagataca

SEQ ID NO: 800209 - DNA, 15 bp, Homo sapiens
acacttgagatacac

SEQ ID NO: 800210 - DNA, 15 bp, Homo sapiens
cacttgagatacact

SEQ ID NO: 800211 - DNA, 15 bp, Homo sapiens
acttgagatacactg

SEQ ID NO: 800212 - DNA, 15 bp, Homo sapiens
cttgagatacactgt

SEQ ID NO: 800213 - DNA, 15 bp, Homo sapiens
ttgagatacactgtg

SEQ ID NO: 800214 - DNA, 15 bp, Homo sapiens
tgagatacactgtgg

SEQ ID NO: 800215 - DNA, 15 bp, Homo sapiens
gagatacactgtggg

SEQ ID NO: 800216 - DNA, 15 bp, Homo sapiens
agatacactgtgggc

SEQ ID NO: 800217 - DNA, 15 bp, Homo sapiens
gatacactgtgggcc

SEQ ID NO: 800218 - DNA, 15 bp, Homo sapiens
atacactgtgggcct

SEQ ID NO: 800219 - DNA, 15 bp, Homo sapiens
tacactgtgggcctt

SEQ ID NO: 800220 - DNA, 15 bp, Homo sapiens
acactgtgggccttc

SEQ ID NO: 800221 - DNA, 15 bp, Homo sapiens
cactgtgggccttcg

SEQ ID NO: 800222 - DNA, 15 bp, Homo sapiens
actgtgggccttcgc

SEQ ID NO: 800223 - DNA, 15 bp, Homo sapiens
ctgtgggccttcgca

SEQ ID NO: 800224 - DNA, 15 bp, Homo sapiens
tgtgggccttcgcat

SEQ ID NO: 800225 - DNA, 15 bp, Homo sapiens
gtgggccttcgcata

SEQ ID NO: 800226 - DNA, 15 bp, Homo sapiens
tgggccttcgcatat

SEQ ID NO: 800227 - DNA, 15 bp, Homo sapiens
gggccttcgcatatt

SEQ ID NO: 800228 - DNA, 15 bp, Homo sapiens
ggccttcgcatattt

SEQ ID NO: 800229 - DNA, 15 bp, Homo sapiens
gccttcgcatatttt

SEQ ID NO: 800230 - DNA, 15 bp, Homo sapiens
ccttcgcatattttt

SEQ ID NO: 800231 - DNA, 15 bp, Homo sapiens
cttcgcatatttttt

SEQ ID NO: 800232 - DNA, 15 bp, Homo sapiens
ttcgcatattttttg

SEQ ID NO: 800233 - DNA, 15 bp, Homo sapiens
tcgcatattttttga

SEQ ID NO: 800234 - DNA, 15 bp, Homo sapiens
cgcatattttttgaa

SEQ ID NO: 800235 - DNA, 15 bp, Homo sapiens
gcatattttttgaat

SEQ ID NO: 800236 - DNA, 15 bp, Homo sapiens
catattttttgaatg

SEQ ID NO: 800237 - DNA, 15 bp, Homo sapiens
atattttttgaatga

SEQ ID NO: 800238 - DNA, 15 bp, Homo sapiens
tattttttgaatgaa

SEQ ID NO: 800239 - DNA, 15 bp, Homo sapiens
attttttgaatgaag

SEQ ID NO: 800240 - DNA, 15 bp, Homo sapiens
ttttttgaatgaagc

SEQ ID NO: 800241 - DNA, 15 bp, Homo sapiens
tttttgaatgaagca

SEQ ID NO: 800242 - DNA, 15 bp, Homo sapiens
ttttgaatgaagcaa

SEQ ID NO: 800243 - DNA, 15 bp, Homo sapiens
tttgaatgaagcaaa

SEQ ID NO: 800244 - DNA, 15 bp, Homo sapiens
ttgaatgaagcaaag

SEQ ID NO: 800245 - DNA, 15 bp, Homo sapiens
tgaatgaagcaaagt

SEQ ID NO: 800246 - DNA, 15 bp, Homo sapiens
gaatgaagcaaagta

SEQ ID NO: 800247 - DNA, 15 bp, Homo sapiens
aatgaagcaaagtaa

SEQ ID NO: 800248 - DNA, 15 bp, Homo sapiens
atgaagcaaagtaac

SEQ ID NO: 800249 - DNA, 15 bp, Homo sapiens
tgaagcaaagtaacc

SEQ ID NO: 800250 - DNA, 15 bp, Homo sapiens
gaagcaaagtaaccg

SEQ ID NO: 800251 - DNA, 15 bp, Homo sapiens
aagcaaagtaaccga

SEQ ID NO: 800252 - DNA, 15 bp, Homo sapiens
agcaaagtaaccgat

SEQ ID NO: 800253 - DNA, 15 bp, Homo sapiens
gcaaagtaaccgatg

SEQ ID NO: 800254 - DNA, 15 bp, Homo sapiens
caaagtaaccgatga

SEQ ID NO: 800255 - DNA, 15 bp, Homo sapiens
aaagtaaccgatgaa

SEQ ID NO: 800256 - DNA, 15 bp, Homo sapiens
aagtaaccgatgaac

SEQ ID NO: 800257 - DNA, 15 bp, Homo sapiens
agtaaccgatgaaca

SEQ ID NO: 800258 - DNA, 15 bp, Homo sapiens
gtaaccgatgaacag

SEQ ID NO: 800259 - DNA, 15 bp, Homo sapiens
taaccgatgaacaga

SEQ ID NO: 800260 - DNA, 15 bp, Homo sapiens
aaccgatgaacagag

SEQ ID NO: 800261 - DNA, 15 bp, Homo sapiens
accgatgaacagaga

SEQ ID NO: 800262 - DNA, 15 bp, Homo sapiens
ccgatgaacagagaa

SEQ ID NO: 800263 - DNA, 15 bp, Homo sapiens
cgatgaacagagaag

SEQ ID NO: 800264 - DNA, 15 bp, Homo sapiens
gatgaacagagaagt

SEQ ID NO: 800265 - DNA, 15 bp, Homo sapiens
atgaacagagaagtg

SEQ ID NO: 800266 - DNA, 15 bp, Homo sapiens
tgaacagagaagtga

SEQ ID NO: 800267 - DNA, 15 bp, Homo sapiens
gaacagagaagtgaa

SEQ ID NO: 800268 - DNA, 15 bp, Homo sapiens
aacagagaagtgaac

SEQ ID NO: 800269 - DNA, 15 bp, Homo sapiens
acagagaagtgaacc

SEQ ID NO: 800270 - DNA, 15 bp, Homo sapiens
cagagaagtgaacca

SEQ ID NO: 800271 - DNA, 15 bp, Homo sapiens
agagaagtgaaccag

SEQ ID NO: 800272 - DNA, 15 bp, Homo sapiens
gagaagtgaaccagg

SEQ ID NO: 800273 - DNA, 15 bp, Homo sapiens
agaagtgaaccagga

SEQ ID NO: 800274 - DNA, 15 bp, Homo sapiens
gaagtgaaccaggaa

SEQ ID NO: 800275 - DNA, 15 bp, Homo sapiens
aagtgaaccaggaag

SEQ ID NO: 800276 - DNA, 15 bp, Homo sapiens
agtgaaccaggaaga

SEQ ID NO: 800277 - DNA, 15 bp, Homo sapiens
gtgaaccaggaagaa

SEQ ID NO: 800278 - DNA, 15 bp, Homo sapiens
tgaaccaggaagaag

SEQ ID NO: 800279 - DNA, 15 bp, Homo sapiens
gaaccaggaagaagc

SEQ ID NO: 800280 - DNA, 15 bp, Homo sapiens
aaccaggaagaagca

SEQ ID NO: 800281 - DNA, 15 bp, Homo sapiens
accaggaagaagcag

SEQ ID NO: 800282 - DNA, 15 bp, Homo sapiens
ccaggaagaagcagg

SEQ ID NO: 800283 - DNA, 15 bp, Homo sapiens
caggaagaagcaggt

SEQ ID NO: 800284 - DNA, 15 bp, Homo sapiens
aggaagaagcaggtg

SEQ ID NO: 800285 - DNA, 15 bp, Homo sapiens
ggaagaagcaggtgc

SEQ ID NO: 800286 - DNA, 15 bp, Homo sapiens
gaagaagcaggtgcc

SEQ ID NO: 800287 - DNA, 15 bp, Homo sapiens
aagaagcaggtgcct

SEQ ID NO: 800288 - DNA, 15 bp, Homo sapiens
agaagcaggtgcctt

SEQ ID NO: 800289 - DNA, 15 bp, Homo sapiens
gaagcaggtgccttg

SEQ ID NO: 800290 - DNA, 15 bp, Homo sapiens
aagcaggtgccttgt

SEQ ID NO: 800291 - DNA, 15 bp, Homo sapiens
agcaggtgccttgtg

SEQ ID NO: 800292 - DNA, 15 bp, Homo sapiens
gcaggtgccttgtga

SEQ ID NO: 800293 - DNA, 15 bp, Homo sapiens
caggtgccttgtgat

SEQ ID NO: 800294 - DNA, 15 bp, Homo sapiens
aggtgccttgtgatg

SEQ ID NO: 800295 - DNA, 15 bp, Homo sapiens
ggtgccttgtgatga

SEQ ID NO: 800296 - DNA, 15 bp, Homo sapiens
gtgccttgtgatgag

SEQ ID NO: 800297 - DNA, 15 bp, Homo sapiens
tgccttgtgatgagg

SEQ ID NO: 800298 - DNA, 15 bp, Homo sapiens
gccttgtgatgagga

SEQ ID NO: 800299 - DNA, 15 bp, Homo sapiens
ccttgtgatgaggac

SEQ ID NO: 800300 - DNA, 15 bp, Homo sapiens
cttgtgatgaggacc

SEQ ID NO: 800301 - DNA, 15 bp, Homo sapiens
ttgtgatgaggaccc

SEQ ID NO: 800302 - DNA, 15 bp, Homo sapiens
tgtgatgaggacccc

SEQ ID NO: 800303 - DNA, 15 bp, Homo sapiens
gtgatgaggacccct

SEQ ID NO: 800304 - DNA, 15 bp, Homo sapiens
tgatgaggacccctg

SEQ ID NO: 800305 - DNA, 15 bp, Homo sapiens
gatgaggacccctga

SEQ ID NO: 800306 - DNA, 15 bp, Homo sapiens
atgaggacccctgag

SEQ ID NO: 800307 - DNA, 15 bp, Homo sapiens
tgaggacccctgagt

SEQ ID NO: 800308 - DNA, 15 bp, Homo sapiens
gaggacccctgagtg

SEQ ID NO: 800309 - DNA, 15 bp, Homo sapiens
aggacccctgagtgg

SEQ ID NO: 800310 - DNA, 15 bp, Homo sapiens
ggacccctgagtggt

SEQ ID NO: 800311 - DNA, 15 bp, Homo sapiens
gacccctgagtggta

SEQ ID NO: 800312 - DNA, 15 bp, Homo sapiens
acccctgagtggtac

SEQ ID NO: 800313 - DNA, 15 bp, Homo sapiens
cccctgagtggtact

SEQ ID NO: 800314 - DNA, 15 bp, Homo sapiens
ccctgagtggtactg

SEQ ID NO: 800315 - DNA, 15 bp, Homo sapiens
cctgagtggtactga

SEQ ID NO: 800316 - DNA, 15 bp, Homo sapiens
ctgagtggtactgaa

SEQ ID NO: 800317 - DNA, 15 bp, Homo sapiens
tgagtggtactgaaa

SEQ ID NO: 800318 - DNA, 15 bp, Homo sapiens
gagtggtactgaaat

SEQ ID NO: 800319 - DNA, 15 bp, Homo sapiens
agtggtactgaaatc

SEQ ID NO: 800320 - DNA, 15 bp, Homo sapiens
gtggtactgaaatca

SEQ ID NO: 800321 - DNA, 15 bp, Homo sapiens
tggtactgaaatcac

SEQ ID NO: 800322 - DNA, 15 bp, Homo sapiens
ggtactgaaatcacc

SEQ ID NO: 800323 - DNA, 15 bp, Homo sapiens
gtactgaaatcacca

SEQ ID NO: 800324 - DNA, 15 bp, Homo sapiens
tactgaaatcaccag

SEQ ID NO: 800325 - DNA, 15 bp, Homo sapiens
actgaaatcaccagg

SEQ ID NO: 800326 - DNA, 15 bp, Homo sapiens
ctgaaatcaccaggt

SEQ ID NO: 800327 - DNA, 15 bp, Homo sapiens
tgaaatcaccaggtt

SEQ ID NO: 800328 - DNA, 15 bp, Homo sapiens
gaaatcaccaggttt

SEQ ID NO: 800329 - DNA, 15 bp, Homo sapiens
aaatcaccaggttta

SEQ ID NO: 800330 - DNA, 15 bp, Homo sapiens
aatcaccaggtttaa

SEQ ID NO: 800331 - DNA, 15 bp, Homo sapiens
atcaccaggtttaat

SEQ ID NO: 800332 - DNA, 15 bp, Homo sapiens
tcaccaggtttaatt

SEQ ID NO: 800333 - DNA, 15 bp, Homo sapiens
caccaggtttaattt

SEQ ID NO: 800334 - DNA, 15 bp, Homo sapiens
accaggtttaatttg

SEQ ID NO: 800335 - DNA, 15 bp, Homo sapiens
ccaggtttaatttga

SEQ ID NO: 800336 - DNA, 15 bp, Homo sapiens
caggtttaatttgac

SEQ ID NO: 800337 - DNA, 15 bp, Homo sapiens
aggtttaatttgaca

SEQ ID NO: 800338 - DNA, 15 bp, Homo sapiens
ggtttaatttgacaa

SEQ ID NO: 800339 - DNA, 15 bp, Homo sapiens
gtttaatttgacaat

SEQ ID NO: 800340 - DNA, 15 bp, Homo sapiens
tttaatttgacaatt

SEQ ID NO: 800341 - DNA, 15 bp, Homo sapiens
ttaatttgacaattc

SEQ ID NO: 800342 - DNA, 15 bp, Homo sapiens
taatttgacaattca

SEQ ID NO: 800343 - DNA, 15 bp, Homo sapiens
aatttgacaattcag

SEQ ID NO: 800344 - DNA, 15 bp, Homo sapiens
atttgacaattcagc

SEQ ID NO: 800345 - DNA, 15 bp, Homo sapiens
tttgacaattcagct

SEQ ID NO: 800346 - DNA, 15 bp, Homo sapiens
ttgacaattcagctt

SEQ ID NO: 800347 - DNA, 15 bp, Homo sapiens
tgacaattcagcttt

SEQ ID NO: 800348 - DNA, 15 bp, Homo sapiens
gacaattcagctttg

SEQ ID NO: 800349 - DNA, 15 bp, Homo sapiens
acaattcagctttgc

SEQ ID NO: 800350 - DNA, 15 bp, Homo sapiens
caattcagctttgct

SEQ ID NO: 800351 - DNA, 15 bp, Homo sapiens
aattcagctttgctt

SEQ ID NO: 800352 - DNA, 15 bp, Homo sapiens
attcagctttgcttt

SEQ ID NO: 800353 - DNA, 15 bp, Homo sapiens
ttcagctttgcttta

SEQ ID NO: 800354 - DNA, 15 bp, Homo sapiens
tcagctttgctttat

SEQ ID NO: 800355 - DNA, 15 bp, Homo sapiens
cagctttgctttatg

SEQ ID NO: 800356 - DNA, 15 bp, Homo sapiens
agctttgctttatgc

SEQ ID NO: 800357 - DNA, 15 bp, Homo sapiens
gctttgctttatgct

SEQ ID NO: 800358 - DNA, 15 bp, Homo sapiens
ctttgctttatgctt

SEQ ID NO: 800359 - DNA, 15 bp, Homo sapiens
tttgctttatgcttg

SEQ ID NO: 800360 - DNA, 15 bp, Homo sapiens
ttgctttatgcttgc

SEQ ID NO: 800361 - DNA, 15 bp, Homo sapiens
tgctttatgcttgcc

SEQ ID NO: 800362 - DNA, 15 bp, Homo sapiens
gctttatgcttgcct

SEQ ID NO: 800363 - DNA, 15 bp, Homo sapiens
ctttatgcttgcctc

SEQ ID NO: 800364 - DNA, 15 bp, Homo sapiens
tttatgcttgcctcc

SEQ ID NO: 800365 - DNA, 15 bp, Homo sapiens
ttatgcttgcctcca

SEQ ID NO: 800366 - DNA, 15 bp, Homo sapiens
tatgcttgcctccat

SEQ ID NO: 800367 - DNA, 15 bp, Homo sapiens
atgcttgcctccata

SEQ ID NO: 800368 - DNA, 15 bp, Homo sapiens
tgcttgcctccatat

SEQ ID NO: 800369 - DNA, 15 bp, Homo sapiens
gcttgcctccatatc

SEQ ID NO: 800370 - DNA, 15 bp, Homo sapiens
cttgcctccatatcg

SEQ ID NO: 800371 - DNA, 15 bp, Homo sapiens
ttgcctccatatcgg

SEQ ID NO: 800372 - DNA, 15 bp, Homo sapiens
tgcctccatatcggt

SEQ ID NO: 800373 - DNA, 15 bp, Homo sapiens
gcctccatatcggtc

SEQ ID NO: 800374 - DNA, 15 bp, Homo sapiens
cctccatatcggtcg

SEQ ID NO: 800375 - DNA, 15 bp, Homo sapiens
ctccatatcggtcgg

SEQ ID NO: 800376 - DNA, 15 bp, Homo sapiens
tccatatcggtcggt

SEQ ID NO: 800377 - DNA, 15 bp, Homo sapiens
ccatatcggtcggtt

SEQ ID NO: 800378 - DNA, 15 bp, Homo sapiens
catatcggtcggtta

SEQ ID NO: 800379 - DNA, 15 bp, Homo sapiens
atatcggtcggttaa

SEQ ID NO: 800380 - DNA, 15 bp, Homo sapiens
tatcggtcggttaat

SEQ ID NO: 800381 - DNA, 15 bp, Homo sapiens
atcggtcggttaatg

SEQ ID NO: 800382 - DNA, 15 bp, Homo sapiens
tcggtcggttaatga

SEQ ID NO: 800383 - DNA, 15 bp, Homo sapiens
cggtcggttaatgac

SEQ ID NO: 800384 - DNA, 15 bp, Homo sapiens
ggtcggttaatgacc

SEQ ID NO: 800385 - DNA, 15 bp, Homo sapiens
gtcggttaatgaccc

SEQ ID NO: 800386 - DNA, 15 bp, Homo sapiens
tcggttaatgaccct

SEQ ID NO: 800387 - DNA, 15 bp, Homo sapiens
cggttaatgaccctc

SEQ ID NO: 800388 - DNA, 15 bp, Homo sapiens
ggttaatgaccctcg

SEQ ID NO: 800389 - DNA, 15 bp, Homo sapiens
gttaatgaccctcgt

SEQ ID NO: 800390 - DNA, 15 bp, Homo sapiens
ttaatgaccctcgtt

SEQ ID NO: 800391 - DNA, 15 bp, Homo sapiens
taatgaccctcgtta

SEQ ID NO: 800392 - DNA, 15 bp, Homo sapiens
aatgaccctcgttag

SEQ ID NO: 800393 - DNA, 15 bp, Homo sapiens
atgaccctcgttagc

SEQ ID NO: 800394 - DNA, 15 bp, Homo sapiens
tgaccctcgttagcc

SEQ ID NO: 800395 - DNA, 15 bp, Homo sapiens
gaccctcgttagccc

SEQ ID NO: 800396 - DNA, 15 bp, Homo sapiens
accctcgttagccca

SEQ ID NO: 800397 - DNA, 15 bp, Homo sapiens
ccctcgttagcccag

SEQ ID NO: 800398 - DNA, 15 bp, Homo sapiens
cctcgttagcccagg

SEQ ID NO: 800399 - DNA, 15 bp, Homo sapiens
ctcgttagcccaggt

SEQ ID NO: 800400 - DNA, 15 bp, Homo sapiens
tcgttagcccaggtc

SEQ ID NO: 800401 - DNA, 15 bp, Homo sapiens
cgttagcccaggtct

SEQ ID NO: 800402 - DNA, 15 bp, Homo sapiens
gttagcccaggtctc

SEQ ID NO: 800403 - DNA, 15 bp, Homo sapiens
ttagcccaggtctct

SEQ ID NO: 800404 - DNA, 15 bp, Homo sapiens
tagcccaggtctctt

SEQ ID NO: 800405 - DNA, 15 bp, Homo sapiens
agcccaggtctcttc

SEQ ID NO: 800406 - DNA, 15 bp, Homo sapiens
gcccaggtctcttca

SEQ ID NO: 800407 - DNA, 15 bp, Homo sapiens
cccaggtctcttcaa

SEQ ID NO: 800408 - DNA, 15 bp, Homo sapiens
ccaggtctcttcaac

SEQ ID NO: 800409 - DNA, 15 bp, Homo sapiens
caggtctcttcaact

SEQ ID NO: 800410 - DNA, 15 bp, Homo sapiens
aggtctcttcaactg

SEQ ID NO: 800411 - DNA, 15 bp, Homo sapiens
ggtctcttcaactga

SEQ ID NO: 800412 - DNA, 15 bp, Homo sapiens
gtctcttcaactgat

SEQ ID NO: 800413 - DNA, 15 bp, Homo sapiens
tctcttcaactgatc

SEQ ID NO: 800414 - DNA, 15 bp, Homo sapiens
ctcttcaactgatct

SEQ ID NO: 800415 - DNA, 15 bp, Homo sapiens
tcttcaactgatctg

SEQ ID NO: 800416 - DNA, 15 bp, Homo sapiens
cttcaactgatctgc

SEQ ID NO: 800417 - DNA, 15 bp, Homo sapiens
ttcaactgatctgct

SEQ ID NO: 800418 - DNA, 15 bp, Homo sapiens
tcaactgatctgcta

SEQ ID NO: 800419 - DNA, 15 bp, Homo sapiens
caactgatctgctac

SEQ ID NO: 800420 - DNA, 15 bp, Homo sapiens
aactgatctgctact

SEQ ID NO: 800421 - DNA, 15 bp, Homo sapiens
actgatctgctacta

SEQ ID NO: 800422 - DNA, 15 bp, Homo sapiens
ctgatctgctactac

SEQ ID NO: 800423 - DNA, 15 bp, Homo sapiens
tgatctgctactaca

SEQ ID NO: 800424 - DNA, 15 bp, Homo sapiens
gatctgctactacaa

SEQ ID NO: 800425 - DNA, 15 bp, Homo sapiens
atctgctactacaat

SEQ ID NO: 800426 - DNA, 15 bp, Homo sapiens
tctgctactacaata

SEQ ID NO: 800427 - DNA, 15 bp, Homo sapiens
ctgctactacaataa

SEQ ID NO: 800428 - DNA, 15 bp, Homo sapiens
tgctactacaataaa

SEQ ID NO: 800429 - DNA, 15 bp, Homo sapiens
gctactacaataaaa

SEQ ID NO: 800430 - DNA, 15 bp, Homo sapiens
ctactacaataaaag

SEQ ID NO: 800431 - DNA, 15 bp, Homo sapiens
tactacaataaaagt

SEQ ID NO: 800432 - DNA, 15 bp, Homo sapiens
actacaataaaagtg

SEQ ID NO: 800433 - DNA, 15 bp, Homo sapiens
ctacaataaaagtgc

SEQ ID NO: 800434 - DNA, 15 bp, Homo sapiens
tacaataaaagtgct

SEQ ID NO: 800435 - DNA, 15 bp, Homo sapiens
acaataaaagtgctg

SEQ ID NO: 800436 - DNA, 15 bp, Homo sapiens
caataaaagtgctga

SEQ ID NO: 800437 - DNA, 15 bp, Homo sapiens
aataaaagtgctgaa

SEQ ID NO: 800438 - DNA, 15 bp, Homo sapiens
ataaaagtgctgaag

SEQ ID NO: 800439 - DNA, 15 bp, Homo sapiens
taaaagtgctgaagt

SEQ ID NO: 800440 - DNA, 15 bp, Homo sapiens
aaaagtgctgaagta

SEQ ID NO: 800441 - DNA, 15 bp, Homo sapiens
aaagtgctgaagtat

SEQ ID NO: 800442 - DNA, 15 bp, Homo sapiens
aagtgctgaagtatt

SEQ ID NO: 800443 - DNA, 15 bp, Homo sapiens
agtgctgaagtattt

SEQ ID NO: 800444 - DNA, 15 bp, Homo sapiens
gtgctgaagtatttt

SEQ ID NO: 800445 - DNA, 15 bp, Homo sapiens
tgctgaagtatttta

SEQ ID NO: 800446 - DNA, 15 bp, Homo sapiens
gctgaagtattttac

SEQ ID NO: 800447 - DNA, 15 bp, Homo sapiens
ctgaagtattttacc

SEQ ID NO: 800448 - DNA, 15 bp, Homo sapiens
tgaagtattttacct

SEQ ID NO: 800449 - DNA, 15 bp, Homo sapiens
gaagtattttaccta

SEQ ID NO: 800450 - DNA, 15 bp, Homo sapiens
aagtattttacctaa

SEQ ID NO: 800451 - DNA, 15 bp, Homo sapiens
agtattttacctaaa

SEQ ID NO: 800452 - DNA, 15 bp, Homo sapiens
gtattttacctaaaa

SEQ ID NO: 800453 - DNA, 15 bp, Homo sapiens
tattttacctaaaaa

SEQ ID NO: 800454 - DNA, 15 bp, Homo sapiens
attttacctaaaaac

SEQ ID NO: 800455 - DNA, 15 bp, Homo sapiens
ttttacctaaaaaca

SEQ ID NO: 800456 - DNA, 15 bp, Homo sapiens
tttacctaaaaacaa

SEQ ID NO: 800457 - DNA, 15 bp, Homo sapiens
ttacctaaaaacaaa

SEQ ID NO: 800458 - DNA, 15 bp, Homo sapiens
tacctaaaaacaaac

SEQ ID NO: 800459 - DNA, 15 bp, Homo sapiens
acctaaaaacaaact

SEQ ID NO: 800460 - DNA, 15 bp, Homo sapiens
cctaaaaacaaactc

SEQ ID NO: 800461 - DNA, 15 bp, Homo sapiens
ctaaaaacaaactca

SEQ ID NO: 800462 - DNA, 15 bp, Homo sapiens
taaaaacaaactcag

SEQ ID NO: 800463 - DNA, 15 bp, Homo sapiens
aaaaacaaactcagt

SEQ ID NO: 800464 - DNA, 15 bp, Homo sapiens
aaaacaaactcagtt

SEQ ID NO: 800465 - DNA, 15 bp, Homo sapiens
aaacaaactcagtta

SEQ ID NO: 800466 - DNA, 15 bp, Homo sapiens
aacaaactcagttat

SEQ ID NO: 800467 - DNA, 15 bp, Homo sapiens
acaaactcagttatc

SEQ ID NO: 800468 - DNA, 15 bp, Homo sapiens
caaactcagttatct

SEQ ID NO: 800469 - DNA, 15 bp, Homo sapiens
aaactcagttatctg

SEQ ID NO: 800470 - DNA, 15 bp, Homo sapiens
aactcagttatctgt

SEQ ID NO: 800471 - DNA, 15 bp, Homo sapiens
actcagttatctgtg

SEQ ID NO: 800472 - DNA, 15 bp, Homo sapiens
ctcagttatctgtgg

SEQ ID NO: 800473 - DNA, 15 bp, Homo sapiens
tcagttatctgtggg

SEQ ID NO: 800474 - DNA, 15 bp, Homo sapiens
cagttatctgtggga

SEQ ID NO: 800475 - DNA, 15 bp, Homo sapiens
agttatctgtgggac

SEQ ID NO: 800476 - DNA, 15 bp, Homo sapiens
gttatctgtgggaca

SEQ ID NO: 800477 - DNA, 15 bp, Homo sapiens
ttatctgtgggacat

SEQ ID NO: 800478 - DNA, 15 bp, Homo sapiens
tatctgtgggacatg

SEQ ID NO: 800479 - DNA, 15 bp, Homo sapiens
atctgtgggacatgt

SEQ ID NO: 800480 - DNA, 15 bp, Homo sapiens
tctgtgggacatgta

SEQ ID NO: 800481 - DNA, 15 bp, Homo sapiens
ctgtgggacatgtat

SEQ ID NO: 800482 - DNA, 15 bp, Homo sapiens
tgtgggacatgtata

SEQ ID NO: 800483 - DNA, 15 bp, Homo sapiens
gtgggacatgtatat

SEQ ID NO: 800484 - DNA, 15 bp, Homo sapiens
tgggacatgtatatg

SEQ ID NO: 800485 - DNA, 15 bp, Homo sapiens
gggacatgtatatgt

SEQ ID NO: 800486 - DNA, 15 bp, Homo sapiens
ggacatgtatatgtg

SEQ ID NO: 800487 - DNA, 15 bp, Homo sapiens
gacatgtatatgtgg

SEQ ID NO: 800488 - DNA, 15 bp, Homo sapiens
acatgtatatgtgga

SEQ ID NO: 800489 - DNA, 15 bp, Homo sapiens
catgtatatgtggaa

SEQ ID NO: 800490 - DNA, 15 bp, Homo sapiens
atgtatatgtggaaa

SEQ ID NO: 800491 - DNA, 15 bp, Homo sapiens
tgtatatgtggaaaa

SEQ ID NO: 800492 - DNA, 15 bp, Homo sapiens
gtatatgtggaaaac

SEQ ID NO: 800493 - DNA, 15 bp, Homo sapiens
tatatgtggaaaaca

SEQ ID NO: 800494 - DNA, 15 bp, Homo sapiens
atatgtggaaaacac

SEQ ID NO: 800495 - DNA, 15 bp, Homo sapiens
tatgtggaaaacaca

SEQ ID NO: 800496 - DNA, 15 bp, Homo sapiens
atgtggaaaacacaa

SEQ ID NO: 800497 - DNA, 15 bp, Homo sapiens
tgtggaaaacacaaa

SEQ ID NO: 800498 - DNA, 15 bp, Homo sapiens
gtggaaaacacaaat

SEQ ID NO: 800499 - DNA, 15 bp, Homo sapiens
tggaaaacacaaatt

SEQ ID NO: 800500 - DNA, 15 bp, Homo sapiens
ggaaaacacaaatta

SEQ ID NO: 800501 - DNA, 15 bp, Homo sapiens
gaaaacacaaattac

SEQ ID NO: 800502 - DNA, 15 bp, Homo sapiens
aaaacacaaattacc

SEQ ID NO: 800503 - DNA, 15 bp, Homo sapiens
aaacacaaattacct

SEQ ID NO: 800504 - DNA, 15 bp, Homo sapiens
aacacaaattacctc

SEQ ID NO: 800505 - DNA, 15 bp, Homo sapiens
acacaaattacctct

SEQ ID NO: 800506 - DNA, 15 bp, Homo sapiens
cacaaattacctcta

SEQ ID NO: 800507 - DNA, 15 bp, Homo sapiens
acaaattacctctac

SEQ ID NO: 800508 - DNA, 15 bp, Homo sapiens
caaattacctctaca

SEQ ID NO: 800509 - DNA, 15 bp, Homo sapiens
aaattacctctacag

SEQ ID NO: 800510 - DNA, 15 bp, Homo sapiens
aattacctctacagt

SEQ ID NO: 800511 - DNA, 15 bp, Homo sapiens
attacctctacagta

SEQ ID NO: 800512 - DNA, 15 bp, Homo sapiens
ttacctctacagtaa

SEQ ID NO: 800513 - DNA, 15 bp, Homo sapiens
tacctctacagtaat

SEQ ID NO: 800514 - DNA, 15 bp, Homo sapiens
acctctacagtaata

SEQ ID NO: 800515 - DNA, 15 bp, Homo sapiens
cctctacagtaatat

SEQ ID NO: 800516 - DNA, 15 bp, Homo sapiens
ctctacagtaatatg

SEQ ID NO: 800517 - DNA, 15 bp, Homo sapiens
tctacagtaatatga

SEQ ID NO: 800518 - DNA, 15 bp, Homo sapiens
ctacagtaatatgaa

SEQ ID NO: 800519 - DNA, 15 bp, Homo sapiens
tacagtaatatgaac

SEQ ID NO: 800520 - DNA, 15 bp, Homo sapiens
acagtaatatgaaca

SEQ ID NO: 800521 - DNA, 15 bp, Homo sapiens
cagtaatatgaacat

SEQ ID NO: 800522 - DNA, 15 bp, Homo sapiens
agtaatatgaacatt

SEQ ID NO: 800523 - DNA, 15 bp, Homo sapiens
gtaatatgaacattt

SEQ ID NO: 800524 - DNA, 15 bp, Homo sapiens
taatatgaacattta

SEQ ID NO: 800525 - DNA, 15 bp, Homo sapiens
aatatgaacatttaa

SEQ ID NO: 800526 - DNA, 15 bp, Homo sapiens
atatgaacatttaat

SEQ ID NO: 800527 - DNA, 15 bp, Homo sapiens
tatgaacatttaatt

SEQ ID NO: 800528 - DNA, 15 bp, Homo sapiens
atgaacatttaattt

SEQ ID NO: 800529 - DNA, 15 bp, Homo sapiens
tgaacatttaatttt

SEQ ID NO: 800530 - DNA, 15 bp, Homo sapiens
gaacatttaattttt

SEQ ID NO: 800531 - DNA, 15 bp, Homo sapiens
aacatttaatttttt

SEQ ID NO: 800532 - DNA, 15 bp, Homo sapiens
acatttaattttttt

SEQ ID NO: 800533 - DNA, 15 bp, Homo sapiens
catttaatttttttg

SEQ ID NO: 800534 - DNA, 15 bp, Homo sapiens
atttaatttttttgg

SEQ ID NO: 800535 - DNA, 15 bp, Homo sapiens
tttaatttttttggt

SEQ ID NO: 800536 - DNA, 15 bp, Homo sapiens
ttaatttttttggta

SEQ ID NO: 800537 - DNA, 15 bp, Homo sapiens
taatttttttggtag

SEQ ID NO: 800538 - DNA, 15 bp, Homo sapiens
aatttttttggtagc

SEQ ID NO: 800539 - DNA, 15 bp, Homo sapiens
atttttttggtagca

SEQ ID NO: 800540 - DNA, 15 bp, Homo sapiens
tttttttggtagcaa

SEQ ID NO: 800541 - DNA, 15 bp, Homo sapiens
ttttttggtagcaaa

SEQ ID NO: 800542 - DNA, 15 bp, Homo sapiens
tttttggtagcaaaa

SEQ ID NO: 800543 - DNA, 15 bp, Homo sapiens
ttttggtagcaaaaa

SEQ ID NO: 800544 - DNA, 15 bp, Homo sapiens
tttggtagcaaaaat

SEQ ID NO: 800545 - DNA, 15 bp, Homo sapiens
ttggtagcaaaaata

SEQ ID NO: 800546 - DNA, 15 bp, Homo sapiens
tggtagcaaaaatat

SEQ ID NO: 800547 - DNA, 15 bp, Homo sapiens
ggtagcaaaaatatc

SEQ ID NO: 800548 - DNA, 15 bp, Homo sapiens
gtagcaaaaatatct

SEQ ID NO: 800549 - DNA, 15 bp, Homo sapiens
tagcaaaaatatcta

SEQ ID NO: 800550 - DNA, 15 bp, Homo sapiens
agcaaaaatatctac

SEQ ID NO: 800551 - DNA, 15 bp, Homo sapiens
gcaaaaatatctact

SEQ ID NO: 800552 - DNA, 15 bp, Homo sapiens
caaaaatatctacta

SEQ ID NO: 800553 - DNA, 15 bp, Homo sapiens
aaaaatatctactat

SEQ ID NO: 800554 - DNA, 15 bp, Homo sapiens
aaaatatctactatt

SEQ ID NO: 800555 - DNA, 15 bp, Homo sapiens
aaatatctactattc

SEQ ID NO: 800556 - DNA, 15 bp, Homo sapiens
aatatctactattca

SEQ ID NO: 800557 - DNA, 15 bp, Homo sapiens
atatctactattcaa

SEQ ID NO: 800558 - DNA, 15 bp, Homo sapiens
tatctactattcaat

SEQ ID NO: 800559 - DNA, 15 bp, Homo sapiens
atctactattcaatg

SEQ ID NO: 800560 - DNA, 15 bp, Homo sapiens
tctactattcaatgc

SEQ ID NO: 800561 - DNA, 15 bp, Homo sapiens
ctactattcaatgca

SEQ ID NO: 800562 - DNA, 15 bp, Homo sapiens
tactattcaatgcac

SEQ ID NO: 800563 - DNA, 15 bp, Homo sapiens
actattcaatgcacg

SEQ ID NO: 800564 - DNA, 15 bp, Homo sapiens
ctattcaatgcacgc

SEQ ID NO: 800565 - DNA, 15 bp, Homo sapiens
tattcaatgcacgct

SEQ ID NO: 800566 - DNA, 15 bp, Homo sapiens
attcaatgcacgctt

SEQ ID NO: 800567 - DNA, 15 bp, Homo sapiens
ttcaatgcacgctta

SEQ ID NO: 800568 - DNA, 15 bp, Homo sapiens
tcaatgcacgcttat

SEQ ID NO: 800569 - DNA, 15 bp, Homo sapiens
caatgcacgcttata

SEQ ID NO: 800570 - DNA, 15 bp, Homo sapiens
aatgcacgcttatat

SEQ ID NO: 800571 - DNA, 15 bp, Homo sapiens
atgcacgcttatatg

SEQ ID NO: 800572 - DNA, 15 bp, Homo sapiens
tgcacgcttatatgc

SEQ ID NO: 800573 - DNA, 15 bp, Homo sapiens
gcacgcttatatgcc

SEQ ID NO: 800574 - DNA, 15 bp, Homo sapiens
cacgcttatatgcca

SEQ ID NO: 800575 - DNA, 15 bp, Homo sapiens
acgcttatatgccag

SEQ ID NO: 800576 - DNA, 15 bp, Homo sapiens
cgcttatatgccagg

SEQ ID NO: 800577 - DNA, 15 bp, Homo sapiens
gcttatatgccaggt

SEQ ID NO: 800578 - DNA, 15 bp, Homo sapiens
cttatatgccaggta

SEQ ID NO: 800579 - DNA, 15 bp, Homo sapiens
ttatatgccaggtac

SEQ ID NO: 800580 - DNA, 15 bp, Homo sapiens
tatatgccaggtact

SEQ ID NO: 800581 - DNA, 15 bp, Homo sapiens
atatgccaggtacta

SEQ ID NO: 800582 - DNA, 15 bp, Homo sapiens
tatgccaggtactat

SEQ ID NO: 800583 - DNA, 15 bp, Homo sapiens
atgccaggtactatg

SEQ ID NO: 800584 - DNA, 15 bp, Homo sapiens
tgccaggtactatgt

SEQ ID NO: 800585 - DNA, 15 bp, Homo sapiens
gccaggtactatgtg

SEQ ID NO: 800586 - DNA, 15 bp, Homo sapiens
ccaggtactatgtga

SEQ ID NO: 800587 - DNA, 15 bp, Homo sapiens
caggtactatgtgaa

SEQ ID NO: 800588 - DNA, 15 bp, Homo sapiens
aggtactatgtgaat

SEQ ID NO: 800589 - DNA, 15 bp, Homo sapiens
ggtactatgtgaatg

SEQ ID NO: 800590 - DNA, 15 bp, Homo sapiens
gtactatgtgaatga

SEQ ID NO: 800591 - DNA, 15 bp, Homo sapiens
tactatgtgaatgaa

SEQ ID NO: 800592 - DNA, 15 bp, Homo sapiens
actatgtgaatgaat

SEQ ID NO: 800593 - DNA, 15 bp, Homo sapiens
ctatgtgaatgaatg

SEQ ID NO: 800594 - DNA, 15 bp, Homo sapiens
tatgtgaatgaatgc

SEQ ID NO: 800595 - DNA, 15 bp, Homo sapiens
atgtgaatgaatgct

SEQ ID NO: 800596 - DNA, 15 bp, Homo sapiens
tgtgaatgaatgctt

SEQ ID NO: 800597 - DNA, 15 bp, Homo sapiens
gtgaatgaatgcttt

SEQ ID NO: 800598 - DNA, 15 bp, Homo sapiens
tgaatgaatgcttta

SEQ ID NO: 800599 - DNA, 15 bp, Homo sapiens
gaatgaatgctttac

SEQ ID NO: 800600 - DNA, 15 bp, Homo sapiens
aatgaatgctttaca

SEQ ID NO: 800601 - DNA, 15 bp, Homo sapiens
atgaatgctttacat

SEQ ID NO: 800602 - DNA, 15 bp, Homo sapiens
tgaatgctttacata

SEQ ID NO: 800603 - DNA, 15 bp, Homo sapiens
gaatgctttacatat

SEQ ID NO: 800604 - DNA, 15 bp, Homo sapiens
aatgctttacatata

SEQ ID NO: 800605 - DNA, 15 bp, Homo sapiens
atgctttacatatat

SEQ ID NO: 800606 - DNA, 15 bp, Homo sapiens
tgctttacatatatt

SEQ ID NO: 800607 - DNA, 15 bp, Homo sapiens
gctttacatatatta

SEQ ID NO: 800608 - DNA, 15 bp, Homo sapiens
ctttacatatattac

SEQ ID NO: 800609 - DNA, 15 bp, Homo sapiens
tttacatatattaca

SEQ ID NO: 800610 - DNA, 15 bp, Homo sapiens
ttacatatattacat

SEQ ID NO: 800611 - DNA, 15 bp, Homo sapiens
tacatatattacata

SEQ ID NO: 800612 - DNA, 15 bp, Homo sapiens
acatatattacataa

SEQ ID NO: 800613 - DNA, 15 bp, Homo sapiens
catatattacataat

SEQ ID NO: 800614 - DNA, 15 bp, Homo sapiens
atatattacataatc

SEQ ID NO: 800615 - DNA, 15 bp, Homo sapiens
tatattacataatct

SEQ ID NO: 800616 - DNA, 15 bp, Homo sapiens
atattacataatctt

SEQ ID NO: 800617 - DNA, 15 bp, Homo sapiens
tattacataatcttc

SEQ ID NO: 800618 - DNA, 15 bp, Homo sapiens
attacataatcttca

SEQ ID NO: 800619 - DNA, 15 bp, Homo sapiens
ttacataatcttcaa

SEQ ID NO: 800620 - DNA, 15 bp, Homo sapiens
tacataatcttcaaa

SEQ ID NO: 800621 - DNA, 15 bp, Homo sapiens
acataatcttcaaaa

SEQ ID NO: 800622 - DNA, 15 bp, Homo sapiens
cataatcttcaaaaa

SEQ ID NO: 800623 - DNA, 15 bp, Homo sapiens
ataatcttcaaaaat

SEQ ID NO: 800624 - DNA, 15 bp, Homo sapiens
taatcttcaaaaatt

SEQ ID NO: 800625 - DNA, 15 bp, Homo sapiens
aatcttcaaaaatta

SEQ ID NO: 800626 - DNA, 15 bp, Homo sapiens
atcttcaaaaattaa

SEQ ID NO: 800627 - DNA, 15 bp, Homo sapiens
tcttcaaaaattaaa

SEQ ID NO: 800628 - DNA, 15 bp, Homo sapiens
cttcaaaaattaaaa

SEQ ID NO: 800629 - DNA, 15 bp, Homo sapiens
ttcaaaaattaaaac

SEQ ID NO: 800630 - DNA, 15 bp, Homo sapiens
tcaaaaattaaaacc

SEQ ID NO: 800631 - DNA, 15 bp, Homo sapiens
caaaaattaaaacca

SEQ ID NO: 800632 - DNA, 15 bp, Homo sapiens
aaaaattaaaaccag

SEQ ID NO: 800633 - DNA, 15 bp, Homo sapiens
aaaattaaaaccagc

SEQ ID NO: 800634 - DNA, 15 bp, Homo sapiens
aaattaaaaccagca

SEQ ID NO: 800635 - DNA, 15 bp, Homo sapiens
aattaaaaccagcaa

SEQ ID NO: 800636 - DNA, 15 bp, Homo sapiens
attaaaaccagcaag

SEQ ID NO: 800637 - DNA, 15 bp, Homo sapiens
ttaaaaccagcaagg

SEQ ID NO: 800638 - DNA, 15 bp, Homo sapiens
taaaaccagcaaggt

SEQ ID NO: 800639 - DNA, 15 bp, Homo sapiens
aaaaccagcaaggtg

SEQ ID NO: 800640 - DNA, 15 bp, Homo sapiens
aaaccagcaaggtgt

SEQ ID NO: 800641 - DNA, 15 bp, Homo sapiens
aaccagcaaggtgtg

SEQ ID NO: 800642 - DNA, 15 bp, Homo sapiens
accagcaaggtgtgt

SEQ ID NO: 800643 - DNA, 15 bp, Homo sapiens
ccagcaaggtgtgtt

SEQ ID NO: 800644 - DNA, 15 bp, Homo sapiens
cagcaaggtgtgttt

SEQ ID NO: 800645 - DNA, 15 bp, Homo sapiens
agcaaggtgtgtttt

SEQ ID NO: 800646 - DNA, 15 bp, Homo sapiens
gcaaggtgtgttttt

SEQ ID NO: 800647 - DNA, 15 bp, Homo sapiens
caaggtgtgttttta

SEQ ID NO: 800648 - DNA, 15 bp, Homo sapiens
aaggtgtgtttttac

SEQ ID NO: 800649 - DNA, 15 bp, Homo sapiens
aggtgtgtttttact

SEQ ID NO: 800650 - DNA, 15 bp, Homo sapiens
ggtgtgtttttacta

SEQ ID NO: 800651 - DNA, 15 bp, Homo sapiens
gtgtgtttttactat

SEQ ID NO: 800652 - DNA, 15 bp, Homo sapiens
tgtgtttttactatt

SEQ ID NO: 800653 - DNA, 15 bp, Homo sapiens
gtgtttttactattc

SEQ ID NO: 800654 - DNA, 15 bp, Homo sapiens
tgtttttactattcc

SEQ ID NO: 800655 - DNA, 15 bp, Homo sapiens
gtttttactattcca

SEQ ID NO: 800656 - DNA, 15 bp, Homo sapiens
tttttactattccag

SEQ ID NO: 800657 - DNA, 15 bp, Homo sapiens
ttttactattccagt

SEQ ID NO: 800658 - DNA, 15 bp, Homo sapiens
tttactattccagtt

SEQ ID NO: 800659 - DNA, 15 bp, Homo sapiens
ttactattccagttt

SEQ ID NO: 800660 - DNA, 15 bp, Homo sapiens
tactattccagtttt

SEQ ID NO: 800661 - DNA, 15 bp, Homo sapiens
actattccagtttta

SEQ ID NO: 800662 - DNA, 15 bp, Homo sapiens
ctattccagttttac

SEQ ID NO: 800663 - DNA, 15 bp, Homo sapiens
tattccagttttaca

SEQ ID NO: 800664 - DNA, 15 bp, Homo sapiens
attccagttttacag

SEQ ID NO: 800665 - DNA, 15 bp, Homo sapiens
ttccagttttacaga

SEQ ID NO: 800666 - DNA, 15 bp, Homo sapiens
tccagttttacagag

SEQ ID NO: 800667 - DNA, 15 bp, Homo sapiens
ccagttttacagagg

SEQ ID NO: 800668 - DNA, 15 bp, Homo sapiens
cagttttacagagga

SEQ ID NO: 800669 - DNA, 15 bp, Homo sapiens
agttttacagaggag

SEQ ID NO: 800670 - DNA, 15 bp, Homo sapiens
gttttacagaggagc

SEQ ID NO: 800671 - DNA, 15 bp, Homo sapiens
ttttacagaggagca

SEQ ID NO: 800672 - DNA, 15 bp, Homo sapiens
tttacagaggagcaa

SEQ ID NO: 800673 - DNA, 15 bp, Homo sapiens
ttacagaggagcaaa

SEQ ID NO: 800674 - DNA, 15 bp, Homo sapiens
tacagaggagcaaac

SEQ ID NO: 800675 - DNA, 15 bp, Homo sapiens
acagaggagcaaact

SEQ ID NO: 800676 - DNA, 15 bp, Homo sapiens
cagaggagcaaactg

SEQ ID NO: 800677 - DNA, 15 bp, Homo sapiens
agaggagcaaactga

SEQ ID NO: 800678 - DNA, 15 bp, Homo sapiens
gaggagcaaactgag

SEQ ID NO: 800679 - DNA, 15 bp, Homo sapiens
aggagcaaactgagg

SEQ ID NO: 800680 - DNA, 15 bp, Homo sapiens
ggagcaaactgaggt

SEQ ID NO: 800681 - DNA, 15 bp, Homo sapiens
gagcaaactgaggtt

SEQ ID NO: 800682 - DNA, 15 bp, Homo sapiens
agcaaactgaggttc

SEQ ID NO: 800683 - DNA, 15 bp, Homo sapiens
gcaaactgaggttca

SEQ ID NO: 800684 - DNA, 15 bp, Homo sapiens
caaactgaggttcaa

SEQ ID NO: 800685 - DNA, 15 bp, Homo sapiens
aaactgaggttcaaa

SEQ ID NO: 800686 - DNA, 15 bp, Homo sapiens
aactgaggttcaaag

SEQ ID NO: 800687 - DNA, 15 bp, Homo sapiens
actgaggttcaaaga

SEQ ID NO: 800688 - DNA, 15 bp, Homo sapiens
ctgaggttcaaagaa

SEQ ID NO: 800689 - DNA, 15 bp, Homo sapiens
tgaggttcaaagaaa

SEQ ID NO: 800690 - DNA, 15 bp, Homo sapiens
gaggttcaaagaaat

SEQ ID NO: 800691 - DNA, 15 bp, Homo sapiens
aggttcaaagaaatt

SEQ ID NO: 800692 - DNA, 15 bp, Homo sapiens
ggttcaaagaaatta

SEQ ID NO: 800693 - DNA, 15 bp, Homo sapiens
gttcaaagaaattaa

SEQ ID NO: 800694 - DNA, 15 bp, Homo sapiens
ttcaaagaaattaaa

SEQ ID NO: 800695 - DNA, 15 bp, Homo sapiens
tcaaagaaattaaat

SEQ ID NO: 800696 - DNA, 15 bp, Homo sapiens
caaagaaattaaata

SEQ ID NO: 800697 - DNA, 15 bp, Homo sapiens
aaagaaattaaataa

SEQ ID NO: 800698 - DNA, 15 bp, Homo sapiens
aagaaattaaataac

SEQ ID NO: 800699 - DNA, 15 bp, Homo sapiens
agaaattaaataaca

SEQ ID NO: 800700 - DNA, 15 bp, Homo sapiens
gaaattaaataacat

SEQ ID NO: 800701 - DNA, 15 bp, Homo sapiens
aaattaaataacatg

SEQ ID NO: 800702 - DNA, 15 bp, Homo sapiens
aattaaataacatgt

SEQ ID NO: 800703 - DNA, 15 bp, Homo sapiens
attaaataacatgtc

SEQ ID NO: 800704 - DNA, 15 bp, Homo sapiens
ttaaataacatgtcc

SEQ ID NO: 800705 - DNA, 15 bp, Homo sapiens
taaataacatgtcca

SEQ ID NO: 800706 - DNA, 15 bp, Homo sapiens
aaataacatgtccag

SEQ ID NO: 800707 - DNA, 15 bp, Homo sapiens
aataacatgtccagg

SEQ ID NO: 800708 - DNA, 15 bp, Homo sapiens
ataacatgtccaggg

SEQ ID NO: 800709 - DNA, 15 bp, Homo sapiens
taacatgtccagggt

SEQ ID NO: 800710 - DNA, 15 bp, Homo sapiens
aacatgtccagggtc

SEQ ID NO: 800711 - DNA, 15 bp, Homo sapiens
acatgtccagggtct

SEQ ID NO: 800712 - DNA, 15 bp, Homo sapiens
catgtccagggtctc

SEQ ID NO: 800713 - DNA, 15 bp, Homo sapiens
atgtccagggtctcg

SEQ ID NO: 800714 - DNA, 15 bp, Homo sapiens
tgtccagggtctcgt

SEQ ID NO: 800715 - DNA, 15 bp, Homo sapiens
gtccagggtctcgta

SEQ ID NO: 800716 - DNA, 15 bp, Homo sapiens
tccagggtctcgtag

SEQ ID NO: 800717 - DNA, 15 bp, Homo sapiens
ccagggtctcgtagc

SEQ ID NO: 800718 - DNA, 15 bp, Homo sapiens
cagggtctcgtagct

SEQ ID NO: 800719 - DNA, 15 bp, Homo sapiens
agggtctcgtagcta

SEQ ID NO: 800720 - DNA, 15 bp, Homo sapiens
gggtctcgtagctaa

SEQ ID NO: 800721 - DNA, 15 bp, Homo sapiens
ggtctcgtagctaaa

SEQ ID NO: 800722 - DNA, 15 bp, Homo sapiens
gtctcgtagctaaac

SEQ ID NO: 800723 - DNA, 15 bp, Homo sapiens
tctcgtagctaaaca

SEQ ID NO: 800724 - DNA, 15 bp, Homo sapiens
ctcgtagctaaacag

SEQ ID NO: 800725 - DNA, 15 bp, Homo sapiens
tcgtagctaaacagt

SEQ ID NO: 800726 - DNA, 15 bp, Homo sapiens
cgtagctaaacagta

SEQ ID NO: 800727 - DNA, 15 bp, Homo sapiens
gtagctaaacagtag

SEQ ID NO: 800728 - DNA, 15 bp, Homo sapiens
tagctaaacagtaga

SEQ ID NO: 800729 - DNA, 15 bp, Homo sapiens
agctaaacagtagag

SEQ ID NO: 800730 - DNA, 15 bp, Homo sapiens
gctaaacagtagagc

SEQ ID NO: 800731 - DNA, 15 bp, Homo sapiens
ctaaacagtagagcc

SEQ ID NO: 800732 - DNA, 15 bp, Homo sapiens
taaacagtagagcca

SEQ ID NO: 800733 - DNA, 15 bp, Homo sapiens
aaacagtagagccag

SEQ ID NO: 800734 - DNA, 15 bp, Homo sapiens
aacagtagagccagg

SEQ ID NO: 800735 - DNA, 15 bp, Homo sapiens
acagtagagccagga

SEQ ID NO: 800736 - DNA, 15 bp, Homo sapiens
cagtagagccaggat

SEQ ID NO: 800737 - DNA, 15 bp, Homo sapiens
agtagagccaggatt

SEQ ID NO: 800738 - DNA, 15 bp, Homo sapiens
gtagagccaggattc

SEQ ID NO: 800739 - DNA, 15 bp, Homo sapiens
tagagccaggattcc

SEQ ID NO: 800740 - DNA, 15 bp, Homo sapiens
agagccaggattcca

SEQ ID NO: 800741 - DNA, 15 bp, Homo sapiens
gagccaggattccag

SEQ ID NO: 800742 - DNA, 15 bp, Homo sapiens
agccaggattccagt

SEQ ID NO: 800743 - DNA, 15 bp, Homo sapiens
gccaggattccagta

SEQ ID NO: 800744 - DNA, 15 bp, Homo sapiens
ccaggattccagtaa

SEQ ID NO: 800745 - DNA, 15 bp, Homo sapiens
caggattccagtaag

SEQ ID NO: 800746 - DNA, 15 bp, Homo sapiens
aggattccagtaagt

SEQ ID NO: 800747 - DNA, 15 bp, Homo sapiens
ggattccagtaagtg

SEQ ID NO: 800748 - DNA, 15 bp, Homo sapiens
gattccagtaagtga

SEQ ID NO: 800749 - DNA, 15 bp, Homo sapiens
attccagtaagtgat

SEQ ID NO: 800750 - DNA, 15 bp, Homo sapiens
ttccagtaagtgatt

SEQ ID NO: 800751 - DNA, 15 bp, Homo sapiens
tccagtaagtgattc

SEQ ID NO: 800752 - DNA, 15 bp, Homo sapiens
ccagtaagtgattca

SEQ ID NO: 800753 - DNA, 15 bp, Homo sapiens
cagtaagtgattcaa

SEQ ID NO: 800754 - DNA, 15 bp, Homo sapiens
agtaagtgattcaaa

SEQ ID NO: 800755 - DNA, 15 bp, Homo sapiens
gtaagtgattcaaag

SEQ ID NO: 800756 - DNA, 15 bp, Homo sapiens
taagtgattcaaagt

SEQ ID NO: 800757 - DNA, 15 bp, Homo sapiens
aagtgattcaaagtg

SEQ ID NO: 800758 - DNA, 15 bp, Homo sapiens
agtgattcaaagtgg

SEQ ID NO: 800759 - DNA, 15 bp, Homo sapiens
gtgattcaaagtggc

SEQ ID NO: 800760 - DNA, 15 bp, Homo sapiens
tgattcaaagtggca

SEQ ID NO: 800761 - DNA, 15 bp, Homo sapiens
gattcaaagtggcag

SEQ ID NO: 800762 - DNA, 15 bp, Homo sapiens
attcaaagtggcaga

SEQ ID NO: 800763 - DNA, 15 bp, Homo sapiens
ttcaaagtggcagat

SEQ ID NO: 800764 - DNA, 15 bp, Homo sapiens
tcaaagtggcagatg

SEQ ID NO: 800765 - DNA, 15 bp, Homo sapiens
caaagtggcagatgg

SEQ ID NO: 800766 - DNA, 15 bp, Homo sapiens
aaagtggcagatggt

SEQ ID NO: 800767 - DNA, 15 bp, Homo sapiens
aagtggcagatggta

SEQ ID NO: 800768 - DNA, 15 bp, Homo sapiens
agtggcagatggtag

SEQ ID NO: 800769 - DNA, 15 bp, Homo sapiens
gtggcagatggtaga

SEQ ID NO: 800770 - DNA, 15 bp, Homo sapiens
tggcagatggtagat

SEQ ID NO: 800771 - DNA, 15 bp, Homo sapiens
ggcagatggtagatg

SEQ ID NO: 800772 - DNA, 15 bp, Homo sapiens
gcagatggtagatga

SEQ ID NO: 800773 - DNA, 15 bp, Homo sapiens
cagatggtagatgag

SEQ ID NO: 800774 - DNA, 15 bp, Homo sapiens
agatggtagatgaga

SEQ ID NO: 800775 - DNA, 15 bp, Homo sapiens
gatggtagatgagag

SEQ ID NO: 800776 - DNA, 15 bp, Homo sapiens
atggtagatgagagg

SEQ ID NO: 800777 - DNA, 15 bp, Homo sapiens
tggtagatgagagga

SEQ ID NO: 800778 - DNA, 15 bp, Homo sapiens
ggtagatgagaggag

SEQ ID NO: 800779 - DNA, 15 bp, Homo sapiens
gtagatgagaggagg

SEQ ID NO: 800780 - DNA, 15 bp, Homo sapiens
tagatgagaggaggt

SEQ ID NO: 800781 - DNA, 15 bp, Homo sapiens
agatgagaggaggta

SEQ ID NO: 800782 - DNA, 15 bp, Homo sapiens
gatgagaggaggtaa

SEQ ID NO: 800783 - DNA, 15 bp, Homo sapiens
atgagaggaggtaag

SEQ ID NO: 800784 - DNA, 15 bp, Homo sapiens
tgagaggaggtaagg

SEQ ID NO: 800785 - DNA, 15 bp, Homo sapiens
gagaggaggtaaggc

SEQ ID NO: 800786 - DNA, 15 bp, Homo sapiens
agaggaggtaaggca

SEQ ID NO: 800787 - DNA, 15 bp, Homo sapiens
gaggaggtaaggcaa

SEQ ID NO: 800788 - DNA, 15 bp, Homo sapiens
aggaggtaaggcaag

SEQ ID NO: 800789 - DNA, 15 bp, Homo sapiens
ggaggtaaggcaagg

SEQ ID NO: 800790 - DNA, 15 bp, Homo sapiens
gaggtaaggcaagga

SEQ ID NO: 800791 - DNA, 15 bp, Homo sapiens
aggtaaggcaaggaa

SEQ ID NO: 800792 - DNA, 15 bp, Homo sapiens
ggtaaggcaaggaat

SEQ ID NO: 800793 - DNA, 15 bp, Homo sapiens
gtaaggcaaggaatc

SEQ ID NO: 800794 - DNA, 15 bp, Homo sapiens
taaggcaaggaatcc

SEQ ID NO: 800795 - DNA, 15 bp, Homo sapiens
aaggcaaggaatcct

SEQ ID NO: 800796 - DNA, 15 bp, Homo sapiens
aggcaaggaatcctg

SEQ ID NO: 800797 - DNA, 15 bp, Homo sapiens
ggcaaggaatcctgg

SEQ ID NO: 800798 - DNA, 15 bp, Homo sapiens
gcaaggaatcctggt

SEQ ID NO: 800799 - DNA, 15 bp, Homo sapiens
caaggaatcctggtg

SEQ ID NO: 800800 - DNA, 15 bp, Homo sapiens
aaggaatcctggtga

SEQ ID NO: 800801 - DNA, 15 bp, Homo sapiens
aggaatcctggtgat

SEQ ID NO: 800802 - DNA, 15 bp, Homo sapiens
ggaatcctggtgatg

SEQ ID NO: 800803 - DNA, 15 bp, Homo sapiens
gaatcctggtgatgt

SEQ ID NO: 800804 - DNA, 15 bp, Homo sapiens
aatcctggtgatgtc

SEQ ID NO: 800805 - DNA, 15 bp, Homo sapiens
atcctggtgatgtct

SEQ ID NO: 800806 - DNA, 15 bp, Homo sapiens
tcctggtgatgtcta

SEQ ID NO: 800807 - DNA, 15 bp, Homo sapiens
cctggtgatgtctac

SEQ ID NO: 800808 - DNA, 15 bp, Homo sapiens
ctggtgatgtctacc

SEQ ID NO: 800809 - DNA, 15 bp, Homo sapiens
tggtgatgtctacct

SEQ ID NO: 800810 - DNA, 15 bp, Homo sapiens
ggtgatgtctacctc

SEQ ID NO: 800811 - DNA, 15 bp, Homo sapiens
gtgatgtctacctca

SEQ ID NO: 800812 - DNA, 15 bp, Homo sapiens
tgatgtctacctcat

SEQ ID NO: 800813 - DNA, 15 bp, Homo sapiens
gatgtctacctcatt

SEQ ID NO: 800814 - DNA, 15 bp, Homo sapiens
atgtctacctcattc

SEQ ID NO: 800815 - DNA, 15 bp, Homo sapiens
tgtctacctcattct

SEQ ID NO: 800816 - DNA, 15 bp, Homo sapiens
gtctacctcattctc

SEQ ID NO: 800817 - DNA, 15 bp, Homo sapiens
tctacctcattctcc

SEQ ID NO: 800818 - DNA, 15 bp, Homo sapiens
ctacctcattctcca

SEQ ID NO: 800819 - DNA, 15 bp, Homo sapiens
tacctcattctccat

SEQ ID NO: 800820 - DNA, 15 bp, Homo sapiens
acctcattctccatc

SEQ ID NO: 800821 - DNA, 15 bp, Homo sapiens
cctcattctccatca

SEQ ID NO: 800822 - DNA, 15 bp, Homo sapiens
ctcattctccatcac

SEQ ID NO: 800823 - DNA, 15 bp, Homo sapiens
tcattctccatcacc

SEQ ID NO: 800824 - DNA, 15 bp, Homo sapiens
cattctccatcaccg

SEQ ID NO: 800825 - DNA, 15 bp, Homo sapiens
attctccatcaccgc

SEQ ID NO: 800826 - DNA, 15 bp, Homo sapiens
ttctccatcaccgca

SEQ ID NO: 800827 - DNA, 15 bp, Homo sapiens
tctccatcaccgcat

SEQ ID NO: 800828 - DNA, 15 bp, Homo sapiens
ctccatcaccgcatg

SEQ ID NO: 800829 - DNA, 15 bp, Homo sapiens
tccatcaccgcatga

SEQ ID NO: 800830 - DNA, 15 bp, Homo sapiens
ccatcaccgcatgat

SEQ ID NO: 800831 - DNA, 15 bp, Homo sapiens
catcaccgcatgatc

SEQ ID NO: 800832 - DNA, 15 bp, Homo sapiens
atcaccgcatgatct

SEQ ID NO: 800833 - DNA, 15 bp, Homo sapiens
tcaccgcatgatctg

SEQ ID NO: 800834 - DNA, 15 bp, Homo sapiens
caccgcatgatctga

SEQ ID NO: 800835 - DNA, 15 bp, Homo sapiens
accgcatgatctgag

SEQ ID NO: 800836 - DNA, 15 bp, Homo sapiens
ccgcatgatctgagt

SEQ ID NO: 800837 - DNA, 15 bp, Homo sapiens
cgcatgatctgagtg

SEQ ID NO: 800838 - DNA, 15 bp, Homo sapiens
gcatgatctgagtga

SEQ ID NO: 800839 - DNA, 15 bp, Homo sapiens
catgatctgagtgag

SEQ ID NO: 800840 - DNA, 15 bp, Homo sapiens
atgatctgagtgagc

SEQ ID NO: 800841 - DNA, 15 bp, Homo sapiens
tgatctgagtgagcc

SEQ ID NO: 800842 - DNA, 15 bp, Homo sapiens
gatctgagtgagcca

SEQ ID NO: 800843 - DNA, 15 bp, Homo sapiens
atctgagtgagccat

SEQ ID NO: 800844 - DNA, 15 bp, Homo sapiens
tctgagtgagccatg

SEQ ID NO: 800845 - DNA, 15 bp, Homo sapiens
ctgagtgagccatgg

SEQ ID NO: 800846 - DNA, 15 bp, Homo sapiens
tgagtgagccatggc

SEQ ID NO: 800847 - DNA, 15 bp, Homo sapiens
gagtgagccatggct

SEQ ID NO: 800848 - DNA, 15 bp, Homo sapiens
agtgagccatggcta

SEQ ID NO: 800849 - DNA, 15 bp, Homo sapiens
gtgagccatggctac

SEQ ID NO: 800850 - DNA, 15 bp, Homo sapiens
tgagccatggctact

SEQ ID NO: 800851 - DNA, 15 bp, Homo sapiens
gagccatggctactt

SEQ ID NO: 800852 - DNA, 15 bp, Homo sapiens
agccatggctacttg

SEQ ID NO: 800853 - DNA, 15 bp, Homo sapiens
gccatggctacttgc

SEQ ID NO: 800854 - DNA, 15 bp, Homo sapiens
ccatggctacttgca

SEQ ID NO: 800855 - DNA, 15 bp, Homo sapiens
catggctacttgcag

SEQ ID NO: 800856 - DNA, 15 bp, Homo sapiens
atggctacttgcagt

SEQ ID NO: 800857 - DNA, 15 bp, Homo sapiens
tggctacttgcagtg

SEQ ID NO: 800858 - DNA, 15 bp, Homo sapiens
ggctacttgcagtgt

SEQ ID NO: 800859 - DNA, 15 bp, Homo sapiens
gctacttgcagtgtt

SEQ ID NO: 800860 - DNA, 15 bp, Homo sapiens
ctacttgcagtgttt

SEQ ID NO: 800861 - DNA, 15 bp, Homo sapiens
tacttgcagtgtttt

SEQ ID NO: 800862 - DNA, 15 bp, Homo sapiens
acttgcagtgttttt

SEQ ID NO: 800863 - DNA, 15 bp, Homo sapiens
cttgcagtgtttttt

SEQ ID NO: 800864 - DNA, 15 bp, Homo sapiens
ttgcagtgttttttt

SEQ ID NO: 800865 - DNA, 15 bp, Homo sapiens
tgcagtgtttttttt

SEQ ID NO: 800866 - DNA, 15 bp, Homo sapiens
gcagtgttttttttg

SEQ ID NO: 800867 - DNA, 15 bp, Homo sapiens
cagtgttttttttgt

SEQ ID NO: 800868 - DNA, 15 bp, Homo sapiens
agtgttttttttgtc

SEQ ID NO: 800869 - DNA, 15 bp, Homo sapiens
gtgttttttttgtcc

SEQ ID NO: 800870 - DNA, 15 bp, Homo sapiens
tgttttttttgtcct

SEQ ID NO: 800871 - DNA, 15 bp, Homo sapiens
gttttttttgtcctg

SEQ ID NO: 800872 - DNA, 15 bp, Homo sapiens
ttttttttgtcctgt

SEQ ID NO: 800873 - DNA, 15 bp, Homo sapiens
tttttttgtcctgtg

SEQ ID NO: 800874 - DNA, 15 bp, Homo sapiens
ttttttgtcctgtgc

SEQ ID NO: 800875 - DNA, 15 bp, Homo sapiens
tttttgtcctgtgcc

SEQ ID NO: 800876 - DNA, 15 bp, Homo sapiens
ttttgtcctgtgcct

SEQ ID NO: 800877 - DNA, 15 bp, Homo sapiens
tttgtcctgtgcctg

SEQ ID NO: 800878 - DNA, 15 bp, Homo sapiens
ttgtcctgtgcctgc

SEQ ID NO: 800879 - DNA, 15 bp, Homo sapiens
tgtcctgtgcctgct

SEQ ID NO: 800880 - DNA, 15 bp, Homo sapiens
gtcctgtgcctgctt

SEQ ID NO: 800881 - DNA, 15 bp, Homo sapiens
tcctgtgcctgcttt

SEQ ID NO: 800882 - DNA, 15 bp, Homo sapiens
cctgtgcctgctttg

SEQ ID NO: 800883 - DNA, 15 bp, Homo sapiens
ctgtgcctgctttgt

SEQ ID NO: 800884 - DNA, 15 bp, Homo sapiens
tgtgcctgctttgtg

SEQ ID NO: 800885 - DNA, 15 bp, Homo sapiens
gtgcctgctttgtgt

SEQ ID NO: 800886 - DNA, 15 bp, Homo sapiens
tgcctgctttgtgtc

SEQ ID NO: 800887 - DNA, 15 bp, Homo sapiens
gcctgctttgtgtct

SEQ ID NO: 800888 - DNA, 15 bp, Homo sapiens
cctgctttgtgtctt

SEQ ID NO: 800889 - DNA, 15 bp, Homo sapiens
ctgctttgtgtctta

SEQ ID NO: 800890 - DNA, 15 bp, Homo sapiens
tgctttgtgtcttac

SEQ ID NO: 800891 - DNA, 15 bp, Homo sapiens
gctttgtgtcttact

SEQ ID NO: 800892 - DNA, 15 bp, Homo sapiens
ctttgtgtcttactg

SEQ ID NO: 800893 - DNA, 15 bp, Homo sapiens
tttgtgtcttactga

SEQ ID NO: 800894 - DNA, 15 bp, Homo sapiens
ttgtgtcttactgat

SEQ ID NO: 800895 - DNA, 15 bp, Homo sapiens
tgtgtcttactgatt

SEQ ID NO: 800896 - DNA, 15 bp, Homo sapiens
gtgtcttactgattc

SEQ ID NO: 800897 - DNA, 15 bp, Homo sapiens
tgtcttactgattcc

SEQ ID NO: 800898 - DNA, 15 bp, Homo sapiens
gtcttactgattcca

SEQ ID NO: 800899 - DNA, 15 bp, Homo sapiens
tcttactgattccag

SEQ ID NO: 800900 - DNA, 15 bp, Homo sapiens
cttactgattccagg

SEQ ID NO: 800901 - DNA, 15 bp, Homo sapiens
ttactgattccaggg

SEQ ID NO: 800902 - DNA, 15 bp, Homo sapiens
tactgattccaggga

SEQ ID NO: 800903 - DNA, 15 bp, Homo sapiens
actgattccagggag

SEQ ID NO: 800904 - DNA, 15 bp, Homo sapiens
ctgattccagggagt

SEQ ID NO: 800905 - DNA, 15 bp, Homo sapiens
tgattccagggagta

SEQ ID NO: 800906 - DNA, 15 bp, Homo sapiens
gattccagggagtaa

SEQ ID NO: 800907 - DNA, 15 bp, Homo sapiens
attccagggagtaag

SEQ ID NO: 800908 - DNA, 15 bp, Homo sapiens
ttccagggagtaagc

SEQ ID NO: 800909 - DNA, 15 bp, Homo sapiens
tccagggagtaagca

SEQ ID NO: 800910 - DNA, 15 bp, Homo sapiens
ccagggagtaagcaa

SEQ ID NO: 800911 - DNA, 15 bp, Homo sapiens
cagggagtaagcaac

SEQ ID NO: 800912 - DNA, 15 bp, Homo sapiens
agggagtaagcaaca

SEQ ID NO: 800913 - DNA, 15 bp, Homo sapiens
gggagtaagcaacat

SEQ ID NO: 800914 - DNA, 15 bp, Homo sapiens
ggagtaagcaacatt

SEQ ID NO: 800915 - DNA, 15 bp, Homo sapiens
gagtaagcaacattg

SEQ ID NO: 800916 - DNA, 15 bp, Homo sapiens
agtaagcaacattga

SEQ ID NO: 800917 - DNA, 15 bp, Homo sapiens
gtaagcaacattgaa

SEQ ID NO: 800918 - DNA, 15 bp, Homo sapiens
taagcaacattgaaa

SEQ ID NO: 800919 - DNA, 15 bp, Homo sapiens
aagcaacattgaaac

SEQ ID NO: 800920 - DNA, 15 bp, Homo sapiens
agcaacattgaaact

SEQ ID NO: 800921 - DNA, 15 bp, Homo sapiens
gcaacattgaaactc

SEQ ID NO: 800922 - DNA, 15 bp, Homo sapiens
caacattgaaactca

SEQ ID NO: 800923 - DNA, 15 bp, Homo sapiens
aacattgaaactcag

SEQ ID NO: 800924 - DNA, 15 bp, Homo sapiens
acattgaaactcaga

SEQ ID NO: 800925 - DNA, 15 bp, Homo sapiens
cattgaaactcagac

SEQ ID NO: 800926 - DNA, 15 bp, Homo sapiens
attgaaactcagact

SEQ ID NO: 800927 - DNA, 15 bp, Homo sapiens
ttgaaactcagacta

SEQ ID NO: 800928 - DNA, 15 bp, Homo sapiens
tgaaactcagactat

SEQ ID NO: 800929 - DNA, 15 bp, Homo sapiens
gaaactcagactatg

SEQ ID NO: 800930 - DNA, 15 bp, Homo sapiens
aaactcagactatgt

SEQ ID NO: 800931 - DNA, 15 bp, Homo sapiens
aactcagactatgtg

SEQ ID NO: 800932 - DNA, 15 bp, Homo sapiens
actcagactatgtgg

SEQ ID NO: 800933 - DNA, 15 bp, Homo sapiens
ctcagactatgtggt

SEQ ID NO: 800934 - DNA, 15 bp, Homo sapiens
tcagactatgtggtg

SEQ ID NO: 800935 - DNA, 15 bp, Homo sapiens
cagactatgtggtgt

SEQ ID NO: 800936 - DNA, 15 bp, Homo sapiens
agactatgtggtgtc

SEQ ID NO: 800937 - DNA, 15 bp, Homo sapiens
gactatgtggtgtct

SEQ ID NO: 800938 - DNA, 15 bp, Homo sapiens
actatgtggtgtctc

SEQ ID NO: 800939 - DNA, 15 bp, Homo sapiens
ctatgtggtgtctct

SEQ ID NO: 800940 - DNA, 15 bp, Homo sapiens
tatgtggtgtctctc

SEQ ID NO: 800941 - DNA, 15 bp, Homo sapiens
atgtggtgtctctcc

SEQ ID NO: 800942 - DNA, 15 bp, Homo sapiens
tgtggtgtctctccc

SEQ ID NO: 800943 - DNA, 15 bp, Homo sapiens
gtggtgtctctccca

SEQ ID NO: 800944 - DNA, 15 bp, Homo sapiens
tggtgtctctcccaa

SEQ ID NO: 800945 - DNA, 15 bp, Homo sapiens
ggtgtctctcccaaa

SEQ ID NO: 800946 - DNA, 15 bp, Homo sapiens
gtgtctctcccaaat

SEQ ID NO: 800947 - DNA, 15 bp, Homo sapiens
tgtctctcccaaata

SEQ ID NO: 800948 - DNA, 15 bp, Homo sapiens
gtctctcccaaatag

SEQ ID NO: 800949 - DNA, 15 bp, Homo sapiens
tctctcccaaatagc

SEQ ID NO: 800950 - DNA, 15 bp, Homo sapiens
ctctcccaaatagca

SEQ ID NO: 800951 - DNA, 15 bp, Homo sapiens
tctcccaaatagcac

SEQ ID NO: 800952 - DNA, 15 bp, Homo sapiens
ctcccaaatagcact

SEQ ID NO: 800953 - DNA, 15 bp, Homo sapiens
tcccaaatagcacta

SEQ ID NO: 800954 - DNA, 15 bp, Homo sapiens
cccaaatagcactag

SEQ ID NO: 800955 - DNA, 15 bp, Homo sapiens
ccaaatagcactagc

SEQ ID NO: 800956 - DNA, 15 bp, Homo sapiens
caaatagcactagct

SEQ ID NO: 800957 - DNA, 15 bp, Homo sapiens
aaatagcactagctt

SEQ ID NO: 800958 - DNA, 15 bp, Homo sapiens
aatagcactagcttt

SEQ ID NO: 800959 - DNA, 15 bp, Homo sapiens
atagcactagcttta

SEQ ID NO: 800960 - DNA, 15 bp, Homo sapiens
tagcactagctttat

SEQ ID NO: 800961 - DNA, 15 bp, Homo sapiens
agcactagctttatt

SEQ ID NO: 800962 - DNA, 15 bp, Homo sapiens
gcactagctttattc

SEQ ID NO: 800963 - DNA, 15 bp, Homo sapiens
cactagctttattct

SEQ ID NO: 800964 - DNA, 15 bp, Homo sapiens
actagctttattctc

SEQ ID NO: 800965 - DNA, 15 bp, Homo sapiens
ctagctttattctca

SEQ ID NO: 800966 - DNA, 15 bp, Homo sapiens
tagctttattctcag

SEQ ID NO: 800967 - DNA, 15 bp, Homo sapiens
agctttattctcaga

SEQ ID NO: 800968 - DNA, 15 bp, Homo sapiens
gctttattctcagaa

SEQ ID NO: 800969 - DNA, 15 bp, Homo sapiens
ctttattctcagaac

SEQ ID NO: 800970 - DNA, 15 bp, Homo sapiens
tttattctcagaact

SEQ ID NO: 800971 - DNA, 15 bp, Homo sapiens
ttattctcagaactc

SEQ ID NO: 800972 - DNA, 15 bp, Homo sapiens
tattctcagaactcc

SEQ ID NO: 800973 - DNA, 15 bp, Homo sapiens
attctcagaactcct

SEQ ID NO: 800974 - DNA, 15 bp, Homo sapiens
ttctcagaactcctt

SEQ ID NO: 800975 - DNA, 15 bp, Homo sapiens
tctcagaactcctta

SEQ ID NO: 800976 - DNA, 15 bp, Homo sapiens
ctcagaactccttat

SEQ ID NO: 800977 - DNA, 15 bp, Homo sapiens
tcagaactccttatt

SEQ ID NO: 800978 - DNA, 15 bp, Homo sapiens
cagaactccttattg

SEQ ID NO: 800979 - DNA, 15 bp, Homo sapiens
agaactccttattga

SEQ ID NO: 800980 - DNA, 15 bp, Homo sapiens
gaactccttattgat

SEQ ID NO: 800981 - DNA, 15 bp, Homo sapiens
aactccttattgatg

SEQ ID NO: 800982 - DNA, 15 bp, Homo sapiens
actccttattgatgt

SEQ ID NO: 800983 - DNA, 15 bp, Homo sapiens
ctccttattgatgtt

SEQ ID NO: 800984 - DNA, 15 bp, Homo sapiens
tccttattgatgttt

SEQ ID NO: 800985 - DNA, 15 bp, Homo sapiens
ccttattgatgtttt

SEQ ID NO: 800986 - DNA, 15 bp, Homo sapiens
cttattgatgtttta

SEQ ID NO: 800987 - DNA, 15 bp, Homo sapiens
ttattgatgttttaa

SEQ ID NO: 800988 - DNA, 15 bp, Homo sapiens
tattgatgttttaaa

SEQ ID NO: 800989 - DNA, 15 bp, Homo sapiens
attgatgttttaaaa

SEQ ID NO: 800990 - DNA, 15 bp, Homo sapiens
ttgatgttttaaaaa

SEQ ID NO: 800991 - DNA, 15 bp, Homo sapiens
tgatgttttaaaaac

SEQ ID NO: 800992 - DNA, 15 bp, Homo sapiens
gatgttttaaaaaca

SEQ ID NO: 800993 - DNA, 15 bp, Homo sapiens
atgttttaaaaacat

SEQ ID NO: 800994 - DNA, 15 bp, Homo sapiens
tgttttaaaaacatc

SEQ ID NO: 800995 - DNA, 15 bp, Homo sapiens
gttttaaaaacatct

SEQ ID NO: 800996 - DNA, 15 bp, Homo sapiens
ttttaaaaacatctt

SEQ ID NO: 800997 - DNA, 15 bp, Homo sapiens
tttaaaaacatcttt

SEQ ID NO: 800998 - DNA, 15 bp, Homo sapiens
ttaaaaacatctttt

SEQ ID NO: 800999 - DNA, 15 bp, Homo sapiens
taaaaacatcttttc

SEQ ID NO: 801000 - DNA, 15 bp, Homo sapiens
aaaaacatcttttct

SEQ ID NO: 801001 - DNA, 15 bp, Homo sapiens
aaaacatcttttctg

SEQ ID NO: 801002 - DNA, 15 bp, Homo sapiens
aaacatcttttctgg

SEQ ID NO: 801003 - DNA, 15 bp, Homo sapiens
aacatcttttctggt

SEQ ID NO: 801004 - DNA, 15 bp, Homo sapiens
acatcttttctggtc

SEQ ID NO: 801005 - DNA, 15 bp, Homo sapiens
catcttttctggtct

SEQ ID NO: 801006 - DNA, 15 bp, Homo sapiens
atcttttctggtctt

SEQ ID NO: 801007 - DNA, 15 bp, Homo sapiens
tcttttctggtctta

SEQ ID NO: 801008 - DNA, 15 bp, Homo sapiens
cttttctggtcttag

SEQ ID NO: 801009 - DNA, 15 bp, Homo sapiens
ttttctggtcttagg

SEQ ID NO: 801010 - DNA, 15 bp, Homo sapiens
tttctggtcttaggc

SEQ ID NO: 801011 - DNA, 15 bp, Homo sapiens
ttctggtcttaggcc

SEQ ID NO: 801012 - DNA, 15 bp, Homo sapiens
tctggtcttaggcca

SEQ ID NO: 801013 - DNA, 15 bp, Homo sapiens
ctggtcttaggccat

SEQ ID NO: 801014 - DNA, 15 bp, Homo sapiens
tggtcttaggccatt

SEQ ID NO: 801015 - DNA, 15 bp, Homo sapiens
ggtcttaggccattt

SEQ ID NO: 801016 - DNA, 15 bp, Homo sapiens
gtcttaggccatttt

SEQ ID NO: 801017 - DNA, 15 bp, Homo sapiens
tcttaggccatttta

SEQ ID NO: 801018 - DNA, 15 bp, Homo sapiens
cttaggccattttat

SEQ ID NO: 801019 - DNA, 15 bp, Homo sapiens
ttaggccattttatc

SEQ ID NO: 801020 - DNA, 15 bp, Homo sapiens
taggccattttatca

SEQ ID NO: 801021 - DNA, 15 bp, Homo sapiens
aggccattttatcag

SEQ ID NO: 801022 - DNA, 15 bp, Homo sapiens
ggccattttatcaga

SEQ ID NO: 801023 - DNA, 15 bp, Homo sapiens
gccattttatcagag

SEQ ID NO: 801024 - DNA, 15 bp, Homo sapiens
ccattttatcagagc

SEQ ID NO: 801025 - DNA, 15 bp, Homo sapiens
cattttatcagagcc

SEQ ID NO: 801026 - DNA, 15 bp, Homo sapiens
attttatcagagcca

SEQ ID NO: 801027 - DNA, 15 bp, Homo sapiens
ttttatcagagccag

SEQ ID NO: 801028 - DNA, 15 bp, Homo sapiens
tttatcagagccagt

SEQ ID NO: 801029 - DNA, 15 bp, Homo sapiens
ttatcagagccagtt

SEQ ID NO: 801030 - DNA, 15 bp, Homo sapiens
tatcagagccagttg

SEQ ID NO: 801031 - DNA, 15 bp, Homo sapiens
atcagagccagttgc

SEQ ID NO: 801032 - DNA, 15 bp, Homo sapiens
tcagagccagttgca

SEQ ID NO: 801033 - DNA, 15 bp, Homo sapiens
cagagccagttgcac

SEQ ID NO: 801034 - DNA, 15 bp, Homo sapiens
agagccagttgcacc

SEQ ID NO: 801035 - DNA, 15 bp, Homo sapiens
gagccagttgcacca

SEQ ID NO: 801036 - DNA, 15 bp, Homo sapiens
agccagttgcaccaa

SEQ ID NO: 801037 - DNA, 15 bp, Homo sapiens
gccagttgcaccaaa

SEQ ID NO: 801038 - DNA, 15 bp, Homo sapiens
ccagttgcaccaaag

SEQ ID NO: 801039 - DNA, 15 bp, Homo sapiens
cagttgcaccaaagc

SEQ ID NO: 801040 - DNA, 15 bp, Homo sapiens
agttgcaccaaagca

SEQ ID NO: 801041 - DNA, 15 bp, Homo sapiens
gttgcaccaaagcat

SEQ ID NO: 801042 - DNA, 15 bp, Homo sapiens
ttgcaccaaagcatt

SEQ ID NO: 801043 - DNA, 15 bp, Homo sapiens
tgcaccaaagcattg

SEQ ID NO: 801044 - DNA, 15 bp, Homo sapiens
gcaccaaagcattgt

SEQ ID NO: 801045 - DNA, 15 bp, Homo sapiens
caccaaagcattgta

SEQ ID NO: 801046 - DNA, 15 bp, Homo sapiens
accaaagcattgtag

SEQ ID NO: 801047 - DNA, 15 bp, Homo sapiens
ccaaagcattgtagg

SEQ ID NO: 801048 - DNA, 15 bp, Homo sapiens
caaagcattgtaggc

SEQ ID NO: 801049 - DNA, 15 bp, Homo sapiens
aaagcattgtaggca

SEQ ID NO: 801050 - DNA, 15 bp, Homo sapiens
aagcattgtaggcat

SEQ ID NO: 801051 - DNA, 15 bp, Homo sapiens
agcattgtaggcatg

SEQ ID NO: 801052 - DNA, 15 bp, Homo sapiens
gcattgtaggcatga

SEQ ID NO: 801053 - DNA, 15 bp, Homo sapiens
cattgtaggcatgaa

SEQ ID NO: 801054 - DNA, 15 bp, Homo sapiens
attgtaggcatgaaa

SEQ ID NO: 801055 - DNA, 15 bp, Homo sapiens
ttgtaggcatgaaaa

SEQ ID NO: 801056 - DNA, 15 bp, Homo sapiens
tgtaggcatgaaaaa

SEQ ID NO: 801057 - DNA, 15 bp, Homo sapiens
gtaggcatgaaaaaa

SEQ ID NO: 801058 - DNA, 15 bp, Homo sapiens
taggcatgaaaaaaa

SEQ ID NO: 801059 - DNA, 15 bp, Homo sapiens
aggcatgaaaaaaat

SEQ ID NO: 801060 - DNA, 15 bp, Homo sapiens
ggcatgaaaaaaatt

SEQ ID NO: 801061 - DNA, 15 bp, Homo sapiens
gcatgaaaaaaattt

SEQ ID NO: 801062 - DNA, 15 bp, Homo sapiens
catgaaaaaaatttg

SEQ ID NO: 801063 - DNA, 15 bp, Homo sapiens
atgaaaaaaatttgc

SEQ ID NO: 801064 - DNA, 15 bp, Homo sapiens
tgaaaaaaatttgct

SEQ ID NO: 801065 - DNA, 15 bp, Homo sapiens
gaaaaaaatttgcta

SEQ ID NO: 801066 - DNA, 15 bp, Homo sapiens
aaaaaaatttgctat

SEQ ID NO: 801067 - DNA, 15 bp, Homo sapiens
aaaaaatttgctatc

SEQ ID NO: 801068 - DNA, 15 bp, Homo sapiens
aaaaatttgctatct

SEQ ID NO: 801069 - DNA, 15 bp, Homo sapiens
aaaatttgctatctc

SEQ ID NO: 801070 - DNA, 15 bp, Homo sapiens
aaatttgctatctcc

SEQ ID NO: 801071 - DNA, 15 bp, Homo sapiens
aatttgctatctcca

SEQ ID NO: 801072 - DNA, 15 bp, Homo sapiens
atttgctatctccag

SEQ ID NO: 801073 - DNA, 15 bp, Homo sapiens
tttgctatctccagt

SEQ ID NO: 801074 - DNA, 15 bp, Homo sapiens
ttgctatctccagtt

SEQ ID NO: 801075 - DNA, 15 bp, Homo sapiens
tgctatctccagtta

SEQ ID NO: 801076 - DNA, 15 bp, Homo sapiens
gctatctccagttat

SEQ ID NO: 801077 - DNA, 15 bp, Homo sapiens
ctatctccagttatc

SEQ ID NO: 801078 - DNA, 15 bp, Homo sapiens
tatctccagttatct

SEQ ID NO: 801079 - DNA, 15 bp, Homo sapiens
atctccagttatctt

SEQ ID NO: 801080 - DNA, 15 bp, Homo sapiens
tctccagttatcttt

SEQ ID NO: 801081 - DNA, 15 bp, Homo sapiens
ctccagttatctttt

SEQ ID NO: 801082 - DNA, 15 bp, Homo sapiens
tccagttatcttttg

SEQ ID NO: 801083 - DNA, 15 bp, Homo sapiens
ccagttatcttttgt

SEQ ID NO: 801084 - DNA, 15 bp, Homo sapiens
cagttatcttttgtt

SEQ ID NO: 801085 - DNA, 15 bp, Homo sapiens
agttatcttttgttt

SEQ ID NO: 801086 - DNA, 15 bp, Homo sapiens
gttatcttttgtttg

SEQ ID NO: 801087 - DNA, 15 bp, Homo sapiens
ttatcttttgtttgt

SEQ ID NO: 801088 - DNA, 15 bp, Homo sapiens
tatcttttgtttgta

SEQ ID NO: 801089 - DNA, 15 bp, Homo sapiens
atcttttgtttgtat

SEQ ID NO: 801090 - DNA, 15 bp, Homo sapiens
tcttttgtttgtatg

SEQ ID NO: 801091 - DNA, 15 bp, Homo sapiens
cttttgtttgtatgt

SEQ ID NO: 801092 - DNA, 15 bp, Homo sapiens
ttttgtttgtatgtt

SEQ ID NO: 801093 - DNA, 15 bp, Homo sapiens
tttgtttgtatgttt

SEQ ID NO: 801094 - DNA, 15 bp, Homo sapiens
ttgtttgtatgtttg

SEQ ID NO: 801095 - DNA, 15 bp, Homo sapiens
tgtttgtatgtttgt

SEQ ID NO: 801096 - DNA, 15 bp, Homo sapiens
gtttgtatgtttgtg

SEQ ID NO: 801097 - DNA, 15 bp, Homo sapiens
tttgtatgtttgtgt

SEQ ID NO: 801098 - DNA, 15 bp, Homo sapiens
ttgtatgtttgtgtg

SEQ ID NO: 801099 - DNA, 15 bp, Homo sapiens
tgtatgtttgtgtgt

SEQ ID NO: 801100 - DNA, 15 bp, Homo sapiens
gtatgtttgtgtgtg

SEQ ID NO: 801101 - DNA, 15 bp, Homo sapiens
tatgtttgtgtgtgt

SEQ ID NO: 801102 - DNA, 15 bp, Homo sapiens
atgtttgtgtgtgtg

SEQ ID NO: 801103 - DNA, 15 bp, Homo sapiens
tgtttgtgtgtgtgt

SEQ ID NO: 801104 - DNA, 15 bp, Homo sapiens
tgtgtgtgtgtggtt

SEQ ID NO: 801105 - DNA, 15 bp, Homo sapiens
gtgtgtgtgtggttg

SEQ ID NO: 801106 - DNA, 15 bp, Homo sapiens
tgtgtgtgtggttgt

SEQ ID NO: 801107 - DNA, 15 bp, Homo sapiens
gtgtgtgtggttgtg

SEQ ID NO: 801108 - DNA, 15 bp, Homo sapiens
tgtgtgtggttgtgt

SEQ ID NO: 801109 - DNA, 15 bp, Homo sapiens
gtgtgtggttgtgtc

SEQ ID NO: 801110 - DNA, 15 bp, Homo sapiens
tgtgtggttgtgtct

SEQ ID NO: 801111 - DNA, 15 bp, Homo sapiens
gtgtggttgtgtctg

SEQ ID NO: 801112 - DNA, 15 bp, Homo sapiens
tgtggttgtgtctgt

SEQ ID NO: 801113 - DNA, 15 bp, Homo sapiens
gtggttgtgtctgtt

SEQ ID NO: 801114 - DNA, 15 bp, Homo sapiens
tggttgtgtctgttt

SEQ ID NO: 801115 - DNA, 15 bp, Homo sapiens
ggttgtgtctgtttt

SEQ ID NO: 801116 - DNA, 15 bp, Homo sapiens
gttgtgtctgttttt

SEQ ID NO: 801117 - DNA, 15 bp, Homo sapiens
ttgtgtctgtttttg

SEQ ID NO: 801118 - DNA, 15 bp, Homo sapiens
tgtgtctgtttttga

SEQ ID NO: 801119 - DNA, 15 bp, Homo sapiens
gtgtctgtttttgat

SEQ ID NO: 801120 - DNA, 15 bp, Homo sapiens
tgtctgtttttgatg

SEQ ID NO: 801121 - DNA, 15 bp, Homo sapiens
gtctgtttttgatgc

SEQ ID NO: 801122 - DNA, 15 bp, Homo sapiens
tctgtttttgatgca

SEQ ID NO: 801123 - DNA, 15 bp, Homo sapiens
ctgtttttgatgcaa

SEQ ID NO: 801124 - DNA, 15 bp, Homo sapiens
tgtttttgatgcaag

SEQ ID NO: 801125 - DNA, 15 bp, Homo sapiens
gtttttgatgcaagt

SEQ ID NO: 801126 - DNA, 15 bp, Homo sapiens
tttttgatgcaagtc

SEQ ID NO: 801127 - DNA, 15 bp, Homo sapiens
ttttgatgcaagtct

SEQ ID NO: 801128 - DNA, 15 bp, Homo sapiens
tttgatgcaagtcta

SEQ ID NO: 801129 - DNA, 15 bp, Homo sapiens
ttgatgcaagtctag

SEQ ID NO: 801130 - DNA, 15 bp, Homo sapiens
tgatgcaagtctaga

SEQ ID NO: 801131 - DNA, 15 bp, Homo sapiens
gatgcaagtctagaa

SEQ ID NO: 801132 - DNA, 15 bp, Homo sapiens
atgcaagtctagaaa

SEQ ID NO: 801133 - DNA, 15 bp, Homo sapiens
tgcaagtctagaaaa

SEQ ID NO: 801134 - DNA, 15 bp, Homo sapiens
gcaagtctagaaaat

SEQ ID NO: 801135 - DNA, 15 bp, Homo sapiens
caagtctagaaaata

SEQ ID NO: 801136 - DNA, 15 bp, Homo sapiens
aagtctagaaaatag

SEQ ID NO: 801137 - DNA, 15 bp, Homo sapiens
agtctagaaaataga

SEQ ID NO: 801138 - DNA, 15 bp, Homo sapiens
gtctagaaaatagat

SEQ ID NO: 801139 - DNA, 15 bp, Homo sapiens
tctagaaaatagatt

SEQ ID NO: 801140 - DNA, 15 bp, Homo sapiens
ctagaaaatagattt

SEQ ID NO: 801141 - DNA, 15 bp, Homo sapiens
tagaaaatagatttg

SEQ ID NO: 801142 - DNA, 15 bp, Homo sapiens
agaaaatagatttgt

SEQ ID NO: 801143 - DNA, 15 bp, Homo sapiens
gaaaatagatttgta

SEQ ID NO: 801144 - DNA, 15 bp, Homo sapiens
aaaatagatttgtat

SEQ ID NO: 801145 - DNA, 15 bp, Homo sapiens
aaatagatttgtatt

SEQ ID NO: 801146 - DNA, 15 bp, Homo sapiens
aatagatttgtatta

SEQ ID NO: 801147 - DNA, 15 bp, Homo sapiens
atagatttgtattac

SEQ ID NO: 801148 - DNA, 15 bp, Homo sapiens
tagatttgtattaca

SEQ ID NO: 801149 - DNA, 15 bp, Homo sapiens
agatttgtattacat

SEQ ID NO: 801150 - DNA, 15 bp, Homo sapiens
gatttgtattacata

SEQ ID NO: 801151 - DNA, 15 bp, Homo sapiens
atttgtattacatat

SEQ ID NO: 801152 - DNA, 15 bp, Homo sapiens
tttgtattacatata

SEQ ID NO: 801153 - DNA, 15 bp, Homo sapiens
ttgtattacatatat

SEQ ID NO: 801154 - DNA, 15 bp, Homo sapiens
tgtattacatatata

SEQ ID NO: 801155 - DNA, 15 bp, Homo sapiens
gtattacatatatac

SEQ ID NO: 801156 - DNA, 15 bp, Homo sapiens
tattacatatatact

SEQ ID NO: 801157 - DNA, 15 bp, Homo sapiens
attacatatatactt

SEQ ID NO: 801158 - DNA, 15 bp, Homo sapiens
ttacatatatactta

SEQ ID NO: 801159 - DNA, 15 bp, Homo sapiens
tacatatatacttac

SEQ ID NO: 801160 - DNA, 15 bp, Homo sapiens
acatatatacttaca

SEQ ID NO: 801161 - DNA, 15 bp, Homo sapiens
catatatacttacat

SEQ ID NO: 801162 - DNA, 15 bp, Homo sapiens
atatatacttacata

SEQ ID NO: 801163 - DNA, 15 bp, Homo sapiens
tatatacttacatac

SEQ ID NO: 801164 - DNA, 15 bp, Homo sapiens
atatacttacataca

SEQ ID NO: 801165 - DNA, 15 bp, Homo sapiens
tatacttacatacat

SEQ ID NO: 801166 - DNA, 15 bp, Homo sapiens
atacttacatacata

SEQ ID NO: 801167 - DNA, 15 bp, Homo sapiens
tacttacatacatat

SEQ ID NO: 801168 - DNA, 15 bp, Homo sapiens
acttacatacatata

SEQ ID NO: 801169 - DNA, 15 bp, Homo sapiens
cttacatacatatag

SEQ ID NO: 801170 - DNA, 15 bp, Homo sapiens
ttacatacatataga

SEQ ID NO: 801171 - DNA, 15 bp, Homo sapiens
tacatacatatagag

SEQ ID NO: 801172 - DNA, 15 bp, Homo sapiens
acatacatatagaga

SEQ ID NO: 801173 - DNA, 15 bp, Homo sapiens
catacatatagagag

SEQ ID NO: 801174 - DNA, 15 bp, Homo sapiens
atacatatagagaga

SEQ ID NO: 801175 - DNA, 15 bp, Homo sapiens
tacatatagagagag

SEQ ID NO: 801176 - DNA, 15 bp, Homo sapiens
acatatagagagaga

SEQ ID NO: 801177 - DNA, 15 bp, Homo sapiens
catatagagagagag

SEQ ID NO: 801178 - DNA, 15 bp, Homo sapiens
atatagagagagaga

SEQ ID NO: 801179 - DNA, 15 bp, Homo sapiens
tatagagagagagaa

SEQ ID NO: 801180 - DNA, 15 bp, Homo sapiens
atagagagagagaaa

SEQ ID NO: 801181 - DNA, 15 bp, Homo sapiens
tagagagagagaaaa

SEQ ID NO: 801182 - DNA, 15 bp, Homo sapiens
agagagagagaaaaa

SEQ ID NO: 801183 - DNA, 15 bp, Homo sapiens
gagagagagaaaaat

SEQ ID NO: 801184 - DNA, 15 bp, Homo sapiens
agagagagaaaaata

SEQ ID NO: 801185 - DNA, 15 bp, Homo sapiens
gagagagaaaaataa

SEQ ID NO: 801186 - DNA, 15 bp, Homo sapiens
agagagaaaaataaa

SEQ ID NO: 801187 - DNA, 15 bp, Homo sapiens
gagagaaaaataaaa

SEQ ID NO: 801188 - DNA, 15 bp, Homo sapiens
agagaaaaataaaaa

SEQ ID NO: 801189 - DNA, 15 bp, Homo sapiens
gagaaaaataaaaat

SEQ ID NO: 801190 - DNA, 15 bp, Homo sapiens
agaaaaataaaaatg

SEQ ID NO: 801191 - DNA, 15 bp, Homo sapiens
gaaaaataaaaatgc

SEQ ID NO: 801192 - DNA, 15 bp, Homo sapiens
aaaaataaaaatgct

SEQ ID NO: 801193 - DNA, 15 bp, Homo sapiens
aaaataaaaatgctt

SEQ ID NO: 801194 - DNA, 15 bp, Homo sapiens
aaataaaaatgctta

SEQ ID NO: 801195 - DNA, 15 bp, Homo sapiens
aataaaaatgcttat

SEQ ID NO: 801196 - DNA, 15 bp, Homo sapiens
ataaaaatgcttatt

SEQ ID NO: 801197 - DNA, 15 bp, Homo sapiens
taaaaatgcttatta

SEQ ID NO: 801198 - DNA, 15 bp, Homo sapiens
aaaaatgcttattac

SEQ ID NO: 801199 - DNA, 15 bp, Homo sapiens
aaaatgcttattaca

SEQ ID NO: 801200 - DNA, 15 bp, Homo sapiens
aaatgcttattacaa

SEQ ID NO: 801201 - DNA, 15 bp, Homo sapiens
aatgcttattacaag

SEQ ID NO: 801202 - DNA, 15 bp, Homo sapiens
atgcttattacaagc

SEQ ID NO: 801203 - DNA, 15 bp, Homo sapiens
tgcttattacaagcc

SEQ ID NO: 801204 - DNA, 15 bp, Homo sapiens
gcttattacaagcca

SEQ ID NO: 801205 - DNA, 15 bp, Homo sapiens
cttattacaagccag

SEQ ID NO: 801206 - DNA, 15 bp, Homo sapiens
ttattacaagccagg

SEQ ID NO: 801207 - DNA, 15 bp, Homo sapiens
tattacaagccaggc

SEQ ID NO: 801208 - DNA, 15 bp, Homo sapiens
attacaagccaggca

SEQ ID NO: 801209 - DNA, 15 bp, Homo sapiens
ttacaagccaggcat

SEQ ID NO: 801210 - DNA, 15 bp, Homo sapiens
tacaagccaggcatg

SEQ ID NO: 801211 - DNA, 15 bp, Homo sapiens
acaagccaggcatgg

SEQ ID NO: 801212 - DNA, 15 bp, Homo sapiens
caagccaggcatggt

SEQ ID NO: 801213 - DNA, 15 bp, Homo sapiens
aagccaggcatggtg

SEQ ID NO: 801214 - DNA, 15 bp, Homo sapiens
agccaggcatggtgg

SEQ ID NO: 801215 - DNA, 15 bp, Homo sapiens
ccaggcatggtggca

SEQ ID NO: 801216 - DNA, 15 bp, Homo sapiens
caggcatggtggcat

SEQ ID NO: 801217 - DNA, 15 bp, Homo sapiens
aggcatggtggcata

SEQ ID NO: 801218 - DNA, 15 bp, Homo sapiens
ggcatggtggcatat

SEQ ID NO: 801219 - DNA, 15 bp, Homo sapiens
gcatggtggcatatg

SEQ ID NO: 801220 - DNA, 15 bp, Homo sapiens
catggtggcatatgc

SEQ ID NO: 801221 - DNA, 15 bp, Homo sapiens
atggtggcatatgcc

SEQ ID NO: 801222 - DNA, 15 bp, Homo sapiens
tggtggcatatgcct

SEQ ID NO: 801223 - DNA, 15 bp, Homo sapiens
ggtggcatatgcctt

SEQ ID NO: 801224 - DNA, 15 bp, Homo sapiens
gtggcatatgcctta

SEQ ID NO: 801225 - DNA, 15 bp, Homo sapiens
tggcatatgccttat

SEQ ID NO: 801226 - DNA, 15 bp, Homo sapiens
ggcatatgccttata

SEQ ID NO: 801227 - DNA, 15 bp, Homo sapiens
gcatatgccttatag

SEQ ID NO: 801228 - DNA, 15 bp, Homo sapiens
catatgccttatagt

SEQ ID NO: 801229 - DNA, 15 bp, Homo sapiens
atatgccttatagtc

SEQ ID NO: 801230 - DNA, 15 bp, Homo sapiens
tatgccttatagtcc

SEQ ID NO: 801231 - DNA, 15 bp, Homo sapiens
atgccttatagtccc

SEQ ID NO: 801232 - DNA, 15 bp, Homo sapiens
tgccttatagtccca

SEQ ID NO: 801233 - DNA, 15 bp, Homo sapiens
gccttatagtcccag

SEQ ID NO: 801234 - DNA, 15 bp, Homo sapiens
ccttatagtcccagt

SEQ ID NO: 801235 - DNA, 15 bp, Homo sapiens
cttatagtcccagta

SEQ ID NO: 801236 - DNA, 15 bp, Homo sapiens
ttatagtcccagtaa

SEQ ID NO: 801237 - DNA, 15 bp, Homo sapiens
tatagtcccagtaac

SEQ ID NO: 801238 - DNA, 15 bp, Homo sapiens
atagtcccagtaact

SEQ ID NO: 801239 - DNA, 15 bp, Homo sapiens
tagtcccagtaactt

SEQ ID NO: 801240 - DNA, 15 bp, Homo sapiens
agtcccagtaacttg

SEQ ID NO: 801241 - DNA, 15 bp, Homo sapiens
gtcccagtaacttgg

SEQ ID NO: 801242 - DNA, 15 bp, Homo sapiens
tcccagtaacttggg

SEQ ID NO: 801243 - DNA, 15 bp, Homo sapiens
cccagtaacttggga

SEQ ID NO: 801244 - DNA, 15 bp, Homo sapiens
ccagtaacttgggag

SEQ ID NO: 801245 - DNA, 15 bp, Homo sapiens
cagtaacttgggagg

SEQ ID NO: 801246 - DNA, 15 bp, Homo sapiens
agtaacttgggaggc

SEQ ID NO: 801247 - DNA, 15 bp, Homo sapiens
gtaacttgggaggct

SEQ ID NO: 801248 - DNA, 15 bp, Homo sapiens
taacttgggaggctg

SEQ ID NO: 801249 - DNA, 15 bp, Homo sapiens
aacttgggaggctga

SEQ ID NO: 801250 - DNA, 15 bp, Homo sapiens
ggctgaggcaggagg

SEQ ID NO: 801251 - DNA, 15 bp, Homo sapiens
gctgaggcaggagga

SEQ ID NO: 801252 - DNA, 15 bp, Homo sapiens
ctgaggcaggaggat

SEQ ID NO: 801253 - DNA, 15 bp, Homo sapiens
tgaggcaggaggatc

SEQ ID NO: 801254 - DNA, 15 bp, Homo sapiens
gaggcaggaggatcg

SEQ ID NO: 801255 - DNA, 15 bp, Homo sapiens
aggcaggaggatcgc

SEQ ID NO: 801256 - DNA, 15 bp, Homo sapiens
ggcaggaggatcgct

SEQ ID NO: 801257 - DNA, 15 bp, Homo sapiens
gcaggaggatcgctt

SEQ ID NO: 801258 - DNA, 15 bp, Homo sapiens
caggaggatcgcttg

SEQ ID NO: 801259 - DNA, 15 bp, Homo sapiens
aggaggatcgcttga

SEQ ID NO: 801260 - DNA, 15 bp, Homo sapiens
ggaggatcgcttgag

SEQ ID NO: 801261 - DNA, 15 bp, Homo sapiens
gaggatcgcttgagc

SEQ ID NO: 801262 - DNA, 15 bp, Homo sapiens
aggatcgcttgagcc

SEQ ID NO: 801263 - DNA, 15 bp, Homo sapiens
ggatcgcttgagccc

SEQ ID NO: 801264 - DNA, 15 bp, Homo sapiens
gatcgcttgagccca

SEQ ID NO: 801265 - DNA, 15 bp, Homo sapiens
atcgcttgagcccag

SEQ ID NO: 801266 - DNA, 15 bp, Homo sapiens
tcgcttgagcccagg

SEQ ID NO: 801267 - DNA, 15 bp, Homo sapiens
cgcttgagcccagga

SEQ ID NO: 801268 - DNA, 15 bp, Homo sapiens
ccaggagttcaaggc

SEQ ID NO: 801269 - DNA, 15 bp, Homo sapiens
caggagttcaaggct

SEQ ID NO: 801270 - DNA, 15 bp, Homo sapiens
aggagttcaaggctg

SEQ ID NO: 801271 - DNA, 15 bp, Homo sapiens
ggagttcaaggctgc

SEQ ID NO: 801272 - DNA, 15 bp, Homo sapiens
gagttcaaggctgca

SEQ ID NO: 801273 - DNA, 15 bp, Homo sapiens
agttcaaggctgcag

SEQ ID NO: 801274 - DNA, 15 bp, Homo sapiens
gttcaaggctgcagt

SEQ ID NO: 801275 - DNA, 15 bp, Homo sapiens
ttcaaggctgcagtg

SEQ ID NO: 801276 - DNA, 15 bp, Homo sapiens
ggctgcagtgagcta

SEQ ID NO: 801277 - DNA, 15 bp, Homo sapiens
gctgcagtgagctat

SEQ ID NO: 801278 - DNA, 15 bp, Homo sapiens
ctgcagtgagctatg

SEQ ID NO: 801279 - DNA, 15 bp, Homo sapiens
tgcagtgagctatgg

SEQ ID NO: 801280 - DNA, 15 bp, Homo sapiens
gcagtgagctatggt

SEQ ID NO: 801281 - DNA, 15 bp, Homo sapiens
cagtgagctatggtt

SEQ ID NO: 801282 - DNA, 15 bp, Homo sapiens
agtgagctatggttg

SEQ ID NO: 801283 - DNA, 15 bp, Homo sapiens
gtgagctatggttgc

SEQ ID NO: 801284 - DNA, 15 bp, Homo sapiens
tgagctatggttgca

SEQ ID NO: 801285 - DNA, 15 bp, Homo sapiens
gagctatggttgcac

SEQ ID NO: 801286 - DNA, 15 bp, Homo sapiens
agctatggttgcacc

SEQ ID NO: 801287 - DNA, 15 bp, Homo sapiens
gctatggttgcacca

SEQ ID NO: 801288 - DNA, 15 bp, Homo sapiens
ctatggttgcaccac

SEQ ID NO: 801289 - DNA, 15 bp, Homo sapiens
tatggttgcaccact

SEQ ID NO: 801290 - DNA, 15 bp, Homo sapiens
atggttgcaccactg

SEQ ID NO: 801291 - DNA, 15 bp, Homo sapiens
tggttgcaccactgc

SEQ ID NO: 801292 - DNA, 15 bp, Homo sapiens
ggttgcaccactgca

SEQ ID NO: 801293 - DNA, 15 bp, Homo sapiens
gttgcaccactgcac

SEQ ID NO: 801294 - DNA, 15 bp, Homo sapiens
actccagcctggaca

SEQ ID NO: 801295 - DNA, 15 bp, Homo sapiens
ctccagcctggacaa

SEQ ID NO: 801296 - DNA, 15 bp, Homo sapiens
tccagcctggacaac

SEQ ID NO: 801297 - DNA, 15 bp, Homo sapiens
ccagcctggacaaca

SEQ ID NO: 801298 - DNA, 15 bp, Homo sapiens
cagcctggacaacag

SEQ ID NO: 801299 - DNA, 15 bp, Homo sapiens
agcctggacaacaga

SEQ ID NO: 801300 - DNA, 15 bp, Homo sapiens
gcctggacaacagag

SEQ ID NO: 801301 - DNA, 15 bp, Homo sapiens
cctggacaacagagt

SEQ ID NO: 801302 - DNA, 15 bp, Homo sapiens
ctggacaacagagtg

SEQ ID NO: 801303 - DNA, 15 bp, Homo sapiens
tggacaacagagtga

SEQ ID NO: 801304 - DNA, 15 bp, Homo sapiens
ggacaacagagtgag

SEQ ID NO: 801305 - DNA, 15 bp, Homo sapiens
gacaacagagtgaga

SEQ ID NO: 801306 - DNA, 15 bp, Homo sapiens
acaacagagtgagac

SEQ ID NO: 801307 - DNA, 15 bp, Homo sapiens
caacagagtgagacc

SEQ ID NO: 801308 - DNA, 15 bp, Homo sapiens
aacagagtgagaccc

SEQ ID NO: 801309 - DNA, 15 bp, Homo sapiens
acagagtgagacccc

SEQ ID NO: 801310 - DNA, 15 bp, Homo sapiens
cagagtgagacccca

SEQ ID NO: 801311 - DNA, 15 bp, Homo sapiens
agagtgagaccccat

SEQ ID NO: 801312 - DNA, 15 bp, Homo sapiens
gagtgagaccccatc

SEQ ID NO: 801313 - DNA, 15 bp, Homo sapiens
agtgagaccccatcc

SEQ ID NO: 801314 - DNA, 15 bp, Homo sapiens
gtgagaccccatccc

SEQ ID NO: 801315 - DNA, 15 bp, Homo sapiens
tgagaccccatccct

SEQ ID NO: 801316 - DNA, 15 bp, Homo sapiens
gagaccccatccctt

SEQ ID NO: 801317 - DNA, 15 bp, Homo sapiens
agaccccatccctta

SEQ ID NO: 801318 - DNA, 15 bp, Homo sapiens
gaccccatcccttaa

SEQ ID NO: 801319 - DNA, 15 bp, Homo sapiens
accccatcccttaaa

SEQ ID NO: 801320 - DNA, 15 bp, Homo sapiens
ccccatcccttaaaa

SEQ ID NO: 801321 - DNA, 15 bp, Homo sapiens
cccatcccttaaaaa

SEQ ID NO: 801322 - DNA, 15 bp, Homo sapiens
ccatcccttaaaaaa

SEQ ID NO: 801323 - DNA, 15 bp, Homo sapiens
catcccttaaaaaat

SEQ ID NO: 801324 - DNA, 15 bp, Homo sapiens
atcccttaaaaaatg

SEQ ID NO: 801325 - DNA, 15 bp, Homo sapiens
tcccttaaaaaatgc

SEQ ID NO: 801326 - DNA, 15 bp, Homo sapiens
cccttaaaaaatgct

SEQ ID NO: 801327 - DNA, 15 bp, Homo sapiens
ccttaaaaaatgctt

SEQ ID NO: 801328 - DNA, 15 bp, Homo sapiens
cttaaaaaatgctta

SEQ ID NO: 801329 - DNA, 15 bp, Homo sapiens
ttaaaaaatgcttat

SEQ ID NO: 801330 - DNA, 15 bp, Homo sapiens
taaaaaatgcttatt

SEQ ID NO: 801331 - DNA, 15 bp, Homo sapiens
aaaaaatgcttatta

SEQ ID NO: 801332 - DNA, 15 bp, Homo sapiens
aaaaatgcttattat

SEQ ID NO: 801333 - DNA, 15 bp, Homo sapiens
aaaatgcttattata

SEQ ID NO: 801334 - DNA, 15 bp, Homo sapiens
aaatgcttattatag

SEQ ID NO: 801335 - DNA, 15 bp, Homo sapiens
aatgcttattataga

SEQ ID NO: 801336 - DNA, 15 bp, Homo sapiens
atgcttattatagaa

SEQ ID NO: 801337 - DNA, 15 bp, Homo sapiens
tgcttattatagaaa

SEQ ID NO: 801338 - DNA, 15 bp, Homo sapiens
gcttattatagaaaa

SEQ ID NO: 801339 - DNA, 15 bp, Homo sapiens
cttattatagaaaac

SEQ ID NO: 801340 - DNA, 15 bp, Homo sapiens
ttattatagaaaact

SEQ ID NO: 801341 - DNA, 15 bp, Homo sapiens
tattatagaaaactt

SEQ ID NO: 801342 - DNA, 15 bp, Homo sapiens
attatagaaaacttg

SEQ ID NO: 801343 - DNA, 15 bp, Homo sapiens
ttatagaaaacttgg

SEQ ID NO: 801344 - DNA, 15 bp, Homo sapiens
tatagaaaacttgga

SEQ ID NO: 801345 - DNA, 15 bp, Homo sapiens
atagaaaacttggaa

SEQ ID NO: 801346 - DNA, 15 bp, Homo sapiens
tagaaaacttggaaa

SEQ ID NO: 801347 - DNA, 15 bp, Homo sapiens
agaaaacttggaaag

SEQ ID NO: 801348 - DNA, 15 bp, Homo sapiens
gaaaacttggaaagc

SEQ ID NO: 801349 - DNA, 15 bp, Homo sapiens
aaaacttggaaagca

SEQ ID NO: 801350 - DNA, 15 bp, Homo sapiens
aaacttggaaagcac

SEQ ID NO: 801351 - DNA, 15 bp, Homo sapiens
aacttggaaagcaca

SEQ ID NO: 801352 - DNA, 15 bp, Homo sapiens
acttggaaagcacag

SEQ ID NO: 801353 - DNA, 15 bp, Homo sapiens
cttggaaagcacaga

SEQ ID NO: 801354 - DNA, 15 bp, Homo sapiens
ttggaaagcacagaa

SEQ ID NO: 801355 - DNA, 15 bp, Homo sapiens
tggaaagcacagaag

SEQ ID NO: 801356 - DNA, 15 bp, Homo sapiens
ggaaagcacagaagg

SEQ ID NO: 801357 - DNA, 15 bp, Homo sapiens
gaaagcacagaagga

SEQ ID NO: 801358 - DNA, 15 bp, Homo sapiens
aaagcacagaaggag

SEQ ID NO: 801359 - DNA, 15 bp, Homo sapiens
aagcacagaaggagt

SEQ ID NO: 801360 - DNA, 15 bp, Homo sapiens
agcacagaaggagta

SEQ ID NO: 801361 - DNA, 15 bp, Homo sapiens
gcacagaaggagtac

SEQ ID NO: 801362 - DNA, 15 bp, Homo sapiens
cacagaaggagtaca

SEQ ID NO: 801363 - DNA, 15 bp, Homo sapiens
acagaaggagtacaa

SEQ ID NO: 801364 - DNA, 15 bp, Homo sapiens
cagaaggagtacaaa

SEQ ID NO: 801365 - DNA, 15 bp, Homo sapiens
agaaggagtacaaaa

SEQ ID NO: 801366 - DNA, 15 bp, Homo sapiens
gaaggagtacaaaag

SEQ ID NO: 801367 - DNA, 15 bp, Homo sapiens
aaggagtacaaaaga

SEQ ID NO: 801368 - DNA, 15 bp, Homo sapiens
aggagtacaaaagaa

SEQ ID NO: 801369 - DNA, 15 bp, Homo sapiens
ggagtacaaaagaag

SEQ ID NO: 801370 - DNA, 15 bp, Homo sapiens
gagtacaaaagaagt

SEQ ID NO: 801371 - DNA, 15 bp, Homo sapiens
agtacaaaagaagtt

SEQ ID NO: 801372 - DNA, 15 bp, Homo sapiens
gtacaaaagaagtta

SEQ ID NO: 801373 - DNA, 15 bp, Homo sapiens
tacaaaagaagttaa

SEQ ID NO: 801374 - DNA, 15 bp, Homo sapiens
acaaaagaagttaat

SEQ ID NO: 801375 - DNA, 15 bp, Homo sapiens
caaaagaagttaatc

SEQ ID NO: 801376 - DNA, 15 bp, Homo sapiens
aaaagaagttaatct

SEQ ID NO: 801377 - DNA, 15 bp, Homo sapiens
aaagaagttaatctc

SEQ ID NO: 801378 - DNA, 15 bp, Homo sapiens
aagaagttaatctcc

SEQ ID NO: 801379 - DNA, 15 bp, Homo sapiens
agaagttaatctccc

SEQ ID NO: 801380 - DNA, 15 bp, Homo sapiens
gaagttaatctccca

SEQ ID NO: 801381 - DNA, 15 bp, Homo sapiens
aagttaatctcccat

SEQ ID NO: 801382 - DNA, 15 bp, Homo sapiens
agttaatctcccatt

SEQ ID NO: 801383 - DNA, 15 bp, Homo sapiens
gttaatctcccatta

SEQ ID NO: 801384 - DNA, 15 bp, Homo sapiens
ttaatctcccattaa

SEQ ID NO: 801385 - DNA, 15 bp, Homo sapiens
taatctcccattaaa

SEQ ID NO: 801386 - DNA, 15 bp, Homo sapiens
aatctcccattaaaa

SEQ ID NO: 801387 - DNA, 15 bp, Homo sapiens
atctcccattaaaat

SEQ ID NO: 801388 - DNA, 15 bp, Homo sapiens
tctcccattaaaatc

SEQ ID NO: 801389 - DNA, 15 bp, Homo sapiens
ctcccattaaaatca

SEQ ID NO: 801390 - DNA, 15 bp, Homo sapiens
tcccattaaaatcaa

SEQ ID NO: 801391 - DNA, 15 bp, Homo sapiens
cccattaaaatcaaa

SEQ ID NO: 801392 - DNA, 15 bp, Homo sapiens
ccattaaaatcaaat

SEQ ID NO: 801393 - DNA, 15 bp, Homo sapiens
cattaaaatcaaata

SEQ ID NO: 801394 - DNA, 15 bp, Homo sapiens
attaaaatcaaatat

SEQ ID NO: 801395 - DNA, 15 bp, Homo sapiens
ttaaaatcaaatatt

SEQ ID NO: 801396 - DNA, 15 bp, Homo sapiens
taaaatcaaatattt

SEQ ID NO: 801397 - DNA, 15 bp, Homo sapiens
aaaatcaaatattta

SEQ ID NO: 801398 - DNA, 15 bp, Homo sapiens
aaatcaaatatttaa

SEQ ID NO: 801399 - DNA, 15 bp, Homo sapiens
aatcaaatatttaac

SEQ ID NO: 801400 - DNA, 15 bp, Homo sapiens
atcaaatatttaacc

SEQ ID NO: 801401 - DNA, 15 bp, Homo sapiens
tcaaatatttaacca

SEQ ID NO: 801402 - DNA, 15 bp, Homo sapiens
caaatatttaaccac

SEQ ID NO: 801403 - DNA, 15 bp, Homo sapiens
aaatatttaaccacc

SEQ ID NO: 801404 - DNA, 15 bp, Homo sapiens
aatatttaaccacca

SEQ ID NO: 801405 - DNA, 15 bp, Homo sapiens
atatttaaccaccat

SEQ ID NO: 801406 - DNA, 15 bp, Homo sapiens
tatttaaccaccatg

SEQ ID NO: 801407 - DNA, 15 bp, Homo sapiens
atttaaccaccatga

SEQ ID NO: 801408 - DNA, 15 bp, Homo sapiens
tttaaccaccatgaa

SEQ ID NO: 801409 - DNA, 15 bp, Homo sapiens
ttaaccaccatgaac

SEQ ID NO: 801410 - DNA, 15 bp, Homo sapiens
taaccaccatgaaca

SEQ ID NO: 801411 - DNA, 15 bp, Homo sapiens
aaccaccatgaacat

SEQ ID NO: 801412 - DNA, 15 bp, Homo sapiens
accaccatgaacatt

SEQ ID NO: 801413 - DNA, 15 bp, Homo sapiens
ccaccatgaacattc

SEQ ID NO: 801414 - DNA, 15 bp, Homo sapiens
caccatgaacattca

SEQ ID NO: 801415 - DNA, 15 bp, Homo sapiens
accatgaacattcaa

SEQ ID NO: 801416 - DNA, 15 bp, Homo sapiens
ccatgaacattcaac

SEQ ID NO: 801417 - DNA, 15 bp, Homo sapiens
catgaacattcaacc

SEQ ID NO: 801418 - DNA, 15 bp, Homo sapiens
atgaacattcaacct

SEQ ID NO: 801419 - DNA, 15 bp, Homo sapiens
tgaacattcaacctg

SEQ ID NO: 801420 - DNA, 15 bp, Homo sapiens
gaacattcaacctgt

SEQ ID NO: 801421 - DNA, 15 bp, Homo sapiens
aacattcaacctgtg

SEQ ID NO: 801422 - DNA, 15 bp, Homo sapiens
acattcaacctgtga

SEQ ID NO: 801423 - DNA, 15 bp, Homo sapiens
cattcaacctgtgat

SEQ ID NO: 801424 - DNA, 15 bp, Homo sapiens
attcaacctgtgatt

SEQ ID NO: 801425 - DNA, 15 bp, Homo sapiens
ttcaacctgtgattg

SEQ ID NO: 801426 - DNA, 15 bp, Homo sapiens
tcaacctgtgattgt

SEQ ID NO: 801427 - DNA, 15 bp, Homo sapiens
caacctgtgattgtc

SEQ ID NO: 801428 - DNA, 15 bp, Homo sapiens
aacctgtgattgtcc

SEQ ID NO: 801429 - DNA, 15 bp, Homo sapiens
acctgtgattgtcca

SEQ ID NO: 801430 - DNA, 15 bp, Homo sapiens
cctgtgattgtccaa

SEQ ID NO: 801431 - DNA, 15 bp, Homo sapiens
ctgtgattgtccaat

SEQ ID NO: 801432 - DNA, 15 bp, Homo sapiens
tgtgattgtccaatg

SEQ ID NO: 801433 - DNA, 15 bp, Homo sapiens
gtgattgtccaatgg

SEQ ID NO: 801434 - DNA, 15 bp, Homo sapiens
tgattgtccaatggt

SEQ ID NO: 801435 - DNA, 15 bp, Homo sapiens
gattgtccaatggtt

SEQ ID NO: 801436 - DNA, 15 bp, Homo sapiens
attgtccaatggttt

SEQ ID NO: 801437 - DNA, 15 bp, Homo sapiens
ttgtccaatggtttt

SEQ ID NO: 801438 - DNA, 15 bp, Homo sapiens
tgtccaatggttttt

SEQ ID NO: 801439 - DNA, 15 bp, Homo sapiens
gtccaatggttttta

SEQ ID NO: 801440 - DNA, 15 bp, Homo sapiens
tccaatggtttttaa

SEQ ID NO: 801441 - DNA, 15 bp, Homo sapiens
ccaatggtttttaat

SEQ ID NO: 801442 - DNA, 15 bp, Homo sapiens
caatggtttttaatg

SEQ ID NO: 801443 - DNA, 15 bp, Homo sapiens
aatggtttttaatgc

SEQ ID NO: 801444 - DNA, 15 bp, Homo sapiens
atggtttttaatgcc

SEQ ID NO: 801445 - DNA, 15 bp, Homo sapiens
tggtttttaatgcct

SEQ ID NO: 801446 - DNA, 15 bp, Homo sapiens
ggtttttaatgccta

SEQ ID NO: 801447 - DNA, 15 bp, Homo sapiens
gtttttaatgcctac

SEQ ID NO: 801448 - DNA, 15 bp, Homo sapiens
tttttaatgcctacc

SEQ ID NO: 801449 - DNA, 15 bp, Homo sapiens
ttttaatgcctacct

SEQ ID NO: 801450 - DNA, 15 bp, Homo sapiens
tttaatgcctaccta

SEQ ID NO: 801451 - DNA, 15 bp, Homo sapiens
ttaatgcctacctat

SEQ ID NO: 801452 - DNA, 15 bp, Homo sapiens
taatgcctacctata

SEQ ID NO: 801453 - DNA, 15 bp, Homo sapiens
aatgcctacctatac

SEQ ID NO: 801454 - DNA, 15 bp, Homo sapiens
atgcctacctatacc

SEQ ID NO: 801455 - DNA, 15 bp, Homo sapiens
tgcctacctatacct

SEQ ID NO: 801456 - DNA, 15 bp, Homo sapiens
gcctacctatacctt

SEQ ID NO: 801457 - DNA, 15 bp, Homo sapiens
cctacctataccttt

SEQ ID NO: 801458 - DNA, 15 bp, Homo sapiens
ctacctatacctttt

SEQ ID NO: 801459 - DNA, 15 bp, Homo sapiens
tacctataccttttt

SEQ ID NO: 801460 - DNA, 15 bp, Homo sapiens
acctatacctttttt

SEQ ID NO: 801461 - DNA, 15 bp, Homo sapiens
cctataccttttttt

SEQ ID NO: 801462 - DNA, 15 bp, Homo sapiens
ctatacctttttttg

SEQ ID NO: 801463 - DNA, 15 bp, Homo sapiens
tatacctttttttgt

SEQ ID NO: 801464 - DNA, 15 bp, Homo sapiens
atacctttttttgtc

SEQ ID NO: 801465 - DNA, 15 bp, Homo sapiens
tacctttttttgtca

SEQ ID NO: 801466 - DNA, 15 bp, Homo sapiens
acctttttttgtcaa

SEQ ID NO: 801467 - DNA, 15 bp, Homo sapiens
cctttttttgtcaaa

SEQ ID NO: 801468 - DNA, 15 bp, Homo sapiens
ctttttttgtcaaaa

SEQ ID NO: 801469 - DNA, 15 bp, Homo sapiens
tttttttgtcaaaat

SEQ ID NO: 801470 - DNA, 15 bp, Homo sapiens
ttttttgtcaaaata

SEQ ID NO: 801471 - DNA, 15 bp, Homo sapiens
tttttgtcaaaataa

SEQ ID NO: 801472 - DNA, 15 bp, Homo sapiens
ttttgtcaaaataat

SEQ ID NO: 801473 - DNA, 15 bp, Homo sapiens
tttgtcaaaataatt

SEQ ID NO: 801474 - DNA, 15 bp, Homo sapiens
ttgtcaaaataatta

SEQ ID NO: 801475 - DNA, 15 bp, Homo sapiens
tgtcaaaataattaa

SEQ ID NO: 801476 - DNA, 15 bp, Homo sapiens
gtcaaaataattaat

SEQ ID NO: 801477 - DNA, 15 bp, Homo sapiens
tcaaaataattaata

SEQ ID NO: 801478 - DNA, 15 bp, Homo sapiens
caaaataattaataa

SEQ ID NO: 801479 - DNA, 15 bp, Homo sapiens
aaaataattaataat

SEQ ID NO: 801480 - DNA, 15 bp, Homo sapiens
aaataattaataatc

SEQ ID NO: 801481 - DNA, 15 bp, Homo sapiens
aataattaataatct

SEQ ID NO: 801482 - DNA, 15 bp, Homo sapiens
ataattaataatctg

SEQ ID NO: 801483 - DNA, 15 bp, Homo sapiens
taattaataatctgc

SEQ ID NO: 801484 - DNA, 15 bp, Homo sapiens
aattaataatctgct

SEQ ID NO: 801485 - DNA, 15 bp, Homo sapiens
attaataatctgcta

SEQ ID NO: 801486 - DNA, 15 bp, Homo sapiens
ttaataatctgctat

SEQ ID NO: 801487 - DNA, 15 bp, Homo sapiens
taataatctgctatg

SEQ ID NO: 801488 - DNA, 15 bp, Homo sapiens
aataatctgctatgt

SEQ ID NO: 801489 - DNA, 15 bp, Homo sapiens
ataatctgctatgta

SEQ ID NO: 801490 - DNA, 15 bp, Homo sapiens
taatctgctatgtaa

SEQ ID NO: 801491 - DNA, 15 bp, Homo sapiens
aatctgctatgtaaa

SEQ ID NO: 801492 - DNA, 15 bp, Homo sapiens
atctgctatgtaaat

SEQ ID NO: 801493 - DNA, 15 bp, Homo sapiens
tctgctatgtaaatt

SEQ ID NO: 801494 - DNA, 15 bp, Homo sapiens
ctgctatgtaaattg

SEQ ID NO: 801495 - DNA, 15 bp, Homo sapiens
tgctatgtaaattgt

SEQ ID NO: 801496 - DNA, 15 bp, Homo sapiens
gctatgtaaattgtt

SEQ ID NO: 801497 - DNA, 15 bp, Homo sapiens
ctatgtaaattgtta

SEQ ID NO: 801498 - DNA, 15 bp, Homo sapiens
tatgtaaattgttag

SEQ ID NO: 801499 - DNA, 15 bp, Homo sapiens
atgtaaattgttagg

SEQ ID NO: 801500 - DNA, 15 bp, Homo sapiens
tgtaaattgttaggg

SEQ ID NO: 801501 - DNA, 15 bp, Homo sapiens
gtaaattgttagggt

SEQ ID NO: 801502 - DNA, 15 bp, Homo sapiens
taaattgttagggta

SEQ ID NO: 801503 - DNA, 15 bp, Homo sapiens
aaattgttagggtac

SEQ ID NO: 801504 - DNA, 15 bp, Homo sapiens
aattgttagggtaca

SEQ ID NO: 801505 - DNA, 15 bp, Homo sapiens
attgttagggtacat

SEQ ID NO: 801506 - DNA, 15 bp, Homo sapiens
ttgttagggtacatt

SEQ ID NO: 801507 - DNA, 15 bp, Homo sapiens
tgttagggtacattg

SEQ ID NO: 801508 - DNA, 15 bp, Homo sapiens
gttagggtacattga

SEQ ID NO: 801509 - DNA, 15 bp, Homo sapiens
ttagggtacattgat

SEQ ID NO: 801510 - DNA, 15 bp, Homo sapiens
tagggtacattgatt

SEQ ID NO: 801511 - DNA, 15 bp, Homo sapiens
agggtacattgattt

SEQ ID NO: 801512 - DNA, 15 bp, Homo sapiens
gggtacattgatttt

SEQ ID NO: 801513 - DNA, 15 bp, Homo sapiens
ggtacattgattttt

SEQ ID NO: 801514 - DNA, 15 bp, Homo sapiens
gtacattgatttttt

SEQ ID NO: 801515 - DNA, 15 bp, Homo sapiens
tacattgattttttt

SEQ ID NO: 801516 - DNA, 15 bp, Homo sapiens
acattgatttttttc

SEQ ID NO: 801517 - DNA, 15 bp, Homo sapiens
cattgatttttttcc

SEQ ID NO: 801518 - DNA, 15 bp, Homo sapiens
attgatttttttcca

SEQ ID NO: 801519 - DNA, 15 bp, Homo sapiens
ttgatttttttccat

SEQ ID NO: 801520 - DNA, 15 bp, Homo sapiens
tgatttttttccatt

SEQ ID NO: 801521 - DNA, 15 bp, Homo sapiens
gatttttttccattt

SEQ ID NO: 801522 - DNA, 15 bp, Homo sapiens
atttttttccattta

SEQ ID NO: 801523 - DNA, 15 bp, Homo sapiens
tttttttccatttag

SEQ ID NO: 801524 - DNA, 15 bp, Homo sapiens
ttttttccatttagc

SEQ ID NO: 801525 - DNA, 15 bp, Homo sapiens
tttttccatttagca

SEQ ID NO: 801526 - DNA, 15 bp, Homo sapiens
ttttccatttagcaa

SEQ ID NO: 801527 - DNA, 15 bp, Homo sapiens
tttccatttagcaat

SEQ ID NO: 801528 - DNA, 15 bp, Homo sapiens
ttccatttagcaatg

SEQ ID NO: 801529 - DNA, 15 bp, Homo sapiens
tccatttagcaatgt

SEQ ID NO: 801530 - DNA, 15 bp, Homo sapiens
ccatttagcaatgta

SEQ ID NO: 801531 - DNA, 15 bp, Homo sapiens
catttagcaatgtat

SEQ ID NO: 801532 - DNA, 15 bp, Homo sapiens
atttagcaatgtatg

SEQ ID NO: 801533 - DNA, 15 bp, Homo sapiens
tttagcaatgtatga

SEQ ID NO: 801534 - DNA, 15 bp, Homo sapiens
ttagcaatgtatgat

SEQ ID NO: 801535 - DNA, 15 bp, Homo sapiens
tagcaatgtatgatg

SEQ ID NO: 801536 - DNA, 15 bp, Homo sapiens
agcaatgtatgatga

SEQ ID NO: 801537 - DNA, 15 bp, Homo sapiens
gcaatgtatgatgaa

SEQ ID NO: 801538 - DNA, 15 bp, Homo sapiens
caatgtatgatgaac

SEQ ID NO: 801539 - DNA, 15 bp, Homo sapiens
aatgtatgatgaaca

SEQ ID NO: 801540 - DNA, 15 bp, Homo sapiens
atgtatgatgaacat

SEQ ID NO: 801541 - DNA, 15 bp, Homo sapiens
tgtatgatgaacatt

SEQ ID NO: 801542 - DNA, 15 bp, Homo sapiens
gtatgatgaacattt

SEQ ID NO: 801543 - DNA, 15 bp, Homo sapiens
tatgatgaacatttc

SEQ ID NO: 801544 - DNA, 15 bp, Homo sapiens
atgatgaacatttcc

SEQ ID NO: 801545 - DNA, 15 bp, Homo sapiens
tgatgaacatttccc

SEQ ID NO: 801546 - DNA, 15 bp, Homo sapiens
gatgaacatttccct

SEQ ID NO: 801547 - DNA, 15 bp, Homo sapiens
atgaacatttccctg

SEQ ID NO: 801548 - DNA, 15 bp, Homo sapiens
tgaacatttccctgt

SEQ ID NO: 801549 - DNA, 15 bp, Homo sapiens
gaacatttccctgtg

SEQ ID NO: 801550 - DNA, 15 bp, Homo sapiens
aacatttccctgtgc

SEQ ID NO: 801551 - DNA, 15 bp, Homo sapiens
acatttccctgtgct

SEQ ID NO: 801552 - DNA, 15 bp, Homo sapiens
catttccctgtgcta

SEQ ID NO: 801553 - DNA, 15 bp, Homo sapiens
atttccctgtgctaa

SEQ ID NO: 801554 - DNA, 15 bp, Homo sapiens
tttccctgtgctaat

SEQ ID NO: 801555 - DNA, 15 bp, Homo sapiens
ttccctgtgctaata

SEQ ID NO: 801556 - DNA, 15 bp, Homo sapiens
tccctgtgctaatac

SEQ ID NO: 801557 - DNA, 15 bp, Homo sapiens
ccctgtgctaataca

SEQ ID NO: 801558 - DNA, 15 bp, Homo sapiens
cctgtgctaatacat

SEQ ID NO: 801559 - DNA, 15 bp, Homo sapiens
ctgtgctaatacata

SEQ ID NO: 801560 - DNA, 15 bp, Homo sapiens
tgtgctaatacatat

SEQ ID NO: 801561 - DNA, 15 bp, Homo sapiens
gtgctaatacatatt

SEQ ID NO: 801562 - DNA, 15 bp, Homo sapiens
tgctaatacatatta

SEQ ID NO: 801563 - DNA, 15 bp, Homo sapiens
gctaatacatattat

SEQ ID NO: 801564 - DNA, 15 bp, Homo sapiens
ctaatacatattatt

SEQ ID NO: 801565 - DNA, 15 bp, Homo sapiens
aatacatattatttc

SEQ ID NO: 801566 - DNA, 15 bp, Homo sapiens
atacatattatttca

SEQ ID NO: 801567 - DNA, 15 bp, Homo sapiens
tacatattatttcac

SEQ ID NO: 801568 - DNA, 15 bp, Homo sapiens
acatattatttcact

SEQ ID NO: 801569 - DNA, 15 bp, Homo sapiens
catattatttcacta

SEQ ID NO: 801570 - DNA, 15 bp, Homo sapiens
atattatttcactac

SEQ ID NO: 801571 - DNA, 15 bp, Homo sapiens
tattatttcactacc

SEQ ID NO: 801572 - DNA, 15 bp, Homo sapiens
attatttcactacct

SEQ ID NO: 801573 - DNA, 15 bp, Homo sapiens
ttatttcactacctg

SEQ ID NO: 801574 - DNA, 15 bp, Homo sapiens
tatttcactacctgg

SEQ ID NO: 801575 - DNA, 15 bp, Homo sapiens
atttcactacctggt

SEQ ID NO: 801576 - DNA, 15 bp, Homo sapiens
tttcactacctggtt

SEQ ID NO: 801577 - DNA, 15 bp, Homo sapiens
ttcactacctggttt

SEQ ID NO: 801578 - DNA, 15 bp, Homo sapiens
tcactacctggtttt

SEQ ID NO: 801579 - DNA, 15 bp, Homo sapiens
cactacctggttttg

SEQ ID NO: 801580 - DNA, 15 bp, Homo sapiens
actacctggttttgg

SEQ ID NO: 801581 - DNA, 15 bp, Homo sapiens
ctacctggttttggg

SEQ ID NO: 801582 - DNA, 15 bp, Homo sapiens
tacctggttttggga

SEQ ID NO: 801583 - DNA, 15 bp, Homo sapiens
acctggttttgggag

SEQ ID NO: 801584 - DNA, 15 bp, Homo sapiens
cctggttttgggagc

SEQ ID NO: 801585 - DNA, 15 bp, Homo sapiens
ctggttttgggagca

SEQ ID NO: 801586 - DNA, 15 bp, Homo sapiens
tggttttgggagcaa

SEQ ID NO: 801587 - DNA, 15 bp, Homo sapiens
ggttttgggagcaac

SEQ ID NO: 801588 - DNA, 15 bp, Homo sapiens
gttttgggagcaact

SEQ ID NO: 801589 - DNA, 15 bp, Homo sapiens
ttttgggagcaactt

SEQ ID NO: 801590 - DNA, 15 bp, Homo sapiens
tttgggagcaactta

SEQ ID NO: 801591 - DNA, 15 bp, Homo sapiens
ttgggagcaacttaa

SEQ ID NO: 801592 - DNA, 15 bp, Homo sapiens
tgggagcaacttaat

SEQ ID NO: 801593 - DNA, 15 bp, Homo sapiens
gggagcaacttaata

SEQ ID NO: 801594 - DNA, 15 bp, Homo sapiens
ggagcaacttaatag

SEQ ID NO: 801595 - DNA, 15 bp, Homo sapiens
gagcaacttaatagt

SEQ ID NO: 801596 - DNA, 15 bp, Homo sapiens
agcaacttaatagtc

SEQ ID NO: 801597 - DNA, 15 bp, Homo sapiens
gcaacttaatagtca

SEQ ID NO: 801598 - DNA, 15 bp, Homo sapiens
caacttaatagtcat

SEQ ID NO: 801599 - DNA, 15 bp, Homo sapiens
aacttaatagtcatc

SEQ ID NO: 801600 - DNA, 15 bp, Homo sapiens
acttaatagtcatca

SEQ ID NO: 801601 - DNA, 15 bp, Homo sapiens
cttaatagtcatcat

SEQ ID NO: 801602 - DNA, 15 bp, Homo sapiens
ttaatagtcatcatt

SEQ ID NO: 801603 - DNA, 15 bp, Homo sapiens
taatagtcatcattg

SEQ ID NO: 801604 - DNA, 15 bp, Homo sapiens
aatagtcatcattga

SEQ ID NO: 801605 - DNA, 15 bp, Homo sapiens
atagtcatcattgac

SEQ ID NO: 801606 - DNA, 15 bp, Homo sapiens
tagtcatcattgact

SEQ ID NO: 801607 - DNA, 15 bp, Homo sapiens
agtcatcattgactg

SEQ ID NO: 801608 - DNA, 15 bp, Homo sapiens
gtcatcattgactgt

SEQ ID NO: 801609 - DNA, 15 bp, Homo sapiens
tcatcattgactgtg

SEQ ID NO: 801610 - DNA, 15 bp, Homo sapiens
catcattgactgtga

SEQ ID NO: 801611 - DNA, 15 bp, Homo sapiens
atcattgactgtgat

SEQ ID NO: 801612 - DNA, 15 bp, Homo sapiens
tcattgactgtgata

SEQ ID NO: 801613 - DNA, 15 bp, Homo sapiens
cattgactgtgatat

SEQ ID NO: 801614 - DNA, 15 bp, Homo sapiens
attgactgtgatata

SEQ ID NO: 801615 - DNA, 15 bp, Homo sapiens
ttgactgtgatataa

SEQ ID NO: 801616 - DNA, 15 bp, Homo sapiens
tgactgtgatataaa

SEQ ID NO: 801617 - DNA, 15 bp, Homo sapiens
gactgtgatataaat

SEQ ID NO: 801618 - DNA, 15 bp, Homo sapiens
actgtgatataaatt

SEQ ID NO: 801619 - DNA, 15 bp, Homo sapiens
ctgtgatataaatta

SEQ ID NO: 801620 - DNA, 15 bp, Homo sapiens
tgtgatataaattaa

SEQ ID NO: 801621 - DNA, 15 bp, Homo sapiens
gtgatataaattaat

SEQ ID NO: 801622 - DNA, 15 bp, Homo sapiens
tgatataaattaatg

SEQ ID NO: 801623 - DNA, 15 bp, Homo sapiens
gatataaattaatgt

SEQ ID NO: 801624 - DNA, 15 bp, Homo sapiens
atataaattaatgta

SEQ ID NO: 801625 - DNA, 15 bp, Homo sapiens
tataaattaatgtac

SEQ ID NO: 801626 - DNA, 15 bp, Homo sapiens
ataaattaatgtacc

SEQ ID NO: 801627 - DNA, 15 bp, Homo sapiens
taaattaatgtacct

SEQ ID NO: 801628 - DNA, 15 bp, Homo sapiens
aaattaatgtacctg

SEQ ID NO: 801629 - DNA, 15 bp, Homo sapiens
aattaatgtacctgt

SEQ ID NO: 801630 - DNA, 15 bp, Homo sapiens
attaatgtacctgtt

SEQ ID NO: 801631 - DNA, 15 bp, Homo sapiens
ttaatgtacctgttt

SEQ ID NO: 801632 - DNA, 15 bp, Homo sapiens
taatgtacctgtttt

SEQ ID NO: 801633 - DNA, 15 bp, Homo sapiens
aatgtacctgttttt

SEQ ID NO: 801634 - DNA, 15 bp, Homo sapiens
atgtacctgtttttt

SEQ ID NO: 801635 - DNA, 15 bp, Homo sapiens
tgtacctgttttttt

SEQ ID NO: 801636 - DNA, 15 bp, Homo sapiens
gtacctgtttttttt

SEQ ID NO: 801637 - DNA, 15 bp, Homo sapiens
tacctgttttttttc

SEQ ID NO: 801638 - DNA, 15 bp, Homo sapiens
acctgttttttttca

SEQ ID NO: 801639 - DNA, 15 bp, Homo sapiens
cctgttttttttcac

SEQ ID NO: 801640 - DNA, 15 bp, Homo sapiens
ctgttttttttcaca

SEQ ID NO: 801641 - DNA, 15 bp, Homo sapiens
tgttttttttcacat

SEQ ID NO: 801642 - DNA, 15 bp, Homo sapiens
gttttttttcacatt

SEQ ID NO: 801643 - DNA, 15 bp, Homo sapiens
ttttttttcacattt

SEQ ID NO: 801644 - DNA, 15 bp, Homo sapiens
tttttttcacatttt

SEQ ID NO: 801645 - DNA, 15 bp, Homo sapiens
ttttttcacattttg

SEQ ID NO: 801646 - DNA, 15 bp, Homo sapiens
tttttcacattttgt

SEQ ID NO: 801647 - DNA, 15 bp, Homo sapiens
ttttcacattttgtt

SEQ ID NO: 801648 - DNA, 15 bp, Homo sapiens
tttcacattttgttt

SEQ ID NO: 801649 - DNA, 15 bp, Homo sapiens
ttcacattttgttta

SEQ ID NO: 801650 - DNA, 15 bp, Homo sapiens
tcacattttgtttat

SEQ ID NO: 801651 - DNA, 15 bp, Homo sapiens
cacattttgtttatt

SEQ ID NO: 801652 - DNA, 15 bp, Homo sapiens
acattttgtttattt

SEQ ID NO: 801653 - DNA, 15 bp, Homo sapiens
cattttgtttattta

SEQ ID NO: 801654 - DNA, 15 bp, Homo sapiens
attttgtttatttat

SEQ ID NO: 801655 - DNA, 15 bp, Homo sapiens
ttttgtttatttata

SEQ ID NO: 801656 - DNA, 15 bp, Homo sapiens
tttgtttatttatac

SEQ ID NO: 801657 - DNA, 15 bp, Homo sapiens
ttgtttatttatact

SEQ ID NO: 801658 - DNA, 15 bp, Homo sapiens
tgtttatttatactt

SEQ ID NO: 801659 - DNA, 15 bp, Homo sapiens
gtttatttatacttt

SEQ ID NO: 801660 - DNA, 15 bp, Homo sapiens
tttatttatactttt

SEQ ID NO: 801661 - DNA, 15 bp, Homo sapiens
ttatttatacttttg

SEQ ID NO: 801662 - DNA, 15 bp, Homo sapiens
tatttatacttttgc

SEQ ID NO: 801663 - DNA, 15 bp, Homo sapiens
atttatacttttgct

SEQ ID NO: 801664 - DNA, 15 bp, Homo sapiens
tttatacttttgcta

SEQ ID NO: 801665 - DNA, 15 bp, Homo sapiens
ttatacttttgctaa

SEQ ID NO: 801666 - DNA, 15 bp, Homo sapiens
tatacttttgctaat

SEQ ID NO: 801667 - DNA, 15 bp, Homo sapiens
atacttttgctaatg

SEQ ID NO: 801668 - DNA, 15 bp, Homo sapiens
tacttttgctaatga

SEQ ID NO: 801669 - DNA, 15 bp, Homo sapiens
acttttgctaatgat

SEQ ID NO: 801670 - DNA, 15 bp, Homo sapiens
cttttgctaatgatt

SEQ ID NO: 801671 - DNA, 15 bp, Homo sapiens
ttttgctaatgattt

SEQ ID NO: 801672 - DNA, 15 bp, Homo sapiens
tttgctaatgatttt

SEQ ID NO: 801673 - DNA, 15 bp, Homo sapiens
ttgctaatgattttc

SEQ ID NO: 801674 - DNA, 15 bp, Homo sapiens
tgctaatgattttca

SEQ ID NO: 801675 - DNA, 15 bp, Homo sapiens
gctaatgattttcat

SEQ ID NO: 801676 - DNA, 15 bp, Homo sapiens
ctaatgattttcata

SEQ ID NO: 801677 - DNA, 15 bp, Homo sapiens
taatgattttcatat

SEQ ID NO: 801678 - DNA, 15 bp, Homo sapiens
aatgattttcatatg

SEQ ID NO: 801679 - DNA, 15 bp, Homo sapiens
atgattttcatatga

SEQ ID NO: 801680 - DNA, 15 bp, Homo sapiens
tgattttcatatgac

SEQ ID NO: 801681 - DNA, 15 bp, Homo sapiens
gattttcatatgact

SEQ ID NO: 801682 - DNA, 15 bp, Homo sapiens
attttcatatgactt

SEQ ID NO: 801683 - DNA, 15 bp, Homo sapiens
ttttcatatgactta

SEQ ID NO: 801684 - DNA, 15 bp, Homo sapiens
tttcatatgacttat

SEQ ID NO: 801685 - DNA, 15 bp, Homo sapiens
ttcatatgacttatg

SEQ ID NO: 801686 - DNA, 15 bp, Homo sapiens
tcatatgacttatgc

SEQ ID NO: 801687 - DNA, 15 bp, Homo sapiens
catatgacttatgct

SEQ ID NO: 801688 - DNA, 15 bp, Homo sapiens
atatgacttatgcta

SEQ ID NO: 801689 - DNA, 15 bp, Homo sapiens
tatgacttatgctat

SEQ ID NO: 801690 - DNA, 15 bp, Homo sapiens
atgacttatgctatt

SEQ ID NO: 801691 - DNA, 15 bp, Homo sapiens
tgacttatgctattg

SEQ ID NO: 801692 - DNA, 15 bp, Homo sapiens
gacttatgctattgt

SEQ ID NO: 801693 - DNA, 15 bp, Homo sapiens
acttatgctattgtt

SEQ ID NO: 801694 - DNA, 15 bp, Homo sapiens
cttatgctattgttg

SEQ ID NO: 801695 - DNA, 15 bp, Homo sapiens
ttatgctattgttga

SEQ ID NO: 801696 - DNA, 15 bp, Homo sapiens
tatgctattgttgat

SEQ ID NO: 801697 - DNA, 15 bp, Homo sapiens
atgctattgttgata

SEQ ID NO: 801698 - DNA, 15 bp, Homo sapiens
tgctattgttgatat

SEQ ID NO: 801699 - DNA, 15 bp, Homo sapiens
gctattgttgatatt

SEQ ID NO: 801700 - DNA, 15 bp, Homo sapiens
ctattgttgatattg

SEQ ID NO: 801701 - DNA, 15 bp, Homo sapiens
tattgttgatattga

SEQ ID NO: 801702 - DNA, 15 bp, Homo sapiens
attgttgatattgaa

SEQ ID NO: 801703 - DNA, 15 bp, Homo sapiens
ttgttgatattgaaa

SEQ ID NO: 801704 - DNA, 15 bp, Homo sapiens
tgttgatattgaaaa

SEQ ID NO: 801705 - DNA, 15 bp, Homo sapiens
gttgatattgaaaat

SEQ ID NO: 801706 - DNA, 15 bp, Homo sapiens
ttgatattgaaaatc

SEQ ID NO: 801707 - DNA, 15 bp, Homo sapiens
tgatattgaaaatcc

SEQ ID NO: 801708 - DNA, 15 bp, Homo sapiens
gatattgaaaatccc

SEQ ID NO: 801709 - DNA, 15 bp, Homo sapiens
atattgaaaatcccg

SEQ ID NO: 801710 - DNA, 15 bp, Homo sapiens
tattgaaaatcccga

SEQ ID NO: 801711 - DNA, 15 bp, Homo sapiens
attgaaaatcccgaa

SEQ ID NO: 801712 - DNA, 15 bp, Homo sapiens
ttgaaaatcccgaaa

SEQ ID NO: 801713 - DNA, 15 bp, Homo sapiens
tgaaaatcccgaaaa

SEQ ID NO: 801714 - DNA, 15 bp, Homo sapiens
gaaaatcccgaaaaa

SEQ ID NO: 801715 - DNA, 15 bp, Homo sapiens
aaaatcccgaaaaaa

SEQ ID NO: 801716 - DNA, 15 bp, Homo sapiens
aaatcccgaaaaaat

SEQ ID NO: 801717 - DNA, 15 bp, Homo sapiens
aatcccgaaaaaata

SEQ ID NO: 801718 - DNA, 15 bp, Homo sapiens
atcccgaaaaaatag

SEQ ID NO: 801719 - DNA, 15 bp, Homo sapiens
tcccgaaaaaatagt

SEQ ID NO: 801720 - DNA, 15 bp, Homo sapiens
cccgaaaaaatagtt

SEQ ID NO: 801721 - DNA, 15 bp, Homo sapiens
ccgaaaaaatagttg

SEQ ID NO: 801722 - DNA, 15 bp, Homo sapiens
cgaaaaaatagttgt

SEQ ID NO: 801723 - DNA, 15 bp, Homo sapiens
gaaaaaatagttgta

SEQ ID NO: 801724 - DNA, 15 bp, Homo sapiens
aaaaaatagttgtat

SEQ ID NO: 801725 - DNA, 15 bp, Homo sapiens
aaaaatagttgtatg

SEQ ID NO: 801726 - DNA, 15 bp, Homo sapiens
aaaatagttgtatga

SEQ ID NO: 801727 - DNA, 15 bp, Homo sapiens
aaatagttgtatgag

SEQ ID NO: 801728 - DNA, 15 bp, Homo sapiens
aatagttgtatgagt

SEQ ID NO: 801729 - DNA, 15 bp, Homo sapiens
atagttgtatgagtt

SEQ ID NO: 801730 - DNA, 15 bp, Homo sapiens
tagttgtatgagtta

SEQ ID NO: 801731 - DNA, 15 bp, Homo sapiens
agttgtatgagttaa

SEQ ID NO: 801732 - DNA, 15 bp, Homo sapiens
gttgtatgagttaat

SEQ ID NO: 801733 - DNA, 15 bp, Homo sapiens
ttgtatgagttaatt

SEQ ID NO: 801734 - DNA, 15 bp, Homo sapiens
tgtatgagttaattc

SEQ ID NO: 801735 - DNA, 15 bp, Homo sapiens
gtatgagttaattct

SEQ ID NO: 801736 - DNA, 15 bp, Homo sapiens
tatgagttaattctt

SEQ ID NO: 801737 - DNA, 15 bp, Homo sapiens
atgagttaattcttt

SEQ ID NO: 801738 - DNA, 15 bp, Homo sapiens
tgagttaattctttg

SEQ ID NO: 801739 - DNA, 15 bp, Homo sapiens
gagttaattctttgg

SEQ ID NO: 801740 - DNA, 15 bp, Homo sapiens
agttaattctttggt

SEQ ID NO: 801741 - DNA, 15 bp, Homo sapiens
gttaattctttggta

SEQ ID NO: 801742 - DNA, 15 bp, Homo sapiens
ttaattctttggtat

SEQ ID NO: 801743 - DNA, 15 bp, Homo sapiens
taattctttggtatt

SEQ ID NO: 801744 - DNA, 15 bp, Homo sapiens
aattctttggtatta

SEQ ID NO: 801745 - DNA, 15 bp, Homo sapiens
attctttggtattaa

SEQ ID NO: 801746 - DNA, 15 bp, Homo sapiens
ttctttggtattaac

SEQ ID NO: 801747 - DNA, 15 bp, Homo sapiens
tctttggtattaaca

SEQ ID NO: 801748 - DNA, 15 bp, Homo sapiens
ctttggtattaacat

SEQ ID NO: 801749 - DNA, 15 bp, Homo sapiens
tttggtattaacatt

SEQ ID NO: 801750 - DNA, 15 bp, Homo sapiens
ttggtattaacattt

SEQ ID NO: 801751 - DNA, 15 bp, Homo sapiens
tggtattaacattta

SEQ ID NO: 801752 - DNA, 15 bp, Homo sapiens
ggtattaacatttat

SEQ ID NO: 801753 - DNA, 15 bp, Homo sapiens
gtattaacatttatg

SEQ ID NO: 801754 - DNA, 15 bp, Homo sapiens
tattaacatttatgt

SEQ ID NO: 801755 - DNA, 15 bp, Homo sapiens
attaacatttatgtg

SEQ ID NO: 801756 - DNA, 15 bp, Homo sapiens
ttaacatttatgtga

SEQ ID NO: 801757 - DNA, 15 bp, Homo sapiens
taacatttatgtgaa

SEQ ID NO: 801758 - DNA, 15 bp, Homo sapiens
aacatttatgtgaat

SEQ ID NO: 801759 - DNA, 15 bp, Homo sapiens
acatttatgtgaatg

SEQ ID NO: 801760 - DNA, 15 bp, Homo sapiens
catttatgtgaatga

SEQ ID NO: 801761 - DNA, 15 bp, Homo sapiens
atttatgtgaatgat

SEQ ID NO: 801762 - DNA, 15 bp, Homo sapiens
tttatgtgaatgata

SEQ ID NO: 801763 - DNA, 15 bp, Homo sapiens
ttatgtgaatgataa

SEQ ID NO: 801764 - DNA, 15 bp, Homo sapiens
tatgtgaatgataac

SEQ ID NO: 801765 - DNA, 15 bp, Homo sapiens
atgtgaatgataact

SEQ ID NO: 801766 - DNA, 15 bp, Homo sapiens
tgtgaatgataacta

SEQ ID NO: 801767 - DNA, 15 bp, Homo sapiens
gtgaatgataactat

SEQ ID NO: 801768 - DNA, 15 bp, Homo sapiens
tgaatgataactatg

SEQ ID NO: 801769 - DNA, 15 bp, Homo sapiens
gaatgataactatgg

SEQ ID NO: 801770 - DNA, 15 bp, Homo sapiens
aatgataactatggg

SEQ ID NO: 801771 - DNA, 15 bp, Homo sapiens
atgataactatggga

SEQ ID NO: 801772 - DNA, 15 bp, Homo sapiens
tgataactatgggat

SEQ ID NO: 801773 - DNA, 15 bp, Homo sapiens
gataactatgggatc

SEQ ID NO: 801774 - DNA, 15 bp, Homo sapiens
ataactatgggatca

SEQ ID NO: 801775 - DNA, 15 bp, Homo sapiens
taactatgggatcat

SEQ ID NO: 801776 - DNA, 15 bp, Homo sapiens
aactatgggatcatt

SEQ ID NO: 801777 - DNA, 15 bp, Homo sapiens
actatgggatcattt

SEQ ID NO: 801778 - DNA, 15 bp, Homo sapiens
ctatgggatcatttt

SEQ ID NO: 801779 - DNA, 15 bp, Homo sapiens
tatgggatcattttc

SEQ ID NO: 801780 - DNA, 15 bp, Homo sapiens
atgggatcattttca

SEQ ID NO: 801781 - DNA, 15 bp, Homo sapiens
tgggatcattttcat

SEQ ID NO: 801782 - DNA, 15 bp, Homo sapiens
gggatcattttcatt

SEQ ID NO: 801783 - DNA, 15 bp, Homo sapiens
ggatcattttcattc

SEQ ID NO: 801784 - DNA, 15 bp, Homo sapiens
gatcattttcattca

SEQ ID NO: 801785 - DNA, 15 bp, Homo sapiens
atcattttcattcaa

SEQ ID NO: 801786 - DNA, 15 bp, Homo sapiens
tcattttcattcaaa

SEQ ID NO: 801787 - DNA, 15 bp, Homo sapiens
cattttcattcaaat

SEQ ID NO: 801788 - DNA, 15 bp, Homo sapiens
attttcattcaaatt

SEQ ID NO: 801789 - DNA, 15 bp, Homo sapiens
ttttcattcaaatta

SEQ ID NO: 801790 - DNA, 15 bp, Homo sapiens
tttcattcaaattat

SEQ ID NO: 801791 - DNA, 15 bp, Homo sapiens
ttcattcaaattatg

SEQ ID NO: 801792 - DNA, 15 bp, Homo sapiens
tcattcaaattatga

SEQ ID NO: 801793 - DNA, 15 bp, Homo sapiens
cattcaaattatgat

SEQ ID NO: 801794 - DNA, 15 bp, Homo sapiens
attcaaattatgata

SEQ ID NO: 801795 - DNA, 15 bp, Homo sapiens
ttcaaattatgatag

SEQ ID NO: 801796 - DNA, 15 bp, Homo sapiens
tcaaattatgataga

SEQ ID NO: 801797 - DNA, 15 bp, Homo sapiens
caaattatgatagaa

SEQ ID NO: 801798 - DNA, 15 bp, Homo sapiens
aaattatgatagaat

SEQ ID NO: 801799 - DNA, 15 bp, Homo sapiens
aattatgatagaatt

SEQ ID NO: 801800 - DNA, 15 bp, Homo sapiens
attatgatagaattt

SEQ ID NO: 801801 - DNA, 15 bp, Homo sapiens
ttatgatagaatttt

SEQ ID NO: 801802 - DNA, 15 bp, Homo sapiens
tatgatagaatttta

SEQ ID NO: 801803 - DNA, 15 bp, Homo sapiens
atgatagaattttaa

SEQ ID NO: 801804 - DNA, 15 bp, Homo sapiens
tgatagaattttaag

SEQ ID NO: 801805 - DNA, 15 bp, Homo sapiens
gatagaattttaaga

SEQ ID NO: 801806 - DNA, 15 bp, Homo sapiens
atagaattttaagat

SEQ ID NO: 801807 - DNA, 15 bp, Homo sapiens
tagaattttaagatc

SEQ ID NO: 801808 - DNA, 15 bp, Homo sapiens
agaattttaagatct

SEQ ID NO: 801809 - DNA, 15 bp, Homo sapiens
gaattttaagatctt

SEQ ID NO: 801810 - DNA, 15 bp, Homo sapiens
aattttaagatctta

SEQ ID NO: 801811 - DNA, 15 bp, Homo sapiens
attttaagatcttag

SEQ ID NO: 801812 - DNA, 15 bp, Homo sapiens
ttttaagatcttagc

SEQ ID NO: 801813 - DNA, 15 bp, Homo sapiens
tttaagatcttagca

SEQ ID NO: 801814 - DNA, 15 bp, Homo sapiens
ttaagatcttagcaa

SEQ ID NO: 801815 - DNA, 15 bp, Homo sapiens
taagatcttagcaaa

SEQ ID NO: 801816 - DNA, 15 bp, Homo sapiens
aagatcttagcaaaa

SEQ ID NO: 801817 - DNA, 15 bp, Homo sapiens
agatcttagcaaaaa

SEQ ID NO: 801818 - DNA, 15 bp, Homo sapiens
gatcttagcaaaaag

SEQ ID NO: 801819 - DNA, 15 bp, Homo sapiens
atcttagcaaaaagc

SEQ ID NO: 801820 - DNA, 15 bp, Homo sapiens
tcttagcaaaaagca

SEQ ID NO: 801821 - DNA, 15 bp, Homo sapiens
cttagcaaaaagcac

SEQ ID NO: 801822 - DNA, 15 bp, Homo sapiens
ttagcaaaaagcact

SEQ ID NO: 801823 - DNA, 15 bp, Homo sapiens
tagcaaaaagcactt

SEQ ID NO: 801824 - DNA, 15 bp, Homo sapiens
agcaaaaagcacttt

SEQ ID NO: 801825 - DNA, 15 bp, Homo sapiens
gcaaaaagcacttta

SEQ ID NO: 801826 - DNA, 15 bp, Homo sapiens
caaaaagcactttag

SEQ ID NO: 801827 - DNA, 15 bp, Homo sapiens
aaaaagcactttagc

SEQ ID NO: 801828 - DNA, 15 bp, Homo sapiens
aaaagcactttagca

SEQ ID NO: 801829 - DNA, 15 bp, Homo sapiens
aaagcactttagcag

SEQ ID NO: 801830 - DNA, 15 bp, Homo sapiens
aagcactttagcagc

SEQ ID NO: 801831 - DNA, 15 bp, Homo sapiens
agcactttagcagcc

SEQ ID NO: 801832 - DNA, 15 bp, Homo sapiens
gcactttagcagcca

SEQ ID NO: 801833 - DNA, 15 bp, Homo sapiens
cactttagcagccac

SEQ ID NO: 801834 - DNA, 15 bp, Homo sapiens
actttagcagccacc

SEQ ID NO: 801835 - DNA, 15 bp, Homo sapiens
ctttagcagccaccc

SEQ ID NO: 801836 - DNA, 15 bp, Homo sapiens
tttagcagccaccca

SEQ ID NO: 801837 - DNA, 15 bp, Homo sapiens
ttagcagccacccaa

SEQ ID NO: 801838 - DNA, 15 bp, Homo sapiens
tagcagccacccaag

SEQ ID NO: 801839 - DNA, 15 bp, Homo sapiens
agcagccacccaagg

SEQ ID NO: 801840 - DNA, 15 bp, Homo sapiens
gcagccacccaaggt

SEQ ID NO: 801841 - DNA, 15 bp, Homo sapiens
cagccacccaaggta

SEQ ID NO: 801842 - DNA, 15 bp, Homo sapiens
agccacccaaggtag

SEQ ID NO: 801843 - DNA, 15 bp, Homo sapiens
gccacccaaggtagc

SEQ ID NO: 801844 - DNA, 15 bp, Homo sapiens
ccacccaaggtagcc

SEQ ID NO: 801845 - DNA, 15 bp, Homo sapiens
cacccaaggtagcct

SEQ ID NO: 801846 - DNA, 15 bp, Homo sapiens
acccaaggtagcctc

SEQ ID NO: 801847 - DNA, 15 bp, Homo sapiens
cccaaggtagcctct

SEQ ID NO: 801848 - DNA, 15 bp, Homo sapiens
ccaaggtagcctcta

SEQ ID NO: 801849 - DNA, 15 bp, Homo sapiens
caaggtagcctctaa

SEQ ID NO: 801850 - DNA, 15 bp, Homo sapiens
aaggtagcctctaat

SEQ ID NO: 801851 - DNA, 15 bp, Homo sapiens
aggtagcctctaata

SEQ ID NO: 801852 - DNA, 15 bp, Homo sapiens
ggtagcctctaatag

SEQ ID NO: 801853 - DNA, 15 bp, Homo sapiens
gtagcctctaatagg

SEQ ID NO: 801854 - DNA, 15 bp, Homo sapiens
tagcctctaataggc

SEQ ID NO: 801855 - DNA, 15 bp, Homo sapiens
agcctctaataggcc

SEQ ID NO: 801856 - DNA, 15 bp, Homo sapiens
gcctctaataggcca

SEQ ID NO: 801857 - DNA, 15 bp, Homo sapiens
cctctaataggccac

SEQ ID NO: 801858 - DNA, 15 bp, Homo sapiens
ctctaataggccaca

SEQ ID NO: 801859 - DNA, 15 bp, Homo sapiens
tctaataggccacat

SEQ ID NO: 801860 - DNA, 15 bp, Homo sapiens
ctaataggccacatc

SEQ ID NO: 801861 - DNA, 15 bp, Homo sapiens
taataggccacatct

SEQ ID NO: 801862 - DNA, 15 bp, Homo sapiens
aataggccacatctc

SEQ ID NO: 801863 - DNA, 15 bp, Homo sapiens
ataggccacatctct

SEQ ID NO: 801864 - DNA, 15 bp, Homo sapiens
taggccacatctctt

SEQ ID NO: 801865 - DNA, 15 bp, Homo sapiens
aggccacatctcttc

SEQ ID NO: 801866 - DNA, 15 bp, Homo sapiens
ggccacatctcttca

SEQ ID NO: 801867 - DNA, 15 bp, Homo sapiens
gccacatctcttcag

SEQ ID NO: 801868 - DNA, 15 bp, Homo sapiens
ccacatctcttcagc

SEQ ID NO: 801869 - DNA, 15 bp, Homo sapiens
cacatctcttcagca

SEQ ID NO: 801870 - DNA, 15 bp, Homo sapiens
acatctcttcagcag

SEQ ID NO: 801871 - DNA, 15 bp, Homo sapiens
catctcttcagcagt

SEQ ID NO: 801872 - DNA, 15 bp, Homo sapiens
atctcttcagcagtt

SEQ ID NO: 801873 - DNA, 15 bp, Homo sapiens
tctcttcagcagttt

SEQ ID NO: 801874 - DNA, 15 bp, Homo sapiens
ctcttcagcagtttc

SEQ ID NO: 801875 - DNA, 15 bp, Homo sapiens
tcttcagcagtttcc

SEQ ID NO: 801876 - DNA, 15 bp, Homo sapiens
cttcagcagtttccc

SEQ ID NO: 801877 - DNA, 15 bp, Homo sapiens
ttcagcagtttccct

SEQ ID NO: 801878 - DNA, 15 bp, Homo sapiens
tcagcagtttccctg

SEQ ID NO: 801879 - DNA, 15 bp, Homo sapiens
cagcagtttccctga

SEQ ID NO: 801880 - DNA, 15 bp, Homo sapiens
agcagtttccctgac

SEQ ID NO: 801881 - DNA, 15 bp, Homo sapiens
gcagtttccctgaca

SEQ ID NO: 801882 - DNA, 15 bp, Homo sapiens
cagtttccctgacag

SEQ ID NO: 801883 - DNA, 15 bp, Homo sapiens
agtttccctgacagg

SEQ ID NO: 801884 - DNA, 15 bp, Homo sapiens
gtttccctgacaggt

SEQ ID NO: 801885 - DNA, 15 bp, Homo sapiens
tttccctgacaggtg

SEQ ID NO: 801886 - DNA, 15 bp, Homo sapiens
ttccctgacaggtga

SEQ ID NO: 801887 - DNA, 15 bp, Homo sapiens
tccctgacaggtgag

SEQ ID NO: 801888 - DNA, 15 bp, Homo sapiens
ccctgacaggtgagc

SEQ ID NO: 801889 - DNA, 15 bp, Homo sapiens
cctgacaggtgagcc

SEQ ID NO: 801890 - DNA, 15 bp, Homo sapiens
ctgacaggtgagcca

SEQ ID NO: 801891 - DNA, 15 bp, Homo sapiens
tgacaggtgagccag

SEQ ID NO: 801892 - DNA, 15 bp, Homo sapiens
gacaggtgagccagt

SEQ ID NO: 801893 - DNA, 15 bp, Homo sapiens
acaggtgagccagtc

SEQ ID NO: 801894 - DNA, 15 bp, Homo sapiens
caggtgagccagtct

SEQ ID NO: 801895 - DNA, 15 bp, Homo sapiens
aggtgagccagtctc

SEQ ID NO: 801896 - DNA, 15 bp, Homo sapiens
ggtgagccagtctcc

SEQ ID NO: 801897 - DNA, 15 bp, Homo sapiens
gtgagccagtctcca

SEQ ID NO: 801898 - DNA, 15 bp, Homo sapiens
tgagccagtctccac

SEQ ID NO: 801899 - DNA, 15 bp, Homo sapiens
gagccagtctccact

SEQ ID NO: 801900 - DNA, 15 bp, Homo sapiens
agccagtctccactc

SEQ ID NO: 801901 - DNA, 15 bp, Homo sapiens
gccagtctccactca

SEQ ID NO: 801902 - DNA, 15 bp, Homo sapiens
ccagtctccactcag

SEQ ID NO: 801903 - DNA, 15 bp, Homo sapiens
cagtctccactcaga

SEQ ID NO: 801904 - DNA, 15 bp, Homo sapiens
agtctccactcagag

SEQ ID NO: 801905 - DNA, 15 bp, Homo sapiens
gtctccactcagaga

SEQ ID NO: 801906 - DNA, 15 bp, Homo sapiens
tctccactcagagac

SEQ ID NO: 801907 - DNA, 15 bp, Homo sapiens
ctccactcagagacc

SEQ ID NO: 801908 - DNA, 15 bp, Homo sapiens
tccactcagagacct

SEQ ID NO: 801909 - DNA, 15 bp, Homo sapiens
ccactcagagacctc

SEQ ID NO: 801910 - DNA, 15 bp, Homo sapiens
cactcagagacctcc

SEQ ID NO: 801911 - DNA, 15 bp, Homo sapiens
actcagagacctcca

SEQ ID NO: 801912 - DNA, 15 bp, Homo sapiens
ctcagagacctccat

SEQ ID NO: 801913 - DNA, 15 bp, Homo sapiens
tcagagacctccatg

SEQ ID NO: 801914 - DNA, 15 bp, Homo sapiens
cagagacctccatga

SEQ ID NO: 801915 - DNA, 15 bp, Homo sapiens
agagacctccatgag

SEQ ID NO: 801916 - DNA, 15 bp, Homo sapiens
gagacctccatgagt

SEQ ID NO: 801917 - DNA, 15 bp, Homo sapiens
agacctccatgagta

SEQ ID NO: 801918 - DNA, 15 bp, Homo sapiens
gacctccatgagtag

SEQ ID NO: 801919 - DNA, 15 bp, Homo sapiens
acctccatgagtagg

SEQ ID NO: 801920 - DNA, 15 bp, Homo sapiens
cctccatgagtaggc

SEQ ID NO: 801921 - DNA, 15 bp, Homo sapiens
ctccatgagtaggcg

SEQ ID NO: 801922 - DNA, 15 bp, Homo sapiens
tccatgagtaggcgc

SEQ ID NO: 801923 - DNA, 15 bp, Homo sapiens
ccatgagtaggcgct

SEQ ID NO: 801924 - DNA, 15 bp, Homo sapiens
catgagtaggcgctg

SEQ ID NO: 801925 - DNA, 15 bp, Homo sapiens
atgagtaggcgctgc

SEQ ID NO: 801926 - DNA, 15 bp, Homo sapiens
tgagtaggcgctgct

SEQ ID NO: 801927 - DNA, 15 bp, Homo sapiens
gagtaggcgctgctc

SEQ ID NO: 801928 - DNA, 15 bp, Homo sapiens
agtaggcgctgctca

SEQ ID NO: 801929 - DNA, 15 bp, Homo sapiens
gtaggcgctgctcac

SEQ ID NO: 801930 - DNA, 15 bp, Homo sapiens
taggcgctgctcaca

SEQ ID NO: 801931 - DNA, 15 bp, Homo sapiens
aggcgctgctcacac

SEQ ID NO: 801932 - DNA, 15 bp, Homo sapiens
ggcgctgctcacacc

SEQ ID NO: 801933 - DNA, 15 bp, Homo sapiens
gcgctgctcacacct

SEQ ID NO: 801934 - DNA, 15 bp, Homo sapiens
cgctgctcacaccta

SEQ ID NO: 801935 - DNA, 15 bp, Homo sapiens
gctgctcacacctaa

SEQ ID NO: 801936 - DNA, 15 bp, Homo sapiens
ctgctcacacctaaa

SEQ ID NO: 801937 - DNA, 15 bp, Homo sapiens
tgctcacacctaaag

SEQ ID NO: 801938 - DNA, 15 bp, Homo sapiens
gctcacacctaaaga

SEQ ID NO: 801939 - DNA, 15 bp, Homo sapiens
ctcacacctaaagac

SEQ ID NO: 801940 - DNA, 15 bp, Homo sapiens
tcacacctaaagacc

SEQ ID NO: 801941 - DNA, 15 bp, Homo sapiens
cacacctaaagacca

SEQ ID NO: 801942 - DNA, 15 bp, Homo sapiens
acacctaaagaccac

SEQ ID NO: 801943 - DNA, 15 bp, Homo sapiens
cacctaaagaccaca

SEQ ID NO: 801944 - DNA, 15 bp, Homo sapiens
acctaaagaccacag

SEQ ID NO: 801945 - DNA, 15 bp, Homo sapiens
cctaaagaccacagc

SEQ ID NO: 801946 - DNA, 15 bp, Homo sapiens
ctaaagaccacagct

SEQ ID NO: 801947 - DNA, 15 bp, Homo sapiens
taaagaccacagctc

SEQ ID NO: 801948 - DNA, 15 bp, Homo sapiens
aaagaccacagctct

SEQ ID NO: 801949 - DNA, 15 bp, Homo sapiens
aagaccacagctctc

SEQ ID NO: 801950 - DNA, 15 bp, Homo sapiens
agaccacagctctct

SEQ ID NO: 801951 - DNA, 15 bp, Homo sapiens
gaccacagctctctg

SEQ ID NO: 801952 - DNA, 15 bp, Homo sapiens
accacagctctctgc

SEQ ID NO: 801953 - DNA, 15 bp, Homo sapiens
ccacagctctctgct

SEQ ID NO: 801954 - DNA, 15 bp, Homo sapiens
cacagctctctgctt

SEQ ID NO: 801955 - DNA, 15 bp, Homo sapiens
acagctctctgcttc

SEQ ID NO: 801956 - DNA, 15 bp, Homo sapiens
cagctctctgcttct

SEQ ID NO: 801957 - DNA, 15 bp, Homo sapiens
agctctctgcttctc

SEQ ID NO: 801958 - DNA, 15 bp, Homo sapiens
gctctctgcttctct

SEQ ID NO: 801959 - DNA, 15 bp, Homo sapiens
ctctctgcttctctt

SEQ ID NO: 801960 - DNA, 15 bp, Homo sapiens
tctctgcttctcttc

SEQ ID NO: 801961 - DNA, 15 bp, Homo sapiens
ctctgcttctcttca

SEQ ID NO: 801962 - DNA, 15 bp, Homo sapiens
tctgcttctcttcat

SEQ ID NO: 801963 - DNA, 15 bp, Homo sapiens
ctgcttctcttcata

SEQ ID NO: 801964 - DNA, 15 bp, Homo sapiens
tgcttctcttcatat

SEQ ID NO: 801965 - DNA, 15 bp, Homo sapiens
gcttctcttcatatg

SEQ ID NO: 801966 - DNA, 15 bp, Homo sapiens
cttctcttcatatgc

SEQ ID NO: 801967 - DNA, 15 bp, Homo sapiens
ttctcttcatatgcc

SEQ ID NO: 801968 - DNA, 15 bp, Homo sapiens
tctcttcatatgccc

SEQ ID NO: 801969 - DNA, 15 bp, Homo sapiens
ctcttcatatgccct

SEQ ID NO: 801970 - DNA, 15 bp, Homo sapiens
tcttcatatgccctg

SEQ ID NO: 801971 - DNA, 15 bp, Homo sapiens
cttcatatgccctga

SEQ ID NO: 801972 - DNA, 15 bp, Homo sapiens
ttcatatgccctgac

SEQ ID NO: 801973 - DNA, 15 bp, Homo sapiens
tcatatgccctgact

SEQ ID NO: 801974 - DNA, 15 bp, Homo sapiens
catatgccctgactt

SEQ ID NO: 801975 - DNA, 15 bp, Homo sapiens
atatgccctgacttt

SEQ ID NO: 801976 - DNA, 15 bp, Homo sapiens
tatgccctgactttg

SEQ ID NO: 801977 - DNA, 15 bp, Homo sapiens
atgccctgactttgg

SEQ ID NO: 801978 - DNA, 15 bp, Homo sapiens
tgccctgactttgga

SEQ ID NO: 801979 - DNA, 15 bp, Homo sapiens
gccctgactttggat

SEQ ID NO: 801980 - DNA, 15 bp, Homo sapiens
ccctgactttggatg

SEQ ID NO: 801981 - DNA, 15 bp, Homo sapiens
cctgactttggatgc

SEQ ID NO: 801982 - DNA, 15 bp, Homo sapiens
ctgactttggatgct

SEQ ID NO: 801983 - DNA, 15 bp, Homo sapiens
tgactttggatgctc

SEQ ID NO: 801984 - DNA, 15 bp, Homo sapiens
gactttggatgctcc

SEQ ID NO: 801985 - DNA, 15 bp, Homo sapiens
actttggatgctcct

SEQ ID NO: 801986 - DNA, 15 bp, Homo sapiens
ctttggatgctcctg

SEQ ID NO: 801987 - DNA, 15 bp, Homo sapiens
tttggatgctcctgc

SEQ ID NO: 801988 - DNA, 15 bp, Homo sapiens
ttggatgctcctgca

SEQ ID NO: 801989 - DNA, 15 bp, Homo sapiens
tggatgctcctgcag

SEQ ID NO: 801990 - DNA, 15 bp, Homo sapiens
ggatgctcctgcagt

SEQ ID NO: 801991 - DNA, 15 bp, Homo sapiens
gatgctcctgcagtg

SEQ ID NO: 801992 - DNA, 15 bp, Homo sapiens
atgctcctgcagtgg

SEQ ID NO: 801993 - DNA, 15 bp, Homo sapiens
tgctcctgcagtgga

SEQ ID NO: 801994 - DNA, 15 bp, Homo sapiens
gctcctgcagtggag

SEQ ID NO: 801995 - DNA, 15 bp, Homo sapiens
ctcctgcagtggagg

SEQ ID NO: 801996 - DNA, 15 bp, Homo sapiens
tcctgcagtggaggc

SEQ ID NO: 801997 - DNA, 15 bp, Homo sapiens
cctgcagtggaggct

SEQ ID NO: 801998 - DNA, 15 bp, Homo sapiens
ctgcagtggaggctg

SEQ ID NO: 801999 - DNA, 15 bp, Homo sapiens
tgcagtggaggctga

SEQ ID NO: 802000 - DNA, 15 bp, Homo sapiens
gcagtggaggctgac

SEQ ID NO: 802001 - DNA, 15 bp, Homo sapiens
cagtggaggctgaca

SEQ ID NO: 802002 - DNA, 15 bp, Homo sapiens
agtggaggctgacac

SEQ ID NO: 802003 - DNA, 15 bp, Homo sapiens
gtggaggctgacaca

SEQ ID NO: 802004 - DNA, 15 bp, Homo sapiens
tggaggctgacacaa

SEQ ID NO: 802005 - DNA, 15 bp, Homo sapiens
ggaggctgacacaaa

SEQ ID NO: 802006 - DNA, 15 bp, Homo sapiens
gaggctgacacaaat

SEQ ID NO: 802007 - DNA, 15 bp, Homo sapiens
aggctgacacaaata

SEQ ID NO: 802008 - DNA, 15 bp, Homo sapiens
ggctgacacaaatag

SEQ ID NO: 802009 - DNA, 15 bp, Homo sapiens
gctgacacaaataga

SEQ ID NO: 802010 - DNA, 15 bp, Homo sapiens
ctgacacaaatagat

SEQ ID NO: 802011 - DNA, 15 bp, Homo sapiens
tgacacaaatagatt

SEQ ID NO: 802012 - DNA, 15 bp, Homo sapiens
gacacaaatagattt

SEQ ID NO: 802013 - DNA, 15 bp, Homo sapiens
acacaaatagatttt

SEQ ID NO: 802014 - DNA, 15 bp, Homo sapiens
cacaaatagattttg

SEQ ID NO: 802015 - DNA, 15 bp, Homo sapiens
acaaatagattttga

SEQ ID NO: 802016 - DNA, 15 bp, Homo sapiens
caaatagattttgaa

SEQ ID NO: 802017 - DNA, 15 bp, Homo sapiens
aaatagattttgaaa

SEQ ID NO: 802018 - DNA, 15 bp, Homo sapiens
aatagattttgaaaa

SEQ ID NO: 802019 - DNA, 15 bp, Homo sapiens
atagattttgaaaag

SEQ ID NO: 802020 - DNA, 15 bp, Homo sapiens
tagattttgaaaagt

SEQ ID NO: 802021 - DNA, 15 bp, Homo sapiens
agattttgaaaagtt

SEQ ID NO: 802022 - DNA, 15 bp, Homo sapiens
gattttgaaaagttg

SEQ ID NO: 802023 - DNA, 15 bp, Homo sapiens
attttgaaaagttgc

SEQ ID NO: 802024 - DNA, 15 bp, Homo sapiens
ttttgaaaagttgct

SEQ ID NO: 802025 - DNA, 15 bp, Homo sapiens
tttgaaaagttgctt

SEQ ID NO: 802026 - DNA, 15 bp, Homo sapiens
ttgaaaagttgcttc

SEQ ID NO: 802027 - DNA, 15 bp, Homo sapiens
tgaaaagttgcttcc

SEQ ID NO: 802028 - DNA, 15 bp, Homo sapiens
gaaaagttgcttcca

SEQ ID NO: 802029 - DNA, 15 bp, Homo sapiens
aaaagttgcttccaa

SEQ ID NO: 802030 - DNA, 15 bp, Homo sapiens
aaagttgcttccaaa

SEQ ID NO: 802031 - DNA, 15 bp, Homo sapiens
aagttgcttccaaaa

SEQ ID NO: 802032 - DNA, 15 bp, Homo sapiens
agttgcttccaaaat

SEQ ID NO: 802033 - DNA, 15 bp, Homo sapiens
gttgcttccaaaatt

SEQ ID NO: 802034 - DNA, 15 bp, Homo sapiens
ttgcttccaaaattt

SEQ ID NO: 802035 - DNA, 15 bp, Homo sapiens
tgcttccaaaatttt

SEQ ID NO: 802036 - DNA, 15 bp, Homo sapiens
gcttccaaaattttt

SEQ ID NO: 802037 - DNA, 15 bp, Homo sapiens
cttccaaaattttta

SEQ ID NO: 802038 - DNA, 15 bp, Homo sapiens
ttccaaaatttttag

SEQ ID NO: 802039 - DNA, 15 bp, Homo sapiens
tccaaaatttttaga

SEQ ID NO: 802040 - DNA, 15 bp, Homo sapiens
ccaaaatttttagaa

SEQ ID NO: 802041 - DNA, 15 bp, Homo sapiens
caaaatttttagaag

SEQ ID NO: 802042 - DNA, 15 bp, Homo sapiens
aaaatttttagaagc

SEQ ID NO: 802043 - DNA, 15 bp, Homo sapiens
aaatttttagaagca

SEQ ID NO: 802044 - DNA, 15 bp, Homo sapiens
aatttttagaagcac

SEQ ID NO: 802045 - DNA, 15 bp, Homo sapiens
atttttagaagcact

SEQ ID NO: 802046 - DNA, 15 bp, Homo sapiens
tttttagaagcactg

SEQ ID NO: 802047 - DNA, 15 bp, Homo sapiens
ttttagaagcactgc

SEQ ID NO: 802048 - DNA, 15 bp, Homo sapiens
tttagaagcactgca

SEQ ID NO: 802049 - DNA, 15 bp, Homo sapiens
ttagaagcactgcat

SEQ ID NO: 802050 - DNA, 15 bp, Homo sapiens
tagaagcactgcatt

SEQ ID NO: 802051 - DNA, 15 bp, Homo sapiens
agaagcactgcattt

SEQ ID NO: 802052 - DNA, 15 bp, Homo sapiens
gaagcactgcatttc

SEQ ID NO: 802053 - DNA, 15 bp, Homo sapiens
aagcactgcatttca

SEQ ID NO: 802054 - DNA, 15 bp, Homo sapiens
agcactgcatttcaa

SEQ ID NO: 802055 - DNA, 15 bp, Homo sapiens
gcactgcatttcaag

SEQ ID NO: 802056 - DNA, 15 bp, Homo sapiens
cactgcatttcaaga

SEQ ID NO: 802057 - DNA, 15 bp, Homo sapiens
actgcatttcaagat

SEQ ID NO: 802058 - DNA, 15 bp, Homo sapiens
ctgcatttcaagatc

SEQ ID NO: 802059 - DNA, 15 bp, Homo sapiens
tgcatttcaagatca

SEQ ID NO: 802060 - DNA, 15 bp, Homo sapiens
gcatttcaagatcag

SEQ ID NO: 802061 - DNA, 15 bp, Homo sapiens
catttcaagatcagt

SEQ ID NO: 802062 - DNA, 15 bp, Homo sapiens
atttcaagatcagtg

SEQ ID NO: 802063 - DNA, 15 bp, Homo sapiens
tttcaagatcagtgt

SEQ ID NO: 802064 - DNA, 15 bp, Homo sapiens
ttcaagatcagtgtg

SEQ ID NO: 802065 - DNA, 15 bp, Homo sapiens
tcaagatcagtgtga

SEQ ID NO: 802066 - DNA, 15 bp, Homo sapiens
caagatcagtgtgat

SEQ ID NO: 802067 - DNA, 15 bp, Homo sapiens
aagatcagtgtgatt

SEQ ID NO: 802068 - DNA, 15 bp, Homo sapiens
agatcagtgtgattt

SEQ ID NO: 802069 - DNA, 15 bp, Homo sapiens
gatcagtgtgatttt

SEQ ID NO: 802070 - DNA, 15 bp, Homo sapiens
atcagtgtgatttta

SEQ ID NO: 802071 - DNA, 15 bp, Homo sapiens
tcagtgtgattttat

SEQ ID NO: 802072 - DNA, 15 bp, Homo sapiens
cagtgtgattttatc

SEQ ID NO: 802073 - DNA, 15 bp, Homo sapiens
agtgtgattttatct

SEQ ID NO: 802074 - DNA, 15 bp, Homo sapiens
gtgtgattttatctg

SEQ ID NO: 802075 - DNA, 15 bp, Homo sapiens
tgtgattttatctgg

SEQ ID NO: 802076 - DNA, 15 bp, Homo sapiens
gtgattttatctggg

SEQ ID NO: 802077 - DNA, 15 bp, Homo sapiens
tgattttatctggga

SEQ ID NO: 802078 - DNA, 15 bp, Homo sapiens
gattttatctgggaa

SEQ ID NO: 802079 - DNA, 15 bp, Homo sapiens
attttatctgggaag

SEQ ID NO: 802080 - DNA, 15 bp, Homo sapiens
ttttatctgggaagg

SEQ ID NO: 802081 - DNA, 15 bp, Homo sapiens
tttatctgggaagga

SEQ ID NO: 802082 - DNA, 15 bp, Homo sapiens
ttatctgggaaggaa

SEQ ID NO: 802083 - DNA, 15 bp, Homo sapiens
tatctgggaaggaag

SEQ ID NO: 802084 - DNA, 15 bp, Homo sapiens
atctgggaaggaagt

SEQ ID NO: 802085 - DNA, 15 bp, Homo sapiens
tctgggaaggaagtt

SEQ ID NO: 802086 - DNA, 15 bp, Homo sapiens
ctgggaaggaagtta

SEQ ID NO: 802087 - DNA, 15 bp, Homo sapiens
tgggaaggaagttag

SEQ ID NO: 802088 - DNA, 15 bp, Homo sapiens
gggaaggaagttaga

SEQ ID NO: 802089 - DNA, 15 bp, Homo sapiens
ggaaggaagttagag

SEQ ID NO: 802090 - DNA, 15 bp, Homo sapiens
gaaggaagttagagg

SEQ ID NO: 802091 - DNA, 15 bp, Homo sapiens
aaggaagttagaggc

SEQ ID NO: 802092 - DNA, 15 bp, Homo sapiens
aggaagttagaggca

SEQ ID NO: 802093 - DNA, 15 bp, Homo sapiens
ggaagttagaggcag

SEQ ID NO: 802094 - DNA, 15 bp, Homo sapiens
gaagttagaggcagg

SEQ ID NO: 802095 - DNA, 15 bp, Homo sapiens
aagttagaggcagga

SEQ ID NO: 802096 - DNA, 15 bp, Homo sapiens
agttagaggcaggat

SEQ ID NO: 802097 - DNA, 15 bp, Homo sapiens
gttagaggcaggatg

SEQ ID NO: 802098 - DNA, 15 bp, Homo sapiens
ttagaggcaggatgg

SEQ ID NO: 802099 - DNA, 15 bp, Homo sapiens
tagaggcaggatggc

SEQ ID NO: 802100 - DNA, 15 bp, Homo sapiens
agaggcaggatggcg

SEQ ID NO: 802101 - DNA, 15 bp, Homo sapiens
gaggcaggatggcgg

SEQ ID NO: 802102 - DNA, 15 bp, Homo sapiens
aggcaggatggcggg

SEQ ID NO: 802103 - DNA, 15 bp, Homo sapiens
ggcaggatggcgggc

SEQ ID NO: 802104 - DNA, 15 bp, Homo sapiens
gcaggatggcgggca

SEQ ID NO: 802105 - DNA, 15 bp, Homo sapiens
caggatggcgggcaa

SEQ ID NO: 802106 - DNA, 15 bp, Homo sapiens
aggatggcgggcaaa

SEQ ID NO: 802107 - DNA, 15 bp, Homo sapiens
ggatggcgggcaaaa

SEQ ID NO: 802108 - DNA, 15 bp, Homo sapiens
gatggcgggcaaaat

SEQ ID NO: 802109 - DNA, 15 bp, Homo sapiens
atggcgggcaaaata

SEQ ID NO: 802110 - DNA, 15 bp, Homo sapiens
tggcgggcaaaatag

SEQ ID NO: 802111 - DNA, 15 bp, Homo sapiens
ggcgggcaaaatagc

SEQ ID NO: 802112 - DNA, 15 bp, Homo sapiens
gcgggcaaaatagca

SEQ ID NO: 802113 - DNA, 15 bp, Homo sapiens
cgggcaaaatagcac

SEQ ID NO: 802114 - DNA, 15 bp, Homo sapiens
gggcaaaatagcaca

SEQ ID NO: 802115 - DNA, 15 bp, Homo sapiens
ggcaaaatagcacag

SEQ ID NO: 802116 - DNA, 15 bp, Homo sapiens
gcaaaatagcacaga

SEQ ID NO: 802117 - DNA, 15 bp, Homo sapiens
caaaatagcacagaa

SEQ ID NO: 802118 - DNA, 15 bp, Homo sapiens
aaaatagcacagaac

SEQ ID NO: 802119 - DNA, 15 bp, Homo sapiens
aaatagcacagaacc

SEQ ID NO: 802120 - DNA, 15 bp, Homo sapiens
aatagcacagaacca

SEQ ID NO: 802121 - DNA, 15 bp, Homo sapiens
atagcacagaaccaa

SEQ ID NO: 802122 - DNA, 15 bp, Homo sapiens
tagcacagaaccaag

SEQ ID NO: 802123 - DNA, 15 bp, Homo sapiens
agcacagaaccaagc

SEQ ID NO: 802124 - DNA, 15 bp, Homo sapiens
gcacagaaccaagcc

SEQ ID NO: 802125 - DNA, 15 bp, Homo sapiens
cacagaaccaagcca

SEQ ID NO: 802126 - DNA, 15 bp, Homo sapiens
acagaaccaagccat

SEQ ID NO: 802127 - DNA, 15 bp, Homo sapiens
cagaaccaagccatt

SEQ ID NO: 802128 - DNA, 15 bp, Homo sapiens
agaaccaagccatta

SEQ ID NO: 802129 - DNA, 15 bp, Homo sapiens
gaaccaagccattat

SEQ ID NO: 802130 - DNA, 15 bp, Homo sapiens
aaccaagccattatt

SEQ ID NO: 802131 - DNA, 15 bp, Homo sapiens
accaagccattatta

SEQ ID NO: 802132 - DNA, 15 bp, Homo sapiens
ccaagccattattat

SEQ ID NO: 802133 - DNA, 15 bp, Homo sapiens
caagccattattata

SEQ ID NO: 802134 - DNA, 15 bp, Homo sapiens
aagccattattatag

SEQ ID NO: 802135 - DNA, 15 bp, Homo sapiens
agccattattataga

SEQ ID NO: 802136 - DNA, 15 bp, Homo sapiens
gccattattatagat

SEQ ID NO: 802137 - DNA, 15 bp, Homo sapiens
ccattattatagatg

SEQ ID NO: 802138 - DNA, 15 bp, Homo sapiens
cattattatagatgg

SEQ ID NO: 802139 - DNA, 15 bp, Homo sapiens
attattatagatgga

SEQ ID NO: 802140 - DNA, 15 bp, Homo sapiens
ttattatagatggac

SEQ ID NO: 802141 - DNA, 15 bp, Homo sapiens
tattatagatggaca

SEQ ID NO: 802142 - DNA, 15 bp, Homo sapiens
attatagatggacaa

SEQ ID NO: 802143 - DNA, 15 bp, Homo sapiens
ttatagatggacaaa

SEQ ID NO: 802144 - DNA, 15 bp, Homo sapiens
tatagatggacaaag

SEQ ID NO: 802145 - DNA, 15 bp, Homo sapiens
atagatggacaaagc

SEQ ID NO: 802146 - DNA, 15 bp, Homo sapiens
tagatggacaaagcg

SEQ ID NO: 802147 - DNA, 15 bp, Homo sapiens
agatggacaaagcgt

SEQ ID NO: 802148 - DNA, 15 bp, Homo sapiens
gatggacaaagcgtg

SEQ ID NO: 802149 - DNA, 15 bp, Homo sapiens
atggacaaagcgtgt

SEQ ID NO: 802150 - DNA, 15 bp, Homo sapiens
tggacaaagcgtgtt

SEQ ID NO: 802151 - DNA, 15 bp, Homo sapiens
ggacaaagcgtgttc

SEQ ID NO: 802152 - DNA, 15 bp, Homo sapiens
gacaaagcgtgttct

SEQ ID NO: 802153 - DNA, 15 bp, Homo sapiens
acaaagcgtgttctt

SEQ ID NO: 802154 - DNA, 15 bp, Homo sapiens
caaagcgtgttcttt

SEQ ID NO: 802155 - DNA, 15 bp, Homo sapiens
aaagcgtgttctttg

SEQ ID NO: 802156 - DNA, 15 bp, Homo sapiens
aagcgtgttctttga

SEQ ID NO: 802157 - DNA, 15 bp, Homo sapiens
agcgtgttctttgat

SEQ ID NO: 802158 - DNA, 15 bp, Homo sapiens
gcgtgttctttgatt

SEQ ID NO: 802159 - DNA, 15 bp, Homo sapiens
cgtgttctttgattt

SEQ ID NO: 802160 - DNA, 15 bp, Homo sapiens
gtgttctttgatttg

SEQ ID NO: 802161 - DNA, 15 bp, Homo sapiens
tgttctttgatttgt

SEQ ID NO: 802162 - DNA, 15 bp, Homo sapiens
gttctttgatttgtg

SEQ ID NO: 802163 - DNA, 15 bp, Homo sapiens
ttctttgatttgtga

SEQ ID NO: 802164 - DNA, 15 bp, Homo sapiens
tctttgatttgtgag

SEQ ID NO: 802165 - DNA, 15 bp, Homo sapiens
ctttgatttgtgagc

SEQ ID NO: 802166 - DNA, 15 bp, Homo sapiens
tttgatttgtgagct

SEQ ID NO: 802167 - DNA, 15 bp, Homo sapiens
ttgatttgtgagcta

SEQ ID NO: 802168 - DNA, 15 bp, Homo sapiens
tgatttgtgagctac

SEQ ID NO: 802169 - DNA, 15 bp, Homo sapiens
gatttgtgagctaca

SEQ ID NO: 802170 - DNA, 15 bp, Homo sapiens
atttgtgagctacag

SEQ ID NO: 802171 - DNA, 15 bp, Homo sapiens
tttgtgagctacagt

SEQ ID NO: 802172 - DNA, 15 bp, Homo sapiens
ttgtgagctacagtt

SEQ ID NO: 802173 - DNA, 15 bp, Homo sapiens
tgtgagctacagtta

SEQ ID NO: 802174 - DNA, 15 bp, Homo sapiens
gtgagctacagttat

SEQ ID NO: 802175 - DNA, 15 bp, Homo sapiens
tgagctacagttatt

SEQ ID NO: 802176 - DNA, 15 bp, Homo sapiens
gagctacagttattc

SEQ ID NO: 802177 - DNA, 15 bp, Homo sapiens
agctacagttattct

SEQ ID NO: 802178 - DNA, 15 bp, Homo sapiens
gctacagttattcta

SEQ ID NO: 802179 - DNA, 15 bp, Homo sapiens
ctacagttattctaa

SEQ ID NO: 802180 - DNA, 15 bp, Homo sapiens
tacagttattctaat

SEQ ID NO: 802181 - DNA, 15 bp, Homo sapiens
acagttattctaatt

SEQ ID NO: 802182 - DNA, 15 bp, Homo sapiens
cagttattctaattg

SEQ ID NO: 802183 - DNA, 15 bp, Homo sapiens
agttattctaattga

SEQ ID NO: 802184 - DNA, 15 bp, Homo sapiens
gttattctaattgat

SEQ ID NO: 802185 - DNA, 15 bp, Homo sapiens
ttattctaattgatt

SEQ ID NO: 802186 - DNA, 15 bp, Homo sapiens
tattctaattgattt

SEQ ID NO: 802187 - DNA, 15 bp, Homo sapiens
attctaattgatttc

SEQ ID NO: 802188 - DNA, 15 bp, Homo sapiens
ttctaattgatttct

SEQ ID NO: 802189 - DNA, 15 bp, Homo sapiens
tctaattgatttctg

SEQ ID NO: 802190 - DNA, 15 bp, Homo sapiens
ctaattgatttctgc

SEQ ID NO: 802191 - DNA, 15 bp, Homo sapiens
taattgatttctgca

SEQ ID NO: 802192 - DNA, 15 bp, Homo sapiens
aattgatttctgcat

SEQ ID NO: 802193 - DNA, 15 bp, Homo sapiens
attgatttctgcata

SEQ ID NO: 802194 - DNA, 15 bp, Homo sapiens
ttgatttctgcatac

SEQ ID NO: 802195 - DNA, 15 bp, Homo sapiens
tgatttctgcatact

SEQ ID NO: 802196 - DNA, 15 bp, Homo sapiens
gatttctgcatactt

SEQ ID NO: 802197 - DNA, 15 bp, Homo sapiens
atttctgcatacttg

SEQ ID NO: 802198 - DNA, 15 bp, Homo sapiens
tttctgcatacttgt

SEQ ID NO: 802199 - DNA, 15 bp, Homo sapiens
ttctgcatacttgtg

SEQ ID NO: 802200 - DNA, 15 bp, Homo sapiens
tctgcatacttgtgg

SEQ ID NO: 802201 - DNA, 15 bp, Homo sapiens
ctgcatacttgtgga

SEQ ID NO: 802202 - DNA, 15 bp, Homo sapiens
tgcatacttgtggat

SEQ ID NO: 802203 - DNA, 15 bp, Homo sapiens
gcatacttgtggata

SEQ ID NO: 802204 - DNA, 15 bp, Homo sapiens
catacttgtggatag

SEQ ID NO: 802205 - DNA, 15 bp, Homo sapiens
atacttgtggatagg

SEQ ID NO: 802206 - DNA, 15 bp, Homo sapiens
tacttgtggataggg

SEQ ID NO: 802207 - DNA, 15 bp, Homo sapiens
acttgtggataggga

SEQ ID NO: 802208 - DNA, 15 bp, Homo sapiens
cttgtggatagggat

SEQ ID NO: 802209 - DNA, 15 bp, Homo sapiens
ttgtggatagggatc

SEQ ID NO: 802210 - DNA, 15 bp, Homo sapiens
tgtggatagggatct

SEQ ID NO: 802211 - DNA, 15 bp, Homo sapiens
gtggatagggatctg

SEQ ID NO: 802212 - DNA, 15 bp, Homo sapiens
tggatagggatctgc

SEQ ID NO: 802213 - DNA, 15 bp, Homo sapiens
ggatagggatctgcc

SEQ ID NO: 802214 - DNA, 15 bp, Homo sapiens
gatagggatctgccc

SEQ ID NO: 802215 - DNA, 15 bp, Homo sapiens
atagggatctgccct

SEQ ID NO: 802216 - DNA, 15 bp, Homo sapiens
tagggatctgccctg

SEQ ID NO: 802217 - DNA, 15 bp, Homo sapiens
agggatctgccctgt

SEQ ID NO: 802218 - DNA, 15 bp, Homo sapiens
gggatctgccctgtt

SEQ ID NO: 802219 - DNA, 15 bp, Homo sapiens
ggatctgccctgttc

SEQ ID NO: 802220 - DNA, 15 bp, Homo sapiens
gatctgccctgttcc

SEQ ID NO: 802221 - DNA, 15 bp, Homo sapiens
atctgccctgttcca

SEQ ID NO: 802222 - DNA, 15 bp, Homo sapiens
tctgccctgttccat

SEQ ID NO: 802223 - DNA, 15 bp, Homo sapiens
ctgccctgttccatt

SEQ ID NO: 802224 - DNA, 15 bp, Homo sapiens
tgccctgttccattt

SEQ ID NO: 802225 - DNA, 15 bp, Homo sapiens
gccctgttccattta

SEQ ID NO: 802226 - DNA, 15 bp, Homo sapiens
ccctgttccatttat

SEQ ID NO: 802227 - DNA, 15 bp, Homo sapiens
cctgttccatttatt

SEQ ID NO: 802228 - DNA, 15 bp, Homo sapiens
ctgttccatttattt

SEQ ID NO: 802229 - DNA, 15 bp, Homo sapiens
tgttccatttatttt

SEQ ID NO: 802230 - DNA, 15 bp, Homo sapiens
gttccatttattttt

SEQ ID NO: 802231 - DNA, 15 bp, Homo sapiens
ttccatttatttttc

SEQ ID NO: 802232 - DNA, 15 bp, Homo sapiens
tccatttatttttct

SEQ ID NO: 802233 - DNA, 15 bp, Homo sapiens
ccatttatttttctc

SEQ ID NO: 802234 - DNA, 15 bp, Homo sapiens
catttatttttctct

SEQ ID NO: 802235 - DNA, 15 bp, Homo sapiens
atttatttttctctt

SEQ ID NO: 802236 - DNA, 15 bp, Homo sapiens
tttatttttctcttg

SEQ ID NO: 802237 - DNA, 15 bp, Homo sapiens
ttatttttctcttga

SEQ ID NO: 802238 - DNA, 15 bp, Homo sapiens
tatttttctcttgac

SEQ ID NO: 802239 - DNA, 15 bp, Homo sapiens
atttttctcttgaca

SEQ ID NO: 802240 - DNA, 15 bp, Homo sapiens
tttttctcttgacaa

SEQ ID NO: 802241 - DNA, 15 bp, Homo sapiens
ttttctcttgacaag

SEQ ID NO: 802242 - DNA, 15 bp, Homo sapiens
tttctcttgacaagt

SEQ ID NO: 802243 - DNA, 15 bp, Homo sapiens
ttctcttgacaagta

SEQ ID NO: 802244 - DNA, 15 bp, Homo sapiens
tctcttgacaagtaa

SEQ ID NO: 802245 - DNA, 15 bp, Homo sapiens
ctcttgacaagtaag

SEQ ID NO: 802246 - DNA, 15 bp, Homo sapiens
tcttgacaagtaaga

SEQ ID NO: 802247 - DNA, 15 bp, Homo sapiens
cttgacaagtaagat

SEQ ID NO: 802248 - DNA, 15 bp, Homo sapiens
ttgacaagtaagatg

SEQ ID NO: 802249 - DNA, 15 bp, Homo sapiens
tgacaagtaagatgt

SEQ ID NO: 802250 - DNA, 15 bp, Homo sapiens
gacaagtaagatgtg

SEQ ID NO: 802251 - DNA, 15 bp, Homo sapiens
acaagtaagatgtga

SEQ ID NO: 802252 - DNA, 15 bp, Homo sapiens
caagtaagatgtgaa

SEQ ID NO: 802253 - DNA, 15 bp, Homo sapiens
aagtaagatgtgaaa

SEQ ID NO: 802254 - DNA, 15 bp, Homo sapiens
agtaagatgtgaaat

SEQ ID NO: 802255 - DNA, 15 bp, Homo sapiens
gtaagatgtgaaatg

SEQ ID NO: 802256 - DNA, 15 bp, Homo sapiens
taagatgtgaaatgt

SEQ ID NO: 802257 - DNA, 15 bp, Homo sapiens
aagatgtgaaatgtt

SEQ ID NO: 802258 - DNA, 15 bp, Homo sapiens
agatgtgaaatgttg

SEQ ID NO: 802259 - DNA, 15 bp, Homo sapiens
gatgtgaaatgttgt

SEQ ID NO: 802260 - DNA, 15 bp, Homo sapiens
atgtgaaatgttgtt

SEQ ID NO: 802261 - DNA, 15 bp, Homo sapiens
tgtgaaatgttgttc

SEQ ID NO: 802262 - DNA, 15 bp, Homo sapiens
ctccaaacccctgtc

SEQ ID NO: 802263 - DNA, 15 bp, Homo sapiens
tccaaacccctgtcc

SEQ ID NO: 802264 - DNA, 15 bp, Homo sapiens
ccaaacccctgtcct

SEQ ID NO: 802265 - DNA, 15 bp, Homo sapiens
caaacccctgtcctt

SEQ ID NO: 802266 - DNA, 15 bp, Homo sapiens
aaacccctgtccttg

SEQ ID NO: 802267 - DNA, 15 bp, Homo sapiens
aacccctgtccttgt

SEQ ID NO: 802268 - DNA, 15 bp, Homo sapiens
acccctgtccttgtt

SEQ ID NO: 802269 - DNA, 15 bp, Homo sapiens
cccctgtccttgttt

SEQ ID NO: 802270 - DNA, 15 bp, Homo sapiens
ccctgtccttgtttg

SEQ ID NO: 802271 - DNA, 15 bp, Homo sapiens
cctgtccttgtttga

SEQ ID NO: 802272 - DNA, 15 bp, Homo sapiens
ctgtccttgtttgat

SEQ ID NO: 802273 - DNA, 15 bp, Homo sapiens
tgtccttgtttgata

SEQ ID NO: 802274 - DNA, 15 bp, Homo sapiens
gtccttgtttgatag

SEQ ID NO: 802275 - DNA, 15 bp, Homo sapiens
tccttgtttgatagc

SEQ ID NO: 802276 - DNA, 15 bp, Homo sapiens
ccttgtttgatagca

SEQ ID NO: 802277 - DNA, 15 bp, Homo sapiens
cttgtttgatagcat

SEQ ID NO: 802278 - DNA, 15 bp, Homo sapiens
ttgtttgatagcata

SEQ ID NO: 802279 - DNA, 15 bp, Homo sapiens
tgtttgatagcatat

SEQ ID NO: 802280 - DNA, 15 bp, Homo sapiens
gtttgatagcatatg

SEQ ID NO: 802281 - DNA, 15 bp, Homo sapiens
tttgatagcatatgt

SEQ ID NO: 802282 - DNA, 15 bp, Homo sapiens
ttgatagcatatgta

SEQ ID NO: 802283 - DNA, 15 bp, Homo sapiens
tgatagcatatgtat

SEQ ID NO: 802284 - DNA, 15 bp, Homo sapiens
gatagcatatgtatt

SEQ ID NO: 802285 - DNA, 15 bp, Homo sapiens
atagcatatgtatta

SEQ ID NO: 802286 - DNA, 15 bp, Homo sapiens
tagcatatgtattaa

SEQ ID NO: 802287 - DNA, 15 bp, Homo sapiens
agcatatgtattaaa

SEQ ID NO: 802288 - DNA, 15 bp, Homo sapiens
gcatatgtattaaag

SEQ ID NO: 802289 - DNA, 15 bp, Homo sapiens
catatgtattaaagt

SEQ ID NO: 802290 - DNA, 15 bp, Homo sapiens
atatgtattaaagtg

SEQ ID NO: 802291 - DNA, 15 bp, Homo sapiens
tatgtattaaagtga

SEQ ID NO: 802292 - DNA, 15 bp, Homo sapiens
atgtattaaagtgaa

SEQ ID NO: 802293 - DNA, 15 bp, Homo sapiens
tgtattaaagtgaat

SEQ ID NO: 802294 - DNA, 15 bp, Homo sapiens
gtattaaagtgaatt

SEQ ID NO: 802295 - DNA, 15 bp, Homo sapiens
tattaaagtgaatta

SEQ ID NO: 802296 - DNA, 15 bp, Homo sapiens
attaaagtgaattat

SEQ ID NO: 802297 - DNA, 15 bp, Homo sapiens
ttaaagtgaattatg

SEQ ID NO: 802298 - DNA, 15 bp, Homo sapiens
taaagtgaattatgt

SEQ ID NO: 802299 - DNA, 15 bp, Homo sapiens
aaagtgaattatgtg

SEQ ID NO: 802300 - DNA, 15 bp, Homo sapiens
aagtgaattatgtga

SEQ ID NO: 802301 - DNA, 15 bp, Homo sapiens
agtgaattatgtgag

SEQ ID NO: 802302 - DNA, 15 bp, Homo sapiens
gtgaattatgtgagt

SEQ ID NO: 802303 - DNA, 15 bp, Homo sapiens
tgaattatgtgagtg

SEQ ID NO: 802304 - DNA, 15 bp, Homo sapiens
gaattatgtgagtgg

SEQ ID NO: 802305 - DNA, 15 bp, Homo sapiens
aattatgtgagtggg

SEQ ID NO: 802306 - DNA, 15 bp, Homo sapiens
attatgtgagtgggt

SEQ ID NO: 802307 - DNA, 15 bp, Homo sapiens
ttatgtgagtgggtt

SEQ ID NO: 802308 - DNA, 15 bp, Homo sapiens
tatgtgagtgggttt

SEQ ID NO: 802309 - DNA, 15 bp, Homo sapiens
atgtgagtgggtttg

SEQ ID NO: 802310 - DNA, 15 bp, Homo sapiens
tgtgagtgggtttgg

SEQ ID NO: 802311 - DNA, 15 bp, Homo sapiens
gtgagtgggtttggc

SEQ ID NO: 802312 - DNA, 15 bp, Homo sapiens
tgagtgggtttggct

SEQ ID NO: 802313 - DNA, 15 bp, Homo sapiens
gagtgggtttggctt

SEQ ID NO: 802314 - DNA, 15 bp, Homo sapiens
agtgggtttggcttc

SEQ ID NO: 802315 - DNA, 15 bp, Homo sapiens
gtgggtttggcttcc

SEQ ID NO: 802316 - DNA, 15 bp, Homo sapiens
tgggtttggcttcct

SEQ ID NO: 802317 - DNA, 15 bp, Homo sapiens
gggtttggcttcctt

SEQ ID NO: 802318 - DNA, 15 bp, Homo sapiens
ggtttggcttccttt

SEQ ID NO: 802319 - DNA, 15 bp, Homo sapiens
gtttggcttcctttt

SEQ ID NO: 802320 - DNA, 15 bp, Homo sapiens
tttggcttccttttc

SEQ ID NO: 802321 - DNA, 15 bp, Homo sapiens
ttggcttccttttcc

SEQ ID NO: 802322 - DNA, 15 bp, Homo sapiens
tggcttccttttcct

SEQ ID NO: 802323 - DNA, 15 bp, Homo sapiens
ggcttccttttcctc

SEQ ID NO: 802324 - DNA, 15 bp, Homo sapiens
gcttccttttcctcc

SEQ ID NO: 802325 - DNA, 15 bp, Homo sapiens
cttccttttcctcca

SEQ ID NO: 802326 - DNA, 15 bp, Homo sapiens
ttccttttcctccaa

SEQ ID NO: 802327 - DNA, 15 bp, Homo sapiens
tccttttcctccaag

SEQ ID NO: 802328 - DNA, 15 bp, Homo sapiens
ccttttcctccaagt

SEQ ID NO: 802329 - DNA, 15 bp, Homo sapiens
cttttcctccaagtc

SEQ ID NO: 802330 - DNA, 15 bp, Homo sapiens
ttttcctccaagtct

SEQ ID NO: 802331 - DNA, 15 bp, Homo sapiens
tttcctccaagtctc

SEQ ID NO: 802332 - DNA, 15 bp, Homo sapiens
ttcctccaagtctct

SEQ ID NO: 802333 - DNA, 15 bp, Homo sapiens
tcctccaagtctctc

SEQ ID NO: 802334 - DNA, 15 bp, Homo sapiens
cctccaagtctctcc

SEQ ID NO: 802335 - DNA, 15 bp, Homo sapiens
ctccaagtctctcca

SEQ ID NO: 802336 - DNA, 15 bp, Homo sapiens
tccaagtctctccaa

SEQ ID NO: 802337 - DNA, 15 bp, Homo sapiens
ccaagtctctccaaa

SEQ ID NO: 802338 - DNA, 15 bp, Homo sapiens
caagtctctccaaat

SEQ ID NO: 802339 - DNA, 15 bp, Homo sapiens
aagtctctccaaatt

SEQ ID NO: 802340 - DNA, 15 bp, Homo sapiens
agtctctccaaattt

SEQ ID NO: 802341 - DNA, 15 bp, Homo sapiens
gtctctccaaattta

SEQ ID NO: 802342 - DNA, 15 bp, Homo sapiens
tctctccaaatttat

SEQ ID NO: 802343 - DNA, 15 bp, Homo sapiens
ctctccaaatttatc

SEQ ID NO: 802344 - DNA, 15 bp, Homo sapiens
tctccaaatttatca

SEQ ID NO: 802345 - DNA, 15 bp, Homo sapiens
ctccaaatttatcaa

SEQ ID NO: 802346 - DNA, 15 bp, Homo sapiens
tccaaatttatcaaa

SEQ ID NO: 802347 - DNA, 15 bp, Homo sapiens
ccaaatttatcaaag

SEQ ID NO: 802348 - DNA, 15 bp, Homo sapiens
caaatttatcaaagg

SEQ ID NO: 802349 - DNA, 15 bp, Homo sapiens
aaatttatcaaaggg

SEQ ID NO: 802350 - DNA, 15 bp, Homo sapiens
aatttatcaaaggga

SEQ ID NO: 802351 - DNA, 15 bp, Homo sapiens
atttatcaaagggaa

SEQ ID NO: 802352 - DNA, 15 bp, Homo sapiens
tttatcaaagggaaa

SEQ ID NO: 802353 - DNA, 15 bp, Homo sapiens
ttatcaaagggaaag

SEQ ID NO: 802354 - DNA, 15 bp, Homo sapiens
tatcaaagggaaaga

SEQ ID NO: 802355 - DNA, 15 bp, Homo sapiens
atcaaagggaaagat

SEQ ID NO: 802356 - DNA, 15 bp, Homo sapiens
tcaaagggaaagatg

SEQ ID NO: 802357 - DNA, 15 bp, Homo sapiens
caaagggaaagatgc

SEQ ID NO: 802358 - DNA, 15 bp, Homo sapiens
aaagggaaagatgcc

SEQ ID NO: 802359 - DNA, 15 bp, Homo sapiens
aagggaaagatgcca

SEQ ID NO: 802360 - DNA, 15 bp, Homo sapiens
agggaaagatgccaa

SEQ ID NO: 802361 - DNA, 15 bp, Homo sapiens
gggaaagatgccaaa

SEQ ID NO: 802362 - DNA, 15 bp, Homo sapiens
ggaaagatgccaaag

SEQ ID NO: 802363 - DNA, 15 bp, Homo sapiens
gaaagatgccaaagg

SEQ ID NO: 802364 - DNA, 15 bp, Homo sapiens
aaagatgccaaagga

SEQ ID NO: 802365 - DNA, 15 bp, Homo sapiens
aagatgccaaaggat

SEQ ID NO: 802366 - DNA, 15 bp, Homo sapiens
agatgccaaaggatt

SEQ ID NO: 802367 - DNA, 15 bp, Homo sapiens
gatgccaaaggattg

SEQ ID NO: 802368 - DNA, 15 bp, Homo sapiens
atgccaaaggattga

SEQ ID NO: 802369 - DNA, 15 bp, Homo sapiens
tgccaaaggattgaa

SEQ ID NO: 802370 - DNA, 15 bp, Homo sapiens
gccaaaggattgaaa

SEQ ID NO: 802371 - DNA, 15 bp, Homo sapiens
ccaaaggattgaaat

SEQ ID NO: 802372 - DNA, 15 bp, Homo sapiens
caaaggattgaaatg

SEQ ID NO: 802373 - DNA, 15 bp, Homo sapiens
aaaggattgaaatgt

SEQ ID NO: 802374 - DNA, 15 bp, Homo sapiens
aaggattgaaatgta

SEQ ID NO: 802375 - DNA, 15 bp, Homo sapiens
aggattgaaatgtag

SEQ ID NO: 802376 - DNA, 15 bp, Homo sapiens
ggattgaaatgtagc

SEQ ID NO: 802377 - DNA, 15 bp, Homo sapiens
gattgaaatgtagct

SEQ ID NO: 802378 - DNA, 15 bp, Homo sapiens
attgaaatgtagctg

SEQ ID NO: 802379 - DNA, 15 bp, Homo sapiens
ttgaaatgtagctga

SEQ ID NO: 802380 - DNA, 15 bp, Homo sapiens
tgaaatgtagctgaa

SEQ ID NO: 802381 - DNA, 15 bp, Homo sapiens
gaaatgtagctgaag

SEQ ID NO: 802382 - DNA, 15 bp, Homo sapiens
aaatgtagctgaaga

SEQ ID NO: 802383 - DNA, 15 bp, Homo sapiens
aatgtagctgaagaa

SEQ ID NO: 802384 - DNA, 15 bp, Homo sapiens
atgtagctgaagaaa

SEQ ID NO: 802385 - DNA, 15 bp, Homo sapiens
tgtagctgaagaaac

SEQ ID NO: 802386 - DNA, 15 bp, Homo sapiens
gtagctgaagaaacc

SEQ ID NO: 802387 - DNA, 15 bp, Homo sapiens
tagctgaagaaaccc

SEQ ID NO: 802388 - DNA, 15 bp, Homo sapiens
agctgaagaaaccct

SEQ ID NO: 802389 - DNA, 15 bp, Homo sapiens
gctgaagaaacccta

SEQ ID NO: 802390 - DNA, 15 bp, Homo sapiens
ctgaagaaaccctat

SEQ ID NO: 802391 - DNA, 15 bp, Homo sapiens
tgaagaaaccctatg

SEQ ID NO: 802392 - DNA, 15 bp, Homo sapiens
gaagaaaccctatgt

SEQ ID NO: 802393 - DNA, 15 bp, Homo sapiens
aagaaaccctatgta

SEQ ID NO: 802394 - DNA, 15 bp, Homo sapiens
agaaaccctatgtac

SEQ ID NO: 802395 - DNA, 15 bp, Homo sapiens
gaaaccctatgtact

SEQ ID NO: 802396 - DNA, 15 bp, Homo sapiens
aaaccctatgtactg

SEQ ID NO: 802397 - DNA, 15 bp, Homo sapiens
aaccctatgtactga

SEQ ID NO: 802398 - DNA, 15 bp, Homo sapiens
accctatgtactgat

SEQ ID NO: 802399 - DNA, 15 bp, Homo sapiens
ccctatgtactgatt

SEQ ID NO: 802400 - DNA, 15 bp, Homo sapiens
cctatgtactgattg

SEQ ID NO: 802401 - DNA, 15 bp, Homo sapiens
ctatgtactgattgg

SEQ ID NO: 802402 - DNA, 15 bp, Homo sapiens
tatgtactgattggc

SEQ ID NO: 802403 - DNA, 15 bp, Homo sapiens
atgtactgattggcc

SEQ ID NO: 802404 - DNA, 15 bp, Homo sapiens
tgtactgattggcct

SEQ ID NO: 802405 - DNA, 15 bp, Homo sapiens
gtactgattggcctg

SEQ ID NO: 802406 - DNA, 15 bp, Homo sapiens
tactgattggcctga

SEQ ID NO: 802407 - DNA, 15 bp, Homo sapiens
actgattggcctgag

SEQ ID NO: 802408 - DNA, 15 bp, Homo sapiens
ctgattggcctgagc

SEQ ID NO: 802409 - DNA, 15 bp, Homo sapiens
tgattggcctgagca

SEQ ID NO: 802410 - DNA, 15 bp, Homo sapiens
gattggcctgagcac

SEQ ID NO: 802411 - DNA, 15 bp, Homo sapiens
attggcctgagcaca

SEQ ID NO: 802412 - DNA, 15 bp, Homo sapiens
ttggcctgagcacag

SEQ ID NO: 802413 - DNA, 15 bp, Homo sapiens
tggcctgagcacaga

SEQ ID NO: 802414 - DNA, 15 bp, Homo sapiens
ggcctgagcacagag

SEQ ID NO: 802415 - DNA, 15 bp, Homo sapiens
gcctgagcacagaga

SEQ ID NO: 802416 - DNA, 15 bp, Homo sapiens
cctgagcacagagac

SEQ ID NO: 802417 - DNA, 15 bp, Homo sapiens
ctgagcacagagacc

SEQ ID NO: 802418 - DNA, 15 bp, Homo sapiens
tgagcacagagaccc

SEQ ID NO: 802419 - DNA, 15 bp, Homo sapiens
gagcacagagacccc

SEQ ID NO: 802420 - DNA, 15 bp, Homo sapiens
agcacagagacccct

SEQ ID NO: 802421 - DNA, 15 bp, Homo sapiens
gcacagagacccctg

SEQ ID NO: 802422 - DNA, 15 bp, Homo sapiens
cacagagacccctgg

SEQ ID NO: 802423 - DNA, 15 bp, Homo sapiens
acagagacccctggt

SEQ ID NO: 802424 - DNA, 15 bp, Homo sapiens
cagagacccctggtt

SEQ ID NO: 802425 - DNA, 15 bp, Homo sapiens
agagacccctggttt

SEQ ID NO: 802426 - DNA, 15 bp, Homo sapiens
gagacccctggtttg

SEQ ID NO: 802427 - DNA, 15 bp, Homo sapiens
agacccctggtttgg

SEQ ID NO: 802428 - DNA, 15 bp, Homo sapiens
gacccctggtttggg

SEQ ID NO: 802429 - DNA, 15 bp, Homo sapiens
acccctggtttgggc

SEQ ID NO: 802430 - DNA, 15 bp, Homo sapiens
cccctggtttgggct

SEQ ID NO: 802431 - DNA, 15 bp, Homo sapiens
ccctggtttgggctg

SEQ ID NO: 802432 - DNA, 15 bp, Homo sapiens
cctggtttgggctgg

SEQ ID NO: 802433 - DNA, 15 bp, Homo sapiens
ctggtttgggctggt

SEQ ID NO: 802434 - DNA, 15 bp, Homo sapiens
tggtttgggctggtg

SEQ ID NO: 802435 - DNA, 15 bp, Homo sapiens
ggtttgggctggtgt

SEQ ID NO: 802436 - DNA, 15 bp, Homo sapiens
gtttgggctggtgtc

SEQ ID NO: 802437 - DNA, 15 bp, Homo sapiens
tttgggctggtgtct

SEQ ID NO: 802438 - DNA, 15 bp, Homo sapiens
ttgggctggtgtctg

SEQ ID NO: 802439 - DNA, 15 bp, Homo sapiens
tgggctggtgtctgc

SEQ ID NO: 802440 - DNA, 15 bp, Homo sapiens
gggctggtgtctgct

SEQ ID NO: 802441 - DNA, 15 bp, Homo sapiens
ggctggtgtctgctg

SEQ ID NO: 802442 - DNA, 15 bp, Homo sapiens
gctggtgtctgctgg

SEQ ID NO: 802443 - DNA, 15 bp, Homo sapiens
ctggtgtctgctggg

SEQ ID NO: 802444 - DNA, 15 bp, Homo sapiens
tggtgtctgctgggc

SEQ ID NO: 802445 - DNA, 15 bp, Homo sapiens
ggtgtctgctgggct

SEQ ID NO: 802446 - DNA, 15 bp, Homo sapiens
gtgtctgctgggctg

SEQ ID NO: 802447 - DNA, 15 bp, Homo sapiens
tgtctgctgggctgg

SEQ ID NO: 802448 - DNA, 15 bp, Homo sapiens
gtctgctgggctggt

SEQ ID NO: 802449 - DNA, 15 bp, Homo sapiens
tctgctgggctggtc

SEQ ID NO: 802450 - DNA, 15 bp, Homo sapiens
ctgctgggctggtcc

SEQ ID NO: 802451 - DNA, 15 bp, Homo sapiens
tgctgggctggtcca

SEQ ID NO: 802452 - DNA, 15 bp, Homo sapiens
gctgggctggtccat

SEQ ID NO: 802453 - DNA, 15 bp, Homo sapiens
ctgggctggtccatt

SEQ ID NO: 802454 - DNA, 15 bp, Homo sapiens
tgggctggtccattg

SEQ ID NO: 802455 - DNA, 15 bp, Homo sapiens
gggctggtccattgt

SEQ ID NO: 802456 - DNA, 15 bp, Homo sapiens
ggctggtccattgtg

SEQ ID NO: 802457 - DNA, 15 bp, Homo sapiens
gctggtccattgtga

SEQ ID NO: 802458 - DNA, 15 bp, Homo sapiens
ctggtccattgtgag

SEQ ID NO: 802459 - DNA, 15 bp, Homo sapiens
tggtccattgtgagg

SEQ ID NO: 802460 - DNA, 15 bp, Homo sapiens
ggtccattgtgaggg

SEQ ID NO: 802461 - DNA, 15 bp, Homo sapiens
gtccattgtgagggt

SEQ ID NO: 802462 - DNA, 15 bp, Homo sapiens
tccattgtgagggtt

SEQ ID NO: 802463 - DNA, 15 bp, Homo sapiens
ccattgtgagggttc

SEQ ID NO: 802464 - DNA, 15 bp, Homo sapiens
cattgtgagggttct

SEQ ID NO: 802465 - DNA, 15 bp, Homo sapiens
attgtgagggttctg

SEQ ID NO: 802466 - DNA, 15 bp, Homo sapiens
ttgtgagggttctgc

SEQ ID NO: 802467 - DNA, 15 bp, Homo sapiens
tgtgagggttctgcc

SEQ ID NO: 802468 - DNA, 15 bp, Homo sapiens
gtgagggttctgcct

SEQ ID NO: 802469 - DNA, 15 bp, Homo sapiens
tgagggttctgcctg

SEQ ID NO: 802470 - DNA, 15 bp, Homo sapiens
gagggttctgcctgg

SEQ ID NO: 802471 - DNA, 15 bp, Homo sapiens
agggttctgcctggg

SEQ ID NO: 802472 - DNA, 15 bp, Homo sapiens
gggttctgcctgggc

SEQ ID NO: 802473 - DNA, 15 bp, Homo sapiens
ggttctgcctgggct

SEQ ID NO: 802474 - DNA, 15 bp, Homo sapiens
gttctgcctgggctc

SEQ ID NO: 802475 - DNA, 15 bp, Homo sapiens
ttctgcctgggctct

SEQ ID NO: 802476 - DNA, 15 bp, Homo sapiens
tctgcctgggctctt

SEQ ID NO: 802477 - DNA, 15 bp, Homo sapiens
ctgcctgggctcttc

SEQ ID NO: 802478 - DNA, 15 bp, Homo sapiens
tgcctgggctcttca

SEQ ID NO: 802479 - DNA, 15 bp, Homo sapiens
gcctgggctcttcag

SEQ ID NO: 802480 - DNA, 15 bp, Homo sapiens
cctgggctcttcagc

SEQ ID NO: 802481 - DNA, 15 bp, Homo sapiens
ctgggctcttcagct

SEQ ID NO: 802482 - DNA, 15 bp, Homo sapiens
tgggctcttcagctg

SEQ ID NO: 802483 - DNA, 15 bp, Homo sapiens
gggctcttcagctgg

SEQ ID NO: 802484 - DNA, 15 bp, Homo sapiens
ggctcttcagctgga

SEQ ID NO: 802485 - DNA, 15 bp, Homo sapiens
gctcttcagctggac

SEQ ID NO: 802486 - DNA, 15 bp, Homo sapiens
ctcttcagctggaca

SEQ ID NO: 802487 - DNA, 15 bp, Homo sapiens
tcttcagctggacag

SEQ ID NO: 802488 - DNA, 15 bp, Homo sapiens
cttcagctggacaga

SEQ ID NO: 802489 - DNA, 15 bp, Homo sapiens
ttcagctggacagat

SEQ ID NO: 802490 - DNA, 15 bp, Homo sapiens
tcagctggacagatg

SEQ ID NO: 802491 - DNA, 15 bp, Homo sapiens
cagctggacagatgt

SEQ ID NO: 802492 - DNA, 15 bp, Homo sapiens
agctggacagatgtg

SEQ ID NO: 802493 - DNA, 15 bp, Homo sapiens
gctggacagatgtgg

SEQ ID NO: 802494 - DNA, 15 bp, Homo sapiens
ctggacagatgtggt

SEQ ID NO: 802495 - DNA, 15 bp, Homo sapiens
tggacagatgtggtc

SEQ ID NO: 802496 - DNA, 15 bp, Homo sapiens
ggacagatgtggtct

SEQ ID NO: 802497 - DNA, 15 bp, Homo sapiens
gacagatgtggtctg

SEQ ID NO: 802498 - DNA, 15 bp, Homo sapiens
acagatgtggtctgc

SEQ ID NO: 802499 - DNA, 15 bp, Homo sapiens
cagatgtggtctgca

SEQ ID NO: 802500 - DNA, 15 bp, Homo sapiens
agatgtggtctgcac

SEQ ID NO: 802501 - DNA, 15 bp, Homo sapiens
gatgtggtctgcacc

SEQ ID NO: 802502 - DNA, 15 bp, Homo sapiens
atgtggtctgcaccg

SEQ ID NO: 802503 - DNA, 15 bp, Homo sapiens
tgtggtctgcaccga

SEQ ID NO: 802504 - DNA, 15 bp, Homo sapiens
gtggtctgcaccgac

SEQ ID NO: 802505 - DNA, 15 bp, Homo sapiens
tggtctgcaccgacc

SEQ ID NO: 802506 - DNA, 15 bp, Homo sapiens
ggtctgcaccgaccg

SEQ ID NO: 802507 - DNA, 15 bp, Homo sapiens
gtctgcaccgaccgg

SEQ ID NO: 802508 - DNA, 15 bp, Homo sapiens
tctgcaccgaccgga

SEQ ID NO: 802509 - DNA, 15 bp, Homo sapiens
ctgcaccgaccggag

SEQ ID NO: 802510 - DNA, 15 bp, Homo sapiens
tgcaccgaccggagt

SEQ ID NO: 802511 - DNA, 15 bp, Homo sapiens
gcaccgaccggagtt

SEQ ID NO: 802512 - DNA, 15 bp, Homo sapiens
caccgaccggagttt

SEQ ID NO: 802513 - DNA, 15 bp, Homo sapiens
accgaccggagtttg

SEQ ID NO: 802514 - DNA, 15 bp, Homo sapiens
ccgaccggagtttga

SEQ ID NO: 802515 - DNA, 15 bp, Homo sapiens
cgaccggagtttgaa

SEQ ID NO: 802516 - DNA, 15 bp, Homo sapiens
gaccggagtttgaag

SEQ ID NO: 802517 - DNA, 15 bp, Homo sapiens
accggagtttgaaga

SEQ ID NO: 802518 - DNA, 15 bp, Homo sapiens
ccggagtttgaagag

SEQ ID NO: 802519 - DNA, 15 bp, Homo sapiens
cggagtttgaagagg

SEQ ID NO: 802520 - DNA, 15 bp, Homo sapiens
ggagtttgaagagga

SEQ ID NO: 802521 - DNA, 15 bp, Homo sapiens
gagtttgaagaggag

SEQ ID NO: 802522 - DNA, 15 bp, Homo sapiens
agtttgaagaggagc

SEQ ID NO: 802523 - DNA, 15 bp, Homo sapiens
gtttgaagaggagct

SEQ ID NO: 802524 - DNA, 15 bp, Homo sapiens
tttgaagaggagctg

SEQ ID NO: 802525 - DNA, 15 bp, Homo sapiens
ttgaagaggagctgc

SEQ ID NO: 802526 - DNA, 15 bp, Homo sapiens
tgaagaggagctgct

SEQ ID NO: 802527 - DNA, 15 bp, Homo sapiens
gaagaggagctgctg

SEQ ID NO: 802528 - DNA, 15 bp, Homo sapiens
aagaggagctgctga

SEQ ID NO: 802529 - DNA, 15 bp, Homo sapiens
agaggagctgctgac

SEQ ID NO: 802530 - DNA, 15 bp, Homo sapiens
gaggagctgctgact

SEQ ID NO: 802531 - DNA, 15 bp, Homo sapiens
aggagctgctgactg

SEQ ID NO: 802532 - DNA, 15 bp, Homo sapiens
ggagctgctgactga

SEQ ID NO: 802533 - DNA, 15 bp, Homo sapiens
gagctgctgactgag

SEQ ID NO: 802534 - DNA, 15 bp, Homo sapiens
agctgctgactgaga

SEQ ID NO: 802535 - DNA, 15 bp, Homo sapiens
gctgctgactgagag

SEQ ID NO: 802536 - DNA, 15 bp, Homo sapiens
ctgctgactgagagg

SEQ ID NO: 802537 - DNA, 15 bp, Homo sapiens
tgctgactgagaggg

SEQ ID NO: 802538 - DNA, 15 bp, Homo sapiens
gctgactgagaggga

SEQ ID NO: 802539 - DNA, 15 bp, Homo sapiens
ctgactgagagggag

SEQ ID NO: 802540 - DNA, 15 bp, Homo sapiens
tgactgagagggagc

SEQ ID NO: 802541 - DNA, 15 bp, Homo sapiens
gactgagagggagct

SEQ ID NO: 802542 - DNA, 15 bp, Homo sapiens
actgagagggagctg

SEQ ID NO: 802543 - DNA, 15 bp, Homo sapiens
ctgagagggagctgc

SEQ ID NO: 802544 - DNA, 15 bp, Homo sapiens
tgagagggagctgcg

SEQ ID NO: 802545 - DNA, 15 bp, Homo sapiens
gagagggagctgcgc

SEQ ID NO: 802546 - DNA, 15 bp, Homo sapiens
agagggagctgcgca

SEQ ID NO: 802547 - DNA, 15 bp, Homo sapiens
gagggagctgcgcat

SEQ ID NO: 802548 - DNA, 15 bp, Homo sapiens
agggagctgcgcatg

SEQ ID NO: 802549 - DNA, 15 bp, Homo sapiens
gggagctgcgcatga

SEQ ID NO: 802550 - DNA, 15 bp, Homo sapiens
ggagctgcgcatgag

SEQ ID NO: 802551 - DNA, 15 bp, Homo sapiens
gagctgcgcatgagt

SEQ ID NO: 802552 - DNA, 15 bp, Homo sapiens
agctgcgcatgagtc

SEQ ID NO: 802553 - DNA, 15 bp, Homo sapiens
gctgcgcatgagtca

SEQ ID NO: 802554 - DNA, 15 bp, Homo sapiens
ctgcgcatgagtcat

SEQ ID NO: 802555 - DNA, 15 bp, Homo sapiens
tgcgcatgagtcatg

SEQ ID NO: 802556 - DNA, 15 bp, Homo sapiens
gcgcatgagtcatgg

SEQ ID NO: 802557 - DNA, 15 bp, Homo sapiens
cgcatgagtcatggg

SEQ ID NO: 802558 - DNA, 15 bp, Homo sapiens
gcatgagtcatgggt

SEQ ID NO: 802559 - DNA, 15 bp, Homo sapiens
catgagtcatgggtg

SEQ ID NO: 802560 - DNA, 15 bp, Homo sapiens
atgagtcatgggtgg

SEQ ID NO: 802561 - DNA, 15 bp, Homo sapiens
tgagtcatgggtggg

SEQ ID NO: 802562 - DNA, 15 bp, Homo sapiens
gagtcatgggtggga

SEQ ID NO: 802563 - DNA, 15 bp, Homo sapiens
agtcatgggtgggag

SEQ ID NO: 802564 - DNA, 15 bp, Homo sapiens
gtcatgggtgggagg

SEQ ID NO: 802565 - DNA, 15 bp, Homo sapiens
tcatgggtgggaggc

SEQ ID NO: 802566 - DNA, 15 bp, Homo sapiens
catgggtgggaggcc

SEQ ID NO: 802567 - DNA, 15 bp, Homo sapiens
atgggtgggaggcca

SEQ ID NO: 802568 - DNA, 15 bp, Homo sapiens
tgggtgggaggccag

SEQ ID NO: 802569 - DNA, 15 bp, Homo sapiens
gggtgggaggccagc

SEQ ID NO: 802570 - DNA, 15 bp, Homo sapiens
ggtgggaggccagca

SEQ ID NO: 802571 - DNA, 15 bp, Homo sapiens
gtgggaggccagcac

SEQ ID NO: 802572 - DNA, 15 bp, Homo sapiens
tgggaggccagcacc

SEQ ID NO: 802573 - DNA, 15 bp, Homo sapiens
gggaggccagcacca

SEQ ID NO: 802574 - DNA, 15 bp, Homo sapiens
ggaggccagcaccag

SEQ ID NO: 802575 - DNA, 15 bp, Homo sapiens
gaggccagcaccagg

SEQ ID NO: 802576 - DNA, 15 bp, Homo sapiens
aggccagcaccagga

SEQ ID NO: 802577 - DNA, 15 bp, Homo sapiens
ggccagcaccaggaa

SEQ ID NO: 802578 - DNA, 15 bp, Homo sapiens
gccagcaccaggaag

SEQ ID NO: 802579 - DNA, 15 bp, Homo sapiens
ccagcaccaggaagc

SEQ ID NO: 802580 - DNA, 15 bp, Homo sapiens
cagcaccaggaagct

SEQ ID NO: 802581 - DNA, 15 bp, Homo sapiens
agcaccaggaagctg

SEQ ID NO: 802582 - DNA, 15 bp, Homo sapiens
gcaccaggaagctgg

SEQ ID NO: 802583 - DNA, 15 bp, Homo sapiens
caccaggaagctggc

SEQ ID NO: 802584 - DNA, 15 bp, Homo sapiens
accaggaagctggca

SEQ ID NO: 802585 - DNA, 15 bp, Homo sapiens
ccaggaagctggcac

SEQ ID NO: 802586 - DNA, 15 bp, Homo sapiens
caggaagctggcacc

SEQ ID NO: 802587 - DNA, 15 bp, Homo sapiens
aggaagctggcacca

SEQ ID NO: 802588 - DNA, 15 bp, Homo sapiens
ggaagctggcaccat

SEQ ID NO: 802589 - DNA, 15 bp, Homo sapiens
gaagctggcaccatg

SEQ ID NO: 802590 - DNA, 15 bp, Homo sapiens
aagctggcaccatgg

SEQ ID NO: 802591 - DNA, 15 bp, Homo sapiens
agctggcaccatggc

SEQ ID NO: 802592 - DNA, 15 bp, Homo sapiens
gctggcaccatggcc

SEQ ID NO: 802593 - DNA, 15 bp, Homo sapiens
ctggcaccatggcca

SEQ ID NO: 802594 - DNA, 15 bp, Homo sapiens
tggcaccatggccag

SEQ ID NO: 802595 - DNA, 15 bp, Homo sapiens
ggcaccatggccaga

SEQ ID NO: 802596 - DNA, 15 bp, Homo sapiens
gcaccatggccagat

SEQ ID NO: 802597 - DNA, 15 bp, Homo sapiens
caccatggccagatg

SEQ ID NO: 802598 - DNA, 15 bp, Homo sapiens
accatggccagatgt

SEQ ID NO: 802599 - DNA, 15 bp, Homo sapiens
ccatggccagatgtg

SEQ ID NO: 802600 - DNA, 15 bp, Homo sapiens
catggccagatgtgg

SEQ ID NO: 802601 - DNA, 15 bp, Homo sapiens
atggccagatgtgga

SEQ ID NO: 802602 - DNA, 15 bp, Homo sapiens
tggccagatgtggag

SEQ ID NO: 802603 - DNA, 15 bp, Homo sapiens
ggccagatgtggagt

SEQ ID NO: 802604 - DNA, 15 bp, Homo sapiens
gccagatgtggagtt

SEQ ID NO: 802605 - DNA, 15 bp, Homo sapiens
ccagatgtggagttg

SEQ ID NO: 802606 - DNA, 15 bp, Homo sapiens
cagatgtggagttgt

SEQ ID NO: 802607 - DNA, 15 bp, Homo sapiens
agatgtggagttgtg

SEQ ID NO: 802608 - DNA, 15 bp, Homo sapiens
gatgtggagttgtgg

SEQ ID NO: 802609 - DNA, 15 bp, Homo sapiens
atgtggagttgtggg

SEQ ID NO: 802610 - DNA, 15 bp, Homo sapiens
tgtggagttgtgggg

SEQ ID NO: 802611 - DNA, 15 bp, Homo sapiens
gtggagttgtggggc

SEQ ID NO: 802612 - DNA, 15 bp, Homo sapiens
tggagttgtggggca

SEQ ID NO: 802613 - DNA, 15 bp, Homo sapiens
ggagttgtggggcag

SEQ ID NO: 802614 - DNA, 15 bp, Homo sapiens
gagttgtggggcagg

SEQ ID NO: 802615 - DNA, 15 bp, Homo sapiens
agttgtggggcaggg

SEQ ID NO: 802616 - DNA, 15 bp, Homo sapiens
gttgtggggcagggc

SEQ ID NO: 802617 - DNA, 15 bp, Homo sapiens
ttgtggggcagggca

SEQ ID NO: 802618 - DNA, 15 bp, Homo sapiens
tgtggggcagggcag

SEQ ID NO: 802619 - DNA, 15 bp, Homo sapiens
gtggggcagggcagt

SEQ ID NO: 802620 - DNA, 15 bp, Homo sapiens
tggggcagggcagtg

SEQ ID NO: 802621 - DNA, 15 bp, Homo sapiens
ggggcagggcagtgt

SEQ ID NO: 802622 - DNA, 15 bp, Homo sapiens
gggcagggcagtgtg

SEQ ID NO: 802623 - DNA, 15 bp, Homo sapiens
ggcagggcagtgtgc

SEQ ID NO: 802624 - DNA, 15 bp, Homo sapiens
gcagggcagtgtgct

SEQ ID NO: 802625 - DNA, 15 bp, Homo sapiens
cagggcagtgtgctg

SEQ ID NO: 802626 - DNA, 15 bp, Homo sapiens
agggcagtgtgctgt

SEQ ID NO: 802627 - DNA, 15 bp, Homo sapiens
gggcagtgtgctgtg

SEQ ID NO: 802628 - DNA, 15 bp, Homo sapiens
ggcagtgtgctgtgt

SEQ ID NO: 802629 - DNA, 15 bp, Homo sapiens
gcagtgtgctgtgtg

SEQ ID NO: 802630 - DNA, 15 bp, Homo sapiens
cagtgtgctgtgtgg

SEQ ID NO: 802631 - DNA, 15 bp, Homo sapiens
agtgtgctgtgtggt

SEQ ID NO: 802632 - DNA, 15 bp, Homo sapiens
gtgtgctgtgtggtg

SEQ ID NO: 802633 - DNA, 15 bp, Homo sapiens
tgtgctgtgtggtga

SEQ ID NO: 802634 - DNA, 15 bp, Homo sapiens
gtgctgtgtggtgag

SEQ ID NO: 802635 - DNA, 15 bp, Homo sapiens
tgctgtgtggtgagg

SEQ ID NO: 802636 - DNA, 15 bp, Homo sapiens
gctgtgtggtgaggc

SEQ ID NO: 802637 - DNA, 15 bp, Homo sapiens
ctgtgtggtgaggct

SEQ ID NO: 802638 - DNA, 15 bp, Homo sapiens
tgtgtggtgaggctg

SEQ ID NO: 802639 - DNA, 15 bp, Homo sapiens
gtgtggtgaggctgt

SEQ ID NO: 802640 - DNA, 15 bp, Homo sapiens
tgtggtgaggctgtg

SEQ ID NO: 802641 - DNA, 15 bp, Homo sapiens
gtggtgaggctgtgc

SEQ ID NO: 802642 - DNA, 15 bp, Homo sapiens
tggtgaggctgtgct

SEQ ID NO: 802643 - DNA, 15 bp, Homo sapiens
ggtgaggctgtgctc

SEQ ID NO: 802644 - DNA, 15 bp, Homo sapiens
gtgaggctgtgctct

SEQ ID NO: 802645 - DNA, 15 bp, Homo sapiens
tgaggctgtgctctg

SEQ ID NO: 802646 - DNA, 15 bp, Homo sapiens
gaggctgtgctctgg

SEQ ID NO: 802647 - DNA, 15 bp, Homo sapiens
aggctgtgctctggc

SEQ ID NO: 802648 - DNA, 15 bp, Homo sapiens
ggctgtgctctggca

SEQ ID NO: 802649 - DNA, 15 bp, Homo sapiens
gctgtgctctggcaa

SEQ ID NO: 802650 - DNA, 15 bp, Homo sapiens
ctgtgctctggcaag

SEQ ID NO: 802651 - DNA, 15 bp, Homo sapiens
tgtgctctggcaaga

SEQ ID NO: 802652 - DNA, 15 bp, Homo sapiens
gtgctctggcaagag

SEQ ID NO: 802653 - DNA, 15 bp, Homo sapiens
tgctctggcaagagg

SEQ ID NO: 802654 - DNA, 15 bp, Homo sapiens
gctctggcaagaggg

SEQ ID NO: 802655 - DNA, 15 bp, Homo sapiens
ctctggcaagaggga

SEQ ID NO: 802656 - DNA, 15 bp, Homo sapiens
tctggcaagagggat

SEQ ID NO: 802657 - DNA, 15 bp, Homo sapiens
ctggcaagagggatt

SEQ ID NO: 802658 - DNA, 15 bp, Homo sapiens
tggcaagagggattt

SEQ ID NO: 802659 - DNA, 15 bp, Homo sapiens
ggcaagagggatttc

SEQ ID NO: 802660 - DNA, 15 bp, Homo sapiens
gcaagagggatttcc

SEQ ID NO: 802661 - DNA, 15 bp, Homo sapiens
caagagggatttccc

SEQ ID NO: 802662 - DNA, 15 bp, Homo sapiens
aagagggatttcccg

SEQ ID NO: 802663 - DNA, 15 bp, Homo sapiens
agagggatttcccgt

SEQ ID NO: 802664 - DNA, 15 bp, Homo sapiens
gagggatttcccgtg

SEQ ID NO: 802665 - DNA, 15 bp, Homo sapiens
agggatttcccgtga

SEQ ID NO: 802666 - DNA, 15 bp, Homo sapiens
gggatttcccgtgag

SEQ ID NO: 802667 - DNA, 15 bp, Homo sapiens
ggatttcccgtgagc

SEQ ID NO: 802668 - DNA, 15 bp, Homo sapiens
gatttcccgtgagca

SEQ ID NO: 802669 - DNA, 15 bp, Homo sapiens
atttcccgtgagcac

SEQ ID NO: 802670 - DNA, 15 bp, Homo sapiens
tttcccgtgagcacc

SEQ ID NO: 802671 - DNA, 15 bp, Homo sapiens
ttcccgtgagcacct

SEQ ID NO: 802672 - DNA, 15 bp, Homo sapiens
tcccgtgagcacctc

SEQ ID NO: 802673 - DNA, 15 bp, Homo sapiens
cccgtgagcacctcg

SEQ ID NO: 802674 - DNA, 15 bp, Homo sapiens
ccgtgagcacctcgt

SEQ ID NO: 802675 - DNA, 15 bp, Homo sapiens
cgtgagcacctcgtg

SEQ ID NO: 802676 - DNA, 15 bp, Homo sapiens
gtgagcacctcgtgg

SEQ ID NO: 802677 - DNA, 15 bp, Homo sapiens
tgagcacctcgtggg

SEQ ID NO: 802678 - DNA, 15 bp, Homo sapiens
gagcacctcgtgggt

SEQ ID NO: 802679 - DNA, 15 bp, Homo sapiens
agcacctcgtgggtt

SEQ ID NO: 802680 - DNA, 15 bp, Homo sapiens
gcacctcgtgggttg

SEQ ID NO: 802681 - DNA, 15 bp, Homo sapiens
cacctcgtgggttgc

SEQ ID NO: 802682 - DNA, 15 bp, Homo sapiens
acctcgtgggttgca

SEQ ID NO: 802683 - DNA, 15 bp, Homo sapiens
cctcgtgggttgcat

SEQ ID NO: 802684 - DNA, 15 bp, Homo sapiens
ctcgtgggttgcatg

SEQ ID NO: 802685 - DNA, 15 bp, Homo sapiens
tcgtgggttgcatgt

SEQ ID NO: 802686 - DNA, 15 bp, Homo sapiens
cgtgggttgcatgta

SEQ ID NO: 802687 - DNA, 15 bp, Homo sapiens
gtgggttgcatgtag

SEQ ID NO: 802688 - DNA, 15 bp, Homo sapiens
tgggttgcatgtagt

SEQ ID NO: 802689 - DNA, 15 bp, Homo sapiens
gggttgcatgtagtg

SEQ ID NO: 802690 - DNA, 15 bp, Homo sapiens
ggttgcatgtagtga

SEQ ID NO: 802691 - DNA, 15 bp, Homo sapiens
gttgcatgtagtgac

SEQ ID NO: 802692 - DNA, 15 bp, Homo sapiens
ttgcatgtagtgact

SEQ ID NO: 802693 - DNA, 15 bp, Homo sapiens
tgcatgtagtgactc

SEQ ID NO: 802694 - DNA, 15 bp, Homo sapiens
gcatgtagtgactcg

SEQ ID NO: 802695 - DNA, 15 bp, Homo sapiens
catgtagtgactcgg

SEQ ID NO: 802696 - DNA, 15 bp, Homo sapiens
atgtagtgactcgga

SEQ ID NO: 802697 - DNA, 15 bp, Homo sapiens
tgtagtgactcggag

SEQ ID NO: 802698 - DNA, 15 bp, Homo sapiens
gtagtgactcggagt

SEQ ID NO: 802699 - DNA, 15 bp, Homo sapiens
tagtgactcggagta

SEQ ID NO: 802700 - DNA, 15 bp, Homo sapiens
agtgactcggagtac

SEQ ID NO: 802701 - DNA, 15 bp, Homo sapiens
gtgactcggagtacc

SEQ ID NO: 802702 - DNA, 15 bp, Homo sapiens
tgactcggagtacca

SEQ ID NO: 802703 - DNA, 15 bp, Homo sapiens
gactcggagtaccat

SEQ ID NO: 802704 - DNA, 15 bp, Homo sapiens
actcggagtaccatg

SEQ ID NO: 802705 - DNA, 15 bp, Homo sapiens
ctcggagtaccatgt

SEQ ID NO: 802706 - DNA, 15 bp, Homo sapiens
tcggagtaccatgtg

SEQ ID NO: 802707 - DNA, 15 bp, Homo sapiens
cggagtaccatgtgc

SEQ ID NO: 802708 - DNA, 15 bp, Homo sapiens
ggagtaccatgtgca

SEQ ID NO: 802709 - DNA, 15 bp, Homo sapiens
gagtaccatgtgcag

SEQ ID NO: 802710 - DNA, 15 bp, Homo sapiens
agtaccatgtgcaga

SEQ ID NO: 802711 - DNA, 15 bp, Homo sapiens
gtaccatgtgcagag

SEQ ID NO: 802712 - DNA, 15 bp, Homo sapiens
taccatgtgcagagc

SEQ ID NO: 802713 - DNA, 15 bp, Homo sapiens
accatgtgcagagca

SEQ ID NO: 802714 - DNA, 15 bp, Homo sapiens
ccatgtgcagagcac

SEQ ID NO: 802715 - DNA, 15 bp, Homo sapiens
catgtgcagagcaca

SEQ ID NO: 802716 - DNA, 15 bp, Homo sapiens
atgtgcagagcacac

SEQ ID NO: 802717 - DNA, 15 bp, Homo sapiens
tgtgcagagcacacg

SEQ ID NO: 802718 - DNA, 15 bp, Homo sapiens
gtgcagagcacacgt

SEQ ID NO: 802719 - DNA, 15 bp, Homo sapiens
tgcagagcacacgtg

SEQ ID NO: 802720 - DNA, 15 bp, Homo sapiens
gcagagcacacgtgt

SEQ ID NO: 802721 - DNA, 15 bp, Homo sapiens
cagagcacacgtgta

SEQ ID NO: 802722 - DNA, 15 bp, Homo sapiens
agagcacacgtgtag

SEQ ID NO: 802723 - DNA, 15 bp, Homo sapiens
gagcacacgtgtagc

SEQ ID NO: 802724 - DNA, 15 bp, Homo sapiens
agcacacgtgtagcc

SEQ ID NO: 802725 - DNA, 15 bp, Homo sapiens
gcacacgtgtagcct

SEQ ID NO: 802726 - DNA, 15 bp, Homo sapiens
cacacgtgtagcctc

SEQ ID NO: 802727 - DNA, 15 bp, Homo sapiens
acacgtgtagcctca

SEQ ID NO: 802728 - DNA, 15 bp, Homo sapiens
cacgtgtagcctcag

SEQ ID NO: 802729 - DNA, 15 bp, Homo sapiens
acgtgtagcctcagc

SEQ ID NO: 802730 - DNA, 15 bp, Homo sapiens
cgtgtagcctcagca

SEQ ID NO: 802731 - DNA, 15 bp, Homo sapiens
gtgtagcctcagcac

SEQ ID NO: 802732 - DNA, 15 bp, Homo sapiens
tgtagcctcagcact

SEQ ID NO: 802733 - DNA, 15 bp, Homo sapiens
gtagcctcagcactg

SEQ ID NO: 802734 - DNA, 15 bp, Homo sapiens
tagcctcagcactgt

SEQ ID NO: 802735 - DNA, 15 bp, Homo sapiens
agcctcagcactgta

SEQ ID NO: 802736 - DNA, 15 bp, Homo sapiens
gcctcagcactgtat

SEQ ID NO: 802737 - DNA, 15 bp, Homo sapiens
cctcagcactgtatg

SEQ ID NO: 802738 - DNA, 15 bp, Homo sapiens
ctcagcactgtatga

SEQ ID NO: 802739 - DNA, 15 bp, Homo sapiens
tcagcactgtatgaa

SEQ ID NO: 802740 - DNA, 15 bp, Homo sapiens
cagcactgtatgaaa

SEQ ID NO: 802741 - DNA, 15 bp, Homo sapiens
agcactgtatgaaag

SEQ ID NO: 802742 - DNA, 15 bp, Homo sapiens
gcactgtatgaaagc

SEQ ID NO: 802743 - DNA, 15 bp, Homo sapiens
cactgtatgaaagca

SEQ ID NO: 802744 - DNA, 15 bp, Homo sapiens
actgtatgaaagcac

SEQ ID NO: 802745 - DNA, 15 bp, Homo sapiens
ctgtatgaaagcaca

SEQ ID NO: 802746 - DNA, 15 bp, Homo sapiens
tgtatgaaagcacac

SEQ ID NO: 802747 - DNA, 15 bp, Homo sapiens
gtatgaaagcacaca

SEQ ID NO: 802748 - DNA, 15 bp, Homo sapiens
tatgaaagcacacaa

SEQ ID NO: 802749 - DNA, 15 bp, Homo sapiens
atgaaagcacacaaa

SEQ ID NO: 802750 - DNA, 15 bp, Homo sapiens
tgaaagcacacaaaa

SEQ ID NO: 802751 - DNA, 15 bp, Homo sapiens
gaaagcacacaaaag

SEQ ID NO: 802752 - DNA, 15 bp, Homo sapiens
aaagcacacaaaaga

SEQ ID NO: 802753 - DNA, 15 bp, Homo sapiens
aagcacacaaaagaa

SEQ ID NO: 802754 - DNA, 15 bp, Homo sapiens
agcacacaaaagaaa

SEQ ID NO: 802755 - DNA, 15 bp, Homo sapiens
gcacacaaaagaaaa

SEQ ID NO: 802756 - DNA, 15 bp, Homo sapiens
cacacaaaagaaaac

SEQ ID NO: 802757 - DNA, 15 bp, Homo sapiens
acacaaaagaaaacc

SEQ ID NO: 802758 - DNA, 15 bp, Homo sapiens
cacaaaagaaaaccc

SEQ ID NO: 802759 - DNA, 15 bp, Homo sapiens
acaaaagaaaaccct

SEQ ID NO: 802760 - DNA, 15 bp, Homo sapiens
caaaagaaaaccctg

SEQ ID NO: 802761 - DNA, 15 bp, Homo sapiens
aaaagaaaaccctgc

SEQ ID NO: 802762 - DNA, 15 bp, Homo sapiens
aaagaaaaccctgcc

SEQ ID NO: 802763 - DNA, 15 bp, Homo sapiens
aagaaaaccctgccc

SEQ ID NO: 802764 - DNA, 15 bp, Homo sapiens
agaaaaccctgccct

SEQ ID NO: 802765 - DNA, 15 bp, Homo sapiens
gaaaaccctgccctc

SEQ ID NO: 802766 - DNA, 15 bp, Homo sapiens
aaaaccctgccctcg

SEQ ID NO: 802767 - DNA, 15 bp, Homo sapiens
aaaccctgccctcga

SEQ ID NO: 802768 - DNA, 15 bp, Homo sapiens
aaccctgccctcgac

SEQ ID NO: 802769 - DNA, 15 bp, Homo sapiens
accctgccctcgact

SEQ ID NO: 802770 - DNA, 15 bp, Homo sapiens
ccctgccctcgacta

SEQ ID NO: 802771 - DNA, 15 bp, Homo sapiens
cctgccctcgactac

SEQ ID NO: 802772 - DNA, 15 bp, Homo sapiens
ctgccctcgactacc

SEQ ID NO: 802773 - DNA, 15 bp, Homo sapiens
tgccctcgactacct

SEQ ID NO: 802774 - DNA, 15 bp, Homo sapiens
gccctcgactacctt

SEQ ID NO: 802775 - DNA, 15 bp, Homo sapiens
ccctcgactacctta

SEQ ID NO: 802776 - DNA, 15 bp, Homo sapiens
cctcgactaccttac

SEQ ID NO: 802777 - DNA, 15 bp, Homo sapiens
ctcgactaccttaca

SEQ ID NO: 802778 - DNA, 15 bp, Homo sapiens
tcgactaccttacac

SEQ ID NO: 802779 - DNA, 15 bp, Homo sapiens
cgactaccttacact

SEQ ID NO: 802780 - DNA, 15 bp, Homo sapiens
gactaccttacactt

SEQ ID NO: 802781 - DNA, 15 bp, Homo sapiens
actaccttacacttg

SEQ ID NO: 802782 - DNA, 15 bp, Homo sapiens
ctaccttacacttgc

SEQ ID NO: 802783 - DNA, 15 bp, Homo sapiens
taccttacacttgct

SEQ ID NO: 802784 - DNA, 15 bp, Homo sapiens
accttacacttgcta

SEQ ID NO: 802785 - DNA, 15 bp, Homo sapiens
ccttacacttgctag

SEQ ID NO: 802786 - DNA, 15 bp, Homo sapiens
cttacacttgctagc

SEQ ID NO: 802787 - DNA, 15 bp, Homo sapiens
ttacacttgctagca

SEQ ID NO: 802788 - DNA, 15 bp, Homo sapiens
tacacttgctagcag

SEQ ID NO: 802789 - DNA, 15 bp, Homo sapiens
acacttgctagcagt

SEQ ID NO: 802790 - DNA, 15 bp, Homo sapiens
cacttgctagcagtc

SEQ ID NO: 802791 - DNA, 15 bp, Homo sapiens
acttgctagcagtct

SEQ ID NO: 802792 - DNA, 15 bp, Homo sapiens
cttgctagcagtcta

SEQ ID NO: 802793 - DNA, 15 bp, Homo sapiens
ttgctagcagtctaa

SEQ ID NO: 802794 - DNA, 15 bp, Homo sapiens
tgctagcagtctaat

SEQ ID NO: 802795 - DNA, 15 bp, Homo sapiens
gctagcagtctaatg

SEQ ID NO: 802796 - DNA, 15 bp, Homo sapiens
ctagcagtctaatga

SEQ ID NO: 802797 - DNA, 15 bp, Homo sapiens
tagcagtctaatgac

SEQ ID NO: 802798 - DNA, 15 bp, Homo sapiens
agcagtctaatgacc

SEQ ID NO: 802799 - DNA, 15 bp, Homo sapiens
gcagtctaatgaccc

SEQ ID NO: 802800 - DNA, 15 bp, Homo sapiens
cagtctaatgaccca

SEQ ID NO: 802801 - DNA, 15 bp, Homo sapiens
agtctaatgacccat

SEQ ID NO: 802802 - DNA, 15 bp, Homo sapiens
gtctaatgacccata

SEQ ID NO: 802803 - DNA, 15 bp, Homo sapiens
tctaatgacccatac

SEQ ID NO: 802804 - DNA, 15 bp, Homo sapiens
ctaatgacccatacc

SEQ ID NO: 802805 - DNA, 15 bp, Homo sapiens
taatgacccatacca

SEQ ID NO: 802806 - DNA, 15 bp, Homo sapiens
aatgacccataccac

SEQ ID NO: 802807 - DNA, 15 bp, Homo sapiens
atgacccataccaca

SEQ ID NO: 802808 - DNA, 15 bp, Homo sapiens
tgacccataccacat

SEQ ID NO: 802809 - DNA, 15 bp, Homo sapiens
gacccataccacatg

SEQ ID NO: 802810 - DNA, 15 bp, Homo sapiens
acccataccacatgt

SEQ ID NO: 802811 - DNA, 15 bp, Homo sapiens
cccataccacatgtg

SEQ ID NO: 802812 - DNA, 15 bp, Homo sapiens
ccataccacatgtgg

SEQ ID NO: 802813 - DNA, 15 bp, Homo sapiens
cataccacatgtgga

SEQ ID NO: 802814 - DNA, 15 bp, Homo sapiens
ataccacatgtggaa

SEQ ID NO: 802815 - DNA, 15 bp, Homo sapiens
taccacatgtggaaa

SEQ ID NO: 802816 - DNA, 15 bp, Homo sapiens
accacatgtggaaaa

SEQ ID NO: 802817 - DNA, 15 bp, Homo sapiens
ccacatgtggaaaat

SEQ ID NO: 802818 - DNA, 15 bp, Homo sapiens
cacatgtggaaaata

SEQ ID NO: 802819 - DNA, 15 bp, Homo sapiens
acatgtggaaaatat

SEQ ID NO: 802820 - DNA, 15 bp, Homo sapiens
catgtggaaaatatt

SEQ ID NO: 802821 - DNA, 15 bp, Homo sapiens
atgtggaaaatatta

SEQ ID NO: 802822 - DNA, 15 bp, Homo sapiens
tgtggaaaatattat

SEQ ID NO: 802823 - DNA, 15 bp, Homo sapiens
gtggaaaatattatt

SEQ ID NO: 802824 - DNA, 15 bp, Homo sapiens
tggaaaatattattt

SEQ ID NO: 802825 - DNA, 15 bp, Homo sapiens
ggaaaatattatttt

SEQ ID NO: 802826 - DNA, 15 bp, Homo sapiens
gaaaatattattttg

SEQ ID NO: 802827 - DNA, 15 bp, Homo sapiens
aaaatattattttgc

SEQ ID NO: 802828 - DNA, 15 bp, Homo sapiens
aaatattattttgct

SEQ ID NO: 802829 - DNA, 15 bp, Homo sapiens
aatattattttgctt

SEQ ID NO: 802830 - DNA, 15 bp, Homo sapiens
atattattttgcttt

SEQ ID NO: 802831 - DNA, 15 bp, Homo sapiens
tattattttgctttg

SEQ ID NO: 802832 - DNA, 15 bp, Homo sapiens
attattttgctttgc

SEQ ID NO: 802833 - DNA, 15 bp, Homo sapiens
ttattttgctttgct

SEQ ID NO: 802834 - DNA, 15 bp, Homo sapiens
tattttgctttgctg

SEQ ID NO: 802835 - DNA, 15 bp, Homo sapiens
attttgctttgctgt

SEQ ID NO: 802836 - DNA, 15 bp, Homo sapiens
ttttgctttgctgta

SEQ ID NO: 802837 - DNA, 15 bp, Homo sapiens
tttgctttgctgtaa

SEQ ID NO: 802838 - DNA, 15 bp, Homo sapiens
ttgctttgctgtaat

SEQ ID NO: 802839 - DNA, 15 bp, Homo sapiens
tgctttgctgtaata

SEQ ID NO: 802840 - DNA, 15 bp, Homo sapiens
gctttgctgtaatac

SEQ ID NO: 802841 - DNA, 15 bp, Homo sapiens
ctttgctgtaataca

SEQ ID NO: 802842 - DNA, 15 bp, Homo sapiens
tttgctgtaatacaa

SEQ ID NO: 802843 - DNA, 15 bp, Homo sapiens
ttgctgtaatacaac

SEQ ID NO: 802844 - DNA, 15 bp, Homo sapiens
tgctgtaatacaaca

SEQ ID NO: 802845 - DNA, 15 bp, Homo sapiens
gctgtaatacaacat

SEQ ID NO: 802846 - DNA, 15 bp, Homo sapiens
ctgtaatacaacatt

SEQ ID NO: 802847 - DNA, 15 bp, Homo sapiens
tgtaatacaacattg

SEQ ID NO: 802848 - DNA, 15 bp, Homo sapiens
gtaatacaacattgt

SEQ ID NO: 802849 - DNA, 15 bp, Homo sapiens
taatacaacattgtt

SEQ ID NO: 802850 - DNA, 15 bp, Homo sapiens
aatacaacattgttt

SEQ ID NO: 802851 - DNA, 15 bp, Homo sapiens
atacaacattgtttt

SEQ ID NO: 802852 - DNA, 15 bp, Homo sapiens
tacaacattgttttg

SEQ ID NO: 802853 - DNA, 15 bp, Homo sapiens
acaacattgttttga

SEQ ID NO: 802854 - DNA, 15 bp, Homo sapiens
caacattgttttgac

SEQ ID NO: 802855 - DNA, 15 bp, Homo sapiens
aacattgttttgaca

SEQ ID NO: 802856 - DNA, 15 bp, Homo sapiens
acattgttttgacaa

SEQ ID NO: 802857 - DNA, 15 bp, Homo sapiens
cattgttttgacaat

SEQ ID NO: 802858 - DNA, 15 bp, Homo sapiens
attgttttgacaatt

SEQ ID NO: 802859 - DNA, 15 bp, Homo sapiens
ttgttttgacaattc

SEQ ID NO: 802860 - DNA, 15 bp, Homo sapiens
tgttttgacaattca

SEQ ID NO: 802861 - DNA, 15 bp, Homo sapiens
gttttgacaattcag

SEQ ID NO: 802862 - DNA, 15 bp, Homo sapiens
ttttgacaattcagg

SEQ ID NO: 802863 - DNA, 15 bp, Homo sapiens
tttgacaattcaggc

SEQ ID NO: 802864 - DNA, 15 bp, Homo sapiens
ttgacaattcaggct

SEQ ID NO: 802865 - DNA, 15 bp, Homo sapiens
tgacaattcaggcta

SEQ ID NO: 802866 - DNA, 15 bp, Homo sapiens
gacaattcaggctaa

SEQ ID NO: 802867 - DNA, 15 bp, Homo sapiens
acaattcaggctaaa

SEQ ID NO: 802868 - DNA, 15 bp, Homo sapiens
caattcaggctaaat

SEQ ID NO: 802869 - DNA, 15 bp, Homo sapiens
aattcaggctaaatg

SEQ ID NO: 802870 - DNA, 15 bp, Homo sapiens
attcaggctaaatgg

SEQ ID NO: 802871 - DNA, 15 bp, Homo sapiens
ttcaggctaaatggt

SEQ ID NO: 802872 - DNA, 15 bp, Homo sapiens
tcaggctaaatggtt

SEQ ID NO: 802873 - DNA, 15 bp, Homo sapiens
caggctaaatggtta

SEQ ID NO: 802874 - DNA, 15 bp, Homo sapiens
aggctaaatggttat

SEQ ID NO: 802875 - DNA, 15 bp, Homo sapiens
ggctaaatggttatt

SEQ ID NO: 802876 - DNA, 15 bp, Homo sapiens
gctaaatggttatta

SEQ ID NO: 802877 - DNA, 15 bp, Homo sapiens
ctaaatggttattat

SEQ ID NO: 802878 - DNA, 15 bp, Homo sapiens
taaatggttattatc

SEQ ID NO: 802879 - DNA, 15 bp, Homo sapiens
aaatggttattatca

SEQ ID NO: 802880 - DNA, 15 bp, Homo sapiens
aatggttattatcaa

SEQ ID NO: 802881 - DNA, 15 bp, Homo sapiens
atggttattatcaaa

SEQ ID NO: 802882 - DNA, 15 bp, Homo sapiens
tggttattatcaaat

SEQ ID NO: 802883 - DNA, 15 bp, Homo sapiens
ggttattatcaaatc

SEQ ID NO: 802884 - DNA, 15 bp, Homo sapiens
gttattatcaaatca

SEQ ID NO: 802885 - DNA, 15 bp, Homo sapiens
ttattatcaaatcat

SEQ ID NO: 802886 - DNA, 15 bp, Homo sapiens
tattatcaaatcata

SEQ ID NO: 802887 - DNA, 15 bp, Homo sapiens
attatcaaatcatac

SEQ ID NO: 802888 - DNA, 15 bp, Homo sapiens
ttatcaaatcatact

SEQ ID NO: 802889 - DNA, 15 bp, Homo sapiens
tatcaaatcatacta

SEQ ID NO: 802890 - DNA, 15 bp, Homo sapiens
atcaaatcatactat

SEQ ID NO: 802891 - DNA, 15 bp, Homo sapiens
tcaaatcatactatg

SEQ ID NO: 802892 - DNA, 15 bp, Homo sapiens
caaatcatactatgt

SEQ ID NO: 802893 - DNA, 15 bp, Homo sapiens
aaatcatactatgta

SEQ ID NO: 802894 - DNA, 15 bp, Homo sapiens
aatcatactatgtac

SEQ ID NO: 802895 - DNA, 15 bp, Homo sapiens
atcatactatgtaca

SEQ ID NO: 802896 - DNA, 15 bp, Homo sapiens
tcatactatgtacaa

SEQ ID NO: 802897 - DNA, 15 bp, Homo sapiens
catactatgtacaag

SEQ ID NO: 802898 - DNA, 15 bp, Homo sapiens
atactatgtacaagg

SEQ ID NO: 802899 - DNA, 15 bp, Homo sapiens
tactatgtacaagga

SEQ ID NO: 802900 - DNA, 15 bp, Homo sapiens
actatgtacaaggat

SEQ ID NO: 802901 - DNA, 15 bp, Homo sapiens
ctatgtacaaggatc

SEQ ID NO: 802902 - DNA, 15 bp, Homo sapiens
tatgtacaaggatca

SEQ ID NO: 802903 - DNA, 15 bp, Homo sapiens
atgtacaaggatcat

SEQ ID NO: 802904 - DNA, 15 bp, Homo sapiens
tgtacaaggatcatg

SEQ ID NO: 802905 - DNA, 15 bp, Homo sapiens
gtacaaggatcatgt

SEQ ID NO: 802906 - DNA, 15 bp, Homo sapiens
tacaaggatcatgtc

SEQ ID NO: 802907 - DNA, 15 bp, Homo sapiens
acaaggatcatgtca

SEQ ID NO: 802908 - DNA, 15 bp, Homo sapiens
caaggatcatgtcag

SEQ ID NO: 802909 - DNA, 15 bp, Homo sapiens
aaggatcatgtcagg

SEQ ID NO: 802910 - DNA, 15 bp, Homo sapiens
aggatcatgtcaggc

SEQ ID NO: 802911 - DNA, 15 bp, Homo sapiens
ggatcatgtcaggct

SEQ ID NO: 802912 - DNA, 15 bp, Homo sapiens
gatcatgtcaggctc

SEQ ID NO: 802913 - DNA, 15 bp, Homo sapiens
atcatgtcaggctct

SEQ ID NO: 802914 - DNA, 15 bp, Homo sapiens
tcatgtcaggctctt

SEQ ID NO: 802915 - DNA, 15 bp, Homo sapiens
catgtcaggctcttc

SEQ ID NO: 802916 - DNA, 15 bp, Homo sapiens
atgtcaggctcttca

SEQ ID NO: 802917 - DNA, 15 bp, Homo sapiens
tgtcaggctcttcat

SEQ ID NO: 802918 - DNA, 15 bp, Homo sapiens
gtcaggctcttcatg

SEQ ID NO: 802919 - DNA, 15 bp, Homo sapiens
tcaggctcttcatgt

SEQ ID NO: 802920 - DNA, 15 bp, Homo sapiens
caggctcttcatgtg

SEQ ID NO: 802921 - DNA, 15 bp, Homo sapiens
aggctcttcatgtgg

SEQ ID NO: 802922 - DNA, 15 bp, Homo sapiens
ggctcttcatgtggc

SEQ ID NO: 802923 - DNA, 15 bp, Homo sapiens
gctcttcatgtggcc

SEQ ID NO: 802924 - DNA, 15 bp, Homo sapiens
ctcttcatgtggccc

SEQ ID NO: 802925 - DNA, 15 bp, Homo sapiens
tcttcatgtggccca

SEQ ID NO: 802926 - DNA, 15 bp, Homo sapiens
cttcatgtggcccag

SEQ ID NO: 802927 - DNA, 15 bp, Homo sapiens
ttcatgtggcccaga

SEQ ID NO: 802928 - DNA, 15 bp, Homo sapiens
tcatgtggcccagac

SEQ ID NO: 802929 - DNA, 15 bp, Homo sapiens
catgtggcccagact

SEQ ID NO: 802930 - DNA, 15 bp, Homo sapiens
atgtggcccagactt

SEQ ID NO: 802931 - DNA, 15 bp, Homo sapiens
tgtggcccagactta

SEQ ID NO: 802932 - DNA, 15 bp, Homo sapiens
gtggcccagacttag

SEQ ID NO: 802933 - DNA, 15 bp, Homo sapiens
tggcccagacttagg

SEQ ID NO: 802934 - DNA, 15 bp, Homo sapiens
ggcccagacttagga

SEQ ID NO: 802935 - DNA, 15 bp, Homo sapiens
gcccagacttaggat

SEQ ID NO: 802936 - DNA, 15 bp, Homo sapiens
cccagacttaggata

SEQ ID NO: 802937 - DNA, 15 bp, Homo sapiens
ccagacttaggatat

SEQ ID NO: 802938 - DNA, 15 bp, Homo sapiens
cagacttaggatata

SEQ ID NO: 802939 - DNA, 15 bp, Homo sapiens
agacttaggatatat

SEQ ID NO: 802940 - DNA, 15 bp, Homo sapiens
gacttaggatatatt

SEQ ID NO: 802941 - DNA, 15 bp, Homo sapiens
acttaggatatattt

SEQ ID NO: 802942 - DNA, 15 bp, Homo sapiens
cttaggatatatttt

SEQ ID NO: 802943 - DNA, 15 bp, Homo sapiens
ttaggatatattttt

SEQ ID NO: 802944 - DNA, 15 bp, Homo sapiens
taggatatatttttc

SEQ ID NO: 802945 - DNA, 15 bp, Homo sapiens
aggatatatttttct

SEQ ID NO: 802946 - DNA, 15 bp, Homo sapiens
ggatatatttttctc

SEQ ID NO: 802947 - DNA, 15 bp, Homo sapiens
gatatatttttctcc

SEQ ID NO: 802948 - DNA, 15 bp, Homo sapiens
atatatttttctccc

SEQ ID NO: 802949 - DNA, 15 bp, Homo sapiens
tatatttttctccct

SEQ ID NO: 802950 - DNA, 15 bp, Homo sapiens
atatttttctccctc

SEQ ID NO: 802951 - DNA, 15 bp, Homo sapiens
tatttttctccctca

SEQ ID NO: 802952 - DNA, 15 bp, Homo sapiens
atttttctccctcag

SEQ ID NO: 802953 - DNA, 15 bp, Homo sapiens
tttttctccctcaga

SEQ ID NO: 802954 - DNA, 15 bp, Homo sapiens
ttttctccctcagat

SEQ ID NO: 802955 - DNA, 15 bp, Homo sapiens
tttctccctcagata

SEQ ID NO: 802956 - DNA, 15 bp, Homo sapiens
ttctccctcagataa

SEQ ID NO: 802957 - DNA, 15 bp, Homo sapiens
tctccctcagataat

SEQ ID NO: 802958 - DNA, 15 bp, Homo sapiens
ctccctcagataata

SEQ ID NO: 802959 - DNA, 15 bp, Homo sapiens
tccctcagataataa

SEQ ID NO: 802960 - DNA, 15 bp, Homo sapiens
ccctcagataataag

SEQ ID NO: 802961 - DNA, 15 bp, Homo sapiens
cctcagataataagc

SEQ ID NO: 802962 - DNA, 15 bp, Homo sapiens
ctcagataataagct

SEQ ID NO: 802963 - DNA, 15 bp, Homo sapiens
tcagataataagctc

SEQ ID NO: 802964 - DNA, 15 bp, Homo sapiens
cagataataagctcc

SEQ ID NO: 802965 - DNA, 15 bp, Homo sapiens
agataataagctcca

SEQ ID NO: 802966 - DNA, 15 bp, Homo sapiens
gataataagctccaa

SEQ ID NO: 802967 - DNA, 15 bp, Homo sapiens
ataataagctccaaa

SEQ ID NO: 802968 - DNA, 15 bp, Homo sapiens
taataagctccaaat

SEQ ID NO: 802969 - DNA, 15 bp, Homo sapiens
aataagctccaaatt

SEQ ID NO: 802970 - DNA, 15 bp, Homo sapiens
ataagctccaaattt

SEQ ID NO: 802971 - DNA, 15 bp, Homo sapiens
taagctccaaatttt

SEQ ID NO: 802972 - DNA, 15 bp, Homo sapiens
aagctccaaatttta

SEQ ID NO: 802973 - DNA, 15 bp, Homo sapiens
agctccaaattttag

SEQ ID NO: 802974 - DNA, 15 bp, Homo sapiens
gctccaaattttagc

SEQ ID NO: 802975 - DNA, 15 bp, Homo sapiens
ctccaaattttagct

SEQ ID NO: 802976 - DNA, 15 bp, Homo sapiens
tccaaattttagctc

SEQ ID NO: 802977 - DNA, 15 bp, Homo sapiens
ccaaattttagctct

SEQ ID NO: 802978 - DNA, 15 bp, Homo sapiens
caaattttagctctt

SEQ ID NO: 802979 - DNA, 15 bp, Homo sapiens
aaattttagctcttc

SEQ ID NO: 802980 - DNA, 15 bp, Homo sapiens
aattttagctcttct

SEQ ID NO: 802981 - DNA, 15 bp, Homo sapiens
attttagctcttctc

SEQ ID NO: 802982 - DNA, 15 bp, Homo sapiens
ttttagctcttctcc

SEQ ID NO: 802983 - DNA, 15 bp, Homo sapiens
tttagctcttctccc

SEQ ID NO: 802984 - DNA, 15 bp, Homo sapiens
ttagctcttctccct

SEQ ID NO: 802985 - DNA, 15 bp, Homo sapiens
tagctcttctccctt

SEQ ID NO: 802986 - DNA, 15 bp, Homo sapiens
agctcttctcccttc

SEQ ID NO: 802987 - DNA, 15 bp, Homo sapiens
gctcttctcccttct

SEQ ID NO: 802988 - DNA, 15 bp, Homo sapiens
ctcttctcccttctc

SEQ ID NO: 802989 - DNA, 15 bp, Homo sapiens
tcttctcccttctct

SEQ ID NO: 802990 - DNA, 15 bp, Homo sapiens
cttctcccttctctg

SEQ ID NO: 802991 - DNA, 15 bp, Homo sapiens
ttctcccttctctgt

SEQ ID NO: 802992 - DNA, 15 bp, Homo sapiens
tctcccttctctgtc

SEQ ID NO: 802993 - DNA, 15 bp, Homo sapiens
ctcccttctctgtcc

SEQ ID NO: 802994 - DNA, 15 bp, Homo sapiens
tcccttctctgtcct

SEQ ID NO: 802995 - DNA, 15 bp, Homo sapiens
cccttctctgtcctc

SEQ ID NO: 802996 - DNA, 15 bp, Homo sapiens
ccttctctgtcctct

SEQ ID NO: 802997 - DNA, 15 bp, Homo sapiens
cttctctgtcctctc

SEQ ID NO: 802998 - DNA, 15 bp, Homo sapiens
ttctctgtcctctct

SEQ ID NO: 802999 - DNA, 15 bp, Homo sapiens
tctctgtcctctctc

SEQ ID NO: 803000 - DNA, 15 bp, Homo sapiens
ctctgtcctctctcc

SEQ ID NO: 803001 - DNA, 15 bp, Homo sapiens
tctgtcctctctcct

SEQ ID NO: 803002 - DNA, 15 bp, Homo sapiens
ctgtcctctctcctg

SEQ ID NO: 803003 - DNA, 15 bp, Homo sapiens
tgtcctctctcctgc

SEQ ID NO: 803004 - DNA, 15 bp, Homo sapiens
gtcctctctcctgcc

SEQ ID NO: 803005 - DNA, 15 bp, Homo sapiens
tcctctctcctgcca

SEQ ID NO: 803006 - DNA, 15 bp, Homo sapiens
cctctctcctgccat

SEQ ID NO: 803007 - DNA, 15 bp, Homo sapiens
ctctctcctgccatc

SEQ ID NO: 803008 - DNA, 15 bp, Homo sapiens
tctctcctgccatct

SEQ ID NO: 803009 - DNA, 15 bp, Homo sapiens
ctctcctgccatctc

SEQ ID NO: 803010 - DNA, 15 bp, Homo sapiens
tctcctgccatctct

SEQ ID NO: 803011 - DNA, 15 bp, Homo sapiens
ctcctgccatctctg

SEQ ID NO: 803012 - DNA, 15 bp, Homo sapiens
tcctgccatctctgc

SEQ ID NO: 803013 - DNA, 15 bp, Homo sapiens
cctgccatctctgcc

SEQ ID NO: 803014 - DNA, 15 bp, Homo sapiens
ctgccatctctgccc

SEQ ID NO: 803015 - DNA, 15 bp, Homo sapiens
tgccatctctgccct

SEQ ID NO: 803016 - DNA, 15 bp, Homo sapiens
gccatctctgccctt

SEQ ID NO: 803017 - DNA, 15 bp, Homo sapiens
ccatctctgcccttt

SEQ ID NO: 803018 - DNA, 15 bp, Homo sapiens
catctctgccctttc

SEQ ID NO: 803019 - DNA, 15 bp, Homo sapiens
atctctgccctttca

SEQ ID NO: 803020 - DNA, 15 bp, Homo sapiens
tctctgccctttcac

SEQ ID NO: 803021 - DNA, 15 bp, Homo sapiens
ctctgccctttcacc

SEQ ID NO: 803022 - DNA, 15 bp, Homo sapiens
tctgccctttcacca

SEQ ID NO: 803023 - DNA, 15 bp, Homo sapiens
ctgccctttcaccag

SEQ ID NO: 803024 - DNA, 15 bp, Homo sapiens
tgccctttcaccagc

SEQ ID NO: 803025 - DNA, 15 bp, Homo sapiens
gccctttcaccagcc

SEQ ID NO: 803026 - DNA, 15 bp, Homo sapiens
ccctttcaccagccc

SEQ ID NO: 803027 - DNA, 15 bp, Homo sapiens
cctttcaccagcccc

SEQ ID NO: 803028 - DNA, 15 bp, Homo sapiens
ctttcaccagcccca

SEQ ID NO: 803029 - DNA, 15 bp, Homo sapiens
tttcaccagccccag

SEQ ID NO: 803030 - DNA, 15 bp, Homo sapiens
ttcaccagccccagt

SEQ ID NO: 803031 - DNA, 15 bp, Homo sapiens
tcaccagccccagtt

SEQ ID NO: 803032 - DNA, 15 bp, Homo sapiens
caccagccccagtta

SEQ ID NO: 803033 - DNA, 15 bp, Homo sapiens
accagccccagttat

SEQ ID NO: 803034 - DNA, 15 bp, Homo sapiens
ccagccccagttata

SEQ ID NO: 803035 - DNA, 15 bp, Homo sapiens
cagccccagttatat

SEQ ID NO: 803036 - DNA, 15 bp, Homo sapiens
agccccagttatatc

SEQ ID NO: 803037 - DNA, 15 bp, Homo sapiens
gccccagttatatca

SEQ ID NO: 803038 - DNA, 15 bp, Homo sapiens
ccccagttatatcaa

SEQ ID NO: 803039 - DNA, 15 bp, Homo sapiens
cccagttatatcaat

SEQ ID NO: 803040 - DNA, 15 bp, Homo sapiens
ccagttatatcaata

SEQ ID NO: 803041 - DNA, 15 bp, Homo sapiens
cagttatatcaatat

SEQ ID NO: 803042 - DNA, 15 bp, Homo sapiens
agttatatcaatatc

SEQ ID NO: 803043 - DNA, 15 bp, Homo sapiens
gttatatcaatatct

SEQ ID NO: 803044 - DNA, 15 bp, Homo sapiens
ttatatcaatatctt

SEQ ID NO: 803045 - DNA, 15 bp, Homo sapiens
tatatcaatatctta

SEQ ID NO: 803046 - DNA, 15 bp, Homo sapiens
atatcaatatcttat

SEQ ID NO: 803047 - DNA, 15 bp, Homo sapiens
tatcaatatcttata

SEQ ID NO: 803048 - DNA, 15 bp, Homo sapiens
atcaatatcttatag

SEQ ID NO: 803049 - DNA, 15 bp, Homo sapiens
tcaatatcttatagc

SEQ ID NO: 803050 - DNA, 15 bp, Homo sapiens
caatatcttatagct

SEQ ID NO: 803051 - DNA, 15 bp, Homo sapiens
aatatcttatagctg

SEQ ID NO: 803052 - DNA, 15 bp, Homo sapiens
atatcttatagctgt

SEQ ID NO: 803053 - DNA, 15 bp, Homo sapiens
tatcttatagctgta

SEQ ID NO: 803054 - DNA, 15 bp, Homo sapiens
atcttatagctgtaa

SEQ ID NO: 803055 - DNA, 15 bp, Homo sapiens
tcttatagctgtaac

SEQ ID NO: 803056 - DNA, 15 bp, Homo sapiens
cttatagctgtaaca

SEQ ID NO: 803057 - DNA, 15 bp, Homo sapiens
ttatagctgtaacat

SEQ ID NO: 803058 - DNA, 15 bp, Homo sapiens
tatagctgtaacata

SEQ ID NO: 803059 - DNA, 15 bp, Homo sapiens
atagctgtaacatat

SEQ ID NO: 803060 - DNA, 15 bp, Homo sapiens
tagctgtaacatata

SEQ ID NO: 803061 - DNA, 15 bp, Homo sapiens
agctgtaacatataa

SEQ ID NO: 803062 - DNA, 15 bp, Homo sapiens
gctgtaacatataag

SEQ ID NO: 803063 - DNA, 15 bp, Homo sapiens
ctgtaacatataagt

SEQ ID NO: 803064 - DNA, 15 bp, Homo sapiens
tgtaacatataagta

SEQ ID NO: 803065 - DNA, 15 bp, Homo sapiens
gtaacatataagtac

SEQ ID NO: 803066 - DNA, 15 bp, Homo sapiens
taacatataagtact

SEQ ID NO: 803067 - DNA, 15 bp, Homo sapiens
aacatataagtactt

SEQ ID NO: 803068 - DNA, 15 bp, Homo sapiens
acatataagtacttt

SEQ ID NO: 803069 - DNA, 15 bp, Homo sapiens
catataagtactttc

SEQ ID NO: 803070 - DNA, 15 bp, Homo sapiens
atataagtactttcc

SEQ ID NO: 803071 - DNA, 15 bp, Homo sapiens
tataagtactttccc

SEQ ID NO: 803072 - DNA, 15 bp, Homo sapiens
ataagtactttcccc

SEQ ID NO: 803073 - DNA, 15 bp, Homo sapiens
taagtactttcccca

SEQ ID NO: 803074 - DNA, 15 bp, Homo sapiens
aagtactttccccag

SEQ ID NO: 803075 - DNA, 15 bp, Homo sapiens
agtactttccccaga

SEQ ID NO: 803076 - DNA, 15 bp, Homo sapiens
gtactttccccagag

SEQ ID NO: 803077 - DNA, 15 bp, Homo sapiens
tactttccccagagg

SEQ ID NO: 803078 - DNA, 15 bp, Homo sapiens
actttccccagagga

SEQ ID NO: 803079 - DNA, 15 bp, Homo sapiens
ctttccccagaggaa

SEQ ID NO: 803080 - DNA, 15 bp, Homo sapiens
tttccccagaggaac

SEQ ID NO: 803081 - DNA, 15 bp, Homo sapiens
ttccccagaggaaca

SEQ ID NO: 803082 - DNA, 15 bp, Homo sapiens
tccccagaggaacag

SEQ ID NO: 803083 - DNA, 15 bp, Homo sapiens
ccccagaggaacagt

SEQ ID NO: 803084 - DNA, 15 bp, Homo sapiens
cccagaggaacagtg

SEQ ID NO: 803085 - DNA, 15 bp, Homo sapiens
ccagaggaacagtgt

SEQ ID NO: 803086 - DNA, 15 bp, Homo sapiens
cagaggaacagtgta

SEQ ID NO: 803087 - DNA, 15 bp, Homo sapiens
agaggaacagtgtaa

SEQ ID NO: 803088 - DNA, 15 bp, Homo sapiens
gaggaacagtgtaac

SEQ ID NO: 803089 - DNA, 15 bp, Homo sapiens
aggaacagtgtaacc

SEQ ID NO: 803090 - DNA, 15 bp, Homo sapiens
ggaacagtgtaacct

SEQ ID NO: 803091 - DNA, 15 bp, Homo sapiens
gaacagtgtaacctt

SEQ ID NO: 803092 - DNA, 15 bp, Homo sapiens
aacagtgtaacctta

SEQ ID NO: 803093 - DNA, 15 bp, Homo sapiens
acagtgtaaccttag

SEQ ID NO: 803094 - DNA, 15 bp, Homo sapiens
cagtgtaaccttaga

SEQ ID NO: 803095 - DNA, 15 bp, Homo sapiens
agtgtaaccttagag

SEQ ID NO: 803096 - DNA, 15 bp, Homo sapiens
gtgtaaccttagagc

SEQ ID NO: 803097 - DNA, 15 bp, Homo sapiens
tgtaaccttagagcc

SEQ ID NO: 803098 - DNA, 15 bp, Homo sapiens
gtaaccttagagccc

SEQ ID NO: 803099 - DNA, 15 bp, Homo sapiens
taaccttagagccct

SEQ ID NO: 803100 - DNA, 15 bp, Homo sapiens
aaccttagagccctg

SEQ ID NO: 803101 - DNA, 15 bp, Homo sapiens
accttagagccctgg

SEQ ID NO: 803102 - DNA, 15 bp, Homo sapiens
ccttagagccctggg

SEQ ID NO: 803103 - DNA, 15 bp, Homo sapiens
cttagagccctgggt

SEQ ID NO: 803104 - DNA, 15 bp, Homo sapiens
ttagagccctgggtg

SEQ ID NO: 803105 - DNA, 15 bp, Homo sapiens
tagagccctgggtgc

SEQ ID NO: 803106 - DNA, 15 bp, Homo sapiens
agagccctgggtgca

SEQ ID NO: 803107 - DNA, 15 bp, Homo sapiens
gagccctgggtgcat

SEQ ID NO: 803108 - DNA, 15 bp, Homo sapiens
agccctgggtgcata

SEQ ID NO: 803109 - DNA, 15 bp, Homo sapiens
gccctgggtgcatag

SEQ ID NO: 803110 - DNA, 15 bp, Homo sapiens
ccctgggtgcatagt

SEQ ID NO: 803111 - DNA, 15 bp, Homo sapiens
cctgggtgcatagta

SEQ ID NO: 803112 - DNA, 15 bp, Homo sapiens
ctgggtgcatagtaa

SEQ ID NO: 803113 - DNA, 15 bp, Homo sapiens
tgggtgcatagtaaa

SEQ ID NO: 803114 - DNA, 15 bp, Homo sapiens
gggtgcatagtaaat

SEQ ID NO: 803115 - DNA, 15 bp, Homo sapiens
ggtgcatagtaaatt

SEQ ID NO: 803116 - DNA, 15 bp, Homo sapiens
gtgcatagtaaattt

SEQ ID NO: 803117 - DNA, 15 bp, Homo sapiens
tgcatagtaaatttc

SEQ ID NO: 803118 - DNA, 15 bp, Homo sapiens
gcatagtaaatttcc

SEQ ID NO: 803119 - DNA, 15 bp, Homo sapiens
catagtaaatttcca

SEQ ID NO: 803120 - DNA, 15 bp, Homo sapiens
atagtaaatttccaa

SEQ ID NO: 803121 - DNA, 15 bp, Homo sapiens
tagtaaatttccaaa

SEQ ID NO: 803122 - DNA, 15 bp, Homo sapiens
agtaaatttccaaac

SEQ ID NO: 803123 - DNA, 15 bp, Homo sapiens
gtaaatttccaaaca

SEQ ID NO: 803124 - DNA, 15 bp, Homo sapiens
taaatttccaaacac

SEQ ID NO: 803125 - DNA, 15 bp, Homo sapiens
aaatttccaaacacc

SEQ ID NO: 803126 - DNA, 15 bp, Homo sapiens
aatttccaaacacca

SEQ ID NO: 803127 - DNA, 15 bp, Homo sapiens
atttccaaacaccag

SEQ ID NO: 803128 - DNA, 15 bp, Homo sapiens
tttccaaacaccagc

SEQ ID NO: 803129 - DNA, 15 bp, Homo sapiens
ttccaaacaccagca

SEQ ID NO: 803130 - DNA, 15 bp, Homo sapiens
tccaaacaccagcat

SEQ ID NO: 803131 - DNA, 15 bp, Homo sapiens
ccaaacaccagcatc

SEQ ID NO: 803132 - DNA, 15 bp, Homo sapiens
caaacaccagcatca

SEQ ID NO: 803133 - DNA, 15 bp, Homo sapiens
aaacaccagcatcat

SEQ ID NO: 803134 - DNA, 15 bp, Homo sapiens
aacaccagcatcatc

SEQ ID NO: 803135 - DNA, 15 bp, Homo sapiens
acaccagcatcatca

SEQ ID NO: 803136 - DNA, 15 bp, Homo sapiens
caccagcatcatcaa

SEQ ID NO: 803137 - DNA, 15 bp, Homo sapiens
accagcatcatcaag

SEQ ID NO: 803138 - DNA, 15 bp, Homo sapiens
ccagcatcatcaagc

SEQ ID NO: 803139 - DNA, 15 bp, Homo sapiens
cagcatcatcaagcc

SEQ ID NO: 803140 - DNA, 15 bp, Homo sapiens
agcatcatcaagcca

SEQ ID NO: 803141 - DNA, 15 bp, Homo sapiens
gcatcatcaagccag

SEQ ID NO: 803142 - DNA, 15 bp, Homo sapiens
catcatcaagccagt

SEQ ID NO: 803143 - DNA, 15 bp, Homo sapiens
atcatcaagccagtc

SEQ ID NO: 803144 - DNA, 15 bp, Homo sapiens
tcatcaagccagtca

SEQ ID NO: 803145 - DNA, 15 bp, Homo sapiens
catcaagccagtcat

SEQ ID NO: 803146 - DNA, 15 bp, Homo sapiens
atcaagccagtcatg

SEQ ID NO: 803147 - DNA, 15 bp, Homo sapiens
tcaagccagtcatga

SEQ ID NO: 803148 - DNA, 15 bp, Homo sapiens
caagccagtcatgaa

SEQ ID NO: 803149 - DNA, 15 bp, Homo sapiens
aagccagtcatgaat

SEQ ID NO: 803150 - DNA, 15 bp, Homo sapiens
agccagtcatgaatc

SEQ ID NO: 803151 - DNA, 15 bp, Homo sapiens
gccagtcatgaatct

SEQ ID NO: 803152 - DNA, 15 bp, Homo sapiens
ccagtcatgaatctc

SEQ ID NO: 803153 - DNA, 15 bp, Homo sapiens
cagtcatgaatctcc

SEQ ID NO: 803154 - DNA, 15 bp, Homo sapiens
agtcatgaatctcca

SEQ ID NO: 803155 - DNA, 15 bp, Homo sapiens
gtcatgaatctccag

SEQ ID NO: 803156 - DNA, 15 bp, Homo sapiens
tcatgaatctccagc

SEQ ID NO: 803157 - DNA, 15 bp, Homo sapiens
catgaatctccagca

SEQ ID NO: 803158 - DNA, 15 bp, Homo sapiens
atgaatctccagcat

SEQ ID NO: 803159 - DNA, 15 bp, Homo sapiens
tgaatctccagcatg

SEQ ID NO: 803160 - DNA, 15 bp, Homo sapiens
gaatctccagcatgg

SEQ ID NO: 803161 - DNA, 15 bp, Homo sapiens
aatctccagcatggt

SEQ ID NO: 803162 - DNA, 15 bp, Homo sapiens
atctccagcatggtg

SEQ ID NO: 803163 - DNA, 15 bp, Homo sapiens
tctccagcatggtgg

SEQ ID NO: 803164 - DNA, 15 bp, Homo sapiens
ctccagcatggtggg

SEQ ID NO: 803165 - DNA, 15 bp, Homo sapiens
tccagcatggtggga

SEQ ID NO: 803166 - DNA, 15 bp, Homo sapiens
ccagcatggtgggat

SEQ ID NO: 803167 - DNA, 15 bp, Homo sapiens
cagcatggtgggatc

SEQ ID NO: 803168 - DNA, 15 bp, Homo sapiens
agcatggtgggatct

SEQ ID NO: 803169 - DNA, 15 bp, Homo sapiens
gcatggtgggatctg

SEQ ID NO: 803170 - DNA, 15 bp, Homo sapiens
catggtgggatctgg

SEQ ID NO: 803171 - DNA, 15 bp, Homo sapiens
atggtgggatctggg

SEQ ID NO: 803172 - DNA, 15 bp, Homo sapiens
tggtgggatctgggt

SEQ ID NO: 803173 - DNA, 15 bp, Homo sapiens
ggtgggatctgggtg

SEQ ID NO: 803174 - DNA, 15 bp, Homo sapiens
gtgggatctgggtgc

SEQ ID NO: 803175 - DNA, 15 bp, Homo sapiens
tgggatctgggtgca

SEQ ID NO: 803176 - DNA, 15 bp, Homo sapiens
gggatctgggtgcag

SEQ ID NO: 803177 - DNA, 15 bp, Homo sapiens
ggatctgggtgcaga

SEQ ID NO: 803178 - DNA, 15 bp, Homo sapiens
gatctgggtgcagaa

SEQ ID NO: 803179 - DNA, 15 bp, Homo sapiens
atctgggtgcagaac

SEQ ID NO: 803180 - DNA, 15 bp, Homo sapiens
tctgggtgcagaact

SEQ ID NO: 803181 - DNA, 15 bp, Homo sapiens
ctgggtgcagaactc

SEQ ID NO: 803182 - DNA, 15 bp, Homo sapiens
tgggtgcagaactca

SEQ ID NO: 803183 - DNA, 15 bp, Homo sapiens
gggtgcagaactcaa

SEQ ID NO: 803184 - DNA, 15 bp, Homo sapiens
ggtgcagaactcaat

SEQ ID NO: 803185 - DNA, 15 bp, Homo sapiens
gtgcagaactcaatg

SEQ ID NO: 803186 - DNA, 15 bp, Homo sapiens
tgcagaactcaatgg

SEQ ID NO: 803187 - DNA, 15 bp, Homo sapiens
gcagaactcaatggc

SEQ ID NO: 803188 - DNA, 15 bp, Homo sapiens
cagaactcaatggct

SEQ ID NO: 803189 - DNA, 15 bp, Homo sapiens
agaactcaatggctg

SEQ ID NO: 803190 - DNA, 15 bp, Homo sapiens
gaactcaatggctgt

SEQ ID NO: 803191 - DNA, 15 bp, Homo sapiens
aactcaatggctgtc

SEQ ID NO: 803192 - DNA, 15 bp, Homo sapiens
actcaatggctgtca

SEQ ID NO: 803193 - DNA, 15 bp, Homo sapiens
ctcaatggctgtcat

SEQ ID NO: 803194 - DNA, 15 bp, Homo sapiens
tcaatggctgtcatc

SEQ ID NO: 803195 - DNA, 15 bp, Homo sapiens
caatggctgtcatca

SEQ ID NO: 803196 - DNA, 15 bp, Homo sapiens
aatggctgtcatcag

SEQ ID NO: 803197 - DNA, 15 bp, Homo sapiens
atggctgtcatcaga

SEQ ID NO: 803198 - DNA, 15 bp, Homo sapiens
tggctgtcatcagat

SEQ ID NO: 803199 - DNA, 15 bp, Homo sapiens
ggctgtcatcagatt

SEQ ID NO: 803200 - DNA, 15 bp, Homo sapiens
gctgtcatcagattg

SEQ ID NO: 803201 - DNA, 15 bp, Homo sapiens
ctgtcatcagattga

SEQ ID NO: 803202 - DNA, 15 bp, Homo sapiens
tgtcatcagattgag

SEQ ID NO: 803203 - DNA, 15 bp, Homo sapiens
gtcatcagattgagg

SEQ ID NO: 803204 - DNA, 15 bp, Homo sapiens
tcatcagattgaggt

SEQ ID NO: 803205 - DNA, 15 bp, Homo sapiens
catcagattgaggta

SEQ ID NO: 803206 - DNA, 15 bp, Homo sapiens
atcagattgaggtag

SEQ ID NO: 803207 - DNA, 15 bp, Homo sapiens
tcagattgaggtagc

SEQ ID NO: 803208 - DNA, 15 bp, Homo sapiens
cagattgaggtagca

SEQ ID NO: 803209 - DNA, 15 bp, Homo sapiens
agattgaggtagcag

SEQ ID NO: 803210 - DNA, 15 bp, Homo sapiens
gattgaggtagcagg

SEQ ID NO: 803211 - DNA, 15 bp, Homo sapiens
attgaggtagcagga

SEQ ID NO: 803212 - DNA, 15 bp, Homo sapiens
ttgaggtagcaggag

SEQ ID NO: 803213 - DNA, 15 bp, Homo sapiens
tgaggtagcaggagt

SEQ ID NO: 803214 - DNA, 15 bp, Homo sapiens
gaggtagcaggagtt

SEQ ID NO: 803215 - DNA, 15 bp, Homo sapiens
aggtagcaggagttg

SEQ ID NO: 803216 - DNA, 15 bp, Homo sapiens
ggtagcaggagttgc

SEQ ID NO: 803217 - DNA, 15 bp, Homo sapiens
gtagcaggagttgct

SEQ ID NO: 803218 - DNA, 15 bp, Homo sapiens
tagcaggagttgctc

SEQ ID NO: 803219 - DNA, 15 bp, Homo sapiens
agcaggagttgctca

SEQ ID NO: 803220 - DNA, 15 bp, Homo sapiens
gcaggagttgctcac

SEQ ID NO: 803221 - DNA, 15 bp, Homo sapiens
caggagttgctcact

SEQ ID NO: 803222 - DNA, 15 bp, Homo sapiens
aggagttgctcactt

SEQ ID NO: 803223 - DNA, 15 bp, Homo sapiens
ggagttgctcacttg

SEQ ID NO: 803224 - DNA, 15 bp, Homo sapiens
gagttgctcacttgc

SEQ ID NO: 803225 - DNA, 15 bp, Homo sapiens
agttgctcacttgcc

SEQ ID NO: 803226 - DNA, 15 bp, Homo sapiens
gttgctcacttgcct

SEQ ID NO: 803227 - DNA, 15 bp, Homo sapiens
ttgctcacttgcctt

SEQ ID NO: 803228 - DNA, 15 bp, Homo sapiens
tgctcacttgccttc

SEQ ID NO: 803229 - DNA, 15 bp, Homo sapiens
gctcacttgccttcc

SEQ ID NO: 803230 - DNA, 15 bp, Homo sapiens
ctcacttgccttcct

SEQ ID NO: 803231 - DNA, 15 bp, Homo sapiens
tcacttgccttcctg

SEQ ID NO: 803232 - DNA, 15 bp, Homo sapiens
cacttgccttcctgc

SEQ ID NO: 803233 - DNA, 15 bp, Homo sapiens
acttgccttcctgcc

SEQ ID NO: 803234 - DNA, 15 bp, Homo sapiens
cttgccttcctgcca

SEQ ID NO: 803235 - DNA, 15 bp, Homo sapiens
ttgccttcctgccag

SEQ ID NO: 803236 - DNA, 15 bp, Homo sapiens
tgccttcctgccagc

SEQ ID NO: 803237 - DNA, 15 bp, Homo sapiens
gccttcctgccagcc

SEQ ID NO: 803238 - DNA, 15 bp, Homo sapiens
ccttcctgccagcca

SEQ ID NO: 803239 - DNA, 15 bp, Homo sapiens
cttcctgccagccag

SEQ ID NO: 803240 - DNA, 15 bp, Homo sapiens
ttcctgccagccaga

SEQ ID NO: 803241 - DNA, 15 bp, Homo sapiens
tcctgccagccagac

SEQ ID NO: 803242 - DNA, 15 bp, Homo sapiens
cctgccagccagacc

SEQ ID NO: 803243 - DNA, 15 bp, Homo sapiens
ctgccagccagaccc

SEQ ID NO: 803244 - DNA, 15 bp, Homo sapiens
tgccagccagaccca

SEQ ID NO: 803245 - DNA, 15 bp, Homo sapiens
gccagccagacccag

SEQ ID NO: 803246 - DNA, 15 bp, Homo sapiens
ccagccagacccagt

SEQ ID NO: 803247 - DNA, 15 bp, Homo sapiens
cagccagacccagtg

SEQ ID NO: 803248 - DNA, 15 bp, Homo sapiens
agccagacccagtgc

SEQ ID NO: 803249 - DNA, 15 bp, Homo sapiens
gccagacccagtgcg

SEQ ID NO: 803250 - DNA, 15 bp, Homo sapiens
ccagacccagtgcga

SEQ ID NO: 803251 - DNA, 15 bp, Homo sapiens
cagacccagtgcgag

SEQ ID NO: 803252 - DNA, 15 bp, Homo sapiens
agacccagtgcgaga

SEQ ID NO: 803253 - DNA, 15 bp, Homo sapiens
gacccagtgcgagat

SEQ ID NO: 803254 - DNA, 15 bp, Homo sapiens
acccagtgcgagatt

SEQ ID NO: 803255 - DNA, 15 bp, Homo sapiens
cccagtgcgagattt

SEQ ID NO: 803256 - DNA, 15 bp, Homo sapiens
ccagtgcgagatttg

SEQ ID NO: 803257 - DNA, 15 bp, Homo sapiens
cagtgcgagatttgt

SEQ ID NO: 803258 - DNA, 15 bp, Homo sapiens
agtgcgagatttgtt

SEQ ID NO: 803259 - DNA, 15 bp, Homo sapiens
gtgcgagatttgtta

SEQ ID NO: 803260 - DNA, 15 bp, Homo sapiens
tgcgagatttgttac

SEQ ID NO: 803261 - DNA, 15 bp, Homo sapiens
gcgagatttgttact

SEQ ID NO: 803262 - DNA, 15 bp, Homo sapiens
cgagatttgttactc

SEQ ID NO: 803263 - DNA, 15 bp, Homo sapiens
gagatttgttactca

SEQ ID NO: 803264 - DNA, 15 bp, Homo sapiens
agatttgttactcag

SEQ ID NO: 803265 - DNA, 15 bp, Homo sapiens
gatttgttactcagg

SEQ ID NO: 803266 - DNA, 15 bp, Homo sapiens
atttgttactcaggg

SEQ ID NO: 803267 - DNA, 15 bp, Homo sapiens
tttgttactcaggga

SEQ ID NO: 803268 - DNA, 15 bp, Homo sapiens
ttgttactcagggaa

SEQ ID NO: 803269 - DNA, 15 bp, Homo sapiens
tgttactcagggaac

SEQ ID NO: 803270 - DNA, 15 bp, Homo sapiens
gttactcagggaact

SEQ ID NO: 803271 - DNA, 15 bp, Homo sapiens
ttactcagggaactg

SEQ ID NO: 803272 - DNA, 15 bp, Homo sapiens
tactcagggaactgg

SEQ ID NO: 803273 - DNA, 15 bp, Homo sapiens
actcagggaactggg

SEQ ID NO: 803274 - DNA, 15 bp, Homo sapiens
ctcagggaactggga

SEQ ID NO: 803275 - DNA, 15 bp, Homo sapiens
tcagggaactgggag

SEQ ID NO: 803276 - DNA, 15 bp, Homo sapiens
cagggaactgggaga

SEQ ID NO: 803277 - DNA, 15 bp, Homo sapiens
agggaactgggagat

SEQ ID NO: 803278 - DNA, 15 bp, Homo sapiens
gggaactgggagatc

SEQ ID NO: 803279 - DNA, 15 bp, Homo sapiens
ggaactgggagatcc

SEQ ID NO: 803280 - DNA, 15 bp, Homo sapiens
gaactgggagatccc

SEQ ID NO: 803281 - DNA, 15 bp, Homo sapiens
aactgggagatcccc

SEQ ID NO: 803282 - DNA, 15 bp, Homo sapiens
actgggagatccccg

SEQ ID NO: 803283 - DNA, 15 bp, Homo sapiens
ctgggagatccccgt

SEQ ID NO: 803284 - DNA, 15 bp, Homo sapiens
tgggagatccccgtg

SEQ ID NO: 803285 - DNA, 15 bp, Homo sapiens
gggagatccccgtga

SEQ ID NO: 803286 - DNA, 15 bp, Homo sapiens
ggagatccccgtgat

SEQ ID NO: 803287 - DNA, 15 bp, Homo sapiens
gagatccccgtgatg

SEQ ID NO: 803288 - DNA, 15 bp, Homo sapiens
agatccccgtgatgt

SEQ ID NO: 803289 - DNA, 15 bp, Homo sapiens
gatccccgtgatgtg

SEQ ID NO: 803290 - DNA, 15 bp, Homo sapiens
atccccgtgatgtgt

SEQ ID NO: 803291 - DNA, 15 bp, Homo sapiens
tccccgtgatgtgtt

SEQ ID NO: 803292 - DNA, 15 bp, Homo sapiens
ccccgtgatgtgttt

SEQ ID NO: 803293 - DNA, 15 bp, Homo sapiens
cccgtgatgtgtttc

SEQ ID NO: 803294 - DNA, 15 bp, Homo sapiens
ccgtgatgtgtttct

SEQ ID NO: 803295 - DNA, 15 bp, Homo sapiens
cgtgatgtgtttctc

SEQ ID NO: 803296 - DNA, 15 bp, Homo sapiens
gtgatgtgtttctca

SEQ ID NO: 803297 - DNA, 15 bp, Homo sapiens
tgatgtgtttctcac

SEQ ID NO: 803298 - DNA, 15 bp, Homo sapiens
gatgtgtttctcacc

SEQ ID NO: 803299 - DNA, 15 bp, Homo sapiens
atgtgtttctcaccg

SEQ ID NO: 803300 - DNA, 15 bp, Homo sapiens
tgtgtttctcaccgt

SEQ ID NO: 803301 - DNA, 15 bp, Homo sapiens
gtgtttctcaccgtt

SEQ ID NO: 803302 - DNA, 15 bp, Homo sapiens
tgtttctcaccgttc

SEQ ID NO: 803303 - DNA, 15 bp, Homo sapiens
gtttctcaccgttcg

SEQ ID NO: 803304 - DNA, 15 bp, Homo sapiens
tttctcaccgttcga

SEQ ID NO: 803305 - DNA, 15 bp, Homo sapiens
ttctcaccgttcgag

SEQ ID NO: 803306 - DNA, 15 bp, Homo sapiens
tctcaccgttcgagt

SEQ ID NO: 803307 - DNA, 15 bp, Homo sapiens
ctcaccgttcgagtt

SEQ ID NO: 803308 - DNA, 15 bp, Homo sapiens
tcaccgttcgagttt

SEQ ID NO: 803309 - DNA, 15 bp, Homo sapiens
caccgttcgagtttg

SEQ ID NO: 803310 - DNA, 15 bp, Homo sapiens
accgttcgagtttga

SEQ ID NO: 803311 - DNA, 15 bp, Homo sapiens
ccgttcgagtttgat

SEQ ID NO: 803312 - DNA, 15 bp, Homo sapiens
cgttcgagtttgatt

SEQ ID NO: 803313 - DNA, 15 bp, Homo sapiens
gttcgagtttgattg

SEQ ID NO: 803314 - DNA, 15 bp, Homo sapiens
ttcgagtttgattgt

SEQ ID NO: 803315 - DNA, 15 bp, Homo sapiens
tcgagtttgattgtg

SEQ ID NO: 803316 - DNA, 15 bp, Homo sapiens
cgagtttgattgtga

SEQ ID NO: 803317 - DNA, 15 bp, Homo sapiens
gagtttgattgtgaa

SEQ ID NO: 803318 - DNA, 15 bp, Homo sapiens
agtttgattgtgaaa

SEQ ID NO: 803319 - DNA, 15 bp, Homo sapiens
gtttgattgtgaaaa

SEQ ID NO: 803320 - DNA, 15 bp, Homo sapiens
tttgattgtgaaaag

SEQ ID NO: 803321 - DNA, 15 bp, Homo sapiens
ttgattgtgaaaaga

SEQ ID NO: 803322 - DNA, 15 bp, Homo sapiens
tgattgtgaaaagag

SEQ ID NO: 803323 - DNA, 15 bp, Homo sapiens
gattgtgaaaagagt

SEQ ID NO: 803324 - DNA, 15 bp, Homo sapiens
attgtgaaaagagtc

SEQ ID NO: 803325 - DNA, 15 bp, Homo sapiens
ttgtgaaaagagtct

SEQ ID NO: 803326 - DNA, 15 bp, Homo sapiens
tgtgaaaagagtctg

SEQ ID NO: 803327 - DNA, 15 bp, Homo sapiens
gtgaaaagagtctgg

SEQ ID NO: 803328 - DNA, 15 bp, Homo sapiens
tgaaaagagtctggt

SEQ ID NO: 803329 - DNA, 15 bp, Homo sapiens
gaaaagagtctggta

SEQ ID NO: 803330 - DNA, 15 bp, Homo sapiens
aaaagagtctggtac

SEQ ID NO: 803331 - DNA, 15 bp, Homo sapiens
aaagagtctggtacc

SEQ ID NO: 803332 - DNA, 15 bp, Homo sapiens
aagagtctggtacct

SEQ ID NO: 803333 - DNA, 15 bp, Homo sapiens
agagtctggtacctc

SEQ ID NO: 803334 - DNA, 15 bp, Homo sapiens
gagtctggtacctca

SEQ ID NO: 803335 - DNA, 15 bp, Homo sapiens
agtctggtacctcac

SEQ ID NO: 803336 - DNA, 15 bp, Homo sapiens
gtctggtacctcaca

SEQ ID NO: 803337 - DNA, 15 bp, Homo sapiens
tctggtacctcacac

SEQ ID NO: 803338 - DNA, 15 bp, Homo sapiens
ctggtacctcacaca

SEQ ID NO: 803339 - DNA, 15 bp, Homo sapiens
tggtacctcacacat

SEQ ID NO: 803340 - DNA, 15 bp, Homo sapiens
ggtacctcacacatt

SEQ ID NO: 803341 - DNA, 15 bp, Homo sapiens
gtacctcacacatta

SEQ ID NO: 803342 - DNA, 15 bp, Homo sapiens
tacctcacacattag

SEQ ID NO: 803343 - DNA, 15 bp, Homo sapiens
acctcacacattaga

SEQ ID NO: 803344 - DNA, 15 bp, Homo sapiens
cctcacacattagat

SEQ ID NO: 803345 - DNA, 15 bp, Homo sapiens
ctcacacattagatt

SEQ ID NO: 803346 - DNA, 15 bp, Homo sapiens
tcacacattagattt

SEQ ID NO: 803347 - DNA, 15 bp, Homo sapiens
cacacattagatttg

SEQ ID NO: 803348 - DNA, 15 bp, Homo sapiens
acacattagatttga

SEQ ID NO: 803349 - DNA, 15 bp, Homo sapiens
cacattagatttgat

SEQ ID NO: 803350 - DNA, 15 bp, Homo sapiens
acattagatttgatt

SEQ ID NO: 803351 - DNA, 15 bp, Homo sapiens
cattagatttgattt

SEQ ID NO: 803352 - DNA, 15 bp, Homo sapiens
attagatttgatttc

SEQ ID NO: 803353 - DNA, 15 bp, Homo sapiens
ttagatttgatttca

SEQ ID NO: 803354 - DNA, 15 bp, Homo sapiens
tagatttgatttcag

SEQ ID NO: 803355 - DNA, 15 bp, Homo sapiens
agatttgatttcaga

SEQ ID NO: 803356 - DNA, 15 bp, Homo sapiens
gatttgatttcagaa

SEQ ID NO: 803357 - DNA, 15 bp, Homo sapiens
atttgatttcagaaa

SEQ ID NO: 803358 - DNA, 15 bp, Homo sapiens
tttgatttcagaaat

SEQ ID NO: 803359 - DNA, 15 bp, Homo sapiens
ttgatttcagaaatc

SEQ ID NO: 803360 - DNA, 15 bp, Homo sapiens
tgatttcagaaatcc

SEQ ID NO: 803361 - DNA, 15 bp, Homo sapiens
gatttcagaaatcct

SEQ ID NO: 803362 - DNA, 15 bp, Homo sapiens
atttcagaaatcctc

SEQ ID NO: 803363 - DNA, 15 bp, Homo sapiens
tttcagaaatcctca

SEQ ID NO: 803364 - DNA, 15 bp, Homo sapiens
ttcagaaatcctcac

SEQ ID NO: 803365 - DNA, 15 bp, Homo sapiens
tcagaaatcctcacc

SEQ ID NO: 803366 - DNA, 15 bp, Homo sapiens
cagaaatcctcaccg

SEQ ID NO: 803367 - DNA, 15 bp, Homo sapiens
agaaatcctcaccgt

SEQ ID NO: 803368 - DNA, 15 bp, Homo sapiens
gaaatcctcaccgtg

SEQ ID NO: 803369 - DNA, 15 bp, Homo sapiens
aaatcctcaccgtgg

SEQ ID NO: 803370 - DNA, 15 bp, Homo sapiens
aatcctcaccgtggg

SEQ ID NO: 803371 - DNA, 15 bp, Homo sapiens
atcctcaccgtgggc

SEQ ID NO: 803372 - DNA, 15 bp, Homo sapiens
tcctcaccgtgggcc

SEQ ID NO: 803373 - DNA, 15 bp, Homo sapiens
cctcaccgtgggccc

SEQ ID NO: 803374 - DNA, 15 bp, Homo sapiens
ctcaccgtgggccca

SEQ ID NO: 803375 - DNA, 15 bp, Homo sapiens
tcaccgtgggcccat

SEQ ID NO: 803376 - DNA, 15 bp, Homo sapiens
caccgtgggcccata

SEQ ID NO: 803377 - DNA, 15 bp, Homo sapiens
accgtgggcccatag

SEQ ID NO: 803378 - DNA, 15 bp, Homo sapiens
ccgtgggcccatagt

SEQ ID NO: 803379 - DNA, 15 bp, Homo sapiens
cgtgggcccatagtt

SEQ ID NO: 803380 - DNA, 15 bp, Homo sapiens
gtgggcccatagttt

SEQ ID NO: 803381 - DNA, 15 bp, Homo sapiens
tgggcccatagttta

SEQ ID NO: 803382 - DNA, 15 bp, Homo sapiens
gggcccatagtttac

SEQ ID NO: 803383 - DNA, 15 bp, Homo sapiens
ggcccatagtttacc

SEQ ID NO: 803384 - DNA, 15 bp, Homo sapiens
gcccatagtttacct

SEQ ID NO: 803385 - DNA, 15 bp, Homo sapiens
cccatagtttacctt

SEQ ID NO: 803386 - DNA, 15 bp, Homo sapiens
ccatagtttaccttt

SEQ ID NO: 803387 - DNA, 15 bp, Homo sapiens
catagtttacctttc

SEQ ID NO: 803388 - DNA, 15 bp, Homo sapiens
atagtttacctttca

SEQ ID NO: 803389 - DNA, 15 bp, Homo sapiens
tagtttacctttcaa

SEQ ID NO: 803390 - DNA, 15 bp, Homo sapiens
agtttacctttcaac

SEQ ID NO: 803391 - DNA, 15 bp, Homo sapiens
gtttacctttcaact

SEQ ID NO: 803392 - DNA, 15 bp, Homo sapiens
tttacctttcaactc

SEQ ID NO: 803393 - DNA, 15 bp, Homo sapiens
ttacctttcaactcc

SEQ ID NO: 803394 - DNA, 15 bp, Homo sapiens
tacctttcaactccc

SEQ ID NO: 803395 - DNA, 15 bp, Homo sapiens
acctttcaactcccc

SEQ ID NO: 803396 - DNA, 15 bp, Homo sapiens
cctttcaactccccc

SEQ ID NO: 803397 - DNA, 15 bp, Homo sapiens
ctttcaactccccct

SEQ ID NO: 803398 - DNA, 15 bp, Homo sapiens
tttcaactccccctt

SEQ ID NO: 803399 - DNA, 15 bp, Homo sapiens
ttcaactcccccttc

SEQ ID NO: 803400 - DNA, 15 bp, Homo sapiens
tcaactcccccttca

SEQ ID NO: 803401 - DNA, 15 bp, Homo sapiens
caactcccccttcag

SEQ ID NO: 803402 - DNA, 15 bp, Homo sapiens
aactcccccttcagg

SEQ ID NO: 803403 - DNA, 15 bp, Homo sapiens
actcccccttcaggg

SEQ ID NO: 803404 - DNA, 15 bp, Homo sapiens
ctcccccttcaggga

SEQ ID NO: 803405 - DNA, 15 bp, Homo sapiens
tcccccttcagggag

SEQ ID NO: 803406 - DNA, 15 bp, Homo sapiens
cccccttcagggaga

SEQ ID NO: 803407 - DNA, 15 bp, Homo sapiens
ccccttcagggagat

SEQ ID NO: 803408 - DNA, 15 bp, Homo sapiens
cccttcagggagatc

SEQ ID NO: 803409 - DNA, 15 bp, Homo sapiens
ccttcagggagatcc

SEQ ID NO: 803410 - DNA, 15 bp, Homo sapiens
cttcagggagatcct

SEQ ID NO: 803411 - DNA, 15 bp, Homo sapiens
ttcagggagatcctt

SEQ ID NO: 803412 - DNA, 15 bp, Homo sapiens
tcagggagatccttg

SEQ ID NO: 803413 - DNA, 15 bp, Homo sapiens
cagggagatccttgt

SEQ ID NO: 803414 - DNA, 15 bp, Homo sapiens
agggagatccttgtt

SEQ ID NO: 803415 - DNA, 15 bp, Homo sapiens
gggagatccttgtta

SEQ ID NO: 803416 - DNA, 15 bp, Homo sapiens
ggagatccttgttaa

SEQ ID NO: 803417 - DNA, 15 bp, Homo sapiens
gagatccttgttaag

SEQ ID NO: 803418 - DNA, 15 bp, Homo sapiens
agatccttgttaagt

SEQ ID NO: 803419 - DNA, 15 bp, Homo sapiens
gatccttgttaagtt

SEQ ID NO: 803420 - DNA, 15 bp, Homo sapiens
atccttgttaagttt

SEQ ID NO: 803421 - DNA, 15 bp, Homo sapiens
tccttgttaagtttc

SEQ ID NO: 803422 - DNA, 15 bp, Homo sapiens
ccttgttaagtttcg

SEQ ID NO: 803423 - DNA, 15 bp, Homo sapiens
cttgttaagtttcgg

SEQ ID NO: 803424 - DNA, 15 bp, Homo sapiens
ttgttaagtttcggt

SEQ ID NO: 803425 - DNA, 15 bp, Homo sapiens
tgttaagtttcggtt

SEQ ID NO: 803426 - DNA, 15 bp, Homo sapiens
gttaagtttcggttt

SEQ ID NO: 803427 - DNA, 15 bp, Homo sapiens
ttaagtttcggtttt

SEQ ID NO: 803428 - DNA, 15 bp, Homo sapiens
taagtttcggttttc

SEQ ID NO: 803429 - DNA, 15 bp, Homo sapiens
aagtttcggttttct

SEQ ID NO: 803430 - DNA, 15 bp, Homo sapiens
agtttcggttttctg

SEQ ID NO: 803431 - DNA, 15 bp, Homo sapiens
gtttcggttttctgg

SEQ ID NO: 803432 - DNA, 15 bp, Homo sapiens
tttcggttttctggt

SEQ ID NO: 803433 - DNA, 15 bp, Homo sapiens
ttcggttttctggta

SEQ ID NO: 803434 - DNA, 15 bp, Homo sapiens
tcggttttctggtaa

SEQ ID NO: 803435 - DNA, 15 bp, Homo sapiens
cggttttctggtaag

SEQ ID NO: 803436 - DNA, 15 bp, Homo sapiens
ggttttctggtaaga

SEQ ID NO: 803437 - DNA, 15 bp, Homo sapiens
gttttctggtaagaa

SEQ ID NO: 803438 - DNA, 15 bp, Homo sapiens
ttttctggtaagaaa

SEQ ID NO: 803439 - DNA, 15 bp, Homo sapiens
tttctggtaagaaag

SEQ ID NO: 803440 - DNA, 15 bp, Homo sapiens
ttctggtaagaaagg

SEQ ID NO: 803441 - DNA, 15 bp, Homo sapiens
tctggtaagaaaggc

SEQ ID NO: 803442 - DNA, 15 bp, Homo sapiens
ctggtaagaaaggca

SEQ ID NO: 803443 - DNA, 15 bp, Homo sapiens
tggtaagaaaggcag

SEQ ID NO: 803444 - DNA, 15 bp, Homo sapiens
ggtaagaaaggcagt

SEQ ID NO: 803445 - DNA, 15 bp, Homo sapiens
gtaagaaaggcagtt

SEQ ID NO: 803446 - DNA, 15 bp, Homo sapiens
taagaaaggcagttt

SEQ ID NO: 803447 - DNA, 15 bp, Homo sapiens
aagaaaggcagtttt

SEQ ID NO: 803448 - DNA, 15 bp, Homo sapiens
agaaaggcagttttc

SEQ ID NO: 803449 - DNA, 15 bp, Homo sapiens
gaaaggcagttttct

SEQ ID NO: 803450 - DNA, 15 bp, Homo sapiens
aaaggcagttttctg

SEQ ID NO: 803451 - DNA, 15 bp, Homo sapiens
aaggcagttttctga

SEQ ID NO: 803452 - DNA, 15 bp, Homo sapiens
aggcagttttctgaa

SEQ ID NO: 803453 - DNA, 15 bp, Homo sapiens
ggcagttttctgaaa

SEQ ID NO: 803454 - DNA, 15 bp, Homo sapiens
gcagttttctgaaaa

SEQ ID NO: 803455 - DNA, 15 bp, Homo sapiens
cagttttctgaaaag

SEQ ID NO: 803456 - DNA, 15 bp, Homo sapiens
agttttctgaaaagt

SEQ ID NO: 803457 - DNA, 15 bp, Homo sapiens
gttttctgaaaagta

SEQ ID NO: 803458 - DNA, 15 bp, Homo sapiens
ttttctgaaaagtac

SEQ ID NO: 803459 - DNA, 15 bp, Homo sapiens
tttctgaaaagtaca

SEQ ID NO: 803460 - DNA, 15 bp, Homo sapiens
ttctgaaaagtacag

SEQ ID NO: 803461 - DNA, 15 bp, Homo sapiens
tctgaaaagtacagt

SEQ ID NO: 803462 - DNA, 15 bp, Homo sapiens
ctgaaaagtacagta

SEQ ID NO: 803463 - DNA, 15 bp, Homo sapiens
tgaaaagtacagtat

SEQ ID NO: 803464 - DNA, 15 bp, Homo sapiens
gaaaagtacagtatt

SEQ ID NO: 803465 - DNA, 15 bp, Homo sapiens
aaaagtacagtattt

SEQ ID NO: 803466 - DNA, 15 bp, Homo sapiens
aaagtacagtatttt

SEQ ID NO: 803467 - DNA, 15 bp, Homo sapiens
aagtacagtattttt

SEQ ID NO: 803468 - DNA, 15 bp, Homo sapiens
agtacagtattttta

SEQ ID NO: 803469 - DNA, 15 bp, Homo sapiens
gtacagtatttttaa

SEQ ID NO: 803470 - DNA, 15 bp, Homo sapiens
tacagtatttttaaa

SEQ ID NO: 803471 - DNA, 15 bp, Homo sapiens
acagtatttttaaat

SEQ ID NO: 803472 - DNA, 15 bp, Homo sapiens
cagtatttttaaatg

SEQ ID NO: 803473 - DNA, 15 bp, Homo sapiens
agtatttttaaatgt

SEQ ID NO: 803474 - DNA, 15 bp, Homo sapiens
gtatttttaaatgtt

SEQ ID NO: 803475 - DNA, 15 bp, Homo sapiens
tatttttaaatgttt

SEQ ID NO: 803476 - DNA, 15 bp, Homo sapiens
atttttaaatgtttt

SEQ ID NO: 803477 - DNA, 15 bp, Homo sapiens
tttttaaatgtttta

SEQ ID NO: 803478 - DNA, 15 bp, Homo sapiens
ttttaaatgttttaa

SEQ ID NO: 803479 - DNA, 15 bp, Homo sapiens
tttaaatgttttaat

SEQ ID NO: 803480 - DNA, 15 bp, Homo sapiens
ttaaatgttttaatc

SEQ ID NO: 803481 - DNA, 15 bp, Homo sapiens
taaatgttttaatcg

SEQ ID NO: 803482 - DNA, 15 bp, Homo sapiens
aaatgttttaatcga

SEQ ID NO: 803483 - DNA, 15 bp, Homo sapiens
aatgttttaatcgag

SEQ ID NO: 803484 - DNA, 15 bp, Homo sapiens
atgttttaatcgagt

SEQ ID NO: 803485 - DNA, 15 bp, Homo sapiens
tgttttaatcgagtc

SEQ ID NO: 803486 - DNA, 15 bp, Homo sapiens
gttttaatcgagtcc

SEQ ID NO: 803487 - DNA, 15 bp, Homo sapiens
ttttaatcgagtcca

SEQ ID NO: 803488 - DNA, 15 bp, Homo sapiens
tttaatcgagtccaa

SEQ ID NO: 803489 - DNA, 15 bp, Homo sapiens
ttaatcgagtccaat

SEQ ID NO: 803490 - DNA, 15 bp, Homo sapiens
taatcgagtccaatt

SEQ ID NO: 803491 - DNA, 15 bp, Homo sapiens
aatcgagtccaatta

SEQ ID NO: 803492 - DNA, 15 bp, Homo sapiens
atcgagtccaattaa

SEQ ID NO: 803493 - DNA, 15 bp, Homo sapiens
tcgagtccaattaag

SEQ ID NO: 803494 - DNA, 15 bp, Homo sapiens
cgagtccaattaagt

SEQ ID NO: 803495 - DNA, 15 bp, Homo sapiens
gagtccaattaagtt

SEQ ID NO: 803496 - DNA, 15 bp, Homo sapiens
agtccaattaagttt

SEQ ID NO: 803497 - DNA, 15 bp, Homo sapiens
gtccaattaagtttc

SEQ ID NO: 803498 - DNA, 15 bp, Homo sapiens
tccaattaagtttcc

SEQ ID NO: 803499 - DNA, 15 bp, Homo sapiens
ccaattaagtttcca

SEQ ID NO: 803500 - DNA, 15 bp, Homo sapiens
caattaagtttccat

SEQ ID NO: 803501 - DNA, 15 bp, Homo sapiens
aattaagtttccatg

SEQ ID NO: 803502 - DNA, 15 bp, Homo sapiens
attaagtttccatgg

SEQ ID NO: 803503 - DNA, 15 bp, Homo sapiens
ttaagtttccatggg

SEQ ID NO: 803504 - DNA, 15 bp, Homo sapiens
taagtttccatgggg

SEQ ID NO: 803505 - DNA, 15 bp, Homo sapiens
aagtttccatgggga

SEQ ID NO: 803506 - DNA, 15 bp, Homo sapiens
agtttccatggggat

SEQ ID NO: 803507 - DNA, 15 bp, Homo sapiens
gtttccatggggata

SEQ ID NO: 803508 - DNA, 15 bp, Homo sapiens
tttccatggggatag

SEQ ID NO: 803509 - DNA, 15 bp, Homo sapiens
ttccatggggataga

SEQ ID NO: 803510 - DNA, 15 bp, Homo sapiens
tccatggggatagat

SEQ ID NO: 803511 - DNA, 15 bp, Homo sapiens
ccatggggatagatt

SEQ ID NO: 803512 - DNA, 15 bp, Homo sapiens
catggggatagatta

SEQ ID NO: 803513 - DNA, 15 bp, Homo sapiens
atggggatagattag

SEQ ID NO: 803514 - DNA, 15 bp, Homo sapiens
tggggatagattagt

SEQ ID NO: 803515 - DNA, 15 bp, Homo sapiens
ggggatagattagtt

SEQ ID NO: 803516 - DNA, 15 bp, Homo sapiens
gggatagattagtta

SEQ ID NO: 803517 - DNA, 15 bp, Homo sapiens
ggatagattagttat

SEQ ID NO: 803518 - DNA, 15 bp, Homo sapiens
gatagattagttatt

SEQ ID NO: 803519 - DNA, 15 bp, Homo sapiens
atagattagttatta

SEQ ID NO: 803520 - DNA, 15 bp, Homo sapiens
tagattagttattag

SEQ ID NO: 803521 - DNA, 15 bp, Homo sapiens
agattagttattaga

SEQ ID NO: 803522 - DNA, 15 bp, Homo sapiens
gattagttattagaa

SEQ ID NO: 803523 - DNA, 15 bp, Homo sapiens
attagttattagaac

SEQ ID NO: 803524 - DNA, 15 bp, Homo sapiens
ttagttattagaaca

SEQ ID NO: 803525 - DNA, 15 bp, Homo sapiens
tagttattagaacaa

SEQ ID NO: 803526 - DNA, 15 bp, Homo sapiens
agttattagaacaag

SEQ ID NO: 803527 - DNA, 15 bp, Homo sapiens
gttattagaacaaga

SEQ ID NO: 803528 - DNA, 15 bp, Homo sapiens
ttattagaacaagat

SEQ ID NO: 803529 - DNA, 15 bp, Homo sapiens
tattagaacaagatt

SEQ ID NO: 803530 - DNA, 15 bp, Homo sapiens
attagaacaagatta

SEQ ID NO: 803531 - DNA, 15 bp, Homo sapiens
ttagaacaagattac

SEQ ID NO: 803532 - DNA, 15 bp, Homo sapiens
tagaacaagattaca

SEQ ID NO: 803533 - DNA, 15 bp, Homo sapiens
agaacaagattacag

SEQ ID NO: 803534 - DNA, 15 bp, Homo sapiens
gaacaagattacagt

SEQ ID NO: 803535 - DNA, 15 bp, Homo sapiens
aacaagattacagtt

SEQ ID NO: 803536 - DNA, 15 bp, Homo sapiens
acaagattacagttc

SEQ ID NO: 803537 - DNA, 15 bp, Homo sapiens
caagattacagttct

SEQ ID NO: 803538 - DNA, 15 bp, Homo sapiens
aagattacagttctt

SEQ ID NO: 803539 - DNA, 15 bp, Homo sapiens
agattacagttctta

SEQ ID NO: 803540 - DNA, 15 bp, Homo sapiens
gattacagttcttaa

SEQ ID NO: 803541 - DNA, 15 bp, Homo sapiens
attacagttcttaag

SEQ ID NO: 803542 - DNA, 15 bp, Homo sapiens
ttacagttcttaaga

SEQ ID NO: 803543 - DNA, 15 bp, Homo sapiens
tacagttcttaagag

SEQ ID NO: 803544 - DNA, 15 bp, Homo sapiens
acagttcttaagaga

SEQ ID NO: 803545 - DNA, 15 bp, Homo sapiens
cagttcttaagagaa

SEQ ID NO: 803546 - DNA, 15 bp, Homo sapiens
agttcttaagagaaa

SEQ ID NO: 803547 - DNA, 15 bp, Homo sapiens
gttcttaagagaaac

SEQ ID NO: 803548 - DNA, 15 bp, Homo sapiens
ttcttaagagaaacc

SEQ ID NO: 803549 - DNA, 15 bp, Homo sapiens
tcttaagagaaacct

SEQ ID NO: 803550 - DNA, 15 bp, Homo sapiens
cttaagagaaacctt

SEQ ID NO: 803551 - DNA, 15 bp, Homo sapiens
ttaagagaaacctta

SEQ ID NO: 803552 - DNA, 15 bp, Homo sapiens
taagagaaaccttat

SEQ ID NO: 803553 - DNA, 15 bp, Homo sapiens
aagagaaaccttata

SEQ ID NO: 803554 - DNA, 15 bp, Homo sapiens
agagaaaccttatag

SEQ ID NO: 803555 - DNA, 15 bp, Homo sapiens
gagaaaccttatagg

SEQ ID NO: 803556 - DNA, 15 bp, Homo sapiens
agaaaccttataggg

SEQ ID NO: 803557 - DNA, 15 bp, Homo sapiens
gaaaccttataggga

SEQ ID NO: 803558 - DNA, 15 bp, Homo sapiens
aaaccttatagggat

SEQ ID NO: 803559 - DNA, 15 bp, Homo sapiens
aaccttatagggata

SEQ ID NO: 803560 - DNA, 15 bp, Homo sapiens
accttatagggataa

SEQ ID NO: 803561 - DNA, 15 bp, Homo sapiens
ccttatagggataat

SEQ ID NO: 803562 - DNA, 15 bp, Homo sapiens
cttatagggataatc

SEQ ID NO: 803563 - DNA, 15 bp, Homo sapiens
ttatagggataatct

SEQ ID NO: 803564 - DNA, 15 bp, Homo sapiens
tatagggataatctt

SEQ ID NO: 803565 - DNA, 15 bp, Homo sapiens
atagggataatcttt

SEQ ID NO: 803566 - DNA, 15 bp, Homo sapiens
tagggataatcttta

SEQ ID NO: 803567 - DNA, 15 bp, Homo sapiens
agggataatctttat

SEQ ID NO: 803568 - DNA, 15 bp, Homo sapiens
gggataatctttata

SEQ ID NO: 803569 - DNA, 15 bp, Homo sapiens
ggataatctttataa

SEQ ID NO: 803570 - DNA, 15 bp, Homo sapiens
gataatctttataag

SEQ ID NO: 803571 - DNA, 15 bp, Homo sapiens
ataatctttataagc

SEQ ID NO: 803572 - DNA, 15 bp, Homo sapiens
taatctttataagcc

SEQ ID NO: 803573 - DNA, 15 bp, Homo sapiens
aatctttataagcct

SEQ ID NO: 803574 - DNA, 15 bp, Homo sapiens
atctttataagcctg

SEQ ID NO: 803575 - DNA, 15 bp, Homo sapiens
tctttataagcctga

SEQ ID NO: 803576 - DNA, 15 bp, Homo sapiens
ctttataagcctgaa

SEQ ID NO: 803577 - DNA, 15 bp, Homo sapiens
tttataagcctgaaa

SEQ ID NO: 803578 - DNA, 15 bp, Homo sapiens
ttataagcctgaaat

SEQ ID NO: 803579 - DNA, 15 bp, Homo sapiens
tataagcctgaaata

SEQ ID NO: 803580 - DNA, 15 bp, Homo sapiens
ataagcctgaaatag

SEQ ID NO: 803581 - DNA, 15 bp, Homo sapiens
taagcctgaaatagg

SEQ ID NO: 803582 - DNA, 15 bp, Homo sapiens
aagcctgaaatagga

SEQ ID NO: 803583 - DNA, 15 bp, Homo sapiens
agcctgaaataggaa

SEQ ID NO: 803584 - DNA, 15 bp, Homo sapiens
gcctgaaataggaaa

SEQ ID NO: 803585 - DNA, 15 bp, Homo sapiens
cctgaaataggaaat

SEQ ID NO: 803586 - DNA, 15 bp, Homo sapiens
ctgaaataggaaatt

SEQ ID NO: 803587 - DNA, 15 bp, Homo sapiens
tgaaataggaaatta

SEQ ID NO: 803588 - DNA, 15 bp, Homo sapiens
gaaataggaaattat

SEQ ID NO: 803589 - DNA, 15 bp, Homo sapiens
aaataggaaattatg

SEQ ID NO: 803590 - DNA, 15 bp, Homo sapiens
aataggaaattatgg

SEQ ID NO: 803591 - DNA, 15 bp, Homo sapiens
ataggaaattatggc

SEQ ID NO: 803592 - DNA, 15 bp, Homo sapiens
taggaaattatggct

SEQ ID NO: 803593 - DNA, 15 bp, Homo sapiens
aggaaattatggctc

SEQ ID NO: 803594 - DNA, 15 bp, Homo sapiens
ggaaattatggctca

SEQ ID NO: 803595 - DNA, 15 bp, Homo sapiens
gaaattatggctcac

SEQ ID NO: 803596 - DNA, 15 bp, Homo sapiens
aaattatggctcaca

SEQ ID NO: 803597 - DNA, 15 bp, Homo sapiens
aattatggctcacat

SEQ ID NO: 803598 - DNA, 15 bp, Homo sapiens
attatggctcacatt

SEQ ID NO: 803599 - DNA, 15 bp, Homo sapiens
ttatggctcacatta

SEQ ID NO: 803600 - DNA, 15 bp, Homo sapiens
tatggctcacattaa

SEQ ID NO: 803601 - DNA, 15 bp, Homo sapiens
atggctcacattaat

SEQ ID NO: 803602 - DNA, 15 bp, Homo sapiens
tggctcacattaatt

SEQ ID NO: 803603 - DNA, 15 bp, Homo sapiens
ggctcacattaattg

SEQ ID NO: 803604 - DNA, 15 bp, Homo sapiens
gctcacattaattga

SEQ ID NO: 803605 - DNA, 15 bp, Homo sapiens
ctcacattaattgaa

SEQ ID NO: 803606 - DNA, 15 bp, Homo sapiens
tcacattaattgaat

SEQ ID NO: 803607 - DNA, 15 bp, Homo sapiens
cacattaattgaatg

SEQ ID NO: 803608 - DNA, 15 bp, Homo sapiens
acattaattgaatgc

SEQ ID NO: 803609 - DNA, 15 bp, Homo sapiens
cattaattgaatgca

SEQ ID NO: 803610 - DNA, 15 bp, Homo sapiens
attaattgaatgcag

SEQ ID NO: 803611 - DNA, 15 bp, Homo sapiens
ttaattgaatgcagt

SEQ ID NO: 803612 - DNA, 15 bp, Homo sapiens
taattgaatgcagtg

SEQ ID NO: 803613 - DNA, 15 bp, Homo sapiens
aattgaatgcagtgc

SEQ ID NO: 803614 - DNA, 15 bp, Homo sapiens
attgaatgcagtgct

SEQ ID NO: 803615 - DNA, 15 bp, Homo sapiens
ttgaatgcagtgctc

SEQ ID NO: 803616 - DNA, 15 bp, Homo sapiens
tgaatgcagtgctcc

SEQ ID NO: 803617 - DNA, 15 bp, Homo sapiens
gaatgcagtgctcca

SEQ ID NO: 803618 - DNA, 15 bp, Homo sapiens
aatgcagtgctccaa

SEQ ID NO: 803619 - DNA, 15 bp, Homo sapiens
atgcagtgctccaag

SEQ ID NO: 803620 - DNA, 15 bp, Homo sapiens
tgcagtgctccaagt

SEQ ID NO: 803621 - DNA, 15 bp, Homo sapiens
gcagtgctccaagtc

SEQ ID NO: 803622 - DNA, 15 bp, Homo sapiens
cagtgctccaagtct

SEQ ID NO: 803623 - DNA, 15 bp, Homo sapiens
agtgctccaagtctg

SEQ ID NO: 803624 - DNA, 15 bp, Homo sapiens
gtgctccaagtctgg

SEQ ID NO: 803625 - DNA, 15 bp, Homo sapiens
tgctccaagtctggt

SEQ ID NO: 803626 - DNA, 15 bp, Homo sapiens
gctccaagtctggtc

SEQ ID NO: 803627 - DNA, 15 bp, Homo sapiens
ctccaagtctggtct

SEQ ID NO: 803628 - DNA, 15 bp, Homo sapiens
tccaagtctggtctc

SEQ ID NO: 803629 - DNA, 15 bp, Homo sapiens
ccaagtctggtctcc

SEQ ID NO: 803630 - DNA, 15 bp, Homo sapiens
caagtctggtctccc

SEQ ID NO: 803631 - DNA, 15 bp, Homo sapiens
aagtctggtctccct

SEQ ID NO: 803632 - DNA, 15 bp, Homo sapiens
agtctggtctccctc

SEQ ID NO: 803633 - DNA, 15 bp, Homo sapiens
gtctggtctccctcc

SEQ ID NO: 803634 - DNA, 15 bp, Homo sapiens
tctggtctccctcca

SEQ ID NO: 803635 - DNA, 15 bp, Homo sapiens
ctggtctccctccaa

SEQ ID NO: 803636 - DNA, 15 bp, Homo sapiens
tggtctccctccaaa

SEQ ID NO: 803637 - DNA, 15 bp, Homo sapiens
ggtctccctccaaaa

SEQ ID NO: 803638 - DNA, 15 bp, Homo sapiens
gtctccctccaaaat

SEQ ID NO: 803639 - DNA, 15 bp, Homo sapiens
tctccctccaaaatc

SEQ ID NO: 803640 - DNA, 15 bp, Homo sapiens
ctccctccaaaatct

SEQ ID NO: 803641 - DNA, 15 bp, Homo sapiens
tccctccaaaatctt

SEQ ID NO: 803642 - DNA, 15 bp, Homo sapiens
ccctccaaaatcttt

SEQ ID NO: 803643 - DNA, 15 bp, Homo sapiens
cctccaaaatctttt

SEQ ID NO: 803644 - DNA, 15 bp, Homo sapiens
ctccaaaatcttttt

SEQ ID NO: 803645 - DNA, 15 bp, Homo sapiens
tccaaaatctttttt

SEQ ID NO: 803646 - DNA, 15 bp, Homo sapiens
ccaaaatcttttttg

SEQ ID NO: 803647 - DNA, 15 bp, Homo sapiens
caaaatcttttttgg

SEQ ID NO: 803648 - DNA, 15 bp, Homo sapiens
aaaatcttttttggt

SEQ ID NO: 803649 - DNA, 15 bp, Homo sapiens
aaatcttttttggtt

SEQ ID NO: 803650 - DNA, 15 bp, Homo sapiens
aatcttttttggttg

SEQ ID NO: 803651 - DNA, 15 bp, Homo sapiens
atcttttttggttgg

SEQ ID NO: 803652 - DNA, 15 bp, Homo sapiens
tcttttttggttgga

SEQ ID NO: 803653 - DNA, 15 bp, Homo sapiens
cttttttggttggat

SEQ ID NO: 803654 - DNA, 15 bp, Homo sapiens
ttttttggttggatg

SEQ ID NO: 803655 - DNA, 15 bp, Homo sapiens
tttttggttggatgt

SEQ ID NO: 803656 - DNA, 15 bp, Homo sapiens
ttttggttggatgtt

SEQ ID NO: 803657 - DNA, 15 bp, Homo sapiens
tttggttggatgtta

SEQ ID NO: 803658 - DNA, 15 bp, Homo sapiens
ttggttggatgttaa

SEQ ID NO: 803659 - DNA, 15 bp, Homo sapiens
tggttggatgttaag

SEQ ID NO: 803660 - DNA, 15 bp, Homo sapiens
ggttggatgttaagg

SEQ ID NO: 803661 - DNA, 15 bp, Homo sapiens
gttggatgttaaggg

SEQ ID NO: 803662 - DNA, 15 bp, Homo sapiens
ttggatgttaagggt

SEQ ID NO: 803663 - DNA, 15 bp, Homo sapiens
tggatgttaagggtg

SEQ ID NO: 803664 - DNA, 15 bp, Homo sapiens
ggatgttaagggtga

SEQ ID NO: 803665 - DNA, 15 bp, Homo sapiens
gatgttaagggtgag

SEQ ID NO: 803666 - DNA, 15 bp, Homo sapiens
atgttaagggtgagg

SEQ ID NO: 803667 - DNA, 15 bp, Homo sapiens
tgttaagggtgagga

SEQ ID NO: 803668 - DNA, 15 bp, Homo sapiens
gttaagggtgaggat

SEQ ID NO: 803669 - DNA, 15 bp, Homo sapiens
ttaagggtgaggata

SEQ ID NO: 803670 - DNA, 15 bp, Homo sapiens
taagggtgaggatat

SEQ ID NO: 803671 - DNA, 15 bp, Homo sapiens
aagggtgaggatatg

SEQ ID NO: 803672 - DNA, 15 bp, Homo sapiens
agggtgaggatatga

SEQ ID NO: 803673 - DNA, 15 bp, Homo sapiens
gggtgaggatatgaa

SEQ ID NO: 803674 - DNA, 15 bp, Homo sapiens
ggtgaggatatgaag

SEQ ID NO: 803675 - DNA, 15 bp, Homo sapiens
gtgaggatatgaaga

SEQ ID NO: 803676 - DNA, 15 bp, Homo sapiens
tgaggatatgaagaa

SEQ ID NO: 803677 - DNA, 15 bp, Homo sapiens
gaggatatgaagaag

SEQ ID NO: 803678 - DNA, 15 bp, Homo sapiens
aggatatgaagaagg

SEQ ID NO: 803679 - DNA, 15 bp, Homo sapiens
ggatatgaagaaggt

SEQ ID NO: 803680 - DNA, 15 bp, Homo sapiens
gatatgaagaaggta

SEQ ID NO: 803681 - DNA, 15 bp, Homo sapiens
atatgaagaaggtag

SEQ ID NO: 803682 - DNA, 15 bp, Homo sapiens
tatgaagaaggtagg

SEQ ID NO: 803683 - DNA, 15 bp, Homo sapiens
atgaagaaggtaggt

SEQ ID NO: 803684 - DNA, 15 bp, Homo sapiens
tgaagaaggtaggtt

SEQ ID NO: 803685 - DNA, 15 bp, Homo sapiens
gaagaaggtaggttg

SEQ ID NO: 803686 - DNA, 15 bp, Homo sapiens
aagaaggtaggttgt

SEQ ID NO: 803687 - DNA, 15 bp, Homo sapiens
agaaggtaggttgtt

SEQ ID NO: 803688 - DNA, 15 bp, Homo sapiens
gaaggtaggttgttt

SEQ ID NO: 803689 - DNA, 15 bp, Homo sapiens
aaggtaggttgtttt

SEQ ID NO: 803690 - DNA, 15 bp, Homo sapiens
aggtaggttgtttta

SEQ ID NO: 803691 - DNA, 15 bp, Homo sapiens
ggtaggttgttttaa

SEQ ID NO: 803692 - DNA, 15 bp, Homo sapiens
gtaggttgttttaag

SEQ ID NO: 803693 - DNA, 15 bp, Homo sapiens
taggttgttttaagt

SEQ ID NO: 803694 - DNA, 15 bp, Homo sapiens
aggttgttttaagtg

SEQ ID NO: 803695 - DNA, 15 bp, Homo sapiens
ggttgttttaagtgc

SEQ ID NO: 803696 - DNA, 15 bp, Homo sapiens
gttgttttaagtgct

SEQ ID NO: 803697 - DNA, 15 bp, Homo sapiens
ttgttttaagtgcta

SEQ ID NO: 803698 - DNA, 15 bp, Homo sapiens
tgttttaagtgctac

SEQ ID NO: 803699 - DNA, 15 bp, Homo sapiens
gttttaagtgctacc

SEQ ID NO: 803700 - DNA, 15 bp, Homo sapiens
ttttaagtgctaccc

SEQ ID NO: 803701 - DNA, 15 bp, Homo sapiens
tttaagtgctaccca

SEQ ID NO: 803702 - DNA, 15 bp, Homo sapiens
ttaagtgctacccat

SEQ ID NO: 803703 - DNA, 15 bp, Homo sapiens
taagtgctacccata

SEQ ID NO: 803704 - DNA, 15 bp, Homo sapiens
aagtgctacccataa

SEQ ID NO: 803705 - DNA, 15 bp, Homo sapiens
agtgctacccataat

SEQ ID NO: 803706 - DNA, 15 bp, Homo sapiens
gtgctacccataatt

SEQ ID NO: 803707 - DNA, 15 bp, Homo sapiens
tgctacccataattt

SEQ ID NO: 803708 - DNA, 15 bp, Homo sapiens
gctacccataatttg

SEQ ID NO: 803709 - DNA, 15 bp, Homo sapiens
ctacccataatttgc

SEQ ID NO: 803710 - DNA, 15 bp, Homo sapiens
tacccataatttgca

SEQ ID NO: 803711 - DNA, 15 bp, Homo sapiens
acccataatttgcac

SEQ ID NO: 803712 - DNA, 15 bp, Homo sapiens
cccataatttgcaca

SEQ ID NO: 803713 - DNA, 15 bp, Homo sapiens
ccataatttgcacat

SEQ ID NO: 803714 - DNA, 15 bp, Homo sapiens
cataatttgcacatt

SEQ ID NO: 803715 - DNA, 15 bp, Homo sapiens
ataatttgcacatta

SEQ ID NO: 803716 - DNA, 15 bp, Homo sapiens
taatttgcacattaa

SEQ ID NO: 803717 - DNA, 15 bp, Homo sapiens
aatttgcacattaaa

SEQ ID NO: 803718 - DNA, 15 bp, Homo sapiens
atttgcacattaaaa

SEQ ID NO: 803719 - DNA, 15 bp, Homo sapiens
tttgcacattaaaag

SEQ ID NO: 803720 - DNA, 15 bp, Homo sapiens
ttgcacattaaaagt

SEQ ID NO: 803721 - DNA, 15 bp, Homo sapiens
tgcacattaaaagta

SEQ ID NO: 803722 - DNA, 15 bp, Homo sapiens
gcacattaaaagtat

SEQ ID NO: 803723 - DNA, 15 bp, Homo sapiens
cacattaaaagtata

SEQ ID NO: 803724 - DNA, 15 bp, Homo sapiens
acattaaaagtataa

SEQ ID NO: 803725 - DNA, 15 bp, Homo sapiens
cattaaaagtataat

SEQ ID NO: 803726 - DNA, 15 bp, Homo sapiens
attaaaagtataatt

SEQ ID NO: 803727 - DNA, 15 bp, Homo sapiens
ttaaaagtataatta

SEQ ID NO: 803728 - DNA, 15 bp, Homo sapiens
taaaagtataattat

SEQ ID NO: 803729 - DNA, 15 bp, Homo sapiens
aaaagtataattata

SEQ ID NO: 803730 - DNA, 15 bp, Homo sapiens
aaagtataattatag

SEQ ID NO: 803731 - DNA, 15 bp, Homo sapiens
aagtataattatagc

SEQ ID NO: 803732 - DNA, 15 bp, Homo sapiens
agtataattatagcc

SEQ ID NO: 803733 - DNA, 15 bp, Homo sapiens
gtataattatagcca

SEQ ID NO: 803734 - DNA, 15 bp, Homo sapiens
tataattatagccac

SEQ ID NO: 803735 - DNA, 15 bp, Homo sapiens
ataattatagccaca

SEQ ID NO: 803736 - DNA, 15 bp, Homo sapiens
taattatagccacac

SEQ ID NO: 803737 - DNA, 15 bp, Homo sapiens
aattatagccacacg

SEQ ID NO: 803738 - DNA, 15 bp, Homo sapiens
attatagccacacga

SEQ ID NO: 803739 - DNA, 15 bp, Homo sapiens
ttatagccacacgag

SEQ ID NO: 803740 - DNA, 15 bp, Homo sapiens
tatagccacacgagg

SEQ ID NO: 803741 - DNA, 15 bp, Homo sapiens
atagccacacgaggc

SEQ ID NO: 803742 - DNA, 15 bp, Homo sapiens
tagccacacgaggcc

SEQ ID NO: 803743 - DNA, 15 bp, Homo sapiens
agccacacgaggccc

SEQ ID NO: 803744 - DNA, 15 bp, Homo sapiens
gccacacgaggccct

SEQ ID NO: 803745 - DNA, 15 bp, Homo sapiens
ccacacgaggccctg

SEQ ID NO: 803746 - DNA, 15 bp, Homo sapiens
cacacgaggccctga

SEQ ID NO: 803747 - DNA, 15 bp, Homo sapiens
acacgaggccctgag

SEQ ID NO: 803748 - DNA, 15 bp, Homo sapiens
cacgaggccctgagc

SEQ ID NO: 803749 - DNA, 15 bp, Homo sapiens
acgaggccctgagca

SEQ ID NO: 803750 - DNA, 15 bp, Homo sapiens
cgaggccctgagcac

SEQ ID NO: 803751 - DNA, 15 bp, Homo sapiens
gaggccctgagcaca

SEQ ID NO: 803752 - DNA, 15 bp, Homo sapiens
aggccctgagcacac

SEQ ID NO: 803753 - DNA, 15 bp, Homo sapiens
ggccctgagcacact

SEQ ID NO: 803754 - DNA, 15 bp, Homo sapiens
gccctgagcacactt

SEQ ID NO: 803755 - DNA, 15 bp, Homo sapiens
ccctgagcacacttg

SEQ ID NO: 803756 - DNA, 15 bp, Homo sapiens
cctgagcacacttgt

SEQ ID NO: 803757 - DNA, 15 bp, Homo sapiens
ctgagcacacttgtt

SEQ ID NO: 803758 - DNA, 15 bp, Homo sapiens
tgagcacacttgttc

SEQ ID NO: 803759 - DNA, 15 bp, Homo sapiens
gagcacacttgttcc

SEQ ID NO: 803760 - DNA, 15 bp, Homo sapiens
agcacacttgttccg

SEQ ID NO: 803761 - DNA, 15 bp, Homo sapiens
gcacacttgttccgt

SEQ ID NO: 803762 - DNA, 15 bp, Homo sapiens
cacacttgttccgtg

SEQ ID NO: 803763 - DNA, 15 bp, Homo sapiens
acacttgttccgtgt

SEQ ID NO: 803764 - DNA, 15 bp, Homo sapiens
cacttgttccgtgtg

SEQ ID NO: 803765 - DNA, 15 bp, Homo sapiens
acttgttccgtgtgt

SEQ ID NO: 803766 - DNA, 15 bp, Homo sapiens
cttgttccgtgtgtt

SEQ ID NO: 803767 - DNA, 15 bp, Homo sapiens
ttgttccgtgtgttt

SEQ ID NO: 803768 - DNA, 15 bp, Homo sapiens
tgttccgtgtgtttg

SEQ ID NO: 803769 - DNA, 15 bp, Homo sapiens
gttccgtgtgtttga

SEQ ID NO: 803770 - DNA, 15 bp, Homo sapiens
ttccgtgtgtttgaa

SEQ ID NO: 803771 - DNA, 15 bp, Homo sapiens
tccgtgtgtttgaat

SEQ ID NO: 803772 - DNA, 15 bp, Homo sapiens
ccgtgtgtttgaatc

SEQ ID NO: 803773 - DNA, 15 bp, Homo sapiens
cgtgtgtttgaatcc

SEQ ID NO: 803774 - DNA, 15 bp, Homo sapiens
gtgtgtttgaatccc

SEQ ID NO: 803775 - DNA, 15 bp, Homo sapiens
tgtgtttgaatccca

SEQ ID NO: 803776 - DNA, 15 bp, Homo sapiens
gtgtttgaatcccag

SEQ ID NO: 803777 - DNA, 15 bp, Homo sapiens
tgtttgaatcccagc

SEQ ID NO: 803778 - DNA, 15 bp, Homo sapiens
gtttgaatcccagca

SEQ ID NO: 803779 - DNA, 15 bp, Homo sapiens
tttgaatcccagcag

SEQ ID NO: 803780 - DNA, 15 bp, Homo sapiens
ttgaatcccagcagg

SEQ ID NO: 803781 - DNA, 15 bp, Homo sapiens
tgaatcccagcaggc

SEQ ID NO: 803782 - DNA, 15 bp, Homo sapiens
gaatcccagcaggct

SEQ ID NO: 803783 - DNA, 15 bp, Homo sapiens
aatcccagcaggctg

SEQ ID NO: 803784 - DNA, 15 bp, Homo sapiens
atcccagcaggctga

SEQ ID NO: 803785 - DNA, 15 bp, Homo sapiens
tcccagcaggctgac

SEQ ID NO: 803786 - DNA, 15 bp, Homo sapiens
cccagcaggctgacc

SEQ ID NO: 803787 - DNA, 15 bp, Homo sapiens
ccagcaggctgacct

SEQ ID NO: 803788 - DNA, 15 bp, Homo sapiens
cagcaggctgaccta

SEQ ID NO: 803789 - DNA, 15 bp, Homo sapiens
agcaggctgacctac

SEQ ID NO: 803790 - DNA, 15 bp, Homo sapiens
gcaggctgacctacc

SEQ ID NO: 803791 - DNA, 15 bp, Homo sapiens
caggctgacctacct

SEQ ID NO: 803792 - DNA, 15 bp, Homo sapiens
aggctgacctacctg

SEQ ID NO: 803793 - DNA, 15 bp, Homo sapiens
ggctgacctacctgg

SEQ ID NO: 803794 - DNA, 15 bp, Homo sapiens
gctgacctacctgga

SEQ ID NO: 803795 - DNA, 15 bp, Homo sapiens
ctgacctacctggat

SEQ ID NO: 803796 - DNA, 15 bp, Homo sapiens
tgacctacctggatg

SEQ ID NO: 803797 - DNA, 15 bp, Homo sapiens
gacctacctggatgt

SEQ ID NO: 803798 - DNA, 15 bp, Homo sapiens
acctacctggatgta

SEQ ID NO: 803799 - DNA, 15 bp, Homo sapiens
cctacctggatgtag

SEQ ID NO: 803800 - DNA, 15 bp, Homo sapiens
ctacctggatgtagt

SEQ ID NO: 803801 - DNA, 15 bp, Homo sapiens
tacctggatgtagta

SEQ ID NO: 803802 - DNA, 15 bp, Homo sapiens
acctggatgtagtag

SEQ ID NO: 803803 - DNA, 15 bp, Homo sapiens
cctggatgtagtagg

SEQ ID NO: 803804 - DNA, 15 bp, Homo sapiens
ctggatgtagtaggc

SEQ ID NO: 803805 - DNA, 15 bp, Homo sapiens
tggatgtagtaggca

SEQ ID NO: 803806 - DNA, 15 bp, Homo sapiens
ggatgtagtaggcat

SEQ ID NO: 803807 - DNA, 15 bp, Homo sapiens
gatgtagtaggcata

SEQ ID NO: 803808 - DNA, 15 bp, Homo sapiens
atgtagtaggcatat

SEQ ID NO: 803809 - DNA, 15 bp, Homo sapiens
tgtagtaggcatatt

SEQ ID NO: 803810 - DNA, 15 bp, Homo sapiens
gtagtaggcatattc

SEQ ID NO: 803811 - DNA, 15 bp, Homo sapiens
tagtaggcatattcg

SEQ ID NO: 803812 - DNA, 15 bp, Homo sapiens
agtaggcatattcgt

SEQ ID NO: 803813 - DNA, 15 bp, Homo sapiens
gtaggcatattcgtc

SEQ ID NO: 803814 - DNA, 15 bp, Homo sapiens
taggcatattcgtct

SEQ ID NO: 803815 - DNA, 15 bp, Homo sapiens
aggcatattcgtctg

SEQ ID NO: 803816 - DNA, 15 bp, Homo sapiens
ggcatattcgtctgc

SEQ ID NO: 803817 - DNA, 15 bp, Homo sapiens
gcatattcgtctgca

SEQ ID NO: 803818 - DNA, 15 bp, Homo sapiens
catattcgtctgcat

SEQ ID NO: 803819 - DNA, 15 bp, Homo sapiens
atattcgtctgcatg

SEQ ID NO: 803820 - DNA, 15 bp, Homo sapiens
tattcgtctgcatgg

SEQ ID NO: 803821 - DNA, 15 bp, Homo sapiens
attcgtctgcatgga

SEQ ID NO: 803822 - DNA, 15 bp, Homo sapiens
ttcgtctgcatggag

SEQ ID NO: 803823 - DNA, 15 bp, Homo sapiens
tcgtctgcatggagt

SEQ ID NO: 803824 - DNA, 15 bp, Homo sapiens
cgtctgcatggagtt

SEQ ID NO: 803825 - DNA, 15 bp, Homo sapiens
gtctgcatggagttc

SEQ ID NO: 803826 - DNA, 15 bp, Homo sapiens
tctgcatggagttcc

SEQ ID NO: 803827 - DNA, 15 bp, Homo sapiens
ctgcatggagttcct

SEQ ID NO: 803828 - DNA, 15 bp, Homo sapiens
tgcatggagttcctc

SEQ ID NO: 803829 - DNA, 15 bp, Homo sapiens
gcatggagttcctcc

SEQ ID NO: 803830 - DNA, 15 bp, Homo sapiens
catggagttcctcct

SEQ ID NO: 803831 - DNA, 15 bp, Homo sapiens
atggagttcctcctg

SEQ ID NO: 803832 - DNA, 15 bp, Homo sapiens
tggagttcctcctgg

SEQ ID NO: 803833 - DNA, 15 bp, Homo sapiens
ggagttcctcctgga

SEQ ID NO: 803834 - DNA, 15 bp, Homo sapiens
gagttcctcctggat

SEQ ID NO: 803835 - DNA, 15 bp, Homo sapiens
agttcctcctggatt

SEQ ID NO: 803836 - DNA, 15 bp, Homo sapiens
gttcctcctggattc

SEQ ID NO: 803837 - DNA, 15 bp, Homo sapiens
ttcctcctggattcc

SEQ ID NO: 803838 - DNA, 15 bp, Homo sapiens
tcctcctggattccc

SEQ ID NO: 803839 - DNA, 15 bp, Homo sapiens
cctcctggattccct

SEQ ID NO: 803840 - DNA, 15 bp, Homo sapiens
ctcctggattccctc

SEQ ID NO: 803841 - DNA, 15 bp, Homo sapiens
tcctggattccctcc

SEQ ID NO: 803842 - DNA, 15 bp, Homo sapiens
cctggattccctcca

SEQ ID NO: 803843 - DNA, 15 bp, Homo sapiens
ctggattccctccac

SEQ ID NO: 803844 - DNA, 15 bp, Homo sapiens
tggattccctccacc

SEQ ID NO: 803845 - DNA, 15 bp, Homo sapiens
ggattccctccaccc

SEQ ID NO: 803846 - DNA, 15 bp, Homo sapiens
gattccctccaccct

SEQ ID NO: 803847 - DNA, 15 bp, Homo sapiens
attccctccaccctc

SEQ ID NO: 803848 - DNA, 15 bp, Homo sapiens
ttccctccaccctca

SEQ ID NO: 803849 - DNA, 15 bp, Homo sapiens
tccctccaccctcag

SEQ ID NO: 803850 - DNA, 15 bp, Homo sapiens
ccctccaccctcagt

SEQ ID NO: 803851 - DNA, 15 bp, Homo sapiens
cctccaccctcagta

SEQ ID NO: 803852 - DNA, 15 bp, Homo sapiens
ctccaccctcagtat

SEQ ID NO: 803853 - DNA, 15 bp, Homo sapiens
tccaccctcagtatt

SEQ ID NO: 803854 - DNA, 15 bp, Homo sapiens
ccaccctcagtatta

SEQ ID NO: 803855 - DNA, 15 bp, Homo sapiens
caccctcagtattag

SEQ ID NO: 803856 - DNA, 15 bp, Homo sapiens
accctcagtattagc

SEQ ID NO: 803857 - DNA, 15 bp, Homo sapiens
ccctcagtattagcc

SEQ ID NO: 803858 - DNA, 15 bp, Homo sapiens
cctcagtattagcct

SEQ ID NO: 803859 - DNA, 15 bp, Homo sapiens
ctcagtattagcctt

SEQ ID NO: 803860 - DNA, 15 bp, Homo sapiens
tcagtattagccttg

SEQ ID NO: 803861 - DNA, 15 bp, Homo sapiens
cagtattagccttgt

SEQ ID NO: 803862 - DNA, 15 bp, Homo sapiens
agtattagccttgtg

SEQ ID NO: 803863 - DNA, 15 bp, Homo sapiens
gtattagccttgtgg

SEQ ID NO: 803864 - DNA, 15 bp, Homo sapiens
tattagccttgtgga

SEQ ID NO: 803865 - DNA, 15 bp, Homo sapiens
attagccttgtggat

SEQ ID NO: 803866 - DNA, 15 bp, Homo sapiens
ttagccttgtggatt

SEQ ID NO: 803867 - DNA, 15 bp, Homo sapiens
tagccttgtggatta

SEQ ID NO: 803868 - DNA, 15 bp, Homo sapiens
agccttgtggattac

SEQ ID NO: 803869 - DNA, 15 bp, Homo sapiens
gccttgtggattact

SEQ ID NO: 803870 - DNA, 15 bp, Homo sapiens
ccttgtggattactg

SEQ ID NO: 803871 - DNA, 15 bp, Homo sapiens
cttgtggattactgt

SEQ ID NO: 803872 - DNA, 15 bp, Homo sapiens
ttgtggattactgtt

SEQ ID NO: 803873 - DNA, 15 bp, Homo sapiens
tgtggattactgttg

SEQ ID NO: 803874 - DNA, 15 bp, Homo sapiens
gtggattactgttga

SEQ ID NO: 803875 - DNA, 15 bp, Homo sapiens
tggattactgttgaa

SEQ ID NO: 803876 - DNA, 15 bp, Homo sapiens
ggattactgttgaag

SEQ ID NO: 803877 - DNA, 15 bp, Homo sapiens
gattactgttgaaga

SEQ ID NO: 803878 - DNA, 15 bp, Homo sapiens
attactgttgaagac

SEQ ID NO: 803879 - DNA, 15 bp, Homo sapiens
ttactgttgaagact

SEQ ID NO: 803880 - DNA, 15 bp, Homo sapiens
tactgttgaagactc

SEQ ID NO: 803881 - DNA, 15 bp, Homo sapiens
actgttgaagactct

SEQ ID NO: 803882 - DNA, 15 bp, Homo sapiens
ctgttgaagactctg

SEQ ID NO: 803883 - DNA, 15 bp, Homo sapiens
tgttgaagactctga

SEQ ID NO: 803884 - DNA, 15 bp, Homo sapiens
gttgaagactctgag

SEQ ID NO: 803885 - DNA, 15 bp, Homo sapiens
ttgaagactctgagg

SEQ ID NO: 803886 - DNA, 15 bp, Homo sapiens
tgaagactctgagga

SEQ ID NO: 803887 - DNA, 15 bp, Homo sapiens
gaagactctgaggaa

SEQ ID NO: 803888 - DNA, 15 bp, Homo sapiens
aagactctgaggaat

SEQ ID NO: 803889 - DNA, 15 bp, Homo sapiens
agactctgaggaata

SEQ ID NO: 803890 - DNA, 15 bp, Homo sapiens
gactctgaggaatag

SEQ ID NO: 803891 - DNA, 15 bp, Homo sapiens
actctgaggaatagg

SEQ ID NO: 803892 - DNA, 15 bp, Homo sapiens
ctctgaggaatagga

SEQ ID NO: 803893 - DNA, 15 bp, Homo sapiens
tctgaggaataggag

SEQ ID NO: 803894 - DNA, 15 bp, Homo sapiens
ctgaggaataggagc

SEQ ID NO: 803895 - DNA, 15 bp, Homo sapiens
tgaggaataggagct

SEQ ID NO: 803896 - DNA, 15 bp, Homo sapiens
gaggaataggagctg

SEQ ID NO: 803897 - DNA, 15 bp, Homo sapiens
aggaataggagctga

SEQ ID NO: 803898 - DNA, 15 bp, Homo sapiens
ggaataggagctgaa

SEQ ID NO: 803899 - DNA, 15 bp, Homo sapiens
gaataggagctgaat

SEQ ID NO: 803900 - DNA, 15 bp, Homo sapiens
aataggagctgaatg

SEQ ID NO: 803901 - DNA, 15 bp, Homo sapiens
ataggagctgaatgg

SEQ ID NO: 803902 - DNA, 15 bp, Homo sapiens
taggagctgaatggt

SEQ ID NO: 803903 - DNA, 15 bp, Homo sapiens
aggagctgaatggta

SEQ ID NO: 803904 - DNA, 15 bp, Homo sapiens
ggagctgaatggtag

SEQ ID NO: 803905 - DNA, 15 bp, Homo sapiens
gagctgaatggtaga

SEQ ID NO: 803906 - DNA, 15 bp, Homo sapiens
agctgaatggtagag

SEQ ID NO: 803907 - DNA, 15 bp, Homo sapiens
gctgaatggtagagg

SEQ ID NO: 803908 - DNA, 15 bp, Homo sapiens
ctgaatggtagagga

SEQ ID NO: 803909 - DNA, 15 bp, Homo sapiens
tgaatggtagaggaa

SEQ ID NO: 803910 - DNA, 15 bp, Homo sapiens
gaatggtagaggaaa

SEQ ID NO: 803911 - DNA, 15 bp, Homo sapiens
aatggtagaggaaag

SEQ ID NO: 803912 - DNA, 15 bp, Homo sapiens
atggtagaggaaagg

SEQ ID NO: 803913 - DNA, 15 bp, Homo sapiens
tggtagaggaaaggc

SEQ ID NO: 803914 - DNA, 15 bp, Homo sapiens
ggtagaggaaaggcc

SEQ ID NO: 803915 - DNA, 15 bp, Homo sapiens
gtagaggaaaggcct

SEQ ID NO: 803916 - DNA, 15 bp, Homo sapiens
tagaggaaaggcctc

SEQ ID NO: 803917 - DNA, 15 bp, Homo sapiens
agaggaaaggcctct

SEQ ID NO: 803918 - DNA, 15 bp, Homo sapiens
gaggaaaggcctcta

SEQ ID NO: 803919 - DNA, 15 bp, Homo sapiens
aggaaaggcctctag

SEQ ID NO: 803920 - DNA, 15 bp, Homo sapiens
ggaaaggcctctaga

SEQ ID NO: 803921 - DNA, 15 bp, Homo sapiens
gaaaggcctctagat

SEQ ID NO: 803922 - DNA, 15 bp, Homo sapiens
aaaggcctctagatc

SEQ ID NO: 803923 - DNA, 15 bp, Homo sapiens
aaggcctctagatct

SEQ ID NO: 803924 - DNA, 15 bp, Homo sapiens
aggcctctagatctt

SEQ ID NO: 803925 - DNA, 15 bp, Homo sapiens
ggcctctagatcttg

SEQ ID NO: 803926 - DNA, 15 bp, Homo sapiens
gcctctagatcttgt

SEQ ID NO: 803927 - DNA, 15 bp, Homo sapiens
cctctagatcttgta

SEQ ID NO: 803928 - DNA, 15 bp, Homo sapiens
ctctagatcttgtat

SEQ ID NO: 803929 - DNA, 15 bp, Homo sapiens
tctagatcttgtatt

SEQ ID NO: 803930 - DNA, 15 bp, Homo sapiens
ctagatcttgtattc

SEQ ID NO: 803931 - DNA, 15 bp, Homo sapiens
tagatcttgtattcc

SEQ ID NO: 803932 - DNA, 15 bp, Homo sapiens
agatcttgtattccc

SEQ ID NO: 803933 - DNA, 15 bp, Homo sapiens
gatcttgtattccct

SEQ ID NO: 803934 - DNA, 15 bp, Homo sapiens
atcttgtattccctg

SEQ ID NO: 803935 - DNA, 15 bp, Homo sapiens
tcttgtattccctga

SEQ ID NO: 803936 - DNA, 15 bp, Homo sapiens
cttgtattccctgag

SEQ ID NO: 803937 - DNA, 15 bp, Homo sapiens
ttgtattccctgagg

SEQ ID NO: 803938 - DNA, 15 bp, Homo sapiens
tgtattccctgagga

SEQ ID NO: 803939 - DNA, 15 bp, Homo sapiens
gtattccctgaggac

SEQ ID NO: 803940 - DNA, 15 bp, Homo sapiens
tattccctgaggacc

SEQ ID NO: 803941 - DNA, 15 bp, Homo sapiens
attccctgaggacca

SEQ ID NO: 803942 - DNA, 15 bp, Homo sapiens
ttccctgaggaccat

SEQ ID NO: 803943 - DNA, 15 bp, Homo sapiens
tccctgaggaccatg

SEQ ID NO: 803944 - DNA, 15 bp, Homo sapiens
ccctgaggaccatgg

SEQ ID NO: 803945 - DNA, 15 bp, Homo sapiens
cctgaggaccatgga

SEQ ID NO: 803946 - DNA, 15 bp, Homo sapiens
ctgaggaccatggag

SEQ ID NO: 803947 - DNA, 15 bp, Homo sapiens
tgaggaccatggagc

SEQ ID NO: 803948 - DNA, 15 bp, Homo sapiens
gaggaccatggagcc

SEQ ID NO: 803949 - DNA, 15 bp, Homo sapiens
aggaccatggagccc

SEQ ID NO: 803950 - DNA, 15 bp, Homo sapiens
ggaccatggagccct

SEQ ID NO: 803951 - DNA, 15 bp, Homo sapiens
gaccatggagccctc

SEQ ID NO: 803952 - DNA, 15 bp, Homo sapiens
accatggagccctct

SEQ ID NO: 803953 - DNA, 15 bp, Homo sapiens
ccatggagccctctg

SEQ ID NO: 803954 - DNA, 15 bp, Homo sapiens
catggagccctctgg

SEQ ID NO: 803955 - DNA, 15 bp, Homo sapiens
atggagccctctggt

SEQ ID NO: 803956 - DNA, 15 bp, Homo sapiens
tggagccctctggtc

SEQ ID NO: 803957 - DNA, 15 bp, Homo sapiens
ggagccctctggtcc

SEQ ID NO: 803958 - DNA, 15 bp, Homo sapiens
gagccctctggtcct

SEQ ID NO: 803959 - DNA, 15 bp, Homo sapiens
agccctctggtcctc

SEQ ID NO: 803960 - DNA, 15 bp, Homo sapiens
gccctctggtcctct

SEQ ID NO: 803961 - DNA, 15 bp, Homo sapiens
ccctctggtcctctt

SEQ ID NO: 803962 - DNA, 15 bp, Homo sapiens
cctctggtcctcttg

SEQ ID NO: 803963 - DNA, 15 bp, Homo sapiens
ctctggtcctcttgg

SEQ ID NO: 803964 - DNA, 15 bp, Homo sapiens
tctggtcctcttggt

SEQ ID NO: 803965 - DNA, 15 bp, Homo sapiens
ctggtcctcttggtt

SEQ ID NO: 803966 - DNA, 15 bp, Homo sapiens
tggtcctcttggtta

SEQ ID NO: 803967 - DNA, 15 bp, Homo sapiens
ggtcctcttggttag

SEQ ID NO: 803968 - DNA, 15 bp, Homo sapiens
gtcctcttggttaga

SEQ ID NO: 803969 - DNA, 15 bp, Homo sapiens
tcctcttggttagag

SEQ ID NO: 803970 - DNA, 15 bp, Homo sapiens
cctcttggttagagt

SEQ ID NO: 803971 - DNA, 15 bp, Homo sapiens
ctcttggttagagtg

SEQ ID NO: 803972 - DNA, 15 bp, Homo sapiens
tcttggttagagtgg

SEQ ID NO: 803973 - DNA, 15 bp, Homo sapiens
cttggttagagtggg

SEQ ID NO: 803974 - DNA, 15 bp, Homo sapiens
ttggttagagtgggc

SEQ ID NO: 803975 - DNA, 15 bp, Homo sapiens
tggttagagtgggct

SEQ ID NO: 803976 - DNA, 15 bp, Homo sapiens
ggttagagtgggctg

SEQ ID NO: 803977 - DNA, 15 bp, Homo sapiens
gttagagtgggctgt

SEQ ID NO: 803978 - DNA, 15 bp, Homo sapiens
ttagagtgggctgtt

SEQ ID NO: 803979 - DNA, 15 bp, Homo sapiens
tagagtgggctgttt

SEQ ID NO: 803980 - DNA, 15 bp, Homo sapiens
agagtgggctgtttc

SEQ ID NO: 803981 - DNA, 15 bp, Homo sapiens
gagtgggctgtttct

SEQ ID NO: 803982 - DNA, 15 bp, Homo sapiens
agtgggctgtttctc

SEQ ID NO: 803983 - DNA, 15 bp, Homo sapiens
gtgggctgtttctca

SEQ ID NO: 803984 - DNA, 15 bp, Homo sapiens
tgggctgtttctcac

SEQ ID NO: 803985 - DNA, 15 bp, Homo sapiens
gggctgtttctcacg

SEQ ID NO: 803986 - DNA, 15 bp, Homo sapiens
ggctgtttctcacgt

SEQ ID NO: 803987 - DNA, 15 bp, Homo sapiens
gctgtttctcacgtg

SEQ ID NO: 803988 - DNA, 15 bp, Homo sapiens
ctgtttctcacgtgc

SEQ ID NO: 803989 - DNA, 15 bp, Homo sapiens
tgtttctcacgtgca

SEQ ID NO: 803990 - DNA, 15 bp, Homo sapiens
gtttctcacgtgcag

SEQ ID NO: 803991 - DNA, 15 bp, Homo sapiens
tttctcacgtgcagt

SEQ ID NO: 803992 - DNA, 15 bp, Homo sapiens
ttctcacgtgcagtt

SEQ ID NO: 803993 - DNA, 15 bp, Homo sapiens
tctcacgtgcagttt

SEQ ID NO: 803994 - DNA, 15 bp, Homo sapiens
ctcacgtgcagtttc

SEQ ID NO: 803995 - DNA, 15 bp, Homo sapiens
tcacgtgcagtttca

SEQ ID NO: 803996 - DNA, 15 bp, Homo sapiens
cacgtgcagtttcac

SEQ ID NO: 803997 - DNA, 15 bp, Homo sapiens
acgtgcagtttcaca

SEQ ID NO: 803998 - DNA, 15 bp, Homo sapiens
cgtgcagtttcacag

SEQ ID NO: 803999 - DNA, 15 bp, Homo sapiens
gtgcagtttcacagc

SEQ ID NO: 804000 - DNA, 15 bp, Homo sapiens
tgcagtttcacagcc

SEQ ID NO: 804001 - DNA, 15 bp, Homo sapiens
gcagtttcacagcct

SEQ ID NO: 804002 - DNA, 15 bp, Homo sapiens
cagtttcacagcctc

SEQ ID NO: 804003 - DNA, 15 bp, Homo sapiens
agtttcacagcctct

SEQ ID NO: 804004 - DNA, 15 bp, Homo sapiens
gtttcacagcctctc

SEQ ID NO: 804005 - DNA, 15 bp, Homo sapiens
tttcacagcctctcc

SEQ ID NO: 804006 - DNA, 15 bp, Homo sapiens
ttcacagcctctccc

SEQ ID NO: 804007 - DNA, 15 bp, Homo sapiens
tcacagcctctcccc

SEQ ID NO: 804008 - DNA, 15 bp, Homo sapiens
cacagcctctccccc

SEQ ID NO: 804009 - DNA, 15 bp, Homo sapiens
acagcctctccccca

SEQ ID NO: 804010 - DNA, 15 bp, Homo sapiens
cagcctctcccccag

SEQ ID NO: 804011 - DNA, 15 bp, Homo sapiens
agcctctcccccagc

SEQ ID NO: 804012 - DNA, 15 bp, Homo sapiens
gcctctcccccagca

SEQ ID NO: 804013 - DNA, 15 bp, Homo sapiens
cctctcccccagcac

SEQ ID NO: 804014 - DNA, 15 bp, Homo sapiens
ctctcccccagcacc

SEQ ID NO: 804015 - DNA, 15 bp, Homo sapiens
tctcccccagcaccc

SEQ ID NO: 804016 - DNA, 15 bp, Homo sapiens
ctcccccagcacccc

SEQ ID NO: 804017 - DNA, 15 bp, Homo sapiens
tcccccagcaccccc

SEQ ID NO: 804018 - DNA, 15 bp, Homo sapiens
cccccagcaccccca

SEQ ID NO: 804019 - DNA, 15 bp, Homo sapiens
ccccagcacccccag

SEQ ID NO: 804020 - DNA, 15 bp, Homo sapiens
cccagcacccccagc

SEQ ID NO: 804021 - DNA, 15 bp, Homo sapiens
ccagcacccccagca

SEQ ID NO: 804022 - DNA, 15 bp, Homo sapiens
cagcacccccagcag

SEQ ID NO: 804023 - DNA, 15 bp, Homo sapiens
agcacccccagcagg

SEQ ID NO: 804024 - DNA, 15 bp, Homo sapiens
gcacccccagcaggt

SEQ ID NO: 804025 - DNA, 15 bp, Homo sapiens
cacccccagcaggtg

SEQ ID NO: 804026 - DNA, 15 bp, Homo sapiens
acccccagcaggtgg

SEQ ID NO: 804027 - DNA, 15 bp, Homo sapiens
cccccagcaggtggc

SEQ ID NO: 804028 - DNA, 15 bp, Homo sapiens
ccccagcaggtggct

SEQ ID NO: 804029 - DNA, 15 bp, Homo sapiens
cccagcaggtggctc

SEQ ID NO: 804030 - DNA, 15 bp, Homo sapiens
ccagcaggtggctct

SEQ ID NO: 804031 - DNA, 15 bp, Homo sapiens
cagcaggtggctctt

SEQ ID NO: 804032 - DNA, 15 bp, Homo sapiens
agcaggtggctcttt

SEQ ID NO: 804033 - DNA, 15 bp, Homo sapiens
gcaggtggctctttc

SEQ ID NO: 804034 - DNA, 15 bp, Homo sapiens
caggtggctctttct

SEQ ID NO: 804035 - DNA, 15 bp, Homo sapiens
aggtggctctttctc

SEQ ID NO: 804036 - DNA, 15 bp, Homo sapiens
ggtggctctttctcc

SEQ ID NO: 804037 - DNA, 15 bp, Homo sapiens
gtggctctttctcct

SEQ ID NO: 804038 - DNA, 15 bp, Homo sapiens
tggctctttctcctc

SEQ ID NO: 804039 - DNA, 15 bp, Homo sapiens
ggctctttctcctcc

SEQ ID NO: 804040 - DNA, 15 bp, Homo sapiens
gctctttctcctcct

SEQ ID NO: 804041 - DNA, 15 bp, Homo sapiens
ctctttctcctcctg

SEQ ID NO: 804042 - DNA, 15 bp, Homo sapiens
tctttctcctcctgc

SEQ ID NO: 804043 - DNA, 15 bp, Homo sapiens
ctttctcctcctgca

SEQ ID NO: 804044 - DNA, 15 bp, Homo sapiens
tttctcctcctgcag

SEQ ID NO: 804045 - DNA, 15 bp, Homo sapiens
ttctcctcctgcagg

SEQ ID NO: 804046 - DNA, 15 bp, Homo sapiens
tctcctcctgcaggc

SEQ ID NO: 804047 - DNA, 15 bp, Homo sapiens
ctcctcctgcaggcc

SEQ ID NO: 804048 - DNA, 15 bp, Homo sapiens
tcctcctgcaggccc

SEQ ID NO: 804049 - DNA, 15 bp, Homo sapiens
cctcctgcaggcccg

SEQ ID NO: 804050 - DNA, 15 bp, Homo sapiens
ctcctgcaggcccgc

SEQ ID NO: 804051 - DNA, 15 bp, Homo sapiens
tcctgcaggcccgcc

SEQ ID NO: 804052 - DNA, 15 bp, Homo sapiens
cctgcaggcccgccc

SEQ ID NO: 804053 - DNA, 15 bp, Homo sapiens
ctgcaggcccgcccc

SEQ ID NO: 804054 - DNA, 15 bp, Homo sapiens
tgcaggcccgcccca

SEQ ID NO: 804055 - DNA, 15 bp, Homo sapiens
gcaggcccgccccat

SEQ ID NO: 804056 - DNA, 15 bp, Homo sapiens
caggcccgccccatc

SEQ ID NO: 804057 - DNA, 15 bp, Homo sapiens
aggcccgccccatcg

SEQ ID NO: 804058 - DNA, 15 bp, Homo sapiens
ggcccgccccatcga

SEQ ID NO: 804059 - DNA, 15 bp, Homo sapiens
gcccgccccatcgac

SEQ ID NO: 804060 - DNA, 15 bp, Homo sapiens
cccgccccatcgacc

SEQ ID NO: 804061 - DNA, 15 bp, Homo sapiens
ccgccccatcgaccc

SEQ ID NO: 804062 - DNA, 15 bp, Homo sapiens
cgccccatcgaccca

SEQ ID NO: 804063 - DNA, 15 bp, Homo sapiens
gccccatcgacccag

SEQ ID NO: 804064 - DNA, 15 bp, Homo sapiens
ccccatcgacccagg

SEQ ID NO: 804065 - DNA, 15 bp, Homo sapiens
cccatcgacccaggc

SEQ ID NO: 804066 - DNA, 15 bp, Homo sapiens
ccatcgacccaggca

SEQ ID NO: 804067 - DNA, 15 bp, Homo sapiens
catcgacccaggcag

SEQ ID NO: 804068 - DNA, 15 bp, Homo sapiens
atcgacccaggcagt

SEQ ID NO: 804069 - DNA, 15 bp, Homo sapiens
tcgacccaggcagtc

SEQ ID NO: 804070 - DNA, 15 bp, Homo sapiens
cgacccaggcagtct

SEQ ID NO: 804071 - DNA, 15 bp, Homo sapiens
gacccaggcagtctc

SEQ ID NO: 804072 - DNA, 15 bp, Homo sapiens
acccaggcagtctct

SEQ ID NO: 804073 - DNA, 15 bp, Homo sapiens
cccaggcagtctctc

SEQ ID NO: 804074 - DNA, 15 bp, Homo sapiens
ccaggcagtctctca

SEQ ID NO: 804075 - DNA, 15 bp, Homo sapiens
caggcagtctctcag

SEQ ID NO: 804076 - DNA, 15 bp, Homo sapiens
aggcagtctctcagg

SEQ ID NO: 804077 - DNA, 15 bp, Homo sapiens
ggcagtctctcaggc

SEQ ID NO: 804078 - DNA, 15 bp, Homo sapiens
gcagtctctcaggca

SEQ ID NO: 804079 - DNA, 15 bp, Homo sapiens
cagtctctcaggcag

SEQ ID NO: 804080 - DNA, 15 bp, Homo sapiens
agtctctcaggcagc

SEQ ID NO: 804081 - DNA, 15 bp, Homo sapiens
gtctctcaggcagcc

SEQ ID NO: 804082 - DNA, 15 bp, Homo sapiens
tctctcaggcagcct

SEQ ID NO: 804083 - DNA, 15 bp, Homo sapiens
ctctcaggcagcctc

SEQ ID NO: 804084 - DNA, 15 bp, Homo sapiens
tctcaggcagcctca

SEQ ID NO: 804085 - DNA, 15 bp, Homo sapiens
ctcaggcagcctcat

SEQ ID NO: 804086 - DNA, 15 bp, Homo sapiens
tcaggcagcctcatc

SEQ ID NO: 804087 - DNA, 15 bp, Homo sapiens
caggcagcctcatca

SEQ ID NO: 804088 - DNA, 15 bp, Homo sapiens
aggcagcctcatcat

SEQ ID NO: 804089 - DNA, 15 bp, Homo sapiens
ggcagcctcatcatg

SEQ ID NO: 804090 - DNA, 15 bp, Homo sapiens
gcagcctcatcatga

SEQ ID NO: 804091 - DNA, 15 bp, Homo sapiens
cagcctcatcatgag

SEQ ID NO: 804092 - DNA, 15 bp, Homo sapiens
agcctcatcatgagc

SEQ ID NO: 804093 - DNA, 15 bp, Homo sapiens
gcctcatcatgagca

SEQ ID NO: 804094 - DNA, 15 bp, Homo sapiens
cctcatcatgagcac

SEQ ID NO: 804095 - DNA, 15 bp, Homo sapiens
ctcatcatgagcaca

SEQ ID NO: 804096 - DNA, 15 bp, Homo sapiens
tcatcatgagcacag

SEQ ID NO: 804097 - DNA, 15 bp, Homo sapiens
catcatgagcacaga

SEQ ID NO: 804098 - DNA, 15 bp, Homo sapiens
atcatgagcacagag

SEQ ID NO: 804099 - DNA, 15 bp, Homo sapiens
tcatgagcacagaga

SEQ ID NO: 804100 - DNA, 15 bp, Homo sapiens
catgagcacagagaa

SEQ ID NO: 804101 - DNA, 15 bp, Homo sapiens
atgagcacagagaag

SEQ ID NO: 804102 - DNA, 15 bp, Homo sapiens
tgagcacagagaagg

SEQ ID NO: 804103 - DNA, 15 bp, Homo sapiens
gagcacagagaagga

SEQ ID NO: 804104 - DNA, 15 bp, Homo sapiens
agcacagagaaggag

SEQ ID NO: 804105 - DNA, 15 bp, Homo sapiens
gcacagagaaggagg

SEQ ID NO: 804106 - DNA, 15 bp, Homo sapiens
cacagagaaggaggc

SEQ ID NO: 804107 - DNA, 15 bp, Homo sapiens
acagagaaggaggcg

SEQ ID NO: 804108 - DNA, 15 bp, Homo sapiens
cagagaaggaggcga

SEQ ID NO: 804109 - DNA, 15 bp, Homo sapiens
agagaaggaggcgat

SEQ ID NO: 804110 - DNA, 15 bp, Homo sapiens
gagaaggaggcgatt

SEQ ID NO: 804111 - DNA, 15 bp, Homo sapiens
agaaggaggcgattc

SEQ ID NO: 804112 - DNA, 15 bp, Homo sapiens
gaaggaggcgattct

SEQ ID NO: 804113 - DNA, 15 bp, Homo sapiens
aaggaggcgattctc

SEQ ID NO: 804114 - DNA, 15 bp, Homo sapiens
aggaggcgattctct

SEQ ID NO: 804115 - DNA, 15 bp, Homo sapiens
ggaggcgattctctt

SEQ ID NO: 804116 - DNA, 15 bp, Homo sapiens
gaggcgattctcttg

SEQ ID NO: 804117 - DNA, 15 bp, Homo sapiens
aggcgattctcttga

SEQ ID NO: 804118 - DNA, 15 bp, Homo sapiens
ggcgattctcttgac

SEQ ID NO: 804119 - DNA, 15 bp, Homo sapiens
gcgattctcttgacc

SEQ ID NO: 804120 - DNA, 15 bp, Homo sapiens
cgattctcttgacct

SEQ ID NO: 804121 - DNA, 15 bp, Homo sapiens
gattctcttgacctc

SEQ ID NO: 804122 - DNA, 15 bp, Homo sapiens
attctcttgacctct

SEQ ID NO: 804123 - DNA, 15 bp, Homo sapiens
ttctcttgacctctg

SEQ ID NO: 804124 - DNA, 15 bp, Homo sapiens
tctcttgacctctgt

SEQ ID NO: 804125 - DNA, 15 bp, Homo sapiens
ctcttgacctctgta

SEQ ID NO: 804126 - DNA, 15 bp, Homo sapiens
tcttgacctctgtac

SEQ ID NO: 804127 - DNA, 15 bp, Homo sapiens
cttgacctctgtacc

SEQ ID NO: 804128 - DNA, 15 bp, Homo sapiens
ttgacctctgtacca

SEQ ID NO: 804129 - DNA, 15 bp, Homo sapiens
tgacctctgtaccac

SEQ ID NO: 804130 - DNA, 15 bp, Homo sapiens
gacctctgtaccaca

SEQ ID NO: 804131 - DNA, 15 bp, Homo sapiens
acctctgtaccacag

SEQ ID NO: 804132 - DNA, 15 bp, Homo sapiens
cctctgtaccacagc

SEQ ID NO: 804133 - DNA, 15 bp, Homo sapiens
ctctgtaccacagct

SEQ ID NO: 804134 - DNA, 15 bp, Homo sapiens
tctgtaccacagctt

SEQ ID NO: 804135 - DNA, 15 bp, Homo sapiens
ctgtaccacagcttt

SEQ ID NO: 804136 - DNA, 15 bp, Homo sapiens
tgtaccacagctttt

SEQ ID NO: 804137 - DNA, 15 bp, Homo sapiens
gtaccacagcttttt

SEQ ID NO: 804138 - DNA, 15 bp, Homo sapiens
taccacagctttttg

SEQ ID NO: 804139 - DNA, 15 bp, Homo sapiens
accacagctttttgg

SEQ ID NO: 804140 - DNA, 15 bp, Homo sapiens
ccacagctttttggt

SEQ ID NO: 804141 - DNA, 15 bp, Homo sapiens
cacagctttttggtt

SEQ ID NO: 804142 - DNA, 15 bp, Homo sapiens
acagctttttggttt

SEQ ID NO: 804143 - DNA, 15 bp, Homo sapiens
cagctttttggtttt

SEQ ID NO: 804144 - DNA, 15 bp, Homo sapiens
agctttttggttttc

SEQ ID NO: 804145 - DNA, 15 bp, Homo sapiens
gctttttggttttcc

SEQ ID NO: 804146 - DNA, 15 bp, Homo sapiens
ctttttggttttccc

SEQ ID NO: 804147 - DNA, 15 bp, Homo sapiens
tttttggttttccca

SEQ ID NO: 804148 - DNA, 15 bp, Homo sapiens
ttttggttttcccaa

SEQ ID NO: 804149 - DNA, 15 bp, Homo sapiens
tttggttttcccaaa

SEQ ID NO: 804150 - DNA, 15 bp, Homo sapiens
ttggttttcccaaac

SEQ ID NO: 804151 - DNA, 15 bp, Homo sapiens
tggttttcccaaacc

SEQ ID NO: 804152 - DNA, 15 bp, Homo sapiens
ggttttcccaaaccc

SEQ ID NO: 804153 - DNA, 15 bp, Homo sapiens
gttttcccaaaccca

SEQ ID NO: 804154 - DNA, 15 bp, Homo sapiens
ttttcccaaacccaa

SEQ ID NO: 804155 - DNA, 15 bp, Homo sapiens
tttcccaaacccaat

SEQ ID NO: 804156 - DNA, 15 bp, Homo sapiens
ttcccaaacccaatg

SEQ ID NO: 804157 - DNA, 15 bp, Homo sapiens
tcccaaacccaatgt

SEQ ID NO: 804158 - DNA, 15 bp, Homo sapiens
cccaaacccaatgtt

SEQ ID NO: 804159 - DNA, 15 bp, Homo sapiens
ccaaacccaatgttt

SEQ ID NO: 804160 - DNA, 15 bp, Homo sapiens
caaacccaatgtttg

SEQ ID NO: 804161 - DNA, 15 bp, Homo sapiens
aaacccaatgtttga

SEQ ID NO: 804162 - DNA, 15 bp, Homo sapiens
aacccaatgtttgaa

SEQ ID NO: 804163 - DNA, 15 bp, Homo sapiens
acccaatgtttgaaa

SEQ ID NO: 804164 - DNA, 15 bp, Homo sapiens
cccaatgtttgaaat

SEQ ID NO: 804165 - DNA, 15 bp, Homo sapiens
ccaatgtttgaaata

SEQ ID NO: 804166 - DNA, 15 bp, Homo sapiens
caatgtttgaaatat

SEQ ID NO: 804167 - DNA, 15 bp, Homo sapiens
aatgtttgaaatata

SEQ ID NO: 804168 - DNA, 15 bp, Homo sapiens
atgtttgaaatataa

SEQ ID NO: 804169 - DNA, 15 bp, Homo sapiens
tgtttgaaatataat

SEQ ID NO: 804170 - DNA, 15 bp, Homo sapiens
gtttgaaatataata

SEQ ID NO: 804171 - DNA, 15 bp, Homo sapiens
tttgaaatataatat

SEQ ID NO: 804172 - DNA, 15 bp, Homo sapiens
ttgaaatataatata

SEQ ID NO: 804173 - DNA, 15 bp, Homo sapiens
tgaaatataatataa

SEQ ID NO: 804174 - DNA, 15 bp, Homo sapiens
gaaatataatataaa

SEQ ID NO: 804175 - DNA, 15 bp, Homo sapiens
aaatataatataaaa

SEQ ID NO: 804176 - DNA, 15 bp, Homo sapiens
aatataatataaaaa

SEQ ID NO: 804177 - DNA, 15 bp, Homo sapiens
atataatataaaaat

SEQ ID NO: 804178 - DNA, 15 bp, Homo sapiens
tataatataaaaatt

SEQ ID NO: 804179 - DNA, 15 bp, Homo sapiens
ataatataaaaatta

SEQ ID NO: 804180 - DNA, 15 bp, Homo sapiens
taatataaaaattat

SEQ ID NO: 804181 - DNA, 15 bp, Homo sapiens
aatataaaaattata

SEQ ID NO: 804182 - DNA, 15 bp, Homo sapiens
atataaaaattatag

SEQ ID NO: 804183 - DNA, 15 bp, Homo sapiens
tataaaaattataga

SEQ ID NO: 804184 - DNA, 15 bp, Homo sapiens
ataaaaattatagag

SEQ ID NO: 804185 - DNA, 15 bp, Homo sapiens
taaaaattatagagg

SEQ ID NO: 804186 - DNA, 15 bp, Homo sapiens
aaaaattatagaggg

SEQ ID NO: 804187 - DNA, 15 bp, Homo sapiens
aaaattatagagggc

SEQ ID NO: 804188 - DNA, 15 bp, Homo sapiens
aaattatagagggca

SEQ ID NO: 804189 - DNA, 15 bp, Homo sapiens
aattatagagggcac

SEQ ID NO: 804190 - DNA, 15 bp, Homo sapiens
attatagagggcact

SEQ ID NO: 804191 - DNA, 15 bp, Homo sapiens
ttatagagggcactc

SEQ ID NO: 804192 - DNA, 15 bp, Homo sapiens
tatagagggcactct

SEQ ID NO: 804193 - DNA, 15 bp, Homo sapiens
atagagggcactcta

SEQ ID NO: 804194 - DNA, 15 bp, Homo sapiens
tagagggcactctaa

SEQ ID NO: 804195 - DNA, 15 bp, Homo sapiens
agagggcactctaaa

SEQ ID NO: 804196 - DNA, 15 bp, Homo sapiens
gagggcactctaaag

SEQ ID NO: 804197 - DNA, 15 bp, Homo sapiens
agggcactctaaaga

SEQ ID NO: 804198 - DNA, 15 bp, Homo sapiens
gggcactctaaagag

SEQ ID NO: 804199 - DNA, 15 bp, Homo sapiens
ggcactctaaagagc

SEQ ID NO: 804200 - DNA, 15 bp, Homo sapiens
gcactctaaagagca

SEQ ID NO: 804201 - DNA, 15 bp, Homo sapiens
cactctaaagagcac

SEQ ID NO: 804202 - DNA, 15 bp, Homo sapiens
actctaaagagcacc

SEQ ID NO: 804203 - DNA, 15 bp, Homo sapiens
ctctaaagagcacca

SEQ ID NO: 804204 - DNA, 15 bp, Homo sapiens
tctaaagagcaccag

SEQ ID NO: 804205 - DNA, 15 bp, Homo sapiens
ctaaagagcaccagc

SEQ ID NO: 804206 - DNA, 15 bp, Homo sapiens
taaagagcaccagct

SEQ ID NO: 804207 - DNA, 15 bp, Homo sapiens
aaagagcaccagctt

SEQ ID NO: 804208 - DNA, 15 bp, Homo sapiens
aagagcaccagcttt

SEQ ID NO: 804209 - DNA, 15 bp, Homo sapiens
agagcaccagctttt

SEQ ID NO: 804210 - DNA, 15 bp, Homo sapiens
gagcaccagcttttc

SEQ ID NO: 804211 - DNA, 15 bp, Homo sapiens
agcaccagcttttct

SEQ ID NO: 804212 - DNA, 15 bp, Homo sapiens
gcaccagcttttctt

SEQ ID NO: 804213 - DNA, 15 bp, Homo sapiens
caccagcttttcttg

SEQ ID NO: 804214 - DNA, 15 bp, Homo sapiens
accagcttttcttgt

SEQ ID NO: 804215 - DNA, 15 bp, Homo sapiens
ccagcttttcttgtt

SEQ ID NO: 804216 - DNA, 15 bp, Homo sapiens
cagcttttcttgttt

SEQ ID NO: 804217 - DNA, 15 bp, Homo sapiens
agcttttcttgtttt

SEQ ID NO: 804218 - DNA, 15 bp, Homo sapiens
gcttttcttgttttt

SEQ ID NO: 804219 - DNA, 15 bp, Homo sapiens
cttttcttgtttttt

SEQ ID NO: 804220 - DNA, 15 bp, Homo sapiens
ttttcttgttttttt

SEQ ID NO: 804221 - DNA, 15 bp, Homo sapiens
tttcttgtttttttg

SEQ ID NO: 804222 - DNA, 15 bp, Homo sapiens
ttcttgtttttttga

SEQ ID NO: 804223 - DNA, 15 bp, Homo sapiens
tcttgtttttttgat

SEQ ID NO: 804224 - DNA, 15 bp, Homo sapiens
cttgtttttttgatg

SEQ ID NO: 804225 - DNA, 15 bp, Homo sapiens
gtttttttgatgatt

SEQ ID NO: 804226 - DNA, 15 bp, Homo sapiens
tttttttgatgattg

SEQ ID NO: 804227 - DNA, 15 bp, Homo sapiens
ttttttgatgattgt

SEQ ID NO: 804228 - DNA, 15 bp, Homo sapiens
tttttgatgattgtt

SEQ ID NO: 804229 - DNA, 15 bp, Homo sapiens
ttttgatgattgttg

SEQ ID NO: 804230 - DNA, 15 bp, Homo sapiens
tttgatgattgttgg

SEQ ID NO: 804231 - DNA, 15 bp, Homo sapiens
ttgatgattgttgga

SEQ ID NO: 804232 - DNA, 15 bp, Homo sapiens
tgatgattgttggaa

SEQ ID NO: 804233 - DNA, 15 bp, Homo sapiens
gatgattgttggaag

SEQ ID NO: 804234 - DNA, 15 bp, Homo sapiens
atgattgttggaagt

SEQ ID NO: 804235 - DNA, 15 bp, Homo sapiens
tgattgttggaagtg

SEQ ID NO: 804236 - DNA, 15 bp, Homo sapiens
gattgttggaagtgt

SEQ ID NO: 804237 - DNA, 15 bp, Homo sapiens
attgttggaagtgta

SEQ ID NO: 804238 - DNA, 15 bp, Homo sapiens
ttgttggaagtgtat

SEQ ID NO: 804239 - DNA, 15 bp, Homo sapiens
tgttggaagtgtatt

SEQ ID NO: 804240 - DNA, 15 bp, Homo sapiens
gttggaagtgtattt

SEQ ID NO: 804241 - DNA, 15 bp, Homo sapiens
ttggaagtgtatttg

SEQ ID NO: 804242 - DNA, 15 bp, Homo sapiens
tggaagtgtatttgt

SEQ ID NO: 804243 - DNA, 15 bp, Homo sapiens
ggaagtgtatttgtc

SEQ ID NO: 804244 - DNA, 15 bp, Homo sapiens
gaagtgtatttgtca

SEQ ID NO: 804245 - DNA, 15 bp, Homo sapiens
aagtgtatttgtcat

SEQ ID NO: 804246 - DNA, 15 bp, Homo sapiens
agtgtatttgtcatc

SEQ ID NO: 804247 - DNA, 15 bp, Homo sapiens
gtgtatttgtcatca

SEQ ID NO: 804248 - DNA, 15 bp, Homo sapiens
tgtatttgtcatcaa

SEQ ID NO: 804249 - DNA, 15 bp, Homo sapiens
gtatttgtcatcaag

SEQ ID NO: 804250 - DNA, 15 bp, Homo sapiens
tatttgtcatcaaga

SEQ ID NO: 804251 - DNA, 15 bp, Homo sapiens
atttgtcatcaagag

SEQ ID NO: 804252 - DNA, 15 bp, Homo sapiens
tttgtcatcaagagt

SEQ ID NO: 804253 - DNA, 15 bp, Homo sapiens
ttgtcatcaagagtc

SEQ ID NO: 804254 - DNA, 15 bp, Homo sapiens
tgtcatcaagagtct

SEQ ID NO: 804255 - DNA, 15 bp, Homo sapiens
gtcatcaagagtctc

SEQ ID NO: 804256 - DNA, 15 bp, Homo sapiens
tcatcaagagtctct

SEQ ID NO: 804257 - DNA, 15 bp, Homo sapiens
catcaagagtctctt

SEQ ID NO: 804258 - DNA, 15 bp, Homo sapiens
atcaagagtctctta

SEQ ID NO: 804259 - DNA, 15 bp, Homo sapiens
tcaagagtctcttac

SEQ ID NO: 804260 - DNA, 15 bp, Homo sapiens
caagagtctcttaca

SEQ ID NO: 804261 - DNA, 15 bp, Homo sapiens
aagagtctcttacaa

SEQ ID NO: 804262 - DNA, 15 bp, Homo sapiens
agagtctcttacaat

SEQ ID NO: 804263 - DNA, 15 bp, Homo sapiens
gagtctcttacaatt

SEQ ID NO: 804264 - DNA, 15 bp, Homo sapiens
agtctcttacaattg

SEQ ID NO: 804265 - DNA, 15 bp, Homo sapiens
gtctcttacaattgt

SEQ ID NO: 804266 - DNA, 15 bp, Homo sapiens
tctcttacaattgtg

SEQ ID NO: 804267 - DNA, 15 bp, Homo sapiens
ctcttacaattgtgc

SEQ ID NO: 804268 - DNA, 15 bp, Homo sapiens
tcttacaattgtgcc

SEQ ID NO: 804269 - DNA, 15 bp, Homo sapiens
cttacaattgtgcca

SEQ ID NO: 804270 - DNA, 15 bp, Homo sapiens
ttacaattgtgccag

SEQ ID NO: 804271 - DNA, 15 bp, Homo sapiens
tacaattgtgccaga

SEQ ID NO: 804272 - DNA, 15 bp, Homo sapiens
acaattgtgccagat

SEQ ID NO: 804273 - DNA, 15 bp, Homo sapiens
caattgtgccagata

SEQ ID NO: 804274 - DNA, 15 bp, Homo sapiens
aattgtgccagataa

SEQ ID NO: 804275 - DNA, 15 bp, Homo sapiens
attgtgccagataac

SEQ ID NO: 804276 - DNA, 15 bp, Homo sapiens
ttgtgccagataacc

SEQ ID NO: 804277 - DNA, 15 bp, Homo sapiens
tgtgccagataaccc

SEQ ID NO: 804278 - DNA, 15 bp, Homo sapiens
gtgccagataaccct

SEQ ID NO: 804279 - DNA, 15 bp, Homo sapiens
tgccagataacccta

SEQ ID NO: 804280 - DNA, 15 bp, Homo sapiens
gccagataaccctag

SEQ ID NO: 804281 - DNA, 15 bp, Homo sapiens
ccagataaccctagc

SEQ ID NO: 804282 - DNA, 15 bp, Homo sapiens
cagataaccctagca

SEQ ID NO: 804283 - DNA, 15 bp, Homo sapiens
agataaccctagcag

SEQ ID NO: 804284 - DNA, 15 bp, Homo sapiens
gataaccctagcagt

SEQ ID NO: 804285 - DNA, 15 bp, Homo sapiens
ataaccctagcagtc

SEQ ID NO: 804286 - DNA, 15 bp, Homo sapiens
taaccctagcagtct

SEQ ID NO: 804287 - DNA, 15 bp, Homo sapiens
aaccctagcagtctt

SEQ ID NO: 804288 - DNA, 15 bp, Homo sapiens
accctagcagtcttg

SEQ ID NO: 804289 - DNA, 15 bp, Homo sapiens
ccctagcagtcttga

SEQ ID NO: 804290 - DNA, 15 bp, Homo sapiens
cctagcagtcttgac

SEQ ID NO: 804291 - DNA, 15 bp, Homo sapiens
ctagcagtcttgacc

SEQ ID NO: 804292 - DNA, 15 bp, Homo sapiens
tagcagtcttgacct

SEQ ID NO: 804293 - DNA, 15 bp, Homo sapiens
agcagtcttgacctt

SEQ ID NO: 804294 - DNA, 15 bp, Homo sapiens
gcagtcttgaccttc

SEQ ID NO: 804295 - DNA, 15 bp, Homo sapiens
cagtcttgaccttcc

SEQ ID NO: 804296 - DNA, 15 bp, Homo sapiens
agtcttgaccttccc

SEQ ID NO: 804297 - DNA, 15 bp, Homo sapiens
gtcttgaccttccct

SEQ ID NO: 804298 - DNA, 15 bp, Homo sapiens
tcttgaccttccctc

SEQ ID NO: 804299 - DNA, 15 bp, Homo sapiens
cttgaccttccctcc

SEQ ID NO: 804300 - DNA, 15 bp, Homo sapiens
ttgaccttccctcct

SEQ ID NO: 804301 - DNA, 15 bp, Homo sapiens
tgaccttccctcctt

SEQ ID NO: 804302 - DNA, 15 bp, Homo sapiens
gaccttccctccttg

SEQ ID NO: 804303 - DNA, 15 bp, Homo sapiens
accttccctccttgc

SEQ ID NO: 804304 - DNA, 15 bp, Homo sapiens
ccttccctccttgca

SEQ ID NO: 804305 - DNA, 15 bp, Homo sapiens
cttccctccttgcag

SEQ ID NO: 804306 - DNA, 15 bp, Homo sapiens
ttccctccttgcagt

SEQ ID NO: 804307 - DNA, 15 bp, Homo sapiens
tccctccttgcagtt

SEQ ID NO: 804308 - DNA, 15 bp, Homo sapiens
ccctccttgcagttt

SEQ ID NO: 804309 - DNA, 15 bp, Homo sapiens
cctccttgcagtttg

SEQ ID NO: 804310 - DNA, 15 bp, Homo sapiens
ctccttgcagtttga

SEQ ID NO: 804311 - DNA, 15 bp, Homo sapiens
tccttgcagtttgaa

SEQ ID NO: 804312 - DNA, 15 bp, Homo sapiens
ccttgcagtttgaat

SEQ ID NO: 804313 - DNA, 15 bp, Homo sapiens
cttgcagtttgaata

SEQ ID NO: 804314 - DNA, 15 bp, Homo sapiens
ttgcagtttgaatag

SEQ ID NO: 804315 - DNA, 15 bp, Homo sapiens
tgcagtttgaataga

SEQ ID NO: 804316 - DNA, 15 bp, Homo sapiens
gcagtttgaatagac

SEQ ID NO: 804317 - DNA, 15 bp, Homo sapiens
cagtttgaatagacc

SEQ ID NO: 804318 - DNA, 15 bp, Homo sapiens
agtttgaatagacct

SEQ ID NO: 804319 - DNA, 15 bp, Homo sapiens
gtttgaatagaccta

SEQ ID NO: 804320 - DNA, 15 bp, Homo sapiens
tttgaatagacctac

SEQ ID NO: 804321 - DNA, 15 bp, Homo sapiens
ttgaatagacctaca

SEQ ID NO: 804322 - DNA, 15 bp, Homo sapiens
tgaatagacctacat

SEQ ID NO: 804323 - DNA, 15 bp, Homo sapiens
gaatagacctacatg

SEQ ID NO: 804324 - DNA, 15 bp, Homo sapiens
aatagacctacatgt

SEQ ID NO: 804325 - DNA, 15 bp, Homo sapiens
atagacctacatgtg

SEQ ID NO: 804326 - DNA, 15 bp, Homo sapiens
tagacctacatgtga

SEQ ID NO: 804327 - DNA, 15 bp, Homo sapiens
agacctacatgtgag

SEQ ID NO: 804328 - DNA, 15 bp, Homo sapiens
gacctacatgtgagg

SEQ ID NO: 804329 - DNA, 15 bp, Homo sapiens
acctacatgtgaggt

SEQ ID NO: 804330 - DNA, 15 bp, Homo sapiens
cctacatgtgaggtc

SEQ ID NO: 804331 - DNA, 15 bp, Homo sapiens
ctacatgtgaggtcc

SEQ ID NO: 804332 - DNA, 15 bp, Homo sapiens
tacatgtgaggtcct

SEQ ID NO: 804333 - DNA, 15 bp, Homo sapiens
acatgtgaggtcctt

SEQ ID NO: 804334 - DNA, 15 bp, Homo sapiens
catgtgaggtccttg

SEQ ID NO: 804335 - DNA, 15 bp, Homo sapiens
atgtgaggtccttgc

SEQ ID NO: 804336 - DNA, 15 bp, Homo sapiens
tgtgaggtccttgct

SEQ ID NO: 804337 - DNA, 15 bp, Homo sapiens
gtgaggtccttgctg

SEQ ID NO: 804338 - DNA, 15 bp, Homo sapiens
tgaggtccttgctgg

SEQ ID NO: 804339 - DNA, 15 bp, Homo sapiens
gaggtccttgctgga

SEQ ID NO: 804340 - DNA, 15 bp, Homo sapiens
aggtccttgctggat

SEQ ID NO: 804341 - DNA, 15 bp, Homo sapiens
ggtccttgctggata

SEQ ID NO: 804342 - DNA, 15 bp, Homo sapiens
gtccttgctggatat

SEQ ID NO: 804343 - DNA, 15 bp, Homo sapiens
tccttgctggatatc

SEQ ID NO: 804344 - DNA, 15 bp, Homo sapiens
ccttgctggatatct

SEQ ID NO: 804345 - DNA, 15 bp, Homo sapiens
cttgctggatatctc

SEQ ID NO: 804346 - DNA, 15 bp, Homo sapiens
ttgctggatatctct

SEQ ID NO: 804347 - DNA, 15 bp, Homo sapiens
tgctggatatctctc

SEQ ID NO: 804348 - DNA, 15 bp, Homo sapiens
gctggatatctctct

SEQ ID NO: 804349 - DNA, 15 bp, Homo sapiens
ctggatatctctcta

SEQ ID NO: 804350 - DNA, 15 bp, Homo sapiens
tggatatctctctat

SEQ ID NO: 804351 - DNA, 15 bp, Homo sapiens
ggatatctctctatg

SEQ ID NO: 804352 - DNA, 15 bp, Homo sapiens
gatatctctctatga

SEQ ID NO: 804353 - DNA, 15 bp, Homo sapiens
atatctctctatgag

SEQ ID NO: 804354 - DNA, 15 bp, Homo sapiens
tatctctctatgagg

SEQ ID NO: 804355 - DNA, 15 bp, Homo sapiens
atctctctatgaggg

SEQ ID NO: 804356 - DNA, 15 bp, Homo sapiens
tctctctatgagggt

SEQ ID NO: 804357 - DNA, 15 bp, Homo sapiens
ctctctatgagggtg

SEQ ID NO: 804358 - DNA, 15 bp, Homo sapiens
tctctatgagggtgg

SEQ ID NO: 804359 - DNA, 15 bp, Homo sapiens
ctctatgagggtggc

SEQ ID NO: 804360 - DNA, 15 bp, Homo sapiens
tctatgagggtggca

SEQ ID NO: 804361 - DNA, 15 bp, Homo sapiens
ctatgagggtggcac

SEQ ID NO: 804362 - DNA, 15 bp, Homo sapiens
tatgagggtggcacc

SEQ ID NO: 804363 - DNA, 15 bp, Homo sapiens
atgagggtggcaccc

SEQ ID NO: 804364 - DNA, 15 bp, Homo sapiens
tgagggtggcaccct

SEQ ID NO: 804365 - DNA, 15 bp, Homo sapiens
gagggtggcaccctc

SEQ ID NO: 804366 - DNA, 15 bp, Homo sapiens
agggtggcaccctcc

SEQ ID NO: 804367 - DNA, 15 bp, Homo sapiens
gggtggcaccctcca

SEQ ID NO: 804368 - DNA, 15 bp, Homo sapiens
ggtggcaccctccac

SEQ ID NO: 804369 - DNA, 15 bp, Homo sapiens
gtggcaccctccact

SEQ ID NO: 804370 - DNA, 15 bp, Homo sapiens
tggcaccctccactg

SEQ ID NO: 804371 - DNA, 15 bp, Homo sapiens
ggcaccctccactga

SEQ ID NO: 804372 - DNA, 15 bp, Homo sapiens
gcaccctccactgat

SEQ ID NO: 804373 - DNA, 15 bp, Homo sapiens
caccctccactgata

SEQ ID NO: 804374 - DNA, 15 bp, Homo sapiens
accctccactgatat

SEQ ID NO: 804375 - DNA, 15 bp, Homo sapiens
ccctccactgatata

SEQ ID NO: 804376 - DNA, 15 bp, Homo sapiens
cctccactgatatac

SEQ ID NO: 804377 - DNA, 15 bp, Homo sapiens
ctccactgatatact

SEQ ID NO: 804378 - DNA, 15 bp, Homo sapiens
tccactgatatactt

SEQ ID NO: 804379 - DNA, 15 bp, Homo sapiens
ccactgatatactta

SEQ ID NO: 804380 - DNA, 15 bp, Homo sapiens
cactgatatacttag

SEQ ID NO: 804381 - DNA, 15 bp, Homo sapiens
actgatatacttaga

SEQ ID NO: 804382 - DNA, 15 bp, Homo sapiens
ctgatatacttagag

SEQ ID NO: 804383 - DNA, 15 bp, Homo sapiens
tgatatacttagagg

SEQ ID NO: 804384 - DNA, 15 bp, Homo sapiens
gatatacttagaggg

SEQ ID NO: 804385 - DNA, 15 bp, Homo sapiens
atatacttagagggt

SEQ ID NO: 804386 - DNA, 15 bp, Homo sapiens
tatacttagagggtg

SEQ ID NO: 804387 - DNA, 15 bp, Homo sapiens
atacttagagggtgc

SEQ ID NO: 804388 - DNA, 15 bp, Homo sapiens
tacttagagggtgcc

SEQ ID NO: 804389 - DNA, 15 bp, Homo sapiens
acttagagggtgcca

SEQ ID NO: 804390 - DNA, 15 bp, Homo sapiens
cttagagggtgccag

SEQ ID NO: 804391 - DNA, 15 bp, Homo sapiens
ttagagggtgccagg

SEQ ID NO: 804392 - DNA, 15 bp, Homo sapiens
tagagggtgccagga

SEQ ID NO: 804393 - DNA, 15 bp, Homo sapiens
agagggtgccaggaa

SEQ ID NO: 804394 - DNA, 15 bp, Homo sapiens
gagggtgccaggaaa

SEQ ID NO: 804395 - DNA, 15 bp, Homo sapiens
agggtgccaggaaaa

SEQ ID NO: 804396 - DNA, 15 bp, Homo sapiens
gggtgccaggaaaaa

SEQ ID NO: 804397 - DNA, 15 bp, Homo sapiens
ggtgccaggaaaaaa

SEQ ID NO: 804398 - DNA, 15 bp, Homo sapiens
gtgccaggaaaaaat

SEQ ID NO: 804399 - DNA, 15 bp, Homo sapiens
tgccaggaaaaaata

SEQ ID NO: 804400 - DNA, 15 bp, Homo sapiens
gccaggaaaaaatac

SEQ ID NO: 804401 - DNA, 15 bp, Homo sapiens
ccaggaaaaaataca

SEQ ID NO: 804402 - DNA, 15 bp, Homo sapiens
caggaaaaaatacag

SEQ ID NO: 804403 - DNA, 15 bp, Homo sapiens
aggaaaaaatacagg

SEQ ID NO: 804404 - DNA, 15 bp, Homo sapiens
ggaaaaaatacagga

SEQ ID NO: 804405 - DNA, 15 bp, Homo sapiens
gaaaaaatacaggag

SEQ ID NO: 804406 - DNA, 15 bp, Homo sapiens
aaaaaatacaggaga

SEQ ID NO: 804407 - DNA, 15 bp, Homo sapiens
aaaaatacaggagaa

SEQ ID NO: 804408 - DNA, 15 bp, Homo sapiens
aaaatacaggagaaa

SEQ ID NO: 804409 - DNA, 15 bp, Homo sapiens
aaatacaggagaaac

SEQ ID NO: 804410 - DNA, 15 bp, Homo sapiens
aatacaggagaaact

SEQ ID NO: 804411 - DNA, 15 bp, Homo sapiens
atacaggagaaacta

SEQ ID NO: 804412 - DNA, 15 bp, Homo sapiens
tacaggagaaactag

SEQ ID NO: 804413 - DNA, 15 bp, Homo sapiens
acaggagaaactagt

SEQ ID NO: 804414 - DNA, 15 bp, Homo sapiens
caggagaaactagta

SEQ ID NO: 804415 - DNA, 15 bp, Homo sapiens
aggagaaactagtat

SEQ ID NO: 804416 - DNA, 15 bp, Homo sapiens
ggagaaactagtatc

SEQ ID NO: 804417 - DNA, 15 bp, Homo sapiens
gagaaactagtatca

SEQ ID NO: 804418 - DNA, 15 bp, Homo sapiens
agaaactagtatcat

SEQ ID NO: 804419 - DNA, 15 bp, Homo sapiens
gaaactagtatcatc

SEQ ID NO: 804420 - DNA, 15 bp, Homo sapiens
aaactagtatcatct

SEQ ID NO: 804421 - DNA, 15 bp, Homo sapiens
aactagtatcatctc

SEQ ID NO: 804422 - DNA, 15 bp, Homo sapiens
actagtatcatctca

SEQ ID NO: 804423 - DNA, 15 bp, Homo sapiens
ctagtatcatctcat

SEQ ID NO: 804424 - DNA, 15 bp, Homo sapiens
tagtatcatctcatt

SEQ ID NO: 804425 - DNA, 15 bp, Homo sapiens
agtatcatctcatta

SEQ ID NO: 804426 - DNA, 15 bp, Homo sapiens
gtatcatctcattat

SEQ ID NO: 804427 - DNA, 15 bp, Homo sapiens
tatcatctcattata

SEQ ID NO: 804428 - DNA, 15 bp, Homo sapiens
atcatctcattataa

SEQ ID NO: 804429 - DNA, 15 bp, Homo sapiens
tcatctcattataat

SEQ ID NO: 804430 - DNA, 15 bp, Homo sapiens
catctcattataatg

SEQ ID NO: 804431 - DNA, 15 bp, Homo sapiens
atctcattataatga

SEQ ID NO: 804432 - DNA, 15 bp, Homo sapiens
tctcattataatgat

SEQ ID NO: 804433 - DNA, 15 bp, Homo sapiens
ctcattataatgatt

SEQ ID NO: 804434 - DNA, 15 bp, Homo sapiens
tcattataatgattt

SEQ ID NO: 804435 - DNA, 15 bp, Homo sapiens
cattataatgatttt

SEQ ID NO: 804436 - DNA, 15 bp, Homo sapiens
attataatgattttt

SEQ ID NO: 804437 - DNA, 15 bp, Homo sapiens
ttataatgatttttt

SEQ ID NO: 804438 - DNA, 15 bp, Homo sapiens
tataatgatttttta

SEQ ID NO: 804439 - DNA, 15 bp, Homo sapiens
ataatgattttttaa

SEQ ID NO: 804440 - DNA, 15 bp, Homo sapiens
taatgattttttaaa

SEQ ID NO: 804441 - DNA, 15 bp, Homo sapiens
aatgattttttaaat

SEQ ID NO: 804442 - DNA, 15 bp, Homo sapiens
atgattttttaaata

SEQ ID NO: 804443 - DNA, 15 bp, Homo sapiens
tgattttttaaatac

SEQ ID NO: 804444 - DNA, 15 bp, Homo sapiens
gattttttaaataca

SEQ ID NO: 804445 - DNA, 15 bp, Homo sapiens
attttttaaatacag

SEQ ID NO: 804446 - DNA, 15 bp, Homo sapiens
ttttttaaatacagg

SEQ ID NO: 804447 - DNA, 15 bp, Homo sapiens
tttttaaatacagga

SEQ ID NO: 804448 - DNA, 15 bp, Homo sapiens
ttttaaatacaggaa

SEQ ID NO: 804449 - DNA, 15 bp, Homo sapiens
tttaaatacaggaag

SEQ ID NO: 804450 - DNA, 15 bp, Homo sapiens
ttaaatacaggaagg

SEQ ID NO: 804451 - DNA, 15 bp, Homo sapiens
taaatacaggaagga

SEQ ID NO: 804452 - DNA, 15 bp, Homo sapiens
aaatacaggaaggaa

SEQ ID NO: 804453 - DNA, 15 bp, Homo sapiens
aatacaggaaggaaa

SEQ ID NO: 804454 - DNA, 15 bp, Homo sapiens
atacaggaaggaaaa

SEQ ID NO: 804455 - DNA, 15 bp, Homo sapiens
tacaggaaggaaaaa

SEQ ID NO: 804456 - DNA, 15 bp, Homo sapiens
acaggaaggaaaaaa

SEQ ID NO: 804457 - DNA, 15 bp, Homo sapiens
caggaaggaaaaaat

SEQ ID NO: 804458 - DNA, 15 bp, Homo sapiens
aggaaggaaaaaata

SEQ ID NO: 804459 - DNA, 15 bp, Homo sapiens
ggaaggaaaaaatat

SEQ ID NO: 804460 - DNA, 15 bp, Homo sapiens
gaaggaaaaaatata

SEQ ID NO: 804461 - DNA, 15 bp, Homo sapiens
aaggaaaaaatatag

SEQ ID NO: 804462 - DNA, 15 bp, Homo sapiens
aggaaaaaatataga

SEQ ID NO: 804463 - DNA, 15 bp, Homo sapiens
ggaaaaaatatagac

SEQ ID NO: 804464 - DNA, 15 bp, Homo sapiens
gaaaaaatatagacg

SEQ ID NO: 804465 - DNA, 15 bp, Homo sapiens
aaaaaatatagacgg

SEQ ID NO: 804466 - DNA, 15 bp, Homo sapiens
aaaaatatagacggg

SEQ ID NO: 804467 - DNA, 15 bp, Homo sapiens
aaaatatagacggga

SEQ ID NO: 804468 - DNA, 15 bp, Homo sapiens
aaatatagacgggat

SEQ ID NO: 804469 - DNA, 15 bp, Homo sapiens
aatatagacgggata

SEQ ID NO: 804470 - DNA, 15 bp, Homo sapiens
atatagacgggatac

SEQ ID NO: 804471 - DNA, 15 bp, Homo sapiens
tatagacgggatacc

SEQ ID NO: 804472 - DNA, 15 bp, Homo sapiens
atagacgggatacct

SEQ ID NO: 804473 - DNA, 15 bp, Homo sapiens
tagacgggatacctt

SEQ ID NO: 804474 - DNA, 15 bp, Homo sapiens
agacgggataccttt

SEQ ID NO: 804475 - DNA, 15 bp, Homo sapiens
gacgggatacctttt

SEQ ID NO: 804476 - DNA, 15 bp, Homo sapiens
acgggataccttttt

SEQ ID NO: 804477 - DNA, 15 bp, Homo sapiens
cgggatacctttttt

SEQ ID NO: 804478 - DNA, 15 bp, Homo sapiens
gggataccttttttc

SEQ ID NO: 804479 - DNA, 15 bp, Homo sapiens
ggataccttttttcc

SEQ ID NO: 804480 - DNA, 15 bp, Homo sapiens
gataccttttttccc

SEQ ID NO: 804481 - DNA, 15 bp, Homo sapiens
ataccttttttccct

SEQ ID NO: 804482 - DNA, 15 bp, Homo sapiens
taccttttttccctg

SEQ ID NO: 804483 - DNA, 15 bp, Homo sapiens
accttttttccctgt

SEQ ID NO: 804484 - DNA, 15 bp, Homo sapiens
ccttttttccctgta

SEQ ID NO: 804485 - DNA, 15 bp, Homo sapiens
cttttttccctgtat

SEQ ID NO: 804486 - DNA, 15 bp, Homo sapiens
ttttttccctgtata

SEQ ID NO: 804487 - DNA, 15 bp, Homo sapiens
tttttccctgtatac

SEQ ID NO: 804488 - DNA, 15 bp, Homo sapiens
ttttccctgtatact

SEQ ID NO: 804489 - DNA, 15 bp, Homo sapiens
tttccctgtatactc

SEQ ID NO: 804490 - DNA, 15 bp, Homo sapiens
ttccctgtatactcg

SEQ ID NO: 804491 - DNA, 15 bp, Homo sapiens
tccctgtatactcgg

SEQ ID NO: 804492 - DNA, 15 bp, Homo sapiens
ccctgtatactcggt

SEQ ID NO: 804493 - DNA, 15 bp, Homo sapiens
cctgtatactcggtt

SEQ ID NO: 804494 - DNA, 15 bp, Homo sapiens
ctgtatactcggttt

SEQ ID NO: 804495 - DNA, 15 bp, Homo sapiens
tgtatactcggtttt

SEQ ID NO: 804496 - DNA, 15 bp, Homo sapiens
gtatactcggttttg

SEQ ID NO: 804497 - DNA, 15 bp, Homo sapiens
tatactcggttttgg

SEQ ID NO: 804498 - DNA, 15 bp, Homo sapiens
atactcggttttgga

SEQ ID NO: 804499 - DNA, 15 bp, Homo sapiens
tactcggttttggat

SEQ ID NO: 804500 - DNA, 15 bp, Homo sapiens
actcggttttggatt

SEQ ID NO: 804501 - DNA, 15 bp, Homo sapiens
ctcggttttggattt

SEQ ID NO: 804502 - DNA, 15 bp, Homo sapiens
tcggttttggatttt

SEQ ID NO: 804503 - DNA, 15 bp, Homo sapiens
cggttttggattttc

SEQ ID NO: 804504 - DNA, 15 bp, Homo sapiens
ggttttggattttcc

SEQ ID NO: 804505 - DNA, 15 bp, Homo sapiens
gttttggattttcca

SEQ ID NO: 804506 - DNA, 15 bp, Homo sapiens
ttttggattttccag

SEQ ID NO: 804507 - DNA, 15 bp, Homo sapiens
tttggattttccagg

SEQ ID NO: 804508 - DNA, 15 bp, Homo sapiens
ttggattttccaggt

SEQ ID NO: 804509 - DNA, 15 bp, Homo sapiens
tggattttccaggtt

SEQ ID NO: 804510 - DNA, 15 bp, Homo sapiens
ggattttccaggttt

SEQ ID NO: 804511 - DNA, 15 bp, Homo sapiens
gattttccaggtttt

SEQ ID NO: 804512 - DNA, 15 bp, Homo sapiens
attttccaggttttg

SEQ ID NO: 804513 - DNA, 15 bp, Homo sapiens
ttttccaggttttgt

SEQ ID NO: 804514 - DNA, 15 bp, Homo sapiens
tttccaggttttgta

SEQ ID NO: 804515 - DNA, 15 bp, Homo sapiens
ttccaggttttgtac

SEQ ID NO: 804516 - DNA, 15 bp, Homo sapiens
tccaggttttgtaca

SEQ ID NO: 804517 - DNA, 15 bp, Homo sapiens
ccaggttttgtacaa

SEQ ID NO: 804518 - DNA, 15 bp, Homo sapiens
caggttttgtacaat

SEQ ID NO: 804519 - DNA, 15 bp, Homo sapiens
aggttttgtacaatg

SEQ ID NO: 804520 - DNA, 15 bp, Homo sapiens
ggttttgtacaatga

SEQ ID NO: 804521 - DNA, 15 bp, Homo sapiens
gttttgtacaatgaa

SEQ ID NO: 804522 - DNA, 15 bp, Homo sapiens
ttttgtacaatgaac

SEQ ID NO: 804523 - DNA, 15 bp, Homo sapiens
tttgtacaatgaaca

SEQ ID NO: 804524 - DNA, 15 bp, Homo sapiens
ttgtacaatgaacac

SEQ ID NO: 804525 - DNA, 15 bp, Homo sapiens
tgtacaatgaacacg

SEQ ID NO: 804526 - DNA, 15 bp, Homo sapiens
gtacaatgaacacgt

SEQ ID NO: 804527 - DNA, 15 bp, Homo sapiens
tacaatgaacacgtg

SEQ ID NO: 804528 - DNA, 15 bp, Homo sapiens
acaatgaacacgtgt

SEQ ID NO: 804529 - DNA, 15 bp, Homo sapiens
caatgaacacgtgtt

SEQ ID NO: 804530 - DNA, 15 bp, Homo sapiens
aatgaacacgtgttt

SEQ ID NO: 804531 - DNA, 15 bp, Homo sapiens
atgaacacgtgtttt

SEQ ID NO: 804532 - DNA, 15 bp, Homo sapiens
tgaacacgtgttttg

SEQ ID NO: 804533 - DNA, 15 bp, Homo sapiens
gaacacgtgttttgt

SEQ ID NO: 804534 - DNA, 15 bp, Homo sapiens
aacacgtgttttgta

SEQ ID NO: 804535 - DNA, 15 bp, Homo sapiens
acacgtgttttgtaa

SEQ ID NO: 804536 - DNA, 15 bp, Homo sapiens
cacgtgttttgtaat

SEQ ID NO: 804537 - DNA, 15 bp, Homo sapiens
acgtgttttgtaatt

SEQ ID NO: 804538 - DNA, 15 bp, Homo sapiens
cgtgttttgtaattt

SEQ ID NO: 804539 - DNA, 15 bp, Homo sapiens
gtgttttgtaatttg

SEQ ID NO: 804540 - DNA, 15 bp, Homo sapiens
tgttttgtaatttga

SEQ ID NO: 804541 - DNA, 15 bp, Homo sapiens
gttttgtaatttgag

SEQ ID NO: 804542 - DNA, 15 bp, Homo sapiens
ttttgtaatttgagt

SEQ ID NO: 804543 - DNA, 15 bp, Homo sapiens
tttgtaatttgagta

SEQ ID NO: 804544 - DNA, 15 bp, Homo sapiens
ttgtaatttgagtaa

SEQ ID NO: 804545 - DNA, 15 bp, Homo sapiens
tgtaatttgagtaaa

SEQ ID NO: 804546 - DNA, 15 bp, Homo sapiens
gtaatttgagtaaat

SEQ ID NO: 804547 - DNA, 15 bp, Homo sapiens
taatttgagtaaatt

SEQ ID NO: 804548 - DNA, 15 bp, Homo sapiens
aatttgagtaaatta

SEQ ID NO: 804549 - DNA, 15 bp, Homo sapiens
atttgagtaaattac

SEQ ID NO: 804550 - DNA, 15 bp, Homo sapiens
tttgagtaaattaca

SEQ ID NO: 804551 - DNA, 15 bp, Homo sapiens
ttgagtaaattacaa

SEQ ID NO: 804552 - DNA, 15 bp, Homo sapiens
tgagtaaattacaaa

SEQ ID NO: 804553 - DNA, 15 bp, Homo sapiens
gagtaaattacaaat

SEQ ID NO: 804554 - DNA, 15 bp, Homo sapiens
agtaaattacaaatt

SEQ ID NO: 804555 - DNA, 15 bp, Homo sapiens
gtaaattacaaattg

SEQ ID NO: 804556 - DNA, 15 bp, Homo sapiens
taaattacaaattgt

SEQ ID NO: 804557 - DNA, 15 bp, Homo sapiens
aaattacaaattgtt

SEQ ID NO: 804558 - DNA, 15 bp, Homo sapiens
aattacaaattgttt

SEQ ID NO: 804559 - DNA, 15 bp, Homo sapiens
attacaaattgtttc

SEQ ID NO: 804560 - DNA, 15 bp, Homo sapiens
ttacaaattgtttca

SEQ ID NO: 804561 - DNA, 15 bp, Homo sapiens
tacaaattgtttcag

SEQ ID NO: 804562 - DNA, 15 bp, Homo sapiens
acaaattgtttcagc

SEQ ID NO: 804563 - DNA, 15 bp, Homo sapiens
caaattgtttcagct

SEQ ID NO: 804564 - DNA, 15 bp, Homo sapiens
aaattgtttcagctg

SEQ ID NO: 804565 - DNA, 15 bp, Homo sapiens
aattgtttcagctgt

SEQ ID NO: 804566 - DNA, 15 bp, Homo sapiens
attgtttcagctgtg

SEQ ID NO: 804567 - DNA, 15 bp, Homo sapiens
ttgtttcagctgtgt

SEQ ID NO: 804568 - DNA, 15 bp, Homo sapiens
tgtttcagctgtgtt

SEQ ID NO: 804569 - DNA, 15 bp, Homo sapiens
gtttcagctgtgttt

SEQ ID NO: 804570 - DNA, 15 bp, Homo sapiens
tttcagctgtgtttg

SEQ ID NO: 804571 - DNA, 15 bp, Homo sapiens
ttcagctgtgtttgc

SEQ ID NO: 804572 - DNA, 15 bp, Homo sapiens
tcagctgtgtttgct

SEQ ID NO: 804573 - DNA, 15 bp, Homo sapiens
cagctgtgtttgctt

SEQ ID NO: 804574 - DNA, 15 bp, Homo sapiens
agctgtgtttgcttt

SEQ ID NO: 804575 - DNA, 15 bp, Homo sapiens
gctgtgtttgctttt

SEQ ID NO: 804576 - DNA, 15 bp, Homo sapiens
ctgtgtttgcttttg

SEQ ID NO: 804577 - DNA, 15 bp, Homo sapiens
tgtgtttgcttttga

SEQ ID NO: 804578 - DNA, 15 bp, Homo sapiens
gtgtttgcttttgag

SEQ ID NO: 804579 - DNA, 15 bp, Homo sapiens
tgtttgcttttgaga

SEQ ID NO: 804580 - DNA, 15 bp, Homo sapiens
gtttgcttttgagaa

SEQ ID NO: 804581 - DNA, 15 bp, Homo sapiens
tttgcttttgagaaa

SEQ ID NO: 804582 - DNA, 15 bp, Homo sapiens
ttgcttttgagaaaa

SEQ ID NO: 804583 - DNA, 15 bp, Homo sapiens
tgcttttgagaaaaa

SEQ ID NO: 804584 - DNA, 15 bp, Homo sapiens
gcttttgagaaaaaa

SEQ ID NO: 804585 - DNA, 15 bp, Homo sapiens
cttttgagaaaaaaa

SEQ ID NO: 804586 - DNA, 15 bp, Homo sapiens
ttttgagaaaaaaat

SEQ ID NO: 804587 - DNA, 15 bp, Homo sapiens
tttgagaaaaaaata

SEQ ID NO: 804588 - DNA, 15 bp, Homo sapiens
ttgagaaaaaaatac

SEQ ID NO: 804589 - DNA, 15 bp, Homo sapiens
tgagaaaaaaatact

SEQ ID NO: 804590 - DNA, 15 bp, Homo sapiens
gagaaaaaaatacta

SEQ ID NO: 804591 - DNA, 15 bp, Homo sapiens
agaaaaaaatactat

SEQ ID NO: 804592 - DNA, 15 bp, Homo sapiens
gaaaaaaatactata

SEQ ID NO: 804593 - DNA, 15 bp, Homo sapiens
aaaaaaatactatac

SEQ ID NO: 804594 - DNA, 15 bp, Homo sapiens
aaaaaatactataca

SEQ ID NO: 804595 - DNA, 15 bp, Homo sapiens
aaaaatactatacat

SEQ ID NO: 804596 - DNA, 15 bp, Homo sapiens
aaaatactatacatt

SEQ ID NO: 804597 - DNA, 15 bp, Homo sapiens
aaatactatacatta

SEQ ID NO: 804598 - DNA, 15 bp, Homo sapiens
aatactatacattag

SEQ ID NO: 804599 - DNA, 15 bp, Homo sapiens
atactatacattagg

SEQ ID NO: 804600 - DNA, 15 bp, Homo sapiens
tactatacattaggc

SEQ ID NO: 804601 - DNA, 15 bp, Homo sapiens
actatacattaggca

SEQ ID NO: 804602 - DNA, 15 bp, Homo sapiens
ctatacattaggcat

SEQ ID NO: 804603 - DNA, 15 bp, Homo sapiens
tatacattaggcata

SEQ ID NO: 804604 - DNA, 15 bp, Homo sapiens
atacattaggcatag

SEQ ID NO: 804605 - DNA, 15 bp, Homo sapiens
tacattaggcatagg

SEQ ID NO: 804606 - DNA, 15 bp, Homo sapiens
acattaggcataggc

SEQ ID NO: 804607 - DNA, 15 bp, Homo sapiens
cattaggcataggcg

SEQ ID NO: 804608 - DNA, 15 bp, Homo sapiens
attaggcataggcgg

SEQ ID NO: 804609 - DNA, 15 bp, Homo sapiens
ttaggcataggcggt

SEQ ID NO: 804610 - DNA, 15 bp, Homo sapiens
taggcataggcggtg

SEQ ID NO: 804611 - DNA, 15 bp, Homo sapiens
aggcataggcggtgc

SEQ ID NO: 804612 - DNA, 15 bp, Homo sapiens
ggcataggcggtgct

SEQ ID NO: 804613 - DNA, 15 bp, Homo sapiens
gcataggcggtgctc

SEQ ID NO: 804614 - DNA, 15 bp, Homo sapiens
cataggcggtgctcc

SEQ ID NO: 804615 - DNA, 15 bp, Homo sapiens
ataggcggtgctcct

SEQ ID NO: 804616 - DNA, 15 bp, Homo sapiens
taggcggtgctcctc

SEQ ID NO: 804617 - DNA, 15 bp, Homo sapiens
aggcggtgctcctct

SEQ ID NO: 804618 - DNA, 15 bp, Homo sapiens
ggcggtgctcctctt

SEQ ID NO: 804619 - DNA, 15 bp, Homo sapiens
gcggtgctcctcttc

SEQ ID NO: 804620 - DNA, 15 bp, Homo sapiens
cggtgctcctcttcc

SEQ ID NO: 804621 - DNA, 15 bp, Homo sapiens
ggtgctcctcttccc

SEQ ID NO: 804622 - DNA, 15 bp, Homo sapiens
gtgctcctcttccct

SEQ ID NO: 804623 - DNA, 15 bp, Homo sapiens
tgctcctcttccctc

SEQ ID NO: 804624 - DNA, 15 bp, Homo sapiens
gctcctcttccctcc

SEQ ID NO: 804625 - DNA, 15 bp, Homo sapiens
ctcctcttccctccc

SEQ ID NO: 804626 - DNA, 15 bp, Homo sapiens
tcctcttccctccca

SEQ ID NO: 804627 - DNA, 15 bp, Homo sapiens
cctcttccctcccat

SEQ ID NO: 804628 - DNA, 15 bp, Homo sapiens
ctcttccctcccatg

SEQ ID NO: 804629 - DNA, 15 bp, Homo sapiens
tcttccctcccatga

SEQ ID NO: 804630 - DNA, 15 bp, Homo sapiens
cttccctcccatgaa

SEQ ID NO: 804631 - DNA, 15 bp, Homo sapiens
ttccctcccatgaag

SEQ ID NO: 804632 - DNA, 15 bp, Homo sapiens
tccctcccatgaagg

SEQ ID NO: 804633 - DNA, 15 bp, Homo sapiens
ccctcccatgaaggc

SEQ ID NO: 804634 - DNA, 15 bp, Homo sapiens
cctcccatgaaggcg

SEQ ID NO: 804635 - DNA, 15 bp, Homo sapiens
ctcccatgaaggcgt

SEQ ID NO: 804636 - DNA, 15 bp, Homo sapiens
tcccatgaaggcgtg

SEQ ID NO: 804637 - DNA, 15 bp, Homo sapiens
cccatgaaggcgtga

SEQ ID NO: 804638 - DNA, 15 bp, Homo sapiens
ccatgaaggcgtgac

SEQ ID NO: 804639 - DNA, 15 bp, Homo sapiens
catgaaggcgtgaca

SEQ ID NO: 804640 - DNA, 15 bp, Homo sapiens
atgaaggcgtgacac

SEQ ID NO: 804641 - DNA, 15 bp, Homo sapiens
tgaaggcgtgacacc

SEQ ID NO: 804642 - DNA, 15 bp, Homo sapiens
gaaggcgtgacaccc

SEQ ID NO: 804643 - DNA, 15 bp, Homo sapiens
aaggcgtgacaccct

SEQ ID NO: 804644 - DNA, 15 bp, Homo sapiens
aggcgtgacaccctc

SEQ ID NO: 804645 - DNA, 15 bp, Homo sapiens
ggcgtgacaccctca

SEQ ID NO: 804646 - DNA, 15 bp, Homo sapiens
gcgtgacaccctcaa

SEQ ID NO: 804647 - DNA, 15 bp, Homo sapiens
cgtgacaccctcaaa

SEQ ID NO: 804648 - DNA, 15 bp, Homo sapiens
gtgacaccctcaaat

SEQ ID NO: 804649 - DNA, 15 bp, Homo sapiens
tgacaccctcaaatc

SEQ ID NO: 804650 - DNA, 15 bp, Homo sapiens
gacaccctcaaatca

SEQ ID NO: 804651 - DNA, 15 bp, Homo sapiens
acaccctcaaatcag

SEQ ID NO: 804652 - DNA, 15 bp, Homo sapiens
caccctcaaatcagc

SEQ ID NO: 804653 - DNA, 15 bp, Homo sapiens
accctcaaatcagcc

SEQ ID NO: 804654 - DNA, 15 bp, Homo sapiens
ccctcaaatcagccc

SEQ ID NO: 804655 - DNA, 15 bp, Homo sapiens
cctcaaatcagcccc

SEQ ID NO: 804656 - DNA, 15 bp, Homo sapiens
ctcaaatcagccccc

SEQ ID NO: 804657 - DNA, 15 bp, Homo sapiens
tcaaatcagccccct

SEQ ID NO: 804658 - DNA, 15 bp, Homo sapiens
caaatcagccccctc

SEQ ID NO: 804659 - DNA, 15 bp, Homo sapiens
aaatcagccccctcc

SEQ ID NO: 804660 - DNA, 15 bp, Homo sapiens
aatcagccccctcct

SEQ ID NO: 804661 - DNA, 15 bp, Homo sapiens
atcagccccctcctg

SEQ ID NO: 804662 - DNA, 15 bp, Homo sapiens
tcagccccctcctgc

SEQ ID NO: 804663 - DNA, 15 bp, Homo sapiens
cagccccctcctgcc

SEQ ID NO: 804664 - DNA, 15 bp, Homo sapiens
agccccctcctgcct

SEQ ID NO: 804665 - DNA, 15 bp, Homo sapiens
gccccctcctgcctc

SEQ ID NO: 804666 - DNA, 15 bp, Homo sapiens
ccccctcctgcctca

SEQ ID NO: 804667 - DNA, 15 bp, Homo sapiens
cccctcctgcctcaa

SEQ ID NO: 804668 - DNA, 15 bp, Homo sapiens
ccctcctgcctcaat

SEQ ID NO: 804669 - DNA, 15 bp, Homo sapiens
cctcctgcctcaatt

SEQ ID NO: 804670 - DNA, 15 bp, Homo sapiens
ctcctgcctcaattt

SEQ ID NO: 804671 - DNA, 15 bp, Homo sapiens
tcctgcctcaattta

SEQ ID NO: 804672 - DNA, 15 bp, Homo sapiens
cctgcctcaatttag

SEQ ID NO: 804673 - DNA, 15 bp, Homo sapiens
ctgcctcaatttaga

SEQ ID NO: 804674 - DNA, 15 bp, Homo sapiens
tgcctcaatttagag

SEQ ID NO: 804675 - DNA, 15 bp, Homo sapiens
gcctcaatttagagt

SEQ ID NO: 804676 - DNA, 15 bp, Homo sapiens
cctcaatttagagtg

SEQ ID NO: 804677 - DNA, 15 bp, Homo sapiens
ctcaatttagagtgc

SEQ ID NO: 804678 - DNA, 15 bp, Homo sapiens
tcaatttagagtgct

SEQ ID NO: 804679 - DNA, 15 bp, Homo sapiens
caatttagagtgctg

SEQ ID NO: 804680 - DNA, 15 bp, Homo sapiens
aatttagagtgctga

SEQ ID NO: 804681 - DNA, 15 bp, Homo sapiens
atttagagtgctgaa

SEQ ID NO: 804682 - DNA, 15 bp, Homo sapiens
tttagagtgctgaag

SEQ ID NO: 804683 - DNA, 15 bp, Homo sapiens
ttagagtgctgaagg

SEQ ID NO: 804684 - DNA, 15 bp, Homo sapiens
tagagtgctgaaggc

SEQ ID NO: 804685 - DNA, 15 bp, Homo sapiens
agagtgctgaaggct

SEQ ID NO: 804686 - DNA, 15 bp, Homo sapiens
gagtgctgaaggctg

SEQ ID NO: 804687 - DNA, 15 bp, Homo sapiens
agtgctgaaggctgg

SEQ ID NO: 804688 - DNA, 15 bp, Homo sapiens
ccagcatgtttactt

SEQ ID NO: 804689 - DNA, 15 bp, Homo sapiens
cagcatgtttacttg

SEQ ID NO: 804690 - DNA, 15 bp, Homo sapiens
agcatgtttacttgg

SEQ ID NO: 804691 - DNA, 15 bp, Homo sapiens
gcatgtttacttggt

SEQ ID NO: 804692 - DNA, 15 bp, Homo sapiens
catgtttacttggtg

SEQ ID NO: 804693 - DNA, 15 bp, Homo sapiens
atgtttacttggtga

SEQ ID NO: 804694 - DNA, 15 bp, Homo sapiens
tgtttacttggtgac

SEQ ID NO: 804695 - DNA, 15 bp, Homo sapiens
gtttacttggtgacc

SEQ ID NO: 804696 - DNA, 15 bp, Homo sapiens
tttacttggtgacca

SEQ ID NO: 804697 - DNA, 15 bp, Homo sapiens
ttacttggtgaccat

SEQ ID NO: 804698 - DNA, 15 bp, Homo sapiens
tacttggtgaccatg

SEQ ID NO: 804699 - DNA, 15 bp, Homo sapiens
acttggtgaccatga

SEQ ID NO: 804700 - DNA, 15 bp, Homo sapiens
cttggtgaccatgat

SEQ ID NO: 804701 - DNA, 15 bp, Homo sapiens
ttggtgaccatgatg

SEQ ID NO: 804702 - DNA, 15 bp, Homo sapiens
tggtgaccatgatgt

SEQ ID NO: 804703 - DNA, 15 bp, Homo sapiens
ggtgaccatgatgtg

SEQ ID NO: 804704 - DNA, 15 bp, Homo sapiens
gtgaccatgatgtgc

SEQ ID NO: 804705 - DNA, 15 bp, Homo sapiens
tgaccatgatgtgca

SEQ ID NO: 804706 - DNA, 15 bp, Homo sapiens
gaccatgatgtgcag

SEQ ID NO: 804707 - DNA, 15 bp, Homo sapiens
accatgatgtgcagt

SEQ ID NO: 804708 - DNA, 15 bp, Homo sapiens
ccatgatgtgcagtc

SEQ ID NO: 804709 - DNA, 15 bp, Homo sapiens
catgatgtgcagtcc

SEQ ID NO: 804710 - DNA, 15 bp, Homo sapiens
atgatgtgcagtcca

SEQ ID NO: 804711 - DNA, 15 bp, Homo sapiens
tgatgtgcagtccat

SEQ ID NO: 804712 - DNA, 15 bp, Homo sapiens
gatgtgcagtccata

SEQ ID NO: 804713 - DNA, 15 bp, Homo sapiens
atgtgcagtccataa

SEQ ID NO: 804714 - DNA, 15 bp, Homo sapiens
tgtgcagtccataag

SEQ ID NO: 804715 - DNA, 15 bp, Homo sapiens
gtgcagtccataagg

SEQ ID NO: 804716 - DNA, 15 bp, Homo sapiens
tgcagtccataagga

SEQ ID NO: 804717 - DNA, 15 bp, Homo sapiens
gcagtccataaggaa

SEQ ID NO: 804718 - DNA, 15 bp, Homo sapiens
cagtccataaggaag

SEQ ID NO: 804719 - DNA, 15 bp, Homo sapiens
agtccataaggaagc

SEQ ID NO: 804720 - DNA, 15 bp, Homo sapiens
gtccataaggaagcc

SEQ ID NO: 804721 - DNA, 15 bp, Homo sapiens
tccataaggaagccc

SEQ ID NO: 804722 - DNA, 15 bp, Homo sapiens
ccataaggaagccca

SEQ ID NO: 804723 - DNA, 15 bp, Homo sapiens
cataaggaagcccac

SEQ ID NO: 804724 - DNA, 15 bp, Homo sapiens
ataaggaagcccaca

SEQ ID NO: 804725 - DNA, 15 bp, Homo sapiens
taaggaagcccacag

SEQ ID NO: 804726 - DNA, 15 bp, Homo sapiens
aaggaagcccacagg

SEQ ID NO: 804727 - DNA, 15 bp, Homo sapiens
aggaagcccacaggg

SEQ ID NO: 804728 - DNA, 15 bp, Homo sapiens
ggaagcccacaggga

SEQ ID NO: 804729 - DNA, 15 bp, Homo sapiens
gaagcccacagggaa

SEQ ID NO: 804730 - DNA, 15 bp, Homo sapiens
aagcccacagggaag

SEQ ID NO: 804731 - DNA, 15 bp, Homo sapiens
agcccacagggaagc

SEQ ID NO: 804732 - DNA, 15 bp, Homo sapiens
gcccacagggaagcg

SEQ ID NO: 804733 - DNA, 15 bp, Homo sapiens
cccacagggaagcgt

SEQ ID NO: 804734 - DNA, 15 bp, Homo sapiens
ccacagggaagcgtg

SEQ ID NO: 804735 - DNA, 15 bp, Homo sapiens
cacagggaagcgtga

SEQ ID NO: 804736 - DNA, 15 bp, Homo sapiens
acagggaagcgtgaa

SEQ ID NO: 804737 - DNA, 15 bp, Homo sapiens
cagggaagcgtgaac

SEQ ID NO: 804738 - DNA, 15 bp, Homo sapiens
agggaagcgtgaacc

SEQ ID NO: 804739 - DNA, 15 bp, Homo sapiens
gggaagcgtgaacca

SEQ ID NO: 804740 - DNA, 15 bp, Homo sapiens
ggaagcgtgaaccac

SEQ ID NO: 804741 - DNA, 15 bp, Homo sapiens
gaagcgtgaaccact

SEQ ID NO: 804742 - DNA, 15 bp, Homo sapiens
aagcgtgaaccactg

SEQ ID NO: 804743 - DNA, 15 bp, Homo sapiens
agcgtgaaccactgg

SEQ ID NO: 804744 - DNA, 15 bp, Homo sapiens
gcgtgaaccactggg

SEQ ID NO: 804745 - DNA, 15 bp, Homo sapiens
cgtgaaccactggga

SEQ ID NO: 804746 - DNA, 15 bp, Homo sapiens
gtgaaccactgggaa

SEQ ID NO: 804747 - DNA, 15 bp, Homo sapiens
tgaaccactgggaaa

SEQ ID NO: 804748 - DNA, 15 bp, Homo sapiens
gaaccactgggaaat

SEQ ID NO: 804749 - DNA, 15 bp, Homo sapiens
aaccactgggaaata

SEQ ID NO: 804750 - DNA, 15 bp, Homo sapiens
accactgggaaatag

SEQ ID NO: 804751 - DNA, 15 bp, Homo sapiens
ccactgggaaatagt

SEQ ID NO: 804752 - DNA, 15 bp, Homo sapiens
cactgggaaatagtg

SEQ ID NO: 804753 - DNA, 15 bp, Homo sapiens
actgggaaatagtgg

SEQ ID NO: 804754 - DNA, 15 bp, Homo sapiens
ctgggaaatagtgga

SEQ ID NO: 804755 - DNA, 15 bp, Homo sapiens
tgggaaatagtggaa

SEQ ID NO: 804756 - DNA, 15 bp, Homo sapiens
gggaaatagtggaaa

SEQ ID NO: 804757 - DNA, 15 bp, Homo sapiens
ggaaatagtggaaag

SEQ ID NO: 804758 - DNA, 15 bp, Homo sapiens
gaaatagtggaaaga

SEQ ID NO: 804759 - DNA, 15 bp, Homo sapiens
aaatagtggaaagag

SEQ ID NO: 804760 - DNA, 15 bp, Homo sapiens
aatagtggaaagagc

SEQ ID NO: 804761 - DNA, 15 bp, Homo sapiens
atagtggaaagagca

SEQ ID NO: 804762 - DNA, 15 bp, Homo sapiens
tagtggaaagagcag

SEQ ID NO: 804763 - DNA, 15 bp, Homo sapiens
agtggaaagagcagc

SEQ ID NO: 804764 - DNA, 15 bp, Homo sapiens
gtggaaagagcagct

SEQ ID NO: 804765 - DNA, 15 bp, Homo sapiens
tggaaagagcagctt

SEQ ID NO: 804766 - DNA, 15 bp, Homo sapiens
ggaaagagcagcttc

SEQ ID NO: 804767 - DNA, 15 bp, Homo sapiens
gaaagagcagcttcc

SEQ ID NO: 804768 - DNA, 15 bp, Homo sapiens
aaagagcagcttcca

SEQ ID NO: 804769 - DNA, 15 bp, Homo sapiens
aagagcagcttccac

SEQ ID NO: 804770 - DNA, 15 bp, Homo sapiens
agagcagcttccact

SEQ ID NO: 804771 - DNA, 15 bp, Homo sapiens
gagcagcttccactg

SEQ ID NO: 804772 - DNA, 15 bp, Homo sapiens
agcagcttccactgg

SEQ ID NO: 804773 - DNA, 15 bp, Homo sapiens
gcagcttccactggc

SEQ ID NO: 804774 - DNA, 15 bp, Homo sapiens
cagcttccactggca

SEQ ID NO: 804775 - DNA, 15 bp, Homo sapiens
agcttccactggcat

SEQ ID NO: 804776 - DNA, 15 bp, Homo sapiens
gcttccactggcatt

SEQ ID NO: 804777 - DNA, 15 bp, Homo sapiens
cttccactggcattt

SEQ ID NO: 804778 - DNA, 15 bp, Homo sapiens
ttccactggcatttc

SEQ ID NO: 804779 - DNA, 15 bp, Homo sapiens
tccactggcatttcc

SEQ ID NO: 804780 - DNA, 15 bp, Homo sapiens
ccactggcatttccc

SEQ ID NO: 804781 - DNA, 15 bp, Homo sapiens
cactggcatttcccc

SEQ ID NO: 804782 - DNA, 15 bp, Homo sapiens
actggcatttccccc

SEQ ID NO: 804783 - DNA, 15 bp, Homo sapiens
ctggcatttccccct

SEQ ID NO: 804784 - DNA, 15 bp, Homo sapiens
tggcatttcccccta

SEQ ID NO: 804785 - DNA, 15 bp, Homo sapiens
ggcatttccccctaa

SEQ ID NO: 804786 - DNA, 15 bp, Homo sapiens
gcatttccccctaat

SEQ ID NO: 804787 - DNA, 15 bp, Homo sapiens
catttccccctaatc

SEQ ID NO: 804788 - DNA, 15 bp, Homo sapiens
atttccccctaatct

SEQ ID NO: 804789 - DNA, 15 bp, Homo sapiens
tttccccctaatcta

SEQ ID NO: 804790 - DNA, 15 bp, Homo sapiens
ttccccctaatctaa

SEQ ID NO: 804791 - DNA, 15 bp, Homo sapiens
tccccctaatctaat

SEQ ID NO: 804792 - DNA, 15 bp, Homo sapiens
ccccctaatctaatc

SEQ ID NO: 804793 - DNA, 15 bp, Homo sapiens
cccctaatctaatct

SEQ ID NO: 804794 - DNA, 15 bp, Homo sapiens
ccctaatctaatcta

SEQ ID NO: 804795 - DNA, 15 bp, Homo sapiens
cctaatctaatctac

SEQ ID NO: 804796 - DNA, 15 bp, Homo sapiens
ctaatctaatctacc

SEQ ID NO: 804797 - DNA, 15 bp, Homo sapiens
taatctaatctacct

SEQ ID NO: 804798 - DNA, 15 bp, Homo sapiens
aatctaatctacctc

SEQ ID NO: 804799 - DNA, 15 bp, Homo sapiens
atctaatctacctca

SEQ ID NO: 804800 - DNA, 15 bp, Homo sapiens
tctaatctacctcag

SEQ ID NO: 804801 - DNA, 15 bp, Homo sapiens
ctaatctacctcagt

SEQ ID NO: 804802 - DNA, 15 bp, Homo sapiens
taatctacctcagtg

SEQ ID NO: 804803 - DNA, 15 bp, Homo sapiens
aatctacctcagtga

SEQ ID NO: 804804 - DNA, 15 bp, Homo sapiens
atctacctcagtgat

SEQ ID NO: 804805 - DNA, 15 bp, Homo sapiens
tctacctcagtgatt

SEQ ID NO: 804806 - DNA, 15 bp, Homo sapiens
ctacctcagtgattt

SEQ ID NO: 804807 - DNA, 15 bp, Homo sapiens
tacctcagtgattta

SEQ ID NO: 804808 - DNA, 15 bp, Homo sapiens
acctcagtgatttag

SEQ ID NO: 804809 - DNA, 15 bp, Homo sapiens
cctcagtgatttagg

SEQ ID NO: 804810 - DNA, 15 bp, Homo sapiens
ctcagtgatttagga

SEQ ID NO: 804811 - DNA, 15 bp, Homo sapiens
tcagtgatttaggac

SEQ ID NO: 804812 - DNA, 15 bp, Homo sapiens
cagtgatttaggact

SEQ ID NO: 804813 - DNA, 15 bp, Homo sapiens
agtgatttaggacta

SEQ ID NO: 804814 - DNA, 15 bp, Homo sapiens
gtgatttaggactaa

SEQ ID NO: 804815 - DNA, 15 bp, Homo sapiens
tgatttaggactaac

SEQ ID NO: 804816 - DNA, 15 bp, Homo sapiens
gatttaggactaact

SEQ ID NO: 804817 - DNA, 15 bp, Homo sapiens
atttaggactaactc

SEQ ID NO: 804818 - DNA, 15 bp, Homo sapiens
tttaggactaactct

SEQ ID NO: 804819 - DNA, 15 bp, Homo sapiens
ttaggactaactctt

SEQ ID NO: 804820 - DNA, 15 bp, Homo sapiens
taggactaactcttc

SEQ ID NO: 804821 - DNA, 15 bp, Homo sapiens
aggactaactcttcc

SEQ ID NO: 804822 - DNA, 15 bp, Homo sapiens
ggactaactcttcct

SEQ ID NO: 804823 - DNA, 15 bp, Homo sapiens
gactaactcttccta

SEQ ID NO: 804824 - DNA, 15 bp, Homo sapiens
actaactcttcctag

SEQ ID NO: 804825 - DNA, 15 bp, Homo sapiens
ctaactcttcctaga

SEQ ID NO: 804826 - DNA, 15 bp, Homo sapiens
taactcttcctagaa

SEQ ID NO: 804827 - DNA, 15 bp, Homo sapiens
aactcttcctagaat

SEQ ID NO: 804828 - DNA, 15 bp, Homo sapiens
actcttcctagaatg

SEQ ID NO: 804829 - DNA, 15 bp, Homo sapiens
ctcttcctagaatgt

SEQ ID NO: 804830 - DNA, 15 bp, Homo sapiens
tcttcctagaatgtt

SEQ ID NO: 804831 - DNA, 15 bp, Homo sapiens
cttcctagaatgttt

SEQ ID NO: 804832 - DNA, 15 bp, Homo sapiens
ttcctagaatgttta

SEQ ID NO: 804833 - DNA, 15 bp, Homo sapiens
tcctagaatgtttag

SEQ ID NO: 804834 - DNA, 15 bp, Homo sapiens
cctagaatgtttagt

SEQ ID NO: 804835 - DNA, 15 bp, Homo sapiens
ctagaatgtttagtt

SEQ ID NO: 804836 - DNA, 15 bp, Homo sapiens
tagaatgtttagtta

SEQ ID NO: 804837 - DNA, 15 bp, Homo sapiens
agaatgtttagttac

SEQ ID NO: 804838 - DNA, 15 bp, Homo sapiens
gaatgtttagttaca

SEQ ID NO: 804839 - DNA, 15 bp, Homo sapiens
aatgtttagttacaa

SEQ ID NO: 804840 - DNA, 15 bp, Homo sapiens
atgtttagttacaaa

SEQ ID NO: 804841 - DNA, 15 bp, Homo sapiens
tgtttagttacaaag

SEQ ID NO: 804842 - DNA, 15 bp, Homo sapiens
gtttagttacaaaga

SEQ ID NO: 804843 - DNA, 15 bp, Homo sapiens
tttagttacaaagat

SEQ ID NO: 804844 - DNA, 15 bp, Homo sapiens
ttagttacaaagata

SEQ ID NO: 804845 - DNA, 15 bp, Homo sapiens
tagttacaaagataa

SEQ ID NO: 804846 - DNA, 15 bp, Homo sapiens
agttacaaagataag

SEQ ID NO: 804847 - DNA, 15 bp, Homo sapiens
gttacaaagataagc

SEQ ID NO: 804848 - DNA, 15 bp, Homo sapiens
ttacaaagataagct

SEQ ID NO: 804849 - DNA, 15 bp, Homo sapiens
tacaaagataagctt

SEQ ID NO: 804850 - DNA, 15 bp, Homo sapiens
acaaagataagcttg

SEQ ID NO: 804851 - DNA, 15 bp, Homo sapiens
caaagataagcttgc

SEQ ID NO: 804852 - DNA, 15 bp, Homo sapiens
aaagataagcttgca

SEQ ID NO: 804853 - DNA, 15 bp, Homo sapiens
aagataagcttgcac

SEQ ID NO: 804854 - DNA, 15 bp, Homo sapiens
agataagcttgcaca

SEQ ID NO: 804855 - DNA, 15 bp, Homo sapiens
gataagcttgcacat

SEQ ID NO: 804856 - DNA, 15 bp, Homo sapiens
ataagcttgcacata

SEQ ID NO: 804857 - DNA, 15 bp, Homo sapiens
taagcttgcacatat

SEQ ID NO: 804858 - DNA, 15 bp, Homo sapiens
aagcttgcacatata

SEQ ID NO: 804859 - DNA, 15 bp, Homo sapiens
agcttgcacatataa

SEQ ID NO: 804860 - DNA, 15 bp, Homo sapiens
gcttgcacatataaa

SEQ ID NO: 804861 - DNA, 15 bp, Homo sapiens
cttgcacatataaat

SEQ ID NO: 804862 - DNA, 15 bp, Homo sapiens
ttgcacatataaata

SEQ ID NO: 804863 - DNA, 15 bp, Homo sapiens
tgcacatataaatac

SEQ ID NO: 804864 - DNA, 15 bp, Homo sapiens
gcacatataaatacg

SEQ ID NO: 804865 - DNA, 15 bp, Homo sapiens
cacatataaatacgt

SEQ ID NO: 804866 - DNA, 15 bp, Homo sapiens
acatataaatacgtt

SEQ ID NO: 804867 - DNA, 15 bp, Homo sapiens
catataaatacgtta

SEQ ID NO: 804868 - DNA, 15 bp, Homo sapiens
atataaatacgttat

SEQ ID NO: 804869 - DNA, 15 bp, Homo sapiens
tataaatacgttatc

SEQ ID NO: 804870 - DNA, 15 bp, Homo sapiens
ataaatacgttatca

SEQ ID NO: 804871 - DNA, 15 bp, Homo sapiens
taaatacgttatcat

SEQ ID NO: 804872 - DNA, 15 bp, Homo sapiens
aaatacgttatcatt

SEQ ID NO: 804873 - DNA, 15 bp, Homo sapiens
aatacgttatcattc

SEQ ID NO: 804874 - DNA, 15 bp, Homo sapiens
atacgttatcattcc

SEQ ID NO: 804875 - DNA, 15 bp, Homo sapiens
tacgttatcattcca

SEQ ID NO: 804876 - DNA, 15 bp, Homo sapiens
acgttatcattccaa

SEQ ID NO: 804877 - DNA, 15 bp, Homo sapiens
cgttatcattccaaa

SEQ ID NO: 804878 - DNA, 15 bp, Homo sapiens
gttatcattccaaac

SEQ ID NO: 804879 - DNA, 15 bp, Homo sapiens
ttatcattccaaacc

SEQ ID NO: 804880 - DNA, 15 bp, Homo sapiens
tatcattccaaaccc

SEQ ID NO: 804881 - DNA, 15 bp, Homo sapiens
atcattccaaaccca

SEQ ID NO: 804882 - DNA, 15 bp, Homo sapiens
tcattccaaacccac

SEQ ID NO: 804883 - DNA, 15 bp, Homo sapiens
cattccaaacccacc

SEQ ID NO: 804884 - DNA, 15 bp, Homo sapiens
attccaaacccacct

SEQ ID NO: 804885 - DNA, 15 bp, Homo sapiens
ttccaaacccacctc

SEQ ID NO: 804886 - DNA, 15 bp, Homo sapiens
tccaaacccacctcc

SEQ ID NO: 804887 - DNA, 15 bp, Homo sapiens
ccaaacccacctcct

SEQ ID NO: 804888 - DNA, 15 bp, Homo sapiens
caaacccacctcctc

SEQ ID NO: 804889 - DNA, 15 bp, Homo sapiens
aaacccacctcctca

SEQ ID NO: 804890 - DNA, 15 bp, Homo sapiens
aacccacctcctcac

SEQ ID NO: 804891 - DNA, 15 bp, Homo sapiens
acccacctcctcaca

SEQ ID NO: 804892 - DNA, 15 bp, Homo sapiens
cccacctcctcacag

SEQ ID NO: 804893 - DNA, 15 bp, Homo sapiens
ccacctcctcacaga

SEQ ID NO: 804894 - DNA, 15 bp, Homo sapiens
cacctcctcacagaa

SEQ ID NO: 804895 - DNA, 15 bp, Homo sapiens
acctcctcacagaat

SEQ ID NO: 804896 - DNA, 15 bp, Homo sapiens
cctcctcacagaatg

SEQ ID NO: 804897 - DNA, 15 bp, Homo sapiens
ctcctcacagaatgt

SEQ ID NO: 804898 - DNA, 15 bp, Homo sapiens
tcctcacagaatgtg

SEQ ID NO: 804899 - DNA, 15 bp, Homo sapiens
cctcacagaatgtgg

SEQ ID NO: 804900 - DNA, 15 bp, Homo sapiens
ctcacagaatgtggg

SEQ ID NO: 804901 - DNA, 15 bp, Homo sapiens
tcacagaatgtggga

SEQ ID NO: 804902 - DNA, 15 bp, Homo sapiens
cacagaatgtgggaa

SEQ ID NO: 804903 - DNA, 15 bp, Homo sapiens
acagaatgtgggaag

SEQ ID NO: 804904 - DNA, 15 bp, Homo sapiens
cagaatgtgggaagg

SEQ ID NO: 804905 - DNA, 15 bp, Homo sapiens
agaatgtgggaaggt

SEQ ID NO: 804906 - DNA, 15 bp, Homo sapiens
gaatgtgggaaggtc

SEQ ID NO: 804907 - DNA, 15 bp, Homo sapiens
aatgtgggaaggtca

SEQ ID NO: 804908 - DNA, 15 bp, Homo sapiens
atgtgggaaggtcag

SEQ ID NO: 804909 - DNA, 15 bp, Homo sapiens
tgtgggaaggtcagg

SEQ ID NO: 804910 - DNA, 15 bp, Homo sapiens
gtgggaaggtcagga

SEQ ID NO: 804911 - DNA, 15 bp, Homo sapiens
tgggaaggtcaggat

SEQ ID NO: 804912 - DNA, 15 bp, Homo sapiens
gggaaggtcaggatt

SEQ ID NO: 804913 - DNA, 15 bp, Homo sapiens
ggaaggtcaggattc

SEQ ID NO: 804914 - DNA, 15 bp, Homo sapiens
gaaggtcaggattct

SEQ ID NO: 804915 - DNA, 15 bp, Homo sapiens
aaggtcaggattctg

SEQ ID NO: 804916 - DNA, 15 bp, Homo sapiens
aggtcaggattctga

SEQ ID NO: 804917 - DNA, 15 bp, Homo sapiens
ggtcaggattctgac

SEQ ID NO: 804918 - DNA, 15 bp, Homo sapiens
gtcaggattctgacc

SEQ ID NO: 804919 - DNA, 15 bp, Homo sapiens
tcaggattctgaccc

SEQ ID NO: 804920 - DNA, 15 bp, Homo sapiens
caggattctgacccc

SEQ ID NO: 804921 - DNA, 15 bp, Homo sapiens
aggattctgacccct

SEQ ID NO: 804922 - DNA, 15 bp, Homo sapiens
ggattctgacccctc

SEQ ID NO: 804923 - DNA, 15 bp, Homo sapiens
gattctgacccctct

SEQ ID NO: 804924 - DNA, 15 bp, Homo sapiens
attctgacccctctg

SEQ ID NO: 804925 - DNA, 15 bp, Homo sapiens
ttctgacccctctgt

SEQ ID NO: 804926 - DNA, 15 bp, Homo sapiens
tctgacccctctgtc

SEQ ID NO: 804927 - DNA, 15 bp, Homo sapiens
ctgacccctctgtct

SEQ ID NO: 804928 - DNA, 15 bp, Homo sapiens
tgacccctctgtctt

SEQ ID NO: 804929 - DNA, 15 bp, Homo sapiens
gacccctctgtcttt

SEQ ID NO: 804930 - DNA, 15 bp, Homo sapiens
acccctctgtctttc

SEQ ID NO: 804931 - DNA, 15 bp, Homo sapiens
cccctctgtctttcc

SEQ ID NO: 804932 - DNA, 15 bp, Homo sapiens
ccctctgtctttcct

SEQ ID NO: 804933 - DNA, 15 bp, Homo sapiens
cctctgtctttcctt

SEQ ID NO: 804934 - DNA, 15 bp, Homo sapiens
ctctgtctttccttc

SEQ ID NO: 804935 - DNA, 15 bp, Homo sapiens
tctgtctttccttct

SEQ ID NO: 804936 - DNA, 15 bp, Homo sapiens
ctgtctttccttctc

SEQ ID NO: 804937 - DNA, 15 bp, Homo sapiens
tgtctttccttctct

SEQ ID NO: 804938 - DNA, 15 bp, Homo sapiens
gtctttccttctctt

SEQ ID NO: 804939 - DNA, 15 bp, Homo sapiens
tctttccttctcttg

SEQ ID NO: 804940 - DNA, 15 bp, Homo sapiens
ctttccttctcttgt

SEQ ID NO: 804941 - DNA, 15 bp, Homo sapiens
tttccttctcttgtc

SEQ ID NO: 804942 - DNA, 15 bp, Homo sapiens
ttccttctcttgtct

SEQ ID NO: 804943 - DNA, 15 bp, Homo sapiens
tccttctcttgtctc

SEQ ID NO: 804944 - DNA, 15 bp, Homo sapiens
ccttctcttgtctct

SEQ ID NO: 804945 - DNA, 15 bp, Homo sapiens
cttctcttgtctctc

SEQ ID NO: 804946 - DNA, 15 bp, Homo sapiens
ttctcttgtctctct

SEQ ID NO: 804947 - DNA, 15 bp, Homo sapiens
tctcttgtctctctc

SEQ ID NO: 804948 - DNA, 15 bp, Homo sapiens
ctcttgtctctctcc

SEQ ID NO: 804949 - DNA, 15 bp, Homo sapiens
tcttgtctctctcct

SEQ ID NO: 804950 - DNA, 15 bp, Homo sapiens
cttgtctctctcctt

SEQ ID NO: 804951 - DNA, 15 bp, Homo sapiens
ttgtctctctccttc

SEQ ID NO: 804952 - DNA, 15 bp, Homo sapiens
tgtctctctccttct

SEQ ID NO: 804953 - DNA, 15 bp, Homo sapiens
gtctctctccttctc

SEQ ID NO: 804954 - DNA, 15 bp, Homo sapiens
tctctctccttctcc

SEQ ID NO: 804955 - DNA, 15 bp, Homo sapiens
ctctctccttctccg

SEQ ID NO: 804956 - DNA, 15 bp, Homo sapiens
tctctccttctccga

SEQ ID NO: 804957 - DNA, 15 bp, Homo sapiens
ctctccttctccgag

SEQ ID NO: 804958 - DNA, 15 bp, Homo sapiens
tctccttctccgaga

SEQ ID NO: 804959 - DNA, 15 bp, Homo sapiens
ctccttctccgagac

SEQ ID NO: 804960 - DNA, 15 bp, Homo sapiens
tccttctccgagact

SEQ ID NO: 804961 - DNA, 15 bp, Homo sapiens
ccttctccgagactg

SEQ ID NO: 804962 - DNA, 15 bp, Homo sapiens
cttctccgagactga

SEQ ID NO: 804963 - DNA, 15 bp, Homo sapiens
ttctccgagactgag

SEQ ID NO: 804964 - DNA, 15 bp, Homo sapiens
tctccgagactgagc

SEQ ID NO: 804965 - DNA, 15 bp, Homo sapiens
ctccgagactgagcc

SEQ ID NO: 804966 - DNA, 15 bp, Homo sapiens
tccgagactgagcct

SEQ ID NO: 804967 - DNA, 15 bp, Homo sapiens
ccgagactgagcctc

SEQ ID NO: 804968 - DNA, 15 bp, Homo sapiens
cgagactgagcctct

SEQ ID NO: 804969 - DNA, 15 bp, Homo sapiens
gagactgagcctctt

SEQ ID NO: 804970 - DNA, 15 bp, Homo sapiens
agactgagcctcttg

SEQ ID NO: 804971 - DNA, 15 bp, Homo sapiens
gactgagcctcttga

SEQ ID NO: 804972 - DNA, 15 bp, Homo sapiens
actgagcctcttgat

SEQ ID NO: 804973 - DNA, 15 bp, Homo sapiens
ctgagcctcttgatt

SEQ ID NO: 804974 - DNA, 15 bp, Homo sapiens
tgagcctcttgattt

SEQ ID NO: 804975 - DNA, 15 bp, Homo sapiens
gagcctcttgatttc

SEQ ID NO: 804976 - DNA, 15 bp, Homo sapiens
agcctcttgatttct

SEQ ID NO: 804977 - DNA, 15 bp, Homo sapiens
gcctcttgatttctg

SEQ ID NO: 804978 - DNA, 15 bp, Homo sapiens
cctcttgatttctga

SEQ ID NO: 804979 - DNA, 15 bp, Homo sapiens
ctcttgatttctgac

SEQ ID NO: 804980 - DNA, 15 bp, Homo sapiens
tcttgatttctgact

SEQ ID NO: 804981 - DNA, 15 bp, Homo sapiens
cttgatttctgactc

SEQ ID NO: 804982 - DNA, 15 bp, Homo sapiens
ttgatttctgactct

SEQ ID NO: 804983 - DNA, 15 bp, Homo sapiens
tgatttctgactctc

SEQ ID NO: 804984 - DNA, 15 bp, Homo sapiens
gatttctgactctca

SEQ ID NO: 804985 - DNA, 15 bp, Homo sapiens
atttctgactctcat

SEQ ID NO: 804986 - DNA, 15 bp, Homo sapiens
tttctgactctcatg

SEQ ID NO: 804987 - DNA, 15 bp, Homo sapiens
ttctgactctcatgt

SEQ ID NO: 804988 - DNA, 15 bp, Homo sapiens
tctgactctcatgtt

SEQ ID NO: 804989 - DNA, 15 bp, Homo sapiens
ctgactctcatgttc

SEQ ID NO: 804990 - DNA, 15 bp, Homo sapiens
tgactctcatgttca

SEQ ID NO: 804991 - DNA, 15 bp, Homo sapiens
gactctcatgttcac

SEQ ID NO: 804992 - DNA, 15 bp, Homo sapiens
actctcatgttcact

SEQ ID NO: 804993 - DNA, 15 bp, Homo sapiens
ctctcatgttcactt

SEQ ID NO: 804994 - DNA, 15 bp, Homo sapiens
tctcatgttcactta

SEQ ID NO: 804995 - DNA, 15 bp, Homo sapiens
ctcatgttcacttat

SEQ ID NO: 804996 - DNA, 15 bp, Homo sapiens
tcatgttcacttata

SEQ ID NO: 804997 - DNA, 15 bp, Homo sapiens
catgttcacttatag

SEQ ID NO: 804998 - DNA, 15 bp, Homo sapiens
atgttcacttatagt

SEQ ID NO: 804999 - DNA, 15 bp, Homo sapiens
tgttcacttatagtc

SEQ ID NO: 805000 - DNA, 15 bp, Homo sapiens
gttcacttatagtcc

SEQ ID NO: 805001 - DNA, 15 bp, Homo sapiens
ttcacttatagtcct

SEQ ID NO: 805002 - DNA, 15 bp, Homo sapiens
tcacttatagtcctc

SEQ ID NO: 805003 - DNA, 15 bp, Homo sapiens
cacttatagtcctcg

SEQ ID NO: 805004 - DNA, 15 bp, Homo sapiens
acttatagtcctcga

SEQ ID NO: 805005 - DNA, 15 bp, Homo sapiens
cttatagtcctcgac

SEQ ID NO: 805006 - DNA, 15 bp, Homo sapiens
ttatagtcctcgacc

SEQ ID NO: 805007 - DNA, 15 bp, Homo sapiens
tatagtcctcgacct

SEQ ID NO: 805008 - DNA, 15 bp, Homo sapiens
atagtcctcgacctc

SEQ ID NO: 805009 - DNA, 15 bp, Homo sapiens
tagtcctcgacctct

SEQ ID NO: 805010 - DNA, 15 bp, Homo sapiens
agtcctcgacctctt

SEQ ID NO: 805011 - DNA, 15 bp, Homo sapiens
gtcctcgacctcttt

SEQ ID NO: 805012 - DNA, 15 bp, Homo sapiens
tcctcgacctctttg

SEQ ID NO: 805013 - DNA, 15 bp, Homo sapiens
cctcgacctctttga

SEQ ID NO: 805014 - DNA, 15 bp, Homo sapiens
ctcgacctctttgaa

SEQ ID NO: 805015 - DNA, 15 bp, Homo sapiens
tcgacctctttgaag

SEQ ID NO: 805016 - DNA, 15 bp, Homo sapiens
cgacctctttgaagc

SEQ ID NO: 805017 - DNA, 15 bp, Homo sapiens
gacctctttgaagcc

SEQ ID NO: 805018 - DNA, 15 bp, Homo sapiens
acctctttgaagcct

SEQ ID NO: 805019 - DNA, 15 bp, Homo sapiens
cctctttgaagcctg

SEQ ID NO: 805020 - DNA, 15 bp, Homo sapiens
ctctttgaagcctga

SEQ ID NO: 805021 - DNA, 15 bp, Homo sapiens
tctttgaagcctgat

SEQ ID NO: 805022 - DNA, 15 bp, Homo sapiens
ctttgaagcctgata

SEQ ID NO: 805023 - DNA, 15 bp, Homo sapiens
tttgaagcctgatat

SEQ ID NO: 805024 - DNA, 15 bp, Homo sapiens
ttgaagcctgatatt

SEQ ID NO: 805025 - DNA, 15 bp, Homo sapiens
tgaagcctgatattg

SEQ ID NO: 805026 - DNA, 15 bp, Homo sapiens
gaagcctgatattga

SEQ ID NO: 805027 - DNA, 15 bp, Homo sapiens
aagcctgatattgat

SEQ ID NO: 805028 - DNA, 15 bp, Homo sapiens
agcctgatattgatt

SEQ ID NO: 805029 - DNA, 15 bp, Homo sapiens
gcctgatattgatta

SEQ ID NO: 805030 - DNA, 15 bp, Homo sapiens
cctgatattgattac

SEQ ID NO: 805031 - DNA, 15 bp, Homo sapiens
ctgatattgattacc

SEQ ID NO: 805032 - DNA, 15 bp, Homo sapiens
tgatattgattaccg

SEQ ID NO: 805033 - DNA, 15 bp, Homo sapiens
gatattgattaccgt

SEQ ID NO: 805034 - DNA, 15 bp, Homo sapiens
atattgattaccgtg

SEQ ID NO: 805035 - DNA, 15 bp, Homo sapiens
tattgattaccgtga

SEQ ID NO: 805036 - DNA, 15 bp, Homo sapiens
attgattaccgtgaa

SEQ ID NO: 805037 - DNA, 15 bp, Homo sapiens
ttgattaccgtgaaa

SEQ ID NO: 805038 - DNA, 15 bp, Homo sapiens
tgattaccgtgaaat

SEQ ID NO: 805039 - DNA, 15 bp, Homo sapiens
gattaccgtgaaatg

SEQ ID NO: 805040 - DNA, 15 bp, Homo sapiens
attaccgtgaaatgt

SEQ ID NO: 805041 - DNA, 15 bp, Homo sapiens
ttaccgtgaaatgtc

SEQ ID NO: 805042 - DNA, 15 bp, Homo sapiens
taccgtgaaatgtca

SEQ ID NO: 805043 - DNA, 15 bp, Homo sapiens
accgtgaaatgtcaa

SEQ ID NO: 805044 - DNA, 15 bp, Homo sapiens
ccgtgaaatgtcaat

SEQ ID NO: 805045 - DNA, 15 bp, Homo sapiens
cgtgaaatgtcaatt

SEQ ID NO: 805046 - DNA, 15 bp, Homo sapiens
gtgaaatgtcaattg

SEQ ID NO: 805047 - DNA, 15 bp, Homo sapiens
tgaaatgtcaattgt

SEQ ID NO: 805048 - DNA, 15 bp, Homo sapiens
gaaatgtcaattgtc

SEQ ID NO: 805049 - DNA, 15 bp, Homo sapiens
aaatgtcaattgtct

SEQ ID NO: 805050 - DNA, 15 bp, Homo sapiens
aatgtcaattgtctg

SEQ ID NO: 805051 - DNA, 15 bp, Homo sapiens
atgtcaattgtctga

SEQ ID NO: 805052 - DNA, 15 bp, Homo sapiens
tgtcaattgtctgat

SEQ ID NO: 805053 - DNA, 15 bp, Homo sapiens
gtcaattgtctgatt

SEQ ID NO: 805054 - DNA, 15 bp, Homo sapiens
tcaattgtctgattg

SEQ ID NO: 805055 - DNA, 15 bp, Homo sapiens
caattgtctgattgc

SEQ ID NO: 805056 - DNA, 15 bp, Homo sapiens
aattgtctgattgca

SEQ ID NO: 805057 - DNA, 15 bp, Homo sapiens
attgtctgattgcag

SEQ ID NO: 805058 - DNA, 15 bp, Homo sapiens
ttgtctgattgcagt

SEQ ID NO: 805059 - DNA, 15 bp, Homo sapiens
tgtctgattgcagta

SEQ ID NO: 805060 - DNA, 15 bp, Homo sapiens
gtctgattgcagtag

SEQ ID NO: 805061 - DNA, 15 bp, Homo sapiens
tctgattgcagtagg

SEQ ID NO: 805062 - DNA, 15 bp, Homo sapiens
ctgattgcagtaggg

SEQ ID NO: 805063 - DNA, 15 bp, Homo sapiens
tgattgcagtagggc

SEQ ID NO: 805064 - DNA, 15 bp, Homo sapiens
gattgcagtagggca

SEQ ID NO: 805065 - DNA, 15 bp, Homo sapiens
attgcagtagggcac

SEQ ID NO: 805066 - DNA, 15 bp, Homo sapiens
ttgcagtagggcacc

SEQ ID NO: 805067 - DNA, 15 bp, Homo sapiens
tgcagtagggcacct

SEQ ID NO: 805068 - DNA, 15 bp, Homo sapiens
gcagtagggcacctg

SEQ ID NO: 805069 - DNA, 15 bp, Homo sapiens
cagtagggcacctgg

SEQ ID NO: 805070 - DNA, 15 bp, Homo sapiens
agtagggcacctgga

SEQ ID NO: 805071 - DNA, 15 bp, Homo sapiens
gtagggcacctggaa

SEQ ID NO: 805072 - DNA, 15 bp, Homo sapiens
tagggcacctggaag

SEQ ID NO: 805073 - DNA, 15 bp, Homo sapiens
agggcacctggaagt

SEQ ID NO: 805074 - DNA, 15 bp, Homo sapiens
gggcacctggaagtt

SEQ ID NO: 805075 - DNA, 15 bp, Homo sapiens
ggcacctggaagtta

SEQ ID NO: 805076 - DNA, 15 bp, Homo sapiens
gcacctggaagttat

SEQ ID NO: 805077 - DNA, 15 bp, Homo sapiens
cacctggaagttatt

SEQ ID NO: 805078 - DNA, 15 bp, Homo sapiens
acctggaagttattc

SEQ ID NO: 805079 - DNA, 15 bp, Homo sapiens
cctggaagttattca

SEQ ID NO: 805080 - DNA, 15 bp, Homo sapiens
ctggaagttattcag

SEQ ID NO: 805081 - DNA, 15 bp, Homo sapiens
tggaagttattcaga

SEQ ID NO: 805082 - DNA, 15 bp, Homo sapiens
ggaagttattcagat

SEQ ID NO: 805083 - DNA, 15 bp, Homo sapiens
gaagttattcagata

SEQ ID NO: 805084 - DNA, 15 bp, Homo sapiens
aagttattcagataa

SEQ ID NO: 805085 - DNA, 15 bp, Homo sapiens
agttattcagataag

SEQ ID NO: 805086 - DNA, 15 bp, Homo sapiens
gttattcagataagc

SEQ ID NO: 805087 - DNA, 15 bp, Homo sapiens
ttattcagataagca

SEQ ID NO: 805088 - DNA, 15 bp, Homo sapiens
tattcagataagcag

SEQ ID NO: 805089 - DNA, 15 bp, Homo sapiens
attcagataagcaga

SEQ ID NO: 805090 - DNA, 15 bp, Homo sapiens
ttcagataagcagag

SEQ ID NO: 805091 - DNA, 15 bp, Homo sapiens
tcagataagcagagg

SEQ ID NO: 805092 - DNA, 15 bp, Homo sapiens
cagataagcagaggc

SEQ ID NO: 805093 - DNA, 15 bp, Homo sapiens
agataagcagaggcg

SEQ ID NO: 805094 - DNA, 15 bp, Homo sapiens
gataagcagaggcgt

SEQ ID NO: 805095 - DNA, 15 bp, Homo sapiens
ataagcagaggcgtt

SEQ ID NO: 805096 - DNA, 15 bp, Homo sapiens
taagcagaggcgttt

SEQ ID NO: 805097 - DNA, 15 bp, Homo sapiens
aagcagaggcgtttt

SEQ ID NO: 805098 - DNA, 15 bp, Homo sapiens
agcagaggcgttttg

SEQ ID NO: 805099 - DNA, 15 bp, Homo sapiens
gcagaggcgttttga

SEQ ID NO: 805100 - DNA, 15 bp, Homo sapiens
cagaggcgttttgaa

SEQ ID NO: 805101 - DNA, 15 bp, Homo sapiens
agaggcgttttgaat

SEQ ID NO: 805102 - DNA, 15 bp, Homo sapiens
gaggcgttttgaatg

SEQ ID NO: 805103 - DNA, 15 bp, Homo sapiens
aggcgttttgaatgt

SEQ ID NO: 805104 - DNA, 15 bp, Homo sapiens
ggcgttttgaatgtt

SEQ ID NO: 805105 - DNA, 15 bp, Homo sapiens
gcgttttgaatgtta

SEQ ID NO: 805106 - DNA, 15 bp, Homo sapiens
cgttttgaatgttaa

SEQ ID NO: 805107 - DNA, 15 bp, Homo sapiens
gttttgaatgttaat

SEQ ID NO: 805108 - DNA, 15 bp, Homo sapiens
tttgaatgttaatga

SEQ ID NO: 805109 - DNA, 15 bp, Homo sapiens
ttgaatgttaatgaa

SEQ ID NO: 805110 - DNA, 15 bp, Homo sapiens
tgaatgttaatgaag

SEQ ID NO: 805111 - DNA, 15 bp, Homo sapiens
gaatgttaatgaagc

SEQ ID NO: 805112 - DNA, 15 bp, Homo sapiens
aatgttaatgaagcc

SEQ ID NO: 805113 - DNA, 15 bp, Homo sapiens
atgttaatgaagcct

SEQ ID NO: 805114 - DNA, 15 bp, Homo sapiens
tgttaatgaagcctg

SEQ ID NO: 805115 - DNA, 15 bp, Homo sapiens
gttaatgaagcctgt

SEQ ID NO: 805116 - DNA, 15 bp, Homo sapiens
ttaatgaagcctgtt

SEQ ID NO: 805117 - DNA, 15 bp, Homo sapiens
taatgaagcctgttg

SEQ ID NO: 805118 - DNA, 15 bp, Homo sapiens
aatgaagcctgttgg

SEQ ID NO: 805119 - DNA, 15 bp, Homo sapiens
atgaagcctgttggg

SEQ ID NO: 805120 - DNA, 15 bp, Homo sapiens
tgaagcctgttggga

SEQ ID NO: 805121 - DNA, 15 bp, Homo sapiens
gaagcctgttgggag

SEQ ID NO: 805122 - DNA, 15 bp, Homo sapiens
aagcctgttgggagc

SEQ ID NO: 805123 - DNA, 15 bp, Homo sapiens
agcctgttgggagcc

SEQ ID NO: 805124 - DNA, 15 bp, Homo sapiens
gcctgttgggagccg

SEQ ID NO: 805125 - DNA, 15 bp, Homo sapiens
cctgttgggagccgt

SEQ ID NO: 805126 - DNA, 15 bp, Homo sapiens
ctgttgggagccgtg

SEQ ID NO: 805127 - DNA, 15 bp, Homo sapiens
tgttgggagccgtga

SEQ ID NO: 805128 - DNA, 15 bp, Homo sapiens
gttgggagccgtgac

SEQ ID NO: 805129 - DNA, 15 bp, Homo sapiens
ttgggagccgtgacc

SEQ ID NO: 805130 - DNA, 15 bp, Homo sapiens
tgggagccgtgacct

SEQ ID NO: 805131 - DNA, 15 bp, Homo sapiens
gggagccgtgacctt

SEQ ID NO: 805132 - DNA, 15 bp, Homo sapiens
ggagccgtgaccttc

SEQ ID NO: 805133 - DNA, 15 bp, Homo sapiens
gagccgtgaccttct

SEQ ID NO: 805134 - DNA, 15 bp, Homo sapiens
agccgtgaccttcta

SEQ ID NO: 805135 - DNA, 15 bp, Homo sapiens
gccgtgaccttctaa

SEQ ID NO: 805136 - DNA, 15 bp, Homo sapiens
ccgtgaccttctaag

SEQ ID NO: 805137 - DNA, 15 bp, Homo sapiens
cgtgaccttctaagt

SEQ ID NO: 805138 - DNA, 15 bp, Homo sapiens
gtgaccttctaagtg

SEQ ID NO: 805139 - DNA, 15 bp, Homo sapiens
tgaccttctaagtga

SEQ ID NO: 805140 - DNA, 15 bp, Homo sapiens
gaccttctaagtgat

SEQ ID NO: 805141 - DNA, 15 bp, Homo sapiens
accttctaagtgatg

SEQ ID NO: 805142 - DNA, 15 bp, Homo sapiens
ccttctaagtgatgg

SEQ ID NO: 805143 - DNA, 15 bp, Homo sapiens
cttctaagtgatggt

SEQ ID NO: 805144 - DNA, 15 bp, Homo sapiens
ttctaagtgatggtg

SEQ ID NO: 805145 - DNA, 15 bp, Homo sapiens
tctaagtgatggtgt

SEQ ID NO: 805146 - DNA, 15 bp, Homo sapiens
ctaagtgatggtgtt

SEQ ID NO: 805147 - DNA, 15 bp, Homo sapiens
taagtgatggtgttt

SEQ ID NO: 805148 - DNA, 15 bp, Homo sapiens
aagtgatggtgtttc

SEQ ID NO: 805149 - DNA, 15 bp, Homo sapiens
agtgatggtgtttca

SEQ ID NO: 805150 - DNA, 15 bp, Homo sapiens
gtgatggtgtttcag

SEQ ID NO: 805151 - DNA, 15 bp, Homo sapiens
tgatggtgtttcagg

SEQ ID NO: 805152 - DNA, 15 bp, Homo sapiens
gatggtgtttcagga

SEQ ID NO: 805153 - DNA, 15 bp, Homo sapiens
atggtgtttcaggaa

SEQ ID NO: 805154 - DNA, 15 bp, Homo sapiens
tggtgtttcaggaaa

SEQ ID NO: 805155 - DNA, 15 bp, Homo sapiens
ggtgtttcaggaaaa

SEQ ID NO: 805156 - DNA, 15 bp, Homo sapiens
gtgtttcaggaaaag

SEQ ID NO: 805157 - DNA, 15 bp, Homo sapiens
tgtttcaggaaaagg

SEQ ID NO: 805158 - DNA, 15 bp, Homo sapiens
gtttcaggaaaagga

SEQ ID NO: 805159 - DNA, 15 bp, Homo sapiens
tttcaggaaaaggaa

SEQ ID NO: 805160 - DNA, 15 bp, Homo sapiens
ttcaggaaaaggaag

SEQ ID NO: 805161 - DNA, 15 bp, Homo sapiens
tcaggaaaaggaaga

SEQ ID NO: 805162 - DNA, 15 bp, Homo sapiens
caggaaaaggaagat

SEQ ID NO: 805163 - DNA, 15 bp, Homo sapiens
aggaaaaggaagatc

SEQ ID NO: 805164 - DNA, 15 bp, Homo sapiens
ggaaaaggaagatca

SEQ ID NO: 805165 - DNA, 15 bp, Homo sapiens
gaaaaggaagatcag

SEQ ID NO: 805166 - DNA, 15 bp, Homo sapiens
aaaaggaagatcagg

SEQ ID NO: 805167 - DNA, 15 bp, Homo sapiens
aaaggaagatcaggc

SEQ ID NO: 805168 - DNA, 15 bp, Homo sapiens
aaggaagatcaggca

SEQ ID NO: 805169 - DNA, 15 bp, Homo sapiens
aggaagatcaggcaa

SEQ ID NO: 805170 - DNA, 15 bp, Homo sapiens
ggaagatcaggcaat

SEQ ID NO: 805171 - DNA, 15 bp, Homo sapiens
gaagatcaggcaatt

SEQ ID NO: 805172 - DNA, 15 bp, Homo sapiens
aagatcaggcaattg

SEQ ID NO: 805173 - DNA, 15 bp, Homo sapiens
agatcaggcaattga

SEQ ID NO: 805174 - DNA, 15 bp, Homo sapiens
gatcaggcaattgaa

SEQ ID NO: 805175 - DNA, 15 bp, Homo sapiens
atcaggcaattgaaa

SEQ ID NO: 805176 - DNA, 15 bp, Homo sapiens
tcaggcaattgaaat

SEQ ID NO: 805177 - DNA, 15 bp, Homo sapiens
caggcaattgaaatg

SEQ ID NO: 805178 - DNA, 15 bp, Homo sapiens
aggcaattgaaatgt

SEQ ID NO: 805179 - DNA, 15 bp, Homo sapiens
ggcaattgaaatgtc

SEQ ID NO: 805180 - DNA, 15 bp, Homo sapiens
gcaattgaaatgtcg

SEQ ID NO: 805181 - DNA, 15 bp, Homo sapiens
caattgaaatgtcgt

SEQ ID NO: 805182 - DNA, 15 bp, Homo sapiens
aattgaaatgtcgtt

SEQ ID NO: 805183 - DNA, 15 bp, Homo sapiens
attgaaatgtcgttc

SEQ ID NO: 805184 - DNA, 15 bp, Homo sapiens
ttgaaatgtcgttct

SEQ ID NO: 805185 - DNA, 15 bp, Homo sapiens
tgaaatgtcgttctc

SEQ ID NO: 805186 - DNA, 15 bp, Homo sapiens
gaaatgtcgttctct

SEQ ID NO: 805187 - DNA, 15 bp, Homo sapiens
aaatgtcgttctctt

SEQ ID NO: 805188 - DNA, 15 bp, Homo sapiens
aatgtcgttctcttt

SEQ ID NO: 805189 - DNA, 15 bp, Homo sapiens
atgtcgttctctttt

SEQ ID NO: 805190 - DNA, 15 bp, Homo sapiens
tgtcgttctcttttt

SEQ ID NO: 805191 - DNA, 15 bp, Homo sapiens
gtcgttctctttttt

SEQ ID NO: 805192 - DNA, 15 bp, Homo sapiens
tcgttctcttttttt

SEQ ID NO: 805193 - DNA, 15 bp, Homo sapiens
cgttctcttttttta

SEQ ID NO: 805194 - DNA, 15 bp, Homo sapiens
gttctctttttttac

SEQ ID NO: 805195 - DNA, 15 bp, Homo sapiens
ttctctttttttact

SEQ ID NO: 805196 - DNA, 15 bp, Homo sapiens
tctctttttttacta

SEQ ID NO: 805197 - DNA, 15 bp, Homo sapiens
ctctttttttactag

SEQ ID NO: 805198 - DNA, 15 bp, Homo sapiens
tctttttttactagt

SEQ ID NO: 805199 - DNA, 15 bp, Homo sapiens
ctttttttactagtt

SEQ ID NO: 805200 - DNA, 15 bp, Homo sapiens
tttttttactagttc

SEQ ID NO: 805201 - DNA, 15 bp, Homo sapiens
ttttttactagttca

SEQ ID NO: 805202 - DNA, 15 bp, Homo sapiens
tttttactagttcag

SEQ ID NO: 805203 - DNA, 15 bp, Homo sapiens
ttttactagttcagt

SEQ ID NO: 805204 - DNA, 15 bp, Homo sapiens
tttactagttcagtt

SEQ ID NO: 805205 - DNA, 15 bp, Homo sapiens
ttactagttcagttg

SEQ ID NO: 805206 - DNA, 15 bp, Homo sapiens
tactagttcagttgc

SEQ ID NO: 805207 - DNA, 15 bp, Homo sapiens
actagttcagttgct

SEQ ID NO: 805208 - DNA, 15 bp, Homo sapiens
ctagttcagttgctt

SEQ ID NO: 805209 - DNA, 15 bp, Homo sapiens
tagttcagttgcttt

SEQ ID NO: 805210 - DNA, 15 bp, Homo sapiens
agttcagttgctttt

SEQ ID NO: 805211 - DNA, 15 bp, Homo sapiens
gttcagttgcttttt

SEQ ID NO: 805212 - DNA, 15 bp, Homo sapiens
ttcagttgctttttc

SEQ ID NO: 805213 - DNA, 15 bp, Homo sapiens
tcagttgctttttct

SEQ ID NO: 805214 - DNA, 15 bp, Homo sapiens
cagttgctttttctc

SEQ ID NO: 805215 - DNA, 15 bp, Homo sapiens
agttgctttttctca

SEQ ID NO: 805216 - DNA, 15 bp, Homo sapiens
gttgctttttctcac

SEQ ID NO: 805217 - DNA, 15 bp, Homo sapiens
ttgctttttctcacc

SEQ ID NO: 805218 - DNA, 15 bp, Homo sapiens
tgctttttctcacca

SEQ ID NO: 805219 - DNA, 15 bp, Homo sapiens
gctttttctcaccac

SEQ ID NO: 805220 - DNA, 15 bp, Homo sapiens
ctttttctcaccacg

SEQ ID NO: 805221 - DNA, 15 bp, Homo sapiens
tttttctcaccacga

SEQ ID NO: 805222 - DNA, 15 bp, Homo sapiens
ttttctcaccacgag

SEQ ID NO: 805223 - DNA, 15 bp, Homo sapiens
tttctcaccacgaga

SEQ ID NO: 805224 - DNA, 15 bp, Homo sapiens
ttctcaccacgagac

SEQ ID NO: 805225 - DNA, 15 bp, Homo sapiens
tctcaccacgagaca

SEQ ID NO: 805226 - DNA, 15 bp, Homo sapiens
ctcaccacgagacac

SEQ ID NO: 805227 - DNA, 15 bp, Homo sapiens
tcaccacgagacact

SEQ ID NO: 805228 - DNA, 15 bp, Homo sapiens
caccacgagacactc

SEQ ID NO: 805229 - DNA, 15 bp, Homo sapiens
accacgagacactca

SEQ ID NO: 805230 - DNA, 15 bp, Homo sapiens
ccacgagacactcat

SEQ ID NO: 805231 - DNA, 15 bp, Homo sapiens
cacgagacactcatt

SEQ ID NO: 805232 - DNA, 15 bp, Homo sapiens
acgagacactcattg

SEQ ID NO: 805233 - DNA, 15 bp, Homo sapiens
cgagacactcattga

SEQ ID NO: 805234 - DNA, 15 bp, Homo sapiens
gagacactcattgaa

SEQ ID NO: 805235 - DNA, 15 bp, Homo sapiens
agacactcattgaat

SEQ ID NO: 805236 - DNA, 15 bp, Homo sapiens
gacactcattgaatc

SEQ ID NO: 805237 - DNA, 15 bp, Homo sapiens
acactcattgaatcc

SEQ ID NO: 805238 - DNA, 15 bp, Homo sapiens
cactcattgaatcct

SEQ ID NO: 805239 - DNA, 15 bp, Homo sapiens
actcattgaatccta

SEQ ID NO: 805240 - DNA, 15 bp, Homo sapiens
ctcattgaatcctag

SEQ ID NO: 805241 - DNA, 15 bp, Homo sapiens
tcattgaatcctagg

SEQ ID NO: 805242 - DNA, 15 bp, Homo sapiens
cattgaatcctaggg

SEQ ID NO: 805243 - DNA, 15 bp, Homo sapiens
attgaatcctagggc

SEQ ID NO: 805244 - DNA, 15 bp, Homo sapiens
ttgaatcctagggca

SEQ ID NO: 805245 - DNA, 15 bp, Homo sapiens
tgaatcctagggcat

SEQ ID NO: 805246 - DNA, 15 bp, Homo sapiens
gaatcctagggcatt

SEQ ID NO: 805247 - DNA, 15 bp, Homo sapiens
aatcctagggcattt

SEQ ID NO: 805248 - DNA, 15 bp, Homo sapiens
atcctagggcatttt

SEQ ID NO: 805249 - DNA, 15 bp, Homo sapiens
tcctagggcattttg

SEQ ID NO: 805250 - DNA, 15 bp, Homo sapiens
cctagggcattttga

SEQ ID NO: 805251 - DNA, 15 bp, Homo sapiens
ctagggcattttgat

SEQ ID NO: 805252 - DNA, 15 bp, Homo sapiens
tagggcattttgatt

SEQ ID NO: 805253 - DNA, 15 bp, Homo sapiens
agggcattttgatta

SEQ ID NO: 805254 - DNA, 15 bp, Homo sapiens
gggcattttgattaa

SEQ ID NO: 805255 - DNA, 15 bp, Homo sapiens
ggcattttgattaaa

SEQ ID NO: 805256 - DNA, 15 bp, Homo sapiens
gcattttgattaaag

SEQ ID NO: 805257 - DNA, 15 bp, Homo sapiens
cattttgattaaaga

SEQ ID NO: 805258 - DNA, 15 bp, Homo sapiens
attttgattaaagat

SEQ ID NO: 805259 - DNA, 15 bp, Homo sapiens
ttttgattaaagata

SEQ ID NO: 805260 - DNA, 15 bp, Homo sapiens
tttgattaaagatat

SEQ ID NO: 805261 - DNA, 15 bp, Homo sapiens
ttgattaaagatatg

SEQ ID NO: 805262 - DNA, 15 bp, Homo sapiens
tgattaaagatatga

SEQ ID NO: 805263 - DNA, 15 bp, Homo sapiens
gattaaagatatgac

SEQ ID NO: 805264 - DNA, 15 bp, Homo sapiens
attaaagatatgacc

SEQ ID NO: 805265 - DNA, 15 bp, Homo sapiens
ttaaagatatgacca

SEQ ID NO: 805266 - DNA, 15 bp, Homo sapiens
taaagatatgaccat

SEQ ID NO: 805267 - DNA, 15 bp, Homo sapiens
aaagatatgaccatg

SEQ ID NO: 805268 - DNA, 15 bp, Homo sapiens
aagatatgaccatgt

SEQ ID NO: 805269 - DNA, 15 bp, Homo sapiens
agatatgaccatgta

SEQ ID NO: 805270 - DNA, 15 bp, Homo sapiens
gatatgaccatgtat

SEQ ID NO: 805271 - DNA, 15 bp, Homo sapiens
atatgaccatgtatc

SEQ ID NO: 805272 - DNA, 15 bp, Homo sapiens
tatgaccatgtatct

SEQ ID NO: 805273 - DNA, 15 bp, Homo sapiens
atgaccatgtatctc

SEQ ID NO: 805274 - DNA, 15 bp, Homo sapiens
tgaccatgtatctct

SEQ ID NO: 805275 - DNA, 15 bp, Homo sapiens
gaccatgtatctctg

SEQ ID NO: 805276 - DNA, 15 bp, Homo sapiens
accatgtatctctgc

SEQ ID NO: 805277 - DNA, 15 bp, Homo sapiens
ccatgtatctctgcc

SEQ ID NO: 805278 - DNA, 15 bp, Homo sapiens
catgtatctctgccc

SEQ ID NO: 805279 - DNA, 15 bp, Homo sapiens
atgtatctctgccct

SEQ ID NO: 805280 - DNA, 15 bp, Homo sapiens
tgtatctctgccctc

SEQ ID NO: 805281 - DNA, 15 bp, Homo sapiens
gtatctctgccctct

SEQ ID NO: 805282 - DNA, 15 bp, Homo sapiens
tatctctgccctctg

SEQ ID NO: 805283 - DNA, 15 bp, Homo sapiens
atctctgccctctgg

SEQ ID NO: 805284 - DNA, 15 bp, Homo sapiens
tctctgccctctgga

SEQ ID NO: 805285 - DNA, 15 bp, Homo sapiens
ctctgccctctggac

SEQ ID NO: 805286 - DNA, 15 bp, Homo sapiens
tctgccctctggaca

SEQ ID NO: 805287 - DNA, 15 bp, Homo sapiens
ctgccctctggacag

SEQ ID NO: 805288 - DNA, 15 bp, Homo sapiens
tgccctctggacagt

SEQ ID NO: 805289 - DNA, 15 bp, Homo sapiens
gccctctggacagtt

SEQ ID NO: 805290 - DNA, 15 bp, Homo sapiens
ccctctggacagttt

SEQ ID NO: 805291 - DNA, 15 bp, Homo sapiens
cctctggacagtttt

SEQ ID NO: 805292 - DNA, 15 bp, Homo sapiens
ctctggacagtttta

SEQ ID NO: 805293 - DNA, 15 bp, Homo sapiens
tctggacagttttag

SEQ ID NO: 805294 - DNA, 15 bp, Homo sapiens
ctggacagttttaga

SEQ ID NO: 805295 - DNA, 15 bp, Homo sapiens
tggacagttttagac

SEQ ID NO: 805296 - DNA, 15 bp, Homo sapiens
ggacagttttagaca

SEQ ID NO: 805297 - DNA, 15 bp, Homo sapiens
gacagttttagacat

SEQ ID NO: 805298 - DNA, 15 bp, Homo sapiens
acagttttagacatc

SEQ ID NO: 805299 - DNA, 15 bp, Homo sapiens
cagttttagacatcg

SEQ ID NO: 805300 - DNA, 15 bp, Homo sapiens
agttttagacatcga

SEQ ID NO: 805301 - DNA, 15 bp, Homo sapiens
gttttagacatcgag

SEQ ID NO: 805302 - DNA, 15 bp, Homo sapiens
ttttagacatcgaga

SEQ ID NO: 805303 - DNA, 15 bp, Homo sapiens
tttagacatcgagat

SEQ ID NO: 805304 - DNA, 15 bp, Homo sapiens
ttagacatcgagata

SEQ ID NO: 805305 - DNA, 15 bp, Homo sapiens
tagacatcgagataa

SEQ ID NO: 805306 - DNA, 15 bp, Homo sapiens
agacatcgagataaa

SEQ ID NO: 805307 - DNA, 15 bp, Homo sapiens
gacatcgagataaat

SEQ ID NO: 805308 - DNA, 15 bp, Homo sapiens
acatcgagataaata

SEQ ID NO: 805309 - DNA, 15 bp, Homo sapiens
catcgagataaatag

SEQ ID NO: 805310 - DNA, 15 bp, Homo sapiens
atcgagataaatagg

SEQ ID NO: 805311 - DNA, 15 bp, Homo sapiens
tcgagataaataggc

SEQ ID NO: 805312 - DNA, 15 bp, Homo sapiens
cgagataaataggct

SEQ ID NO: 805313 - DNA, 15 bp, Homo sapiens
gagataaataggctg

SEQ ID NO: 805314 - DNA, 15 bp, Homo sapiens
agataaataggctgt

SEQ ID NO: 805315 - DNA, 15 bp, Homo sapiens
gataaataggctgtt

SEQ ID NO: 805316 - DNA, 15 bp, Homo sapiens
ataaataggctgttc

SEQ ID NO: 805317 - DNA, 15 bp, Homo sapiens
taaataggctgttcc

SEQ ID NO: 805318 - DNA, 15 bp, Homo sapiens
aaataggctgttcca

SEQ ID NO: 805319 - DNA, 15 bp, Homo sapiens
aataggctgttccag

SEQ ID NO: 805320 - DNA, 15 bp, Homo sapiens
ataggctgttccagg

SEQ ID NO: 805321 - DNA, 15 bp, Homo sapiens
taggctgttccaggt

SEQ ID NO: 805322 - DNA, 15 bp, Homo sapiens
aggctgttccaggtt

SEQ ID NO: 805323 - DNA, 15 bp, Homo sapiens
ggctgttccaggttt

SEQ ID NO: 805324 - DNA, 15 bp, Homo sapiens
gctgttccaggtttt

SEQ ID NO: 805325 - DNA, 15 bp, Homo sapiens
ctgttccaggttttc

SEQ ID NO: 805326 - DNA, 15 bp, Homo sapiens
tgttccaggttttct

SEQ ID NO: 805327 - DNA, 15 bp, Homo sapiens
gttccaggttttctt

SEQ ID NO: 805328 - DNA, 15 bp, Homo sapiens
ttccaggttttcttg

SEQ ID NO: 805329 - DNA, 15 bp, Homo sapiens
tccaggttttcttgg

SEQ ID NO: 805330 - DNA, 15 bp, Homo sapiens
ccaggttttcttggt

SEQ ID NO: 805331 - DNA, 15 bp, Homo sapiens
caggttttcttggtg

SEQ ID NO: 805332 - DNA, 15 bp, Homo sapiens
aggttttcttggtgt

SEQ ID NO: 805333 - DNA, 15 bp, Homo sapiens
ggttttcttggtgtt

SEQ ID NO: 805334 - DNA, 15 bp, Homo sapiens
gttttcttggtgttg

SEQ ID NO: 805335 - DNA, 15 bp, Homo sapiens
ttttcttggtgttgc

SEQ ID NO: 805336 - DNA, 15 bp, Homo sapiens
tttcttggtgttgct

SEQ ID NO: 805337 - DNA, 15 bp, Homo sapiens
ttcttggtgttgctc

SEQ ID NO: 805338 - DNA, 15 bp, Homo sapiens
tcttggtgttgctca

SEQ ID NO: 805339 - DNA, 15 bp, Homo sapiens
cttggtgttgctcat

SEQ ID NO: 805340 - DNA, 15 bp, Homo sapiens
ttggtgttgctcatt

SEQ ID NO: 805341 - DNA, 15 bp, Homo sapiens
tggtgttgctcattc

SEQ ID NO: 805342 - DNA, 15 bp, Homo sapiens
ggtgttgctcattca

SEQ ID NO: 805343 - DNA, 15 bp, Homo sapiens
gtgttgctcattcag

SEQ ID NO: 805344 - DNA, 15 bp, Homo sapiens
tgttgctcattcaga

SEQ ID NO: 805345 - DNA, 15 bp, Homo sapiens
gttgctcattcagac

SEQ ID NO: 805346 - DNA, 15 bp, Homo sapiens
ttgctcattcagact

SEQ ID NO: 805347 - DNA, 15 bp, Homo sapiens
tgctcattcagactt

SEQ ID NO: 805348 - DNA, 15 bp, Homo sapiens
gctcattcagactta

SEQ ID NO: 805349 - DNA, 15 bp, Homo sapiens
ctcattcagacttaa

SEQ ID NO: 805350 - DNA, 15 bp, Homo sapiens
tcattcagacttaac

SEQ ID NO: 805351 - DNA, 15 bp, Homo sapiens
cattcagacttaact

SEQ ID NO: 805352 - DNA, 15 bp, Homo sapiens
attcagacttaactt

SEQ ID NO: 805353 - DNA, 15 bp, Homo sapiens
ttcagacttaacttt

SEQ ID NO: 805354 - DNA, 15 bp, Homo sapiens
tcagacttaactttt

SEQ ID NO: 805355 - DNA, 15 bp, Homo sapiens
cagacttaacttttc

SEQ ID NO: 805356 - DNA, 15 bp, Homo sapiens
agacttaacttttca

SEQ ID NO: 805357 - DNA, 15 bp, Homo sapiens
gacttaacttttcag

SEQ ID NO: 805358 - DNA, 15 bp, Homo sapiens
acttaacttttcagc

SEQ ID NO: 805359 - DNA, 15 bp, Homo sapiens
cttaacttttcagca

SEQ ID NO: 805360 - DNA, 15 bp, Homo sapiens
ttaacttttcagcag

SEQ ID NO: 805361 - DNA, 15 bp, Homo sapiens
taacttttcagcagt

SEQ ID NO: 805362 - DNA, 15 bp, Homo sapiens
aacttttcagcagta

SEQ ID NO: 805363 - DNA, 15 bp, Homo sapiens
acttttcagcagtaa

SEQ ID NO: 805364 - DNA, 15 bp, Homo sapiens
cttttcagcagtaaa

SEQ ID NO: 805365 - DNA, 15 bp, Homo sapiens
ttttcagcagtaaat

SEQ ID NO: 805366 - DNA, 15 bp, Homo sapiens
tttcagcagtaaatt

SEQ ID NO: 805367 - DNA, 15 bp, Homo sapiens
ttcagcagtaaattt

SEQ ID NO: 805368 - DNA, 15 bp, Homo sapiens
tcagcagtaaatttc

SEQ ID NO: 805369 - DNA, 15 bp, Homo sapiens
cagcagtaaatttcc

SEQ ID NO: 805370 - DNA, 15 bp, Homo sapiens
agcagtaaatttccc

SEQ ID NO: 805371 - DNA, 15 bp, Homo sapiens
gcagtaaatttcccc

SEQ ID NO: 805372 - DNA, 15 bp, Homo sapiens
cagtaaatttccccc

SEQ ID NO: 805373 - DNA, 15 bp, Homo sapiens
agtaaatttccccct

SEQ ID NO: 805374 - DNA, 15 bp, Homo sapiens
gtaaatttcccccta

SEQ ID NO: 805375 - DNA, 15 bp, Homo sapiens
taaatttccccctaa

SEQ ID NO: 805376 - DNA, 15 bp, Homo sapiens
aaatttccccctaag

SEQ ID NO: 805377 - DNA, 15 bp, Homo sapiens
aatttccccctaagt

SEQ ID NO: 805378 - DNA, 15 bp, Homo sapiens
atttccccctaagtc

SEQ ID NO: 805379 - DNA, 15 bp, Homo sapiens
tttccccctaagtca

SEQ ID NO: 805380 - DNA, 15 bp, Homo sapiens
ttccccctaagtcaa

SEQ ID NO: 805381 - DNA, 15 bp, Homo sapiens
tccccctaagtcaag

SEQ ID NO: 805382 - DNA, 15 bp, Homo sapiens
ccccctaagtcaagt

SEQ ID NO: 805383 - DNA, 15 bp, Homo sapiens
cccctaagtcaagtg

SEQ ID NO: 805384 - DNA, 15 bp, Homo sapiens
ccctaagtcaagtga

SEQ ID NO: 805385 - DNA, 15 bp, Homo sapiens
cctaagtcaagtgaa

SEQ ID NO: 805386 - DNA, 15 bp, Homo sapiens
ctaagtcaagtgaaa

SEQ ID NO: 805387 - DNA, 15 bp, Homo sapiens
taagtcaagtgaaaa

SEQ ID NO: 805388 - DNA, 15 bp, Homo sapiens
aagtcaagtgaaaac

SEQ ID NO: 805389 - DNA, 15 bp, Homo sapiens
agtcaagtgaaaact

SEQ ID NO: 805390 - DNA, 15 bp, Homo sapiens
gtcaagtgaaaactg

SEQ ID NO: 805391 - DNA, 15 bp, Homo sapiens
tcaagtgaaaactgc

SEQ ID NO: 805392 - DNA, 15 bp, Homo sapiens
caagtgaaaactgct

SEQ ID NO: 805393 - DNA, 15 bp, Homo sapiens
aagtgaaaactgctg

SEQ ID NO: 805394 - DNA, 15 bp, Homo sapiens
agtgaaaactgctgt

SEQ ID NO: 805395 - DNA, 15 bp, Homo sapiens
gtgaaaactgctgtt

SEQ ID NO: 805396 - DNA, 15 bp, Homo sapiens
tgaaaactgctgttt

SEQ ID NO: 805397 - DNA, 15 bp, Homo sapiens
gaaaactgctgtttc

SEQ ID NO: 805398 - DNA, 15 bp, Homo sapiens
aaaactgctgtttct

SEQ ID NO: 805399 - DNA, 15 bp, Homo sapiens
aaactgctgtttctc

SEQ ID NO: 805400 - DNA, 15 bp, Homo sapiens
aactgctgtttctcc

SEQ ID NO: 805401 - DNA, 15 bp, Homo sapiens
actgctgtttctcct

SEQ ID NO: 805402 - DNA, 15 bp, Homo sapiens
ctgctgtttctcctt

SEQ ID NO: 805403 - DNA, 15 bp, Homo sapiens
tgctgtttctccttc

SEQ ID NO: 805404 - DNA, 15 bp, Homo sapiens
gctgtttctccttct

SEQ ID NO: 805405 - DNA, 15 bp, Homo sapiens
ctgtttctccttcta

SEQ ID NO: 805406 - DNA, 15 bp, Homo sapiens
tgtttctccttctat

SEQ ID NO: 805407 - DNA, 15 bp, Homo sapiens
gtttctccttctata

SEQ ID NO: 805408 - DNA, 15 bp, Homo sapiens
tttctccttctatat

SEQ ID NO: 805409 - DNA, 15 bp, Homo sapiens
ttctccttctatatt

SEQ ID NO: 805410 - DNA, 15 bp, Homo sapiens
tctccttctatattg

SEQ ID NO: 805411 - DNA, 15 bp, Homo sapiens
ctccttctatattgg

SEQ ID NO: 805412 - DNA, 15 bp, Homo sapiens
tccttctatattggt

SEQ ID NO: 805413 - DNA, 15 bp, Homo sapiens
ccttctatattggtt

SEQ ID NO: 805414 - DNA, 15 bp, Homo sapiens
cttctatattggttg

SEQ ID NO: 805415 - DNA, 15 bp, Homo sapiens
ttctatattggttgg

SEQ ID NO: 805416 - DNA, 15 bp, Homo sapiens
tctatattggttggg

SEQ ID NO: 805417 - DNA, 15 bp, Homo sapiens
ctatattggttgggt

SEQ ID NO: 805418 - DNA, 15 bp, Homo sapiens
tatattggttgggtc

SEQ ID NO: 805419 - DNA, 15 bp, Homo sapiens
atattggttgggtct

SEQ ID NO: 805420 - DNA, 15 bp, Homo sapiens
tattggttgggtctc

SEQ ID NO: 805421 - DNA, 15 bp, Homo sapiens
attggttgggtctcc

SEQ ID NO: 805422 - DNA, 15 bp, Homo sapiens
ttggttgggtctcca

SEQ ID NO: 805423 - DNA, 15 bp, Homo sapiens
tggttgggtctccaa

SEQ ID NO: 805424 - DNA, 15 bp, Homo sapiens
ggttgggtctccaac

SEQ ID NO: 805425 - DNA, 15 bp, Homo sapiens
gttgggtctccaact

SEQ ID NO: 805426 - DNA, 15 bp, Homo sapiens
ttgggtctccaacta

SEQ ID NO: 805427 - DNA, 15 bp, Homo sapiens
tgggtctccaactaa

SEQ ID NO: 805428 - DNA, 15 bp, Homo sapiens
gggtctccaactaaa

SEQ ID NO: 805429 - DNA, 15 bp, Homo sapiens
ggtctccaactaaaa

SEQ ID NO: 805430 - DNA, 15 bp, Homo sapiens
gtctccaactaaaaa

SEQ ID NO: 805431 - DNA, 15 bp, Homo sapiens
tctccaactaaaaaa

SEQ ID NO: 805432 - DNA, 15 bp, Homo sapiens
ctccaactaaaaaat

SEQ ID NO: 805433 - DNA, 15 bp, Homo sapiens
tccaactaaaaaata

SEQ ID NO: 805434 - DNA, 15 bp, Homo sapiens
ccaactaaaaaatat

SEQ ID NO: 805435 - DNA, 15 bp, Homo sapiens
caactaaaaaatatt

SEQ ID NO: 805436 - DNA, 15 bp, Homo sapiens
aactaaaaaatattg

SEQ ID NO: 805437 - DNA, 15 bp, Homo sapiens
actaaaaaatattga

SEQ ID NO: 805438 - DNA, 15 bp, Homo sapiens
ctaaaaaatattgac

SEQ ID NO: 805439 - DNA, 15 bp, Homo sapiens
taaaaaatattgact

SEQ ID NO: 805440 - DNA, 15 bp, Homo sapiens
aaaaaatattgactg

SEQ ID NO: 805441 - DNA, 15 bp, Homo sapiens
aaaaatattgactga

SEQ ID NO: 805442 - DNA, 15 bp, Homo sapiens
aaaatattgactgat

SEQ ID NO: 805443 - DNA, 15 bp, Homo sapiens
aaatattgactgatt

SEQ ID NO: 805444 - DNA, 15 bp, Homo sapiens
aatattgactgattt

SEQ ID NO: 805445 - DNA, 15 bp, Homo sapiens
atattgactgatttt

SEQ ID NO: 805446 - DNA, 15 bp, Homo sapiens
tattgactgattttc

SEQ ID NO: 805447 - DNA, 15 bp, Homo sapiens
attgactgattttca

SEQ ID NO: 805448 - DNA, 15 bp, Homo sapiens
ttgactgattttcaa

SEQ ID NO: 805449 - DNA, 15 bp, Homo sapiens
tgactgattttcaaa

SEQ ID NO: 805450 - DNA, 15 bp, Homo sapiens
gactgattttcaaac

SEQ ID NO: 805451 - DNA, 15 bp, Homo sapiens
actgattttcaaaca

SEQ ID NO: 805452 - DNA, 15 bp, Homo sapiens
ctgattttcaaacat

SEQ ID NO: 805453 - DNA, 15 bp, Homo sapiens
tgattttcaaacatg

SEQ ID NO: 805454 - DNA, 15 bp, Homo sapiens
gattttcaaacatgc

SEQ ID NO: 805455 - DNA, 15 bp, Homo sapiens
attttcaaacatgcg

SEQ ID NO: 805456 - DNA, 15 bp, Homo sapiens
ttttcaaacatgcgc

SEQ ID NO: 805457 - DNA, 15 bp, Homo sapiens
tttcaaacatgcgca

SEQ ID NO: 805458 - DNA, 15 bp, Homo sapiens
ttcaaacatgcgcag

SEQ ID NO: 805459 - DNA, 15 bp, Homo sapiens
tcaaacatgcgcaga

SEQ ID NO: 805460 - DNA, 15 bp, Homo sapiens
caaacatgcgcagaa

SEQ ID NO: 805461 - DNA, 15 bp, Homo sapiens
aaacatgcgcagaaa

SEQ ID NO: 805462 - DNA, 15 bp, Homo sapiens
aacatgcgcagaaat

SEQ ID NO: 805463 - DNA, 15 bp, Homo sapiens
acatgcgcagaaata

SEQ ID NO: 805464 - DNA, 15 bp, Homo sapiens
catgcgcagaaatac

SEQ ID NO: 805465 - DNA, 15 bp, Homo sapiens
atgcgcagaaataca

SEQ ID NO: 805466 - DNA, 15 bp, Homo sapiens
tgcgcagaaatacaa

SEQ ID NO: 805467 - DNA, 15 bp, Homo sapiens
gcgcagaaatacaac

SEQ ID NO: 805468 - DNA, 15 bp, Homo sapiens
cgcagaaatacaact

SEQ ID NO: 805469 - DNA, 15 bp, Homo sapiens
gcagaaatacaactg

SEQ ID NO: 805470 - DNA, 15 bp, Homo sapiens
cagaaatacaactga

SEQ ID NO: 805471 - DNA, 15 bp, Homo sapiens
agaaatacaactgag

SEQ ID NO: 805472 - DNA, 15 bp, Homo sapiens
gaaatacaactgagc

SEQ ID NO: 805473 - DNA, 15 bp, Homo sapiens
aaatacaactgagca

SEQ ID NO: 805474 - DNA, 15 bp, Homo sapiens
aatacaactgagcat

SEQ ID NO: 805475 - DNA, 15 bp, Homo sapiens
atacaactgagcatc

SEQ ID NO: 805476 - DNA, 15 bp, Homo sapiens
tacaactgagcatcc

SEQ ID NO: 805477 - DNA, 15 bp, Homo sapiens
acaactgagcatccc

SEQ ID NO: 805478 - DNA, 15 bp, Homo sapiens
caactgagcatccca

SEQ ID NO: 805479 - DNA, 15 bp, Homo sapiens
aactgagcatcccaa

SEQ ID NO: 805480 - DNA, 15 bp, Homo sapiens
actgagcatcccaag

SEQ ID NO: 805481 - DNA, 15 bp, Homo sapiens
ctgagcatcccaagc

SEQ ID NO: 805482 - DNA, 15 bp, Homo sapiens
tgagcatcccaagca

SEQ ID NO: 805483 - DNA, 15 bp, Homo sapiens
gagcatcccaagcaa

SEQ ID NO: 805484 - DNA, 15 bp, Homo sapiens
agcatcccaagcaag

SEQ ID NO: 805485 - DNA, 15 bp, Homo sapiens
gcatcccaagcaagt

SEQ ID NO: 805486 - DNA, 15 bp, Homo sapiens
catcccaagcaagtc

SEQ ID NO: 805487 - DNA, 15 bp, Homo sapiens
atcccaagcaagtct

SEQ ID NO: 805488 - DNA, 15 bp, Homo sapiens
tcccaagcaagtctg

SEQ ID NO: 805489 - DNA, 15 bp, Homo sapiens
cccaagcaagtctgc

SEQ ID NO: 805490 - DNA, 15 bp, Homo sapiens
ccaagcaagtctgca

SEQ ID NO: 805491 - DNA, 15 bp, Homo sapiens
caagcaagtctgcac

SEQ ID NO: 805492 - DNA, 15 bp, Homo sapiens
aagcaagtctgcacc

SEQ ID NO: 805493 - DNA, 15 bp, Homo sapiens
agcaagtctgcacct

SEQ ID NO: 805494 - DNA, 15 bp, Homo sapiens
gcaagtctgcacctc

SEQ ID NO: 805495 - DNA, 15 bp, Homo sapiens
caagtctgcacctcc

SEQ ID NO: 805496 - DNA, 15 bp, Homo sapiens
aagtctgcacctcca

SEQ ID NO: 805497 - DNA, 15 bp, Homo sapiens
agtctgcacctccag

SEQ ID NO: 805498 - DNA, 15 bp, Homo sapiens
gtctgcacctccaga

SEQ ID NO: 805499 - DNA, 15 bp, Homo sapiens
tctgcacctccagac

SEQ ID NO: 805500 - DNA, 15 bp, Homo sapiens
ctgcacctccagaca

SEQ ID NO: 805501 - DNA, 15 bp, Homo sapiens
tgcacctccagacat

SEQ ID NO: 805502 - DNA, 15 bp, Homo sapiens
gcacctccagacatt

SEQ ID NO: 805503 - DNA, 15 bp, Homo sapiens
cacctccagacattt

SEQ ID NO: 805504 - DNA, 15 bp, Homo sapiens
acctccagacatttt

SEQ ID NO: 805505 - DNA, 15 bp, Homo sapiens
cctccagacattttt

SEQ ID NO: 805506 - DNA, 15 bp, Homo sapiens
ctccagacatttttt

SEQ ID NO: 805507 - DNA, 15 bp, Homo sapiens
tccagacatttttta

SEQ ID NO: 805508 - DNA, 15 bp, Homo sapiens
ccagacattttttaa

SEQ ID NO: 805509 - DNA, 15 bp, Homo sapiens
cagacattttttaaa

SEQ ID NO: 805510 - DNA, 15 bp, Homo sapiens
agacattttttaaaa

SEQ ID NO: 805511 - DNA, 15 bp, Homo sapiens
gacattttttaaaaa

SEQ ID NO: 805512 - DNA, 15 bp, Homo sapiens
acattttttaaaaaa

SEQ ID NO: 805513 - DNA, 15 bp, Homo sapiens
cattttttaaaaaat

SEQ ID NO: 805514 - DNA, 15 bp, Homo sapiens
attttttaaaaaata

SEQ ID NO: 805515 - DNA, 15 bp, Homo sapiens
ttttttaaaaaatat

SEQ ID NO: 805516 - DNA, 15 bp, Homo sapiens
tttttaaaaaatatc

SEQ ID NO: 805517 - DNA, 15 bp, Homo sapiens
ttttaaaaaatatct

SEQ ID NO: 805518 - DNA, 15 bp, Homo sapiens
tttaaaaaatatctc

SEQ ID NO: 805519 - DNA, 15 bp, Homo sapiens
ttaaaaaatatctcc

SEQ ID NO: 805520 - DNA, 15 bp, Homo sapiens
taaaaaatatctcct

SEQ ID NO: 805521 - DNA, 15 bp, Homo sapiens
aaaaaatatctcctg

SEQ ID NO: 805522 - DNA, 15 bp, Homo sapiens
aaaaatatctcctga

SEQ ID NO: 805523 - DNA, 15 bp, Homo sapiens
aaaatatctcctgat

SEQ ID NO: 805524 - DNA, 15 bp, Homo sapiens
aaatatctcctgatg

SEQ ID NO: 805525 - DNA, 15 bp, Homo sapiens
aatatctcctgatgg

SEQ ID NO: 805526 - DNA, 15 bp, Homo sapiens
atatctcctgatgga

SEQ ID NO: 805527 - DNA, 15 bp, Homo sapiens
tatctcctgatggag

SEQ ID NO: 805528 - DNA, 15 bp, Homo sapiens
atctcctgatggagc

SEQ ID NO: 805529 - DNA, 15 bp, Homo sapiens
tctcctgatggagct

SEQ ID NO: 805530 - DNA, 15 bp, Homo sapiens
ctcctgatggagctt

SEQ ID NO: 805531 - DNA, 15 bp, Homo sapiens
tcctgatggagcttt

SEQ ID NO: 805532 - DNA, 15 bp, Homo sapiens
cctgatggagctttt

SEQ ID NO: 805533 - DNA, 15 bp, Homo sapiens
ctgatggagctttta

SEQ ID NO: 805534 - DNA, 15 bp, Homo sapiens
tgatggagcttttat

SEQ ID NO: 805535 - DNA, 15 bp, Homo sapiens
gatggagcttttatt

SEQ ID NO: 805536 - DNA, 15 bp, Homo sapiens
atggagcttttattt

SEQ ID NO: 805537 - DNA, 15 bp, Homo sapiens
tggagcttttatttg

SEQ ID NO: 805538 - DNA, 15 bp, Homo sapiens
ggagcttttatttgg

SEQ ID NO: 805539 - DNA, 15 bp, Homo sapiens
gagcttttatttggt

SEQ ID NO: 805540 - DNA, 15 bp, Homo sapiens
agcttttatttggtt

SEQ ID NO: 805541 - DNA, 15 bp, Homo sapiens
gcttttatttggtta

SEQ ID NO: 805542 - DNA, 15 bp, Homo sapiens
cttttatttggttat

SEQ ID NO: 805543 - DNA, 15 bp, Homo sapiens
ttttatttggttatg

SEQ ID NO: 805544 - DNA, 15 bp, Homo sapiens
tttatttggttatga

SEQ ID NO: 805545 - DNA, 15 bp, Homo sapiens
ttatttggttatgaa

SEQ ID NO: 805546 - DNA, 15 bp, Homo sapiens
tatttggttatgaag

SEQ ID NO: 805547 - DNA, 15 bp, Homo sapiens
atttggttatgaagt

SEQ ID NO: 805548 - DNA, 15 bp, Homo sapiens
tttggttatgaagtg

SEQ ID NO: 805549 - DNA, 15 bp, Homo sapiens
ttggttatgaagtga

SEQ ID NO: 805550 - DNA, 15 bp, Homo sapiens
tggttatgaagtgaa

SEQ ID NO: 805551 - DNA, 15 bp, Homo sapiens
ggttatgaagtgaaa

SEQ ID NO: 805552 - DNA, 15 bp, Homo sapiens
gttatgaagtgaaag

SEQ ID NO: 805553 - DNA, 15 bp, Homo sapiens
ttatgaagtgaaagg

SEQ ID NO: 805554 - DNA, 15 bp, Homo sapiens
tatgaagtgaaaggg

SEQ ID NO: 805555 - DNA, 15 bp, Homo sapiens
atgaagtgaaagggc

SEQ ID NO: 805556 - DNA, 15 bp, Homo sapiens
tgaagtgaaagggct

SEQ ID NO: 805557 - DNA, 15 bp, Homo sapiens
gaagtgaaagggctt

SEQ ID NO: 805558 - DNA, 15 bp, Homo sapiens
aagtgaaagggctta

SEQ ID NO: 805559 - DNA, 15 bp, Homo sapiens
agtgaaagggcttag

SEQ ID NO: 805560 - DNA, 15 bp, Homo sapiens
gtgaaagggcttagc

SEQ ID NO: 805561 - DNA, 15 bp, Homo sapiens
tgaaagggcttagca

SEQ ID NO: 805562 - DNA, 15 bp, Homo sapiens
gaaagggcttagcag

SEQ ID NO: 805563 - DNA, 15 bp, Homo sapiens
aaagggcttagcagc

SEQ ID NO: 805564 - DNA, 15 bp, Homo sapiens
aagggcttagcagct

SEQ ID NO: 805565 - DNA, 15 bp, Homo sapiens
agggcttagcagctt

SEQ ID NO: 805566 - DNA, 15 bp, Homo sapiens
gggcttagcagcttc

SEQ ID NO: 805567 - DNA, 15 bp, Homo sapiens
ggcttagcagcttca

SEQ ID NO: 805568 - DNA, 15 bp, Homo sapiens
gcttagcagcttcag

SEQ ID NO: 805569 - DNA, 15 bp, Homo sapiens
cttagcagcttcaga

SEQ ID NO: 805570 - DNA, 15 bp, Homo sapiens
ttagcagcttcagac

SEQ ID NO: 805571 - DNA, 15 bp, Homo sapiens
tagcagcttcagaca

SEQ ID NO: 805572 - DNA, 15 bp, Homo sapiens
agcagcttcagacac

SEQ ID NO: 805573 - DNA, 15 bp, Homo sapiens
gcagcttcagacacc

SEQ ID NO: 805574 - DNA, 15 bp, Homo sapiens
cagcttcagacacct

SEQ ID NO: 805575 - DNA, 15 bp, Homo sapiens
agcttcagacacctc

SEQ ID NO: 805576 - DNA, 15 bp, Homo sapiens
gcttcagacacctca

SEQ ID NO: 805577 - DNA, 15 bp, Homo sapiens
cttcagacacctcac

SEQ ID NO: 805578 - DNA, 15 bp, Homo sapiens
ttcagacacctcact

SEQ ID NO: 805579 - DNA, 15 bp, Homo sapiens
tcagacacctcacta

SEQ ID NO: 805580 - DNA, 15 bp, Homo sapiens
cagacacctcactac

SEQ ID NO: 805581 - DNA, 15 bp, Homo sapiens
agacacctcactaca

SEQ ID NO: 805582 - DNA, 15 bp, Homo sapiens
gacacctcactacat

SEQ ID NO: 805583 - DNA, 15 bp, Homo sapiens
acacctcactacatt

SEQ ID NO: 805584 - DNA, 15 bp, Homo sapiens
cacctcactacattg

SEQ ID NO: 805585 - DNA, 15 bp, Homo sapiens
acctcactacattgc

SEQ ID NO: 805586 - DNA, 15 bp, Homo sapiens
cctcactacattgcc

SEQ ID NO: 805587 - DNA, 15 bp, Homo sapiens
ctcactacattgcct

SEQ ID NO: 805588 - DNA, 15 bp, Homo sapiens
tcactacattgcctg

SEQ ID NO: 805589 - DNA, 15 bp, Homo sapiens
cactacattgcctgc

SEQ ID NO: 805590 - DNA, 15 bp, Homo sapiens
actacattgcctgct

SEQ ID NO: 805591 - DNA, 15 bp, Homo sapiens
ctacattgcctgctc

SEQ ID NO: 805592 - DNA, 15 bp, Homo sapiens
tacattgcctgctcc

SEQ ID NO: 805593 - DNA, 15 bp, Homo sapiens
acattgcctgctcct

SEQ ID NO: 805594 - DNA, 15 bp, Homo sapiens
cattgcctgctcctt

SEQ ID NO: 805595 - DNA, 15 bp, Homo sapiens
attgcctgctccttc

SEQ ID NO: 805596 - DNA, 15 bp, Homo sapiens
ttgcctgctccttcc

SEQ ID NO: 805597 - DNA, 15 bp, Homo sapiens
tgcctgctccttcct

SEQ ID NO: 805598 - DNA, 15 bp, Homo sapiens
gcctgctccttcctt

SEQ ID NO: 805599 - DNA, 15 bp, Homo sapiens
cctgctccttccttg

SEQ ID NO: 805600 - DNA, 15 bp, Homo sapiens
ctgctccttccttgc

SEQ ID NO: 805601 - DNA, 15 bp, Homo sapiens
tgctccttccttgca

SEQ ID NO: 805602 - DNA, 15 bp, Homo sapiens
gctccttccttgcag

SEQ ID NO: 805603 - DNA, 15 bp, Homo sapiens
ctccttccttgcagg

SEQ ID NO: 805604 - DNA, 15 bp, Homo sapiens
tccttccttgcaggt

SEQ ID NO: 805605 - DNA, 15 bp, Homo sapiens
ccttccttgcaggta

SEQ ID NO: 805606 - DNA, 15 bp, Homo sapiens
cttccttgcaggtat

SEQ ID NO: 805607 - DNA, 15 bp, Homo sapiens
ttccttgcaggtatg

SEQ ID NO: 805608 - DNA, 15 bp, Homo sapiens
tccttgcaggtatgg

SEQ ID NO: 805609 - DNA, 15 bp, Homo sapiens
ccttgcaggtatggg

SEQ ID NO: 805610 - DNA, 15 bp, Homo sapiens
cttgcaggtatggga

SEQ ID NO: 805611 - DNA, 15 bp, Homo sapiens
ttgcaggtatgggat

SEQ ID NO: 805612 - DNA, 15 bp, Homo sapiens
tgcaggtatgggatg

SEQ ID NO: 805613 - DNA, 15 bp, Homo sapiens
gcaggtatgggatgg

SEQ ID NO: 805614 - DNA, 15 bp, Homo sapiens
caggtatgggatgga

SEQ ID NO: 805615 - DNA, 15 bp, Homo sapiens
aggtatgggatggaa

SEQ ID NO: 805616 - DNA, 15 bp, Homo sapiens
ggtatgggatggaag

SEQ ID NO: 805617 - DNA, 15 bp, Homo sapiens
gtatgggatggaagg

SEQ ID NO: 805618 - DNA, 15 bp, Homo sapiens
tatgggatggaaggc

SEQ ID NO: 805619 - DNA, 15 bp, Homo sapiens
atgggatggaaggct

SEQ ID NO: 805620 - DNA, 15 bp, Homo sapiens
tgggatggaaggctt

SEQ ID NO: 805621 - DNA, 15 bp, Homo sapiens
gggatggaaggcttg

SEQ ID NO: 805622 - DNA, 15 bp, Homo sapiens
ggatggaaggcttgc

SEQ ID NO: 805623 - DNA, 15 bp, Homo sapiens
gatggaaggcttgct

SEQ ID NO: 805624 - DNA, 15 bp, Homo sapiens
atggaaggcttgctg

SEQ ID NO: 805625 - DNA, 15 bp, Homo sapiens
tggaaggcttgctgt

SEQ ID NO: 805626 - DNA, 15 bp, Homo sapiens
ggaaggcttgctgtg

SEQ ID NO: 805627 - DNA, 15 bp, Homo sapiens
gaaggcttgctgtgg

SEQ ID NO: 805628 - DNA, 15 bp, Homo sapiens
aaggcttgctgtggg

SEQ ID NO: 805629 - DNA, 15 bp, Homo sapiens
aggcttgctgtgggg

SEQ ID NO: 805630 - DNA, 15 bp, Homo sapiens
ggcttgctgtggggg

SEQ ID NO: 805631 - DNA, 15 bp, Homo sapiens
gcttgctgtggggga

SEQ ID NO: 805632 - DNA, 15 bp, Homo sapiens
cttgctgtgggggaa

SEQ ID NO: 805633 - DNA, 15 bp, Homo sapiens
ttgctgtgggggaag

SEQ ID NO: 805634 - DNA, 15 bp, Homo sapiens
tgctgtgggggaagg

SEQ ID NO: 805635 - DNA, 15 bp, Homo sapiens
gctgtgggggaaggt

SEQ ID NO: 805636 - DNA, 15 bp, Homo sapiens
ctgtgggggaaggtg

SEQ ID NO: 805637 - DNA, 15 bp, Homo sapiens
tgtgggggaaggtgg

SEQ ID NO: 805638 - DNA, 15 bp, Homo sapiens
gtgggggaaggtggc

SEQ ID NO: 805639 - DNA, 15 bp, Homo sapiens
tgggggaaggtggct

SEQ ID NO: 805640 - DNA, 15 bp, Homo sapiens
gggggaaggtggctt

SEQ ID NO: 805641 - DNA, 15 bp, Homo sapiens
ggggaaggtggctta

SEQ ID NO: 805642 - DNA, 15 bp, Homo sapiens
gggaaggtggcttag

SEQ ID NO: 805643 - DNA, 15 bp, Homo sapiens
ggaaggtggcttagt

SEQ ID NO: 805644 - DNA, 15 bp, Homo sapiens
gaaggtggcttagta

SEQ ID NO: 805645 - DNA, 15 bp, Homo sapiens
aaggtggcttagtaa

SEQ ID NO: 805646 - DNA, 15 bp, Homo sapiens
aggtggcttagtaat

SEQ ID NO: 805647 - DNA, 15 bp, Homo sapiens
ggtggcttagtaatg

SEQ ID NO: 805648 - DNA, 15 bp, Homo sapiens
gtggcttagtaatga

SEQ ID NO: 805649 - DNA, 15 bp, Homo sapiens
tggcttagtaatgaa

SEQ ID NO: 805650 - DNA, 15 bp, Homo sapiens
ggcttagtaatgaag

SEQ ID NO: 805651 - DNA, 15 bp, Homo sapiens
gcttagtaatgaagg

SEQ ID NO: 805652 - DNA, 15 bp, Homo sapiens
cttagtaatgaaggg

SEQ ID NO: 805653 - DNA, 15 bp, Homo sapiens
ttagtaatgaaggga

SEQ ID NO: 805654 - DNA, 15 bp, Homo sapiens
tagtaatgaagggag

SEQ ID NO: 805655 - DNA, 15 bp, Homo sapiens
agtaatgaagggagc

SEQ ID NO: 805656 - DNA, 15 bp, Homo sapiens
gtaatgaagggagcc

SEQ ID NO: 805657 - DNA, 15 bp, Homo sapiens
taatgaagggagccc

SEQ ID NO: 805658 - DNA, 15 bp, Homo sapiens
aatgaagggagccca

SEQ ID NO: 805659 - DNA, 15 bp, Homo sapiens
atgaagggagcccat

SEQ ID NO: 805660 - DNA, 15 bp, Homo sapiens
tgaagggagcccatc

SEQ ID NO: 805661 - DNA, 15 bp, Homo sapiens
gaagggagcccatct

SEQ ID NO: 805662 - DNA, 15 bp, Homo sapiens
aagggagcccatctc

SEQ ID NO: 805663 - DNA, 15 bp, Homo sapiens
agggagcccatctca

SEQ ID NO: 805664 - DNA, 15 bp, Homo sapiens
gggagcccatctcaa

SEQ ID NO: 805665 - DNA, 15 bp, Homo sapiens
ggagcccatctcaac

SEQ ID NO: 805666 - DNA, 15 bp, Homo sapiens
gagcccatctcaact

SEQ ID NO: 805667 - DNA, 15 bp, Homo sapiens
agcccatctcaactg

SEQ ID NO: 805668 - DNA, 15 bp, Homo sapiens
gcccatctcaactgg

SEQ ID NO: 805669 - DNA, 15 bp, Homo sapiens
cccatctcaactggg

SEQ ID NO: 805670 - DNA, 15 bp, Homo sapiens
ccatctcaactgggg

SEQ ID NO: 805671 - DNA, 15 bp, Homo sapiens
catctcaactggggc

SEQ ID NO: 805672 - DNA, 15 bp, Homo sapiens
atctcaactggggct

SEQ ID NO: 805673 - DNA, 15 bp, Homo sapiens
tctcaactggggctc

SEQ ID NO: 805674 - DNA, 15 bp, Homo sapiens
ctcaactggggctcg

SEQ ID NO: 805675 - DNA, 15 bp, Homo sapiens
tcaactggggctcgt

SEQ ID NO: 805676 - DNA, 15 bp, Homo sapiens
caactggggctcgtg

SEQ ID NO: 805677 - DNA, 15 bp, Homo sapiens
aactggggctcgtgg

SEQ ID NO: 805678 - DNA, 15 bp, Homo sapiens
actggggctcgtggg

SEQ ID NO: 805679 - DNA, 15 bp, Homo sapiens
ctggggctcgtggga

SEQ ID NO: 805680 - DNA, 15 bp, Homo sapiens
tggggctcgtgggag

SEQ ID NO: 805681 - DNA, 15 bp, Homo sapiens
ggggctcgtgggaga

SEQ ID NO: 805682 - DNA, 15 bp, Homo sapiens
gggctcgtgggagag

SEQ ID NO: 805683 - DNA, 15 bp, Homo sapiens
ggctcgtgggagagt

SEQ ID NO: 805684 - DNA, 15 bp, Homo sapiens
gctcgtgggagagta

SEQ ID NO: 805685 - DNA, 15 bp, Homo sapiens
ctcgtgggagagtaa

SEQ ID NO: 805686 - DNA, 15 bp, Homo sapiens
tcgtgggagagtaaa

SEQ ID NO: 805687 - DNA, 15 bp, Homo sapiens
cgtgggagagtaaat

SEQ ID NO: 805688 - DNA, 15 bp, Homo sapiens
gtgggagagtaaatt

SEQ ID NO: 805689 - DNA, 15 bp, Homo sapiens
tgggagagtaaatta

SEQ ID NO: 805690 - DNA, 15 bp, Homo sapiens
gggagagtaaattag

SEQ ID NO: 805691 - DNA, 15 bp, Homo sapiens
ggagagtaaattagg

SEQ ID NO: 805692 - DNA, 15 bp, Homo sapiens
gagagtaaattaggc

SEQ ID NO: 805693 - DNA, 15 bp, Homo sapiens
agagtaaattaggcc

SEQ ID NO: 805694 - DNA, 15 bp, Homo sapiens
gagtaaattaggccc

SEQ ID NO: 805695 - DNA, 15 bp, Homo sapiens
agtaaattaggccct

SEQ ID NO: 805696 - DNA, 15 bp, Homo sapiens
gtaaattaggccctc

SEQ ID NO: 805697 - DNA, 15 bp, Homo sapiens
taaattaggccctct

SEQ ID NO: 805698 - DNA, 15 bp, Homo sapiens
aaattaggccctcta

SEQ ID NO: 805699 - DNA, 15 bp, Homo sapiens
aattaggccctctag

SEQ ID NO: 805700 - DNA, 15 bp, Homo sapiens
attaggccctctagg

SEQ ID NO: 805701 - DNA, 15 bp, Homo sapiens
ttaggccctctagga

SEQ ID NO: 805702 - DNA, 15 bp, Homo sapiens
taggccctctaggaa

SEQ ID NO: 805703 - DNA, 15 bp, Homo sapiens
aggccctctaggaaa

SEQ ID NO: 805704 - DNA, 15 bp, Homo sapiens
ggccctctaggaaaa

SEQ ID NO: 805705 - DNA, 15 bp, Homo sapiens
gccctctaggaaaaa

SEQ ID NO: 805706 - DNA, 15 bp, Homo sapiens
ccctctaggaaaaag

SEQ ID NO: 805707 - DNA, 15 bp, Homo sapiens
cctctaggaaaaagt

SEQ ID NO: 805708 - DNA, 15 bp, Homo sapiens
ctctaggaaaaagtt

SEQ ID NO: 805709 - DNA, 15 bp, Homo sapiens
tctaggaaaaagttc

SEQ ID NO: 805710 - DNA, 15 bp, Homo sapiens
ctaggaaaaagttca

SEQ ID NO: 805711 - DNA, 15 bp, Homo sapiens
taggaaaaagttcaa

SEQ ID NO: 805712 - DNA, 15 bp, Homo sapiens
aggaaaaagttcaag

SEQ ID NO: 805713 - DNA, 15 bp, Homo sapiens
ggaaaaagttcaagg

SEQ ID NO: 805714 - DNA, 15 bp, Homo sapiens
gaaaaagttcaaggg

SEQ ID NO: 805715 - DNA, 15 bp, Homo sapiens
aaaaagttcaaggga

SEQ ID NO: 805716 - DNA, 15 bp, Homo sapiens
aaaagttcaagggag

SEQ ID NO: 805717 - DNA, 15 bp, Homo sapiens
aaagttcaagggagt

SEQ ID NO: 805718 - DNA, 15 bp, Homo sapiens
aagttcaagggagtc

SEQ ID NO: 805719 - DNA, 15 bp, Homo sapiens
agttcaagggagtct

SEQ ID NO: 805720 - DNA, 15 bp, Homo sapiens
gttcaagggagtctt

SEQ ID NO: 805721 - DNA, 15 bp, Homo sapiens
ttcaagggagtcttt

SEQ ID NO: 805722 - DNA, 15 bp, Homo sapiens
tcaagggagtctttg

SEQ ID NO: 805723 - DNA, 15 bp, Homo sapiens
caagggagtctttgt

SEQ ID NO: 805724 - DNA, 15 bp, Homo sapiens
aagggagtctttgtg

SEQ ID NO: 805725 - DNA, 15 bp, Homo sapiens
agggagtctttgtga

SEQ ID NO: 805726 - DNA, 15 bp, Homo sapiens
gggagtctttgtgaa

SEQ ID NO: 805727 - DNA, 15 bp, Homo sapiens
ggagtctttgtgaat

SEQ ID NO: 805728 - DNA, 15 bp, Homo sapiens
gagtctttgtgaatt

SEQ ID NO: 805729 - DNA, 15 bp, Homo sapiens
agtctttgtgaattc

SEQ ID NO: 805730 - DNA, 15 bp, Homo sapiens
gtctttgtgaattct

SEQ ID NO: 805731 - DNA, 15 bp, Homo sapiens
tctttgtgaattctc

SEQ ID NO: 805732 - DNA, 15 bp, Homo sapiens
ctttgtgaattctcc

SEQ ID NO: 805733 - DNA, 15 bp, Homo sapiens
tttgtgaattctccc

SEQ ID NO: 805734 - DNA, 15 bp, Homo sapiens
ttgtgaattctccca

SEQ ID NO: 805735 - DNA, 15 bp, Homo sapiens
tgtgaattctcccaa

SEQ ID NO: 805736 - DNA, 15 bp, Homo sapiens
gtgaattctcccaag

SEQ ID NO: 805737 - DNA, 15 bp, Homo sapiens
tgaattctcccaagg

SEQ ID NO: 805738 - DNA, 15 bp, Homo sapiens
gaattctcccaagga

SEQ ID NO: 805739 - DNA, 15 bp, Homo sapiens
aattctcccaaggat

SEQ ID NO: 805740 - DNA, 15 bp, Homo sapiens
attctcccaaggatg

SEQ ID NO: 805741 - DNA, 15 bp, Homo sapiens
ttctcccaaggatgg

SEQ ID NO: 805742 - DNA, 15 bp, Homo sapiens
tctcccaaggatgga

SEQ ID NO: 805743 - DNA, 15 bp, Homo sapiens
ctcccaaggatggaa

SEQ ID NO: 805744 - DNA, 15 bp, Homo sapiens
tcccaaggatggaac

SEQ ID NO: 805745 - DNA, 15 bp, Homo sapiens
cccaaggatggaaca

SEQ ID NO: 805746 - DNA, 15 bp, Homo sapiens
ccaaggatggaacat

SEQ ID NO: 805747 - DNA, 15 bp, Homo sapiens
caaggatggaacatt

SEQ ID NO: 805748 - DNA, 15 bp, Homo sapiens
aaggatggaacattc

SEQ ID NO: 805749 - DNA, 15 bp, Homo sapiens
aggatggaacattct

SEQ ID NO: 805750 - DNA, 15 bp, Homo sapiens
ggatggaacattcta

SEQ ID NO: 805751 - DNA, 15 bp, Homo sapiens
gatggaacattctag

SEQ ID NO: 805752 - DNA, 15 bp, Homo sapiens
atggaacattctaga

SEQ ID NO: 805753 - DNA, 15 bp, Homo sapiens
tggaacattctagat

SEQ ID NO: 805754 - DNA, 15 bp, Homo sapiens
ggaacattctagata

SEQ ID NO: 805755 - DNA, 15 bp, Homo sapiens
gaacattctagatag

SEQ ID NO: 805756 - DNA, 15 bp, Homo sapiens
aacattctagatagg

SEQ ID NO: 805757 - DNA, 15 bp, Homo sapiens
acattctagatagga

SEQ ID NO: 805758 - DNA, 15 bp, Homo sapiens
cattctagataggag

SEQ ID NO: 805759 - DNA, 15 bp, Homo sapiens
attctagataggagg

SEQ ID NO: 805760 - DNA, 15 bp, Homo sapiens
ttctagataggaggg

SEQ ID NO: 805761 - DNA, 15 bp, Homo sapiens
tctagataggaggga

SEQ ID NO: 805762 - DNA, 15 bp, Homo sapiens
ctagataggagggat

SEQ ID NO: 805763 - DNA, 15 bp, Homo sapiens
tagataggagggata

SEQ ID NO: 805764 - DNA, 15 bp, Homo sapiens
agataggagggatag

SEQ ID NO: 805765 - DNA, 15 bp, Homo sapiens
gataggagggataga

SEQ ID NO: 805766 - DNA, 15 bp, Homo sapiens
ataggagggatagaa

SEQ ID NO: 805767 - DNA, 15 bp, Homo sapiens
taggagggatagaag

SEQ ID NO: 805768 - DNA, 15 bp, Homo sapiens
aggagggatagaagc

SEQ ID NO: 805769 - DNA, 15 bp, Homo sapiens
ggagggatagaagca

SEQ ID NO: 805770 - DNA, 15 bp, Homo sapiens
gagggatagaagcaa

SEQ ID NO: 805771 - DNA, 15 bp, Homo sapiens
agggatagaagcaaa

SEQ ID NO: 805772 - DNA, 15 bp, Homo sapiens
gggatagaagcaaat

SEQ ID NO: 805773 - DNA, 15 bp, Homo sapiens
ggatagaagcaaatc

SEQ ID NO: 805774 - DNA, 15 bp, Homo sapiens
gatagaagcaaatca

SEQ ID NO: 805775 - DNA, 15 bp, Homo sapiens
atagaagcaaatcat

SEQ ID NO: 805776 - DNA, 15 bp, Homo sapiens
tagaagcaaatcatt

SEQ ID NO: 805777 - DNA, 15 bp, Homo sapiens
agaagcaaatcattc

SEQ ID NO: 805778 - DNA, 15 bp, Homo sapiens
gaagcaaatcattct

SEQ ID NO: 805779 - DNA, 15 bp, Homo sapiens
aagcaaatcattcta

SEQ ID NO: 805780 - DNA, 15 bp, Homo sapiens
agcaaatcattctat

SEQ ID NO: 805781 - DNA, 15 bp, Homo sapiens
gcaaatcattctata

SEQ ID NO: 805782 - DNA, 15 bp, Homo sapiens
caaatcattctatac

SEQ ID NO: 805783 - DNA, 15 bp, Homo sapiens
aaatcattctatacg

SEQ ID NO: 805784 - DNA, 15 bp, Homo sapiens
aatcattctatacgt

SEQ ID NO: 805785 - DNA, 15 bp, Homo sapiens
atcattctatacgtt

SEQ ID NO: 805786 - DNA, 15 bp, Homo sapiens
tcattctatacgttg

SEQ ID NO: 805787 - DNA, 15 bp, Homo sapiens
cattctatacgttgg

SEQ ID NO: 805788 - DNA, 15 bp, Homo sapiens
attctatacgttgga

SEQ ID NO: 805789 - DNA, 15 bp, Homo sapiens
ttctatacgttggaa

SEQ ID NO: 805790 - DNA, 15 bp, Homo sapiens
tctatacgttggaag

SEQ ID NO: 805791 - DNA, 15 bp, Homo sapiens
ctatacgttggaagc

SEQ ID NO: 805792 - DNA, 15 bp, Homo sapiens
tatacgttggaagca

SEQ ID NO: 805793 - DNA, 15 bp, Homo sapiens
atacgttggaagcat

SEQ ID NO: 805794 - DNA, 15 bp, Homo sapiens
tacgttggaagcatt

SEQ ID NO: 805795 - DNA, 15 bp, Homo sapiens
acgttggaagcattg

SEQ ID NO: 805796 - DNA, 15 bp, Homo sapiens
cgttggaagcattgg

SEQ ID NO: 805797 - DNA, 15 bp, Homo sapiens
gttggaagcattggg

SEQ ID NO: 805798 - DNA, 15 bp, Homo sapiens
ttggaagcattgggg

SEQ ID NO: 805799 - DNA, 15 bp, Homo sapiens
tggaagcattggggc

SEQ ID NO: 805800 - DNA, 15 bp, Homo sapiens
ggaagcattggggct

SEQ ID NO: 805801 - DNA, 15 bp, Homo sapiens
gaagcattggggctt

SEQ ID NO: 805802 - DNA, 15 bp, Homo sapiens
aagcattggggcttc

SEQ ID NO: 805803 - DNA, 15 bp, Homo sapiens
agcattggggcttcg

SEQ ID NO: 805804 - DNA, 15 bp, Homo sapiens
gcattggggcttcgt

SEQ ID NO: 805805 - DNA, 15 bp, Homo sapiens
cattggggcttcgta

SEQ ID NO: 805806 - DNA, 15 bp, Homo sapiens
attggggcttcgtat

SEQ ID NO: 805807 - DNA, 15 bp, Homo sapiens
ttggggcttcgtatt

SEQ ID NO: 805808 - DNA, 15 bp, Homo sapiens
tggggcttcgtattc

SEQ ID NO: 805809 - DNA, 15 bp, Homo sapiens
ggggcttcgtattct

SEQ ID NO: 805810 - DNA, 15 bp, Homo sapiens
gggcttcgtattctt

SEQ ID NO: 805811 - DNA, 15 bp, Homo sapiens
ggcttcgtattcttg

SEQ ID NO: 805812 - DNA, 15 bp, Homo sapiens
gcttcgtattcttgt

SEQ ID NO: 805813 - DNA, 15 bp, Homo sapiens
cttcgtattcttgtg

SEQ ID NO: 805814 - DNA, 15 bp, Homo sapiens
ttcgtattcttgtgg

SEQ ID NO: 805815 - DNA, 15 bp, Homo sapiens
tcgtattcttgtgga

SEQ ID NO: 805816 - DNA, 15 bp, Homo sapiens
cgtattcttgtggaa

SEQ ID NO: 805817 - DNA, 15 bp, Homo sapiens
gtattcttgtggaac

SEQ ID NO: 805818 - DNA, 15 bp, Homo sapiens
tattcttgtggaacc

SEQ ID NO: 805819 - DNA, 15 bp, Homo sapiens
attcttgtggaacct

SEQ ID NO: 805820 - DNA, 15 bp, Homo sapiens
ttcttgtggaacctt

SEQ ID NO: 805821 - DNA, 15 bp, Homo sapiens
tcttgtggaaccttg

SEQ ID NO: 805822 - DNA, 15 bp, Homo sapiens
cttgtggaaccttgt

SEQ ID NO: 805823 - DNA, 15 bp, Homo sapiens
ttgtggaaccttgtt

SEQ ID NO: 805824 - DNA, 15 bp, Homo sapiens
tgtggaaccttgttg

SEQ ID NO: 805825 - DNA, 15 bp, Homo sapiens
gtggaaccttgttga

SEQ ID NO: 805826 - DNA, 15 bp, Homo sapiens
tggaaccttgttgag

SEQ ID NO: 805827 - DNA, 15 bp, Homo sapiens
ggaaccttgttgaga

SEQ ID NO: 805828 - DNA, 15 bp, Homo sapiens
gaaccttgttgagaa

SEQ ID NO: 805829 - DNA, 15 bp, Homo sapiens
aaccttgttgagaag

SEQ ID NO: 805830 - DNA, 15 bp, Homo sapiens
accttgttgagaagg

SEQ ID NO: 805831 - DNA, 15 bp, Homo sapiens
ccttgttgagaaggg

SEQ ID NO: 805832 - DNA, 15 bp, Homo sapiens
cttgttgagaagggc

SEQ ID NO: 805833 - DNA, 15 bp, Homo sapiens
ttgttgagaagggca

SEQ ID NO: 805834 - DNA, 15 bp, Homo sapiens
tgttgagaagggcag

SEQ ID NO: 805835 - DNA, 15 bp, Homo sapiens
gttgagaagggcagg

SEQ ID NO: 805836 - DNA, 15 bp, Homo sapiens
ttgagaagggcaggt

SEQ ID NO: 805837 - DNA, 15 bp, Homo sapiens
tgagaagggcaggtg

SEQ ID NO: 805838 - DNA, 15 bp, Homo sapiens
gagaagggcaggtgt

SEQ ID NO: 805839 - DNA, 15 bp, Homo sapiens
agaagggcaggtgtc

SEQ ID NO: 805840 - DNA, 15 bp, Homo sapiens
gaagggcaggtgtca

SEQ ID NO: 805841 - DNA, 15 bp, Homo sapiens
aagggcaggtgtcat

SEQ ID NO: 805842 - DNA, 15 bp, Homo sapiens
agggcaggtgtcatc

SEQ ID NO: 805843 - DNA, 15 bp, Homo sapiens
gggcaggtgtcatcc

SEQ ID NO: 805844 - DNA, 15 bp, Homo sapiens
ggcaggtgtcatcca

SEQ ID NO: 805845 - DNA, 15 bp, Homo sapiens
gcaggtgtcatccag

SEQ ID NO: 805846 - DNA, 15 bp, Homo sapiens
caggtgtcatccagg

SEQ ID NO: 805847 - DNA, 15 bp, Homo sapiens
aggtgtcatccagga

SEQ ID NO: 805848 - DNA, 15 bp, Homo sapiens
ggtgtcatccaggaa

SEQ ID NO: 805849 - DNA, 15 bp, Homo sapiens
gtgtcatccaggaaa

SEQ ID NO: 805850 - DNA, 15 bp, Homo sapiens
tgtcatccaggaaag

SEQ ID NO: 805851 - DNA, 15 bp, Homo sapiens
gtcatccaggaaaga

SEQ ID NO: 805852 - DNA, 15 bp, Homo sapiens
tcatccaggaaagaa

SEQ ID NO: 805853 - DNA, 15 bp, Homo sapiens
catccaggaaagaag

SEQ ID NO: 805854 - DNA, 15 bp, Homo sapiens
atccaggaaagaagg

SEQ ID NO: 805855 - DNA, 15 bp, Homo sapiens
tccaggaaagaaggg

SEQ ID NO: 805856 - DNA, 15 bp, Homo sapiens
ccaggaaagaaggga

SEQ ID NO: 805857 - DNA, 15 bp, Homo sapiens
caggaaagaagggac

SEQ ID NO: 805858 - DNA, 15 bp, Homo sapiens
aggaaagaagggacc

SEQ ID NO: 805859 - DNA, 15 bp, Homo sapiens
ggaaagaagggacca

SEQ ID NO: 805860 - DNA, 15 bp, Homo sapiens
gaaagaagggaccac

SEQ ID NO: 805861 - DNA, 15 bp, Homo sapiens
aaagaagggaccaca

SEQ ID NO: 805862 - DNA, 15 bp, Homo sapiens
aagaagggaccacag

SEQ ID NO: 805863 - DNA, 15 bp, Homo sapiens
agaagggaccacagt

SEQ ID NO: 805864 - DNA, 15 bp, Homo sapiens
gaagggaccacagta

SEQ ID NO: 805865 - DNA, 15 bp, Homo sapiens
aagggaccacagtac

SEQ ID NO: 805866 - DNA, 15 bp, Homo sapiens
agggaccacagtact

SEQ ID NO: 805867 - DNA, 15 bp, Homo sapiens
gggaccacagtactt

SEQ ID NO: 805868 - DNA, 15 bp, Homo sapiens
ggaccacagtacttt

SEQ ID NO: 805869 - DNA, 15 bp, Homo sapiens
gaccacagtactttg

SEQ ID NO: 805870 - DNA, 15 bp, Homo sapiens
accacagtactttgc

SEQ ID NO: 805871 - DNA, 15 bp, Homo sapiens
ccacagtactttgct

SEQ ID NO: 805872 - DNA, 15 bp, Homo sapiens
cacagtactttgctg

SEQ ID NO: 805873 - DNA, 15 bp, Homo sapiens
acagtactttgctgt

SEQ ID NO: 805874 - DNA, 15 bp, Homo sapiens
cagtactttgctgtg

SEQ ID NO: 805875 - DNA, 15 bp, Homo sapiens
agtactttgctgtgc

SEQ ID NO: 805876 - DNA, 15 bp, Homo sapiens
gtactttgctgtgca

SEQ ID NO: 805877 - DNA, 15 bp, Homo sapiens
tactttgctgtgcag

SEQ ID NO: 805878 - DNA, 15 bp, Homo sapiens
actttgctgtgcagc

SEQ ID NO: 805879 - DNA, 15 bp, Homo sapiens
ctttgctgtgcagca

SEQ ID NO: 805880 - DNA, 15 bp, Homo sapiens
tttgctgtgcagcat

SEQ ID NO: 805881 - DNA, 15 bp, Homo sapiens
ttgctgtgcagcatg

SEQ ID NO: 805882 - DNA, 15 bp, Homo sapiens
tgctgtgcagcatgg

SEQ ID NO: 805883 - DNA, 15 bp, Homo sapiens
gctgtgcagcatggg

SEQ ID NO: 805884 - DNA, 15 bp, Homo sapiens
ctgtgcagcatgggg

SEQ ID NO: 805885 - DNA, 15 bp, Homo sapiens
tgtgcagcatgggga

SEQ ID NO: 805886 - DNA, 15 bp, Homo sapiens
gtgcagcatggggaa

SEQ ID NO: 805887 - DNA, 15 bp, Homo sapiens
tgcagcatggggaaa

SEQ ID NO: 805888 - DNA, 15 bp, Homo sapiens
gcagcatggggaaaa

SEQ ID NO: 805889 - DNA, 15 bp, Homo sapiens
cagcatggggaaaag

SEQ ID NO: 805890 - DNA, 15 bp, Homo sapiens
agcatggggaaaagg

SEQ ID NO: 805891 - DNA, 15 bp, Homo sapiens
gcatggggaaaaggg

SEQ ID NO: 805892 - DNA, 15 bp, Homo sapiens
catggggaaaaggga

SEQ ID NO: 805893 - DNA, 15 bp, Homo sapiens
atggggaaaagggag

SEQ ID NO: 805894 - DNA, 15 bp, Homo sapiens
tggggaaaagggagc

SEQ ID NO: 805895 - DNA, 15 bp, Homo sapiens
ggggaaaagggagca

SEQ ID NO: 805896 - DNA, 15 bp, Homo sapiens
gggaaaagggagcat

SEQ ID NO: 805897 - DNA, 15 bp, Homo sapiens
ggaaaagggagcatt

SEQ ID NO: 805898 - DNA, 15 bp, Homo sapiens
gaaaagggagcattt

SEQ ID NO: 805899 - DNA, 15 bp, Homo sapiens
aaaagggagcattta

SEQ ID NO: 805900 - DNA, 15 bp, Homo sapiens
aaagggagcatttat

SEQ ID NO: 805901 - DNA, 15 bp, Homo sapiens
aagggagcatttatg

SEQ ID NO: 805902 - DNA, 15 bp, Homo sapiens
agggagcatttatgg

SEQ ID NO: 805903 - DNA, 15 bp, Homo sapiens
gggagcatttatgga

SEQ ID NO: 805904 - DNA, 15 bp, Homo sapiens
ggagcatttatggac

SEQ ID NO: 805905 - DNA, 15 bp, Homo sapiens
gagcatttatggaca

SEQ ID NO: 805906 - DNA, 15 bp, Homo sapiens
agcatttatggacat

SEQ ID NO: 805907 - DNA, 15 bp, Homo sapiens
gcatttatggacatc

SEQ ID NO: 805908 - DNA, 15 bp, Homo sapiens
catttatggacatca

SEQ ID NO: 805909 - DNA, 15 bp, Homo sapiens
atttatggacatcaa

SEQ ID NO: 805910 - DNA, 15 bp, Homo sapiens
tttatggacatcaac

SEQ ID NO: 805911 - DNA, 15 bp, Homo sapiens
ttatggacatcaacc

SEQ ID NO: 805912 - DNA, 15 bp, Homo sapiens
tatggacatcaacca

SEQ ID NO: 805913 - DNA, 15 bp, Homo sapiens
atggacatcaaccag

SEQ ID NO: 805914 - DNA, 15 bp, Homo sapiens
tggacatcaaccagg

SEQ ID NO: 805915 - DNA, 15 bp, Homo sapiens
ggacatcaaccagga

SEQ ID NO: 805916 - DNA, 15 bp, Homo sapiens
gacatcaaccaggat

SEQ ID NO: 805917 - DNA, 15 bp, Homo sapiens
acatcaaccaggatg

SEQ ID NO: 805918 - DNA, 15 bp, Homo sapiens
catcaaccaggatga

SEQ ID NO: 805919 - DNA, 15 bp, Homo sapiens
atcaaccaggatgaa

SEQ ID NO: 805920 - DNA, 15 bp, Homo sapiens
tcaaccaggatgaag

SEQ ID NO: 805921 - DNA, 15 bp, Homo sapiens
caaccaggatgaagc

SEQ ID NO: 805922 - DNA, 15 bp, Homo sapiens
aaccaggatgaagct

SEQ ID NO: 805923 - DNA, 15 bp, Homo sapiens
accaggatgaagctt

SEQ ID NO: 805924 - DNA, 15 bp, Homo sapiens
ccaggatgaagcttt

SEQ ID NO: 805925 - DNA, 15 bp, Homo sapiens
caggatgaagctttc

SEQ ID NO: 805926 - DNA, 15 bp, Homo sapiens
aggatgaagctttcc

SEQ ID NO: 805927 - DNA, 15 bp, Homo sapiens
ggatgaagctttcct

SEQ ID NO: 805928 - DNA, 15 bp, Homo sapiens
gatgaagctttcctc

SEQ ID NO: 805929 - DNA, 15 bp, Homo sapiens
atgaagctttcctcc

SEQ ID NO: 805930 - DNA, 15 bp, Homo sapiens
tgaagctttcctcct

SEQ ID NO: 805931 - DNA, 15 bp, Homo sapiens
gaagctttcctcctg

SEQ ID NO: 805932 - DNA, 15 bp, Homo sapiens
aagctttcctcctga

SEQ ID NO: 805933 - DNA, 15 bp, Homo sapiens
agctttcctcctgat

SEQ ID NO: 805934 - DNA, 15 bp, Homo sapiens
gctttcctcctgatt

SEQ ID NO: 805935 - DNA, 15 bp, Homo sapiens
ctttcctcctgattt

SEQ ID NO: 805936 - DNA, 15 bp, Homo sapiens
tttcctcctgatttt

SEQ ID NO: 805937 - DNA, 15 bp, Homo sapiens
ttcctcctgattttc

SEQ ID NO: 805938 - DNA, 15 bp, Homo sapiens
tcctcctgattttca

SEQ ID NO: 805939 - DNA, 15 bp, Homo sapiens
cctcctgattttcag

SEQ ID NO: 805940 - DNA, 15 bp, Homo sapiens
ctcctgattttcaga

SEQ ID NO: 805941 - DNA, 15 bp, Homo sapiens
tcctgattttcagag

SEQ ID NO: 805942 - DNA, 15 bp, Homo sapiens
cctgattttcagagg

SEQ ID NO: 805943 - DNA, 15 bp, Homo sapiens
ctgattttcagaggc

SEQ ID NO: 805944 - DNA, 15 bp, Homo sapiens
tgattttcagaggct

SEQ ID NO: 805945 - DNA, 15 bp, Homo sapiens
gattttcagaggctt

SEQ ID NO: 805946 - DNA, 15 bp, Homo sapiens
attttcagaggcttc

SEQ ID NO: 805947 - DNA, 15 bp, Homo sapiens
ttttcagaggcttca

SEQ ID NO: 805948 - DNA, 15 bp, Homo sapiens
tttcagaggcttcac

SEQ ID NO: 805949 - DNA, 15 bp, Homo sapiens
ttcagaggcttcact

SEQ ID NO: 805950 - DNA, 15 bp, Homo sapiens
tcagaggcttcactt

SEQ ID NO: 805951 - DNA, 15 bp, Homo sapiens
cagaggcttcacttt

SEQ ID NO: 805952 - DNA, 15 bp, Homo sapiens
agaggcttcactttt

SEQ ID NO: 805953 - DNA, 15 bp, Homo sapiens
gaggcttcacttttg

SEQ ID NO: 805954 - DNA, 15 bp, Homo sapiens
aggcttcacttttgt

SEQ ID NO: 805955 - DNA, 15 bp, Homo sapiens
ggcttcacttttgtg

SEQ ID NO: 805956 - DNA, 15 bp, Homo sapiens
gcttcacttttgtgc

SEQ ID NO: 805957 - DNA, 15 bp, Homo sapiens
cttcacttttgtgct

SEQ ID NO: 805958 - DNA, 15 bp, Homo sapiens
ttcacttttgtgctt

SEQ ID NO: 805959 - DNA, 15 bp, Homo sapiens
tcacttttgtgcttt

SEQ ID NO: 805960 - DNA, 15 bp, Homo sapiens
cacttttgtgctttt

SEQ ID NO: 805961 - DNA, 15 bp, Homo sapiens
acttttgtgcttttt

SEQ ID NO: 805962 - DNA, 15 bp, Homo sapiens
cttttgtgcttttta

SEQ ID NO: 805963 - DNA, 15 bp, Homo sapiens
ttttgtgctttttat

SEQ ID NO: 805964 - DNA, 15 bp, Homo sapiens
tttgtgctttttatc

SEQ ID NO: 805965 - DNA, 15 bp, Homo sapiens
ttgtgctttttatcc

SEQ ID NO: 805966 - DNA, 15 bp, Homo sapiens
tgtgctttttatcca

SEQ ID NO: 805967 - DNA, 15 bp, Homo sapiens
gtgctttttatccaa

SEQ ID NO: 805968 - DNA, 15 bp, Homo sapiens
tgctttttatccaag

SEQ ID NO: 805969 - DNA, 15 bp, Homo sapiens
gctttttatccaagt

SEQ ID NO: 805970 - DNA, 15 bp, Homo sapiens
ctttttatccaagtc

SEQ ID NO: 805971 - DNA, 15 bp, Homo sapiens
tttttatccaagtca

SEQ ID NO: 805972 - DNA, 15 bp, Homo sapiens
ttttatccaagtcag

SEQ ID NO: 805973 - DNA, 15 bp, Homo sapiens
tttatccaagtcagg

SEQ ID NO: 805974 - DNA, 15 bp, Homo sapiens
ttatccaagtcaggt

SEQ ID NO: 805975 - DNA, 15 bp, Homo sapiens
tatccaagtcaggtt

SEQ ID NO: 805976 - DNA, 15 bp, Homo sapiens
atccaagtcaggtta

SEQ ID NO: 805977 - DNA, 15 bp, Homo sapiens
tccaagtcaggttag

SEQ ID NO: 805978 - DNA, 15 bp, Homo sapiens
ccaagtcaggttagt

SEQ ID NO: 805979 - DNA, 15 bp, Homo sapiens
caagtcaggttagtg

SEQ ID NO: 805980 - DNA, 15 bp, Homo sapiens
aagtcaggttagtgc

SEQ ID NO: 805981 - DNA, 15 bp, Homo sapiens
agtcaggttagtgcc

SEQ ID NO: 805982 - DNA, 15 bp, Homo sapiens
gtcaggttagtgccc

SEQ ID NO: 805983 - DNA, 15 bp, Homo sapiens
tcaggttagtgccca

SEQ ID NO: 805984 - DNA, 15 bp, Homo sapiens
caggttagtgcccaa

SEQ ID NO: 805985 - DNA, 15 bp, Homo sapiens
aggttagtgcccaaa

SEQ ID NO: 805986 - DNA, 15 bp, Homo sapiens
ggttagtgcccaaaa

SEQ ID NO: 805987 - DNA, 15 bp, Homo sapiens
gttagtgcccaaaac

SEQ ID NO: 805988 - DNA, 15 bp, Homo sapiens
ttagtgcccaaaaca

SEQ ID NO: 805989 - DNA, 15 bp, Homo sapiens
tagtgcccaaaacaa

SEQ ID NO: 805990 - DNA, 15 bp, Homo sapiens
agtgcccaaaacaaa

SEQ ID NO: 805991 - DNA, 15 bp, Homo sapiens
gtgcccaaaacaaag

SEQ ID NO: 805992 - DNA, 15 bp, Homo sapiens
tgcccaaaacaaagc

SEQ ID NO: 805993 - DNA, 15 bp, Homo sapiens
gcccaaaacaaagca

SEQ ID NO: 805994 - DNA, 15 bp, Homo sapiens
cccaaaacaaagcaa

SEQ ID NO: 805995 - DNA, 15 bp, Homo sapiens
ccaaaacaaagcaaa

SEQ ID NO: 805996 - DNA, 15 bp, Homo sapiens
caaaacaaagcaaac

SEQ ID NO: 805997 - DNA, 15 bp, Homo sapiens
aaaacaaagcaaaca

SEQ ID NO: 805998 - DNA, 15 bp, Homo sapiens
aaacaaagcaaacaa

SEQ ID NO: 805999 - DNA, 15 bp, Homo sapiens
aacaaagcaaacaaa

SEQ ID NO: 806000 - DNA, 15 bp, Homo sapiens
acaaagcaaacaaat

SEQ ID NO: 806001 - DNA, 15 bp, Homo sapiens
caaagcaaacaaata

SEQ ID NO: 806002 - DNA, 15 bp, Homo sapiens
aaagcaaacaaataa

SEQ ID NO: 806003 - DNA, 15 bp, Homo sapiens
aagcaaacaaataaa

SEQ ID NO: 806004 - DNA, 15 bp, Homo sapiens
agcaaacaaataaag

SEQ ID NO: 806005 - DNA, 15 bp, Homo sapiens
gcaaacaaataaagg

SEQ ID NO: 806006 - DNA, 15 bp, Homo sapiens
caaacaaataaaggc

SEQ ID NO: 806007 - DNA, 15 bp, Homo sapiens
aaacaaataaaggcc

SEQ ID NO: 806008 - DNA, 15 bp, Homo sapiens
aacaaataaaggcct

SEQ ID NO: 806009 - DNA, 15 bp, Homo sapiens
acaaataaaggcctt

SEQ ID NO: 806010 - DNA, 15 bp, Homo sapiens
caaataaaggccttt

SEQ ID NO: 806011 - DNA, 15 bp, Homo sapiens
aaataaaggccttta

SEQ ID NO: 806012 - DNA, 15 bp, Homo sapiens
aataaaggcctttat

SEQ ID NO: 806013 - DNA, 15 bp, Homo sapiens
ataaaggcctttatt

SEQ ID NO: 806014 - DNA, 15 bp, Homo sapiens
taaaggcctttattt

SEQ ID NO: 806015 - DNA, 15 bp, Homo sapiens
aaaggcctttatttt

SEQ ID NO: 806016 - DNA, 15 bp, Homo sapiens
aaggcctttatttta

SEQ ID NO: 806017 - DNA, 15 bp, Homo sapiens
aggcctttattttaa

SEQ ID NO: 806018 - DNA, 15 bp, Homo sapiens
ggcctttattttaag

SEQ ID NO: 806019 - DNA, 15 bp, Homo sapiens
gcctttattttaagc

SEQ ID NO: 806020 - DNA, 15 bp, Homo sapiens
cctttattttaagcc

SEQ ID NO: 806021 - DNA, 15 bp, Homo sapiens
ctttattttaagcca

SEQ ID NO: 806022 - DNA, 15 bp, Homo sapiens
tttattttaagccaa

SEQ ID NO: 806023 - DNA, 15 bp, Homo sapiens
ttattttaagccaac

SEQ ID NO: 806024 - DNA, 15 bp, Homo sapiens
tattttaagccaacc

SEQ ID NO: 806025 - DNA, 15 bp, Homo sapiens
attttaagccaacct

SEQ ID NO: 806026 - DNA, 15 bp, Homo sapiens
ttttaagccaacctt

SEQ ID NO: 806027 - DNA, 15 bp, Homo sapiens
tttaagccaaccttg

SEQ ID NO: 806028 - DNA, 15 bp, Homo sapiens
ttaagccaaccttgt

SEQ ID NO: 806029 - DNA, 15 bp, Homo sapiens
taagccaaccttgta

SEQ ID NO: 806030 - DNA, 15 bp, Homo sapiens
aagccaaccttgtaa

SEQ ID NO: 806031 - DNA, 15 bp, Homo sapiens
agccaaccttgtaac

SEQ ID NO: 806032 - DNA, 15 bp, Homo sapiens
gccaaccttgtaaca

SEQ ID NO: 806033 - DNA, 15 bp, Homo sapiens
ccaaccttgtaacat

SEQ ID NO: 806034 - DNA, 15 bp, Homo sapiens
caaccttgtaacatc

SEQ ID NO: 806035 - DNA, 15 bp, Homo sapiens
aaccttgtaacatct

SEQ ID NO: 806036 - DNA, 15 bp, Homo sapiens
accttgtaacatctc

SEQ ID NO: 806037 - DNA, 15 bp, Homo sapiens
ccttgtaacatctcc

SEQ ID NO: 806038 - DNA, 15 bp, Homo sapiens
cttgtaacatctcca

SEQ ID NO: 806039 - DNA, 15 bp, Homo sapiens
ttgtaacatctccat

SEQ ID NO: 806040 - DNA, 15 bp, Homo sapiens
tgtaacatctccatt

SEQ ID NO: 806041 - DNA, 15 bp, Homo sapiens
gtaacatctccattc

SEQ ID NO: 806042 - DNA, 15 bp, Homo sapiens
taacatctccattca

SEQ ID NO: 806043 - DNA, 15 bp, Homo sapiens
aacatctccattcat

SEQ ID NO: 806044 - DNA, 15 bp, Homo sapiens
acatctccattcatt

SEQ ID NO: 806045 - DNA, 15 bp, Homo sapiens
catctccattcattc

SEQ ID NO: 806046 - DNA, 15 bp, Homo sapiens
atctccattcattct

SEQ ID NO: 806047 - DNA, 15 bp, Homo sapiens
tctccattcattcta

SEQ ID NO: 806048 - DNA, 15 bp, Homo sapiens
ctccattcattctac

SEQ ID NO: 806049 - DNA, 15 bp, Homo sapiens
tccattcattctaca

SEQ ID NO: 806050 - DNA, 15 bp, Homo sapiens
ccattcattctacag

SEQ ID NO: 806051 - DNA, 15 bp, Homo sapiens
cattcattctacagc

SEQ ID NO: 806052 - DNA, 15 bp, Homo sapiens
attcattctacagct

SEQ ID NO: 806053 - DNA, 15 bp, Homo sapiens
ttcattctacagctc

SEQ ID NO: 806054 - DNA, 15 bp, Homo sapiens
tcattctacagctca

SEQ ID NO: 806055 - DNA, 15 bp, Homo sapiens
cattctacagctcaa

SEQ ID NO: 806056 - DNA, 15 bp, Homo sapiens
attctacagctcaag

SEQ ID NO: 806057 - DNA, 15 bp, Homo sapiens
ttctacagctcaagg

SEQ ID NO: 806058 - DNA, 15 bp, Homo sapiens
tctacagctcaaggt

SEQ ID NO: 806059 - DNA, 15 bp, Homo sapiens
ctacagctcaaggtg

SEQ ID NO: 806060 - DNA, 15 bp, Homo sapiens
tacagctcaaggtga

SEQ ID NO: 806061 - DNA, 15 bp, Homo sapiens
acagctcaaggtgag

SEQ ID NO: 806062 - DNA, 15 bp, Homo sapiens
cagctcaaggtgagg

SEQ ID NO: 806063 - DNA, 15 bp, Homo sapiens
agctcaaggtgaggc

SEQ ID NO: 806064 - DNA, 15 bp, Homo sapiens
gctcaaggtgaggct

SEQ ID NO: 806065 - DNA, 15 bp, Homo sapiens
ctcaaggtgaggctc

SEQ ID NO: 806066 - DNA, 15 bp, Homo sapiens
tcaaggtgaggctcc

SEQ ID NO: 806067 - DNA, 15 bp, Homo sapiens
caaggtgaggctccc

SEQ ID NO: 806068 - DNA, 15 bp, Homo sapiens
aaggtgaggctcccc

SEQ ID NO: 806069 - DNA, 15 bp, Homo sapiens
aggtgaggctccccg

SEQ ID NO: 806070 - DNA, 15 bp, Homo sapiens
ggtgaggctccccga

SEQ ID NO: 806071 - DNA, 15 bp, Homo sapiens
gtgaggctccccgag

SEQ ID NO: 806072 - DNA, 15 bp, Homo sapiens
tgaggctccccgagg

SEQ ID NO: 806073 - DNA, 15 bp, Homo sapiens
gaggctccccgagga

SEQ ID NO: 806074 - DNA, 15 bp, Homo sapiens
aggctccccgaggac

SEQ ID NO: 806075 - DNA, 15 bp, Homo sapiens
ggctccccgaggacc

SEQ ID NO: 806076 - DNA, 15 bp, Homo sapiens
gctccccgaggaccc

SEQ ID NO: 806077 - DNA, 15 bp, Homo sapiens
ctccccgaggacccc

SEQ ID NO: 806078 - DNA, 15 bp, Homo sapiens
tccccgaggacccca

SEQ ID NO: 806079 - DNA, 15 bp, Homo sapiens
ccccgaggaccccac

SEQ ID NO: 806080 - DNA, 15 bp, Homo sapiens
cccgaggaccccaca

SEQ ID NO: 806081 - DNA, 15 bp, Homo sapiens
ccgaggaccccacat

SEQ ID NO: 806082 - DNA, 15 bp, Homo sapiens
cgaggaccccacatt

SEQ ID NO: 806083 - DNA, 15 bp, Homo sapiens
gaggaccccacattt

SEQ ID NO: 806084 - DNA, 15 bp, Homo sapiens
aggaccccacatttt

SEQ ID NO: 806085 - DNA, 15 bp, Homo sapiens
ggaccccacatttta

SEQ ID NO: 806086 - DNA, 15 bp, Homo sapiens
gaccccacattttag

SEQ ID NO: 806087 - DNA, 15 bp, Homo sapiens
accccacattttagt

SEQ ID NO: 806088 - DNA, 15 bp, Homo sapiens
ccccacattttagtg

SEQ ID NO: 806089 - DNA, 15 bp, Homo sapiens
cccacattttagtgt

SEQ ID NO: 806090 - DNA, 15 bp, Homo sapiens
ccacattttagtgtg

SEQ ID NO: 806091 - DNA, 15 bp, Homo sapiens
cacattttagtgtgt

SEQ ID NO: 806092 - DNA, 15 bp, Homo sapiens
acattttagtgtgtg

SEQ ID NO: 806093 - DNA, 15 bp, Homo sapiens
cattttagtgtgtgt

SEQ ID NO: 806094 - DNA, 15 bp, Homo sapiens
attttagtgtgtgtg

SEQ ID NO: 806095 - DNA, 15 bp, Homo sapiens
ttttagtgtgtgtgc

SEQ ID NO: 806096 - DNA, 15 bp, Homo sapiens
tttagtgtgtgtgca

SEQ ID NO: 806097 - DNA, 15 bp, Homo sapiens
ttagtgtgtgtgcat

SEQ ID NO: 806098 - DNA, 15 bp, Homo sapiens
tagtgtgtgtgcatc

SEQ ID NO: 806099 - DNA, 15 bp, Homo sapiens
agtgtgtgtgcatca

SEQ ID NO: 806100 - DNA, 15 bp, Homo sapiens
gtgtgtgtgcatcac

SEQ ID NO: 806101 - DNA, 15 bp, Homo sapiens
tgtgtgtgcatcacc

SEQ ID NO: 806102 - DNA, 15 bp, Homo sapiens
gtgtgtgcatcaccc

SEQ ID NO: 806103 - DNA, 15 bp, Homo sapiens
tgtgtgcatcaccca

SEQ ID NO: 806104 - DNA, 15 bp, Homo sapiens
gtgtgcatcacccag

SEQ ID NO: 806105 - DNA, 15 bp, Homo sapiens
tgtgcatcacccaga

SEQ ID NO: 806106 - DNA, 15 bp, Homo sapiens
gtgcatcacccagag

SEQ ID NO: 806107 - DNA, 15 bp, Homo sapiens
tgcatcacccagagt

SEQ ID NO: 806108 - DNA, 15 bp, Homo sapiens
gcatcacccagagta

SEQ ID NO: 806109 - DNA, 15 bp, Homo sapiens
catcacccagagtac

SEQ ID NO: 806110 - DNA, 15 bp, Homo sapiens
atcacccagagtaca

SEQ ID NO: 806111 - DNA, 15 bp, Homo sapiens
tcacccagagtacag

SEQ ID NO: 806112 - DNA, 15 bp, Homo sapiens
cacccagagtacaga

SEQ ID NO: 806113 - DNA, 15 bp, Homo sapiens
acccagagtacagac

SEQ ID NO: 806114 - DNA, 15 bp, Homo sapiens
cccagagtacagact

SEQ ID NO: 806115 - DNA, 15 bp, Homo sapiens
ccagagtacagactt

SEQ ID NO: 806116 - DNA, 15 bp, Homo sapiens
cagagtacagacttt

SEQ ID NO: 806117 - DNA, 15 bp, Homo sapiens
agagtacagactttg

SEQ ID NO: 806118 - DNA, 15 bp, Homo sapiens
gagtacagactttga

SEQ ID NO: 806119 - DNA, 15 bp, Homo sapiens
agtacagactttgag

SEQ ID NO: 806120 - DNA, 15 bp, Homo sapiens
gtacagactttgagc

SEQ ID NO: 806121 - DNA, 15 bp, Homo sapiens
tacagactttgagcg

SEQ ID NO: 806122 - DNA, 15 bp, Homo sapiens
acagactttgagcga

SEQ ID NO: 806123 - DNA, 15 bp, Homo sapiens
cagactttgagcgat

SEQ ID NO: 806124 - DNA, 15 bp, Homo sapiens
agactttgagcgatg

SEQ ID NO: 806125 - DNA, 15 bp, Homo sapiens
gactttgagcgatgc

SEQ ID NO: 806126 - DNA, 15 bp, Homo sapiens
actttgagcgatgcc

SEQ ID NO: 806127 - DNA, 15 bp, Homo sapiens
ctttgagcgatgcct

SEQ ID NO: 806128 - DNA, 15 bp, Homo sapiens
tttgagcgatgcctg

SEQ ID NO: 806129 - DNA, 15 bp, Homo sapiens
ttgagcgatgcctgt

SEQ ID NO: 806130 - DNA, 15 bp, Homo sapiens
tgagcgatgcctgtt

SEQ ID NO: 806131 - DNA, 15 bp, Homo sapiens
gagcgatgcctgtta

SEQ ID NO: 806132 - DNA, 15 bp, Homo sapiens
agcgatgcctgttat

SEQ ID NO: 806133 - DNA, 15 bp, Homo sapiens
gcgatgcctgttatc

SEQ ID NO: 806134 - DNA, 15 bp, Homo sapiens
cgatgcctgttatct

SEQ ID NO: 806135 - DNA, 15 bp, Homo sapiens
gatgcctgttatcta

SEQ ID NO: 806136 - DNA, 15 bp, Homo sapiens
atgcctgttatctag

SEQ ID NO: 806137 - DNA, 15 bp, Homo sapiens
tgcctgttatctagc

SEQ ID NO: 806138 - DNA, 15 bp, Homo sapiens
gcctgttatctagct

SEQ ID NO: 806139 - DNA, 15 bp, Homo sapiens
cctgttatctagctg

SEQ ID NO: 806140 - DNA, 15 bp, Homo sapiens
ctgttatctagctgc

SEQ ID NO: 806141 - DNA, 15 bp, Homo sapiens
tgttatctagctgcg

SEQ ID NO: 806142 - DNA, 15 bp, Homo sapiens
gttatctagctgcgc

SEQ ID NO: 806143 - DNA, 15 bp, Homo sapiens
ttatctagctgcgct

SEQ ID NO: 806144 - DNA, 15 bp, Homo sapiens
tatctagctgcgctg

SEQ ID NO: 806145 - DNA, 15 bp, Homo sapiens
atctagctgcgctgg

SEQ ID NO: 806146 - DNA, 15 bp, Homo sapiens
tctagctgcgctggc

SEQ ID NO: 806147 - DNA, 15 bp, Homo sapiens
ctagctgcgctggct

SEQ ID NO: 806148 - DNA, 15 bp, Homo sapiens
tagctgcgctggctc

SEQ ID NO: 806149 - DNA, 15 bp, Homo sapiens
agctgcgctggctca

SEQ ID NO: 806150 - DNA, 15 bp, Homo sapiens
gctgcgctggctcat

SEQ ID NO: 806151 - DNA, 15 bp, Homo sapiens
ctgcgctggctcatg

SEQ ID NO: 806152 - DNA, 15 bp, Homo sapiens
tgcgctggctcatgt

SEQ ID NO: 806153 - DNA, 15 bp, Homo sapiens
gcgctggctcatgtt

SEQ ID NO: 806154 - DNA, 15 bp, Homo sapiens
cgctggctcatgttc

SEQ ID NO: 806155 - DNA, 15 bp, Homo sapiens
gctggctcatgttca

SEQ ID NO: 806156 - DNA, 15 bp, Homo sapiens
ctggctcatgttcag

SEQ ID NO: 806157 - DNA, 15 bp, Homo sapiens
tggctcatgttcagc

SEQ ID NO: 806158 - DNA, 15 bp, Homo sapiens
ggctcatgttcagca

SEQ ID NO: 806159 - DNA, 15 bp, Homo sapiens
gctcatgttcagcag

SEQ ID NO: 806160 - DNA, 15 bp, Homo sapiens
ctcatgttcagcagt

SEQ ID NO: 806161 - DNA, 15 bp, Homo sapiens
tcatgttcagcagtt

SEQ ID NO: 806162 - DNA, 15 bp, Homo sapiens
catgttcagcagttg

SEQ ID NO: 806163 - DNA, 15 bp, Homo sapiens
atgttcagcagttgc

SEQ ID NO: 806164 - DNA, 15 bp, Homo sapiens
tgttcagcagttgca

SEQ ID NO: 806165 - DNA, 15 bp, Homo sapiens
gttcagcagttgcaa

SEQ ID NO: 806166 - DNA, 15 bp, Homo sapiens
ttcagcagttgcaac

SEQ ID NO: 806167 - DNA, 15 bp, Homo sapiens
tcagcagttgcaaca

SEQ ID NO: 806168 - DNA, 15 bp, Homo sapiens
cagcagttgcaacag

SEQ ID NO: 806169 - DNA, 15 bp, Homo sapiens
agcagttgcaacagc

SEQ ID NO: 806170 - DNA, 15 bp, Homo sapiens
gcagttgcaacagct

SEQ ID NO: 806171 - DNA, 15 bp, Homo sapiens
cagttgcaacagctc

SEQ ID NO: 806172 - DNA, 15 bp, Homo sapiens
agttgcaacagctcc

SEQ ID NO: 806173 - DNA, 15 bp, Homo sapiens
gttgcaacagctcca

SEQ ID NO: 806174 - DNA, 15 bp, Homo sapiens
ttgcaacagctccat

SEQ ID NO: 806175 - DNA, 15 bp, Homo sapiens
tgcaacagctccatg

SEQ ID NO: 806176 - DNA, 15 bp, Homo sapiens
gcaacagctccatgg

SEQ ID NO: 806177 - DNA, 15 bp, Homo sapiens
caacagctccatggc

SEQ ID NO: 806178 - DNA, 15 bp, Homo sapiens
aacagctccatggct

SEQ ID NO: 806179 - DNA, 15 bp, Homo sapiens
acagctccatggctg

SEQ ID NO: 806180 - DNA, 15 bp, Homo sapiens
cagctccatggctgc

SEQ ID NO: 806181 - DNA, 15 bp, Homo sapiens
agctccatggctgca

SEQ ID NO: 806182 - DNA, 15 bp, Homo sapiens
gctccatggctgcaa

SEQ ID NO: 806183 - DNA, 15 bp, Homo sapiens
ctccatggctgcaat

SEQ ID NO: 806184 - DNA, 15 bp, Homo sapiens
tccatggctgcaatg

SEQ ID NO: 806185 - DNA, 15 bp, Homo sapiens
ccatggctgcaatgg

SEQ ID NO: 806186 - DNA, 15 bp, Homo sapiens
catggctgcaatggc

SEQ ID NO: 806187 - DNA, 15 bp, Homo sapiens
atggctgcaatggct

SEQ ID NO: 806188 - DNA, 15 bp, Homo sapiens
tggctgcaatggctc

SEQ ID NO: 806189 - DNA, 15 bp, Homo sapiens
ggctgcaatggctca

SEQ ID NO: 806190 - DNA, 15 bp, Homo sapiens
gctgcaatggctcaa

SEQ ID NO: 806191 - DNA, 15 bp, Homo sapiens
ctgcaatggctcaat

SEQ ID NO: 806192 - DNA, 15 bp, Homo sapiens
tgcaatggctcaata

SEQ ID NO: 806193 - DNA, 15 bp, Homo sapiens
gcaatggctcaatat

SEQ ID NO: 806194 - DNA, 15 bp, Homo sapiens
caatggctcaatatc

SEQ ID NO: 806195 - DNA, 15 bp, Homo sapiens
aatggctcaatatca

SEQ ID NO: 806196 - DNA, 15 bp, Homo sapiens
atggctcaatatcag

SEQ ID NO: 806197 - DNA, 15 bp, Homo sapiens
tggctcaatatcagc

SEQ ID NO: 806198 - DNA, 15 bp, Homo sapiens
ggctcaatatcagca

SEQ ID NO: 806199 - DNA, 15 bp, Homo sapiens
gctcaatatcagcag

SEQ ID NO: 806200 - DNA, 15 bp, Homo sapiens
ctcaatatcagcagt

SEQ ID NO: 806201 - DNA, 15 bp, Homo sapiens
tcaatatcagcagtt

SEQ ID NO: 806202 - DNA, 15 bp, Homo sapiens
caatatcagcagttc

SEQ ID NO: 806203 - DNA, 15 bp, Homo sapiens
aatatcagcagttcc

SEQ ID NO: 806204 - DNA, 15 bp, Homo sapiens
atatcagcagttcct

SEQ ID NO: 806205 - DNA, 15 bp, Homo sapiens
tatcagcagttcctt

SEQ ID NO: 806206 - DNA, 15 bp, Homo sapiens
atcagcagttccttc

SEQ ID NO: 806207 - DNA, 15 bp, Homo sapiens
tcagcagttccttcc

SEQ ID NO: 806208 - DNA, 15 bp, Homo sapiens
cagcagttccttccc

SEQ ID NO: 806209 - DNA, 15 bp, Homo sapiens
agcagttccttcccc

SEQ ID NO: 806210 - DNA, 15 bp, Homo sapiens
gcagttccttcccca

SEQ ID NO: 806211 - DNA, 15 bp, Homo sapiens
cagttccttccccac

SEQ ID NO: 806212 - DNA, 15 bp, Homo sapiens
agttccttccccact

SEQ ID NO: 806213 - DNA, 15 bp, Homo sapiens
gttccttccccactc

SEQ ID NO: 806214 - DNA, 15 bp, Homo sapiens
ttccttccccactca

SEQ ID NO: 806215 - DNA, 15 bp, Homo sapiens
tccttccccactcaa

SEQ ID NO: 806216 - DNA, 15 bp, Homo sapiens
ccttccccactcaac

SEQ ID NO: 806217 - DNA, 15 bp, Homo sapiens
cttccccactcaacc

SEQ ID NO: 806218 - DNA, 15 bp, Homo sapiens
ttccccactcaacca

SEQ ID NO: 806219 - DNA, 15 bp, Homo sapiens
tccccactcaaccac

SEQ ID NO: 806220 - DNA, 15 bp, Homo sapiens
ccccactcaaccaca

SEQ ID NO: 806221 - DNA, 15 bp, Homo sapiens
cccactcaaccacaa

SEQ ID NO: 806222 - DNA, 15 bp, Homo sapiens
ccactcaaccacaac

SEQ ID NO: 806223 - DNA, 15 bp, Homo sapiens
cactcaaccacaact

SEQ ID NO: 806224 - DNA, 15 bp, Homo sapiens
actcaaccacaactt

SEQ ID NO: 806225 - DNA, 15 bp, Homo sapiens
ctcaaccacaacttc

SEQ ID NO: 806226 - DNA, 15 bp, Homo sapiens
tcaaccacaacttca

SEQ ID NO: 806227 - DNA, 15 bp, Homo sapiens
caaccacaacttcaa

SEQ ID NO: 806228 - DNA, 15 bp, Homo sapiens
aaccacaacttcaac

SEQ ID NO: 806229 - DNA, 15 bp, Homo sapiens
accacaacttcaaca

SEQ ID NO: 806230 - DNA, 15 bp, Homo sapiens
ccacaacttcaacag

SEQ ID NO: 806231 - DNA, 15 bp, Homo sapiens
cacaacttcaacagt

SEQ ID NO: 806232 - DNA, 15 bp, Homo sapiens
acaacttcaacagtt

SEQ ID NO: 806233 - DNA, 15 bp, Homo sapiens
caacttcaacagttc

SEQ ID NO: 806234 - DNA, 15 bp, Homo sapiens
aacttcaacagttct

SEQ ID NO: 806235 - DNA, 15 bp, Homo sapiens
acttcaacagttcta

SEQ ID NO: 806236 - DNA, 15 bp, Homo sapiens
cttcaacagttctaa

SEQ ID NO: 806237 - DNA, 15 bp, Homo sapiens
ttcaacagttctaaa

SEQ ID NO: 806238 - DNA, 15 bp, Homo sapiens
tcaacagttctaaat

SEQ ID NO: 806239 - DNA, 15 bp, Homo sapiens
caacagttctaaatc

SEQ ID NO: 806240 - DNA, 15 bp, Homo sapiens
aacagttctaaatct

SEQ ID NO: 806241 - DNA, 15 bp, Homo sapiens
acagttctaaatctg

SEQ ID NO: 806242 - DNA, 15 bp, Homo sapiens
cagttctaaatctgt

SEQ ID NO: 806243 - DNA, 15 bp, Homo sapiens
agttctaaatctgtt

SEQ ID NO: 806244 - DNA, 15 bp, Homo sapiens
gttctaaatctgttt

SEQ ID NO: 806245 - DNA, 15 bp, Homo sapiens
ttctaaatctgtttt

SEQ ID NO: 806246 - DNA, 15 bp, Homo sapiens
tctaaatctgttttt

SEQ ID NO: 806247 - DNA, 15 bp, Homo sapiens
ctaaatctgtttttg

SEQ ID NO: 806248 - DNA, 15 bp, Homo sapiens
taaatctgtttttgg

SEQ ID NO: 806249 - DNA, 15 bp, Homo sapiens
aaatctgtttttggc

SEQ ID NO: 806250 - DNA, 15 bp, Homo sapiens
aatctgtttttggcc

SEQ ID NO: 806251 - DNA, 15 bp, Homo sapiens
atctgtttttggcca

SEQ ID NO: 806252 - DNA, 15 bp, Homo sapiens
tctgtttttggccaa

SEQ ID NO: 806253 - DNA, 15 bp, Homo sapiens
ctgtttttggccaag

SEQ ID NO: 806254 - DNA, 15 bp, Homo sapiens
tgtttttggccaagt

SEQ ID NO: 806255 - DNA, 15 bp, Homo sapiens
gtttttggccaagtc

SEQ ID NO: 806256 - DNA, 15 bp, Homo sapiens
tttttggccaagtct

SEQ ID NO: 806257 - DNA, 15 bp, Homo sapiens
ttttggccaagtctt

SEQ ID NO: 806258 - DNA, 15 bp, Homo sapiens
tttggccaagtcttc

SEQ ID NO: 806259 - DNA, 15 bp, Homo sapiens
ttggccaagtcttca

SEQ ID NO: 806260 - DNA, 15 bp, Homo sapiens
tggccaagtcttcag

SEQ ID NO: 806261 - DNA, 15 bp, Homo sapiens
ggccaagtcttcagg

SEQ ID NO: 806262 - DNA, 15 bp, Homo sapiens
gccaagtcttcagga

SEQ ID NO: 806263 - DNA, 15 bp, Homo sapiens
ccaagtcttcaggat

SEQ ID NO: 806264 - DNA, 15 bp, Homo sapiens
caagtcttcaggata

SEQ ID NO: 806265 - DNA, 15 bp, Homo sapiens
aagtcttcaggatat

SEQ ID NO: 806266 - DNA, 15 bp, Homo sapiens
agtcttcaggatata

SEQ ID NO: 806267 - DNA, 15 bp, Homo sapiens
gtcttcaggatataa

SEQ ID NO: 806268 - DNA, 15 bp, Homo sapiens
tcttcaggatataac

SEQ ID NO: 806269 - DNA, 15 bp, Homo sapiens
cttcaggatataact

SEQ ID NO: 806270 - DNA, 15 bp, Homo sapiens
ttcaggatataactt

SEQ ID NO: 806271 - DNA, 15 bp, Homo sapiens
tcaggatataacttt

SEQ ID NO: 806272 - DNA, 15 bp, Homo sapiens
caggatataactttg

SEQ ID NO: 806273 - DNA, 15 bp, Homo sapiens
aggatataactttgc

SEQ ID NO: 806274 - DNA, 15 bp, Homo sapiens
ggatataactttgcc

SEQ ID NO: 806275 - DNA, 15 bp, Homo sapiens
gatataactttgcca

SEQ ID NO: 806276 - DNA, 15 bp, Homo sapiens
atataactttgccag

SEQ ID NO: 806277 - DNA, 15 bp, Homo sapiens
tataactttgccagc

SEQ ID NO: 806278 - DNA, 15 bp, Homo sapiens
ataactttgccagca

SEQ ID NO: 806279 - DNA, 15 bp, Homo sapiens
taactttgccagcaa

SEQ ID NO: 806280 - DNA, 15 bp, Homo sapiens
aactttgccagcaat

SEQ ID NO: 806281 - DNA, 15 bp, Homo sapiens
actttgccagcaata

SEQ ID NO: 806282 - DNA, 15 bp, Homo sapiens
ctttgccagcaatat

SEQ ID NO: 806283 - DNA, 15 bp, Homo sapiens
tttgccagcaatatc

SEQ ID NO: 806284 - DNA, 15 bp, Homo sapiens
ttgccagcaatatca

SEQ ID NO: 806285 - DNA, 15 bp, Homo sapiens
tgccagcaatatcac

SEQ ID NO: 806286 - DNA, 15 bp, Homo sapiens
gccagcaatatcacc

SEQ ID NO: 806287 - DNA, 15 bp, Homo sapiens
ccagcaatatcacct

SEQ ID NO: 806288 - DNA, 15 bp, Homo sapiens
cagcaatatcacctt

SEQ ID NO: 806289 - DNA, 15 bp, Homo sapiens
agcaatatcaccttg

SEQ ID NO: 806290 - DNA, 15 bp, Homo sapiens
gcaatatcaccttgt

SEQ ID NO: 806291 - DNA, 15 bp, Homo sapiens
caatatcaccttgtt

SEQ ID NO: 806292 - DNA, 15 bp, Homo sapiens
aatatcaccttgttt

SEQ ID NO: 806293 - DNA, 15 bp, Homo sapiens
atatcaccttgttta

SEQ ID NO: 806294 - DNA, 15 bp, Homo sapiens
tatcaccttgtttat

SEQ ID NO: 806295 - DNA, 15 bp, Homo sapiens
atcaccttgtttatt

SEQ ID NO: 806296 - DNA, 15 bp, Homo sapiens
tcaccttgtttatta

SEQ ID NO: 806297 - DNA, 15 bp, Homo sapiens
caccttgtttattaa

SEQ ID NO: 806298 - DNA, 15 bp, Homo sapiens
accttgtttattaag

SEQ ID NO: 806299 - DNA, 15 bp, Homo sapiens
ccttgtttattaagc

SEQ ID NO: 806300 - DNA, 15 bp, Homo sapiens
cttgtttattaagcc

SEQ ID NO: 806301 - DNA, 15 bp, Homo sapiens
ttgtttattaagccc

SEQ ID NO: 806302 - DNA, 15 bp, Homo sapiens
tgtttattaagccct

SEQ ID NO: 806303 - DNA, 15 bp, Homo sapiens
gtttattaagcccta

SEQ ID NO: 806304 - DNA, 15 bp, Homo sapiens
tttattaagccctat

SEQ ID NO: 806305 - DNA, 15 bp, Homo sapiens
ttattaagccctatc

SEQ ID NO: 806306 - DNA, 15 bp, Homo sapiens
tattaagccctatct

SEQ ID NO: 806307 - DNA, 15 bp, Homo sapiens
attaagccctatctt

SEQ ID NO: 806308 - DNA, 15 bp, Homo sapiens
ttaagccctatcttc

SEQ ID NO: 806309 - DNA, 15 bp, Homo sapiens
taagccctatcttcc

SEQ ID NO: 806310 - DNA, 15 bp, Homo sapiens
aagccctatcttcca

SEQ ID NO: 806311 - DNA, 15 bp, Homo sapiens
agccctatcttccac

SEQ ID NO: 806312 - DNA, 15 bp, Homo sapiens
gccctatcttccacc

SEQ ID NO: 806313 - DNA, 15 bp, Homo sapiens
ccctatcttccacca

SEQ ID NO: 806314 - DNA, 15 bp, Homo sapiens
cctatcttccaccac

SEQ ID NO: 806315 - DNA, 15 bp, Homo sapiens
ctatcttccaccacc

SEQ ID NO: 806316 - DNA, 15 bp, Homo sapiens
tatcttccaccacct

SEQ ID NO: 806317 - DNA, 15 bp, Homo sapiens
atcttccaccacctg

SEQ ID NO: 806318 - DNA, 15 bp, Homo sapiens
tcttccaccacctgt

SEQ ID NO: 806319 - DNA, 15 bp, Homo sapiens
cttccaccacctgtc

SEQ ID NO: 806320 - DNA, 15 bp, Homo sapiens
ttccaccacctgtca

SEQ ID NO: 806321 - DNA, 15 bp, Homo sapiens
tccaccacctgtcag

SEQ ID NO: 806322 - DNA, 15 bp, Homo sapiens
ccaccacctgtcaga

SEQ ID NO: 806323 - DNA, 15 bp, Homo sapiens
caccacctgtcagaa

SEQ ID NO: 806324 - DNA, 15 bp, Homo sapiens
accacctgtcagaat

SEQ ID NO: 806325 - DNA, 15 bp, Homo sapiens
ccacctgtcagaatc

SEQ ID NO: 806326 - DNA, 15 bp, Homo sapiens
cacctgtcagaatct

SEQ ID NO: 806327 - DNA, 15 bp, Homo sapiens
acctgtcagaatctc

SEQ ID NO: 806328 - DNA, 15 bp, Homo sapiens
cctgtcagaatctct

SEQ ID NO: 806329 - DNA, 15 bp, Homo sapiens
ctgtcagaatctctg

SEQ ID NO: 806330 - DNA, 15 bp, Homo sapiens
tgtcagaatctctgg

SEQ ID NO: 806331 - DNA, 15 bp, Homo sapiens
gtcagaatctctggt

SEQ ID NO: 806332 - DNA, 15 bp, Homo sapiens
tcagaatctctggtt

SEQ ID NO: 806333 - DNA, 15 bp, Homo sapiens
cagaatctctggttt

SEQ ID NO: 806334 - DNA, 15 bp, Homo sapiens
agaatctctggttta

SEQ ID NO: 806335 - DNA, 15 bp, Homo sapiens
gaatctctggtttat

SEQ ID NO: 806336 - DNA, 15 bp, Homo sapiens
aatctctggtttatc

SEQ ID NO: 806337 - DNA, 15 bp, Homo sapiens
atctctggtttatcg

SEQ ID NO: 806338 - DNA, 15 bp, Homo sapiens
tctctggtttatcga

SEQ ID NO: 806339 - DNA, 15 bp, Homo sapiens
ctctggtttatcgag

SEQ ID NO: 806340 - DNA, 15 bp, Homo sapiens
tctggtttatcgaga

SEQ ID NO: 806341 - DNA, 15 bp, Homo sapiens
ctggtttatcgagac

SEQ ID NO: 806342 - DNA, 15 bp, Homo sapiens
tggtttatcgagacc

SEQ ID NO: 806343 - DNA, 15 bp, Homo sapiens
ggtttatcgagacca

SEQ ID NO: 806344 - DNA, 15 bp, Homo sapiens
gtttatcgagaccac

SEQ ID NO: 806345 - DNA, 15 bp, Homo sapiens
tttatcgagaccact

SEQ ID NO: 806346 - DNA, 15 bp, Homo sapiens
ttatcgagaccactg

SEQ ID NO: 806347 - DNA, 15 bp, Homo sapiens
tatcgagaccactgt

SEQ ID NO: 806348 - DNA, 15 bp, Homo sapiens
atcgagaccactgta

SEQ ID NO: 806349 - DNA, 15 bp, Homo sapiens
tcgagaccactgtaa

SEQ ID NO: 806350 - DNA, 15 bp, Homo sapiens
cgagaccactgtaac

SEQ ID NO: 806351 - DNA, 15 bp, Homo sapiens
gagaccactgtaaca

SEQ ID NO: 806352 - DNA, 15 bp, Homo sapiens
agaccactgtaacac

SEQ ID NO: 806353 - DNA, 15 bp, Homo sapiens
gaccactgtaacact

SEQ ID NO: 806354 - DNA, 15 bp, Homo sapiens
accactgtaacactt

SEQ ID NO: 806355 - DNA, 15 bp, Homo sapiens
ccactgtaacacttt

SEQ ID NO: 806356 - DNA, 15 bp, Homo sapiens
cactgtaacacttta

SEQ ID NO: 806357 - DNA, 15 bp, Homo sapiens
actgtaacactttaa

SEQ ID NO: 806358 - DNA, 15 bp, Homo sapiens
ctgtaacactttaac

SEQ ID NO: 806359 - DNA, 15 bp, Homo sapiens
tgtaacactttaact

SEQ ID NO: 806360 - DNA, 15 bp, Homo sapiens
gtaacactttaactc

SEQ ID NO: 806361 - DNA, 15 bp, Homo sapiens
taacactttaactcc

SEQ ID NO: 806362 - DNA, 15 bp, Homo sapiens
aacactttaactcct

SEQ ID NO: 806363 - DNA, 15 bp, Homo sapiens
acactttaactcctc

SEQ ID NO: 806364 - DNA, 15 bp, Homo sapiens
cactttaactcctct

SEQ ID NO: 806365 - DNA, 15 bp, Homo sapiens
actttaactcctctt

SEQ ID NO: 806366 - DNA, 15 bp, Homo sapiens
ctttaactcctcttt

SEQ ID NO: 806367 - DNA, 15 bp, Homo sapiens
tttaactcctcttta

SEQ ID NO: 806368 - DNA, 15 bp, Homo sapiens
ttaactcctctttat

SEQ ID NO: 806369 - DNA, 15 bp, Homo sapiens
taactcctctttatg

SEQ ID NO: 806370 - DNA, 15 bp, Homo sapiens
aactcctctttatga

SEQ ID NO: 806371 - DNA, 15 bp, Homo sapiens
actcctctttatgaa

SEQ ID NO: 806372 - DNA, 15 bp, Homo sapiens
ctcctctttatgaag

SEQ ID NO: 806373 - DNA, 15 bp, Homo sapiens
tcctctttatgaagt

SEQ ID NO: 806374 - DNA, 15 bp, Homo sapiens
cctctttatgaagtt

SEQ ID NO: 806375 - DNA, 15 bp, Homo sapiens
ctctttatgaagttg

SEQ ID NO: 806376 - DNA, 15 bp, Homo sapiens
tctttatgaagttga

SEQ ID NO: 806377 - DNA, 15 bp, Homo sapiens
ctttatgaagttgag

SEQ ID NO: 806378 - DNA, 15 bp, Homo sapiens
tttatgaagttgagc

SEQ ID NO: 806379 - DNA, 15 bp, Homo sapiens
ttatgaagttgagca

SEQ ID NO: 806380 - DNA, 15 bp, Homo sapiens
tatgaagttgagcat

SEQ ID NO: 806381 - DNA, 15 bp, Homo sapiens
atgaagttgagcatt

SEQ ID NO: 806382 - DNA, 15 bp, Homo sapiens
tgaagttgagcatta

SEQ ID NO: 806383 - DNA, 15 bp, Homo sapiens
gaagttgagcattat

SEQ ID NO: 806384 - DNA, 15 bp, Homo sapiens
aagttgagcattata

SEQ ID NO: 806385 - DNA, 15 bp, Homo sapiens
agttgagcattatag

SEQ ID NO: 806386 - DNA, 15 bp, Homo sapiens
gttgagcattataga

SEQ ID NO: 806387 - DNA, 15 bp, Homo sapiens
ttgagcattatagac

SEQ ID NO: 806388 - DNA, 15 bp, Homo sapiens
tgagcattatagaca

SEQ ID NO: 806389 - DNA, 15 bp, Homo sapiens
gagcattatagacag

SEQ ID NO: 806390 - DNA, 15 bp, Homo sapiens
agcattatagacaga

SEQ ID NO: 806391 - DNA, 15 bp, Homo sapiens
gcattatagacagat

SEQ ID NO: 806392 - DNA, 15 bp, Homo sapiens
cattatagacagatg

SEQ ID NO: 806393 - DNA, 15 bp, Homo sapiens
attatagacagatgc

SEQ ID NO: 806394 - DNA, 15 bp, Homo sapiens
ttatagacagatgct

SEQ ID NO: 806395 - DNA, 15 bp, Homo sapiens
tatagacagatgctg

SEQ ID NO: 806396 - DNA, 15 bp, Homo sapiens
atagacagatgctgt

SEQ ID NO: 806397 - DNA, 15 bp, Homo sapiens
tagacagatgctgtg

SEQ ID NO: 806398 - DNA, 15 bp, Homo sapiens
agacagatgctgtgg

SEQ ID NO: 806399 - DNA, 15 bp, Homo sapiens
gacagatgctgtggt

SEQ ID NO: 806400 - DNA, 15 bp, Homo sapiens
acagatgctgtggtt

SEQ ID NO: 806401 - DNA, 15 bp, Homo sapiens
cagatgctgtggttt

SEQ ID NO: 806402 - DNA, 15 bp, Homo sapiens
agatgctgtggtttg

SEQ ID NO: 806403 - DNA, 15 bp, Homo sapiens
gatgctgtggtttgt

SEQ ID NO: 806404 - DNA, 15 bp, Homo sapiens
atgctgtggtttgtg

SEQ ID NO: 806405 - DNA, 15 bp, Homo sapiens
tgctgtggtttgtgg

SEQ ID NO: 806406 - DNA, 15 bp, Homo sapiens
gctgtggtttgtgga

SEQ ID NO: 806407 - DNA, 15 bp, Homo sapiens
ctgtggtttgtggag

SEQ ID NO: 806408 - DNA, 15 bp, Homo sapiens
tgtggtttgtggagc

SEQ ID NO: 806409 - DNA, 15 bp, Homo sapiens
gtggtttgtggagcc

SEQ ID NO: 806410 - DNA, 15 bp, Homo sapiens
tggtttgtggagcct

SEQ ID NO: 806411 - DNA, 15 bp, Homo sapiens
ggtttgtggagcctt

SEQ ID NO: 806412 - DNA, 15 bp, Homo sapiens
gtttgtggagccttg

SEQ ID NO: 806413 - DNA, 15 bp, Homo sapiens
tttgtggagccttgg

SEQ ID NO: 806414 - DNA, 15 bp, Homo sapiens
ttgtggagccttggt

SEQ ID NO: 806415 - DNA, 15 bp, Homo sapiens
tgtggagccttggta

SEQ ID NO: 806416 - DNA, 15 bp, Homo sapiens
gtggagccttggtag

SEQ ID NO: 806417 - DNA, 15 bp, Homo sapiens
tggagccttggtagt

SEQ ID NO: 806418 - DNA, 15 bp, Homo sapiens
ggagccttggtagtc

SEQ ID NO: 806419 - DNA, 15 bp, Homo sapiens
gagccttggtagtct

SEQ ID NO: 806420 - DNA, 15 bp, Homo sapiens
agccttggtagtctc

SEQ ID NO: 806421 - DNA, 15 bp, Homo sapiens
gccttggtagtctct

SEQ ID NO: 806422 - DNA, 15 bp, Homo sapiens
ccttggtagtctctg

SEQ ID NO: 806423 - DNA, 15 bp, Homo sapiens
cttggtagtctctga

SEQ ID NO: 806424 - DNA, 15 bp, Homo sapiens
ttggtagtctctgat

SEQ ID NO: 806425 - DNA, 15 bp, Homo sapiens
tggtagtctctgatt

SEQ ID NO: 806426 - DNA, 15 bp, Homo sapiens
ggtagtctctgatta

SEQ ID NO: 806427 - DNA, 15 bp, Homo sapiens
gtagtctctgattat

SEQ ID NO: 806428 - DNA, 15 bp, Homo sapiens
tagtctctgattata

SEQ ID NO: 806429 - DNA, 15 bp, Homo sapiens
agtctctgattatat

SEQ ID NO: 806430 - DNA, 15 bp, Homo sapiens
gtctctgattatata

SEQ ID NO: 806431 - DNA, 15 bp, Homo sapiens
tctctgattatatat

SEQ ID NO: 806432 - DNA, 15 bp, Homo sapiens
ctctgattatatatg

SEQ ID NO: 806433 - DNA, 15 bp, Homo sapiens
tctgattatatatgt

SEQ ID NO: 806434 - DNA, 15 bp, Homo sapiens
ctgattatatatgtg

SEQ ID NO: 806435 - DNA, 15 bp, Homo sapiens
tgattatatatgtgt

SEQ ID NO: 806436 - DNA, 15 bp, Homo sapiens
gattatatatgtgtc

SEQ ID NO: 806437 - DNA, 15 bp, Homo sapiens
attatatatgtgtct

SEQ ID NO: 806438 - DNA, 15 bp, Homo sapiens
ttatatatgtgtctg

SEQ ID NO: 806439 - DNA, 15 bp, Homo sapiens
tatatatgtgtctgt

SEQ ID NO: 806440 - DNA, 15 bp, Homo sapiens
atatatgtgtctgtg

SEQ ID NO: 806441 - DNA, 15 bp, Homo sapiens
tatatgtgtctgtgt

SEQ ID NO: 806442 - DNA, 15 bp, Homo sapiens
atatgtgtctgtgta

SEQ ID NO: 806443 - DNA, 15 bp, Homo sapiens
tatgtgtctgtgtat

SEQ ID NO: 806444 - DNA, 15 bp, Homo sapiens
atgtgtctgtgtatg

SEQ ID NO: 806445 - DNA, 15 bp, Homo sapiens
tgtgtctgtgtatgt

SEQ ID NO: 806446 - DNA, 15 bp, Homo sapiens
gtgtctgtgtatgta

SEQ ID NO: 806447 - DNA, 15 bp, Homo sapiens
tgtctgtgtatgtag

SEQ ID NO: 806448 - DNA, 15 bp, Homo sapiens
gtctgtgtatgtaga

SEQ ID NO: 806449 - DNA, 15 bp, Homo sapiens
tctgtgtatgtagat

SEQ ID NO: 806450 - DNA, 15 bp, Homo sapiens
ctgtgtatgtagata

SEQ ID NO: 806451 - DNA, 15 bp, Homo sapiens
tgtgtatgtagatat

SEQ ID NO: 806452 - DNA, 15 bp, Homo sapiens
gtgtatgtagatata

SEQ ID NO: 806453 - DNA, 15 bp, Homo sapiens
tgtatgtagatatac

SEQ ID NO: 806454 - DNA, 15 bp, Homo sapiens
gtatgtagatataca

SEQ ID NO: 806455 - DNA, 15 bp, Homo sapiens
tatgtagatatacat

SEQ ID NO: 806456 - DNA, 15 bp, Homo sapiens
atgtagatatacata

SEQ ID NO: 806457 - DNA, 15 bp, Homo sapiens
tgtagatatacatat

SEQ ID NO: 806458 - DNA, 15 bp, Homo sapiens
gtagatatacatata

SEQ ID NO: 806459 - DNA, 15 bp, Homo sapiens
tagatatacatatac

SEQ ID NO: 806460 - DNA, 15 bp, Homo sapiens
agatatacatatacg

SEQ ID NO: 806461 - DNA, 15 bp, Homo sapiens
gatatacatatacgc

SEQ ID NO: 806462 - DNA, 15 bp, Homo sapiens
atatacatatacgca

SEQ ID NO: 806463 - DNA, 15 bp, Homo sapiens
tatacatatacgcag

SEQ ID NO: 806464 - DNA, 15 bp, Homo sapiens
atacatatacgcaga

SEQ ID NO: 806465 - DNA, 15 bp, Homo sapiens
tacatatacgcagac

SEQ ID NO: 806466 - DNA, 15 bp, Homo sapiens
acatatacgcagaca

SEQ ID NO: 806467 - DNA, 15 bp, Homo sapiens
catatacgcagacat

SEQ ID NO: 806468 - DNA, 15 bp, Homo sapiens
atatacgcagacata

SEQ ID NO: 806469 - DNA, 15 bp, Homo sapiens
tatacgcagacatat

SEQ ID NO: 806470 - DNA, 15 bp, Homo sapiens
atacgcagacatata

SEQ ID NO: 806471 - DNA, 15 bp, Homo sapiens
tacgcagacatatat

SEQ ID NO: 806472 - DNA, 15 bp, Homo sapiens
acgcagacatatata

SEQ ID NO: 806473 - DNA, 15 bp, Homo sapiens
cgcagacatatataa

SEQ ID NO: 806474 - DNA, 15 bp, Homo sapiens
gcagacatatataat

SEQ ID NO: 806475 - DNA, 15 bp, Homo sapiens
cagacatatataatt

SEQ ID NO: 806476 - DNA, 15 bp, Homo sapiens
agacatatataatta

SEQ ID NO: 806477 - DNA, 15 bp, Homo sapiens
gacatatataattat

SEQ ID NO: 806478 - DNA, 15 bp, Homo sapiens
acatatataattatg

SEQ ID NO: 806479 - DNA, 15 bp, Homo sapiens
catatataattatgt

SEQ ID NO: 806480 - DNA, 15 bp, Homo sapiens
atatataattatgta

SEQ ID NO: 806481 - DNA, 15 bp, Homo sapiens
tatataattatgtat

SEQ ID NO: 806482 - DNA, 15 bp, Homo sapiens
atataattatgtatg

SEQ ID NO: 806483 - DNA, 15 bp, Homo sapiens
tataattatgtatgt

SEQ ID NO: 806484 - DNA, 15 bp, Homo sapiens
ataattatgtatgta

SEQ ID NO: 806485 - DNA, 15 bp, Homo sapiens
taattatgtatgtac

SEQ ID NO: 806486 - DNA, 15 bp, Homo sapiens
aattatgtatgtaca

SEQ ID NO: 806487 - DNA, 15 bp, Homo sapiens
attatgtatgtacac

SEQ ID NO: 806488 - DNA, 15 bp, Homo sapiens
ttatgtatgtacaca

SEQ ID NO: 806489 - DNA, 15 bp, Homo sapiens
tatgtatgtacacat

SEQ ID NO: 806490 - DNA, 15 bp, Homo sapiens
atgtatgtacacata

SEQ ID NO: 806491 - DNA, 15 bp, Homo sapiens
tgtatgtacacatat

SEQ ID NO: 806492 - DNA, 15 bp, Homo sapiens
gtatgtacacatatt

SEQ ID NO: 806493 - DNA, 15 bp, Homo sapiens
tatgtacacatatta

SEQ ID NO: 806494 - DNA, 15 bp, Homo sapiens
atgtacacatattat

SEQ ID NO: 806495 - DNA, 15 bp, Homo sapiens
tgtacacatattatg

SEQ ID NO: 806496 - DNA, 15 bp, Homo sapiens
gtacacatattatgt

SEQ ID NO: 806497 - DNA, 15 bp, Homo sapiens
tacacatattatgtg

SEQ ID NO: 806498 - DNA, 15 bp, Homo sapiens
acacatattatgtgt

SEQ ID NO: 806499 - DNA, 15 bp, Homo sapiens
cacatattatgtgtg

SEQ ID NO: 806500 - DNA, 15 bp, Homo sapiens
acatattatgtgtgt

SEQ ID NO: 806501 - DNA, 15 bp, Homo sapiens
catattatgtgtgta

SEQ ID NO: 806502 - DNA, 15 bp, Homo sapiens
atattatgtgtgtat

SEQ ID NO: 806503 - DNA, 15 bp, Homo sapiens
tattatgtgtgtatt

SEQ ID NO: 806504 - DNA, 15 bp, Homo sapiens
attatgtgtgtattt

SEQ ID NO: 806505 - DNA, 15 bp, Homo sapiens
ttatgtgtgtatttc

SEQ ID NO: 806506 - DNA, 15 bp, Homo sapiens
tatgtgtgtatttcc

SEQ ID NO: 806507 - DNA, 15 bp, Homo sapiens
atgtgtgtatttcct

SEQ ID NO: 806508 - DNA, 15 bp, Homo sapiens
tgtgtgtatttccta

SEQ ID NO: 806509 - DNA, 15 bp, Homo sapiens
gtgtgtatttcctat

SEQ ID NO: 806510 - DNA, 15 bp, Homo sapiens
tgtgtatttcctatc

SEQ ID NO: 806511 - DNA, 15 bp, Homo sapiens
gtgtatttcctatca

SEQ ID NO: 806512 - DNA, 15 bp, Homo sapiens
tgtatttcctatcat

SEQ ID NO: 806513 - DNA, 15 bp, Homo sapiens
gtatttcctatcatg

SEQ ID NO: 806514 - DNA, 15 bp, Homo sapiens
tatttcctatcatgt

SEQ ID NO: 806515 - DNA, 15 bp, Homo sapiens
atttcctatcatgtt

SEQ ID NO: 806516 - DNA, 15 bp, Homo sapiens
tttcctatcatgttg

SEQ ID NO: 806517 - DNA, 15 bp, Homo sapiens
ttcctatcatgttgg

SEQ ID NO: 806518 - DNA, 15 bp, Homo sapiens
tcctatcatgttggg

SEQ ID NO: 806519 - DNA, 15 bp, Homo sapiens
cctatcatgttgggt

SEQ ID NO: 806520 - DNA, 15 bp, Homo sapiens
ctatcatgttgggtg

SEQ ID NO: 806521 - DNA, 15 bp, Homo sapiens
tatcatgttgggtga

SEQ ID NO: 806522 - DNA, 15 bp, Homo sapiens
atcatgttgggtgaa

SEQ ID NO: 806523 - DNA, 15 bp, Homo sapiens
tcatgttgggtgaat

SEQ ID NO: 806524 - DNA, 15 bp, Homo sapiens
catgttgggtgaatg

SEQ ID NO: 806525 - DNA, 15 bp, Homo sapiens
atgttgggtgaatgc

SEQ ID NO: 806526 - DNA, 15 bp, Homo sapiens
tgttgggtgaatgca

SEQ ID NO: 806527 - DNA, 15 bp, Homo sapiens
gttgggtgaatgcaa

SEQ ID NO: 806528 - DNA, 15 bp, Homo sapiens
ttgggtgaatgcaat

SEQ ID NO: 806529 - DNA, 15 bp, Homo sapiens
tgggtgaatgcaatc

SEQ ID NO: 806530 - DNA, 15 bp, Homo sapiens
gggtgaatgcaatca

SEQ ID NO: 806531 - DNA, 15 bp, Homo sapiens
ggtgaatgcaatcag

SEQ ID NO: 806532 - DNA, 15 bp, Homo sapiens
gtgaatgcaatcagt

SEQ ID NO: 806533 - DNA, 15 bp, Homo sapiens
tgaatgcaatcagta

SEQ ID NO: 806534 - DNA, 15 bp, Homo sapiens
gaatgcaatcagtag

SEQ ID NO: 806535 - DNA, 15 bp, Homo sapiens
aatgcaatcagtaga

SEQ ID NO: 806536 - DNA, 15 bp, Homo sapiens
atgcaatcagtagac

SEQ ID NO: 806537 - DNA, 15 bp, Homo sapiens
tgcaatcagtagact

SEQ ID NO: 806538 - DNA, 15 bp, Homo sapiens
gcaatcagtagactt

SEQ ID NO: 806539 - DNA, 15 bp, Homo sapiens
caatcagtagacttg

SEQ ID NO: 806540 - DNA, 15 bp, Homo sapiens
aatcagtagacttgt

SEQ ID NO: 806541 - DNA, 15 bp, Homo sapiens
atcagtagacttgtt

SEQ ID NO: 806542 - DNA, 15 bp, Homo sapiens
tcagtagacttgttc

SEQ ID NO: 806543 - DNA, 15 bp, Homo sapiens
cagtagacttgttcc

SEQ ID NO: 806544 - DNA, 15 bp, Homo sapiens
agtagacttgttcca

SEQ ID NO: 806545 - DNA, 15 bp, Homo sapiens
gtagacttgttccat

SEQ ID NO: 806546 - DNA, 15 bp, Homo sapiens
tagacttgttccata

SEQ ID NO: 806547 - DNA, 15 bp, Homo sapiens
agacttgttccatat

SEQ ID NO: 806548 - DNA, 15 bp, Homo sapiens
gacttgttccatatt

SEQ ID NO: 806549 - DNA, 15 bp, Homo sapiens
acttgttccatatta

SEQ ID NO: 806550 - DNA, 15 bp, Homo sapiens
cttgttccatattat

SEQ ID NO: 806551 - DNA, 15 bp, Homo sapiens
ttgttccatattatc

SEQ ID NO: 806552 - DNA, 15 bp, Homo sapiens
tgttccatattatcc

SEQ ID NO: 806553 - DNA, 15 bp, Homo sapiens
gttccatattatcct

SEQ ID NO: 806554 - DNA, 15 bp, Homo sapiens
ttccatattatcctc

SEQ ID NO: 806555 - DNA, 15 bp, Homo sapiens
tccatattatcctct

SEQ ID NO: 806556 - DNA, 15 bp, Homo sapiens
ccatattatcctctt

SEQ ID NO: 806557 - DNA, 15 bp, Homo sapiens
catattatcctctta

SEQ ID NO: 806558 - DNA, 15 bp, Homo sapiens
atattatcctcttat

SEQ ID NO: 806559 - DNA, 15 bp, Homo sapiens
tattatcctcttata

SEQ ID NO: 806560 - DNA, 15 bp, Homo sapiens
attatcctcttataa

SEQ ID NO: 806561 - DNA, 15 bp, Homo sapiens
ttatcctcttataac

SEQ ID NO: 806562 - DNA, 15 bp, Homo sapiens
tatcctcttataact

SEQ ID NO: 806563 - DNA, 15 bp, Homo sapiens
atcctcttataacta

SEQ ID NO: 806564 - DNA, 15 bp, Homo sapiens
tcctcttataactag

SEQ ID NO: 806565 - DNA, 15 bp, Homo sapiens
cctcttataactagg

SEQ ID NO: 806566 - DNA, 15 bp, Homo sapiens
ctcttataactagga

SEQ ID NO: 806567 - DNA, 15 bp, Homo sapiens
tcttataactaggat

SEQ ID NO: 806568 - DNA, 15 bp, Homo sapiens
cttataactaggatt

SEQ ID NO: 806569 - DNA, 15 bp, Homo sapiens
ttataactaggattt

SEQ ID NO: 806570 - DNA, 15 bp, Homo sapiens
tataactaggatttt

SEQ ID NO: 806571 - DNA, 15 bp, Homo sapiens
ataactaggatttta

SEQ ID NO: 806572 - DNA, 15 bp, Homo sapiens
taactaggattttac

SEQ ID NO: 806573 - DNA, 15 bp, Homo sapiens
aactaggattttaca

SEQ ID NO: 806574 - DNA, 15 bp, Homo sapiens
actaggattttacaa

SEQ ID NO: 806575 - DNA, 15 bp, Homo sapiens
ctaggattttacaaa

SEQ ID NO: 806576 - DNA, 15 bp, Homo sapiens
taggattttacaaat

SEQ ID NO: 806577 - DNA, 15 bp, Homo sapiens
aggattttacaaatg

SEQ ID NO: 806578 - DNA, 15 bp, Homo sapiens
ggattttacaaatgc

SEQ ID NO: 806579 - DNA, 15 bp, Homo sapiens
gattttacaaatgct

SEQ ID NO: 806580 - DNA, 15 bp, Homo sapiens
attttacaaatgctt

SEQ ID NO: 806581 - DNA, 15 bp, Homo sapiens
ttttacaaatgcttt

SEQ ID NO: 806582 - DNA, 15 bp, Homo sapiens
tttacaaatgctttc

SEQ ID NO: 806583 - DNA, 15 bp, Homo sapiens
ttacaaatgctttca

SEQ ID NO: 806584 - DNA, 15 bp, Homo sapiens
tacaaatgctttcag

SEQ ID NO: 806585 - DNA, 15 bp, Homo sapiens
acaaatgctttcaga

SEQ ID NO: 806586 - DNA, 15 bp, Homo sapiens
caaatgctttcagag

SEQ ID NO: 806587 - DNA, 15 bp, Homo sapiens
aaatgctttcagagt

SEQ ID NO: 806588 - DNA, 15 bp, Homo sapiens
aatgctttcagagta

SEQ ID NO: 806589 - DNA, 15 bp, Homo sapiens
atgctttcagagtaa

SEQ ID NO: 806590 - DNA, 15 bp, Homo sapiens
tgctttcagagtaat

SEQ ID NO: 806591 - DNA, 15 bp, Homo sapiens
gctttcagagtaatt

SEQ ID NO: 806592 - DNA, 15 bp, Homo sapiens
ctttcagagtaattg

SEQ ID NO: 806593 - DNA, 15 bp, Homo sapiens
tttcagagtaattgg

SEQ ID NO: 806594 - DNA, 15 bp, Homo sapiens
ttcagagtaattggg

SEQ ID NO: 806595 - DNA, 15 bp, Homo sapiens
tcagagtaattgggc

SEQ ID NO: 806596 - DNA, 15 bp, Homo sapiens
cagagtaattgggca

SEQ ID NO: 806597 - DNA, 15 bp, Homo sapiens
agagtaattgggcag

SEQ ID NO: 806598 - DNA, 15 bp, Homo sapiens
gagtaattgggcagt

SEQ ID NO: 806599 - DNA, 15 bp, Homo sapiens
agtaattgggcagta

SEQ ID NO: 806600 - DNA, 15 bp, Homo sapiens
gtaattgggcagtaa

SEQ ID NO: 806601 - DNA, 15 bp, Homo sapiens
taattgggcagtaat

SEQ ID NO: 806602 - DNA, 15 bp, Homo sapiens
aattgggcagtaatt

SEQ ID NO: 806603 - DNA, 15 bp, Homo sapiens
attgggcagtaattg

SEQ ID NO: 806604 - DNA, 15 bp, Homo sapiens
ttgggcagtaattgc

SEQ ID NO: 806605 - DNA, 15 bp, Homo sapiens
tgggcagtaattgct

SEQ ID NO: 806606 - DNA, 15 bp, Homo sapiens
gggcagtaattgctc

SEQ ID NO: 806607 - DNA, 15 bp, Homo sapiens
ggcagtaattgctca

SEQ ID NO: 806608 - DNA, 15 bp, Homo sapiens
gcagtaattgctcat

SEQ ID NO: 806609 - DNA, 15 bp, Homo sapiens
cagtaattgctcatt

SEQ ID NO: 806610 - DNA, 15 bp, Homo sapiens
agtaattgctcattc

SEQ ID NO: 806611 - DNA, 15 bp, Homo sapiens
gtaattgctcattcc

SEQ ID NO: 806612 - DNA, 15 bp, Homo sapiens
taattgctcattccc

SEQ ID NO: 806613 - DNA, 15 bp, Homo sapiens
aattgctcattccca

SEQ ID NO: 806614 - DNA, 15 bp, Homo sapiens
attgctcattcccag

SEQ ID NO: 806615 - DNA, 15 bp, Homo sapiens
ttgctcattcccagg

SEQ ID NO: 806616 - DNA, 15 bp, Homo sapiens
tgctcattcccaggc

SEQ ID NO: 806617 - DNA, 15 bp, Homo sapiens
gctcattcccaggcc

SEQ ID NO: 806618 - DNA, 15 bp, Homo sapiens
ctcattcccaggccc

SEQ ID NO: 806619 - DNA, 15 bp, Homo sapiens
tcattcccaggccca

SEQ ID NO: 806620 - DNA, 15 bp, Homo sapiens
cattcccaggcccat

SEQ ID NO: 806621 - DNA, 15 bp, Homo sapiens
attcccaggcccatt

SEQ ID NO: 806622 - DNA, 15 bp, Homo sapiens
ttcccaggcccattg

SEQ ID NO: 806623 - DNA, 15 bp, Homo sapiens
tcccaggcccattgt

SEQ ID NO: 806624 - DNA, 15 bp, Homo sapiens
cccaggcccattgtc

SEQ ID NO: 806625 - DNA, 15 bp, Homo sapiens
ccaggcccattgtct

SEQ ID NO: 806626 - DNA, 15 bp, Homo sapiens
caggcccattgtctc

SEQ ID NO: 806627 - DNA, 15 bp, Homo sapiens
aggcccattgtctcc

SEQ ID NO: 806628 - DNA, 15 bp, Homo sapiens
ggcccattgtctccc

SEQ ID NO: 806629 - DNA, 15 bp, Homo sapiens
gcccattgtctccca

SEQ ID NO: 806630 - DNA, 15 bp, Homo sapiens
cccattgtctcccat

SEQ ID NO: 806631 - DNA, 15 bp, Homo sapiens
ccattgtctcccatg

SEQ ID NO: 806632 - DNA, 15 bp, Homo sapiens
cattgtctcccatga

SEQ ID NO: 806633 - DNA, 15 bp, Homo sapiens
attgtctcccatgat

SEQ ID NO: 806634 - DNA, 15 bp, Homo sapiens
ttgtctcccatgatg

SEQ ID NO: 806635 - DNA, 15 bp, Homo sapiens
tgtctcccatgatgc

SEQ ID NO: 806636 - DNA, 15 bp, Homo sapiens
gtctcccatgatgcc

SEQ ID NO: 806637 - DNA, 15 bp, Homo sapiens
tctcccatgatgcct

SEQ ID NO: 806638 - DNA, 15 bp, Homo sapiens
ctcccatgatgcctt

SEQ ID NO: 806639 - DNA, 15 bp, Homo sapiens
tcccatgatgccttc

SEQ ID NO: 806640 - DNA, 15 bp, Homo sapiens
cccatgatgccttcc

SEQ ID NO: 806641 - DNA, 15 bp, Homo sapiens
ccatgatgccttcca

SEQ ID NO: 806642 - DNA, 15 bp, Homo sapiens
catgatgccttccaa

SEQ ID NO: 806643 - DNA, 15 bp, Homo sapiens
atgatgccttccaac

SEQ ID NO: 806644 - DNA, 15 bp, Homo sapiens
tgatgccttccaact

SEQ ID NO: 806645 - DNA, 15 bp, Homo sapiens
gatgccttccaactg

SEQ ID NO: 806646 - DNA, 15 bp, Homo sapiens
atgccttccaactgc

SEQ ID NO: 806647 - DNA, 15 bp, Homo sapiens
tgccttccaactgca

SEQ ID NO: 806648 - DNA, 15 bp, Homo sapiens
gccttccaactgcat

SEQ ID NO: 806649 - DNA, 15 bp, Homo sapiens
ccttccaactgcatt

SEQ ID NO: 806650 - DNA, 15 bp, Homo sapiens
cttccaactgcattc

SEQ ID NO: 806651 - DNA, 15 bp, Homo sapiens
ttccaactgcattca

SEQ ID NO: 806652 - DNA, 15 bp, Homo sapiens
tccaactgcattcat

SEQ ID NO: 806653 - DNA, 15 bp, Homo sapiens
ccaactgcattcatg

SEQ ID NO: 806654 - DNA, 15 bp, Homo sapiens
caactgcattcatgg

SEQ ID NO: 806655 - DNA, 15 bp, Homo sapiens
aactgcattcatggg

SEQ ID NO: 806656 - DNA, 15 bp, Homo sapiens
actgcattcatgggt

SEQ ID NO: 806657 - DNA, 15 bp, Homo sapiens
ctgcattcatgggtg

SEQ ID NO: 806658 - DNA, 15 bp, Homo sapiens
tgcattcatgggtgc

SEQ ID NO: 806659 - DNA, 15 bp, Homo sapiens
gcattcatgggtgct

SEQ ID NO: 806660 - DNA, 15 bp, Homo sapiens
cattcatgggtgctc

SEQ ID NO: 806661 - DNA, 15 bp, Homo sapiens
attcatgggtgctcc

SEQ ID NO: 806662 - DNA, 15 bp, Homo sapiens
ttcatgggtgctccc

SEQ ID NO: 806663 - DNA, 15 bp, Homo sapiens
tcatgggtgctccca

SEQ ID NO: 806664 - DNA, 15 bp, Homo sapiens
catgggtgctcccaa

SEQ ID NO: 806665 - DNA, 15 bp, Homo sapiens
atgggtgctcccaat

SEQ ID NO: 806666 - DNA, 15 bp, Homo sapiens
tgggtgctcccaatc

SEQ ID NO: 806667 - DNA, 15 bp, Homo sapiens
gggtgctcccaatcc

SEQ ID NO: 806668 - DNA, 15 bp, Homo sapiens
ggtgctcccaatcca

SEQ ID NO: 806669 - DNA, 15 bp, Homo sapiens
gtgctcccaatccag

SEQ ID NO: 806670 - DNA, 15 bp, Homo sapiens
tgctcccaatccagc

SEQ ID NO: 806671 - DNA, 15 bp, Homo sapiens
gctcccaatccagct

SEQ ID NO: 806672 - DNA, 15 bp, Homo sapiens
ctcccaatccagctc

SEQ ID NO: 806673 - DNA, 15 bp, Homo sapiens
tcccaatccagctct

SEQ ID NO: 806674 - DNA, 15 bp, Homo sapiens
cccaatccagctcta

SEQ ID NO: 806675 - DNA, 15 bp, Homo sapiens
ccaatccagctctaa

SEQ ID NO: 806676 - DNA, 15 bp, Homo sapiens
caatccagctctaaa

SEQ ID NO: 806677 - DNA, 15 bp, Homo sapiens
aatccagctctaaac

SEQ ID NO: 806678 - DNA, 15 bp, Homo sapiens
atccagctctaaact

SEQ ID NO: 806679 - DNA, 15 bp, Homo sapiens
tccagctctaaactg

SEQ ID NO: 806680 - DNA, 15 bp, Homo sapiens
ccagctctaaactga

SEQ ID NO: 806681 - DNA, 15 bp, Homo sapiens
cagctctaaactgaa

SEQ ID NO: 806682 - DNA, 15 bp, Homo sapiens
agctctaaactgaaa

SEQ ID NO: 806683 - DNA, 15 bp, Homo sapiens
gctctaaactgaaaa

SEQ ID NO: 806684 - DNA, 15 bp, Homo sapiens
ctctaaactgaaaaa

SEQ ID NO: 806685 - DNA, 15 bp, Homo sapiens
tctaaactgaaaaag

SEQ ID NO: 806686 - DNA, 15 bp, Homo sapiens
ctaaactgaaaaaga

SEQ ID NO: 806687 - DNA, 15 bp, Homo sapiens
taaactgaaaaagat

SEQ ID NO: 806688 - DNA, 15 bp, Homo sapiens
aaactgaaaaagata

SEQ ID NO: 806689 - DNA, 15 bp, Homo sapiens
aactgaaaaagatag

SEQ ID NO: 806690 - DNA, 15 bp, Homo sapiens
actgaaaaagatagg

SEQ ID NO: 806691 - DNA, 15 bp, Homo sapiens
ctgaaaaagataggc

SEQ ID NO: 806692 - DNA, 15 bp, Homo sapiens
tgaaaaagataggcc

SEQ ID NO: 806693 - DNA, 15 bp, Homo sapiens
gaaaaagataggcca

SEQ ID NO: 806694 - DNA, 15 bp, Homo sapiens
aaaaagataggccat

SEQ ID NO: 806695 - DNA, 15 bp, Homo sapiens
aaaagataggccatc

SEQ ID NO: 806696 - DNA, 15 bp, Homo sapiens
aaagataggccatct

SEQ ID NO: 806697 - DNA, 15 bp, Homo sapiens
aagataggccatcta

SEQ ID NO: 806698 - DNA, 15 bp, Homo sapiens
agataggccatctat

SEQ ID NO: 806699 - DNA, 15 bp, Homo sapiens
gataggccatctatt

SEQ ID NO: 806700 - DNA, 15 bp, Homo sapiens
ataggccatctattc

SEQ ID NO: 806701 - DNA, 15 bp, Homo sapiens
taggccatctattcc

SEQ ID NO: 806702 - DNA, 15 bp, Homo sapiens
aggccatctattccg

SEQ ID NO: 806703 - DNA, 15 bp, Homo sapiens
ggccatctattccgt

SEQ ID NO: 806704 - DNA, 15 bp, Homo sapiens
gccatctattccgta

SEQ ID NO: 806705 - DNA, 15 bp, Homo sapiens
ccatctattccgtag

SEQ ID NO: 806706 - DNA, 15 bp, Homo sapiens
catctattccgtagg

SEQ ID NO: 806707 - DNA, 15 bp, Homo sapiens
atctattccgtaggg

SEQ ID NO: 806708 - DNA, 15 bp, Homo sapiens
tctattccgtagggt

SEQ ID NO: 806709 - DNA, 15 bp, Homo sapiens
ctattccgtagggtg

SEQ ID NO: 806710 - DNA, 15 bp, Homo sapiens
tattccgtagggtgg

SEQ ID NO: 806711 - DNA, 15 bp, Homo sapiens
attccgtagggtggt

SEQ ID NO: 806712 - DNA, 15 bp, Homo sapiens
ttccgtagggtggtt

SEQ ID NO: 806713 - DNA, 15 bp, Homo sapiens
tccgtagggtggttt

SEQ ID NO: 806714 - DNA, 15 bp, Homo sapiens
ccgtagggtggtttt

SEQ ID NO: 806715 - DNA, 15 bp, Homo sapiens
cgtagggtggttttg

SEQ ID NO: 806716 - DNA, 15 bp, Homo sapiens
gtagggtggttttgt

SEQ ID NO: 806717 - DNA, 15 bp, Homo sapiens
tagggtggttttgtg

SEQ ID NO: 806718 - DNA, 15 bp, Homo sapiens
agggtggttttgtgc

SEQ ID NO: 806719 - DNA, 15 bp, Homo sapiens
gggtggttttgtgca

SEQ ID NO: 806720 - DNA, 15 bp, Homo sapiens
ggtggttttgtgcac

SEQ ID NO: 806721 - DNA, 15 bp, Homo sapiens
gtggttttgtgcact

SEQ ID NO: 806722 - DNA, 15 bp, Homo sapiens
tggttttgtgcactc

SEQ ID NO: 806723 - DNA, 15 bp, Homo sapiens
ggttttgtgcactca

SEQ ID NO: 806724 - DNA, 15 bp, Homo sapiens
gttttgtgcactcaa

SEQ ID NO: 806725 - DNA, 15 bp, Homo sapiens
ttttgtgcactcaac

SEQ ID NO: 806726 - DNA, 15 bp, Homo sapiens
tttgtgcactcaaca

SEQ ID NO: 806727 - DNA, 15 bp, Homo sapiens
ttgtgcactcaacaa

SEQ ID NO: 806728 - DNA, 15 bp, Homo sapiens
tgtgcactcaacaaa

SEQ ID NO: 806729 - DNA, 15 bp, Homo sapiens
gtgcactcaacaaag

SEQ ID NO: 806730 - DNA, 15 bp, Homo sapiens
tgcactcaacaaagg

SEQ ID NO: 806731 - DNA, 15 bp, Homo sapiens
gcactcaacaaagga

SEQ ID NO: 806732 - DNA, 15 bp, Homo sapiens
cactcaacaaaggat

SEQ ID NO: 806733 - DNA, 15 bp, Homo sapiens
actcaacaaaggata

SEQ ID NO: 806734 - DNA, 15 bp, Homo sapiens
ctcaacaaaggataa

SEQ ID NO: 806735 - DNA, 15 bp, Homo sapiens
tcaacaaaggataat

SEQ ID NO: 806736 - DNA, 15 bp, Homo sapiens
caacaaaggataatt

SEQ ID NO: 806737 - DNA, 15 bp, Homo sapiens
aacaaaggataattt

SEQ ID NO: 806738 - DNA, 15 bp, Homo sapiens
acaaaggataatttc

SEQ ID NO: 806739 - DNA, 15 bp, Homo sapiens
caaaggataatttca

SEQ ID NO: 806740 - DNA, 15 bp, Homo sapiens
aaaggataatttcag

SEQ ID NO: 806741 - DNA, 15 bp, Homo sapiens
aaggataatttcaga

SEQ ID NO: 806742 - DNA, 15 bp, Homo sapiens
aggataatttcagaa

SEQ ID NO: 806743 - DNA, 15 bp, Homo sapiens
ggataatttcagaag

SEQ ID NO: 806744 - DNA, 15 bp, Homo sapiens
gataatttcagaaga

SEQ ID NO: 806745 - DNA, 15 bp, Homo sapiens
ataatttcagaagat

SEQ ID NO: 806746 - DNA, 15 bp, Homo sapiens
taatttcagaagatt

SEQ ID NO: 806747 - DNA, 15 bp, Homo sapiens
aatttcagaagatta

SEQ ID NO: 806748 - DNA, 15 bp, Homo sapiens
atttcagaagattat

SEQ ID NO: 806749 - DNA, 15 bp, Homo sapiens
tttcagaagattatc

SEQ ID NO: 806750 - DNA, 15 bp, Homo sapiens
ttcagaagattatca

SEQ ID NO: 806751 - DNA, 15 bp, Homo sapiens
tcagaagattatcag

SEQ ID NO: 806752 - DNA, 15 bp, Homo sapiens
cagaagattatcaga

SEQ ID NO: 806753 - DNA, 15 bp, Homo sapiens
agaagattatcagaa

SEQ ID NO: 806754 - DNA, 15 bp, Homo sapiens
gaagattatcagaaa

SEQ ID NO: 806755 - DNA, 15 bp, Homo sapiens
aagattatcagaaac

SEQ ID NO: 806756 - DNA, 15 bp, Homo sapiens
agattatcagaaact

SEQ ID NO: 806757 - DNA, 15 bp, Homo sapiens
gattatcagaaactg

SEQ ID NO: 806758 - DNA, 15 bp, Homo sapiens
attatcagaaactgc

SEQ ID NO: 806759 - DNA, 15 bp, Homo sapiens
ttatcagaaactgcc

SEQ ID NO: 806760 - DNA, 15 bp, Homo sapiens
tatcagaaactgcca

SEQ ID NO: 806761 - DNA, 15 bp, Homo sapiens
atcagaaactgccat

SEQ ID NO: 806762 - DNA, 15 bp, Homo sapiens
tcagaaactgccatg

SEQ ID NO: 806763 - DNA, 15 bp, Homo sapiens
cagaaactgccatgt

SEQ ID NO: 806764 - DNA, 15 bp, Homo sapiens
agaaactgccatgta

SEQ ID NO: 806765 - DNA, 15 bp, Homo sapiens
gaaactgccatgtac

SEQ ID NO: 806766 - DNA, 15 bp, Homo sapiens
aaactgccatgtacc

SEQ ID NO: 806767 - DNA, 15 bp, Homo sapiens
aactgccatgtacct

SEQ ID NO: 806768 - DNA, 15 bp, Homo sapiens
actgccatgtacctg

SEQ ID NO: 806769 - DNA, 15 bp, Homo sapiens
ctgccatgtacctgg

SEQ ID NO: 806770 - DNA, 15 bp, Homo sapiens
tgccatgtacctggc

SEQ ID NO: 806771 - DNA, 15 bp, Homo sapiens
gccatgtacctggca

SEQ ID NO: 806772 - DNA, 15 bp, Homo sapiens
ccatgtacctggcac

SEQ ID NO: 806773 - DNA, 15 bp, Homo sapiens
catgtacctggcacc

SEQ ID NO: 806774 - DNA, 15 bp, Homo sapiens
atgtacctggcaccc

SEQ ID NO: 806775 - DNA, 15 bp, Homo sapiens
tgtacctggcacccg

SEQ ID NO: 806776 - DNA, 15 bp, Homo sapiens
gtacctggcacccgc

SEQ ID NO: 806777 - DNA, 15 bp, Homo sapiens
tacctggcacccgct

SEQ ID NO: 806778 - DNA, 15 bp, Homo sapiens
acctggcacccgctt

SEQ ID NO: 806779 - DNA, 15 bp, Homo sapiens
cctggcacccgcttg

SEQ ID NO: 806780 - DNA, 15 bp, Homo sapiens
ctggcacccgcttga

SEQ ID NO: 806781 - DNA, 15 bp, Homo sapiens
tggcacccgcttgag

SEQ ID NO: 806782 - DNA, 15 bp, Homo sapiens
ggcacccgcttgagg

SEQ ID NO: 806783 - DNA, 15 bp, Homo sapiens
gcacccgcttgagga

SEQ ID NO: 806784 - DNA, 15 bp, Homo sapiens
cacccgcttgaggat

SEQ ID NO: 806785 - DNA, 15 bp, Homo sapiens
acccgcttgaggatg

SEQ ID NO: 806786 - DNA, 15 bp, Homo sapiens
cccgcttgaggatgg

SEQ ID NO: 806787 - DNA, 15 bp, Homo sapiens
ccgcttgaggatggc

SEQ ID NO: 806788 - DNA, 15 bp, Homo sapiens
cgcttgaggatggca

SEQ ID NO: 806789 - DNA, 15 bp, Homo sapiens
gcttgaggatggcac

SEQ ID NO: 806790 - DNA, 15 bp, Homo sapiens
cttgaggatggcacc

SEQ ID NO: 806791 - DNA, 15 bp, Homo sapiens
ttgaggatggcaccg

SEQ ID NO: 806792 - DNA, 15 bp, Homo sapiens
tgaggatggcaccgt

SEQ ID NO: 806793 - DNA, 15 bp, Homo sapiens
gaggatggcaccgtc

SEQ ID NO: 806794 - DNA, 15 bp, Homo sapiens
aggatggcaccgtct

SEQ ID NO: 806795 - DNA, 15 bp, Homo sapiens
ggatggcaccgtctc

SEQ ID NO: 806796 - DNA, 15 bp, Homo sapiens
gatggcaccgtctcc

SEQ ID NO: 806797 - DNA, 15 bp, Homo sapiens
atggcaccgtctcct

SEQ ID NO: 806798 - DNA, 15 bp, Homo sapiens
tggcaccgtctcctc

SEQ ID NO: 806799 - DNA, 15 bp, Homo sapiens
ggcaccgtctcctct

SEQ ID NO: 806800 - DNA, 15 bp, Homo sapiens
gcaccgtctcctctt

SEQ ID NO: 806801 - DNA, 15 bp, Homo sapiens
caccgtctcctcttt

SEQ ID NO: 806802 - DNA, 15 bp, Homo sapiens
accgtctcctctttg

SEQ ID NO: 806803 - DNA, 15 bp, Homo sapiens
ccgtctcctctttgc

SEQ ID NO: 806804 - DNA, 15 bp, Homo sapiens
cgtctcctctttgct

SEQ ID NO: 806805 - DNA, 15 bp, Homo sapiens
gtctcctctttgctc

SEQ ID NO: 806806 - DNA, 15 bp, Homo sapiens
tctcctctttgctca

SEQ ID NO: 806807 - DNA, 15 bp, Homo sapiens
ctcctctttgctcaa

SEQ ID NO: 806808 - DNA, 15 bp, Homo sapiens
tcctctttgctcaag

SEQ ID NO: 806809 - DNA, 15 bp, Homo sapiens
cctctttgctcaagc

SEQ ID NO: 806810 - DNA, 15 bp, Homo sapiens
ctctttgctcaagca

SEQ ID NO: 806811 - DNA, 15 bp, Homo sapiens
tctttgctcaagcac

SEQ ID NO: 806812 - DNA, 15 bp, Homo sapiens
ctttgctcaagcact

SEQ ID NO: 806813 - DNA, 15 bp, Homo sapiens
tttgctcaagcactg

SEQ ID NO: 806814 - DNA, 15 bp, Homo sapiens
ttgctcaagcactga

SEQ ID NO: 806815 - DNA, 15 bp, Homo sapiens
tgctcaagcactgac

SEQ ID NO: 806816 - DNA, 15 bp, Homo sapiens
gctcaagcactgaca

SEQ ID NO: 806817 - DNA, 15 bp, Homo sapiens
ctcaagcactgacat

SEQ ID NO: 806818 - DNA, 15 bp, Homo sapiens
tcaagcactgacatg

SEQ ID NO: 806819 - DNA, 15 bp, Homo sapiens
caagcactgacatgg

SEQ ID NO: 806820 - DNA, 15 bp, Homo sapiens
aagcactgacatggc

SEQ ID NO: 806821 - DNA, 15 bp, Homo sapiens
agcactgacatggct

SEQ ID NO: 806822 - DNA, 15 bp, Homo sapiens
gcactgacatggctg

SEQ ID NO: 806823 - DNA, 15 bp, Homo sapiens
cactgacatggctgc

SEQ ID NO: 806824 - DNA, 15 bp, Homo sapiens
actgacatggctgcc

SEQ ID NO: 806825 - DNA, 15 bp, Homo sapiens
ctgacatggctgcct

SEQ ID NO: 806826 - DNA, 15 bp, Homo sapiens
tgacatggctgcctg

SEQ ID NO: 806827 - DNA, 15 bp, Homo sapiens
gacatggctgcctgt

SEQ ID NO: 806828 - DNA, 15 bp, Homo sapiens
acatggctgcctgtt

SEQ ID NO: 806829 - DNA, 15 bp, Homo sapiens
catggctgcctgttt

SEQ ID NO: 806830 - DNA, 15 bp, Homo sapiens
atggctgcctgtttc

SEQ ID NO: 806831 - DNA, 15 bp, Homo sapiens
tggctgcctgtttct

SEQ ID NO: 806832 - DNA, 15 bp, Homo sapiens
ggctgcctgtttctt

SEQ ID NO: 806833 - DNA, 15 bp, Homo sapiens
gctgcctgtttctta

SEQ ID NO: 806834 - DNA, 15 bp, Homo sapiens
ctgcctgtttcttaa

SEQ ID NO: 806835 - DNA, 15 bp, Homo sapiens
tgcctgtttcttaac

SEQ ID NO: 806836 - DNA, 15 bp, Homo sapiens
gcctgtttcttaact

SEQ ID NO: 806837 - DNA, 15 bp, Homo sapiens
cctgtttcttaactg

SEQ ID NO: 806838 - DNA, 15 bp, Homo sapiens
ctgtttcttaactgc

SEQ ID NO: 806839 - DNA, 15 bp, Homo sapiens
tgtttcttaactgca

SEQ ID NO: 806840 - DNA, 15 bp, Homo sapiens
gtttcttaactgcag

SEQ ID NO: 806841 - DNA, 15 bp, Homo sapiens
tttcttaactgcaga

SEQ ID NO: 806842 - DNA, 15 bp, Homo sapiens
ttcttaactgcagat

SEQ ID NO: 806843 - DNA, 15 bp, Homo sapiens
tcttaactgcagatc

SEQ ID NO: 806844 - DNA, 15 bp, Homo sapiens
cttaactgcagatcc

SEQ ID NO: 806845 - DNA, 15 bp, Homo sapiens
ttaactgcagatcca

SEQ ID NO: 806846 - DNA, 15 bp, Homo sapiens
taactgcagatccaa

SEQ ID NO: 806847 - DNA, 15 bp, Homo sapiens
aactgcagatccaac

SEQ ID NO: 806848 - DNA, 15 bp, Homo sapiens
actgcagatccaacc

SEQ ID NO: 806849 - DNA, 15 bp, Homo sapiens
ctgcagatccaacct

SEQ ID NO: 806850 - DNA, 15 bp, Homo sapiens
tgcagatccaacctg

SEQ ID NO: 806851 - DNA, 15 bp, Homo sapiens
gcagatccaacctga

SEQ ID NO: 806852 - DNA, 15 bp, Homo sapiens
cagatccaacctgac

SEQ ID NO: 806853 - DNA, 15 bp, Homo sapiens
agatccaacctgaca

SEQ ID NO: 806854 - DNA, 15 bp, Homo sapiens
gatccaacctgacac

SEQ ID NO: 806855 - DNA, 15 bp, Homo sapiens
atccaacctgacacg

SEQ ID NO: 806856 - DNA, 15 bp, Homo sapiens
tccaacctgacacgc

SEQ ID NO: 806857 - DNA, 15 bp, Homo sapiens
ccaacctgacacgca

SEQ ID NO: 806858 - DNA, 15 bp, Homo sapiens
caacctgacacgcag

SEQ ID NO: 806859 - DNA, 15 bp, Homo sapiens
aacctgacacgcagg

SEQ ID NO: 806860 - DNA, 15 bp, Homo sapiens
acctgacacgcaggg

SEQ ID NO: 806861 - DNA, 15 bp, Homo sapiens
cctgacacgcagggc

SEQ ID NO: 806862 - DNA, 15 bp, Homo sapiens
ctgacacgcagggcc

SEQ ID NO: 806863 - DNA, 15 bp, Homo sapiens
tgacacgcagggccc

SEQ ID NO: 806864 - DNA, 15 bp, Homo sapiens
gacacgcagggccct

SEQ ID NO: 806865 - DNA, 15 bp, Homo sapiens
acacgcagggccctc

SEQ ID NO: 806866 - DNA, 15 bp, Homo sapiens
cacgcagggccctcc

SEQ ID NO: 806867 - DNA, 15 bp, Homo sapiens
acgcagggccctccc

SEQ ID NO: 806868 - DNA, 15 bp, Homo sapiens
cgcagggccctcccc

SEQ ID NO: 806869 - DNA, 15 bp, Homo sapiens
gcagggccctcccca

SEQ ID NO: 806870 - DNA, 15 bp, Homo sapiens
cagggccctccccag

SEQ ID NO: 806871 - DNA, 15 bp, Homo sapiens
agggccctccccagt

SEQ ID NO: 806872 - DNA, 15 bp, Homo sapiens
gggccctccccagta

SEQ ID NO: 806873 - DNA, 15 bp, Homo sapiens
ggccctccccagtat

SEQ ID NO: 806874 - DNA, 15 bp, Homo sapiens
gccctccccagtatc

SEQ ID NO: 806875 - DNA, 15 bp, Homo sapiens
ccctccccagtatcc

SEQ ID NO: 806876 - DNA, 15 bp, Homo sapiens
cctccccagtatcct

SEQ ID NO: 806877 - DNA, 15 bp, Homo sapiens
ctccccagtatcctt

SEQ ID NO: 806878 - DNA, 15 bp, Homo sapiens
tccccagtatccttc

SEQ ID NO: 806879 - DNA, 15 bp, Homo sapiens
ccccagtatccttct

SEQ ID NO: 806880 - DNA, 15 bp, Homo sapiens
cccagtatccttcta

SEQ ID NO: 806881 - DNA, 15 bp, Homo sapiens
ccagtatccttctag

SEQ ID NO: 806882 - DNA, 15 bp, Homo sapiens
cagtatccttctagc

SEQ ID NO: 806883 - DNA, 15 bp, Homo sapiens
agtatccttctagcc

SEQ ID NO: 806884 - DNA, 15 bp, Homo sapiens
gtatccttctagcca

SEQ ID NO: 806885 - DNA, 15 bp, Homo sapiens
tatccttctagccac

SEQ ID NO: 806886 - DNA, 15 bp, Homo sapiens
atccttctagccact

SEQ ID NO: 806887 - DNA, 15 bp, Homo sapiens
tccttctagccactt

SEQ ID NO: 806888 - DNA, 15 bp, Homo sapiens
ccttctagccacttt

SEQ ID NO: 806889 - DNA, 15 bp, Homo sapiens
cttctagccactttt

SEQ ID NO: 806890 - DNA, 15 bp, Homo sapiens
ttctagccacttttg

SEQ ID NO: 806891 - DNA, 15 bp, Homo sapiens
tctagccacttttga

SEQ ID NO: 806892 - DNA, 15 bp, Homo sapiens
ctagccacttttgaa

SEQ ID NO: 806893 - DNA, 15 bp, Homo sapiens
tagccacttttgaac

SEQ ID NO: 806894 - DNA, 15 bp, Homo sapiens
agccacttttgaact

SEQ ID NO: 806895 - DNA, 15 bp, Homo sapiens
gccacttttgaactc

SEQ ID NO: 806896 - DNA, 15 bp, Homo sapiens
ccacttttgaactct

SEQ ID NO: 806897 - DNA, 15 bp, Homo sapiens
cacttttgaactcta

SEQ ID NO: 806898 - DNA, 15 bp, Homo sapiens
acttttgaactctac

SEQ ID NO: 806899 - DNA, 15 bp, Homo sapiens
cttttgaactctact

SEQ ID NO: 806900 - DNA, 15 bp, Homo sapiens
ttttgaactctactt

SEQ ID NO: 806901 - DNA, 15 bp, Homo sapiens
tttgaactctacttc

SEQ ID NO: 806902 - DNA, 15 bp, Homo sapiens
ttgaactctacttct

SEQ ID NO: 806903 - DNA, 15 bp, Homo sapiens
tgaactctacttctt

SEQ ID NO: 806904 - DNA, 15 bp, Homo sapiens
gaactctacttcttc

SEQ ID NO: 806905 - DNA, 15 bp, Homo sapiens
aactctacttcttct

SEQ ID NO: 806906 - DNA, 15 bp, Homo sapiens
actctacttcttcta

SEQ ID NO: 806907 - DNA, 15 bp, Homo sapiens
ctctacttcttctaa

SEQ ID NO: 806908 - DNA, 15 bp, Homo sapiens
tctacttcttctaac

SEQ ID NO: 806909 - DNA, 15 bp, Homo sapiens
ctacttcttctaact

SEQ ID NO: 806910 - DNA, 15 bp, Homo sapiens
tacttcttctaactg

SEQ ID NO: 806911 - DNA, 15 bp, Homo sapiens
acttcttctaactgt

SEQ ID NO: 806912 - DNA, 15 bp, Homo sapiens
cttcttctaactgtc

SEQ ID NO: 806913 - DNA, 15 bp, Homo sapiens
ttcttctaactgtcc

SEQ ID NO: 806914 - DNA, 15 bp, Homo sapiens
tcttctaactgtcct

SEQ ID NO: 806915 - DNA, 15 bp, Homo sapiens
cttctaactgtccta

SEQ ID NO: 806916 - DNA, 15 bp, Homo sapiens
ttctaactgtcctag

SEQ ID NO: 806917 - DNA, 15 bp, Homo sapiens
tctaactgtcctagc

SEQ ID NO: 806918 - DNA, 15 bp, Homo sapiens
ctaactgtcctagct

SEQ ID NO: 806919 - DNA, 15 bp, Homo sapiens
taactgtcctagcta

SEQ ID NO: 806920 - DNA, 15 bp, Homo sapiens
aactgtcctagctaa

SEQ ID NO: 806921 - DNA, 15 bp, Homo sapiens
actgtcctagctaaa

SEQ ID NO: 806922 - DNA, 15 bp, Homo sapiens
ctgtcctagctaaac

SEQ ID NO: 806923 - DNA, 15 bp, Homo sapiens
tgtcctagctaaact

SEQ ID NO: 806924 - DNA, 15 bp, Homo sapiens
gtcctagctaaactg

SEQ ID NO: 806925 - DNA, 15 bp, Homo sapiens
tcctagctaaactga

SEQ ID NO: 806926 - DNA, 15 bp, Homo sapiens
cctagctaaactgaa

SEQ ID NO: 806927 - DNA, 15 bp, Homo sapiens
ctagctaaactgaac

SEQ ID NO: 806928 - DNA, 15 bp, Homo sapiens
tagctaaactgaacc

SEQ ID NO: 806929 - DNA, 15 bp, Homo sapiens
agctaaactgaacca

SEQ ID NO: 806930 - DNA, 15 bp, Homo sapiens
gctaaactgaaccat

SEQ ID NO: 806931 - DNA, 15 bp, Homo sapiens
ctaaactgaaccatt

SEQ ID NO: 806932 - DNA, 15 bp, Homo sapiens
taaactgaaccattt

SEQ ID NO: 806933 - DNA, 15 bp, Homo sapiens
aaactgaaccattta

SEQ ID NO: 806934 - DNA, 15 bp, Homo sapiens
aactgaaccatttac

SEQ ID NO: 806935 - DNA, 15 bp, Homo sapiens
actgaaccatttact

SEQ ID NO: 806936 - DNA, 15 bp, Homo sapiens
ctgaaccatttacta

SEQ ID NO: 806937 - DNA, 15 bp, Homo sapiens
tgaaccatttactac

SEQ ID NO: 806938 - DNA, 15 bp, Homo sapiens
gaaccatttactacc

SEQ ID NO: 806939 - DNA, 15 bp, Homo sapiens
aaccatttactacct

SEQ ID NO: 806940 - DNA, 15 bp, Homo sapiens
accatttactacctt

SEQ ID NO: 806941 - DNA, 15 bp, Homo sapiens
ccatttactaccttc

SEQ ID NO: 806942 - DNA, 15 bp, Homo sapiens
catttactaccttct

SEQ ID NO: 806943 - DNA, 15 bp, Homo sapiens
atttactaccttctg

SEQ ID NO: 806944 - DNA, 15 bp, Homo sapiens
tttactaccttctgg

SEQ ID NO: 806945 - DNA, 15 bp, Homo sapiens
ttactaccttctggt

SEQ ID NO: 806946 - DNA, 15 bp, Homo sapiens
tactaccttctggta

SEQ ID NO: 806947 - DNA, 15 bp, Homo sapiens
actaccttctggtaa

SEQ ID NO: 806948 - DNA, 15 bp, Homo sapiens
ctaccttctggtaat

SEQ ID NO: 806949 - DNA, 15 bp, Homo sapiens
taccttctggtaata

SEQ ID NO: 806950 - DNA, 15 bp, Homo sapiens
accttctggtaatag

SEQ ID NO: 806951 - DNA, 15 bp, Homo sapiens
ccttctggtaatagt

SEQ ID NO: 806952 - DNA, 15 bp, Homo sapiens
cttctggtaatagtg

SEQ ID NO: 806953 - DNA, 15 bp, Homo sapiens
ttctggtaatagtgt

SEQ ID NO: 806954 - DNA, 15 bp, Homo sapiens
tctggtaatagtgtt

SEQ ID NO: 806955 - DNA, 15 bp, Homo sapiens
ctggtaatagtgttg

SEQ ID NO: 806956 - DNA, 15 bp, Homo sapiens
tggtaatagtgttgc

SEQ ID NO: 806957 - DNA, 15 bp, Homo sapiens
ggtaatagtgttgct

SEQ ID NO: 806958 - DNA, 15 bp, Homo sapiens
gtaatagtgttgctt

SEQ ID NO: 806959 - DNA, 15 bp, Homo sapiens
taatagtgttgcttt

SEQ ID NO: 806960 - DNA, 15 bp, Homo sapiens
aatagtgttgctttt

SEQ ID NO: 806961 - DNA, 15 bp, Homo sapiens
atagtgttgcttttc

SEQ ID NO: 806962 - DNA, 15 bp, Homo sapiens
tagtgttgcttttcc

SEQ ID NO: 806963 - DNA, 15 bp, Homo sapiens
agtgttgcttttcca

SEQ ID NO: 806964 - DNA, 15 bp, Homo sapiens
gtgttgcttttccat

SEQ ID NO: 806965 - DNA, 15 bp, Homo sapiens
tgttgcttttccatt

SEQ ID NO: 806966 - DNA, 15 bp, Homo sapiens
gttgcttttccattt

SEQ ID NO: 806967 - DNA, 15 bp, Homo sapiens
ttgcttttccatttc

SEQ ID NO: 806968 - DNA, 15 bp, Homo sapiens
tgcttttccatttct

SEQ ID NO: 806969 - DNA, 15 bp, Homo sapiens
agataagaaaattga

SEQ ID NO: 806970 - DNA, 15 bp, Homo sapiens
gataagaaaattgag

SEQ ID NO: 806971 - DNA, 15 bp, Homo sapiens
ataagaaaattgagg

SEQ ID NO: 806972 - DNA, 15 bp, Homo sapiens
taagaaaattgaggc

SEQ ID NO: 806973 - DNA, 15 bp, Homo sapiens
aagaaaattgaggcc

SEQ ID NO: 806974 - DNA, 15 bp, Homo sapiens
agaaaattgaggcca

SEQ ID NO: 806975 - DNA, 15 bp, Homo sapiens
gaaaattgaggccaa

SEQ ID NO: 806976 - DNA, 15 bp, Homo sapiens
aaaattgaggccaaa

SEQ ID NO: 806977 - DNA, 15 bp, Homo sapiens
aaattgaggccaaag

SEQ ID NO: 806978 - DNA, 15 bp, Homo sapiens
aattgaggccaaagg

SEQ ID NO: 806979 - DNA, 15 bp, Homo sapiens
attgaggccaaagga

SEQ ID NO: 806980 - DNA, 15 bp, Homo sapiens
ttgaggccaaaggat

SEQ ID NO: 806981 - DNA, 15 bp, Homo sapiens
tgaggccaaaggatc

SEQ ID NO: 806982 - DNA, 15 bp, Homo sapiens
gaggccaaaggatca

SEQ ID NO: 806983 - DNA, 15 bp, Homo sapiens
aggccaaaggatcaa

SEQ ID NO: 806984 - DNA, 15 bp, Homo sapiens
ggccaaaggatcaag

SEQ ID NO: 806985 - DNA, 15 bp, Homo sapiens
gccaaaggatcaaga

SEQ ID NO: 806986 - DNA, 15 bp, Homo sapiens
ccaaaggatcaagac

SEQ ID NO: 806987 - DNA, 15 bp, Homo sapiens
caaaggatcaagaca

SEQ ID NO: 806988 - DNA, 15 bp, Homo sapiens
aaaggatcaagacac

SEQ ID NO: 806989 - DNA, 15 bp, Homo sapiens
aaggatcaagacact

SEQ ID NO: 806990 - DNA, 15 bp, Homo sapiens
aggatcaagacactt

SEQ ID NO: 806991 - DNA, 15 bp, Homo sapiens
ggatcaagacacttg

SEQ ID NO: 806992 - DNA, 15 bp, Homo sapiens
gatcaagacacttgg

SEQ ID NO: 806993 - DNA, 15 bp, Homo sapiens
atcaagacacttggc

SEQ ID NO: 806994 - DNA, 15 bp, Homo sapiens
tcaagacacttggcc

SEQ ID NO: 806995 - DNA, 15 bp, Homo sapiens
caagacacttggcca

SEQ ID NO: 806996 - DNA, 15 bp, Homo sapiens
aagacacttggccaa

SEQ ID NO: 806997 - DNA, 15 bp, Homo sapiens
agacacttggccaac

SEQ ID NO: 806998 - DNA, 15 bp, Homo sapiens
gacacttggccaacg

SEQ ID NO: 806999 - DNA, 15 bp, Homo sapiens
acacttggccaacgc

SEQ ID NO: 807000 - DNA, 15 bp, Homo sapiens
cacttggccaacgca

SEQ ID NO: 807001 - DNA, 15 bp, Homo sapiens
acttggccaacgcag

SEQ ID NO: 807002 - DNA, 15 bp, Homo sapiens
cttggccaacgcagc

SEQ ID NO: 807003 - DNA, 15 bp, Homo sapiens
ttggccaacgcagca

SEQ ID NO: 807004 - DNA, 15 bp, Homo sapiens
tggccaacgcagcag

SEQ ID NO: 807005 - DNA, 15 bp, Homo sapiens
ggccaacgcagcaga

SEQ ID NO: 807006 - DNA, 15 bp, Homo sapiens
gccaacgcagcagag

SEQ ID NO: 807007 - DNA, 15 bp, Homo sapiens
ccaacgcagcagagt

SEQ ID NO: 807008 - DNA, 15 bp, Homo sapiens
caacgcagcagagtg

SEQ ID NO: 807009 - DNA, 15 bp, Homo sapiens
aacgcagcagagtgc

SEQ ID NO: 807010 - DNA, 15 bp, Homo sapiens
acgcagcagagtgcc

SEQ ID NO: 807011 - DNA, 15 bp, Homo sapiens
cgcagcagagtgcca

SEQ ID NO: 807012 - DNA, 15 bp, Homo sapiens
gcagcagagtgccat

SEQ ID NO: 807013 - DNA, 15 bp, Homo sapiens
cagcagagtgccata

SEQ ID NO: 807014 - DNA, 15 bp, Homo sapiens
agcagagtgccatag

SEQ ID NO: 807015 - DNA, 15 bp, Homo sapiens
gcagagtgccatagt

SEQ ID NO: 807016 - DNA, 15 bp, Homo sapiens
cagagtgccatagtg

SEQ ID NO: 807017 - DNA, 15 bp, Homo sapiens
agagtgccatagtgg

SEQ ID NO: 807018 - DNA, 15 bp, Homo sapiens
gagtgccatagtggt

SEQ ID NO: 807019 - DNA, 15 bp, Homo sapiens
agtgccatagtggtg

SEQ ID NO: 807020 - DNA, 15 bp, Homo sapiens
gtgccatagtggtgg

SEQ ID NO: 807021 - DNA, 15 bp, Homo sapiens
tgccatagtggtgga

SEQ ID NO: 807022 - DNA, 15 bp, Homo sapiens
gccatagtggtggaa

SEQ ID NO: 807023 - DNA, 15 bp, Homo sapiens
ccatagtggtggaat

SEQ ID NO: 807024 - DNA, 15 bp, Homo sapiens
catagtggtggaatt

SEQ ID NO: 807025 - DNA, 15 bp, Homo sapiens
atagtggtggaattt

SEQ ID NO: 807026 - DNA, 15 bp, Homo sapiens
tagtggtggaatttg

SEQ ID NO: 807027 - DNA, 15 bp, Homo sapiens
agtggtggaatttgt

SEQ ID NO: 807028 - DNA, 15 bp, Homo sapiens
gtggtggaatttgtg

SEQ ID NO: 807029 - DNA, 15 bp, Homo sapiens
tggtggaatttgtgc

SEQ ID NO: 807030 - DNA, 15 bp, Homo sapiens
ggtggaatttgtgcc

SEQ ID NO: 807031 - DNA, 15 bp, Homo sapiens
gtggaatttgtgcct

SEQ ID NO: 807032 - DNA, 15 bp, Homo sapiens
tggaatttgtgcctc

SEQ ID NO: 807033 - DNA, 15 bp, Homo sapiens
ggaatttgtgcctcc

SEQ ID NO: 807034 - DNA, 15 bp, Homo sapiens
gaatttgtgcctcct

SEQ ID NO: 807035 - DNA, 15 bp, Homo sapiens
aatttgtgcctcctt

SEQ ID NO: 807036 - DNA, 15 bp, Homo sapiens
atttgtgcctccttc

SEQ ID NO: 807037 - DNA, 15 bp, Homo sapiens
tttgtgcctccttct

SEQ ID NO: 807038 - DNA, 15 bp, Homo sapiens
ttgtgcctccttctg

SEQ ID NO: 807039 - DNA, 15 bp, Homo sapiens
tgtgcctccttctgt

SEQ ID NO: 807040 - DNA, 15 bp, Homo sapiens
gtgcctccttctgta

SEQ ID NO: 807041 - DNA, 15 bp, Homo sapiens
tgcctccttctgtat

SEQ ID NO: 807042 - DNA, 15 bp, Homo sapiens
gcctccttctgtata

SEQ ID NO: 807043 - DNA, 15 bp, Homo sapiens
cctccttctgtatat

SEQ ID NO: 807044 - DNA, 15 bp, Homo sapiens
ctccttctgtatatt

SEQ ID NO: 807045 - DNA, 15 bp, Homo sapiens
tccttctgtatattt

SEQ ID NO: 807046 - DNA, 15 bp, Homo sapiens
ccttctgtatatttt

SEQ ID NO: 807047 - DNA, 15 bp, Homo sapiens
cttctgtatattttg

SEQ ID NO: 807048 - DNA, 15 bp, Homo sapiens
ttctgtatattttgt

SEQ ID NO: 807049 - DNA, 15 bp, Homo sapiens
tctgtatattttgtg

SEQ ID NO: 807050 - DNA, 15 bp, Homo sapiens
ctgtatattttgtga

SEQ ID NO: 807051 - DNA, 15 bp, Homo sapiens
tgtatattttgtgaa

SEQ ID NO: 807052 - DNA, 15 bp, Homo sapiens
gtatattttgtgaaa

SEQ ID NO: 807053 - DNA, 15 bp, Homo sapiens
tatattttgtgaaaa

SEQ ID NO: 807054 - DNA, 15 bp, Homo sapiens
atattttgtgaaaag

SEQ ID NO: 807055 - DNA, 15 bp, Homo sapiens
tattttgtgaaaagt

SEQ ID NO: 807056 - DNA, 15 bp, Homo sapiens
attttgtgaaaagta

SEQ ID NO: 807057 - DNA, 15 bp, Homo sapiens
ttttgtgaaaagtat

SEQ ID NO: 807058 - DNA, 15 bp, Homo sapiens
tttgtgaaaagtatc

SEQ ID NO: 807059 - DNA, 15 bp, Homo sapiens
ttgtgaaaagtatca

SEQ ID NO: 807060 - DNA, 15 bp, Homo sapiens
tgtgaaaagtatcag

SEQ ID NO: 807061 - DNA, 15 bp, Homo sapiens
gtgaaaagtatcagt

SEQ ID NO: 807062 - DNA, 15 bp, Homo sapiens
tgaaaagtatcagtg

SEQ ID NO: 807063 - DNA, 15 bp, Homo sapiens
gaaaagtatcagtga

SEQ ID NO: 807064 - DNA, 15 bp, Homo sapiens
aaaagtatcagtgaa

SEQ ID NO: 807065 - DNA, 15 bp, Homo sapiens
aaagtatcagtgaaa

SEQ ID NO: 807066 - DNA, 15 bp, Homo sapiens
aagtatcagtgaaat

SEQ ID NO: 807067 - DNA, 15 bp, Homo sapiens
agtatcagtgaaatt

SEQ ID NO: 807068 - DNA, 15 bp, Homo sapiens
gtatcagtgaaattc

SEQ ID NO: 807069 - DNA, 15 bp, Homo sapiens
tatcagtgaaattct

SEQ ID NO: 807070 - DNA, 15 bp, Homo sapiens
atcagtgaaattctt

SEQ ID NO: 807071 - DNA, 15 bp, Homo sapiens
tcagtgaaattcttt

SEQ ID NO: 807072 - DNA, 15 bp, Homo sapiens
cagtgaaattctttt

SEQ ID NO: 807073 - DNA, 15 bp, Homo sapiens
agtgaaattcttttt

SEQ ID NO: 807074 - DNA, 15 bp, Homo sapiens
gtgaaattctttttt

SEQ ID NO: 807075 - DNA, 15 bp, Homo sapiens
tgaaattcttttttt

SEQ ID NO: 807076 - DNA, 15 bp, Homo sapiens
gaaattctttttttt

SEQ ID NO: 807077 - DNA, 15 bp, Homo sapiens
aaattcttttttttt

SEQ ID NO: 807078 - DNA, 15 bp, Homo sapiens
aattctttttttttt

SEQ ID NO: 807079 - DNA, 15 bp, Homo sapiens
attcttttttttttt

SEQ ID NO: 807080 - DNA, 15 bp, Homo sapiens
ttctttttttttttt

SEQ ID NO: 807081 - DNA, 15 bp, Homo sapiens
tcttttttttttttt

SEQ ID NO: 807082 - DNA, 15 bp, Homo sapiens
ctttttttttttttt

SEQ ID NO: 807083 - DNA, 15 bp, Homo sapiens
tttttttttttgagt

SEQ ID NO: 807084 - DNA, 15 bp, Homo sapiens
ttttttttttgagtc

SEQ ID NO: 807085 - DNA, 15 bp, Homo sapiens
tttttttttgagtca

SEQ ID NO: 807086 - DNA, 15 bp, Homo sapiens
ttttttttgagtcag

SEQ ID NO: 807087 - DNA, 15 bp, Homo sapiens
tttttttgagtcaga

SEQ ID NO: 807088 - DNA, 15 bp, Homo sapiens
ttttttgagtcagag

SEQ ID NO: 807089 - DNA, 15 bp, Homo sapiens
tttttgagtcagagt

SEQ ID NO: 807090 - DNA, 15 bp, Homo sapiens
ttttgagtcagagtc

SEQ ID NO: 807091 - DNA, 15 bp, Homo sapiens
tttgagtcagagtct

SEQ ID NO: 807092 - DNA, 15 bp, Homo sapiens
ttgagtcagagtctt

SEQ ID NO: 807093 - DNA, 15 bp, Homo sapiens
tgagtcagagtcttg

SEQ ID NO: 807094 - DNA, 15 bp, Homo sapiens
gagtcagagtcttgc

SEQ ID NO: 807095 - DNA, 15 bp, Homo sapiens
agtcagagtcttgct

SEQ ID NO: 807096 - DNA, 15 bp, Homo sapiens
gtcagagtcttgctc

SEQ ID NO: 807097 - DNA, 15 bp, Homo sapiens
tcagagtcttgctct

SEQ ID NO: 807098 - DNA, 15 bp, Homo sapiens
cagagtcttgctctg

SEQ ID NO: 807099 - DNA, 15 bp, Homo sapiens
agagtcttgctctgt

SEQ ID NO: 807100 - DNA, 15 bp, Homo sapiens
gagtcttgctctgtt

SEQ ID NO: 807101 - DNA, 15 bp, Homo sapiens
agtcttgctctgttg

SEQ ID NO: 807102 - DNA, 15 bp, Homo sapiens
gtcttgctctgttgc

SEQ ID NO: 807103 - DNA, 15 bp, Homo sapiens
tcttgctctgttgcc

SEQ ID NO: 807104 - DNA, 15 bp, Homo sapiens
cttgctctgttgccc

SEQ ID NO: 807105 - DNA, 15 bp, Homo sapiens
ttgctctgttgccca

SEQ ID NO: 807106 - DNA, 15 bp, Homo sapiens
tgctctgttgcccag

SEQ ID NO: 807107 - DNA, 15 bp, Homo sapiens
gctctgttgcccagg

SEQ ID NO: 807108 - DNA, 15 bp, Homo sapiens
ctctgttgcccaggc

SEQ ID NO: 807109 - DNA, 15 bp, Homo sapiens
tctgttgcccaggct

SEQ ID NO: 807110 - DNA, 15 bp, Homo sapiens
ctgttgcccaggcta

SEQ ID NO: 807111 - DNA, 15 bp, Homo sapiens
tgttgcccaggctag

SEQ ID NO: 807112 - DNA, 15 bp, Homo sapiens
gttgcccaggctaga

SEQ ID NO: 807113 - DNA, 15 bp, Homo sapiens
ttgcccaggctagag

SEQ ID NO: 807114 - DNA, 15 bp, Homo sapiens
tgcccaggctagagt

SEQ ID NO: 807115 - DNA, 15 bp, Homo sapiens
gcccaggctagagtg

SEQ ID NO: 807116 - DNA, 15 bp, Homo sapiens
cccaggctagagtgc

SEQ ID NO: 807117 - DNA, 15 bp, Homo sapiens
ccaggctagagtgca

SEQ ID NO: 807118 - DNA, 15 bp, Homo sapiens
caggctagagtgcag

SEQ ID NO: 807119 - DNA, 15 bp, Homo sapiens
aggctagagtgcagt

SEQ ID NO: 807120 - DNA, 15 bp, Homo sapiens
ggctagagtgcagtg

SEQ ID NO: 807121 - DNA, 15 bp, Homo sapiens
gctagagtgcagtgg

SEQ ID NO: 807122 - DNA, 15 bp, Homo sapiens
ctagagtgcagtggc

SEQ ID NO: 807123 - DNA, 15 bp, Homo sapiens
tagagtgcagtggcg

SEQ ID NO: 807124 - DNA, 15 bp, Homo sapiens
agagtgcagtggcgc

SEQ ID NO: 807125 - DNA, 15 bp, Homo sapiens
gagtgcagtggcgca

SEQ ID NO: 807126 - DNA, 15 bp, Homo sapiens
agtgcagtggcgcaa

SEQ ID NO: 807127 - DNA, 15 bp, Homo sapiens
gtgcagtggcgcaat

SEQ ID NO: 807128 - DNA, 15 bp, Homo sapiens
tgcagtggcgcaatc

SEQ ID NO: 807129 - DNA, 15 bp, Homo sapiens
gcagtggcgcaatct

SEQ ID NO: 807130 - DNA, 15 bp, Homo sapiens
cagtggcgcaatctt

SEQ ID NO: 807131 - DNA, 15 bp, Homo sapiens
agtggcgcaatcttg

SEQ ID NO: 807132 - DNA, 15 bp, Homo sapiens
gtggcgcaatcttgg

SEQ ID NO: 807133 - DNA, 15 bp, Homo sapiens
tggcgcaatcttggc

SEQ ID NO: 807134 - DNA, 15 bp, Homo sapiens
ggcgcaatcttggct

SEQ ID NO: 807135 - DNA, 15 bp, Homo sapiens
gcgcaatcttggctc

SEQ ID NO: 807136 - DNA, 15 bp, Homo sapiens
cgcaatcttggctca

SEQ ID NO: 807137 - DNA, 15 bp, Homo sapiens
ccaagtagctgggac

SEQ ID NO: 807138 - DNA, 15 bp, Homo sapiens
caagtagctgggact

SEQ ID NO: 807139 - DNA, 15 bp, Homo sapiens
aagtagctgggacta

SEQ ID NO: 807140 - DNA, 15 bp, Homo sapiens
agtagctgggactac

SEQ ID NO: 807141 - DNA, 15 bp, Homo sapiens
gtagctgggactaca

SEQ ID NO: 807142 - DNA, 15 bp, Homo sapiens
ctgggactacaggcg

SEQ ID NO: 807143 - DNA, 15 bp, Homo sapiens
tgggactacaggcgt

SEQ ID NO: 807144 - DNA, 15 bp, Homo sapiens
gggactacaggcgtg

SEQ ID NO: 807145 - DNA, 15 bp, Homo sapiens
ggactacaggcgtgc

SEQ ID NO: 807146 - DNA, 15 bp, Homo sapiens
gactacaggcgtgcg

SEQ ID NO: 807147 - DNA, 15 bp, Homo sapiens
actacaggcgtgcgc

SEQ ID NO: 807148 - DNA, 15 bp, Homo sapiens
ctacaggcgtgcgcc

SEQ ID NO: 807149 - DNA, 15 bp, Homo sapiens
tacaggcgtgcgcca

SEQ ID NO: 807150 - DNA, 15 bp, Homo sapiens
acaggcgtgcgccac

SEQ ID NO: 807151 - DNA, 15 bp, Homo sapiens
caggcgtgcgccacc

SEQ ID NO: 807152 - DNA, 15 bp, Homo sapiens
aggcgtgcgccacca

SEQ ID NO: 807153 - DNA, 15 bp, Homo sapiens
ggcgtgcgccaccac

SEQ ID NO: 807154 - DNA, 15 bp, Homo sapiens
gcgtgcgccaccacg

SEQ ID NO: 807155 - DNA, 15 bp, Homo sapiens
cgtgcgccaccacgc

SEQ ID NO: 807156 - DNA, 15 bp, Homo sapiens
gtgcgccaccacgcc

SEQ ID NO: 807157 - DNA, 15 bp, Homo sapiens
tgcgccaccacgccc

SEQ ID NO: 807158 - DNA, 15 bp, Homo sapiens
gcgccaccacgccca

SEQ ID NO: 807159 - DNA, 15 bp, Homo sapiens
cgccaccacgcccag

SEQ ID NO: 807160 - DNA, 15 bp, Homo sapiens
gccaccacgcccagc

SEQ ID NO: 807161 - DNA, 15 bp, Homo sapiens
ccaccacgcccagct

SEQ ID NO: 807162 - DNA, 15 bp, Homo sapiens
caccacgcccagcta

SEQ ID NO: 807163 - DNA, 15 bp, Homo sapiens
accacgcccagctaa

SEQ ID NO: 807164 - DNA, 15 bp, Homo sapiens
ccacgcccagctaat

SEQ ID NO: 807165 - DNA, 15 bp, Homo sapiens
cacgcccagctaatt

SEQ ID NO: 807166 - DNA, 15 bp, Homo sapiens
acgcccagctaattt

SEQ ID NO: 807167 - DNA, 15 bp, Homo sapiens
cgcccagctaatttt

SEQ ID NO: 807168 - DNA, 15 bp, Homo sapiens
tttttagtagagacc

SEQ ID NO: 807169 - DNA, 15 bp, Homo sapiens
ttttagtagagaccg

SEQ ID NO: 807170 - DNA, 15 bp, Homo sapiens
tttagtagagaccgg

SEQ ID NO: 807171 - DNA, 15 bp, Homo sapiens
ttagtagagaccggg

SEQ ID NO: 807172 - DNA, 15 bp, Homo sapiens
tagtagagaccgggg

SEQ ID NO: 807173 - DNA, 15 bp, Homo sapiens
agtagagaccggggt

SEQ ID NO: 807174 - DNA, 15 bp, Homo sapiens
gtagagaccggggtt

SEQ ID NO: 807175 - DNA, 15 bp, Homo sapiens
tagagaccggggttt

SEQ ID NO: 807176 - DNA, 15 bp, Homo sapiens
agagaccggggtttt

SEQ ID NO: 807177 - DNA, 15 bp, Homo sapiens
gagaccggggtttta

SEQ ID NO: 807178 - DNA, 15 bp, Homo sapiens
agaccggggttttac

SEQ ID NO: 807179 - DNA, 15 bp, Homo sapiens
gaccggggttttacc

SEQ ID NO: 807180 - DNA, 15 bp, Homo sapiens
accggggttttacca

SEQ ID NO: 807181 - DNA, 15 bp, Homo sapiens
ccggggttttaccat

SEQ ID NO: 807182 - DNA, 15 bp, Homo sapiens
cggggttttaccata

SEQ ID NO: 807183 - DNA, 15 bp, Homo sapiens
ggggttttaccatat

SEQ ID NO: 807184 - DNA, 15 bp, Homo sapiens
gggttttaccatatt

SEQ ID NO: 807185 - DNA, 15 bp, Homo sapiens
ggttttaccatattg

SEQ ID NO: 807186 - DNA, 15 bp, Homo sapiens
gttttaccatattgg

SEQ ID NO: 807187 - DNA, 15 bp, Homo sapiens
ttttaccatattggc

SEQ ID NO: 807188 - DNA, 15 bp, Homo sapiens
tttaccatattggcc

SEQ ID NO: 807189 - DNA, 15 bp, Homo sapiens
ttaccatattggcca

SEQ ID NO: 807190 - DNA, 15 bp, Homo sapiens
taccatattggccag

SEQ ID NO: 807191 - DNA, 15 bp, Homo sapiens
accatattggccagg

SEQ ID NO: 807192 - DNA, 15 bp, Homo sapiens
ccatattggccaggc

SEQ ID NO: 807193 - DNA, 15 bp, Homo sapiens
catattggccaggct

SEQ ID NO: 807194 - DNA, 15 bp, Homo sapiens
atattggccaggctg

SEQ ID NO: 807195 - DNA, 15 bp, Homo sapiens
tattggccaggctgg

SEQ ID NO: 807196 - DNA, 15 bp, Homo sapiens
attggccaggctggt

SEQ ID NO: 807197 - DNA, 15 bp, Homo sapiens
tgaactcctgacctt

SEQ ID NO: 807198 - DNA, 15 bp, Homo sapiens
gaactcctgaccttg

SEQ ID NO: 807199 - DNA, 15 bp, Homo sapiens
aactcctgaccttgt

SEQ ID NO: 807200 - DNA, 15 bp, Homo sapiens
actcctgaccttgtg

SEQ ID NO: 807201 - DNA, 15 bp, Homo sapiens
ctcctgaccttgtga

SEQ ID NO: 807202 - DNA, 15 bp, Homo sapiens
tcctgaccttgtgat

SEQ ID NO: 807203 - DNA, 15 bp, Homo sapiens
cctgaccttgtgatt

SEQ ID NO: 807204 - DNA, 15 bp, Homo sapiens
ctgaccttgtgattt

SEQ ID NO: 807205 - DNA, 15 bp, Homo sapiens
tgaccttgtgatttg

SEQ ID NO: 807206 - DNA, 15 bp, Homo sapiens
gaccttgtgatttgc

SEQ ID NO: 807207 - DNA, 15 bp, Homo sapiens
accttgtgatttgcc

SEQ ID NO: 807208 - DNA, 15 bp, Homo sapiens
ccttgtgatttgccc

SEQ ID NO: 807209 - DNA, 15 bp, Homo sapiens
cttgtgatttgccca

SEQ ID NO: 807210 - DNA, 15 bp, Homo sapiens
ttgtgatttgcccac

SEQ ID NO: 807211 - DNA, 15 bp, Homo sapiens
tgtgatttgcccacc

SEQ ID NO: 807212 - DNA, 15 bp, Homo sapiens
gtgatttgcccacct

SEQ ID NO: 807213 - DNA, 15 bp, Homo sapiens
tgatttgcccacctc

SEQ ID NO: 807214 - DNA, 15 bp, Homo sapiens
gatttgcccacctct

SEQ ID NO: 807215 - DNA, 15 bp, Homo sapiens
atttgcccacctcta

SEQ ID NO: 807216 - DNA, 15 bp, Homo sapiens
tttgcccacctctat

SEQ ID NO: 807217 - DNA, 15 bp, Homo sapiens
ttgcccacctctatc

SEQ ID NO: 807218 - DNA, 15 bp, Homo sapiens
tgcccacctctatct

SEQ ID NO: 807219 - DNA, 15 bp, Homo sapiens
gcccacctctatctc

SEQ ID NO: 807220 - DNA, 15 bp, Homo sapiens
cccacctctatctcc

SEQ ID NO: 807221 - DNA, 15 bp, Homo sapiens
ccacctctatctccc

SEQ ID NO: 807222 - DNA, 15 bp, Homo sapiens
cacctctatctccca

SEQ ID NO: 807223 - DNA, 15 bp, Homo sapiens
acctctatctcccaa

SEQ ID NO: 807224 - DNA, 15 bp, Homo sapiens
cctctatctcccaaa

SEQ ID NO: 807225 - DNA, 15 bp, Homo sapiens
ctctatctcccaaag

SEQ ID NO: 807226 - DNA, 15 bp, Homo sapiens
tctatctcccaaagt

SEQ ID NO: 807227 - DNA, 15 bp, Homo sapiens
ctatctcccaaagtg

SEQ ID NO: 807228 - DNA, 15 bp, Homo sapiens
tatctcccaaagtgc

SEQ ID NO: 807229 - DNA, 15 bp, Homo sapiens
atctcccaaagtgct

SEQ ID NO: 807230 - DNA, 15 bp, Homo sapiens
tctcccaaagtgctg

SEQ ID NO: 807231 - DNA, 15 bp, Homo sapiens
caggtgtgagccacc

SEQ ID NO: 807232 - DNA, 15 bp, Homo sapiens
aggtgtgagccaccg

SEQ ID NO: 807233 - DNA, 15 bp, Homo sapiens
ggtgtgagccaccgc

SEQ ID NO: 807234 - DNA, 15 bp, Homo sapiens
gtgtgagccaccgcg

SEQ ID NO: 807235 - DNA, 15 bp, Homo sapiens
tgtgagccaccgcgc

SEQ ID NO: 807236 - DNA, 15 bp, Homo sapiens
gtgagccaccgcgcc

SEQ ID NO: 807237 - DNA, 15 bp, Homo sapiens
gccaccgcgcccagt

SEQ ID NO: 807238 - DNA, 15 bp, Homo sapiens
ccaccgcgcccagta

SEQ ID NO: 807239 - DNA, 15 bp, Homo sapiens
caccgcgcccagtaa

SEQ ID NO: 807240 - DNA, 15 bp, Homo sapiens
accgcgcccagtaag

SEQ ID NO: 807241 - DNA, 15 bp, Homo sapiens
ccgcgcccagtaagt

SEQ ID NO: 807242 - DNA, 15 bp, Homo sapiens
cgcgcccagtaagta

SEQ ID NO: 807243 - DNA, 15 bp, Homo sapiens
gcgcccagtaagtat

SEQ ID NO: 807244 - DNA, 15 bp, Homo sapiens
cgcccagtaagtatc

SEQ ID NO: 807245 - DNA, 15 bp, Homo sapiens
gcccagtaagtatca

SEQ ID NO: 807246 - DNA, 15 bp, Homo sapiens
cccagtaagtatcag

SEQ ID NO: 807247 - DNA, 15 bp, Homo sapiens
ccagtaagtatcagt

SEQ ID NO: 807248 - DNA, 15 bp, Homo sapiens
cagtaagtatcagtg

SEQ ID NO: 807249 - DNA, 15 bp, Homo sapiens
agtaagtatcagtga

SEQ ID NO: 807250 - DNA, 15 bp, Homo sapiens
gtaagtatcagtgaa

SEQ ID NO: 807251 - DNA, 15 bp, Homo sapiens
taagtatcagtgaaa

SEQ ID NO: 807252 - DNA, 15 bp, Homo sapiens
atcagtgaaattcta

SEQ ID NO: 807253 - DNA, 15 bp, Homo sapiens
tcagtgaaattctaa

SEQ ID NO: 807254 - DNA, 15 bp, Homo sapiens
cagtgaaattctaac

SEQ ID NO: 807255 - DNA, 15 bp, Homo sapiens
agtgaaattctaaca

SEQ ID NO: 807256 - DNA, 15 bp, Homo sapiens
gtgaaattctaacat

SEQ ID NO: 807257 - DNA, 15 bp, Homo sapiens
tgaaattctaacata

SEQ ID NO: 807258 - DNA, 15 bp, Homo sapiens
gaaattctaacatat

SEQ ID NO: 807259 - DNA, 15 bp, Homo sapiens
aaattctaacatata

SEQ ID NO: 807260 - DNA, 15 bp, Homo sapiens
aattctaacatatat

SEQ ID NO: 807261 - DNA, 15 bp, Homo sapiens
attctaacatatatc

SEQ ID NO: 807262 - DNA, 15 bp, Homo sapiens
ttctaacatatatct

SEQ ID NO: 807263 - DNA, 15 bp, Homo sapiens
tctaacatatatctg

SEQ ID NO: 807264 - DNA, 15 bp, Homo sapiens
ctaacatatatctga

SEQ ID NO: 807265 - DNA, 15 bp, Homo sapiens
taacatatatctgaa

SEQ ID NO: 807266 - DNA, 15 bp, Homo sapiens
aacatatatctgaac

SEQ ID NO: 807267 - DNA, 15 bp, Homo sapiens
acatatatctgaaca

SEQ ID NO: 807268 - DNA, 15 bp, Homo sapiens
catatatctgaacag

SEQ ID NO: 807269 - DNA, 15 bp, Homo sapiens
atatatctgaacagt

SEQ ID NO: 807270 - DNA, 15 bp, Homo sapiens
tatatctgaacagta

SEQ ID NO: 807271 - DNA, 15 bp, Homo sapiens
atatctgaacagtaa

SEQ ID NO: 807272 - DNA, 15 bp, Homo sapiens
tatctgaacagtaaa

SEQ ID NO: 807273 - DNA, 15 bp, Homo sapiens
atctgaacagtaaaa

SEQ ID NO: 807274 - DNA, 15 bp, Homo sapiens
tctgaacagtaaaat

SEQ ID NO: 807275 - DNA, 15 bp, Homo sapiens
ctgaacagtaaaata

SEQ ID NO: 807276 - DNA, 15 bp, Homo sapiens
tgaacagtaaaatac

SEQ ID NO: 807277 - DNA, 15 bp, Homo sapiens
gaacagtaaaatacc

SEQ ID NO: 807278 - DNA, 15 bp, Homo sapiens
aacagtaaaatacca

SEQ ID NO: 807279 - DNA, 15 bp, Homo sapiens
acagtaaaataccac

SEQ ID NO: 807280 - DNA, 15 bp, Homo sapiens
cagtaaaataccacc

SEQ ID NO: 807281 - DNA, 15 bp, Homo sapiens
agtaaaataccacca

SEQ ID NO: 807282 - DNA, 15 bp, Homo sapiens
gtaaaataccaccaa

SEQ ID NO: 807283 - DNA, 15 bp, Homo sapiens
taaaataccaccaat

SEQ ID NO: 807284 - DNA, 15 bp, Homo sapiens
aaaataccaccaata

SEQ ID NO: 807285 - DNA, 15 bp, Homo sapiens
aaataccaccaatag

SEQ ID NO: 807286 - DNA, 15 bp, Homo sapiens
aataccaccaatagg

SEQ ID NO: 807287 - DNA, 15 bp, Homo sapiens
ataccaccaataggc

SEQ ID NO: 807288 - DNA, 15 bp, Homo sapiens
taccaccaataggct

SEQ ID NO: 807289 - DNA, 15 bp, Homo sapiens
accaccaataggctg

SEQ ID NO: 807290 - DNA, 15 bp, Homo sapiens
ccaccaataggctga

SEQ ID NO: 807291 - DNA, 15 bp, Homo sapiens
caccaataggctgaa

SEQ ID NO: 807292 - DNA, 15 bp, Homo sapiens
accaataggctgaaa

SEQ ID NO: 807293 - DNA, 15 bp, Homo sapiens
ccaataggctgaaag

SEQ ID NO: 807294 - DNA, 15 bp, Homo sapiens
caataggctgaaaga

SEQ ID NO: 807295 - DNA, 15 bp, Homo sapiens
aataggctgaaagac

SEQ ID NO: 807296 - DNA, 15 bp, Homo sapiens
ataggctgaaagact

SEQ ID NO: 807297 - DNA, 15 bp, Homo sapiens
taggctgaaagactt

SEQ ID NO: 807298 - DNA, 15 bp, Homo sapiens
aggctgaaagacttc

SEQ ID NO: 807299 - DNA, 15 bp, Homo sapiens
ggctgaaagacttca

SEQ ID NO: 807300 - DNA, 15 bp, Homo sapiens
gctgaaagacttcat

SEQ ID NO: 807301 - DNA, 15 bp, Homo sapiens
ctgaaagacttcatg

SEQ ID NO: 807302 - DNA, 15 bp, Homo sapiens
tgaaagacttcatgg

SEQ ID NO: 807303 - DNA, 15 bp, Homo sapiens
gaaagacttcatggg

SEQ ID NO: 807304 - DNA, 15 bp, Homo sapiens
aaagacttcatggga

SEQ ID NO: 807305 - DNA, 15 bp, Homo sapiens
aagacttcatgggag

SEQ ID NO: 807306 - DNA, 15 bp, Homo sapiens
agacttcatgggagg

SEQ ID NO: 807307 - DNA, 15 bp, Homo sapiens
gacttcatgggaggt

SEQ ID NO: 807308 - DNA, 15 bp, Homo sapiens
acttcatgggaggta

SEQ ID NO: 807309 - DNA, 15 bp, Homo sapiens
cttcatgggaggtaa

SEQ ID NO: 807310 - DNA, 15 bp, Homo sapiens
ttcatgggaggtaaa

SEQ ID NO: 807311 - DNA, 15 bp, Homo sapiens
tcatgggaggtaaat

SEQ ID NO: 807312 - DNA, 15 bp, Homo sapiens
catgggaggtaaata

SEQ ID NO: 807313 - DNA, 15 bp, Homo sapiens
atgggaggtaaatat

SEQ ID NO: 807314 - DNA, 15 bp, Homo sapiens
tgggaggtaaatatt

SEQ ID NO: 807315 - DNA, 15 bp, Homo sapiens
gggaggtaaatattc

SEQ ID NO: 807316 - DNA, 15 bp, Homo sapiens
ggaggtaaatattca

SEQ ID NO: 807317 - DNA, 15 bp, Homo sapiens
gaggtaaatattcaa

SEQ ID NO: 807318 - DNA, 15 bp, Homo sapiens
aggtaaatattcaat

SEQ ID NO: 807319 - DNA, 15 bp, Homo sapiens
ggtaaatattcaata

SEQ ID NO: 807320 - DNA, 15 bp, Homo sapiens
gtaaatattcaataa

SEQ ID NO: 807321 - DNA, 15 bp, Homo sapiens
taaatattcaataaa

SEQ ID NO: 807322 - DNA, 15 bp, Homo sapiens
aaatattcaataaac

SEQ ID NO: 807323 - DNA, 15 bp, Homo sapiens
aatattcaataaaca

SEQ ID NO: 807324 - DNA, 15 bp, Homo sapiens
atattcaataaacag

SEQ ID NO: 807325 - DNA, 15 bp, Homo sapiens
tattcaataaacagg

SEQ ID NO: 807326 - DNA, 15 bp, Homo sapiens
attcaataaacaggt

SEQ ID NO: 807327 - DNA, 15 bp, Homo sapiens
ttcaataaacaggtg

SEQ ID NO: 807328 - DNA, 15 bp, Homo sapiens
tcaataaacaggtga

SEQ ID NO: 807329 - DNA, 15 bp, Homo sapiens
caataaacaggtgaa

SEQ ID NO: 807330 - DNA, 15 bp, Homo sapiens
aataaacaggtgaaa

SEQ ID NO: 807331 - DNA, 15 bp, Homo sapiens
ataaacaggtgaaaa

SEQ ID NO: 807332 - DNA, 15 bp, Homo sapiens
taaacaggtgaaaaa

SEQ ID NO: 807333 - DNA, 15 bp, Homo sapiens
aaacaggtgaaaaaa

SEQ ID NO: 807334 - DNA, 15 bp, Homo sapiens
aacaggtgaaaaaag

SEQ ID NO: 807335 - DNA, 15 bp, Homo sapiens
acaggtgaaaaaaga

SEQ ID NO: 807336 - DNA, 15 bp, Homo sapiens
caggtgaaaaaagaa

SEQ ID NO: 807337 - DNA, 15 bp, Homo sapiens
aggtgaaaaaagaaa

SEQ ID NO: 807338 - DNA, 15 bp, Homo sapiens
ggtgaaaaaagaaat

SEQ ID NO: 807339 - DNA, 15 bp, Homo sapiens
gtgaaaaaagaaata

SEQ ID NO: 807340 - DNA, 15 bp, Homo sapiens
tgaaaaaagaaatac

SEQ ID NO: 807341 - DNA, 15 bp, Homo sapiens
gaaaaaagaaataca

SEQ ID NO: 807342 - DNA, 15 bp, Homo sapiens
aaaaaagaaatacaa

SEQ ID NO: 807343 - DNA, 15 bp, Homo sapiens
aaaaagaaatacaaa

SEQ ID NO: 807344 - DNA, 15 bp, Homo sapiens
aaaagaaatacaaat

SEQ ID NO: 807345 - DNA, 15 bp, Homo sapiens
aaagaaatacaaatg

SEQ ID NO: 807346 - DNA, 15 bp, Homo sapiens
aagaaatacaaatgg

SEQ ID NO: 807347 - DNA, 15 bp, Homo sapiens
agaaatacaaatgga

SEQ ID NO: 807348 - DNA, 15 bp, Homo sapiens
gaaatacaaatggag

SEQ ID NO: 807349 - DNA, 15 bp, Homo sapiens
aaatacaaatggagc

SEQ ID NO: 807350 - DNA, 15 bp, Homo sapiens
aatacaaatggagct

SEQ ID NO: 807351 - DNA, 15 bp, Homo sapiens
atacaaatggagctt

SEQ ID NO: 807352 - DNA, 15 bp, Homo sapiens
tacaaatggagcttg

SEQ ID NO: 807353 - DNA, 15 bp, Homo sapiens
acaaatggagcttgc

SEQ ID NO: 807354 - DNA, 15 bp, Homo sapiens
caaatggagcttgct

SEQ ID NO: 807355 - DNA, 15 bp, Homo sapiens
aaatggagcttgctt

SEQ ID NO: 807356 - DNA, 15 bp, Homo sapiens
aatggagcttgctta

SEQ ID NO: 807357 - DNA, 15 bp, Homo sapiens
atggagcttgcttag

SEQ ID NO: 807358 - DNA, 15 bp, Homo sapiens
tggagcttgcttaga

SEQ ID NO: 807359 - DNA, 15 bp, Homo sapiens
ggagcttgcttagat

SEQ ID NO: 807360 - DNA, 15 bp, Homo sapiens
gagcttgcttagatt

SEQ ID NO: 807361 - DNA, 15 bp, Homo sapiens
agcttgcttagatta

SEQ ID NO: 807362 - DNA, 15 bp, Homo sapiens
gcttgcttagattat

SEQ ID NO: 807363 - DNA, 15 bp, Homo sapiens
cttgcttagattatt

SEQ ID NO: 807364 - DNA, 15 bp, Homo sapiens
ttgcttagattattt

SEQ ID NO: 807365 - DNA, 15 bp, Homo sapiens
tgcttagattatttt

SEQ ID NO: 807366 - DNA, 15 bp, Homo sapiens
gcttagattattttt

SEQ ID NO: 807367 - DNA, 15 bp, Homo sapiens
cttagattatttttc

SEQ ID NO: 807368 - DNA, 15 bp, Homo sapiens
ttagattatttttct

SEQ ID NO: 807369 - DNA, 15 bp, Homo sapiens
tagattatttttcta

SEQ ID NO: 807370 - DNA, 15 bp, Homo sapiens
agattatttttctaa

SEQ ID NO: 807371 - DNA, 15 bp, Homo sapiens
gattatttttctaat

SEQ ID NO: 807372 - DNA, 15 bp, Homo sapiens
attatttttctaatt

SEQ ID NO: 807373 - DNA, 15 bp, Homo sapiens
ttatttttctaattg

SEQ ID NO: 807374 - DNA, 15 bp, Homo sapiens
tatttttctaattgc

SEQ ID NO: 807375 - DNA, 15 bp, Homo sapiens
atttttctaattgct

SEQ ID NO: 807376 - DNA, 15 bp, Homo sapiens
tttttctaattgcta

SEQ ID NO: 807377 - DNA, 15 bp, Homo sapiens
ttttctaattgctat

SEQ ID NO: 807378 - DNA, 15 bp, Homo sapiens
tttctaattgctatg

SEQ ID NO: 807379 - DNA, 15 bp, Homo sapiens
ttctaattgctatgt

SEQ ID NO: 807380 - DNA, 15 bp, Homo sapiens
tctaattgctatgtc

SEQ ID NO: 807381 - DNA, 15 bp, Homo sapiens
ctaattgctatgtct

SEQ ID NO: 807382 - DNA, 15 bp, Homo sapiens
taattgctatgtcta

SEQ ID NO: 807383 - DNA, 15 bp, Homo sapiens
aattgctatgtctaa

SEQ ID NO: 807384 - DNA, 15 bp, Homo sapiens
attgctatgtctaac

SEQ ID NO: 807385 - DNA, 15 bp, Homo sapiens
ttgctatgtctaact

SEQ ID NO: 807386 - DNA, 15 bp, Homo sapiens
tgctatgtctaactt

SEQ ID NO: 807387 - DNA, 15 bp, Homo sapiens
gctatgtctaacttg

SEQ ID NO: 807388 - DNA, 15 bp, Homo sapiens
ctatgtctaacttgg

SEQ ID NO: 807389 - DNA, 15 bp, Homo sapiens
tatgtctaacttggg

SEQ ID NO: 807390 - DNA, 15 bp, Homo sapiens
atgtctaacttggga

SEQ ID NO: 807391 - DNA, 15 bp, Homo sapiens
tgtctaacttgggaa

SEQ ID NO: 807392 - DNA, 15 bp, Homo sapiens
gtctaacttgggaag

SEQ ID NO: 807393 - DNA, 15 bp, Homo sapiens
tctaacttgggaagt

SEQ ID NO: 807394 - DNA, 15 bp, Homo sapiens
ctaacttgggaagtg

SEQ ID NO: 807395 - DNA, 15 bp, Homo sapiens
taacttgggaagtga

SEQ ID NO: 807396 - DNA, 15 bp, Homo sapiens
aacttgggaagtgag

SEQ ID NO: 807397 - DNA, 15 bp, Homo sapiens
acttgggaagtgagg

SEQ ID NO: 807398 - DNA, 15 bp, Homo sapiens
cttgggaagtgagga

SEQ ID NO: 807399 - DNA, 15 bp, Homo sapiens
ttgggaagtgaggaa

SEQ ID NO: 807400 - DNA, 15 bp, Homo sapiens
tgggaagtgaggaac

SEQ ID NO: 807401 - DNA, 15 bp, Homo sapiens
gggaagtgaggaact

SEQ ID NO: 807402 - DNA, 15 bp, Homo sapiens
ggaagtgaggaactg

SEQ ID NO: 807403 - DNA, 15 bp, Homo sapiens
gaagtgaggaactgt

SEQ ID NO: 807404 - DNA, 15 bp, Homo sapiens
aagtgaggaactgtt

SEQ ID NO: 807405 - DNA, 15 bp, Homo sapiens
agtgaggaactgttt

SEQ ID NO: 807406 - DNA, 15 bp, Homo sapiens
gtgaggaactgtttt

SEQ ID NO: 807407 - DNA, 15 bp, Homo sapiens
tgaggaactgttttt

SEQ ID NO: 807408 - DNA, 15 bp, Homo sapiens
gaggaactgtttttg

SEQ ID NO: 807409 - DNA, 15 bp, Homo sapiens
aggaactgtttttgg

SEQ ID NO: 807410 - DNA, 15 bp, Homo sapiens
ggaactgtttttggt

SEQ ID NO: 807411 - DNA, 15 bp, Homo sapiens
gaactgtttttggtc

SEQ ID NO: 807412 - DNA, 15 bp, Homo sapiens
aactgtttttggtca

SEQ ID NO: 807413 - DNA, 15 bp, Homo sapiens
actgtttttggtcag

SEQ ID NO: 807414 - DNA, 15 bp, Homo sapiens
ctgtttttggtcagc

SEQ ID NO: 807415 - DNA, 15 bp, Homo sapiens
tgtttttggtcagca

SEQ ID NO: 807416 - DNA, 15 bp, Homo sapiens
gtttttggtcagcat

SEQ ID NO: 807417 - DNA, 15 bp, Homo sapiens
tttttggtcagcata

SEQ ID NO: 807418 - DNA, 15 bp, Homo sapiens
ttttggtcagcataa

SEQ ID NO: 807419 - DNA, 15 bp, Homo sapiens
tttggtcagcataat

SEQ ID NO: 807420 - DNA, 15 bp, Homo sapiens
ttggtcagcataatt

SEQ ID NO: 807421 - DNA, 15 bp, Homo sapiens
tggtcagcataattt

SEQ ID NO: 807422 - DNA, 15 bp, Homo sapiens
ggtcagcataattta

SEQ ID NO: 807423 - DNA, 15 bp, Homo sapiens
gtcagcataatttac

SEQ ID NO: 807424 - DNA, 15 bp, Homo sapiens
tcagcataatttacc

SEQ ID NO: 807425 - DNA, 15 bp, Homo sapiens
cagcataatttacca

SEQ ID NO: 807426 - DNA, 15 bp, Homo sapiens
agcataatttaccat

SEQ ID NO: 807427 - DNA, 15 bp, Homo sapiens
gcataatttaccatc

SEQ ID NO: 807428 - DNA, 15 bp, Homo sapiens
cataatttaccatca

SEQ ID NO: 807429 - DNA, 15 bp, Homo sapiens
ataatttaccatcag

SEQ ID NO: 807430 - DNA, 15 bp, Homo sapiens
taatttaccatcaga

SEQ ID NO: 807431 - DNA, 15 bp, Homo sapiens
aatttaccatcagaa

SEQ ID NO: 807432 - DNA, 15 bp, Homo sapiens
atttaccatcagaat

SEQ ID NO: 807433 - DNA, 15 bp, Homo sapiens
tttaccatcagaatt

SEQ ID NO: 807434 - DNA, 15 bp, Homo sapiens
ttaccatcagaattt

SEQ ID NO: 807435 - DNA, 15 bp, Homo sapiens
taccatcagaattta

SEQ ID NO: 807436 - DNA, 15 bp, Homo sapiens
accatcagaatttag

SEQ ID NO: 807437 - DNA, 15 bp, Homo sapiens
ccatcagaatttagc

SEQ ID NO: 807438 - DNA, 15 bp, Homo sapiens
catcagaatttagct

SEQ ID NO: 807439 - DNA, 15 bp, Homo sapiens
atcagaatttagcta

SEQ ID NO: 807440 - DNA, 15 bp, Homo sapiens
tcagaatttagctat

SEQ ID NO: 807441 - DNA, 15 bp, Homo sapiens
cagaatttagctatt

SEQ ID NO: 807442 - DNA, 15 bp, Homo sapiens
agaatttagctattt

SEQ ID NO: 807443 - DNA, 15 bp, Homo sapiens
gaatttagctattta

SEQ ID NO: 807444 - DNA, 15 bp, Homo sapiens
aatttagctatttac

SEQ ID NO: 807445 - DNA, 15 bp, Homo sapiens
atttagctatttact

SEQ ID NO: 807446 - DNA, 15 bp, Homo sapiens
tttagctatttacta

SEQ ID NO: 807447 - DNA, 15 bp, Homo sapiens
ttagctatttactaa

SEQ ID NO: 807448 - DNA, 15 bp, Homo sapiens
tagctatttactaat

SEQ ID NO: 807449 - DNA, 15 bp, Homo sapiens
agctatttactaatg

SEQ ID NO: 807450 - DNA, 15 bp, Homo sapiens
gctatttactaatga

SEQ ID NO: 807451 - DNA, 15 bp, Homo sapiens
ctatttactaatgaa

SEQ ID NO: 807452 - DNA, 15 bp, Homo sapiens
tatttactaatgaaa

SEQ ID NO: 807453 - DNA, 15 bp, Homo sapiens
atttactaatgaaaa

SEQ ID NO: 807454 - DNA, 15 bp, Homo sapiens
tttactaatgaaaag

SEQ ID NO: 807455 - DNA, 15 bp, Homo sapiens
ttactaatgaaaaga

SEQ ID NO: 807456 - DNA, 15 bp, Homo sapiens
tactaatgaaaagaa

SEQ ID NO: 807457 - DNA, 15 bp, Homo sapiens
actaatgaaaagaaa

SEQ ID NO: 807458 - DNA, 15 bp, Homo sapiens
ctaatgaaaagaaat

SEQ ID NO: 807459 - DNA, 15 bp, Homo sapiens
taatgaaaagaaata

SEQ ID NO: 807460 - DNA, 15 bp, Homo sapiens
aatgaaaagaaatac

SEQ ID NO: 807461 - DNA, 15 bp, Homo sapiens
atgaaaagaaatact

SEQ ID NO: 807462 - DNA, 15 bp, Homo sapiens
tgaaaagaaatacta

SEQ ID NO: 807463 - DNA, 15 bp, Homo sapiens
gaaaagaaatactaa

SEQ ID NO: 807464 - DNA, 15 bp, Homo sapiens
aaaagaaatactaat

SEQ ID NO: 807465 - DNA, 15 bp, Homo sapiens
aaagaaatactaatc

SEQ ID NO: 807466 - DNA, 15 bp, Homo sapiens
aagaaatactaatct

SEQ ID NO: 807467 - DNA, 15 bp, Homo sapiens
agaaatactaatcta

SEQ ID NO: 807468 - DNA, 15 bp, Homo sapiens
gaaatactaatctag

SEQ ID NO: 807469 - DNA, 15 bp, Homo sapiens
aaatactaatctagg

SEQ ID NO: 807470 - DNA, 15 bp, Homo sapiens
aatactaatctaggt

SEQ ID NO: 807471 - DNA, 15 bp, Homo sapiens
atactaatctaggtt

SEQ ID NO: 807472 - DNA, 15 bp, Homo sapiens
tactaatctaggttt

SEQ ID NO: 807473 - DNA, 15 bp, Homo sapiens
actaatctaggtttg

SEQ ID NO: 807474 - DNA, 15 bp, Homo sapiens
ctaatctaggtttgt

SEQ ID NO: 807475 - DNA, 15 bp, Homo sapiens
taatctaggtttgtt

SEQ ID NO: 807476 - DNA, 15 bp, Homo sapiens
aatctaggtttgttt

SEQ ID NO: 807477 - DNA, 15 bp, Homo sapiens
atctaggtttgtttt

SEQ ID NO: 807478 - DNA, 15 bp, Homo sapiens
tctaggtttgtttta

SEQ ID NO: 807479 - DNA, 15 bp, Homo sapiens
ctaggtttgttttag

SEQ ID NO: 807480 - DNA, 15 bp, Homo sapiens
taggtttgttttaga

SEQ ID NO: 807481 - DNA, 15 bp, Homo sapiens
aggtttgttttagat

SEQ ID NO: 807482 - DNA, 15 bp, Homo sapiens
ggtttgttttagatt

SEQ ID NO: 807483 - DNA, 15 bp, Homo sapiens
gtttgttttagatta

SEQ ID NO: 807484 - DNA, 15 bp, Homo sapiens
tttgttttagattaa

SEQ ID NO: 807485 - DNA, 15 bp, Homo sapiens
ttgttttagattaag

SEQ ID NO: 807486 - DNA, 15 bp, Homo sapiens
tgttttagattaagg

SEQ ID NO: 807487 - DNA, 15 bp, Homo sapiens
gttttagattaagga

SEQ ID NO: 807488 - DNA, 15 bp, Homo sapiens
ttttagattaaggac

SEQ ID NO: 807489 - DNA, 15 bp, Homo sapiens
tttagattaaggaca

SEQ ID NO: 807490 - DNA, 15 bp, Homo sapiens
ttagattaaggacag

SEQ ID NO: 807491 - DNA, 15 bp, Homo sapiens
tagattaaggacagt

SEQ ID NO: 807492 - DNA, 15 bp, Homo sapiens
agattaaggacagtc

SEQ ID NO: 807493 - DNA, 15 bp, Homo sapiens
gattaaggacagtca

SEQ ID NO: 807494 - DNA, 15 bp, Homo sapiens
attaaggacagtcat

SEQ ID NO: 807495 - DNA, 15 bp, Homo sapiens
ttaaggacagtcatg

SEQ ID NO: 807496 - DNA, 15 bp, Homo sapiens
taaggacagtcatga

SEQ ID NO: 807497 - DNA, 15 bp, Homo sapiens
aaggacagtcatgac

SEQ ID NO: 807498 - DNA, 15 bp, Homo sapiens
aggacagtcatgacc

SEQ ID NO: 807499 - DNA, 15 bp, Homo sapiens
ggacagtcatgacct

SEQ ID NO: 807500 - DNA, 15 bp, Homo sapiens
gacagtcatgaccta

SEQ ID NO: 807501 - DNA, 15 bp, Homo sapiens
acagtcatgacctaa

SEQ ID NO: 807502 - DNA, 15 bp, Homo sapiens
cagtcatgacctaaa

SEQ ID NO: 807503 - DNA, 15 bp, Homo sapiens
agtcatgacctaaat

SEQ ID NO: 807504 - DNA, 15 bp, Homo sapiens
gtcatgacctaaatg

SEQ ID NO: 807505 - DNA, 15 bp, Homo sapiens
tcatgacctaaatgt

SEQ ID NO: 807506 - DNA, 15 bp, Homo sapiens
catgacctaaatgtc

SEQ ID NO: 807507 - DNA, 15 bp, Homo sapiens
atgacctaaatgtca

SEQ ID NO: 807508 - DNA, 15 bp, Homo sapiens
tgacctaaatgtcat

SEQ ID NO: 807509 - DNA, 15 bp, Homo sapiens
gacctaaatgtcatt

SEQ ID NO: 807510 - DNA, 15 bp, Homo sapiens
acctaaatgtcattt

SEQ ID NO: 807511 - DNA, 15 bp, Homo sapiens
cctaaatgtcattta

SEQ ID NO: 807512 - DNA, 15 bp, Homo sapiens
ctaaatgtcatttaa

SEQ ID NO: 807513 - DNA, 15 bp, Homo sapiens
taaatgtcatttaaa

SEQ ID NO: 807514 - DNA, 15 bp, Homo sapiens
aaatgtcatttaaac

SEQ ID NO: 807515 - DNA, 15 bp, Homo sapiens
aatgtcatttaaacc

SEQ ID NO: 807516 - DNA, 15 bp, Homo sapiens
atgtcatttaaacca

SEQ ID NO: 807517 - DNA, 15 bp, Homo sapiens
tgtcatttaaaccag

SEQ ID NO: 807518 - DNA, 15 bp, Homo sapiens
gtcatttaaaccaga

SEQ ID NO: 807519 - DNA, 15 bp, Homo sapiens
tcatttaaaccagag

SEQ ID NO: 807520 - DNA, 15 bp, Homo sapiens
catttaaaccagagt

SEQ ID NO: 807521 - DNA, 15 bp, Homo sapiens
atttaaaccagagtg

SEQ ID NO: 807522 - DNA, 15 bp, Homo sapiens
tttaaaccagagtgc

SEQ ID NO: 807523 - DNA, 15 bp, Homo sapiens
ttaaaccagagtgca

SEQ ID NO: 807524 - DNA, 15 bp, Homo sapiens
taaaccagagtgcat

SEQ ID NO: 807525 - DNA, 15 bp, Homo sapiens
aaaccagagtgcatt

SEQ ID NO: 807526 - DNA, 15 bp, Homo sapiens
aaccagagtgcattg

SEQ ID NO: 807527 - DNA, 15 bp, Homo sapiens
accagagtgcattgt

SEQ ID NO: 807528 - DNA, 15 bp, Homo sapiens
ccagagtgcattgtg

SEQ ID NO: 807529 - DNA, 15 bp, Homo sapiens
cagagtgcattgtgg

SEQ ID NO: 807530 - DNA, 15 bp, Homo sapiens
agagtgcattgtggc

SEQ ID NO: 807531 - DNA, 15 bp, Homo sapiens
gagtgcattgtggct

SEQ ID NO: 807532 - DNA, 15 bp, Homo sapiens
agtgcattgtggctt

SEQ ID NO: 807533 - DNA, 15 bp, Homo sapiens
gtgcattgtggcttg

SEQ ID NO: 807534 - DNA, 15 bp, Homo sapiens
tgcattgtggcttga

SEQ ID NO: 807535 - DNA, 15 bp, Homo sapiens
gcattgtggcttgat

SEQ ID NO: 807536 - DNA, 15 bp, Homo sapiens
cattgtggcttgatc

SEQ ID NO: 807537 - DNA, 15 bp, Homo sapiens
attgtggcttgatca

SEQ ID NO: 807538 - DNA, 15 bp, Homo sapiens
ttgtggcttgatcag

SEQ ID NO: 807539 - DNA, 15 bp, Homo sapiens
tgtggcttgatcagt

SEQ ID NO: 807540 - DNA, 15 bp, Homo sapiens
gtggcttgatcagtg

SEQ ID NO: 807541 - DNA, 15 bp, Homo sapiens
tggcttgatcagtgg

SEQ ID NO: 807542 - DNA, 15 bp, Homo sapiens
ggcttgatcagtggt

SEQ ID NO: 807543 - DNA, 15 bp, Homo sapiens
gcttgatcagtggtc

SEQ ID NO: 807544 - DNA, 15 bp, Homo sapiens
cttgatcagtggtca

SEQ ID NO: 807545 - DNA, 15 bp, Homo sapiens
ttgatcagtggtcat

SEQ ID NO: 807546 - DNA, 15 bp, Homo sapiens
tgatcagtggtcatt

SEQ ID NO: 807547 - DNA, 15 bp, Homo sapiens
gatcagtggtcattt

SEQ ID NO: 807548 - DNA, 15 bp, Homo sapiens
atcagtggtcatttc

SEQ ID NO: 807549 - DNA, 15 bp, Homo sapiens
tcagtggtcatttct

SEQ ID NO: 807550 - DNA, 15 bp, Homo sapiens
cagtggtcatttctg

SEQ ID NO: 807551 - DNA, 15 bp, Homo sapiens
agtggtcatttctgt

SEQ ID NO: 807552 - DNA, 15 bp, Homo sapiens
gtggtcatttctgtc

SEQ ID NO: 807553 - DNA, 15 bp, Homo sapiens
tggtcatttctgtct

SEQ ID NO: 807554 - DNA, 15 bp, Homo sapiens
ggtcatttctgtctc

SEQ ID NO: 807555 - DNA, 15 bp, Homo sapiens
gtcatttctgtctct

SEQ ID NO: 807556 - DNA, 15 bp, Homo sapiens
tcatttctgtctcta

SEQ ID NO: 807557 - DNA, 15 bp, Homo sapiens
catttctgtctctag

SEQ ID NO: 807558 - DNA, 15 bp, Homo sapiens
actagatcacaggat

SEQ ID NO: 807559 - DNA, 15 bp, Homo sapiens
ctagatcacaggata

SEQ ID NO: 807560 - DNA, 15 bp, Homo sapiens
tagatcacaggataa

SEQ ID NO: 807561 - DNA, 15 bp, Homo sapiens
agatcacaggataag

SEQ ID NO: 807562 - DNA, 15 bp, Homo sapiens
gatcacaggataagg

SEQ ID NO: 807563 - DNA, 15 bp, Homo sapiens
atcacaggataaggg

SEQ ID NO: 807564 - DNA, 15 bp, Homo sapiens
tcacaggataaggga

SEQ ID NO: 807565 - DNA, 15 bp, Homo sapiens
cacaggataagggaa

SEQ ID NO: 807566 - DNA, 15 bp, Homo sapiens
acaggataagggaag

SEQ ID NO: 807567 - DNA, 15 bp, Homo sapiens
caggataagggaagt

SEQ ID NO: 807568 - DNA, 15 bp, Homo sapiens
aggataagggaagta

SEQ ID NO: 807569 - DNA, 15 bp, Homo sapiens
ggataagggaagtag

SEQ ID NO: 807570 - DNA, 15 bp, Homo sapiens
gataagggaagtaga

SEQ ID NO: 807571 - DNA, 15 bp, Homo sapiens
ataagggaagtagat

SEQ ID NO: 807572 - DNA, 15 bp, Homo sapiens
taagggaagtagatt

SEQ ID NO: 807573 - DNA, 15 bp, Homo sapiens
aagggaagtagattc

SEQ ID NO: 807574 - DNA, 15 bp, Homo sapiens
agggaagtagattcc

SEQ ID NO: 807575 - DNA, 15 bp, Homo sapiens
gggaagtagattcca

SEQ ID NO: 807576 - DNA, 15 bp, Homo sapiens
ggaagtagattccat

SEQ ID NO: 807577 - DNA, 15 bp, Homo sapiens
gaagtagattccatt

SEQ ID NO: 807578 - DNA, 15 bp, Homo sapiens
aagtagattccattc

SEQ ID NO: 807579 - DNA, 15 bp, Homo sapiens
agtagattccattca

SEQ ID NO: 807580 - DNA, 15 bp, Homo sapiens
gtagattccattcat

SEQ ID NO: 807581 - DNA, 15 bp, Homo sapiens
tagattccattcata

SEQ ID NO: 807582 - DNA, 15 bp, Homo sapiens
agattccattcatag

SEQ ID NO: 807583 - DNA, 15 bp, Homo sapiens
gattccattcataga

SEQ ID NO: 807584 - DNA, 15 bp, Homo sapiens
attccattcatagag

SEQ ID NO: 807585 - DNA, 15 bp, Homo sapiens
ttccattcatagagc

SEQ ID NO: 807586 - DNA, 15 bp, Homo sapiens
tccattcatagagca
